United States Patent Application Publication US 2005/0244851 A1 - sequence listing, part 127

SEQ ID NO: 4956093 - DNA, 25 bp, Homo sapien
ttttattgcccagaagtaactggca

SEQ ID NO: 4956094 - DNA, 25 bp, Homo sapien
ttgaactgtagtgaaaagggtgtac

SEQ ID NO: 4956095 - DNA, 25 bp, Homo sapien
catggcccaagaattacttttgaac

SEQ ID NO: 4956096 - DNA, 25 bp, Homo sapien
tctgatattccaaccataaaattga

SEQ ID NO: 4956097 - DNA, 25 bp, Homo sapien
cattctgatattccaaccataaaat

SEQ ID NO: 4956098 - DNA, 25 bp, Homo sapien
atatttaagccatgcgtatctgtca

SEQ ID NO: 4956099 - DNA, 25 bp, Homo sapien
tcattcttcttgcaattgcagcaaa

SEQ ID NO: 4956100 - DNA, 25 bp, Homo sapien
gtcaaatactattttcctgttgcag

SEQ ID NO: 4956101 - DNA, 25 bp, Homo sapien
gcagtgaacaagcaatccaaacttg

SEQ ID NO: 4956102 - DNA, 25 bp, Homo sapien
cgtggtgtattattccatgtggaat

SEQ ID NO: 4956103 - DNA, 25 bp, Homo sapien
gcattgtaaagtctactaattatca

SEQ ID NO: 4956104 - DNA, 25 bp, Homo sapien
aatgacagtaccttacatttatgca

SEQ ID NO: 4956105 - DNA, 25 bp, Homo sapien
catttatgcattacttattctgcac

SEQ ID NO: 4956106 - DNA, 25 bp, Homo sapien
tttgatgtggatgttttatatatct

SEQ ID NO: 4956107 - DNA, 25 bp, Homo sapien
cacagaaaatgtttgatgtggatgt

SEQ ID NO: 4956108 - DNA, 25 bp, Homo sapien
aattattatctgtctatccatccat

SEQ ID NO: 4956109 - DNA, 25 bp, Homo sapien
tattatctgtctatccatccatcta

SEQ ID NO: 4956110 - DNA, 25 bp, Homo sapien
ttatataattattatctgtctatcc

SEQ ID NO: 4956111 - DNA, 25 bp, Homo sapien
tatataattattatctgtctatcca

SEQ ID NO: 4956112 - DNA, 25 bp, Homo sapien
taaagctctgagtatccggcaatga

SEQ ID NO: 4956113 - DNA, 25 bp, Homo sapien
tcaacatttacacgtagagactctc

SEQ ID NO: 4956114 - DNA, 25 bp, Homo sapien
caagataatagtgtagggaaaggca

SEQ ID NO: 4956115 - DNA, 25 bp, Homo sapien
tctaactggtaagcaatactgtcaa

SEQ ID NO: 4956116 - DNA, 25 bp, Homo sapien
tggaagatgggaggtccgtggactc

SEQ ID NO: 4956117 - DNA, 25 bp, Homo sapien
ccgtggactcagtgtcagaagacaa

SEQ ID NO: 4956118 - DNA, 25 bp, Homo sapien
gtgtcagaagacaaatttactcgtg

SEQ ID NO: 4956119 - DNA, 25 bp, Homo sapien
aatttactcgtgtctgatttactga

SEQ ID NO: 4956120 - DNA, 25 bp, Homo sapien
gatacactaaagagttgctgacaac

SEQ ID NO: 4956121 - DNA, 25 bp, Homo sapien
tctttctcccagtgcacactgatac

SEQ ID NO: 4956122 - DNA, 25 bp, Homo sapien
gttgctgacaactgacagtgacgtg

SEQ ID NO: 4956123 - DNA, 25 bp, Homo sapien
caactgacagtgacgtgtcacacat

SEQ ID NO: 4956124 - DNA, 25 bp, Homo sapien
aaagaagtagaaagtggaaagctca

SEQ ID NO: 4956125 - DNA, 25 bp, Homo sapien
gactcctatgggaaaagaagtagaa

SEQ ID NO: 4956126 - DNA, 25 bp, Homo sapien
aagaagtagaaagtggaaagctcac

SEQ ID NO: 4956127 - DNA, 25 bp, Homo sapien
tatgggaaaagaagtagaaagtgga

SEQ ID NO: 4956128 - DNA, 25 bp, Homo sapien
tgtcctgatcaagctggtccagttt

SEQ ID NO: 4956129 - DNA, 25 bp, Homo sapien
aacgtgccgccgcaggtttgttggt

SEQ ID NO: 4956130 - DNA, 25 bp, Homo sapien
ccgcaggtttgttggtgtgcctgat

SEQ ID NO: 4956131 - DNA, 25 bp, Homo sapien
gagctggtgctgagggcattttcta

SEQ ID NO: 4956132 - DNA, 25 bp, Homo sapien
gagtccagccgcgccctatctcgat

SEQ ID NO: 4956133 - DNA, 25 bp, Homo sapien
gccgcgccctatctcgatcttctct

SEQ ID NO: 4956134 - DNA, 25 bp, Homo sapien
gccctatctcgatcttctcttattt

SEQ ID NO: 4956135 - DNA, 25 bp, Homo sapien
tccagccgcgccctatctcgatctt

SEQ ID NO: 4956136 - DNA, 25 bp, Homo sapien
aatactttccatccagtaatgcccc

SEQ ID NO: 4956137 - DNA, 25 bp, Homo sapien
tactttccatccagtaatgccccat

SEQ ID NO: 4956138 - DNA, 25 bp, Homo sapien
atactttccatccagtaatgcccca

SEQ ID NO: 4956139 - DNA, 25 bp, Homo sapien
gaagagctatttagttcctgggcag

SEQ ID NO: 4956140 - DNA, 25 bp, Homo sapien
caagcccatggtggtaaactggaaa

SEQ ID NO: 4956141 - DNA, 25 bp, Homo sapien
gacataggtcaatagatacgaggca

SEQ ID NO: 4956142 - DNA, 25 bp, Homo sapien
gaaacctaagatgtccaagcccatg

SEQ ID NO: 4956143 - DNA, 25 bp, Homo sapien
cactgcaaccggctgatttaatttt

SEQ ID NO: 4956144 - DNA, 25 bp, Homo sapien
gaagtgctggatagtatgttcatga

SEQ ID NO: 4956145 - DNA, 25 bp, Homo sapien
gaagaagtgctggatagtatgttca

SEQ ID NO: 4956146 - DNA, 25 bp, Homo sapien
ttgaagaagaagtgctggatagtat

SEQ ID NO: 4956147 - DNA, 25 bp, Homo sapien
aatgcattgccccatgcctccaaga

SEQ ID NO: 4956148 - DNA, 25 bp, Homo sapien
tgtcccgacactggctcattctgtt

SEQ ID NO: 4956149 - DNA, 25 bp, Homo sapien
cactgtacggttaatgccccagctt

SEQ ID NO: 4956150 - DNA, 25 bp, Homo sapien
gcatcatcattctagtgagagccat

SEQ ID NO: 4956151 - DNA, 25 bp, Homo sapien
tccagttacggtgttccagtttgct

SEQ ID NO: 4956152 - DNA, 25 bp, Homo sapien
agggctatgatgaaagttgagggct

SEQ ID NO: 4956153 - DNA, 25 bp, Homo sapien
cggtgttccagtttgcttgcagaga

SEQ ID NO: 4956154 - DNA, 25 bp, Homo sapien
gccagaaatccagttacggtgttcc

SEQ ID NO: 4956155 - DNA, 25 bp, Homo sapien
agactaatgggtccctgatttgatt

SEQ ID NO: 4956156 - DNA, 25 bp, Homo sapien
agcttctaagcagagttgtggctgc

SEQ ID NO: 4956157 - DNA, 25 bp, Homo sapien
tgtggctgcttcagactaatgggtc

SEQ ID NO: 4956158 - DNA, 25 bp, Homo sapien
aaaggccatttgatgctgacacagc

SEQ ID NO: 4956159 - DNA, 25 bp, Homo sapien
gaatcacaggcaacatgcatctggc

SEQ ID NO: 4956160 - DNA, 25 bp, Homo sapien
tgaacgcatagtgtatcagttgcta

SEQ ID NO: 4956161 - DNA, 25 bp, Homo sapien
gaatcaaggtaactacaaggtagtg

SEQ ID NO: 4956162 - DNA, 25 bp, Homo sapien
tcagttgctatagctacccctatgg

SEQ ID NO: 4956163 - DNA, 25 bp, Homo sapien
gaaatttgtatctcgatcatgatca

SEQ ID NO: 4956164 - DNA, 25 bp, Homo sapien
taactaggtgtgactgaatatctgt

SEQ ID NO: 4956165 - DNA, 25 bp, Homo sapien
ctcgatcatgatcaagtgtttcaga

SEQ ID NO: 4956166 - DNA, 25 bp, Homo sapien
gatttgcagttcttgtgggaatatg

SEQ ID NO: 4956167 - DNA, 25 bp, Homo sapien
aggagaataatacttgggtgattgt

SEQ ID NO: 4956168 - DNA, 25 bp, Homo sapien
agaataatacttgggtgattgtaac

SEQ ID NO: 4956169 - DNA, 25 bp, Homo sapien
tacttgggtgattgtaacctctttg

SEQ ID NO: 4956170 - DNA, 25 bp, Homo sapien
taatacttgggtgattgtaacctct

SEQ ID NO: 4956171 - DNA, 25 bp, Homo sapien
gccggattcccaggacctatgtctt

SEQ ID NO: 4956172 - DNA, 25 bp, Homo sapien
acctgactttttgccggattcccag

SEQ ID NO: 4956173 - DNA, 25 bp, Homo sapien
tgtctttaaagactgggattatcat

SEQ ID NO: 4956174 - DNA, 25 bp, Homo sapien
taatagccactcatagttattattt

SEQ ID NO: 4956175 - DNA, 25 bp, Homo sapien
tcctcaattccatttagctaagtaa

SEQ ID NO: 4956176 - DNA, 25 bp, Homo sapien
aacatttacatcgtattctcttacc

SEQ ID NO: 4956177 - DNA, 25 bp, Homo sapien
tcttaatctttacttcatcggtaat

SEQ ID NO: 4956178 - DNA, 25 bp, Homo sapien
tacttcatcggtaataatagttctt

SEQ ID NO: 4956179 - DNA, 25 bp, Homo sapien
taaatttctgctacatgaggcagtt

SEQ ID NO: 4956180 - DNA, 25 bp, Homo sapien
aaatttctgctacatgaggcagttc

SEQ ID NO: 4956181 - DNA, 25 bp, Homo sapien
aagatcatatttgcaggttccaggg

SEQ ID NO: 4956182 - DNA, 25 bp, Homo sapien
tcattagattgagggtccacctggg

SEQ ID NO: 4956183 - DNA, 25 bp, Homo sapien
ccaaaaactagttaggcaagggcag

SEQ ID NO: 4956184 - DNA, 25 bp, Homo sapien
tagggcacgtacttgcaggatgcac

SEQ ID NO: 4956185 - DNA, 25 bp, Homo sapien
caacaaagagtatacttttgcaaga

SEQ ID NO: 4956186 - DNA, 25 bp, Homo sapien
gcctgcagtagtgaccgcttggttc

SEQ ID NO: 4956187 - DNA, 25 bp, Homo sapien
ttctactccaggtttcaacaaagag

SEQ ID NO: 4956188 - DNA, 25 bp, Homo sapien
gaagcaaaatattgcatttccagtt

SEQ ID NO: 4956189 - DNA, 25 bp, Homo sapien
cctgttggagatacagcccataagg

SEQ ID NO: 4956190 - DNA, 25 bp, Homo sapien
ggagatacagcccataaggctggct

SEQ ID NO: 4956191 - DNA, 25 bp, Homo sapien
tacagcccataaggctggctctggt

SEQ ID NO: 4956192 - DNA, 25 bp, Homo sapien
ctctagcctgttggagatacagccc

SEQ ID NO: 4956193 - DNA, 25 bp, Homo sapien
gttttcctttgatatcagtggcttc

SEQ ID NO: 4956194 - DNA, 25 bp, Homo sapien
tttcctttgatatcagtggcttcaa

SEQ ID NO: 4956195 - DNA, 25 bp, Homo sapien
ttttcctttgatatcagtggcttca

SEQ ID NO: 4956196 - DNA, 25 bp, Homo sapien
tgcaatatagtgatgaacacctctg

SEQ ID NO: 4956197 - DNA, 25 bp, Homo sapien
ggaagtgagagtctgccagaagcac

SEQ ID NO: 4956198 - DNA, 25 bp, Homo sapien
tacagcattccctcaaacagatttg

SEQ ID NO: 4956199 - DNA, 25 bp, Homo sapien
tttgtaagcaaaaccacagtctatg

SEQ ID NO: 4956200 - DNA, 25 bp, Homo sapien
cacttgaaagcttcgcaggggagga

SEQ ID NO: 4956201 - DNA, 25 bp, Homo sapien
tttagaattagtcaaaggggctgta

SEQ ID NO: 4956202 - DNA, 25 bp, Homo sapien
tcacttgaaagcttcgcaggggagg

SEQ ID NO: 4956203 - DNA, 25 bp, Homo sapien
caaaggggctgtagcataaaacata

SEQ ID NO: 4956204 - DNA, 25 bp, Homo sapien
ttttgatggtttgaccaagtgggta

SEQ ID NO: 4956205 - DNA, 25 bp, Homo sapien
ctgataaatccaaggatatttacaa

SEQ ID NO: 4956206 - DNA, 25 bp, Homo sapien
tcgttgaattacacatctgcataac

SEQ ID NO: 4956207 - DNA, 25 bp, Homo sapien
ccaagtgggtagtcgttgaattaca

SEQ ID NO: 4956208 - DNA, 25 bp, Homo sapien
ccagagaatctgtgcatatgtctta

SEQ ID NO: 4956209 - DNA, 25 bp, Homo sapien
cagagaatctgtgcatatgtcttac

SEQ ID NO: 4956210 - DNA, 25 bp, Homo sapien
agccagagaatctgtgcatatgtct

SEQ ID NO: 4956211 - DNA, 25 bp, Homo sapien
gccagagaatctgtgcatatgtctt

SEQ ID NO: 4956212 - DNA, 25 bp, Homo sapien
tcttacgaagtctgacttggttatc

SEQ ID NO: 4956213 - DNA, 25 bp, Homo sapien
cgaagtctgacttggttatctgtgg

SEQ ID NO: 4956214 - DNA, 25 bp, Homo sapien
ctttctcttacgaagtctgacttgg

SEQ ID NO: 4956215 - DNA, 25 bp, Homo sapien
gtctgacttggttatctgtgggttc

SEQ ID NO: 4956216 - DNA, 25 bp, Homo sapien
cctctgtttgtgcaaggagtatcca

SEQ ID NO: 4956217 - DNA, 25 bp, Homo sapien
cagctattccccaggagttagaaga

SEQ ID NO: 4956218 - DNA, 25 bp, Homo sapien
gacagcagtcaggtagtgaaacaca

SEQ ID NO: 4956219 - DNA, 25 bp, Homo sapien
tcctttgaaagatgacccattggcc

SEQ ID NO: 4956220 - DNA, 25 bp, Homo sapien
tattccatatgagggtaaaggagat

SEQ ID NO: 4956221 - DNA, 25 bp, Homo sapien
aaatcaccaatcaaagaagcgaatg

SEQ ID NO: 4956222 - DNA, 25 bp, Homo sapien
gtttaacaacagacagagagatata

SEQ ID NO: 4956223 - DNA, 25 bp, Homo sapien
ccaatcaaagaagcgaatgagttct

SEQ ID NO: 4956224 - DNA, 25 bp, Homo sapien
catttcgtggttgagatcatggctc

SEQ ID NO: 4956225 - DNA, 25 bp, Homo sapien
tctgagcagtttcacgcagtgtgtg

SEQ ID NO: 4956226 - DNA, 25 bp, Homo sapien
tagacaacgaggagctgaaacgcca

SEQ ID NO: 4956227 - DNA, 25 bp, Homo sapien
tgctcaacactcaggctaggaaaga

SEQ ID NO: 4956228 - DNA, 25 bp, Homo sapien
tccacaaccaggcccagattgcctg

SEQ ID NO: 4956229 - DNA, 25 bp, Homo sapien
ctccacaaccaggcccagattgcct

SEQ ID NO: 4956230 - DNA, 25 bp, Homo sapien
aaccaggcccagattgcctggaaag

SEQ ID NO: 4956231 - DNA, 25 bp, Homo sapien
caggcccagattgcctggaaagtat

SEQ ID NO: 4956232 - DNA, 25 bp, Homo sapien
tagcatggcagcgttcctgaatcac

SEQ ID NO: 4956233 - DNA, 25 bp, Homo sapien
catctagcatggcagcgttcctgaa

SEQ ID NO: 4956234 - DNA, 25 bp, Homo sapien
gcagcgttcctgaatcacatctcta

SEQ ID NO: 4956235 - DNA, 25 bp, Homo sapien
tgcttccatctagcatggcagcgtt

SEQ ID NO: 4956236 - DNA, 25 bp, Homo sapien
gagctggctgaacgattgctgttct

SEQ ID NO: 4956237 - DNA, 25 bp, Homo sapien
taccagcagggataagcaggtgtct

SEQ ID NO: 4956238 - DNA, 25 bp, Homo sapien
cactggtagaaagtgtctgagtgcc

SEQ ID NO: 4956239 - DNA, 25 bp, Homo sapien
tccaagagagctgccgttcatctag

SEQ ID NO: 4956240 - DNA, 25 bp, Homo sapien
agctggtggtctgctagttttgctg

SEQ ID NO: 4956241 - DNA, 25 bp, Homo sapien
ggtggtctgctagttttgctgctgc

SEQ ID NO: 4956242 - DNA, 25 bp, Homo sapien
ttctgaggctgcactgtaaagatct

SEQ ID NO: 4956243 - DNA, 25 bp, Homo sapien
gctggtggtctgctagttttgctgc

SEQ ID NO: 4956244 - DNA, 25 bp, Homo sapien
catggacattgaggacctttttaaa

SEQ ID NO: 4956245 - DNA, 25 bp, Homo sapien
cctcaatataataatacatggacat

SEQ ID NO: 4956246 - DNA, 25 bp, Homo sapien
taaacttagggttttatgcaataca

SEQ ID NO: 4956247 - DNA, 25 bp, Homo sapien
aacttagggttttatgcaatacatg

SEQ ID NO: 4956248 - DNA, 25 bp, Homo sapien
tagtgcacagtgagaagtcaaatac

SEQ ID NO: 4956249 - DNA, 25 bp, Homo sapien
aagccagttcttgccaagtttttct

SEQ ID NO: 4956250 - DNA, 25 bp, Homo sapien
tattcttcattaggctatccttcat

SEQ ID NO: 4956251 - DNA, 25 bp, Homo sapien
tgtattttaaccacacgatccatat

SEQ ID NO: 4956252 - DNA, 25 bp, Homo sapien
tcctctgcattctgagagaatacca

SEQ ID NO: 4956253 - DNA, 25 bp, Homo sapien
tgagagaataccacaagtctgggct

SEQ ID NO: 4956254 - DNA, 25 bp, Homo sapien
tcgattttctgcgtaagtcttctcc

SEQ ID NO: 4956255 - DNA, 25 bp, Homo sapien
cattgctttcgtctcttttccttcc

SEQ ID NO: 4956256 - DNA, 25 bp, Homo sapien
gcaggagtcatcatagtaagagaag

SEQ ID NO: 4956257 - DNA, 25 bp, Homo sapien
agcaggagtcatcatagtaagagaa

SEQ ID NO: 4956258 - DNA, 25 bp, Homo sapien
tagcagtagcagcattaacgatagg

SEQ ID NO: 4956259 - DNA, 25 bp, Homo sapien
cattaacgataggaatagtggcagc

SEQ ID NO: 4956260 - DNA, 25 bp, Homo sapien
cagcattttttactggatcactgga

SEQ ID NO: 4956261 - DNA, 25 bp, Homo sapien
gctttgatgtgactgagtccaaaca

SEQ ID NO: 4956262 - DNA, 25 bp, Homo sapien
tttgctttgatgtgactgagtccaa

SEQ ID NO: 4956263 - DNA, 25 bp, Homo sapien
agtccaaacatctatcagcattttt

SEQ ID NO: 4956264 - DNA, 25 bp, Homo sapien
catcctctgcaagttgccagtcaga

SEQ ID NO: 4956265 - DNA, 25 bp, Homo sapien
gagaccaggtagagctccattgcta

SEQ ID NO: 4956266 - DNA, 25 bp, Homo sapien
taatgacgtgattgctgacgagacc

SEQ ID NO: 4956267 - DNA, 25 bp, Homo sapien
aaacttgacctgttgtctctcggcc

SEQ ID NO: 4956268 - DNA, 25 bp, Homo sapien
tctaaggccggatttatggtggtca

SEQ ID NO: 4956269 - DNA, 25 bp, Homo sapien
tgtagtcttccactctcgtctttgc

SEQ ID NO: 4956270 - DNA, 25 bp, Homo sapien
tcagcaattcttgacgcgtatgcct

SEQ ID NO: 4956271 - DNA, 25 bp, Homo sapien
cattcaaggccccatgctgtagtct

SEQ ID NO: 4956272 - DNA, 25 bp, Homo sapien
tcttctcgccttaatttccagagat

SEQ ID NO: 4956273 - DNA, 25 bp, Homo sapien
atcttctcgccttaatttccagaga

SEQ ID NO: 4956274 - DNA, 25 bp, Homo sapien
tatcttctcgccttaatttccagag

SEQ ID NO: 4956275 - DNA, 25 bp, Homo sapien
cgtgttcaccaggatagacttgatc

SEQ ID NO: 4956276 - DNA, 25 bp, Homo sapien
ccgcggtagaggcattgcagtcgca

SEQ ID NO: 4956277 - DNA, 25 bp, Homo sapien
ggagctccacgaggagtttgagcac

SEQ ID NO: 4956278 - DNA, 25 bp, Homo sapien
tggaaaaccactaggaactggagga

SEQ ID NO: 4956279 - DNA, 25 bp, Homo sapien
ttcagctgactgaaggccgcggtag

SEQ ID NO: 4956280 - DNA, 25 bp, Homo sapien
tggtagcctcatcgcccagctctcc

SEQ ID NO: 4956281 - DNA, 25 bp, Homo sapien
gtagcctcatcgcccagctctccct

SEQ ID NO: 4956282 - DNA, 25 bp, Homo sapien
ttggtagcctcatcgcccagctctc

SEQ ID NO: 4956283 - DNA, 25 bp, Homo sapien
tagcctcatcgcccagctctccctt

SEQ ID NO: 4956284 - DNA, 25 bp, Homo sapien
agagcttccactccgatcactcttt

SEQ ID NO: 4956285 - DNA, 25 bp, Homo sapien
cacctccaatgcttgttgtcctata

SEQ ID NO: 4956286 - DNA, 25 bp, Homo sapien
cctttcagtacttttggattcctgc

SEQ ID NO: 4956287 - DNA, 25 bp, Homo sapien
gctactgctagagtcacctccaatg

SEQ ID NO: 4956288 - DNA, 25 bp, Homo sapien
acttgtcacacttaattcttctatg

SEQ ID NO: 4956289 - DNA, 25 bp, Homo sapien
ttctatgtctttagggtcacttaaa

SEQ ID NO: 4956290 - DNA, 25 bp, Homo sapien
acaatgaagctagaagaacttgtca

SEQ ID NO: 4956291 - DNA, 25 bp, Homo sapien
attcttctatgtctttagggtcact

SEQ ID NO: 4956292 - DNA, 25 bp, Homo sapien
ctaaattctcctccggctgctccca

SEQ ID NO: 4956293 - DNA, 25 bp, Homo sapien
taaattctcctccggctgctcccat

SEQ ID NO: 4956294 - DNA, 25 bp, Homo sapien
aaattctcctccggctgctcccatc

SEQ ID NO: 4956295 - DNA, 25 bp, Homo sapien
tcaggattggtcagggtttccattt

SEQ ID NO: 4956296 - DNA, 25 bp, Homo sapien
agaattgtgctgcactctattcttg

SEQ ID NO: 4956297 - DNA, 25 bp, Homo sapien
gcaggatacaacagccttccttcca

SEQ ID NO: 4956298 - DNA, 25 bp, Homo sapien
gaatggtgattttcaggattggtca

SEQ ID NO: 4956299 - DNA, 25 bp, Homo sapien
gtccccatcatccaaccataagttg

SEQ ID NO: 4956300 - DNA, 25 bp, Homo sapien
catcatccaaccataagttgctcat

SEQ ID NO: 4956301 - DNA, 25 bp, Homo sapien
taaaggggtacctcctccacacagc

SEQ ID NO: 4956302 - DNA, 25 bp, Homo sapien
ccccatcatccaaccataagttgct

SEQ ID NO: 4956303 - DNA, 25 bp, Homo sapien
cctgtggccatatgctattacttga

SEQ ID NO: 4956304 - DNA, 25 bp, Homo sapien
cagtcaactgatttccctgtggcca

SEQ ID NO: 4956305 - DNA, 25 bp, Homo sapien
tttctgcccctgaggatggaactgc

SEQ ID NO: 4956306 - DNA, 25 bp, Homo sapien
gatttagcaggttatagccttcatt

SEQ ID NO: 4956307 - DNA, 25 bp, Homo sapien
agtcagagggcctggtcttgggagt

SEQ ID NO: 4956308 - DNA, 25 bp, Homo sapien
gaacccagatgcttgtcacggctca

SEQ ID NO: 4956309 - DNA, 25 bp, Homo sapien
caggaatacctttgggtacaatagt

SEQ ID NO: 4956310 - DNA, 25 bp, Homo sapien
taattagaaagctgacaggaatacc

SEQ ID NO: 4956311 - DNA, 25 bp, Homo sapien
ctgaagtagttacccatttcattac

SEQ ID NO: 4956312 - DNA, 25 bp, Homo sapien
ttctgaagtagttacccatttcatt

SEQ ID NO: 4956313 - DNA, 25 bp, Homo sapien
tgaagtagttacccatttcattacg

SEQ ID NO: 4956314 - DNA, 25 bp, Homo sapien
aattctgaagtagttacccatttca

SEQ ID NO: 4956315 - DNA, 25 bp, Homo sapien
cttcaagcataaagttcaaactcat

SEQ ID NO: 4956316 - DNA, 25 bp, Homo sapien
tgtcacttcaagcataaagttcaaa

SEQ ID NO: 4956317 - DNA, 25 bp, Homo sapien
ttgtgtgtcacttcaagcataaagt

SEQ ID NO: 4956318 - DNA, 25 bp, Homo sapien
tgtgtcacttcaagcataaagttca

SEQ ID NO: 4956319 - DNA, 25 bp, Homo sapien
tcctcgtgtggagccgtgtcatcat

SEQ ID NO: 4956320 - DNA, 25 bp, Homo sapien
tcccctgtgagaatcgagtgaagaa

SEQ ID NO: 4956321 - DNA, 25 bp, Homo sapien
cattaggcttccatatgtgttgaac

SEQ ID NO: 4956322 - DNA, 25 bp, Homo sapien
tcttaattccgtgagctttgccagc

SEQ ID NO: 4956323 - DNA, 25 bp, Homo sapien
gaagccttgtgatactcatgttgat

SEQ ID NO: 4956324 - DNA, 25 bp, Homo sapien
tttcagatagttgacgttgtacccg

SEQ ID NO: 4956325 - DNA, 25 bp, Homo sapien
tgtacccgttgtggagtaagaagcc

SEQ ID NO: 4956326 - DNA, 25 bp, Homo sapien
ttccagatgaccatgaagcagccat

SEQ ID NO: 4956327 - DNA, 25 bp, Homo sapien
tagaaatacagttgactgttgtacg

SEQ ID NO: 4956328 - DNA, 25 bp, Homo sapien
gctgcaacattgctggactcagtta

SEQ ID NO: 4956329 - DNA, 25 bp, Homo sapien
taatatgtgcgtgtacaagctgttc

SEQ ID NO: 4956330 - DNA, 25 bp, Homo sapien
tgtacgttgatttttcatgctgcaa

SEQ ID NO: 4956331 - DNA, 25 bp, Homo sapien
aaaactgtttcttgtgttggcaaag

SEQ ID NO: 4956332 - DNA, 25 bp, Homo sapien
tgtgaaaacagctcctgatgtcggg

SEQ ID NO: 4956333 - DNA, 25 bp, Homo sapien
caagagttttgttttccacggatga

SEQ ID NO: 4956334 - DNA, 25 bp, Homo sapien
cggatgaaggaacttctcctccctt

SEQ ID NO: 4956335 - DNA, 25 bp, Homo sapien
taatggtattaagctgacgatcctc

SEQ ID NO: 4956336 - DNA, 25 bp, Homo sapien
cagataatatagctgctctcctagg

SEQ ID NO: 4956337 - DNA, 25 bp, Homo sapien
cacttgtgaggcattggcagatctc

SEQ ID NO: 4956338 - DNA, 25 bp, Homo sapien
ccttccttactcaagacgcaggcag

SEQ ID NO: 4956339 - DNA, 25 bp, Homo sapien
gcttacatttacttgggtgtctgtg

SEQ ID NO: 4956340 - DNA, 25 bp, Homo sapien
gaatttatcacaatcttcattaagt

SEQ ID NO: 4956341 - DNA, 25 bp, Homo sapien
taagtctttgttgtcaaaccctcag

SEQ ID NO: 4956342 - DNA, 25 bp, Homo sapien
ccctcagcaagtatgttactaactg

SEQ ID NO: 4956343 - DNA, 25 bp, Homo sapien
catagttaccaagtgctttagccac

SEQ ID NO: 4956344 - DNA, 25 bp, Homo sapien
ttactgtttatgctttctaggctag

SEQ ID NO: 4956345 - DNA, 25 bp, Homo sapien
gaaaaagccaactgactccacaatc

SEQ ID NO: 4956346 - DNA, 25 bp, Homo sapien
taatcttggttaccatagttaccaa

SEQ ID NO: 4956347 - DNA, 25 bp, Homo sapien
aattctttctcattaggccccctca

SEQ ID NO: 4956348 - DNA, 25 bp, Homo sapien
tcattaggccccctcatatgattaa

SEQ ID NO: 4956349 - DNA, 25 bp, Homo sapien
ttaggccccctcatatgattaagtt

SEQ ID NO: 4956350 - DNA, 25 bp, Homo sapien
tctttctcattaggccccctcatat

SEQ ID NO: 4956351 - DNA, 25 bp, Homo sapien
actcttaagcaagtcagaatgttcc

SEQ ID NO: 4956352 - DNA, 25 bp, Homo sapien
aatgttccttacaatatgctgcttc

SEQ ID NO: 4956353 - DNA, 25 bp, Homo sapien
actgtctgctctcataactcttaag

SEQ ID NO: 4956354 - DNA, 25 bp, Homo sapien
ttatgtttcccgtagagttctgctg

SEQ ID NO: 4956355 - DNA, 25 bp, Homo sapien
ccaaaggattctgtagatgaagctt

SEQ ID NO: 4956356 - DNA, 25 bp, Homo sapien
cttctgccaaaggattctgtagatg

SEQ ID NO: 4956357 - DNA, 25 bp, Homo sapien
tctgtagatgaagcttgaatacact

SEQ ID NO: 4956358 - DNA, 25 bp, Homo sapien
tgaagcttgaatacactctgatgtg

SEQ ID NO: 4956359 - DNA, 25 bp, Homo sapien
ctctgtaagacggagttgtgaagat

SEQ ID NO: 4956360 - DNA, 25 bp, Homo sapien
gtaagacggagttgtgaagatgcgg

SEQ ID NO: 4956361 - DNA, 25 bp, Homo sapien
aagacggagttgtgaagatgcggcc

SEQ ID NO: 4956362 - DNA, 25 bp, Homo sapien
ctgtaagacggagttgtgaagatgc

SEQ ID NO: 4956363 - DNA, 25 bp, Homo sapien
tcattctgtaacaagttttgctttt

SEQ ID NO: 4956364 - DNA, 25 bp, Homo sapien
cattctgtaacaagttttgcttttt

SEQ ID NO: 4956365 - DNA, 25 bp, Homo sapien
acatttatttctttgattttgctac

SEQ ID NO: 4956366 - DNA, 25 bp, Homo sapien
tgctttttgaacatttatttctttg

SEQ ID NO: 4956367 - DNA, 25 bp, Homo sapien
gtgctccagatgtttgcttgtttca

SEQ ID NO: 4956368 - DNA, 25 bp, Homo sapien
tgtgctccagatgtttgcttgtttc

SEQ ID NO: 4956369 - DNA, 25 bp, Homo sapien
ttgtctaagttcattgtctttgtgc

SEQ ID NO: 4956370 - DNA, 25 bp, Homo sapien
ttcctttagctgttcttctaagtat

SEQ ID NO: 4956371 - DNA, 25 bp, Homo sapien
cctttagctgttcttctaagtatct

SEQ ID NO: 4956372 - DNA, 25 bp, Homo sapien
ttagctgttcttctaagtatcttct

SEQ ID NO: 4956373 - DNA, 25 bp, Homo sapien
tttagctgttcttctaagtatcttc

SEQ ID NO: 4956374 - DNA, 25 bp, Homo sapien
ggtccacagtgacagtgagaaactg

SEQ ID NO: 4956375 - DNA, 25 bp, Homo sapien
tccacagtgacagtgagaaactggg

SEQ ID NO: 4956376 - DNA, 25 bp, Homo sapien
ctaggtccacagtgacagtgagaaa

SEQ ID NO: 4956377 - DNA, 25 bp, Homo sapien
taggtccacagtgacagtgagaaac

SEQ ID NO: 4956378 - DNA, 25 bp, Homo sapien
ttttagagatgtgttagtagaaata

SEQ ID NO: 4956379 - DNA, 25 bp, Homo sapien
gatgtgttagtagaaataactttgt

SEQ ID NO: 4956380 - DNA, 25 bp, Homo sapien
tagagatgtgttagtagaaataact

SEQ ID NO: 4956381 - DNA, 25 bp, Homo sapien
tgttagtagaaataactttgtttga

SEQ ID NO: 4956382 - DNA, 25 bp, Homo sapien
tttctctggtctttccagttcctac

SEQ ID NO: 4956383 - DNA, 25 bp, Homo sapien
taatactgacagcaaaggtaactca

SEQ ID NO: 4956384 - DNA, 25 bp, Homo sapien
tacaggaacttcatgaatataatac

SEQ ID NO: 4956385 - DNA, 25 bp, Homo sapien
aatataatactgacagcaaaggtaa

SEQ ID NO: 4956386 - DNA, 25 bp, Homo sapien
ggaaatccagtggcgatgcctggca

SEQ ID NO: 4956387 - DNA, 25 bp, Homo sapien
gccagagtacacctttgcccaagaa

SEQ ID NO: 4956388 - DNA, 25 bp, Homo sapien
aggattcttttctaaacggccagag

SEQ ID NO: 4956389 - DNA, 25 bp, Homo sapien
tctaaacggccagagtacacctttg

SEQ ID NO: 4956390 - DNA, 25 bp, Homo sapien
tggccaccatcccctttctgttttg

SEQ ID NO: 4956391 - DNA, 25 bp, Homo sapien
tttgctgttatttatgctttctaat

SEQ ID NO: 4956392 - DNA, 25 bp, Homo sapien
ctattttcatttcacttggccacca

SEQ ID NO: 4956393 - DNA, 25 bp, Homo sapien
tcttgctttggttcttctattttca

SEQ ID NO: 4956394 - DNA, 25 bp, Homo sapien
ggccgccctgaactccgtattgtac

SEQ ID NO: 4956395 - DNA, 25 bp, Homo sapien
ccgtattgtacagcctttttctctc

SEQ ID NO: 4956396 - DNA, 25 bp, Homo sapien
ccctttccaccccacggcattcagg

SEQ ID NO: 4956397 - DNA, 25 bp, Homo sapien
ccacggcattcaggccgccctgaac

SEQ ID NO: 4956398 - DNA, 25 bp, Homo sapien
caagatagagtacaaaagcacagct

SEQ ID NO: 4956399 - DNA, 25 bp, Homo sapien
tacatagtagcaccaaaattaggac

SEQ ID NO: 4956400 - DNA, 25 bp, Homo sapien
tctacagtttatagggcagacagtc

SEQ ID NO: 4956401 - DNA, 25 bp, Homo sapien
tcattgcatgcttcaaaaggtctca

SEQ ID NO: 4956402 - DNA, 25 bp, Homo sapien
tggaccacactaatgatgtttccct

SEQ ID NO: 4956403 - DNA, 25 bp, Homo sapien
cccattttgggatacggtctttgca

SEQ ID NO: 4956404 - DNA, 25 bp, Homo sapien
tccaaatagtgttcagcaagcagtg

SEQ ID NO: 4956405 - DNA, 25 bp, Homo sapien
aaaaatagccctctggttctacaag

SEQ ID NO: 4956406 - DNA, 25 bp, Homo sapien
ttgttccttcctggcgtacactgag

SEQ ID NO: 4956407 - DNA, 25 bp, Homo sapien
tgaagttattaagatacgggtaata

SEQ ID NO: 4956408 - DNA, 25 bp, Homo sapien
taataagatagcttagtcgcatcca

SEQ ID NO: 4956409 - DNA, 25 bp, Homo sapien
cctggcgtacactgagtatgaagtt

SEQ ID NO: 4956410 - DNA, 25 bp, Homo sapien
tgtgcagttcatatccaggtcctgc

SEQ ID NO: 4956411 - DNA, 25 bp, Homo sapien
tgctgacgacgctttttccactgct

SEQ ID NO: 4956412 - DNA, 25 bp, Homo sapien
tcatcttgccattggatactgggaa

SEQ ID NO: 4956413 - DNA, 25 bp, Homo sapien
tcacttcgcgtagcaaaggcaccta

SEQ ID NO: 4956414 - DNA, 25 bp, Homo sapien
agaaggtggtggcgaatccctgctc

SEQ ID NO: 4956415 - DNA, 25 bp, Homo sapien
tgttgagcagtacagtaaatcacaa

SEQ ID NO: 4956416 - DNA, 25 bp, Homo sapien
cattcgaagaagctctggactgatc

SEQ ID NO: 4956417 - DNA, 25 bp, Homo sapien
tgctctgtggaccattcgaagaagc

SEQ ID NO: 4956418 - DNA, 25 bp, Homo sapien
gctattctggtgtgaggagaaatca

SEQ ID NO: 4956419 - DNA, 25 bp, Homo sapien
attctggtgtgaggagaaatcagtc

SEQ ID NO: 4956420 - DNA, 25 bp, Homo sapien
tattctggtgtgaggagaaatcagt

SEQ ID NO: 4956421 - DNA, 25 bp, Homo sapien
aggctattctggtgtgaggagaaat

SEQ ID NO: 4956422 - DNA, 25 bp, Homo sapien
cagatgttgctactggactgacaag

SEQ ID NO: 4956423 - DNA, 25 bp, Homo sapien
tactggactgacaagtggaacctac

SEQ ID NO: 4956424 - DNA, 25 bp, Homo sapien
tgttgctactggactgacaagtgga

SEQ ID NO: 4956425 - DNA, 25 bp, Homo sapien
ctccacaggcagatgttgctactgg

SEQ ID NO: 4956426 - DNA, 25 bp, Homo sapien
tgtctgtcgagaacttgaggagctg

SEQ ID NO: 4956427 - DNA, 25 bp, Homo sapien
tagatttcccagcttgattgtctct

SEQ ID NO: 4956428 - DNA, 25 bp, Homo sapien
gaaggagccagttggtagatttccc

SEQ ID NO: 4956429 - DNA, 25 bp, Homo sapien
gggcagacgcagagttcatacactg

SEQ ID NO: 4956430 - DNA, 25 bp, Homo sapien
gagcaaagaaatagctctctccagc

SEQ ID NO: 4956431 - DNA, 25 bp, Homo sapien
cgtatggctctgacatgcatggaga

SEQ ID NO: 4956432 - DNA, 25 bp, Homo sapien
tttgagagacagtgatcgtatggct

SEQ ID NO: 4956433 - DNA, 25 bp, Homo sapien
aaaaaacggatcttgaatttgagca

SEQ ID NO: 4956434 - DNA, 25 bp, Homo sapien
ctccccttctgtagattgcagatgg

SEQ ID NO: 4956435 - DNA, 25 bp, Homo sapien
tctgtagattgcagatggagctcct

SEQ ID NO: 4956436 - DNA, 25 bp, Homo sapien
ccatgatcaaggatctggtgggtga

SEQ ID NO: 4956437 - DNA, 25 bp, Homo sapien
gagcttccatgatcaaggatctggt

SEQ ID NO: 4956438 - DNA, 25 bp, Homo sapien
agtgcccaaatacggctccttcagt

SEQ ID NO: 4956439 - DNA, 25 bp, Homo sapien
cacagagtgcccaaatacggctcct

SEQ ID NO: 4956440 - DNA, 25 bp, Homo sapien
cagagtgcccaaatacggctccttc

SEQ ID NO: 4956441 - DNA, 25 bp, Homo sapien
tccacagagtgcccaaatacggctc

SEQ ID NO: 4956442 - DNA, 25 bp, Homo sapien
tggctttcatctctatgtttatgca

SEQ ID NO: 4956443 - DNA, 25 bp, Homo sapien
agcagtcagtataagcaagtccaca

SEQ ID NO: 4956444 - DNA, 25 bp, Homo sapien
cagtataagcaagtccacacagtgg

SEQ ID NO: 4956445 - DNA, 25 bp, Homo sapien
acacagtggctttcatctctatgtt

SEQ ID NO: 4956446 - DNA, 25 bp, Homo sapien
caaatattcttccaaaacagagaaa

SEQ ID NO: 4956447 - DNA, 25 bp, Homo sapien
tgaagatacattccttatatgccat

SEQ ID NO: 4956448 - DNA, 25 bp, Homo sapien
aaaaattgaagatacattccttata

SEQ ID NO: 4956449 - DNA, 25 bp, Homo sapien
attgaagatacattccttatatgcc

SEQ ID NO: 4956450 - DNA, 25 bp, Homo sapien
aaattgaagatacattccttatatg

SEQ ID NO: 4956451 - DNA, 25 bp, Homo sapien
tatggctagagttctgagacagatg

SEQ ID NO: 4956452 - DNA, 25 bp, Homo sapien
cactaattgttggtgtctgaagact

SEQ ID NO: 4956453 - DNA, 25 bp, Homo sapien
ttctttcacgtagtctccagacagg

SEQ ID NO: 4956454 - DNA, 25 bp, Homo sapien
tccagacaggttacaagagacacat

SEQ ID NO: 4956455 - DNA, 25 bp, Homo sapien
gtcattgaggctgctaatatttgca

SEQ ID NO: 4956456 - DNA, 25 bp, Homo sapien
gtcccctttactcagaatttgcatt

SEQ ID NO: 4956457 - DNA, 25 bp, Homo sapien
ttatgtcattgaggctgctaatatt

SEQ ID NO: 4956458 - DNA, 25 bp, Homo sapien
ttagtcccctttactcagaatttgc

SEQ ID NO: 4956459 - DNA, 25 bp, Homo sapien
aagaacaaacgttgtgattatgtaa

SEQ ID NO: 4956460 - DNA, 25 bp, Homo sapien
gaagaacaaacgttgtgattatgta

SEQ ID NO: 4956461 - DNA, 25 bp, Homo sapien
agaacaaacgttgtgattatgtaag

SEQ ID NO: 4956462 - DNA, 25 bp, Homo sapien
tgcagttgtatattctttaaagaag

SEQ ID NO: 4956463 - DNA, 25 bp, Homo sapien
tgtgcagttgtatattctttaaaga

SEQ ID NO: 4956464 - DNA, 25 bp, Homo sapien
ccttgtgcagttgtatattctttaa

SEQ ID NO: 4956465 - DNA, 25 bp, Homo sapien
gctccttgtgcagttgtatattctt

SEQ ID NO: 4956466 - DNA, 25 bp, Homo sapien
ttcagcttttcagccccaatggtaa

SEQ ID NO: 4956467 - DNA, 25 bp, Homo sapien
ttcagccccaatggtaatctcatct

SEQ ID NO: 4956468 - DNA, 25 bp, Homo sapien
gctctcacttcaaatcttttacact

SEQ ID NO: 4956469 - DNA, 25 bp, Homo sapien
ccccaatggtaatctcatcttcatc

SEQ ID NO: 4956470 - DNA, 25 bp, Homo sapien
gattctacattacttttcttctcag

SEQ ID NO: 4956471 - DNA, 25 bp, Homo sapien
ctgattctacattacttttcttctc

SEQ ID NO: 4956472 - DNA, 25 bp, Homo sapien
tctacattacttttcttctcagcct

SEQ ID NO: 4956473 - DNA, 25 bp, Homo sapien
ttctacattacttttcttctcagcc

SEQ ID NO: 4956474 - DNA, 25 bp, Homo sapien
ccagaacatggaatgcgacattctg

SEQ ID NO: 4956475 - DNA, 25 bp, Homo sapien
catggaatgcgacattctgtctttt

SEQ ID NO: 4956476 - DNA, 25 bp, Homo sapien
agaacatggaatgcgacattctgtc

SEQ ID NO: 4956477 - DNA, 25 bp, Homo sapien
tggaatgcgacattctgtcttttcc

SEQ ID NO: 4956478 - DNA, 25 bp, Homo sapien
tggaacggtaactgaaaatactagc

SEQ ID NO: 4956479 - DNA, 25 bp, Homo sapien
gaacggtaactgaaaatactagcac

SEQ ID NO: 4956480 - DNA, 25 bp, Homo sapien
ggaacggtaactgaaaatactagca

SEQ ID NO: 4956481 - DNA, 25 bp, Homo sapien
aatgcaaaaggcagttctatctggc

SEQ ID NO: 4956482 - DNA, 25 bp, Homo sapien
tgcagttccaacataacaggaatga

SEQ ID NO: 4956483 - DNA, 25 bp, Homo sapien
taggcctatagtttctgcagttcca

SEQ ID NO: 4956484 - DNA, 25 bp, Homo sapien
cttgaatccatttgctaatagcacc

SEQ ID NO: 4956485 - DNA, 25 bp, Homo sapien
tgtccggttaactgccccatgtgat

SEQ ID NO: 4956486 - DNA, 25 bp, Homo sapien
agctgtccggttaactgccccatgt

SEQ ID NO: 4956487 - DNA, 25 bp, Homo sapien
gccccatgtgatttcttgcattcac

SEQ ID NO: 4956488 - DNA, 25 bp, Homo sapien
atggtcagctgtccggttaactgcc

SEQ ID NO: 4956489 - DNA, 25 bp, Homo sapien
tgctttttcaaacggtaatgaagta

SEQ ID NO: 4956490 - DNA, 25 bp, Homo sapien
tccaaggatccacccctgtaggagt

SEQ ID NO: 4956491 - DNA, 25 bp, Homo sapien
tggctgaaggctggtttcatgcccc

SEQ ID NO: 4956492 - DNA, 25 bp, Homo sapien
gagttactttacccctaatggcagc

SEQ ID NO: 4956493 - DNA, 25 bp, Homo sapien
gtttcatgcccctgggaatccaagg

SEQ ID NO: 4956494 - DNA, 25 bp, Homo sapien
actgttaataattctacatcttttt

SEQ ID NO: 4956495 - DNA, 25 bp, Homo sapien
ttatcactggactctgctctctcca

SEQ ID NO: 4956496 - DNA, 25 bp, Homo sapien
ctcaactgttaataattctacatct

SEQ ID NO: 4956497 - DNA, 25 bp, Homo sapien
cttttttatcactggactctgctct

SEQ ID NO: 4956498 - DNA, 25 bp, Homo sapien
aactacaaagctttgctacaaattt

SEQ ID NO: 4956499 - DNA, 25 bp, Homo sapien
taactacaaagctttgctacaaatt

SEQ ID NO: 4956500 - DNA, 25 bp, Homo sapien
actacaaagctttgctacaaattta

SEQ ID NO: 4956501 - DNA, 25 bp, Homo sapien
gagtaagccaaagccagtatcacat

SEQ ID NO: 4956502 - DNA, 25 bp, Homo sapien
ttagagtaagccaaagccagtatca

SEQ ID NO: 4956503 - DNA, 25 bp, Homo sapien
tagagtaagccaaagccagtatcac

SEQ ID NO: 4956504 - DNA, 25 bp, Homo sapien
gtaagccaaagccagtatcacatac

SEQ ID NO: 4956505 - DNA, 25 bp, Homo sapien
tggaagtagaaactcagatatacct

SEQ ID NO: 4956506 - DNA, 25 bp, Homo sapien
ccttcaagtcggattcccttcttgg

SEQ ID NO: 4956507 - DNA, 25 bp, Homo sapien
cgagaatgaatttctttcacataca

SEQ ID NO: 4956508 - DNA, 25 bp, Homo sapien
ttcacatacaatggaagtagaaact

SEQ ID NO: 4956509 - DNA, 25 bp, Homo sapien
tgtttttcagaacagctccacgttt

SEQ ID NO: 4956510 - DNA, 25 bp, Homo sapien
gatccatgcattctagctgcttgag

SEQ ID NO: 4956511 - DNA, 25 bp, Homo sapien
aactgtactgccagcagttttttgt

SEQ ID NO: 4956512 - DNA, 25 bp, Homo sapien
ttaatgctcttaccgtattccaaag

SEQ ID NO: 4956513 - DNA, 25 bp, Homo sapien
tataaaaacattgctgatatctgtc

SEQ ID NO: 4956514 - DNA, 25 bp, Homo sapien
tgcctatttttgccttggtcatata

SEQ ID NO: 4956515 - DNA, 25 bp, Homo sapien
ctgcctatttttgccttggtcatat

SEQ ID NO: 4956516 - DNA, 25 bp, Homo sapien
tctgacacattggtgctttgaccca

SEQ ID NO: 4956517 - DNA, 25 bp, Homo sapien
cagttaacagttatgcacagtggtt

SEQ ID NO: 4956518 - DNA, 25 bp, Homo sapien
gatattgaggccatataagcctcct

SEQ ID NO: 4956519 - DNA, 25 bp, Homo sapien
tcctttacaaatggcagactgcttc

SEQ ID NO: 4956520 - DNA, 25 bp, Homo sapien
ggtacatcgaaggtcttccacaagg

SEQ ID NO: 4956521 - DNA, 25 bp, Homo sapien
gggtacatcgaaggtcttccacaag

SEQ ID NO: 4956522 - DNA, 25 bp, Homo sapien
tttagggtacatcgaaggtcttcca

SEQ ID NO: 4956523 - DNA, 25 bp, Homo sapien
tagggtacatcgaaggtcttccaca

SEQ ID NO: 4956524 - DNA, 25 bp, Homo sapien
cttgctcttcaatagtgcctgccat

SEQ ID NO: 4956525 - DNA, 25 bp, Homo sapien
tagaatctgacaggcctgggcatcc

SEQ ID NO: 4956526 - DNA, 25 bp, Homo sapien
ttatgtgagaagtatgggagttaaa

SEQ ID NO: 4956527 - DNA, 25 bp, Homo sapien
tgtgagaagtatgggagttaaattg

SEQ ID NO: 4956528 - DNA, 25 bp, Homo sapien
tatctttgatacttcttcccaggat

SEQ ID NO: 4956529 - DNA, 25 bp, Homo sapien
atctttgatacttcttcccaggatc

SEQ ID NO: 4956530 - DNA, 25 bp, Homo sapien
tattagcgtttgtttctaaagcgac

SEQ ID NO: 4956531 - DNA, 25 bp, Homo sapien
ttgaaagtccaatctttatgccgaa

SEQ ID NO: 4956532 - DNA, 25 bp, Homo sapien
tctaaagcgacgagaaagcatgtac

SEQ ID NO: 4956533 - DNA, 25 bp, Homo sapien
tctttatgccgaaattattagcgtt

SEQ ID NO: 4956534 - DNA, 25 bp, Homo sapien
taccaagagggctttacaggagtta

SEQ ID NO: 4956535 - DNA, 25 bp, Homo sapien
tctgcttggcaatctccctattagc

SEQ ID NO: 4956536 - DNA, 25 bp, Homo sapien
tttacaggagttaggcggtaattgc

SEQ ID NO: 4956537 - DNA, 25 bp, Homo sapien
ttgcttccagcagctagccagaaag

SEQ ID NO: 4956538 - DNA, 25 bp, Homo sapien
ccaactgcaatattctgctaccaag

SEQ ID NO: 4956539 - DNA, 25 bp, Homo sapien
cagcttgtacgtggccactggtacc

SEQ ID NO: 4956540 - DNA, 25 bp, Homo sapien
tctgctaccaagtacagcttgtacg

SEQ ID NO: 4956541 - DNA, 25 bp, Homo sapien
caagtacagcttgtacgtggccact

SEQ ID NO: 4956542 - DNA, 25 bp, Homo sapien
ggacaaagctttccactccagtact

SEQ ID NO: 4956543 - DNA, 25 bp, Homo sapien
tacttgtccacttattctcaaaaat

SEQ ID NO: 4956544 - DNA, 25 bp, Homo sapien
cactccagtactatttacttgtcca

SEQ ID NO: 4956545 - DNA, 25 bp, Homo sapien
tttacttgtccacttattctcaaaa

SEQ ID NO: 4956546 - DNA, 25 bp, Homo sapien
actgaaatcatcttggggcagacag

SEQ ID NO: 4956547 - DNA, 25 bp, Homo sapien
cttggggcagacagaatatggtaga

SEQ ID NO: 4956548 - DNA, 25 bp, Homo sapien
cataacagcacatggcccattatga

SEQ ID NO: 4956549 - DNA, 25 bp, Homo sapien
cattatgattcaatgtgctgtgcaa

SEQ ID NO: 4956550 - DNA, 25 bp, Homo sapien
cttccagttgctatctacgatgacg

SEQ ID NO: 4956551 - DNA, 25 bp, Homo sapien
gttgctatctacgatgacgtccgca

SEQ ID NO: 4956552 - DNA, 25 bp, Homo sapien
tatctacgatgacgtccgcagcaag

SEQ ID NO: 4956553 - DNA, 25 bp, Homo sapien
gatgacgtccgcagcaagaatttgg

SEQ ID NO: 4956554 - DNA, 25 bp, Homo sapien
ggtaaccaccttgagctgtgttcat

SEQ ID NO: 4956555 - DNA, 25 bp, Homo sapien
tcatatctgcaaatgacaggttcat

SEQ ID NO: 4956556 - DNA, 25 bp, Homo sapien
taatatctaacttcccctccttgag

SEQ ID NO: 4956557 - DNA, 25 bp, Homo sapien
tgcctctcaagactgcgtaaacctg

SEQ ID NO: 4956558 - DNA, 25 bp, Homo sapien
tttaatctcccttaccgctctcaga

SEQ ID NO: 4956559 - DNA, 25 bp, Homo sapien
tctcccttaccgctctcagaaacaa

SEQ ID NO: 4956560 - DNA, 25 bp, Homo sapien
cctttaatctcccttaccgctctca

SEQ ID NO: 4956561 - DNA, 25 bp, Homo sapien
taatctcccttaccgctctcagaaa

SEQ ID NO: 4956562 - DNA, 25 bp, Homo sapien
tggtgactgaataccttcaaaatga

SEQ ID NO: 4956563 - DNA, 25 bp, Homo sapien
tggaagaatttctgggtaagatagg

SEQ ID NO: 4956564 - DNA, 25 bp, Homo sapien
ggttacatagctctcagttttcatg

SEQ ID NO: 4956565 - DNA, 25 bp, Homo sapien
gttttcatgctgtcatggtgactga

SEQ ID NO: 4956566 - DNA, 25 bp, Homo sapien
gattttaacacaagccaggcaatgc

SEQ ID NO: 4956567 - DNA, 25 bp, Homo sapien
agccaggcaatgcaattgttcctgc

SEQ ID NO: 4956568 - DNA, 25 bp, Homo sapien
attgcatgagttatgattttaacac

SEQ ID NO: 4956569 - DNA, 25 bp, Homo sapien
acaaaggaaggatgaattgcatgag

SEQ ID NO: 4956570 - DNA, 25 bp, Homo sapien
ctcctatcaggggaagctagccacc

SEQ ID NO: 4956571 - DNA, 25 bp, Homo sapien
cggacagaaattatgctgtttttcc

SEQ ID NO: 4956572 - DNA, 25 bp, Homo sapien
gctgtttttcctcctatcaggggaa

SEQ ID NO: 4956573 - DNA, 25 bp, Homo sapien
aaagtgctttcggattcggacagaa

SEQ ID NO: 4956574 - DNA, 25 bp, Homo sapien
tcacataattgtggtgccttacaac

SEQ ID NO: 4956575 - DNA, 25 bp, Homo sapien
tgccttacaacatggacggcagcta

SEQ ID NO: 4956576 - DNA, 25 bp, Homo sapien
caacatggacggcagctagggtcat

SEQ ID NO: 4956577 - DNA, 25 bp, Homo sapien
aattgtggtgccttacaacatggac

SEQ ID NO: 4956578 - DNA, 25 bp, Homo sapien
tgaaccaagagcaataagatgtaaa

SEQ ID NO: 4956579 - DNA, 25 bp, Homo sapien
gaaccaagagcaataagatgtaaaa

SEQ ID NO: 4956580 - DNA, 25 bp, Homo sapien
ctgaaccaagagcaataagatgtaa

SEQ ID NO: 4956581 - DNA, 25 bp, Homo sapien
cataaattcccactgggtaaagttg

SEQ ID NO: 4956582 - DNA, 25 bp, Homo sapien
ctatcatggtaaccaacagcagaag

SEQ ID NO: 4956583 - DNA, 25 bp, Homo sapien
gaagtataagcacctctttcgccat

SEQ ID NO: 4956584 - DNA, 25 bp, Homo sapien
gctagtatgtattgttctcgtgtca

SEQ ID NO: 4956585 - DNA, 25 bp, Homo sapien
tccacctttaacatcctctgccctg

SEQ ID NO: 4956586 - DNA, 25 bp, Homo sapien
ctaattcccagtttgttttgcatcc

SEQ ID NO: 4956587 - DNA, 25 bp, Homo sapien
tgcttcacgtctaaaactcttccac

SEQ ID NO: 4956588 - DNA, 25 bp, Homo sapien
gggcatcaaaatgcttcacgtctaa

SEQ ID NO: 4956589 - DNA, 25 bp, Homo sapien
cacgggtgctgccttattgagtgga

SEQ ID NO: 4956590 - DNA, 25 bp, Homo sapien
aaaacacgggtgctgccttattgag

SEQ ID NO: 4956591 - DNA, 25 bp, Homo sapien
ggaaaacacgggtgctgccttattg

SEQ ID NO: 4956592 - DNA, 25 bp, Homo sapien
ggtgctgccttattgagtggaaaat

SEQ ID NO: 4956593 - DNA, 25 bp, Homo sapien
tggaaccagtcagcctagaaatagc

SEQ ID NO: 4956594 - DNA, 25 bp, Homo sapien
gctggatggatctgagtcctcatgg

SEQ ID NO: 4956595 - DNA, 25 bp, Homo sapien
tggtttagggctattggaagcagca

SEQ ID NO: 4956596 - DNA, 25 bp, Homo sapien
tgagttcaccacaagagaaagtttg

SEQ ID NO: 4956597 - DNA, 25 bp, Homo sapien
tttcataccccattcatcatgttta

SEQ ID NO: 4956598 - DNA, 25 bp, Homo sapien
gagcttttcataccccattcatcat

SEQ ID NO: 4956599 - DNA, 25 bp, Homo sapien
ttggagcttttcataccccattcat

SEQ ID NO: 4956600 - DNA, 25 bp, Homo sapien
tcttctaatgtctgtgtagaaatct

SEQ ID NO: 4956601 - DNA, 25 bp, Homo sapien
tcaagcttccttggtgtgctgaagc

SEQ ID NO: 4956602 - DNA, 25 bp, Homo sapien
gaaaggagtccactgcgcattcatt

SEQ ID NO: 4956603 - DNA, 25 bp, Homo sapien
tatatgtaatagttcctctggactt

SEQ ID NO: 4956604 - DNA, 25 bp, Homo sapien
gaatcatgtaggactgagtcatcca

SEQ ID NO: 4956605 - DNA, 25 bp, Homo sapien
tgtccccaggatgtctaaacttgta

SEQ ID NO: 4956606 - DNA, 25 bp, Homo sapien
tgaagcaccgtgttaggaccacaga

SEQ ID NO: 4956607 - DNA, 25 bp, Homo sapien
gtgtgaatacccatctcgtctcctg

SEQ ID NO: 4956608 - DNA, 25 bp, Homo sapien
gaagatactccacttgggagccact

SEQ ID NO: 4956609 - DNA, 25 bp, Homo sapien
cttttgtatcatactgacagatcta

SEQ ID NO: 4956610 - DNA, 25 bp, Homo sapien
gtatcatactgacagatctacagct

SEQ ID NO: 4956611 - DNA, 25 bp, Homo sapien
tacagctgccatgacagtatttcag

SEQ ID NO: 4956612 - DNA, 25 bp, Homo sapien
tgacagatctacagctgccatgaca

SEQ ID NO: 4956613 - DNA, 25 bp, Homo sapien
tgagtttccatgttgcgtcctatag

SEQ ID NO: 4956614 - DNA, 25 bp, Homo sapien
tgaagaatgacttaagcactgtggg

SEQ ID NO: 4956615 - DNA, 25 bp, Homo sapien
cattgactgagctattcaacggaat

SEQ ID NO: 4956616 - DNA, 25 bp, Homo sapien
aagaggctgtgttcttccattgact

SEQ ID NO: 4956617 - DNA, 25 bp, Homo sapien
ctatattgccttatgttcaagtcca

SEQ ID NO: 4956618 - DNA, 25 bp, Homo sapien
tatattgccttatgttcaagtccaa

SEQ ID NO: 4956619 - DNA, 25 bp, Homo sapien
attgccttatgttcaagtccaagaa

SEQ ID NO: 4956620 - DNA, 25 bp, Homo sapien
gccttatgttcaagtccaagaacca

SEQ ID NO: 4956621 - DNA, 25 bp, Homo sapien
catggagtaatagcctttctctgca

SEQ ID NO: 4956622 - DNA, 25 bp, Homo sapien
ccatctgtagtgtttcatggagtaa

SEQ ID NO: 4956623 - DNA, 25 bp, Homo sapien
cgtctaaactctcctgaagcgttag

SEQ ID NO: 4956624 - DNA, 25 bp, Homo sapien
catcaaagtctttcctggattcctg

SEQ ID NO: 4956625 - DNA, 25 bp, Homo sapien
catgtgtgcattatagcagcattca

SEQ ID NO: 4956626 - DNA, 25 bp, Homo sapien
tgaggatacatagaaagtatattcc

SEQ ID NO: 4956627 - DNA, 25 bp, Homo sapien
caatagcggcctttgcatgtgtgca

SEQ ID NO: 4956628 - DNA, 25 bp, Homo sapien
agtatattccaatagcggcctttgc

SEQ ID NO: 4956629 - DNA, 25 bp, Homo sapien
ggctgcattcagctgtgattatgcc

SEQ ID NO: 4956630 - DNA, 25 bp, Homo sapien
atttaaaaagttagctggccatggt

SEQ ID NO: 4956631 - DNA, 25 bp, Homo sapien
gagattgaggctgcattcagctgtg

SEQ ID NO: 4956632 - DNA, 25 bp, Homo sapien
gaggatctcttaagcctgggagatt

SEQ ID NO: 4956633 - DNA, 25 bp, Homo sapien
ccagttagattctcacttctaccaa

SEQ ID NO: 4956634 - DNA, 25 bp, Homo sapien
ttagattctcacttctaccaacagt

SEQ ID NO: 4956635 - DNA, 25 bp, Homo sapien
taccaacagtgcagctgtattgtag

SEQ ID NO: 4956636 - DNA, 25 bp, Homo sapien
caccagttagattctcacttctacc

SEQ ID NO: 4956637 - DNA, 25 bp, Homo sapien
ctgaatcccactccatttcgacccc

SEQ ID NO: 4956638 - DNA, 25 bp, Homo sapien
ctggcttaggtttgtctgtaatagc

SEQ ID NO: 4956639 - DNA, 25 bp, Homo sapien
tactaaatacagatgcagcagcaga

SEQ ID NO: 4956640 - DNA, 25 bp, Homo sapien
caccactaactgctgacagatatca

SEQ ID NO: 4956641 - DNA, 25 bp, Homo sapien
aatacatgacagtgtagatacagca

SEQ ID NO: 4956642 - DNA, 25 bp, Homo sapien
cagcatagcaaaactctgaaagtca

SEQ ID NO: 4956643 - DNA, 25 bp, Homo sapien
gagtgtcaggaatagaacagcatag

SEQ ID NO: 4956644 - DNA, 25 bp, Homo sapien
atttctaactcacacaccatgagtg

SEQ ID NO: 4956645 - DNA, 25 bp, Homo sapien
tagcaaaactctgaaagtcaccatt

SEQ ID NO: 4956646 - DNA, 25 bp, Homo sapien
gatccaagaagatactgagcaatct

SEQ ID NO: 4956647 - DNA, 25 bp, Homo sapien
cagatccaagaagatactgagcaat

SEQ ID NO: 4956648 - DNA, 25 bp, Homo sapien
gagcaatcttttaagatggaaaatg

SEQ ID NO: 4956649 - DNA, 25 bp, Homo sapien
ttcagatccaagaagatactgagca

SEQ ID NO: 4956650 - DNA, 25 bp, Homo sapien
ttaaatgtgctcctagtgtagacac

SEQ ID NO: 4956651 - DNA, 25 bp, Homo sapien
caatctaatttagtatgcagacaaa

SEQ ID NO: 4956652 - DNA, 25 bp, Homo sapien
tgcctttatttgacaggagcttgat

SEQ ID NO: 4956653 - DNA, 25 bp, Homo sapien
gaattgtgacagctttgcgtatgta

SEQ ID NO: 4956654 - DNA, 25 bp, Homo sapien
taactgccctgtagccaatagcagc

SEQ ID NO: 4956655 - DNA, 25 bp, Homo sapien
gaaggaaacgctgctctccgcagtc

SEQ ID NO: 4956656 - DNA, 25 bp, Homo sapien
acgtatactcctcgcgcatcacaga

SEQ ID NO: 4956657 - DNA, 25 bp, Homo sapien
tagtctcggagtggccacgtatact

SEQ ID NO: 4956658 - DNA, 25 bp, Homo sapien
tggaactggcagtcctttttaattg

SEQ ID NO: 4956659 - DNA, 25 bp, Homo sapien
gtctggtatttggaactggcagtcc

SEQ ID NO: 4956660 - DNA, 25 bp, Homo sapien
tttgtctggtatttggaactggcag

SEQ ID NO: 4956661 - DNA, 25 bp, Homo sapien
cttttgtctggtatttggaactggc

SEQ ID NO: 4956662 - DNA, 25 bp, Homo sapien
tcagtttcccatagttctgaatgag

SEQ ID NO: 4956663 - DNA, 25 bp, Homo sapien
aatgaggaatctgggggtgtaccac

SEQ ID NO: 4956664 - DNA, 25 bp, Homo sapien
gtgtaccacagaacccactacttat

SEQ ID NO: 4956665 - DNA, 25 bp, Homo sapien
cagtttcccatagttctgaatgagg

SEQ ID NO: 4956666 - DNA, 25 bp, Homo sapien
gaaggaaacgatcactagcttaaaa

SEQ ID NO: 4956667 - DNA, 25 bp, Homo sapien
aatgttttggcctgactgtgctctt

SEQ ID NO: 4956668 - DNA, 25 bp, Homo sapien
ctatggtggatgtaaggaaggaaac

SEQ ID NO: 4956669 - DNA, 25 bp, Homo sapien
tgtaaggaaggaaacgatcactagc

SEQ ID NO: 4956670 - DNA, 25 bp, Homo sapien
ccatgaaagttgtccatccctggtg

SEQ ID NO: 4956671 - DNA, 25 bp, Homo sapien
cattagattcgtattggagcgcaaa

SEQ ID NO: 4956672 - DNA, 25 bp, Homo sapien
gaagcagtggcaattaacgcaacat

SEQ ID NO: 4956673 - DNA, 25 bp, Homo sapien
tgccaactgagcatgcaagggatct

SEQ ID NO: 4956674 - DNA, 25 bp, Homo sapien
tctggttgaccttaagcaccaacat

SEQ ID NO: 4956675 - DNA, 25 bp, Homo sapien
ctaagaaagtttcagtgcaggtgtt

SEQ ID NO: 4956676 - DNA, 25 bp, Homo sapien
tgctaagaaagtttcagtgcaggtg

SEQ ID NO: 4956677 - DNA, 25 bp, Homo sapien
gttctggttgaccttaagcaccaac

SEQ ID NO: 4956678 - DNA, 25 bp, Homo sapien
cagctatcaactcctcttgttgcca

SEQ ID NO: 4956679 - DNA, 25 bp, Homo sapien
gagaacagtaactgttatttcttcc

SEQ ID NO: 4956680 - DNA, 25 bp, Homo sapien
tatcaactcctcttgttgccagaga

SEQ ID NO: 4956681 - DNA, 25 bp, Homo sapien
tcagtcagctatcaactcctcttgt

SEQ ID NO: 4956682 - DNA, 25 bp, Homo sapien
ggatcagaagaaagctaatgcctag

SEQ ID NO: 4956683 - DNA, 25 bp, Homo sapien
taatgcctagctgacggcagttccc

SEQ ID NO: 4956684 - DNA, 25 bp, Homo sapien
cctgtgatcgaacccaccaatggat

SEQ ID NO: 4956685 - DNA, 25 bp, Homo sapien
aaagtcaaccatgtgtagaccagcc

SEQ ID NO: 4956686 - DNA, 25 bp, Homo sapien
caaatgaaaagggaatgattcacca

SEQ ID NO: 4956687 - DNA, 25 bp, Homo sapien
ttcaaagacttcttcagatgcatcc

SEQ ID NO: 4956688 - DNA, 25 bp, Homo sapien
cagaaattcaaagacttcttcagat

SEQ ID NO: 4956689 - DNA, 25 bp, Homo sapien
caaagacttcttcagatgcatccaa

SEQ ID NO: 4956690 - DNA, 25 bp, Homo sapien
tgtggagatgttccctaaagctcgt

SEQ ID NO: 4956691 - DNA, 25 bp, Homo sapien
tgaggctttcctcgtcatgtggaga

SEQ ID NO: 4956692 - DNA, 25 bp, Homo sapien
taaagctcgtttgggacatatgaca

SEQ ID NO: 4956693 - DNA, 25 bp, Homo sapien
tgcactgtgggcttcgttctaacgc

SEQ ID NO: 4956694 - DNA, 25 bp, Homo sapien
tctgacaggcaaggtttctgacagg

SEQ ID NO: 4956695 - DNA, 25 bp, Homo sapien
ctgacaggcaaggtttctgacaggc

SEQ ID NO: 4956696 - DNA, 25 bp, Homo sapien
cgttctgacaggcaaggtttctgac

SEQ ID NO: 4956697 - DNA, 25 bp, Homo sapien
acaggcaaggtttctgacaggcaag

SEQ ID NO: 4956698 - DNA, 25 bp, Homo sapien
aattgggtgcacatgctctggcatc

SEQ ID NO: 4956699 - DNA, 25 bp, Homo sapien
tctgaggatgtgaggtcacactgcc

SEQ ID NO: 4956700 - DNA, 25 bp, Homo sapien
tgccagattgcgtgcacgaggctct

SEQ ID NO: 4956701 - DNA, 25 bp, Homo sapien
gctgttccccgattaccactgtgtg

SEQ ID NO: 4956702 - DNA, 25 bp, Homo sapien
tgggaagtacagatgttcaaagggt

SEQ ID NO: 4956703 - DNA, 25 bp, Homo sapien
gatgttcaaagggtggcttcacccc

SEQ ID NO: 4956704 - DNA, 25 bp, Homo sapien
gaagtacagatgttcaaagggtggc

SEQ ID NO: 4956705 - DNA, 25 bp, Homo sapien
tacagatgttcaaagggtggcttca

SEQ ID NO: 4956706 - DNA, 25 bp, Homo sapien
agaactcccggttaatgccttcagt

SEQ ID NO: 4956707 - DNA, 25 bp, Homo sapien
ctggtaaaccagttagcacgttttg

SEQ ID NO: 4956708 - DNA, 25 bp, Homo sapien
tcctttccctcatatagcccaagaa

SEQ ID NO: 4956709 - DNA, 25 bp, Homo sapien
tagcacgttttgaatagttaggaga

SEQ ID NO: 4956710 - DNA, 25 bp, Homo sapien
gaatagaacaatgggtgtggagaga

SEQ ID NO: 4956711 - DNA, 25 bp, Homo sapien
aatagaacaatgggtgtggagagag

SEQ ID NO: 4956712 - DNA, 25 bp, Homo sapien
aatatatttcccatatttcacatac

SEQ ID NO: 4956713 - DNA, 25 bp, Homo sapien
agtgtacctgaggatgacttgaagc

SEQ ID NO: 4956714 - DNA, 25 bp, Homo sapien
gatgacttgaagccatttaatatat

SEQ ID NO: 4956715 - DNA, 25 bp, Homo sapien
taatatatttcccatatttcacata

SEQ ID NO: 4956716 - DNA, 25 bp, Homo sapien
gaggtctgaacagaaatcaaatctt

SEQ ID NO: 4956717 - DNA, 25 bp, Homo sapien
gcagtgccgtaaaagatgccactag

SEQ ID NO: 4956718 - DNA, 25 bp, Homo sapien
atcaaatcttcatgaactttgaaac

SEQ ID NO: 4956719 - DNA, 25 bp, Homo sapien
tgaaactcttataaggaaagttgga

SEQ ID NO: 4956720 - DNA, 25 bp, Homo sapien
gcatatgactttattccaaacttac

SEQ ID NO: 4956721 - DNA, 25 bp, Homo sapien
cgcatatgactttattccaaactta

SEQ ID NO: 4956722 - DNA, 25 bp, Homo sapien
agtcttctccatttattgtgatcat

SEQ ID NO: 4956723 - DNA, 25 bp, Homo sapien
agcctcatgactgggaacgacttgc

SEQ ID NO: 4956724 - DNA, 25 bp, Homo sapien
cctcatgactgggaacgacttgcac

SEQ ID NO: 4956725 - DNA, 25 bp, Homo sapien
gcctcatgactgggaacgacttgca

SEQ ID NO: 4956726 - DNA, 25 bp, Homo sapien
cagacaacttctttccggaaacttg

SEQ ID NO: 4956727 - DNA, 25 bp, Homo sapien
tcctcaacaactgaactggctgcag

SEQ ID NO: 4956728 - DNA, 25 bp, Homo sapien
tggccccagcatcggaagtctgctt

SEQ ID NO: 4956729 - DNA, 25 bp, Homo sapien
tggctgcaggtgaagtactctccat

SEQ ID NO: 4956730 - DNA, 25 bp, Homo sapien
acggatctctactgccttgcattgg

SEQ ID NO: 4956731 - DNA, 25 bp, Homo sapien
aaacagatcatctctccttagaata

SEQ ID NO: 4956732 - DNA, 25 bp, Homo sapien
ggtatcaccgatttcaacacatata

SEQ ID NO: 4956733 - DNA, 25 bp, Homo sapien
ctaaaatggcctctataaacatggg

SEQ ID NO: 4956734 - DNA, 25 bp, Homo sapien
cagctaattgttttggcgtctgctg

SEQ ID NO: 4956735 - DNA, 25 bp, Homo sapien
ttatagatatcattgacatcttctg

SEQ ID NO: 4956736 - DNA, 25 bp, Homo sapien
tcttcagatcaatattgtccgtggt

SEQ ID NO: 4956737 - DNA, 25 bp, Homo sapien
gatcaatattgtccgtggtcactgt

SEQ ID NO: 4956738 - DNA, 25 bp, Homo sapien
gcatatgtctgttaatgttcttcag

SEQ ID NO: 4956739 - DNA, 25 bp, Homo sapien
tcttctcaagagatgacatgacaca

SEQ ID NO: 4956740 - DNA, 25 bp, Homo sapien
taagtaaatcacataccctctccgt

SEQ ID NO: 4956741 - DNA, 25 bp, Homo sapien
gagatttagctcacatttgtcctaa

SEQ ID NO: 4956742 - DNA, 25 bp, Homo sapien
tagagattaaaggtacccaacacat

SEQ ID NO: 4956743 - DNA, 25 bp, Homo sapien
aaatggtgctacatcccatacaact

SEQ ID NO: 4956744 - DNA, 25 bp, Homo sapien
ggtctgcagccattagtttgcctat

SEQ ID NO: 4956745 - DNA, 25 bp, Homo sapien
actggtgtggtcagatttggtctgc

SEQ ID NO: 4956746 - DNA, 25 bp, Homo sapien
tctgctccacaatcctgaaatggtg

SEQ ID NO: 4956747 - DNA, 25 bp, Homo sapien
ttaaagtggcattaactttcagact

SEQ ID NO: 4956748 - DNA, 25 bp, Homo sapien
aagtggcattaactttcagactaaa

SEQ ID NO: 4956749 - DNA, 25 bp, Homo sapien
gtggcattaactttcagactaaaaa

SEQ ID NO: 4956750 - DNA, 25 bp, Homo sapien
taaagtggcattaactttcagacta

SEQ ID NO: 4956751 - DNA, 25 bp, Homo sapien
aatgtttcattaccataaggatgcc

SEQ ID NO: 4956752 - DNA, 25 bp, Homo sapien
gctcagcacttggtgcaatggccca

SEQ ID NO: 4956753 - DNA, 25 bp, Homo sapien
ggctaagtggccgtgcaatgtttca

SEQ ID NO: 4956754 - DNA, 25 bp, Homo sapien
ttgacgggaagtaatctgcaggctc

SEQ ID NO: 4956755 - DNA, 25 bp, Homo sapien
tccagcatacttgataagaggcatg

SEQ ID NO: 4956756 - DNA, 25 bp, Homo sapien
actccagcatacttgataagaggca

SEQ ID NO: 4956757 - DNA, 25 bp, Homo sapien
cagcatacttgataagaggcatgag

SEQ ID NO: 4956758 - DNA, 25 bp, Homo sapien
tcactccagcatacttgataagagg

SEQ ID NO: 4956759 - DNA, 25 bp, Homo sapien
tgccgtatcgcctcagtccttctgg

SEQ ID NO: 4956760 - DNA, 25 bp, Homo sapien
tcagagcaaattattccccaagccc

SEQ ID NO: 4956761 - DNA, 25 bp, Homo sapien
cacaagacatcctttgatcagagca

SEQ ID NO: 4956762 - DNA, 25 bp, Homo sapien
ctggcttctctgtgaaggttataac

SEQ ID NO: 4956763 - DNA, 25 bp, Homo sapien
tctttgtccatgcacttgcctctca

SEQ ID NO: 4956764 - DNA, 25 bp, Homo sapien
ggccttccgcaggtccattccaggg

SEQ ID NO: 4956765 - DNA, 25 bp, Homo sapien
gactggcagaactgtcctcactttt

SEQ ID NO: 4956766 - DNA, 25 bp, Homo sapien
gccgctcttgcccagtgactggcag

SEQ ID NO: 4956767 - DNA, 25 bp, Homo sapien
catcaagttctatgataagttgtac

SEQ ID NO: 4956768 - DNA, 25 bp, Homo sapien
ggagggacagccactaacgactaat

SEQ ID NO: 4956769 - DNA, 25 bp, Homo sapien
tcatcaacagatcccatatgccatg

SEQ ID NO: 4956770 - DNA, 25 bp, Homo sapien
tatgccatgcataaaacaaaccacc

SEQ ID NO: 4956771 - DNA, 25 bp, Homo sapien
ctgctttgagaaaattctgttgagt

SEQ ID NO: 4956772 - DNA, 25 bp, Homo sapien
agctgctttgagaaaattctgttga

SEQ ID NO: 4956773 - DNA, 25 bp, Homo sapien
gctgctttgagaaaattctgttgag

SEQ ID NO: 4956774 - DNA, 25 bp, Homo sapien
ctgtgtacgggattactcatgtgga

SEQ ID NO: 4956775 - DNA, 25 bp, Homo sapien
aatgttcggtaactgatttgtctga

SEQ ID NO: 4956776 - DNA, 25 bp, Homo sapien
tggaatgatggaatgttcggtaact

SEQ ID NO: 4956777 - DNA, 25 bp, Homo sapien
cgggattactcatgtggaatgatgg

SEQ ID NO: 4956778 - DNA, 25 bp, Homo sapien
cataagcactctctgtgattcctct

SEQ ID NO: 4956779 - DNA, 25 bp, Homo sapien
cataacaacttccttaaagtcacag

SEQ ID NO: 4956780 - DNA, 25 bp, Homo sapien
ttccgtaatactgttccttctccaa

SEQ ID NO: 4956781 - DNA, 25 bp, Homo sapien
gtgtcctttataaccctactccata

SEQ ID NO: 4956782 - DNA, 25 bp, Homo sapien
tctagtgtactttatcacccgtccc

SEQ ID NO: 4956783 - DNA, 25 bp, Homo sapien
gtatgagcaatccaatactccctca

SEQ ID NO: 4956784 - DNA, 25 bp, Homo sapien
tctgtgccttacttgcaacctggct

SEQ ID NO: 4956785 - DNA, 25 bp, Homo sapien
cagctgactttgtaaccactcactt

SEQ ID NO: 4956786 - DNA, 25 bp, Homo sapien
tgcaactgcgggaggaaacactgcc

SEQ ID NO: 4956787 - DNA, 25 bp, Homo sapien
aaaacgggctgtcgttgcagatgcc

SEQ ID NO: 4956788 - DNA, 25 bp, Homo sapien
gggtctcacgaagttctgggataaa

SEQ ID NO: 4956789 - DNA, 25 bp, Homo sapien
gcagatgcctctgtcacgcgaatct

SEQ ID NO: 4956790 - DNA, 25 bp, Homo sapien
gtaggtaatttagctccagtcccag

SEQ ID NO: 4956791 - DNA, 25 bp, Homo sapien
tagtgacaggtgatctctaccgcgg

SEQ ID NO: 4956792 - DNA, 25 bp, Homo sapien
tccatggagcgcaactaaacgaagt

SEQ ID NO: 4956793 - DNA, 25 bp, Homo sapien
gataaaaggcttcctccgtcaggct

SEQ ID NO: 4956794 - DNA, 25 bp, Homo sapien
aatgataaaccaatgcaataacaac

SEQ ID NO: 4956795 - DNA, 25 bp, Homo sapien
tttccacgggttctaccggcatcag

SEQ ID NO: 4956796 - DNA, 25 bp, Homo sapien
agaaatgataaaccaatgcaataac

SEQ ID NO: 4956797 - DNA, 25 bp, Homo sapien
tcccccaacacgtgcagaaatgata

SEQ ID NO: 4956798 - DNA, 25 bp, Homo sapien
caaacaatggctcgcagatatgttc

SEQ ID NO: 4956799 - DNA, 25 bp, Homo sapien
acaatggctcgcagatatgttcttc

SEQ ID NO: 4956800 - DNA, 25 bp, Homo sapien
caatggctcgcagatatgttcttct

SEQ ID NO: 4956801 - DNA, 25 bp, Homo sapien
aacaatggctcgcagatatgttctt

SEQ ID NO: 4956802 - DNA, 25 bp, Homo sapien
taatcagcattactctgatgttctc

SEQ ID NO: 4956803 - DNA, 25 bp, Homo sapien
aaacattggtacgaagttgacagcc

SEQ ID NO: 4956804 - DNA, 25 bp, Homo sapien
atagaaacattggtacgaagttgac

SEQ ID NO: 4956805 - DNA, 25 bp, Homo sapien
gaagttgacagccaataatcagcat

SEQ ID NO: 4956806 - DNA, 25 bp, Homo sapien
agtggcaagcttcataacatttaat

SEQ ID NO: 4956807 - DNA, 25 bp, Homo sapien
caatgttggtcactttaattttaag

SEQ ID NO: 4956808 - DNA, 25 bp, Homo sapien
taatttccagaacttgttctctgaa

SEQ ID NO: 4956809 - DNA, 25 bp, Homo sapien
gttatcataagtggcaagcttcata

SEQ ID NO: 4956810 - DNA, 25 bp, Homo sapien
ctaattacagctgccttttctgacg

SEQ ID NO: 4956811 - DNA, 25 bp, Homo sapien
tacagctgccttttctgacggtgtc

SEQ ID NO: 4956812 - DNA, 25 bp, Homo sapien
attacagctgccttttctgacggtg

SEQ ID NO: 4956813 - DNA, 25 bp, Homo sapien
cagctgccttttctgacggtgtcat

SEQ ID NO: 4956814 - DNA, 25 bp, Homo sapien
caatcaactttctcttcttgtaaga

SEQ ID NO: 4956815 - DNA, 25 bp, Homo sapien
tcaactttctcttcttgtaagattg

SEQ ID NO: 4956816 - DNA, 25 bp, Homo sapien
aactttctcttcttgtaagattgct

SEQ ID NO: 4956817 - DNA, 25 bp, Homo sapien
tttctcttcttgtaagattgcttcc

SEQ ID NO: 4956818 - DNA, 25 bp, Homo sapien
tcagcaaataaggcacaagatccca

SEQ ID NO: 4956819 - DNA, 25 bp, Homo sapien
agcaaataaggcacaagatcccact

SEQ ID NO: 4956820 - DNA, 25 bp, Homo sapien
ctagggtacagccgcccttgttcta

SEQ ID NO: 4956821 - DNA, 25 bp, Homo sapien
gggtacagccgcccttgttctatca

SEQ ID NO: 4956822 - DNA, 25 bp, Homo sapien
gcctgtgatagtaaatggttcttgc

SEQ ID NO: 4956823 - DNA, 25 bp, Homo sapien
caatctaaccctctttggatcgttt

SEQ ID NO: 4956824 - DNA, 25 bp, Homo sapien
ttatcctccgaaaactcaagaagcg

SEQ ID NO: 4956825 - DNA, 25 bp, Homo sapien
tcagtggaaaggtcaggcgaaaaaa

SEQ ID NO: 4956826 - DNA, 25 bp, Homo sapien
aagaacttgagattatcaatgatcg

SEQ ID NO: 4956827 - DNA, 25 bp, Homo sapien
acttgagattatcaatgatcgatca

SEQ ID NO: 4956828 - DNA, 25 bp, Homo sapien
gattatcaatgatcgatcatcttgt

SEQ ID NO: 4956829 - DNA, 25 bp, Homo sapien
ctgaaagaacttgagattatcaatg

SEQ ID NO: 4956830 - DNA, 25 bp, Homo sapien
gagtacaaactccaaaatacagcat

SEQ ID NO: 4956831 - DNA, 25 bp, Homo sapien
tcttttatgagtacaaactccaaaa

SEQ ID NO: 4956832 - DNA, 25 bp, Homo sapien
gtgacaacattcttttatgagtaca

SEQ ID NO: 4956833 - DNA, 25 bp, Homo sapien
ctattttctgtgacaacattctttt

SEQ ID NO: 4956834 - DNA, 25 bp, Homo sapien
aaatagcttgaaccaaagttattat

SEQ ID NO: 4956835 - DNA, 25 bp, Homo sapien
aatagcttgaaccaaagttattatc

SEQ ID NO: 4956836 - DNA, 25 bp, Homo sapien
caaatagcttgaaccaaagttatta

SEQ ID NO: 4956837 - DNA, 25 bp, Homo sapien
atagcttgaaccaaagttattatca

SEQ ID NO: 4956838 - DNA, 25 bp, Homo sapien
ggagaaatgtcaaagtcccggcaaa

SEQ ID NO: 4956839 - DNA, 25 bp, Homo sapien
gagaaatgtcaaagtcccggcaaac

SEQ ID NO: 4956840 - DNA, 25 bp, Homo sapien
gaaatgtcaaagtcccggcaaactc

SEQ ID NO: 4956841 - DNA, 25 bp, Homo sapien
ctgggagaaatgtcaaagtcccggc

SEQ ID NO: 4956842 - DNA, 25 bp, Homo sapien
tcaaaatctaatccataatgctggg

SEQ ID NO: 4956843 - DNA, 25 bp, Homo sapien
aatctaatccataatgctgggtcat

SEQ ID NO: 4956844 - DNA, 25 bp, Homo sapien
ttcctgaacatcactagctttgggt

SEQ ID NO: 4956845 - DNA, 25 bp, Homo sapien
tagctttgggttcaaaatctaatcc

SEQ ID NO: 4956846 - DNA, 25 bp, Homo sapien
gatgattacactactatagccaagc

SEQ ID NO: 4956847 - DNA, 25 bp, Homo sapien
gtcgcttctctacaaccaggatgat

SEQ ID NO: 4956848 - DNA, 25 bp, Homo sapien
tcatttctgagtaccccagaatatg

SEQ ID NO: 4956849 - DNA, 25 bp, Homo sapien
tagccaagcaatttatactcatttc

SEQ ID NO: 4956850 - DNA, 25 bp, Homo sapien
gtaacatcacatctttccaaaacca

SEQ ID NO: 4956851 - DNA, 25 bp, Homo sapien
taacatcacatctttccaaaaccat

SEQ ID NO: 4956852 - DNA, 25 bp, Homo sapien
tgtaacatcacatctttccaaaacc

SEQ ID NO: 4956853 - DNA, 25 bp, Homo sapien
ctgtaacatcacatctttccaaaac

SEQ ID NO: 4956854 - DNA, 25 bp, Homo sapien
catcctgagagaaacggaatttcgt

SEQ ID NO: 4956855 - DNA, 25 bp, Homo sapien
taaatgtattcttgatgagtctctc

SEQ ID NO: 4956856 - DNA, 25 bp, Homo sapien
aagcagaattgaagagtatcatata

SEQ ID NO: 4956857 - DNA, 25 bp, Homo sapien
tctaaagtatttctgctaaatgtat

SEQ ID NO: 4956858 - DNA, 25 bp, Homo sapien
ggcatgcttgagatctttgttcaaa

SEQ ID NO: 4956859 - DNA, 25 bp, Homo sapien
cgtggcatgcttgagatctttgttc

SEQ ID NO: 4956860 - DNA, 25 bp, Homo sapien
actcgtggcatgcttgagatctttg

SEQ ID NO: 4956861 - DNA, 25 bp, Homo sapien
tcgtggcatgcttgagatctttgtt

SEQ ID NO: 4956862 - DNA, 25 bp, Homo sapien
gctgtttcgagttgtctttccattg

SEQ ID NO: 4956863 - DNA, 25 bp, Homo sapien
tctgaattccttcatagtccgtgga

SEQ ID NO: 4956864 - DNA, 25 bp, Homo sapien
ccattgtcagatacagtcgatgaaa

SEQ ID NO: 4956865 - DNA, 25 bp, Homo sapien
tgctgctataccagctgctctgctg

SEQ ID NO: 4956866 - DNA, 25 bp, Homo sapien
tatcaagatttccagcacactaacc

SEQ ID NO: 4956867 - DNA, 25 bp, Homo sapien
cacgtcctatttaaacaatgttatg

SEQ ID NO: 4956868 - DNA, 25 bp, Homo sapien
taaccacctttgcacgtcctattta

SEQ ID NO: 4956869 - DNA, 25 bp, Homo sapien
atttccagcacactaaccacctttg

SEQ ID NO: 4956870 - DNA, 25 bp, Homo sapien
catgatcttgctgggttactcttcc

SEQ ID NO: 4956871 - DNA, 25 bp, Homo sapien
catatttctcacactcacgatacat

SEQ ID NO: 4956872 - DNA, 25 bp, Homo sapien
ccatatttctcacactcacgataca

SEQ ID NO: 4956873 - DNA, 25 bp, Homo sapien
cccatatttctcacactcacgatac

SEQ ID NO: 4956874 - DNA, 25 bp, Homo sapien
cccccatatttctcacactcacgat

SEQ ID NO: 4956875 - DNA, 25 bp, Homo sapien
tcagctcagaatgagagggaagtgt

SEQ ID NO: 4956876 - DNA, 25 bp, Homo sapien
ggtgtgaatgaactgctttgaggaa

SEQ ID NO: 4956877 - DNA, 25 bp, Homo sapien
tgaatgaactgctttgaggaatgag

SEQ ID NO: 4956878 - DNA, 25 bp, Homo sapien
gaagggtgtgaatgaactgctttga

SEQ ID NO: 4956879 - DNA, 25 bp, Homo sapien
tacacacattttcgcttccagtcat

SEQ ID NO: 4956880 - DNA, 25 bp, Homo sapien
ctgggtctacacacattttcgcttc

SEQ ID NO: 4956881 - DNA, 25 bp, Homo sapien
gcttccagtcataagcagcaggttg

SEQ ID NO: 4956882 - DNA, 25 bp, Homo sapien
cattttcgcttccagtcataagcag

SEQ ID NO: 4956883 - DNA, 25 bp, Homo sapien
tcatgctgaaaacggaactccgctt

SEQ ID NO: 4956884 - DNA, 25 bp, Homo sapien
gaaaacggaactccgcttcttcaca

SEQ ID NO: 4956885 - DNA, 25 bp, Homo sapien
aatcatgctgaaaacggaactccgc

SEQ ID NO: 4956886 - DNA, 25 bp, Homo sapien
cttacaatcatgctgaaaacggaac

SEQ ID NO: 4956887 - DNA, 25 bp, Homo sapien
ttcatcatccaagaaggcattcagg

SEQ ID NO: 4956888 - DNA, 25 bp, Homo sapien
tgaaccggatgctctgtcagtctcc

SEQ ID NO: 4956889 - DNA, 25 bp, Homo sapien
gatggcctcagattgaggtcccagg

SEQ ID NO: 4956890 - DNA, 25 bp, Homo sapien
agtgctggactacccagtaattggg

SEQ ID NO: 4956891 - DNA, 25 bp, Homo sapien
catcacaagcttccccgtgtggttc

SEQ ID NO: 4956892 - DNA, 25 bp, Homo sapien
caagcttccccgtgtggttctgtgt

SEQ ID NO: 4956893 - DNA, 25 bp, Homo sapien
acaagcttccccgtgtggttctgtg

SEQ ID NO: 4956894 - DNA, 25 bp, Homo sapien
gcttccccgtgtggttctgtgttag

SEQ ID NO: 4956895 - DNA, 25 bp, Homo sapien
gaggctgcccgttggatctggaata

SEQ ID NO: 4956896 - DNA, 25 bp, Homo sapien
gaacaggattcattgacacaggcaa

SEQ ID NO: 4956897 - DNA, 25 bp, Homo sapien
gaagagtgtgacatgatggaggctg

SEQ ID NO: 4956898 - DNA, 25 bp, Homo sapien
gaaaatcccaggtagtgagaacagg

SEQ ID NO: 4956899 - DNA, 25 bp, Homo sapien
agagaagcttgtataagtcattagt

SEQ ID NO: 4956900 - DNA, 25 bp, Homo sapien
gagaagcttgtataagtcattagtg

SEQ ID NO: 4956901 - DNA, 25 bp, Homo sapien
aagcttgtataagtcattagtgggg

SEQ ID NO: 4956902 - DNA, 25 bp, Homo sapien
gaagcttgtataagtcattagtggg

SEQ ID NO: 4956903 - DNA, 25 bp, Homo sapien
cttgatgtatatgcacccagtctct

SEQ ID NO: 4956904 - DNA, 25 bp, Homo sapien
taagatgtgagttaacgctttcctc

SEQ ID NO: 4956905 - DNA, 25 bp, Homo sapien
tttaagatgtgagttaacgctttcc

SEQ ID NO: 4956906 - DNA, 25 bp, Homo sapien
agatgtgagttaacgctttcctcat

SEQ ID NO: 4956907 - DNA, 25 bp, Homo sapien
gatttaagatgtgagttaacgcttt

SEQ ID NO: 4956908 - DNA, 25 bp, Homo sapien
gggtcgcctgcttgagggagttgag

SEQ ID NO: 4956909 - DNA, 25 bp, Homo sapien
catacaggagacctctttgccctgc

SEQ ID NO: 4956910 - DNA, 25 bp, Homo sapien
gagttgaggactgagtgcatacagg

SEQ ID NO: 4956911 - DNA, 25 bp, Homo sapien
ccaggagcggtttgtcagtgcacca

SEQ ID NO: 4956912 - DNA, 25 bp, Homo sapien
ttaccacccagtgcagggggatgac

SEQ ID NO: 4956913 - DNA, 25 bp, Homo sapien
tgcacgccattcttctagctcattt

SEQ ID NO: 4956914 - DNA, 25 bp, Homo sapien
tttacaaaatcttctgccctgtagt

SEQ ID NO: 4956915 - DNA, 25 bp, Homo sapien
acaaaatcttctgccctgtagtttg

SEQ ID NO: 4956916 - DNA, 25 bp, Homo sapien
agctgctcgtcttgtcttgcacgcc

SEQ ID NO: 4956917 - DNA, 25 bp, Homo sapien
gctggatgggaatcgatccacttgt

SEQ ID NO: 4956918 - DNA, 25 bp, Homo sapien
ctgggggtgacaccatccaggatgt

SEQ ID NO: 4956919 - DNA, 25 bp, Homo sapien
cactccgtcaacagcatctggactc

SEQ ID NO: 4956920 - DNA, 25 bp, Homo sapien
tcactccgtcaacagcatctggact

SEQ ID NO: 4956921 - DNA, 25 bp, Homo sapien
gtcttgctctcttgcagtgccaaga

SEQ ID NO: 4956922 - DNA, 25 bp, Homo sapien
tcttgatacccatagtcttgctctc

SEQ ID NO: 4956923 - DNA, 25 bp, Homo sapien
cttgttgttcttgatacccatagtc

SEQ ID NO: 4956924 - DNA, 25 bp, Homo sapien
ggtcttcttcactggcgccagccac

SEQ ID NO: 4956925 - DNA, 25 bp, Homo sapien
caccgaagggatgttgctcagccat

SEQ ID NO: 4956926 - DNA, 25 bp, Homo sapien
acaccgaagggatgttgctcagcca

SEQ ID NO: 4956927 - DNA, 25 bp, Homo sapien
tgcctggcaatcgtggctgtggtag

SEQ ID NO: 4956928 - DNA, 25 bp, Homo sapien
catgcctggcaatcgtggctgtggt

SEQ ID NO: 4956929 - DNA, 25 bp, Homo sapien
cctggcaatcgtggctgtggtagtg

SEQ ID NO: 4956930 - DNA, 25 bp, Homo sapien
ccatgcctggcaatcgtggctgtgg

SEQ ID NO: 4956931 - DNA, 25 bp, Homo sapien
ttagagaatctcatgtgtcttggga

SEQ ID NO: 4956932 - DNA, 25 bp, Homo sapien
tacactttcgaggttgcttgctttc

SEQ ID NO: 4956933 - DNA, 25 bp, Homo sapien
cagtgagtcgtagatttggttccct

SEQ ID NO: 4956934 - DNA, 25 bp, Homo sapien
tataggtgatctggcccttttctct

SEQ ID NO: 4956935 - DNA, 25 bp, Homo sapien
cacaaagcgctgatagcttgctctg

SEQ ID NO: 4956936 - DNA, 25 bp, Homo sapien
aattccaacatccttgagcatggcc

SEQ ID NO: 4956937 - DNA, 25 bp, Homo sapien
agcgctgatagcttgctctgataaa

SEQ ID NO: 4956938 - DNA, 25 bp, Homo sapien
gaaggctgaattccaacatccttga

SEQ ID NO: 4956939 - DNA, 25 bp, Homo sapien
agataaaactgtgccgcctttcctg

SEQ ID NO: 4956940 - DNA, 25 bp, Homo sapien
gcctttcctgctagtgtaccttgaa

SEQ ID NO: 4956941 - DNA, 25 bp, Homo sapien
taccttgaatctctgtgctgtgacg

SEQ ID NO: 4956942 - DNA, 25 bp, Homo sapien
gctgtgacgtaacagaggcatccat

SEQ ID NO: 4956943 - DNA, 25 bp, Homo sapien
ctacagtgagtaatcaatctgcagt

SEQ ID NO: 4956944 - DNA, 25 bp, Homo sapien
taagcagattcattgaatgggccac

SEQ ID NO: 4956945 - DNA, 25 bp, Homo sapien
gattcattgaatgggccacaaattc

SEQ ID NO: 4956946 - DNA, 25 bp, Homo sapien
tgagtaatcaatctgcagtttaaaa

SEQ ID NO: 4956947 - DNA, 25 bp, Homo sapien
tggtgtttgcaagtcagtgtaacat

SEQ ID NO: 4956948 - DNA, 25 bp, Homo sapien
gcaagtcagtgtaacatttttgaaa

SEQ ID NO: 4956949 - DNA, 25 bp, Homo sapien
gattttggtgtttgcaagtcagtgt

SEQ ID NO: 4956950 - DNA, 25 bp, Homo sapien
cagtaagtatgattttggtgtttgc

SEQ ID NO: 4956951 - DNA, 25 bp, Homo sapien
ctgaatctagtctctggttaggagc

SEQ ID NO: 4956952 - DNA, 25 bp, Homo sapien
ggttaggagctgctagcccaccatt

SEQ ID NO: 4956953 - DNA, 25 bp, Homo sapien
gggactgaataagaccaagcatggg

SEQ ID NO: 4956954 - DNA, 25 bp, Homo sapien
tagactaccagtcttattgacaggg

SEQ ID NO: 4956955 - DNA, 25 bp, Homo sapien
tctctcttcctataatatttaccat

SEQ ID NO: 4956956 - DNA, 25 bp, Homo sapien
cctgtgttctataatggaaactgta

SEQ ID NO: 4956957 - DNA, 25 bp, Homo sapien
ggattgagaatcatgtttttgtatg

SEQ ID NO: 4956958 - DNA, 25 bp, Homo sapien
ccattttcatctatagcacttatag

SEQ ID NO: 4956959 - DNA, 25 bp, Homo sapien
tgtatgattggtacttagtttggcc

SEQ ID NO: 4956960 - DNA, 25 bp, Homo sapien
tccttgtatatcagagcatgtaatg

SEQ ID NO: 4956961 - DNA, 25 bp, Homo sapien
ggcaaattctaactttccttgtata

SEQ ID NO: 4956962 - DNA, 25 bp, Homo sapien
taagccctatttagttgacaggaag

SEQ ID NO: 4956963 - DNA, 25 bp, Homo sapien
acagcaatataatgactaggaaaag

SEQ ID NO: 4956964 - DNA, 25 bp, Homo sapien
taagatttgagtaacagaccatgga

SEQ ID NO: 4956965 - DNA, 25 bp, Homo sapien
cattgggagttccagctatatagcc

SEQ ID NO: 4956966 - DNA, 25 bp, Homo sapien
tatatagcctcaaacaagaaacggg

SEQ ID NO: 4956967 - DNA, 25 bp, Homo sapien
tatcaagttatatcccagggcaatg

SEQ ID NO: 4956968 - DNA, 25 bp, Homo sapien
tgtacaccacatggactaagtcagg

SEQ ID NO: 4956969 - DNA, 25 bp, Homo sapien
tagcatcagttgatgtggagtcact

SEQ ID NO: 4956970 - DNA, 25 bp, Homo sapien
ttgtttgccaattcacctccaggtg

SEQ ID NO: 4956971 - DNA, 25 bp, Homo sapien
tctcattggctaatgtgtacaccac

SEQ ID NO: 4956972 - DNA, 25 bp, Homo sapien
tctgcctccttcttcgctgcttctg

SEQ ID NO: 4956973 - DNA, 25 bp, Homo sapien
tgcctccttcttcgctgcttctggt

SEQ ID NO: 4956974 - DNA, 25 bp, Homo sapien
tccttcttcgctgcttctggtgata

SEQ ID NO: 4956975 - DNA, 25 bp, Homo sapien
ctgcattccaggtacttgcccaact

SEQ ID NO: 4956976 - DNA, 25 bp, Homo sapien
ttcccttatgcaaacaggtgtcgac

SEQ ID NO: 4956977 - DNA, 25 bp, Homo sapien
ccagtaggacctttcccatggatac

SEQ ID NO: 4956978 - DNA, 25 bp, Homo sapien
aggatgcccgttatacacagcaaag

SEQ ID NO: 4956979 - DNA, 25 bp, Homo sapien
gagaaccaggatgcccgttatacac

SEQ ID NO: 4956980 - DNA, 25 bp, Homo sapien
cctgtaaatcctggttatcggcgat

SEQ ID NO: 4956981 - DNA, 25 bp, Homo sapien
taaatcctggttatcggcgatgtga

SEQ ID NO: 4956982 - DNA, 25 bp, Homo sapien
taggtgtgcccagctatttgccact

SEQ ID NO: 4956983 - DNA, 25 bp, Homo sapien
gagtaaatctgctagtgaagaagtc

SEQ ID NO: 4956984 - DNA, 25 bp, Homo sapien
cataacattaccttgtgaggttgca

SEQ ID NO: 4956985 - DNA, 25 bp, Homo sapien
tactgtagtttaaaggtgttcactg

SEQ ID NO: 4956986 - DNA, 25 bp, Homo sapien
catacacacatacgtttattccagc

SEQ ID NO: 4956987 - DNA, 25 bp, Homo sapien
catttatacgctgttgatgggagtg

SEQ ID NO: 4956988 - DNA, 25 bp, Homo sapien
ttcacattaacaaagacaaggaatt

SEQ ID NO: 4956989 - DNA, 25 bp, Homo sapien
aatcattttaacatgaagacacata

SEQ ID NO: 4956990 - DNA, 25 bp, Homo sapien
aagtattgccttatgttctgctcca

SEQ ID NO: 4956991 - DNA, 25 bp, Homo sapien
tctgctccaaccaggtagccatgtg

SEQ ID NO: 4956992 - DNA, 25 bp, Homo sapien
ttaagtccctcggataaagcgttgc

SEQ ID NO: 4956993 - DNA, 25 bp, Homo sapien
tgaccctgcgcaaggcacgtgaatt

SEQ ID NO: 4956994 - DNA, 25 bp, Homo sapien
ggcaggtctgcatgtattgcaggga

SEQ ID NO: 4956995 - DNA, 25 bp, Homo sapien
acagaatagggccatgacttttgaa

SEQ ID NO: 4956996 - DNA, 25 bp, Homo sapien
tagatatatccgcagtcctccactc

SEQ ID NO: 4956997 - DNA, 25 bp, Homo sapien
ctccactctgtccatggatttcaaa

SEQ ID NO: 4956998 - DNA, 25 bp, Homo sapien
tttgtgtcaccctcttgtatttggc

SEQ ID NO: 4956999 - DNA, 25 bp, Homo sapien
tatagacacacgttaccatgcccaa

SEQ ID NO: 4957000 - DNA, 25 bp, Homo sapien
ccaccaagcagaagtaagcacaata

SEQ ID NO: 4957001 - DNA, 25 bp, Homo sapien
tcgctcaggcttgcgtggaattcct

SEQ ID NO: 4957002 - DNA, 25 bp, Homo sapien
tatttctggactgttaccaggaaac

SEQ ID NO: 4957003 - DNA, 25 bp, Homo sapien
aattcatatttctggactgttacca

SEQ ID NO: 4957004 - DNA, 25 bp, Homo sapien
catatttctggactgttaccaggaa

SEQ ID NO: 4957005 - DNA, 25 bp, Homo sapien
ttcatatttctggactgttaccagg

SEQ ID NO: 4957006 - DNA, 25 bp, Homo sapien
aattctccggagacattgaaatgga

SEQ ID NO: 4957007 - DNA, 25 bp, Homo sapien
ttgtggggtgaattctccggagaca

SEQ ID NO: 4957008 - DNA, 25 bp, Homo sapien
gacaccagcctcagggggaatactg

SEQ ID NO: 4957009 - DNA, 25 bp, Homo sapien
tggagagactctaagggacaccagc

SEQ ID NO: 4957010 - DNA, 25 bp, Homo sapien
taggactgattagatgcaaagaggt

SEQ ID NO: 4957011 - DNA, 25 bp, Homo sapien
gatttgaccatcagcgggtttagga

SEQ ID NO: 4957012 - DNA, 25 bp, Homo sapien
cagattgatcaggatggatttgacc

SEQ ID NO: 4957013 - DNA, 25 bp, Homo sapien
gaacttcattcgttgtaatgcagaa

SEQ ID NO: 4957014 - DNA, 25 bp, Homo sapien
tgtcaaagaccgtctttggagaagt

SEQ ID NO: 4957015 - DNA, 25 bp, Homo sapien
caaagaccgtctttggagaagttgg

SEQ ID NO: 4957016 - DNA, 25 bp, Homo sapien
gatttgtcaaagaccgtctttggag

SEQ ID NO: 4957017 - DNA, 25 bp, Homo sapien
gaagatttgtcaaagaccgtctttg

SEQ ID NO: 4957018 - DNA, 25 bp, Homo sapien
acagtttcagtaggctgcacaaaca

SEQ ID NO: 4957019 - DNA, 25 bp, Homo sapien
ctgacagtttcagtaggctgcacaa

SEQ ID NO: 4957020 - DNA, 25 bp, Homo sapien
ttctgacagtttcagtaggctgcac

SEQ ID NO: 4957021 - DNA, 25 bp, Homo sapien
tgacagtttcagtaggctgcacaaa

SEQ ID NO: 4957022 - DNA, 25 bp, Homo sapien
catgaggtgcttaggtaatgcaaca

SEQ ID NO: 4957023 - DNA, 25 bp, Homo sapien
ccatgaggtgcttaggtaatgcaac

SEQ ID NO: 4957024 - DNA, 25 bp, Homo sapien
cagcacccaattgtcttttgctgtt

SEQ ID NO: 4957025 - DNA, 25 bp, Homo sapien
tccacagcacccaattgtcttttgc

SEQ ID NO: 4957026 - DNA, 25 bp, Homo sapien
cacagcacccaattgtcttttgctg

SEQ ID NO: 4957027 - DNA, 25 bp, Homo sapien
tctccacagcacccaattgtctttt

SEQ ID NO: 4957028 - DNA, 25 bp, Homo sapien
ctcctcttcatttgtcctttttgct

SEQ ID NO: 4957029 - DNA, 25 bp, Homo sapien
ctcctcctcttcatttgtccttttt

SEQ ID NO: 4957030 - DNA, 25 bp, Homo sapien
ccctcctcctcttcatttgtccttt

SEQ ID NO: 4957031 - DNA, 25 bp, Homo sapien
tcctcctcttcatttgtcctttttg

SEQ ID NO: 4957032 - DNA, 25 bp, Homo sapien
aattagtaactgtgaggctacatac

SEQ ID NO: 4957033 - DNA, 25 bp, Homo sapien
caggtaattagtaactgtgaggcta

SEQ ID NO: 4957034 - DNA, 25 bp, Homo sapien
tcaggtaattagtaactgtgaggct

SEQ ID NO: 4957035 - DNA, 25 bp, Homo sapien
ggtaattagtaactgtgaggctaca

SEQ ID NO: 4957036 - DNA, 25 bp, Homo sapien
ttgtatgaatttcccccacagcaga

SEQ ID NO: 4957037 - DNA, 25 bp, Homo sapien
agaatccttgctaccccactcttca

SEQ ID NO: 4957038 - DNA, 25 bp, Homo sapien
tggccccaaatttgtatgaatttcc

SEQ ID NO: 4957039 - DNA, 25 bp, Homo sapien
tgatgtcagtgatccaaattcagaa

SEQ ID NO: 4957040 - DNA, 25 bp, Homo sapien
ttggcccactggagaaagcttccag

SEQ ID NO: 4957041 - DNA, 25 bp, Homo sapien
tgcttggtggcttgtgaatactgaa

SEQ ID NO: 4957042 - DNA, 25 bp, Homo sapien
tgtagctttgccctggcacctcctg

SEQ ID NO: 4957043 - DNA, 25 bp, Homo sapien
tttgccctggcacctcctgtattca

SEQ ID NO: 4957044 - DNA, 25 bp, Homo sapien
ctggctgttgcagatggttttgggg

SEQ ID NO: 4957045 - DNA, 25 bp, Homo sapien
gaattctctatatccctcagtgggt

SEQ ID NO: 4957046 - DNA, 25 bp, Homo sapien
aaggctggctgtacccatagactga

SEQ ID NO: 4957047 - DNA, 25 bp, Homo sapien
caaaggtccccatggtaagtcacaa

SEQ ID NO: 4957048 - DNA, 25 bp, Homo sapien
tctcaaaagtggtagaagtcaaggc

SEQ ID NO: 4957049 - DNA, 25 bp, Homo sapien
aatattttcaagattgaccaggaat

SEQ ID NO: 4957050 - DNA, 25 bp, Homo sapien
ttcaagattgaccaggaattttccc

SEQ ID NO: 4957051 - DNA, 25 bp, Homo sapien
ttttcaagattgaccaggaattttc

SEQ ID NO: 4957052 - DNA, 25 bp, Homo sapien
tcaaatattttcaagattgaccagg

SEQ ID NO: 4957053 - DNA, 25 bp, Homo sapien
tgttgtcactattacttcctccagg

SEQ ID NO: 4957054 - DNA, 25 bp, Homo sapien
gatcccagcgcattctttaggctca

SEQ ID NO: 4957055 - DNA, 25 bp, Homo sapien
tgccaatttcactggatcccagcgc

SEQ ID NO: 4957056 - DNA, 25 bp, Homo sapien
cagtaggcatactcacattcttcag

SEQ ID NO: 4957057 - DNA, 25 bp, Homo sapien
tcaatgtcaaaggggcactactgct

SEQ ID NO: 4957058 - DNA, 25 bp, Homo sapien
ctgtcaatgtcaaaggggcactact

SEQ ID NO: 4957059 - DNA, 25 bp, Homo sapien
tgtcaatgtcaaaggggcactactg

SEQ ID NO: 4957060 - DNA, 25 bp, Homo sapien
gtcaatgtcaaaggggcactactgc

SEQ ID NO: 4957061 - DNA, 25 bp, Homo sapien
tgccaggtaccaccacggatgcact

SEQ ID NO: 4957062 - DNA, 25 bp, Homo sapien
ctgccaggtaccaccacggatgcac

SEQ ID NO: 4957063 - DNA, 25 bp, Homo sapien
aggtaccaccacggatgcactatag

SEQ ID NO: 4957064 - DNA, 25 bp, Homo sapien
ccaggtaccaccacggatgcactat

SEQ ID NO: 4957065 - DNA, 25 bp, Homo sapien
tctttacttccgtgatgccggcatc

SEQ ID NO: 4957066 - DNA, 25 bp, Homo sapien
tcttctttacttccgtgatgccggc

SEQ ID NO: 4957067 - DNA, 25 bp, Homo sapien
tacttccgtgatgccggcatctcat

SEQ ID NO: 4957068 - DNA, 25 bp, Homo sapien
cccgctcttctttacttccgtgatg

SEQ ID NO: 4957069 - DNA, 25 bp, Homo sapien
atgtttccagctctccacggagacc

SEQ ID NO: 4957070 - DNA, 25 bp, Homo sapien
tatgtttccagctctccacggagac

SEQ ID NO: 4957071 - DNA, 25 bp, Homo sapien
tgtttccagctctccacggagacct

SEQ ID NO: 4957072 - DNA, 25 bp, Homo sapien
tttccagctctccacggagaccttt

SEQ ID NO: 4957073 - DNA, 25 bp, Homo sapien
gagcatatgagggttcgggagccga

SEQ ID NO: 4957074 - DNA, 25 bp, Homo sapien
acgtcttgcatctggactgctatgg

SEQ ID NO: 4957075 - DNA, 25 bp, Homo sapien
actggtgaagaggttaacgtcttgc

SEQ ID NO: 4957076 - DNA, 25 bp, Homo sapien
ccacaagaatgcaaggattaagcag

SEQ ID NO: 4957077 - DNA, 25 bp, Homo sapien
cttctccatgccttctgctatgcca

SEQ ID NO: 4957078 - DNA, 25 bp, Homo sapien
tctgctactgctgtatccaaaagga

SEQ ID NO: 4957079 - DNA, 25 bp, Homo sapien
tgaaggcctctttctgctactgctg

SEQ ID NO: 4957080 - DNA, 25 bp, Homo sapien
cctctttctgctactgctgtatcca

SEQ ID NO: 4957081 - DNA, 25 bp, Homo sapien
tataaatgggcggtcccctgaacaa

SEQ ID NO: 4957082 - DNA, 25 bp, Homo sapien
tctagctcattggtatgatttggct

SEQ ID NO: 4957083 - DNA, 25 bp, Homo sapien
tggcccaggcggagagaattgaatc

SEQ ID NO: 4957084 - DNA, 25 bp, Homo sapien
tggaggtgagtagccagctctagct

SEQ ID NO: 4957085 - DNA, 25 bp, Homo sapien
cttgtaaactttccaactttgtgtg

SEQ ID NO: 4957086 - DNA, 25 bp, Homo sapien
tgttcttatagatgtacttattcct

SEQ ID NO: 4957087 - DNA, 25 bp, Homo sapien
tagatgtacttattcctgtaggtag

SEQ ID NO: 4957088 - DNA, 25 bp, Homo sapien
atgtacttattcctgtaggtagact

SEQ ID NO: 4957089 - DNA, 25 bp, Homo sapien
cttatagatgtacttattcctgtag

SEQ ID NO: 4957090 - DNA, 25 bp, Homo sapien
gaaaaataagctccctggtccatag

SEQ ID NO: 4957091 - DNA, 25 bp, Homo sapien
taagttggacggctgtgagtctacc

SEQ ID NO: 4957092 - DNA, 25 bp, Homo sapien
taacgtgatgctggatggctcaaca

SEQ ID NO: 4957093 - DNA, 25 bp, Homo sapien
tcacactctacactatggccctggg

SEQ ID NO: 4957094 - DNA, 25 bp, Homo sapien
ccattgccgaattttacattcttca

SEQ ID NO: 4957095 - DNA, 25 bp, Homo sapien
ttcagaatgtgaacaggctcttgtc

SEQ ID NO: 4957096 - DNA, 25 bp, Homo sapien
tataaagtgcaagtgactccagcat

SEQ ID NO: 4957097 - DNA, 25 bp, Homo sapien
tcttcaatagatgattctctcccaa

SEQ ID NO: 4957098 - DNA, 25 bp, Homo sapien
ctgcaataatgaggtataactgcat

SEQ ID NO: 4957099 - DNA, 25 bp, Homo sapien
gggtatcccaagctcctacagacga

SEQ ID NO: 4957100 - DNA, 25 bp, Homo sapien
ccttgtgcacggcttgaacacctgg

SEQ ID NO: 4957101 - DNA, 25 bp, Homo sapien
cactggccgctgtggagtatctcca

SEQ ID NO: 4957102 - DNA, 25 bp, Homo sapien
gcacttcccagcgatcgtcacaaat

SEQ ID NO: 4957103 - DNA, 25 bp, Homo sapien
gacaaccttcatttagaaatagcaa

SEQ ID NO: 4957104 - DNA, 25 bp, Homo sapien
caagggaaacaagggaactatagtg

SEQ ID NO: 4957105 - DNA, 25 bp, Homo sapien
aaaaataggtgatcaaacttcatat

SEQ ID NO: 4957106 - DNA, 25 bp, Homo sapien
caaacttatcaacatacaatgcaga

SEQ ID NO: 4957107 - DNA, 25 bp, Homo sapien
aaatatgcttgggtatgctgatcca

SEQ ID NO: 4957108 - DNA, 25 bp, Homo sapien
gaaaggcgtctcaataggtcagtag

SEQ ID NO: 4957109 - DNA, 25 bp, Homo sapien
gagagttggcttcacctactattca

SEQ ID NO: 4957110 - DNA, 25 bp, Homo sapien
taaactattgacaggtgaccacaca

SEQ ID NO: 4957111 - DNA, 25 bp, Homo sapien
ccaagacccgaatctgcttaggagt

SEQ ID NO: 4957112 - DNA, 25 bp, Homo sapien
cttaggagtctccaacttgtactca

SEQ ID NO: 4957113 - DNA, 25 bp, Homo sapien
gctctcctgttcacttgatagaaca

SEQ ID NO: 4957114 - DNA, 25 bp, Homo sapien
caacttgtactcaagcttctttctg

SEQ ID NO: 4957115 - DNA, 25 bp, Homo sapien
attttccaaataagtctcattctcc

SEQ ID NO: 4957116 - DNA, 25 bp, Homo sapien
ttggttcctgtctggaatgttcctt

SEQ ID NO: 4957117 - DNA, 25 bp, Homo sapien
tatttctggggctttggttcctgtc

SEQ ID NO: 4957118 - DNA, 25 bp, Homo sapien
gggctttggttcctgtctggaatgt

SEQ ID NO: 4957119 - DNA, 25 bp, Homo sapien
gatggccaatgatctttcgttaaca

SEQ ID NO: 4957120 - DNA, 25 bp, Homo sapien
tgcacaaaaacatgaacggaaggaa

SEQ ID NO: 4957121 - DNA, 25 bp, Homo sapien
caatgagttagctagtttcagagaa

SEQ ID NO: 4957122 - DNA, 25 bp, Homo sapien
gacatactggtacttcaactctgct

SEQ ID NO: 4957123 - DNA, 25 bp, Homo sapien
taattgcatgaatttccacttttgc

SEQ ID NO: 4957124 - DNA, 25 bp, Homo sapien
cacataattgcatgaatttccactt

SEQ ID NO: 4957125 - DNA, 25 bp, Homo sapien
attgcatgaatttccacttttgctg

SEQ ID NO: 4957126 - DNA, 25 bp, Homo sapien
cataattgcatgaatttccactttt

SEQ ID NO: 4957127 - DNA, 25 bp, Homo sapien
ggctgagcccgttagcaaaataaag

SEQ ID NO: 4957128 - DNA, 25 bp, Homo sapien
tggaaccatccctactcaggtacac

SEQ ID NO: 4957129 - DNA, 25 bp, Homo sapien
tgtgagccaccgctaatttgtgaac

SEQ ID NO: 4957130 - DNA, 25 bp, Homo sapien
catgtaactgtcaaggatgagcagc

SEQ ID NO: 4957131 - DNA, 25 bp, Homo sapien
gaaacatcactcttccgcgttaagg

SEQ ID NO: 4957132 - DNA, 25 bp, Homo sapien
ggacagagcctcacacaagtgttgt

SEQ ID NO: 4957133 - DNA, 25 bp, Homo sapien
tagtctcattgcacttgagcaaaga

SEQ ID NO: 4957134 - DNA, 25 bp, Homo sapien
gacgattcactatgactagcgttag

SEQ ID NO: 4957135 - DNA, 25 bp, Homo sapien
ctgttgatcagtagagagaaaccaa

SEQ ID NO: 4957136 - DNA, 25 bp, Homo sapien
gatacacagaggcataccatctaga

SEQ ID NO: 4957137 - DNA, 25 bp, Homo sapien
ggataaattgcccaagctcgactac

SEQ ID NO: 4957138 - DNA, 25 bp, Homo sapien
aatcttgggtctgtgtgttaaaacg

SEQ ID NO: 4957139 - DNA, 25 bp, Homo sapien
tatgacatccctatctctggttgag

SEQ ID NO: 4957140 - DNA, 25 bp, Homo sapien
tccagtccgtgcatgagaggtgtcc

SEQ ID NO: 4957141 - DNA, 25 bp, Homo sapien
tccaagttagggtgagaacacagca

SEQ ID NO: 4957142 - DNA, 25 bp, Homo sapien
caagactctaggtcaatgggtggca

SEQ ID NO: 4957143 - DNA, 25 bp, Homo sapien
gagggccctgccctaatatgatcag

SEQ ID NO: 4957144 - DNA, 25 bp, Homo sapien
cctgccctaatatgatcagtgagtt

SEQ ID NO: 4957145 - DNA, 25 bp, Homo sapien
ttaagagggccctgccctaatatga

SEQ ID NO: 4957146 - DNA, 25 bp, Homo sapien
atatgatcagtgagttgtactggtc

SEQ ID NO: 4957147 - DNA, 25 bp, Homo sapien
ctttctggccttttggtccagaatt

SEQ ID NO: 4957148 - DNA, 25 bp, Homo sapien
ttctggccttttggtccagaatttc

SEQ ID NO: 4957149 - DNA, 25 bp, Homo sapien
cctttctggccttttggtccagaat

SEQ ID NO: 4957150 - DNA, 25 bp, Homo sapien
tcttgtagaggagagactgtactgt

SEQ ID NO: 4957151 - DNA, 25 bp, Homo sapien
tagtctgcagtacaactagaacagc

SEQ ID NO: 4957152 - DNA, 25 bp, Homo sapien
catatttgacaattatcggacttat

SEQ ID NO: 4957153 - DNA, 25 bp, Homo sapien
tgacatctctaccagattggtgtct

SEQ ID NO: 4957154 - DNA, 25 bp, Homo sapien
ctgggagtcctcgacttccaggaaa

SEQ ID NO: 4957155 - DNA, 25 bp, Homo sapien
attgctccccgatcacctttaagac

SEQ ID NO: 4957156 - DNA, 25 bp, Homo sapien
aggaaagccaattgctccccgatca

SEQ ID NO: 4957157 - DNA, 25 bp, Homo sapien
gagtcctcgacttccaggaaagcca

SEQ ID NO: 4957158 - DNA, 25 bp, Homo sapien
ctggaaatcctcgtggaccactttc

SEQ ID NO: 4957159 - DNA, 25 bp, Homo sapien
cagtgggacctcgatctcctttttc

SEQ ID NO: 4957160 - DNA, 25 bp, Homo sapien
gacctggaaatcctcgtggaccact

SEQ ID NO: 4957161 - DNA, 25 bp, Homo sapien
tccagtgggacctcgatctcctttt

SEQ ID NO: 4957162 - DNA, 25 bp, Homo sapien
ctaacacttttctatgttctgagaa

SEQ ID NO: 4957163 - DNA, 25 bp, Homo sapien
taacacttttctatgttctgagaac

SEQ ID NO: 4957164 - DNA, 25 bp, Homo sapien
atacattgtaaacacgctcctctaa

SEQ ID NO: 4957165 - DNA, 25 bp, Homo sapien
tcattagtgatgttattcagtactt

SEQ ID NO: 4957166 - DNA, 25 bp, Homo sapien
ggtctgagaatgttcccaatctttc

SEQ ID NO: 4957167 - DNA, 25 bp, Homo sapien
aaagtgatatttctcaaggtctgag

SEQ ID NO: 4957168 - DNA, 25 bp, Homo sapien
ggcacaccgccatgataaatacact

SEQ ID NO: 4957169 - DNA, 25 bp, Homo sapien
tactcatttccgatttgcacatggg

SEQ ID NO: 4957170 - DNA, 25 bp, Homo sapien
gagcatggatgtttgtagggcacac

SEQ ID NO: 4957171 - DNA, 25 bp, Homo sapien
cactctcttgagctggactagacta

SEQ ID NO: 4957172 - DNA, 25 bp, Homo sapien
cagattttctatgttgagctgcaaa

SEQ ID NO: 4957173 - DNA, 25 bp, Homo sapien
attcagattttctatgttgagctgc

SEQ ID NO: 4957174 - DNA, 25 bp, Homo sapien
tattaaggacttggagatttcatct

SEQ ID NO: 4957175 - DNA, 25 bp, Homo sapien
ttcaaacttattaaggacttggaga

SEQ ID NO: 4957176 - DNA, 25 bp, Homo sapien
tgcagaagaatgtcattaaatcttt

SEQ ID NO: 4957177 - DNA, 25 bp, Homo sapien
aatctttgatcagttgtcatgctga

SEQ ID NO: 4957178 - DNA, 25 bp, Homo sapien
aaaacaaggtacttagctgcagaag

SEQ ID NO: 4957179 - DNA, 25 bp, Homo sapien
gaatgtcattaaatctttgatcagt

SEQ ID NO: 4957180 - DNA, 25 bp, Homo sapien
cccgtgagactttgagttatatcat

SEQ ID NO: 4957181 - DNA, 25 bp, Homo sapien
tgaactaactgagcaattcttcgtt

SEQ ID NO: 4957182 - DNA, 25 bp, Homo sapien
tgctcatgtgttccataaagacttc

SEQ ID NO: 4957183 - DNA, 25 bp, Homo sapien
tttgcattagttgaactaactgagc

SEQ ID NO: 4957184 - DNA, 25 bp, Homo sapien
taaactccagaataaatgtgttgac

SEQ ID NO: 4957185 - DNA, 25 bp, Homo sapien
gaattattttccgactcctgtctgc

SEQ ID NO: 4957186 - DNA, 25 bp, Homo sapien
gagcctatcagaagctgcggtccct

SEQ ID NO: 4957187 - DNA, 25 bp, Homo sapien
tgaacttggttagaaccttgaatta

SEQ ID NO: 4957188 - DNA, 25 bp, Homo sapien
gggcaatcagtgcagctttgaagga

SEQ ID NO: 4957189 - DNA, 25 bp, Homo sapien
tgccactattccaatgagagggatg

SEQ ID NO: 4957190 - DNA, 25 bp, Homo sapien
gatgagaactgcaaacacgaggagg

SEQ ID NO: 4957191 - DNA, 25 bp, Homo sapien
tattccaatgagagggatgagaact

SEQ ID NO: 4957192 - DNA, 25 bp, Homo sapien
ttcagtttctcttgaagggaagggc

SEQ ID NO: 4957193 - DNA, 25 bp, Homo sapien
cttcagtttctcttgaagggaaggg

SEQ ID NO: 4957194 - DNA, 25 bp, Homo sapien
agtttctcttgaagggaagggctgt

SEQ ID NO: 4957195 - DNA, 25 bp, Homo sapien
tcagtttctcttgaagggaagggct

SEQ ID NO: 4957196 - DNA, 25 bp, Homo sapien
tcaaatttcacagattcggagcagc

SEQ ID NO: 4957197 - DNA, 25 bp, Homo sapien
cagattcggagcagctatcagtgtc

SEQ ID NO: 4957198 - DNA, 25 bp, Homo sapien
gtcattgagcgagcatcaaatttca

SEQ ID NO: 4957199 - DNA, 25 bp, Homo sapien
agcaaagctgtcattgagcgagcat

SEQ ID NO: 4957200 - DNA, 25 bp, Homo sapien
tgttgattgtgaaagtgatcccact

SEQ ID NO: 4957201 - DNA, 25 bp, Homo sapien
attgtgaaagtgatcccactgctcc

SEQ ID NO: 4957202 - DNA, 25 bp, Homo sapien
tgattgtgaaagtgatcccactgct

SEQ ID NO: 4957203 - DNA, 25 bp, Homo sapien
gttgattgtgaaagtgatcccactg

SEQ ID NO: 4957204 - DNA, 25 bp, Homo sapien
atgtttgattatggctttgatcctc

SEQ ID NO: 4957205 - DNA, 25 bp, Homo sapien
ttgcactgagatagcacatccaggg

SEQ ID NO: 4957206 - DNA, 25 bp, Homo sapien
atactgatgattgcactgagatagc

SEQ ID NO: 4957207 - DNA, 25 bp, Homo sapien
tgatgattgcactgagatagcacat

SEQ ID NO: 4957208 - DNA, 25 bp, Homo sapien
tgattgcactgagatagcacatcca

SEQ ID NO: 4957209 - DNA, 25 bp, Homo sapien
catagaagtaattttggcctcgcct

SEQ ID NO: 4957210 - DNA, 25 bp, Homo sapien
gattccggagcacaaaaagaactat

SEQ ID NO: 4957211 - DNA, 25 bp, Homo sapien
tcaagttactcaactagggagcagg

SEQ ID NO: 4957212 - DNA, 25 bp, Homo sapien
cacaggcagtctactcccagaagat

SEQ ID NO: 4957213 - DNA, 25 bp, Homo sapien
ctttcgtcctaaagaaagcagcact

SEQ ID NO: 4957214 - DNA, 25 bp, Homo sapien
gaaagcagcactgatttatccactt

SEQ ID NO: 4957215 - DNA, 25 bp, Homo sapien
aaagcagcactgatttatccacttc

SEQ ID NO: 4957216 - DNA, 25 bp, Homo sapien
agcagcactgatttatccacttctc

SEQ ID NO: 4957217 - DNA, 25 bp, Homo sapien
ggtacatgaagaaaggaaatgacac

SEQ ID NO: 4957218 - DNA, 25 bp, Homo sapien
tggtacatgaagaaaggaaatgaca

SEQ ID NO: 4957219 - DNA, 25 bp, Homo sapien
gtacatgaagaaaggaaatgacaca

SEQ ID NO: 4957220 - DNA, 25 bp, Homo sapien
ctggtacatgaagaaaggaaatgac

SEQ ID NO: 4957221 - DNA, 25 bp, Homo sapien
ttccattatcttctgcgggggctgt

SEQ ID NO: 4957222 - DNA, 25 bp, Homo sapien
acttttggtttctactcctgggctg

SEQ ID NO: 4957223 - DNA, 25 bp, Homo sapien
cgggggctgtctttcaaatcgccaa

SEQ ID NO: 4957224 - DNA, 25 bp, Homo sapien
cttttggtttctactcctgggctgc

SEQ ID NO: 4957225 - DNA, 25 bp, Homo sapien
agtggaaggctgcagtgagtcacga

SEQ ID NO: 4957226 - DNA, 25 bp, Homo sapien
tggaaggctgcagtgagtcacgatc

SEQ ID NO: 4957227 - DNA, 25 bp, Homo sapien
gagtggaaggctgcagtgagtcacg

SEQ ID NO: 4957228 - DNA, 25 bp, Homo sapien
aggagtggaaggctgcagtgagtca

SEQ ID NO: 4957229 - DNA, 25 bp, Homo sapien
aaggtgggaaggttctgcagagccc

SEQ ID NO: 4957230 - DNA, 25 bp, Homo sapien
gccctgggggagaatagctgaaggc

SEQ ID NO: 4957231 - DNA, 25 bp, Homo sapien
gaaaggtgggaaggttctgcagagc

SEQ ID NO: 4957232 - DNA, 25 bp, Homo sapien
ctgctgaaaggtgggaaggttctgc

SEQ ID NO: 4957233 - DNA, 25 bp, Homo sapien
tccgtagttttgactcacatgctta

SEQ ID NO: 4957234 - DNA, 25 bp, Homo sapien
tcttccgtagttttgactcacatgc

SEQ ID NO: 4957235 - DNA, 25 bp, Homo sapien
agttttgactcacatgcttacccat

SEQ ID NO: 4957236 - DNA, 25 bp, Homo sapien
cagtcttccgtagttttgactcaca

SEQ ID NO: 4957237 - DNA, 25 bp, Homo sapien
tcaaagacaacttcaattgctacag

SEQ ID NO: 4957238 - DNA, 25 bp, Homo sapien
ctacagataggtttccgaagccatg

SEQ ID NO: 4957239 - DNA, 25 bp, Homo sapien
gctacagataggtttccgaagccat

SEQ ID NO: 4957240 - DNA, 25 bp, Homo sapien
taaagggcgatgtgattttggacag

SEQ ID NO: 4957241 - DNA, 25 bp, Homo sapien
ggcaacctcaacatgaaagcgtcct

SEQ ID NO: 4957242 - DNA, 25 bp, Homo sapien
ccaagtttcgggcaaatacatgata

SEQ ID NO: 4957243 - DNA, 25 bp, Homo sapien
gatatcagtgacaatggcaacctca

SEQ ID NO: 4957244 - DNA, 25 bp, Homo sapien
catctgaagtagttgagacccttgc

SEQ ID NO: 4957245 - DNA, 25 bp, Homo sapien
ctgctgctcatgtccagactgactc

SEQ ID NO: 4957246 - DNA, 25 bp, Homo sapien
tccagactgactccattcctcgaag

SEQ ID NO: 4957247 - DNA, 25 bp, Homo sapien
ctgcattcataacatctgaagtagt

SEQ ID NO: 4957248 - DNA, 25 bp, Homo sapien
gcaatcttctgtcttggataaatcc

SEQ ID NO: 4957249 - DNA, 25 bp, Homo sapien
agcacaaatcttgagggacatactg

SEQ ID NO: 4957250 - DNA, 25 bp, Homo sapien
gagggacatactgtctctttgcttg

SEQ ID NO: 4957251 - DNA, 25 bp, Homo sapien
caaatgctgagcctacaacaaatgc

SEQ ID NO: 4957252 - DNA, 25 bp, Homo sapien
gtcacagtctgtgttggccttacgg

SEQ ID NO: 4957253 - DNA, 25 bp, Homo sapien
tcacagtctgtgttggccttacggc

SEQ ID NO: 4957254 - DNA, 25 bp, Homo sapien
cagtctgtgttggccttacggccat

SEQ ID NO: 4957255 - DNA, 25 bp, Homo sapien
cacagtctgtgttggccttacggcc

SEQ ID NO: 4957256 - DNA, 25 bp, Homo sapien
tgtcctggatgtattaccaaggcaa

SEQ ID NO: 4957257 - DNA, 25 bp, Homo sapien
ggctataaaatacggacctcctcag

SEQ ID NO: 4957258 - DNA, 25 bp, Homo sapien
tcaaggtcgttgttaaaagcatgca

SEQ ID NO: 4957259 - DNA, 25 bp, Homo sapien
aaagcatgcactggtgtcacaggca

SEQ ID NO: 4957260 - DNA, 25 bp, Homo sapien
gactggtaacaaaatcaggtggtca

SEQ ID NO: 4957261 - DNA, 25 bp, Homo sapien
cccacatagattgtaagagctgaag

SEQ ID NO: 4957262 - DNA, 25 bp, Homo sapien
tccggtatccaacacttgaaaggga

SEQ ID NO: 4957263 - DNA, 25 bp, Homo sapien
gataatgagtaagccacaattgcaa

SEQ ID NO: 4957264 - DNA, 25 bp, Homo sapien
tctttgttttggcaacataaatcaa

SEQ ID NO: 4957265 - DNA, 25 bp, Homo sapien
tgttttggcaacataaatcaatggt

SEQ ID NO: 4957266 - DNA, 25 bp, Homo sapien
ctctttgttttggcaacataaatca

SEQ ID NO: 4957267 - DNA, 25 bp, Homo sapien
tttgttttggcaacataaatcaatg

SEQ ID NO: 4957268 - DNA, 25 bp, Homo sapien
tcactttatcttgtttacacaaata

SEQ ID NO: 4957269 - DNA, 25 bp, Homo sapien
cactttatcttgtttacacaaatac

SEQ ID NO: 4957270 - DNA, 25 bp, Homo sapien
cacacgtgtagtattcatcttctgt

SEQ ID NO: 4957271 - DNA, 25 bp, Homo sapien
gtcaaaatattcagctcattaaccc

SEQ ID NO: 4957272 - DNA, 25 bp, Homo sapien
tcattaacccggatctcacactcag

SEQ ID NO: 4957273 - DNA, 25 bp, Homo sapien
aatattcagctcattaacccggatc

SEQ ID NO: 4957274 - DNA, 25 bp, Homo sapien
tcagctcattaacccggatctcaca

SEQ ID NO: 4957275 - DNA, 25 bp, Homo sapien
gagcttgtcccaatggatcgtctcc

SEQ ID NO: 4957276 - DNA, 25 bp, Homo sapien
tctccttcctgcatcgctggtttac

SEQ ID NO: 4957277 - DNA, 25 bp, Homo sapien
tgcatcgctggtttacaaaggacag

SEQ ID NO: 4957278 - DNA, 25 bp, Homo sapien
tcagggagcttgtcccaatggatcg

SEQ ID NO: 4957279 - DNA, 25 bp, Homo sapien
ctctcagtgtctggtggatgagaac

SEQ ID NO: 4957280 - DNA, 25 bp, Homo sapien
tgagaacaacctctagggataaggt

SEQ ID NO: 4957281 - DNA, 25 bp, Homo sapien
tgaagtgcactgaaggatgctaacg

SEQ ID NO: 4957282 - DNA, 25 bp, Homo sapien
tctgacaccagtgtatctctcagtg

SEQ ID NO: 4957283 - DNA, 25 bp, Homo sapien
atctctctattctatctctgatcat

SEQ ID NO: 4957284 - DNA, 25 bp, Homo sapien
gcacaggactgtgcgtgagcactcc

SEQ ID NO: 4957285 - DNA, 25 bp, Homo sapien
tgcccacgaaaattattccctgtgc

SEQ ID NO: 4957286 - DNA, 25 bp, Homo sapien
tgtgcgtgagcactccacagttcat

SEQ ID NO: 4957287 - DNA, 25 bp, Homo sapien
tgtgcattgagtgtgcacaggactg

SEQ ID NO: 4957288 - DNA, 25 bp, Homo sapien
gaacagtggactaagatcaggaact

SEQ ID NO: 4957289 - DNA, 25 bp, Homo sapien
taggtgttacgatcctgagagctgt

SEQ ID NO: 4957290 - DNA, 25 bp, Homo sapien
tgagagctgtaaagtccaactgtgt

SEQ ID NO: 4957291 - DNA, 25 bp, Homo sapien
agtttactgtgtacctggattccca

SEQ ID NO: 4957292 - DNA, 25 bp, Homo sapien
cacctaacttgcacggttgtagtaa

SEQ ID NO: 4957293 - DNA, 25 bp, Homo sapien
tttagacctaaacaatgagcatggt

SEQ ID NO: 4957294 - DNA, 25 bp, Homo sapien
tgaatggagtcccaaggactagcca

SEQ ID NO: 4957295 - DNA, 25 bp, Homo sapien
gacagagctcaaagttaagcccctg

SEQ ID NO: 4957296 - DNA, 25 bp, Homo sapien
tagtagcagtcaaggaaatattccc

SEQ ID NO: 4957297 - DNA, 25 bp, Homo sapien
gagcaaagtgagacataatcttccc

SEQ ID NO: 4957298 - DNA, 25 bp, Homo sapien
aatgtatcttgtttggttctggagc

SEQ ID NO: 4957299 - DNA, 25 bp, Homo sapien
caaacaagcactgatcgtaaacatg

SEQ ID NO: 4957300 - DNA, 25 bp, Homo sapien
ggtttgttaaatgaccagtggtgga

SEQ ID NO: 4957301 - DNA, 25 bp, Homo sapien
taatgtcaataggtgaatctgtcag

SEQ ID NO: 4957302 - DNA, 25 bp, Homo sapien
caaggtcactttgaacgatctagca

SEQ ID NO: 4957303 - DNA, 25 bp, Homo sapien
taagcttgacctgatagaacacacc

SEQ ID NO: 4957304 - DNA, 25 bp, Homo sapien
tagactgtgtatgtctcctcatact

SEQ ID NO: 4957305 - DNA, 25 bp, Homo sapien
tcctcatactcttctggggttatct

SEQ ID NO: 4957306 - DNA, 25 bp, Homo sapien
ctgtgtagactgtgtatgtctcctc

SEQ ID NO: 4957307 - DNA, 25 bp, Homo sapien
tcttctggggttatctttcagagca

SEQ ID NO: 4957308 - DNA, 25 bp, Homo sapien
gatacgataattccacgaggcacac

SEQ ID NO: 4957309 - DNA, 25 bp, Homo sapien
gataattccacgaggcacacatata

SEQ ID NO: 4957310 - DNA, 25 bp, Homo sapien
tccacgaggcacacatatatcagaa

SEQ ID NO: 4957311 - DNA, 25 bp, Homo sapien
cttgatacgataattccacgaggca

SEQ ID NO: 4957312 - DNA, 25 bp, Homo sapien
ttctgtgcaatgaagtagaaaaaga

SEQ ID NO: 4957313 - DNA, 25 bp, Homo sapien
gaatttcagagagactcatcagcat

SEQ ID NO: 4957314 - DNA, 25 bp, Homo sapien
ctcaagggttctgtgcaatgaagta

SEQ ID NO: 4957315 - DNA, 25 bp, Homo sapien
gaaagaatttcagagagactcatca

SEQ ID NO: 4957316 - DNA, 25 bp, Homo sapien
tctactaacttctatcaagctttat

SEQ ID NO: 4957317 - DNA, 25 bp, Homo sapien
cagatatgagaattctactaacttc

SEQ ID NO: 4957318 - DNA, 25 bp, Homo sapien
acagatatgagaattctactaactt

SEQ ID NO: 4957319 - DNA, 25 bp, Homo sapien
acttctatcaagctttatattaaag

SEQ ID NO: 4957320 - DNA, 25 bp, Homo sapien
taccccatttacaatcagggtatat

SEQ ID NO: 4957321 - DNA, 25 bp, Homo sapien
cttctttaccccatttacaatcagg

SEQ ID NO: 4957322 - DNA, 25 bp, Homo sapien
ttcaaatgagtcatccttctttacc

SEQ ID NO: 4957323 - DNA, 25 bp, Homo sapien
catttacaatcagggtatatttgga

SEQ ID NO: 4957324 - DNA, 25 bp, Homo sapien
gctaagttgaatattgatctgtgtc

SEQ ID NO: 4957325 - DNA, 25 bp, Homo sapien
tcttgctaagttgaatattgatctg

SEQ ID NO: 4957326 - DNA, 25 bp, Homo sapien
gaaagaaactgcttctgagcttgaa

SEQ ID NO: 4957327 - DNA, 25 bp, Homo sapien
tgcttctgagcttgaacacaaatca

SEQ ID NO: 4957328 - DNA, 25 bp, Homo sapien
atgacattgtaaccacacctgaagg

SEQ ID NO: 4957329 - DNA, 25 bp, Homo sapien
taaaaaccatatgtagctttggcct

SEQ ID NO: 4957330 - DNA, 25 bp, Homo sapien
tccttcactggccatagaaatgaca

SEQ ID NO: 4957331 - DNA, 25 bp, Homo sapien
caagatagttatggagtaatcctca

SEQ ID NO: 4957332 - DNA, 25 bp, Homo sapien
tgtgtttcctacagcagtggatgca

SEQ ID NO: 4957333 - DNA, 25 bp, Homo sapien
tgaagtctatggagaaaagcctgca

SEQ ID NO: 4957334 - DNA, 25 bp, Homo sapien
caggctgcatctccaaagtagtcta

SEQ ID NO: 4957335 - DNA, 25 bp, Homo sapien
gcattagctctccaataggttccag

SEQ ID NO: 4957336 - DNA, 25 bp, Homo sapien
gtattggccttcaaaggtatgggca

SEQ ID NO: 4957337 - DNA, 25 bp, Homo sapien
ctacagaaggatgggccattggaag

SEQ ID NO: 4957338 - DNA, 25 bp, Homo sapien
aggtatgggcaaccattgccaaatc

SEQ ID NO: 4957339 - DNA, 25 bp, Homo sapien
gccattggaagtattggccttcaaa

SEQ ID NO: 4957340 - DNA, 25 bp, Homo sapien
ctgctactggcgctgaattctcaat

SEQ ID NO: 4957341 - DNA, 25 bp, Homo sapien
gctactggcgctgaattctcaatca

SEQ ID NO: 4957342 - DNA, 25 bp, Homo sapien
gacccgtcattacacagtaagatcc

SEQ ID NO: 4957343 - DNA, 25 bp, Homo sapien
tggctttgatgacccgtcattacac

SEQ ID NO: 4957344 - DNA, 25 bp, Homo sapien
cagtttatcagtcattgctgtgtga

SEQ ID NO: 4957345 - DNA, 25 bp, Homo sapien
ttcagtgtttctggaccaactactt

SEQ ID NO: 4957346 - DNA, 25 bp, Homo sapien
tgctgtgtgatagaagagacagggt

SEQ ID NO: 4957347 - DNA, 25 bp, Homo sapien
accttcagtgtttctggaccaacta

SEQ ID NO: 4957348 - DNA, 25 bp, Homo sapien
tatccacaggagtctagtgttgaat

SEQ ID NO: 4957349 - DNA, 25 bp, Homo sapien
tgtgaatctaccctagaagaggaag

SEQ ID NO: 4957350 - DNA, 25 bp, Homo sapien
gaagaggaagcactgtgtatccaca

SEQ ID NO: 4957351 - DNA, 25 bp, Homo sapien
gttttagagtggatatgcgttcatg

SEQ ID NO: 4957352 - DNA, 25 bp, Homo sapien
gttgttctggactttactgtccatg

SEQ ID NO: 4957353 - DNA, 25 bp, Homo sapien
ttttgttgttctggactttactgtc

SEQ ID NO: 4957354 - DNA, 25 bp, Homo sapien
tccatgatagtctttcttgtccatt

SEQ ID NO: 4957355 - DNA, 25 bp, Homo sapien
ggactttactgtccatgatagtctt

SEQ ID NO: 4957356 - DNA, 25 bp, Homo sapien
ttgaagtcacgtcttggcgactgct

SEQ ID NO: 4957357 - DNA, 25 bp, Homo sapien
ggcgactgctttctattaatctggt

SEQ ID NO: 4957358 - DNA, 25 bp, Homo sapien
cacgtcttggcgactgctttctatt

SEQ ID NO: 4957359 - DNA, 25 bp, Homo sapien
gccatagactttgaagtcacgtctt

SEQ ID NO: 4957360 - DNA, 25 bp, Homo sapien
tttgtcactgaacatcatctgaaac

SEQ ID NO: 4957361 - DNA, 25 bp, Homo sapien
tgaaactctccatgcaaaattcgtt

SEQ ID NO: 4957362 - DNA, 25 bp, Homo sapien
tgtcactgaacatcatctgaaactc

SEQ ID NO: 4957363 - DNA, 25 bp, Homo sapien
caaaattcgtttactgaagcccagg

SEQ ID NO: 4957364 - DNA, 25 bp, Homo sapien
tgttgacatctgctgtactcagagg

SEQ ID NO: 4957365 - DNA, 25 bp, Homo sapien
tatggaactgagagcaaacagttca

SEQ ID NO: 4957366 - DNA, 25 bp, Homo sapien
cagcagactccgcagataaaacagg

SEQ ID NO: 4957367 - DNA, 25 bp, Homo sapien
caggaagaatatggaactgagagca

SEQ ID NO: 4957368 - DNA, 25 bp, Homo sapien
tctaatcatggatgacagaatctcc

SEQ ID NO: 4957369 - DNA, 25 bp, Homo sapien
tagcctttaaacagattacaggagg

SEQ ID NO: 4957370 - DNA, 25 bp, Homo sapien
tagaaggccttttttgattcgaagc

SEQ ID NO: 4957371 - DNA, 25 bp, Homo sapien
ctctgaggaacaaaataagcttgga

SEQ ID NO: 4957372 - DNA, 25 bp, Homo sapien
ctttacaatgtcaaatttagcggtc

SEQ ID NO: 4957373 - DNA, 25 bp, Homo sapien
tttacaatgtcaaatttagcggtca

SEQ ID NO: 4957374 - DNA, 25 bp, Homo sapien
ttacaatgtcaaatttagcggtcat

SEQ ID NO: 4957375 - DNA, 25 bp, Homo sapien
tttattgctgtgaatgttttgggcc

SEQ ID NO: 4957376 - DNA, 25 bp, Homo sapien
ctgtgaatgttttgggccgcatgcc

SEQ ID NO: 4957377 - DNA, 25 bp, Homo sapien
gatgttaagccgacccattttctca

SEQ ID NO: 4957378 - DNA, 25 bp, Homo sapien
catttcaaagttgaagatgttaagc

SEQ ID NO: 4957379 - DNA, 25 bp, Homo sapien
tcctccttggtgcacgggtgaggca

SEQ ID NO: 4957380 - DNA, 25 bp, Homo sapien
gggtgaggcaccctcgaagacctag

SEQ ID NO: 4957381 - DNA, 25 bp, Homo sapien
tgtttgtatgcttgtggcttttctt

SEQ ID NO: 4957382 - DNA, 25 bp, Homo sapien
tcctcccccgtgatgtggatttcct

SEQ ID NO: 4957383 - DNA, 25 bp, Homo sapien
ccttcctccgcgctctctccccacg

SEQ ID NO: 4957384 - DNA, 25 bp, Homo sapien
cctccgcgctctctccccacgtcat

SEQ ID NO: 4957385 - DNA, 25 bp, Homo sapien
tctctcccttcctccgcgctctctc

SEQ ID NO: 4957386 - DNA, 25 bp, Homo sapien
tggatctctcccttcctccgcgctc

SEQ ID NO: 4957387 - DNA, 25 bp, Homo sapien
tattgagcttctaagttcaaatggg

SEQ ID NO: 4957388 - DNA, 25 bp, Homo sapien
tgagcttctaagttcaaatgggagt

SEQ ID NO: 4957389 - DNA, 25 bp, Homo sapien
gaatattgagcttctaagttcaaat

SEQ ID NO: 4957390 - DNA, 25 bp, Homo sapien
gtctttcaggctagccattaacttt

SEQ ID NO: 4957391 - DNA, 25 bp, Homo sapien
cactgttttgttatgagtgaaaggt

SEQ ID NO: 4957392 - DNA, 25 bp, Homo sapien
tcttaatttgtcttgcggatgggaa

SEQ ID NO: 4957393 - DNA, 25 bp, Homo sapien
ctgattaatgtgaggtcttgttacc

SEQ ID NO: 4957394 - DNA, 25 bp, Homo sapien
aaaggaaaggcaaacttgcctgatg

SEQ ID NO: 4957395 - DNA, 25 bp, Homo sapien
catctttgatatacgtcttgagaac

SEQ ID NO: 4957396 - DNA, 25 bp, Homo sapien
agcattagctttgccgcttctcgga

SEQ ID NO: 4957397 - DNA, 25 bp, Homo sapien
cctccttcagagcattagctttgcc

SEQ ID NO: 4957398 - DNA, 25 bp, Homo sapien
tcttgagaacatcgcaacatatttc

SEQ ID NO: 4957399 - DNA, 25 bp, Homo sapien
gacggattggacagcgagtctcgct

SEQ ID NO: 4957400 - DNA, 25 bp, Homo sapien
caatgacagacggattggacagcga

SEQ ID NO: 4957401 - DNA, 25 bp, Homo sapien
gaaacaatgacagacggattggaca

SEQ ID NO: 4957402 - DNA, 25 bp, Homo sapien
tgacagacggattggacagcgagtc

SEQ ID NO: 4957403 - DNA, 25 bp, Homo sapien
tcctatagaggataaatccacagaa

SEQ ID NO: 4957404 - DNA, 25 bp, Homo sapien
ttcctatagaggataaatccacaga

SEQ ID NO: 4957405 - DNA, 25 bp, Homo sapien
cctatagaggataaatccacagaat

SEQ ID NO: 4957406 - DNA, 25 bp, Homo sapien
gacggcacatctgtcaagaagcata

SEQ ID NO: 4957407 - DNA, 25 bp, Homo sapien
gtcaagaagcatattgaaagggcca

SEQ ID NO: 4957408 - DNA, 25 bp, Homo sapien
ggccaactcggatactctcactttc

SEQ ID NO: 4957409 - DNA, 25 bp, Homo sapien
tattgaaagggccaactcggatact

SEQ ID NO: 4957410 - DNA, 25 bp, Homo sapien
ttctgaagatctcttttgctagatc

SEQ ID NO: 4957411 - DNA, 25 bp, Homo sapien
atgaaatccaaattatattgttggg

SEQ ID NO: 4957412 - DNA, 25 bp, Homo sapien
gctagatcagcttctatgaaatcca

SEQ ID NO: 4957413 - DNA, 25 bp, Homo sapien
tcttttgctagatcagcttctatga

SEQ ID NO: 4957414 - DNA, 25 bp, Homo sapien
tgtgatggtctccactgcaccttct

SEQ ID NO: 4957415 - DNA, 25 bp, Homo sapien
cttctcatggaaggacatgcttggt

SEQ ID NO: 4957416 - DNA, 25 bp, Homo sapien
ctgtgatggtctccactgcaccttc

SEQ ID NO: 4957417 - DNA, 25 bp, Homo sapien
ccttctcatggaaggacatgcttgg

SEQ ID NO: 4957418 - DNA, 25 bp, Homo sapien
cccacataatacaacgcgttttctg

SEQ ID NO: 4957419 - DNA, 25 bp, Homo sapien
cacataatacaacgcgttttctgca

SEQ ID NO: 4957420 - DNA, 25 bp, Homo sapien
cataatacaacgcgttttctgcatt

SEQ ID NO: 4957421 - DNA, 25 bp, Homo sapien
ataatacaacgcgttttctgcattt

SEQ ID NO: 4957422 - DNA, 25 bp, Homo sapien
gtcttttgttctaccgataagtgat

SEQ ID NO: 4957423 - DNA, 25 bp, Homo sapien
tcttttgttctaccgataagtgata

SEQ ID NO: 4957424 - DNA, 25 bp, Homo sapien
ttcccccgagtctgactgatgaagg

SEQ ID NO: 4957425 - DNA, 25 bp, Homo sapien
tttgttctaccgataagtgatacat

SEQ ID NO: 4957426 - DNA, 25 bp, Homo sapien
tttcccattctaaaggaaaatatca

SEQ ID NO: 4957427 - DNA, 25 bp, Homo sapien
caaatggttcttccccaagaacgtg

SEQ ID NO: 4957428 - DNA, 25 bp, Homo sapien
gaataagcgcaagagtagacaacaa

SEQ ID NO: 4957429 - DNA, 25 bp, Homo sapien
gctggcagtgccagaaaagcacatc

SEQ ID NO: 4957430 - DNA, 25 bp, Homo sapien
cagagcagtaagacactggaataag

SEQ ID NO: 4957431 - DNA, 25 bp, Homo sapien
aacccagagcagcagctttcagaac

SEQ ID NO: 4957432 - DNA, 25 bp, Homo sapien
acccagagcagcagctttcagaaca

SEQ ID NO: 4957433 - DNA, 25 bp, Homo sapien
gaaaacccagagcagcagctttcag

SEQ ID NO: 4957434 - DNA, 25 bp, Homo sapien
ctggaaaacccagagcagcagcttt

SEQ ID NO: 4957435 - DNA, 25 bp, Homo sapien
caggaacaaaggctggcacgtaaac

SEQ ID NO: 4957436 - DNA, 25 bp, Homo sapien
gaacaaaggctggcacgtaaaccat

SEQ ID NO: 4957437 - DNA, 25 bp, Homo sapien
tgcacaggaacaaaggctggcacgt

SEQ ID NO: 4957438 - DNA, 25 bp, Homo sapien
ctgagatgcacaggaacaaaggctg

SEQ ID NO: 4957439 - DNA, 25 bp, Homo sapien
tgactggccgaatctctgaatttat

SEQ ID NO: 4957440 - DNA, 25 bp, Homo sapien
gatctggtaacccaaaggagactta

SEQ ID NO: 4957441 - DNA, 25 bp, Homo sapien
gaccctatgggtctatgactggccg

SEQ ID NO: 4957442 - DNA, 25 bp, Homo sapien
ttagatttccttgaccctatgggtc

SEQ ID NO: 4957443 - DNA, 25 bp, Homo sapien
taaggagacgaaaaggataacagat

SEQ ID NO: 4957444 - DNA, 25 bp, Homo sapien
tctggatacccaataatcatttctt

SEQ ID NO: 4957445 - DNA, 25 bp, Homo sapien
caaatagtgtcagtccagcaaaggc

SEQ ID NO: 4957446 - DNA, 25 bp, Homo sapien
gcagtatcaagtaaaatccctctgg

SEQ ID NO: 4957447 - DNA, 25 bp, Homo sapien
tcatagttcatgtttcacccaggtg

SEQ ID NO: 4957448 - DNA, 25 bp, Homo sapien
taaacataatccagagaggtgaggc

SEQ ID NO: 4957449 - DNA, 25 bp, Homo sapien
tgagggttcccattatccacagttt

SEQ ID NO: 4957450 - DNA, 25 bp, Homo sapien
caaggtcctcagaatttatgtagca

SEQ ID NO: 4957451 - DNA, 25 bp, Homo sapien
gttccgtctttgttaagtgccacaa

SEQ ID NO: 4957452 - DNA, 25 bp, Homo sapien
tgatgcctcttggacctggcgccat

SEQ ID NO: 4957453 - DNA, 25 bp, Homo sapien
cagtaggtccttgtacaattctgga

SEQ ID NO: 4957454 - DNA, 25 bp, Homo sapien
agtgccacaaaatacctgcggccag

SEQ ID NO: 4957455 - DNA, 25 bp, Homo sapien
aagatgcattcggaagtaagtttct

SEQ ID NO: 4957456 - DNA, 25 bp, Homo sapien
ctaaagatgcattcggaagtaagtt

SEQ ID NO: 4957457 - DNA, 25 bp, Homo sapien
taaagatgcattcggaagtaagttt

SEQ ID NO: 4957458 - DNA, 25 bp, Homo sapien
agatgcattcggaagtaagtttctc

SEQ ID NO: 4957459 - DNA, 25 bp, Homo sapien
tctaatactgaccagtcccactgcc

SEQ ID NO: 4957460 - DNA, 25 bp, Homo sapien
cctctaatactgaccagtcccactg

SEQ ID NO: 4957461 - DNA, 25 bp, Homo sapien
acacctctaatactgaccagtccca

SEQ ID NO: 4957462 - DNA, 25 bp, Homo sapien
ctaatactgaccagtcccactgcca

SEQ ID NO: 4957463 - DNA, 25 bp, Homo sapien
ccaaatagtagcggtagtcggccat

SEQ ID NO: 4957464 - DNA, 25 bp, Homo sapien
tccaaatagtagcggtagtcggcca

SEQ ID NO: 4957465 - DNA, 25 bp, Homo sapien
ttccaaatagtagcggtagtcggcc

SEQ ID NO: 4957466 - DNA, 25 bp, Homo sapien
cttccaaatagtagcggtagtcggc

SEQ ID NO: 4957467 - DNA, 25 bp, Homo sapien
gcgcaggatgccgtgcaggtgcgcc

SEQ ID NO: 4957468 - DNA, 25 bp, Homo sapien
aggctgtggtcctgccgggtgccct

SEQ ID NO: 4957469 - DNA, 25 bp, Homo sapien
aagccggtgcggcaatagagctgcc

SEQ ID NO: 4957470 - DNA, 25 bp, Homo sapien
tgccggcggcgcaggatgccgtgca

SEQ ID NO: 4957471 - DNA, 25 bp, Homo sapien
gaggcaacaggaaatgcgaacccac

SEQ ID NO: 4957472 - DNA, 25 bp, Homo sapien
cgccgcgctcctgcgctcgcccagc

SEQ ID NO: 4957473 - DNA, 25 bp, Homo sapien
aggaggcaacaggaaatgcgaaccc

SEQ ID NO: 4957474 - DNA, 25 bp, Homo sapien
ccgcgctcctgcgctcgcccagcag

SEQ ID NO: 4957475 - DNA, 25 bp, Homo sapien
ctccaggccgcccagaaagcccccg

SEQ ID NO: 4957476 - DNA, 25 bp, Homo sapien
ccccgacttcggctaagggagccat

SEQ ID NO: 4957477 - DNA, 25 bp, Homo sapien
cagccagcaacttcgaggaggtgca

SEQ ID NO: 4957478 - DNA, 25 bp, Homo sapien
gataaatcgcctctaaaaggagccc

SEQ ID NO: 4957479 - DNA, 25 bp, Homo sapien
tgctcttcggaagtgaccaaaaggg

SEQ ID NO: 4957480 - DNA, 25 bp, Homo sapien
taagcgggtcctcttgacatatgct

SEQ ID NO: 4957481 - DNA, 25 bp, Homo sapien
ggaagctgcccttcagtcgtcaaag

SEQ ID NO: 4957482 - DNA, 25 bp, Homo sapien
tcccatcaaaagtccggaagctgcc

SEQ ID NO: 4957483 - DNA, 25 bp, Homo sapien
gaccgcgggtgtgctaatgcttcta

SEQ ID NO: 4957484 - DNA, 25 bp, Homo sapien
tatttatacaaacagcgcttccctg

SEQ ID NO: 4957485 - DNA, 25 bp, Homo sapien
tcttccatgatcttcccgggccgaa

SEQ ID NO: 4957486 - DNA, 25 bp, Homo sapien
tcgcgctgtcgcgtagccaggtgtc

SEQ ID NO: 4957487 - DNA, 25 bp, Homo sapien
agttacgctgactcggctgtgcccg

SEQ ID NO: 4957488 - DNA, 25 bp, Homo sapien
cgggctggcgcggttatttatgact

SEQ ID NO: 4957489 - DNA, 25 bp, Homo sapien
tggcttcttgttccctccatttgct

SEQ ID NO: 4957490 - DNA, 25 bp, Homo sapien
aagaacttatggctcaaggaattca

SEQ ID NO: 4957491 - DNA, 25 bp, Homo sapien
gaacctcttccaagtgatatttatg

SEQ ID NO: 4957492 - DNA, 25 bp, Homo sapien
ttttcttgcaagaacttatggctca

SEQ ID NO: 4957493 - DNA, 25 bp, Homo sapien
tctgaaatacatgcaacaagtgagc

SEQ ID NO: 4957494 - DNA, 25 bp, Homo sapien
tgcaggttcaacatttcacaacagg

SEQ ID NO: 4957495 - DNA, 25 bp, Homo sapien
cacaacaggtggtagcaaatgtatc

SEQ ID NO: 4957496 - DNA, 25 bp, Homo sapien
gaaagtaggacactatctgtgcctc

SEQ ID NO: 4957497 - DNA, 25 bp, Homo sapien
ttgagaagggcacgtccactgagct

SEQ ID NO: 4957498 - DNA, 25 bp, Homo sapien
ttttgagaagggcacgtccactgag

SEQ ID NO: 4957499 - DNA, 25 bp, Homo sapien
gtgttttgagaagggcacgtccact

SEQ ID NO: 4957500 - DNA, 25 bp, Homo sapien
aagggcacgtccactgagctgctct

SEQ ID NO: 4957501 - DNA, 25 bp, Homo sapien
taacatagctgtaaaaattcctcag

SEQ ID NO: 4957502 - DNA, 25 bp, Homo sapien
cagaaaacctctgaaagagcttcat

SEQ ID NO: 4957503 - DNA, 25 bp, Homo sapien
tacttttcctttgtaacatagctgt

SEQ ID NO: 4957504 - DNA, 25 bp, Homo sapien
aaattcctcagaaaacctctgaaag

SEQ ID NO: 4957505 - DNA, 25 bp, Homo sapien
taaacttctcccctgaatttcaggc

SEQ ID NO: 4957506 - DNA, 25 bp, Homo sapien
gaaaaattaagcaggcaagttggat

SEQ ID NO: 4957507 - DNA, 25 bp, Homo sapien
aatctagcggtcaagggtgcagtca

SEQ ID NO: 4957508 - DNA, 25 bp, Homo sapien
tgcagtcaggactactgattagtag

SEQ ID NO: 4957509 - DNA, 25 bp, Homo sapien
tattgcttatcagagtgagtggatg

SEQ ID NO: 4957510 - DNA, 25 bp, Homo sapien
tgcgtacatggcaaatcctgcaaat

SEQ ID NO: 4957511 - DNA, 25 bp, Homo sapien
tcttaatatgatttggtacctaaag

SEQ ID NO: 4957512 - DNA, 25 bp, Homo sapien
acatttgtaaggctgcaacataata

SEQ ID NO: 4957513 - DNA, 25 bp, Homo sapien
tttcagagacgtaaataccatccac

SEQ ID NO: 4957514 - DNA, 25 bp, Homo sapien
gagacgtaaataccatccacacatt

SEQ ID NO: 4957515 - DNA, 25 bp, Homo sapien
gacgtaaataccatccacacatttt

SEQ ID NO: 4957516 - DNA, 25 bp, Homo sapien
tcagagacgtaaataccatccacac

SEQ ID NO: 4957517 - DNA, 25 bp, Homo sapien
ttatttaattgtcgtggctggctga

SEQ ID NO: 4957518 - DNA, 25 bp, Homo sapien
tatttaattgtcgtggctggctgaa

SEQ ID NO: 4957519 - DNA, 25 bp, Homo sapien
atttaattgtcgtggctggctgaat

SEQ ID NO: 4957520 - DNA, 25 bp, Homo sapien
ctattcttccggataacgacattga

SEQ ID NO: 4957521 - DNA, 25 bp, Homo sapien
atggagaagtgagtacacacagagc

SEQ ID NO: 4957522 - DNA, 25 bp, Homo sapien
agctcatcttgcagcggaagcccag

SEQ ID NO: 4957523 - DNA, 25 bp, Homo sapien
acagagctcatcttgcagcggaagc

SEQ ID NO: 4957524 - DNA, 25 bp, Homo sapien
gaatatggacagtctggttgcagag

SEQ ID NO: 4957525 - DNA, 25 bp, Homo sapien
ccattttttgtcagtgccggagcct

SEQ ID NO: 4957526 - DNA, 25 bp, Homo sapien
gggtatcccttcaaagtgatatcta

SEQ ID NO: 4957527 - DNA, 25 bp, Homo sapien
ctacaaatagtgcaaacggcagcca

SEQ ID NO: 4957528 - DNA, 25 bp, Homo sapien
cttgcctggctgtccgctcgtctct

SEQ ID NO: 4957529 - DNA, 25 bp, Homo sapien
ctcttctcttccttagcgtcgcctt

SEQ ID NO: 4957530 - DNA, 25 bp, Homo sapien
ttctcttccttagcgtcgccttctt

SEQ ID NO: 4957531 - DNA, 25 bp, Homo sapien
tggctgtccgctcgtctcttctctt

SEQ ID NO: 4957532 - DNA, 25 bp, Homo sapien
tctttgtgagggtatttcagtccca

SEQ ID NO: 4957533 - DNA, 25 bp, Homo sapien
aggatctacagaggcactatttgca

SEQ ID NO: 4957534 - DNA, 25 bp, Homo sapien
ccgatttcaagaccctgtaggactg

SEQ ID NO: 4957535 - DNA, 25 bp, Homo sapien
gggcatcgtcgcatccaggatctac

SEQ ID NO: 4957536 - DNA, 25 bp, Homo sapien
cgggctcccagggacccgcaagttg

SEQ ID NO: 4957537 - DNA, 25 bp, Homo sapien
tcccatgccagacgccggctcggca

SEQ ID NO: 4957538 - DNA, 25 bp, Homo sapien
aagttgaagcgcgagggttccacgc

SEQ ID NO: 4957539 - DNA, 25 bp, Homo sapien
tgtgcatttctgcttcccccgaaag

SEQ ID NO: 4957540 - DNA, 25 bp, Homo sapien
cgggcctcggtgctgcagactttct

SEQ ID NO: 4957541 - DNA, 25 bp, Homo sapien
ctcggtgctgcagactttctcaggg

SEQ ID NO: 4957542 - DNA, 25 bp, Homo sapien
ggcctcggtgctgcagactttctca

SEQ ID NO: 4957543 - DNA, 25 bp, Homo sapien
acgcgggcctcggtgctgcagactt

SEQ ID NO: 4957544 - DNA, 25 bp, Homo sapien
caactctcgggttaaggtggcgcct

SEQ ID NO: 4957545 - DNA, 25 bp, Homo sapien
gggcagcttcttccacgcgcacgcc

SEQ ID NO: 4957546 - DNA, 25 bp, Homo sapien
gccgctaaaagcagcctcggggcag

SEQ ID NO: 4957547 - DNA, 25 bp, Homo sapien
ggctccgccgctaaaagcagcctcg

SEQ ID NO: 4957548 - DNA, 25 bp, Homo sapien
ggttggcgtcaatgcacttgttaaa

SEQ ID NO: 4957549 - DNA, 25 bp, Homo sapien
tttgaggattgccagttggacactt

SEQ ID NO: 4957550 - DNA, 25 bp, Homo sapien
taaaaatttgtgacagcgctcaggg

SEQ ID NO: 4957551 - DNA, 25 bp, Homo sapien
agctggatcccttgctggttggcgt

SEQ ID NO: 4957552 - DNA, 25 bp, Homo sapien
cgggccacttttactctgtccaggg

SEQ ID NO: 4957553 - DNA, 25 bp, Homo sapien
gagctgacgttgcacctgaggaaca

SEQ ID NO: 4957554 - DNA, 25 bp, Homo sapien
aatgcaactctctgaatccacggcg

SEQ ID NO: 4957555 - DNA, 25 bp, Homo sapien
aaatggacagaaacgaagggcaggc

SEQ ID NO: 4957556 - DNA, 25 bp, Homo sapien
tcacaccgatttaagtgccttattg

SEQ ID NO: 4957557 - DNA, 25 bp, Homo sapien
tattttattcaatgatatcttacag

SEQ ID NO: 4957558 - DNA, 25 bp, Homo sapien
tttaatgattctatgagtatcctca

SEQ ID NO: 4957559 - DNA, 25 bp, Homo sapien
gtgtattaatgtattacccagaagg

SEQ ID NO: 4957560 - DNA, 25 bp, Homo sapien
aaaaccagatcgctgccatcactgc

SEQ ID NO: 4957561 - DNA, 25 bp, Homo sapien
acttataaaaccagatcgctgccat

SEQ ID NO: 4957562 - DNA, 25 bp, Homo sapien
tataaaaccagatcgctgccatcac

SEQ ID NO: 4957563 - DNA, 25 bp, Homo sapien
aaaccagatcgctgccatcactgct

SEQ ID NO: 4957564 - DNA, 25 bp, Homo sapien
tgaagatggatcatcattgtccatg

SEQ ID NO: 4957565 - DNA, 25 bp, Homo sapien
ttttgaagatggatcatcattgtcc

SEQ ID NO: 4957566 - DNA, 25 bp, Homo sapien
gtattttgaagatggatcatcattg

SEQ ID NO: 4957567 - DNA, 25 bp, Homo sapien
atgtattttgaagatggatcatcat

SEQ ID NO: 4957568 - DNA, 25 bp, Homo sapien
tacagttagattaggctgtttccag

SEQ ID NO: 4957569 - DNA, 25 bp, Homo sapien
cttttgagacagaatacagttagat

SEQ ID NO: 4957570 - DNA, 25 bp, Homo sapien
tgccatgattccattcaaacaccat

SEQ ID NO: 4957571 - DNA, 25 bp, Homo sapien
caaacaccataaaaggcaacctcag

SEQ ID NO: 4957572 - DNA, 25 bp, Homo sapien
ctttgagggatgtgcatacttgcgt

SEQ ID NO: 4957573 - DNA, 25 bp, Homo sapien
acttgcgtaatttgagatgacatgc

SEQ ID NO: 4957574 - DNA, 25 bp, Homo sapien
tactgcctttttattgcggcaacag

SEQ ID NO: 4957575 - DNA, 25 bp, Homo sapien
tagaagtgagaggaagctaaacact

SEQ ID NO: 4957576 - DNA, 25 bp, Homo sapien
tagacggatgtggtgtggcgcacct

SEQ ID NO: 4957577 - DNA, 25 bp, Homo sapien
tccagttgtatttatatcaaataat

SEQ ID NO: 4957578 - DNA, 25 bp, Homo sapien
cagttgtatttatatcaaataatag

SEQ ID NO: 4957579 - DNA, 25 bp, Homo sapien
atttgcaattcattccagttgtatt

SEQ ID NO: 4957580 - DNA, 25 bp, Homo sapien
aaatttatctgagtgaacaaagtgc

SEQ ID NO: 4957581 - DNA, 25 bp, Homo sapien
taagtattccctcttgtcaaactgg

SEQ ID NO: 4957582 - DNA, 25 bp, Homo sapien
taatggcttaactcgaacttgaaga

SEQ ID NO: 4957583 - DNA, 25 bp, Homo sapien
tagtgtaccaatgcttcatatacgt

SEQ ID NO: 4957584 - DNA, 25 bp, Homo sapien
catgggtttcgcagtgatacaagac

SEQ ID NO: 4957585 - DNA, 25 bp, Homo sapien
tgacaataaagcaagagggcagatt

SEQ ID NO: 4957586 - DNA, 25 bp, Homo sapien
gcacttaaaacctatgacatggcta

SEQ ID NO: 4957587 - DNA, 25 bp, Homo sapien
ggaagccatgatgatagtctgaagc

SEQ ID NO: 4957588 - DNA, 25 bp, Homo sapien
ggatgtgtacagtcctacgtttcta

SEQ ID NO: 4957589 - DNA, 25 bp, Homo sapien
cctcaggttgcctacccagaggagc

SEQ ID NO: 4957590 - DNA, 25 bp, Homo sapien
ttcactacaaagcaccgacacacag

SEQ ID NO: 4957591 - DNA, 25 bp, Homo sapien
ttacaccaacatagcaaatggcatg

SEQ ID NO: 4957592 - DNA, 25 bp, Homo sapien
ggacgggaggtaacattttgctcaa

SEQ ID NO: 4957593 - DNA, 25 bp, Homo sapien
caaggtactgctaaatactgacaca

SEQ ID NO: 4957594 - DNA, 25 bp, Homo sapien
tacagcgctgttttgacttctcata

SEQ ID NO: 4957595 - DNA, 25 bp, Homo sapien
aaatggatttggcaatacagcgctg

SEQ ID NO: 4957596 - DNA, 25 bp, Homo sapien
ccatgattctgtagcttgccaagcg

SEQ ID NO: 4957597 - DNA, 25 bp, Homo sapien
tgccaagcggcaatgtgaaacaaga

SEQ ID NO: 4957598 - DNA, 25 bp, Homo sapien
tcttcaagcacgatgtaattcagca

SEQ ID NO: 4957599 - DNA, 25 bp, Homo sapien
aactactgttctcatcaaagggctg

SEQ ID NO: 4957600 - DNA, 25 bp, Homo sapien
gcaagctgattctggctacgggcca

SEQ ID NO: 4957601 - DNA, 25 bp, Homo sapien
tacaaaagttacactatacggttgc

SEQ ID NO: 4957602 - DNA, 25 bp, Homo sapien
taaggcgctcctaaacttttgatgg

SEQ ID NO: 4957603 - DNA, 25 bp, Homo sapien
tacggttgctcaacctacaatgagg

SEQ ID NO: 4957604 - DNA, 25 bp, Homo sapien
gatagtaaacatccaatcacaaggg

SEQ ID NO: 4957605 - DNA, 25 bp, Homo sapien
taaacactacgtacagaaacagcag

SEQ ID NO: 4957606 - DNA, 25 bp, Homo sapien
taaagtcttcctacacatgctctgg

SEQ ID NO: 4957607 - DNA, 25 bp, Homo sapien
caacgtgctatattctgtgggtcaa

SEQ ID NO: 4957608 - DNA, 25 bp, Homo sapien
gggaaaggtactgtctattgttcga

SEQ ID NO: 4957609 - DNA, 25 bp, Homo sapien
tattgttcgagggattcaaccagag

SEQ ID NO: 4957610 - DNA, 25 bp, Homo sapien
tactgtctattgttcgagggattca

SEQ ID NO: 4957611 - DNA, 25 bp, Homo sapien
aaaggtactgtctattgttcgaggg

SEQ ID NO: 4957612 - DNA, 25 bp, Homo sapien
tcatgactgcttgttggcttcctct

SEQ ID NO: 4957613 - DNA, 25 bp, Homo sapien
tgcttgttggcttcctcttcatatg

SEQ ID NO: 4957614 - DNA, 25 bp, Homo sapien
catgactgcttgttggcttcctctt

SEQ ID NO: 4957615 - DNA, 25 bp, Homo sapien
ttggcttcctcttcatatgcattcc

SEQ ID NO: 4957616 - DNA, 25 bp, Homo sapien
tgtacataggatgaaccagaaccaa

SEQ ID NO: 4957617 - DNA, 25 bp, Homo sapien
gaccacaatatttggcatcatcaat

SEQ ID NO: 4957618 - DNA, 25 bp, Homo sapien
taggatgaaccagaaccaaggccat

SEQ ID NO: 4957619 - DNA, 25 bp, Homo sapien
gaaccaaggccatacaaatgaccac

SEQ ID NO: 4957620 - DNA, 25 bp, Homo sapien
gttcctttgaggctacgcatttcag

SEQ ID NO: 4957621 - DNA, 25 bp, Homo sapien
tgatggctcttttctatggtgttcc

SEQ ID NO: 4957622 - DNA, 25 bp, Homo sapien
tacgtgtcatgaatggatagtccaa

SEQ ID NO: 4957623 - DNA, 25 bp, Homo sapien
gctgagctggctataaatgatcaaa

SEQ ID NO: 4957624 - DNA, 25 bp, Homo sapien
tagtaggtacttgttgcccaaaatc

SEQ ID NO: 4957625 - DNA, 25 bp, Homo sapien
ggttggacctacatgacttctcagg

SEQ ID NO: 4957626 - DNA, 25 bp, Homo sapien
ttatactcaaggaactgatctctgc

SEQ ID NO: 4957627 - DNA, 25 bp, Homo sapien
caatgcagtaaaagagcctgagttc

SEQ ID NO: 4957628 - DNA, 25 bp, Homo sapien
tctctcattttgaaaaaggccattc

SEQ ID NO: 4957629 - DNA, 25 bp, Homo sapien
ttctctcattttgaaaaaggccatt

SEQ ID NO: 4957630 - DNA, 25 bp, Homo sapien
gtggtcctatccgttccagctctaa

SEQ ID NO: 4957631 - DNA, 25 bp, Homo sapien
ctgcctgatgttgtggtcctatccg

SEQ ID NO: 4957632 - DNA, 25 bp, Homo sapien
ctgtgagcaatgaatcagatcctgc

SEQ ID NO: 4957633 - DNA, 25 bp, Homo sapien
tgtgagcaatgaatcagatcctgcc

SEQ ID NO: 4957634 - DNA, 25 bp, Homo sapien
tgctgctgtagataatgccatccga

SEQ ID NO: 4957635 - DNA, 25 bp, Homo sapien
gcctaggctcgcatgacagtcactt

SEQ ID NO: 4957636 - DNA, 25 bp, Homo sapien
tagataatgccatccgaagccttac

SEQ ID NO: 4957637 - DNA, 25 bp, Homo sapien
cagtcacttggtctgaacagtgtgc

SEQ ID NO: 4957638 - DNA, 25 bp, Homo sapien
tgattaagtagccaaagtcgtaacc

SEQ ID NO: 4957639 - DNA, 25 bp, Homo sapien
agagttggttaggattttgattaag

SEQ ID NO: 4957640 - DNA, 25 bp, Homo sapien
tggttaggattttgattaagtagcc

SEQ ID NO: 4957641 - DNA, 25 bp, Homo sapien
gattttgattaagtagccaaagtcg

SEQ ID NO: 4957642 - DNA, 25 bp, Homo sapien
taggagacaactctatatggcagtc

SEQ ID NO: 4957643 - DNA, 25 bp, Homo sapien
tgggtaacaccaattccaaatggcg

SEQ ID NO: 4957644 - DNA, 25 bp, Homo sapien
gctaacatagtgacccaagtaagtg

SEQ ID NO: 4957645 - DNA, 25 bp, Homo sapien
aatggcgccgctggatttaaaccag

SEQ ID NO: 4957646 - DNA, 25 bp, Homo sapien
cagatgttgttagtagctctataga

SEQ ID NO: 4957647 - DNA, 25 bp, Homo sapien
gatgttgttagtagctctatagagt

SEQ ID NO: 4957648 - DNA, 25 bp, Homo sapien
agatgttgttagtagctctatagag

SEQ ID NO: 4957649 - DNA, 25 bp, Homo sapien
gaggcatgccttagcaactataagc

SEQ ID NO: 4957650 - DNA, 25 bp, Homo sapien
gaatctcattcatcaggtcccagtg

SEQ ID NO: 4957651 - DNA, 25 bp, Homo sapien
gcccagcctaaaagtgagaatttgt

SEQ ID NO: 4957652 - DNA, 25 bp, Homo sapien
tacttgcagcatatggcttcacccc

SEQ ID NO: 4957653 - DNA, 25 bp, Homo sapien
gagaattcccatacgttacaattgt

SEQ ID NO: 4957654 - DNA, 25 bp, Homo sapien
cacttcaattttcatggatgtatca

SEQ ID NO: 4957655 - DNA, 25 bp, Homo sapien
gaattcccatacgttacaattgtaa

SEQ ID NO: 4957656 - DNA, 25 bp, Homo sapien
ttttcatggatgtatcaactccaaa

SEQ ID NO: 4957657 - DNA, 25 bp, Homo sapien
cacaaatgtaggatgtcaaacagaa

SEQ ID NO: 4957658 - DNA, 25 bp, Homo sapien
gaaagaattcatacattggcactac

SEQ ID NO: 4957659 - DNA, 25 bp, Homo sapien
catacagttaagtactcactcaacg

SEQ ID NO: 4957660 - DNA, 25 bp, Homo sapien
taccagatattaggatgtatgacac

SEQ ID NO: 4957661 - DNA, 25 bp, Homo sapien
tatcagaagtactttcaatacccag

SEQ ID NO: 4957662 - DNA, 25 bp, Homo sapien
tgtgggctgaagtggcaacctaatg

SEQ ID NO: 4957663 - DNA, 25 bp, Homo sapien
gattctgacatatgataaacaccag

SEQ ID NO: 4957664 - DNA, 25 bp, Homo sapien
ggttccagaaaacgtcttactgcat

SEQ ID NO: 4957665 - DNA, 25 bp, Homo sapien
tacaccgcaatagttggtattgata

SEQ ID NO: 4957666 - DNA, 25 bp, Homo sapien
attacaccgcaatagttggtattga

SEQ ID NO: 4957667 - DNA, 25 bp, Homo sapien
tacattacaccgcaatagttggtat

SEQ ID NO: 4957668 - DNA, 25 bp, Homo sapien
cattacaccgcaatagttggtattg

SEQ ID NO: 4957669 - DNA, 25 bp, Homo sapien
cctgtctcccaaaggatacatgaaa

SEQ ID NO: 4957670 - DNA, 25 bp, Homo sapien
aaatgatgctcacagtattccaatg

SEQ ID NO: 4957671 - DNA, 25 bp, Homo sapien
gggaaaatcataaattcctgtctcc

SEQ ID NO: 4957672 - DNA, 25 bp, Homo sapien
catgaaatgatgctcacagtattcc

SEQ ID NO: 4957673 - DNA, 25 bp, Homo sapien
tgcttctctgacacaaggtttttct

SEQ ID NO: 4957674 - DNA, 25 bp, Homo sapien
gacaatctaggcagaccaaacagca

SEQ ID NO: 4957675 - DNA, 25 bp, Homo sapien
ttgcagaccaacaacgtttcactgg

SEQ ID NO: 4957676 - DNA, 25 bp, Homo sapien
tgggagctcatgtggtactaccagc

SEQ ID NO: 4957677 - DNA, 25 bp, Homo sapien
gaaagagcaccctagcttctgggag

SEQ ID NO: 4957678 - DNA, 25 bp, Homo sapien
tatattttcggataacttgacgaat

SEQ ID NO: 4957679 - DNA, 25 bp, Homo sapien
catagcaacgtaattatattttcgg

SEQ ID NO: 4957680 - DNA, 25 bp, Homo sapien
cggataacttgacgaattttcttca

SEQ ID NO: 4957681 - DNA, 25 bp, Homo sapien
gcaacgtaattatattttcggataa

SEQ ID NO: 4957682 - DNA, 25 bp, Homo sapien
gttgcaagcccaaacttcacaaatt

SEQ ID NO: 4957683 - DNA, 25 bp, Homo sapien
agtgagggcacaagggagtctagat

SEQ ID NO: 4957684 - DNA, 25 bp, Homo sapien
ggcacaagggagtctagatgccaag

SEQ ID NO: 4957685 - DNA, 25 bp, Homo sapien
gggagtctagatgccaagcatcaaa

SEQ ID NO: 4957686 - DNA, 25 bp, Homo sapien
tcaaaatgttatacttgattgaaga

SEQ ID NO: 4957687 - DNA, 25 bp, Homo sapien
cacagaataattgatccagcaggaa

SEQ ID NO: 4957688 - DNA, 25 bp, Homo sapien
tatgaagaccagatatatcaaatct

SEQ ID NO: 4957689 - DNA, 25 bp, Homo sapien
gacaagatcagatgttaccatggca

SEQ ID NO: 4957690 - DNA, 25 bp, Homo sapien
tgagttcaactactctgcataaaac

SEQ ID NO: 4957691 - DNA, 25 bp, Homo sapien
tgctctgagaaaaaagtaacggcca

SEQ ID NO: 4957692 - DNA, 25 bp, Homo sapien
gaatgttcgcagttgcagaacggaa

SEQ ID NO: 4957693 - DNA, 25 bp, Homo sapien
taaaacttagagcatattgcatggt

SEQ ID NO: 4957694 - DNA, 25 bp, Homo sapien
gcagaacggaaaaagaacacaatag

SEQ ID NO: 4957695 - DNA, 25 bp, Homo sapien
ctgttgattcttgggcagggaaatt

SEQ ID NO: 4957696 - DNA, 25 bp, Homo sapien
tttctggtctataaacagagttcct

SEQ ID NO: 4957697 - DNA, 25 bp, Homo sapien
tcctgttgattcttgggcagggaaa

SEQ ID NO: 4957698 - DNA, 25 bp, Homo sapien
gttgattcttgggcagggaaatttc

SEQ ID NO: 4957699 - DNA, 25 bp, Homo sapien
taaaaagagggtcttatgactgtct

SEQ ID NO: 4957700 - DNA, 25 bp, Homo sapien
ctgaagagtcacaaatgtaacttcc

SEQ ID NO: 4957701 - DNA, 25 bp, Homo sapien
gtaacttccaattctccaagtagag

SEQ ID NO: 4957702 - DNA, 25 bp, Homo sapien
tagagaaactaaaggagatccagga

SEQ ID NO: 4957703 - DNA, 25 bp, Homo sapien
gcaccgaggtattcaagccatagat

SEQ ID NO: 4957704 - DNA, 25 bp, Homo sapien
caaagcgccagtgcgaaggtgctga

SEQ ID NO: 4957705 - DNA, 25 bp, Homo sapien
tacgaagaggtgaggatctaggcca

SEQ ID NO: 4957706 - DNA, 25 bp, Homo sapien
cactgccgcgtgaaacaatacgaag

SEQ ID NO: 4957707 - DNA, 25 bp, Homo sapien
actgcgaagccccaggtacaaagcc

SEQ ID NO: 4957708 - DNA, 25 bp, Homo sapien
atttccgtcccactgcgaagcccca

SEQ ID NO: 4957709 - DNA, 25 bp, Homo sapien
gtcccactgcgaagccccaggtaca

SEQ ID NO: 4957710 - DNA, 25 bp, Homo sapien
tccactcccaatttccgtcccactg

SEQ ID NO: 4957711 - DNA, 25 bp, Homo sapien
aggctccttcctccgccagccgcac

SEQ ID NO: 4957712 - DNA, 25 bp, Homo sapien
tccttcctccgccagccgcactcca

SEQ ID NO: 4957713 - DNA, 25 bp, Homo sapien
ccaacccgccgccaggctccttcct

SEQ ID NO: 4957714 - DNA, 25 bp, Homo sapien
tccgccagccgcactccagctggcg

SEQ ID NO: 4957715 - DNA, 25 bp, Homo sapien
gagctgcgccgcaccgtgctgcgcc

SEQ ID NO: 4957716 - DNA, 25 bp, Homo sapien
ccgcaccgtgctgcgccgtcgcttt

SEQ ID NO: 4957717 - DNA, 25 bp, Homo sapien
gtcgcttttcgcacgtcctgacggg

SEQ ID NO: 4957718 - DNA, 25 bp, Homo sapien
gtgctgcgccgtcgcttttcgcacg

SEQ ID NO: 4957719 - DNA, 25 bp, Homo sapien
aagtgagattctatagcagcaattg

SEQ ID NO: 4957720 - DNA, 25 bp, Homo sapien
ttgctgctaaggctggtaagtaagg

SEQ ID NO: 4957721 - DNA, 25 bp, Homo sapien
taccaaaccagtcctgctattgcag

SEQ ID NO: 4957722 - DNA, 25 bp, Homo sapien
tgcttttaaaccttagtatgtagta

SEQ ID NO: 4957723 - DNA, 25 bp, Homo sapien
gaaactagtataatgagccaccacg

SEQ ID NO: 4957724 - DNA, 25 bp, Homo sapien
tatccatcatgtggcaacaacagct

SEQ ID NO: 4957725 - DNA, 25 bp, Homo sapien
aacgagttccacctattgcatttgg

SEQ ID NO: 4957726 - DNA, 25 bp, Homo sapien
gtccatgtacatacatccatgcgtg

SEQ ID NO: 4957727 - DNA, 25 bp, Homo sapien
cacgtggactgagatacaatgttgg

SEQ ID NO: 4957728 - DNA, 25 bp, Homo sapien
gaagccctaaaagctcataaaggaa

SEQ ID NO: 4957729 - DNA, 25 bp, Homo sapien
gaaaatgccgtgaactatgtagctc

SEQ ID NO: 4957730 - DNA, 25 bp, Homo sapien
tcaggcttggtaaggtgccatctaa

SEQ ID NO: 4957731 - DNA, 25 bp, Homo sapien
gagttactaggctaatcagtgtacg

SEQ ID NO: 4957732 - DNA, 25 bp, Homo sapien
tacaacccagtcatgaaacagagca

SEQ ID NO: 4957733 - DNA, 25 bp, Homo sapien
taaaaattggtcacatcggagaagc

SEQ ID NO: 4957734 - DNA, 25 bp, Homo sapien
tgtcacccacgatgaaaagaatctg

SEQ ID NO: 4957735 - DNA, 25 bp, Homo sapien
ttttatactggattattccctatgc

SEQ ID NO: 4957736 - DNA, 25 bp, Homo sapien
tatgctttaaaccactgctctcaat

SEQ ID NO: 4957737 - DNA, 25 bp, Homo sapien
gagaagaaagtaaactaatgtgctc

SEQ ID NO: 4957738 - DNA, 25 bp, Homo sapien
actaattgggaagtaatatgcctca

SEQ ID NO: 4957739 - DNA, 25 bp, Homo sapien
gctgtttggcatagatactttgtca

SEQ ID NO: 4957740 - DNA, 25 bp, Homo sapien
tgctgtttggcatagatactttgtc

SEQ ID NO: 4957741 - DNA, 25 bp, Homo sapien
gccacatcctcaatattaggcaaca

SEQ ID NO: 4957742 - DNA, 25 bp, Homo sapien
gtttttatagacatacactgtcaaa

SEQ ID NO: 4957743 - DNA, 25 bp, Homo sapien
tacttaatttgggaactgctcagca

SEQ ID NO: 4957744 - DNA, 25 bp, Homo sapien
gatactttgagatcaggctggtggc

SEQ ID NO: 4957745 - DNA, 25 bp, Homo sapien
gagggactctcccttaaatgtgcag

SEQ ID NO: 4957746 - DNA, 25 bp, Homo sapien
cactgtcggtagtgtagtctctaga

SEQ ID NO: 4957747 - DNA, 25 bp, Homo sapien
tgataaatgaaatgactacgtcctc

SEQ ID NO: 4957748 - DNA, 25 bp, Homo sapien
taactaaaaagggtgcatctcacca

SEQ ID NO: 4957749 - DNA, 25 bp, Homo sapien
gagagatgcatgctatgacaaggaa

SEQ ID NO: 4957750 - DNA, 25 bp, Homo sapien
caccaatgtgcctgtttttagaaat

SEQ ID NO: 4957751 - DNA, 25 bp, Homo sapien
gaatcagagcagaatcttcatcgcc

SEQ ID NO: 4957752 - DNA, 25 bp, Homo sapien
ggcttcatcagaatcccggtccttg

SEQ ID NO: 4957753 - DNA, 25 bp, Homo sapien
tcatcgccttgtgaagggctccggg

SEQ ID NO: 4957754 - DNA, 25 bp, Homo sapien
tagaaaaccctgagtgcttgctggg

SEQ ID NO: 4957755 - DNA, 25 bp, Homo sapien
gataagactttacagtcagtctccc

SEQ ID NO: 4957756 - DNA, 25 bp, Homo sapien
tgcattaaatgcctaggtttgggct

SEQ ID NO: 4957757 - DNA, 25 bp, Homo sapien
tataacctccctgtccaagtacagg

SEQ ID NO: 4957758 - DNA, 25 bp, Homo sapien
tgtattgcactgaatcttaagaggc

SEQ ID NO: 4957759 - DNA, 25 bp, Homo sapien
actgccattaggtaatctgtaactg

SEQ ID NO: 4957760 - DNA, 25 bp, Homo sapien
tgtcggggctgcatccccttttcaa

SEQ ID NO: 4957761 - DNA, 25 bp, Homo sapien
gggctgcatccccttttcaaagcgg

SEQ ID NO: 4957762 - DNA, 25 bp, Homo sapien
gcatccccttttcaaagcggttata

SEQ ID NO: 4957763 - DNA, 25 bp, Homo sapien
agaataagtttatgaaaagtctgcc

SEQ ID NO: 4957764 - DNA, 25 bp, Homo sapien
gataccaccttatcacagtctgaaa

SEQ ID NO: 4957765 - DNA, 25 bp, Homo sapien
cctcaagtcttctaaggtatctatg

SEQ ID NO: 4957766 - DNA, 25 bp, Homo sapien
gatggcaaagcgtcgtgataccacc

SEQ ID NO: 4957767 - DNA, 25 bp, Homo sapien
gtcatgatcactgttgaaacttgtg

SEQ ID NO: 4957768 - DNA, 25 bp, Homo sapien
cttccagtaggacttaattcagtgg

SEQ ID NO: 4957769 - DNA, 25 bp, Homo sapien
aaaggcaacctattacgttggtgca

SEQ ID NO: 4957770 - DNA, 25 bp, Homo sapien
ccgcctcggctaatacatacaatct

SEQ ID NO: 4957771 - DNA, 25 bp, Homo sapien
tgagtctggctgtgatcagctctaa

SEQ ID NO: 4957772 - DNA, 25 bp, Homo sapien
taaacagaggattcaggtagtcggc

SEQ ID NO: 4957773 - DNA, 25 bp, Homo sapien
ttacatggtgttgtagggagatgaa

SEQ ID NO: 4957774 - DNA, 25 bp, Homo sapien
agatgaagggttccctgagtctggc

SEQ ID NO: 4957775 - DNA, 25 bp, Homo sapien
ggagagatttcttttgggtcaccat

SEQ ID NO: 4957776 - DNA, 25 bp, Homo sapien
ccaaactggcaggaataaatgtgat

SEQ ID NO: 4957777 - DNA, 25 bp, Homo sapien
gggaaattgttccattaactgccaa

SEQ ID NO: 4957778 - DNA, 25 bp, Homo sapien
ggctgttacataggaagtttccaaa

SEQ ID NO: 4957779 - DNA, 25 bp, Homo sapien
tatgaccaaaggaaatccagtcctt

SEQ ID NO: 4957780 - DNA, 25 bp, Homo sapien
gtgattaaacttatgaccaaaggaa

SEQ ID NO: 4957781 - DNA, 25 bp, Homo sapien
caaaggaaatccagtccttttcaat

SEQ ID NO: 4957782 - DNA, 25 bp, Homo sapien
cggtgattaaacttatgaccaaagg

SEQ ID NO: 4957783 - DNA, 25 bp, Homo sapien
cagtgaacaagcacacttgcccctt

SEQ ID NO: 4957784 - DNA, 25 bp, Homo sapien
ttcagagtccggtagtgagggtcca

SEQ ID NO: 4957785 - DNA, 25 bp, Homo sapien
accgagcacacctgagcggtcctgt

SEQ ID NO: 4957786 - DNA, 25 bp, Homo sapien
cccagccatcagaacagtgaacaag

SEQ ID NO: 4957787 - DNA, 25 bp, Homo sapien
cattatggctttaatgtgccttaac

SEQ ID NO: 4957788 - DNA, 25 bp, Homo sapien
taatgtgccttaaccagccagagtt

SEQ ID NO: 4957789 - DNA, 25 bp, Homo sapien
tgtgccttaaccagccagagttctc

SEQ ID NO: 4957790 - DNA, 25 bp, Homo sapien
gctttaatgtgccttaaccagccag

SEQ ID NO: 4957791 - DNA, 25 bp, Homo sapien
caccagtgacttgtcctctgctctt

SEQ ID NO: 4957792 - DNA, 25 bp, Homo sapien
gccttcaccagtgacttgtcctctg

SEQ ID NO: 4957793 - DNA, 25 bp, Homo sapien
agccctacaccctcacatctccaac

SEQ ID NO: 4957794 - DNA, 25 bp, Homo sapien
tgcaggccttcaccagtgacttgtc

SEQ ID NO: 4957795 - DNA, 25 bp, Homo sapien
tcaggcctcaaaacctttgcgtgga

SEQ ID NO: 4957796 - DNA, 25 bp, Homo sapien
gaagatttcaatccatcaggcctca

SEQ ID NO: 4957797 - DNA, 25 bp, Homo sapien
tgcgtggaagaacagatcgggtatc

SEQ ID NO: 4957798 - DNA, 25 bp, Homo sapien
gtgcctcccacgacaactccaagtg

SEQ ID NO: 4957799 - DNA, 25 bp, Homo sapien
gtatcttcattacgatgtgaggtgg

SEQ ID NO: 4957800 - DNA, 25 bp, Homo sapien
tagtaagccttccataaacgtatct

SEQ ID NO: 4957801 - DNA, 25 bp, Homo sapien
tataatgatccttgtggtcacaagc

SEQ ID NO: 4957802 - DNA, 25 bp, Homo sapien
tctgaaccgtgtccaatacatagta

SEQ ID NO: 4957803 - DNA, 25 bp, Homo sapien
ggctttccccagaagcgcagacagt

SEQ ID NO: 4957804 - DNA, 25 bp, Homo sapien
actacagcgacagattcctcttggg

SEQ ID NO: 4957805 - DNA, 25 bp, Homo sapien
ccggaagtggtagactacagcgaca

SEQ ID NO: 4957806 - DNA, 25 bp, Homo sapien
tcttttcccagttcgcagagccgga

SEQ ID NO: 4957807 - DNA, 25 bp, Homo sapien
atgacatggatgttctctatcccga

SEQ ID NO: 4957808 - DNA, 25 bp, Homo sapien
ggaataattgtcttcattctcatag

SEQ ID NO: 4957809 - DNA, 25 bp, Homo sapien
tgcagactgttcctcatgacatgga

SEQ ID NO: 4957810 - DNA, 25 bp, Homo sapien
tctatcccgataaactgaaacttga

SEQ ID NO: 4957811 - DNA, 25 bp, Homo sapien
aaggctagaaagcactgagggtcca

SEQ ID NO: 4957812 - DNA, 25 bp, Homo sapien
cgaaggttcctgtgtggcagctaca

SEQ ID NO: 4957813 - DNA, 25 bp, Homo sapien
tgagggtccactacaacaggcccag

SEQ ID NO: 4957814 - DNA, 25 bp, Homo sapien
cactccaggtgaagacgaaggttcc

SEQ ID NO: 4957815 - DNA, 25 bp, Homo sapien
gactgctgaggggtttgctccggcc

SEQ ID NO: 4957816 - DNA, 25 bp, Homo sapien
tgctgaggggtttgctccggcccac

SEQ ID NO: 4957817 - DNA, 25 bp, Homo sapien
actgctgaggggtttgctccggccc

SEQ ID NO: 4957818 - DNA, 25 bp, Homo sapien
ctgctgaggggtttgctccggccca

SEQ ID NO: 4957819 - DNA, 25 bp, Homo sapien
acggggcagaaccacagcaaagtct

SEQ ID NO: 4957820 - DNA, 25 bp, Homo sapien
cacggggcagaaccacagcaaagtc

SEQ ID NO: 4957821 - DNA, 25 bp, Homo sapien
acaccttctagagcaaactcagtct

SEQ ID NO: 4957822 - DNA, 25 bp, Homo sapien
agggtccacaccttctagagcaaac

SEQ ID NO: 4957823 - DNA, 25 bp, Homo sapien
cagtctcctggctaccaaggaggcc

SEQ ID NO: 4957824 - DNA, 25 bp, Homo sapien
ggctaccaaggaggcctaacacact

SEQ ID NO: 4957825 - DNA, 25 bp, Homo sapien
tctggcatccgtgagtagtaactcc

SEQ ID NO: 4957826 - DNA, 25 bp, Homo sapien
gctttgctccgaagaagactggatg

SEQ ID NO: 4957827 - DNA, 25 bp, Homo sapien
tctagctgtggtatcggtttcatca

SEQ ID NO: 4957828 - DNA, 25 bp, Homo sapien
ggacgagtagggcactgatctcact

SEQ ID NO: 4957829 - DNA, 25 bp, Homo sapien
agcatctgctcgtcctctaggcacc

SEQ ID NO: 4957830 - DNA, 25 bp, Homo sapien
tttaggccgggtgtcaacgacataa

SEQ ID NO: 4957831 - DNA, 25 bp, Homo sapien
gggctggctgctccggcagatggag

SEQ ID NO: 4957832 - DNA, 25 bp, Homo sapien
gacataaacgaagtcacttcctgga

SEQ ID NO: 4957833 - DNA, 25 bp, Homo sapien
caggaaatcgccgtctactccggaa

SEQ ID NO: 4957834 - DNA, 25 bp, Homo sapien
cactatgatgtgtgccgtggccgat

SEQ ID NO: 4957835 - DNA, 25 bp, Homo sapien
tggccgatttgggaacgtacagttc

SEQ ID NO: 4957836 - DNA, 25 bp, Homo sapien
tacagttcagtaggataagagtcac

SEQ ID NO: 4957837 - DNA, 25 bp, Homo sapien
gccaggatttgcttgaaagacagaa

SEQ ID NO: 4957838 - DNA, 25 bp, Homo sapien
ccttagtgttctgtccccgtgcact

SEQ ID NO: 4957839 - DNA, 25 bp, Homo sapien
gaccagtgacaatgaagccttcctt

SEQ ID NO: 4957840 - DNA, 25 bp, Homo sapien
gacaaactgccattttgcaccctgg

SEQ ID NO: 4957841 - DNA, 25 bp, Homo sapien
cactgtctttgttagcagaatagaa

SEQ ID NO: 4957842 - DNA, 25 bp, Homo sapien
tccactgtctttgttagcagaatag

SEQ ID NO: 4957843 - DNA, 25 bp, Homo sapien
acctccactgtctttgttagcagaa

SEQ ID NO: 4957844 - DNA, 25 bp, Homo sapien
cactctggaagatgggtttgtaggg

SEQ ID NO: 4957845 - DNA, 25 bp, Homo sapien
catccgcgtgtattcttcactaaga

SEQ ID NO: 4957846 - DNA, 25 bp, Homo sapien
ccagtaatgattagggaggcccatc

SEQ ID NO: 4957847 - DNA, 25 bp, Homo sapien
tcactaagatcgatcagcacccagc

SEQ ID NO: 4957848 - DNA, 25 bp, Homo sapien
cacatcgctgagctgccagtaatga

SEQ ID NO: 4957849 - DNA, 25 bp, Homo sapien
gccttgcaaggcgtatcagggagat

SEQ ID NO: 4957850 - DNA, 25 bp, Homo sapien
tacacgtcgtggcaatctctttcct

SEQ ID NO: 4957851 - DNA, 25 bp, Homo sapien
gaaagttcttgcagcgaatcagcag

SEQ ID NO: 4957852 - DNA, 25 bp, Homo sapien
tccggtagcggttgttgcctgtttc

SEQ ID NO: 4957853 - DNA, 25 bp, Homo sapien
gacactcgatctaccaagcggacat

SEQ ID NO: 4957854 - DNA, 25 bp, Homo sapien
gaattttccacgaatatgacatggg

SEQ ID NO: 4957855 - DNA, 25 bp, Homo sapien
gctgcttttttaggagacactcgat

SEQ ID NO: 4957856 - DNA, 25 bp, Homo sapien
catgggtagccgtcaaatacaaagt

SEQ ID NO: 4957857 - DNA, 25 bp, Homo sapien
aataccctctctgggttttacaatg

SEQ ID NO: 4957858 - DNA, 25 bp, Homo sapien
ggttttacaatggtcaacgctttca

SEQ ID NO: 4957859 - DNA, 25 bp, Homo sapien
caaaagatgtgtagatcctattaag

SEQ ID NO: 4957860 - DNA, 25 bp, Homo sapien
tagatcctattaagaataccctctc

SEQ ID NO: 4957861 - DNA, 25 bp, Homo sapien
cctttgttgaatgacagctctgttg

SEQ ID NO: 4957862 - DNA, 25 bp, Homo sapien
actggtttactttgctactgggtga

SEQ ID NO: 4957863 - DNA, 25 bp, Homo sapien
ggagactacagtcactcttgcattg

SEQ ID NO: 4957864 - DNA, 25 bp, Homo sapien
gcccaaggcccaatgagtttttata

SEQ ID NO: 4957865 - DNA, 25 bp, Homo sapien
caggacacccgtgctagagctaagg

SEQ ID NO: 4957866 - DNA, 25 bp, Homo sapien
cagcatgggtctccaacctttcggc

SEQ ID NO: 4957867 - DNA, 25 bp, Homo sapien
tattgggccataccacacacgtaaa

SEQ ID NO: 4957868 - DNA, 25 bp, Homo sapien
cgttcatccttcaccatggctgtgg

SEQ ID NO: 4957869 - DNA, 25 bp, Homo sapien
acactggcggcccaacataggtcct

SEQ ID NO: 4957870 - DNA, 25 bp, Homo sapien
aggccacactggcggcccaacatag

SEQ ID NO: 4957871 - DNA, 25 bp, Homo sapien
gcggcccaacataggtcctccttgg

SEQ ID NO: 4957872 - DNA, 25 bp, Homo sapien
tggcggcccaacataggtcctcctt

SEQ ID NO: 4957873 - DNA, 25 bp, Homo sapien
cagaggctgcactgatatccagtgt

SEQ ID NO: 4957874 - DNA, 25 bp, Homo sapien
gcccagaggctgcactgatatccag

SEQ ID NO: 4957875 - DNA, 25 bp, Homo sapien
agaggctgcactgatatccagtgtt

SEQ ID NO: 4957876 - DNA, 25 bp, Homo sapien
cccagaggctgcactgatatccagt

SEQ ID NO: 4957877 - DNA, 25 bp, Homo sapien
gcatgtttcaaatcgaaaggttcaa

SEQ ID NO: 4957878 - DNA, 25 bp, Homo sapien
atcgaaaggttcaaaggcctcctgc

SEQ ID NO: 4957879 - DNA, 25 bp, Homo sapien
ttctctgggcggagctctgaagtgt

SEQ ID NO: 4957880 - DNA, 25 bp, Homo sapien
ttctcccggtggtcgagggattctc

SEQ ID NO: 4957881 - DNA, 25 bp, Homo sapien
acctcatgtccacaacttcatttct

SEQ ID NO: 4957882 - DNA, 25 bp, Homo sapien
tataaactacccaattatagctggc

SEQ ID NO: 4957883 - DNA, 25 bp, Homo sapien
tcctgtgtgaaactcacagaaacaa

SEQ ID NO: 4957884 - DNA, 25 bp, Homo sapien
ttatagctggcaaagtactctgaca

SEQ ID NO: 4957885 - DNA, 25 bp, Homo sapien
cccaggtattctgatgtaccagcat

SEQ ID NO: 4957886 - DNA, 25 bp, Homo sapien
aaagcagtcaccagtctcatatgat

SEQ ID NO: 4957887 - DNA, 25 bp, Homo sapien
tctcatatgatagatatcactgatc

SEQ ID NO: 4957888 - DNA, 25 bp, Homo sapien
caccagtctcatatgatagatatca

SEQ ID NO: 4957889 - DNA, 25 bp, Homo sapien
ctagcagacaactgaggttccctcc

SEQ ID NO: 4957890 - DNA, 25 bp, Homo sapien
cttgtgtccactgcgctcccccaaa

SEQ ID NO: 4957891 - DNA, 25 bp, Homo sapien
aaaccaagaggtcagacccagcagc

SEQ ID NO: 4957892 - DNA, 25 bp, Homo sapien
gacccagcagcagctaaggctaggc

SEQ ID NO: 4957893 - DNA, 25 bp, Homo sapien
tccatggctggcccacgtctgcagg

SEQ ID NO: 4957894 - DNA, 25 bp, Homo sapien
gctctctcttaacaggggcagccgg

SEQ ID NO: 4957895 - DNA, 25 bp, Homo sapien
ctgttctccgagacacaaagagggc

SEQ ID NO: 4957896 - DNA, 25 bp, Homo sapien
gcagccggcggagcactatacggcc

SEQ ID NO: 4957897 - DNA, 25 bp, Homo sapien
cggcggagcactatacggccactgt

SEQ ID NO: 4957898 - DNA, 25 bp, Homo sapien
cttccgttatggttggtcactgcca

SEQ ID NO: 4957899 - DNA, 25 bp, Homo sapien
aatgcctgtgaaatcgcaaagctgc

SEQ ID NO: 4957900 - DNA, 25 bp, Homo sapien
tcactgtggttatagccactaacag

SEQ ID NO: 4957901 - DNA, 25 bp, Homo sapien
gccaatattgttactttcactgtgg

SEQ ID NO: 4957902 - DNA, 25 bp, Homo sapien
tgggcccttcagtgagaagattaac

SEQ ID NO: 4957903 - DNA, 25 bp, Homo sapien
acatccatgccaagagtgttgtttt

SEQ ID NO: 4957904 - DNA, 25 bp, Homo sapien
gggagaccgcatccttgccagtgcc

SEQ ID NO: 4957905 - DNA, 25 bp, Homo sapien
aagattaacatccatgccaagagtg

SEQ ID NO: 4957906 - DNA, 25 bp, Homo sapien
ccctttcttctcactggtccggcac

SEQ ID NO: 4957907 - DNA, 25 bp, Homo sapien
ggtccggcacctgtaacatctttca

SEQ ID NO: 4957908 - DNA, 25 bp, Homo sapien
cttatgtttcctttgatcgtcccct

SEQ ID NO: 4957909 - DNA, 25 bp, Homo sapien
cggcacctgtaacatctttcatcta

SEQ ID NO: 4957910 - DNA, 25 bp, Homo sapien
tattgctgacgaatcatttctgctg

SEQ ID NO: 4957911 - DNA, 25 bp, Homo sapien
attgctgacgaatcatttctgctgt

SEQ ID NO: 4957912 - DNA, 25 bp, Homo sapien
atattgctgacgaatcatttctgct

SEQ ID NO: 4957913 - DNA, 25 bp, Homo sapien
catattgctgacgaatcatttctgc

SEQ ID NO: 4957914 - DNA, 25 bp, Homo sapien
ccccagtaagttgctaggtctccag

SEQ ID NO: 4957915 - DNA, 25 bp, Homo sapien
ccagccccagtaagttgctaggtct

SEQ ID NO: 4957916 - DNA, 25 bp, Homo sapien
caacccagccccagtaagttgctag

SEQ ID NO: 4957917 - DNA, 25 bp, Homo sapien
cccgccgagagtccgcgggcgaggg

SEQ ID NO: 4957918 - DNA, 25 bp, Homo sapien
tgaggccgcgctccagcgagtcttc

SEQ ID NO: 4957919 - DNA, 25 bp, Homo sapien
ccagcgagtcttcgtcagggagtcg

SEQ ID NO: 4957920 - DNA, 25 bp, Homo sapien
cggaatgcgcctcgcctcgtccggt

SEQ ID NO: 4957921 - DNA, 25 bp, Homo sapien
gggacgagtccagctgcgcgcagct

SEQ ID NO: 4957922 - DNA, 25 bp, Homo sapien
gcgacttcgcggggacccttcagtc

SEQ ID NO: 4957923 - DNA, 25 bp, Homo sapien
gaggggctggcacggcgacttcgcg

SEQ ID NO: 4957924 - DNA, 25 bp, Homo sapien
gggacccttcagtcactatttccag

SEQ ID NO: 4957925 - DNA, 25 bp, Homo sapien
ctatttccagaggagctcggcgcac

SEQ ID NO: 4957926 - DNA, 25 bp, Homo sapien
cttcgctccttttcggttcttggct

SEQ ID NO: 4957927 - DNA, 25 bp, Homo sapien
cgaagccgccttcgctccttttcgg

SEQ ID NO: 4957928 - DNA, 25 bp, Homo sapien
aaagccggcttggagcgctggaagc

SEQ ID NO: 4957929 - DNA, 25 bp, Homo sapien
tggcttaaattagaaagccggcttg

SEQ ID NO: 4957930 - DNA, 25 bp, Homo sapien
tttaaaatccgtttgagatgggctg

SEQ ID NO: 4957931 - DNA, 25 bp, Homo sapien
tataagcccgtttcatgaaacgctg

SEQ ID NO: 4957932 - DNA, 25 bp, Homo sapien
agatgggctgtattttataagcccg

SEQ ID NO: 4957933 - DNA, 25 bp, Homo sapien
gaaacgctgttcttgaggcttagag

SEQ ID NO: 4957934 - DNA, 25 bp, Homo sapien
tcaactcgtcgaaaagaaatatgct

SEQ ID NO: 4957935 - DNA, 25 bp, Homo sapien
tcttcaactcgtcgaaaagaaatat

SEQ ID NO: 4957936 - DNA, 25 bp, Homo sapien
tctatggagtaaggtattgagagat

SEQ ID NO: 4957937 - DNA, 25 bp, Homo sapien
atccagtctatggagtaaggtattg

SEQ ID NO: 4957938 - DNA, 25 bp, Homo sapien
gagaaaaagtactcagcctcttcag

SEQ ID NO: 4957939 - DNA, 25 bp, Homo sapien
aagtggatatagtgcctggatttca

SEQ ID NO: 4957940 - DNA, 25 bp, Homo sapien
tatctagacgtttgtgcagaaacac

SEQ ID NO: 4957941 - DNA, 25 bp, Homo sapien
tgcaaaactggctaaagcctttagg

SEQ ID NO: 4957942 - DNA, 25 bp, Homo sapien
gagcctgggaaggcgaatagaagct

SEQ ID NO: 4957943 - DNA, 25 bp, Homo sapien
ctgggaaggcgaatagaagctagct

SEQ ID NO: 4957944 - DNA, 25 bp, Homo sapien
gcctgggaaggcgaatagaagctag

SEQ ID NO: 4957945 - DNA, 25 bp, Homo sapien
gcgaatagaagctagctggggagac

SEQ ID NO: 4957946 - DNA, 25 bp, Homo sapien
cggagtccccgttgtgcccatttct

SEQ ID NO: 4957947 - DNA, 25 bp, Homo sapien
gcaagcacactcacctttgcagagt

SEQ ID NO: 4957948 - DNA, 25 bp, Homo sapien
ttgcagagtggaagtgccttgtccc

SEQ ID NO: 4957949 - DNA, 25 bp, Homo sapien
ggctgttatggccagacccggagtc

SEQ ID NO: 4957950 - DNA, 25 bp, Homo sapien
taaaaattgggttaataggtgcagc

SEQ ID NO: 4957951 - DNA, 25 bp, Homo sapien
gatgatattgacaaaacgcagccaa

SEQ ID NO: 4957952 - DNA, 25 bp, Homo sapien
tctaagcagacgatttcagacctgt

SEQ ID NO: 4957953 - DNA, 25 bp, Homo sapien
ctctaatacatgaaggcgatgctac

SEQ ID NO: 4957954 - DNA, 25 bp, Homo sapien
cctttactccgatctgctggccatt

SEQ ID NO: 4957955 - DNA, 25 bp, Homo sapien
gcatgaatggttcccatagttccct

SEQ ID NO: 4957956 - DNA, 25 bp, Homo sapien
caaacaggagaactaaagaaattca

SEQ ID NO: 4957957 - DNA, 25 bp, Homo sapien
gctggccattctgtttacattcgtg

SEQ ID NO: 4957958 - DNA, 25 bp, Homo sapien
gaaatatcttaggagagaatcctgt

SEQ ID NO: 4957959 - DNA, 25 bp, Homo sapien
ctgaatcatactaaagaccagtgga

SEQ ID NO: 4957960 - DNA, 25 bp, Homo sapien
tgaatcatactaaagaccagtggaa

SEQ ID NO: 4957961 - DNA, 25 bp, Homo sapien
gaatcatactaaagaccagtggaag

SEQ ID NO: 4957962 - DNA, 25 bp, Homo sapien
tctttctcagtcgttggttgtgtag

SEQ ID NO: 4957963 - DNA, 25 bp, Homo sapien
tctcagtcgttggttgtgtagtcat

SEQ ID NO: 4957964 - DNA, 25 bp, Homo sapien
tttctcagtcgttggttgtgtagtc

SEQ ID NO: 4957965 - DNA, 25 bp, Homo sapien
ttctcagtcgttggttgtgtagtca

SEQ ID NO: 4957966 - DNA, 25 bp, Homo sapien
taacaagcagctagtacttaacctc

SEQ ID NO: 4957967 - DNA, 25 bp, Homo sapien
tgtcctcagttggtagacagagaac

SEQ ID NO: 4957968 - DNA, 25 bp, Homo sapien
tactatcacattgcaggtcagaact

SEQ ID NO: 4957969 - DNA, 25 bp, Homo sapien
taggagttgagattatggtgccagc

SEQ ID NO: 4957970 - DNA, 25 bp, Homo sapien
gagaatctctatcttcgtccatatt

SEQ ID NO: 4957971 - DNA, 25 bp, Homo sapien
tctttttaagcaacagtgatgagaa

SEQ ID NO: 4957972 - DNA, 25 bp, Homo sapien
tccatatttctgtcgccattttctc

SEQ ID NO: 4957973 - DNA, 25 bp, Homo sapien
ccaggaacttatcagaactcttctg

SEQ ID NO: 4957974 - DNA, 25 bp, Homo sapien
tatgcttggctaaggaggaaatctc

SEQ ID NO: 4957975 - DNA, 25 bp, Homo sapien
ctcttcacagggagacgtggcgctg

SEQ ID NO: 4957976 - DNA, 25 bp, Homo sapien
tgtccgtgcccagaattatgcattg

SEQ ID NO: 4957977 - DNA, 25 bp, Homo sapien
gaaaacccaggtcttgtgtccgtgc

SEQ ID NO: 4957978 - DNA, 25 bp, Homo sapien
taattgtccttaaccacacgtcttg

SEQ ID NO: 4957979 - DNA, 25 bp, Homo sapien
cacacgtcttgtgtacgtacaacca

SEQ ID NO: 4957980 - DNA, 25 bp, Homo sapien
cacagtaattgtccttaaccacacg

SEQ ID NO: 4957981 - DNA, 25 bp, Homo sapien
agtctgctgcaatcacagtaattgt

SEQ ID NO: 4957982 - DNA, 25 bp, Homo sapien
gactccggttaccaaggtgctgagg

SEQ ID NO: 4957983 - DNA, 25 bp, Homo sapien
gagtgacatactagccaaagattgc

SEQ ID NO: 4957984 - DNA, 25 bp, Homo sapien
ggaacaggttgtacccactggcagt

SEQ ID NO: 4957985 - DNA, 25 bp, Homo sapien
caaagattgctggagacctacgggc

SEQ ID NO: 4957986 - DNA, 25 bp, Homo sapien
atggagtcacatgtttggaagcagc

SEQ ID NO: 4957987 - DNA, 25 bp, Homo sapien
cagctgtctttacagacttcccaga

SEQ ID NO: 4957988 - DNA, 25 bp, Homo sapien
aaatggagtcacatgtttggaagca

SEQ ID NO: 4957989 - DNA, 25 bp, Homo sapien
gcagctgtctttacagacttcccag

SEQ ID NO: 4957990 - DNA, 25 bp, Homo sapien
tatatcagtgtgtctcgacaaaagc

SEQ ID NO: 4957991 - DNA, 25 bp, Homo sapien
tccccagagtaacatggagaacctg

SEQ ID NO: 4957992 - DNA, 25 bp, Homo sapien
aatccgtattttaccaggctgtgcg

SEQ ID NO: 4957993 - DNA, 25 bp, Homo sapien
tgctaagcactgcatgatacacctg

SEQ ID NO: 4957994 - DNA, 25 bp, Homo sapien
gacctttgcccgatgtctgatccgg

SEQ ID NO: 4957995 - DNA, 25 bp, Homo sapien
gaagacaccaaattatgccgctgct

SEQ ID NO: 4957996 - DNA, 25 bp, Homo sapien
gaaaaatcgtgaccctggacagtct

SEQ ID NO: 4957997 - DNA, 25 bp, Homo sapien
tacacctacgtgactgtcggagagc

SEQ ID NO: 4957998 - DNA, 25 bp, Homo sapien
tgagtagctctgattacagtcacgt

SEQ ID NO: 4957999 - DNA, 25 bp, Homo sapien
ctgagtagctctgattacagtcacg

SEQ ID NO: 4958000 - DNA, 25 bp, Homo sapien
agtagctctgattacagtcacgtgc

SEQ ID NO: 4958001 - DNA, 25 bp, Homo sapien
tagctctgattacagtcacgtgcca

SEQ ID NO: 4958002 - DNA, 25 bp, Homo sapien
ccagtgtcgtcattaatcggtggca

SEQ ID NO: 4958003 - DNA, 25 bp, Homo sapien
tcatggtgtctgtcactggttaggg

SEQ ID NO: 4958004 - DNA, 25 bp, Homo sapien
tgtaaagaggtttcatctatgcccc

SEQ ID NO: 4958005 - DNA, 25 bp, Homo sapien
tatactgcacatactgaaatagagg

SEQ ID NO: 4958006 - DNA, 25 bp, Homo sapien
taccccataaattgtgtagcacttt

SEQ ID NO: 4958007 - DNA, 25 bp, Homo sapien
cctgttctgataggaacggcctgtt

SEQ ID NO: 4958008 - DNA, 25 bp, Homo sapien
tggcaaatggcccaatttaagggct

SEQ ID NO: 4958009 - DNA, 25 bp, Homo sapien
tatacaataacccatcagtgattgg

SEQ ID NO: 4958010 - DNA, 25 bp, Homo sapien
taagcacaggctcgggtattttggt

SEQ ID NO: 4958011 - DNA, 25 bp, Homo sapien
taaaactgttatgcccactgtgctc

SEQ ID NO: 4958012 - DNA, 25 bp, Homo sapien
caagctgcgtggtttactggagaga

SEQ ID NO: 4958013 - DNA, 25 bp, Homo sapien
tgtcacagtacgctgaaaacccgtt

SEQ ID NO: 4958014 - DNA, 25 bp, Homo sapien
gggattcctgtttacttgctgctgc

SEQ ID NO: 4958015 - DNA, 25 bp, Homo sapien
tgctgccacaccttttccgactgat

SEQ ID NO: 4958016 - DNA, 25 bp, Homo sapien
aactctagtacattatagcaggtgc

SEQ ID NO: 4958017 - DNA, 25 bp, Homo sapien
tccgactgatctgtcctggtaggtg

SEQ ID NO: 4958018 - DNA, 25 bp, Homo sapien
gattctgactctccctttccggtga

SEQ ID NO: 4958019 - DNA, 25 bp, Homo sapien
taagaccggcctgagtagcatagca

SEQ ID NO: 4958020 - DNA, 25 bp, Homo sapien
gaattaccaccaaaaggcaatggca

SEQ ID NO: 4958021 - DNA, 25 bp, Homo sapien
gaagcataaggaaaagccatcggcc

SEQ ID NO: 4958022 - DNA, 25 bp, Homo sapien
caagatgaataaggaccaagggacc

SEQ ID NO: 4958023 - DNA, 25 bp, Homo sapien
gaaagagcgtcatattgccaacagg

SEQ ID NO: 4958024 - DNA, 25 bp, Homo sapien
tggagatcataatcagggccccagg

SEQ ID NO: 4958025 - DNA, 25 bp, Homo sapien
ctgtgactcatagaagggctggctg

SEQ ID NO: 4958026 - DNA, 25 bp, Homo sapien
tgaaaggcctgtgacgatccaagac

SEQ ID NO: 4958027 - DNA, 25 bp, Homo sapien
tcttcaaggacagaccacagtagct

SEQ ID NO: 4958028 - DNA, 25 bp, Homo sapien
tgaaaggaacgctcaacagtgttgg

SEQ ID NO: 4958029 - DNA, 25 bp, Homo sapien
ggactgggacacaccacgagaatct

SEQ ID NO: 4958030 - DNA, 25 bp, Homo sapien
tgcatagattaagaacattcaactt

SEQ ID NO: 4958031 - DNA, 25 bp, Homo sapien
tcaaaggtgtaattgtagattagtc

SEQ ID NO: 4958032 - DNA, 25 bp, Homo sapien
tagtagcaactttaacaaatgtgag

SEQ ID NO: 4958033 - DNA, 25 bp, Homo sapien
ttatttgtcaaacatagatagcttt

SEQ ID NO: 4958034 - DNA, 25 bp, Homo sapien
ccaactctgcggttgcagtggaaat

SEQ ID NO: 4958035 - DNA, 25 bp, Homo sapien
gctctgtgagcccatgaccaactct

SEQ ID NO: 4958036 - DNA, 25 bp, Homo sapien
tataaactaagaggagatacgacct

SEQ ID NO: 4958037 - DNA, 25 bp, Homo sapien
gctgtcacagggctgtaaaaatgaa

SEQ ID NO: 4958038 - DNA, 25 bp, Homo sapien
attccagcattatttatttgatcag

SEQ ID NO: 4958039 - DNA, 25 bp, Homo sapien
tattccagcattatttatttgatca

SEQ ID NO: 4958040 - DNA, 25 bp, Homo sapien
ttccagcattatttatttgatcaga

SEQ ID NO: 4958041 - DNA, 25 bp, Homo sapien
tcacgtaatacggaggacagcaggg

SEQ ID NO: 4958042 - DNA, 25 bp, Homo sapien
gaaaaatgagcgctatcctcccaga

SEQ ID NO: 4958043 - DNA, 25 bp, Homo sapien
aacaacgtccgtgtcgatgccgaaa

SEQ ID NO: 4958044 - DNA, 25 bp, Homo sapien
gtgacgctccagttaccctacggtg

SEQ ID NO: 4958045 - DNA, 25 bp, Homo sapien
ggctacacaggtccccattgtgcag

SEQ ID NO: 4958046 - DNA, 25 bp, Homo sapien
tcgttttccatagagagtcgcttgt

SEQ ID NO: 4958047 - DNA, 25 bp, Homo sapien
tctccagcgactcttgcagaacagc

SEQ ID NO: 4958048 - DNA, 25 bp, Homo sapien
gagcccgaattccttggtgactgca

SEQ ID NO: 4958049 - DNA, 25 bp, Homo sapien
gaagaaaaaggccagaaaccatgag

SEQ ID NO: 4958050 - DNA, 25 bp, Homo sapien
cttgaagaaaaaggccagaaaccat

SEQ ID NO: 4958051 - DNA, 25 bp, Homo sapien
ttgaagaaaaaggccagaaaccatg

SEQ ID NO: 4958052 - DNA, 25 bp, Homo sapien
agaaaaaggccagaaaccatgagat

SEQ ID NO: 4958053 - DNA, 25 bp, Homo sapien
ttgtccatccgagctttcaattctt

SEQ ID NO: 4958054 - DNA, 25 bp, Homo sapien
ctgctggaaacgcttcaatttgtca

SEQ ID NO: 4958055 - DNA, 25 bp, Homo sapien
tggaaacgcttcaatttgtcaacca

SEQ ID NO: 4958056 - DNA, 25 bp, Homo sapien
tgccatgtgcttgtccatccgagct

SEQ ID NO: 4958057 - DNA, 25 bp, Homo sapien
catgaatggcatatggagcagtcct

SEQ ID NO: 4958058 - DNA, 25 bp, Homo sapien
gaacaggacgacctttggcaggaac

SEQ ID NO: 4958059 - DNA, 25 bp, Homo sapien
tgaaataaaccctgcagacacactg

SEQ ID NO: 4958060 - DNA, 25 bp, Homo sapien
tcaaagaagtaacatgccacgagtc

SEQ ID NO: 4958061 - DNA, 25 bp, Homo sapien
ttaacttgatgtcctgttgatgcag

SEQ ID NO: 4958062 - DNA, 25 bp, Homo sapien
cctgttctagatacatgatctgagg

SEQ ID NO: 4958063 - DNA, 25 bp, Homo sapien
tctcattcttgatctctaacacagc

SEQ ID NO: 4958064 - DNA, 25 bp, Homo sapien
tgatctctaacacagctttcaggct

SEQ ID NO: 4958065 - DNA, 25 bp, Homo sapien
gaccaatccttagggagaatccagg

SEQ ID NO: 4958066 - DNA, 25 bp, Homo sapien
ggttaagcgccctactcaggaaaga

SEQ ID NO: 4958067 - DNA, 25 bp, Homo sapien
taagagtcggtggtgtggtcatcaa

SEQ ID NO: 4958068 - DNA, 25 bp, Homo sapien
tcagggcagggactaatacatcttt

SEQ ID NO: 4958069 - DNA, 25 bp, Homo sapien
gggaaatggcataacttaccgtcag

SEQ ID NO: 4958070 - DNA, 25 bp, Homo sapien
gcatatccctgcatgtaagtctaga

SEQ ID NO: 4958071 - DNA, 25 bp, Homo sapien
tgtgtaccggaagctctttcaaacc

SEQ ID NO: 4958072 - DNA, 25 bp, Homo sapien
gcctcagcatgcttacgtgacagaa

SEQ ID NO: 4958073 - DNA, 25 bp, Homo sapien
cgacgccagtcttaaaaggaccaca

SEQ ID NO: 4958074 - DNA, 25 bp, Homo sapien
taaaaggaccacatgttctacaatc

SEQ ID NO: 4958075 - DNA, 25 bp, Homo sapien
ggaccacatgttctacaatcaacct

SEQ ID NO: 4958076 - DNA, 25 bp, Homo sapien
ctttatactaagtaaacgacgccag

SEQ ID NO: 4958077 - DNA, 25 bp, Homo sapien
cactcttcagatcattgatttgctt

SEQ ID NO: 4958078 - DNA, 25 bp, Homo sapien
tcactcttcagatcattgatttgct

SEQ ID NO: 4958079 - DNA, 25 bp, Homo sapien
tctcagaaagtaaatcttcaagcga

SEQ ID NO: 4958080 - DNA, 25 bp, Homo sapien
gaaagtaaatcttcaagcgatttct

SEQ ID NO: 4958081 - DNA, 25 bp, Homo sapien
cagaaagtaaatcttcaagcgattt

SEQ ID NO: 4958082 - DNA, 25 bp, Homo sapien
ctcagaaagtaaatcttcaagcgat

SEQ ID NO: 4958083 - DNA, 25 bp, Homo sapien
tgtaaattggccatctgttctcaaa

SEQ ID NO: 4958084 - DNA, 25 bp, Homo sapien
cattttatgactgagagccctgagg

SEQ ID NO: 4958085 - DNA, 25 bp, Homo sapien
gaggtggttagggtagacattccca

SEQ ID NO: 4958086 - DNA, 25 bp, Homo sapien
ggttgatgatgaagccgtatgacgt

SEQ ID NO: 4958087 - DNA, 25 bp, Homo sapien
gaggccatgcgaccttaggacaaca

SEQ ID NO: 4958088 - DNA, 25 bp, Homo sapien
aaacttgtacttgccacttcccagg

SEQ ID NO: 4958089 - DNA, 25 bp, Homo sapien
gacactgccgattctgttctgaaag

SEQ ID NO: 4958090 - DNA, 25 bp, Homo sapien
tgttcactacaagtctgcctggagc

SEQ ID NO: 4958091 - DNA, 25 bp, Homo sapien
tctgagtggctagcttcaatttcca

SEQ ID NO: 4958092 - DNA, 25 bp, Homo sapien
caatttccaacttagaggtttcatg

SEQ ID NO: 4958093 - DNA, 25 bp, Homo sapien
catgcgcagcatttaagttgtcaaa

SEQ ID NO: 4958094 - DNA, 25 bp, Homo sapien
gaaagggaggcttcataggccttct

SEQ ID NO: 4958095 - DNA, 25 bp, Homo sapien
gctctccagggtgacagatggaaat

SEQ ID NO: 4958096 - DNA, 25 bp, Homo sapien
cacagacacagaggctctccagggt

SEQ ID NO: 4958097 - DNA, 25 bp, Homo sapien
aggaacacagacacagaggctctcc

SEQ ID NO: 4958098 - DNA, 25 bp, Homo sapien
gaggctctccagggtgacagatgga

SEQ ID NO: 4958099 - DNA, 25 bp, Homo sapien
tttggtcataagaaaactattcaat

SEQ ID NO: 4958100 - DNA, 25 bp, Homo sapien
ttggtcataagaaaactattcaatt

SEQ ID NO: 4958101 - DNA, 25 bp, Homo sapien
ctttggtcataagaaaactattcaa

SEQ ID NO: 4958102 - DNA, 25 bp, Homo sapien
cctttggtcataagaaaactattca

SEQ ID NO: 4958103 - DNA, 25 bp, Homo sapien
ggtgctgctggacgaatgcttcata

SEQ ID NO: 4958104 - DNA, 25 bp, Homo sapien
tacactgtttgtaactcattcctgg

SEQ ID NO: 4958105 - DNA, 25 bp, Homo sapien
taatttctcacaggtggttgaagca

SEQ ID NO: 4958106 - DNA, 25 bp, Homo sapien
tcttcaatgtaagtgtcccgaagct

SEQ ID NO: 4958107 - DNA, 25 bp, Homo sapien
acagctgtgatgacacctgaagcat

SEQ ID NO: 4958108 - DNA, 25 bp, Homo sapien
agctgtgatgacacctgaagcatac

SEQ ID NO: 4958109 - DNA, 25 bp, Homo sapien
cagctgtgatgacacctgaagcata

SEQ ID NO: 4958110 - DNA, 25 bp, Homo sapien
atgatgtcttgggtctctagtgacc

SEQ ID NO: 4958111 - DNA, 25 bp, Homo sapien
acccatgatgtcttgggtctctagt

SEQ ID NO: 4958112 - DNA, 25 bp, Homo sapien
gatgtcttgggtctctagtgaccat

SEQ ID NO: 4958113 - DNA, 25 bp, Homo sapien
ccatgatgtcttgggtctctagtga

SEQ ID NO: 4958114 - DNA, 25 bp, Homo sapien
catttgcacctaggagttcatgacc

SEQ ID NO: 4958115 - DNA, 25 bp, Homo sapien
tcatttgcacctaggagttcatgac

SEQ ID NO: 4958116 - DNA, 25 bp, Homo sapien
gatagtttacgtccagtcagggtgg

SEQ ID NO: 4958117 - DNA, 25 bp, Homo sapien
aaaaactatttctcgttgcctggca

SEQ ID NO: 4958118 - DNA, 25 bp, Homo sapien
gaggaccctcctaaacatatagata

SEQ ID NO: 4958119 - DNA, 25 bp, Homo sapien
gcaggaatagtgtctgccaaagaga

SEQ ID NO: 4958120 - DNA, 25 bp, Homo sapien
gccgttggtgaaggtatcaaatagc

SEQ ID NO: 4958121 - DNA, 25 bp, Homo sapien
caagccgttggtgaaggtatcaaat

SEQ ID NO: 4958122 - DNA, 25 bp, Homo sapien
ccgttggtgaaggtatcaaatagct

SEQ ID NO: 4958123 - DNA, 25 bp, Homo sapien
tttgcaagccgttggtgaaggtatc

SEQ ID NO: 4958124 - DNA, 25 bp, Homo sapien
tggctttcgtttgaaggaagtggcc

SEQ ID NO: 4958125 - DNA, 25 bp, Homo sapien
tgggctgcagtaatcgctcacacta

SEQ ID NO: 4958126 - DNA, 25 bp, Homo sapien
ttgctctgtttactggcccggtgtg

SEQ ID NO: 4958127 - DNA, 25 bp, Homo sapien
gctctgtttactggcccggtgtgct

SEQ ID NO: 4958128 - DNA, 25 bp, Homo sapien
gatcctgacacacgtccatggcaag

SEQ ID NO: 4958129 - DNA, 25 bp, Homo sapien
cgtaggagtgtgatgatgtcataac

SEQ ID NO: 4958130 - DNA, 25 bp, Homo sapien
gaaatccgaggaaatccgatcctga

SEQ ID NO: 4958131 - DNA, 25 bp, Homo sapien
catggcaagcgactatgtaggtgac

SEQ ID NO: 4958132 - DNA, 25 bp, Homo sapien
ggaagacaattccacccagccagcc

SEQ ID NO: 4958133 - DNA, 25 bp, Homo sapien
gtgggaagacaattccacccagcca

SEQ ID NO: 4958134 - DNA, 25 bp, Homo sapien
tgggaagacaattccacccagccag

SEQ ID NO: 4958135 - DNA, 25 bp, Homo sapien
aggtgggaagacaattccacccagc

SEQ ID NO: 4958136 - DNA, 25 bp, Homo sapien
gatcatttttagagcacgagggtca

SEQ ID NO: 4958137 - DNA, 25 bp, Homo sapien
aaactggtctcctgttaacctgagg

SEQ ID NO: 4958138 - DNA, 25 bp, Homo sapien
aaaaggctgctaaaagtccttggca

SEQ ID NO: 4958139 - DNA, 25 bp, Homo sapien
taacctgaggacactagggccagag

SEQ ID NO: 4958140 - DNA, 25 bp, Homo sapien
cacattccatatggcgtgaggcaat

SEQ ID NO: 4958141 - DNA, 25 bp, Homo sapien
gattggtggtctagccatcttgggt

SEQ ID NO: 4958142 - DNA, 25 bp, Homo sapien
cagagaagtagactgagagctgaac

SEQ ID NO: 4958143 - DNA, 25 bp, Homo sapien
gtagctatcaatgcaaacgagcgtt

SEQ ID NO: 4958144 - DNA, 25 bp, Homo sapien
gacccattgggtagctgttgcagta

SEQ ID NO: 4958145 - DNA, 25 bp, Homo sapien
aatgaggagacgctgcatggcgctc

SEQ ID NO: 4958146 - DNA, 25 bp, Homo sapien
catatcgaccctgccaaagctgagg

SEQ ID NO: 4958147 - DNA, 25 bp, Homo sapien
taagtacagatcctggccgcaagtg

SEQ ID NO: 4958148 - DNA, 25 bp, Homo sapien
tagcatcgccatttttaccgaggat

SEQ ID NO: 4958149 - DNA, 25 bp, Homo sapien
tattcaagctccacaataacgcagc

SEQ ID NO: 4958150 - DNA, 25 bp, Homo sapien
tcctggaccgcttcatcacaagtgt

SEQ ID NO: 4958151 - DNA, 25 bp, Homo sapien
ggccccggacagtgtgacaacatca

SEQ ID NO: 4958152 - DNA, 25 bp, Homo sapien
gcaatgacacattccctaagaagcc

SEQ ID NO: 4958153 - DNA, 25 bp, Homo sapien
gggatctggataggccacccactgt

SEQ ID NO: 4958154 - DNA, 25 bp, Homo sapien
ccatcagatgtatgcctgctgcaac

SEQ ID NO: 4958155 - DNA, 25 bp, Homo sapien
tccaaacggagaacggttaccatca

SEQ ID NO: 4958156 - DNA, 25 bp, Homo sapien
tgggcacagactgttacagctattt

SEQ ID NO: 4958157 - DNA, 25 bp, Homo sapien
tttcctgtcaggctacctgactcac

SEQ ID NO: 4958158 - DNA, 25 bp, Homo sapien
tccttatcaaggataggaaggtgac

SEQ ID NO: 4958159 - DNA, 25 bp, Homo sapien
cacagactgttacagctatttcctg

SEQ ID NO: 4958160 - DNA, 25 bp, Homo sapien
ccaactgcggttgcttaattgtgct

SEQ ID NO: 4958161 - DNA, 25 bp, Homo sapien
tatttaaggcatggacaaaagcaag

SEQ ID NO: 4958162 - DNA, 25 bp, Homo sapien
gaacctctaggtaggctcacctcca

SEQ ID NO: 4958163 - DNA, 25 bp, Homo sapien
ttaggtaatcataagggctgctgtc

SEQ ID NO: 4958164 - DNA, 25 bp, Homo sapien
taagaatctggacggttagtcaggg

SEQ ID NO: 4958165 - DNA, 25 bp, Homo sapien
tgtgttgtttcagtgcttcctcccg

SEQ ID NO: 4958166 - DNA, 25 bp, Homo sapien
ccggaggttaacaagttcttgagat

SEQ ID NO: 4958167 - DNA, 25 bp, Homo sapien
ctagctctccccggaggttaacaag

SEQ ID NO: 4958168 - DNA, 25 bp, Homo sapien
cttgagatagggttttgtgttgttt

SEQ ID NO: 4958169 - DNA, 25 bp, Homo sapien
ctgcggaaaacacacatcaagttac

SEQ ID NO: 4958170 - DNA, 25 bp, Homo sapien
tttggtttgacgcagtgaatggccc

SEQ ID NO: 4958171 - DNA, 25 bp, Homo sapien
tgcaggtcccagtgaaactttggtt

SEQ ID NO: 4958172 - DNA, 25 bp, Homo sapien
aaggtagattccctagcaccaggga

SEQ ID NO: 4958173 - DNA, 25 bp, Homo sapien
ttgcagagatcatgagacccggcct

SEQ ID NO: 4958174 - DNA, 25 bp, Homo sapien
aatagaggcacagtttgctgctggg

SEQ ID NO: 4958175 - DNA, 25 bp, Homo sapien
ccttgttgctgcacatggagaatag

SEQ ID NO: 4958176 - DNA, 25 bp, Homo sapien
acccctcgcactgtgcaagaagcat

SEQ ID NO: 4958177 - DNA, 25 bp, Homo sapien
ccagtcgggtctgtctacattcaaa

SEQ ID NO: 4958178 - DNA, 25 bp, Homo sapien
ggaaacttgttcttcgaagcccata

SEQ ID NO: 4958179 - DNA, 25 bp, Homo sapien
cccctctgcatggataatggagtta

SEQ ID NO: 4958180 - DNA, 25 bp, Homo sapien
ttagacttgtgagcctttttcttcc

SEQ ID NO: 4958181 - DNA, 25 bp, Homo sapien
cccctctctaattgtggtcattatt

SEQ ID NO: 4958182 - DNA, 25 bp, Homo sapien
ctgtggtcccatcggtgtgcctgca

SEQ ID NO: 4958183 - DNA, 25 bp, Homo sapien
taattgaattaggagtccctgggac

SEQ ID NO: 4958184 - DNA, 25 bp, Homo sapien
tgagtagcatcaacagcatagagca

SEQ ID NO: 4958185 - DNA, 25 bp, Homo sapien
ttactcagctgctcctagatcagtg

SEQ ID NO: 4958186 - DNA, 25 bp, Homo sapien
tgctcccccgacctcaagtagaaag

SEQ ID NO: 4958187 - DNA, 25 bp, Homo sapien
ggctctttctaggatgcacctcctt

SEQ ID NO: 4958188 - DNA, 25 bp, Homo sapien
ggccagcgtgtgagcaagtcctccc

SEQ ID NO: 4958189 - DNA, 25 bp, Homo sapien
ctctttctaggatgcacctccttac

SEQ ID NO: 4958190 - DNA, 25 bp, Homo sapien
ggtgctgaatcacaactgtcaatgc

SEQ ID NO: 4958191 - DNA, 25 bp, Homo sapien
tggtattaccacaggcaagaagctg

SEQ ID NO: 4958192 - DNA, 25 bp, Homo sapien
tctgtggctggatacataagcttcg

SEQ ID NO: 4958193 - DNA, 25 bp, Homo sapien
gcttgagctgcaggataaatccact

SEQ ID NO: 4958194 - DNA, 25 bp, Homo sapien
cacttgacggacgatttctcggacg

SEQ ID NO: 4958195 - DNA, 25 bp, Homo sapien
gcctctgggcaagcgaattcacttc

SEQ ID NO: 4958196 - DNA, 25 bp, Homo sapien
tgacggcatgaattacccacttgac

SEQ ID NO: 4958197 - DNA, 25 bp, Homo sapien
tggataagcccatcaaagactgata

SEQ ID NO: 4958198 - DNA, 25 bp, Homo sapien
gaatatatagtacgcttttatttct

SEQ ID NO: 4958199 - DNA, 25 bp, Homo sapien
acatgtgatcacatgcaaatctaaa

SEQ ID NO: 4958200 - DNA, 25 bp, Homo sapien
tgtgatcacatgcaaatctaaaaca

SEQ ID NO: 4958201 - DNA, 25 bp, Homo sapien
aaaaggtatagaatatatagtacgc

SEQ ID NO: 4958202 - DNA, 25 bp, Homo sapien
cctttggccgtcagtcgtatgtgaa

SEQ ID NO: 4958203 - DNA, 25 bp, Homo sapien
gaaggtttcgaagcaatcctttggc

SEQ ID NO: 4958204 - DNA, 25 bp, Homo sapien
tatgtgaatggtggataaggagaat

SEQ ID NO: 4958205 - DNA, 25 bp, Homo sapien
aggagaatttgggagacaacaacat

SEQ ID NO: 4958206 - DNA, 25 bp, Homo sapien
taaactcagtactcttcaaggccaa

SEQ ID NO: 4958207 - DNA, 25 bp, Homo sapien
gaggcaatttccatggactgtcaca

SEQ ID NO: 4958208 - DNA, 25 bp, Homo sapien
gagcaggtggcgagatttcacagaa

SEQ ID NO: 4958209 - DNA, 25 bp, Homo sapien
tcagaggaaagatgcctacacagca

SEQ ID NO: 4958210 - DNA, 25 bp, Homo sapien
ggttacgaattctgagatagctggg

SEQ ID NO: 4958211 - DNA, 25 bp, Homo sapien
gtcttcctagctttaagagcctaca

SEQ ID NO: 4958212 - DNA, 25 bp, Homo sapien
cgaattctgagatagctgggcgcag

SEQ ID NO: 4958213 - DNA, 25 bp, Homo sapien
ctacaaaaggttacgaattctgaga

SEQ ID NO: 4958214 - DNA, 25 bp, Homo sapien
gagctgtaaataaattttttctcga

SEQ ID NO: 4958215 - DNA, 25 bp, Homo sapien
ctgcattaagagctgtaaataaatt

SEQ ID NO: 4958216 - DNA, 25 bp, Homo sapien
cattaagagctgtaaataaattttt

SEQ ID NO: 4958217 - DNA, 25 bp, Homo sapien
agagctgtaaataaattttttctcg

SEQ ID NO: 4958218 - DNA, 25 bp, Homo sapien
tgaggaaccattctgaaatgctggt

SEQ ID NO: 4958219 - DNA, 25 bp, Homo sapien
ttggaggagttttcatcaagtgaac

SEQ ID NO: 4958220 - DNA, 25 bp, Homo sapien
tgaacatgagccctggataccaaag

SEQ ID NO: 4958221 - DNA, 25 bp, Homo sapien
tatttgatgacagcggcattaccag

SEQ ID NO: 4958222 - DNA, 25 bp, Homo sapien
tatacaaaggctgtacgatcccacg

SEQ ID NO: 4958223 - DNA, 25 bp, Homo sapien
ggtagcatcatagtgcctctctgaa

SEQ ID NO: 4958224 - DNA, 25 bp, Homo sapien
cagcagtgtcaataaggtagcatca

SEQ ID NO: 4958225 - DNA, 25 bp, Homo sapien
cagtaaacgtggctaacaaaggaat

SEQ ID NO: 4958226 - DNA, 25 bp, Homo sapien
tgaatgcttaatccgcaacaggaac

SEQ ID NO: 4958227 - DNA, 25 bp, Homo sapien
ggaacacatcgccactagacaggct

SEQ ID NO: 4958228 - DNA, 25 bp, Homo sapien
aaaaaatgcgtaagctccaaggcac

SEQ ID NO: 4958229 - DNA, 25 bp, Homo sapien
tccaaggcactacacaaaacagatt

SEQ ID NO: 4958230 - DNA, 25 bp, Homo sapien
aattgttgctgtaagtgctcagctc

SEQ ID NO: 4958231 - DNA, 25 bp, Homo sapien
ttgttgctgtaagtgctcagctcac

SEQ ID NO: 4958232 - DNA, 25 bp, Homo sapien
attgttgctgtaagtgctcagctca

SEQ ID NO: 4958233 - DNA, 25 bp, Homo sapien
tccgcagcgcaggacttttcaaaga

SEQ ID NO: 4958234 - DNA, 25 bp, Homo sapien
gcagttttcaaggatgtaggctttc

SEQ ID NO: 4958235 - DNA, 25 bp, Homo sapien
ggaagtggtctaggcaaattcaccc

SEQ ID NO: 4958236 - DNA, 25 bp, Homo sapien
aaattcacccatgacgactgtgcag

SEQ ID NO: 4958237 - DNA, 25 bp, Homo sapien
ctgaaggagatgatcaatcagaata

SEQ ID NO: 4958238 - DNA, 25 bp, Homo sapien
ctttcatgccagtaggggcaagagc

SEQ ID NO: 4958239 - DNA, 25 bp, Homo sapien
ccagtaggggcaagagccagatctg

SEQ ID NO: 4958240 - DNA, 25 bp, Homo sapien
cagacataaggacaagagggcgaag

SEQ ID NO: 4958241 - DNA, 25 bp, Homo sapien
tcagacataaggacaagagggcgaa

SEQ ID NO: 4958242 - DNA, 25 bp, Homo sapien
gtccctgccctgagatgccgtcctt

SEQ ID NO: 4958243 - DNA, 25 bp, Homo sapien
tccctgccctgagatgccgtccttt

SEQ ID NO: 4958244 - DNA, 25 bp, Homo sapien
cctgccctgagatgccgtcctttgc

SEQ ID NO: 4958245 - DNA, 25 bp, Homo sapien
ctgccctgagatgccgtcctttgct

SEQ ID NO: 4958246 - DNA, 25 bp, Homo sapien
aaaacattctcacgtgtgtggacac

SEQ ID NO: 4958247 - DNA, 25 bp, Homo sapien
cccaaggctgtaccggcagaagtaa

SEQ ID NO: 4958248 - DNA, 25 bp, Homo sapien
cagtcaattggaatggctagcaggc

SEQ ID NO: 4958249 - DNA, 25 bp, Homo sapien
gatggagccatgtgctgcaaacccc

SEQ ID NO: 4958250 - DNA, 25 bp, Homo sapien
tgttccgcctcaaacaggaaacagg

SEQ ID NO: 4958251 - DNA, 25 bp, Homo sapien
caaaccgcaggagtcaggcttggat

SEQ ID NO: 4958252 - DNA, 25 bp, Homo sapien
gatcctctgaggagatacggctcga

SEQ ID NO: 4958253 - DNA, 25 bp, Homo sapien
gggccccactttggcttttggagca

SEQ ID NO: 4958254 - DNA, 25 bp, Homo sapien
cacagttctctgaagcatgcaaaaa

SEQ ID NO: 4958255 - DNA, 25 bp, Homo sapien
tattaacaccccagtactgacaaga

SEQ ID NO: 4958256 - DNA, 25 bp, Homo sapien
gataactaaatgctaacacatctca

SEQ ID NO: 4958257 - DNA, 25 bp, Homo sapien
tgtaaatctgcccacctggttctgc

SEQ ID NO: 4958258 - DNA, 25 bp, Homo sapien
caaaagctggcaccattaaagggca

SEQ ID NO: 4958259 - DNA, 25 bp, Homo sapien
cctaccagttggtggcaggcttcca

SEQ ID NO: 4958260 - DNA, 25 bp, Homo sapien
gaaggactgactctttccgatggca

SEQ ID NO: 4958261 - DNA, 25 bp, Homo sapien
tcctggcgggctacttagaatcaat

SEQ ID NO: 4958262 - DNA, 25 bp, Homo sapien
cagtaactacagcagggtcagtttc

SEQ ID NO: 4958263 - DNA, 25 bp, Homo sapien
tgtcatctgggttggcagaattcca

SEQ ID NO: 4958264 - DNA, 25 bp, Homo sapien
catctgggttggcagaattccagtt

SEQ ID NO: 4958265 - DNA, 25 bp, Homo sapien
tacagcagggtcagtttcataatca

SEQ ID NO: 4958266 - DNA, 25 bp, Homo sapien
tgtaggtggtgatttcgggttgtat

SEQ ID NO: 4958267 - DNA, 25 bp, Homo sapien
tggtgatttcgggttgtatgcatgt

SEQ ID NO: 4958268 - DNA, 25 bp, Homo sapien
agagttttgtgtaggtggtgatttc

SEQ ID NO: 4958269 - DNA, 25 bp, Homo sapien
ctgaagagttttgtgtaggtggtga

SEQ ID NO: 4958270 - DNA, 25 bp, Homo sapien
gaaaggttttcagtctaagatgctc

SEQ ID NO: 4958271 - DNA, 25 bp, Homo sapien
ttatcactggtaaagaaggtttgca

SEQ ID NO: 4958272 - DNA, 25 bp, Homo sapien
tgaatagtaaccttaaacctctgcc

SEQ ID NO: 4958273 - DNA, 25 bp, Homo sapien
tccttttaaatgagagggtgggcaa

SEQ ID NO: 4958274 - DNA, 25 bp, Homo sapien
gtgatgtgattacagcttactgcag

SEQ ID NO: 4958275 - DNA, 25 bp, Homo sapien
cagtgatgtgattacagcttactgc

SEQ ID NO: 4958276 - DNA, 25 bp, Homo sapien
gtgcagtgatgtgattacagcttac

SEQ ID NO: 4958277 - DNA, 25 bp, Homo sapien
tgactacaggtatgtgccagcatgc

SEQ ID NO: 4958278 - DNA, 25 bp, Homo sapien
gcgcccggcccttagtcagtaatct

SEQ ID NO: 4958279 - DNA, 25 bp, Homo sapien
ttcagggcatcctatattctttaaa

SEQ ID NO: 4958280 - DNA, 25 bp, Homo sapien
tcagggcatcctatattctttaaac

SEQ ID NO: 4958281 - DNA, 25 bp, Homo sapien
tagtcagtaatcttaataaggaaaa

SEQ ID NO: 4958282 - DNA, 25 bp, Homo sapien
gacgtgaggcatcatcgaaggtaag

SEQ ID NO: 4958283 - DNA, 25 bp, Homo sapien
ctttatgcaaaaggtgacgtgaggc

SEQ ID NO: 4958284 - DNA, 25 bp, Homo sapien
aggtaagggagtgctcactgccatg

SEQ ID NO: 4958285 - DNA, 25 bp, Homo sapien
taagggagtgctcactgccatgaca

SEQ ID NO: 4958286 - DNA, 25 bp, Homo sapien
gccagcacagtttgtgaggccagga

SEQ ID NO: 4958287 - DNA, 25 bp, Homo sapien
tgagagaaagcgctgtgtaaacaca

SEQ ID NO: 4958288 - DNA, 25 bp, Homo sapien
gacagtcccatgtgacagacaggtc

SEQ ID NO: 4958289 - DNA, 25 bp, Homo sapien
tgggtaaagataacgacatcagtgc

SEQ ID NO: 4958290 - DNA, 25 bp, Homo sapien
tcaaactgactcttcataataaaac

SEQ ID NO: 4958291 - DNA, 25 bp, Homo sapien
gccatggccgttcagtcggacacaa

SEQ ID NO: 4958292 - DNA, 25 bp, Homo sapien
acacaagactgagggtaaactacct

SEQ ID NO: 4958293 - DNA, 25 bp, Homo sapien
aaacagtaactcagaagcatcagga

SEQ ID NO: 4958294 - DNA, 25 bp, Homo sapien
cagaaagtagcgaggcgccacgagg

SEQ ID NO: 4958295 - DNA, 25 bp, Homo sapien
gatttttctagagcgtgaaaaagtg

SEQ ID NO: 4958296 - DNA, 25 bp, Homo sapien
tttttctagagcgtgaaaaagtgca

SEQ ID NO: 4958297 - DNA, 25 bp, Homo sapien
ttctagagcgtgaaaaagtgcaaac

SEQ ID NO: 4958298 - DNA, 25 bp, Homo sapien
agtcaagcccctcggtcactttcaa

SEQ ID NO: 4958299 - DNA, 25 bp, Homo sapien
gcgtaaggagtccacagtcaagccc

SEQ ID NO: 4958300 - DNA, 25 bp, Homo sapien
tgacagcgacgagatccgcatccgt

SEQ ID NO: 4958301 - DNA, 25 bp, Homo sapien
tttcaaggtgacagcgacgagatcc

SEQ ID NO: 4958302 - DNA, 25 bp, Homo sapien
ctgcgctggcccacgtgagacccgc

SEQ ID NO: 4958303 - DNA, 25 bp, Homo sapien
cgctgccgccccctttagccctcag

SEQ ID NO: 4958304 - DNA, 25 bp, Homo sapien
tgccgccccctttagccctcagctt

SEQ ID NO: 4958305 - DNA, 25 bp, Homo sapien
ggcccacgtgagacccgcctccgct

SEQ ID NO: 4958306 - DNA, 25 bp, Homo sapien
gggaacagattccagcgcgcactta

SEQ ID NO: 4958307 - DNA, 25 bp, Homo sapien
agcgggaacagattccagcgcgcac

SEQ ID NO: 4958308 - DNA, 25 bp, Homo sapien
cgggcagcgggaacagattccagcg

SEQ ID NO: 4958309 - DNA, 25 bp, Homo sapien
gcagcgggaacagattccagcgcgc

SEQ ID NO: 4958310 - DNA, 25 bp, Homo sapien
agggctggcgccctttgcaccactg

SEQ ID NO: 4958311 - DNA, 25 bp, Homo sapien
tggcgccctttgcaccactggcggg

SEQ ID NO: 4958312 - DNA, 25 bp, Homo sapien
ctccttcaagcgctccgggagcaaa

SEQ ID NO: 4958313 - DNA, 25 bp, Homo sapien
agcgctccgggagcaaagacgcaga

SEQ ID NO: 4958314 - DNA, 25 bp, Homo sapien
ctgttgccacgtgcgacgcggcgct

SEQ ID NO: 4958315 - DNA, 25 bp, Homo sapien
cgcgcgctcccggactaagtgcgga

SEQ ID NO: 4958316 - DNA, 25 bp, Homo sapien
cgggacagcgctgcacctgttgcca

SEQ ID NO: 4958317 - DNA, 25 bp, Homo sapien
tgtaaatagccgaactcgggcctcc

SEQ ID NO: 4958318 - DNA, 25 bp, Homo sapien
aaaagactgagaaagctctttgtac

SEQ ID NO: 4958319 - DNA, 25 bp, Homo sapien
aacaattacctaatagtatgctaca

SEQ ID NO: 4958320 - DNA, 25 bp, Homo sapien
caatctatgtcatgtgcatttttta

SEQ ID NO: 4958321 - DNA, 25 bp, Homo sapien
tgtacttttatgagatgatcttcaa

SEQ ID NO: 4958322 - DNA, 25 bp, Homo sapien
cttgaggaagttactcacccagaca

SEQ ID NO: 4958323 - DNA, 25 bp, Homo sapien
ggaccggtcttataacagcataatg

SEQ ID NO: 4958324 - DNA, 25 bp, Homo sapien
cacccagacagggaccggtcttata

SEQ ID NO: 4958325 - DNA, 25 bp, Homo sapien
tatttttcatagtgactgtgaataa

SEQ ID NO: 4958326 - DNA, 25 bp, Homo sapien
tgtcatggctaaagaaactactcgt

SEQ ID NO: 4958327 - DNA, 25 bp, Homo sapien
cagtttgttatgcaaccacttcgaa

SEQ ID NO: 4958328 - DNA, 25 bp, Homo sapien
agaaaaatatagtaccaccagtttg

SEQ ID NO: 4958329 - DNA, 25 bp, Homo sapien
cataatccactcttgacagtgattc

SEQ ID NO: 4958330 - DNA, 25 bp, Homo sapien
tgtagagtgagcacagactattcct

SEQ ID NO: 4958331 - DNA, 25 bp, Homo sapien
caaagcgctccatgttagctaacaa

SEQ ID NO: 4958332 - DNA, 25 bp, Homo sapien
aataacaagtctgtggcttcgaggc

SEQ ID NO: 4958333 - DNA, 25 bp, Homo sapien
gattgggcccagtgatcacctaaaa

SEQ ID NO: 4958334 - DNA, 25 bp, Homo sapien
gctgttcccaagtggaacctccaag

SEQ ID NO: 4958335 - DNA, 25 bp, Homo sapien
cattgtgcccgtcagacactttgca

SEQ ID NO: 4958336 - DNA, 25 bp, Homo sapien
ccaagctttccagcaattgcctgct

SEQ ID NO: 4958337 - DNA, 25 bp, Homo sapien
cattcccctgactttggagtgtgca

SEQ ID NO: 4958338 - DNA, 25 bp, Homo sapien
acatagaatcaacctggacgcccat

SEQ ID NO: 4958339 - DNA, 25 bp, Homo sapien
tggacgcccatcaacaacagactgg

SEQ ID NO: 4958340 - DNA, 25 bp, Homo sapien
tcttttacaaagatacgtgcacgtg

SEQ ID NO: 4958341 - DNA, 25 bp, Homo sapien
taaaaagatacgtgtacacgtatgt

SEQ ID NO: 4958342 - DNA, 25 bp, Homo sapien
tctgggctactgagtaagacccaga

SEQ ID NO: 4958343 - DNA, 25 bp, Homo sapien
ggctactgagtaagacccagacatt

SEQ ID NO: 4958344 - DNA, 25 bp, Homo sapien
tgggctactgagtaagacccagaca

SEQ ID NO: 4958345 - DNA, 25 bp, Homo sapien
tagtctgggctactgagtaagaccc

SEQ ID NO: 4958346 - DNA, 25 bp, Homo sapien
agatgatttctatttgctaattgct

SEQ ID NO: 4958347 - DNA, 25 bp, Homo sapien
tgctaattgctttaattgacctcca

SEQ ID NO: 4958348 - DNA, 25 bp, Homo sapien
taacataatatacgtgttatataac

SEQ ID NO: 4958349 - DNA, 25 bp, Homo sapien
gacagcatcagtcttaatagcttag

SEQ ID NO: 4958350 - DNA, 25 bp, Homo sapien
atctcatgtctacatctccattcat

SEQ ID NO: 4958351 - DNA, 25 bp, Homo sapien
tcacagtcaatagttggaattttac

SEQ ID NO: 4958352 - DNA, 25 bp, Homo sapien
ttcacagtcaatagttggaatttta

SEQ ID NO: 4958353 - DNA, 25 bp, Homo sapien
acagtcaatagttggaattttactt

SEQ ID NO: 4958354 - DNA, 25 bp, Homo sapien
aattcacagtcaatagttggaattt

SEQ ID NO: 4958355 - DNA, 25 bp, Homo sapien
cagagacaatgatgataagaagtac

SEQ ID NO: 4958356 - DNA, 25 bp, Homo sapien
gagtctgtgggctcctgagtcctca

SEQ ID NO: 4958357 - DNA, 25 bp, Homo sapien
ccagccatgtgcaggacgtaatagt

SEQ ID NO: 4958358 - DNA, 25 bp, Homo sapien
ccctgcagacggttgcaaaatgaat

SEQ ID NO: 4958359 - DNA, 25 bp, Homo sapien
tctggattttgcaaacccgatagtc

SEQ ID NO: 4958360 - DNA, 25 bp, Homo sapien
gttctcctgacaatgaggtcctgtg

SEQ ID NO: 4958361 - DNA, 25 bp, Homo sapien
gaaatgtcgcaacaagttctcctga

SEQ ID NO: 4958362 - DNA, 25 bp, Homo sapien
gctcagctttgatagtaatatttcc

SEQ ID NO: 4958363 - DNA, 25 bp, Homo sapien
aagggtgttccagtgcgctggccag

SEQ ID NO: 4958364 - DNA, 25 bp, Homo sapien
gaagacactgaacagcctgatgcag

SEQ ID NO: 4958365 - DNA, 25 bp, Homo sapien
atgaagcctcccgaagacactgaac

SEQ ID NO: 4958366 - DNA, 25 bp, Homo sapien
ggcggatgcaaaggttccagaccaa

SEQ ID NO: 4958367 - DNA, 25 bp, Homo sapien
taagcgtcttggttccaggtaaatg

SEQ ID NO: 4958368 - DNA, 25 bp, Homo sapien
agctgtctaagcgtcttggttccag

SEQ ID NO: 4958369 - DNA, 25 bp, Homo sapien
tgtctaagcgtcttggttccaggta

SEQ ID NO: 4958370 - DNA, 25 bp, Homo sapien
cgtcttggttccaggtaaatgatac

SEQ ID NO: 4958371 - DNA, 25 bp, Homo sapien
taagacaagctggtaatgagagcaa

SEQ ID NO: 4958372 - DNA, 25 bp, Homo sapien
taggcacgctgtatacaggttagat

SEQ ID NO: 4958373 - DNA, 25 bp, Homo sapien
tatctatgcagattgtaggcacgct

SEQ ID NO: 4958374 - DNA, 25 bp, Homo sapien
gtctcagagttataggtgtgcccca

SEQ ID NO: 4958375 - DNA, 25 bp, Homo sapien
gttaagttgcctacccaacgtcaca

SEQ ID NO: 4958376 - DNA, 25 bp, Homo sapien
cttgtagatgagatagctagggctc

SEQ ID NO: 4958377 - DNA, 25 bp, Homo sapien
ttataattctcaaagcacccctatg

SEQ ID NO: 4958378 - DNA, 25 bp, Homo sapien
taaggatcactcaactatattggct

SEQ ID NO: 4958379 - DNA, 25 bp, Homo sapien
gcatatctgctgtactgaaagcaca

SEQ ID NO: 4958380 - DNA, 25 bp, Homo sapien
gaatgaaaagcactactcacaacag

SEQ ID NO: 4958381 - DNA, 25 bp, Homo sapien
tgattgcgcatggatatgttcagaa

SEQ ID NO: 4958382 - DNA, 25 bp, Homo sapien
cattaagtaacaaaggcaagtgaga

SEQ ID NO: 4958383 - DNA, 25 bp, Homo sapien
aaccacagatttcagagaataccac

SEQ ID NO: 4958384 - DNA, 25 bp, Homo sapien
cataaccacagatttcagagaatac

SEQ ID NO: 4958385 - DNA, 25 bp, Homo sapien
tttcataaccacagatttcagagaa

SEQ ID NO: 4958386 - DNA, 25 bp, Homo sapien
taaccacagatttcagagaatacca

SEQ ID NO: 4958387 - DNA, 25 bp, Homo sapien
gtgtaggggccgctgtagtatacac

SEQ ID NO: 4958388 - DNA, 25 bp, Homo sapien
gggccgctgtagtatacaccattca

SEQ ID NO: 4958389 - DNA, 25 bp, Homo sapien
ccattgtctgttttagccgtgtagg

SEQ ID NO: 4958390 - DNA, 25 bp, Homo sapien
cattgtctgttttagccgtgtaggg

SEQ ID NO: 4958391 - DNA, 25 bp, Homo sapien
gaatccaatggtgcgaatctctgct

SEQ ID NO: 4958392 - DNA, 25 bp, Homo sapien
gaacacgagcactatgaaactccaa

SEQ ID NO: 4958393 - DNA, 25 bp, Homo sapien
tcagcgtggatacgctagacagagg

SEQ ID NO: 4958394 - DNA, 25 bp, Homo sapien
aaataagcatgattcgaacacgagc

SEQ ID NO: 4958395 - DNA, 25 bp, Homo sapien
cagtgagatatcatcaactccatta

SEQ ID NO: 4958396 - DNA, 25 bp, Homo sapien
taaagactaacattaccatacatat

SEQ ID NO: 4958397 - DNA, 25 bp, Homo sapien
cctcaaaacgacttcattgctgaag

SEQ ID NO: 4958398 - DNA, 25 bp, Homo sapien
gataattaatgtctatcagtgagat

SEQ ID NO: 4958399 - DNA, 25 bp, Homo sapien
tgtcccacgtgctgaatttcattct

SEQ ID NO: 4958400 - DNA, 25 bp, Homo sapien
tgatctctgtcccacgtgctgaatt

SEQ ID NO: 4958401 - DNA, 25 bp, Homo sapien
ctgatcttcttctgcgcagttccct

SEQ ID NO: 4958402 - DNA, 25 bp, Homo sapien
ctgcgcagttcccttcatagttgtc

SEQ ID NO: 4958403 - DNA, 25 bp, Homo sapien
tattccccaatattcaactcgtaga

SEQ ID NO: 4958404 - DNA, 25 bp, Homo sapien
cactgcacctcaggatgaaaattcc

SEQ ID NO: 4958405 - DNA, 25 bp, Homo sapien
caggatgaaaattccccgcaaggga

SEQ ID NO: 4958406 - DNA, 25 bp, Homo sapien
cccgcaagggaatctccagctgttc

SEQ ID NO: 4958407 - DNA, 25 bp, Homo sapien
tatattgtgcataacggctattttt

SEQ ID NO: 4958408 - DNA, 25 bp, Homo sapien
tgcaaggtcgatttttaaagtgtag

SEQ ID NO: 4958409 - DNA, 25 bp, Homo sapien
ttcttatattgtgcataacggctat

SEQ ID NO: 4958410 - DNA, 25 bp, Homo sapien
gtgcataacggctatttttttcaaa

SEQ ID NO: 4958411 - DNA, 25 bp, Homo sapien
caatctaacaatgaaagggtcgacg

SEQ ID NO: 4958412 - DNA, 25 bp, Homo sapien
tgtaatctctagtagctgagccact

SEQ ID NO: 4958413 - DNA, 25 bp, Homo sapien
gcctgcatatgcctgaacttggtta

SEQ ID NO: 4958414 - DNA, 25 bp, Homo sapien
aaaaccttcgtttgatactggctca

SEQ ID NO: 4958415 - DNA, 25 bp, Homo sapien
ctattcacacccaagttgggtggat

SEQ ID NO: 4958416 - DNA, 25 bp, Homo sapien
tctattcacacccaagttgggtgga

SEQ ID NO: 4958417 - DNA, 25 bp, Homo sapien
tattcacacccaagttgggtggatt

SEQ ID NO: 4958418 - DNA, 25 bp, Homo sapien
attcacacccaagttgggtggatta

SEQ ID NO: 4958419 - DNA, 25 bp, Homo sapien
tatgaaggattcaggatcagacttg

SEQ ID NO: 4958420 - DNA, 25 bp, Homo sapien
taaaagtatatagggagacatccag

SEQ ID NO: 4958421 - DNA, 25 bp, Homo sapien
aacatgggagatagaagctgggaaa

SEQ ID NO: 4958422 - DNA, 25 bp, Homo sapien
gataatctcagactacaacagaggt

SEQ ID NO: 4958423 - DNA, 25 bp, Homo sapien
agaagtgaagatttttattgcccag

SEQ ID NO: 4958424 - DNA, 25 bp, Homo sapien
tcaccatgtttttggacaaaatttc

SEQ ID NO: 4958425 - DNA, 25 bp, Homo sapien
gccattttcatagtctttccatcct

SEQ ID NO: 4958426 - DNA, 25 bp, Homo sapien
ttgcccagccaatattcaccatgtt

SEQ ID NO: 4958427 - DNA, 25 bp, Homo sapien
tgaattacagtccatcctcctccat

SEQ ID NO: 4958428 - DNA, 25 bp, Homo sapien
tctctgaattacagtccatcctcct

SEQ ID NO: 4958429 - DNA, 25 bp, Homo sapien
tcgtctctgaattacagtccatcct

SEQ ID NO: 4958430 - DNA, 25 bp, Homo sapien
agatcgtctctgaattacagtccat

SEQ ID NO: 4958431 - DNA, 25 bp, Homo sapien
gagcttatacccatcattgaaaatc

SEQ ID NO: 4958432 - DNA, 25 bp, Homo sapien
aaatccactgagcttatacccatca

SEQ ID NO: 4958433 - DNA, 25 bp, Homo sapien
cactgagcttatacccatcattgaa

SEQ ID NO: 4958434 - DNA, 25 bp, Homo sapien
gtaaaatccactgagcttataccca

SEQ ID NO: 4958435 - DNA, 25 bp, Homo sapien
ttaaaacaaggtaatgtaacattca

SEQ ID NO: 4958436 - DNA, 25 bp, Homo sapien
atcactggagacagataacacatgg

SEQ ID NO: 4958437 - DNA, 25 bp, Homo sapien
gagcctctgaatgagactactcagt

SEQ ID NO: 4958438 - DNA, 25 bp, Homo sapien
gaatgagactactcagtatcactgg

SEQ ID NO: 4958439 - DNA, 25 bp, Homo sapien
tgtagctacccctttgtcaccaaaa

SEQ ID NO: 4958440 - DNA, 25 bp, Homo sapien
caggttatcctgacttagagcatga

SEQ ID NO: 4958441 - DNA, 25 bp, Homo sapien
gtaaaatttatctcacccatgaagc

SEQ ID NO: 4958442 - DNA, 25 bp, Homo sapien
tgtgctgcacccataatcttgtcaa

SEQ ID NO: 4958443 - DNA, 25 bp, Homo sapien
cttagtgaatatagaggtttcagcc

SEQ ID NO: 4958444 - DNA, 25 bp, Homo sapien
taaatttcctaccaaagagctgaat

SEQ ID NO: 4958445 - DNA, 25 bp, Homo sapien
tattattttatgctaactgcgagtt

SEQ ID NO: 4958446 - DNA, 25 bp, Homo sapien
ggaagtgattagctataacatttgc

SEQ ID NO: 4958447 - DNA, 25 bp, Homo sapien
ttcataatccgctagcacccaaatt

SEQ ID NO: 4958448 - DNA, 25 bp, Homo sapien
accttttaattcataatccgctagc

SEQ ID NO: 4958449 - DNA, 25 bp, Homo sapien
cggtggtgacgccagatttttgttc

SEQ ID NO: 4958450 - DNA, 25 bp, Homo sapien
tgttcttgccaccagttaatgtgaa

SEQ ID NO: 4958451 - DNA, 25 bp, Homo sapien
gaacaaacatctgattagctgcccc

SEQ ID NO: 4958452 - DNA, 25 bp, Homo sapien
gagtctgtgccaataacctgctcag

SEQ ID NO: 4958453 - DNA, 25 bp, Homo sapien
cccctgccatgattgacccttgagt

SEQ ID NO: 4958454 - DNA, 25 bp, Homo sapien
gagttcctcgcccttgagatcagct

SEQ ID NO: 4958455 - DNA, 25 bp, Homo sapien
tggccatcttcaggctatagccatc

SEQ ID NO: 4958456 - DNA, 25 bp, Homo sapien
actggccatcttcaggctatagcca

SEQ ID NO: 4958457 - DNA, 25 bp, Homo sapien
atcttcaggctatagccatccccac

SEQ ID NO: 4958458 - DNA, 25 bp, Homo sapien
catccccactactgcagaccactgg

SEQ ID NO: 4958459 - DNA, 25 bp, Homo sapien
gatcaagatgctggccataagagaa

SEQ ID NO: 4958460 - DNA, 25 bp, Homo sapien
aagatgctggccataagagaagcag

SEQ ID NO: 4958461 - DNA, 25 bp, Homo sapien
ggatcaagatgctggccataagaga

SEQ ID NO: 4958462 - DNA, 25 bp, Homo sapien
tcaagatgctggccataagagaagc

SEQ ID NO: 4958463 - DNA, 25 bp, Homo sapien
tatcattctagacctcacagagtgc

SEQ ID NO: 4958464 - DNA, 25 bp, Homo sapien
cacagagtgcccagttaattgacct

SEQ ID NO: 4958465 - DNA, 25 bp, Homo sapien
tatgtttcaggcactctaatagcca

SEQ ID NO: 4958466 - DNA, 25 bp, Homo sapien
tatggacaaagtgctttcgctagca

SEQ ID NO: 4958467 - DNA, 25 bp, Homo sapien
ctcctgcaaaagctgcttgatcttg

SEQ ID NO: 4958468 - DNA, 25 bp, Homo sapien
tttgacccgggtctcaagcaggcgc

SEQ ID NO: 4958469 - DNA, 25 bp, Homo sapien
tgatcttgacctgttgctgtttgac

SEQ ID NO: 4958470 - DNA, 25 bp, Homo sapien
cctttatcaaggaactggacttcat

SEQ ID NO: 4958471 - DNA, 25 bp, Homo sapien
tcccagccatttttctaggatgatt

SEQ ID NO: 4958472 - DNA, 25 bp, Homo sapien
ttttctaggatgattccttctctct

SEQ ID NO: 4958473 - DNA, 25 bp, Homo sapien
ccatttttctaggatgattccttct

SEQ ID NO: 4958474 - DNA, 25 bp, Homo sapien
cagccatttttctaggatgattcct

SEQ ID NO: 4958475 - DNA, 25 bp, Homo sapien
ctacagatgcgtgccatcacgcccg

SEQ ID NO: 4958476 - DNA, 25 bp, Homo sapien
tagtaaagatggggtttcaccatat

SEQ ID NO: 4958477 - DNA, 25 bp, Homo sapien
ctaggactacagatgcgtgccatca

SEQ ID NO: 4958478 - DNA, 25 bp, Homo sapien
ttagtaaagatggggtttcaccata

SEQ ID NO: 4958479 - DNA, 25 bp, Homo sapien
tgcccattgtcagagcggtggtaac

SEQ ID NO: 4958480 - DNA, 25 bp, Homo sapien
cggtggtaacaaggatgaaactgaa

SEQ ID NO: 4958481 - DNA, 25 bp, Homo sapien
agagcggtggtaacaaggatgaaac

SEQ ID NO: 4958482 - DNA, 25 bp, Homo sapien
ttgtcagagcggtggtaacaaggat

SEQ ID NO: 4958483 - DNA, 25 bp, Homo sapien
ggttcttttcgctatcctaatgtgc

SEQ ID NO: 4958484 - DNA, 25 bp, Homo sapien
gccgaggaaattctcccagactttc

SEQ ID NO: 4958485 - DNA, 25 bp, Homo sapien
tccaggaagtcggatgcagccgcag

SEQ ID NO: 4958486 - DNA, 25 bp, Homo sapien
cctaatcttagagtcgccgaggaaa

SEQ ID NO: 4958487 - DNA, 25 bp, Homo sapien
aatgtcagcaagttggtagatgata

SEQ ID NO: 4958488 - DNA, 25 bp, Homo sapien
cagctagtgtgcaatgtcagcaagt

SEQ ID NO: 4958489 - DNA, 25 bp, Homo sapien
tcagcaagttggtagatgataaaaa

SEQ ID NO: 4958490 - DNA, 25 bp, Homo sapien
aagaacagctagtgtgcaatgtcag

SEQ ID NO: 4958491 - DNA, 25 bp, Homo sapien
gattggaggcactgctagcttggaa

SEQ ID NO: 4958492 - DNA, 25 bp, Homo sapien
gcaaatgggctaacagtcagatcct

SEQ ID NO: 4958493 - DNA, 25 bp, Homo sapien
caggtgaatgctgcttctcgtaccc

SEQ ID NO: 4958494 - DNA, 25 bp, Homo sapien
gaagtcacagtgtagcaccctaggg

SEQ ID NO: 4958495 - DNA, 25 bp, Homo sapien
caaaataaccaagatgggccgggcg

SEQ ID NO: 4958496 - DNA, 25 bp, Homo sapien
tgaacaaaataaccaagatgggccg

SEQ ID NO: 4958497 - DNA, 25 bp, Homo sapien
tgtgaacaaaataaccaagatgggc

SEQ ID NO: 4958498 - DNA, 25 bp, Homo sapien
aataaccaagatgggccgggcgtgt

SEQ ID NO: 4958499 - DNA, 25 bp, Homo sapien
atgactgacctacagcatgctttag

SEQ ID NO: 4958500 - DNA, 25 bp, Homo sapien
tggattctagtcctctaatccctgt

SEQ ID NO: 4958501 - DNA, 25 bp, Homo sapien
ccctgtcactagaaaatgactgacc

SEQ ID NO: 4958502 - DNA, 25 bp, Homo sapien
catatattttctaactattcgtagg

SEQ ID NO: 4958503 - DNA, 25 bp, Homo sapien
taatgctaggtggatagttaggtac

SEQ ID NO: 4958504 - DNA, 25 bp, Homo sapien
cctgtacaatgtaagcacgaagagg

SEQ ID NO: 4958505 - DNA, 25 bp, Homo sapien
gaggtgagtggctacatctattatg

SEQ ID NO: 4958506 - DNA, 25 bp, Homo sapien
tcttgaggccaccataacaaattac

SEQ ID NO: 4958507 - DNA, 25 bp, Homo sapien
gcacaggtactcgacaaaatatcta

SEQ ID NO: 4958508 - DNA, 25 bp, Homo sapien
ataccatcttcacatagctgtcttt

SEQ ID NO: 4958509 - DNA, 25 bp, Homo sapien
catcttaactcagttacatgtacaa

SEQ ID NO: 4958510 - DNA, 25 bp, Homo sapien
ttgacttgtggcagtatcactctat

SEQ ID NO: 4958511 - DNA, 25 bp, Homo sapien
tataagatgtctttatcagattccc

SEQ ID NO: 4958512 - DNA, 25 bp, Homo sapien
gatgtctttatcagattccctccat

SEQ ID NO: 4958513 - DNA, 25 bp, Homo sapien
gcttatgggagatcaaattcttttg

SEQ ID NO: 4958514 - DNA, 25 bp, Homo sapien
ctgttattgtaatttcacagttgct

SEQ ID NO: 4958515 - DNA, 25 bp, Homo sapien
gcagactccttgctagtcaacctga

SEQ ID NO: 4958516 - DNA, 25 bp, Homo sapien
cttgcaaaagctaatggttgttacc

SEQ ID NO: 4958517 - DNA, 25 bp, Homo sapien
tgagttttggttactatcatacctg

SEQ ID NO: 4958518 - DNA, 25 bp, Homo sapien
tattacaagcatgtcaaaaatgcag

SEQ ID NO: 4958519 - DNA, 25 bp, Homo sapien
agaagtgagtcagagacccagctca

SEQ ID NO: 4958520 - DNA, 25 bp, Homo sapien
aggcacttgttagctccattaatcg

SEQ ID NO: 4958521 - DNA, 25 bp, Homo sapien
taagtaaaaacgaagtccagctgaa

SEQ ID NO: 4958522 - DNA, 25 bp, Homo sapien
tggaagcatcgattatactctggac

SEQ ID NO: 4958523 - DNA, 25 bp, Homo sapien
catgtggacacaggtttaactgaaa

SEQ ID NO: 4958524 - DNA, 25 bp, Homo sapien
ccttctgatgtaactcaagcagttg

SEQ ID NO: 4958525 - DNA, 25 bp, Homo sapien
tggaaatctgggttcatcatttctt

SEQ ID NO: 4958526 - DNA, 25 bp, Homo sapien
cttctgatgtaactcaagcagttgt

SEQ ID NO: 4958527 - DNA, 25 bp, Homo sapien
tgagcactgacgatgtttggtcttc

SEQ ID NO: 4958528 - DNA, 25 bp, Homo sapien
ttggtcttcccattaaacatcttcc

SEQ ID NO: 4958529 - DNA, 25 bp, Homo sapien
tctttgttatctactggacttgagc

SEQ ID NO: 4958530 - DNA, 25 bp, Homo sapien
tgtccttcacgtggacattttgaag

SEQ ID NO: 4958531 - DNA, 25 bp, Homo sapien
caggcagtaaggactactctagggc

SEQ ID NO: 4958532 - DNA, 25 bp, Homo sapien
tcttggagtaacattattccatgga

SEQ ID NO: 4958533 - DNA, 25 bp, Homo sapien
tactctagggccaatactttgtgga

SEQ ID NO: 4958534 - DNA, 25 bp, Homo sapien
cttgcaaaagttaatcaggcagtaa

SEQ ID NO: 4958535 - DNA, 25 bp, Homo sapien
cactcaagcttgcagcgaggaacat

SEQ ID NO: 4958536 - DNA, 25 bp, Homo sapien
ggtttaattccagatcttgccgcct

SEQ ID NO: 4958537 - DNA, 25 bp, Homo sapien
ggaaggtttaattccagatcttgcc

SEQ ID NO: 4958538 - DNA, 25 bp, Homo sapien
aattccagatcttgccgcctccagt

SEQ ID NO: 4958539 - DNA, 25 bp, Homo sapien
ctgattaatctgttggttagcccac

SEQ ID NO: 4958540 - DNA, 25 bp, Homo sapien
ctcaaaaacaaaggctaggtccctg

SEQ ID NO: 4958541 - DNA, 25 bp, Homo sapien
tgtgcatttgggacaataaccgggc

SEQ ID NO: 4958542 - DNA, 25 bp, Homo sapien
ggtccctgactcctataggcatgac

SEQ ID NO: 4958543 - DNA, 25 bp, Homo sapien
aaacgatctcttatccaggtgactg

SEQ ID NO: 4958544 - DNA, 25 bp, Homo sapien
actggaatccaaacgccctctcgtg

SEQ ID NO: 4958545 - DNA, 25 bp, Homo sapien
cgtgctcggaccagcaaaatgctat

SEQ ID NO: 4958546 - DNA, 25 bp, Homo sapien
cattccggaggtagccataagcaac

SEQ ID NO: 4958547 - DNA, 25 bp, Homo sapien
gtatttgcaatggtaaacatcaagg

SEQ ID NO: 4958548 - DNA, 25 bp, Homo sapien
caagtaactggcctaattaaaggag

SEQ ID NO: 4958549 - DNA, 25 bp, Homo sapien
acaaattggagggtattcataccag

SEQ ID NO: 4958550 - DNA, 25 bp, Homo sapien
gaacagaagccagtatgtaaaattt

SEQ ID NO: 4958551 - DNA, 25 bp, Homo sapien
tgtgtcttaagagtccgaatggccc

SEQ ID NO: 4958552 - DNA, 25 bp, Homo sapien
tccggtcggtgtagggttcattgca

SEQ ID NO: 4958553 - DNA, 25 bp, Homo sapien
cgcggtaattaccatcaaggcagcc

SEQ ID NO: 4958554 - DNA, 25 bp, Homo sapien
tctcatgtcggtggtgtagcctggc

SEQ ID NO: 4958555 - DNA, 25 bp, Homo sapien
ttatatttatattggcggcagcacc

SEQ ID NO: 4958556 - DNA, 25 bp, Homo sapien
ctttatatttatattggcggcagca

SEQ ID NO: 4958557 - DNA, 25 bp, Homo sapien
tatttatattggcggcagcaccgcc

SEQ ID NO: 4958558 - DNA, 25 bp, Homo sapien
tatatttatattggcggcagcaccg

SEQ ID NO: 4958559 - DNA, 25 bp, Homo sapien
gacagactggtctccgcaatgacca

SEQ ID NO: 4958560 - DNA, 25 bp, Homo sapien
tgaccatgctcaggtgtaactccac

SEQ ID NO: 4958561 - DNA, 25 bp, Homo sapien
gaccacacgttcttgggagtccctc

SEQ ID NO: 4958562 - DNA, 25 bp, Homo sapien
ggagcccacactgggtgccaaagat

SEQ ID NO: 4958563 - DNA, 25 bp, Homo sapien
tttcgggcctcaacatatactagtg

SEQ ID NO: 4958564 - DNA, 25 bp, Homo sapien
tgccaaaacgggtcagattcagaac

SEQ ID NO: 4958565 - DNA, 25 bp, Homo sapien
taaatttaggctctaccacttgcag

SEQ ID NO: 4958566 - DNA, 25 bp, Homo sapien
ttaaaggaatcacatagacctccgt

SEQ ID NO: 4958567 - DNA, 25 bp, Homo sapien
tgtttccacctcttcgtgaccgaat

SEQ ID NO: 4958568 - DNA, 25 bp, Homo sapien
caaaaaagcgatcccggtcttggct

SEQ ID NO: 4958569 - DNA, 25 bp, Homo sapien
tccgtggaacaatcccctcatatgt

SEQ ID NO: 4958570 - DNA, 25 bp, Homo sapien
catatgtaaaatcaggaggttggac

SEQ ID NO: 4958571 - DNA, 25 bp, Homo sapien
tttctccacgggctgagggatcaat

SEQ ID NO: 4958572 - DNA, 25 bp, Homo sapien
gagggatcaatgcacttccgcatag

SEQ ID NO: 4958573 - DNA, 25 bp, Homo sapien
aatgcacttccgcataggcctaggg

SEQ ID NO: 4958574 - DNA, 25 bp, Homo sapien
atcagcgccggaagcgcacggcatg

SEQ ID NO: 4958575 - DNA, 25 bp, Homo sapien
ggccggcaggcgtttagaacgcgag

SEQ ID NO: 4958576 - DNA, 25 bp, Homo sapien
gtggccggcaggcgtttagaacgcg

SEQ ID NO: 4958577 - DNA, 25 bp, Homo sapien
ccggcaggcgtttagaacgcgaggt

SEQ ID NO: 4958578 - DNA, 25 bp, Homo sapien
ctgtggccggcaggcgtttagaacg

SEQ ID NO: 4958579 - DNA, 25 bp, Homo sapien
agccaggaaacgtgtgggcctctct

SEQ ID NO: 4958580 - DNA, 25 bp, Homo sapien
tagctgaggtcgaaaaggcggccac

SEQ ID NO: 4958581 - DNA, 25 bp, Homo sapien
tgtagaggtaatgcctgcgcgtccc

SEQ ID NO: 4958582 - DNA, 25 bp, Homo sapien
caatgagatcctaagatggcggtgg

SEQ ID NO: 4958583 - DNA, 25 bp, Homo sapien
cactgggtcgagttcttagagaaac

SEQ ID NO: 4958584 - DNA, 25 bp, Homo sapien
aggagcgacgcgactctgaagagtt

SEQ ID NO: 4958585 - DNA, 25 bp, Homo sapien
tgtgagctgcaggatttccgccgtc

SEQ ID NO: 4958586 - DNA, 25 bp, Homo sapien
tggtggccatagttcttccccgcgt

SEQ ID NO: 4958587 - DNA, 25 bp, Homo sapien
tggcctgccggtatatctttgttcg

SEQ ID NO: 4958588 - DNA, 25 bp, Homo sapien
tgcttttcggcgtgctgctttggcc

SEQ ID NO: 4958589 - DNA, 25 bp, Homo sapien
tctttgttcggaaaggccctgtcat

SEQ ID NO: 4958590 - DNA, 25 bp, Homo sapien
tgtttgctctgcttttcggcgtgct

SEQ ID NO: 4958591 - DNA, 25 bp, Homo sapien
ttttttcaataggagatttggccat

SEQ ID NO: 4958592 - DNA, 25 bp, Homo sapien
gttttttcaataggagatttggcca

SEQ ID NO: 4958593 - DNA, 25 bp, Homo sapien
ctgggttttttcaataggagatttg

SEQ ID NO: 4958594 - DNA, 25 bp, Homo sapien
tgaccaggcgaatcaagtgatccgc

SEQ ID NO: 4958595 - DNA, 25 bp, Homo sapien
tagttagaatcctgcaacgggatgt

SEQ ID NO: 4958596 - DNA, 25 bp, Homo sapien
ccagcctgattatttgattactttg

SEQ ID NO: 4958597 - DNA, 25 bp, Homo sapien
taaactgtagtcataggtattttca

SEQ ID NO: 4958598 - DNA, 25 bp, Homo sapien
acatgggtcttgagattgaacagaa

SEQ ID NO: 4958599 - DNA, 25 bp, Homo sapien
taagccaccataagatatctaagga

SEQ ID NO: 4958600 - DNA, 25 bp, Homo sapien
gacttttgcagttatggaccagcat

SEQ ID NO: 4958601 - DNA, 25 bp, Homo sapien
ttaactaggatcttatacatgggtc

SEQ ID NO: 4958602 - DNA, 25 bp, Homo sapien
ggtctcagtctcctgccgtcgtgat

SEQ ID NO: 4958603 - DNA, 25 bp, Homo sapien
cctcggcctcctgaagtgttgggat

SEQ ID NO: 4958604 - DNA, 25 bp, Homo sapien
tcagtctcctgccgtcgtgatccgc

SEQ ID NO: 4958605 - DNA, 25 bp, Homo sapien
ccgcctcggcctcctgaagtgttgg

SEQ ID NO: 4958606 - DNA, 25 bp, Homo sapien
gaatgaatatccatcacgagcagta

SEQ ID NO: 4958607 - DNA, 25 bp, Homo sapien
ccaactttgtattcaccactaggag

SEQ ID NO: 4958608 - DNA, 25 bp, Homo sapien
gttgtcagaagcctaacacagtgtt

SEQ ID NO: 4958609 - DNA, 25 bp, Homo sapien
tatttggcctacttcagattagacc

SEQ ID NO: 4958610 - DNA, 25 bp, Homo sapien
ccttacccagcaaaatgatgagagc

SEQ ID NO: 4958611 - DNA, 25 bp, Homo sapien
gcttctaacttcagtaaggcgcatg

SEQ ID NO: 4958612 - DNA, 25 bp, Homo sapien
gcgcatggttttgacccttacccag

SEQ ID NO: 4958613 - DNA, 25 bp, Homo sapien
tcaggagcacatggatgaagtatgc

SEQ ID NO: 4958614 - DNA, 25 bp, Homo sapien
tcttcttttagatacctgcaggtcc

SEQ ID NO: 4958615 - DNA, 25 bp, Homo sapien
cctgtgcaagaatagggcagattat

SEQ ID NO: 4958616 - DNA, 25 bp, Homo sapien
gccagtcttccaactaatgccagtg

SEQ ID NO: 4958617 - DNA, 25 bp, Homo sapien
taactttaggctgctcagagaagag

SEQ ID NO: 4958618 - DNA, 25 bp, Homo sapien
taattgttactcttacagtccctgt

SEQ ID NO: 4958619 - DNA, 25 bp, Homo sapien
caagtcaccttgactggaagagcca

SEQ ID NO: 4958620 - DNA, 25 bp, Homo sapien
aagagccagcatttcccgttgtaca

SEQ ID NO: 4958621 - DNA, 25 bp, Homo sapien
ggtttcttcctcagattcactggta

SEQ ID NO: 4958622 - DNA, 25 bp, Homo sapien
tacaatgagttgttgtccccagagg

SEQ ID NO: 4958623 - DNA, 25 bp, Homo sapien
catggagaactgttcgcagaacctc

SEQ ID NO: 4958624 - DNA, 25 bp, Homo sapien
taacgttgaggacagagtagcatct

SEQ ID NO: 4958625 - DNA, 25 bp, Homo sapien
ccttatgaataagaccactgggtcg

SEQ ID NO: 4958626 - DNA, 25 bp, Homo sapien
tgggctgtatgatccttcagggaag

SEQ ID NO: 4958627 - DNA, 25 bp, Homo sapien
tgtttcttagccagcccagtacagt

SEQ ID NO: 4958628 - DNA, 25 bp, Homo sapien
tgttgacctctctaaccttgcgttg

SEQ ID NO: 4958629 - DNA, 25 bp, Homo sapien
ggcaattatagatccctggacccat

SEQ ID NO: 4958630 - DNA, 25 bp, Homo sapien
agttgtgccacaggccgcttgtctg

SEQ ID NO: 4958631 - DNA, 25 bp, Homo sapien
tgtgcggcattctgcgcacctggaa

SEQ ID NO: 4958632 - DNA, 25 bp, Homo sapien
tctgcgcacctggaacataaactcc

SEQ ID NO: 4958633 - DNA, 25 bp, Homo sapien
ggctgtgtgcggcattctgcgcacc

SEQ ID NO: 4958634 - DNA, 25 bp, Homo sapien
gagcaacaagttccaggtgttattg

SEQ ID NO: 4958635 - DNA, 25 bp, Homo sapien
caagttccaggtgttattgctgcca

SEQ ID NO: 4958636 - DNA, 25 bp, Homo sapien
tgttattgctgccactgacgaccgg

SEQ ID NO: 4958637 - DNA, 25 bp, Homo sapien
tgacgaccgggacgaccaagccaag

SEQ ID NO: 4958638 - DNA, 25 bp, Homo sapien
tacataacccttgttatttaattca

SEQ ID NO: 4958639 - DNA, 25 bp, Homo sapien
cacagatgtacacacccaatcagcg

SEQ ID NO: 4958640 - DNA, 25 bp, Homo sapien
taattcagatacgatgttcagcttg

SEQ ID NO: 4958641 - DNA, 25 bp, Homo sapien
ccaatcagcgtgcatgactgctgac

SEQ ID NO: 4958642 - DNA, 25 bp, Homo sapien
tgaagtggacaaacggtcttgcaca

SEQ ID NO: 4958643 - DNA, 25 bp, Homo sapien
tgactgtttattgagtgtcaggaac

SEQ ID NO: 4958644 - DNA, 25 bp, Homo sapien
cggtcttgcacaaatgacgtacatt

SEQ ID NO: 4958645 - DNA, 25 bp, Homo sapien
gacgtacatttcacagttaatcgtg

SEQ ID NO: 4958646 - DNA, 25 bp, Homo sapien
tgtcccgttactcacacagacgtgc

SEQ ID NO: 4958647 - DNA, 25 bp, Homo sapien
ttaaaactccctatcaatctgaaga

SEQ ID NO: 4958648 - DNA, 25 bp, Homo sapien
tatacaggtgaatgtctgtctcatc

SEQ ID NO: 4958649 - DNA, 25 bp, Homo sapien
tactgattacttcttgaaccccaaa

SEQ ID NO: 4958650 - DNA, 25 bp, Homo sapien
tattccacggaggtggagttcacca

SEQ ID NO: 4958651 - DNA, 25 bp, Homo sapien
gaacctgccgcgagtcttagtcttt

SEQ ID NO: 4958652 - DNA, 25 bp, Homo sapien
cagctgcagtgttcggtcacatgga

SEQ ID NO: 4958653 - DNA, 25 bp, Homo sapien
ggtgtcttcatgtctcagaggccgc

SEQ ID NO: 4958654 - DNA, 25 bp, Homo sapien
tttcgaattgacctttggtaacatc

SEQ ID NO: 4958655 - DNA, 25 bp, Homo sapien
ctatcaaggttgtgtatacggtcag

SEQ ID NO: 4958656 - DNA, 25 bp, Homo sapien
ctatacaagggtcagggcagtcccg

SEQ ID NO: 4958657 - DNA, 25 bp, Homo sapien
agtcccgcaggtaagtttcgaattg

SEQ ID NO: 4958658 - DNA, 25 bp, Homo sapien
gacatcatacatggtttcaaatgag

SEQ ID NO: 4958659 - DNA, 25 bp, Homo sapien
tttgttgacaggacatcatacatgg

SEQ ID NO: 4958660 - DNA, 25 bp, Homo sapien
tcatacatggtttcaaatgagatat

SEQ ID NO: 4958661 - DNA, 25 bp, Homo sapien
gacaggacatcatacatggtttcaa

SEQ ID NO: 4958662 - DNA, 25 bp, Homo sapien
tttgtaccacataccatctaccctg

SEQ ID NO: 4958663 - DNA, 25 bp, Homo sapien
tcagacacatctttgcaggcgttct

SEQ ID NO: 4958664 - DNA, 25 bp, Homo sapien
caggcgttctgcgatcatcaaggaa

SEQ ID NO: 4958665 - DNA, 25 bp, Homo sapien
gaagaagggatgtttccaacggtca

SEQ ID NO: 4958666 - DNA, 25 bp, Homo sapien
gtgtaatcacacaaccttccccaga

SEQ ID NO: 4958667 - DNA, 25 bp, Homo sapien
taggctggggccaatatcttggtct

SEQ ID NO: 4958668 - DNA, 25 bp, Homo sapien
cttccccagactggttgcctcccag

SEQ ID NO: 4958669 - DNA, 25 bp, Homo sapien
tccaatgattcctttctgtctcgtg

SEQ ID NO: 4958670 - DNA, 25 bp, Homo sapien
tcataatgtcagtatccctagtgct

SEQ ID NO: 4958671 - DNA, 25 bp, Homo sapien
tcctcaaaggattaagctggagctt

SEQ ID NO: 4958672 - DNA, 25 bp, Homo sapien
taaaacacacagtctgcacgaagaa

SEQ ID NO: 4958673 - DNA, 25 bp, Homo sapien
ttccacatgagtgtcagaggttcac

SEQ ID NO: 4958674 - DNA, 25 bp, Homo sapien
cttgtgctattttccagaactgttc

SEQ ID NO: 4958675 - DNA, 25 bp, Homo sapien
tgttctagtgaggaaccctatccac

SEQ ID NO: 4958676 - DNA, 25 bp, Homo sapien
gtgctattttccagaactgttctag

SEQ ID NO: 4958677 - DNA, 25 bp, Homo sapien
ggaaccctatccacatgacatcttt

SEQ ID NO: 4958678 - DNA, 25 bp, Homo sapien
ggctggactatataaccagtcagga

SEQ ID NO: 4958679 - DNA, 25 bp, Homo sapien
tatgtaaccagtcaggacccggaag

SEQ ID NO: 4958680 - DNA, 25 bp, Homo sapien
cccatttcacttgagaatgctctac

SEQ ID NO: 4958681 - DNA, 25 bp, Homo sapien
tcaggaaccggaagaggtgacacta

SEQ ID NO: 4958682 - DNA, 25 bp, Homo sapien
tatactgaaacgttcattcagtgta

SEQ ID NO: 4958683 - DNA, 25 bp, Homo sapien
cattcagtgtaagactgaacagtcc

SEQ ID NO: 4958684 - DNA, 25 bp, Homo sapien
ttcattcagtgtaagactgaacagt

SEQ ID NO: 4958685 - DNA, 25 bp, Homo sapien
ataaccaccatttatactgaaacgt

SEQ ID NO: 4958686 - DNA, 25 bp, Homo sapien
ggtttgaatcctgttaacatgccca

SEQ ID NO: 4958687 - DNA, 25 bp, Homo sapien
ttaacatgcccacatagccagcaaa

SEQ ID NO: 4958688 - DNA, 25 bp, Homo sapien
tcctgttaacatgcccacatagcca

SEQ ID NO: 4958689 - DNA, 25 bp, Homo sapien
gaatcctgttaacatgcccacatag

SEQ ID NO: 4958690 - DNA, 25 bp, Homo sapien
cagttatgacccaggtatcattatt

SEQ ID NO: 4958691 - DNA, 25 bp, Homo sapien
taaaggttttagttgctcagttatg

SEQ ID NO: 4958692 - DNA, 25 bp, Homo sapien
ttttagttgctcagttatgacccag

SEQ ID NO: 4958693 - DNA, 25 bp, Homo sapien
tatgacccaggtatcattatttatg

SEQ ID NO: 4958694 - DNA, 25 bp, Homo sapien
gagggccaggcattacactaggagc

SEQ ID NO: 4958695 - DNA, 25 bp, Homo sapien
tttaccgagtcaccacgatcaatcc

SEQ ID NO: 4958696 - DNA, 25 bp, Homo sapien
aatgatcaacatgatgatgagggcc

SEQ ID NO: 4958697 - DNA, 25 bp, Homo sapien
gcttataaatagtgagcctcagatt

SEQ ID NO: 4958698 - DNA, 25 bp, Homo sapien
ggctctgtatcccaagctgcagtgc

SEQ ID NO: 4958699 - DNA, 25 bp, Homo sapien
catgcctgaccctttgttctttact

SEQ ID NO: 4958700 - DNA, 25 bp, Homo sapien
tctggctctgtatcccaagctgcag

SEQ ID NO: 4958701 - DNA, 25 bp, Homo sapien
gcctcgcaggttcaaaaaagtctct

SEQ ID NO: 4958702 - DNA, 25 bp, Homo sapien
ggttctaccaggacacagaaatcgg

SEQ ID NO: 4958703 - DNA, 25 bp, Homo sapien
tcagggtgagttagcgaagttgtcc

SEQ ID NO: 4958704 - DNA, 25 bp, Homo sapien
caggacatctcaagggtaaggtaca

SEQ ID NO: 4958705 - DNA, 25 bp, Homo sapien
taaccccacaaaatctgagagcacg

SEQ ID NO: 4958706 - DNA, 25 bp, Homo sapien
tgtcttctgctactattgaagtaca

SEQ ID NO: 4958707 - DNA, 25 bp, Homo sapien
ttgtcttctgctactattgaagtac

SEQ ID NO: 4958708 - DNA, 25 bp, Homo sapien
ttttgtcttctgctactattgaagt

SEQ ID NO: 4958709 - DNA, 25 bp, Homo sapien
gtcttctgctactattgaagtacaa

SEQ ID NO: 4958710 - DNA, 25 bp, Homo sapien
gaaacaagtcaccaaggaggcagcc

SEQ ID NO: 4958711 - DNA, 25 bp, Homo sapien
ttcgggcgagctgaacatctgggca

SEQ ID NO: 4958712 - DNA, 25 bp, Homo sapien
tattaaaattagtacagagctgcca

SEQ ID NO: 4958713 - DNA, 25 bp, Homo sapien
gcctggactctctagactcaagatg

SEQ ID NO: 4958714 - DNA, 25 bp, Homo sapien
ggtaggccaagattccttaaatgga

SEQ ID NO: 4958715 - DNA, 25 bp, Homo sapien
gaagcttgacccataagtcatagca

SEQ ID NO: 4958716 - DNA, 25 bp, Homo sapien
taactaactggatataccacatgag

SEQ ID NO: 4958717 - DNA, 25 bp, Homo sapien
tgaaggtcatagactgggagcagat

SEQ ID NO: 4958718 - DNA, 25 bp, Homo sapien
tacaagaaatcacacaggacagttc

SEQ ID NO: 4958719 - DNA, 25 bp, Homo sapien
ttcactgagctgtatatctaagacc

SEQ ID NO: 4958720 - DNA, 25 bp, Homo sapien
taccctgttgatacaatagcacacc

SEQ ID NO: 4958721 - DNA, 25 bp, Homo sapien
tgctgggctcttccgtatcttgatc

SEQ ID NO: 4958722 - DNA, 25 bp, Homo sapien
gctgtatatctaagacatacagcac

SEQ ID NO: 4958723 - DNA, 25 bp, Homo sapien
gtgctgtatatctaagacatacagc

SEQ ID NO: 4958724 - DNA, 25 bp, Homo sapien
ctgtgctgtatatctaagacataca

SEQ ID NO: 4958725 - DNA, 25 bp, Homo sapien
tgtgctgtatatctaagacatacag

SEQ ID NO: 4958726 - DNA, 25 bp, Homo sapien
tatcacacctcaatggaaacttgta

SEQ ID NO: 4958727 - DNA, 25 bp, Homo sapien
gtgctgtatgtatatcacacctcaa

SEQ ID NO: 4958728 - DNA, 25 bp, Homo sapien
ctgtgctgtatgtatatcacacctc

SEQ ID NO: 4958729 - DNA, 25 bp, Homo sapien
atcacacctcaatggaaacttgtaa

SEQ ID NO: 4958730 - DNA, 25 bp, Homo sapien
taacagcggcaatacccttcatttc

SEQ ID NO: 4958731 - DNA, 25 bp, Homo sapien
aaaggtatatcagtaacagcggcaa

SEQ ID NO: 4958732 - DNA, 25 bp, Homo sapien
caggaaagttgccaagtaggccagg

SEQ ID NO: 4958733 - DNA, 25 bp, Homo sapien
tatatcagtaacagcggcaataccc

SEQ ID NO: 4958734 - DNA, 25 bp, Homo sapien
cattgagcaaattcagtggtggaca

SEQ ID NO: 4958735 - DNA, 25 bp, Homo sapien
taagttcacggccttttgctgagat

SEQ ID NO: 4958736 - DNA, 25 bp, Homo sapien
aattcaccctctagccactggcata

SEQ ID NO: 4958737 - DNA, 25 bp, Homo sapien
tattgtccgattccaaggcgtggca

SEQ ID NO: 4958738 - DNA, 25 bp, Homo sapien
ctgcataatttttccacttggcacg

SEQ ID NO: 4958739 - DNA, 25 bp, Homo sapien
ccacttggcacgaatgtatttatca

SEQ ID NO: 4958740 - DNA, 25 bp, Homo sapien
tttccacttggcacgaatgtattta

SEQ ID NO: 4958741 - DNA, 25 bp, Homo sapien
aatttttccacttggcacgaatgta

SEQ ID NO: 4958742 - DNA, 25 bp, Homo sapien
gattaatacattaatacagtaagtc

SEQ ID NO: 4958743 - DNA, 25 bp, Homo sapien
taaactattctgtgggtaatttcat

SEQ ID NO: 4958744 - DNA, 25 bp, Homo sapien
aggaatgacctcttttcctctgctg

SEQ ID NO: 4958745 - DNA, 25 bp, Homo sapien
tcacttaacgtatagggcagaaagg

SEQ ID NO: 4958746 - DNA, 25 bp, Homo sapien
cttttgtagggtggtaagtcaagat

SEQ ID NO: 4958747 - DNA, 25 bp, Homo sapien
ttgtagggtggtaagtcaagattta

SEQ ID NO: 4958748 - DNA, 25 bp, Homo sapien
tgtagggtggtaagtcaagatttat

SEQ ID NO: 4958749 - DNA, 25 bp, Homo sapien
ggtgccttgtcaagcatcaattcat

SEQ ID NO: 4958750 - DNA, 25 bp, Homo sapien
gagtgtaacactattgccaaaccaa

SEQ ID NO: 4958751 - DNA, 25 bp, Homo sapien
catgtattatcttcccacgatcagc

SEQ ID NO: 4958752 - DNA, 25 bp, Homo sapien
caatgtctccagtgttgccttcagg

SEQ ID NO: 4958753 - DNA, 25 bp, Homo sapien
tttaagccccagatggcaacatgta

SEQ ID NO: 4958754 - DNA, 25 bp, Homo sapien
tgtgccacaatgataccagtctcct

SEQ ID NO: 4958755 - DNA, 25 bp, Homo sapien
tctggccctggttactaaactgaaa

SEQ ID NO: 4958756 - DNA, 25 bp, Homo sapien
gaaatagcttttaagggtgtgccag

SEQ ID NO: 4958757 - DNA, 25 bp, Homo sapien
cagcaatttctgaggatatagcaac

SEQ ID NO: 4958758 - DNA, 25 bp, Homo sapien
catgtaaagtgcacctaaaagggag

SEQ ID NO: 4958759 - DNA, 25 bp, Homo sapien
gacagcaggccattgaagaaagagc

SEQ ID NO: 4958760 - DNA, 25 bp, Homo sapien
gtagaaacggcctcaaacatggaag

SEQ ID NO: 4958761 - DNA, 25 bp, Homo sapien
tgatctcaaaggaacagaacgtctg

SEQ ID NO: 4958762 - DNA, 25 bp, Homo sapien
gcgacgggcatttgaatcggaagat

SEQ ID NO: 4958763 - DNA, 25 bp, Homo sapien
gattttgatagtctagcgacgggca

SEQ ID NO: 4958764 - DNA, 25 bp, Homo sapien
caccgcgtctggctgaaaatccttt

SEQ ID NO: 4958765 - DNA, 25 bp, Homo sapien
gaaacaaacctctgtctcggaatgg

SEQ ID NO: 4958766 - DNA, 25 bp, Homo sapien
gtcctgaaggaggataggttgattt

SEQ ID NO: 4958767 - DNA, 25 bp, Homo sapien
tggtcctgaaggaggataggttgat

SEQ ID NO: 4958768 - DNA, 25 bp, Homo sapien
gttggtcctgaaggaggataggttg

SEQ ID NO: 4958769 - DNA, 25 bp, Homo sapien
tcctgaaggaggataggttgatttt

SEQ ID NO: 4958770 - DNA, 25 bp, Homo sapien
taatctgtgaagacaacatcaagtc

SEQ ID NO: 4958771 - DNA, 25 bp, Homo sapien
gctcttttatacgtttcaatgcctc

SEQ ID NO: 4958772 - DNA, 25 bp, Homo sapien
tcaatttgtaaaagtgctaggtgtt

SEQ ID NO: 4958773 - DNA, 25 bp, Homo sapien
aataacaaatgcttgccaacggaat

SEQ ID NO: 4958774 - DNA, 25 bp, Homo sapien
catctatcttccatatgaaaatatt

SEQ ID NO: 4958775 - DNA, 25 bp, Homo sapien
tctatcttccatatgaaaatattca

SEQ ID NO: 4958776 - DNA, 25 bp, Homo sapien
tcatctatcttccatatgaaaatat

SEQ ID NO: 4958777 - DNA, 25 bp, Homo sapien
atcttccatatgaaaatattcatac

SEQ ID NO: 4958778 - DNA, 25 bp, Homo sapien
ataccagactctgcgctccttgagg

SEQ ID NO: 4958779 - DNA, 25 bp, Homo sapien
gtttgcgttccttgtcaataccaga

SEQ ID NO: 4958780 - DNA, 25 bp, Homo sapien
cagcatttgtgcacactctcatcaa

SEQ ID NO: 4958781 - DNA, 25 bp, Homo sapien
tataatcatctgtttgcgttccttg

SEQ ID NO: 4958782 - DNA, 25 bp, Homo sapien
tgagacatgacacaccaagacaaag

SEQ ID NO: 4958783 - DNA, 25 bp, Homo sapien
tggccagactagactttgataatcg

SEQ ID NO: 4958784 - DNA, 25 bp, Homo sapien
cacagatacctacgtcggataagat

SEQ ID NO: 4958785 - DNA, 25 bp, Homo sapien
tacaagccgatctgacactcacagc

SEQ ID NO: 4958786 - DNA, 25 bp, Homo sapien
gctaaatcatatcccaccatgattt

SEQ ID NO: 4958787 - DNA, 25 bp, Homo sapien
catgacttgggtgcaaaaggccaca

SEQ ID NO: 4958788 - DNA, 25 bp, Homo sapien
tcaagaggctcggacgttacgcatg

SEQ ID NO: 4958789 - DNA, 25 bp, Homo sapien
tgacttgctcgtgggaaagagccac

SEQ ID NO: 4958790 - DNA, 25 bp, Homo sapien
taaaatgaaagagtcacgctcgtcc

SEQ ID NO: 4958791 - DNA, 25 bp, Homo sapien
gagaaagcacctgaccatcaggcag

SEQ ID NO: 4958792 - DNA, 25 bp, Homo sapien
caagcttgggaccactcagcgtttc

SEQ ID NO: 4958793 - DNA, 25 bp, Homo sapien
cagtatcctgggctgaactcctgaa

SEQ ID NO: 4958794 - DNA, 25 bp, Homo sapien
gaacttcttcgggagaaagcacctg

SEQ ID NO: 4958795 - DNA, 25 bp, Homo sapien
tagcaccgaatctaccgaggacggg

SEQ ID NO: 4958796 - DNA, 25 bp, Homo sapien
tatcctgcagagactaggatttcct

SEQ ID NO: 4958797 - DNA, 25 bp, Homo sapien
taaaggagttctagttgcaggtagc

SEQ ID NO: 4958798 - DNA, 25 bp, Homo sapien
tgtgcgaatcacacccaggtatcct

SEQ ID NO: 4958799 - DNA, 25 bp, Homo sapien
ccctctctgcgcctcggctcaagct

SEQ ID NO: 4958800 - DNA, 25 bp, Homo sapien
tgcgcctcggctcaagctcactcac

SEQ ID NO: 4958801 - DNA, 25 bp, Homo sapien
ctctctgcgcctcggctcaagctca

SEQ ID NO: 4958802 - DNA, 25 bp, Homo sapien
tctgcgcctcggctcaagctcactc

SEQ ID NO: 4958803 - DNA, 25 bp, Homo sapien
caggaggactaaggcgacgcaactc

SEQ ID NO: 4958804 - DNA, 25 bp, Homo sapien
aggactaaggcgacgcaactccggc

SEQ ID NO: 4958805 - DNA, 25 bp, Homo sapien
gccaggaggactaaggcgacgcaac

SEQ ID NO: 4958806 - DNA, 25 bp, Homo sapien
cgtgctgcgcgacggcacagctgac

SEQ ID NO: 4958807 - DNA, 25 bp, Homo sapien
tctagcagccaacgccactccccgg

SEQ ID NO: 4958808 - DNA, 25 bp, Homo sapien
cgctctagcagccaacgccactccc

SEQ ID NO: 4958809 - DNA, 25 bp, Homo sapien
gccaacgccactccccggactccag

SEQ ID NO: 4958810 - DNA, 25 bp, Homo sapien
agcagccaacgccactccccggact

SEQ ID NO: 4958811 - DNA, 25 bp, Homo sapien
ctgggaccgcaccattccaggcagt

SEQ ID NO: 4958812 - DNA, 25 bp, Homo sapien
attccaggcagtagggggaacgctc

SEQ ID NO: 4958813 - DNA, 25 bp, Homo sapien
tgggaccgcaccattccaggcagta

SEQ ID NO: 4958814 - DNA, 25 bp, Homo sapien
ggcagtagggggaacgctcggagga

SEQ ID NO: 4958815 - DNA, 25 bp, Homo sapien
gagagagagccttccaggctacctg

SEQ ID NO: 4958816 - DNA, 25 bp, Homo sapien
tgcagaaggagagtcgcgatcgcct

SEQ ID NO: 4958817 - DNA, 25 bp, Homo sapien
gcaatagtcggaccgagccggagcc

SEQ ID NO: 4958818 - DNA, 25 bp, Homo sapien
cctttggcgcgtggcgtgatccatc

SEQ ID NO: 4958819 - DNA, 25 bp, Homo sapien
ctagcaggcgggtgcagcctgtccc

SEQ ID NO: 4958820 - DNA, 25 bp, Homo sapien
agcaggcgggtgcagcctgtcccgc

SEQ ID NO: 4958821 - DNA, 25 bp, Homo sapien
ggcgggtgcagcctgtcccgcgtac

SEQ ID NO: 4958822 - DNA, 25 bp, Homo sapien
caggcgggtgcagcctgtcccgcgt

SEQ ID NO: 4958823 - DNA, 25 bp, Homo sapien
ccacgaaacggatccaaagagtctc

SEQ ID NO: 4958824 - DNA, 25 bp, Homo sapien
cccacgaaacggatccaaagagtct

SEQ ID NO: 4958825 - DNA, 25 bp, Homo sapien
caaagagtctcaacactaatgtaac

SEQ ID NO: 4958826 - DNA, 25 bp, Homo sapien
cacgaaacggatccaaagagtctca

SEQ ID NO: 4958827 - DNA, 25 bp, Homo sapien
aagcggcccgaaatgagttgagtta

SEQ ID NO: 4958828 - DNA, 25 bp, Homo sapien
agaaaagcggcccgaaatgagttga

SEQ ID NO: 4958829 - DNA, 25 bp, Homo sapien
aaaagcggcccgaaatgagttgagt

SEQ ID NO: 4958830 - DNA, 25 bp, Homo sapien
aaagcggcccgaaatgagttgagtt

SEQ ID NO: 4958831 - DNA, 25 bp, Homo sapien
ggtcctccaagctgttggttaccca

SEQ ID NO: 4958832 - DNA, 25 bp, Homo sapien
ccgaggagtgagagagaatcgaatc

SEQ ID NO: 4958833 - DNA, 25 bp, Homo sapien
gagaatcgaatccactcgggtcctc

SEQ ID NO: 4958834 - DNA, 25 bp, Homo sapien
gagcagttgagtggccgaggagtga

SEQ ID NO: 4958835 - DNA, 25 bp, Homo sapien
ggtgggacccgcgagctttctctcc

SEQ ID NO: 4958836 - DNA, 25 bp, Homo sapien
ctcccagcccgatgcagcagttcat

SEQ ID NO: 4958837 - DNA, 25 bp, Homo sapien
gcctcggtgaaaagcgcgctgagac

SEQ ID NO: 4958838 - DNA, 25 bp, Homo sapien
aaatcccagaattgaggcctcggtg

SEQ ID NO: 4958839 - DNA, 25 bp, Homo sapien
aaggactcaggtgggcggagcagag

SEQ ID NO: 4958840 - DNA, 25 bp, Homo sapien
gctgtgtttcctcctaactggcgaa

SEQ ID NO: 4958841 - DNA, 25 bp, Homo sapien
cctaactggcgaaggactcaggtgg

SEQ ID NO: 4958842 - DNA, 25 bp, Homo sapien
tcctcctaactggcgaaggactcag

SEQ ID NO: 4958843 - DNA, 25 bp, Homo sapien
ccgggttggatttcaaagtccagca

SEQ ID NO: 4958844 - DNA, 25 bp, Homo sapien
aggcggacgcgagtagctcggcagg

SEQ ID NO: 4958845 - DNA, 25 bp, Homo sapien
atccgtggacacagtcgcgcgggta

SEQ ID NO: 4958846 - DNA, 25 bp, Homo sapien
ggactcgcttggctttcgtgccatc

SEQ ID NO: 4958847 - DNA, 25 bp, Homo sapien
cttcatctgtttctgggctgctcat

SEQ ID NO: 4958848 - DNA, 25 bp, Homo sapien
tcaccaaaaccttcatcttttcaat

SEQ ID NO: 4958849 - DNA, 25 bp, Homo sapien
aaaccttcatcttttcaatctcttc

SEQ ID NO: 4958850 - DNA, 25 bp, Homo sapien
cgtgaatattcaccaaaaccttcat

SEQ ID NO: 4958851 - DNA, 25 bp, Homo sapien
ccgtccgccgtcatctcttgaactg

SEQ ID NO: 4958852 - DNA, 25 bp, Homo sapien
cgtgatccgtccgccgtcatctctt

SEQ ID NO: 4958853 - DNA, 25 bp, Homo sapien
cgtccgccgtcatctcttgaactgc

SEQ ID NO: 4958854 - DNA, 25 bp, Homo sapien
gatccgtccgccgtcatctcttgaa

SEQ ID NO: 4958855 - DNA, 25 bp, Homo sapien
aatgaagcatacatttcatttatct

SEQ ID NO: 4958856 - DNA, 25 bp, Homo sapien
tgaagcatacatttcatttatctta

SEQ ID NO: 4958857 - DNA, 25 bp, Homo sapien
agcatacatttcatttatcttatgt

SEQ ID NO: 4958858 - DNA, 25 bp, Homo sapien
catacatttcatttatcttatgtac

SEQ ID NO: 4958859 - DNA, 25 bp, Homo sapien
aaaccagtggacatacaggaacctg

SEQ ID NO: 4958860 - DNA, 25 bp, Homo sapien
accagtggacatacaggaacctgat

SEQ ID NO: 4958861 - DNA, 25 bp, Homo sapien
aaccagtggacatacaggaacctga

SEQ ID NO: 4958862 - DNA, 25 bp, Homo sapien
tagcatctgtctgcctctaactaga

SEQ ID NO: 4958863 - DNA, 25 bp, Homo sapien
gatatcataacccaagtagtgtctg

SEQ ID NO: 4958864 - DNA, 25 bp, Homo sapien
cagatcataaaaccttacgtaagcc

SEQ ID NO: 4958865 - DNA, 25 bp, Homo sapien
tctggcatgtagtagcactcaatga

SEQ ID NO: 4958866 - DNA, 25 bp, Homo sapien
tccaaagcatatcaagcactctgtg

SEQ ID NO: 4958867 - DNA, 25 bp, Homo sapien
tgctatatgccctctaaaagccatg

SEQ ID NO: 4958868 - DNA, 25 bp, Homo sapien
gctatttctaagagcgctagtggca

SEQ ID NO: 4958869 - DNA, 25 bp, Homo sapien
tacacaggccatggtgtaaacctcc

SEQ ID NO: 4958870 - DNA, 25 bp, Homo sapien
tctgaacggctaggatgccaggctg

SEQ ID NO: 4958871 - DNA, 25 bp, Homo sapien
tgaacggctaggatgccaggctgct

SEQ ID NO: 4958872 - DNA, 25 bp, Homo sapien
tgtctgaacggctaggatgccaggc

SEQ ID NO: 4958873 - DNA, 25 bp, Homo sapien
ctgtctgaacggctaggatgccagg

SEQ ID NO: 4958874 - DNA, 25 bp, Homo sapien
gagtttgcaaccctgtacagcttga

SEQ ID NO: 4958875 - DNA, 25 bp, Homo sapien
gggcaaactcaaatatgcttgagtt

SEQ ID NO: 4958876 - DNA, 25 bp, Homo sapien
ccttcatataggcatactgggaatt

SEQ ID NO: 4958877 - DNA, 25 bp, Homo sapien
tgtatgtcagtgaccttttggaggg

SEQ ID NO: 4958878 - DNA, 25 bp, Homo sapien
cttcatggatccagcatacaactcc

SEQ ID NO: 4958879 - DNA, 25 bp, Homo sapien
gcagccttcatggatccagcataca

SEQ ID NO: 4958880 - DNA, 25 bp, Homo sapien
gagcagccttcatggatccagcata

SEQ ID NO: 4958881 - DNA, 25 bp, Homo sapien
tggatccagcatacaactcccagtc

SEQ ID NO: 4958882 - DNA, 25 bp, Homo sapien
cttttaatctaactgagaatatctc

SEQ ID NO: 4958883 - DNA, 25 bp, Homo sapien
cagagacagagcttgttgatgtgtg

SEQ ID NO: 4958884 - DNA, 25 bp, Homo sapien
tgtgatgaatggctcactggcgccc

SEQ ID NO: 4958885 - DNA, 25 bp, Homo sapien
gaatatctcaagacagtctattgag

SEQ ID NO: 4958886 - DNA, 25 bp, Homo sapien
agtatgggctggttacactgtgttc

SEQ ID NO: 4958887 - DNA, 25 bp, Homo sapien
cccttgcagtatgggctggttacac

SEQ ID NO: 4958888 - DNA, 25 bp, Homo sapien
tatgggctggttacactgtgttcca

SEQ ID NO: 4958889 - DNA, 25 bp, Homo sapien
tgcagtatgggctggttacactgtg

SEQ ID NO: 4958890 - DNA, 25 bp, Homo sapien
gaaataacgccgcatatctacaact

SEQ ID NO: 4958891 - DNA, 25 bp, Homo sapien
gcccgcatcgccaagtcaatcctaa

SEQ ID NO: 4958892 - DNA, 25 bp, Homo sapien
agccctcagaaataacgccgcatat

SEQ ID NO: 4958893 - DNA, 25 bp, Homo sapien
aataacgccgcatatctacaactat

SEQ ID NO: 4958894 - DNA, 25 bp, Homo sapien
caagtaaggtagaatccaaacattt

SEQ ID NO: 4958895 - DNA, 25 bp, Homo sapien
caagaccccaagacaagtaaggtag

SEQ ID NO: 4958896 - DNA, 25 bp, Homo sapien
cccaagacaagtaaggtagaatcca

SEQ ID NO: 4958897 - DNA, 25 bp, Homo sapien
tcaagaccccaagacaagtaaggta

SEQ ID NO: 4958898 - DNA, 25 bp, Homo sapien
aaggacgctaacatgcaacaagaaa

SEQ ID NO: 4958899 - DNA, 25 bp, Homo sapien
cagacttgtcttacaagaaacgcta

SEQ ID NO: 4958900 - DNA, 25 bp, Homo sapien
acttgtcttacaagaaacgctaaag

SEQ ID NO: 4958901 - DNA, 25 bp, Homo sapien
tgaaaggaaaggacgctaacatgca

SEQ ID NO: 4958902 - DNA, 25 bp, Homo sapien
atttttatgctgagaaaagaaccca

SEQ ID NO: 4958903 - DNA, 25 bp, Homo sapien
gtgctgggaaaatctctacattttt

SEQ ID NO: 4958904 - DNA, 25 bp, Homo sapien
aaatctctacatttttatgctgaga

SEQ ID NO: 4958905 - DNA, 25 bp, Homo sapien
tggtgctgggaaaatctctacattt

SEQ ID NO: 4958906 - DNA, 25 bp, Homo sapien
cagtatatcaattacaacttctcca

SEQ ID NO: 4958907 - DNA, 25 bp, Homo sapien
aaaggtgcacagtattggcagctgc

SEQ ID NO: 4958908 - DNA, 25 bp, Homo sapien
cagctgctgagcacttcatctcttg

SEQ ID NO: 4958909 - DNA, 25 bp, Homo sapien
gtgagcagccagcaaccaagcagca

SEQ ID NO: 4958910 - DNA, 25 bp, Homo sapien
gtctcttccaaatccgatcccgaga

SEQ ID NO: 4958911 - DNA, 25 bp, Homo sapien
cgatcccgagaaagcctgtgaggct

SEQ ID NO: 4958912 - DNA, 25 bp, Homo sapien
gaggaagtcctgtgtatccggcatg

SEQ ID NO: 4958913 - DNA, 25 bp, Homo sapien
gacatttgttagagaacgttcccca

SEQ ID NO: 4958914 - DNA, 25 bp, Homo sapien
gtgaaaggataaattcgataccctc

SEQ ID NO: 4958915 - DNA, 25 bp, Homo sapien
ggataaattcgataccctctctcaa

SEQ ID NO: 4958916 - DNA, 25 bp, Homo sapien
gccacatcagtcaactttactgtca

SEQ ID NO: 4958917 - DNA, 25 bp, Homo sapien
agcacagcggccacatcagtcaact

SEQ ID NO: 4958918 - DNA, 25 bp, Homo sapien
tgatggatattgtccagggataacc

SEQ ID NO: 4958919 - DNA, 25 bp, Homo sapien
tgtccagggataacccaaaaatgca

SEQ ID NO: 4958920 - DNA, 25 bp, Homo sapien
tgctatcacagtacccacagaatga

SEQ ID NO: 4958921 - DNA, 25 bp, Homo sapien
actcagtgctatcacagtacccaca

SEQ ID NO: 4958922 - DNA, 25 bp, Homo sapien
attcttgtactcttgttccactgac

SEQ ID NO: 4958923 - DNA, 25 bp, Homo sapien
caattcttgtactcttgttccactg

SEQ ID NO: 4958924 - DNA, 25 bp, Homo sapien
ctacaattcttgtactcttgttcca

SEQ ID NO: 4958925 - DNA, 25 bp, Homo sapien
tacaattcttgtactcttgttccac

SEQ ID NO: 4958926 - DNA, 25 bp, Homo sapien
tagctaacacttgaaaggctgtgcc

SEQ ID NO: 4958927 - DNA, 25 bp, Homo sapien
ggctgtgcccataagtctatttcct

SEQ ID NO: 4958928 - DNA, 25 bp, Homo sapien
ccaagtgtccattcacggtgtcaat

SEQ ID NO: 4958929 - DNA, 25 bp, Homo sapien
tattcaactgccttgggagactaaa

SEQ ID NO: 4958930 - DNA, 25 bp, Homo sapien
ttctatcacatagcttatagctgac

SEQ ID NO: 4958931 - DNA, 25 bp, Homo sapien
ctatcacatagcttatagctgacac

SEQ ID NO: 4958932 - DNA, 25 bp, Homo sapien
tctatcacatagcttatagctgaca

SEQ ID NO: 4958933 - DNA, 25 bp, Homo sapien
gactgaaactggttttagttatgac

SEQ ID NO: 4958934 - DNA, 25 bp, Homo sapien
caagactgaaactggttttagttat

SEQ ID NO: 4958935 - DNA, 25 bp, Homo sapien
aggtgtgagggaagattagaaatct

SEQ ID NO: 4958936 - DNA, 25 bp, Homo sapien
gaaatctgttcttgacaagactgaa

SEQ ID NO: 4958937 - DNA, 25 bp, Homo sapien
ttcccgcatggaacatcaagtcctt

SEQ ID NO: 4958938 - DNA, 25 bp, Homo sapien
tgaaataccgcccatgaaatcatgc

SEQ ID NO: 4958939 - DNA, 25 bp, Homo sapien
ccgcatggaacatcaagtccttcaa

SEQ ID NO: 4958940 - DNA, 25 bp, Homo sapien
aaatcatgcttggttgactcaggcc

SEQ ID NO: 4958941 - DNA, 25 bp, Homo sapien
tctcccaggtagagtcaagttggac

SEQ ID NO: 4958942 - DNA, 25 bp, Homo sapien
gcacgccccattatgcttagctgga

SEQ ID NO: 4958943 - DNA, 25 bp, Homo sapien
tagctaacgatgtcacaggtgaagg

SEQ ID NO: 4958944 - DNA, 25 bp, Homo sapien
caggagctcagaaatggtgcataaa

SEQ ID NO: 4958945 - DNA, 25 bp, Homo sapien
tcactcagataattcattgacatca

SEQ ID NO: 4958946 - DNA, 25 bp, Homo sapien
attgtttcactcagataattcattg

SEQ ID NO: 4958947 - DNA, 25 bp, Homo sapien
ggccatattgtttcactcagataat

SEQ ID NO: 4958948 - DNA, 25 bp, Homo sapien
catattgtttcactcagataattca

SEQ ID NO: 4958949 - DNA, 25 bp, Homo sapien
tgccatcaaaagctacacaagggaa

SEQ ID NO: 4958950 - DNA, 25 bp, Homo sapien
tgggaactttatacaagccgctcaa

SEQ ID NO: 4958951 - DNA, 25 bp, Homo sapien
caattctgtctgaggatatccaacc

SEQ ID NO: 4958952 - DNA, 25 bp, Homo sapien
gaaacaatgtgcagtagactacctg

SEQ ID NO: 4958953 - DNA, 25 bp, Homo sapien
gagattcccatgccgaaaggggtga

SEQ ID NO: 4958954 - DNA, 25 bp, Homo sapien
gaaaggggtgaacggaggatgatgc

SEQ ID NO: 4958955 - DNA, 25 bp, Homo sapien
agattcccatgccgaaaggggtgaa

SEQ ID NO: 4958956 - DNA, 25 bp, Homo sapien
ccgaaaggggtgaacggaggatgat

SEQ ID NO: 4958957 - DNA, 25 bp, Homo sapien
agaggcaacgggaattcttggcttc

SEQ ID NO: 4958958 - DNA, 25 bp, Homo sapien
gcgtcctgtctgttatcccacaagg

SEQ ID NO: 4958959 - DNA, 25 bp, Homo sapien
tccaagggtgtccaagcgtcctgtc

SEQ ID NO: 4958960 - DNA, 25 bp, Homo sapien
ccccacattgggaacagctgtcttc

SEQ ID NO: 4958961 - DNA, 25 bp, Homo sapien
tgccaagagcagcttgtgaattcat

SEQ ID NO: 4958962 - DNA, 25 bp, Homo sapien
cgtaggacaattatacatcccttgc

SEQ ID NO: 4958963 - DNA, 25 bp, Homo sapien
gaccttcccgtaggacaattataca

SEQ ID NO: 4958964 - DNA, 25 bp, Homo sapien
acaattatacatcccttgccaagag

SEQ ID NO: 4958965 - DNA, 25 bp, Homo sapien
taatttcaggcaagatctcgaatgc

SEQ ID NO: 4958966 - DNA, 25 bp, Homo sapien
cgaatgcccaatagggcctggttca

SEQ ID NO: 4958967 - DNA, 25 bp, Homo sapien
accatcccctagtgttaatttcagg

SEQ ID NO: 4958968 - DNA, 25 bp, Homo sapien
tgccagtggaatacggaatttttaa

SEQ ID NO: 4958969 - DNA, 25 bp, Homo sapien
tctcctaggacttctgtcttattct

SEQ ID NO: 4958970 - DNA, 25 bp, Homo sapien
tctgtcttattcttgttgatggcaa

SEQ ID NO: 4958971 - DNA, 25 bp, Homo sapien
tttctcctaggacttctgtcttatt

SEQ ID NO: 4958972 - DNA, 25 bp, Homo sapien
tcttgttgatggcaaggagtatctt

SEQ ID NO: 4958973 - DNA, 25 bp, Homo sapien
tggtactctcgagcagaaagaactt

SEQ ID NO: 4958974 - DNA, 25 bp, Homo sapien
gccacgtcacttctggtactctcga

SEQ ID NO: 4958975 - DNA, 25 bp, Homo sapien
tatgttgctgtcttgcaataatgcc

SEQ ID NO: 4958976 - DNA, 25 bp, Homo sapien
gttcagctatgttgctgtcttgcaa

SEQ ID NO: 4958977 - DNA, 25 bp, Homo sapien
aaactcatcgcctgtcatcttcaca

SEQ ID NO: 4958978 - DNA, 25 bp, Homo sapien
cacatggccaacagtcacagccaga

SEQ ID NO: 4958979 - DNA, 25 bp, Homo sapien
actcatcgcctgtcatcttcacatg

SEQ ID NO: 4958980 - DNA, 25 bp, Homo sapien
tcttcacatggccaacagtcacagc

SEQ ID NO: 4958981 - DNA, 25 bp, Homo sapien
tgaagccacaaatgcgtcattcttc

SEQ ID NO: 4958982 - DNA, 25 bp, Homo sapien
tgtccagcgtattgaccagtttctt

SEQ ID NO: 4958983 - DNA, 25 bp, Homo sapien
tcgatgttcacgtcggggataccca

SEQ ID NO: 4958984 - DNA, 25 bp, Homo sapien
ccagtttcttactctcgttgagttc

SEQ ID NO: 4958985 - DNA, 25 bp, Homo sapien
agactgagaagcatttgtccttctg

SEQ ID NO: 4958986 - DNA, 25 bp, Homo sapien
tctggggatcatagttcttcaagct

SEQ ID NO: 4958987 - DNA, 25 bp, Homo sapien
cttaagactgagaagcatttgtcct

SEQ ID NO: 4958988 - DNA, 25 bp, Homo sapien
taagactgagaagcatttgtccttc

SEQ ID NO: 4958989 - DNA, 25 bp, Homo sapien
tcccaggactctttgcactgcctgg

SEQ ID NO: 4958990 - DNA, 25 bp, Homo sapien
tctccaaaaacttctggcgcttgtg

SEQ ID NO: 4958991 - DNA, 25 bp, Homo sapien
accaagtgtcgccagagaccctgct

SEQ ID NO: 4958992 - DNA, 25 bp, Homo sapien
aacttctggcgcttgtgctggttcc

SEQ ID NO: 4958993 - DNA, 25 bp, Homo sapien
ctcaagcccctagggcaggcgctag

SEQ ID NO: 4958994 - DNA, 25 bp, Homo sapien
tgcttaggttttggcgccgccgctt

SEQ ID NO: 4958995 - DNA, 25 bp, Homo sapien
cgcctggttcggcaggtctgtccgc

SEQ ID NO: 4958996 - DNA, 25 bp, Homo sapien
taggcgttccggattgtcgcgccct

SEQ ID NO: 4958997 - DNA, 25 bp, Homo sapien
ctaaagagttatggtttcaggccag

SEQ ID NO: 4958998 - DNA, 25 bp, Homo sapien
caagccctagaacgaggattcaaac

SEQ ID NO: 4958999 - DNA, 25 bp, Homo sapien
ttcaggccagtaatagagggagctc

SEQ ID NO: 4959000 - DNA, 25 bp, Homo sapien
ggagctcgtgcaaaataatttaggc

SEQ ID NO: 4959001 - DNA, 25 bp, Homo sapien
tgtaaggcaactcgcagagcagcag

SEQ ID NO: 4959002 - DNA, 25 bp, Homo sapien
gtgactgtaaggcaactcgcagagc

SEQ ID NO: 4959003 - DNA, 25 bp, Homo sapien
gactgtaaggcaactcgcagagcag

SEQ ID NO: 4959004 - DNA, 25 bp, Homo sapien
tcagtgactgtaaggcaactcgcag

SEQ ID NO: 4959005 - DNA, 25 bp, Homo sapien
gtttggggtcatcagacacgctcac

SEQ ID NO: 4959006 - DNA, 25 bp, Homo sapien
tcacttcacactcccaacagtctcc

SEQ ID NO: 4959007 - DNA, 25 bp, Homo sapien
ggtcatcagacacgctcacttcaca

SEQ ID NO: 4959008 - DNA, 25 bp, Homo sapien
tggggtcatcagacacgctcacttc

SEQ ID NO: 4959009 - DNA, 25 bp, Homo sapien
ggattcatccgagcaggaggtctct

SEQ ID NO: 4959010 - DNA, 25 bp, Homo sapien
caggattcatccgagcaggaggtct

SEQ ID NO: 4959011 - DNA, 25 bp, Homo sapien
tacccccaggattcatccgagcagg

SEQ ID NO: 4959012 - DNA, 25 bp, Homo sapien
ccccaggattcatccgagcaggagg

SEQ ID NO: 4959013 - DNA, 25 bp, Homo sapien
gctcaactggacatcatggcactga

SEQ ID NO: 4959014 - DNA, 25 bp, Homo sapien
tttcattttggcagcacgcacagag

SEQ ID NO: 4959015 - DNA, 25 bp, Homo sapien
tctgtgtatgcgagaccagaatcca

SEQ ID NO: 4959016 - DNA, 25 bp, Homo sapien
ggtcacagctcaactggacatcatg

SEQ ID NO: 4959017 - DNA, 25 bp, Homo sapien
caccgcccactcagcaaggcagaag

SEQ ID NO: 4959018 - DNA, 25 bp, Homo sapien
aagccagacatgtggcctcctcatc

SEQ ID NO: 4959019 - DNA, 25 bp, Homo sapien
atacgttcggtgcaaggaaaattga

SEQ ID NO: 4959020 - DNA, 25 bp, Homo sapien
aatacgttcggtgcaaggaaaattg

SEQ ID NO: 4959021 - DNA, 25 bp, Homo sapien
agattctgtgactgttaaattttaa

SEQ ID NO: 4959022 - DNA, 25 bp, Homo sapien
tacgttcggtgcaaggaaaattgaa

SEQ ID NO: 4959023 - DNA, 25 bp, Homo sapien
cacaggaatagtggccttccaggaa

SEQ ID NO: 4959024 - DNA, 25 bp, Homo sapien
tgcctgaggtgtgcaatgtgagtat

SEQ ID NO: 4959025 - DNA, 25 bp, Homo sapien
caacgcacagctttatcttggcaaa

SEQ ID NO: 4959026 - DNA, 25 bp, Homo sapien
tagtgtctctctggaatggcctttg

SEQ ID NO: 4959027 - DNA, 25 bp, Homo sapien
ctttcttccaccatcagacgaggga

SEQ ID NO: 4959028 - DNA, 25 bp, Homo sapien
tccaccatcagacgagggatgagat

SEQ ID NO: 4959029 - DNA, 25 bp, Homo sapien
gtcactgccatctgcgctcttctct

SEQ ID NO: 4959030 - DNA, 25 bp, Homo sapien
tgatggtgtagctgtagtctccctt

SEQ ID NO: 4959031 - DNA, 25 bp, Homo sapien
gtttggacttggatttgagctctat

SEQ ID NO: 4959032 - DNA, 25 bp, Homo sapien
tcatttatgctaatctttggtttgg

SEQ ID NO: 4959033 - DNA, 25 bp, Homo sapien
tgtgcaccaggaatatcatttatgc

SEQ ID NO: 4959034 - DNA, 25 bp, Homo sapien
ctctatcttcggcaagtttctgtgg

SEQ ID NO: 4959035 - DNA, 25 bp, Homo sapien
tgagatggtgatggtttagtaagtg

SEQ ID NO: 4959036 - DNA, 25 bp, Homo sapien
gagatggtgatggtttagtaagtgc

SEQ ID NO: 4959037 - DNA, 25 bp, Homo sapien
agatggtgatggtttagtaagtgca

SEQ ID NO: 4959038 - DNA, 25 bp, Homo sapien
gatggtgatggtttagtaagtgcag

SEQ ID NO: 4959039 - DNA, 25 bp, Homo sapien
tctgaggcacaggagttcatgtcgc

SEQ ID NO: 4959040 - DNA, 25 bp, Homo sapien
gtctctccagtgatcctttagcggg

SEQ ID NO: 4959041 - DNA, 25 bp, Homo sapien
gactgcatagctgaatgatggccct

SEQ ID NO: 4959042 - DNA, 25 bp, Homo sapien
gggctgtgacagaaccgactgcata

SEQ ID NO: 4959043 - DNA, 25 bp, Homo sapien
taagctagcacttgagtattcctcg

SEQ ID NO: 4959044 - DNA, 25 bp, Homo sapien
cgtagttagaactcagggtgccagt

SEQ ID NO: 4959045 - DNA, 25 bp, Homo sapien
gaggcaaagatatcgtccgtccgta

SEQ ID NO: 4959046 - DNA, 25 bp, Homo sapien
tctgatctggactgaacaaagctgc

SEQ ID NO: 4959047 - DNA, 25 bp, Homo sapien
tgtggtccttaatcgagccttgggc

SEQ ID NO: 4959048 - DNA, 25 bp, Homo sapien
ggacacctggatccctaaagcaggg

SEQ ID NO: 4959049 - DNA, 25 bp, Homo sapien
gaagacttatttatggcgaccgatg

SEQ ID NO: 4959050 - DNA, 25 bp, Homo sapien
ctgggactcttctaggagcgcctga

SEQ ID NO: 4959051 - DNA, 25 bp, Homo sapien
tccatttccatcctcgctgttgttg

SEQ ID NO: 4959052 - DNA, 25 bp, Homo sapien
tcaggaattgaagttagggtgctta

SEQ ID NO: 4959053 - DNA, 25 bp, Homo sapien
ggaaaagtgctcaactgctcagcat

SEQ ID NO: 4959054 - DNA, 25 bp, Homo sapien
cagcatgttcagtcggagctctctt

SEQ ID NO: 4959055 - DNA, 25 bp, Homo sapien
cacttgtactcctctctcaaaggaa

SEQ ID NO: 4959056 - DNA, 25 bp, Homo sapien
gctcctacaggaagtgcctccttgt

SEQ ID NO: 4959057 - DNA, 25 bp, Homo sapien
caaaggaatgatctgcagagcaagc

SEQ ID NO: 4959058 - DNA, 25 bp, Homo sapien
gagtgtggacaaggcacatcagtgc

SEQ ID NO: 4959059 - DNA, 25 bp, Homo sapien
gaaagaatgtgatatggatcccctc

SEQ ID NO: 4959060 - DNA, 25 bp, Homo sapien
tcaggaggagaggactaaccacatg

SEQ ID NO: 4959061 - DNA, 25 bp, Homo sapien
gaaagccttcaatttggtggtccac

SEQ ID NO: 4959062 - DNA, 25 bp, Homo sapien
tgtgtacacatgtcagaggtcccag

SEQ ID NO: 4959063 - DNA, 25 bp, Homo sapien
aaattacagggagctatgcccttgg

SEQ ID NO: 4959064 - DNA, 25 bp, Homo sapien
caagtcaagcgagtacggatgcggc

SEQ ID NO: 4959065 - DNA, 25 bp, Homo sapien
tatggtgggtacttaattcttccga

SEQ ID NO: 4959066 - DNA, 25 bp, Homo sapien
tctgcaactgcaaacctaggataca

SEQ ID NO: 4959067 - DNA, 25 bp, Homo sapien
aaagcaactgcaaccctagagaggg

SEQ ID NO: 4959068 - DNA, 25 bp, Homo sapien
caattctacctctgtgactgggcaa

SEQ ID NO: 4959069 - DNA, 25 bp, Homo sapien
tgaaaactcgaccaagtccacggga

SEQ ID NO: 4959070 - DNA, 25 bp, Homo sapien
gcagggtccgatctcaacaacaagt

SEQ ID NO: 4959071 - DNA, 25 bp, Homo sapien
tggtgtttcaggtcggtgatccttc

SEQ ID NO: 4959072 - DNA, 25 bp, Homo sapien
gtttcaggtcggtgatccttcctct

SEQ ID NO: 4959073 - DNA, 25 bp, Homo sapien
tgatccttcctctctgacacgttac

SEQ ID NO: 4959074 - DNA, 25 bp, Homo sapien
gtgatccttcctctctgacacgtta

SEQ ID NO: 4959075 - DNA, 25 bp, Homo sapien
cagtgattggagaagtatccgggtt

SEQ ID NO: 4959076 - DNA, 25 bp, Homo sapien
tcagcgaaggactcgagtgcgactt

SEQ ID NO: 4959077 - DNA, 25 bp, Homo sapien
tgctgacatacatttcatagcgggt

SEQ ID NO: 4959078 - DNA, 25 bp, Homo sapien
gcctcgctttcatcgttactcagta

SEQ ID NO: 4959079 - DNA, 25 bp, Homo sapien
gtgtgaatggctgttgaagacttcg

SEQ ID NO: 4959080 - DNA, 25 bp, Homo sapien
aatggctgttgaagacttcgcttca

SEQ ID NO: 4959081 - DNA, 25 bp, Homo sapien
gagagtgtgaatggctgttgaagac

SEQ ID NO: 4959082 - DNA, 25 bp, Homo sapien
gaatggctgttgaagacttcgcttc

SEQ ID NO: 4959083 - DNA, 25 bp, Homo sapien
ccaagtgtctaggattacaggcgca

SEQ ID NO: 4959084 - DNA, 25 bp, Homo sapien
caagtgtctaggattacaggcgcac

SEQ ID NO: 4959085 - DNA, 25 bp, Homo sapien
cacactcggccagtaaattactttt

SEQ ID NO: 4959086 - DNA, 25 bp, Homo sapien
cagctcagagactgaaaacaatgat

SEQ ID NO: 4959087 - DNA, 25 bp, Homo sapien
cagagactgaaaacaatgatcagtg

SEQ ID NO: 4959088 - DNA, 25 bp, Homo sapien
accacactcggccagtaaattactt

SEQ ID NO: 4959089 - DNA, 25 bp, Homo sapien
aagctcatcaatcatattgcggcag

SEQ ID NO: 4959090 - DNA, 25 bp, Homo sapien
catattgcggcagacggtgtttcct

SEQ ID NO: 4959091 - DNA, 25 bp, Homo sapien
tctttcgtactaatggaactgtgcg

SEQ ID NO: 4959092 - DNA, 25 bp, Homo sapien
gtcatcatggacccaagaagctcat

SEQ ID NO: 4959093 - DNA, 25 bp, Homo sapien
tccctcagaagcacattcccagagt

SEQ ID NO: 4959094 - DNA, 25 bp, Homo sapien
ccgggtatccctcagaagcacattc

SEQ ID NO: 4959095 - DNA, 25 bp, Homo sapien
tccttctgattgtactggaattccc

SEQ ID NO: 4959096 - DNA, 25 bp, Homo sapien
ctggaattccccgaagtcataccgg

SEQ ID NO: 4959097 - DNA, 25 bp, Homo sapien
tggaggtctttgagattcatgtacc

SEQ ID NO: 4959098 - DNA, 25 bp, Homo sapien
gatgcagcaattggctctgttgatg

SEQ ID NO: 4959099 - DNA, 25 bp, Homo sapien
tctcttgcccttattacagtctatg

SEQ ID NO: 4959100 - DNA, 25 bp, Homo sapien
tggtgaattcctctttgggtggaac

SEQ ID NO: 4959101 - DNA, 25 bp, Homo sapien
ggaaggcactgatctatatcacctg

SEQ ID NO: 4959102 - DNA, 25 bp, Homo sapien
tgcagggagacgacaacagaaagct

SEQ ID NO: 4959103 - DNA, 25 bp, Homo sapien
gttcagaaaggataaggtcatgcca

SEQ ID NO: 4959104 - DNA, 25 bp, Homo sapien
gctaggctccgcttctcttcaaaag

SEQ ID NO: 4959105 - DNA, 25 bp, Homo sapien
tccagaacagctcaaccaactgtgc

SEQ ID NO: 4959106 - DNA, 25 bp, Homo sapien
acaaaacatcgatctgccccagaac

SEQ ID NO: 4959107 - DNA, 25 bp, Homo sapien
gtgctttgtttggagccttgtaaac

SEQ ID NO: 4959108 - DNA, 25 bp, Homo sapien
acattgacacaaaacatcgatctgc

SEQ ID NO: 4959109 - DNA, 25 bp, Homo sapien
gcaacctgggatttaaacaactgga

SEQ ID NO: 4959110 - DNA, 25 bp, Homo sapien
cagagtttggacagtttctaaggca

SEQ ID NO: 4959111 - DNA, 25 bp, Homo sapien
taaatttggctcaccatgaagcact

SEQ ID NO: 4959112 - DNA, 25 bp, Homo sapien
cagtaacatcccttcgcttagagtt

SEQ ID NO: 4959113 - DNA, 25 bp, Homo sapien
aggacttgtgaaaatggtaagaatt

SEQ ID NO: 4959114 - DNA, 25 bp, Homo sapien
aaggacttgtgaaaatggtaagaat

SEQ ID NO: 4959115 - DNA, 25 bp, Homo sapien
caaggacttgtgaaaatggtaagaa

SEQ ID NO: 4959116 - DNA, 25 bp, Homo sapien
ctggtgattaaagctcctcttcctg

SEQ ID NO: 4959117 - DNA, 25 bp, Homo sapien
ccattcatgcctatgatcttccctg

SEQ ID NO: 4959118 - DNA, 25 bp, Homo sapien
ccctggtgattaaagctcctcttcc

SEQ ID NO: 4959119 - DNA, 25 bp, Homo sapien
tgcctatgatcttccctggtgatta

SEQ ID NO: 4959120 - DNA, 25 bp, Homo sapien
ccaggtttgttttcatgggagcttc

SEQ ID NO: 4959121 - DNA, 25 bp, Homo sapien
gtttgttttcatgggagcttctggt

SEQ ID NO: 4959122 - DNA, 25 bp, Homo sapien
tgagaacagtcaccaggtttgtttt

SEQ ID NO: 4959123 - DNA, 25 bp, Homo sapien
ctgggtgagaacagtcaccaggttt

SEQ ID NO: 4959124 - DNA, 25 bp, Homo sapien
ggctcttccaccttcggcatcaagg

SEQ ID NO: 4959125 - DNA, 25 bp, Homo sapien
ttccaccttcggcatcaagggctcc

SEQ ID NO: 4959126 - DNA, 25 bp, Homo sapien
gctcttccaccttcggcatcaaggg

SEQ ID NO: 4959127 - DNA, 25 bp, Homo sapien
tcttccaccttcggcatcaagggct

SEQ ID NO: 4959128 - DNA, 25 bp, Homo sapien
tgctttttgagaactcccatttccc

SEQ ID NO: 4959129 - DNA, 25 bp, Homo sapien
caaaacaggcctatggcttaaagcc

SEQ ID NO: 4959130 - DNA, 25 bp, Homo sapien
aacaaaacaggcctatggcttaaag

SEQ ID NO: 4959131 - DNA, 25 bp, Homo sapien
aaacaggcctatggcttaaagccac

SEQ ID NO: 4959132 - DNA, 25 bp, Homo sapien
cactcactgtatagatggatgtgcc

SEQ ID NO: 4959133 - DNA, 25 bp, Homo sapien
tgccgaacagcaagaatgtgcaggg

SEQ ID NO: 4959134 - DNA, 25 bp, Homo sapien
ggcagaggctaagggactctaaccc

SEQ ID NO: 4959135 - DNA, 25 bp, Homo sapien
gaaaaacgcatagtgttgccgaaca

SEQ ID NO: 4959136 - DNA, 25 bp, Homo sapien
gccagctcggtggtgatctgcttca

SEQ ID NO: 4959137 - DNA, 25 bp, Homo sapien
agtttgtactcatcgacgtccttgg

SEQ ID NO: 4959138 - DNA, 25 bp, Homo sapien
tactcatcgacgtccttggctttga

SEQ ID NO: 4959139 - DNA, 25 bp, Homo sapien
tgctcggccagctcggtggtgatct

SEQ ID NO: 4959140 - DNA, 25 bp, Homo sapien
ttgattggcccaaagcaacccgtca

SEQ ID NO: 4959141 - DNA, 25 bp, Homo sapien
tcaggcaaggagactatcaactatg

SEQ ID NO: 4959142 - DNA, 25 bp, Homo sapien
ggtaccgtgtaccaatgcaatatgg

SEQ ID NO: 4959143 - DNA, 25 bp, Homo sapien
caagaaaggtagcatgaacacgtgg

SEQ ID NO: 4959144 - DNA, 25 bp, Homo sapien
aagtgggcggctaaacttcttctga

SEQ ID NO: 4959145 - DNA, 25 bp, Homo sapien
cttcttctgagagccgattgctgct

SEQ ID NO: 4959146 - DNA, 25 bp, Homo sapien
ttatccacccttgcatttcctctgg

SEQ ID NO: 4959147 - DNA, 25 bp, Homo sapien
gacagttttgttgtagtggcaggca

SEQ ID NO: 4959148 - DNA, 25 bp, Homo sapien
gaacattgtcattcgacgatcacca

SEQ ID NO: 4959149 - DNA, 25 bp, Homo sapien
ccaaagaagctatgatcatcacagt

SEQ ID NO: 4959150 - DNA, 25 bp, Homo sapien
tgatcatcacagtgccagactgtga

SEQ ID NO: 4959151 - DNA, 25 bp, Homo sapien
aacttcattagagatgaacattgtc

SEQ ID NO: 4959152 - DNA, 25 bp, Homo sapien
agaccctccagtcggcagttttaag

SEQ ID NO: 4959153 - DNA, 25 bp, Homo sapien
cgtggtgcacactcacagcgttttt

SEQ ID NO: 4959154 - DNA, 25 bp, Homo sapien
ccttggatgccaatgcgtggtgcac

SEQ ID NO: 4959155 - DNA, 25 bp, Homo sapien
tctcatagtccgtggccttggatgc

SEQ ID NO: 4959156 - DNA, 25 bp, Homo sapien
gaagttactacccaaatgtcaacca

SEQ ID NO: 4959157 - DNA, 25 bp, Homo sapien
tatgaagttactacccaaatgtcaa

SEQ ID NO: 4959158 - DNA, 25 bp, Homo sapien
gatatgaagttactacccaaatgtc

SEQ ID NO: 4959159 - DNA, 25 bp, Homo sapien
ctgtaacgaagtggatatgaagtta

SEQ ID NO: 4959160 - DNA, 25 bp, Homo sapien
tctccaagtagagctatgtttcccc

SEQ ID NO: 4959161 - DNA, 25 bp, Homo sapien
tggctccagatcaaagtatgcataa

SEQ ID NO: 4959162 - DNA, 25 bp, Homo sapien
gcataattgcttactggacacatcc

SEQ ID NO: 4959163 - DNA, 25 bp, Homo sapien
gacatcatctacttgcatggcttaa

SEQ ID NO: 4959164 - DNA, 25 bp, Homo sapien
acgccggatcctgggatctttgcat

SEQ ID NO: 4959165 - DNA, 25 bp, Homo sapien
cgccggatcctgggatctttgcatc

SEQ ID NO: 4959166 - DNA, 25 bp, Homo sapien
gccggatcctgggatctttgcatcc

SEQ ID NO: 4959167 - DNA, 25 bp, Homo sapien
ttatttcatcgagttttgtggattt

SEQ ID NO: 4959168 - DNA, 25 bp, Homo sapien
ccttcagtacagcataaaaggtttt

SEQ ID NO: 4959169 - DNA, 25 bp, Homo sapien
taaagaactgttcccttcagtacag

SEQ ID NO: 4959170 - DNA, 25 bp, Homo sapien
gcaagtaaagaactgttcccttcag

SEQ ID NO: 4959171 - DNA, 25 bp, Homo sapien
tgttcccttcagtacagcataaaag

SEQ ID NO: 4959172 - DNA, 25 bp, Homo sapien
ccagtcagattgaagggacatccac

SEQ ID NO: 4959173 - DNA, 25 bp, Homo sapien
gggacatccacagtaaatggtctgt

SEQ ID NO: 4959174 - DNA, 25 bp, Homo sapien
tctgtaccagtacacagtctctgag

SEQ ID NO: 4959175 - DNA, 25 bp, Homo sapien
cactgttccagtcagattgaaggga

SEQ ID NO: 4959176 - DNA, 25 bp, Homo sapien
tcctccaaagatgggtgatattgga

SEQ ID NO: 4959177 - DNA, 25 bp, Homo sapien
caaagatgggtgatattggagccat

SEQ ID NO: 4959178 - DNA, 25 bp, Homo sapien
tccaaagatgggtgatattggagcc

SEQ ID NO: 4959179 - DNA, 25 bp, Homo sapien
gttcctccaaagatgggtgatattg

SEQ ID NO: 4959180 - DNA, 25 bp, Homo sapien
gaaggccgacaatgcaaatcctgcc

SEQ ID NO: 4959181 - DNA, 25 bp, Homo sapien
gcattccaaaataaacccagcactt

SEQ ID NO: 4959182 - DNA, 25 bp, Homo sapien
gcacaaggcatttttaagactgttc

SEQ ID NO: 4959183 - DNA, 25 bp, Homo sapien
tttttcagggcctcaccaagagtct

SEQ ID NO: 4959184 - DNA, 25 bp, Homo sapien
taaactgggagctaggcacttagat

SEQ ID NO: 4959185 - DNA, 25 bp, Homo sapien
agattttattcacaccatgatgccc

SEQ ID NO: 4959186 - DNA, 25 bp, Homo sapien
gatgtggctctattcctataagagg

SEQ ID NO: 4959187 - DNA, 25 bp, Homo sapien
tctattcaaagtgttccctagtggg

SEQ ID NO: 4959188 - DNA, 25 bp, Homo sapien
tctctgcaacataggacgtgtatgc

SEQ ID NO: 4959189 - DNA, 25 bp, Homo sapien
ttttttcctgcaacgctagagtcac

SEQ ID NO: 4959190 - DNA, 25 bp, Homo sapien
tatggacttgtgctaagccggccgc

SEQ ID NO: 4959191 - DNA, 25 bp, Homo sapien
aaaacggcatcactacagttcaggg

SEQ ID NO: 4959192 - DNA, 25 bp, Homo sapien
cagcccaaggcccacgggcatcttt

SEQ ID NO: 4959193 - DNA, 25 bp, Homo sapien
aaggcccacgggcatctttaaaatg

SEQ ID NO: 4959194 - DNA, 25 bp, Homo sapien
gcccaaggcccacgggcatctttaa

SEQ ID NO: 4959195 - DNA, 25 bp, Homo sapien
ggcccacgggcatctttaaaatgcc

SEQ ID NO: 4959196 - DNA, 25 bp, Homo sapien
gcttctacccggagaatcctccaat

SEQ ID NO: 4959197 - DNA, 25 bp, Homo sapien
cccggagaatcctccaatagaggag

SEQ ID NO: 4959198 - DNA, 25 bp, Homo sapien
tcatatgtattaggccgctgaggga

SEQ ID NO: 4959199 - DNA, 25 bp, Homo sapien
tcctgggccactgggtccaggaaaa

SEQ ID NO: 4959200 - DNA, 25 bp, Homo sapien
tcagtgatacaagtcagaatcctgt

SEQ ID NO: 4959201 - DNA, 25 bp, Homo sapien
cagtgatacaagtcagaatcctgtc

SEQ ID NO: 4959202 - DNA, 25 bp, Homo sapien
tcatgaggaatgtccaaaaatgggt

SEQ ID NO: 4959203 - DNA, 25 bp, Homo sapien
catatctgcatgaattttccgagcc

SEQ ID NO: 4959204 - DNA, 25 bp, Homo sapien
tgttccgttagctttctcctcagta

SEQ ID NO: 4959205 - DNA, 25 bp, Homo sapien
tttccgagccaagaatccacttttg

SEQ ID NO: 4959206 - DNA, 25 bp, Homo sapien
ctgctcctttagttctgatttcaca

SEQ ID NO: 4959207 - DNA, 25 bp, Homo sapien
tgctcctttagttctgatttcacag

SEQ ID NO: 4959208 - DNA, 25 bp, Homo sapien
gctcctttagttctgatttcacagc

SEQ ID NO: 4959209 - DNA, 25 bp, Homo sapien
ctctgctcctttagttctgatttca

SEQ ID NO: 4959210 - DNA, 25 bp, Homo sapien
gctggattgtaatcccaaatgttga

SEQ ID NO: 4959211 - DNA, 25 bp, Homo sapien
gagtgagttaagtcatcatgagatc

SEQ ID NO: 4959212 - DNA, 25 bp, Homo sapien
tgagaggtgactcgatcataatggc

SEQ ID NO: 4959213 - DNA, 25 bp, Homo sapien
tcaaatttcatgctggattgtaatc

SEQ ID NO: 4959214 - DNA, 25 bp, Homo sapien
gatttaatgactgtcctgccggggt

SEQ ID NO: 4959215 - DNA, 25 bp, Homo sapien
gcaggttattattggagctttaaga

SEQ ID NO: 4959216 - DNA, 25 bp, Homo sapien
gggtttcggacttgcacagtgcctg

SEQ ID NO: 4959217 - DNA, 25 bp, Homo sapien
tgagagcaaccgcagggactgaact

SEQ ID NO: 4959218 - DNA, 25 bp, Homo sapien
gacggggtggctacagagatgccag

SEQ ID NO: 4959219 - DNA, 25 bp, Homo sapien
tataagacggggtggctacagagat

SEQ ID NO: 4959220 - DNA, 25 bp, Homo sapien
gactttataagacggggtggctaca

SEQ ID NO: 4959221 - DNA, 25 bp, Homo sapien
ctttataagacggggtggctacaga

SEQ ID NO: 4959222 - DNA, 25 bp, Homo sapien
actgcccattcaagcttctcattct

SEQ ID NO: 4959223 - DNA, 25 bp, Homo sapien
caagcttctcattcttgattgagtt

SEQ ID NO: 4959224 - DNA, 25 bp, Homo sapien
tgcccattcaagcttctcattcttg

SEQ ID NO: 4959225 - DNA, 25 bp, Homo sapien
ttcaagcttctcattcttgattgag

SEQ ID NO: 4959226 - DNA, 25 bp, Homo sapien
tacagtagctaataaaaaccaggtc

SEQ ID NO: 4959227 - DNA, 25 bp, Homo sapien
tcaggagggctttcgttggataaac

SEQ ID NO: 4959228 - DNA, 25 bp, Homo sapien
gaggctgaacacctatggaagtgca

SEQ ID NO: 4959229 - DNA, 25 bp, Homo sapien
taaaatacggagtatactgaggcac

SEQ ID NO: 4959230 - DNA, 25 bp, Homo sapien
catgcattgtgtaaccgtgagtctc

SEQ ID NO: 4959231 - DNA, 25 bp, Homo sapien
gatggaattcgtgtattttagttca

SEQ ID NO: 4959232 - DNA, 25 bp, Homo sapien
tgtgtaaccgtgagtctctctttct

SEQ ID NO: 4959233 - DNA, 25 bp, Homo sapien
tctccaacatattttgcacagttga

SEQ ID NO: 4959234 - DNA, 25 bp, Homo sapien
actgactccggacacagcaactcgg

SEQ ID NO: 4959235 - DNA, 25 bp, Homo sapien
cacagtgtacactttgcttcttcga

SEQ ID NO: 4959236 - DNA, 25 bp, Homo sapien
tttgaatgttgaccacacagtgtac

SEQ ID NO: 4959237 - DNA, 25 bp, Homo sapien
acattagattttatgctccttgcag

SEQ ID NO: 4959238 - DNA, 25 bp, Homo sapien
ttgtacatcagctccacagactggg

SEQ ID NO: 4959239 - DNA, 25 bp, Homo sapien
tacttgtacatcagctccacagact

SEQ ID NO: 4959240 - DNA, 25 bp, Homo sapien
cttgtacatcagctccacagactgg

SEQ ID NO: 4959241 - DNA, 25 bp, Homo sapien
tcatacttgtacatcagctccacag

SEQ ID NO: 4959242 - DNA, 25 bp, Homo sapien
cggatagaatcctcccgggagtatt

SEQ ID NO: 4959243 - DNA, 25 bp, Homo sapien
ctggcactctggacactattcacgc

SEQ ID NO: 4959244 - DNA, 25 bp, Homo sapien
ggactttgacctgtgagactgccgc

SEQ ID NO: 4959245 - DNA, 25 bp, Homo sapien
gagtatttcacggaacctgaggtcc

SEQ ID NO: 4959246 - DNA, 25 bp, Homo sapien
cagcatcttcaactaccctgtttgc

SEQ ID NO: 4959247 - DNA, 25 bp, Homo sapien
accctgtttgcagcgagtctgattg

SEQ ID NO: 4959248 - DNA, 25 bp, Homo sapien
gatccgcgttagcttaagaagcacc

SEQ ID NO: 4959249 - DNA, 25 bp, Homo sapien
tctcacgctggaggaactctgcggg

SEQ ID NO: 4959250 - DNA, 25 bp, Homo sapien
gaaaatcaggccataatggagcggg

SEQ ID NO: 4959251 - DNA, 25 bp, Homo sapien
tatttaagaaggatgatgagaggct

SEQ ID NO: 4959252 - DNA, 25 bp, Homo sapien
gagcgggagctgagaaatatattta

SEQ ID NO: 4959253 - DNA, 25 bp, Homo sapien
gaaaatgaggcaggatctgaagaat

SEQ ID NO: 4959254 - DNA, 25 bp, Homo sapien
gcttggacagctataggtactcttt

SEQ ID NO: 4959255 - DNA, 25 bp, Homo sapien
ctataggtactctttataagaggca

SEQ ID NO: 4959256 - DNA, 25 bp, Homo sapien
ggtactctttataagaggcatttta

SEQ ID NO: 4959257 - DNA, 25 bp, Homo sapien
gccaccgcgcttggacagctatagg

SEQ ID NO: 4959258 - DNA, 25 bp, Homo sapien
tccacagaagactggatgactgcag

SEQ ID NO: 4959259 - DNA, 25 bp, Homo sapien
taagcacacaaacctctagaaacgt

SEQ ID NO: 4959260 - DNA, 25 bp, Homo sapien
gcagctgatccacgaaaaagggaaa

SEQ ID NO: 4959261 - DNA, 25 bp, Homo sapien
ctagaaacgtaccattttgccagtg

SEQ ID NO: 4959262 - DNA, 25 bp, Homo sapien
cactgtataggttggctcagcgtcc

SEQ ID NO: 4959263 - DNA, 25 bp, Homo sapien
aaatggatctcccaacgagaagacg

SEQ ID NO: 4959264 - DNA, 25 bp, Homo sapien
tatgaacaaatagggcccatgtccc

SEQ ID NO: 4959265 - DNA, 25 bp, Homo sapien
cgagaagacgcttagagcagagctc

SEQ ID NO: 4959266 - DNA, 25 bp, Homo sapien
ttttctaaacgatgaggtgactggg

SEQ ID NO: 4959267 - DNA, 25 bp, Homo sapien
tggaggcactaacagtaaacacggc

SEQ ID NO: 4959268 - DNA, 25 bp, Homo sapien
gactgggttagaatatcttcaagac

SEQ ID NO: 4959269 - DNA, 25 bp, Homo sapien
aagaccctctccagctttaagcctg

SEQ ID NO: 4959270 - DNA, 25 bp, Homo sapien
tctcacgtaatttctataacctcca

SEQ ID NO: 4959271 - DNA, 25 bp, Homo sapien
aaagtagcttctgacaaatttcaac

SEQ ID NO: 4959272 - DNA, 25 bp, Homo sapien
tgagcacatctcctatgctacagtt

SEQ ID NO: 4959273 - DNA, 25 bp, Homo sapien
taagtcaactaagaaacacgcacct

SEQ ID NO: 4959274 - DNA, 25 bp, Homo sapien
gagtgtgagcctggactagatgaca

SEQ ID NO: 4959275 - DNA, 25 bp, Homo sapien
tagagataagggcagattaccccag

SEQ ID NO: 4959276 - DNA, 25 bp, Homo sapien
ttaccccagagcagaatagcatgtt

SEQ ID NO: 4959277 - DNA, 25 bp, Homo sapien
tcaaagctttctgatggcaatgagc

SEQ ID NO: 4959278 - DNA, 25 bp, Homo sapien
cctgcattatccagaaaatacttcc

SEQ ID NO: 4959279 - DNA, 25 bp, Homo sapien
tcatgtacctgcattatccagaaaa

SEQ ID NO: 4959280 - DNA, 25 bp, Homo sapien
tctggataatgtggcttctggcgtt

SEQ ID NO: 4959281 - DNA, 25 bp, Homo sapien
ccttgcaagatctggataatgtggc

SEQ ID NO: 4959282 - DNA, 25 bp, Homo sapien
gatcgaaagcgaaagcaggctgcca

SEQ ID NO: 4959283 - DNA, 25 bp, Homo sapien
aatattaccctcattatcgtcacca

SEQ ID NO: 4959284 - DNA, 25 bp, Homo sapien
agggcagaagcggaaacacgccacg

SEQ ID NO: 4959285 - DNA, 25 bp, Homo sapien
cattattctgcccatgatgagcacg

SEQ ID NO: 4959286 - DNA, 25 bp, Homo sapien
aaaagcttgcaaacctagcttttct

SEQ ID NO: 4959287 - DNA, 25 bp, Homo sapien
aagcttgcaaacctagcttttctct

SEQ ID NO: 4959288 - DNA, 25 bp, Homo sapien
aaagcttgcaaacctagcttttctc

SEQ ID NO: 4959289 - DNA, 25 bp, Homo sapien
aggcatccaagccctcttcctccat

SEQ ID NO: 4959290 - DNA, 25 bp, Homo sapien
acaggacaggcatccaagccctctt

SEQ ID NO: 4959291 - DNA, 25 bp, Homo sapien
acaggcatccaagccctcttcctcc

SEQ ID NO: 4959292 - DNA, 25 bp, Homo sapien
ggacaggcatccaagccctcttcct

SEQ ID NO: 4959293 - DNA, 25 bp, Homo sapien
ctcttgtgtagtcctttgggaataa

SEQ ID NO: 4959294 - DNA, 25 bp, Homo sapien
cctcttgtgtagtcctttgggaata

SEQ ID NO: 4959295 - DNA, 25 bp, Homo sapien
tcctcttgtgtagtcctttgggaat

SEQ ID NO: 4959296 - DNA, 25 bp, Homo sapien
tatatatttgtggtgcacaatgcag

SEQ ID NO: 4959297 - DNA, 25 bp, Homo sapien
tatatagtcgaaaggaaattgtacc

SEQ ID NO: 4959298 - DNA, 25 bp, Homo sapien
acaacaaagctctatgatttattta

SEQ ID NO: 4959299 - DNA, 25 bp, Homo sapien
ccatttaactccatgaatctgtgag

SEQ ID NO: 4959300 - DNA, 25 bp, Homo sapien
atccatatcttacactgtaaacacc

SEQ ID NO: 4959301 - DNA, 25 bp, Homo sapien
tctgaggacaggtgcccatttggtt

SEQ ID NO: 4959302 - DNA, 25 bp, Homo sapien
tatttcaacatggaataactgttta

SEQ ID NO: 4959303 - DNA, 25 bp, Homo sapien
agcatcttctccaatcccacaacac

SEQ ID NO: 4959304 - DNA, 25 bp, Homo sapien
gaaagacacctccaatatttctcag

SEQ ID NO: 4959305 - DNA, 25 bp, Homo sapien
ggagaatgcatgaattccaaagttg

SEQ ID NO: 4959306 - DNA, 25 bp, Homo sapien
ttacaatgctggagaatgcatgaat

SEQ ID NO: 4959307 - DNA, 25 bp, Homo sapien
ttccaaagttgattttgttgtctcc

SEQ ID NO: 4959308 - DNA, 25 bp, Homo sapien
caaagttgattttgttgtctccttg

SEQ ID NO: 4959309 - DNA, 25 bp, Homo sapien
acactaaaaaccaatagttccatgc

SEQ ID NO: 4959310 - DNA, 25 bp, Homo sapien
ctaaaaaccaatagttccatgctta

SEQ ID NO: 4959311 - DNA, 25 bp, Homo sapien
cactaaaaaccaatagttccatgct

SEQ ID NO: 4959312 - DNA, 25 bp, Homo sapien
taaaaaccaatagttccatgcttac

SEQ ID NO: 4959313 - DNA, 25 bp, Homo sapien
ccttgcagatttgcaatgaactcct

SEQ ID NO: 4959314 - DNA, 25 bp, Homo sapien
tacatactatcaagacctgtgaagg

SEQ ID NO: 4959315 - DNA, 25 bp, Homo sapien
aaaaacggacatttctgagctgaac

SEQ ID NO: 4959316 - DNA, 25 bp, Homo sapien
tcacagagcaacctgaatagggcca

SEQ ID NO: 4959317 - DNA, 25 bp, Homo sapien
tgttgcattataggagagaaaccct

SEQ ID NO: 4959318 - DNA, 25 bp, Homo sapien
ttgttatgggtatgaacgggtatgc

SEQ ID NO: 4959319 - DNA, 25 bp, Homo sapien
cagacactaacatctgtccctttta

SEQ ID NO: 4959320 - DNA, 25 bp, Homo sapien
gtgctaattatccatttgcatgtct

SEQ ID NO: 4959321 - DNA, 25 bp, Homo sapien
gtgggattattgagtcctatggtaa

SEQ ID NO: 4959322 - DNA, 25 bp, Homo sapien
cttcgggcaccagcaggagtgaact

SEQ ID NO: 4959323 - DNA, 25 bp, Homo sapien
gggcacctgagctctttaccagcat

SEQ ID NO: 4959324 - DNA, 25 bp, Homo sapien
cagcatccaggagaaaagaggttgc

SEQ ID NO: 4959325 - DNA, 25 bp, Homo sapien
gagtgaactctgtactggtcccgca

SEQ ID NO: 4959326 - DNA, 25 bp, Homo sapien
ttctgtcgttggtacagcctgttcc

SEQ ID NO: 4959327 - DNA, 25 bp, Homo sapien
gtcgttggtacagcctgttcctgct

SEQ ID NO: 4959328 - DNA, 25 bp, Homo sapien
tctgtcgttggtacagcctgttcct

SEQ ID NO: 4959329 - DNA, 25 bp, Homo sapien
tgtcgttggtacagcctgttcctgc

SEQ ID NO: 4959330 - DNA, 25 bp, Homo sapien
tggaatgtcgggcacctgtcacttc

SEQ ID NO: 4959331 - DNA, 25 bp, Homo sapien
ggaaatgactacaatctaagagaac

SEQ ID NO: 4959332 - DNA, 25 bp, Homo sapien
tacaagtattcttgggccacagatc

SEQ ID NO: 4959333 - DNA, 25 bp, Homo sapien
ttttctgagtttggctaatgacggt

SEQ ID NO: 4959334 - DNA, 25 bp, Homo sapien
ttggctacggctgcaaaagccacca

SEQ ID NO: 4959335 - DNA, 25 bp, Homo sapien
tgagccttaatcttggctacggctg

SEQ ID NO: 4959336 - DNA, 25 bp, Homo sapien
caaagatcctgagccttaatcttgg

SEQ ID NO: 4959337 - DNA, 25 bp, Homo sapien
tgcctcaaagatcctgagccttaat

SEQ ID NO: 4959338 - DNA, 25 bp, Homo sapien
ttttttgtgagaccgacactcactc

SEQ ID NO: 4959339 - DNA, 25 bp, Homo sapien
ccttgacctcttcttgtagggccag

SEQ ID NO: 4959340 - DNA, 25 bp, Homo sapien
tggttttgtgtatcctctcatcctg

SEQ ID NO: 4959341 - DNA, 25 bp, Homo sapien
tatcttctaaatgcagggctccctt

SEQ ID NO: 4959342 - DNA, 25 bp, Homo sapien
tccctgtgatgttgggatgcccacc

SEQ ID NO: 4959343 - DNA, 25 bp, Homo sapien
aagtttcgggtgtcaattggtagca

SEQ ID NO: 4959344 - DNA, 25 bp, Homo sapien
gatatcgtgcgtggtgattctaagc

SEQ ID NO: 4959345 - DNA, 25 bp, Homo sapien
catgagctcatacaggttaagggct

SEQ ID NO: 4959346 - DNA, 25 bp, Homo sapien
caggcgtttataccatttccaaagg

SEQ ID NO: 4959347 - DNA, 25 bp, Homo sapien
gaaatactcctcacgatgtctggat

SEQ ID NO: 4959348 - DNA, 25 bp, Homo sapien
tattcaggcaaacactactcaacga

SEQ ID NO: 4959349 - DNA, 25 bp, Homo sapien
aacaaatgttgaccagttgcatgcc

SEQ ID NO: 4959350 - DNA, 25 bp, Homo sapien
acacctaatggttaggttctcaggc

SEQ ID NO: 4959351 - DNA, 25 bp, Homo sapien
aacatttcaacacctaatggttagg

SEQ ID NO: 4959352 - DNA, 25 bp, Homo sapien
ggttctcaggctattctctatatcc

SEQ ID NO: 4959353 - DNA, 25 bp, Homo sapien
ctctatatccttattgtggagacag

SEQ ID NO: 4959354 - DNA, 25 bp, Homo sapien
gacgatgagaggatagcctgcaaat

SEQ ID NO: 4959355 - DNA, 25 bp, Homo sapien
gatattatcctgcaggacgatgaga

SEQ ID NO: 4959356 - DNA, 25 bp, Homo sapien
ggatagcctgcaaatgtacttaaca

SEQ ID NO: 4959357 - DNA, 25 bp, Homo sapien
gaagcacagacagaagaggtatcca

SEQ ID NO: 4959358 - DNA, 25 bp, Homo sapien
ggtgatcactgacttgattcaatgt

SEQ ID NO: 4959359 - DNA, 25 bp, Homo sapien
gttatatgtggccaaacgcactcaa

SEQ ID NO: 4959360 - DNA, 25 bp, Homo sapien
agggaattcttcacgctggtgatca

SEQ ID NO: 4959361 - DNA, 25 bp, Homo sapien
ctagtgtgaagggaattcttcacgc

SEQ ID NO: 4959362 - DNA, 25 bp, Homo sapien
aaagcagagataagcccgacatgtt

SEQ ID NO: 4959363 - DNA, 25 bp, Homo sapien
aaccatgtagagaatgggaaacggg

SEQ ID NO: 4959364 - DNA, 25 bp, Homo sapien
ttttattcacctgccatgggaacca

SEQ ID NO: 4959365 - DNA, 25 bp, Homo sapien
aagcccgacatgttttggatctaag

SEQ ID NO: 4959366 - DNA, 25 bp, Homo sapien
gcattattgcacaggtaaggcaatg

SEQ ID NO: 4959367 - DNA, 25 bp, Homo sapien
tggccatgtagatcggtattaagaa

SEQ ID NO: 4959368 - DNA, 25 bp, Homo sapien
taagaagcattattgcacaggtaag

SEQ ID NO: 4959369 - DNA, 25 bp, Homo sapien
tcggtattaagaagcattattgcac

SEQ ID NO: 4959370 - DNA, 25 bp, Homo sapien
gcatgaattcgcttttcactgttgg

SEQ ID NO: 4959371 - DNA, 25 bp, Homo sapien
agcatgaattcgcttttcactgttg

SEQ ID NO: 4959372 - DNA, 25 bp, Homo sapien
aaagcatgaattcgcttttcactgt

SEQ ID NO: 4959373 - DNA, 25 bp, Homo sapien
aaaaagcatgaattcgcttttcact

SEQ ID NO: 4959374 - DNA, 25 bp, Homo sapien
tcagtttaccgataggaatgtgacc

SEQ ID NO: 4959375 - DNA, 25 bp, Homo sapien
gaataactggtctgaatagcatcag

SEQ ID NO: 4959376 - DNA, 25 bp, Homo sapien
tgataaactaactgtgactgcagcc

SEQ ID NO: 4959377 - DNA, 25 bp, Homo sapien
tcagggctaatggtgacagagatag

SEQ ID NO: 4959378 - DNA, 25 bp, Homo sapien
aagagtagaggatatcatgctgtcc

SEQ ID NO: 4959379 - DNA, 25 bp, Homo sapien
tacgctgtcacactagagaagtgga

SEQ ID NO: 4959380 - DNA, 25 bp, Homo sapien
gttatcactaggtaactgaagatac

SEQ ID NO: 4959381 - DNA, 25 bp, Homo sapien
tgaagatacataatttctcacaata

SEQ ID NO: 4959382 - DNA, 25 bp, Homo sapien
ttctcccacaagagagaatgcttta

SEQ ID NO: 4959383 - DNA, 25 bp, Homo sapien
tctctctcgttcttgagtttctccc

SEQ ID NO: 4959384 - DNA, 25 bp, Homo sapien
caatggtatctgggttacaataaaa

SEQ ID NO: 4959385 - DNA, 25 bp, Homo sapien
ctattggagaagtgtattaaaactc

SEQ ID NO: 4959386 - DNA, 25 bp, Homo sapien
atttactagacagccattcaatata

SEQ ID NO: 4959387 - DNA, 25 bp, Homo sapien
tactagacagccattcaatataaat

SEQ ID NO: 4959388 - DNA, 25 bp, Homo sapien
gaaattttcgaaaatgctatcacac

SEQ ID NO: 4959389 - DNA, 25 bp, Homo sapien
agatattaattatacaaagtaagat

SEQ ID NO: 4959390 - DNA, 25 bp, Homo sapien
tccagatgaccctcacttgacaatg

SEQ ID NO: 4959391 - DNA, 25 bp, Homo sapien
tactcggagtcactaagagcactgt

SEQ ID NO: 4959392 - DNA, 25 bp, Homo sapien
aagagcactgtttatttgagatgaa

SEQ ID NO: 4959393 - DNA, 25 bp, Homo sapien
gatgaccctcacttgacaatgtaga

SEQ ID NO: 4959394 - DNA, 25 bp, Homo sapien
agtatcaccttaaaaggctattggg

SEQ ID NO: 4959395 - DNA, 25 bp, Homo sapien
gaagagttaattccaaagtatcacc

SEQ ID NO: 4959396 - DNA, 25 bp, Homo sapien
aaagggttacactagatgatctcag

SEQ ID NO: 4959397 - DNA, 25 bp, Homo sapien
taggttttaccttcagctacttaga

SEQ ID NO: 4959398 - DNA, 25 bp, Homo sapien
gcactccagcctgggtgacagagcg

SEQ ID NO: 4959399 - DNA, 25 bp, Homo sapien
ccagttattcgggaggctgattcag

SEQ ID NO: 4959400 - DNA, 25 bp, Homo sapien
tgcagtgagccaagatggtgctact

SEQ ID NO: 4959401 - DNA, 25 bp, Homo sapien
gagaactgcttgaacctgggaggtg

SEQ ID NO: 4959402 - DNA, 25 bp, Homo sapien
ccagcgtcattcctgtaaaatcaaa

SEQ ID NO: 4959403 - DNA, 25 bp, Homo sapien
tgcaactagtttgctaaattcgttg

SEQ ID NO: 4959404 - DNA, 25 bp, Homo sapien
tgagtgactgatccagcgtcattcc

SEQ ID NO: 4959405 - DNA, 25 bp, Homo sapien
cttcagatattcttctgcaactagt

SEQ ID NO: 4959406 - DNA, 25 bp, Homo sapien
gctgataaaggcgtttggccaacct

SEQ ID NO: 4959407 - DNA, 25 bp, Homo sapien
attgctgctggtaccattactgaga

SEQ ID NO: 4959408 - DNA, 25 bp, Homo sapien
tgatcttttgaatctgtccagctga

SEQ ID NO: 4959409 - DNA, 25 bp, Homo sapien
gccaaggtgttttgcaacatctgat

SEQ ID NO: 4959410 - DNA, 25 bp, Homo sapien
ttcagaatgagcttctagccgtgtt

SEQ ID NO: 4959411 - DNA, 25 bp, Homo sapien
gagcttctagccgtgttgttttcac

SEQ ID NO: 4959412 - DNA, 25 bp, Homo sapien
tctagccgtgttgttttcaccccag

SEQ ID NO: 4959413 - DNA, 25 bp, Homo sapien
gaatgagcttctagccgtgttgttt

SEQ ID NO: 4959414 - DNA, 25 bp, Homo sapien
cagcaaccatacagacaccaagaag

SEQ ID NO: 4959415 - DNA, 25 bp, Homo sapien
gaagccccgtccagtattcttcagc

SEQ ID NO: 4959416 - DNA, 25 bp, Homo sapien
tggaccatccttcctctccgaagcc

SEQ ID NO: 4959417 - DNA, 25 bp, Homo sapien
aacccctggggtgcgcctggaccat

SEQ ID NO: 4959418 - DNA, 25 bp, Homo sapien
cgaagccccgtccagtattcttcag

SEQ ID NO: 4959419 - DNA, 25 bp, Homo sapien
tatagcacaggcgttgctgtgtttc

SEQ ID NO: 4959420 - DNA, 25 bp, Homo sapien
ggaactgcgtatctgttctgcagtg

SEQ ID NO: 4959421 - DNA, 25 bp, Homo sapien
ttctctttggcgtgtttggaactgc

SEQ ID NO: 4959422 - DNA, 25 bp, Homo sapien
ttttccagtgtcctatagcacaggc

SEQ ID NO: 4959423 - DNA, 25 bp, Homo sapien
tttagggagctatacatgatcttac

SEQ ID NO: 4959424 - DNA, 25 bp, Homo sapien
tactaaatagattatatgcattacg

SEQ ID NO: 4959425 - DNA, 25 bp, Homo sapien
cagcctacgttacctttatgaaaga

SEQ ID NO: 4959426 - DNA, 25 bp, Homo sapien
caactattgttgtcagtttctacgc

SEQ ID NO: 4959427 - DNA, 25 bp, Homo sapien
ggcatattcttttctggcagtagca

SEQ ID NO: 4959428 - DNA, 25 bp, Homo sapien
tggaaactgccaatgtggaacccac

SEQ ID NO: 4959429 - DNA, 25 bp, Homo sapien
tggaacccacaaatacaacagtctg

SEQ ID NO: 4959430 - DNA, 25 bp, Homo sapien
ttctcagtagagatgcaaccatttc

SEQ ID NO: 4959431 - DNA, 25 bp, Homo sapien
ggctcttaaacttctatacccatgg

SEQ ID NO: 4959432 - DNA, 25 bp, Homo sapien
taacaaagctccaattccaggtggc

SEQ ID NO: 4959433 - DNA, 25 bp, Homo sapien
ttttgagaagggaatacccacacac

SEQ ID NO: 4959434 - DNA, 25 bp, Homo sapien
gagtcacaatgcaccttagtaccct

SEQ ID NO: 4959435 - DNA, 25 bp, Homo sapien
tgaagccaaaatagacctgccagtc

SEQ ID NO: 4959436 - DNA, 25 bp, Homo sapien
agaggatacactcctttcttcggag

SEQ ID NO: 4959437 - DNA, 25 bp, Homo sapien
tttggcaccattcttcaagctcgct

SEQ ID NO: 4959438 - DNA, 25 bp, Homo sapien
tcctatcattggaactagggctgat

SEQ ID NO: 4959439 - DNA, 25 bp, Homo sapien
tgaattccgcaacttatcattgaat

SEQ ID NO: 4959440 - DNA, 25 bp, Homo sapien
ttgatgatcaaaccgccttctgggt

SEQ ID NO: 4959441 - DNA, 25 bp, Homo sapien
ctattgatgatcaaaccgccttctg

SEQ ID NO: 4959442 - DNA, 25 bp, Homo sapien
agagatcctgaattccgcaacttat

SEQ ID NO: 4959443 - DNA, 25 bp, Homo sapien
ttcctgactgctaaactgggacatt

SEQ ID NO: 4959444 - DNA, 25 bp, Homo sapien
tggactgagtaaagcggatggccct

SEQ ID NO: 4959445 - DNA, 25 bp, Homo sapien
tgggccacaggatatctagacacct

SEQ ID NO: 4959446 - DNA, 25 bp, Homo sapien
ccccaatgtaggtgggtatcatcca

SEQ ID NO: 4959447 - DNA, 25 bp, Homo sapien
caacttactatatggctcatcaaac

SEQ ID NO: 4959448 - DNA, 25 bp, Homo sapien
tctaacttgcctagtccaacttact

SEQ ID NO: 4959449 - DNA, 25 bp, Homo sapien
aactggacccaaagagaattgtatc

SEQ ID NO: 4959450 - DNA, 25 bp, Homo sapien
ttgtatcagtagcaatttcccttct

SEQ ID NO: 4959451 - DNA, 25 bp, Homo sapien
ttgaaatgttaccatcaaagaagga

SEQ ID NO: 4959452 - DNA, 25 bp, Homo sapien
gaaatgttaccatcaaagaaggaaa

SEQ ID NO: 4959453 - DNA, 25 bp, Homo sapien
ttgtatctttcccttgggaatataa

SEQ ID NO: 4959454 - DNA, 25 bp, Homo sapien
tctttcccttgggaatataaattga

SEQ ID NO: 4959455 - DNA, 25 bp, Homo sapien
cagctgattttggaacatctactgt

SEQ ID NO: 4959456 - DNA, 25 bp, Homo sapien
tactgtgttatctttgaagtttgaa

SEQ ID NO: 4959457 - DNA, 25 bp, Homo sapien
gctgattttggaacatctactgtgt

SEQ ID NO: 4959458 - DNA, 25 bp, Homo sapien
tctactgtgttatctttgaagtttg

SEQ ID NO: 4959459 - DNA, 25 bp, Homo sapien
gccagaggcagtgtactttctacct

SEQ ID NO: 4959460 - DNA, 25 bp, Homo sapien
cattttgtactcaacactgagatga

SEQ ID NO: 4959461 - DNA, 25 bp, Homo sapien
agatgaatatttctaaagccagagg

SEQ ID NO: 4959462 - DNA, 25 bp, Homo sapien
ctccataagtttggcaaaggccctt

SEQ ID NO: 4959463 - DNA, 25 bp, Homo sapien
ggttaatgagctattccctgaattg

SEQ ID NO: 4959464 - DNA, 25 bp, Homo sapien
cataattaaaagttgcaggcagcag

SEQ ID NO: 4959465 - DNA, 25 bp, Homo sapien
gaccacattcaagcttcgatacaag

SEQ ID NO: 4959466 - DNA, 25 bp, Homo sapien
taagccaactatagaaagcagccaa

SEQ ID NO: 4959467 - DNA, 25 bp, Homo sapien
tttgggcacaggcttattggccaca

SEQ ID NO: 4959468 - DNA, 25 bp, Homo sapien
tcagttctgcatagattcacatcag

SEQ ID NO: 4959469 - DNA, 25 bp, Homo sapien
gttcaccaataacatgtcaagcatt

SEQ ID NO: 4959470 - DNA, 25 bp, Homo sapien
tgccaaccagtacagctcactgtgg

SEQ ID NO: 4959471 - DNA, 25 bp, Homo sapien
gaacacatagcctagtctaaggaca

SEQ ID NO: 4959472 - DNA, 25 bp, Homo sapien
tgacagcgaaactgacactgaggac

SEQ ID NO: 4959473 - DNA, 25 bp, Homo sapien
cagatatgctctctggcatggcagt

SEQ ID NO: 4959474 - DNA, 25 bp, Homo sapien
gaggttataattgagcagccatgag

SEQ ID NO: 4959475 - DNA, 25 bp, Homo sapien
tttgtttccggtttgatctgatggc

SEQ ID NO: 4959476 - DNA, 25 bp, Homo sapien
tttccggtttgatctgatggcaagg

SEQ ID NO: 4959477 - DNA, 25 bp, Homo sapien
gtttgatctgatggcaaggctttta

SEQ ID NO: 4959478 - DNA, 25 bp, Homo sapien
gatctgatggcaaggcttttaacta

SEQ ID NO: 4959479 - DNA, 25 bp, Homo sapien
ctatgcatacgccaagctcaagagg

SEQ ID NO: 4959480 - DNA, 25 bp, Homo sapien
tccagacagtataagatagacagcg

SEQ ID NO: 4959481 - DNA, 25 bp, Homo sapien
aatgtgagacgctcttgaaccagcc

SEQ ID NO: 4959482 - DNA, 25 bp, Homo sapien
taagcaagtcttcctgacacaagcc

SEQ ID NO: 4959483 - DNA, 25 bp, Homo sapien
ttctccacttgaattaagaacaagg

SEQ ID NO: 4959484 - DNA, 25 bp, Homo sapien
caaggatggctgttcactaatctca

SEQ ID NO: 4959485 - DNA, 25 bp, Homo sapien
tgatgttttaatactcactggcaaa

SEQ ID NO: 4959486 - DNA, 25 bp, Homo sapien
aagatgacaagaccccgtccctata

SEQ ID NO: 4959487 - DNA, 25 bp, Homo sapien
gctccagtagttatagaacacacca

SEQ ID NO: 4959488 - DNA, 25 bp, Homo sapien
cagtagttatagaacacaccactca

SEQ ID NO: 4959489 - DNA, 25 bp, Homo sapien
tccagtagttatagaacacaccact

SEQ ID NO: 4959490 - DNA, 25 bp, Homo sapien
tagttatagaacacaccactcacca

SEQ ID NO: 4959491 - DNA, 25 bp, Homo sapien
gagttctggtcccacaagacagatg

SEQ ID NO: 4959492 - DNA, 25 bp, Homo sapien
cctacacaaggttctgtccattggg

SEQ ID NO: 4959493 - DNA, 25 bp, Homo sapien
ttatctaagagctgtatctccccag

SEQ ID NO: 4959494 - DNA, 25 bp, Homo sapien
gctgggctatgaagacaaatatcct

SEQ ID NO: 4959495 - DNA, 25 bp, Homo sapien
gcaaactttcatcttccgcaagggc

SEQ ID NO: 4959496 - DNA, 25 bp, Homo sapien
ggctcagggatacgaacttgaaaga

SEQ ID NO: 4959497 - DNA, 25 bp, Homo sapien
tgtcaggaattgaagagcattctcc

SEQ ID NO: 4959498 - DNA, 25 bp, Homo sapien
tacaaactgctacacactgactccg

SEQ ID NO: 4959499 - DNA, 25 bp, Homo sapien
cctgcttcagacacgtaagtggcca

SEQ ID NO: 4959500 - DNA, 25 bp, Homo sapien
ttattgtcctgttggttgtccaaag

SEQ ID NO: 4959501 - DNA, 25 bp, Homo sapien
gagatccactggaagccgtggccgc

SEQ ID NO: 4959502 - DNA, 25 bp, Homo sapien
atggatgccagagtgtgtgtcagcc

SEQ ID NO: 4959503 - DNA, 25 bp, Homo sapien
accaatggatgccagagtgtgtgtc

SEQ ID NO: 4959504 - DNA, 25 bp, Homo sapien
aatggatgccagagtgtgtgtcagc

SEQ ID NO: 4959505 - DNA, 25 bp, Homo sapien
ctaaccaatggatgccagagtgtgt

SEQ ID NO: 4959506 - DNA, 25 bp, Homo sapien
taaagctatccatgtccaggtgcca

SEQ ID NO: 4959507 - DNA, 25 bp, Homo sapien
tggaccaccgttgtagaccagtgct

SEQ ID NO: 4959508 - DNA, 25 bp, Homo sapien
taggctgcgcatcagaatcaccggg

SEQ ID NO: 4959509 - DNA, 25 bp, Homo sapien
tgatgtctgttagtctgaggcccac

SEQ ID NO: 4959510 - DNA, 25 bp, Homo sapien
tagtcagtaaatcatgctgtcagca

SEQ ID NO: 4959511 - DNA, 25 bp, Homo sapien
cctttgtagttccattcctagagca

SEQ ID NO: 4959512 - DNA, 25 bp, Homo sapien
gcgatgcctcgtactctctagctaa

SEQ ID NO: 4959513 - DNA, 25 bp, Homo sapien
tgcattagctcctaccaagggtcag

SEQ ID NO: 4959514 - DNA, 25 bp, Homo sapien
agccagtcacccatgcttgaactct

SEQ ID NO: 4959515 - DNA, 25 bp, Homo sapien
ccccaactccagtgcagggtttctt

SEQ ID NO: 4959516 - DNA, 25 bp, Homo sapien
tgactcagccccatgtgtcctagag

SEQ ID NO: 4959517 - DNA, 25 bp, Homo sapien
agtgcagggtttcttgctccagcca

SEQ ID NO: 4959518 - DNA, 25 bp, Homo sapien
gagaagcactcagacacaaaggaac

SEQ ID NO: 4959519 - DNA, 25 bp, Homo sapien
tgtggtcatctgctgataagccggc

SEQ ID NO: 4959520 - DNA, 25 bp, Homo sapien
gaaacgtgtataattgtaagtctct

SEQ ID NO: 4959521 - DNA, 25 bp, Homo sapien
caaaggaacccattgaaacgtgtat

SEQ ID NO: 4959522 - DNA, 25 bp, Homo sapien
taccacttggtccagttcagcatag

SEQ ID NO: 4959523 - DNA, 25 bp, Homo sapien
aaatcactgtccaataccgccactg

SEQ ID NO: 4959524 - DNA, 25 bp, Homo sapien
gctgagcccaagactggaaggcatt

SEQ ID NO: 4959525 - DNA, 25 bp, Homo sapien
taaaagagcaattcagccgagaaca

SEQ ID NO: 4959526 - DNA, 25 bp, Homo sapien
ccacgtggctttgggtaagatatcc

SEQ ID NO: 4959527 - DNA, 25 bp, Homo sapien
cacagtgaatgaatccggcctagga

SEQ ID NO: 4959528 - DNA, 25 bp, Homo sapien
ttaattctaacacttgggccctcag

SEQ ID NO: 4959529 - DNA, 25 bp, Homo sapien
aatgtccacttccttgcctcggcag

SEQ ID NO: 4959530 - DNA, 25 bp, Homo sapien
atttcttaggatcattaaacctgcc

SEQ ID NO: 4959531 - DNA, 25 bp, Homo sapien
gagtcctgccaagcttgtctgtcca

SEQ ID NO: 4959532 - DNA, 25 bp, Homo sapien
tgaggccccttcaagtagtaaaatg

SEQ ID NO: 4959533 - DNA, 25 bp, Homo sapien
ccttttaaccttgaatagagacata

SEQ ID NO: 4959534 - DNA, 25 bp, Homo sapien
aattgtacagtaggagtgcccagac

SEQ ID NO: 4959535 - DNA, 25 bp, Homo sapien
gaacgtggtcctttaccactagaca

SEQ ID NO: 4959536 - DNA, 25 bp, Homo sapien
taggatgaccaccaatcaggaattg

SEQ ID NO: 4959537 - DNA, 25 bp, Homo sapien
gcgtctccaaggtgcttgtcactca

SEQ ID NO: 4959538 - DNA, 25 bp, Homo sapien
gcacaagccgcacatttaataaacc

SEQ ID NO: 4959539 - DNA, 25 bp, Homo sapien
gtgcacaagccgcacatttaataaa

SEQ ID NO: 4959540 - DNA, 25 bp, Homo sapien
ctgttctaagtgcacaagccgcaca

SEQ ID NO: 4959541 - DNA, 25 bp, Homo sapien
tctaagtgcacaagccgcacattta

SEQ ID NO: 4959542 - DNA, 25 bp, Homo sapien
tcagagaacgtaagtggcttgccca

SEQ ID NO: 4959543 - DNA, 25 bp, Homo sapien
catagctacaatgtcacaaggagcc

SEQ ID NO: 4959544 - DNA, 25 bp, Homo sapien
gcagtcctcagagacgaaggtgaaa

SEQ ID NO: 4959545 - DNA, 25 bp, Homo sapien
tctagatgtggactaaccaggcaac

SEQ ID NO: 4959546 - DNA, 25 bp, Homo sapien
gataacctgaggatgacgagcatga

SEQ ID NO: 4959547 - DNA, 25 bp, Homo sapien
tccataaatagtcgcggaatcccca

SEQ ID NO: 4959548 - DNA, 25 bp, Homo sapien
cgagcatgaagaaatgaaacgctgg

SEQ ID NO: 4959549 - DNA, 25 bp, Homo sapien
cggagcctagaccaagatatcagct

SEQ ID NO: 4959550 - DNA, 25 bp, Homo sapien
ccagcatgaaatgaatgagaatggg

SEQ ID NO: 4959551 - DNA, 25 bp, Homo sapien
tattccacactcagatttcccagaa

SEQ ID NO: 4959552 - DNA, 25 bp, Homo sapien
gatttcccagaaaagaaatcctaca

SEQ ID NO: 4959553 - DNA, 25 bp, Homo sapien
aaatgaatgagaatgggacgagtac

SEQ ID NO: 4959554 - DNA, 25 bp, Homo sapien
tggtgacgccactagaatagcccat

SEQ ID NO: 4959555 - DNA, 25 bp, Homo sapien
gtgcctttcgtgtagatggagtcgc

SEQ ID NO: 4959556 - DNA, 25 bp, Homo sapien
catcattcagcccattggtgacgcc

SEQ ID NO: 4959557 - DNA, 25 bp, Homo sapien
gatggagtcgctggcatcattcagc

SEQ ID NO: 4959558 - DNA, 25 bp, Homo sapien
tttcaaactgggagctgtacacgtc

SEQ ID NO: 4959559 - DNA, 25 bp, Homo sapien
tgtacacgtcggtggagtcctccgt

SEQ ID NO: 4959560 - DNA, 25 bp, Homo sapien
gtcctccgtatatccaggcccaagg

SEQ ID NO: 4959561 - DNA, 25 bp, Homo sapien
gctaaaatagctatcaggctctgag

SEQ ID NO: 4959562 - DNA, 25 bp, Homo sapien
tacacaaaccagctgatgagatgag

SEQ ID NO: 4959563 - DNA, 25 bp, Homo sapien
caaaatctataggatgctgggtctc

SEQ ID NO: 4959564 - DNA, 25 bp, Homo sapien
cgtggcactttggaagactctttgc

SEQ ID NO: 4959565 - DNA, 25 bp, Homo sapien
tccactctcatcaagacgcacaggg

SEQ ID NO: 4959566 - DNA, 25 bp, Homo sapien
ccatggagctgcttcgatcacatcc

SEQ ID NO: 4959567 - DNA, 25 bp, Homo sapien
atggagctgcttcgatcacatcccc

SEQ ID NO: 4959568 - DNA, 25 bp, Homo sapien
tccttgaaattccacatgtttgacc

SEQ ID NO: 4959569 - DNA, 25 bp, Homo sapien
tttgacccggcctgggcgtcccatg

SEQ ID NO: 4959570 - DNA, 25 bp, Homo sapien
gactctctgtgttttacgactggca

SEQ ID NO: 4959571 - DNA, 25 bp, Homo sapien
ctccagttaacagcgcggtgagatc

SEQ ID NO: 4959572 - DNA, 25 bp, Homo sapien
tcctccgttgttacttcagctgaaa

SEQ ID NO: 4959573 - DNA, 25 bp, Homo sapien
gaaaccaacactgcctgcagagtgg

SEQ ID NO: 4959574 - DNA, 25 bp, Homo sapien
gaaatcaaagagtcaatgggctgta

SEQ ID NO: 4959575 - DNA, 25 bp, Homo sapien
taacactgtcgagcccagagtggca

SEQ ID NO: 4959576 - DNA, 25 bp, Homo sapien
ctttgtagcctgtaatgttccggaa

SEQ ID NO: 4959577 - DNA, 25 bp, Homo sapien
gcagagcctcaccatcaaattccag

SEQ ID NO: 4959578 - DNA, 25 bp, Homo sapien
cccatattctggaaattcatttgtg

SEQ ID NO: 4959579 - DNA, 25 bp, Homo sapien
tagacacttgggagcccgctttgct

SEQ ID NO: 4959580 - DNA, 25 bp, Homo sapien
gcataatgttactcacgccttaaag

SEQ ID NO: 4959581 - DNA, 25 bp, Homo sapien
gaagctgtatttataaactgcacca

SEQ ID NO: 4959582 - DNA, 25 bp, Homo sapien
gaaaattgaccatagtgactgctga

SEQ ID NO: 4959583 - DNA, 25 bp, Homo sapien
ttttagaactctaagtcaggactaa

SEQ ID NO: 4959584 - DNA, 25 bp, Homo sapien
tctgagaggcgaaaggacctgacca

SEQ ID NO: 4959585 - DNA, 25 bp, Homo sapien
cctgcgtgacagattgcttgcttta

SEQ ID NO: 4959586 - DNA, 25 bp, Homo sapien
tactggagtagtttctcgtggtctg

SEQ ID NO: 4959587 - DNA, 25 bp, Homo sapien
taagctgctcccttgtaaaataggg

SEQ ID NO: 4959588 - DNA, 25 bp, Homo sapien
tacggcgtgaactaacgcatttagc

SEQ ID NO: 4959589 - DNA, 25 bp, Homo sapien
cctcctccggtgcttaagtgatcct

SEQ ID NO: 4959590 - DNA, 25 bp, Homo sapien
cttgactgtgttgttaatcctgacc

SEQ ID NO: 4959591 - DNA, 25 bp, Homo sapien
aggaaaaagagtgaccactctgatc

SEQ ID NO: 4959592 - DNA, 25 bp, Homo sapien
tgtcagaaaggaattcagttccaaa

SEQ ID NO: 4959593 - DNA, 25 bp, Homo sapien
tctgatcccttagtgtgaaatttca

SEQ ID NO: 4959594 - DNA, 25 bp, Homo sapien
attcagttccaaagacgagggcagg

SEQ ID NO: 4959595 - DNA, 25 bp, Homo sapien
ctcctctatgtctggattcagcaga

SEQ ID NO: 4959596 - DNA, 25 bp, Homo sapien
gaggtgctgggcataggcattcaga

SEQ ID NO: 4959597 - DNA, 25 bp, Homo sapien
aattaaagaatggttggcgcgggca

SEQ ID NO: 4959598 - DNA, 25 bp, Homo sapien
gcgggcatccccgaataaatgcaaa

SEQ ID NO: 4959599 - DNA, 25 bp, Homo sapien
tgagatgacgggagttagctttaat

SEQ ID NO: 4959600 - DNA, 25 bp, Homo sapien
aactacttccaaggagataattgag

SEQ ID NO: 4959601 - DNA, 25 bp, Homo sapien
cagccaccgtagggcgtttttatat

SEQ ID NO: 4959602 - DNA, 25 bp, Homo sapien
aaggcttggagaggattgtaccatc

SEQ ID NO: 4959603 - DNA, 25 bp, Homo sapien
ctgggtgacatcagaggtggggctg

SEQ ID NO: 4959604 - DNA, 25 bp, Homo sapien
gggctgtcatcttagtattatgcag

SEQ ID NO: 4959605 - DNA, 25 bp, Homo sapien
ctgtcatcttagtattatgcagcat

SEQ ID NO: 4959606 - DNA, 25 bp, Homo sapien
gtggggctgtcatcttagtattatg

SEQ ID NO: 4959607 - DNA, 25 bp, Homo sapien
gtacatctaaatgttcaagcttaat

SEQ ID NO: 4959608 - DNA, 25 bp, Homo sapien
caggtacatctaaatgttcaagctt

SEQ ID NO: 4959609 - DNA, 25 bp, Homo sapien
aggtacatctaaatgttcaagctta

SEQ ID NO: 4959610 - DNA, 25 bp, Homo sapien
ggtacatctaaatgttcaagcttaa

SEQ ID NO: 4959611 - DNA, 25 bp, Homo sapien
agctgcggttctgccacggctgcca

SEQ ID NO: 4959612 - DNA, 25 bp, Homo sapien
aggcaacatgctctcccagctgcgg

SEQ ID NO: 4959613 - DNA, 25 bp, Homo sapien
gcaacatgctctcccagctgcggtt

SEQ ID NO: 4959614 - DNA, 25 bp, Homo sapien
acatgctctcccagctgcggttctg

SEQ ID NO: 4959615 - DNA, 25 bp, Homo sapien
ttcaaatcagaagtggtagtatcat

SEQ ID NO: 4959616 - DNA, 25 bp, Homo sapien
cttcaaatcagaagtggtagtatca

SEQ ID NO: 4959617 - DNA, 25 bp, Homo sapien
tcaaatcagaagtggtagtatcata

SEQ ID NO: 4959618 - DNA, 25 bp, Homo sapien
aaatcagaagtggtagtatcatatc

SEQ ID NO: 4959619 - DNA, 25 bp, Homo sapien
acaccagctgctctgaccaagccat

SEQ ID NO: 4959620 - DNA, 25 bp, Homo sapien
tgaagtcttctagttcattgctccc

SEQ ID NO: 4959621 - DNA, 25 bp, Homo sapien
tctagttcattgctccctcttgaca

SEQ ID NO: 4959622 - DNA, 25 bp, Homo sapien
tcttctagttcattgctccctcttg

SEQ ID NO: 4959623 - DNA, 25 bp, Homo sapien
agcaataactcgtaggtttcctggg

SEQ ID NO: 4959624 - DNA, 25 bp, Homo sapien
taaagcagacgctcaacattcaccc

SEQ ID NO: 4959625 - DNA, 25 bp, Homo sapien
gcaaagatctgaataggcatgagta

SEQ ID NO: 4959626 - DNA, 25 bp, Homo sapien
tggtgaggcgtctacctaaagcaga

SEQ ID NO: 4959627 - DNA, 25 bp, Homo sapien
gactaaatcattggccaacttaacc

SEQ ID NO: 4959628 - DNA, 25 bp, Homo sapien
actgctgctgtgtagccactgaccc

SEQ ID NO: 4959629 - DNA, 25 bp, Homo sapien
gctgccatgctacttagtttccctg

SEQ ID NO: 4959630 - DNA, 25 bp, Homo sapien
gaacacacgtaggagaaagtccgaa

SEQ ID NO: 4959631 - DNA, 25 bp, Homo sapien
aggagccaccaacaagtcttttgtt

SEQ ID NO: 4959632 - DNA, 25 bp, Homo sapien
ctgcacttgtgccagtccatacacc

SEQ ID NO: 4959633 - DNA, 25 bp, Homo sapien
cccacctcgtagaaacccattccag

SEQ ID NO: 4959634 - DNA, 25 bp, Homo sapien
ttgtgccagtccatacaccccacct

SEQ ID NO: 4959635 - DNA, 25 bp, Homo sapien
tccagccctcttctatatgaaggga

SEQ ID NO: 4959636 - DNA, 25 bp, Homo sapien
catgacttgaaattaccaagaatag

SEQ ID NO: 4959637 - DNA, 25 bp, Homo sapien
gttttgatgaataattagggaaagc

SEQ ID NO: 4959638 - DNA, 25 bp, Homo sapien
tacatgaaatatttgcggattctac

SEQ ID NO: 4959639 - DNA, 25 bp, Homo sapien
tgcggattctacatcttgggaagat

SEQ ID NO: 4959640 - DNA, 25 bp, Homo sapien
gagagggatatgaggaaatacttac

SEQ ID NO: 4959641 - DNA, 25 bp, Homo sapien
ggagagggatatgaggaaatactta

SEQ ID NO: 4959642 - DNA, 25 bp, Homo sapien
ctgggagagggatatgaggaaatac

SEQ ID NO: 4959643 - DNA, 25 bp, Homo sapien
tgggagagggatatgaggaaatact

SEQ ID NO: 4959644 - DNA, 25 bp, Homo sapien
tggccttggcaacactctgggaatg

SEQ ID NO: 4959645 - DNA, 25 bp, Homo sapien
gaatgtgcagatgcattgttcaccc

SEQ ID NO: 4959646 - DNA, 25 bp, Homo sapien
aaaattcatatttggccttggcaac

SEQ ID NO: 4959647 - DNA, 25 bp, Homo sapien
ttgttcacccaaacaaatgtctctg

SEQ ID NO: 4959648 - DNA, 25 bp, Homo sapien
cagatatcaccggtactggtttcta

SEQ ID NO: 4959649 - DNA, 25 bp, Homo sapien
gatacagatatcaccggtactggtt

SEQ ID NO: 4959650 - DNA, 25 bp, Homo sapien
tatcaccggtactggtttctaccca

SEQ ID NO: 4959651 - DNA, 25 bp, Homo sapien
caggatacagatatcaccggtactg

SEQ ID NO: 4959652 - DNA, 25 bp, Homo sapien
tgggactccgcattcctaaaagttc

SEQ ID NO: 4959653 - DNA, 25 bp, Homo sapien
ggcttgaaggcgctaaagcttccga

SEQ ID NO: 4959654 - DNA, 25 bp, Homo sapien
tggtgaccatgatccacagaccagc

SEQ ID NO: 4959655 - DNA, 25 bp, Homo sapien
tgtgaaccactgctctcgaccaatg

SEQ ID NO: 4959656 - DNA, 25 bp, Homo sapien
aaaaggaggtgaatctttcactcta

SEQ ID NO: 4959657 - DNA, 25 bp, Homo sapien
gaatgtgggtttgaagacatgcaaa

SEQ ID NO: 4959658 - DNA, 25 bp, Homo sapien
gatgtataatactctaatccagtgg

SEQ ID NO: 4959659 - DNA, 25 bp, Homo sapien
tttcactctagccaaaaacagcgat

SEQ ID NO: 4959660 - DNA, 25 bp, Homo sapien
gtgagcacaagaccaataactgaat

SEQ ID NO: 4959661 - DNA, 25 bp, Homo sapien
ttcatggccttgttaaaagcccctg

SEQ ID NO: 4959662 - DNA, 25 bp, Homo sapien
agtcatcatgcagccccgctgccag

SEQ ID NO: 4959663 - DNA, 25 bp, Homo sapien
tgtgtgagcacaagaccaataactg

SEQ ID NO: 4959664 - DNA, 25 bp, Homo sapien
ggtcagggagcggcggccatatggg

SEQ ID NO: 4959665 - DNA, 25 bp, Homo sapien
cagtggcacgagctggcttccatcg

SEQ ID NO: 4959666 - DNA, 25 bp, Homo sapien
agagcagagccgcagtggcacgagc

SEQ ID NO: 4959667 - DNA, 25 bp, Homo sapien
cgagctggcttccatcgacacacat

SEQ ID NO: 4959668 - DNA, 25 bp, Homo sapien
tctgtccatcaatatacaaatggct

SEQ ID NO: 4959669 - DNA, 25 bp, Homo sapien
acaatctgtccatcaatatacaaat

SEQ ID NO: 4959670 - DNA, 25 bp, Homo sapien
atctgtccatcaatatacaaatggc

SEQ ID NO: 4959671 - DNA, 25 bp, Homo sapien
aatctgtccatcaatatacaaatgg

SEQ ID NO: 4959672 - DNA, 25 bp, Homo sapien
cttactggaatctactttaataaca

SEQ ID NO: 4959673 - DNA, 25 bp, Homo sapien
ttactggaatctactttaataacag

SEQ ID NO: 4959674 - DNA, 25 bp, Homo sapien
tgtaaagtgcgaagcagtcacatca

SEQ ID NO: 4959675 - DNA, 25 bp, Homo sapien
ctgtaaagtgcgaagcagtcacatc

SEQ ID NO: 4959676 - DNA, 25 bp, Homo sapien
tctcttaaaaatccctctcccacaa

SEQ ID NO: 4959677 - DNA, 25 bp, Homo sapien
aaatccctctcccacaaatattcgt

SEQ ID NO: 4959678 - DNA, 25 bp, Homo sapien
cctctcccacaaatattcgttgaca

SEQ ID NO: 4959679 - DNA, 25 bp, Homo sapien
cacaaatattcgttgacaaagtgtc

SEQ ID NO: 4959680 - DNA, 25 bp, Homo sapien
ctggctgatgcccattcatacctgc

SEQ ID NO: 4959681 - DNA, 25 bp, Homo sapien
ggctgatgcccattcatacctgctg

SEQ ID NO: 4959682 - DNA, 25 bp, Homo sapien
tggctgatgcccattcatacctgct

SEQ ID NO: 4959683 - DNA, 25 bp, Homo sapien
tgggccaaagcaccacatatagtcg

SEQ ID NO: 4959684 - DNA, 25 bp, Homo sapien
acttagctatgtaacagcctatggg

SEQ ID NO: 4959685 - DNA, 25 bp, Homo sapien
catatagtcgtccatcggtaaagtg

SEQ ID NO: 4959686 - DNA, 25 bp, Homo sapien
tgccgtatattcttaatagggttcc

SEQ ID NO: 4959687 - DNA, 25 bp, Homo sapien
aagctgaccgggcaaagaaagatcg

SEQ ID NO: 4959688 - DNA, 25 bp, Homo sapien
ctaaatacaagctgaccgggcaaag

SEQ ID NO: 4959689 - DNA, 25 bp, Homo sapien
tgaccgggcaaagaaagatcggcat

SEQ ID NO: 4959690 - DNA, 25 bp, Homo sapien
gcaaagaaagatcggcatacgaggt

SEQ ID NO: 4959691 - DNA, 25 bp, Homo sapien
gaggttttcaaagccgaggtatgaa

SEQ ID NO: 4959692 - DNA, 25 bp, Homo sapien
tcaaagccgaggtatgaactaaaac

SEQ ID NO: 4959693 - DNA, 25 bp, Homo sapien
ctgaggttttcaaagccgaggtatg

SEQ ID NO: 4959694 - DNA, 25 bp, Homo sapien
ttcaaagccgaggtatgaactaaaa

SEQ ID NO: 4959695 - DNA, 25 bp, Homo sapien
tcagggcgcgagtgccggcggccag

SEQ ID NO: 4959696 - DNA, 25 bp, Homo sapien
gccagcgccgcgtgctctttgttga

SEQ ID NO: 4959697 - DNA, 25 bp, Homo sapien
gcctcagggcgcgagtgccggcggc

SEQ ID NO: 4959698 - DNA, 25 bp, Homo sapien
agctcccgggactgccgagaggcgg

SEQ ID NO: 4959699 - DNA, 25 bp, Homo sapien
gaaaagtgagaggtgctttccctgg

SEQ ID NO: 4959700 - DNA, 25 bp, Homo sapien
ccctgagaaaagtgagaggtgcttt

SEQ ID NO: 4959701 - DNA, 25 bp, Homo sapien
tcaggaagggccgtgtgactggagc

SEQ ID NO: 4959702 - DNA, 25 bp, Homo sapien
tggagccgcgagttgggcgccgtct

SEQ ID NO: 4959703 - DNA, 25 bp, Homo sapien
ccgatccgcggccggagcgtttagt

SEQ ID NO: 4959704 - DNA, 25 bp, Homo sapien
caccgatccgcggccggagcgttta

SEQ ID NO: 4959705 - DNA, 25 bp, Homo sapien
gtcccggcctctctgaccgggctcc

SEQ ID NO: 4959706 - DNA, 25 bp, Homo sapien
gatccgcggccggagcgtttagtcc

SEQ ID NO: 4959707 - DNA, 25 bp, Homo sapien
gcggggagaggtcacttaaaactgc

SEQ ID NO: 4959708 - DNA, 25 bp, Homo sapien
ggccatttccccctgaggcgagtcc

SEQ ID NO: 4959709 - DNA, 25 bp, Homo sapien
caccgacagtgcgtgcgcggggaga

SEQ ID NO: 4959710 - DNA, 25 bp, Homo sapien
ctggcctcgggactgcccccaccga

SEQ ID NO: 4959711 - DNA, 25 bp, Homo sapien
cagcatgagggagtgtatgccttta

SEQ ID NO: 4959712 - DNA, 25 bp, Homo sapien
caacttcagaaaaacgtccgcagct

SEQ ID NO: 4959713 - DNA, 25 bp, Homo sapien
cttcagaaaaacgtccgcagctcat

SEQ ID NO: 4959714 - DNA, 25 bp, Homo sapien
ccagcatgagggagtgtatgccttt

SEQ ID NO: 4959715 - DNA, 25 bp, Homo sapien
tacccaagtctatcctcatgagagt

SEQ ID NO: 4959716 - DNA, 25 bp, Homo sapien
cacttggaatttgtttgggcattaa

SEQ ID NO: 4959717 - DNA, 25 bp, Homo sapien
gcattaaagatagaggtgttgatcc

SEQ ID NO: 4959718 - DNA, 25 bp, Homo sapien
catcaaaaatttgactacccaagtc

SEQ ID NO: 4959719 - DNA, 25 bp, Homo sapien
ctgaggaatgattgaaaatggcaat

SEQ ID NO: 4959720 - DNA, 25 bp, Homo sapien
gatcgcttaagcctgaggaatgatt

SEQ ID NO: 4959721 - DNA, 25 bp, Homo sapien
ctattgccaggtaacgtatttgtgg

SEQ ID NO: 4959722 - DNA, 25 bp, Homo sapien
aaagggatattttgatcgcttaagc

SEQ ID NO: 4959723 - DNA, 25 bp, Homo sapien
aacttgtcggcattcctggctcgcc

SEQ ID NO: 4959724 - DNA, 25 bp, Homo sapien
aacaaggagtatgttcacatccaaa

SEQ ID NO: 4959725 - DNA, 25 bp, Homo sapien
tccaatgaccaacttgtcggcattc

SEQ ID NO: 4959726 - DNA, 25 bp, Homo sapien
tggctcgcccaaacctagaaacaag

SEQ ID NO: 4959727 - DNA, 25 bp, Homo sapien
gcacccagcctataaacctttatct

SEQ ID NO: 4959728 - DNA, 25 bp, Homo sapien
ggtttcagaccaattcactgcatgt

SEQ ID NO: 4959729 - DNA, 25 bp, Homo sapien
accatgcctgaccattaattacgaa

SEQ ID NO: 4959730 - DNA, 25 bp, Homo sapien
gatagtctcttactcagttggccag

SEQ ID NO: 4959731 - DNA, 25 bp, Homo sapien
catgagaaaatagacctccattgca

SEQ ID NO: 4959732 - DNA, 25 bp, Homo sapien
agtttgtcagcaaaaccagagcttc

SEQ ID NO: 4959733 - DNA, 25 bp, Homo sapien
cctagtctgctagacagggtctgca

SEQ ID NO: 4959734 - DNA, 25 bp, Homo sapien
gaaagatttcctggagacaatgaga

SEQ ID NO: 4959735 - DNA, 25 bp, Homo sapien
ggagaacaagctttgcttttgccct

SEQ ID NO: 4959736 - DNA, 25 bp, Homo sapien
cccaatgcccattctggagaacaag

SEQ ID NO: 4959737 - DNA, 25 bp, Homo sapien
tcaggtgttcatggatgacagtagg

SEQ ID NO: 4959738 - DNA, 25 bp, Homo sapien
ccaaggctgtgctccggttctggaa

SEQ ID NO: 4959739 - DNA, 25 bp, Homo sapien
gcagcccttgctggtgtgcacagct

SEQ ID NO: 4959740 - DNA, 25 bp, Homo sapien
cttgctggtgtgcacagctggacag

SEQ ID NO: 4959741 - DNA, 25 bp, Homo sapien
ggcagagtggcaggcggggctgggc

SEQ ID NO: 4959742 - DNA, 25 bp, Homo sapien
gctgggcagcccttgctggtgtgca

SEQ ID NO: 4959743 - DNA, 25 bp, Homo sapien
tgtagagccatgcccttgtcgcctg

SEQ ID NO: 4959744 - DNA, 25 bp, Homo sapien
gtagagccatgcccttgtcgcctgc

SEQ ID NO: 4959745 - DNA, 25 bp, Homo sapien
ctgtagagccatgcccttgtcgcct

SEQ ID NO: 4959746 - DNA, 25 bp, Homo sapien
aggtctcggcgcctctcctcagcac

SEQ ID NO: 4959747 - DNA, 25 bp, Homo sapien
gcatccctgcatcgggggtccatgc

SEQ ID NO: 4959748 - DNA, 25 bp, Homo sapien
ctcctggggagtatttggcaggtct

SEQ ID NO: 4959749 - DNA, 25 bp, Homo sapien
ctgggtggcagaagtgactggccag

SEQ ID NO: 4959750 - DNA, 25 bp, Homo sapien
gacttgggaaactgtgtccctcctc

SEQ ID NO: 4959751 - DNA, 25 bp, Homo sapien
gagcagagcaagtgaaagcagctga

SEQ ID NO: 4959752 - DNA, 25 bp, Homo sapien
tgcttacgtccggatcctgggattt

SEQ ID NO: 4959753 - DNA, 25 bp, Homo sapien
gctgattcctccgtctcagggcctg

SEQ ID NO: 4959754 - DNA, 25 bp, Homo sapien
gacaaccttaagaagtaggcagcat

SEQ ID NO: 4959755 - DNA, 25 bp, Homo sapien
gagcaacctttgctcatcagggagc

SEQ ID NO: 4959756 - DNA, 25 bp, Homo sapien
tagaatcctaacaatggtgacaagg

SEQ ID NO: 4959757 - DNA, 25 bp, Homo sapien
gacatcattagggagaacagtggtt

SEQ ID NO: 4959758 - DNA, 25 bp, Homo sapien
catatggtggagtccaccactgtct

SEQ ID NO: 4959759 - DNA, 25 bp, Homo sapien
ctgtctgtccttggcatttatttgc

SEQ ID NO: 4959760 - DNA, 25 bp, Homo sapien
agtcactgtgcccaatttggttgtg

SEQ ID NO: 4959761 - DNA, 25 bp, Homo sapien
gtgcccaatttggttgtgacctggt

SEQ ID NO: 4959762 - DNA, 25 bp, Homo sapien
gcaatggtaagaactagcactgacc

SEQ ID NO: 4959763 - DNA, 25 bp, Homo sapien
caaggtacagctggaatgggacaca

SEQ ID NO: 4959764 - DNA, 25 bp, Homo sapien
gagtcagagctttagttttttccac

SEQ ID NO: 4959765 - DNA, 25 bp, Homo sapien
gagtctggcggaactgaaacctgaa

SEQ ID NO: 4959766 - DNA, 25 bp, Homo sapien
acagacaagagtactgagccacggg

SEQ ID NO: 4959767 - DNA, 25 bp, Homo sapien
gcagactgcttttgaagtaaatgga

SEQ ID NO: 4959768 - DNA, 25 bp, Homo sapien
tgttctgtgtcaagcccagacggcc

SEQ ID NO: 4959769 - DNA, 25 bp, Homo sapien
gggagtttgaatgccctgttctgtg

SEQ ID NO: 4959770 - DNA, 25 bp, Homo sapien
gggccatcagtgagctcactacaag

SEQ ID NO: 4959771 - DNA, 25 bp, Homo sapien
aacgccactgtggtttcgccagctt

SEQ ID NO: 4959772 - DNA, 25 bp, Homo sapien
tacaagtctgtgctcgtaaacgcca

SEQ ID NO: 4959773 - DNA, 25 bp, Homo sapien
ttttcctgatttcccatgcgcctgc

SEQ ID NO: 4959774 - DNA, 25 bp, Homo sapien
cagtccctgagatgttggtcctcct

SEQ ID NO: 4959775 - DNA, 25 bp, Homo sapien
agctgtgggccagccttctgctcca

SEQ ID NO: 4959776 - DNA, 25 bp, Homo sapien
tccaacacatctacatctacagact

SEQ ID NO: 4959777 - DNA, 25 bp, Homo sapien
ctgtagaaagggtgacatccaagct

SEQ ID NO: 4959778 - DNA, 25 bp, Homo sapien
gtgctggggatgccaactgagggtg

SEQ ID NO: 4959779 - DNA, 25 bp, Homo sapien
tttctctgagtttctactgtgctgg

SEQ ID NO: 4959780 - DNA, 25 bp, Homo sapien
ttctctgagtttctactgtgctggg

SEQ ID NO: 4959781 - DNA, 25 bp, Homo sapien
gggatgccaactgagggtgggtgac

SEQ ID NO: 4959782 - DNA, 25 bp, Homo sapien
gagttgcaagggcatttcagcaggt

SEQ ID NO: 4959783 - DNA, 25 bp, Homo sapien
cactttcacccctgttatctcttca

SEQ ID NO: 4959784 - DNA, 25 bp, Homo sapien
aagggcatttcagcaggtagcggac

SEQ ID NO: 4959785 - DNA, 25 bp, Homo sapien
agcaggtagcggacccactttcacc

SEQ ID NO: 4959786 - DNA, 25 bp, Homo sapien
cagagaatgaggctttggtgaagga

SEQ ID NO: 4959787 - DNA, 25 bp, Homo sapien
catccaggaggccatagaagcccat

SEQ ID NO: 4959788 - DNA, 25 bp, Homo sapien
agcttggaatgttcagacgccaggg

SEQ ID NO: 4959789 - DNA, 25 bp, Homo sapien
taaatagggtgtgggtagaagctgt

SEQ ID NO: 4959790 - DNA, 25 bp, Homo sapien
gcagatgagatctcaggacactcag

SEQ ID NO: 4959791 - DNA, 25 bp, Homo sapien
gagtaaattctgagtacagcagatg

SEQ ID NO: 4959792 - DNA, 25 bp, Homo sapien
tgaccttgaattagacttgccgctg

SEQ ID NO: 4959793 - DNA, 25 bp, Homo sapien
gatccatcagttgcatgaccttgaa

SEQ ID NO: 4959794 - DNA, 25 bp, Homo sapien
tgaggcatcatgtcccccacatcag

SEQ ID NO: 4959795 - DNA, 25 bp, Homo sapien
gaggcatcatgtcccccacatcaga

SEQ ID NO: 4959796 - DNA, 25 bp, Homo sapien
aggcatcatgtcccccacatcagag

SEQ ID NO: 4959797 - DNA, 25 bp, Homo sapien
gcttgagctccttattgcaacggcc

SEQ ID NO: 4959798 - DNA, 25 bp, Homo sapien
tgacgcttgagctccttattgcaac

SEQ ID NO: 4959799 - DNA, 25 bp, Homo sapien
tccttattgcaacggcctttgctct

SEQ ID NO: 4959800 - DNA, 25 bp, Homo sapien
tgctgctggcctgacgcttgagctc

SEQ ID NO: 4959801 - DNA, 25 bp, Homo sapien
agggcacactgttgggggcaccaca

SEQ ID NO: 4959802 - DNA, 25 bp, Homo sapien
ggcctcctgtttggcgctgctgtct

SEQ ID NO: 4959803 - DNA, 25 bp, Homo sapien
gggcaccacatagaggtagcggcct

SEQ ID NO: 4959804 - DNA, 25 bp, Homo sapien
cgtcaaatccacctcgtacagggca

SEQ ID NO: 4959805 - DNA, 25 bp, Homo sapien
caagccgtaatgtacttcccaaatc

SEQ ID NO: 4959806 - DNA, 25 bp, Homo sapien
gccagtctgtttgggacaccctcat

SEQ ID NO: 4959807 - DNA, 25 bp, Homo sapien
tacacaagccgtaatgtacttccca

SEQ ID NO: 4959808 - DNA, 25 bp, Homo sapien
tttctacatgccagtctgtttggga

SEQ ID NO: 4959809 - DNA, 25 bp, Homo sapien
tatgggaccatctgagtcatgactt

SEQ ID NO: 4959810 - DNA, 25 bp, Homo sapien
agatgaggttccctcatgctcaggg

SEQ ID NO: 4959811 - DNA, 25 bp, Homo sapien
tgaggttccctcatgctcagggtcc

SEQ ID NO: 4959812 - DNA, 25 bp, Homo sapien
cctatgggaccatctgagtcatgac

SEQ ID NO: 4959813 - DNA, 25 bp, Homo sapien
ggagcagcttcaagaaaggttcatc

SEQ ID NO: 4959814 - DNA, 25 bp, Homo sapien
gcttcaagaaaggttcatcagacat

SEQ ID NO: 4959815 - DNA, 25 bp, Homo sapien
actgcttccctgtctcaatcggggt

SEQ ID NO: 4959816 - DNA, 25 bp, Homo sapien
ccagcagtagatctgggagcagctt

SEQ ID NO: 4959817 - DNA, 25 bp, Homo sapien
agatcaattataatgtctggaagcc

SEQ ID NO: 4959818 - DNA, 25 bp, Homo sapien
ctggaagccagccagtttgcctttc

SEQ ID NO: 4959819 - DNA, 25 bp, Homo sapien
gaagccagccagtttgcctttcctc

SEQ ID NO: 4959820 - DNA, 25 bp, Homo sapien
agcataagatcaattataatgtctg

SEQ ID NO: 4959821 - DNA, 25 bp, Homo sapien
aatccaatcaccgtttccacagctg

SEQ ID NO: 4959822 - DNA, 25 bp, Homo sapien
catgctctgaaagactccattgtcg

SEQ ID NO: 4959823 - DNA, 25 bp, Homo sapien
ggcatgactcacacccatgctctga

SEQ ID NO: 4959824 - DNA, 25 bp, Homo sapien
gatgtcacagtgtcgcatggcatgg

SEQ ID NO: 4959825 - DNA, 25 bp, Homo sapien
ggaacttttcattcgggtcattagc

SEQ ID NO: 4959826 - DNA, 25 bp, Homo sapien
cttttcattcgggtcattagctcca

SEQ ID NO: 4959827 - DNA, 25 bp, Homo sapien
cccgtatctgctgttggaacttttc

SEQ ID NO: 4959828 - DNA, 25 bp, Homo sapien
tctgctgttggaacttttcattcgg

SEQ ID NO: 4959829 - DNA, 25 bp, Homo sapien
tcacagttggtttatcaccaataaa

SEQ ID NO: 4959830 - DNA, 25 bp, Homo sapien
tctgccaagcctgaggatccccagg

SEQ ID NO: 4959831 - DNA, 25 bp, Homo sapien
cctgtttttcctctgccaagcctga

SEQ ID NO: 4959832 - DNA, 25 bp, Homo sapien
ctttctctgtctctatcagccctgt

SEQ ID NO: 4959833 - DNA, 25 bp, Homo sapien
tctgtctctatcagccctgtttttc

SEQ ID NO: 4959834 - DNA, 25 bp, Homo sapien
gaaatccaaaacgtcaacaaacatc

SEQ ID NO: 4959835 - DNA, 25 bp, Homo sapien
gaaggaatgctagcactttctccat

SEQ ID NO: 4959836 - DNA, 25 bp, Homo sapien
atccaaaacgtcaacaaacatctgc

SEQ ID NO: 4959837 - DNA, 25 bp, Homo sapien
catctgcttgggaaggaatgctagc

SEQ ID NO: 4959838 - DNA, 25 bp, Homo sapien
accgttaacgaaatagatattcatg

SEQ ID NO: 4959839 - DNA, 25 bp, Homo sapien
ccaagacttgttagagtcgggtggt

SEQ ID NO: 4959840 - DNA, 25 bp, Homo sapien
tggtgagaacttgggtattacttat

SEQ ID NO: 4959841 - DNA, 25 bp, Homo sapien
tagatattcatgtccatagctggta

SEQ ID NO: 4959842 - DNA, 25 bp, Homo sapien
gagcttttactctaatctgaaaggc

SEQ ID NO: 4959843 - DNA, 25 bp, Homo sapien
cacagctgggctgactcattgttcg

SEQ ID NO: 4959844 - DNA, 25 bp, Homo sapien
caaaggggtccatcgaagtgaagca

SEQ ID NO: 4959845 - DNA, 25 bp, Homo sapien
ttcggtgacttgttcaggactatag

SEQ ID NO: 4959846 - DNA, 25 bp, Homo sapien
ttcccacacccaagtcatacagcag

SEQ ID NO: 4959847 - DNA, 25 bp, Homo sapien
gatgctaagttagggacagcatcat

SEQ ID NO: 4959848 - DNA, 25 bp, Homo sapien
ctgggacaaccttggtatcccagga

SEQ ID NO: 4959849 - DNA, 25 bp, Homo sapien
catcattgcaggagtgctgggagta

SEQ ID NO: 4959850 - DNA, 25 bp, Homo sapien
catgtcctgcgggctggaccacacg

SEQ ID NO: 4959851 - DNA, 25 bp, Homo sapien
ctggaccacacggtatggaggagaa

SEQ ID NO: 4959852 - DNA, 25 bp, Homo sapien
tgagttctgacaggcctcgcatgcc

SEQ ID NO: 4959853 - DNA, 25 bp, Homo sapien
gttctgacaggcctcgcatgcccag

SEQ ID NO: 4959854 - DNA, 25 bp, Homo sapien
ctgtacagcatggtcattctctcga

SEQ ID NO: 4959855 - DNA, 25 bp, Homo sapien
atgattccggatagtttttctttct

SEQ ID NO: 4959856 - DNA, 25 bp, Homo sapien
catttattggcttcacatttgtgtt

SEQ ID NO: 4959857 - DNA, 25 bp, Homo sapien
tctcgatctaatgattccggatagt

SEQ ID NO: 4959858 - DNA, 25 bp, Homo sapien
tgccccagtgttgctactcttgccc

SEQ ID NO: 4959859 - DNA, 25 bp, Homo sapien
aacgagctacacttttctgatcatc

SEQ ID NO: 4959860 - DNA, 25 bp, Homo sapien
ctctgagggcgccaacgagctacac

SEQ ID NO: 4959861 - DNA, 25 bp, Homo sapien
tcttgcccggctacccctctgaggg

SEQ ID NO: 4959862 - DNA, 25 bp, Homo sapien
agtttgggtggggatgtgacagctg

SEQ ID NO: 4959863 - DNA, 25 bp, Homo sapien
tgtgacagctgcctctcaataattg

SEQ ID NO: 4959864 - DNA, 25 bp, Homo sapien
gacagctgcctctcaataattgtta

SEQ ID NO: 4959865 - DNA, 25 bp, Homo sapien
gcctctcaataattgttacgtgtac

SEQ ID NO: 4959866 - DNA, 25 bp, Homo sapien
gaagctatttcactcacctgtggcc

SEQ ID NO: 4959867 - DNA, 25 bp, Homo sapien
tctatgggaacagccggtccctttc

SEQ ID NO: 4959868 - DNA, 25 bp, Homo sapien
tgtggccataagacaacttagaggg

SEQ ID NO: 4959869 - DNA, 25 bp, Homo sapien
gacctgtgacatgaagttctatggg

SEQ ID NO: 4959870 - DNA, 25 bp, Homo sapien
tcaggatcagtgactcattggacac

SEQ ID NO: 4959871 - DNA, 25 bp, Homo sapien
caacttcgaaggttgtactcctgct

SEQ ID NO: 4959872 - DNA, 25 bp, Homo sapien
gggtctgtggtcagtcttctcttgt

SEQ ID NO: 4959873 - DNA, 25 bp, Homo sapien
cgaaggttgtactcctgcttccttt

SEQ ID NO: 4959874 - DNA, 25 bp, Homo sapien
tgggaggggtttgatgctgccccgc

SEQ ID NO: 4959875 - DNA, 25 bp, Homo sapien
ccagtgggaggggtttgatgctgcc

SEQ ID NO: 4959876 - DNA, 25 bp, Homo sapien
gctcagcaggttgccccagtgggag

SEQ ID NO: 4959877 - DNA, 25 bp, Homo sapien
gggtttgatgctgccccgcttttct

SEQ ID NO: 4959878 - DNA, 25 bp, Homo sapien
aaaccattcctggtgcaaagctgca

SEQ ID NO: 4959879 - DNA, 25 bp, Homo sapien
ctgcaaggacataaaccattcctgg

SEQ ID NO: 4959880 - DNA, 25 bp, Homo sapien
cataaaccattcctggtgcaaagct

SEQ ID NO: 4959881 - DNA, 25 bp, Homo sapien
aggacataaaccattcctggtgcaa

SEQ ID NO: 4959882 - DNA, 25 bp, Homo sapien
gaagtagctttggcttgactgcaag

SEQ ID NO: 4959883 - DNA, 25 bp, Homo sapien
aaggacagtgttgctctggcaataa

SEQ ID NO: 4959884 - DNA, 25 bp, Homo sapien
tgaagtagctttggcttgactgcaa

SEQ ID NO: 4959885 - DNA, 25 bp, Homo sapien
ctggcttaagctaggagtcgaattc

SEQ ID NO: 4959886 - DNA, 25 bp, Homo sapien
taaagtctgcctatataagccgagg

SEQ ID NO: 4959887 - DNA, 25 bp, Homo sapien
ggttaaaatccactaacgcatgcca

SEQ ID NO: 4959888 - DNA, 25 bp, Homo sapien
gaaaagcaattctaccagggccctg

SEQ ID NO: 4959889 - DNA, 25 bp, Homo sapien
ggaaagttctgtacgcagctaagtc

SEQ ID NO: 4959890 - DNA, 25 bp, Homo sapien
cgcaatacagatccaaaagggtgaa

SEQ ID NO: 4959891 - DNA, 25 bp, Homo sapien
tgatctcgggcctctgcaaagtagg

SEQ ID NO: 4959892 - DNA, 25 bp, Homo sapien
gacatggaaccgcaatacagatcca

SEQ ID NO: 4959893 - DNA, 25 bp, Homo sapien
cttaccacatgggagggtgtgacat

SEQ ID NO: 4959894 - DNA, 25 bp, Homo sapien
acatgagtctaactggccatggagg

SEQ ID NO: 4959895 - DNA, 25 bp, Homo sapien
gggaaggatgcccttaccacatggg

SEQ ID NO: 4959896 - DNA, 25 bp, Homo sapien
ggtgtgacatgagtctaactggcca

SEQ ID NO: 4959897 - DNA, 25 bp, Homo sapien
agagccatctcttggtccattcgca

SEQ ID NO: 4959898 - DNA, 25 bp, Homo sapien
ccagaaatatatcccctagcagcat

SEQ ID NO: 4959899 - DNA, 25 bp, Homo sapien
tggactcctgagtgtataccaacac

SEQ ID NO: 4959900 - DNA, 25 bp, Homo sapien
ggtccattcgcaaaggtgaaaccag

SEQ ID NO: 4959901 - DNA, 25 bp, Homo sapien
aagatgatttggcttcttagcctca

SEQ ID NO: 4959902 - DNA, 25 bp, Homo sapien
tcttagcctcagatgtattggatat

SEQ ID NO: 4959903 - DNA, 25 bp, Homo sapien
gccagtgagcaaaagatgatttggc

SEQ ID NO: 4959904 - DNA, 25 bp, Homo sapien
cttagcctcagatgtattggatatg

SEQ ID NO: 4959905 - DNA, 25 bp, Homo sapien
agataacatcgggactggaaaggac

SEQ ID NO: 4959906 - DNA, 25 bp, Homo sapien
ctttctttacagataacatcgggac

SEQ ID NO: 4959907 - DNA, 25 bp, Homo sapien
ctggagatgcacatagtcttacttc

SEQ ID NO: 4959908 - DNA, 25 bp, Homo sapien
atagtcttacttccagctcaggcat

SEQ ID NO: 4959909 - DNA, 25 bp, Homo sapien
catctctcagctccttgaagaggtt

SEQ ID NO: 4959910 - DNA, 25 bp, Homo sapien
tctgctttggttttgaggggttatg

SEQ ID NO: 4959911 - DNA, 25 bp, Homo sapien
caggcttgcatctctcagctccttg

SEQ ID NO: 4959912 - DNA, 25 bp, Homo sapien
tggttttgaggggttatgtctgaaa

SEQ ID NO: 4959913 - DNA, 25 bp, Homo sapien
atcaagatgatctcattcactcctg

SEQ ID NO: 4959914 - DNA, 25 bp, Homo sapien
catagttgattacacgtgtttccct

SEQ ID NO: 4959915 - DNA, 25 bp, Homo sapien
cattcactcctgtacaaccagttca

SEQ ID NO: 4959916 - DNA, 25 bp, Homo sapien
gttgattacacgtgtttcccttgag

SEQ ID NO: 4959917 - DNA, 25 bp, Homo sapien
gaagttgctaacaggacatcctcct

SEQ ID NO: 4959918 - DNA, 25 bp, Homo sapien
gttaaattcatagctcatttgtccg

SEQ ID NO: 4959919 - DNA, 25 bp, Homo sapien
taagcaatccggagtcagctttgaa

SEQ ID NO: 4959920 - DNA, 25 bp, Homo sapien
gctgggatgttagcctgttaaattc

SEQ ID NO: 4959921 - DNA, 25 bp, Homo sapien
gaatctgttaatccttccttgcccc

SEQ ID NO: 4959922 - DNA, 25 bp, Homo sapien
gcactaaaagaagttacgtggctcc

SEQ ID NO: 4959923 - DNA, 25 bp, Homo sapien
caataactcggaggaactagttcca

SEQ ID NO: 4959924 - DNA, 25 bp, Homo sapien
cacatggcggcagtcttcgtggtca

SEQ ID NO: 4959925 - DNA, 25 bp, Homo sapien
tagataatgcaaagtctaaggcgga

SEQ ID NO: 4959926 - DNA, 25 bp, Homo sapien
taatgcaaagtctaaggcggagggc

SEQ ID NO: 4959927 - DNA, 25 bp, Homo sapien
aaggcggagggcatctcactgcaaa

SEQ ID NO: 4959928 - DNA, 25 bp, Homo sapien
tatgcagtggtagataatgcaaagt

SEQ ID NO: 4959929 - DNA, 25 bp, Homo sapien
tctcagaaagcataccgtccacata

SEQ ID NO: 4959930 - DNA, 25 bp, Homo sapien
ttaggctaccaagggaacagtgctt

SEQ ID NO: 4959931 - DNA, 25 bp, Homo sapien
gaacagtgcttaatcgaaaagtcct

SEQ ID NO: 4959932 - DNA, 25 bp, Homo sapien
tgcatgctgaagacataattcttga

SEQ ID NO: 4959933 - DNA, 25 bp, Homo sapien
gacatagtcaaactcaacagcataa

SEQ ID NO: 4959934 - DNA, 25 bp, Homo sapien
tcttcaatcataaatggacagatcc

SEQ ID NO: 4959935 - DNA, 25 bp, Homo sapien
cagaacatcagtaaggacatagtca

SEQ ID NO: 4959936 - DNA, 25 bp, Homo sapien
ggacagatccagcagacagaacatc

SEQ ID NO: 4959937 - DNA, 25 bp, Homo sapien
gaaagcagtgcttacagcgaaattt

SEQ ID NO: 4959938 - DNA, 25 bp, Homo sapien
cagtgcttacagcgaaatttatggc

SEQ ID NO: 4959939 - DNA, 25 bp, Homo sapien
gcagtgcttacagcgaaatttatgg

SEQ ID NO: 4959940 - DNA, 25 bp, Homo sapien
gtgaaagcagtgcttacagcgaaat

SEQ ID NO: 4959941 - DNA, 25 bp, Homo sapien
taggaaatctccgtagcttctgctc

SEQ ID NO: 4959942 - DNA, 25 bp, Homo sapien
cataacgaccactcttgtgctggat

SEQ ID NO: 4959943 - DNA, 25 bp, Homo sapien
tggattttgatagtcaggcaggcta

SEQ ID NO: 4959944 - DNA, 25 bp, Homo sapien
caattttgctgtggatctacaaatc

SEQ ID NO: 4959945 - DNA, 25 bp, Homo sapien
caaacaaaatcttcctggtaattca

SEQ ID NO: 4959946 - DNA, 25 bp, Homo sapien
ctctcttgatcttgattctcattgg

SEQ ID NO: 4959947 - DNA, 25 bp, Homo sapien
aatcttcctggtaattcacaactgc

SEQ ID NO: 4959948 - DNA, 25 bp, Homo sapien
cttgattctcattggaagcaaacaa

SEQ ID NO: 4959949 - DNA, 25 bp, Homo sapien
gcacaagggcattgtttatgtcact

SEQ ID NO: 4959950 - DNA, 25 bp, Homo sapien
ctgagtgctgagcaaagctctggct

SEQ ID NO: 4959951 - DNA, 25 bp, Homo sapien
aaaagagcccttgaggactttgaca

SEQ ID NO: 4959952 - DNA, 25 bp, Homo sapien
tgcttatctacacgaacaaccctga

SEQ ID NO: 4959953 - DNA, 25 bp, Homo sapien
gcatgcatctctgtccttgaacgaa

SEQ ID NO: 4959954 - DNA, 25 bp, Homo sapien
cgaactgagaaagcgggtctccttt

SEQ ID NO: 4959955 - DNA, 25 bp, Homo sapien
cctgcatggcctcaattgagtcttg

SEQ ID NO: 4959956 - DNA, 25 bp, Homo sapien
catatgacgccgctgttggattcca

SEQ ID NO: 4959957 - DNA, 25 bp, Homo sapien
ggcaaaggctgtaagccacccaatt

SEQ ID NO: 4959958 - DNA, 25 bp, Homo sapien
tacgaggttgaatgcggtgaacccg

SEQ ID NO: 4959959 - DNA, 25 bp, Homo sapien
ttttatttcatgcaactttacgagg

SEQ ID NO: 4959960 - DNA, 25 bp, Homo sapien
caaaggctgtaagccacccaattca

SEQ ID NO: 4959961 - DNA, 25 bp, Homo sapien
tctgtcatcatttggccctggagca

SEQ ID NO: 4959962 - DNA, 25 bp, Homo sapien
gaagcatcccagactttacctctgt

SEQ ID NO: 4959963 - DNA, 25 bp, Homo sapien
tacctctgtcatcatttggccctgg

SEQ ID NO: 4959964 - DNA, 25 bp, Homo sapien
atgtgggagtggtgtcgaagcatcc

SEQ ID NO: 4959965 - DNA, 25 bp, Homo sapien
ctggtagcctttttccttaattgtg

SEQ ID NO: 4959966 - DNA, 25 bp, Homo sapien
tgacaatacttatgacagcgttagt

SEQ ID NO: 4959967 - DNA, 25 bp, Homo sapien
tatttcatgggttccctgtttctgt

SEQ ID NO: 4959968 - DNA, 25 bp, Homo sapien
ccccaggaactacaacaatattatc

SEQ ID NO: 4959969 - DNA, 25 bp, Homo sapien
ccagcatgggctgcatgacaatact

SEQ ID NO: 4959970 - DNA, 25 bp, Homo sapien
aaccagctgtctgtaggaaacctac

SEQ ID NO: 4959971 - DNA, 25 bp, Homo sapien
ggaaccagctgtctgtaggaaacct

SEQ ID NO: 4959972 - DNA, 25 bp, Homo sapien
ctaggaaccagctgtctgtaggaaa

SEQ ID NO: 4959973 - DNA, 25 bp, Homo sapien
taggaaccagctgtctgtaggaaac

SEQ ID NO: 4959974 - DNA, 25 bp, Homo sapien
tggagagcctgaattgacctgaggt

SEQ ID NO: 4959975 - DNA, 25 bp, Homo sapien
cctccaaggaaaactgcaatcagct

SEQ ID NO: 4959976 - DNA, 25 bp, Homo sapien
cctgaggtgtaggtgtgtctgatcc

SEQ ID NO: 4959977 - DNA, 25 bp, Homo sapien
catcaggaaacagtatagggaaggc

SEQ ID NO: 4959978 - DNA, 25 bp, Homo sapien
cttccaagaacctcttcctgatcaa

SEQ ID NO: 4959979 - DNA, 25 bp, Homo sapien
tcataaaccttcttgcttccaagaa

SEQ ID NO: 4959980 - DNA, 25 bp, Homo sapien
tcatcaaatctttaagtttccattc

SEQ ID NO: 4959981 - DNA, 25 bp, Homo sapien
ggaatagacagcgactcatcaaatc

SEQ ID NO: 4959982 - DNA, 25 bp, Homo sapien
ccaaaacacagggtgagccaatagc

SEQ ID NO: 4959983 - DNA, 25 bp, Homo sapien
gccaatagctatggctgtacttgaa

SEQ ID NO: 4959984 - DNA, 25 bp, Homo sapien
tcatagtgatgaatccaggtgtgaa

SEQ ID NO: 4959985 - DNA, 25 bp, Homo sapien
tcttcctggtcatagtgatgaatcc

SEQ ID NO: 4959986 - DNA, 25 bp, Homo sapien
gcctgtatcttcaccaccctgcttg

SEQ ID NO: 4959987 - DNA, 25 bp, Homo sapien
tcttcaccaccctgcttgcacactg

SEQ ID NO: 4959988 - DNA, 25 bp, Homo sapien
tatgcctgtatcttcaccaccctgc

SEQ ID NO: 4959989 - DNA, 25 bp, Homo sapien
tctatgcctgtatcttcaccaccct

SEQ ID NO: 4959990 - DNA, 25 bp, Homo sapien
tttccacagccgtctatcatgggtc

SEQ ID NO: 4959991 - DNA, 25 bp, Homo sapien
ccctaatagcgttgtatgtttcatc

SEQ ID NO: 4959992 - DNA, 25 bp, Homo sapien
catgcctctcttcacctgttttgag

SEQ ID NO: 4959993 - DNA, 25 bp, Homo sapien
cccgagcctggattccctaatagcg

SEQ ID NO: 4959994 - DNA, 25 bp, Homo sapien
ccatggatcacagcgaacacgcaga

SEQ ID NO: 4959995 - DNA, 25 bp, Homo sapien
cagtgttgtggttctccatggatca

SEQ ID NO: 4959996 - DNA, 25 bp, Homo sapien
tactgggtgcctacactgaactgga

SEQ ID NO: 4959997 - DNA, 25 bp, Homo sapien
gggaatagctggatttctctgtcct

SEQ ID NO: 4959998 - DNA, 25 bp, Homo sapien
cacgtgtgcatgctttccacactgc

SEQ ID NO: 4959999 - DNA, 25 bp, Homo sapien
aaattaagagcgctgtccactccgg

SEQ ID NO: 4960000 - DNA, 25 bp, Homo sapien
tttcaaactaaaattaagagcgctg

SEQ ID NO: 4960001 - DNA, 25 bp, Homo sapien
ggaacgatcagttctgtaaaactgg

SEQ ID NO: 4960002 - DNA, 25 bp, Homo sapien
tgtccactccggaacgatcagttct

SEQ ID NO: 4960003 - DNA, 25 bp, Homo sapien
ttaactctgctcatagagctccagc

SEQ ID NO: 4960004 - DNA, 25 bp, Homo sapien
tggatgatgaccgtagtggctgtta

SEQ ID NO: 4960005 - DNA, 25 bp, Homo sapien
taagaatttctgtaatgtggcagat

SEQ ID NO: 4960006 - DNA, 25 bp, Homo sapien
gctgttatgcgtaagagcatacata

SEQ ID NO: 4960007 - DNA, 25 bp, Homo sapien
agaagcacccattgtgatttgctgg

SEQ ID NO: 4960008 - DNA, 25 bp, Homo sapien
atgggggcctgtgtcttaagaagca

SEQ ID NO: 4960009 - DNA, 25 bp, Homo sapien
gggggcctgtgtcttaagaagcacc

SEQ ID NO: 4960010 - DNA, 25 bp, Homo sapien
ttaagaagcacccattgtgatttgc

SEQ ID NO: 4960011 - DNA, 25 bp, Homo sapien
caatgaatctgggaaccccagtggg

SEQ ID NO: 4960012 - DNA, 25 bp, Homo sapien
taggcaatgaatctgggaaccccag

SEQ ID NO: 4960013 - DNA, 25 bp, Homo sapien
gggactttaggcaatgaatctggga

SEQ ID NO: 4960014 - DNA, 25 bp, Homo sapien
atgacaccagggactttaggcaatg

SEQ ID NO: 4960015 - DNA, 25 bp, Homo sapien
tcaggatcggcccaggaactcaggt

SEQ ID NO: 4960016 - DNA, 25 bp, Homo sapien
actgaggattcacatgcccgttgct

SEQ ID NO: 4960017 - DNA, 25 bp, Homo sapien
ctcctcgctcttgggcaacaattcc

SEQ ID NO: 4960018 - DNA, 25 bp, Homo sapien
cgttgctgtagtcaggatcggccca

SEQ ID NO: 4960019 - DNA, 25 bp, Homo sapien
tgtcccttgagggtgagcagctgct

SEQ ID NO: 4960020 - DNA, 25 bp, Homo sapien
ctgctgtgtcctccacatccaccat

SEQ ID NO: 4960021 - DNA, 25 bp, Homo sapien
ctgtcccttgagggtgagcagctgc

SEQ ID NO: 4960022 - DNA, 25 bp, Homo sapien
cagctgctgtgtcctccacatccac

SEQ ID NO: 4960023 - DNA, 25 bp, Homo sapien
aaacagcagcgtaagatgtgagcct

SEQ ID NO: 4960024 - DNA, 25 bp, Homo sapien
gagaaggttcctgagatcgggctgt

SEQ ID NO: 4960025 - DNA, 25 bp, Homo sapien
gtctgaaacagcagcgtaagatgtg

SEQ ID NO: 4960026 - DNA, 25 bp, Homo sapien
cagcgtaagatgtgagcctgtgaag

SEQ ID NO: 4960027 - DNA, 25 bp, Homo sapien
catgagttacccttcataagatgct

SEQ ID NO: 4960028 - DNA, 25 bp, Homo sapien
ggttgcctaatttttcactccacaa

SEQ ID NO: 4960029 - DNA, 25 bp, Homo sapien
ttctgaaatattaggatggtagccc

SEQ ID NO: 4960030 - DNA, 25 bp, Homo sapien
gaaatataatcgcttatcaccggga

SEQ ID NO: 4960031 - DNA, 25 bp, Homo sapien
caatgttgtgaagatttggccctct

SEQ ID NO: 4960032 - DNA, 25 bp, Homo sapien
tatatatgatgttagataagggtcc

SEQ ID NO: 4960033 - DNA, 25 bp, Homo sapien
cattctttcacatgcggttatgcaa

SEQ ID NO: 4960034 - DNA, 25 bp, Homo sapien
aatgagtatgtgtgacgtcttcctg

SEQ ID NO: 4960035 - DNA, 25 bp, Homo sapien
ttctctatgtcaaggatcagcctga

SEQ ID NO: 4960036 - DNA, 25 bp, Homo sapien
gaatagtcataattttccgcatata

SEQ ID NO: 4960037 - DNA, 25 bp, Homo sapien
ggtataaacttacagtcttcacagc

SEQ ID NO: 4960038 - DNA, 25 bp, Homo sapien
cttttttagcctgtatctttacatg

SEQ ID NO: 4960039 - DNA, 25 bp, Homo sapien
aacctcttggaggtattctctggaa

SEQ ID NO: 4960040 - DNA, 25 bp, Homo sapien
caggtagttggaattacaaggcatg

SEQ ID NO: 4960041 - DNA, 25 bp, Homo sapien
ctactgactcttcagagggtcactc

SEQ ID NO: 4960042 - DNA, 25 bp, Homo sapien
ttaaggtggaatcctgtgtcccact

SEQ ID NO: 4960043 - DNA, 25 bp, Homo sapien
gactggcatccttaggagaagagag

SEQ ID NO: 4960044 - DNA, 25 bp, Homo sapien
gacacacaagatcgacccattcact

SEQ ID NO: 4960045 - DNA, 25 bp, Homo sapien
gacttgttactatagccccagaaag

SEQ ID NO: 4960046 - DNA, 25 bp, Homo sapien
ttggtaatagacacaaatgcagtgg

SEQ ID NO: 4960047 - DNA, 25 bp, Homo sapien
aagaacatattctgtgtgttggaaa

SEQ ID NO: 4960048 - DNA, 25 bp, Homo sapien
ccccaaccaactggcaccatcccca

SEQ ID NO: 4960049 - DNA, 25 bp, Homo sapien
agaacatattctgtgtgttggaaaa

SEQ ID NO: 4960050 - DNA, 25 bp, Homo sapien
ccaactggcaccatccccatagttt

SEQ ID NO: 4960051 - DNA, 25 bp, Homo sapien
ttctttccttgttacgtgatttctc

SEQ ID NO: 4960052 - DNA, 25 bp, Homo sapien
tccatccctgtgttagcaagctttc

SEQ ID NO: 4960053 - DNA, 25 bp, Homo sapien
ctaacactgccggtcattgcacagt

SEQ ID NO: 4960054 - DNA, 25 bp, Homo sapien
tccttgttacgtgatttctcaggtg

SEQ ID NO: 4960055 - DNA, 25 bp, Homo sapien
gccaaagctagttcccgcagacctt

SEQ ID NO: 4960056 - DNA, 25 bp, Homo sapien
agttcccgcagaccttccaatccat

SEQ ID NO: 4960057 - DNA, 25 bp, Homo sapien
taggccaaagctagttcccgcagac

SEQ ID NO: 4960058 - DNA, 25 bp, Homo sapien
tcccgcagaccttccaatccatctg

SEQ ID NO: 4960059 - DNA, 25 bp, Homo sapien
atcatattttattagctgtgcaata

SEQ ID NO: 4960060 - DNA, 25 bp, Homo sapien
aatcatattttattagctgtgcaat

SEQ ID NO: 4960061 - DNA, 25 bp, Homo sapien
caactgggttacttttgcaggcaaa

SEQ ID NO: 4960062 - DNA, 25 bp, Homo sapien
catcttggtgatcgagtagaactgc

SEQ ID NO: 4960063 - DNA, 25 bp, Homo sapien
gaaagcggtccctacttctgaggag

SEQ ID NO: 4960064 - DNA, 25 bp, Homo sapien
ggaggagcaccctgttttgaaaaga

SEQ ID NO: 4960065 - DNA, 25 bp, Homo sapien
caggcgtccgtaccactatgaggtt

SEQ ID NO: 4960066 - DNA, 25 bp, Homo sapien
tatctcgtgcctgaacaccagcatg

SEQ ID NO: 4960067 - DNA, 25 bp, Homo sapien
ttctgtttgcgaaggtgagcctcta

SEQ ID NO: 4960068 - DNA, 25 bp, Homo sapien
gagatacttgcgataaaggtgcaca

SEQ ID NO: 4960069 - DNA, 25 bp, Homo sapien
cgagaattccccaacaaagacgact

SEQ ID NO: 4960070 - DNA, 25 bp, Homo sapien
gaaatgatggatacctcccatgacc

SEQ ID NO: 4960071 - DNA, 25 bp, Homo sapien
gacgacttttatggcagacagcacc

SEQ ID NO: 4960072 - DNA, 25 bp, Homo sapien
ggtacgagagtgtccacctgggtca

SEQ ID NO: 4960073 - DNA, 25 bp, Homo sapien
aatgcagattcttgtgcttctgtga

SEQ ID NO: 4960074 - DNA, 25 bp, Homo sapien
gaaggcaatggtaccaccttcccaa

SEQ ID NO: 4960075 - DNA, 25 bp, Homo sapien
agactccttggaaaccctacttgat

SEQ ID NO: 4960076 - DNA, 25 bp, Homo sapien
ccagactccttggaaaccctacttg

SEQ ID NO: 4960077 - DNA, 25 bp, Homo sapien
ttttgaaggcaatggtaccaccttc

SEQ ID NO: 4960078 - DNA, 25 bp, Homo sapien
gtggcagtagagatgcagatttgtc

SEQ ID NO: 4960079 - DNA, 25 bp, Homo sapien
gcctctgggtggcagtagagatgca

SEQ ID NO: 4960080 - DNA, 25 bp, Homo sapien
ggcagtagagatgcagatttgtcct

SEQ ID NO: 4960081 - DNA, 25 bp, Homo sapien
gggtggcagtagagatgcagatttg

SEQ ID NO: 4960082 - DNA, 25 bp, Homo sapien
ctatattgatgaagtctgaccgata

SEQ ID NO: 4960083 - DNA, 25 bp, Homo sapien
tgaccgatactgacacgtcatccca

SEQ ID NO: 4960084 - DNA, 25 bp, Homo sapien
tgaagtctgaccgatactgacacgt

SEQ ID NO: 4960085 - DNA, 25 bp, Homo sapien
ccgatactgacacgtcatcccaaat

SEQ ID NO: 4960086 - DNA, 25 bp, Homo sapien
agccaccgtggagtgtggagcccat

SEQ ID NO: 4960087 - DNA, 25 bp, Homo sapien
gtcaggaatacagtacacacaccag

SEQ ID NO: 4960088 - DNA, 25 bp, Homo sapien
caccagtcccaaaacaaggtcttgt

SEQ ID NO: 4960089 - DNA, 25 bp, Homo sapien
cctccactggtgcaggaaacgcaga

SEQ ID NO: 4960090 - DNA, 25 bp, Homo sapien
gacgcgctcaatagcagtctggcgg

SEQ ID NO: 4960091 - DNA, 25 bp, Homo sapien
tgccctcaagcacacatccgattat

SEQ ID NO: 4960092 - DNA, 25 bp, Homo sapien
cagctgtgctgggtcgctaactgga

SEQ ID NO: 4960093 - DNA, 25 bp, Homo sapien
agtctggcgggagtgtgtgccctca

SEQ ID NO: 4960094 - DNA, 25 bp, Homo sapien
caaaaggacagttgtcagccctgct

SEQ ID NO: 4960095 - DNA, 25 bp, Homo sapien
taaatagcaactactcaggcagagc

SEQ ID NO: 4960096 - DNA, 25 bp, Homo sapien
tagcagggccggcttacaaagtgac

SEQ ID NO: 4960097 - DNA, 25 bp, Homo sapien
cagctctgtggacgattcacgtgac

SEQ ID NO: 4960098 - DNA, 25 bp, Homo sapien
accatcgtgcttcaattgcctgtag

SEQ ID NO: 4960099 - DNA, 25 bp, Homo sapien
tgtattacaagctccactcatggga

SEQ ID NO: 4960100 - DNA, 25 bp, Homo sapien
gtttagatactgaataccatcgtgc

SEQ ID NO: 4960101 - DNA, 25 bp, Homo sapien
tagtgtcacctaagtctacagtggt

SEQ ID NO: 4960102 - DNA, 25 bp, Homo sapien
atgaaattgcctgacgatacatgac

SEQ ID NO: 4960103 - DNA, 25 bp, Homo sapien
gcctgacgatacatgacatctctct

SEQ ID NO: 4960104 - DNA, 25 bp, Homo sapien
gctgaaaactgattcttaagacgtg

SEQ ID NO: 4960105 - DNA, 25 bp, Homo sapien
tcaagcgattttcaacctgcctagt

SEQ ID NO: 4960106 - DNA, 25 bp, Homo sapien
tcatggtggccgtatattatgccag

SEQ ID NO: 4960107 - DNA, 25 bp, Homo sapien
ctgctgttccaagggagggactgca

SEQ ID NO: 4960108 - DNA, 25 bp, Homo sapien
tccaagggagggactgcatcatggt

SEQ ID NO: 4960109 - DNA, 25 bp, Homo sapien
gattgtactgactgaaaagaactgg

SEQ ID NO: 4960110 - DNA, 25 bp, Homo sapien
gcgaatagctcttctaccctaggta

SEQ ID NO: 4960111 - DNA, 25 bp, Homo sapien
tagcagccttgcctatgagtggagt

SEQ ID NO: 4960112 - DNA, 25 bp, Homo sapien
gaatgttcatgaaagctgacctccc

SEQ ID NO: 4960113 - DNA, 25 bp, Homo sapien
cagaattatggtggctgacaggccc

SEQ ID NO: 4960114 - DNA, 25 bp, Homo sapien
agagaaggacgttgcttcccttcca

SEQ ID NO: 4960115 - DNA, 25 bp, Homo sapien
tggctgtgtattcagcctacacgta

SEQ ID NO: 4960116 - DNA, 25 bp, Homo sapien
agaagcgggctccaacatcaagtcc

SEQ ID NO: 4960117 - DNA, 25 bp, Homo sapien
gcctacacgtattgaggaattcaga

SEQ ID NO: 4960118 - DNA, 25 bp, Homo sapien
gccaggtcattatgctcagctaggg

SEQ ID NO: 4960119 - DNA, 25 bp, Homo sapien
tccaataaaccagtgatctgaaaga

SEQ ID NO: 4960120 - DNA, 25 bp, Homo sapien
taaaccagtgatctgaaagaacccc

SEQ ID NO: 4960121 - DNA, 25 bp, Homo sapien
ctaggggtccgtctgaggatgaata

SEQ ID NO: 4960122 - DNA, 25 bp, Homo sapien
gcagggactccatcactagactaga

SEQ ID NO: 4960123 - DNA, 25 bp, Homo sapien
tagtcaggccacttatcaatgcccc

SEQ ID NO: 4960124 - DNA, 25 bp, Homo sapien
gaggaattggcttcttcaagtagtc

SEQ ID NO: 4960125 - DNA, 25 bp, Homo sapien
cattttgaagcagtgctcattgggc

SEQ ID NO: 4960126 - DNA, 25 bp, Homo sapien
aacatcactcggtctttaaggccca

SEQ ID NO: 4960127 - DNA, 25 bp, Homo sapien
aatacgcgctctgcatctactcctg

SEQ ID NO: 4960128 - DNA, 25 bp, Homo sapien
tctcttccctcaaatacgcgctctg

SEQ ID NO: 4960129 - DNA, 25 bp, Homo sapien
tctactcctgcgaacatcactcggt

SEQ ID NO: 4960130 - DNA, 25 bp, Homo sapien
catacagggcatgtttattagtgat

SEQ ID NO: 4960131 - DNA, 25 bp, Homo sapien
gcctatgtagttacttcactggcaa

SEQ ID NO: 4960132 - DNA, 25 bp, Homo sapien
gtgtcctttcatgtccgccccaagg

SEQ ID NO: 4960133 - DNA, 25 bp, Homo sapien
ggcaatctttacgtcttcatgtgga

SEQ ID NO: 4960134 - DNA, 25 bp, Homo sapien
tagccctagagaggtacatggtcct

SEQ ID NO: 4960135 - DNA, 25 bp, Homo sapien
gaacctccggacagttcaaatagtg

SEQ ID NO: 4960136 - DNA, 25 bp, Homo sapien
taaagacaaccttgtgagtggtgtc

SEQ ID NO: 4960137 - DNA, 25 bp, Homo sapien
tgggagcttaggacatacatgggtt

SEQ ID NO: 4960138 - DNA, 25 bp, Homo sapien
taaacaacagtgagatggactctcc

SEQ ID NO: 4960139 - DNA, 25 bp, Homo sapien
gtaaacaacagtgagatggactctc

SEQ ID NO: 4960140 - DNA, 25 bp, Homo sapien
cagaatatacccgtgcctggccagt

SEQ ID NO: 4960141 - DNA, 25 bp, Homo sapien
tccccaagaccgctttgtgccttgt

SEQ ID NO: 4960142 - DNA, 25 bp, Homo sapien
tagagcacaaagacgtggcctttgc

SEQ ID NO: 4960143 - DNA, 25 bp, Homo sapien
ccagtacgccgggtgagctgttttc

SEQ ID NO: 4960144 - DNA, 25 bp, Homo sapien
ttaatcaaccagcggcactgtgcca

SEQ ID NO: 4960145 - DNA, 25 bp, Homo sapien
atcaaccagcggcactgtgccattc

SEQ ID NO: 4960146 - DNA, 25 bp, Homo sapien
cactgtgccattccaaagggaaaac

SEQ ID NO: 4960147 - DNA, 25 bp, Homo sapien
cagcggcactgtgccattccaaagg

SEQ ID NO: 4960148 - DNA, 25 bp, Homo sapien
ttataattagacagtaggattttct

SEQ ID NO: 4960149 - DNA, 25 bp, Homo sapien
aaacaagctggtgaaatcacttagc

SEQ ID NO: 4960150 - DNA, 25 bp, Homo sapien
agcttctaagatccaacaccgcaca

SEQ ID NO: 4960151 - DNA, 25 bp, Homo sapien
tagctggttatcctcagccaatatg

SEQ ID NO: 4960152 - DNA, 25 bp, Homo sapien
caagggcttaaaggcacacatctaa

SEQ ID NO: 4960153 - DNA, 25 bp, Homo sapien
ttaaaggcacacatctaaaaacttc

SEQ ID NO: 4960154 - DNA, 25 bp, Homo sapien
gggcttaaaggcacacatctaaaaa

SEQ ID NO: 4960155 - DNA, 25 bp, Homo sapien
tcaagggcttaaaggcacacatcta

SEQ ID NO: 4960156 - DNA, 25 bp, Homo sapien
gatgatgcaggttacaataaaagat

SEQ ID NO: 4960157 - DNA, 25 bp, Homo sapien
gatttggattcaatgcattgcagcc

SEQ ID NO: 4960158 - DNA, 25 bp, Homo sapien
ccttcttggtataattctacactta

SEQ ID NO: 4960159 - DNA, 25 bp, Homo sapien
ctacaaaaatgtgggcttgaaacct

SEQ ID NO: 4960160 - DNA, 25 bp, Homo sapien
atatgcttgtaaggcagttttctaa

SEQ ID NO: 4960161 - DNA, 25 bp, Homo sapien
tctgaaggtcaatatgcttgtaagg

SEQ ID NO: 4960162 - DNA, 25 bp, Homo sapien
tcacttctgaaggtcaatatgcttg

SEQ ID NO: 4960163 - DNA, 25 bp, Homo sapien
gaaggtcaatatgcttgtaaggcag

SEQ ID NO: 4960164 - DNA, 25 bp, Homo sapien
ccaccctttttgctagaggcacgat

SEQ ID NO: 4960165 - DNA, 25 bp, Homo sapien
gataagcgtgttggccatgttgagc

SEQ ID NO: 4960166 - DNA, 25 bp, Homo sapien
ccgaatggtcgaaataagatgagcc

SEQ ID NO: 4960167 - DNA, 25 bp, Homo sapien
tctgcatgaactgccggaacttgtc

SEQ ID NO: 4960168 - DNA, 25 bp, Homo sapien
tacatgtcttcctcgcaagttctct

SEQ ID NO: 4960169 - DNA, 25 bp, Homo sapien
gtcttcctcgcaagttctcttctct

SEQ ID NO: 4960170 - DNA, 25 bp, Homo sapien
ggaactacatgtcttcctcgcaagt

SEQ ID NO: 4960171 - DNA, 25 bp, Homo sapien
tttgtgggaactacatgtcttcctc

SEQ ID NO: 4960172 - DNA, 25 bp, Homo sapien
accttgaggcagttcggcaaggctg

SEQ ID NO: 4960173 - DNA, 25 bp, Homo sapien
gataatcgtggaagcaaaggtaaga

SEQ ID NO: 4960174 - DNA, 25 bp, Homo sapien
ggtcacatcatgtggatcccctaag

SEQ ID NO: 4960175 - DNA, 25 bp, Homo sapien
aaaccagcttgttatgtttggccac

SEQ ID NO: 4960176 - DNA, 25 bp, Homo sapien
caagtgaatgttcctttcgttcctg

SEQ ID NO: 4960177 - DNA, 25 bp, Homo sapien
taaggaaaggtagagtacaaggaca

SEQ ID NO: 4960178 - DNA, 25 bp, Homo sapien
cggtaactcagggtaactcctatct

SEQ ID NO: 4960179 - DNA, 25 bp, Homo sapien
tgcagtgagagtaaacaacaaggct

SEQ ID NO: 4960180 - DNA, 25 bp, Homo sapien
tggcagatccatctattcccatcat

SEQ ID NO: 4960181 - DNA, 25 bp, Homo sapien
aaatggcagatccatctattcccat

SEQ ID NO: 4960182 - DNA, 25 bp, Homo sapien
gttgaagaactgtgggtttctaatg

SEQ ID NO: 4960183 - DNA, 25 bp, Homo sapien
ttcacttcctattgttgaagaactg

SEQ ID NO: 4960184 - DNA, 25 bp, Homo sapien
gtcaaagtacagctctttcaaggtg

SEQ ID NO: 4960185 - DNA, 25 bp, Homo sapien
gaccaaagggcacacgagtaagaat

SEQ ID NO: 4960186 - DNA, 25 bp, Homo sapien
gaggtaagccatttactcattttga

SEQ ID NO: 4960187 - DNA, 25 bp, Homo sapien
tcaaggttgcaaatgctatgctccc

SEQ ID NO: 4960188 - DNA, 25 bp, Homo sapien
gctaccacttattggtgagaacacg

SEQ ID NO: 4960189 - DNA, 25 bp, Homo sapien
cctcagaggtaggcaccagtgtgtg

SEQ ID NO: 4960190 - DNA, 25 bp, Homo sapien
tgccccaggaatttattgtacagat

SEQ ID NO: 4960191 - DNA, 25 bp, Homo sapien
ataggtaaacttctgccccaggaat

SEQ ID NO: 4960192 - DNA, 25 bp, Homo sapien
tagaagccacaccaacaacactggg

SEQ ID NO: 4960193 - DNA, 25 bp, Homo sapien
catagttgctgacccatcattggga

SEQ ID NO: 4960194 - DNA, 25 bp, Homo sapien
gcccgtccaagtgcctaaaatgttg

SEQ ID NO: 4960195 - DNA, 25 bp, Homo sapien
tctcctacgagagtgagggatccta

SEQ ID NO: 4960196 - DNA, 25 bp, Homo sapien
cgatgctttcacgttatcagctctt

SEQ ID NO: 4960197 - DNA, 25 bp, Homo sapien
gatgctttcacgttatcagctcttt

SEQ ID NO: 4960198 - DNA, 25 bp, Homo sapien
atgctttcacgttatcagctctttc

SEQ ID NO: 4960199 - DNA, 25 bp, Homo sapien
tggaccatctgttcttttgatggcc

SEQ ID NO: 4960200 - DNA, 25 bp, Homo sapien
tgttcttttgatggcccccaaatat

SEQ ID NO: 4960201 - DNA, 25 bp, Homo sapien
ttcctggaccatctgttcttttgat

SEQ ID NO: 4960202 - DNA, 25 bp, Homo sapien
gaccatctgttcttttgatggcccc

SEQ ID NO: 4960203 - DNA, 25 bp, Homo sapien
gaggaagaatgcgtcctagacccta

SEQ ID NO: 4960204 - DNA, 25 bp, Homo sapien
aagcccaaatgtctccacggatgtt

SEQ ID NO: 4960205 - DNA, 25 bp, Homo sapien
gacttctgataagcaatctcaatgg

SEQ ID NO: 4960206 - DNA, 25 bp, Homo sapien
gcaatcaaaataacctcatcagggc

SEQ ID NO: 4960207 - DNA, 25 bp, Homo sapien
tactgactggcaaaggaagtctgcc

SEQ ID NO: 4960208 - DNA, 25 bp, Homo sapien
tggcaaggataggtgcagagaaaca

SEQ ID NO: 4960209 - DNA, 25 bp, Homo sapien
agcctcctcagggtttaaagtcttg

SEQ ID NO: 4960210 - DNA, 25 bp, Homo sapien
gtccttagggcacaagctccagatg

SEQ ID NO: 4960211 - DNA, 25 bp, Homo sapien
tgatttccaccacaagtcacaaagt

SEQ ID NO: 4960212 - DNA, 25 bp, Homo sapien
gaaatggcacactgacataaggacc

SEQ ID NO: 4960213 - DNA, 25 bp, Homo sapien
cccagaatgcacctgaaaggctgtc

SEQ ID NO: 4960214 - DNA, 25 bp, Homo sapien
cacaagtcacaaagttgctatcact

SEQ ID NO: 4960215 - DNA, 25 bp, Homo sapien
taaagctatcgaaaggcactgctgc

SEQ ID NO: 4960216 - DNA, 25 bp, Homo sapien
caaggctgattcaatggcttccacc

SEQ ID NO: 4960217 - DNA, 25 bp, Homo sapien
catgtacaggacagagatagcacag

SEQ ID NO: 4960218 - DNA, 25 bp, Homo sapien
ttcaggctgctcacgtagttgcggt

SEQ ID NO: 4960219 - DNA, 25 bp, Homo sapien
ctagaacgagttctgcctcttggag

SEQ ID NO: 4960220 - DNA, 25 bp, Homo sapien
aagcaatgactgaagtgaaatctcc

SEQ ID NO: 4960221 - DNA, 25 bp, Homo sapien
aggaatcagccatgcgtccagaacc

SEQ ID NO: 4960222 - DNA, 25 bp, Homo sapien
cttttaaaggatgatcttgcaggca

SEQ ID NO: 4960223 - DNA, 25 bp, Homo sapien
ttagaccaggtcaatctcttggggg

SEQ ID NO: 4960224 - DNA, 25 bp, Homo sapien
tagaccaggtcaatctcttgggggt

SEQ ID NO: 4960225 - DNA, 25 bp, Homo sapien
agaccaggtcaatctcttgggggtg

SEQ ID NO: 4960226 - DNA, 25 bp, Homo sapien
gaccaggtcaatctcttgggggtgg

SEQ ID NO: 4960227 - DNA, 25 bp, Homo sapien
gtccacaagaagctcataaatcaag

SEQ ID NO: 4960228 - DNA, 25 bp, Homo sapien
cagtgaacgttttggtcacgagagc

SEQ ID NO: 4960229 - DNA, 25 bp, Homo sapien
caagatatgcctactaatgtccaca

SEQ ID NO: 4960230 - DNA, 25 bp, Homo sapien
gactcaaggacaagccctgctgatg

SEQ ID NO: 4960231 - DNA, 25 bp, Homo sapien
tgccacaactgattccaggtcccca

SEQ ID NO: 4960232 - DNA, 25 bp, Homo sapien
tccaggtttccagtagttgatcttc

SEQ ID NO: 4960233 - DNA, 25 bp, Homo sapien
gagcccacagatacctagctccagg

SEQ ID NO: 4960234 - DNA, 25 bp, Homo sapien
tctgactgcattacaagtgtccttg

SEQ ID NO: 4960235 - DNA, 25 bp, Homo sapien
cattcctacactgaaaggtgccagc

SEQ ID NO: 4960236 - DNA, 25 bp, Homo sapien
tgggcacttgcagtcacctaatggc

SEQ ID NO: 4960237 - DNA, 25 bp, Homo sapien
tggtgccaaaagtgacaaactagta

SEQ ID NO: 4960238 - DNA, 25 bp, Homo sapien
cattatggaagaatggatctgcaca

SEQ ID NO: 4960239 - DNA, 25 bp, Homo sapien
agtggttgacattacaggctctgag

SEQ ID NO: 4960240 - DNA, 25 bp, Homo sapien
ggttgagaccatttgagccctgcag

SEQ ID NO: 4960241 - DNA, 25 bp, Homo sapien
tagagtcctcatgacgtactcagca

SEQ ID NO: 4960242 - DNA, 25 bp, Homo sapien
tccctgcgtcgtggtaagacttcat

SEQ ID NO: 4960243 - DNA, 25 bp, Homo sapien
caggagccaccacgcccaggctaca

SEQ ID NO: 4960244 - DNA, 25 bp, Homo sapien
gggctccagcgatccacccaccttg

SEQ ID NO: 4960245 - DNA, 25 bp, Homo sapien
aggcaggagccaccacgcccaggct

SEQ ID NO: 4960246 - DNA, 25 bp, Homo sapien
tggcctcccaaagtggtgagattac

SEQ ID NO: 4960247 - DNA, 25 bp, Homo sapien
tatcacaggagacaaaccgaagggt

SEQ ID NO: 4960248 - DNA, 25 bp, Homo sapien
aatgcttactgcatggaagggacca

SEQ ID NO: 4960249 - DNA, 25 bp, Homo sapien
caaaacaatgccgtagttcagagga

SEQ ID NO: 4960250 - DNA, 25 bp, Homo sapien
gagtggcaaggacagttctaaaaac

SEQ ID NO: 4960251 - DNA, 25 bp, Homo sapien
cagtccaaagctcaatgtctttcca

SEQ ID NO: 4960252 - DNA, 25 bp, Homo sapien
ttttggccagatgcacgtactgccc

SEQ ID NO: 4960253 - DNA, 25 bp, Homo sapien
caaagctcaatgtctttccagcaga

SEQ ID NO: 4960254 - DNA, 25 bp, Homo sapien
gatgcacgtactgcccagtccaaag

SEQ ID NO: 4960255 - DNA, 25 bp, Homo sapien
tccaactgccatacatcccatccga

SEQ ID NO: 4960256 - DNA, 25 bp, Homo sapien
catacatcccatccgatcaacactg

SEQ ID NO: 4960257 - DNA, 25 bp, Homo sapien
tgccatacatcccatccgatcaaca

SEQ ID NO: 4960258 - DNA, 25 bp, Homo sapien
catcccatccgatcaacactgtcat

SEQ ID NO: 4960259 - DNA, 25 bp, Homo sapien
gaaagctaagtccattagaacaggg

SEQ ID NO: 4960260 - DNA, 25 bp, Homo sapien
agtgtgtaccttttgaccttcatag

SEQ ID NO: 4960261 - DNA, 25 bp, Homo sapien
tagaacagggatcttccaagtccta

SEQ ID NO: 4960262 - DNA, 25 bp, Homo sapien
aaatttacacacctcacagagtcag

SEQ ID NO: 4960263 - DNA, 25 bp, Homo sapien
tcaactagttagtggaggttaccca

SEQ ID NO: 4960264 - DNA, 25 bp, Homo sapien
gggtgagtagctggctccatcagac

SEQ ID NO: 4960265 - DNA, 25 bp, Homo sapien
gagccacaaaagactaaagatcatg

SEQ ID NO: 4960266 - DNA, 25 bp, Homo sapien
gatcatgaattcctaacgctaaaca

SEQ ID NO: 4960267 - DNA, 25 bp, Homo sapien
caggtgatgcaccctgtgttggcct

SEQ ID NO: 4960268 - DNA, 25 bp, Homo sapien
tgatgcaccctgtgttggcctccaa

SEQ ID NO: 4960269 - DNA, 25 bp, Homo sapien
tcaggtgatgcaccctgtgttggcc

SEQ ID NO: 4960270 - DNA, 25 bp, Homo sapien
gcaccctgtgttggcctccaaaagt

SEQ ID NO: 4960271 - DNA, 25 bp, Homo sapien
gaacagggccccatacctatgctga

SEQ ID NO: 4960272 - DNA, 25 bp, Homo sapien
agcttagctatgctaaattccaggg

SEQ ID NO: 4960273 - DNA, 25 bp, Homo sapien
ttcttaaagtaatgtggaacagggc

SEQ ID NO: 4960274 - DNA, 25 bp, Homo sapien
taataaacctctagtagctgtaagt

SEQ ID NO: 4960275 - DNA, 25 bp, Homo sapien
cagaggaggctaatttttgagacct

SEQ ID NO: 4960276 - DNA, 25 bp, Homo sapien
gcagaggaggctaatttttgagacc

SEQ ID NO: 4960277 - DNA, 25 bp, Homo sapien
gaggaggctaatttttgagaccttg

SEQ ID NO: 4960278 - DNA, 25 bp, Homo sapien
agaggaggctaatttttgagacctt

SEQ ID NO: 4960279 - DNA, 25 bp, Homo sapien
gacctttgacctcagagagccggaa

SEQ ID NO: 4960280 - DNA, 25 bp, Homo sapien
agcgttcggcttcctattgcgtgca

SEQ ID NO: 4960281 - DNA, 25 bp, Homo sapien
caaagtcggataacaggctgacacc

SEQ ID NO: 4960282 - DNA, 25 bp, Homo sapien
tgcgtgcaagcaaatagatccagtc

SEQ ID NO: 4960283 - DNA, 25 bp, Homo sapien
acataacagaggcagacggtgagag

SEQ ID NO: 4960284 - DNA, 25 bp, Homo sapien
ggaaataatgcagggccaagatcct

SEQ ID NO: 4960285 - DNA, 25 bp, Homo sapien
tggagagtcaggtacacataacaga

SEQ ID NO: 4960286 - DNA, 25 bp, Homo sapien
taagtcagggaccaagtgatgccac

SEQ ID NO: 4960287 - DNA, 25 bp, Homo sapien
tattcagcctggtatgtgagtgact

SEQ ID NO: 4960288 - DNA, 25 bp, Homo sapien
tttaaaacagccatcaggaaccggc

SEQ ID NO: 4960289 - DNA, 25 bp, Homo sapien
catgcttgtcttgtgggaaatattc

SEQ ID NO: 4960290 - DNA, 25 bp, Homo sapien
gactgaaatgcaactccgtggaaac

SEQ ID NO: 4960291 - DNA, 25 bp, Homo sapien
ctgctctatcccagatcctgtgaaa

SEQ ID NO: 4960292 - DNA, 25 bp, Homo sapien
cctctgctctatcccagatcctgtg

SEQ ID NO: 4960293 - DNA, 25 bp, Homo sapien
cacttgcaagccctctgctctatcc

SEQ ID NO: 4960294 - DNA, 25 bp, Homo sapien
attcaaatctaactgtggcttatac

SEQ ID NO: 4960295 - DNA, 25 bp, Homo sapien
atgattaagatccacgtgcaggcct

SEQ ID NO: 4960296 - DNA, 25 bp, Homo sapien
gatgattaagatccacgtgcaggcc

SEQ ID NO: 4960297 - DNA, 25 bp, Homo sapien
tgctgtggtcccactctgagcacca

SEQ ID NO: 4960298 - DNA, 25 bp, Homo sapien
ggaggaaagctgctgtggtcccact

SEQ ID NO: 4960299 - DNA, 25 bp, Homo sapien
aaagctgctgtggtcccactctgag

SEQ ID NO: 4960300 - DNA, 25 bp, Homo sapien
ctgacaagtatgggtcctgggggag

SEQ ID NO: 4960301 - DNA, 25 bp, Homo sapien
tttacagactttcgaagtgtttctg

SEQ ID NO: 4960302 - DNA, 25 bp, Homo sapien
ctttacagactttcgaagtgtttct

SEQ ID NO: 4960303 - DNA, 25 bp, Homo sapien
tcactttacagactttcgaagtgtt

SEQ ID NO: 4960304 - DNA, 25 bp, Homo sapien
cactttacagactttcgaagtgttt

SEQ ID NO: 4960305 - DNA, 25 bp, Homo sapien
gtgccaatggtctcttgcaacaact

SEQ ID NO: 4960306 - DNA, 25 bp, Homo sapien
cagacccagcaaatgcaacctagtg

SEQ ID NO: 4960307 - DNA, 25 bp, Homo sapien
gcagcccagtttatcagacagaacc

SEQ ID NO: 4960308 - DNA, 25 bp, Homo sapien
tggaatctgccatccatttccagcc

SEQ ID NO: 4960309 - DNA, 25 bp, Homo sapien
ctgctgattgccccatcagtcttac

SEQ ID NO: 4960310 - DNA, 25 bp, Homo sapien
cccgcttgtgagtggggtcctacta

SEQ ID NO: 4960311 - DNA, 25 bp, Homo sapien
ggttatactgccacaccttactgct

SEQ ID NO: 4960312 - DNA, 25 bp, Homo sapien
gtttcctgtgcaactggttatactg

SEQ ID NO: 4960313 - DNA, 25 bp, Homo sapien
gagccaatacttgggcccgcttgtg

SEQ ID NO: 4960314 - DNA, 25 bp, Homo sapien
cctttcttctggtccaccctcaggc

SEQ ID NO: 4960315 - DNA, 25 bp, Homo sapien
tttcctttcttctggtccaccctca

SEQ ID NO: 4960316 - DNA, 25 bp, Homo sapien
tttcttctggtccaccctcaggcaa

SEQ ID NO: 4960317 - DNA, 25 bp, Homo sapien
ttcttctggtccaccctcaggcaag

SEQ ID NO: 4960318 - DNA, 25 bp, Homo sapien
cactctctagtaaatcctggcataa

SEQ ID NO: 4960319 - DNA, 25 bp, Homo sapien
gccgcttgctggttgagttgacact

SEQ ID NO: 4960320 - DNA, 25 bp, Homo sapien
accacaagttaagccgaaggagccg

SEQ ID NO: 4960321 - DNA, 25 bp, Homo sapien
tgagcactgctaagagaacgcagcc

SEQ ID NO: 4960322 - DNA, 25 bp, Homo sapien
acagcataggtagattcctccgact

SEQ ID NO: 4960323 - DNA, 25 bp, Homo sapien
ttccacaagtgatgagacaatctcc

SEQ ID NO: 4960324 - DNA, 25 bp, Homo sapien
cataggtagattcctccgacttcat

SEQ ID NO: 4960325 - DNA, 25 bp, Homo sapien
cacaagtgatgagacaatctccaca

SEQ ID NO: 4960326 - DNA, 25 bp, Homo sapien
tcatttgcagtaggctgggtaaagc

SEQ ID NO: 4960327 - DNA, 25 bp, Homo sapien
gcaggcagcttctagttatcattct

SEQ ID NO: 4960328 - DNA, 25 bp, Homo sapien
aacgtcagactaggtaaagcaggca

SEQ ID NO: 4960329 - DNA, 25 bp, Homo sapien
tcttgacagcaaagatcggctgact

SEQ ID NO: 4960330 - DNA, 25 bp, Homo sapien
caatctccaaaatagggcagagaat

SEQ ID NO: 4960331 - DNA, 25 bp, Homo sapien
ccaagaacggtgaagaacctctcaa

SEQ ID NO: 4960332 - DNA, 25 bp, Homo sapien
tgagacactaatggcaccgtgaacc

SEQ ID NO: 4960333 - DNA, 25 bp, Homo sapien
taggaagggttctttttcacagagc

SEQ ID NO: 4960334 - DNA, 25 bp, Homo sapien
gtctcactactagtggaaggtcagg

SEQ ID NO: 4960335 - DNA, 25 bp, Homo sapien
gaccggaccggcagatggtcagctc

SEQ ID NO: 4960336 - DNA, 25 bp, Homo sapien
ggtcagctccccacattttatgcct

SEQ ID NO: 4960337 - DNA, 25 bp, Homo sapien
gcagcagcaagagctggattggtct

SEQ ID NO: 4960338 - DNA, 25 bp, Homo sapien
caaatgagcagggtatagtggccca

SEQ ID NO: 4960339 - DNA, 25 bp, Homo sapien
tctggagtacaagaagctaactgct

SEQ ID NO: 4960340 - DNA, 25 bp, Homo sapien
tagatgaccctttgcatgctgggaa

SEQ ID NO: 4960341 - DNA, 25 bp, Homo sapien
tacaacagaagcaactacacaggtg

SEQ ID NO: 4960342 - DNA, 25 bp, Homo sapien
aaaggaaagttctgcgccctgctca

SEQ ID NO: 4960343 - DNA, 25 bp, Homo sapien
cagtgacaagatacaaggtggccgt

SEQ ID NO: 4960344 - DNA, 25 bp, Homo sapien
gactagcggaactgcaaagggccta

SEQ ID NO: 4960345 - DNA, 25 bp, Homo sapien
tactggaaggcatgcatcaccggat

SEQ ID NO: 4960346 - DNA, 25 bp, Homo sapien
gcctcatcttccctagtagctgggt

SEQ ID NO: 4960347 - DNA, 25 bp, Homo sapien
aggtatgcaccaccatgcctggcta

SEQ ID NO: 4960348 - DNA, 25 bp, Homo sapien
tcatcttccctagtagctgggttac

SEQ ID NO: 4960349 - DNA, 25 bp, Homo sapien
atttttatatttacagtagagatgg

SEQ ID NO: 4960350 - DNA, 25 bp, Homo sapien
atcattgctcctctgggtcaaaatt

SEQ ID NO: 4960351 - DNA, 25 bp, Homo sapien
agggaaggttaggaggtggctacat

SEQ ID NO: 4960352 - DNA, 25 bp, Homo sapien
gaaggttaggaggtggctacatcat

SEQ ID NO: 4960353 - DNA, 25 bp, Homo sapien
cattgctcctctgggtcaaaattac

SEQ ID NO: 4960354 - DNA, 25 bp, Homo sapien
cttggcgtctttccttgaaatagga

SEQ ID NO: 4960355 - DNA, 25 bp, Homo sapien
gcgtctttccttgaaataggaaggc

SEQ ID NO: 4960356 - DNA, 25 bp, Homo sapien
tggcgtctttccttgaaataggaag

SEQ ID NO: 4960357 - DNA, 25 bp, Homo sapien
gtctttccttgaaataggaaggcag

SEQ ID NO: 4960358 - DNA, 25 bp, Homo sapien
tccccagagaaggtaagagcgcaca

SEQ ID NO: 4960359 - DNA, 25 bp, Homo sapien
gatctcgcaggaaagaaacgtgccc

SEQ ID NO: 4960360 - DNA, 25 bp, Homo sapien
cacacgctggaaaacggtgggagca

SEQ ID NO: 4960361 - DNA, 25 bp, Homo sapien
tgcaaggactgtgttcagcgccacc

SEQ ID NO: 4960362 - DNA, 25 bp, Homo sapien
ctgctgatgagacctttcaatgttc

SEQ ID NO: 4960363 - DNA, 25 bp, Homo sapien
gatgagacctttcaatgttcaatgc

SEQ ID NO: 4960364 - DNA, 25 bp, Homo sapien
tgagacctttcaatgttcaatgcac

SEQ ID NO: 4960365 - DNA, 25 bp, Homo sapien
gctgatgagacctttcaatgttcaa

SEQ ID NO: 4960366 - DNA, 25 bp, Homo sapien
gatgatcaaatgtagccctggccct

SEQ ID NO: 4960367 - DNA, 25 bp, Homo sapien
cagcagcctggatgatcaaatgtag

SEQ ID NO: 4960368 - DNA, 25 bp, Homo sapien
caagtgaatgatatggcagcagcct

SEQ ID NO: 4960369 - DNA, 25 bp, Homo sapien
tgaaagactggactcctgggtcact

SEQ ID NO: 4960370 - DNA, 25 bp, Homo sapien
accatctattgcgttgacctgcatt

SEQ ID NO: 4960371 - DNA, 25 bp, Homo sapien
caccatctattgcgttgacctgcat

SEQ ID NO: 4960372 - DNA, 25 bp, Homo sapien
tccagaaggtcaggtaaggtcttca

SEQ ID NO: 4960373 - DNA, 25 bp, Homo sapien
caagtgacttgtggcccggattgca

SEQ ID NO: 4960374 - DNA, 25 bp, Homo sapien
cctggtgttcactatcctgggataa

SEQ ID NO: 4960375 - DNA, 25 bp, Homo sapien
tcacatgggaggatatggccattcc

SEQ ID NO: 4960376 - DNA, 25 bp, Homo sapien
ctccaataattcactggccttggcc

SEQ ID NO: 4960377 - DNA, 25 bp, Homo sapien
gttgtggcaacattaatttgcatgc

SEQ ID NO: 4960378 - DNA, 25 bp, Homo sapien
tccaataattcactggccttggcct

SEQ ID NO: 4960379 - DNA, 25 bp, Homo sapien
ggcaacattaatttgcatgctgaaa

SEQ ID NO: 4960380 - DNA, 25 bp, Homo sapien
atgctgatcaaatacccctgtagcc

SEQ ID NO: 4960381 - DNA, 25 bp, Homo sapien
ttaaggtactgacgcaggatgctga

SEQ ID NO: 4960382 - DNA, 25 bp, Homo sapien
tcaaatacccctgtagccaccttta

SEQ ID NO: 4960383 - DNA, 25 bp, Homo sapien
aggtactgacgcaggatgctgacaa

SEQ ID NO: 4960384 - DNA, 25 bp, Homo sapien
attcttcttcaaatcgcctttcaac

SEQ ID NO: 4960385 - DNA, 25 bp, Homo sapien
ctattcttcttcaaatcgcctttca

SEQ ID NO: 4960386 - DNA, 25 bp, Homo sapien
tattcttcttcaaatcgcctttcaa

SEQ ID NO: 4960387 - DNA, 25 bp, Homo sapien
gtgcacaaaggaaggtccggcacca

SEQ ID NO: 4960388 - DNA, 25 bp, Homo sapien
cacaaaggaaggtccggcaccacct

SEQ ID NO: 4960389 - DNA, 25 bp, Homo sapien
tgcacaaaggaaggtccggcaccac

SEQ ID NO: 4960390 - DNA, 25 bp, Homo sapien
acaaaggaaggtccggcaccacctg

SEQ ID NO: 4960391 - DNA, 25 bp, Homo sapien
cgtatggtctttcccggtctttgct

SEQ ID NO: 4960392 - DNA, 25 bp, Homo sapien
aagatgacacctgttgtcacccctg

SEQ ID NO: 4960393 - DNA, 25 bp, Homo sapien
tttgctgtcagtactctactcccag

SEQ ID NO: 4960394 - DNA, 25 bp, Homo sapien
cagtactctactcccagggtttcca

SEQ ID NO: 4960395 - DNA, 25 bp, Homo sapien
ttccggccagcacagataacactat

SEQ ID NO: 4960396 - DNA, 25 bp, Homo sapien
tgttctgcaatcagggccaggacac

SEQ ID NO: 4960397 - DNA, 25 bp, Homo sapien
acaagcccgtctgcccaagtttgag

SEQ ID NO: 4960398 - DNA, 25 bp, Homo sapien
tggttttaagcagcctttccggcca

SEQ ID NO: 4960399 - DNA, 25 bp, Homo sapien
atgagcacataaggcagttatgtcc

SEQ ID NO: 4960400 - DNA, 25 bp, Homo sapien
caatgagcacataaggcagttatgt

SEQ ID NO: 4960401 - DNA, 25 bp, Homo sapien
agcaatgagcacataaggcagttat

SEQ ID NO: 4960402 - DNA, 25 bp, Homo sapien
gagcacataaggcagttatgtccca

SEQ ID NO: 4960403 - DNA, 25 bp, Homo sapien
gatcctgcttctaggccatcattca

SEQ ID NO: 4960404 - DNA, 25 bp, Homo sapien
gatggtccctccctcagtacagatc

SEQ ID NO: 4960405 - DNA, 25 bp, Homo sapien
attcagatgagatggaacgatggtc

SEQ ID NO: 4960406 - DNA, 25 bp, Homo sapien
agtacagtgccctgaactatcaacc

SEQ ID NO: 4960407 - DNA, 25 bp, Homo sapien
gtacaaggtacccagcaagctccat

SEQ ID NO: 4960408 - DNA, 25 bp, Homo sapien
gagactggaccaaatgctacctggg

SEQ ID NO: 4960409 - DNA, 25 bp, Homo sapien
catgctatgggtccagcggcttcag

SEQ ID NO: 4960410 - DNA, 25 bp, Homo sapien
ctcaagaggcagtggtaaacaggac

SEQ ID NO: 4960411 - DNA, 25 bp, Homo sapien
taagcactggttgtcccctgcatgc

SEQ ID NO: 4960412 - DNA, 25 bp, Homo sapien
tcaatgactccttctggacaagggc

SEQ ID NO: 4960413 - DNA, 25 bp, Homo sapien
tggaatgctccatctcagtccttgt

SEQ ID NO: 4960414 - DNA, 25 bp, Homo sapien
cagacctcgtcctcaagactcaagt

SEQ ID NO: 4960415 - DNA, 25 bp, Homo sapien
tagtgtccctccaataggatgctac

SEQ ID NO: 4960416 - DNA, 25 bp, Homo sapien
cccaagaccctgaaatcgagagctt

SEQ ID NO: 4960417 - DNA, 25 bp, Homo sapien
gctactgtcttctgatctattacca

SEQ ID NO: 4960418 - DNA, 25 bp, Homo sapien
aataacccaagaccctgaaatcgag

SEQ ID NO: 4960419 - DNA, 25 bp, Homo sapien
gccaccaaagcctgtaaagcctggc

SEQ ID NO: 4960420 - DNA, 25 bp, Homo sapien
ggccaccaaagcctgtaaagcctgg

SEQ ID NO: 4960421 - DNA, 25 bp, Homo sapien
ccaccaaagcctgtaaagcctggcc

SEQ ID NO: 4960422 - DNA, 25 bp, Homo sapien
tgacacgtaggtataaccctgggac

SEQ ID NO: 4960423 - DNA, 25 bp, Homo sapien
ccagtggaattaggagtgacttctc

SEQ ID NO: 4960424 - DNA, 25 bp, Homo sapien
gaagagatgtgattccccaaaagga

SEQ ID NO: 4960425 - DNA, 25 bp, Homo sapien
ggaaggcacccgacctgcttttcaa

SEQ ID NO: 4960426 - DNA, 25 bp, Homo sapien
aaaagcagccatatatgtgtcttca

SEQ ID NO: 4960427 - DNA, 25 bp, Homo sapien
tcatgggactttcaccccatatcac

SEQ ID NO: 4960428 - DNA, 25 bp, Homo sapien
cgatagttgacctttcacttgatat

SEQ ID NO: 4960429 - DNA, 25 bp, Homo sapien
tagttgacctttcacttgatattgt

SEQ ID NO: 4960430 - DNA, 25 bp, Homo sapien
ctacacgatggagagcaagggcgat

SEQ ID NO: 4960431 - DNA, 25 bp, Homo sapien
tcaaagatttctagctcatgtacat

SEQ ID NO: 4960432 - DNA, 25 bp, Homo sapien
tacttggtggtttcacacactggca

SEQ ID NO: 4960433 - DNA, 25 bp, Homo sapien
tgccccaagaataacacaaccatcg

SEQ ID NO: 4960434 - DNA, 25 bp, Homo sapien
ttagtgggtggccagctccacaagc

SEQ ID NO: 4960435 - DNA, 25 bp, Homo sapien
cttcactttagtgggtggccagctc

SEQ ID NO: 4960436 - DNA, 25 bp, Homo sapien
tttagtgggtggccagctccacaag

SEQ ID NO: 4960437 - DNA, 25 bp, Homo sapien
acatgccttcactttagtgggtggc

SEQ ID NO: 4960438 - DNA, 25 bp, Homo sapien
aaaaagtcactggttaccctctgtg

SEQ ID NO: 4960439 - DNA, 25 bp, Homo sapien
tcactggttaccctctgtgcaccag

SEQ ID NO: 4960440 - DNA, 25 bp, Homo sapien
aaagtcactggttaccctctgtgca

SEQ ID NO: 4960441 - DNA, 25 bp, Homo sapien
ctggttaccctctgtgcaccagtaa

SEQ ID NO: 4960442 - DNA, 25 bp, Homo sapien
gatgaatcaattcacagtccacaaa

SEQ ID NO: 4960443 - DNA, 25 bp, Homo sapien
ccaccctctggactgatgaatcaat

SEQ ID NO: 4960444 - DNA, 25 bp, Homo sapien
ttctgctcagatttcggcttcagcc

SEQ ID NO: 4960445 - DNA, 25 bp, Homo sapien
ctgctcagatttcggcttcagccac

SEQ ID NO: 4960446 - DNA, 25 bp, Homo sapien
caatgctccttgacactcgttttct

SEQ ID NO: 4960447 - DNA, 25 bp, Homo sapien
gcaaatatagcatgctcctcctcat

SEQ ID NO: 4960448 - DNA, 25 bp, Homo sapien
gaatagaaataggagatataaggcc

SEQ ID NO: 4960449 - DNA, 25 bp, Homo sapien
gatataaggcctaaagcaaatatag

SEQ ID NO: 4960450 - DNA, 25 bp, Homo sapien
gtttgcttattcacagaagggctgg

SEQ ID NO: 4960451 - DNA, 25 bp, Homo sapien
cctggctgaggtagacgtttctgaa

SEQ ID NO: 4960452 - DNA, 25 bp, Homo sapien
tggtcaccaaacaaggcggctcagt

SEQ ID NO: 4960453 - DNA, 25 bp, Homo sapien
tgccatggcataataaataacgagt

SEQ ID NO: 4960454 - DNA, 25 bp, Homo sapien
gggagccagaagtccataagaggca

SEQ ID NO: 4960455 - DNA, 25 bp, Homo sapien
ataagaggcaatgcaccaatctgga

SEQ ID NO: 4960456 - DNA, 25 bp, Homo sapien
agaggcaatgcaccaatctggagat

SEQ ID NO: 4960457 - DNA, 25 bp, Homo sapien
gccagggagccagaagtccataaga

SEQ ID NO: 4960458 - DNA, 25 bp, Homo sapien
tctttggccagcttaggtaacaaca

SEQ ID NO: 4960459 - DNA, 25 bp, Homo sapien
cagggaccctacactgctgtcaggt

SEQ ID NO: 4960460 - DNA, 25 bp, Homo sapien
tctaaaggaactgatcacactcggc

SEQ ID NO: 4960461 - DNA, 25 bp, Homo sapien
cacactcggccttggattttagata

SEQ ID NO: 4960462 - DNA, 25 bp, Homo sapien
aaatgggatctctataaccttttca

SEQ ID NO: 4960463 - DNA, 25 bp, Homo sapien
tctggggaagcattagtctgtgcaa

SEQ ID NO: 4960464 - DNA, 25 bp, Homo sapien
gtttgaggataagccaaactcttgc

SEQ ID NO: 4960465 - DNA, 25 bp, Homo sapien
ataaccttttcatgtgcgcagaatc

SEQ ID NO: 4960466 - DNA, 25 bp, Homo sapien
gaattggatgtctgataattttcca

SEQ ID NO: 4960467 - DNA, 25 bp, Homo sapien
aaatatcagaattggatgtctgata

SEQ ID NO: 4960468 - DNA, 25 bp, Homo sapien
ggatgtctgataattttccaaactc

SEQ ID NO: 4960469 - DNA, 25 bp, Homo sapien
cagaattggatgtctgataattttc

SEQ ID NO: 4960470 - DNA, 25 bp, Homo sapien
ccgaagcgccctgctagctgcccgg

SEQ ID NO: 4960471 - DNA, 25 bp, Homo sapien
ctgccgccgtcgctgaactttccct

SEQ ID NO: 4960472 - DNA, 25 bp, Homo sapien
tgccgccgtcgctgaactttccctc

SEQ ID NO: 4960473 - DNA, 25 bp, Homo sapien
gcgccctgctagctgcccggcccgg

SEQ ID NO: 4960474 - DNA, 25 bp, Homo sapien
gacaccaggggcggtttacgcgtga

SEQ ID NO: 4960475 - DNA, 25 bp, Homo sapien
accactgtgggtaagcgatgtctgc

SEQ ID NO: 4960476 - DNA, 25 bp, Homo sapien
gtaactctcacaccgcaccactgtg

SEQ ID NO: 4960477 - DNA, 25 bp, Homo sapien
ggtcaggaacccctgtaactctcac

SEQ ID NO: 4960478 - DNA, 25 bp, Homo sapien
tgggtaataaaagatccaccgccac

SEQ ID NO: 4960479 - DNA, 25 bp, Homo sapien
ctttgagaactttgacccagagcca

SEQ ID NO: 4960480 - DNA, 25 bp, Homo sapien
tcttagatgacagcaaatgtgccgt

SEQ ID NO: 4960481 - DNA, 25 bp, Homo sapien
ggaagaggattgttgtacccaagca

SEQ ID NO: 4960482 - DNA, 25 bp, Homo sapien
tagagactgctcattagacggaaga

SEQ ID NO: 4960483 - DNA, 25 bp, Homo sapien
ctatgctgattcgcggttgacatca

SEQ ID NO: 4960484 - DNA, 25 bp, Homo sapien
gctgattcgcggttgacatcacagg

SEQ ID NO: 4960485 - DNA, 25 bp, Homo sapien
tatgctgattcgcggttgacatcac

SEQ ID NO: 4960486 - DNA, 25 bp, Homo sapien
tgctgattcgcggttgacatcacag

SEQ ID NO: 4960487 - DNA, 25 bp, Homo sapien
taagtcagaagctgtcacacgtaca

SEQ ID NO: 4960488 - DNA, 25 bp, Homo sapien
tgccaccaacgaactcattccaaga

SEQ ID NO: 4960489 - DNA, 25 bp, Homo sapien
tgtgggaaataatgccttatcttga

SEQ ID NO: 4960490 - DNA, 25 bp, Homo sapien
tagcactggctaggtcatcgtctct

SEQ ID NO: 4960491 - DNA, 25 bp, Homo sapien
ttaaacacgtatcagccgggagcag

SEQ ID NO: 4960492 - DNA, 25 bp, Homo sapien
tatgttacattactagcttgcttgg

SEQ ID NO: 4960493 - DNA, 25 bp, Homo sapien
cagccaatgaagtaaattaagtgac

SEQ ID NO: 4960494 - DNA, 25 bp, Homo sapien
gcttggagtgctcacatgaaagtct

SEQ ID NO: 4960495 - DNA, 25 bp, Homo sapien
tgtatcactgagtaatcctggccca

SEQ ID NO: 4960496 - DNA, 25 bp, Homo sapien
tcctggcccataaagtaatcataca

SEQ ID NO: 4960497 - DNA, 25 bp, Homo sapien
gagatattaaacagtgcttcgaagc

SEQ ID NO: 4960498 - DNA, 25 bp, Homo sapien
gctgttctgtgcataagtaggagat

SEQ ID NO: 4960499 - DNA, 25 bp, Homo sapien
gacagactcatttcctttgagggct

SEQ ID NO: 4960500 - DNA, 25 bp, Homo sapien
gcctatgggcagtgtcagactgacc

SEQ ID NO: 4960501 - DNA, 25 bp, Homo sapien
gagtacatcactattaggcctatgg

SEQ ID NO: 4960502 - DNA, 25 bp, Homo sapien
ccataaagtgggaggcttgtaaaca

SEQ ID NO: 4960503 - DNA, 25 bp, Homo sapien
tctgcttctagtcttgtgtattttc

SEQ ID NO: 4960504 - DNA, 25 bp, Homo sapien
tgtgggtgtttgaatgctgctgttt

SEQ ID NO: 4960505 - DNA, 25 bp, Homo sapien
tgcagtgcagggtgagtcggtgtgg

SEQ ID NO: 4960506 - DNA, 25 bp, Homo sapien
gaggttaatgagtttctgtttagtc

SEQ ID NO: 4960507 - DNA, 25 bp, Homo sapien
tatgagagtctagatgggcacagca

SEQ ID NO: 4960508 - DNA, 25 bp, Homo sapien
gaggagctgccctattctggtgtcc

SEQ ID NO: 4960509 - DNA, 25 bp, Homo sapien
ctggccgggctggacatgagctctt

SEQ ID NO: 4960510 - DNA, 25 bp, Homo sapien
gcaggagccctgaacctttctggga

SEQ ID NO: 4960511 - DNA, 25 bp, Homo sapien
gagttctaactccttggttgcttaa

SEQ ID NO: 4960512 - DNA, 25 bp, Homo sapien
tcccaagagtctgagaagctatttc

SEQ ID NO: 4960513 - DNA, 25 bp, Homo sapien
cagtgattgccatggcacagagccg

SEQ ID NO: 4960514 - DNA, 25 bp, Homo sapien
cagctcgggcctgtgtaattgtagg

SEQ ID NO: 4960515 - DNA, 25 bp, Homo sapien
aaagactcacatcgataggcccctg

SEQ ID NO: 4960516 - DNA, 25 bp, Homo sapien
gacagcccattgagacagtggacta

SEQ ID NO: 4960517 - DNA, 25 bp, Homo sapien
cagtggactagctcaaggcctcgag

SEQ ID NO: 4960518 - DNA, 25 bp, Homo sapien
cattagactgtagccaagggacagc

SEQ ID NO: 4960519 - DNA, 25 bp, Homo sapien
cgtgaaggacgtaaggtcccttgat

SEQ ID NO: 4960520 - DNA, 25 bp, Homo sapien
tgataggagcggttctccagagaag

SEQ ID NO: 4960521 - DNA, 25 bp, Homo sapien
gagaagctggattgaccaagacagt

SEQ ID NO: 4960522 - DNA, 25 bp, Homo sapien
cagtgggggaaatccgtgaaggacg

SEQ ID NO: 4960523 - DNA, 25 bp, Homo sapien
agtgggtctggtccatagagctgtt

SEQ ID NO: 4960524 - DNA, 25 bp, Homo sapien
ggtctggtccatagagctgtttgga

SEQ ID NO: 4960525 - DNA, 25 bp, Homo sapien
tggtccatagagctgtttggaatca

SEQ ID NO: 4960526 - DNA, 25 bp, Homo sapien
tgggtctggtccatagagctgtttg

SEQ ID NO: 4960527 - DNA, 25 bp, Homo sapien
agtactgctggtgtgaattctccca

SEQ ID NO: 4960528 - DNA, 25 bp, Homo sapien
agtccaagggaacaagtcctgccgg

SEQ ID NO: 4960529 - DNA, 25 bp, Homo sapien
caaagagccaaatgtacctcccagg

SEQ ID NO: 4960530 - DNA, 25 bp, Homo sapien
tgatgccaccatgcaagatccaaga

SEQ ID NO: 4960531 - DNA, 25 bp, Homo sapien
tcaatgtgaccatagactaaacatg

SEQ ID NO: 4960532 - DNA, 25 bp, Homo sapien
tgccgaaatcttcacagcaccgcag

SEQ ID NO: 4960533 - DNA, 25 bp, Homo sapien
actaaacatggccatgagtgcagga

SEQ ID NO: 4960534 - DNA, 25 bp, Homo sapien
gtccctgaaactctctagtgtcaat

SEQ ID NO: 4960535 - DNA, 25 bp, Homo sapien
tgctcaaggacggagactcacagga

SEQ ID NO: 4960536 - DNA, 25 bp, Homo sapien
ggttggcaactctctgcagcaacag

SEQ ID NO: 4960537 - DNA, 25 bp, Homo sapien
actcacaggatatggggttggcaac

SEQ ID NO: 4960538 - DNA, 25 bp, Homo sapien
gaaagagtgattagatacttggtgc

SEQ ID NO: 4960539 - DNA, 25 bp, Homo sapien
ttttttggaagctgctttctcttac

SEQ ID NO: 4960540 - DNA, 25 bp, Homo sapien
cttttttggaagctgctttctctta

SEQ ID NO: 4960541 - DNA, 25 bp, Homo sapien
tcctactaccaacacttgtgataag

SEQ ID NO: 4960542 - DNA, 25 bp, Homo sapien
tgtgataagaacagcatatatttgt

SEQ ID NO: 4960543 - DNA, 25 bp, Homo sapien
gtaaaacatagacactggtaatcct

SEQ ID NO: 4960544 - DNA, 25 bp, Homo sapien
tgtgtagacttaggccaggtaccag

SEQ ID NO: 4960545 - DNA, 25 bp, Homo sapien
tcttggtgtaatacagacagactca

SEQ ID NO: 4960546 - DNA, 25 bp, Homo sapien
ctcataacttctatgttgtcttggt

SEQ ID NO: 4960547 - DNA, 25 bp, Homo sapien
cttctatgttgtcttggtgtaatac

SEQ ID NO: 4960548 - DNA, 25 bp, Homo sapien
ctatgttgtcttggtgtaatacaga

SEQ ID NO: 4960549 - DNA, 25 bp, Homo sapien
gaggcggtaggctacggcagaattt

SEQ ID NO: 4960550 - DNA, 25 bp, Homo sapien
aggcggtaggctacggcagaatttt

SEQ ID NO: 4960551 - DNA, 25 bp, Homo sapien
tacattgtacaagagcaggcagtct

SEQ ID NO: 4960552 - DNA, 25 bp, Homo sapien
gtcaaatacattgtacaagagcagg

SEQ ID NO: 4960553 - DNA, 25 bp, Homo sapien
taactccttggtagtcaaatacatt

SEQ ID NO: 4960554 - DNA, 25 bp, Homo sapien
ttgtacaagagcaggcagtcttttc

SEQ ID NO: 4960555 - DNA, 25 bp, Homo sapien
tcttttcctacataatttaagtggc

SEQ ID NO: 4960556 - DNA, 25 bp, Homo sapien
tagagatgagactactactaacaga

SEQ ID NO: 4960557 - DNA, 25 bp, Homo sapien
cccaagtgagtagactgtgtaattt

SEQ ID NO: 4960558 - DNA, 25 bp, Homo sapien
tccattatgtcagagcttgtgaata

SEQ ID NO: 4960559 - DNA, 25 bp, Homo sapien
ttttccgcggcacgaatcagactca

SEQ ID NO: 4960560 - DNA, 25 bp, Homo sapien
gaacatgtaacttggagagggacga

SEQ ID NO: 4960561 - DNA, 25 bp, Homo sapien
gaatgtggtccagacgtcaaccagg

SEQ ID NO: 4960562 - DNA, 25 bp, Homo sapien
taaacagtccctaccattggcctgc

SEQ ID NO: 4960563 - DNA, 25 bp, Homo sapien
gaacttcgaccctttctctgagaga

SEQ ID NO: 4960564 - DNA, 25 bp, Homo sapien
ccagatggagtaccatgagggttgc

SEQ ID NO: 4960565 - DNA, 25 bp, Homo sapien
agaggctatagctgggaacccgact

SEQ ID NO: 4960566 - DNA, 25 bp, Homo sapien
taagcagtgcttgtaaaccatcgcg

SEQ ID NO: 4960567 - DNA, 25 bp, Homo sapien
gtgacccagggtgcattaacttaaa

SEQ ID NO: 4960568 - DNA, 25 bp, Homo sapien
ctctggctccgaaaaactttgttat

SEQ ID NO: 4960569 - DNA, 25 bp, Homo sapien
gatggtctcacagagccaactcact

SEQ ID NO: 4960570 - DNA, 25 bp, Homo sapien
gcacatagcactgggaactctggct

SEQ ID NO: 4960571 - DNA, 25 bp, Homo sapien
ggtacttccataaactctcgccttg

SEQ ID NO: 4960572 - DNA, 25 bp, Homo sapien
taagattcagctccatagatttgtg

SEQ ID NO: 4960573 - DNA, 25 bp, Homo sapien
atggcggtcatgaacggcagcaccc

SEQ ID NO: 4960574 - DNA, 25 bp, Homo sapien
tcgccttggctgaggaaatcctaca

SEQ ID NO: 4960575 - DNA, 25 bp, Homo sapien
ttctgaatttctgccgtgtatttcc

SEQ ID NO: 4960576 - DNA, 25 bp, Homo sapien
aatagagctctgtcagttaccccag

SEQ ID NO: 4960577 - DNA, 25 bp, Homo sapien
tcctatacattgacagctggagaca

SEQ ID NO: 4960578 - DNA, 25 bp, Homo sapien
tttagcagttggaaaagctggccca

SEQ ID NO: 4960579 - DNA, 25 bp, Homo sapien
ggctttatcatccaactgtacagat

SEQ ID NO: 4960580 - DNA, 25 bp, Homo sapien
gccataacggcacacttcagaagtg

SEQ ID NO: 4960581 - DNA, 25 bp, Homo sapien
gacaccttgactaatgccataacgg

SEQ ID NO: 4960582 - DNA, 25 bp, Homo sapien
tgtagacccaagatgccaagcattt

SEQ ID NO: 4960583 - DNA, 25 bp, Homo sapien
ggaaatgctccttgcccaaatcaga

SEQ ID NO: 4960584 - DNA, 25 bp, Homo sapien
ctgggcatcacagacggtcagggtc

SEQ ID NO: 4960585 - DNA, 25 bp, Homo sapien
gggcatcacagacggtcagggtcat

SEQ ID NO: 4960586 - DNA, 25 bp, Homo sapien
tgggcatcacagacggtcagggtca

SEQ ID NO: 4960587 - DNA, 25 bp, Homo sapien
cagcatcagtattggattagtggga

SEQ ID NO: 4960588 - DNA, 25 bp, Homo sapien
gaagcatttccactaaagccaggga

SEQ ID NO: 4960589 - DNA, 25 bp, Homo sapien
tgctagtaccagacaatacaattag

SEQ ID NO: 4960590 - DNA, 25 bp, Homo sapien
gacttcatatgtacaaacaagttgg

SEQ ID NO: 4960591 - DNA, 25 bp, Homo sapien
gcgtagcctaggcagccccttagat

SEQ ID NO: 4960592 - DNA, 25 bp, Homo sapien
aaggcacactgaaggcgtagcctag

SEQ ID NO: 4960593 - DNA, 25 bp, Homo sapien
gcccccaggactgggtaggattcag

SEQ ID NO: 4960594 - DNA, 25 bp, Homo sapien
agtccagcaataagggcctccaggc

SEQ ID NO: 4960595 - DNA, 25 bp, Homo sapien
gaaagcagaggagggtgaataagca

SEQ ID NO: 4960596 - DNA, 25 bp, Homo sapien
agcagaaagacaggacatgaggccc

SEQ ID NO: 4960597 - DNA, 25 bp, Homo sapien
cagaggagggtgaataagcagaaag

SEQ ID NO: 4960598 - DNA, 25 bp, Homo sapien
gcagaaagacaggacatgaggccct

SEQ ID NO: 4960599 - DNA, 25 bp, Homo sapien
taaatggcaatcatggacaaatccc

SEQ ID NO: 4960600 - DNA, 25 bp, Homo sapien
gagggagttgctttagctgtcacaa

SEQ ID NO: 4960601 - DNA, 25 bp, Homo sapien
tatagcacaatcgtaggaaaaggca

SEQ ID NO: 4960602 - DNA, 25 bp, Homo sapien
gctatgtgcatctgcctaagggcag

SEQ ID NO: 4960603 - DNA, 25 bp, Homo sapien
aatgttggcatgacagagtgtttcc

SEQ ID NO: 4960604 - DNA, 25 bp, Homo sapien
tctgtactgggaccaacttgtgggc

SEQ ID NO: 4960605 - DNA, 25 bp, Homo sapien
cctctggagcggagttctgttgacc

SEQ ID NO: 4960606 - DNA, 25 bp, Homo sapien
ccttttgagtgcagctggtgtcatc

SEQ ID NO: 4960607 - DNA, 25 bp, Homo sapien
tgcttggaatctttgccagctttcc

SEQ ID NO: 4960608 - DNA, 25 bp, Homo sapien
tcaccactgcttggaatctttgcca

SEQ ID NO: 4960609 - DNA, 25 bp, Homo sapien
ggctgggcctcctgatgcgcttttc

SEQ ID NO: 4960610 - DNA, 25 bp, Homo sapien
gggcctcctgatgcgcttttcttaa

SEQ ID NO: 4960611 - DNA, 25 bp, Homo sapien
gcacggcctccgcagtcacgtttgt

SEQ ID NO: 4960612 - DNA, 25 bp, Homo sapien
tatcaggacggtgcctagggctctc

SEQ ID NO: 4960613 - DNA, 25 bp, Homo sapien
tctctggcggtatgctggctggcac

SEQ ID NO: 4960614 - DNA, 25 bp, Homo sapien
cgcagtcacgtttgtttccccagct

SEQ ID NO: 4960615 - DNA, 25 bp, Homo sapien
catgagccagaagctatcactgaat

SEQ ID NO: 4960616 - DNA, 25 bp, Homo sapien
tcctacaactggaagctgacaaaag

SEQ ID NO: 4960617 - DNA, 25 bp, Homo sapien
acagccctttgcacgagacttcaag

SEQ ID NO: 4960618 - DNA, 25 bp, Homo sapien
gggctccccatctcagagtgaataa

SEQ ID NO: 4960619 - DNA, 25 bp, Homo sapien
gcaagtttaagggatccaatgtcac

SEQ ID NO: 4960620 - DNA, 25 bp, Homo sapien
catgggtcttcttactgggtgcaag

SEQ ID NO: 4960621 - DNA, 25 bp, Homo sapien
cagacaatgacgaacagccaacact

SEQ ID NO: 4960622 - DNA, 25 bp, Homo sapien
tacttaccgtgggatgcacaggaac

SEQ ID NO: 4960623 - DNA, 25 bp, Homo sapien
ttaaagaggcttgtcagtcacccca

SEQ ID NO: 4960624 - DNA, 25 bp, Homo sapien
agtttaatcaacctcacagcagcgg

SEQ ID NO: 4960625 - DNA, 25 bp, Homo sapien
tatgtgaagcccactgagccgtggg

SEQ ID NO: 4960626 - DNA, 25 bp, Homo sapien
gaacattttctcaactcggctggga

SEQ ID NO: 4960627 - DNA, 25 bp, Homo sapien
ggcttctgggttgcatacatccggg

SEQ ID NO: 4960628 - DNA, 25 bp, Homo sapien
tccatggggcagtcctgactcagaa

SEQ ID NO: 4960629 - DNA, 25 bp, Homo sapien
gaggaaattccttcgtgggcttctg

SEQ ID NO: 4960630 - DNA, 25 bp, Homo sapien
ggttgcatacatccgggtctccatg

SEQ ID NO: 4960631 - DNA, 25 bp, Homo sapien
ctgtcggtatcccaaacccatcagg

SEQ ID NO: 4960632 - DNA, 25 bp, Homo sapien
agcagcctctgtcggtatcccaaac

SEQ ID NO: 4960633 - DNA, 25 bp, Homo sapien
tgtcggtatcccaaacccatcaggc

SEQ ID NO: 4960634 - DNA, 25 bp, Homo sapien
cttgagcagcctctgtcggtatccc

SEQ ID NO: 4960635 - DNA, 25 bp, Homo sapien
ggcctttacaatggcaccaccggtg

SEQ ID NO: 4960636 - DNA, 25 bp, Homo sapien
tgatgaccatgagccagggaaaacc

SEQ ID NO: 4960637 - DNA, 25 bp, Homo sapien
tagtagcagagtggagcatagacga

SEQ ID NO: 4960638 - DNA, 25 bp, Homo sapien
tagacgatgttgatgaccccagtga

SEQ ID NO: 4960639 - DNA, 25 bp, Homo sapien
tatggagcatcctccacgtaggaca

SEQ ID NO: 4960640 - DNA, 25 bp, Homo sapien
tggagcctccatatggagcatcctc

SEQ ID NO: 4960641 - DNA, 25 bp, Homo sapien
tcaaagtcataagtgtctatggagc

SEQ ID NO: 4960642 - DNA, 25 bp, Homo sapien
acatcaaagtcataagtgtctatgg

SEQ ID NO: 4960643 - DNA, 25 bp, Homo sapien
ggtgccccatgatgggcatcataga

SEQ ID NO: 4960644 - DNA, 25 bp, Homo sapien
atcagcgatggcgtagacactccca

SEQ ID NO: 4960645 - DNA, 25 bp, Homo sapien
gcccatgcaaaaagccacatcagcg

SEQ ID NO: 4960646 - DNA, 25 bp, Homo sapien
catacaccgaggtgtggcgtagatc

SEQ ID NO: 4960647 - DNA, 25 bp, Homo sapien
tcagacccaaagccaacatgcaggg

SEQ ID NO: 4960648 - DNA, 25 bp, Homo sapien
cagacccaaagccaacatgcagggg

SEQ ID NO: 4960649 - DNA, 25 bp, Homo sapien
agacccaaagccaacatgcaggggc

SEQ ID NO: 4960650 - DNA, 25 bp, Homo sapien
aggccaagccctgcattggggccaa

SEQ ID NO: 4960651 - DNA, 25 bp, Homo sapien
aagccctgcattggggccaatgaga

SEQ ID NO: 4960652 - DNA, 25 bp, Homo sapien
ccaagccctgcattggggccaatga

SEQ ID NO: 4960653 - DNA, 25 bp, Homo sapien
gccaagccctgcattggggccaatg

SEQ ID NO: 4960654 - DNA, 25 bp, Homo sapien
ctggtctcattcttcatggaataaa

SEQ ID NO: 4960655 - DNA, 25 bp, Homo sapien
gttttccattatggacatcactgaa

SEQ ID NO: 4960656 - DNA, 25 bp, Homo sapien
catggaataaagttgcctctgtttt

SEQ ID NO: 4960657 - DNA, 25 bp, Homo sapien
cctctgttttccattatggacatca

SEQ ID NO: 4960658 - DNA, 25 bp, Homo sapien
gtttagcataccgtttagatgctgc

SEQ ID NO: 4960659 - DNA, 25 bp, Homo sapien
aagggtttagcataccgtttagatg

SEQ ID NO: 4960660 - DNA, 25 bp, Homo sapien
tagcataccgtttagatgctgctgg

SEQ ID NO: 4960661 - DNA, 25 bp, Homo sapien
ctctgggtacctgccattcaaacct

SEQ ID NO: 4960662 - DNA, 25 bp, Homo sapien
ttcttctatcaagcctctggtgcca

SEQ ID NO: 4960663 - DNA, 25 bp, Homo sapien
ccagagactgggacatagatgatgg

SEQ ID NO: 4960664 - DNA, 25 bp, Homo sapien
ctcaggcctaggaggtttgtgtgtt

SEQ ID NO: 4960665 - DNA, 25 bp, Homo sapien
gctttgagaacttgagggggattct

SEQ ID NO: 4960666 - DNA, 25 bp, Homo sapien
actaccagcatcccgattagggaac

SEQ ID NO: 4960667 - DNA, 25 bp, Homo sapien
caagctggtacctactaccagcatc

SEQ ID NO: 4960668 - DNA, 25 bp, Homo sapien
ttcgtcccagatcccgaggctacat

SEQ ID NO: 4960669 - DNA, 25 bp, Homo sapien
atttctactgttcgtcccagatccc

SEQ ID NO: 4960670 - DNA, 25 bp, Homo sapien
actgttcgtcccagatcccgaggct

SEQ ID NO: 4960671 - DNA, 25 bp, Homo sapien
tctactgttcgtcccagatcccgag

SEQ ID NO: 4960672 - DNA, 25 bp, Homo sapien
gaggttggtgccaatgaggtaggac

SEQ ID NO: 4960673 - DNA, 25 bp, Homo sapien
tggccaacacaccaaagaggttggt

SEQ ID NO: 4960674 - DNA, 25 bp, Homo sapien
ggccaacacaccaaagaggttggtg

SEQ ID NO: 4960675 - DNA, 25 bp, Homo sapien
ttggtgccaatgaggtaggacacac

SEQ ID NO: 4960676 - DNA, 25 bp, Homo sapien
tataaggtgagaccaacagcgtggt

SEQ ID NO: 4960677 - DNA, 25 bp, Homo sapien
catgccatggctcagttacagacaa

SEQ ID NO: 4960678 - DNA, 25 bp, Homo sapien
gattgttggacaatgtgaaacccac

SEQ ID NO: 4960679 - DNA, 25 bp, Homo sapien
tacagacaaggagtaggcaacaaga

SEQ ID NO: 4960680 - DNA, 25 bp, Homo sapien
tgcatcatccagatgggcagtgtgg

SEQ ID NO: 4960681 - DNA, 25 bp, Homo sapien
tccaggatggccacccccatgttgg

SEQ ID NO: 4960682 - DNA, 25 bp, Homo sapien
gggggagcacatggtctgcatcatc

SEQ ID NO: 4960683 - DNA, 25 bp, Homo sapien
ccacccccatgttggcaaagcagat

SEQ ID NO: 4960684 - DNA, 25 bp, Homo sapien
agaagcataaagaggggagtcccct

SEQ ID NO: 4960685 - DNA, 25 bp, Homo sapien
ctttgagaagcataaagaggggagt

SEQ ID NO: 4960686 - DNA, 25 bp, Homo sapien
cataaagaggggagtccccttggca

SEQ ID NO: 4960687 - DNA, 25 bp, Homo sapien
gagaagcataaagaggggagtcccc

SEQ ID NO: 4960688 - DNA, 25 bp, Homo sapien
gcaccgaatcccaaaagcaagcaca

SEQ ID NO: 4960689 - DNA, 25 bp, Homo sapien
tcagagtggattggtagcaaggtca

SEQ ID NO: 4960690 - DNA, 25 bp, Homo sapien
agcaagcacagaagccataactcag

SEQ ID NO: 4960691 - DNA, 25 bp, Homo sapien
gatctccctggtactaatatttgtc

SEQ ID NO: 4960692 - DNA, 25 bp, Homo sapien
tcagccatcctgtataactgttaga

SEQ ID NO: 4960693 - DNA, 25 bp, Homo sapien
taactgttagaaatggagctttgtg

SEQ ID NO: 4960694 - DNA, 25 bp, Homo sapien
gaaatggagctttgtgtctgcttac

SEQ ID NO: 4960695 - DNA, 25 bp, Homo sapien
cctgtataactgttagaaatggagc

SEQ ID NO: 4960696 - DNA, 25 bp, Homo sapien
ggagagactttggaaggctgtagga

SEQ ID NO: 4960697 - DNA, 25 bp, Homo sapien
gagagactttggaaggctgtaggat

SEQ ID NO: 4960698 - DNA, 25 bp, Homo sapien
tgggctgtcacctgctggaggctct

SEQ ID NO: 4960699 - DNA, 25 bp, Homo sapien
ctgggctgtcacctgctggaggctc

SEQ ID NO: 4960700 - DNA, 25 bp, Homo sapien
cctgctggaggctctgatggtgact

SEQ ID NO: 4960701 - DNA, 25 bp, Homo sapien
gctggaggctctgatggtgacttac

SEQ ID NO: 4960702 - DNA, 25 bp, Homo sapien
aacaaactcgtacattacacttcca

SEQ ID NO: 4960703 - DNA, 25 bp, Homo sapien
gaagggtgcagacttcccaacaaac

SEQ ID NO: 4960704 - DNA, 25 bp, Homo sapien
gacttcccaacaaactcgtacatta

SEQ ID NO: 4960705 - DNA, 25 bp, Homo sapien
actcgtacattacacttccaaaggg

SEQ ID NO: 4960706 - DNA, 25 bp, Homo sapien
tggagaggcataggagacacagatt

SEQ ID NO: 4960707 - DNA, 25 bp, Homo sapien
gagaggcataggagacacagattcc

SEQ ID NO: 4960708 - DNA, 25 bp, Homo sapien
cataggagacacagattccagaggt

SEQ ID NO: 4960709 - DNA, 25 bp, Homo sapien
acacagattccagaggtgagggtga

SEQ ID NO: 4960710 - DNA, 25 bp, Homo sapien
tggctcgtcctctctcatggtcatc

SEQ ID NO: 4960711 - DNA, 25 bp, Homo sapien
catggctcgtcctctctcatggtca

SEQ ID NO: 4960712 - DNA, 25 bp, Homo sapien
gctcgtcctctctcatggtcatcag

SEQ ID NO: 4960713 - DNA, 25 bp, Homo sapien
tcgtcctctctcatggtcatcagtg

SEQ ID NO: 4960714 - DNA, 25 bp, Homo sapien
cacaaagagtagagtataggtccca

SEQ ID NO: 4960715 - DNA, 25 bp, Homo sapien
agatccaatgccttgaagggttcgg

SEQ ID NO: 4960716 - DNA, 25 bp, Homo sapien
ggttcgggccacaaagagtagagta

SEQ ID NO: 4960717 - DNA, 25 bp, Homo sapien
tagagtataggtcccagaaaaagca

SEQ ID NO: 4960718 - DNA, 25 bp, Homo sapien
gaataatctcctcgaagtgtctgaa

SEQ ID NO: 4960719 - DNA, 25 bp, Homo sapien
caaaactaaatcagagggtgctggt

SEQ ID NO: 4960720 - DNA, 25 bp, Homo sapien
tcagcaggtccttccattcagggtc

SEQ ID NO: 4960721 - DNA, 25 bp, Homo sapien
tcagtttacgaagaccatgggatta

SEQ ID NO: 4960722 - DNA, 25 bp, Homo sapien
aacatgataacaaagccagcaaaca

SEQ ID NO: 4960723 - DNA, 25 bp, Homo sapien
taactgtggagagaaacatgataac

SEQ ID NO: 4960724 - DNA, 25 bp, Homo sapien
gcaaacatggggatatgatatccaa

SEQ ID NO: 4960725 - DNA, 25 bp, Homo sapien
gtggagagaaacatgataacaaagc

SEQ ID NO: 4960726 - DNA, 25 bp, Homo sapien
gcggggcactgcacccagtgagata

SEQ ID NO: 4960727 - DNA, 25 bp, Homo sapien
cggggcactgcacccagtgagatac

SEQ ID NO: 4960728 - DNA, 25 bp, Homo sapien
cctgcggggcactgcacccagtgag

SEQ ID NO: 4960729 - DNA, 25 bp, Homo sapien
tgcggggcactgcacccagtgagat

SEQ ID NO: 4960730 - DNA, 25 bp, Homo sapien
agagggcccacgaatgggttgacca

SEQ ID NO: 4960731 - DNA, 25 bp, Homo sapien
ggttgaccagaagttgcatcacagc

SEQ ID NO: 4960732 - DNA, 25 bp, Homo sapien
ccactaggtacgctttcttcaacag

SEQ ID NO: 4960733 - DNA, 25 bp, Homo sapien
gaacttccggcatggccgaggtgca

SEQ ID NO: 4960734 - DNA, 25 bp, Homo sapien
tgaactcaagcagggtgtacactgc

SEQ ID NO: 4960735 - DNA, 25 bp, Homo sapien
tttagctgtgtttgacaagtgtcag

SEQ ID NO: 4960736 - DNA, 25 bp, Homo sapien
tcctgctctttgaacctcctgagtc

SEQ ID NO: 4960737 - DNA, 25 bp, Homo sapien
tcactgttgaactcaagcagggtgt

SEQ ID NO: 4960738 - DNA, 25 bp, Homo sapien
aggagcaaagcgacgaataccacca

SEQ ID NO: 4960739 - DNA, 25 bp, Homo sapien
gttgtccaggagcaaagcgacgaat

SEQ ID NO: 4960740 - DNA, 25 bp, Homo sapien
caccacagtaaacagcatgttgtcc

SEQ ID NO: 4960741 - DNA, 25 bp, Homo sapien
aaagcgacgaataccaccaccagca

SEQ ID NO: 4960742 - DNA, 25 bp, Homo sapien
gggagcatccagaatggtccggagc

SEQ ID NO: 4960743 - DNA, 25 bp, Homo sapien
tggggagcatccagaatggtccgga

SEQ ID NO: 4960744 - DNA, 25 bp, Homo sapien
ctggggagcatccagaatggtccgg

SEQ ID NO: 4960745 - DNA, 25 bp, Homo sapien
gagcatccagaatggtccggagcat

SEQ ID NO: 4960746 - DNA, 25 bp, Homo sapien
ggtgatggccggactggggcagtct

SEQ ID NO: 4960747 - DNA, 25 bp, Homo sapien
cgggctcttagggaaggtcctgtga

SEQ ID NO: 4960748 - DNA, 25 bp, Homo sapien
cctgcgggctcttagggaaggtcct

SEQ ID NO: 4960749 - DNA, 25 bp, Homo sapien
cttcccctgcgggctcttagggaag

SEQ ID NO: 4960750 - DNA, 25 bp, Homo sapien
gggagggagtctgcccagacgaagg

SEQ ID NO: 4960751 - DNA, 25 bp, Homo sapien
agggagtctgcccagacgaaggaaa

SEQ ID NO: 4960752 - DNA, 25 bp, Homo sapien
gagtctgcccagacgaaggaaactc

SEQ ID NO: 4960753 - DNA, 25 bp, Homo sapien
ggggagggagtctgcccagacgaag

SEQ ID NO: 4960754 - DNA, 25 bp, Homo sapien
cgaaaagtgcaaagggttgcaagta

SEQ ID NO: 4960755 - DNA, 25 bp, Homo sapien
ggttgcaagtagtaggatgatattt

SEQ ID NO: 4960756 - DNA, 25 bp, Homo sapien
aaagtgcaaagggttgcaagtagta

SEQ ID NO: 4960757 - DNA, 25 bp, Homo sapien
ttgcaagtagtaggatgatatttgg

SEQ ID NO: 4960758 - DNA, 25 bp, Homo sapien
tacaaacccctgatcagaaagatgc

SEQ ID NO: 4960759 - DNA, 25 bp, Homo sapien
ccgagcctctgaaggttaggagatt

SEQ ID NO: 4960760 - DNA, 25 bp, Homo sapien
tagtgtcaaactgggatgaaatccc

SEQ ID NO: 4960761 - DNA, 25 bp, Homo sapien
tcatagacaagaaatccgagcctct

SEQ ID NO: 4960762 - DNA, 25 bp, Homo sapien
tgttctctgaacgtggatgtgctgt

SEQ ID NO: 4960763 - DNA, 25 bp, Homo sapien
ggcactcagtgaggtattggcagct

SEQ ID NO: 4960764 - DNA, 25 bp, Homo sapien
gatttattgcctcctgttatctgag

SEQ ID NO: 4960765 - DNA, 25 bp, Homo sapien
tgttagcaagacagcagggacactg

SEQ ID NO: 4960766 - DNA, 25 bp, Homo sapien
tgctgtgaggagcaccgctgtagca

SEQ ID NO: 4960767 - DNA, 25 bp, Homo sapien
cagactaactctagtcaaggactag

SEQ ID NO: 4960768 - DNA, 25 bp, Homo sapien
ttgataacagttggtctgcagaccg

SEQ ID NO: 4960769 - DNA, 25 bp, Homo sapien
cgctgtagcacgctcctttgaagat

SEQ ID NO: 4960770 - DNA, 25 bp, Homo sapien
tacatgtatacagatttagccacga

SEQ ID NO: 4960771 - DNA, 25 bp, Homo sapien
taaatatggctagttccaccacgtg

SEQ ID NO: 4960772 - DNA, 25 bp, Homo sapien
aaaaccttctggtgccccattgtca

SEQ ID NO: 4960773 - DNA, 25 bp, Homo sapien
tcgacgaggttttccaggttacatg

SEQ ID NO: 4960774 - DNA, 25 bp, Homo sapien
tgtttaccagatgctgaaggcaagg

SEQ ID NO: 4960775 - DNA, 25 bp, Homo sapien
tgtctggtagcagtgagaccccttg

SEQ ID NO: 4960776 - DNA, 25 bp, Homo sapien
gacgtgagccctgagcgatcttcta

SEQ ID NO: 4960777 - DNA, 25 bp, Homo sapien
gcagttctgccatgcgtcctgttgg

SEQ ID NO: 4960778 - DNA, 25 bp, Homo sapien
tctgcggccagaggaaaatagctca

SEQ ID NO: 4960779 - DNA, 25 bp, Homo sapien
gatgggcaccgtttaacctcaggga

SEQ ID NO: 4960780 - DNA, 25 bp, Homo sapien
tagggagcccttaaccaaagcagac

SEQ ID NO: 4960781 - DNA, 25 bp, Homo sapien
catggtccaagaatagtgagggcgc

SEQ ID NO: 4960782 - DNA, 25 bp, Homo sapien
cagtggctatgatgtcctcgtaggg

SEQ ID NO: 4960783 - DNA, 25 bp, Homo sapien
gatctcagtggctatgatgtcctcg

SEQ ID NO: 4960784 - DNA, 25 bp, Homo sapien
tcagtggctatgatgtcctcgtagg

SEQ ID NO: 4960785 - DNA, 25 bp, Homo sapien
tctcagtggctatgatgtcctcgta

SEQ ID NO: 4960786 - DNA, 25 bp, Homo sapien
caggcgctggttccgctggtacatg

SEQ ID NO: 4960787 - DNA, 25 bp, Homo sapien
cgctggttccgctggtacatggcca

SEQ ID NO: 4960788 - DNA, 25 bp, Homo sapien
ctggtacatggccacgtagctctgc

SEQ ID NO: 4960789 - DNA, 25 bp, Homo sapien
gtacatggccacgtagctctgctgc

SEQ ID NO: 4960790 - DNA, 25 bp, Homo sapien
tctccttctcctccttccacacgag

SEQ ID NO: 4960791 - DNA, 25 bp, Homo sapien
tggaagcccgaggacatctggtcat

SEQ ID NO: 4960792 - DNA, 25 bp, Homo sapien
gaagcccgaggacatctggtcatgg

SEQ ID NO: 4960793 - DNA, 25 bp, Homo sapien
ggaagcccgaggacatctggtcatg

SEQ ID NO: 4960794 - DNA, 25 bp, Homo sapien
agcccgaggacatctggtcatggcc

SEQ ID NO: 4960795 - DNA, 25 bp, Homo sapien
ggcggccccatgtcgcgggccaggg

SEQ ID NO: 4960796 - DNA, 25 bp, Homo sapien
aaggtgggcggccccatgtcgcggg

SEQ ID NO: 4960797 - DNA, 25 bp, Homo sapien
ggtgggcggccccatgtcgcgggcc

SEQ ID NO: 4960798 - DNA, 25 bp, Homo sapien
tgggcggccccatgtcgcgggccag

SEQ ID NO: 4960799 - DNA, 25 bp, Homo sapien
ctccgcctcgttcttcttgcgctgc

SEQ ID NO: 4960800 - DNA, 25 bp, Homo sapien
agcagctccgcctcgttcttcttgc

SEQ ID NO: 4960801 - DNA, 25 bp, Homo sapien
gctccgcctcgttcttcttgcgctg

SEQ ID NO: 4960802 - DNA, 25 bp, Homo sapien
cagctccgcctcgttcttcttgcgc

SEQ ID NO: 4960803 - DNA, 25 bp, Homo sapien
agacccaggatctcgctagccttgg

SEQ ID NO: 4960804 - DNA, 25 bp, Homo sapien
tgtgccttgagacccaggatctcgc

SEQ ID NO: 4960805 - DNA, 25 bp, Homo sapien
ttggcgttcacctccgtctgggact

SEQ ID NO: 4960806 - DNA, 25 bp, Homo sapien
tccaggcccttggtgcgcagggcgc

SEQ ID NO: 4960807 - DNA, 25 bp, Homo sapien
tcagcaaggagtggccacttccatc

SEQ ID NO: 4960808 - DNA, 25 bp, Homo sapien
atagaagttccacttacacttcagc

SEQ ID NO: 4960809 - DNA, 25 bp, Homo sapien
agaagttccacttacacttcagcaa

SEQ ID NO: 4960810 - DNA, 25 bp, Homo sapien
ggagtggccacttccatcactgaaa

SEQ ID NO: 4960811 - DNA, 25 bp, Homo sapien
tggcttccggcttcatgatttaatg

SEQ ID NO: 4960812 - DNA, 25 bp, Homo sapien
gtcatctggcttccggcttcatgat

SEQ ID NO: 4960813 - DNA, 25 bp, Homo sapien
gcttccggcttcatgatttaatggc

SEQ ID NO: 4960814 - DNA, 25 bp, Homo sapien
tctggcttccggcttcatgatttaa

SEQ ID NO: 4960815 - DNA, 25 bp, Homo sapien
ctgcgcggtctgtgtttgcacgcta

SEQ ID NO: 4960816 - DNA, 25 bp, Homo sapien
gcagggagccccttctttgggtgat

SEQ ID NO: 4960817 - DNA, 25 bp, Homo sapien
tgataaagccagcacattagccccg

SEQ ID NO: 4960818 - DNA, 25 bp, Homo sapien
ctattggccggcaccagaaggagag

SEQ ID NO: 4960819 - DNA, 25 bp, Homo sapien
agctggtcttctccctctcgtagga

SEQ ID NO: 4960820 - DNA, 25 bp, Homo sapien
gggccgaagctggtcttctccctct

SEQ ID NO: 4960821 - DNA, 25 bp, Homo sapien
cgaagctggtcttctccctctcgta

SEQ ID NO: 4960822 - DNA, 25 bp, Homo sapien
tctcctccagcgcggggccgaagct

SEQ ID NO: 4960823 - DNA, 25 bp, Homo sapien
gaggctctcgagctcctgccggagc

SEQ ID NO: 4960824 - DNA, 25 bp, Homo sapien
tgcaggacctgctgcgcgcgctggc

SEQ ID NO: 4960825 - DNA, 25 bp, Homo sapien
aggacctgctgcgcgcgctggctct

SEQ ID NO: 4960826 - DNA, 25 bp, Homo sapien
aggctctcgagctcctgccggagct

SEQ ID NO: 4960827 - DNA, 25 bp, Homo sapien
gagtggcccagcttgctacctccgt

SEQ ID NO: 4960828 - DNA, 25 bp, Homo sapien
gggcccttgtctgccttgttcgagt

SEQ ID NO: 4960829 - DNA, 25 bp, Homo sapien
tggatgctgcactcgtccgtggaga

SEQ ID NO: 4960830 - DNA, 25 bp, Homo sapien
tacctccgtcggagaaggacagagc

SEQ ID NO: 4960831 - DNA, 25 bp, Homo sapien
gctggtggctggcactctccgggga

SEQ ID NO: 4960832 - DNA, 25 bp, Homo sapien
aggatggctcctgaccgtggcagca

SEQ ID NO: 4960833 - DNA, 25 bp, Homo sapien
gggcctcactgcacccttctcggag

SEQ ID NO: 4960834 - DNA, 25 bp, Homo sapien
ggacatggagttccggccggagtct

SEQ ID NO: 4960835 - DNA, 25 bp, Homo sapien
tagaggaaaaggaccgcggtgactc

SEQ ID NO: 4960836 - DNA, 25 bp, Homo sapien
tccagcctgtattcaaagatgcccc

SEQ ID NO: 4960837 - DNA, 25 bp, Homo sapien
gaaatagcaacctgccaccagcttg

SEQ ID NO: 4960838 - DNA, 25 bp, Homo sapien
caagttagggcatcaggctggccga

SEQ ID NO: 4960839 - DNA, 25 bp, Homo sapien
gggcagcaaatgagaagaccgcacc

SEQ ID NO: 4960840 - DNA, 25 bp, Homo sapien
ggcagcaaatgagaagaccgcaccc

SEQ ID NO: 4960841 - DNA, 25 bp, Homo sapien
cagcaaatgagaagaccgcacccac

SEQ ID NO: 4960842 - DNA, 25 bp, Homo sapien
cagggcagcaaatgagaagaccgca

SEQ ID NO: 4960843 - DNA, 25 bp, Homo sapien
agaagcggttaactcccggcctgca

SEQ ID NO: 4960844 - DNA, 25 bp, Homo sapien
gaagcggttaactcccggcctgcat

SEQ ID NO: 4960845 - DNA, 25 bp, Homo sapien
agagaagcggttaactcccggcctg

SEQ ID NO: 4960846 - DNA, 25 bp, Homo sapien
aagcggttaactcccggcctgcatc

SEQ ID NO: 4960847 - DNA, 25 bp, Homo sapien
gctacatttcagtgggactccagaa

SEQ ID NO: 4960848 - DNA, 25 bp, Homo sapien
acgtttgatctctgcggtgtggcca

SEQ ID NO: 4960849 - DNA, 25 bp, Homo sapien
tatggcctgacccaagacttctgct

SEQ ID NO: 4960850 - DNA, 25 bp, Homo sapien
gccgctctggttttgaggagtctga

SEQ ID NO: 4960851 - DNA, 25 bp, Homo sapien
gaccttgatgtagaagaagtcttcg

SEQ ID NO: 4960852 - DNA, 25 bp, Homo sapien
tagaagaagtcttcgctcttgccca

SEQ ID NO: 4960853 - DNA, 25 bp, Homo sapien
aatctgggtgatgggagccccgggc

SEQ ID NO: 4960854 - DNA, 25 bp, Homo sapien
ctaaatccccgctggacagtgccgt

SEQ ID NO: 4960855 - DNA, 25 bp, Homo sapien
gcagcttgtactgcgaagcccggca

SEQ ID NO: 4960856 - DNA, 25 bp, Homo sapien
agatgaggctactgacgctgcccat

SEQ ID NO: 4960857 - DNA, 25 bp, Homo sapien
tgccgtgaccggagtcctgggagaa

SEQ ID NO: 4960858 - DNA, 25 bp, Homo sapien
tcagcagcccgtcggaataccggtt

SEQ ID NO: 4960859 - DNA, 25 bp, Homo sapien
tcgtggctccgtgaggggactgagg

SEQ ID NO: 4960860 - DNA, 25 bp, Homo sapien
gggcagtcgtggctccgtgagggga

SEQ ID NO: 4960861 - DNA, 25 bp, Homo sapien
gctccgtgaggggactgaggtcata

SEQ ID NO: 4960862 - DNA, 25 bp, Homo sapien
gcagtcgtggctccgtgaggggact

SEQ ID NO: 4960863 - DNA, 25 bp, Homo sapien
agacacaagacagaagtcagcgtgg

SEQ ID NO: 4960864 - DNA, 25 bp, Homo sapien
tggtcacagcacagtgctgattccg

SEQ ID NO: 4960865 - DNA, 25 bp, Homo sapien
cagcgtgggtgggagtggtcacagc

SEQ ID NO: 4960866 - DNA, 25 bp, Homo sapien
cacagtgctgattccgacttccaga

SEQ ID NO: 4960867 - DNA, 25 bp, Homo sapien
tatagcaagtggtaccagtgctgcg

SEQ ID NO: 4960868 - DNA, 25 bp, Homo sapien
cacttcatgcaagcctctactctaa

SEQ ID NO: 4960869 - DNA, 25 bp, Homo sapien
ctaaacactcgggacccagcaagtg

SEQ ID NO: 4960870 - DNA, 25 bp, Homo sapien
aaactggagcagagaggacagaaca

SEQ ID NO: 4960871 - DNA, 25 bp, Homo sapien
cctcccgtgctctgcgcaatatgct

SEQ ID NO: 4960872 - DNA, 25 bp, Homo sapien
ttttttgccatgcaatacacattgc

SEQ ID NO: 4960873 - DNA, 25 bp, Homo sapien
cgtgctctgcgcaatatgctcagct

SEQ ID NO: 4960874 - DNA, 25 bp, Homo sapien
atacacattgccgagcagctgtacc

SEQ ID NO: 4960875 - DNA, 25 bp, Homo sapien
tcccactgtgttagagtacaatgcg

SEQ ID NO: 4960876 - DNA, 25 bp, Homo sapien
tcatagcacttcctaatgggaaccc

SEQ ID NO: 4960877 - DNA, 25 bp, Homo sapien
tctgaagcgtccaggtcatagcact

SEQ ID NO: 4960878 - DNA, 25 bp, Homo sapien
tgggccttgaaggagcctcccaatg

SEQ ID NO: 4960879 - DNA, 25 bp, Homo sapien
gatgcaaagtgttgtgctggccact

SEQ ID NO: 4960880 - DNA, 25 bp, Homo sapien
tgctgtgccaagtagcctgttggca

SEQ ID NO: 4960881 - DNA, 25 bp, Homo sapien
cccacaacgatgcaaagtgttgtgc

SEQ ID NO: 4960882 - DNA, 25 bp, Homo sapien
gaataactgctgtgccaagtagcct

SEQ ID NO: 4960883 - DNA, 25 bp, Homo sapien
ggtgaaggagctttggctgagcaga

SEQ ID NO: 4960884 - DNA, 25 bp, Homo sapien
gaggcagcctggaactcgaggcaca

SEQ ID NO: 4960885 - DNA, 25 bp, Homo sapien
ccaggcaggacctcggccgtcctct

SEQ ID NO: 4960886 - DNA, 25 bp, Homo sapien
ggaactcgaggcacaaccagccagg

SEQ ID NO: 4960887 - DNA, 25 bp, Homo sapien
ctaacaggacagggacaactgggtt

SEQ ID NO: 4960888 - DNA, 25 bp, Homo sapien
gacagggacaactgggtttcatttc

SEQ ID NO: 4960889 - DNA, 25 bp, Homo sapien
cagggacaactgggtttcatttcca

SEQ ID NO: 4960890 - DNA, 25 bp, Homo sapien
acaggacagggacaactgggtttca

SEQ ID NO: 4960891 - DNA, 25 bp, Homo sapien
cacattgtcccccagggtagcggca

SEQ ID NO: 4960892 - DNA, 25 bp, Homo sapien
acattgtcccccagggtagcggcat

SEQ ID NO: 4960893 - DNA, 25 bp, Homo sapien
tcacattgtcccccagggtagcggc

SEQ ID NO: 4960894 - DNA, 25 bp, Homo sapien
gtatatgccaccataactgtctaat

SEQ ID NO: 4960895 - DNA, 25 bp, Homo sapien
ggtatatgccaccataactgtctaa

SEQ ID NO: 4960896 - DNA, 25 bp, Homo sapien
ggtgaaagttactctcttggccagg

SEQ ID NO: 4960897 - DNA, 25 bp, Homo sapien
agcagcatgaatttaaccaaaaatg

SEQ ID NO: 4960898 - DNA, 25 bp, Homo sapien
gcccctagcatgtgagcggttttta

SEQ ID NO: 4960899 - DNA, 25 bp, Homo sapien
agccagtttgtctctgcccctagca

SEQ ID NO: 4960900 - DNA, 25 bp, Homo sapien
tgctgtctgggctgtcgggtcccct

SEQ ID NO: 4960901 - DNA, 25 bp, Homo sapien
ggtttctggcatcgtccttgtgttc

SEQ ID NO: 4960902 - DNA, 25 bp, Homo sapien
gagcccaagagtgtagacctggtct

SEQ ID NO: 4960903 - DNA, 25 bp, Homo sapien
gagtgtagacctggtctccatgttg

SEQ ID NO: 4960904 - DNA, 25 bp, Homo sapien
agctttccttatctggaattcctcc

SEQ ID NO: 4960905 - DNA, 25 bp, Homo sapien
cagctttccttatctggaattcctc

SEQ ID NO: 4960906 - DNA, 25 bp, Homo sapien
ttcagctttccttatctggaattcc

SEQ ID NO: 4960907 - DNA, 25 bp, Homo sapien
tcagctttccttatctggaattcct

SEQ ID NO: 4960908 - DNA, 25 bp, Homo sapien
ttcactctctagaccagggtcttcc

SEQ ID NO: 4960909 - DNA, 25 bp, Homo sapien
cactctctagaccagggtcttccat

SEQ ID NO: 4960910 - DNA, 25 bp, Homo sapien
ctcttcactctctagaccagggtct

SEQ ID NO: 4960911 - DNA, 25 bp, Homo sapien
cccaggtccacactgtggtcctctt

SEQ ID NO: 4960912 - DNA, 25 bp, Homo sapien
agtgcagcaggtgcacgactctcca

SEQ ID NO: 4960913 - DNA, 25 bp, Homo sapien
gtgcagcaggtgcacgactctccat

SEQ ID NO: 4960914 - DNA, 25 bp, Homo sapien
aagtgcagcaggtgcacgactctcc

SEQ ID NO: 4960915 - DNA, 25 bp, Homo sapien
catgggagcctctcactaacgggca

SEQ ID NO: 4960916 - DNA, 25 bp, Homo sapien
aggagatgggatgggcatgggagcc

SEQ ID NO: 4960917 - DNA, 25 bp, Homo sapien
ggcatgggagcctctcactaacggg

SEQ ID NO: 4960918 - DNA, 25 bp, Homo sapien
tgggagcctctcactaacgggcacc

SEQ ID NO: 4960919 - DNA, 25 bp, Homo sapien
ccccggtgacgctgagtgactcata

SEQ ID NO: 4960920 - DNA, 25 bp, Homo sapien
ttctgaacctccttgcccttctggc

SEQ ID NO: 4960921 - DNA, 25 bp, Homo sapien
gaggtgcttaaagaggctccgaaga

SEQ ID NO: 4960922 - DNA, 25 bp, Homo sapien
gtgactcataggccccacttgccat

SEQ ID NO: 4960923 - DNA, 25 bp, Homo sapien
agagaaggccttcatgactgggact

SEQ ID NO: 4960924 - DNA, 25 bp, Homo sapien
cagcttcgagcgcagtaccttctgg

SEQ ID NO: 4960925 - DNA, 25 bp, Homo sapien
ccctgggactttgctcagaaggcac

SEQ ID NO: 4960926 - DNA, 25 bp, Homo sapien
gaggccccttctgcgtgttcttaca

SEQ ID NO: 4960927 - DNA, 25 bp, Homo sapien
cactaggtatgggacgatgtacgac

SEQ ID NO: 4960928 - DNA, 25 bp, Homo sapien
ggtgcactgttactaccccaactga

SEQ ID NO: 4960929 - DNA, 25 bp, Homo sapien
taaactggagctatgggtagtaccc

SEQ ID NO: 4960930 - DNA, 25 bp, Homo sapien
caaacctaggttgcggtcaacagcc

SEQ ID NO: 4960931 - DNA, 25 bp, Homo sapien
gggtcaggcaatggagcacagttct

SEQ ID NO: 4960932 - DNA, 25 bp, Homo sapien
gctccagggtcaggcaatggagcac

SEQ ID NO: 4960933 - DNA, 25 bp, Homo sapien
cagggtcaggcaatggagcacagtt

SEQ ID NO: 4960934 - DNA, 25 bp, Homo sapien
tccagggtcaggcaatggagcacag

SEQ ID NO: 4960935 - DNA, 25 bp, Homo sapien
agtaccgactgttagcaactgcgac

SEQ ID NO: 4960936 - DNA, 25 bp, Homo sapien
tcagttttgaaagtaccgactgtta

SEQ ID NO: 4960937 - DNA, 25 bp, Homo sapien
cgactgttagcaactgcgaccagca

SEQ ID NO: 4960938 - DNA, 25 bp, Homo sapien
gttagcaactgcgaccagcacagcc

SEQ ID NO: 4960939 - DNA, 25 bp, Homo sapien
aggaatataatgttcggctgcctta

SEQ ID NO: 4960940 - DNA, 25 bp, Homo sapien
tcaattctccctctttacagcagga

SEQ ID NO: 4960941 - DNA, 25 bp, Homo sapien
ggaatataatgttcggctgccttac

SEQ ID NO: 4960942 - DNA, 25 bp, Homo sapien
ccctctttacagcaggaatataatg

SEQ ID NO: 4960943 - DNA, 25 bp, Homo sapien
ggtggaagtacagcaagttgagacc

SEQ ID NO: 4960944 - DNA, 25 bp, Homo sapien
ctgaatgctgccagcgaataatgac

SEQ ID NO: 4960945 - DNA, 25 bp, Homo sapien
tagcagtccatggtgccaagaggag

SEQ ID NO: 4960946 - DNA, 25 bp, Homo sapien
gctgccagcgaataatgactaaggt

SEQ ID NO: 4960947 - DNA, 25 bp, Homo sapien
tgctcgactgtagctgacacatccc

SEQ ID NO: 4960948 - DNA, 25 bp, Homo sapien
tcgactgtagctgacacatccccat

SEQ ID NO: 4960949 - DNA, 25 bp, Homo sapien
tatgctcgactgtagctgacacatc

SEQ ID NO: 4960950 - DNA, 25 bp, Homo sapien
cagctatgctcgactgtagctgaca

SEQ ID NO: 4960951 - DNA, 25 bp, Homo sapien
gtccccttccataactgtgcttgtg

SEQ ID NO: 4960952 - DNA, 25 bp, Homo sapien
ggcgagtgttccctcggactcccga

SEQ ID NO: 4960953 - DNA, 25 bp, Homo sapien
tgattgacctggagatagagtgggt

SEQ ID NO: 4960954 - DNA, 25 bp, Homo sapien
ctcggactcccgaactgttggtggg

SEQ ID NO: 4960955 - DNA, 25 bp, Homo sapien
gcgagcacaaggctcatttgctcca

SEQ ID NO: 4960956 - DNA, 25 bp, Homo sapien
tcgtgggcgagcacaaggctcattt

SEQ ID NO: 4960957 - DNA, 25 bp, Homo sapien
tgggcgagcacaaggctcatttgct

SEQ ID NO: 4960958 - DNA, 25 bp, Homo sapien
cgagcacaaggctcatttgctccac

SEQ ID NO: 4960959 - DNA, 25 bp, Homo sapien
cgaaaaagagacatcacctggccct

SEQ ID NO: 4960960 - DNA, 25 bp, Homo sapien
tggagcacgaaaaagagacatcacc

SEQ ID NO: 4960961 - DNA, 25 bp, Homo sapien
acctggcccttggtgtctcggggat

SEQ ID NO: 4960962 - DNA, 25 bp, Homo sapien
tgtctcggggatgcctgttgctgcc

SEQ ID NO: 4960963 - DNA, 25 bp, Homo sapien
ccggaccctcttcctgcggcccctg

SEQ ID NO: 4960964 - DNA, 25 bp, Homo sapien
tgctcctgcggcctcgcgtccccac

SEQ ID NO: 4960965 - DNA, 25 bp, Homo sapien
cggaccctcttcctgcggcccctgc

SEQ ID NO: 4960966 - DNA, 25 bp, Homo sapien
ccctgctcctgcggcctcgcgtccc

SEQ ID NO: 4960967 - DNA, 25 bp, Homo sapien
ttcttcacctccgacaccagtgtca

SEQ ID NO: 4960968 - DNA, 25 bp, Homo sapien
tcggtgctgggaatagacgaacccc

SEQ ID NO: 4960969 - DNA, 25 bp, Homo sapien
ccaggatcagcatcggtgctgggaa

SEQ ID NO: 4960970 - DNA, 25 bp, Homo sapien
gtccccgccaggatcagcatcggtg

SEQ ID NO: 4960971 - DNA, 25 bp, Homo sapien
ccgaggcgggcagagaaactttcgg

SEQ ID NO: 4960972 - DNA, 25 bp, Homo sapien
gggccggtcccactgcgcgggatgc

SEQ ID NO: 4960973 - DNA, 25 bp, Homo sapien
ctgcgcgggatgcagctcccggctc

SEQ ID NO: 4960974 - DNA, 25 bp, Homo sapien
gcgggcagagaaactttcggcctcc

SEQ ID NO: 4960975 - DNA, 25 bp, Homo sapien
ccatcagccccattgggcgaccctg

SEQ ID NO: 4960976 - DNA, 25 bp, Homo sapien
tccatcagccccattgggcgaccct

SEQ ID NO: 4960977 - DNA, 25 bp, Homo sapien
tcagccccattgggcgaccctgccc

SEQ ID NO: 4960978 - DNA, 25 bp, Homo sapien
cccattgggcgaccctgccccctca

SEQ ID NO: 4960979 - DNA, 25 bp, Homo sapien
tcaaggccacgtccatatccgtcca

SEQ ID NO: 4960980 - DNA, 25 bp, Homo sapien
catcaaggccacgtccatatccgtc

SEQ ID NO: 4960981 - DNA, 25 bp, Homo sapien
atcaaggccacgtccatatccgtcc

SEQ ID NO: 4960982 - DNA, 25 bp, Homo sapien
caaggccacgtccatatccgtccat

SEQ ID NO: 4960983 - DNA, 25 bp, Homo sapien
caccgtctgcactgtatgagaagga

SEQ ID NO: 4960984 - DNA, 25 bp, Homo sapien
ggactccatctgtgtacaccgtctg

SEQ ID NO: 4960985 - DNA, 25 bp, Homo sapien
gacatcgagatgcttgcagagcttg

SEQ ID NO: 4960986 - DNA, 25 bp, Homo sapien
taatacttagtgctgtcccagggcc

SEQ ID NO: 4960987 - DNA, 25 bp, Homo sapien
tcaaattcatgaatcctgttaaaat

SEQ ID NO: 4960988 - DNA, 25 bp, Homo sapien
aaattcatgaatcctgttaaaatat

SEQ ID NO: 4960989 - DNA, 25 bp, Homo sapien
ttcaaattcatgaatcctgttaaaa

SEQ ID NO: 4960990 - DNA, 25 bp, Homo sapien
caaattcatgaatcctgttaaaata

SEQ ID NO: 4960991 - DNA, 25 bp, Homo sapien
ccttcttattgtcgttgcccaccat

SEQ ID NO: 4960992 - DNA, 25 bp, Homo sapien
ggtggtcccttcttattgtcgttgc

SEQ ID NO: 4960993 - DNA, 25 bp, Homo sapien
actggtggtcccttcttattgtcgt

SEQ ID NO: 4960994 - DNA, 25 bp, Homo sapien
ggtcccttcttattgtcgttgccca

SEQ ID NO: 4960995 - DNA, 25 bp, Homo sapien
gcaccctattgtgctgaactcccag

SEQ ID NO: 4960996 - DNA, 25 bp, Homo sapien
tgaactcccagcgtcttggctctgc

SEQ ID NO: 4960997 - DNA, 25 bp, Homo sapien
tagcgtggtgtggaggcaccctatt

SEQ ID NO: 4960998 - DNA, 25 bp, Homo sapien
cccagatagcgtggtgtggaggcac

SEQ ID NO: 4960999 - DNA, 25 bp, Homo sapien
cagggtcatggtattcacagcgctg

SEQ ID NO: 4961000 - DNA, 25 bp, Homo sapien
tcacagcgctgctgtgagtcagcgc

SEQ ID NO: 4961001 - DNA, 25 bp, Homo sapien
ctttgtcatcgtcggaggcaccgga

SEQ ID NO: 4961002 - DNA, 25 bp, Homo sapien
cagcgctgacccttctttgtcatcg

SEQ ID NO: 4961003 - DNA, 25 bp, Homo sapien
tcatgcctgcattccgggcagaatt

SEQ ID NO: 4961004 - DNA, 25 bp, Homo sapien
ggcaggtcaccactttcgtcttatc

SEQ ID NO: 4961005 - DNA, 25 bp, Homo sapien
aattactccaaaggaggaagcagca

SEQ ID NO: 4961006 - DNA, 25 bp, Homo sapien
ctttcgtcttatcatcagaactgga

SEQ ID NO: 4961007 - DNA, 25 bp, Homo sapien
ccacaggactgatgaagcacactct

SEQ ID NO: 4961008 - DNA, 25 bp, Homo sapien
gtttccctttgcattgccgcccatg

SEQ ID NO: 4961009 - DNA, 25 bp, Homo sapien
cacactctgtggttgtcactagtga

SEQ ID NO: 4961010 - DNA, 25 bp, Homo sapien
cgcccatgcccacaggactgatgaa

SEQ ID NO: 4961011 - DNA, 25 bp, Homo sapien
tggtaggaaatctggttcaggcagt

SEQ ID NO: 4961012 - DNA, 25 bp, Homo sapien
tctttgcttcactaatgcaattgcc

SEQ ID NO: 4961013 - DNA, 25 bp, Homo sapien
cccatccatattgcctgcctgcttc

SEQ ID NO: 4961014 - DNA, 25 bp, Homo sapien
tctgtccccatccatattgcctgcc

SEQ ID NO: 4961015 - DNA, 25 bp, Homo sapien
aagccacgtgtgagccgtgaaggta

SEQ ID NO: 4961016 - DNA, 25 bp, Homo sapien
tttacgctggcgtggagcctcagac

SEQ ID NO: 4961017 - DNA, 25 bp, Homo sapien
tgtgagccgtgaaggtaagcagctc

SEQ ID NO: 4961018 - DNA, 25 bp, Homo sapien
ccaataggattgtcgttttacgctg

SEQ ID NO: 4961019 - DNA, 25 bp, Homo sapien
cttggattagacatcacttccacca

SEQ ID NO: 4961020 - DNA, 25 bp, Homo sapien
catcttggttgttgggttgaggctt

SEQ ID NO: 4961021 - DNA, 25 bp, Homo sapien
acttccaccattagcagctcacaag

SEQ ID NO: 4961022 - DNA, 25 bp, Homo sapien
gccactggattttttgggctacatc

SEQ ID NO: 4961023 - DNA, 25 bp, Homo sapien
tgaggtctgagaccgccattcgttt

SEQ ID NO: 4961024 - DNA, 25 bp, Homo sapien
gtctgagaccgccattcgtttctgg

SEQ ID NO: 4961025 - DNA, 25 bp, Homo sapien
tgagaccgccattcgtttctggcat

SEQ ID NO: 4961026 - DNA, 25 bp, Homo sapien
tccctgaggtctgagaccgccattc

SEQ ID NO: 4961027 - DNA, 25 bp, Homo sapien
tcacaccgttcagcccctccctgtc

SEQ ID NO: 4961028 - DNA, 25 bp, Homo sapien
aaataatcctgtgtcatcatgagga

SEQ ID NO: 4961029 - DNA, 25 bp, Homo sapien
tgagggccgagggaaaagtttgctg

SEQ ID NO: 4961030 - DNA, 25 bp, Homo sapien
cctgtgtcatcatgaggaagagctt

SEQ ID NO: 4961031 - DNA, 25 bp, Homo sapien
gtctaatcttggaggagcaggcacc

SEQ ID NO: 4961032 - DNA, 25 bp, Homo sapien
ttagtctaatcttggaggagcaggc

SEQ ID NO: 4961033 - DNA, 25 bp, Homo sapien
tagtctaatcttggaggagcaggca

SEQ ID NO: 4961034 - DNA, 25 bp, Homo sapien
tctaatcttggaggagcaggcaccc

SEQ ID NO: 4961035 - DNA, 25 bp, Homo sapien
tctgaaggtgctttagacctgcctg

SEQ ID NO: 4961036 - DNA, 25 bp, Homo sapien
aaggtgctttagacctgcctgtccc

SEQ ID NO: 4961037 - DNA, 25 bp, Homo sapien
tgaaggtgctttagacctgcctgtc

SEQ ID NO: 4961038 - DNA, 25 bp, Homo sapien
gaaggtgctttagacctgcctgtcc

SEQ ID NO: 4961039 - DNA, 25 bp, Homo sapien
tgatttggagtctacagggcttgca

SEQ ID NO: 4961040 - DNA, 25 bp, Homo sapien
gaaaagtgaaaggtagcccaggctc

SEQ ID NO: 4961041 - DNA, 25 bp, Homo sapien
taagattaggcattcctgggtcctc

SEQ ID NO: 4961042 - DNA, 25 bp, Homo sapien
tcagagacctcactggttgagacag

SEQ ID NO: 4961043 - DNA, 25 bp, Homo sapien
tttgccagtgccgttgtctcaaccc

SEQ ID NO: 4961044 - DNA, 25 bp, Homo sapien
tctccggttttcataatcatccaag

SEQ ID NO: 4961045 - DNA, 25 bp, Homo sapien
catccaagtgcatctctatgctctg

SEQ ID NO: 4961046 - DNA, 25 bp, Homo sapien
tctgctttgccagtgccgttgtctc

SEQ ID NO: 4961047 - DNA, 25 bp, Homo sapien
tagttcacagaatgcttgtaaagga

SEQ ID NO: 4961048 - DNA, 25 bp, Homo sapien
cttcaaatagttcacagaatgcttg

SEQ ID NO: 4961049 - DNA, 25 bp, Homo sapien
taaacatttccaaaccaaggtgaca

SEQ ID NO: 4961050 - DNA, 25 bp, Homo sapien
gcttgtaaaggagagagactaataa

SEQ ID NO: 4961051 - DNA, 25 bp, Homo sapien
gacttgggccacaaagcaggattgg

SEQ ID NO: 4961052 - DNA, 25 bp, Homo sapien
tggactgatgtctgcgacttgggcc

SEQ ID NO: 4961053 - DNA, 25 bp, Homo sapien
ccttgtgaatagtcgcgtggcagcc

SEQ ID NO: 4961054 - DNA, 25 bp, Homo sapien
tggcctccataggttctgatgtgat

SEQ ID NO: 4961055 - DNA, 25 bp, Homo sapien
ttgtggcaaaaacaactacttgtgt

SEQ ID NO: 4961056 - DNA, 25 bp, Homo sapien
tgtggcaaaaacaactacttgtgta

SEQ ID NO: 4961057 - DNA, 25 bp, Homo sapien
gcacctagtgaggtcacctgactca

SEQ ID NO: 4961058 - DNA, 25 bp, Homo sapien
gttggcacctagtgaggtcacctga

SEQ ID NO: 4961059 - DNA, 25 bp, Homo sapien
tgcttttcatgggttggcacctagt

SEQ ID NO: 4961060 - DNA, 25 bp, Homo sapien
catgggttggcacctagtgaggtca

SEQ ID NO: 4961061 - DNA, 25 bp, Homo sapien
ctgtgtgatgctgggttgccatgac

SEQ ID NO: 4961062 - DNA, 25 bp, Homo sapien
tcaagcgactgtggcactcactacc

SEQ ID NO: 4961063 - DNA, 25 bp, Homo sapien
ctcactacctttataatttctctcg

SEQ ID NO: 4961064 - DNA, 25 bp, Homo sapien
ccttcaagcgactgtggcactcact

SEQ ID NO: 4961065 - DNA, 25 bp, Homo sapien
ctgccattttctggcaggtagctca

SEQ ID NO: 4961066 - DNA, 25 bp, Homo sapien
ctggaccgggaaacatgcagccata

SEQ ID NO: 4961067 - DNA, 25 bp, Homo sapien
tgtctgctgccaatagcctgattgc

SEQ ID NO: 4961068 - DNA, 25 bp, Homo sapien
caaatgatgcctgattgtctgctgc

SEQ ID NO: 4961069 - DNA, 25 bp, Homo sapien
tacacacgaacttgctgggactgat

SEQ ID NO: 4961070 - DNA, 25 bp, Homo sapien
ttgcagttcagaccggaaaggatcg

SEQ ID NO: 4961071 - DNA, 25 bp, Homo sapien
gaaaggatcgggctccatagggaac

SEQ ID NO: 4961072 - DNA, 25 bp, Homo sapien
tagggaactctatgcaactggctgt

SEQ ID NO: 4961073 - DNA, 25 bp, Homo sapien
taatacaagatagtgatataagcca

SEQ ID NO: 4961074 - DNA, 25 bp, Homo sapien
tataagccatggatcttctcatgcc

SEQ ID NO: 4961075 - DNA, 25 bp, Homo sapien
caagatagtgatataagccatggat

SEQ ID NO: 4961076 - DNA, 25 bp, Homo sapien
gaagaagtaatacaagatagtgata

SEQ ID NO: 4961077 - DNA, 25 bp, Homo sapien
tcattgcactggtggatggcaagag

SEQ ID NO: 4961078 - DNA, 25 bp, Homo sapien
gctcattgcactggtggatggcaag

SEQ ID NO: 4961079 - DNA, 25 bp, Homo sapien
cttcctgctcattgcactggtggat

SEQ ID NO: 4961080 - DNA, 25 bp, Homo sapien
cctgctcattgcactggtggatggc

SEQ ID NO: 4961081 - DNA, 25 bp, Homo sapien
ctgggtctctctggcaagctttggg

SEQ ID NO: 4961082 - DNA, 25 bp, Homo sapien
tgttgccaggttcctgccacctgct

SEQ ID NO: 4961083 - DNA, 25 bp, Homo sapien
tctggcaagctttggggtctgcaca

SEQ ID NO: 4961084 - DNA, 25 bp, Homo sapien
catggtgtgggttctctctgttgcc

SEQ ID NO: 4961085 - DNA, 25 bp, Homo sapien
aacaacagatctattgtgaaacagg

SEQ ID NO: 4961086 - DNA, 25 bp, Homo sapien
tgtgaaacaggtcgccctccttaga

SEQ ID NO: 4961087 - DNA, 25 bp, Homo sapien
ttcaggccctttccgataaacaaca

SEQ ID NO: 4961088 - DNA, 25 bp, Homo sapien
tccttagaagcctttgagcaaccct

SEQ ID NO: 4961089 - DNA, 25 bp, Homo sapien
gagaaggtctcaacctggagctttc

SEQ ID NO: 4961090 - DNA, 25 bp, Homo sapien
gaaggtctcaacctggagctttcca

SEQ ID NO: 4961091 - DNA, 25 bp, Homo sapien
aaggtctcaacctggagctttccat

SEQ ID NO: 4961092 - DNA, 25 bp, Homo sapien
gagaggagaaggtctcaacctggag

SEQ ID NO: 4961093 - DNA, 25 bp, Homo sapien
ttccggtgatgctttcgttccaggc

SEQ ID NO: 4961094 - DNA, 25 bp, Homo sapien
cggtgatgctttcgttccaggcaac

SEQ ID NO: 4961095 - DNA, 25 bp, Homo sapien
cagatttccggtgatgctttcgttc

SEQ ID NO: 4961096 - DNA, 25 bp, Homo sapien
ttctcatcagatttccggtgatgct

SEQ ID NO: 4961097 - DNA, 25 bp, Homo sapien
attctgttcatttgcccaacagtgc

SEQ ID NO: 4961098 - DNA, 25 bp, Homo sapien
ttgttgcattctgagttgcattctg

SEQ ID NO: 4961099 - DNA, 25 bp, Homo sapien
tgttcatttgcccaacagtgctcat

SEQ ID NO: 4961100 - DNA, 25 bp, Homo sapien
aagtgcaatttgttgcattctgagt

SEQ ID NO: 4961101 - DNA, 25 bp, Homo sapien
gaggctatgatgctcttcactaaat

SEQ ID NO: 4961102 - DNA, 25 bp, Homo sapien
cgtgcacccagcagtcaatgtggcc

SEQ ID NO: 4961103 - DNA, 25 bp, Homo sapien
tgctcttcactaaatgtggcccctg

SEQ ID NO: 4961104 - DNA, 25 bp, Homo sapien
ggcctgaagactcagtccaagtggc

SEQ ID NO: 4961105 - DNA, 25 bp, Homo sapien
tgaataaaaatgatccggaagccgt

SEQ ID NO: 4961106 - DNA, 25 bp, Homo sapien
agcaccaaacaagaactgtagccgt

SEQ ID NO: 4961107 - DNA, 25 bp, Homo sapien
ctgtagccgtcagaagctgcgtgga

SEQ ID NO: 4961108 - DNA, 25 bp, Homo sapien
agtactgtgagtgaaatgcgcaaaa

SEQ ID NO: 4961109 - DNA, 25 bp, Homo sapien
tggcggtgaagcttggggagaggct

SEQ ID NO: 4961110 - DNA, 25 bp, Homo sapien
aatgtctcgaaagccgccctcagac

SEQ ID NO: 4961111 - DNA, 25 bp, Homo sapien
caatgtctcgaaagccgccctcaga

SEQ ID NO: 4961112 - DNA, 25 bp, Homo sapien
aggtgggtgggtggcggtgaagctt

SEQ ID NO: 4961113 - DNA, 25 bp, Homo sapien
gctccctttccatacactacctctg

SEQ ID NO: 4961114 - DNA, 25 bp, Homo sapien
ctctggctaatggtccgatcccagc

SEQ ID NO: 4961115 - DNA, 25 bp, Homo sapien
gcactgacagctcggttcatacatt

SEQ ID NO: 4961116 - DNA, 25 bp, Homo sapien
ctacctctggctaatggtccgatcc

SEQ ID NO: 4961117 - DNA, 25 bp, Homo sapien
gctcctggaagaggtctttccttac

SEQ ID NO: 4961118 - DNA, 25 bp, Homo sapien
gaagaggtctttccttacactgcat

SEQ ID NO: 4961119 - DNA, 25 bp, Homo sapien
ctggaagaggtctttccttacactg

SEQ ID NO: 4961120 - DNA, 25 bp, Homo sapien
ctcctggaagaggtctttccttaca

SEQ ID NO: 4961121 - DNA, 25 bp, Homo sapien
gggctggagtatgccctgcagtgct

SEQ ID NO: 4961122 - DNA, 25 bp, Homo sapien
aaggtctgggacagtagagatagca

SEQ ID NO: 4961123 - DNA, 25 bp, Homo sapien
ttctgggtccaaaagccacgggcta

SEQ ID NO: 4961124 - DNA, 25 bp, Homo sapien
gtagagatagcaagttgcccctttc

SEQ ID NO: 4961125 - DNA, 25 bp, Homo sapien
aactgcagagctcctacttggatgc

SEQ ID NO: 4961126 - DNA, 25 bp, Homo sapien
cctacttggatgcaggcactgtggt

SEQ ID NO: 4961127 - DNA, 25 bp, Homo sapien
ggaaactgcagagctcctacttgga

SEQ ID NO: 4961128 - DNA, 25 bp, Homo sapien
cagagctcctacttggatgcaggca

SEQ ID NO: 4961129 - DNA, 25 bp, Homo sapien
gagtagttcagacgttgtgaatcac

SEQ ID NO: 4961130 - DNA, 25 bp, Homo sapien
agcattatccacatgaagggaaggg

SEQ ID NO: 4961131 - DNA, 25 bp, Homo sapien
tctgcaagccgtagcagacatttga

SEQ ID NO: 4961132 - DNA, 25 bp, Homo sapien
gagagccagcattatccacatgaag

SEQ ID NO: 4961133 - DNA, 25 bp, Homo sapien
atgaaagcagctttacgatcccata

SEQ ID NO: 4961134 - DNA, 25 bp, Homo sapien
ttacgatcccataaatccaagaaga

SEQ ID NO: 4961135 - DNA, 25 bp, Homo sapien
aaatgaagctagaaggcttgaaggc

SEQ ID NO: 4961136 - DNA, 25 bp, Homo sapien
gctggctaggagtggaagcccactt

SEQ ID NO: 4961137 - DNA, 25 bp, Homo sapien
cttccaaatgaagctagaaggcttg

SEQ ID NO: 4961138 - DNA, 25 bp, Homo sapien
ttctcaagagatgaagcaaagggta

SEQ ID NO: 4961139 - DNA, 25 bp, Homo sapien
tgtggatttgttcaccatgatgtcc

SEQ ID NO: 4961140 - DNA, 25 bp, Homo sapien
catcataaaatctagtgcaacagcc

SEQ ID NO: 4961141 - DNA, 25 bp, Homo sapien
catcaggaccactggagtcctctat

SEQ ID NO: 4961142 - DNA, 25 bp, Homo sapien
tttccttgaagcctatgggtgctgg

SEQ ID NO: 4961143 - DNA, 25 bp, Homo sapien
ctctgtggccacccatgccttggtc

SEQ ID NO: 4961144 - DNA, 25 bp, Homo sapien
ctgtggccacccatgccttggtcat

SEQ ID NO: 4961145 - DNA, 25 bp, Homo sapien
tctgtggccacccatgccttggtca

SEQ ID NO: 4961146 - DNA, 25 bp, Homo sapien
aaaatgtgtagcatgagtccttggc

SEQ ID NO: 4961147 - DNA, 25 bp, Homo sapien
cagtccacaagtcagtgccttattt

SEQ ID NO: 4961148 - DNA, 25 bp, Homo sapien
tcatgagactttttgacagtccaca

SEQ ID NO: 4961149 - DNA, 25 bp, Homo sapien
ccttattttcagagggtgattggcg

SEQ ID NO: 4961150 - DNA, 25 bp, Homo sapien
tccttgttacgccggatggcaggcc

SEQ ID NO: 4961151 - DNA, 25 bp, Homo sapien
ttgttacgccggatggcaggcctct

SEQ ID NO: 4961152 - DNA, 25 bp, Homo sapien
cttccttgttacgccggatggcagg

SEQ ID NO: 4961153 - DNA, 25 bp, Homo sapien
cttgttacgccggatggcaggcctc

SEQ ID NO: 4961154 - DNA, 25 bp, Homo sapien
tgccttggtctgctggttggcccat

SEQ ID NO: 4961155 - DNA, 25 bp, Homo sapien
tacaaagagcatgaggtgatgtgtg

SEQ ID NO: 4961156 - DNA, 25 bp, Homo sapien
gggatgacggatgggagcagggctt

SEQ ID NO: 4961157 - DNA, 25 bp, Homo sapien
ggccatttctgcgttgctgtgcggt

SEQ ID NO: 4961158 - DNA, 25 bp, Homo sapien
tcacaccccctgatggactgcctcc

SEQ ID NO: 4961159 - DNA, 25 bp, Homo sapien
caccccctgatggactgcctccttc

SEQ ID NO: 4961160 - DNA, 25 bp, Homo sapien
actcacaccccctgatggactgcct

SEQ ID NO: 4961161 - DNA, 25 bp, Homo sapien
acaccccctgatggactgcctcctt

SEQ ID NO: 4961162 - DNA, 25 bp, Homo sapien
gctgcgaggtcctctcaggtcctgg

SEQ ID NO: 4961163 - DNA, 25 bp, Homo sapien
gcacttccttgtgggggcctttaga

SEQ ID NO: 4961164 - DNA, 25 bp, Homo sapien
gacacacgatagaagcttgctcggg

SEQ ID NO: 4961165 - DNA, 25 bp, Homo sapien
tgaaggcagagtgggctgcgaggtc

SEQ ID NO: 4961166 - DNA, 25 bp, Homo sapien
catctggaggaagattagcatcagc

SEQ ID NO: 4961167 - DNA, 25 bp, Homo sapien
cttgtactgtgtcctgtgctaccca

SEQ ID NO: 4961168 - DNA, 25 bp, Homo sapien
cccattggcaatgcagacagcaggg

SEQ ID NO: 4961169 - DNA, 25 bp, Homo sapien
tgcatctggaggaagattagcatca

SEQ ID NO: 4961170 - DNA, 25 bp, Homo sapien
ggcgttatcatgcaagctgtgcagt

SEQ ID NO: 4961171 - DNA, 25 bp, Homo sapien
aatgttttacaggtagcggtagctc

SEQ ID NO: 4961172 - DNA, 25 bp, Homo sapien
tctcaagatcggagtcactgcagac

SEQ ID NO: 4961173 - DNA, 25 bp, Homo sapien
gctgtgcagtgtgccccaactctca

SEQ ID NO: 4961174 - DNA, 25 bp, Homo sapien
caggtgggctctggtagtctcccca

SEQ ID NO: 4961175 - DNA, 25 bp, Homo sapien
tcacatcggaggtacctggccaggt

SEQ ID NO: 4961176 - DNA, 25 bp, Homo sapien
tgctctaggaccacctggagggaca

SEQ ID NO: 4961177 - DNA, 25 bp, Homo sapien
gaggactccacagcgtgctctagga

SEQ ID NO: 4961178 - DNA, 25 bp, Homo sapien
ttcgatgtctctggttggcaggaga

SEQ ID NO: 4961179 - DNA, 25 bp, Homo sapien
ttggcaggagaggtgctgactaagc

SEQ ID NO: 4961180 - DNA, 25 bp, Homo sapien
gaggtgctgactaagcggctgttca

SEQ ID NO: 4961181 - DNA, 25 bp, Homo sapien
ggccttcgatgtctctggttggcag

SEQ ID NO: 4961182 - DNA, 25 bp, Homo sapien
gcgtgtggccttgaagtcccctgtg

SEQ ID NO: 4961183 - DNA, 25 bp, Homo sapien
ccttccttttgtgcccagcgtgtgg

SEQ ID NO: 4961184 - DNA, 25 bp, Homo sapien
tgtgtccagccagggatgactcctt

SEQ ID NO: 4961185 - DNA, 25 bp, Homo sapien
agggatgactccttgcagagcacag

SEQ ID NO: 4961186 - DNA, 25 bp, Homo sapien
tcagagagaaccactgacttggggt

SEQ ID NO: 4961187 - DNA, 25 bp, Homo sapien
ggttaccataatgcagttgggcctt

SEQ ID NO: 4961188 - DNA, 25 bp, Homo sapien
tcaaccctggttaccataatgcagt

SEQ ID NO: 4961189 - DNA, 25 bp, Homo sapien
gaaccactgacttggggttagatgg

SEQ ID NO: 4961190 - DNA, 25 bp, Homo sapien
aagagaaatgagtgcatgtgggctc

SEQ ID NO: 4961191 - DNA, 25 bp, Homo sapien
gaagagaaatgagtgcatgtgggct

SEQ ID NO: 4961192 - DNA, 25 bp, Homo sapien
agagaaatgagtgcatgtgggctcc

SEQ ID NO: 4961193 - DNA, 25 bp, Homo sapien
gtgccctgaaaatactgaagaccgc

SEQ ID NO: 4961194 - DNA, 25 bp, Homo sapien
tgtcctgacattgtggtgccctgaa

SEQ ID NO: 4961195 - DNA, 25 bp, Homo sapien
tcaaactggatagaaattgcggtgc

SEQ ID NO: 4961196 - DNA, 25 bp, Homo sapien
taaacgcagcaccataacaatagtc

SEQ ID NO: 4961197 - DNA, 25 bp, Homo sapien
tcaagtcacgctctttgcacttgct

SEQ ID NO: 4961198 - DNA, 25 bp, Homo sapien
aagggagttgtgttttccggcatgt

SEQ ID NO: 4961199 - DNA, 25 bp, Homo sapien
gatgtgtcatcaagccagggacttc

SEQ ID NO: 4961200 - DNA, 25 bp, Homo sapien
gcttttgtgatgtgtcatcaagcca

SEQ ID NO: 4961201 - DNA, 25 bp, Homo sapien
caagaccttcttgaacggcatcaac

SEQ ID NO: 4961202 - DNA, 25 bp, Homo sapien
cctcggaagaagctggtgtaggcga

SEQ ID NO: 4961203 - DNA, 25 bp, Homo sapien
gaacggcatcaacagtaaaagacac

SEQ ID NO: 4961204 - DNA, 25 bp, Homo sapien
cggaagaagctggtgtaggcgacat

SEQ ID NO: 4961205 - DNA, 25 bp, Homo sapien
ttctgtctccaagttcgttcctgca

SEQ ID NO: 4961206 - DNA, 25 bp, Homo sapien
gttatgataagcatttctgccaaaa

SEQ ID NO: 4961207 - DNA, 25 bp, Homo sapien
gcagatgtttccaatcctcatcact

SEQ ID NO: 4961208 - DNA, 25 bp, Homo sapien
agcatgttttcctgcgcaaccagac

SEQ ID NO: 4961209 - DNA, 25 bp, Homo sapien
ctggtggtcctgacttggatccccc

SEQ ID NO: 4961210 - DNA, 25 bp, Homo sapien
ctggttggtagcttgcagatgaggt

SEQ ID NO: 4961211 - DNA, 25 bp, Homo sapien
gtggtcctgacttggatcccccaga

SEQ ID NO: 4961212 - DNA, 25 bp, Homo sapien
gtcctgacttggatcccccagaggc

SEQ ID NO: 4961213 - DNA, 25 bp, Homo sapien
taggaactagatcccggtccacttg

SEQ ID NO: 4961214 - DNA, 25 bp, Homo sapien
catataggaactagatcccggtcca

SEQ ID NO: 4961215 - DNA, 25 bp, Homo sapien
tgcatataggaactagatcccggtc

SEQ ID NO: 4961216 - DNA, 25 bp, Homo sapien
ttctgcatataggaactagatcccg

SEQ ID NO: 4961217 - DNA, 25 bp, Homo sapien
cctgatagttccccattcgaacttc

SEQ ID NO: 4961218 - DNA, 25 bp, Homo sapien
gtggcctgatagttccccattcgaa

SEQ ID NO: 4961219 - DNA, 25 bp, Homo sapien
ggcctgatagttccccattcgaact

SEQ ID NO: 4961220 - DNA, 25 bp, Homo sapien
cgtggcctgatagttccccattcga

SEQ ID NO: 4961221 - DNA, 25 bp, Homo sapien
ttcttctggcagcacatccaggttc

SEQ ID NO: 4961222 - DNA, 25 bp, Homo sapien
ggagaagaactggtgagaaagctcc

SEQ ID NO: 4961223 - DNA, 25 bp, Homo sapien
tacataatgacagctgggagaagaa

SEQ ID NO: 4961224 - DNA, 25 bp, Homo sapien
gcacatccaggttcttacataatga

SEQ ID NO: 4961225 - DNA, 25 bp, Homo sapien
gagcataactcagtgcttggcacac

SEQ ID NO: 4961226 - DNA, 25 bp, Homo sapien
cttggcacacggataggcctgttca

SEQ ID NO: 4961227 - DNA, 25 bp, Homo sapien
aattcccgtatgagcttccgcatgg

SEQ ID NO: 4961228 - DNA, 25 bp, Homo sapien
tggtctgagcataactcagtgagct

SEQ ID NO: 4961229 - DNA, 25 bp, Homo sapien
gcctgtgcttccccatcaacacggc

SEQ ID NO: 4961230 - DNA, 25 bp, Homo sapien
tattgccttccaggtacccactgtg

SEQ ID NO: 4961231 - DNA, 25 bp, Homo sapien
agcctgtgcttccccatcaacacgg

SEQ ID NO: 4961232 - DNA, 25 bp, Homo sapien
tagcaggggatgaagcttgcacagc

SEQ ID NO: 4961233 - DNA, 25 bp, Homo sapien
tctggagcgctcagccctgatggag

SEQ ID NO: 4961234 - DNA, 25 bp, Homo sapien
tcttccagaggcaagacctagcagg

SEQ ID NO: 4961235 - DNA, 25 bp, Homo sapien
tcatgcagctctactgtggactggg

SEQ ID NO: 4961236 - DNA, 25 bp, Homo sapien
tgaaacggaggcatcgacatccttg

SEQ ID NO: 4961237 - DNA, 25 bp, Homo sapien
tattttccagggagatcagtgggct

SEQ ID NO: 4961238 - DNA, 25 bp, Homo sapien
tcagtgggctcctctgtgaaacgga

SEQ ID NO: 4961239 - DNA, 25 bp, Homo sapien
aaggtgcagcagctttagggaagac

SEQ ID NO: 4961240 - DNA, 25 bp, Homo sapien
ctcttagcttgatttaaaaaataat

SEQ ID NO: 4961241 - DNA, 25 bp, Homo sapien
tgatttaaaaaataattcctagcca

SEQ ID NO: 4961242 - DNA, 25 bp, Homo sapien
tgcagtgcctaaatctatagcaaat

SEQ ID NO: 4961243 - DNA, 25 bp, Homo sapien
ttcttctgatgccgctgctttctac

SEQ ID NO: 4961244 - DNA, 25 bp, Homo sapien
ctatagcaaatgtcagcagccaggc

SEQ ID NO: 4961245 - DNA, 25 bp, Homo sapien
catgagtaatttcttttaacccgag

SEQ ID NO: 4961246 - DNA, 25 bp, Homo sapien
aaagatttcttctcgactgacactg

SEQ ID NO: 4961247 - DNA, 25 bp, Homo sapien
ctgacactgtggagaagccgctgtg

SEQ ID NO: 4961248 - DNA, 25 bp, Homo sapien
tcttctcgactgacactgtggagaa

SEQ ID NO: 4961249 - DNA, 25 bp, Homo sapien
tctcgactgacactgtggagaagcc

SEQ ID NO: 4961250 - DNA, 25 bp, Homo sapien
tccaccaatccaagaggacaggttt

SEQ ID NO: 4961251 - DNA, 25 bp, Homo sapien
gaaagagtccaccaatccaagagga

SEQ ID NO: 4961252 - DNA, 25 bp, Homo sapien
gagtccaccaatccaagaggacagg

SEQ ID NO: 4961253 - DNA, 25 bp, Homo sapien
tgaagtggacacaagaaagagtcca

SEQ ID NO: 4961254 - DNA, 25 bp, Homo sapien
aaaacttgccgatcatccctgtggc

SEQ ID NO: 4961255 - DNA, 25 bp, Homo sapien
cttatcaataataccagcgagatga

SEQ ID NO: 4961256 - DNA, 25 bp, Homo sapien
taccagcgagatgagatgtggttgt

SEQ ID NO: 4961257 - DNA, 25 bp, Homo sapien
gggtgtaaaaacttgccgatcatcc

SEQ ID NO: 4961258 - DNA, 25 bp, Homo sapien
atggattcatttgcaccgatatcgg

SEQ ID NO: 4961259 - DNA, 25 bp, Homo sapien
tcatttgcaccgatatcggcatgtc

SEQ ID NO: 4961260 - DNA, 25 bp, Homo sapien
tgtgcatttcatagcaatggattca

SEQ ID NO: 4961261 - DNA, 25 bp, Homo sapien
taggtgtgtgcatttcatagcaatg

SEQ ID NO: 4961262 - DNA, 25 bp, Homo sapien
cctggggacgatcgtgtaaataaca

SEQ ID NO: 4961263 - DNA, 25 bp, Homo sapien
ggtcctggggacgatcgtgtaaata

SEQ ID NO: 4961264 - DNA, 25 bp, Homo sapien
ggacgatcgtgtaaataacaaacga

SEQ ID NO: 4961265 - DNA, 25 bp, Homo sapien
tcgtgtaaataacaaacgagtgcac

SEQ ID NO: 4961266 - DNA, 25 bp, Homo sapien
caggtggcagcgctcacaaacgata

SEQ ID NO: 4961267 - DNA, 25 bp, Homo sapien
ggcgcccagaggcagaacatccagc

SEQ ID NO: 4961268 - DNA, 25 bp, Homo sapien
ccagaggcagaacatccagcaggtg

SEQ ID NO: 4961269 - DNA, 25 bp, Homo sapien
acaaacgatacagcctgcactgaca

SEQ ID NO: 4961270 - DNA, 25 bp, Homo sapien
gtgaccagctatgtttataaacaag

SEQ ID NO: 4961271 - DNA, 25 bp, Homo sapien
gtgggtgtccctgagatctcacaac

SEQ ID NO: 4961272 - DNA, 25 bp, Homo sapien
attcctgctacactcagctcagctt

SEQ ID NO: 4961273 - DNA, 25 bp, Homo sapien
cagcttcctgtagtgaccagctatg

SEQ ID NO: 4961274 - DNA, 25 bp, Homo sapien
ccttttctcatatgcacacggtgga

SEQ ID NO: 4961275 - DNA, 25 bp, Homo sapien
tggccagagaaccatcctgtccttt

SEQ ID NO: 4961276 - DNA, 25 bp, Homo sapien
ttgacggcggtcctttctttctgcg

SEQ ID NO: 4961277 - DNA, 25 bp, Homo sapien
cggtggacacatgacgcaaatgctt

SEQ ID NO: 4961278 - DNA, 25 bp, Homo sapien
tcatcccgttgtcgttccagctgca

SEQ ID NO: 4961279 - DNA, 25 bp, Homo sapien
tgtcgttccagctgcatcgtgggct

SEQ ID NO: 4961280 - DNA, 25 bp, Homo sapien
attggctgagatgatttagagggca

SEQ ID NO: 4961281 - DNA, 25 bp, Homo sapien
agccatccagtcatcccgttgtcgt

SEQ ID NO: 4961282 - DNA, 25 bp, Homo sapien
gaaacttgtgcttcatctatgacca

SEQ ID NO: 4961283 - DNA, 25 bp, Homo sapien
agatctcagtggaaacttgtgcttc

SEQ ID NO: 4961284 - DNA, 25 bp, Homo sapien
cttgtgcttcatctatgaccaagac

SEQ ID NO: 4961285 - DNA, 25 bp, Homo sapien
tctcagtggaaacttgtgcttcatc

SEQ ID NO: 4961286 - DNA, 25 bp, Homo sapien
ccacaccctcttagggatgcagctt

SEQ ID NO: 4961287 - DNA, 25 bp, Homo sapien
cccacaccctcttagggatgcagct

SEQ ID NO: 4961288 - DNA, 25 bp, Homo sapien
cacaccctcttagggatgcagcttg

SEQ ID NO: 4961289 - DNA, 25 bp, Homo sapien
cctgcaccatctgtggcaccatcac

SEQ ID NO: 4961290 - DNA, 25 bp, Homo sapien
tgtcatttccgtccagactttcaag

SEQ ID NO: 4961291 - DNA, 25 bp, Homo sapien
tccctggtggtggaatttctctcag

SEQ ID NO: 4961292 - DNA, 25 bp, Homo sapien
ccaaaactgtcatttccgtccagac

SEQ ID NO: 4961293 - DNA, 25 bp, Homo sapien
gcacaggaatttaaactgctctgtt

SEQ ID NO: 4961294 - DNA, 25 bp, Homo sapien
gaatttaaactgctctgttaatgac

SEQ ID NO: 4961295 - DNA, 25 bp, Homo sapien
aggaatttaaactgctctgttaatg

SEQ ID NO: 4961296 - DNA, 25 bp, Homo sapien
tcagcacaggaatttaaactgctct

SEQ ID NO: 4961297 - DNA, 25 bp, Homo sapien
gaaagcgccatctgtttgcataggg

SEQ ID NO: 4961298 - DNA, 25 bp, Homo sapien
gagagagatccaacaagagcttcct

SEQ ID NO: 4961299 - DNA, 25 bp, Homo sapien
gccacattcctgttttacgaagagt

SEQ ID NO: 4961300 - DNA, 25 bp, Homo sapien
agtggcatcttgtctgaccccaacc

SEQ ID NO: 4961301 - DNA, 25 bp, Homo sapien
tgaggctctggtcttacggtatgag

SEQ ID NO: 4961302 - DNA, 25 bp, Homo sapien
gctaaggggccactgccactcatct

SEQ ID NO: 4961303 - DNA, 25 bp, Homo sapien
aaagactgtgctaaggggccactgc

SEQ ID NO: 4961304 - DNA, 25 bp, Homo sapien
cttacggtatgaggctctgtgaaag

SEQ ID NO: 4961305 - DNA, 25 bp, Homo sapien
agcagagggtgaaacctctgcttac

SEQ ID NO: 4961306 - DNA, 25 bp, Homo sapien
tgagcagagggtgaaacctctgctt

SEQ ID NO: 4961307 - DNA, 25 bp, Homo sapien
ctgtgagcagagggtgaaacctctg

SEQ ID NO: 4961308 - DNA, 25 bp, Homo sapien
tgtgagcagagggtgaaacctctgc

SEQ ID NO: 4961309 - DNA, 25 bp, Homo sapien
tgtacctgacctcttctccatgggt

SEQ ID NO: 4961310 - DNA, 25 bp, Homo sapien
gtacctgacctcttctccatgggtt

SEQ ID NO: 4961311 - DNA, 25 bp, Homo sapien
acctgacctcttctccatgggttag

SEQ ID NO: 4961312 - DNA, 25 bp, Homo sapien
cctgtacctgacctcttctccatgg

SEQ ID NO: 4961313 - DNA, 25 bp, Homo sapien
tgtacctgacctcttctccatgggt

SEQ ID NO: 4961314 - DNA, 25 bp, Homo sapien
tacctgacctcttctccatgggttg

SEQ ID NO: 4961315 - DNA, 25 bp, Homo sapien
cctgtacctgacctcttctccatgg

SEQ ID NO: 4961316 - DNA, 25 bp, Homo sapien
acctgacctcttctccatgggttgg

SEQ ID NO: 4961317 - DNA, 25 bp, Homo sapien
tgatctgtggtagtctgacttcctc

SEQ ID NO: 4961318 - DNA, 25 bp, Homo sapien
cttgatctgtggtagtctgacttcc

SEQ ID NO: 4961319 - DNA, 25 bp, Homo sapien
tctcccactaaaatgataccagctg

SEQ ID NO: 4961320 - DNA, 25 bp, Homo sapien
taaaatgataccagctggcagcttg

SEQ ID NO: 4961321 - DNA, 25 bp, Homo sapien
gctgccctgaaacagatctggctca

SEQ ID NO: 4961322 - DNA, 25 bp, Homo sapien
cgctgccctgaaacagatctggctc

SEQ ID NO: 4961323 - DNA, 25 bp, Homo sapien
ctgccctgaaacagatctggctcac

SEQ ID NO: 4961324 - DNA, 25 bp, Homo sapien
cacacgactctccagtattttacag

SEQ ID NO: 4961325 - DNA, 25 bp, Homo sapien
ttcatgctgcgtacgtgactcaccc

SEQ ID NO: 4961326 - DNA, 25 bp, Homo sapien
agtgacctgctctttgtcagattca

SEQ ID NO: 4961327 - DNA, 25 bp, Homo sapien
ttacagaaggatcgctcccttctgc

SEQ ID NO: 4961328 - DNA, 25 bp, Homo sapien
taatctctggacattcctggtggtc

SEQ ID NO: 4961329 - DNA, 25 bp, Homo sapien
tctctggacattcctggtggtctct

SEQ ID NO: 4961330 - DNA, 25 bp, Homo sapien
ttttctcggcgtatctttttctggc

SEQ ID NO: 4961331 - DNA, 25 bp, Homo sapien
tgtaatctctggacattcctggtgg

SEQ ID NO: 4961332 - DNA, 25 bp, Homo sapien
aaattttgcttcgtcttttagattg

SEQ ID NO: 4961333 - DNA, 25 bp, Homo sapien
ttttatgacataatctgttgtagca

SEQ ID NO: 4961334 - DNA, 25 bp, Homo sapien
tctgttgtagcattacccagggtcc

SEQ ID NO: 4961335 - DNA, 25 bp, Homo sapien
ttgcttcgtcttttagattggttct

SEQ ID NO: 4961336 - DNA, 25 bp, Homo sapien
cagctgctcgcgtggtaaagaagca

SEQ ID NO: 4961337 - DNA, 25 bp, Homo sapien
ggaatcagctgctcgcgtggtaaag

SEQ ID NO: 4961338 - DNA, 25 bp, Homo sapien
atggttgtggagacctctggattct

SEQ ID NO: 4961339 - DNA, 25 bp, Homo sapien
tgatggttgtggagacctctggatt

SEQ ID NO: 4961340 - DNA, 25 bp, Homo sapien
tgagtccattctcccttttctatcc

SEQ ID NO: 4961341 - DNA, 25 bp, Homo sapien
tgccagggcaagagagtccatgtgc

SEQ ID NO: 4961342 - DNA, 25 bp, Homo sapien
tttctatcccgttgcttagggcagg

SEQ ID NO: 4961343 - DNA, 25 bp, Homo sapien
ggagatgtctttgtaccagtccatg

SEQ ID NO: 4961344 - DNA, 25 bp, Homo sapien
cctagaggaactatgggcccagtgt

SEQ ID NO: 4961345 - DNA, 25 bp, Homo sapien
tagaggaactatgggcccagtgttt

SEQ ID NO: 4961346 - DNA, 25 bp, Homo sapien
ttaagtagcacagaaacctagagga

SEQ ID NO: 4961347 - DNA, 25 bp, Homo sapien
tagcacagaaacctagaggaactat

SEQ ID NO: 4961348 - DNA, 25 bp, Homo sapien
cgacagttgatacccgtgtgtgcac

SEQ ID NO: 4961349 - DNA, 25 bp, Homo sapien
gctcctattcgacagttgatacccg

SEQ ID NO: 4961350 - DNA, 25 bp, Homo sapien
tattcgacagttgatacccgtgtgt

SEQ ID NO: 4961351 - DNA, 25 bp, Homo sapien
ctgagctcctattcgacagttgata

SEQ ID NO: 4961352 - DNA, 25 bp, Homo sapien
ttctcccacgtctccctctctccca

SEQ ID NO: 4961353 - DNA, 25 bp, Homo sapien
ccctctctcccatgcccaatcctca

SEQ ID NO: 4961354 - DNA, 25 bp, Homo sapien
tcccacgtctccctctctcccatgc

SEQ ID NO: 4961355 - DNA, 25 bp, Homo sapien
cctctctcccatgcccaatcctcac

SEQ ID NO: 4961356 - DNA, 25 bp, Homo sapien
ttatatcccggtgtgctccattggc

SEQ ID NO: 4961357 - DNA, 25 bp, Homo sapien
cacctcacagagctcacggatgata

SEQ ID NO: 4961358 - DNA, 25 bp, Homo sapien
tccccagcagcgttggcctttatat

SEQ ID NO: 4961359 - DNA, 25 bp, Homo sapien
ggctggctccaaccggtttatcagc

SEQ ID NO: 4961360 - DNA, 25 bp, Homo sapien
aacaatcatgcaagccttttcctag

SEQ ID NO: 4961361 - DNA, 25 bp, Homo sapien
tcccctgaagtgaacaatcatgcaa

SEQ ID NO: 4961362 - DNA, 25 bp, Homo sapien
gaacaatcatgcaagccttttccta

SEQ ID NO: 4961363 - DNA, 25 bp, Homo sapien
tgcagccaagccttgtgtggatcag

SEQ ID NO: 4961364 - DNA, 25 bp, Homo sapien
agccaagccttgtgtggatcaggta

SEQ ID NO: 4961365 - DNA, 25 bp, Homo sapien
agccttgtgtggatcaggtagatac

SEQ ID NO: 4961366 - DNA, 25 bp, Homo sapien
ccaagccttgtgtggatcaggtaga

SEQ ID NO: 4961367 - DNA, 25 bp, Homo sapien
aagtcttgtcatctctttgagtcat

SEQ ID NO: 4961368 - DNA, 25 bp, Homo sapien
gaagtcttgtcatctctttgagtca

SEQ ID NO: 4961369 - DNA, 25 bp, Homo sapien
ttgaagtcttgtcatctctttgagt

SEQ ID NO: 4961370 - DNA, 25 bp, Homo sapien
cctccagctgattctttgaagtctt

SEQ ID NO: 4961371 - DNA, 25 bp, Homo sapien
tctccatataaggaagcacattgat

SEQ ID NO: 4961372 - DNA, 25 bp, Homo sapien
ttctctccatataaggaagcacatt

SEQ ID NO: 4961373 - DNA, 25 bp, Homo sapien
ccaggatttaccttctctccatata

SEQ ID NO: 4961374 - DNA, 25 bp, Homo sapien
caggatttaccttctctccatataa

SEQ ID NO: 4961375 - DNA, 25 bp, Homo sapien
tgtggtaagtaataacggttgccat

SEQ ID NO: 4961376 - DNA, 25 bp, Homo sapien
gtaataacggttgccatgtgcctgg

SEQ ID NO: 4961377 - DNA, 25 bp, Homo sapien
caggctgatataaatgtggtaagta

SEQ ID NO: 4961378 - DNA, 25 bp, Homo sapien
tatagaaacaggctgatataaatgt

SEQ ID NO: 4961379 - DNA, 25 bp, Homo sapien
tcttcctcttgggaaaaattcttga

SEQ ID NO: 4961380 - DNA, 25 bp, Homo sapien
gagaagctagctgtcctgaaccaca

SEQ ID NO: 4961381 - DNA, 25 bp, Homo sapien
caggaaacctaacatcaccaggatt

SEQ ID NO: 4961382 - DNA, 25 bp, Homo sapien
caccaggatttttgtatggacccat

SEQ ID NO: 4961383 - DNA, 25 bp, Homo sapien
tctgtgggatgcaaactagatggat

SEQ ID NO: 4961384 - DNA, 25 bp, Homo sapien
gatgttgttggaaatgtactgggcc

SEQ ID NO: 4961385 - DNA, 25 bp, Homo sapien
tggctaaaagcagcgacatctgtgt

SEQ ID NO: 4961386 - DNA, 25 bp, Homo sapien
ctgcaaactcccaagtgtgagatgt

SEQ ID NO: 4961387 - DNA, 25 bp, Homo sapien
cctttttctttcccagatgtcctca

SEQ ID NO: 4961388 - DNA, 25 bp, Homo sapien
ctttttctttcccagatgtcctcat

SEQ ID NO: 4961389 - DNA, 25 bp, Homo sapien
ccatctggccggcggtagaaagccc

SEQ ID NO: 4961390 - DNA, 25 bp, Homo sapien
gtggcagagggtttgcttcagagac

SEQ ID NO: 4961391 - DNA, 25 bp, Homo sapien
cactgtgaggtatcataggggagtt

SEQ ID NO: 4961392 - DNA, 25 bp, Homo sapien
ctggccggcggtagaaagcccactg

SEQ ID NO: 4961393 - DNA, 25 bp, Homo sapien
tgtcttgagactgccccattgatgg

SEQ ID NO: 4961394 - DNA, 25 bp, Homo sapien
catggcagttgttttccggatgaaa

SEQ ID NO: 4961395 - DNA, 25 bp, Homo sapien
ggttccaaggcaatagcatggcagt

SEQ ID NO: 4961396 - DNA, 25 bp, Homo sapien
ggcagcctccccgttcaggaatggt

SEQ ID NO: 4961397 - DNA, 25 bp, Homo sapien
agagccaagtgtattgcagcaaggt

SEQ ID NO: 4961398 - DNA, 25 bp, Homo sapien
ttaggactgcagtgtttgagaaggt

SEQ ID NO: 4961399 - DNA, 25 bp, Homo sapien
tcaccttgcttggttctactttagg

SEQ ID NO: 4961400 - DNA, 25 bp, Homo sapien
tggaacggcaatcccaaggctgaga

SEQ ID NO: 4961401 - DNA, 25 bp, Homo sapien
tcacactgggctgatcccttcacct

SEQ ID NO: 4961402 - DNA, 25 bp, Homo sapien
tgttgactttttctcctctccctct

SEQ ID NO: 4961403 - DNA, 25 bp, Homo sapien
tctgttgactttttctcctctccct

SEQ ID NO: 4961404 - DNA, 25 bp, Homo sapien
ctgggtctgttgactttttctcctc

SEQ ID NO: 4961405 - DNA, 25 bp, Homo sapien
ggtctgttgactttttctcctctcc

SEQ ID NO: 4961406 - DNA, 25 bp, Homo sapien
ggtggtgatgaggaagttgaggact

SEQ ID NO: 4961407 - DNA, 25 bp, Homo sapien
gtgatgaggaagttgaggactgtac

SEQ ID NO: 4961408 - DNA, 25 bp, Homo sapien
tggtgatgaggaagttgaggactgt

SEQ ID NO: 4961409 - DNA, 25 bp, Homo sapien
ctggagggggtggtgatgaggaagt

SEQ ID NO: 4961410 - DNA, 25 bp, Homo sapien
acttctctaatgatgaactatagga

SEQ ID NO: 4961411 - DNA, 25 bp, Homo sapien
agttatttcttgtctcggtgctcta

SEQ ID NO: 4961412 - DNA, 25 bp, Homo sapien
tctctaatgatgaactataggaatg

SEQ ID NO: 4961413 - DNA, 25 bp, Homo sapien
ttcttgtctcggtgctctacatgtt

SEQ ID NO: 4961414 - DNA, 25 bp, Homo sapien
taatacagtgttgtggaaggccaag

SEQ ID NO: 4961415 - DNA, 25 bp, Homo sapien
tagtttttacagagatagggtatcg

SEQ ID NO: 4961416 - DNA, 25 bp, Homo sapien
ttagaaagacacattcggaccatag

SEQ ID NO: 4961417 - DNA, 25 bp, Homo sapien
gcttgtatcaaagtaatcctcccag

SEQ ID NO: 4961418 - DNA, 25 bp, Homo sapien
gctctgctggacctggactgtgaag

SEQ ID NO: 4961419 - DNA, 25 bp, Homo sapien
gaagattgccgctgccttttgaatg

SEQ ID NO: 4961420 - DNA, 25 bp, Homo sapien
cacagatcagtagagaacttggccc

SEQ ID NO: 4961421 - DNA, 25 bp, Homo sapien
gacctctttcttcagcaacagtgtg

SEQ ID NO: 4961422 - DNA, 25 bp, Homo sapien
tcccctcttcagttgcacagatcag

SEQ ID NO: 4961423 - DNA, 25 bp, Homo sapien
tcattgctggtaatcggctttcaga

SEQ ID NO: 4961424 - DNA, 25 bp, Homo sapien
tggtaatcggctttcagattgtgac

SEQ ID NO: 4961425 - DNA, 25 bp, Homo sapien
atcattgctggtaatcggctttcag

SEQ ID NO: 4961426 - DNA, 25 bp, Homo sapien
tgctggtaatcggctttcagattgt

SEQ ID NO: 4961427 - DNA, 25 bp, Homo sapien
aggccacacgctatgctgattatca

SEQ ID NO: 4961428 - DNA, 25 bp, Homo sapien
tcattgagctgagttgctgcccgca

SEQ ID NO: 4961429 - DNA, 25 bp, Homo sapien
catttcatactccattaaggaagga

SEQ ID NO: 4961430 - DNA, 25 bp, Homo sapien
gggatggtgtgtctcccatttcata

SEQ ID NO: 4961431 - DNA, 25 bp, Homo sapien
gattctgacacgtgggacatgcttg

SEQ ID NO: 4961432 - DNA, 25 bp, Homo sapien
tgactgctctgattcttttgggagg

SEQ ID NO: 4961433 - DNA, 25 bp, Homo sapien
tgaattccttaacgaggcagccatg

SEQ ID NO: 4961434 - DNA, 25 bp, Homo sapien
catgcttgagccactatgagaaggc

SEQ ID NO: 4961435 - DNA, 25 bp, Homo sapien
gcagacactgtctgccccacttttt

SEQ ID NO: 4961436 - DNA, 25 bp, Homo sapien
atgcagacactgtctgccccacttt

SEQ ID NO: 4961437 - DNA, 25 bp, Homo sapien
gacactgtctgccccactttttccc

SEQ ID NO: 4961438 - DNA, 25 bp, Homo sapien
cactgtctgccccactttttcccac

SEQ ID NO: 4961439 - DNA, 25 bp, Homo sapien
cagctgcaatgcctatgctggtaat

SEQ ID NO: 4961440 - DNA, 25 bp, Homo sapien
ttctgtctcaaagtactcctctcca

SEQ ID NO: 4961441 - DNA, 25 bp, Homo sapien
ccattccaccaacctttgtggctag

SEQ ID NO: 4961442 - DNA, 25 bp, Homo sapien
tgtctcaaagtactcctctccatca

SEQ ID NO: 4961443 - DNA, 25 bp, Homo sapien
gacttcgacaattagtgattgacac

SEQ ID NO: 4961444 - DNA, 25 bp, Homo sapien
cttgacttcgacaattagtgattga

SEQ ID NO: 4961445 - DNA, 25 bp, Homo sapien
gacaattagtgattgacactccaac

SEQ ID NO: 4961446 - DNA, 25 bp, Homo sapien
tagtgattgacactccaactcccca

SEQ ID NO: 4961447 - DNA, 25 bp, Homo sapien
cctaattgtcgaatcctcctctttc

SEQ ID NO: 4961448 - DNA, 25 bp, Homo sapien
tcctccctaattgtcgaatcctcct

SEQ ID NO: 4961449 - DNA, 25 bp, Homo sapien
taattgtcgaatcctcctctttctt

SEQ ID NO: 4961450 - DNA, 25 bp, Homo sapien
tccctaattgtcgaatcctcctctt

SEQ ID NO: 4961451 - DNA, 25 bp, Homo sapien
ctttgccgtttatattgtagcctac

SEQ ID NO: 4961452 - DNA, 25 bp, Homo sapien
tcctttgccgtttatattgtagcct

SEQ ID NO: 4961453 - DNA, 25 bp, Homo sapien
cttctgtcatgaaattgtcttctcc

SEQ ID NO: 4961454 - DNA, 25 bp, Homo sapien
tctcctttgccgtttatattgtagc

SEQ ID NO: 4961455 - DNA, 25 bp, Homo sapien
ttcctgttacatgtcttggatatct

SEQ ID NO: 4961456 - DNA, 25 bp, Homo sapien
tccttcctgttacatgtcttggata

SEQ ID NO: 4961457 - DNA, 25 bp, Homo sapien
cttcctgttacatgtcttggatatc

SEQ ID NO: 4961458 - DNA, 25 bp, Homo sapien
ccttcctgttacatgtcttggatat

SEQ ID NO: 4961459 - DNA, 25 bp, Homo sapien
ctgtcgacttcctcttcttgacttt

SEQ ID NO: 4961460 - DNA, 25 bp, Homo sapien
tcgacttcctcttcttgactttcaa

SEQ ID NO: 4961461 - DNA, 25 bp, Homo sapien
gtcgacttcctcttcttgactttca

SEQ ID NO: 4961462 - DNA, 25 bp, Homo sapien
gacttcctcttcttgactttcaacc

SEQ ID NO: 4961463 - DNA, 25 bp, Homo sapien
taaatgccataagagctgttctcct

SEQ ID NO: 4961464 - DNA, 25 bp, Homo sapien
tattttcctttctacactatcaagc

SEQ ID NO: 4961465 - DNA, 25 bp, Homo sapien
gatgtgtccattgtccacatataaa

SEQ ID NO: 4961466 - DNA, 25 bp, Homo sapien
gttgggcccactgaaatgttcaaca

SEQ ID NO: 4961467 - DNA, 25 bp, Homo sapien
tgtttgtgtcttgggtcaccctaac

SEQ ID NO: 4961468 - DNA, 25 bp, Homo sapien
gtgtcttgggtcaccctaacagcag

SEQ ID NO: 4961469 - DNA, 25 bp, Homo sapien
ccttgtttgtgtcttgggtcaccct

SEQ ID NO: 4961470 - DNA, 25 bp, Homo sapien
gggtcaccctaacagcagaggcaca

SEQ ID NO: 4961471 - DNA, 25 bp, Homo sapien
caaagtactatatctccaacagtgg

SEQ ID NO: 4961472 - DNA, 25 bp, Homo sapien
gtaacctacttgaaggtatccatgg

SEQ ID NO: 4961473 - DNA, 25 bp, Homo sapien
aatgacctccccatattaagctggt

SEQ ID NO: 4961474 - DNA, 25 bp, Homo sapien
taacaggatgattgaattgggcctc

SEQ ID NO: 4961475 - DNA, 25 bp, Homo sapien
atttggctttgagcccttgtttagc

SEQ ID NO: 4961476 - DNA, 25 bp, Homo sapien
tggctttgagcccttgtttagcctc

SEQ ID NO: 4961477 - DNA, 25 bp, Homo sapien
tgagcccttgtttagcctcctcttc

SEQ ID NO: 4961478 - DNA, 25 bp, Homo sapien
gctttgagcccttgtttagcctcct

SEQ ID NO: 4961479 - DNA, 25 bp, Homo sapien
caagttccacgatatatggttgagt

SEQ ID NO: 4961480 - DNA, 25 bp, Homo sapien
tagtgagaagcagcataagtgtttg

SEQ ID NO: 4961481 - DNA, 25 bp, Homo sapien
tacatgcacccatatttaccaaagg

SEQ ID NO: 4961482 - DNA, 25 bp, Homo sapien
cacatatttgctgcagattacactg

SEQ ID NO: 4961483 - DNA, 25 bp, Homo sapien
gccacgagaatagatctcagattaa

SEQ ID NO: 4961484 - DNA, 25 bp, Homo sapien
gaagagcccctgtgttcaaggccat

SEQ ID NO: 4961485 - DNA, 25 bp, Homo sapien
gtggctccagccacgagaatagatc

SEQ ID NO: 4961486 - DNA, 25 bp, Homo sapien
agaagagcccctgtgttcaaggcca

SEQ ID NO: 4961487 - DNA, 25 bp, Homo sapien
cagggttctggaggtagatgggaga

SEQ ID NO: 4961488 - DNA, 25 bp, Homo sapien
ataagctaaaacagggttctggagg

SEQ ID NO: 4961489 - DNA, 25 bp, Homo sapien
gggttctggaggtagatgggagaga

SEQ ID NO: 4961490 - DNA, 25 bp, Homo sapien
ctatctataagctaaaacagggttc

SEQ ID NO: 4961491 - DNA, 25 bp, Homo sapien
gtctctccagcagtgaaactgttgg

SEQ ID NO: 4961492 - DNA, 25 bp, Homo sapien
tttgtctgttggcatgctgtctctc

SEQ ID NO: 4961493 - DNA, 25 bp, Homo sapien
ctgtctctccagcagtgaaactgtt

SEQ ID NO: 4961494 - DNA, 25 bp, Homo sapien
tgtctgttggcatgctgtctctcca

SEQ ID NO: 4961495 - DNA, 25 bp, Homo sapien
attatgaaggtggtcactctggcag

SEQ ID NO: 4961496 - DNA, 25 bp, Homo sapien
gatgttgcaaaggaattgaggtaga

SEQ ID NO: 4961497 - DNA, 25 bp, Homo sapien
aggtgatgttgcaaaggaattgagg

SEQ ID NO: 4961498 - DNA, 25 bp, Homo sapien
caaaggaattgaggtagaggaggaa

SEQ ID NO: 4961499 - DNA, 25 bp, Homo sapien
ctttgcatcttcgtgtgggctgttt

SEQ ID NO: 4961500 - DNA, 25 bp, Homo sapien
tgcatcttcgtgtgggctgtttcct

SEQ ID NO: 4961501 - DNA, 25 bp, Homo sapien
gcatcttcgtgtgggctgtttcctc

SEQ ID NO: 4961502 - DNA, 25 bp, Homo sapien
ttgcatcttcgtgtgggctgtttcc

SEQ ID NO: 4961503 - DNA, 25 bp, Homo sapien
ccaaatcacagagaaggacatttaa

SEQ ID NO: 4961504 - DNA, 25 bp, Homo sapien
ctgttcagtgatctgtggaaccgct

SEQ ID NO: 4961505 - DNA, 25 bp, Homo sapien
cagtgatctgtggaaccgcttagga

SEQ ID NO: 4961506 - DNA, 25 bp, Homo sapien
cagagaaggacatttaatctgttca

SEQ ID NO: 4961507 - DNA, 25 bp, Homo sapien
catctgagcgaaaatgagcattctg

SEQ ID NO: 4961508 - DNA, 25 bp, Homo sapien
tcatctgagcgaaaatgagcattct

SEQ ID NO: 4961509 - DNA, 25 bp, Homo sapien
ggcttctgtgggttgacttcatgga

SEQ ID NO: 4961510 - DNA, 25 bp, Homo sapien
ggtcaaaatgggagaagccatcctc

SEQ ID NO: 4961511 - DNA, 25 bp, Homo sapien
gaaatgaacctggtcaaaatgggag

SEQ ID NO: 4961512 - DNA, 25 bp, Homo sapien
tagcaggactggttatgggcttctg

SEQ ID NO: 4961513 - DNA, 25 bp, Homo sapien
aatggccgggataagggagaaatat

SEQ ID NO: 4961514 - DNA, 25 bp, Homo sapien
tagaaatggccgggataagggagaa

SEQ ID NO: 4961515 - DNA, 25 bp, Homo sapien
gatggcataaatgtcctgggctcca

SEQ ID NO: 4961516 - DNA, 25 bp, Homo sapien
aaatatggagatggcataaatgtcc

SEQ ID NO: 4961517 - DNA, 25 bp, Homo sapien
tgtaatagcacacagtagcaccttg

SEQ ID NO: 4961518 - DNA, 25 bp, Homo sapien
ataatgtgcttgctgtatgtagtag

SEQ ID NO: 4961519 - DNA, 25 bp, Homo sapien
acacagtagcaccttgaatggaaaa

SEQ ID NO: 4961520 - DNA, 25 bp, Homo sapien
tgaaattgtaatagcacacagtagc

SEQ ID NO: 4961521 - DNA, 25 bp, Homo sapien
tagctggagatgtgggtcacggcca

SEQ ID NO: 4961522 - DNA, 25 bp, Homo sapien
gagatgtgggtcacggccagtgctt

SEQ ID NO: 4961523 - DNA, 25 bp, Homo sapien
ctttctgagcaacctgacactgggg

SEQ ID NO: 4961524 - DNA, 25 bp, Homo sapien
catctgagttgcaggttactagttc

SEQ ID NO: 4961525 - DNA, 25 bp, Homo sapien
atcctgtgatttcagggctgagatc

SEQ ID NO: 4961526 - DNA, 25 bp, Homo sapien
gatttcagggctgagatcctggctt

SEQ ID NO: 4961527 - DNA, 25 bp, Homo sapien
cctgtgatttcagggctgagatcct

SEQ ID NO: 4961528 - DNA, 25 bp, Homo sapien
cttttgtcctatagtccccattatc

SEQ ID NO: 4961529 - DNA, 25 bp, Homo sapien
tcaatcacacttgacgtttgcaaaa

SEQ ID NO: 4961530 - DNA, 25 bp, Homo sapien
cactggcaaactgagcagtcatgga

SEQ ID NO: 4961531 - DNA, 25 bp, Homo sapien
actggcaaactgagcagtcatggaa

SEQ ID NO: 4961532 - DNA, 25 bp, Homo sapien
aatcacacttgacgtttgcaaaaac

SEQ ID NO: 4961533 - DNA, 25 bp, Homo sapien
gtgctgtcacgtccaacagcaggat

SEQ ID NO: 4961534 - DNA, 25 bp, Homo sapien
tgctggtgctgtcacgtccaacagc

SEQ ID NO: 4961535 - DNA, 25 bp, Homo sapien
tggtgctgtcacgtccaacagcagg

SEQ ID NO: 4961536 - DNA, 25 bp, Homo sapien
gctggtgctgtcacgtccaacagca

SEQ ID NO: 4961537 - DNA, 25 bp, Homo sapien
cgcagttcagggtcttattaagaga

SEQ ID NO: 4961538 - DNA, 25 bp, Homo sapien
ctaggtaatacgcagttcagggtct

SEQ ID NO: 4961539 - DNA, 25 bp, Homo sapien
taagagaataagcaaagatagccgc

SEQ ID NO: 4961540 - DNA, 25 bp, Homo sapien
agatagccgctgagccgccgattgt

SEQ ID NO: 4961541 - DNA, 25 bp, Homo sapien
ctttgcagaccattccattcatagc

SEQ ID NO: 4961542 - DNA, 25 bp, Homo sapien
ttctcatccccgactacagtctctc

SEQ ID NO: 4961543 - DNA, 25 bp, Homo sapien
tcatccccgactacagtctctccaa

SEQ ID NO: 4961544 - DNA, 25 bp, Homo sapien
ccgactacagtctctccaacacaat

SEQ ID NO: 4961545 - DNA, 25 bp, Homo sapien
ttgtccttctcatccccgactacag

SEQ ID NO: 4961546 - DNA, 25 bp, Homo sapien
atacattgtcccattttgattcttc

SEQ ID NO: 4961547 - DNA, 25 bp, Homo sapien
ctcacagtagatgtttatggagtac

SEQ ID NO: 4961548 - DNA, 25 bp, Homo sapien
gaaaatgtcaaacagttttttcatc

SEQ ID NO: 4961549 - DNA, 25 bp, Homo sapien
tatggagtactgctcttcctctgag

SEQ ID NO: 4961550 - DNA, 25 bp, Homo sapien
ttttgctgaaaacctgccccctggc

SEQ ID NO: 4961551 - DNA, 25 bp, Homo sapien
agtgtgtgcaaggagaatacttcac

SEQ ID NO: 4961552 - DNA, 25 bp, Homo sapien
gcaaggagaatacttcacacttgtc

SEQ ID NO: 4961553 - DNA, 25 bp, Homo sapien
cacttgtcaatacacttttgctgaa

SEQ ID NO: 4961554 - DNA, 25 bp, Homo sapien
aggtaccaggatcaaactgaatcca

SEQ ID NO: 4961555 - DNA, 25 bp, Homo sapien
ccaggatcaaactgaatccatgttc

SEQ ID NO: 4961556 - DNA, 25 bp, Homo sapien
aaactgaatccatgttctgaatcac

SEQ ID NO: 4961557 - DNA, 25 bp, Homo sapien
tcacttgtcgcttctgtatggcaaa

SEQ ID NO: 4961558 - DNA, 25 bp, Homo sapien
ctgggcatggttacgtctccatggt

SEQ ID NO: 4961559 - DNA, 25 bp, Homo sapien
tccatggtaccaacatcagctcatg

SEQ ID NO: 4961560 - DNA, 25 bp, Homo sapien
atggttacgtctccatggtaccaac

SEQ ID NO: 4961561 - DNA, 25 bp, Homo sapien
catggtaccaacatcagctcatggt

SEQ ID NO: 4961562 - DNA, 25 bp, Homo sapien
gagagtggaagctctgccctagagt

SEQ ID NO: 4961563 - DNA, 25 bp, Homo sapien
caaacattcaggacaaaggtaaccg

SEQ ID NO: 4961564 - DNA, 25 bp, Homo sapien
cagtatggattaggtgagtctcagc

SEQ ID NO: 4961565 - DNA, 25 bp, Homo sapien
tctccaggacaggtgcaagtgtaca

SEQ ID NO: 4961566 - DNA, 25 bp, Homo sapien
taaacttgcgttgccaaattgcatg

SEQ ID NO: 4961567 - DNA, 25 bp, Homo sapien
ttggacacccggcattgaatgattc

SEQ ID NO: 4961568 - DNA, 25 bp, Homo sapien
tttgatgacctttggacacccggca

SEQ ID NO: 4961569 - DNA, 25 bp, Homo sapien
ctgctgggcttctaaacttgcgttg

SEQ ID NO: 4961570 - DNA, 25 bp, Homo sapien
aatccacagtaaagcggtcatcacc

SEQ ID NO: 4961571 - DNA, 25 bp, Homo sapien
aagaatccacagtaaagcggtcatc

SEQ ID NO: 4961572 - DNA, 25 bp, Homo sapien
agtaaagcggtcatcacctgtctcc

SEQ ID NO: 4961573 - DNA, 25 bp, Homo sapien
cacagtaaagcggtcatcacctgtc

SEQ ID NO: 4961574 - DNA, 25 bp, Homo sapien
cctgaagggtatcttctctgttcct

SEQ ID NO: 4961575 - DNA, 25 bp, Homo sapien
tactggatgatcctgaagggtatct

SEQ ID NO: 4961576 - DNA, 25 bp, Homo sapien
ctccacagtactggatgatcctgaa

SEQ ID NO: 4961577 - DNA, 25 bp, Homo sapien
taagctcaagtctcaggtcattggt

SEQ ID NO: 4961578 - DNA, 25 bp, Homo sapien
taattgcatttcaggagaatggtga

SEQ ID NO: 4961579 - DNA, 25 bp, Homo sapien
atgaggacatgcaccagggcattgg

SEQ ID NO: 4961580 - DNA, 25 bp, Homo sapien
gcaccagggcattggcagtttcctt

SEQ ID NO: 4961581 - DNA, 25 bp, Homo sapien
ttaataattgcatttcaggagaatg

SEQ ID NO: 4961582 - DNA, 25 bp, Homo sapien
tcaagccgttgaggtgacctggagc

SEQ ID NO: 4961583 - DNA, 25 bp, Homo sapien
gccgctggccacgtgttgccatcaa

SEQ ID NO: 4961584 - DNA, 25 bp, Homo sapien
tgttgccatcaagccgttgaggtga

SEQ ID NO: 4961585 - DNA, 25 bp, Homo sapien
tggccacgtgttgccatcaagccgt

SEQ ID NO: 4961586 - DNA, 25 bp, Homo sapien
gaaccagccgcatcattactgccag

SEQ ID NO: 4961587 - DNA, 25 bp, Homo sapien
ggtctcaacccaagcactagagatg

SEQ ID NO: 4961588 - DNA, 25 bp, Homo sapien
tactgccagtaacgacggtaatgac

SEQ ID NO: 4961589 - DNA, 25 bp, Homo sapien
tccgcgcgctttctgctcgtcaatg

SEQ ID NO: 4961590 - DNA, 25 bp, Homo sapien
tccgcaccagctaagcatcaaagct

SEQ ID NO: 4961591 - DNA, 25 bp, Homo sapien
tgcccacctccgcaccagctaagca

SEQ ID NO: 4961592 - DNA, 25 bp, Homo sapien
cagctaagcatcaaagctaagctca

SEQ ID NO: 4961593 - DNA, 25 bp, Homo sapien
taagcatcaaagctaagctcaggct

SEQ ID NO: 4961594 - DNA, 25 bp, Homo sapien
cctgtctggatctttagacaataca

SEQ ID NO: 4961595 - DNA, 25 bp, Homo sapien
ctgcctgtctggatctttagacaat

SEQ ID NO: 4961596 - DNA, 25 bp, Homo sapien
tctggatctttagacaatacataga

SEQ ID NO: 4961597 - DNA, 25 bp, Homo sapien
ggatctttagacaatacatagaatt

SEQ ID NO: 4961598 - DNA, 25 bp, Homo sapien
gggtgatcttaacaagtcctcatgt

SEQ ID NO: 4961599 - DNA, 25 bp, Homo sapien
caagtcctcatgttatggaaaagag

SEQ ID NO: 4961600 - DNA, 25 bp, Homo sapien
aaggcaccaagggtgatcttaacaa

SEQ ID NO: 4961601 - DNA, 25 bp, Homo sapien
tcctcatgttatggaaaagagtccc

SEQ ID NO: 4961602 - DNA, 25 bp, Homo sapien
tctgggtcctcttgaaaaggatttg

SEQ ID NO: 4961603 - DNA, 25 bp, Homo sapien
aaaggatttgtgtacttgcaagtcc

SEQ ID NO: 4961604 - DNA, 25 bp, Homo sapien
tgtacttgcaagtcctgggcaaggc

SEQ ID NO: 4961605 - DNA, 25 bp, Homo sapien
tcttgaaaaggatttgtgtacttgc

SEQ ID NO: 4961606 - DNA, 25 bp, Homo sapien
tcaggcaggtatgggtgtatctcgt

SEQ ID NO: 4961607 - DNA, 25 bp, Homo sapien
gggccattttgacctggtagcaaag

SEQ ID NO: 4961608 - DNA, 25 bp, Homo sapien
ctaaattcaggcaggtatgggtgta

SEQ ID NO: 4961609 - DNA, 25 bp, Homo sapien
tatgggtgtatctcgtctacaaaat

SEQ ID NO: 4961610 - DNA, 25 bp, Homo sapien
tggacacttcttgttcccataaaga

SEQ ID NO: 4961611 - DNA, 25 bp, Homo sapien
cttgttcccataaagatattgtcat

SEQ ID NO: 4961612 - DNA, 25 bp, Homo sapien
gaatttctttggacacttcttgttc

SEQ ID NO: 4961613 - DNA, 25 bp, Homo sapien
tggagcagttttgaatttctttgga

SEQ ID NO: 4961614 - DNA, 25 bp, Homo sapien
ctggacttgacgttggctgattgca

SEQ ID NO: 4961615 - DNA, 25 bp, Homo sapien
ttggctgattgcattccgccgacat

SEQ ID NO: 4961616 - DNA, 25 bp, Homo sapien
cactacaattttcgcaagcagaggg

SEQ ID NO: 4961617 - DNA, 25 bp, Homo sapien
taactcgagttttcctcgctggact

SEQ ID NO: 4961618 - DNA, 25 bp, Homo sapien
gaattgatggaataggtgaggtctt

SEQ ID NO: 4961619 - DNA, 25 bp, Homo sapien
actgtggaattgatggaataggtga

SEQ ID NO: 4961620 - DNA, 25 bp, Homo sapien
ttgatggaataggtgaggtcttcta

SEQ ID NO: 4961621 - DNA, 25 bp, Homo sapien
gatggaataggtgaggtcttctatt

SEQ ID NO: 4961622 - DNA, 25 bp, Homo sapien
tgagataggtacatgcaaaaaggta

SEQ ID NO: 4961623 - DNA, 25 bp, Homo sapien
ccaaaccaaacgttgctccagggat

SEQ ID NO: 4961624 - DNA, 25 bp, Homo sapien
ctggatgatccaggcttattttcct

SEQ ID NO: 4961625 - DNA, 25 bp, Homo sapien
tcttgttagatgagccttggtccct

SEQ ID NO: 4961626 - DNA, 25 bp, Homo sapien
ttaatcatcctgtttatcctctggg

SEQ ID NO: 4961627 - DNA, 25 bp, Homo sapien
tacagataatctatctttacagagt

SEQ ID NO: 4961628 - DNA, 25 bp, Homo sapien
gtgtacagataatctatctttacag

SEQ ID NO: 4961629 - DNA, 25 bp, Homo sapien
cagtgtacagataatctatctttac

SEQ ID NO: 4961630 - DNA, 25 bp, Homo sapien
tcacagtgtacagataatctatctt

SEQ ID NO: 4961631 - DNA, 25 bp, Homo sapien
tcaacacgctgtccttgttaacctc

SEQ ID NO: 4961632 - DNA, 25 bp, Homo sapien
acgctgtccttgttaacctcactac

SEQ ID NO: 4961633 - DNA, 25 bp, Homo sapien
ctcttcaacacgctgtccttgttaa

SEQ ID NO: 4961634 - DNA, 25 bp, Homo sapien
aacacgctgtccttgttaacctcac

SEQ ID NO: 4961635 - DNA, 25 bp, Homo sapien
ttctgaagtgaccatcaaactggtc

SEQ ID NO: 4961636 - DNA, 25 bp, Homo sapien
gaagattctgaagtgaccatcaaac

SEQ ID NO: 4961637 - DNA, 25 bp, Homo sapien
agattctgaagtgaccatcaaactg

SEQ ID NO: 4961638 - DNA, 25 bp, Homo sapien
gattctgaagtgaccatcaaactgg

SEQ ID NO: 4961639 - DNA, 25 bp, Homo sapien
accaagcattttactggctttttgg

SEQ ID NO: 4961640 - DNA, 25 bp, Homo sapien
tctcatactgtcagcttctacatgt

SEQ ID NO: 4961641 - DNA, 25 bp, Homo sapien
gtcttcattgctaattctcatactg

SEQ ID NO: 4961642 - DNA, 25 bp, Homo sapien
tccttgtcttcattgctaattctca

SEQ ID NO: 4961643 - DNA, 25 bp, Homo sapien
ctttcctgcagaagctgctgcagac

SEQ ID NO: 4961644 - DNA, 25 bp, Homo sapien
tttcctgcagaagctgctgcagacc

SEQ ID NO: 4961645 - DNA, 25 bp, Homo sapien
gcagaagctgctgcagaccaacggg

SEQ ID NO: 4961646 - DNA, 25 bp, Homo sapien
cctgcagaagctgctgcagaccaac

SEQ ID NO: 4961647 - DNA, 25 bp, Homo sapien
gagctccttatcaagatctacaaat

SEQ ID NO: 4961648 - DNA, 25 bp, Homo sapien
atcaagatctacaaattgcagggtg

SEQ ID NO: 4961649 - DNA, 25 bp, Homo sapien
agagggcatagagctccttatcaag

SEQ ID NO: 4961650 - DNA, 25 bp, Homo sapien
gggcatagagctccttatcaagatc

SEQ ID NO: 4961651 - DNA, 25 bp, Homo sapien
tgggatgatcatccctgctcatggg

SEQ ID NO: 4961652 - DNA, 25 bp, Homo sapien
aaaaaacattcacaagtctgacagt

SEQ ID NO: 4961653 - DNA, 25 bp, Homo sapien
aacattcacaagtctgacagtgccc

SEQ ID NO: 4961654 - DNA, 25 bp, Homo sapien
ttgatcaaatagcccagggccctgg

SEQ ID NO: 4961655 - DNA, 25 bp, Homo sapien
cagagatgtaatattggagcctgga

SEQ ID NO: 4961656 - DNA, 25 bp, Homo sapien
ggcaggaagccctgacaatgtagat

SEQ ID NO: 4961657 - DNA, 25 bp, Homo sapien
cacgatattggaagtctgggcagta

SEQ ID NO: 4961658 - DNA, 25 bp, Homo sapien
tagtagctgggtgcagcgaggcatg

SEQ ID NO: 4961659 - DNA, 25 bp, Homo sapien
ctaagcttatttgtccctttgtctc

SEQ ID NO: 4961660 - DNA, 25 bp, Homo sapien
tttgtctcttcccttaggatcactt

SEQ ID NO: 4961661 - DNA, 25 bp, Homo sapien
tcctgcagaataactgttggtggct

SEQ ID NO: 4961662 - DNA, 25 bp, Homo sapien
tgtactgtgataggctatagccacg

SEQ ID NO: 4961663 - DNA, 25 bp, Homo sapien
caccatagggcactttgtcctggaa

SEQ ID NO: 4961664 - DNA, 25 bp, Homo sapien
tctggcatggtacataactttcgga

SEQ ID NO: 4961665 - DNA, 25 bp, Homo sapien
acattaggctctttgttccgaaatc

SEQ ID NO: 4961666 - DNA, 25 bp, Homo sapien
gcagcgagttgcaaatacgtgtctc

SEQ ID NO: 4961667 - DNA, 25 bp, Homo sapien
gagttgcaaatacgtgtctctaggg

SEQ ID NO: 4961668 - DNA, 25 bp, Homo sapien
tctctaggggcagttcttacattag

SEQ ID NO: 4961669 - DNA, 25 bp, Homo sapien
ctccaggacttgcagagccaccaac

SEQ ID NO: 4961670 - DNA, 25 bp, Homo sapien
acagcaacgtacctagtagccatgt

SEQ ID NO: 4961671 - DNA, 25 bp, Homo sapien
ccaccaacagcaacgtacctagtag

SEQ ID NO: 4961672 - DNA, 25 bp, Homo sapien
cctgttgcttgtctagcttcctcca

SEQ ID NO: 4961673 - DNA, 25 bp, Homo sapien
agcactgggccagaacttcgggcac

SEQ ID NO: 4961674 - DNA, 25 bp, Homo sapien
acaggaaggttgctgtggtaccccg

SEQ ID NO: 4961675 - DNA, 25 bp, Homo sapien
gttgctgtggtaccccgcactgcag

SEQ ID NO: 4961676 - DNA, 25 bp, Homo sapien
caaaacaggaaggttgctgtggtac

SEQ ID NO: 4961677 - DNA, 25 bp, Homo sapien
ctgagccatagagatacaaggacaa

SEQ ID NO: 4961678 - DNA, 25 bp, Homo sapien
tagagatacaaggacaaacatgaca

SEQ ID NO: 4961679 - DNA, 25 bp, Homo sapien
gccatagagatacaaggacaaacat

SEQ ID NO: 4961680 - DNA, 25 bp, Homo sapien
gatacaaggacaaacatgacactgc

SEQ ID NO: 4961681 - DNA, 25 bp, Homo sapien
gcaaccatcagtggttgcctatgct

SEQ ID NO: 4961682 - DNA, 25 bp, Homo sapien
actcacatgcaaccatcagtggttg

SEQ ID NO: 4961683 - DNA, 25 bp, Homo sapien
catgcaaccatcagtggttgcctat

SEQ ID NO: 4961684 - DNA, 25 bp, Homo sapien
tgctccaactcacatgcaaccatca

SEQ ID NO: 4961685 - DNA, 25 bp, Homo sapien
tgatcagccaagttcttgaagacct

SEQ ID NO: 4961686 - DNA, 25 bp, Homo sapien
tcagccaagttcttgaagacctgcc

SEQ ID NO: 4961687 - DNA, 25 bp, Homo sapien
ctgctgatcagccaagttcttgaag

SEQ ID NO: 4961688 - DNA, 25 bp, Homo sapien
ctgatcagccaagttcttgaagacc

SEQ ID NO: 4961689 - DNA, 25 bp, Homo sapien
catgtccattgatagatggattgtg

SEQ ID NO: 4961690 - DNA, 25 bp, Homo sapien
caggagcaagtgcttgataaacatg

SEQ ID NO: 4961691 - DNA, 25 bp, Homo sapien
caggcaatttaacaggagcaagtgc

SEQ ID NO: 4961692 - DNA, 25 bp, Homo sapien
tgataaacatgtccattgatagatg

SEQ ID NO: 4961693 - DNA, 25 bp, Homo sapien
caggaagaaccaatcgaaagcatag

SEQ ID NO: 4961694 - DNA, 25 bp, Homo sapien
gaaccaatcgaaagcataggccctc

SEQ ID NO: 4961695 - DNA, 25 bp, Homo sapien
catactcaggaagaaccaatcgaaa

SEQ ID NO: 4961696 - DNA, 25 bp, Homo sapien
ccaatcgaaagcataggccctccat

SEQ ID NO: 4961697 - DNA, 25 bp, Homo sapien
caccagctgcgttcatcagttcatt

SEQ ID NO: 4961698 - DNA, 25 bp, Homo sapien
gccaacgcttggtgccatatggcct

SEQ ID NO: 4961699 - DNA, 25 bp, Homo sapien
tggccttgatatagaacaccagctg

SEQ ID NO: 4961700 - DNA, 25 bp, Homo sapien
gaattgttccgcaagaacacagcca

SEQ ID NO: 4961701 - DNA, 25 bp, Homo sapien
aatgtcccctttgcctagctgtcca

SEQ ID NO: 4961702 - DNA, 25 bp, Homo sapien
tagctgtccactcatctgggccgat

SEQ ID NO: 4961703 - DNA, 25 bp, Homo sapien
tgggccgatttgctcagtactttgc

SEQ ID NO: 4961704 - DNA, 25 bp, Homo sapien
tgtgtctttgccagtgcaccttctc

SEQ ID NO: 4961705 - DNA, 25 bp, Homo sapien
catgtatagcccagacagctgtgag

SEQ ID NO: 4961706 - DNA, 25 bp, Homo sapien
ctgcccatgtatagcccagacagct

SEQ ID NO: 4961707 - DNA, 25 bp, Homo sapien
atttatgcctttaataccacgagct

SEQ ID NO: 4961708 - DNA, 25 bp, Homo sapien
tagcccagacagctgtgaggttgat

SEQ ID NO: 4961709 - DNA, 25 bp, Homo sapien
tcatttagccggtctggaaaacaca

SEQ ID NO: 4961710 - DNA, 25 bp, Homo sapien
tggacattaatttcgacagtgggtt

SEQ ID NO: 4961711 - DNA, 25 bp, Homo sapien
gacaggtctatttttccgtcttgga

SEQ ID NO: 4961712 - DNA, 25 bp, Homo sapien
gaaaacacatttcggcgtgtgaagc

SEQ ID NO: 4961713 - DNA, 25 bp, Homo sapien
ggtagtgaagttcttggtcgtgaat

SEQ ID NO: 4961714 - DNA, 25 bp, Homo sapien
gaaaggtactgctcttggtagtgaa

SEQ ID NO: 4961715 - DNA, 25 bp, Homo sapien
tcaatattgcctcattagtggaaag

SEQ ID NO: 4961716 - DNA, 25 bp, Homo sapien
gctatcataaatgttgaaaatggct

SEQ ID NO: 4961717 - DNA, 25 bp, Homo sapien
gaaggcttgctggtaaagaaatttc

SEQ ID NO: 4961718 - DNA, 25 bp, Homo sapien
cagtatgacgaaacgtgcctcccat

SEQ ID NO: 4961719 - DNA, 25 bp, Homo sapien
cacggattgagggtgagtccagata

SEQ ID NO: 4961720 - DNA, 25 bp, Homo sapien
tgagcacagcccttgcacggattga

SEQ ID NO: 4961721 - DNA, 25 bp, Homo sapien
taatttgccagcctgaaacccagtg

SEQ ID NO: 4961722 - DNA, 25 bp, Homo sapien
ttttaatttgccagcctgaaaccca

SEQ ID NO: 4961723 - DNA, 25 bp, Homo sapien
ggtcatcgtttttaatttgccagcc

SEQ ID NO: 4961724 - DNA, 25 bp, Homo sapien
tcgtttttaatttgccagcctgaaa

SEQ ID NO: 4961725 - DNA, 25 bp, Homo sapien
aagttatcatggtgtgaactgagta

SEQ ID NO: 4961726 - DNA, 25 bp, Homo sapien
tttgcaggggttcgaatccagttgc

SEQ ID NO: 4961727 - DNA, 25 bp, Homo sapien
agttatcatggtgtgaactgagtag

SEQ ID NO: 4961728 - DNA, 25 bp, Homo sapien
gatttgcaggggttcgaatccagtt

SEQ ID NO: 4961729 - DNA, 25 bp, Homo sapien
gaggaaggcataggttgcaatggga

SEQ ID NO: 4961730 - DNA, 25 bp, Homo sapien
gcataggttgcaatgggaaagaaag

SEQ ID NO: 4961731 - DNA, 25 bp, Homo sapien
ctttgaggaaggcataggttgcaat

SEQ ID NO: 4961732 - DNA, 25 bp, Homo sapien
aaggcataggttgcaatgggaaaga

SEQ ID NO: 4961733 - DNA, 25 bp, Homo sapien
cctttgaaccccttagcatagcact

SEQ ID NO: 4961734 - DNA, 25 bp, Homo sapien
taaaccaaactggtggctcctgtag

SEQ ID NO: 4961735 - DNA, 25 bp, Homo sapien
tggctcctgtagcagcgggcctttg

SEQ ID NO: 4961736 - DNA, 25 bp, Homo sapien
tactgggtagagttcgcacggcagc

SEQ ID NO: 4961737 - DNA, 25 bp, Homo sapien
agcagccactccatgcagtggcatt

SEQ ID NO: 4961738 - DNA, 25 bp, Homo sapien
catgcagtggcattgtctggcggtc

SEQ ID NO: 4961739 - DNA, 25 bp, Homo sapien
cactccatgcagtggcattgtctgg

SEQ ID NO: 4961740 - DNA, 25 bp, Homo sapien
cagccactccatgcagtggcattgt

SEQ ID NO: 4961741 - DNA, 25 bp, Homo sapien
tgagtcacatcatctgaggagcagc

SEQ ID NO: 4961742 - DNA, 25 bp, Homo sapien
gggtgagtcacatcatctgaggagc

SEQ ID NO: 4961743 - DNA, 25 bp, Homo sapien
aggggtgagtcacatcatctgagga

SEQ ID NO: 4961744 - DNA, 25 bp, Homo sapien
ggtgagtcacatcatctgaggagca

SEQ ID NO: 4961745 - DNA, 25 bp, Homo sapien
tacggttttgccctgagtgagagcc

SEQ ID NO: 4961746 - DNA, 25 bp, Homo sapien
agcaggaggcttctgagtgagtatc

SEQ ID NO: 4961747 - DNA, 25 bp, Homo sapien
ccttccacggatttggctgcagatc

SEQ ID NO: 4961748 - DNA, 25 bp, Homo sapien
ccaccgtgactgatttaccagctac

SEQ ID NO: 4961749 - DNA, 25 bp, Homo sapien
cctcttgcccacctcatggctggca

SEQ ID NO: 4961750 - DNA, 25 bp, Homo sapien
tttcctcttgcccacctcatggctg

SEQ ID NO: 4961751 - DNA, 25 bp, Homo sapien
ttgcccacctcatggctggcattgt

SEQ ID NO: 4961752 - DNA, 25 bp, Homo sapien
ccacctcatggctggcattgtacat

SEQ ID NO: 4961753 - DNA, 25 bp, Homo sapien
aaagtcagacactgcgattgccccg

SEQ ID NO: 4961754 - DNA, 25 bp, Homo sapien
ccaaagtcagacactgcgattgccc

SEQ ID NO: 4961755 - DNA, 25 bp, Homo sapien
gtcagacactgcgattgccccgcag

SEQ ID NO: 4961756 - DNA, 25 bp, Homo sapien
agacactgcgattgccccgcagctg

SEQ ID NO: 4961757 - DNA, 25 bp, Homo sapien
catgcagatcagtgtcctgggctaa

SEQ ID NO: 4961758 - DNA, 25 bp, Homo sapien
ccaagtgctgattgtggcccaagag

SEQ ID NO: 4961759 - DNA, 25 bp, Homo sapien
gcctcagtgggaacagatagaccca

SEQ ID NO: 4961760 - DNA, 25 bp, Homo sapien
tcaagttcgcccaaagtgcagtgtg

SEQ ID NO: 4961761 - DNA, 25 bp, Homo sapien
gattgccaggtgctatagcctgttc

SEQ ID NO: 4961762 - DNA, 25 bp, Homo sapien
ttatataacaagaactccagtttgg

SEQ ID NO: 4961763 - DNA, 25 bp, Homo sapien
gtaccccatatgattgattgccagg

SEQ ID NO: 4961764 - DNA, 25 bp, Homo sapien
aatttaatagcaggaatgtttcctc

SEQ ID NO: 4961765 - DNA, 25 bp, Homo sapien
tttggtagctgcagcgtcttctggg

SEQ ID NO: 4961766 - DNA, 25 bp, Homo sapien
ggacttacagccatagaaatatcac

SEQ ID NO: 4961767 - DNA, 25 bp, Homo sapien
tccctttgtattaatcaacatggac

SEQ ID NO: 4961768 - DNA, 25 bp, Homo sapien
atagaagaggctttacagcatccct

SEQ ID NO: 4961769 - DNA, 25 bp, Homo sapien
ctgagtaaggttggaagctgattct

SEQ ID NO: 4961770 - DNA, 25 bp, Homo sapien
ggctgactcttgagtccagccttgt

SEQ ID NO: 4961771 - DNA, 25 bp, Homo sapien
ttagcactacaatcattgacgcagc

SEQ ID NO: 4961772 - DNA, 25 bp, Homo sapien
cccattcgccttggcattgtggtca

SEQ ID NO: 4961773 - DNA, 25 bp, Homo sapien
tggatttcattgtccccattcgcct

SEQ ID NO: 4961774 - DNA, 25 bp, Homo sapien
tggtcatgtctgtaacaattagcac

SEQ ID NO: 4961775 - DNA, 25 bp, Homo sapien
caggccccatgtatacactgccagt

SEQ ID NO: 4961776 - DNA, 25 bp, Homo sapien
ccatgtatacactgccagtgccagt

SEQ ID NO: 4961777 - DNA, 25 bp, Homo sapien
aaggtgttcccaggccccatgtata

SEQ ID NO: 4961778 - DNA, 25 bp, Homo sapien
gccccatgtatacactgccagtgcc

SEQ ID NO: 4961779 - DNA, 25 bp, Homo sapien
gatgtaagcacagtttagactgcgc

SEQ ID NO: 4961780 - DNA, 25 bp, Homo sapien
caaaaggagtttgcctgagagatgc

SEQ ID NO: 4961781 - DNA, 25 bp, Homo sapien
tagactgcgctgtctcagtgacatg

SEQ ID NO: 4961782 - DNA, 25 bp, Homo sapien
tcaaggtaacccgaagcaggatgta

SEQ ID NO: 4961783 - DNA, 25 bp, Homo sapien
cagatgaggcctgctcaagagcatt

SEQ ID NO: 4961784 - DNA, 25 bp, Homo sapien
tgaggcctgctcaagagcatttggc

SEQ ID NO: 4961785 - DNA, 25 bp, Homo sapien
gcaaccaggttcatttggctccaag

SEQ ID NO: 4961786 - DNA, 25 bp, Homo sapien
ctgcaaccaggttcatttggctcca

SEQ ID NO: 4961787 - DNA, 25 bp, Homo sapien
caatggcaagtccatggggaatttc

SEQ ID NO: 4961788 - DNA, 25 bp, Homo sapien
gaattagatatattgctggacgcga

SEQ ID NO: 4961789 - DNA, 25 bp, Homo sapien
ggtagattaatgtccctctgaaagc

SEQ ID NO: 4961790 - DNA, 25 bp, Homo sapien
cgcgaataattaaggattctgatgt

SEQ ID NO: 4961791 - DNA, 25 bp, Homo sapien
tccaggacaattctaggttttacca

SEQ ID NO: 4961792 - DNA, 25 bp, Homo sapien
gcaggactgacccatctcatctttc

SEQ ID NO: 4961793 - DNA, 25 bp, Homo sapien
tctttcaagaaatcgatgggtaatc

SEQ ID NO: 4961794 - DNA, 25 bp, Homo sapien
ttagctagcaatgatggtgtccagg

SEQ ID NO: 4961795 - DNA, 25 bp, Homo sapien
tgcaaactctggctcatgggcctct

SEQ ID NO: 4961796 - DNA, 25 bp, Homo sapien
taggaggaatgcatcacaccaggac

SEQ ID NO: 4961797 - DNA, 25 bp, Homo sapien
taggcatatagtccagaaccatcac

SEQ ID NO: 4961798 - DNA, 25 bp, Homo sapien
gattaaatacggcacagttgatgac

SEQ ID NO: 4961799 - DNA, 25 bp, Homo sapien
caggagatgtgcatggcatcagaga

SEQ ID NO: 4961800 - DNA, 25 bp, Homo sapien
gaattgctatgaagacggcaggaga

SEQ ID NO: 4961801 - DNA, 25 bp, Homo sapien
cagtgaattgctatgaagacggcag

SEQ ID NO: 4961802 - DNA, 25 bp, Homo sapien
tatgaagacggcaggagatgtgcat

SEQ ID NO: 4961803 - DNA, 25 bp, Homo sapien
gttgagtcttgaaatatcagggccc

SEQ ID NO: 4961804 - DNA, 25 bp, Homo sapien
taattgcatatttgttcctgttgag

SEQ ID NO: 4961805 - DNA, 25 bp, Homo sapien
ctcctgtactgaagatactgccatg

SEQ ID NO: 4961806 - DNA, 25 bp, Homo sapien
cttgaaatatcagggcccagtgtat

SEQ ID NO: 4961807 - DNA, 25 bp, Homo sapien
cccatagtagctgctggatgatgag

SEQ ID NO: 4961808 - DNA, 25 bp, Homo sapien
cagcatagcagtggacccatagtag

SEQ ID NO: 4961809 - DNA, 25 bp, Homo sapien
cctccccaaggagaatgaacagcag

SEQ ID NO: 4961810 - DNA, 25 bp, Homo sapien
aaactgtagggccatggagatgatc

SEQ ID NO: 4961811 - DNA, 25 bp, Homo sapien
ggtgaaggtgccaagaactgtttct

SEQ ID NO: 4961812 - DNA, 25 bp, Homo sapien
ggccttcgaaacctcctgggcgctg

SEQ ID NO: 4961813 - DNA, 25 bp, Homo sapien
gggacaagcaatcttggcacggttt

SEQ ID NO: 4961814 - DNA, 25 bp, Homo sapien
tctcgtatcataacaagggccttcg

SEQ ID NO: 4961815 - DNA, 25 bp, Homo sapien
taagcttctattatagggacattct

SEQ ID NO: 4961816 - DNA, 25 bp, Homo sapien
gtccctaagcttctattatagggac

SEQ ID NO: 4961817 - DNA, 25 bp, Homo sapien
ccctaagcttctattatagggacat

SEQ ID NO: 4961818 - DNA, 25 bp, Homo sapien
tagccacagtcttcccatacttcca

SEQ ID NO: 4961819 - DNA, 25 bp, Homo sapien
gccagtctagattccacctcatccc

SEQ ID NO: 4961820 - DNA, 25 bp, Homo sapien
cagtctagattccacctcatcccta

SEQ ID NO: 4961821 - DNA, 25 bp, Homo sapien
ctgccagtctagattccacctcatc

SEQ ID NO: 4961822 - DNA, 25 bp, Homo sapien
gtctagattccacctcatccctacc

SEQ ID NO: 4961823 - DNA, 25 bp, Homo sapien
gagcaattgtgaagccaacctgtcc

SEQ ID NO: 4961824 - DNA, 25 bp, Homo sapien
agcaattgtgaagccaacctgtcca

SEQ ID NO: 4961825 - DNA, 25 bp, Homo sapien
caattgtgaagccaacctgtccaga

SEQ ID NO: 4961826 - DNA, 25 bp, Homo sapien
tccccttgcatgagcaattgtgaag

SEQ ID NO: 4961827 - DNA, 25 bp, Homo sapien
gctggctgcagtagcctccggcttc

SEQ ID NO: 4961828 - DNA, 25 bp, Homo sapien
tcgttcataagacccttggcattgg

SEQ ID NO: 4961829 - DNA, 25 bp, Homo sapien
cctcttgctgaggactaagaggcat

SEQ ID NO: 4961830 - DNA, 25 bp, Homo sapien
cttcctttctgggtcgttcataaga

SEQ ID NO: 4961831 - DNA, 25 bp, Homo sapien
tggggagactcccataaacatccat

SEQ ID NO: 4961832 - DNA, 25 bp, Homo sapien
gagagaaatcagtctgctccacctg

SEQ ID NO: 4961833 - DNA, 25 bp, Homo sapien
ggccacgagagaaatcagtctgctc

SEQ ID NO: 4961834 - DNA, 25 bp, Homo sapien
agaaatcagtctgctccacctgggg

SEQ ID NO: 4961835 - DNA, 25 bp, Homo sapien
tgcaccatatctgcgatcagcagaa

SEQ ID NO: 4961836 - DNA, 25 bp, Homo sapien
cattctgcaccatatctgcgatcag

SEQ ID NO: 4961837 - DNA, 25 bp, Homo sapien
cagcatccttcattctgcaccatat

SEQ ID NO: 4961838 - DNA, 25 bp, Homo sapien
ccttcattctgcaccatatctgcga

SEQ ID NO: 4961839 - DNA, 25 bp, Homo sapien
gcaggcagtctatgactttccgata

SEQ ID NO: 4961840 - DNA, 25 bp, Homo sapien
cagtctatgactttccgatatttgg

SEQ ID NO: 4961841 - DNA, 25 bp, Homo sapien
tgactttccgatatttggtgatatg

SEQ ID NO: 4961842 - DNA, 25 bp, Homo sapien
tattctgcaggcagtctatgacttt

SEQ ID NO: 4961843 - DNA, 25 bp, Homo sapien
tcaaatggaggctatcaattgcttt

SEQ ID NO: 4961844 - DNA, 25 bp, Homo sapien
caaatggaggctatcaattgctttc

SEQ ID NO: 4961845 - DNA, 25 bp, Homo sapien
tttcagccagtactgagctgactgt

SEQ ID NO: 4961846 - DNA, 25 bp, Homo sapien
cagccagtactgagctgactgtttc

SEQ ID NO: 4961847 - DNA, 25 bp, Homo sapien
tcagccagtactgagctgactgttt

SEQ ID NO: 4961848 - DNA, 25 bp, Homo sapien
ttcagccagtactgagctgactgtt

SEQ ID NO: 4961849 - DNA, 25 bp, Homo sapien
cattgcagggcccttgacagtgatg

SEQ ID NO: 4961850 - DNA, 25 bp, Homo sapien
acaaagtatgtcaaagcaagggagc

SEQ ID NO: 4961851 - DNA, 25 bp, Homo sapien
cgtgaaagcggaagtgacaaagtat

SEQ ID NO: 4961852 - DNA, 25 bp, Homo sapien
tgacagtgatggatctggtgctatc

SEQ ID NO: 4961853 - DNA, 25 bp, Homo sapien
catagagaagtaagatttacatatc

SEQ ID NO: 4961854 - DNA, 25 bp, Homo sapien
atatcgaagatcaataacagcctcc

SEQ ID NO: 4961855 - DNA, 25 bp, Homo sapien
gatttacatatcgaagatcaataac

SEQ ID NO: 4961856 - DNA, 25 bp, Homo sapien
gagaagtaagatttacatatcgaag

SEQ ID NO: 4961857 - DNA, 25 bp, Homo sapien
tggtgtcttggatttgctcagcagc

SEQ ID NO: 4961858 - DNA, 25 bp, Homo sapien
gacagactggtgtcttggatttgct

SEQ ID NO: 4961859 - DNA, 25 bp, Homo sapien
ggctcatttcagacaggccagacat

SEQ ID NO: 4961860 - DNA, 25 bp, Homo sapien
taagaaagatgttgtatgaagacag

SEQ ID NO: 4961861 - DNA, 25 bp, Homo sapien
ggggggcttcaattcacgttcaggc

SEQ ID NO: 4961862 - DNA, 25 bp, Homo sapien
gacaaagatgaggtcctgtgctgac

SEQ ID NO: 4961863 - DNA, 25 bp, Homo sapien
aattcacgttcaggcatggtgacaa

SEQ ID NO: 4961864 - DNA, 25 bp, Homo sapien
caaagatgaggtcctgtgctgacag

SEQ ID NO: 4961865 - DNA, 25 bp, Homo sapien
gttgtccctgccagtgtgctgaagg

SEQ ID NO: 4961866 - DNA, 25 bp, Homo sapien
gagagactgccagtccactgggtta

SEQ ID NO: 4961867 - DNA, 25 bp, Homo sapien
tatcgagtgctgagagtggagatgc

SEQ ID NO: 4961868 - DNA, 25 bp, Homo sapien
ctgggttatcgagtgctgagagtgg

SEQ ID NO: 4961869 - DNA, 25 bp, Homo sapien
tgaggtctgtagtccaaggaagccc

SEQ ID NO: 4961870 - DNA, 25 bp, Homo sapien
aagccccagttgtctgggtccacag

SEQ ID NO: 4961871 - DNA, 25 bp, Homo sapien
tcttggcccaagatctgagtatgct

SEQ ID NO: 4961872 - DNA, 25 bp, Homo sapien
catccttgggtgcagaactcttggc

SEQ ID NO: 4961873 - DNA, 25 bp, Homo sapien
caatccaggggtagaaaccacatcc

SEQ ID NO: 4961874 - DNA, 25 bp, Homo sapien
tcaatccaggggtagaaaccacatc

SEQ ID NO: 4961875 - DNA, 25 bp, Homo sapien
gattttgcgtcaagctcagcgtggc

SEQ ID NO: 4961876 - DNA, 25 bp, Homo sapien
ccaaacagtgcagcgtacagacaca

SEQ ID NO: 4961877 - DNA, 25 bp, Homo sapien
gatttggagcttcccttgaacgtct

SEQ ID NO: 4961878 - DNA, 25 bp, Homo sapien
ttctaatggtcgacggaaggctcca

SEQ ID NO: 4961879 - DNA, 25 bp, Homo sapien
gttttcttatcatcctcctctggtc

SEQ ID NO: 4961880 - DNA, 25 bp, Homo sapien
gcagctgcctggttatggcagcacc

SEQ ID NO: 4961881 - DNA, 25 bp, Homo sapien
ttcacatcccgtacatccaggcagc

SEQ ID NO: 4961882 - DNA, 25 bp, Homo sapien
ttctgctcttgggtacgttttctta

SEQ ID NO: 4961883 - DNA, 25 bp, Homo sapien
tatgggaatgtaagggagccccgcc

SEQ ID NO: 4961884 - DNA, 25 bp, Homo sapien
gagctagtcagaggctaatcctgga

SEQ ID NO: 4961885 - DNA, 25 bp, Homo sapien
tgaggacctcgggactgactttctg

SEQ ID NO: 4961886 - DNA, 25 bp, Homo sapien
tccagctgggcgatcttagtaccac

SEQ ID NO: 4961887 - DNA, 25 bp, Homo sapien
ggatgggtccatcactcacagagca

SEQ ID NO: 4961888 - DNA, 25 bp, Homo sapien
taatctggcatgtggtagtaactca

SEQ ID NO: 4961889 - DNA, 25 bp, Homo sapien
gttcttatgtcttttgccagggcca

SEQ ID NO: 4961890 - DNA, 25 bp, Homo sapien
gatggccctggtgcaagagaagacc

SEQ ID NO: 4961891 - DNA, 25 bp, Homo sapien
tttattaggtagcccatgtcttcca

SEQ ID NO: 4961892 - DNA, 25 bp, Homo sapien
gggagatctagacagctccgtgttt

SEQ ID NO: 4961893 - DNA, 25 bp, Homo sapien
tgaatctccttagtttggtttgaaa

SEQ ID NO: 4961894 - DNA, 25 bp, Homo sapien
gacagctccgtgttttgaatctcct

SEQ ID NO: 4961895 - DNA, 25 bp, Homo sapien
tcagaacctcccgatctgcataggg

SEQ ID NO: 4961896 - DNA, 25 bp, Homo sapien
tctgcatagggtgcatttggtggaa

SEQ ID NO: 4961897 - DNA, 25 bp, Homo sapien
cagagtggcagttcagaacctcccg

SEQ ID NO: 4961898 - DNA, 25 bp, Homo sapien
tcccgatctgcatagggtgcatttg

SEQ ID NO: 4961899 - DNA, 25 bp, Homo sapien
gaggcagggtgcaagctctcaaaac

SEQ ID NO: 4961900 - DNA, 25 bp, Homo sapien
tacagcatgtttgagacaaagtatg

SEQ ID NO: 4961901 - DNA, 25 bp, Homo sapien
tttgcaagggcgtgatgtaaatgct

SEQ ID NO: 4961902 - DNA, 25 bp, Homo sapien
ctttgaagaaaaggcgagtgatcag

SEQ ID NO: 4961903 - DNA, 25 bp, Homo sapien
ttggagaagttaggcgatgaacacc

SEQ ID NO: 4961904 - DNA, 25 bp, Homo sapien
tgagcttctctaccagctagctgaa

SEQ ID NO: 4961905 - DNA, 25 bp, Homo sapien
gggaatatatcgaagctataaattc

SEQ ID NO: 4961906 - DNA, 25 bp, Homo sapien
gatggttttcaacagatggaagatg

SEQ ID NO: 4961907 - DNA, 25 bp, Homo sapien
taagagtttaggctccacagtgctg

SEQ ID NO: 4961908 - DNA, 25 bp, Homo sapien
tgaagcaggaagtacttgggaacaa

SEQ ID NO: 4961909 - DNA, 25 bp, Homo sapien
gaacaatagggtgaagccagcctaa

SEQ ID NO: 4961910 - DNA, 25 bp, Homo sapien
cacagtgctggtaatgggatgcgta

SEQ ID NO: 4961911 - DNA, 25 bp, Homo sapien
taaattttgttctctccattggcct

SEQ ID NO: 4961912 - DNA, 25 bp, Homo sapien
acgctgtagcattgggtcaggtcag

SEQ ID NO: 4961913 - DNA, 25 bp, Homo sapien
tgaacacaacgctgtagcattgggt

SEQ ID NO: 4961914 - DNA, 25 bp, Homo sapien
cacaacgctgtagcattgggtcagg

SEQ ID NO: 4961915 - DNA, 25 bp, Homo sapien
caacgctgtagcattgggtcaggtc

SEQ ID NO: 4961916 - DNA, 25 bp, Homo sapien
tacgccaaagcatgagaccaacaga

SEQ ID NO: 4961917 - DNA, 25 bp, Homo sapien
gaaaccagttctatcccgatgccta

SEQ ID NO: 4961918 - DNA, 25 bp, Homo sapien
gggcatttcctagccatcatatttt

SEQ ID NO: 4961919 - DNA, 25 bp, Homo sapien
gatcagcgcttgctggttataagaa

SEQ ID NO: 4961920 - DNA, 25 bp, Homo sapien
agtagagcatcagttcacatttgga

SEQ ID NO: 4961921 - DNA, 25 bp, Homo sapien
tagagcatcagttcacatttggaaa

SEQ ID NO: 4961922 - DNA, 25 bp, Homo sapien
gcatcagttcacatttggaaaggcc

SEQ ID NO: 4961923 - DNA, 25 bp, Homo sapien
ttagtagagcatcagttcacatttg

SEQ ID NO: 4961924 - DNA, 25 bp, Homo sapien
agtcaaatgatgtgtgccctcttgc

SEQ ID NO: 4961925 - DNA, 25 bp, Homo sapien
cttactggtgtttcttgcactccaa

SEQ ID NO: 4961926 - DNA, 25 bp, Homo sapien
caagggtctcttgcattttagtcaa

SEQ ID NO: 4961927 - DNA, 25 bp, Homo sapien
gcaaccagccaagaatatggaatta

SEQ ID NO: 4961928 - DNA, 25 bp, Homo sapien
tacaaaacatcaagccagcaattac

SEQ ID NO: 4961929 - DNA, 25 bp, Homo sapien
ggagagctgcctctacttcgcacac

SEQ ID NO: 4961930 - DNA, 25 bp, Homo sapien
acgcatggggttgtccacctgcgtc

SEQ ID NO: 4961931 - DNA, 25 bp, Homo sapien
caattactgcaatcagacgcatggg

SEQ ID NO: 4961932 - DNA, 25 bp, Homo sapien
cctgaagacgtattttcaggccgga

SEQ ID NO: 4961933 - DNA, 25 bp, Homo sapien
tgaagacgtattttcaggccggaag

SEQ ID NO: 4961934 - DNA, 25 bp, Homo sapien
ctgcctgaagacgtattttcaggcc

SEQ ID NO: 4961935 - DNA, 25 bp, Homo sapien
gccacctcttcctttgtacaatgtc

SEQ ID NO: 4961936 - DNA, 25 bp, Homo sapien
gagattcccacgttttctccaacaa

SEQ ID NO: 4961937 - DNA, 25 bp, Homo sapien
ctgtgattgatcatggatattccca

SEQ ID NO: 4961938 - DNA, 25 bp, Homo sapien
tgattgatcatggatattcccagag

SEQ ID NO: 4961939 - DNA, 25 bp, Homo sapien
tattcccagagattcccacgttttc

SEQ ID NO: 4961940 - DNA, 25 bp, Homo sapien
tgcaattatgtttgcgccagcctaa

SEQ ID NO: 4961941 - DNA, 25 bp, Homo sapien
tggaaccaacaaacacacgcaaagc

SEQ ID NO: 4961942 - DNA, 25 bp, Homo sapien
tcaggagagcatcgcgttgaagaca

SEQ ID NO: 4961943 - DNA, 25 bp, Homo sapien
gttggtgcaaatgtaatggcgcgtc

SEQ ID NO: 4961944 - DNA, 25 bp, Homo sapien
gcaatggcagccttacaaaggatga

SEQ ID NO: 4961945 - DNA, 25 bp, Homo sapien
gccttacaaaggatgatgacttttg

SEQ ID NO: 4961946 - DNA, 25 bp, Homo sapien
cagccttacaaaggatgatgacttt

SEQ ID NO: 4961947 - DNA, 25 bp, Homo sapien
tggcagccttacaaaggatgatgac

SEQ ID NO: 4961948 - DNA, 25 bp, Homo sapien
ggatagcggactctccaaaagccat

SEQ ID NO: 4961949 - DNA, 25 bp, Homo sapien
gaagatgggatagcggactctccaa

SEQ ID NO: 4961950 - DNA, 25 bp, Homo sapien
ctgtgaagatgggatagcggactct

SEQ ID NO: 4961951 - DNA, 25 bp, Homo sapien
gatgggatagcggactctccaaaag

SEQ ID NO: 4961952 - DNA, 25 bp, Homo sapien
gaatgccaagtgtaggatccttcct

SEQ ID NO: 4961953 - DNA, 25 bp, Homo sapien
tccctgatcctggaacgcgggtgct

SEQ ID NO: 4961954 - DNA, 25 bp, Homo sapien
aaacacacagtgaccgcgggtggtg

SEQ ID NO: 4961955 - DNA, 25 bp, Homo sapien
tgctgccagagacactatccctgat

SEQ ID NO: 4961956 - DNA, 25 bp, Homo sapien
tcctttttagtaactcgaagagtca

SEQ ID NO: 4961957 - DNA, 25 bp, Homo sapien
ggtgttcgcagctcgtcttcctttt

SEQ ID NO: 4961958 - DNA, 25 bp, Homo sapien
tagtaactcgaagagtcatcctgac

SEQ ID NO: 4961959 - DNA, 25 bp, Homo sapien
taaaagatggtgttcgcagctcgtc

SEQ ID NO: 4961960 - DNA, 25 bp, Homo sapien
tctccaaaaaggcttctgccttcaa

SEQ ID NO: 4961961 - DNA, 25 bp, Homo sapien
tccaaaaaggcttctgccttcaaca

SEQ ID NO: 4961962 - DNA, 25 bp, Homo sapien
cttctccaaaaaggcttctgccttc

SEQ ID NO: 4961963 - DNA, 25 bp, Homo sapien
ccaaaaaggcttctgccttcaacag

SEQ ID NO: 4961964 - DNA, 25 bp, Homo sapien
tgggacaagaaagtcctgggtgtca

SEQ ID NO: 4961965 - DNA, 25 bp, Homo sapien
ggaccaacaagggataaatgcccta

SEQ ID NO: 4961966 - DNA, 25 bp, Homo sapien
gaccaacaagggataaatgccctag

SEQ ID NO: 4961967 - DNA, 25 bp, Homo sapien
caagggataaatgccctagcaaaag

SEQ ID NO: 4961968 - DNA, 25 bp, Homo sapien
caacaagggataaatgccctagcaa

SEQ ID NO: 4961969 - DNA, 25 bp, Homo sapien
aatggaagctccccccgagaatttg

SEQ ID NO: 4961970 - DNA, 25 bp, Homo sapien
caagtgaagctagaaatgtaagtac

SEQ ID NO: 4961971 - DNA, 25 bp, Homo sapien
atggccatgctgatgacaagtgaag

SEQ ID NO: 4961972 - DNA, 25 bp, Homo sapien
ccccgagaatttgccaaaagacaat

SEQ ID NO: 4961973 - DNA, 25 bp, Homo sapien
ccagttctgggacagagcaccagac

SEQ ID NO: 4961974 - DNA, 25 bp, Homo sapien
ggccagttctgggacagagcaccag

SEQ ID NO: 4961975 - DNA, 25 bp, Homo sapien
gggggccagttctgggacagagcac

SEQ ID NO: 4961976 - DNA, 25 bp, Homo sapien
ctgggggccagttctgggacagagc

SEQ ID NO: 4961977 - DNA, 25 bp, Homo sapien
aacaagcaccaggagagtggccagc

SEQ ID NO: 4961978 - DNA, 25 bp, Homo sapien
ctggctccctgcaacaagcaccagg

SEQ ID NO: 4961979 - DNA, 25 bp, Homo sapien
caggagagtggccagcaatgcccac

SEQ ID NO: 4961980 - DNA, 25 bp, Homo sapien
tggctccctgcaacaagcaccagga

SEQ ID NO: 4961981 - DNA, 25 bp, Homo sapien
ctgatctgaaactcacaccaaactc

SEQ ID NO: 4961982 - DNA, 25 bp, Homo sapien
accaaactccttacttccaggcatg

SEQ ID NO: 4961983 - DNA, 25 bp, Homo sapien
cttttcctcctgatacagtgtccaa

SEQ ID NO: 4961984 - DNA, 25 bp, Homo sapien
ttcctcctgatacagtgtccaaaat

SEQ ID NO: 4961985 - DNA, 25 bp, Homo sapien
gaagtagatagttgtggaggaaaaa

SEQ ID NO: 4961986 - DNA, 25 bp, Homo sapien
gggatataacctaatggtaatagcc

SEQ ID NO: 4961987 - DNA, 25 bp, Homo sapien
tataacctaatggtaatagcctggg

SEQ ID NO: 4961988 - DNA, 25 bp, Homo sapien
aaattttacatgacacatgagtctt

SEQ ID NO: 4961989 - DNA, 25 bp, Homo sapien
tcagtaactcattcctgtgagaggg

SEQ ID NO: 4961990 - DNA, 25 bp, Homo sapien
taactcattcctgtgagagggctcc

SEQ ID NO: 4961991 - DNA, 25 bp, Homo sapien
cagtaactcattcctgtgagagggc

SEQ ID NO: 4961992 - DNA, 25 bp, Homo sapien
gtaactcattcctgtgagagggctc

SEQ ID NO: 4961993 - DNA, 25 bp, Homo sapien
ggtctgaggattgattagcttcaca

SEQ ID NO: 4961994 - DNA, 25 bp, Homo sapien
gtctgaggattgattagcttcacac

SEQ ID NO: 4961995 - DNA, 25 bp, Homo sapien
caaagttctagatttgctgagtgga

SEQ ID NO: 4961996 - DNA, 25 bp, Homo sapien
ccacaaagttctagatttgctgagt

SEQ ID NO: 4961997 - DNA, 25 bp, Homo sapien
gggggtcatgcccagaaagtcttcc

SEQ ID NO: 4961998 - DNA, 25 bp, Homo sapien
agtggatgagcagaggtcgagagcc

SEQ ID NO: 4961999 - DNA, 25 bp, Homo sapien
catttcgaatcctgctcctccataa

SEQ ID NO: 4962000 - DNA, 25 bp, Homo sapien
ccatttcgaatcctgctcctccata

SEQ ID NO: 4962001 - DNA, 25 bp, Homo sapien
ctcctctaccatttcgaatcctgct

SEQ ID NO: 4962002 - DNA, 25 bp, Homo sapien
tcctctaccatttcgaatcctgctc

SEQ ID NO: 4962003 - DNA, 25 bp, Homo sapien
gatctctccccgatagagacgtttg

SEQ ID NO: 4962004 - DNA, 25 bp, Homo sapien
tgtaaaaatgatctctccccgatag

SEQ ID NO: 4962005 - DNA, 25 bp, Homo sapien
gacgtttgatgatcaaaaacattaa

SEQ ID NO: 4962006 - DNA, 25 bp, Homo sapien
ccccgatagagacgtttgatgatca

SEQ ID NO: 4962007 - DNA, 25 bp, Homo sapien
aaggtccatgatgctttacataagc

SEQ ID NO: 4962008 - DNA, 25 bp, Homo sapien
tgtcaaaaagcgacttcaagctggc

SEQ ID NO: 4962009 - DNA, 25 bp, Homo sapien
cattttgcactgacgtttttcaagc

SEQ ID NO: 4962010 - DNA, 25 bp, Homo sapien
taatggtgtagtattcccacaacat

SEQ ID NO: 4962011 - DNA, 25 bp, Homo sapien
cacttccaggtgtagaaacacaaag

SEQ ID NO: 4962012 - DNA, 25 bp, Homo sapien
gggtcaggatcagagactcaccacg

SEQ ID NO: 4962013 - DNA, 25 bp, Homo sapien
tgggacttgctgcagatattgacac

SEQ ID NO: 4962014 - DNA, 25 bp, Homo sapien
gcagggggcacaagaagtgggactt

SEQ ID NO: 4962015 - DNA, 25 bp, Homo sapien
gattgcctaaagcattcatgtgaaa

SEQ ID NO: 4962016 - DNA, 25 bp, Homo sapien
gcagatttttgcctatgtttgttac

SEQ ID NO: 4962017 - DNA, 25 bp, Homo sapien
tcccatcatggctgattgcctaaag

SEQ ID NO: 4962018 - DNA, 25 bp, Homo sapien
aatgcagtttattggattctcagaa

SEQ ID NO: 4962019 - DNA, 25 bp, Homo sapien
tatagagtcggatggggatttgcca

SEQ ID NO: 4962020 - DNA, 25 bp, Homo sapien
ttgataagggatatagagtcggatg

SEQ ID NO: 4962021 - DNA, 25 bp, Homo sapien
tgatcagcaggttgataagggatat

SEQ ID NO: 4962022 - DNA, 25 bp, Homo sapien
tgacaaatgagaggtgatcagcagg

SEQ ID NO: 4962023 - DNA, 25 bp, Homo sapien
ttttcagaacatcctgtgggtacca

SEQ ID NO: 4962024 - DNA, 25 bp, Homo sapien
catccataatgggaacatgagcgca

SEQ ID NO: 4962025 - DNA, 25 bp, Homo sapien
tcggttcagcaagtttgcaacacac

SEQ ID NO: 4962026 - DNA, 25 bp, Homo sapien
catgagcgcatttgtatttgacatt

SEQ ID NO: 4962027 - DNA, 25 bp, Homo sapien
gtaaatattgactgtgtctgcattt

SEQ ID NO: 4962028 - DNA, 25 bp, Homo sapien
tctgcttgtaaggatggtgaccagg

SEQ ID NO: 4962029 - DNA, 25 bp, Homo sapien
ctattttgtaatgccaaatctgatg

SEQ ID NO: 4962030 - DNA, 25 bp, Homo sapien
tgtaatgccaaatctgatgtaaata

SEQ ID NO: 4962031 - DNA, 25 bp, Homo sapien
tgcaattcagaacgtcctcggagga

SEQ ID NO: 4962032 - DNA, 25 bp, Homo sapien
agacccatggcagtgatgaagtttc

SEQ ID NO: 4962033 - DNA, 25 bp, Homo sapien
gaggacatgagcatgcaattcagaa

SEQ ID NO: 4962034 - DNA, 25 bp, Homo sapien
gtcctcggaggaccagaagacccat

SEQ ID NO: 4962035 - DNA, 25 bp, Homo sapien
gattggtgcggagaagtgtcaggca

SEQ ID NO: 4962036 - DNA, 25 bp, Homo sapien
tgaaggcagattggtgcggagaagt

SEQ ID NO: 4962037 - DNA, 25 bp, Homo sapien
aggcagattggtgcggagaagtgtc

SEQ ID NO: 4962038 - DNA, 25 bp, Homo sapien
tgcggagaagtgtcaggcaggaaga

SEQ ID NO: 4962039 - DNA, 25 bp, Homo sapien
tccccgctcgggtctcttcggcaga

SEQ ID NO: 4962040 - DNA, 25 bp, Homo sapien
ccacacccatgaagaccatgtgctg

SEQ ID NO: 4962041 - DNA, 25 bp, Homo sapien
tctcttcggcagaagctgctcacct

SEQ ID NO: 4962042 - DNA, 25 bp, Homo sapien
cacccatgaagaccatgtgctggta

SEQ ID NO: 4962043 - DNA, 25 bp, Homo sapien
gagacccctggtctatactccaaag

SEQ ID NO: 4962044 - DNA, 25 bp, Homo sapien
cagccagttgctatgtgttgtggag

SEQ ID NO: 4962045 - DNA, 25 bp, Homo sapien
tctatactccaaaggcagccagttg

SEQ ID NO: 4962046 - DNA, 25 bp, Homo sapien
ggagagagacccctggtctatactc

SEQ ID NO: 4962047 - DNA, 25 bp, Homo sapien
ttcatcagcacggcccaagcagccc

SEQ ID NO: 4962048 - DNA, 25 bp, Homo sapien
cttcatcagcacggcccaagcagcc

SEQ ID NO: 4962049 - DNA, 25 bp, Homo sapien
gatttagtctagcagagtcctcctg

SEQ ID NO: 4962050 - DNA, 25 bp, Homo sapien
gaaggctccatatgagacttctgag

SEQ ID NO: 4962051 - DNA, 25 bp, Homo sapien
tctccacaaggcagaaggccatgga

SEQ ID NO: 4962052 - DNA, 25 bp, Homo sapien
gctctgaagatctgggtctggtggt

SEQ ID NO: 4962053 - DNA, 25 bp, Homo sapien
agtggaacccggaagcacaagagca

SEQ ID NO: 4962054 - DNA, 25 bp, Homo sapien
tggaacccggaagcacaagagcagc

SEQ ID NO: 4962055 - DNA, 25 bp, Homo sapien
aacccggaagcacaagagcagccat

SEQ ID NO: 4962056 - DNA, 25 bp, Homo sapien
tcagtggaacccggaagcacaagag

SEQ ID NO: 4962057 - DNA, 25 bp, Homo sapien
acttcaacgtcttcatcccacaagg

SEQ ID NO: 4962058 - DNA, 25 bp, Homo sapien
tggctggcctgagcatagcacagct

SEQ ID NO: 4962059 - DNA, 25 bp, Homo sapien
ccacatggaagatgacaagttggct

SEQ ID NO: 4962060 - DNA, 25 bp, Homo sapien
taggaggaggtagaacttcaacgtc

SEQ ID NO: 4962061 - DNA, 25 bp, Homo sapien
cactcacacgtgttatcagccaagc

SEQ ID NO: 4962062 - DNA, 25 bp, Homo sapien
ccatgtcagcaacaccacctaaggg

SEQ ID NO: 4962063 - DNA, 25 bp, Homo sapien
tcagccaagcttcagctcagattag

SEQ ID NO: 4962064 - DNA, 25 bp, Homo sapien
tcattgccctaggtgaaaccacagt

SEQ ID NO: 4962065 - DNA, 25 bp, Homo sapien
acgaggccgccagtggttgcttgca

SEQ ID NO: 4962066 - DNA, 25 bp, Homo sapien
gcatggctccaaaagttgacacttg

SEQ ID NO: 4962067 - DNA, 25 bp, Homo sapien
tgacacttgggacaagcacttcaca

SEQ ID NO: 4962068 - DNA, 25 bp, Homo sapien
tggttgcttgcatggctccaaaagt

SEQ ID NO: 4962069 - DNA, 25 bp, Homo sapien
tctgaagaatgacaccaaggcagca

SEQ ID NO: 4962070 - DNA, 25 bp, Homo sapien
ccccttgagtgtggagatactcaaa

SEQ ID NO: 4962071 - DNA, 25 bp, Homo sapien
caaggcagcagatattacggccccc

SEQ ID NO: 4962072 - DNA, 25 bp, Homo sapien
aacacaaatggcttgccgggtgccc

SEQ ID NO: 4962073 - DNA, 25 bp, Homo sapien
tcaggcatgggcagccttgagcctc

SEQ ID NO: 4962074 - DNA, 25 bp, Homo sapien
tgggcagaagccagtgtgccccact

SEQ ID NO: 4962075 - DNA, 25 bp, Homo sapien
gccccacttaggaggctccacgtgg

SEQ ID NO: 4962076 - DNA, 25 bp, Homo sapien
gggcagccttgagcctctgggcaga

SEQ ID NO: 4962077 - DNA, 25 bp, Homo sapien
ctgctgcctctccgatgtggccggc

SEQ ID NO: 4962078 - DNA, 25 bp, Homo sapien
atgtggccggcacccactgagccat

SEQ ID NO: 4962079 - DNA, 25 bp, Homo sapien
ccgatgtggccggcacccactgagc

SEQ ID NO: 4962080 - DNA, 25 bp, Homo sapien
tgctgcctctccgatgtggccggca

SEQ ID NO: 4962081 - DNA, 25 bp, Homo sapien
gccccagtaaggatgagaatcttcc

SEQ ID NO: 4962082 - DNA, 25 bp, Homo sapien
ccccagtaaggatgagaatcttcct

SEQ ID NO: 4962083 - DNA, 25 bp, Homo sapien
tggggtctctttggaagtacctcca

SEQ ID NO: 4962084 - DNA, 25 bp, Homo sapien
gctggggtttggcaaatccaatctc

SEQ ID NO: 4962085 - DNA, 25 bp, Homo sapien
ctcataattcccagttgttagcagc

SEQ ID NO: 4962086 - DNA, 25 bp, Homo sapien
cataattcccagttgttagcagcat

SEQ ID NO: 4962087 - DNA, 25 bp, Homo sapien
tcataattcccagttgttagcagca

SEQ ID NO: 4962088 - DNA, 25 bp, Homo sapien
gggaaggaatatccattggaactat

SEQ ID NO: 4962089 - DNA, 25 bp, Homo sapien
gtggggaaggaatatccattggaac

SEQ ID NO: 4962090 - DNA, 25 bp, Homo sapien
tggggaaggaatatccattggaact

SEQ ID NO: 4962091 - DNA, 25 bp, Homo sapien
ggggaaggaatatccattggaacta

SEQ ID NO: 4962092 - DNA, 25 bp, Homo sapien
catttgagggcagagtaaagctagc

SEQ ID NO: 4962093 - DNA, 25 bp, Homo sapien
cctattagggataccagacatgaca

SEQ ID NO: 4962094 - DNA, 25 bp, Homo sapien
cagcagaatgctgaccctgtacatc

SEQ ID NO: 4962095 - DNA, 25 bp, Homo sapien
gaacacggattcctaagtggatgcc

SEQ ID NO: 4962096 - DNA, 25 bp, Homo sapien
catatatgttaggagaggagccccg

SEQ ID NO: 4962097 - DNA, 25 bp, Homo sapien
cctagcacgtttattggagccttgg

SEQ ID NO: 4962098 - DNA, 25 bp, Homo sapien
ccttggttaagcttggatgcggatc

SEQ ID NO: 4962099 - DNA, 25 bp, Homo sapien
gacagcaggaaagcttgagggccca

SEQ ID NO: 4962100 - DNA, 25 bp, Homo sapien
tgtttccatttcgtcaggcggctgt

SEQ ID NO: 4962101 - DNA, 25 bp, Homo sapien
caggttcagcgacaaggtgggaaaa

SEQ ID NO: 4962102 - DNA, 25 bp, Homo sapien
ggtgcccaagttttaatgcctcgcc

SEQ ID NO: 4962103 - DNA, 25 bp, Homo sapien
caaaaatattctgactcggttccca

SEQ ID NO: 4962104 - DNA, 25 bp, Homo sapien
tcaaggcagccgacggtctggctct

SEQ ID NO: 4962105 - DNA, 25 bp, Homo sapien
cacggtcaaggcagccgacggtctg

SEQ ID NO: 4962106 - DNA, 25 bp, Homo sapien
caccttgttactccctgggatgata

SEQ ID NO: 4962107 - DNA, 25 bp, Homo sapien
gggcctgagttaggtttgatcacct

SEQ ID NO: 4962108 - DNA, 25 bp, Homo sapien
caagggagcccacattcgccctgtt

SEQ ID NO: 4962109 - DNA, 25 bp, Homo sapien
ctgggacccggcagagaaacggact

SEQ ID NO: 4962110 - DNA, 25 bp, Homo sapien
ggataacaggctactcctccctgca

SEQ ID NO: 4962111 - DNA, 25 bp, Homo sapien
cactctgaagggagcgctgactctc

SEQ ID NO: 4962112 - DNA, 25 bp, Homo sapien
ctctgtgaagcacatgcttaactct

SEQ ID NO: 4962113 - DNA, 25 bp, Homo sapien
tttggagttgttggccttcagcccc

SEQ ID NO: 4962114 - DNA, 25 bp, Homo sapien
gaagcacatgcttaactctttggag

SEQ ID NO: 4962115 - DNA, 25 bp, Homo sapien
gcttaactctttggagttgttggcc

SEQ ID NO: 4962116 - DNA, 25 bp, Homo sapien
tccagtccaaaagcacacaggccta

SEQ ID NO: 4962117 - DNA, 25 bp, Homo sapien
gtggctccagtccaaaagcacacag

SEQ ID NO: 4962118 - DNA, 25 bp, Homo sapien
atcccctagaggcatctgtggctcc

SEQ ID NO: 4962119 - DNA, 25 bp, Homo sapien
ttctcatcccctagaggcatctgtg

SEQ ID NO: 4962120 - DNA, 25 bp, Homo sapien
gcatcaaagaactggcccttgcaga

SEQ ID NO: 4962121 - DNA, 25 bp, Homo sapien
caaagaactggcccttgcagatggc

SEQ ID NO: 4962122 - DNA, 25 bp, Homo sapien
aaagaactggcccttgcagatggca

SEQ ID NO: 4962123 - DNA, 25 bp, Homo sapien
catcaaagaactggcccttgcagat

SEQ ID NO: 4962124 - DNA, 25 bp, Homo sapien
gcagcttcccagtcctgcgcacaga

SEQ ID NO: 4962125 - DNA, 25 bp, Homo sapien
caggtgtccaagactgacctgacac

SEQ ID NO: 4962126 - DNA, 25 bp, Homo sapien
ctgcaggtgtccaagactgacctga

SEQ ID NO: 4962127 - DNA, 25 bp, Homo sapien
ggtgtccaagactgacctgacactc

SEQ ID NO: 4962128 - DNA, 25 bp, Homo sapien
tgtccaagactgacctgacactcag

SEQ ID NO: 4962129 - DNA, 25 bp, Homo sapien
gaggtcatctggcaaagaaggcgtc

SEQ ID NO: 4962130 - DNA, 25 bp, Homo sapien
gtccgtgccgttgccaaaggcctgg

SEQ ID NO: 4962131 - DNA, 25 bp, Homo sapien
aaagaaggcgtcttctccacccgag

SEQ ID NO: 4962132 - DNA, 25 bp, Homo sapien
caagctggtactgtcactgaggtca

SEQ ID NO: 4962133 - DNA, 25 bp, Homo sapien
acatagttaggtgtcatgtcaaacc

SEQ ID NO: 4962134 - DNA, 25 bp, Homo sapien
tctcggtgaagtccctgaggaactt

SEQ ID NO: 4962135 - DNA, 25 bp, Homo sapien
cgctgccacgacagctgcaccaggg

SEQ ID NO: 4962136 - DNA, 25 bp, Homo sapien
ctggagtccacatagttaggtgtca

SEQ ID NO: 4962137 - DNA, 25 bp, Homo sapien
cctggtaattgtccgcagggcagct

SEQ ID NO: 4962138 - DNA, 25 bp, Homo sapien
aattggcatggaagtcggccagccg

SEQ ID NO: 4962139 - DNA, 25 bp, Homo sapien
tgaccgtctggtaggaggctcgaca

SEQ ID NO: 4962140 - DNA, 25 bp, Homo sapien
tcatgccagcataagagcccagaca

SEQ ID NO: 4962141 - DNA, 25 bp, Homo sapien
aacagcagcatgaatggggagtaca

SEQ ID NO: 4962142 - DNA, 25 bp, Homo sapien
acagcagcatgaatggggagtacat

SEQ ID NO: 4962143 - DNA, 25 bp, Homo sapien
cctccagccccacacgctggagaag

SEQ ID NO: 4962144 - DNA, 25 bp, Homo sapien
cagccccacacgctggagaaggaac

SEQ ID NO: 4962145 - DNA, 25 bp, Homo sapien
tgaatgcatttatcttagaacaagc

SEQ ID NO: 4962146 - DNA, 25 bp, Homo sapien
aacaagcaggttcaggcatctggca

SEQ ID NO: 4962147 - DNA, 25 bp, Homo sapien
tctggcaaggttcttcatgtcttct

SEQ ID NO: 4962148 - DNA, 25 bp, Homo sapien
gcatctggcaaggttcttcatgtct

SEQ ID NO: 4962149 - DNA, 25 bp, Homo sapien
catttaatagccgaccccgcgcagt

SEQ ID NO: 4962150 - DNA, 25 bp, Homo sapien
cagaaagcaatgaaagcgccgagat

SEQ ID NO: 4962151 - DNA, 25 bp, Homo sapien
gaggctgaggtttgatgaccattta

SEQ ID NO: 4962152 - DNA, 25 bp, Homo sapien
cccgcgcagttagaggagcatcaga

SEQ ID NO: 4962153 - DNA, 25 bp, Homo sapien
tctagggtcctaagcacagtgcagt

SEQ ID NO: 4962154 - DNA, 25 bp, Homo sapien
tgggactggctcctctgcaatggca

SEQ ID NO: 4962155 - DNA, 25 bp, Homo sapien
gaaggactcttttagccatagcagg

SEQ ID NO: 4962156 - DNA, 25 bp, Homo sapien
actagagtctgtcccaaggctgaga

SEQ ID NO: 4962157 - DNA, 25 bp, Homo sapien
gaggagcgcagcttcttgcagttgt

SEQ ID NO: 4962158 - DNA, 25 bp, Homo sapien
gcaatggttgctcttggcgctgacc

SEQ ID NO: 4962159 - DNA, 25 bp, Homo sapien
aagagcatgcggtaggtgtactcgc

SEQ ID NO: 4962160 - DNA, 25 bp, Homo sapien
cattcaggttgcaggccttggcagc

SEQ ID NO: 4962161 - DNA, 25 bp, Homo sapien
ctggccctaggggacactctggctt

SEQ ID NO: 4962162 - DNA, 25 bp, Homo sapien
ctcctggccctaggggacactctgg

SEQ ID NO: 4962163 - DNA, 25 bp, Homo sapien
ggccctaggggacactctggcttct

SEQ ID NO: 4962164 - DNA, 25 bp, Homo sapien
tcctggccctaggggacactctggc

SEQ ID NO: 4962165 - DNA, 25 bp, Homo sapien
ctggggagcacagccagcagcagag

SEQ ID NO: 4962166 - DNA, 25 bp, Homo sapien
cagccagcagcagaggggcaggaca

SEQ ID NO: 4962167 - DNA, 25 bp, Homo sapien
gcacagccagcagcagaggggcagg

SEQ ID NO: 4962168 - DNA, 25 bp, Homo sapien
agccagcagcagaggggcaggacag

SEQ ID NO: 4962169 - DNA, 25 bp, Homo sapien
gagagcagggggtgcctgcacaaag

SEQ ID NO: 4962170 - DNA, 25 bp, Homo sapien
cgtctattcttttgctcagcagccc

SEQ ID NO: 4962171 - DNA, 25 bp, Homo sapien
aaggctgggtctcctgcctccgggc

SEQ ID NO: 4962172 - DNA, 25 bp, Homo sapien
cctgcacaaaggctgggtctcctgc

SEQ ID NO: 4962173 - DNA, 25 bp, Homo sapien
ggtacctgagcttcacacagagtag

SEQ ID NO: 4962174 - DNA, 25 bp, Homo sapien
cacctgtgcacgcagtagtaatctg

SEQ ID NO: 4962175 - DNA, 25 bp, Homo sapien
atgtgggtgcatctggcggccacca

SEQ ID NO: 4962176 - DNA, 25 bp, Homo sapien
cagaaggaatggtcccaagtggatt

SEQ ID NO: 4962177 - DNA, 25 bp, Homo sapien
tgagctcagagcctctgtatgaccc

SEQ ID NO: 4962178 - DNA, 25 bp, Homo sapien
gtagagctgccatggtgcccacagg

SEQ ID NO: 4962179 - DNA, 25 bp, Homo sapien
cccacaggcagtgccagcatgggag

SEQ ID NO: 4962180 - DNA, 25 bp, Homo sapien
cacaggcagtgccagcatgggagct

SEQ ID NO: 4962181 - DNA, 25 bp, Homo sapien
ccgagaggcgggaggtcaccggctc

SEQ ID NO: 4962182 - DNA, 25 bp, Homo sapien
tcaccggctcatagggggaggcttc

SEQ ID NO: 4962183 - DNA, 25 bp, Homo sapien
gggggaggcttcgtagaactcctca

SEQ ID NO: 4962184 - DNA, 25 bp, Homo sapien
caagcctgaagatgtccgagaggcg

SEQ ID NO: 4962185 - DNA, 25 bp, Homo sapien
tgtcaccaggagaatcttgctggag

SEQ ID NO: 4962186 - DNA, 25 bp, Homo sapien
gtaaggccaggtatcaattgcagga

SEQ ID NO: 4962187 - DNA, 25 bp, Homo sapien
gatccccagcttccatctgcgtggt

SEQ ID NO: 4962188 - DNA, 25 bp, Homo sapien
tgaagccagaatgctctccacaatc

SEQ ID NO: 4962189 - DNA, 25 bp, Homo sapien
attggcccggacacagtccactggg

SEQ ID NO: 4962190 - DNA, 25 bp, Homo sapien
gccccaggtggatgctccagtagat

SEQ ID NO: 4962191 - DNA, 25 bp, Homo sapien
agctgcagttggattcggcggcaca

SEQ ID NO: 4962192 - DNA, 25 bp, Homo sapien
cagcggcagtcgtacagcgggctct

SEQ ID NO: 4962193 - DNA, 25 bp, Homo sapien
gggctggccaaagagcggagggtct

SEQ ID NO: 4962194 - DNA, 25 bp, Homo sapien
ggaagggctggccaaagagcggagg

SEQ ID NO: 4962195 - DNA, 25 bp, Homo sapien
gctggccaaagagcggagggtctcg

SEQ ID NO: 4962196 - DNA, 25 bp, Homo sapien
aagggctggccaaagagcggagggt

SEQ ID NO: 4962197 - DNA, 25 bp, Homo sapien
gccaaagcacaccaaggcgactctg

SEQ ID NO: 4962198 - DNA, 25 bp, Homo sapien
catttcgccaaagcacaccaaggcg

SEQ ID NO: 4962199 - DNA, 25 bp, Homo sapien
tcaggcatcatcctcccctggatgt

SEQ ID NO: 4962200 - DNA, 25 bp, Homo sapien
tgtaggagcaagttttctccctttg

SEQ ID NO: 4962201 - DNA, 25 bp, Homo sapien
gagacctgaactctcctcttccgag

SEQ ID NO: 4962202 - DNA, 25 bp, Homo sapien
tcctcttccgagagacaagttccgc

SEQ ID NO: 4962203 - DNA, 25 bp, Homo sapien
tagtccaacttcacaccagacggag

SEQ ID NO: 4962204 - DNA, 25 bp, Homo sapien
cggccccctccaatagaaaatgctt

SEQ ID NO: 4962205 - DNA, 25 bp, Homo sapien
cacctaaaggcagcgcgctgcacag

SEQ ID NO: 4962206 - DNA, 25 bp, Homo sapien
cacagcgggccttcgctcccgagag

SEQ ID NO: 4962207 - DNA, 25 bp, Homo sapien
ggaatccatccactcccggtgggac

SEQ ID NO: 4962208 - DNA, 25 bp, Homo sapien
gagacagcgacacctaaaggcagcg

SEQ ID NO: 4962209 - DNA, 25 bp, Homo sapien
ctccccactcgtggccttcccagat

SEQ ID NO: 4962210 - DNA, 25 bp, Homo sapien
cactcgtggccttcccagatcccct

SEQ ID NO: 4962211 - DNA, 25 bp, Homo sapien
cccactcgtggccttcccagatccc

SEQ ID NO: 4962212 - DNA, 25 bp, Homo sapien
tccccactcgtggccttcccagatc

SEQ ID NO: 4962213 - DNA, 25 bp, Homo sapien
gaagaggcagaagacgtttgccaag

SEQ ID NO: 4962214 - DNA, 25 bp, Homo sapien
ggcagaagacgtttgccaagatcat

SEQ ID NO: 4962215 - DNA, 25 bp, Homo sapien
aggcagaagacgtttgccaagatca

SEQ ID NO: 4962216 - DNA, 25 bp, Homo sapien
gaggcagaagacgtttgccaagatc

SEQ ID NO: 4962217 - DNA, 25 bp, Homo sapien
aatccagtcggagcttcgaggacga

SEQ ID NO: 4962218 - DNA, 25 bp, Homo sapien
gaaatccacagacgggtgtcagcgc

SEQ ID NO: 4962219 - DNA, 25 bp, Homo sapien
tgtcagcgcccaagaacaatccagt

SEQ ID NO: 4962220 - DNA, 25 bp, Homo sapien
taggcaagcagtggtaatcagcccc

SEQ ID NO: 4962221 - DNA, 25 bp, Homo sapien
agaatttacaataaacgcccagaag

SEQ ID NO: 4962222 - DNA, 25 bp, Homo sapien
aggacctaaaaggaagcgtctggct

SEQ ID NO: 4962223 - DNA, 25 bp, Homo sapien
tcacgttccggcgagagcgggagag

SEQ ID NO: 4962224 - DNA, 25 bp, Homo sapien
cggcgtgttttagtcgcagaattta

SEQ ID NO: 4962225 - DNA, 25 bp, Homo sapien
tggaagacagtcttgtaaacggatc

SEQ ID NO: 4962226 - DNA, 25 bp, Homo sapien
gccaccttggaagacagtcttgtaa

SEQ ID NO: 4962227 - DNA, 25 bp, Homo sapien
ccttggaagacagtcttgtaaacgg

SEQ ID NO: 4962228 - DNA, 25 bp, Homo sapien
caccttggaagacagtcttgtaaac

SEQ ID NO: 4962229 - DNA, 25 bp, Homo sapien
ccattgtgtcatgagtgttattgaa

SEQ ID NO: 4962230 - DNA, 25 bp, Homo sapien
tgtccccacgctctgtttggcagct

SEQ ID NO: 4962231 - DNA, 25 bp, Homo sapien
ggggcagcgacatcaataagttcca

SEQ ID NO: 4962232 - DNA, 25 bp, Homo sapien
ttttcctgcagaggtttttgcagga

SEQ ID NO: 4962233 - DNA, 25 bp, Homo sapien
ttgaaaaacagccttgcagtaactt

SEQ ID NO: 4962234 - DNA, 25 bp, Homo sapien
tgaaaaacagccttgcagtaacttc

SEQ ID NO: 4962235 - DNA, 25 bp, Homo sapien
gaaaaacagccttgcagtaacttcc

SEQ ID NO: 4962236 - DNA, 25 bp, Homo sapien
ttccttgggaagcccaatggcacca

SEQ ID NO: 4962237 - DNA, 25 bp, Homo sapien
gaagcgtgtggccatccgaaaccac

SEQ ID NO: 4962238 - DNA, 25 bp, Homo sapien
gggtagatcccagctgaacaaagca

SEQ ID NO: 4962239 - DNA, 25 bp, Homo sapien
catccgaaaccaccttggagaccgg

SEQ ID NO: 4962240 - DNA, 25 bp, Homo sapien
ttggagaccgggtagatcccagctg

SEQ ID NO: 4962241 - DNA, 25 bp, Homo sapien
tggcacctgtgtgccgcaactcggc

SEQ ID NO: 4962242 - DNA, 25 bp, Homo sapien
ggcctgatggcgcattgtcccgttc

SEQ ID NO: 4962243 - DNA, 25 bp, Homo sapien
atctgccagcttctgccggcctgat

SEQ ID NO: 4962244 - DNA, 25 bp, Homo sapien
gcattgtcccgttccaactccagat

SEQ ID NO: 4962245 - DNA, 25 bp, Homo sapien
acacagagaggaattcaagctccag

SEQ ID NO: 4962246 - DNA, 25 bp, Homo sapien
cacagagaggaattcaagctccaga

SEQ ID NO: 4962247 - DNA, 25 bp, Homo sapien
ttagaggtagccttggttgtggatt

SEQ ID NO: 4962248 - DNA, 25 bp, Homo sapien
gacacagagaggaattcaagctcca

SEQ ID NO: 4962249 - DNA, 25 bp, Homo sapien
ccaagctgagcaaataaggatgtct

SEQ ID NO: 4962250 - DNA, 25 bp, Homo sapien
ttcccaagctgagcaaataaggatg

SEQ ID NO: 4962251 - DNA, 25 bp, Homo sapien
aattcccaagctgagcaaataagga

SEQ ID NO: 4962252 - DNA, 25 bp, Homo sapien
caaattcccaagctgagcaaataag

SEQ ID NO: 4962253 - DNA, 25 bp, Homo sapien
catgaaaagatgacagcactgctgc

SEQ ID NO: 4962254 - DNA, 25 bp, Homo sapien
tgcgactgaggagccacgagaatct

SEQ ID NO: 4962255 - DNA, 25 bp, Homo sapien
aatttgagtgttttacaacgattga

SEQ ID NO: 4962256 - DNA, 25 bp, Homo sapien
tacaacgattgatgttataatcagg

SEQ ID NO: 4962257 - DNA, 25 bp, Homo sapien
gagtaccaccagactgtgcattcca

SEQ ID NO: 4962258 - DNA, 25 bp, Homo sapien
tcctcccctgtatccgtgggtgaat

SEQ ID NO: 4962259 - DNA, 25 bp, Homo sapien
tgtggacttttctgagtaccaccag

SEQ ID NO: 4962260 - DNA, 25 bp, Homo sapien
gtgcattccatgcagtagacacctg

SEQ ID NO: 4962261 - DNA, 25 bp, Homo sapien
gccatgattgcagaaacaggtcaag

SEQ ID NO: 4962262 - DNA, 25 bp, Homo sapien
cctgcagccatgattgcagaaacag

SEQ ID NO: 4962263 - DNA, 25 bp, Homo sapien
gcagagggggccattgagcacctgg

SEQ ID NO: 4962264 - DNA, 25 bp, Homo sapien
tgattgcagaaacaggtcaagggta

SEQ ID NO: 4962265 - DNA, 25 bp, Homo sapien
gctaatgttcttggttgctcccaga

SEQ ID NO: 4962266 - DNA, 25 bp, Homo sapien
cagtggaggagctgctaatgttctt

SEQ ID NO: 4962267 - DNA, 25 bp, Homo sapien
cacacatgctgacagtggaggagct

SEQ ID NO: 4962268 - DNA, 25 bp, Homo sapien
cagattcagcgactggatccagttg

SEQ ID NO: 4962269 - DNA, 25 bp, Homo sapien
ggaatgtcaagccattatagacctc

SEQ ID NO: 4962270 - DNA, 25 bp, Homo sapien
tccaggaatgtcaagccattataga

SEQ ID NO: 4962271 - DNA, 25 bp, Homo sapien
ctgaggtcacgtccaggaatgtcaa

SEQ ID NO: 4962272 - DNA, 25 bp, Homo sapien
catcctgaggtcacgtccaggaatg

SEQ ID NO: 4962273 - DNA, 25 bp, Homo sapien
tccgatgggaagcctggttccacca

SEQ ID NO: 4962274 - DNA, 25 bp, Homo sapien
ttccgatgggaagcctggttccacc

SEQ ID NO: 4962275 - DNA, 25 bp, Homo sapien
cagttgactttgctcccagttgtaa

SEQ ID NO: 4962276 - DNA, 25 bp, Homo sapien
agttgactttgctcccagttgtaac

SEQ ID NO: 4962277 - DNA, 25 bp, Homo sapien
caggtaggccccgaagtactgaggg

SEQ ID NO: 4962278 - DNA, 25 bp, Homo sapien
gaccaggtaggccccgaagtactga

SEQ ID NO: 4962279 - DNA, 25 bp, Homo sapien
accagcagagagctaggaacagtca

SEQ ID NO: 4962280 - DNA, 25 bp, Homo sapien
aaggagaggcagtccccacaagtaa

SEQ ID NO: 4962281 - DNA, 25 bp, Homo sapien
catgacatgcgcaaggagaggcagt

SEQ ID NO: 4962282 - DNA, 25 bp, Homo sapien
agtccccacaagtaaccagcagaga

SEQ ID NO: 4962283 - DNA, 25 bp, Homo sapien
gagttgtctaacctgaccatcttcc

SEQ ID NO: 4962284 - DNA, 25 bp, Homo sapien
tgtaccggagctgcaaggccacctg

SEQ ID NO: 4962285 - DNA, 25 bp, Homo sapien
ccccaatagcaaccaagctgtaccg

SEQ ID NO: 4962286 - DNA, 25 bp, Homo sapien
cagaaggagttgtctaacctgacca

SEQ ID NO: 4962287 - DNA, 25 bp, Homo sapien
ttatcagccccaacgaagacaggcc

SEQ ID NO: 4962288 - DNA, 25 bp, Homo sapien
ccctgggagaggcaatttatcagcc

SEQ ID NO: 4962289 - DNA, 25 bp, Homo sapien
caggcaggaggcttgcatagccaag

SEQ ID NO: 4962290 - DNA, 25 bp, Homo sapien
caagcagcccaagcaattgctgaca

SEQ ID NO: 4962291 - DNA, 25 bp, Homo sapien
ctgcccggctggctggacatgctgg

SEQ ID NO: 4962292 - DNA, 25 bp, Homo sapien
cctgtcagctgtcgcctgcctcctc

SEQ ID NO: 4962293 - DNA, 25 bp, Homo sapien
agggtccctgtcagctgtcgcctgc

SEQ ID NO: 4962294 - DNA, 25 bp, Homo sapien
gcagggtccctgtcagctgtcgcct

SEQ ID NO: 4962295 - DNA, 25 bp, Homo sapien
aagatgcccctgaagttcttcccca

SEQ ID NO: 4962296 - DNA, 25 bp, Homo sapien
tcctgcgggctgtcatagagggaca

SEQ ID NO: 4962297 - DNA, 25 bp, Homo sapien
ccctcgggctcatcgtatatgtggt

SEQ ID NO: 4962298 - DNA, 25 bp, Homo sapien
aatgctgtcgtacagagggtcggcc

SEQ ID NO: 4962299 - DNA, 25 bp, Homo sapien
gcatcgaagggcacggcatactccc

SEQ ID NO: 4962300 - DNA, 25 bp, Homo sapien
aagaagatctcattgccttgccggg

SEQ ID NO: 4962301 - DNA, 25 bp, Homo sapien
gtttcgaactcaaagttgccctctc

SEQ ID NO: 4962302 - DNA, 25 bp, Homo sapien
ggtgcagcattcttctgggcagaga

SEQ ID NO: 4962303 - DNA, 25 bp, Homo sapien
cccaaagcgccgcagaaacctgtag

SEQ ID NO: 4962304 - DNA, 25 bp, Homo sapien
ggccagtcgtacagctgggtccctg

SEQ ID NO: 4962305 - DNA, 25 bp, Homo sapien
tagggccagtcgtacagctgggtcc

SEQ ID NO: 4962306 - DNA, 25 bp, Homo sapien
cagaaacctgtagggccagtcgtac

SEQ ID NO: 4962307 - DNA, 25 bp, Homo sapien
tctagaaagtattatccacacactt

SEQ ID NO: 4962308 - DNA, 25 bp, Homo sapien
gagagagaaggcgaaggcagttaat

SEQ ID NO: 4962309 - DNA, 25 bp, Homo sapien
aatgagcgtaccagaacttttctag

SEQ ID NO: 4962310 - DNA, 25 bp, Homo sapien
tctaaatgagcgtaccagaactttt

SEQ ID NO: 4962311 - DNA, 25 bp, Homo sapien
tgactgcgctgctgtacaattcatt

SEQ ID NO: 4962312 - DNA, 25 bp, Homo sapien
gcgctgctgtacaattcattttcct

SEQ ID NO: 4962313 - DNA, 25 bp, Homo sapien
ctgcgctgctgtacaattcattttc

SEQ ID NO: 4962314 - DNA, 25 bp, Homo sapien
gctgctgtacaattcattttcctcc

SEQ ID NO: 4962315 - DNA, 25 bp, Homo sapien
agtccgaccctccatacagtgaggc

SEQ ID NO: 4962316 - DNA, 25 bp, Homo sapien
gtgaggcgccgaagcggcgccattt

SEQ ID NO: 4962317 - DNA, 25 bp, Homo sapien
ccaggaggtacaggcgctccttggt

SEQ ID NO: 4962318 - DNA, 25 bp, Homo sapien
gggcagcctcacaccgacgaggctt

SEQ ID NO: 4962319 - DNA, 25 bp, Homo sapien
gagggcggcgtgtgacccgggctgg

SEQ ID NO: 4962320 - DNA, 25 bp, Homo sapien
caaggtgtccggtgaaaagaagtca

SEQ ID NO: 4962321 - DNA, 25 bp, Homo sapien
agccctcagtaaggagcacagtttg

SEQ ID NO: 4962322 - DNA, 25 bp, Homo sapien
tctgggtctaacttggtgggtgcac

SEQ ID NO: 4962323 - DNA, 25 bp, Homo sapien
gaaaagagccctcccaaagttgagc

SEQ ID NO: 4962324 - DNA, 25 bp, Homo sapien
gatacaagaagccttgtttcactgc

SEQ ID NO: 4962325 - DNA, 25 bp, Homo sapien
gaagatacaagaagccttgtttcac

SEQ ID NO: 4962326 - DNA, 25 bp, Homo sapien
gaagccttgtttcactgccccgtct

SEQ ID NO: 4962327 - DNA, 25 bp, Homo sapien
caagaagccttgtttcactgccccg

SEQ ID NO: 4962328 - DNA, 25 bp, Homo sapien
gcctctctcttcttagccgtgtgtt

SEQ ID NO: 4962329 - DNA, 25 bp, Homo sapien
gcagcggctccggccgaggtgcgcg

SEQ ID NO: 4962330 - DNA, 25 bp, Homo sapien
ggcagcggctccggccgaggtgcgc

SEQ ID NO: 4962331 - DNA, 25 bp, Homo sapien
gagcgcagcgcgacgagtccccagc

SEQ ID NO: 4962332 - DNA, 25 bp, Homo sapien
agcgcgacgagtccccagcgcgcag

SEQ ID NO: 4962333 - DNA, 25 bp, Homo sapien
tttcaggctgaagcacttttaatgt

SEQ ID NO: 4962334 - DNA, 25 bp, Homo sapien
aggctgaagcacttttaatgtctta

SEQ ID NO: 4962335 - DNA, 25 bp, Homo sapien
ggctgaagcacttttaatgtcttac

SEQ ID NO: 4962336 - DNA, 25 bp, Homo sapien
tatgtttcaggctgaagcactttta

SEQ ID NO: 4962337 - DNA, 25 bp, Homo sapien
tacgcatgtaataggaaggactttt

SEQ ID NO: 4962338 - DNA, 25 bp, Homo sapien
tagtgtacttttccgactgtgcttg

SEQ ID NO: 4962339 - DNA, 25 bp, Homo sapien
tgttttgctggcagactccacagga

SEQ ID NO: 4962340 - DNA, 25 bp, Homo sapien
gattaaacctcttagtacgcatgta

SEQ ID NO: 4962341 - DNA, 25 bp, Homo sapien
atgggagtcgtggttgtaaaagcat

SEQ ID NO: 4962342 - DNA, 25 bp, Homo sapien
ctaatgggagtcgtggttgtaaaag

SEQ ID NO: 4962343 - DNA, 25 bp, Homo sapien
aatgggagtcgtggttgtaaaagca

SEQ ID NO: 4962344 - DNA, 25 bp, Homo sapien
taatgggagtcgtggttgtaaaagc

SEQ ID NO: 4962345 - DNA, 25 bp, Homo sapien
actaaagcattctgaatctaaagtg

SEQ ID NO: 4962346 - DNA, 25 bp, Homo sapien
gcattctgaatctaaagtgcagctg

SEQ ID NO: 4962347 - DNA, 25 bp, Homo sapien
cattctgaatctaaagtgcagctgt

SEQ ID NO: 4962348 - DNA, 25 bp, Homo sapien
aaagcattctgaatctaaagtgcag

SEQ ID NO: 4962349 - DNA, 25 bp, Homo sapien
aaaagtaatcgatgacaataagtaa

SEQ ID NO: 4962350 - DNA, 25 bp, Homo sapien
ttaaaaagtaatcgatgacaataag

SEQ ID NO: 4962351 - DNA, 25 bp, Homo sapien
gtattaaaaagtaatcgatgacaat

SEQ ID NO: 4962352 - DNA, 25 bp, Homo sapien
taaaaagtaatcgatgacaataagt

SEQ ID NO: 4962353 - DNA, 25 bp, Homo sapien
gggccgttgtgaaccaatcacctcc

SEQ ID NO: 4962354 - DNA, 25 bp, Homo sapien
ccagcaaatcaaaagggtctcctgc

SEQ ID NO: 4962355 - DNA, 25 bp, Homo sapien
ccagccctcaaggaaaccagcaaat

SEQ ID NO: 4962356 - DNA, 25 bp, Homo sapien
agcatcaccaacttgaagtactggg

SEQ ID NO: 4962357 - DNA, 25 bp, Homo sapien
tatacttacgtcatcagagtggctc

SEQ ID NO: 4962358 - DNA, 25 bp, Homo sapien
catgctgaacaatcacacggtgagt

SEQ ID NO: 4962359 - DNA, 25 bp, Homo sapien
gaggtcccgggtattgctacagcaa

SEQ ID NO: 4962360 - DNA, 25 bp, Homo sapien
gcttagtgcggtacagttcatgctg

SEQ ID NO: 4962361 - DNA, 25 bp, Homo sapien
tttacagagtctagtgcaccaatgc

SEQ ID NO: 4962362 - DNA, 25 bp, Homo sapien
tggaccgtgtagattctgccctggg

SEQ ID NO: 4962363 - DNA, 25 bp, Homo sapien
tattaggaactctaagccatgccag

SEQ ID NO: 4962364 - DNA, 25 bp, Homo sapien
ggtccctagccccttgcagtgataa

SEQ ID NO: 4962365 - DNA, 25 bp, Homo sapien
tctcctctggcgactgtgtgatgaa

SEQ ID NO: 4962366 - DNA, 25 bp, Homo sapien
gggacactcatcaattaggttttat

SEQ ID NO: 4962367 - DNA, 25 bp, Homo sapien
ggacactcatcaattaggttttatt

SEQ ID NO: 4962368 - DNA, 25 bp, Homo sapien
tcctctggcgactgtgtgatgaatc

SEQ ID NO: 4962369 - DNA, 25 bp, Homo sapien
gaaactaatatgtaccgagctcagg

SEQ ID NO: 4962370 - DNA, 25 bp, Homo sapien
ggaaaaccctctcttacacatgaca

SEQ ID NO: 4962371 - DNA, 25 bp, Homo sapien
ggccattcacggtctcacagctagt

SEQ ID NO: 4962372 - DNA, 25 bp, Homo sapien
gcactgcactctagattctgcccgg

SEQ ID NO: 4962373 - DNA, 25 bp, Homo sapien
tgggcacaaactcggagggcccagt

SEQ ID NO: 4962374 - DNA, 25 bp, Homo sapien
cccagtgggcgggtcttatcaccca

SEQ ID NO: 4962375 - DNA, 25 bp, Homo sapien
gagccacagtctggatcagtttctg

SEQ ID NO: 4962376 - DNA, 25 bp, Homo sapien
agaagagcgcgccaggatgagtggg

SEQ ID NO: 4962377 - DNA, 25 bp, Homo sapien
gatggaaaagtcattgccgatccga

SEQ ID NO: 4962378 - DNA, 25 bp, Homo sapien
aaaacccgctctctgcctgaccgga

SEQ ID NO: 4962379 - DNA, 25 bp, Homo sapien
gaaagaagagatggaaaagtcattg

SEQ ID NO: 4962380 - DNA, 25 bp, Homo sapien
cattgccgatccgaaggaaaacccg

SEQ ID NO: 4962381 - DNA, 25 bp, Homo sapien
gtgcagcgctgcgatcacaattcac

SEQ ID NO: 4962382 - DNA, 25 bp, Homo sapien
tgcagcgctgcgatcacaattcact

SEQ ID NO: 4962383 - DNA, 25 bp, Homo sapien
agtgcagcgctgcgatcacaattca

SEQ ID NO: 4962384 - DNA, 25 bp, Homo sapien
cagtgaactgttatcgtgagaccgc

SEQ ID NO: 4962385 - DNA, 25 bp, Homo sapien
tgatgatttagctgccggtcccact

SEQ ID NO: 4962386 - DNA, 25 bp, Homo sapien
gaagacagacattccctggcggctg

SEQ ID NO: 4962387 - DNA, 25 bp, Homo sapien
ttgaaggaaaccgatgctgctgccc

SEQ ID NO: 4962388 - DNA, 25 bp, Homo sapien
ggattccggctttcaaactcccgca

SEQ ID NO: 4962389 - DNA, 25 bp, Homo sapien
gggagcaagttaggcagtctgaacc

SEQ ID NO: 4962390 - DNA, 25 bp, Homo sapien
cagtgaccgagatcgtcaacaggtg

SEQ ID NO: 4962391 - DNA, 25 bp, Homo sapien
cagttacgatggcaaaacagcagtg

SEQ ID NO: 4962392 - DNA, 25 bp, Homo sapien
ggcggtgggagactcctgtccacac

SEQ ID NO: 4962393 - DNA, 25 bp, Homo sapien
tcactcaaggagactgcggcatgtt

SEQ ID NO: 4962394 - DNA, 25 bp, Homo sapien
ggctgccattgccttcgtcaagttt

SEQ ID NO: 4962395 - DNA, 25 bp, Homo sapien
gaccacaccagactgggtttcaggg

SEQ ID NO: 4962396 - DNA, 25 bp, Homo sapien
cacattaggtaccatgggagctgct

SEQ ID NO: 4962397 - DNA, 25 bp, Homo sapien
tttgtcccctgcctacatggcttgg

SEQ ID NO: 4962398 - DNA, 25 bp, Homo sapien
gcccagtgttcttgatagaagaccc

SEQ ID NO: 4962399 - DNA, 25 bp, Homo sapien
tgctaatgagaaccttggtgcagct

SEQ ID NO: 4962400 - DNA, 25 bp, Homo sapien
acgggcggcgccaggcattacctca

SEQ ID NO: 4962401 - DNA, 25 bp, Homo sapien
tcacagcgggactacacagttgctg

SEQ ID NO: 4962402 - DNA, 25 bp, Homo sapien
gaatacacgggcggcgccaggcatt

SEQ ID NO: 4962403 - DNA, 25 bp, Homo sapien
aggcattacctcacagcgggactac

SEQ ID NO: 4962404 - DNA, 25 bp, Homo sapien
tctccgtggatgaactgcgtctgga

SEQ ID NO: 4962405 - DNA, 25 bp, Homo sapien
gaaacaggaggaaactcagtgacct

SEQ ID NO: 4962406 - DNA, 25 bp, Homo sapien
gcatttgcacggtgtcttccccgga

SEQ ID NO: 4962407 - DNA, 25 bp, Homo sapien
cacaggttgccaagaggtgacacga

SEQ ID NO: 4962408 - DNA, 25 bp, Homo sapien
agagagggtcttgctgtctcaccca

SEQ ID NO: 4962409 - DNA, 25 bp, Homo sapien
aggctggcttcaaactctggccttc

SEQ ID NO: 4962410 - DNA, 25 bp, Homo sapien
gctggcttcaaactctggccttcaa

SEQ ID NO: 4962411 - DNA, 25 bp, Homo sapien
ggcttcaaactctggccttcaagcg

SEQ ID NO: 4962412 - DNA, 25 bp, Homo sapien
gaatgcaggcctttcccaaggacgg

SEQ ID NO: 4962413 - DNA, 25 bp, Homo sapien
tttctccccacagagacgtgtaggc

SEQ ID NO: 4962414 - DNA, 25 bp, Homo sapien
ccaaggacggcacagaacgtgatga

SEQ ID NO: 4962415 - DNA, 25 bp, Homo sapien
tggactcctcgcttggttaaaggca

SEQ ID NO: 4962416 - DNA, 25 bp, Homo sapien
tgggacaacagaggatccctgaagc

SEQ ID NO: 4962417 - DNA, 25 bp, Homo sapien
ggacaacagaggatccctgaagccg

SEQ ID NO: 4962418 - DNA, 25 bp, Homo sapien
acaacagaggatccctgaagccgct

SEQ ID NO: 4962419 - DNA, 25 bp, Homo sapien
aacagaggatccctgaagccgctgg

SEQ ID NO: 4962420 - DNA, 25 bp, Homo sapien
ctggtaaaggtagccacgagccgct

SEQ ID NO: 4962421 - DNA, 25 bp, Homo sapien
catcactgtgatctcggcccaggtg

SEQ ID NO: 4962422 - DNA, 25 bp, Homo sapien
cccacactgtctgggcgctggtaaa

SEQ ID NO: 4962423 - DNA, 25 bp, Homo sapien
ctctgctccatagggtcgaggccac

SEQ ID NO: 4962424 - DNA, 25 bp, Homo sapien
aaggtgtcaactggccctgttcaca

SEQ ID NO: 4962425 - DNA, 25 bp, Homo sapien
caggctgtgccagccataacaggac

SEQ ID NO: 4962426 - DNA, 25 bp, Homo sapien
ccaaaggctggaatctgcccatgcc

SEQ ID NO: 4962427 - DNA, 25 bp, Homo sapien
caacagacatccctgacccaggaga

SEQ ID NO: 4962428 - DNA, 25 bp, Homo sapien
gggcgagcgaggaacacgaagcgga

SEQ ID NO: 4962429 - DNA, 25 bp, Homo sapien
gacagcagtgtctcgggctcacagt

SEQ ID NO: 4962430 - DNA, 25 bp, Homo sapien
attctccccgcaggcaggtaccacg

SEQ ID NO: 4962431 - DNA, 25 bp, Homo sapien
gccccgctcctccacggacagcagt

SEQ ID NO: 4962432 - DNA, 25 bp, Homo sapien
tagtcggatgagacaaacaggcccc

SEQ ID NO: 4962433 - DNA, 25 bp, Homo sapien
ggattgagccactgctatctgaggg

SEQ ID NO: 4962434 - DNA, 25 bp, Homo sapien
ctttgcaaaactgggaagcgccacg

SEQ ID NO: 4962435 - DNA, 25 bp, Homo sapien
ccctggccccgtctagttgtcatta

SEQ ID NO: 4962436 - DNA, 25 bp, Homo sapien
gctcgctgaggaacacggccagcac

SEQ ID NO: 4962437 - DNA, 25 bp, Homo sapien
tgctcgctgaggaacacggccagca

SEQ ID NO: 4962438 - DNA, 25 bp, Homo sapien
ctgctcgctgaggaacacggccagc

SEQ ID NO: 4962439 - DNA, 25 bp, Homo sapien
gcgggctagagtgcgctgcggagcc

SEQ ID NO: 4962440 - DNA, 25 bp, Homo sapien
agtcgcagctgtgcacgctggaccc

SEQ ID NO: 4962441 - DNA, 25 bp, Homo sapien
accgactgagccgagccgcgggcta

SEQ ID NO: 4962442 - DNA, 25 bp, Homo sapien
gggccggatcctcgcagaccgactg

SEQ ID NO: 4962443 - DNA, 25 bp, Homo sapien
aagcgcacgcgaacgcggaagcgca

SEQ ID NO: 4962444 - DNA, 25 bp, Homo sapien
cgcggaagcgcacgcgaacgcggaa

SEQ ID NO: 4962445 - DNA, 25 bp, Homo sapien
gagaacgcggaagcgcacgcgaacg

SEQ ID NO: 4962446 - DNA, 25 bp, Homo sapien
aacgcggaagcgcacgcgagctctg

SEQ ID NO: 4962447 - DNA, 25 bp, Homo sapien
ggcctgcccggattggccggcccgc

SEQ ID NO: 4962448 - DNA, 25 bp, Homo sapien
ggcgccgcggcctgcccggattggc

SEQ ID NO: 4962449 - DNA, 25 bp, Homo sapien
gcgccgcggcctgcccggattggcc

SEQ ID NO: 4962450 - DNA, 25 bp, Homo sapien
cgcggcctgcccggattggccggcc

SEQ ID NO: 4962451 - DNA, 25 bp, Homo sapien
gctcgggacgtctcccagccgccac

SEQ ID NO: 4962452 - DNA, 25 bp, Homo sapien
tgtcagtcccgtgcgctcgggacgt

SEQ ID NO: 4962453 - DNA, 25 bp, Homo sapien
gcctgtcagtcccgtgcgctcggga

SEQ ID NO: 4962454 - DNA, 25 bp, Homo sapien
ggcttctgccgcctgtcagtcccgt

SEQ ID NO: 4962455 - DNA, 25 bp, Homo sapien
cgctcgccaactccccgagcgcgca

SEQ ID NO: 4962456 - DNA, 25 bp, Homo sapien
ccgctcgccaactccccgagcgcgc

SEQ ID NO: 4962457 - DNA, 25 bp, Homo sapien
gctcgccaactccccgagcgcgcac

SEQ ID NO: 4962458 - DNA, 25 bp, Homo sapien
tgcaggagctccgacggtgacgtca

SEQ ID NO: 4962459 - DNA, 25 bp, Homo sapien
caggagctccgacggtgacgtcatc

SEQ ID NO: 4962460 - DNA, 25 bp, Homo sapien
agctccgacggtgacgtcatctttc

SEQ ID NO: 4962461 - DNA, 25 bp, Homo sapien
ggagctccgacggtgacgtcatctt

SEQ ID NO: 4962462 - DNA, 25 bp, Homo sapien
ggtgacgcgacaatccggtgacgtc

SEQ ID NO: 4962463 - DNA, 25 bp, Homo sapien
gtaggcgacggtgacgcgacaatcc

SEQ ID NO: 4962464 - DNA, 25 bp, Homo sapien
ctgcagggcgcgttgcgccgccggg

SEQ ID NO: 4962465 - DNA, 25 bp, Homo sapien
aatccggtgacgtcacggaggcccg

SEQ ID NO: 4962466 - DNA, 25 bp, Homo sapien
gcattgccggagttgatcatatccc

SEQ ID NO: 4962467 - DNA, 25 bp, Homo sapien
ctgttgccgtaaacacacaatggca

SEQ ID NO: 4962468 - DNA, 25 bp, Homo sapien
aagagttataaatgtcacatggccc

SEQ ID NO: 4962469 - DNA, 25 bp, Homo sapien
gagttgatcatatcccaaatacctt

SEQ ID NO: 4962470 - DNA, 25 bp, Homo sapien
ctccatccttgtcgtcaccctccca

SEQ ID NO: 4962471 - DNA, 25 bp, Homo sapien
ccacgcagctcaaggccctctctgc

SEQ ID NO: 4962472 - DNA, 25 bp, Homo sapien
tgggggtggttgtggcgagcgcctg

SEQ ID NO: 4962473 - DNA, 25 bp, Homo sapien
tgctgcagatggtgcgccctgggag

SEQ ID NO: 4962474 - DNA, 25 bp, Homo sapien
ggaacaaatgaacattgattcactt

SEQ ID NO: 4962475 - DNA, 25 bp, Homo sapien
atatgtcctcaagggcattgtgacc

SEQ ID NO: 4962476 - DNA, 25 bp, Homo sapien
gctggaacaaatgaacattgattca

SEQ ID NO: 4962477 - DNA, 25 bp, Homo sapien
tatgtcctcaagggcattgtgaccc

SEQ ID NO: 4962478 - DNA, 25 bp, Homo sapien
ggagagggcggagcgccaccaggag

SEQ ID NO: 4962479 - DNA, 25 bp, Homo sapien
acaagagtgggagtgtttttctttg

SEQ ID NO: 4962480 - DNA, 25 bp, Homo sapien
tagggctgagatacacaaaggaagc

SEQ ID NO: 4962481 - DNA, 25 bp, Homo sapien
agcaggaacaattaggtatgacaag

SEQ ID NO: 4962482 - DNA, 25 bp, Homo sapien
gggcaagggctcttctgggccatac

SEQ ID NO: 4962483 - DNA, 25 bp, Homo sapien
gcaagggctcttctgggccatactt

SEQ ID NO: 4962484 - DNA, 25 bp, Homo sapien
gatctccaggtcagggtagacggga

SEQ ID NO: 4962485 - DNA, 25 bp, Homo sapien
ccaggtcagggtagacgggagagat

SEQ ID NO: 4962486 - DNA, 25 bp, Homo sapien
ctgggtggagtagggctcgggagtc

SEQ ID NO: 4962487 - DNA, 25 bp, Homo sapien
tgggtggagtagggctcgggagtct

SEQ ID NO: 4962488 - DNA, 25 bp, Homo sapien
aggccccagacgaagagcaggcagt

SEQ ID NO: 4962489 - DNA, 25 bp, Homo sapien
ccaaagtctcctcagtgggaggcaa

SEQ ID NO: 4962490 - DNA, 25 bp, Homo sapien
tgcacagggaggtcacctcgtggct

SEQ ID NO: 4962491 - DNA, 25 bp, Homo sapien
tctctaaggcagatttccatgtccc

SEQ ID NO: 4962492 - DNA, 25 bp, Homo sapien
gaaggggctgagtgacatcgcccat

SEQ ID NO: 4962493 - DNA, 25 bp, Homo sapien
gctgagtgacatcgcccatgccgct

SEQ ID NO: 4962494 - DNA, 25 bp, Homo sapien
ccgggaaggggctgagtgacatcgc

SEQ ID NO: 4962495 - DNA, 25 bp, Homo sapien
ggcggaccgggaaggggctgagtga

SEQ ID NO: 4962496 - DNA, 25 bp, Homo sapien
cttgttcagcatgcctgcagtgagc

SEQ ID NO: 4962497 - DNA, 25 bp, Homo sapien
ttgttcagcatgcctgcagtgagcc

SEQ ID NO: 4962498 - DNA, 25 bp, Homo sapien
agaaggttggaggccccttgttcag

SEQ ID NO: 4962499 - DNA, 25 bp, Homo sapien
tgagcccagtgaggatgcggtggta

SEQ ID NO: 4962500 - DNA, 25 bp, Homo sapien
tagcgccatcccctgctgaagttgt

SEQ ID NO: 4962501 - DNA, 25 bp, Homo sapien
aggaagtcaattgcccccagtgcgg

SEQ ID NO: 4962502 - DNA, 25 bp, Homo sapien
tgcttgtgcccagagtggtgcttgt

SEQ ID NO: 4962503 - DNA, 25 bp, Homo sapien
gttgtttaagccagaatgattccca

SEQ ID NO: 4962504 - DNA, 25 bp, Homo sapien
ctatttggcctcctgtaatgtcccc

SEQ ID NO: 4962505 - DNA, 25 bp, Homo sapien
gcctcctgtaatgtccccacggcca

SEQ ID NO: 4962506 - DNA, 25 bp, Homo sapien
ttggcctcctgtaatgtccccacgg

SEQ ID NO: 4962507 - DNA, 25 bp, Homo sapien
tatttggcctcctgtaatgtcccca

SEQ ID NO: 4962508 - DNA, 25 bp, Homo sapien
ttaaaaggaatactctggccagatg

SEQ ID NO: 4962509 - DNA, 25 bp, Homo sapien
ggtgggaggcttgggtagcacaccc

SEQ ID NO: 4962510 - DNA, 25 bp, Homo sapien
gaggcttgggtagcacacccagcct

SEQ ID NO: 4962511 - DNA, 25 bp, Homo sapien
gatctgctatgtccactgcagctgt

SEQ ID NO: 4962512 - DNA, 25 bp, Homo sapien
ggaagtgctgagtgacgctgactgt

SEQ ID NO: 4962513 - DNA, 25 bp, Homo sapien
ctgagtgacgctgactgtgctcacc

SEQ ID NO: 4962514 - DNA, 25 bp, Homo sapien
tgggcataaagcaggtggcagtcag

SEQ ID NO: 4962515 - DNA, 25 bp, Homo sapien
gcagtcagggggaaggctgggtccc

SEQ ID NO: 4962516 - DNA, 25 bp, Homo sapien
gacagtgaggctcaagatcacacat

SEQ ID NO: 4962517 - DNA, 25 bp, Homo sapien
tcagagagcagattcctggatgcac

SEQ ID NO: 4962518 - DNA, 25 bp, Homo sapien
ctgtggccaaaaccgggactcagaa

SEQ ID NO: 4962519 - DNA, 25 bp, Homo sapien
tgattgggtcgcttctgccatcctg

SEQ ID NO: 4962520 - DNA, 25 bp, Homo sapien
gtccagcagctcacgccccactcct

SEQ ID NO: 4962521 - DNA, 25 bp, Homo sapien
ggtccagcagctcacgccccactcc

SEQ ID NO: 4962522 - DNA, 25 bp, Homo sapien
agcagctcacgccccactcctcccg

SEQ ID NO: 4962523 - DNA, 25 bp, Homo sapien
cagctcacgccccactcctcccgca

SEQ ID NO: 4962524 - DNA, 25 bp, Homo sapien
tctgcaaatccgagggagacgtcct

SEQ ID NO: 4962525 - DNA, 25 bp, Homo sapien
taagattccggatgcagaaaaggga

SEQ ID NO: 4962526 - DNA, 25 bp, Homo sapien
tacagttgggcagactgaatccctg

SEQ ID NO: 4962527 - DNA, 25 bp, Homo sapien
tgccagcaggtgaacaggctttccg

SEQ ID NO: 4962528 - DNA, 25 bp, Homo sapien
tcctgtgcccggaacacgtgccaca

SEQ ID NO: 4962529 - DNA, 25 bp, Homo sapien
tgggcgtcctgtgcccggaacacgt

SEQ ID NO: 4962530 - DNA, 25 bp, Homo sapien
gtcctgtgcccggaacacgtgccac

SEQ ID NO: 4962531 - DNA, 25 bp, Homo sapien
aggcagtggtgtgtcggcatgcacc

SEQ ID NO: 4962532 - DNA, 25 bp, Homo sapien
cccaggtgtccccggtgcgggctca

SEQ ID NO: 4962533 - DNA, 25 bp, Homo sapien
gcagtggtgtgtcggcatgcaccag

SEQ ID NO: 4962534 - DNA, 25 bp, Homo sapien
cacctccacacagaggttcttggtc

SEQ ID NO: 4962535 - DNA, 25 bp, Homo sapien
ctccagtggacgcagggcaaggccc

SEQ ID NO: 4962536 - DNA, 25 bp, Homo sapien
gctggggctccagtggacgcagggc

SEQ ID NO: 4962537 - DNA, 25 bp, Homo sapien
tggggctccagtggacgcagggcaa

SEQ ID NO: 4962538 - DNA, 25 bp, Homo sapien
gggctccagtggacgcagggcaagg

SEQ ID NO: 4962539 - DNA, 25 bp, Homo sapien
ttgagttttccatggagggcgcagt

SEQ ID NO: 4962540 - DNA, 25 bp, Homo sapien
tccggaagtggcagactggcagcta

SEQ ID NO: 4962541 - DNA, 25 bp, Homo sapien
ccatggagggcgcagtactccggaa

SEQ ID NO: 4962542 - DNA, 25 bp, Homo sapien
cgcagtactccggaagtggcagact

SEQ ID NO: 4962543 - DNA, 25 bp, Homo sapien
ctgtcagggtagggggtcatgccca

SEQ ID NO: 4962544 - DNA, 25 bp, Homo sapien
ggtagggggtcatgcccagcaggcc

SEQ ID NO: 4962545 - DNA, 25 bp, Homo sapien
tcagggtagggggtcatgcccagca

SEQ ID NO: 4962546 - DNA, 25 bp, Homo sapien
gtagggggtcatgcccagcaggccc

SEQ ID NO: 4962547 - DNA, 25 bp, Homo sapien
cccaaagctcggtgcagcaggagga

SEQ ID NO: 4962548 - DNA, 25 bp, Homo sapien
gtcctcatcccccaaagctcggtgc

SEQ ID NO: 4962549 - DNA, 25 bp, Homo sapien
atcccccaaagctcggtgcagcagg

SEQ ID NO: 4962550 - DNA, 25 bp, Homo sapien
tcatcccccaaagctcggtgcagca

SEQ ID NO: 4962551 - DNA, 25 bp, Homo sapien
gaagccctcccagaatgttgtgctg

SEQ ID NO: 4962552 - DNA, 25 bp, Homo sapien
aagagcttctgtcccccacaggttg

SEQ ID NO: 4962553 - DNA, 25 bp, Homo sapien
cacctggcctccaagtgccccaaga

SEQ ID NO: 4962554 - DNA, 25 bp, Homo sapien
ttgccctgcaatgtcctttggatcc

SEQ ID NO: 4962555 - DNA, 25 bp, Homo sapien
caccacctgtgcgataatgctgtcc

SEQ ID NO: 4962556 - DNA, 25 bp, Homo sapien
tggaagaggtggaagccacgccgag

SEQ ID NO: 4962557 - DNA, 25 bp, Homo sapien
caggcccttgcgcagacccgggcca

SEQ ID NO: 4962558 - DNA, 25 bp, Homo sapien
ttctcctggatcttccgttccacca

SEQ ID NO: 4962559 - DNA, 25 bp, Homo sapien
cgaaggccatgtgtattcgctcatg

SEQ ID NO: 4962560 - DNA, 25 bp, Homo sapien
ttgaccgcggtagaagccagcagtt

SEQ ID NO: 4962561 - DNA, 25 bp, Homo sapien
cagttcgcagagagaaggacaaggc

SEQ ID NO: 4962562 - DNA, 25 bp, Homo sapien
tgtattcgctcatggcccaagcaga

SEQ ID NO: 4962563 - DNA, 25 bp, Homo sapien
gagttgggggcgttttctgtgttga

SEQ ID NO: 4962564 - DNA, 25 bp, Homo sapien
cattgcaggaaggttgtggagttgg

SEQ ID NO: 4962565 - DNA, 25 bp, Homo sapien
tcctgtgggtgtcgccattgcagga

SEQ ID NO: 4962566 - DNA, 25 bp, Homo sapien
ggtcctgtgggtgtcgccattgcag

SEQ ID NO: 4962567 - DNA, 25 bp, Homo sapien
agaatgaacaatggactcttgtcag

SEQ ID NO: 4962568 - DNA, 25 bp, Homo sapien
caattcaacagaacccacaagaatg

SEQ ID NO: 4962569 - DNA, 25 bp, Homo sapien
tcaacagaacccacaagaatgaaca

SEQ ID NO: 4962570 - DNA, 25 bp, Homo sapien
cctaaaatcgtgtttataggagcaa

SEQ ID NO: 4962571 - DNA, 25 bp, Homo sapien
gtgcccccggatatcaaacttgacc

SEQ ID NO: 4962572 - DNA, 25 bp, Homo sapien
ggcccatacccgggcatcagcttgg

SEQ ID NO: 4962573 - DNA, 25 bp, Homo sapien
gggcagtgcccccggatatcaaact

SEQ ID NO: 4962574 - DNA, 25 bp, Homo sapien
gggcccatacccgggcatcagcttg

SEQ ID NO: 4962575 - DNA, 25 bp, Homo sapien
actgggtcagcatcagggaacaggc

SEQ ID NO: 4962576 - DNA, 25 bp, Homo sapien
ctggctggagacaaactgggtcagc

SEQ ID NO: 4962577 - DNA, 25 bp, Homo sapien
agggaacaggcagcgtgcccggcct

SEQ ID NO: 4962578 - DNA, 25 bp, Homo sapien
tcctccgcggactgctcctgaaagc

SEQ ID NO: 4962579 - DNA, 25 bp, Homo sapien
gtgcctgccacacgaccacaggcca

SEQ ID NO: 4962580 - DNA, 25 bp, Homo sapien
cagcgtggaatgcctgggctgtcct

SEQ ID NO: 4962581 - DNA, 25 bp, Homo sapien
catcgccagtgggtgttgaagagtc

SEQ ID NO: 4962582 - DNA, 25 bp, Homo sapien
gggctgtcctctgtcacggctggcc

SEQ ID NO: 4962583 - DNA, 25 bp, Homo sapien
caggcggcacagtcggtcccccaaa

SEQ ID NO: 4962584 - DNA, 25 bp, Homo sapien
cagcaggcggcacagtcggtccccc

SEQ ID NO: 4962585 - DNA, 25 bp, Homo sapien
gcacagtcggtcccccaaaccactg

SEQ ID NO: 4962586 - DNA, 25 bp, Homo sapien
gcggcacagtcggtcccccaaacca

SEQ ID NO: 4962587 - DNA, 25 bp, Homo sapien
agccggctgtcagggccggaccctg

SEQ ID NO: 4962588 - DNA, 25 bp, Homo sapien
tggcgaggcctgtgctgagccggct

SEQ ID NO: 4962589 - DNA, 25 bp, Homo sapien
ttggcgaggcctgtgctgagccggc

SEQ ID NO: 4962590 - DNA, 25 bp, Homo sapien
ggcatggtatgtcctgaagtcccgg

SEQ ID NO: 4962591 - DNA, 25 bp, Homo sapien
acaactttggcattgagccagtttt

SEQ ID NO: 4962592 - DNA, 25 bp, Homo sapien
cacaactttggcattgagccagttt

SEQ ID NO: 4962593 - DNA, 25 bp, Homo sapien
ctgaagtcccgggtcctggagactg

SEQ ID NO: 4962594 - DNA, 25 bp, Homo sapien
ggaccaggcagctggaaggctcgca

SEQ ID NO: 4962595 - DNA, 25 bp, Homo sapien
caagagtggaccaggcagctggaag

SEQ ID NO: 4962596 - DNA, 25 bp, Homo sapien
cagcaagagtggaccaggcagctgg

SEQ ID NO: 4962597 - DNA, 25 bp, Homo sapien
gaccaggcagctggaaggctcgcac

SEQ ID NO: 4962598 - DNA, 25 bp, Homo sapien
gataccactggctgcgtgacatgag

SEQ ID NO: 4962599 - DNA, 25 bp, Homo sapien
caggtgcagtaacccaagaaggcga

SEQ ID NO: 4962600 - DNA, 25 bp, Homo sapien
tctgaggatgccgtgacatggaccg

SEQ ID NO: 4962601 - DNA, 25 bp, Homo sapien
tgaggagacaatcccaacgtggacg

SEQ ID NO: 4962602 - DNA, 25 bp, Homo sapien
ttcacttcctcgctgggttcgctgg

SEQ ID NO: 4962603 - DNA, 25 bp, Homo sapien
tgttccctatcgatgtgtcccgcac

SEQ ID NO: 4962604 - DNA, 25 bp, Homo sapien
ccagcccagacgttgccaagagtat

SEQ ID NO: 4962605 - DNA, 25 bp, Homo sapien
tccgagtgccgtgtgagccatgtct

SEQ ID NO: 4962606 - DNA, 25 bp, Homo sapien
ccccaggaagagcgggcaaggattc

SEQ ID NO: 4962607 - DNA, 25 bp, Homo sapien
cagtgaagggcgttcggcctccccg

SEQ ID NO: 4962608 - DNA, 25 bp, Homo sapien
tggtgcagtgaagggcgttcggcct

SEQ ID NO: 4962609 - DNA, 25 bp, Homo sapien
aggaagagcgggcaaggattctgct

SEQ ID NO: 4962610 - DNA, 25 bp, Homo sapien
caacctgggaatgctcggatccttg

SEQ ID NO: 4962611 - DNA, 25 bp, Homo sapien
ctttgccaacctgggaatgctcgga

SEQ ID NO: 4962612 - DNA, 25 bp, Homo sapien
gaatgctcggatccttgtagtaaaa

SEQ ID NO: 4962613 - DNA, 25 bp, Homo sapien
tgctcggatccttgtagtaaaagcc

SEQ ID NO: 4962614 - DNA, 25 bp, Homo sapien
cggatgggtaagcatggcctccttc

SEQ ID NO: 4962615 - DNA, 25 bp, Homo sapien
tccacaagtgggagcatgtccttgg

SEQ ID NO: 4962616 - DNA, 25 bp, Homo sapien
cccgcagaatgccagcggatgggta

SEQ ID NO: 4962617 - DNA, 25 bp, Homo sapien
cacagggtcactcttgagatggcca

SEQ ID NO: 4962618 - DNA, 25 bp, Homo sapien
gggtgctcaggacgcccctccaaaa

SEQ ID NO: 4962619 - DNA, 25 bp, Homo sapien
ctgtctcacgatgccgttctctggg

SEQ ID NO: 4962620 - DNA, 25 bp, Homo sapien
tcaggaagctgggcgtactctccat

SEQ ID NO: 4962621 - DNA, 25 bp, Homo sapien
ccatggtgcagtccatctcgaggcg

SEQ ID NO: 4962622 - DNA, 25 bp, Homo sapien
tgccctcatggggctctcccagagg

SEQ ID NO: 4962623 - DNA, 25 bp, Homo sapien
cctgccctcatggggctctcccaga

SEQ ID NO: 4962624 - DNA, 25 bp, Homo sapien
tctcctgccctcatggggctctccc

SEQ ID NO: 4962625 - DNA, 25 bp, Homo sapien
cactctcctgccctcatggggctct

SEQ ID NO: 4962626 - DNA, 25 bp, Homo sapien
ggaatctgctcacgacccatgaggg

SEQ ID NO: 4962627 - DNA, 25 bp, Homo sapien
tggcctcaccaagctaggaatctgc

SEQ ID NO: 4962628 - DNA, 25 bp, Homo sapien
tgactctgtcctatgctgtatggcc

SEQ ID NO: 4962629 - DNA, 25 bp, Homo sapien
tgaggcagctcaaaccagtaaggca

SEQ ID NO: 4962630 - DNA, 25 bp, Homo sapien
atgggtcaagctgccctagcccagc

SEQ ID NO: 4962631 - DNA, 25 bp, Homo sapien
cgccaccgccgctggaaacttcagc

SEQ ID NO: 4962632 - DNA, 25 bp, Homo sapien
ggatgggtcaagctgccctagccca

SEQ ID NO: 4962633 - DNA, 25 bp, Homo sapien
tcagctggatgggtcaagctgccct

SEQ ID NO: 4962634 - DNA, 25 bp, Homo sapien
gggcgaggacgcgttctcccgctct

SEQ ID NO: 4962635 - DNA, 25 bp, Homo sapien
gcggtggcggtcgtcgtggccggca

SEQ ID NO: 4962636 - DNA, 25 bp, Homo sapien
accgggcgcctgctccccatgggcc

SEQ ID NO: 4962637 - DNA, 25 bp, Homo sapien
cttcaccggccggtcgcggcgcggg

SEQ ID NO: 4962638 - DNA, 25 bp, Homo sapien
ggatgcggcacacggcgcggatcgg

SEQ ID NO: 4962639 - DNA, 25 bp, Homo sapien
tccgggatctgcaggatgcggcaca

SEQ ID NO: 4962640 - DNA, 25 bp, Homo sapien
gcaggatgcggcacacggcgcggat

SEQ ID NO: 4962641 - DNA, 25 bp, Homo sapien
tggaggggtcggactccgggatctg

SEQ ID NO: 4962642 - DNA, 25 bp, Homo sapien
gttgcgccatgggacgccgagactc

SEQ ID NO: 4962643 - DNA, 25 bp, Homo sapien
gtaggttgcgccatgggacgccgag

SEQ ID NO: 4962644 - DNA, 25 bp, Homo sapien
aggccgtaggttgcgccatgggacg

SEQ ID NO: 4962645 - DNA, 25 bp, Homo sapien
tgggccgaggccgtaggttgcgcca

SEQ ID NO: 4962646 - DNA, 25 bp, Homo sapien
ctgcgccgcggggagggccgggccg

SEQ ID NO: 4962647 - DNA, 25 bp, Homo sapien
ccccgggtcggagatggccgagttg

SEQ ID NO: 4962648 - DNA, 25 bp, Homo sapien
gaacacgcgccccgggtcggagatg

SEQ ID NO: 4962649 - DNA, 25 bp, Homo sapien
acgcgccccgggtcggagatggccg

SEQ ID NO: 4962650 - DNA, 25 bp, Homo sapien
gaagggggtcgtgcctggatggtgg

SEQ ID NO: 4962651 - DNA, 25 bp, Homo sapien
caccggcgagggcgcagcaccgcgc

SEQ ID NO: 4962652 - DNA, 25 bp, Homo sapien
ggcaccggcgagggcgcagcaccgc

SEQ ID NO: 4962653 - DNA, 25 bp, Homo sapien
gcaccggcgagggcgcagcaccgcg

SEQ ID NO: 4962654 - DNA, 25 bp, Homo sapien
tctgatcgccatcgccagaagcgca

SEQ ID NO: 4962655 - DNA, 25 bp, Homo sapien
ctaatggaggtagagcgcggcggag

SEQ ID NO: 4962656 - DNA, 25 bp, Homo sapien
taatggaggtagagcgcggcggaga

SEQ ID NO: 4962657 - DNA, 25 bp, Homo sapien
gcaggacctctgatcgccatcgcca

SEQ ID NO: 4962658 - DNA, 25 bp, Homo sapien
aagctgctccgccggtttcctcctc

SEQ ID NO: 4962659 - DNA, 25 bp, Homo sapien
gaagctgctccgccggtttcctcct

SEQ ID NO: 4962660 - DNA, 25 bp, Homo sapien
cgggcgcctgccgagagaggctccc

SEQ ID NO: 4962661 - DNA, 25 bp, Homo sapien
gagaatgagccctttgttccccctc

SEQ ID NO: 4962662 - DNA, 25 bp, Homo sapien
ccggcgatgccaccggctgcgcacg

SEQ ID NO: 4962663 - DNA, 25 bp, Homo sapien
aggagcccgtgattcggcggccgcg

SEQ ID NO: 4962664 - DNA, 25 bp, Homo sapien
gccccggagcctggcaggcgggcgg

SEQ ID NO: 4962665 - DNA, 25 bp, Homo sapien
cccggagcctggcaggcgggcggca

SEQ ID NO: 4962666 - DNA, 25 bp, Homo sapien
ccggagcctggcaggcgggcggcac

SEQ ID NO: 4962667 - DNA, 25 bp, Homo sapien
ccggccccggagcctggcaggcggg

SEQ ID NO: 4962668 - DNA, 25 bp, Homo sapien
ggtgccaagcccgggaactggagca

SEQ ID NO: 4962669 - DNA, 25 bp, Homo sapien
gtgccaagcccgggaactggagcaa

SEQ ID NO: 4962670 - DNA, 25 bp, Homo sapien
tgccaagcccgggaactggagcaaa

SEQ ID NO: 4962671 - DNA, 25 bp, Homo sapien
tgatgggcgctctggcccacgccaa

SEQ ID NO: 4962672 - DNA, 25 bp, Homo sapien
ggcagtcgagttctcacgggtcagt

SEQ ID NO: 4962673 - DNA, 25 bp, Homo sapien
tgtggcacatggcacgccccactgg

SEQ ID NO: 4962674 - DNA, 25 bp, Homo sapien
ctctccatctgtggcacatggcacg

SEQ ID NO: 4962675 - DNA, 25 bp, Homo sapien
cgtcctaggacctctgggagggcct

SEQ ID NO: 4962676 - DNA, 25 bp, Homo sapien
atgagctccgacaccggctccagac

SEQ ID NO: 4962677 - DNA, 25 bp, Homo sapien
caagggcacaaagggttgcgtccta

SEQ ID NO: 4962678 - DNA, 25 bp, Homo sapien
gtctgtccctggtctaagggccttg

SEQ ID NO: 4962679 - DNA, 25 bp, Homo sapien
ggcgcccatgggagtggctcccggg

SEQ ID NO: 4962680 - DNA, 25 bp, Homo sapien
gcgcccatgggagtggctcccggga

SEQ ID NO: 4962681 - DNA, 25 bp, Homo sapien
tcagagcggggactgccgggtggag

SEQ ID NO: 4962682 - DNA, 25 bp, Homo sapien
gtcagagcggggactgccgggtgga

SEQ ID NO: 4962683 - DNA, 25 bp, Homo sapien
cagagcggggactgccgggtggagg

SEQ ID NO: 4962684 - DNA, 25 bp, Homo sapien
gaaggaatgaacacacccaggtgga

SEQ ID NO: 4962685 - DNA, 25 bp, Homo sapien
acacaaccaggacacatgtgccagg

SEQ ID NO: 4962686 - DNA, 25 bp, Homo sapien
tgtgccaggccttatgaaaggctat

SEQ ID NO: 4962687 - DNA, 25 bp, Homo sapien
tatcaaaacactcgcaaacctgacc

SEQ ID NO: 4962688 - DNA, 25 bp, Homo sapien
caaggtccctccaaatagccctgga

SEQ ID NO: 4962689 - DNA, 25 bp, Homo sapien
agccctgcagggcacgaggtaagaa

SEQ ID NO: 4962690 - DNA, 25 bp, Homo sapien
gcccttaaccatcagcaggagtcag

SEQ ID NO: 4962691 - DNA, 25 bp, Homo sapien
gcaataaatagaaccctgggcccag

SEQ ID NO: 4962692 - DNA, 25 bp, Homo sapien
tgtccacgtctgagggcacagtctt

SEQ ID NO: 4962693 - DNA, 25 bp, Homo sapien
tgagggcacagtctttttcctcgtc

SEQ ID NO: 4962694 - DNA, 25 bp, Homo sapien
ttcctcgtccgaaccttcagggagc

SEQ ID NO: 4962695 - DNA, 25 bp, Homo sapien
tccgaaccttcagggagcgcgaggt

SEQ ID NO: 4962696 - DNA, 25 bp, Homo sapien
cttgaccacacgcaggctctggctg

SEQ ID NO: 4962697 - DNA, 25 bp, Homo sapien
tcctcttgaccacacgcaggctctg

SEQ ID NO: 4962698 - DNA, 25 bp, Homo sapien
ctcttgaccacacgcaggctctggc

SEQ ID NO: 4962699 - DNA, 25 bp, Homo sapien
ttcctcttgaccacacgcaggctct

SEQ ID NO: 4962700 - DNA, 25 bp, Homo sapien
tcagtatctgaccaacactcatcct

SEQ ID NO: 4962701 - DNA, 25 bp, Homo sapien
gggactgcctcagtatctgaccaac

SEQ ID NO: 4962702 - DNA, 25 bp, Homo sapien
caacactcatcctcggtgtcgctgt

SEQ ID NO: 4962703 - DNA, 25 bp, Homo sapien
ccgggggactgcctcagtatctgac

SEQ ID NO: 4962704 - DNA, 25 bp, Homo sapien
gggcaggtgcgtcagagatggagcg

SEQ ID NO: 4962705 - DNA, 25 bp, Homo sapien
tggcctccggtgggacacctggtcc

SEQ ID NO: 4962706 - DNA, 25 bp, Homo sapien
aagctccgcagcctgccggccagcg

SEQ ID NO: 4962707 - DNA, 25 bp, Homo sapien
gcgtcagagatggagcgcaggtcct

SEQ ID NO: 4962708 - DNA, 25 bp, Homo sapien
ccgcgccaatgtggcaccaacagga

SEQ ID NO: 4962709 - DNA, 25 bp, Homo sapien
aaactgctcagcaagcttctggccc

SEQ ID NO: 4962710 - DNA, 25 bp, Homo sapien
ttggccaaccagctaatcaccggag

SEQ ID NO: 4962711 - DNA, 25 bp, Homo sapien
gagacgcagaagtgaaaactgctca

SEQ ID NO: 4962712 - DNA, 25 bp, Homo sapien
tgaatgagcccaaagggccttaggg

SEQ ID NO: 4962713 - DNA, 25 bp, Homo sapien
gctgaatgagcccaaagggccttag

SEQ ID NO: 4962714 - DNA, 25 bp, Homo sapien
aggagctgaatgagcccaaagggcc

SEQ ID NO: 4962715 - DNA, 25 bp, Homo sapien
agctccacgcttctgccaatacccc

SEQ ID NO: 4962716 - DNA, 25 bp, Homo sapien
aggcggcaatgttgaggccccgctt

SEQ ID NO: 4962717 - DNA, 25 bp, Homo sapien
cgcttcccgaagctgagcacggtct

SEQ ID NO: 4962718 - DNA, 25 bp, Homo sapien
tggcctgcacgatgtacgcgtcgat

SEQ ID NO: 4962719 - DNA, 25 bp, Homo sapien
tcgtagctgcgctccttggcctgca

SEQ ID NO: 4962720 - DNA, 25 bp, Homo sapien
caggactgggatagaaccccggtgt

SEQ ID NO: 4962721 - DNA, 25 bp, Homo sapien
cagcatcctaaatcccaggtccagg

SEQ ID NO: 4962722 - DNA, 25 bp, Homo sapien
tccctcatacccacccctaagcctc

SEQ ID NO: 4962723 - DNA, 25 bp, Homo sapien
ctgtcaaggtcctgcccctcaatag

SEQ ID NO: 4962724 - DNA, 25 bp, Homo sapien
gggtggacaaacttgcggtaaagca

SEQ ID NO: 4962725 - DNA, 25 bp, Homo sapien
cgcccttggtgtagggtgagagcag

SEQ ID NO: 4962726 - DNA, 25 bp, Homo sapien
ttgcggtaaagcaggctggcgccct

SEQ ID NO: 4962727 - DNA, 25 bp, Homo sapien
tggcgggacagggacgggtggacaa

SEQ ID NO: 4962728 - DNA, 25 bp, Homo sapien
aaaatgtctgtaacgatctctgctg

SEQ ID NO: 4962729 - DNA, 25 bp, Homo sapien
taaaaatgtctgtaacgatctctgc

SEQ ID NO: 4962730 - DNA, 25 bp, Homo sapien
aatgtctgtaacgatctctgctgcc

SEQ ID NO: 4962731 - DNA, 25 bp, Homo sapien
aaatgtctgtaacgatctctgctgc

SEQ ID NO: 4962732 - DNA, 25 bp, Homo sapien
aggcaccccgatggcctgccctcta

SEQ ID NO: 4962733 - DNA, 25 bp, Homo sapien
accccgatggcctgccctctatcta

SEQ ID NO: 4962734 - DNA, 25 bp, Homo sapien
tatctacaccctcttgaacagggcc

SEQ ID NO: 4962735 - DNA, 25 bp, Homo sapien
tgccctctatctacaccctcttgaa

SEQ ID NO: 4962736 - DNA, 25 bp, Homo sapien
ttataggaagcataagctggacaca

SEQ ID NO: 4962737 - DNA, 25 bp, Homo sapien
cttataggaagcataagctggacac

SEQ ID NO: 4962738 - DNA, 25 bp, Homo sapien
tataggaagcataagctggacacag

SEQ ID NO: 4962739 - DNA, 25 bp, Homo sapien
atattcacgaatgttcttggtcttc

SEQ ID NO: 4962740 - DNA, 25 bp, Homo sapien
taacccttgcatggagtgctggagg

SEQ ID NO: 4962741 - DNA, 25 bp, Homo sapien
gggtagcctgcggtgccccagacac

SEQ ID NO: 4962742 - DNA, 25 bp, Homo sapien
tcgttctcagccaacgaggcttggt

SEQ ID NO: 4962743 - DNA, 25 bp, Homo sapien
cgtgcaagcccacaggtccgttaac

SEQ ID NO: 4962744 - DNA, 25 bp, Homo sapien
accaccaggcgacagatcatccagg

SEQ ID NO: 4962745 - DNA, 25 bp, Homo sapien
ccaggcgacagatcatccaggacac

SEQ ID NO: 4962746 - DNA, 25 bp, Homo sapien
aggcgacagatcatccaggacacca

SEQ ID NO: 4962747 - DNA, 25 bp, Homo sapien
caccaggcgacagatcatccaggac

SEQ ID NO: 4962748 - DNA, 25 bp, Homo sapien
caggaagccgctcagaaggacgttc

SEQ ID NO: 4962749 - DNA, 25 bp, Homo sapien
cacttgaaagttgcacggaaccgag

SEQ ID NO: 4962750 - DNA, 25 bp, Homo sapien
aaggacgttcactcaagggctggga

SEQ ID NO: 4962751 - DNA, 25 bp, Homo sapien
tacagggcggagttcgcaactcact

SEQ ID NO: 4962752 - DNA, 25 bp, Homo sapien
caagcctgagaaagcgacagctaca

SEQ ID NO: 4962753 - DNA, 25 bp, Homo sapien
cacaggcatacgtggtgctcacaga

SEQ ID NO: 4962754 - DNA, 25 bp, Homo sapien
caggttggtcgcttgtcttcacaca

SEQ ID NO: 4962755 - DNA, 25 bp, Homo sapien
tgtaatgagtgtgtccgtccgcgtc

SEQ ID NO: 4962756 - DNA, 25 bp, Homo sapien
tctaggtcgttaggcttgcgcacgc

SEQ ID NO: 4962757 - DNA, 25 bp, Homo sapien
ggcaaagtaccagtcaccgtcgatg

SEQ ID NO: 4962758 - DNA, 25 bp, Homo sapien
ccagtggtaaatgtaagagccgcca

SEQ ID NO: 4962759 - DNA, 25 bp, Homo sapien
caaactccaggtcggtgtcacggtg

SEQ ID NO: 4962760 - DNA, 25 bp, Homo sapien
cagacagcatcaggcaggccggcgg

SEQ ID NO: 4962761 - DNA, 25 bp, Homo sapien
ctgtgccaggacagaggcagacagc

SEQ ID NO: 4962762 - DNA, 25 bp, Homo sapien
ccaggacagaggcagacagcatcag

SEQ ID NO: 4962763 - DNA, 25 bp, Homo sapien
atcaggcaggccggcggctcccact

SEQ ID NO: 4962764 - DNA, 25 bp, Homo sapien
ctgggattctatcatagtctcgaag

SEQ ID NO: 4962765 - DNA, 25 bp, Homo sapien
tagtctcgaagctgccgctcaacat

SEQ ID NO: 4962766 - DNA, 25 bp, Homo sapien
tatcatagtctcgaagctgccgctc

SEQ ID NO: 4962767 - DNA, 25 bp, Homo sapien
tcgaagctgccgctcaacatagtcc

SEQ ID NO: 4962768 - DNA, 25 bp, Homo sapien
tgggccagagccaaatagaggtcac

SEQ ID NO: 4962769 - DNA, 25 bp, Homo sapien
ctcagccgacactgctgggaaggcc

SEQ ID NO: 4962770 - DNA, 25 bp, Homo sapien
gaaggccagggtctggtacaacaca

SEQ ID NO: 4962771 - DNA, 25 bp, Homo sapien
caaatagaggtcactggagtagagg

SEQ ID NO: 4962772 - DNA, 25 bp, Homo sapien
gtgttggtgtgtgccagccactcca

SEQ ID NO: 4962773 - DNA, 25 bp, Homo sapien
gtgatgcaatcgaactcccgcagcg

SEQ ID NO: 4962774 - DNA, 25 bp, Homo sapien
tcacagttgagtgagttgccccgca

SEQ ID NO: 4962775 - DNA, 25 bp, Homo sapien
cacttcaccttgcagtcacagttga

SEQ ID NO: 4962776 - DNA, 25 bp, Homo sapien
ctgcaggttattgttggccagcgag

SEQ ID NO: 4962777 - DNA, 25 bp, Homo sapien
aaggtgaacttggatagtgcccaga

SEQ ID NO: 4962778 - DNA, 25 bp, Homo sapien
tcaaggacttgagtcctcggaaggt

SEQ ID NO: 4962779 - DNA, 25 bp, Homo sapien
ggatagtgcccagatgtcattgttc

SEQ ID NO: 4962780 - DNA, 25 bp, Homo sapien
tgagtcctcggaaggtgaacttgga

SEQ ID NO: 4962781 - DNA, 25 bp, Homo sapien
tgaatgaaacgaccttctgctcagg

SEQ ID NO: 4962782 - DNA, 25 bp, Homo sapien
tgccatcacgggatgcaagggctct

SEQ ID NO: 4962783 - DNA, 25 bp, Homo sapien
gaacttgcctcagtgctcacacagg

SEQ ID NO: 4962784 - DNA, 25 bp, Homo sapien
tcaccaagccatagagatagagcat

SEQ ID NO: 4962785 - DNA, 25 bp, Homo sapien
actgcaggtgcgacagtcctgtgaa

SEQ ID NO: 4962786 - DNA, 25 bp, Homo sapien
agatactgcaggtgcgacagtcctg

SEQ ID NO: 4962787 - DNA, 25 bp, Homo sapien
tctccaatcagtgtaaacttgttgg

SEQ ID NO: 4962788 - DNA, 25 bp, Homo sapien
gcgttgtctccaatcagtgtaaact

SEQ ID NO: 4962789 - DNA, 25 bp, Homo sapien
atggacaactgtccctcatggacgg

SEQ ID NO: 4962790 - DNA, 25 bp, Homo sapien
gggtacatcctatcagaacaaaagc

SEQ ID NO: 4962791 - DNA, 25 bp, Homo sapien
tggatcctaaacatgggccaaggca

SEQ ID NO: 4962792 - DNA, 25 bp, Homo sapien
gattcctgggatcacctgtctctaa

SEQ ID NO: 4962793 - DNA, 25 bp, Homo sapien
ggaggtgggagaacgctccatcctg

SEQ ID NO: 4962794 - DNA, 25 bp, Homo sapien
cgggaggtgggagaacgctccatcc

SEQ ID NO: 4962795 - DNA, 25 bp, Homo sapien
agcagcgggaggtgggagaacgctc

SEQ ID NO: 4962796 - DNA, 25 bp, Homo sapien
agcgggaggtgggagaacgctccat

SEQ ID NO: 4962797 - DNA, 25 bp, Homo sapien
cgagtcagtactgtggggtctgcaa

SEQ ID NO: 4962798 - DNA, 25 bp, Homo sapien
cacccgagtcagtactgtggggtct

SEQ ID NO: 4962799 - DNA, 25 bp, Homo sapien
gggacacccgagtcagtactgtggg

SEQ ID NO: 4962800 - DNA, 25 bp, Homo sapien
gcggggacacccgagtcagtactgt

SEQ ID NO: 4962801 - DNA, 25 bp, Homo sapien
cctcttagcgctgacttgcagcatg

SEQ ID NO: 4962802 - DNA, 25 bp, Homo sapien
ttgcagcatgaggcagaagccgagc

SEQ ID NO: 4962803 - DNA, 25 bp, Homo sapien
tccctggtgcaagagcagctgggcg

SEQ ID NO: 4962804 - DNA, 25 bp, Homo sapien
cttggggggcctcttagcgctgact

SEQ ID NO: 4962805 - DNA, 25 bp, Homo sapien
ctcgggagagaagagcggagcgcgg

SEQ ID NO: 4962806 - DNA, 25 bp, Homo sapien
tggcacctccctgccaccggcagct

SEQ ID NO: 4962807 - DNA, 25 bp, Homo sapien
ctgtgtgctctaccgggcggtctct

SEQ ID NO: 4962808 - DNA, 25 bp, Homo sapien
tcgctcccgcgatccggctcgggag

SEQ ID NO: 4962809 - DNA, 25 bp, Homo sapien
catatgcgtgggtgtgtcgctgcct

SEQ ID NO: 4962810 - DNA, 25 bp, Homo sapien
taggcaagcatgttcacctgtgatc

SEQ ID NO: 4962811 - DNA, 25 bp, Homo sapien
tctaagtgcgcccttgtcctttggg

SEQ ID NO: 4962812 - DNA, 25 bp, Homo sapien
gatccaagggagtcagctaatctct

SEQ ID NO: 4962813 - DNA, 25 bp, Homo sapien
gcctctcaaaatgctcagttacagg

SEQ ID NO: 4962814 - DNA, 25 bp, Homo sapien
tactccctcgcaagagctagaatgg

SEQ ID NO: 4962815 - DNA, 25 bp, Homo sapien
ccatgcctggtccacatttggtaat

SEQ ID NO: 4962816 - DNA, 25 bp, Homo sapien
gctagaatggacttgcatcttcaga

SEQ ID NO: 4962817 - DNA, 25 bp, Homo sapien
gccacatttgggtgacggtacatcc

SEQ ID NO: 4962818 - DNA, 25 bp, Homo sapien
taacacactctgtagatgtcgccgc

SEQ ID NO: 4962819 - DNA, 25 bp, Homo sapien
tgtcgccgcctgaatgagagccaga

SEQ ID NO: 4962820 - DNA, 25 bp, Homo sapien
tgatgcaatgcacgcctagtgggct

SEQ ID NO: 4962821 - DNA, 25 bp, Homo sapien
aaaatggaagctgtggcgacactgg

SEQ ID NO: 4962822 - DNA, 25 bp, Homo sapien
gacactgggcccacattcttccatg

SEQ ID NO: 4962823 - DNA, 25 bp, Homo sapien
cagcctagggccaaggtccctctat

SEQ ID NO: 4962824 - DNA, 25 bp, Homo sapien
agtgtgtggtgcctcgtgccaccgc

SEQ ID NO: 4962825 - DNA, 25 bp, Homo sapien
tggagcctgaagcagcttggctgcc

SEQ ID NO: 4962826 - DNA, 25 bp, Homo sapien
actttcaaatacactggccctcctg

SEQ ID NO: 4962827 - DNA, 25 bp, Homo sapien
tgtccccttgcctatctcatggctg

SEQ ID NO: 4962828 - DNA, 25 bp, Homo sapien
agcagagcttcagccctcgtgtggc

SEQ ID NO: 4962829 - DNA, 25 bp, Homo sapien
gttgcaccagtagagtcacaggctg

SEQ ID NO: 4962830 - DNA, 25 bp, Homo sapien
tgcttgttgcaccagtagagtcaca

SEQ ID NO: 4962831 - DNA, 25 bp, Homo sapien
gggttactgcttgttgcaccagtag

SEQ ID NO: 4962832 - DNA, 25 bp, Homo sapien
cccagaggggttactgcttgttgca

SEQ ID NO: 4962833 - DNA, 25 bp, Homo sapien
gatcctgaagaccgccgaggaggtc

SEQ ID NO: 4962834 - DNA, 25 bp, Homo sapien
cacatggcggttccggatcttctgc

SEQ ID NO: 4962835 - DNA, 25 bp, Homo sapien
ggaggtccacatggcggttccggat

SEQ ID NO: 4962836 - DNA, 25 bp, Homo sapien
catggagtgaataaagatcctgaag

SEQ ID NO: 4962837 - DNA, 25 bp, Homo sapien
tgtcggggaccaagcgcgtgccacc

SEQ ID NO: 4962838 - DNA, 25 bp, Homo sapien
cacgtgtttgtgtcaggtatgtctg

SEQ ID NO: 4962839 - DNA, 25 bp, Homo sapien
cgcgtgccaccacgtgtttgtgtca

SEQ ID NO: 4962840 - DNA, 25 bp, Homo sapien
gccaccacgtgtttgtgtcaggtat

SEQ ID NO: 4962841 - DNA, 25 bp, Homo sapien
tgtggccgccacctcgttttccctg

SEQ ID NO: 4962842 - DNA, 25 bp, Homo sapien
tgaagcttccccttgtggccgccac

SEQ ID NO: 4962843 - DNA, 25 bp, Homo sapien
atctgaagcttccccttgtggccgc

SEQ ID NO: 4962844 - DNA, 25 bp, Homo sapien
ccacctcgttttccctggctgcctg

SEQ ID NO: 4962845 - DNA, 25 bp, Homo sapien
ggtggtttattgatgcacgtcgcaa

SEQ ID NO: 4962846 - DNA, 25 bp, Homo sapien
atgcacgtcgcaagcacagcacagg

SEQ ID NO: 4962847 - DNA, 25 bp, Homo sapien
tattgatgcacgtcgcaagcacagc

SEQ ID NO: 4962848 - DNA, 25 bp, Homo sapien
cctcaggccatggtggtttattgat

SEQ ID NO: 4962849 - DNA, 25 bp, Homo sapien
acagataggtgaccgttgtccacct

SEQ ID NO: 4962850 - DNA, 25 bp, Homo sapien
gataggtgaccgttgtccacctgtc

SEQ ID NO: 4962851 - DNA, 25 bp, Homo sapien
taggtgaccgttgtccacctgtccc

SEQ ID NO: 4962852 - DNA, 25 bp, Homo sapien
ctacagataggtgaccgttgtccac

SEQ ID NO: 4962853 - DNA, 25 bp, Homo sapien
tccgtccttcatcacgaaaatccag

SEQ ID NO: 4962854 - DNA, 25 bp, Homo sapien
tgctgcttccgtccttcatcacgaa

SEQ ID NO: 4962855 - DNA, 25 bp, Homo sapien
gtccttcatcacgaaaatccagctg

SEQ ID NO: 4962856 - DNA, 25 bp, Homo sapien
tgcttccgtccttcatcacgaaaat

SEQ ID NO: 4962857 - DNA, 25 bp, Homo sapien
cctctgagaaagtcactgtgaggct

SEQ ID NO: 4962858 - DNA, 25 bp, Homo sapien
ctttgttgattgtagggagtccacc

SEQ ID NO: 4962859 - DNA, 25 bp, Homo sapien
ggaatgaggcaaaaacacaaggagg

SEQ ID NO: 4962860 - DNA, 25 bp, Homo sapien
caccctcgtgacctgtgtgacagta

SEQ ID NO: 4962861 - DNA, 25 bp, Homo sapien
cctgtgtgacagtaggaatgaggca

SEQ ID NO: 4962862 - DNA, 25 bp, Homo sapien
ttacaggtctcacgttccatgccag

SEQ ID NO: 4962863 - DNA, 25 bp, Homo sapien
gtccaggtcacgcatgggcacagta

SEQ ID NO: 4962864 - DNA, 25 bp, Homo sapien
gcacagtacagtcatggcaccatgg

SEQ ID NO: 4962865 - DNA, 25 bp, Homo sapien
caccatggcagagcgagtgagcaaa

SEQ ID NO: 4962866 - DNA, 25 bp, Homo sapien
tcagacccctgcactctaagcaagg

SEQ ID NO: 4962867 - DNA, 25 bp, Homo sapien
gagagttcctttctagagagcaggg

SEQ ID NO: 4962868 - DNA, 25 bp, Homo sapien
ctaagcaaggagaaggtatgctggg

SEQ ID NO: 4962869 - DNA, 25 bp, Homo sapien
tggaaggaaggaacatccgacagcc

SEQ ID NO: 4962870 - DNA, 25 bp, Homo sapien
cacggtggtgcaggagactatttat

SEQ ID NO: 4962871 - DNA, 25 bp, Homo sapien
ggtgtgggccacacttaccaagagg

SEQ ID NO: 4962872 - DNA, 25 bp, Homo sapien
tggacgaggcaaagaacagtaggac

SEQ ID NO: 4962873 - DNA, 25 bp, Homo sapien
taccaagaggaccaccgtctgttgc

SEQ ID NO: 4962874 - DNA, 25 bp, Homo sapien
tggcatcggcagtagacagactcat

SEQ ID NO: 4962875 - DNA, 25 bp, Homo sapien
gctggcccgtgttgaactccgtgtt

SEQ ID NO: 4962876 - DNA, 25 bp, Homo sapien
ggtaaggctgcagcatgttcccgca

SEQ ID NO: 4962877 - DNA, 25 bp, Homo sapien
ggtaggccgtgtacatgcagtagaa

SEQ ID NO: 4962878 - DNA, 25 bp, Homo sapien
gaagatgtggctggtgagccgggct

SEQ ID NO: 4962879 - DNA, 25 bp, Homo sapien
caccccagggagacacaccaaaggg

SEQ ID NO: 4962880 - DNA, 25 bp, Homo sapien
ggagacacaccaaagggaagagaag

SEQ ID NO: 4962881 - DNA, 25 bp, Homo sapien
ggtgagccgggctgaggcttggctg

SEQ ID NO: 4962882 - DNA, 25 bp, Homo sapien
tgccctgaggttaaaactgccctga

SEQ ID NO: 4962883 - DNA, 25 bp, Homo sapien
tttgaaaaccgacgagctgggtgct

SEQ ID NO: 4962884 - DNA, 25 bp, Homo sapien
gagccagcctggtgacgtcaggaca

SEQ ID NO: 4962885 - DNA, 25 bp, Homo sapien
caggacatgtcaaccctagaggagg

SEQ ID NO: 4962886 - DNA, 25 bp, Homo sapien
tggtagacccctgtgaaaggaactg

SEQ ID NO: 4962887 - DNA, 25 bp, Homo sapien
tccttgtgatggttgcggtagaaga

SEQ ID NO: 4962888 - DNA, 25 bp, Homo sapien
cggagcatgcggcctgcgatctgct

SEQ ID NO: 4962889 - DNA, 25 bp, Homo sapien
cggtagaagacggagaagcggagca

SEQ ID NO: 4962890 - DNA, 25 bp, Homo sapien
agaagcggagcatgcggcctgcgat

SEQ ID NO: 4962891 - DNA, 25 bp, Homo sapien
tgcaagatcccagatgcggtaggtg

SEQ ID NO: 4962892 - DNA, 25 bp, Homo sapien
caagatcccagatgcggtaggtgag

SEQ ID NO: 4962893 - DNA, 25 bp, Homo sapien
agatcccagatgcggtaggtgagcc

SEQ ID NO: 4962894 - DNA, 25 bp, Homo sapien
ctgcaagatcccagatgcggtaggt

SEQ ID NO: 4962895 - DNA, 25 bp, Homo sapien
agtgcagaactccaccgtctcgctc

SEQ ID NO: 4962896 - DNA, 25 bp, Homo sapien
tggcctctcaccgtcatgggcagcg

SEQ ID NO: 4962897 - DNA, 25 bp, Homo sapien
tgcttcactgccgtctgcacggcca

SEQ ID NO: 4962898 - DNA, 25 bp, Homo sapien
acggccacactgtactccgtgcggg

SEQ ID NO: 4962899 - DNA, 25 bp, Homo sapien
agtaatgggtgaccctctccaggtc

SEQ ID NO: 4962900 - DNA, 25 bp, Homo sapien
gagatgcggaaggagtcgcaggtga

SEQ ID NO: 4962901 - DNA, 25 bp, Homo sapien
ggaaggagtcgcaggtgatgttgtt

SEQ ID NO: 4962902 - DNA, 25 bp, Homo sapien
gtcaatgaagtaatgggtgaccctc

SEQ ID NO: 4962903 - DNA, 25 bp, Homo sapien
tcagcaagcgttgccgcggtacatg

SEQ ID NO: 4962904 - DNA, 25 bp, Homo sapien
tgccagggccctcggattcaggcct

SEQ ID NO: 4962905 - DNA, 25 bp, Homo sapien
tcactggggtcagcaagcgttgccg

SEQ ID NO: 4962906 - DNA, 25 bp, Homo sapien
gctgtggagcggaggtgcgaggctt

SEQ ID NO: 4962907 - DNA, 25 bp, Homo sapien
cacacacacgccgcgcacaccggtg

SEQ ID NO: 4962908 - DNA, 25 bp, Homo sapien
ctccagccaactcgcgagcgcgcac

SEQ ID NO: 4962909 - DNA, 25 bp, Homo sapien
gcctccagccaactcgcgagcgcgc

SEQ ID NO: 4962910 - DNA, 25 bp, Homo sapien
acacacgccgcgcacaccggtgccc

SEQ ID NO: 4962911 - DNA, 25 bp, Homo sapien
agagacctctgcgtggatgagctcc

SEQ ID NO: 4962912 - DNA, 25 bp, Homo sapien
ctctgcgtggatgagctccccggca

SEQ ID NO: 4962913 - DNA, 25 bp, Homo sapien
ctgcgtggatgagctccccggcagg

SEQ ID NO: 4962914 - DNA, 25 bp, Homo sapien
gagagacctctgcgtggatgagctc

SEQ ID NO: 4962915 - DNA, 25 bp, Homo sapien
agccggacgcctgggtcacgggcag

SEQ ID NO: 4962916 - DNA, 25 bp, Homo sapien
gccggacgcctgggtcacgggcagt

SEQ ID NO: 4962917 - DNA, 25 bp, Homo sapien
cagccggacgcctgggtcacgggca

SEQ ID NO: 4962918 - DNA, 25 bp, Homo sapien
ggtgagacgatgttcccagctgagc

SEQ ID NO: 4962919 - DNA, 25 bp, Homo sapien
gtctggctgtgcagcgcgtcgctgc

SEQ ID NO: 4962920 - DNA, 25 bp, Homo sapien
cgaaatcaaagcagcgtggaggaga

SEQ ID NO: 4962921 - DNA, 25 bp, Homo sapien
agagaggcaagagcgaaatcaaagc

SEQ ID NO: 4962922 - DNA, 25 bp, Homo sapien
gagactgcacgaggtcctgtggccc

SEQ ID NO: 4962923 - DNA, 25 bp, Homo sapien
gtcatgaggagactgcacgaggtcc

SEQ ID NO: 4962924 - DNA, 25 bp, Homo sapien
agactgcacgaggtcctgtggccca

SEQ ID NO: 4962925 - DNA, 25 bp, Homo sapien
ggatgtcatgaggagactgcacgag

SEQ ID NO: 4962926 - DNA, 25 bp, Homo sapien
gaatcctcacattgcggcgtggtgg

SEQ ID NO: 4962927 - DNA, 25 bp, Homo sapien
tcagaagcgggtatgactgggcacc

SEQ ID NO: 4962928 - DNA, 25 bp, Homo sapien
ggctttgaccaagagcgcacacgag

SEQ ID NO: 4962929 - DNA, 25 bp, Homo sapien
agggccaccgccttcgtgatcagaa

SEQ ID NO: 4962930 - DNA, 25 bp, Homo sapien
ctcatcctttttcgccctctcaacc

SEQ ID NO: 4962931 - DNA, 25 bp, Homo sapien
acctcatcctttttcgccctctcaa

SEQ ID NO: 4962932 - DNA, 25 bp, Homo sapien
catcctttttcgccctctcaaccca

SEQ ID NO: 4962933 - DNA, 25 bp, Homo sapien
tcctttttcgccctctcaacccagc

SEQ ID NO: 4962934 - DNA, 25 bp, Homo sapien
taggtatggcattcgaggctctgtg

SEQ ID NO: 4962935 - DNA, 25 bp, Homo sapien
gactgtggatgtcaagagtagccca

SEQ ID NO: 4962936 - DNA, 25 bp, Homo sapien
cagtcttagagggttcagaattcac

SEQ ID NO: 4962937 - DNA, 25 bp, Homo sapien
tttaagaaacccatgaaagccagac

SEQ ID NO: 4962938 - DNA, 25 bp, Homo sapien
gatgggtcgactagtgtatcccctg

SEQ ID NO: 4962939 - DNA, 25 bp, Homo sapien
tatccgggaataaccgtcagcagct

SEQ ID NO: 4962940 - DNA, 25 bp, Homo sapien
tagacaattcatagtagctgctgcc

SEQ ID NO: 4962941 - DNA, 25 bp, Homo sapien
gatttccttggaaccgtctgctttg

SEQ ID NO: 4962942 - DNA, 25 bp, Homo sapien
ttggcttactgcaactctgtctccc

SEQ ID NO: 4962943 - DNA, 25 bp, Homo sapien
cactctgtcgcccagtggtgtgatc

SEQ ID NO: 4962944 - DNA, 25 bp, Homo sapien
catgagcatgttagttttgttttgt

SEQ ID NO: 4962945 - DNA, 25 bp, Homo sapien
cccgcctcagccccccagatagctg

SEQ ID NO: 4962946 - DNA, 25 bp, Homo sapien
ttaatcctcagactgccctgcgtgg

SEQ ID NO: 4962947 - DNA, 25 bp, Homo sapien
tctcttggattgtggttcggccgca

SEQ ID NO: 4962948 - DNA, 25 bp, Homo sapien
catttccccttgagatggctgtggc

SEQ ID NO: 4962949 - DNA, 25 bp, Homo sapien
cctgcgtggtccgattgaattgggc

SEQ ID NO: 4962950 - DNA, 25 bp, Homo sapien
ccagccatattcacgggagttagca

SEQ ID NO: 4962951 - DNA, 25 bp, Homo sapien
gaaggtggcctcaagtttacctcca

SEQ ID NO: 4962952 - DNA, 25 bp, Homo sapien
tgatttcaagggtagcacacacgtg

SEQ ID NO: 4962953 - DNA, 25 bp, Homo sapien
tattcccaatgaaagcacgaccagt

SEQ ID NO: 4962954 - DNA, 25 bp, Homo sapien
taggctaaatctgtttataggagtt

SEQ ID NO: 4962955 - DNA, 25 bp, Homo sapien
tcaacacgcgagtcttaggctaaat

SEQ ID NO: 4962956 - DNA, 25 bp, Homo sapien
taatcctcttaactggcaggaatgg

SEQ ID NO: 4962957 - DNA, 25 bp, Homo sapien
tttttcaccacctgtatcgctaatc

SEQ ID NO: 4962958 - DNA, 25 bp, Homo sapien
ggaatctgctccatagccatccgca

SEQ ID NO: 4962959 - DNA, 25 bp, Homo sapien
taccagcaggtatgcaaaatccagt

SEQ ID NO: 4962960 - DNA, 25 bp, Homo sapien
taccagagtaagtccaacttgccag

SEQ ID NO: 4962961 - DNA, 25 bp, Homo sapien
tagtgcttcacagggttcaagagga

SEQ ID NO: 4962962 - DNA, 25 bp, Homo sapien
cggtgcggcatcaagtctgaaaagt

SEQ ID NO: 4962963 - DNA, 25 bp, Homo sapien
tcattgtgggaagcggtgcggcatc

SEQ ID NO: 4962964 - DNA, 25 bp, Homo sapien
aacaccatctaagggcgcgtcccct

SEQ ID NO: 4962965 - DNA, 25 bp, Homo sapien
cttttggctggtggaaatatgcaga

SEQ ID NO: 4962966 - DNA, 25 bp, Homo sapien
ccgcgggatgggcagcggcggagga

SEQ ID NO: 4962967 - DNA, 25 bp, Homo sapien
ggacgccaagggccgcgggatgggc

SEQ ID NO: 4962968 - DNA, 25 bp, Homo sapien
ccgaggccgcctccgagcgccaggt

SEQ ID NO: 4962969 - DNA, 25 bp, Homo sapien
gccaggtgagggcggggacgccaag

SEQ ID NO: 4962970 - DNA, 25 bp, Homo sapien
gataggctagtggtcctcttgctgg

SEQ ID NO: 4962971 - DNA, 25 bp, Homo sapien
ataggctagtggtcctcttgctggg

SEQ ID NO: 4962972 - DNA, 25 bp, Homo sapien
gagataggctagtggtcctcttgct

SEQ ID NO: 4962973 - DNA, 25 bp, Homo sapien
caggagataggctagtggtcctctt

SEQ ID NO: 4962974 - DNA, 25 bp, Homo sapien
cagcttgcaggatgtcgtgattttg

SEQ ID NO: 4962975 - DNA, 25 bp, Homo sapien
agcttgcaggatgtcgtgattttgc

SEQ ID NO: 4962976 - DNA, 25 bp, Homo sapien
tgggctggtggaatgccaggagata

SEQ ID NO: 4962977 - DNA, 25 bp, Homo sapien
atcgactgtcgccagccagggcttc

SEQ ID NO: 4962978 - DNA, 25 bp, Homo sapien
caggagataaggagtccagagtccg

SEQ ID NO: 4962979 - DNA, 25 bp, Homo sapien
aggagtccagagtccgccccatcga

SEQ ID NO: 4962980 - DNA, 25 bp, Homo sapien
cgtgggcattaaacctctcaggggg

SEQ ID NO: 4962981 - DNA, 25 bp, Homo sapien
ctcagggggcccctggttgggcctg

SEQ ID NO: 4962982 - DNA, 25 bp, Homo sapien
gcagagacgcagaggctgggccctc

SEQ ID NO: 4962983 - DNA, 25 bp, Homo sapien
cagagacgcagaggctgggccctct

SEQ ID NO: 4962984 - DNA, 25 bp, Homo sapien
agaacaaattgagctaatctctgag

SEQ ID NO: 4962985 - DNA, 25 bp, Homo sapien
tacgtgtcacatttcatgtagcttc

SEQ ID NO: 4962986 - DNA, 25 bp, Homo sapien
taataggtgtaacttaaatttgctg

SEQ ID NO: 4962987 - DNA, 25 bp, Homo sapien
gaattactgttcgagatcacttagc

SEQ ID NO: 4962988 - DNA, 25 bp, Homo sapien
ggcggagagggtgtcttggaaccaa

SEQ ID NO: 4962989 - DNA, 25 bp, Homo sapien
aaagtctatagggaggaagtgcgta

SEQ ID NO: 4962990 - DNA, 25 bp, Homo sapien
ttcaatactataagtaacctagaga

SEQ ID NO: 4962991 - DNA, 25 bp, Homo sapien
gatggtttaaagtctatagggagga

SEQ ID NO: 4962992 - DNA, 25 bp, Homo sapien
gcaacttgcctctgtacagagagct

SEQ ID NO: 4962993 - DNA, 25 bp, Homo sapien
cagagagctctggttgagtgtgaca

SEQ ID NO: 4962994 - DNA, 25 bp, Homo sapien
agagctctggttgagtgtgacactg

SEQ ID NO: 4962995 - DNA, 25 bp, Homo sapien
ttgcctctgtacagagagctctggt

SEQ ID NO: 4962996 - DNA, 25 bp, Homo sapien
ttgtggtacccctgtggcaaagagg

SEQ ID NO: 4962997 - DNA, 25 bp, Homo sapien
cagattgtggtacccctgtggcaaa

SEQ ID NO: 4962998 - DNA, 25 bp, Homo sapien
ggacagattgtggtacccctgtggc

SEQ ID NO: 4962999 - DNA, 25 bp, Homo sapien
tggtacccctgtggcaaagagggaa

SEQ ID NO: 4963000 - DNA, 25 bp, Homo sapien
tctcaggataccaggtccctgggca

SEQ ID NO: 4963001 - DNA, 25 bp, Homo sapien
tttccatctgatgggctgggtaatt

SEQ ID NO: 4963002 - DNA, 25 bp, Homo sapien
gggtaattctcaggataccaggtcc

SEQ ID NO: 4963003 - DNA, 25 bp, Homo sapien
tgttttccatctgatgggctgggta

SEQ ID NO: 4963004 - DNA, 25 bp, Homo sapien
ggtcattttcctgcacgcgttccag

SEQ ID NO: 4963005 - DNA, 25 bp, Homo sapien
gagcgctcactgtgctcaatacgca

SEQ ID NO: 4963006 - DNA, 25 bp, Homo sapien
ttggctcttagagcgctcactgtgc

SEQ ID NO: 4963007 - DNA, 25 bp, Homo sapien
gcacgcgttccaggaagcggtcttg

SEQ ID NO: 4963008 - DNA, 25 bp, Homo sapien
tagctatctggtgggagcacaggca

SEQ ID NO: 4963009 - DNA, 25 bp, Homo sapien
cctgggacatgcatttccctggtgt

SEQ ID NO: 4963010 - DNA, 25 bp, Homo sapien
caggcggcttcttgtgccatagcta

SEQ ID NO: 4963011 - DNA, 25 bp, Homo sapien
gtggatcctgggacatgcatttccc

SEQ ID NO: 4963012 - DNA, 25 bp, Homo sapien
ttttccctacgcctgggctccagat

SEQ ID NO: 4963013 - DNA, 25 bp, Homo sapien
gctagctggagatacatttctatca

SEQ ID NO: 4963014 - DNA, 25 bp, Homo sapien
gagccatggttatctgctagctgga

SEQ ID NO: 4963015 - DNA, 25 bp, Homo sapien
cagagagctaaccttgagccatggt

SEQ ID NO: 4963016 - DNA, 25 bp, Homo sapien
tggagaaagcgcagtctgcttgaag

SEQ ID NO: 4963017 - DNA, 25 bp, Homo sapien
aggaagagtggagaaagcgcagtct

SEQ ID NO: 4963018 - DNA, 25 bp, Homo sapien
gaaagcgcagtctgcttgaagggct

SEQ ID NO: 4963019 - DNA, 25 bp, Homo sapien
agtggagaaagcgcagtctgcttga

SEQ ID NO: 4963020 - DNA, 25 bp, Homo sapien
gacaggtctagacctgagcctggat

SEQ ID NO: 4963021 - DNA, 25 bp, Homo sapien
catggagacaggtctagacctgagc

SEQ ID NO: 4963022 - DNA, 25 bp, Homo sapien
gggctgtgctcgctgaatctgcaca

SEQ ID NO: 4963023 - DNA, 25 bp, Homo sapien
atgctgtcttgtgggcgtcagtgcc

SEQ ID NO: 4963024 - DNA, 25 bp, Homo sapien
tgtggctgatgccgaatccatccat

SEQ ID NO: 4963025 - DNA, 25 bp, Homo sapien
tcgttgtggctgatgccgaatccat

SEQ ID NO: 4963026 - DNA, 25 bp, Homo sapien
gttgtggctgatgccgaatccatcc

SEQ ID NO: 4963027 - DNA, 25 bp, Homo sapien
cgtcgttgtggctgatgccgaatcc

SEQ ID NO: 4963028 - DNA, 25 bp, Homo sapien
tgagccaccgaacgtggcctaacca

SEQ ID NO: 4963029 - DNA, 25 bp, Homo sapien
cagtggggttaataagagcacctcc

SEQ ID NO: 4963030 - DNA, 25 bp, Homo sapien
ccaccatttcttaacgattaaatag

SEQ ID NO: 4963031 - DNA, 25 bp, Homo sapien
tccttttagccccatatgcagtggc

SEQ ID NO: 4963032 - DNA, 25 bp, Homo sapien
tttatctcaatgcattgggtgtgtc

SEQ ID NO: 4963033 - DNA, 25 bp, Homo sapien
gaatggctgtatatagataagagac

SEQ ID NO: 4963034 - DNA, 25 bp, Homo sapien
tcgtctgtttaaggtgtacctacca

SEQ ID NO: 4963035 - DNA, 25 bp, Homo sapien
caccgcacatggctggtagtttgtt

SEQ ID NO: 4963036 - DNA, 25 bp, Homo sapien
gtgtttaaagtccataataaggcca

SEQ ID NO: 4963037 - DNA, 25 bp, Homo sapien
tatttttagccagcctctaaactca

SEQ ID NO: 4963038 - DNA, 25 bp, Homo sapien
tttaaagtccataataaggccaggc

SEQ ID NO: 4963039 - DNA, 25 bp, Homo sapien
taaagtccataataaggccaggcat

SEQ ID NO: 4963040 - DNA, 25 bp, Homo sapien
tcacggctgtccgagtgagctaacg

SEQ ID NO: 4963041 - DNA, 25 bp, Homo sapien
gaggaagtcgaaccactgctgtgtg

SEQ ID NO: 4963042 - DNA, 25 bp, Homo sapien
ttaacgctgacagaatggaggctca

SEQ ID NO: 4963043 - DNA, 25 bp, Homo sapien
catgactctagctgggcaccttgga

SEQ ID NO: 4963044 - DNA, 25 bp, Homo sapien
taaaccgtagttggcgcagaggtca

SEQ ID NO: 4963045 - DNA, 25 bp, Homo sapien
gaagcctttcttagtggtgcccaca

SEQ ID NO: 4963046 - DNA, 25 bp, Homo sapien
ccatagacagctgcctcaaagggaa

SEQ ID NO: 4963047 - DNA, 25 bp, Homo sapien
tctcagtaatcacaagcagcatccg

SEQ ID NO: 4963048 - DNA, 25 bp, Homo sapien
tttttcacccctggcattagcagct

SEQ ID NO: 4963049 - DNA, 25 bp, Homo sapien
tatgtcacgtgcaggaacagtgagg

SEQ ID NO: 4963050 - DNA, 25 bp, Homo sapien
aaattggagctattcttcactggtc

SEQ ID NO: 4963051 - DNA, 25 bp, Homo sapien
gatgcaccagctcctattaataagt

SEQ ID NO: 4963052 - DNA, 25 bp, Homo sapien
cactactacgccatttgctattcaa

SEQ ID NO: 4963053 - DNA, 25 bp, Homo sapien
taatttgcattacctcactactacg

SEQ ID NO: 4963054 - DNA, 25 bp, Homo sapien
tacaggacttgcattgtaattgctg

SEQ ID NO: 4963055 - DNA, 25 bp, Homo sapien
ggagtctgtctctgcatacctcagt

SEQ ID NO: 4963056 - DNA, 25 bp, Homo sapien
ggccacgcgggcgggtttcagatgt

SEQ ID NO: 4963057 - DNA, 25 bp, Homo sapien
cacgcgggcgggtttcagatgttcc

SEQ ID NO: 4963058 - DNA, 25 bp, Homo sapien
cgggccacgcgggcgggtttcagat

SEQ ID NO: 4963059 - DNA, 25 bp, Homo sapien
cgcgggccacgcgggcgggtttcag

SEQ ID NO: 4963060 - DNA, 25 bp, Homo sapien
cagcagggacccggagccggaggag

SEQ ID NO: 4963061 - DNA, 25 bp, Homo sapien
ttagcagcagggacccggagccgga

SEQ ID NO: 4963062 - DNA, 25 bp, Homo sapien
ggcggttagcagcagggacccggag

SEQ ID NO: 4963063 - DNA, 25 bp, Homo sapien
tagcagcagggacccggagccggag

SEQ ID NO: 4963064 - DNA, 25 bp, Homo sapien
ggcgtaggcgcacgtccggcgggct

SEQ ID NO: 4963065 - DNA, 25 bp, Homo sapien
tctggtgctcggacaccgctgagga

SEQ ID NO: 4963066 - DNA, 25 bp, Homo sapien
gtggccgcgcccttctggtgctcgg

SEQ ID NO: 4963067 - DNA, 25 bp, Homo sapien
ctggctgacggctccgggcagctaa

SEQ ID NO: 4963068 - DNA, 25 bp, Homo sapien
ccactgtttgtccatggcaatgatg

SEQ ID NO: 4963069 - DNA, 25 bp, Homo sapien
tggcaatgatgtcggcagtatgcat

SEQ ID NO: 4963070 - DNA, 25 bp, Homo sapien
catggcaatgatgtcggcagtatgc

SEQ ID NO: 4963071 - DNA, 25 bp, Homo sapien
tccatggcaatgatgtcggcagtat

SEQ ID NO: 4963072 - DNA, 25 bp, Homo sapien
tcagcgttgagtatctattagtgga

SEQ ID NO: 4963073 - DNA, 25 bp, Homo sapien
caaacatacattaagataggagtag

SEQ ID NO: 4963074 - DNA, 25 bp, Homo sapien
gataggagtagattcaatgtttgat

SEQ ID NO: 4963075 - DNA, 25 bp, Homo sapien
gaagaccctggcttaatactatgca

SEQ ID NO: 4963076 - DNA, 25 bp, Homo sapien
gataaaggacatgtacccagaacat

SEQ ID NO: 4963077 - DNA, 25 bp, Homo sapien
tggcccttaagcaagtagaaaggtc

SEQ ID NO: 4963078 - DNA, 25 bp, Homo sapien
ccggtagacgttcactgtactggaa

SEQ ID NO: 4963079 - DNA, 25 bp, Homo sapien
gagaacaaagagataccggtagacg

SEQ ID NO: 4963080 - DNA, 25 bp, Homo sapien
tatgcatagtctatatgatatagcc

SEQ ID NO: 4963081 - DNA, 25 bp, Homo sapien
cccatctgggcaataaagcgagatc

SEQ ID NO: 4963082 - DNA, 25 bp, Homo sapien
gatatagcctattacttctaggcca

SEQ ID NO: 4963083 - DNA, 25 bp, Homo sapien
aaggcaaaaactggtacacctgtat

SEQ ID NO: 4963084 - DNA, 25 bp, Homo sapien
tcctttgagtatatacgcgataatg

SEQ ID NO: 4963085 - DNA, 25 bp, Homo sapien
ctttgagtatatacgcgataatggg

SEQ ID NO: 4963086 - DNA, 25 bp, Homo sapien
attctggtatacatgtacagaacat

SEQ ID NO: 4963087 - DNA, 25 bp, Homo sapien
ataatcctttgagtatatacgcgat

SEQ ID NO: 4963088 - DNA, 25 bp, Homo sapien
tatatagagggtggcatactacagc

SEQ ID NO: 4963089 - DNA, 25 bp, Homo sapien
tagagggtggcatactacagctact

SEQ ID NO: 4963090 - DNA, 25 bp, Homo sapien
ttctttattatatagagggtggcat

SEQ ID NO: 4963091 - DNA, 25 bp, Homo sapien
ggcatactacagctactcttgtact

SEQ ID NO: 4963092 - DNA, 25 bp, Homo sapien
gactcagagttgaacacttacatgc

SEQ ID NO: 4963093 - DNA, 25 bp, Homo sapien
aatgatgtgaggaggctagaagata

SEQ ID NO: 4963094 - DNA, 25 bp, Homo sapien
catgacataggagccgctataagga

SEQ ID NO: 4963095 - DNA, 25 bp, Homo sapien
gctgaatcggacaaaaagtagtaag

SEQ ID NO: 4963096 - DNA, 25 bp, Homo sapien
gattggacatcctgcagtgctctga

SEQ ID NO: 4963097 - DNA, 25 bp, Homo sapien
caacactgtccgagggtgctcttat

SEQ ID NO: 4963098 - DNA, 25 bp, Homo sapien
gagaagaccttggagcactataccc

SEQ ID NO: 4963099 - DNA, 25 bp, Homo sapien
gtaagctagtccttgaggtcgaaaa

SEQ ID NO: 4963100 - DNA, 25 bp, Homo sapien
tatcgaatgtacaggaagagccaag

SEQ ID NO: 4963101 - DNA, 25 bp, Homo sapien
tatctcctaaggattactggcttct

SEQ ID NO: 4963102 - DNA, 25 bp, Homo sapien
tgtaccaaatatcgctgcagagtct

SEQ ID NO: 4963103 - DNA, 25 bp, Homo sapien
agagcccatgaagcccaagatgctg

SEQ ID NO: 4963104 - DNA, 25 bp, Homo sapien
tcattcactgttgagactcacctcc

SEQ ID NO: 4963105 - DNA, 25 bp, Homo sapien
cattcactgttgagactcacctccc

SEQ ID NO: 4963106 - DNA, 25 bp, Homo sapien
tcattatcatggtggtagttagaca

SEQ ID NO: 4963107 - DNA, 25 bp, Homo sapien
tcctctggtgggagaatattgtccc

SEQ ID NO: 4963108 - DNA, 25 bp, Homo sapien
gaaccattggactaatcagtgataa

SEQ ID NO: 4963109 - DNA, 25 bp, Homo sapien
ggcacagggaacatctagagtgtta

SEQ ID NO: 4963110 - DNA, 25 bp, Homo sapien
tggccatcctgccatttataggagt

SEQ ID NO: 4963111 - DNA, 25 bp, Homo sapien
tcattgctattgactaacagggaca

SEQ ID NO: 4963112 - DNA, 25 bp, Homo sapien
ttttcccacctcatcgttcatctgg

SEQ ID NO: 4963113 - DNA, 25 bp, Homo sapien
atagctcatggcagcgcccggttgc

SEQ ID NO: 4963114 - DNA, 25 bp, Homo sapien
tctaagagggattggcgtgagttac

SEQ ID NO: 4963115 - DNA, 25 bp, Homo sapien
tatgtctcaccttgatctaagaggg

SEQ ID NO: 4963116 - DNA, 25 bp, Homo sapien
gagagctttcaaccaacagtatccc

SEQ ID NO: 4963117 - DNA, 25 bp, Homo sapien
ggacaagattcacaaagaccatcag

SEQ ID NO: 4963118 - DNA, 25 bp, Homo sapien
aaaacacacggtttgaggcacagct

SEQ ID NO: 4963119 - DNA, 25 bp, Homo sapien
aaaacaacttcaacgtggaggtgca

SEQ ID NO: 4963120 - DNA, 25 bp, Homo sapien
ttaactagcctcatcgcaggagccg

SEQ ID NO: 4963121 - DNA, 25 bp, Homo sapien
tacatcagagcatggaacgtgcaca

SEQ ID NO: 4963122 - DNA, 25 bp, Homo sapien
tgagacgcctggaggaaagctgtca

SEQ ID NO: 4963123 - DNA, 25 bp, Homo sapien
tagagaactgtattaacaatagggc

SEQ ID NO: 4963124 - DNA, 25 bp, Homo sapien
caatagggctttgtgccattgacag

SEQ ID NO: 4963125 - DNA, 25 bp, Homo sapien
gaagaaagttgtgtagtcgaaggac

SEQ ID NO: 4963126 - DNA, 25 bp, Homo sapien
actttattggctccctgtgtcttta

SEQ ID NO: 4963127 - DNA, 25 bp, Homo sapien
ggcttttgatgtctggtctggtctc

SEQ ID NO: 4963128 - DNA, 25 bp, Homo sapien
tctggtctggtctctgatgataaca

SEQ ID NO: 4963129 - DNA, 25 bp, Homo sapien
agcctggcttttgatgtctggtctg

SEQ ID NO: 4963130 - DNA, 25 bp, Homo sapien
ggctgatgcagacctaatttcccag

SEQ ID NO: 4963131 - DNA, 25 bp, Homo sapien
catctttcctgagaactaagagagg

SEQ ID NO: 4963132 - DNA, 25 bp, Homo sapien
ccatcgcagtctacctgagctggga

SEQ ID NO: 4963133 - DNA, 25 bp, Homo sapien
tactttatggtatccactgggccaa

SEQ ID NO: 4963134 - DNA, 25 bp, Homo sapien
tcccaacccttggtcagacgttgta

SEQ ID NO: 4963135 - DNA, 25 bp, Homo sapien
taagcctgatgcagtggttcctctc

SEQ ID NO: 4963136 - DNA, 25 bp, Homo sapien
gaggctggaacattccatgtaagcc

SEQ ID NO: 4963137 - DNA, 25 bp, Homo sapien
atcagaatggagtcattattacagc

SEQ ID NO: 4963138 - DNA, 25 bp, Homo sapien
gatgttggcaatttgcgtcttctct

SEQ ID NO: 4963139 - DNA, 25 bp, Homo sapien
cttaggatgaaagtttagactattg

SEQ ID NO: 4963140 - DNA, 25 bp, Homo sapien
tctgtctagagctttattaatttac

SEQ ID NO: 4963141 - DNA, 25 bp, Homo sapien
gcccggctgatatgttctctttcat

SEQ ID NO: 4963142 - DNA, 25 bp, Homo sapien
cctggcatatcaccccgcactgtgg

SEQ ID NO: 4963143 - DNA, 25 bp, Homo sapien
aggcctggcaagagctctggcccca

SEQ ID NO: 4963144 - DNA, 25 bp, Homo sapien
ggcaccactagcctggctcaaatat

SEQ ID NO: 4963145 - DNA, 25 bp, Homo sapien
ttccccagggagactgctgtgtgct

SEQ ID NO: 4963146 - DNA, 25 bp, Homo sapien
tgttaaatgccgatggctgggcccc

SEQ ID NO: 4963147 - DNA, 25 bp, Homo sapien
aagaatcaagtctcgggccgggtgc

SEQ ID NO: 4963148 - DNA, 25 bp, Homo sapien
taagtagggtcgaacacagaagtgg

SEQ ID NO: 4963149 - DNA, 25 bp, Homo sapien
tacacctgtgccgactgtgggctga

SEQ ID NO: 4963150 - DNA, 25 bp, Homo sapien
caaggtggagcacaaaggatttcac

SEQ ID NO: 4963151 - DNA, 25 bp, Homo sapien
tgacatttaggccaccttccaggtt

SEQ ID NO: 4963152 - DNA, 25 bp, Homo sapien
gggaaatctgcctaccctagctcag

SEQ ID NO: 4963153 - DNA, 25 bp, Homo sapien
tgcttttccaaagccgcacggtgag

SEQ ID NO: 4963154 - DNA, 25 bp, Homo sapien
ctgatgggattctttagcgaggaca

SEQ ID NO: 4963155 - DNA, 25 bp, Homo sapien
tctgtaggctgagacctctcggtgc

SEQ ID NO: 4963156 - DNA, 25 bp, Homo sapien
tcattccacaggatcgagtccaggg

SEQ ID NO: 4963157 - DNA, 25 bp, Homo sapien
tttgagcccggaaccaatgatccga

SEQ ID NO: 4963158 - DNA, 25 bp, Homo sapien
tcgcgcttccggagaggcgcttccg

SEQ ID NO: 4963159 - DNA, 25 bp, Homo sapien
accatatccgggagagcggcagctt

SEQ ID NO: 4963160 - DNA, 25 bp, Homo sapien
taccgaggcgcgacttcctgacgcg

SEQ ID NO: 4963161 - DNA, 25 bp, Homo sapien
tccgatccgggaaggcgcacttccg

SEQ ID NO: 4963162 - DNA, 25 bp, Homo sapien
gaccactaggagcatgctgtcccgt

SEQ ID NO: 4963163 - DNA, 25 bp, Homo sapien
agtgaacccaggtcaactgcttgga

SEQ ID NO: 4963164 - DNA, 25 bp, Homo sapien
tatacagtggttaagcaagcaggga

SEQ ID NO: 4963165 - DNA, 25 bp, Homo sapien
gacacacaggtagctttctcagcca

SEQ ID NO: 4963166 - DNA, 25 bp, Homo sapien
agcttttaatttatgaaggactcag

SEQ ID NO: 4963167 - DNA, 25 bp, Homo sapien
tgtacagcgttgagtggaccataac

SEQ ID NO: 4963168 - DNA, 25 bp, Homo sapien
taacagtttagctagaggccgacag

SEQ ID NO: 4963169 - DNA, 25 bp, Homo sapien
tgcaagtcctgagaggtcagcccct

SEQ ID NO: 4963170 - DNA, 25 bp, Homo sapien
tttagacaggtgtacccagctgggc

SEQ ID NO: 4963171 - DNA, 25 bp, Homo sapien
tcttactgttggtgatgggtcaacc

SEQ ID NO: 4963172 - DNA, 25 bp, Homo sapien
aatgagatggcgtctatgcaagtgc

SEQ ID NO: 4963173 - DNA, 25 bp, Homo sapien
tgctaagaagccaaggcatgacctg

SEQ ID NO: 4963174 - DNA, 25 bp, Homo sapien
caagaaacgcaaacagcgggctggt

SEQ ID NO: 4963175 - DNA, 25 bp, Homo sapien
tgcagacagtgaccccgcttatagt

SEQ ID NO: 4963176 - DNA, 25 bp, Homo sapien
tagttcgaaggtaagctgacaggcg

SEQ ID NO: 4963177 - DNA, 25 bp, Homo sapien
cagactggcattgatttgagcggct

SEQ ID NO: 4963178 - DNA, 25 bp, Homo sapien
tcatgtttgcagatagagacctcac

SEQ ID NO: 4963179 - DNA, 25 bp, Homo sapien
gaaacggacactgatctcccagagg

SEQ ID NO: 4963180 - DNA, 25 bp, Homo sapien
tgttgtcacaggaaacggagcctac

SEQ ID NO: 4963181 - DNA, 25 bp, Homo sapien
gatataggtggcctaatcccgggac

SEQ ID NO: 4963182 - DNA, 25 bp, Homo sapien
gagtttcagtacctgcagccgggac

SEQ ID NO: 4963183 - DNA, 25 bp, Homo sapien
tgcacccttgctcggcatggactga

SEQ ID NO: 4963184 - DNA, 25 bp, Homo sapien
gattgcctgatggttaactagaaaa

SEQ ID NO: 4963185 - DNA, 25 bp, Homo sapien
tagcacacctagtgcaagggaaggt

SEQ ID NO: 4963186 - DNA, 25 bp, Homo sapien
tgtcactgagaacgcttggcagagt

SEQ ID NO: 4963187 - DNA, 25 bp, Homo sapien
gaagggcacgttcataggctccagg

SEQ ID NO: 4963188 - DNA, 25 bp, Homo sapien
gacggtatctgtagagccctccata

SEQ ID NO: 4963189 - DNA, 25 bp, Homo sapien
ttgatggacccaacacacagtgtgg

SEQ ID NO: 4963190 - DNA, 25 bp, Homo sapien
tctgaggacctgtgtgagatggccc

SEQ ID NO: 4963191 - DNA, 25 bp, Homo sapien
cacggtgcagttcgctccagaaggt

SEQ ID NO: 4963192 - DNA, 25 bp, Homo sapien
agcgcctctgctggaccacggtgca

SEQ ID NO: 4963193 - DNA, 25 bp, Homo sapien
gcctaagttacagcacaatactatg

SEQ ID NO: 4963194 - DNA, 25 bp, Homo sapien
tactctcctaggcttgcccgcgtgc

SEQ ID NO: 4963195 - DNA, 25 bp, Homo sapien
gaggtagatttgatgcccacaacgc

SEQ ID NO: 4963196 - DNA, 25 bp, Homo sapien
gatactcaggtgagacacaaaccca

SEQ ID NO: 4963197 - DNA, 25 bp, Homo sapien
ggtaccagtcctcagtgacctcggg

SEQ ID NO: 4963198 - DNA, 25 bp, Homo sapien
caggatgcatgctggacggttctcc

SEQ ID NO: 4963199 - DNA, 25 bp, Homo sapien
ggctgaccacgtcacaggagtcctc

SEQ ID NO: 4963200 - DNA, 25 bp, Homo sapien
gagaagggcaaggatgaatgaggct

SEQ ID NO: 4963201 - DNA, 25 bp, Homo sapien
gatgaatgaggctgaccacgtcaca

SEQ ID NO: 4963202 - DNA, 25 bp, Homo sapien
ggcaaggatgaatgaggctgaccac

SEQ ID NO: 4963203 - DNA, 25 bp, Homo sapien
agtcatcggccacaatggagagggc

SEQ ID NO: 4963204 - DNA, 25 bp, Homo sapien
catcggccacaatggagagggcccg

SEQ ID NO: 4963205 - DNA, 25 bp, Homo sapien
ccacaatggagagggcccggagctc

SEQ ID NO: 4963206 - DNA, 25 bp, Homo sapien
tcagtcatcggccacaatggagagg

SEQ ID NO: 4963207 - DNA, 25 bp, Homo sapien
cgctgctcatcggagtggcctggct

SEQ ID NO: 4963208 - DNA, 25 bp, Homo sapien
tcccgctgctcatcggagtggcctg

SEQ ID NO: 4963209 - DNA, 25 bp, Homo sapien
ccgctcccgctgctcatcggagtgg

SEQ ID NO: 4963210 - DNA, 25 bp, Homo sapien
ggtctccaaagatcttgtgcatttc

SEQ ID NO: 4963211 - DNA, 25 bp, Homo sapien
atatgcagggcacggaagggctcta

SEQ ID NO: 4963212 - DNA, 25 bp, Homo sapien
ctgtgcagcagcgtgcctttgggga

SEQ ID NO: 4963213 - DNA, 25 bp, Homo sapien
agcagcgtgcctttggggatatgca

SEQ ID NO: 4963214 - DNA, 25 bp, Homo sapien
ggatatgcagggcacggaagggctc

SEQ ID NO: 4963215 - DNA, 25 bp, Homo sapien
gctccaacctggacacgcgggagcc

SEQ ID NO: 4963216 - DNA, 25 bp, Homo sapien
ccaacctggacacgcgggagcctgg

SEQ ID NO: 4963217 - DNA, 25 bp, Homo sapien
acctggacacgcgggagcctggcac

SEQ ID NO: 4963218 - DNA, 25 bp, Homo sapien
ctggacacgcgggagcctggcaccc

SEQ ID NO: 4963219 - DNA, 25 bp, Homo sapien
ctgcctgttcttggcttcaaagtcc

SEQ ID NO: 4963220 - DNA, 25 bp, Homo sapien
gctgccgtagaagcgcggcatctcc

SEQ ID NO: 4963221 - DNA, 25 bp, Homo sapien
tagtcgaggcggctgccgtagaagc

SEQ ID NO: 4963222 - DNA, 25 bp, Homo sapien
cagcagctgcctgttcttggcttca

SEQ ID NO: 4963223 - DNA, 25 bp, Homo sapien
gccatgttgaggctcgggaagacac

SEQ ID NO: 4963224 - DNA, 25 bp, Homo sapien
agccatgttgaggctcgggaagaca

SEQ ID NO: 4963225 - DNA, 25 bp, Homo sapien
aggcctgttcccgcctcttcacagc

SEQ ID NO: 4963226 - DNA, 25 bp, Homo sapien
ccatgttgaggctcgggaagacact

SEQ ID NO: 4963227 - DNA, 25 bp, Homo sapien
cctggctggagatgggtccgctctt

SEQ ID NO: 4963228 - DNA, 25 bp, Homo sapien
tgtcccctggagcttgtgcgaacgt

SEQ ID NO: 4963229 - DNA, 25 bp, Homo sapien
ccaaagtcacgatgaggcagagaag

SEQ ID NO: 4963230 - DNA, 25 bp, Homo sapien
agctttatcacacaacggactaggg

SEQ ID NO: 4963231 - DNA, 25 bp, Homo sapien
ccgccaaagttccaaccagctgctt

SEQ ID NO: 4963232 - DNA, 25 bp, Homo sapien
gccattggaaccgccaaagttccaa

SEQ ID NO: 4963233 - DNA, 25 bp, Homo sapien
tggaaccgccaaagttccaaccagc

SEQ ID NO: 4963234 - DNA, 25 bp, Homo sapien
tgccattggaaccgccaaagttcca

SEQ ID NO: 4963235 - DNA, 25 bp, Homo sapien
gctgataaattacaaccacggtggg

SEQ ID NO: 4963236 - DNA, 25 bp, Homo sapien
tgggaactcacatcagtcagggcag

SEQ ID NO: 4963237 - DNA, 25 bp, Homo sapien
cagggagctcatgactctgtggcca

SEQ ID NO: 4963238 - DNA, 25 bp, Homo sapien
tgatccttgtgttagaagccacctg

SEQ ID NO: 4963239 - DNA, 25 bp, Homo sapien
tgtcctaaggctcaatatcaaactc

SEQ ID NO: 4963240 - DNA, 25 bp, Homo sapien
tgacctgagaacacgctgtggcttt

SEQ ID NO: 4963241 - DNA, 25 bp, Homo sapien
aaagcattacccatgatcactgccc

SEQ ID NO: 4963242 - DNA, 25 bp, Homo sapien
ggcccaggccagtgatcaaagcatt

SEQ ID NO: 4963243 - DNA, 25 bp, Homo sapien
gatgagcctcatagaagcattcctg

SEQ ID NO: 4963244 - DNA, 25 bp, Homo sapien
gaaagcatccccatccgacatgtga

SEQ ID NO: 4963245 - DNA, 25 bp, Homo sapien
aaacaagagcttgctagggtcaggc

SEQ ID NO: 4963246 - DNA, 25 bp, Homo sapien
cgacatgtgaatacggcccagagac

SEQ ID NO: 4963247 - DNA, 25 bp, Homo sapien
ggtcaaatgaccaccagaacagcgg

SEQ ID NO: 4963248 - DNA, 25 bp, Homo sapien
gctctcaatcaggaggaagcggtca

SEQ ID NO: 4963249 - DNA, 25 bp, Homo sapien
tgctagctccattcagcaagccctg

SEQ ID NO: 4963250 - DNA, 25 bp, Homo sapien
aaggccttgctcatgtccgctgagg

SEQ ID NO: 4963251 - DNA, 25 bp, Homo sapien
ggtaccctgagctcgcctgggccat

SEQ ID NO: 4963252 - DNA, 25 bp, Homo sapien
agaaatcctcttcagtccccaagtg

SEQ ID NO: 4963253 - DNA, 25 bp, Homo sapien
gcatggacgcttaggccacaggtca

SEQ ID NO: 4963254 - DNA, 25 bp, Homo sapien
actgagtttcccgtcaggccccatg

SEQ ID NO: 4963255 - DNA, 25 bp, Homo sapien
tttttaagggctcgatcacagtctt

SEQ ID NO: 4963256 - DNA, 25 bp, Homo sapien
ttttttaagggctcgatcacagtct

SEQ ID NO: 4963257 - DNA, 25 bp, Homo sapien
acacgaggccagagggcttagagcc

SEQ ID NO: 4963258 - DNA, 25 bp, Homo sapien
gagccctgtgggcttgcagcacctt

SEQ ID NO: 4963259 - DNA, 25 bp, Homo sapien
acatgagctcgtggagcctcaggag

SEQ ID NO: 4963260 - DNA, 25 bp, Homo sapien
gtaagtaacatgagctcgtggagcc

SEQ ID NO: 4963261 - DNA, 25 bp, Homo sapien
gaaggtcctggtcttgctcacagag

SEQ ID NO: 4963262 - DNA, 25 bp, Homo sapien
gaaggcatccatccgcttcatggcc

SEQ ID NO: 4963263 - DNA, 25 bp, Homo sapien
ttcatggccgtgtccagggccgtca

SEQ ID NO: 4963264 - DNA, 25 bp, Homo sapien
taagtccaaggatatcttcacggca

SEQ ID NO: 4963265 - DNA, 25 bp, Homo sapien
ctatgaaggggcaggtttcacggcc

SEQ ID NO: 4963266 - DNA, 25 bp, Homo sapien
ctgtgggaagccaaagctcggtgaa

SEQ ID NO: 4963267 - DNA, 25 bp, Homo sapien
agctcggtgaaccttctatgaaggg

SEQ ID NO: 4963268 - DNA, 25 bp, Homo sapien
gccaaagctcggtgaaccttctatg

SEQ ID NO: 4963269 - DNA, 25 bp, Homo sapien
taccacacaaccacaagctgctgat

SEQ ID NO: 4963270 - DNA, 25 bp, Homo sapien
gtcaagaacggcgaagtaccacaca

SEQ ID NO: 4963271 - DNA, 25 bp, Homo sapien
acagccacggccgtcaagaacggcg

SEQ ID NO: 4963272 - DNA, 25 bp, Homo sapien
gcgaagtaccacacaaccacaagct

SEQ ID NO: 4963273 - DNA, 25 bp, Homo sapien
gacgtgatgcttggtttgggactcc

SEQ ID NO: 4963274 - DNA, 25 bp, Homo sapien
aactaggtcagattaggccagcagc

SEQ ID NO: 4963275 - DNA, 25 bp, Homo sapien
tatccagtaggaagagatacgctgg

SEQ ID NO: 4963276 - DNA, 25 bp, Homo sapien
cagacaattcttttgagccgcttta

SEQ ID NO: 4963277 - DNA, 25 bp, Homo sapien
ttcaggcctccattatttctagatt

SEQ ID NO: 4963278 - DNA, 25 bp, Homo sapien
acaaaattctggaggggcaggaagc

SEQ ID NO: 4963279 - DNA, 25 bp, Homo sapien
gttttcaggcctccattatttctag

SEQ ID NO: 4963280 - DNA, 25 bp, Homo sapien
gccctggagaagggtcatgctggcc

SEQ ID NO: 4963281 - DNA, 25 bp, Homo sapien
tgggtctggaatccccgcccagtga

SEQ ID NO: 4963282 - DNA, 25 bp, Homo sapien
cattgtcaggaagtcaaggaactga

SEQ ID NO: 4963283 - DNA, 25 bp, Homo sapien
gggcagaactgggtctggaatcccc

SEQ ID NO: 4963284 - DNA, 25 bp, Homo sapien
agctcttgcattgtcaggaagtcaa

SEQ ID NO: 4963285 - DNA, 25 bp, Homo sapien
ttcaggtcctcgtcccagtgtggta

SEQ ID NO: 4963286 - DNA, 25 bp, Homo sapien
tattgaccttgcacgccacgacgtg

SEQ ID NO: 4963287 - DNA, 25 bp, Homo sapien
tgctgccgaccatgacgacggtgat

SEQ ID NO: 4963288 - DNA, 25 bp, Homo sapien
cattatataccgatccgcttgtgga

SEQ ID NO: 4963289 - DNA, 25 bp, Homo sapien
cacggagtctcgtttctgcgggaag

SEQ ID NO: 4963290 - DNA, 25 bp, Homo sapien
tgaggcaatggaggcatctgctacc

SEQ ID NO: 4963291 - DNA, 25 bp, Homo sapien
tggatgctcccttattcccgacctg

SEQ ID NO: 4963292 - DNA, 25 bp, Homo sapien
tcccggtgccctttgtcatcataga

SEQ ID NO: 4963293 - DNA, 25 bp, Homo sapien
ccaggtctgcgtcggtgctcttctt

SEQ ID NO: 4963294 - DNA, 25 bp, Homo sapien
atgtctttctgcagcctccgggtct

SEQ ID NO: 4963295 - DNA, 25 bp, Homo sapien
ggtctgcgtcggtgctcttcttcat

SEQ ID NO: 4963296 - DNA, 25 bp, Homo sapien
ctgcgtcggtgctcttcttcatgtc

SEQ ID NO: 4963297 - DNA, 25 bp, Homo sapien
ctgagcgaagcccaggtgctctgga

SEQ ID NO: 4963298 - DNA, 25 bp, Homo sapien
gagcgaagcccaggtgctctggagg

SEQ ID NO: 4963299 - DNA, 25 bp, Homo sapien
tgagcgaagcccaggtgctctggag

SEQ ID NO: 4963300 - DNA, 25 bp, Homo sapien
gcgaagcccaggtgctctggagggc

SEQ ID NO: 4963301 - DNA, 25 bp, Homo sapien
tgaagttttccatactccctttcaa

SEQ ID NO: 4963302 - DNA, 25 bp, Homo sapien
actccctttcaaagtctctctccac

SEQ ID NO: 4963303 - DNA, 25 bp, Homo sapien
tgctgaagttttccatactcccttt

SEQ ID NO: 4963304 - DNA, 25 bp, Homo sapien
tactccctttcaaagtctctctcca

SEQ ID NO: 4963305 - DNA, 25 bp, Homo sapien
ccttttgaggattaagaggcagtgc

SEQ ID NO: 4963306 - DNA, 25 bp, Homo sapien
tagctgatatcatctaccccagtgg

SEQ ID NO: 4963307 - DNA, 25 bp, Homo sapien
tataaacctgggctataagctgccc

SEQ ID NO: 4963308 - DNA, 25 bp, Homo sapien
ggcccatggcagtcctcactaaatg

SEQ ID NO: 4963309 - DNA, 25 bp, Homo sapien
gactaaagggacacactggagcctc

SEQ ID NO: 4963310 - DNA, 25 bp, Homo sapien
taaccttgcaggatatgacagctga

SEQ ID NO: 4963311 - DNA, 25 bp, Homo sapien
taaacacatgtgcacggaccatcag

SEQ ID NO: 4963312 - DNA, 25 bp, Homo sapien
tacttggtgccgctcaaggccatct

SEQ ID NO: 4963313 - DNA, 25 bp, Homo sapien
gcaggattaacgaggctaagggccc

SEQ ID NO: 4963314 - DNA, 25 bp, Homo sapien
agcattctgggaagcccctccttca

SEQ ID NO: 4963315 - DNA, 25 bp, Homo sapien
tatgttctagcaggattaagcagga

SEQ ID NO: 4963316 - DNA, 25 bp, Homo sapien
gcatctgatcggagtctgagaagcc

SEQ ID NO: 4963317 - DNA, 25 bp, Homo sapien
ttgccctaactttgcagagcaccca

SEQ ID NO: 4963318 - DNA, 25 bp, Homo sapien
ggccagactctctttgccctaactt

SEQ ID NO: 4963319 - DNA, 25 bp, Homo sapien
gactctctttgccctaactttgcag

SEQ ID NO: 4963320 - DNA, 25 bp, Homo sapien
tctttgccctaactttgcagagcac

SEQ ID NO: 4963321 - DNA, 25 bp, Homo sapien
tctttgtgcctgacagttgggtgcc

SEQ ID NO: 4963322 - DNA, 25 bp, Homo sapien
tcagttctaatggtcagccccagca

SEQ ID NO: 4963323 - DNA, 25 bp, Homo sapien
aaggtgtggcggcttcttcctacgc

SEQ ID NO: 4963324 - DNA, 25 bp, Homo sapien
ggtgccttgagccaaaaacctcctg

SEQ ID NO: 4963325 - DNA, 25 bp, Homo sapien
aaggctattttgcaccgggattcca

SEQ ID NO: 4963326 - DNA, 25 bp, Homo sapien
caaaacactgggagggcttcactgc

SEQ ID NO: 4963327 - DNA, 25 bp, Homo sapien
tctggatttgctagagatggagcca

SEQ ID NO: 4963328 - DNA, 25 bp, Homo sapien
tcagagaggctctacagttgtggtc

SEQ ID NO: 4963329 - DNA, 25 bp, Homo sapien
tgtttcttgggctgcccaatcttaa

SEQ ID NO: 4963330 - DNA, 25 bp, Homo sapien
aatctgtttcttgggctgcccaatc

SEQ ID NO: 4963331 - DNA, 25 bp, Homo sapien
tgttttgggcacaatctgtttcttg

SEQ ID NO: 4963332 - DNA, 25 bp, Homo sapien
tgggctgcccaatcttaaaaggaat

SEQ ID NO: 4963333 - DNA, 25 bp, Homo sapien
ggtgcaaactcagaaattacagact

SEQ ID NO: 4963334 - DNA, 25 bp, Homo sapien
tagctatcatccttgaaatcacgaa

SEQ ID NO: 4963335 - DNA, 25 bp, Homo sapien
tcttgaggaggtgcaaactcagaaa

SEQ ID NO: 4963336 - DNA, 25 bp, Homo sapien
gaaattacagactcactgtaatagc

SEQ ID NO: 4963337 - DNA, 25 bp, Homo sapien
taaagatcagattctccctgcgatg

SEQ ID NO: 4963338 - DNA, 25 bp, Homo sapien
cagagaagtcggcaaaaaactgggc

SEQ ID NO: 4963339 - DNA, 25 bp, Homo sapien
gctgggtttattccgaggctgccaa

SEQ ID NO: 4963340 - DNA, 25 bp, Homo sapien
gggtccagcaacagtacattcagtg

SEQ ID NO: 4963341 - DNA, 25 bp, Homo sapien
ttatcgagagccatctaggtccggc

SEQ ID NO: 4963342 - DNA, 25 bp, Homo sapien
gagccatctaggtccggcagaacag

SEQ ID NO: 4963343 - DNA, 25 bp, Homo sapien
atctaggtccggcagaacagctgct

SEQ ID NO: 4963344 - DNA, 25 bp, Homo sapien
tcgagagccatctaggtccggcaga

SEQ ID NO: 4963345 - DNA, 25 bp, Homo sapien
cctcttctctgctgaaagtttggcc

SEQ ID NO: 4963346 - DNA, 25 bp, Homo sapien
ctttttcctcttctctgctgaaagt

SEQ ID NO: 4963347 - DNA, 25 bp, Homo sapien
tcctcttctctgctgaaagtttggc

SEQ ID NO: 4963348 - DNA, 25 bp, Homo sapien
tttcctcttctctgctgaaagtttg

SEQ ID NO: 4963349 - DNA, 25 bp, Homo sapien
tctccttgttatcctagagtaacca

SEQ ID NO: 4963350 - DNA, 25 bp, Homo sapien
gagacagtctcactacgctccccag

SEQ ID NO: 4963351 - DNA, 25 bp, Homo sapien
tggcccctgagattccatttccttc

SEQ ID NO: 4963352 - DNA, 25 bp, Homo sapien
gctccccaggttagtctccatctcc

SEQ ID NO: 4963353 - DNA, 25 bp, Homo sapien
gccagccattgagctaggaactgag

SEQ ID NO: 4963354 - DNA, 25 bp, Homo sapien
gagaattccagtctcacatgaatgg

SEQ ID NO: 4963355 - DNA, 25 bp, Homo sapien
catgatggctctacgtcactctggt

SEQ ID NO: 4963356 - DNA, 25 bp, Homo sapien
gggagtgaatcagaaggacccagcc

SEQ ID NO: 4963357 - DNA, 25 bp, Homo sapien
ctttattagtttctgctgtgctctt

SEQ ID NO: 4963358 - DNA, 25 bp, Homo sapien
agtttctgctgtgctcttctcccaa

SEQ ID NO: 4963359 - DNA, 25 bp, Homo sapien
tattagtttctgctgtgctcttctc

SEQ ID NO: 4963360 - DNA, 25 bp, Homo sapien
attagtttctgctgtgctcttctcc

SEQ ID NO: 4963361 - DNA, 25 bp, Homo sapien
tcgtgcaaagaggatagttacccag

SEQ ID NO: 4963362 - DNA, 25 bp, Homo sapien
tccaaagattcaagacgcagcagcc

SEQ ID NO: 4963363 - DNA, 25 bp, Homo sapien
tgctgagagactgcgactccggaaa

SEQ ID NO: 4963364 - DNA, 25 bp, Homo sapien
tcacttcaaggagctaggaggacgc

SEQ ID NO: 4963365 - DNA, 25 bp, Homo sapien
actcgtttctctagggtcacttccg

SEQ ID NO: 4963366 - DNA, 25 bp, Homo sapien
tcagccacaactcgtttctctaggg

SEQ ID NO: 4963367 - DNA, 25 bp, Homo sapien
ccggattcaaccagtctccaggaag

SEQ ID NO: 4963368 - DNA, 25 bp, Homo sapien
tctccaggaagtgacgtaagcccgc

SEQ ID NO: 4963369 - DNA, 25 bp, Homo sapien
tgcgttcctgggcaacctagagctg

SEQ ID NO: 4963370 - DNA, 25 bp, Homo sapien
ggagaaggtctgtgagatgccccac

SEQ ID NO: 4963371 - DNA, 25 bp, Homo sapien
ttggtgtgctctggcctcaaaaagc

SEQ ID NO: 4963372 - DNA, 25 bp, Homo sapien
gctgccatagagagtgtccagtcct

SEQ ID NO: 4963373 - DNA, 25 bp, Homo sapien
tcacagtcattagcccttgctgcct

SEQ ID NO: 4963374 - DNA, 25 bp, Homo sapien
cacagtcattagcccttgctgcctc

SEQ ID NO: 4963375 - DNA, 25 bp, Homo sapien
aagtccctcttgatttggttgttgc

SEQ ID NO: 4963376 - DNA, 25 bp, Homo sapien
gaaggtcaaatccaagtccctcttg

SEQ ID NO: 4963377 - DNA, 25 bp, Homo sapien
gcctggtggactgaaggtcaaatcc

SEQ ID NO: 4963378 - DNA, 25 bp, Homo sapien
gatgaggcctggtggactgaaggtc

SEQ ID NO: 4963379 - DNA, 25 bp, Homo sapien
caggtggcaattatccccgggcact

SEQ ID NO: 4963380 - DNA, 25 bp, Homo sapien
ttatccccgggcactgattacacca

SEQ ID NO: 4963381 - DNA, 25 bp, Homo sapien
tgattacaccacaaggccggcagtg

SEQ ID NO: 4963382 - DNA, 25 bp, Homo sapien
cagggcaggtggcaattatccccgg

SEQ ID NO: 4963383 - DNA, 25 bp, Homo sapien
gcacacagcaggacggaagagaggc

SEQ ID NO: 4963384 - DNA, 25 bp, Homo sapien
ggcacacagcaggacggaagagagg

SEQ ID NO: 4963385 - DNA, 25 bp, Homo sapien
agcaggacggaagagaggccaaaca

SEQ ID NO: 4963386 - DNA, 25 bp, Homo sapien
aggacggaagagaggccaaacaagg

SEQ ID NO: 4963387 - DNA, 25 bp, Homo sapien
cttcccacgtggagagcctatatct

SEQ ID NO: 4963388 - DNA, 25 bp, Homo sapien
tttcttcttgtataagcaccagttc

SEQ ID NO: 4963389 - DNA, 25 bp, Homo sapien
gcctatatctattgcatcttcccca

SEQ ID NO: 4963390 - DNA, 25 bp, Homo sapien
tcttgtataagcaccagttcttctg

SEQ ID NO: 4963391 - DNA, 25 bp, Homo sapien
tggggaggggctgcccgggctgtgg

SEQ ID NO: 4963392 - DNA, 25 bp, Homo sapien
gaggggctgcccgggctgtgggggc

SEQ ID NO: 4963393 - DNA, 25 bp, Homo sapien
tgcccgggctgtgggggccttgggc

SEQ ID NO: 4963394 - DNA, 25 bp, Homo sapien
ggctgcccgggctgtgggggccttg

SEQ ID NO: 4963395 - DNA, 25 bp, Homo sapien
tgtggaacctgactctaagcacctc

SEQ ID NO: 4963396 - DNA, 25 bp, Homo sapien
cacttagggtctaatgcacagggag

SEQ ID NO: 4963397 - DNA, 25 bp, Homo sapien
aaaagaggccggcagactcagagtc

SEQ ID NO: 4963398 - DNA, 25 bp, Homo sapien
gaggctcagccaagttaagaaattc

SEQ ID NO: 4963399 - DNA, 25 bp, Homo sapien
cagagccatggtaggtggaggtcac

SEQ ID NO: 4963400 - DNA, 25 bp, Homo sapien
tgaggagctggcgtctacagagcca

SEQ ID NO: 4963401 - DNA, 25 bp, Homo sapien
aagatggaggctccccgtatccctc

SEQ ID NO: 4963402 - DNA, 25 bp, Homo sapien
ggagggatgttgttcctgtaccaaa

SEQ ID NO: 4963403 - DNA, 25 bp, Homo sapien
taaccccggtgcctagaagaatgtg

SEQ ID NO: 4963404 - DNA, 25 bp, Homo sapien
agaagactttcattagcaccctggg

SEQ ID NO: 4963405 - DNA, 25 bp, Homo sapien
gaactcagtgcgtgacccaaaaggg

SEQ ID NO: 4963406 - DNA, 25 bp, Homo sapien
gcacttggcgcatagaaagtcctca

SEQ ID NO: 4963407 - DNA, 25 bp, Homo sapien
cattgcaaagcctctactgattccc

SEQ ID NO: 4963408 - DNA, 25 bp, Homo sapien
aaaaacgtatgccatgccttgcccc

SEQ ID NO: 4963409 - DNA, 25 bp, Homo sapien
tggaaggagctatgcctctacccct

SEQ ID NO: 4963410 - DNA, 25 bp, Homo sapien
gatgcctgattttgccctagggcac

SEQ ID NO: 4963411 - DNA, 25 bp, Homo sapien
catagaaatctggaaggaaacatct

SEQ ID NO: 4963412 - DNA, 25 bp, Homo sapien
gcaaagagatggattatatgctcaa

SEQ ID NO: 4963413 - DNA, 25 bp, Homo sapien
tatgctcaatgttaggacctttccg

SEQ ID NO: 4963414 - DNA, 25 bp, Homo sapien
tctatgaggctattgaagccacagt

SEQ ID NO: 4963415 - DNA, 25 bp, Homo sapien
ggaattcaagatggcagccggtgac

SEQ ID NO: 4963416 - DNA, 25 bp, Homo sapien
ttcatgaggtaagagaagggaattc

SEQ ID NO: 4963417 - DNA, 25 bp, Homo sapien
aagtttcatgaggtaagagaaggga

SEQ ID NO: 4963418 - DNA, 25 bp, Homo sapien
tttagaagtttcatgaggtaagaga

SEQ ID NO: 4963419 - DNA, 25 bp, Homo sapien
ggcctcaacttcttggtaactatag

SEQ ID NO: 4963420 - DNA, 25 bp, Homo sapien
ctgagcagggacacgacatttctgt

SEQ ID NO: 4963421 - DNA, 25 bp, Homo sapien
gattccagtcacaagctggtgggcc

SEQ ID NO: 4963422 - DNA, 25 bp, Homo sapien
gccaaccagaaataccacccatatt

SEQ ID NO: 4963423 - DNA, 25 bp, Homo sapien
gctgaaaaaatatgggccctcctgg

SEQ ID NO: 4963424 - DNA, 25 bp, Homo sapien
tgaccacaggagaagtaacgctaac

SEQ ID NO: 4963425 - DNA, 25 bp, Homo sapien
aaaggagccaccctgtacgagaagg

SEQ ID NO: 4963426 - DNA, 25 bp, Homo sapien
tttcagagcggatggaagaccacct

SEQ ID NO: 4963427 - DNA, 25 bp, Homo sapien
aagatgccggcgctcatgaggctaa

SEQ ID NO: 4963428 - DNA, 25 bp, Homo sapien
ctgaagctccgcatgcagatccggc

SEQ ID NO: 4963429 - DNA, 25 bp, Homo sapien
agagattgctgtccaacgccggctt

SEQ ID NO: 4963430 - DNA, 25 bp, Homo sapien
tgggcttctcgttggtcagaccgat

SEQ ID NO: 4963431 - DNA, 25 bp, Homo sapien
ccttgcccaggtgcggagggtgcgg

SEQ ID NO: 4963432 - DNA, 25 bp, Homo sapien
agtgaagccgatccggctccgggcc

SEQ ID NO: 4963433 - DNA, 25 bp, Homo sapien
cggccgggtggagtgcgtagcgcat

SEQ ID NO: 4963434 - DNA, 25 bp, Homo sapien
gggtaagaggaacgctgagccccgc

SEQ ID NO: 4963435 - DNA, 25 bp, Homo sapien
tggatatagcaaaatactacggatc

SEQ ID NO: 4963436 - DNA, 25 bp, Homo sapien
acacagcgcacaagccgcgcacaca

SEQ ID NO: 4963437 - DNA, 25 bp, Homo sapien
atatagcaaaatactacggatcggg

SEQ ID NO: 4963438 - DNA, 25 bp, Homo sapien
cacacacagcgcacaagccgcgcac

SEQ ID NO: 4963439 - DNA, 25 bp, Homo sapien
gtagccatctgattgtaatggacta

SEQ ID NO: 4963440 - DNA, 25 bp, Homo sapien
ctgtagccatctgattgtaatggac

SEQ ID NO: 4963441 - DNA, 25 bp, Homo sapien
tagccatctgattgtaatggactac

SEQ ID NO: 4963442 - DNA, 25 bp, Homo sapien
tgtagccatctgattgtaatggact

SEQ ID NO: 4963443 - DNA, 25 bp, Homo sapien
tgccggagaagaggttgagcgcgct

SEQ ID NO: 4963444 - DNA, 25 bp, Homo sapien
gcagttggtttagcaaactgctcat

SEQ ID NO: 4963445 - DNA, 25 bp, Homo sapien
tcctcggggtacagattgtcaggca

SEQ ID NO: 4963446 - DNA, 25 bp, Homo sapien
tcgctgctgccggagaagaggttga

SEQ ID NO: 4963447 - DNA, 25 bp, Homo sapien
gcagcttctcggcgagtttgccggt

SEQ ID NO: 4963448 - DNA, 25 bp, Homo sapien
gcttctcggcgagtttgccggtcat

SEQ ID NO: 4963449 - DNA, 25 bp, Homo sapien
cggcagcttctcggcgagtttgccg

SEQ ID NO: 4963450 - DNA, 25 bp, Homo sapien
agcttctcggcgagtttgccggtca

SEQ ID NO: 4963451 - DNA, 25 bp, Homo sapien
catccgagaggcgatccgtggtgca

SEQ ID NO: 4963452 - DNA, 25 bp, Homo sapien
aaaagcatgcgagagggaaagttcg

SEQ ID NO: 4963453 - DNA, 25 bp, Homo sapien
agcttccaggcaagcggcatccgag

SEQ ID NO: 4963454 - DNA, 25 bp, Homo sapien
cgccgctcgctcctaacgcagcttc

SEQ ID NO: 4963455 - DNA, 25 bp, Homo sapien
tgtttgcaagtggtctccaacaccc

SEQ ID NO: 4963456 - DNA, 25 bp, Homo sapien
gcgaaatccctttgcagcccgggaa

SEQ ID NO: 4963457 - DNA, 25 bp, Homo sapien
ccccagcagttagaaagagagttga

SEQ ID NO: 4963458 - DNA, 25 bp, Homo sapien
tccagcgttcgggatcctatccgag

SEQ ID NO: 4963459 - DNA, 25 bp, Homo sapien
gaggaactcccgagctgcacgttgt

SEQ ID NO: 4963460 - DNA, 25 bp, Homo sapien
taaacacgtgcactgaatccccagt

SEQ ID NO: 4963461 - DNA, 25 bp, Homo sapien
taacggttccaagcagcctctgtgg

SEQ ID NO: 4963462 - DNA, 25 bp, Homo sapien
gcagttgcgccaaagacaagagccc

SEQ ID NO: 4963463 - DNA, 25 bp, Homo sapien
tcatcctcgatgatggtggcagatg

SEQ ID NO: 4963464 - DNA, 25 bp, Homo sapien
agtgcctgttcaggttgcagcctgc

SEQ ID NO: 4963465 - DNA, 25 bp, Homo sapien
ctacaaggttaggccctcagtgccc

SEQ ID NO: 4963466 - DNA, 25 bp, Homo sapien
tgttcaggttgcagcctgcaaagat

SEQ ID NO: 4963467 - DNA, 25 bp, Homo sapien
tgaatggcagttctcttgagggtcc

SEQ ID NO: 4963468 - DNA, 25 bp, Homo sapien
cctagcgttctagaggtcattgtca

SEQ ID NO: 4963469 - DNA, 25 bp, Homo sapien
tgtgccacagggcttcataggcgat

SEQ ID NO: 4963470 - DNA, 25 bp, Homo sapien
gatggacaagtcacagtggaatcct

SEQ ID NO: 4963471 - DNA, 25 bp, Homo sapien
ggccaggccttgtggacacatttca

SEQ ID NO: 4963472 - DNA, 25 bp, Homo sapien
cttggccaggccttgtggacacatt

SEQ ID NO: 4963473 - DNA, 25 bp, Homo sapien
acagccttaatctccttggctcaaa

SEQ ID NO: 4963474 - DNA, 25 bp, Homo sapien
gccttgtggacacatttcattttct

SEQ ID NO: 4963475 - DNA, 25 bp, Homo sapien
gaaggaagatcttagaaggtgagac

SEQ ID NO: 4963476 - DNA, 25 bp, Homo sapien
tacaaagtggattgtcctggagact

SEQ ID NO: 4963477 - DNA, 25 bp, Homo sapien
gatacaagtccaagacagcgagtca

SEQ ID NO: 4963478 - DNA, 25 bp, Homo sapien
ctggccagaaaaagtaccatttact

SEQ ID NO: 4963479 - DNA, 25 bp, Homo sapien
ccaaaggctggcagattcctcttct

SEQ ID NO: 4963480 - DNA, 25 bp, Homo sapien
gacagacgctgatccaaaggctggc

SEQ ID NO: 4963481 - DNA, 25 bp, Homo sapien
caaaggctggcagattcctcttctc

SEQ ID NO: 4963482 - DNA, 25 bp, Homo sapien
cagacgctgatccaaaggctggcag

SEQ ID NO: 4963483 - DNA, 25 bp, Homo sapien
gaactcccgtgcattcttggtggaa

SEQ ID NO: 4963484 - DNA, 25 bp, Homo sapien
tcaatgagggcaacatctacggaga

SEQ ID NO: 4963485 - DNA, 25 bp, Homo sapien
agaattccattttgcggcgggcgca

SEQ ID NO: 4963486 - DNA, 25 bp, Homo sapien
taagacatgatgcacgtccagagga

SEQ ID NO: 4963487 - DNA, 25 bp, Homo sapien
ccgagatgcctcccggttttctcat

SEQ ID NO: 4963488 - DNA, 25 bp, Homo sapien
tccgagatgcctcccggttttctca

SEQ ID NO: 4963489 - DNA, 25 bp, Homo sapien
ctccgagatgcctcccggttttctc

SEQ ID NO: 4963490 - DNA, 25 bp, Homo sapien
ctctgagccccgagggcgtttttca

SEQ ID NO: 4963491 - DNA, 25 bp, Homo sapien
tctgagccccgagggcgtttttcat

SEQ ID NO: 4963492 - DNA, 25 bp, Homo sapien
ctgctctgagccccgagggcgtttt

SEQ ID NO: 4963493 - DNA, 25 bp, Homo sapien
gctctgagccccgagggcgtttttc

SEQ ID NO: 4963494 - DNA, 25 bp, Homo sapien
ttttttccgcaagggccagagctct

SEQ ID NO: 4963495 - DNA, 25 bp, Homo sapien
cagagactggttcgaatccctggtg

SEQ ID NO: 4963496 - DNA, 25 bp, Homo sapien
ctaggttgccggaaatcgtccccag

SEQ ID NO: 4963497 - DNA, 25 bp, Homo sapien
ttcacagagtcaaaccccaagcatc

SEQ ID NO: 4963498 - DNA, 25 bp, Homo sapien
caaaggcctggcatggtctggcctt

SEQ ID NO: 4963499 - DNA, 25 bp, Homo sapien
catgcctggcccaatctacttatca

SEQ ID NO: 4963500 - DNA, 25 bp, Homo sapien
ttgcccacccgtcatactgttcttg

SEQ ID NO: 4963501 - DNA, 25 bp, Homo sapien
catactttgcggcagccacagcatg

SEQ ID NO: 4963502 - DNA, 25 bp, Homo sapien
gggttccatacccacatcgtcggtg

SEQ ID NO: 4963503 - DNA, 25 bp, Homo sapien
gcaaagccggctatctagcaggcag

SEQ ID NO: 4963504 - DNA, 25 bp, Homo sapien
ggttctgtatccagagggggttcca

SEQ ID NO: 4963505 - DNA, 25 bp, Homo sapien
ccacatgcccggatggcaaagccgg

SEQ ID NO: 4963506 - DNA, 25 bp, Homo sapien
ggtgcttgcttcaggttcgcccagg

SEQ ID NO: 4963507 - DNA, 25 bp, Homo sapien
ctggtttttgtgcttgggctcgctg

SEQ ID NO: 4963508 - DNA, 25 bp, Homo sapien
ttcgcccaggtggaaacggttcaga

SEQ ID NO: 4963509 - DNA, 25 bp, Homo sapien
gtggaaacggttcagaaatctgtcc

SEQ ID NO: 4963510 - DNA, 25 bp, Homo sapien
tggtgtgtggcaggaacagggacga

SEQ ID NO: 4963511 - DNA, 25 bp, Homo sapien
taatacgggcttatgggtgaattgg

SEQ ID NO: 4963512 - DNA, 25 bp, Homo sapien
cacatgccagggtaatacgggctta

SEQ ID NO: 4963513 - DNA, 25 bp, Homo sapien
tgtgcgcacgcgcacatgccagggt

SEQ ID NO: 4963514 - DNA, 25 bp, Homo sapien
agaactggtagcgatggaagccact

SEQ ID NO: 4963515 - DNA, 25 bp, Homo sapien
caaagaactggtagcgatggaagcc

SEQ ID NO: 4963516 - DNA, 25 bp, Homo sapien
aaagaactggtagcgatggaagcca

SEQ ID NO: 4963517 - DNA, 25 bp, Homo sapien
aactggtagcgatggaagccactgt

SEQ ID NO: 4963518 - DNA, 25 bp, Homo sapien
ctgataactcctggccctgaatctt

SEQ ID NO: 4963519 - DNA, 25 bp, Homo sapien
atcttccctttcttcaggtcggcgc

SEQ ID NO: 4963520 - DNA, 25 bp, Homo sapien
aatcttccctttcttcaggtcggcg

SEQ ID NO: 4963521 - DNA, 25 bp, Homo sapien
actcctggccctgaatcttcccttt

SEQ ID NO: 4963522 - DNA, 25 bp, Homo sapien
ctcttgcggagtgcccgtggtgcgc

SEQ ID NO: 4963523 - DNA, 25 bp, Homo sapien
ccgtggtgcgcaggcatctcgccat

SEQ ID NO: 4963524 - DNA, 25 bp, Homo sapien
tgcggagtgcccgtggtgcgcaggc

SEQ ID NO: 4963525 - DNA, 25 bp, Homo sapien
agtgcccgtggtgcgcaggcatctc

SEQ ID NO: 4963526 - DNA, 25 bp, Homo sapien
ggccgcctcaacattggctttggga

SEQ ID NO: 4963527 - DNA, 25 bp, Homo sapien
gatgctgggagaacttcagagctag

SEQ ID NO: 4963528 - DNA, 25 bp, Homo sapien
cagagtggcttaggcaaagtctcca

SEQ ID NO: 4963529 - DNA, 25 bp, Homo sapien
agtgagcgcagatgggctaccgcct

SEQ ID NO: 4963530 - DNA, 25 bp, Homo sapien
tattatctagcggagtgtaacagaa

SEQ ID NO: 4963531 - DNA, 25 bp, Homo sapien
tcttgcctggagtccaaagatctgc

SEQ ID NO: 4963532 - DNA, 25 bp, Homo sapien
aagaggccattattccactcccggg

SEQ ID NO: 4963533 - DNA, 25 bp, Homo sapien
cctgctgctataacggtgactcttc

SEQ ID NO: 4963534 - DNA, 25 bp, Homo sapien
agtgcacactggcagagcatggaga

SEQ ID NO: 4963535 - DNA, 25 bp, Homo sapien
agctggtcagtgcacactggcagag

SEQ ID NO: 4963536 - DNA, 25 bp, Homo sapien
gtgcacactggcagagcatggagaa

SEQ ID NO: 4963537 - DNA, 25 bp, Homo sapien
tcaggagctggtcagtgcacactgg

SEQ ID NO: 4963538 - DNA, 25 bp, Homo sapien
ctcggtctgtttcatcccttttagg

SEQ ID NO: 4963539 - DNA, 25 bp, Homo sapien
ctcttgtccgatttccttctgttgc

SEQ ID NO: 4963540 - DNA, 25 bp, Homo sapien
tcagcgcctctgactcttgtccgat

SEQ ID NO: 4963541 - DNA, 25 bp, Homo sapien
tcccccatggtcttctcggtctgtt

SEQ ID NO: 4963542 - DNA, 25 bp, Homo sapien
ctgcacggcactcctgttgccccag

SEQ ID NO: 4963543 - DNA, 25 bp, Homo sapien
gttctcttctcactcgccctgcacg

SEQ ID NO: 4963544 - DNA, 25 bp, Homo sapien
gcctgctctagctccatcggataca

SEQ ID NO: 4963545 - DNA, 25 bp, Homo sapien
tccatcggatacagggttctcttct

SEQ ID NO: 4963546 - DNA, 25 bp, Homo sapien
gatcctgagggcgtctaaggctcag

SEQ ID NO: 4963547 - DNA, 25 bp, Homo sapien
atggctggactcctccgatcctgag

SEQ ID NO: 4963548 - DNA, 25 bp, Homo sapien
taaggctcagtcttaggtcttccct

SEQ ID NO: 4963549 - DNA, 25 bp, Homo sapien
ggatcagcggaccttcagcagctgg

SEQ ID NO: 4963550 - DNA, 25 bp, Homo sapien
ctgcttggggccggccccgccttgc

SEQ ID NO: 4963551 - DNA, 25 bp, Homo sapien
caccacgtttggatgcccttggcag

SEQ ID NO: 4963552 - DNA, 25 bp, Homo sapien
tgcttggggccggccccgccttgca

SEQ ID NO: 4963553 - DNA, 25 bp, Homo sapien
tgcccaccacgtttggatgcccttg

SEQ ID NO: 4963554 - DNA, 25 bp, Homo sapien
ctagtcaccggtgctagggaagtcc

SEQ ID NO: 4963555 - DNA, 25 bp, Homo sapien
tagtcaccggtgctagggaagtccc

SEQ ID NO: 4963556 - DNA, 25 bp, Homo sapien
agtcaccggtgctagggaagtccct

SEQ ID NO: 4963557 - DNA, 25 bp, Homo sapien
gggaggttccagctgccagcaactg

SEQ ID NO: 4963558 - DNA, 25 bp, Homo sapien
taatagggaacagcaatcccgggag

SEQ ID NO: 4963559 - DNA, 25 bp, Homo sapien
aggactcctggcgtttgcttctgcc

SEQ ID NO: 4963560 - DNA, 25 bp, Homo sapien
agtcacagggaagacgactagctcc

SEQ ID NO: 4963561 - DNA, 25 bp, Homo sapien
cagtcaagggcttgatgggccagca

SEQ ID NO: 4963562 - DNA, 25 bp, Homo sapien
tcagtcaagggcttgatgggccagc

SEQ ID NO: 4963563 - DNA, 25 bp, Homo sapien
acgctccggactgtgggttcctcct

SEQ ID NO: 4963564 - DNA, 25 bp, Homo sapien
cttcccaaacgctccggactgtggg

SEQ ID NO: 4963565 - DNA, 25 bp, Homo sapien
agattcttcccaaacgctccggact

SEQ ID NO: 4963566 - DNA, 25 bp, Homo sapien
caaacgctccggactgtgggttcct

SEQ ID NO: 4963567 - DNA, 25 bp, Homo sapien
ctgcccccaacacgtctcctgccat

SEQ ID NO: 4963568 - DNA, 25 bp, Homo sapien
ccgctttgtagcaacattttattta

SEQ ID NO: 4963569 - DNA, 25 bp, Homo sapien
tccgctttgtagcaacattttattt

SEQ ID NO: 4963570 - DNA, 25 bp, Homo sapien
ttccgctttgtagcaacattttatt

SEQ ID NO: 4963571 - DNA, 25 bp, Homo sapien
cgctttgtagcaacattttatttaa

SEQ ID NO: 4963572 - DNA, 25 bp, Homo sapien
tgacagcagagtgggactgtgagtg

SEQ ID NO: 4963573 - DNA, 25 bp, Homo sapien
gacagcagagtgggactgtgagtga

SEQ ID NO: 4963574 - DNA, 25 bp, Homo sapien
gggtcacgttaggtcctccaggctg

SEQ ID NO: 4963575 - DNA, 25 bp, Homo sapien
tctgctctggttcaggaggtcacag

SEQ ID NO: 4963576 - DNA, 25 bp, Homo sapien
aatgatgggactgaccaaaggcttc

SEQ ID NO: 4963577 - DNA, 25 bp, Homo sapien
gcttccaggctccaacacgctttgg

SEQ ID NO: 4963578 - DNA, 25 bp, Homo sapien
ctaagagatggcatcattcaacttc

SEQ ID NO: 4963579 - DNA, 25 bp, Homo sapien
aagagatggcatcattcaacttctc

SEQ ID NO: 4963580 - DNA, 25 bp, Homo sapien
gctaagagatggcatcattcaactt

SEQ ID NO: 4963581 - DNA, 25 bp, Homo sapien
taagagatggcatcattcaacttct

SEQ ID NO: 4963582 - DNA, 25 bp, Homo sapien
gctaaattcatgttcgttgtacaga

SEQ ID NO: 4963583 - DNA, 25 bp, Homo sapien
aattcatgttcgttgtacagagctc

SEQ ID NO: 4963584 - DNA, 25 bp, Homo sapien
taaattcatgttcgttgtacagagc

SEQ ID NO: 4963585 - DNA, 25 bp, Homo sapien
ttcatgttcgttgtacagagctcct

SEQ ID NO: 4963586 - DNA, 25 bp, Homo sapien
ccatcaccaggatataggttgcgcc

SEQ ID NO: 4963587 - DNA, 25 bp, Homo sapien
ggcatctggatccaccatcaccagg

SEQ ID NO: 4963588 - DNA, 25 bp, Homo sapien
gttaccagccaatgtctccagaatc

SEQ ID NO: 4963589 - DNA, 25 bp, Homo sapien
tctgtctgggttctgctctgctagg

SEQ ID NO: 4963590 - DNA, 25 bp, Homo sapien
ctgtaacacatgtaccgaaaagtaa

SEQ ID NO: 4963591 - DNA, 25 bp, Homo sapien
gtaccgaaaagtaatgtagcgtcat

SEQ ID NO: 4963592 - DNA, 25 bp, Homo sapien
gtaacacatgtaccgaaaagtaatg

SEQ ID NO: 4963593 - DNA, 25 bp, Homo sapien
cacatgtaccgaaaagtaatgtagc

SEQ ID NO: 4963594 - DNA, 25 bp, Homo sapien
ctaattcattatccccaagaggtga

SEQ ID NO: 4963595 - DNA, 25 bp, Homo sapien
cttgggtagatcgtgacttttagga

SEQ ID NO: 4963596 - DNA, 25 bp, Homo sapien
gagaaactggcggatggtcgattca

SEQ ID NO: 4963597 - DNA, 25 bp, Homo sapien
gcggatggtcgattcacagtggatt

SEQ ID NO: 4963598 - DNA, 25 bp, Homo sapien
gccaatccatgaatggaatcatcta

SEQ ID NO: 4963599 - DNA, 25 bp, Homo sapien
caatccatgaatggaatcatctagg

SEQ ID NO: 4963600 - DNA, 25 bp, Homo sapien
ccaatccatgaatggaatcatctag

SEQ ID NO: 4963601 - DNA, 25 bp, Homo sapien
ttttcacttggctgctgagcctgtg

SEQ ID NO: 4963602 - DNA, 25 bp, Homo sapien
gctgagcctgtgataactgaagtgt

SEQ ID NO: 4963603 - DNA, 25 bp, Homo sapien
tgaagtgtcaccactgcgatgccca

SEQ ID NO: 4963604 - DNA, 25 bp, Homo sapien
actgaagtgtcaccactgcgatgcc

SEQ ID NO: 4963605 - DNA, 25 bp, Homo sapien
agccaagtaagaggttgtgtcactg

SEQ ID NO: 4963606 - DNA, 25 bp, Homo sapien
tccctcatgaggttgaacccactgg

SEQ ID NO: 4963607 - DNA, 25 bp, Homo sapien
ctcatgaggttgaacccactgggcc

SEQ ID NO: 4963608 - DNA, 25 bp, Homo sapien
cagggagtctaggtttgcaccccaa

SEQ ID NO: 4963609 - DNA, 25 bp, Homo sapien
cagtgctgctgtcgcattctctgac

SEQ ID NO: 4963610 - DNA, 25 bp, Homo sapien
tgtttccgtgcccactgccaagtta

SEQ ID NO: 4963611 - DNA, 25 bp, Homo sapien
caccttctgacccagacggtgtttc

SEQ ID NO: 4963612 - DNA, 25 bp, Homo sapien
gctgatgtgtggcattatgtgattc

SEQ ID NO: 4963613 - DNA, 25 bp, Homo sapien
accacaagagcgtccaaccagaaag

SEQ ID NO: 4963614 - DNA, 25 bp, Homo sapien
ccagaaagagcctagaaaaaatctg

SEQ ID NO: 4963615 - DNA, 25 bp, Homo sapien
caacggagtcttttgtgagtgtgaa

SEQ ID NO: 4963616 - DNA, 25 bp, Homo sapien
tatgaattatagttcctggccgtgc

SEQ ID NO: 4963617 - DNA, 25 bp, Homo sapien
tgtccggacgaaggcaaagaaacgc

SEQ ID NO: 4963618 - DNA, 25 bp, Homo sapien
gaacttgtccggacgaaggcaaaga

SEQ ID NO: 4963619 - DNA, 25 bp, Homo sapien
caggaacttgtccggacgaaggcaa

SEQ ID NO: 4963620 - DNA, 25 bp, Homo sapien
ttgggcgatgcttcacggaccgtcc

SEQ ID NO: 4963621 - DNA, 25 bp, Homo sapien
tgtgttgggcgatgcttcacggacc

SEQ ID NO: 4963622 - DNA, 25 bp, Homo sapien
cgatgcttcacggaccgtccatggg

SEQ ID NO: 4963623 - DNA, 25 bp, Homo sapien
cggaccgtccatggggcaaactctt

SEQ ID NO: 4963624 - DNA, 25 bp, Homo sapien
taatactggaaagttgaccctggat

SEQ ID NO: 4963625 - DNA, 25 bp, Homo sapien
tgttggcagtgaaaggcggctgtgg

SEQ ID NO: 4963626 - DNA, 25 bp, Homo sapien
cttttattgtcacgacagactggga

SEQ ID NO: 4963627 - DNA, 25 bp, Homo sapien
ctgggattacagtaacctcttcttt

SEQ ID NO: 4963628 - DNA, 25 bp, Homo sapien
agttattggcgagactgcacctgca

SEQ ID NO: 4963629 - DNA, 25 bp, Homo sapien
ggagaatctcccgaagctggtacag

SEQ ID NO: 4963630 - DNA, 25 bp, Homo sapien
tttacgttaagttcaccaagatagc

SEQ ID NO: 4963631 - DNA, 25 bp, Homo sapien
ctcttcattgtcagccatggaggaa

SEQ ID NO: 4963632 - DNA, 25 bp, Homo sapien
ccgtagccaaatggctgggaaacta

SEQ ID NO: 4963633 - DNA, 25 bp, Homo sapien
tgtctctccgtagccaaatggctgg

SEQ ID NO: 4963634 - DNA, 25 bp, Homo sapien
tctccgtagccaaatggctgggaaa

SEQ ID NO: 4963635 - DNA, 25 bp, Homo sapien
tttgtctctccgtagccaaatggct

SEQ ID NO: 4963636 - DNA, 25 bp, Homo sapien
catatttatgttggagtgcaaaggc

SEQ ID NO: 4963637 - DNA, 25 bp, Homo sapien
aaggcttccgatgcccggacacgtg

SEQ ID NO: 4963638 - DNA, 25 bp, Homo sapien
cggacacgtgtcctccaatctgaga

SEQ ID NO: 4963639 - DNA, 25 bp, Homo sapien
ggagtgcaaaggcttccgatgcccg

SEQ ID NO: 4963640 - DNA, 25 bp, Homo sapien
aaaatgtcccgctgcctgccatcat

SEQ ID NO: 4963641 - DNA, 25 bp, Homo sapien
aggccagtgaagagccacgtagaaa

SEQ ID NO: 4963642 - DNA, 25 bp, Homo sapien
acgtagaaaatgtcccgctgcctgc

SEQ ID NO: 4963643 - DNA, 25 bp, Homo sapien
gtgaagagccacgtagaaaatgtcc

SEQ ID NO: 4963644 - DNA, 25 bp, Homo sapien
tgcatgcagatgaatacgcctcgtg

SEQ ID NO: 4963645 - DNA, 25 bp, Homo sapien
tgggtattcaccaggtcctcttggg

SEQ ID NO: 4963646 - DNA, 25 bp, Homo sapien
tgttgctagtgaagctactctgccc

SEQ ID NO: 4963647 - DNA, 25 bp, Homo sapien
tcctggcgtcctcagcactgttgct

SEQ ID NO: 4963648 - DNA, 25 bp, Homo sapien
cactgggcacattgcccagaagttg

SEQ ID NO: 4963649 - DNA, 25 bp, Homo sapien
cattgcccagaagttggggagttct

SEQ ID NO: 4963650 - DNA, 25 bp, Homo sapien
ccagaagttggggagttctcaggta

SEQ ID NO: 4963651 - DNA, 25 bp, Homo sapien
gggagcagttagcagcactgtctgc

SEQ ID NO: 4963652 - DNA, 25 bp, Homo sapien
gccgctgagcaccaccagatgttac

SEQ ID NO: 4963653 - DNA, 25 bp, Homo sapien
ggttgagccaagcaatattgaggtc

SEQ ID NO: 4963654 - DNA, 25 bp, Homo sapien
ctattggtattgcttagctgcagaa

SEQ ID NO: 4963655 - DNA, 25 bp, Homo sapien
tgctccaaattgatgcaatgttcaa

SEQ ID NO: 4963656 - DNA, 25 bp, Homo sapien
agtgaggagaacatgagccagtact

SEQ ID NO: 4963657 - DNA, 25 bp, Homo sapien
tgccactctcaacaggcacagagac

SEQ ID NO: 4963658 - DNA, 25 bp, Homo sapien
gtgaggagaacatgagccagtactt

SEQ ID NO: 4963659 - DNA, 25 bp, Homo sapien
ctctcaacaggcacagagacagaga

SEQ ID NO: 4963660 - DNA, 25 bp, Homo sapien
tgtctcacaatgcttgggtgctctg

SEQ ID NO: 4963661 - DNA, 25 bp, Homo sapien
gaaaagtgccactggaacctagaat

SEQ ID NO: 4963662 - DNA, 25 bp, Homo sapien
ttgaacccagcctaggtggcattgg

SEQ ID NO: 4963663 - DNA, 25 bp, Homo sapien
tgctgtgtggcatcagacagttgcc

SEQ ID NO: 4963664 - DNA, 25 bp, Homo sapien
actcctatcatgcaaagtccctggg

SEQ ID NO: 4963665 - DNA, 25 bp, Homo sapien
cattgtaagctgctatcagtcacca

SEQ ID NO: 4963666 - DNA, 25 bp, Homo sapien
agtcaccacactgcaacgggatgtg

SEQ ID NO: 4963667 - DNA, 25 bp, Homo sapien
gaatgaagatactgcttgtcgaagg

SEQ ID NO: 4963668 - DNA, 25 bp, Homo sapien
catgtccagatcagaggccctgagc

SEQ ID NO: 4963669 - DNA, 25 bp, Homo sapien
cagaggccctgagctcttgtactca

SEQ ID NO: 4963670 - DNA, 25 bp, Homo sapien
tgtactcatctcctaaacctgctct

SEQ ID NO: 4963671 - DNA, 25 bp, Homo sapien
cctgagctcttgtactcatctccta

SEQ ID NO: 4963672 - DNA, 25 bp, Homo sapien
gcagggcaggttgcgggatgataaa

SEQ ID NO: 4963673 - DNA, 25 bp, Homo sapien
ggccccttggctgttagctcctctt

SEQ ID NO: 4963674 - DNA, 25 bp, Homo sapien
ccttggctgttagctcctctttgtc

SEQ ID NO: 4963675 - DNA, 25 bp, Homo sapien
cctggcatagaggagatactccttg

SEQ ID NO: 4963676 - DNA, 25 bp, Homo sapien
ggagaacagaagctccaaactcagg

SEQ ID NO: 4963677 - DNA, 25 bp, Homo sapien
ccagatcctgcagcatagccttgcg

SEQ ID NO: 4963678 - DNA, 25 bp, Homo sapien
gatcctgcagcatagccttgcgttc

SEQ ID NO: 4963679 - DNA, 25 bp, Homo sapien
aggagaacagaagctccaaactcag

SEQ ID NO: 4963680 - DNA, 25 bp, Homo sapien
gtggggtggaggtgagcgttgaacc

SEQ ID NO: 4963681 - DNA, 25 bp, Homo sapien
gtggaggtgagcgttgaaccttgga

SEQ ID NO: 4963682 - DNA, 25 bp, Homo sapien
gaggtgagcgttgaaccttggacct

SEQ ID NO: 4963683 - DNA, 25 bp, Homo sapien
gggtggaggtgagcgttgaaccttg

SEQ ID NO: 4963684 - DNA, 25 bp, Homo sapien
ccagaggcagcagttcctgaatggg

SEQ ID NO: 4963685 - DNA, 25 bp, Homo sapien
ccccagaggcagcagttcctgaatg

SEQ ID NO: 4963686 - DNA, 25 bp, Homo sapien
cccagaggcagcagttcctgaatgg

SEQ ID NO: 4963687 - DNA, 25 bp, Homo sapien
cagaggcagcagttcctgaatgggg

SEQ ID NO: 4963688 - DNA, 25 bp, Homo sapien
ctgagggaccccagggctctccgta

SEQ ID NO: 4963689 - DNA, 25 bp, Homo sapien
ctgctgagggaccccagggctctcc

SEQ ID NO: 4963690 - DNA, 25 bp, Homo sapien
gctgagggaccccagggctctccgt

SEQ ID NO: 4963691 - DNA, 25 bp, Homo sapien
tgagggaccccagggctctccgtac

SEQ ID NO: 4963692 - DNA, 25 bp, Homo sapien
agcctggcaggttcctctccacggg

SEQ ID NO: 4963693 - DNA, 25 bp, Homo sapien
tgttccacgataacatactgaaaaa

SEQ ID NO: 4963694 - DNA, 25 bp, Homo sapien
aggaggaaatagctgttccacgata

SEQ ID NO: 4963695 - DNA, 25 bp, Homo sapien
ccctgggatgttgctggtgaatgga

SEQ ID NO: 4963696 - DNA, 25 bp, Homo sapien
tctcactaaggctgcttggccagtt

SEQ ID NO: 4963697 - DNA, 25 bp, Homo sapien
gggagagtgtgccttcccacatccc

SEQ ID NO: 4963698 - DNA, 25 bp, Homo sapien
ggagagtgtgccttcccacatccct

SEQ ID NO: 4963699 - DNA, 25 bp, Homo sapien
gcttggccagtttgccaagtcagtt

SEQ ID NO: 4963700 - DNA, 25 bp, Homo sapien
taggatgacggtcacctatctcccc

SEQ ID NO: 4963701 - DNA, 25 bp, Homo sapien
gagatagagggcgatctccgcctac

SEQ ID NO: 4963702 - DNA, 25 bp, Homo sapien
aatgccttcctgcattggtggcccc

SEQ ID NO: 4963703 - DNA, 25 bp, Homo sapien
cctggtgtcggctcttcccattgca

SEQ ID NO: 4963704 - DNA, 25 bp, Homo sapien
caatcgctgagcgtgcaccctgcct

SEQ ID NO: 4963705 - DNA, 25 bp, Homo sapien
ttcagtggatgtcagcggcccaatc

SEQ ID NO: 4963706 - DNA, 25 bp, Homo sapien
tgccggcaagatctatcggactggg

SEQ ID NO: 4963707 - DNA, 25 bp, Homo sapien
gcaggttcaggtctggcaggaagtt

SEQ ID NO: 4963708 - DNA, 25 bp, Homo sapien
ggaacgatccagatccagtggctct

SEQ ID NO: 4963709 - DNA, 25 bp, Homo sapien
tcctggaacgatccagatccagtgg

SEQ ID NO: 4963710 - DNA, 25 bp, Homo sapien
agtcctggaacgatccagatccagt

SEQ ID NO: 4963711 - DNA, 25 bp, Homo sapien
tcccagcccgcagtcctggaacgat

SEQ ID NO: 4963712 - DNA, 25 bp, Homo sapien
cacagcttcgatcaaatcttccttt

SEQ ID NO: 4963713 - DNA, 25 bp, Homo sapien
ccacagcttcgatcaaatcttcctt

SEQ ID NO: 4963714 - DNA, 25 bp, Homo sapien
ttcccacagcttcgatcaaatcttc

SEQ ID NO: 4963715 - DNA, 25 bp, Homo sapien
tcccacagcttcgatcaaatcttcc

SEQ ID NO: 4963716 - DNA, 25 bp, Homo sapien
tctgtagttgttacaatcaggaaca

SEQ ID NO: 4963717 - DNA, 25 bp, Homo sapien
cccgggaacttgactatcggctcca

SEQ ID NO: 4963718 - DNA, 25 bp, Homo sapien
tcaggaacaaccttgcagccaatgt

SEQ ID NO: 4963719 - DNA, 25 bp, Homo sapien
gaacttgactatcggctccatccag

SEQ ID NO: 4963720 - DNA, 25 bp, Homo sapien
ctgccggtagccacccacagcggtc

SEQ ID NO: 4963721 - DNA, 25 bp, Homo sapien
cttgcagggctaagccgctctacag

SEQ ID NO: 4963722 - DNA, 25 bp, Homo sapien
cagcggtccacagtgccttgctggg

SEQ ID NO: 4963723 - DNA, 25 bp, Homo sapien
aagccgctctacagcctgccggtag

SEQ ID NO: 4963724 - DNA, 25 bp, Homo sapien
gatctccttgacaagacttgaaggc

SEQ ID NO: 4963725 - DNA, 25 bp, Homo sapien
atctccttgacaagacttgaaggca

SEQ ID NO: 4963726 - DNA, 25 bp, Homo sapien
tgatctccttgacaagacttgaagg

SEQ ID NO: 4963727 - DNA, 25 bp, Homo sapien
catgaatgaccacaaagaagatgag

SEQ ID NO: 4963728 - DNA, 25 bp, Homo sapien
agtttgtgcacctcgtggatccgca

SEQ ID NO: 4963729 - DNA, 25 bp, Homo sapien
gaccaaggcccctgagagaggttga

SEQ ID NO: 4963730 - DNA, 25 bp, Homo sapien
tggatccgcactacaacaggtaggg

SEQ ID NO: 4963731 - DNA, 25 bp, Homo sapien
gactttgtaggttcgttactgacag

SEQ ID NO: 4963732 - DNA, 25 bp, Homo sapien
gctatgtaaacactgtgggcagatt

SEQ ID NO: 4963733 - DNA, 25 bp, Homo sapien
cttgactcgagtctgggagccctga

SEQ ID NO: 4963734 - DNA, 25 bp, Homo sapien
atgcatgggtcaccagggcaccaac

SEQ ID NO: 4963735 - DNA, 25 bp, Homo sapien
tggcaaaagagggtgtcctcgtcca

SEQ ID NO: 4963736 - DNA, 25 bp, Homo sapien
tccaagagggcctcatgggcacacg

SEQ ID NO: 4963737 - DNA, 25 bp, Homo sapien
gggtgtcctcgtccaagagggcctc

SEQ ID NO: 4963738 - DNA, 25 bp, Homo sapien
gcctcatgggcacacgggctgttct

SEQ ID NO: 4963739 - DNA, 25 bp, Homo sapien
tgaccagcctcattgtccaacccat

SEQ ID NO: 4963740 - DNA, 25 bp, Homo sapien
gctgctgtgaccagcctcattgtcc

SEQ ID NO: 4963741 - DNA, 25 bp, Homo sapien
catgagacccagtaacagtgctgct

SEQ ID NO: 4963742 - DNA, 25 bp, Homo sapien
cagtgctgctgtgaccagcctcatt

SEQ ID NO: 4963743 - DNA, 25 bp, Homo sapien
cgcagctaatccagtccaccacccg

SEQ ID NO: 4963744 - DNA, 25 bp, Homo sapien
tccagggctccgcagctaatccagt

SEQ ID NO: 4963745 - DNA, 25 bp, Homo sapien
agggctccgcagctaatccagtcca

SEQ ID NO: 4963746 - DNA, 25 bp, Homo sapien
tccgcagctaatccagtccaccacc

SEQ ID NO: 4963747 - DNA, 25 bp, Homo sapien
tgggtgtcaactcctttagcacagt

SEQ ID NO: 4963748 - DNA, 25 bp, Homo sapien
caacttttctgggtgtcaactcctt

SEQ ID NO: 4963749 - DNA, 25 bp, Homo sapien
cttttctgggtgtcaactcctttag

SEQ ID NO: 4963750 - DNA, 25 bp, Homo sapien
tctgggtgtcaactcctttagcaca

SEQ ID NO: 4963751 - DNA, 25 bp, Homo sapien
ctagttttctgtgcacgtacttcat

SEQ ID NO: 4963752 - DNA, 25 bp, Homo sapien
cagagccagcggatgttgagagttt

SEQ ID NO: 4963753 - DNA, 25 bp, Homo sapien
tacacaccttgacaggtttctggcc

SEQ ID NO: 4963754 - DNA, 25 bp, Homo sapien
ctggctgtgggaaggtacacacctt

SEQ ID NO: 4963755 - DNA, 25 bp, Homo sapien
tcagtttgggcccttaaggtaatca

SEQ ID NO: 4963756 - DNA, 25 bp, Homo sapien
gtttctcctttcaagatgcacagag

SEQ ID NO: 4963757 - DNA, 25 bp, Homo sapien
cgtttctcctttcaagatgcacaga

SEQ ID NO: 4963758 - DNA, 25 bp, Homo sapien
caattgcagccttcggtttgagggc

SEQ ID NO: 4963759 - DNA, 25 bp, Homo sapien
tgaaggcagccaagtcattaagccc

SEQ ID NO: 4963760 - DNA, 25 bp, Homo sapien
aatgagtcctcgcaccaattgcagc

SEQ ID NO: 4963761 - DNA, 25 bp, Homo sapien
tgcagagtctcattagagcggccct

SEQ ID NO: 4963762 - DNA, 25 bp, Homo sapien
ggcaactctgaatgaatgtgcctga

SEQ ID NO: 4963763 - DNA, 25 bp, Homo sapien
cgatccctgtgtgtctcccttcgga

SEQ ID NO: 4963764 - DNA, 25 bp, Homo sapien
tgtgtctcccttcggaagcgcaatc

SEQ ID NO: 4963765 - DNA, 25 bp, Homo sapien
tccttgatcagatgaccctggcaac

SEQ ID NO: 4963766 - DNA, 25 bp, Homo sapien
tgatgccagacatcactgaaacgat

SEQ ID NO: 4963767 - DNA, 25 bp, Homo sapien
tcactgaaacgatattcacaaagag

SEQ ID NO: 4963768 - DNA, 25 bp, Homo sapien
ctcgtaaggtacatcattgatgcca

SEQ ID NO: 4963769 - DNA, 25 bp, Homo sapien
taaggtacatcattgatgccagaca

SEQ ID NO: 4963770 - DNA, 25 bp, Homo sapien
gcaaaatacttgagtggaccacctg

SEQ ID NO: 4963771 - DNA, 25 bp, Homo sapien
ggcccattgcccactagagactata

SEQ ID NO: 4963772 - DNA, 25 bp, Homo sapien
catttagtgcatcccagagcagagc

SEQ ID NO: 4963773 - DNA, 25 bp, Homo sapien
taagggaaagcagccaagcactagt

SEQ ID NO: 4963774 - DNA, 25 bp, Homo sapien
agtttcccgggaaggcatgctctcc

SEQ ID NO: 4963775 - DNA, 25 bp, Homo sapien
tggctggtgcttctcaaccttgctg

SEQ ID NO: 4963776 - DNA, 25 bp, Homo sapien
tgcctttctgaatctgccgtgcagc

SEQ ID NO: 4963777 - DNA, 25 bp, Homo sapien
tcctgcgatgggtgcagtttcccgg

SEQ ID NO: 4963778 - DNA, 25 bp, Homo sapien
gaatgtattccacgtaacaggaggc

SEQ ID NO: 4963779 - DNA, 25 bp, Homo sapien
aaattataactgcatgttcattgac

SEQ ID NO: 4963780 - DNA, 25 bp, Homo sapien
aacaggaggctagaagaaagaaagg

SEQ ID NO: 4963781 - DNA, 25 bp, Homo sapien
cattgactgtatttacttgctagaa

SEQ ID NO: 4963782 - DNA, 25 bp, Homo sapien
tgaataagacaccaggtccttgcct

SEQ ID NO: 4963783 - DNA, 25 bp, Homo sapien
aatttgcagctgtgggtagtccagg

SEQ ID NO: 4963784 - DNA, 25 bp, Homo sapien
ggcaggcccctctagactgttgtaa

SEQ ID NO: 4963785 - DNA, 25 bp, Homo sapien
tgagacattctctcgccagggcagg

SEQ ID NO: 4963786 - DNA, 25 bp, Homo sapien
tgggggttgaaagagggcagaggtg

SEQ ID NO: 4963787 - DNA, 25 bp, Homo sapien
ctgtgggggttgaaagagggcagag

SEQ ID NO: 4963788 - DNA, 25 bp, Homo sapien
tgtgggggttgaaagagggcagagg

SEQ ID NO: 4963789 - DNA, 25 bp, Homo sapien
aagagggcagaggtgggaggtgggg

SEQ ID NO: 4963790 - DNA, 25 bp, Homo sapien
gtgtttctggccgaccgtggtggct

SEQ ID NO: 4963791 - DNA, 25 bp, Homo sapien
aaggtgtttctggccgaccgtggtg

SEQ ID NO: 4963792 - DNA, 25 bp, Homo sapien
gcacagtactttggtgagaccaagg

SEQ ID NO: 4963793 - DNA, 25 bp, Homo sapien
cacagtactttggtgagaccaaggt

SEQ ID NO: 4963794 - DNA, 25 bp, Homo sapien
actgcagcgccaggcgtcttcgcgg

SEQ ID NO: 4963795 - DNA, 25 bp, Homo sapien
ccggagtttctgagtggccgcgagc

SEQ ID NO: 4963796 - DNA, 25 bp, Homo sapien
tcccaacttgcaggcgcggagggac

SEQ ID NO: 4963797 - DNA, 25 bp, Homo sapien
aggaggtcgcgagcggtacctggga

SEQ ID NO: 4963798 - DNA, 25 bp, Homo sapien
gaattgggccagtctgtatcttaaa

SEQ ID NO: 4963799 - DNA, 25 bp, Homo sapien
ggatcctcctttaagacaggcctga

SEQ ID NO: 4963800 - DNA, 25 bp, Homo sapien
ttggcacaaattaaccacggttcag

SEQ ID NO: 4963801 - DNA, 25 bp, Homo sapien
agacaaatacctcctttcagcccag

SEQ ID NO: 4963802 - DNA, 25 bp, Homo sapien
ccttagcctaggagggatgactccg

SEQ ID NO: 4963803 - DNA, 25 bp, Homo sapien
caaaaaggcggaggaggttgtctca

SEQ ID NO: 4963804 - DNA, 25 bp, Homo sapien
gaacatcacctaggagtgccagctg

SEQ ID NO: 4963805 - DNA, 25 bp, Homo sapien
acatcgaaggcaactgaggcaagca

SEQ ID NO: 4963806 - DNA, 25 bp, Homo sapien
tatgaaaggccaaacgtagagacca

SEQ ID NO: 4963807 - DNA, 25 bp, Homo sapien
cgaccaatatcgtgtgtgccaggag

SEQ ID NO: 4963808 - DNA, 25 bp, Homo sapien
ggaacaagggtcagctcccaaagag

SEQ ID NO: 4963809 - DNA, 25 bp, Homo sapien
cactggtgatctcgcgtaggtctcc

SEQ ID NO: 4963810 - DNA, 25 bp, Homo sapien
gacgtctttgacaacgccatccgag

SEQ ID NO: 4963811 - DNA, 25 bp, Homo sapien
tactatgagaccagcgtggtggccc

SEQ ID NO: 4963812 - DNA, 25 bp, Homo sapien
cattgcctgctaattgccagagagg

SEQ ID NO: 4963813 - DNA, 25 bp, Homo sapien
cagccagctttgacgtgtgcgagag

SEQ ID NO: 4963814 - DNA, 25 bp, Homo sapien
gctagatgagaacgagcgtgacctc

SEQ ID NO: 4963815 - DNA, 25 bp, Homo sapien
cgggctgtcctcaagtacctgtaca

SEQ ID NO: 4963816 - DNA, 25 bp, Homo sapien
gagctgctcgaggtctttgatctgc

SEQ ID NO: 4963817 - DNA, 25 bp, Homo sapien
gagccgagcttttgtgagcatccag

SEQ ID NO: 4963818 - DNA, 25 bp, Homo sapien
gagagcacatcctcacatactgagt

SEQ ID NO: 4963819 - DNA, 25 bp, Homo sapien
cacggattgtacgagccggagctca

SEQ ID NO: 4963820 - DNA, 25 bp, Homo sapien
cagacggctctcgttcatgttggag

SEQ ID NO: 4963821 - DNA, 25 bp, Homo sapien
cggagctcagcttttagtgtggaca

SEQ ID NO: 4963822 - DNA, 25 bp, Homo sapien
gactgctgcatggaaaggcttattg

SEQ ID NO: 4963823 - DNA, 25 bp, Homo sapien
tgaaattatcgatacacactaggga

SEQ ID NO: 4963824 - DNA, 25 bp, Homo sapien
ctatgaggccattaattcaagttga

SEQ ID NO: 4963825 - DNA, 25 bp, Homo sapien
taagttttgtgacatatgcttccta

SEQ ID NO: 4963826 - DNA, 25 bp, Homo sapien
cccatgatgaggaggtgaagattta

SEQ ID NO: 4963827 - DNA, 25 bp, Homo sapien
aaaggactcggcacttctctgactg

SEQ ID NO: 4963828 - DNA, 25 bp, Homo sapien
gcacttctctgactgcggaggccct

SEQ ID NO: 4963829 - DNA, 25 bp, Homo sapien
gttgcagaatcgactccaatgcctt

SEQ ID NO: 4963830 - DNA, 25 bp, Homo sapien
taaaagatggagtcccacggaggag

SEQ ID NO: 4963831 - DNA, 25 bp, Homo sapien
taccctcagagagtgcttatggtgg

SEQ ID NO: 4963832 - DNA, 25 bp, Homo sapien
aatggcaccagactcttgcttttgc

SEQ ID NO: 4963833 - DNA, 25 bp, Homo sapien
caggacacagccttattactgctgg

SEQ ID NO: 4963834 - DNA, 25 bp, Homo sapien
caggcaggacctaatgaccagaggt

SEQ ID NO: 4963835 - DNA, 25 bp, Homo sapien
ttaggcctgggattgagctaacctg

SEQ ID NO: 4963836 - DNA, 25 bp, Homo sapien
tccaggaaaacgctggttaggcctg

SEQ ID NO: 4963837 - DNA, 25 bp, Homo sapien
agagatgttctagctgagagggcct

SEQ ID NO: 4963838 - DNA, 25 bp, Homo sapien
cgagtgacacactatactatggctg

SEQ ID NO: 4963839 - DNA, 25 bp, Homo sapien
aattatttcatgtcgtcaggaagct

SEQ ID NO: 4963840 - DNA, 25 bp, Homo sapien
tgtgtcacatgctatttggcctggg

SEQ ID NO: 4963841 - DNA, 25 bp, Homo sapien
gcatgaaaggacaccaaccacgagt

SEQ ID NO: 4963842 - DNA, 25 bp, Homo sapien
cctaaaaggcagctcatgggctcag

SEQ ID NO: 4963843 - DNA, 25 bp, Homo sapien
tgcaaatgagactgcccaggtaggg

SEQ ID NO: 4963844 - DNA, 25 bp, Homo sapien
aagactggcccctgtagaagttgcc

SEQ ID NO: 4963845 - DNA, 25 bp, Homo sapien
gaagaaaaccttaatgcgtcagcca

SEQ ID NO: 4963846 - DNA, 25 bp, Homo sapien
gagagtttcttccagtaccggtcat

SEQ ID NO: 4963847 - DNA, 25 bp, Homo sapien
tgtggcactttcctactgactggag

SEQ ID NO: 4963848 - DNA, 25 bp, Homo sapien
tagtatcaagtgaagtcggacaacg

SEQ ID NO: 4963849 - DNA, 25 bp, Homo sapien
tctcaaagtacgcacaaacggaatg

SEQ ID NO: 4963850 - DNA, 25 bp, Homo sapien
taggacatggcagagtctgcattac

SEQ ID NO: 4963851 - DNA, 25 bp, Homo sapien
ttaggacatggcagagtctgcatta

SEQ ID NO: 4963852 - DNA, 25 bp, Homo sapien
ggacagaggcatctcgcccggtttt

SEQ ID NO: 4963853 - DNA, 25 bp, Homo sapien
ctttccagagctcaacaagtggtcc

SEQ ID NO: 4963854 - DNA, 25 bp, Homo sapien
caatcttctgcttggcaagtctctc

SEQ ID NO: 4963855 - DNA, 25 bp, Homo sapien
tctagatacatgaactttccagagc

SEQ ID NO: 4963856 - DNA, 25 bp, Homo sapien
gctgcctcagctttagccaccttta

SEQ ID NO: 4963857 - DNA, 25 bp, Homo sapien
tcagcatcgtgtacaaggtgtccct

SEQ ID NO: 4963858 - DNA, 25 bp, Homo sapien
tctgcaaagtcatcgaagcactgtc

SEQ ID NO: 4963859 - DNA, 25 bp, Homo sapien
aacttcctcatgagcggctcccagg

SEQ ID NO: 4963860 - DNA, 25 bp, Homo sapien
agaggattccacatcaggcccagaa

SEQ ID NO: 4963861 - DNA, 25 bp, Homo sapien
agccaggtgagttgggactcagaaa

SEQ ID NO: 4963862 - DNA, 25 bp, Homo sapien
tgagttgggactcagaaagggcaga

SEQ ID NO: 4963863 - DNA, 25 bp, Homo sapien
gaaagggcagaggattccacatcag

SEQ ID NO: 4963864 - DNA, 25 bp, Homo sapien
ccgctccagtgcccacccgcttccc

SEQ ID NO: 4963865 - DNA, 25 bp, Homo sapien
cagtgggatcaccttcatttgctgg

SEQ ID NO: 4963866 - DNA, 25 bp, Homo sapien
agtgggatcaccttcatttgctgga

SEQ ID NO: 4963867 - DNA, 25 bp, Homo sapien
agatgctctgactccccgggggaca

SEQ ID NO: 4963868 - DNA, 25 bp, Homo sapien
gcagatgctctgactccccggggga

SEQ ID NO: 4963869 - DNA, 25 bp, Homo sapien
cagcagatgctctgactccccgggg

SEQ ID NO: 4963870 - DNA, 25 bp, Homo sapien
gatgctctgactccccgggggacaa

SEQ ID NO: 4963871 - DNA, 25 bp, Homo sapien
gctgcaagatactcacgatctcatt

SEQ ID NO: 4963872 - DNA, 25 bp, Homo sapien
gggctgcaagatactcacgatctca

SEQ ID NO: 4963873 - DNA, 25 bp, Homo sapien
gatactcacgatctcattgaggaca

SEQ ID NO: 4963874 - DNA, 25 bp, Homo sapien
gcaagatactcacgatctcattgag

SEQ ID NO: 4963875 - DNA, 25 bp, Homo sapien
cagggtcctcagtatgcagctgcac

SEQ ID NO: 4963876 - DNA, 25 bp, Homo sapien
actcaggagtccacacctagggctc

SEQ ID NO: 4963877 - DNA, 25 bp, Homo sapien
cctatgtggtgctcaaaatggccat

SEQ ID NO: 4963878 - DNA, 25 bp, Homo sapien
ggaaggcaaaaagccgactcaggag

SEQ ID NO: 4963879 - DNA, 25 bp, Homo sapien
ctgtccacacgctcagggtccccac

SEQ ID NO: 4963880 - DNA, 25 bp, Homo sapien
tctgtccacacgctcagggtcccca

SEQ ID NO: 4963881 - DNA, 25 bp, Homo sapien
aagaagcagtctccttagcaggaag

SEQ ID NO: 4963882 - DNA, 25 bp, Homo sapien
ccctcccagaggacagtggggcgca

SEQ ID NO: 4963883 - DNA, 25 bp, Homo sapien
aaaaagaagcagtctccttagcagg

SEQ ID NO: 4963884 - DNA, 25 bp, Homo sapien
aagcagtctccttagcaggaaggga

SEQ ID NO: 4963885 - DNA, 25 bp, Homo sapien
tggaggcacttagacttggggcagg

SEQ ID NO: 4963886 - DNA, 25 bp, Homo sapien
gatgggggtgaccacgaggaggagg

SEQ ID NO: 4963887 - DNA, 25 bp, Homo sapien
gggggtgaccacgaggaggaggata

SEQ ID NO: 4963888 - DNA, 25 bp, Homo sapien
gggtgaccacgaggaggaggataga

SEQ ID NO: 4963889 - DNA, 25 bp, Homo sapien
aacacagccacaatcaagactacgg

SEQ ID NO: 4963890 - DNA, 25 bp, Homo sapien
gccacaatcaagactacggctgcaa

SEQ ID NO: 4963891 - DNA, 25 bp, Homo sapien
actacggctgcaactgtgactccta

SEQ ID NO: 4963892 - DNA, 25 bp, Homo sapien
caatcaagactacggctgcaactgt

SEQ ID NO: 4963893 - DNA, 25 bp, Homo sapien
gggctggaggtcaccgtctcctcca

SEQ ID NO: 4963894 - DNA, 25 bp, Homo sapien
tgggacttccccactgtgctttgta

SEQ ID NO: 4963895 - DNA, 25 bp, Homo sapien
ctgggacttccccactgtgctttgt

SEQ ID NO: 4963896 - DNA, 25 bp, Homo sapien
gctggaggtcaccgtctcctccaca

SEQ ID NO: 4963897 - DNA, 25 bp, Homo sapien
tcactccagggtgtacaatcaccga

SEQ ID NO: 4963898 - DNA, 25 bp, Homo sapien
tccagggtgtacaatcaccgacctt

SEQ ID NO: 4963899 - DNA, 25 bp, Homo sapien
ggtgtacaatcaccgaccttgacca

SEQ ID NO: 4963900 - DNA, 25 bp, Homo sapien
cagggtgtacaatcaccgaccttga

SEQ ID NO: 4963901 - DNA, 25 bp, Homo sapien
ctcaggagaatcttcttcccggaag

SEQ ID NO: 4963902 - DNA, 25 bp, Homo sapien
tctcaggagaatcttcttcccggaa

SEQ ID NO: 4963903 - DNA, 25 bp, Homo sapien
tcaggagaatcttcttcccggaagg

SEQ ID NO: 4963904 - DNA, 25 bp, Homo sapien
atctcaggagaatcttcttcccgga

SEQ ID NO: 4963905 - DNA, 25 bp, Homo sapien
ctggtgcagcgcaagcagaaaagga

SEQ ID NO: 4963906 - DNA, 25 bp, Homo sapien
ctaccgtcttctgagatatggtgtc

SEQ ID NO: 4963907 - DNA, 25 bp, Homo sapien
ccagtgagtgctatagtcctgtcca

SEQ ID NO: 4963908 - DNA, 25 bp, Homo sapien
ttgcaggagatgcaatctctaccgt

SEQ ID NO: 4963909 - DNA, 25 bp, Homo sapien
cacataacatcccaggggagcgcct

SEQ ID NO: 4963910 - DNA, 25 bp, Homo sapien
gggacaccacataacatcccagggg

SEQ ID NO: 4963911 - DNA, 25 bp, Homo sapien
caccacataacatcccaggggagcg

SEQ ID NO: 4963912 - DNA, 25 bp, Homo sapien
gacaccacataacatcccaggggag

SEQ ID NO: 4963913 - DNA, 25 bp, Homo sapien
tcagtccaggagtgggcactcaaga

SEQ ID NO: 4963914 - DNA, 25 bp, Homo sapien
tgtcttgctccggttcagtccagga

SEQ ID NO: 4963915 - DNA, 25 bp, Homo sapien
agatgtacatccgatgctggtggcc

SEQ ID NO: 4963916 - DNA, 25 bp, Homo sapien
tggtggccctctgctgaaaacttct

SEQ ID NO: 4963917 - DNA, 25 bp, Homo sapien
ggtggacacaatccctctgaggggc

SEQ ID NO: 4963918 - DNA, 25 bp, Homo sapien
gctggggagctaggtcttgttgggt

SEQ ID NO: 4963919 - DNA, 25 bp, Homo sapien
ctggacctcttttgttgtggggccg

SEQ ID NO: 4963920 - DNA, 25 bp, Homo sapien
cctcttttgttgtggggccgctctc

SEQ ID NO: 4963921 - DNA, 25 bp, Homo sapien
caagggtaactaattgttgtcttat

SEQ ID NO: 4963922 - DNA, 25 bp, Homo sapien
ctggccaagggtaactaattgttgt

SEQ ID NO: 4963923 - DNA, 25 bp, Homo sapien
tggccaagggtaactaattgttgtc

SEQ ID NO: 4963924 - DNA, 25 bp, Homo sapien
tgatattaagatagccacagcagtt

SEQ ID NO: 4963925 - DNA, 25 bp, Homo sapien
gctcctactatacctgcattttgct

SEQ ID NO: 4963926 - DNA, 25 bp, Homo sapien
tttctctattttggctaagctggtc

SEQ ID NO: 4963927 - DNA, 25 bp, Homo sapien
ctctcttaacactacaaaggtccct

SEQ ID NO: 4963928 - DNA, 25 bp, Homo sapien
cggcgacaacgagcacaagggtctt

SEQ ID NO: 4963929 - DNA, 25 bp, Homo sapien
cgacaacgagcacaagggtcttggg

SEQ ID NO: 4963930 - DNA, 25 bp, Homo sapien
ccgcggcgacaacgagcacaagggt

SEQ ID NO: 4963931 - DNA, 25 bp, Homo sapien
caggaccgcggcgacaacgagcaca

SEQ ID NO: 4963932 - DNA, 25 bp, Homo sapien
tctctcaggcccgtgggtttcagcc

SEQ ID NO: 4963933 - DNA, 25 bp, Homo sapien
ggcggtagggaacgctcttatagtc

SEQ ID NO: 4963934 - DNA, 25 bp, Homo sapien
tagtctctcaggcccgtgggtttca

SEQ ID NO: 4963935 - DNA, 25 bp, Homo sapien
tagggaacgctcttatagtctctca

SEQ ID NO: 4963936 - DNA, 25 bp, Homo sapien
tccggccgcgtgctgatttatgtgt

SEQ ID NO: 4963937 - DNA, 25 bp, Homo sapien
catcgtcggtgtattttgtgggcgc

SEQ ID NO: 4963938 - DNA, 25 bp, Homo sapien
cttaaagtagatcgggcatcgtcgg

SEQ ID NO: 4963939 - DNA, 25 bp, Homo sapien
ggcgaatcagatccaatgtgcaact

SEQ ID NO: 4963940 - DNA, 25 bp, Homo sapien
cttccacagtgttaccactgctggc

SEQ ID NO: 4963941 - DNA, 25 bp, Homo sapien
aacttgagctagatacacagtgcca

SEQ ID NO: 4963942 - DNA, 25 bp, Homo sapien
aagcttccacagtgttaccactgct

SEQ ID NO: 4963943 - DNA, 25 bp, Homo sapien
gggaaagaaggaagcttccacagtg

SEQ ID NO: 4963944 - DNA, 25 bp, Homo sapien
tgtacttggaaaaccgtgctcagct

SEQ ID NO: 4963945 - DNA, 25 bp, Homo sapien
gccaaccgccatgcctgttaatgga

SEQ ID NO: 4963946 - DNA, 25 bp, Homo sapien
ggtccaatctctatgccaggtcctt

SEQ ID NO: 4963947 - DNA, 25 bp, Homo sapien
tggctctgtcaatgccggactggtc

SEQ ID NO: 4963948 - DNA, 25 bp, Homo sapien
tctcaggttgttagagagtactgaa

SEQ ID NO: 4963949 - DNA, 25 bp, Homo sapien
aatgaggggataaaaatcttcagca

SEQ ID NO: 4963950 - DNA, 25 bp, Homo sapien
gctctcaggttgttagagagtactg

SEQ ID NO: 4963951 - DNA, 25 bp, Homo sapien
tgaaattggaggctgtggatggctg

SEQ ID NO: 4963952 - DNA, 25 bp, Homo sapien
aacagacgagccagaattcaaatga

SEQ ID NO: 4963953 - DNA, 25 bp, Homo sapien
acggtgatggcactgcagggccaca

SEQ ID NO: 4963954 - DNA, 25 bp, Homo sapien
aattcaaatgaggacggtgatggca

SEQ ID NO: 4963955 - DNA, 25 bp, Homo sapien
tagaggaacagacgagccagaattc

SEQ ID NO: 4963956 - DNA, 25 bp, Homo sapien
gacagtggagacagtgccatgccct

SEQ ID NO: 4963957 - DNA, 25 bp, Homo sapien
agagaccacagtcccagttccggtt

SEQ ID NO: 4963958 - DNA, 25 bp, Homo sapien
aaaggtctcaatccgtgtggccaca

SEQ ID NO: 4963959 - DNA, 25 bp, Homo sapien
gcagcgaggctctagcttccaggtt

SEQ ID NO: 4963960 - DNA, 25 bp, Homo sapien
ttcatgtagtggattttcctaacaa

SEQ ID NO: 4963961 - DNA, 25 bp, Homo sapien
cttcatgtagtggattttcctaaca

SEQ ID NO: 4963962 - DNA, 25 bp, Homo sapien
ctctgagagctcatttaatgccact

SEQ ID NO: 4963963 - DNA, 25 bp, Homo sapien
tctgagagctcatttaatgccactt

SEQ ID NO: 4963964 - DNA, 25 bp, Homo sapien
ctgagagctcatttaatgccacttc

SEQ ID NO: 4963965 - DNA, 25 bp, Homo sapien
cagactgagagaacaagtctgagtt

SEQ ID NO: 4963966 - DNA, 25 bp, Homo sapien
cagttcagggtcaactggcagcttt

SEQ ID NO: 4963967 - DNA, 25 bp, Homo sapien
gtctggtcttctgagtgattgctca

SEQ ID NO: 4963968 - DNA, 25 bp, Homo sapien
tctgagtgattgctcagttcagggt

SEQ ID NO: 4963969 - DNA, 25 bp, Homo sapien
ccagttcttagagtgaaatgcacag

SEQ ID NO: 4963970 - DNA, 25 bp, Homo sapien
aaaatgtagaaatgtgtgggatgcc

SEQ ID NO: 4963971 - DNA, 25 bp, Homo sapien
tgggaattacaaaacaaggagcagc

SEQ ID NO: 4963972 - DNA, 25 bp, Homo sapien
tctagaaaaactcccaatatgtgaa

SEQ ID NO: 4963973 - DNA, 25 bp, Homo sapien
cacgactgggctactgtggagaaga

SEQ ID NO: 4963974 - DNA, 25 bp, Homo sapien
gaaccctcgtaagtccatatgctca

SEQ ID NO: 4963975 - DNA, 25 bp, Homo sapien
gatttgtatccaggcaacccatgta

SEQ ID NO: 4963976 - DNA, 25 bp, Homo sapien
gcatgtggcctaaaacgacccttaa

SEQ ID NO: 4963977 - DNA, 25 bp, Homo sapien
tccagtgttgccgaggcatccagca

SEQ ID NO: 4963978 - DNA, 25 bp, Homo sapien
tcttcataaaagagcttttcggagc

SEQ ID NO: 4963979 - DNA, 25 bp, Homo sapien
aaaagagcttttcggagcccaccag

SEQ ID NO: 4963980 - DNA, 25 bp, Homo sapien
tgttgccgaggcatccagcaaggtg

SEQ ID NO: 4963981 - DNA, 25 bp, Homo sapien
cggagtcagcgtcattcactggaac

SEQ ID NO: 4963982 - DNA, 25 bp, Homo sapien
cagtcacacctgttagctctgccag

SEQ ID NO: 4963983 - DNA, 25 bp, Homo sapien
actcgtgaaggacatgaacgccgcc

SEQ ID NO: 4963984 - DNA, 25 bp, Homo sapien
tgggtgggctgcaagtatctgttac

SEQ ID NO: 4963985 - DNA, 25 bp, Homo sapien
cagggtctcgttgcgggcattgtcc

SEQ ID NO: 4963986 - DNA, 25 bp, Homo sapien
tctgtgcacacgttcgggacctcct

SEQ ID NO: 4963987 - DNA, 25 bp, Homo sapien
tgcacacgttcgggacctcctccac

SEQ ID NO: 4963988 - DNA, 25 bp, Homo sapien
ctgtgcacacgttcgggacctcctc

SEQ ID NO: 4963989 - DNA, 25 bp, Homo sapien
tgtgcacacgttcgggacctcctcc

SEQ ID NO: 4963990 - DNA, 25 bp, Homo sapien
gggcgtacaattactgaccttgacc

SEQ ID NO: 4963991 - DNA, 25 bp, Homo sapien
taaaaccactatgatgataaggtag

SEQ ID NO: 4963992 - DNA, 25 bp, Homo sapien
tttttgcacttgatgtcactccggg

SEQ ID NO: 4963993 - DNA, 25 bp, Homo sapien
aatttcttccgacatgaaaagccaa

SEQ ID NO: 4963994 - DNA, 25 bp, Homo sapien
cacggtgtctctggtcgtggtacag

SEQ ID NO: 4963995 - DNA, 25 bp, Homo sapien
acacacggtgtctctggtcgtggta

SEQ ID NO: 4963996 - DNA, 25 bp, Homo sapien
tgttctacacgtccggcacatctca

SEQ ID NO: 4963997 - DNA, 25 bp, Homo sapien
cacatctcaggggagtttttatcct

SEQ ID NO: 4963998 - DNA, 25 bp, Homo sapien
ctctgggcaaggggtccacacattc

SEQ ID NO: 4963999 - DNA, 25 bp, Homo sapien
tctgggcaaggggtccacacattct

SEQ ID NO: 4964000 - DNA, 25 bp, Homo sapien
tgggcaaggggtccacacattctgt

SEQ ID NO: 4964001 - DNA, 25 bp, Homo sapien
ggcaaggggtccacacattctgtac

SEQ ID NO: 4964002 - DNA, 25 bp, Homo sapien
tgcacgggttacaggctccagtata

SEQ ID NO: 4964003 - DNA, 25 bp, Homo sapien
ttacaaactgtacatagcaggcaag

SEQ ID NO: 4964004 - DNA, 25 bp, Homo sapien
atggtgtaatccacaccctctgtgc

SEQ ID NO: 4964005 - DNA, 25 bp, Homo sapien
caggcaagaaggcaaattgttggaa

SEQ ID NO: 4964006 - DNA, 25 bp, Homo sapien
tgggactgtcattcctagggaggct

SEQ ID NO: 4964007 - DNA, 25 bp, Homo sapien
aattatcccattagcacggtgcctg

SEQ ID NO: 4964008 - DNA, 25 bp, Homo sapien
ccagagaaaaggttccacgagggca

SEQ ID NO: 4964009 - DNA, 25 bp, Homo sapien
tacatgtgatctgcccatgctggtc

SEQ ID NO: 4964010 - DNA, 25 bp, Homo sapien
ggatggtggcagagtcaacccggac

SEQ ID NO: 4964011 - DNA, 25 bp, Homo sapien
tgttagccatttcccaccagttttg

SEQ ID NO: 4964012 - DNA, 25 bp, Homo sapien
cattaagtttagaggtcatatcgcg

SEQ ID NO: 4964013 - DNA, 25 bp, Homo sapien
tatttcactccgagcactgttagcc

SEQ ID NO: 4964014 - DNA, 25 bp, Homo sapien
gaaaggaactgcatacccttcagga

SEQ ID NO: 4964015 - DNA, 25 bp, Homo sapien
catcgctgtcctcacttgaactctg

SEQ ID NO: 4964016 - DNA, 25 bp, Homo sapien
cacatggtgctccaccccagtcttc

SEQ ID NO: 4964017 - DNA, 25 bp, Homo sapien
ggccctgcagtgccatcgctgtcct

SEQ ID NO: 4964018 - DNA, 25 bp, Homo sapien
ccacatggtgctccaccccagtctt

SEQ ID NO: 4964019 - DNA, 25 bp, Homo sapien
catcccgcggtcctgcctatgggat

SEQ ID NO: 4964020 - DNA, 25 bp, Homo sapien
tatgcctaaggaaggggccatcccg

SEQ ID NO: 4964021 - DNA, 25 bp, Homo sapien
ttacatcttttatgcctaaggaagg

SEQ ID NO: 4964022 - DNA, 25 bp, Homo sapien
ccgcggtcctgcctatgggatacag

SEQ ID NO: 4964023 - DNA, 25 bp, Homo sapien
gttaaccgcttcctgccactttcag

SEQ ID NO: 4964024 - DNA, 25 bp, Homo sapien
cttggttaaccgcttcctgccactt

SEQ ID NO: 4964025 - DNA, 25 bp, Homo sapien
taaccgcttcctgccactttcaggg

SEQ ID NO: 4964026 - DNA, 25 bp, Homo sapien
caccttggttaaccgcttcctgcca

SEQ ID NO: 4964027 - DNA, 25 bp, Homo sapien
acgatgaagacgacgaacttaagga

SEQ ID NO: 4964028 - DNA, 25 bp, Homo sapien
gtctggttcccgacgctgtcctggc

SEQ ID NO: 4964029 - DNA, 25 bp, Homo sapien
agacgacgaacttaaggatcttggg

SEQ ID NO: 4964030 - DNA, 25 bp, Homo sapien
tctggttcccgacgctgtcctggct

SEQ ID NO: 4964031 - DNA, 25 bp, Homo sapien
gcgctcgaggcggtcgggacgcttt

SEQ ID NO: 4964032 - DNA, 25 bp, Homo sapien
gagcgctcgaggcggtcgggacgct

SEQ ID NO: 4964033 - DNA, 25 bp, Homo sapien
tcgagcgctcgaggcggtcgggacg

SEQ ID NO: 4964034 - DNA, 25 bp, Homo sapien
gctcgaggcggtcgggacgctttgt

SEQ ID NO: 4964035 - DNA, 25 bp, Homo sapien
aaatcgtccccgtagtttgtgcgcg

SEQ ID NO: 4964036 - DNA, 25 bp, Homo sapien
aatcaatcagaaatcgtccccgtag

SEQ ID NO: 4964037 - DNA, 25 bp, Homo sapien
gagggtggatcgaaagcgccaaaaa

SEQ ID NO: 4964038 - DNA, 25 bp, Homo sapien
gtttgtgcgcgtgcaaaggttctcg

SEQ ID NO: 4964039 - DNA, 25 bp, Homo sapien
cagttgtactcccttcccgcagtca

SEQ ID NO: 4964040 - DNA, 25 bp, Homo sapien
tcccttcccgcagtcacttccaggc

SEQ ID NO: 4964041 - DNA, 25 bp, Homo sapien
ttgtactcccttcccgcagtcactt

SEQ ID NO: 4964042 - DNA, 25 bp, Homo sapien
actcccttcccgcagtcacttccag

SEQ ID NO: 4964043 - DNA, 25 bp, Homo sapien
tgcatggacggacaggaactggctc

SEQ ID NO: 4964044 - DNA, 25 bp, Homo sapien
gcctgcggtttgattccgggtcctg

SEQ ID NO: 4964045 - DNA, 25 bp, Homo sapien
tgcggtttgattccgggtcctgtcc

SEQ ID NO: 4964046 - DNA, 25 bp, Homo sapien
ggctctttccggcagcggtgaccca

SEQ ID NO: 4964047 - DNA, 25 bp, Homo sapien
tatccctcagtagcgggtgcctggc

SEQ ID NO: 4964048 - DNA, 25 bp, Homo sapien
gggcccagtgaacacatgagtggac

SEQ ID NO: 4964049 - DNA, 25 bp, Homo sapien
ggcttggtatccctcagtagcgggt

SEQ ID NO: 4964050 - DNA, 25 bp, Homo sapien
cagtgaacacatgagtggacagaat

SEQ ID NO: 4964051 - DNA, 25 bp, Homo sapien
tccccatccagttgaacacactgcc

SEQ ID NO: 4964052 - DNA, 25 bp, Homo sapien
ctccccatccagttgaacacactgc

SEQ ID NO: 4964053 - DNA, 25 bp, Homo sapien
ccccatccagttgaacacactgccg

SEQ ID NO: 4964054 - DNA, 25 bp, Homo sapien
ttgaattgtgtatcgttttgctatg

SEQ ID NO: 4964055 - DNA, 25 bp, Homo sapien
tttgaattgtgtatcgttttgctat

SEQ ID NO: 4964056 - DNA, 25 bp, Homo sapien
tctgttaatgagtgggaccagtgcc

SEQ ID NO: 4964057 - DNA, 25 bp, Homo sapien
gagggtccagctagtctcacgttag

SEQ ID NO: 4964058 - DNA, 25 bp, Homo sapien
tctcttggtattcatggctgggacg

SEQ ID NO: 4964059 - DNA, 25 bp, Homo sapien
tggtcaggccaacatcagatgggtc

SEQ ID NO: 4964060 - DNA, 25 bp, Homo sapien
ctgccatcatgcccgtttaattttg

SEQ ID NO: 4964061 - DNA, 25 bp, Homo sapien
gccatcatgcccgtttaattttgta

SEQ ID NO: 4964062 - DNA, 25 bp, Homo sapien
agagcaatggccccatctcaggtca

SEQ ID NO: 4964063 - DNA, 25 bp, Homo sapien
tggagagcaatggccccatctcagg

SEQ ID NO: 4964064 - DNA, 25 bp, Homo sapien
ctagagaactagaaggtatgcagtc

SEQ ID NO: 4964065 - DNA, 25 bp, Homo sapien
gaaacacgattcctagtcctatgac

SEQ ID NO: 4964066 - DNA, 25 bp, Homo sapien
ccaagtttgcaagcacacgatttca

SEQ ID NO: 4964067 - DNA, 25 bp, Homo sapien
caatgtaacagtactcagacgtagg

SEQ ID NO: 4964068 - DNA, 25 bp, Homo sapien
gcaagaaggccctccctagatttgg

SEQ ID NO: 4964069 - DNA, 25 bp, Homo sapien
tttggcctgttgactgcccttggac

SEQ ID NO: 4964070 - DNA, 25 bp, Homo sapien
tcagaaggacagtaccgagaggaat

SEQ ID NO: 4964071 - DNA, 25 bp, Homo sapien
tatcagagcccattagcaagaaggc

SEQ ID NO: 4964072 - DNA, 25 bp, Homo sapien
gaaaaacatttagatgggctccagt

SEQ ID NO: 4964073 - DNA, 25 bp, Homo sapien
aatctttgcataggtaccaaataac

SEQ ID NO: 4964074 - DNA, 25 bp, Homo sapien
aagtgttttgattagtaaatccagg

SEQ ID NO: 4964075 - DNA, 25 bp, Homo sapien
tcagatcacgtgaccttgaaaaaca

SEQ ID NO: 4964076 - DNA, 25 bp, Homo sapien
aatccttagatccttcgggaggcca

SEQ ID NO: 4964077 - DNA, 25 bp, Homo sapien
tggacggccaccatcttatatgctg

SEQ ID NO: 4964078 - DNA, 25 bp, Homo sapien
ccactggtgtatgccctggagtcca

SEQ ID NO: 4964079 - DNA, 25 bp, Homo sapien
gagtccaagggctagaaatcctaga

SEQ ID NO: 4964080 - DNA, 25 bp, Homo sapien
tttggcatgtgagcctcagtcgggc

SEQ ID NO: 4964081 - DNA, 25 bp, Homo sapien
ccgagtagccgagaatatatgcaca

SEQ ID NO: 4964082 - DNA, 25 bp, Homo sapien
catgataaggaaacacacggaggcc

SEQ ID NO: 4964083 - DNA, 25 bp, Homo sapien
taatgccttaccagtgttctaggtg

SEQ ID NO: 4964084 - DNA, 25 bp, Homo sapien
gagtcaaagggcacgatgtttgcaa

SEQ ID NO: 4964085 - DNA, 25 bp, Homo sapien
tttccagagtccaccaagaggtcct

SEQ ID NO: 4964086 - DNA, 25 bp, Homo sapien
tcagcattgcatacaaggcatcccc

SEQ ID NO: 4964087 - DNA, 25 bp, Homo sapien
gatcgaggcgttccgtccagttttg

SEQ ID NO: 4964088 - DNA, 25 bp, Homo sapien
tcccatccacagagagcccacccac

SEQ ID NO: 4964089 - DNA, 25 bp, Homo sapien
ctcccatccacagagagcccaccca

SEQ ID NO: 4964090 - DNA, 25 bp, Homo sapien
gtcaccagagaatctgccctcagag

SEQ ID NO: 4964091 - DNA, 25 bp, Homo sapien
tcaccagagaatctgccctcagaga

SEQ ID NO: 4964092 - DNA, 25 bp, Homo sapien
tgtggcccccaaggcgctgacgggc

SEQ ID NO: 4964093 - DNA, 25 bp, Homo sapien
ccccaaggcgctgacgggcgtcaag

SEQ ID NO: 4964094 - DNA, 25 bp, Homo sapien
aatacaaaaagtacccagatgtggt

SEQ ID NO: 4964095 - DNA, 25 bp, Homo sapien
tggtggtgcacacctgtggtcccag

SEQ ID NO: 4964096 - DNA, 25 bp, Homo sapien
caaaaagtacccagatgtggtggtg

SEQ ID NO: 4964097 - DNA, 25 bp, Homo sapien
tgtggtggtgcacacctgtggtccc

SEQ ID NO: 4964098 - DNA, 25 bp, Homo sapien
cactacatccaatgggatgctggac

SEQ ID NO: 4964099 - DNA, 25 bp, Homo sapien
actacatccaatgggatgctggacc

SEQ ID NO: 4964100 - DNA, 25 bp, Homo sapien
tacatccaatgggatgctggacccc

SEQ ID NO: 4964101 - DNA, 25 bp, Homo sapien
catccaatgggatgctggacccctc

SEQ ID NO: 4964102 - DNA, 25 bp, Homo sapien
gggtcagcaccatttgctggaacca

SEQ ID NO: 4964103 - DNA, 25 bp, Homo sapien
tggggtcagcaccatttgctggaac

SEQ ID NO: 4964104 - DNA, 25 bp, Homo sapien
ctcagtggggtcagcaccatttgct

SEQ ID NO: 4964105 - DNA, 25 bp, Homo sapien
agtggggtcagcaccatttgctgga

SEQ ID NO: 4964106 - DNA, 25 bp, Homo sapien
ctgtaacacacagtggggaatgcct

SEQ ID NO: 4964107 - DNA, 25 bp, Homo sapien
tcgttgtgagcattgtcctcagccc

SEQ ID NO: 4964108 - DNA, 25 bp, Homo sapien
tgctgctcagagacgaaagtggaca

SEQ ID NO: 4964109 - DNA, 25 bp, Homo sapien
tgcgttgctcagaatctcgttgtga

SEQ ID NO: 4964110 - DNA, 25 bp, Homo sapien
gtgacacctgtcaaatctgccggct

SEQ ID NO: 4964111 - DNA, 25 bp, Homo sapien
atgcacttggggtcccctccacaac

SEQ ID NO: 4964112 - DNA, 25 bp, Homo sapien
catgcacttggggtcccctccacaa

SEQ ID NO: 4964113 - DNA, 25 bp, Homo sapien
cctgtccatgcacttggggtcccct

SEQ ID NO: 4964114 - DNA, 25 bp, Homo sapien
gtccatgcacttggggtcccctcca

SEQ ID NO: 4964115 - DNA, 25 bp, Homo sapien
ccaacagcaacggaacaaccaaagt

SEQ ID NO: 4964116 - DNA, 25 bp, Homo sapien
acagcaacggaacaaccaaagtcac

SEQ ID NO: 4964117 - DNA, 25 bp, Homo sapien
caacagcaacggaacaaccaaagtc

SEQ ID NO: 4964118 - DNA, 25 bp, Homo sapien
ccaccaacagcaacggaacaaccaa

SEQ ID NO: 4964119 - DNA, 25 bp, Homo sapien
cagggcgtacaatccttgaccttga

SEQ ID NO: 4964120 - DNA, 25 bp, Homo sapien
actccagggcgtacaatccttgacc

SEQ ID NO: 4964121 - DNA, 25 bp, Homo sapien
gggcgtacaatccttgaccttgacc

SEQ ID NO: 4964122 - DNA, 25 bp, Homo sapien
tcactccagggcgtacaatccttga

SEQ ID NO: 4964123 - DNA, 25 bp, Homo sapien
cattccggaaagttcctggtttgca

SEQ ID NO: 4964124 - DNA, 25 bp, Homo sapien
attgtcattccggaaagttcctggt

SEQ ID NO: 4964125 - DNA, 25 bp, Homo sapien
cagcagaattgtcattccggaaagt

SEQ ID NO: 4964126 - DNA, 25 bp, Homo sapien
catctcagcagaattgtcattccgg

SEQ ID NO: 4964127 - DNA, 25 bp, Homo sapien
catgggaggcaagcaaacaaattgt

SEQ ID NO: 4964128 - DNA, 25 bp, Homo sapien
ccaagatactgagactctggagagc

SEQ ID NO: 4964129 - DNA, 25 bp, Homo sapien
tggcccaagatactgagactctgga

SEQ ID NO: 4964130 - DNA, 25 bp, Homo sapien
ttccggtggcccaagatactgagac

SEQ ID NO: 4964131 - DNA, 25 bp, Homo sapien
cttccggtggcccaagatactgaga

SEQ ID NO: 4964132 - DNA, 25 bp, Homo sapien
cactatgctatcatcaagcttccac

SEQ ID NO: 4964133 - DNA, 25 bp, Homo sapien
tatgctatcatcaagcttccactga

SEQ ID NO: 4964134 - DNA, 25 bp, Homo sapien
accactatgctatcatcaagcttcc

SEQ ID NO: 4964135 - DNA, 25 bp, Homo sapien
ctatgctatcatcaagcttccactg

SEQ ID NO: 4964136 - DNA, 25 bp, Homo sapien
aagaagctctatgatgtttatgtgg

SEQ ID NO: 4964137 - DNA, 25 bp, Homo sapien
tgtttatgtggccaaggttcaacac

SEQ ID NO: 4964138 - DNA, 25 bp, Homo sapien
agaagctctatgatgtttatgtggc

SEQ ID NO: 4964139 - DNA, 25 bp, Homo sapien
catgaagtttgatggttgcagctga

SEQ ID NO: 4964140 - DNA, 25 bp, Homo sapien
gatcatgaagtttgatggttgcagc

SEQ ID NO: 4964141 - DNA, 25 bp, Homo sapien
ttcccattgctgtgtgccaattgat

SEQ ID NO: 4964142 - DNA, 25 bp, Homo sapien
actctcccaaagggctatgttccca

SEQ ID NO: 4964143 - DNA, 25 bp, Homo sapien
aaagcagggactggcatgagtggct

SEQ ID NO: 4964144 - DNA, 25 bp, Homo sapien
caaagcagggactggcatgagtggc

SEQ ID NO: 4964145 - DNA, 25 bp, Homo sapien
tttttcctgagatggagttttactc

SEQ ID NO: 4964146 - DNA, 25 bp, Homo sapien
tttcctgagatggagttttactctt

SEQ ID NO: 4964147 - DNA, 25 bp, Homo sapien
ttttcctgagatggagttttactct

SEQ ID NO: 4964148 - DNA, 25 bp, Homo sapien
catccaaggagggcatgtcggcgcc

SEQ ID NO: 4964149 - DNA, 25 bp, Homo sapien
gaacccatgttactcattcatccaa

SEQ ID NO: 4964150 - DNA, 25 bp, Homo sapien
cctagaacccatgttactcattcat

SEQ ID NO: 4964151 - DNA, 25 bp, Homo sapien
tagaaacgctgtgcaaggaatcgtg

SEQ ID NO: 4964152 - DNA, 25 bp, Homo sapien
catagagggaaaggtccacatagag

SEQ ID NO: 4964153 - DNA, 25 bp, Homo sapien
aggcacagccatcaataacccgagt

SEQ ID NO: 4964154 - DNA, 25 bp, Homo sapien
agccatcaataacccgagtcacgag

SEQ ID NO: 4964155 - DNA, 25 bp, Homo sapien
tggcagggacaccggtagacataga

SEQ ID NO: 4964156 - DNA, 25 bp, Homo sapien
tagatgtactctagctggtggtggc

SEQ ID NO: 4964157 - DNA, 25 bp, Homo sapien
tgccaggaacgcacctagatgtact

SEQ ID NO: 4964158 - DNA, 25 bp, Homo sapien
tcccgggattcggagtcactgccag

SEQ ID NO: 4964159 - DNA, 25 bp, Homo sapien
gaagagccccacactttgctgggtg

SEQ ID NO: 4964160 - DNA, 25 bp, Homo sapien
ccaggtcaatccaagaagcagcgtg

SEQ ID NO: 4964161 - DNA, 25 bp, Homo sapien
gacaagacagaacttcgcattcgga

SEQ ID NO: 4964162 - DNA, 25 bp, Homo sapien
caagacagaacttcgcattcggagt

SEQ ID NO: 4964163 - DNA, 25 bp, Homo sapien
agaagcagcgtgcttggctatgaca

SEQ ID NO: 4964164 - DNA, 25 bp, Homo sapien
cctgttaagagtcttgaaagtcctt

SEQ ID NO: 4964165 - DNA, 25 bp, Homo sapien
tccaccgtccctggtgtcaggcaag

SEQ ID NO: 4964166 - DNA, 25 bp, Homo sapien
tctccatgccagtgaaatgtcacct

SEQ ID NO: 4964167 - DNA, 25 bp, Homo sapien
cgtgcccggctcatcctgcttttgg

SEQ ID NO: 4964168 - DNA, 25 bp, Homo sapien
cgtgtcacggagactcgcttccttg

SEQ ID NO: 4964169 - DNA, 25 bp, Homo sapien
catgatattgtaccacgtgtcacgg

SEQ ID NO: 4964170 - DNA, 25 bp, Homo sapien
ggaaagttcaacctgccacaacgtc

SEQ ID NO: 4964171 - DNA, 25 bp, Homo sapien
ggttctggttccgtgtgtactgcat

SEQ ID NO: 4964172 - DNA, 25 bp, Homo sapien
caattggcaggaaaatggagagact

SEQ ID NO: 4964173 - DNA, 25 bp, Homo sapien
gtttgcagtatagccaattggcagg

SEQ ID NO: 4964174 - DNA, 25 bp, Homo sapien
ttggcaggaaaatggagagactaca

SEQ ID NO: 4964175 - DNA, 25 bp, Homo sapien
gtgtttgcagtatagccaattggca

SEQ ID NO: 4964176 - DNA, 25 bp, Homo sapien
tggtctcacactcctcggcgcaaac

SEQ ID NO: 4964177 - DNA, 25 bp, Homo sapien
acactcctcggcgcaaacaagaccc

SEQ ID NO: 4964178 - DNA, 25 bp, Homo sapien
cactcctcggcgcaaacaagacccc

SEQ ID NO: 4964179 - DNA, 25 bp, Homo sapien
tctcacactcctcggcgcaaacaag

SEQ ID NO: 4964180 - DNA, 25 bp, Homo sapien
gaaagggtctgaatgctctggcaat

SEQ ID NO: 4964181 - DNA, 25 bp, Homo sapien
ggccaggagcacaaatcgttgttca

SEQ ID NO: 4964182 - DNA, 25 bp, Homo sapien
ctggcaatggcgagaagaagcgatc

SEQ ID NO: 4964183 - DNA, 25 bp, Homo sapien
gagccaggatgtgcaatagaagcag

SEQ ID NO: 4964184 - DNA, 25 bp, Homo sapien
gtatttaagtgccaaccattgggcc

SEQ ID NO: 4964185 - DNA, 25 bp, Homo sapien
tcttttcttctgagggaggttccaa

SEQ ID NO: 4964186 - DNA, 25 bp, Homo sapien
ttttctaaagcaccaggaggacctc

SEQ ID NO: 4964187 - DNA, 25 bp, Homo sapien
gataacctgggagactgtatctgca

SEQ ID NO: 4964188 - DNA, 25 bp, Homo sapien
taataatgctacatcttggcatgga

SEQ ID NO: 4964189 - DNA, 25 bp, Homo sapien
tgtactgtttcaggttcacatagct

SEQ ID NO: 4964190 - DNA, 25 bp, Homo sapien
gggtgaccaatcacaagaatgttaa

SEQ ID NO: 4964191 - DNA, 25 bp, Homo sapien
gatttctattggtctatttcccagt

SEQ ID NO: 4964192 - DNA, 25 bp, Homo sapien
tctggccactgaacataggaagcct

SEQ ID NO: 4964193 - DNA, 25 bp, Homo sapien
tgtccaccggagaaaaccacgaatg

SEQ ID NO: 4964194 - DNA, 25 bp, Homo sapien
ttctcccagatggtaggagctgccc

SEQ ID NO: 4964195 - DNA, 25 bp, Homo sapien
gaacggatgccctcttgctttgata

SEQ ID NO: 4964196 - DNA, 25 bp, Homo sapien
tgtcactggagaagagcgcggctcc

SEQ ID NO: 4964197 - DNA, 25 bp, Homo sapien
ggaccctggttatagcaccgttgaa

SEQ ID NO: 4964198 - DNA, 25 bp, Homo sapien
tgaatgggacaagctgatgacaacc

SEQ ID NO: 4964199 - DNA, 25 bp, Homo sapien
caaatcagaaaacacgtggcaccat

SEQ ID NO: 4964200 - DNA, 25 bp, Homo sapien
tgagcttagacacagctgtaggggt

SEQ ID NO: 4964201 - DNA, 25 bp, Homo sapien
ccccatgaatgatgggagggtccct

SEQ ID NO: 4964202 - DNA, 25 bp, Homo sapien
aagacaggagttgaccacgcaggct

SEQ ID NO: 4964203 - DNA, 25 bp, Homo sapien
cgtggcattcgttcagactcagttg

SEQ ID NO: 4964204 - DNA, 25 bp, Homo sapien
gctggttgtttaagagcccgctgaa

SEQ ID NO: 4964205 - DNA, 25 bp, Homo sapien
tttccgtctcttcgctgaaggaacc

SEQ ID NO: 4964206 - DNA, 25 bp, Homo sapien
ttttttccgtctcttcgctgaagga

SEQ ID NO: 4964207 - DNA, 25 bp, Homo sapien
ttaagagcccgctgaagtgctcaaa

SEQ ID NO: 4964208 - DNA, 25 bp, Homo sapien
gtacatccagatgcggtggccgtca

SEQ ID NO: 4964209 - DNA, 25 bp, Homo sapien
gtggccgtcatagcggctcctgcat

SEQ ID NO: 4964210 - DNA, 25 bp, Homo sapien
cggattctgcaacctcgaagttggg

SEQ ID NO: 4964211 - DNA, 25 bp, Homo sapien
tgttgttggagtaatcggattctgc

SEQ ID NO: 4964212 - DNA, 25 bp, Homo sapien
cattctctaaatttggggccccaga

SEQ ID NO: 4964213 - DNA, 25 bp, Homo sapien
cgggtacaggctgctcgttcaggaa

SEQ ID NO: 4964214 - DNA, 25 bp, Homo sapien
ttcaggaacattctctaaatttggg

SEQ ID NO: 4964215 - DNA, 25 bp, Homo sapien
gctgctcgttcaggaacattctcta

SEQ ID NO: 4964216 - DNA, 25 bp, Homo sapien
aggccgctgggcttgcccaaagagg

SEQ ID NO: 4964217 - DNA, 25 bp, Homo sapien
gccgctgggcttgcccaaagaggtg

SEQ ID NO: 4964218 - DNA, 25 bp, Homo sapien
ggccgctgggcttgcccaaagaggt

SEQ ID NO: 4964219 - DNA, 25 bp, Homo sapien
ctggcagtcgatgtcatggcggtac

SEQ ID NO: 4964220 - DNA, 25 bp, Homo sapien
ggcacgtcagtgatgtcaacccact

SEQ ID NO: 4964221 - DNA, 25 bp, Homo sapien
ggcacactcgtaattcttctggatg

SEQ ID NO: 4964222 - DNA, 25 bp, Homo sapien
gccctgatcgccgaagttggcacac

SEQ ID NO: 4964223 - DNA, 25 bp, Homo sapien
tctaggctgctaagcccagatggag

SEQ ID NO: 4964224 - DNA, 25 bp, Homo sapien
gacacttggcattgggacaccagaa

SEQ ID NO: 4964225 - DNA, 25 bp, Homo sapien
gggcatacgcatcagggtctaggct

SEQ ID NO: 4964226 - DNA, 25 bp, Homo sapien
gggacacttggcattgggacaccag

SEQ ID NO: 4964227 - DNA, 25 bp, Homo sapien
gcaggtcatagtgggtgaacacctc

SEQ ID NO: 4964228 - DNA, 25 bp, Homo sapien
tccttcacattctgtgtcctccaag

SEQ ID NO: 4964229 - DNA, 25 bp, Homo sapien
tcatagtgggtgaacacctccatgc

SEQ ID NO: 4964230 - DNA, 25 bp, Homo sapien
caccttggtgccattgaggttcagc

SEQ ID NO: 4964231 - DNA, 25 bp, Homo sapien
tcggactggccattgttgtggatct

SEQ ID NO: 4964232 - DNA, 25 bp, Homo sapien
tgtgacagtcgtgccagatccacgc

SEQ ID NO: 4964233 - DNA, 25 bp, Homo sapien
ttcttgggccggaagtcggactggc

SEQ ID NO: 4964234 - DNA, 25 bp, Homo sapien
catctccgcattgaggaccaggtca

SEQ ID NO: 4964235 - DNA, 25 bp, Homo sapien
taattactactgcaacaagagctgg

SEQ ID NO: 4964236 - DNA, 25 bp, Homo sapien
tgaatacctctgagctgagcatgga

SEQ ID NO: 4964237 - DNA, 25 bp, Homo sapien
tgagcaaggcagaggtggaactacc

SEQ ID NO: 4964238 - DNA, 25 bp, Homo sapien
tacccatggctcgagtattacgatg

SEQ ID NO: 4964239 - DNA, 25 bp, Homo sapien
tcatagacagcgatctgtggttggg

SEQ ID NO: 4964240 - DNA, 25 bp, Homo sapien
gggtggcggtcatctctcttgcccc

SEQ ID NO: 4964241 - DNA, 25 bp, Homo sapien
cactacatcatagacagcgatctgt

SEQ ID NO: 4964242 - DNA, 25 bp, Homo sapien
cattctaccttcctctattgcttgg

SEQ ID NO: 4964243 - DNA, 25 bp, Homo sapien
tcagagtctcttgaggaataactgg

SEQ ID NO: 4964244 - DNA, 25 bp, Homo sapien
gagtctcttgaggaataactggtgg

SEQ ID NO: 4964245 - DNA, 25 bp, Homo sapien
aactggtgggactctggtccccttg

SEQ ID NO: 4964246 - DNA, 25 bp, Homo sapien
gaataactggtgggactctggtccc

SEQ ID NO: 4964247 - DNA, 25 bp, Homo sapien
ttctgagcaggcaactccggccccg

SEQ ID NO: 4964248 - DNA, 25 bp, Homo sapien
tgagcaggcaactccggccccgtac

SEQ ID NO: 4964249 - DNA, 25 bp, Homo sapien
tctgagcaggcaactccggccccgt

SEQ ID NO: 4964250 - DNA, 25 bp, Homo sapien
tttctgagcaggcaactccggcccc

SEQ ID NO: 4964251 - DNA, 25 bp, Homo sapien
ccgtcgtggcggcagtgcgccaggg

SEQ ID NO: 4964252 - DNA, 25 bp, Homo sapien
cactcatgaccactttgttgctgtt

SEQ ID NO: 4964253 - DNA, 25 bp, Homo sapien
ttgacatctccgtgccaataccagg

SEQ ID NO: 4964254 - DNA, 25 bp, Homo sapien
gggacagctccgttcccgagcactt

SEQ ID NO: 4964255 - DNA, 25 bp, Homo sapien
acgatgccccagttttggccacaca

SEQ ID NO: 4964256 - DNA, 25 bp, Homo sapien
cactcggccctcgtagggattgcgg

SEQ ID NO: 4964257 - DNA, 25 bp, Homo sapien
tggaaggcgttgctggcgaatccca

SEQ ID NO: 4964258 - DNA, 25 bp, Homo sapien
ctcgtagggattgcggccgccgttc

SEQ ID NO: 4964259 - DNA, 25 bp, Homo sapien
tcagattcagcagcacccttgggag

SEQ ID NO: 4964260 - DNA, 25 bp, Homo sapien
gacacactcagattcagcagcaccc

SEQ ID NO: 4964261 - DNA, 25 bp, Homo sapien
gcgctgtgcctagcatggtcttata

SEQ ID NO: 4964262 - DNA, 25 bp, Homo sapien
ccggtggcagcgctgtgcctagcat

SEQ ID NO: 4964263 - DNA, 25 bp, Homo sapien
agagaagggtttgactgttctggaa

SEQ ID NO: 4964264 - DNA, 25 bp, Homo sapien
gagaagggtttgactgttctggaag

SEQ ID NO: 4964265 - DNA, 25 bp, Homo sapien
gagagaagggtttgactgttctgga

SEQ ID NO: 4964266 - DNA, 25 bp, Homo sapien
caggcccgggatggcctctaggaca

SEQ ID NO: 4964267 - DNA, 25 bp, Homo sapien
cctgagactcggcattgaacttgca

SEQ ID NO: 4964268 - DNA, 25 bp, Homo sapien
cttgcagtctataatggacttctca

SEQ ID NO: 4964269 - DNA, 25 bp, Homo sapien
tgcactggatctcgttgaggtggat

SEQ ID NO: 4964270 - DNA, 25 bp, Homo sapien
ccatggcaggggtgttgcatctcac

SEQ ID NO: 4964271 - DNA, 25 bp, Homo sapien
catgctctatgaaagctttggaagg

SEQ ID NO: 4964272 - DNA, 25 bp, Homo sapien
ctgtgttctggagcacccctgaatt

SEQ ID NO: 4964273 - DNA, 25 bp, Homo sapien
tgttctggagcacccctgaattgct

SEQ ID NO: 4964274 - DNA, 25 bp, Homo sapien
atccttgacctgcagctgtcaccta

SEQ ID NO: 4964275 - DNA, 25 bp, Homo sapien
catccttgacctgcagctgtcacct

SEQ ID NO: 4964276 - DNA, 25 bp, Homo sapien
tatatggcccaatggaagctgccag

SEQ ID NO: 4964277 - DNA, 25 bp, Homo sapien
tgtaagagctgacccactgcaggct

SEQ ID NO: 4964278 - DNA, 25 bp, Homo sapien
ccaatggcactagacagatgagctc

SEQ ID NO: 4964279 - DNA, 25 bp, Homo sapien
catgggtaggccgtagaaagaacca

SEQ ID NO: 4964280 - DNA, 25 bp, Homo sapien
attagtctgaggacatccggagggc

SEQ ID NO: 4964281 - DNA, 25 bp, Homo sapien
tcaattagtctgaggacatccggag

SEQ ID NO: 4964282 - DNA, 25 bp, Homo sapien
ctgaggacatccggagggcggcttc

SEQ ID NO: 4964283 - DNA, 25 bp, Homo sapien
catccggagggcggcttcttgttcc

SEQ ID NO: 4964284 - DNA, 25 bp, Homo sapien
taaggcccctttcaactctgtctag

SEQ ID NO: 4964285 - DNA, 25 bp, Homo sapien
tggatgtttactccgtcttttgggc

SEQ ID NO: 4964286 - DNA, 25 bp, Homo sapien
tagggtctcagtgttctctaaggcc

SEQ ID NO: 4964287 - DNA, 25 bp, Homo sapien
cctggcgttttttggtaagacagca

SEQ ID NO: 4964288 - DNA, 25 bp, Homo sapien
atgtaggcaccgcctctcagtcgca

SEQ ID NO: 4964289 - DNA, 25 bp, Homo sapien
tgcagaccacactggccgacaccag

SEQ ID NO: 4964290 - DNA, 25 bp, Homo sapien
ggtcccacttgtcgtcgcagacggt

SEQ ID NO: 4964291 - DNA, 25 bp, Homo sapien
gcggccctccccgatgtaggcaccg

SEQ ID NO: 4964292 - DNA, 25 bp, Homo sapien
aggccaggcactcagtctgggagct

SEQ ID NO: 4964293 - DNA, 25 bp, Homo sapien
acgttcagcgggtgaccactgtccc

SEQ ID NO: 4964294 - DNA, 25 bp, Homo sapien
caactatgcttgatgtatggatgtg

SEQ ID NO: 4964295 - DNA, 25 bp, Homo sapien
tgagtacagacgctgatgcacgttc

SEQ ID NO: 4964296 - DNA, 25 bp, Homo sapien
tgttctaggaaatcggccagtgggc

SEQ ID NO: 4964297 - DNA, 25 bp, Homo sapien
caagcctgctgtggttggactactt

SEQ ID NO: 4964298 - DNA, 25 bp, Homo sapien
caagatattcgctgtttcctgaaca

SEQ ID NO: 4964299 - DNA, 25 bp, Homo sapien
tcagcccctgagaaatgatcggtca

SEQ ID NO: 4964300 - DNA, 25 bp, Homo sapien
tacgctttccggaatcttgagggtc

SEQ ID NO: 4964301 - DNA, 25 bp, Homo sapien
tccggaatcttgagggtccgtcagg

SEQ ID NO: 4964302 - DNA, 25 bp, Homo sapien
aatcttgagggtccgtcagggctga

SEQ ID NO: 4964303 - DNA, 25 bp, Homo sapien
gcttgtacgctttccggaatcttga

SEQ ID NO: 4964304 - DNA, 25 bp, Homo sapien
tggagaatggccagtagcgctgctt

SEQ ID NO: 4964305 - DNA, 25 bp, Homo sapien
cggtagcccattctcgcaggtgaca

SEQ ID NO: 4964306 - DNA, 25 bp, Homo sapien
agcgctgcttcctccgtgaggcaaa

SEQ ID NO: 4964307 - DNA, 25 bp, Homo sapien
gcctctgtgccggtgcagtccatgg

SEQ ID NO: 4964308 - DNA, 25 bp, Homo sapien
tgcttgtgaacacaatgacacggaa

SEQ ID NO: 4964309 - DNA, 25 bp, Homo sapien
agggcagaggcgaggtcccatccct

SEQ ID NO: 4964310 - DNA, 25 bp, Homo sapien
cagtaagatgccagaaggagccagc

SEQ ID NO: 4964311 - DNA, 25 bp, Homo sapien
agggcaaatcctacagacacagtta

SEQ ID NO: 4964312 - DNA, 25 bp, Homo sapien
aaggactctggactggccacggttg

SEQ ID NO: 4964313 - DNA, 25 bp, Homo sapien
tcctcaaaagccgagaaggactctg

SEQ ID NO: 4964314 - DNA, 25 bp, Homo sapien
ccatctgaacaaggcgcgtgctgtc

SEQ ID NO: 4964315 - DNA, 25 bp, Homo sapien
gccacggttgggagatggcttccaa

SEQ ID NO: 4964316 - DNA, 25 bp, Homo sapien
gaagccaaacatgccgcagaccacg

SEQ ID NO: 4964317 - DNA, 25 bp, Homo sapien
gccgtccagtgcttgtcacagatct

SEQ ID NO: 4964318 - DNA, 25 bp, Homo sapien
agatctgcttccaggtcttgccctc

SEQ ID NO: 4964319 - DNA, 25 bp, Homo sapien
cgcgggaattcttggccgtccagtg

SEQ ID NO: 4964320 - DNA, 25 bp, Homo sapien
tcgaatccgaatgtcctccacctgg

SEQ ID NO: 4964321 - DNA, 25 bp, Homo sapien
ttgagaggatggctcgaatccgaat

SEQ ID NO: 4964322 - DNA, 25 bp, Homo sapien
gatggctcgaatccgaatgtcctcc

SEQ ID NO: 4964323 - DNA, 25 bp, Homo sapien
tgtcctccacctggatattcaggtt

SEQ ID NO: 4964324 - DNA, 25 bp, Homo sapien
agttcacagatcctttcccctgcgt

SEQ ID NO: 4964325 - DNA, 25 bp, Homo sapien
cacagatcctttcccctgcgttggg

SEQ ID NO: 4964326 - DNA, 25 bp, Homo sapien
caggctcgctgcagggaaggtgtga

SEQ ID NO: 4964327 - DNA, 25 bp, Homo sapien
ctcgctgcagggaaggtgtgacccc

SEQ ID NO: 4964328 - DNA, 25 bp, Homo sapien
tttcctccgctgaatagggctggtg

SEQ ID NO: 4964329 - DNA, 25 bp, Homo sapien
tcctgcgatgatgcgggacagtttc

SEQ ID NO: 4964330 - DNA, 25 bp, Homo sapien
ggagcttgctctcgttcctgcgatg

SEQ ID NO: 4964331 - DNA, 25 bp, Homo sapien
ggctccacgatgaaggcaatgcagc

SEQ ID NO: 4964332 - DNA, 25 bp, Homo sapien
tgggtgtccccttcaaccagctgaa

SEQ ID NO: 4964333 - DNA, 25 bp, Homo sapien
cagaattctgggtgtccccttcaac

SEQ ID NO: 4964334 - DNA, 25 bp, Homo sapien
tgtgcacattggaagcccagcaccc

SEQ ID NO: 4964335 - DNA, 25 bp, Homo sapien
tggtgctgtgcacattggaagccca

SEQ ID NO: 4964336 - DNA, 25 bp, Homo sapien
gcatggtagtagttcaagtatttga

SEQ ID NO: 4964337 - DNA, 25 bp, Homo sapien
cggccgggagttgggatacattcta

SEQ ID NO: 4964338 - DNA, 25 bp, Homo sapien
atccggccgggagttgggatacatt

SEQ ID NO: 4964339 - DNA, 25 bp, Homo sapien
tcttctgcatggtagtagttcaagt

SEQ ID NO: 4964340 - DNA, 25 bp, Homo sapien
tctccctaaagtctgcactctgtga

SEQ ID NO: 4964341 - DNA, 25 bp, Homo sapien
taatatgttacagcttgggcccatt

SEQ ID NO: 4964342 - DNA, 25 bp, Homo sapien
ccccatgaactttgatataggacct

SEQ ID NO: 4964343 - DNA, 25 bp, Homo sapien
gatgtgagccaacccaacaggcctt

SEQ ID NO: 4964344 - DNA, 25 bp, Homo sapien
agctttctccaaggcgtacatcttg

SEQ ID NO: 4964345 - DNA, 25 bp, Homo sapien
gtttctggagatttgtgagggccca

SEQ ID NO: 4964346 - DNA, 25 bp, Homo sapien
tgccttggaaggatctccagctttc

SEQ ID NO: 4964347 - DNA, 25 bp, Homo sapien
catcttgtcttgcaggttgtaaggg

SEQ ID NO: 4964348 - DNA, 25 bp, Homo sapien
tagattatcctgaggttcaggttga

SEQ ID NO: 4964349 - DNA, 25 bp, Homo sapien
cagaggcccatctaagatgttacaa

SEQ ID NO: 4964350 - DNA, 25 bp, Homo sapien
tcaggttgaacagaggcccatctaa

SEQ ID NO: 4964351 - DNA, 25 bp, Homo sapien
tgactttcttatgccaagaaggctg

SEQ ID NO: 4964352 - DNA, 25 bp, Homo sapien
atctgacatgttccttgaggacagg

SEQ ID NO: 4964353 - DNA, 25 bp, Homo sapien
ggctgaagcacagcgaaggttcctt

SEQ ID NO: 4964354 - DNA, 25 bp, Homo sapien
ttcttctgcattagtgctgggttca

SEQ ID NO: 4964355 - DNA, 25 bp, Homo sapien
gtgttagctgccaattcctcctgtc

SEQ ID NO: 4964356 - DNA, 25 bp, Homo sapien
aaatcaatacgcaaaaagcgagttg

SEQ ID NO: 4964357 - DNA, 25 bp, Homo sapien
caaaaagcgagttgcatggaagagg

SEQ ID NO: 4964358 - DNA, 25 bp, Homo sapien
cacacacttcttgaaatcaatacgc

SEQ ID NO: 4964359 - DNA, 25 bp, Homo sapien
aaaagcgagttgcatggaagaggaa

SEQ ID NO: 4964360 - DNA, 25 bp, Homo sapien
aacgaattgtcaaatttgaacccag

SEQ ID NO: 4964361 - DNA, 25 bp, Homo sapien
gaacccaggaatccttttgtcgctg

SEQ ID NO: 4964362 - DNA, 25 bp, Homo sapien
caggaatccttttgtcgctgcacac

SEQ ID NO: 4964363 - DNA, 25 bp, Homo sapien
ctctatctggttgatcaacgaattg

SEQ ID NO: 4964364 - DNA, 25 bp, Homo sapien
cagtgacgccccagccattggaggt

SEQ ID NO: 4964365 - DNA, 25 bp, Homo sapien
tccgtgtgcttgcagtcagtgacgc

SEQ ID NO: 4964366 - DNA, 25 bp, Homo sapien
cgttgccagtacagtggagattgtc

SEQ ID NO: 4964367 - DNA, 25 bp, Homo sapien
aggtgcatgctgcaagggtcgcctc

SEQ ID NO: 4964368 - DNA, 25 bp, Homo sapien
ttcttgtatctccatctgaacagag

SEQ ID NO: 4964369 - DNA, 25 bp, Homo sapien
gagactcgcaatccagtgatcacag

SEQ ID NO: 4964370 - DNA, 25 bp, Homo sapien
tgatcacagcagctatgcacaatcc

SEQ ID NO: 4964371 - DNA, 25 bp, Homo sapien
tcaccacgcttggatggcaaagtcc

SEQ ID NO: 4964372 - DNA, 25 bp, Homo sapien
gacgacgtgggcagcgtggatggag

SEQ ID NO: 4964373 - DNA, 25 bp, Homo sapien
tctcccttgccgtaggaggagctgg

SEQ ID NO: 4964374 - DNA, 25 bp, Homo sapien
tggagaagtcgtcatcgcacacggt

SEQ ID NO: 4964375 - DNA, 25 bp, Homo sapien
aggacttggcctccacgtagcccag

SEQ ID NO: 4964376 - DNA, 25 bp, Homo sapien
ctccacccggccctcgctgtgcttc

SEQ ID NO: 4964377 - DNA, 25 bp, Homo sapien
ccacccggccctcgctgtgcttcct

SEQ ID NO: 4964378 - DNA, 25 bp, Homo sapien
cccggccctcgctgtgcttcctctt

SEQ ID NO: 4964379 - DNA, 25 bp, Homo sapien
acccggccctcgctgtgcttcctct

SEQ ID NO: 4964380 - DNA, 25 bp, Homo sapien
cccagccaggcgcagctgaatcttg

SEQ ID NO: 4964381 - DNA, 25 bp, Homo sapien
agccaggcgcagctgaatcttggcc

SEQ ID NO: 4964382 - DNA, 25 bp, Homo sapien
ccaggcgcagctgaatcttggccac

SEQ ID NO: 4964383 - DNA, 25 bp, Homo sapien
tgcccagccaggcgcagctgaatct

SEQ ID NO: 4964384 - DNA, 25 bp, Homo sapien
ggagccggttgctggaagtactcgg

SEQ ID NO: 4964385 - DNA, 25 bp, Homo sapien
ctggtgatactcaggagccggttgc

SEQ ID NO: 4964386 - DNA, 25 bp, Homo sapien
tgctggaagtactcggggtaatggg

SEQ ID NO: 4964387 - DNA, 25 bp, Homo sapien
ggggccagctgtcatactgtgccag

SEQ ID NO: 4964388 - DNA, 25 bp, Homo sapien
acaggagggccagcatagccaggca

SEQ ID NO: 4964389 - DNA, 25 bp, Homo sapien
gggacaggagggccagcatagccag

SEQ ID NO: 4964390 - DNA, 25 bp, Homo sapien
agctgcagaggtgggagcacagagg

SEQ ID NO: 4964391 - DNA, 25 bp, Homo sapien
ccagcatagccaggcagctgcagag

SEQ ID NO: 4964392 - DNA, 25 bp, Homo sapien
ttcgggctgatgatcccacgaaggg

SEQ ID NO: 4964393 - DNA, 25 bp, Homo sapien
gctgatgatcccacgaaggggccct

SEQ ID NO: 4964394 - DNA, 25 bp, Homo sapien
gtcttcgggctgatgatcccacgaa

SEQ ID NO: 4964395 - DNA, 25 bp, Homo sapien
ggctgatgatcccacgaaggggccc

SEQ ID NO: 4964396 - DNA, 25 bp, Homo sapien
cacggcagtgatcaacaggctgaga

SEQ ID NO: 4964397 - DNA, 25 bp, Homo sapien
caattccacggcagtgatcaacagg

SEQ ID NO: 4964398 - DNA, 25 bp, Homo sapien
ccggaagatactcgccaattccacg

SEQ ID NO: 4964399 - DNA, 25 bp, Homo sapien
gatactcgccaattccacggcagtg

SEQ ID NO: 4964400 - DNA, 25 bp, Homo sapien
caacagaaacgtaatgagagccaca

SEQ ID NO: 4964401 - DNA, 25 bp, Homo sapien
agcatgtgagaagtgctaagacagg

SEQ ID NO: 4964402 - DNA, 25 bp, Homo sapien
taaattccctcgtagccactttcca

SEQ ID NO: 4964403 - DNA, 25 bp, Homo sapien
caggtatttcatcctctcgtctgga

SEQ ID NO: 4964404 - DNA, 25 bp, Homo sapien
cacgtactttgcgtttgcagcgcat

SEQ ID NO: 4964405 - DNA, 25 bp, Homo sapien
tgaaatccagcacgtactttgcgtt

SEQ ID NO: 4964406 - DNA, 25 bp, Homo sapien
tattaatgagatgttttgcgttctt

SEQ ID NO: 4964407 - DNA, 25 bp, Homo sapien
cagcacgtactttgcgtttgcagcg

SEQ ID NO: 4964408 - DNA, 25 bp, Homo sapien
cagcacattgcaagtgtttggtggc

SEQ ID NO: 4964409 - DNA, 25 bp, Homo sapien
gagcaaggtattatcagcatcccta

SEQ ID NO: 4964410 - DNA, 25 bp, Homo sapien
ttggtggccccatatggtggtggct

SEQ ID NO: 4964411 - DNA, 25 bp, Homo sapien
tggctgccatactgcacaacacagc

SEQ ID NO: 4964412 - DNA, 25 bp, Homo sapien
ggaatttgtaaccaggccagccaga

SEQ ID NO: 4964413 - DNA, 25 bp, Homo sapien
cgagagacagaaaggctacatgatt

SEQ ID NO: 4964414 - DNA, 25 bp, Homo sapien
actgctaaaaagtgatcaagctgga

SEQ ID NO: 4964415 - DNA, 25 bp, Homo sapien
gctacatgattttcctatagtcaca

SEQ ID NO: 4964416 - DNA, 25 bp, Homo sapien
tgaaaaggcgcctagagacgtccct

SEQ ID NO: 4964417 - DNA, 25 bp, Homo sapien
tggacgatgacagtaacaagctgct

SEQ ID NO: 4964418 - DNA, 25 bp, Homo sapien
tgcagaccgaccacaaaagcctttc

SEQ ID NO: 4964419 - DNA, 25 bp, Homo sapien
tacgcttggccaagaggtgctccct

SEQ ID NO: 4964420 - DNA, 25 bp, Homo sapien
gggagattgtcctctactagatttc

SEQ ID NO: 4964421 - DNA, 25 bp, Homo sapien
taccagctgtcagagtactcaggtg

SEQ ID NO: 4964422 - DNA, 25 bp, Homo sapien
gagtactcaggtgatgctcagagag

SEQ ID NO: 4964423 - DNA, 25 bp, Homo sapien
tcagagaggggagattgtcctctac

SEQ ID NO: 4964424 - DNA, 25 bp, Homo sapien
gtttcagtccccacattgactaact

SEQ ID NO: 4964425 - DNA, 25 bp, Homo sapien
acattgactaactcagtgaccgtga

SEQ ID NO: 4964426 - DNA, 25 bp, Homo sapien
accgtgagcctcagcgtttttcttc

SEQ ID NO: 4964427 - DNA, 25 bp, Homo sapien
ttccaggacggacaggctagcagtg

SEQ ID NO: 4964428 - DNA, 25 bp, Homo sapien
attacgggcgctcgggacgatccag

SEQ ID NO: 4964429 - DNA, 25 bp, Homo sapien
cgctcgggacgatccagggacccag

SEQ ID NO: 4964430 - DNA, 25 bp, Homo sapien
tctgtcccgcctgattacgggcgct

SEQ ID NO: 4964431 - DNA, 25 bp, Homo sapien
cccgcctgattacgggcgctcggga

SEQ ID NO: 4964432 - DNA, 25 bp, Homo sapien
gggggtggcgcgggaagcgctctta

SEQ ID NO: 4964433 - DNA, 25 bp, Homo sapien
gagggggtggcgcgggaagcgctct

SEQ ID NO: 4964434 - DNA, 25 bp, Homo sapien
ggggtggcgcgggaagcgctcttac

SEQ ID NO: 4964435 - DNA, 25 bp, Homo sapien
agggggtggcgcgggaagcgctctt

SEQ ID NO: 4964436 - DNA, 25 bp, Homo sapien
ttggtttcagggatccgcagtggcc

SEQ ID NO: 4964437 - DNA, 25 bp, Homo sapien
gctgagcccctttctcgagcagagg

SEQ ID NO: 4964438 - DNA, 25 bp, Homo sapien
agagggggcggctctggtctccgat

SEQ ID NO: 4964439 - DNA, 25 bp, Homo sapien
ccgggctgggaccgcgctctccacg

SEQ ID NO: 4964440 - DNA, 25 bp, Homo sapien
tggagtcgcgcgtttactcttttcc

SEQ ID NO: 4964441 - DNA, 25 bp, Homo sapien
acttttaactagaggaggatggcaa

SEQ ID NO: 4964442 - DNA, 25 bp, Homo sapien
aagcaccaagcgtaggtagccgcgc

SEQ ID NO: 4964443 - DNA, 25 bp, Homo sapien
ctggagaaagcaagcaccaagcgta

SEQ ID NO: 4964444 - DNA, 25 bp, Homo sapien
tgtatgatccagtcataactctaga

SEQ ID NO: 4964445 - DNA, 25 bp, Homo sapien
ccatagcaaacagtatggttgaatc

SEQ ID NO: 4964446 - DNA, 25 bp, Homo sapien
tgaatctcaaacatatcaggatgcc

SEQ ID NO: 4964447 - DNA, 25 bp, Homo sapien
tcaaacatatcaggatgcctgcccc

SEQ ID NO: 4964448 - DNA, 25 bp, Homo sapien
cagctgactcatcgtgcccgtagag

SEQ ID NO: 4964449 - DNA, 25 bp, Homo sapien
gcagcagtaattgcgctgtcatttt

SEQ ID NO: 4964450 - DNA, 25 bp, Homo sapien
gctactgtttacttggtcatgctag

SEQ ID NO: 4964451 - DNA, 25 bp, Homo sapien
tgtgtaaccaacttagaatacaacc

SEQ ID NO: 4964452 - DNA, 25 bp, Homo sapien
tctcggagaaatgaggactgcggtc

SEQ ID NO: 4964453 - DNA, 25 bp, Homo sapien
tattgaatgtctaccgcctatcaga

SEQ ID NO: 4964454 - DNA, 25 bp, Homo sapien
taatagggagagtcgtacatagaac

SEQ ID NO: 4964455 - DNA, 25 bp, Homo sapien
gatctaaggtcataagcatcatggg

SEQ ID NO: 4964456 - DNA, 25 bp, Homo sapien
cagtcactcagaatcattaccaagg

SEQ ID NO: 4964457 - DNA, 25 bp, Homo sapien
tgaatcaaagggcacacacgctgct

SEQ ID NO: 4964458 - DNA, 25 bp, Homo sapien
caccagcaatattgaagtccaggcc

SEQ ID NO: 4964459 - DNA, 25 bp, Homo sapien
ggtacgcattgcagtttgcaccacc

SEQ ID NO: 4964460 - DNA, 25 bp, Homo sapien
cagacacaggctgttgacagaaatg

SEQ ID NO: 4964461 - DNA, 25 bp, Homo sapien
acacaggctgttgacagaaatgttg

SEQ ID NO: 4964462 - DNA, 25 bp, Homo sapien
tttgggcctcttacatgaaacagac

SEQ ID NO: 4964463 - DNA, 25 bp, Homo sapien
cttgtttgggcctcttacatgaaac

SEQ ID NO: 4964464 - DNA, 25 bp, Homo sapien
tccaggagaacatctatgtattctc

SEQ ID NO: 4964465 - DNA, 25 bp, Homo sapien
tctatgtattctccaacggctgaga

SEQ ID NO: 4964466 - DNA, 25 bp, Homo sapien
catgctgagcgtctaatgtcatcct

SEQ ID NO: 4964467 - DNA, 25 bp, Homo sapien
gctgagaaacatgctgagcgtctaa

SEQ ID NO: 4964468 - DNA, 25 bp, Homo sapien
gcttaacgtcgtgggttggtcacta

SEQ ID NO: 4964469 - DNA, 25 bp, Homo sapien
gaccttataaacagtcatctcagag

SEQ ID NO: 4964470 - DNA, 25 bp, Homo sapien
gaagcaagcccacacagtctacggg

SEQ ID NO: 4964471 - DNA, 25 bp, Homo sapien
catgcaaagagtgtgcgtcagactc

SEQ ID NO: 4964472 - DNA, 25 bp, Homo sapien
aaatgtctgagaacatcccctggag

SEQ ID NO: 4964473 - DNA, 25 bp, Homo sapien
tcaatgcggttaggaagaggactcg

SEQ ID NO: 4964474 - DNA, 25 bp, Homo sapien
gaataaggagcgtaattacctgcgg

SEQ ID NO: 4964475 - DNA, 25 bp, Homo sapien
tctggagttagggaacagcacacac

SEQ ID NO: 4964476 - DNA, 25 bp, Homo sapien
gctgtactcaaaatggctaaacgca

SEQ ID NO: 4964477 - DNA, 25 bp, Homo sapien
tggcagatatcctgtgcagcaaaaa

SEQ ID NO: 4964478 - DNA, 25 bp, Homo sapien
cgcaatacttctagacagcagggct

SEQ ID NO: 4964479 - DNA, 25 bp, Homo sapien
cagcagggcttataaacaatgcatt

SEQ ID NO: 4964480 - DNA, 25 bp, Homo sapien
tgctccggggagtgcgcctgtggat

SEQ ID NO: 4964481 - DNA, 25 bp, Homo sapien
ccagagaacaggtagtggttgtaga

SEQ ID NO: 4964482 - DNA, 25 bp, Homo sapien
tcctccatccagagggcggcggccg

SEQ ID NO: 4964483 - DNA, 25 bp, Homo sapien
gaaacgccccgccagtgggtgtgac

SEQ ID NO: 4964484 - DNA, 25 bp, Homo sapien
gagctgcactttaggaactgcaacc

SEQ ID NO: 4964485 - DNA, 25 bp, Homo sapien
taggaactgcaaccctacctctgaa

SEQ ID NO: 4964486 - DNA, 25 bp, Homo sapien
caacaaacaggacagtaagcaagga

SEQ ID NO: 4964487 - DNA, 25 bp, Homo sapien
aggccccagagctgcactttaggaa

SEQ ID NO: 4964488 - DNA, 25 bp, Homo sapien
tatcattagcgttggcagcacctgc

SEQ ID NO: 4964489 - DNA, 25 bp, Homo sapien
tgtccctacaattctgccgtggccg

SEQ ID NO: 4964490 - DNA, 25 bp, Homo sapien
gaaagtgctaattctgctgccagat

SEQ ID NO: 4964491 - DNA, 25 bp, Homo sapien
cgtggccggctctaacagcaatgcc

SEQ ID NO: 4964492 - DNA, 25 bp, Homo sapien
aaacttgcaaggcagtctttaagct

SEQ ID NO: 4964493 - DNA, 25 bp, Homo sapien
cttaatggtagaaagcgggtcctgt

SEQ ID NO: 4964494 - DNA, 25 bp, Homo sapien
gaacctccttgtcgtaaacttgcaa

SEQ ID NO: 4964495 - DNA, 25 bp, Homo sapien
ccaggccgatttgaagcactgatac

SEQ ID NO: 4964496 - DNA, 25 bp, Homo sapien
tggagcagttcacctgtcaaatcaa

SEQ ID NO: 4964497 - DNA, 25 bp, Homo sapien
ccaactgcgcgcgtttcaaggttga

SEQ ID NO: 4964498 - DNA, 25 bp, Homo sapien
tcaaggttgatgtacttgcttcaca

SEQ ID NO: 4964499 - DNA, 25 bp, Homo sapien
tacaaacggcaagcacaaaggcaag

SEQ ID NO: 4964500 - DNA, 25 bp, Homo sapien
ggcgtacagtcctcggtcaaagcgt

SEQ ID NO: 4964501 - DNA, 25 bp, Homo sapien
ggtcaaagcgttcccgcaaaatgga

SEQ ID NO: 4964502 - DNA, 25 bp, Homo sapien
aggtcagcatgagaggcgtacagtc

SEQ ID NO: 4964503 - DNA, 25 bp, Homo sapien
tcccgcaaaatggaccactttgttg

SEQ ID NO: 4964504 - DNA, 25 bp, Homo sapien
gaagtccatgactcctaggctgcag

SEQ ID NO: 4964505 - DNA, 25 bp, Homo sapien
taatacttaactcctcgaggtggct

SEQ ID NO: 4964506 - DNA, 25 bp, Homo sapien
gcatacagtgctctgcgcttcgaga

SEQ ID NO: 4964507 - DNA, 25 bp, Homo sapien
tggcgatgccattaaccgagagaag

SEQ ID NO: 4964508 - DNA, 25 bp, Homo sapien
caagtacggcatatcaggagtcaga

SEQ ID NO: 4964509 - DNA, 25 bp, Homo sapien
gaaaggctggatagtctctcgacac

SEQ ID NO: 4964510 - DNA, 25 bp, Homo sapien
tcctcggtgcagtagtagaattcgg

SEQ ID NO: 4964511 - DNA, 25 bp, Homo sapien
caaagtctccagtccctcgtaggta

SEQ ID NO: 4964512 - DNA, 25 bp, Homo sapien
tcccaagttaaattcagctaacaag

SEQ ID NO: 4964513 - DNA, 25 bp, Homo sapien
tctgtcgagcagcattgccaccaaa

SEQ ID NO: 4964514 - DNA, 25 bp, Homo sapien
aagaaacgtggccacatagactcga

SEQ ID NO: 4964515 - DNA, 25 bp, Homo sapien
tcagtttggtgaacatcacatccca

SEQ ID NO: 4964516 - DNA, 25 bp, Homo sapien
accttaatagcttaagctactttag

SEQ ID NO: 4964517 - DNA, 25 bp, Homo sapien
ccttaatagcttaagctactttagc

SEQ ID NO: 4964518 - DNA, 25 bp, Homo sapien
gttaacttccacaacggcctcatca

SEQ ID NO: 4964519 - DNA, 25 bp, Homo sapien
gtacgctatctgagtcgacacgccg

SEQ ID NO: 4964520 - DNA, 25 bp, Homo sapien
cttttacggacaatggcttcgctgc

SEQ ID NO: 4964521 - DNA, 25 bp, Homo sapien
agaatgcccgctgtccttttacgga

SEQ ID NO: 4964522 - DNA, 25 bp, Homo sapien
ttcaatatgctcaaatcgtccaagg

SEQ ID NO: 4964523 - DNA, 25 bp, Homo sapien
gctcaaatcgtccaaggacaaaatt

SEQ ID NO: 4964524 - DNA, 25 bp, Homo sapien
ttaatgccaatccaagcatacacac

SEQ ID NO: 4964525 - DNA, 25 bp, Homo sapien
catcttcaatatgctcaaatcgtcc

SEQ ID NO: 4964526 - DNA, 25 bp, Homo sapien
aaagtgcacggggatatcggtcaga

SEQ ID NO: 4964527 - DNA, 25 bp, Homo sapien
cttgtttcccagaaattacttctgc

SEQ ID NO: 4964528 - DNA, 25 bp, Homo sapien
gatatcggtcagaaggtcttccaga

SEQ ID NO: 4964529 - DNA, 25 bp, Homo sapien
aacagaaagtcaaagtgcacgggga

SEQ ID NO: 4964530 - DNA, 25 bp, Homo sapien
tgcagagaatgtagagaggtgtctc

SEQ ID NO: 4964531 - DNA, 25 bp, Homo sapien
tttgtgttttgcccgtggcacatgc

SEQ ID NO: 4964532 - DNA, 25 bp, Homo sapien
ccagccgtgcagagaatgtagagag

SEQ ID NO: 4964533 - DNA, 25 bp, Homo sapien
gggaggattctcattccagccgtgc

SEQ ID NO: 4964534 - DNA, 25 bp, Homo sapien
ctctggagaggtagcaaattctgaa

SEQ ID NO: 4964535 - DNA, 25 bp, Homo sapien
ctgcagcaaagttcaaaagtggaga

SEQ ID NO: 4964536 - DNA, 25 bp, Homo sapien
tctctggagaggtagcaaattctga

SEQ ID NO: 4964537 - DNA, 25 bp, Homo sapien
ttctctggagaggtagcaaattctg

SEQ ID NO: 4964538 - DNA, 25 bp, Homo sapien
taaacaaatactcgagacccactgc

SEQ ID NO: 4964539 - DNA, 25 bp, Homo sapien
gattgccattatgccttggccagca

SEQ ID NO: 4964540 - DNA, 25 bp, Homo sapien
caatgtcggtaactcgtgccaggta

SEQ ID NO: 4964541 - DNA, 25 bp, Homo sapien
tggtgtctgtagcttcaatgtcggt

SEQ ID NO: 4964542 - DNA, 25 bp, Homo sapien
aatttcttgtctctggttagtcgcc

SEQ ID NO: 4964543 - DNA, 25 bp, Homo sapien
tattcagaattcgaggacaccctac

SEQ ID NO: 4964544 - DNA, 25 bp, Homo sapien
gttagtcgcccatacttatttcgga

SEQ ID NO: 4964545 - DNA, 25 bp, Homo sapien
ggacactaatgaccataatttggcg

SEQ ID NO: 4964546 - DNA, 25 bp, Homo sapien
gccaagaagcaggaaaaagacagga

SEQ ID NO: 4964547 - DNA, 25 bp, Homo sapien
aggaaaaagacaggagatgccaatc

SEQ ID NO: 4964548 - DNA, 25 bp, Homo sapien
aaatgccaagaagcaggaaaaagac

SEQ ID NO: 4964549 - DNA, 25 bp, Homo sapien
ctaaaatgccaagaagcaggaaaaa

SEQ ID NO: 4964550 - DNA, 25 bp, Homo sapien
tctgggattcagtccttctcacaaa

SEQ ID NO: 4964551 - DNA, 25 bp, Homo sapien
tagaaataatgctggggtcctcacg

SEQ ID NO: 4964552 - DNA, 25 bp, Homo sapien
gggtcctcacggagttagagccctc

SEQ ID NO: 4964553 - DNA, 25 bp, Homo sapien
ctgaaaggtcagcaacaaggcaatg

SEQ ID NO: 4964554 - DNA, 25 bp, Homo sapien
ccctacttggctgaacattattgga

SEQ ID NO: 4964555 - DNA, 25 bp, Homo sapien
tgttagacctatcaccagagagatg

SEQ ID NO: 4964556 - DNA, 25 bp, Homo sapien
gctaagaatcttcgcaccagggcac

SEQ ID NO: 4964557 - DNA, 25 bp, Homo sapien
ttaactcaggacaaaagtacaatgg

SEQ ID NO: 4964558 - DNA, 25 bp, Homo sapien
tgacctggattacctggttctcagc

SEQ ID NO: 4964559 - DNA, 25 bp, Homo sapien
tcagctttgattcccacatccggtg

SEQ ID NO: 4964560 - DNA, 25 bp, Homo sapien
agacgggtaccaccaatccccattg

SEQ ID NO: 4964561 - DNA, 25 bp, Homo sapien
caagccagtcgattcttcctcagat

SEQ ID NO: 4964562 - DNA, 25 bp, Homo sapien
gcgctcggatgtggccgcgcggcag

SEQ ID NO: 4964563 - DNA, 25 bp, Homo sapien
gcggggctaagcaggcggctgtggg

SEQ ID NO: 4964564 - DNA, 25 bp, Homo sapien
ggtcccggggcgctcggatgtggcc

SEQ ID NO: 4964565 - DNA, 25 bp, Homo sapien
tccgcggggctaagcaggcggctgt

SEQ ID NO: 4964566 - DNA, 25 bp, Homo sapien
tcctttcctggagccgcacccccgc

SEQ ID NO: 4964567 - DNA, 25 bp, Homo sapien
tgggcagcatcacggccagccggct

SEQ ID NO: 4964568 - DNA, 25 bp, Homo sapien
gtgggcagcatcacggccagccggc

SEQ ID NO: 4964569 - DNA, 25 bp, Homo sapien
agtgggcagcatcacggccagccgg

SEQ ID NO: 4964570 - DNA, 25 bp, Homo sapien
tcatgagagcttcgagcttccaagt

SEQ ID NO: 4964571 - DNA, 25 bp, Homo sapien
gggatattattatgtctagaaagca

SEQ ID NO: 4964572 - DNA, 25 bp, Homo sapien
cgagcttccaagtatgaaatagagg

SEQ ID NO: 4964573 - DNA, 25 bp, Homo sapien
ctgggagccggtagacctcatgaga

SEQ ID NO: 4964574 - DNA, 25 bp, Homo sapien
cagagaaaggacaaccagcttccat

SEQ ID NO: 4964575 - DNA, 25 bp, Homo sapien
agccaggatcatccagagtctgata

SEQ ID NO: 4964576 - DNA, 25 bp, Homo sapien
catccagagtctgatagcgcctgca

SEQ ID NO: 4964577 - DNA, 25 bp, Homo sapien
gagaaaggacaaccagcttccatgc

SEQ ID NO: 4964578 - DNA, 25 bp, Homo sapien
agtgacttcgtgtcccctcatgaga

SEQ ID NO: 4964579 - DNA, 25 bp, Homo sapien
ggacaagccccacgttgaactctgc

SEQ ID NO: 4964580 - DNA, 25 bp, Homo sapien
tcagtcctgcgccacactatttggg

SEQ ID NO: 4964581 - DNA, 25 bp, Homo sapien
tacttgttgcttcaccgctggacag

SEQ ID NO: 4964582 - DNA, 25 bp, Homo sapien
tggacccccttgtgaaccgaacatg

SEQ ID NO: 4964583 - DNA, 25 bp, Homo sapien
gaacatgcctcaaaaacacgacgac

SEQ ID NO: 4964584 - DNA, 25 bp, Homo sapien
agcgtccaatgggacgttctgtgcc

SEQ ID NO: 4964585 - DNA, 25 bp, Homo sapien
tcaaaaacacgacgaccccagcagg

SEQ ID NO: 4964586 - DNA, 25 bp, Homo sapien
tacaaattctgtaggaactgggttc

SEQ ID NO: 4964587 - DNA, 25 bp, Homo sapien
taccccaccctttgcggggagctgc

SEQ ID NO: 4964588 - DNA, 25 bp, Homo sapien
caaattctgtaggaactgggttcca

SEQ ID NO: 4964589 - DNA, 25 bp, Homo sapien
accctttgcggggagctgcatggtt

SEQ ID NO: 4964590 - DNA, 25 bp, Homo sapien
tgggccgctgagggccatgagtgag

SEQ ID NO: 4964591 - DNA, 25 bp, Homo sapien
gagactcatctggttggtcccagcc

SEQ ID NO: 4964592 - DNA, 25 bp, Homo sapien
ggaaaaagggcctcaggagactcat

SEQ ID NO: 4964593 - DNA, 25 bp, Homo sapien
ctgcacagccttgggtgggccgctg

SEQ ID NO: 4964594 - DNA, 25 bp, Homo sapien
ggtgtccgtcaggatggcttgggcc

SEQ ID NO: 4964595 - DNA, 25 bp, Homo sapien
tgtggtgtccgtcaggatggcttgg

SEQ ID NO: 4964596 - DNA, 25 bp, Homo sapien
tatgtggtgtccgtcaggatggctt

SEQ ID NO: 4964597 - DNA, 25 bp, Homo sapien
ttatgtggtgtccgtcaggatggct

SEQ ID NO: 4964598 - DNA, 25 bp, Homo sapien
cttgtcgaagtgatatttcaacgca

SEQ ID NO: 4964599 - DNA, 25 bp, Homo sapien
gtgatatttcaacgcaagtttccga

SEQ ID NO: 4964600 - DNA, 25 bp, Homo sapien
tttcaacgcaagtttccgataggac

SEQ ID NO: 4964601 - DNA, 25 bp, Homo sapien
gaagtgatatttcaacgcaagtttc

SEQ ID NO: 4964602 - DNA, 25 bp, Homo sapien
tgtggcacaatgattccccagaggt

SEQ ID NO: 4964603 - DNA, 25 bp, Homo sapien
acaatgattccccagaggtagacag

SEQ ID NO: 4964604 - DNA, 25 bp, Homo sapien
tgattccccagaggtagacagtgaa

SEQ ID NO: 4964605 - DNA, 25 bp, Homo sapien
ctgtggcacaatgattccccagagg

SEQ ID NO: 4964606 - DNA, 25 bp, Homo sapien
tggtgtggatttcccttggttcttg

SEQ ID NO: 4964607 - DNA, 25 bp, Homo sapien
gacaaagccctgagggcgtcatcct

SEQ ID NO: 4964608 - DNA, 25 bp, Homo sapien
caaggagaagcaaattggttgattc

SEQ ID NO: 4964609 - DNA, 25 bp, Homo sapien
ttcttgggcactcaaggagaagcaa

SEQ ID NO: 4964610 - DNA, 25 bp, Homo sapien
aggctcccatgagccatttctaagt

SEQ ID NO: 4964611 - DNA, 25 bp, Homo sapien
ccaggctcccatgagccatttctaa

SEQ ID NO: 4964612 - DNA, 25 bp, Homo sapien
cgcagatgagtaaagcaacttgccc

SEQ ID NO: 4964613 - DNA, 25 bp, Homo sapien
tcttaaaacacttactgtgccaggt

SEQ ID NO: 4964614 - DNA, 25 bp, Homo sapien
ggaggtttcattactccgcagatga

SEQ ID NO: 4964615 - DNA, 25 bp, Homo sapien
gcacctttttcacgatcagggctcc

SEQ ID NO: 4964616 - DNA, 25 bp, Homo sapien
tggagtcccaggaagcaatcatctg

SEQ ID NO: 4964617 - DNA, 25 bp, Homo sapien
ctccagtaagagaatcagtttgtta

SEQ ID NO: 4964618 - DNA, 25 bp, Homo sapien
ccaatataagtactagttacctgcc

SEQ ID NO: 4964619 - DNA, 25 bp, Homo sapien
taatttgttagggtagccataagaa

SEQ ID NO: 4964620 - DNA, 25 bp, Homo sapien
ccgacggacgccagtggcagggttt

SEQ ID NO: 4964621 - DNA, 25 bp, Homo sapien
gaggggcgcaccttaaatctgaatc

SEQ ID NO: 4964622 - DNA, 25 bp, Homo sapien
tccacctccagtgctaaggcctaga

SEQ ID NO: 4964623 - DNA, 25 bp, Homo sapien
gaatcaatccacaaagcccgacgga

SEQ ID NO: 4964624 - DNA, 25 bp, Homo sapien
tgcagcatagctatcgttgatgaaa

SEQ ID NO: 4964625 - DNA, 25 bp, Homo sapien
ctatgcagcatagctatcgttgatg

SEQ ID NO: 4964626 - DNA, 25 bp, Homo sapien
catagctatcgttgatgaaacgtct

SEQ ID NO: 4964627 - DNA, 25 bp, Homo sapien
cagcatagctatcgttgatgaaacg

SEQ ID NO: 4964628 - DNA, 25 bp, Homo sapien
gttaatcaggaaattgggctctgaa

SEQ ID NO: 4964629 - DNA, 25 bp, Homo sapien
tggtgccgccaacattggcccagtc

SEQ ID NO: 4964630 - DNA, 25 bp, Homo sapien
ttaatcaggaaattgggctctgaaa

SEQ ID NO: 4964631 - DNA, 25 bp, Homo sapien
taatcaggaaattgggctctgaaag

SEQ ID NO: 4964632 - DNA, 25 bp, Homo sapien
tatgaatgctgagaggctaagtaaa

SEQ ID NO: 4964633 - DNA, 25 bp, Homo sapien
taaccatgcgattcttttcctgagc

SEQ ID NO: 4964634 - DNA, 25 bp, Homo sapien
cattataatcatcgtccatgtcgtg

SEQ ID NO: 4964635 - DNA, 25 bp, Homo sapien
caaagcagttgcctataagcctcca

SEQ ID NO: 4964636 - DNA, 25 bp, Homo sapien
gatggtaccgatctcccagggtggt

SEQ ID NO: 4964637 - DNA, 25 bp, Homo sapien
tcctcttgctaagggttgggagcat

SEQ ID NO: 4964638 - DNA, 25 bp, Homo sapien
ttcacatgcctggtacacgcacaga

SEQ ID NO: 4964639 - DNA, 25 bp, Homo sapien
agggttaagccctcgctgcacttca

SEQ ID NO: 4964640 - DNA, 25 bp, Homo sapien
ttaaatccagattattatagcctgg

SEQ ID NO: 4964641 - DNA, 25 bp, Homo sapien
cctgggtcctggacagcccatctgt

SEQ ID NO: 4964642 - DNA, 25 bp, Homo sapien
tacacctctgagtcaatggccttca

SEQ ID NO: 4964643 - DNA, 25 bp, Homo sapien
tagcctggaccccaagattgactgc

SEQ ID NO: 4964644 - DNA, 25 bp, Homo sapien
aaccaggacctcaatcaaacccatc

SEQ ID NO: 4964645 - DNA, 25 bp, Homo sapien
gaaaccaggacctcaatcaaaccca

SEQ ID NO: 4964646 - DNA, 25 bp, Homo sapien
gagggtcctgttgccccttagctcc

SEQ ID NO: 4964647 - DNA, 25 bp, Homo sapien
ccaccctattgttgtcagcctcagc

SEQ ID NO: 4964648 - DNA, 25 bp, Homo sapien
agctttaaaacttgctattggctgg

SEQ ID NO: 4964649 - DNA, 25 bp, Homo sapien
aagctttaaaacttgctattggctg

SEQ ID NO: 4964650 - DNA, 25 bp, Homo sapien
ctagaactcgggcctttttctgctc

SEQ ID NO: 4964651 - DNA, 25 bp, Homo sapien
tagaactcgggcctttttctgctcc

SEQ ID NO: 4964652 - DNA, 25 bp, Homo sapien
gaactcgggcctttttctgctccag

SEQ ID NO: 4964653 - DNA, 25 bp, Homo sapien
actcgggcctttttctgctccagag

SEQ ID NO: 4964654 - DNA, 25 bp, Homo sapien
ccaccttcagggaggtgtacccagg

SEQ ID NO: 4964655 - DNA, 25 bp, Homo sapien
tagtggctgcgtgtagcagaaacca

SEQ ID NO: 4964656 - DNA, 25 bp, Homo sapien
aaaccagcagggtaggaccggatga

SEQ ID NO: 4964657 - DNA, 25 bp, Homo sapien
tacccagggctgttagtttgaggac

SEQ ID NO: 4964658 - DNA, 25 bp, Homo sapien
aggtgccagctgcattgggacaaga

SEQ ID NO: 4964659 - DNA, 25 bp, Homo sapien
ttgcgatcacaggaggtgccagctg

SEQ ID NO: 4964660 - DNA, 25 bp, Homo sapien
ggcattgcgatcacaggaggtgcca

SEQ ID NO: 4964661 - DNA, 25 bp, Homo sapien
gtgccagctgcattgggacaagatg

SEQ ID NO: 4964662 - DNA, 25 bp, Homo sapien
gtgtagtgaaggagtttcgcaatgt

SEQ ID NO: 4964663 - DNA, 25 bp, Homo sapien
taaattggtgtagtgaaggagtttc

SEQ ID NO: 4964664 - DNA, 25 bp, Homo sapien
aagtctacggtagtgcacaggaatg

SEQ ID NO: 4964665 - DNA, 25 bp, Homo sapien
ttcacatttactcaccaccactcac

SEQ ID NO: 4964666 - DNA, 25 bp, Homo sapien
gaggctcagattcgtgtgtcacttc

SEQ ID NO: 4964667 - DNA, 25 bp, Homo sapien
tggaggctcagattcgtgtgtcact

SEQ ID NO: 4964668 - DNA, 25 bp, Homo sapien
tgaaaggtaactggagagctggaca

SEQ ID NO: 4964669 - DNA, 25 bp, Homo sapien
cttttgaaaggtaactggagagctg

SEQ ID NO: 4964670 - DNA, 25 bp, Homo sapien
accaaccattcatggtgttgcttga

SEQ ID NO: 4964671 - DNA, 25 bp, Homo sapien
tttgtcaatccagaaccaaccattc

SEQ ID NO: 4964672 - DNA, 25 bp, Homo sapien
tagctcgagtgtaagggagggactg

SEQ ID NO: 4964673 - DNA, 25 bp, Homo sapien
ctgagtagctcgagtgtaagggagg

SEQ ID NO: 4964674 - DNA, 25 bp, Homo sapien
caatcaagcaactctgggaaaaaca

SEQ ID NO: 4964675 - DNA, 25 bp, Homo sapien
taacactacatgattctctcgggaa

SEQ ID NO: 4964676 - DNA, 25 bp, Homo sapien
tgtaattagcttgagatgaccaggg

SEQ ID NO: 4964677 - DNA, 25 bp, Homo sapien
tagaagcaaggcgaaagcagatctt

SEQ ID NO: 4964678 - DNA, 25 bp, Homo sapien
ccctgctgtggaattttgcagaggg

SEQ ID NO: 4964679 - DNA, 25 bp, Homo sapien
aagcacttttgctttgcagcggaag

SEQ ID NO: 4964680 - DNA, 25 bp, Homo sapien
gaccctgctgtggaattttgcagag

SEQ ID NO: 4964681 - DNA, 25 bp, Homo sapien
ctttgcagcggaagctaggaagacc

SEQ ID NO: 4964682 - DNA, 25 bp, Homo sapien
ccaaggtgtctgcctagaaataaat

SEQ ID NO: 4964683 - DNA, 25 bp, Homo sapien
tccaaggtgtctgcctagaaataaa

SEQ ID NO: 4964684 - DNA, 25 bp, Homo sapien
catgtacggtgctttgatgtggact

SEQ ID NO: 4964685 - DNA, 25 bp, Homo sapien
gtggactcttgtgttaaatttgttc

SEQ ID NO: 4964686 - DNA, 25 bp, Homo sapien
acacatgggttgatgtgcatgtacg

SEQ ID NO: 4964687 - DNA, 25 bp, Homo sapien
tgcgcagctttgtgacgcttcagtg

SEQ ID NO: 4964688 - DNA, 25 bp, Homo sapien
cacaggtcctcattccccagatgca

SEQ ID NO: 4964689 - DNA, 25 bp, Homo sapien
acaggtcctcattccccagatgcac

SEQ ID NO: 4964690 - DNA, 25 bp, Homo sapien
caggtcctcattccccagatgcacc

SEQ ID NO: 4964691 - DNA, 25 bp, Homo sapien
tcggcccgcttgctcacgaataaag

SEQ ID NO: 4964692 - DNA, 25 bp, Homo sapien
aggaaacagccacctagccaacggt

SEQ ID NO: 4964693 - DNA, 25 bp, Homo sapien
cctagccaacggtattttgaaagcg

SEQ ID NO: 4964694 - DNA, 25 bp, Homo sapien
tgaaagcgtttgtctggagttagaa

SEQ ID NO: 4964695 - DNA, 25 bp, Homo sapien
tacaacaggtctctacaacgccaag

SEQ ID NO: 4964696 - DNA, 25 bp, Homo sapien
tctgccagcagctcttacgtaaggc

SEQ ID NO: 4964697 - DNA, 25 bp, Homo sapien
atggctgacaaaggactcgcgcaac

SEQ ID NO: 4964698 - DNA, 25 bp, Homo sapien
taatgatcagacataggagaaaccc

SEQ ID NO: 4964699 - DNA, 25 bp, Homo sapien
aaagctaagtcctgggttccgtctg

SEQ ID NO: 4964700 - DNA, 25 bp, Homo sapien
cacctgggcggagctggtagtacat

SEQ ID NO: 4964701 - DNA, 25 bp, Homo sapien
taatgtttcatggtcccagggaggg

SEQ ID NO: 4964702 - DNA, 25 bp, Homo sapien
tccacgatgcggtaatgaatccagc

SEQ ID NO: 4964703 - DNA, 25 bp, Homo sapien
tctgaacactcaggagaacgtggcc

SEQ ID NO: 4964704 - DNA, 25 bp, Homo sapien
caagtactttctcaccaagcgccag

SEQ ID NO: 4964705 - DNA, 25 bp, Homo sapien
tatggccaatgccttccggacggtg

SEQ ID NO: 4964706 - DNA, 25 bp, Homo sapien
atccaggcgcgtgtcatctaccaga

SEQ ID NO: 4964707 - DNA, 25 bp, Homo sapien
catcaggtgaacgaaaaaggcaaca

SEQ ID NO: 4964708 - DNA, 25 bp, Homo sapien
tgtgtttagcccctccagatggaag

SEQ ID NO: 4964709 - DNA, 25 bp, Homo sapien
tacacctagtattacggctgggact

SEQ ID NO: 4964710 - DNA, 25 bp, Homo sapien
tgtgcttgtgcgtgtctacacctag

SEQ ID NO: 4964711 - DNA, 25 bp, Homo sapien
gaccagagatctggccctggcctat

SEQ ID NO: 4964712 - DNA, 25 bp, Homo sapien
ggaccagagatctggccctggccta

SEQ ID NO: 4964713 - DNA, 25 bp, Homo sapien
ccaggaccagagatctggccctggc

SEQ ID NO: 4964714 - DNA, 25 bp, Homo sapien
accagagatctggccctggcctatt

SEQ ID NO: 4964715 - DNA, 25 bp, Homo sapien
ctgggcataaacctgctgagactgc

SEQ ID NO: 4964716 - DNA, 25 bp, Homo sapien
gtggcaggatctcgcccgctggagg

SEQ ID NO: 4964717 - DNA, 25 bp, Homo sapien
gagtgatgtgaatgcctgccttccc

SEQ ID NO: 4964718 - DNA, 25 bp, Homo sapien
tcagcacttagaagcccttgatagg

SEQ ID NO: 4964719 - DNA, 25 bp, Homo sapien
gatgggaaagagccaaactgggtac

SEQ ID NO: 4964720 - DNA, 25 bp, Homo sapien
ggatgggaaagagccaaactgggta

SEQ ID NO: 4964721 - DNA, 25 bp, Homo sapien
tcagggatgggaaagagccaaactg

SEQ ID NO: 4964722 - DNA, 25 bp, Homo sapien
agggatgggaaagagccaaactggg

SEQ ID NO: 4964723 - DNA, 25 bp, Homo sapien
tgtcccatctggcagttaacgcctt

SEQ ID NO: 4964724 - DNA, 25 bp, Homo sapien
tgtagaaagccgtaaagtccacgct

SEQ ID NO: 4964725 - DNA, 25 bp, Homo sapien
agtccacgctactgttgaaaatgtt

SEQ ID NO: 4964726 - DNA, 25 bp, Homo sapien
cctgccttgggttcgtgttaaatgg

SEQ ID NO: 4964727 - DNA, 25 bp, Homo sapien
cagccagttagtgccacctgagtac

SEQ ID NO: 4964728 - DNA, 25 bp, Homo sapien
caccctggtgaccaattcagtgtaa

SEQ ID NO: 4964729 - DNA, 25 bp, Homo sapien
tattgttgctccacgcagactgcag

SEQ ID NO: 4964730 - DNA, 25 bp, Homo sapien
cagtgtaacctttgcacgtactcag

SEQ ID NO: 4964731 - DNA, 25 bp, Homo sapien
ttcctacctgcaagacgaacaatgt

SEQ ID NO: 4964732 - DNA, 25 bp, Homo sapien
gttgcaaaacactggagctagagaa

SEQ ID NO: 4964733 - DNA, 25 bp, Homo sapien
ttcctccaaagtccccataaagctg

SEQ ID NO: 4964734 - DNA, 25 bp, Homo sapien
caatgtatgtttcaagggtgagcaa

SEQ ID NO: 4964735 - DNA, 25 bp, Homo sapien
ctggcgagggtggcacttttctttc

SEQ ID NO: 4964736 - DNA, 25 bp, Homo sapien
gcgagggtggcacttttctttctca

SEQ ID NO: 4964737 - DNA, 25 bp, Homo sapien
ggcgagggtggcacttttctttctc

SEQ ID NO: 4964738 - DNA, 25 bp, Homo sapien
tggcgagggtggcacttttctttct

SEQ ID NO: 4964739 - DNA, 25 bp, Homo sapien
caaggaggtgtgtcacaccaaagag

SEQ ID NO: 4964740 - DNA, 25 bp, Homo sapien
agaggtgacatacaccattgtgtga

SEQ ID NO: 4964741 - DNA, 25 bp, Homo sapien
aactgattcccatggattcgcagcc

SEQ ID NO: 4964742 - DNA, 25 bp, Homo sapien
ccatggattcgcagcctcagggctt

SEQ ID NO: 4964743 - DNA, 25 bp, Homo sapien
taccttttacagcttgaataagggc

SEQ ID NO: 4964744 - DNA, 25 bp, Homo sapien
gagtaccttttacagcttgaataag

SEQ ID NO: 4964745 - DNA, 25 bp, Homo sapien
cttttacagcttgaataagggccat

SEQ ID NO: 4964746 - DNA, 25 bp, Homo sapien
ccttttacagcttgaataagggcca

SEQ ID NO: 4964747 - DNA, 25 bp, Homo sapien
tgtgttgaggtatgtatagtgccat

SEQ ID NO: 4964748 - DNA, 25 bp, Homo sapien
gaggtatgtatagtgccatcttctt

SEQ ID NO: 4964749 - DNA, 25 bp, Homo sapien
ttgaggtatgtatagtgccatcttc

SEQ ID NO: 4964750 - DNA, 25 bp, Homo sapien
tgttgaggtatgtatagtgccatct

SEQ ID NO: 4964751 - DNA, 25 bp, Homo sapien
tatcatctaactggttactgttaca

SEQ ID NO: 4964752 - DNA, 25 bp, Homo sapien
gatgaccccacaatgtctcttctgt

SEQ ID NO: 4964753 - DNA, 25 bp, Homo sapien
tatagatgaccccacaatgtctctt

SEQ ID NO: 4964754 - DNA, 25 bp, Homo sapien
aaaccatttctgtatctgagctatc

SEQ ID NO: 4964755 - DNA, 25 bp, Homo sapien
tctcatgtaatccaaaatggctctg

SEQ ID NO: 4964756 - DNA, 25 bp, Homo sapien
agccttctatactttggtacgtctt

SEQ ID NO: 4964757 - DNA, 25 bp, Homo sapien
actttggtacgtcttttgcttatga

SEQ ID NO: 4964758 - DNA, 25 bp, Homo sapien
cgtcttttgcttatgaaaatcaaac

SEQ ID NO: 4964759 - DNA, 25 bp, Homo sapien
ttaactttgtcaaccagcaggcagc

SEQ ID NO: 4964760 - DNA, 25 bp, Homo sapien
cctcatgtgggttcatgggagacaa

SEQ ID NO: 4964761 - DNA, 25 bp, Homo sapien
caagaacatttctgagctgaggctt

SEQ ID NO: 4964762 - DNA, 25 bp, Homo sapien
ggcatttgcttgacaagaacatttc

SEQ ID NO: 4964763 - DNA, 25 bp, Homo sapien
gcagctgacatagaagaccgagtga

SEQ ID NO: 4964764 - DNA, 25 bp, Homo sapien
gctgatggtggaaaacggagtctct

SEQ ID NO: 4964765 - DNA, 25 bp, Homo sapien
ccttccgtgaagacgagagctgatg

SEQ ID NO: 4964766 - DNA, 25 bp, Homo sapien
agtctcttggaacaggcttgggccc

SEQ ID NO: 4964767 - DNA, 25 bp, Homo sapien
ttttccaggccacaatatgtatgtt

SEQ ID NO: 4964768 - DNA, 25 bp, Homo sapien
tttccaggccacaatatgtatgttc

SEQ ID NO: 4964769 - DNA, 25 bp, Homo sapien
cattttccaggccacaatatgtatg

SEQ ID NO: 4964770 - DNA, 25 bp, Homo sapien
ccattttccaggccacaatatgtat

SEQ ID NO: 4964771 - DNA, 25 bp, Homo sapien
tttgtgctggctagtactccggtcg

SEQ ID NO: 4964772 - DNA, 25 bp, Homo sapien
gaacattgcaatgtggagcccaaac

SEQ ID NO: 4964773 - DNA, 25 bp, Homo sapien
tgttatgcatgtagagaacccaaac

SEQ ID NO: 4964774 - DNA, 25 bp, Homo sapien
tcggtgtcagcagcacgtggcattg

SEQ ID NO: 4964775 - DNA, 25 bp, Homo sapien
gtgcttttcatagagacaccctggg

SEQ ID NO: 4964776 - DNA, 25 bp, Homo sapien
tgtcttggacaagcggagattctcc

SEQ ID NO: 4964777 - DNA, 25 bp, Homo sapien
gaatccttgggtgtacaactcatcc

SEQ ID NO: 4964778 - DNA, 25 bp, Homo sapien
tggacagctcagtaagcctggccct

SEQ ID NO: 4964779 - DNA, 25 bp, Homo sapien
caaaaagctgggctccagctgccca

SEQ ID NO: 4964780 - DNA, 25 bp, Homo sapien
aaaaagctgggctccagctgcccac

SEQ ID NO: 4964781 - DNA, 25 bp, Homo sapien
gttatacacggagaccagggaggcc

SEQ ID NO: 4964782 - DNA, 25 bp, Homo sapien
cttagtcttatagcgtctgttctgg

SEQ ID NO: 4964783 - DNA, 25 bp, Homo sapien
cgaggagagctgctttcgcttagtc

SEQ ID NO: 4964784 - DNA, 25 bp, Homo sapien
tagtaaggatagctgttatacacgg

SEQ ID NO: 4964785 - DNA, 25 bp, Homo sapien
aagccttggaagggcgcctgaagtg

SEQ ID NO: 4964786 - DNA, 25 bp, Homo sapien
tggaagggcgcctgaagtgttttca

SEQ ID NO: 4964787 - DNA, 25 bp, Homo sapien
ccttggaagggcgcctgaagtgttt

SEQ ID NO: 4964788 - DNA, 25 bp, Homo sapien
ttggaagggcgcctgaagtgttttc

SEQ ID NO: 4964789 - DNA, 25 bp, Homo sapien
gctcggtctctgccagcgtctcggc

SEQ ID NO: 4964790 - DNA, 25 bp, Homo sapien
ctggctcggtctctgccagcgtctc

SEQ ID NO: 4964791 - DNA, 25 bp, Homo sapien
tggctcggtctctgccagcgtctcg

SEQ ID NO: 4964792 - DNA, 25 bp, Homo sapien
ggctcggtctctgccagcgtctcgg

SEQ ID NO: 4964793 - DNA, 25 bp, Homo sapien
ggcccggtgctcagctggtcgttct

SEQ ID NO: 4964794 - DNA, 25 bp, Homo sapien
ggtgctcagctggtcgttctgcgcc

SEQ ID NO: 4964795 - DNA, 25 bp, Homo sapien
cccggtgctcagctggtcgttctgc

SEQ ID NO: 4964796 - DNA, 25 bp, Homo sapien
gtgctcagctggtcgttctgcgccc

SEQ ID NO: 4964797 - DNA, 25 bp, Homo sapien
gtctctggctgctcgtgcggccgcc

SEQ ID NO: 4964798 - DNA, 25 bp, Homo sapien
tgtctctggctgctcgtgcggccgc

SEQ ID NO: 4964799 - DNA, 25 bp, Homo sapien
ctctggctgctcgtgcggccgcctt

SEQ ID NO: 4964800 - DNA, 25 bp, Homo sapien
ctgtctctggctgctcgtgcggccg

SEQ ID NO: 4964801 - DNA, 25 bp, Homo sapien
cctggatgaggaaggacgtgagcgg

SEQ ID NO: 4964802 - DNA, 25 bp, Homo sapien
aggatgtcctggatgaggaaggacg

SEQ ID NO: 4964803 - DNA, 25 bp, Homo sapien
gatgtcctggatgaggaaggacgtg

SEQ ID NO: 4964804 - DNA, 25 bp, Homo sapien
tgtcctggatgaggaaggacgtgag

SEQ ID NO: 4964805 - DNA, 25 bp, Homo sapien
ggccccgccttggcctgaatgcacc

SEQ ID NO: 4964806 - DNA, 25 bp, Homo sapien
gccttggcctgaatgcacccgcccg

SEQ ID NO: 4964807 - DNA, 25 bp, Homo sapien
ccgccttggcctgaatgcacccgcc

SEQ ID NO: 4964808 - DNA, 25 bp, Homo sapien
ttggcctgaatgcacccgcccggcc

SEQ ID NO: 4964809 - DNA, 25 bp, Homo sapien
gcttcttctgctactattctgtgtt

SEQ ID NO: 4964810 - DNA, 25 bp, Homo sapien
tgctactattctgtgttagaagagg

SEQ ID NO: 4964811 - DNA, 25 bp, Homo sapien
aataacattgattaatttcctactc

SEQ ID NO: 4964812 - DNA, 25 bp, Homo sapien
gtaactgcttcttctgctactattc

SEQ ID NO: 4964813 - DNA, 25 bp, Homo sapien
attggaggatggtaggcccgctaga

SEQ ID NO: 4964814 - DNA, 25 bp, Homo sapien
ttaattggaggatggtaggcccgct

SEQ ID NO: 4964815 - DNA, 25 bp, Homo sapien
gaggatggtaggcccgctagatcac

SEQ ID NO: 4964816 - DNA, 25 bp, Homo sapien
tggaggatggtaggcccgctagatc

SEQ ID NO: 4964817 - DNA, 25 bp, Homo sapien
ggctgctgcgtacagatgcaagagc

SEQ ID NO: 4964818 - DNA, 25 bp, Homo sapien
aaagtcacgcgccttagtactgctc

SEQ ID NO: 4964819 - DNA, 25 bp, Homo sapien
atgcaagagcctctcgggcctctgg

SEQ ID NO: 4964820 - DNA, 25 bp, Homo sapien
agccttggtgttcttcagtccctgt

SEQ ID NO: 4964821 - DNA, 25 bp, Homo sapien
gccgttgggtagcagcttccttcca

SEQ ID NO: 4964822 - DNA, 25 bp, Homo sapien
aaagaagcgccgttgggtagcagct

SEQ ID NO: 4964823 - DNA, 25 bp, Homo sapien
ttcagagatccctccggaaagaagc

SEQ ID NO: 4964824 - DNA, 25 bp, Homo sapien
atccctccggaaagaagcgccgttg

SEQ ID NO: 4964825 - DNA, 25 bp, Homo sapien
aggggaagggaacgagcatctggcc

SEQ ID NO: 4964826 - DNA, 25 bp, Homo sapien
gggaagggaacgagcatctggccct

SEQ ID NO: 4964827 - DNA, 25 bp, Homo sapien
gttggcagagtcaagccgaggagcc

SEQ ID NO: 4964828 - DNA, 25 bp, Homo sapien
gaggggaagggaacgagcatctggc

SEQ ID NO: 4964829 - DNA, 25 bp, Homo sapien
tggccagccagttccagcgacttgt

SEQ ID NO: 4964830 - DNA, 25 bp, Homo sapien
tagggcgacactgctgcactgtagg

SEQ ID NO: 4964831 - DNA, 25 bp, Homo sapien
tagcctccgtagcaagagtagggcg

SEQ ID NO: 4964832 - DNA, 25 bp, Homo sapien
agcacctgcgcctgcgaaaagagca

SEQ ID NO: 4964833 - DNA, 25 bp, Homo sapien
cgctccagtcgcaggatgtccttga

SEQ ID NO: 4964834 - DNA, 25 bp, Homo sapien
gcgttgtgaacctctgaccctcgcg

SEQ ID NO: 4964835 - DNA, 25 bp, Homo sapien
gaacttcccgtcttgtcgctgcagg

SEQ ID NO: 4964836 - DNA, 25 bp, Homo sapien
ggttctcgcagaaaccacgtgctag

SEQ ID NO: 4964837 - DNA, 25 bp, Homo sapien
cgtgccagcttgtgtgcgcgtataa

SEQ ID NO: 4964838 - DNA, 25 bp, Homo sapien
ctgcggcccgcgcaaagtggtcaga

SEQ ID NO: 4964839 - DNA, 25 bp, Homo sapien
ttaaagcggattgcctggagcgtgc

SEQ ID NO: 4964840 - DNA, 25 bp, Homo sapien
tcttaaagggctccgcgaatggtgg

SEQ ID NO: 4964841 - DNA, 25 bp, Homo sapien
tccgcggtaggagttccgcctcgtc

SEQ ID NO: 4964842 - DNA, 25 bp, Homo sapien
gggatactgacgactcgctgggttc

SEQ ID NO: 4964843 - DNA, 25 bp, Homo sapien
tgaacttagaatatttccgcggtag

SEQ ID NO: 4964844 - DNA, 25 bp, Homo sapien
tcgctgggttctcgccttccaagtg

SEQ ID NO: 4964845 - DNA, 25 bp, Homo sapien
aggttttctcactaccaatcctggg

SEQ ID NO: 4964846 - DNA, 25 bp, Homo sapien
tgagagtgcctattacatggaaaag

SEQ ID NO: 4964847 - DNA, 25 bp, Homo sapien
taagaaacttatttgaggccacatc

SEQ ID NO: 4964848 - DNA, 25 bp, Homo sapien
gcgttagtacactcactccgtagaa

SEQ ID NO: 4964849 - DNA, 25 bp, Homo sapien
ttttattgtagaatgtcaccagctc

SEQ ID NO: 4964850 - DNA, 25 bp, Homo sapien
tttattgtagaatgtcaccagctca

SEQ ID NO: 4964851 - DNA, 25 bp, Homo sapien
ttattgtagaatgtcaccagctcac

SEQ ID NO: 4964852 - DNA, 25 bp, Homo sapien
cattaatgtgcctaatttcatccac

SEQ ID NO: 4964853 - DNA, 25 bp, Homo sapien
tttgtctgccggactggcattaatg

SEQ ID NO: 4964854 - DNA, 25 bp, Homo sapien
catccacttgatggataacgttttc

SEQ ID NO: 4964855 - DNA, 25 bp, Homo sapien
ttatcattaaaatctatgatgttga

SEQ ID NO: 4964856 - DNA, 25 bp, Homo sapien
taagagacgggttgatcactggtgc

SEQ ID NO: 4964857 - DNA, 25 bp, Homo sapien
ctgattaccatatttaagagacggg

SEQ ID NO: 4964858 - DNA, 25 bp, Homo sapien
tttaagagacgggttgatcactggt

SEQ ID NO: 4964859 - DNA, 25 bp, Homo sapien
gacgggttgatcactggtgcatcct

SEQ ID NO: 4964860 - DNA, 25 bp, Homo sapien
acgctgctgggcgacgcttatctgc

SEQ ID NO: 4964861 - DNA, 25 bp, Homo sapien
gggccttcccggatcgctgattcgg

SEQ ID NO: 4964862 - DNA, 25 bp, Homo sapien
cgctcgccagctccgtttcaattaa

SEQ ID NO: 4964863 - DNA, 25 bp, Homo sapien
agaaaaccctcagcggccagagagg

SEQ ID NO: 4964864 - DNA, 25 bp, Homo sapien
tccacatcatttagctttgggatgg

SEQ ID NO: 4964865 - DNA, 25 bp, Homo sapien
tagctttgggatggttgcacagaag

SEQ ID NO: 4964866 - DNA, 25 bp, Homo sapien
cagggcagggtcgtgagggctttct

SEQ ID NO: 4964867 - DNA, 25 bp, Homo sapien
taaggtgcaaacgtggaatgcatcc

SEQ ID NO: 4964868 - DNA, 25 bp, Homo sapien
tgttcactcctacgcatactactgg

SEQ ID NO: 4964869 - DNA, 25 bp, Homo sapien
ttccctattctcagcaaaaccaggc

SEQ ID NO: 4964870 - DNA, 25 bp, Homo sapien
tatggaccaactggggaagaatttc

SEQ ID NO: 4964871 - DNA, 25 bp, Homo sapien
cagaaagcatcgcaggtaaggaagc

SEQ ID NO: 4964872 - DNA, 25 bp, Homo sapien
ccagatggtttgagctgagtacctc

SEQ ID NO: 4964873 - DNA, 25 bp, Homo sapien
tacgtcgctgactcgaagctgggcg

SEQ ID NO: 4964874 - DNA, 25 bp, Homo sapien
aagaatgtttacgtggtgccaggac

SEQ ID NO: 4964875 - DNA, 25 bp, Homo sapien
tgagttcttaacaccagggcacttc

SEQ ID NO: 4964876 - DNA, 25 bp, Homo sapien
tggctgggcctcttggcagaaatac

SEQ ID NO: 4964877 - DNA, 25 bp, Homo sapien
cttggctgggcctcttggcagaaat

SEQ ID NO: 4964878 - DNA, 25 bp, Homo sapien
ttggctgggcctcttggcagaaata

SEQ ID NO: 4964879 - DNA, 25 bp, Homo sapien
ggctgggcctcttggcagaaataca

SEQ ID NO: 4964880 - DNA, 25 bp, Homo sapien
ctgggttttctctgaacttcctcaa

SEQ ID NO: 4964881 - DNA, 25 bp, Homo sapien
gctgggttttctctgaacttcctca

SEQ ID NO: 4964882 - DNA, 25 bp, Homo sapien
ggctgggttttctctgaacttcctc

SEQ ID NO: 4964883 - DNA, 25 bp, Homo sapien
gctttcaatatatataagctcatat

SEQ ID NO: 4964884 - DNA, 25 bp, Homo sapien
catggccagcacatggaaagctctt

SEQ ID NO: 4964885 - DNA, 25 bp, Homo sapien
tttactgaagatacacaccctgaaa

SEQ ID NO: 4964886 - DNA, 25 bp, Homo sapien
tcttatcgcagtacctagtgcaaag

SEQ ID NO: 4964887 - DNA, 25 bp, Homo sapien
aatgcagggcttcagtgtatctcgc

SEQ ID NO: 4964888 - DNA, 25 bp, Homo sapien
tatctcgcaggtcatctggaaccgc

SEQ ID NO: 4964889 - DNA, 25 bp, Homo sapien
gaagatttcaacatacctaagggcc

SEQ ID NO: 4964890 - DNA, 25 bp, Homo sapien
aaataaatggatcacatgccctggc

SEQ ID NO: 4964891 - DNA, 25 bp, Homo sapien
tatacccacgagagcttcagaagca

SEQ ID NO: 4964892 - DNA, 25 bp, Homo sapien
tccttgacctctgacagttgagcag

SEQ ID NO: 4964893 - DNA, 25 bp, Homo sapien
cttagaaaagggagtggttgagatc

SEQ ID NO: 4964894 - DNA, 25 bp, Homo sapien
acctctgacagttgagcaggtcctg

SEQ ID NO: 4964895 - DNA, 25 bp, Homo sapien
caagaccactcttgtcggctggcac

SEQ ID NO: 4964896 - DNA, 25 bp, Homo sapien
aagaccactcttgtcggctggcact

SEQ ID NO: 4964897 - DNA, 25 bp, Homo sapien
accactcttgtcggctggcactttc

SEQ ID NO: 4964898 - DNA, 25 bp, Homo sapien
cggctggcactttccttcccacctc

SEQ ID NO: 4964899 - DNA, 25 bp, Homo sapien
ttcttcctgtacgacactgtcccta

SEQ ID NO: 4964900 - DNA, 25 bp, Homo sapien
tcttcctgtacgacactgtccctac

SEQ ID NO: 4964901 - DNA, 25 bp, Homo sapien
tttcttcctgtacgacactgtccct

SEQ ID NO: 4964902 - DNA, 25 bp, Homo sapien
ctttcttcctgtacgacactgtccc

SEQ ID NO: 4964903 - DNA, 25 bp, Homo sapien
cagtttcaattgtggtcaggcctca

SEQ ID NO: 4964904 - DNA, 25 bp, Homo sapien
cagatcactgcagaaggactcggga

SEQ ID NO: 4964905 - DNA, 25 bp, Homo sapien
gagaattgacttccagcatagcggg

SEQ ID NO: 4964906 - DNA, 25 bp, Homo sapien
gaatactttgccgactgtgccagat

SEQ ID NO: 4964907 - DNA, 25 bp, Homo sapien
agagatgtcagctgtttcccagcct

SEQ ID NO: 4964908 - DNA, 25 bp, Homo sapien
cttgaattgctttcagaagcagaga

SEQ ID NO: 4964909 - DNA, 25 bp, Homo sapien
agcagagagatgtcagctgtttccc

SEQ ID NO: 4964910 - DNA, 25 bp, Homo sapien
agagagatgtcagctgtttcccagc

SEQ ID NO: 4964911 - DNA, 25 bp, Homo sapien
cctggccctcacaaagaactcggat

SEQ ID NO: 4964912 - DNA, 25 bp, Homo sapien
caaagaggaaacaagtgtctggaac

SEQ ID NO: 4964913 - DNA, 25 bp, Homo sapien
gaggtgcagtgaaactgcatatact

SEQ ID NO: 4964914 - DNA, 25 bp, Homo sapien
gtgtctggaacagggtgcacactca

SEQ ID NO: 4964915 - DNA, 25 bp, Homo sapien
gtctcaatgtcttgaagtgttctct

SEQ ID NO: 4964916 - DNA, 25 bp, Homo sapien
cattgaggggcatcttcccagtgga

SEQ ID NO: 4964917 - DNA, 25 bp, Homo sapien
gcatcttcccagtggaggtgttgta

SEQ ID NO: 4964918 - DNA, 25 bp, Homo sapien
tcagcagcattgaggggcatcttcc

SEQ ID NO: 4964919 - DNA, 25 bp, Homo sapien
ctcgactgattctgtggatatactt

SEQ ID NO: 4964920 - DNA, 25 bp, Homo sapien
tcgactgattctgtggatatacttt

SEQ ID NO: 4964921 - DNA, 25 bp, Homo sapien
gactgattctgtggatatacttttc

SEQ ID NO: 4964922 - DNA, 25 bp, Homo sapien
actgattctgtggatatacttttcc

SEQ ID NO: 4964923 - DNA, 25 bp, Homo sapien
tagttgatgactaaagaaacctgct

SEQ ID NO: 4964924 - DNA, 25 bp, Homo sapien
ctattggtgggaaggtcatagttga

SEQ ID NO: 4964925 - DNA, 25 bp, Homo sapien
tattggtgggaaggtcatagttgat

SEQ ID NO: 4964926 - DNA, 25 bp, Homo sapien
agaaacctgctgcacctcagtgcct

SEQ ID NO: 4964927 - DNA, 25 bp, Homo sapien
ggggcactgcatgttcccttggaga

SEQ ID NO: 4964928 - DNA, 25 bp, Homo sapien
aggggcactgcatgttcccttggag

SEQ ID NO: 4964929 - DNA, 25 bp, Homo sapien
gaggggcactgcatgttcccttgga

SEQ ID NO: 4964930 - DNA, 25 bp, Homo sapien
gggcactgcatgttcccttggagag

SEQ ID NO: 4964931 - DNA, 25 bp, Homo sapien
caattttttgagtggctttgcttaa

SEQ ID NO: 4964932 - DNA, 25 bp, Homo sapien
tttaagagccaattttttgagtggc

SEQ ID NO: 4964933 - DNA, 25 bp, Homo sapien
taagagccaattttttgagtggctt

SEQ ID NO: 4964934 - DNA, 25 bp, Homo sapien
gagccaattttttgagtggctttgc

SEQ ID NO: 4964935 - DNA, 25 bp, Homo sapien
ggtgacaagctttggatgacatatt

SEQ ID NO: 4964936 - DNA, 25 bp, Homo sapien
ttggatgacatatttgctccatggc

SEQ ID NO: 4964937 - DNA, 25 bp, Homo sapien
tattgaggaagttgggtgacaagct

SEQ ID NO: 4964938 - DNA, 25 bp, Homo sapien
tatttgctaatattgaggaagttgg

SEQ ID NO: 4964939 - DNA, 25 bp, Homo sapien
ttttggggctatgctctctcctttg

SEQ ID NO: 4964940 - DNA, 25 bp, Homo sapien
ctttgtaagttgttcttgtcccttg

SEQ ID NO: 4964941 - DNA, 25 bp, Homo sapien
tagaaaattgaggatgtgacaattt

SEQ ID NO: 4964942 - DNA, 25 bp, Homo sapien
agttgttcttgtcccttgatgctgt

SEQ ID NO: 4964943 - DNA, 25 bp, Homo sapien
ggttgacttgtgttgaggtagatac

SEQ ID NO: 4964944 - DNA, 25 bp, Homo sapien
aagccacgtctgaatgatcctggct

SEQ ID NO: 4964945 - DNA, 25 bp, Homo sapien
gctatactgggttgacttgtgttga

SEQ ID NO: 4964946 - DNA, 25 bp, Homo sapien
agagggcctacactcatcagaagct

SEQ ID NO: 4964947 - DNA, 25 bp, Homo sapien
tcatgaagggtgtacacagagcttc

SEQ ID NO: 4964948 - DNA, 25 bp, Homo sapien
ctcttaggtcctctgtagtggcgca

SEQ ID NO: 4964949 - DNA, 25 bp, Homo sapien
cacagagcttctatcagatattggc

SEQ ID NO: 4964950 - DNA, 25 bp, Homo sapien
tgtccactgatgacatgctcgatgt

SEQ ID NO: 4964951 - DNA, 25 bp, Homo sapien
tataaagtgtattctcatcaggccc

SEQ ID NO: 4964952 - DNA, 25 bp, Homo sapien
aacccttgcccttaatctgccccat

SEQ ID NO: 4964953 - DNA, 25 bp, Homo sapien
aaagtgtattctcatcaggccccat

SEQ ID NO: 4964954 - DNA, 25 bp, Homo sapien
gtgtattctcatcaggccccattgt

SEQ ID NO: 4964955 - DNA, 25 bp, Homo sapien
catggctagagtcacctgtttcaaa

SEQ ID NO: 4964956 - DNA, 25 bp, Homo sapien
ttttcaagaataacaatgaaagaca

SEQ ID NO: 4964957 - DNA, 25 bp, Homo sapien
caagaataacaatgaaagacatggg

SEQ ID NO: 4964958 - DNA, 25 bp, Homo sapien
tcaagaataacaatgaaagacatgg

SEQ ID NO: 4964959 - DNA, 25 bp, Homo sapien
agtttttcaagaataacaatgaaag

SEQ ID NO: 4964960 - DNA, 25 bp, Homo sapien
gaaggaattcaccaaaggcttcata

SEQ ID NO: 4964961 - DNA, 25 bp, Homo sapien
atcttagaaggaattcaccaaaggc

SEQ ID NO: 4964962 - DNA, 25 bp, Homo sapien
ttatcttagaaggaattcaccaaag

SEQ ID NO: 4964963 - DNA, 25 bp, Homo sapien
tatttttatcttagaaggaattcac

SEQ ID NO: 4964964 - DNA, 25 bp, Homo sapien
cattaccatgatatgtttcataacc

SEQ ID NO: 4964965 - DNA, 25 bp, Homo sapien
tcattaccatgatatgtttcataac

SEQ ID NO: 4964966 - DNA, 25 bp, Homo sapien
attaccatgatatgtttcataacct

SEQ ID NO: 4964967 - DNA, 25 bp, Homo sapien
catgcaaactggtctaggtcagccc

SEQ ID NO: 4964968 - DNA, 25 bp, Homo sapien
ctgcagcaaacacaagacgaagctt

SEQ ID NO: 4964969 - DNA, 25 bp, Homo sapien
aaactagcaacattgtgagaactgc

SEQ ID NO: 4964970 - DNA, 25 bp, Homo sapien
tcacaagagaagaatcatgcaaact

SEQ ID NO: 4964971 - DNA, 25 bp, Homo sapien
tgtcgcattggggtcctggcttagt

SEQ ID NO: 4964972 - DNA, 25 bp, Homo sapien
gtttgcaaaatggacacaacacaca

SEQ ID NO: 4964973 - DNA, 25 bp, Homo sapien
tcctggcttagttgggtttgcaaaa

SEQ ID NO: 4964974 - DNA, 25 bp, Homo sapien
ggacacaacacacaaactttaatag

SEQ ID NO: 4964975 - DNA, 25 bp, Homo sapien
gagtctaacttagaatatggtctac

SEQ ID NO: 4964976 - DNA, 25 bp, Homo sapien
gaggggaagagtctaacttagaata

SEQ ID NO: 4964977 - DNA, 25 bp, Homo sapien
gggaagagtctaacttagaatatgg

SEQ ID NO: 4964978 - DNA, 25 bp, Homo sapien
gaagagtctaacttagaatatggtc

SEQ ID NO: 4964979 - DNA, 25 bp, Homo sapien
aaatgcccttaacaatctgatgtca

SEQ ID NO: 4964980 - DNA, 25 bp, Homo sapien
tataaaaatgcccttaacaatctga

SEQ ID NO: 4964981 - DNA, 25 bp, Homo sapien
ggcagtgtccataagtttggggacc

SEQ ID NO: 4964982 - DNA, 25 bp, Homo sapien
aatctgatgtcagcacgcttagagg

SEQ ID NO: 4964983 - DNA, 25 bp, Homo sapien
tacctaagcgagtttggagtggccc

SEQ ID NO: 4964984 - DNA, 25 bp, Homo sapien
taagtggtccaagcccatagggatg

SEQ ID NO: 4964985 - DNA, 25 bp, Homo sapien
gactactttggcaggcagcgtgcta

SEQ ID NO: 4964986 - DNA, 25 bp, Homo sapien
tgggcagtgacgctcataagggact

SEQ ID NO: 4964987 - DNA, 25 bp, Homo sapien
cactctcatgggatgtgcgtttgat

SEQ ID NO: 4964988 - DNA, 25 bp, Homo sapien
tctcatgggatgtgcgtttgatgtg

SEQ ID NO: 4964989 - DNA, 25 bp, Homo sapien
tttgatgtgggagggagagtcctcc

SEQ ID NO: 4964990 - DNA, 25 bp, Homo sapien
ttatgcactctcatgggatgtgcgt

SEQ ID NO: 4964991 - DNA, 25 bp, Homo sapien
tctgcggctcattggtgcgtctcct

SEQ ID NO: 4964992 - DNA, 25 bp, Homo sapien
tcctgttgaagtcagctcgtgggtg

SEQ ID NO: 4964993 - DNA, 25 bp, Homo sapien
ctggccatgttaggcccaattttct

SEQ ID NO: 4964994 - DNA, 25 bp, Homo sapien
ggctgtctctgattgtgctgactgt

SEQ ID NO: 4964995 - DNA, 25 bp, Homo sapien
gaacgttctgtgtgagggtttataa

SEQ ID NO: 4964996 - DNA, 25 bp, Homo sapien
tactgcctaggaacgttctgtgtga

SEQ ID NO: 4964997 - DNA, 25 bp, Homo sapien
agtcctttgtttcccttgatcaata

SEQ ID NO: 4964998 - DNA, 25 bp, Homo sapien
acacatactgcctaggaacgttctg

SEQ ID NO: 4964999 - DNA, 25 bp, Homo sapien
tagttctgcctaaagacctctctgc

SEQ ID NO: 4965000 - DNA, 25 bp, Homo sapien
aaattgggacctctagtcgagtagc

SEQ ID NO: 4965001 - DNA, 25 bp, Homo sapien
ttcctaatggtgaaggaagtctcca

SEQ ID NO: 4965002 - DNA, 25 bp, Homo sapien
gattagtatcgcctcaaaattggaa

SEQ ID NO: 4965003 - DNA, 25 bp, Homo sapien
ccctgattgtgaaaaagtagactca

SEQ ID NO: 4965004 - DNA, 25 bp, Homo sapien
ccagtcccctgattgtgaaaaagta

SEQ ID NO: 4965005 - DNA, 25 bp, Homo sapien
gattgtgaaaaagtagactcagttt

SEQ ID NO: 4965006 - DNA, 25 bp, Homo sapien
gctcccagtcccctgattgtgaaaa

SEQ ID NO: 4965007 - DNA, 25 bp, Homo sapien
cccgttggcgatgcattttaagctc

SEQ ID NO: 4965008 - DNA, 25 bp, Homo sapien
aagtgattgggcagctggacgacct

SEQ ID NO: 4965009 - DNA, 25 bp, Homo sapien
cagggttccgcttggcgatgctgca

SEQ ID NO: 4965010 - DNA, 25 bp, Homo sapien
gaaagtggagcacctccgaatggcg

SEQ ID NO: 4965011 - DNA, 25 bp, Homo sapien
cagcgctgtacaagaaggatttaca

SEQ ID NO: 4965012 - DNA, 25 bp, Homo sapien
tcaaatttagcagcgctgtacaaga

SEQ ID NO: 4965013 - DNA, 25 bp, Homo sapien
agccgacctgtagagcactgttgag

SEQ ID NO: 4965014 - DNA, 25 bp, Homo sapien
cgcagccgacctgtagagcactgtt

SEQ ID NO: 4965015 - DNA, 25 bp, Homo sapien
tccaagagggtacgtgccagatttc

SEQ ID NO: 4965016 - DNA, 25 bp, Homo sapien
ctgcagggacgactgaatggagccc

SEQ ID NO: 4965017 - DNA, 25 bp, Homo sapien
ggttttctctgaatccgccctggat

SEQ ID NO: 4965018 - DNA, 25 bp, Homo sapien
tatagagagcgctttgaagcatgcc

SEQ ID NO: 4965019 - DNA, 25 bp, Homo sapien
tgagccgccactcgggatttcctgg

SEQ ID NO: 4965020 - DNA, 25 bp, Homo sapien
tgagttttgagccgccactcgggat

SEQ ID NO: 4965021 - DNA, 25 bp, Homo sapien
ccagcaccagaagcactgctgagtt

SEQ ID NO: 4965022 - DNA, 25 bp, Homo sapien
cagcaccagaagcactgctgagttt

SEQ ID NO: 4965023 - DNA, 25 bp, Homo sapien
atgtggatctggatacactgaaagc

SEQ ID NO: 4965024 - DNA, 25 bp, Homo sapien
tgagaagtttccgctaagttgttgg

SEQ ID NO: 4965025 - DNA, 25 bp, Homo sapien
ccctctcctggcttgagtgaagatg

SEQ ID NO: 4965026 - DNA, 25 bp, Homo sapien
actgaaagcttaggtgaggatttga

SEQ ID NO: 4965027 - DNA, 25 bp, Homo sapien
gaagttcattgctaggtgtgccaag

SEQ ID NO: 4965028 - DNA, 25 bp, Homo sapien
ggtgtgccaagtgtttcccaataac

SEQ ID NO: 4965029 - DNA, 25 bp, Homo sapien
tgccaagtgtttcccaataacaggt

SEQ ID NO: 4965030 - DNA, 25 bp, Homo sapien
tatcttgtgcctggaagttcattgc

SEQ ID NO: 4965031 - DNA, 25 bp, Homo sapien
tctgctacttcatgctcctgtcccc

SEQ ID NO: 4965032 - DNA, 25 bp, Homo sapien
cattcagttggatgcagggactggt

SEQ ID NO: 4965033 - DNA, 25 bp, Homo sapien
cccagacacctttgtgaagaagggg

SEQ ID NO: 4965034 - DNA, 25 bp, Homo sapien
ctggtttgcaatacccaaagggtgg

SEQ ID NO: 4965035 - DNA, 25 bp, Homo sapien
ggctcataacactgaacccaaggta

SEQ ID NO: 4965036 - DNA, 25 bp, Homo sapien
gcaaggcttgggctcataacactga

SEQ ID NO: 4965037 - DNA, 25 bp, Homo sapien
tggtgtcagcattgtgagagtgcaa

SEQ ID NO: 4965038 - DNA, 25 bp, Homo sapien
tctctttgccggaaatggtgtcagc

SEQ ID NO: 4965039 - DNA, 25 bp, Homo sapien
ttctgtgactattgccaaaaagggt

SEQ ID NO: 4965040 - DNA, 25 bp, Homo sapien
agaagccgtgaatgcgaagccacca

SEQ ID NO: 4965041 - DNA, 25 bp, Homo sapien
aaaagggtttgctacatgacaaaga

SEQ ID NO: 4965042 - DNA, 25 bp, Homo sapien
ctgtgctttgctgcagaattctgtg

SEQ ID NO: 4965043 - DNA, 25 bp, Homo sapien
tatcagcatgtgaaagtcacccaga

SEQ ID NO: 4965044 - DNA, 25 bp, Homo sapien
tgtaccaagagaaagggactccatg

SEQ ID NO: 4965045 - DNA, 25 bp, Homo sapien
gagctgctgattagaaacctcttaa

SEQ ID NO: 4965046 - DNA, 25 bp, Homo sapien
taactgccacgttacatcctctggg

SEQ ID NO: 4965047 - DNA, 25 bp, Homo sapien
ctcttctaaactgcctgatgaagca

SEQ ID NO: 4965048 - DNA, 25 bp, Homo sapien
aactcttctaaactgcctgatgaag

SEQ ID NO: 4965049 - DNA, 25 bp, Homo sapien
tcttctaaactgcctgatgaagcag

SEQ ID NO: 4965050 - DNA, 25 bp, Homo sapien
actcttctaaactgcctgatgaagc

SEQ ID NO: 4965051 - DNA, 25 bp, Homo sapien
gcccaatctctgcttgagggttact

SEQ ID NO: 4965052 - DNA, 25 bp, Homo sapien
ggcccaatctctgcttgagggttac

SEQ ID NO: 4965053 - DNA, 25 bp, Homo sapien
cccaatctctgcttgagggttactt

SEQ ID NO: 4965054 - DNA, 25 bp, Homo sapien
ttcagtcctcccactatggcagcag

SEQ ID NO: 4965055 - DNA, 25 bp, Homo sapien
gatctaagcacaactttccagaagc

SEQ ID NO: 4965056 - DNA, 25 bp, Homo sapien
gcagaggacagagcctcctgtgatg

SEQ ID NO: 4965057 - DNA, 25 bp, Homo sapien
tgcttctgggaccatcgcaggagat

SEQ ID NO: 4965058 - DNA, 25 bp, Homo sapien
ttttttctagaatcctcgatggcaa

SEQ ID NO: 4965059 - DNA, 25 bp, Homo sapien
tgacctgagtctatgcatgctctta

SEQ ID NO: 4965060 - DNA, 25 bp, Homo sapien
gggcttctacctgatgactgtataa

SEQ ID NO: 4965061 - DNA, 25 bp, Homo sapien
gggtcttaccacataggagattccc

SEQ ID NO: 4965062 - DNA, 25 bp, Homo sapien
tgttcctctgatttttgagaaatca

SEQ ID NO: 4965063 - DNA, 25 bp, Homo sapien
ttttaaatgttcctctgatttttga

SEQ ID NO: 4965064 - DNA, 25 bp, Homo sapien
aaatgttcctctgatttttgagaaa

SEQ ID NO: 4965065 - DNA, 25 bp, Homo sapien
ttaaatgttcctctgatttttgaga

SEQ ID NO: 4965066 - DNA, 25 bp, Homo sapien
agtctttccactgaacttaaccagg

SEQ ID NO: 4965067 - DNA, 25 bp, Homo sapien
cttaaccagggcaggagtttcttga

SEQ ID NO: 4965068 - DNA, 25 bp, Homo sapien
cacagctgttcacatatttggtttc

SEQ ID NO: 4965069 - DNA, 25 bp, Homo sapien
tggtttctttgaacagtctttccac

SEQ ID NO: 4965070 - DNA, 25 bp, Homo sapien
tgctcttgggaatgcctgctcttct

SEQ ID NO: 4965071 - DNA, 25 bp, Homo sapien
cctctgtgctcttgggaatgcctgc

SEQ ID NO: 4965072 - DNA, 25 bp, Homo sapien
ctgtgctcttgggaatgcctgctct

SEQ ID NO: 4965073 - DNA, 25 bp, Homo sapien
gctcttgggaatgcctgctcttctt

SEQ ID NO: 4965074 - DNA, 25 bp, Homo sapien
tctctctttccgttatcacaggatt

SEQ ID NO: 4965075 - DNA, 25 bp, Homo sapien
cgttatcacaggattagaggtggtg

SEQ ID NO: 4965076 - DNA, 25 bp, Homo sapien
gaagtaaagcgataccaaatcgagg

SEQ ID NO: 4965077 - DNA, 25 bp, Homo sapien
tctgtggaaagaagtaaagcgatac

SEQ ID NO: 4965078 - DNA, 25 bp, Homo sapien
tggcctattgacagcttccactgct

SEQ ID NO: 4965079 - DNA, 25 bp, Homo sapien
tggaaatagacagtgcgcttctgac

SEQ ID NO: 4965080 - DNA, 25 bp, Homo sapien
gagcagtattgggtcttcagtggca

SEQ ID NO: 4965081 - DNA, 25 bp, Homo sapien
tcagtggcaatgatattgtctggca

SEQ ID NO: 4965082 - DNA, 25 bp, Homo sapien
tgccagctggactttgcttgaaatg

SEQ ID NO: 4965083 - DNA, 25 bp, Homo sapien
tgacactaatacagccccaggctat

SEQ ID NO: 4965084 - DNA, 25 bp, Homo sapien
ttcaatgcatatagccagactgtcc

SEQ ID NO: 4965085 - DNA, 25 bp, Homo sapien
gctgtatgagccatcagctgtggca

SEQ ID NO: 4965086 - DNA, 25 bp, Homo sapien
caatatagattatttaaacagccac

SEQ ID NO: 4965087 - DNA, 25 bp, Homo sapien
ctttttcatgcaatatagattattt

SEQ ID NO: 4965088 - DNA, 25 bp, Homo sapien
gacacagagaatggactccgacgaa

SEQ ID NO: 4965089 - DNA, 25 bp, Homo sapien
tttccttatctgtcattcttatcac

SEQ ID NO: 4965090 - DNA, 25 bp, Homo sapien
tggactccgacgaatgttttatttc

SEQ ID NO: 4965091 - DNA, 25 bp, Homo sapien
caaataaaatgggttggtgacacag

SEQ ID NO: 4965092 - DNA, 25 bp, Homo sapien
tctttgctcagtggggttcaataga

SEQ ID NO: 4965093 - DNA, 25 bp, Homo sapien
ctagagcgtgctcggggttacatag

SEQ ID NO: 4965094 - DNA, 25 bp, Homo sapien
ttacatagggagcaagtgttctttg

SEQ ID NO: 4965095 - DNA, 25 bp, Homo sapien
ctcagtggggttcaatagatgaagt

SEQ ID NO: 4965096 - DNA, 25 bp, Homo sapien
tggagtctattgtgttgtgttctgc

SEQ ID NO: 4965097 - DNA, 25 bp, Homo sapien
agagcagaccctgtacctccaggca

SEQ ID NO: 4965098 - DNA, 25 bp, Homo sapien
tttagctctgccaatttcagagcag

SEQ ID NO: 4965099 - DNA, 25 bp, Homo sapien
tattgatgcggactagcctgccaac

SEQ ID NO: 4965100 - DNA, 25 bp, Homo sapien
caattccataacttcaggcgttcac

SEQ ID NO: 4965101 - DNA, 25 bp, Homo sapien
ccaattccataacttcaggcgttca

SEQ ID NO: 4965102 - DNA, 25 bp, Homo sapien
tgaggcctagccattcatggagatg

SEQ ID NO: 4965103 - DNA, 25 bp, Homo sapien
gaggcctagccattcatggagatgt

SEQ ID NO: 4965104 - DNA, 25 bp, Homo sapien
tcctgaggcctagccattcatggag

SEQ ID NO: 4965105 - DNA, 25 bp, Homo sapien
ggcatcctgaggcctagccattcat

SEQ ID NO: 4965106 - DNA, 25 bp, Homo sapien
tgagctcataaagatccaccagggc

SEQ ID NO: 4965107 - DNA, 25 bp, Homo sapien
agctcataaagatccaccagggccc

SEQ ID NO: 4965108 - DNA, 25 bp, Homo sapien
gtcactaaatccaagcctgagctca

SEQ ID NO: 4965109 - DNA, 25 bp, Homo sapien
agggtcactaaatccaagcctgagc

SEQ ID NO: 4965110 - DNA, 25 bp, Homo sapien
gcttggattgcatgagtgttctgtc

SEQ ID NO: 4965111 - DNA, 25 bp, Homo sapien
cgtttaggccagcactgcggagctt

SEQ ID NO: 4965112 - DNA, 25 bp, Homo sapien
agcctgcagagatgatgcgtttagg

SEQ ID NO: 4965113 - DNA, 25 bp, Homo sapien
attgcatgagtgttctgtccatacc

SEQ ID NO: 4965114 - DNA, 25 bp, Homo sapien
cataagagtgacaccatgatctgct

SEQ ID NO: 4965115 - DNA, 25 bp, Homo sapien
aaggacataagagtgacaccatgat

SEQ ID NO: 4965116 - DNA, 25 bp, Homo sapien
aagagtgacaccatgatctgctggc

SEQ ID NO: 4965117 - DNA, 25 bp, Homo sapien
tgctggctgctgaaaatttggggca

SEQ ID NO: 4965118 - DNA, 25 bp, Homo sapien
ggcagtcctccacagcgtggagaag

SEQ ID NO: 4965119 - DNA, 25 bp, Homo sapien
gcagtcctccacagcgtggagaagg

SEQ ID NO: 4965120 - DNA, 25 bp, Homo sapien
atttccaaatgaatccgggaagaat

SEQ ID NO: 4965121 - DNA, 25 bp, Homo sapien
aatccgggaagaatttagcagctga

SEQ ID NO: 4965122 - DNA, 25 bp, Homo sapien
gctgaagcagtttcgctgcttcatt

SEQ ID NO: 4965123 - DNA, 25 bp, Homo sapien
aaatgaatccgggaagaatttagca

SEQ ID NO: 4965124 - DNA, 25 bp, Homo sapien
caagaaagagccagtacgggacaag

SEQ ID NO: 4965125 - DNA, 25 bp, Homo sapien
tcttggcaggatacacggcttgtct

SEQ ID NO: 4965126 - DNA, 25 bp, Homo sapien
cttgtcttgcgaacagagcccttga

SEQ ID NO: 4965127 - DNA, 25 bp, Homo sapien
caaacatgtccgtcccttgactcag

SEQ ID NO: 4965128 - DNA, 25 bp, Homo sapien
ctttgtgtgcaatgctttagtgaaa

SEQ ID NO: 4965129 - DNA, 25 bp, Homo sapien
tcccagacactttagtgtaatgctt

SEQ ID NO: 4965130 - DNA, 25 bp, Homo sapien
taatgttctgtggaatcttcatctc

SEQ ID NO: 4965131 - DNA, 25 bp, Homo sapien
tgttttggtgactgcaaccactcct

SEQ ID NO: 4965132 - DNA, 25 bp, Homo sapien
ccaccatttggtacacgtttacatc

SEQ ID NO: 4965133 - DNA, 25 bp, Homo sapien
gattgcctgtttggatataccacca

SEQ ID NO: 4965134 - DNA, 25 bp, Homo sapien
tgcattgccctcgttcacatttaaa

SEQ ID NO: 4965135 - DNA, 25 bp, Homo sapien
aagatgatggtagatgtagcattag

SEQ ID NO: 4965136 - DNA, 25 bp, Homo sapien
cttttagacagcatgggatcttccc

SEQ ID NO: 4965137 - DNA, 25 bp, Homo sapien
cagcatgggatcttcccttggagct

SEQ ID NO: 4965138 - DNA, 25 bp, Homo sapien
tttagacagcatgggatcttccctt

SEQ ID NO: 4965139 - DNA, 25 bp, Homo sapien
ttcttttagacagcatgggatcttc

SEQ ID NO: 4965140 - DNA, 25 bp, Homo sapien
tcctgagatccacaagcctgtcttc

SEQ ID NO: 4965141 - DNA, 25 bp, Homo sapien
tgagatccacaagcctgtcttctcc

SEQ ID NO: 4965142 - DNA, 25 bp, Homo sapien
gattcctgagatccacaagcctgtc

SEQ ID NO: 4965143 - DNA, 25 bp, Homo sapien
ggtggattcctgagatccacaagcc

SEQ ID NO: 4965144 - DNA, 25 bp, Homo sapien
gacttagtagaggtctaatatctaa

SEQ ID NO: 4965145 - DNA, 25 bp, Homo sapien
cttcagcaaaaacctcatatgcaaa

SEQ ID NO: 4965146 - DNA, 25 bp, Homo sapien
acacgcacccgtccaaaatcttcag

SEQ ID NO: 4965147 - DNA, 25 bp, Homo sapien
acacaaggctttcccgcgttccttg

SEQ ID NO: 4965148 - DNA, 25 bp, Homo sapien
attgtcccttccctgactccatcgg

SEQ ID NO: 4965149 - DNA, 25 bp, Homo sapien
cttagaattgtcccttccctgactc

SEQ ID NO: 4965150 - DNA, 25 bp, Homo sapien
tcccttccctgactccatcggccat

SEQ ID NO: 4965151 - DNA, 25 bp, Homo sapien
tgtcccttccctgactccatcggcc

SEQ ID NO: 4965152 - DNA, 25 bp, Homo sapien
tcggtcccatcctgtggtatagtta

SEQ ID NO: 4965153 - DNA, 25 bp, Homo sapien
ctttcttgccatgatgcaggctata

SEQ ID NO: 4965154 - DNA, 25 bp, Homo sapien
agtaataaagcagctggccttaagc

SEQ ID NO: 4965155 - DNA, 25 bp, Homo sapien
tgctgctggtatcggtcccatcctg

SEQ ID NO: 4965156 - DNA, 25 bp, Homo sapien
cattctctaattgctcgtatttctg

SEQ ID NO: 4965157 - DNA, 25 bp, Homo sapien
tacataccattctctaattgctcgt

SEQ ID NO: 4965158 - DNA, 25 bp, Homo sapien
tgttgcctggtaaccttcaaaggct

SEQ ID NO: 4965159 - DNA, 25 bp, Homo sapien
tagttggtgccaaacaagtgattga

SEQ ID NO: 4965160 - DNA, 25 bp, Homo sapien
gatctgtctgaaagtttgcataagc

SEQ ID NO: 4965161 - DNA, 25 bp, Homo sapien
gggtagggtacatcaccatcaatta

SEQ ID NO: 4965162 - DNA, 25 bp, Homo sapien
tgcataagctgtcttatattcaggg

SEQ ID NO: 4965163 - DNA, 25 bp, Homo sapien
gctttcttggaagccttgaaacctg

SEQ ID NO: 4965164 - DNA, 25 bp, Homo sapien
ctctctcaagcacattgctatattt

SEQ ID NO: 4965165 - DNA, 25 bp, Homo sapien
gcagggaccagggactgagaaactt

SEQ ID NO: 4965166 - DNA, 25 bp, Homo sapien
taggatttattggatcatactccag

SEQ ID NO: 4965167 - DNA, 25 bp, Homo sapien
atcatactccagagggtcaggaatg

SEQ ID NO: 4965168 - DNA, 25 bp, Homo sapien
ggatcatactccagagggtcaggaa

SEQ ID NO: 4965169 - DNA, 25 bp, Homo sapien
taatgccgccttcttggaactactc

SEQ ID NO: 4965170 - DNA, 25 bp, Homo sapien
ttcaatcgtgttgattaatgccgcc

SEQ ID NO: 4965171 - DNA, 25 bp, Homo sapien
ttcttggaactactctcttcgcttc

SEQ ID NO: 4965172 - DNA, 25 bp, Homo sapien
ttctcgggcacataacagccttcaa

SEQ ID NO: 4965173 - DNA, 25 bp, Homo sapien
gggaattgatcccaaacatgaaggt

SEQ ID NO: 4965174 - DNA, 25 bp, Homo sapien
gctatctgtcctttgcaagctgctt

SEQ ID NO: 4965175 - DNA, 25 bp, Homo sapien
catgaaggtcgcactgatcttcact

SEQ ID NO: 4965176 - DNA, 25 bp, Homo sapien
cctgactcctccatgtaggtcacac

SEQ ID NO: 4965177 - DNA, 25 bp, Homo sapien
ctaaatcttgcaatcgtgtcggtaa

SEQ ID NO: 4965178 - DNA, 25 bp, Homo sapien
tccagtatcgccttcaggatctaac

SEQ ID NO: 4965179 - DNA, 25 bp, Homo sapien
tgtccttcggcatggaacattccag

SEQ ID NO: 4965180 - DNA, 25 bp, Homo sapien
tgacaaacgtgaaattaatagcaat

SEQ ID NO: 4965181 - DNA, 25 bp, Homo sapien
ttatagccaaactgcctgcggatgg

SEQ ID NO: 4965182 - DNA, 25 bp, Homo sapien
ttcatccctattgcccatgactcgt

SEQ ID NO: 4965183 - DNA, 25 bp, Homo sapien
ccatgactcgtcttcctatagcaca

SEQ ID NO: 4965184 - DNA, 25 bp, Homo sapien
gaagttctctagttgagcatcagcc

SEQ ID NO: 4965185 - DNA, 25 bp, Homo sapien
atttctctgagtccattcctttttc

SEQ ID NO: 4965186 - DNA, 25 bp, Homo sapien
cattcctttttctttagtgcccaag

SEQ ID NO: 4965187 - DNA, 25 bp, Homo sapien
ttatttctctgagtccattcctttt

SEQ ID NO: 4965188 - DNA, 25 bp, Homo sapien
gagtccattcctttttctttagtgc

SEQ ID NO: 4965189 - DNA, 25 bp, Homo sapien
cagggttccttgcaagttgactcat

SEQ ID NO: 4965190 - DNA, 25 bp, Homo sapien
tggacagggttccttgcaagttgac

SEQ ID NO: 4965191 - DNA, 25 bp, Homo sapien
tttggacagggttccttgcaagttg

SEQ ID NO: 4965192 - DNA, 25 bp, Homo sapien
gacagggttccttgcaagttgactc

SEQ ID NO: 4965193 - DNA, 25 bp, Homo sapien
aaagtgctaacacagtccccactac

SEQ ID NO: 4965194 - DNA, 25 bp, Homo sapien
gagcctcgtgctgggaaaatcacct

SEQ ID NO: 4965195 - DNA, 25 bp, Homo sapien
gatgagcctcgtgctgggaaaatca

SEQ ID NO: 4965196 - DNA, 25 bp, Homo sapien
gggaaagtgctaacacagtccccac

SEQ ID NO: 4965197 - DNA, 25 bp, Homo sapien
tgttgttcacacttgtgatgttctg

SEQ ID NO: 4965198 - DNA, 25 bp, Homo sapien
ctttctgttgttcacacttgtgatg

SEQ ID NO: 4965199 - DNA, 25 bp, Homo sapien
acttgtgatgttctgggccctcctt

SEQ ID NO: 4965200 - DNA, 25 bp, Homo sapien
cacttgtgatgttctgggccctcct

SEQ ID NO: 4965201 - DNA, 25 bp, Homo sapien
gctgatgtactgtccttctagttta

SEQ ID NO: 4965202 - DNA, 25 bp, Homo sapien
gctgctgctgatgtactgtccttct

SEQ ID NO: 4965203 - DNA, 25 bp, Homo sapien
ttctagtttaatttgggcttggaga

SEQ ID NO: 4965204 - DNA, 25 bp, Homo sapien
ctagtttaatttgggcttggagact

SEQ ID NO: 4965205 - DNA, 25 bp, Homo sapien
tgctgtgtccttgacctgtggaact

SEQ ID NO: 4965206 - DNA, 25 bp, Homo sapien
cctgagctgagtttgtataagtcat

SEQ ID NO: 4965207 - DNA, 25 bp, Homo sapien
gtgtaaacttctccttactgaacaa

SEQ ID NO: 4965208 - DNA, 25 bp, Homo sapien
tcctgctgaataattctccacaagc

SEQ ID NO: 4965209 - DNA, 25 bp, Homo sapien
cctgtatgtcccacgttacgggtag

SEQ ID NO: 4965210 - DNA, 25 bp, Homo sapien
tgaaatcagctgttcgccaaacaga

SEQ ID NO: 4965211 - DNA, 25 bp, Homo sapien
cctggatctgctattagtgctggca

SEQ ID NO: 4965212 - DNA, 25 bp, Homo sapien
gacattttcagctcgagggttggac

SEQ ID NO: 4965213 - DNA, 25 bp, Homo sapien
ggttggtttcacatatagctctctt

SEQ ID NO: 4965214 - DNA, 25 bp, Homo sapien
aatgtgtaaatgtgcgatgtgtagg

SEQ ID NO: 4965215 - DNA, 25 bp, Homo sapien
tctgagagacataggtggacattag

SEQ ID NO: 4965216 - DNA, 25 bp, Homo sapien
tagaatcccggtcttccacatagga

SEQ ID NO: 4965217 - DNA, 25 bp, Homo sapien
tccgaaaatgcaaggttcttcccag

SEQ ID NO: 4965218 - DNA, 25 bp, Homo sapien
tggatgtttggatctggccccatgg

SEQ ID NO: 4965219 - DNA, 25 bp, Homo sapien
ttcttcccagtaaatttcctgtgac

SEQ ID NO: 4965220 - DNA, 25 bp, Homo sapien
ggctttctcttcgatgaagcaagga

SEQ ID NO: 4965221 - DNA, 25 bp, Homo sapien
caaaaattaaatagcccagggactg

SEQ ID NO: 4965222 - DNA, 25 bp, Homo sapien
gggactggaactcatggccaaatct

SEQ ID NO: 4965223 - DNA, 25 bp, Homo sapien
gctcacagagccacatctcaggata

SEQ ID NO: 4965224 - DNA, 25 bp, Homo sapien
ccggatttaaaagaagctcacagag

SEQ ID NO: 4965225 - DNA, 25 bp, Homo sapien
tgaactaagaataaaagaacgggca

SEQ ID NO: 4965226 - DNA, 25 bp, Homo sapien
gagtttgagcctcccgaagaagcca

SEQ ID NO: 4965227 - DNA, 25 bp, Homo sapien
cagtaataactctggagtagagttt

SEQ ID NO: 4965228 - DNA, 25 bp, Homo sapien
ggtacaccaacaaccaagtgttgaa

SEQ ID NO: 4965229 - DNA, 25 bp, Homo sapien
actctcaacttcttgagaaatctta

SEQ ID NO: 4965230 - DNA, 25 bp, Homo sapien
agttaataggatttctttactctca

SEQ ID NO: 4965231 - DNA, 25 bp, Homo sapien
taataggatttctttactctcaact

SEQ ID NO: 4965232 - DNA, 25 bp, Homo sapien
ctcaacttcttgagaaatcttagcc

SEQ ID NO: 4965233 - DNA, 25 bp, Homo sapien
gaatttgaactaggagctggcagac

SEQ ID NO: 4965234 - DNA, 25 bp, Homo sapien
gaaaatgggccttagatgaccggaa

SEQ ID NO: 4965235 - DNA, 25 bp, Homo sapien
ttatttctgaggagactgggaccaa

SEQ ID NO: 4965236 - DNA, 25 bp, Homo sapien
taaagtgggactcacatctatgccc

SEQ ID NO: 4965237 - DNA, 25 bp, Homo sapien
catgactatgaagaagtttgcactg

SEQ ID NO: 4965238 - DNA, 25 bp, Homo sapien
aataaatagtattctagcagttgtt

SEQ ID NO: 4965239 - DNA, 25 bp, Homo sapien
tgtgcatgactatgaagaagtttgc

SEQ ID NO: 4965240 - DNA, 25 bp, Homo sapien
ttgtcaagcttgtgcatgactatga

SEQ ID NO: 4965241 - DNA, 25 bp, Homo sapien
tgatgtactgtttagggaccgaaac

SEQ ID NO: 4965242 - DNA, 25 bp, Homo sapien
gccatattccaagtttaccttctta

SEQ ID NO: 4965243 - DNA, 25 bp, Homo sapien
ggtcagtggcatttatgatgtactg

SEQ ID NO: 4965244 - DNA, 25 bp, Homo sapien
tttggggatatttagacattggaag

SEQ ID NO: 4965245 - DNA, 25 bp, Homo sapien
tgtatcctttaaaagcctcaagtga

SEQ ID NO: 4965246 - DNA, 25 bp, Homo sapien
cccagcttgggtaggattaagggct

SEQ ID NO: 4965247 - DNA, 25 bp, Homo sapien
caccatagaagagatttggagtaag

SEQ ID NO: 4965248 - DNA, 25 bp, Homo sapien
caagaagaaaggttcgaaactggag

SEQ ID NO: 4965249 - DNA, 25 bp, Homo sapien
catcatggcagtgctaatggagaca

SEQ ID NO: 4965250 - DNA, 25 bp, Homo sapien
tgcatattcataggcaggtattctg

SEQ ID NO: 4965251 - DNA, 25 bp, Homo sapien
tggggatctacctgcacttgcatct

SEQ ID NO: 4965252 - DNA, 25 bp, Homo sapien
tcaggtattttgcagcgtattctgc

SEQ ID NO: 4965253 - DNA, 25 bp, Homo sapien
catcctggggatctacctgcacttg

SEQ ID NO: 4965254 - DNA, 25 bp, Homo sapien
tttccaaacatgaaactattccctg

SEQ ID NO: 4965255 - DNA, 25 bp, Homo sapien
ctgcgggtatattgcatatagcctt

SEQ ID NO: 4965256 - DNA, 25 bp, Homo sapien
gcatatagccttcttcaacactttc

SEQ ID NO: 4965257 - DNA, 25 bp, Homo sapien
tattccctgtatagtgtcaatacac

SEQ ID NO: 4965258 - DNA, 25 bp, Homo sapien
acgtttgctgaagtgtcatctgaag

SEQ ID NO: 4965259 - DNA, 25 bp, Homo sapien
tcacgtagaagacaacgtttgctga

SEQ ID NO: 4965260 - DNA, 25 bp, Homo sapien
gaagtaaaccgtacaatgctgcaac

SEQ ID NO: 4965261 - DNA, 25 bp, Homo sapien
catctgaagttcaccggaagtaaac

SEQ ID NO: 4965262 - DNA, 25 bp, Homo sapien
caatgtccatgcaatcatatagaaa

SEQ ID NO: 4965263 - DNA, 25 bp, Homo sapien
ctcagttccttgataatcagttgca

SEQ ID NO: 4965264 - DNA, 25 bp, Homo sapien
tcagttccttgataatcagttgcat

SEQ ID NO: 4965265 - DNA, 25 bp, Homo sapien
ctgagtgataacaatgtccatgcaa

SEQ ID NO: 4965266 - DNA, 25 bp, Homo sapien
gtgccttggcactacatgactctgg

SEQ ID NO: 4965267 - DNA, 25 bp, Homo sapien
gccatgttaaagtccaatttcctga

SEQ ID NO: 4965268 - DNA, 25 bp, Homo sapien
ttctgtgcaggccatttctaggtac

SEQ ID NO: 4965269 - DNA, 25 bp, Homo sapien
tgtatttgacactgaccagcctgtt

SEQ ID NO: 4965270 - DNA, 25 bp, Homo sapien
ccaactagattctaatctccaagca

SEQ ID NO: 4965271 - DNA, 25 bp, Homo sapien
aaaacctattccagtagttggcaca

SEQ ID NO: 4965272 - DNA, 25 bp, Homo sapien
ccccatatctaattaataactgtat

SEQ ID NO: 4965273 - DNA, 25 bp, Homo sapien
cgttcccattccaactagattctaa

SEQ ID NO: 4965274 - DNA, 25 bp, Homo sapien
agaagagcagacaccgtgctcctgg

SEQ ID NO: 4965275 - DNA, 25 bp, Homo sapien
agcgagaagagcagacaccgtgctc

SEQ ID NO: 4965276 - DNA, 25 bp, Homo sapien
gagaagagcagacaccgtgctcctg

SEQ ID NO: 4965277 - DNA, 25 bp, Homo sapien
cgagaagagcagacaccgtgctcct

SEQ ID NO: 4965278 - DNA, 25 bp, Homo sapien
tcaactagaggtatgggcttaggga

SEQ ID NO: 4965279 - DNA, 25 bp, Homo sapien
tatgtacctatatctgaactgaacc

SEQ ID NO: 4965280 - DNA, 25 bp, Homo sapien
tcttagaatgtttgctgggacctgg

SEQ ID NO: 4965281 - DNA, 25 bp, Homo sapien
agtgcctcgaattcctcccagtaaa

SEQ ID NO: 4965282 - DNA, 25 bp, Homo sapien
atcccgagaaaaaattgacttatgg

SEQ ID NO: 4965283 - DNA, 25 bp, Homo sapien
gcaatacatatgtgcccctctgacc

SEQ ID NO: 4965284 - DNA, 25 bp, Homo sapien
gagatgtaaaataaggctggttgtg

SEQ ID NO: 4965285 - DNA, 25 bp, Homo sapien
gcagtgaacttcacaatcccgagaa

SEQ ID NO: 4965286 - DNA, 25 bp, Homo sapien
ttgcctttataaggtaactggaaga

SEQ ID NO: 4965287 - DNA, 25 bp, Homo sapien
tactcagggggtacagcactttttg

SEQ ID NO: 4965288 - DNA, 25 bp, Homo sapien
actcagggggtacagcactttttga

SEQ ID NO: 4965289 - DNA, 25 bp, Homo sapien
cttccttgcctttataaggtaactg

SEQ ID NO: 4965290 - DNA, 25 bp, Homo sapien
taggctcttcttaatgtttgtacgt

SEQ ID NO: 4965291 - DNA, 25 bp, Homo sapien
aataggctcttcttaatgtttgtac

SEQ ID NO: 4965292 - DNA, 25 bp, Homo sapien
gctcttcttaatgtttgtacgtttc

SEQ ID NO: 4965293 - DNA, 25 bp, Homo sapien
gaataggctcttcttaatgtttgta

SEQ ID NO: 4965294 - DNA, 25 bp, Homo sapien
gagaatatattatgaggcctgatga

SEQ ID NO: 4965295 - DNA, 25 bp, Homo sapien
taaacaccatagataattgaagaaa

SEQ ID NO: 4965296 - DNA, 25 bp, Homo sapien
tataatggaatgagcactgaatgct

SEQ ID NO: 4965297 - DNA, 25 bp, Homo sapien
taatatctcaggtgtcaggtgacac

SEQ ID NO: 4965298 - DNA, 25 bp, Homo sapien
cagcactcactcaaacgatacttta

SEQ ID NO: 4965299 - DNA, 25 bp, Homo sapien
taatttgtttatttagttgccagag

SEQ ID NO: 4965300 - DNA, 25 bp, Homo sapien
tatttagttgccagagttgtttgat

SEQ ID NO: 4965301 - DNA, 25 bp, Homo sapien
cactcaaacgatactttaaaatgca

SEQ ID NO: 4965302 - DNA, 25 bp, Homo sapien
caaggtgggtcggataatttgccct

SEQ ID NO: 4965303 - DNA, 25 bp, Homo sapien
cggctacagggaaaaataccatcag

SEQ ID NO: 4965304 - DNA, 25 bp, Homo sapien
tacaactaagagtctcggctacagg

SEQ ID NO: 4965305 - DNA, 25 bp, Homo sapien
ccctggaaaggacggatagtgactt

SEQ ID NO: 4965306 - DNA, 25 bp, Homo sapien
gaaaagggtagctggaatatgtgct

SEQ ID NO: 4965307 - DNA, 25 bp, Homo sapien
aacaaggactagtgtgttgtgcaga

SEQ ID NO: 4965308 - DNA, 25 bp, Homo sapien
cagcttcttattcactaatgacagg

SEQ ID NO: 4965309 - DNA, 25 bp, Homo sapien
cagctcatttcccagttgttacaaa

SEQ ID NO: 4965310 - DNA, 25 bp, Homo sapien
tatgggcatctgaatactctagctg

SEQ ID NO: 4965311 - DNA, 25 bp, Homo sapien
cagtgactgctggagttacctcaca

SEQ ID NO: 4965312 - DNA, 25 bp, Homo sapien
catggaattggtagatcagtgactg

SEQ ID NO: 4965313 - DNA, 25 bp, Homo sapien
cgctccacacggtgattatgaaggc

SEQ ID NO: 4965314 - DNA, 25 bp, Homo sapien
cagatttccacatggcctaggaggc

SEQ ID NO: 4965315 - DNA, 25 bp, Homo sapien
gccattaagaaaatgagcccctgag

SEQ ID NO: 4965316 - DNA, 25 bp, Homo sapien
tagaggatgcagctaaattttgtcc

SEQ ID NO: 4965317 - DNA, 25 bp, Homo sapien
tgagttcaacgaccctcaaatgaag

SEQ ID NO: 4965318 - DNA, 25 bp, Homo sapien
cccagagctctaggtttggcaagcc

SEQ ID NO: 4965319 - DNA, 25 bp, Homo sapien
gagctcccttctaattccacttgac

SEQ ID NO: 4965320 - DNA, 25 bp, Homo sapien
tgtggcacctttactcggtaacggc

SEQ ID NO: 4965321 - DNA, 25 bp, Homo sapien
tgcatcactgggcaggtcaagagct

SEQ ID NO: 4965322 - DNA, 25 bp, Homo sapien
gacacaggcctatgtgggcaaaacc

SEQ ID NO: 4965323 - DNA, 25 bp, Homo sapien
aaaatcctgcttgcgaacagtcggc

SEQ ID NO: 4965324 - DNA, 25 bp, Homo sapien
taggagatccctgaatcctggtgtg

SEQ ID NO: 4965325 - DNA, 25 bp, Homo sapien
ggaaagcctctgatctccacggatg

SEQ ID NO: 4965326 - DNA, 25 bp, Homo sapien
agtcagcctgaaataatggacagct

SEQ ID NO: 4965327 - DNA, 25 bp, Homo sapien
ttcagtacagggaagcagtatgacc

SEQ ID NO: 4965328 - DNA, 25 bp, Homo sapien
tttgagaaaatagggcataagttac

SEQ ID NO: 4965329 - DNA, 25 bp, Homo sapien
cagcagttgaatagtctcacatcac

SEQ ID NO: 4965330 - DNA, 25 bp, Homo sapien
gcagaccggcgaaagatgaatgtga

SEQ ID NO: 4965331 - DNA, 25 bp, Homo sapien
gaaatgtccaactcgtgaggatcag

SEQ ID NO: 4965332 - DNA, 25 bp, Homo sapien
aaagcagggtccatatgcagaccgg

SEQ ID NO: 4965333 - DNA, 25 bp, Homo sapien
tgaagtattcacacagatggtggcc

SEQ ID NO: 4965334 - DNA, 25 bp, Homo sapien
cagagtggcttgacctttgggttaa

SEQ ID NO: 4965335 - DNA, 25 bp, Homo sapien
cagatgaccagcaatttcagagtgg

SEQ ID NO: 4965336 - DNA, 25 bp, Homo sapien
aattgctttcttagtggtgtgacca

SEQ ID NO: 4965337 - DNA, 25 bp, Homo sapien
ggtgccactgactgtacactaaagg

SEQ ID NO: 4965338 - DNA, 25 bp, Homo sapien
aataacttctttattagtgggcaat

SEQ ID NO: 4965339 - DNA, 25 bp, Homo sapien
tttattagtgggcaattgtctgtgt

SEQ ID NO: 4965340 - DNA, 25 bp, Homo sapien
aacttctttattagtgggcaattgt

SEQ ID NO: 4965341 - DNA, 25 bp, Homo sapien
tattagtgggcaattgtctgtgtac

SEQ ID NO: 4965342 - DNA, 25 bp, Homo sapien
caaacactgctttcgtctctggcag

SEQ ID NO: 4965343 - DNA, 25 bp, Homo sapien
cactaggtggccacatagctaacaa

SEQ ID NO: 4965344 - DNA, 25 bp, Homo sapien
tagctagaaaactgctccaggctgc

SEQ ID NO: 4965345 - DNA, 25 bp, Homo sapien
gacaatgcatcagcgacatccatgg

SEQ ID NO: 4965346 - DNA, 25 bp, Homo sapien
gatcctctccaaaatgtccgtgacg

SEQ ID NO: 4965347 - DNA, 25 bp, Homo sapien
gcttctaggttgttctaccctctcc

SEQ ID NO: 4965348 - DNA, 25 bp, Homo sapien
aagcagctgtagagtaatctgatcc

SEQ ID NO: 4965349 - DNA, 25 bp, Homo sapien
tctcccttaaagtcctggctcaggg

SEQ ID NO: 4965350 - DNA, 25 bp, Homo sapien
tgcaaatctgatgcgtcaatcttga

SEQ ID NO: 4965351 - DNA, 25 bp, Homo sapien
caaatctgatgcgtcaatcttgaag

SEQ ID NO: 4965352 - DNA, 25 bp, Homo sapien
aatctgatgcgtcaatcttgaagca

SEQ ID NO: 4965353 - DNA, 25 bp, Homo sapien
gtgcaaatctgatgcgtcaatcttg

SEQ ID NO: 4965354 - DNA, 25 bp, Homo sapien
aaaatatcaccagctggacactgtg

SEQ ID NO: 4965355 - DNA, 25 bp, Homo sapien
taatgctgccgtgtctaacaggttt

SEQ ID NO: 4965356 - DNA, 25 bp, Homo sapien
gtctaacaggtttctatgctgaaaa

SEQ ID NO: 4965357 - DNA, 25 bp, Homo sapien
ggacactgtgacacttaatattgca

SEQ ID NO: 4965358 - DNA, 25 bp, Homo sapien
cttctccaatataatttttccatta

SEQ ID NO: 4965359 - DNA, 25 bp, Homo sapien
ttccattatcaataaactcacagtg

SEQ ID NO: 4965360 - DNA, 25 bp, Homo sapien
ttatcaataaactcacagtgaccca

SEQ ID NO: 4965361 - DNA, 25 bp, Homo sapien
atttttccattatcaataaactcac

SEQ ID NO: 4965362 - DNA, 25 bp, Homo sapien
tcccatgagctcttcagccttagtt

SEQ ID NO: 4965363 - DNA, 25 bp, Homo sapien
ttcatccatcatagctggctccagg

SEQ ID NO: 4965364 - DNA, 25 bp, Homo sapien
tgcacgaaggcttagatcaagttca

SEQ ID NO: 4965365 - DNA, 25 bp, Homo sapien
tgatgactgctctccgagttcatcc

SEQ ID NO: 4965366 - DNA, 25 bp, Homo sapien
tgatggtggattggagcaaggggaa

SEQ ID NO: 4965367 - DNA, 25 bp, Homo sapien
ttggagcaaggggaatcaacctgtc

SEQ ID NO: 4965368 - DNA, 25 bp, Homo sapien
gagcaaggggaatcaacctgtccat

SEQ ID NO: 4965369 - DNA, 25 bp, Homo sapien
tggattggagcaaggggaatcaacc

SEQ ID NO: 4965370 - DNA, 25 bp, Homo sapien
taagaatagagcaataggccgggtg

SEQ ID NO: 4965371 - DNA, 25 bp, Homo sapien
tcaactggcttctcaccaagactag

SEQ ID NO: 4965372 - DNA, 25 bp, Homo sapien
tttttcacctatagcacaattggca

SEQ ID NO: 4965373 - DNA, 25 bp, Homo sapien
catgagcaggtggtggatgacataa

SEQ ID NO: 4965374 - DNA, 25 bp, Homo sapien
tggccacaccatatagatcacgggc

SEQ ID NO: 4965375 - DNA, 25 bp, Homo sapien
ggccacaccatatagatcacgggct

SEQ ID NO: 4965376 - DNA, 25 bp, Homo sapien
cttcaggaatgcagtattgactact

SEQ ID NO: 4965377 - DNA, 25 bp, Homo sapien
taagagactggctcttccaaacact

SEQ ID NO: 4965378 - DNA, 25 bp, Homo sapien
taaaggtcttatatgagtgagtggt

SEQ ID NO: 4965379 - DNA, 25 bp, Homo sapien
ttatgcaccagaggattcaccagca

SEQ ID NO: 4965380 - DNA, 25 bp, Homo sapien
tgcataaagtcagccaacatagttc

SEQ ID NO: 4965381 - DNA, 25 bp, Homo sapien
agccttcctatctttgacactgcaa

SEQ ID NO: 4965382 - DNA, 25 bp, Homo sapien
catagttcattaagcccctgtgagt

SEQ ID NO: 4965383 - DNA, 25 bp, Homo sapien
ggaaagccttcctatctttgacact

SEQ ID NO: 4965384 - DNA, 25 bp, Homo sapien
tcttgcacattgagaagtcaccgtg

SEQ ID NO: 4965385 - DNA, 25 bp, Homo sapien
cttgcacattgagaagtcaccgtga

SEQ ID NO: 4965386 - DNA, 25 bp, Homo sapien
ttgcacattgagaagtcaccgtgaa

SEQ ID NO: 4965387 - DNA, 25 bp, Homo sapien
tgtcttgcacattgagaagtcaccg

SEQ ID NO: 4965388 - DNA, 25 bp, Homo sapien
gcctcctaggatgtaaacttctgca

SEQ ID NO: 4965389 - DNA, 25 bp, Homo sapien
cattattaggctggctccctttcca

SEQ ID NO: 4965390 - DNA, 25 bp, Homo sapien
cacacccatggattgttctacacta

SEQ ID NO: 4965391 - DNA, 25 bp, Homo sapien
aacttctgcattcattattaggctg

SEQ ID NO: 4965392 - DNA, 25 bp, Homo sapien
ggagctcatctaatttaccacattt

SEQ ID NO: 4965393 - DNA, 25 bp, Homo sapien
gttgcactaagaagactccatagga

SEQ ID NO: 4965394 - DNA, 25 bp, Homo sapien
cactaagaagactccataggagctc

SEQ ID NO: 4965395 - DNA, 25 bp, Homo sapien
gaagactccataggagctcatctaa

SEQ ID NO: 4965396 - DNA, 25 bp, Homo sapien
ttggtttattccattcacgggctct

SEQ ID NO: 4965397 - DNA, 25 bp, Homo sapien
acgggctctgctgaggcagctctca

SEQ ID NO: 4965398 - DNA, 25 bp, Homo sapien
cgggctctgctgaggcagctctcat

SEQ ID NO: 4965399 - DNA, 25 bp, Homo sapien
ctgcttggtttattccattcacggg

SEQ ID NO: 4965400 - DNA, 25 bp, Homo sapien
catcgagactaaatctggaggcaat

SEQ ID NO: 4965401 - DNA, 25 bp, Homo sapien
gaggcattgccacatcgagactaaa

SEQ ID NO: 4965402 - DNA, 25 bp, Homo sapien
actggcaaaatcacttcgaggcatt

SEQ ID NO: 4965403 - DNA, 25 bp, Homo sapien
gcagcatattttggctgtcactggc

SEQ ID NO: 4965404 - DNA, 25 bp, Homo sapien
tgtgatcattcctcgcctacactct

SEQ ID NO: 4965405 - DNA, 25 bp, Homo sapien
gccatgcaaactagcaatgggtttt

SEQ ID NO: 4965406 - DNA, 25 bp, Homo sapien
cacctgccagctgattatagaaaaa

SEQ ID NO: 4965407 - DNA, 25 bp, Homo sapien
tgggtttttgaatatcttgagaact

SEQ ID NO: 4965408 - DNA, 25 bp, Homo sapien
ggaacacttggcttcaatcccctct

SEQ ID NO: 4965409 - DNA, 25 bp, Homo sapien
gaggtctagtggctgccaaccccag

SEQ ID NO: 4965410 - DNA, 25 bp, Homo sapien
gagcagcacagcacgaggtctagtg

SEQ ID NO: 4965411 - DNA, 25 bp, Homo sapien
tcaaatgtctaagggtctaaggagc

SEQ ID NO: 4965412 - DNA, 25 bp, Homo sapien
agagcccacatctaacatgaagtta

SEQ ID NO: 4965413 - DNA, 25 bp, Homo sapien
cacatctaacatgaagttattcaag

SEQ ID NO: 4965414 - DNA, 25 bp, Homo sapien
gagcccacatctaacatgaagttat

SEQ ID NO: 4965415 - DNA, 25 bp, Homo sapien
ctaacatgaagttattcaagcccat

SEQ ID NO: 4965416 - DNA, 25 bp, Homo sapien
gtgctgtaaatttagaaccaatgca

SEQ ID NO: 4965417 - DNA, 25 bp, Homo sapien
acagacaccgacctggaaggaagag

SEQ ID NO: 4965418 - DNA, 25 bp, Homo sapien
gacaccgacctggaaggaagaggaa

SEQ ID NO: 4965419 - DNA, 25 bp, Homo sapien
ttagaaccaatgcatgaaaacattt

SEQ ID NO: 4965420 - DNA, 25 bp, Homo sapien
gtgatagttacccagtctgcaataa

SEQ ID NO: 4965421 - DNA, 25 bp, Homo sapien
tacccagtctgcaataatttatccc

SEQ ID NO: 4965422 - DNA, 25 bp, Homo sapien
gatagttacccagtctgcaataatt

SEQ ID NO: 4965423 - DNA, 25 bp, Homo sapien
ttagtaatgtgatagttacccagtc

SEQ ID NO: 4965424 - DNA, 25 bp, Homo sapien
tctgtgtgacttttagagctgtgtc

SEQ ID NO: 4965425 - DNA, 25 bp, Homo sapien
ggcaacaaagagcaatggccttttc

SEQ ID NO: 4965426 - DNA, 25 bp, Homo sapien
tcatacctgcgagtgcaggtgcccc

SEQ ID NO: 4965427 - DNA, 25 bp, Homo sapien
cactttcatacctgcgagtgcaggt

SEQ ID NO: 4965428 - DNA, 25 bp, Homo sapien
ccaggtaggcctgtaaagtctcatc

SEQ ID NO: 4965429 - DNA, 25 bp, Homo sapien
tcccaggtaggcctgtaaagtctca

SEQ ID NO: 4965430 - DNA, 25 bp, Homo sapien
cccaggtaggcctgtaaagtctcat

SEQ ID NO: 4965431 - DNA, 25 bp, Homo sapien
ataatgagaattggatcaatctgac

SEQ ID NO: 4965432 - DNA, 25 bp, Homo sapien
gaattggatcaatctgacattttgc

SEQ ID NO: 4965433 - DNA, 25 bp, Homo sapien
atgagaattggatcaatctgacatt

SEQ ID NO: 4965434 - DNA, 25 bp, Homo sapien
gagaattggatcaatctgacatttt

SEQ ID NO: 4965435 - DNA, 25 bp, Homo sapien
aaataatgtgtagttgctcccagtg

SEQ ID NO: 4965436 - DNA, 25 bp, Homo sapien
agttgctcccagtgttcaactaggt

SEQ ID NO: 4965437 - DNA, 25 bp, Homo sapien
catctaatgcctgccttctatgggt

SEQ ID NO: 4965438 - DNA, 25 bp, Homo sapien
gtcagttctgatactttggggttgg

SEQ ID NO: 4965439 - DNA, 25 bp, Homo sapien
caaactctcaactgagctaatgtga

SEQ ID NO: 4965440 - DNA, 25 bp, Homo sapien
ccatcacataaattattggcagatt

SEQ ID NO: 4965441 - DNA, 25 bp, Homo sapien
taaattattggcagattcacttttg

SEQ ID NO: 4965442 - DNA, 25 bp, Homo sapien
gtaattttccaaactctcaactgag

SEQ ID NO: 4965443 - DNA, 25 bp, Homo sapien
gcactgagtacctcaccctgaatac

SEQ ID NO: 4965444 - DNA, 25 bp, Homo sapien
tcaccctgaatacataccacattca

SEQ ID NO: 4965445 - DNA, 25 bp, Homo sapien
ctgagtacctcaccctgaatacata

SEQ ID NO: 4965446 - DNA, 25 bp, Homo sapien
gagtacctcaccctgaatacatacc

SEQ ID NO: 4965447 - DNA, 25 bp, Homo sapien
ccagctggtcttttgatcttcagtc

SEQ ID NO: 4965448 - DNA, 25 bp, Homo sapien
ctctcctttccagtgcaccttgtcc

SEQ ID NO: 4965449 - DNA, 25 bp, Homo sapien
ctggtcttttgatcttcagtctctc

SEQ ID NO: 4965450 - DNA, 25 bp, Homo sapien
cttttgatcttcagtctctcctttc

SEQ ID NO: 4965451 - DNA, 25 bp, Homo sapien
tccactagcacgtgggctaatttgg

SEQ ID NO: 4965452 - DNA, 25 bp, Homo sapien
tcccttatgaacgtcagtcagcttg

SEQ ID NO: 4965453 - DNA, 25 bp, Homo sapien
tgtcagctgtaggtctctgctcttc

SEQ ID NO: 4965454 - DNA, 25 bp, Homo sapien
tgaccccaagatcatctgccagctg

SEQ ID NO: 4965455 - DNA, 25 bp, Homo sapien
tcatcatctgcttacccttgaagcc

SEQ ID NO: 4965456 - DNA, 25 bp, Homo sapien
catcatcatctgcttacccttgaag

SEQ ID NO: 4965457 - DNA, 25 bp, Homo sapien
caggatcagcctgcctgctcatcat

SEQ ID NO: 4965458 - DNA, 25 bp, Homo sapien
tcactgcctgctcaggatcagcctg

SEQ ID NO: 4965459 - DNA, 25 bp, Homo sapien
gaaggagccaaaacatgttcagctg

SEQ ID NO: 4965460 - DNA, 25 bp, Homo sapien
ctgtgcgaaggagccaaaacatgtt

SEQ ID NO: 4965461 - DNA, 25 bp, Homo sapien
ggagcgctaggagctgacaatcgta

SEQ ID NO: 4965462 - DNA, 25 bp, Homo sapien
gctgacaatcgtacattgcattaac

SEQ ID NO: 4965463 - DNA, 25 bp, Homo sapien
gcatgacagccctcagagggagacc

SEQ ID NO: 4965464 - DNA, 25 bp, Homo sapien
actctctggtgtctgggctaaagct

SEQ ID NO: 4965465 - DNA, 25 bp, Homo sapien
taaagcttggcactcgctgggactg

SEQ ID NO: 4965466 - DNA, 25 bp, Homo sapien
tgccacgagcctctcaccagagttc

SEQ ID NO: 4965467 - DNA, 25 bp, Homo sapien
cctacagatgggtttaagcattgtc

SEQ ID NO: 4965468 - DNA, 25 bp, Homo sapien
gcctcaagacctacagatgggttta

SEQ ID NO: 4965469 - DNA, 25 bp, Homo sapien
cagatgggtttaagcattgtctatt

SEQ ID NO: 4965470 - DNA, 25 bp, Homo sapien
tcaagacctacagatgggtttaagc

SEQ ID NO: 4965471 - DNA, 25 bp, Homo sapien
ccagcttagagtagatacaatgcat

SEQ ID NO: 4965472 - DNA, 25 bp, Homo sapien
tcctctgtgcaaaccagcttagagt

SEQ ID NO: 4965473 - DNA, 25 bp, Homo sapien
tgcaaaccagcttagagtagataca

SEQ ID NO: 4965474 - DNA, 25 bp, Homo sapien
tctgtgcaaaccagcttagagtaga

SEQ ID NO: 4965475 - DNA, 25 bp, Homo sapien
cttaaacaattagcagaggacaggt

SEQ ID NO: 4965476 - DNA, 25 bp, Homo sapien
ggagaggtgaaagcattacacagca

SEQ ID NO: 4965477 - DNA, 25 bp, Homo sapien
taacagtaactgacaaatagaaggc

SEQ ID NO: 4965478 - DNA, 25 bp, Homo sapien
cctgcttcggcagactaagtcccta

SEQ ID NO: 4965479 - DNA, 25 bp, Homo sapien
tcagcctaccaatttgaaagtgacg

SEQ ID NO: 4965480 - DNA, 25 bp, Homo sapien
tattttcccagtattagatgacacc

SEQ ID NO: 4965481 - DNA, 25 bp, Homo sapien
gaaagtgacgttgtccatctggagt

SEQ ID NO: 4965482 - DNA, 25 bp, Homo sapien
catatagattggagcatgccttgta

SEQ ID NO: 4965483 - DNA, 25 bp, Homo sapien
acatgtttaatgatatagaaaatct

SEQ ID NO: 4965484 - DNA, 25 bp, Homo sapien
tttaatgatatagaaaatctattcc

SEQ ID NO: 4965485 - DNA, 25 bp, Homo sapien
taatgatatagaaaatctattccaa

SEQ ID NO: 4965486 - DNA, 25 bp, Homo sapien
ttgcataaacatgtttaatgatata

SEQ ID NO: 4965487 - DNA, 25 bp, Homo sapien
tgagctacacgttggactcgctggg

SEQ ID NO: 4965488 - DNA, 25 bp, Homo sapien
tgaagacagacatctcgacggcgct

SEQ ID NO: 4965489 - DNA, 25 bp, Homo sapien
caaggttgtggtgactctgttccgc

SEQ ID NO: 4965490 - DNA, 25 bp, Homo sapien
tcagaccagaatatgcaccaggccg

SEQ ID NO: 4965491 - DNA, 25 bp, Homo sapien
gactgcatgcaagctcagggtgctc

SEQ ID NO: 4965492 - DNA, 25 bp, Homo sapien
tgagtccattgcaaaaggttaagcc

SEQ ID NO: 4965493 - DNA, 25 bp, Homo sapien
gcagcttcaaaacagaacgggttct

SEQ ID NO: 4965494 - DNA, 25 bp, Homo sapien
tagtaaaggaagtcacccagagtga

SEQ ID NO: 4965495 - DNA, 25 bp, Homo sapien
caggctaacgctctccctgggatag

SEQ ID NO: 4965496 - DNA, 25 bp, Homo sapien
taggcttgtgccttcaaagcaccag

SEQ ID NO: 4965497 - DNA, 25 bp, Homo sapien
tacagggtccagagaaatatctggt

SEQ ID NO: 4965498 - DNA, 25 bp, Homo sapien
aatatctggtgcttgttttccaacc

SEQ ID NO: 4965499 - DNA, 25 bp, Homo sapien
agcaaaaccctgattcccggcgcct

SEQ ID NO: 4965500 - DNA, 25 bp, Homo sapien
tggccgcagatctcgctgccgcctc

SEQ ID NO: 4965501 - DNA, 25 bp, Homo sapien
tctggccgcagatctcgctgccgcc

SEQ ID NO: 4965502 - DNA, 25 bp, Homo sapien
ctggagaaagatccagcaaaaccct

SEQ ID NO: 4965503 - DNA, 25 bp, Homo sapien
ggcacacaggatagaggatggtaca

SEQ ID NO: 4965504 - DNA, 25 bp, Homo sapien
gcacacaggatagaggatggtacag

SEQ ID NO: 4965505 - DNA, 25 bp, Homo sapien
cacacaggatagaggatggtacagt

SEQ ID NO: 4965506 - DNA, 25 bp, Homo sapien
tggcacacaggatagaggatggtac

SEQ ID NO: 4965507 - DNA, 25 bp, Homo sapien
ttcttacttcaaccaagtaattctc

SEQ ID NO: 4965508 - DNA, 25 bp, Homo sapien
ggagacgcctcatctttacagaagc

SEQ ID NO: 4965509 - DNA, 25 bp, Homo sapien
gcttgcatctgtttgagacttacca

SEQ ID NO: 4965510 - DNA, 25 bp, Homo sapien
gacttaccatgtacatcaacccagg

SEQ ID NO: 4965511 - DNA, 25 bp, Homo sapien
tcaacccaggtctagtaagcagaaa

SEQ ID NO: 4965512 - DNA, 25 bp, Homo sapien
caacacgtgttatgaggcaaagtct

SEQ ID NO: 4965513 - DNA, 25 bp, Homo sapien
gatgcaatgtccaaccagtcaagct

SEQ ID NO: 4965514 - DNA, 25 bp, Homo sapien
tatctcccagtagagacatgcagag

SEQ ID NO: 4965515 - DNA, 25 bp, Homo sapien
tacttgaggcaacagaattacgctt

SEQ ID NO: 4965516 - DNA, 25 bp, Homo sapien
tgctaaccaccgaaggttcaaagga

SEQ ID NO: 4965517 - DNA, 25 bp, Homo sapien
cctgatttcgggagaattattcctg

SEQ ID NO: 4965518 - DNA, 25 bp, Homo sapien
tcctgaactcataagcgtggtccat

SEQ ID NO: 4965519 - DNA, 25 bp, Homo sapien
taactcagggtctttaattgctaac

SEQ ID NO: 4965520 - DNA, 25 bp, Homo sapien
tcaatctttcttcttagctgcttgt

SEQ ID NO: 4965521 - DNA, 25 bp, Homo sapien
ctccccagcaccttcaactttcttc

SEQ ID NO: 4965522 - DNA, 25 bp, Homo sapien
agcttctttggtttcctctccttct

SEQ ID NO: 4965523 - DNA, 25 bp, Homo sapien
gcttcttcagactcttccttggcag

SEQ ID NO: 4965524 - DNA, 25 bp, Homo sapien
tcttcctcggcctcttccttgtcct

SEQ ID NO: 4965525 - DNA, 25 bp, Homo sapien
cttcttcctcttcagctgcctcctc

SEQ ID NO: 4965526 - DNA, 25 bp, Homo sapien
ttcctcggcctcttccttgtccttc

SEQ ID NO: 4965527 - DNA, 25 bp, Homo sapien
cctcttcctcggcctcttccttgtc

SEQ ID NO: 4965528 - DNA, 25 bp, Homo sapien
agagggggggctcatccttggcttc

SEQ ID NO: 4965529 - DNA, 25 bp, Homo sapien
cttcagagggggggctcatccttgg

SEQ ID NO: 4965530 - DNA, 25 bp, Homo sapien
tcagccttggcagcctcaatggttt

SEQ ID NO: 4965531 - DNA, 25 bp, Homo sapien
ttcctcagccttggcagcctcaatg

SEQ ID NO: 4965532 - DNA, 25 bp, Homo sapien
gataggagctggtctgtaaaccgcc

SEQ ID NO: 4965533 - DNA, 25 bp, Homo sapien
taaaccgccgtaggcagatcggcca

SEQ ID NO: 4965534 - DNA, 25 bp, Homo sapien
gagctctgggagtagccactggtta

SEQ ID NO: 4965535 - DNA, 25 bp, Homo sapien
ctggttatgcttcccacgctggtga

SEQ ID NO: 4965536 - DNA, 25 bp, Homo sapien
taagctgcaatctcaatatccaaag

SEQ ID NO: 4965537 - DNA, 25 bp, Homo sapien
tgcaatctcaatatccaaagccatc

SEQ ID NO: 4965538 - DNA, 25 bp, Homo sapien
gctgcaatctcaatatccaaagcca

SEQ ID NO: 4965539 - DNA, 25 bp, Homo sapien
ctgtaagctgcaatctcaatatcca

SEQ ID NO: 4965540 - DNA, 25 bp, Homo sapien
ggtattcttttaggtatcgtgccat

SEQ ID NO: 4965541 - DNA, 25 bp, Homo sapien
tattcttttaggtatcgtgccattt

SEQ ID NO: 4965542 - DNA, 25 bp, Homo sapien
tcttttaggtatcgtgccatttcac

SEQ ID NO: 4965543 - DNA, 25 bp, Homo sapien
cttggtattcttttaggtatcgtgc

SEQ ID NO: 4965544 - DNA, 25 bp, Homo sapien
ttgaaaaaccttcatgcctaaaata

SEQ ID NO: 4965545 - DNA, 25 bp, Homo sapien
tgaaaaaccttcatgcctaaaatac

SEQ ID NO: 4965546 - DNA, 25 bp, Homo sapien
cgcaccaactcccccccttgctcga

SEQ ID NO: 4965547 - DNA, 25 bp, Homo sapien
ggcgcaccaactcccccccttgctc

SEQ ID NO: 4965548 - DNA, 25 bp, Homo sapien
tctccactttctgggcgcaccaact

SEQ ID NO: 4965549 - DNA, 25 bp, Homo sapien
caccaactcccccccttgctcgagt

SEQ ID NO: 4965550 - DNA, 25 bp, Homo sapien
ggccttgagcagacgacggctctcg

SEQ ID NO: 4965551 - DNA, 25 bp, Homo sapien
gatgtcggcgttctgcttgtcctcc

SEQ ID NO: 4965552 - DNA, 25 bp, Homo sapien
tgcatagcgctgatgtcggcgttct

SEQ ID NO: 4965553 - DNA, 25 bp, Homo sapien
cggcatgcttcgatttccagggtct

SEQ ID NO: 4965554 - DNA, 25 bp, Homo sapien
agatctgcgcgtactggatctgcgc

SEQ ID NO: 4965555 - DNA, 25 bp, Homo sapien
gaagcggctcttgaaccattcctca

SEQ ID NO: 4965556 - DNA, 25 bp, Homo sapien
ggtcacgtccatctccacggagatc

SEQ ID NO: 4965557 - DNA, 25 bp, Homo sapien
gagatttcgtccatcaagctgtcga

SEQ ID NO: 4965558 - DNA, 25 bp, Homo sapien
tcttcatagcgcgcctgcaggttgc

SEQ ID NO: 4965559 - DNA, 25 bp, Homo sapien
cctcctcttcatagcgcgcctgcag

SEQ ID NO: 4965560 - DNA, 25 bp, Homo sapien
ctttgcgcgcttccatcagccggcc

SEQ ID NO: 4965561 - DNA, 25 bp, Homo sapien
tcctcttcatagcgcgcctgcaggt

SEQ ID NO: 4965562 - DNA, 25 bp, Homo sapien
atcttccgccgccaggcgcaggtcg

SEQ ID NO: 4965563 - DNA, 25 bp, Homo sapien
ccgccgccaggcgcaggtcgcggat

SEQ ID NO: 4965564 - DNA, 25 bp, Homo sapien
ctcgttggtggcatcttccgccgcc

SEQ ID NO: 4965565 - DNA, 25 bp, Homo sapien
tcgttggtggcatcttccgccgcca

SEQ ID NO: 4965566 - DNA, 25 bp, Homo sapien
tcggagtgcttctggcgcagcacca

SEQ ID NO: 4965567 - DNA, 25 bp, Homo sapien
ctcctgctcgtacagcgcccggaag

SEQ ID NO: 4965568 - DNA, 25 bp, Homo sapien
ccagctcgtgcacgcgctcgatgaa

SEQ ID NO: 4965569 - DNA, 25 bp, Homo sapien
gcccggaagcgggatggctcggagt

SEQ ID NO: 4965570 - DNA, 25 bp, Homo sapien
gactgggcatcaacgatccagagct

SEQ ID NO: 4965571 - DNA, 25 bp, Homo sapien
tggaggagtagctgcggcgcacgga

SEQ ID NO: 4965572 - DNA, 25 bp, Homo sapien
aggtcgaggttctccagactgggca

SEQ ID NO: 4965573 - DNA, 25 bp, Homo sapien
tgatggcggctacctggctcaggtc

SEQ ID NO: 4965574 - DNA, 25 bp, Homo sapien
ccgcttgtaggaggtcgagtagtac

SEQ ID NO: 4965575 - DNA, 25 bp, Homo sapien
tagtacggctcgtagctgaaggaac

SEQ ID NO: 4965576 - DNA, 25 bp, Homo sapien
tgcgcacgctggagatgtgcacccg

SEQ ID NO: 4965577 - DNA, 25 bp, Homo sapien
caccggcgccgagtagctggagtaa

SEQ ID NO: 4965578 - DNA, 25 bp, Homo sapien
ggctgtgtgcggctcggcgccgttc

SEQ ID NO: 4965579 - DNA, 25 bp, Homo sapien
cgccgttctgccacccctatttata

SEQ ID NO: 4965580 - DNA, 25 bp, Homo sapien
ggctcctgacgcagcctgcgatcga

SEQ ID NO: 4965581 - DNA, 25 bp, Homo sapien
cctatttatacgccgggaggctcct

SEQ ID NO: 4965582 - DNA, 25 bp, Homo sapien
acggcacgccggccagtgggggcag

SEQ ID NO: 4965583 - DNA, 25 bp, Homo sapien
tcacggcacgccggccagtgggggc

SEQ ID NO: 4965584 - DNA, 25 bp, Homo sapien
gcacgccggccagtgggggcagcgc

SEQ ID NO: 4965585 - DNA, 25 bp, Homo sapien
cggcacgccggccagtgggggcagc

SEQ ID NO: 4965586 - DNA, 25 bp, Homo sapien
tgtgtagcacacgacctgatgattt

SEQ ID NO: 4965587 - DNA, 25 bp, Homo sapien
tcaggaacggatagaaaatagccat

SEQ ID NO: 4965588 - DNA, 25 bp, Homo sapien
caaccgcagcacatttaaagtccgc

SEQ ID NO: 4965589 - DNA, 25 bp, Homo sapien
tggctgattttcagggaagccgctg

SEQ ID NO: 4965590 - DNA, 25 bp, Homo sapien
gatacaatgtaataacccgaaaaca

SEQ ID NO: 4965591 - DNA, 25 bp, Homo sapien
cacgcggtagcgcacgtggatacaa

SEQ ID NO: 4965592 - DNA, 25 bp, Homo sapien
agcacccagatgcttgaaactggcg

SEQ ID NO: 4965593 - DNA, 25 bp, Homo sapien
aaaacagatgcagtcaggaatgcat

SEQ ID NO: 4965594 - DNA, 25 bp, Homo sapien
tgatagcccaccgtcctcatgatag

SEQ ID NO: 4965595 - DNA, 25 bp, Homo sapien
caagactaagtgatctcagaggacc

SEQ ID NO: 4965596 - DNA, 25 bp, Homo sapien
gaatggcttcccctgtgatacttgg

SEQ ID NO: 4965597 - DNA, 25 bp, Homo sapien
ttcaaatagagaagccggaatggct

SEQ ID NO: 4965598 - DNA, 25 bp, Homo sapien
aatatgccaatatcagtggaagagg

SEQ ID NO: 4965599 - DNA, 25 bp, Homo sapien
tatcagtggaagaggtaagggctaa

SEQ ID NO: 4965600 - DNA, 25 bp, Homo sapien
tgccaatatcagtggaagaggtaag

SEQ ID NO: 4965601 - DNA, 25 bp, Homo sapien
aatatcagtggaagaggtaagggct

SEQ ID NO: 4965602 - DNA, 25 bp, Homo sapien
gctgattcaaatgtctgcctctttc

SEQ ID NO: 4965603 - DNA, 25 bp, Homo sapien
ttctctcctctgaattgctgtaact

SEQ ID NO: 4965604 - DNA, 25 bp, Homo sapien
tttctctcctctgaattgctgtaac

SEQ ID NO: 4965605 - DNA, 25 bp, Homo sapien
acttggacccatttgtgaatcagca

SEQ ID NO: 4965606 - DNA, 25 bp, Homo sapien
ccttctgttatgaaacctcattggc

SEQ ID NO: 4965607 - DNA, 25 bp, Homo sapien
cagcaaaactttagctttcttcctc

SEQ ID NO: 4965608 - DNA, 25 bp, Homo sapien
tgaacttggacccatttgtgaatca

SEQ ID NO: 4965609 - DNA, 25 bp, Homo sapien
cagagtttgtgtgcaattggagcgt

SEQ ID NO: 4965610 - DNA, 25 bp, Homo sapien
gtcatggccgcgtcagtgacactcc

SEQ ID NO: 4965611 - DNA, 25 bp, Homo sapien
gaccacatgagcctgttagaaacaa

SEQ ID NO: 4965612 - DNA, 25 bp, Homo sapien
aagttttcgttcacggtcatggccg

SEQ ID NO: 4965613 - DNA, 25 bp, Homo sapien
tgtaagcaggttctttgacacaagt

SEQ ID NO: 4965614 - DNA, 25 bp, Homo sapien
tttatctttatcaaagctggttacc

SEQ ID NO: 4965615 - DNA, 25 bp, Homo sapien
tttctgacactgtaagcaggttctt

SEQ ID NO: 4965616 - DNA, 25 bp, Homo sapien
tatcaaagctggttaccatgttttc

SEQ ID NO: 4965617 - DNA, 25 bp, Homo sapien
tttaatttcacactgttatactgtt

SEQ ID NO: 4965618 - DNA, 25 bp, Homo sapien
tcacactgttatactgtttgctcat

SEQ ID NO: 4965619 - DNA, 25 bp, Homo sapien
gatgcctgcaactattaaatcagca

SEQ ID NO: 4965620 - DNA, 25 bp, Homo sapien
ctggatgcctgcaactattaaatca

SEQ ID NO: 4965621 - DNA, 25 bp, Homo sapien
agttcacaaagagttaggcctcctt

SEQ ID NO: 4965622 - DNA, 25 bp, Homo sapien
gacggaaaatagaagttcacaaaga

SEQ ID NO: 4965623 - DNA, 25 bp, Homo sapien
ttagacggaaaatagaagttcacaa

SEQ ID NO: 4965624 - DNA, 25 bp, Homo sapien
gttcacaaagagttaggcctccttg

SEQ ID NO: 4965625 - DNA, 25 bp, Homo sapien
gagtgggctcttctgttacaagcaa

SEQ ID NO: 4965626 - DNA, 25 bp, Homo sapien
tgttacaagcaaagaggattctcac

SEQ ID NO: 4965627 - DNA, 25 bp, Homo sapien
agattgagtggtctggttaaagagt

SEQ ID NO: 4965628 - DNA, 25 bp, Homo sapien
ggctcttctgttacaagcaaagagg

SEQ ID NO: 4965629 - DNA, 25 bp, Homo sapien
gagcctggtgctcaaccagcgtctt

SEQ ID NO: 4965630 - DNA, 25 bp, Homo sapien
tccttcaagagcctggtgctcaacc

SEQ ID NO: 4965631 - DNA, 25 bp, Homo sapien
cctggtgctcaaccagcgtcttctg

SEQ ID NO: 4965632 - DNA, 25 bp, Homo sapien
caagagcctggtgctcaaccagcgt

SEQ ID NO: 4965633 - DNA, 25 bp, Homo sapien
ttatacttcacgtctatggcacgaa

SEQ ID NO: 4965634 - DNA, 25 bp, Homo sapien
tggcacgaaatactttagttccagt

SEQ ID NO: 4965635 - DNA, 25 bp, Homo sapien
tatgagaaatgagctatctctgggc

SEQ ID NO: 4965636 - DNA, 25 bp, Homo sapien
tagttccagtattaacagttagttc

SEQ ID NO: 4965637 - DNA, 25 bp, Homo sapien
cttcaggaagtccccccactctgag

SEQ ID NO: 4965638 - DNA, 25 bp, Homo sapien
caagctggcctccatagaagttgta

SEQ ID NO: 4965639 - DNA, 25 bp, Homo sapien
acctcacccaacaggacctggtgac

SEQ ID NO: 4965640 - DNA, 25 bp, Homo sapien
tgacaagctggcctccatagaagtt

SEQ ID NO: 4965641 - DNA, 25 bp, Homo sapien
ggctctgtgcgaaatatatttgtgc

SEQ ID NO: 4965642 - DNA, 25 bp, Homo sapien
cacgggctctgtgcgaaatatattt

SEQ ID NO: 4965643 - DNA, 25 bp, Homo sapien
aaacaccaccactaaagtctccatt

SEQ ID NO: 4965644 - DNA, 25 bp, Homo sapien
ggcaaacacgggctctgtgcgaaat

SEQ ID NO: 4965645 - DNA, 25 bp, Homo sapien
gtagttccattagccactgactcgt

SEQ ID NO: 4965646 - DNA, 25 bp, Homo sapien
ctgactcgtataggatcacagaata

SEQ ID NO: 4965647 - DNA, 25 bp, Homo sapien
tttggtagttccattagccactgac

SEQ ID NO: 4965648 - DNA, 25 bp, Homo sapien
tttttggtagttccattagccactg

SEQ ID NO: 4965649 - DNA, 25 bp, Homo sapien
atggctccttcaagcagagcctgtg

SEQ ID NO: 4965650 - DNA, 25 bp, Homo sapien
tggctccttcaagcagagcctgtga

SEQ ID NO: 4965651 - DNA, 25 bp, Homo sapien
ggctccttcaagcagagcctgtgag

SEQ ID NO: 4965652 - DNA, 25 bp, Homo sapien
atccaatttccctaagcacggagaa

SEQ ID NO: 4965653 - DNA, 25 bp, Homo sapien
atttccctaagcacggagaattcat

SEQ ID NO: 4965654 - DNA, 25 bp, Homo sapien
caatttccctaagcacggagaattc

SEQ ID NO: 4965655 - DNA, 25 bp, Homo sapien
tccaatttccctaagcacggagaat

SEQ ID NO: 4965656 - DNA, 25 bp, Homo sapien
ggtcgcctgctcccaggatgtcact

SEQ ID NO: 4965657 - DNA, 25 bp, Homo sapien
gcagacacctgatcagcatagctca

SEQ ID NO: 4965658 - DNA, 25 bp, Homo sapien
gcctgctcccaggatgtcactatat

SEQ ID NO: 4965659 - DNA, 25 bp, Homo sapien
ggtggtcgcctgctcccaggatgtc

SEQ ID NO: 4965660 - DNA, 25 bp, Homo sapien
ttgggatcttcgtcaagaaaaggca

SEQ ID NO: 4965661 - DNA, 25 bp, Homo sapien
ttggccctttctccacgggaatgct

SEQ ID NO: 4965662 - DNA, 25 bp, Homo sapien
aggcagtcgttgacggagaaaagac

SEQ ID NO: 4965663 - DNA, 25 bp, Homo sapien
ccacgggaatgctctctgggctgct

SEQ ID NO: 4965664 - DNA, 25 bp, Homo sapien
gcggggcgaggtcgccgccatggcc

SEQ ID NO: 4965665 - DNA, 25 bp, Homo sapien
acggggttggtgagtgcgcgcccca

SEQ ID NO: 4965666 - DNA, 25 bp, Homo sapien
atggcccgctggatcccgaccaaga

SEQ ID NO: 4965667 - DNA, 25 bp, Homo sapien
gctggatcccgaccaagaggcagaa

SEQ ID NO: 4965668 - DNA, 25 bp, Homo sapien
agcggccctgccaggtttgcgcaga

SEQ ID NO: 4965669 - DNA, 25 bp, Homo sapien
gtgcagctgagcttcgggaccgtaa

SEQ ID NO: 4965670 - DNA, 25 bp, Homo sapien
tcgggaccgtaatcccgctcttgca

SEQ ID NO: 4965671 - DNA, 25 bp, Homo sapien
gggactccgagtgcttccaagtgca

SEQ ID NO: 4965672 - DNA, 25 bp, Homo sapien
ccggtgcgcccagcgtgggtttcac

SEQ ID NO: 4965673 - DNA, 25 bp, Homo sapien
cttcacaccagggaaatgtcaacgc

SEQ ID NO: 4965674 - DNA, 25 bp, Homo sapien
caccagggaaatgtcaacgcgaggg

SEQ ID NO: 4965675 - DNA, 25 bp, Homo sapien
ccgcagctctgtggctcgccccggt

SEQ ID NO: 4965676 - DNA, 25 bp, Homo sapien
tgggagtaggtgaccagcccgggtc

SEQ ID NO: 4965677 - DNA, 25 bp, Homo sapien
gctcctttggctttttatcaaggat

SEQ ID NO: 4965678 - DNA, 25 bp, Homo sapien
gctgggcacttggcattcagaacag

SEQ ID NO: 4965679 - DNA, 25 bp, Homo sapien
ttggctccgaaacaatagatgtgcg

SEQ ID NO: 4965680 - DNA, 25 bp, Homo sapien
caaggattgaagttattgagggcct

SEQ ID NO: 4965681 - DNA, 25 bp, Homo sapien
tgttgtgcaacataccctgcagagt

SEQ ID NO: 4965682 - DNA, 25 bp, Homo sapien
tagctctccaatgcagaccaactgc

SEQ ID NO: 4965683 - DNA, 25 bp, Homo sapien
gataaagtctgagcctccgttccaa

SEQ ID NO: 4965684 - DNA, 25 bp, Homo sapien
tggaagtctctcgtggtcaacagga

SEQ ID NO: 4965685 - DNA, 25 bp, Homo sapien
catttggatgactcagagctagcta

SEQ ID NO: 4965686 - DNA, 25 bp, Homo sapien
gaggaagggagagcctccactctgt

SEQ ID NO: 4965687 - DNA, 25 bp, Homo sapien
tatgaattgtgcctgctgaagctgg

SEQ ID NO: 4965688 - DNA, 25 bp, Homo sapien
gaagctggcagtcgctactgtcata

SEQ ID NO: 4965689 - DNA, 25 bp, Homo sapien
tactcctccctcttatggaatgtgt

SEQ ID NO: 4965690 - DNA, 25 bp, Homo sapien
cctgtgggatcagacctgccgcctc

SEQ ID NO: 4965691 - DNA, 25 bp, Homo sapien
ctcagcttgactcaggaccttggca

SEQ ID NO: 4965692 - DNA, 25 bp, Homo sapien
tgccaagctcagcttgactcaggac

SEQ ID NO: 4965693 - DNA, 25 bp, Homo sapien
catgtagccatcttgttagctgaaa

SEQ ID NO: 4965694 - DNA, 25 bp, Homo sapien
caaaaagagcatatgtactgtacac

SEQ ID NO: 4965695 - DNA, 25 bp, Homo sapien
gaaagaaaatgcttgaccatgtggt

SEQ ID NO: 4965696 - DNA, 25 bp, Homo sapien
gaaagaaggcgcagtctcatggaag

SEQ ID NO: 4965697 - DNA, 25 bp, Homo sapien
gggttcatggtcattatccaccttt

SEQ ID NO: 4965698 - DNA, 25 bp, Homo sapien
tttcccaaatgtgccgtttgctctc

SEQ ID NO: 4965699 - DNA, 25 bp, Homo sapien
aagccactgttgttcgaatgggttc

SEQ ID NO: 4965700 - DNA, 25 bp, Homo sapien
gctctgtgccattgcaaagccactg

SEQ ID NO: 4965701 - DNA, 25 bp, Homo sapien
tatgcacttagcacttggaatactc

SEQ ID NO: 4965702 - DNA, 25 bp, Homo sapien
gtgcaaataaatgctgtgttcatct

SEQ ID NO: 4965703 - DNA, 25 bp, Homo sapien
caggtatctgagtaggaggtatgca

SEQ ID NO: 4965704 - DNA, 25 bp, Homo sapien
tgttcatcttcaccgattcaccagg

SEQ ID NO: 4965705 - DNA, 25 bp, Homo sapien
cgtagcctggacaatgacatatggt

SEQ ID NO: 4965706 - DNA, 25 bp, Homo sapien
gatggacacactacctagaggccat

SEQ ID NO: 4965707 - DNA, 25 bp, Homo sapien
catcactgattgtccctggatggac

SEQ ID NO: 4965708 - DNA, 25 bp, Homo sapien
gcctaggtagcctcgttttacacca

SEQ ID NO: 4965709 - DNA, 25 bp, Homo sapien
gccaatgttgtgaatggaaaccaca

SEQ ID NO: 4965710 - DNA, 25 bp, Homo sapien
ccaatgttgtgaatggaaaccacaa

SEQ ID NO: 4965711 - DNA, 25 bp, Homo sapien
cgtgaataattaaattgttaggaag

SEQ ID NO: 4965712 - DNA, 25 bp, Homo sapien
cacgcaagttcgtgaataattaaat

SEQ ID NO: 4965713 - DNA, 25 bp, Homo sapien
cgcaagttcgtgaataattaaattg

SEQ ID NO: 4965714 - DNA, 25 bp, Homo sapien
cacacgcaagttcgtgaataattaa

SEQ ID NO: 4965715 - DNA, 25 bp, Homo sapien
catcggttggtcattaatcttccac

SEQ ID NO: 4965716 - DNA, 25 bp, Homo sapien
tggcacctcttttatcctgtgggaa

SEQ ID NO: 4965717 - DNA, 25 bp, Homo sapien
tagtcttatcgattcagcagtcatc

SEQ ID NO: 4965718 - DNA, 25 bp, Homo sapien
aaagtgtgacttaaatgccatcccc

SEQ ID NO: 4965719 - DNA, 25 bp, Homo sapien
ttatcattgcgaaaggggacagaga

SEQ ID NO: 4965720 - DNA, 25 bp, Homo sapien
tttatcattgcgaaaggggacagag

SEQ ID NO: 4965721 - DNA, 25 bp, Homo sapien
gttgtgacacgcgagagagccccat

SEQ ID NO: 4965722 - DNA, 25 bp, Homo sapien
gttgggttgtgacacgcgagagagc

SEQ ID NO: 4965723 - DNA, 25 bp, Homo sapien
caaaagtgtcttgcacgcttggtgc

SEQ ID NO: 4965724 - DNA, 25 bp, Homo sapien
ttggcagctacgtcgccagcagatg

SEQ ID NO: 4965725 - DNA, 25 bp, Homo sapien
tcatagaggctgtcggtcctcagca

SEQ ID NO: 4965726 - DNA, 25 bp, Homo sapien
tggagtactgcttgcccaggtgccc

SEQ ID NO: 4965727 - DNA, 25 bp, Homo sapien
accattgccttggaaggaccattga

SEQ ID NO: 4965728 - DNA, 25 bp, Homo sapien
tgttttcattgaccgactcccactg

SEQ ID NO: 4965729 - DNA, 25 bp, Homo sapien
gagctctgtatttagcggcctgcaa

SEQ ID NO: 4965730 - DNA, 25 bp, Homo sapien
catctttgaggatgtaggtgtcacc

SEQ ID NO: 4965731 - DNA, 25 bp, Homo sapien
tcattcagttgcaggaacggagccc

SEQ ID NO: 4965732 - DNA, 25 bp, Homo sapien
ggaggcacattcacaccaattaggg

SEQ ID NO: 4965733 - DNA, 25 bp, Homo sapien
ccaattagggttatacaggatgccc

SEQ ID NO: 4965734 - DNA, 25 bp, Homo sapien
cagatgcttggatgcgataaagtcc

SEQ ID NO: 4965735 - DNA, 25 bp, Homo sapien
tgtgccaggtctaccattgaataga

SEQ ID NO: 4965736 - DNA, 25 bp, Homo sapien
caaaaccagcccgtcccaatatggt

SEQ ID NO: 4965737 - DNA, 25 bp, Homo sapien
gctaaaacacaactggtgtgcccag

SEQ ID NO: 4965738 - DNA, 25 bp, Homo sapien
gagtatgagtgaggccgactttttt

SEQ ID NO: 4965739 - DNA, 25 bp, Homo sapien
tgccagcgtggttaagttttggtta

SEQ ID NO: 4965740 - DNA, 25 bp, Homo sapien
caaatcactggctacaagggactta

SEQ ID NO: 4965741 - DNA, 25 bp, Homo sapien
tacctcctctgagcgcaaatcactg

SEQ ID NO: 4965742 - DNA, 25 bp, Homo sapien
aaaatggagcgatttaggtgaccaa

SEQ ID NO: 4965743 - DNA, 25 bp, Homo sapien
gaaattgaggctacacacagaaaat

SEQ ID NO: 4965744 - DNA, 25 bp, Homo sapien
catagtagtctaaggcttcaccagc

SEQ ID NO: 4965745 - DNA, 25 bp, Homo sapien
gaggtccatggactatacttgtccc

SEQ ID NO: 4965746 - DNA, 25 bp, Homo sapien
tcccatttatcatcccaggtggtgc

SEQ ID NO: 4965747 - DNA, 25 bp, Homo sapien
ttagaattccttcagccctagctgc

SEQ ID NO: 4965748 - DNA, 25 bp, Homo sapien
tgaagtaggaaaattttgttcagat

SEQ ID NO: 4965749 - DNA, 25 bp, Homo sapien
ccatattttgtgagtcgtttgtcta

SEQ ID NO: 4965750 - DNA, 25 bp, Homo sapien
tgctatctggatttcaaacatggac

SEQ ID NO: 4965751 - DNA, 25 bp, Homo sapien
gcagtatcagatgtccaaactcatc

SEQ ID NO: 4965752 - DNA, 25 bp, Homo sapien
aagtggaagaaagccttggccgtgg

SEQ ID NO: 4965753 - DNA, 25 bp, Homo sapien
tggaagaaagccttggccgtggccc

SEQ ID NO: 4965754 - DNA, 25 bp, Homo sapien
ttggagacgatcaagggagggaact

SEQ ID NO: 4965755 - DNA, 25 bp, Homo sapien
ttcaaagggtttggagacgatcaag

SEQ ID NO: 4965756 - DNA, 25 bp, Homo sapien
acttaagtcatgttagtaatggtca

SEQ ID NO: 4965757 - DNA, 25 bp, Homo sapien
gcaacttggtgtaaggatttctgaa

SEQ ID NO: 4965758 - DNA, 25 bp, Homo sapien
tattatggaatatgtgcaacttggt

SEQ ID NO: 4965759 - DNA, 25 bp, Homo sapien
caatgtcagaattatacttaagtca

SEQ ID NO: 4965760 - DNA, 25 bp, Homo sapien
tgcccagtttcctcttcaatcagac

SEQ ID NO: 4965761 - DNA, 25 bp, Homo sapien
cagtttcctcttcaatcagactttc

SEQ ID NO: 4965762 - DNA, 25 bp, Homo sapien
taaatcttcttctgcccagtttcct

SEQ ID NO: 4965763 - DNA, 25 bp, Homo sapien
ttaaatcttcttctgcccagtttcc

SEQ ID NO: 4965764 - DNA, 25 bp, Homo sapien
ggctggtgcgtggtgcattcgaagc

SEQ ID NO: 4965765 - DNA, 25 bp, Homo sapien
cagagctcctttcaggtctcggagg

SEQ ID NO: 4965766 - DNA, 25 bp, Homo sapien
ggtttctgccagttgaccaacctct

SEQ ID NO: 4965767 - DNA, 25 bp, Homo sapien
ggtgcattcgaagcgttgggtttct

SEQ ID NO: 4965768 - DNA, 25 bp, Homo sapien
tcttggaaagaatcaatcaaatttt

SEQ ID NO: 4965769 - DNA, 25 bp, Homo sapien
gggcgcagtccataggaccagtgct

SEQ ID NO: 4965770 - DNA, 25 bp, Homo sapien
ctccagggcgcagtccataggacca

SEQ ID NO: 4965771 - DNA, 25 bp, Homo sapien
ccagggcgcagtccataggaccagt

SEQ ID NO: 4965772 - DNA, 25 bp, Homo sapien
aagtcagtagaataaggccagctag

SEQ ID NO: 4965773 - DNA, 25 bp, Homo sapien
ttccacgcaccaagtcagtagaata

SEQ ID NO: 4965774 - DNA, 25 bp, Homo sapien
ccacgcaccaagtcagtagaataag

SEQ ID NO: 4965775 - DNA, 25 bp, Homo sapien
caccaagtcagtagaataaggccag

SEQ ID NO: 4965776 - DNA, 25 bp, Homo sapien
tcacacctggatttagcccttgggc

SEQ ID NO: 4965777 - DNA, 25 bp, Homo sapien
tactgctggctgaaccatctgtggg

SEQ ID NO: 4965778 - DNA, 25 bp, Homo sapien
tcactaaccctgcagaagatggaag

SEQ ID NO: 4965779 - DNA, 25 bp, Homo sapien
ggtcgataagctgtgggagtcccca

SEQ ID NO: 4965780 - DNA, 25 bp, Homo sapien
gagagcaagaccatattgagcagac

SEQ ID NO: 4965781 - DNA, 25 bp, Homo sapien
ccccggcatttagtgagcattcagt

SEQ ID NO: 4965782 - DNA, 25 bp, Homo sapien
ggaaaccagcagacctatcaagagt

SEQ ID NO: 4965783 - DNA, 25 bp, Homo sapien
cccagaggtgcaaccgtggacgtgt

SEQ ID NO: 4965784 - DNA, 25 bp, Homo sapien
ggttaggcccatctagacttttcac

SEQ ID NO: 4965785 - DNA, 25 bp, Homo sapien
taggcccatctagacttttcacgtt

SEQ ID NO: 4965786 - DNA, 25 bp, Homo sapien
gaggttaggcccatctagacttttc

SEQ ID NO: 4965787 - DNA, 25 bp, Homo sapien
gctgggaggttaggcccatctagac

SEQ ID NO: 4965788 - DNA, 25 bp, Homo sapien
aattcataaggtttgtgttgttagc

SEQ ID NO: 4965789 - DNA, 25 bp, Homo sapien
aagctaactggtaatattcatcacc

SEQ ID NO: 4965790 - DNA, 25 bp, Homo sapien
cgaattattggggaggcagtctttt

SEQ ID NO: 4965791 - DNA, 25 bp, Homo sapien
gggcatgctatttatccagtctaat

SEQ ID NO: 4965792 - DNA, 25 bp, Homo sapien
caacacatattgaagaaatgtaagc

SEQ ID NO: 4965793 - DNA, 25 bp, Homo sapien
caaattaagttatactgtatttcct

SEQ ID NO: 4965794 - DNA, 25 bp, Homo sapien
gggctggttgtcaacacatattgaa

SEQ ID NO: 4965795 - DNA, 25 bp, Homo sapien
tacagaaagtgatgattttcaaaag

SEQ ID NO: 4965796 - DNA, 25 bp, Homo sapien
tcattggtagggaggtacaggccct

SEQ ID NO: 4965797 - DNA, 25 bp, Homo sapien
tgatgactgtatgagaaaactaggc

SEQ ID NO: 4965798 - DNA, 25 bp, Homo sapien
gataattacatcttggaccagccaa

SEQ ID NO: 4965799 - DNA, 25 bp, Homo sapien
cccactgtagggttctagctgcaat

SEQ ID NO: 4965800 - DNA, 25 bp, Homo sapien
actttgtgacatgtgtagtggtgtc

SEQ ID NO: 4965801 - DNA, 25 bp, Homo sapien
cgttggaccctctcaggttggcttc

SEQ ID NO: 4965802 - DNA, 25 bp, Homo sapien
ctcttcaaatatagctcccttcacg

SEQ ID NO: 4965803 - DNA, 25 bp, Homo sapien
tgacatgtgtagtggtgtcagcatc

SEQ ID NO: 4965804 - DNA, 25 bp, Homo sapien
taatttgtcttgagatcacggagca

SEQ ID NO: 4965805 - DNA, 25 bp, Homo sapien
cacagactgatactggtccatggcc

SEQ ID NO: 4965806 - DNA, 25 bp, Homo sapien
taccagatttcatagctaccagcca

SEQ ID NO: 4965807 - DNA, 25 bp, Homo sapien
gcttttgctgctaggccacactgag

SEQ ID NO: 4965808 - DNA, 25 bp, Homo sapien
tctaaatcagttcctgccagagttg

SEQ ID NO: 4965809 - DNA, 25 bp, Homo sapien
cattttttaaggtagccactctcag

SEQ ID NO: 4965810 - DNA, 25 bp, Homo sapien
ggttacagttcttcaactttgcatt

SEQ ID NO: 4965811 - DNA, 25 bp, Homo sapien
ccagagttgctcctctgaggttaca

SEQ ID NO: 4965812 - DNA, 25 bp, Homo sapien
tacagtgaacacattctgggagtag

SEQ ID NO: 4965813 - DNA, 25 bp, Homo sapien
aacacattctgggagtagtttaact

SEQ ID NO: 4965814 - DNA, 25 bp, Homo sapien
aaatatagttatctaccttcaacag

SEQ ID NO: 4965815 - DNA, 25 bp, Homo sapien
atatagttatctaccttcaacagaa

SEQ ID NO: 4965816 - DNA, 25 bp, Homo sapien
cagggatgctccttctgcattagaa

SEQ ID NO: 4965817 - DNA, 25 bp, Homo sapien
ggctttaagaccagaaggatcctca

SEQ ID NO: 4965818 - DNA, 25 bp, Homo sapien
ctgcattagaacagagcatcttgac

SEQ ID NO: 4965819 - DNA, 25 bp, Homo sapien
atcttgactccctggagattcgcac

SEQ ID NO: 4965820 - DNA, 25 bp, Homo sapien
tacagcggcttaaattggccatttt

SEQ ID NO: 4965821 - DNA, 25 bp, Homo sapien
acagcggcttaaattggccattttg

SEQ ID NO: 4965822 - DNA, 25 bp, Homo sapien
acaaattcctttcgggatattggtg

SEQ ID NO: 4965823 - DNA, 25 bp, Homo sapien
tggagttgctagcaaaaatcggaca

SEQ ID NO: 4965824 - DNA, 25 bp, Homo sapien
gctagcaaaaatcggacaaattcct

SEQ ID NO: 4965825 - DNA, 25 bp, Homo sapien
gtgaatgatcctccggtggttgaga

SEQ ID NO: 4965826 - DNA, 25 bp, Homo sapien
cacttctaggtgttcaatcaatgag

SEQ ID NO: 4965827 - DNA, 25 bp, Homo sapien
gtgttcaatcaatgagtcaatacca

SEQ ID NO: 4965828 - DNA, 25 bp, Homo sapien
ctaggtgttcaatcaatgagtcaat

SEQ ID NO: 4965829 - DNA, 25 bp, Homo sapien
ctttattgccacttctaggtgttca

SEQ ID NO: 4965830 - DNA, 25 bp, Homo sapien
taaagttgatgcgtatggcttacat

SEQ ID NO: 4965831 - DNA, 25 bp, Homo sapien
gactatctacctgaaggaccacctg

SEQ ID NO: 4965832 - DNA, 25 bp, Homo sapien
gggaatatccagaacttggagccaa

SEQ ID NO: 4965833 - DNA, 25 bp, Homo sapien
agtcacttgtgatagaacgtaaatc

SEQ ID NO: 4965834 - DNA, 25 bp, Homo sapien
acaatgagctgtccatgacgcaagt

SEQ ID NO: 4965835 - DNA, 25 bp, Homo sapien
cgcaagtagttcaaaatgggttcga

SEQ ID NO: 4965836 - DNA, 25 bp, Homo sapien
gttcaaaatgggttcgaagtactca

SEQ ID NO: 4965837 - DNA, 25 bp, Homo sapien
gagctgtccatgacgcaagtagttc

SEQ ID NO: 4965838 - DNA, 25 bp, Homo sapien
ttagtaagtacagaaggtcaggagt

SEQ ID NO: 4965839 - DNA, 25 bp, Homo sapien
attagtaagtacagaaggtcaggag

SEQ ID NO: 4965840 - DNA, 25 bp, Homo sapien
ctttgtccttaaacatgtgggccag

SEQ ID NO: 4965841 - DNA, 25 bp, Homo sapien
ttgtccttaaacatgtgggccagca

SEQ ID NO: 4965842 - DNA, 25 bp, Homo sapien
atactgtcaggttctttattcacta

SEQ ID NO: 4965843 - DNA, 25 bp, Homo sapien
tgggccagcatactgtcaggttctt

SEQ ID NO: 4965844 - DNA, 25 bp, Homo sapien
atttaagtcaagagtatactcgatc

SEQ ID NO: 4965845 - DNA, 25 bp, Homo sapien
aagagtatactcgatcccagctgct

SEQ ID NO: 4965846 - DNA, 25 bp, Homo sapien
ctcaaaaagatgcatgctacaacct

SEQ ID NO: 4965847 - DNA, 25 bp, Homo sapien
aagtcaagagtatactcgatcccag

SEQ ID NO: 4965848 - DNA, 25 bp, Homo sapien
tgtagttgtaaagtaccgccctcca

SEQ ID NO: 4965849 - DNA, 25 bp, Homo sapien
ttaatgtcagccagtctgtgtggaa

SEQ ID NO: 4965850 - DNA, 25 bp, Homo sapien
ccctcaggaggcttagaatctgtct

SEQ ID NO: 4965851 - DNA, 25 bp, Homo sapien
tgtggaatcctaacaatccctcagg

SEQ ID NO: 4965852 - DNA, 25 bp, Homo sapien
taatacaaatattaagattggggat

SEQ ID NO: 4965853 - DNA, 25 bp, Homo sapien
agatgacatgtagaaaataatacaa

SEQ ID NO: 4965854 - DNA, 25 bp, Homo sapien
ctagagatgacatgtagaaaataat

SEQ ID NO: 4965855 - DNA, 25 bp, Homo sapien
gagatgacatgtagaaaataataca

SEQ ID NO: 4965856 - DNA, 25 bp, Homo sapien
caataaatggctctccttcacaaac

SEQ ID NO: 4965857 - DNA, 25 bp, Homo sapien
acaaacaaacaaaacatcatcatcc

SEQ ID NO: 4965858 - DNA, 25 bp, Homo sapien
aaatggctctccttcacaaacaaac

SEQ ID NO: 4965859 - DNA, 25 bp, Homo sapien
cacaaacaaacaaaacatcatcatc

SEQ ID NO: 4965860 - DNA, 25 bp, Homo sapien
gctatcaatctagactgcaaagaag

SEQ ID NO: 4965861 - DNA, 25 bp, Homo sapien
catacacccaaatgtaaatggctgc

SEQ ID NO: 4965862 - DNA, 25 bp, Homo sapien
tacacaaacgatgttgagttcagct

SEQ ID NO: 4965863 - DNA, 25 bp, Homo sapien
tttacccctaaatcatcagctgttg

SEQ ID NO: 4965864 - DNA, 25 bp, Homo sapien
aatcagataaagttccatatacagc

SEQ ID NO: 4965865 - DNA, 25 bp, Homo sapien
ggtggcttttatgccgagtttactg

SEQ ID NO: 4965866 - DNA, 25 bp, Homo sapien
gataaagttccatatacagcaacca

SEQ ID NO: 4965867 - DNA, 25 bp, Homo sapien
cgagtttactgctggccacagaaag

SEQ ID NO: 4965868 - DNA, 25 bp, Homo sapien
cctggacatgatgggacggaaaaga

SEQ ID NO: 4965869 - DNA, 25 bp, Homo sapien
tggatgaacctttttgacagtatgc

SEQ ID NO: 4965870 - DNA, 25 bp, Homo sapien
aaaggttaccaaggcatagatggga

SEQ ID NO: 4965871 - DNA, 25 bp, Homo sapien
tttgggatgatgaccaagtactgga

SEQ ID NO: 4965872 - DNA, 25 bp, Homo sapien
ttgtcttccgatgaaaataaaggcc

SEQ ID NO: 4965873 - DNA, 25 bp, Homo sapien
ttctgtgggtctattgtcttccgat

SEQ ID NO: 4965874 - DNA, 25 bp, Homo sapien
tattgtcttccgatgaaaataaagg

SEQ ID NO: 4965875 - DNA, 25 bp, Homo sapien
tgggtctattgtcttccgatgaaaa

SEQ ID NO: 4965876 - DNA, 25 bp, Homo sapien
tgaagtaggacacaccttttttgtg

SEQ ID NO: 4965877 - DNA, 25 bp, Homo sapien
tccatagctccagatactagttcta

SEQ ID NO: 4965878 - DNA, 25 bp, Homo sapien
caattctaaagcagtctgggcatgg

SEQ ID NO: 4965879 - DNA, 25 bp, Homo sapien
taaccaaagggtggtcaattagaga

SEQ ID NO: 4965880 - DNA, 25 bp, Homo sapien
gcaatcaggcagttaacaatttcct

SEQ ID NO: 4965881 - DNA, 25 bp, Homo sapien
accatgtggcctgatgtttccatgt

SEQ ID NO: 4965882 - DNA, 25 bp, Homo sapien
atgtttccatgtcactgggattatc

SEQ ID NO: 4965883 - DNA, 25 bp, Homo sapien
tccaccatgtggcctgatgtttcca

SEQ ID NO: 4965884 - DNA, 25 bp, Homo sapien
gatgtttccatgtcactgggattat

SEQ ID NO: 4965885 - DNA, 25 bp, Homo sapien
taaatcgtcttggacactgtctgtg

SEQ ID NO: 4965886 - DNA, 25 bp, Homo sapien
tcagtgactggaggcacctgtgtct

SEQ ID NO: 4965887 - DNA, 25 bp, Homo sapien
aattcctggcgagcatataacacag

SEQ ID NO: 4965888 - DNA, 25 bp, Homo sapien
gcttcatagtctcacagtctggtaa

SEQ ID NO: 4965889 - DNA, 25 bp, Homo sapien
ggctgccgttcaggaacagggtcac

SEQ ID NO: 4965890 - DNA, 25 bp, Homo sapien
cgttcaggaacagggtcacccgcct

SEQ ID NO: 4965891 - DNA, 25 bp, Homo sapien
tttccgttcttggggctgccgttca

SEQ ID NO: 4965892 - DNA, 25 bp, Homo sapien
tgccgttcaggaacagggtcacccg

SEQ ID NO: 4965893 - DNA, 25 bp, Homo sapien
ccgctgggtcctgagtgagccgcca

SEQ ID NO: 4965894 - DNA, 25 bp, Homo sapien
ctccctccacccactcggattcgcc

SEQ ID NO: 4965895 - DNA, 25 bp, Homo sapien
actcggattcgcctcccttcgccac

SEQ ID NO: 4965896 - DNA, 25 bp, Homo sapien
cgctgggtcctgagtgagccgccac

SEQ ID NO: 4965897 - DNA, 25 bp, Homo sapien
gacacaccacacgcacgcactctgt

SEQ ID NO: 4965898 - DNA, 25 bp, Homo sapien
ccttggggacacaccacacgcacgc

SEQ ID NO: 4965899 - DNA, 25 bp, Homo sapien
acaccacacgcacgcactctgtccc

SEQ ID NO: 4965900 - DNA, 25 bp, Homo sapien
ctgcccttggggacacaccacacgc

SEQ ID NO: 4965901 - DNA, 25 bp, Homo sapien
gactggcagcttgccggtgtccagc

SEQ ID NO: 4965902 - DNA, 25 bp, Homo sapien
tgtccagcgcctggctaacagattg

SEQ ID NO: 4965903 - DNA, 25 bp, Homo sapien
cctttggcaggatcgttgaattggt

SEQ ID NO: 4965904 - DNA, 25 bp, Homo sapien
tggtagggccgatttccttcgtgga

SEQ ID NO: 4965905 - DNA, 25 bp, Homo sapien
ccacgtaaatactagcctgaaacag

SEQ ID NO: 4965906 - DNA, 25 bp, Homo sapien
gctgggcctggatctaacccgcata

SEQ ID NO: 4965907 - DNA, 25 bp, Homo sapien
ctcatattaatgtcaccgcgttcac

SEQ ID NO: 4965908 - DNA, 25 bp, Homo sapien
ccgcgttcactggtaatagctgggc

SEQ ID NO: 4965909 - DNA, 25 bp, Homo sapien
cttctccccattctaccttttgctt

SEQ ID NO: 4965910 - DNA, 25 bp, Homo sapien
ctcttccaagtgaattcctccacct

SEQ ID NO: 4965911 - DNA, 25 bp, Homo sapien
ttcctcttccaagtgaattcctcca

SEQ ID NO: 4965912 - DNA, 25 bp, Homo sapien
tccaagtgaattcctccacctgggt

SEQ ID NO: 4965913 - DNA, 25 bp, Homo sapien
tgtgacaaagcagagccaatcgggt

SEQ ID NO: 4965914 - DNA, 25 bp, Homo sapien
gagtcaccttgaggctgtttggcca

SEQ ID NO: 4965915 - DNA, 25 bp, Homo sapien
ttgaatggccatgggctgacacagg

SEQ ID NO: 4965916 - DNA, 25 bp, Homo sapien
tgactgagtaaagcaggctcctcca

SEQ ID NO: 4965917 - DNA, 25 bp, Homo sapien
aggaaggcctgggagagacactgac

SEQ ID NO: 4965918 - DNA, 25 bp, Homo sapien
ctgcgaagaggaaggcctgggagag

SEQ ID NO: 4965919 - DNA, 25 bp, Homo sapien
gaagaggaaggcctgggagagacac

SEQ ID NO: 4965920 - DNA, 25 bp, Homo sapien
agaggaaggcctgggagagacactg

SEQ ID NO: 4965921 - DNA, 25 bp, Homo sapien
gataagaggacaggattgaggtcat

SEQ ID NO: 4965922 - DNA, 25 bp, Homo sapien
tgataagaggacaggattgaggtca

SEQ ID NO: 4965923 - DNA, 25 bp, Homo sapien
ctgataagaggacaggattgaggtc

SEQ ID NO: 4965924 - DNA, 25 bp, Homo sapien
tcaaagaagaattaatcttggtctt

SEQ ID NO: 4965925 - DNA, 25 bp, Homo sapien
caaagaagaattaatcttggtcttt

SEQ ID NO: 4965926 - DNA, 25 bp, Homo sapien
aaagaagaattaatcttggtctttg

SEQ ID NO: 4965927 - DNA, 25 bp, Homo sapien
tgcctcctgacccaagatgatgaag

SEQ ID NO: 4965928 - DNA, 25 bp, Homo sapien
taccctggagtatgaaaacacactg

SEQ ID NO: 4965929 - DNA, 25 bp, Homo sapien
tagctagctgcacaaccagggcaaa

SEQ ID NO: 4965930 - DNA, 25 bp, Homo sapien
taagcatggtccagatccgaactgt

SEQ ID NO: 4965931 - DNA, 25 bp, Homo sapien
cacgtgattcatacatgttgattac

SEQ ID NO: 4965932 - DNA, 25 bp, Homo sapien
tgtgggcttgaatcctaacaccctc

SEQ ID NO: 4965933 - DNA, 25 bp, Homo sapien
catggaaagactgtgaagacactta

SEQ ID NO: 4965934 - DNA, 25 bp, Homo sapien
tacatgtgttgcttgaatgaggccc

SEQ ID NO: 4965935 - DNA, 25 bp, Homo sapien
ctgagaactggagccggactgtaca

SEQ ID NO: 4965936 - DNA, 25 bp, Homo sapien
tgtcagccactgattgtccctgtag

SEQ ID NO: 4965937 - DNA, 25 bp, Homo sapien
ggactgtacaacttcccctgggatc

SEQ ID NO: 4965938 - DNA, 25 bp, Homo sapien
tggctctctgcccaagttgtgtgca

SEQ ID NO: 4965939 - DNA, 25 bp, Homo sapien
tgccagagcatgcttattcagaggc

SEQ ID NO: 4965940 - DNA, 25 bp, Homo sapien
tgagtgtgcgctggagtgccagagc

SEQ ID NO: 4965941 - DNA, 25 bp, Homo sapien
gccagagcatgcttattcagaggcc

SEQ ID NO: 4965942 - DNA, 25 bp, Homo sapien
aaaaggagaaaggccggtctgtgag

SEQ ID NO: 4965943 - DNA, 25 bp, Homo sapien
ttgcattattgtaacagacaagtct

SEQ ID NO: 4965944 - DNA, 25 bp, Homo sapien
gatttctcttcacattccttttgca

SEQ ID NO: 4965945 - DNA, 25 bp, Homo sapien
tgaaagaaacctctcatagttttcc

SEQ ID NO: 4965946 - DNA, 25 bp, Homo sapien
caagtctaaggcactgtctaatgtt

SEQ ID NO: 4965947 - DNA, 25 bp, Homo sapien
cattgtgcctttgaaacgttgtttt

SEQ ID NO: 4965948 - DNA, 25 bp, Homo sapien
ctctcggctcccatggcttttattt

SEQ ID NO: 4965949 - DNA, 25 bp, Homo sapien
ctgggggtggaaatcattgtgcctt

SEQ ID NO: 4965950 - DNA, 25 bp, Homo sapien
tccagaagacaggacttgattactt

SEQ ID NO: 4965951 - DNA, 25 bp, Homo sapien
tgattgtgctgacagattcttctga

SEQ ID NO: 4965952 - DNA, 25 bp, Homo sapien
ttcccgactgtgtataaatttgcca

SEQ ID NO: 4965953 - DNA, 25 bp, Homo sapien
aggccagcccaggtgttcccgactg

SEQ ID NO: 4965954 - DNA, 25 bp, Homo sapien
aaatagcagttgattgtgctgacag

SEQ ID NO: 4965955 - DNA, 25 bp, Homo sapien
tggttcctggatctgctatcactgg

SEQ ID NO: 4965956 - DNA, 25 bp, Homo sapien
ggttcctggatctgctatcactggt

SEQ ID NO: 4965957 - DNA, 25 bp, Homo sapien
gttcctggatctgctatcactggta

SEQ ID NO: 4965958 - DNA, 25 bp, Homo sapien
ttcctggatctgctatcactggtac

SEQ ID NO: 4965959 - DNA, 25 bp, Homo sapien
acctaaatgattgtggttctgggag

SEQ ID NO: 4965960 - DNA, 25 bp, Homo sapien
gaaagatcagtgagcacatctcaga

SEQ ID NO: 4965961 - DNA, 25 bp, Homo sapien
ccctcatacggataagattctgttt

SEQ ID NO: 4965962 - DNA, 25 bp, Homo sapien
cacactgagttgtgcggcctgatca

SEQ ID NO: 4965963 - DNA, 25 bp, Homo sapien
gaagctcaaatcttagaggggagtt

SEQ ID NO: 4965964 - DNA, 25 bp, Homo sapien
aaaccttatcagaatcctctcctgt

SEQ ID NO: 4965965 - DNA, 25 bp, Homo sapien
cacggccaggaccagaaattggaag

SEQ ID NO: 4965966 - DNA, 25 bp, Homo sapien
tcaaatcttagaggggagttggaag

SEQ ID NO: 4965967 - DNA, 25 bp, Homo sapien
caccctgccgaagatggataggaca

SEQ ID NO: 4965968 - DNA, 25 bp, Homo sapien
tggtgcttgagtttatcaccctgcc

SEQ ID NO: 4965969 - DNA, 25 bp, Homo sapien
agtactggggcaatttctcaaagct

SEQ ID NO: 4965970 - DNA, 25 bp, Homo sapien
ggataggacatctcgaataagacag

SEQ ID NO: 4965971 - DNA, 25 bp, Homo sapien
ttgggttctatacagtcctcctcct

SEQ ID NO: 4965972 - DNA, 25 bp, Homo sapien
tcattgggtttctagacgacagccc

SEQ ID NO: 4965973 - DNA, 25 bp, Homo sapien
ggtttctagacgacagccctcagtg

SEQ ID NO: 4965974 - DNA, 25 bp, Homo sapien
tgcccagccatttgggttctataca

SEQ ID NO: 4965975 - DNA, 25 bp, Homo sapien
tgcgcagggataatcaccaggaccc

SEQ ID NO: 4965976 - DNA, 25 bp, Homo sapien
cttccaaagaatgcgcagggataat

SEQ ID NO: 4965977 - DNA, 25 bp, Homo sapien
caaagaatgcgcagggataatcacc

SEQ ID NO: 4965978 - DNA, 25 bp, Homo sapien
ggataatcaccaggacccctcttgc

SEQ ID NO: 4965979 - DNA, 25 bp, Homo sapien
gatggtttcagcagatcaaacagta

SEQ ID NO: 4965980 - DNA, 25 bp, Homo sapien
ttgttatcactactggccaccaaag

SEQ ID NO: 4965981 - DNA, 25 bp, Homo sapien
tatcactactggccaccaaagagaa

SEQ ID NO: 4965982 - DNA, 25 bp, Homo sapien
gttatcactactggccaccaaagag

SEQ ID NO: 4965983 - DNA, 25 bp, Homo sapien
atcaatctgaggtcccttggaaggg

SEQ ID NO: 4965984 - DNA, 25 bp, Homo sapien
aaaggactcccgttgccctgctgac

SEQ ID NO: 4965985 - DNA, 25 bp, Homo sapien
aatcaatctgaggtcccttggaagg

SEQ ID NO: 4965986 - DNA, 25 bp, Homo sapien
tagaaaaggactcccgttgccctgc

SEQ ID NO: 4965987 - DNA, 25 bp, Homo sapien
atggtaacgctctccgttgcctttc

SEQ ID NO: 4965988 - DNA, 25 bp, Homo sapien
tggtctctccatcatggtaacgctc

SEQ ID NO: 4965989 - DNA, 25 bp, Homo sapien
taacgctctccgttgcctttctcaa

SEQ ID NO: 4965990 - DNA, 25 bp, Homo sapien
ggtctctccatcatggtaacgctct

SEQ ID NO: 4965991 - DNA, 25 bp, Homo sapien
cacattcctctgcaatgctgtgtac

SEQ ID NO: 4965992 - DNA, 25 bp, Homo sapien
cattttcccacattcctctgcaatg

SEQ ID NO: 4965993 - DNA, 25 bp, Homo sapien
tgccctttgctcctatcattagctt

SEQ ID NO: 4965994 - DNA, 25 bp, Homo sapien
aaagcagcgaagtgacattttccca

SEQ ID NO: 4965995 - DNA, 25 bp, Homo sapien
tccagggacagcagaatcattgaga

SEQ ID NO: 4965996 - DNA, 25 bp, Homo sapien
cacacaagttggcaagaaggcgaga

SEQ ID NO: 4965997 - DNA, 25 bp, Homo sapien
cagcctggcggtgcatccagggaca

SEQ ID NO: 4965998 - DNA, 25 bp, Homo sapien
agtacttttgtttgcgactaagccg

SEQ ID NO: 4965999 - DNA, 25 bp, Homo sapien
tctgcctgttgagaaatctcaaaga

SEQ ID NO: 4966000 - DNA, 25 bp, Homo sapien
tacctcctcccatatctgcctgttg

SEQ ID NO: 4966001 - DNA, 25 bp, Homo sapien
tgactacctcctcccatatctgcct

SEQ ID NO: 4966002 - DNA, 25 bp, Homo sapien
agttctgaatctttgctcaagtggt

SEQ ID NO: 4966003 - DNA, 25 bp, Homo sapien
atgaatgggactccgcaggaaaacc

SEQ ID NO: 4966004 - DNA, 25 bp, Homo sapien
aatgaatgggactccgcaggaaaac

SEQ ID NO: 4966005 - DNA, 25 bp, Homo sapien
agtgtctgagaaatcggtggcagag

SEQ ID NO: 4966006 - DNA, 25 bp, Homo sapien
tgagaaatcggtggcagaggaattt

SEQ ID NO: 4966007 - DNA, 25 bp, Homo sapien
ccagggggaacggcctcttgaatag

SEQ ID NO: 4966008 - DNA, 25 bp, Homo sapien
tccagggggaacggcctcttgaata

SEQ ID NO: 4966009 - DNA, 25 bp, Homo sapien
gttaataagttctgtgtcgccagct

SEQ ID NO: 4966010 - DNA, 25 bp, Homo sapien
cagaaaggattggaaagcttgtcct

SEQ ID NO: 4966011 - DNA, 25 bp, Homo sapien
gcggggaaacgcattcaagggctct

SEQ ID NO: 4966012 - DNA, 25 bp, Homo sapien
tcagaaaggattggaaagcttgtcc

SEQ ID NO: 4966013 - DNA, 25 bp, Homo sapien
cattcaagggctctgcttgatgaaa

SEQ ID NO: 4966014 - DNA, 25 bp, Homo sapien
gccgttcagggtacagatttgcata

SEQ ID NO: 4966015 - DNA, 25 bp, Homo sapien
agatttgcataggttcttaaggaag

SEQ ID NO: 4966016 - DNA, 25 bp, Homo sapien
ttctcaaagacactgatgaagacag

SEQ ID NO: 4966017 - DNA, 25 bp, Homo sapien
aaatcatgatacaagatatatgccg

SEQ ID NO: 4966018 - DNA, 25 bp, Homo sapien
gctgttcctggtttgtgtgctaagg

SEQ ID NO: 4966019 - DNA, 25 bp, Homo sapien
tgtgctaaggttgacacaatgtttt

SEQ ID NO: 4966020 - DNA, 25 bp, Homo sapien
ggagagggcagtgaagcctccaagg

SEQ ID NO: 4966021 - DNA, 25 bp, Homo sapien
gcagtgaagcctccaagggcttcct

SEQ ID NO: 4966022 - DNA, 25 bp, Homo sapien
gccagacaaggagatccattcaaaa

SEQ ID NO: 4966023 - DNA, 25 bp, Homo sapien
taacgccagacaaggagatccattc

SEQ ID NO: 4966024 - DNA, 25 bp, Homo sapien
tcaattaacgccagacaaggagatc

SEQ ID NO: 4966025 - DNA, 25 bp, Homo sapien
ttcactgtcaattaacgccagacaa

SEQ ID NO: 4966026 - DNA, 25 bp, Homo sapien
aaagtctgcatcagggggtctacac

SEQ ID NO: 4966027 - DNA, 25 bp, Homo sapien
caaagtctgcatcagggggtctaca

SEQ ID NO: 4966028 - DNA, 25 bp, Homo sapien
ccagatcctgttgcatgcagatttc

SEQ ID NO: 4966029 - DNA, 25 bp, Homo sapien
ctttctgcccaaatggtcagtggcc

SEQ ID NO: 4966030 - DNA, 25 bp, Homo sapien
gtactttctgcccaaatggtcagtg

SEQ ID NO: 4966031 - DNA, 25 bp, Homo sapien
ttctgcccaaatggtcagtggcccc

SEQ ID NO: 4966032 - DNA, 25 bp, Homo sapien
ctgcccaaatggtcagtggccccgg

SEQ ID NO: 4966033 - DNA, 25 bp, Homo sapien
caagccagctgtggcagtgatgtag

SEQ ID NO: 4966034 - DNA, 25 bp, Homo sapien
tcaagccagctgtggcagtgatgta

SEQ ID NO: 4966035 - DNA, 25 bp, Homo sapien
gctgtggcagtgatgtagggtagct

SEQ ID NO: 4966036 - DNA, 25 bp, Homo sapien
gtggcagtgatgtagggtagcttac

SEQ ID NO: 4966037 - DNA, 25 bp, Homo sapien
aaagatccgaacacgccttccaaat

SEQ ID NO: 4966038 - DNA, 25 bp, Homo sapien
cagttgttgtcggtgaaacatcaca

SEQ ID NO: 4966039 - DNA, 25 bp, Homo sapien
catcacagaagtgaggcctcttttc

SEQ ID NO: 4966040 - DNA, 25 bp, Homo sapien
taaagtctggaaagatccgaacacg

SEQ ID NO: 4966041 - DNA, 25 bp, Homo sapien
tctttaaattcacagatcaattttc

SEQ ID NO: 4966042 - DNA, 25 bp, Homo sapien
cacaggtgaatggtaaccaatcaaa

SEQ ID NO: 4966043 - DNA, 25 bp, Homo sapien
tttttcacaggtgaatggtaaccaa

SEQ ID NO: 4966044 - DNA, 25 bp, Homo sapien
ggtgaatggtaaccaatcaaatcct

SEQ ID NO: 4966045 - DNA, 25 bp, Homo sapien
cttggggaccactcataggacacga

SEQ ID NO: 4966046 - DNA, 25 bp, Homo sapien
gggaccactcataggacacgaacca

SEQ ID NO: 4966047 - DNA, 25 bp, Homo sapien
tcataggacacgaaccacatttggg

SEQ ID NO: 4966048 - DNA, 25 bp, Homo sapien
catttggggtactcgctttaggagc

SEQ ID NO: 4966049 - DNA, 25 bp, Homo sapien
ggagcctccgtcttggcactgccat

SEQ ID NO: 4966050 - DNA, 25 bp, Homo sapien
aaggagcagcaacgttctcgcagcg

SEQ ID NO: 4966051 - DNA, 25 bp, Homo sapien
caaagggcgtttgcaaggagcagca

SEQ ID NO: 4966052 - DNA, 25 bp, Homo sapien
tccatctcggtggagcctccgtctt

SEQ ID NO: 4966053 - DNA, 25 bp, Homo sapien
gggcacagctggggttcactgtctc

SEQ ID NO: 4966054 - DNA, 25 bp, Homo sapien
gagtgcccagatgtacatttgcccc

SEQ ID NO: 4966055 - DNA, 25 bp, Homo sapien
gggggcacagctggggttcactgtc

SEQ ID NO: 4966056 - DNA, 25 bp, Homo sapien
ccagagtgcccagatgtacatttgc

SEQ ID NO: 4966057 - DNA, 25 bp, Homo sapien
ggacctgcgactgcttccatggaaa

SEQ ID NO: 4966058 - DNA, 25 bp, Homo sapien
gaaaacgtctcaatctaatttgtgt

SEQ ID NO: 4966059 - DNA, 25 bp, Homo sapien
aatttgtgtagagtcgcgttgcgtg

SEQ ID NO: 4966060 - DNA, 25 bp, Homo sapien
tttttccagaaaacgtctcaatcta

SEQ ID NO: 4966061 - DNA, 25 bp, Homo sapien
atggcagtgagtaagactccgctta

SEQ ID NO: 4966062 - DNA, 25 bp, Homo sapien
aagactccgcttagcatttcctacc

SEQ ID NO: 4966063 - DNA, 25 bp, Homo sapien
gtgagtaagactccgcttagcattt

SEQ ID NO: 4966064 - DNA, 25 bp, Homo sapien
tgggctgagtcccctccacagtttc

SEQ ID NO: 4966065 - DNA, 25 bp, Homo sapien
ctcccagggctgcatggcatccatt

SEQ ID NO: 4966066 - DNA, 25 bp, Homo sapien
tcccagggctgcatggcatccattt

SEQ ID NO: 4966067 - DNA, 25 bp, Homo sapien
ccagggctgcatggcatccatttac

SEQ ID NO: 4966068 - DNA, 25 bp, Homo sapien
cccagggctgcatggcatccattta

SEQ ID NO: 4966069 - DNA, 25 bp, Homo sapien
tcactgtggagcagcaaccatctct

SEQ ID NO: 4966070 - DNA, 25 bp, Homo sapien
catctctggagatctatgggatggc

SEQ ID NO: 4966071 - DNA, 25 bp, Homo sapien
tctgtcatatctgcgctccccattg

SEQ ID NO: 4966072 - DNA, 25 bp, Homo sapien
ggctccagattgcagcgatcactgt

SEQ ID NO: 4966073 - DNA, 25 bp, Homo sapien
ccagtctggtctgacacttgctgct

SEQ ID NO: 4966074 - DNA, 25 bp, Homo sapien
ccctgttgtaaaggcttcagagggc

SEQ ID NO: 4966075 - DNA, 25 bp, Homo sapien
gtctgacacttgctgctgaggatgg

SEQ ID NO: 4966076 - DNA, 25 bp, Homo sapien
actgtgaagccctgttgtaaaggct

SEQ ID NO: 4966077 - DNA, 25 bp, Homo sapien
gtgtctcctgtttagggaatgctga

SEQ ID NO: 4966078 - DNA, 25 bp, Homo sapien
aacacttatagggagtgtctgatct

SEQ ID NO: 4966079 - DNA, 25 bp, Homo sapien
tcttaaaggattgatgtgtctcctg

SEQ ID NO: 4966080 - DNA, 25 bp, Homo sapien
tatagggagtgtctgatctactttt

SEQ ID NO: 4966081 - DNA, 25 bp, Homo sapien
tataatagccccagactcgaaaaaa

SEQ ID NO: 4966082 - DNA, 25 bp, Homo sapien
cactagattgaagtcttaaagctga

SEQ ID NO: 4966083 - DNA, 25 bp, Homo sapien
gaactctcatatattccttgtggga

SEQ ID NO: 4966084 - DNA, 25 bp, Homo sapien
gacttggaaattctaagcctagcta

SEQ ID NO: 4966085 - DNA, 25 bp, Homo sapien
catatgaggttctgcctgcagcaat

SEQ ID NO: 4966086 - DNA, 25 bp, Homo sapien
tccacactgctgctgtatttgatgt

SEQ ID NO: 4966087 - DNA, 25 bp, Homo sapien
gttacatatgaggttctgcctgcag

SEQ ID NO: 4966088 - DNA, 25 bp, Homo sapien
gatgttacatatgaggttctgcctg

SEQ ID NO: 4966089 - DNA, 25 bp, Homo sapien
tttctaacacaagcaccattagctg

SEQ ID NO: 4966090 - DNA, 25 bp, Homo sapien
tctaacacaagcaccattagctgtc

SEQ ID NO: 4966091 - DNA, 25 bp, Homo sapien
tggctgtttctaacacaagcaccat

SEQ ID NO: 4966092 - DNA, 25 bp, Homo sapien
tgtttctaacacaagcaccattagc

SEQ ID NO: 4966093 - DNA, 25 bp, Homo sapien
aaggccctctgaaaactaggaagag

SEQ ID NO: 4966094 - DNA, 25 bp, Homo sapien
acctggagacacaggtaccactccg

SEQ ID NO: 4966095 - DNA, 25 bp, Homo sapien
tggggaatgttcttcacctggagac

SEQ ID NO: 4966096 - DNA, 25 bp, Homo sapien
ggagacacaggtaccactccgtgcc

SEQ ID NO: 4966097 - DNA, 25 bp, Homo sapien
caaaggcaaggccaacaggttggga

SEQ ID NO: 4966098 - DNA, 25 bp, Homo sapien
agtgtcttcaggcatggcatgggtc

SEQ ID NO: 4966099 - DNA, 25 bp, Homo sapien
aacctgggcacgttcactgaaaaag

SEQ ID NO: 4966100 - DNA, 25 bp, Homo sapien
tgaggacactcggtgagatgtagca

SEQ ID NO: 4966101 - DNA, 25 bp, Homo sapien
catgcagcttttggcacttagcagg

SEQ ID NO: 4966102 - DNA, 25 bp, Homo sapien
caggtgtttgattgataggtgctga

SEQ ID NO: 4966103 - DNA, 25 bp, Homo sapien
ggattctattattgtggcccttcag

SEQ ID NO: 4966104 - DNA, 25 bp, Homo sapien
tctcatcacccacaattcatgcagc

SEQ ID NO: 4966105 - DNA, 25 bp, Homo sapien
tttggcttgtctgactgcgagtagg

SEQ ID NO: 4966106 - DNA, 25 bp, Homo sapien
gtctgactgcgagtaggttaacagg

SEQ ID NO: 4966107 - DNA, 25 bp, Homo sapien
ggttaacaggacctgatgtcaccat

SEQ ID NO: 4966108 - DNA, 25 bp, Homo sapien
agtaggttaacaggacctgatgtca

SEQ ID NO: 4966109 - DNA, 25 bp, Homo sapien
tatgggatcacaggaccaataacca

SEQ ID NO: 4966110 - DNA, 25 bp, Homo sapien
ctatgggatcacaggaccaataacc

SEQ ID NO: 4966111 - DNA, 25 bp, Homo sapien
actctctggcagacttttgatttct

SEQ ID NO: 4966112 - DNA, 25 bp, Homo sapien
gctctgagaagagggcgctctgcat

SEQ ID NO: 4966113 - DNA, 25 bp, Homo sapien
gaagctctgagaagagggcgctctg

SEQ ID NO: 4966114 - DNA, 25 bp, Homo sapien
tctctggcagacttttgatttctcc

SEQ ID NO: 4966115 - DNA, 25 bp, Homo sapien
aataatgtggaaatgatgagccctg

SEQ ID NO: 4966116 - DNA, 25 bp, Homo sapien
ctttaggatcattcttacacctgaa

SEQ ID NO: 4966117 - DNA, 25 bp, Homo sapien
attgtggtttactgatacgcccatc

SEQ ID NO: 4966118 - DNA, 25 bp, Homo sapien
tactgatacgcccatccatccaatt

SEQ ID NO: 4966119 - DNA, 25 bp, Homo sapien
ctgacgttctcttcagactcccaca

SEQ ID NO: 4966120 - DNA, 25 bp, Homo sapien
cacaggcttgctccacagagggatg

SEQ ID NO: 4966121 - DNA, 25 bp, Homo sapien
ccacaggcttgctccacagagggat

SEQ ID NO: 4966122 - DNA, 25 bp, Homo sapien
acaggcttgctccacagagggatgc

SEQ ID NO: 4966123 - DNA, 25 bp, Homo sapien
ctgtgctaattttatcaactctccc

SEQ ID NO: 4966124 - DNA, 25 bp, Homo sapien
ggatactgtgctaattttatcaact

SEQ ID NO: 4966125 - DNA, 25 bp, Homo sapien
ccccgcttggggatactgtgctaat

SEQ ID NO: 4966126 - DNA, 25 bp, Homo sapien
ccgcttggggatactgtgctaattt

SEQ ID NO: 4966127 - DNA, 25 bp, Homo sapien
cctcctgtctctctgattcatttat

SEQ ID NO: 4966128 - DNA, 25 bp, Homo sapien
tcctgcacacccctgaagatgtaat

SEQ ID NO: 4966129 - DNA, 25 bp, Homo sapien
cccctgaagatgtaatcccagaagg

SEQ ID NO: 4966130 - DNA, 25 bp, Homo sapien
atttatcagcacagccgactcctcc

SEQ ID NO: 4966131 - DNA, 25 bp, Homo sapien
tagcaacatacgaggaattccccac

SEQ ID NO: 4966132 - DNA, 25 bp, Homo sapien
ctagcaacatacgaggaattcccca

SEQ ID NO: 4966133 - DNA, 25 bp, Homo sapien
agcaacatacgaggaattccccact

SEQ ID NO: 4966134 - DNA, 25 bp, Homo sapien
ataagctaattatacagtcagccat

SEQ ID NO: 4966135 - DNA, 25 bp, Homo sapien
aataagctaattatacagtcagcca

SEQ ID NO: 4966136 - DNA, 25 bp, Homo sapien
tccaatgccaggatgcatgttgtta

SEQ ID NO: 4966137 - DNA, 25 bp, Homo sapien
gtccaatgccaggatgcatgttgtt

SEQ ID NO: 4966138 - DNA, 25 bp, Homo sapien
ccaatgccaggatgcatgttgttat

SEQ ID NO: 4966139 - DNA, 25 bp, Homo sapien
tctccggtagagcaggattcctttg

SEQ ID NO: 4966140 - DNA, 25 bp, Homo sapien
gacgtttctccggtagagcaggatt

SEQ ID NO: 4966141 - DNA, 25 bp, Homo sapien
tgaaaggtaccaatagacgtttctc

SEQ ID NO: 4966142 - DNA, 25 bp, Homo sapien
taccaatagacgtttctccggtaga

SEQ ID NO: 4966143 - DNA, 25 bp, Homo sapien
gattaagaccaattagattctctcc

SEQ ID NO: 4966144 - DNA, 25 bp, Homo sapien
tcagacatgggcatgtggtatgatt

SEQ ID NO: 4966145 - DNA, 25 bp, Homo sapien
gaccaattagattctctccttggac

SEQ ID NO: 4966146 - DNA, 25 bp, Homo sapien
ggcatgtggtatgattaagaccaat

SEQ ID NO: 4966147 - DNA, 25 bp, Homo sapien
tcagggcatccctgttcctttgagg

SEQ ID NO: 4966148 - DNA, 25 bp, Homo sapien
tcttatccatgtgcaacgggaagta

SEQ ID NO: 4966149 - DNA, 25 bp, Homo sapien
gcatccctgttcctttgagggtccc

SEQ ID NO: 4966150 - DNA, 25 bp, Homo sapien
gaagtactcagagaactcagggcat

SEQ ID NO: 4966151 - DNA, 25 bp, Homo sapien
ccaggactgcatgccaagagtgtaa

SEQ ID NO: 4966152 - DNA, 25 bp, Homo sapien
gcgcatgatctacagagcgtagagg

SEQ ID NO: 4966153 - DNA, 25 bp, Homo sapien
ccaagagtgtaaatggcatagacag

SEQ ID NO: 4966154 - DNA, 25 bp, Homo sapien
gatctacagagcgtagaggtgtcat

SEQ ID NO: 4966155 - DNA, 25 bp, Homo sapien
ttctcaactgtccaccttcaatccc

SEQ ID NO: 4966156 - DNA, 25 bp, Homo sapien
atttctcaactgtccaccttcaatc

SEQ ID NO: 4966157 - DNA, 25 bp, Homo sapien
gtcatttctcaactgtccaccttca

SEQ ID NO: 4966158 - DNA, 25 bp, Homo sapien
tcatttctcaactgtccaccttcaa

SEQ ID NO: 4966159 - DNA, 25 bp, Homo sapien
ctcactctgtgcgtttcttgcttta

SEQ ID NO: 4966160 - DNA, 25 bp, Homo sapien
tagtcatagtgtgaatagctcccac

SEQ ID NO: 4966161 - DNA, 25 bp, Homo sapien
cttgctttattgacaacatcacaac

SEQ ID NO: 4966162 - DNA, 25 bp, Homo sapien
cgctgggcactcaagataattctca

SEQ ID NO: 4966163 - DNA, 25 bp, Homo sapien
caaataagtggctgaaagagtggct

SEQ ID NO: 4966164 - DNA, 25 bp, Homo sapien
ggctgaaagagtggctgctgttcca

SEQ ID NO: 4966165 - DNA, 25 bp, Homo sapien
tgaaaatttttaactcgtctgccaa

SEQ ID NO: 4966166 - DNA, 25 bp, Homo sapien
gtgttgtcaccaatgaaaattttta

SEQ ID NO: 4966167 - DNA, 25 bp, Homo sapien
acgtaataggaccaatacttaggag

SEQ ID NO: 4966168 - DNA, 25 bp, Homo sapien
taataggaccaatacttaggagagc

SEQ ID NO: 4966169 - DNA, 25 bp, Homo sapien
gaccaatacttaggagagccagatg

SEQ ID NO: 4966170 - DNA, 25 bp, Homo sapien
gccagatgcagtgtgaggaggatca

SEQ ID NO: 4966171 - DNA, 25 bp, Homo sapien
tcccacaaagcctcggatgatattg

SEQ ID NO: 4966172 - DNA, 25 bp, Homo sapien
gggctcgacattcgctctcccacaa

SEQ ID NO: 4966173 - DNA, 25 bp, Homo sapien
gatattggaaaagctcttcgtggtc

SEQ ID NO: 4966174 - DNA, 25 bp, Homo sapien
ttaaccacgtcgctggaatcctcgg

SEQ ID NO: 4966175 - DNA, 25 bp, Homo sapien
gatggagaagccgttttagctcgtg

SEQ ID NO: 4966176 - DNA, 25 bp, Homo sapien
gaagccgttttagctcgtgaagtca

SEQ ID NO: 4966177 - DNA, 25 bp, Homo sapien
atggatggagaagccgttttagctc

SEQ ID NO: 4966178 - DNA, 25 bp, Homo sapien
gagaagccgttttagctcgtgaagt

SEQ ID NO: 4966179 - DNA, 25 bp, Homo sapien
cgctgtgcgtctgtgttgtcctcct

SEQ ID NO: 4966180 - DNA, 25 bp, Homo sapien
tcctccttatctatcctgggacata

SEQ ID NO: 4966181 - DNA, 25 bp, Homo sapien
ggaccacagcttttttgtacactca

SEQ ID NO: 4966182 - DNA, 25 bp, Homo sapien
cctcttctccgctgtgcgtctgtgt

SEQ ID NO: 4966183 - DNA, 25 bp, Homo sapien
actgttttccgactttgtctccagt

SEQ ID NO: 4966184 - DNA, 25 bp, Homo sapien
aacagtttcttgccggcatcttcac

SEQ ID NO: 4966185 - DNA, 25 bp, Homo sapien
aaacagtttcttgccggcatcttca

SEQ ID NO: 4966186 - DNA, 25 bp, Homo sapien
tcctttccatctgccgatctttggg

SEQ ID NO: 4966187 - DNA, 25 bp, Homo sapien
tgcccccagagtcctcgagggtggg

SEQ ID NO: 4966188 - DNA, 25 bp, Homo sapien
ctgggggcagggtgttcctttccat

SEQ ID NO: 4966189 - DNA, 25 bp, Homo sapien
gagtcctcgagggtgggcctgtgtc

SEQ ID NO: 4966190 - DNA, 25 bp, Homo sapien
tgttggagtcattggtttttggaaa

SEQ ID NO: 4966191 - DNA, 25 bp, Homo sapien
tcccaggcctatccctcttgtcttt

SEQ ID NO: 4966192 - DNA, 25 bp, Homo sapien
cattgttggagtcattggtttttgg

SEQ ID NO: 4966193 - DNA, 25 bp, Homo sapien
tccttcccaggcctatccctcttgt

SEQ ID NO: 4966194 - DNA, 25 bp, Homo sapien
gacctggagaactttgcctgaggct

SEQ ID NO: 4966195 - DNA, 25 bp, Homo sapien
ctctgccgctctgatgaacaacaag

SEQ ID NO: 4966196 - DNA, 25 bp, Homo sapien
tctcctctgccgctctgatgaacaa

SEQ ID NO: 4966197 - DNA, 25 bp, Homo sapien
ctgtgagggacctggagaactttgc

SEQ ID NO: 4966198 - DNA, 25 bp, Homo sapien
gaatggactgccatactaggaaacc

SEQ ID NO: 4966199 - DNA, 25 bp, Homo sapien
gactgccatactaggaaacctttct

SEQ ID NO: 4966200 - DNA, 25 bp, Homo sapien
gccagaatggactgccatactagga

SEQ ID NO: 4966201 - DNA, 25 bp, Homo sapien
tccatgccagaatggactgccatac

SEQ ID NO: 4966202 - DNA, 25 bp, Homo sapien
catgggaaagtgtaattttcgcatg

SEQ ID NO: 4966203 - DNA, 25 bp, Homo sapien
accacaaaatcagtaagttcaatat

SEQ ID NO: 4966204 - DNA, 25 bp, Homo sapien
agtgttggagatccacaacttccag

SEQ ID NO: 4966205 - DNA, 25 bp, Homo sapien
ttcgcatgtgatcaggagcagagga

SEQ ID NO: 4966206 - DNA, 25 bp, Homo sapien
ggacatagtccccacctaattctta

SEQ ID NO: 4966207 - DNA, 25 bp, Homo sapien
gcagtatagatcagtgtatgaagtc

SEQ ID NO: 4966208 - DNA, 25 bp, Homo sapien
gaacagtcttttaggacatagtccc

SEQ ID NO: 4966209 - DNA, 25 bp, Homo sapien
tctaaagtctttggcattgagaaca

SEQ ID NO: 4966210 - DNA, 25 bp, Homo sapien
cgcatttttcggtgtaaagctacca

SEQ ID NO: 4966211 - DNA, 25 bp, Homo sapien
cagggttctagctgaatggtcaaga

SEQ ID NO: 4966212 - DNA, 25 bp, Homo sapien
tagcaatgactaacgaggacagggt

SEQ ID NO: 4966213 - DNA, 25 bp, Homo sapien
cacaggatagagtttgtagttacca

SEQ ID NO: 4966214 - DNA, 25 bp, Homo sapien
ccccaacgtggaaacaagtgacatc

SEQ ID NO: 4966215 - DNA, 25 bp, Homo sapien
gaaagtcttccgtgctggtaccctg

SEQ ID NO: 4966216 - DNA, 25 bp, Homo sapien
tagtcacaaaacgatgaagagccca

SEQ ID NO: 4966217 - DNA, 25 bp, Homo sapien
tgagtcaataaggagaaccccaacg

SEQ ID NO: 4966218 - DNA, 25 bp, Homo sapien
tattggtccatcagagtaagtagtt

SEQ ID NO: 4966219 - DNA, 25 bp, Homo sapien
gacccaagggtgtccatcatgttca

SEQ ID NO: 4966220 - DNA, 25 bp, Homo sapien
caccatcagagctataggaggacgt

SEQ ID NO: 4966221 - DNA, 25 bp, Homo sapien
atcttttgtccttgtcccaagaggg

SEQ ID NO: 4966222 - DNA, 25 bp, Homo sapien
cgggggtacaacaagtccggtcatg

SEQ ID NO: 4966223 - DNA, 25 bp, Homo sapien
gactgtgcattaaatgtcagcttgg

SEQ ID NO: 4966224 - DNA, 25 bp, Homo sapien
ttttgttcagtgactgtgcattaaa

SEQ ID NO: 4966225 - DNA, 25 bp, Homo sapien
cagtgactgtgcattaaatgtcagc

SEQ ID NO: 4966226 - DNA, 25 bp, Homo sapien
tgtctgagatcccaggattttttgt

SEQ ID NO: 4966227 - DNA, 25 bp, Homo sapien
ctataaacctatcaggaatgtgctg

SEQ ID NO: 4966228 - DNA, 25 bp, Homo sapien
cagggaaccttactaagaccaagca

SEQ ID NO: 4966229 - DNA, 25 bp, Homo sapien
ctgacttcagtaacagcacgggagt

SEQ ID NO: 4966230 - DNA, 25 bp, Homo sapien
caagtcattgctcctataaacctat

SEQ ID NO: 4966231 - DNA, 25 bp, Homo sapien
cctttgatccatgagggttaatgaa

SEQ ID NO: 4966232 - DNA, 25 bp, Homo sapien
caggacaatgcagcccatccaaggt

SEQ ID NO: 4966233 - DNA, 25 bp, Homo sapien
tgaccttacagcctttgatccatga

SEQ ID NO: 4966234 - DNA, 25 bp, Homo sapien
tctatcatcaaaccaccaggcagat

SEQ ID NO: 4966235 - DNA, 25 bp, Homo sapien
tttccattgccgctggagcaggcag

SEQ ID NO: 4966236 - DNA, 25 bp, Homo sapien
ttccattgccgctggagcaggcagg

SEQ ID NO: 4966237 - DNA, 25 bp, Homo sapien
gaagaggaaaatgggaggatggagg

SEQ ID NO: 4966238 - DNA, 25 bp, Homo sapien
ctgaagaggaaaatgggaggatgga

SEQ ID NO: 4966239 - DNA, 25 bp, Homo sapien
ggaaaatgggaggatggaggatgtg

SEQ ID NO: 4966240 - DNA, 25 bp, Homo sapien
agaggaaaatgggaggatggaggat

SEQ ID NO: 4966241 - DNA, 25 bp, Homo sapien
agacccaacggtgggacttgatgac

SEQ ID NO: 4966242 - DNA, 25 bp, Homo sapien
gaagacccaacggtgggacttgatg

SEQ ID NO: 4966243 - DNA, 25 bp, Homo sapien
gacccaacggtgggacttgatgaca

SEQ ID NO: 4966244 - DNA, 25 bp, Homo sapien
ctggaagacccaacggtgggacttg

SEQ ID NO: 4966245 - DNA, 25 bp, Homo sapien
aaggtgaactgaaggtcaaatgttc

SEQ ID NO: 4966246 - DNA, 25 bp, Homo sapien
tgtccatggacaactccaccctcat

SEQ ID NO: 4966247 - DNA, 25 bp, Homo sapien
tgatgtccatggacaactccaccct

SEQ ID NO: 4966248 - DNA, 25 bp, Homo sapien
tctgatgtccatggacaactccacc

SEQ ID NO: 4966249 - DNA, 25 bp, Homo sapien
cttgctcttggcacaagggaaccac

SEQ ID NO: 4966250 - DNA, 25 bp, Homo sapien
caccgtgtagtgtagagtgtatgca

SEQ ID NO: 4966251 - DNA, 25 bp, Homo sapien
agctcataggtgtgtctccccaggg

SEQ ID NO: 4966252 - DNA, 25 bp, Homo sapien
attctgaagctatggtggacgtggc

SEQ ID NO: 4966253 - DNA, 25 bp, Homo sapien
gtatccccgcggagagatgctgctt

SEQ ID NO: 4966254 - DNA, 25 bp, Homo sapien
cgtggagctggaagagtatccccgc

SEQ ID NO: 4966255 - DNA, 25 bp, Homo sapien
tgaacctggaacacccaagttggcc

SEQ ID NO: 4966256 - DNA, 25 bp, Homo sapien
taattagactgttgaggcgtggagc

SEQ ID NO: 4966257 - DNA, 25 bp, Homo sapien
ctctgagatgctgaccccaagctgg

SEQ ID NO: 4966258 - DNA, 25 bp, Homo sapien
tctgcggctcgcttcaaaatgatgt

SEQ ID NO: 4966259 - DNA, 25 bp, Homo sapien
cgctgtagagagcttcagcaatgtc

SEQ ID NO: 4966260 - DNA, 25 bp, Homo sapien
ggagttgattcccatcatgccactg

SEQ ID NO: 4966261 - DNA, 25 bp, Homo sapien
gcttccactagatctgcagctcttt

SEQ ID NO: 4966262 - DNA, 25 bp, Homo sapien
ctggttattgtgtggtgtgccataa

SEQ ID NO: 4966263 - DNA, 25 bp, Homo sapien
cataaagagcttccactagatctgc

SEQ ID NO: 4966264 - DNA, 25 bp, Homo sapien
tggtgtgccataaagagcttccact

SEQ ID NO: 4966265 - DNA, 25 bp, Homo sapien
aagcgaggatgggatattgtcaaag

SEQ ID NO: 4966266 - DNA, 25 bp, Homo sapien
ggatgggatattgtcaaaggcaaaa

SEQ ID NO: 4966267 - DNA, 25 bp, Homo sapien
aaataagcgaggatgggatattgtc

SEQ ID NO: 4966268 - DNA, 25 bp, Homo sapien
tggaaaataagcgaggatgggatat

SEQ ID NO: 4966269 - DNA, 25 bp, Homo sapien
agctaatctctcaggatctccagga

SEQ ID NO: 4966270 - DNA, 25 bp, Homo sapien
tccaggatgcctagggatgaccttc

SEQ ID NO: 4966271 - DNA, 25 bp, Homo sapien
tgcagtctctggaagccatagtcta

SEQ ID NO: 4966272 - DNA, 25 bp, Homo sapien
catagtctatggtgggttcatttaa

SEQ ID NO: 4966273 - DNA, 25 bp, Homo sapien
ctcagggtggttgttggtgtctccc

SEQ ID NO: 4966274 - DNA, 25 bp, Homo sapien
tcaagttggagacaggggagcctca

SEQ ID NO: 4966275 - DNA, 25 bp, Homo sapien
ttgttggtgtctcccccatcacttc

SEQ ID NO: 4966276 - DNA, 25 bp, Homo sapien
ggagcctcagggtggttgttggtgt

SEQ ID NO: 4966277 - DNA, 25 bp, Homo sapien
gctacagatgcaagagcatgatggg

SEQ ID NO: 4966278 - DNA, 25 bp, Homo sapien
ctcctcagcttcaagagctacagat

SEQ ID NO: 4966279 - DNA, 25 bp, Homo sapien
ctacagatgcaagagcatgatgggc

SEQ ID NO: 4966280 - DNA, 25 bp, Homo sapien
cagcttcaagagctacagatgcaag

SEQ ID NO: 4966281 - DNA, 25 bp, Homo sapien
gattgcaaaccactaggatacaggg

SEQ ID NO: 4966282 - DNA, 25 bp, Homo sapien
tgggctctaatcagtgcacagaggt

SEQ ID NO: 4966283 - DNA, 25 bp, Homo sapien
ctaaacagataacccataaggcaga

SEQ ID NO: 4966284 - DNA, 25 bp, Homo sapien
tatgggtacactcacaacgtgctaa

SEQ ID NO: 4966285 - DNA, 25 bp, Homo sapien
ccatttggatcagccttgaaaaact

SEQ ID NO: 4966286 - DNA, 25 bp, Homo sapien
cctggatctcatgtgccatttctca

SEQ ID NO: 4966287 - DNA, 25 bp, Homo sapien
tgccacagaatctaaatcccatttg

SEQ ID NO: 4966288 - DNA, 25 bp, Homo sapien
tccactgggagtcattcgggtttgc

SEQ ID NO: 4966289 - DNA, 25 bp, Homo sapien
cccctgtccctctcctgcaaaggcc

SEQ ID NO: 4966290 - DNA, 25 bp, Homo sapien
ctgcttccttgtgaccccctgtccc

SEQ ID NO: 4966291 - DNA, 25 bp, Homo sapien
gcttccttgtgaccccctgtccctc

SEQ ID NO: 4966292 - DNA, 25 bp, Homo sapien
cctgtccctctcctgcaaaggccat

SEQ ID NO: 4966293 - DNA, 25 bp, Homo sapien
tcagctcactctttccacactagta

SEQ ID NO: 4966294 - DNA, 25 bp, Homo sapien
cagctcactctttccacactagtaa

SEQ ID NO: 4966295 - DNA, 25 bp, Homo sapien
cactctttccacactagtaaaaaga

SEQ ID NO: 4966296 - DNA, 25 bp, Homo sapien
gctcactctttccacactagtaaaa

SEQ ID NO: 4966297 - DNA, 25 bp, Homo sapien
ggaggagtctgtactctgatggcat

SEQ ID NO: 4966298 - DNA, 25 bp, Homo sapien
gagtctgtactctgatggcatgagg

SEQ ID NO: 4966299 - DNA, 25 bp, Homo sapien
tcacctctaccacgcctgggatgtg

SEQ ID NO: 4966300 - DNA, 25 bp, Homo sapien
tataagataatgtcacctctaccac

SEQ ID NO: 4966301 - DNA, 25 bp, Homo sapien
cttggagaccatcaaagaagttgtc

SEQ ID NO: 4966302 - DNA, 25 bp, Homo sapien
gaccatcaaagaagttgtccccgat

SEQ ID NO: 4966303 - DNA, 25 bp, Homo sapien
gctccatacaagcatagtcccaaac

SEQ ID NO: 4966304 - DNA, 25 bp, Homo sapien
tcgctccatacaagcatagtcccaa

SEQ ID NO: 4966305 - DNA, 25 bp, Homo sapien
ggtccagccttcactcgggctaatg

SEQ ID NO: 4966306 - DNA, 25 bp, Homo sapien
tgttgtcagaaacagccaggacgtg

SEQ ID NO: 4966307 - DNA, 25 bp, Homo sapien
tccacattcaccgttgttgacaaca

SEQ ID NO: 4966308 - DNA, 25 bp, Homo sapien
cttccgatggatcgagtcttcttgc

SEQ ID NO: 4966309 - DNA, 25 bp, Homo sapien
tgctctccgtccatgcttggagttg

SEQ ID NO: 4966310 - DNA, 25 bp, Homo sapien
ggaccgccaccgccagtggagcctc

SEQ ID NO: 4966311 - DNA, 25 bp, Homo sapien
tccaccacagaaagctggtgtgcca

SEQ ID NO: 4966312 - DNA, 25 bp, Homo sapien
gagcctccaccacagaaagctggtg

SEQ ID NO: 4966313 - DNA, 25 bp, Homo sapien
ctggaccgccaccgccagtggagcc

SEQ ID NO: 4966314 - DNA, 25 bp, Homo sapien
cccaaagcataactgttatgtggga

SEQ ID NO: 4966315 - DNA, 25 bp, Homo sapien
ccaaagcataactgttatgtgggat

SEQ ID NO: 4966316 - DNA, 25 bp, Homo sapien
cacaagcatggattttgtcattttc

SEQ ID NO: 4966317 - DNA, 25 bp, Homo sapien
cccacaagcatggattttgtcattt

SEQ ID NO: 4966318 - DNA, 25 bp, Homo sapien
acaagcatggattttgtcattttct

SEQ ID NO: 4966319 - DNA, 25 bp, Homo sapien
ccacaagcatggattttgtcatttt

SEQ ID NO: 4966320 - DNA, 25 bp, Homo sapien
tggcactgtacggaagcccactgct

SEQ ID NO: 4966321 - DNA, 25 bp, Homo sapien
agctggcactgtacggaagcccact

SEQ ID NO: 4966322 - DNA, 25 bp, Homo sapien
cacagctggcactgtacggaagccc

SEQ ID NO: 4966323 - DNA, 25 bp, Homo sapien
acagctggcactgtacggaagccca

SEQ ID NO: 4966324 - DNA, 25 bp, Homo sapien
tgggtttcctgctgttttcaaacaa

SEQ ID NO: 4966325 - DNA, 25 bp, Homo sapien
ctgaaaccgtctcatgtcccttggg

SEQ ID NO: 4966326 - DNA, 25 bp, Homo sapien
tgaaaccgtctcatgtcccttgggt

SEQ ID NO: 4966327 - DNA, 25 bp, Homo sapien
ttgggtttcctgctgttttcaaaca

SEQ ID NO: 4966328 - DNA, 25 bp, Homo sapien
tcatgctcatacgtgaaggtggcct

SEQ ID NO: 4966329 - DNA, 25 bp, Homo sapien
gaagtggccttttcagcaactcacc

SEQ ID NO: 4966330 - DNA, 25 bp, Homo sapien
taaagtcccaggtgagctaggccta

SEQ ID NO: 4966331 - DNA, 25 bp, Homo sapien
aaaattgggcatctttcatcaggca

SEQ ID NO: 4966332 - DNA, 25 bp, Homo sapien
ctgcctggaaaatgtcggcactctc

SEQ ID NO: 4966333 - DNA, 25 bp, Homo sapien
gctgcctggaaaatgtcggcactct

SEQ ID NO: 4966334 - DNA, 25 bp, Homo sapien
tgcctggaaaatgtcggcactctcc

SEQ ID NO: 4966335 - DNA, 25 bp, Homo sapien
tcttctgctggaataagagtggagt

SEQ ID NO: 4966336 - DNA, 25 bp, Homo sapien
tctgctggaataagagtggagtcct

SEQ ID NO: 4966337 - DNA, 25 bp, Homo sapien
tgcatgctgggtgcttataagctcc

SEQ ID NO: 4966338 - DNA, 25 bp, Homo sapien
taaccgtatgttgtattaggagaga

SEQ ID NO: 4966339 - DNA, 25 bp, Homo sapien
tatcaaaacactctgtgcatgctgg

SEQ ID NO: 4966340 - DNA, 25 bp, Homo sapien
aagctcctttgatggtatttggaat

SEQ ID NO: 4966341 - DNA, 25 bp, Homo sapien
aattgacacgctcagtatccaataa

SEQ ID NO: 4966342 - DNA, 25 bp, Homo sapien
taattgacacgctcagtatccaata

SEQ ID NO: 4966343 - DNA, 25 bp, Homo sapien
ctaattgacacgctcagtatccaat

SEQ ID NO: 4966344 - DNA, 25 bp, Homo sapien
attgacacgctcagtatccaataat

SEQ ID NO: 4966345 - DNA, 25 bp, Homo sapien
tgctttctcagggagttgccaggac

SEQ ID NO: 4966346 - DNA, 25 bp, Homo sapien
ctggcaagcccataggcaggataac

SEQ ID NO: 4966347 - DNA, 25 bp, Homo sapien
gcaggataaccactcccagaaatgg

SEQ ID NO: 4966348 - DNA, 25 bp, Homo sapien
cgctgggagaaaggccactctgtgc

SEQ ID NO: 4966349 - DNA, 25 bp, Homo sapien
tggaacaggtttgccgctaattgga

SEQ ID NO: 4966350 - DNA, 25 bp, Homo sapien
tacatcatatgctgtctggccgcag

SEQ ID NO: 4966351 - DNA, 25 bp, Homo sapien
tggcagcactgaagtaaattgacag

SEQ ID NO: 4966352 - DNA, 25 bp, Homo sapien
gagatgttaaaactgtgccagcaca

SEQ ID NO: 4966353 - DNA, 25 bp, Homo sapien
caaactgtgcttaaaggggcagccc

SEQ ID NO: 4966354 - DNA, 25 bp, Homo sapien
gaaggtctgtatccactgttgcaaa

SEQ ID NO: 4966355 - DNA, 25 bp, Homo sapien
tgcaaaattatttgaataccaaaag

SEQ ID NO: 4966356 - DNA, 25 bp, Homo sapien
acacataaagaaggtctgtatccac

SEQ ID NO: 4966357 - DNA, 25 bp, Homo sapien
tcaccattcacgtcaaggagtcaag

SEQ ID NO: 4966358 - DNA, 25 bp, Homo sapien
tagggtgtccgtcttccgggcagta

SEQ ID NO: 4966359 - DNA, 25 bp, Homo sapien
tgaatggtgggtcacaagtccctgt

SEQ ID NO: 4966360 - DNA, 25 bp, Homo sapien
tacatattgggtctccgtgtgcgtg

SEQ ID NO: 4966361 - DNA, 25 bp, Homo sapien
gcagagcagctgtgaaaaccggaac

SEQ ID NO: 4966362 - DNA, 25 bp, Homo sapien
gagcagcattccaccagtacttggg

SEQ ID NO: 4966363 - DNA, 25 bp, Homo sapien
tattctaatgcgaaagttcccaggg

SEQ ID NO: 4966364 - DNA, 25 bp, Homo sapien
tagtctgtgccctaagctacggagg

SEQ ID NO: 4966365 - DNA, 25 bp, Homo sapien
ttgtgccaaatccccatttcctgct

SEQ ID NO: 4966366 - DNA, 25 bp, Homo sapien
tttttgcttcttctgccattcccag

SEQ ID NO: 4966367 - DNA, 25 bp, Homo sapien
gcagtttcaaattccagctttgtgc

SEQ ID NO: 4966368 - DNA, 25 bp, Homo sapien
tccattcatttactcttgtttttgc

SEQ ID NO: 4966369 - DNA, 25 bp, Homo sapien
cactgtagccattttgccgcaaaca

SEQ ID NO: 4966370 - DNA, 25 bp, Homo sapien
cctaaatccatagctcagcagccag

SEQ ID NO: 4966371 - DNA, 25 bp, Homo sapien
attgcctagaattacaactccagag

SEQ ID NO: 4966372 - DNA, 25 bp, Homo sapien
tgcaaaacatggcatccaaaatgga

SEQ ID NO: 4966373 - DNA, 25 bp, Homo sapien
tgacaggaatcacaaccactaactc

SEQ ID NO: 4966374 - DNA, 25 bp, Homo sapien
tcaatacattatggagacaattttc

SEQ ID NO: 4966375 - DNA, 25 bp, Homo sapien
tcgcattacaaagtggctgacagga

SEQ ID NO: 4966376 - DNA, 25 bp, Homo sapien
tgagtttcatcaccagattgcaagg

SEQ ID NO: 4966377 - DNA, 25 bp, Homo sapien
aatgacgagagcttcggtgagtgtc

SEQ ID NO: 4966378 - DNA, 25 bp, Homo sapien
ttggataggaatgacgagagcttcg

SEQ ID NO: 4966379 - DNA, 25 bp, Homo sapien
gagcttcggtgagtgtctgcaaaga

SEQ ID NO: 4966380 - DNA, 25 bp, Homo sapien
caaacaatcattggataggaatgac

SEQ ID NO: 4966381 - DNA, 25 bp, Homo sapien
tttggcataagtcgctcaaccctgc

SEQ ID NO: 4966382 - DNA, 25 bp, Homo sapien
agcctgttcctagaagctcctggga

SEQ ID NO: 4966383 - DNA, 25 bp, Homo sapien
gaggaaatcactttccggactctac

SEQ ID NO: 4966384 - DNA, 25 bp, Homo sapien
gtgcagttgcaatgtattgcagggc

SEQ ID NO: 4966385 - DNA, 25 bp, Homo sapien
ctttctctccaaatccagatagcca

SEQ ID NO: 4966386 - DNA, 25 bp, Homo sapien
ctctccaaatccagatagccagcat

SEQ ID NO: 4966387 - DNA, 25 bp, Homo sapien
tttctctccaaatccagatagccag

SEQ ID NO: 4966388 - DNA, 25 bp, Homo sapien
ttctctccaaatccagatagccagc

SEQ ID NO: 4966389 - DNA, 25 bp, Homo sapien
aaatagaagataatcgagactcttg

SEQ ID NO: 4966390 - DNA, 25 bp, Homo sapien
aggagtaaaggcctgctgacgcttc

SEQ ID NO: 4966391 - DNA, 25 bp, Homo sapien
tgctgacgcttctgagttcctccag

SEQ ID NO: 4966392 - DNA, 25 bp, Homo sapien
gaagataatcgagactcttgtctcc

SEQ ID NO: 4966393 - DNA, 25 bp, Homo sapien
gctccagattgcttgctgacatccc

SEQ ID NO: 4966394 - DNA, 25 bp, Homo sapien
ggtttccagatgaaccaggatgctg

SEQ ID NO: 4966395 - DNA, 25 bp, Homo sapien
cccatcctaggctggtaccaaagcg

SEQ ID NO: 4966396 - DNA, 25 bp, Homo sapien
agcgtaagtgaaagtctgtcccctg

SEQ ID NO: 4966397 - DNA, 25 bp, Homo sapien
cgctgaagcaggtgcgggcatattt

SEQ ID NO: 4966398 - DNA, 25 bp, Homo sapien
ccattcgcttcgacaggagccttca

SEQ ID NO: 4966399 - DNA, 25 bp, Homo sapien
caccttctgggagcatgtgtcggtc

SEQ ID NO: 4966400 - DNA, 25 bp, Homo sapien
gtcggtctcggagcctggcgctgaa

SEQ ID NO: 4966401 - DNA, 25 bp, Homo sapien
gacatatgaacccacagagcaattt

SEQ ID NO: 4966402 - DNA, 25 bp, Homo sapien
tatgaacccacagagcaattttttt

SEQ ID NO: 4966403 - DNA, 25 bp, Homo sapien
tagacatatgaacccacagagcaat

SEQ ID NO: 4966404 - DNA, 25 bp, Homo sapien
catatgaacccacagagcaattttt

SEQ ID NO: 4966405 - DNA, 25 bp, Homo sapien
gcagatccctgatagctcatccaga

SEQ ID NO: 4966406 - DNA, 25 bp, Homo sapien
tcagcactttgagggccatcagggt

SEQ ID NO: 4966407 - DNA, 25 bp, Homo sapien
tcagggtcgaagcaccagtattccc

SEQ ID NO: 4966408 - DNA, 25 bp, Homo sapien
tgtgcattttgagatccggggagac

SEQ ID NO: 4966409 - DNA, 25 bp, Homo sapien
caagcaattatagtgctgtttccca

SEQ ID NO: 4966410 - DNA, 25 bp, Homo sapien
catcaagatggctgttagctgcgga

SEQ ID NO: 4966411 - DNA, 25 bp, Homo sapien
ttagctgcggatctccaagttgctg

SEQ ID NO: 4966412 - DNA, 25 bp, Homo sapien
cagattttcttttacgactgctaaa

SEQ ID NO: 4966413 - DNA, 25 bp, Homo sapien
gctgtggcgtgctgcgtaatatttt

SEQ ID NO: 4966414 - DNA, 25 bp, Homo sapien
ggcgtgctgcgtaatatttttaaaa

SEQ ID NO: 4966415 - DNA, 25 bp, Homo sapien
gtggcgtgctgcgtaatatttttaa

SEQ ID NO: 4966416 - DNA, 25 bp, Homo sapien
ctgtggcgtgctgcgtaatattttt

SEQ ID NO: 4966417 - DNA, 25 bp, Homo sapien
gcattctttaccgaatggatcccag

SEQ ID NO: 4966418 - DNA, 25 bp, Homo sapien
gggatcagcattctttaccgaatgg

SEQ ID NO: 4966419 - DNA, 25 bp, Homo sapien
aaaaattcataagggggatcagcat

SEQ ID NO: 4966420 - DNA, 25 bp, Homo sapien
tttaccgaatggatcccagtggcac

SEQ ID NO: 4966421 - DNA, 25 bp, Homo sapien
cgaagcaccaggaggacaattaggg

SEQ ID NO: 4966422 - DNA, 25 bp, Homo sapien
gtagtttgtagcaaagctctttgtc

SEQ ID NO: 4966423 - DNA, 25 bp, Homo sapien
gattaaccaaagtgctcgctcctgc

SEQ ID NO: 4966424 - DNA, 25 bp, Homo sapien
gccagcaagagtttgcgctcctggg

SEQ ID NO: 4966425 - DNA, 25 bp, Homo sapien
gctaatatttgaatccacttgggag

SEQ ID NO: 4966426 - DNA, 25 bp, Homo sapien
tgtccccagttccaatgcaatcatc

SEQ ID NO: 4966427 - DNA, 25 bp, Homo sapien
tgcaatcatcatgaccagcagggcc

SEQ ID NO: 4966428 - DNA, 25 bp, Homo sapien
catttgggccgttcacagaggctaa

SEQ ID NO: 4966429 - DNA, 25 bp, Homo sapien
tataggttgacatatttccctgatc

SEQ ID NO: 4966430 - DNA, 25 bp, Homo sapien
taattcttataggttgacatatttc

SEQ ID NO: 4966431 - DNA, 25 bp, Homo sapien
ggttgacatatttccctgatctttc

SEQ ID NO: 4966432 - DNA, 25 bp, Homo sapien
tcttataggttgacatatttccctg

SEQ ID NO: 4966433 - DNA, 25 bp, Homo sapien
aaactaattggaaagatagcaaatg

SEQ ID NO: 4966434 - DNA, 25 bp, Homo sapien
ggtaagatgcaaatcgtagggtgtt

SEQ ID NO: 4966435 - DNA, 25 bp, Homo sapien
ctgaacaggtgctggaatagaatta

SEQ ID NO: 4966436 - DNA, 25 bp, Homo sapien
cgtagggtgttaattgctgaacagg

SEQ ID NO: 4966437 - DNA, 25 bp, Homo sapien
caagtattgctcattgccagtgaca

SEQ ID NO: 4966438 - DNA, 25 bp, Homo sapien
cagcaaggccactgcaagactcaag

SEQ ID NO: 4966439 - DNA, 25 bp, Homo sapien
gggtgtaaacgccagccaatctctt

SEQ ID NO: 4966440 - DNA, 25 bp, Homo sapien
caaaggatgcttggaaactccagca

SEQ ID NO: 4966441 - DNA, 25 bp, Homo sapien
tatttccctctcaaaagctcttgtt

SEQ ID NO: 4966442 - DNA, 25 bp, Homo sapien
tctgtcatcacatccgtggagttag

SEQ ID NO: 4966443 - DNA, 25 bp, Homo sapien
ctctcaaaagctcttgttaaatggg

SEQ ID NO: 4966444 - DNA, 25 bp, Homo sapien
ctccttggtggtctcgaggggacca

SEQ ID NO: 4966445 - DNA, 25 bp, Homo sapien
tctatctctaccatgattctctaaa

SEQ ID NO: 4966446 - DNA, 25 bp, Homo sapien
aagtttccgtcccacaaatcgcact

SEQ ID NO: 4966447 - DNA, 25 bp, Homo sapien
caactactacccaaattctatctct

SEQ ID NO: 4966448 - DNA, 25 bp, Homo sapien
cacttcactggagttaagaaacaca

SEQ ID NO: 4966449 - DNA, 25 bp, Homo sapien
gaggctcactggatcgtcagagaac

SEQ ID NO: 4966450 - DNA, 25 bp, Homo sapien
cagatcaccagattatcctgagccc

SEQ ID NO: 4966451 - DNA, 25 bp, Homo sapien
tcttctcacagatcaccagattatc

SEQ ID NO: 4966452 - DNA, 25 bp, Homo sapien
gactgtccctaaagtcctcttctca

SEQ ID NO: 4966453 - DNA, 25 bp, Homo sapien
gaaaactgattgagaccataccctg

SEQ ID NO: 4966454 - DNA, 25 bp, Homo sapien
cctccatggtagaaaggaatctccc

SEQ ID NO: 4966455 - DNA, 25 bp, Homo sapien
ggaaaagactccaccacagatttag

SEQ ID NO: 4966456 - DNA, 25 bp, Homo sapien
cataccctgcccgaaaggagaggtg

SEQ ID NO: 4966457 - DNA, 25 bp, Homo sapien
tcaattatgactgggtccgatggag

SEQ ID NO: 4966458 - DNA, 25 bp, Homo sapien
ttatgactgggtccgatggagtctc

SEQ ID NO: 4966459 - DNA, 25 bp, Homo sapien
ctgtcaattatgactgggtccgatg

SEQ ID NO: 4966460 - DNA, 25 bp, Homo sapien
ctgggtccgatggagtctcatttcg

SEQ ID NO: 4966461 - DNA, 25 bp, Homo sapien
tacacatcacttcgtgcgtcaggag

SEQ ID NO: 4966462 - DNA, 25 bp, Homo sapien
cttcgtgcgtcaggagaactcggca

SEQ ID NO: 4966463 - DNA, 25 bp, Homo sapien
catttccggattcttattctgtccc

SEQ ID NO: 4966464 - DNA, 25 bp, Homo sapien
gaactcggcacatttccggattctt

SEQ ID NO: 4966465 - DNA, 25 bp, Homo sapien
gagcctgacatagaggtcctgttcc

SEQ ID NO: 4966466 - DNA, 25 bp, Homo sapien
tagaggtcctgttccgtgcggacac

SEQ ID NO: 4966467 - DNA, 25 bp, Homo sapien
tgaccgagtcgatgagcctgacata

SEQ ID NO: 4966468 - DNA, 25 bp, Homo sapien
tgcttggtgaccgagtcgatgagcc

SEQ ID NO: 4966469 - DNA, 25 bp, Homo sapien
taacttgtagtgagtgccgttgttg

SEQ ID NO: 4966470 - DNA, 25 bp, Homo sapien
tgagtgccgttgttggtcttctcgt

SEQ ID NO: 4966471 - DNA, 25 bp, Homo sapien
ctgtagaggagctgtaacttgtagt

SEQ ID NO: 4966472 - DNA, 25 bp, Homo sapien
tagaggagctgtaacttgtagtgag

SEQ ID NO: 4966473 - DNA, 25 bp, Homo sapien
catagagcgccaggacgaagtgaaa

SEQ ID NO: 4966474 - DNA, 25 bp, Homo sapien
tgtttctcaaagtgggcccgggaca

SEQ ID NO: 4966475 - DNA, 25 bp, Homo sapien
acaaagtccacgaaggccgtccgct

SEQ ID NO: 4966476 - DNA, 25 bp, Homo sapien
tggccctgcctgtcatagagcgcca

SEQ ID NO: 4966477 - DNA, 25 bp, Homo sapien
gacacggggaagcacaaaaaggcga

SEQ ID NO: 4966478 - DNA, 25 bp, Homo sapien
caagacacggggaagcacaaaaagg

SEQ ID NO: 4966479 - DNA, 25 bp, Homo sapien
gggaacacaagacacggggaagcac

SEQ ID NO: 4966480 - DNA, 25 bp, Homo sapien
cggggaagcacaaaaaggcgatgtt

SEQ ID NO: 4966481 - DNA, 25 bp, Homo sapien
cccagagtggtcccctaaggaggtg

SEQ ID NO: 4966482 - DNA, 25 bp, Homo sapien
aggtggcccgcgtcctataccgtgg

SEQ ID NO: 4966483 - DNA, 25 bp, Homo sapien
tcgaaaccgaaagaccccggctgca

SEQ ID NO: 4966484 - DNA, 25 bp, Homo sapien
ctaaggaggtggcccgcgtcctata

SEQ ID NO: 4966485 - DNA, 25 bp, Homo sapien
gatcccatttcaccgaagacttggg

SEQ ID NO: 4966486 - DNA, 25 bp, Homo sapien
gtgtgtgcacacgcttcccagccaa

SEQ ID NO: 4966487 - DNA, 25 bp, Homo sapien
gccagccgaacccagtgactgtgaa

SEQ ID NO: 4966488 - DNA, 25 bp, Homo sapien
ccctcgagcgtgctgagtgtgtgca

SEQ ID NO: 4966489 - DNA, 25 bp, Homo sapien
ttggctaagctctcccccactaagt

SEQ ID NO: 4966490 - DNA, 25 bp, Homo sapien
ctgaggtgaacgcacagattgcggg

SEQ ID NO: 4966491 - DNA, 25 bp, Homo sapien
gagggaggcgtctttaaggagccca

SEQ ID NO: 4966492 - DNA, 25 bp, Homo sapien
ttgaaccccggtgcgcaagcacctt

SEQ ID NO: 4966493 - DNA, 25 bp, Homo sapien
ctctgcgcggcgacattagcgtcca

SEQ ID NO: 4966494 - DNA, 25 bp, Homo sapien
tctccgcgcccagcgatttctcttt

SEQ ID NO: 4966495 - DNA, 25 bp, Homo sapien
ggacctgaccgaatccatctccgcg

SEQ ID NO: 4966496 - DNA, 25 bp, Homo sapien
tccgacattccggacccaggacctg

SEQ ID NO: 4966497 - DNA, 25 bp, Homo sapien
aaaaagtctgatcctctactgtcgc

SEQ ID NO: 4966498 - DNA, 25 bp, Homo sapien
cagcaaatcgtctcctccaaagcaa

SEQ ID NO: 4966499 - DNA, 25 bp, Homo sapien
gactgttcccaacgttgccagcaaa

SEQ ID NO: 4966500 - DNA, 25 bp, Homo sapien
gggttcttatcctccgcaagttcag

SEQ ID NO: 4966501 - DNA, 25 bp, Homo sapien
tcgaggcgggctgagtgcgcgagcg

SEQ ID NO: 4966502 - DNA, 25 bp, Homo sapien
gaggttgctgacagatcgaggcggg

SEQ ID NO: 4966503 - DNA, 25 bp, Homo sapien
aggagaggttgctgacagatcgagg

SEQ ID NO: 4966504 - DNA, 25 bp, Homo sapien
cgagcggccggggagtattcccgcg

SEQ ID NO: 4966505 - DNA, 25 bp, Homo sapien
tctgatctgcgcatagatctgctgc

SEQ ID NO: 4966506 - DNA, 25 bp, Homo sapien
gtggcagcagcctcaccgaacagct

SEQ ID NO: 4966507 - DNA, 25 bp, Homo sapien
gctgctcgcggtgcctattaaacat

SEQ ID NO: 4966508 - DNA, 25 bp, Homo sapien
cgaacagctgaaaccctagacggtt

SEQ ID NO: 4966509 - DNA, 25 bp, Homo sapien
gggcgggagagccatacagggcgat

SEQ ID NO: 4966510 - DNA, 25 bp, Homo sapien
tcctccctgttggactggaaggggc

SEQ ID NO: 4966511 - DNA, 25 bp, Homo sapien
atacagggcgattgggaaatggatc

SEQ ID NO: 4966512 - DNA, 25 bp, Homo sapien
gagagccatacagggcgattgggaa

SEQ ID NO: 4966513 - DNA, 25 bp, Homo sapien
gccccctcaggaagcgaatgaattg

SEQ ID NO: 4966514 - DNA, 25 bp, Homo sapien
tcagggtcgagggcaccagcttttc

SEQ ID NO: 4966515 - DNA, 25 bp, Homo sapien
tcaggaagcgaatgaattgttcctt

SEQ ID NO: 4966516 - DNA, 25 bp, Homo sapien
ttttctcggcggtaacagctgccac

SEQ ID NO: 4966517 - DNA, 25 bp, Homo sapien
gctgcgggcgttgaagttccctgtt

SEQ ID NO: 4966518 - DNA, 25 bp, Homo sapien
gggatggctgtgtggctcgctgcgg

SEQ ID NO: 4966519 - DNA, 25 bp, Homo sapien
tgtgtggctcgctgcgggcgttgaa

SEQ ID NO: 4966520 - DNA, 25 bp, Homo sapien
tacttgccggctgcgctaagggcgc

SEQ ID NO: 4966521 - DNA, 25 bp, Homo sapien
gctccggccaactagctcggttctg

SEQ ID NO: 4966522 - DNA, 25 bp, Homo sapien
cgggaagcccaatcccgcgggactg

SEQ ID NO: 4966523 - DNA, 25 bp, Homo sapien
tccttttcgatctcgtgcaacacaa

SEQ ID NO: 4966524 - DNA, 25 bp, Homo sapien
aacacaaaacctgccccgagctgtg

SEQ ID NO: 4966525 - DNA, 25 bp, Homo sapien
gctcaatctcgtccggtccagtcat

SEQ ID NO: 4966526 - DNA, 25 bp, Homo sapien
tcatgtttctgtttcacgtctgcaa

SEQ ID NO: 4966527 - DNA, 25 bp, Homo sapien
cccagtgcggtatgttcgatttcct

SEQ ID NO: 4966528 - DNA, 25 bp, Homo sapien
ttttaagcccctttgctcaatctcg

SEQ ID NO: 4966529 - DNA, 25 bp, Homo sapien
ctggactaaatgcccagaaaccctc

SEQ ID NO: 4966530 - DNA, 25 bp, Homo sapien
ccgtgatgtccactttccgtggatc

SEQ ID NO: 4966531 - DNA, 25 bp, Homo sapien
gaaaccctcacaacccgtgatgtcc

SEQ ID NO: 4966532 - DNA, 25 bp, Homo sapien
cgtaggggtcgctggactaaatgcc

SEQ ID NO: 4966533 - DNA, 25 bp, Homo sapien
cccagtggattgcaaagtagaagct

SEQ ID NO: 4966534 - DNA, 25 bp, Homo sapien
tactgcctcctagtggcggatacgg

SEQ ID NO: 4966535 - DNA, 25 bp, Homo sapien
gatacggcggcaatagtggcgcaca

SEQ ID NO: 4966536 - DNA, 25 bp, Homo sapien
aagcaagaggaacagagccaccagc

SEQ ID NO: 4966537 - DNA, 25 bp, Homo sapien
cagtacaagcttttcatcatgggaa

SEQ ID NO: 4966538 - DNA, 25 bp, Homo sapien
tcatgggaatgagaaggtactggca

SEQ ID NO: 4966539 - DNA, 25 bp, Homo sapien
ttggagagccgagtcctcagacagc

SEQ ID NO: 4966540 - DNA, 25 bp, Homo sapien
tatgaagtcaagagccagtacaagc

SEQ ID NO: 4966541 - DNA, 25 bp, Homo sapien
ccggtgacagaaagaaccacttctt

SEQ ID NO: 4966542 - DNA, 25 bp, Homo sapien
agccacataccggtgacagaaagaa

SEQ ID NO: 4966543 - DNA, 25 bp, Homo sapien
gacagaaagaaccacttcttagatc

SEQ ID NO: 4966544 - DNA, 25 bp, Homo sapien
cacataccggtgacagaaagaacca

SEQ ID NO: 4966545 - DNA, 25 bp, Homo sapien
tggcagtcaggatggttaaaacagc

SEQ ID NO: 4966546 - DNA, 25 bp, Homo sapien
cacagtcctggatttgaccctcgct

SEQ ID NO: 4966547 - DNA, 25 bp, Homo sapien
catacgcaaggagcccacagtcctg

SEQ ID NO: 4966548 - DNA, 25 bp, Homo sapien
agtcctggatttgaccctcgctgta

SEQ ID NO: 4966549 - DNA, 25 bp, Homo sapien
tgataactctccagcccttctgcca

SEQ ID NO: 4966550 - DNA, 25 bp, Homo sapien
tgctgataactctccagcccttctg

SEQ ID NO: 4966551 - DNA, 25 bp, Homo sapien
tattgctgataactctccagccctt

SEQ ID NO: 4966552 - DNA, 25 bp, Homo sapien
ttgctgataactctccagcccttct

SEQ ID NO: 4966553 - DNA, 25 bp, Homo sapien
ggaactgggcataccagggatacct

SEQ ID NO: 4966554 - DNA, 25 bp, Homo sapien
tgggcacctagagcataaatgccat

SEQ ID NO: 4966555 - DNA, 25 bp, Homo sapien
ttgggcacctagagcataaatgcca

SEQ ID NO: 4966556 - DNA, 25 bp, Homo sapien
cttgggcacctagagcataaatgcc

SEQ ID NO: 4966557 - DNA, 25 bp, Homo sapien
cacagctgtcgagttggacacagca

SEQ ID NO: 4966558 - DNA, 25 bp, Homo sapien
ctgtgatataatcacgccgactggg

SEQ ID NO: 4966559 - DNA, 25 bp, Homo sapien
cttctctgctttgtgggatcatcct

SEQ ID NO: 4966560 - DNA, 25 bp, Homo sapien
ctttgtgggatcatcctgggtgttc

SEQ ID NO: 4966561 - DNA, 25 bp, Homo sapien
caagtcctagtgcctgtccactgct

SEQ ID NO: 4966562 - DNA, 25 bp, Homo sapien
ggagtccccgcgctgggatggagag

SEQ ID NO: 4966563 - DNA, 25 bp, Homo sapien
ccgcgctgggatggagagtgctcac

SEQ ID NO: 4966564 - DNA, 25 bp, Homo sapien
ttggcatttaccatcttccctgcca

SEQ ID NO: 4966565 - DNA, 25 bp, Homo sapien
tccaatcccatcacttgtctcctga

SEQ ID NO: 4966566 - DNA, 25 bp, Homo sapien
cctgctttccaccctgtgagtgcac

SEQ ID NO: 4966567 - DNA, 25 bp, Homo sapien
cgtcgccgcagactcagtgctgcag

SEQ ID NO: 4966568 - DNA, 25 bp, Homo sapien
tgtcgtcgccgcagactcagtgctg

SEQ ID NO: 4966569 - DNA, 25 bp, Homo sapien
aagatgatgttttgcctctgctgcc

SEQ ID NO: 4966570 - DNA, 25 bp, Homo sapien
tcagttctgccaatggtgcctctgt

SEQ ID NO: 4966571 - DNA, 25 bp, Homo sapien
cttccctgtgatgaaatagacctgg

SEQ ID NO: 4966572 - DNA, 25 bp, Homo sapien
cagcgtggcccactgttgctgtgaa

SEQ ID NO: 4966573 - DNA, 25 bp, Homo sapien
ccctcgaaggcagtaggcagtgctg

SEQ ID NO: 4966574 - DNA, 25 bp, Homo sapien
tcgaaggcagtaggcagtgctgttt

SEQ ID NO: 4966575 - DNA, 25 bp, Homo sapien
tgcaccctcgaaggcagtaggcagt

SEQ ID NO: 4966576 - DNA, 25 bp, Homo sapien
caccctcgaaggcagtaggcagtgc

SEQ ID NO: 4966577 - DNA, 25 bp, Homo sapien
ggatgggcattgtaatgagaaatag

SEQ ID NO: 4966578 - DNA, 25 bp, Homo sapien
gatgggcattgtaatgagaaataga

SEQ ID NO: 4966579 - DNA, 25 bp, Homo sapien
gggcattgtaatgagaaatagaaac

SEQ ID NO: 4966580 - DNA, 25 bp, Homo sapien
ctgggatgggcattgtaatgagaaa

SEQ ID NO: 4966581 - DNA, 25 bp, Homo sapien
ggtccttaatggctgatccctgaaa

SEQ ID NO: 4966582 - DNA, 25 bp, Homo sapien
gtccatttgacttctaatggaggag

SEQ ID NO: 4966583 - DNA, 25 bp, Homo sapien
gtccttaatggctgatccctgaaag

SEQ ID NO: 4966584 - DNA, 25 bp, Homo sapien
gacttctaatggaggagtctacagg

SEQ ID NO: 4966585 - DNA, 25 bp, Homo sapien
gtctgactcccactggtgttgcaaa

SEQ ID NO: 4966586 - DNA, 25 bp, Homo sapien
gtgttgcaaatgctctgaatcttgg

SEQ ID NO: 4966587 - DNA, 25 bp, Homo sapien
ctgtctgactcccactggtgttgca

SEQ ID NO: 4966588 - DNA, 25 bp, Homo sapien
aatgctctgaatcttggcaatgtcc

SEQ ID NO: 4966589 - DNA, 25 bp, Homo sapien
cattctccactaggagcccagcaat

SEQ ID NO: 4966590 - DNA, 25 bp, Homo sapien
ctgggtgatgccccgggtagcccca

SEQ ID NO: 4966591 - DNA, 25 bp, Homo sapien
tttctgcattctccactaggagccc

SEQ ID NO: 4966592 - DNA, 25 bp, Homo sapien
tctgcattctccactaggagcccag

SEQ ID NO: 4966593 - DNA, 25 bp, Homo sapien
tgtcagttggctcaggattgaggca

SEQ ID NO: 4966594 - DNA, 25 bp, Homo sapien
tagagagccttgcacatttgccagt

SEQ ID NO: 4966595 - DNA, 25 bp, Homo sapien
tctttgagggatcaatgtggaggac

SEQ ID NO: 4966596 - DNA, 25 bp, Homo sapien
aatgtcgcatgaaagccgcttccag

SEQ ID NO: 4966597 - DNA, 25 bp, Homo sapien
aagaaatgcaaatctcccgctgttg

SEQ ID NO: 4966598 - DNA, 25 bp, Homo sapien
gttgctaaagtctcacttggcagct

SEQ ID NO: 4966599 - DNA, 25 bp, Homo sapien
gctgttgctaaagtctcacttggca

SEQ ID NO: 4966600 - DNA, 25 bp, Homo sapien
cccgctgttgctaaagtctcacttg

SEQ ID NO: 4966601 - DNA, 25 bp, Homo sapien
gcaaatcatgagtcgaaacgggccc

SEQ ID NO: 4966602 - DNA, 25 bp, Homo sapien
tggcaaccaatggagcaagcagagc

SEQ ID NO: 4966603 - DNA, 25 bp, Homo sapien
gatcatcacagagagcaatgcatag

SEQ ID NO: 4966604 - DNA, 25 bp, Homo sapien
cgggcccagtgaacaggaaaatcca

SEQ ID NO: 4966605 - DNA, 25 bp, Homo sapien
cacaagatgatatgcaatgggcatg

SEQ ID NO: 4966606 - DNA, 25 bp, Homo sapien
ctgggagcctaaaagaaggttgaag

SEQ ID NO: 4966607 - DNA, 25 bp, Homo sapien
ttcaggcacctctttccacaagatg

SEQ ID NO: 4966608 - DNA, 25 bp, Homo sapien
gaagtactggcaatttttcaggcac

SEQ ID NO: 4966609 - DNA, 25 bp, Homo sapien
ggttcatgacctcttgtgggcccat

SEQ ID NO: 4966610 - DNA, 25 bp, Homo sapien
tattgacaacttccccgccttaaga

SEQ ID NO: 4966611 - DNA, 25 bp, Homo sapien
ctgctgaactggtgatgggtatttc

SEQ ID NO: 4966612 - DNA, 25 bp, Homo sapien
ttcctctcagaattatgcactgctg

SEQ ID NO: 4966613 - DNA, 25 bp, Homo sapien
aagatccgaggaggtttctaaagca

SEQ ID NO: 4966614 - DNA, 25 bp, Homo sapien
tcatttcctggcgtcattgctctaa

SEQ ID NO: 4966615 - DNA, 25 bp, Homo sapien
tgctttgcctccatacagccagagt

SEQ ID NO: 4966616 - DNA, 25 bp, Homo sapien
taatggcaaagttctcacaacacag

SEQ ID NO: 4966617 - DNA, 25 bp, Homo sapien
cattgctctaaatcctaatggcaaa

SEQ ID NO: 4966618 - DNA, 25 bp, Homo sapien
tgtggtagatgaggagggctggatg

SEQ ID NO: 4966619 - DNA, 25 bp, Homo sapien
tggtagatgaggagggctggatgtt

SEQ ID NO: 4966620 - DNA, 25 bp, Homo sapien
ctgtggtagatgaggagggctggat

SEQ ID NO: 4966621 - DNA, 25 bp, Homo sapien
gtagatgaggagggctggatgttgc

SEQ ID NO: 4966622 - DNA, 25 bp, Homo sapien
tatgagtctcttaggagccaccttg

SEQ ID NO: 4966623 - DNA, 25 bp, Homo sapien
taggtgtgccccatctatgagtctc

SEQ ID NO: 4966624 - DNA, 25 bp, Homo sapien
tgatgaaatcttgcgccatgcagct

SEQ ID NO: 4966625 - DNA, 25 bp, Homo sapien
ccattgctcagtttcaggtcacctt

SEQ ID NO: 4966626 - DNA, 25 bp, Homo sapien
tttccagcaccttcagaaacttaga

SEQ ID NO: 4966627 - DNA, 25 bp, Homo sapien
cgtgtttttccagcaccttcagaaa

SEQ ID NO: 4966628 - DNA, 25 bp, Homo sapien
tccagcaccttcagaaacttagaaa

SEQ ID NO: 4966629 - DNA, 25 bp, Homo sapien
ctactcttcgtgtttttccagcacc

SEQ ID NO: 4966630 - DNA, 25 bp, Homo sapien
tgaacttgatcctgggaaccccagg

SEQ ID NO: 4966631 - DNA, 25 bp, Homo sapien
ctgggaacccaggatgttttctaag

SEQ ID NO: 4966632 - DNA, 25 bp, Homo sapien
ttctaaggagagaaatgcctccttc

SEQ ID NO: 4966633 - DNA, 25 bp, Homo sapien
gagccagatcttgaagagccctgtg

SEQ ID NO: 4966634 - DNA, 25 bp, Homo sapien
gcagagagtacttccccaagaagcc

SEQ ID NO: 4966635 - DNA, 25 bp, Homo sapien
tccttatgggatttgatcaggagag

SEQ ID NO: 4966636 - DNA, 25 bp, Homo sapien
gaaggatctgcatcctccttatggg

SEQ ID NO: 4966637 - DNA, 25 bp, Homo sapien
tcccagctcttgggaatttgttcta

SEQ ID NO: 4966638 - DNA, 25 bp, Homo sapien
cactaatgtgtgcatgaccaacttg

SEQ ID NO: 4966639 - DNA, 25 bp, Homo sapien
ttgctggggtagacactaatgtgtg

SEQ ID NO: 4966640 - DNA, 25 bp, Homo sapien
taatgtgtgcatgaccaacttgaac

SEQ ID NO: 4966641 - DNA, 25 bp, Homo sapien
gggtagacactaatgtgtgcatgac

SEQ ID NO: 4966642 - DNA, 25 bp, Homo sapien
ttttattggttgaatctacttctgg

SEQ ID NO: 4966643 - DNA, 25 bp, Homo sapien
tggttgaatctacttctggtacaac

SEQ ID NO: 4966644 - DNA, 25 bp, Homo sapien
tgaatctacttctggtacaactact

SEQ ID NO: 4966645 - DNA, 25 bp, Homo sapien
ttgaatctacttctggtacaactac

SEQ ID NO: 4966646 - DNA, 25 bp, Homo sapien
cttgctagagttttcttgcgcttca

SEQ ID NO: 4966647 - DNA, 25 bp, Homo sapien
tgcatatgaatcttgacacctgctc

SEQ ID NO: 4966648 - DNA, 25 bp, Homo sapien
gtagcctcagtcttgccaagctgca

SEQ ID NO: 4966649 - DNA, 25 bp, Homo sapien
tgtagcctcagtcttgccaagctgc

SEQ ID NO: 4966650 - DNA, 25 bp, Homo sapien
tagcctcagtcttgccaagctgcag

SEQ ID NO: 4966651 - DNA, 25 bp, Homo sapien
ttttcctcgactgttcccacccaca

SEQ ID NO: 4966652 - DNA, 25 bp, Homo sapien
ggattccacgtagaacatctgattg

SEQ ID NO: 4966653 - DNA, 25 bp, Homo sapien
caagctggtgtgctcagcgatggat

SEQ ID NO: 4966654 - DNA, 25 bp, Homo sapien
tactacaccgtaggtaatgaactgc

SEQ ID NO: 4966655 - DNA, 25 bp, Homo sapien
aatttcttcatggtgcaattactac

SEQ ID NO: 4966656 - DNA, 25 bp, Homo sapien
ccaggcctctgtgcatatgcgacat

SEQ ID NO: 4966657 - DNA, 25 bp, Homo sapien
ggcttctctgtgactccgaaagcag

SEQ ID NO: 4966658 - DNA, 25 bp, Homo sapien
tctgtgactccgaaagcagtgaaat

SEQ ID NO: 4966659 - DNA, 25 bp, Homo sapien
ccgaaagcagtgaaattttgcatac

SEQ ID NO: 4966660 - DNA, 25 bp, Homo sapien
agatgtttatcttgtgattgccgat

SEQ ID NO: 4966661 - DNA, 25 bp, Homo sapien
tcacggaagcatccatggagatgtt

SEQ ID NO: 4966662 - DNA, 25 bp, Homo sapien
aagtcatcacggaagcatccatgga

SEQ ID NO: 4966663 - DNA, 25 bp, Homo sapien
tgtttatcttgtgattgccgattgt

SEQ ID NO: 4966664 - DNA, 25 bp, Homo sapien
ggttccttacctctcagacctcgga

SEQ ID NO: 4966665 - DNA, 25 bp, Homo sapien
ctatggtcgttttgagcattgccca

SEQ ID NO: 4966666 - DNA, 25 bp, Homo sapien
caaatcagcagtctccgctatggtc

SEQ ID NO: 4966667 - DNA, 25 bp, Homo sapien
tcagtgggccttcaacacagcacag

SEQ ID NO: 4966668 - DNA, 25 bp, Homo sapien
caccaggttctagctgctgggccat

SEQ ID NO: 4966669 - DNA, 25 bp, Homo sapien
gactcagttccttgtagagggatcc

SEQ ID NO: 4966670 - DNA, 25 bp, Homo sapien
cacgttatgccctttggaccctgaa

SEQ ID NO: 4966671 - DNA, 25 bp, Homo sapien
tcctcccttaggaaagcgaaggcgc

SEQ ID NO: 4966672 - DNA, 25 bp, Homo sapien
tttgaacagcagtggcgcacgttat

SEQ ID NO: 4966673 - DNA, 25 bp, Homo sapien
catcctcaccaggacaaaagggggt

SEQ ID NO: 4966674 - DNA, 25 bp, Homo sapien
aaagggggtatggagaaaatcagct

SEQ ID NO: 4966675 - DNA, 25 bp, Homo sapien
gccttaacagttggcccagagctgg

SEQ ID NO: 4966676 - DNA, 25 bp, Homo sapien
gggagccatgtgctgccttaacagt

SEQ ID NO: 4966677 - DNA, 25 bp, Homo sapien
tgaaatctctgctagctgttttgaa

SEQ ID NO: 4966678 - DNA, 25 bp, Homo sapien
tctatgctttgggaacatttgaaat

SEQ ID NO: 4966679 - DNA, 25 bp, Homo sapien
aacatttgaaatctctgctagctgt

SEQ ID NO: 4966680 - DNA, 25 bp, Homo sapien
catgcccagctggtatttatcattt

SEQ ID NO: 4966681 - DNA, 25 bp, Homo sapien
cagtgtctacagctatatctgtgtc

SEQ ID NO: 4966682 - DNA, 25 bp, Homo sapien
tgtctacagctatatctgtgtctgg

SEQ ID NO: 4966683 - DNA, 25 bp, Homo sapien
ctgctacagtgtctacagctatatc

SEQ ID NO: 4966684 - DNA, 25 bp, Homo sapien
acagctatatctgtgtctggtggag

SEQ ID NO: 4966685 - DNA, 25 bp, Homo sapien
tccttggcatgtcttcccaggtcct

SEQ ID NO: 4966686 - DNA, 25 bp, Homo sapien
ctccacaagactggcgaggcctctg

SEQ ID NO: 4966687 - DNA, 25 bp, Homo sapien
caagactggcgaggcctctgtgctc

SEQ ID NO: 4966688 - DNA, 25 bp, Homo sapien
cacaagactggcgaggcctctgtgc

SEQ ID NO: 4966689 - DNA, 25 bp, Homo sapien
agagagcttttccagtgaaggcatc

SEQ ID NO: 4966690 - DNA, 25 bp, Homo sapien
ccttgatggtcatatatggtgctgc

SEQ ID NO: 4966691 - DNA, 25 bp, Homo sapien
tcaggacagcccattcatccaaggc

SEQ ID NO: 4966692 - DNA, 25 bp, Homo sapien
tggtgctgcatgagactgaaataca

SEQ ID NO: 4966693 - DNA, 25 bp, Homo sapien
cacatcatgtgggagctggttacaa

SEQ ID NO: 4966694 - DNA, 25 bp, Homo sapien
tctcagcgggatccctaggaggctc

SEQ ID NO: 4966695 - DNA, 25 bp, Homo sapien
cctctggaggcctggttaggaatgt

SEQ ID NO: 4966696 - DNA, 25 bp, Homo sapien
taggaatgtgcgcttctaagtccca

SEQ ID NO: 4966697 - DNA, 25 bp, Homo sapien
ctatgataacaatgattgtgtctag

SEQ ID NO: 4966698 - DNA, 25 bp, Homo sapien
tgaaatttatgggactgtcattggc

SEQ ID NO: 4966699 - DNA, 25 bp, Homo sapien
ttatgggactgtcattggcttggac

SEQ ID NO: 4966700 - DNA, 25 bp, Homo sapien
attgtgtctagaggagagtactgga

SEQ ID NO: 4966701 - DNA, 25 bp, Homo sapien
tcttcggattgtagaccttaagtct

SEQ ID NO: 4966702 - DNA, 25 bp, Homo sapien
tactggagtcttcggattgtagacc

SEQ ID NO: 4966703 - DNA, 25 bp, Homo sapien
acagatactggagtcttcggattgt

SEQ ID NO: 4966704 - DNA, 25 bp, Homo sapien
gattgtagaccttaagtcttctttc

SEQ ID NO: 4966705 - DNA, 25 bp, Homo sapien
tcacttcctccaatagtgaatggga

SEQ ID NO: 4966706 - DNA, 25 bp, Homo sapien
ggcacaatattcaccattcagaaaa

SEQ ID NO: 4966707 - DNA, 25 bp, Homo sapien
ccagttatttgtttgagcacgttca

SEQ ID NO: 4966708 - DNA, 25 bp, Homo sapien
cctgacctcttgacaatacctggca

SEQ ID NO: 4966709 - DNA, 25 bp, Homo sapien
caagtaggctgacaaatatatttag

SEQ ID NO: 4966710 - DNA, 25 bp, Homo sapien
gatctgaatcttttatcagagtttc

SEQ ID NO: 4966711 - DNA, 25 bp, Homo sapien
ttagagcccttggaaaattctccag

SEQ ID NO: 4966712 - DNA, 25 bp, Homo sapien
tgtttgtatgatgatctgaatcttt

SEQ ID NO: 4966713 - DNA, 25 bp, Homo sapien
tccattgatagaacccattagggtg

SEQ ID NO: 4966714 - DNA, 25 bp, Homo sapien
tgtctccttggatgaatttattcct

SEQ ID NO: 4966715 - DNA, 25 bp, Homo sapien
agactgtacttttccccattcgttg

SEQ ID NO: 4966716 - DNA, 25 bp, Homo sapien
cattggtagtgtgtagaaacaactg

SEQ ID NO: 4966717 - DNA, 25 bp, Homo sapien
tacagccatatgtggtagacgttat

SEQ ID NO: 4966718 - DNA, 25 bp, Homo sapien
caaggtgtcagatcagcaaatacgt

SEQ ID NO: 4966719 - DNA, 25 bp, Homo sapien
tcatcagcagaagacgaaaaagcag

SEQ ID NO: 4966720 - DNA, 25 bp, Homo sapien
tagacgttatgtgggtgtcaactct

SEQ ID NO: 4966721 - DNA, 25 bp, Homo sapien
cctgctgcactcacatcagcgagag

SEQ ID NO: 4966722 - DNA, 25 bp, Homo sapien
agcctgctgcactcacatcagcgag

SEQ ID NO: 4966723 - DNA, 25 bp, Homo sapien
gcctgctgcactcacatcagcgaga

SEQ ID NO: 4966724 - DNA, 25 bp, Homo sapien
gtcacttcatagatgcccagatcag

SEQ ID NO: 4966725 - DNA, 25 bp, Homo sapien
ggtgtgacactcttgtgagaactct

SEQ ID NO: 4966726 - DNA, 25 bp, Homo sapien
tgcctgggccatgatttattcttga

SEQ ID NO: 4966727 - DNA, 25 bp, Homo sapien
tagcctgattactaaggtgtgacac

SEQ ID NO: 4966728 - DNA, 25 bp, Homo sapien
ggataccagtatttagccagccctg

SEQ ID NO: 4966729 - DNA, 25 bp, Homo sapien
cgaggatgcttacaactagggctta

SEQ ID NO: 4966730 - DNA, 25 bp, Homo sapien
ccagccctgtttgggtgtagcatga

SEQ ID NO: 4966731 - DNA, 25 bp, Homo sapien
aaagcagcgatgtttgtatggcaca

SEQ ID NO: 4966732 - DNA, 25 bp, Homo sapien
cccattcttggcatgccggtatgca

SEQ ID NO: 4966733 - DNA, 25 bp, Homo sapien
tgcagtggcacatacggtacaaagc

SEQ ID NO: 4966734 - DNA, 25 bp, Homo sapien
gcttcagcgtgctccctataactca

SEQ ID NO: 4966735 - DNA, 25 bp, Homo sapien
aggcaagaccataccccattcttgg

SEQ ID NO: 4966736 - DNA, 25 bp, Homo sapien
gcatcatccataaacttagagattt

SEQ ID NO: 4966737 - DNA, 25 bp, Homo sapien
cacaacttagaagagctttcaaagc

SEQ ID NO: 4966738 - DNA, 25 bp, Homo sapien
ggtctatgagcggaatttgaattca

SEQ ID NO: 4966739 - DNA, 25 bp, Homo sapien
ccagtgagactgtgagacattggca

SEQ ID NO: 4966740 - DNA, 25 bp, Homo sapien
cattgaaggcacatagcacgaagca

SEQ ID NO: 4966741 - DNA, 25 bp, Homo sapien
gatcatgactgtgaagtcagcactg

SEQ ID NO: 4966742 - DNA, 25 bp, Homo sapien
tggtagaatccatgtgacgtgactg

SEQ ID NO: 4966743 - DNA, 25 bp, Homo sapien
tgattctagtggtcctgcagtgtag

SEQ ID NO: 4966744 - DNA, 25 bp, Homo sapien
cattatgctcgatgtagataattca

SEQ ID NO: 4966745 - DNA, 25 bp, Homo sapien
ctgattataaatttagggttgtatg

SEQ ID NO: 4966746 - DNA, 25 bp, Homo sapien
tcagtaaatatggataagtggcaaa

SEQ ID NO: 4966747 - DNA, 25 bp, Homo sapien
ggcaaagaatgcatgtataacccca

SEQ ID NO: 4966748 - DNA, 25 bp, Homo sapien
cacttgatccttatctggaagagaa

SEQ ID NO: 4966749 - DNA, 25 bp, Homo sapien
gggtgtcatgcatttacctgcatca

SEQ ID NO: 4966750 - DNA, 25 bp, Homo sapien
tcccaaagttatcctgtcctgagag

SEQ ID NO: 4966751 - DNA, 25 bp, Homo sapien
aatgatagaatttgcacttgatcct

SEQ ID NO: 4966752 - DNA, 25 bp, Homo sapien
cagttaaagtgtgattttgctaccc

SEQ ID NO: 4966753 - DNA, 25 bp, Homo sapien
tacccatttggttcagtattgacat

SEQ ID NO: 4966754 - DNA, 25 bp, Homo sapien
gaaagtggccagtccttagtagagg

SEQ ID NO: 4966755 - DNA, 25 bp, Homo sapien
tagtagaggtgcacctgctcaggtt

SEQ ID NO: 4966756 - DNA, 25 bp, Homo sapien
caaagtcagtctggttcagtatcca

SEQ ID NO: 4966757 - DNA, 25 bp, Homo sapien
cattcacagcgatgcagtactgcca

SEQ ID NO: 4966758 - DNA, 25 bp, Homo sapien
caacatagtgacagtgcagcatcca

SEQ ID NO: 4966759 - DNA, 25 bp, Homo sapien
aatccggagacccactgaaactgac

SEQ ID NO: 4966760 - DNA, 25 bp, Homo sapien
tgtaatcactcctcgccgtgtctgg

SEQ ID NO: 4966761 - DNA, 25 bp, Homo sapien
aaagagagaggtccattgtggcgcc

SEQ ID NO: 4966762 - DNA, 25 bp, Homo sapien
caataagcctcgcacagttctgaag

SEQ ID NO: 4966763 - DNA, 25 bp, Homo sapien
tctgaagcctcgcaaagtctgtgca

SEQ ID NO: 4966764 - DNA, 25 bp, Homo sapien
tccctaagcggtgatacattatcca

SEQ ID NO: 4966765 - DNA, 25 bp, Homo sapien
aaaagtgcttaatgaactccaacag

SEQ ID NO: 4966766 - DNA, 25 bp, Homo sapien
gaaaactaacatcaagtgacactgc

SEQ ID NO: 4966767 - DNA, 25 bp, Homo sapien
gaatgtacctttgtcagtcttgcag

SEQ ID NO: 4966768 - DNA, 25 bp, Homo sapien
ggatattcccctgccacaagtgtca

SEQ ID NO: 4966769 - DNA, 25 bp, Homo sapien
tatgatgattctcctccatgacact

SEQ ID NO: 4966770 - DNA, 25 bp, Homo sapien
cattggtgtagcaaactctaagccc

SEQ ID NO: 4966771 - DNA, 25 bp, Homo sapien
taaaatgcctctatcaaggaatgct

SEQ ID NO: 4966772 - DNA, 25 bp, Homo sapien
gcttagcgattctacagagtcttga

SEQ ID NO: 4966773 - DNA, 25 bp, Homo sapien
tccgtagtggtgtcagactggaacc

SEQ ID NO: 4966774 - DNA, 25 bp, Homo sapien
tgaagaaacacccactttacaggct

SEQ ID NO: 4966775 - DNA, 25 bp, Homo sapien
gaggtgttctcagatgccaaatata

SEQ ID NO: 4966776 - DNA, 25 bp, Homo sapien
aaggcatctcgcagcgccaactgtt

SEQ ID NO: 4966777 - DNA, 25 bp, Homo sapien
aggcatctcgcagcgccaactgttt

SEQ ID NO: 4966778 - DNA, 25 bp, Homo sapien
ttcataatatagtgcttctggactt

SEQ ID NO: 4966779 - DNA, 25 bp, Homo sapien
ttcagcagttttcataatatagtgc

SEQ ID NO: 4966780 - DNA, 25 bp, Homo sapien
tcttcctcacaaattcttttcggtc

SEQ ID NO: 4966781 - DNA, 25 bp, Homo sapien
cattgcagttgctagtcttgtctct

SEQ ID NO: 4966782 - DNA, 25 bp, Homo sapien
ttgcagttgctagtcttgtctcttt

SEQ ID NO: 4966783 - DNA, 25 bp, Homo sapien
ctcacaaattcttttcggtctgtct

SEQ ID NO: 4966784 - DNA, 25 bp, Homo sapien
tgggatttcccggggacagcgtcaa

SEQ ID NO: 4966785 - DNA, 25 bp, Homo sapien
tcttttctcatttgcgccatgcgga

SEQ ID NO: 4966786 - DNA, 25 bp, Homo sapien
tgcgccatgcggattttctggaagt

SEQ ID NO: 4966787 - DNA, 25 bp, Homo sapien
cggggacagcgtcaagttcttttct

SEQ ID NO: 4966788 - DNA, 25 bp, Homo sapien
ttgcacatcaacccattcgccatcg

SEQ ID NO: 4966789 - DNA, 25 bp, Homo sapien
caacccattcgccatcggcatcctc

SEQ ID NO: 4966790 - DNA, 25 bp, Homo sapien
catcaacccattcgccatcggcatc

SEQ ID NO: 4966791 - DNA, 25 bp, Homo sapien
cacatcaacccattcgccatcggca

SEQ ID NO: 4966792 - DNA, 25 bp, Homo sapien
ggcttctgtaggcttaccccagaat

SEQ ID NO: 4966793 - DNA, 25 bp, Homo sapien
tggaggcttctgtaggcttacccca

SEQ ID NO: 4966794 - DNA, 25 bp, Homo sapien
gaggcttctgtaggcttaccccaga

SEQ ID NO: 4966795 - DNA, 25 bp, Homo sapien
ttctgtaggcttaccccagaatttc

SEQ ID NO: 4966796 - DNA, 25 bp, Homo sapien
gccgaatcaaagttctagcagacat

SEQ ID NO: 4966797 - DNA, 25 bp, Homo sapien
gtgttcggaagagccgaatcaaagt

SEQ ID NO: 4966798 - DNA, 25 bp, Homo sapien
ttcagtgttcggaagagccgaatca

SEQ ID NO: 4966799 - DNA, 25 bp, Homo sapien
tgaggattcagtgttcggaagagcc

SEQ ID NO: 4966800 - DNA, 25 bp, Homo sapien
aggacactgagctgttgtctctttt

SEQ ID NO: 4966801 - DNA, 25 bp, Homo sapien
cagcattgattcctattgtcatggc

SEQ ID NO: 4966802 - DNA, 25 bp, Homo sapien
tcctattgtcatggcttctccagag

SEQ ID NO: 4966803 - DNA, 25 bp, Homo sapien
caaaaagtgatagaaattgaagagg

SEQ ID NO: 4966804 - DNA, 25 bp, Homo sapien
cttcgcaaaaagtgatagaaattga

SEQ ID NO: 4966805 - DNA, 25 bp, Homo sapien
agaggaagagcttatgaattcccac

SEQ ID NO: 4966806 - DNA, 25 bp, Homo sapien
gaaattgaagaggaagagcttatga

SEQ ID NO: 4966807 - DNA, 25 bp, Homo sapien
ctccttacagcactcaagctgcttt

SEQ ID NO: 4966808 - DNA, 25 bp, Homo sapien
acctctccttacagcactcaagctg

SEQ ID NO: 4966809 - DNA, 25 bp, Homo sapien
aacctctccttacagcactcaagct

SEQ ID NO: 4966810 - DNA, 25 bp, Homo sapien
tcttttgtttcttgagcactttcat

SEQ ID NO: 4966811 - DNA, 25 bp, Homo sapien
tttcttgagcactttcattgccttt

SEQ ID NO: 4966812 - DNA, 25 bp, Homo sapien
ttgtttcttgagcactttcattgcc

SEQ ID NO: 4966813 - DNA, 25 bp, Homo sapien
tcttgagcactttcattgccttttc

SEQ ID NO: 4966814 - DNA, 25 bp, Homo sapien
tgggaactttgttccctgtagcata

SEQ ID NO: 4966815 - DNA, 25 bp, Homo sapien
ttgggaactttgttccctgtagcat

SEQ ID NO: 4966816 - DNA, 25 bp, Homo sapien
tttgggaactttgttccctgtagca

SEQ ID NO: 4966817 - DNA, 25 bp, Homo sapien
gggaactttgttccctgtagcatac

SEQ ID NO: 4966818 - DNA, 25 bp, Homo sapien
tgtcaaagcagcaactaatatcttg

SEQ ID NO: 4966819 - DNA, 25 bp, Homo sapien
gattcggagtcactggcctgttttt

SEQ ID NO: 4966820 - DNA, 25 bp, Homo sapien
ggtccgtcatcctcagattcggagt

SEQ ID NO: 4966821 - DNA, 25 bp, Homo sapien
caggtctcttgctgttggtccgtca

SEQ ID NO: 4966822 - DNA, 25 bp, Homo sapien
gctgcagttgcattgctatctctca

SEQ ID NO: 4966823 - DNA, 25 bp, Homo sapien
gacagttttggtatcattccagatg

SEQ ID NO: 4966824 - DNA, 25 bp, Homo sapien
tgaaattttacaatactacatccac

SEQ ID NO: 4966825 - DNA, 25 bp, Homo sapien
gctatctctcaacatggtatacatg

SEQ ID NO: 4966826 - DNA, 25 bp, Homo sapien
tcagtcacgatatatgtgtatgaag

SEQ ID NO: 4966827 - DNA, 25 bp, Homo sapien
tacagtatgattacaggacagaaga

SEQ ID NO: 4966828 - DNA, 25 bp, Homo sapien
atatcagtcacgatatatgtgtatg

SEQ ID NO: 4966829 - DNA, 25 bp, Homo sapien
cagtatgattacaggacagaagatc

SEQ ID NO: 4966830 - DNA, 25 bp, Homo sapien
cacatatttaggacgttctgtgcca

SEQ ID NO: 4966831 - DNA, 25 bp, Homo sapien
tgcacatatttaggacgttctgtgc

SEQ ID NO: 4966832 - DNA, 25 bp, Homo sapien
gatgcacatatttaggacgttctgt

SEQ ID NO: 4966833 - DNA, 25 bp, Homo sapien
agatgcacatatttaggacgttctg

SEQ ID NO: 4966834 - DNA, 25 bp, Homo sapien
tctttaccgggtttatatggttgca

SEQ ID NO: 4966835 - DNA, 25 bp, Homo sapien
ctgaagactggcttcgcggcgagca

SEQ ID NO: 4966836 - DNA, 25 bp, Homo sapien
ataaaactcagatggccagcagccg

SEQ ID NO: 4966837 - DNA, 25 bp, Homo sapien
gcagtcaggttgctgggcagcttgt

SEQ ID NO: 4966838 - DNA, 25 bp, Homo sapien
gagggtggtgggtctcgcttcatca

SEQ ID NO: 4966839 - DNA, 25 bp, Homo sapien
gaaacagcactcaatctattaatag

SEQ ID NO: 4966840 - DNA, 25 bp, Homo sapien
gaactcctgcttccgggtatgaccg

SEQ ID NO: 4966841 - DNA, 25 bp, Homo sapien
cacaaggtcaatcttggacaagtcc

SEQ ID NO: 4966842 - DNA, 25 bp, Homo sapien
gggatttgacaaatcaatccttaaa

SEQ ID NO: 4966843 - DNA, 25 bp, Homo sapien
gatagccctgaaacagactcacatt

SEQ ID NO: 4966844 - DNA, 25 bp, Homo sapien
gtaatcttggtgtgactgtctcccc

SEQ ID NO: 4966845 - DNA, 25 bp, Homo sapien
cagagagtgacaaaggtgcaatttc

SEQ ID NO: 4966846 - DNA, 25 bp, Homo sapien
tctaacagaggtattgcagatagcc

SEQ ID NO: 4966847 - DNA, 25 bp, Homo sapien
ggataaacggcttcccacgtcatgt

SEQ ID NO: 4966848 - DNA, 25 bp, Homo sapien
tagaaaacagatgcgtgcgcagggc

SEQ ID NO: 4966849 - DNA, 25 bp, Homo sapien
tttggagtttacacgtggaggcacc

SEQ ID NO: 4966850 - DNA, 25 bp, Homo sapien
tcccaagtcacacgcaagagttcgt

SEQ ID NO: 4966851 - DNA, 25 bp, Homo sapien
cactgaaagcaaagggattttcatc

SEQ ID NO: 4966852 - DNA, 25 bp, Homo sapien
taggtgtacgtgatttcactgaaag

SEQ ID NO: 4966853 - DNA, 25 bp, Homo sapien
acagttttcttatgagtgaagatac

SEQ ID NO: 4966854 - DNA, 25 bp, Homo sapien
tatgagtgaagatacttggtaggtg

SEQ ID NO: 4966855 - DNA, 25 bp, Homo sapien
gagttgaatgcatctaccctggaat

SEQ ID NO: 4966856 - DNA, 25 bp, Homo sapien
taagaacttaataactccgtggagc

SEQ ID NO: 4966857 - DNA, 25 bp, Homo sapien
ggtaagtgctttcctggctcatgga

SEQ ID NO: 4966858 - DNA, 25 bp, Homo sapien
cagtgttgatcccttctcaggacca

SEQ ID NO: 4966859 - DNA, 25 bp, Homo sapien
gaaactgcttttcggatgatcatcc

SEQ ID NO: 4966860 - DNA, 25 bp, Homo sapien
tcgattgataacaggagagctcaca

SEQ ID NO: 4966861 - DNA, 25 bp, Homo sapien
caggtctgagtctgtggcccttgtt

SEQ ID NO: 4966862 - DNA, 25 bp, Homo sapien
tgatattatccccatggaccagtgg

SEQ ID NO: 4966863 - DNA, 25 bp, Homo sapien
tgcaagggcttcttttccgcaaatg

SEQ ID NO: 4966864 - DNA, 25 bp, Homo sapien
taattagtgccaccagactagacct

SEQ ID NO: 4966865 - DNA, 25 bp, Homo sapien
tctgataaggaacgtctcaggctta

SEQ ID NO: 4966866 - DNA, 25 bp, Homo sapien
tccgcaaatgccaccagcagattat

SEQ ID NO: 4966867 - DNA, 25 bp, Homo sapien
caaggtgattcctgcgactgcaggc

SEQ ID NO: 4966868 - DNA, 25 bp, Homo sapien
tcagagttattccaagcacttgtgc

SEQ ID NO: 4966869 - DNA, 25 bp, Homo sapien
ggaagcatcacctatactctgaagc

SEQ ID NO: 4966870 - DNA, 25 bp, Homo sapien
aaacagacttgggttgtgggaacag

SEQ ID NO: 4966871 - DNA, 25 bp, Homo sapien
ttggaaagtgcaacaagttcccgtg

SEQ ID NO: 4966872 - DNA, 25 bp, Homo sapien
tctgtagccctaacacatgggatga

SEQ ID NO: 4966873 - DNA, 25 bp, Homo sapien
gatgaacgttttactgctacaccca

SEQ ID NO: 4966874 - DNA, 25 bp, Homo sapien
taggagaactgactagctaaactgc

SEQ ID NO: 4966875 - DNA, 25 bp, Homo sapien
tagtcacacttggaacaggataaac

SEQ ID NO: 4966876 - DNA, 25 bp, Homo sapien
gaagcaacaggaacgtagaaccatg

SEQ ID NO: 4966877 - DNA, 25 bp, Homo sapien
tagaaccatggatcaaggcgaacgc

SEQ ID NO: 4966878 - DNA, 25 bp, Homo sapien
ggcgaacgcaatggcaacaaccttc

SEQ ID NO: 4966879 - DNA, 25 bp, Homo sapien
gctttagtagcaaactgatgcagta

SEQ ID NO: 4966880 - DNA, 25 bp, Homo sapien
tatggcctctaccttagttcctgat

SEQ ID NO: 4966881 - DNA, 25 bp, Homo sapien
tgggcaatctctccctaacataggt

SEQ ID NO: 4966882 - DNA, 25 bp, Homo sapien
tccatgtttgggcaggcctatggcc

SEQ ID NO: 4966883 - DNA, 25 bp, Homo sapien
cttgttacccaagcgcagcagctgt

SEQ ID NO: 4966884 - DNA, 25 bp, Homo sapien
acccaagcgcagcagctgttcctta

SEQ ID NO: 4966885 - DNA, 25 bp, Homo sapien
tacccaagcgcagcagctgttcctt

SEQ ID NO: 4966886 - DNA, 25 bp, Homo sapien
ttacttgttacccaagcgcagcagc

SEQ ID NO: 4966887 - DNA, 25 bp, Homo sapien
cctttcttgaccattctcgacaatt

SEQ ID NO: 4966888 - DNA, 25 bp, Homo sapien
tggccgtcttcttcaacttctaccc

SEQ ID NO: 4966889 - DNA, 25 bp, Homo sapien
gggctttaactggccgtcttcttca

SEQ ID NO: 4966890 - DNA, 25 bp, Homo sapien
tttcttgaccattctcgacaattct

SEQ ID NO: 4966891 - DNA, 25 bp, Homo sapien
tcaaatgaaaatgggtccctttcac

SEQ ID NO: 4966892 - DNA, 25 bp, Homo sapien
gtcaaatgaaaatgggtccctttca

SEQ ID NO: 4966893 - DNA, 25 bp, Homo sapien
tcaaaagaagtcaaatgaaaatggg

SEQ ID NO: 4966894 - DNA, 25 bp, Homo sapien
agaagtcaaatgaaaatgggtccct

SEQ ID NO: 4966895 - DNA, 25 bp, Homo sapien
caaaatcaaatggaccatcaaaatg

SEQ ID NO: 4966896 - DNA, 25 bp, Homo sapien
ccaaaatcaaatggaccatcaaaat

SEQ ID NO: 4966897 - DNA, 25 bp, Homo sapien
aaatcaaatggaccatcaaaatgac

SEQ ID NO: 4966898 - DNA, 25 bp, Homo sapien
aagccaaaatcaaatggaccatcaa

SEQ ID NO: 4966899 - DNA, 25 bp, Homo sapien
tggcgggatgcaggcggctggtggc

SEQ ID NO: 4966900 - DNA, 25 bp, Homo sapien
tgttggtattggtccgaggacagag

SEQ ID NO: 4966901 - DNA, 25 bp, Homo sapien
tggcggcccggatctcttcccggct

SEQ ID NO: 4966902 - DNA, 25 bp, Homo sapien
cagcggctcctcgtgctttcctttg

SEQ ID NO: 4966903 - DNA, 25 bp, Homo sapien
tgaggacggttgggtaatccaggtc

SEQ ID NO: 4966904 - DNA, 25 bp, Homo sapien
ggtattatatggtctgaggacggtt

SEQ ID NO: 4966905 - DNA, 25 bp, Homo sapien
tattatatggtctgaggacggttgg

SEQ ID NO: 4966906 - DNA, 25 bp, Homo sapien
ttaggtattatatggtctgaggacg

SEQ ID NO: 4966907 - DNA, 25 bp, Homo sapien
acagtgctgtctgctcgcccggtgt

SEQ ID NO: 4966908 - DNA, 25 bp, Homo sapien
ggtgtctttcatgccgtttcccacc

SEQ ID NO: 4966909 - DNA, 25 bp, Homo sapien
cattgcacagtgcagcgaggttgcc

SEQ ID NO: 4966910 - DNA, 25 bp, Homo sapien
ggttgccaattccatagttgtagcg

SEQ ID NO: 4966911 - DNA, 25 bp, Homo sapien
tatctgggggatagattggcttgca

SEQ ID NO: 4966912 - DNA, 25 bp, Homo sapien
tgtgcctgagacctcgacaaatatc

SEQ ID NO: 4966913 - DNA, 25 bp, Homo sapien
agcttgtgcctgagacctcgacaaa

SEQ ID NO: 4966914 - DNA, 25 bp, Homo sapien
cctgagacctcgacaaatatctggg

SEQ ID NO: 4966915 - DNA, 25 bp, Homo sapien
taaatatggcagaccatagttcccc

SEQ ID NO: 4966916 - DNA, 25 bp, Homo sapien
tcttcaggtaaatatggcagaccat

SEQ ID NO: 4966917 - DNA, 25 bp, Homo sapien
gattgcttttagcatagctactggg

SEQ ID NO: 4966918 - DNA, 25 bp, Homo sapien
cagaggccccgcatgtgatggaaac

SEQ ID NO: 4966919 - DNA, 25 bp, Homo sapien
ccagcatctgagctggaagactgcc

SEQ ID NO: 4966920 - DNA, 25 bp, Homo sapien
gaagactgcccgtgtccttccaatc

SEQ ID NO: 4966921 - DNA, 25 bp, Homo sapien
gcccgtgtccttccaatccacttcc

SEQ ID NO: 4966922 - DNA, 25 bp, Homo sapien
ctggaagactgcccgtgtccttcca

SEQ ID NO: 4966923 - DNA, 25 bp, Homo sapien
tggaagaaggcccttctgtaagatc

SEQ ID NO: 4966924 - DNA, 25 bp, Homo sapien
gccacagcagcaaatgcgaagaccc

SEQ ID NO: 4966925 - DNA, 25 bp, Homo sapien
gaaggcccttctgtaagatctgaag

SEQ ID NO: 4966926 - DNA, 25 bp, Homo sapien
ctcgggcttcgacgcagggacctgc

SEQ ID NO: 4966927 - DNA, 25 bp, Homo sapien
tttggggtgtgtcctgcggcaccgt

SEQ ID NO: 4966928 - DNA, 25 bp, Homo sapien
ctcgtctgtgctctgtgtttggggt

SEQ ID NO: 4966929 - DNA, 25 bp, Homo sapien
gggtgtgtcctgcggcaccgtccct

SEQ ID NO: 4966930 - DNA, 25 bp, Homo sapien
tgtgtcctgcggcaccgtccctgag

SEQ ID NO: 4966931 - DNA, 25 bp, Homo sapien
cgcgcttccagcgccgtcggtctgg

SEQ ID NO: 4966932 - DNA, 25 bp, Homo sapien
ggccggggaatgcaccgagctgcgc

SEQ ID NO: 4966933 - DNA, 25 bp, Homo sapien
ccagcgccgtcggtctggggtttct

SEQ ID NO: 4966934 - DNA, 25 bp, Homo sapien
gggcagtgcggccggggaatgcacc

SEQ ID NO: 4966935 - DNA, 25 bp, Homo sapien
tgcgtctcccgacgcgcgctgctcc

SEQ ID NO: 4966936 - DNA, 25 bp, Homo sapien
tctgaccctggcgagtcactgcgtc

SEQ ID NO: 4966937 - DNA, 25 bp, Homo sapien
cctgccctcggccttgcgtggggaa

SEQ ID NO: 4966938 - DNA, 25 bp, Homo sapien
tggcgagtcactgcgtctcccgacg

SEQ ID NO: 4966939 - DNA, 25 bp, Homo sapien
taccagggactcgaccgagcatctc

SEQ ID NO: 4966940 - DNA, 25 bp, Homo sapien
cacataccagggactcgaccgagca

SEQ ID NO: 4966941 - DNA, 25 bp, Homo sapien
cagccacaggattccccgggggagc

SEQ ID NO: 4966942 - DNA, 25 bp, Homo sapien
cccgcacggtgaccacataccaggg

SEQ ID NO: 4966943 - DNA, 25 bp, Homo sapien
tgacttgtccacatatgccagtggg

SEQ ID NO: 4966944 - DNA, 25 bp, Homo sapien
cgaggtaacctttctgagcgttgac

SEQ ID NO: 4966945 - DNA, 25 bp, Homo sapien
tgagcgttgacttgtccacatatgc

SEQ ID NO: 4966946 - DNA, 25 bp, Homo sapien
tatgtgtgacgcgtcgaggtaacct

SEQ ID NO: 4966947 - DNA, 25 bp, Homo sapien
taacatatgggaagctgtatagtgg

SEQ ID NO: 4966948 - DNA, 25 bp, Homo sapien
tatgggaagctgtatagtggccttc

SEQ ID NO: 4966949 - DNA, 25 bp, Homo sapien
catgtgtaacatatgggaagctgta

SEQ ID NO: 4966950 - DNA, 25 bp, Homo sapien
aacatgtgtaacatatgggaagctg

SEQ ID NO: 4966951 - DNA, 25 bp, Homo sapien
aatagtcagccacatccttctggac

SEQ ID NO: 4966952 - DNA, 25 bp, Homo sapien
cctggtgagtgcaatagtcagccac

SEQ ID NO: 4966953 - DNA, 25 bp, Homo sapien
caatagtcagccacatccttctgga

SEQ ID NO: 4966954 - DNA, 25 bp, Homo sapien
cttctttcctggtgagtgcaatagt

SEQ ID NO: 4966955 - DNA, 25 bp, Homo sapien
ctttgatgacaggtgcattcctaga

SEQ ID NO: 4966956 - DNA, 25 bp, Homo sapien
tgacaggtgcattcctagaggtact

SEQ ID NO: 4966957 - DNA, 25 bp, Homo sapien
gatgacaggtgcattcctagaggta

SEQ ID NO: 4966958 - DNA, 25 bp, Homo sapien
ggtgcattcctagaggtactgtctt

SEQ ID NO: 4966959 - DNA, 25 bp, Homo sapien
ccaagaacgctttgatggtgtgggc

SEQ ID NO: 4966960 - DNA, 25 bp, Homo sapien
gcaacgccaagaacgctttgatggt

SEQ ID NO: 4966961 - DNA, 25 bp, Homo sapien
tacgtaatgcaacgccaagaacgct

SEQ ID NO: 4966962 - DNA, 25 bp, Homo sapien
ctgcagagttttacgtaatgcaacg

SEQ ID NO: 4966963 - DNA, 25 bp, Homo sapien
gagacccttcgtcatctggttgggc

SEQ ID NO: 4966964 - DNA, 25 bp, Homo sapien
tcattgaaacatcccaacgaactct

SEQ ID NO: 4966965 - DNA, 25 bp, Homo sapien
tgtcattgaaacatcccaacgaact

SEQ ID NO: 4966966 - DNA, 25 bp, Homo sapien
gcaatggcttgggagacccttcgtc

SEQ ID NO: 4966967 - DNA, 25 bp, Homo sapien
ggaagtcctgaaattcaatccaatt

SEQ ID NO: 4966968 - DNA, 25 bp, Homo sapien
cctactggttgaagtctaatgggac

SEQ ID NO: 4966969 - DNA, 25 bp, Homo sapien
aagaaaattcccacacacgtaatga

SEQ ID NO: 4966970 - DNA, 25 bp, Homo sapien
cagagggagcccctaactcaaaaca

SEQ ID NO: 4966971 - DNA, 25 bp, Homo sapien
gacacacctctcacgatggctgaaa

SEQ ID NO: 4966972 - DNA, 25 bp, Homo sapien
cttaccagctgatgacaaggatgca

SEQ ID NO: 4966973 - DNA, 25 bp, Homo sapien
aacagtactaccctatgatcaagcc

SEQ ID NO: 4966974 - DNA, 25 bp, Homo sapien
tcagcatccttagtcatgaaaccat

SEQ ID NO: 4966975 - DNA, 25 bp, Homo sapien
tcttatcgctcagctggtggaaatg

SEQ ID NO: 4966976 - DNA, 25 bp, Homo sapien
aataagtgctgtcccaatggatgtc

SEQ ID NO: 4966977 - DNA, 25 bp, Homo sapien
atgacaccagcttgagccaacctca

SEQ ID NO: 4966978 - DNA, 25 bp, Homo sapien
caacctcaccaggtgtcatgagcag

SEQ ID NO: 4966979 - DNA, 25 bp, Homo sapien
gattgcagggaatatggctggtcca

SEQ ID NO: 4966980 - DNA, 25 bp, Homo sapien
catctcagaggacggcacttgttgc

SEQ ID NO: 4966981 - DNA, 25 bp, Homo sapien
tgcagttgccaagaccgcagaggaa

SEQ ID NO: 4966982 - DNA, 25 bp, Homo sapien
gacgcattggctctaggcagcctca

SEQ ID NO: 4966983 - DNA, 25 bp, Homo sapien
ttactttgtataccgccaataaatg

SEQ ID NO: 4966984 - DNA, 25 bp, Homo sapien
acattttactttgtataccgccaat

SEQ ID NO: 4966985 - DNA, 25 bp, Homo sapien
tttgtataccgccaataaatgacaa

SEQ ID NO: 4966986 - DNA, 25 bp, Homo sapien
gtataccgccaataaatgacaatga

SEQ ID NO: 4966987 - DNA, 25 bp, Homo sapien
cacattttggagatggcactgctag

SEQ ID NO: 4966988 - DNA, 25 bp, Homo sapien
tatctgacacctagcagaaaggcag

SEQ ID NO: 4966989 - DNA, 25 bp, Homo sapien
gaaattagggtgtcatggtaaccac

SEQ ID NO: 4966990 - DNA, 25 bp, Homo sapien
cttaaagagtttagcccaggcatgg

SEQ ID NO: 4966991 - DNA, 25 bp, Homo sapien
cagcatctggttaagagtggcccca

SEQ ID NO: 4966992 - DNA, 25 bp, Homo sapien
cagtttccggtatctcatgggtagc

SEQ ID NO: 4966993 - DNA, 25 bp, Homo sapien
gagcagggtttctagccgtaacaca

SEQ ID NO: 4966994 - DNA, 25 bp, Homo sapien
tacactgatggacgggttgtctgcc

SEQ ID NO: 4966995 - DNA, 25 bp, Homo sapien
tgtcctaagaattgacccactctga

SEQ ID NO: 4966996 - DNA, 25 bp, Homo sapien
tcctaagaattgacccactctgact

SEQ ID NO: 4966997 - DNA, 25 bp, Homo sapien
gtcctaagaattgacccactctgac

SEQ ID NO: 4966998 - DNA, 25 bp, Homo sapien
aatgaccctggcctactcagtggca

SEQ ID NO: 4966999 - DNA, 25 bp, Homo sapien
ctcagtggcaagaactcaggacttc

SEQ ID NO: 4967000 - DNA, 25 bp, Homo sapien
ccaggtgggcaggtcgtatctcagt

SEQ ID NO: 4967001 - DNA, 25 bp, Homo sapien
tctgatagttgaggcacctgggaca

SEQ ID NO: 4967002 - DNA, 25 bp, Homo sapien
ttcccgagtgttccgcgagaggtga

SEQ ID NO: 4967003 - DNA, 25 bp, Homo sapien
gttcccgagtgttccgcgagaggtg

SEQ ID NO: 4967004 - DNA, 25 bp, Homo sapien
cacagtggtgtgtctggctcttagc

SEQ ID NO: 4967005 - DNA, 25 bp, Homo sapien
cacctccacacagtggtgtgtctgg

SEQ ID NO: 4967006 - DNA, 25 bp, Homo sapien
agtgggttcttgttctattagcttc

SEQ ID NO: 4967007 - DNA, 25 bp, Homo sapien
cctttcttgccgcatctgctccctc

SEQ ID NO: 4967008 - DNA, 25 bp, Homo sapien
atgagtgggttcttgttctattagc

SEQ ID NO: 4967009 - DNA, 25 bp, Homo sapien
ggtaatgagtgggttcttgttctat

SEQ ID NO: 4967010 - DNA, 25 bp, Homo sapien
aatacctcccagttactgctgcgga

SEQ ID NO: 4967011 - DNA, 25 bp, Homo sapien
tacctcccagttactgctgcggagt

SEQ ID NO: 4967012 - DNA, 25 bp, Homo sapien
ctaatacctcccagttactgctgcg

SEQ ID NO: 4967013 - DNA, 25 bp, Homo sapien
ctcccagttactgctgcggagtgtg

SEQ ID NO: 4967014 - DNA, 25 bp, Homo sapien
gtctgtttctcatccggagacgcct

SEQ ID NO: 4967015 - DNA, 25 bp, Homo sapien
tcaaatgcaaagcacatctgccgct

SEQ ID NO: 4967016 - DNA, 25 bp, Homo sapien
tttctcatccggagacgcctttcca

SEQ ID NO: 4967017 - DNA, 25 bp, Homo sapien
atctgccgctaagtccaaaatgccc

SEQ ID NO: 4967018 - DNA, 25 bp, Homo sapien
gggctgatcttcaaattgcgactga

SEQ ID NO: 4967019 - DNA, 25 bp, Homo sapien
tcttcaaattgcgactgattgtcca

SEQ ID NO: 4967020 - DNA, 25 bp, Homo sapien
tcaaattgcgactgattgtccagca

SEQ ID NO: 4967021 - DNA, 25 bp, Homo sapien
gctgatcttcaaattgcgactgatt

SEQ ID NO: 4967022 - DNA, 25 bp, Homo sapien
tggccctgcggtaaacggcctctca

SEQ ID NO: 4967023 - DNA, 25 bp, Homo sapien
ttggtaaccgcatttaatcctgggc

SEQ ID NO: 4967024 - DNA, 25 bp, Homo sapien
gccctacgcggtggccctgcggtaa

SEQ ID NO: 4967025 - DNA, 25 bp, Homo sapien
ggactggatccctggttacacggcc

SEQ ID NO: 4967026 - DNA, 25 bp, Homo sapien
accaaaggaggggcaccatttctgc

SEQ ID NO: 4967027 - DNA, 25 bp, Homo sapien
gccaccaaaggaggggcaccatttc

SEQ ID NO: 4967028 - DNA, 25 bp, Homo sapien
aaaggaggggcaccatttctgcagg

SEQ ID NO: 4967029 - DNA, 25 bp, Homo sapien
cgggccaccaaaggaggggcaccat

SEQ ID NO: 4967030 - DNA, 25 bp, Homo sapien
gcatctggtaacccgggaaacgctg

SEQ ID NO: 4967031 - DNA, 25 bp, Homo sapien
aaacgctgcgactgtggcgcagtgc

SEQ ID NO: 4967032 - DNA, 25 bp, Homo sapien
gactgtggcgcagtgcgcaacaggg

SEQ ID NO: 4967033 - DNA, 25 bp, Homo sapien
taacccgggaaacgctgcgactgtg

SEQ ID NO: 4967034 - DNA, 25 bp, Homo sapien
ggaattcccgactgcactctttgct

SEQ ID NO: 4967035 - DNA, 25 bp, Homo sapien
gacctgcgtctctctctatattcct

SEQ ID NO: 4967036 - DNA, 25 bp, Homo sapien
atttcttcccgccatgttgtgtgcc

SEQ ID NO: 4967037 - DNA, 25 bp, Homo sapien
tcccatctgctacgcccctctgaat

SEQ ID NO: 4967038 - DNA, 25 bp, Homo sapien
ccaaggcgagtggacaaactgaagc

SEQ ID NO: 4967039 - DNA, 25 bp, Homo sapien
acaccaaagtggatgcacgaagcgg

SEQ ID NO: 4967040 - DNA, 25 bp, Homo sapien
gggaaccttctcgtttcagtctctg

SEQ ID NO: 4967041 - DNA, 25 bp, Homo sapien
gggtgtccagcgtcttggctgcccc

SEQ ID NO: 4967042 - DNA, 25 bp, Homo sapien
gagtagcctggcgcccggcttgtcc

SEQ ID NO: 4967043 - DNA, 25 bp, Homo sapien
ccgcttcccacaccctgagtagcct

SEQ ID NO: 4967044 - DNA, 25 bp, Homo sapien
ttcccacaccctgagtagcctggcg

SEQ ID NO: 4967045 - DNA, 25 bp, Homo sapien
acaccctgagtagcctggcgcccgg

SEQ ID NO: 4967046 - DNA, 25 bp, Homo sapien
agctcacacccagggtaacggggcg

SEQ ID NO: 4967047 - DNA, 25 bp, Homo sapien
cagctcacacccagggtaacggggc

SEQ ID NO: 4967048 - DNA, 25 bp, Homo sapien
cggggcgggacccctatccacagtg

SEQ ID NO: 4967049 - DNA, 25 bp, Homo sapien
ccctatccacagtgcgccctcgccc

SEQ ID NO: 4967050 - DNA, 25 bp, Homo sapien
ggctgcgtcctccggtcctcactcc

SEQ ID NO: 4967051 - DNA, 25 bp, Homo sapien
tgcgtcctccggtcctcactccgcg

SEQ ID NO: 4967052 - DNA, 25 bp, Homo sapien
gtcctccggtcctcactccgcgtgc

SEQ ID NO: 4967053 - DNA, 25 bp, Homo sapien
tccggtcctcactccgcgtgccctg

SEQ ID NO: 4967054 - DNA, 25 bp, Homo sapien
tccgctccgcatccattagctggtg

SEQ ID NO: 4967055 - DNA, 25 bp, Homo sapien
tggccgcttcacttccggagcgcgg

SEQ ID NO: 4967056 - DNA, 25 bp, Homo sapien
tccattagctggtggtctggccgct

SEQ ID NO: 4967057 - DNA, 25 bp, Homo sapien
gcgcggagagcggtcagcgggccct

SEQ ID NO: 4967058 - DNA, 25 bp, Homo sapien
cgcgcagggtgcggcgaggctcggg

SEQ ID NO: 4967059 - DNA, 25 bp, Homo sapien
tctccgcgcagggtgcggcgaggct

SEQ ID NO: 4967060 - DNA, 25 bp, Homo sapien
tccgcgcagggtgcggcgaggctcg

SEQ ID NO: 4967061 - DNA, 25 bp, Homo sapien
cttctccgcgcagggtgcggcgagg

SEQ ID NO: 4967062 - DNA, 25 bp, Homo sapien
agacacagcgtagccagaaccagtg

SEQ ID NO: 4967063 - DNA, 25 bp, Homo sapien
agcaaacaacctatgcaggctggag

SEQ ID NO: 4967064 - DNA, 25 bp, Homo sapien
gctgtgctgccctctaactgtacaa

SEQ ID NO: 4967065 - DNA, 25 bp, Homo sapien
caggtgccgctgaatgaactgcaca

SEQ ID NO: 4967066 - DNA, 25 bp, Homo sapien
ggattgcattcatccgttacgttct

SEQ ID NO: 4967067 - DNA, 25 bp, Homo sapien
cagtttttgccttaaagctgccctc

SEQ ID NO: 4967068 - DNA, 25 bp, Homo sapien
taatagcaagaccagcgaagcggtt

SEQ ID NO: 4967069 - DNA, 25 bp, Homo sapien
gaagcggttgcacccttttcaatct

SEQ ID NO: 4967070 - DNA, 25 bp, Homo sapien
aaagcctccaagtgtaagccttgcg

SEQ ID NO: 4967071 - DNA, 25 bp, Homo sapien
gccttgcgacttgtgtcttgctgta

SEQ ID NO: 4967072 - DNA, 25 bp, Homo sapien
agtgtaagccttgcgacttgtgtct

SEQ ID NO: 4967073 - DNA, 25 bp, Homo sapien
tgtcttgctgtacatgttgcccttt

SEQ ID NO: 4967074 - DNA, 25 bp, Homo sapien
tgttcttgtttttgactctttcctg

SEQ ID NO: 4967075 - DNA, 25 bp, Homo sapien
tcttgtttttgactctttcctgcct

SEQ ID NO: 4967076 - DNA, 25 bp, Homo sapien
ttgtttttgactctttcctgccttc

SEQ ID NO: 4967077 - DNA, 25 bp, Homo sapien
tgtttttgactctttcctgccttcc

SEQ ID NO: 4967078 - DNA, 25 bp, Homo sapien
tctgtttagggacgagggacatccc

SEQ ID NO: 4967079 - DNA, 25 bp, Homo sapien
ttcttgccaccaccccgaatttctc

SEQ ID NO: 4967080 - DNA, 25 bp, Homo sapien
catccagatgggttccttctgttta

SEQ ID NO: 4967081 - DNA, 25 bp, Homo sapien
tccttctgtttagggacgagggaca

SEQ ID NO: 4967082 - DNA, 25 bp, Homo sapien
tgaattggtacaaaaatctccctct

SEQ ID NO: 4967083 - DNA, 25 bp, Homo sapien
tattgagtccagaaagaaatgcctg

SEQ ID NO: 4967084 - DNA, 25 bp, Homo sapien
tggctgggatttgctttacagagaa

SEQ ID NO: 4967085 - DNA, 25 bp, Homo sapien
agaaggaggccttgcaaagagaaat

SEQ ID NO: 4967086 - DNA, 25 bp, Homo sapien
tgctggctctgcgtttcccaggtca

SEQ ID NO: 4967087 - DNA, 25 bp, Homo sapien
tggctctgcgtttcccaggtcacag

SEQ ID NO: 4967088 - DNA, 25 bp, Homo sapien
gctggctctgcgtttcccaggtcac

SEQ ID NO: 4967089 - DNA, 25 bp, Homo sapien
ctggctctgcgtttcccaggtcaca

SEQ ID NO: 4967090 - DNA, 25 bp, Homo sapien
cacagccaaatattctcggtttaaa

SEQ ID NO: 4967091 - DNA, 25 bp, Homo sapien
atggcgccgcatgtagaggaaaaca

SEQ ID NO: 4967092 - DNA, 25 bp, Homo sapien
gaaatggcgccgcatgtagaggaaa

SEQ ID NO: 4967093 - DNA, 25 bp, Homo sapien
gcagaagataatattattgccatta

SEQ ID NO: 4967094 - DNA, 25 bp, Homo sapien
tgtggaacatacacctgtagctctg

SEQ ID NO: 4967095 - DNA, 25 bp, Homo sapien
cggaaggacagacacgacttgccaa

SEQ ID NO: 4967096 - DNA, 25 bp, Homo sapien
agtagtgagcactcccatgtggtag

SEQ ID NO: 4967097 - DNA, 25 bp, Homo sapien
aacacttaccctgtgcgtcggtgca

SEQ ID NO: 4967098 - DNA, 25 bp, Homo sapien
ggtgcatgccggatctgcacactct

SEQ ID NO: 4967099 - DNA, 25 bp, Homo sapien
gatctccagggcttgggaaccactg

SEQ ID NO: 4967100 - DNA, 25 bp, Homo sapien
ggtctgtgactctgtattcgaatct

SEQ ID NO: 4967101 - DNA, 25 bp, Homo sapien
tcatttctgctcacctgaactccag

SEQ ID NO: 4967102 - DNA, 25 bp, Homo sapien
tgggtagcaccgcacagcagagatg

SEQ ID NO: 4967103 - DNA, 25 bp, Homo sapien
gtccctgggtagcaccgcacagcag

SEQ ID NO: 4967104 - DNA, 25 bp, Homo sapien
ccctgggtagcaccgcacagcagag

SEQ ID NO: 4967105 - DNA, 25 bp, Homo sapien
ctggtccctgggtagcaccgcacag

SEQ ID NO: 4967106 - DNA, 25 bp, Homo sapien
tgagtaccagccttgtcacttctcc

SEQ ID NO: 4967107 - DNA, 25 bp, Homo sapien
cctccctcctgagtaccagccttgt

SEQ ID NO: 4967108 - DNA, 25 bp, Homo sapien
ggctccctggatgtgcatcaggcac

SEQ ID NO: 4967109 - DNA, 25 bp, Homo sapien
gctgtggctccctggatgtgcatca

SEQ ID NO: 4967110 - DNA, 25 bp, Homo sapien
ctgctccttgctgcttttccggtgc

SEQ ID NO: 4967111 - DNA, 25 bp, Homo sapien
cagttggactccctgtctgctcctt

SEQ ID NO: 4967112 - DNA, 25 bp, Homo sapien
aactgtccccagttggactccctgt

SEQ ID NO: 4967113 - DNA, 25 bp, Homo sapien
tccttgctgcttttccggtgcccag

SEQ ID NO: 4967114 - DNA, 25 bp, Homo sapien
agaaccctccacgacgcggcctatt

SEQ ID NO: 4967115 - DNA, 25 bp, Homo sapien
tgccccagcccagacttgcattgtc

SEQ ID NO: 4967116 - DNA, 25 bp, Homo sapien
gaatcagcccaagtgtcagaaccct

SEQ ID NO: 4967117 - DNA, 25 bp, Homo sapien
tcattgtgccgccttcttcctctga

SEQ ID NO: 4967118 - DNA, 25 bp, Homo sapien
ctctgcaagcagatgccgggagcct

SEQ ID NO: 4967119 - DNA, 25 bp, Homo sapien
tgagcagagcggagggatctcctaa

SEQ ID NO: 4967120 - DNA, 25 bp, Homo sapien
gggccgatctaatgcctggcactga

SEQ ID NO: 4967121 - DNA, 25 bp, Homo sapien
catttctcctaaggacacgggtgcc

SEQ ID NO: 4967122 - DNA, 25 bp, Homo sapien
actgatgaatgcagaactgctctgg

SEQ ID NO: 4967123 - DNA, 25 bp, Homo sapien
ctgatgaatgcagaactgctctggt

SEQ ID NO: 4967124 - DNA, 25 bp, Homo sapien
tgatgaatgcagaactgctctggtt

SEQ ID NO: 4967125 - DNA, 25 bp, Homo sapien
gatgaatgcagaactgctctggttg

SEQ ID NO: 4967126 - DNA, 25 bp, Homo sapien
gactctccgtgattgttgggtgaag

SEQ ID NO: 4967127 - DNA, 25 bp, Homo sapien
tgagggttctgtctttgactctccg

SEQ ID NO: 4967128 - DNA, 25 bp, Homo sapien
aattccttgcttttagagcgtctta

SEQ ID NO: 4967129 - DNA, 25 bp, Homo sapien
tgattgttgggtgaagccatttgct

SEQ ID NO: 4967130 - DNA, 25 bp, Homo sapien
tcaaaccaagggatagtatggaccc

SEQ ID NO: 4967131 - DNA, 25 bp, Homo sapien
tccttcctcttttgtagtgtcaaac

SEQ ID NO: 4967132 - DNA, 25 bp, Homo sapien
tgtagtgtcaaaccaagggatagta

SEQ ID NO: 4967133 - DNA, 25 bp, Homo sapien
aagggatagtatggacccagcagaa

SEQ ID NO: 4967134 - DNA, 25 bp, Homo sapien
cttgagtttgccctcaggtacaggg

SEQ ID NO: 4967135 - DNA, 25 bp, Homo sapien
ttgagtttgccctcaggtacagggc

SEQ ID NO: 4967136 - DNA, 25 bp, Homo sapien
cagggtcgactctgctgcttattag

SEQ ID NO: 4967137 - DNA, 25 bp, Homo sapien
tcatggagctgggagaccttcgtgc

SEQ ID NO: 4967138 - DNA, 25 bp, Homo sapien
cttcttgatgatgcatcttcatgga

SEQ ID NO: 4967139 - DNA, 25 bp, Homo sapien
gcttattagctcaggctcggtgccc

SEQ ID NO: 4967140 - DNA, 25 bp, Homo sapien
aatggctacctccattcccttgagc

SEQ ID NO: 4967141 - DNA, 25 bp, Homo sapien
tcctcgagatttgctctgatctcac

SEQ ID NO: 4967142 - DNA, 25 bp, Homo sapien
gctggctggaatggctacctccatt

SEQ ID NO: 4967143 - DNA, 25 bp, Homo sapien
gtggctggctggaatggctacctcc

SEQ ID NO: 4967144 - DNA, 25 bp, Homo sapien
ggctgagagtaaatcctgttttgct

SEQ ID NO: 4967145 - DNA, 25 bp, Homo sapien
aaatcctgttttgctcccttttgtg

SEQ ID NO: 4967146 - DNA, 25 bp, Homo sapien
gagagtaaatcctgttttgctccct

SEQ ID NO: 4967147 - DNA, 25 bp, Homo sapien
atggctgagagtaaatcctgttttg

SEQ ID NO: 4967148 - DNA, 25 bp, Homo sapien
agaggccctgttagcctcttcctcc

SEQ ID NO: 4967149 - DNA, 25 bp, Homo sapien
tgaaagccaatgagtattctgccag

SEQ ID NO: 4967150 - DNA, 25 bp, Homo sapien
aagccaatgagtattctgccaggtc

SEQ ID NO: 4967151 - DNA, 25 bp, Homo sapien
gaaagccaatgagtattctgccagg

SEQ ID NO: 4967152 - DNA, 25 bp, Homo sapien
aggtgaaagccaatgagtattctgc

SEQ ID NO: 4967153 - DNA, 25 bp, Homo sapien
aaaagttggacgttagctatcttca

SEQ ID NO: 4967154 - DNA, 25 bp, Homo sapien
gaaaagttggacgttagctatcttc

SEQ ID NO: 4967155 - DNA, 25 bp, Homo sapien
aaagttggacgttagctatcttcat

SEQ ID NO: 4967156 - DNA, 25 bp, Homo sapien
tccatttaacatcaggtccctggcc

SEQ ID NO: 4967157 - DNA, 25 bp, Homo sapien
tgaacttccatttaacatcaggtcc

SEQ ID NO: 4967158 - DNA, 25 bp, Homo sapien
gggctggcccatcaagtacctcaat

SEQ ID NO: 4967159 - DNA, 25 bp, Homo sapien
ctcaatatattgctccctgatgagg

SEQ ID NO: 4967160 - DNA, 25 bp, Homo sapien
gatacattctgttgggatacagtcc

SEQ ID NO: 4967161 - DNA, 25 bp, Homo sapien
cctgctggagatgtaactgtcgtga

SEQ ID NO: 4967162 - DNA, 25 bp, Homo sapien
gctctgataggtggttttacttgca

SEQ ID NO: 4967163 - DNA, 25 bp, Homo sapien
catgaagtctgttaatgcgggatcg

SEQ ID NO: 4967164 - DNA, 25 bp, Homo sapien
caggccacgatttcgtcatcctgct

SEQ ID NO: 4967165 - DNA, 25 bp, Homo sapien
cgtcatcctgctttacggatggcat

SEQ ID NO: 4967166 - DNA, 25 bp, Homo sapien
gcattgtaaccaagttggctctcct

SEQ ID NO: 4967167 - DNA, 25 bp, Homo sapien
gaagctttgcattgtaaccaagttg

SEQ ID NO: 4967168 - DNA, 25 bp, Homo sapien
gatggatcgttgaggtgactgctat

SEQ ID NO: 4967169 - DNA, 25 bp, Homo sapien
gaggtgactgctatgcatagaaatg

SEQ ID NO: 4967170 - DNA, 25 bp, Homo sapien
gtttccagtgacagaaaaggattta

SEQ ID NO: 4967171 - DNA, 25 bp, Homo sapien
taagttacccattgcatgtgtttcc

SEQ ID NO: 4967172 - DNA, 25 bp, Homo sapien
gtggctgttgcgcagcttctgtggc

SEQ ID NO: 4967173 - DNA, 25 bp, Homo sapien
tggctgttgcgcagcttctgtggcc

SEQ ID NO: 4967174 - DNA, 25 bp, Homo sapien
ggctgttgcgcagcttctgtggccc

SEQ ID NO: 4967175 - DNA, 25 bp, Homo sapien
cactgctggtatagtcgggttgcca

SEQ ID NO: 4967176 - DNA, 25 bp, Homo sapien
tccggaagtgagtatgacattctgc

SEQ ID NO: 4967177 - DNA, 25 bp, Homo sapien
tgccctattcccttggagcagctct

SEQ ID NO: 4967178 - DNA, 25 bp, Homo sapien
ccacagtaagggagtactgcagcaa

SEQ ID NO: 4967179 - DNA, 25 bp, Homo sapien
gtaggaccttggagaccagcagcct

SEQ ID NO: 4967180 - DNA, 25 bp, Homo sapien
agacacaaggcaagtcatactcctt

SEQ ID NO: 4967181 - DNA, 25 bp, Homo sapien
tggaggataaaggtagcggctcgtg

SEQ ID NO: 4967182 - DNA, 25 bp, Homo sapien
cacaggagggaattagttcaaccaa

SEQ ID NO: 4967183 - DNA, 25 bp, Homo sapien
ccaagtgctgttagtaggattccag

SEQ ID NO: 4967184 - DNA, 25 bp, Homo sapien
cctctccaagtgctgttagtaggat

SEQ ID NO: 4967185 - DNA, 25 bp, Homo sapien
gtgctgttagtaggattccaggcat

SEQ ID NO: 4967186 - DNA, 25 bp, Homo sapien
ctccaagtgctgttagtaggattcc

SEQ ID NO: 4967187 - DNA, 25 bp, Homo sapien
caacacttagacatgcgaacaagca

SEQ ID NO: 4967188 - DNA, 25 bp, Homo sapien
caccaagctcatacagggaaccaca

SEQ ID NO: 4967189 - DNA, 25 bp, Homo sapien
gtgatagttactgtggagcagccag

SEQ ID NO: 4967190 - DNA, 25 bp, Homo sapien
gataaagtgaattgcccagagctgc

SEQ ID NO: 4967191 - DNA, 25 bp, Homo sapien
caaactcatcgtgtctgtcctgaga

SEQ ID NO: 4967192 - DNA, 25 bp, Homo sapien
taatgatgcaattacgtcatcaccc

SEQ ID NO: 4967193 - DNA, 25 bp, Homo sapien
gctgattccgggtggttggcaaact

SEQ ID NO: 4967194 - DNA, 25 bp, Homo sapien
gggtttgaactggacatcctaatga

SEQ ID NO: 4967195 - DNA, 25 bp, Homo sapien
atgaatattttcgtgtctgtctctc

SEQ ID NO: 4967196 - DNA, 25 bp, Homo sapien
ttgtctcggagacggtgttttcctc

SEQ ID NO: 4967197 - DNA, 25 bp, Homo sapien
taccatttttctgcgtgctctcact

SEQ ID NO: 4967198 - DNA, 25 bp, Homo sapien
ggcaggcttgcgttattggcctaga

SEQ ID NO: 4967199 - DNA, 25 bp, Homo sapien
atttcatggtggtcgttgggtccgc

SEQ ID NO: 4967200 - DNA, 25 bp, Homo sapien
ggatttgagcgtttgccattgcaag

SEQ ID NO: 4967201 - DNA, 25 bp, Homo sapien
ccattgcaagcatagtgctgtgtca

SEQ ID NO: 4967202 - DNA, 25 bp, Homo sapien
ttgggtccgcctaaaggatttgagc

SEQ ID NO: 4967203 - DNA, 25 bp, Homo sapien
tggctaaagtcacggtcaaacctaa

SEQ ID NO: 4967204 - DNA, 25 bp, Homo sapien
tgctaaccacctgccatcatgagga

SEQ ID NO: 4967205 - DNA, 25 bp, Homo sapien
taagctaataggagtctgacccgag

SEQ ID NO: 4967206 - DNA, 25 bp, Homo sapien
agtatcacacgtggaaccgcagaca

SEQ ID NO: 4967207 - DNA, 25 bp, Homo sapien
tctaaagctgataaagtgtgtagcc

SEQ ID NO: 4967208 - DNA, 25 bp, Homo sapien
agttaaaacctgacgatttctgcag

SEQ ID NO: 4967209 - DNA, 25 bp, Homo sapien
ttgtgattgtgacccatgagtggag

SEQ ID NO: 4967210 - DNA, 25 bp, Homo sapien
gctaaaataaatcgacagtgtctca

SEQ ID NO: 4967211 - DNA, 25 bp, Homo sapien
ggccacgggattctaattctaagca

SEQ ID NO: 4967212 - DNA, 25 bp, Homo sapien
gctgctacgtccaggccacgggatt

SEQ ID NO: 4967213 - DNA, 25 bp, Homo sapien
tacgtccaggccacgggattctaat

SEQ ID NO: 4967214 - DNA, 25 bp, Homo sapien
atgtcacaggctgctacgtccaggc

SEQ ID NO: 4967215 - DNA, 25 bp, Homo sapien
ggcagagcactgtgaaccagtcaaa

SEQ ID NO: 4967216 - DNA, 25 bp, Homo sapien
cactgcatgctgatggcagagcact

SEQ ID NO: 4967217 - DNA, 25 bp, Homo sapien
gcactgtgaaccagtcaaatcgagt

SEQ ID NO: 4967218 - DNA, 25 bp, Homo sapien
cctttcactgcatgctgatggcaga

SEQ ID NO: 4967219 - DNA, 25 bp, Homo sapien
gcttcccgttactggcgggcgtgtc

SEQ ID NO: 4967220 - DNA, 25 bp, Homo sapien
ctcctcgaagtccagatgtgccgtg

SEQ ID NO: 4967221 - DNA, 25 bp, Homo sapien
cttggttcaacttctccgtagggct

SEQ ID NO: 4967222 - DNA, 25 bp, Homo sapien
tccatctagtcctcggtgagcctct

SEQ ID NO: 4967223 - DNA, 25 bp, Homo sapien
ggctctcagcccgatccccaactct

SEQ ID NO: 4967224 - DNA, 25 bp, Homo sapien
gagagaagggctctcagcccgatcc

SEQ ID NO: 4967225 - DNA, 25 bp, Homo sapien
agagaagggctctcagcccgatccc

SEQ ID NO: 4967226 - DNA, 25 bp, Homo sapien
tctcagcccgatccccaactctggc

SEQ ID NO: 4967227 - DNA, 25 bp, Homo sapien
gcaggtacttcaactctctcgcgag

SEQ ID NO: 4967228 - DNA, 25 bp, Homo sapien
caccagtctcttgtccgttcggttt

SEQ ID NO: 4967229 - DNA, 25 bp, Homo sapien
aactctctcgcgagttccctcagtt

SEQ ID NO: 4967230 - DNA, 25 bp, Homo sapien
tggtcgtaaacctccacctagcctg

SEQ ID NO: 4967231 - DNA, 25 bp, Homo sapien
ccaactccaaaggacagggacagcc

SEQ ID NO: 4967232 - DNA, 25 bp, Homo sapien
ccatagtaggttgcaggtcctgcct

SEQ ID NO: 4967233 - DNA, 25 bp, Homo sapien
tgtcttaatccagagcaccaactcc

SEQ ID NO: 4967234 - DNA, 25 bp, Homo sapien
gggacagcctgtacagcgaagaatc

SEQ ID NO: 4967235 - DNA, 25 bp, Homo sapien
tggccatggctaaattctgtgaggc

SEQ ID NO: 4967236 - DNA, 25 bp, Homo sapien
tgcaggtgtggcttcttcagagact

SEQ ID NO: 4967237 - DNA, 25 bp, Homo sapien
catccatggggtgcaggtgtggctt

SEQ ID NO: 4967238 - DNA, 25 bp, Homo sapien
tcatccatggggtgcaggtgtggct

SEQ ID NO: 4967239 - DNA, 25 bp, Homo sapien
aggtgtggcttcttcagagactgac

SEQ ID NO: 4967240 - DNA, 25 bp, Homo sapien
acactgtgtggctggtatcttggac

SEQ ID NO: 4967241 - DNA, 25 bp, Homo sapien
ccttcttgggctgggtaccttctgc

SEQ ID NO: 4967242 - DNA, 25 bp, Homo sapien
cactgttgatgtccctgaatgaggg

SEQ ID NO: 4967243 - DNA, 25 bp, Homo sapien
tgtgctctggcgtacaccctacagt

SEQ ID NO: 4967244 - DNA, 25 bp, Homo sapien
cgtcagaagtatttaggcaagaagt

SEQ ID NO: 4967245 - DNA, 25 bp, Homo sapien
agaaaacatatatccctgggcactg

SEQ ID NO: 4967246 - DNA, 25 bp, Homo sapien
tccagaaagcctccaacgtcagaag

SEQ ID NO: 4967247 - DNA, 25 bp, Homo sapien
catagaaaacatatatccctgggca

SEQ ID NO: 4967248 - DNA, 25 bp, Homo sapien
tgtgagactttagcctcttccaacg

SEQ ID NO: 4967249 - DNA, 25 bp, Homo sapien
gagtctccgagattcctcccatggg

SEQ ID NO: 4967250 - DNA, 25 bp, Homo sapien
caacgctccctcagttatttctggg

SEQ ID NO: 4967251 - DNA, 25 bp, Homo sapien
tcccatgggttctggtgcaagtcag

SEQ ID NO: 4967252 - DNA, 25 bp, Homo sapien
agtctcatttggtattgattaagtc

SEQ ID NO: 4967253 - DNA, 25 bp, Homo sapien
tattgattaagtctacttgatatca

SEQ ID NO: 4967254 - DNA, 25 bp, Homo sapien
catttggtattgattaagtctactt

SEQ ID NO: 4967255 - DNA, 25 bp, Homo sapien
tggtattgattaagtctacttgata

SEQ ID NO: 4967256 - DNA, 25 bp, Homo sapien
ccaactagttttgggatctcgacct

SEQ ID NO: 4967257 - DNA, 25 bp, Homo sapien
cagtagcactgggaatgtgttgaca

SEQ ID NO: 4967258 - DNA, 25 bp, Homo sapien
gagaatgtaactcagctctgtgcac

SEQ ID NO: 4967259 - DNA, 25 bp, Homo sapien
gatctcatgcttacaggatggaaac

SEQ ID NO: 4967260 - DNA, 25 bp, Homo sapien
tctcagctctttgtttgtcccatcc

SEQ ID NO: 4967261 - DNA, 25 bp, Homo sapien
tcagctctttgtttgtcccatccct

SEQ ID NO: 4967262 - DNA, 25 bp, Homo sapien
ttctcagctctttgtttgtcccatc

SEQ ID NO: 4967263 - DNA, 25 bp, Homo sapien
agctctttgtttgtcccatccctgg

SEQ ID NO: 4967264 - DNA, 25 bp, Homo sapien
tctgagactggatagtactgaacct

SEQ ID NO: 4967265 - DNA, 25 bp, Homo sapien
cagactgaggttgacagtgggtaac

SEQ ID NO: 4967266 - DNA, 25 bp, Homo sapien
tggacggctcctaagtgactgacgg

SEQ ID NO: 4967267 - DNA, 25 bp, Homo sapien
tgagggtgatttgaccatgagcact

SEQ ID NO: 4967268 - DNA, 25 bp, Homo sapien
cattagtgggtgcataggctcctgg

SEQ ID NO: 4967269 - DNA, 25 bp, Homo sapien
ggcaatgcctcctttgcactcagca

SEQ ID NO: 4967270 - DNA, 25 bp, Homo sapien
caatggcaatgcctcctttgcactc

SEQ ID NO: 4967271 - DNA, 25 bp, Homo sapien
ctagccaaacatgtgcttttcatta

SEQ ID NO: 4967272 - DNA, 25 bp, Homo sapien
cacattgtcgtattttgccgcctct

SEQ ID NO: 4967273 - DNA, 25 bp, Homo sapien
ttgtcgtattttgccgcctcttcct

SEQ ID NO: 4967274 - DNA, 25 bp, Homo sapien
ttcttaatgtagcccacccccatgg

SEQ ID NO: 4967275 - DNA, 25 bp, Homo sapien
cctccacattgtcgtattttgccgc

SEQ ID NO: 4967276 - DNA, 25 bp, Homo sapien
gttttgcggaggcaaagatagcctc

SEQ ID NO: 4967277 - DNA, 25 bp, Homo sapien
cagccctttagttttgcggaggcaa

SEQ ID NO: 4967278 - DNA, 25 bp, Homo sapien
ttccacagccctttagttttgcgga

SEQ ID NO: 4967279 - DNA, 25 bp, Homo sapien
caaagatagcctctggtgatctgca

SEQ ID NO: 4967280 - DNA, 25 bp, Homo sapien
gctaaatagaaagggtctagtgttc

SEQ ID NO: 4967281 - DNA, 25 bp, Homo sapien
gaagtgacggtccattttgctagta

SEQ ID NO: 4967282 - DNA, 25 bp, Homo sapien
gggacatctgtactaatttcaaaca

SEQ ID NO: 4967283 - DNA, 25 bp, Homo sapien
aatcaaatacgcttaaatgtcaagg

SEQ ID NO: 4967284 - DNA, 25 bp, Homo sapien
tcatccacagaaaggattgcactgt

SEQ ID NO: 4967285 - DNA, 25 bp, Homo sapien
gccacagaagaatgtgtagtccagt

SEQ ID NO: 4967286 - DNA, 25 bp, Homo sapien
gggaaggtaagataactgccacaga

SEQ ID NO: 4967287 - DNA, 25 bp, Homo sapien
tagtccagtggtgcttaaaccgtgc

SEQ ID NO: 4967288 - DNA, 25 bp, Homo sapien
ggtggcgtcggcctggtggcacatc

SEQ ID NO: 4967289 - DNA, 25 bp, Homo sapien
gtggcgtcggcctggtggcacatcc

SEQ ID NO: 4967290 - DNA, 25 bp, Homo sapien
ggcgtcggcctggtggcacatccct

SEQ ID NO: 4967291 - DNA, 25 bp, Homo sapien
tggcgtcggcctggtggcacatccc

SEQ ID NO: 4967292 - DNA, 25 bp, Homo sapien
taagcgagactgacttccctgtgcc

SEQ ID NO: 4967293 - DNA, 25 bp, Homo sapien
tctgacacagaagagaatgctccct

SEQ ID NO: 4967294 - DNA, 25 bp, Homo sapien
ttgataagcctaactctgcagccgg

SEQ ID NO: 4967295 - DNA, 25 bp, Homo sapien
tatagcgtgcataccaaactctcag

SEQ ID NO: 4967296 - DNA, 25 bp, Homo sapien
tctagaatttgagggacactaactt

SEQ ID NO: 4967297 - DNA, 25 bp, Homo sapien
acttggcgctggagcacagtaaccc

SEQ ID NO: 4967298 - DNA, 25 bp, Homo sapien
ggactatgtctctgcccttgttatt

SEQ ID NO: 4967299 - DNA, 25 bp, Homo sapien
tgcagggtgattttcatgtctatga

SEQ ID NO: 4967300 - DNA, 25 bp, Homo sapien
aatcgagctatttgtccctgaaggc

SEQ ID NO: 4967301 - DNA, 25 bp, Homo sapien
tgatgattctcaattaacttttaag

SEQ ID NO: 4967302 - DNA, 25 bp, Homo sapien
gggaggttgtatgaaactgatttac

SEQ ID NO: 4967303 - DNA, 25 bp, Homo sapien
ctcacaccctacacgtggctgatga

SEQ ID NO: 4967304 - DNA, 25 bp, Homo sapien
tcagatggatgcttgataaagaagt

SEQ ID NO: 4967305 - DNA, 25 bp, Homo sapien
gaccagtggtgggtttcatgctccc

SEQ ID NO: 4967306 - DNA, 25 bp, Homo sapien
caaagacagtgggtcgcaggaccag

SEQ ID NO: 4967307 - DNA, 25 bp, Homo sapien
taaggacaacagtcgtggacgggaa

SEQ ID NO: 4967308 - DNA, 25 bp, Homo sapien
agagttgggccaagaacctcatccc

SEQ ID NO: 4967309 - DNA, 25 bp, Homo sapien
tctgagtcacgagagaccatttggc

SEQ ID NO: 4967310 - DNA, 25 bp, Homo sapien
ccgtcagcctgagtcgtggtgagct

SEQ ID NO: 4967311 - DNA, 25 bp, Homo sapien
cagacttcagtagagcgggttctca

SEQ ID NO: 4967312 - DNA, 25 bp, Homo sapien
tcaagtctgtcccttttgcttccat

SEQ ID NO: 4967313 - DNA, 25 bp, Homo sapien
ctggagcttccatgagagtctggaa

SEQ ID NO: 4967314 - DNA, 25 bp, Homo sapien
tggagcttccatgagagtctggaag

SEQ ID NO: 4967315 - DNA, 25 bp, Homo sapien
gcttgtgacttgttatacccagaga

SEQ ID NO: 4967316 - DNA, 25 bp, Homo sapien
catcatggatgcattataggcagca

SEQ ID NO: 4967317 - DNA, 25 bp, Homo sapien
ggagaacacacaagagagcgcagct

SEQ ID NO: 4967318 - DNA, 25 bp, Homo sapien
gggaaggtcacgtttagcaagctaa

SEQ ID NO: 4967319 - DNA, 25 bp, Homo sapien
cactgtgaggcaatacaagggtctt

SEQ ID NO: 4967320 - DNA, 25 bp, Homo sapien
tctagattggactgaagctggtgca

SEQ ID NO: 4967321 - DNA, 25 bp, Homo sapien
taaggctgcatttagcaacagggat

SEQ ID NO: 4967322 - DNA, 25 bp, Homo sapien
tatacttgcaacctgagagtcccca

SEQ ID NO: 4967323 - DNA, 25 bp, Homo sapien
gctaggacactaatatggcagggct

SEQ ID NO: 4967324 - DNA, 25 bp, Homo sapien
cattccgatgggttaagcattgctc

SEQ ID NO: 4967325 - DNA, 25 bp, Homo sapien
tactcgttgggagaagatcctttac

SEQ ID NO: 4967326 - DNA, 25 bp, Homo sapien
gaaggactctgtgaacaagttccag

SEQ ID NO: 4967327 - DNA, 25 bp, Homo sapien
ctgggctcagtagagactttcgaac

SEQ ID NO: 4967328 - DNA, 25 bp, Homo sapien
agagagtggtaagaggtgcacacca

SEQ ID NO: 4967329 - DNA, 25 bp, Homo sapien
gactttcgaaccatcagagagtggt

SEQ ID NO: 4967330 - DNA, 25 bp, Homo sapien
tcagtagagactttcgaaccatcag

SEQ ID NO: 4967331 - DNA, 25 bp, Homo sapien
atgtggctgcacgttgtttgtacct

SEQ ID NO: 4967332 - DNA, 25 bp, Homo sapien
tttcacttggaagtaattgtgtaag

SEQ ID NO: 4967333 - DNA, 25 bp, Homo sapien
ctttcacttggaagtaattgtgtaa

SEQ ID NO: 4967334 - DNA, 25 bp, Homo sapien
aaaatgtggctgcacgttgtttgta

SEQ ID NO: 4967335 - DNA, 25 bp, Homo sapien
gtgggtatgcaatgacccacaggct

SEQ ID NO: 4967336 - DNA, 25 bp, Homo sapien
ttttggttaatctgggaacatcctc

SEQ ID NO: 4967337 - DNA, 25 bp, Homo sapien
tagagactgtatgaccccacaatgc

SEQ ID NO: 4967338 - DNA, 25 bp, Homo sapien
tgtgtttttcatgccaagtgcaggg

SEQ ID NO: 4967339 - DNA, 25 bp, Homo sapien
cacagggatgacttaagataggcac

SEQ ID NO: 4967340 - DNA, 25 bp, Homo sapien
tttgaatgcacctacaggatccggc

SEQ ID NO: 4967341 - DNA, 25 bp, Homo sapien
tgtcgagaaacacagtggacctggg

SEQ ID NO: 4967342 - DNA, 25 bp, Homo sapien
tcggcccctagaacagtgacatgct

SEQ ID NO: 4967343 - DNA, 25 bp, Homo sapien
gactgcctaggtctccagctacctg

SEQ ID NO: 4967344 - DNA, 25 bp, Homo sapien
tcacttaggaacaagcgatgtcaca

SEQ ID NO: 4967345 - DNA, 25 bp, Homo sapien
cttaaccatgaaacctactgggcca

SEQ ID NO: 4967346 - DNA, 25 bp, Homo sapien
tacatagccatagcttccagctgac

SEQ ID NO: 4967347 - DNA, 25 bp, Homo sapien
cttggtgaaatatctacaatccatt

SEQ ID NO: 4967348 - DNA, 25 bp, Homo sapien
gcattctgaaccctttctccacggt

SEQ ID NO: 4967349 - DNA, 25 bp, Homo sapien
tctccacggtggcatcataaaattc

SEQ ID NO: 4967350 - DNA, 25 bp, Homo sapien
taaaattcacatgcttgatatgctc

SEQ ID NO: 4967351 - DNA, 25 bp, Homo sapien
ccagcgtgccatagtatgtcctcct

SEQ ID NO: 4967352 - DNA, 25 bp, Homo sapien
tgaactgtggttggtcatcaataac

SEQ ID NO: 4967353 - DNA, 25 bp, Homo sapien
aacacccgatatgtgtcctgtcagc

SEQ ID NO: 4967354 - DNA, 25 bp, Homo sapien
cttgcaaggccttaatcacattcca

SEQ ID NO: 4967355 - DNA, 25 bp, Homo sapien
attgcaatgtggaaagagatttggt

SEQ ID NO: 4967356 - DNA, 25 bp, Homo sapien
cattgcaatgtggaaagagatttgg

SEQ ID NO: 4967357 - DNA, 25 bp, Homo sapien
ccattgcaatgtggaaagagatttg

SEQ ID NO: 4967358 - DNA, 25 bp, Homo sapien
gtttgcaaactcctgcgttagacag

SEQ ID NO: 4967359 - DNA, 25 bp, Homo sapien
taagtgaacagcctctatctttgca

SEQ ID NO: 4967360 - DNA, 25 bp, Homo sapien
tccaacatgccacaggtgaagctca

SEQ ID NO: 4967361 - DNA, 25 bp, Homo sapien
gatcataaggctcattccaacatgc

SEQ ID NO: 4967362 - DNA, 25 bp, Homo sapien
gccctacccgctgcctgatgagttg

SEQ ID NO: 4967363 - DNA, 25 bp, Homo sapien
agcaggtcccctctttgattggtcc

SEQ ID NO: 4967364 - DNA, 25 bp, Homo sapien
ttagctgcagggaaatgctgttccg

SEQ ID NO: 4967365 - DNA, 25 bp, Homo sapien
gctccaaacttagagtgtgtgctca

SEQ ID NO: 4967366 - DNA, 25 bp, Homo sapien
cttgatggttcttgtcaaggctggg

SEQ ID NO: 4967367 - DNA, 25 bp, Homo sapien
ggaacttgatggttcttgtcaaggc

SEQ ID NO: 4967368 - DNA, 25 bp, Homo sapien
gaccttaatggttggaacttgatgg

SEQ ID NO: 4967369 - DNA, 25 bp, Homo sapien
gggagatggtgtggaccttaatggt

SEQ ID NO: 4967370 - DNA, 25 bp, Homo sapien
aaacgccatccgtcttggagatcct

SEQ ID NO: 4967371 - DNA, 25 bp, Homo sapien
ggaggattggtctttggacactgta

SEQ ID NO: 4967372 - DNA, 25 bp, Homo sapien
agaaggtctctcttgatcccacggg

SEQ ID NO: 4967373 - DNA, 25 bp, Homo sapien
gagatcctgtagaaggtctctcttg

SEQ ID NO: 4967374 - DNA, 25 bp, Homo sapien
cagagacactggattctcaagacat

SEQ ID NO: 4967375 - DNA, 25 bp, Homo sapien
tttagatatccgagccaaaatacta

SEQ ID NO: 4967376 - DNA, 25 bp, Homo sapien
gcgggtgcagggtgtagcccagggc

SEQ ID NO: 4967377 - DNA, 25 bp, Homo sapien
gggttgatgcagctgtttagatatc

SEQ ID NO: 4967378 - DNA, 25 bp, Homo sapien
ccatctcagagctcgcctgcactga

SEQ ID NO: 4967379 - DNA, 25 bp, Homo sapien
tccatctcagagctcgcctgcactg

SEQ ID NO: 4967380 - DNA, 25 bp, Homo sapien
catctcagagctcgcctgcactgac

SEQ ID NO: 4967381 - DNA, 25 bp, Homo sapien
catcacataggataaggtcaatgtc

SEQ ID NO: 4967382 - DNA, 25 bp, Homo sapien
tggccatcgtcaacttcgggagcct

SEQ ID NO: 4967383 - DNA, 25 bp, Homo sapien
aaatgatgacggcttttggcctggc

SEQ ID NO: 4967384 - DNA, 25 bp, Homo sapien
caatgtcgtttctaaagcagctggg

SEQ ID NO: 4967385 - DNA, 25 bp, Homo sapien
ggtggtgtacctgcgggaggtcctg

SEQ ID NO: 4967386 - DNA, 25 bp, Homo sapien
tggtggtgtacctgcgggaggtcct

SEQ ID NO: 4967387 - DNA, 25 bp, Homo sapien
tacctgcgggaggtcctgcccttct

SEQ ID NO: 4967388 - DNA, 25 bp, Homo sapien
gtgtacctgcgggaggtcctgccct

SEQ ID NO: 4967389 - DNA, 25 bp, Homo sapien
tgaggtggatagaacaggagtttat

SEQ ID NO: 4967390 - DNA, 25 bp, Homo sapien
gccggtcagactgaggtggatagaa

SEQ ID NO: 4967391 - DNA, 25 bp, Homo sapien
actgaggtggatagaacaggagttt

SEQ ID NO: 4967392 - DNA, 25 bp, Homo sapien
cggtcagactgaggtggatagaaca

SEQ ID NO: 4967393 - DNA, 25 bp, Homo sapien
agagcacagatgatatgctttccaa

SEQ ID NO: 4967394 - DNA, 25 bp, Homo sapien
gaacccaattaacagttcctgccag

SEQ ID NO: 4967395 - DNA, 25 bp, Homo sapien
ggtaggagaccaggttatctctctc

SEQ ID NO: 4967396 - DNA, 25 bp, Homo sapien
tctcactgtagtgcaagatgggagc

SEQ ID NO: 4967397 - DNA, 25 bp, Homo sapien
gtgtctttccttgaaacaccttcca

SEQ ID NO: 4967398 - DNA, 25 bp, Homo sapien
tggttgtttaaagctgggtgagtca

SEQ ID NO: 4967399 - DNA, 25 bp, Homo sapien
cactgctgcatggtgaactggttgt

SEQ ID NO: 4967400 - DNA, 25 bp, Homo sapien
tcaccaaaccccacaggtgtctttc

SEQ ID NO: 4967401 - DNA, 25 bp, Homo sapien
caaaggctgctgtcatgcagtgcgt

SEQ ID NO: 4967402 - DNA, 25 bp, Homo sapien
ggctaaggctgtgctcatctggtcc

SEQ ID NO: 4967403 - DNA, 25 bp, Homo sapien
gctgctggtcgcgtcagaacttgtg

SEQ ID NO: 4967404 - DNA, 25 bp, Homo sapien
tcttaataatacacgggccacacac

SEQ ID NO: 4967405 - DNA, 25 bp, Homo sapien
tgtattcagtgatacaccattagat

SEQ ID NO: 4967406 - DNA, 25 bp, Homo sapien
ctctttttgtattcagtgatacacc

SEQ ID NO: 4967407 - DNA, 25 bp, Homo sapien
gtgatacaccattagattctgcatc

SEQ ID NO: 4967408 - DNA, 25 bp, Homo sapien
tcagtgatacaccattagattctgc

SEQ ID NO: 4967409 - DNA, 25 bp, Homo sapien
ttcatagctcatcagtgagggcaat

SEQ ID NO: 4967410 - DNA, 25 bp, Homo sapien
caaaataagcttcggagtcagtctc

SEQ ID NO: 4967411 - DNA, 25 bp, Homo sapien
ttccatgggtgtcagagttgtgctc

SEQ ID NO: 4967412 - DNA, 25 bp, Homo sapien
gatgcttcgaggatggttatgtcag

SEQ ID NO: 4967413 - DNA, 25 bp, Homo sapien
agttcggtcattacataaagctgcc

SEQ ID NO: 4967414 - DNA, 25 bp, Homo sapien
ttactctggcttaaccgagagttcg

SEQ ID NO: 4967415 - DNA, 25 bp, Homo sapien
tctggcttaaccgagagttcggtca

SEQ ID NO: 4967416 - DNA, 25 bp, Homo sapien
taaccgagagttcggtcattacata

SEQ ID NO: 4967417 - DNA, 25 bp, Homo sapien
aagaaacttcagttgcctgtgattt

SEQ ID NO: 4967418 - DNA, 25 bp, Homo sapien
acttcagttgcctgtgatttcttct

SEQ ID NO: 4967419 - DNA, 25 bp, Homo sapien
cagttgcctgtgatttcttctctgc

SEQ ID NO: 4967420 - DNA, 25 bp, Homo sapien
ataagaaacttcagttgcctgtgat

SEQ ID NO: 4967421 - DNA, 25 bp, Homo sapien
cctaaagcggaatatggagaagacc

SEQ ID NO: 4967422 - DNA, 25 bp, Homo sapien
cacacacttcttgtagcacaatggg

SEQ ID NO: 4967423 - DNA, 25 bp, Homo sapien
cacaatgggaagacctaaagcggaa

SEQ ID NO: 4967424 - DNA, 25 bp, Homo sapien
agaagaccctatgaaagcccctggc

SEQ ID NO: 4967425 - DNA, 25 bp, Homo sapien
ggtgctcatcgaccctatgcccttg

SEQ ID NO: 4967426 - DNA, 25 bp, Homo sapien
ccctgcggtgctcatcgaccctatg

SEQ ID NO: 4967427 - DNA, 25 bp, Homo sapien
gctcatcgaccctatgcccttggat

SEQ ID NO: 4967428 - DNA, 25 bp, Homo sapien
ctgacccctgcggtgctcatcgacc

SEQ ID NO: 4967429 - DNA, 25 bp, Homo sapien
agcacagcaatctccacgtagatcc

SEQ ID NO: 4967430 - DNA, 25 bp, Homo sapien
catgagtgttatttagccttgtaga

SEQ ID NO: 4967431 - DNA, 25 bp, Homo sapien
tcatgagtgttatttagccttgtag

SEQ ID NO: 4967432 - DNA, 25 bp, Homo sapien
ttctcatgagtgttatttagccttg

SEQ ID NO: 4967433 - DNA, 25 bp, Homo sapien
gcccctgcagtcagatagttcttca

SEQ ID NO: 4967434 - DNA, 25 bp, Homo sapien
agttcttcactttggacctgtattc

SEQ ID NO: 4967435 - DNA, 25 bp, Homo sapien
aatactgagtgcatctccaagggca

SEQ ID NO: 4967436 - DNA, 25 bp, Homo sapien
tattcctctgacaatactgagtgca

SEQ ID NO: 4967437 - DNA, 25 bp, Homo sapien
aactgacccatccagttggaactct

SEQ ID NO: 4967438 - DNA, 25 bp, Homo sapien
cagttggaactctggactttttcca

SEQ ID NO: 4967439 - DNA, 25 bp, Homo sapien
gacccatccagttggaactctggac

SEQ ID NO: 4967440 - DNA, 25 bp, Homo sapien
ccatccagttggaactctggacttt

SEQ ID NO: 4967441 - DNA, 25 bp, Homo sapien
ccttcagcggttgttgccttctcac

SEQ ID NO: 4967442 - DNA, 25 bp, Homo sapien
ggaatggaagccttgaccctcggtc

SEQ ID NO: 4967443 - DNA, 25 bp, Homo sapien
gagaagctctcggaggcaggctaac

SEQ ID NO: 4967444 - DNA, 25 bp, Homo sapien
gacacctttgtacggagctttgcac

SEQ ID NO: 4967445 - DNA, 25 bp, Homo sapien
tctgccaaggtcaaggagcaaacag

SEQ ID NO: 4967446 - DNA, 25 bp, Homo sapien
attgtggaaggtctctctgagcatc

SEQ ID NO: 4967447 - DNA, 25 bp, Homo sapien
ttgtggaaggtctctctgagcatcc

SEQ ID NO: 4967448 - DNA, 25 bp, Homo sapien
gagaaggcacattcaatgaaaaaac

SEQ ID NO: 4967449 - DNA, 25 bp, Homo sapien
agtggaaaagatagttttaaatatg

SEQ ID NO: 4967450 - DNA, 25 bp, Homo sapien
tcttttcttagtaaacctctctctc

SEQ ID NO: 4967451 - DNA, 25 bp, Homo sapien
aaatgcaaataaccaagtggaaaag

SEQ ID NO: 4967452 - DNA, 25 bp, Homo sapien
ctattccatagaaggtggatgccac

SEQ ID NO: 4967453 - DNA, 25 bp, Homo sapien
tattccatagaaggtggatgccact

SEQ ID NO: 4967454 - DNA, 25 bp, Homo sapien
ggaatgcctgaagattggctgggca

SEQ ID NO: 4967455 - DNA, 25 bp, Homo sapien
tagtggaaagaggcagttggcattt

SEQ ID NO: 4967456 - DNA, 25 bp, Homo sapien
ggaggaggagtgtcccctttagcca

SEQ ID NO: 4967457 - DNA, 25 bp, Homo sapien
gaggagtgtcccctttagccagaac

SEQ ID NO: 4967458 - DNA, 25 bp, Homo sapien
ctgttaatgtggcagccagtgtggt

SEQ ID NO: 4967459 - DNA, 25 bp, Homo sapien
gtggtgtggaaggaacccaccaggc

SEQ ID NO: 4967460 - DNA, 25 bp, Homo sapien
tgagactgggatggaaacattgttg

SEQ ID NO: 4967461 - DNA, 25 bp, Homo sapien
tggggtagagagtgtggtgtggaag

SEQ ID NO: 4967462 - DNA, 25 bp, Homo sapien
ctgtggatagcacactcatccctgc

SEQ ID NO: 4967463 - DNA, 25 bp, Homo sapien
cagtccctattaaacatgggtgttt

SEQ ID NO: 4967464 - DNA, 25 bp, Homo sapien
tgggtcagtccctattaaacatggg

SEQ ID NO: 4967465 - DNA, 25 bp, Homo sapien
ttcctgggtcagtccctattaaaca

SEQ ID NO: 4967466 - DNA, 25 bp, Homo sapien
tctccaaaacagcacgtcatattta

SEQ ID NO: 4967467 - DNA, 25 bp, Homo sapien
tagtgcagaccgacagcccttttct

SEQ ID NO: 4967468 - DNA, 25 bp, Homo sapien
tcctctcccgcagcctagtgcagac

SEQ ID NO: 4967469 - DNA, 25 bp, Homo sapien
aaacagcacgtcatatttaagaatg

SEQ ID NO: 4967470 - DNA, 25 bp, Homo sapien
gaagcccagtgattccgagggctcc

SEQ ID NO: 4967471 - DNA, 25 bp, Homo sapien
agcccagtgattccgagggctcctg

SEQ ID NO: 4967472 - DNA, 25 bp, Homo sapien
agaagcccagtgattccgagggctc

SEQ ID NO: 4967473 - DNA, 25 bp, Homo sapien
cccagtgattccgagggctcctgtc

SEQ ID NO: 4967474 - DNA, 25 bp, Homo sapien
caaagctgtgatgtacttccaggag

SEQ ID NO: 4967475 - DNA, 25 bp, Homo sapien
tacagtcgaaaaagtgctctaggac

SEQ ID NO: 4967476 - DNA, 25 bp, Homo sapien
tacttgttgagcgagcacacgcatg

SEQ ID NO: 4967477 - DNA, 25 bp, Homo sapien
tgccctgttcatccaaagtgcctag

SEQ ID NO: 4967478 - DNA, 25 bp, Homo sapien
ccggctcctcgttgatctggcagat

SEQ ID NO: 4967479 - DNA, 25 bp, Homo sapien
tagctcacgccgatgtagcggtcga

SEQ ID NO: 4967480 - DNA, 25 bp, Homo sapien
ccgacttgtcggtcttgaggccaga

SEQ ID NO: 4967481 - DNA, 25 bp, Homo sapien
tagcctaggacctcgaagatggcgg

SEQ ID NO: 4967482 - DNA, 25 bp, Homo sapien
agatcaccccgagcagaatggcctt

SEQ ID NO: 4967483 - DNA, 25 bp, Homo sapien
gagaggatcactaggatgttaccca

SEQ ID NO: 4967484 - DNA, 25 bp, Homo sapien
ccttggaaatgttcaccggtgccgg

SEQ ID NO: 4967485 - DNA, 25 bp, Homo sapien
gagctgtcggaagcatttcccgaga

SEQ ID NO: 4967486 - DNA, 25 bp, Homo sapien
gaattcaaaactccagcgccagtct

SEQ ID NO: 4967487 - DNA, 25 bp, Homo sapien
cgggaatcaaaaggtctcggctgga

SEQ ID NO: 4967488 - DNA, 25 bp, Homo sapien
ggtgcgaagatccaggagactcctt

SEQ ID NO: 4967489 - DNA, 25 bp, Homo sapien
caaaccaaaagatcagccgtcgacg

SEQ ID NO: 4967490 - DNA, 25 bp, Homo sapien
ggaattctggaggatgtactcggtt

SEQ ID NO: 4967491 - DNA, 25 bp, Homo sapien
gatgtactcggtttccgttagaaca

SEQ ID NO: 4967492 - DNA, 25 bp, Homo sapien
gagtgtgtcgcacggatcctagccg

SEQ ID NO: 4967493 - DNA, 25 bp, Homo sapien
ttagaacaggttgcctcgcagtcac

SEQ ID NO: 4967494 - DNA, 25 bp, Homo sapien
gggagagggaacagctgcgacccag

SEQ ID NO: 4967495 - DNA, 25 bp, Homo sapien
tggaattcgcactcgggtgtgcaga

SEQ ID NO: 4967496 - DNA, 25 bp, Homo sapien
acgctcactctcacgccggtggaat

SEQ ID NO: 4967497 - DNA, 25 bp, Homo sapien
aggaccacgagcacgctcactctca

SEQ ID NO: 4967498 - DNA, 25 bp, Homo sapien
aggtctgtccacgacgcctttccaa

SEQ ID NO: 4967499 - DNA, 25 bp, Homo sapien
accagccaagctggcttgagagcca

SEQ ID NO: 4967500 - DNA, 25 bp, Homo sapien
cactgcggattttgcaggcgtaaac

SEQ ID NO: 4967501 - DNA, 25 bp, Homo sapien
cgtaaacattaagccggcatgccag

SEQ ID NO: 4967502 - DNA, 25 bp, Homo sapien
cctgggtttccacaactgcgaacct

SEQ ID NO: 4967503 - DNA, 25 bp, Homo sapien
gggccaccatctgcgtaagaaacct

SEQ ID NO: 4967504 - DNA, 25 bp, Homo sapien
catctgcgtaagaaacctgggtttc

SEQ ID NO: 4967505 - DNA, 25 bp, Homo sapien
taccgcagggactcggcaggacagc

SEQ ID NO: 4967506 - DNA, 25 bp, Homo sapien
agctcctgaaccgctgtcactttac

SEQ ID NO: 4967507 - DNA, 25 bp, Homo sapien
tgtctccgaggcaccaaatccttgt

SEQ ID NO: 4967508 - DNA, 25 bp, Homo sapien
aaatccttgtccttttgcacccgct

SEQ ID NO: 4967509 - DNA, 25 bp, Homo sapien
gggaccgtgtctccgaggcaccaaa

SEQ ID NO: 4967510 - DNA, 25 bp, Homo sapien
tgacgtaactcaggcagtagcccag

SEQ ID NO: 4967511 - DNA, 25 bp, Homo sapien
cacaatcacccttttaatattcagc

SEQ ID NO: 4967512 - DNA, 25 bp, Homo sapien
tgcagataaccggtaactccacaat

SEQ ID NO: 4967513 - DNA, 25 bp, Homo sapien
gaatagcaaggaactttgcagctct

SEQ ID NO: 4967514 - DNA, 25 bp, Homo sapien
ctctactgttggctgaagtcttcat

SEQ ID NO: 4967515 - DNA, 25 bp, Homo sapien
caaaattgatctaagacccttcaga

SEQ ID NO: 4967516 - DNA, 25 bp, Homo sapien
taagaggcatctgtttcaaaggcaa

SEQ ID NO: 4967517 - DNA, 25 bp, Homo sapien
aggcaaaagcaaaattgatctaaga

SEQ ID NO: 4967518 - DNA, 25 bp, Homo sapien
caaaagcaaaattgatctaagaccc

SEQ ID NO: 4967519 - DNA, 25 bp, Homo sapien
gcagcgacaactgtggtgatggtgt

SEQ ID NO: 4967520 - DNA, 25 bp, Homo sapien
ctgttgagtggcagcggtattggct

SEQ ID NO: 4967521 - DNA, 25 bp, Homo sapien
cagtccatagtggtggcagcgacaa

SEQ ID NO: 4967522 - DNA, 25 bp, Homo sapien
cagatggcccagaggagttgggatt

SEQ ID NO: 4967523 - DNA, 25 bp, Homo sapien
tactttactacagtcctgggtggtc

SEQ ID NO: 4967524 - DNA, 25 bp, Homo sapien
ctcttctagccccacttcaatactg

SEQ ID NO: 4967525 - DNA, 25 bp, Homo sapien
atctcagcagggagcgaatccccaa

SEQ ID NO: 4967526 - DNA, 25 bp, Homo sapien
cagcagggagcgaatccccaaggag

SEQ ID NO: 4967527 - DNA, 25 bp, Homo sapien
tctgtggtccagtcaagtcaatcca

SEQ ID NO: 4967528 - DNA, 25 bp, Homo sapien
tagcacttaaaagccatacttggga

SEQ ID NO: 4967529 - DNA, 25 bp, Homo sapien
tgtcaatctcatccagaaatacccc

SEQ ID NO: 4967530 - DNA, 25 bp, Homo sapien
tcctgccttcttagtgttactttgt

SEQ ID NO: 4967531 - DNA, 25 bp, Homo sapien
agcatcacacaatatccccagggga

SEQ ID NO: 4967532 - DNA, 25 bp, Homo sapien
cacaatatccccaggggatacatgt

SEQ ID NO: 4967533 - DNA, 25 bp, Homo sapien
acacaatatccccaggggatacatg

SEQ ID NO: 4967534 - DNA, 25 bp, Homo sapien
atcacacaatatccccaggggatac

SEQ ID NO: 4967535 - DNA, 25 bp, Homo sapien
gattcagccctgactagtcctttga

SEQ ID NO: 4967536 - DNA, 25 bp, Homo sapien
tgatttttgtacttgggtctgtcct

SEQ ID NO: 4967537 - DNA, 25 bp, Homo sapien
aatagaggaattctgggccactttg

SEQ ID NO: 4967538 - DNA, 25 bp, Homo sapien
tatgatcttgacattgtaatagagg

SEQ ID NO: 4967539 - DNA, 25 bp, Homo sapien
cagcagtgttagctgagacagctcc

SEQ ID NO: 4967540 - DNA, 25 bp, Homo sapien
ttctgctccagatgacccctcatca

SEQ ID NO: 4967541 - DNA, 25 bp, Homo sapien
acagcagcagtgttagctgagacag

SEQ ID NO: 4967542 - DNA, 25 bp, Homo sapien
cagtgttagctgagacagctcccca

SEQ ID NO: 4967543 - DNA, 25 bp, Homo sapien
ggtgagatgatcaaggctcctagaa

SEQ ID NO: 4967544 - DNA, 25 bp, Homo sapien
tgatgttctggcatgatggtgagat

SEQ ID NO: 4967545 - DNA, 25 bp, Homo sapien
tctggcatgatggtgagatgatcaa

SEQ ID NO: 4967546 - DNA, 25 bp, Homo sapien
caaggctcctagaatctctattgtg

SEQ ID NO: 4967547 - DNA, 25 bp, Homo sapien
catcttattttggaagggattctga

SEQ ID NO: 4967548 - DNA, 25 bp, Homo sapien
tcctcctaagcagctgttttcgtct

SEQ ID NO: 4967549 - DNA, 25 bp, Homo sapien
agctgttttcgtctcctgaattttg

SEQ ID NO: 4967550 - DNA, 25 bp, Homo sapien
aagcagctgttttcgtctcctgaat

SEQ ID NO: 4967551 - DNA, 25 bp, Homo sapien
cctaagcagctgttttcgtctcctg

SEQ ID NO: 4967552 - DNA, 25 bp, Homo sapien
tcccaaagggaaggatgccaccagc

SEQ ID NO: 4967553 - DNA, 25 bp, Homo sapien
ttcttttgcgggacctgtggccggc

SEQ ID NO: 4967554 - DNA, 25 bp, Homo sapien
tcagttgcagctgcagtggtggccc

SEQ ID NO: 4967555 - DNA, 25 bp, Homo sapien
acctccatcttcaggagcctggctg

SEQ ID NO: 4967556 - DNA, 25 bp, Homo sapien
ccgagagataagacacagcctgaca

SEQ ID NO: 4967557 - DNA, 25 bp, Homo sapien
tccgagagataagacacagcctgac

SEQ ID NO: 4967558 - DNA, 25 bp, Homo sapien
gttccgagagataagacacagcctg

SEQ ID NO: 4967559 - DNA, 25 bp, Homo sapien
gagagataagacacagcctgacagg

SEQ ID NO: 4967560 - DNA, 25 bp, Homo sapien
ccagattcccggggcaggcacaggt

SEQ ID NO: 4967561 - DNA, 25 bp, Homo sapien
ccaaggtgtcgctgacggttgaaga

SEQ ID NO: 4967562 - DNA, 25 bp, Homo sapien
agaggagtgggaaacggccccagat

SEQ ID NO: 4967563 - DNA, 25 bp, Homo sapien
aaagaaggcccaaggtgtcgctgac

SEQ ID NO: 4967564 - DNA, 25 bp, Homo sapien
ggaaggcctcacagacaagacgagc

SEQ ID NO: 4967565 - DNA, 25 bp, Homo sapien
ctgcagggtgagcccggccagctgg

SEQ ID NO: 4967566 - DNA, 25 bp, Homo sapien
caggttgccgatggcgtggccagga

SEQ ID NO: 4967567 - DNA, 25 bp, Homo sapien
tcacagacaagacgagcaggttgcc

SEQ ID NO: 4967568 - DNA, 25 bp, Homo sapien
atgctggctggcatccagtggccct

SEQ ID NO: 4967569 - DNA, 25 bp, Homo sapien
gtggccctgtcttggccggccctat

SEQ ID NO: 4967570 - DNA, 25 bp, Homo sapien
ctatcccccaggttacagggccaga

SEQ ID NO: 4967571 - DNA, 25 bp, Homo sapien
cctatcccccaggttacagggccag

SEQ ID NO: 4967572 - DNA, 25 bp, Homo sapien
ccagtcctctacaaagatgtagggc

SEQ ID NO: 4967573 - DNA, 25 bp, Homo sapien
gtttctcgactgatgggaaggatcc

SEQ ID NO: 4967574 - DNA, 25 bp, Homo sapien
gaactaccagttgtcagcacagcac

SEQ ID NO: 4967575 - DNA, 25 bp, Homo sapien
tcttctaatggagcctttcacctca

SEQ ID NO: 4967576 - DNA, 25 bp, Homo sapien
ttggtgttgtaacaatcacagtgcc

SEQ ID NO: 4967577 - DNA, 25 bp, Homo sapien
caatcacagtgccatactcatagag

SEQ ID NO: 4967578 - DNA, 25 bp, Homo sapien
catagagtgtgagaacttttgccac

SEQ ID NO: 4967579 - DNA, 25 bp, Homo sapien
gccatactcatagagtgtgagaact

SEQ ID NO: 4967580 - DNA, 25 bp, Homo sapien
caatacaacaagataaccacgtttg

SEQ ID NO: 4967581 - DNA, 25 bp, Homo sapien
tacaacaagataaccacgtttgagg

SEQ ID NO: 4967582 - DNA, 25 bp, Homo sapien
atacaacaagataaccacgtttgag

SEQ ID NO: 4967583 - DNA, 25 bp, Homo sapien
caacaagataaccacgtttgaggat

SEQ ID NO: 4967584 - DNA, 25 bp, Homo sapien
tacgactggtgacttgacgacaagt

SEQ ID NO: 4967585 - DNA, 25 bp, Homo sapien
ggtcccttcccatgtacgactggtg

SEQ ID NO: 4967586 - DNA, 25 bp, Homo sapien
tgacgacaagtatttggcagggtct

SEQ ID NO: 4967587 - DNA, 25 bp, Homo sapien
aagtctaagccacagccgctgagca

SEQ ID NO: 4967588 - DNA, 25 bp, Homo sapien
ctatttcaggggctttccacagaac

SEQ ID NO: 4967589 - DNA, 25 bp, Homo sapien
gtcggctccttggctgttgctattt

SEQ ID NO: 4967590 - DNA, 25 bp, Homo sapien
cggctccttggctgttgctatttca

SEQ ID NO: 4967591 - DNA, 25 bp, Homo sapien
tcaggggctttccacagaacttttc

SEQ ID NO: 4967592 - DNA, 25 bp, Homo sapien
tgtttatgtagaagacacatctgcc

SEQ ID NO: 4967593 - DNA, 25 bp, Homo sapien
ctcgttagagggaatgggaatgttt

SEQ ID NO: 4967594 - DNA, 25 bp, Homo sapien
tgccatccaccttgaaagattgtgc

SEQ ID NO: 4967595 - DNA, 25 bp, Homo sapien
tctgagccgttgtcatacgaggtcg

SEQ ID NO: 4967596 - DNA, 25 bp, Homo sapien
cagtggccatcccggatgagaaggt

SEQ ID NO: 4967597 - DNA, 25 bp, Homo sapien
gtggccatcccggatgagaaggtgg

SEQ ID NO: 4967598 - DNA, 25 bp, Homo sapien
atcccggatgagaaggtgggagggc

SEQ ID NO: 4967599 - DNA, 25 bp, Homo sapien
ggccatcccggatgagaaggtggga

SEQ ID NO: 4967600 - DNA, 25 bp, Homo sapien
cttttctgcctttagttgcaagaat

SEQ ID NO: 4967601 - DNA, 25 bp, Homo sapien
tgcctttagttgcaagaatatttcc

SEQ ID NO: 4967602 - DNA, 25 bp, Homo sapien
cagatgccaaactgtacgctgatgc

SEQ ID NO: 4967603 - DNA, 25 bp, Homo sapien
ccaaactgtacgctgatgccaaaag

SEQ ID NO: 4967604 - DNA, 25 bp, Homo sapien
tagggaaggcattagacttcaacag

SEQ ID NO: 4967605 - DNA, 25 bp, Homo sapien
ggcattagacttcaacagaatacgg

SEQ ID NO: 4967606 - DNA, 25 bp, Homo sapien
attcacagaaatgttagggaaggca

SEQ ID NO: 4967607 - DNA, 25 bp, Homo sapien
cttcaacagaatacggaatggaatg

SEQ ID NO: 4967608 - DNA, 25 bp, Homo sapien
gggaacacttaatgatcaatccaat

SEQ ID NO: 4967609 - DNA, 25 bp, Homo sapien
taaatggcaataattaagctccact

SEQ ID NO: 4967610 - DNA, 25 bp, Homo sapien
tggcaataattaagctccactggat

SEQ ID NO: 4967611 - DNA, 25 bp, Homo sapien
taattaagctccactggataacagc

SEQ ID NO: 4967612 - DNA, 25 bp, Homo sapien
acagcatgtgcataaatggcaataa

SEQ ID NO: 4967613 - DNA, 25 bp, Homo sapien
cagcaatgatggttagttggtaaac

SEQ ID NO: 4967614 - DNA, 25 bp, Homo sapien
attcagcaatgatggttagttggta

SEQ ID NO: 4967615 - DNA, 25 bp, Homo sapien
agcaatgatggttagttggtaaacc

SEQ ID NO: 4967616 - DNA, 25 bp, Homo sapien
tcagcaatgatggttagttggtaaa

SEQ ID NO: 4967617 - DNA, 25 bp, Homo sapien
tcaggagaaagacgatggttggcaa

SEQ ID NO: 4967618 - DNA, 25 bp, Homo sapien
gcaaggatacagtgtcaagagtcac

SEQ ID NO: 4967619 - DNA, 25 bp, Homo sapien
atgtgtgagcaaatggaatggatga

SEQ ID NO: 4967620 - DNA, 25 bp, Homo sapien
gttggaaggcaaggatacagtgtca

SEQ ID NO: 4967621 - DNA, 25 bp, Homo sapien
agtgtccttcccaattgtccattca

SEQ ID NO: 4967622 - DNA, 25 bp, Homo sapien
aagtccagatttctcagtctgacgt

SEQ ID NO: 4967623 - DNA, 25 bp, Homo sapien
cattgtacgtggtcttctggccact

SEQ ID NO: 4967624 - DNA, 25 bp, Homo sapien
tctggccactctggataatgtactg

SEQ ID NO: 4967625 - DNA, 25 bp, Homo sapien
aaaaactacacagtgtgcagagcag

SEQ ID NO: 4967626 - DNA, 25 bp, Homo sapien
ggttgaatcctaatcccgacactac

SEQ ID NO: 4967627 - DNA, 25 bp, Homo sapien
catggaggacttctgctatggtgtg

SEQ ID NO: 4967628 - DNA, 25 bp, Homo sapien
gatgcctcctttgccttctactagc

SEQ ID NO: 4967629 - DNA, 25 bp, Homo sapien
cgccgggcagggttgcaatgtcctt

SEQ ID NO: 4967630 - DNA, 25 bp, Homo sapien
tcatctctcctcaacatggtgcctg

SEQ ID NO: 4967631 - DNA, 25 bp, Homo sapien
gaggctcaatgtccaggtagagatg

SEQ ID NO: 4967632 - DNA, 25 bp, Homo sapien
tgaaaatcagatctgcgccgggcag

SEQ ID NO: 4967633 - DNA, 25 bp, Homo sapien
tccgcacctcctcggcgtgcttgtc

SEQ ID NO: 4967634 - DNA, 25 bp, Homo sapien
tttttccgcacctcctcggcgtgct

SEQ ID NO: 4967635 - DNA, 25 bp, Homo sapien
ttcagctccttgtttttccgcacct

SEQ ID NO: 4967636 - DNA, 25 bp, Homo sapien
cttcagctccttgtttttccgcacc

SEQ ID NO: 4967637 - DNA, 25 bp, Homo sapien
aggtcccgggagtcaccgcgcagca

SEQ ID NO: 4967638 - DNA, 25 bp, Homo sapien
ggagtcaccgcgcagcaggcggttc

SEQ ID NO: 4967639 - DNA, 25 bp, Homo sapien
gacgaggccaccgatcaggtcccgg

SEQ ID NO: 4967640 - DNA, 25 bp, Homo sapien
gccaccgatcaggtcccgggagtca

SEQ ID NO: 4967641 - DNA, 25 bp, Homo sapien
tcctctctagccagggacccctcac

SEQ ID NO: 4967642 - DNA, 25 bp, Homo sapien
gcatgtcccaggaaactcctctcta

SEQ ID NO: 4967643 - DNA, 25 bp, Homo sapien
ggaaaacagcatgtcccaggaaact

SEQ ID NO: 4967644 - DNA, 25 bp, Homo sapien
caggaaactcctctctagccaggga

SEQ ID NO: 4967645 - DNA, 25 bp, Homo sapien
ttctctgctaggtgtttcaggagct

SEQ ID NO: 4967646 - DNA, 25 bp, Homo sapien
cagtttttccttagccatcttgatg

SEQ ID NO: 4967647 - DNA, 25 bp, Homo sapien
ttttggatcacctctctctcatgtt

SEQ ID NO: 4967648 - DNA, 25 bp, Homo sapien
tctcttgcagccgttccaacatggc

SEQ ID NO: 4967649 - DNA, 25 bp, Homo sapien
agggtttattttcaccatcgtggct

SEQ ID NO: 4967650 - DNA, 25 bp, Homo sapien
gtttattttcaccatcgtggctgaa

SEQ ID NO: 4967651 - DNA, 25 bp, Homo sapien
gggtttattttcaccatcgtggctg

SEQ ID NO: 4967652 - DNA, 25 bp, Homo sapien
ttattttcaccatcgtggctgaaaa

SEQ ID NO: 4967653 - DNA, 25 bp, Homo sapien
gatgacttccatgtcggaaatgacg

SEQ ID NO: 4967654 - DNA, 25 bp, Homo sapien
tccagggatgggtctcgccgccttg

SEQ ID NO: 4967655 - DNA, 25 bp, Homo sapien
caccaattcaggtccaccgtgtctg

SEQ ID NO: 4967656 - DNA, 25 bp, Homo sapien
cttcaaaggattggcccgaggtgca

SEQ ID NO: 4967657 - DNA, 25 bp, Homo sapien
ccatctgacgctcggcctgcggaat

SEQ ID NO: 4967658 - DNA, 25 bp, Homo sapien
gcccatctgacgctcggcctgcgga

SEQ ID NO: 4967659 - DNA, 25 bp, Homo sapien
ccacagcccatctgacgctcggcct

SEQ ID NO: 4967660 - DNA, 25 bp, Homo sapien
ggcctgcggaatccctccgctgcct

SEQ ID NO: 4967661 - DNA, 25 bp, Homo sapien
tgtctttccgctggctttcatcctt

SEQ ID NO: 4967662 - DNA, 25 bp, Homo sapien
ctttccgctggctttcatccttcct

SEQ ID NO: 4967663 - DNA, 25 bp, Homo sapien
actgtctttccgctggctttcatcc

SEQ ID NO: 4967664 - DNA, 25 bp, Homo sapien
ctccagtcagcactgtctttccgct

SEQ ID NO: 4967665 - DNA, 25 bp, Homo sapien
tcatatttgtaggacgacttattca

SEQ ID NO: 4967666 - DNA, 25 bp, Homo sapien
acttattcaggggatcggccaggaa

SEQ ID NO: 4967667 - DNA, 25 bp, Homo sapien
cttattcaggggatcggccaggaag

SEQ ID NO: 4967668 - DNA, 25 bp, Homo sapien
tatttgtaggacgacttattcaggg

SEQ ID NO: 4967669 - DNA, 25 bp, Homo sapien
ttcttccctgcttctgtgagtccat

SEQ ID NO: 4967670 - DNA, 25 bp, Homo sapien
tgtgttcttccctgcttctgtgagt

SEQ ID NO: 4967671 - DNA, 25 bp, Homo sapien
ttcctgccagctgtgttcttccctg

SEQ ID NO: 4967672 - DNA, 25 bp, Homo sapien
tgttcttccctgcttctgtgagtcc

SEQ ID NO: 4967673 - DNA, 25 bp, Homo sapien
ctggtggctgaatctagctgaaagt

SEQ ID NO: 4967674 - DNA, 25 bp, Homo sapien
tcaccagcttgggacgctgtcacca

SEQ ID NO: 4967675 - DNA, 25 bp, Homo sapien
agctgaaagttacagagtgggtctg

SEQ ID NO: 4967676 - DNA, 25 bp, Homo sapien
caccagcttgggacgctgtcaccaa

SEQ ID NO: 4967677 - DNA, 25 bp, Homo sapien
tttgttatccaaactctcgagttgc

SEQ ID NO: 4967678 - DNA, 25 bp, Homo sapien
gtctaggcacagactcccacatggt

SEQ ID NO: 4967679 - DNA, 25 bp, Homo sapien
acatggtccactgacactctgctca

SEQ ID NO: 4967680 - DNA, 25 bp, Homo sapien
gggtctttcatcctagatctgcgct

SEQ ID NO: 4967681 - DNA, 25 bp, Homo sapien
cagtccagttagaagcgagctgctc

SEQ ID NO: 4967682 - DNA, 25 bp, Homo sapien
tgagtaactcttagcaggccaggga

SEQ ID NO: 4967683 - DNA, 25 bp, Homo sapien
gttgcttggcaattggacagtctcc

SEQ ID NO: 4967684 - DNA, 25 bp, Homo sapien
tcaattagtggtaccctgggcttct

SEQ ID NO: 4967685 - DNA, 25 bp, Homo sapien
aactgcctccgggaatatggacgct

SEQ ID NO: 4967686 - DNA, 25 bp, Homo sapien
tgttcgttgtagttgggccacacag

SEQ ID NO: 4967687 - DNA, 25 bp, Homo sapien
ccagatggatgggtctataaagcaa

SEQ ID NO: 4967688 - DNA, 25 bp, Homo sapien
tagtccacctgatagagaacactgg

SEQ ID NO: 4967689 - DNA, 25 bp, Homo sapien
gaagggtgggatcacagcataccaa

SEQ ID NO: 4967690 - DNA, 25 bp, Homo sapien
gactggcagactgtccctgatgcag

SEQ ID NO: 4967691 - DNA, 25 bp, Homo sapien
agcgtggacgctctctgttgaattc

SEQ ID NO: 4967692 - DNA, 25 bp, Homo sapien
tcaagcaatggtcagatggtggccc

SEQ ID NO: 4967693 - DNA, 25 bp, Homo sapien
ttcagcacaaatcattggaaccagt

SEQ ID NO: 4967694 - DNA, 25 bp, Homo sapien
caattatgatatacttcagcacaaa

SEQ ID NO: 4967695 - DNA, 25 bp, Homo sapien
gaagtcaattatgatatacttcagc

SEQ ID NO: 4967696 - DNA, 25 bp, Homo sapien
cacaaatcattggaaccagtaaaac

SEQ ID NO: 4967697 - DNA, 25 bp, Homo sapien
cacaggatgctagaattggaatgac

SEQ ID NO: 4967698 - DNA, 25 bp, Homo sapien
cagtggttcagtcagggtttaggtc

SEQ ID NO: 4967699 - DNA, 25 bp, Homo sapien
gaacagaatatacccatcaacagga

SEQ ID NO: 4967700 - DNA, 25 bp, Homo sapien
aatgcccaagtttccctgtttacag

SEQ ID NO: 4967701 - DNA, 25 bp, Homo sapien
catccacagatttggggcctgaaag

SEQ ID NO: 4967702 - DNA, 25 bp, Homo sapien
ttccacaaaacaggcggcatgcagt

SEQ ID NO: 4967703 - DNA, 25 bp, Homo sapien
tattatggtccagcaacatccacag

SEQ ID NO: 4967704 - DNA, 25 bp, Homo sapien
gcagaaaagacagcgaggtgctctt

SEQ ID NO: 4967705 - DNA, 25 bp, Homo sapien
cacaagggtcacgaaagacttccac

SEQ ID NO: 4967706 - DNA, 25 bp, Homo sapien
taaacagtggtgaccgtggttgcag

SEQ ID NO: 4967707 - DNA, 25 bp, Homo sapien
tccactattgtgatattgagcaatc

SEQ ID NO: 4967708 - DNA, 25 bp, Homo sapien
tctcgaatgtcactctggaggtggg

SEQ ID NO: 4967709 - DNA, 25 bp, Homo sapien
gagatgccacattacccctactagg

SEQ ID NO: 4967710 - DNA, 25 bp, Homo sapien
tataccagttaaagggacttgtgcc

SEQ ID NO: 4967711 - DNA, 25 bp, Homo sapien
cagcaaatctgctcccaggcatata

SEQ ID NO: 4967712 - DNA, 25 bp, Homo sapien
ttgtgccaggctataaaaggactct

SEQ ID NO: 4967713 - DNA, 25 bp, Homo sapien
taagttttatctaaccagtgtacac

SEQ ID NO: 4967714 - DNA, 25 bp, Homo sapien
ccaattaatacgtgtgagtcatgat

SEQ ID NO: 4967715 - DNA, 25 bp, Homo sapien
cttggtcaggaatgtgacccagatt

SEQ ID NO: 4967716 - DNA, 25 bp, Homo sapien
gggtcacactctcagacactttggc

SEQ ID NO: 4967717 - DNA, 25 bp, Homo sapien
gatgagatggtttacaacaggccca

SEQ ID NO: 4967718 - DNA, 25 bp, Homo sapien
gaaatcgcaagtggcagagcaagca

SEQ ID NO: 4967719 - DNA, 25 bp, Homo sapien
caggtatcagacaaaaagggcagcc

SEQ ID NO: 4967720 - DNA, 25 bp, Homo sapien
tatggaaaccaactaatccggagcg

SEQ ID NO: 4967721 - DNA, 25 bp, Homo sapien
tggcagtggcgctccgcgtcataga

SEQ ID NO: 4967722 - DNA, 25 bp, Homo sapien
atagaaagacagctcgccctcctca

SEQ ID NO: 4967723 - DNA, 25 bp, Homo sapien
ctgcgtgcggcagacataccagaag

SEQ ID NO: 4967724 - DNA, 25 bp, Homo sapien
cagatgcgcaaaggctctggaggcc

SEQ ID NO: 4967725 - DNA, 25 bp, Homo sapien
cgcccgagtcctggcgcacacgtac

SEQ ID NO: 4967726 - DNA, 25 bp, Homo sapien
cccaggcgtgcgagccctgtgagaa

SEQ ID NO: 4967727 - DNA, 25 bp, Homo sapien
gaggagaagcgttccgggttctcca

SEQ ID NO: 4967728 - DNA, 25 bp, Homo sapien
ctcccaggcgtgcgagccctgtgag

SEQ ID NO: 4967729 - DNA, 25 bp, Homo sapien
cacctcccaggcgtgcgagccctgt

SEQ ID NO: 4967730 - DNA, 25 bp, Homo sapien
cagctgcggtgttggggtcaaagct

SEQ ID NO: 4967731 - DNA, 25 bp, Homo sapien
gacgctggtgaggtcgtcagacacg

SEQ ID NO: 4967732 - DNA, 25 bp, Homo sapien
aggtcgtcagacacggagagccagc

SEQ ID NO: 4967733 - DNA, 25 bp, Homo sapien
cacgcggtagccatggttggtgacg

SEQ ID NO: 4967734 - DNA, 25 bp, Homo sapien
gaacctgcctgcgagggactggcag

SEQ ID NO: 4967735 - DNA, 25 bp, Homo sapien
ggtacaggaacctgcctgcgaggga

SEQ ID NO: 4967736 - DNA, 25 bp, Homo sapien
acaggaacctgcctgcgagggactg

SEQ ID NO: 4967737 - DNA, 25 bp, Homo sapien
aacctgcctgcgagggactggcaga

SEQ ID NO: 4967738 - DNA, 25 bp, Homo sapien
ttccagacgcggtactgcagggagc

SEQ ID NO: 4967739 - DNA, 25 bp, Homo sapien
catcgataagcatgccgggctggac

SEQ ID NO: 4967740 - DNA, 25 bp, Homo sapien
tggctctggctccatggtgcagaag

SEQ ID NO: 4967741 - DNA, 25 bp, Homo sapien
gagcccaggtacttgcagacatcga

SEQ ID NO: 4967742 - DNA, 25 bp, Homo sapien
aaacaggaggttctccaacatggct

SEQ ID NO: 4967743 - DNA, 25 bp, Homo sapien
agaaatacaaacaggaggttctcca

SEQ ID NO: 4967744 - DNA, 25 bp, Homo sapien
tgccccaactaggagaaatacaaac

SEQ ID NO: 4967745 - DNA, 25 bp, Homo sapien
taggagaaatacaaacaggaggttc

SEQ ID NO: 4967746 - DNA, 25 bp, Homo sapien
tttagagacagctctgaacacagaa

SEQ ID NO: 4967747 - DNA, 25 bp, Homo sapien
ggagatgacactgcctgaacagata

SEQ ID NO: 4967748 - DNA, 25 bp, Homo sapien
tacagaccagctttcgagcccagaa

SEQ ID NO: 4967749 - DNA, 25 bp, Homo sapien
acaggagacttcatggttccaggct

SEQ ID NO: 4967750 - DNA, 25 bp, Homo sapien
tttagtttcatgacacaagcagagc

SEQ ID NO: 4967751 - DNA, 25 bp, Homo sapien
ggtttcaaggaactccgccctgata

SEQ ID NO: 4967752 - DNA, 25 bp, Homo sapien
cctggaacatgtggccctgtcactg

SEQ ID NO: 4967753 - DNA, 25 bp, Homo sapien
ttacactgagctataatcacccact

SEQ ID NO: 4967754 - DNA, 25 bp, Homo sapien
caagaactcgcgaagcttatcaaac

SEQ ID NO: 4967755 - DNA, 25 bp, Homo sapien
ttatcaaactcctgccggatccggc

SEQ ID NO: 4967756 - DNA, 25 bp, Homo sapien
gcagccgctcgatctcatgtgccag

SEQ ID NO: 4967757 - DNA, 25 bp, Homo sapien
catgagaaaagaaacgtcgtcctcc

SEQ ID NO: 4967758 - DNA, 25 bp, Homo sapien
ttggccttctcccgcagtgcatgct

SEQ ID NO: 4967759 - DNA, 25 bp, Homo sapien
tcataggagcgccgcatggcccaga

SEQ ID NO: 4967760 - DNA, 25 bp, Homo sapien
ggccttctcccgcagtgcatgctcc

SEQ ID NO: 4967761 - DNA, 25 bp, Homo sapien
ccttctcccgcagtgcatgctccat

SEQ ID NO: 4967762 - DNA, 25 bp, Homo sapien
catcttgattttggattcagcattc

SEQ ID NO: 4967763 - DNA, 25 bp, Homo sapien
tttgctagtgatacatagaaataca

SEQ ID NO: 4967764 - DNA, 25 bp, Homo sapien
gacaggctggactatgttgtgcaag

SEQ ID NO: 4967765 - DNA, 25 bp, Homo sapien
taatacttatgatttaactgtagaa

SEQ ID NO: 4967766 - DNA, 25 bp, Homo sapien
ccttctctcttcggctatcaggctc

SEQ ID NO: 4967767 - DNA, 25 bp, Homo sapien
ttaggagagctggtttggagccttg

SEQ ID NO: 4967768 - DNA, 25 bp, Homo sapien
tctcttcggctatcaggctcctcac

SEQ ID NO: 4967769 - DNA, 25 bp, Homo sapien
aggagagctggtttggagccttgtc

SEQ ID NO: 4967770 - DNA, 25 bp, Homo sapien
caagacatgactttcatcgtcttgt

SEQ ID NO: 4967771 - DNA, 25 bp, Homo sapien
tcaagacatgactttcatcgtcttg

SEQ ID NO: 4967772 - DNA, 25 bp, Homo sapien
aagacatgactttcatcgtcttgtc

SEQ ID NO: 4967773 - DNA, 25 bp, Homo sapien
tcactttccgttcgcattctcttct

SEQ ID NO: 4967774 - DNA, 25 bp, Homo sapien
tgagaacctgggtcggagaggtggg

SEQ ID NO: 4967775 - DNA, 25 bp, Homo sapien
ctgtcactttccgttcgcattctct

SEQ ID NO: 4967776 - DNA, 25 bp, Homo sapien
ctgagaacctgggtcggagaggtgg

SEQ ID NO: 4967777 - DNA, 25 bp, Homo sapien
gaaagtcgtgggcagtgtccttcac

SEQ ID NO: 4967778 - DNA, 25 bp, Homo sapien
tagcagacggcgcagagcaactcct

SEQ ID NO: 4967779 - DNA, 25 bp, Homo sapien
ggtgacgcgcggtctttgcacactg

SEQ ID NO: 4967780 - DNA, 25 bp, Homo sapien
tcctccttgaaggagcgggaaggcc

SEQ ID NO: 4967781 - DNA, 25 bp, Homo sapien
ggcacgagcagccggctcgggcgcc

SEQ ID NO: 4967782 - DNA, 25 bp, Homo sapien
cacgagcagccggctcgggcgcccg

SEQ ID NO: 4967783 - DNA, 25 bp, Homo sapien
cagccggctcgggcgcccggaactt

SEQ ID NO: 4967784 - DNA, 25 bp, Homo sapien
gagcagccggctcgggcgcccggaa

SEQ ID NO: 4967785 - DNA, 25 bp, Homo sapien
cccgcgacccgagtgctgggaatcg

SEQ ID NO: 4967786 - DNA, 25 bp, Homo sapien
gccaacgcccgcgacccgagtgctg

SEQ ID NO: 4967787 - DNA, 25 bp, Homo sapien
aacgcccgcgacccgagtgctggga

SEQ ID NO: 4967788 - DNA, 25 bp, Homo sapien
acccgcccggctgccaacgcccgcg

SEQ ID NO: 4967789 - DNA, 25 bp, Homo sapien
ctggcactgcagacataatcgacct

SEQ ID NO: 4967790 - DNA, 25 bp, Homo sapien
gcagcatcttcggaaacaggcatcc

SEQ ID NO: 4967791 - DNA, 25 bp, Homo sapien
tagtccgatgtacctttactgaggc

SEQ ID NO: 4967792 - DNA, 25 bp, Homo sapien
taaatctttgaggaaatcactgtag

SEQ ID NO: 4967793 - DNA, 25 bp, Homo sapien
ctgtgtagtcaccaagattacctcc

SEQ ID NO: 4967794 - DNA, 25 bp, Homo sapien
gtgtagtcaccaagattacctccaa

SEQ ID NO: 4967795 - DNA, 25 bp, Homo sapien
acctgctgaccgctgtgtagtcacc

SEQ ID NO: 4967796 - DNA, 25 bp, Homo sapien
tctgacctgctgaccgctgtgtagt

SEQ ID NO: 4967797 - DNA, 25 bp, Homo sapien
tgtacttgccgccgtcccggctcac

SEQ ID NO: 4967798 - DNA, 25 bp, Homo sapien
ctgtacttgccgccgtcccggctca

SEQ ID NO: 4967799 - DNA, 25 bp, Homo sapien
cggtgcccgaggagtagtcgctgga

SEQ ID NO: 4967800 - DNA, 25 bp, Homo sapien
ccgaggagtagtcgctggagtccgc

SEQ ID NO: 4967801 - DNA, 25 bp, Homo sapien
agtagtcgctggagtccgcgcctcc

SEQ ID NO: 4967802 - DNA, 25 bp, Homo sapien
tgggtgagtccctcccgcgagccag

SEQ ID NO: 4967803 - DNA, 25 bp, Homo sapien
cctgagctgggagttcccggagaaa

SEQ ID NO: 4967804 - DNA, 25 bp, Homo sapien
ctgcgcccggcagaagttggaggct

SEQ ID NO: 4967805 - DNA, 25 bp, Homo sapien
ccaggaaatcggagccgtgggtgct

SEQ ID NO: 4967806 - DNA, 25 bp, Homo sapien
aagttggaggcttgaccgggtggca

SEQ ID NO: 4967807 - DNA, 25 bp, Homo sapien
caaggtgtggggacaaggtgagtgt

SEQ ID NO: 4967808 - DNA, 25 bp, Homo sapien
cggccaggtgcaaggtgtggggaca

SEQ ID NO: 4967809 - DNA, 25 bp, Homo sapien
acaaggtgagtgtggcatggcctct

SEQ ID NO: 4967810 - DNA, 25 bp, Homo sapien
ctgcggccaggtgcaaggtgtgggg

SEQ ID NO: 4967811 - DNA, 25 bp, Homo sapien
tactatccaaccctgcactagaggg

SEQ ID NO: 4967812 - DNA, 25 bp, Homo sapien
agggtactatccaaccctgcactag

SEQ ID NO: 4967813 - DNA, 25 bp, Homo sapien
gcagtgtgggataccgggtggttga

SEQ ID NO: 4967814 - DNA, 25 bp, Homo sapien
aaggtgcagggtactatccaaccct

SEQ ID NO: 4967815 - DNA, 25 bp, Homo sapien
gggcaggttggtgtgaatgcagagt

SEQ ID NO: 4967816 - DNA, 25 bp, Homo sapien
cacccagatgcagcgggcaggttgg

SEQ ID NO: 4967817 - DNA, 25 bp, Homo sapien
agcgggcaggttggtgtgaatgcag

SEQ ID NO: 4967818 - DNA, 25 bp, Homo sapien
tcacccagatgcagcgggcaggttg

SEQ ID NO: 4967819 - DNA, 25 bp, Homo sapien
cagccagttagtgtgactaaaacca

SEQ ID NO: 4967820 - DNA, 25 bp, Homo sapien
ccagcactaaggtggttgctgcttt

SEQ ID NO: 4967821 - DNA, 25 bp, Homo sapien
tagtgtgactaaaaccaagatcagc

SEQ ID NO: 4967822 - DNA, 25 bp, Homo sapien
tcccagcactaaggtggttgctgct

SEQ ID NO: 4967823 - DNA, 25 bp, Homo sapien
ctgcgggaggcaagccttcccgttt

SEQ ID NO: 4967824 - DNA, 25 bp, Homo sapien
gaggcaagccttcccgtttcctagc

SEQ ID NO: 4967825 - DNA, 25 bp, Homo sapien
tgcgggaggcaagccttcccgtttc

SEQ ID NO: 4967826 - DNA, 25 bp, Homo sapien
gcaagccttcccgtttcctagcttg

SEQ ID NO: 4967827 - DNA, 25 bp, Homo sapien
gagctgttgaccatgctgacttcgg

SEQ ID NO: 4967828 - DNA, 25 bp, Homo sapien
tgccataaaagaggcacgaagtgct

SEQ ID NO: 4967829 - DNA, 25 bp, Homo sapien
cattttgggtggaaccaagagtggc

SEQ ID NO: 4967830 - DNA, 25 bp, Homo sapien
tctggctatggactctgggaatgct

SEQ ID NO: 4967831 - DNA, 25 bp, Homo sapien
aaattggttgttgcttggcttctac

SEQ ID NO: 4967832 - DNA, 25 bp, Homo sapien
gaagggccggatctctctgcttgca

SEQ ID NO: 4967833 - DNA, 25 bp, Homo sapien
ctgggcagcttgcagaatcctctct

SEQ ID NO: 4967834 - DNA, 25 bp, Homo sapien
tgcttgcacttgttgtcaggatgcc

SEQ ID NO: 4967835 - DNA, 25 bp, Homo sapien
tctccaggataatttcatcaacatt

SEQ ID NO: 4967836 - DNA, 25 bp, Homo sapien
atttcacaatctccaggataatttc

SEQ ID NO: 4967837 - DNA, 25 bp, Homo sapien
ggataatttcatcaacattatcttt

SEQ ID NO: 4967838 - DNA, 25 bp, Homo sapien
cattatcttttgaataaaacataga

SEQ ID NO: 4967839 - DNA, 25 bp, Homo sapien
gcaagaccacaatctacttaacgtc

SEQ ID NO: 4967840 - DNA, 25 bp, Homo sapien
agaccacaatctacttaacgtcttc

SEQ ID NO: 4967841 - DNA, 25 bp, Homo sapien
accacaatctacttaacgtcttcag

SEQ ID NO: 4967842 - DNA, 25 bp, Homo sapien
cacaatctacttaacgtcttcaggg

SEQ ID NO: 4967843 - DNA, 25 bp, Homo sapien
catgatcttgtaggatagggaggta

SEQ ID NO: 4967844 - DNA, 25 bp, Homo sapien
taaccagcaactgacagcagaagag

SEQ ID NO: 4967845 - DNA, 25 bp, Homo sapien
taggatagggaggtaaccagcaact

SEQ ID NO: 4967846 - DNA, 25 bp, Homo sapien
catctcccttaaccgctatcaggag

SEQ ID NO: 4967847 - DNA, 25 bp, Homo sapien
tctcttgttgtgaaactgggctttc

SEQ ID NO: 4967848 - DNA, 25 bp, Homo sapien
cagctttgaaggaaattgggtctct

SEQ ID NO: 4967849 - DNA, 25 bp, Homo sapien
cccaaccaccagctttgaaggaaat

SEQ ID NO: 4967850 - DNA, 25 bp, Homo sapien
gaaattgggtctcttgttgtgaaac

SEQ ID NO: 4967851 - DNA, 25 bp, Homo sapien
gactgggtctgtgggtgacaagggc

SEQ ID NO: 4967852 - DNA, 25 bp, Homo sapien
gacacaaatcgctgacctgtctggg

SEQ ID NO: 4967853 - DNA, 25 bp, Homo sapien
tccttttatggacacaaatcgctga

SEQ ID NO: 4967854 - DNA, 25 bp, Homo sapien
tggatcttccttttatggacacaaa

SEQ ID NO: 4967855 - DNA, 25 bp, Homo sapien
gcgttcctgggacatgttcatgtga

SEQ ID NO: 4967856 - DNA, 25 bp, Homo sapien
ccatgtgctgggctgtgacagtcac

SEQ ID NO: 4967857 - DNA, 25 bp, Homo sapien
tgacagtcacttggcgttcctggga

SEQ ID NO: 4967858 - DNA, 25 bp, Homo sapien
tgccatgtgctgggctgtgacagtc

SEQ ID NO: 4967859 - DNA, 25 bp, Homo sapien
cccagtcctgtgggccacgattact

SEQ ID NO: 4967860 - DNA, 25 bp, Homo sapien
cctgtgggccacgattactctccca

SEQ ID NO: 4967861 - DNA, 25 bp, Homo sapien
gtcctgtgggccacgattactctcc

SEQ ID NO: 4967862 - DNA, 25 bp, Homo sapien
cagtcctgtgggccacgattactct

SEQ ID NO: 4967863 - DNA, 25 bp, Homo sapien
catttacaataagccagatgtgctg

SEQ ID NO: 4967864 - DNA, 25 bp, Homo sapien
gctgaaaagggaacagcagccgtga

SEQ ID NO: 4967865 - DNA, 25 bp, Homo sapien
aacagcagccgtgaagaaaagcttc

SEQ ID NO: 4967866 - DNA, 25 bp, Homo sapien
gccccaaagggtaaacatagcacat

SEQ ID NO: 4967867 - DNA, 25 bp, Homo sapien
gattgtaggcaatattcgcttttct

SEQ ID NO: 4967868 - DNA, 25 bp, Homo sapien
tctaactggctgtcaattcctgtgg

SEQ ID NO: 4967869 - DNA, 25 bp, Homo sapien
cactgacgtccaattgacgggagaa

SEQ ID NO: 4967870 - DNA, 25 bp, Homo sapien
tgacttgatgagtggcctcactgac

SEQ ID NO: 4967871 - DNA, 25 bp, Homo sapien
ctggaaagaagaactagggctgcct

SEQ ID NO: 4967872 - DNA, 25 bp, Homo sapien
cggagaccctggaaagaagaactag

SEQ ID NO: 4967873 - DNA, 25 bp, Homo sapien
aaagaagaactagggctgccttggg

SEQ ID NO: 4967874 - DNA, 25 bp, Homo sapien
tggaaagaagaactagggctgcctt

SEQ ID NO: 4967875 - DNA, 25 bp, Homo sapien
cttataatcacaggatcccttcact

SEQ ID NO: 4967876 - DNA, 25 bp, Homo sapien
tataatcacaggatcccttcactgg

SEQ ID NO: 4967877 - DNA, 25 bp, Homo sapien
ggacctgagatgaccaggccctgtg

SEQ ID NO: 4967878 - DNA, 25 bp, Homo sapien
agggggacctgagatgaccaggccc

SEQ ID NO: 4967879 - DNA, 25 bp, Homo sapien
ggggacctgagatgaccaggccctg

SEQ ID NO: 4967880 - DNA, 25 bp, Homo sapien
gtagggggacctgagatgaccaggc

SEQ ID NO: 4967881 - DNA, 25 bp, Homo sapien
ctgtggtctatccagagcccttccg

SEQ ID NO: 4967882 - DNA, 25 bp, Homo sapien
agagcccttccgttacggccttcat

SEQ ID NO: 4967883 - DNA, 25 bp, Homo sapien
ctcctctgtggtctatccagagccc

SEQ ID NO: 4967884 - DNA, 25 bp, Homo sapien
ggtctatccagagcccttccgttac

SEQ ID NO: 4967885 - DNA, 25 bp, Homo sapien
gccatgcaattaggcacttgacaca

SEQ ID NO: 4967886 - DNA, 25 bp, Homo sapien
cacggccatgcaattaggcacttga

SEQ ID NO: 4967887 - DNA, 25 bp, Homo sapien
caggcacacggccatgcaattaggc

SEQ ID NO: 4967888 - DNA, 25 bp, Homo sapien
gcacacggccatgcaattaggcact

SEQ ID NO: 4967889 - DNA, 25 bp, Homo sapien
ccatacatgtatgaggaatttgtgt

SEQ ID NO: 4967890 - DNA, 25 bp, Homo sapien
tcatctgggctgtactctttggcac

SEQ ID NO: 4967891 - DNA, 25 bp, Homo sapien
aagtctgcattcctttccatacatg

SEQ ID NO: 4967892 - DNA, 25 bp, Homo sapien
catattaacatgtcaaaagtctgca

SEQ ID NO: 4967893 - DNA, 25 bp, Homo sapien
catcgcgtatgagagtaatgtcttc

SEQ ID NO: 4967894 - DNA, 25 bp, Homo sapien
tgtaccacccgtaattgtatgtgct

SEQ ID NO: 4967895 - DNA, 25 bp, Homo sapien
cattatcaagtgttatgtaccaccc

SEQ ID NO: 4967896 - DNA, 25 bp, Homo sapien
taaccctacacaagatcaggaccat

SEQ ID NO: 4967897 - DNA, 25 bp, Homo sapien
tgtcactatttgtcaacagcctggg

SEQ ID NO: 4967898 - DNA, 25 bp, Homo sapien
tgattctagtagctcatccaactgg

SEQ ID NO: 4967899 - DNA, 25 bp, Homo sapien
gaatatgtggtacgatcaggcctga

SEQ ID NO: 4967900 - DNA, 25 bp, Homo sapien
aattggaaggcatcaggatgtctcc

SEQ ID NO: 4967901 - DNA, 25 bp, Homo sapien
ctttatatatggacatggcaggccg

SEQ ID NO: 4967902 - DNA, 25 bp, Homo sapien
ctctgggctatggacacagggtgac

SEQ ID NO: 4967903 - DNA, 25 bp, Homo sapien
gttgtcaacaaaccaagcatcaggg

SEQ ID NO: 4967904 - DNA, 25 bp, Homo sapien
caagctaattgggagtccaggcaca

SEQ ID NO: 4967905 - DNA, 25 bp, Homo sapien
tgcatgcacacgagtagacaggagc

SEQ ID NO: 4967906 - DNA, 25 bp, Homo sapien
cacatgcaagatggatgggagacat

SEQ ID NO: 4967907 - DNA, 25 bp, Homo sapien
tgaagggttcagagcaggtcaacac

SEQ ID NO: 4967908 - DNA, 25 bp, Homo sapien
gatgcccacatctgttagctgccaa

SEQ ID NO: 4967909 - DNA, 25 bp, Homo sapien
tagggaagatctgccctgtacctcc

SEQ ID NO: 4967910 - DNA, 25 bp, Homo sapien
tgacttacagagacctcacctggct

SEQ ID NO: 4967911 - DNA, 25 bp, Homo sapien
cgtagggacatatggagcccctgca

SEQ ID NO: 4967912 - DNA, 25 bp, Homo sapien
tgtttgcctgctgcacgcgtaggga

SEQ ID NO: 4967913 - DNA, 25 bp, Homo sapien
cagctgtagcagagacggtcaaaag

SEQ ID NO: 4967914 - DNA, 25 bp, Homo sapien
tgcaatccctgggtcagtgtccaga

SEQ ID NO: 4967915 - DNA, 25 bp, Homo sapien
aacgttaagctggatggaagcctgc

SEQ ID NO: 4967916 - DNA, 25 bp, Homo sapien
tcagccctggtacaataacgttaag

SEQ ID NO: 4967917 - DNA, 25 bp, Homo sapien
tgggagccagctcgagggaggtgca

SEQ ID NO: 4967918 - DNA, 25 bp, Homo sapien
tccccaggaagcagacgatgataaa

SEQ ID NO: 4967919 - DNA, 25 bp, Homo sapien
cctgtcgatgaccatggcaacatac

SEQ ID NO: 4967920 - DNA, 25 bp, Homo sapien
gaagatcctgtcgatgaccatggca

SEQ ID NO: 4967921 - DNA, 25 bp, Homo sapien
atcattccagctaggaacggaggca

SEQ ID NO: 4967922 - DNA, 25 bp, Homo sapien
caagctcacactctgcggtaaggtg

SEQ ID NO: 4967923 - DNA, 25 bp, Homo sapien
tctgcggtaaggtggttccccgcta

SEQ ID NO: 4967924 - DNA, 25 bp, Homo sapien
tcacactctgcggtaaggtggttcc

SEQ ID NO: 4967925 - DNA, 25 bp, Homo sapien
tgcccaagctcacactctgcggtaa

SEQ ID NO: 4967926 - DNA, 25 bp, Homo sapien
tcctcagaccgcaggtggtcggcaa

SEQ ID NO: 4967927 - DNA, 25 bp, Homo sapien
caggtggtcggcaatgtagtgcaca

SEQ ID NO: 4967928 - DNA, 25 bp, Homo sapien
cgaagagtcagcatcctcagaccgc

SEQ ID NO: 4967929 - DNA, 25 bp, Homo sapien
tagtgcacaccttccagtgccttct

SEQ ID NO: 4967930 - DNA, 25 bp, Homo sapien
gccccagagtgcaggtggccgtggc

SEQ ID NO: 4967931 - DNA, 25 bp, Homo sapien
cctgaggccccagagtgcaggtggc

SEQ ID NO: 4967932 - DNA, 25 bp, Homo sapien
ctctcctcggcatccacgttgctct

SEQ ID NO: 4967933 - DNA, 25 bp, Homo sapien
agcctcagccttgggacctgaggcc

SEQ ID NO: 4967934 - DNA, 25 bp, Homo sapien
tgcccgtggcattgacgatggccca

SEQ ID NO: 4967935 - DNA, 25 bp, Homo sapien
gctctcccagtagtccttcaggtcc

SEQ ID NO: 4967936 - DNA, 25 bp, Homo sapien
tctcggcgcagcagtcgtacttctt

SEQ ID NO: 4967937 - DNA, 25 bp, Homo sapien
ggccttgtcataagtccaggagcca

SEQ ID NO: 4967938 - DNA, 25 bp, Homo sapien
aaggtgacgtcgatgctgcaggagc

SEQ ID NO: 4967939 - DNA, 25 bp, Homo sapien
gaaggtgacgtcgatgctgcaggag

SEQ ID NO: 4967940 - DNA, 25 bp, Homo sapien
gggaagaaggtgacgtcgatgctgc

SEQ ID NO: 4967941 - DNA, 25 bp, Homo sapien
aagaaggtgacgtcgatgctgcagg

SEQ ID NO: 4967942 - DNA, 25 bp, Homo sapien
ggtcactgcaaactccccatctgca

SEQ ID NO: 4967943 - DNA, 25 bp, Homo sapien
tgggtcactgcaaactccccatctg

SEQ ID NO: 4967944 - DNA, 25 bp, Homo sapien
gggtcactgcaaactccccatctgc

SEQ ID NO: 4967945 - DNA, 25 bp, Homo sapien
gtgggtcactgcaaactccccatct

SEQ ID NO: 4967946 - DNA, 25 bp, Homo sapien
agctggggagacccctgcacaccca

SEQ ID NO: 4967947 - DNA, 25 bp, Homo sapien
agaggagctggggagacccctgcac

SEQ ID NO: 4967948 - DNA, 25 bp, Homo sapien
aggagctggggagacccctgcacac

SEQ ID NO: 4967949 - DNA, 25 bp, Homo sapien
ggagctggggagacccctgcacacc

SEQ ID NO: 4967950 - DNA, 25 bp, Homo sapien
tgccaaaatcagtggggttccagcg

SEQ ID NO: 4967951 - DNA, 25 bp, Homo sapien
aacaatgtcggggatccagatcatc

SEQ ID NO: 4967952 - DNA, 25 bp, Homo sapien
agcgcagtttgtagtcgctccactc

SEQ ID NO: 4967953 - DNA, 25 bp, Homo sapien
tgtgatgttgccaaaatcagtgggg

SEQ ID NO: 4967954 - DNA, 25 bp, Homo sapien
ttttagccagacgttggtggtcatc

SEQ ID NO: 4967955 - DNA, 25 bp, Homo sapien
tagccagacgttggtggtcatcatt

SEQ ID NO: 4967956 - DNA, 25 bp, Homo sapien
gccagacgttggtggtcatcatttg

SEQ ID NO: 4967957 - DNA, 25 bp, Homo sapien
gacgttggtggtcatcatttggttc

SEQ ID NO: 4967958 - DNA, 25 bp, Homo sapien
tggacagtccaaagcgcacaatcac

SEQ ID NO: 4967959 - DNA, 25 bp, Homo sapien
tagccccggaagaggtgtttgaaga

SEQ ID NO: 4967960 - DNA, 25 bp, Homo sapien
gcccagcggttgtagccccggaaga

SEQ ID NO: 4967961 - DNA, 25 bp, Homo sapien
aagagccggtcctcagtctcggtat

SEQ ID NO: 4967962 - DNA, 25 bp, Homo sapien
ccctgggaggtgggcgcttagcttc

SEQ ID NO: 4967963 - DNA, 25 bp, Homo sapien
ctgggaggtgggcgcttagcttcct

SEQ ID NO: 4967964 - DNA, 25 bp, Homo sapien
gggaggtgggcgcttagcttcctct

SEQ ID NO: 4967965 - DNA, 25 bp, Homo sapien
gaggtgggcgcttagcttcctctcc

SEQ ID NO: 4967966 - DNA, 25 bp, Homo sapien
ctgccatcaaatcagagccactcag

SEQ ID NO: 4967967 - DNA, 25 bp, Homo sapien
cctcactgagcctcagtttgctcat

SEQ ID NO: 4967968 - DNA, 25 bp, Homo sapien
agccactcagcctcactgagcctca

SEQ ID NO: 4967969 - DNA, 25 bp, Homo sapien
cagcctcactgagcctcagtttgct

SEQ ID NO: 4967970 - DNA, 25 bp, Homo sapien
ccctgcagctttgacggttgcaaca

SEQ ID NO: 4967971 - DNA, 25 bp, Homo sapien
ggttgcaacacatccacctgcagac

SEQ ID NO: 4967972 - DNA, 25 bp, Homo sapien
ttgacggttgcaacacatccacctg

SEQ ID NO: 4967973 - DNA, 25 bp, Homo sapien
gctttgacggttgcaacacatccac

SEQ ID NO: 4967974 - DNA, 25 bp, Homo sapien
gagctttgtgaaggacaggaacaca

SEQ ID NO: 4967975 - DNA, 25 bp, Homo sapien
agctttgtgaaggacaggaacacag

SEQ ID NO: 4967976 - DNA, 25 bp, Homo sapien
tctgctggattctgcgaggcttcct

SEQ ID NO: 4967977 - DNA, 25 bp, Homo sapien
gctggattctgcgaggcttcctctc

SEQ ID NO: 4967978 - DNA, 25 bp, Homo sapien
attctgctggattctgcgaggcttc

SEQ ID NO: 4967979 - DNA, 25 bp, Homo sapien
tggattctgcgaggcttcctctcac

SEQ ID NO: 4967980 - DNA, 25 bp, Homo sapien
gctaagccaccatcaggactgaggt

SEQ ID NO: 4967981 - DNA, 25 bp, Homo sapien
cactgtgtctgtcattgctaagcca

SEQ ID NO: 4967982 - DNA, 25 bp, Homo sapien
gtgttccgtagaccctagcactgtg

SEQ ID NO: 4967983 - DNA, 25 bp, Homo sapien
ctgtgttccgtagaccctagcactg

SEQ ID NO: 4967984 - DNA, 25 bp, Homo sapien
tcaccccagaaatagagtggcaggt

SEQ ID NO: 4967985 - DNA, 25 bp, Homo sapien
ggcagctgacaaaagtcaccccaga

SEQ ID NO: 4967986 - DNA, 25 bp, Homo sapien
gacaccccgtcgagcagaagactta

SEQ ID NO: 4967987 - DNA, 25 bp, Homo sapien
agtggcaggtacagaatagagctca

SEQ ID NO: 4967988 - DNA, 25 bp, Homo sapien
cagctctggcagccagaacggcttc

SEQ ID NO: 4967989 - DNA, 25 bp, Homo sapien
gcagcccagcacaagcgattctgca

SEQ ID NO: 4967990 - DNA, 25 bp, Homo sapien
cagcccagcacaagcgattctgcag

SEQ ID NO: 4967991 - DNA, 25 bp, Homo sapien
gcacacaggctcacgctgttctctc

SEQ ID NO: 4967992 - DNA, 25 bp, Homo sapien
aggcagcccagcacaagcgattctg

SEQ ID NO: 4967993 - DNA, 25 bp, Homo sapien
tgcctttgattttccggtgaagcct

SEQ ID NO: 4967994 - DNA, 25 bp, Homo sapien
gcctttgattttccggtgaagcctc

SEQ ID NO: 4967995 - DNA, 25 bp, Homo sapien
caactggaattcatctgggattggc

SEQ ID NO: 4967996 - DNA, 25 bp, Homo sapien
cattgaaaagttgagcaaggccaca

SEQ ID NO: 4967997 - DNA, 25 bp, Homo sapien
gggaaaaccattgctgacattgaaa

SEQ ID NO: 4967998 - DNA, 25 bp, Homo sapien
gctgaccactgttacctgcaagagg

SEQ ID NO: 4967999 - DNA, 25 bp, Homo sapien
gatggaggatgcactgtcttctacc

SEQ ID NO: 4968000 - DNA, 25 bp, Homo sapien
aggagagacctttcagcagagctgt

SEQ ID NO: 4968001 - DNA, 25 bp, Homo sapien
ttttggccgacttgaaggagagacc

SEQ ID NO: 4968002 - DNA, 25 bp, Homo sapien
catggtgtcccacatgagcctgggc

SEQ ID NO: 4968003 - DNA, 25 bp, Homo sapien
tcctcaaaacattgagtctctctct

SEQ ID NO: 4968004 - DNA, 25 bp, Homo sapien
ctcctcaaaacattgagtctctctc

SEQ ID NO: 4968005 - DNA, 25 bp, Homo sapien
gtaggcagaaggttttacctggctg

SEQ ID NO: 4968006 - DNA, 25 bp, Homo sapien
tctcctcaaaacattgagtctctct

SEQ ID NO: 4968007 - DNA, 25 bp, Homo sapien
cttaactcaattccctctggtagca

SEQ ID NO: 4968008 - DNA, 25 bp, Homo sapien
tccggtgttgaaggccaaactaata

SEQ ID NO: 4968009 - DNA, 25 bp, Homo sapien
tggaacctcatggagaaggcagtgt

SEQ ID NO: 4968010 - DNA, 25 bp, Homo sapien
tctggtagcactagtccctcagcag

SEQ ID NO: 4968011 - DNA, 25 bp, Homo sapien
gaaggacttcgtgctcgttcctcag

SEQ ID NO: 4968012 - DNA, 25 bp, Homo sapien
taaccacgagtctgttgtgcaaagt

SEQ ID NO: 4968013 - DNA, 25 bp, Homo sapien
tacaagggtcatcagtgcaccccgg

SEQ ID NO: 4968014 - DNA, 25 bp, Homo sapien
aaagttcggcagatacaacgtcagg

SEQ ID NO: 4968015 - DNA, 25 bp, Homo sapien
ctcaaagatgtagaacgcagcgtgt

SEQ ID NO: 4968016 - DNA, 25 bp, Homo sapien
gaacccaccggtggtctcaaagatg

SEQ ID NO: 4968017 - DNA, 25 bp, Homo sapien
caggccaaccgaggtgaatcagatc

SEQ ID NO: 4968018 - DNA, 25 bp, Homo sapien
tcttagtatacagaggtggccttac

SEQ ID NO: 4968019 - DNA, 25 bp, Homo sapien
ctcctccaagcccataggctgggtt

SEQ ID NO: 4968020 - DNA, 25 bp, Homo sapien
gttatcgggctcacagatgcacgca

SEQ ID NO: 4968021 - DNA, 25 bp, Homo sapien
gctgggttccgagccctttctgcct

SEQ ID NO: 4968022 - DNA, 25 bp, Homo sapien
ccccttgcatggttatcgggctcac

SEQ ID NO: 4968023 - DNA, 25 bp, Homo sapien
catccaaggtttccaggagacccgt

SEQ ID NO: 4968024 - DNA, 25 bp, Homo sapien
ctctgctaaaagaaatcggccctta

SEQ ID NO: 4968025 - DNA, 25 bp, Homo sapien
tctgtcaaggaaggaccacttagtg

SEQ ID NO: 4968026 - DNA, 25 bp, Homo sapien
tcactgttcaaaggactccatctgg

SEQ ID NO: 4968027 - DNA, 25 bp, Homo sapien
aagggaccctgctgcatgtcggtgc

SEQ ID NO: 4968028 - DNA, 25 bp, Homo sapien
tttggcagagatgcaacaggtgccc

SEQ ID NO: 4968029 - DNA, 25 bp, Homo sapien
tcgtctcttaggagcttcactgcca

SEQ ID NO: 4968030 - DNA, 25 bp, Homo sapien
gacagtcacgatgaggaagggaccc

SEQ ID NO: 4968031 - DNA, 25 bp, Homo sapien
ttgggcatcacatacacaccctcgt

SEQ ID NO: 4968032 - DNA, 25 bp, Homo sapien
acatacacaccctcgttgctccttg

SEQ ID NO: 4968033 - DNA, 25 bp, Homo sapien
tttctcttgggcatcacatacacac

SEQ ID NO: 4968034 - DNA, 25 bp, Homo sapien
gggcatcacatacacaccctcgttg

SEQ ID NO: 4968035 - DNA, 25 bp, Homo sapien
tctccggcttagcagcttcagcaaa

SEQ ID NO: 4968036 - DNA, 25 bp, Homo sapien
cagcccacgtggctctccggcttag

SEQ ID NO: 4968037 - DNA, 25 bp, Homo sapien
gtggctctccggcttagcagcttca

SEQ ID NO: 4968038 - DNA, 25 bp, Homo sapien
accttccggcgaacagccagaagct

SEQ ID NO: 4968039 - DNA, 25 bp, Homo sapien
tcatggagcgcattccttgatcata

SEQ ID NO: 4968040 - DNA, 25 bp, Homo sapien
agacttcatggagcgcattccttga

SEQ ID NO: 4968041 - DNA, 25 bp, Homo sapien
gagcgcattccttgatcataggcca

SEQ ID NO: 4968042 - DNA, 25 bp, Homo sapien
tccttgatcataggccatgcagcaa

SEQ ID NO: 4968043 - DNA, 25 bp, Homo sapien
gccaggtttgcggttactagaatga

SEQ ID NO: 4968044 - DNA, 25 bp, Homo sapien
tgcctggccaggtttgcggttacta

SEQ ID NO: 4968045 - DNA, 25 bp, Homo sapien
ggtttgcggttactagaatgaggca

SEQ ID NO: 4968046 - DNA, 25 bp, Homo sapien
tgcggttactagaatgaggcaaaag

SEQ ID NO: 4968047 - DNA, 25 bp, Homo sapien
aagtcccttcagcaggctccgtggg

SEQ ID NO: 4968048 - DNA, 25 bp, Homo sapien
tagccccaagacacttatctgatgc

SEQ ID NO: 4968049 - DNA, 25 bp, Homo sapien
ggtaacatctcaagcagactctatt

SEQ ID NO: 4968050 - DNA, 25 bp, Homo sapien
tgctgccacctattctataccagag

SEQ ID NO: 4968051 - DNA, 25 bp, Homo sapien
ctgctccccctttgccacaagagtc

SEQ ID NO: 4968052 - DNA, 25 bp, Homo sapien
tcagcacatcaagccctgctccccc

SEQ ID NO: 4968053 - DNA, 25 bp, Homo sapien
agcacatcaagccctgctccccctt

SEQ ID NO: 4968054 - DNA, 25 bp, Homo sapien
cacatcaagccctgctccccctttg

SEQ ID NO: 4968055 - DNA, 25 bp, Homo sapien
tatgatcacttaagcaaatacctct

SEQ ID NO: 4968056 - DNA, 25 bp, Homo sapien
atgtatatcattaagtgaatcacac

SEQ ID NO: 4968057 - DNA, 25 bp, Homo sapien
aaatacctctgaccccataattcta

SEQ ID NO: 4968058 - DNA, 25 bp, Homo sapien
aatcacactgactttactctgaatt

SEQ ID NO: 4968059 - DNA, 25 bp, Homo sapien
taaaagccgagaaacgcctgtggtc

SEQ ID NO: 4968060 - DNA, 25 bp, Homo sapien
cacagtcaagaagatgcccctggga

SEQ ID NO: 4968061 - DNA, 25 bp, Homo sapien
tggactttgctacacacctgggatg

SEQ ID NO: 4968062 - DNA, 25 bp, Homo sapien
tgaagatcatataaaccggcggtgg

SEQ ID NO: 4968063 - DNA, 25 bp, Homo sapien
gacagtccctataccatcttagcca

SEQ ID NO: 4968064 - DNA, 25 bp, Homo sapien
agtccctataccatcttagccactg

SEQ ID NO: 4968065 - DNA, 25 bp, Homo sapien
tatgacagtccctataccatcttag

SEQ ID NO: 4968066 - DNA, 25 bp, Homo sapien
cactggtatgacagtccctatacca

SEQ ID NO: 4968067 - DNA, 25 bp, Homo sapien
ctcaacataaaaagaggaccctcca

SEQ ID NO: 4968068 - DNA, 25 bp, Homo sapien
caaaatgaaggcatgccgggaagca

SEQ ID NO: 4968069 - DNA, 25 bp, Homo sapien
acttattttccatcccccctgcctg

SEQ ID NO: 4968070 - DNA, 25 bp, Homo sapien
tgcctgccccccatagcaaaatgaa

SEQ ID NO: 4968071 - DNA, 25 bp, Homo sapien
agttttattgaattagttgcatgca

SEQ ID NO: 4968072 - DNA, 25 bp, Homo sapien
atgagcagcagagtcgagtgttaga

SEQ ID NO: 4968073 - DNA, 25 bp, Homo sapien
cagcagagtcgagtgttagagtgca

SEQ ID NO: 4968074 - DNA, 25 bp, Homo sapien
cccatgagcagcagagtcgagtgtt

SEQ ID NO: 4968075 - DNA, 25 bp, Homo sapien
tgcaggatccagagcggggagaggc

SEQ ID NO: 4968076 - DNA, 25 bp, Homo sapien
ctggttacttggtgacgtgcagagc

SEQ ID NO: 4968077 - DNA, 25 bp, Homo sapien
gatgcccccgtaggtgcaaaagcaa

SEQ ID NO: 4968078 - DNA, 25 bp, Homo sapien
acttggtgacgtgcagagctctctc

SEQ ID NO: 4968079 - DNA, 25 bp, Homo sapien
tcagatgcccccgtaggtgcaaaag

SEQ ID NO: 4968080 - DNA, 25 bp, Homo sapien
gctctggctccgggcggagtcgttc

SEQ ID NO: 4968081 - DNA, 25 bp, Homo sapien
tctggctccgggcggagtcgttccc

SEQ ID NO: 4968082 - DNA, 25 bp, Homo sapien
ctccgggcggagtcgttcccaccag

SEQ ID NO: 4968083 - DNA, 25 bp, Homo sapien
tggctccgggcggagtcgttcccac

SEQ ID NO: 4968084 - DNA, 25 bp, Homo sapien
gaaggaacgtccgagtcagaagtgt

SEQ ID NO: 4968085 - DNA, 25 bp, Homo sapien
tccgccacggtctccataaatttag

SEQ ID NO: 4968086 - DNA, 25 bp, Homo sapien
tggagacttctacagggaccgtcac

SEQ ID NO: 4968087 - DNA, 25 bp, Homo sapien
aaagagcttcacgaccacctcagtg

SEQ ID NO: 4968088 - DNA, 25 bp, Homo sapien
cactgtggtcaaaatgcatgcgctc

SEQ ID NO: 4968089 - DNA, 25 bp, Homo sapien
tcagtggacagaacggacctggttc

SEQ ID NO: 4968090 - DNA, 25 bp, Homo sapien
tgtcagctatcacaccttggccaag

SEQ ID NO: 4968091 - DNA, 25 bp, Homo sapien
tccctgagtgggtgatgaggcttca

SEQ ID NO: 4968092 - DNA, 25 bp, Homo sapien
tagtactggtcttcgccttgcgtga

SEQ ID NO: 4968093 - DNA, 25 bp, Homo sapien
cgtggtgacccgcagatagtactgg

SEQ ID NO: 4968094 - DNA, 25 bp, Homo sapien
tgttgagcatcttccactggtagga

SEQ ID NO: 4968095 - DNA, 25 bp, Homo sapien
tctcagcgacctggagggattcgtc

SEQ ID NO: 4968096 - DNA, 25 bp, Homo sapien
catgcagcgggaacaaaagcagtgc

SEQ ID NO: 4968097 - DNA, 25 bp, Homo sapien
tgaatgaatggaagttagcacatgc

SEQ ID NO: 4968098 - DNA, 25 bp, Homo sapien
ggaaggctacaaagggatagaacca

SEQ ID NO: 4968099 - DNA, 25 bp, Homo sapien
gagatggaagaaacgcaagtgagaa

SEQ ID NO: 4968100 - DNA, 25 bp, Homo sapien
ccgtggagttgtggcggatctcccg

SEQ ID NO: 4968101 - DNA, 25 bp, Homo sapien
cacagacaagatctcccggcacttg

SEQ ID NO: 4968102 - DNA, 25 bp, Homo sapien
acactggtccttcatccgcaggcag

SEQ ID NO: 4968103 - DNA, 25 bp, Homo sapien
ccggcacacagtccggtcatcgtcg

SEQ ID NO: 4968104 - DNA, 25 bp, Homo sapien
ggcctgctgagcctcgtgtatcatc

SEQ ID NO: 4968105 - DNA, 25 bp, Homo sapien
cgtatgaattctgttggcgggtgct

SEQ ID NO: 4968106 - DNA, 25 bp, Homo sapien
ccgggctatggaagtggatgtccat

SEQ ID NO: 4968107 - DNA, 25 bp, Homo sapien
gagcctcgtgtatcatctcaaggaa

SEQ ID NO: 4968108 - DNA, 25 bp, Homo sapien
gaaagaagaagtgaggcctccggtg

SEQ ID NO: 4968109 - DNA, 25 bp, Homo sapien
gacgatgcgggacttgggaaagaag

SEQ ID NO: 4968110 - DNA, 25 bp, Homo sapien
aaagaagaagtgaggcctccggtgg

SEQ ID NO: 4968111 - DNA, 25 bp, Homo sapien
ctgcggacgatgcgggacttgggaa

SEQ ID NO: 4968112 - DNA, 25 bp, Homo sapien
gctgaagggcaggtagtggtaggta

SEQ ID NO: 4968113 - DNA, 25 bp, Homo sapien
aggctgaagggcaggtagtggtagg

SEQ ID NO: 4968114 - DNA, 25 bp, Homo sapien
tgaagggcaggtagtggtaggtatc

SEQ ID NO: 4968115 - DNA, 25 bp, Homo sapien
ctgaagggcaggtagtggtaggtat

SEQ ID NO: 4968116 - DNA, 25 bp, Homo sapien
tggaagagctcgtctatgatgctgg

SEQ ID NO: 4968117 - DNA, 25 bp, Homo sapien
cgcggctgaagtggtcctgcatgac

SEQ ID NO: 4968118 - DNA, 25 bp, Homo sapien
gaagtggtcctgcatgacatccagc

SEQ ID NO: 4968119 - DNA, 25 bp, Homo sapien
ctatgatgctggacgcgcggctgaa

SEQ ID NO: 4968120 - DNA, 25 bp, Homo sapien
atgtgcgtctgctgccggtcgttct

SEQ ID NO: 4968121 - DNA, 25 bp, Homo sapien
agggagtcgatgcggtcaccattca

SEQ ID NO: 4968122 - DNA, 25 bp, Homo sapien
tgtgcgtctgctgccggtcgttctc

SEQ ID NO: 4968123 - DNA, 25 bp, Homo sapien
tcgatgcggtcaccattcatccaga

SEQ ID NO: 4968124 - DNA, 25 bp, Homo sapien
tgctgcatgagttttctaagagaag

SEQ ID NO: 4968125 - DNA, 25 bp, Homo sapien
gttttctaagagaaggcagatacct

SEQ ID NO: 4968126 - DNA, 25 bp, Homo sapien
tatgtcatccagctaagcactgctg

SEQ ID NO: 4968127 - DNA, 25 bp, Homo sapien
gccatcccacgaagcagtttattat

SEQ ID NO: 4968128 - DNA, 25 bp, Homo sapien
gccacttctgcagacgcgtgcgtag

SEQ ID NO: 4968129 - DNA, 25 bp, Homo sapien
gcgtgcgtagaacttcatgcaggtc

SEQ ID NO: 4968130 - DNA, 25 bp, Homo sapien
tctgcagacgcgtgcgtagaacttc

SEQ ID NO: 4968131 - DNA, 25 bp, Homo sapien
ggcggccaaccaggcctgagccact

SEQ ID NO: 4968132 - DNA, 25 bp, Homo sapien
ggccatcatggtctcattgcacact

SEQ ID NO: 4968133 - DNA, 25 bp, Homo sapien
agagggccatcatggtctcattgca

SEQ ID NO: 4968134 - DNA, 25 bp, Homo sapien
gattccctggtctcatttagggcat

SEQ ID NO: 4968135 - DNA, 25 bp, Homo sapien
tgattccctggtctcatttagggca

SEQ ID NO: 4968136 - DNA, 25 bp, Homo sapien
tacacaggtttctttacggcagaac

SEQ ID NO: 4968137 - DNA, 25 bp, Homo sapien
tcttagcatctgaagtagggcgacc

SEQ ID NO: 4968138 - DNA, 25 bp, Homo sapien
gcaatccctgaagtggctcctatgg

SEQ ID NO: 4968139 - DNA, 25 bp, Homo sapien
cacgatggatcatgaagcttgcagg

SEQ ID NO: 4968140 - DNA, 25 bp, Homo sapien
cctgggccaggctcataacaaaacc

SEQ ID NO: 4968141 - DNA, 25 bp, Homo sapien
ttcctgaaggttggacgccacgcct

SEQ ID NO: 4968142 - DNA, 25 bp, Homo sapien
cccctccagtgggatggtcaaggca

SEQ ID NO: 4968143 - DNA, 25 bp, Homo sapien
cttggaactagcatgtgatcagggc

SEQ ID NO: 4968144 - DNA, 25 bp, Homo sapien
gagagtctttatctgtttcaccccg

SEQ ID NO: 4968145 - DNA, 25 bp, Homo sapien
tattgacgtacttacttccctgatt

SEQ ID NO: 4968146 - DNA, 25 bp, Homo sapien
gctgagcagtgtcttgcgctcttcg

SEQ ID NO: 4968147 - DNA, 25 bp, Homo sapien
gtttcaccccgttgacagcattttg

SEQ ID NO: 4968148 - DNA, 25 bp, Homo sapien
cattgtctgagaccgtctggtcccc

SEQ ID NO: 4968149 - DNA, 25 bp, Homo sapien
tgtctgagaccgtctggtcccccag

SEQ ID NO: 4968150 - DNA, 25 bp, Homo sapien
tctgagaccgtctggtcccccagga

SEQ ID NO: 4968151 - DNA, 25 bp, Homo sapien
ctcattgtctgagaccgtctggtcc

SEQ ID NO: 4968152 - DNA, 25 bp, Homo sapien
ctccaattctggagtctttgcacgc

SEQ ID NO: 4968153 - DNA, 25 bp, Homo sapien
gcctccaattctggagtctttgcac

SEQ ID NO: 4968154 - DNA, 25 bp, Homo sapien
tccaattctggagtctttgcacgcc

SEQ ID NO: 4968155 - DNA, 25 bp, Homo sapien
ccaattctggagtctttgcacgcct

SEQ ID NO: 4968156 - DNA, 25 bp, Homo sapien
tcatgggaacagctagacagcctgc

SEQ ID NO: 4968157 - DNA, 25 bp, Homo sapien
aacagctagacagcctgctggcgtc

SEQ ID NO: 4968158 - DNA, 25 bp, Homo sapien
agctagacagcctgctggcgtcccg

SEQ ID NO: 4968159 - DNA, 25 bp, Homo sapien
tgggaacagctagacagcctgctgg

SEQ ID NO: 4968160 - DNA, 25 bp, Homo sapien
gaaacaagaaccctggcatcggagg

SEQ ID NO: 4968161 - DNA, 25 bp, Homo sapien
gactgcaggacagcaatgttgagtg

SEQ ID NO: 4968162 - DNA, 25 bp, Homo sapien
tccttgtccagagtggtatcgatca

SEQ ID NO: 4968163 - DNA, 25 bp, Homo sapien
catggacacctcgaatgaaagcgaa

SEQ ID NO: 4968164 - DNA, 25 bp, Homo sapien
accccagcagacgctccccattcac

SEQ ID NO: 4968165 - DNA, 25 bp, Homo sapien
caccccagcagacgctccccattca

SEQ ID NO: 4968166 - DNA, 25 bp, Homo sapien
tcaccccagcagacgctccccattc

SEQ ID NO: 4968167 - DNA, 25 bp, Homo sapien
cagcccccagggagtctcagcacca

SEQ ID NO: 4968168 - DNA, 25 bp, Homo sapien
gaatccatctgcatccctagtggga

SEQ ID NO: 4968169 - DNA, 25 bp, Homo sapien
gtagagagggttcgcagtggcccga

SEQ ID NO: 4968170 - DNA, 25 bp, Homo sapien
caggaaggacaattcccttcggaga

SEQ ID NO: 4968171 - DNA, 25 bp, Homo sapien
tttcaagagccggaggcaacagcag

SEQ ID NO: 4968172 - DNA, 25 bp, Homo sapien
gcaggcccatctggacactcagtag

SEQ ID NO: 4968173 - DNA, 25 bp, Homo sapien
acagaaccaacaggacgatggggtt

SEQ ID NO: 4968174 - DNA, 25 bp, Homo sapien
cactcagtagcacattaacaaggag

SEQ ID NO: 4968175 - DNA, 25 bp, Homo sapien
tctggacactcagtagcacattaac

SEQ ID NO: 4968176 - DNA, 25 bp, Homo sapien
gaacagagcctttgtcatgccagag

SEQ ID NO: 4968177 - DNA, 25 bp, Homo sapien
aaggaattccagactcagcagcggg

SEQ ID NO: 4968178 - DNA, 25 bp, Homo sapien
ggttctgaccagaagacagggtgct

SEQ ID NO: 4968179 - DNA, 25 bp, Homo sapien
gggcccctgaaagcaacaacttctg

SEQ ID NO: 4968180 - DNA, 25 bp, Homo sapien
caagattggccatttcagttgtgcc

SEQ ID NO: 4968181 - DNA, 25 bp, Homo sapien
aaagtcggatttcggtggttgcagc

SEQ ID NO: 4968182 - DNA, 25 bp, Homo sapien
ttctggaaggtcaagaggctttggc

SEQ ID NO: 4968183 - DNA, 25 bp, Homo sapien
cggtaattcatatcacccagaggca

SEQ ID NO: 4968184 - DNA, 25 bp, Homo sapien
caagccgaaagccacaactgagaga

SEQ ID NO: 4968185 - DNA, 25 bp, Homo sapien
gctctgtcacctgctagcctgggtc

SEQ ID NO: 4968186 - DNA, 25 bp, Homo sapien
gggtctcccgcaacgcggcaggtct

SEQ ID NO: 4968187 - DNA, 25 bp, Homo sapien
gagagatccgcatcttcgcagagga

SEQ ID NO: 4968188 - DNA, 25 bp, Homo sapien
ttcctgggctccgtcgaaagcgcag

SEQ ID NO: 4968189 - DNA, 25 bp, Homo sapien
tgtgactgcgagctgtgtcatccct

SEQ ID NO: 4968190 - DNA, 25 bp, Homo sapien
tatatctgttctatttaccccccca

SEQ ID NO: 4968191 - DNA, 25 bp, Homo sapien
ccccaccacagaattgtggttggag

SEQ ID NO: 4968192 - DNA, 25 bp, Homo sapien
tttatagcgctctgctcgcgcacac

SEQ ID NO: 4968193 - DNA, 25 bp, Homo sapien
cggtcagcggcaccctgtgcccgcg

SEQ ID NO: 4968194 - DNA, 25 bp, Homo sapien
ctgggaggcgccgtatttatagcgc

SEQ ID NO: 4968195 - DNA, 25 bp, Homo sapien
cgacgccgcgttgtgggcactggga

SEQ ID NO: 4968196 - DNA, 25 bp, Homo sapien
gactcacgcccaaagaatgccgcgg

SEQ ID NO: 4968197 - DNA, 25 bp, Homo sapien
cacgcccaaagaatgccgcggaaag

SEQ ID NO: 4968198 - DNA, 25 bp, Homo sapien
actcacgcccaaagaatgccgcgga

SEQ ID NO: 4968199 - DNA, 25 bp, Homo sapien
tcacgcccaaagaatgccgcggaaa

SEQ ID NO: 4968200 - DNA, 25 bp, Homo sapien
ttttccgccactcataaggtggggc

SEQ ID NO: 4968201 - DNA, 25 bp, Homo sapien
ccactcataaggtggggcttctctc

SEQ ID NO: 4968202 - DNA, 25 bp, Homo sapien
tccgccactcataaggtggggcttc

SEQ ID NO: 4968203 - DNA, 25 bp, Homo sapien
ctctgaactatgacctctgctgtcc

SEQ ID NO: 4968204 - DNA, 25 bp, Homo sapien
taagcaggggaccagcatacccggg

SEQ ID NO: 4968205 - DNA, 25 bp, Homo sapien
tcgggaggaaggtctcacatctgtc

SEQ ID NO: 4968206 - DNA, 25 bp, Homo sapien
agaggcaaagtggacctggcaacca

SEQ ID NO: 4968207 - DNA, 25 bp, Homo sapien
cagctacctcgggaggaaggtctca

SEQ ID NO: 4968208 - DNA, 25 bp, Homo sapien
tgttggctacactctaaagctgctt

SEQ ID NO: 4968209 - DNA, 25 bp, Homo sapien
atggcccgagccctctttgcatggg

SEQ ID NO: 4968210 - DNA, 25 bp, Homo sapien
tagggcatagagttgtctccttccc

SEQ ID NO: 4968211 - DNA, 25 bp, Homo sapien
gatcacagctgcatgccgaccttgt

SEQ ID NO: 4968212 - DNA, 25 bp, Homo sapien
tctccttatcaagcatcactgaggc

SEQ ID NO: 4968213 - DNA, 25 bp, Homo sapien
gatgacatcgttctccaatttatag

SEQ ID NO: 4968214 - DNA, 25 bp, Homo sapien
gtcccacgcctgcatttcccgaaat

SEQ ID NO: 4968215 - DNA, 25 bp, Homo sapien
gtaaaaggcatcctttcttccagtg

SEQ ID NO: 4968216 - DNA, 25 bp, Homo sapien
gcctgaggcatcaactactgagaag

SEQ ID NO: 4968217 - DNA, 25 bp, Homo sapien
ctgaggcatcaactactgagaagcc

SEQ ID NO: 4968218 - DNA, 25 bp, Homo sapien
cctgaggcatcaactactgagaagc

SEQ ID NO: 4968219 - DNA, 25 bp, Homo sapien
gaagcctgcagacttaggggaaatg

SEQ ID NO: 4968220 - DNA, 25 bp, Homo sapien
tctgcctcctggattcaacattctc

SEQ ID NO: 4968221 - DNA, 25 bp, Homo sapien
aactctgcctcctggattcaacatt

SEQ ID NO: 4968222 - DNA, 25 bp, Homo sapien
gagatgggttttcgccgtgttggcc

SEQ ID NO: 4968223 - DNA, 25 bp, Homo sapien
agagatgggttttcgccgtgttggc

SEQ ID NO: 4968224 - DNA, 25 bp, Homo sapien
gaaaaccgctggcactgaatagctg

SEQ ID NO: 4968225 - DNA, 25 bp, Homo sapien
gtaaattaaacatgcccctcgcctg

SEQ ID NO: 4968226 - DNA, 25 bp, Homo sapien
gagaaagatgatagccccgtacaga

SEQ ID NO: 4968227 - DNA, 25 bp, Homo sapien
tgaaaggctcgctgaaatctgtgct

SEQ ID NO: 4968228 - DNA, 25 bp, Homo sapien
aagggcagcctgctttcacaaggta

SEQ ID NO: 4968229 - DNA, 25 bp, Homo sapien
gctgagaaattactcctgggcccag

SEQ ID NO: 4968230 - DNA, 25 bp, Homo sapien
ttttcagggatagaccagagcagca

SEQ ID NO: 4968231 - DNA, 25 bp, Homo sapien
gacagactgcactgagggtcactac

SEQ ID NO: 4968232 - DNA, 25 bp, Homo sapien
acatgaattcatctgaatcattgcc

SEQ ID NO: 4968233 - DNA, 25 bp, Homo sapien
ttacatgaattcatctgaatcattg

SEQ ID NO: 4968234 - DNA, 25 bp, Homo sapien
catgaattcatctgaatcattgcca

SEQ ID NO: 4968235 - DNA, 25 bp, Homo sapien
tgaattcatctgaatcattgccatc

SEQ ID NO: 4968236 - DNA, 25 bp, Homo sapien
aaaatgagaacataaaagccttgaa

SEQ ID NO: 4968237 - DNA, 25 bp, Homo sapien
aatgagaacataaaagccttgaaaa

SEQ ID NO: 4968238 - DNA, 25 bp, Homo sapien
aaatgagaacataaaagccttgaaa

SEQ ID NO: 4968239 - DNA, 25 bp, Homo sapien
taataaataaaggcacttttgcatg

SEQ ID NO: 4968240 - DNA, 25 bp, Homo sapien
aataaataaaggcacttttgcatgc

SEQ ID NO: 4968241 - DNA, 25 bp, Homo sapien
ctaataaataaaggcacttttgcat

SEQ ID NO: 4968242 - DNA, 25 bp, Homo sapien
tcaactttcattagtgatgaatagc

SEQ ID NO: 4968243 - DNA, 25 bp, Homo sapien
ttcaactttcattagtgatgaatag

SEQ ID NO: 4968244 - DNA, 25 bp, Homo sapien
aactttcattagtgatgaatagctc

SEQ ID NO: 4968245 - DNA, 25 bp, Homo sapien
attttcaactttcattagtgatgaa

SEQ ID NO: 4968246 - DNA, 25 bp, Homo sapien
gaatcttgctggacttctaatctac

SEQ ID NO: 4968247 - DNA, 25 bp, Homo sapien
tgttatcttctatggcaaagtagac

SEQ ID NO: 4968248 - DNA, 25 bp, Homo sapien
tacagcactgtatggcagaacatcc

SEQ ID NO: 4968249 - DNA, 25 bp, Homo sapien
tctgtgatgagaattcgcaggatta

SEQ ID NO: 4968250 - DNA, 25 bp, Homo sapien
taaggttgagcttaagctgagcttg

SEQ ID NO: 4968251 - DNA, 25 bp, Homo sapien
tcatcagggaataatctttgaggtc

SEQ ID NO: 4968252 - DNA, 25 bp, Homo sapien
gtctcaatgccacagctccgacata

SEQ ID NO: 4968253 - DNA, 25 bp, Homo sapien
tatatcgttcttaatggctaataca

SEQ ID NO: 4968254 - DNA, 25 bp, Homo sapien
ctcattcctctcttcacgatctctg

SEQ ID NO: 4968255 - DNA, 25 bp, Homo sapien
tctgggaaccgctcgactttggtct

SEQ ID NO: 4968256 - DNA, 25 bp, Homo sapien
ttggtcttttctaatcggttcagga

SEQ ID NO: 4968257 - DNA, 25 bp, Homo sapien
gctaggtctgggaaccgctcgactt

SEQ ID NO: 4968258 - DNA, 25 bp, Homo sapien
tctgcctgtgaaagcctatctgccc

SEQ ID NO: 4968259 - DNA, 25 bp, Homo sapien
ccacattaacgttgttcatcttgca

SEQ ID NO: 4968260 - DNA, 25 bp, Homo sapien
gaccacggcgtatataccacattaa

SEQ ID NO: 4968261 - DNA, 25 bp, Homo sapien
tcttcaggttagaccacggcgtata

SEQ ID NO: 4968262 - DNA, 25 bp, Homo sapien
cttagcttgaatctggactctgatg

SEQ ID NO: 4968263 - DNA, 25 bp, Homo sapien
ccttagcttgaatctggactctgat

SEQ ID NO: 4968264 - DNA, 25 bp, Homo sapien
tatgtggaccttgaaccttagcttg

SEQ ID NO: 4968265 - DNA, 25 bp, Homo sapien
ttagcttgaatctggactctgatga

SEQ ID NO: 4968266 - DNA, 25 bp, Homo sapien
ttgaatgctattggccttcacaagg

SEQ ID NO: 4968267 - DNA, 25 bp, Homo sapien
aatgctattggccttcacaaggtgg

SEQ ID NO: 4968268 - DNA, 25 bp, Homo sapien
gccttcacaaggtgggcacagtcca

SEQ ID NO: 4968269 - DNA, 25 bp, Homo sapien
cttgaatgctattggccttcacaag

SEQ ID NO: 4968270 - DNA, 25 bp, Homo sapien
ttgggatgtcttctatattctctcc

SEQ ID NO: 4968271 - DNA, 25 bp, Homo sapien
cagcacttcctttgggatgtcttct

SEQ ID NO: 4968272 - DNA, 25 bp, Homo sapien
cctttgggatgtcttctatattctc

SEQ ID NO: 4968273 - DNA, 25 bp, Homo sapien
agcacttcctttgggatgtcttcta

SEQ ID NO: 4968274 - DNA, 25 bp, Homo sapien
atacatgcacatgaacagccaatca

SEQ ID NO: 4968275 - DNA, 25 bp, Homo sapien
catcacactcataaactacagaagg

SEQ ID NO: 4968276 - DNA, 25 bp, Homo sapien
atcatcacactcataaactacagaa

SEQ ID NO: 4968277 - DNA, 25 bp, Homo sapien
ctcatacatgcacatgaacagccaa

SEQ ID NO: 4968278 - DNA, 25 bp, Homo sapien
acatgagccgaagagagtttgtcca

SEQ ID NO: 4968279 - DNA, 25 bp, Homo sapien
gagccgaagagagtttgtccacatg

SEQ ID NO: 4968280 - DNA, 25 bp, Homo sapien
catgagccgaagagagtttgtccac

SEQ ID NO: 4968281 - DNA, 25 bp, Homo sapien
cgaagagagtttgtccacatgaaac

SEQ ID NO: 4968282 - DNA, 25 bp, Homo sapien
ttcaggccagccatgcttgatcaga

SEQ ID NO: 4968283 - DNA, 25 bp, Homo sapien
gccagccatgcttgatcagatcttc

SEQ ID NO: 4968284 - DNA, 25 bp, Homo sapien
caggccagccatgcttgatcagatc

SEQ ID NO: 4968285 - DNA, 25 bp, Homo sapien
ggccagccatgcttgatcagatctt

SEQ ID NO: 4968286 - DNA, 25 bp, Homo sapien
caatgagatatgagaaacgaaagaa

SEQ ID NO: 4968287 - DNA, 25 bp, Homo sapien
aatgagatatgagaaacgaaagaaa

SEQ ID NO: 4968288 - DNA, 25 bp, Homo sapien
cagattctcgctgtctcttaagctg

SEQ ID NO: 4968289 - DNA, 25 bp, Homo sapien
tcagacaacagattctcgctgtctc

SEQ ID NO: 4968290 - DNA, 25 bp, Homo sapien
caacagattctcgctgtctcttaag

SEQ ID NO: 4968291 - DNA, 25 bp, Homo sapien
ttcagacaacagattctcgctgtct

SEQ ID NO: 4968292 - DNA, 25 bp, Homo sapien
tcaaaatcaaatgcttttgaaaact

SEQ ID NO: 4968293 - DNA, 25 bp, Homo sapien
gctgaaaatttcaaaatcaaatgct

SEQ ID NO: 4968294 - DNA, 25 bp, Homo sapien
tgaaaatttcaaaatcaaatgcttt

SEQ ID NO: 4968295 - DNA, 25 bp, Homo sapien
ctgctgaaaatttcaaaatcaaatg

SEQ ID NO: 4968296 - DNA, 25 bp, Homo sapien
taaatagtgtaggcagatgaattaa

SEQ ID NO: 4968297 - DNA, 25 bp, Homo sapien
atgtaaatagtgtaggcagatgaat

SEQ ID NO: 4968298 - DNA, 25 bp, Homo sapien
catgtaaatagtgtaggcagatgaa

SEQ ID NO: 4968299 - DNA, 25 bp, Homo sapien
tataatcagatggtcttaaatgtga

SEQ ID NO: 4968300 - DNA, 25 bp, Homo sapien
cttcagaggtgatctgattatttca

SEQ ID NO: 4968301 - DNA, 25 bp, Homo sapien
aagtggactttgagccaagtatcta

SEQ ID NO: 4968302 - DNA, 25 bp, Homo sapien
tagcaaccaacccaacttcagaggt

SEQ ID NO: 4968303 - DNA, 25 bp, Homo sapien
ggtggatcacttgaggtaaggagtt

SEQ ID NO: 4968304 - DNA, 25 bp, Homo sapien
gagcgtggtgattcacgcctttaat

SEQ ID NO: 4968305 - DNA, 25 bp, Homo sapien
cttttggctgagcgtggtgattcac

SEQ ID NO: 4968306 - DNA, 25 bp, Homo sapien
cctagcactttggaaggccgaggcg

SEQ ID NO: 4968307 - DNA, 25 bp, Homo sapien
gctgctgctggtgaagtagaacacc

SEQ ID NO: 4968308 - DNA, 25 bp, Homo sapien
cgctgctgctggtgaagtagaacac

SEQ ID NO: 4968309 - DNA, 25 bp, Homo sapien
tgctgctggtgaagtagaacaccat

SEQ ID NO: 4968310 - DNA, 25 bp, Homo sapien
ctgctgctggtgaagtagaacacca

SEQ ID NO: 4968311 - DNA, 25 bp, Homo sapien
gcggtgactccaccgcggagcagca

SEQ ID NO: 4968312 - DNA, 25 bp, Homo sapien
cggtgactccaccgcggagcagcag

SEQ ID NO: 4968313 - DNA, 25 bp, Homo sapien
cccggaactcctccgtgcacttccg

SEQ ID NO: 4968314 - DNA, 25 bp, Homo sapien
tcataacgccggccgtgggcgccat

SEQ ID NO: 4968315 - DNA, 25 bp, Homo sapien
gggcgcgtcataacgccggccgtgg

SEQ ID NO: 4968316 - DNA, 25 bp, Homo sapien
tccgtgcacttccggcggacgtcgg

SEQ ID NO: 4968317 - DNA, 25 bp, Homo sapien
gcttaattggtctatggctgtggcc

SEQ ID NO: 4968318 - DNA, 25 bp, Homo sapien
gatctgctgggattcattcactaga

SEQ ID NO: 4968319 - DNA, 25 bp, Homo sapien
gaaaactcgcatgaatttagctgct

SEQ ID NO: 4968320 - DNA, 25 bp, Homo sapien
tctgtagtaaagcagtgcattgcgt

SEQ ID NO: 4968321 - DNA, 25 bp, Homo sapien
atctgaggagatccaagagatcaag

SEQ ID NO: 4968322 - DNA, 25 bp, Homo sapien
gtaaccagagtctgaagtatccaag

SEQ ID NO: 4968323 - DNA, 25 bp, Homo sapien
caaggagctactctttttgaggcat

SEQ ID NO: 4968324 - DNA, 25 bp, Homo sapien
cctcagcttccagttatcatttgat

SEQ ID NO: 4968325 - DNA, 25 bp, Homo sapien
tagtgttttaagtcagcatgagcag

SEQ ID NO: 4968326 - DNA, 25 bp, Homo sapien
tgttaacaagaaactatggtcctca

SEQ ID NO: 4968327 - DNA, 25 bp, Homo sapien
caaagtgctaatgtcagtagatcca

SEQ ID NO: 4968328 - DNA, 25 bp, Homo sapien
gttatttacgcaagccacacttcag

SEQ ID NO: 4968329 - DNA, 25 bp, Homo sapien
ctagacatctgtttccagagcttca

SEQ ID NO: 4968330 - DNA, 25 bp, Homo sapien
tagacatctgtttccagagcttcaa

SEQ ID NO: 4968331 - DNA, 25 bp, Homo sapien
agacatctgtttccagagcttcaac

SEQ ID NO: 4968332 - DNA, 25 bp, Homo sapien
catattaataggtggcctagttccc

SEQ ID NO: 4968333 - DNA, 25 bp, Homo sapien
tcattagtgcatacagagaagagtt

SEQ ID NO: 4968334 - DNA, 25 bp, Homo sapien
gcagaaggacgatctttagggtctt

SEQ ID NO: 4968335 - DNA, 25 bp, Homo sapien
gaagagttcaattactttctggtat

SEQ ID NO: 4968336 - DNA, 25 bp, Homo sapien
tggtccagtatgctttccattctgc

SEQ ID NO: 4968337 - DNA, 25 bp, Homo sapien
ccttggtggtaccaaatcagtcatc

SEQ ID NO: 4968338 - DNA, 25 bp, Homo sapien
tgtcttcaattgtcctgccatcaag

SEQ ID NO: 4968339 - DNA, 25 bp, Homo sapien
tcttggatttataggttatcgaccc

SEQ ID NO: 4968340 - DNA, 25 bp, Homo sapien
catttcccacaaagtaaggccaaag

SEQ ID NO: 4968341 - DNA, 25 bp, Homo sapien
tgtcagtaataacaccattctcctc

SEQ ID NO: 4968342 - DNA, 25 bp, Homo sapien
tttgaaagattaatgtgtggaatcg

SEQ ID NO: 4968343 - DNA, 25 bp, Homo sapien
tgtgtggaatcgataaagtcatcat

SEQ ID NO: 4968344 - DNA, 25 bp, Homo sapien
ccaatgtaacaagcctcagggtcag

SEQ ID NO: 4968345 - DNA, 25 bp, Homo sapien
tgccaatgtaacaagcctcagggtc

SEQ ID NO: 4968346 - DNA, 25 bp, Homo sapien
atgtaacaagcctcagggtcagtca

SEQ ID NO: 4968347 - DNA, 25 bp, Homo sapien
aatgtaacaagcctcagggtcagtc

SEQ ID NO: 4968348 - DNA, 25 bp, Homo sapien
gaaacaagcaagatggttatgaagg

SEQ ID NO: 4968349 - DNA, 25 bp, Homo sapien
caagcaagatggttatgaaggcagg

SEQ ID NO: 4968350 - DNA, 25 bp, Homo sapien
aacaagcaagatggttatgaaggca

SEQ ID NO: 4968351 - DNA, 25 bp, Homo sapien
ctgaaacaagcaagatggttatgaa

SEQ ID NO: 4968352 - DNA, 25 bp, Homo sapien
cgatttgaacaagtagttcacaggt

SEQ ID NO: 4968353 - DNA, 25 bp, Homo sapien
ttcacaggttaatcagtgtagccag

SEQ ID NO: 4968354 - DNA, 25 bp, Homo sapien
caaatcacgaaaaggcaagcaaccc

SEQ ID NO: 4968355 - DNA, 25 bp, Homo sapien
aggcaagcaacccaaagggaaacag

SEQ ID NO: 4968356 - DNA, 25 bp, Homo sapien
taatcacatcaggaccgataggatg

SEQ ID NO: 4968357 - DNA, 25 bp, Homo sapien
gataggatgtcctacaatgtgtcag

SEQ ID NO: 4968358 - DNA, 25 bp, Homo sapien
cagactgggcagaggtccttattcc

SEQ ID NO: 4968359 - DNA, 25 bp, Homo sapien
catattagagttatgctgaccacaa

SEQ ID NO: 4968360 - DNA, 25 bp, Homo sapien
caacaaaagtttgatgagatcataa

SEQ ID NO: 4968361 - DNA, 25 bp, Homo sapien
gagatcataaactaatggttcagtc

SEQ ID NO: 4968362 - DNA, 25 bp, Homo sapien
gatggattgttctgacaacaaaagt

SEQ ID NO: 4968363 - DNA, 25 bp, Homo sapien
ttcaaagagtttaagcagacatgct

SEQ ID NO: 4968364 - DNA, 25 bp, Homo sapien
tggtagagagactcctacatcacag

SEQ ID NO: 4968365 - DNA, 25 bp, Homo sapien
tattttcatccagtggtagagagac

SEQ ID NO: 4968366 - DNA, 25 bp, Homo sapien
tcatccagtggtagagagactccta

SEQ ID NO: 4968367 - DNA, 25 bp, Homo sapien
gagagactcctacatcacagatttt

SEQ ID NO: 4968368 - DNA, 25 bp, Homo sapien
gactgccatcattggcttcagtaaa

SEQ ID NO: 4968369 - DNA, 25 bp, Homo sapien
tccatattccatagcaagacacaga

SEQ ID NO: 4968370 - DNA, 25 bp, Homo sapien
ctgctggaaaaggatcttggctggc

SEQ ID NO: 4968371 - DNA, 25 bp, Homo sapien
cttggctggctttatatcgttcttc

SEQ ID NO: 4968372 - DNA, 25 bp, Homo sapien
ggcttttcaaaatcttagcttcatc

SEQ ID NO: 4968373 - DNA, 25 bp, Homo sapien
ttttcaaaatcttagcttcatccat

SEQ ID NO: 4968374 - DNA, 25 bp, Homo sapien
caacaatgtttggatgatgaaggct

SEQ ID NO: 4968375 - DNA, 25 bp, Homo sapien
aacaatgtttggatgatgaaggctt

SEQ ID NO: 4968376 - DNA, 25 bp, Homo sapien
tagtctcttttgatacacacttcga

SEQ ID NO: 4968377 - DNA, 25 bp, Homo sapien
cttttgatacacacttcgataatga

SEQ ID NO: 4968378 - DNA, 25 bp, Homo sapien
tacacacttcgataatgatcattac

SEQ ID NO: 4968379 - DNA, 25 bp, Homo sapien
gatcattacatataggattaatctt

SEQ ID NO: 4968380 - DNA, 25 bp, Homo sapien
ccatttgagcatgttggactacaac

SEQ ID NO: 4968381 - DNA, 25 bp, Homo sapien
tccatttcaattgggaggtaagatc

SEQ ID NO: 4968382 - DNA, 25 bp, Homo sapien
tagtttggactatgaacacctctgc

SEQ ID NO: 4968383 - DNA, 25 bp, Homo sapien
tatctatactgtggaagggagagga

SEQ ID NO: 4968384 - DNA, 25 bp, Homo sapien
tagcactccaagagactaaagatgc

SEQ ID NO: 4968385 - DNA, 25 bp, Homo sapien
ttctgtaccaactggcagctgccca

SEQ ID NO: 4968386 - DNA, 25 bp, Homo sapien
aacaggtggactcgtagataccctc

SEQ ID NO: 4968387 - DNA, 25 bp, Homo sapien
tgtcagttgagaacctgtaatacag

SEQ ID NO: 4968388 - DNA, 25 bp, Homo sapien
cattaggtacacatttaccccagta

SEQ ID NO: 4968389 - DNA, 25 bp, Homo sapien
taggtacacatttaccccagtacca

SEQ ID NO: 4968390 - DNA, 25 bp, Homo sapien
tttcattaggtacacatttacccca

SEQ ID NO: 4968391 - DNA, 25 bp, Homo sapien
tcattaggtacacatttaccccagt

SEQ ID NO: 4968392 - DNA, 25 bp, Homo sapien
agaggccgggatatttatagttgga

SEQ ID NO: 4968393 - DNA, 25 bp, Homo sapien
ctgcataaacggagaggccgggata

SEQ ID NO: 4968394 - DNA, 25 bp, Homo sapien
ggatatttatagttggagttgaaca

SEQ ID NO: 4968395 - DNA, 25 bp, Homo sapien
cataaacggagaggccgggatattt

SEQ ID NO: 4968396 - DNA, 25 bp, Homo sapien
gtcttgaaattactgatcccttcca

SEQ ID NO: 4968397 - DNA, 25 bp, Homo sapien
tgtcttgaaattactgatcccttcc

SEQ ID NO: 4968398 - DNA, 25 bp, Homo sapien
ggtgtcttgaaattactgatccctt

SEQ ID NO: 4968399 - DNA, 25 bp, Homo sapien
gtgtcttgaaattactgatcccttc

SEQ ID NO: 4968400 - DNA, 25 bp, Homo sapien
taaccagatcctcccctgtcacgaa

SEQ ID NO: 4968401 - DNA, 25 bp, Homo sapien
cccaatccaggggctcacaaggggc

SEQ ID NO: 4968402 - DNA, 25 bp, Homo sapien
ctgtaaccagatcctcccctgtcac

SEQ ID NO: 4968403 - DNA, 25 bp, Homo sapien
agatcctcccctgtcacgaaagccc

SEQ ID NO: 4968404 - DNA, 25 bp, Homo sapien
gaggtgaaaataagtcgtggccaag

SEQ ID NO: 4968405 - DNA, 25 bp, Homo sapien
gtgaaaataagtcgtggccaagtac

SEQ ID NO: 4968406 - DNA, 25 bp, Homo sapien
aggtcggaggtgaaaataagtcgtg

SEQ ID NO: 4968407 - DNA, 25 bp, Homo sapien
tcggaggtgaaaataagtcgtggcc

SEQ ID NO: 4968408 - DNA, 25 bp, Homo sapien
cccgcaggcgccaaagacgagggaa

SEQ ID NO: 4968409 - DNA, 25 bp, Homo sapien
gttgcaattcgaaccctcctggctt

SEQ ID NO: 4968410 - DNA, 25 bp, Homo sapien
ggctttcaaaaagtcgcgcgctgcg

SEQ ID NO: 4968411 - DNA, 25 bp, Homo sapien
tcttcaaaattggtcccgagcggcc

SEQ ID NO: 4968412 - DNA, 25 bp, Homo sapien
ttttcagtagatatgggctttgcca

SEQ ID NO: 4968413 - DNA, 25 bp, Homo sapien
gggtctcagtcatctcacccaggtt

SEQ ID NO: 4968414 - DNA, 25 bp, Homo sapien
gacaataagttcaggtgggcacacg

SEQ ID NO: 4968415 - DNA, 25 bp, Homo sapien
tttaaccgtgactgcccaatgccag

SEQ ID NO: 4968416 - DNA, 25 bp, Homo sapien
ttcaagagggaaatgacgaccggcc

SEQ ID NO: 4968417 - DNA, 25 bp, Homo sapien
tacatatatgggctctggcaaggga

SEQ ID NO: 4968418 - DNA, 25 bp, Homo sapien
tgtgcccttgcaggcaacgtcatcc

SEQ ID NO: 4968419 - DNA, 25 bp, Homo sapien
tgcaggcaacgtcatccatccagat

SEQ ID NO: 4968420 - DNA, 25 bp, Homo sapien
aagatggtttcctctgtgcccttgc

SEQ ID NO: 4968421 - DNA, 25 bp, Homo sapien
aagctgcagcggaagatggtttcct

SEQ ID NO: 4968422 - DNA, 25 bp, Homo sapien
cttgcccgaatcgagctgtgcggta

SEQ ID NO: 4968423 - DNA, 25 bp, Homo sapien
ggccctcgtgcggacctgagccatt

SEQ ID NO: 4968424 - DNA, 25 bp, Homo sapien
caacgccggtcgtggtacacttcca

SEQ ID NO: 4968425 - DNA, 25 bp, Homo sapien
ctgagccattcaccaggcggatcat

SEQ ID NO: 4968426 - DNA, 25 bp, Homo sapien
gggctcctatggtctccccagtagg

SEQ ID NO: 4968427 - DNA, 25 bp, Homo sapien
ccccagtagggaccacattgatctc

SEQ ID NO: 4968428 - DNA, 25 bp, Homo sapien
tgcattgagcaaagtcatggcctgc

SEQ ID NO: 4968429 - DNA, 25 bp, Homo sapien
catgcattgagcaaagtcatggcct

SEQ ID NO: 4968430 - DNA, 25 bp, Homo sapien
ggccacattttgttgtagctccact

SEQ ID NO: 4968431 - DNA, 25 bp, Homo sapien
cacattttgttgtagctccacttca

SEQ ID NO: 4968432 - DNA, 25 bp, Homo sapien
attttgttgtagctccacttcacag

SEQ ID NO: 4968433 - DNA, 25 bp, Homo sapien
agaggccacattttgttgtagctcc

SEQ ID NO: 4968434 - DNA, 25 bp, Homo sapien
ctaagctgtggattttgcatccttt

SEQ ID NO: 4968435 - DNA, 25 bp, Homo sapien
tgcttatgatgtaggctgccctgat

SEQ ID NO: 4968436 - DNA, 25 bp, Homo sapien
aggaactcagagtctaaattcagaa

SEQ ID NO: 4968437 - DNA, 25 bp, Homo sapien
cttgcttatgatgtaggctgccctg

SEQ ID NO: 4968438 - DNA, 25 bp, Homo sapien
tatctctcagcaagcagaaatcggg

SEQ ID NO: 4968439 - DNA, 25 bp, Homo sapien
aatcgggacatctggattctagacc

SEQ ID NO: 4968440 - DNA, 25 bp, Homo sapien
caatttggccgtgacctaggctggg

SEQ ID NO: 4968441 - DNA, 25 bp, Homo sapien
caccagtcccttttgcacagttaca

SEQ ID NO: 4968442 - DNA, 25 bp, Homo sapien
aggccaccctggttagcggctcttc

SEQ ID NO: 4968443 - DNA, 25 bp, Homo sapien
tcaggtctttgctgctaacggcacg

SEQ ID NO: 4968444 - DNA, 25 bp, Homo sapien
taacggcacgggcttcagaggtgtt

SEQ ID NO: 4968445 - DNA, 25 bp, Homo sapien
tcccgcacgatgttggcttgtggag

SEQ ID NO: 4968446 - DNA, 25 bp, Homo sapien
ggcaccatgtctgtcagaatttcca

SEQ ID NO: 4968447 - DNA, 25 bp, Homo sapien
gaaaccctcagacatgggcaccatg

SEQ ID NO: 4968448 - DNA, 25 bp, Homo sapien
tcccagggcgcagggaatgactaag

SEQ ID NO: 4968449 - DNA, 25 bp, Homo sapien
tatggttaatgcttctgggactgga

SEQ ID NO: 4968450 - DNA, 25 bp, Homo sapien
cctggcctaaggacgtgaggaagtc

SEQ ID NO: 4968451 - DNA, 25 bp, Homo sapien
gagaattcccaacaagagcccctct

SEQ ID NO: 4968452 - DNA, 25 bp, Homo sapien
aaccagtcaacaaacagagcaggga

SEQ ID NO: 4968453 - DNA, 25 bp, Homo sapien
caaggtgaatagagaccacgcatcc

SEQ ID NO: 4968454 - DNA, 25 bp, Homo sapien
tgagtgtgcttgatctcatctgaag

SEQ ID NO: 4968455 - DNA, 25 bp, Homo sapien
cctgagtgtgcttgatctcatctga

SEQ ID NO: 4968456 - DNA, 25 bp, Homo sapien
gagtgtgcttgatctcatctgaagg

SEQ ID NO: 4968457 - DNA, 25 bp, Homo sapien
catcctgagtgtgcttgatctcatc

SEQ ID NO: 4968458 - DNA, 25 bp, Homo sapien
ggcacagagattataccagctgggc

SEQ ID NO: 4968459 - DNA, 25 bp, Homo sapien
ggtgtccagcatgatcataagcact

SEQ ID NO: 4968460 - DNA, 25 bp, Homo sapien
tatgacacctctagaaatgtggcca

SEQ ID NO: 4968461 - DNA, 25 bp, Homo sapien
cacaaccgccaggtttatgacacct

SEQ ID NO: 4968462 - DNA, 25 bp, Homo sapien
ctagccctgtgccaacaccatatcc

SEQ ID NO: 4968463 - DNA, 25 bp, Homo sapien
aacaccatatcccacggccccagca

SEQ ID NO: 4968464 - DNA, 25 bp, Homo sapien
cacggccccagcagaatgtccttac

SEQ ID NO: 4968465 - DNA, 25 bp, Homo sapien
tagccctgtgccaacaccatatccc

SEQ ID NO: 4968466 - DNA, 25 bp, Homo sapien
ttctctccttttgggcctcggtcac

SEQ ID NO: 4968467 - DNA, 25 bp, Homo sapien
ggcatccccagctctgtctcctttc

SEQ ID NO: 4968468 - DNA, 25 bp, Homo sapien
tctcctttctctccttttgggcctc

SEQ ID NO: 4968469 - DNA, 25 bp, Homo sapien
tggcatccccagctctgtctccttt

SEQ ID NO: 4968470 - DNA, 25 bp, Homo sapien
tgcaggagattgatgaactcgagac

SEQ ID NO: 4968471 - DNA, 25 bp, Homo sapien
gagggcagccaattctgccatctgc

SEQ ID NO: 4968472 - DNA, 25 bp, Homo sapien
accagagaaaccctcaggcaggagc

SEQ ID NO: 4968473 - DNA, 25 bp, Homo sapien
gagaagagggcagccaattctgcca

SEQ ID NO: 4968474 - DNA, 25 bp, Homo sapien
ctgtcacccaggcccaggcgggagt

SEQ ID NO: 4968475 - DNA, 25 bp, Homo sapien
gcagtggtgcaatcttagctcactg

SEQ ID NO: 4968476 - DNA, 25 bp, Homo sapien
atcacaggtgtgccccaacatgcct

SEQ ID NO: 4968477 - DNA, 25 bp, Homo sapien
gggatcacaggtgtgccccaacatg

SEQ ID NO: 4968478 - DNA, 25 bp, Homo sapien
acgcatgcccattggtcctgtggcc

SEQ ID NO: 4968479 - DNA, 25 bp, Homo sapien
tttgaacccacgcatgcccattggt

SEQ ID NO: 4968480 - DNA, 25 bp, Homo sapien
ccgggcaatcctggggtacctctct

SEQ ID NO: 4968481 - DNA, 25 bp, Homo sapien
tggggtacctctctccccgggcaga

SEQ ID NO: 4968482 - DNA, 25 bp, Homo sapien
ggcctggcctaagcgtgtagttatc

SEQ ID NO: 4968483 - DNA, 25 bp, Homo sapien
catgcagagccagcataaacaagtc

SEQ ID NO: 4968484 - DNA, 25 bp, Homo sapien
aagtccttgaccgagtgagagccct

SEQ ID NO: 4968485 - DNA, 25 bp, Homo sapien
ctgcggtgacggtgccggcgccatg

SEQ ID NO: 4968486 - DNA, 25 bp, Homo sapien
ctgatcacctttgggtcccggtggc

SEQ ID NO: 4968487 - DNA, 25 bp, Homo sapien
cccacagggctagacatctcatcag

SEQ ID NO: 4968488 - DNA, 25 bp, Homo sapien
gcaacacccacagggctagacatct

SEQ ID NO: 4968489 - DNA, 25 bp, Homo sapien
gctagacatctcatcagttgcagaa

SEQ ID NO: 4968490 - DNA, 25 bp, Homo sapien
cagttgcagaatcttcttgccagcc

SEQ ID NO: 4968491 - DNA, 25 bp, Homo sapien
aaagaccctgatgtagggcctctgg

SEQ ID NO: 4968492 - DNA, 25 bp, Homo sapien
ttcccaggagtcactctcgccaagg

SEQ ID NO: 4968493 - DNA, 25 bp, Homo sapien
tcactctcgccaagggaggatgctg

SEQ ID NO: 4968494 - DNA, 25 bp, Homo sapien
tggatattgagtcttgggttcaagt

SEQ ID NO: 4968495 - DNA, 25 bp, Homo sapien
ggctccgaggaccaagtgatcttta

SEQ ID NO: 4968496 - DNA, 25 bp, Homo sapien
cctggctgactcagaagggctgatg

SEQ ID NO: 4968497 - DNA, 25 bp, Homo sapien
tcacatcctcaggtggtacaggcct

SEQ ID NO: 4968498 - DNA, 25 bp, Homo sapien
tgatgatttggccagagcctcgagg

SEQ ID NO: 4968499 - DNA, 25 bp, Homo sapien
cattgcagtctctactccttgacat

SEQ ID NO: 4968500 - DNA, 25 bp, Homo sapien
ttgcagtctctactccttgacattg

SEQ ID NO: 4968501 - DNA, 25 bp, Homo sapien
gcagtctctactccttgacattgct

SEQ ID NO: 4968502 - DNA, 25 bp, Homo sapien
tgacattgcagtctctactccttga

SEQ ID NO: 4968503 - DNA, 25 bp, Homo sapien
tggagtgctcccagtccttgaggcg

SEQ ID NO: 4968504 - DNA, 25 bp, Homo sapien
aacgagtctgactggttctgcagcg

SEQ ID NO: 4968505 - DNA, 25 bp, Homo sapien
ctttcgcgagggagatgttccgcag

SEQ ID NO: 4968506 - DNA, 25 bp, Homo sapien
ctcggtgaccgcgttgagcatggcc

SEQ ID NO: 4968507 - DNA, 25 bp, Homo sapien
cagccggttcacattgcgagtcagg

SEQ ID NO: 4968508 - DNA, 25 bp, Homo sapien
agtcagggccttcaggtcgtcaggg

SEQ ID NO: 4968509 - DNA, 25 bp, Homo sapien
ccggttcacattgcgagtcagggcc

SEQ ID NO: 4968510 - DNA, 25 bp, Homo sapien
ctcattcagccggttcacattgcga

SEQ ID NO: 4968511 - DNA, 25 bp, Homo sapien
ccctgagcaggaaactggactgaaa

SEQ ID NO: 4968512 - DNA, 25 bp, Homo sapien
caggaaactggactgaaacttggtc

SEQ ID NO: 4968513 - DNA, 25 bp, Homo sapien
tgagcaggaaactggactgaaactt

SEQ ID NO: 4968514 - DNA, 25 bp, Homo sapien
gaaactggactgaaacttggtccat

SEQ ID NO: 4968515 - DNA, 25 bp, Homo sapien
cagctgtccccatatggaaccaaat

SEQ ID NO: 4968516 - DNA, 25 bp, Homo sapien
atatggaaccaaatttcggtccagt

SEQ ID NO: 4968517 - DNA, 25 bp, Homo sapien
tcagctgtccccatatggaaccaaa

SEQ ID NO: 4968518 - DNA, 25 bp, Homo sapien
gccagctgatggtcacggatttcca

SEQ ID NO: 4968519 - DNA, 25 bp, Homo sapien
ccagctgatggtcacggatttccat

SEQ ID NO: 4968520 - DNA, 25 bp, Homo sapien
ggcaggtaagcgctctccccagaca

SEQ ID NO: 4968521 - DNA, 25 bp, Homo sapien
gggcaggtaagcgctctccccagac

SEQ ID NO: 4968522 - DNA, 25 bp, Homo sapien
aggtaagcgctctccccagacaact

SEQ ID NO: 4968523 - DNA, 25 bp, Homo sapien
gcaggtaagcgctctccccagacaa

SEQ ID NO: 4968524 - DNA, 25 bp, Homo sapien
caggtaccaggaccctctgctgtca

SEQ ID NO: 4968525 - DNA, 25 bp, Homo sapien
ctggctgttcccaggtaccaggacc

SEQ ID NO: 4968526 - DNA, 25 bp, Homo sapien
tctgtccctggctgttcccaggtac

SEQ ID NO: 4968527 - DNA, 25 bp, Homo sapien
tgttcccaggtaccaggaccctctg

SEQ ID NO: 4968528 - DNA, 25 bp, Homo sapien
ctgcctggaggtcccagcgaggggc

SEQ ID NO: 4968529 - DNA, 25 bp, Homo sapien
tcccagcgaggggccagtaggctct

SEQ ID NO: 4968530 - DNA, 25 bp, Homo sapien
aggtcccagcgaggggccagtaggc

SEQ ID NO: 4968531 - DNA, 25 bp, Homo sapien
cctggaggtcccagcgaggggccag

SEQ ID NO: 4968532 - DNA, 25 bp, Homo sapien
gatacaaggggtgaaatgcgtgcac

SEQ ID NO: 4968533 - DNA, 25 bp, Homo sapien
cgtgcacgggctggcaagccctggg

SEQ ID NO: 4968534 - DNA, 25 bp, Homo sapien
aatgcgtgcacgggctggcaagccc

SEQ ID NO: 4968535 - DNA, 25 bp, Homo sapien
gggtgaaatgcgtgcacgggctggc

SEQ ID NO: 4968536 - DNA, 25 bp, Homo sapien
ctctcgggaactgcacgcgtggcag

SEQ ID NO: 4968537 - DNA, 25 bp, Homo sapien
tcctctcgggaactgcacgcgtggc

SEQ ID NO: 4968538 - DNA, 25 bp, Homo sapien
ctcgggaactgcacgcgtggcagca

SEQ ID NO: 4968539 - DNA, 25 bp, Homo sapien
gtcctctcgggaactgcacgcgtgg

SEQ ID NO: 4968540 - DNA, 25 bp, Homo sapien
caataagcacaaggggtgaaatttc

SEQ ID NO: 4968541 - DNA, 25 bp, Homo sapien
tcccctgagtacagcattgtgtaat

SEQ ID NO: 4968542 - DNA, 25 bp, Homo sapien
atttcacagggttgtttctgacagt

SEQ ID NO: 4968543 - DNA, 25 bp, Homo sapien
tcattcttacaataagcacaagggg

SEQ ID NO: 4968544 - DNA, 25 bp, Homo sapien
atgatgatgacaacgaccgaatggt

SEQ ID NO: 4968545 - DNA, 25 bp, Homo sapien
tgatgatgacaacgaccgaatggtg

SEQ ID NO: 4968546 - DNA, 25 bp, Homo sapien
tctgtatctgtcacctaaaagtccc

SEQ ID NO: 4968547 - DNA, 25 bp, Homo sapien
gaaatttgttatggtcctcgcagcc

SEQ ID NO: 4968548 - DNA, 25 bp, Homo sapien
tgtcacctaaaagtccctgttctgg

SEQ ID NO: 4968549 - DNA, 25 bp, Homo sapien
ctggtttcctgttgggctggaatgc

SEQ ID NO: 4968550 - DNA, 25 bp, Homo sapien
caagcagcccgagaacatgttcaaa

SEQ ID NO: 4968551 - DNA, 25 bp, Homo sapien
taatgaggttctctcgttgttgctg

SEQ ID NO: 4968552 - DNA, 25 bp, Homo sapien
gatgggacagactccaccccaatgt

SEQ ID NO: 4968553 - DNA, 25 bp, Homo sapien
ggctgcccctcaggttgctcattga

SEQ ID NO: 4968554 - DNA, 25 bp, Homo sapien
agccccaggacagcatgcttcaggg

SEQ ID NO: 4968555 - DNA, 25 bp, Homo sapien
ccacaagaatcaggaagaccagcag

SEQ ID NO: 4968556 - DNA, 25 bp, Homo sapien
cttgcccgccgtttgtgacatggac

SEQ ID NO: 4968557 - DNA, 25 bp, Homo sapien
tgggtacagcagatgcttgcccgcc

SEQ ID NO: 4968558 - DNA, 25 bp, Homo sapien
gtggaaagaagggatcctctccctg

SEQ ID NO: 4968559 - DNA, 25 bp, Homo sapien
cagggcatgtaggaatcactgggtg

SEQ ID NO: 4968560 - DNA, 25 bp, Homo sapien
gggatcctctccctgatgttagcag

SEQ ID NO: 4968561 - DNA, 25 bp, Homo sapien
cctgatgttagcagggcatgtagga

SEQ ID NO: 4968562 - DNA, 25 bp, Homo sapien
gcgttttattgctgggaggaacctc

SEQ ID NO: 4968563 - DNA, 25 bp, Homo sapien
ggaaacaagtctccctggagcctgg

SEQ ID NO: 4968564 - DNA, 25 bp, Homo sapien
tcacagcggacccagggaaacaagt

SEQ ID NO: 4968565 - DNA, 25 bp, Homo sapien
ggtcccacagctcataaacagcagg

SEQ ID NO: 4968566 - DNA, 25 bp, Homo sapien
ttgggtgctcctcgaaaaactcctc

SEQ ID NO: 4968567 - DNA, 25 bp, Homo sapien
agagcctcccctgccacttgtagag

SEQ ID NO: 4968568 - DNA, 25 bp, Homo sapien
acttacgcacgaaaaacacagcagg

SEQ ID NO: 4968569 - DNA, 25 bp, Homo sapien
ttcctaccaccattcagtgggaagg

SEQ ID NO: 4968570 - DNA, 25 bp, Homo sapien
gcaccggcagatcaggtgtctacac

SEQ ID NO: 4968571 - DNA, 25 bp, Homo sapien
caccggcagatcaggtgtctacaca

SEQ ID NO: 4968572 - DNA, 25 bp, Homo sapien
accggcagatcaggtgtctacacag

SEQ ID NO: 4968573 - DNA, 25 bp, Homo sapien
ggcaccggcagatcaggtgtctaca

SEQ ID NO: 4968574 - DNA, 25 bp, Homo sapien
taaagaacagtgtacggcacgtggg

SEQ ID NO: 4968575 - DNA, 25 bp, Homo sapien
cattgggcaagagagacctggaaca

SEQ ID NO: 4968576 - DNA, 25 bp, Homo sapien
tatagagggacagcccattgggcaa

SEQ ID NO: 4968577 - DNA, 25 bp, Homo sapien
tgagttcacgcatgcaaggacaaca

SEQ ID NO: 4968578 - DNA, 25 bp, Homo sapien
tttctgacactaacacctctctctg

SEQ ID NO: 4968579 - DNA, 25 bp, Homo sapien
tgcggccatggatgacgccacgagt

SEQ ID NO: 4968580 - DNA, 25 bp, Homo sapien
cctatttgcggccatggatgacgcc

SEQ ID NO: 4968581 - DNA, 25 bp, Homo sapien
ggcgaatgggactgcagtatttttc

SEQ ID NO: 4968582 - DNA, 25 bp, Homo sapien
gctcctgccatcaaaggaatcctca

SEQ ID NO: 4968583 - DNA, 25 bp, Homo sapien
tcgctgacggtgtgtaggtacatag

SEQ ID NO: 4968584 - DNA, 25 bp, Homo sapien
aggctcctgccatcaaaggaatcct

SEQ ID NO: 4968585 - DNA, 25 bp, Homo sapien
atggagctggtgtcacagtcgctga

SEQ ID NO: 4968586 - DNA, 25 bp, Homo sapien
ccctcggaccgcgtccccacagcca

SEQ ID NO: 4968587 - DNA, 25 bp, Homo sapien
ccttgtcccctcagatctcagcatt

SEQ ID NO: 4968588 - DNA, 25 bp, Homo sapien
tgtcccctcagatctcagcatttgc

SEQ ID NO: 4968589 - DNA, 25 bp, Homo sapien
cctcggaccgcgtccccacagccag

SEQ ID NO: 4968590 - DNA, 25 bp, Homo sapien
ggtcaagatgcaacctgtggcagag

SEQ ID NO: 4968591 - DNA, 25 bp, Homo sapien
cctgggtagcgatcaggagatgttc

SEQ ID NO: 4968592 - DNA, 25 bp, Homo sapien
cgcccagggacgagtctcagagcag

SEQ ID NO: 4968593 - DNA, 25 bp, Homo sapien
tactgcctgagatgcgaactgcagc

SEQ ID NO: 4968594 - DNA, 25 bp, Homo sapien
aaggggccacgtcccatttgtcatt

SEQ ID NO: 4968595 - DNA, 25 bp, Homo sapien
gaaggggccacgtcccatttgtcat

SEQ ID NO: 4968596 - DNA, 25 bp, Homo sapien
aggggccacgtcccatttgtcattg

SEQ ID NO: 4968597 - DNA, 25 bp, Homo sapien
ggaaggggccacgtcccatttgtca

SEQ ID NO: 4968598 - DNA, 25 bp, Homo sapien
atgcgagtggcctgaacaccttgct

SEQ ID NO: 4968599 - DNA, 25 bp, Homo sapien
ataaatgcgagtggcctgaacacct

SEQ ID NO: 4968600 - DNA, 25 bp, Homo sapien
aaatgcgagtggcctgaacaccttg

SEQ ID NO: 4968601 - DNA, 25 bp, Homo sapien
ctataaatgcgagtggcctgaacac

SEQ ID NO: 4968602 - DNA, 25 bp, Homo sapien
ccagggttgtagacagcaaagtcaa

SEQ ID NO: 4968603 - DNA, 25 bp, Homo sapien
tcaatgagcttcctccgtgtcacgt

SEQ ID NO: 4968604 - DNA, 25 bp, Homo sapien
tgatggattccgtgagacagcccag

SEQ ID NO: 4968605 - DNA, 25 bp, Homo sapien
tttctgacaccggtccagggttgta

SEQ ID NO: 4968606 - DNA, 25 bp, Homo sapien
ccctttctgttcatgagcactggag

SEQ ID NO: 4968607 - DNA, 25 bp, Homo sapien
gccctttctgttcatgagcactgga

SEQ ID NO: 4968608 - DNA, 25 bp, Homo sapien
taggtcatatttctctcgctctggg

SEQ ID NO: 4968609 - DNA, 25 bp, Homo sapien
acatgccaacacgtgcctgacaggg

SEQ ID NO: 4968610 - DNA, 25 bp, Homo sapien
ccaggattttagcacgtgtcaggag

SEQ ID NO: 4968611 - DNA, 25 bp, Homo sapien
cgaaccatggagataagctaaaagg

SEQ ID NO: 4968612 - DNA, 25 bp, Homo sapien
tggcatgaaccaaagcagtggcacc

SEQ ID NO: 4968613 - DNA, 25 bp, Homo sapien
caaagatgggtaaaacaacttgcac

SEQ ID NO: 4968614 - DNA, 25 bp, Homo sapien
tccttttctaccatgttcacacttg

SEQ ID NO: 4968615 - DNA, 25 bp, Homo sapien
ttttcaccgtcatgaactttcaggg

SEQ ID NO: 4968616 - DNA, 25 bp, Homo sapien
aaccagtgcactttaatgtaatagc

SEQ ID NO: 4968617 - DNA, 25 bp, Homo sapien
aatactttcctgatgagattggtga

SEQ ID NO: 4968618 - DNA, 25 bp, Homo sapien
tatttttcactgtgagcttgacagc

SEQ ID NO: 4968619 - DNA, 25 bp, Homo sapien
tggaatatttgcttaactcagcgaa

SEQ ID NO: 4968620 - DNA, 25 bp, Homo sapien
tctgagaagtgatgaagccgggtct

SEQ ID NO: 4968621 - DNA, 25 bp, Homo sapien
ggaagtgctggccttagataacaca

SEQ ID NO: 4968622 - DNA, 25 bp, Homo sapien
tacgatgttgcctccttacccaaag

SEQ ID NO: 4968623 - DNA, 25 bp, Homo sapien
ggtctatgttcatctggctcccaaa

SEQ ID NO: 4968624 - DNA, 25 bp, Homo sapien
gcaacagaggtagatagatcttgtc

SEQ ID NO: 4968625 - DNA, 25 bp, Homo sapien
ccatgcccagcgatgtttagatgtt

SEQ ID NO: 4968626 - DNA, 25 bp, Homo sapien
ttcatccattgggactaagccccag

SEQ ID NO: 4968627 - DNA, 25 bp, Homo sapien
attacccaggtatgggccgggcacg

SEQ ID NO: 4968628 - DNA, 25 bp, Homo sapien
ttctccatctccttgtattcactcc

SEQ ID NO: 4968629 - DNA, 25 bp, Homo sapien
ttacagtgatgtcccgggggggcca

SEQ ID NO: 4968630 - DNA, 25 bp, Homo sapien
atctccttgtattcactcccgacat

SEQ ID NO: 4968631 - DNA, 25 bp, Homo sapien
cttcctcagccgtgcattctccgcg

SEQ ID NO: 4968632 - DNA, 25 bp, Homo sapien
ctgggacgaagcaagggccagcata

SEQ ID NO: 4968633 - DNA, 25 bp, Homo sapien
gcaagctccttgtagaggccatccc

SEQ ID NO: 4968634 - DNA, 25 bp, Homo sapien
gcatagtggtgatgctgcccttcac

SEQ ID NO: 4968635 - DNA, 25 bp, Homo sapien
ggccatccccctgggacgaagcaag

SEQ ID NO: 4968636 - DNA, 25 bp, Homo sapien
gatccaggatgtgggcatagagtac

SEQ ID NO: 4968637 - DNA, 25 bp, Homo sapien
ttctgcactcgcttcctctcctccc

SEQ ID NO: 4968638 - DNA, 25 bp, Homo sapien
cttctgcactcgcttcctctcctcc

SEQ ID NO: 4968639 - DNA, 25 bp, Homo sapien
cccggagcctctcggggtctaggat

SEQ ID NO: 4968640 - DNA, 25 bp, Homo sapien
ttcctgggccctttcaaacatgccc

SEQ ID NO: 4968641 - DNA, 25 bp, Homo sapien
ggcatctttcatccgctcacacgct

SEQ ID NO: 4968642 - DNA, 25 bp, Homo sapien
tctttcatccgctcacacgcttttt

SEQ ID NO: 4968643 - DNA, 25 bp, Homo sapien
atctttcatccgctcacacgctttt

SEQ ID NO: 4968644 - DNA, 25 bp, Homo sapien
tcgtaacagagcttcaggtcactct

SEQ ID NO: 4968645 - DNA, 25 bp, Homo sapien
agggactcgtagatcctcctcttcc

SEQ ID NO: 4968646 - DNA, 25 bp, Homo sapien
acagaggcagtgagggactcgtaga

SEQ ID NO: 4968647 - DNA, 25 bp, Homo sapien
cttcgtaacagagcttcaggtcact

SEQ ID NO: 4968648 - DNA, 25 bp, Homo sapien
tggcaaaagaggccgttggtgacaa

SEQ ID NO: 4968649 - DNA, 25 bp, Homo sapien
caaaagaggccgttggtgacaattc

SEQ ID NO: 4968650 - DNA, 25 bp, Homo sapien
atgtggcaaaagaggccgttggtga

SEQ ID NO: 4968651 - DNA, 25 bp, Homo sapien
gcaaaagaggccgttggtgacaatt

SEQ ID NO: 4968652 - DNA, 25 bp, Homo sapien
agccacttcttatcccaatttctgt

SEQ ID NO: 4968653 - DNA, 25 bp, Homo sapien
ctgcagggactgcttaaaagcatct

SEQ ID NO: 4968654 - DNA, 25 bp, Homo sapien
ttgcagctatcatatttccagccac

SEQ ID NO: 4968655 - DNA, 25 bp, Homo sapien
tctatgtgaggcatcagagctgaac

SEQ ID NO: 4968656 - DNA, 25 bp, Homo sapien
tttagatcaattctcgccagagtcc

SEQ ID NO: 4968657 - DNA, 25 bp, Homo sapien
tcctggaggcatagatgccattttt

SEQ ID NO: 4968658 - DNA, 25 bp, Homo sapien
tgcttccaaaaacagggtcgatctg

SEQ ID NO: 4968659 - DNA, 25 bp, Homo sapien
catagacgggctgagtgagggcttc

SEQ ID NO: 4968660 - DNA, 25 bp, Homo sapien
tgctcacattccaactttccaaggc

SEQ ID NO: 4968661 - DNA, 25 bp, Homo sapien
cattccaactttccaaggcccacta

SEQ ID NO: 4968662 - DNA, 25 bp, Homo sapien
actgctcacattccaactttccaag

SEQ ID NO: 4968663 - DNA, 25 bp, Homo sapien
tttccactgctcacattccaacttt

SEQ ID NO: 4968664 - DNA, 25 bp, Homo sapien
tctgagttttccctggaagggtcac

SEQ ID NO: 4968665 - DNA, 25 bp, Homo sapien
ggcctcctggaatatctgagttttc

SEQ ID NO: 4968666 - DNA, 25 bp, Homo sapien
aagcttggggatcgggcaggcctcc

SEQ ID NO: 4968667 - DNA, 25 bp, Homo sapien
tcttttgaagggaatgggatgatgc

SEQ ID NO: 4968668 - DNA, 25 bp, Homo sapien
ttctcttccgcaaatctccgcagga

SEQ ID NO: 4968669 - DNA, 25 bp, Homo sapien
tctgaggatgcagcggtaagaagtc

SEQ ID NO: 4968670 - DNA, 25 bp, Homo sapien
gctgctccatgcaggcgaagcactg

SEQ ID NO: 4968671 - DNA, 25 bp, Homo sapien
aagcactgtgcgatggccttctcca

SEQ ID NO: 4968672 - DNA, 25 bp, Homo sapien
tcacatacttggtcactgtcctctt

SEQ ID NO: 4968673 - DNA, 25 bp, Homo sapien
actatctgtgaggagcaacaggcca

SEQ ID NO: 4968674 - DNA, 25 bp, Homo sapien
gagttgaaactatctgtgaggagca

SEQ ID NO: 4968675 - DNA, 25 bp, Homo sapien
ctgatgtattctcttaacttaggga

SEQ ID NO: 4968676 - DNA, 25 bp, Homo sapien
tgggcgctgactgtatacaccagat

SEQ ID NO: 4968677 - DNA, 25 bp, Homo sapien
ggcttccagaaccttgaagtcagct

SEQ ID NO: 4968678 - DNA, 25 bp, Homo sapien
agcctgctgccagtactcctgggcg

SEQ ID NO: 4968679 - DNA, 25 bp, Homo sapien
gactgtatacaccagatctgaggct

SEQ ID NO: 4968680 - DNA, 25 bp, Homo sapien
tttctttctaaaacagcctctcgct

SEQ ID NO: 4968681 - DNA, 25 bp, Homo sapien
tctaaaacagcctctcgctgactct

SEQ ID NO: 4968682 - DNA, 25 bp, Homo sapien
cctctcgctgactctgaatagcttg

SEQ ID NO: 4968683 - DNA, 25 bp, Homo sapien
attctagtcctttgtagttttatca

SEQ ID NO: 4968684 - DNA, 25 bp, Homo sapien
agatcactgagcacttgtcaatggt

SEQ ID NO: 4968685 - DNA, 25 bp, Homo sapien
gaaactcgctctatgtcgctgatca

SEQ ID NO: 4968686 - DNA, 25 bp, Homo sapien
tcagaaggtcttcgtgggcttgccc

SEQ ID NO: 4968687 - DNA, 25 bp, Homo sapien
cccgctggcaggctttgatgctctc

SEQ ID NO: 4968688 - DNA, 25 bp, Homo sapien
gatcaagggccagatgcgcatctca

SEQ ID NO: 4968689 - DNA, 25 bp, Homo sapien
tgttgaagtcgcctgtgcctgggat

SEQ ID NO: 4968690 - DNA, 25 bp, Homo sapien
tcaggtcggatttgggaagtgtcac

SEQ ID NO: 4968691 - DNA, 25 bp, Homo sapien
tctctcctctgtgtgcggatgtagg

SEQ ID NO: 4968692 - DNA, 25 bp, Homo sapien
tccttttgggcttcgccctcagtaa

SEQ ID NO: 4968693 - DNA, 25 bp, Homo sapien
ctatgcaggagtttggtcaggttct

SEQ ID NO: 4968694 - DNA, 25 bp, Homo sapien
tccgccttgagggtgatgactctgg

SEQ ID NO: 4968695 - DNA, 25 bp, Homo sapien
aatcatttgtagcttccaggtggct

SEQ ID NO: 4968696 - DNA, 25 bp, Homo sapien
gccagagctcacttgtacaatgcag

SEQ ID NO: 4968697 - DNA, 25 bp, Homo sapien
tacatatgctttctccagacactgg

SEQ ID NO: 4968698 - DNA, 25 bp, Homo sapien
tttggcctcatactgcacacagcag

SEQ ID NO: 4968699 - DNA, 25 bp, Homo sapien
aatgtagattgggtccactgtcggc

SEQ ID NO: 4968700 - DNA, 25 bp, Homo sapien
tcaaaacccttctggtccgtgattc

SEQ ID NO: 4968701 - DNA, 25 bp, Homo sapien
ccttctggtccgtgattccaatttt

SEQ ID NO: 4968702 - DNA, 25 bp, Homo sapien
tacttgactccattagggatgctgt

SEQ ID NO: 4968703 - DNA, 25 bp, Homo sapien
tctgataagtgttgctcaaaaccct

SEQ ID NO: 4968704 - DNA, 25 bp, Homo sapien
gataaagtactaggtctccaaagga

SEQ ID NO: 4968705 - DNA, 25 bp, Homo sapien
acctggcagggataaagtactaggt

SEQ ID NO: 4968706 - DNA, 25 bp, Homo sapien
gagagatgtcacctgcaggtacctg

SEQ ID NO: 4968707 - DNA, 25 bp, Homo sapien
acagagagatgtcacctgcaggtac

SEQ ID NO: 4968708 - DNA, 25 bp, Homo sapien
tggaacagaaccgaaccatgttaaa

SEQ ID NO: 4968709 - DNA, 25 bp, Homo sapien
ccatgttaaaacaacagttccaaga

SEQ ID NO: 4968710 - DNA, 25 bp, Homo sapien
aaaacaacagttccaagacactcac

SEQ ID NO: 4968711 - DNA, 25 bp, Homo sapien
ttggaacagaaccgaaccatgttaa

SEQ ID NO: 4968712 - DNA, 25 bp, Homo sapien
gggaaatgctcggaaccgctggtct

SEQ ID NO: 4968713 - DNA, 25 bp, Homo sapien
ccatggagggaaatgctcggaaccg

SEQ ID NO: 4968714 - DNA, 25 bp, Homo sapien
ggaaccgctggtctcgatctgattt

SEQ ID NO: 4968715 - DNA, 25 bp, Homo sapien
aaatgctcggaaccgctggtctcga

SEQ ID NO: 4968716 - DNA, 25 bp, Homo sapien
ttaaacttgtcacgagaaagcacct

SEQ ID NO: 4968717 - DNA, 25 bp, Homo sapien
tgacaacagtgaaatatagtcccaa

SEQ ID NO: 4968718 - DNA, 25 bp, Homo sapien
gaaagcaccttctgaataaagagta

SEQ ID NO: 4968719 - DNA, 25 bp, Homo sapien
aatcagttcctatatcctccatcag

SEQ ID NO: 4968720 - DNA, 25 bp, Homo sapien
caaaaacatccttcgtttctgccat

SEQ ID NO: 4968721 - DNA, 25 bp, Homo sapien
gtttctgccattccttgttacgtga

SEQ ID NO: 4968722 - DNA, 25 bp, Homo sapien
ctgctcttctcagttcaggagaacc

SEQ ID NO: 4968723 - DNA, 25 bp, Homo sapien
gatgcggttcctggccaaaaacatc

SEQ ID NO: 4968724 - DNA, 25 bp, Homo sapien
agggtagaatctgctagcctggagc

SEQ ID NO: 4968725 - DNA, 25 bp, Homo sapien
agaactggacccgtggaggctcaga

SEQ ID NO: 4968726 - DNA, 25 bp, Homo sapien
cagcagatagggcttggacatagag

SEQ ID NO: 4968727 - DNA, 25 bp, Homo sapien
tgcagcttgcagcatggagcatctg

SEQ ID NO: 4968728 - DNA, 25 bp, Homo sapien
ggtttggttacaggagtccacagag

SEQ ID NO: 4968729 - DNA, 25 bp, Homo sapien
tggtttggttacaggagtccacaga

SEQ ID NO: 4968730 - DNA, 25 bp, Homo sapien
tctggtttggttacaggagtccaca

SEQ ID NO: 4968731 - DNA, 25 bp, Homo sapien
gttctggtttggttacaggagtcca

SEQ ID NO: 4968732 - DNA, 25 bp, Homo sapien
catggtttcttaggggaagttggat

SEQ ID NO: 4968733 - DNA, 25 bp, Homo sapien
gaaatgcctacatgtaggttttggg

SEQ ID NO: 4968734 - DNA, 25 bp, Homo sapien
ctcactcttacccaagccattctcc

SEQ ID NO: 4968735 - DNA, 25 bp, Homo sapien
tgttcttattacacatgttacacct

SEQ ID NO: 4968736 - DNA, 25 bp, Homo sapien
tagctgtgtctgatctgctagaccc

SEQ ID NO: 4968737 - DNA, 25 bp, Homo sapien
tagacccatccattgatgcattggt

SEQ ID NO: 4968738 - DNA, 25 bp, Homo sapien
taatgttgcaggtaagaaatcagct

SEQ ID NO: 4968739 - DNA, 25 bp, Homo sapien
gatattccctcaggctacttctgtg

SEQ ID NO: 4968740 - DNA, 25 bp, Homo sapien
tcatttggacaccataactcatgca

SEQ ID NO: 4968741 - DNA, 25 bp, Homo sapien
aatcacttgcgtttttgaggcttaa

SEQ ID NO: 4968742 - DNA, 25 bp, Homo sapien
ggcctattttgactcagacggtgaa

SEQ ID NO: 4968743 - DNA, 25 bp, Homo sapien
cagtttctacattttgcatgaggcc

SEQ ID NO: 4968744 - DNA, 25 bp, Homo sapien
cactgtccggctggtctgtctgctc

SEQ ID NO: 4968745 - DNA, 25 bp, Homo sapien
gaagcttccgcttctcttgtgactg

SEQ ID NO: 4968746 - DNA, 25 bp, Homo sapien
tatcttgtggcctgtgcaaaacggc

SEQ ID NO: 4968747 - DNA, 25 bp, Homo sapien
ccggcacggatggtgcttggcacct

SEQ ID NO: 4968748 - DNA, 25 bp, Homo sapien
gcatgacaccctttactgaggtgag

SEQ ID NO: 4968749 - DNA, 25 bp, Homo sapien
atgacaccctttactgaggtgagag

SEQ ID NO: 4968750 - DNA, 25 bp, Homo sapien
catgacaccctttactgaggtgaga

SEQ ID NO: 4968751 - DNA, 25 bp, Homo sapien
gacttgatggtacctgctgtcaaca

SEQ ID NO: 4968752 - DNA, 25 bp, Homo sapien
agaaaatgtgaccaccagggagact

SEQ ID NO: 4968753 - DNA, 25 bp, Homo sapien
gccaagtcagatccctgcaccagct

SEQ ID NO: 4968754 - DNA, 25 bp, Homo sapien
gacactcgtcatcttgtctgcaagg

SEQ ID NO: 4968755 - DNA, 25 bp, Homo sapien
aatggcggatcgtccagatgcctgg

SEQ ID NO: 4968756 - DNA, 25 bp, Homo sapien
ccaagaaagaatggcggatcgtcca

SEQ ID NO: 4968757 - DNA, 25 bp, Homo sapien
ctgcccaagaaagaatggcggatcg

SEQ ID NO: 4968758 - DNA, 25 bp, Homo sapien
gaaagaatggcggatcgtccagatg

SEQ ID NO: 4968759 - DNA, 25 bp, Homo sapien
tatgtgctgacataggacatggact

SEQ ID NO: 4968760 - DNA, 25 bp, Homo sapien
tggggggggtgtatgtgctgacata

SEQ ID NO: 4968761 - DNA, 25 bp, Homo sapien
gggtgtatgtgctgacataggacat

SEQ ID NO: 4968762 - DNA, 25 bp, Homo sapien
gacataggacatggacttgatggga

SEQ ID NO: 4968763 - DNA, 25 bp, Homo sapien
agccataaagcactgaatcaccgat

SEQ ID NO: 4968764 - DNA, 25 bp, Homo sapien
tcctacccagctcagtagtttctgc

SEQ ID NO: 4968765 - DNA, 25 bp, Homo sapien
cagacaatttcggatctgtttctct

SEQ ID NO: 4968766 - DNA, 25 bp, Homo sapien
taaagcactgaatcaccgatgccct

SEQ ID NO: 4968767 - DNA, 25 bp, Homo sapien
ttcatgcaagacctggatgaggaac

SEQ ID NO: 4968768 - DNA, 25 bp, Homo sapien
cacgtcatagacacggagttcatgc

SEQ ID NO: 4968769 - DNA, 25 bp, Homo sapien
cacggagttcatgcaagacctggat

SEQ ID NO: 4968770 - DNA, 25 bp, Homo sapien
atccttgcccacgtcatagacacgg

SEQ ID NO: 4968771 - DNA, 25 bp, Homo sapien
caatacagctttcaagctgaatgcc

SEQ ID NO: 4968772 - DNA, 25 bp, Homo sapien
tcaatacagctttcaagctgaatgc

SEQ ID NO: 4968773 - DNA, 25 bp, Homo sapien
tccattcccttgcatgaaggcctgc

SEQ ID NO: 4968774 - DNA, 25 bp, Homo sapien
gattgttatcactcccctgtgtaaa

SEQ ID NO: 4968775 - DNA, 25 bp, Homo sapien
tgggcaacaaagtgtgcctagcaaa

SEQ ID NO: 4968776 - DNA, 25 bp, Homo sapien
caaggatttcaaaagcccctccaat

SEQ ID NO: 4968777 - DNA, 25 bp, Homo sapien
agcaaaaatgcaaatcagattgtta

SEQ ID NO: 4968778 - DNA, 25 bp, Homo sapien
ctctgaacagccgtgcaggcggttc

SEQ ID NO: 4968779 - DNA, 25 bp, Homo sapien
gagaggcctcactcaaccatcccat

SEQ ID NO: 4968780 - DNA, 25 bp, Homo sapien
gctttccagacccaccagcctttca

SEQ ID NO: 4968781 - DNA, 25 bp, Homo sapien
gctggtaacttttgcttgcctctcc

SEQ ID NO: 4968782 - DNA, 25 bp, Homo sapien
gcttctgccagctgatacccttgga

SEQ ID NO: 4968783 - DNA, 25 bp, Homo sapien
tctggaatggacaggcaggcttgct

SEQ ID NO: 4968784 - DNA, 25 bp, Homo sapien
tccttccagagcaagtcaggtgcgc

SEQ ID NO: 4968785 - DNA, 25 bp, Homo sapien
tgtttatgcaaagtccggtctcccc

SEQ ID NO: 4968786 - DNA, 25 bp, Homo sapien
gaaacccaggcaacaatggagaggc

SEQ ID NO: 4968787 - DNA, 25 bp, Homo sapien
tccaaggctagactatgaaaggtac

SEQ ID NO: 4968788 - DNA, 25 bp, Homo sapien
tgaaaggtactttagcctggctctc

SEQ ID NO: 4968789 - DNA, 25 bp, Homo sapien
ctgccatgttgtgaagaaacccagg

SEQ ID NO: 4968790 - DNA, 25 bp, Homo sapien
taccatacccaagggaagcccatgg

SEQ ID NO: 4968791 - DNA, 25 bp, Homo sapien
ctctcaaagtgccaagtctcagtgg

SEQ ID NO: 4968792 - DNA, 25 bp, Homo sapien
gtctgcaccatttctagtctacttg

SEQ ID NO: 4968793 - DNA, 25 bp, Homo sapien
gaagccatcacaaacgccacacagt

SEQ ID NO: 4968794 - DNA, 25 bp, Homo sapien
ctgtgggatcctggctgaacagagt

SEQ ID NO: 4968795 - DNA, 25 bp, Homo sapien
tgggatcctggctgaacagagtcca

SEQ ID NO: 4968796 - DNA, 25 bp, Homo sapien
aagcaggcttgagaatggattgatg

SEQ ID NO: 4968797 - DNA, 25 bp, Homo sapien
agctgtgggatcctggctgaacaga

SEQ ID NO: 4968798 - DNA, 25 bp, Homo sapien
caggtaggcaactgcacggggcccc

SEQ ID NO: 4968799 - DNA, 25 bp, Homo sapien
tcaggtaggcaactgcacggggccc

SEQ ID NO: 4968800 - DNA, 25 bp, Homo sapien
ggtaggcaactgcacggggccccca

SEQ ID NO: 4968801 - DNA, 25 bp, Homo sapien
tgctgctggcctcttgcgagatggt

SEQ ID NO: 4968802 - DNA, 25 bp, Homo sapien
tggactaactgcgtggagctccggg

SEQ ID NO: 4968803 - DNA, 25 bp, Homo sapien
tcttgcgagatggtttcttcattca

SEQ ID NO: 4968804 - DNA, 25 bp, Homo sapien
aactgcgtggagctccgggagggca

SEQ ID NO: 4968805 - DNA, 25 bp, Homo sapien
gaggagagacgtaacacaaacatga

SEQ ID NO: 4968806 - DNA, 25 bp, Homo sapien
tcctgggatcctaccaagtgagaag

SEQ ID NO: 4968807 - DNA, 25 bp, Homo sapien
taaatcacataatccagagagcaag

SEQ ID NO: 4968808 - DNA, 25 bp, Homo sapien
tgcaaggcagggtgtaattcagtcc

SEQ ID NO: 4968809 - DNA, 25 bp, Homo sapien
tcattcggccaaggaacgtgtgtgg

SEQ ID NO: 4968810 - DNA, 25 bp, Homo sapien
tctgccatcccacagtggctcagat

SEQ ID NO: 4968811 - DNA, 25 bp, Homo sapien
gcttcaacattgcagaagcacaaaa

SEQ ID NO: 4968812 - DNA, 25 bp, Homo sapien
agaagcacaaaatcatcagcccggg

SEQ ID NO: 4968813 - DNA, 25 bp, Homo sapien
tagccctgaacgtgtgtcttttgcc

SEQ ID NO: 4968814 - DNA, 25 bp, Homo sapien
cccctccacactctttctatggctt

SEQ ID NO: 4968815 - DNA, 25 bp, Homo sapien
gccctgaacgtgtgtcttttgcccc

SEQ ID NO: 4968816 - DNA, 25 bp, Homo sapien
ctgcagtagccctgaacgtgtgtct

SEQ ID NO: 4968817 - DNA, 25 bp, Homo sapien
gccctggacagcttcgacctggagg

SEQ ID NO: 4968818 - DNA, 25 bp, Homo sapien
gctcctgcaccatgaaagtcctgct

SEQ ID NO: 4968819 - DNA, 25 bp, Homo sapien
agtcctgctttgtgacctgctgctg

SEQ ID NO: 4968820 - DNA, 25 bp, Homo sapien
cagttgtcagagggactgtctcaca

SEQ ID NO: 4968821 - DNA, 25 bp, Homo sapien
gagtagatgtcttggactgggccac

SEQ ID NO: 4968822 - DNA, 25 bp, Homo sapien
gaaagggacactcctgtcagaccta

SEQ ID NO: 4968823 - DNA, 25 bp, Homo sapien
taaggcagccctccctatctatgga

SEQ ID NO: 4968824 - DNA, 25 bp, Homo sapien
ttgcttcttggaaaccctgccaggg

SEQ ID NO: 4968825 - DNA, 25 bp, Homo sapien
tgttaacgtgctgtgacaccagagg

SEQ ID NO: 4968826 - DNA, 25 bp, Homo sapien
tgcttggctccaaaaacccgactaa

SEQ ID NO: 4968827 - DNA, 25 bp, Homo sapien
aaaacctgtgtaaaactgctccacg

SEQ ID NO: 4968828 - DNA, 25 bp, Homo sapien
ggtaagttacgctcacctctctgag

SEQ ID NO: 4968829 - DNA, 25 bp, Homo sapien
tctggactccatgcaccaaggtcat

SEQ ID NO: 4968830 - DNA, 25 bp, Homo sapien
gttggccaatcagaagcggttcagt

SEQ ID NO: 4968831 - DNA, 25 bp, Homo sapien
ccagaatggtaatgtgtagccggaa

SEQ ID NO: 4968832 - DNA, 25 bp, Homo sapien
tccggagcttgttccaggagcagga

SEQ ID NO: 4968833 - DNA, 25 bp, Homo sapien
gggactgattccttgtggtcaacgg

SEQ ID NO: 4968834 - DNA, 25 bp, Homo sapien
gattccttgtggtcaacggtatcat

SEQ ID NO: 4968835 - DNA, 25 bp, Homo sapien
gactgattccttgtggtcaacggta

SEQ ID NO: 4968836 - DNA, 25 bp, Homo sapien
ttccttgtggtcaacggtatcatta

SEQ ID NO: 4968837 - DNA, 25 bp, Homo sapien
agagagaatgggcaaggtgcacccc

SEQ ID NO: 4968838 - DNA, 25 bp, Homo sapien
ccccagtttcagatggtagaaatct

SEQ ID NO: 4968839 - DNA, 25 bp, Homo sapien
cggcacagtgcccagatccgagtgc

SEQ ID NO: 4968840 - DNA, 25 bp, Homo sapien
tgcctttttaccaagctccaggtgg

SEQ ID NO: 4968841 - DNA, 25 bp, Homo sapien
gctttctaaagacgagacggcagtg

SEQ ID NO: 4968842 - DNA, 25 bp, Homo sapien
ggcatgaatggaacaaccccgagaa

SEQ ID NO: 4968843 - DNA, 25 bp, Homo sapien
taggcatgatcactgggtcggttcc

SEQ ID NO: 4968844 - DNA, 25 bp, Homo sapien
caatgacaacgtggccatggctcaa

SEQ ID NO: 4968845 - DNA, 25 bp, Homo sapien
gggacatagggccaggacttgtacc

SEQ ID NO: 4968846 - DNA, 25 bp, Homo sapien
ccaaataagtcacgctgggaggaaa

SEQ ID NO: 4968847 - DNA, 25 bp, Homo sapien
ctgggcagtgggcagtcacattcca

SEQ ID NO: 4968848 - DNA, 25 bp, Homo sapien
ggttggcatggtgctacactcccga

SEQ ID NO: 4968849 - DNA, 25 bp, Homo sapien
gagggaacccagatttaagtcgtca

SEQ ID NO: 4968850 - DNA, 25 bp, Homo sapien
gacttccatgcaggatgctcagaca

SEQ ID NO: 4968851 - DNA, 25 bp, Homo sapien
ctcagacagggaacaggaggtaccc

SEQ ID NO: 4968852 - DNA, 25 bp, Homo sapien
tgaggcgtcctttcaataaccggag

SEQ ID NO: 4968853 - DNA, 25 bp, Homo sapien
tgacacgcacaagctaatcccctag

SEQ ID NO: 4968854 - DNA, 25 bp, Homo sapien
gaacgagctgttccttcttttgaca

SEQ ID NO: 4968855 - DNA, 25 bp, Homo sapien
gaaagcaaagaattcaccgactcag

SEQ ID NO: 4968856 - DNA, 25 bp, Homo sapien
catcttgctcacagtcctttctgga

SEQ ID NO: 4968857 - DNA, 25 bp, Homo sapien
tttctctttcggtttctgctgaggg

SEQ ID NO: 4968858 - DNA, 25 bp, Homo sapien
ctttcggtttctgctgagggctggt

SEQ ID NO: 4968859 - DNA, 25 bp, Homo sapien
ttacaccttagccaacagagcccaa

SEQ ID NO: 4968860 - DNA, 25 bp, Homo sapien
agtgttacaccttagccaacagagc

SEQ ID NO: 4968861 - DNA, 25 bp, Homo sapien
aggccgtgcaccactggtcccggtg

SEQ ID NO: 4968862 - DNA, 25 bp, Homo sapien
tcagtccagaaagcgctggcaggcc

SEQ ID NO: 4968863 - DNA, 25 bp, Homo sapien
caccttgcggcacttcttagcctcc

SEQ ID NO: 4968864 - DNA, 25 bp, Homo sapien
ccggtgctcgatgccatacaccttg

SEQ ID NO: 4968865 - DNA, 25 bp, Homo sapien
aggaatgcaaatcgagccccacaca

SEQ ID NO: 4968866 - DNA, 25 bp, Homo sapien
gaatgcaaatcgagccccacacagg

SEQ ID NO: 4968867 - DNA, 25 bp, Homo sapien
agaggaatgcaaatcgagccccaca

SEQ ID NO: 4968868 - DNA, 25 bp, Homo sapien
gaggaatgcaaatcgagccccacac

SEQ ID NO: 4968869 - DNA, 25 bp, Homo sapien
accctggtgacttcatctgggtggg

SEQ ID NO: 4968870 - DNA, 25 bp, Homo sapien
tctgggtggggtcggagtccacgcc

SEQ ID NO: 4968871 - DNA, 25 bp, Homo sapien
catctggtgcatccgccatctgggc

SEQ ID NO: 4968872 - DNA, 25 bp, Homo sapien
gccagaggctctgaggaccaaacag

SEQ ID NO: 4968873 - DNA, 25 bp, Homo sapien
gggtggagaagtgacgatcagatga

SEQ ID NO: 4968874 - DNA, 25 bp, Homo sapien
atgagatttcatcgcaggtgctggc

SEQ ID NO: 4968875 - DNA, 25 bp, Homo sapien
tgaagcttagcgaccggctccggac

SEQ ID NO: 4968876 - DNA, 25 bp, Homo sapien
ggctcgctgaagcttagcgaccggc

SEQ ID NO: 4968877 - DNA, 25 bp, Homo sapien
tgagcacagggacattcaggaaagg

SEQ ID NO: 4968878 - DNA, 25 bp, Homo sapien
cacagggacattcaggaaaggtgag

SEQ ID NO: 4968879 - DNA, 25 bp, Homo sapien
tgtgagcacagggacattcaggaaa

SEQ ID NO: 4968880 - DNA, 25 bp, Homo sapien
gagcacagggacattcaggaaaggt

SEQ ID NO: 4968881 - DNA, 25 bp, Homo sapien
tctccagtggccttgagatttctga

SEQ ID NO: 4968882 - DNA, 25 bp, Homo sapien
ttgagttgggggtccacctatggcc

SEQ ID NO: 4968883 - DNA, 25 bp, Homo sapien
tgggggtccacctatggcccttgtc

SEQ ID NO: 4968884 - DNA, 25 bp, Homo sapien
cttgagatttctgacccagcccaca

SEQ ID NO: 4968885 - DNA, 25 bp, Homo sapien
tgggagagccctcggccatacgagg

SEQ ID NO: 4968886 - DNA, 25 bp, Homo sapien
gccacgtgccccgtgcccaagggat

SEQ ID NO: 4968887 - DNA, 25 bp, Homo sapien
ctcggccatacgaggccccagccgt

SEQ ID NO: 4968888 - DNA, 25 bp, Homo sapien
cccagccgtgctgcccgcacactca

SEQ ID NO: 4968889 - DNA, 25 bp, Homo sapien
cagctgacactggtgtagatgtgtg

SEQ ID NO: 4968890 - DNA, 25 bp, Homo sapien
tgtagatgtgtggtgagactgggat

SEQ ID NO: 4968891 - DNA, 25 bp, Homo sapien
agcccagctgacactggtgtagatg

SEQ ID NO: 4968892 - DNA, 25 bp, Homo sapien
cagcagcccagctgacactggtgta

SEQ ID NO: 4968893 - DNA, 25 bp, Homo sapien
taagcggccactcattctaacaagg

SEQ ID NO: 4968894 - DNA, 25 bp, Homo sapien
tgtcagcccggattctagctcagga

SEQ ID NO: 4968895 - DNA, 25 bp, Homo sapien
tagtaaccactcatgacagctgcca

SEQ ID NO: 4968896 - DNA, 25 bp, Homo sapien
tctaggacctagacgtcacgtggga

SEQ ID NO: 4968897 - DNA, 25 bp, Homo sapien
ctggtatgcatgatctgcctgaatg

SEQ ID NO: 4968898 - DNA, 25 bp, Homo sapien
tgttctgggccggaggactgggctt

SEQ ID NO: 4968899 - DNA, 25 bp, Homo sapien
gagctgacttgctgagagcccctga

SEQ ID NO: 4968900 - DNA, 25 bp, Homo sapien
gcctgaatgtgccagaaggacccag

SEQ ID NO: 4968901 - DNA, 25 bp, Homo sapien
gcagcagcagattcctccttcagct

SEQ ID NO: 4968902 - DNA, 25 bp, Homo sapien
agcagcagcagattcctccttcagc

SEQ ID NO: 4968903 - DNA, 25 bp, Homo sapien
ggagctggctcggaggtgggagtcc

SEQ ID NO: 4968904 - DNA, 25 bp, Homo sapien
tggctcggaggtgggagtcccaggg

SEQ ID NO: 4968905 - DNA, 25 bp, Homo sapien
tcctcccgcttgaactgatcagagt

SEQ ID NO: 4968906 - DNA, 25 bp, Homo sapien
gcttgaactgatcagagtccactgt

SEQ ID NO: 4968907 - DNA, 25 bp, Homo sapien
tcccgcttgaactgatcagagtcca

SEQ ID NO: 4968908 - DNA, 25 bp, Homo sapien
ctcctcccgcttgaactgatcagag

SEQ ID NO: 4968909 - DNA, 25 bp, Homo sapien
cccagatggagggctttgacgtgtc

SEQ ID NO: 4968910 - DNA, 25 bp, Homo sapien
cagaactttgccacagtttggccac

SEQ ID NO: 4968911 - DNA, 25 bp, Homo sapien
cacaatggagcgcagaactttgcca

SEQ ID NO: 4968912 - DNA, 25 bp, Homo sapien
tgacgtgtcgtttgatgcccacaat

SEQ ID NO: 4968913 - DNA, 25 bp, Homo sapien
ctttctttttcgtggagctggttcg

SEQ ID NO: 4968914 - DNA, 25 bp, Homo sapien
ttcgtggagctggttcgtccagcag

SEQ ID NO: 4968915 - DNA, 25 bp, Homo sapien
tcaggatcggtctcaaagccatgat

SEQ ID NO: 4968916 - DNA, 25 bp, Homo sapien
caggaaagggtcaggatcggtctca

SEQ ID NO: 4968917 - DNA, 25 bp, Homo sapien
ctctccttccatgggtcgcaggccg

SEQ ID NO: 4968918 - DNA, 25 bp, Homo sapien
ccactccagtgaccgctggtagtgc

SEQ ID NO: 4968919 - DNA, 25 bp, Homo sapien
tccatgggtcgcaggccgcacggga

SEQ ID NO: 4968920 - DNA, 25 bp, Homo sapien
ctgctgccgctgtccgagatgtcac

SEQ ID NO: 4968921 - DNA, 25 bp, Homo sapien
ttctgagcttcggtaaacatggaga

SEQ ID NO: 4968922 - DNA, 25 bp, Homo sapien
tctcttggtagaactgctctaccct

SEQ ID NO: 4968923 - DNA, 25 bp, Homo sapien
tagaactgctctaccctcgcagaca

SEQ ID NO: 4968924 - DNA, 25 bp, Homo sapien
ctgggcaaactctcccttctgagct

SEQ ID NO: 4968925 - DNA, 25 bp, Homo sapien
aatgcggtagcccttccctatagga

SEQ ID NO: 4968926 - DNA, 25 bp, Homo sapien
tctaggatgctcaggactccgggac

SEQ ID NO: 4968927 - DNA, 25 bp, Homo sapien
tactacatggcaacatctaggatgc

SEQ ID NO: 4968928 - DNA, 25 bp, Homo sapien
aaagtactgctctacaaatgcacgg

SEQ ID NO: 4968929 - DNA, 25 bp, Homo sapien
tatgagggatacttatgaaggccac

SEQ ID NO: 4968930 - DNA, 25 bp, Homo sapien
tacataccctcatgatgggaactgg

SEQ ID NO: 4968931 - DNA, 25 bp, Homo sapien
taagcttcacagctaggtgtcctca

SEQ ID NO: 4968932 - DNA, 25 bp, Homo sapien
ctttggcagcctagtcattgacagc

SEQ ID NO: 4968933 - DNA, 25 bp, Homo sapien
ggaagcatctaactccatggcatgc

SEQ ID NO: 4968934 - DNA, 25 bp, Homo sapien
catgctcaaccatcttcacaatgta

SEQ ID NO: 4968935 - DNA, 25 bp, Homo sapien
ggcatgcagccggtcagaggtgcca

SEQ ID NO: 4968936 - DNA, 25 bp, Homo sapien
tcacaatgtaccaggaaactcctcc

SEQ ID NO: 4968937 - DNA, 25 bp, Homo sapien
gaggactctgtacaacagggctgca

SEQ ID NO: 4968938 - DNA, 25 bp, Homo sapien
ctcggtcccgggaggactctgtaca

SEQ ID NO: 4968939 - DNA, 25 bp, Homo sapien
tctcatccatttccactgcgtccga

SEQ ID NO: 4968940 - DNA, 25 bp, Homo sapien
ggctgcaggacagggacgtcagcac

SEQ ID NO: 4968941 - DNA, 25 bp, Homo sapien
ctggattcacacggatgagtgggaa

SEQ ID NO: 4968942 - DNA, 25 bp, Homo sapien
cacacggatgagtgggaaatgttac

SEQ ID NO: 4968943 - DNA, 25 bp, Homo sapien
ttcacacggatgagtgggaaatgtt

SEQ ID NO: 4968944 - DNA, 25 bp, Homo sapien
gattcacacggatgagtgggaaatg

SEQ ID NO: 4968945 - DNA, 25 bp, Homo sapien
tggtttcaaaatactgggtctgctg

SEQ ID NO: 4968946 - DNA, 25 bp, Homo sapien
gaacctactacccaagccaatgtgc

SEQ ID NO: 4968947 - DNA, 25 bp, Homo sapien
aatctcccaatgcaagtgtccatgc

SEQ ID NO: 4968948 - DNA, 25 bp, Homo sapien
tcaggtccgccaaaatatgacttgg

SEQ ID NO: 4968949 - DNA, 25 bp, Homo sapien
tgggacatcgatgttcctggagacg

SEQ ID NO: 4968950 - DNA, 25 bp, Homo sapien
ctctttgggacatcgatgttcctgg

SEQ ID NO: 4968951 - DNA, 25 bp, Homo sapien
ctttgggacatcgatgttcctggag

SEQ ID NO: 4968952 - DNA, 25 bp, Homo sapien
ttgggacatcgatgttcctggagac

SEQ ID NO: 4968953 - DNA, 25 bp, Homo sapien
agcagccagacggtcacctgaccct

SEQ ID NO: 4968954 - DNA, 25 bp, Homo sapien
gccagacggtcacctgaccctccat

SEQ ID NO: 4968955 - DNA, 25 bp, Homo sapien
accagtcctgtgcactcttgacccc

SEQ ID NO: 4968956 - DNA, 25 bp, Homo sapien
tcttgacccccgtaccacacataaa

SEQ ID NO: 4968957 - DNA, 25 bp, Homo sapien
gaggtgctgggagccttaaggactt

SEQ ID NO: 4968958 - DNA, 25 bp, Homo sapien
ctgggagccttaaggacttccttgg

SEQ ID NO: 4968959 - DNA, 25 bp, Homo sapien
gctgggagccttaaggacttccttg

SEQ ID NO: 4968960 - DNA, 25 bp, Homo sapien
tgctgggagccttaaggacttcctt

SEQ ID NO: 4968961 - DNA, 25 bp, Homo sapien
caggagggaccgctttccaaggcgt

SEQ ID NO: 4968962 - DNA, 25 bp, Homo sapien
ctttccaaggcgtcgggacaggaca

SEQ ID NO: 4968963 - DNA, 25 bp, Homo sapien
gagggcccctccgaggcactgggtc

SEQ ID NO: 4968964 - DNA, 25 bp, Homo sapien
ggcgtcgggacaggacactcgccat

SEQ ID NO: 4968965 - DNA, 25 bp, Homo sapien
ctgcggaggcgaaggggacactgaa

SEQ ID NO: 4968966 - DNA, 25 bp, Homo sapien
tggaatcaacccaaaaagtcaggga

SEQ ID NO: 4968967 - DNA, 25 bp, Homo sapien
gatgcctcgcctgtgttaatcagca

SEQ ID NO: 4968968 - DNA, 25 bp, Homo sapien
aaatctagactaatccaggctgggc

SEQ ID NO: 4968969 - DNA, 25 bp, Homo sapien
tctggcagggcacgcaaagggataa

SEQ ID NO: 4968970 - DNA, 25 bp, Homo sapien
tggagctcaacactaagtcagactg

SEQ ID NO: 4968971 - DNA, 25 bp, Homo sapien
gactcacctggctggaattaacatg

SEQ ID NO: 4968972 - DNA, 25 bp, Homo sapien
gtaatcaaggcacccatttagaggc

SEQ ID NO: 4968973 - DNA, 25 bp, Homo sapien
tacccatgtgactaggtgcctgccc

SEQ ID NO: 4968974 - DNA, 25 bp, Homo sapien
catgagaatgagtttcgagacgaaa

SEQ ID NO: 4968975 - DNA, 25 bp, Homo sapien
taaggaatctttatgccccaataac

SEQ ID NO: 4968976 - DNA, 25 bp, Homo sapien
ccccaataactgtgggcatgagaat

SEQ ID NO: 4968977 - DNA, 25 bp, Homo sapien
ccttagtgacgagaagacaggcacc

SEQ ID NO: 4968978 - DNA, 25 bp, Homo sapien
tttgtaagtcctataggtatagatg

SEQ ID NO: 4968979 - DNA, 25 bp, Homo sapien
cacagccaatgcacttaactttttg

SEQ ID NO: 4968980 - DNA, 25 bp, Homo sapien
acagccaatgcacttaactttttgt

SEQ ID NO: 4968981 - DNA, 25 bp, Homo sapien
atccacagccaatgcacttaacttt

SEQ ID NO: 4968982 - DNA, 25 bp, Homo sapien
aaggctgcagtgagctgtgattgtg

SEQ ID NO: 4968983 - DNA, 25 bp, Homo sapien
ctgtgattgtgccactgcactccag

SEQ ID NO: 4968984 - DNA, 25 bp, Homo sapien
agaatggcttgagcctggggaagtc

SEQ ID NO: 4968985 - DNA, 25 bp, Homo sapien
ggagaatggcttgagcctggggaag

SEQ ID NO: 4968986 - DNA, 25 bp, Homo sapien
agaagggtctctcaaaaatgctggg

SEQ ID NO: 4968987 - DNA, 25 bp, Homo sapien
tgactcaaatacttgccactgaagg

SEQ ID NO: 4968988 - DNA, 25 bp, Homo sapien
ttgaataccgccaacagccgtaagc

SEQ ID NO: 4968989 - DNA, 25 bp, Homo sapien
gaagagactttggaggtcggcctaa

SEQ ID NO: 4968990 - DNA, 25 bp, Homo sapien
gctcagtggcccatgtgcgtagacc

SEQ ID NO: 4968991 - DNA, 25 bp, Homo sapien
gaaggctcacactgaactgatgaac

SEQ ID NO: 4968992 - DNA, 25 bp, Homo sapien
gaccttgaggttgacacagcgagca

SEQ ID NO: 4968993 - DNA, 25 bp, Homo sapien
ctcagtggacctgtgccaacctggg

SEQ ID NO: 4968994 - DNA, 25 bp, Homo sapien
gagtaaattagcttgaccactgctt

SEQ ID NO: 4968995 - DNA, 25 bp, Homo sapien
tgtcacccttgcaacatgaacagag

SEQ ID NO: 4968996 - DNA, 25 bp, Homo sapien
ggaatcacaatatccctagggctaa

SEQ ID NO: 4968997 - DNA, 25 bp, Homo sapien
tccaccctcgagattagaagaatca

SEQ ID NO: 4968998 - DNA, 25 bp, Homo sapien
tcagttccaaagtgaaggcgctgag

SEQ ID NO: 4968999 - DNA, 25 bp, Homo sapien
gttctaagaaaagcagcgccggcct

SEQ ID NO: 4969000 - DNA, 25 bp, Homo sapien
tcatgggaacgcctgcccggtggaa

SEQ ID NO: 4969001 - DNA, 25 bp, Homo sapien
cggtggaagtcctccaaggccacag

SEQ ID NO: 4969002 - DNA, 25 bp, Homo sapien
cgctgccttggaaattgtttgcaca

SEQ ID NO: 4969003 - DNA, 25 bp, Homo sapien
gaagaaaacgctgccttggaaattg

SEQ ID NO: 4969004 - DNA, 25 bp, Homo sapien
gcagggaagaaaacgctgccttgga

SEQ ID NO: 4969005 - DNA, 25 bp, Homo sapien
aaaacgctgccttggaaattgtttg

SEQ ID NO: 4969006 - DNA, 25 bp, Homo sapien
tcggacggctagctcagctccgggc

SEQ ID NO: 4969007 - DNA, 25 bp, Homo sapien
cggctcggctcggacggctagctca

SEQ ID NO: 4969008 - DNA, 25 bp, Homo sapien
cggcttccccggctcggacggctcg

SEQ ID NO: 4969009 - DNA, 25 bp, Homo sapien
acgagcggcagcacgcgcccggctt

SEQ ID NO: 4969010 - DNA, 25 bp, Homo sapien
cgctcaataagtgcccgagcgactc

SEQ ID NO: 4969011 - DNA, 25 bp, Homo sapien
cggccgcccgtagacagtcggcgct

SEQ ID NO: 4969012 - DNA, 25 bp, Homo sapien
gtcggcgctcaataagtgcccgagc

SEQ ID NO: 4969013 - DNA, 25 bp, Homo sapien
ataagtgcccgagcgactcctcgcg

SEQ ID NO: 4969014 - DNA, 25 bp, Homo sapien
gggcgccgcggacgggagctcggct

SEQ ID NO: 4969015 - DNA, 25 bp, Homo sapien
cgagaggggccgggctcgacccagg

SEQ ID NO: 4969016 - DNA, 25 bp, Homo sapien
agccagacagctggggcgccgcgga

SEQ ID NO: 4969017 - DNA, 25 bp, Homo sapien
tccgagaggggccgggctcgaccca

SEQ ID NO: 4969018 - DNA, 25 bp, Homo sapien
gggggacccaggcggcgcagcccca

SEQ ID NO: 4969019 - DNA, 25 bp, Homo sapien
ctgggggacccaggcggcgcagccc

SEQ ID NO: 4969020 - DNA, 25 bp, Homo sapien
gacccaggcggcgcagccccagccg

SEQ ID NO: 4969021 - DNA, 25 bp, Homo sapien
agccccagccgccccaagcgcccat

SEQ ID NO: 4969022 - DNA, 25 bp, Homo sapien
tctaaactgcagagtctcactgcag

SEQ ID NO: 4969023 - DNA, 25 bp, Homo sapien
agccttgctctgtctaaactgcaga

SEQ ID NO: 4969024 - DNA, 25 bp, Homo sapien
gctctgtctaaactgcagagtctca

SEQ ID NO: 4969025 - DNA, 25 bp, Homo sapien
tgtctaaactgcagagtctcactgc

SEQ ID NO: 4969026 - DNA, 25 bp, Homo sapien
gcagagcctcttaagcttcctgcct

SEQ ID NO: 4969027 - DNA, 25 bp, Homo sapien
agcctcttaagcttcctgcctgtgt

SEQ ID NO: 4969028 - DNA, 25 bp, Homo sapien
agagcctcttaagcttcctgcctgt

SEQ ID NO: 4969029 - DNA, 25 bp, Homo sapien
gagcctcttaagcttcctgcctgtg

SEQ ID NO: 4969030 - DNA, 25 bp, Homo sapien
gacttgtaaaggtgtgaatatgcta

SEQ ID NO: 4969031 - DNA, 25 bp, Homo sapien
gaatatgctatacacttgtggtaat

SEQ ID NO: 4969032 - DNA, 25 bp, Homo sapien
cttgtaaaggtgtgaatatgctata

SEQ ID NO: 4969033 - DNA, 25 bp, Homo sapien
tgtaaaggtgtgaatatgctataca

SEQ ID NO: 4969034 - DNA, 25 bp, Homo sapien
tgcgagtgcggacgaggatgccggg

SEQ ID NO: 4969035 - DNA, 25 bp, Homo sapien
ccgggccgcgtctgtcctgcggctc

SEQ ID NO: 4969036 - DNA, 25 bp, Homo sapien
ctctgcagcgcggtgcgagttcctg

SEQ ID NO: 4969037 - DNA, 25 bp, Homo sapien
gaaaggctgcgtttgcgctccccgg

SEQ ID NO: 4969038 - DNA, 25 bp, Homo sapien
agacaggttcctgctatggggcttg

SEQ ID NO: 4969039 - DNA, 25 bp, Homo sapien
acaggttcctgctatggggcttgcc

SEQ ID NO: 4969040 - DNA, 25 bp, Homo sapien
caggttcctgctatggggcttgccc

SEQ ID NO: 4969041 - DNA, 25 bp, Homo sapien
aggttcctgctatggggcttgccca

SEQ ID NO: 4969042 - DNA, 25 bp, Homo sapien
gcttctttgtctaagtctgatccac

SEQ ID NO: 4969043 - DNA, 25 bp, Homo sapien
tcagcttctttgtctaagtctgatc

SEQ ID NO: 4969044 - DNA, 25 bp, Homo sapien
ttgtctaagtctgatccaccaaagg

SEQ ID NO: 4969045 - DNA, 25 bp, Homo sapien
aggccttgggcccatctttcacctc

SEQ ID NO: 4969046 - DNA, 25 bp, Homo sapien
agccaggcttgccagcagcctttca

SEQ ID NO: 4969047 - DNA, 25 bp, Homo sapien
atgctttgcagctatgcaggtggaa

SEQ ID NO: 4969048 - DNA, 25 bp, Homo sapien
cgaacctcgtacccttcaaagtcag

SEQ ID NO: 4969049 - DNA, 25 bp, Homo sapien
tggaaccctcccgaagccaggcttg

SEQ ID NO: 4969050 - DNA, 25 bp, Homo sapien
tactccccttgatagcaaagttgtc

SEQ ID NO: 4969051 - DNA, 25 bp, Homo sapien
tctcatgggcacatacgggtggttg

SEQ ID NO: 4969052 - DNA, 25 bp, Homo sapien
tgaataagttagagaaaacaccgcc

SEQ ID NO: 4969053 - DNA, 25 bp, Homo sapien
agtttttccagccagatcgcagcta

SEQ ID NO: 4969054 - DNA, 25 bp, Homo sapien
ggagagaagtccagattcacatcaa

SEQ ID NO: 4969055 - DNA, 25 bp, Homo sapien
cacttgagtagaagacagattgagc

SEQ ID NO: 4969056 - DNA, 25 bp, Homo sapien
tgaatatgggaagatcaagacttcg

SEQ ID NO: 4969057 - DNA, 25 bp, Homo sapien
caaaatggacagtatatataatgtg

SEQ ID NO: 4969058 - DNA, 25 bp, Homo sapien
tctccactgtgcaaagcatcttgtc

SEQ ID NO: 4969059 - DNA, 25 bp, Homo sapien
tttactgaaataccgtaggactcac

SEQ ID NO: 4969060 - DNA, 25 bp, Homo sapien
tcagtccactttggctctggaacct

SEQ ID NO: 4969061 - DNA, 25 bp, Homo sapien
gaaagagtttctaatgggagccaag

SEQ ID NO: 4969062 - DNA, 25 bp, Homo sapien
aaggaatcatgaaagcgagggttat

SEQ ID NO: 4969063 - DNA, 25 bp, Homo sapien
tcatgaaagcgagggttattgaaat

SEQ ID NO: 4969064 - DNA, 25 bp, Homo sapien
gaaagcgagggttattgaaatacca

SEQ ID NO: 4969065 - DNA, 25 bp, Homo sapien
agcgagggttattgaaataccaagg

SEQ ID NO: 4969066 - DNA, 25 bp, Homo sapien
gtctttagcgtccaaagtgctctca

SEQ ID NO: 4969067 - DNA, 25 bp, Homo sapien
gacagtccaagttcacaccgctaaa

SEQ ID NO: 4969068 - DNA, 25 bp, Homo sapien
caccgctaaaaagtgtcacagctgg

SEQ ID NO: 4969069 - DNA, 25 bp, Homo sapien
cctgagctacagataatacggtctt

SEQ ID NO: 4969070 - DNA, 25 bp, Homo sapien
agtgggaagggatttctcctcgaca

SEQ ID NO: 4969071 - DNA, 25 bp, Homo sapien
gtgggaagggatttctcctcgacat

SEQ ID NO: 4969072 - DNA, 25 bp, Homo sapien
caaagaaatttagcggggcgtggtg

SEQ ID NO: 4969073 - DNA, 25 bp, Homo sapien
gtgcactcctgtaatcccagctact

SEQ ID NO: 4969074 - DNA, 25 bp, Homo sapien
tgggaggccgagacaggagaatcac

SEQ ID NO: 4969075 - DNA, 25 bp, Homo sapien
ttgaacttgggaggcggaggttgca

SEQ ID NO: 4969076 - DNA, 25 bp, Homo sapien
gaactgagtcacacccgccttgtat

SEQ ID NO: 4969077 - DNA, 25 bp, Homo sapien
tcaccggcatgagtcaaaatatcgc

SEQ ID NO: 4969078 - DNA, 25 bp, Homo sapien
gagggcaaactaccatcctgtggag

SEQ ID NO: 4969079 - DNA, 25 bp, Homo sapien
tcatcttgcatcacttaggaggccg

SEQ ID NO: 4969080 - DNA, 25 bp, Homo sapien
tcaaattccccgttctcccatggac

SEQ ID NO: 4969081 - DNA, 25 bp, Homo sapien
ttcaaattccccgttctcccatgga

SEQ ID NO: 4969082 - DNA, 25 bp, Homo sapien
caaattccccgttctcccatggact

SEQ ID NO: 4969083 - DNA, 25 bp, Homo sapien
ccttcaaattccccgttctcccatg

SEQ ID NO: 4969084 - DNA, 25 bp, Homo sapien
gaagcacgacataatggcccatgtg

SEQ ID NO: 4969085 - DNA, 25 bp, Homo sapien
aaaccaggcagaagcacgacataat

SEQ ID NO: 4969086 - DNA, 25 bp, Homo sapien
cataatggcccatgtgataagcctc

SEQ ID NO: 4969087 - DNA, 25 bp, Homo sapien
gcccatgtgataagcctcataaagt

SEQ ID NO: 4969088 - DNA, 25 bp, Homo sapien
tctgctaggcaatgataatgctccc

SEQ ID NO: 4969089 - DNA, 25 bp, Homo sapien
tctacttcgtgccaaagacttgcat

SEQ ID NO: 4969090 - DNA, 25 bp, Homo sapien
cacgatttgggaaactctgctaggc

SEQ ID NO: 4969091 - DNA, 25 bp, Homo sapien
gccacagggcttcggagccacgatt

SEQ ID NO: 4969092 - DNA, 25 bp, Homo sapien
taaatcaccactccatgattctgat

SEQ ID NO: 4969093 - DNA, 25 bp, Homo sapien
tgcaaataggattagagatctggag

SEQ ID NO: 4969094 - DNA, 25 bp, Homo sapien
cagtcagtgtcagaaacccgaattt

SEQ ID NO: 4969095 - DNA, 25 bp, Homo sapien
cattaatgttatggtgatgaatctt

SEQ ID NO: 4969096 - DNA, 25 bp, Homo sapien
tatttttcttatcatgtgactgtcg

SEQ ID NO: 4969097 - DNA, 25 bp, Homo sapien
tgtgcttttcttagcctagttctgt

SEQ ID NO: 4969098 - DNA, 25 bp, Homo sapien
gcctagttctgtcctgcaatttatt

SEQ ID NO: 4969099 - DNA, 25 bp, Homo sapien
tcatgtgactgtcggctgaagtctg

SEQ ID NO: 4969100 - DNA, 25 bp, Homo sapien
aaaactcaggtggtttgcatagcta

SEQ ID NO: 4969101 - DNA, 25 bp, Homo sapien
gaactggttgcatcaactcctgcat

SEQ ID NO: 4969102 - DNA, 25 bp, Homo sapien
tccacacaatgcagtactatgagct

SEQ ID NO: 4969103 - DNA, 25 bp, Homo sapien
tatattcaactgtggaaggatctcc

SEQ ID NO: 4969104 - DNA, 25 bp, Homo sapien
gggtgcttatcagaagatcgccagg

SEQ ID NO: 4969105 - DNA, 25 bp, Homo sapien
agcgattacaaatccatcctttggg

SEQ ID NO: 4969106 - DNA, 25 bp, Homo sapien
gaagaggaccgaaaagctgataaag

SEQ ID NO: 4969107 - DNA, 25 bp, Homo sapien
aactagttgaacgtcagcgattaca

SEQ ID NO: 4969108 - DNA, 25 bp, Homo sapien
gcaaagagccaatgtttgcaagctt

SEQ ID NO: 4969109 - DNA, 25 bp, Homo sapien
tattcttagttctagaatttgcaaa

SEQ ID NO: 4969110 - DNA, 25 bp, Homo sapien
caacttccagtctgatcctttattc

SEQ ID NO: 4969111 - DNA, 25 bp, Homo sapien
gcaagcttgtggctttctgtctaaa

SEQ ID NO: 4969112 - DNA, 25 bp, Homo sapien
gcttggtaatatgaagttctttcac

SEQ ID NO: 4969113 - DNA, 25 bp, Homo sapien
taggcttggtaatatgaagttcttt

SEQ ID NO: 4969114 - DNA, 25 bp, Homo sapien
cttaggcttggtaatatgaagttct

SEQ ID NO: 4969115 - DNA, 25 bp, Homo sapien
ggcttggtaatatgaagttctttca

SEQ ID NO: 4969116 - DNA, 25 bp, Homo sapien
tgaatatagtgcttcttccagatcc

SEQ ID NO: 4969117 - DNA, 25 bp, Homo sapien
catttgaatatagtgcttcttccag

SEQ ID NO: 4969118 - DNA, 25 bp, Homo sapien
gagaaattgatgtaccagttaaacc

SEQ ID NO: 4969119 - DNA, 25 bp, Homo sapien
cagttaaaccgtaaacatttcagca

SEQ ID NO: 4969120 - DNA, 25 bp, Homo sapien
ctcactttgtgactcaggctagcag

SEQ ID NO: 4969121 - DNA, 25 bp, Homo sapien
gtatttataatagagatgagttttc

SEQ ID NO: 4969122 - DNA, 25 bp, Homo sapien
ctgcctcagccccgccaaatagctg

SEQ ID NO: 4969123 - DNA, 25 bp, Homo sapien
cagattcaagcaacccttctgcctc

SEQ ID NO: 4969124 - DNA, 25 bp, Homo sapien
tatcatggaatactcacaaaggctt

SEQ ID NO: 4969125 - DNA, 25 bp, Homo sapien
tgacgcgtcgtggagatagttgcaa

SEQ ID NO: 4969126 - DNA, 25 bp, Homo sapien
gaaattagccctttgcatgcaatcg

SEQ ID NO: 4969127 - DNA, 25 bp, Homo sapien
tttaccatgttgcaggacacccatc

SEQ ID NO: 4969128 - DNA, 25 bp, Homo sapien
aatgctgtgcagtataagaccgtcc

SEQ ID NO: 4969129 - DNA, 25 bp, Homo sapien
tgaggaccttattgcagctgaatgc

SEQ ID NO: 4969130 - DNA, 25 bp, Homo sapien
gaatgccctgtgctctacaattgag

SEQ ID NO: 4969131 - DNA, 25 bp, Homo sapien
tatgagcacacctgcccacttggat

SEQ ID NO: 4969132 - DNA, 25 bp, Homo sapien
aaagataacacccttggaagcttgg

SEQ ID NO: 4969133 - DNA, 25 bp, Homo sapien
tttgctgggacagcgagcagcgctc

SEQ ID NO: 4969134 - DNA, 25 bp, Homo sapien
tgtgcacaacgacaaaggctccgag

SEQ ID NO: 4969135 - DNA, 25 bp, Homo sapien
gaagcttggttgtaaagtccagggc

SEQ ID NO: 4969136 - DNA, 25 bp, Homo sapien
gagaaataggccccgtgtggtggct

SEQ ID NO: 4969137 - DNA, 25 bp, Homo sapien
taagagctcctcagagctgagcaga

SEQ ID NO: 4969138 - DNA, 25 bp, Homo sapien
caggtagcatcccatcaaaagaaca

SEQ ID NO: 4969139 - DNA, 25 bp, Homo sapien
aaaagaacagataagagctcctcag

SEQ ID NO: 4969140 - DNA, 25 bp, Homo sapien
ttacgtgagagtgcctccattctgg

SEQ ID NO: 4969141 - DNA, 25 bp, Homo sapien
aaattttaacattagaggcgtggtg

SEQ ID NO: 4969142 - DNA, 25 bp, Homo sapien
gaggttgcggagtgctattgcactc

SEQ ID NO: 4969143 - DNA, 25 bp, Homo sapien
cagtttgattacgtgagagtgcctc

SEQ ID NO: 4969144 - DNA, 25 bp, Homo sapien
ccaagcagggctcttctttcttcaa

SEQ ID NO: 4969145 - DNA, 25 bp, Homo sapien
ccatttgccaagcagggctcttctt

SEQ ID NO: 4969146 - DNA, 25 bp, Homo sapien
gcagggctcttctttcttcaaatac

SEQ ID NO: 4969147 - DNA, 25 bp, Homo sapien
caagcagggctcttctttcttcaaa

SEQ ID NO: 4969148 - DNA, 25 bp, Homo sapien
tggataccttttggccagctgtctc

SEQ ID NO: 4969149 - DNA, 25 bp, Homo sapien
ggaagccccttgaaattattgtctg

SEQ ID NO: 4969150 - DNA, 25 bp, Homo sapien
ctcatttagaagtatggaagcccct

SEQ ID NO: 4969151 - DNA, 25 bp, Homo sapien
aatgttagatccagaagggaccttc

SEQ ID NO: 4969152 - DNA, 25 bp, Homo sapien
tcactttttcaatgtgtgtaaaacc

SEQ ID NO: 4969153 - DNA, 25 bp, Homo sapien
tttcaatgtgtgtaaaaccttcaca

SEQ ID NO: 4969154 - DNA, 25 bp, Homo sapien
tttttcaatgtgtgtaaaaccttca

SEQ ID NO: 4969155 - DNA, 25 bp, Homo sapien
tcaagtcactttttcaatgtgtgta

SEQ ID NO: 4969156 - DNA, 25 bp, Homo sapien
tatgcttcaggaaccaaaccaggtt

SEQ ID NO: 4969157 - DNA, 25 bp, Homo sapien
atgcttcaggaaccaaaccaggttc

SEQ ID NO: 4969158 - DNA, 25 bp, Homo sapien
ttatgcttcaggaaccaaaccaggt

SEQ ID NO: 4969159 - DNA, 25 bp, Homo sapien
ccggtcattcaatagctgatggttt

SEQ ID NO: 4969160 - DNA, 25 bp, Homo sapien
tttgggaccatctgtgttttttgga

SEQ ID NO: 4969161 - DNA, 25 bp, Homo sapien
gtgttttttggaggtgcaaatgcca

SEQ ID NO: 4969162 - DNA, 25 bp, Homo sapien
tctgtgttttttggaggtgcaaatg

SEQ ID NO: 4969163 - DNA, 25 bp, Homo sapien
accatctgtgttttttggaggtgca

SEQ ID NO: 4969164 - DNA, 25 bp, Homo sapien
gacgttgccacagtttcattaggtc

SEQ ID NO: 4969165 - DNA, 25 bp, Homo sapien
ctcttcaagcctcaagcgctgacgt

SEQ ID NO: 4969166 - DNA, 25 bp, Homo sapien
aggtcagctttttctccgactccct

SEQ ID NO: 4969167 - DNA, 25 bp, Homo sapien
cctcaagcgctgacgttgccacagt

SEQ ID NO: 4969168 - DNA, 25 bp, Homo sapien
caccgtctataaatcccgtcgctgg

SEQ ID NO: 4969169 - DNA, 25 bp, Homo sapien
tcaccgtctataaatcccgtcgctg

SEQ ID NO: 4969170 - DNA, 25 bp, Homo sapien
caatcaccgtctataaatcccgtcg

SEQ ID NO: 4969171 - DNA, 25 bp, Homo sapien
ccgtctataaatcccgtcgctggca

SEQ ID NO: 4969172 - DNA, 25 bp, Homo sapien
gatctgcctcttgagcaccccaaat

SEQ ID NO: 4969173 - DNA, 25 bp, Homo sapien
acacctccgcgctgtgtcatcaggg

SEQ ID NO: 4969174 - DNA, 25 bp, Homo sapien
ttctcagaccaggtgtaggtggtcc

SEQ ID NO: 4969175 - DNA, 25 bp, Homo sapien
tgcatctcagatgagcgcctccagg

SEQ ID NO: 4969176 - DNA, 25 bp, Homo sapien
aaatgtgccccatgtaataaaatga

SEQ ID NO: 4969177 - DNA, 25 bp, Homo sapien
caaacgccttttgtgagaccaagct

SEQ ID NO: 4969178 - DNA, 25 bp, Homo sapien
ggttgatcaacttgatatgttggcc

SEQ ID NO: 4969179 - DNA, 25 bp, Homo sapien
gaccaagctaacaaacctctgacgg

SEQ ID NO: 4969180 - DNA, 25 bp, Homo sapien
tcttgtgaacctattaccttgagga

SEQ ID NO: 4969181 - DNA, 25 bp, Homo sapien
gaggatgtgccaagatttgccttat

SEQ ID NO: 4969182 - DNA, 25 bp, Homo sapien
tttggcccttgactgtgttcatggg

SEQ ID NO: 4969183 - DNA, 25 bp, Homo sapien
gaataggcctgatcatctgaatctc

SEQ ID NO: 4969184 - DNA, 25 bp, Homo sapien
gacacaaggatctcataataaagcc

SEQ ID NO: 4969185 - DNA, 25 bp, Homo sapien
gcatccatccctgcacaatataagg

SEQ ID NO: 4969186 - DNA, 25 bp, Homo sapien
tgcttgaagatcgagtagcctgcaa

SEQ ID NO: 4969187 - DNA, 25 bp, Homo sapien
cattgctgtttcacgccagtgcatg

SEQ ID NO: 4969188 - DNA, 25 bp, Homo sapien
aaataggcaattagaccagtgttca

SEQ ID NO: 4969189 - DNA, 25 bp, Homo sapien
tacagtctttaaatcggtcatccaa

SEQ ID NO: 4969190 - DNA, 25 bp, Homo sapien
gcctgatccataaattgttctactg

SEQ ID NO: 4969191 - DNA, 25 bp, Homo sapien
cacactatgagaattgtttgtacac

SEQ ID NO: 4969192 - DNA, 25 bp, Homo sapien
tatcatattcctggagtaggatgga

SEQ ID NO: 4969193 - DNA, 25 bp, Homo sapien
cagtagttcaatctgttgaaaggca

SEQ ID NO: 4969194 - DNA, 25 bp, Homo sapien
ttttaaatcatcatctgcctcagga

SEQ ID NO: 4969195 - DNA, 25 bp, Homo sapien
cattttattggtcactgtcaccagt

SEQ ID NO: 4969196 - DNA, 25 bp, Homo sapien
tgtagagattgaggccagacgcagt

SEQ ID NO: 4969197 - DNA, 25 bp, Homo sapien
taatgtagagattgaggccagacgc

SEQ ID NO: 4969198 - DNA, 25 bp, Homo sapien
gatataatgtagagattgaggccag

SEQ ID NO: 4969199 - DNA, 25 bp, Homo sapien
tctgatataatgtagagattgaggc

SEQ ID NO: 4969200 - DNA, 25 bp, Homo sapien
gcccaaacccatgtgatgtctgaaa

SEQ ID NO: 4969201 - DNA, 25 bp, Homo sapien
tttttaagttcaagcgcaatgcctg

SEQ ID NO: 4969202 - DNA, 25 bp, Homo sapien
gataccattaagtgacctagcttgg

SEQ ID NO: 4969203 - DNA, 25 bp, Homo sapien
tcattctacctgacagacagctagg

SEQ ID NO: 4969204 - DNA, 25 bp, Homo sapien
cagattgcatattgctcgggtgagg

SEQ ID NO: 4969205 - DNA, 25 bp, Homo sapien
acaggattggctttcagcaggcggt

SEQ ID NO: 4969206 - DNA, 25 bp, Homo sapien
ctagcgtcgctgtttcagattgcat

SEQ ID NO: 4969207 - DNA, 25 bp, Homo sapien
tgagtaagaattccagtcggtggac

SEQ ID NO: 4969208 - DNA, 25 bp, Homo sapien
tgttgctaccaacaccccgttccga

SEQ ID NO: 4969209 - DNA, 25 bp, Homo sapien
caacaccccgttccgagaaggcaag

SEQ ID NO: 4969210 - DNA, 25 bp, Homo sapien
gttccgagaaggcaaggacacagaa

SEQ ID NO: 4969211 - DNA, 25 bp, Homo sapien
cccgttccgagaaggcaaggacaca

SEQ ID NO: 4969212 - DNA, 25 bp, Homo sapien
tccgccgtgtgcagccgggtgctgg

SEQ ID NO: 4969213 - DNA, 25 bp, Homo sapien
attggctgcggcgtcccacaatgca

SEQ ID NO: 4969214 - DNA, 25 bp, Homo sapien
taggcgcccggtgccgtatagccct

SEQ ID NO: 4969215 - DNA, 25 bp, Homo sapien
aggcagcgcaggctcggcattggct

SEQ ID NO: 4969216 - DNA, 25 bp, Homo sapien
cccttggtaagcatgtcctgtcctg

SEQ ID NO: 4969217 - DNA, 25 bp, Homo sapien
ggtaagcatgtcctgtcctgaaggc

SEQ ID NO: 4969218 - DNA, 25 bp, Homo sapien
tggtaagcatgtcctgtcctgaagg

SEQ ID NO: 4969219 - DNA, 25 bp, Homo sapien
cttggtaagcatgtcctgtcctgaa

SEQ ID NO: 4969220 - DNA, 25 bp, Homo sapien
attccttttttgctagacagtcata

SEQ ID NO: 4969221 - DNA, 25 bp, Homo sapien
ttgacttgagataataagaaaattc

SEQ ID NO: 4969222 - DNA, 25 bp, Homo sapien
tgctagacagtcatacctgttgact

SEQ ID NO: 4969223 - DNA, 25 bp, Homo sapien
tacctgttgacttgagataataaga

SEQ ID NO: 4969224 - DNA, 25 bp, Homo sapien
tctttcctgttagcgatgacgttgt

SEQ ID NO: 4969225 - DNA, 25 bp, Homo sapien
tgtaaacttagcaccccacacggct

SEQ ID NO: 4969226 - DNA, 25 bp, Homo sapien
gctcctggaccatggtaacctggag

SEQ ID NO: 4969227 - DNA, 25 bp, Homo sapien
tgcatgggcgatgtccactgtctgt

SEQ ID NO: 4969228 - DNA, 25 bp, Homo sapien
tcactcctcccttaatagaggttta

SEQ ID NO: 4969229 - DNA, 25 bp, Homo sapien
tgccttcccatagacacaattaaag

SEQ ID NO: 4969230 - DNA, 25 bp, Homo sapien
ttgaggattctggtaactggtgagg

SEQ ID NO: 4969231 - DNA, 25 bp, Homo sapien
ttctgccttcccatagacacaatta

SEQ ID NO: 4969232 - DNA, 25 bp, Homo sapien
gattctggtaactggtgaggacagc

SEQ ID NO: 4969233 - DNA, 25 bp, Homo sapien
gcccgtgcagaagccacgtggtcct

SEQ ID NO: 4969234 - DNA, 25 bp, Homo sapien
aagccacgtggtcctgctctcacat

SEQ ID NO: 4969235 - DNA, 25 bp, Homo sapien
agggctgcccgtgcagaagccacgt

SEQ ID NO: 4969236 - DNA, 25 bp, Homo sapien
tgcagaagccacgtggtcctgctct

SEQ ID NO: 4969237 - DNA, 25 bp, Homo sapien
ggaatattggactacctgactctat

SEQ ID NO: 4969238 - DNA, 25 bp, Homo sapien
tccccaggcatttgaagatattgtt

SEQ ID NO: 4969239 - DNA, 25 bp, Homo sapien
cactctgtacagcagtcagtggaca

SEQ ID NO: 4969240 - DNA, 25 bp, Homo sapien
tgtcttccagcaaccagtattgttg

SEQ ID NO: 4969241 - DNA, 25 bp, Homo sapien
tgtcagcttgattgctactgaagct

SEQ ID NO: 4969242 - DNA, 25 bp, Homo sapien
gatccaaggccaaaacaggcttctc

SEQ ID NO: 4969243 - DNA, 25 bp, Homo sapien
taaaatgtcagcttgattgctactg

SEQ ID NO: 4969244 - DNA, 25 bp, Homo sapien
agaaggtggcttggatccaaggcca

SEQ ID NO: 4969245 - DNA, 25 bp, Homo sapien
cttggtcataggcatagtcgccgga

SEQ ID NO: 4969246 - DNA, 25 bp, Homo sapien
cataggcatagtcgccggaaactgc

SEQ ID NO: 4969247 - DNA, 25 bp, Homo sapien
tcgccggaaactgctgtatctgctg

SEQ ID NO: 4969248 - DNA, 25 bp, Homo sapien
gcatagtcgccggaaactgctgtat

SEQ ID NO: 4969249 - DNA, 25 bp, Homo sapien
tggaggagagaagaaggcacgtggc

SEQ ID NO: 4969250 - DNA, 25 bp, Homo sapien
ctgagtggaggagagaagaaggcac

SEQ ID NO: 4969251 - DNA, 25 bp, Homo sapien
agtggaggagagaagaaggcacgtg

SEQ ID NO: 4969252 - DNA, 25 bp, Homo sapien
tgagtggaggagagaagaaggcacg

SEQ ID NO: 4969253 - DNA, 25 bp, Homo sapien
tgcctgggaccaggggtggactttc

SEQ ID NO: 4969254 - DNA, 25 bp, Homo sapien
agcttctttgtgcatctgcctggga

SEQ ID NO: 4969255 - DNA, 25 bp, Homo sapien
ctttccagtcttgcctgcagaaggt

SEQ ID NO: 4969256 - DNA, 25 bp, Homo sapien
gtggactttccagtcttgcctgcag

SEQ ID NO: 4969257 - DNA, 25 bp, Homo sapien
ccttgcagtcttttttcgtaattct

SEQ ID NO: 4969258 - DNA, 25 bp, Homo sapien
ttgcagtcttttttcgtaattctcc

SEQ ID NO: 4969259 - DNA, 25 bp, Homo sapien
gttctttgctgacccagttgtggag

SEQ ID NO: 4969260 - DNA, 25 bp, Homo sapien
tgcagtcttttttcgtaattctccc

SEQ ID NO: 4969261 - DNA, 25 bp, Homo sapien
gtttgttgtagtaaacttgtgtcat

SEQ ID NO: 4969262 - DNA, 25 bp, Homo sapien
gcaggtttgttgtagtaaacttgtg

SEQ ID NO: 4969263 - DNA, 25 bp, Homo sapien
tctgtaggttaggaattcagaagtg

SEQ ID NO: 4969264 - DNA, 25 bp, Homo sapien
tggcttagctgggtgttttttctgg

SEQ ID NO: 4969265 - DNA, 25 bp, Homo sapien
gatcttgaatagtggctgtcagcac

SEQ ID NO: 4969266 - DNA, 25 bp, Homo sapien
tctagagtgagccatttatcagggt

SEQ ID NO: 4969267 - DNA, 25 bp, Homo sapien
ggtaatgagtgctatccctggagcc

SEQ ID NO: 4969268 - DNA, 25 bp, Homo sapien
tggcaaggcagagaatactatgaca

SEQ ID NO: 4969269 - DNA, 25 bp, Homo sapien
caagctctatttacaagtgaggccc

SEQ ID NO: 4969270 - DNA, 25 bp, Homo sapien
tgattgtgctccagacagaagaccc

SEQ ID NO: 4969271 - DNA, 25 bp, Homo sapien
gatgctgctgatgctcggtccttgt

SEQ ID NO: 4969272 - DNA, 25 bp, Homo sapien
gccaataatgtctctcttacgggag

SEQ ID NO: 4969273 - DNA, 25 bp, Homo sapien
tcagctccctatctggcagccgata

SEQ ID NO: 4969274 - DNA, 25 bp, Homo sapien
gatttcagtgttaagggatgggcca

SEQ ID NO: 4969275 - DNA, 25 bp, Homo sapien
cacgagttaggaagatttgcagtcc

SEQ ID NO: 4969276 - DNA, 25 bp, Homo sapien
tttaaggccctggtgagatagccag

SEQ ID NO: 4969277 - DNA, 25 bp, Homo sapien
tcaaagggcttcaaaactgcaggca

SEQ ID NO: 4969278 - DNA, 25 bp, Homo sapien
tttctaagttaagcaggtgaccagg

SEQ ID NO: 4969279 - DNA, 25 bp, Homo sapien
cagttcttcttaaggcagccgacca

SEQ ID NO: 4969280 - DNA, 25 bp, Homo sapien
aaaccctggagtagaagccctgtgt

SEQ ID NO: 4969281 - DNA, 25 bp, Homo sapien
catttcggcaactatcatttcgaag

SEQ ID NO: 4969282 - DNA, 25 bp, Homo sapien
caactatcatttcgaagactttcaa

SEQ ID NO: 4969283 - DNA, 25 bp, Homo sapien
tcggcaactatcatttcgaagactt

SEQ ID NO: 4969284 - DNA, 25 bp, Homo sapien
ccttcatttcggcaactatcatttc

SEQ ID NO: 4969285 - DNA, 25 bp, Homo sapien
gatgggatggtaaagcgtctcaagc

SEQ ID NO: 4969286 - DNA, 25 bp, Homo sapien
ggagcttatgagtcaagaacgagga

SEQ ID NO: 4969287 - DNA, 25 bp, Homo sapien
tcataagctgatttaaggctgggca

SEQ ID NO: 4969288 - DNA, 25 bp, Homo sapien
ggagaatgcccgagtcataagctga

SEQ ID NO: 4969289 - DNA, 25 bp, Homo sapien
gctgccattgaacgtctgaggtgta

SEQ ID NO: 4969290 - DNA, 25 bp, Homo sapien
tgtgcttgctgccattgaacgtctg

SEQ ID NO: 4969291 - DNA, 25 bp, Homo sapien
aacgtctgaggtgtagatgtctgtg

SEQ ID NO: 4969292 - DNA, 25 bp, Homo sapien
tgaacgtctgaggtgtagatgtctg

SEQ ID NO: 4969293 - DNA, 25 bp, Homo sapien
aggagatccgctcgcctcggcctct

SEQ ID NO: 4969294 - DNA, 25 bp, Homo sapien
caggtgtgagccaccatgcccagcc

SEQ ID NO: 4969295 - DNA, 25 bp, Homo sapien
tacaggtgtgagccaccatgcccag

SEQ ID NO: 4969296 - DNA, 25 bp, Homo sapien
attacaggtgtgagccaccatgccc

SEQ ID NO: 4969297 - DNA, 25 bp, Homo sapien
tgtacacgcagttcagggtggattc

SEQ ID NO: 4969298 - DNA, 25 bp, Homo sapien
tcgtgaaggtgtacggctacatgcc

SEQ ID NO: 4969299 - DNA, 25 bp, Homo sapien
tgccccatgacaagaccaagtgctt

SEQ ID NO: 4969300 - DNA, 25 bp, Homo sapien
ggtggacattccgatgcccaggatg

SEQ ID NO: 4969301 - DNA, 25 bp, Homo sapien
ggctggccgggaagttttacagcaa

SEQ ID NO: 4969302 - DNA, 25 bp, Homo sapien
tccctagtgtagagcaagccagtgt

SEQ ID NO: 4969303 - DNA, 25 bp, Homo sapien
tgaagtggtttgcaggtcagcctcc

SEQ ID NO: 4969304 - DNA, 25 bp, Homo sapien
tcttggattggacaggagatcagca

SEQ ID NO: 4969305 - DNA, 25 bp, Homo sapien
ctaattttttgggtcacggtggcag

SEQ ID NO: 4969306 - DNA, 25 bp, Homo sapien
gcttaggattctgttccctgggctg

SEQ ID NO: 4969307 - DNA, 25 bp, Homo sapien
cattcacaacccgagttaccacttt

SEQ ID NO: 4969308 - DNA, 25 bp, Homo sapien
tccagccttggaatctaacgggcat

SEQ ID NO: 4969309 - DNA, 25 bp, Homo sapien
tggagccaggttgtcgggccccgaa

SEQ ID NO: 4969310 - DNA, 25 bp, Homo sapien
tctgtgtggtgggaccccctttagc

SEQ ID NO: 4969311 - DNA, 25 bp, Homo sapien
tgacttcagtgggactcggtgagcc

SEQ ID NO: 4969312 - DNA, 25 bp, Homo sapien
ccctttagcgggactcagtgagctg

SEQ ID NO: 4969313 - DNA, 25 bp, Homo sapien
tggtcaggtgcttctcaccacggga

SEQ ID NO: 4969314 - DNA, 25 bp, Homo sapien
tgtcttaccataacaccgtcccagg

SEQ ID NO: 4969315 - DNA, 25 bp, Homo sapien
ggtgccggtgcttccaacaaggaca

SEQ ID NO: 4969316 - DNA, 25 bp, Homo sapien
tctgacaccaaaacatgccgcaggg

SEQ ID NO: 4969317 - DNA, 25 bp, Homo sapien
tgtccggaaggatgggatctttctg

SEQ ID NO: 4969318 - DNA, 25 bp, Homo sapien
ctgtccggaaggatgggatctttct

SEQ ID NO: 4969319 - DNA, 25 bp, Homo sapien
tccggaaggatgggatctttctggg

SEQ ID NO: 4969320 - DNA, 25 bp, Homo sapien
gtccggaaggatgggatctttctgg

SEQ ID NO: 4969321 - DNA, 25 bp, Homo sapien
tgcttgattccaggtcgccacctgt

SEQ ID NO: 4969322 - DNA, 25 bp, Homo sapien
tgggcctgctcgcagaagacgatgg

SEQ ID NO: 4969323 - DNA, 25 bp, Homo sapien
ccacctgtgtatgccagctgggcct

SEQ ID NO: 4969324 - DNA, 25 bp, Homo sapien
tgctcgcagaagacgatgggaggca

SEQ ID NO: 4969325 - DNA, 25 bp, Homo sapien
acagactcacactcacatgggcagc

SEQ ID NO: 4969326 - DNA, 25 bp, Homo sapien
tgcctgtgcccggttccagggcaag

SEQ ID NO: 4969327 - DNA, 25 bp, Homo sapien
tgcccggttccagggcaagtcattt

SEQ ID NO: 4969328 - DNA, 25 bp, Homo sapien
ccagagatgggtgaacagactcaca

SEQ ID NO: 4969329 - DNA, 25 bp, Homo sapien
ctttaagcaggatgtggaagggcat

SEQ ID NO: 4969330 - DNA, 25 bp, Homo sapien
agccccatcctgttggtgcccacag

SEQ ID NO: 4969331 - DNA, 25 bp, Homo sapien
ccgagctgacgctccctgactgcag

SEQ ID NO: 4969332 - DNA, 25 bp, Homo sapien
gtgcccacaggcctagatcttgtgc

SEQ ID NO: 4969333 - DNA, 25 bp, Homo sapien
ccacaggcctagatcttgtgcttgg

SEQ ID NO: 4969334 - DNA, 25 bp, Homo sapien
tgtgggcttcggggagaaggatgga

SEQ ID NO: 4969335 - DNA, 25 bp, Homo sapien
taaaggcgaggactcctctcctggg

SEQ ID NO: 4969336 - DNA, 25 bp, Homo sapien
tgagctgtgggcttcggggagaagg

SEQ ID NO: 4969337 - DNA, 25 bp, Homo sapien
ctgcaggtggcagctttggtcacac

SEQ ID NO: 4969338 - DNA, 25 bp, Homo sapien
cattttactggacccgccttggagc

SEQ ID NO: 4969339 - DNA, 25 bp, Homo sapien
tgagtaaagtggcaacatcaatgca

SEQ ID NO: 4969340 - DNA, 25 bp, Homo sapien
tcctgttgtaggactgtcatgttag

SEQ ID NO: 4969341 - DNA, 25 bp, Homo sapien
tattgatttaaacgactggtcccac

SEQ ID NO: 4969342 - DNA, 25 bp, Homo sapien
gatcatcatcttattgcgtacagca

SEQ ID NO: 4969343 - DNA, 25 bp, Homo sapien
tcttcactccttaagccagaggaca

SEQ ID NO: 4969344 - DNA, 25 bp, Homo sapien
tgggactgatgcaagacagccagcc

SEQ ID NO: 4969345 - DNA, 25 bp, Homo sapien
taagtccagaccatttccctcaaga

SEQ ID NO: 4969346 - DNA, 25 bp, Homo sapien
aatttgaggacaaggtcccgcagtc

SEQ ID NO: 4969347 - DNA, 25 bp, Homo sapien
atttgaggacaaggtcccgcagtcg

SEQ ID NO: 4969348 - DNA, 25 bp, Homo sapien
ttcaatctggatgagcgtctcagcc

SEQ ID NO: 4969349 - DNA, 25 bp, Homo sapien
gcatctcgtcattgtcgcagatgat

SEQ ID NO: 4969350 - DNA, 25 bp, Homo sapien
tatgggtcgagtcttcttcaatctg

SEQ ID NO: 4969351 - DNA, 25 bp, Homo sapien
cctggagcaggacgatatggccctt

SEQ ID NO: 4969352 - DNA, 25 bp, Homo sapien
tgggcagactgcacatctgtgagat

SEQ ID NO: 4969353 - DNA, 25 bp, Homo sapien
ggtgggctgggcagactgcacatct

SEQ ID NO: 4969354 - DNA, 25 bp, Homo sapien
ggctgggcagactgcacatctgtga

SEQ ID NO: 4969355 - DNA, 25 bp, Homo sapien
agaaaagaaagaggtgggctgggca

SEQ ID NO: 4969356 - DNA, 25 bp, Homo sapien
tgagttctttgagggcacgtccaag

SEQ ID NO: 4969357 - DNA, 25 bp, Homo sapien
actttctagaaactgacacgtctca

SEQ ID NO: 4969358 - DNA, 25 bp, Homo sapien
tgtaaatgacacttcacagactcga

SEQ ID NO: 4969359 - DNA, 25 bp, Homo sapien
tacttgaaaagagaccctaaacatg

SEQ ID NO: 4969360 - DNA, 25 bp, Homo sapien
gaagggcctcggtgtggggaggcca

SEQ ID NO: 4969361 - DNA, 25 bp, Homo sapien
tgaagggcctcggtgtggggaggcc

SEQ ID NO: 4969362 - DNA, 25 bp, Homo sapien
gctcccctagggacttggacaggtg

SEQ ID NO: 4969363 - DNA, 25 bp, Homo sapien
ggacttggacaggtgcttgctcctt

SEQ ID NO: 4969364 - DNA, 25 bp, Homo sapien
atggctgcaggctcccctagggact

SEQ ID NO: 4969365 - DNA, 25 bp, Homo sapien
cccctagggacttggacaggtgctt

SEQ ID NO: 4969366 - DNA, 25 bp, Homo sapien
tcctgacagtcgactggagacttgg

SEQ ID NO: 4969367 - DNA, 25 bp, Homo sapien
cagcaggaccttagaccaaacagat

SEQ ID NO: 4969368 - DNA, 25 bp, Homo sapien
ttcttcagtctggagaggccttctg

SEQ ID NO: 4969369 - DNA, 25 bp, Homo sapien
tgtggagttttcacggcaccagcga

SEQ ID NO: 4969370 - DNA, 25 bp, Homo sapien
ggatggaaccgctcaacaaaggctt

SEQ ID NO: 4969371 - DNA, 25 bp, Homo sapien
tccagggtctgcacgaactgctcca

SEQ ID NO: 4969372 - DNA, 25 bp, Homo sapien
agtctggtacgtcatcgctcacccg

SEQ ID NO: 4969373 - DNA, 25 bp, Homo sapien
tcaggactttgcagtctggtacgtc

SEQ ID NO: 4969374 - DNA, 25 bp, Homo sapien
ccatgggcaccagtgaatctgcgag

SEQ ID NO: 4969375 - DNA, 25 bp, Homo sapien
caagtgcttgttatctttggtgtgc

SEQ ID NO: 4969376 - DNA, 25 bp, Homo sapien
atctccatgggcaccagtgaatctg

SEQ ID NO: 4969377 - DNA, 25 bp, Homo sapien
gcacggccgagacagttgccaagga

SEQ ID NO: 4969378 - DNA, 25 bp, Homo sapien
aaagcaaagggcgcagttcaggctg

SEQ ID NO: 4969379 - DNA, 25 bp, Homo sapien
atgatgaccattactcttcctttaa

SEQ ID NO: 4969380 - DNA, 25 bp, Homo sapien
ggctgggggcctttaatgatgacca

SEQ ID NO: 4969381 - DNA, 25 bp, Homo sapien
gggcctttaatgatgaccattactc

SEQ ID NO: 4969382 - DNA, 25 bp, Homo sapien
tggcggttgagggagctctctcttc

SEQ ID NO: 4969383 - DNA, 25 bp, Homo sapien
ggggacagcagcatggcggttgagg

SEQ ID NO: 4969384 - DNA, 25 bp, Homo sapien
atggcggttgagggagctctctctt

SEQ ID NO: 4969385 - DNA, 25 bp, Homo sapien
gcagtcgatcatgaggtccatcctg

SEQ ID NO: 4969386 - DNA, 25 bp, Homo sapien
ctcgtaccgacgtttgaagggcagg

SEQ ID NO: 4969387 - DNA, 25 bp, Homo sapien
gcggctgagtgtactgctcaggaca

SEQ ID NO: 4969388 - DNA, 25 bp, Homo sapien
tcagcccgccgataggacatggcgg

SEQ ID NO: 4969389 - DNA, 25 bp, Homo sapien
gaccccgatccactccccgccatta

SEQ ID NO: 4969390 - DNA, 25 bp, Homo sapien
gtggtgtgaagtacagtggcccctg

SEQ ID NO: 4969391 - DNA, 25 bp, Homo sapien
tccactccccgccattacaggctca

SEQ ID NO: 4969392 - DNA, 25 bp, Homo sapien
ggaaggcccattcctgaccccgatc

SEQ ID NO: 4969393 - DNA, 25 bp, Homo sapien
cccaatgaaccgtagacaggagagg

SEQ ID NO: 4969394 - DNA, 25 bp, Homo sapien
gaactttcatcctctcaagcccaat

SEQ ID NO: 4969395 - DNA, 25 bp, Homo sapien
tcctctcaagcccaatgaaccgtag

SEQ ID NO: 4969396 - DNA, 25 bp, Homo sapien
ccaaggtgaactttcatcctctcaa

SEQ ID NO: 4969397 - DNA, 25 bp, Homo sapien
taagtttcacggtaacttccatgtg

SEQ ID NO: 4969398 - DNA, 25 bp, Homo sapien
tctcggaaacccctaaactgcctca

SEQ ID NO: 4969399 - DNA, 25 bp, Homo sapien
ccagcggtctctgggcttcctcggg

SEQ ID NO: 4969400 - DNA, 25 bp, Homo sapien
tcggggcacggtctttctctaacat

SEQ ID NO: 4969401 - DNA, 25 bp, Homo sapien
accaatttttactttgcacaaatat

SEQ ID NO: 4969402 - DNA, 25 bp, Homo sapien
gcccacaggggcactgtgttgtccc

SEQ ID NO: 4969403 - DNA, 25 bp, Homo sapien
ttgttatcttgagaaaaaaagatta

SEQ ID NO: 4969404 - DNA, 25 bp, Homo sapien
acaaatatcacccaaatgaaaagga

SEQ ID NO: 4969405 - DNA, 25 bp, Homo sapien
gaagacggctttccaccaggctgac

SEQ ID NO: 4969406 - DNA, 25 bp, Homo sapien
tgctgaagacggctttccaccaggc

SEQ ID NO: 4969407 - DNA, 25 bp, Homo sapien
gctgaagacggctttccaccaggct

SEQ ID NO: 4969408 - DNA, 25 bp, Homo sapien
tgaagacggctttccaccaggctga

SEQ ID NO: 4969409 - DNA, 25 bp, Homo sapien
caaaagcacttgttccttagggcta

SEQ ID NO: 4969410 - DNA, 25 bp, Homo sapien
tgtctcaaagcatctcatgccacag

SEQ ID NO: 4969411 - DNA, 25 bp, Homo sapien
acaggtgcagtctgatggcttctcc

SEQ ID NO: 4969412 - DNA, 25 bp, Homo sapien
tagggctaatacttttctcctccaa

SEQ ID NO: 4969413 - DNA, 25 bp, Homo sapien
cactgctgcttctaacgtggatgag

SEQ ID NO: 4969414 - DNA, 25 bp, Homo sapien
taatgaaaagcaacacgcctttcac

SEQ ID NO: 4969415 - DNA, 25 bp, Homo sapien
gaatcactgtagacaggccccacgt

SEQ ID NO: 4969416 - DNA, 25 bp, Homo sapien
tccaggattagcacctgacagaggg

SEQ ID NO: 4969417 - DNA, 25 bp, Homo sapien
cctggatgaagttcagccgggtgtc

SEQ ID NO: 4969418 - DNA, 25 bp, Homo sapien
tctttaagcagctttgacacctgga

SEQ ID NO: 4969419 - DNA, 25 bp, Homo sapien
cagcggctggtaaggagccagggct

SEQ ID NO: 4969420 - DNA, 25 bp, Homo sapien
tcgatggggcagtagatgcatttca

SEQ ID NO: 4969421 - DNA, 25 bp, Homo sapien
tgggctccaagcttcagcagaggca

SEQ ID NO: 4969422 - DNA, 25 bp, Homo sapien
aatcttacaatgcagactacacagg

SEQ ID NO: 4969423 - DNA, 25 bp, Homo sapien
gaaagctctttttacaacgaaatgc

SEQ ID NO: 4969424 - DNA, 25 bp, Homo sapien
caccgtttggcaaccattacagttc

SEQ ID NO: 4969425 - DNA, 25 bp, Homo sapien
aagggtgcccggtgaacaccacaca

SEQ ID NO: 4969426 - DNA, 25 bp, Homo sapien
tattgagactagattttccccagag

SEQ ID NO: 4969427 - DNA, 25 bp, Homo sapien
gagctccatgaagtggaccacgtcc

SEQ ID NO: 4969428 - DNA, 25 bp, Homo sapien
taaagtcgttgctgaagtctccgtg

SEQ ID NO: 4969429 - DNA, 25 bp, Homo sapien
ctttaattgaagagacctggttgta

SEQ ID NO: 4969430 - DNA, 25 bp, Homo sapien
ggagcaaacatcgaattcccacgtt

SEQ ID NO: 4969431 - DNA, 25 bp, Homo sapien
cgcatgcttggatggaatatgaata

SEQ ID NO: 4969432 - DNA, 25 bp, Homo sapien
gaatatgaatagtaaagccggagca

SEQ ID NO: 4969433 - DNA, 25 bp, Homo sapien
gatcttcatcagctgtcgcatgctt

SEQ ID NO: 4969434 - DNA, 25 bp, Homo sapien
gcaggtctctgcacacgtaagtcac

SEQ ID NO: 4969435 - DNA, 25 bp, Homo sapien
gggtctattgtatcctaagatgtca

SEQ ID NO: 4969436 - DNA, 25 bp, Homo sapien
tctatagttcctgtagctctactga

SEQ ID NO: 4969437 - DNA, 25 bp, Homo sapien
gagtggctgtcaaaaagggtctatt

SEQ ID NO: 4969438 - DNA, 25 bp, Homo sapien
agactggtgtgcagtaagtagcacg

SEQ ID NO: 4969439 - DNA, 25 bp, Homo sapien
taagtagcacgattgcagttcactg

SEQ ID NO: 4969440 - DNA, 25 bp, Homo sapien
ccgcacctgaccaaattctagattt

SEQ ID NO: 4969441 - DNA, 25 bp, Homo sapien
gcacctgaccaaattctagatttgt

SEQ ID NO: 4969442 - DNA, 25 bp, Homo sapien
gttctggaagatacaccttactctg

SEQ ID NO: 4969443 - DNA, 25 bp, Homo sapien
ctctgcatgaggaaaaggtggttct

SEQ ID NO: 4969444 - DNA, 25 bp, Homo sapien
caccttactctgtttgttgtgacaa

SEQ ID NO: 4969445 - DNA, 25 bp, Homo sapien
gaagagcatacggtggcatctgttg

SEQ ID NO: 4969446 - DNA, 25 bp, Homo sapien
agcatacggtggcatctgttgccac

SEQ ID NO: 4969447 - DNA, 25 bp, Homo sapien
agcatgtgaggaagagcatacggtg

SEQ ID NO: 4969448 - DNA, 25 bp, Homo sapien
tgaggaagagcatacggtggcatct

SEQ ID NO: 4969449 - DNA, 25 bp, Homo sapien
ttcttactgcttgaatgtcctgaat

SEQ ID NO: 4969450 - DNA, 25 bp, Homo sapien
tttttattcttactgcttgaatgtc

SEQ ID NO: 4969451 - DNA, 25 bp, Homo sapien
ttattcttactgcttgaatgtcctg

SEQ ID NO: 4969452 - DNA, 25 bp, Homo sapien
cttactgcttgaatgtcctgaatca

SEQ ID NO: 4969453 - DNA, 25 bp, Homo sapien
tccagaagggtagcagggaaccaac

SEQ ID NO: 4969454 - DNA, 25 bp, Homo sapien
gaaagcccggctgagtcgatgtact

SEQ ID NO: 4969455 - DNA, 25 bp, Homo sapien
ctgatataggcactccaggaggtca

SEQ ID NO: 4969456 - DNA, 25 bp, Homo sapien
ctccagtgaactgttggccacaggg

SEQ ID NO: 4969457 - DNA, 25 bp, Homo sapien
aagctccttcccgttttagatcctg

SEQ ID NO: 4969458 - DNA, 25 bp, Homo sapien
tccttcccgttttagatcctgctca

SEQ ID NO: 4969459 - DNA, 25 bp, Homo sapien
ctgttcagtctctgaccatggctga

SEQ ID NO: 4969460 - DNA, 25 bp, Homo sapien
agctgagcttcaggacagagcctcc

SEQ ID NO: 4969461 - DNA, 25 bp, Homo sapien
ctaggttgctgcagaactctcccac

SEQ ID NO: 4969462 - DNA, 25 bp, Homo sapien
ctgtcagaacaagaacatcgctgtt

SEQ ID NO: 4969463 - DNA, 25 bp, Homo sapien
caagaacatcgctgtttttgagaga

SEQ ID NO: 4969464 - DNA, 25 bp, Homo sapien
gggatctgggtaagccctgtcagaa

SEQ ID NO: 4969465 - DNA, 25 bp, Homo sapien
ggtaagccctgtcagaacaagaaca

SEQ ID NO: 4969466 - DNA, 25 bp, Homo sapien
gaaacattatctctgaaccttggcc

SEQ ID NO: 4969467 - DNA, 25 bp, Homo sapien
tcgaatgtcaccgagttggaaccat

SEQ ID NO: 4969468 - DNA, 25 bp, Homo sapien
agacatttctcgttgattcccaggg

SEQ ID NO: 4969469 - DNA, 25 bp, Homo sapien
cagaggcagtgctacagtacgaatg

SEQ ID NO: 4969470 - DNA, 25 bp, Homo sapien
accctctagattcccattcctcaag

SEQ ID NO: 4969471 - DNA, 25 bp, Homo sapien
aagaccctctagattcccattcctc

SEQ ID NO: 4969472 - DNA, 25 bp, Homo sapien
gaccctctagattcccattcctcaa

SEQ ID NO: 4969473 - DNA, 25 bp, Homo sapien
cctctagattcccattcctcaagca

SEQ ID NO: 4969474 - DNA, 25 bp, Homo sapien
tgatttcaataaccaggaagggccc

SEQ ID NO: 4969475 - DNA, 25 bp, Homo sapien
catatcaggaacgatagaagctgcc

SEQ ID NO: 4969476 - DNA, 25 bp, Homo sapien
gggcccagaattccgccagatgcag

SEQ ID NO: 4969477 - DNA, 25 bp, Homo sapien
tgaactaagcaggacaaatcgcgag

SEQ ID NO: 4969478 - DNA, 25 bp, Homo sapien
taaaccaatggccatcattctgaaa

SEQ ID NO: 4969479 - DNA, 25 bp, Homo sapien
ctcagttcaagtgagatcttcccat

SEQ ID NO: 4969480 - DNA, 25 bp, Homo sapien
tgggcacccaatctaaaccaatggc

SEQ ID NO: 4969481 - DNA, 25 bp, Homo sapien
tgttacccgcactggagtacggtgg

SEQ ID NO: 4969482 - DNA, 25 bp, Homo sapien
gatgatccagttggagctcccaagg

SEQ ID NO: 4969483 - DNA, 25 bp, Homo sapien
gagtcacctggaccgcaccaaaaag

SEQ ID NO: 4969484 - DNA, 25 bp, Homo sapien
agacactttctcgtaatgagactgg

SEQ ID NO: 4969485 - DNA, 25 bp, Homo sapien
ggtaagcaaggaggatccagagaca

SEQ ID NO: 4969486 - DNA, 25 bp, Homo sapien
ccaatcgaatgctggctggtgatgg

SEQ ID NO: 4969487 - DNA, 25 bp, Homo sapien
gatgagacgcctttctccggactcc

SEQ ID NO: 4969488 - DNA, 25 bp, Homo sapien
tataaaatctaatgtgaacaggatg

SEQ ID NO: 4969489 - DNA, 25 bp, Homo sapien
ctgcacgctggccaatcgaatgctg

SEQ ID NO: 4969490 - DNA, 25 bp, Homo sapien
tatcccaccagctggattttactaa

SEQ ID NO: 4969491 - DNA, 25 bp, Homo sapien
gagttcacctcttgcattgtatagc

SEQ ID NO: 4969492 - DNA, 25 bp, Homo sapien
tcttgcattgtatagcatcttctcc

SEQ ID NO: 4969493 - DNA, 25 bp, Homo sapien
ggattttactaagggcagagttcac

SEQ ID NO: 4969494 - DNA, 25 bp, Homo sapien
tcaactaccaggtgaacatttcttc

SEQ ID NO: 4969495 - DNA, 25 bp, Homo sapien
gtcaactaccaggtgaacatttctt

SEQ ID NO: 4969496 - DNA, 25 bp, Homo sapien
gtgtggccattttaacgatactgat

SEQ ID NO: 4969497 - DNA, 25 bp, Homo sapien
cagtgtggccattttaacgatactg

SEQ ID NO: 4969498 - DNA, 25 bp, Homo sapien
gtggccattttaacgatactgattc

SEQ ID NO: 4969499 - DNA, 25 bp, Homo sapien
ggcagtgtggccattttaacgatac

SEQ ID NO: 4969500 - DNA, 25 bp, Homo sapien
catctaatagcaagagttgcagaaa

SEQ ID NO: 4969501 - DNA, 25 bp, Homo sapien
gaggttcagcatctaatagcaagag

SEQ ID NO: 4969502 - DNA, 25 bp, Homo sapien
gattatgggcatgactgatatctgt

SEQ ID NO: 4969503 - DNA, 25 bp, Homo sapien
taaatgacaatctaagaggttcagc

SEQ ID NO: 4969504 - DNA, 25 bp, Homo sapien
taactcacgactgcctgctttgagg

SEQ ID NO: 4969505 - DNA, 25 bp, Homo sapien
tccacatccccataactcacgactg

SEQ ID NO: 4969506 - DNA, 25 bp, Homo sapien
actttggactgaggccgccgcaggg

SEQ ID NO: 4969507 - DNA, 25 bp, Homo sapien
ggcaggagtacagggaagtggcaca

SEQ ID NO: 4969508 - DNA, 25 bp, Homo sapien
ttaagttctcaggatcaggcagccc

SEQ ID NO: 4969509 - DNA, 25 bp, Homo sapien
ctttaagttctcaggatcaggcagc

SEQ ID NO: 4969510 - DNA, 25 bp, Homo sapien
agttctcaggatcaggcagccctgg

SEQ ID NO: 4969511 - DNA, 25 bp, Homo sapien
taagttctcaggatcaggcagccct

SEQ ID NO: 4969512 - DNA, 25 bp, Homo sapien
gttctacaatcagaatgatgacaga

SEQ ID NO: 4969513 - DNA, 25 bp, Homo sapien
tgatgacagaaacatcagtatgcat

SEQ ID NO: 4969514 - DNA, 25 bp, Homo sapien
atgatgacagaaacatcagtatgca

SEQ ID NO: 4969515 - DNA, 25 bp, Homo sapien
ctacaatcagaatgatgacagaaac

SEQ ID NO: 4969516 - DNA, 25 bp, Homo sapien
gtagtgagcattaaacatacagcta

SEQ ID NO: 4969517 - DNA, 25 bp, Homo sapien
gggccagtagtgagcattaaacata

SEQ ID NO: 4969518 - DNA, 25 bp, Homo sapien
cagtagtgagcattaaacatacagc

SEQ ID NO: 4969519 - DNA, 25 bp, Homo sapien
ggccagtagtgagcattaaacatac

SEQ ID NO: 4969520 - DNA, 25 bp, Homo sapien
catgatgccaaagctctgcggcctc

SEQ ID NO: 4969521 - DNA, 25 bp, Homo sapien
ctgacatgatgccaaagctctgcgg

SEQ ID NO: 4969522 - DNA, 25 bp, Homo sapien
gacatgatgccaaagctctgcggcc

SEQ ID NO: 4969523 - DNA, 25 bp, Homo sapien
gatgccaaagctctgcggcctcttc

SEQ ID NO: 4969524 - DNA, 25 bp, Homo sapien
tcttccacaaggaggcagactgagc

SEQ ID NO: 4969525 - DNA, 25 bp, Homo sapien
gagcctttggcactctttcaatgaa

SEQ ID NO: 4969526 - DNA, 25 bp, Homo sapien
atgtccttattcttccacaaggagg

SEQ ID NO: 4969527 - DNA, 25 bp, Homo sapien
ctgagcctttggcactctttcaatg

SEQ ID NO: 4969528 - DNA, 25 bp, Homo sapien
cggtgggttccgtggcatacactgt

SEQ ID NO: 4969529 - DNA, 25 bp, Homo sapien
catctactgtagacagatctattag

SEQ ID NO: 4969530 - DNA, 25 bp, Homo sapien
tgctcggtgatgtatggcagcgcca

SEQ ID NO: 4969531 - DNA, 25 bp, Homo sapien
cctgtgaagccggtgtgctcggtga

SEQ ID NO: 4969532 - DNA, 25 bp, Homo sapien
caagccttggtgtgcttctgttgaa

SEQ ID NO: 4969533 - DNA, 25 bp, Homo sapien
cagtacctaacaagccttggtgtgc

SEQ ID NO: 4969534 - DNA, 25 bp, Homo sapien
tggcagccagtacctaacaagcctt

SEQ ID NO: 4969535 - DNA, 25 bp, Homo sapien
cctaacaagccttggtgtgcttctg

SEQ ID NO: 4969536 - DNA, 25 bp, Homo sapien
actgcatgaagcacgacgcaagatc

SEQ ID NO: 4969537 - DNA, 25 bp, Homo sapien
tgagaactgcgagagatcactcttt

SEQ ID NO: 4969538 - DNA, 25 bp, Homo sapien
atggcgggcaatatcagctgcaggt

SEQ ID NO: 4969539 - DNA, 25 bp, Homo sapien
gcaggtttcaatctacatatcaggc

SEQ ID NO: 4969540 - DNA, 25 bp, Homo sapien
cagaattccggcacagaatccacaa

SEQ ID NO: 4969541 - DNA, 25 bp, Homo sapien
ctctggtaaacagaattccggcaca

SEQ ID NO: 4969542 - DNA, 25 bp, Homo sapien
gaatccacaaatacatgacccgagc

SEQ ID NO: 4969543 - DNA, 25 bp, Homo sapien
tacatgacccgagcactcctttagc

SEQ ID NO: 4969544 - DNA, 25 bp, Homo sapien
cacagatcatagtgtcggagaccca

SEQ ID NO: 4969545 - DNA, 25 bp, Homo sapien
ggaagtcaaacactctgctcctgga

SEQ ID NO: 4969546 - DNA, 25 bp, Homo sapien
gagtgatccgatctgacaatgccac

SEQ ID NO: 4969547 - DNA, 25 bp, Homo sapien
tcaggacaggttgaaacgggatcac

SEQ ID NO: 4969548 - DNA, 25 bp, Homo sapien
tatgagaagatagctttccactggc

SEQ ID NO: 4969549 - DNA, 25 bp, Homo sapien
cacactactacagggtggctctggt

SEQ ID NO: 4969550 - DNA, 25 bp, Homo sapien
aagaccctagcatagatcttgggga

SEQ ID NO: 4969551 - DNA, 25 bp, Homo sapien
taggctttagtttgtagtcttagat

SEQ ID NO: 4969552 - DNA, 25 bp, Homo sapien
tgtccaagaaagcatttccatcctt

SEQ ID NO: 4969553 - DNA, 25 bp, Homo sapien
cagccaggaagattggacagcctgg

SEQ ID NO: 4969554 - DNA, 25 bp, Homo sapien
agcatttccatccttcagggaccag

SEQ ID NO: 4969555 - DNA, 25 bp, Homo sapien
accagccaggaagattggacagcct

SEQ ID NO: 4969556 - DNA, 25 bp, Homo sapien
tccgcagtccaacataatggtggtt

SEQ ID NO: 4969557 - DNA, 25 bp, Homo sapien
catggtaaggttgggtgccctgaca

SEQ ID NO: 4969558 - DNA, 25 bp, Homo sapien
gaatttgagcacattgcatggtaag

SEQ ID NO: 4969559 - DNA, 25 bp, Homo sapien
tagaagtcatgtccagtccgcagtc

SEQ ID NO: 4969560 - DNA, 25 bp, Homo sapien
ggcagtttgccagtcctctaccaag

SEQ ID NO: 4969561 - DNA, 25 bp, Homo sapien
gccaggcacacaaataggttttact

SEQ ID NO: 4969562 - DNA, 25 bp, Homo sapien
ctgaagaaccccacataaagatggt

SEQ ID NO: 4969563 - DNA, 25 bp, Homo sapien
tgcagacaggtgacatattcaacaa

SEQ ID NO: 4969564 - DNA, 25 bp, Homo sapien
taacttagccttatgtcacacgcag

SEQ ID NO: 4969565 - DNA, 25 bp, Homo sapien
tatcacagaccattactgagaaagg

SEQ ID NO: 4969566 - DNA, 25 bp, Homo sapien
gggcacaagacaccaggcctagcta

SEQ ID NO: 4969567 - DNA, 25 bp, Homo sapien
tgaaatgcctaagagtaaaatatcc

SEQ ID NO: 4969568 - DNA, 25 bp, Homo sapien
tagcagtcactgaactcctcaaacc

SEQ ID NO: 4969569 - DNA, 25 bp, Homo sapien
aagcgtcttccggtgcaatctccgc

SEQ ID NO: 4969570 - DNA, 25 bp, Homo sapien
cttttggtggttcaatagcagtcac

SEQ ID NO: 4969571 - DNA, 25 bp, Homo sapien
agcatcgcgggacttgcagtctttc

SEQ ID NO: 4969572 - DNA, 25 bp, Homo sapien
tgggatgtgtagtcccgacggctcc

SEQ ID NO: 4969573 - DNA, 25 bp, Homo sapien
gccgggctccgcaatttttctcagg

SEQ ID NO: 4969574 - DNA, 25 bp, Homo sapien
gcatcatgggaactgtggtcgcctt

SEQ ID NO: 4969575 - DNA, 25 bp, Homo sapien
tgtcagccagacaaagacagtcagt

SEQ ID NO: 4969576 - DNA, 25 bp, Homo sapien
gtgattgagacaagggaggtttttc

SEQ ID NO: 4969577 - DNA, 25 bp, Homo sapien
ctgatgtgattgagacaagggaggt

SEQ ID NO: 4969578 - DNA, 25 bp, Homo sapien
attgagacaagggaggtttttcagg

SEQ ID NO: 4969579 - DNA, 25 bp, Homo sapien
gatgtgattgagacaagggaggttt

SEQ ID NO: 4969580 - DNA, 25 bp, Homo sapien
cggtcctggaaaggcgtcgactgcc

SEQ ID NO: 4969581 - DNA, 25 bp, Homo sapien
cttccgagtgggtgacccagacgcg

SEQ ID NO: 4969582 - DNA, 25 bp, Homo sapien
tacgatgagcggaaggtttgaatcc

SEQ ID NO: 4969583 - DNA, 25 bp, Homo sapien
ggatgggtctcgtaagcggccggat

SEQ ID NO: 4969584 - DNA, 25 bp, Homo sapien
tgctctgctcgtcttggagcggtgt

SEQ ID NO: 4969585 - DNA, 25 bp, Homo sapien
tgatttgcaggtgtgttggtttgtt

SEQ ID NO: 4969586 - DNA, 25 bp, Homo sapien
tgtgacgtgtacttgtgtgctctgc

SEQ ID NO: 4969587 - DNA, 25 bp, Homo sapien
ggtgtgtaagtgtgtttaaactgtg

SEQ ID NO: 4969588 - DNA, 25 bp, Homo sapien
ctgtagatgggaagttagacagcgc

SEQ ID NO: 4969589 - DNA, 25 bp, Homo sapien
ggccgggctcaacaactcgcttgtg

SEQ ID NO: 4969590 - DNA, 25 bp, Homo sapien
tgggctggcgacgtggtgcgaggcg

SEQ ID NO: 4969591 - DNA, 25 bp, Homo sapien
ttagacagcgcgagtcctcgctcgc

SEQ ID NO: 4969592 - DNA, 25 bp, Homo sapien
gccccctcccctggacgaatctcca

SEQ ID NO: 4969593 - DNA, 25 bp, Homo sapien
ccaccccaaactccagccacgagaa

SEQ ID NO: 4969594 - DNA, 25 bp, Homo sapien
ctggacgaatctccaccccaaactc

SEQ ID NO: 4969595 - DNA, 25 bp, Homo sapien
tctgccactcgcctccgccccctcc

SEQ ID NO: 4969596 - DNA, 25 bp, Homo sapien
tagaggtatcttgtcttcgtgtgaa

SEQ ID NO: 4969597 - DNA, 25 bp, Homo sapien
agtgctggattgtgtacgcgtctgt

SEQ ID NO: 4969598 - DNA, 25 bp, Homo sapien
cttcaccccgaaacagtaggtagag

SEQ ID NO: 4969599 - DNA, 25 bp, Homo sapien
cttgtcttcgtgtgaattagatgaa

SEQ ID NO: 4969600 - DNA, 25 bp, Homo sapien
aatgggagaaacgttaggaatctga

SEQ ID NO: 4969601 - DNA, 25 bp, Homo sapien
gataaatggtttcttgtctcagcat

SEQ ID NO: 4969602 - DNA, 25 bp, Homo sapien
tctgagaagctagtctctcaagctc

SEQ ID NO: 4969603 - DNA, 25 bp, Homo sapien
tctcaagctctcgttctggtgataa

SEQ ID NO: 4969604 - DNA, 25 bp, Homo sapien
ttccagttctgtttgtattgccctg

SEQ ID NO: 4969605 - DNA, 25 bp, Homo sapien
tccagttctgtttgtattgccctgg

SEQ ID NO: 4969606 - DNA, 25 bp, Homo sapien
gaagagttgtctttcacaccagaca

SEQ ID NO: 4969607 - DNA, 25 bp, Homo sapien
caatctacaggtgcctcgcctgcta

SEQ ID NO: 4969608 - DNA, 25 bp, Homo sapien
gacacagctcctgcaaacaatctac

SEQ ID NO: 4969609 - DNA, 25 bp, Homo sapien
ttgtctttcacaccagacacagctc

SEQ ID NO: 4969610 - DNA, 25 bp, Homo sapien
ggtggttccctactgctttgagtgg

SEQ ID NO: 4969611 - DNA, 25 bp, Homo sapien
cagctttagcacactatagcacaga

SEQ ID NO: 4969612 - DNA, 25 bp, Homo sapien
gcaacttgggtggttccctactgct

SEQ ID NO: 4969613 - DNA, 25 bp, Homo sapien
tagtgggggcacctgatcagcttta

SEQ ID NO: 4969614 - DNA, 25 bp, Homo sapien
ttaggcagacatgggaggatagctt

SEQ ID NO: 4969615 - DNA, 25 bp, Homo sapien
tagccaaacttagtgatgcatgcct

SEQ ID NO: 4969616 - DNA, 25 bp, Homo sapien
ttccatacagatattagagttagct

SEQ ID NO: 4969617 - DNA, 25 bp, Homo sapien
tactattctcattcattggcctttc

SEQ ID NO: 4969618 - DNA, 25 bp, Homo sapien
gaatacttctgccagaaaaaactga

SEQ ID NO: 4969619 - DNA, 25 bp, Homo sapien
agagaatacttctgccagaaaaaac

SEQ ID NO: 4969620 - DNA, 25 bp, Homo sapien
gatagactagatgtattaaatatct

SEQ ID NO: 4969621 - DNA, 25 bp, Homo sapien
agtgtgactttattagagataaaca

SEQ ID NO: 4969622 - DNA, 25 bp, Homo sapien
cacacttggcctgtaaaagaaggtt

SEQ ID NO: 4969623 - DNA, 25 bp, Homo sapien
gaaggttttagtactatgaactcaa

SEQ ID NO: 4969624 - DNA, 25 bp, Homo sapien
agtggcgcagtcattgttaacctca

SEQ ID NO: 4969625 - DNA, 25 bp, Homo sapien
taaaattgttggatgattaccagag

SEQ ID NO: 4969626 - DNA, 25 bp, Homo sapien
ctgtgaggtactggaagaggaatta

SEQ ID NO: 4969627 - DNA, 25 bp, Homo sapien
ttggattactattcccattggatca

SEQ ID NO: 4969628 - DNA, 25 bp, Homo sapien
gaggaattaataacttgagctaaag

SEQ ID NO: 4969629 - DNA, 25 bp, Homo sapien
gctaaagtctccaaacgttggatta

SEQ ID NO: 4969630 - DNA, 25 bp, Homo sapien
ctgcaggcttaacagagtttggcct

SEQ ID NO: 4969631 - DNA, 25 bp, Homo sapien
ttaacagagtttggcctgcaaggca

SEQ ID NO: 4969632 - DNA, 25 bp, Homo sapien
gattctcagtctggtattttttagc

SEQ ID NO: 4969633 - DNA, 25 bp, Homo sapien
tagagatgttgatctggattctcag

SEQ ID NO: 4969634 - DNA, 25 bp, Homo sapien
acatgctacatgtaaacgtgctgca

SEQ ID NO: 4969635 - DNA, 25 bp, Homo sapien
gaagttgtcaaaggatcccctctag

SEQ ID NO: 4969636 - DNA, 25 bp, Homo sapien
cagtgtggatgtgatcttaataccc

SEQ ID NO: 4969637 - DNA, 25 bp, Homo sapien
aaactagccttgaacgtgttgccca

SEQ ID NO: 4969638 - DNA, 25 bp, Homo sapien
tctctgtcacgtggatctctccata

SEQ ID NO: 4969639 - DNA, 25 bp, Homo sapien
aggcttaaatgagattagaagaccc

SEQ ID NO: 4969640 - DNA, 25 bp, Homo sapien
gaatgtctcagttctctgtcacgtg

SEQ ID NO: 4969641 - DNA, 25 bp, Homo sapien
tcaggagcagcttagataggttgtt

SEQ ID NO: 4969642 - DNA, 25 bp, Homo sapien
tgcgttctgtaatgctgcagcctca

SEQ ID NO: 4969643 - DNA, 25 bp, Homo sapien
gaagttatgggactatctcaatcta

SEQ ID NO: 4969644 - DNA, 25 bp, Homo sapien
tctaattctaatgacctgggtaatg

SEQ ID NO: 4969645 - DNA, 25 bp, Homo sapien
gagcctgccctcatgtgtaaattta

SEQ ID NO: 4969646 - DNA, 25 bp, Homo sapien
ccgaagtggtcaggtcacttgaggc

SEQ ID NO: 4969647 - DNA, 25 bp, Homo sapien
ggccgaagtggtcaggtcacttgag

SEQ ID NO: 4969648 - DNA, 25 bp, Homo sapien
gaggccgaagtggtcaggtcacttg

SEQ ID NO: 4969649 - DNA, 25 bp, Homo sapien
gggaggccgaagtggtcaggtcact

SEQ ID NO: 4969650 - DNA, 25 bp, Homo sapien
ggtccacttggaaactcactcatgt

SEQ ID NO: 4969651 - DNA, 25 bp, Homo sapien
acacggcagctagttttcccttgag

SEQ ID NO: 4969652 - DNA, 25 bp, Homo sapien
gactatacggaggtgtgcagaccag

SEQ ID NO: 4969653 - DNA, 25 bp, Homo sapien
tgttggtcgcacagcctaatcatgg

SEQ ID NO: 4969654 - DNA, 25 bp, Homo sapien
tatgccaatagttgcaaaagcacag

SEQ ID NO: 4969655 - DNA, 25 bp, Homo sapien
ctgtaaaaccagcaaagtaagcctt

SEQ ID NO: 4969656 - DNA, 25 bp, Homo sapien
ccttgactgcatgggtaaataaata

SEQ ID NO: 4969657 - DNA, 25 bp, Homo sapien
tagtacagaaggtcacacagtatga

SEQ ID NO: 4969658 - DNA, 25 bp, Homo sapien
gcattgagcgtggtatgggcataga

SEQ ID NO: 4969659 - DNA, 25 bp, Homo sapien
ggcgcattgagcgtggtatgggcat

SEQ ID NO: 4969660 - DNA, 25 bp, Homo sapien
cgcattgagcgtggtatgggcatag

SEQ ID NO: 4969661 - DNA, 25 bp, Homo sapien
tcgggcgcattgagcgtggtatggg

SEQ ID NO: 4969662 - DNA, 25 bp, Homo sapien
gaaatggcagcagtcaaccacacta

SEQ ID NO: 4969663 - DNA, 25 bp, Homo sapien
tagtttagacgtagcaccttagcag

SEQ ID NO: 4969664 - DNA, 25 bp, Homo sapien
agtacgagccatagtgaccaccaag

SEQ ID NO: 4969665 - DNA, 25 bp, Homo sapien
tatcttggcattggcccgacaagga

SEQ ID NO: 4969666 - DNA, 25 bp, Homo sapien
actgtatgcttcttggttgttccgc

SEQ ID NO: 4969667 - DNA, 25 bp, Homo sapien
tgtatgcttcttggttgttccgccc

SEQ ID NO: 4969668 - DNA, 25 bp, Homo sapien
tatgcttcttggttgttccgcccct

SEQ ID NO: 4969669 - DNA, 25 bp, Homo sapien
cacactgtatgcttcttggttgttc

SEQ ID NO: 4969670 - DNA, 25 bp, Homo sapien
cacaagggcagtcttcccaccccac

SEQ ID NO: 4969671 - DNA, 25 bp, Homo sapien
tcacaagggcagtcttcccacccca

SEQ ID NO: 4969672 - DNA, 25 bp, Homo sapien
cccatattcacattcccatggccca

SEQ ID NO: 4969673 - DNA, 25 bp, Homo sapien
tcacattcccatggcccatcacagg

SEQ ID NO: 4969674 - DNA, 25 bp, Homo sapien
cattcccatggcccatcacaggaag

SEQ ID NO: 4969675 - DNA, 25 bp, Homo sapien
ccatggcccatcacaggaagaagga

SEQ ID NO: 4969676 - DNA, 25 bp, Homo sapien
caaactgagctgtgtgccctgaaag

SEQ ID NO: 4969677 - DNA, 25 bp, Homo sapien
ccatgttgaatttggcaaactgagc

SEQ ID NO: 4969678 - DNA, 25 bp, Homo sapien
gcaagggtgtttactcaggatttgg

SEQ ID NO: 4969679 - DNA, 25 bp, Homo sapien
tgtgcttattaaatagcaagggtgt

SEQ ID NO: 4969680 - DNA, 25 bp, Homo sapien
ttcacctaggaatacctgagttatc

SEQ ID NO: 4969681 - DNA, 25 bp, Homo sapien
agttatccagtccagtgttccctga

SEQ ID NO: 4969682 - DNA, 25 bp, Homo sapien
gttccctgatgagagtggaagattt

SEQ ID NO: 4969683 - DNA, 25 bp, Homo sapien
cctaggaatacctgagttatccagt

SEQ ID NO: 4969684 - DNA, 25 bp, Homo sapien
ttttcctgtactgtgctctacttcc

SEQ ID NO: 4969685 - DNA, 25 bp, Homo sapien
cttttcctgtactgtgctctacttc

SEQ ID NO: 4969686 - DNA, 25 bp, Homo sapien
ttggtttcaaagatgaccgccactt

SEQ ID NO: 4969687 - DNA, 25 bp, Homo sapien
tgtcttgtgatcttgcagggccagt

SEQ ID NO: 4969688 - DNA, 25 bp, Homo sapien
taggaaaggcttctcggatacaagc

SEQ ID NO: 4969689 - DNA, 25 bp, Homo sapien
ccagagaactatcatactaaggtga

SEQ ID NO: 4969690 - DNA, 25 bp, Homo sapien
tcagccagccccgtaactgcaccca

SEQ ID NO: 4969691 - DNA, 25 bp, Homo sapien
tcggctgccctccagttggtcggtg

SEQ ID NO: 4969692 - DNA, 25 bp, Homo sapien
ggacagctgtgtccgtgcctgctcg

SEQ ID NO: 4969693 - DNA, 25 bp, Homo sapien
ccccgtaactgcacccagaggggtg

SEQ ID NO: 4969694 - DNA, 25 bp, Homo sapien
ccccgactcgcacttgagaagtctt

SEQ ID NO: 4969695 - DNA, 25 bp, Homo sapien
aagtcttgggatgccggctccctcg

SEQ ID NO: 4969696 - DNA, 25 bp, Homo sapien
ctccctcgactccattttcatttta

SEQ ID NO: 4969697 - DNA, 25 bp, Homo sapien
cacttgagaagtcttgggatgccgg

SEQ ID NO: 4969698 - DNA, 25 bp, Homo sapien
taactctcaaattcacattggtgtg

SEQ ID NO: 4969699 - DNA, 25 bp, Homo sapien
taattaactctcaaattcacattgg

SEQ ID NO: 4969700 - DNA, 25 bp, Homo sapien
attaactctcaaattcacattggtg

SEQ ID NO: 4969701 - DNA, 25 bp, Homo sapien
ctgtatagccataattaactctcaa

SEQ ID NO: 4969702 - DNA, 25 bp, Homo sapien
taatgctcccaagaacatttggaac

SEQ ID NO: 4969703 - DNA, 25 bp, Homo sapien
ctgttttagcaggatgtagattggc

SEQ ID NO: 4969704 - DNA, 25 bp, Homo sapien
tgaatgactgagtgtcctcctgaca

SEQ ID NO: 4969705 - DNA, 25 bp, Homo sapien
tgtgattggaaatggcagcgctccc

SEQ ID NO: 4969706 - DNA, 25 bp, Homo sapien
aggaccccagaagaagcccctctga

SEQ ID NO: 4969707 - DNA, 25 bp, Homo sapien
tcaggaccccagaagaagcccctct

SEQ ID NO: 4969708 - DNA, 25 bp, Homo sapien
caggaccccagaagaagcccctctg

SEQ ID NO: 4969709 - DNA, 25 bp, Homo sapien
ggaccccagaagaagcccctctgac

SEQ ID NO: 4969710 - DNA, 25 bp, Homo sapien
agctccgggcccttgcttgcctaac

SEQ ID NO: 4969711 - DNA, 25 bp, Homo sapien
tgcctaactcgaggatgttgctgct

SEQ ID NO: 4969712 - DNA, 25 bp, Homo sapien
gttgcttgatatttccattgccgtc

SEQ ID NO: 4969713 - DNA, 25 bp, Homo sapien
tttcccttggttgcttgatatttcc

SEQ ID NO: 4969714 - DNA, 25 bp, Homo sapien
gtgagcatctccccggcactcaagt

SEQ ID NO: 4969715 - DNA, 25 bp, Homo sapien
gccgttgccgttgccctgagtcttc

SEQ ID NO: 4969716 - DNA, 25 bp, Homo sapien
cccggcactcaagtccatgttctct

SEQ ID NO: 4969717 - DNA, 25 bp, Homo sapien
agctgccccactcccgccgttgccg

SEQ ID NO: 4969718 - DNA, 25 bp, Homo sapien
ctgttgcacgggacatcatgtgggc

SEQ ID NO: 4969719 - DNA, 25 bp, Homo sapien
catcatgtgggcttgatgccgtaca

SEQ ID NO: 4969720 - DNA, 25 bp, Homo sapien
tgtgggcttgatgccgtacacagtc

SEQ ID NO: 4969721 - DNA, 25 bp, Homo sapien
gatgccgtacacagtccctgaccat

SEQ ID NO: 4969722 - DNA, 25 bp, Homo sapien
tgacctcaaagagtagagcattcct

SEQ ID NO: 4969723 - DNA, 25 bp, Homo sapien
tcatgagaatgctgaagtaggctgc

SEQ ID NO: 4969724 - DNA, 25 bp, Homo sapien
tgcacaccggcattcaagatccatg

SEQ ID NO: 4969725 - DNA, 25 bp, Homo sapien
cgtataggctctgaaagcaacctca

SEQ ID NO: 4969726 - DNA, 25 bp, Homo sapien
tcttgtagcgctaccctggccgttc

SEQ ID NO: 4969727 - DNA, 25 bp, Homo sapien
tgcagttagccaaggcagagaccag

SEQ ID NO: 4969728 - DNA, 25 bp, Homo sapien
tcttcaaagaacagaccacatagga

SEQ ID NO: 4969729 - DNA, 25 bp, Homo sapien
gctttctcacgcagcagtgccaggt

SEQ ID NO: 4969730 - DNA, 25 bp, Homo sapien
tggactggtcctcgtgagagtctcc

SEQ ID NO: 4969731 - DNA, 25 bp, Homo sapien
gggttggctctctcatggtctttct

SEQ ID NO: 4969732 - DNA, 25 bp, Homo sapien
ttctgatctgctctgccccgtcgtg

SEQ ID NO: 4969733 - DNA, 25 bp, Homo sapien
taagtggtcctctaggggttggctc

SEQ ID NO: 4969734 - DNA, 25 bp, Homo sapien
tctttcgaagcactgggagcttggg

SEQ ID NO: 4969735 - DNA, 25 bp, Homo sapien
gggagtggagcttttctttcgaagc

SEQ ID NO: 4969736 - DNA, 25 bp, Homo sapien
tgcccctcagttttgccggagcact

SEQ ID NO: 4969737 - DNA, 25 bp, Homo sapien
cttgggcagggcgtcccgactgccc

SEQ ID NO: 4969738 - DNA, 25 bp, Homo sapien
cttctcagaacccactttgccggtg

SEQ ID NO: 4969739 - DNA, 25 bp, Homo sapien
agcttctcagaacccactttgccgg

SEQ ID NO: 4969740 - DNA, 25 bp, Homo sapien
ctggagcttctcagaacccactttg

SEQ ID NO: 4969741 - DNA, 25 bp, Homo sapien
gagcttctcagaacccactttgccg

SEQ ID NO: 4969742 - DNA, 25 bp, Homo sapien
gtatctcctattctggattagtgcc

SEQ ID NO: 4969743 - DNA, 25 bp, Homo sapien
tctcctattctggattagtgccttt

SEQ ID NO: 4969744 - DNA, 25 bp, Homo sapien
ttgtatctcctattctggattagtg

SEQ ID NO: 4969745 - DNA, 25 bp, Homo sapien
gagtcctgtatcattgtatctccta

SEQ ID NO: 4969746 - DNA, 25 bp, Homo sapien
tattcggcagcgcttgtctccaagc

SEQ ID NO: 4969747 - DNA, 25 bp, Homo sapien
tctgcgtccttgtgggaatgtgcac

SEQ ID NO: 4969748 - DNA, 25 bp, Homo sapien
tccaagggccaactgattcgctggc

SEQ ID NO: 4969749 - DNA, 25 bp, Homo sapien
gagccctccacttgcaagtgtattt

SEQ ID NO: 4969750 - DNA, 25 bp, Homo sapien
ttccatggttcctggcttcagtaag

SEQ ID NO: 4969751 - DNA, 25 bp, Homo sapien
aaagtttccatggttcctggcttca

SEQ ID NO: 4969752 - DNA, 25 bp, Homo sapien
cgaagggccccagaaagtttccatg

SEQ ID NO: 4969753 - DNA, 25 bp, Homo sapien
gtttccatggttcctggcttcagta

SEQ ID NO: 4969754 - DNA, 25 bp, Homo sapien
tttgatggaaagacacatacggtac

SEQ ID NO: 4969755 - DNA, 25 bp, Homo sapien
accattagtgtctgcagcccaccag

SEQ ID NO: 4969756 - DNA, 25 bp, Homo sapien
tacacgaatccacacatagagaagc

SEQ ID NO: 4969757 - DNA, 25 bp, Homo sapien
catacggtacaaaattacaggtggt

SEQ ID NO: 4969758 - DNA, 25 bp, Homo sapien
aatgggtcagtatcttgggcaggaa

SEQ ID NO: 4969759 - DNA, 25 bp, Homo sapien
tcagtccttcataagggcccgaggg

SEQ ID NO: 4969760 - DNA, 25 bp, Homo sapien
gacagcgccgcgtgtgcagttactg

SEQ ID NO: 4969761 - DNA, 25 bp, Homo sapien
caggacttcccgtttcacatacagg

SEQ ID NO: 4969762 - DNA, 25 bp, Homo sapien
tccaggagcgcatcgggagtcctaa

SEQ ID NO: 4969763 - DNA, 25 bp, Homo sapien
tactccactgtaagtcaaaccgatg

SEQ ID NO: 4969764 - DNA, 25 bp, Homo sapien
caaaccgatggtaaaaagcacgaca

SEQ ID NO: 4969765 - DNA, 25 bp, Homo sapien
caagctgacattagtccgcaccgag

SEQ ID NO: 4969766 - DNA, 25 bp, Homo sapien
tgtgtgaatcttgacccaggactcc

SEQ ID NO: 4969767 - DNA, 25 bp, Homo sapien
gagaaaccgctaagaaaccctggca

SEQ ID NO: 4969768 - DNA, 25 bp, Homo sapien
ggagactactctgttggcgccttca

SEQ ID NO: 4969769 - DNA, 25 bp, Homo sapien
gaaaagttcgccctaaggcagcggc

SEQ ID NO: 4969770 - DNA, 25 bp, Homo sapien
gcagcccgtagccagggttacacct

SEQ ID NO: 4969771 - DNA, 25 bp, Homo sapien
cggttctcagggttcttgtggctcc

SEQ ID NO: 4969772 - DNA, 25 bp, Homo sapien
tgaagtactgcttcccgccgatgga

SEQ ID NO: 4969773 - DNA, 25 bp, Homo sapien
gctggcccaggatttccggttctca

SEQ ID NO: 4969774 - DNA, 25 bp, Homo sapien
tcaccacgcccgttttgtgggcgcc

SEQ ID NO: 4969775 - DNA, 25 bp, Homo sapien
cggtgacgaactcgccctctcggag

SEQ ID NO: 4969776 - DNA, 25 bp, Homo sapien
ctgagggcaggtcgagctccacgcc

SEQ ID NO: 4969777 - DNA, 25 bp, Homo sapien
cacgtgccctcttggaagtcggcag

SEQ ID NO: 4969778 - DNA, 25 bp, Homo sapien
aaggagcgcaactccgaggcccgca

SEQ ID NO: 4969779 - DNA, 25 bp, Homo sapien
catgcgcgagaaggagcgcaactcc

SEQ ID NO: 4969780 - DNA, 25 bp, Homo sapien
cgagaaggagcgcaactccgaggcc

SEQ ID NO: 4969781 - DNA, 25 bp, Homo sapien
cccagccagcatgcgcgagaaggag

SEQ ID NO: 4969782 - DNA, 25 bp, Homo sapien
cggtggggggtggctgatgggcgcc

SEQ ID NO: 4969783 - DNA, 25 bp, Homo sapien
ccgtgggcggtggggggtggctgat

SEQ ID NO: 4969784 - DNA, 25 bp, Homo sapien
tggggggtggctgatgggcgcctcg

SEQ ID NO: 4969785 - DNA, 25 bp, Homo sapien
gggggtggctgatgggcgcctcggg

SEQ ID NO: 4969786 - DNA, 25 bp, Homo sapien
tttgtcgcagatcttcaaggccggg

SEQ ID NO: 4969787 - DNA, 25 bp, Homo sapien
aaggcactttggcaggtttgtcgca

SEQ ID NO: 4969788 - DNA, 25 bp, Homo sapien
gacgctgtgggagaagtacccgcta

SEQ ID NO: 4969789 - DNA, 25 bp, Homo sapien
gtacccgctagaggcttcactcagg

SEQ ID NO: 4969790 - DNA, 25 bp, Homo sapien
cagcacgtcagggcccatctccggc

SEQ ID NO: 4969791 - DNA, 25 bp, Homo sapien
cgtcagggcccatctccggctgagc

SEQ ID NO: 4969792 - DNA, 25 bp, Homo sapien
agcacgtcagggcccatctccggct

SEQ ID NO: 4969793 - DNA, 25 bp, Homo sapien
cacgtcagggcccatctccggctga

SEQ ID NO: 4969794 - DNA, 25 bp, Homo sapien
gcagcttgataaatcatgcgttttc

SEQ ID NO: 4969795 - DNA, 25 bp, Homo sapien
ccaggaactgtcctttatattcccg

SEQ ID NO: 4969796 - DNA, 25 bp, Homo sapien
ctgtcctttatattcccgtttccag

SEQ ID NO: 4969797 - DNA, 25 bp, Homo sapien
aaatcatgcgttttcccaggaactg

SEQ ID NO: 4969798 - DNA, 25 bp, Homo sapien
agcttggaaaaccaccatgatgagc

SEQ ID NO: 4969799 - DNA, 25 bp, Homo sapien
catgatgagctacagaagctgctgc

SEQ ID NO: 4969800 - DNA, 25 bp, Homo sapien
tggagacttctgcaaaagcccaagc

SEQ ID NO: 4969801 - DNA, 25 bp, Homo sapien
ggcaaggggcttgctctgaccatcc

SEQ ID NO: 4969802 - DNA, 25 bp, Homo sapien
gccacagcaaattcgtgaatgccca

SEQ ID NO: 4969803 - DNA, 25 bp, Homo sapien
gcaaattcgtgaatgcccagtgtgc

SEQ ID NO: 4969804 - DNA, 25 bp, Homo sapien
cccggccacagcaaattcgtgaatg

SEQ ID NO: 4969805 - DNA, 25 bp, Homo sapien
cgatcccggccacagcaaattcgtg

SEQ ID NO: 4969806 - DNA, 25 bp, Homo sapien
aacagtttcggcatcagggccacct

SEQ ID NO: 4969807 - DNA, 25 bp, Homo sapien
aggaatgctaacatcaaaaactgtg

SEQ ID NO: 4969808 - DNA, 25 bp, Homo sapien
tgtggactcaacagtttcggcatca

SEQ ID NO: 4969809 - DNA, 25 bp, Homo sapien
cagggccacctgctcgctgtaggtg

SEQ ID NO: 4969810 - DNA, 25 bp, Homo sapien
tgactgcaccatgatgcggggcacg

SEQ ID NO: 4969811 - DNA, 25 bp, Homo sapien
gctgactgcaccatgatgcggggca

SEQ ID NO: 4969812 - DNA, 25 bp, Homo sapien
ctggctgactgcaccatgatgcggg

SEQ ID NO: 4969813 - DNA, 25 bp, Homo sapien
ggctggctgactgcaccatgatgcg

SEQ ID NO: 4969814 - DNA, 25 bp, Homo sapien
tcaggggtcgagaggacagaacagg

SEQ ID NO: 4969815 - DNA, 25 bp, Homo sapien
agcagaaaggtttccgctgcacagg

SEQ ID NO: 4969816 - DNA, 25 bp, Homo sapien
caggggtagcagaaaggtttccgct

SEQ ID NO: 4969817 - DNA, 25 bp, Homo sapien
tgaggaggcaagtgtgcaggtcagg

SEQ ID NO: 4969818 - DNA, 25 bp, Homo sapien
tgcccgaggggaatcggcccatcag

SEQ ID NO: 4969819 - DNA, 25 bp, Homo sapien
ccagggaaacaggccacatgccaag

SEQ ID NO: 4969820 - DNA, 25 bp, Homo sapien
aatcggcccatcaggtgtgcgagtg

SEQ ID NO: 4969821 - DNA, 25 bp, Homo sapien
cgagtgtgaggggctccacaccctc

SEQ ID NO: 4969822 - DNA, 25 bp, Homo sapien
agagatgtggactccacgtctccca

SEQ ID NO: 4969823 - DNA, 25 bp, Homo sapien
gcccagagatgtggactccacgtct

SEQ ID NO: 4969824 - DNA, 25 bp, Homo sapien
actgaactttaactgcccagagatg

SEQ ID NO: 4969825 - DNA, 25 bp, Homo sapien
gtggctgctcggttactgaacttta

SEQ ID NO: 4969826 - DNA, 25 bp, Homo sapien
tggagtcaggccttctagacagagc

SEQ ID NO: 4969827 - DNA, 25 bp, Homo sapien
gcctcgatggagtcaggccttctag

SEQ ID NO: 4969828 - DNA, 25 bp, Homo sapien
ctggtgctttggctcttgtgcgtct

SEQ ID NO: 4969829 - DNA, 25 bp, Homo sapien
tcttgtgcgtctgggcacttgaggc

SEQ ID NO: 4969830 - DNA, 25 bp, Homo sapien
gactccagctgtagggagaagagtc

SEQ ID NO: 4969831 - DNA, 25 bp, Homo sapien
tagggagaagagtcccgaagaagcc

SEQ ID NO: 4969832 - DNA, 25 bp, Homo sapien
tccagctgtagggagaagagtcccg

SEQ ID NO: 4969833 - DNA, 25 bp, Homo sapien
ctgtagggagaagagtcccgaagaa

SEQ ID NO: 4969834 - DNA, 25 bp, Homo sapien
gacagctaggaccagggtgcattaa

SEQ ID NO: 4969835 - DNA, 25 bp, Homo sapien
tcccctggtggcagttaggccattg

SEQ ID NO: 4969836 - DNA, 25 bp, Homo sapien
tactttacactgcaaccactaggga

SEQ ID NO: 4969837 - DNA, 25 bp, Homo sapien
tgagcagccaatgggacagaatgag

SEQ ID NO: 4969838 - DNA, 25 bp, Homo sapien
gcatgccagggctcgtatcttcatt

SEQ ID NO: 4969839 - DNA, 25 bp, Homo sapien
tttctgcctatagtatttaacgtcc

SEQ ID NO: 4969840 - DNA, 25 bp, Homo sapien
atagtatttaacgtccccacaaatg

SEQ ID NO: 4969841 - DNA, 25 bp, Homo sapien
gaaagtgaggctcaagcacgcgtcc

SEQ ID NO: 4969842 - DNA, 25 bp, Homo sapien
ggcaacctgattggtggggaacaca

SEQ ID NO: 4969843 - DNA, 25 bp, Homo sapien
caacctgattggtggggaacacata

SEQ ID NO: 4969844 - DNA, 25 bp, Homo sapien
ggaaggtgacagtggagtggaagct

SEQ ID NO: 4969845 - DNA, 25 bp, Homo sapien
tttgctctcaacagatgggcaacct

SEQ ID NO: 4969846 - DNA, 25 bp, Homo sapien
actggatgcctcacgcagagccgta

SEQ ID NO: 4969847 - DNA, 25 bp, Homo sapien
tattgaaattggtgcactaacaggc

SEQ ID NO: 4969848 - DNA, 25 bp, Homo sapien
tgctgctaagtccagcactggatgc

SEQ ID NO: 4969849 - DNA, 25 bp, Homo sapien
cagagaggaaagttccgggtacttg

SEQ ID NO: 4969850 - DNA, 25 bp, Homo sapien
agtcccaggagtggatcgcggaccg

SEQ ID NO: 4969851 - DNA, 25 bp, Homo sapien
caggcgaaggaagttgcactgaagc

SEQ ID NO: 4969852 - DNA, 25 bp, Homo sapien
gtggatcgcggaccgagggaaggga

SEQ ID NO: 4969853 - DNA, 25 bp, Homo sapien
ttccagcattatgttgacgccaagt

SEQ ID NO: 4969854 - DNA, 25 bp, Homo sapien
aagagagacttgaggagctttggca

SEQ ID NO: 4969855 - DNA, 25 bp, Homo sapien
catcgcggacgggaaagagagactt

SEQ ID NO: 4969856 - DNA, 25 bp, Homo sapien
cttctcatcgcggacgggaaagaga

SEQ ID NO: 4969857 - DNA, 25 bp, Homo sapien
ttgcccctcttctcatcgcggacgg

SEQ ID NO: 4969858 - DNA, 25 bp, Homo sapien
gatttgacaggattcaagtaggatg

SEQ ID NO: 4969859 - DNA, 25 bp, Homo sapien
gcacgaaggatttgacaggattcaa

SEQ ID NO: 4969860 - DNA, 25 bp, Homo sapien
cggcacgaaggatttgacaggattc

SEQ ID NO: 4969861 - DNA, 25 bp, Homo sapien
ttgcggcacgaaggatttgacagga

SEQ ID NO: 4969862 - DNA, 25 bp, Homo sapien
tgtcgcctagacctgagtacagtga

SEQ ID NO: 4969863 - DNA, 25 bp, Homo sapien
tgatgcaattgtgcctcactgcagc

SEQ ID NO: 4969864 - DNA, 25 bp, Homo sapien
cactctgtcgcctagacctgagtac

SEQ ID NO: 4969865 - DNA, 25 bp, Homo sapien
gtacagtgatgcaattgtgcctcac

SEQ ID NO: 4969866 - DNA, 25 bp, Homo sapien
caaggtaagagtattcccagagaca

SEQ ID NO: 4969867 - DNA, 25 bp, Homo sapien
taatgccctctcaagaactgatgga

SEQ ID NO: 4969868 - DNA, 25 bp, Homo sapien
gataggccactctatcaggaagata

SEQ ID NO: 4969869 - DNA, 25 bp, Homo sapien
caaaagggacatttcatgataggcc

SEQ ID NO: 4969870 - DNA, 25 bp, Homo sapien
ggtttgggatacatcctgctgactt

SEQ ID NO: 4969871 - DNA, 25 bp, Homo sapien
ctggaaactgtggtttgggatacat

SEQ ID NO: 4969872 - DNA, 25 bp, Homo sapien
aaactgtggtttgggatacatcctg

SEQ ID NO: 4969873 - DNA, 25 bp, Homo sapien
tgtggtttgggatacatcctgctga

SEQ ID NO: 4969874 - DNA, 25 bp, Homo sapien
gcagcgacctaagtactaatcataa

SEQ ID NO: 4969875 - DNA, 25 bp, Homo sapien
tctttactaattgcctgatcagcga

SEQ ID NO: 4969876 - DNA, 25 bp, Homo sapien
gccaacgcgcctggcaagttttctt

SEQ ID NO: 4969877 - DNA, 25 bp, Homo sapien
gaggaagggcctcttaggtttcaga

SEQ ID NO: 4969878 - DNA, 25 bp, Homo sapien
actgaagtcactggtaggcagcacc

SEQ ID NO: 4969879 - DNA, 25 bp, Homo sapien
tgatacagttacacagagggaagct

SEQ ID NO: 4969880 - DNA, 25 bp, Homo sapien
tgtcctcaccggcagactcaaagag

SEQ ID NO: 4969881 - DNA, 25 bp, Homo sapien
gacaaagtaagaacgccggaggctc

SEQ ID NO: 4969882 - DNA, 25 bp, Homo sapien
ttccccacgtttgcattgataactg

SEQ ID NO: 4969883 - DNA, 25 bp, Homo sapien
accatttttccccacgtttgcattg

SEQ ID NO: 4969884 - DNA, 25 bp, Homo sapien
taactgcatacatttgtaccatata

SEQ ID NO: 4969885 - DNA, 25 bp, Homo sapien
ttcctaatgcaaaattacacaccac

SEQ ID NO: 4969886 - DNA, 25 bp, Homo sapien
tccttcagggggaggcttaagaatg

SEQ ID NO: 4969887 - DNA, 25 bp, Homo sapien
tgcctgtgtggacctcagtgtcatc

SEQ ID NO: 4969888 - DNA, 25 bp, Homo sapien
tcagtgtcatccttcagggggaggc

SEQ ID NO: 4969889 - DNA, 25 bp, Homo sapien
cctgcctgtgtggacctcagtgtca

SEQ ID NO: 4969890 - DNA, 25 bp, Homo sapien
tgcagggctccagtgaacggataag

SEQ ID NO: 4969891 - DNA, 25 bp, Homo sapien
atgcagggctccagtgaacggataa

SEQ ID NO: 4969892 - DNA, 25 bp, Homo sapien
catgcagggctccagtgaacggata

SEQ ID NO: 4969893 - DNA, 25 bp, Homo sapien
gacagaagtacgagctttagcagaa

SEQ ID NO: 4969894 - DNA, 25 bp, Homo sapien
tttttcaaccccagtagtcagagtc

SEQ ID NO: 4969895 - DNA, 25 bp, Homo sapien
ttcacataatacagatgagtagagg

SEQ ID NO: 4969896 - DNA, 25 bp, Homo sapien
tgaaagctgaatgggaaatgggact

SEQ ID NO: 4969897 - DNA, 25 bp, Homo sapien
cttgttgctgcctagactgtatgat

SEQ ID NO: 4969898 - DNA, 25 bp, Homo sapien
gttgctgcctagactgtatgatgga

SEQ ID NO: 4969899 - DNA, 25 bp, Homo sapien
ttgttgctgcctagactgtatgatg

SEQ ID NO: 4969900 - DNA, 25 bp, Homo sapien
tgttgctgcctagactgtatgatgg

SEQ ID NO: 4969901 - DNA, 25 bp, Homo sapien
gaacacctcagtctatgctaggcag

SEQ ID NO: 4969902 - DNA, 25 bp, Homo sapien
catacacgtggtctaggcaacgcca

SEQ ID NO: 4969903 - DNA, 25 bp, Homo sapien
aagagtaatcaagcggccaagagcc

SEQ ID NO: 4969904 - DNA, 25 bp, Homo sapien
taaatgagacgttatccgccttgag

SEQ ID NO: 4969905 - DNA, 25 bp, Homo sapien
catttggagaactgatactcctcct

SEQ ID NO: 4969906 - DNA, 25 bp, Homo sapien
cacatttggagaactgatactcctc

SEQ ID NO: 4969907 - DNA, 25 bp, Homo sapien
gatactcctcctgctcaactttcct

SEQ ID NO: 4969908 - DNA, 25 bp, Homo sapien
actgatactcctcctgctcaacttt

SEQ ID NO: 4969909 - DNA, 25 bp, Homo sapien
aagacatgtaagagacacactgcaa

SEQ ID NO: 4969910 - DNA, 25 bp, Homo sapien
cgccctatccatgcggttggctaac

SEQ ID NO: 4969911 - DNA, 25 bp, Homo sapien
taagacagaatgacccaattacaat

SEQ ID NO: 4969912 - DNA, 25 bp, Homo sapien
tgttaggtgcaacaacactgtgaat

SEQ ID NO: 4969913 - DNA, 25 bp, Homo sapien
ctggcgcagacgatctaaagtcagg

SEQ ID NO: 4969914 - DNA, 25 bp, Homo sapien
gtcaggaggttttctacagccagca

SEQ ID NO: 4969915 - DNA, 25 bp, Homo sapien
tcaatataagcctccgagtcagcag

SEQ ID NO: 4969916 - DNA, 25 bp, Homo sapien
gccagcacgctcctgaggtactttt

SEQ ID NO: 4969917 - DNA, 25 bp, Homo sapien
cctggagccgaccaaggagaggtta

SEQ ID NO: 4969918 - DNA, 25 bp, Homo sapien
caaatgggaggtgcacagtcagaaa

SEQ ID NO: 4969919 - DNA, 25 bp, Homo sapien
atagtggacatagggtttcagcgcc

SEQ ID NO: 4969920 - DNA, 25 bp, Homo sapien
gaaaggattttgtcgactagccaga

SEQ ID NO: 4969921 - DNA, 25 bp, Homo sapien
aatacatgtctaattcacgaatcac

SEQ ID NO: 4969922 - DNA, 25 bp, Homo sapien
tgggtgaatgaatacatgtctaatt

SEQ ID NO: 4969923 - DNA, 25 bp, Homo sapien
tgaatacatgtctaattcacgaatc

SEQ ID NO: 4969924 - DNA, 25 bp, Homo sapien
gaatgaatacatgtctaattcacga

SEQ ID NO: 4969925 - DNA, 25 bp, Homo sapien
catatgtatgtcatgggtaggtcac

SEQ ID NO: 4969926 - DNA, 25 bp, Homo sapien
aactggaatctctatgctacgctgc

SEQ ID NO: 4969927 - DNA, 25 bp, Homo sapien
ccatcaagcttgtaccagggataaa

SEQ ID NO: 4969928 - DNA, 25 bp, Homo sapien
tctagcacacgcacaacaattggta

SEQ ID NO: 4969929 - DNA, 25 bp, Homo sapien
agccaggaatagaacttcgatgaga

SEQ ID NO: 4969930 - DNA, 25 bp, Homo sapien
tcgatgagacatcttttttaggaga

SEQ ID NO: 4969931 - DNA, 25 bp, Homo sapien
gaacttcgatgagacatctttttta

SEQ ID NO: 4969932 - DNA, 25 bp, Homo sapien
ctctggaatattggagacaatttca

SEQ ID NO: 4969933 - DNA, 25 bp, Homo sapien
taactaagatggaagcaacgactgg

SEQ ID NO: 4969934 - DNA, 25 bp, Homo sapien
tttctgtcaaggaccctgtagggcc

SEQ ID NO: 4969935 - DNA, 25 bp, Homo sapien
taccatgaatattgacaagtccggg

SEQ ID NO: 4969936 - DNA, 25 bp, Homo sapien
gagctttcaccccatgcaacaggaa

SEQ ID NO: 4969937 - DNA, 25 bp, Homo sapien
atgcaccgcggagtcccaggaggct

SEQ ID NO: 4969938 - DNA, 25 bp, Homo sapien
cgcacgatcaggaacaaccgctcgt

SEQ ID NO: 4969939 - DNA, 25 bp, Homo sapien
tggcggccgtgaacattgacacaga

SEQ ID NO: 4969940 - DNA, 25 bp, Homo sapien
cacagattctcttgcgtaacaccag

SEQ ID NO: 4969941 - DNA, 25 bp, Homo sapien
gcttcacaatctgcaattcaaagaa

SEQ ID NO: 4969942 - DNA, 25 bp, Homo sapien
aatctgcaattcaaagaactcctct

SEQ ID NO: 4969943 - DNA, 25 bp, Homo sapien
cccagtcaaggtcgcatcccatcca

SEQ ID NO: 4969944 - DNA, 25 bp, Homo sapien
gtcatcaagattatcctgagagctg

SEQ ID NO: 4969945 - DNA, 25 bp, Homo sapien
gtccaggaatataacaggaatgtgt

SEQ ID NO: 4969946 - DNA, 25 bp, Homo sapien
taacaggaatgtgtgtctccatccc

SEQ ID NO: 4969947 - DNA, 25 bp, Homo sapien
catttaagtccaggaatataacagg

SEQ ID NO: 4969948 - DNA, 25 bp, Homo sapien
caggaatgtgtgtctccatcccagg

SEQ ID NO: 4969949 - DNA, 25 bp, Homo sapien
agttagggtcaaccgcatctccaga

SEQ ID NO: 4969950 - DNA, 25 bp, Homo sapien
tgcgcttcacggtcagcatcatcct

SEQ ID NO: 4969951 - DNA, 25 bp, Homo sapien
gcccctggaataccactgccagcag

SEQ ID NO: 4969952 - DNA, 25 bp, Homo sapien
gaggggaccatcaccgcgttcctct

SEQ ID NO: 4969953 - DNA, 25 bp, Homo sapien
agaggactcgagccctttggataag

SEQ ID NO: 4969954 - DNA, 25 bp, Homo sapien
aggcctacagagggaccgcacagga

SEQ ID NO: 4969955 - DNA, 25 bp, Homo sapien
ctcgagccctttggataagaaaagt

SEQ ID NO: 4969956 - DNA, 25 bp, Homo sapien
gagaggtcagatgggctcctgcaga

SEQ ID NO: 4969957 - DNA, 25 bp, Homo sapien
gaggaagacctccaccaagatacga

SEQ ID NO: 4969958 - DNA, 25 bp, Homo sapien
aaagagtaacactcatctgctcctg

SEQ ID NO: 4969959 - DNA, 25 bp, Homo sapien
ttcatctggttcttaactgatgtgg

SEQ ID NO: 4969960 - DNA, 25 bp, Homo sapien
caaaccatgtatgctttgtgcactg

SEQ ID NO: 4969961 - DNA, 25 bp, Homo sapien
ttttctacgaagtctctctaaatct

SEQ ID NO: 4969962 - DNA, 25 bp, Homo sapien
gacgttttgttaatgcatttagcca

SEQ ID NO: 4969963 - DNA, 25 bp, Homo sapien
gcaattgttgatccaagtactcctg

SEQ ID NO: 4969964 - DNA, 25 bp, Homo sapien
ttagccattttctacgaagtctctc

SEQ ID NO: 4969965 - DNA, 25 bp, Homo sapien
tgtcaagataatctatctgaaactg

SEQ ID NO: 4969966 - DNA, 25 bp, Homo sapien
actgatgctctatcttaccttgctc

SEQ ID NO: 4969967 - DNA, 25 bp, Homo sapien
gataatctatctgaaactgatgctc

SEQ ID NO: 4969968 - DNA, 25 bp, Homo sapien
tgaaactgatgctctatcttacctt

SEQ ID NO: 4969969 - DNA, 25 bp, Homo sapien
cactccactgcactatggtctgggt

SEQ ID NO: 4969970 - DNA, 25 bp, Homo sapien
tccactgcactatggtctgggtggt

SEQ ID NO: 4969971 - DNA, 25 bp, Homo sapien
tcacctttcatgccaactacttggg

SEQ ID NO: 4969972 - DNA, 25 bp, Homo sapien
gcactatggtctgggtggtagagca

SEQ ID NO: 4969973 - DNA, 25 bp, Homo sapien
gaacataacaggtatagaaacttac

SEQ ID NO: 4969974 - DNA, 25 bp, Homo sapien
gtctttcaagaagaacataacaggt

SEQ ID NO: 4969975 - DNA, 25 bp, Homo sapien
ggttccaaaaggcactctggtctga

SEQ ID NO: 4969976 - DNA, 25 bp, Homo sapien
ccaaaaggcactctggtctgatttt

SEQ ID NO: 4969977 - DNA, 25 bp, Homo sapien
catcagtggtaaagtcccagattcc

SEQ ID NO: 4969978 - DNA, 25 bp, Homo sapien
ttcgacttgaactctccgggactgc

SEQ ID NO: 4969979 - DNA, 25 bp, Homo sapien
gacagtatacattcttccatcagtg

SEQ ID NO: 4969980 - DNA, 25 bp, Homo sapien
ggctctgagcggtctaactttgaca

SEQ ID NO: 4969981 - DNA, 25 bp, Homo sapien
cagaaatcacttctacagggcagta

SEQ ID NO: 4969982 - DNA, 25 bp, Homo sapien
gaagattcctcctgttgggacatcc

SEQ ID NO: 4969983 - DNA, 25 bp, Homo sapien
tacagggcagtattcaccattctca

SEQ ID NO: 4969984 - DNA, 25 bp, Homo sapien
tcctgttgggacatcctttgcagaa

SEQ ID NO: 4969985 - DNA, 25 bp, Homo sapien
cgtgtctttgcttggatgattccca

SEQ ID NO: 4969986 - DNA, 25 bp, Homo sapien
tgctcgataaagtcttcggtgatgt

SEQ ID NO: 4969987 - DNA, 25 bp, Homo sapien
ctgtcccgaagactacgtgtctttg

SEQ ID NO: 4969988 - DNA, 25 bp, Homo sapien
gctccttcggaaagatgctcgataa

SEQ ID NO: 4969989 - DNA, 25 bp, Homo sapien
acttcaggagcgacaatcaccggct

SEQ ID NO: 4969990 - DNA, 25 bp, Homo sapien
agtgcggctccttgctgacggaaga

SEQ ID NO: 4969991 - DNA, 25 bp, Homo sapien
tgtggcaacccagtagcttgcagga

SEQ ID NO: 4969992 - DNA, 25 bp, Homo sapien
caccggctcctgttgatcccagaag

SEQ ID NO: 4969993 - DNA, 25 bp, Homo sapien
ctgccacctcatcgcctcctgcgat

SEQ ID NO: 4969994 - DNA, 25 bp, Homo sapien
acatcaccactgagtcgcatcacct

SEQ ID NO: 4969995 - DNA, 25 bp, Homo sapien
cctccacgtgcagccgacctgccac

SEQ ID NO: 4969996 - DNA, 25 bp, Homo sapien
tcaccactgagtcgcatcacctcca

SEQ ID NO: 4969997 - DNA, 25 bp, Homo sapien
agtgactcgaggaagacattggcca

SEQ ID NO: 4969998 - DNA, 25 bp, Homo sapien
tcatcatagaatggatcagcacgtt

SEQ ID NO: 4969999 - DNA, 25 bp, Homo sapien
ttggccaccccaatgagactgtgat

SEQ ID NO: 4970000 - DNA, 25 bp, Homo sapien
gatgatgggaacagcgtattgtaac

SEQ ID NO: 4970001 - DNA, 25 bp, Homo sapien
ggattgcaggctcactaagaagaga

SEQ ID NO: 4970002 - DNA, 25 bp, Homo sapien
tcatatccaacagcctgttgtccag

SEQ ID NO: 4970003 - DNA, 25 bp, Homo sapien
gataaaggtctctcatatccaacag

SEQ ID NO: 4970004 - DNA, 25 bp, Homo sapien
ccactcctgataaaggtctctcata

SEQ ID NO: 4970005 - DNA, 25 bp, Homo sapien
tgaacacctaacttgtggagaaggg

SEQ ID NO: 4970006 - DNA, 25 bp, Homo sapien
taacaccaggaaatatcaggcgatc

SEQ ID NO: 4970007 - DNA, 25 bp, Homo sapien
taatgagcagttttacagagcaagc

SEQ ID NO: 4970008 - DNA, 25 bp, Homo sapien
gagatgcagagtatattcccctagc

SEQ ID NO: 4970009 - DNA, 25 bp, Homo sapien
ggccttaacaatttgttccctcagc

SEQ ID NO: 4970010 - DNA, 25 bp, Homo sapien
tcagcaatgtaattagcttctctca

SEQ ID NO: 4970011 - DNA, 25 bp, Homo sapien
tagattggccttaacaatttgttcc

SEQ ID NO: 4970012 - DNA, 25 bp, Homo sapien
tagcttctctcaccaatagattggc

SEQ ID NO: 4970013 - DNA, 25 bp, Homo sapien
gtcgtctgcacgcagggactgtgtt

SEQ ID NO: 4970014 - DNA, 25 bp, Homo sapien
tgttgctgacactgacccatgcaca

SEQ ID NO: 4970015 - DNA, 25 bp, Homo sapien
ttgaacctcaactacacgataagca

SEQ ID NO: 4970016 - DNA, 25 bp, Homo sapien
ccaaagtgtgaattgagctttttcc

SEQ ID NO: 4970017 - DNA, 25 bp, Homo sapien
ctggaaagcagccacacagcaagcc

SEQ ID NO: 4970018 - DNA, 25 bp, Homo sapien
tggaaagcagccacacagcaagccg

SEQ ID NO: 4970019 - DNA, 25 bp, Homo sapien
ggaaagcagccacacagcaagccgg

SEQ ID NO: 4970020 - DNA, 25 bp, Homo sapien
tcttaagcgttgctgagcgctgggc

SEQ ID NO: 4970021 - DNA, 25 bp, Homo sapien
tgctcatacataagcctctggcgct

SEQ ID NO: 4970022 - DNA, 25 bp, Homo sapien
aaagaaaacctgtccatgctccggc

SEQ ID NO: 4970023 - DNA, 25 bp, Homo sapien
gctgtttaatatggactgcatcgga

SEQ ID NO: 4970024 - DNA, 25 bp, Homo sapien
ggaggagtctccgtctacatccagc

SEQ ID NO: 4970025 - DNA, 25 bp, Homo sapien
tattctcgttcttcatggagggatc

SEQ ID NO: 4970026 - DNA, 25 bp, Homo sapien
gacctccatctgtgcgtattcgtaa

SEQ ID NO: 4970027 - DNA, 25 bp, Homo sapien
cagggccttcatggtgacctccatc

SEQ ID NO: 4970028 - DNA, 25 bp, Homo sapien
tgctgctttgacggcagtgcagcat

SEQ ID NO: 4970029 - DNA, 25 bp, Homo sapien
aatgctgctttgacggcagtgcagc

SEQ ID NO: 4970030 - DNA, 25 bp, Homo sapien
gaatgctgctttgacggcagtgcag

SEQ ID NO: 4970031 - DNA, 25 bp, Homo sapien
ctgaatgctgctttgacggcagtgc

SEQ ID NO: 4970032 - DNA, 25 bp, Homo sapien
tattggactggagacagatgaccca

SEQ ID NO: 4970033 - DNA, 25 bp, Homo sapien
catggtgtagctgtattggactgga

SEQ ID NO: 4970034 - DNA, 25 bp, Homo sapien
ggagacagatgacccatttacaaat

SEQ ID NO: 4970035 - DNA, 25 bp, Homo sapien
ataatatcctgtccccatggtgtag

SEQ ID NO: 4970036 - DNA, 25 bp, Homo sapien
ccactgtgctgcttatcatgaaaat

SEQ ID NO: 4970037 - DNA, 25 bp, Homo sapien
cactgtgctgcttatcatgaaaatg

SEQ ID NO: 4970038 - DNA, 25 bp, Homo sapien
actgtgctgcttatcatgaaaatgg

SEQ ID NO: 4970039 - DNA, 25 bp, Homo sapien
ttccactgtgctgcttatcatgaaa

SEQ ID NO: 4970040 - DNA, 25 bp, Homo sapien
gccacaacagggcgatggtccgata

SEQ ID NO: 4970041 - DNA, 25 bp, Homo sapien
tgccacaacagggcgatggtccgat

SEQ ID NO: 4970042 - DNA, 25 bp, Homo sapien
ccacaacagggcgatggtccgatac

SEQ ID NO: 4970043 - DNA, 25 bp, Homo sapien
aagaagcactgccacaacagggcga

SEQ ID NO: 4970044 - DNA, 25 bp, Homo sapien
gactccccacaggagaacatggcag

SEQ ID NO: 4970045 - DNA, 25 bp, Homo sapien
tgcattcagaccaaacagtgactcc

SEQ ID NO: 4970046 - DNA, 25 bp, Homo sapien
catggcagcacttaaccctgcagac

SEQ ID NO: 4970047 - DNA, 25 bp, Homo sapien
tgcagacccaacaggagttagcagg

SEQ ID NO: 4970048 - DNA, 25 bp, Homo sapien
taacctggccttctgacgtgatgtc

SEQ ID NO: 4970049 - DNA, 25 bp, Homo sapien
ccttctgacgtgatgtctataatac

SEQ ID NO: 4970050 - DNA, 25 bp, Homo sapien
tcagcataacctggccttctgacgt

SEQ ID NO: 4970051 - DNA, 25 bp, Homo sapien
gatgtctataatacagtgttcagga

SEQ ID NO: 4970052 - DNA, 25 bp, Homo sapien
ttgctgaccctatcaatgtatgttc

SEQ ID NO: 4970053 - DNA, 25 bp, Homo sapien
gccgcacagttggatatcttgggaa

SEQ ID NO: 4970054 - DNA, 25 bp, Homo sapien
atttatcatccccaactttgattcc

SEQ ID NO: 4970055 - DNA, 25 bp, Homo sapien
gaagagatattccaagactctcaag

SEQ ID NO: 4970056 - DNA, 25 bp, Homo sapien
taaatagtacaccagaagctcattc

SEQ ID NO: 4970057 - DNA, 25 bp, Homo sapien
ctttgattcccgaagactgaagaga

SEQ ID NO: 4970058 - DNA, 25 bp, Homo sapien
ttcctggattagcttctcagattct

SEQ ID NO: 4970059 - DNA, 25 bp, Homo sapien
tctcagattcttccagccggtcctt

SEQ ID NO: 4970060 - DNA, 25 bp, Homo sapien
gtcatttcctggattagcttctcag

SEQ ID NO: 4970061 - DNA, 25 bp, Homo sapien
ttccagccggtcctttagctctgga

SEQ ID NO: 4970062 - DNA, 25 bp, Homo sapien
cataccgcagagttgagagggtttc

SEQ ID NO: 4970063 - DNA, 25 bp, Homo sapien
tacaatgtgcttggctcgatctgca

SEQ ID NO: 4970064 - DNA, 25 bp, Homo sapien
tatcagctgcaggactcacagtagc

SEQ ID NO: 4970065 - DNA, 25 bp, Homo sapien
tgctttggtcagctgctcccggagt

SEQ ID NO: 4970066 - DNA, 25 bp, Homo sapien
gctgacgtcaggattcaagtaacaa

SEQ ID NO: 4970067 - DNA, 25 bp, Homo sapien
taatggacctgatattctactgtgg

SEQ ID NO: 4970068 - DNA, 25 bp, Homo sapien
gaatactagttaactcttgagagga

SEQ ID NO: 4970069 - DNA, 25 bp, Homo sapien
tagaattgtctttatggtgggccaa

SEQ ID NO: 4970070 - DNA, 25 bp, Homo sapien
tgagaactgagtcacgatatggaac

SEQ ID NO: 4970071 - DNA, 25 bp, Homo sapien
aagagctgagataaccagaccgagg

SEQ ID NO: 4970072 - DNA, 25 bp, Homo sapien
gagcagccaagtgagaactgagtca

SEQ ID NO: 4970073 - DNA, 25 bp, Homo sapien
gagataaccagaccgagggttgtga

SEQ ID NO: 4970074 - DNA, 25 bp, Homo sapien
tgctcgttcactgccagctaaatcc

SEQ ID NO: 4970075 - DNA, 25 bp, Homo sapien
tcgttgctcgttcactgccagctaa

SEQ ID NO: 4970076 - DNA, 25 bp, Homo sapien
ctgcagcgcctgtcttcgttgctcg

SEQ ID NO: 4970077 - DNA, 25 bp, Homo sapien
gcctgtcttcgttgctcgttcactg

SEQ ID NO: 4970078 - DNA, 25 bp, Homo sapien
tcctcgttcatgttggttgcagcaa

SEQ ID NO: 4970079 - DNA, 25 bp, Homo sapien
cccagacttcacatcgtagagagta

SEQ ID NO: 4970080 - DNA, 25 bp, Homo sapien
tgaaaactgcatgggatcggctact

SEQ ID NO: 4970081 - DNA, 25 bp, Homo sapien
cagcaactgtgcgagatttgttacc

SEQ ID NO: 4970082 - DNA, 25 bp, Homo sapien
gaaagtccgtcgacataaggtccca

SEQ ID NO: 4970083 - DNA, 25 bp, Homo sapien
tctgactttcaacgtctgacggctt

SEQ ID NO: 4970084 - DNA, 25 bp, Homo sapien
gtagcttgtgacagccagtttagaa

SEQ ID NO: 4970085 - DNA, 25 bp, Homo sapien
ataaggtcccaacacactatgctct

SEQ ID NO: 4970086 - DNA, 25 bp, Homo sapien
cctttgggatcaagaaggtctcgaa

SEQ ID NO: 4970087 - DNA, 25 bp, Homo sapien
caagaaggtctcgaactttttcatt

SEQ ID NO: 4970088 - DNA, 25 bp, Homo sapien
gagtccactgcaaagtcttgggatt

SEQ ID NO: 4970089 - DNA, 25 bp, Homo sapien
tcctctttctgagttcgttcaaaga

SEQ ID NO: 4970090 - DNA, 25 bp, Homo sapien
gtgcccatcatggtataagattttc

SEQ ID NO: 4970091 - DNA, 25 bp, Homo sapien
gctgtgcccatcatggtataagatt

SEQ ID NO: 4970092 - DNA, 25 bp, Homo sapien
gcccatcatggtataagattttcca

SEQ ID NO: 4970093 - DNA, 25 bp, Homo sapien
tcagctgtgcccatcatggtataag

SEQ ID NO: 4970094 - DNA, 25 bp, Homo sapien
gcattgtagccatcaaaagcattct

SEQ ID NO: 4970095 - DNA, 25 bp, Homo sapien
ctgcaggatattctctccaaggcac

SEQ ID NO: 4970096 - DNA, 25 bp, Homo sapien
ggatattctctccaaggcacttgaa

SEQ ID NO: 4970097 - DNA, 25 bp, Homo sapien
ctgtccataggcaaagatacatgca

SEQ ID NO: 4970098 - DNA, 25 bp, Homo sapien
ggattgctaaacacacagggcccaa

SEQ ID NO: 4970099 - DNA, 25 bp, Homo sapien
atacttctgatattgggccacctag

SEQ ID NO: 4970100 - DNA, 25 bp, Homo sapien
catcggaactgagttagaggacacc

SEQ ID NO: 4970101 - DNA, 25 bp, Homo sapien
ctctaatagcaaacacgggagggtg

SEQ ID NO: 4970102 - DNA, 25 bp, Homo sapien
atacttttctttgacagattcatcc

SEQ ID NO: 4970103 - DNA, 25 bp, Homo sapien
ctgcatacttttctttgacagattc

SEQ ID NO: 4970104 - DNA, 25 bp, Homo sapien
acttttctttgacagattcatccat

SEQ ID NO: 4970105 - DNA, 25 bp, Homo sapien
gcatacttttctttgacagattcat

SEQ ID NO: 4970106 - DNA, 25 bp, Homo sapien
ccagaaacaatgatcataagcaaac

SEQ ID NO: 4970107 - DNA, 25 bp, Homo sapien
gaccagaaacaatgatcataagcaa

SEQ ID NO: 4970108 - DNA, 25 bp, Homo sapien
agaccagaaacaatgatcataagca

SEQ ID NO: 4970109 - DNA, 25 bp, Homo sapien
agaaacaatgatcataagcaaacac

SEQ ID NO: 4970110 - DNA, 25 bp, Homo sapien
tgaacataagtgtgtgttaagaaaa

SEQ ID NO: 4970111 - DNA, 25 bp, Homo sapien
acataagtgtgtgttaagaaaacct

SEQ ID NO: 4970112 - DNA, 25 bp, Homo sapien
cataagtgtgtgttaagaaaacctc

SEQ ID NO: 4970113 - DNA, 25 bp, Homo sapien
taagtgtgtgttaagaaaacctcaa

SEQ ID NO: 4970114 - DNA, 25 bp, Homo sapien
tctggacaggtgaggatcggcacac

SEQ ID NO: 4970115 - DNA, 25 bp, Homo sapien
ctctggacaggtgaggatcggcaca

SEQ ID NO: 4970116 - DNA, 25 bp, Homo sapien
caggcaggggagacacctgttccct

SEQ ID NO: 4970117 - DNA, 25 bp, Homo sapien
tctctgtgtgaaacagcaggcaggg

SEQ ID NO: 4970118 - DNA, 25 bp, Homo sapien
gcatctctgtgtgaaacagcaggca

SEQ ID NO: 4970119 - DNA, 25 bp, Homo sapien
ctgcatctctgtgtgaaacagcagg

SEQ ID NO: 4970120 - DNA, 25 bp, Homo sapien
tggcacacgtatgctgacgcatgct

SEQ ID NO: 4970121 - DNA, 25 bp, Homo sapien
ctcagtagggaatagtggcatgcac

SEQ ID NO: 4970122 - DNA, 25 bp, Homo sapien
tcagccagcaggttgagagaaactg

SEQ ID NO: 4970123 - DNA, 25 bp, Homo sapien
gcatacttgaagtgcatggcacacg

SEQ ID NO: 4970124 - DNA, 25 bp, Homo sapien
cacttctatcctttcggttaccagg

SEQ ID NO: 4970125 - DNA, 25 bp, Homo sapien
attgtttgccctggtgatagcctac

SEQ ID NO: 4970126 - DNA, 25 bp, Homo sapien
tggtgatagcctacttctccttcaa

SEQ ID NO: 4970127 - DNA, 25 bp, Homo sapien
agctatattgccctctctgtgactg

SEQ ID NO: 4970128 - DNA, 25 bp, Homo sapien
gcgtttctttccgggtgcctgacat

SEQ ID NO: 4970129 - DNA, 25 bp, Homo sapien
tttctttccgggtgcctgacatcat

SEQ ID NO: 4970130 - DNA, 25 bp, Homo sapien
gtttctttccgggtgcctgacatca

SEQ ID NO: 4970131 - DNA, 25 bp, Homo sapien
ggcgtttctttccgggtgcctgaca

SEQ ID NO: 4970132 - DNA, 25 bp, Homo sapien
ttggacatacaactaaaaggtgagc

SEQ ID NO: 4970133 - DNA, 25 bp, Homo sapien
taaaaggtgagcatcaagtacactc

SEQ ID NO: 4970134 - DNA, 25 bp, Homo sapien
gagcatcaagtacactctgaactag

SEQ ID NO: 4970135 - DNA, 25 bp, Homo sapien
catacaactaaaaggtgagcatcaa

SEQ ID NO: 4970136 - DNA, 25 bp, Homo sapien
taatactctgctggagagacaaaat

SEQ ID NO: 4970137 - DNA, 25 bp, Homo sapien
tccacgctccctgcatgagttgcat

SEQ ID NO: 4970138 - DNA, 25 bp, Homo sapien
aactgttcagggctgtgacatcatc

SEQ ID NO: 4970139 - DNA, 25 bp, Homo sapien
tccaggacctgttgctccggtggct

SEQ ID NO: 4970140 - DNA, 25 bp, Homo sapien
gaaggaaatgagtacacacaggctg

SEQ ID NO: 4970141 - DNA, 25 bp, Homo sapien
tcaggttccccgtgcaaatcttgcc

SEQ ID NO: 4970142 - DNA, 25 bp, Homo sapien
tcttgcctagaggaaacctgccctt

SEQ ID NO: 4970143 - DNA, 25 bp, Homo sapien
catatctgggcctgtgtccatcgac

SEQ ID NO: 4970144 - DNA, 25 bp, Homo sapien
caacaagagagcctatttcatggga

SEQ ID NO: 4970145 - DNA, 25 bp, Homo sapien
gaccttgggcaactaatctaacttc

SEQ ID NO: 4970146 - DNA, 25 bp, Homo sapien
gaattgcctggttgtgaatcccagc

SEQ ID NO: 4970147 - DNA, 25 bp, Homo sapien
ccagaagacaaagcactaaggtgcc

SEQ ID NO: 4970148 - DNA, 25 bp, Homo sapien
tcctacgtctgttctctgtcaacat

SEQ ID NO: 4970149 - DNA, 25 bp, Homo sapien
ctcaaatgtccagacgccacttttc

SEQ ID NO: 4970150 - DNA, 25 bp, Homo sapien
gccacttttcctacgtctgttctct

SEQ ID NO: 4970151 - DNA, 25 bp, Homo sapien
tgtccagacgccacttttcctacgt

SEQ ID NO: 4970152 - DNA, 25 bp, Homo sapien
gcttaacctgttatacacagaaggg

SEQ ID NO: 4970153 - DNA, 25 bp, Homo sapien
tcaagttaattacacctgctactgt

SEQ ID NO: 4970154 - DNA, 25 bp, Homo sapien
acttagtggcactttgcttaacctg

SEQ ID NO: 4970155 - DNA, 25 bp, Homo sapien
caatttcttgggtacatgccaaaga

SEQ ID NO: 4970156 - DNA, 25 bp, Homo sapien
tgaatacatgcaggatctagagacg

SEQ ID NO: 4970157 - DNA, 25 bp, Homo sapien
gacggattgattcatctttgatgta

SEQ ID NO: 4970158 - DNA, 25 bp, Homo sapien
tgcattgaatacatgcaggatctag

SEQ ID NO: 4970159 - DNA, 25 bp, Homo sapien
caggatctagagacggattgattca

SEQ ID NO: 4970160 - DNA, 25 bp, Homo sapien
gatgcagcagaacccagtcaaagtt

SEQ ID NO: 4970161 - DNA, 25 bp, Homo sapien
gctagggctctatccagacttgaat

SEQ ID NO: 4970162 - DNA, 25 bp, Homo sapien
gcttcactgagcttacaggaacagg

SEQ ID NO: 4970163 - DNA, 25 bp, Homo sapien
catctcctggtggtgtgattgggca

SEQ ID NO: 4970164 - DNA, 25 bp, Homo sapien
caacggacagccagctcaacacaca

SEQ ID NO: 4970165 - DNA, 25 bp, Homo sapien
ggggcaaagggaccagacaggccca

SEQ ID NO: 4970166 - DNA, 25 bp, Homo sapien
aggtcaacggacagccagctcaaca

SEQ ID NO: 4970167 - DNA, 25 bp, Homo sapien
tatccataccaagttctggggggca

SEQ ID NO: 4970168 - DNA, 25 bp, Homo sapien
cgaaatttgaatttatacttccaag

SEQ ID NO: 4970169 - DNA, 25 bp, Homo sapien
aactcagagatcccgaaatttgaat

SEQ ID NO: 4970170 - DNA, 25 bp, Homo sapien
agaaagattccagctacataaaaac

SEQ ID NO: 4970171 - DNA, 25 bp, Homo sapien
aaagaaagattccagctacataaaa

SEQ ID NO: 4970172 - DNA, 25 bp, Homo sapien
ttttccaggatccatcatagatact

SEQ ID NO: 4970173 - DNA, 25 bp, Homo sapien
catcatagatacttgtttctgcctc

SEQ ID NO: 4970174 - DNA, 25 bp, Homo sapien
gatccatcatagatacttgtttctg

SEQ ID NO: 4970175 - DNA, 25 bp, Homo sapien
ccaggatccatcatagatacttgtt

SEQ ID NO: 4970176 - DNA, 25 bp, Homo sapien
gacacagagactccatagcacccat

SEQ ID NO: 4970177 - DNA, 25 bp, Homo sapien
gctgaacttatagaactacttgctc

SEQ ID NO: 4970178 - DNA, 25 bp, Homo sapien
cattctaagctggaacgctgaactt

SEQ ID NO: 4970179 - DNA, 25 bp, Homo sapien
gaaccagggaatccttgccacccta

SEQ ID NO: 4970180 - DNA, 25 bp, Homo sapien
tcaacaattagggaattcacatggc

SEQ ID NO: 4970181 - DNA, 25 bp, Homo sapien
aagtaatgtgaggtccaacaattcc

SEQ ID NO: 4970182 - DNA, 25 bp, Homo sapien
gaacatgacagattcagagtgcaga

SEQ ID NO: 4970183 - DNA, 25 bp, Homo sapien
cagggtcttgaagaggtacttgcac

SEQ ID NO: 4970184 - DNA, 25 bp, Homo sapien
gaacgcggggttctaaatcagtagc

SEQ ID NO: 4970185 - DNA, 25 bp, Homo sapien
tggcttggacagcactatgtttggt

SEQ ID NO: 4970186 - DNA, 25 bp, Homo sapien
tctaaatcagtagccaagggctgaa

SEQ ID NO: 4970187 - DNA, 25 bp, Homo sapien
gcttggacagcactatgtttggttt

SEQ ID NO: 4970188 - DNA, 25 bp, Homo sapien
gcatctcctttggaaagattcgtat

SEQ ID NO: 4970189 - DNA, 25 bp, Homo sapien
atttacaggattaagaataaccttg

SEQ ID NO: 4970190 - DNA, 25 bp, Homo sapien
cacacatttggtatgcaagtcagtc

SEQ ID NO: 4970191 - DNA, 25 bp, Homo sapien
ccacacatttggtatgcaagtcagt

SEQ ID NO: 4970192 - DNA, 25 bp, Homo sapien
atcagctggctccttacagtcaaat

SEQ ID NO: 4970193 - DNA, 25 bp, Homo sapien
tctgaccatattgtatcagctggct

SEQ ID NO: 4970194 - DNA, 25 bp, Homo sapien
tcttaaaaccactgcttaatggaat

SEQ ID NO: 4970195 - DNA, 25 bp, Homo sapien
ttcctcaggcccagaggtccatgag

SEQ ID NO: 4970196 - DNA, 25 bp, Homo sapien
aaattagccattacaactcttcctg

SEQ ID NO: 4970197 - DNA, 25 bp, Homo sapien
tctcacttcgaggataactgttaaa

SEQ ID NO: 4970198 - DNA, 25 bp, Homo sapien
attagggcctaatgcttaaccttca

SEQ ID NO: 4970199 - DNA, 25 bp, Homo sapien
gtttagcagaaagactaaaatactc

SEQ ID NO: 4970200 - DNA, 25 bp, Homo sapien
gaacacaggaggtactttacaccaa

SEQ ID NO: 4970201 - DNA, 25 bp, Homo sapien
catgcacgtcaggaaatataaggct

SEQ ID NO: 4970202 - DNA, 25 bp, Homo sapien
ttgttgaacccaaggatcagctcac

SEQ ID NO: 4970203 - DNA, 25 bp, Homo sapien
taatggaatctatgggtaaacctca

SEQ ID NO: 4970204 - DNA, 25 bp, Homo sapien
aaagcaggactcaatcttgcactag

SEQ ID NO: 4970205 - DNA, 25 bp, Homo sapien
caaagtctcatcaatggcaaagtca

SEQ ID NO: 4970206 - DNA, 25 bp, Homo sapien
taatcggacctagcaggaacaggac

SEQ ID NO: 4970207 - DNA, 25 bp, Homo sapien
tctcctgagacagtaatagtgaccc

SEQ ID NO: 4970208 - DNA, 25 bp, Homo sapien
aggcttgggcgacccgggcgagacg

SEQ ID NO: 4970209 - DNA, 25 bp, Homo sapien
ccgggcggtcccgaggcgggctgca

SEQ ID NO: 4970210 - DNA, 25 bp, Homo sapien
cgggccaaggcggtgcaggcttggg

SEQ ID NO: 4970211 - DNA, 25 bp, Homo sapien
cggtgcaggcttgggcgacccgggc

SEQ ID NO: 4970212 - DNA, 25 bp, Homo sapien
aggacgaggctgggcgcgagggccg

SEQ ID NO: 4970213 - DNA, 25 bp, Homo sapien
acgaggctgggcgcgagggccgagg

SEQ ID NO: 4970214 - DNA, 25 bp, Homo sapien
gacgaggctgggcgcgagggccgag

SEQ ID NO: 4970215 - DNA, 25 bp, Homo sapien
ggacgaggctgggcgcgagggccga

SEQ ID NO: 4970216 - DNA, 25 bp, Homo sapien
gcgtctcagcgcgggagcgggtttc

SEQ ID NO: 4970217 - DNA, 25 bp, Homo sapien
ccgggcgtctcagcgcgggagcggg

SEQ ID NO: 4970218 - DNA, 25 bp, Homo sapien
ctcagcgcgggagcgggtttcaggg

SEQ ID NO: 4970219 - DNA, 25 bp, Homo sapien
gtctcagcgcgggagcgggtttcag

SEQ ID NO: 4970220 - DNA, 25 bp, Homo sapien
ccacggcggccgagggaagggcgcg

SEQ ID NO: 4970221 - DNA, 25 bp, Homo sapien
tgactataggggcggggccgccgga

SEQ ID NO: 4970222 - DNA, 25 bp, Homo sapien
cggccgagggaagggcgcgccaggc

SEQ ID NO: 4970223 - DNA, 25 bp, Homo sapien
ctgactataggggcggggccgccgg

SEQ ID NO: 4970224 - DNA, 25 bp, Homo sapien
cgcctccgccccggcggcccaggag

SEQ ID NO: 4970225 - DNA, 25 bp, Homo sapien
cccggcggcccaggagggctcggct

SEQ ID NO: 4970226 - DNA, 25 bp, Homo sapien
ggcggcccaggagggctcggctctc

SEQ ID NO: 4970227 - DNA, 25 bp, Homo sapien
tgccgcctccgccccggcggcccag

SEQ ID NO: 4970228 - DNA, 25 bp, Homo sapien
gccggttcatgggtcgtatccgcac

SEQ ID NO: 4970229 - DNA, 25 bp, Homo sapien
ctcgccggttcatgggtcgtatccg

SEQ ID NO: 4970230 - DNA, 25 bp, Homo sapien
ttcatgggtcgtatccgcaccgcca

SEQ ID NO: 4970231 - DNA, 25 bp, Homo sapien
tatccgcaccgccactttcactttg

SEQ ID NO: 4970232 - DNA, 25 bp, Homo sapien
cgaggaactcgttcggcttccgtct

SEQ ID NO: 4970233 - DNA, 25 bp, Homo sapien
gccaccggcgactcttcggggttga

SEQ ID NO: 4970234 - DNA, 25 bp, Homo sapien
gaactcgttcggcttccgtctgccg

SEQ ID NO: 4970235 - DNA, 25 bp, Homo sapien
gcagccgccgaggaactcgttcggc

SEQ ID NO: 4970236 - DNA, 25 bp, Homo sapien
aggacttgcgggttggctcactgct

SEQ ID NO: 4970237 - DNA, 25 bp, Homo sapien
gacaggaaagcaacgttcacgtgag

SEQ ID NO: 4970238 - DNA, 25 bp, Homo sapien
gatggactccttccaatatggtgcc

SEQ ID NO: 4970239 - DNA, 25 bp, Homo sapien
tctgatggcctccacagatggactc

SEQ ID NO: 4970240 - DNA, 25 bp, Homo sapien
cagggatagcagacatgcacaggtc

SEQ ID NO: 4970241 - DNA, 25 bp, Homo sapien
tggagaacgtccaggcaaatggctc

SEQ ID NO: 4970242 - DNA, 25 bp, Homo sapien
gatgaggccgatcacaatagcatgg

SEQ ID NO: 4970243 - DNA, 25 bp, Homo sapien
cagcaaggtttcagacagatgaggc

SEQ ID NO: 4970244 - DNA, 25 bp, Homo sapien
ctggaaggtgaggagaggttaccat

SEQ ID NO: 4970245 - DNA, 25 bp, Homo sapien
cattgactttccttcctctaatgaa

SEQ ID NO: 4970246 - DNA, 25 bp, Homo sapien
ctctaatgaaatgatccattctgac

SEQ ID NO: 4970247 - DNA, 25 bp, Homo sapien
tatcattgactttccttcctctaat

SEQ ID NO: 4970248 - DNA, 25 bp, Homo sapien
ctatcattgactttccttcctctaa

SEQ ID NO: 4970249 - DNA, 25 bp, Homo sapien
tagccactgctggtgccttatcaac

SEQ ID NO: 4970250 - DNA, 25 bp, Homo sapien
ggtagccactgctggtgccttatca

SEQ ID NO: 4970251 - DNA, 25 bp, Homo sapien
aaggtagccactgctggtgccttat

SEQ ID NO: 4970252 - DNA, 25 bp, Homo sapien
gccactgctggtgccttatcaacat

SEQ ID NO: 4970253 - DNA, 25 bp, Homo sapien
aaattgtcagatacggtgggaatgc

SEQ ID NO: 4970254 - DNA, 25 bp, Homo sapien
tgtctctacatgtcccttggcaggg

SEQ ID NO: 4970255 - DNA, 25 bp, Homo sapien
gcagggctataccatgtccatcata

SEQ ID NO: 4970256 - DNA, 25 bp, Homo sapien
tgaaatctgatacaagcaacccaca

SEQ ID NO: 4970257 - DNA, 25 bp, Homo sapien
tgagaaagagtatcccaacgtgacg

SEQ ID NO: 4970258 - DNA, 25 bp, Homo sapien
tagattcaaaatggcgcctgcgtgc

SEQ ID NO: 4970259 - DNA, 25 bp, Homo sapien
aaattgcttcggtggcctacatgcc

SEQ ID NO: 4970260 - DNA, 25 bp, Homo sapien
taaggattcaaaatggcacccacgt

SEQ ID NO: 4970261 - DNA, 25 bp, Homo sapien
gccttgacatctgcatgctacggtg

SEQ ID NO: 4970262 - DNA, 25 bp, Homo sapien
gctacggtgctcagctgtttgacat

SEQ ID NO: 4970263 - DNA, 25 bp, Homo sapien
aagttgctcatcatgctaccttgca

SEQ ID NO: 4970264 - DNA, 25 bp, Homo sapien
gcttctcaagatgagccttggcaac

SEQ ID NO: 4970265 - DNA, 25 bp, Homo sapien
caacaaagggacaagtacacagaac

SEQ ID NO: 4970266 - DNA, 25 bp, Homo sapien
tacacagaaccaggcacttctggga

SEQ ID NO: 4970267 - DNA, 25 bp, Homo sapien
agctggttgggcacatttgctagga

SEQ ID NO: 4970268 - DNA, 25 bp, Homo sapien
tttctatcggaaaagtgaaactgac

SEQ ID NO: 4970269 - DNA, 25 bp, Homo sapien
ggcctcgtcgttggccaaggagaaa

SEQ ID NO: 4970270 - DNA, 25 bp, Homo sapien
ggaaggagctcggtcgcctgctccc

SEQ ID NO: 4970271 - DNA, 25 bp, Homo sapien
cggcccgtcctacccttgctgggag

SEQ ID NO: 4970272 - DNA, 25 bp, Homo sapien
tcggagtccttattgccattctggc

SEQ ID NO: 4970273 - DNA, 25 bp, Homo sapien
tgggcgagatgatgctgcggcgctg

SEQ ID NO: 4970274 - DNA, 25 bp, Homo sapien
agtgcacgcccacggagaccggaaa

SEQ ID NO: 4970275 - DNA, 25 bp, Homo sapien
tgcttaacgaactcgaaggcctcct

SEQ ID NO: 4970276 - DNA, 25 bp, Homo sapien
gaaagctgaagacgaactgcgaggt

SEQ ID NO: 4970277 - DNA, 25 bp, Homo sapien
tctatggcttccatgaaccaggagc

SEQ ID NO: 4970278 - DNA, 25 bp, Homo sapien
tagtgtccttcaaagtggtttgggc

SEQ ID NO: 4970279 - DNA, 25 bp, Homo sapien
gaagggaaggatctccacaggaccc

SEQ ID NO: 4970280 - DNA, 25 bp, Homo sapien
gctgatgtcggccttgtggttatct

SEQ ID NO: 4970281 - DNA, 25 bp, Homo sapien
gaggccaagccagggagtcatgtct

SEQ ID NO: 4970282 - DNA, 25 bp, Homo sapien
ttgtccggacacgacgttagaggcc

SEQ ID NO: 4970283 - DNA, 25 bp, Homo sapien
tcattcggctgatacgtgggagcag

SEQ ID NO: 4970284 - DNA, 25 bp, Homo sapien
gagtccatctaactgaaagggctgg

SEQ ID NO: 4970285 - DNA, 25 bp, Homo sapien
tgcagcccaggtccaagggctctgt

SEQ ID NO: 4970286 - DNA, 25 bp, Homo sapien
tcggaggaaaacctctcatagccgc

SEQ ID NO: 4970287 - DNA, 25 bp, Homo sapien
tgggtactcggaggaaaacctctca

SEQ ID NO: 4970288 - DNA, 25 bp, Homo sapien
cagggccttggttttagaacagaat

SEQ ID NO: 4970289 - DNA, 25 bp, Homo sapien
gaccctggtacaaactcttctggat

SEQ ID NO: 4970290 - DNA, 25 bp, Homo sapien
gccacccctgattccagcccttcct

SEQ ID NO: 4970291 - DNA, 25 bp, Homo sapien
cctcaggggaggttctccaatgtga

SEQ ID NO: 4970292 - DNA, 25 bp, Homo sapien
aaatgaccctggtacaaactcttct

SEQ ID NO: 4970293 - DNA, 25 bp, Homo sapien
tcaggatataaatggatctctctct

SEQ ID NO: 4970294 - DNA, 25 bp, Homo sapien
tctctctggtcacaggcccttgttc

SEQ ID NO: 4970295 - DNA, 25 bp, Homo sapien
tctctggtcacaggcccttgttcct

SEQ ID NO: 4970296 - DNA, 25 bp, Homo sapien
tctggtcacaggcccttgttcctgc

SEQ ID NO: 4970297 - DNA, 25 bp, Homo sapien
tcatgaatcttaatgtggctgccac

SEQ ID NO: 4970298 - DNA, 25 bp, Homo sapien
caacactcagaatagtgccaggtcc

SEQ ID NO: 4970299 - DNA, 25 bp, Homo sapien
taagcacctatgtaaatgctgagct

SEQ ID NO: 4970300 - DNA, 25 bp, Homo sapien
tgtgactgttgacttagtaagcacc

SEQ ID NO: 4970301 - DNA, 25 bp, Homo sapien
ccatgctgggggctcgaactggttt

SEQ ID NO: 4970302 - DNA, 25 bp, Homo sapien
ggctgacacctaacgccatgctggg

SEQ ID NO: 4970303 - DNA, 25 bp, Homo sapien
tggcttccgttggagtgaacttttc

SEQ ID NO: 4970304 - DNA, 25 bp, Homo sapien
gctatgttcagcaaactggcttccg

SEQ ID NO: 4970305 - DNA, 25 bp, Homo sapien
cagtccatttttgtgggtggagccc

SEQ ID NO: 4970306 - DNA, 25 bp, Homo sapien
taagcccaaggaagttgtgacggtc

SEQ ID NO: 4970307 - DNA, 25 bp, Homo sapien
gctgtgctgtttgatgccattgccc

SEQ ID NO: 4970308 - DNA, 25 bp, Homo sapien
tgcctcccggtaaggaaatcggctc

SEQ ID NO: 4970309 - DNA, 25 bp, Homo sapien
gggagtctcaaactctaatccaagg

SEQ ID NO: 4970310 - DNA, 25 bp, Homo sapien
gatgctatccggtactatagggtga

SEQ ID NO: 4970311 - DNA, 25 bp, Homo sapien
caggccctgggctattggatgctat

SEQ ID NO: 4970312 - DNA, 25 bp, Homo sapien
taatccaaggatttacgaatgagag

SEQ ID NO: 4970313 - DNA, 25 bp, Homo sapien
gggccgactacgagaggcagtgcag

SEQ ID NO: 4970314 - DNA, 25 bp, Homo sapien
cagcccttaaagtacttctcttatg

SEQ ID NO: 4970315 - DNA, 25 bp, Homo sapien
actacgagaggcagtgcaggctcca

SEQ ID NO: 4970316 - DNA, 25 bp, Homo sapien
gccacccaccagagggctgtcattt

SEQ ID NO: 4970317 - DNA, 25 bp, Homo sapien
cgacaagctcaaacaatggcgcgga

SEQ ID NO: 4970318 - DNA, 25 bp, Homo sapien
tctcaacgggattcacgagggacag

SEQ ID NO: 4970319 - DNA, 25 bp, Homo sapien
tctccagggctctcgaatcggtctg

SEQ ID NO: 4970320 - DNA, 25 bp, Homo sapien
gacttgcgtcccagaggaattgccc

SEQ ID NO: 4970321 - DNA, 25 bp, Homo sapien
atggaccgcgcagaggagtcgcttc

SEQ ID NO: 4970322 - DNA, 25 bp, Homo sapien
cagaggagtcgcttcatcctcgagg

SEQ ID NO: 4970323 - DNA, 25 bp, Homo sapien
tcatcctcgaggctaggaccgttaa

SEQ ID NO: 4970324 - DNA, 25 bp, Homo sapien
gaggctaggaccgttaatgtcaata

SEQ ID NO: 4970325 - DNA, 25 bp, Homo sapien
tgcaggtgaccggagaaacccgtcc

SEQ ID NO: 4970326 - DNA, 25 bp, Homo sapien
cccgtccgcactttccctgaggact

SEQ ID NO: 4970327 - DNA, 25 bp, Homo sapien
taggacggtgcggaattgcaggtga

SEQ ID NO: 4970328 - DNA, 25 bp, Homo sapien
gaacctcgcacttgcacagaaacct

SEQ ID NO: 4970329 - DNA, 25 bp, Homo sapien
gcggggatccccgcaaccacgaatc

SEQ ID NO: 4970330 - DNA, 25 bp, Homo sapien
ggggatccccgcaaccacgaatcac

SEQ ID NO: 4970331 - DNA, 25 bp, Homo sapien
cggggatccccgcaaccacgaatca

SEQ ID NO: 4970332 - DNA, 25 bp, Homo sapien
cgcggggatccccgcaaccacgaat

SEQ ID NO: 4970333 - DNA, 25 bp, Homo sapien
tccttcccgtgccaataaggcgcag

SEQ ID NO: 4970334 - DNA, 25 bp, Homo sapien
ggactccttcccgtgccaataaggc

SEQ ID NO: 4970335 - DNA, 25 bp, Homo sapien
ttcccgtgccaataaggcgcaggcc

SEQ ID NO: 4970336 - DNA, 25 bp, Homo sapien
gccaataaggcgcaggccgccaaga

SEQ ID NO: 4970337 - DNA, 25 bp, Homo sapien
cccgactccagctagcgcccggagc

SEQ ID NO: 4970338 - DNA, 25 bp, Homo sapien
ccgactccagctagcgcccggagcc

SEQ ID NO: 4970339 - DNA, 25 bp, Homo sapien
gactccagctagcgcccggagccct

SEQ ID NO: 4970340 - DNA, 25 bp, Homo sapien
tccccgactccagctagcgcccgga

SEQ ID NO: 4970341 - DNA, 25 bp, Homo sapien
ggtgttacagcgcacgttgaccgaa

SEQ ID NO: 4970342 - DNA, 25 bp, Homo sapien
tcgtcgtagacgatgaccgccgagt

SEQ ID NO: 4970343 - DNA, 25 bp, Homo sapien
tgtgcgccaggaacggtctgcagtc

SEQ ID NO: 4970344 - DNA, 25 bp, Homo sapien
ttgaccgaacctaggatgtagcccg

SEQ ID NO: 4970345 - DNA, 25 bp, Homo sapien
tcggcagccccagggtgccgtggct

SEQ ID NO: 4970346 - DNA, 25 bp, Homo sapien
ctcggcagccccagggtgccgtggc

SEQ ID NO: 4970347 - DNA, 25 bp, Homo sapien
cggcagccccagggtgccgtggctg

SEQ ID NO: 4970348 - DNA, 25 bp, Homo sapien
gtttacgagagaggaccgcggactc

SEQ ID NO: 4970349 - DNA, 25 bp, Homo sapien
tatttttgccggtcgcgcggctcct

SEQ ID NO: 4970350 - DNA, 25 bp, Homo sapien
cctcgcggtcacatagcagtcggag

SEQ ID NO: 4970351 - DNA, 25 bp, Homo sapien
gcctgcagaagtggccgcaaacttg

SEQ ID NO: 4970352 - DNA, 25 bp, Homo sapien
cccgtgcgctttcggcccggccagt

SEQ ID NO: 4970353 - DNA, 25 bp, Homo sapien
tagccccagactccccgtgcgcttt

SEQ ID NO: 4970354 - DNA, 25 bp, Homo sapien
gggaccggagcgctgctgcccaccc

SEQ ID NO: 4970355 - DNA, 25 bp, Homo sapien
tcatcccttggcaccttcgcgcttc

SEQ ID NO: 4970356 - DNA, 25 bp, Homo sapien
tgcctttgttccgggcggagcggct

SEQ ID NO: 4970357 - DNA, 25 bp, Homo sapien
catgcctttgttccgggcggagcgg

SEQ ID NO: 4970358 - DNA, 25 bp, Homo sapien
cccatgcctttgttccgggcggagc

SEQ ID NO: 4970359 - DNA, 25 bp, Homo sapien
ccatgcctttgttccgggcggagcg

SEQ ID NO: 4970360 - DNA, 25 bp, Homo sapien
tgcactccccgaccggagctcggcg

SEQ ID NO: 4970361 - DNA, 25 bp, Homo sapien
ttccgagaccttcgactggcctcgt

SEQ ID NO: 4970362 - DNA, 25 bp, Homo sapien
ccactgggccccgaatgcctcgacc

SEQ ID NO: 4970363 - DNA, 25 bp, Homo sapien
cggagctcggcggagcctccacttc

SEQ ID NO: 4970364 - DNA, 25 bp, Homo sapien
ccacaactgtggactgaccgaggct

SEQ ID NO: 4970365 - DNA, 25 bp, Homo sapien
tctcccggcgcaagtaaacactgat

SEQ ID NO: 4970366 - DNA, 25 bp, Homo sapien
tttcgataaggagcaaggagcccca

SEQ ID NO: 4970367 - DNA, 25 bp, Homo sapien
ggagatcagtggtcaaagccgcacg

SEQ ID NO: 4970368 - DNA, 25 bp, Homo sapien
tctagttttgatgccaacctctgac

SEQ ID NO: 4970369 - DNA, 25 bp, Homo sapien
tatgatcggggaatctaaagcccgg

SEQ ID NO: 4970370 - DNA, 25 bp, Homo sapien
gagagaagtacagcttctattctag

SEQ ID NO: 4970371 - DNA, 25 bp, Homo sapien
ccggagtagaatccccagagagaag

SEQ ID NO: 4970372 - DNA, 25 bp, Homo sapien
gagcacccacgggtgccttggtcat

SEQ ID NO: 4970373 - DNA, 25 bp, Homo sapien
cgagcacccacgggtgccttggtca

SEQ ID NO: 4970374 - DNA, 25 bp, Homo sapien
gcagctgcacgtgtttgacccggca

SEQ ID NO: 4970375 - DNA, 25 bp, Homo sapien
gggtaagtcatcattggccagtcca

SEQ ID NO: 4970376 - DNA, 25 bp, Homo sapien
tgctggaatcggtgcaccaagtgcc

SEQ ID NO: 4970377 - DNA, 25 bp, Homo sapien
gatacaacaggacatagacaaaggg

SEQ ID NO: 4970378 - DNA, 25 bp, Homo sapien
gggaatgtgggattggaagtaagct

SEQ ID NO: 4970379 - DNA, 25 bp, Homo sapien
gaatgtgggattggaagtaagcttc

SEQ ID NO: 4970380 - DNA, 25 bp, Homo sapien
aagggaatgtgggattggaagtaag

SEQ ID NO: 4970381 - DNA, 25 bp, Homo sapien
atgtgggattggaagtaagcttccc

SEQ ID NO: 4970382 - DNA, 25 bp, Homo sapien
gaagcatacatattggtggacttca

SEQ ID NO: 4970383 - DNA, 25 bp, Homo sapien
agagtgactgcgtggagaagcatac

SEQ ID NO: 4970384 - DNA, 25 bp, Homo sapien
gtggacttcagattgacagcggcct

SEQ ID NO: 4970385 - DNA, 25 bp, Homo sapien
gacttcagattgacagcggcctgtc

SEQ ID NO: 4970386 - DNA, 25 bp, Homo sapien
tgaggagcaaagataaccacgagga

SEQ ID NO: 4970387 - DNA, 25 bp, Homo sapien
gataaccacgaggaataaccagagc

SEQ ID NO: 4970388 - DNA, 25 bp, Homo sapien
accagagcagtactgtgtgacagcg

SEQ ID NO: 4970389 - DNA, 25 bp, Homo sapien
gcgttgacaatctgtgatgtcctgt

SEQ ID NO: 4970390 - DNA, 25 bp, Homo sapien
gagatgagtgcccttgtagcccgta

SEQ ID NO: 4970391 - DNA, 25 bp, Homo sapien
cagggcccttgctaagggtgcttcc

SEQ ID NO: 4970392 - DNA, 25 bp, Homo sapien
caggctgtggccttgatcagggaga

SEQ ID NO: 4970393 - DNA, 25 bp, Homo sapien
gtgtggcaagcagggcccttgctaa

SEQ ID NO: 4970394 - DNA, 25 bp, Homo sapien
tgaggcctttggttggaggcctttg

SEQ ID NO: 4970395 - DNA, 25 bp, Homo sapien
ctgagcaacaaacagttgcagagtc

SEQ ID NO: 4970396 - DNA, 25 bp, Homo sapien
tggtttgaggcctttggttggaggc

SEQ ID NO: 4970397 - DNA, 25 bp, Homo sapien
tctgagcaacaaacagttgcagagt

SEQ ID NO: 4970398 - DNA, 25 bp, Homo sapien
gcacctgtagtgcacttggcatccg

SEQ ID NO: 4970399 - DNA, 25 bp, Homo sapien
ccagtgtaggtaacgctcagcagaa

SEQ ID NO: 4970400 - DNA, 25 bp, Homo sapien
tggcatccgggacacttgatgatct

SEQ ID NO: 4970401 - DNA, 25 bp, Homo sapien
tctccgctcttctggtagtccgtgc

SEQ ID NO: 4970402 - DNA, 25 bp, Homo sapien
gatttggtgagaacggatcatttgg

SEQ ID NO: 4970403 - DNA, 25 bp, Homo sapien
aagcctgatttggtgagaacggatc

SEQ ID NO: 4970404 - DNA, 25 bp, Homo sapien
tttaaagcctgatttggtgagaacg

SEQ ID NO: 4970405 - DNA, 25 bp, Homo sapien
cctgatttggtgagaacggatcatt

SEQ ID NO: 4970406 - DNA, 25 bp, Homo sapien
gctgtcagcaccatcagctcgtgct

SEQ ID NO: 4970407 - DNA, 25 bp, Homo sapien
ttggcaggtctctacctctggcatc

SEQ ID NO: 4970408 - DNA, 25 bp, Homo sapien
ctgcttggcaggtctctacctctgg

SEQ ID NO: 4970409 - DNA, 25 bp, Homo sapien
gctctgggtaataacagctgtcagc

SEQ ID NO: 4970410 - DNA, 25 bp, Homo sapien
ttgagtggctgcataggtggtagca

SEQ ID NO: 4970411 - DNA, 25 bp, Homo sapien
tgagtggctgcataggtggtagcat

SEQ ID NO: 4970412 - DNA, 25 bp, Homo sapien
ggtccttctttaaattggggctgca

SEQ ID NO: 4970413 - DNA, 25 bp, Homo sapien
tccccatcagtagggtgaaggaggg

SEQ ID NO: 4970414 - DNA, 25 bp, Homo sapien
gtccttctttaaattggggctgcag

SEQ ID NO: 4970415 - DNA, 25 bp, Homo sapien
taatgttccccatcagtagggtgaa

SEQ ID NO: 4970416 - DNA, 25 bp, Homo sapien
cttctcccttgtaccggttgtgcct

SEQ ID NO: 4970417 - DNA, 25 bp, Homo sapien
aggtttcctacaggtagctgactca

SEQ ID NO: 4970418 - DNA, 25 bp, Homo sapien
cttctcaacaggtttcctacaggta

SEQ ID NO: 4970419 - DNA, 25 bp, Homo sapien
tcaacaggtttcctacaggtagctg

SEQ ID NO: 4970420 - DNA, 25 bp, Homo sapien
gtcctgggtgcctttgaacctcctc

SEQ ID NO: 4970421 - DNA, 25 bp, Homo sapien
ctcctctccatttcactcttggaaa

SEQ ID NO: 4970422 - DNA, 25 bp, Homo sapien
tgtcctgggtgcctttgaacctcct

SEQ ID NO: 4970423 - DNA, 25 bp, Homo sapien
gtgtcctgggtgcctttgaacctcc

SEQ ID NO: 4970424 - DNA, 25 bp, Homo sapien
gaggaatcctgcatggttgtttgca

SEQ ID NO: 4970425 - DNA, 25 bp, Homo sapien
ccacaaatcattataccaggtgcaa

SEQ ID NO: 4970426 - DNA, 25 bp, Homo sapien
cataaattgtgcaacgcctctccca

SEQ ID NO: 4970427 - DNA, 25 bp, Homo sapien
gggtacacgtgctttccacaaatca

SEQ ID NO: 4970428 - DNA, 25 bp, Homo sapien
caaaaactctgatagatagatattg

SEQ ID NO: 4970429 - DNA, 25 bp, Homo sapien
ttccatgatggtgagtgtgcggtta

SEQ ID NO: 4970430 - DNA, 25 bp, Homo sapien
gaaatgtgaaaagtcatccaagttt

SEQ ID NO: 4970431 - DNA, 25 bp, Homo sapien
agatattggtgcatttgatgagcag

SEQ ID NO: 4970432 - DNA, 25 bp, Homo sapien
ccatttagtttgggaagcaccgact

SEQ ID NO: 4970433 - DNA, 25 bp, Homo sapien
gttgattgtagctccatttctccac

SEQ ID NO: 4970434 - DNA, 25 bp, Homo sapien
tgcgccagggagacttccatttagt

SEQ ID NO: 4970435 - DNA, 25 bp, Homo sapien
tgacaatggtggttctaaactcttc

SEQ ID NO: 4970436 - DNA, 25 bp, Homo sapien
aatcaagttacccatccatccccac

SEQ ID NO: 4970437 - DNA, 25 bp, Homo sapien
tcaaatcaagttacccatccatccc

SEQ ID NO: 4970438 - DNA, 25 bp, Homo sapien
aaatcaagttacccatccatcccca

SEQ ID NO: 4970439 - DNA, 25 bp, Homo sapien
caaatcaagttacccatccatcccc

SEQ ID NO: 4970440 - DNA, 25 bp, Homo sapien
ttcccaatctgaccactcagagacg

SEQ ID NO: 4970441 - DNA, 25 bp, Homo sapien
agagacgccactcagagacaccagg

SEQ ID NO: 4970442 - DNA, 25 bp, Homo sapien
gctaggtttggctgttcctccttcc

SEQ ID NO: 4970443 - DNA, 25 bp, Homo sapien
ccatagtcagagctcgatgacccct

SEQ ID NO: 4970444 - DNA, 25 bp, Homo sapien
gccctcagggacatctttgacatca

SEQ ID NO: 4970445 - DNA, 25 bp, Homo sapien
tgacatcactgacagacaggtccat

SEQ ID NO: 4970446 - DNA, 25 bp, Homo sapien
gagtgcatgggatttgatttgtaaa

SEQ ID NO: 4970447 - DNA, 25 bp, Homo sapien
agacaggtccattccagagtgcatg

SEQ ID NO: 4970448 - DNA, 25 bp, Homo sapien
agttcacaggtaggcaaaaatgctg

SEQ ID NO: 4970449 - DNA, 25 bp, Homo sapien
gttcacaggtaggcaaaaatgctgc

SEQ ID NO: 4970450 - DNA, 25 bp, Homo sapien
gagttcacaggtaggcaaaaatgct

SEQ ID NO: 4970451 - DNA, 25 bp, Homo sapien
ttcacaggtaggcaaaaatgctgct

SEQ ID NO: 4970452 - DNA, 25 bp, Homo sapien
caaaccatacacagtggttgacaga

SEQ ID NO: 4970453 - DNA, 25 bp, Homo sapien
tacttcttctatggctgtatttgtg

SEQ ID NO: 4970454 - DNA, 25 bp, Homo sapien
tacacagtggttgacagagagatga

SEQ ID NO: 4970455 - DNA, 25 bp, Homo sapien
ggctgtatttgtgcaaaccatacac

SEQ ID NO: 4970456 - DNA, 25 bp, Homo sapien
taggctagagctgtgtcttgggatt

SEQ ID NO: 4970457 - DNA, 25 bp, Homo sapien
tgtcttgggattccgtacaactgcc

SEQ ID NO: 4970458 - DNA, 25 bp, Homo sapien
actgccaccgctgggagagatggaa

SEQ ID NO: 4970459 - DNA, 25 bp, Homo sapien
gtgaggtccctccacggaactccaa

SEQ ID NO: 4970460 - DNA, 25 bp, Homo sapien
tggcaggtccaatgtcccggtcagc

SEQ ID NO: 4970461 - DNA, 25 bp, Homo sapien
tcagcaggtggcggacacaggtcct

SEQ ID NO: 4970462 - DNA, 25 bp, Homo sapien
gatgtggcaggtccaatgtcccggt

SEQ ID NO: 4970463 - DNA, 25 bp, Homo sapien
caggtccaatgtcccggtcagcagg

SEQ ID NO: 4970464 - DNA, 25 bp, Homo sapien
tcagttccacacactgctttggttt

SEQ ID NO: 4970465 - DNA, 25 bp, Homo sapien
agttccacacactgctttggtttgg

SEQ ID NO: 4970466 - DNA, 25 bp, Homo sapien
gcttcagttccacacactgctttgg

SEQ ID NO: 4970467 - DNA, 25 bp, Homo sapien
cttcagttccacacactgctttggt

SEQ ID NO: 4970468 - DNA, 25 bp, Homo sapien
caactgaggctcttgctaaagaggc

SEQ ID NO: 4970469 - DNA, 25 bp, Homo sapien
aagattacatgagaggcgttccgtg

SEQ ID NO: 4970470 - DNA, 25 bp, Homo sapien
gatgttactatactagccacctttg

SEQ ID NO: 4970471 - DNA, 25 bp, Homo sapien
taaatggtccggaaacagcaagcag

SEQ ID NO: 4970472 - DNA, 25 bp, Homo sapien
tagccgctgaaagatccgctctgtt

SEQ ID NO: 4970473 - DNA, 25 bp, Homo sapien
ggaaggtttctcgtgctctccgcct

SEQ ID NO: 4970474 - DNA, 25 bp, Homo sapien
tacttcttagaactgaggcccctag

SEQ ID NO: 4970475 - DNA, 25 bp, Homo sapien
gacctaagccgagtttgaacttgga

SEQ ID NO: 4970476 - DNA, 25 bp, Homo sapien
aatgtcagtggatgtgtaatatacc

SEQ ID NO: 4970477 - DNA, 25 bp, Homo sapien
tgtcagtggatgtgtaatataccat

SEQ ID NO: 4970478 - DNA, 25 bp, Homo sapien
cggcaacatgaactcataggttgct

SEQ ID NO: 4970479 - DNA, 25 bp, Homo sapien
agtgaaagcggcaacatgaactcat

SEQ ID NO: 4970480 - DNA, 25 bp, Homo sapien
tcagatattcttatcgccctcacac

SEQ ID NO: 4970481 - DNA, 25 bp, Homo sapien
tatcgccctcacacgaggtgacttc

SEQ ID NO: 4970482 - DNA, 25 bp, Homo sapien
attcttatcgccctcacacgaggtg

SEQ ID NO: 4970483 - DNA, 25 bp, Homo sapien
agatattcttatcgccctcacacga

SEQ ID NO: 4970484 - DNA, 25 bp, Homo sapien
tttttgagaatgcttgtgacttggc

SEQ ID NO: 4970485 - DNA, 25 bp, Homo sapien
tagctgcctggaggaacatgggcct

SEQ ID NO: 4970486 - DNA, 25 bp, Homo sapien
tacttcctttgtctgtattgaggcc

SEQ ID NO: 4970487 - DNA, 25 bp, Homo sapien
caggtatgtcacagggtagctgcct

SEQ ID NO: 4970488 - DNA, 25 bp, Homo sapien
tgactctgtgcccagatactggcag

SEQ ID NO: 4970489 - DNA, 25 bp, Homo sapien
tttgttggtaaggatgcagtttgca

SEQ ID NO: 4970490 - DNA, 25 bp, Homo sapien
tgccataaacttcgccagcacactg

SEQ ID NO: 4970491 - DNA, 25 bp, Homo sapien
actttatcctggttttcaaatgcca

SEQ ID NO: 4970492 - DNA, 25 bp, Homo sapien
ttcaacttcttagcccaaatggcag

SEQ ID NO: 4970493 - DNA, 25 bp, Homo sapien
ttggcttgcataatcttctggattg

SEQ ID NO: 4970494 - DNA, 25 bp, Homo sapien
ttcttggcttgcataatcttctgga

SEQ ID NO: 4970495 - DNA, 25 bp, Homo sapien
tcttggcttgcataatcttctggat

SEQ ID NO: 4970496 - DNA, 25 bp, Homo sapien
cttggcttgcataatcttctggatt

SEQ ID NO: 4970497 - DNA, 25 bp, Homo sapien
catggcatctcgagtgaagtctaaa

SEQ ID NO: 4970498 - DNA, 25 bp, Homo sapien
cgagtgaagtctaaacttcccaaca

SEQ ID NO: 4970499 - DNA, 25 bp, Homo sapien
tttaccctgcagctgtaccccatgg

SEQ ID NO: 4970500 - DNA, 25 bp, Homo sapien
gctgtaccccatggcatctcgagtg

SEQ ID NO: 4970501 - DNA, 25 bp, Homo sapien
aatcccagaagttggaccttgtagc

SEQ ID NO: 4970502 - DNA, 25 bp, Homo sapien
ttggaccttgtagcaggcggatgca

SEQ ID NO: 4970503 - DNA, 25 bp, Homo sapien
tgtcctcagactaccatccatgaag

SEQ ID NO: 4970504 - DNA, 25 bp, Homo sapien
caggcggatgcagctcttgtaggag

SEQ ID NO: 4970505 - DNA, 25 bp, Homo sapien
agtgtgcaaagatacactggtatcc

SEQ ID NO: 4970506 - DNA, 25 bp, Homo sapien
aggaggtcccctctgtactgtgagt

SEQ ID NO: 4970507 - DNA, 25 bp, Homo sapien
tactgtgagtctaaatgggcacaag

SEQ ID NO: 4970508 - DNA, 25 bp, Homo sapien
cagttcaacacttaggctaatagga

SEQ ID NO: 4970509 - DNA, 25 bp, Homo sapien
accatgtagagagaagctgttcagt

SEQ ID NO: 4970510 - DNA, 25 bp, Homo sapien
tctgagattaagtctgcttgaccat

SEQ ID NO: 4970511 - DNA, 25 bp, Homo sapien
gagattaagtctgcttgaccatgta

SEQ ID NO: 4970512 - DNA, 25 bp, Homo sapien
tgcttgaccatgtagagagaagctg

SEQ ID NO: 4970513 - DNA, 25 bp, Homo sapien
tcagcttatcgaatagaatttcagc

SEQ ID NO: 4970514 - DNA, 25 bp, Homo sapien
cagcttatcgaatagaatttcagcc

SEQ ID NO: 4970515 - DNA, 25 bp, Homo sapien
tcagtgagttgctgataaatatcag

SEQ ID NO: 4970516 - DNA, 25 bp, Homo sapien
tgctgataaatatcagatttctgta

SEQ ID NO: 4970517 - DNA, 25 bp, Homo sapien
aacagccccatgagccacttcagga

SEQ ID NO: 4970518 - DNA, 25 bp, Homo sapien
gcagagatactctcctaggagaaac

SEQ ID NO: 4970519 - DNA, 25 bp, Homo sapien
tcatatgccatacggctttctgttg

SEQ ID NO: 4970520 - DNA, 25 bp, Homo sapien
ccttcaagactcatatgccatacgg

SEQ ID NO: 4970521 - DNA, 25 bp, Homo sapien
caagactcatatgccatacggcttt

SEQ ID NO: 4970522 - DNA, 25 bp, Homo sapien
gactcatatgccatacggctttctg

SEQ ID NO: 4970523 - DNA, 25 bp, Homo sapien
cacatccagtggtgccattcctatt

SEQ ID NO: 4970524 - DNA, 25 bp, Homo sapien
catccagtggtgccattcctatttc

SEQ ID NO: 4970525 - DNA, 25 bp, Homo sapien
acatccagtggtgccattcctattt

SEQ ID NO: 4970526 - DNA, 25 bp, Homo sapien
tttgcccgtaaagaaggagctagtc

SEQ ID NO: 4970527 - DNA, 25 bp, Homo sapien
tacatccatagctcagcgatcagag

SEQ ID NO: 4970528 - DNA, 25 bp, Homo sapien
taagcaatgatttccaccatccgaa

SEQ ID NO: 4970529 - DNA, 25 bp, Homo sapien
gagctagtctacgtgcggctgcagt

SEQ ID NO: 4970530 - DNA, 25 bp, Homo sapien
ccgagatggcatctgggctgtgaca

SEQ ID NO: 4970531 - DNA, 25 bp, Homo sapien
tttccgcggatagaccgagatggca

SEQ ID NO: 4970532 - DNA, 25 bp, Homo sapien
aaaccacgcggcgttctctggtggc

SEQ ID NO: 4970533 - DNA, 25 bp, Homo sapien
gcttggcgctgcgtgcttgcatttc

SEQ ID NO: 4970534 - DNA, 25 bp, Homo sapien
ctgggacgagtgggcggaaacagcc

SEQ ID NO: 4970535 - DNA, 25 bp, Homo sapien
gacgagtgggcggaaacagccgcag

SEQ ID NO: 4970536 - DNA, 25 bp, Homo sapien
gagtgggcggaaacagccgcaggtc

SEQ ID NO: 4970537 - DNA, 25 bp, Homo sapien
tgggcggaaacagccgcaggtctct

SEQ ID NO: 4970538 - DNA, 25 bp, Homo sapien
gtgggatggggtccccttgtggagc

SEQ ID NO: 4970539 - DNA, 25 bp, Homo sapien
gtccccttgtggagccctgagcctt

SEQ ID NO: 4970540 - DNA, 25 bp, Homo sapien
ttgtgggatggggtccccttgtgga

SEQ ID NO: 4970541 - DNA, 25 bp, Homo sapien
gggtccccttgtggagccctgagcc

SEQ ID NO: 4970542 - DNA, 25 bp, Homo sapien
accactagcaccgactttcctggtg

SEQ ID NO: 4970543 - DNA, 25 bp, Homo sapien
ctttcctggtgcaagaatacggcat

SEQ ID NO: 4970544 - DNA, 25 bp, Homo sapien
tagcaccgactttcctggtgcaaga

SEQ ID NO: 4970545 - DNA, 25 bp, Homo sapien
caccgactttcctggtgcaagaata

SEQ ID NO: 4970546 - DNA, 25 bp, Homo sapien
tcttaaacaagtagaatgctaaggc

SEQ ID NO: 4970547 - DNA, 25 bp, Homo sapien
tgtctagctgccttaacatgaacag

SEQ ID NO: 4970548 - DNA, 25 bp, Homo sapien
ttgaccaatgtccaccaatgatgga

SEQ ID NO: 4970549 - DNA, 25 bp, Homo sapien
tatgacaacagttcattgaccaatg

SEQ ID NO: 4970550 - DNA, 25 bp, Homo sapien
tttggaatttgcaaagcccggttga

SEQ ID NO: 4970551 - DNA, 25 bp, Homo sapien
gagattcacttgaaggtagggaccc

SEQ ID NO: 4970552 - DNA, 25 bp, Homo sapien
aactttgagggtataaataggccag

SEQ ID NO: 4970553 - DNA, 25 bp, Homo sapien
taaaacttgcatataggagtggaac

SEQ ID NO: 4970554 - DNA, 25 bp, Homo sapien
atgaaataacacatggagaaagagc

SEQ ID NO: 4970555 - DNA, 25 bp, Homo sapien
ttctcatctgtaaagcaccaatgat

SEQ ID NO: 4970556 - DNA, 25 bp, Homo sapien
gcaccaatgataggaattaataacg

SEQ ID NO: 4970557 - DNA, 25 bp, Homo sapien
tgatttaatcagtcaaagctgtggt

SEQ ID NO: 4970558 - DNA, 25 bp, Homo sapien
gcaggtacaagcacacaggcttgaa

SEQ ID NO: 4970559 - DNA, 25 bp, Homo sapien
cacagtttaaaggacacagactcga

SEQ ID NO: 4970560 - DNA, 25 bp, Homo sapien
ggcttgaacacacagtttaaaggac

SEQ ID NO: 4970561 - DNA, 25 bp, Homo sapien
aaggacacagactcgaagacacaac

SEQ ID NO: 4970562 - DNA, 25 bp, Homo sapien
aggccgaatatgatctgtgcaccag

SEQ ID NO: 4970563 - DNA, 25 bp, Homo sapien
gaggacaaaaattgcgagtgatgca

SEQ ID NO: 4970564 - DNA, 25 bp, Homo sapien
agagggctgcatactgaacccaggg

SEQ ID NO: 4970565 - DNA, 25 bp, Homo sapien
cctgtcatctaaagaaggaggacaa

SEQ ID NO: 4970566 - DNA, 25 bp, Homo sapien
tgaagaatagtccctgagctcagga

SEQ ID NO: 4970567 - DNA, 25 bp, Homo sapien
ggaattatgaccttgccactcttgg

SEQ ID NO: 4970568 - DNA, 25 bp, Homo sapien
gcatgaagaatagtccctgagctca

SEQ ID NO: 4970569 - DNA, 25 bp, Homo sapien
aggcatgaagaatagtccctgagct

SEQ ID NO: 4970570 - DNA, 25 bp, Homo sapien
gatcaaatgcaagaaaggccttttg

SEQ ID NO: 4970571 - DNA, 25 bp, Homo sapien
cactcactgtggctagattggcttt

SEQ ID NO: 4970572 - DNA, 25 bp, Homo sapien
actgtggctagattggctttccctg

SEQ ID NO: 4970573 - DNA, 25 bp, Homo sapien
ccttcagacgaagcagaaaagtgat

SEQ ID NO: 4970574 - DNA, 25 bp, Homo sapien
gcctcaagacacgtttagaacactg

SEQ ID NO: 4970575 - DNA, 25 bp, Homo sapien
tagtgctccaaagtgatcgattttc

SEQ ID NO: 4970576 - DNA, 25 bp, Homo sapien
tgtgttagaacagccattccctggt

SEQ ID NO: 4970577 - DNA, 25 bp, Homo sapien
ggctttgccgcaggaatagagataa

SEQ ID NO: 4970578 - DNA, 25 bp, Homo sapien
tagcaatcttcttcctactcggaca

SEQ ID NO: 4970579 - DNA, 25 bp, Homo sapien
ccaaaagggttgaagatgttatctt

SEQ ID NO: 4970580 - DNA, 25 bp, Homo sapien
tcggacatccggcaagtccctttgc

SEQ ID NO: 4970581 - DNA, 25 bp, Homo sapien
ttcctactcggacatccggcaagtc

SEQ ID NO: 4970582 - DNA, 25 bp, Homo sapien
tggactagagtcttcaccagggaac

SEQ ID NO: 4970583 - DNA, 25 bp, Homo sapien
cttcccttgcacttctggtgattta

SEQ ID NO: 4970584 - DNA, 25 bp, Homo sapien
cctgacgggacagacgagtgagatc

SEQ ID NO: 4970585 - DNA, 25 bp, Homo sapien
tggtgatttatattggactagagtc

SEQ ID NO: 4970586 - DNA, 25 bp, Homo sapien
gcatatccattcattgccatggagg

SEQ ID NO: 4970587 - DNA, 25 bp, Homo sapien
aaaaatcaccaggtcgacccttgct

SEQ ID NO: 4970588 - DNA, 25 bp, Homo sapien
tagccatctgaaggctctttcttga

SEQ ID NO: 4970589 - DNA, 25 bp, Homo sapien
tgctccctgtcttcaaaggagatgt

SEQ ID NO: 4970590 - DNA, 25 bp, Homo sapien
gccggggggcttgtggctttggcca

SEQ ID NO: 4970591 - DNA, 25 bp, Homo sapien
ggccagccattgtgcaagcaaagaa

SEQ ID NO: 4970592 - DNA, 25 bp, Homo sapien
gggggcttgtggctttggccagcca

SEQ ID NO: 4970593 - DNA, 25 bp, Homo sapien
gcttgtggctttggccagccattgt

SEQ ID NO: 4970594 - DNA, 25 bp, Homo sapien
cctgaagctttctccggagactggc

SEQ ID NO: 4970595 - DNA, 25 bp, Homo sapien
agctttctccggagactggctcccg

SEQ ID NO: 4970596 - DNA, 25 bp, Homo sapien
tgaagctttctccggagactggctc

SEQ ID NO: 4970597 - DNA, 25 bp, Homo sapien
aagctttctccggagactggctccc

SEQ ID NO: 4970598 - DNA, 25 bp, Homo sapien
ccttagaaatagcattcacaggaca

SEQ ID NO: 4970599 - DNA, 25 bp, Homo sapien
attcatctcagctggttcacccttc

SEQ ID NO: 4970600 - DNA, 25 bp, Homo sapien
aatagcattcacaggacaaccaaag

SEQ ID NO: 4970601 - DNA, 25 bp, Homo sapien
attcacaggacaaccaaagtcagtg

SEQ ID NO: 4970602 - DNA, 25 bp, Homo sapien
agccctagggaagtgtggaacttcg

SEQ ID NO: 4970603 - DNA, 25 bp, Homo sapien
aagaaggatcctggccaagatgctt

SEQ ID NO: 4970604 - DNA, 25 bp, Homo sapien
catgatgtgcataaagtgaatagcc

SEQ ID NO: 4970605 - DNA, 25 bp, Homo sapien
cattctagtcctagactttggcaaa

SEQ ID NO: 4970606 - DNA, 25 bp, Homo sapien
gatctggtcattcgcaagtgacctc

SEQ ID NO: 4970607 - DNA, 25 bp, Homo sapien
atctggtcattcgcaagtgacctct

SEQ ID NO: 4970608 - DNA, 25 bp, Homo sapien
tagatctggtcattcgcaagtgacc

SEQ ID NO: 4970609 - DNA, 25 bp, Homo sapien
ttagatctggtcattcgcaagtgac

SEQ ID NO: 4970610 - DNA, 25 bp, Homo sapien
ggaagcgccactccctttatttcaa

SEQ ID NO: 4970611 - DNA, 25 bp, Homo sapien
ggtcactcctggtgagcacaagcaa

SEQ ID NO: 4970612 - DNA, 25 bp, Homo sapien
ccagagcgtcggatcttcggtcact

SEQ ID NO: 4970613 - DNA, 25 bp, Homo sapien
gcacaagcaagtgagagctcaggct

SEQ ID NO: 4970614 - DNA, 25 bp, Homo sapien
taagtactgagtccagcttcatcac

SEQ ID NO: 4970615 - DNA, 25 bp, Homo sapien
ctggtaagtactgagtccagcttca

SEQ ID NO: 4970616 - DNA, 25 bp, Homo sapien
ctgagtccagcttcatcacaaccat

SEQ ID NO: 4970617 - DNA, 25 bp, Homo sapien
tactgagtccagcttcatcacaacc

SEQ ID NO: 4970618 - DNA, 25 bp, Homo sapien
tttctacgacctttggcaatccatc

SEQ ID NO: 4970619 - DNA, 25 bp, Homo sapien
agcactttcaaacgcattcactcca

SEQ ID NO: 4970620 - DNA, 25 bp, Homo sapien
tttttctacgacctttggcaatcca

SEQ ID NO: 4970621 - DNA, 25 bp, Homo sapien
gagctttctagtcaacaaagcactt

SEQ ID NO: 4970622 - DNA, 25 bp, Homo sapien
tgtaaagacttagcagtctgatctg

SEQ ID NO: 4970623 - DNA, 25 bp, Homo sapien
gaaggaaaccgtgaagttctctctc

SEQ ID NO: 4970624 - DNA, 25 bp, Homo sapien
gaagaaaaacaagcacgtcaaagtc

SEQ ID NO: 4970625 - DNA, 25 bp, Homo sapien
cgtcaaagtctaactttcggatgtg

SEQ ID NO: 4970626 - DNA, 25 bp, Homo sapien
tgcagaaagatttcgaggtctgaac

SEQ ID NO: 4970627 - DNA, 25 bp, Homo sapien
atgcacgctgcctgggagaagacaa

SEQ ID NO: 4970628 - DNA, 25 bp, Homo sapien
tctctgaccaccgataccggcaaga

SEQ ID NO: 4970629 - DNA, 25 bp, Homo sapien
attgcaagtgtgacccagtatgggc

SEQ ID NO: 4970630 - DNA, 25 bp, Homo sapien
gcagttatccattagagactcttga

SEQ ID NO: 4970631 - DNA, 25 bp, Homo sapien
gactttttaaaatgtgcgcctctca

SEQ ID NO: 4970632 - DNA, 25 bp, Homo sapien
gagtacaagcaaaagataaacacct

SEQ ID NO: 4970633 - DNA, 25 bp, Homo sapien
tctgtcccactactggatacagttg

SEQ ID NO: 4970634 - DNA, 25 bp, Homo sapien
acacagcacagggatttggccaagt

SEQ ID NO: 4970635 - DNA, 25 bp, Homo sapien
cagcacagggatttggccaagtcaa

SEQ ID NO: 4970636 - DNA, 25 bp, Homo sapien
tttggccaagtcaacagtcagtaaa

SEQ ID NO: 4970637 - DNA, 25 bp, Homo sapien
cagggatttggccaagtcaacagtc

SEQ ID NO: 4970638 - DNA, 25 bp, Homo sapien
caaaatgctaattggagaaccaggt

SEQ ID NO: 4970639 - DNA, 25 bp, Homo sapien
gatgccaggactcggaatgagcaaa

SEQ ID NO: 4970640 - DNA, 25 bp, Homo sapien
tatctctatcagtgggggatgccag

SEQ ID NO: 4970641 - DNA, 25 bp, Homo sapien
ttaggagggcaaagcccaaaatgct

SEQ ID NO: 4970642 - DNA, 25 bp, Homo sapien
ttcaacgataacctggctgtaaggg

SEQ ID NO: 4970643 - DNA, 25 bp, Homo sapien
ttttcaacgataacctggctgtaag

SEQ ID NO: 4970644 - DNA, 25 bp, Homo sapien
tatttttcaacgataacctggctgt

SEQ ID NO: 4970645 - DNA, 25 bp, Homo sapien
ttatttttcaacgataacctggctg

SEQ ID NO: 4970646 - DNA, 25 bp, Homo sapien
tcggcatcgccttcttccaattaga

SEQ ID NO: 4970647 - DNA, 25 bp, Homo sapien
taatgatttactgatcggcatcgcc

SEQ ID NO: 4970648 - DNA, 25 bp, Homo sapien
tactgatcggcatcgccttcttcca

SEQ ID NO: 4970649 - DNA, 25 bp, Homo sapien
gccccacgtttctgcaaatgtcata

SEQ ID NO: 4970650 - DNA, 25 bp, Homo sapien
cgttgctcaggaagataaacctcta

SEQ ID NO: 4970651 - DNA, 25 bp, Homo sapien
gagtctctccggattcgttgctcag

SEQ ID NO: 4970652 - DNA, 25 bp, Homo sapien
gagattcgggctgagtgtctcacca

SEQ ID NO: 4970653 - DNA, 25 bp, Homo sapien
gactagcaggcctcactgtagggca

SEQ ID NO: 4970654 - DNA, 25 bp, Homo sapien
tagacccacacaagtatgcccaagt

SEQ ID NO: 4970655 - DNA, 25 bp, Homo sapien
tcataagactcagcacagcaaaggg

SEQ ID NO: 4970656 - DNA, 25 bp, Homo sapien
gatcaatagaacagaggaacgaacc

SEQ ID NO: 4970657 - DNA, 25 bp, Homo sapien
taatatataagcaggacttgcatgc

SEQ ID NO: 4970658 - DNA, 25 bp, Homo sapien
tcttgactccattaggagatcctga

SEQ ID NO: 4970659 - DNA, 25 bp, Homo sapien
cggcatctcccaagatggggttggg

SEQ ID NO: 4970660 - DNA, 25 bp, Homo sapien
ctcttgactccattaggagatcctg

SEQ ID NO: 4970661 - DNA, 25 bp, Homo sapien
ctcccacaaggaggccggagcaaag

SEQ ID NO: 4970662 - DNA, 25 bp, Homo sapien
cccagagcggaggagaaagaattct

SEQ ID NO: 4970663 - DNA, 25 bp, Homo sapien
aagcaagattcaagtcagggtcccc

SEQ ID NO: 4970664 - DNA, 25 bp, Homo sapien
cgtatcatctggacactcttgggaa

SEQ ID NO: 4970665 - DNA, 25 bp, Homo sapien
tgaacaccgggagtaagcaagctct

SEQ ID NO: 4970666 - DNA, 25 bp, Homo sapien
tcccattcagccatggctccaaatt

SEQ ID NO: 4970667 - DNA, 25 bp, Homo sapien
ccccagcattgtatgatgaaggaat

SEQ ID NO: 4970668 - DNA, 25 bp, Homo sapien
aaattcgcgatctagcaaaggaggg

SEQ ID NO: 4970669 - DNA, 25 bp, Homo sapien
tgtcaatgggcaggacagtccttct

SEQ ID NO: 4970670 - DNA, 25 bp, Homo sapien
tccccaagaagactgccgtctacac

SEQ ID NO: 4970671 - DNA, 25 bp, Homo sapien
gaaatcttgcaatcctgaagcctct

SEQ ID NO: 4970672 - DNA, 25 bp, Homo sapien
agagacagtagctgaaatcttgcaa

SEQ ID NO: 4970673 - DNA, 25 bp, Homo sapien
tagctgaaatcttgcaatcctgaag

SEQ ID NO: 4970674 - DNA, 25 bp, Homo sapien
gatgcatttccattatactatgagg

SEQ ID NO: 4970675 - DNA, 25 bp, Homo sapien
gggatgccagtgctagcatctctga

SEQ ID NO: 4970676 - DNA, 25 bp, Homo sapien
tcattttgtatggacattcaggcca

SEQ ID NO: 4970677 - DNA, 25 bp, Homo sapien
tgtatgttctagagttctttagcag

SEQ ID NO: 4970678 - DNA, 25 bp, Homo sapien
gccagccatgtttccaggggtagga

SEQ ID NO: 4970679 - DNA, 25 bp, Homo sapien
aggatccttccagcatgatgagaat

SEQ ID NO: 4970680 - DNA, 25 bp, Homo sapien
atccttccagcatgatgagaatact

SEQ ID NO: 4970681 - DNA, 25 bp, Homo sapien
cagccatgtttccaggggtaggaca

SEQ ID NO: 4970682 - DNA, 25 bp, Homo sapien
gacccagttagagcccaggcaaagg

SEQ ID NO: 4970683 - DNA, 25 bp, Homo sapien
tcacacaacctagacccagttagag

SEQ ID NO: 4970684 - DNA, 25 bp, Homo sapien
tagaggttcacacaacctagaccca

SEQ ID NO: 4970685 - DNA, 25 bp, Homo sapien
caacctagacccagttagagcccag

SEQ ID NO: 4970686 - DNA, 25 bp, Homo sapien
tgcaagtgcttcacagctcattggc

SEQ ID NO: 4970687 - DNA, 25 bp, Homo sapien
agggccacgtactggaggatttcac

SEQ ID NO: 4970688 - DNA, 25 bp, Homo sapien
cattggctgtgcatgccaaacagga

SEQ ID NO: 4970689 - DNA, 25 bp, Homo sapien
tgagcaagcaggcacagactaggcc

SEQ ID NO: 4970690 - DNA, 25 bp, Homo sapien
cagctcttggctcaattctgtttca

SEQ ID NO: 4970691 - DNA, 25 bp, Homo sapien
catttgcactatctctggtgtcctg

SEQ ID NO: 4970692 - DNA, 25 bp, Homo sapien
gagtcctcaggaaatgtacagtcac

SEQ ID NO: 4970693 - DNA, 25 bp, Homo sapien
cagaaagcatggctagggagtcctc

SEQ ID NO: 4970694 - DNA, 25 bp, Homo sapien
caggaaatgtacagtcacggtggaa

SEQ ID NO: 4970695 - DNA, 25 bp, Homo sapien
gaaagcatggctagggagtcctcag

SEQ ID NO: 4970696 - DNA, 25 bp, Homo sapien
tgtggaatcttagaaatcttgtgac

SEQ ID NO: 4970697 - DNA, 25 bp, Homo sapien
gactcatgataccaggttgctgcat

SEQ ID NO: 4970698 - DNA, 25 bp, Homo sapien
gctaaagtgggcctgattgactcat

SEQ ID NO: 4970699 - DNA, 25 bp, Homo sapien
acattggatcacgtgcctgggcaca

SEQ ID NO: 4970700 - DNA, 25 bp, Homo sapien
agtttggtgtgctcaagctccccca

SEQ ID NO: 4970701 - DNA, 25 bp, Homo sapien
tctctagtaaaagccagtttggtgt

SEQ ID NO: 4970702 - DNA, 25 bp, Homo sapien
atgtgatgccctgcaatgcttcagg

SEQ ID NO: 4970703 - DNA, 25 bp, Homo sapien
cctgcaatgcttcagggttctgcag

SEQ ID NO: 4970704 - DNA, 25 bp, Homo sapien
gatggctctatgtcctatcagttga

SEQ ID NO: 4970705 - DNA, 25 bp, Homo sapien
tggtccacagggataggtcagccgt

SEQ ID NO: 4970706 - DNA, 25 bp, Homo sapien
tgtggctcatgtacgctttgatggc

SEQ ID NO: 4970707 - DNA, 25 bp, Homo sapien
aaggcttccaaggatgactctggga

SEQ ID NO: 4970708 - DNA, 25 bp, Homo sapien
ttttgactgtggataatttgcctct

SEQ ID NO: 4970709 - DNA, 25 bp, Homo sapien
tatgttttacataaaccccacacac

SEQ ID NO: 4970710 - DNA, 25 bp, Homo sapien
ttttgcagaagtagatatgtctttc

SEQ ID NO: 4970711 - DNA, 25 bp, Homo sapien
gggtatatgtccatactcacaggcc

SEQ ID NO: 4970712 - DNA, 25 bp, Homo sapien
gggcgaatccatatagacagagggt

SEQ ID NO: 4970713 - DNA, 25 bp, Homo sapien
gacagagggtcgaatagagattacc

SEQ ID NO: 4970714 - DNA, 25 bp, Homo sapien
tcaaacagacgccaatattcacagc

SEQ ID NO: 4970715 - DNA, 25 bp, Homo sapien
tgaggtacctagaacgggcgaatcc

SEQ ID NO: 4970716 - DNA, 25 bp, Homo sapien
cacccttgcatctctggataaatga

SEQ ID NO: 4970717 - DNA, 25 bp, Homo sapien
agcacccttgcatctctggataaat

SEQ ID NO: 4970718 - DNA, 25 bp, Homo sapien
cccttgcatctctggataaatgaaa

SEQ ID NO: 4970719 - DNA, 25 bp, Homo sapien
ccttgcatctctggataaatgaaat

SEQ ID NO: 4970720 - DNA, 25 bp, Homo sapien
tatctcagtgcagtccctagggaaa

SEQ ID NO: 4970721 - DNA, 25 bp, Homo sapien
ggatgaaccctaaactaagagccaa

SEQ ID NO: 4970722 - DNA, 25 bp, Homo sapien
aaaactgctgcctgttaacttgctc

SEQ ID NO: 4970723 - DNA, 25 bp, Homo sapien
aatttcctactctcacgactgttgg

SEQ ID NO: 4970724 - DNA, 25 bp, Homo sapien
gtagacgagtgtggcagacatgctt

SEQ ID NO: 4970725 - DNA, 25 bp, Homo sapien
ccatggtcagcaggtagacgagtgt

SEQ ID NO: 4970726 - DNA, 25 bp, Homo sapien
tgcttcgccctatttctgggtccat

SEQ ID NO: 4970727 - DNA, 25 bp, Homo sapien
atgaggttcacccatggtcagcagg

SEQ ID NO: 4970728 - DNA, 25 bp, Homo sapien
tcctctcagcctcatatagcaggtg

SEQ ID NO: 4970729 - DNA, 25 bp, Homo sapien
tgttctttgtgtggacggcttgtga

SEQ ID NO: 4970730 - DNA, 25 bp, Homo sapien
gcttgtgatttaatagcaagtgtgg

SEQ ID NO: 4970731 - DNA, 25 bp, Homo sapien
gtgggtagatttcaactgggctctc

SEQ ID NO: 4970732 - DNA, 25 bp, Homo sapien
cccagatgctgagccaatgctacgt

SEQ ID NO: 4970733 - DNA, 25 bp, Homo sapien
gaaatgagtggctgactcagacctg

SEQ ID NO: 4970734 - DNA, 25 bp, Homo sapien
cttgcgaggtgtggatcagactgta

SEQ ID NO: 4970735 - DNA, 25 bp, Homo sapien
tctaattgtgctgctgccgttggcc

SEQ ID NO: 4970736 - DNA, 25 bp, Homo sapien
cccagaatccttgggacggtcatgg

SEQ ID NO: 4970737 - DNA, 25 bp, Homo sapien
tagttaaccaatcttgggccccaga

SEQ ID NO: 4970738 - DNA, 25 bp, Homo sapien
tcatggtcaattgagctgtggatac

SEQ ID NO: 4970739 - DNA, 25 bp, Homo sapien
tggtcttagttaaccaatcttgggc

SEQ ID NO: 4970740 - DNA, 25 bp, Homo sapien
gtttctggaacaccctccatcccca

SEQ ID NO: 4970741 - DNA, 25 bp, Homo sapien
catccccagcaagagttctcagata

SEQ ID NO: 4970742 - DNA, 25 bp, Homo sapien
tccccagcaagagttctcagatagc

SEQ ID NO: 4970743 - DNA, 25 bp, Homo sapien
tccatccccagcaagagttctcaga

SEQ ID NO: 4970744 - DNA, 25 bp, Homo sapien
agtgaccaccattgtgatggggatg

SEQ ID NO: 4970745 - DNA, 25 bp, Homo sapien
ccagaccataggggtccagtgacca

SEQ ID NO: 4970746 - DNA, 25 bp, Homo sapien
ggtccagtgaccaccattgtgatgg

SEQ ID NO: 4970747 - DNA, 25 bp, Homo sapien
gggtccagtgaccaccattgtgatg

SEQ ID NO: 4970748 - DNA, 25 bp, Homo sapien
taacaagctcttttagtgacactag

SEQ ID NO: 4970749 - DNA, 25 bp, Homo sapien
ttgtaccaaaactagccccactctg

SEQ ID NO: 4970750 - DNA, 25 bp, Homo sapien
cagccgtaggtgtggaatccagcct

SEQ ID NO: 4970751 - DNA, 25 bp, Homo sapien
acacaagatgatgacagccgtaggt

SEQ ID NO: 4970752 - DNA, 25 bp, Homo sapien
ataactccttgtccagactcacata

SEQ ID NO: 4970753 - DNA, 25 bp, Homo sapien
gactcacataacaaagatcccagtt

SEQ ID NO: 4970754 - DNA, 25 bp, Homo sapien
gatcccagttgcaggatctgctcat

SEQ ID NO: 4970755 - DNA, 25 bp, Homo sapien
tgtccagactcacataacaaagatc

SEQ ID NO: 4970756 - DNA, 25 bp, Homo sapien
gatggttttctgaaggttcctcctc

SEQ ID NO: 4970757 - DNA, 25 bp, Homo sapien
gacgatggccactttacactcaggt

SEQ ID NO: 4970758 - DNA, 25 bp, Homo sapien
tttcctcaggtagggccagttgacg

SEQ ID NO: 4970759 - DNA, 25 bp, Homo sapien
ggaaatgttcaccttttggctagat

SEQ ID NO: 4970760 - DNA, 25 bp, Homo sapien
cctttggtattctcagaaccaggac

SEQ ID NO: 4970761 - DNA, 25 bp, Homo sapien
tccctttggtattctcagaaccagg

SEQ ID NO: 4970762 - DNA, 25 bp, Homo sapien
gatccctttggtattctcagaacca

SEQ ID NO: 4970763 - DNA, 25 bp, Homo sapien
ccctttggtattctcagaaccagga

SEQ ID NO: 4970764 - DNA, 25 bp, Homo sapien
ctgacaagctgcgggactggaaccc

SEQ ID NO: 4970765 - DNA, 25 bp, Homo sapien
cacggctgcacaaagctggtaacaa

SEQ ID NO: 4970766 - DNA, 25 bp, Homo sapien
tgtgactttagatcagagtcaacac

SEQ ID NO: 4970767 - DNA, 25 bp, Homo sapien
gagtcaacacctctgtttggaggca

SEQ ID NO: 4970768 - DNA, 25 bp, Homo sapien
tctggaccggcaatgtcagagccct

SEQ ID NO: 4970769 - DNA, 25 bp, Homo sapien
aacaattctgtagcccacgtgggag

SEQ ID NO: 4970770 - DNA, 25 bp, Homo sapien
gcctttgctcaaagctaactctagc

SEQ ID NO: 4970771 - DNA, 25 bp, Homo sapien
tgtagcccacgtgggagaagacctt

SEQ ID NO: 4970772 - DNA, 25 bp, Homo sapien
ttccttcctgattccttacactggg

SEQ ID NO: 4970773 - DNA, 25 bp, Homo sapien
cttccgactattccttcctgattcc

SEQ ID NO: 4970774 - DNA, 25 bp, Homo sapien
tccgactattccttcctgattcctt

SEQ ID NO: 4970775 - DNA, 25 bp, Homo sapien
ccttcctgattccttacactgggtg

SEQ ID NO: 4970776 - DNA, 25 bp, Homo sapien
tggaaattttgtagaggactgaagc

SEQ ID NO: 4970777 - DNA, 25 bp, Homo sapien
tagaggactgaagcatcttattccc

SEQ ID NO: 4970778 - DNA, 25 bp, Homo sapien
tattcccgcctcctgggtgaacttg

SEQ ID NO: 4970779 - DNA, 25 bp, Homo sapien
aagcatcttattcccgcctcctggg

SEQ ID NO: 4970780 - DNA, 25 bp, Homo sapien
cctgtcctgggtttgcctttcccag

SEQ ID NO: 4970781 - DNA, 25 bp, Homo sapien
tcttggggtccataacagccccagg

SEQ ID NO: 4970782 - DNA, 25 bp, Homo sapien
ctaatactccttccagcaccctctt

SEQ ID NO: 4970783 - DNA, 25 bp, Homo sapien
cctttcccagattttgctcctgctt

SEQ ID NO: 4970784 - DNA, 25 bp, Homo sapien
ccagtactctgctcttgaggtggtc

SEQ ID NO: 4970785 - DNA, 25 bp, Homo sapien
gtactctgctcttgaggtggtccaa

SEQ ID NO: 4970786 - DNA, 25 bp, Homo sapien
caccccagtactctgctcttgaggt

SEQ ID NO: 4970787 - DNA, 25 bp, Homo sapien
ttacacgaatgtgaagccagctatg

SEQ ID NO: 4970788 - DNA, 25 bp, Homo sapien
cacatcctccaactcagctctatcc

SEQ ID NO: 4970789 - DNA, 25 bp, Homo sapien
tttgacagagacaccaagccacatc

SEQ ID NO: 4970790 - DNA, 25 bp, Homo sapien
tcaggtccatttgacagagacacca

SEQ ID NO: 4970791 - DNA, 25 bp, Homo sapien
tttgattcacttcctgaattgtgca

SEQ ID NO: 4970792 - DNA, 25 bp, Homo sapien
ccatcagacagccataggcttgggt

SEQ ID NO: 4970793 - DNA, 25 bp, Homo sapien
gacagccataggcttgggttatgca

SEQ ID NO: 4970794 - DNA, 25 bp, Homo sapien
tcagacagccataggcttgggttat

SEQ ID NO: 4970795 - DNA, 25 bp, Homo sapien
acagccataggcttgggttatgcat

SEQ ID NO: 4970796 - DNA, 25 bp, Homo sapien
aattgatagtacatccatgtcttta

SEQ ID NO: 4970797 - DNA, 25 bp, Homo sapien
ttgcccactctgcatccatccaaat

SEQ ID NO: 4970798 - DNA, 25 bp, Homo sapien
ggaaaattgatagtacatccatgtc

SEQ ID NO: 4970799 - DNA, 25 bp, Homo sapien
gcccactctgcatccatccaaatca

SEQ ID NO: 4970800 - DNA, 25 bp, Homo sapien
ctcatgtggctcttggtggtccagc

SEQ ID NO: 4970801 - DNA, 25 bp, Homo sapien
gacatccacaaagccacaactgctt

SEQ ID NO: 4970802 - DNA, 25 bp, Homo sapien
aactccagacgccacggatattctc

SEQ ID NO: 4970803 - DNA, 25 bp, Homo sapien
ttttatggtgttgttcatcatgtca

SEQ ID NO: 4970804 - DNA, 25 bp, Homo sapien
tgggaaagctagacctagaaccgga

SEQ ID NO: 4970805 - DNA, 25 bp, Homo sapien
ttgggctgctaaaccaagggataga

SEQ ID NO: 4970806 - DNA, 25 bp, Homo sapien
tagaaccggattagtttgggctgct

SEQ ID NO: 4970807 - DNA, 25 bp, Homo sapien
gaagcataatccatgtgttccactg

SEQ ID NO: 4970808 - DNA, 25 bp, Homo sapien
cacattctggggatggcttaactct

SEQ ID NO: 4970809 - DNA, 25 bp, Homo sapien
gggatggcttaactcttaatttgac

SEQ ID NO: 4970810 - DNA, 25 bp, Homo sapien
cttccaagccttgtcccacattctg

SEQ ID NO: 4970811 - DNA, 25 bp, Homo sapien
aatttgactttcaagctggtgttca

SEQ ID NO: 4970812 - DNA, 25 bp, Homo sapien
tggctaatgagggtgttgtcactgt

SEQ ID NO: 4970813 - DNA, 25 bp, Homo sapien
tgcagactctaagtatccagagagc

SEQ ID NO: 4970814 - DNA, 25 bp, Homo sapien
tgaatctcagatctggcaccatccg

SEQ ID NO: 4970815 - DNA, 25 bp, Homo sapien
ggtcagctccgtgagtgctccagag

SEQ ID NO: 4970816 - DNA, 25 bp, Homo sapien
ttggcactggcaacatatggcttgg

SEQ ID NO: 4970817 - DNA, 25 bp, Homo sapien
gttggcactggcaacatatggcttg

SEQ ID NO: 4970818 - DNA, 25 bp, Homo sapien
gtcaggcaagctacttcagtgccaa

SEQ ID NO: 4970819 - DNA, 25 bp, Homo sapien
tgaataatcagtctccgtttccagc

SEQ ID NO: 4970820 - DNA, 25 bp, Homo sapien
gcaagctacttcagtgccaaatgga

SEQ ID NO: 4970821 - DNA, 25 bp, Homo sapien
gtctctgtgaataatcagtctccgt

SEQ ID NO: 4970822 - DNA, 25 bp, Homo sapien
agcagcatgtattaagccacgtgca

SEQ ID NO: 4970823 - DNA, 25 bp, Homo sapien
ggtgtcacggccagtttccccaaga

SEQ ID NO: 4970824 - DNA, 25 bp, Homo sapien
taagccacgtgcattggtgtcacgg

SEQ ID NO: 4970825 - DNA, 25 bp, Homo sapien
gtcacggccagtttccccaagacaa

SEQ ID NO: 4970826 - DNA, 25 bp, Homo sapien
ctatgttgcccaaagtatttttcca

SEQ ID NO: 4970827 - DNA, 25 bp, Homo sapien
caaagtatttttccataactgaaag

SEQ ID NO: 4970828 - DNA, 25 bp, Homo sapien
tgttgcccaaagtatttttccataa

SEQ ID NO: 4970829 - DNA, 25 bp, Homo sapien
gcccaaagtatttttccataactga

SEQ ID NO: 4970830 - DNA, 25 bp, Homo sapien
cgagttcaaggtttcttttctatag

SEQ ID NO: 4970831 - DNA, 25 bp, Homo sapien
ggtcaggcttcgagttcaaggtttc

SEQ ID NO: 4970832 - DNA, 25 bp, Homo sapien
tcgagttcaaggtttcttttctata

SEQ ID NO: 4970833 - DNA, 25 bp, Homo sapien
caggcttcgagttcaaggtttcttt

SEQ ID NO: 4970834 - DNA, 25 bp, Homo sapien
aggatctgtcactcgtcccacaagg

SEQ ID NO: 4970835 - DNA, 25 bp, Homo sapien
tttggcgtaaccatccaggatctgt

SEQ ID NO: 4970836 - DNA, 25 bp, Homo sapien
taggtttcttggcaccttctggcct

SEQ ID NO: 4970837 - DNA, 25 bp, Homo sapien
gaggcaacgtcactttccttgtagg

SEQ ID NO: 4970838 - DNA, 25 bp, Homo sapien
gccatccttgcacagccaccacgct

SEQ ID NO: 4970839 - DNA, 25 bp, Homo sapien
cccaggtaatagctctccaggttaa

SEQ ID NO: 4970840 - DNA, 25 bp, Homo sapien
tattcctatgcaggtcacagtggtg

SEQ ID NO: 4970841 - DNA, 25 bp, Homo sapien
cccttgtggatccaggacaattcca

SEQ ID NO: 4970842 - DNA, 25 bp, Homo sapien
aacacactcattgtgcccttgtgga

SEQ ID NO: 4970843 - DNA, 25 bp, Homo sapien
tgtaatcaacatgccaccagatggt

SEQ ID NO: 4970844 - DNA, 25 bp, Homo sapien
tagggcactcagcagcggttgtaac

SEQ ID NO: 4970845 - DNA, 25 bp, Homo sapien
tctgccgttgggagatagggcactc

SEQ ID NO: 4970846 - DNA, 25 bp, Homo sapien
gaagacccttttgctgaatcgatgg

SEQ ID NO: 4970847 - DNA, 25 bp, Homo sapien
aagtaacatttatttgcgcctaggc

SEQ ID NO: 4970848 - DNA, 25 bp, Homo sapien
taacatttatttgcgcctaggctaa

SEQ ID NO: 4970849 - DNA, 25 bp, Homo sapien
tttatttgcgcctaggctaatagaa

SEQ ID NO: 4970850 - DNA, 25 bp, Homo sapien
ttgcgcctaggctaatagaaagaat

SEQ ID NO: 4970851 - DNA, 25 bp, Homo sapien
gctacactggacataacaccacaga

SEQ ID NO: 4970852 - DNA, 25 bp, Homo sapien
ttcagttaccagaaggccatctcca

SEQ ID NO: 4970853 - DNA, 25 bp, Homo sapien
gcttcttagggcatcacaggtttta

SEQ ID NO: 4970854 - DNA, 25 bp, Homo sapien
tttttgccagcacagagtcattcac

SEQ ID NO: 4970855 - DNA, 25 bp, Homo sapien
tatcgtctcctggtaccaccatatc

SEQ ID NO: 4970856 - DNA, 25 bp, Homo sapien
ttatcgtctcctggtaccaccatat

SEQ ID NO: 4970857 - DNA, 25 bp, Homo sapien
tgccactaggtggaactgggctaag

SEQ ID NO: 4970858 - DNA, 25 bp, Homo sapien
taaacgttacttaagacactgtgcg

SEQ ID NO: 4970859 - DNA, 25 bp, Homo sapien
tcacaactccagtggtaagagacgt

SEQ ID NO: 4970860 - DNA, 25 bp, Homo sapien
cacacatggttgctgggaatgacag

SEQ ID NO: 4970861 - DNA, 25 bp, Homo sapien
gcttatctgccagcacacaagtgta

SEQ ID NO: 4970862 - DNA, 25 bp, Homo sapien
cagcagctcccaattaggcttgatg

SEQ ID NO: 4970863 - DNA, 25 bp, Homo sapien
ttttactgctgatggatacgtgggc

SEQ ID NO: 4970864 - DNA, 25 bp, Homo sapien
tattcttagttgcacagtaacccac

SEQ ID NO: 4970865 - DNA, 25 bp, Homo sapien
gctaagcctaaatcaaatccctgtt

SEQ ID NO: 4970866 - DNA, 25 bp, Homo sapien
taaaaccttggtctatggtagagct

SEQ ID NO: 4970867 - DNA, 25 bp, Homo sapien
taaaaccatggttgctaaacagata

SEQ ID NO: 4970868 - DNA, 25 bp, Homo sapien
taaaagtgggatctcagttaactgt

SEQ ID NO: 4970869 - DNA, 25 bp, Homo sapien
ttttcgtgtctgagtttgaacatac

SEQ ID NO: 4970870 - DNA, 25 bp, Homo sapien
ctgatgcagttctggttttcgtgtc

SEQ ID NO: 4970871 - DNA, 25 bp, Homo sapien
gcagttctggttttcgtgtctgagt

SEQ ID NO: 4970872 - DNA, 25 bp, Homo sapien
tctggttttcgtgtctgagtttgaa

SEQ ID NO: 4970873 - DNA, 25 bp, Homo sapien
cgaatagctgcccgagcctccatga

SEQ ID NO: 4970874 - DNA, 25 bp, Homo sapien
gaggataggacgggtagtaccacga

SEQ ID NO: 4970875 - DNA, 25 bp, Homo sapien
tattccacgtgccagggtaggaggg

SEQ ID NO: 4970876 - DNA, 25 bp, Homo sapien
aggataggacgggtagtaccacgag

SEQ ID NO: 4970877 - DNA, 25 bp, Homo sapien
ctattccacgtgccagggtaggagg

SEQ ID NO: 4970878 - DNA, 25 bp, Homo sapien
ttcttgtggctataatttttaaata

SEQ ID NO: 4970879 - DNA, 25 bp, Homo sapien
catttttttcttgtggctataattt

SEQ ID NO: 4970880 - DNA, 25 bp, Homo sapien
gttaggcatttttttcttgtggcta

SEQ ID NO: 4970881 - DNA, 25 bp, Homo sapien
tcttgtggctataatttttaaatac

SEQ ID NO: 4970882 - DNA, 25 bp, Homo sapien
cattctcctaccaaaccagactgtt

SEQ ID NO: 4970883 - DNA, 25 bp, Homo sapien
ccattattatggtcactgctatggg

SEQ ID NO: 4970884 - DNA, 25 bp, Homo sapien
taataggctaacgtcaccacaattt

SEQ ID NO: 4970885 - DNA, 25 bp, Homo sapien
taatatatatgaaggtgacacagga

SEQ ID NO: 4970886 - DNA, 25 bp, Homo sapien
gttcccaagcctgtccagaaccctg

SEQ ID NO: 4970887 - DNA, 25 bp, Homo sapien
cttgttgtcctgtaaaagcactgcc

SEQ ID NO: 4970888 - DNA, 25 bp, Homo sapien
agttgcaccatggccagtattctgt

SEQ ID NO: 4970889 - DNA, 25 bp, Homo sapien
aaatatcctagtattccaccagttc

SEQ ID NO: 4970890 - DNA, 25 bp, Homo sapien
catgtaaatcatgggttgggacccc

SEQ ID NO: 4970891 - DNA, 25 bp, Homo sapien
tctcaggagactaatgatgctaagc

SEQ ID NO: 4970892 - DNA, 25 bp, Homo sapien
tgaacagcaagcaagcgactgaagc

SEQ ID NO: 4970893 - DNA, 25 bp, Homo sapien
tatctggtggctaaaaataatctcc

SEQ ID NO: 4970894 - DNA, 25 bp, Homo sapien
gcgatcccaaggagtaccacaatgg

SEQ ID NO: 4970895 - DNA, 25 bp, Homo sapien
tgtgaactcagacttaaagcctggg

SEQ ID NO: 4970896 - DNA, 25 bp, Homo sapien
gaggagaatactgcccgtcactcag

SEQ ID NO: 4970897 - DNA, 25 bp, Homo sapien
catgttacaggaatccgccgaggac

SEQ ID NO: 4970898 - DNA, 25 bp, Homo sapien
atatatgttacttgggggccgggcg

SEQ ID NO: 4970899 - DNA, 25 bp, Homo sapien
gatccgcaaaattcacaatggtaag

SEQ ID NO: 4970900 - DNA, 25 bp, Homo sapien
tgttacttgggctatatatccgtca

SEQ ID NO: 4970901 - DNA, 25 bp, Homo sapien
taagtattcatgtctaagggaagga

SEQ ID NO: 4970902 - DNA, 25 bp, Homo sapien
cttatgctggatattgcgtatatga

SEQ ID NO: 4970903 - DNA, 25 bp, Homo sapien
gttctgacactgtatgacttttggg

SEQ ID NO: 4970904 - DNA, 25 bp, Homo sapien
taagaatcacaaccagctgtgcctc

SEQ ID NO: 4970905 - DNA, 25 bp, Homo sapien
aacacatttcaactgtgggatggga

SEQ ID NO: 4970906 - DNA, 25 bp, Homo sapien
gacttttggggtataagaatcacaa

SEQ ID NO: 4970907 - DNA, 25 bp, Homo sapien
catagtggagggtaagagcttttac

SEQ ID NO: 4970908 - DNA, 25 bp, Homo sapien
gagcttttacatcccgcagcaacat

SEQ ID NO: 4970909 - DNA, 25 bp, Homo sapien
tggtatagcggtcatagtggagggt

SEQ ID NO: 4970910 - DNA, 25 bp, Homo sapien
ccagcctgcgggaggtggtatagcg

SEQ ID NO: 4970911 - DNA, 25 bp, Homo sapien
tccctgcatttcaggccagatgctt

SEQ ID NO: 4970912 - DNA, 25 bp, Homo sapien
ctccctgcatttcaggccagatgct

SEQ ID NO: 4970913 - DNA, 25 bp, Homo sapien
gttcaggaccagttcagaaagtcca

SEQ ID NO: 4970914 - DNA, 25 bp, Homo sapien
cagttcaggaccagttcagaaagtc

SEQ ID NO: 4970915 - DNA, 25 bp, Homo sapien
tcaggaccagttcagaaagtccaaa

SEQ ID NO: 4970916 - DNA, 25 bp, Homo sapien
agttcaggaccagttcagaaagtcc

SEQ ID NO: 4970917 - DNA, 25 bp, Homo sapien
catgccatctttacttcgcaaagca

SEQ ID NO: 4970918 - DNA, 25 bp, Homo sapien
tgcacggaatattactgatcccatg

SEQ ID NO: 4970919 - DNA, 25 bp, Homo sapien
gcttaaattcgacaatgcaggcatt

SEQ ID NO: 4970920 - DNA, 25 bp, Homo sapien
caaatgactactcaacgtgatgtgc

SEQ ID NO: 4970921 - DNA, 25 bp, Homo sapien
aaaaaaaagagtgcaatctgcgatt

SEQ ID NO: 4970922 - DNA, 25 bp, Homo sapien
gcagtgcggccggggcgacaatgtg

SEQ ID NO: 4970923 - DNA, 25 bp, Homo sapien
aaaaaaaaagagtgcaatctgcgat

SEQ ID NO: 4970924 - DNA, 25 bp, Homo sapien
cagtgcggccggggcgacaatgtga

SEQ ID NO: 4970925 - DNA, 25 bp, Homo sapien
acaatgggcaaattccgggagtccg

SEQ ID NO: 4970926 - DNA, 25 bp, Homo sapien
cagatgcgcaggtgagtgtccagct

SEQ ID NO: 4970927 - DNA, 25 bp, Homo sapien
gaacagcaaagaggtcagacatggg

SEQ ID NO: 4970928 - DNA, 25 bp, Homo sapien
gagatgagaaagacgacaatgggca

SEQ ID NO: 4970929 - DNA, 25 bp, Homo sapien
gggcccgcggtcagcagaaacaaat

SEQ ID NO: 4970930 - DNA, 25 bp, Homo sapien
ccgaggagcaagcagtacccggccg

SEQ ID NO: 4970931 - DNA, 25 bp, Homo sapien
aggagcaagcagtacccggccgctc

SEQ ID NO: 4970932 - DNA, 25 bp, Homo sapien
aagccgaggagcaagcagtacccgg

SEQ ID NO: 4970933 - DNA, 25 bp, Homo sapien
gagctgcagccgcaacggatccgtg

SEQ ID NO: 4970934 - DNA, 25 bp, Homo sapien
aacctgggtgcggtagcgcgcgcga

SEQ ID NO: 4970935 - DNA, 25 bp, Homo sapien
cgctcgatgaagatggcgccgggct

SEQ ID NO: 4970936 - DNA, 25 bp, Homo sapien
aaggaacggcccgactgcagagctg

SEQ ID NO: 4970937 - DNA, 25 bp, Homo sapien
tcgttggccagaatggcgggtctcc

SEQ ID NO: 4970938 - DNA, 25 bp, Homo sapien
gggtaagtgccgcaaaatcccgcga

SEQ ID NO: 4970939 - DNA, 25 bp, Homo sapien
gcaaaatcccgcgaagagcgccagt

SEQ ID NO: 4970940 - DNA, 25 bp, Homo sapien
cctcctctcccggagaagtgtggag

SEQ ID NO: 4970941 - DNA, 25 bp, Homo sapien
caatgtgaaattaagccaaaagcca

SEQ ID NO: 4970942 - DNA, 25 bp, Homo sapien
tgcagtagccgtgatcacactccag

SEQ ID NO: 4970943 - DNA, 25 bp, Homo sapien
actgcgaggccgacgtgagagaatc

SEQ ID NO: 4970944 - DNA, 25 bp, Homo sapien
caaggtgctgcaagcgaagaaacca

SEQ ID NO: 4970945 - DNA, 25 bp, Homo sapien
gaccggccctgacaggaattcaaga

SEQ ID NO: 4970946 - DNA, 25 bp, Homo sapien
cttcccaacgcacgcgggaggttgc

SEQ ID NO: 4970947 - DNA, 25 bp, Homo sapien
ttcaagacctggcgcctgctcattc

SEQ ID NO: 4970948 - DNA, 25 bp, Homo sapien
tcacacgtgcatccaaaggacggcc

SEQ ID NO: 4970949 - DNA, 25 bp, Homo sapien
gagccaggagcgacgtcaccgccat

SEQ ID NO: 4970950 - DNA, 25 bp, Homo sapien
cgtagcgcgtcttgggtctcccggc

SEQ ID NO: 4970951 - DNA, 25 bp, Homo sapien
gccgcctcgggtcgtggagccagga

SEQ ID NO: 4970952 - DNA, 25 bp, Homo sapien
tgtctggccgccgtagcgcgtcttg

SEQ ID NO: 4970953 - DNA, 25 bp, Homo sapien
caggacgaaatatcggcgtgtggct

SEQ ID NO: 4970954 - DNA, 25 bp, Homo sapien
tctgttctggatgtcagtgcagtgc

SEQ ID NO: 4970955 - DNA, 25 bp, Homo sapien
aaaaattcccagtaaccaggcatga

SEQ ID NO: 4970956 - DNA, 25 bp, Homo sapien
tgcaggtacacatgagttagagagc

SEQ ID NO: 4970957 - DNA, 25 bp, Homo sapien
ggagcacagtccctctctgaagtgg

SEQ ID NO: 4970958 - DNA, 25 bp, Homo sapien
tacatgccgcattccaggtactact

SEQ ID NO: 4970959 - DNA, 25 bp, Homo sapien
ctatgtcatgaggtagttatgctga

SEQ ID NO: 4970960 - DNA, 25 bp, Homo sapien
gaaattccgcatttggtttcagctt

SEQ ID NO: 4970961 - DNA, 25 bp, Homo sapien
tatcgaagccaattcatctccaagc

SEQ ID NO: 4970962 - DNA, 25 bp, Homo sapien
gctttttgattctgacacgatgatc

SEQ ID NO: 4970963 - DNA, 25 bp, Homo sapien
tgttgctctggtgggtcttgtgcca

SEQ ID NO: 4970964 - DNA, 25 bp, Homo sapien
caggatgtgagaattcctttggagc

SEQ ID NO: 4970965 - DNA, 25 bp, Homo sapien
aggttctggaggcagaccacccaac

SEQ ID NO: 4970966 - DNA, 25 bp, Homo sapien
cctggagggtttacatggtagcaca

SEQ ID NO: 4970967 - DNA, 25 bp, Homo sapien
acccaacttctagctcttcttgatg

SEQ ID NO: 4970968 - DNA, 25 bp, Homo sapien
ctagtggtgtaaccttagccgagtt

SEQ ID NO: 4970969 - DNA, 25 bp, Homo sapien
ccattatgggccggagagaacatgt

SEQ ID NO: 4970970 - DNA, 25 bp, Homo sapien
tccattatgggccggagagaacatg

SEQ ID NO: 4970971 - DNA, 25 bp, Homo sapien
cattatgggccggagagaacatgtt

SEQ ID NO: 4970972 - DNA, 25 bp, Homo sapien
cctccattatgggccggagagaaca

SEQ ID NO: 4970973 - DNA, 25 bp, Homo sapien
aattgtctgtgaggcattttgtttg

SEQ ID NO: 4970974 - DNA, 25 bp, Homo sapien
taaatatatgctgcattacatccct

SEQ ID NO: 4970975 - DNA, 25 bp, Homo sapien
taattgtctgtgaggcattttgttt

SEQ ID NO: 4970976 - DNA, 25 bp, Homo sapien
atcacagtgagaaaccagacgatga

SEQ ID NO: 4970977 - DNA, 25 bp, Homo sapien
gtgagaaaccagacgatgactttgg

SEQ ID NO: 4970978 - DNA, 25 bp, Homo sapien
tcacagtgagaaaccagacgatgac

SEQ ID NO: 4970979 - DNA, 25 bp, Homo sapien
cagtgagaaaccagacgatgacttt

SEQ ID NO: 4970980 - DNA, 25 bp, Homo sapien
caggacattcatgcgcaccattgtg

SEQ ID NO: 4970981 - DNA, 25 bp, Homo sapien
ccaggacattcatgcgcaccattgt

SEQ ID NO: 4970982 - DNA, 25 bp, Homo sapien
catgcgcaccattgtggcggcgcag

SEQ ID NO: 4970983 - DNA, 25 bp, Homo sapien
attcatgcgcaccattgtggcggcg

SEQ ID NO: 4970984 - DNA, 25 bp, Homo sapien
ttaaggcactcgatgtaacatatcc

SEQ ID NO: 4970985 - DNA, 25 bp, Homo sapien
tccagattggccatgaaactaaacc

SEQ ID NO: 4970986 - DNA, 25 bp, Homo sapien
cacttgaatcttatgaactgcacaa

SEQ ID NO: 4970987 - DNA, 25 bp, Homo sapien
gtatcacttgaatcttatgaactgc

SEQ ID NO: 4970988 - DNA, 25 bp, Homo sapien
gggatagatgtcaccctagataagc

SEQ ID NO: 4970989 - DNA, 25 bp, Homo sapien
aaagagcgggaaggcgttacgcact

SEQ ID NO: 4970990 - DNA, 25 bp, Homo sapien
caaccagatcatgtgaaagctcact

SEQ ID NO: 4970991 - DNA, 25 bp, Homo sapien
gattggtttggaatactcaacaagc

SEQ ID NO: 4970992 - DNA, 25 bp, Homo sapien
gatacacaaattcctactgcaagtc

SEQ ID NO: 4970993 - DNA, 25 bp, Homo sapien
catctagactgtaaaccttaaggga

SEQ ID NO: 4970994 - DNA, 25 bp, Homo sapien
gaatagcttgctaaagtagatacac

SEQ ID NO: 4970995 - DNA, 25 bp, Homo sapien
tcactgggtatatccatccaaaact

SEQ ID NO: 4970996 - DNA, 25 bp, Homo sapien
ttgtgctttctcttcgccaatagca

SEQ ID NO: 4970997 - DNA, 25 bp, Homo sapien
tctcttcgccaatagcaaaagcaga

SEQ ID NO: 4970998 - DNA, 25 bp, Homo sapien
gaatacagtacaccatgggaaagac

SEQ ID NO: 4970999 - DNA, 25 bp, Homo sapien
ctgttgtacgaattacagagcaacc

SEQ ID NO: 4971000 - DNA, 25 bp, Homo sapien
tatagaacagcctcatcggccagga

SEQ ID NO: 4971001 - DNA, 25 bp, Homo sapien
tgctggaatacaagccgtcggagcc

SEQ ID NO: 4971002 - DNA, 25 bp, Homo sapien
tggacccttgaacacgagcctgaaa

SEQ ID NO: 4971003 - DNA, 25 bp, Homo sapien
gcaaatgtctgcaacaacggccaag

SEQ ID NO: 4971004 - DNA, 25 bp, Homo sapien
tgtccagagagagggacgtgaccct

SEQ ID NO: 4971005 - DNA, 25 bp, Homo sapien
gaccctctgggtcaagagcatgaga

SEQ ID NO: 4971006 - DNA, 25 bp, Homo sapien
tcccctcacaaatgtccagagagag

SEQ ID NO: 4971007 - DNA, 25 bp, Homo sapien
agtgccttacacacatgctcagaca

SEQ ID NO: 4971008 - DNA, 25 bp, Homo sapien
gcaagataattttttaaagaacata

SEQ ID NO: 4971009 - DNA, 25 bp, Homo sapien
ctgcaagataattttttaaagaaca

SEQ ID NO: 4971010 - DNA, 25 bp, Homo sapien
tgcaagataattttttaaagaacat

SEQ ID NO: 4971011 - DNA, 25 bp, Homo sapien
tgacacactctacagtcagaaatgc

SEQ ID NO: 4971012 - DNA, 25 bp, Homo sapien
acacactctacagtcagaaatgctg

SEQ ID NO: 4971013 - DNA, 25 bp, Homo sapien
acactctacagtcagaaatgctgtc

SEQ ID NO: 4971014 - DNA, 25 bp, Homo sapien
aatgacacactctacagtcagaaat

SEQ ID NO: 4971015 - DNA, 25 bp, Homo sapien
ccttcttcagcaagatgggaacagc

SEQ ID NO: 4971016 - DNA, 25 bp, Homo sapien
ctacccttcttcagcaagatgggaa

SEQ ID NO: 4971017 - DNA, 25 bp, Homo sapien
ttcttcagcaagatgggaacagctg

SEQ ID NO: 4971018 - DNA, 25 bp, Homo sapien
acccttcttcagcaagatgggaaca

SEQ ID NO: 4971019 - DNA, 25 bp, Homo sapien
agaaggaggctcatgcagataatac

SEQ ID NO: 4971020 - DNA, 25 bp, Homo sapien
ctcacagaaggaggctcatgcagat

SEQ ID NO: 4971021 - DNA, 25 bp, Homo sapien
cacagaaggaggctcatgcagataa

SEQ ID NO: 4971022 - DNA, 25 bp, Homo sapien
cagaaggaggctcatgcagataata

SEQ ID NO: 4971023 - DNA, 25 bp, Homo sapien
tcagtgtagtgcagacctaggtgac

SEQ ID NO: 4971024 - DNA, 25 bp, Homo sapien
tgaagacgagcacggcgtaggaacc

SEQ ID NO: 4971025 - DNA, 25 bp, Homo sapien
ggtccacctgtggacttgctgagga

SEQ ID NO: 4971026 - DNA, 25 bp, Homo sapien
cctaggtgacacaaggtctgccagc

SEQ ID NO: 4971027 - DNA, 25 bp, Homo sapien
tggcacgagtggagaatgaatccat

SEQ ID NO: 4971028 - DNA, 25 bp, Homo sapien
ctggcacgagtggagaatgaatcca

SEQ ID NO: 4971029 - DNA, 25 bp, Homo sapien
tgcagagataattgaagagaagtgc

SEQ ID NO: 4971030 - DNA, 25 bp, Homo sapien
gatgcagagataattgaagagaagt

SEQ ID NO: 4971031 - DNA, 25 bp, Homo sapien
cagagataattgaagagaagtgcaa

SEQ ID NO: 4971032 - DNA, 25 bp, Homo sapien
gaagtgcaaagggaaatgcagcccc

SEQ ID NO: 4971033 - DNA, 25 bp, Homo sapien
ggtaaaacgatataggatggagaaa

SEQ ID NO: 4971034 - DNA, 25 bp, Homo sapien
gtaaaacgatataggatggagaaag

SEQ ID NO: 4971035 - DNA, 25 bp, Homo sapien
ctggtaaaacgatataggatggaga

SEQ ID NO: 4971036 - DNA, 25 bp, Homo sapien
tggtaaaacgatataggatggagaa

SEQ ID NO: 4971037 - DNA, 25 bp, Homo sapien
tgccttcctccaagagtaatctcaa

SEQ ID NO: 4971038 - DNA, 25 bp, Homo sapien
gctagggtgagcaaaaggcaaacaa

SEQ ID NO: 4971039 - DNA, 25 bp, Homo sapien
caaacaaaagctctggagataagca

SEQ ID NO: 4971040 - DNA, 25 bp, Homo sapien
ggctgtctctggtctttttatctgg

SEQ ID NO: 4971041 - DNA, 25 bp, Homo sapien
gaattatcgctctacccaggcggtg

SEQ ID NO: 4971042 - DNA, 25 bp, Homo sapien
tctatgcagggctaaagtccgcggg

SEQ ID NO: 4971043 - DNA, 25 bp, Homo sapien
tagggtctacccatctctatgcagg

SEQ ID NO: 4971044 - DNA, 25 bp, Homo sapien
aacaagagtcgcaagcttccgggtc

SEQ ID NO: 4971045 - DNA, 25 bp, Homo sapien
cataatcggcggtgcttggcgccgc

SEQ ID NO: 4971046 - DNA, 25 bp, Homo sapien
ccaatggtggcgactcagaaggtgt

SEQ ID NO: 4971047 - DNA, 25 bp, Homo sapien
tctcatcctgggcattcgggccgaa

SEQ ID NO: 4971048 - DNA, 25 bp, Homo sapien
ggaacctgttcctggtcgccaatgg

SEQ ID NO: 4971049 - DNA, 25 bp, Homo sapien
cattttttgccaggcgtggagtgga

SEQ ID NO: 4971050 - DNA, 25 bp, Homo sapien
gttatcgcgtaaggtaatggcctcc

SEQ ID NO: 4971051 - DNA, 25 bp, Homo sapien
tgctgggtccaatggtacttgtgtt

SEQ ID NO: 4971052 - DNA, 25 bp, Homo sapien
tagctctatatggattgctgggtcc

SEQ ID NO: 4971053 - DNA, 25 bp, Homo sapien
tctctagcgatttaaagtttatcac

SEQ ID NO: 4971054 - DNA, 25 bp, Homo sapien
aggaaagaaatctctagcgatttaa

SEQ ID NO: 4971055 - DNA, 25 bp, Homo sapien
aagttagcacagattataacataag

SEQ ID NO: 4971056 - DNA, 25 bp, Homo sapien
taacataagaagtggtaatacattt

SEQ ID NO: 4971057 - DNA, 25 bp, Homo sapien
caaactcctgactcaaaatttaatt

SEQ ID NO: 4971058 - DNA, 25 bp, Homo sapien
ctcaaactcctgactcaaaatttaa

SEQ ID NO: 4971059 - DNA, 25 bp, Homo sapien
tcaaactcctgactcaaaatttaat

SEQ ID NO: 4971060 - DNA, 25 bp, Homo sapien
tcttgagtcctcattctactaaagc

SEQ ID NO: 4971061 - DNA, 25 bp, Homo sapien
tggaattaggtgtgggtaaagcaac

SEQ ID NO: 4971062 - DNA, 25 bp, Homo sapien
ttatgagtgtgaagagagtaatctc

SEQ ID NO: 4971063 - DNA, 25 bp, Homo sapien
aaagcaaccgtgaatgtttgggagg

SEQ ID NO: 4971064 - DNA, 25 bp, Homo sapien
tcaatcagcctgataccagatcctt

SEQ ID NO: 4971065 - DNA, 25 bp, Homo sapien
ttctgatcgtgagaagaggactttt

SEQ ID NO: 4971066 - DNA, 25 bp, Homo sapien
tcacacacacatgcggctcttctga

SEQ ID NO: 4971067 - DNA, 25 bp, Homo sapien
tgcctaactgctgcatgtcatgacc

SEQ ID NO: 4971068 - DNA, 25 bp, Homo sapien
ggaaggacaggctcaagcatgcagt

SEQ ID NO: 4971069 - DNA, 25 bp, Homo sapien
gagagcaaggacctcctatttgcca

SEQ ID NO: 4971070 - DNA, 25 bp, Homo sapien
tgttgaggacatgcagtaatgacct

SEQ ID NO: 4971071 - DNA, 25 bp, Homo sapien
aaatatttatactcggttctgccac

SEQ ID NO: 4971072 - DNA, 25 bp, Homo sapien
ctcccatcaaaggtgaggctctcat

SEQ ID NO: 4971073 - DNA, 25 bp, Homo sapien
ctccttgcctcttgttgtagcaggg

SEQ ID NO: 4971074 - DNA, 25 bp, Homo sapien
gtagcaggggttgctgttcctccca

SEQ ID NO: 4971075 - DNA, 25 bp, Homo sapien
gggttgctgttcctcccatcaaagg

SEQ ID NO: 4971076 - DNA, 25 bp, Homo sapien
aagacccaagaaggagcttaaggct

SEQ ID NO: 4971077 - DNA, 25 bp, Homo sapien
gatttgggtacttcagcatatatgt

SEQ ID NO: 4971078 - DNA, 25 bp, Homo sapien
aaatgcttggccactacaactccag

SEQ ID NO: 4971079 - DNA, 25 bp, Homo sapien
aattccttgagctatacactgaaga

SEQ ID NO: 4971080 - DNA, 25 bp, Homo sapien
aatcatgttcctgccctcttgtagc

SEQ ID NO: 4971081 - DNA, 25 bp, Homo sapien
ctagcgtgacatcccatagccggtc

SEQ ID NO: 4971082 - DNA, 25 bp, Homo sapien
gcagttgctgcccatctgtacctca

SEQ ID NO: 4971083 - DNA, 25 bp, Homo sapien
atagccggtcatgccaacctgagac

SEQ ID NO: 4971084 - DNA, 25 bp, Homo sapien
tgagctcacatagctctgtgccctc

SEQ ID NO: 4971085 - DNA, 25 bp, Homo sapien
ggtggtgatccattgatctgctcca

SEQ ID NO: 4971086 - DNA, 25 bp, Homo sapien
tgtgccctccttgaggaaattctgg

SEQ ID NO: 4971087 - DNA, 25 bp, Homo sapien
gctgcttgcaggcattgagatatct

SEQ ID NO: 4971088 - DNA, 25 bp, Homo sapien
cgtcatatggattctcaattttctg

SEQ ID NO: 4971089 - DNA, 25 bp, Homo sapien
tttctgctgcacctcccggctcagg

SEQ ID NO: 4971090 - DNA, 25 bp, Homo sapien
cccggctcaggccacacgcaggtac

SEQ ID NO: 4971091 - DNA, 25 bp, Homo sapien
ctgcgtcatatggattctcaatttt

SEQ ID NO: 4971092 - DNA, 25 bp, Homo sapien
ccattccaatgggtagtggcggctg

SEQ ID NO: 4971093 - DNA, 25 bp, Homo sapien
gccattccaatgggtagtggcggct

SEQ ID NO: 4971094 - DNA, 25 bp, Homo sapien
tccaatgggtagtggcggctgtggg

SEQ ID NO: 4971095 - DNA, 25 bp, Homo sapien
attccaatgggtagtggcggctgtg

SEQ ID NO: 4971096 - DNA, 25 bp, Homo sapien
tactggccctcttccagatggtctg

SEQ ID NO: 4971097 - DNA, 25 bp, Homo sapien
gtcctggttccagattttactggcc

SEQ ID NO: 4971098 - DNA, 25 bp, Homo sapien
tatctacagtcttccagtcaccagg

SEQ ID NO: 4971099 - DNA, 25 bp, Homo sapien
taaagctggtaagggctatctacag

SEQ ID NO: 4971100 - DNA, 25 bp, Homo sapien
tcactcccagctgcagtgaaaggct

SEQ ID NO: 4971101 - DNA, 25 bp, Homo sapien
ctcactcccagctgcagtgaaaggc

SEQ ID NO: 4971102 - DNA, 25 bp, Homo sapien
ctcccagctgcagtgaaaggctcat

SEQ ID NO: 4971103 - DNA, 25 bp, Homo sapien
actcccagctgcagtgaaaggctca

SEQ ID NO: 4971104 - DNA, 25 bp, Homo sapien
gcaggtgttcgcctctggtccagtc

SEQ ID NO: 4971105 - DNA, 25 bp, Homo sapien
ctctggccactccagtgtttccaga

SEQ ID NO: 4971106 - DNA, 25 bp, Homo sapien
agagcagagggtatcctgtaatatc

SEQ ID NO: 4971107 - DNA, 25 bp, Homo sapien
tccagtcagcaataggcaagagcag

SEQ ID NO: 4971108 - DNA, 25 bp, Homo sapien
ttgcctaaccccttcctggagtcca

SEQ ID NO: 4971109 - DNA, 25 bp, Homo sapien
gtggctgctccttgcctaacccctt

SEQ ID NO: 4971110 - DNA, 25 bp, Homo sapien
tctgtgtgggtggcggcggtgctac

SEQ ID NO: 4971111 - DNA, 25 bp, Homo sapien
ggtggcggcggtgctaccttccatt

SEQ ID NO: 4971112 - DNA, 25 bp, Homo sapien
cagagcagcgagagacttttactga

SEQ ID NO: 4971113 - DNA, 25 bp, Homo sapien
tcaacgccagcatcccggttactag

SEQ ID NO: 4971114 - DNA, 25 bp, Homo sapien
atcccggttactagatggcagagac

SEQ ID NO: 4971115 - DNA, 25 bp, Homo sapien
tactgaaatgattggactcaacgcc

SEQ ID NO: 4971116 - DNA, 25 bp, Homo sapien
ataggcggacagaaacaactatcat

SEQ ID NO: 4971117 - DNA, 25 bp, Homo sapien
ggataggcggacagaaacaactatc

SEQ ID NO: 4971118 - DNA, 25 bp, Homo sapien
gataggcggacagaaacaactatca

SEQ ID NO: 4971119 - DNA, 25 bp, Homo sapien
ggcatccctgcattgcactcagttc

SEQ ID NO: 4971120 - DNA, 25 bp, Homo sapien
ggtctctgctgacagcgcacagggc

SEQ ID NO: 4971121 - DNA, 25 bp, Homo sapien
caactccgatggcatccctgcattg

SEQ ID NO: 4971122 - DNA, 25 bp, Homo sapien
cagacccatgcaaagtgctgatgga

SEQ ID NO: 4971123 - DNA, 25 bp, Homo sapien
cctctcgctgacatgcgttggctca

SEQ ID NO: 4971124 - DNA, 25 bp, Homo sapien
cgctgacatgcgttggctcagagca

SEQ ID NO: 4971125 - DNA, 25 bp, Homo sapien
gctcagagcaatgttcagtgaagga

SEQ ID NO: 4971126 - DNA, 25 bp, Homo sapien
cgcgtcctctcgctgacatgcgttg

SEQ ID NO: 4971127 - DNA, 25 bp, Homo sapien
ttccagaagatggagtaagagagta

SEQ ID NO: 4971128 - DNA, 25 bp, Homo sapien
tactctggagtctttaatactcaac

SEQ ID NO: 4971129 - DNA, 25 bp, Homo sapien
caactgtccactgcagtgatggaaa

SEQ ID NO: 4971130 - DNA, 25 bp, Homo sapien
tcctggcattcctttgtcgttttcc

SEQ ID NO: 4971131 - DNA, 25 bp, Homo sapien
tatctgctggacgatagctccctcc

SEQ ID NO: 4971132 - DNA, 25 bp, Homo sapien
ctattttatctgctggacgatagct

SEQ ID NO: 4971133 - DNA, 25 bp, Homo sapien
tggtatgacattcctctcactctcc

SEQ ID NO: 4971134 - DNA, 25 bp, Homo sapien
cctggtatgacattcctctcactct

SEQ ID NO: 4971135 - DNA, 25 bp, Homo sapien
tttcatcaactctcggcagcttcca

SEQ ID NO: 4971136 - DNA, 25 bp, Homo sapien
tgttcacgcgcctttcccaatcctt

SEQ ID NO: 4971137 - DNA, 25 bp, Homo sapien
cctgctcaacatgctctaggatctt

SEQ ID NO: 4971138 - DNA, 25 bp, Homo sapien
atgtccacaccattctgttcacgcg

SEQ ID NO: 4971139 - DNA, 25 bp, Homo sapien
agtacacggactgctgggcctcaga

SEQ ID NO: 4971140 - DNA, 25 bp, Homo sapien
aagtacacggactgctgggcctcag

SEQ ID NO: 4971141 - DNA, 25 bp, Homo sapien
ggaagtacacggactgctgggcctc

SEQ ID NO: 4971142 - DNA, 25 bp, Homo sapien
gaagtacacggactgctgggcctca

SEQ ID NO: 4971143 - DNA, 25 bp, Homo sapien
catttatccgagagggctcggatcc

SEQ ID NO: 4971144 - DNA, 25 bp, Homo sapien
gctgaacttagatttacaacctgac

SEQ ID NO: 4971145 - DNA, 25 bp, Homo sapien
ccactttctgaagccaggttcacac

SEQ ID NO: 4971146 - DNA, 25 bp, Homo sapien
taacaccaggaaatctatcttcagc

SEQ ID NO: 4971147 - DNA, 25 bp, Homo sapien
ggccttgcagctattttctggtgac

SEQ ID NO: 4971148 - DNA, 25 bp, Homo sapien
tgtccaagcctgttccgtatccaaa

SEQ ID NO: 4971149 - DNA, 25 bp, Homo sapien
tttctggtgacatgtgcccttggct

SEQ ID NO: 4971150 - DNA, 25 bp, Homo sapien
aaatccttgtgtaagactctggcct

SEQ ID NO: 4971151 - DNA, 25 bp, Homo sapien
aggaagatgtcatttgtgtgctctg

SEQ ID NO: 4971152 - DNA, 25 bp, Homo sapien
ggtccaggacatcgggtagagaaca

SEQ ID NO: 4971153 - DNA, 25 bp, Homo sapien
catcgggtagagaacaggttgtgaa

SEQ ID NO: 4971154 - DNA, 25 bp, Homo sapien
tgtgaaggagccctagacagctggc

SEQ ID NO: 4971155 - DNA, 25 bp, Homo sapien
tgggcgagagagcagttcgacacca

SEQ ID NO: 4971156 - DNA, 25 bp, Homo sapien
caagtggaagcttcagttgggattg

SEQ ID NO: 4971157 - DNA, 25 bp, Homo sapien
tcagttgggattgggcgagagagca

SEQ ID NO: 4971158 - DNA, 25 bp, Homo sapien
aaaacaagtggaagcttcagttggg

SEQ ID NO: 4971159 - DNA, 25 bp, Homo sapien
catatttagaaagctcctgaaattg

SEQ ID NO: 4971160 - DNA, 25 bp, Homo sapien
gaaagtccacagattatcacagaat

SEQ ID NO: 4971161 - DNA, 25 bp, Homo sapien
tgtacatatttagaaagctcctgaa

SEQ ID NO: 4971162 - DNA, 25 bp, Homo sapien
catcattcaatacgaaagtccacag

SEQ ID NO: 4971163 - DNA, 25 bp, Homo sapien
caaagcggtatttctgtataactga

SEQ ID NO: 4971164 - DNA, 25 bp, Homo sapien
tcccaaagcggtatttctgtataac

SEQ ID NO: 4971165 - DNA, 25 bp, Homo sapien
tttcccaaagcggtatttctgtata

SEQ ID NO: 4971166 - DNA, 25 bp, Homo sapien
actgtttcccaaagcggtatttctg

SEQ ID NO: 4971167 - DNA, 25 bp, Homo sapien
ctccgcctagcaccttcaagcaact

SEQ ID NO: 4971168 - DNA, 25 bp, Homo sapien
ccgcctagcaccttcaagcaactct

SEQ ID NO: 4971169 - DNA, 25 bp, Homo sapien
aagctccgcctagcaccttcaagca

SEQ ID NO: 4971170 - DNA, 25 bp, Homo sapien
gcctagcaccttcaagcaactctcc

SEQ ID NO: 4971171 - DNA, 25 bp, Homo sapien
cctgtacccgaagcactccatggct

SEQ ID NO: 4971172 - DNA, 25 bp, Homo sapien
tgtacccgaagcactccatggcttc

SEQ ID NO: 4971173 - DNA, 25 bp, Homo sapien
agtcaatcttgcagtgcagatgaaa

SEQ ID NO: 4971174 - DNA, 25 bp, Homo sapien
ttgccatccaaccagtcaatcttgc

SEQ ID NO: 4971175 - DNA, 25 bp, Homo sapien
ttcatacataccctgacacagaacc

SEQ ID NO: 4971176 - DNA, 25 bp, Homo sapien
gtgctattgtggcttgtgaagttca

SEQ ID NO: 4971177 - DNA, 25 bp, Homo sapien
tattgtggcttgtgaagttcataca

SEQ ID NO: 4971178 - DNA, 25 bp, Homo sapien
gcttgtgaagttcatacataccctg

SEQ ID NO: 4971179 - DNA, 25 bp, Homo sapien
tctcgccgtcaatggcgatgtcaaa

SEQ ID NO: 4971180 - DNA, 25 bp, Homo sapien
ggtggggttgactgtgacttgtggc

SEQ ID NO: 4971181 - DNA, 25 bp, Homo sapien
caaagtctcgccgtcaatggcgatg

SEQ ID NO: 4971182 - DNA, 25 bp, Homo sapien
agctcaaagtctcgccgtcaatggc

SEQ ID NO: 4971183 - DNA, 25 bp, Homo sapien
gaccgcatctccgtgtactacagtg

SEQ ID NO: 4971184 - DNA, 25 bp, Homo sapien
tatgttcctcgtgccatactggtgg

SEQ ID NO: 4971185 - DNA, 25 bp, Homo sapien
gatctagaacctgggaccatggact

SEQ ID NO: 4971186 - DNA, 25 bp, Homo sapien
gatgaacatggcatcgaccccactg

SEQ ID NO: 4971187 - DNA, 25 bp, Homo sapien
accgtgatcgagtcctacaatgcta

SEQ ID NO: 4971188 - DNA, 25 bp, Homo sapien
tgatcgagtcctacaatgctaccct

SEQ ID NO: 4971189 - DNA, 25 bp, Homo sapien
cgtgatcgagtcctacaatgctacc

SEQ ID NO: 4971190 - DNA, 25 bp, Homo sapien
caccgtgatcgagtcctacaatgct

SEQ ID NO: 4971191 - DNA, 25 bp, Homo sapien
cgcactctgagggtgaccacaccaa

SEQ ID NO: 4971192 - DNA, 25 bp, Homo sapien
tgatatctgcttccgcactctgagg

SEQ ID NO: 4971193 - DNA, 25 bp, Homo sapien
tgcttccgcactctgagggtgacca

SEQ ID NO: 4971194 - DNA, 25 bp, Homo sapien
ttccgcactctgagggtgaccacac

SEQ ID NO: 4971195 - DNA, 25 bp, Homo sapien
ttcccttagccgtcttactcaactg

SEQ ID NO: 4971196 - DNA, 25 bp, Homo sapien
ctcagttcccttagccgtcttactc

SEQ ID NO: 4971197 - DNA, 25 bp, Homo sapien
tgtgtttgctgcctctatcttgttt

SEQ ID NO: 4971198 - DNA, 25 bp, Homo sapien
gtttgctgcctctatcttgtttttt

SEQ ID NO: 4971199 - DNA, 25 bp, Homo sapien
aatgtaagagtgttccagttgtccc

SEQ ID NO: 4971200 - DNA, 25 bp, Homo sapien
ccagtctttggaggttatacataag

SEQ ID NO: 4971201 - DNA, 25 bp, Homo sapien
taattagcatctccccaatgatgaa

SEQ ID NO: 4971202 - DNA, 25 bp, Homo sapien
tgtcccacattcttatcagtccttg

SEQ ID NO: 4971203 - DNA, 25 bp, Homo sapien
tccagatggtatcagctgcggcagc

SEQ ID NO: 4971204 - DNA, 25 bp, Homo sapien
catgtgggcctctgatcatgatcag

SEQ ID NO: 4971205 - DNA, 25 bp, Homo sapien
ggctggagcaaccactctcaagata

SEQ ID NO: 4971206 - DNA, 25 bp, Homo sapien
tctcaagatagttcactcagagggc

SEQ ID NO: 4971207 - DNA, 25 bp, Homo sapien
caataacttctttggctcagccgaa

SEQ ID NO: 4971208 - DNA, 25 bp, Homo sapien
tagacaatcacaacacacatggtag

SEQ ID NO: 4971209 - DNA, 25 bp, Homo sapien
caataaaatacagcccctctggcct

SEQ ID NO: 4971210 - DNA, 25 bp, Homo sapien
tcagccgaagggttaatagacaatc

SEQ ID NO: 4971211 - DNA, 25 bp, Homo sapien
atcccttggttacagcgaaattccg

SEQ ID NO: 4971212 - DNA, 25 bp, Homo sapien
tggtcttcagcacaactattacagg

SEQ ID NO: 4971213 - DNA, 25 bp, Homo sapien
tcgaaggtcaggcaatacagtaggt

SEQ ID NO: 4971214 - DNA, 25 bp, Homo sapien
taaggcaagcctcgaaatgaacact

SEQ ID NO: 4971215 - DNA, 25 bp, Homo sapien
ctcaatggtgggattttatctttta

SEQ ID NO: 4971216 - DNA, 25 bp, Homo sapien
gtgatctggttcacagcaatctctg

SEQ ID NO: 4971217 - DNA, 25 bp, Homo sapien
cggcctcaatggtgggattttatct

SEQ ID NO: 4971218 - DNA, 25 bp, Homo sapien
tgatctggttcacagcaatctctgc

SEQ ID NO: 4971219 - DNA, 25 bp, Homo sapien
acagtgctagcatcatgggccacca

SEQ ID NO: 4971220 - DNA, 25 bp, Homo sapien
ttttgttgggcccatgccgggatcc

SEQ ID NO: 4971221 - DNA, 25 bp, Homo sapien
tgctccatgacaggcaagaatggcc

SEQ ID NO: 4971222 - DNA, 25 bp, Homo sapien
ttattgctcgggaagacattgcccc

SEQ ID NO: 4971223 - DNA, 25 bp, Homo sapien
tatacctttgtagcagtcaaatcta

SEQ ID NO: 4971224 - DNA, 25 bp, Homo sapien
caaatctaagagtttaacacggtgg

SEQ ID NO: 4971225 - DNA, 25 bp, Homo sapien
gggcagaacccactgatatatggag

SEQ ID NO: 4971226 - DNA, 25 bp, Homo sapien
tatatggagttccacatttatacct

SEQ ID NO: 4971227 - DNA, 25 bp, Homo sapien
tttttcaagcgtgcttccagcctct

SEQ ID NO: 4971228 - DNA, 25 bp, Homo sapien
gcctctgaagttcctccgtacggac

SEQ ID NO: 4971229 - DNA, 25 bp, Homo sapien
tttcacggatgaggaaacaagtacg

SEQ ID NO: 4971230 - DNA, 25 bp, Homo sapien
tcgaaaactcgaggagacacattca

SEQ ID NO: 4971231 - DNA, 25 bp, Homo sapien
cccaaattgcgtaactccaaggact

SEQ ID NO: 4971232 - DNA, 25 bp, Homo sapien
tttttgtgtccacgcgcgtctgcgg

SEQ ID NO: 4971233 - DNA, 25 bp, Homo sapien
agaaggttcaggcatggcccgtgcc

SEQ ID NO: 4971234 - DNA, 25 bp, Homo sapien
tctcgggagcgtgtgtttttgtgtc

SEQ ID NO: 4971235 - DNA, 25 bp, Homo sapien
gaagagtaggatgagcctttggcca

SEQ ID NO: 4971236 - DNA, 25 bp, Homo sapien
ctttgctcaaaactcaggaacctgt

SEQ ID NO: 4971237 - DNA, 25 bp, Homo sapien
tgccaaccctgcacctaaaaggaaa

SEQ ID NO: 4971238 - DNA, 25 bp, Homo sapien
gatcaagctaccataaaatctggag

SEQ ID NO: 4971239 - DNA, 25 bp, Homo sapien
tgggagcctaggtggtggttcttca

SEQ ID NO: 4971240 - DNA, 25 bp, Homo sapien
tgggcagaacgacacccaatgtgat

SEQ ID NO: 4971241 - DNA, 25 bp, Homo sapien
ggttcttcaggagtgcgtggcttca

SEQ ID NO: 4971242 - DNA, 25 bp, Homo sapien
gcgtggcttcaagtcccctaaagga

SEQ ID NO: 4971243 - DNA, 25 bp, Homo sapien
tgtaacaattggtaagataccaatt

SEQ ID NO: 4971244 - DNA, 25 bp, Homo sapien
tatggtatacgattggcatatgttt

SEQ ID NO: 4971245 - DNA, 25 bp, Homo sapien
ttgtatatggtatacgattggcata

SEQ ID NO: 4971246 - DNA, 25 bp, Homo sapien
tacatcatttaaactcctaatttga

SEQ ID NO: 4971247 - DNA, 25 bp, Homo sapien
tctaccagtgttgtaccagggctct

SEQ ID NO: 4971248 - DNA, 25 bp, Homo sapien
gttcattgcagctatcccaagtggg

SEQ ID NO: 4971249 - DNA, 25 bp, Homo sapien
cagggaattctatgatcgcagcaag

SEQ ID NO: 4971250 - DNA, 25 bp, Homo sapien
caggtctccgagcagttgaaatgta

SEQ ID NO: 4971251 - DNA, 25 bp, Homo sapien
tcttaaaggcattgaacaggctgag

SEQ ID NO: 4971252 - DNA, 25 bp, Homo sapien
ggtagcaggcttgcgtaataggacc

SEQ ID NO: 4971253 - DNA, 25 bp, Homo sapien
tttctaaaagtcaagggagcgagga

SEQ ID NO: 4971254 - DNA, 25 bp, Homo sapien
gatcgttgatccctttgagagtctg

SEQ ID NO: 4971255 - DNA, 25 bp, Homo sapien
gagactgaccgtaagtggaaccagg

SEQ ID NO: 4971256 - DNA, 25 bp, Homo sapien
gtcattacttttatcaggtacagag

SEQ ID NO: 4971257 - DNA, 25 bp, Homo sapien
tctgtcctccctgtacaatgaagga

SEQ ID NO: 4971258 - DNA, 25 bp, Homo sapien
ttatcaggtacagagtataaccaag

SEQ ID NO: 4971259 - DNA, 25 bp, Homo sapien
ggatcctggagccttgcaggttttt

SEQ ID NO: 4971260 - DNA, 25 bp, Homo sapien
gcaggtttttctcagctcattccca

SEQ ID NO: 4971261 - DNA, 25 bp, Homo sapien
tcattcccactcctttcaccctcac

SEQ ID NO: 4971262 - DNA, 25 bp, Homo sapien
ctaggatcctggagccttgcaggtt

SEQ ID NO: 4971263 - DNA, 25 bp, Homo sapien
tccagggatccgcatctcttcgttt

SEQ ID NO: 4971264 - DNA, 25 bp, Homo sapien
tttgccttcgtctggctgagccggg

SEQ ID NO: 4971265 - DNA, 25 bp, Homo sapien
gggtttctggcgctttatcttctgt

SEQ ID NO: 4971266 - DNA, 25 bp, Homo sapien
tgtttctgtaaaccttcgcagccag

SEQ ID NO: 4971267 - DNA, 25 bp, Homo sapien
taagtattctcgtccacacagttgg

SEQ ID NO: 4971268 - DNA, 25 bp, Homo sapien
cccgaaccggctgttggaagtgcga

SEQ ID NO: 4971269 - DNA, 25 bp, Homo sapien
ttggcgataagctctccgaccgtga

SEQ ID NO: 4971270 - DNA, 25 bp, Homo sapien
tcctccgtacggaaagcagttgtga

SEQ ID NO: 4971271 - DNA, 25 bp, Homo sapien
cctacacttgatagatggagcagag

SEQ ID NO: 4971272 - DNA, 25 bp, Homo sapien
gattacacctcacaccctgagcagg

SEQ ID NO: 4971273 - DNA, 25 bp, Homo sapien
tgtaagccagtatgacctacacttg

SEQ ID NO: 4971274 - DNA, 25 bp, Homo sapien
caggtgatattgctagtgtcctcca

SEQ ID NO: 4971275 - DNA, 25 bp, Homo sapien
tagagatggagtttaatagagagac

SEQ ID NO: 4971276 - DNA, 25 bp, Homo sapien
tttaatagagagactattgtctcga

SEQ ID NO: 4971277 - DNA, 25 bp, Homo sapien
ggagtttaatagagagactattgtc

SEQ ID NO: 4971278 - DNA, 25 bp, Homo sapien
tagagagactattgtctcgatctcc

SEQ ID NO: 4971279 - DNA, 25 bp, Homo sapien
catgttgttgcaaacggtaggatcc

SEQ ID NO: 4971280 - DNA, 25 bp, Homo sapien
tgagtatcatgtgggcataatgtcc

SEQ ID NO: 4971281 - DNA, 25 bp, Homo sapien
tccaattcatgtatacaccacattt

SEQ ID NO: 4971282 - DNA, 25 bp, Homo sapien
tgtgagtaacctaaattatatgagt

SEQ ID NO: 4971283 - DNA, 25 bp, Homo sapien
ggaacccagattgtttgtcctgtaa

SEQ ID NO: 4971284 - DNA, 25 bp, Homo sapien
tatcttgcaagaatacctggtagtg

SEQ ID NO: 4971285 - DNA, 25 bp, Homo sapien
taaccaagtggctagacaagaaaag

SEQ ID NO: 4971286 - DNA, 25 bp, Homo sapien
tagtgtgtacttcaatcaagaggca

SEQ ID NO: 4971287 - DNA, 25 bp, Homo sapien
taagatcttaaatgccctgtggtca

SEQ ID NO: 4971288 - DNA, 25 bp, Homo sapien
agttctggtctgttgaggccctgcc

SEQ ID NO: 4971289 - DNA, 25 bp, Homo sapien
tctgagggctacgtggaaaatgctt

SEQ ID NO: 4971290 - DNA, 25 bp, Homo sapien
agtatttggccctgtacttctgagg

SEQ ID NO: 4971291 - DNA, 25 bp, Homo sapien
tttccatgtcagtgcttgggaaccc

SEQ ID NO: 4971292 - DNA, 25 bp, Homo sapien
ataaaatgtaaacctgtgggtgtct

SEQ ID NO: 4971293 - DNA, 25 bp, Homo sapien
agtgcttgggaaccctcacaactgg

SEQ ID NO: 4971294 - DNA, 25 bp, Homo sapien
tcacaactggcaggtaacggggtcg

SEQ ID NO: 4971295 - DNA, 25 bp, Homo sapien
aacacacctgtcttttgtccacttc

SEQ ID NO: 4971296 - DNA, 25 bp, Homo sapien
gagggagctcccatgttgaatttgt

SEQ ID NO: 4971297 - DNA, 25 bp, Homo sapien
aacataccaacctactgcagaccag

SEQ ID NO: 4971298 - DNA, 25 bp, Homo sapien
aaactatttcttgacgacctttgag

SEQ ID NO: 4971299 - DNA, 25 bp, Homo sapien
tgtgcgttctgccacgaagttctat

SEQ ID NO: 4971300 - DNA, 25 bp, Homo sapien
tctgccacgaagttctatgcgcttc

SEQ ID NO: 4971301 - DNA, 25 bp, Homo sapien
caagctttgtgcgttctgccacgaa

SEQ ID NO: 4971302 - DNA, 25 bp, Homo sapien
aagttctatgcgcttcactgagctc

SEQ ID NO: 4971303 - DNA, 25 bp, Homo sapien
tgggctcggacctcagtagcacctg

SEQ ID NO: 4971304 - DNA, 25 bp, Homo sapien
ccttgtggtctagaccttgtccctg

SEQ ID NO: 4971305 - DNA, 25 bp, Homo sapien
caggatgtactcacagtcctaggac

SEQ ID NO: 4971306 - DNA, 25 bp, Homo sapien
tgtactcacagtcctaggaccttgt

SEQ ID NO: 4971307 - DNA, 25 bp, Homo sapien
tggaagatccggcaagagcacaagg

SEQ ID NO: 4971308 - DNA, 25 bp, Homo sapien
cgtgactggaagatccggcaagagc

SEQ ID NO: 4971309 - DNA, 25 bp, Homo sapien
tgactggaagatccggcaagagcac

SEQ ID NO: 4971310 - DNA, 25 bp, Homo sapien
aagatccggcaagagcacaaggcca

SEQ ID NO: 4971311 - DNA, 25 bp, Homo sapien
cttctgggctgctcatggtggtcat

SEQ ID NO: 4971312 - DNA, 25 bp, Homo sapien
ccagcagcacttctgggctgctcat

SEQ ID NO: 4971313 - DNA, 25 bp, Homo sapien
cttctccactcccagcagcacttct

SEQ ID NO: 4971314 - DNA, 25 bp, Homo sapien
cacttctgggctgctcatggtggtc

SEQ ID NO: 4971315 - DNA, 25 bp, Homo sapien
ttagatagcctttcaccagcctagg

SEQ ID NO: 4971316 - DNA, 25 bp, Homo sapien
tcctcagtagggtgaacagagggcc

SEQ ID NO: 4971317 - DNA, 25 bp, Homo sapien
gaatcgcaaagtagtcctggccagg

SEQ ID NO: 4971318 - DNA, 25 bp, Homo sapien
ggaattcgctgtgccggatcttagc

SEQ ID NO: 4971319 - DNA, 25 bp, Homo sapien
tagcagtgcatcttttccgagagga

SEQ ID NO: 4971320 - DNA, 25 bp, Homo sapien
acatctgtacatggtgggtgcgcca

SEQ ID NO: 4971321 - DNA, 25 bp, Homo sapien
caagcaggaccctccgtgagaatgg

SEQ ID NO: 4971322 - DNA, 25 bp, Homo sapien
caggctagtgtgagtgggtaccatc

SEQ ID NO: 4971323 - DNA, 25 bp, Homo sapien
gaagttctcatcacgcaggaggccg

SEQ ID NO: 4971324 - DNA, 25 bp, Homo sapien
gaagaccccttctgtgttcgcaaag

SEQ ID NO: 4971325 - DNA, 25 bp, Homo sapien
aggccggcccttttggatgagctca

SEQ ID NO: 4971326 - DNA, 25 bp, Homo sapien
gacactagagctgaactcgcgcagg

SEQ ID NO: 4971327 - DNA, 25 bp, Homo sapien
tcagccatgtgctagagagcccaga

SEQ ID NO: 4971328 - DNA, 25 bp, Homo sapien
caagctgagggcatgtacaggccat

SEQ ID NO: 4971329 - DNA, 25 bp, Homo sapien
gagttactgctcatgatcctgcaag

SEQ ID NO: 4971330 - DNA, 25 bp, Homo sapien
cacatgtacaggagagggagttact

SEQ ID NO: 4971331 - DNA, 25 bp, Homo sapien
gtagttacagcctccccagattgga

SEQ ID NO: 4971332 - DNA, 25 bp, Homo sapien
tagaagaaagccacctgtccatgtc

SEQ ID NO: 4971333 - DNA, 25 bp, Homo sapien
tacctaaggctaatacggtgagcag

SEQ ID NO: 4971334 - DNA, 25 bp, Homo sapien
ggtgcacccaccaaccagtatgagg

SEQ ID NO: 4971335 - DNA, 25 bp, Homo sapien
caactgttgttgaggtcccaggagc

SEQ ID NO: 4971336 - DNA, 25 bp, Homo sapien
gagtcgcactgattagctgaagccc

SEQ ID NO: 4971337 - DNA, 25 bp, Homo sapien
gagggtagccacgtgttcagaccag

SEQ ID NO: 4971338 - DNA, 25 bp, Homo sapien
agactcctgagcatgtgcactggca

SEQ ID NO: 4971339 - DNA, 25 bp, Homo sapien
ttgctgtaaccagccggctcagagg

SEQ ID NO: 4971340 - DNA, 25 bp, Homo sapien
gaccactcggaggtgccagctgagc

SEQ ID NO: 4971341 - DNA, 25 bp, Homo sapien
cataagcctcgcatactggacacgg

SEQ ID NO: 4971342 - DNA, 25 bp, Homo sapien
tccacatgcagggagttgggcttcc

SEQ ID NO: 4971343 - DNA, 25 bp, Homo sapien
caggcttgaaaaacccttgcccagt

SEQ ID NO: 4971344 - DNA, 25 bp, Homo sapien
ggacaaagccatcgcaactagggag

SEQ ID NO: 4971345 - DNA, 25 bp, Homo sapien
tgtgtgacatgctggtaagatggca

SEQ ID NO: 4971346 - DNA, 25 bp, Homo sapien
tcaaggtgagaccactgacacatgt

SEQ ID NO: 4971347 - DNA, 25 bp, Homo sapien
gcttgctaacaagcagcacacctgt

SEQ ID NO: 4971348 - DNA, 25 bp, Homo sapien
cacctgtgttccagtggtgaaatcc

SEQ ID NO: 4971349 - DNA, 25 bp, Homo sapien
gctgcttcctgccatttccgagaat

SEQ ID NO: 4971350 - DNA, 25 bp, Homo sapien
gaaatccatgtgctcagcaacacag

SEQ ID NO: 4971351 - DNA, 25 bp, Homo sapien
tcctcagccgcaagaagcagatagg

SEQ ID NO: 4971352 - DNA, 25 bp, Homo sapien
taacagaaggttaacagggaacatc

SEQ ID NO: 4971353 - DNA, 25 bp, Homo sapien
tctgtaactctgttccagggcaaaa

SEQ ID NO: 4971354 - DNA, 25 bp, Homo sapien
gaacatcacattgcccatgagccca

SEQ ID NO: 4971355 - DNA, 25 bp, Homo sapien
aaagcgtcgctttttctgtgaagca

SEQ ID NO: 4971356 - DNA, 25 bp, Homo sapien
tccagccaagtgttcgttatgagtc

SEQ ID NO: 4971357 - DNA, 25 bp, Homo sapien
gaagtaatgtcagagtaatccttca

SEQ ID NO: 4971358 - DNA, 25 bp, Homo sapien
gtaatccttcagcactccagccaag

SEQ ID NO: 4971359 - DNA, 25 bp, Homo sapien
gaaataccctgtcgcttcagatatt

SEQ ID NO: 4971360 - DNA, 25 bp, Homo sapien
tggaatctacagtgacactcctcca

SEQ ID NO: 4971361 - DNA, 25 bp, Homo sapien
tttggtccagattcctgcatggaag

SEQ ID NO: 4971362 - DNA, 25 bp, Homo sapien
tcttcaattttctcctcgtccatgg

SEQ ID NO: 4971363 - DNA, 25 bp, Homo sapien
gctacatagtgtcaacatggacccg

SEQ ID NO: 4971364 - DNA, 25 bp, Homo sapien
gtaacgagcttgtgcccttcttggg

SEQ ID NO: 4971365 - DNA, 25 bp, Homo sapien
tcaggcaaggtgttatctctcaggt

SEQ ID NO: 4971366 - DNA, 25 bp, Homo sapien
ggcaagaacaacacagtaacgagct

SEQ ID NO: 4971367 - DNA, 25 bp, Homo sapien
tgtgcttagccctttcccgtaaatg

SEQ ID NO: 4971368 - DNA, 25 bp, Homo sapien
gtcaggcacactctaaaccgtaagg

SEQ ID NO: 4971369 - DNA, 25 bp, Homo sapien
gaaaatgagccaacttaccaatgag

SEQ ID NO: 4971370 - DNA, 25 bp, Homo sapien
gcacaacagtgtggtgcaggcctca

SEQ ID NO: 4971371 - DNA, 25 bp, Homo sapien
aggttgcggtgagccgagatcacgc

SEQ ID NO: 4971372 - DNA, 25 bp, Homo sapien
gaatcgcttgagtccggaaggcaga

SEQ ID NO: 4971373 - DNA, 25 bp, Homo sapien
cagctacttgggaggctgaggaagg

SEQ ID NO: 4971374 - DNA, 25 bp, Homo sapien
agaatcgcttgagtccggaaggcag

SEQ ID NO: 4971375 - DNA, 25 bp, Homo sapien
taacatgcactgatgaggatgtagc

SEQ ID NO: 4971376 - DNA, 25 bp, Homo sapien
cacacctgtgagaatggttatcctc

SEQ ID NO: 4971377 - DNA, 25 bp, Homo sapien
gcagcattacttacaacagtcgaga

SEQ ID NO: 4971378 - DNA, 25 bp, Homo sapien
aggatgtagcagagggaacacctgt

SEQ ID NO: 4971379 - DNA, 25 bp, Homo sapien
gaagtctttgttcaacaggcaccta

SEQ ID NO: 4971380 - DNA, 25 bp, Homo sapien
ctacaatggatagcataagttcact

SEQ ID NO: 4971381 - DNA, 25 bp, Homo sapien
tataaaaatcgccaggcagtactga

SEQ ID NO: 4971382 - DNA, 25 bp, Homo sapien
aggcaacattgcaagtaacgaagac

SEQ ID NO: 4971383 - DNA, 25 bp, Homo sapien
tacatgtaagatactcaattgggat

SEQ ID NO: 4971384 - DNA, 25 bp, Homo sapien
gctaaaatggcaattggtaaacttg

SEQ ID NO: 4971385 - DNA, 25 bp, Homo sapien
tacagcttagcatccaactccacaa

SEQ ID NO: 4971386 - DNA, 25 bp, Homo sapien
aacttaaggttactgcacaaatcac

SEQ ID NO: 4971387 - DNA, 25 bp, Homo sapien
tcgggacgatttacaaatagtatct

SEQ ID NO: 4971388 - DNA, 25 bp, Homo sapien
aaactgacagctcttatcattgaag

SEQ ID NO: 4971389 - DNA, 25 bp, Homo sapien
tcttcttatcgggacgatttacaaa

SEQ ID NO: 4971390 - DNA, 25 bp, Homo sapien
gatttacaaatagtatctggtcccc

SEQ ID NO: 4971391 - DNA, 25 bp, Homo sapien
tttctgggaattgggcagtgcttct

SEQ ID NO: 4971392 - DNA, 25 bp, Homo sapien
tcctaatcctcgctggtcatgctga

SEQ ID NO: 4971393 - DNA, 25 bp, Homo sapien
tgatctaagagcctaagtagggcct

SEQ ID NO: 4971394 - DNA, 25 bp, Homo sapien
ggcttgaaagcatacttcccatcta

SEQ ID NO: 4971395 - DNA, 25 bp, Homo sapien
tctgcttgagtccaatatctaaatg

SEQ ID NO: 4971396 - DNA, 25 bp, Homo sapien
tgcgtatctcctcgctgatgccgtg

SEQ ID NO: 4971397 - DNA, 25 bp, Homo sapien
aatttcatctaaggttagaggatgc

SEQ ID NO: 4971398 - DNA, 25 bp, Homo sapien
gcttgagtccaatatctaaatgttg

SEQ ID NO: 4971399 - DNA, 25 bp, Homo sapien
tcgtgccttactgcaccaggaagaa

SEQ ID NO: 4971400 - DNA, 25 bp, Homo sapien
taatcaatgcatgaaagcctaacca

SEQ ID NO: 4971401 - DNA, 25 bp, Homo sapien
tacataatgccctacaactagagac

SEQ ID NO: 4971402 - DNA, 25 bp, Homo sapien
gaaaatcccttcctcatagatcagg

SEQ ID NO: 4971403 - DNA, 25 bp, Homo sapien
agtatcttttagtatgcattccata

SEQ ID NO: 4971404 - DNA, 25 bp, Homo sapien
aacatgacaagcagcgcagaaatgt

SEQ ID NO: 4971405 - DNA, 25 bp, Homo sapien
caagcagcgcagaaatgtttaaatt

SEQ ID NO: 4971406 - DNA, 25 bp, Homo sapien
tgacaagcagcgcagaaatgtttaa

SEQ ID NO: 4971407 - DNA, 25 bp, Homo sapien
aagaacaccaaacttatatccagag

SEQ ID NO: 4971408 - DNA, 25 bp, Homo sapien
tgtaattcacaatcttagcaagaac

SEQ ID NO: 4971409 - DNA, 25 bp, Homo sapien
cttcatgtaattcacaatcttagca

SEQ ID NO: 4971410 - DNA, 25 bp, Homo sapien
ttcacaatcttagcaagaacaccaa

SEQ ID NO: 4971411 - DNA, 25 bp, Homo sapien
tgctgttgttaacagccactcccat

SEQ ID NO: 4971412 - DNA, 25 bp, Homo sapien
ctgctgttgttaacagccactccca

SEQ ID NO: 4971413 - DNA, 25 bp, Homo sapien
gcattacaaacagacgataccatcg

SEQ ID NO: 4971414 - DNA, 25 bp, Homo sapien
cagacgataccatcgcttcagcagc

SEQ ID NO: 4971415 - DNA, 25 bp, Homo sapien
tacaaacagacgataccatcgcttc

SEQ ID NO: 4971416 - DNA, 25 bp, Homo sapien
tagactgcattacaaacagacgata

SEQ ID NO: 4971417 - DNA, 25 bp, Homo sapien
ccctcttagaagtatgatggacaac

SEQ ID NO: 4971418 - DNA, 25 bp, Homo sapien
catgcactgtttgtgtgtatagcca

SEQ ID NO: 4971419 - DNA, 25 bp, Homo sapien
gaaaacgtgaaactgaagtggtcta

SEQ ID NO: 4971420 - DNA, 25 bp, Homo sapien
catgacaactggaacactgcctgct

SEQ ID NO: 4971421 - DNA, 25 bp, Homo sapien
gatcctccatgttctacctttgttt

SEQ ID NO: 4971422 - DNA, 25 bp, Homo sapien
aattttgtttagagcctgacgatcc

SEQ ID NO: 4971423 - DNA, 25 bp, Homo sapien
gctgaacgtttttctactacaggag

SEQ ID NO: 4971424 - DNA, 25 bp, Homo sapien
atgatgatgactcagaagatgctga

SEQ ID NO: 4971425 - DNA, 25 bp, Homo sapien
agtatttgaccctcgcaactctagg

SEQ ID NO: 4971426 - DNA, 25 bp, Homo sapien
taaggtcgcacagatggaagagcca

SEQ ID NO: 4971427 - DNA, 25 bp, Homo sapien
tacgtgaaatctgaagtgaagctgt

SEQ ID NO: 4971428 - DNA, 25 bp, Homo sapien
caaacaggtattagtgttattccta

SEQ ID NO: 4971429 - DNA, 25 bp, Homo sapien
gctgacccgccaggtcggggtctca

SEQ ID NO: 4971430 - DNA, 25 bp, Homo sapien
gagaagggcagcctcgcacgactcg

SEQ ID NO: 4971431 - DNA, 25 bp, Homo sapien
cagcggcggtagctgaggcggcgac

SEQ ID NO: 4971432 - DNA, 25 bp, Homo sapien
ctcttcctgcttctcgtcagcgccc

SEQ ID NO: 4971433 - DNA, 25 bp, Homo sapien
tgtaccaattaaagctcacagtaac

SEQ ID NO: 4971434 - DNA, 25 bp, Homo sapien
gattctccaatgtgaaatatcctta

SEQ ID NO: 4971435 - DNA, 25 bp, Homo sapien
tttatacgagaactctcttttcacc

SEQ ID NO: 4971436 - DNA, 25 bp, Homo sapien
taagcacaggcaactgattctccaa

SEQ ID NO: 4971437 - DNA, 25 bp, Homo sapien
gtccaagattgagtgcagcagcatg

SEQ ID NO: 4971438 - DNA, 25 bp, Homo sapien
tcagaagatctatgggtcccactgc

SEQ ID NO: 4971439 - DNA, 25 bp, Homo sapien
caggccggcttctcacattacatgc

SEQ ID NO: 4971440 - DNA, 25 bp, Homo sapien
gaagcagctttgttatatgcagagc

SEQ ID NO: 4971441 - DNA, 25 bp, Homo sapien
tgaagaggtagggtgaatggcgact

SEQ ID NO: 4971442 - DNA, 25 bp, Homo sapien
actgtgttgtcaaagtctgccttcg

SEQ ID NO: 4971443 - DNA, 25 bp, Homo sapien
aagtgtgaccagctcttctgaagag

SEQ ID NO: 4971444 - DNA, 25 bp, Homo sapien
aaagtctgccttcgttgctcccatc

SEQ ID NO: 4971445 - DNA, 25 bp, Homo sapien
tcttccttgttagcacagaccattt

SEQ ID NO: 4971446 - DNA, 25 bp, Homo sapien
tacatcggggtaaagctcgttgaat

SEQ ID NO: 4971447 - DNA, 25 bp, Homo sapien
tttggtaactgcgtgatacatcggg

SEQ ID NO: 4971448 - DNA, 25 bp, Homo sapien
tccttttggtaactgcgtgatacat

SEQ ID NO: 4971449 - DNA, 25 bp, Homo sapien
ctgtacactcaaagtagtagcaggg

SEQ ID NO: 4971450 - DNA, 25 bp, Homo sapien
cagctgacagagacctaatttaaag

SEQ ID NO: 4971451 - DNA, 25 bp, Homo sapien
tcttaggaaagatagacatgtgtgt

SEQ ID NO: 4971452 - DNA, 25 bp, Homo sapien
gatactcggtttatgtaagggccag

SEQ ID NO: 4971453 - DNA, 25 bp, Homo sapien
ccacagttgggatgttgttataatc

SEQ ID NO: 4971454 - DNA, 25 bp, Homo sapien
gaagaccacagttgggatgttgtta

SEQ ID NO: 4971455 - DNA, 25 bp, Homo sapien
tatattcaaaaagtcgatgggcaag

SEQ ID NO: 4971456 - DNA, 25 bp, Homo sapien
aagttttcggccagcagctattgca

SEQ ID NO: 4971457 - DNA, 25 bp, Homo sapien
gtctacgatgatatgacccttgtca

SEQ ID NO: 4971458 - DNA, 25 bp, Homo sapien
ggtattctggaattcgtctacgatg

SEQ ID NO: 4971459 - DNA, 25 bp, Homo sapien
tacatccccaactgcatagatgcct

SEQ ID NO: 4971460 - DNA, 25 bp, Homo sapien
gacccttgtcatcggtttgaatccc

SEQ ID NO: 4971461 - DNA, 25 bp, Homo sapien
tttgatcacaaactgaatacatggg

SEQ ID NO: 4971462 - DNA, 25 bp, Homo sapien
aataaaaccataagactcctagtag

SEQ ID NO: 4971463 - DNA, 25 bp, Homo sapien
attcacaaatgtttcgggcagacca

SEQ ID NO: 4971464 - DNA, 25 bp, Homo sapien
aaatgtttcgggcagaccaagccag

SEQ ID NO: 4971465 - DNA, 25 bp, Homo sapien
tagcctaccgggaactgcagtaacc

SEQ ID NO: 4971466 - DNA, 25 bp, Homo sapien
gctgacttccaagcccgacaaagtc

SEQ ID NO: 4971467 - DNA, 25 bp, Homo sapien
catggtcatgactggtagcctaccg

SEQ ID NO: 4971468 - DNA, 25 bp, Homo sapien
tggtattcgggacccgcccaatggc

SEQ ID NO: 4971469 - DNA, 25 bp, Homo sapien
tgatcattgaatcaaaacttctaag

SEQ ID NO: 4971470 - DNA, 25 bp, Homo sapien
ccagctcctccgtgcagttggtgct

SEQ ID NO: 4971471 - DNA, 25 bp, Homo sapien
gctgatcattgaatcaaaacttcta

SEQ ID NO: 4971472 - DNA, 25 bp, Homo sapien
gctcctccgtgcagttggtgctgat

SEQ ID NO: 4971473 - DNA, 25 bp, Homo sapien
tatcaacatagggatgggtaatgcg

SEQ ID NO: 4971474 - DNA, 25 bp, Homo sapien
caacatagggatgggtaatgcgaga

SEQ ID NO: 4971475 - DNA, 25 bp, Homo sapien
atatcaacatagggatgggtaatgc

SEQ ID NO: 4971476 - DNA, 25 bp, Homo sapien
catagggatgggtaatgcgagagga

SEQ ID NO: 4971477 - DNA, 25 bp, Homo sapien
ttatcatgccgtatcatcagtgatg

SEQ ID NO: 4971478 - DNA, 25 bp, Homo sapien
catctccacagcaatgtaacctgca

SEQ ID NO: 4971479 - DNA, 25 bp, Homo sapien
gcaatgtaacctgcaccaacaatga

SEQ ID NO: 4971480 - DNA, 25 bp, Homo sapien
gtgatgtcttagaacccagggctga

SEQ ID NO: 4971481 - DNA, 25 bp, Homo sapien
gcacagtattccacaaggttcatgc

SEQ ID NO: 4971482 - DNA, 25 bp, Homo sapien
tcaggcggctgaatccctaaaagat

SEQ ID NO: 4971483 - DNA, 25 bp, Homo sapien
gctcaagaaattcgctcgcctcagg

SEQ ID NO: 4971484 - DNA, 25 bp, Homo sapien
gttgcagccccaggactactcatgc

SEQ ID NO: 4971485 - DNA, 25 bp, Homo sapien
aactagaaagcctgcaatgtacagc

SEQ ID NO: 4971486 - DNA, 25 bp, Homo sapien
tgacaggagcatccctctaaactag

SEQ ID NO: 4971487 - DNA, 25 bp, Homo sapien
cagtccctgcgccaacacattgggt

SEQ ID NO: 4971488 - DNA, 25 bp, Homo sapien
gagctcaaggctaccacaagccatg

SEQ ID NO: 4971489 - DNA, 25 bp, Homo sapien
gctgaaaaaatccatcgctggttat

SEQ ID NO: 4971490 - DNA, 25 bp, Homo sapien
gaaaaaatccatcgctggttattcc

SEQ ID NO: 4971491 - DNA, 25 bp, Homo sapien
aatccatcgctggttattcctaagc

SEQ ID NO: 4971492 - DNA, 25 bp, Homo sapien
aaaatccatcgctggttattcctaa

SEQ ID NO: 4971493 - DNA, 25 bp, Homo sapien
ggccacggatgatttctatatggga

SEQ ID NO: 4971494 - DNA, 25 bp, Homo sapien
actgacctctattgtgggcttggga

SEQ ID NO: 4971495 - DNA, 25 bp, Homo sapien
ggagggcataccacctgtggcgatc

SEQ ID NO: 4971496 - DNA, 25 bp, Homo sapien
gatcactcgtgaaggctgcatggcc

SEQ ID NO: 4971497 - DNA, 25 bp, Homo sapien
ggcatcccgcttttccttaataaca

SEQ ID NO: 4971498 - DNA, 25 bp, Homo sapien
tgatagatggcattcaggcggctca

SEQ ID NO: 4971499 - DNA, 25 bp, Homo sapien
ttgttttgatagatggcattcaggc

SEQ ID NO: 4971500 - DNA, 25 bp, Homo sapien
aggcggctcacataggcatcccgct

SEQ ID NO: 4971501 - DNA, 25 bp, Homo sapien
tcagtggagaacacactcagttggc

SEQ ID NO: 4971502 - DNA, 25 bp, Homo sapien
tggcatcatctttctgcgcagaaga

SEQ ID NO: 4971503 - DNA, 25 bp, Homo sapien
catgtgttaaaagcctctgtgccac

SEQ ID NO: 4971504 - DNA, 25 bp, Homo sapien
caaccgcagtgagtgaatgtctccg

SEQ ID NO: 4971505 - DNA, 25 bp, Homo sapien
cgccaattgaatttaccctcacaac

SEQ ID NO: 4971506 - DNA, 25 bp, Homo sapien
tgaatttaccctcacaacttggaaa

SEQ ID NO: 4971507 - DNA, 25 bp, Homo sapien
tcacaacttggaaagccataatcag

SEQ ID NO: 4971508 - DNA, 25 bp, Homo sapien
ccataatcagcatgatcatgcatga

SEQ ID NO: 4971509 - DNA, 25 bp, Homo sapien
ctttttgggtacacatccaacattc

SEQ ID NO: 4971510 - DNA, 25 bp, Homo sapien
ttttgggtacacatccaacattcac

SEQ ID NO: 4971511 - DNA, 25 bp, Homo sapien
tttttgggtacacatccaacattca

SEQ ID NO: 4971512 - DNA, 25 bp, Homo sapien
ggaagcctatgaccctgaaatacca

SEQ ID NO: 4971513 - DNA, 25 bp, Homo sapien
ccttgttgggccagagaagctgcgc

SEQ ID NO: 4971514 - DNA, 25 bp, Homo sapien
tgtttcttctaagcgccaaggtggg

SEQ ID NO: 4971515 - DNA, 25 bp, Homo sapien
tatcagtatcttggcctacagtgcc

SEQ ID NO: 4971516 - DNA, 25 bp, Homo sapien
acgcacacaaggcatacggaaaggc

SEQ ID NO: 4971517 - DNA, 25 bp, Homo sapien
ctgaattatttctgcgtctgctggc

SEQ ID NO: 4971518 - DNA, 25 bp, Homo sapien
caaggcatacggaaaggcggagata

SEQ ID NO: 4971519 - DNA, 25 bp, Homo sapien
ctctgaattatttctgcgtctgctg

SEQ ID NO: 4971520 - DNA, 25 bp, Homo sapien
tagggcctgcctcgttaccttcaat

SEQ ID NO: 4971521 - DNA, 25 bp, Homo sapien
gcttcaccatttttcctagggcctg

SEQ ID NO: 4971522 - DNA, 25 bp, Homo sapien
agtgttcagaatcccgatcagtggg

SEQ ID NO: 4971523 - DNA, 25 bp, Homo sapien
tgggccgcctgttatctggtgataa

SEQ ID NO: 4971524 - DNA, 25 bp, Homo sapien
taaccttctatttcggagggctatc

SEQ ID NO: 4971525 - DNA, 25 bp, Homo sapien
tatgaaattctaaacccaggagaca

SEQ ID NO: 4971526 - DNA, 25 bp, Homo sapien
gcatgtccagtgttcagctttacca

SEQ ID NO: 4971527 - DNA, 25 bp, Homo sapien
gggtgggccccattctatgaaattc

SEQ ID NO: 4971528 - DNA, 25 bp, Homo sapien
tgctgctgtgcagcatagttcactg

SEQ ID NO: 4971529 - DNA, 25 bp, Homo sapien
cttggcaatcatgaacttttgtcac

SEQ ID NO: 4971530 - DNA, 25 bp, Homo sapien
ctgctgctgtgcagcatagttcact

SEQ ID NO: 4971531 - DNA, 25 bp, Homo sapien
ggcaatcatgaacttttgtcacatg

SEQ ID NO: 4971532 - DNA, 25 bp, Homo sapien
agcaggaacccaggaccgcaagttc

SEQ ID NO: 4971533 - DNA, 25 bp, Homo sapien
tctcattggtaagtactactcgcca

SEQ ID NO: 4971534 - DNA, 25 bp, Homo sapien
acagaatcagtacactcagcaggaa

SEQ ID NO: 4971535 - DNA, 25 bp, Homo sapien
cctggttattcttatcacagaatca

SEQ ID NO: 4971536 - DNA, 25 bp, Homo sapien
gttgaaatcagcaagggcaacatag

SEQ ID NO: 4971537 - DNA, 25 bp, Homo sapien
gcgtggtgattagccccctgtagtt

SEQ ID NO: 4971538 - DNA, 25 bp, Homo sapien
agtccaagaggttgaaatcagcaag

SEQ ID NO: 4971539 - DNA, 25 bp, Homo sapien
taactaggcgtggtgattagccccc

SEQ ID NO: 4971540 - DNA, 25 bp, Homo sapien
gcaagtgccacccagcttgtggctc

SEQ ID NO: 4971541 - DNA, 25 bp, Homo sapien
agcttgtggctctccaccacggcgg

SEQ ID NO: 4971542 - DNA, 25 bp, Homo sapien
tgtggctctccaccacggcggccct

SEQ ID NO: 4971543 - DNA, 25 bp, Homo sapien
cttgtggctctccaccacggcggcc

SEQ ID NO: 4971544 - DNA, 25 bp, Homo sapien
ctggccagcccgcccgagccgcccc

SEQ ID NO: 4971545 - DNA, 25 bp, Homo sapien
gcccgcccgagccgcccccgatcac

SEQ ID NO: 4971546 - DNA, 25 bp, Homo sapien
gccagcccgcccgagccgcccccga

SEQ ID NO: 4971547 - DNA, 25 bp, Homo sapien
cagcccgcccgagccgcccccgatc

SEQ ID NO: 4971548 - DNA, 25 bp, Homo sapien
caggtagtcataggaggccacggcg

SEQ ID NO: 4971549 - DNA, 25 bp, Homo sapien
gtagtcataggaggccacggcgcca

SEQ ID NO: 4971550 - DNA, 25 bp, Homo sapien
cataggaggccacggcgccagcagc

SEQ ID NO: 4971551 - DNA, 25 bp, Homo sapien
tcataggaggccacggcgccagcag

SEQ ID NO: 4971552 - DNA, 25 bp, Homo sapien
cagcaggaagcctcggaaggcgcgc

SEQ ID NO: 4971553 - DNA, 25 bp, Homo sapien
gccgctaggcaagacccaggaggat

SEQ ID NO: 4971554 - DNA, 25 bp, Homo sapien
gtgactaagcatgcgcccgccgcta

SEQ ID NO: 4971555 - DNA, 25 bp, Homo sapien
gcctcacggtgactaagcatgcgcc

SEQ ID NO: 4971556 - DNA, 25 bp, Homo sapien
gcacgcggaagtggcgcgccaagtg

SEQ ID NO: 4971557 - DNA, 25 bp, Homo sapien
taggattatggtatgaggtcaccac

SEQ ID NO: 4971558 - DNA, 25 bp, Homo sapien
taccaggactggtagggaactcttg

SEQ ID NO: 4971559 - DNA, 25 bp, Homo sapien
gctaggattatggtatgaggtcacc

SEQ ID NO: 4971560 - DNA, 25 bp, Homo sapien
ggactggtagggaactcttggcctc

SEQ ID NO: 4971561 - DNA, 25 bp, Homo sapien
tgttgggaaatcactcttactcggg

SEQ ID NO: 4971562 - DNA, 25 bp, Homo sapien
taattgcaccagtctagcataacca

SEQ ID NO: 4971563 - DNA, 25 bp, Homo sapien
tctgtggattccatcaactctgtca

SEQ ID NO: 4971564 - DNA, 25 bp, Homo sapien
caggcctttagctgactggatgagg

SEQ ID NO: 4971565 - DNA, 25 bp, Homo sapien
cctttgaacacaacgtaggcgtgac

SEQ ID NO: 4971566 - DNA, 25 bp, Homo sapien
tgcccagattcctaacctttgaaca

SEQ ID NO: 4971567 - DNA, 25 bp, Homo sapien
ccttctgggtatggttctgcaacac

SEQ ID NO: 4971568 - DNA, 25 bp, Homo sapien
tggtagttcctttgcactcaggttc

SEQ ID NO: 4971569 - DNA, 25 bp, Homo sapien
gatggatgggtcaggaaaaagaatt

SEQ ID NO: 4971570 - DNA, 25 bp, Homo sapien
gctcaaagcaacctccgcatgcggg

SEQ ID NO: 4971571 - DNA, 25 bp, Homo sapien
tcaaagcaacctccgcatgcgggtt

SEQ ID NO: 4971572 - DNA, 25 bp, Homo sapien
tgggatgctagatggatgggtcagg

SEQ ID NO: 4971573 - DNA, 25 bp, Homo sapien
gaatgttgcatagaacgaccgcctc

SEQ ID NO: 4971574 - DNA, 25 bp, Homo sapien
ccttcgacagtcacagctgggtaat

SEQ ID NO: 4971575 - DNA, 25 bp, Homo sapien
ggcttcggagcagctttgactacaa

SEQ ID NO: 4971576 - DNA, 25 bp, Homo sapien
cggagctgacttcacttcgaggaac

SEQ ID NO: 4971577 - DNA, 25 bp, Homo sapien
gcctggaaattaagcagtggtcaca

SEQ ID NO: 4971578 - DNA, 25 bp, Homo sapien
ggccagcagatacatagagaatgtt

SEQ ID NO: 4971579 - DNA, 25 bp, Homo sapien
gaggagcgcttttatcaaatgacgg

SEQ ID NO: 4971580 - DNA, 25 bp, Homo sapien
caaatgacgggtgaagcctggaaat

SEQ ID NO: 4971581 - DNA, 25 bp, Homo sapien
aagattgggtctcagtgttttgctc

SEQ ID NO: 4971582 - DNA, 25 bp, Homo sapien
tcataggctggagtgtcttggcacg

SEQ ID NO: 4971583 - DNA, 25 bp, Homo sapien
gtcactgtgcctgatgggaaagttt

SEQ ID NO: 4971584 - DNA, 25 bp, Homo sapien
tagctgactgcatcttcaacctctc

SEQ ID NO: 4971585 - DNA, 25 bp, Homo sapien
gccagtcgctggaggacataggaat

SEQ ID NO: 4971586 - DNA, 25 bp, Homo sapien
ggacataggaataactgtggacact

SEQ ID NO: 4971587 - DNA, 25 bp, Homo sapien
gactggatgacgagaattgggtacc

SEQ ID NO: 4971588 - DNA, 25 bp, Homo sapien
tgggtaccacatatctctatacagc

SEQ ID NO: 4971589 - DNA, 25 bp, Homo sapien
gcaaaagtctgctaaaacgtctcaa

SEQ ID NO: 4971590 - DNA, 25 bp, Homo sapien
agtgtaactgatgtgaggccgacca

SEQ ID NO: 4971591 - DNA, 25 bp, Homo sapien
cactgaggccatagctttgcagcaa

SEQ ID NO: 4971592 - DNA, 25 bp, Homo sapien
gagtcacaagttgcaagcccaggtg

SEQ ID NO: 4971593 - DNA, 25 bp, Homo sapien
tggagccccacaggttgaggttgca

SEQ ID NO: 4971594 - DNA, 25 bp, Homo sapien
catgatctcacctctgtgctccagc

SEQ ID NO: 4971595 - DNA, 25 bp, Homo sapien
tgagatcatgtctcaatcatcatca

SEQ ID NO: 4971596 - DNA, 25 bp, Homo sapien
cactggagccccacaggttgaggtt

SEQ ID NO: 4971597 - DNA, 25 bp, Homo sapien
tggcctatatgctgcacctgccgct

SEQ ID NO: 4971598 - DNA, 25 bp, Homo sapien
tagggaaaacagacttattgaagac

SEQ ID NO: 4971599 - DNA, 25 bp, Homo sapien
tgagagtgagctcgaacaagcggct

SEQ ID NO: 4971600 - DNA, 25 bp, Homo sapien
gctgaagtgccttgttatgatggga

SEQ ID NO: 4971601 - DNA, 25 bp, Homo sapien
tacaccaaataggatgcaagcactg

SEQ ID NO: 4971602 - DNA, 25 bp, Homo sapien
caccaaataggatgcaagcactgtc

SEQ ID NO: 4971603 - DNA, 25 bp, Homo sapien
accaaataggatgcaagcactgtca

SEQ ID NO: 4971604 - DNA, 25 bp, Homo sapien
ccaaataggatgcaagcactgtcat

SEQ ID NO: 4971605 - DNA, 25 bp, Homo sapien
ttttttgcttgaacagtccaaagga

SEQ ID NO: 4971606 - DNA, 25 bp, Homo sapien
ttttgcttgaacagtccaaaggaaa

SEQ ID NO: 4971607 - DNA, 25 bp, Homo sapien
ttaaatgttatgacaacatactccc

SEQ ID NO: 4971608 - DNA, 25 bp, Homo sapien
tctctttaaatgttatgacaacata

SEQ ID NO: 4971609 - DNA, 25 bp, Homo sapien
aactgttagactgacctagaacata

SEQ ID NO: 4971610 - DNA, 25 bp, Homo sapien
gcaaactgttagactgacctagaac

SEQ ID NO: 4971611 - DNA, 25 bp, Homo sapien
aaactgttagactgacctagaacat

SEQ ID NO: 4971612 - DNA, 25 bp, Homo sapien
aggcaaactgttagactgacctaga

SEQ ID NO: 4971613 - DNA, 25 bp, Homo sapien
tgtaacatgaggctcaccacgacga

SEQ ID NO: 4971614 - DNA, 25 bp, Homo sapien
ctcaccacgacgaggcgctgggtca

SEQ ID NO: 4971615 - DNA, 25 bp, Homo sapien
cgacgaggcgctgggtcaaattgaa

SEQ ID NO: 4971616 - DNA, 25 bp, Homo sapien
gtaacatgaggctcaccacgacgag

SEQ ID NO: 4971617 - DNA, 25 bp, Homo sapien
catgggcaaatcactgcagatgctc

SEQ ID NO: 4971618 - DNA, 25 bp, Homo sapien
ggctggaatggccatgggcaaatca

SEQ ID NO: 4971619 - DNA, 25 bp, Homo sapien
ggccatgggcaaatcactgcagatg

SEQ ID NO: 4971620 - DNA, 25 bp, Homo sapien
atggccatgggcaaatcactgcaga

SEQ ID NO: 4971621 - DNA, 25 bp, Homo sapien
catgttttgaaccaacctagcattc

SEQ ID NO: 4971622 - DNA, 25 bp, Homo sapien
gacagaatgaatgcagtagtcctcc

SEQ ID NO: 4971623 - DNA, 25 bp, Homo sapien
tacatattgctagatccaggttgct

SEQ ID NO: 4971624 - DNA, 25 bp, Homo sapien
caggttgctggtacgtatgttggaa

SEQ ID NO: 4971625 - DNA, 25 bp, Homo sapien
aaagtgtcatctaattccatgatag

SEQ ID NO: 4971626 - DNA, 25 bp, Homo sapien
aagtgtcatctaattccatgatagc

SEQ ID NO: 4971627 - DNA, 25 bp, Homo sapien
tgggcctaggagtctgttaaatgca

SEQ ID NO: 4971628 - DNA, 25 bp, Homo sapien
aatactgtgcaattcgtgggcctag

SEQ ID NO: 4971629 - DNA, 25 bp, Homo sapien
tgtgtacctgtaaagaatactgtgc

SEQ ID NO: 4971630 - DNA, 25 bp, Homo sapien
ctctctgtggaaatgtagtcgtcta

SEQ ID NO: 4971631 - DNA, 25 bp, Homo sapien
gggctggcgaagttttctctaaaca

SEQ ID NO: 4971632 - DNA, 25 bp, Homo sapien
ggctggcgaagttttctctaaacat

SEQ ID NO: 4971633 - DNA, 25 bp, Homo sapien
acggtggttatgtgacagtgtgtcc

SEQ ID NO: 4971634 - DNA, 25 bp, Homo sapien
tagtaaaggagtatctgtctgcaac

SEQ ID NO: 4971635 - DNA, 25 bp, Homo sapien
taatctttggattcgactatgcaca

SEQ ID NO: 4971636 - DNA, 25 bp, Homo sapien
caggaatctgaatgaagcatacagg

SEQ ID NO: 4971637 - DNA, 25 bp, Homo sapien
gatctgaccataacagatcacacat

SEQ ID NO: 4971638 - DNA, 25 bp, Homo sapien
tggatctgaccataacagatcacac

SEQ ID NO: 4971639 - DNA, 25 bp, Homo sapien
tctgaccataacagatcacacattg

SEQ ID NO: 4971640 - DNA, 25 bp, Homo sapien
tctggatctgaccataacagatcac

SEQ ID NO: 4971641 - DNA, 25 bp, Homo sapien
ctggccaagaaaaataagtacatgt

SEQ ID NO: 4971642 - DNA, 25 bp, Homo sapien
acttcctgtaaacgatccagggctc

SEQ ID NO: 4971643 - DNA, 25 bp, Homo sapien
tgtggaacttcctgtaaacgatcca

SEQ ID NO: 4971644 - DNA, 25 bp, Homo sapien
ccagtgtgtctatggatggagagag

SEQ ID NO: 4971645 - DNA, 25 bp, Homo sapien
tcatgtggaacttcctgtaaacgat

SEQ ID NO: 4971646 - DNA, 25 bp, Homo sapien
tcttctttaccccttctctggtcaa

SEQ ID NO: 4971647 - DNA, 25 bp, Homo sapien
tctctggtcaatggtatccccatcc

SEQ ID NO: 4971648 - DNA, 25 bp, Homo sapien
gtgtcagtccaaatagtgccaacat

SEQ ID NO: 4971649 - DNA, 25 bp, Homo sapien
aaagtgtcagtccaaatagtgccaa

SEQ ID NO: 4971650 - DNA, 25 bp, Homo sapien
gcattgaggttatactaggcatacg

SEQ ID NO: 4971651 - DNA, 25 bp, Homo sapien
tgtgatacacgagctcctgcatagt

SEQ ID NO: 4971652 - DNA, 25 bp, Homo sapien
taggcatacggtgtgagttttgaac

SEQ ID NO: 4971653 - DNA, 25 bp, Homo sapien
tatattggacgaatttctgcaagcc

SEQ ID NO: 4971654 - DNA, 25 bp, Homo sapien
ctttcaaattaatcacggcagtgtc

SEQ ID NO: 4971655 - DNA, 25 bp, Homo sapien
tttaacaagtccaggcaaagtatcg

SEQ ID NO: 4971656 - DNA, 25 bp, Homo sapien
tcccacgagcagtctaagagagaat

SEQ ID NO: 4971657 - DNA, 25 bp, Homo sapien
aaagactgtcaggattacacaggga

SEQ ID NO: 4971658 - DNA, 25 bp, Homo sapien
tcatggtaaccagcagacactgcat

SEQ ID NO: 4971659 - DNA, 25 bp, Homo sapien
tatgaatctagaccccagcttacca

SEQ ID NO: 4971660 - DNA, 25 bp, Homo sapien
cagccaagcattcacttctcaggga

SEQ ID NO: 4971661 - DNA, 25 bp, Homo sapien
gaaaaggccgaggagatgcagaaac

SEQ ID NO: 4971662 - DNA, 25 bp, Homo sapien
ttgtaatgcgttctggataacgcac

SEQ ID NO: 4971663 - DNA, 25 bp, Homo sapien
attgtaatgcgttctggataacgca

SEQ ID NO: 4971664 - DNA, 25 bp, Homo sapien
tattgtaatgcgttctggataacgc

SEQ ID NO: 4971665 - DNA, 25 bp, Homo sapien
atatttccaaacgttggcattccca

SEQ ID NO: 4971666 - DNA, 25 bp, Homo sapien
gctacaagaagagtcacagtctcca

SEQ ID NO: 4971667 - DNA, 25 bp, Homo sapien
acaagaagagtcacagtctccactg

SEQ ID NO: 4971668 - DNA, 25 bp, Homo sapien
atgctacaagaagagtcacagtctc

SEQ ID NO: 4971669 - DNA, 25 bp, Homo sapien
tacaagaagagtcacagtctccact

SEQ ID NO: 4971670 - DNA, 25 bp, Homo sapien
gcacatttgattcttttgttaaaat

SEQ ID NO: 4971671 - DNA, 25 bp, Homo sapien
ctcttgcacatttgattcttttgtt

SEQ ID NO: 4971672 - DNA, 25 bp, Homo sapien
cttgcacatttgattcttttgttaa

SEQ ID NO: 4971673 - DNA, 25 bp, Homo sapien
tgcacatttgattcttttgttaaaa

SEQ ID NO: 4971674 - DNA, 25 bp, Homo sapien
tttatgccaactagatgcgcccagc

SEQ ID NO: 4971675 - DNA, 25 bp, Homo sapien
gaatcacaaagttactctagcccca

SEQ ID NO: 4971676 - DNA, 25 bp, Homo sapien
caacctgtagcgattttcaaaacac

SEQ ID NO: 4971677 - DNA, 25 bp, Homo sapien
ctttaacactagttgagggatactc

SEQ ID NO: 4971678 - DNA, 25 bp, Homo sapien
tttacctgtccactaagaggctggc

SEQ ID NO: 4971679 - DNA, 25 bp, Homo sapien
ggctggcttagcaaggaaaacaatg

SEQ ID NO: 4971680 - DNA, 25 bp, Homo sapien
ggcacacacggcaataaaagcaggc

SEQ ID NO: 4971681 - DNA, 25 bp, Homo sapien
ccatgcccggccgttaatatgatta

SEQ ID NO: 4971682 - DNA, 25 bp, Homo sapien
gttaagagctagtcttctcagaaga

SEQ ID NO: 4971683 - DNA, 25 bp, Homo sapien
tagtcattcacccactggcactagg

SEQ ID NO: 4971684 - DNA, 25 bp, Homo sapien
ttgcaactacctcaaaataggcctt

SEQ ID NO: 4971685 - DNA, 25 bp, Homo sapien
tgcacacacaagaggagtcaaattc

SEQ ID NO: 4971686 - DNA, 25 bp, Homo sapien
cgttcagctgcttacactcgttcag

SEQ ID NO: 4971687 - DNA, 25 bp, Homo sapien
cacttggttctcgttcagctgctta

SEQ ID NO: 4971688 - DNA, 25 bp, Homo sapien
agcgtccgcacttggttctcgttca

SEQ ID NO: 4971689 - DNA, 25 bp, Homo sapien
ttctcgcacagcgtccgcacttggt

SEQ ID NO: 4971690 - DNA, 25 bp, Homo sapien
ctccttggtgaacgccttgtcgtcc

SEQ ID NO: 4971691 - DNA, 25 bp, Homo sapien
tccagctccttggtgaacgccttgt

SEQ ID NO: 4971692 - DNA, 25 bp, Homo sapien
tggtccagctccttggtgaacgcct

SEQ ID NO: 4971693 - DNA, 25 bp, Homo sapien
cagctccttggtgaacgccttgtcg

SEQ ID NO: 4971694 - DNA, 25 bp, Homo sapien
cggcccgatcccgatgcggatcccg

SEQ ID NO: 4971695 - DNA, 25 bp, Homo sapien
cccgatcccgatgcggatcccgagc

SEQ ID NO: 4971696 - DNA, 25 bp, Homo sapien
tcccgatgcggatcccgagccccag

SEQ ID NO: 4971697 - DNA, 25 bp, Homo sapien
atcccgatgcggatcccgagcccca

SEQ ID NO: 4971698 - DNA, 25 bp, Homo sapien
cagcaggcggctccgagcgcgcagc

SEQ ID NO: 4971699 - DNA, 25 bp, Homo sapien
cccagcaggcggctccgagcgcgca

SEQ ID NO: 4971700 - DNA, 25 bp, Homo sapien
gcaggcggctccgagcgcgcagcct

SEQ ID NO: 4971701 - DNA, 25 bp, Homo sapien
aggcggctccgagcgcgcagcctgg

SEQ ID NO: 4971702 - DNA, 25 bp, Homo sapien
ttcaggcccgcctcacgcctaccgg

SEQ ID NO: 4971703 - DNA, 25 bp, Homo sapien
tcggcctagctctcgccggacgaag

SEQ ID NO: 4971704 - DNA, 25 bp, Homo sapien
gcgcgccgcgggagtcggtgaagga

SEQ ID NO: 4971705 - DNA, 25 bp, Homo sapien
gtgaaggacgcggtgaggtgccggg

SEQ ID NO: 4971706 - DNA, 25 bp, Homo sapien
taacccttgagaaaggtctatccag

SEQ ID NO: 4971707 - DNA, 25 bp, Homo sapien
tctatccagttgtgagggctctgtc

SEQ ID NO: 4971708 - DNA, 25 bp, Homo sapien
ccatcccagttggtttaagtgagta

SEQ ID NO: 4971709 - DNA, 25 bp, Homo sapien
ggctctgtctgactaggatcttaca

SEQ ID NO: 4971710 - DNA, 25 bp, Homo sapien
aaatcctgctttcagctcaaatggc

SEQ ID NO: 4971711 - DNA, 25 bp, Homo sapien
taccctccccttataattgcatgga

SEQ ID NO: 4971712 - DNA, 25 bp, Homo sapien
catctctactcaaggaaacactgag

SEQ ID NO: 4971713 - DNA, 25 bp, Homo sapien
gaaaagagacagctcaagactgcag

SEQ ID NO: 4971714 - DNA, 25 bp, Homo sapien
cagtgtcctggatgaaaggattctt

SEQ ID NO: 4971715 - DNA, 25 bp, Homo sapien
tgcccagatgctccaaaagtatgca

SEQ ID NO: 4971716 - DNA, 25 bp, Homo sapien
tgcaactgtggtcaacagcccagaa

SEQ ID NO: 4971717 - DNA, 25 bp, Homo sapien
tactgataaacacaccaagcagagt

SEQ ID NO: 4971718 - DNA, 25 bp, Homo sapien
gtatgtctgggtaatggcattgcca

SEQ ID NO: 4971719 - DNA, 25 bp, Homo sapien
accgacgcatcaggcacaagagaaa

SEQ ID NO: 4971720 - DNA, 25 bp, Homo sapien
aaattggctttgagagcaccgacgc

SEQ ID NO: 4971721 - DNA, 25 bp, Homo sapien
tcatttctagatcaggatggacatc

SEQ ID NO: 4971722 - DNA, 25 bp, Homo sapien
tctgcaaaagcgtcccatggtctgg

SEQ ID NO: 4971723 - DNA, 25 bp, Homo sapien
ctattttgctttccgactttgatgc

SEQ ID NO: 4971724 - DNA, 25 bp, Homo sapien
ctttgatgcgcaagtgtcttttggg

SEQ ID NO: 4971725 - DNA, 25 bp, Homo sapien
tgctttccgactttgatgcgcaagt

SEQ ID NO: 4971726 - DNA, 25 bp, Homo sapien
tccgactttgatgcgcaagtgtctt

SEQ ID NO: 4971727 - DNA, 25 bp, Homo sapien
gccaggtagtgatctttgcatttca

SEQ ID NO: 4971728 - DNA, 25 bp, Homo sapien
ctaagggtaaaagtgagccaggtag

SEQ ID NO: 4971729 - DNA, 25 bp, Homo sapien
tgttttcgcttttgggatgagatcc

SEQ ID NO: 4971730 - DNA, 25 bp, Homo sapien
tcagactgtcacatgaacttggtac

SEQ ID NO: 4971731 - DNA, 25 bp, Homo sapien
ttctaactatactcagaatattctt

SEQ ID NO: 4971732 - DNA, 25 bp, Homo sapien
aactatactcagaatattcttaacc

SEQ ID NO: 4971733 - DNA, 25 bp, Homo sapien
tatactcagaatattcttaaccttt

SEQ ID NO: 4971734 - DNA, 25 bp, Homo sapien
tactcagaatattcttaacctttac

SEQ ID NO: 4971735 - DNA, 25 bp, Homo sapien
ttggatgcttgaatgttgccttttc

SEQ ID NO: 4971736 - DNA, 25 bp, Homo sapien
ttgatttttgtgacatctttcatgt

SEQ ID NO: 4971737 - DNA, 25 bp, Homo sapien
cttggatgcttgaatgttgcctttt

SEQ ID NO: 4971738 - DNA, 25 bp, Homo sapien
tctgttgatttttgtgacatctttc

SEQ ID NO: 4971739 - DNA, 25 bp, Homo sapien
agtatcctcctcaagcccaataggg

SEQ ID NO: 4971740 - DNA, 25 bp, Homo sapien
ttcatgactttcctaatgtgggcca

SEQ ID NO: 4971741 - DNA, 25 bp, Homo sapien
tcttaagttcggaaacagcagtctc

SEQ ID NO: 4971742 - DNA, 25 bp, Homo sapien
tcttggcactgaaccagctcaggaa

SEQ ID NO: 4971743 - DNA, 25 bp, Homo sapien
ggagagtccccacatacattgatca

SEQ ID NO: 4971744 - DNA, 25 bp, Homo sapien
gcaagcttcgcaatgttggttcacc

SEQ ID NO: 4971745 - DNA, 25 bp, Homo sapien
tacgaatgaactttaggagagtccc

SEQ ID NO: 4971746 - DNA, 25 bp, Homo sapien
tagactgctgttgaaatccacgtgg

SEQ ID NO: 4971747 - DNA, 25 bp, Homo sapien
gaatgtaatgtcaagtcagactgcg

SEQ ID NO: 4971748 - DNA, 25 bp, Homo sapien
tgtgttcttcaaagggactgactca

SEQ ID NO: 4971749 - DNA, 25 bp, Homo sapien
tagtgctcagatgggaatcaatcaa

SEQ ID NO: 4971750 - DNA, 25 bp, Homo sapien
taagggccgtatgattagctgagca

SEQ ID NO: 4971751 - DNA, 25 bp, Homo sapien
tcactatctgtcactgcagcggctg

SEQ ID NO: 4971752 - DNA, 25 bp, Homo sapien
gggtctctcaataggatctgtccac

SEQ ID NO: 4971753 - DNA, 25 bp, Homo sapien
tactggatgctgcaaaagaatctac

SEQ ID NO: 4971754 - DNA, 25 bp, Homo sapien
tgctcacagtgtggtacagtactgg

SEQ ID NO: 4971755 - DNA, 25 bp, Homo sapien
gataaacttggattgcttacactgc

SEQ ID NO: 4971756 - DNA, 25 bp, Homo sapien
gaccttcccaactgatacgagactt

SEQ ID NO: 4971757 - DNA, 25 bp, Homo sapien
catttgaggctacacacactgaaga

SEQ ID NO: 4971758 - DNA, 25 bp, Homo sapien
tgtgacaggctctcaaaacttggag

SEQ ID NO: 4971759 - DNA, 25 bp, Homo sapien
ttttaaatcagaagactgcgagtcc

SEQ ID NO: 4971760 - DNA, 25 bp, Homo sapien
taagcattaccggactcctgttggg

SEQ ID NO: 4971761 - DNA, 25 bp, Homo sapien
tcttccaggtcagcgaagtttttca

SEQ ID NO: 4971762 - DNA, 25 bp, Homo sapien
gacgtttggcaaccagtctgataaa

SEQ ID NO: 4971763 - DNA, 25 bp, Homo sapien
catttgacacagaaattgggaagga

SEQ ID NO: 4971764 - DNA, 25 bp, Homo sapien
tacatttgacacagaaattgggaag

SEQ ID NO: 4971765 - DNA, 25 bp, Homo sapien
ctacatttgacacagaaattgggaa

SEQ ID NO: 4971766 - DNA, 25 bp, Homo sapien
acatttgacacagaaattgggaagg

SEQ ID NO: 4971767 - DNA, 25 bp, Homo sapien
cagagcccatgttgtgagcccaaga

SEQ ID NO: 4971768 - DNA, 25 bp, Homo sapien
gaagtagtgactgtgcttgagccag

SEQ ID NO: 4971769 - DNA, 25 bp, Homo sapien
ggtccttacattgccctgccatggt

SEQ ID NO: 4971770 - DNA, 25 bp, Homo sapien
tagtaagaacagcacaatcaccagg

SEQ ID NO: 4971771 - DNA, 25 bp, Homo sapien
aaatgtctgaatcatgtgcaagtac

SEQ ID NO: 4971772 - DNA, 25 bp, Homo sapien
gaaatgtctgaatcatgtgcaagta

SEQ ID NO: 4971773 - DNA, 25 bp, Homo sapien
gtgaaatgtctgaatcatgtgcaag

SEQ ID NO: 4971774 - DNA, 25 bp, Homo sapien
aagtgaaatgtctgaatcatgtgca

SEQ ID NO: 4971775 - DNA, 25 bp, Homo sapien
gcattgcataaacagttttcttgaa

SEQ ID NO: 4971776 - DNA, 25 bp, Homo sapien
gaagtgtctctaatttctgctaaac

SEQ ID NO: 4971777 - DNA, 25 bp, Homo sapien
ctctgtctgtccactgtatgtttca

SEQ ID NO: 4971778 - DNA, 25 bp, Homo sapien
tgaaatgcacaaaggtgacagtagc

SEQ ID NO: 4971779 - DNA, 25 bp, Homo sapien
actgttactacagcatatggaagac

SEQ ID NO: 4971780 - DNA, 25 bp, Homo sapien
tctcaaagatgtcataaggcgtcca

SEQ ID NO: 4971781 - DNA, 25 bp, Homo sapien
cctaggtttatctacaggctttgaa

SEQ ID NO: 4971782 - DNA, 25 bp, Homo sapien
ggaaatcctgttgagaggaatctca

SEQ ID NO: 4971783 - DNA, 25 bp, Homo sapien
gtaggcttgcagttcaatggtatct

SEQ ID NO: 4971784 - DNA, 25 bp, Homo sapien
gtgcatttcttgacatatggcaatc

SEQ ID NO: 4971785 - DNA, 25 bp, Homo sapien
tcaaagttaggagaaggatccaaag

SEQ ID NO: 4971786 - DNA, 25 bp, Homo sapien
ttcttgacatatggcaatcaaagtt

SEQ ID NO: 4971787 - DNA, 25 bp, Homo sapien
tatatctgggctacatcactctggg

SEQ ID NO: 4971788 - DNA, 25 bp, Homo sapien
tcttcaatgtagatgctctggtact

SEQ ID NO: 4971789 - DNA, 25 bp, Homo sapien
tgtcttccactttcacgcatctctg

SEQ ID NO: 4971790 - DNA, 25 bp, Homo sapien
gaactgttcttcaagttccctgcaa

SEQ ID NO: 4971791 - DNA, 25 bp, Homo sapien
tctctactattggtgtaacaaggtg

SEQ ID NO: 4971792 - DNA, 25 bp, Homo sapien
tacatcaagcctgcactggttaaga

SEQ ID NO: 4971793 - DNA, 25 bp, Homo sapien
tccagttcctcattgtgaaccagtt

SEQ ID NO: 4971794 - DNA, 25 bp, Homo sapien
taacgactgcagatcacagtttaca

SEQ ID NO: 4971795 - DNA, 25 bp, Homo sapien
catttacattcttgcttgattcttg

SEQ ID NO: 4971796 - DNA, 25 bp, Homo sapien
ggactactgtaccacacaggctgat

SEQ ID NO: 4971797 - DNA, 25 bp, Homo sapien
aaattcctatttatccacggcctca

SEQ ID NO: 4971798 - DNA, 25 bp, Homo sapien
gattcttgggatcaagcgttcctcc

SEQ ID NO: 4971799 - DNA, 25 bp, Homo sapien
tgtcctcctgatcttaggaatggtg

SEQ ID NO: 4971800 - DNA, 25 bp, Homo sapien
gctgtcctcctgatcttaggaatgg

SEQ ID NO: 4971801 - DNA, 25 bp, Homo sapien
tcctcctgatcttaggaatggtgaa

SEQ ID NO: 4971802 - DNA, 25 bp, Homo sapien
cctcctgatcttaggaatggtgaat

SEQ ID NO: 4971803 - DNA, 25 bp, Homo sapien
agttgagctcatttgccacagtgta

SEQ ID NO: 4971804 - DNA, 25 bp, Homo sapien
gccacagtgtatcctgtttagcagt

SEQ ID NO: 4971805 - DNA, 25 bp, Homo sapien
caaaggattgacttcacgagtattc

SEQ ID NO: 4971806 - DNA, 25 bp, Homo sapien
aacacgggtttgctagttgagctca

SEQ ID NO: 4971807 - DNA, 25 bp, Homo sapien
atatactttaacaggtattcaaaat

SEQ ID NO: 4971808 - DNA, 25 bp, Homo sapien
tatactttaacaggtattcaaaata

SEQ ID NO: 4971809 - DNA, 25 bp, Homo sapien
catatactttaacaggtattcaaaa

SEQ ID NO: 4971810 - DNA, 25 bp, Homo sapien
tccagcattacacagttataatcag

SEQ ID NO: 4971811 - DNA, 25 bp, Homo sapien
ctcagtccatacatgaaaactgata

SEQ ID NO: 4971812 - DNA, 25 bp, Homo sapien
taatcagtactcagtccatacatga

SEQ ID NO: 4971813 - DNA, 25 bp, Homo sapien
ccagcattacacagttataatcagt

SEQ ID NO: 4971814 - DNA, 25 bp, Homo sapien
ctaggagctgcagtacaaacagatt

SEQ ID NO: 4971815 - DNA, 25 bp, Homo sapien
acagattgagttccacaaaaaggcc

SEQ ID NO: 4971816 - DNA, 25 bp, Homo sapien
tggagtctaggagctgcagtacaaa

SEQ ID NO: 4971817 - DNA, 25 bp, Homo sapien
gctgcagtacaaacagattgagttc

SEQ ID NO: 4971818 - DNA, 25 bp, Homo sapien
agcgccgggacacgcggcaccgcat

SEQ ID NO: 4971819 - DNA, 25 bp, Homo sapien
acagcgccgggacacgcggcaccgc

SEQ ID NO: 4971820 - DNA, 25 bp, Homo sapien
agccacagcgccgggacacgcggca

SEQ ID NO: 4971821 - DNA, 25 bp, Homo sapien
aacagccacagcgccgggacacgcg

SEQ ID NO: 4971822 - DNA, 25 bp, Homo sapien
agcgagacagccggcgcaggcgggc

SEQ ID NO: 4971823 - DNA, 25 bp, Homo sapien
accggctcctgcagcgagacagccg

SEQ ID NO: 4971824 - DNA, 25 bp, Homo sapien
gcgagacagccggcgcaggcgggca

SEQ ID NO: 4971825 - DNA, 25 bp, Homo sapien
cgagacagccggcgcaggcgggcat

SEQ ID NO: 4971826 - DNA, 25 bp, Homo sapien
gactcaatcttagcacggtacagac

SEQ ID NO: 4971827 - DNA, 25 bp, Homo sapien
agcgaggtgcgcacagtgagcaggc

SEQ ID NO: 4971828 - DNA, 25 bp, Homo sapien
tgcacgtggaagctcgaagcccgta

SEQ ID NO: 4971829 - DNA, 25 bp, Homo sapien
gcaggaacggactcctgagagactt

SEQ ID NO: 4971830 - DNA, 25 bp, Homo sapien
ccatagagtccatagggtttttttg

SEQ ID NO: 4971831 - DNA, 25 bp, Homo sapien
agatgagattgtgcagtacacaagc

SEQ ID NO: 4971832 - DNA, 25 bp, Homo sapien
ggttgttcgtgcatacatttcaatg

SEQ ID NO: 4971833 - DNA, 25 bp, Homo sapien
tacatttcaatgacagatgagattg

SEQ ID NO: 4971834 - DNA, 25 bp, Homo sapien
ctaggttgttcgtgcatacatttca

SEQ ID NO: 4971835 - DNA, 25 bp, Homo sapien
ccaattctggaggtctgttccatga

SEQ ID NO: 4971836 - DNA, 25 bp, Homo sapien
ctggagcgcctccaattctggaggt

SEQ ID NO: 4971837 - DNA, 25 bp, Homo sapien
tggaggtctgttccatgatagcttt

SEQ ID NO: 4971838 - DNA, 25 bp, Homo sapien
gagcgcctccaattctggaggtctg

SEQ ID NO: 4971839 - DNA, 25 bp, Homo sapien
cagatagactggctatccagggagc

SEQ ID NO: 4971840 - DNA, 25 bp, Homo sapien
tggagacagagaacctcggtagacc

SEQ ID NO: 4971841 - DNA, 25 bp, Homo sapien
aggaccaagcttcgtttccagtggg

SEQ ID NO: 4971842 - DNA, 25 bp, Homo sapien
tagtctaccaagctggaaacaggac

SEQ ID NO: 4971843 - DNA, 25 bp, Homo sapien
tcagtgctcacatagacatccaggg

SEQ ID NO: 4971844 - DNA, 25 bp, Homo sapien
gggcaagggacatgggcaggctgct

SEQ ID NO: 4971845 - DNA, 25 bp, Homo sapien
tgctcagtgctcacatagacatcca

SEQ ID NO: 4971846 - DNA, 25 bp, Homo sapien
ctgctgctcagtgctcacatagaca

SEQ ID NO: 4971847 - DNA, 25 bp, Homo sapien
ctgagctccagcataaacgcagaca

SEQ ID NO: 4971848 - DNA, 25 bp, Homo sapien
cctctgagctccagcataaacgcag

SEQ ID NO: 4971849 - DNA, 25 bp, Homo sapien
cgaggcctattagacacctgctgct

SEQ ID NO: 4971850 - DNA, 25 bp, Homo sapien
gttctcctgcttcgaggcctattag

SEQ ID NO: 4971851 - DNA, 25 bp, Homo sapien
ctgtttaagtgactattcatgctgg

SEQ ID NO: 4971852 - DNA, 25 bp, Homo sapien
ttgcctgagacacaagaaccatccc

SEQ ID NO: 4971853 - DNA, 25 bp, Homo sapien
taatcagtgggccaataatgtccag

SEQ ID NO: 4971854 - DNA, 25 bp, Homo sapien
tatctaatcagtgggccaataatgt

SEQ ID NO: 4971855 - DNA, 25 bp, Homo sapien
cactctcttgctttgagatccatga

SEQ ID NO: 4971856 - DNA, 25 bp, Homo sapien
gggaaaagaacattcaatctggtgg

SEQ ID NO: 4971857 - DNA, 25 bp, Homo sapien
gatccatgaatcaagaagagattgt

SEQ ID NO: 4971858 - DNA, 25 bp, Homo sapien
gaaaagaacattcaatctggtggtt

SEQ ID NO: 4971859 - DNA, 25 bp, Homo sapien
aatgtctctttcctagtctaacaca

SEQ ID NO: 4971860 - DNA, 25 bp, Homo sapien
tgtttcttgtatgtcctcccatgga

SEQ ID NO: 4971861 - DNA, 25 bp, Homo sapien
tgaattgataatacttggtttcaga

SEQ ID NO: 4971862 - DNA, 25 bp, Homo sapien
acagttactctttcctaaggcacca

SEQ ID NO: 4971863 - DNA, 25 bp, Homo sapien
aggactaaagtgtgtgtatttgtca

SEQ ID NO: 4971864 - DNA, 25 bp, Homo sapien
catgtgtgtgaattgttctagccac

SEQ ID NO: 4971865 - DNA, 25 bp, Homo sapien
aaatataatcagataaaggactaaa

SEQ ID NO: 4971866 - DNA, 25 bp, Homo sapien
gtatttgtcatagataagctccttg

SEQ ID NO: 4971867 - DNA, 25 bp, Homo sapien
gtctgcatagtcttagcttgggcca

SEQ ID NO: 4971868 - DNA, 25 bp, Homo sapien
ttttcccagtgttccagtccttctc

SEQ ID NO: 4971869 - DNA, 25 bp, Homo sapien
caaacaaccaaaccattagccactg

SEQ ID NO: 4971870 - DNA, 25 bp, Homo sapien
tttcaaggtcttgaccaaacaacca

SEQ ID NO: 4971871 - DNA, 25 bp, Homo sapien
accagtctccagagatacatcttta

SEQ ID NO: 4971872 - DNA, 25 bp, Homo sapien
cattggtaaggtcaccagtctccag

SEQ ID NO: 4971873 - DNA, 25 bp, Homo sapien
tagatagatcccattggtaaggtca

SEQ ID NO: 4971874 - DNA, 25 bp, Homo sapien
tttcagtaaaccatagatagatccc

SEQ ID NO: 4971875 - DNA, 25 bp, Homo sapien
tgttggtcacgataacatcttccct

SEQ ID NO: 4971876 - DNA, 25 bp, Homo sapien
tcagtgcgcacacatctgctgtagc

SEQ ID NO: 4971877 - DNA, 25 bp, Homo sapien
gctgtagccggatgattccccaaca

SEQ ID NO: 4971878 - DNA, 25 bp, Homo sapien
gcacacatctgctgtagccggatga

SEQ ID NO: 4971879 - DNA, 25 bp, Homo sapien
cctcaaggctgacaaatggtggttt

SEQ ID NO: 4971880 - DNA, 25 bp, Homo sapien
tccgtggaggaatgtcaagtactga

SEQ ID NO: 4971881 - DNA, 25 bp, Homo sapien
gatacttgtcttcccttccgtggag

SEQ ID NO: 4971882 - DNA, 25 bp, Homo sapien
tcagcatgtgtgcagttagcatcca

SEQ ID NO: 4971883 - DNA, 25 bp, Homo sapien
gtgaaaaaggttgatattctctctg

SEQ ID NO: 4971884 - DNA, 25 bp, Homo sapien
tttgacaacagtgaaaaaggttgat

SEQ ID NO: 4971885 - DNA, 25 bp, Homo sapien
ccttatgcttgatttgacaacagtg

SEQ ID NO: 4971886 - DNA, 25 bp, Homo sapien
ttttgtagtatcatggggctgttcc

SEQ ID NO: 4971887 - DNA, 25 bp, Homo sapien
tctggaatagtgataacagggtcgt

SEQ ID NO: 4971888 - DNA, 25 bp, Homo sapien
tactcaattacagtacggcagcaat

SEQ ID NO: 4971889 - DNA, 25 bp, Homo sapien
caagggagttccactattttcacag

SEQ ID NO: 4971890 - DNA, 25 bp, Homo sapien
gaatcaatcatgtatctgcccacct

SEQ ID NO: 4971891 - DNA, 25 bp, Homo sapien
catcgtgacggtttgtttaggcgaa

SEQ ID NO: 4971892 - DNA, 25 bp, Homo sapien
tttagtaatactctgccatgcaatg

SEQ ID NO: 4971893 - DNA, 25 bp, Homo sapien
cactgaggtttctagccttagctgg

SEQ ID NO: 4971894 - DNA, 25 bp, Homo sapien
tacatcttgtctccagtcactgaaa

SEQ ID NO: 4971895 - DNA, 25 bp, Homo sapien
gatgcacttaacacttacaggtggg

SEQ ID NO: 4971896 - DNA, 25 bp, Homo sapien
gcaacaggacaccaccagtagagaa

SEQ ID NO: 4971897 - DNA, 25 bp, Homo sapien
gactaattatctatggaggacacgg

SEQ ID NO: 4971898 - DNA, 25 bp, Homo sapien
acatagagaacaacacgccctggaa

SEQ ID NO: 4971899 - DNA, 25 bp, Homo sapien
taaaatgagggtgtcatattacccc

SEQ ID NO: 4971900 - DNA, 25 bp, Homo sapien
tcagagtcaaatgacccgctaacat

SEQ ID NO: 4971901 - DNA, 25 bp, Homo sapien
gaatgacgtctatataatctcactg

SEQ ID NO: 4971902 - DNA, 25 bp, Homo sapien
taagatggtggtctggtaaaagctg

SEQ ID NO: 4971903 - DNA, 25 bp, Homo sapien
taatcagcaatttaagctctagcct

SEQ ID NO: 4971904 - DNA, 25 bp, Homo sapien
tctatacgtacagagaggatacagg

SEQ ID NO: 4971905 - DNA, 25 bp, Homo sapien
gctacatgatgtatgtcacaaaatg

SEQ ID NO: 4971906 - DNA, 25 bp, Homo sapien
gaagatggtaaaaatgcgatatgct

SEQ ID NO: 4971907 - DNA, 25 bp, Homo sapien
gcattgttccgttgggtatcatcac

SEQ ID NO: 4971908 - DNA, 25 bp, Homo sapien
aatgatttactcagggtcaggccgc

SEQ ID NO: 4971909 - DNA, 25 bp, Homo sapien
cgcaccttggcagaattacgtctta

SEQ ID NO: 4971910 - DNA, 25 bp, Homo sapien
catttagagtaggagggaaccttag

SEQ ID NO: 4971911 - DNA, 25 bp, Homo sapien
gcctttggtcccaagactactgaca

SEQ ID NO: 4971912 - DNA, 25 bp, Homo sapien
caaaatgcactcttgatgggaatga

SEQ ID NO: 4971913 - DNA, 25 bp, Homo sapien
gggacgggtgctcacaaaactatta

SEQ ID NO: 4971914 - DNA, 25 bp, Homo sapien
caatgctttaaacaatcgggtctag

SEQ ID NO: 4971915 - DNA, 25 bp, Homo sapien
ttttggccatgctctttagtgcaaa

SEQ ID NO: 4971916 - DNA, 25 bp, Homo sapien
gccatgctctttagtgcaaataagc

SEQ ID NO: 4971917 - DNA, 25 bp, Homo sapien
tgtttgactcaagtttcagggacat

SEQ ID NO: 4971918 - DNA, 25 bp, Homo sapien
taagcttgtgtttgactcaagtttc

SEQ ID NO: 4971919 - DNA, 25 bp, Homo sapien
taacgaattaaaactctcccatggc

SEQ ID NO: 4971920 - DNA, 25 bp, Homo sapien
tgccctacaggtaagcttagcagct

SEQ ID NO: 4971921 - DNA, 25 bp, Homo sapien
tagcaaagccattggatgaagcctc

SEQ ID NO: 4971922 - DNA, 25 bp, Homo sapien
gcatgaaaagctacaccaccaagat

SEQ ID NO: 4971923 - DNA, 25 bp, Homo sapien
ggtaaggtggtctcacctcacttac

SEQ ID NO: 4971924 - DNA, 25 bp, Homo sapien
gaatggaacagtaatagtattacgg

SEQ ID NO: 4971925 - DNA, 25 bp, Homo sapien
tccaagctttgaatggaacagtaat

SEQ ID NO: 4971926 - DNA, 25 bp, Homo sapien
cagtaatagtattacggtaaggtgg

SEQ ID NO: 4971927 - DNA, 25 bp, Homo sapien
gacaatagtctgttcttggcccaaa

SEQ ID NO: 4971928 - DNA, 25 bp, Homo sapien
gagttcaagcgggtcatcgtctcca

SEQ ID NO: 4971929 - DNA, 25 bp, Homo sapien
tcggctatctttaggaagcggcccc

SEQ ID NO: 4971930 - DNA, 25 bp, Homo sapien
tgtctaatccgtaggaagcgacccc

SEQ ID NO: 4971931 - DNA, 25 bp, Homo sapien
ccctacattcttgcctccgcggccg

SEQ ID NO: 4971932 - DNA, 25 bp, Homo sapien
agagccccctacattcttgcctccg

SEQ ID NO: 4971933 - DNA, 25 bp, Homo sapien
ttaggccagagccccctacattctt

SEQ ID NO: 4971934 - DNA, 25 bp, Homo sapien
cctccccttcgcctggctctttcca

SEQ ID NO: 4971935 - DNA, 25 bp, Homo sapien
cagctgcaagtaacaaacagacaca

SEQ ID NO: 4971936 - DNA, 25 bp, Homo sapien
agctgcaagtaacaaacagacacac

SEQ ID NO: 4971937 - DNA, 25 bp, Homo sapien
gggtgttgagaacaatcgcagacgc

SEQ ID NO: 4971938 - DNA, 25 bp, Homo sapien
gttgagaacaatcgcagacgcccct

SEQ ID NO: 4971939 - DNA, 25 bp, Homo sapien
aagatgggaatgaggaccgggcggc

SEQ ID NO: 4971940 - DNA, 25 bp, Homo sapien
tgcgaagagactacacttcccgagg

SEQ ID NO: 4971941 - DNA, 25 bp, Homo sapien
ccgggcggcgggaatgttctcactt

SEQ ID NO: 4971942 - DNA, 25 bp, Homo sapien
tccaccgggatgcaggactctagct

SEQ ID NO: 4971943 - DNA, 25 bp, Homo sapien
aaaagcatcctttcccgtaccagag

SEQ ID NO: 4971944 - DNA, 25 bp, Homo sapien
ggagagtcccgaaatttgttgcaat

SEQ ID NO: 4971945 - DNA, 25 bp, Homo sapien
ccacatctagcaggagcaaaagcat

SEQ ID NO: 4971946 - DNA, 25 bp, Homo sapien
tgtaagatggctacttgcatcaacc

SEQ ID NO: 4971947 - DNA, 25 bp, Homo sapien
cctgcaatttcccggtttataatgg

SEQ ID NO: 4971948 - DNA, 25 bp, Homo sapien
ggttgatttcagctgactggctata

SEQ ID NO: 4971949 - DNA, 25 bp, Homo sapien
tataatggttgatttcagctgactg

SEQ ID NO: 4971950 - DNA, 25 bp, Homo sapien
aatggttgatttcagctgactggct

SEQ ID NO: 4971951 - DNA, 25 bp, Homo sapien
caaccttatggaataggtccactcg

SEQ ID NO: 4971952 - DNA, 25 bp, Homo sapien
tatggaataggtccactcgtttagc

SEQ ID NO: 4971953 - DNA, 25 bp, Homo sapien
ctcgtttagctatcatgaggaccat

SEQ ID NO: 4971954 - DNA, 25 bp, Homo sapien
taggtccactcgtttagctatcatg

SEQ ID NO: 4971955 - DNA, 25 bp, Homo sapien
gctgaagcgagcacgacagtttttt

SEQ ID NO: 4971956 - DNA, 25 bp, Homo sapien
tgttctaactaaacattagaggcca

SEQ ID NO: 4971957 - DNA, 25 bp, Homo sapien
taatggctatgatcggctctgttgt

SEQ ID NO: 4971958 - DNA, 25 bp, Homo sapien
gatgttatatatagagctactgaac

SEQ ID NO: 4971959 - DNA, 25 bp, Homo sapien
gaatgtggtaatgtaattttgggcc

SEQ ID NO: 4971960 - DNA, 25 bp, Homo sapien
caggaatgctctggaacaatgaaca

SEQ ID NO: 4971961 - DNA, 25 bp, Homo sapien
cagattaatagaccttggaatacag

SEQ ID NO: 4971962 - DNA, 25 bp, Homo sapien
agaccttgtcctggccttaattgca

SEQ ID NO: 4971963 - DNA, 25 bp, Homo sapien
tcagcttcccaagtagctacaggca

SEQ ID NO: 4971964 - DNA, 25 bp, Homo sapien
gcaattctcttgcctcacctcagct

SEQ ID NO: 4971965 - DNA, 25 bp, Homo sapien
aattctcttgcctcacctcagcttc

SEQ ID NO: 4971966 - DNA, 25 bp, Homo sapien
cctcagcttcccaagtagctacagg

SEQ ID NO: 4971967 - DNA, 25 bp, Homo sapien
ccacaaacacatgggtgatgctttg

SEQ ID NO: 4971968 - DNA, 25 bp, Homo sapien
gcagcaaggtgagtttgtttacacc

SEQ ID NO: 4971969 - DNA, 25 bp, Homo sapien
gttacgatggcatgatgtcactagg

SEQ ID NO: 4971970 - DNA, 25 bp, Homo sapien
gatacttgttcctgttggctgcccg

SEQ ID NO: 4971971 - DNA, 25 bp, Homo sapien
ggacttcaaccttcatgtgatgtca

SEQ ID NO: 4971972 - DNA, 25 bp, Homo sapien
gtcctgacagcggacttcaaccttc

SEQ ID NO: 4971973 - DNA, 25 bp, Homo sapien
tcaaccttcatgtgatgtcaacaaa

SEQ ID NO: 4971974 - DNA, 25 bp, Homo sapien
gacagcggacttcaaccttcatgtg

SEQ ID NO: 4971975 - DNA, 25 bp, Homo sapien
gacgttgaagcttaagtaacacgca

SEQ ID NO: 4971976 - DNA, 25 bp, Homo sapien
tactcctcttttggcagagtgggag

SEQ ID NO: 4971977 - DNA, 25 bp, Homo sapien
tattaggctacaacatgacttaggg

SEQ ID NO: 4971978 - DNA, 25 bp, Homo sapien
tcaaagtctgtgctactccatggta

SEQ ID NO: 4971979 - DNA, 25 bp, Homo sapien
tatataagtctcatccgttcttttg

SEQ ID NO: 4971980 - DNA, 25 bp, Homo sapien
agtgtatataagtctcatccgttct

SEQ ID NO: 4971981 - DNA, 25 bp, Homo sapien
tctcatccgttcttttgattttctc

SEQ ID NO: 4971982 - DNA, 25 bp, Homo sapien
taagtctcatccgttcttttgattt

SEQ ID NO: 4971983 - DNA, 25 bp, Homo sapien
taagaaatcatgactgaggccgggc

SEQ ID NO: 4971984 - DNA, 25 bp, Homo sapien
tcatgactgggtaaaagatctgttc

SEQ ID NO: 4971985 - DNA, 25 bp, Homo sapien
tcgaagatccgtataactcagtgaa

SEQ ID NO: 4971986 - DNA, 25 bp, Homo sapien
tctgttcagagtacaagatggacca

SEQ ID NO: 4971987 - DNA, 25 bp, Homo sapien
tgttcagttgtcacagaagcacagc

SEQ ID NO: 4971988 - DNA, 25 bp, Homo sapien
caaggaaactaaggccgattcacac

SEQ ID NO: 4971989 - DNA, 25 bp, Homo sapien
gattggtggaaggacccgtcaacag

SEQ ID NO: 4971990 - DNA, 25 bp, Homo sapien
tacaccgagtagaggatgaagcggc

SEQ ID NO: 4971991 - DNA, 25 bp, Homo sapien
tgcgtggcacatggaaaattgaaag

SEQ ID NO: 4971992 - DNA, 25 bp, Homo sapien
ctttctgcgtggcacatggaaaatt

SEQ ID NO: 4971993 - DNA, 25 bp, Homo sapien
ttgaaagtatctctggttgcttctg

SEQ ID NO: 4971994 - DNA, 25 bp, Homo sapien
agtatctctggttgcttctgcgtag

SEQ ID NO: 4971995 - DNA, 25 bp, Homo sapien
tttatggcactggaaaatcaaagag

SEQ ID NO: 4971996 - DNA, 25 bp, Homo sapien
aataatgtgaaaatcaggggaatca

SEQ ID NO: 4971997 - DNA, 25 bp, Homo sapien
tcaatacaggttttttggcggacaa

SEQ ID NO: 4971998 - DNA, 25 bp, Homo sapien
taatttcgggtttatggcactggaa

SEQ ID NO: 4971999 - DNA, 25 bp, Homo sapien
gagaggagggaatgcgatgcgcctg

SEQ ID NO: 4972000 - DNA, 25 bp, Homo sapien
tgcgcctggtggcagccgtaggatc

SEQ ID NO: 4972001 - DNA, 25 bp, Homo sapien
ccttccaaggccgcactggaggaga

SEQ ID NO: 4972002 - DNA, 25 bp, Homo sapien
gaagactcggcatcaagatggagag

SEQ ID NO: 4972003 - DNA, 25 bp, Homo sapien
ctggctctgtctagagagatggaga

SEQ ID NO: 4972004 - DNA, 25 bp, Homo sapien
taagtcaaatgaatgcccagctgct

SEQ ID NO: 4972005 - DNA, 25 bp, Homo sapien
cagcaagactgatgatcatgatgta

SEQ ID NO: 4972006 - DNA, 25 bp, Homo sapien
tgttttttgttatttgcggctgaat

SEQ ID NO: 4972007 - DNA, 25 bp, Homo sapien
tttttgttatttgcggctgaatgca

SEQ ID NO: 4972008 - DNA, 25 bp, Homo sapien
tcactggctgccacgtggctctgac

SEQ ID NO: 4972009 - DNA, 25 bp, Homo sapien
ttgctcactggctgccacgtggctc

SEQ ID NO: 4972010 - DNA, 25 bp, Homo sapien
ctcactggctgccacgtggctctga

SEQ ID NO: 4972011 - DNA, 25 bp, Homo sapien
ctggctgccacgtggctctgaccat

SEQ ID NO: 4972012 - DNA, 25 bp, Homo sapien
acagttgaagcaacggttctttctt

SEQ ID NO: 4972013 - DNA, 25 bp, Homo sapien
cacagttgaagcaacggttctttct

SEQ ID NO: 4972014 - DNA, 25 bp, Homo sapien
gctatttatgaacctgaacaatgtt

SEQ ID NO: 4972015 - DNA, 25 bp, Homo sapien
tcatccatccggagttccactgtac

SEQ ID NO: 4972016 - DNA, 25 bp, Homo sapien
cataatagatactattcctggccat

SEQ ID NO: 4972017 - DNA, 25 bp, Homo sapien
gtctggtgttgcgtggaacttgtct

SEQ ID NO: 4972018 - DNA, 25 bp, Homo sapien
tcaaatatagctcccttcacgttgg

SEQ ID NO: 4972019 - DNA, 25 bp, Homo sapien
tgcctgccagagttgctcctctgaa

SEQ ID NO: 4972020 - DNA, 25 bp, Homo sapien
catgtgtaatggtgtcagcatctct

SEQ ID NO: 4972021 - DNA, 25 bp, Homo sapien
tcacgttggaccctctgaggttggc

SEQ ID NO: 4972022 - DNA, 25 bp, Homo sapien
tggctttaagagcagaaggatcctc

SEQ ID NO: 4972023 - DNA, 25 bp, Homo sapien
gagcatcttgactccctggagattt

SEQ ID NO: 4972024 - DNA, 25 bp, Homo sapien
tatcagcacctttcagattagcacc

SEQ ID NO: 4972025 - DNA, 25 bp, Homo sapien
ctgcattagaacagagcatcttgac

SEQ ID NO: 4972026 - DNA, 25 bp, Homo sapien
gttaatgtatcgaaggtccaaacaa

SEQ ID NO: 4972027 - DNA, 25 bp, Homo sapien
gtatcgaaggtccaaacaagaaaga

SEQ ID NO: 4972028 - DNA, 25 bp, Homo sapien
tgcaagactgcagcggcttaaactg

SEQ ID NO: 4972029 - DNA, 25 bp, Homo sapien
ctgcagcggcttaaactggcaattt

SEQ ID NO: 4972030 - DNA, 25 bp, Homo sapien
ctgtccacaaagcaagtaattcaaa

SEQ ID NO: 4972031 - DNA, 25 bp, Homo sapien
tccacaaagcaagtaattcaaaatg

SEQ ID NO: 4972032 - DNA, 25 bp, Homo sapien
gctgtccacaaagcaagtaattcaa

SEQ ID NO: 4972033 - DNA, 25 bp, Homo sapien
tgtccacaaagcaagtaattcaaaa

SEQ ID NO: 4972034 - DNA, 25 bp, Homo sapien
tttaatgtcagccagtctgtgtgga

SEQ ID NO: 4972035 - DNA, 25 bp, Homo sapien
ctgaagtgctccgtgtagttgtaaa

SEQ ID NO: 4972036 - DNA, 25 bp, Homo sapien
agtaccgcccctccaacatttaatg

SEQ ID NO: 4972037 - DNA, 25 bp, Homo sapien
gaggcttagaatctgcctgaggatc

SEQ ID NO: 4972038 - DNA, 25 bp, Homo sapien
cctctaccctctcggattcgcctcc

SEQ ID NO: 4972039 - DNA, 25 bp, Homo sapien
ctgctgggtcctgagtgagccgcca

SEQ ID NO: 4972040 - DNA, 25 bp, Homo sapien
gcctcatcgcgctgcccctgctggg

SEQ ID NO: 4972041 - DNA, 25 bp, Homo sapien
tctcggattcgcctccctttgccac

SEQ ID NO: 4972042 - DNA, 25 bp, Homo sapien
caactacccccggtacaatcattga

SEQ ID NO: 4972043 - DNA, 25 bp, Homo sapien
tgaagcaactacccccggtacaatc

SEQ ID NO: 4972044 - DNA, 25 bp, Homo sapien
acaagaatggttgagggtctggcca

SEQ ID NO: 4972045 - DNA, 25 bp, Homo sapien
catgaacttggagacaagaatggtt

SEQ ID NO: 4972046 - DNA, 25 bp, Homo sapien
tctttctcagtttccgtgaggctca

SEQ ID NO: 4972047 - DNA, 25 bp, Homo sapien
caacaaggtgggaactatccttcag

SEQ ID NO: 4972048 - DNA, 25 bp, Homo sapien
gctcagaatggtgggcgtttctgct

SEQ ID NO: 4972049 - DNA, 25 bp, Homo sapien
tgttactgtgacgaagctctccagg

SEQ ID NO: 4972050 - DNA, 25 bp, Homo sapien
caacttgccttttagctttcgagtg

SEQ ID NO: 4972051 - DNA, 25 bp, Homo sapien
caactgacccaacttgccttttagc

SEQ ID NO: 4972052 - DNA, 25 bp, Homo sapien
cccaacttgccttttagctttcgag

SEQ ID NO: 4972053 - DNA, 25 bp, Homo sapien
tgccttttagctttcgagtgtccat

SEQ ID NO: 4972054 - DNA, 25 bp, Homo sapien
agttgacttttgtgtgcggtataag

SEQ ID NO: 4972055 - DNA, 25 bp, Homo sapien
gttgacttttgtgtgcggtataaga

SEQ ID NO: 4972056 - DNA, 25 bp, Homo sapien
aaatgtctagttagaccttttgctc

SEQ ID NO: 4972057 - DNA, 25 bp, Homo sapien
tgacttttgtgtgcggtataagata

SEQ ID NO: 4972058 - DNA, 25 bp, Homo sapien
tagcaatcagtgatcggatgcagat

SEQ ID NO: 4972059 - DNA, 25 bp, Homo sapien
taacaattcagggaggtacaacaac

SEQ ID NO: 4972060 - DNA, 25 bp, Homo sapien
gggtagctgctaccgttttaagagc

SEQ ID NO: 4972061 - DNA, 25 bp, Homo sapien
taggctgcatgcaagtttctccaag

SEQ ID NO: 4972062 - DNA, 25 bp, Homo sapien
gaagagatgcccttcaattggccaa

SEQ ID NO: 4972063 - DNA, 25 bp, Homo sapien
tctgaagtgcaattggaaagtttcc

SEQ ID NO: 4972064 - DNA, 25 bp, Homo sapien
gattgtaccactaggactggccact

SEQ ID NO: 4972065 - DNA, 25 bp, Homo sapien
tattgtatccactacatgccagccc

SEQ ID NO: 4972066 - DNA, 25 bp, Homo sapien
tgttttcatgctcggatgaagggtg

SEQ ID NO: 4972067 - DNA, 25 bp, Homo sapien
tagcagtgtttcgtggcaatgaaag

SEQ ID NO: 4972068 - DNA, 25 bp, Homo sapien
cacaacagccttgtgttagcagtgt

SEQ ID NO: 4972069 - DNA, 25 bp, Homo sapien
tggaagttgagtatacacaacagcc

SEQ ID NO: 4972070 - DNA, 25 bp, Homo sapien
cggttctgggcctacagtagttaca

SEQ ID NO: 4972071 - DNA, 25 bp, Homo sapien
tagttacatggaatggaaacttgag

SEQ ID NO: 4972072 - DNA, 25 bp, Homo sapien
cactagggaatcatcagaaatactt

SEQ ID NO: 4972073 - DNA, 25 bp, Homo sapien
tacagtagttacatggaatggaaac

SEQ ID NO: 4972074 - DNA, 25 bp, Homo sapien
catgcaggaacacatgtaactgtgg

SEQ ID NO: 4972075 - DNA, 25 bp, Homo sapien
taactgtggttatgcgctgtacatg

SEQ ID NO: 4972076 - DNA, 25 bp, Homo sapien
cacagtcccttgtgagcatgcagga

SEQ ID NO: 4972077 - DNA, 25 bp, Homo sapien
tcttctcttacaacacagtcccttg

SEQ ID NO: 4972078 - DNA, 25 bp, Homo sapien
tcagggtgcaataaacctctcaaat

SEQ ID NO: 4972079 - DNA, 25 bp, Homo sapien
caataaacctctcaaatccttgggc

SEQ ID NO: 4972080 - DNA, 25 bp, Homo sapien
tgcaataaacctctcaaatccttgg

SEQ ID NO: 4972081 - DNA, 25 bp, Homo sapien
gggtgcaataaacctctcaaatcct

SEQ ID NO: 4972082 - DNA, 25 bp, Homo sapien
agttttgacaatgtcggatctcctt

SEQ ID NO: 4972083 - DNA, 25 bp, Homo sapien
gtcggatctccttcatgcgctcttg

SEQ ID NO: 4972084 - DNA, 25 bp, Homo sapien
atctctgatgctttcgcttctggag

SEQ ID NO: 4972085 - DNA, 25 bp, Homo sapien
gatgctttcgcttctggagttttga

SEQ ID NO: 4972086 - DNA, 25 bp, Homo sapien
tctagaaggataaggagctgtccac

SEQ ID NO: 4972087 - DNA, 25 bp, Homo sapien
catcagaattcttacttgcaaacaa

SEQ ID NO: 4972088 - DNA, 25 bp, Homo sapien
actgactctggctagattaagcaga

SEQ ID NO: 4972089 - DNA, 25 bp, Homo sapien
tggctagattaagcagaaaggaatc

SEQ ID NO: 4972090 - DNA, 25 bp, Homo sapien
ccatggtctttgtgttccctggaca

SEQ ID NO: 4972091 - DNA, 25 bp, Homo sapien
ttctgaaaagtctctgctactaagc

SEQ ID NO: 4972092 - DNA, 25 bp, Homo sapien
aaacaagagcacaccacgggctaag

SEQ ID NO: 4972093 - DNA, 25 bp, Homo sapien
tggcagctatctgattgcctctgtt

SEQ ID NO: 4972094 - DNA, 25 bp, Homo sapien
ggcagagccaaaaggggtttgagag

SEQ ID NO: 4972095 - DNA, 25 bp, Homo sapien
tgccctagactcttagcttcttgcc

SEQ ID NO: 4972096 - DNA, 25 bp, Homo sapien
caccaaaactcttctgattcctttt

SEQ ID NO: 4972097 - DNA, 25 bp, Homo sapien
tgattccttttactcctgctgcagc

SEQ ID NO: 4972098 - DNA, 25 bp, Homo sapien
gccctggattttgccctagactctt

SEQ ID NO: 4972099 - DNA, 25 bp, Homo sapien
tgtttctgtagtggggtacgatcca

SEQ ID NO: 4972100 - DNA, 25 bp, Homo sapien
ggcttctcatttccgtctcttagtt

SEQ ID NO: 4972101 - DNA, 25 bp, Homo sapien
tagtggggtacgatccactgacgtt

SEQ ID NO: 4972102 - DNA, 25 bp, Homo sapien
tttccgtctcttagttctgcttctg

SEQ ID NO: 4972103 - DNA, 25 bp, Homo sapien
tcctactcatgacatatgcacagcc

SEQ ID NO: 4972104 - DNA, 25 bp, Homo sapien
tccataggataaagatcatcactcc

SEQ ID NO: 4972105 - DNA, 25 bp, Homo sapien
taaagatcatcactcctactcatga

SEQ ID NO: 4972106 - DNA, 25 bp, Homo sapien
tatagtccataggataaagatcatc

SEQ ID NO: 4972107 - DNA, 25 bp, Homo sapien
cacacgcttgttttgttaaggagag

SEQ ID NO: 4972108 - DNA, 25 bp, Homo sapien
gctcgcgaaggccacacgcttgttt

SEQ ID NO: 4972109 - DNA, 25 bp, Homo sapien
gaaggccacacgcttgttttgttaa

SEQ ID NO: 4972110 - DNA, 25 bp, Homo sapien
tttctcttttggctcgcgaaggcca

SEQ ID NO: 4972111 - DNA, 25 bp, Homo sapien
tccattggtggtgctactgttccca

SEQ ID NO: 4972112 - DNA, 25 bp, Homo sapien
catccattggtggtgctactgttcc

SEQ ID NO: 4972113 - DNA, 25 bp, Homo sapien
ccattggtggtgctactgttcccat

SEQ ID NO: 4972114 - DNA, 25 bp, Homo sapien
caacatccattggtggtgctactgt

SEQ ID NO: 4972115 - DNA, 25 bp, Homo sapien
ccttttaacattgacatcatacact

SEQ ID NO: 4972116 - DNA, 25 bp, Homo sapien
ttccttttaacattgacatcataca

SEQ ID NO: 4972117 - DNA, 25 bp, Homo sapien
tggcttccacctgtggaaagtcgtc

SEQ ID NO: 4972118 - DNA, 25 bp, Homo sapien
tccacctgtggaaagtcgtccctga

SEQ ID NO: 4972119 - DNA, 25 bp, Homo sapien
ctttgttactgaacatggcaggagg

SEQ ID NO: 4972120 - DNA, 25 bp, Homo sapien
aagcagtttcataacattctggctt

SEQ ID NO: 4972121 - DNA, 25 bp, Homo sapien
aaagcagtttcataacattctggct

SEQ ID NO: 4972122 - DNA, 25 bp, Homo sapien
taagataaagggtcctgctgctgca

SEQ ID NO: 4972123 - DNA, 25 bp, Homo sapien
tttccatccctaataactgcttgga

SEQ ID NO: 4972124 - DNA, 25 bp, Homo sapien
gcttggaacctgactaagataaagg

SEQ ID NO: 4972125 - DNA, 25 bp, Homo sapien
aataactgcttggaacctgactaag

SEQ ID NO: 4972126 - DNA, 25 bp, Homo sapien
cagggctagcattgattggcaatgg

SEQ ID NO: 4972127 - DNA, 25 bp, Homo sapien
gcacaatcagggctagcattgattg

SEQ ID NO: 4972128 - DNA, 25 bp, Homo sapien
aatcagggctagcattgattggcaa

SEQ ID NO: 4972129 - DNA, 25 bp, Homo sapien
caatcagggctagcattgattggca

SEQ ID NO: 4972130 - DNA, 25 bp, Homo sapien
aaatattagctaggcctgactctgc

SEQ ID NO: 4972131 - DNA, 25 bp, Homo sapien
tcccatccaaatattagctaggcct

SEQ ID NO: 4972132 - DNA, 25 bp, Homo sapien
ccatccaaatattagctaggcctga

SEQ ID NO: 4972133 - DNA, 25 bp, Homo sapien
tccaaatattagctaggcctgactc

SEQ ID NO: 4972134 - DNA, 25 bp, Homo sapien
atgagatggcgacgcgccccgcgcc

SEQ ID NO: 4972135 - DNA, 25 bp, Homo sapien
tcgcaccatgagatggcgacgcgcc

SEQ ID NO: 4972136 - DNA, 25 bp, Homo sapien
accatgagatggcgacgcgccccgc

SEQ ID NO: 4972137 - DNA, 25 bp, Homo sapien
ctcgcaccatgagatggcgacgcgc

SEQ ID NO: 4972138 - DNA, 25 bp, Homo sapien
tcgtccccgcccagcgtgggatcgg

SEQ ID NO: 4972139 - DNA, 25 bp, Homo sapien
atcgagggaaaggtgcacccgcagc

SEQ ID NO: 4972140 - DNA, 25 bp, Homo sapien
tgcaggagctagctcagcgcgccgc

SEQ ID NO: 4972141 - DNA, 25 bp, Homo sapien
tgatcgagggaaaggtgcacccgca

SEQ ID NO: 4972142 - DNA, 25 bp, Homo sapien
gccggccgccttccgagcctctttc

SEQ ID NO: 4972143 - DNA, 25 bp, Homo sapien
gaggacagcaggtacatcttcttca

SEQ ID NO: 4972144 - DNA, 25 bp, Homo sapien
tcctgcgggaggctcaaggaggaca

SEQ ID NO: 4972145 - DNA, 25 bp, Homo sapien
ttcatggagcccgacgccaacagca

SEQ ID NO: 4972146 - DNA, 25 bp, Homo sapien
tgagtcccgcaggattttaacgcct

SEQ ID NO: 4972147 - DNA, 25 bp, Homo sapien
taacgccttcccttcacttggagtc

SEQ ID NO: 4972148 - DNA, 25 bp, Homo sapien
tcttgtgggtgatatgaacttggct

SEQ ID NO: 4972149 - DNA, 25 bp, Homo sapien
caagtagatcggaaatgtgccggct

SEQ ID NO: 4972150 - DNA, 25 bp, Homo sapien
cactgcatcagaacagatgaacgaa

SEQ ID NO: 4972151 - DNA, 25 bp, Homo sapien
tgaaaagtattcttcccgggtctgc

SEQ ID NO: 4972152 - DNA, 25 bp, Homo sapien
tatataatcactaacacatagcggg

SEQ ID NO: 4972153 - DNA, 25 bp, Homo sapien
gaatatcacatgtaggccctgaaga

SEQ ID NO: 4972154 - DNA, 25 bp, Homo sapien
tatggactagccttctctcgaaacc

SEQ ID NO: 4972155 - DNA, 25 bp, Homo sapien
gacgtggatggtaacctgcattgca

SEQ ID NO: 4972156 - DNA, 25 bp, Homo sapien
tgaaattcagctgtccgggtccaag

SEQ ID NO: 4972157 - DNA, 25 bp, Homo sapien
cacaagactgtgaatgcaaatggtc

SEQ ID NO: 4972158 - DNA, 25 bp, Homo sapien
gctgcttgggcagggacggctttcc

SEQ ID NO: 4972159 - DNA, 25 bp, Homo sapien
tcctctcttgaatacactaggttct

SEQ ID NO: 4972160 - DNA, 25 bp, Homo sapien
ctgaactgtttgctcataaacatgt

SEQ ID NO: 4972161 - DNA, 25 bp, Homo sapien
tgaatacactaggttctggttcctc

SEQ ID NO: 4972162 - DNA, 25 bp, Homo sapien
gatttatgaccatttacaggatgct

SEQ ID NO: 4972163 - DNA, 25 bp, Homo sapien
tcttgcaaggtgttatgctggctga

SEQ ID NO: 4972164 - DNA, 25 bp, Homo sapien
gaagggtgtgtttttagctagcaag

SEQ ID NO: 4972165 - DNA, 25 bp, Homo sapien
ttcgtttagtgaagagcccttaggc

SEQ ID NO: 4972166 - DNA, 25 bp, Homo sapien
gacttccgtcattgtaattactgtg

SEQ ID NO: 4972167 - DNA, 25 bp, Homo sapien
cattggttaggacccactgacttcc

SEQ ID NO: 4972168 - DNA, 25 bp, Homo sapien
taatatcactgggagagttacttat

SEQ ID NO: 4972169 - DNA, 25 bp, Homo sapien
cagacctctttacagagccctttta

SEQ ID NO: 4972170 - DNA, 25 bp, Homo sapien
tgagcagcccaaggcaccaaagcct

SEQ ID NO: 4972171 - DNA, 25 bp, Homo sapien
tgtcccagtttctgagcagcccaag

SEQ ID NO: 4972172 - DNA, 25 bp, Homo sapien
agtttctgagcagcccaaggcacca

SEQ ID NO: 4972173 - DNA, 25 bp, Homo sapien
cttattcagtgtcccagtttctgag

SEQ ID NO: 4972174 - DNA, 25 bp, Homo sapien
tatacagttgatctttagcagtgga

SEQ ID NO: 4972175 - DNA, 25 bp, Homo sapien
ttaggctcctgaatggctgtcggca

SEQ ID NO: 4972176 - DNA, 25 bp, Homo sapien
gatctttatttaggctcctgaatgg

SEQ ID NO: 4972177 - DNA, 25 bp, Homo sapien
cattaaagtctctatttcttggtcc

SEQ ID NO: 4972178 - DNA, 25 bp, Homo sapien
agaaggaatccatttgttctgtgaa

SEQ ID NO: 4972179 - DNA, 25 bp, Homo sapien
tgagaaattttggtcttgcagaagg

SEQ ID NO: 4972180 - DNA, 25 bp, Homo sapien
aattttggtcttgcagaaggaatcc

SEQ ID NO: 4972181 - DNA, 25 bp, Homo sapien
ggtcttgcagaaggaatccatttgt

SEQ ID NO: 4972182 - DNA, 25 bp, Homo sapien
tattcatacctaagattcgtcagct

SEQ ID NO: 4972183 - DNA, 25 bp, Homo sapien
ccctggaataagtcacatttcatat

SEQ ID NO: 4972184 - DNA, 25 bp, Homo sapien
caaggccagaggtttcagagtatta

SEQ ID NO: 4972185 - DNA, 25 bp, Homo sapien
tctgggaatgtttcaccgatattca

SEQ ID NO: 4972186 - DNA, 25 bp, Homo sapien
taatgatattacttgatttccagga

SEQ ID NO: 4972187 - DNA, 25 bp, Homo sapien
tacttctgatatgtgtgaaggtgac

SEQ ID NO: 4972188 - DNA, 25 bp, Homo sapien
tgtctgtgtacttccctttgtttta

SEQ ID NO: 4972189 - DNA, 25 bp, Homo sapien
ggtgacatatttattctattggcta

SEQ ID NO: 4972190 - DNA, 25 bp, Homo sapien
cctctccctctgacaaatttcacat

SEQ ID NO: 4972191 - DNA, 25 bp, Homo sapien
ctttggtctgtcttatccttggaaa

SEQ ID NO: 4972192 - DNA, 25 bp, Homo sapien
tgttttcacgtttgagagcatcacc

SEQ ID NO: 4972193 - DNA, 25 bp, Homo sapien
ccttggaaatgttttcacgtttgag

SEQ ID NO: 4972194 - DNA, 25 bp, Homo sapien
tttggtgtagttcactggatgtgcc

SEQ ID NO: 4972195 - DNA, 25 bp, Homo sapien
ttcccagaggctacagtttggtgta

SEQ ID NO: 4972196 - DNA, 25 bp, Homo sapien
taagaatgtgttgtttgaatcctgg

SEQ ID NO: 4972197 - DNA, 25 bp, Homo sapien
tgtgcctgtggacactgaacttgac

SEQ ID NO: 4972198 - DNA, 25 bp, Homo sapien
tatgtgtgcgtcatggacacctgga

SEQ ID NO: 4972199 - DNA, 25 bp, Homo sapien
taagggtcccatgaaagattaggtc

SEQ ID NO: 4972200 - DNA, 25 bp, Homo sapien
gagaagtcctccacctatgtgtgcg

SEQ ID NO: 4972201 - DNA, 25 bp, Homo sapien
cagccatccctattatgactctaag

SEQ ID NO: 4972202 - DNA, 25 bp, Homo sapien
ttgaaggatggacaaagccaggtct

SEQ ID NO: 4972203 - DNA, 25 bp, Homo sapien
aagccaggtctgataaagcgttaga

SEQ ID NO: 4972204 - DNA, 25 bp, Homo sapien
tttgaaggatggacaaagccaggtc

SEQ ID NO: 4972205 - DNA, 25 bp, Homo sapien
tctgataaagcgttagaatttgtca

SEQ ID NO: 4972206 - DNA, 25 bp, Homo sapien
attattcaacactgtgaatactgta

SEQ ID NO: 4972207 - DNA, 25 bp, Homo sapien
tattattcaacactgtgaatactgt

SEQ ID NO: 4972208 - DNA, 25 bp, Homo sapien
tacatagatgagttttctggagatt

SEQ ID NO: 4972209 - DNA, 25 bp, Homo sapien
ctacatagatgagttttctggagat

SEQ ID NO: 4972210 - DNA, 25 bp, Homo sapien
acatagatgagttttctggagattt

SEQ ID NO: 4972211 - DNA, 25 bp, Homo sapien
ggaagctgaagttccttactagaga

SEQ ID NO: 4972212 - DNA, 25 bp, Homo sapien
gggcattctgcccactaatgactag

SEQ ID NO: 4972213 - DNA, 25 bp, Homo sapien
taactctgaacccagtgggcactgc

SEQ ID NO: 4972214 - DNA, 25 bp, Homo sapien
agttttgtagttcctggagttgcac

SEQ ID NO: 4972215 - DNA, 25 bp, Homo sapien
atccacactgtgtttactgtactgt

SEQ ID NO: 4972216 - DNA, 25 bp, Homo sapien
tccacactgtgtttactgtactgtg

SEQ ID NO: 4972217 - DNA, 25 bp, Homo sapien
ctgtactgtgctgtctccatcccat

SEQ ID NO: 4972218 - DNA, 25 bp, Homo sapien
gatccacactgtgtttactgtactg

SEQ ID NO: 4972219 - DNA, 25 bp, Homo sapien
aagcaggtctgttaagggcaaagga

SEQ ID NO: 4972220 - DNA, 25 bp, Homo sapien
caggtgactagcaggaagcaggtct

SEQ ID NO: 4972221 - DNA, 25 bp, Homo sapien
ttttcccaggtgactagcaggaagc

SEQ ID NO: 4972222 - DNA, 25 bp, Homo sapien
agatttttcccaggtgactagcagg

SEQ ID NO: 4972223 - DNA, 25 bp, Homo sapien
tcagtttatgtcctgtaggaggacc

SEQ ID NO: 4972224 - DNA, 25 bp, Homo sapien
ttctttcaagggcttgctgtaagtt

SEQ ID NO: 4972225 - DNA, 25 bp, Homo sapien
gaatgacattcttcatgaccgccat

SEQ ID NO: 4972226 - DNA, 25 bp, Homo sapien
tttgtatcctaaagggagaaagcag

SEQ ID NO: 4972227 - DNA, 25 bp, Homo sapien
tcctcttaacacgaagaaaagaatg

SEQ ID NO: 4972228 - DNA, 25 bp, Homo sapien
agaatactccaggaaataggtgttg

SEQ ID NO: 4972229 - DNA, 25 bp, Homo sapien
gggagagagaatactccaggaaata

SEQ ID NO: 4972230 - DNA, 25 bp, Homo sapien
agtaccggggagagagaatactcca

SEQ ID NO: 4972231 - DNA, 25 bp, Homo sapien
tcagacatattcaggagtaccgggg

SEQ ID NO: 4972232 - DNA, 25 bp, Homo sapien
ccaaggtgagttgggattcacgatt

SEQ ID NO: 4972233 - DNA, 25 bp, Homo sapien
ctctcaatcccaaggtgagttggga

SEQ ID NO: 4972234 - DNA, 25 bp, Homo sapien
caatcccaaggtgagttgggattca

SEQ ID NO: 4972235 - DNA, 25 bp, Homo sapien
tggaaatcacatctaaaacttgagt

SEQ ID NO: 4972236 - DNA, 25 bp, Homo sapien
tccggtgtcacaaggcattgaaaac

SEQ ID NO: 4972237 - DNA, 25 bp, Homo sapien
aagtgttgggttggtgaagcatttt

SEQ ID NO: 4972238 - DNA, 25 bp, Homo sapien
tttctccggtgtcacaaggcattga

SEQ ID NO: 4972239 - DNA, 25 bp, Homo sapien
ttgctacagattgcaggcttttctc

SEQ ID NO: 4972240 - DNA, 25 bp, Homo sapien
ttttcaattagcaaaggttcctgcc

SEQ ID NO: 4972241 - DNA, 25 bp, Homo sapien
ctttttcctccaagtggttaatgat

SEQ ID NO: 4972242 - DNA, 25 bp, Homo sapien
tagcaaaggttcctgccattttaac

SEQ ID NO: 4972243 - DNA, 25 bp, Homo sapien
tctgagacattctatcttcatttct

SEQ ID NO: 4972244 - DNA, 25 bp, Homo sapien
atgttctagctccttggttggctcc

SEQ ID NO: 4972245 - DNA, 25 bp, Homo sapien
gttctagctccttggttggctccaa

SEQ ID NO: 4972246 - DNA, 25 bp, Homo sapien
ttggcatacttcaagccagcagcag

SEQ ID NO: 4972247 - DNA, 25 bp, Homo sapien
ggcatacttcaagccagcagcagcc

SEQ ID NO: 4972248 - DNA, 25 bp, Homo sapien
tgtaatctaaaactgcttcataact

SEQ ID NO: 4972249 - DNA, 25 bp, Homo sapien
taatctaaaactgcttcataacttc

SEQ ID NO: 4972250 - DNA, 25 bp, Homo sapien
tttgtaatctaaaactgcttcataa

SEQ ID NO: 4972251 - DNA, 25 bp, Homo sapien
actttgtaatctaaaactgcttcat

SEQ ID NO: 4972252 - DNA, 25 bp, Homo sapien
gatgtctggaataagagccagattt

SEQ ID NO: 4972253 - DNA, 25 bp, Homo sapien
ctctgatgtctggaataagagccag

SEQ ID NO: 4972254 - DNA, 25 bp, Homo sapien
tgtctggaataagagccagatttcc

SEQ ID NO: 4972255 - DNA, 25 bp, Homo sapien
tctggaataagagccagatttccca

SEQ ID NO: 4972256 - DNA, 25 bp, Homo sapien
ggctcatcagctttttcagggagta

SEQ ID NO: 4972257 - DNA, 25 bp, Homo sapien
aggaaatgcaaggctcatcagcttt

SEQ ID NO: 4972258 - DNA, 25 bp, Homo sapien
tcatcagctttttcagggagtagca

SEQ ID NO: 4972259 - DNA, 25 bp, Homo sapien
catcagctttttcagggagtagcat

SEQ ID NO: 4972260 - DNA, 25 bp, Homo sapien
gaaactgctttcaattcctgaaggg

SEQ ID NO: 4972261 - DNA, 25 bp, Homo sapien
tcctttcctggatcagagttggagg

SEQ ID NO: 4972262 - DNA, 25 bp, Homo sapien
gatggattctcatcaatggccccta

SEQ ID NO: 4972263 - DNA, 25 bp, Homo sapien
gaggttgctcctacattcatacgca

SEQ ID NO: 4972264 - DNA, 25 bp, Homo sapien
cattgcatcattagacagaattgtg

SEQ ID NO: 4972265 - DNA, 25 bp, Homo sapien
tgtgtgaccattcccaaagagattg

SEQ ID NO: 4972266 - DNA, 25 bp, Homo sapien
tgaaagtctggctttcattgcatca

SEQ ID NO: 4972267 - DNA, 25 bp, Homo sapien
tctttctctttattcgattgtttgc

SEQ ID NO: 4972268 - DNA, 25 bp, Homo sapien
tttccactcgctgggctcagtcagg

SEQ ID NO: 4972269 - DNA, 25 bp, Homo sapien
tctttcattagtgaaacagaggtgg

SEQ ID NO: 4972270 - DNA, 25 bp, Homo sapien
catttccactcgctgggctcagtca

SEQ ID NO: 4972271 - DNA, 25 bp, Homo sapien
acttcctgtgaaatcgcagggacag

SEQ ID NO: 4972272 - DNA, 25 bp, Homo sapien
gacggtcctgttgcaaattcaatga

SEQ ID NO: 4972273 - DNA, 25 bp, Homo sapien
gccagccagtctacctagtccatag

SEQ ID NO: 4972274 - DNA, 25 bp, Homo sapien
tatccagcagatatatcagtggaga

SEQ ID NO: 4972275 - DNA, 25 bp, Homo sapien
tatatcagtggagatggcccgagtg

SEQ ID NO: 4972276 - DNA, 25 bp, Homo sapien
ctggaagggacagggttgtgctctc

SEQ ID NO: 4972277 - DNA, 25 bp, Homo sapien
taaatcttatgttgtagtggctgga

SEQ ID NO: 4972278 - DNA, 25 bp, Homo sapien
tttataaatcttatgttgtagtggc

SEQ ID NO: 4972279 - DNA, 25 bp, Homo sapien
gctggaagggacagggttgtgctct

SEQ ID NO: 4972280 - DNA, 25 bp, Homo sapien
taactcgatgaggatgctgtttgga

SEQ ID NO: 4972281 - DNA, 25 bp, Homo sapien
tttggatcttgagtactgtaagtcc

SEQ ID NO: 4972282 - DNA, 25 bp, Homo sapien
tgtaagtcctgtggtttaattgacg

SEQ ID NO: 4972283 - DNA, 25 bp, Homo sapien
tacacaaagtgagaataactcgatg

SEQ ID NO: 4972284 - DNA, 25 bp, Homo sapien
ctactattgagcaataaaagaaatg

SEQ ID NO: 4972285 - DNA, 25 bp, Homo sapien
tctactattgagcaataaaagaaat

SEQ ID NO: 4972286 - DNA, 25 bp, Homo sapien
tactattgagcaataaaagaaatgt

SEQ ID NO: 4972287 - DNA, 25 bp, Homo sapien
actcccttttatcatattgggttat

SEQ ID NO: 4972288 - DNA, 25 bp, Homo sapien
cttttatcatattgggttatcaaca

SEQ ID NO: 4972289 - DNA, 25 bp, Homo sapien
ccttttatcatattgggttatcaac

SEQ ID NO: 4972290 - DNA, 25 bp, Homo sapien
tcccttttatcatattgggttatca

SEQ ID NO: 4972291 - DNA, 25 bp, Homo sapien
catctgaagctcgttcgtaaaccat

SEQ ID NO: 4972292 - DNA, 25 bp, Homo sapien
tacatctgaagctcgttcgtaaacc

SEQ ID NO: 4972293 - DNA, 25 bp, Homo sapien
tgtacatctgaagctcgttcgtaaa

SEQ ID NO: 4972294 - DNA, 25 bp, Homo sapien
acatctgaagctcgttcgtaaacca

SEQ ID NO: 4972295 - DNA, 25 bp, Homo sapien
gcagctgctctcagggtaaaatcca

SEQ ID NO: 4972296 - DNA, 25 bp, Homo sapien
taggcacaggagcagatgtaagtgc

SEQ ID NO: 4972297 - DNA, 25 bp, Homo sapien
gctgctctcagggtaaaatccacgg

SEQ ID NO: 4972298 - DNA, 25 bp, Homo sapien
ctctcagggtaaaatccacgggagg

SEQ ID NO: 4972299 - DNA, 25 bp, Homo sapien
ccaaagttgaggaatttgtcctgct

SEQ ID NO: 4972300 - DNA, 25 bp, Homo sapien
tctgagagtgtgaatcttccacctc

SEQ ID NO: 4972301 - DNA, 25 bp, Homo sapien
ctgagagtgtgaatcttccacctcc

SEQ ID NO: 4972302 - DNA, 25 bp, Homo sapien
aaccaaagttgaggaatttgtcctg

SEQ ID NO: 4972303 - DNA, 25 bp, Homo sapien
gtaactgctgtctagccgcagctcc

SEQ ID NO: 4972304 - DNA, 25 bp, Homo sapien
atggtaactgctgtctagccgcagc

SEQ ID NO: 4972305 - DNA, 25 bp, Homo sapien
tagccgcagctccctttcgacaggt

SEQ ID NO: 4972306 - DNA, 25 bp, Homo sapien
cctttcgacaggtccttctcagaag

SEQ ID NO: 4972307 - DNA, 25 bp, Homo sapien
cctggtgaataagctggccctttcc

SEQ ID NO: 4972308 - DNA, 25 bp, Homo sapien
ggtgaataagctggccctttcccaa

SEQ ID NO: 4972309 - DNA, 25 bp, Homo sapien
ataagctggccctttcccaacctga

SEQ ID NO: 4972310 - DNA, 25 bp, Homo sapien
cccctggtgaataagctggcccttt

SEQ ID NO: 4972311 - DNA, 25 bp, Homo sapien
gatttacagcacctgctacagctgc

SEQ ID NO: 4972312 - DNA, 25 bp, Homo sapien
gaaccatgtaagtatcctgcattga

SEQ ID NO: 4972313 - DNA, 25 bp, Homo sapien
tatgcagataatctacttggaaggc

SEQ ID NO: 4972314 - DNA, 25 bp, Homo sapien
ggctttgagccccagtggaatacag

SEQ ID NO: 4972315 - DNA, 25 bp, Homo sapien
tattcagcatccctttagcgcctac

SEQ ID NO: 4972316 - DNA, 25 bp, Homo sapien
tctcaggagtattataggatgtttc

SEQ ID NO: 4972317 - DNA, 25 bp, Homo sapien
tttggcataggcttcaactctaatt

SEQ ID NO: 4972318 - DNA, 25 bp, Homo sapien
ctagaaaccaagtatcatgactgga

SEQ ID NO: 4972319 - DNA, 25 bp, Homo sapien
ctagagttgcctgccatttctctta

SEQ ID NO: 4972320 - DNA, 25 bp, Homo sapien
caatatctaattcatttaagtcctg

SEQ ID NO: 4972321 - DNA, 25 bp, Homo sapien
tgtctagggaaccagttcggattaa

SEQ ID NO: 4972322 - DNA, 25 bp, Homo sapien
ctgctgggtataagcctagagttgc

SEQ ID NO: 4972323 - DNA, 25 bp, Homo sapien
ttaccacccactgttttaagcagct

SEQ ID NO: 4972324 - DNA, 25 bp, Homo sapien
ctgttaccacccactgttttaagca

SEQ ID NO: 4972325 - DNA, 25 bp, Homo sapien
tggcctgttaccacccactgtttta

SEQ ID NO: 4972326 - DNA, 25 bp, Homo sapien
ctggcctgttaccacccactgtttt

SEQ ID NO: 4972327 - DNA, 25 bp, Homo sapien
tctcaaataccggaagcatggtttg

SEQ ID NO: 4972328 - DNA, 25 bp, Homo sapien
caaataccggaagcatggtttggac

SEQ ID NO: 4972329 - DNA, 25 bp, Homo sapien
cgtgcttctcaaataccggaagcat

SEQ ID NO: 4972330 - DNA, 25 bp, Homo sapien
agcatggtttggacagctgaaggct

SEQ ID NO: 4972331 - DNA, 25 bp, Homo sapien
gacttctgtcttatacctgctgatc

SEQ ID NO: 4972332 - DNA, 25 bp, Homo sapien
tctgacttctgtcttatacctgctg

SEQ ID NO: 4972333 - DNA, 25 bp, Homo sapien
tcttatacctgctgatccacctggg

SEQ ID NO: 4972334 - DNA, 25 bp, Homo sapien
tctgtcttatacctgctgatccacc

SEQ ID NO: 4972335 - DNA, 25 bp, Homo sapien
ggagatctggaacctgattatttct

SEQ ID NO: 4972336 - DNA, 25 bp, Homo sapien
taacctttaagcgtctgccttgcat

SEQ ID NO: 4972337 - DNA, 25 bp, Homo sapien
tggcaaaatatttggaaggagatct

SEQ ID NO: 4972338 - DNA, 25 bp, Homo sapien
tacagtcctcttgggccactcttgg

SEQ ID NO: 4972339 - DNA, 25 bp, Homo sapien
tctgaatggtcttggaagagtggtt

SEQ ID NO: 4972340 - DNA, 25 bp, Homo sapien
ctttggcaatcatggtattccagga

SEQ ID NO: 4972341 - DNA, 25 bp, Homo sapien
tccaggacgtgccaatgaagttggc

SEQ ID NO: 4972342 - DNA, 25 bp, Homo sapien
ttggcaatcatggtattccaggacg

SEQ ID NO: 4972343 - DNA, 25 bp, Homo sapien
actgctgtgatgtaacctctgcttg

SEQ ID NO: 4972344 - DNA, 25 bp, Homo sapien
taacctctgcttgcctgatactgaa

SEQ ID NO: 4972345 - DNA, 25 bp, Homo sapien
ctgatactgaactctaaccatgtgt

SEQ ID NO: 4972346 - DNA, 25 bp, Homo sapien
tgaactctaaccatgtgtatcacat

SEQ ID NO: 4972347 - DNA, 25 bp, Homo sapien
gaagaagctgcttggtaatacctta

SEQ ID NO: 4972348 - DNA, 25 bp, Homo sapien
acagaaccctaaccttgcagttgag

SEQ ID NO: 4972349 - DNA, 25 bp, Homo sapien
gaaccctaaccttgcagttgaggac

SEQ ID NO: 4972350 - DNA, 25 bp, Homo sapien
gaagctgcttggtaataccttaaat

SEQ ID NO: 4972351 - DNA, 25 bp, Homo sapien
tcttttgtctttccatttaacaggc

SEQ ID NO: 4972352 - DNA, 25 bp, Homo sapien
tgtctttccatttaacaggcctcat

SEQ ID NO: 4972353 - DNA, 25 bp, Homo sapien
acttgtatttcttttgtctttccat

SEQ ID NO: 4972354 - DNA, 25 bp, Homo sapien
tgtatttcttttgtctttccattta

SEQ ID NO: 4972355 - DNA, 25 bp, Homo sapien
gggcaccttcagcaaacaaggctct

SEQ ID NO: 4972356 - DNA, 25 bp, Homo sapien
aaggctcttgcaacaatagcttgcg

SEQ ID NO: 4972357 - DNA, 25 bp, Homo sapien
cttcataccccaaattaggtgggct

SEQ ID NO: 4972358 - DNA, 25 bp, Homo sapien
cctcatagggtccaacatgcagtat

SEQ ID NO: 4972359 - DNA, 25 bp, Homo sapien
taccgctgggttagtttggatccca

SEQ ID NO: 4972360 - DNA, 25 bp, Homo sapien
tgcattggaataccgctgggttagt

SEQ ID NO: 4972361 - DNA, 25 bp, Homo sapien
agtttggatcccaaacatagaaaag

SEQ ID NO: 4972362 - DNA, 25 bp, Homo sapien
tgtttccctgcttgcattggaatac

SEQ ID NO: 4972363 - DNA, 25 bp, Homo sapien
caagcaccatagtaaattggcatct

SEQ ID NO: 4972364 - DNA, 25 bp, Homo sapien
ctttaccaagcaccatagtaaattg

SEQ ID NO: 4972365 - DNA, 25 bp, Homo sapien
ttaccaagcaccatagtaaattggc

SEQ ID NO: 4972366 - DNA, 25 bp, Homo sapien
taccaagcaccatagtaaattggca

SEQ ID NO: 4972367 - DNA, 25 bp, Homo sapien
gctcgctgcacgtgactggtgccat

SEQ ID NO: 4972368 - DNA, 25 bp, Homo sapien
gttgttaggcccctgcagctcgctg

SEQ ID NO: 4972369 - DNA, 25 bp, Homo sapien
agctcgctgcacgtgactggtgcca

SEQ ID NO: 4972370 - DNA, 25 bp, Homo sapien
gttaggcccctgcagctcgctgcac

SEQ ID NO: 4972371 - DNA, 25 bp, Homo sapien
ttcattttgcttgcgtgaaagagga

SEQ ID NO: 4972372 - DNA, 25 bp, Homo sapien
ttttgcttgcgtgaaagaggaatgc

SEQ ID NO: 4972373 - DNA, 25 bp, Homo sapien
caaattcattttgcttgcgtgaaag

SEQ ID NO: 4972374 - DNA, 25 bp, Homo sapien
ttcaaattcattttgcttgcgtgaa

SEQ ID NO: 4972375 - DNA, 25 bp, Homo sapien
ttagggcagtgcgtgtgggtcaggg

SEQ ID NO: 4972376 - DNA, 25 bp, Homo sapien
tcaagattcttagggcagtgcgtgt

SEQ ID NO: 4972377 - DNA, 25 bp, Homo sapien
ttatcttgttcctcaagattcttag

SEQ ID NO: 4972378 - DNA, 25 bp, Homo sapien
agcctctacgtctttatcttgttcc

SEQ ID NO: 4972379 - DNA, 25 bp, Homo sapien
tttaaagaaatgctgaagttgctga

SEQ ID NO: 4972380 - DNA, 25 bp, Homo sapien
ccttttaaagaaatgctgaagttgc

SEQ ID NO: 4972381 - DNA, 25 bp, Homo sapien
gaaatgctgaagttgctgagcagaa

SEQ ID NO: 4972382 - DNA, 25 bp, Homo sapien
aagaaatgctgaagttgctgagcag

SEQ ID NO: 4972383 - DNA, 25 bp, Homo sapien
caagccttgaggaccacggagataa

SEQ ID NO: 4972384 - DNA, 25 bp, Homo sapien
gtgacagctggacagttgtgtgacc

SEQ ID NO: 4972385 - DNA, 25 bp, Homo sapien
agtgaggatctttaggcgaagtgac

SEQ ID NO: 4972386 - DNA, 25 bp, Homo sapien
taaagaagttccaatgccacctgtc

SEQ ID NO: 4972387 - DNA, 25 bp, Homo sapien
tcagtattttgcctagtaaacaggg

SEQ ID NO: 4972388 - DNA, 25 bp, Homo sapien
tgagaaaattgagcgaatcccagga

SEQ ID NO: 4972389 - DNA, 25 bp, Homo sapien
gctgcctccagtgttaaaagcaatg

SEQ ID NO: 4972390 - DNA, 25 bp, Homo sapien
ccaatatagactcaggaagatccac

SEQ ID NO: 4972391 - DNA, 25 bp, Homo sapien
tacagaccttgcttatcacaccatg

SEQ ID NO: 4972392 - DNA, 25 bp, Homo sapien
cgtggtcttgcaaaagaccttccaa

SEQ ID NO: 4972393 - DNA, 25 bp, Homo sapien
acagcagtaaagctacgtggtcttg

SEQ ID NO: 4972394 - DNA, 25 bp, Homo sapien
tccaagagaaggttggctacagacc

SEQ ID NO: 4972395 - DNA, 25 bp, Homo sapien
caggccctctactccagctgttgga

SEQ ID NO: 4972396 - DNA, 25 bp, Homo sapien
ttggagattgagctttccagtgcat

SEQ ID NO: 4972397 - DNA, 25 bp, Homo sapien
gcacatgtgtgcttgcggagaaaaa

SEQ ID NO: 4972398 - DNA, 25 bp, Homo sapien
cacatgtgtgcttgcggagaaaaag

SEQ ID NO: 4972399 - DNA, 25 bp, Homo sapien
gctttggaaagtgggagtgtaacca

SEQ ID NO: 4972400 - DNA, 25 bp, Homo sapien
gatgtacagcagcaaaagtctaatg

SEQ ID NO: 4972401 - DNA, 25 bp, Homo sapien
taagatgccgcatactctcctagtg

SEQ ID NO: 4972402 - DNA, 25 bp, Homo sapien
aagttgtgctaaccataagatgccg

SEQ ID NO: 4972403 - DNA, 25 bp, Homo sapien
gaacagggctatgaaggtcagggca

SEQ ID NO: 4972404 - DNA, 25 bp, Homo sapien
tcaagggaaaacttgagtggtgaac

SEQ ID NO: 4972405 - DNA, 25 bp, Homo sapien
tgaacgggaaaatctgtgaggatcg

SEQ ID NO: 4972406 - DNA, 25 bp, Homo sapien
ggatcggaaatgtaagtctctatac

SEQ ID NO: 4972407 - DNA, 25 bp, Homo sapien
cttcctctcattgaatctgatcgta

SEQ ID NO: 4972408 - DNA, 25 bp, Homo sapien
aatctgatcgtattctaatatctcc

SEQ ID NO: 4972409 - DNA, 25 bp, Homo sapien
taatatctcctatctcaatgcctag

SEQ ID NO: 4972410 - DNA, 25 bp, Homo sapien
tgactataacatggagcactgtatg

SEQ ID NO: 4972411 - DNA, 25 bp, Homo sapien
tcaatacgtggcttcaaggtcacgc

SEQ ID NO: 4972412 - DNA, 25 bp, Homo sapien
tcacgctgacgttgttcagacagtg

SEQ ID NO: 4972413 - DNA, 25 bp, Homo sapien
cctccattttcaatacgtggcttca

SEQ ID NO: 4972414 - DNA, 25 bp, Homo sapien
tggcttcaaggtcacgctgacgttg

SEQ ID NO: 4972415 - DNA, 25 bp, Homo sapien
cacagtctttgatgagctggctctc

SEQ ID NO: 4972416 - DNA, 25 bp, Homo sapien
ccaagtgtgggcagacttttgtttc

SEQ ID NO: 4972417 - DNA, 25 bp, Homo sapien
tgggaggctttctgtgggtataaaa

SEQ ID NO: 4972418 - DNA, 25 bp, Homo sapien
tggcaggagcccacaagactacgac

SEQ ID NO: 4972419 - DNA, 25 bp, Homo sapien
ttacagctctgccaaaggcaaaatg

SEQ ID NO: 4972420 - DNA, 25 bp, Homo sapien
ttttgatttccatggcgtagttctt

SEQ ID NO: 4972421 - DNA, 25 bp, Homo sapien
gattttgatttccatggcgtagttc

SEQ ID NO: 4972422 - DNA, 25 bp, Homo sapien
tttgatttccatggcgtagttcttt

SEQ ID NO: 4972423 - DNA, 25 bp, Homo sapien
gatttccatggcgtagttctttggg

SEQ ID NO: 4972424 - DNA, 25 bp, Homo sapien
caagccttcttcatccaagtactga

SEQ ID NO: 4972425 - DNA, 25 bp, Homo sapien
tccgagatcagctgagatcaagcac

SEQ ID NO: 4972426 - DNA, 25 bp, Homo sapien
gagatcagctgagatcaagcacgtt

SEQ ID NO: 4972427 - DNA, 25 bp, Homo sapien
cttccgagatcagctgagatcaagc

SEQ ID NO: 4972428 - DNA, 25 bp, Homo sapien
tcttaaaggctgatttggtgactga

SEQ ID NO: 4972429 - DNA, 25 bp, Homo sapien
ttcatgctctctcttaaaggctgat

SEQ ID NO: 4972430 - DNA, 25 bp, Homo sapien
gctgatttggtgactgaattcatca

SEQ ID NO: 4972431 - DNA, 25 bp, Homo sapien
tcacctattgtttcatgctctctct

SEQ ID NO: 4972432 - DNA, 25 bp, Homo sapien
ctatctgccatcaccaggtataagg

SEQ ID NO: 4972433 - DNA, 25 bp, Homo sapien
caggtataaggtgccaccacttgaa

SEQ ID NO: 4972434 - DNA, 25 bp, Homo sapien
tccctggaaacaggagttctatctg

SEQ ID NO: 4972435 - DNA, 25 bp, Homo sapien
tatctgccatcaccaggtataaggt

SEQ ID NO: 4972436 - DNA, 25 bp, Homo sapien
gctgagcaccctgaatcattaacgt

SEQ ID NO: 4972437 - DNA, 25 bp, Homo sapien
caagtttatactagctgagcaccct

SEQ ID NO: 4972438 - DNA, 25 bp, Homo sapien
tcacatgagtcaagtttatactagc

SEQ ID NO: 4972439 - DNA, 25 bp, Homo sapien
atcattaacgtctttctccccaggg

SEQ ID NO: 4972440 - DNA, 25 bp, Homo sapien
aagccttcctaaagagtgcattatc

SEQ ID NO: 4972441 - DNA, 25 bp, Homo sapien
gaaacgtcgcagtacaccttggcat

SEQ ID NO: 4972442 - DNA, 25 bp, Homo sapien
gatttgatagctctttctgcaccaa

SEQ ID NO: 4972443 - DNA, 25 bp, Homo sapien
ttggcatcaccaggtcaattagtgc

SEQ ID NO: 4972444 - DNA, 25 bp, Homo sapien
ccataaaaacggttgatataaagca

SEQ ID NO: 4972445 - DNA, 25 bp, Homo sapien
tccataaaaacggttgatataaagc

SEQ ID NO: 4972446 - DNA, 25 bp, Homo sapien
ctccataaaaacggttgatataaag

SEQ ID NO: 4972447 - DNA, 25 bp, Homo sapien
cataaaaacggttgatataaagcat

SEQ ID NO: 4972448 - DNA, 25 bp, Homo sapien
ggactaagttttgttccatggtcag

SEQ ID NO: 4972449 - DNA, 25 bp, Homo sapien
tcctggttctatgcatgtgttcaca

SEQ ID NO: 4972450 - DNA, 25 bp, Homo sapien
tcatcaagcattcgccagttcctgg

SEQ ID NO: 4972451 - DNA, 25 bp, Homo sapien
aaaacccaagcctggaattacagca

SEQ ID NO: 4972452 - DNA, 25 bp, Homo sapien
taattatgaatctgcctctcaaaag

SEQ ID NO: 4972453 - DNA, 25 bp, Homo sapien
tctcaaaagccttgactctgtattt

SEQ ID NO: 4972454 - DNA, 25 bp, Homo sapien
gacataaatggtaggacgaggttac

SEQ ID NO: 4972455 - DNA, 25 bp, Homo sapien
cattttccgatgaagtttttttgct

SEQ ID NO: 4972456 - DNA, 25 bp, Homo sapien
gctccgaattttgtgatcttgttca

SEQ ID NO: 4972457 - DNA, 25 bp, Homo sapien
ttttccagtaatggagaaaggagga

SEQ ID NO: 4972458 - DNA, 25 bp, Homo sapien
gctggtccaaatattaattaatcga

SEQ ID NO: 4972459 - DNA, 25 bp, Homo sapien
gatgctgtaccattggtagtaaaat

SEQ ID NO: 4972460 - DNA, 25 bp, Homo sapien
cacctgctaaccagattcgattttg

SEQ ID NO: 4972461 - DNA, 25 bp, Homo sapien
atatacttctttctggtaaaaggag

SEQ ID NO: 4972462 - DNA, 25 bp, Homo sapien
tgctaaccagattcgattttgatgc

SEQ ID NO: 4972463 - DNA, 25 bp, Homo sapien
cacttagcaggcagatggaaatcca

SEQ ID NO: 4972464 - DNA, 25 bp, Homo sapien
tacagaagactgtaaggacagagga

SEQ ID NO: 4972465 - DNA, 25 bp, Homo sapien
gctcgtggctgaaattttttatgtc

SEQ ID NO: 4972466 - DNA, 25 bp, Homo sapien
tttcgccttgggatcttcagactca

SEQ ID NO: 4972467 - DNA, 25 bp, Homo sapien
ttcctacaatggacttgtagtacgg

SEQ ID NO: 4972468 - DNA, 25 bp, Homo sapien
aatggacttgtagtacggtacctgg

SEQ ID NO: 4972469 - DNA, 25 bp, Homo sapien
agtacggtacctgggtgatcacaaa

SEQ ID NO: 4972470 - DNA, 25 bp, Homo sapien
tttcagagttcctacaatggacttg

SEQ ID NO: 4972471 - DNA, 25 bp, Homo sapien
cttctgcttcacccagtccttcccc

SEQ ID NO: 4972472 - DNA, 25 bp, Homo sapien
tctgcttcacccagtccttccccat

SEQ ID NO: 4972473 - DNA, 25 bp, Homo sapien
tgcttcacccagtccttccccatcc

SEQ ID NO: 4972474 - DNA, 25 bp, Homo sapien
tttgctctccatgcctgcttccagc

SEQ ID NO: 4972475 - DNA, 25 bp, Homo sapien
tagtctgagtgaatcttggtcattt

SEQ ID NO: 4972476 - DNA, 25 bp, Homo sapien
tatgcctcatagtctgcatcttcaa

SEQ ID NO: 4972477 - DNA, 25 bp, Homo sapien
ccatactgtaaaactgtcttcgcaa

SEQ ID NO: 4972478 - DNA, 25 bp, Homo sapien
tgtcttcgcaaaatctcatcacaag

SEQ ID NO: 4972479 - DNA, 25 bp, Homo sapien
ttcagtcaacttggaggccgtggcc

SEQ ID NO: 4972480 - DNA, 25 bp, Homo sapien
tttatcctgtgttccactattttgg

SEQ ID NO: 4972481 - DNA, 25 bp, Homo sapien
tgacagagggaaattgatcaagccc

SEQ ID NO: 4972482 - DNA, 25 bp, Homo sapien
tttggaaaccgtcagggttgacaga

SEQ ID NO: 4972483 - DNA, 25 bp, Homo sapien
tgctgtttaacaagttctctgccct

SEQ ID NO: 4972484 - DNA, 25 bp, Homo sapien
ggtaaaatagagctcagaattcctc

SEQ ID NO: 4972485 - DNA, 25 bp, Homo sapien
ctttggtgcccaaatacagctgtgc

SEQ ID NO: 4972486 - DNA, 25 bp, Homo sapien
aattcctgcacaaatttgcgggcgg

SEQ ID NO: 4972487 - DNA, 25 bp, Homo sapien
cagaatcccatttcagcattattgg

SEQ ID NO: 4972488 - DNA, 25 bp, Homo sapien
cccatttcagcattattggtttttc

SEQ ID NO: 4972489 - DNA, 25 bp, Homo sapien
ttcagcattattggtttttccctca

SEQ ID NO: 4972490 - DNA, 25 bp, Homo sapien
gcattattggtttttccctcaccaa

SEQ ID NO: 4972491 - DNA, 25 bp, Homo sapien
cattgttgaaatccgtaatctcttt

SEQ ID NO: 4972492 - DNA, 25 bp, Homo sapien
gtcattgttgaaatccgtaatctct

SEQ ID NO: 4972493 - DNA, 25 bp, Homo sapien
tcattgttgaaatccgtaatctctt

SEQ ID NO: 4972494 - DNA, 25 bp, Homo sapien
tagtcattgttgaaatccgtaatct

SEQ ID NO: 4972495 - DNA, 25 bp, Homo sapien
tgtgttgaagagtcacaggtcccag

SEQ ID NO: 4972496 - DNA, 25 bp, Homo sapien
tatcgccaaattgtcttaaaacgtc

SEQ ID NO: 4972497 - DNA, 25 bp, Homo sapien
tgtccagcacatcattgcaaccttg

SEQ ID NO: 4972498 - DNA, 25 bp, Homo sapien
tgtgtgttgaagagtcacaggtccc

SEQ ID NO: 4972499 - DNA, 25 bp, Homo sapien
ctgttaagggacaattgtgacgatt

SEQ ID NO: 4972500 - DNA, 25 bp, Homo sapien
ttaagggacaattgtgacgattttg

SEQ ID NO: 4972501 - DNA, 25 bp, Homo sapien
aattgtgacgattttgtaatgcttg

SEQ ID NO: 4972502 - DNA, 25 bp, Homo sapien
gggacaattgtgacgattttgtaat

SEQ ID NO: 4972503 - DNA, 25 bp, Homo sapien
gtggctggggacatgatattcctct

SEQ ID NO: 4972504 - DNA, 25 bp, Homo sapien
ccctcccagttgctcctaaggatga

SEQ ID NO: 4972505 - DNA, 25 bp, Homo sapien
gatgagcaaaaagctcttttcacgt

SEQ ID NO: 4972506 - DNA, 25 bp, Homo sapien
acgtcaggggttgtaccgccaatca

SEQ ID NO: 4972507 - DNA, 25 bp, Homo sapien
tttcagtacatatgtccaacactgc

SEQ ID NO: 4972508 - DNA, 25 bp, Homo sapien
ttcagtacatatgtccaacactgcc

SEQ ID NO: 4972509 - DNA, 25 bp, Homo sapien
ctctgtatccctttcagtacatatg

SEQ ID NO: 4972510 - DNA, 25 bp, Homo sapien
tctctctgtatccctttcagtacat

SEQ ID NO: 4972511 - DNA, 25 bp, Homo sapien
cttggtctggtggctactgcagagg

SEQ ID NO: 4972512 - DNA, 25 bp, Homo sapien
tggctactgcagagggggaaatctc

SEQ ID NO: 4972513 - DNA, 25 bp, Homo sapien
ctgcagagggggaaatctccaaaaa

SEQ ID NO: 4972514 - DNA, 25 bp, Homo sapien
ttggtctggtggctactgcagaggg

SEQ ID NO: 4972515 - DNA, 25 bp, Homo sapien
ccatttgcacttcacgaagagatga

SEQ ID NO: 4972516 - DNA, 25 bp, Homo sapien
gctttgatagttaacttctctctct

SEQ ID NO: 4972517 - DNA, 25 bp, Homo sapien
gagatgagctttgatagttaacttc

SEQ ID NO: 4972518 - DNA, 25 bp, Homo sapien
cttcttgtgcaaactgggtgatgac

SEQ ID NO: 4972519 - DNA, 25 bp, Homo sapien
ggccatgtacctcaattcagtccag

SEQ ID NO: 4972520 - DNA, 25 bp, Homo sapien
tgaccttcattagggcattatggac

SEQ ID NO: 4972521 - DNA, 25 bp, Homo sapien
tttctatccaagaggtgcaagctct

SEQ ID NO: 4972522 - DNA, 25 bp, Homo sapien
ttcaaaatccaccattaggagtgtc

SEQ ID NO: 4972523 - DNA, 25 bp, Homo sapien
gcctgaaacgtgtacatattctttg

SEQ ID NO: 4972524 - DNA, 25 bp, Homo sapien
aaaatcagttgcatccgaaaagcct

SEQ ID NO: 4972525 - DNA, 25 bp, Homo sapien
caatgtgtcccttgtgtaaaatcag

SEQ ID NO: 4972526 - DNA, 25 bp, Homo sapien
tcaatgtgtcccttgtgtaaaatca

SEQ ID NO: 4972527 - DNA, 25 bp, Homo sapien
taaaagaagttatcgcaaacagtgt

SEQ ID NO: 4972528 - DNA, 25 bp, Homo sapien
ggcaataaaagaagttatcgcaaac

SEQ ID NO: 4972529 - DNA, 25 bp, Homo sapien
gaagttatcgcaaacagtgtggcca

SEQ ID NO: 4972530 - DNA, 25 bp, Homo sapien
gcatgggcaataccgtaaactggca

SEQ ID NO: 4972531 - DNA, 25 bp, Homo sapien
caatgtactttgttggacctaagca

SEQ ID NO: 4972532 - DNA, 25 bp, Homo sapien
ggcaatgcactaggcaccatcaaag

SEQ ID NO: 4972533 - DNA, 25 bp, Homo sapien
aacttaactccaaaattgctgttgc

SEQ ID NO: 4972534 - DNA, 25 bp, Homo sapien
gaactgaagtacatcaagcctagtg

SEQ ID NO: 4972535 - DNA, 25 bp, Homo sapien
tctcattctggaaagccggctgcaa

SEQ ID NO: 4972536 - DNA, 25 bp, Homo sapien
caggagcggttcagcatcatcaata

SEQ ID NO: 4972537 - DNA, 25 bp, Homo sapien
tcagcggccaccactgagagttcat

SEQ ID NO: 4972538 - DNA, 25 bp, Homo sapien
caagtctgatcgtctcactgggacc

SEQ ID NO: 4972539 - DNA, 25 bp, Homo sapien
tctgtgggataagcccagtccttct

SEQ ID NO: 4972540 - DNA, 25 bp, Homo sapien
cttcttccatacaggaggaacaggg

SEQ ID NO: 4972541 - DNA, 25 bp, Homo sapien
aggagccattccaaggactatgggg

SEQ ID NO: 4972542 - DNA, 25 bp, Homo sapien
tccaaggactatggggtgctctgtg

SEQ ID NO: 4972543 - DNA, 25 bp, Homo sapien
ctttcgagtgttgaatcagaaggac

SEQ ID NO: 4972544 - DNA, 25 bp, Homo sapien
agagggaacaggcagatggactcaa

SEQ ID NO: 4972545 - DNA, 25 bp, Homo sapien
actctttcgagtgttgaatcagaag

SEQ ID NO: 4972546 - DNA, 25 bp, Homo sapien
aacaggcagatggactcaaggtccc

SEQ ID NO: 4972547 - DNA, 25 bp, Homo sapien
gtgagctgtcatgtcaatttcctta

SEQ ID NO: 4972548 - DNA, 25 bp, Homo sapien
taagtccatttgtcacttgataagc

SEQ ID NO: 4972549 - DNA, 25 bp, Homo sapien
caatgtcggaggctaggtaagtctt

SEQ ID NO: 4972550 - DNA, 25 bp, Homo sapien
tttgtgttccccacttgagcatagg

SEQ ID NO: 4972551 - DNA, 25 bp, Homo sapien
agattgacatatttctgcaagtgtt

SEQ ID NO: 4972552 - DNA, 25 bp, Homo sapien
gattgacatatttctgcaagtgttt

SEQ ID NO: 4972553 - DNA, 25 bp, Homo sapien
acatatttctgcaagtgttttcaga

SEQ ID NO: 4972554 - DNA, 25 bp, Homo sapien
tatttctgcaagtgttttcagaggc

SEQ ID NO: 4972555 - DNA, 25 bp, Homo sapien
caagtcaaggcaatttttggtacta

SEQ ID NO: 4972556 - DNA, 25 bp, Homo sapien
agtccaagtcaaggcaatttttggt

SEQ ID NO: 4972557 - DNA, 25 bp, Homo sapien
tccaagtcaaggcaatttttggtac

SEQ ID NO: 4972558 - DNA, 25 bp, Homo sapien
ccaagtcaaggcaatttttggtact

SEQ ID NO: 4972559 - DNA, 25 bp, Homo sapien
gaaatgggaactgttccaattcatg

SEQ ID NO: 4972560 - DNA, 25 bp, Homo sapien
attcatggagcaaccagacatacat

SEQ ID NO: 4972561 - DNA, 25 bp, Homo sapien
caattcatggagcaaccagacatac

SEQ ID NO: 4972562 - DNA, 25 bp, Homo sapien
aaatgggaactgttccaattcatgg

SEQ ID NO: 4972563 - DNA, 25 bp, Homo sapien
tcttcccaaccttcctgactaccca

SEQ ID NO: 4972564 - DNA, 25 bp, Homo sapien
tctttccttctacggcaacaaattc

SEQ ID NO: 4972565 - DNA, 25 bp, Homo sapien
ctacggcaacaaattcccctgattt

SEQ ID NO: 4972566 - DNA, 25 bp, Homo sapien
cttctacggcaacaaattcccctga

SEQ ID NO: 4972567 - DNA, 25 bp, Homo sapien
cctgccaggtaaaagcaccatattc

SEQ ID NO: 4972568 - DNA, 25 bp, Homo sapien
taccatgaaagtgataacgattcca

SEQ ID NO: 4972569 - DNA, 25 bp, Homo sapien
gcagatagcgctttgatcaaggaca

SEQ ID NO: 4972570 - DNA, 25 bp, Homo sapien
gtaaacctatcaaaatgggacactg

SEQ ID NO: 4972571 - DNA, 25 bp, Homo sapien
ggtacttggaaatacaggcttgcag

SEQ ID NO: 4972572 - DNA, 25 bp, Homo sapien
gagattttactatgagtcccaggca

SEQ ID NO: 4972573 - DNA, 25 bp, Homo sapien
tgagtgtatcaatgtcccctaggca

SEQ ID NO: 4972574 - DNA, 25 bp, Homo sapien
tttaaatattggaccatgggccagc

SEQ ID NO: 4972575 - DNA, 25 bp, Homo sapien
tatcacaaaatcgtaggctcttccc

SEQ ID NO: 4972576 - DNA, 25 bp, Homo sapien
cttatgctgtctcacatccttggga

SEQ ID NO: 4972577 - DNA, 25 bp, Homo sapien
catcttgcatacgtctctgtggaat

SEQ ID NO: 4972578 - DNA, 25 bp, Homo sapien
gctatcagaagctacttggacatca

SEQ ID NO: 4972579 - DNA, 25 bp, Homo sapien
gagtaggtttcacgcgcagttctga

SEQ ID NO: 4972580 - DNA, 25 bp, Homo sapien
aattctggatccttccgtggtgccc

SEQ ID NO: 4972581 - DNA, 25 bp, Homo sapien
taattattctgagtcgtgctccgaa

SEQ ID NO: 4972582 - DNA, 25 bp, Homo sapien
ttcccgaccacaacacaagagtatt

SEQ ID NO: 4972583 - DNA, 25 bp, Homo sapien
ctccggcaagaagccggagtccgcg

SEQ ID NO: 4972584 - DNA, 25 bp, Homo sapien
ctctgagcgcccgttgagtcgcgcg

SEQ ID NO: 4972585 - DNA, 25 bp, Homo sapien
tagagcgctccgtctccggcgagat

SEQ ID NO: 4972586 - DNA, 25 bp, Homo sapien
gatgtccgagcgcaaagaaggcaga

SEQ ID NO: 4972587 - DNA, 25 bp, Homo sapien
tttccagaggtatctctttccctaa

SEQ ID NO: 4972588 - DNA, 25 bp, Homo sapien
tctttccctaaactcatcaagtact

SEQ ID NO: 4972589 - DNA, 25 bp, Homo sapien
taactttctatagctgatacttcca

SEQ ID NO: 4972590 - DNA, 25 bp, Homo sapien
cattttggatataggctctgtttca

SEQ ID NO: 4972591 - DNA, 25 bp, Homo sapien
tagtggccacagaatgtagtcacag

SEQ ID NO: 4972592 - DNA, 25 bp, Homo sapien
ggacagtacgggaaagtgcagcagc

SEQ ID NO: 4972593 - DNA, 25 bp, Homo sapien
tgcagcagccttgtagttatagtgg

SEQ ID NO: 4972594 - DNA, 25 bp, Homo sapien
tacggtttgactttggaggacagta

SEQ ID NO: 4972595 - DNA, 25 bp, Homo sapien
cgcggcgcagtgatttgctccagca

SEQ ID NO: 4972596 - DNA, 25 bp, Homo sapien
ggcgcagtgatttgctccagcattc

SEQ ID NO: 4972597 - DNA, 25 bp, Homo sapien
gccgcggcgcagtgatttgctccag

SEQ ID NO: 4972598 - DNA, 25 bp, Homo sapien
gcgcagtgatttgctccagcattca

SEQ ID NO: 4972599 - DNA, 25 bp, Homo sapien
tttgtcagcatcttccagattcttc

SEQ ID NO: 4972600 - DNA, 25 bp, Homo sapien
ctgggtttcttctttgtcagcatct

SEQ ID NO: 4972601 - DNA, 25 bp, Homo sapien
ttcttctttgtcagcatcttccaga

SEQ ID NO: 4972602 - DNA, 25 bp, Homo sapien
cagcatcttccagattcttcctcat

SEQ ID NO: 4972603 - DNA, 25 bp, Homo sapien
tgaatactcctctctcagattcaag

SEQ ID NO: 4972604 - DNA, 25 bp, Homo sapien
gaatcggctgcaggttccaaactag

SEQ ID NO: 4972605 - DNA, 25 bp, Homo sapien
tccaaactagtccttcggtgtgaaa

SEQ ID NO: 4972606 - DNA, 25 bp, Homo sapien
cttgcctccccgattgaaagagatg

SEQ ID NO: 4972607 - DNA, 25 bp, Homo sapien
ccccagtgaaattccgcagaccaag

SEQ ID NO: 4972608 - DNA, 25 bp, Homo sapien
cctctactgtatgattgtttccttg

SEQ ID NO: 4972609 - DNA, 25 bp, Homo sapien
ccccacgtggccatattcttcatgg

SEQ ID NO: 4972610 - DNA, 25 bp, Homo sapien
atggcaatttcaggcattctttcag

SEQ ID NO: 4972611 - DNA, 25 bp, Homo sapien
ggcaccatgattgacaaggccagtt

SEQ ID NO: 4972612 - DNA, 25 bp, Homo sapien
ccatgattgacaaggccagtttcct

SEQ ID NO: 4972613 - DNA, 25 bp, Homo sapien
ggccagtttcctgtacattagagga

SEQ ID NO: 4972614 - DNA, 25 bp, Homo sapien
tgtacattagaggagataccctttt

SEQ ID NO: 4972615 - DNA, 25 bp, Homo sapien
gactgtcacaatcctcatgaaaatg

SEQ ID NO: 4972616 - DNA, 25 bp, Homo sapien
ctttccaaaagtgttagattctgcc

SEQ ID NO: 4972617 - DNA, 25 bp, Homo sapien
tatggaattagacagtgtaactacc

SEQ ID NO: 4972618 - DNA, 25 bp, Homo sapien
gtaactacccattccatcataaagg

SEQ ID NO: 4972619 - DNA, 25 bp, Homo sapien
caggtccagtcttagttacaataat

SEQ ID NO: 4972620 - DNA, 25 bp, Homo sapien
cgactgtgaggtacaaatatctcca

SEQ ID NO: 4972621 - DNA, 25 bp, Homo sapien
cacgcaggacttgcattgcagggaa

SEQ ID NO: 4972622 - DNA, 25 bp, Homo sapien
gaaaatataaaccagtcgtggcagg

SEQ ID NO: 4972623 - DNA, 25 bp, Homo sapien
ggcatttttcatgggttggtggctc

SEQ ID NO: 4972624 - DNA, 25 bp, Homo sapien
catggcatttttcatgggttggtgg

SEQ ID NO: 4972625 - DNA, 25 bp, Homo sapien
aaacatggcatttttcatgggttgg

SEQ ID NO: 4972626 - DNA, 25 bp, Homo sapien
tggcatttttcatgggttggtggct

SEQ ID NO: 4972627 - DNA, 25 bp, Homo sapien
gggctcgtatattatagccattcat

SEQ ID NO: 4972628 - DNA, 25 bp, Homo sapien
cataggtgcaagcaagttactgcct

SEQ ID NO: 4972629 - DNA, 25 bp, Homo sapien
tgccttcacaatcagttcttttatt

SEQ ID NO: 4972630 - DNA, 25 bp, Homo sapien
gatactagagtgacttggtgcaaga

SEQ ID NO: 4972631 - DNA, 25 bp, Homo sapien
tgtgagataacactgattgaggttt

SEQ ID NO: 4972632 - DNA, 25 bp, Homo sapien
tatcagacttatagacatcaccatt

SEQ ID NO: 4972633 - DNA, 25 bp, Homo sapien
aactccggtagttcatctgtgggca

SEQ ID NO: 4972634 - DNA, 25 bp, Homo sapien
caggtcttgttcaattgtgagataa

SEQ ID NO: 4972635 - DNA, 25 bp, Homo sapien
cttctatcactaatcaaacaaaaca

SEQ ID NO: 4972636 - DNA, 25 bp, Homo sapien
ttgtaattgtccagtacctccaaag

SEQ ID NO: 4972637 - DNA, 25 bp, Homo sapien
gatggttaccgagaatggaaacaga

SEQ ID NO: 4972638 - DNA, 25 bp, Homo sapien
tgttttgatggttaccgagaatgga

SEQ ID NO: 4972639 - DNA, 25 bp, Homo sapien
tagcaacatcatttaaatggtttgg

SEQ ID NO: 4972640 - DNA, 25 bp, Homo sapien
agcaacatcatttaaatggtttggt

SEQ ID NO: 4972641 - DNA, 25 bp, Homo sapien
tttttattagatcatccatactttg

SEQ ID NO: 4972642 - DNA, 25 bp, Homo sapien
attaaattttcagtcgtggtggtct

SEQ ID NO: 4972643 - DNA, 25 bp, Homo sapien
tattaaattttcagtcgtggtggtc

SEQ ID NO: 4972644 - DNA, 25 bp, Homo sapien
tgcctagggtgagttcttccctcat

SEQ ID NO: 4972645 - DNA, 25 bp, Homo sapien
ctgaaaacagcatgggttgcctagg

SEQ ID NO: 4972646 - DNA, 25 bp, Homo sapien
catgggttgcctagggtgagttctt

SEQ ID NO: 4972647 - DNA, 25 bp, Homo sapien
aaacagcatgggttgcctagggtga

SEQ ID NO: 4972648 - DNA, 25 bp, Homo sapien
cttcttcttgatcttttcctctttt

SEQ ID NO: 4972649 - DNA, 25 bp, Homo sapien
ccagtttttctgtttttggacatca

SEQ ID NO: 4972650 - DNA, 25 bp, Homo sapien
tagtgtgcttgattccagtttttct

SEQ ID NO: 4972651 - DNA, 25 bp, Homo sapien
gtttttctgtttttggacatcagca

SEQ ID NO: 4972652 - DNA, 25 bp, Homo sapien
ttagtgtgcttgattccagtttttc

SEQ ID NO: 4972653 - DNA, 25 bp, Homo sapien
ttctgtactcccagaaaacgatgtt

SEQ ID NO: 4972654 - DNA, 25 bp, Homo sapien
acgatgttccaaaccatacatctgt

SEQ ID NO: 4972655 - DNA, 25 bp, Homo sapien
agaaaacgatgttccaaaccataca

SEQ ID NO: 4972656 - DNA, 25 bp, Homo sapien
tactcccagaaaacgatgttccaaa

SEQ ID NO: 4972657 - DNA, 25 bp, Homo sapien
ctagtactctagacagggtgaaggc

SEQ ID NO: 4972658 - DNA, 25 bp, Homo sapien
tagacagggtgaaggctcctgttgc

SEQ ID NO: 4972659 - DNA, 25 bp, Homo sapien
ggctcctgttgcagaagtgatggtc

SEQ ID NO: 4972660 - DNA, 25 bp, Homo sapien
tctcatattctagtactctagacag

SEQ ID NO: 4972661 - DNA, 25 bp, Homo sapien
ttctgctttttagcaggattgacat

SEQ ID NO: 4972662 - DNA, 25 bp, Homo sapien
tcatattacaaccttctgcttcagg

SEQ ID NO: 4972663 - DNA, 25 bp, Homo sapien
tcctcatcatattacaaccttctgc

SEQ ID NO: 4972664 - DNA, 25 bp, Homo sapien
gttcctcctcatcatattacaacct

SEQ ID NO: 4972665 - DNA, 25 bp, Homo sapien
caccttttcctgtgtattgtctccc

SEQ ID NO: 4972666 - DNA, 25 bp, Homo sapien
gcaccttttcctgtgtattgtctcc

SEQ ID NO: 4972667 - DNA, 25 bp, Homo sapien
ccttttcctgtgtattgtctcccat

SEQ ID NO: 4972668 - DNA, 25 bp, Homo sapien
accttttcctgtgtattgtctccca

SEQ ID NO: 4972669 - DNA, 25 bp, Homo sapien
tatctgcttttgtagtgtggactcc

SEQ ID NO: 4972670 - DNA, 25 bp, Homo sapien
atgttttccaagagggagtgctgca

SEQ ID NO: 4972671 - DNA, 25 bp, Homo sapien
tatgactaaaaagcaaccgtacagc

SEQ ID NO: 4972672 - DNA, 25 bp, Homo sapien
gccaactgtagagctgtccaagaaa

SEQ ID NO: 4972673 - DNA, 25 bp, Homo sapien
tttgcttccctagattccaactgag

SEQ ID NO: 4972674 - DNA, 25 bp, Homo sapien
tcagtctcttagcaaagtcaatttg

SEQ ID NO: 4972675 - DNA, 25 bp, Homo sapien
tccagcagcacacaattttctgtca

SEQ ID NO: 4972676 - DNA, 25 bp, Homo sapien
gctggcttagataatcaaagtcccc

SEQ ID NO: 4972677 - DNA, 25 bp, Homo sapien
aaggtttttggcttggtttcagctg

SEQ ID NO: 4972678 - DNA, 25 bp, Homo sapien
taatttcttcctgtccagccaaagg

SEQ ID NO: 4972679 - DNA, 25 bp, Homo sapien
gcttgtctgccttcccctggacttt

SEQ ID NO: 4972680 - DNA, 25 bp, Homo sapien
tcatgcttgtctgccttcccctgga

SEQ ID NO: 4972681 - DNA, 25 bp, Homo sapien
tagtgttaccggtgagtattgcata

SEQ ID NO: 4972682 - DNA, 25 bp, Homo sapien
taccggtgagtattgcatattgaga

SEQ ID NO: 4972683 - DNA, 25 bp, Homo sapien
catattgagaatgggcctcagttcc

SEQ ID NO: 4972684 - DNA, 25 bp, Homo sapien
gagtattgcatattgagaatgggcc

SEQ ID NO: 4972685 - DNA, 25 bp, Homo sapien
tcttgcaaacactgttatcctcaaa

SEQ ID NO: 4972686 - DNA, 25 bp, Homo sapien
tcattttcttgcaaacactgttatc

SEQ ID NO: 4972687 - DNA, 25 bp, Homo sapien
tgttatcctcaaaccctcttctact

SEQ ID NO: 4972688 - DNA, 25 bp, Homo sapien
tcctcaaaccctcttctactctcac

SEQ ID NO: 4972689 - DNA, 25 bp, Homo sapien
gtctcatctccatgttttcccgttc

SEQ ID NO: 4972690 - DNA, 25 bp, Homo sapien
atctccatgttttcccgttccaaag

SEQ ID NO: 4972691 - DNA, 25 bp, Homo sapien
actagtctcatctccatgttttccc

SEQ ID NO: 4972692 - DNA, 25 bp, Homo sapien
ctccttcactagtctcatctccatg

SEQ ID NO: 4972693 - DNA, 25 bp, Homo sapien
ttctcccacaaccataggccaaatt

SEQ ID NO: 4972694 - DNA, 25 bp, Homo sapien
cttctcccacaaccataggccaaat

SEQ ID NO: 4972695 - DNA, 25 bp, Homo sapien
tctcccacaaccataggccaaattc

SEQ ID NO: 4972696 - DNA, 25 bp, Homo sapien
acttctctgaggagaggtttccgga

SEQ ID NO: 4972697 - DNA, 25 bp, Homo sapien
ccaagtagtctctctggtcacctaa

SEQ ID NO: 4972698 - DNA, 25 bp, Homo sapien
tccggattgcttggacctcctcctg

SEQ ID NO: 4972699 - DNA, 25 bp, Homo sapien
gacatgactcagaaacaccacaagc

SEQ ID NO: 4972700 - DNA, 25 bp, Homo sapien
atacctttgagtccacttccctggg

SEQ ID NO: 4972701 - DNA, 25 bp, Homo sapien
gtgtgcatgggagtccagcattctg

SEQ ID NO: 4972702 - DNA, 25 bp, Homo sapien
ggattgctggctcttggctcatacc

SEQ ID NO: 4972703 - DNA, 25 bp, Homo sapien
gacagactcttgtttttagccctgt

SEQ ID NO: 4972704 - DNA, 25 bp, Homo sapien
cagactcttgtttttagccctgtct

SEQ ID NO: 4972705 - DNA, 25 bp, Homo sapien
actcttgtttttagccctgtctgtc

SEQ ID NO: 4972706 - DNA, 25 bp, Homo sapien
atgacagactcttgtttttagccct

SEQ ID NO: 4972707 - DNA, 25 bp, Homo sapien
ggtggcctactgcaaaaccaagtaa

SEQ ID NO: 4972708 - DNA, 25 bp, Homo sapien
tcatccctttccagaggcggaggag

SEQ ID NO: 4972709 - DNA, 25 bp, Homo sapien
gagagtgctgaccataaccggcatc

SEQ ID NO: 4972710 - DNA, 25 bp, Homo sapien
atctgcatcgccctccttgtggtcg

SEQ ID NO: 4972711 - DNA, 25 bp, Homo sapien
tctgtttgcttgtagtagcacccga

SEQ ID NO: 4972712 - DNA, 25 bp, Homo sapien
taatggcacatccatccagatatgc

SEQ ID NO: 4972713 - DNA, 25 bp, Homo sapien
tagcacccgatcagtatgtcttgta

SEQ ID NO: 4972714 - DNA, 25 bp, Homo sapien
cgagagcaagttttgtacagttaca

SEQ ID NO: 4972715 - DNA, 25 bp, Homo sapien
tctgagataatagtagatccaacag

SEQ ID NO: 4972716 - DNA, 25 bp, Homo sapien
ctgagataatagtagatccaacagc

SEQ ID NO: 4972717 - DNA, 25 bp, Homo sapien
gagataatagtagatccaacagcat

SEQ ID NO: 4972718 - DNA, 25 bp, Homo sapien
tgagataatagtagatccaacagca

SEQ ID NO: 4972719 - DNA, 25 bp, Homo sapien
taaggaagcctgaaagtgtctaaca

SEQ ID NO: 4972720 - DNA, 25 bp, Homo sapien
tagaaacttactgactgtgggcagc

SEQ ID NO: 4972721 - DNA, 25 bp, Homo sapien
caatttcgacatgtaggtagcatcc

SEQ ID NO: 4972722 - DNA, 25 bp, Homo sapien
tcctgatttacaagaccgtggtgtg

SEQ ID NO: 4972723 - DNA, 25 bp, Homo sapien
gactttgatcaactatgtctgcccc

SEQ ID NO: 4972724 - DNA, 25 bp, Homo sapien
acactgatggaagcagctaagtcca

SEQ ID NO: 4972725 - DNA, 25 bp, Homo sapien
caagacctcccttacagcaggttct

SEQ ID NO: 4972726 - DNA, 25 bp, Homo sapien
cccctcagtgtagccaagacctccc

SEQ ID NO: 4972727 - DNA, 25 bp, Homo sapien
tgtagtcagtttgtacagccatatt

SEQ ID NO: 4972728 - DNA, 25 bp, Homo sapien
tgcaaggttgtaaaggggaccactc

SEQ ID NO: 4972729 - DNA, 25 bp, Homo sapien
gggaccactctgtattactgctcat

SEQ ID NO: 4972730 - DNA, 25 bp, Homo sapien
tacagccatattcccttgcaaggtt

SEQ ID NO: 4972731 - DNA, 25 bp, Homo sapien
tgggagttcatagaggaatgaaacc

SEQ ID NO: 4972732 - DNA, 25 bp, Homo sapien
gagttcatagaggaatgaaaccttt

SEQ ID NO: 4972733 - DNA, 25 bp, Homo sapien
ctcttggcattctgggagttcatag

SEQ ID NO: 4972734 - DNA, 25 bp, Homo sapien
ggcattctgggagttcatagaggaa

SEQ ID NO: 4972735 - DNA, 25 bp, Homo sapien
tcagtcttgcctgggcatgtctctg

SEQ ID NO: 4972736 - DNA, 25 bp, Homo sapien
atggattgaaggtcctcttgggaga

SEQ ID NO: 4972737 - DNA, 25 bp, Homo sapien
gtcttgcctgggcatgtctctggaa

SEQ ID NO: 4972738 - DNA, 25 bp, Homo sapien
cagaggctgtttgcatatggattga

SEQ ID NO: 4972739 - DNA, 25 bp, Homo sapien
tgtaggaggtatccttaggcttcgt

SEQ ID NO: 4972740 - DNA, 25 bp, Homo sapien
tggtatgcaaccaagagtgcctcct

SEQ ID NO: 4972741 - DNA, 25 bp, Homo sapien
aaagagtaaatcagagctgggtgag

SEQ ID NO: 4972742 - DNA, 25 bp, Homo sapien
ttaatttcgaattggtatgcaacca

SEQ ID NO: 4972743 - DNA, 25 bp, Homo sapien
ccagtgacataaagagcactctgcc

SEQ ID NO: 4972744 - DNA, 25 bp, Homo sapien
cagtgacataaagagcactctgcct

SEQ ID NO: 4972745 - DNA, 25 bp, Homo sapien
gtgacataaagagcactctgccttg

SEQ ID NO: 4972746 - DNA, 25 bp, Homo sapien
tgacataaagagcactctgccttgc

SEQ ID NO: 4972747 - DNA, 25 bp, Homo sapien
cctaagaccaatggaaaactcttat

SEQ ID NO: 4972748 - DNA, 25 bp, Homo sapien
agaccaatggaaaactcttatcctt

SEQ ID NO: 4972749 - DNA, 25 bp, Homo sapien
tcctaagaccaatggaaaactctta

SEQ ID NO: 4972750 - DNA, 25 bp, Homo sapien
taagaccaatggaaaactcttatcc

SEQ ID NO: 4972751 - DNA, 25 bp, Homo sapien
ccactctgtgaggtcttccttgtag

SEQ ID NO: 4972752 - DNA, 25 bp, Homo sapien
tcaccactctgtgaggtcttccttg

SEQ ID NO: 4972753 - DNA, 25 bp, Homo sapien
tccttgtagtcatcaccttccttga

SEQ ID NO: 4972754 - DNA, 25 bp, Homo sapien
cactctgtgaggtcttccttgtagt

SEQ ID NO: 4972755 - DNA, 25 bp, Homo sapien
tcataaggggatgtaaatagctttt

SEQ ID NO: 4972756 - DNA, 25 bp, Homo sapien
ataaggggatgtaaatagcttttct

SEQ ID NO: 4972757 - DNA, 25 bp, Homo sapien
cataaggggatgtaaatagcttttc

SEQ ID NO: 4972758 - DNA, 25 bp, Homo sapien
gatcctggacttcaaatctaatgtc

SEQ ID NO: 4972759 - DNA, 25 bp, Homo sapien
tcggtgtctgaaacagtacaaacca

SEQ ID NO: 4972760 - DNA, 25 bp, Homo sapien
aatctaatgtcttttggagaattcc

SEQ ID NO: 4972761 - DNA, 25 bp, Homo sapien
cagaagttagtacaagatcctggac

SEQ ID NO: 4972762 - DNA, 25 bp, Homo sapien
tgggtgttcagattgggcacttggc

SEQ ID NO: 4972763 - DNA, 25 bp, Homo sapien
agacctagagtctgggtgttcagat

SEQ ID NO: 4972764 - DNA, 25 bp, Homo sapien
gtgttcagattgggcacttggcagc

SEQ ID NO: 4972765 - DNA, 25 bp, Homo sapien
caagacctagagtctgggtgttcag

SEQ ID NO: 4972766 - DNA, 25 bp, Homo sapien
tgcacagcttttacccacaagtcca

SEQ ID NO: 4972767 - DNA, 25 bp, Homo sapien
acagcttttacccacaagtccattg

SEQ ID NO: 4972768 - DNA, 25 bp, Homo sapien
gtgcacagcttttacccacaagtcc

SEQ ID NO: 4972769 - DNA, 25 bp, Homo sapien
gcacagcttttacccacaagtccat

SEQ ID NO: 4972770 - DNA, 25 bp, Homo sapien
aacacatccttcacagaagtaccta

SEQ ID NO: 4972771 - DNA, 25 bp, Homo sapien
acacatccttcacagaagtacctac

SEQ ID NO: 4972772 - DNA, 25 bp, Homo sapien
tgacttgagaggatatgaagagcct

SEQ ID NO: 4972773 - DNA, 25 bp, Homo sapien
gaccttcttgcctctaatttcaaga

SEQ ID NO: 4972774 - DNA, 25 bp, Homo sapien
gatgactattacgtctctctcgacc

SEQ ID NO: 4972775 - DNA, 25 bp, Homo sapien
acttgattagaagtcaggatttgac

SEQ ID NO: 4972776 - DNA, 25 bp, Homo sapien
ctaggtcctatagccaacaatcagc

SEQ ID NO: 4972777 - DNA, 25 bp, Homo sapien
tgtccacattaccatccactaaatt

SEQ ID NO: 4972778 - DNA, 25 bp, Homo sapien
aatacccttccaatcatgtccacat

SEQ ID NO: 4972779 - DNA, 25 bp, Homo sapien
tatagccaacaatcagcctcaatac

SEQ ID NO: 4972780 - DNA, 25 bp, Homo sapien
tcccatgaagttttgccccttgaat

SEQ ID NO: 4972781 - DNA, 25 bp, Homo sapien
ccatgaagttttgccccttgaatcc

SEQ ID NO: 4972782 - DNA, 25 bp, Homo sapien
catcccatgaagttttgccccttga

SEQ ID NO: 4972783 - DNA, 25 bp, Homo sapien
tgaagttttgccccttgaatccagc

SEQ ID NO: 4972784 - DNA, 25 bp, Homo sapien
gggatccaaataaccatcaacatgt

SEQ ID NO: 4972785 - DNA, 25 bp, Homo sapien
ccatctcttgggtagtctcttgacc

SEQ ID NO: 4972786 - DNA, 25 bp, Homo sapien
gattcttttaacaccctgactctgg

SEQ ID NO: 4972787 - DNA, 25 bp, Homo sapien
tctgaatgttcttctaagggatcca

SEQ ID NO: 4972788 - DNA, 25 bp, Homo sapien
gaagaaatgaatttaagagatacat

SEQ ID NO: 4972789 - DNA, 25 bp, Homo sapien
ctcagaagaaatgaatttaagagat

SEQ ID NO: 4972790 - DNA, 25 bp, Homo sapien
cttgactcagaagaaatgaatttaa

SEQ ID NO: 4972791 - DNA, 25 bp, Homo sapien
cagaagaaatgaatttaagagatac

SEQ ID NO: 4972792 - DNA, 25 bp, Homo sapien
ttgcaagtgtccacttcttggttga

SEQ ID NO: 4972793 - DNA, 25 bp, Homo sapien
agttgatttgcaagtgtccacttct

SEQ ID NO: 4972794 - DNA, 25 bp, Homo sapien
cttcttggttgaatatgcatgccca

SEQ ID NO: 4972795 - DNA, 25 bp, Homo sapien
gttgaatatgcatgcccaagttttc

SEQ ID NO: 4972796 - DNA, 25 bp, Homo sapien
tttgcctgctgcttttattctataa

SEQ ID NO: 4972797 - DNA, 25 bp, Homo sapien
aaggcaggattcatgttcattattc

SEQ ID NO: 4972798 - DNA, 25 bp, Homo sapien
gtcttgataatggattatttccctg

SEQ ID NO: 4972799 - DNA, 25 bp, Homo sapien
tgtcctttacatccccttgcatggt

SEQ ID NO: 4972800 - DNA, 25 bp, Homo sapien
tattaagaggatgaatacttctctg

SEQ ID NO: 4972801 - DNA, 25 bp, Homo sapien
aatatcgaactctgacattgtcctc

SEQ ID NO: 4972802 - DNA, 25 bp, Homo sapien
tgacattgtcctcagtacaattttg

SEQ ID NO: 4972803 - DNA, 25 bp, Homo sapien
cacgtttattatggtaatatcgaac

SEQ ID NO: 4972804 - DNA, 25 bp, Homo sapien
cacatatattcacgtttattatggt

SEQ ID NO: 4972805 - DNA, 25 bp, Homo sapien
tatgtctatagtggatgcagacatt

SEQ ID NO: 4972806 - DNA, 25 bp, Homo sapien
aatttttagtatgtctatagtggat

SEQ ID NO: 4972807 - DNA, 25 bp, Homo sapien
tagtatgtctatagtggatgcagac

SEQ ID NO: 4972808 - DNA, 25 bp, Homo sapien
tttagtatgtctatagtggatgcag

SEQ ID NO: 4972809 - DNA, 25 bp, Homo sapien
gataccgcatggtgagtattctcag

SEQ ID NO: 4972810 - DNA, 25 bp, Homo sapien
tattctcagaattgccaagtctgca

SEQ ID NO: 4972811 - DNA, 25 bp, Homo sapien
tatggtctgcggataccgcatggtg

SEQ ID NO: 4972812 - DNA, 25 bp, Homo sapien
aacatactgccacttaaagcagtct

SEQ ID NO: 4972813 - DNA, 25 bp, Homo sapien
tggtatctgttgtagactcagaccc

SEQ ID NO: 4972814 - DNA, 25 bp, Homo sapien
caaacgttacaagtgtgaccaaatc

SEQ ID NO: 4972815 - DNA, 25 bp, Homo sapien
tgctaatctttgtggagcgccaaac

SEQ ID NO: 4972816 - DNA, 25 bp, Homo sapien
tggatcagcccagaagatgtctagg

SEQ ID NO: 4972817 - DNA, 25 bp, Homo sapien
ctgccagtgggaatgggtccccaga

SEQ ID NO: 4972818 - DNA, 25 bp, Homo sapien
cacaggagttgggagtccagcatga

SEQ ID NO: 4972819 - DNA, 25 bp, Homo sapien
agagcgcccatcaggaacagagcac

SEQ ID NO: 4972820 - DNA, 25 bp, Homo sapien
aagagtcagaaccacccctggtcct

SEQ ID NO: 4972821 - DNA, 25 bp, Homo sapien
aatacgtaatgctttacaaatttct

SEQ ID NO: 4972822 - DNA, 25 bp, Homo sapien
atacgtaatgctttacaaatttctg

SEQ ID NO: 4972823 - DNA, 25 bp, Homo sapien
atttctgtgtcatctttgcatagga

SEQ ID NO: 4972824 - DNA, 25 bp, Homo sapien
tctgtgtcatctttgcataggagcc

SEQ ID NO: 4972825 - DNA, 25 bp, Homo sapien
tttccatgggctatggctgcttctg

SEQ ID NO: 4972826 - DNA, 25 bp, Homo sapien
tgcttctgagaaaagtattagtcgc

SEQ ID NO: 4972827 - DNA, 25 bp, Homo sapien
cttctgagaaaagtattagtcgcat

SEQ ID NO: 4972828 - DNA, 25 bp, Homo sapien
tccatgggctatggctgcttctgag

SEQ ID NO: 4972829 - DNA, 25 bp, Homo sapien
agatgggactctgtgttctctagtt

SEQ ID NO: 4972830 - DNA, 25 bp, Homo sapien
gggactctgtgttctctagttcctg

SEQ ID NO: 4972831 - DNA, 25 bp, Homo sapien
tgggactctgtgttctctagttcct

SEQ ID NO: 4972832 - DNA, 25 bp, Homo sapien
tcccgcagtcaactgagaattcatc

SEQ ID NO: 4972833 - DNA, 25 bp, Homo sapien
gcctgctctagtgttgagtgtttac

SEQ ID NO: 4972834 - DNA, 25 bp, Homo sapien
tgggtccaaatgagtataactcccc

SEQ ID NO: 4972835 - DNA, 25 bp, Homo sapien
gatgagctttgtctgccacactgcc

SEQ ID NO: 4972836 - DNA, 25 bp, Homo sapien
ctgagtagaaattctttttaaatgt

SEQ ID NO: 4972837 - DNA, 25 bp, Homo sapien
agtagaaattctttttaaatgtcat

SEQ ID NO: 4972838 - DNA, 25 bp, Homo sapien
tgagtagaaattctttttaaatgtc

SEQ ID NO: 4972839 - DNA, 25 bp, Homo sapien
gagtagaaattctttttaaatgtca

SEQ ID NO: 4972840 - DNA, 25 bp, Homo sapien
tctggtcattagtttgtgtctaaac

SEQ ID NO: 4972841 - DNA, 25 bp, Homo sapien
ctgaagatcacattttctggtcatt

SEQ ID NO: 4972842 - DNA, 25 bp, Homo sapien
tagtttgtgtctaaacaccccagac

SEQ ID NO: 4972843 - DNA, 25 bp, Homo sapien
ccagacagggtaagtttttctacag

SEQ ID NO: 4972844 - DNA, 25 bp, Homo sapien
tctttcagggaaagtgcctttcgta

SEQ ID NO: 4972845 - DNA, 25 bp, Homo sapien
tagtccatagttctagcagggtcat

SEQ ID NO: 4972846 - DNA, 25 bp, Homo sapien
caaaggactgcctttgagttcctag

SEQ ID NO: 4972847 - DNA, 25 bp, Homo sapien
tgtaggtgatcaaatcctctttcag

SEQ ID NO: 4972848 - DNA, 25 bp, Homo sapien
tcccttgggtttctcaatctataag

SEQ ID NO: 4972849 - DNA, 25 bp, Homo sapien
tccaagtatcccttgggtttctcaa

SEQ ID NO: 4972850 - DNA, 25 bp, Homo sapien
ggtttctcaatctataagcacctgg

SEQ ID NO: 4972851 - DNA, 25 bp, Homo sapien
tctcaatctataagcacctggtgcc

SEQ ID NO: 4972852 - DNA, 25 bp, Homo sapien
gaagacctcaaagatccacagtttc

SEQ ID NO: 4972853 - DNA, 25 bp, Homo sapien
aaagatccacagtttcgactgtgag

SEQ ID NO: 4972854 - DNA, 25 bp, Homo sapien
ccacagtttcgactgtgagtcctca

SEQ ID NO: 4972855 - DNA, 25 bp, Homo sapien
gttggtttagcaagattcaaaacac

SEQ ID NO: 4972856 - DNA, 25 bp, Homo sapien
ctatggttgcagaccatagcctgga

SEQ ID NO: 4972857 - DNA, 25 bp, Homo sapien
tccagtcactaattctctggctatg

SEQ ID NO: 4972858 - DNA, 25 bp, Homo sapien
cagacacggtagcaatggctttcaa

SEQ ID NO: 4972859 - DNA, 25 bp, Homo sapien
aagtagttgcagacacggtagcaat

SEQ ID NO: 4972860 - DNA, 25 bp, Homo sapien
cttgtattgtcagcaaatacgttgt

SEQ ID NO: 4972861 - DNA, 25 bp, Homo sapien
gttgtaacatccattaagtactttc

SEQ ID NO: 4972862 - DNA, 25 bp, Homo sapien
tgtcagcaaatacgttgtaacatcc

SEQ ID NO: 4972863 - DNA, 25 bp, Homo sapien
gcaaatacgttgtaacatccattaa

SEQ ID NO: 4972864 - DNA, 25 bp, Homo sapien
cttcattacttcagcgtcaggtctc

SEQ ID NO: 4972865 - DNA, 25 bp, Homo sapien
ttacttcagcgtcaggtctcaccat

SEQ ID NO: 4972866 - DNA, 25 bp, Homo sapien
atcacaggcttcattacttcagcgt

SEQ ID NO: 4972867 - DNA, 25 bp, Homo sapien
gctcctgtttgaatcacaggcttca

SEQ ID NO: 4972868 - DNA, 25 bp, Homo sapien
tagtctgcctgcatttaggtaaagc

SEQ ID NO: 4972869 - DNA, 25 bp, Homo sapien
taggtaaagctgtgaggtcctttcc

SEQ ID NO: 4972870 - DNA, 25 bp, Homo sapien
tctatgcccataacttgattgtgat

SEQ ID NO: 4972871 - DNA, 25 bp, Homo sapien
gattgtgatgggatagtctgcctgc

SEQ ID NO: 4972872 - DNA, 25 bp, Homo sapien
cttgcccaaggcctgatataaccac

SEQ ID NO: 4972873 - DNA, 25 bp, Homo sapien
ccagggactagaggcaaaaacctca

SEQ ID NO: 4972874 - DNA, 25 bp, Homo sapien
ggctaccacatacattcactgaaag

SEQ ID NO: 4972875 - DNA, 25 bp, Homo sapien
tggcacttaaaccacaagacggtcc

SEQ ID NO: 4972876 - DNA, 25 bp, Homo sapien
tagaactataagaattgaacctacc

SEQ ID NO: 4972877 - DNA, 25 bp, Homo sapien
agaatccaaaattatctgtgctacc

SEQ ID NO: 4972878 - DNA, 25 bp, Homo sapien
aaaattatctgtgctacctattaca

SEQ ID NO: 4972879 - DNA, 25 bp, Homo sapien
tccaaaattatctgtgctacctatt

SEQ ID NO: 4972880 - DNA, 25 bp, Homo sapien
gaacgcaagtgaactactttaagct

SEQ ID NO: 4972881 - DNA, 25 bp, Homo sapien
gcaagtgaactactttaagctaacc

SEQ ID NO: 4972882 - DNA, 25 bp, Homo sapien
acgcaagtgaactactttaagctaa

SEQ ID NO: 4972883 - DNA, 25 bp, Homo sapien
ttgaacgcaagtgaactactttaag

SEQ ID NO: 4972884 - DNA, 25 bp, Homo sapien
agattgatggaagttaaacccatga

SEQ ID NO: 4972885 - DNA, 25 bp, Homo sapien
ttgatggaagttaaacccatgaaaa

SEQ ID NO: 4972886 - DNA, 25 bp, Homo sapien
tagattgatggaagttaaacccatg

SEQ ID NO: 4972887 - DNA, 25 bp, Homo sapien
gattgatggaagttaaacccatgaa

SEQ ID NO: 4972888 - DNA, 25 bp, Homo sapien
gccaagcagacctccgtagggagtt

SEQ ID NO: 4972889 - DNA, 25 bp, Homo sapien
gctgtcctttaacacaagctccttc

SEQ ID NO: 4972890 - DNA, 25 bp, Homo sapien
taggccatccaaggttcagctgtac

SEQ ID NO: 4972891 - DNA, 25 bp, Homo sapien
acaagctccttcattctgccaagca

SEQ ID NO: 4972892 - DNA, 25 bp, Homo sapien
tctatgtttgccaaatagcagttta

SEQ ID NO: 4972893 - DNA, 25 bp, Homo sapien
tcttctatgtttgccaaatagcagt

SEQ ID NO: 4972894 - DNA, 25 bp, Homo sapien
ttctatgtttgccaaatagcagttt

SEQ ID NO: 4972895 - DNA, 25 bp, Homo sapien
ctatgtttgccaaatagcagtttag

SEQ ID NO: 4972896 - DNA, 25 bp, Homo sapien
ctttgatatcaggaacacaaatgag

SEQ ID NO: 4972897 - DNA, 25 bp, Homo sapien
tgttctggtcctaccagaggttgcc

SEQ ID NO: 4972898 - DNA, 25 bp, Homo sapien
gctgtgtttgttctggtcctaccag

SEQ ID NO: 4972899 - DNA, 25 bp, Homo sapien
gtgtttgttctggtcctaccagagg

SEQ ID NO: 4972900 - DNA, 25 bp, Homo sapien
gttctggtcctaccagaggttgcca

SEQ ID NO: 4972901 - DNA, 25 bp, Homo sapien
ggatctacctctggaaactcatgaa

SEQ ID NO: 4972902 - DNA, 25 bp, Homo sapien
gaagcacatgacttagtgtggctct

SEQ ID NO: 4972903 - DNA, 25 bp, Homo sapien
gctctgacaactgttctcctgaggg

SEQ ID NO: 4972904 - DNA, 25 bp, Homo sapien
cctctggaaactcatgaagcacatg

SEQ ID NO: 4972905 - DNA, 25 bp, Homo sapien
tgatggaatgcaagcgttcatctgg

SEQ ID NO: 4972906 - DNA, 25 bp, Homo sapien
tttgcttggtaacaacgtgcacggg

SEQ ID NO: 4972907 - DNA, 25 bp, Homo sapien
gatgatcaaactgtctgagagttga

SEQ ID NO: 4972908 - DNA, 25 bp, Homo sapien
gggtgctgcagcaagcactcgatga

SEQ ID NO: 4972909 - DNA, 25 bp, Homo sapien
caatgggatgttttactgattcccc

SEQ ID NO: 4972910 - DNA, 25 bp, Homo sapien
gcaacgcaatgggatgttttactga

SEQ ID NO: 4972911 - DNA, 25 bp, Homo sapien
cttcatcccatagcaacgcaatggg

SEQ ID NO: 4972912 - DNA, 25 bp, Homo sapien
gaagtccttcatcccatagcaacgc

SEQ ID NO: 4972913 - DNA, 25 bp, Homo sapien
ttcagatgctaaattcagaaggtgt

SEQ ID NO: 4972914 - DNA, 25 bp, Homo sapien
ggagaattaagggaatttgacttga

SEQ ID NO: 4972915 - DNA, 25 bp, Homo sapien
acttgatgagaaggtagctcttcat

SEQ ID NO: 4972916 - DNA, 25 bp, Homo sapien
gctaaattcagaaggtgtttagaag

SEQ ID NO: 4972917 - DNA, 25 bp, Homo sapien
tgtttcctgcccaaaaggtccaagc

SEQ ID NO: 4972918 - DNA, 25 bp, Homo sapien
taagacttcaaaaagcgcgtggtcc

SEQ ID NO: 4972919 - DNA, 25 bp, Homo sapien
tctgaaggattctggttactccaca

SEQ ID NO: 4972920 - DNA, 25 bp, Homo sapien
tctttgtacgaacattgcggtggtc

SEQ ID NO: 4972921 - DNA, 25 bp, Homo sapien
cctctcacagtgatctggctgtttc

SEQ ID NO: 4972922 - DNA, 25 bp, Homo sapien
cagcatggagaaactctcccgctcc

SEQ ID NO: 4972923 - DNA, 25 bp, Homo sapien
tgtttcatgttctccgactccagca

SEQ ID NO: 4972924 - DNA, 25 bp, Homo sapien
cctctctttgccctcataaaagctt

SEQ ID NO: 4972925 - DNA, 25 bp, Homo sapien
tcatctgcgaattgggaatattacg

SEQ ID NO: 4972926 - DNA, 25 bp, Homo sapien
gaagagactaagaagccctagaagg

SEQ ID NO: 4972927 - DNA, 25 bp, Homo sapien
tacgtgctctacacacttcacaggt

SEQ ID NO: 4972928 - DNA, 25 bp, Homo sapien
cattttctaccagcacaattgtgag

SEQ ID NO: 4972929 - DNA, 25 bp, Homo sapien
tatgctcaccctattcactatgttc

SEQ ID NO: 4972930 - DNA, 25 bp, Homo sapien
taagatcacttacatcactcactga

SEQ ID NO: 4972931 - DNA, 25 bp, Homo sapien
cactatgttcatgtagggtagatag

SEQ ID NO: 4972932 - DNA, 25 bp, Homo sapien
tcacttttgttctggttaagatcac

SEQ ID NO: 4972933 - DNA, 25 bp, Homo sapien
gcctcctggattgatgttccaatag

SEQ ID NO: 4972934 - DNA, 25 bp, Homo sapien
ggattgatgttccaataggaaagcg

SEQ ID NO: 4972935 - DNA, 25 bp, Homo sapien
aagggcctcctggattgatgttcca

SEQ ID NO: 4972936 - DNA, 25 bp, Homo sapien
tgatgttccaataggaaagcgattt

SEQ ID NO: 4972937 - DNA, 25 bp, Homo sapien
attaatcaggatattccagacctcc

SEQ ID NO: 4972938 - DNA, 25 bp, Homo sapien
tcaaggaaagtcctgatcagaattt

SEQ ID NO: 4972939 - DNA, 25 bp, Homo sapien
tttttccttcatatgaagtgttcca

SEQ ID NO: 4972940 - DNA, 25 bp, Homo sapien
tgttccaatcacattaatcaggata

SEQ ID NO: 4972941 - DNA, 25 bp, Homo sapien
tacagatttgatcgtatttcttctt

SEQ ID NO: 4972942 - DNA, 25 bp, Homo sapien
aaataaacctcacgtaactatccat

SEQ ID NO: 4972943 - DNA, 25 bp, Homo sapien
aatacagatttgatcgtatttcttc

SEQ ID NO: 4972944 - DNA, 25 bp, Homo sapien
acagatttgatcgtatttcttcttc

SEQ ID NO: 4972945 - DNA, 25 bp, Homo sapien
gctggcagacgatgaaacagcttca

SEQ ID NO: 4972946 - DNA, 25 bp, Homo sapien
tgtggctggcagacgatgaaacagc

SEQ ID NO: 4972947 - DNA, 25 bp, Homo sapien
agcttcaaagccccaagtccagcaa

SEQ ID NO: 4972948 - DNA, 25 bp, Homo sapien
tggctggcagacgatgaaacagctt

SEQ ID NO: 4972949 - DNA, 25 bp, Homo sapien
atggtcccttcttgatctcaaagag

SEQ ID NO: 4972950 - DNA, 25 bp, Homo sapien
caaagagaccaattcagttaagact

SEQ ID NO: 4972951 - DNA, 25 bp, Homo sapien
aacttgaaagaacaagcctctggtc

SEQ ID NO: 4972952 - DNA, 25 bp, Homo sapien
tggaaacttgaaagaacaagcctct

SEQ ID NO: 4972953 - DNA, 25 bp, Homo sapien
gttggccaagagtgtgacatcccct

SEQ ID NO: 4972954 - DNA, 25 bp, Homo sapien
aagctggtcttctggttcaatggac

SEQ ID NO: 4972955 - DNA, 25 bp, Homo sapien
tcctcagcagagattgtgaccacaa

SEQ ID NO: 4972956 - DNA, 25 bp, Homo sapien
ctttggccctgtagcatcctcagca

SEQ ID NO: 4972957 - DNA, 25 bp, Homo sapien
tcaactattagagggatcacatcgt

SEQ ID NO: 4972958 - DNA, 25 bp, Homo sapien
tgagccgtatagcacacatcattct

SEQ ID NO: 4972959 - DNA, 25 bp, Homo sapien
ggatggcttcctgaacagtgccttc

SEQ ID NO: 4972960 - DNA, 25 bp, Homo sapien
tcatcaggtgagagatgagccgtat

SEQ ID NO: 4972961 - DNA, 25 bp, Homo sapien
acattcagatttatactcctgttcc

SEQ ID NO: 4972962 - DNA, 25 bp, Homo sapien
tcagatttatactcctgttccttat

SEQ ID NO: 4972963 - DNA, 25 bp, Homo sapien
catcagcactgtgacattcagattt

SEQ ID NO: 4972964 - DNA, 25 bp, Homo sapien
cattcagatttatactcctgttcct

SEQ ID NO: 4972965 - DNA, 25 bp, Homo sapien
ctcattcatatgtgtgtctttattc

SEQ ID NO: 4972966 - DNA, 25 bp, Homo sapien
gtgtgtctttattctgctgaggaag

SEQ ID NO: 4972967 - DNA, 25 bp, Homo sapien
gcctcattcatatgtgtgtctttat

SEQ ID NO: 4972968 - DNA, 25 bp, Homo sapien
ctgcctcattcatatgtgtgtcttt

SEQ ID NO: 4972969 - DNA, 25 bp, Homo sapien
aactcatcttgatccctgaatatag

SEQ ID NO: 4972970 - DNA, 25 bp, Homo sapien
cttgctacatcttggtcttgctctc

SEQ ID NO: 4972971 - DNA, 25 bp, Homo sapien
aatatagtatgcctatattcacggg

SEQ ID NO: 4972972 - DNA, 25 bp, Homo sapien
gcgatatcggttgggacaggtccat

SEQ ID NO: 4972973 - DNA, 25 bp, Homo sapien
tggttccattcacagttgttcacca

SEQ ID NO: 4972974 - DNA, 25 bp, Homo sapien
ctaatctataggagatggtgggtac

SEQ ID NO: 4972975 - DNA, 25 bp, Homo sapien
cattcacagttgttcaccatggtac

SEQ ID NO: 4972976 - DNA, 25 bp, Homo sapien
tgggtacgtacaacactggttccat

SEQ ID NO: 4972977 - DNA, 25 bp, Homo sapien
tttgcctgaaactttaggattttca

SEQ ID NO: 4972978 - DNA, 25 bp, Homo sapien
tcagaatttgcctgaaactttagga

SEQ ID NO: 4972979 - DNA, 25 bp, Homo sapien
gcctgaaactttaggattttcatgt

SEQ ID NO: 4972980 - DNA, 25 bp, Homo sapien
cagaatttgcctgaaactttaggat

SEQ ID NO: 4972981 - DNA, 25 bp, Homo sapien
cagcctggcggtgtttagcagtgat

SEQ ID NO: 4972982 - DNA, 25 bp, Homo sapien
tgaaatgaactttgctggcagcctg

SEQ ID NO: 4972983 - DNA, 25 bp, Homo sapien
gatatcagtgccaattctccaggga

SEQ ID NO: 4972984 - DNA, 25 bp, Homo sapien
tccagggatgcagaagacgcccctc

SEQ ID NO: 4972985 - DNA, 25 bp, Homo sapien
ataaataattctactctatacagcg

SEQ ID NO: 4972986 - DNA, 25 bp, Homo sapien
gttacagtcctttgcctctgaaggg

SEQ ID NO: 4972987 - DNA, 25 bp, Homo sapien
ctatacagcgtagcttctataactt

SEQ ID NO: 4972988 - DNA, 25 bp, Homo sapien
tccagtatctacaataccagggtgg

SEQ ID NO: 4972989 - DNA, 25 bp, Homo sapien
gggatttattgcatacgcacaagta

SEQ ID NO: 4972990 - DNA, 25 bp, Homo sapien
gggtatatatgtaaggtattcctcc

SEQ ID NO: 4972991 - DNA, 25 bp, Homo sapien
gacctgcgaaagctgaaaaaattta

SEQ ID NO: 4972992 - DNA, 25 bp, Homo sapien
tgaagtggcaatatactatcagttg

SEQ ID NO: 4972993 - DNA, 25 bp, Homo sapien
gcatgccagctgaaagttatctgca

SEQ ID NO: 4972994 - DNA, 25 bp, Homo sapien
tgctctgctgaacaaagcattcgct

SEQ ID NO: 4972995 - DNA, 25 bp, Homo sapien
tcagagacttaagctatttttccct

SEQ ID NO: 4972996 - DNA, 25 bp, Homo sapien
acatatccttgataatatccagtgg

SEQ ID NO: 4972997 - DNA, 25 bp, Homo sapien
aacccttccacaatcataatcttcg

SEQ ID NO: 4972998 - DNA, 25 bp, Homo sapien
tctttggagctaatggttgcaggca

SEQ ID NO: 4972999 - DNA, 25 bp, Homo sapien
aatcataatcttcgccctctttgga

SEQ ID NO: 4973000 - DNA, 25 bp, Homo sapien
gttgcaggcattctcgtggctctgc

SEQ ID NO: 4973001 - DNA, 25 bp, Homo sapien
ctggttgaagagctttcaggctttc

SEQ ID NO: 4973002 - DNA, 25 bp, Homo sapien
ttgaagagctttcaggctttcaggc

SEQ ID NO: 4973003 - DNA, 25 bp, Homo sapien
ttcaggccagctcctgaggcatagt

SEQ ID NO: 4973004 - DNA, 25 bp, Homo sapien
gaagagctttcaggctttcaggcca

SEQ ID NO: 4973005 - DNA, 25 bp, Homo sapien
gatgcttcgttgctacctggtatca

SEQ ID NO: 4973006 - DNA, 25 bp, Homo sapien
tgctacctggtatcactttctctcc

SEQ ID NO: 4973007 - DNA, 25 bp, Homo sapien
acatctgatgcttcgttgctacctg

SEQ ID NO: 4973008 - DNA, 25 bp, Homo sapien
cgttgctacctggtatcactttctc

SEQ ID NO: 4973009 - DNA, 25 bp, Homo sapien
cctccacaggaatgacagtgcgttg

SEQ ID NO: 4973010 - DNA, 25 bp, Homo sapien
gaccaaagttctcgtacatcctcca

SEQ ID NO: 4973011 - DNA, 25 bp, Homo sapien
tgcaaatctgcagggtgcatgaagc

SEQ ID NO: 4973012 - DNA, 25 bp, Homo sapien
tatcaggtagcactcacaaagggta

SEQ ID NO: 4973013 - DNA, 25 bp, Homo sapien
gcactgctctggtctcccagtaagc

SEQ ID NO: 4973014 - DNA, 25 bp, Homo sapien
tgatgctggcctcgtttgctgaaga

SEQ ID NO: 4973015 - DNA, 25 bp, Homo sapien
tcccagtaagccctgggcaaatgat

SEQ ID NO: 4973016 - DNA, 25 bp, Homo sapien
cctaaaaggagggagtagtgtgata

SEQ ID NO: 4973017 - DNA, 25 bp, Homo sapien
tcttccctattccatccacaatctg

SEQ ID NO: 4973018 - DNA, 25 bp, Homo sapien
atctgcacatatctgttctccttca

SEQ ID NO: 4973019 - DNA, 25 bp, Homo sapien
cttcatttcccatggccaatggtgc

SEQ ID NO: 4973020 - DNA, 25 bp, Homo sapien
ggtgccctcttccctattccatcca

SEQ ID NO: 4973021 - DNA, 25 bp, Homo sapien
cttcgggcttgagcttgtatagaag

SEQ ID NO: 4973022 - DNA, 25 bp, Homo sapien
ggcttgagcttgtatagaagccaat

SEQ ID NO: 4973023 - DNA, 25 bp, Homo sapien
cgggcttgagcttgtatagaagcca

SEQ ID NO: 4973024 - DNA, 25 bp, Homo sapien
cttgagcttgtatagaagccaatca

SEQ ID NO: 4973025 - DNA, 25 bp, Homo sapien
tggttctgtgcgccttgagacctta

SEQ ID NO: 4973026 - DNA, 25 bp, Homo sapien
ggttctgtgcgccttgagaccttac

SEQ ID NO: 4973027 - DNA, 25 bp, Homo sapien
ctttggttctgtgcgccttgagacc

SEQ ID NO: 4973028 - DNA, 25 bp, Homo sapien
ctactttggttctgtgcgccttgag

SEQ ID NO: 4973029 - DNA, 25 bp, Homo sapien
gccacctccctgaataaccacgtat

SEQ ID NO: 4973030 - DNA, 25 bp, Homo sapien
gagtgaaacttgtgataacagctca

SEQ ID NO: 4973031 - DNA, 25 bp, Homo sapien
accacgtatcgatggttaatgaata

SEQ ID NO: 4973032 - DNA, 25 bp, Homo sapien
gactgacacttgatcttttgagtga

SEQ ID NO: 4973033 - DNA, 25 bp, Homo sapien
taattggatgaaaacggaaatgcat

SEQ ID NO: 4973034 - DNA, 25 bp, Homo sapien
ctaattggatgaaaacggaaatgca

SEQ ID NO: 4973035 - DNA, 25 bp, Homo sapien
tcagttcttaaatcgcccagtgttg

SEQ ID NO: 4973036 - DNA, 25 bp, Homo sapien
taaaaggacttattctggacttgcc

SEQ ID NO: 4973037 - DNA, 25 bp, Homo sapien
gcagaactgtttgcccctgtggact

SEQ ID NO: 4973038 - DNA, 25 bp, Homo sapien
caagatgcttgtcttagggaccaac

SEQ ID NO: 4973039 - DNA, 25 bp, Homo sapien
caaagttgtcaagctcaatgtggtg

SEQ ID NO: 4973040 - DNA, 25 bp, Homo sapien
ttaaaaagacatgcactggccgaac

SEQ ID NO: 4973041 - DNA, 25 bp, Homo sapien
ctgtgagactcctgttatactatga

SEQ ID NO: 4973042 - DNA, 25 bp, Homo sapien
caatgtggtggatattcgttttcca

SEQ ID NO: 4973043 - DNA, 25 bp, Homo sapien
ggataatatcctgacccaaaagcat

SEQ ID NO: 4973044 - DNA, 25 bp, Homo sapien
gcctatttgggctagttgaatcatc

SEQ ID NO: 4973045 - DNA, 25 bp, Homo sapien
ccttggaggcattaatcaattccag

SEQ ID NO: 4973046 - DNA, 25 bp, Homo sapien
taaaagacatgcacttaaaggtcaa

SEQ ID NO: 4973047 - DNA, 25 bp, Homo sapien
agacagtgaggtaaagtgaaaggta

SEQ ID NO: 4973048 - DNA, 25 bp, Homo sapien
ggagacagtgaggtaaagtgaaagg

SEQ ID NO: 4973049 - DNA, 25 bp, Homo sapien
acagtgaggtaaagtgaaaggtatg

SEQ ID NO: 4973050 - DNA, 25 bp, Homo sapien
gacagtgaggtaaagtgaaaggtat

SEQ ID NO: 4973051 - DNA, 25 bp, Homo sapien
tacctaatgaagacgctgctcactg

SEQ ID NO: 4973052 - DNA, 25 bp, Homo sapien
gagctgaaccttccctatagcagga

SEQ ID NO: 4973053 - DNA, 25 bp, Homo sapien
catacttcagaaacgcttagagagg

SEQ ID NO: 4973054 - DNA, 25 bp, Homo sapien
tcagcttcagcacaattggagttcc

SEQ ID NO: 4973055 - DNA, 25 bp, Homo sapien
ccctggaaaccaacagatgggatct

SEQ ID NO: 4973056 - DNA, 25 bp, Homo sapien
caggataccaggtttgccaaatacc

SEQ ID NO: 4973057 - DNA, 25 bp, Homo sapien
catgttcatgctcggctgcaggata

SEQ ID NO: 4973058 - DNA, 25 bp, Homo sapien
tattactcacttacatccctggaaa

SEQ ID NO: 4973059 - DNA, 25 bp, Homo sapien
gaagataaccagtgtccataagaaa

SEQ ID NO: 4973060 - DNA, 25 bp, Homo sapien
tgcacaaggaaagtactcactctag

SEQ ID NO: 4973061 - DNA, 25 bp, Homo sapien
agatcgtctccctccattgcacaag

SEQ ID NO: 4973062 - DNA, 25 bp, Homo sapien
aaaggcagtaagtatgtgggtccac

SEQ ID NO: 4973063 - DNA, 25 bp, Homo sapien
gttttgattcctatcaaccagccac

SEQ ID NO: 4973064 - DNA, 25 bp, Homo sapien
tactaggccccaaaactcttgagat

SEQ ID NO: 4973065 - DNA, 25 bp, Homo sapien
aaaagttttgattcctatcaaccag

SEQ ID NO: 4973066 - DNA, 25 bp, Homo sapien
tcagtccttgaatactaggccccaa

SEQ ID NO: 4973067 - DNA, 25 bp, Homo sapien
caaagagctcaaaggtggagtccgg

SEQ ID NO: 4973068 - DNA, 25 bp, Homo sapien
tctttcttggattgttcaaagctgg

SEQ ID NO: 4973069 - DNA, 25 bp, Homo sapien
aatccacatctctcgcaaagagctc

SEQ ID NO: 4973070 - DNA, 25 bp, Homo sapien
tctgggcaactcaggtgggtatctt

SEQ ID NO: 4973071 - DNA, 25 bp, Homo sapien
ccatcatgtgtggcaagaactctta

SEQ ID NO: 4973072 - DNA, 25 bp, Homo sapien
tgtgtggcaagaactcttaattttt

SEQ ID NO: 4973073 - DNA, 25 bp, Homo sapien
catcatgtgtggcaagaactcttaa

SEQ ID NO: 4973074 - DNA, 25 bp, Homo sapien
tcatgtgtggcaagaactcttaatt

SEQ ID NO: 4973075 - DNA, 25 bp, Homo sapien
ctgtccagggcttgtaaactttacg

SEQ ID NO: 4973076 - DNA, 25 bp, Homo sapien
ggaatattcaaccttcctgcaaagc

SEQ ID NO: 4973077 - DNA, 25 bp, Homo sapien
caaagcccggtctttctgataggaa

SEQ ID NO: 4973078 - DNA, 25 bp, Homo sapien
cacgggatcccccagaagaaacaat

SEQ ID NO: 4973079 - DNA, 25 bp, Homo sapien
caacagaaggaaatgcaggagagca

SEQ ID NO: 4973080 - DNA, 25 bp, Homo sapien
gagaacatcaagatggccagcctgc

SEQ ID NO: 4973081 - DNA, 25 bp, Homo sapien
tgctggctctatgcccacctttgat

SEQ ID NO: 4973082 - DNA, 25 bp, Homo sapien
gatgaggtggcaacaacagaaggaa

SEQ ID NO: 4973083 - DNA, 25 bp, Homo sapien
tccagtcgtctgatgtaacttgcca

SEQ ID NO: 4973084 - DNA, 25 bp, Homo sapien
tgaagcctgatattagcccacacct

SEQ ID NO: 4973085 - DNA, 25 bp, Homo sapien
gaagtcgctggttagagatctcacc

SEQ ID NO: 4973086 - DNA, 25 bp, Homo sapien
aattgtcctggttgacgtcttgcac

SEQ ID NO: 4973087 - DNA, 25 bp, Homo sapien
tctcagtgatgtagtcatcacaaac

SEQ ID NO: 4973088 - DNA, 25 bp, Homo sapien
aacttctcagtgatgtagtcatcac

SEQ ID NO: 4973089 - DNA, 25 bp, Homo sapien
tgatgctgggggatccgtaatatac

SEQ ID NO: 4973090 - DNA, 25 bp, Homo sapien
atacagggactacccccagtttcag

SEQ ID NO: 4973091 - DNA, 25 bp, Homo sapien
ccatagaggctggatttttcagctg

SEQ ID NO: 4973092 - DNA, 25 bp, Homo sapien
aatcgacctcgatgtaagtcatcag

SEQ ID NO: 4973093 - DNA, 25 bp, Homo sapien
tgatcctataaaagccatcggcatc

SEQ ID NO: 4973094 - DNA, 25 bp, Homo sapien
tgtttcgtaaacattcaccatagga

SEQ ID NO: 4973095 - DNA, 25 bp, Homo sapien
ctgtccctgtctgatggtgggtcac

SEQ ID NO: 4973096 - DNA, 25 bp, Homo sapien
cctgtctgatggtgggtcacagtct

SEQ ID NO: 4973097 - DNA, 25 bp, Homo sapien
atagctgtccctgtctgatggtggg

SEQ ID NO: 4973098 - DNA, 25 bp, Homo sapien
gctgtccctgtctgatggtgggtca

SEQ ID NO: 4973099 - DNA, 25 bp, Homo sapien
gactgcaaaggaactaggtatcgga

SEQ ID NO: 4973100 - DNA, 25 bp, Homo sapien
tgtacatacaccagcggagcaagtc

SEQ ID NO: 4973101 - DNA, 25 bp, Homo sapien
tccgaggcagaggtaagctatctat

SEQ ID NO: 4973102 - DNA, 25 bp, Homo sapien
agtcatgatgggctttccgaggcag

SEQ ID NO: 4973103 - DNA, 25 bp, Homo sapien
agattagaatacagaggagtctgag

SEQ ID NO: 4973104 - DNA, 25 bp, Homo sapien
ctggtaagattagaatacagaggag

SEQ ID NO: 4973105 - DNA, 25 bp, Homo sapien
gtctgaggctatgaataagaagcat

SEQ ID NO: 4973106 - DNA, 25 bp, Homo sapien
ggagtctgaggctatgaataagaag

SEQ ID NO: 4973107 - DNA, 25 bp, Homo sapien
ctgccaaaggtggtgattcttcttg

SEQ ID NO: 4973108 - DNA, 25 bp, Homo sapien
caaaggtggtgattcttcttgggac

SEQ ID NO: 4973109 - DNA, 25 bp, Homo sapien
gccaaaggtggtgattcttcttggg

SEQ ID NO: 4973110 - DNA, 25 bp, Homo sapien
cattttctgccaaaggtggtgattc

SEQ ID NO: 4973111 - DNA, 25 bp, Homo sapien
ttgcttgctaactgaccctcaccta

SEQ ID NO: 4973112 - DNA, 25 bp, Homo sapien
agagatgactctcccttgcttgcta

SEQ ID NO: 4973113 - DNA, 25 bp, Homo sapien
gcttgctaactgaccctcacctaat

SEQ ID NO: 4973114 - DNA, 25 bp, Homo sapien
gggaaagagatgactctcccttgct

SEQ ID NO: 4973115 - DNA, 25 bp, Homo sapien
cactatcgctgtcaccactgtctgc

SEQ ID NO: 4973116 - DNA, 25 bp, Homo sapien
gttattgtcattgccactatcgctg

SEQ ID NO: 4973117 - DNA, 25 bp, Homo sapien
agccagcactcccaggttattgtca

SEQ ID NO: 4973118 - DNA, 25 bp, Homo sapien
gggcaagaactctctagccagcact

SEQ ID NO: 4973119 - DNA, 25 bp, Homo sapien
tcacagataaacttcaaaaccatca

SEQ ID NO: 4973120 - DNA, 25 bp, Homo sapien
gttcacagataaacttcaaaaccat

SEQ ID NO: 4973121 - DNA, 25 bp, Homo sapien
tcaaaaccatcacatcatcccccat

SEQ ID NO: 4973122 - DNA, 25 bp, Homo sapien
gtaaaagttcacagataaacttcaa

SEQ ID NO: 4973123 - DNA, 25 bp, Homo sapien
cacagccctttgcattgcaccgata

SEQ ID NO: 4973124 - DNA, 25 bp, Homo sapien
ttagccagtaacacagccctttgca

SEQ ID NO: 4973125 - DNA, 25 bp, Homo sapien
gccctttgcattgcaccgatagagc

SEQ ID NO: 4973126 - DNA, 25 bp, Homo sapien
tcctattagccagtaacacagccct

SEQ ID NO: 4973127 - DNA, 25 bp, Homo sapien
cagtcaggcttatgttactcaaaca

SEQ ID NO: 4973128 - DNA, 25 bp, Homo sapien
gaaatgacccgcattaactgtacta

SEQ ID NO: 4973129 - DNA, 25 bp, Homo sapien
ccgctagaagccacatgtctataag

SEQ ID NO: 4973130 - DNA, 25 bp, Homo sapien
ggtttaatcagcctcccgctagaag

SEQ ID NO: 4973131 - DNA, 25 bp, Homo sapien
ggatgtttggcctcaaattctaatc

SEQ ID NO: 4973132 - DNA, 25 bp, Homo sapien
cataggccggtatccatccgtagcc

SEQ ID NO: 4973133 - DNA, 25 bp, Homo sapien
cccagcgctggcattaccgtctgag

SEQ ID NO: 4973134 - DNA, 25 bp, Homo sapien
tatgagaacctgacgcctgatgaac

SEQ ID NO: 4973135 - DNA, 25 bp, Homo sapien
taaaggagagtgatcattgtcatca

SEQ ID NO: 4973136 - DNA, 25 bp, Homo sapien
tgaaatgccataaaggagagtgatc

SEQ ID NO: 4973137 - DNA, 25 bp, Homo sapien
ctctaatgaatatggacaaatcaac

SEQ ID NO: 4973138 - DNA, 25 bp, Homo sapien
catcattaataactgcccaagccaa

SEQ ID NO: 4973139 - DNA, 25 bp, Homo sapien
catctgtctgcatcgttagggcctt

SEQ ID NO: 4973140 - DNA, 25 bp, Homo sapien
ttagggccttcaggtatactgggac

SEQ ID NO: 4973141 - DNA, 25 bp, Homo sapien
ggatgctttccaaccctcgaaaggc

SEQ ID NO: 4973142 - DNA, 25 bp, Homo sapien
tgctaccagcaagaagtaattgttc

SEQ ID NO: 4973143 - DNA, 25 bp, Homo sapien
gaatgctgaaatcggcacctggcat

SEQ ID NO: 4973144 - DNA, 25 bp, Homo sapien
ggcctggaagccgtgtaatttctgt

SEQ ID NO: 4973145 - DNA, 25 bp, Homo sapien
gctctcctctatgactacatttgcc

SEQ ID NO: 4973146 - DNA, 25 bp, Homo sapien
tttctctgacctcagaatgctgaaa

SEQ ID NO: 4973147 - DNA, 25 bp, Homo sapien
agtgagactcttgccacagtcattc

SEQ ID NO: 4973148 - DNA, 25 bp, Homo sapien
ccgagaacgtcccagagactgggta

SEQ ID NO: 4973149 - DNA, 25 bp, Homo sapien
ggactgaatgcaccaagccgagaac

SEQ ID NO: 4973150 - DNA, 25 bp, Homo sapien
gtcccagagactgggtaccacgaag

SEQ ID NO: 4973151 - DNA, 25 bp, Homo sapien
tgatgtttaccccataaagcttgtg

SEQ ID NO: 4973152 - DNA, 25 bp, Homo sapien
taccccataaagcttgtgatggtgc

SEQ ID NO: 4973153 - DNA, 25 bp, Homo sapien
cttccacactgatgtttaccccata

SEQ ID NO: 4973154 - DNA, 25 bp, Homo sapien
gctctcattcgtgctggcttccaca

SEQ ID NO: 4973155 - DNA, 25 bp, Homo sapien
tcctccttgcagcacggacgcttct

SEQ ID NO: 4973156 - DNA, 25 bp, Homo sapien
ctccttgcagcacggacgcttctga

SEQ ID NO: 4973157 - DNA, 25 bp, Homo sapien
ccttgcagcacggacgcttctgaca

SEQ ID NO: 4973158 - DNA, 25 bp, Homo sapien
tccttgcagcacggacgcttctgac

SEQ ID NO: 4973159 - DNA, 25 bp, Homo sapien
ggtgaccctccaaagagccattcta

SEQ ID NO: 4973160 - DNA, 25 bp, Homo sapien
catgaggacatagagaccagagacc

SEQ ID NO: 4973161 - DNA, 25 bp, Homo sapien
catatgactacccacagcagagatg

SEQ ID NO: 4973162 - DNA, 25 bp, Homo sapien
gaagaggcctggcaaatggtgaccc

SEQ ID NO: 4973163 - DNA, 25 bp, Homo sapien
aattaagaaatgtcctgtgccttca

SEQ ID NO: 4973164 - DNA, 25 bp, Homo sapien
ttcagaggacataaagccacccagc

SEQ ID NO: 4973165 - DNA, 25 bp, Homo sapien
cagccaattaagaaatgtcctgtgc

SEQ ID NO: 4973166 - DNA, 25 bp, Homo sapien
aaagacaccagctccaaccacctgc

SEQ ID NO: 4973167 - DNA, 25 bp, Homo sapien
gtctgagctggggaatgcaaaaaga

SEQ ID NO: 4973168 - DNA, 25 bp, Homo sapien
aaagatacaactggtggccaggtgc

SEQ ID NO: 4973169 - DNA, 25 bp, Homo sapien
gaatgcaaaaagatacaactggtgg

SEQ ID NO: 4973170 - DNA, 25 bp, Homo sapien
tgagctggggaatgcaaaaagatac

SEQ ID NO: 4973171 - DNA, 25 bp, Homo sapien
taactccttcagtggtggctagaga

SEQ ID NO: 4973172 - DNA, 25 bp, Homo sapien
caaaggaagcatcgactaggtctgc

SEQ ID NO: 4973173 - DNA, 25 bp, Homo sapien
caagcctctgggaattcgtcatcca

SEQ ID NO: 4973174 - DNA, 25 bp, Homo sapien
ccacatcgggtcatggaggactaca

SEQ ID NO: 4973175 - DNA, 25 bp, Homo sapien
ccagaaacgtgtttatattcagaaa

SEQ ID NO: 4973176 - DNA, 25 bp, Homo sapien
cagaaacgtgtttatattcagaaaa

SEQ ID NO: 4973177 - DNA, 25 bp, Homo sapien
tccagaaacgtgtttatattcagaa

SEQ ID NO: 4973178 - DNA, 25 bp, Homo sapien
ttcctttatccttaattaggtcagc

SEQ ID NO: 4973179 - DNA, 25 bp, Homo sapien
gccacataatcctgtgagtttcctt

SEQ ID NO: 4973180 - DNA, 25 bp, Homo sapien
aaagcttccaggccacataatcctg

SEQ ID NO: 4973181 - DNA, 25 bp, Homo sapien
cagcttttgatacttccatcatttt

SEQ ID NO: 4973182 - DNA, 25 bp, Homo sapien
ggcacccatgaccatacctggctaa

SEQ ID NO: 4973183 - DNA, 25 bp, Homo sapien
ctgcaactttctcctcccaggttta

SEQ ID NO: 4973184 - DNA, 25 bp, Homo sapien
tacaggcacccatgaccatacctgg

SEQ ID NO: 4973185 - DNA, 25 bp, Homo sapien
tgcaactttctcctcccaggtttaa

SEQ ID NO: 4973186 - DNA, 25 bp, Homo sapien
cagggagggactcatacagattttc

SEQ ID NO: 4973187 - DNA, 25 bp, Homo sapien
gaacagcccgatgatccagttacct

SEQ ID NO: 4973188 - DNA, 25 bp, Homo sapien
catgattccctctagagtatcaggg

SEQ ID NO: 4973189 - DNA, 25 bp, Homo sapien
tatcaaagttacatgctcacagctc

SEQ ID NO: 4973190 - DNA, 25 bp, Homo sapien
gtgttttcaaggggagctccaccat

SEQ ID NO: 4973191 - DNA, 25 bp, Homo sapien
tcaaagtgttttcaaggggagctcc

SEQ ID NO: 4973192 - DNA, 25 bp, Homo sapien
caaagtgttttcaaggggagctcca

SEQ ID NO: 4973193 - DNA, 25 bp, Homo sapien
agtgttttcaaggggagctccacca

SEQ ID NO: 4973194 - DNA, 25 bp, Homo sapien
tcagctttggaggaagaccacagca

SEQ ID NO: 4973195 - DNA, 25 bp, Homo sapien
gaagaccacagcaaacaagggagaa

SEQ ID NO: 4973196 - DNA, 25 bp, Homo sapien
cacagcaaacaagggagaaaggcga

SEQ ID NO: 4973197 - DNA, 25 bp, Homo sapien
agcaaacaagggagaaaggcgaaag

SEQ ID NO: 4973198 - DNA, 25 bp, Homo sapien
gaggaatgctttggtcatgtgatga

SEQ ID NO: 4973199 - DNA, 25 bp, Homo sapien
taagatgcgtaggtgcttcctccat

SEQ ID NO: 4973200 - DNA, 25 bp, Homo sapien
ttttcctgttgaaggtcaatccttc

SEQ ID NO: 4973201 - DNA, 25 bp, Homo sapien
taggtccggttgatggtgaagaaac

SEQ ID NO: 4973202 - DNA, 25 bp, Homo sapien
tcaaacttccccagctcaaccatga

SEQ ID NO: 4973203 - DNA, 25 bp, Homo sapien
caaacttccccagctcaaccatgac

SEQ ID NO: 4973204 - DNA, 25 bp, Homo sapien
ttcaaacttccccagctcaaccatg

SEQ ID NO: 4973205 - DNA, 25 bp, Homo sapien
tttcaaacttccccagctcaaccat

SEQ ID NO: 4973206 - DNA, 25 bp, Homo sapien
ggcgcgatcttggcttactgcaaac

SEQ ID NO: 4973207 - DNA, 25 bp, Homo sapien
tctcgcactgtcacctgggtgcagt

SEQ ID NO: 4973208 - DNA, 25 bp, Homo sapien
gtctcgcactgtcacctgggtgcag

SEQ ID NO: 4973209 - DNA, 25 bp, Homo sapien
actccgcctcccaggttcaagtgat

SEQ ID NO: 4973210 - DNA, 25 bp, Homo sapien
tcgctgctcctggtgttagataaag

SEQ ID NO: 4973211 - DNA, 25 bp, Homo sapien
ggtgttagataaaggccgctgatca

SEQ ID NO: 4973212 - DNA, 25 bp, Homo sapien
ctcttttatgtgctcgctgctcctg

SEQ ID NO: 4973213 - DNA, 25 bp, Homo sapien
taaaggccgctgatcattgaagcat

SEQ ID NO: 4973214 - DNA, 25 bp, Homo sapien
cctggggagggcccgtgactttcat

SEQ ID NO: 4973215 - DNA, 25 bp, Homo sapien
gagtctgtaactccctggggagggc

SEQ ID NO: 4973216 - DNA, 25 bp, Homo sapien
aaatacagcaccatattgtctgcca

SEQ ID NO: 4973217 - DNA, 25 bp, Homo sapien
tacagcaccatattgtctgccaaag

SEQ ID NO: 4973218 - DNA, 25 bp, Homo sapien
attacctcattcaatcctacacaga

SEQ ID NO: 4973219 - DNA, 25 bp, Homo sapien
ttcaatcctacacagaagggagatc

SEQ ID NO: 4973220 - DNA, 25 bp, Homo sapien
gcctgacacgtccattcactaaacc

SEQ ID NO: 4973221 - DNA, 25 bp, Homo sapien
cacgtccattcactaaacctcagtt

SEQ ID NO: 4973222 - DNA, 25 bp, Homo sapien
tgacacgtccattcactaaacctca

SEQ ID NO: 4973223 - DNA, 25 bp, Homo sapien
gacacgtccattcactaaacctcag

SEQ ID NO: 4973224 - DNA, 25 bp, Homo sapien
ggctgtgacgcacaggcaagatgcc

SEQ ID NO: 4973225 - DNA, 25 bp, Homo sapien
ctgtgacgcacaggcaagatgccaa

SEQ ID NO: 4973226 - DNA, 25 bp, Homo sapien
tgacaagcagaaagacggtggctgt

SEQ ID NO: 4973227 - DNA, 25 bp, Homo sapien
cagaaagacggtggctgtgacgcac

SEQ ID NO: 4973228 - DNA, 25 bp, Homo sapien
tctgggcgccaatttcctgcactgc

SEQ ID NO: 4973229 - DNA, 25 bp, Homo sapien
tcttaggctatcatcagagcagctg

SEQ ID NO: 4973230 - DNA, 25 bp, Homo sapien
tcacatggaagaaccatctgggcgc

SEQ ID NO: 4973231 - DNA, 25 bp, Homo sapien
ttggcatcgagaggaagcagcatgc

SEQ ID NO: 4973232 - DNA, 25 bp, Homo sapien
attaggttctggaatggacggccgc

SEQ ID NO: 4973233 - DNA, 25 bp, Homo sapien
gggagaacaaggcaattcgcgcccc

SEQ ID NO: 4973234 - DNA, 25 bp, Homo sapien
tcacagttgctacgacttcaacaca

SEQ ID NO: 4973235 - DNA, 25 bp, Homo sapien
cacaacattcctgcaacaagtgatt

SEQ ID NO: 4973236 - DNA, 25 bp, Homo sapien
gtgtctcagcatcaagcccctaccc

SEQ ID NO: 4973237 - DNA, 25 bp, Homo sapien
gccagatgtgatgcggcgctcgcac

SEQ ID NO: 4973238 - DNA, 25 bp, Homo sapien
tttccgtgtctcagcatcaagcccc

SEQ ID NO: 4973239 - DNA, 25 bp, Homo sapien
agaggccagatgtgatgcggcgctc

SEQ ID NO: 4973240 - DNA, 25 bp, Homo sapien
gggttcgtcccgcagaatgcagcgc

SEQ ID NO: 4973241 - DNA, 25 bp, Homo sapien
ccgcagaatgcagcgcagcttcctt

SEQ ID NO: 4973242 - DNA, 25 bp, Homo sapien
ttcctttctccctatgagcccaagc

SEQ ID NO: 4973243 - DNA, 25 bp, Homo sapien
tttctccctatgagcccaagcctgg

SEQ ID NO: 4973244 - DNA, 25 bp, Homo sapien
tctaatcaaatggaatttctgcagt

SEQ ID NO: 4973245 - DNA, 25 bp, Homo sapien
tagtcacgctgttgtgctgctagca

SEQ ID NO: 4973246 - DNA, 25 bp, Homo sapien
ttctgcagtgaaatacaatacaggc

SEQ ID NO: 4973247 - DNA, 25 bp, Homo sapien
ggcatgcagtgagtaataacatcat

SEQ ID NO: 4973248 - DNA, 25 bp, Homo sapien
ttgtcctttggcctgcagcaaaaaa

SEQ ID NO: 4973249 - DNA, 25 bp, Homo sapien
atgtattctgaacctaacagttatg

SEQ ID NO: 4973250 - DNA, 25 bp, Homo sapien
tcattgcctagtgaaaagactgtgg

SEQ ID NO: 4973251 - DNA, 25 bp, Homo sapien
aaagagaatttgtcgaagatggtga

SEQ ID NO: 4973252 - DNA, 25 bp, Homo sapien
tgcccgagaaacttaacagatgagt

SEQ ID NO: 4973253 - DNA, 25 bp, Homo sapien
tatagcatatgtgttgaagtaacag

SEQ ID NO: 4973254 - DNA, 25 bp, Homo sapien
gaaagctaagttgtgaacaagagtg

SEQ ID NO: 4973255 - DNA, 25 bp, Homo sapien
gcaagaaatctggagtgagtgaaga

SEQ ID NO: 4973256 - DNA, 25 bp, Homo sapien
tcttgttctactttccctattctta

SEQ ID NO: 4973257 - DNA, 25 bp, Homo sapien
tttctgatatagttcaccacttttc

SEQ ID NO: 4973258 - DNA, 25 bp, Homo sapien
ccattgtagggtgcgccttcagaaa

SEQ ID NO: 4973259 - DNA, 25 bp, Homo sapien
gcacttttctgatatagttcaccac

SEQ ID NO: 4973260 - DNA, 25 bp, Homo sapien
cagctttggggaattttggccagga

SEQ ID NO: 4973261 - DNA, 25 bp, Homo sapien
ggaaagaatggatgacacttaggga

SEQ ID NO: 4973262 - DNA, 25 bp, Homo sapien
gaaagaatggatgacacttagggac

SEQ ID NO: 4973263 - DNA, 25 bp, Homo sapien
aagaatggatgacacttagggacag

SEQ ID NO: 4973264 - DNA, 25 bp, Homo sapien
aaagaatggatgacacttagggaca

SEQ ID NO: 4973265 - DNA, 25 bp, Homo sapien
ccagtgacttatggcatgaatttct

SEQ ID NO: 4973266 - DNA, 25 bp, Homo sapien
ttcatgctaccttcaatcttcaact

SEQ ID NO: 4973267 - DNA, 25 bp, Homo sapien
tgctaccttcaatcttcaactaaag

SEQ ID NO: 4973268 - DNA, 25 bp, Homo sapien
tgctgggtagattgtccagtgactt

SEQ ID NO: 4973269 - DNA, 25 bp, Homo sapien
gaaacatctgaaatgctctatttat

SEQ ID NO: 4973270 - DNA, 25 bp, Homo sapien
tctacctaaaagatggttgtcccta

SEQ ID NO: 4973271 - DNA, 25 bp, Homo sapien
tattcctgggagcttatagcccatt

SEQ ID NO: 4973272 - DNA, 25 bp, Homo sapien
aatgaggcagtagtttattaaatac

SEQ ID NO: 4973273 - DNA, 25 bp, Homo sapien
gaaaccaagtttcagtctgccttac

SEQ ID NO: 4973274 - DNA, 25 bp, Homo sapien
gctcatatggagatctaaaaccctc

SEQ ID NO: 4973275 - DNA, 25 bp, Homo sapien
gtccttagccccagtgacatgtgct

SEQ ID NO: 4973276 - DNA, 25 bp, Homo sapien
cagacttggtcaggcacatacatag

SEQ ID NO: 4973277 - DNA, 25 bp, Homo sapien
gactcaggtgtaaggtttggatccc

SEQ ID NO: 4973278 - DNA, 25 bp, Homo sapien
gaacagcggtccaggagaatcaggc

SEQ ID NO: 4973279 - DNA, 25 bp, Homo sapien
gagggccttcagtaagaccacaagt

SEQ ID NO: 4973280 - DNA, 25 bp, Homo sapien
gcagggcgctcttaacagactcagg

SEQ ID NO: 4973281 - DNA, 25 bp, Homo sapien
tcaaagactgtcaagtggaaagcta

SEQ ID NO: 4973282 - DNA, 25 bp, Homo sapien
gaagaaaagctatgttcatactcta

SEQ ID NO: 4973283 - DNA, 25 bp, Homo sapien
tggaagagacttcaaagactgtcaa

SEQ ID NO: 4973284 - DNA, 25 bp, Homo sapien
tgtcaagtggaaagctatcatttcc

SEQ ID NO: 4973285 - DNA, 25 bp, Homo sapien
gttttcatcgccttggtaaagctcc

SEQ ID NO: 4973286 - DNA, 25 bp, Homo sapien
ccagcctacttacttgtaactatta

SEQ ID NO: 4973287 - DNA, 25 bp, Homo sapien
gctagtgactgcacaatattgtgac

SEQ ID NO: 4973288 - DNA, 25 bp, Homo sapien
ccagaaatggacaatgctagtgact

SEQ ID NO: 4973289 - DNA, 25 bp, Homo sapien
gtccatcataaacctccagataacc

SEQ ID NO: 4973290 - DNA, 25 bp, Homo sapien
ttccaatatcttcagtctagcttcc

SEQ ID NO: 4973291 - DNA, 25 bp, Homo sapien
tccaatatcttcagtctagcttcct

SEQ ID NO: 4973292 - DNA, 25 bp, Homo sapien
tcctcctcaggtccatcataaacct

SEQ ID NO: 4973293 - DNA, 25 bp, Homo sapien
aagtgccggacagttaggatcccca

SEQ ID NO: 4973294 - DNA, 25 bp, Homo sapien
agtgccggacagttaggatccccaa

SEQ ID NO: 4973295 - DNA, 25 bp, Homo sapien
taagtgccggacagttaggatcccc

SEQ ID NO: 4973296 - DNA, 25 bp, Homo sapien
gtgccggacagttaggatccccaac

SEQ ID NO: 4973297 - DNA, 25 bp, Homo sapien
gaaagccggcaggtttcttgcgtag

SEQ ID NO: 4973298 - DNA, 25 bp, Homo sapien
cctcatcacaatgggtggtgggtcg

SEQ ID NO: 4973299 - DNA, 25 bp, Homo sapien
cttgcgtaggtcctgcgtaaaagaa

SEQ ID NO: 4973300 - DNA, 25 bp, Homo sapien
tggtgggtcgagctccatctccttt

SEQ ID NO: 4973301 - DNA, 25 bp, Homo sapien
ttggaaatggcatggtataggacct

SEQ ID NO: 4973302 - DNA, 25 bp, Homo sapien
tgtgtacaggtggttggaaatggca

SEQ ID NO: 4973303 - DNA, 25 bp, Homo sapien
aaatggcatggtataggacctgggc

SEQ ID NO: 4973304 - DNA, 25 bp, Homo sapien
tggcatggtataggacctgggctct

SEQ ID NO: 4973305 - DNA, 25 bp, Homo sapien
gagacagtgtacacccaggattttg

SEQ ID NO: 4973306 - DNA, 25 bp, Homo sapien
aatgaccaatgatgcgggaagtacc

SEQ ID NO: 4973307 - DNA, 25 bp, Homo sapien
tgtttgatggcagggttattcttcc

SEQ ID NO: 4973308 - DNA, 25 bp, Homo sapien
taagcacaatgtgatggagacagtg

SEQ ID NO: 4973309 - DNA, 25 bp, Homo sapien
tataaacgggtcctgccaagtgatg

SEQ ID NO: 4973310 - DNA, 25 bp, Homo sapien
tatacaagtcgggtttgagaagccc

SEQ ID NO: 4973311 - DNA, 25 bp, Homo sapien
tgcagggccgaccagggaattctta

SEQ ID NO: 4973312 - DNA, 25 bp, Homo sapien
gagaagccctagtatcaccgaaagt

SEQ ID NO: 4973313 - DNA, 25 bp, Homo sapien
aagagggaaggagcgatcacccaaa

SEQ ID NO: 4973314 - DNA, 25 bp, Homo sapien
ggaaggagcgatcacccaaagagaa

SEQ ID NO: 4973315 - DNA, 25 bp, Homo sapien
gagggatccgttgaagagggaagga

SEQ ID NO: 4973316 - DNA, 25 bp, Homo sapien
cacagaacgaggatggaggcgggga

SEQ ID NO: 4973317 - DNA, 25 bp, Homo sapien
gggcgagtctgaccgggataagaat

SEQ ID NO: 4973318 - DNA, 25 bp, Homo sapien
gactctcagggagtaaaagagtctt

SEQ ID NO: 4973319 - DNA, 25 bp, Homo sapien
tgaccgggataagaataaagagaaa

SEQ ID NO: 4973320 - DNA, 25 bp, Homo sapien
ctctcagggagtaaaagagtcttac

SEQ ID NO: 4973321 - DNA, 25 bp, Homo sapien
atgtcaccaacttaaccacccccag

SEQ ID NO: 4973322 - DNA, 25 bp, Homo sapien
taacagtgacgttaaaagactactg

SEQ ID NO: 4973323 - DNA, 25 bp, Homo sapien
taaaagactactgttgcctttctga

SEQ ID NO: 4973324 - DNA, 25 bp, Homo sapien
gagccatgtcaccaacttaaccacc

SEQ ID NO: 4973325 - DNA, 25 bp, Homo sapien
ccgccggtgtctaacaggatccgga

SEQ ID NO: 4973326 - DNA, 25 bp, Homo sapien
cggtgtctaacaggatccggaccta

SEQ ID NO: 4973327 - DNA, 25 bp, Homo sapien
gcgcccgccggtgtctaacaggatc

SEQ ID NO: 4973328 - DNA, 25 bp, Homo sapien
gtgtctaacaggatccggacctagc

SEQ ID NO: 4973329 - DNA, 25 bp, Homo sapien
ttcagttcccgaggagctgcttcca

SEQ ID NO: 4973330 - DNA, 25 bp, Homo sapien
tgtgcgaccgccctgtgttgggtcc

SEQ ID NO: 4973331 - DNA, 25 bp, Homo sapien
tttcctggagggtagaattgcgtcc

SEQ ID NO: 4973332 - DNA, 25 bp, Homo sapien
acgccgcgtcggcattgcttgttcc

SEQ ID NO: 4973333 - DNA, 25 bp, Homo sapien
tacattgagtcactggcataaccac

SEQ ID NO: 4973334 - DNA, 25 bp, Homo sapien
tctatatccttagtgtgacaaagcc

SEQ ID NO: 4973335 - DNA, 25 bp, Homo sapien
gaaagtatactcctcagggcaagag

SEQ ID NO: 4973336 - DNA, 25 bp, Homo sapien
gcatttaataatggtatactgttgg

SEQ ID NO: 4973337 - DNA, 25 bp, Homo sapien
taaataattgcaatcagctgggcat

SEQ ID NO: 4973338 - DNA, 25 bp, Homo sapien
tattcattttagatgtcgactcaac

SEQ ID NO: 4973339 - DNA, 25 bp, Homo sapien
tgtctttagggtacactgagtaaat

SEQ ID NO: 4973340 - DNA, 25 bp, Homo sapien
tagctggtcaaggaatacccagaaa

SEQ ID NO: 4973341 - DNA, 25 bp, Homo sapien
ccagatagctgcagggtcaagtaca

SEQ ID NO: 4973342 - DNA, 25 bp, Homo sapien
tgtaggctcgaaacaggcattcaag

SEQ ID NO: 4973343 - DNA, 25 bp, Homo sapien
caggcctttcaaatgtacgttcatg

SEQ ID NO: 4973344 - DNA, 25 bp, Homo sapien
ttgaggcgccatgcagggccaagtt

SEQ ID NO: 4973345 - DNA, 25 bp, Homo sapien
tggacaagtggcaggtccggcactg

SEQ ID NO: 4973346 - DNA, 25 bp, Homo sapien
ctggacaagtggcaggtccggcact

SEQ ID NO: 4973347 - DNA, 25 bp, Homo sapien
tccatcaagacaggtatcaacaact

SEQ ID NO: 4973348 - DNA, 25 bp, Homo sapien
tcaagacaggtatcaacaactgcac

SEQ ID NO: 4973349 - DNA, 25 bp, Homo sapien
tgcacctcgggactgcccagcatga

SEQ ID NO: 4973350 - DNA, 25 bp, Homo sapien
caaagaactccatcaagacaggtat

SEQ ID NO: 4973351 - DNA, 25 bp, Homo sapien
cactggtcttgcactgagggtagaa

SEQ ID NO: 4973352 - DNA, 25 bp, Homo sapien
tcaacatggaataggaagctccgag

SEQ ID NO: 4973353 - DNA, 25 bp, Homo sapien
tttcgtatctaaagcctgagaggcg

SEQ ID NO: 4973354 - DNA, 25 bp, Homo sapien
cagagggaccagacatccatgaggc

SEQ ID NO: 4973355 - DNA, 25 bp, Homo sapien
agggactagcaatgggcttgttaca

SEQ ID NO: 4973356 - DNA, 25 bp, Homo sapien
gcttgttacacatggggcagacaca

SEQ ID NO: 4973357 - DNA, 25 bp, Homo sapien
ggcagacacagcgaacttccagcca

SEQ ID NO: 4973358 - DNA, 25 bp, Homo sapien
cagctcatccaatagaatcccaatg

SEQ ID NO: 4973359 - DNA, 25 bp, Homo sapien
ttccccttgaagtcttccagacaga

SEQ ID NO: 4973360 - DNA, 25 bp, Homo sapien
ccccttgaagtcttccagacagact

SEQ ID NO: 4973361 - DNA, 25 bp, Homo sapien
acgggagcacgcctaactcatcctt

SEQ ID NO: 4973362 - DNA, 25 bp, Homo sapien
tgaaaggcgtgttggcacgggagca

SEQ ID NO: 4973363 - DNA, 25 bp, Homo sapien
ggggccctcctgcacactttcctgg

SEQ ID NO: 4973364 - DNA, 25 bp, Homo sapien
tggggccctcctgcacactttcctg

SEQ ID NO: 4973365 - DNA, 25 bp, Homo sapien
cccatataattgtaacttcttggca

SEQ ID NO: 4973366 - DNA, 25 bp, Homo sapien
taattgtaacttcttggcatcacct

SEQ ID NO: 4973367 - DNA, 25 bp, Homo sapien
ttcttggcatcacctttaagcacca

SEQ ID NO: 4973368 - DNA, 25 bp, Homo sapien
gtaacttcttggcatcacctttaag

SEQ ID NO: 4973369 - DNA, 25 bp, Homo sapien
atatccgtatcgctcactctgtgcc

SEQ ID NO: 4973370 - DNA, 25 bp, Homo sapien
tccttatatccgtatcgctcactct

SEQ ID NO: 4973371 - DNA, 25 bp, Homo sapien
tatccgtatcgctcactctgtgcct

SEQ ID NO: 4973372 - DNA, 25 bp, Homo sapien
ttatatccgtatcgctcactctgtg

SEQ ID NO: 4973373 - DNA, 25 bp, Homo sapien
tatttgcctaaacatcacagagcta

SEQ ID NO: 4973374 - DNA, 25 bp, Homo sapien
tacaactctgaatggcttgctgtgc

SEQ ID NO: 4973375 - DNA, 25 bp, Homo sapien
cttgctgtgcaaatggccgagacca

SEQ ID NO: 4973376 - DNA, 25 bp, Homo sapien
catataatgtggtctgttcccctaa

SEQ ID NO: 4973377 - DNA, 25 bp, Homo sapien
ggacaattcacacggcatggtggca

SEQ ID NO: 4973378 - DNA, 25 bp, Homo sapien
caggacaattcacacggcatggtgg

SEQ ID NO: 4973379 - DNA, 25 bp, Homo sapien
aggacaattcacacggcatggtggc

SEQ ID NO: 4973380 - DNA, 25 bp, Homo sapien
acaattcacacggcatggtggcatg

SEQ ID NO: 4973381 - DNA, 25 bp, Homo sapien
ctgagactgtgaaactccagggtca

SEQ ID NO: 4973382 - DNA, 25 bp, Homo sapien
cctctgagactgtgaaactccaggg

SEQ ID NO: 4973383 - DNA, 25 bp, Homo sapien
tctgagactgtgaaactccagggtc

SEQ ID NO: 4973384 - DNA, 25 bp, Homo sapien
ctctgagactgtgaaactccagggt

SEQ ID NO: 4973385 - DNA, 25 bp, Homo sapien
gatgaccatatagatgttgagcgga

SEQ ID NO: 4973386 - DNA, 25 bp, Homo sapien
tgagcggaaggtcctggaaactgat

SEQ ID NO: 4973387 - DNA, 25 bp, Homo sapien
tgcctgtgccgaagatgaccatata

SEQ ID NO: 4973388 - DNA, 25 bp, Homo sapien
tagcagcagaagataaggctgagca

SEQ ID NO: 4973389 - DNA, 25 bp, Homo sapien
agcaggacttgttggtgctaaccag

SEQ ID NO: 4973390 - DNA, 25 bp, Homo sapien
gttggtgctaaccagtcccaggcca

SEQ ID NO: 4973391 - DNA, 25 bp, Homo sapien
ttgttggtgctaaccagtcccaggc

SEQ ID NO: 4973392 - DNA, 25 bp, Homo sapien
gacttgttggtgctaaccagtccca

SEQ ID NO: 4973393 - DNA, 25 bp, Homo sapien
cgttacaccactggaatgggtgcat

SEQ ID NO: 4973394 - DNA, 25 bp, Homo sapien
tgacgaggctggtgttcagcccaac

SEQ ID NO: 4973395 - DNA, 25 bp, Homo sapien
aacaaacaaagtcccgcggagcaca

SEQ ID NO: 4973396 - DNA, 25 bp, Homo sapien
aatgaagtcgcggttggcttcctcg

SEQ ID NO: 4973397 - DNA, 25 bp, Homo sapien
tcagcccaacaaagagggacgagga

SEQ ID NO: 4973398 - DNA, 25 bp, Homo sapien
catgtcaaccaaatttagatctctc

SEQ ID NO: 4973399 - DNA, 25 bp, Homo sapien
gctccacatgagtcaggaagactag

SEQ ID NO: 4973400 - DNA, 25 bp, Homo sapien
ctccacatgagtcaggaagactagt

SEQ ID NO: 4973401 - DNA, 25 bp, Homo sapien
ttcccaggaattccgcatagtcctg

SEQ ID NO: 4973402 - DNA, 25 bp, Homo sapien
tccgcatagtcctgctacgttttgc

SEQ ID NO: 4973403 - DNA, 25 bp, Homo sapien
ggaattccgcatagtcctgctacgt

SEQ ID NO: 4973404 - DNA, 25 bp, Homo sapien
agtcctgctacgttttgctttctgg

SEQ ID NO: 4973405 - DNA, 25 bp, Homo sapien
gaactactacgcatgacctgtagct

SEQ ID NO: 4973406 - DNA, 25 bp, Homo sapien
caggtgtgaactactacgcatgacc

SEQ ID NO: 4973407 - DNA, 25 bp, Homo sapien
cctgtagcttagtcttttaatgcag

SEQ ID NO: 4973408 - DNA, 25 bp, Homo sapien
tacgcatgacctgtagcttagtctt

SEQ ID NO: 4973409 - DNA, 25 bp, Homo sapien
ctctttaggcaaccttgatagccct

SEQ ID NO: 4973410 - DNA, 25 bp, Homo sapien
gtagacatttaactggcatagcgca

SEQ ID NO: 4973411 - DNA, 25 bp, Homo sapien
taggcaaccttgatagccctcagct

SEQ ID NO: 4973412 - DNA, 25 bp, Homo sapien
tgggacacaagtatgggccactgca

SEQ ID NO: 4973413 - DNA, 25 bp, Homo sapien
tttatcctcgagacgcttggatcca

SEQ ID NO: 4973414 - DNA, 25 bp, Homo sapien
ctttatttatcctcgagacgcttgg

SEQ ID NO: 4973415 - DNA, 25 bp, Homo sapien
tatttatcctcgagacgcttggatc

SEQ ID NO: 4973416 - DNA, 25 bp, Homo sapien
tttatttatcctcgagacgcttgga

SEQ ID NO: 4973417 - DNA, 25 bp, Homo sapien
tgacaatttcaagactgccagccat

SEQ ID NO: 4973418 - DNA, 25 bp, Homo sapien
ggccagatcccagcggtgttcgaat

SEQ ID NO: 4973419 - DNA, 25 bp, Homo sapien
gcacctctgtatgtttttggcccaa

SEQ ID NO: 4973420 - DNA, 25 bp, Homo sapien
gcattcatgcttgccgtatccctga

SEQ ID NO: 4973421 - DNA, 25 bp, Homo sapien
cacagcacaatgcaccaggatcttc

SEQ ID NO: 4973422 - DNA, 25 bp, Homo sapien
taggccagtaccagggtggcggatc

SEQ ID NO: 4973423 - DNA, 25 bp, Homo sapien
gtggcggatcggctcacgcccacag

SEQ ID NO: 4973424 - DNA, 25 bp, Homo sapien
gatgatgcctcggtggtctttgact

SEQ ID NO: 4973425 - DNA, 25 bp, Homo sapien
cagccgtctggaagtggatgctcat

SEQ ID NO: 4973426 - DNA, 25 bp, Homo sapien
tcagcgcccggtggatgaagtcggc

SEQ ID NO: 4973427 - DNA, 25 bp, Homo sapien
cccggtggatgaagtcggcagccgt

SEQ ID NO: 4973428 - DNA, 25 bp, Homo sapien
atgaagtcggcagccgtctggaagt

SEQ ID NO: 4973429 - DNA, 25 bp, Homo sapien
cctcgccaccggctgtgtgaggcat

SEQ ID NO: 4973430 - DNA, 25 bp, Homo sapien
ggcctcaacacccaggtagcggatg

SEQ ID NO: 4973431 - DNA, 25 bp, Homo sapien
gaagctcccggcggttgttagccat

SEQ ID NO: 4973432 - DNA, 25 bp, Homo sapien
cattgaggacgtgcgtgatgcccag

SEQ ID NO: 4973433 - DNA, 25 bp, Homo sapien
cctggtatgtagcactggcatgtaa

SEQ ID NO: 4973434 - DNA, 25 bp, Homo sapien
aatctctgtaggcactgccgctttg

SEQ ID NO: 4973435 - DNA, 25 bp, Homo sapien
tttcccagagacattgcacaataga

SEQ ID NO: 4973436 - DNA, 25 bp, Homo sapien
gaaatccttgtataactttgaggga

SEQ ID NO: 4973437 - DNA, 25 bp, Homo sapien
cgtgggcccagtctgcccgatacat

SEQ ID NO: 4973438 - DNA, 25 bp, Homo sapien
gtgggcccagtctgcccgatacata

SEQ ID NO: 4973439 - DNA, 25 bp, Homo sapien
tgggcccagtctgcccgatacatac

SEQ ID NO: 4973440 - DNA, 25 bp, Homo sapien
gagccgctccaactcgaagacattg

SEQ ID NO: 4973441 - DNA, 25 bp, Homo sapien
cttgcctgtgtagaggagccgctcc

SEQ ID NO: 4973442 - DNA, 25 bp, Homo sapien
cctcgagttcgaacaggagaccttg

SEQ ID NO: 4973443 - DNA, 25 bp, Homo sapien
gaacggttggcatctcctccagggt

SEQ ID NO: 4973444 - DNA, 25 bp, Homo sapien
tgatgatgggttcagttgccaggta

SEQ ID NO: 4973445 - DNA, 25 bp, Homo sapien
atgatgggttcagttgccaggtagc

SEQ ID NO: 4973446 - DNA, 25 bp, Homo sapien
gatgggttcagttgccaggtagctg

SEQ ID NO: 4973447 - DNA, 25 bp, Homo sapien
gtgatgatgggttcagttgccaggt

SEQ ID NO: 4973448 - DNA, 25 bp, Homo sapien
gacacacttgagtgagtccagagca

SEQ ID NO: 4973449 - DNA, 25 bp, Homo sapien
gggctggtccttcgggagaagattc

SEQ ID NO: 4973450 - DNA, 25 bp, Homo sapien
ccttcgggagaagattctcgaggga

SEQ ID NO: 4973451 - DNA, 25 bp, Homo sapien
ggtgtgagacacacttgagtgagtc

SEQ ID NO: 4973452 - DNA, 25 bp, Homo sapien
gaaggaccagcgtttgaggcttgcc

SEQ ID NO: 4973453 - DNA, 25 bp, Homo sapien
aggaccagcgtttgaggcttgccct

SEQ ID NO: 4973454 - DNA, 25 bp, Homo sapien
aaggaccagcgtttgaggcttgccc

SEQ ID NO: 4973455 - DNA, 25 bp, Homo sapien
ggaccagcgtttgaggcttgccctg

SEQ ID NO: 4973456 - DNA, 25 bp, Homo sapien
tctttgcaagcgctgcgctgggcct

SEQ ID NO: 4973457 - DNA, 25 bp, Homo sapien
ctcagtccgaaaggcggatcgccgg

SEQ ID NO: 4973458 - DNA, 25 bp, Homo sapien
atcgccggcgcagacagcgccacgg

SEQ ID NO: 4973459 - DNA, 25 bp, Homo sapien
cgccacggccatgacgctcctgctg

SEQ ID NO: 4973460 - DNA, 25 bp, Homo sapien
tgcccaagacaggttgacagattag

SEQ ID NO: 4973461 - DNA, 25 bp, Homo sapien
caagacaggttgacagattagcagc

SEQ ID NO: 4973462 - DNA, 25 bp, Homo sapien
acagattagcagctatttttaagcc

SEQ ID NO: 4973463 - DNA, 25 bp, Homo sapien
caggttgacagattagcagctattt

SEQ ID NO: 4973464 - DNA, 25 bp, Homo sapien
attcggtggcccgagtcgccaggca

SEQ ID NO: 4973465 - DNA, 25 bp, Homo sapien
agggactcggtctcacattcggtgg

SEQ ID NO: 4973466 - DNA, 25 bp, Homo sapien
cgtcgaagcagggttcaaatcagcg

SEQ ID NO: 4973467 - DNA, 25 bp, Homo sapien
cagcgtgtgcgctggtgacataaag

SEQ ID NO: 4973468 - DNA, 25 bp, Homo sapien
tgataaatgttagcagatgatgctg

SEQ ID NO: 4973469 - DNA, 25 bp, Homo sapien
cttattgtgtgagagggaagtgggg

SEQ ID NO: 4973470 - DNA, 25 bp, Homo sapien
ggctggcttgaactctcgctgtcta

SEQ ID NO: 4973471 - DNA, 25 bp, Homo sapien
atgatgctgttgagaactaggctgg

SEQ ID NO: 4973472 - DNA, 25 bp, Homo sapien
gcatgaatcattctcaagcgactct

SEQ ID NO: 4973473 - DNA, 25 bp, Homo sapien
cctcctaagtagaggatagcgcttc

SEQ ID NO: 4973474 - DNA, 25 bp, Homo sapien
ctccccgtggcaggatctgcgaggt

SEQ ID NO: 4973475 - DNA, 25 bp, Homo sapien
tctgcgaggtgcgatgcgtacagaa

SEQ ID NO: 4973476 - DNA, 25 bp, Homo sapien
ttgtgtcagttctttcaggtaccaa

SEQ ID NO: 4973477 - DNA, 25 bp, Homo sapien
cctccacgtccttgcgtgtgctttg

SEQ ID NO: 4973478 - DNA, 25 bp, Homo sapien
tctttcaggtaccaagcgggtggtg

SEQ ID NO: 4973479 - DNA, 25 bp, Homo sapien
ccttgcgtgtgctttgtgtcagttc

SEQ ID NO: 4973480 - DNA, 25 bp, Homo sapien
actgtgttagtcagcatggtctcaa

SEQ ID NO: 4973481 - DNA, 25 bp, Homo sapien
ctgtgttagtcagcatggtctcaat

SEQ ID NO: 4973482 - DNA, 25 bp, Homo sapien
cactgtgttagtcagcatggtctca

SEQ ID NO: 4973483 - DNA, 25 bp, Homo sapien
tcaaaccacccctctccttcaccat

SEQ ID NO: 4973484 - DNA, 25 bp, Homo sapien
tccagtctttcaaaccacccctctc

SEQ ID NO: 4973485 - DNA, 25 bp, Homo sapien
tctttcaaaccacccctctccttca

SEQ ID NO: 4973486 - DNA, 25 bp, Homo sapien
cagtctttcaaaccacccctctcct

SEQ ID NO: 4973487 - DNA, 25 bp, Homo sapien
ttccagttcagcagcggtaattcct

SEQ ID NO: 4973488 - DNA, 25 bp, Homo sapien
ggtaattcctgagagcaaaaaggca

SEQ ID NO: 4973489 - DNA, 25 bp, Homo sapien
aatctctacttccagttcagcagcg

SEQ ID NO: 4973490 - DNA, 25 bp, Homo sapien
cagcagcggtaattcctgagagcaa

SEQ ID NO: 4973491 - DNA, 25 bp, Homo sapien
caaagttggtatcctgagtctgaac

SEQ ID NO: 4973492 - DNA, 25 bp, Homo sapien
gttggtatcctgagtctgaacacac

SEQ ID NO: 4973493 - DNA, 25 bp, Homo sapien
tccaaagttggtatcctgagtctga

SEQ ID NO: 4973494 - DNA, 25 bp, Homo sapien
gttccaaagttggtatcctgagtct

SEQ ID NO: 4973495 - DNA, 25 bp, Homo sapien
cacaggcagcacaaagccttgtaac

SEQ ID NO: 4973496 - DNA, 25 bp, Homo sapien
tcagataatacgcacacagttctct

SEQ ID NO: 4973497 - DNA, 25 bp, Homo sapien
tcaggtttggatctgcataatcttc

SEQ ID NO: 4973498 - DNA, 25 bp, Homo sapien
acttggcagtcaggtttggatctgc

SEQ ID NO: 4973499 - DNA, 25 bp, Homo sapien
atctctaagatgtagcaggatttcc

SEQ ID NO: 4973500 - DNA, 25 bp, Homo sapien
gaaacatctctaagatgtagcagga

SEQ ID NO: 4973501 - DNA, 25 bp, Homo sapien
taatgaaacatctctaagatgtagc

SEQ ID NO: 4973502 - DNA, 25 bp, Homo sapien
ctgctaatgaaacatctctaagatg

SEQ ID NO: 4973503 - DNA, 25 bp, Homo sapien
gcgttgccagctgggtaggtctcca

SEQ ID NO: 4973504 - DNA, 25 bp, Homo sapien
tgagctcagagctgagtggagcccc

SEQ ID NO: 4973505 - DNA, 25 bp, Homo sapien
ggtctccagctggtgaaacagcact

SEQ ID NO: 4973506 - DNA, 25 bp, Homo sapien
aacagcactgaaaaagtcctgcatc

SEQ ID NO: 4973507 - DNA, 25 bp, Homo sapien
atgctttaagatcaaggattcccat

SEQ ID NO: 4973508 - DNA, 25 bp, Homo sapien
aatgctttaagatcaaggattccca

SEQ ID NO: 4973509 - DNA, 25 bp, Homo sapien
taaatgctttaagatcaaggattcc

SEQ ID NO: 4973510 - DNA, 25 bp, Homo sapien
aaatgctttaagatcaaggattccc

SEQ ID NO: 4973511 - DNA, 25 bp, Homo sapien
gccagtaaatatagatcaacaccat

SEQ ID NO: 4973512 - DNA, 25 bp, Homo sapien
tcatagatatcattgtgccagtaaa

SEQ ID NO: 4973513 - DNA, 25 bp, Homo sapien
taagcaattcttataaatggacact

SEQ ID NO: 4973514 - DNA, 25 bp, Homo sapien
ccattattttagttgactgagtaat

SEQ ID NO: 4973515 - DNA, 25 bp, Homo sapien
gtctacaatctgcacgctgccttca

SEQ ID NO: 4973516 - DNA, 25 bp, Homo sapien
gaccgcctgctgtctacaatctgca

SEQ ID NO: 4973517 - DNA, 25 bp, Homo sapien
ctatgaccgcctgctgtctacaatc

SEQ ID NO: 4973518 - DNA, 25 bp, Homo sapien
tgctgtctacaatctgcacgctgcc

SEQ ID NO: 4973519 - DNA, 25 bp, Homo sapien
ctgtgcctacacagggggcctgcca

SEQ ID NO: 4973520 - DNA, 25 bp, Homo sapien
caggtttttgtctagacgtccgaga

SEQ ID NO: 4973521 - DNA, 25 bp, Homo sapien
tggtgaaggctgtgcctacacaggg

SEQ ID NO: 4973522 - DNA, 25 bp, Homo sapien
tttggcttcttacccaacccagcca

SEQ ID NO: 4973523 - DNA, 25 bp, Homo sapien
ctgggggagtgcaagttaagccctt

SEQ ID NO: 4973524 - DNA, 25 bp, Homo sapien
tgatgccttgttttagcatcaggct

SEQ ID NO: 4973525 - DNA, 25 bp, Homo sapien
tagcatcaggctactgggggagtgc

SEQ ID NO: 4973526 - DNA, 25 bp, Homo sapien
ctgcatgaagtgtggtctgatgcct

SEQ ID NO: 4973527 - DNA, 25 bp, Homo sapien
gtctagctgattgatgacttgtggc

SEQ ID NO: 4973528 - DNA, 25 bp, Homo sapien
gaggcctgtctagctgattgatgac

SEQ ID NO: 4973529 - DNA, 25 bp, Homo sapien
gcctgtctagctgattgatgacttg

SEQ ID NO: 4973530 - DNA, 25 bp, Homo sapien
ggcacagaggcctgtctagctgatt

SEQ ID NO: 4973531 - DNA, 25 bp, Homo sapien
gccagcatccactttgttgcgtgta

SEQ ID NO: 4973532 - DNA, 25 bp, Homo sapien
tacaggatgcaagcagagccagcat

SEQ ID NO: 4973533 - DNA, 25 bp, Homo sapien
gaagcaccatttggcattctccgga

SEQ ID NO: 4973534 - DNA, 25 bp, Homo sapien
tgttgtgtatatgttgaggctgtag

SEQ ID NO: 4973535 - DNA, 25 bp, Homo sapien
aggcaggccagcaactcttccagct

SEQ ID NO: 4973536 - DNA, 25 bp, Homo sapien
ggtcggcatatgtcaccctgtgggc

SEQ ID NO: 4973537 - DNA, 25 bp, Homo sapien
cagctggtggcacatctgttactgc

SEQ ID NO: 4973538 - DNA, 25 bp, Homo sapien
acttagggcttgagtgttcaggtcg

SEQ ID NO: 4973539 - DNA, 25 bp, Homo sapien
caagagatcctttgaaatgcagata

SEQ ID NO: 4973540 - DNA, 25 bp, Homo sapien
aatgcagataacaatctcagcatgc

SEQ ID NO: 4973541 - DNA, 25 bp, Homo sapien
ccaagagatcctttgaaatgcagat

SEQ ID NO: 4973542 - DNA, 25 bp, Homo sapien
tcagcatgcttattagctggcacca

SEQ ID NO: 4973543 - DNA, 25 bp, Homo sapien
tctagctgtgttgagaccatcgggc

SEQ ID NO: 4973544 - DNA, 25 bp, Homo sapien
ggctttgacccatagcatgctgtgg

SEQ ID NO: 4973545 - DNA, 25 bp, Homo sapien
gaaaccactgcttctactcgatagg

SEQ ID NO: 4973546 - DNA, 25 bp, Homo sapien
cataatgccaccacatggagaggtc

SEQ ID NO: 4973547 - DNA, 25 bp, Homo sapien
caattaataccatgttgtaataagg

SEQ ID NO: 4973548 - DNA, 25 bp, Homo sapien
gtttgactgagggatatttactccc

SEQ ID NO: 4973549 - DNA, 25 bp, Homo sapien
cacagctgttaagcagtaggagcag

SEQ ID NO: 4973550 - DNA, 25 bp, Homo sapien
gcagaaaatcagctcggatacaatt

SEQ ID NO: 4973551 - DNA, 25 bp, Homo sapien
tggttatgatgatgccaaggagggt

SEQ ID NO: 4973552 - DNA, 25 bp, Homo sapien
gttatgatgatgccaaggagggtaa

SEQ ID NO: 4973553 - DNA, 25 bp, Homo sapien
ctggttatgatgatgccaaggaggg

SEQ ID NO: 4973554 - DNA, 25 bp, Homo sapien
ggttatgatgatgccaaggagggta

SEQ ID NO: 4973555 - DNA, 25 bp, Homo sapien
tcatgtatgtcatcacggcaccaca

SEQ ID NO: 4973556 - DNA, 25 bp, Homo sapien
tgtgctgtcctgctgcgggaactgt

SEQ ID NO: 4973557 - DNA, 25 bp, Homo sapien
tctggctctcaggatcatgtatgtc

SEQ ID NO: 4973558 - DNA, 25 bp, Homo sapien
tacgggggtgtcttcagggcaacca

SEQ ID NO: 4973559 - DNA, 25 bp, Homo sapien
cctgggctaaagtgggatctatctc

SEQ ID NO: 4973560 - DNA, 25 bp, Homo sapien
ttctagagcttgtcattgggctgca

SEQ ID NO: 4973561 - DNA, 25 bp, Homo sapien
tcgatgctagtcaaggagtgtgcct

SEQ ID NO: 4973562 - DNA, 25 bp, Homo sapien
gatctatctcttgttcatagcccag

SEQ ID NO: 4973563 - DNA, 25 bp, Homo sapien
aatgtgactcattacagcctgatgc

SEQ ID NO: 4973564 - DNA, 25 bp, Homo sapien
tgaacacactcctacgaacaattgg

SEQ ID NO: 4973565 - DNA, 25 bp, Homo sapien
gctgctccctgaaccataatctctg

SEQ ID NO: 4973566 - DNA, 25 bp, Homo sapien
tctgacagacacatgcggtaatggc

SEQ ID NO: 4973567 - DNA, 25 bp, Homo sapien
ttatgcagtggttgattaaacacac

SEQ ID NO: 4973568 - DNA, 25 bp, Homo sapien
agctttactgactcctgcatgctgg

SEQ ID NO: 4973569 - DNA, 25 bp, Homo sapien
gtggttgattaaacacacatctgga

SEQ ID NO: 4973570 - DNA, 25 bp, Homo sapien
tcgattgcagggagctttatgcagt

SEQ ID NO: 4973571 - DNA, 25 bp, Homo sapien
gggttgacaggcttgggccaaatat

SEQ ID NO: 4973572 - DNA, 25 bp, Homo sapien
ctttctggcagttcagaaaactggt

SEQ ID NO: 4973573 - DNA, 25 bp, Homo sapien
caaatatgagaattaaattctgaca

SEQ ID NO: 4973574 - DNA, 25 bp, Homo sapien
ctggtttcccctgggttgacaggct

SEQ ID NO: 4973575 - DNA, 25 bp, Homo sapien
ttctcaattccattaacccaccata

SEQ ID NO: 4973576 - DNA, 25 bp, Homo sapien
ccattaacccaccatatggcccctg

SEQ ID NO: 4973577 - DNA, 25 bp, Homo sapien
caattccattaacccaccatatggc

SEQ ID NO: 4973578 - DNA, 25 bp, Homo sapien
tcaattccattaacccaccatatgg

SEQ ID NO: 4973579 - DNA, 25 bp, Homo sapien
gtttatctttgccaccacaactgtg

SEQ ID NO: 4973580 - DNA, 25 bp, Homo sapien
agctcagcactgatgggctgtttat

SEQ ID NO: 4973581 - DNA, 25 bp, Homo sapien
tatctttgccaccacaactgtggca

SEQ ID NO: 4973582 - DNA, 25 bp, Homo sapien
tgccaccacaactgtggcagcggca

SEQ ID NO: 4973583 - DNA, 25 bp, Homo sapien
cttggctgccaaagcattttagctt

SEQ ID NO: 4973584 - DNA, 25 bp, Homo sapien
gctgccaaagcattttagcttctga

SEQ ID NO: 4973585 - DNA, 25 bp, Homo sapien
tcttggctgccaaagcattttagct

SEQ ID NO: 4973586 - DNA, 25 bp, Homo sapien
tggctgccaaagcattttagcttct

SEQ ID NO: 4973587 - DNA, 25 bp, Homo sapien
ctgcagaaagagactgctgagaggt

SEQ ID NO: 4973588 - DNA, 25 bp, Homo sapien
tggccccagactgtccatagcagct

SEQ ID NO: 4973589 - DNA, 25 bp, Homo sapien
tttgcctgagggctgtttgcaattt

SEQ ID NO: 4973590 - DNA, 25 bp, Homo sapien
gatgcttttccagtacagctgcaga

SEQ ID NO: 4973591 - DNA, 25 bp, Homo sapien
tcagggcaaacacatgaggaatagc

SEQ ID NO: 4973592 - DNA, 25 bp, Homo sapien
ggcaaacacatgaggaatagctttg

SEQ ID NO: 4973593 - DNA, 25 bp, Homo sapien
cagggcaaacacatgaggaatagct

SEQ ID NO: 4973594 - DNA, 25 bp, Homo sapien
gggcaaacacatgaggaatagcttt

SEQ ID NO: 4973595 - DNA, 25 bp, Homo sapien
cagtggctcaacagctttccaggcg

SEQ ID NO: 4973596 - DNA, 25 bp, Homo sapien
gctgattgaagggttttgtgcagtg

SEQ ID NO: 4973597 - DNA, 25 bp, Homo sapien
ttgtgcagtggctcaacagctttcc

SEQ ID NO: 4973598 - DNA, 25 bp, Homo sapien
gtgctgattgaagggttttgtgcag

SEQ ID NO: 4973599 - DNA, 25 bp, Homo sapien
atctgggcattttgtgaagtttaac

SEQ ID NO: 4973600 - DNA, 25 bp, Homo sapien
tctgggcattttgtgaagtttaacc

SEQ ID NO: 4973601 - DNA, 25 bp, Homo sapien
tgggcattttgtgaagtttaaccac

SEQ ID NO: 4973602 - DNA, 25 bp, Homo sapien
ttatctgggcattttgtgaagttta

SEQ ID NO: 4973603 - DNA, 25 bp, Homo sapien
acagggacaggattgtggctgcaat

SEQ ID NO: 4973604 - DNA, 25 bp, Homo sapien
ctctgacagggacaggattgtggct

SEQ ID NO: 4973605 - DNA, 25 bp, Homo sapien
attcctctgacagggacaggattgt

SEQ ID NO: 4973606 - DNA, 25 bp, Homo sapien
gggacaggattgtggctgcaatggg

SEQ ID NO: 4973607 - DNA, 25 bp, Homo sapien
ctttagtatcggcttctccgctttt

SEQ ID NO: 4973608 - DNA, 25 bp, Homo sapien
tctttagtatcggcttctccgcttt

SEQ ID NO: 4973609 - DNA, 25 bp, Homo sapien
ccttcttcacctgctgagtcatctt

SEQ ID NO: 4973610 - DNA, 25 bp, Homo sapien
tcttccaaagtctggatatgtcgct

SEQ ID NO: 4973611 - DNA, 25 bp, Homo sapien
tatgtcgctcttgggatatgtccag

SEQ ID NO: 4973612 - DNA, 25 bp, Homo sapien
cgtaaaagctgagtacaaggctgca

SEQ ID NO: 4973613 - DNA, 25 bp, Homo sapien
cgaacttcatatcaggcacaatcat

SEQ ID NO: 4973614 - DNA, 25 bp, Homo sapien
cttcatatcaggcacaatcattgta

SEQ ID NO: 4973615 - DNA, 25 bp, Homo sapien
aaagagcacgaacttcatatcaggc

SEQ ID NO: 4973616 - DNA, 25 bp, Homo sapien
ggcacaatcattgtatcccagcact

SEQ ID NO: 4973617 - DNA, 25 bp, Homo sapien
agcttttttaatgttaccagaagct

SEQ ID NO: 4973618 - DNA, 25 bp, Homo sapien
tttaatgttaccagaagcttctgtc

SEQ ID NO: 4973619 - DNA, 25 bp, Homo sapien
taatgttaccagaagcttctgtcat

SEQ ID NO: 4973620 - DNA, 25 bp, Homo sapien
tttttaatgttaccagaagcttctg

SEQ ID NO: 4973621 - DNA, 25 bp, Homo sapien
tttaacaccatctggttgcagtttt

SEQ ID NO: 4973622 - DNA, 25 bp, Homo sapien
cagggacaactgagaaagcaaggtt

SEQ ID NO: 4973623 - DNA, 25 bp, Homo sapien
aaagcaaggttattgtactcagttc

SEQ ID NO: 4973624 - DNA, 25 bp, Homo sapien
gttcagtgaatgatgtccttttcca

SEQ ID NO: 4973625 - DNA, 25 bp, Homo sapien
ttactcagcatctacgcccagggac

SEQ ID NO: 4973626 - DNA, 25 bp, Homo sapien
ttcttgtattcccatttccaataat

SEQ ID NO: 4973627 - DNA, 25 bp, Homo sapien
gatttcttgtattcccatttccaat

SEQ ID NO: 4973628 - DNA, 25 bp, Homo sapien
ttgggatttcttgtattcccatttc

SEQ ID NO: 4973629 - DNA, 25 bp, Homo sapien
gggatttcttgtattcccatttcca

SEQ ID NO: 4973630 - DNA, 25 bp, Homo sapien
cctgtggatgacataagccttcccc

SEQ ID NO: 4973631 - DNA, 25 bp, Homo sapien
ttatgattcctgatcacagttgcct

SEQ ID NO: 4973632 - DNA, 25 bp, Homo sapien
tgcctgtggatgacataagccttcc

SEQ ID NO: 4973633 - DNA, 25 bp, Homo sapien
atgattcctgatcacagttgcctgt

SEQ ID NO: 4973634 - DNA, 25 bp, Homo sapien
gggctaaatgcttactagcattttt

SEQ ID NO: 4973635 - DNA, 25 bp, Homo sapien
cctgggctaaatgcttactagcatt

SEQ ID NO: 4973636 - DNA, 25 bp, Homo sapien
tgcagcacttgggcttgctttcaga

SEQ ID NO: 4973637 - DNA, 25 bp, Homo sapien
ctgcagcacttgggcttgctttcag

SEQ ID NO: 4973638 - DNA, 25 bp, Homo sapien
tcacaaatcagtttgcccttttgct

SEQ ID NO: 4973639 - DNA, 25 bp, Homo sapien
tgctttgcagatgtggagaactttc

SEQ ID NO: 4973640 - DNA, 25 bp, Homo sapien
tcatcaaacaagacataaatggggc

SEQ ID NO: 4973641 - DNA, 25 bp, Homo sapien
gcagatgtggagaactttcatcaaa

SEQ ID NO: 4973642 - DNA, 25 bp, Homo sapien
tggagactatgggaaatgtttgctc

SEQ ID NO: 4973643 - DNA, 25 bp, Homo sapien
ttgcagctgaaactcaacttgtatt

SEQ ID NO: 4973644 - DNA, 25 bp, Homo sapien
cttgtatttgcaacatgccgaaatg

SEQ ID NO: 4973645 - DNA, 25 bp, Homo sapien
ccatgggagacctgtgcttattgca

SEQ ID NO: 4973646 - DNA, 25 bp, Homo sapien
cattgtagcgttttgctcaaagcgg

SEQ ID NO: 4973647 - DNA, 25 bp, Homo sapien
ccactcgtaaatgttgccaaggtaa

SEQ ID NO: 4973648 - DNA, 25 bp, Homo sapien
ccaagaagcatggaacattggaaca

SEQ ID NO: 4973649 - DNA, 25 bp, Homo sapien
aaagcaatgttctttgatgccaaga

SEQ ID NO: 4973650 - DNA, 25 bp, Homo sapien
ggcattttgtcgtagcatactatta

SEQ ID NO: 4973651 - DNA, 25 bp, Homo sapien
tcagagtatcctagggacggcattt

SEQ ID NO: 4973652 - DNA, 25 bp, Homo sapien
gggacggcattttgtcgtagcatac

SEQ ID NO: 4973653 - DNA, 25 bp, Homo sapien
gtatcctagggacggcattttgtcg

SEQ ID NO: 4973654 - DNA, 25 bp, Homo sapien
gctcgtcatctgtctgaattgtggc

SEQ ID NO: 4973655 - DNA, 25 bp, Homo sapien
tgtttgcttcagataggctcgtcat

SEQ ID NO: 4973656 - DNA, 25 bp, Homo sapien
ctcatagcatggtgatttctggcca

SEQ ID NO: 4973657 - DNA, 25 bp, Homo sapien
gaattgtggctatgtattcccctca

SEQ ID NO: 4973658 - DNA, 25 bp, Homo sapien
tgcacatgggtcaaatcagtcattt

SEQ ID NO: 4973659 - DNA, 25 bp, Homo sapien
tccgtttggatctctccatgatcaa

SEQ ID NO: 4973660 - DNA, 25 bp, Homo sapien
tgtgatgtgcacatgggtcaaatca

SEQ ID NO: 4973661 - DNA, 25 bp, Homo sapien
cagccagctccgtgatccgtttgga

SEQ ID NO: 4973662 - DNA, 25 bp, Homo sapien
ccggacactcagacccaagcaagga

SEQ ID NO: 4973663 - DNA, 25 bp, Homo sapien
cctaaatcctttacaccattgggca

SEQ ID NO: 4973664 - DNA, 25 bp, Homo sapien
ccattgggcatttttgagtttgaca

SEQ ID NO: 4973665 - DNA, 25 bp, Homo sapien
cactcaatcctcctctttccctaaa

SEQ ID NO: 4973666 - DNA, 25 bp, Homo sapien
gagtttgacaaattgcactgtctgc

SEQ ID NO: 4973667 - DNA, 25 bp, Homo sapien
aagatgtgagaggtgttgaataatc

SEQ ID NO: 4973668 - DNA, 25 bp, Homo sapien
taagatgtgagaggtgttgaataat

SEQ ID NO: 4973669 - DNA, 25 bp, Homo sapien
gatgtgagaggtgttgaataatctt

SEQ ID NO: 4973670 - DNA, 25 bp, Homo sapien
tcttattggcggctgtgtaagagta

SEQ ID NO: 4973671 - DNA, 25 bp, Homo sapien
catttgttcttattggcggctgtgt

SEQ ID NO: 4973672 - DNA, 25 bp, Homo sapien
tattggcggctgtgtaagagtatcc

SEQ ID NO: 4973673 - DNA, 25 bp, Homo sapien
gatgatgcatttgttcttattggcg

SEQ ID NO: 4973674 - DNA, 25 bp, Homo sapien
ggcactgggaacacttcataataaa

SEQ ID NO: 4973675 - DNA, 25 bp, Homo sapien
aatcttgtgctttcctcccttttca

SEQ ID NO: 4973676 - DNA, 25 bp, Homo sapien
aagaccatggagatttggcccaatc

SEQ ID NO: 4973677 - DNA, 25 bp, Homo sapien
gtggcactgggaacacttcataata

SEQ ID NO: 4973678 - DNA, 25 bp, Homo sapien
gtccaacatgggtcatactggacta

SEQ ID NO: 4973679 - DNA, 25 bp, Homo sapien
aagaagcaacaactggttaagactt

SEQ ID NO: 4973680 - DNA, 25 bp, Homo sapien
tttccagtgtctagatgccaccaca

SEQ ID NO: 4973681 - DNA, 25 bp, Homo sapien
tctggatgctttagtggagaattca

SEQ ID NO: 4973682 - DNA, 25 bp, Homo sapien
tctgagatctccatcatgattaaca

SEQ ID NO: 4973683 - DNA, 25 bp, Homo sapien
gatctccatcatgattaacaaatcg

SEQ ID NO: 4973684 - DNA, 25 bp, Homo sapien
tcatgattaacaaatcgcatgcatt

SEQ ID NO: 4973685 - DNA, 25 bp, Homo sapien
agcatctgagatctccatcatgatt

SEQ ID NO: 4973686 - DNA, 25 bp, Homo sapien
tctccagtatcgttgagtattatgt

SEQ ID NO: 4973687 - DNA, 25 bp, Homo sapien
cttattttcctctggctgagtacca

SEQ ID NO: 4973688 - DNA, 25 bp, Homo sapien
tctggctgagtaccagtgtcttgaa

SEQ ID NO: 4973689 - DNA, 25 bp, Homo sapien
cctctcatctccagtatcgttgagt

SEQ ID NO: 4973690 - DNA, 25 bp, Homo sapien
tcactgattggcaagtggttcttta

SEQ ID NO: 4973691 - DNA, 25 bp, Homo sapien
tgaccacaggtgtaaagaaccctgt

SEQ ID NO: 4973692 - DNA, 25 bp, Homo sapien
caggtgtaaagaaccctgtagccat

SEQ ID NO: 4973693 - DNA, 25 bp, Homo sapien
ttctcatcatgtagatggtgaccac

SEQ ID NO: 4973694 - DNA, 25 bp, Homo sapien
ctcatcatgtagatggtgaccacag

SEQ ID NO: 4973695 - DNA, 25 bp, Homo sapien
acacatccttcttcatatggcagca

SEQ ID NO: 4973696 - DNA, 25 bp, Homo sapien
tggcagatggggaagcaaacacatc

SEQ ID NO: 4973697 - DNA, 25 bp, Homo sapien
catggcagatggggaagcaaacaca

SEQ ID NO: 4973698 - DNA, 25 bp, Homo sapien
atccttcttcatatggcagcagcaa

SEQ ID NO: 4973699 - DNA, 25 bp, Homo sapien
gaaggaaggcagtttcttgtgttct

SEQ ID NO: 4973700 - DNA, 25 bp, Homo sapien
cctgaaggaaggcagtttcttgtgt

SEQ ID NO: 4973701 - DNA, 25 bp, Homo sapien
aaggaaggcagtttcttgtgttcta

SEQ ID NO: 4973702 - DNA, 25 bp, Homo sapien
tgaaggaaggcagtttcttgtgttc

SEQ ID NO: 4973703 - DNA, 25 bp, Homo sapien
ggctgatgcggttgtctcctttagg

SEQ ID NO: 4973704 - DNA, 25 bp, Homo sapien
caggctaccagacatgctgtccatt

SEQ ID NO: 4973705 - DNA, 25 bp, Homo sapien
gcggttgtctcctttaggaatgaca

SEQ ID NO: 4973706 - DNA, 25 bp, Homo sapien
tcctatctttgtcatgtggctgatg

SEQ ID NO: 4973707 - DNA, 25 bp, Homo sapien
atttctcttgattgagcctctgcaa

SEQ ID NO: 4973708 - DNA, 25 bp, Homo sapien
cttgattgagcctctgcaaattatt

SEQ ID NO: 4973709 - DNA, 25 bp, Homo sapien
tctgcaaattatttcacgaaacaat

SEQ ID NO: 4973710 - DNA, 25 bp, Homo sapien
tatttcacgaaacaattcttcattt

SEQ ID NO: 4973711 - DNA, 25 bp, Homo sapien
ctgagggattctttgaccttttatt

SEQ ID NO: 4973712 - DNA, 25 bp, Homo sapien
gtcagtttatcctgctgccatagga

SEQ ID NO: 4973713 - DNA, 25 bp, Homo sapien
cttgtaaccattttgctcgcaagac

SEQ ID NO: 4973714 - DNA, 25 bp, Homo sapien
gggggattccaatgatgtcagttta

SEQ ID NO: 4973715 - DNA, 25 bp, Homo sapien
gctcgcaagactaagaaggtgtagg

SEQ ID NO: 4973716 - DNA, 25 bp, Homo sapien
cattttttgattatgacgatctgac

SEQ ID NO: 4973717 - DNA, 25 bp, Homo sapien
acattttttgattatgacgatctga

SEQ ID NO: 4973718 - DNA, 25 bp, Homo sapien
ttaacattttttgattatgacgatc

SEQ ID NO: 4973719 - DNA, 25 bp, Homo sapien
aacattttttgattatgacgatctg

SEQ ID NO: 4973720 - DNA, 25 bp, Homo sapien
gggatctcgacacaagctgctgagt

SEQ ID NO: 4973721 - DNA, 25 bp, Homo sapien
tgtgccgagcagcactagagctccc

SEQ ID NO: 4973722 - DNA, 25 bp, Homo sapien
tcacctcgcaaagtggctttgagca

SEQ ID NO: 4973723 - DNA, 25 bp, Homo sapien
gacggtgttggctcccgtcacctcg

SEQ ID NO: 4973724 - DNA, 25 bp, Homo sapien
tgactgccagaaagaggtgaggctt

SEQ ID NO: 4973725 - DNA, 25 bp, Homo sapien
ctctggttctgcagcccacccatca

SEQ ID NO: 4973726 - DNA, 25 bp, Homo sapien
tggttctgcagcccacccatcagga

SEQ ID NO: 4973727 - DNA, 25 bp, Homo sapien
tctggttctgcagcccacccatcag

SEQ ID NO: 4973728 - DNA, 25 bp, Homo sapien
gttctgcagcccacccatcaggaag

SEQ ID NO: 4973729 - DNA, 25 bp, Homo sapien
taaagagcatttgattcttgggccc

SEQ ID NO: 4973730 - DNA, 25 bp, Homo sapien
tccatcttattgcagttttgccctg

SEQ ID NO: 4973731 - DNA, 25 bp, Homo sapien
caaataatctctccatgtggcactt

SEQ ID NO: 4973732 - DNA, 25 bp, Homo sapien
gaaaaaactatgtgcaggcattgaa

SEQ ID NO: 4973733 - DNA, 25 bp, Homo sapien
gcctaacactttgttctgctgcccc

SEQ ID NO: 4973734 - DNA, 25 bp, Homo sapien
ctgagcccttctggccttaatccct

SEQ ID NO: 4973735 - DNA, 25 bp, Homo sapien
acctcagatctgcctaacactttgt

SEQ ID NO: 4973736 - DNA, 25 bp, Homo sapien
tctggccttaatccctggttctgcc

SEQ ID NO: 4973737 - DNA, 25 bp, Homo sapien
cagcaggtttcttacagcaccatca

SEQ ID NO: 4973738 - DNA, 25 bp, Homo sapien
accctcatatacaggaatgcagatt

SEQ ID NO: 4973739 - DNA, 25 bp, Homo sapien
ccctcatatacaggaatgcagattc

SEQ ID NO: 4973740 - DNA, 25 bp, Homo sapien
tggggaggtgttgaggaatcgggag

SEQ ID NO: 4973741 - DNA, 25 bp, Homo sapien
gtggggaggtgttgaggaatcggga

SEQ ID NO: 4973742 - DNA, 25 bp, Homo sapien
gagcccagttatgattgctggcttc

SEQ ID NO: 4973743 - DNA, 25 bp, Homo sapien
ctccgggagcccagttatgattgct

SEQ ID NO: 4973744 - DNA, 25 bp, Homo sapien
cgggagcccagttatgattgctggc

SEQ ID NO: 4973745 - DNA, 25 bp, Homo sapien
cagttatgattgctggcttctcatc

SEQ ID NO: 4973746 - DNA, 25 bp, Homo sapien
cttgaatcagtttctacttcccttc

SEQ ID NO: 4973747 - DNA, 25 bp, Homo sapien
ctgcccttttgagtgaatcttgaat

SEQ ID NO: 4973748 - DNA, 25 bp, Homo sapien
cccttttgagtgaatcttgaatcag

SEQ ID NO: 4973749 - DNA, 25 bp, Homo sapien
gcctttcattgaattggatctgccc

SEQ ID NO: 4973750 - DNA, 25 bp, Homo sapien
gttctgcttttgtggtaatccaaat

SEQ ID NO: 4973751 - DNA, 25 bp, Homo sapien
aacagatgggcagatctgcagtggc

SEQ ID NO: 4973752 - DNA, 25 bp, Homo sapien
tgcctgctcaaatgccctgcatcat

SEQ ID NO: 4973753 - DNA, 25 bp, Homo sapien
ccaaattaaaacagatgggcagatc

SEQ ID NO: 4973754 - DNA, 25 bp, Homo sapien
gcaaaatggctcctagggtatccca

SEQ ID NO: 4973755 - DNA, 25 bp, Homo sapien
gaatcagcaaaatggctcctagggt

SEQ ID NO: 4973756 - DNA, 25 bp, Homo sapien
ccttacagattgcagaatcagcaaa

SEQ ID NO: 4973757 - DNA, 25 bp, Homo sapien
tcttgatagtactagctgttttatt

SEQ ID NO: 4973758 - DNA, 25 bp, Homo sapien
cagtctgaatgatgggaacaggtgc

SEQ ID NO: 4973759 - DNA, 25 bp, Homo sapien
ttaaggtttgttaggtgagccatgc

SEQ ID NO: 4973760 - DNA, 25 bp, Homo sapien
ggtgctattttggacctgctcgagc

SEQ ID NO: 4973761 - DNA, 25 bp, Homo sapien
tgtcctaggactctcggctctggct

SEQ ID NO: 4973762 - DNA, 25 bp, Homo sapien
cagaaaggtggctggtaacaggttt

SEQ ID NO: 4973763 - DNA, 25 bp, Homo sapien
tggtaacaggtttattagacaagcc

SEQ ID NO: 4973764 - DNA, 25 bp, Homo sapien
tccctttattcaagagcttagaact

SEQ ID NO: 4973765 - DNA, 25 bp, Homo sapien
ttgcatgcaactgccatttcaacac

SEQ ID NO: 4973766 - DNA, 25 bp, Homo sapien
tgtggacaggcactaatgcttttta

SEQ ID NO: 4973767 - DNA, 25 bp, Homo sapien
tggaagcctcatgggagaagtgaaa

SEQ ID NO: 4973768 - DNA, 25 bp, Homo sapien
ccagtgtccctttaggcagtgtgga

SEQ ID NO: 4973769 - DNA, 25 bp, Homo sapien
tgtggtttcctaggttggaagcctc

SEQ ID NO: 4973770 - DNA, 25 bp, Homo sapien
gcagaagagtcgcagagtgcctgaa

SEQ ID NO: 4973771 - DNA, 25 bp, Homo sapien
ctgaattgccagctcaggctttggg

SEQ ID NO: 4973772 - DNA, 25 bp, Homo sapien
cagcggcaggtctaatgtgatcaga

SEQ ID NO: 4973773 - DNA, 25 bp, Homo sapien
tgatcagacatatttagtttgggca

SEQ ID NO: 4973774 - DNA, 25 bp, Homo sapien
cttggggcacggtttccttgaatgt

SEQ ID NO: 4973775 - DNA, 25 bp, Homo sapien
ttgcttggggcacggtttccttgaa

SEQ ID NO: 4973776 - DNA, 25 bp, Homo sapien
tgcttggggcacggtttccttgaat

SEQ ID NO: 4973777 - DNA, 25 bp, Homo sapien
gcttggggcacggtttccttgaatg

SEQ ID NO: 4973778 - DNA, 25 bp, Homo sapien
gattataagccactctaggacagag

SEQ ID NO: 4973779 - DNA, 25 bp, Homo sapien
catgagggtaggtatggacagacac

SEQ ID NO: 4973780 - DNA, 25 bp, Homo sapien
ttagaagtcagggtgggtaccacca

SEQ ID NO: 4973781 - DNA, 25 bp, Homo sapien
ttatcaagggccaagaagtgagaca

SEQ ID NO: 4973782 - DNA, 25 bp, Homo sapien
gagggagccacccatgcatgcattt

SEQ ID NO: 4973783 - DNA, 25 bp, Homo sapien
caggcaggagagttcggaagtgtca

SEQ ID NO: 4973784 - DNA, 25 bp, Homo sapien
gcagttttggatgagtggccaggga

SEQ ID NO: 4973785 - DNA, 25 bp, Homo sapien
tataatagatgcaatatgtgctaag

SEQ ID NO: 4973786 - DNA, 25 bp, Homo sapien
tgtagctgatcttcgccagcaagac

SEQ ID NO: 4973787 - DNA, 25 bp, Homo sapien
ttcgccagcaagacctttctccagg

SEQ ID NO: 4973788 - DNA, 25 bp, Homo sapien
ccattttgtagctgatcttcgccag

SEQ ID NO: 4973789 - DNA, 25 bp, Homo sapien
tttgtagctgatcttcgccagcaag

SEQ ID NO: 4973790 - DNA, 25 bp, Homo sapien
tcagggagtacggacaggtttatta

SEQ ID NO: 4973791 - DNA, 25 bp, Homo sapien
gtaagcataatacccagtagttact

SEQ ID NO: 4973792 - DNA, 25 bp, Homo sapien
cccaagtagtaagcataatacccag

SEQ ID NO: 4973793 - DNA, 25 bp, Homo sapien
tgcctctagtagtctcccatgtctg

SEQ ID NO: 4973794 - DNA, 25 bp, Homo sapien
tttggttccacatgaggcctgagag

SEQ ID NO: 4973795 - DNA, 25 bp, Homo sapien
actgccagctcctttacatcctttt

SEQ ID NO: 4973796 - DNA, 25 bp, Homo sapien
gagacatgcattgggtgagtaaaag

SEQ ID NO: 4973797 - DNA, 25 bp, Homo sapien
tgtctttaactatccaggccacaga

SEQ ID NO: 4973798 - DNA, 25 bp, Homo sapien
tcatttctgtcctacaacaaatctc

SEQ ID NO: 4973799 - DNA, 25 bp, Homo sapien
catttctgtcctacaacaaatctca

SEQ ID NO: 4973800 - DNA, 25 bp, Homo sapien
atttctgtcctacaacaaatctcac

SEQ ID NO: 4973801 - DNA, 25 bp, Homo sapien
caagccatgtgcgtgctctttcaaa

SEQ ID NO: 4973802 - DNA, 25 bp, Homo sapien
ccctgctatgtcaattgatttcaag

SEQ ID NO: 4973803 - DNA, 25 bp, Homo sapien
gatgctattaatgttttccctgcta

SEQ ID NO: 4973804 - DNA, 25 bp, Homo sapien
tctttcaaatggtacgtaagccaga

SEQ ID NO: 4973805 - DNA, 25 bp, Homo sapien
tctggctgtcttgcagccgctaggg

SEQ ID NO: 4973806 - DNA, 25 bp, Homo sapien
gtcttgcagccgctaggggtgtcat

SEQ ID NO: 4973807 - DNA, 25 bp, Homo sapien
gaaaccatctggctgtcttgcagcc

SEQ ID NO: 4973808 - DNA, 25 bp, Homo sapien
catctggctgtcttgcagccgctag

SEQ ID NO: 4973809 - DNA, 25 bp, Homo sapien
tatagtctatgttgctatggaaagg

SEQ ID NO: 4973810 - DNA, 25 bp, Homo sapien
taccagttctgaaggggttgctatt

SEQ ID NO: 4973811 - DNA, 25 bp, Homo sapien
gagagaattagtggattaaacaaga

SEQ ID NO: 4973812 - DNA, 25 bp, Homo sapien
aagagagagaattagtggattaaac

SEQ ID NO: 4973813 - DNA, 25 bp, Homo sapien
tcctgaaactatagcctggtgttcc

SEQ ID NO: 4973814 - DNA, 25 bp, Homo sapien
tggcttcctgaaactatagcctggt

SEQ ID NO: 4973815 - DNA, 25 bp, Homo sapien
gcttcctgaaactatagcctggtgt

SEQ ID NO: 4973816 - DNA, 25 bp, Homo sapien
tgaaactatagcctggtgttccatc

SEQ ID NO: 4973817 - DNA, 25 bp, Homo sapien
cagagttctggtctgtttacctcca

SEQ ID NO: 4973818 - DNA, 25 bp, Homo sapien
agagttctggtctgtttacctccag

SEQ ID NO: 4973819 - DNA, 25 bp, Homo sapien
tggtctgtttacctccagacacttt

SEQ ID NO: 4973820 - DNA, 25 bp, Homo sapien
ctgtttacctccagacacttttatg

SEQ ID NO: 4973821 - DNA, 25 bp, Homo sapien
atggtggacggcaaaggagacacag

SEQ ID NO: 4973822 - DNA, 25 bp, Homo sapien
tcatggtggacggcaaaggagacac

SEQ ID NO: 4973823 - DNA, 25 bp, Homo sapien
catggtggacggcaaaggagacaca

SEQ ID NO: 4973824 - DNA, 25 bp, Homo sapien
ttgtttctgtggatcaggagtctga

SEQ ID NO: 4973825 - DNA, 25 bp, Homo sapien
tgtttctgtggatcaggagtctgag

SEQ ID NO: 4973826 - DNA, 25 bp, Homo sapien
cattgtttctgtggatcaggagtct

SEQ ID NO: 4973827 - DNA, 25 bp, Homo sapien
ctcattgtttctgtggatcaggagt

SEQ ID NO: 4973828 - DNA, 25 bp, Homo sapien
cagacttcaccaaagatgtccaaat

SEQ ID NO: 4973829 - DNA, 25 bp, Homo sapien
agagagtcctcttgcctgcgcttct

SEQ ID NO: 4973830 - DNA, 25 bp, Homo sapien
agtgacagccaaagatgggttagaa

SEQ ID NO: 4973831 - DNA, 25 bp, Homo sapien
tagtagaagtgacagccaaagatgg

SEQ ID NO: 4973832 - DNA, 25 bp, Homo sapien
gtccaccagagtcctcttcatcaag

SEQ ID NO: 4973833 - DNA, 25 bp, Homo sapien
agagacgtccaccagagtcctcttc

SEQ ID NO: 4973834 - DNA, 25 bp, Homo sapien
caccagagtcctcttcatcaagcat

SEQ ID NO: 4973835 - DNA, 25 bp, Homo sapien
gagacgtccaccagagtcctcttca

SEQ ID NO: 4973836 - DNA, 25 bp, Homo sapien
ctttagcaagcaaccagtctaactc

SEQ ID NO: 4973837 - DNA, 25 bp, Homo sapien
tctttagcaagcaaccagtctaact

SEQ ID NO: 4973838 - DNA, 25 bp, Homo sapien
ttccatgtgctaatttggtacccca

SEQ ID NO: 4973839 - DNA, 25 bp, Homo sapien
tcagcagtaaacaggccattaacaa

SEQ ID NO: 4973840 - DNA, 25 bp, Homo sapien
gctaatttggtaccccattagagac

SEQ ID NO: 4973841 - DNA, 25 bp, Homo sapien
atgagcaagacacgtttgctttttc

SEQ ID NO: 4973842 - DNA, 25 bp, Homo sapien
tctgagcatcagggaagttatgaag

SEQ ID NO: 4973843 - DNA, 25 bp, Homo sapien
ccattaacagctttgatgctctgag

SEQ ID NO: 4973844 - DNA, 25 bp, Homo sapien
cctccattaacagctttgatgctct

SEQ ID NO: 4973845 - DNA, 25 bp, Homo sapien
aagaaaaagagcaggccttgcacac

SEQ ID NO: 4973846 - DNA, 25 bp, Homo sapien
ctgcatattccactttgtcttccat

SEQ ID NO: 4973847 - DNA, 25 bp, Homo sapien
tggattttagtctctgcacccagaa

SEQ ID NO: 4973848 - DNA, 25 bp, Homo sapien
catgaatgtgtcaggtatagctctc

SEQ ID NO: 4973849 - DNA, 25 bp, Homo sapien
gcttctcttagttcccagggtcatg

SEQ ID NO: 4973850 - DNA, 25 bp, Homo sapien
gcacccagaacttcctcagtacagg

SEQ ID NO: 4973851 - DNA, 25 bp, Homo sapien
ttccatccaatggtcactaacagca

SEQ ID NO: 4973852 - DNA, 25 bp, Homo sapien
ggtggtgcctgtctggtacaaagct

SEQ ID NO: 4973853 - DNA, 25 bp, Homo sapien
tccatccaatggtcactaacagcaa

SEQ ID NO: 4973854 - DNA, 25 bp, Homo sapien
ccatccaatggtcactaacagcaaa

SEQ ID NO: 4973855 - DNA, 25 bp, Homo sapien
tcttgtatcataatataaaaggtag

SEQ ID NO: 4973856 - DNA, 25 bp, Homo sapien
cataatataaaaggtagtcacactg

SEQ ID NO: 4973857 - DNA, 25 bp, Homo sapien
tgctcaataacatatgtcttgggat

SEQ ID NO: 4973858 - DNA, 25 bp, Homo sapien
tgcagtcatacatctcactaaacca

SEQ ID NO: 4973859 - DNA, 25 bp, Homo sapien
tggagcttgtccgtggtcctcttga

SEQ ID NO: 4973860 - DNA, 25 bp, Homo sapien
gtccgtggtcctcttgatacataag

SEQ ID NO: 4973861 - DNA, 25 bp, Homo sapien
gcttgtccgtggtcctcttgataca

SEQ ID NO: 4973862 - DNA, 25 bp, Homo sapien
gagcttgtccgtggtcctcttgata

SEQ ID NO: 4973863 - DNA, 25 bp, Homo sapien
caatgacaccaggaatttgacagcc

SEQ ID NO: 4973864 - DNA, 25 bp, Homo sapien
aacagccacagccagaggtaacacc

SEQ ID NO: 4973865 - DNA, 25 bp, Homo sapien
agccacagccagaggtaacaccttc

SEQ ID NO: 4973866 - DNA, 25 bp, Homo sapien
ttgagcaatgacaccaggaatttga

SEQ ID NO: 4973867 - DNA, 25 bp, Homo sapien
aacttgtggcgtttgtgatggttcc

SEQ ID NO: 4973868 - DNA, 25 bp, Homo sapien
tcctgcagtgtgtagcgagagactt

SEQ ID NO: 4973869 - DNA, 25 bp, Homo sapien
cagtgcctcgatatccatgtgggga

SEQ ID NO: 4973870 - DNA, 25 bp, Homo sapien
tgtgtagcgagagactttgctactc

SEQ ID NO: 4973871 - DNA, 25 bp, Homo sapien
gatcgtcttagcaaagatttgggcc

SEQ ID NO: 4973872 - DNA, 25 bp, Homo sapien
caaattgaggattcagctgatgacg

SEQ ID NO: 4973873 - DNA, 25 bp, Homo sapien
ttcttgaacaaaggcctcagcaacg

SEQ ID NO: 4973874 - DNA, 25 bp, Homo sapien
gagtccagacctcagccaaaatgct

SEQ ID NO: 4973875 - DNA, 25 bp, Homo sapien
tcttaatcagggtccattctttcat

SEQ ID NO: 4973876 - DNA, 25 bp, Homo sapien
ccgatcttaatcagggtccattctt

SEQ ID NO: 4973877 - DNA, 25 bp, Homo sapien
tcagaaccgatcttaatcagggtcc

SEQ ID NO: 4973878 - DNA, 25 bp, Homo sapien
tctcagttcagaaccgatcttaatc

SEQ ID NO: 4973879 - DNA, 25 bp, Homo sapien
gagcctagttgcaaacgttttgact

SEQ ID NO: 4973880 - DNA, 25 bp, Homo sapien
cctgcccttggctttttgcatctag

SEQ ID NO: 4973881 - DNA, 25 bp, Homo sapien
gcatctaggagactttctacccact

SEQ ID NO: 4973882 - DNA, 25 bp, Homo sapien
gcttgtctggcttgtagtacattct

SEQ ID NO: 4973883 - DNA, 25 bp, Homo sapien
caactgtggacatcgtagagcctgg

SEQ ID NO: 4973884 - DNA, 25 bp, Homo sapien
tcagctcaacaactgtggacatcgt

SEQ ID NO: 4973885 - DNA, 25 bp, Homo sapien
tggacatcgtagagcctgggacact

SEQ ID NO: 4973886 - DNA, 25 bp, Homo sapien
ctctccacataagtcagctcaacaa

SEQ ID NO: 4973887 - DNA, 25 bp, Homo sapien
tgcagcatccatattccaaggaagt

SEQ ID NO: 4973888 - DNA, 25 bp, Homo sapien
ccagacaggaactattgatggtcag

SEQ ID NO: 4973889 - DNA, 25 bp, Homo sapien
ccatatgtatcctggtaggtgaccc

SEQ ID NO: 4973890 - DNA, 25 bp, Homo sapien
caaagctttgtagcatgagggctct

SEQ ID NO: 4973891 - DNA, 25 bp, Homo sapien
aatggatatatgcagccaagatgag

SEQ ID NO: 4973892 - DNA, 25 bp, Homo sapien
tatctggagacactatggcaatgtt

SEQ ID NO: 4973893 - DNA, 25 bp, Homo sapien
gttataatactcaaacagaagagtg

SEQ ID NO: 4973894 - DNA, 25 bp, Homo sapien
gctgctgctctatgtgatgactcaa

SEQ ID NO: 4973895 - DNA, 25 bp, Homo sapien
tgagtgtctgcagacttagggcaga

SEQ ID NO: 4973896 - DNA, 25 bp, Homo sapien
tactccggcgaatctgctatcatga

SEQ ID NO: 4973897 - DNA, 25 bp, Homo sapien
gggcagacactggtcttataagttg

SEQ ID NO: 4973898 - DNA, 25 bp, Homo sapien
tcgagggttcacattagatttaggg

SEQ ID NO: 4973899 - DNA, 25 bp, Homo sapien
acaagcctacgtataactgaaaact

SEQ ID NO: 4973900 - DNA, 25 bp, Homo sapien
gagaaaacaagcctacgtataactg

SEQ ID NO: 4973901 - DNA, 25 bp, Homo sapien
gaaaacaagcctacgtataactgaa

SEQ ID NO: 4973902 - DNA, 25 bp, Homo sapien
gcctacgtataactgaaaactcttc

SEQ ID NO: 4973903 - DNA, 25 bp, Homo sapien
gagttttgccggcactaattgccat

SEQ ID NO: 4973904 - DNA, 25 bp, Homo sapien
gggccacagccatgcaattatcaaa

SEQ ID NO: 4973905 - DNA, 25 bp, Homo sapien
caatggctgatagatgggccacagc

SEQ ID NO: 4973906 - DNA, 25 bp, Homo sapien
ggaacagcagtgattataagcttca

SEQ ID NO: 4973907 - DNA, 25 bp, Homo sapien
tatgggccagtagtaacttgcacag

SEQ ID NO: 4973908 - DNA, 25 bp, Homo sapien
tcaggaagcctaacaatggagagtt

SEQ ID NO: 4973909 - DNA, 25 bp, Homo sapien
tggagagtttcagctcagagtcttg

SEQ ID NO: 4973910 - DNA, 25 bp, Homo sapien
ttataagtccttcacctatgggcca

SEQ ID NO: 4973911 - DNA, 25 bp, Homo sapien
gcttttggacctcgtgttcggatcc

SEQ ID NO: 4973912 - DNA, 25 bp, Homo sapien
accttcagcttttggacctcgtgtt

SEQ ID NO: 4973913 - DNA, 25 bp, Homo sapien
ttcagcttttggacctcgtgttcgg

SEQ ID NO: 4973914 - DNA, 25 bp, Homo sapien
cagcttttggacctcgtgttcggat

SEQ ID NO: 4973915 - DNA, 25 bp, Homo sapien
cacgtcacggtcaactacagaggca

SEQ ID NO: 4973916 - DNA, 25 bp, Homo sapien
tattccaaggctccgcaggaactcc

SEQ ID NO: 4973917 - DNA, 25 bp, Homo sapien
tatggagttgaaaccgtgagcatca

SEQ ID NO: 4973918 - DNA, 25 bp, Homo sapien
tgatggaagatcagacacgtcacgg

SEQ ID NO: 4973919 - DNA, 25 bp, Homo sapien
gatgtcaaaaatcagtatctgcagg

SEQ ID NO: 4973920 - DNA, 25 bp, Homo sapien
ccttcatggcaaatagctggctgtt

SEQ ID NO: 4973921 - DNA, 25 bp, Homo sapien
gaaagtaaagagacgttgctgaacc

SEQ ID NO: 4973922 - DNA, 25 bp, Homo sapien
tgacacaccagaaatagcacaggcc

SEQ ID NO: 4973923 - DNA, 25 bp, Homo sapien
tatttgatcgtgctctccttcagag

SEQ ID NO: 4973924 - DNA, 25 bp, Homo sapien
gtctctgcggtatttgatcgtgctc

SEQ ID NO: 4973925 - DNA, 25 bp, Homo sapien
tctgcggtatttgatcgtgctctcc

SEQ ID NO: 4973926 - DNA, 25 bp, Homo sapien
ttgcatgcatagattttgtgcacat

SEQ ID NO: 4973927 - DNA, 25 bp, Homo sapien
gaagagctgccatgtagcttctggc

SEQ ID NO: 4973928 - DNA, 25 bp, Homo sapien
agcaactcgtaattttctccttcgt

SEQ ID NO: 4973929 - DNA, 25 bp, Homo sapien
tggtaaagaagagctgccatgtagc

SEQ ID NO: 4973930 - DNA, 25 bp, Homo sapien
ccaaagtcagggcacaccatcaagt

SEQ ID NO: 4973931 - DNA, 25 bp, Homo sapien
gggtaggatgtaagacactaagatc

SEQ ID NO: 4973932 - DNA, 25 bp, Homo sapien
ttcaggtaagttctattcccaagat

SEQ ID NO: 4973933 - DNA, 25 bp, Homo sapien
tattcccaagattgacagacatcac

SEQ ID NO: 4973934 - DNA, 25 bp, Homo sapien
catcttctgcagagtacaaggggta

SEQ ID NO: 4973935 - DNA, 25 bp, Homo sapien
gctcagaagcgagtgcaaaagattg

SEQ ID NO: 4973936 - DNA, 25 bp, Homo sapien
gcattcaaaatctacaagctcagaa

SEQ ID NO: 4973937 - DNA, 25 bp, Homo sapien
ccccaagtgtcatagggtagcattc

SEQ ID NO: 4973938 - DNA, 25 bp, Homo sapien
cattcgcagccctgagtttcttaca

SEQ ID NO: 4973939 - DNA, 25 bp, Homo sapien
ttcttctttgcataggctttccctt

SEQ ID NO: 4973940 - DNA, 25 bp, Homo sapien
aaataactgtgaccttccatgacac

SEQ ID NO: 4973941 - DNA, 25 bp, Homo sapien
tgaccttccatgacacaattcttct

SEQ ID NO: 4973942 - DNA, 25 bp, Homo sapien
cttctttgcataggctttcccttcc

SEQ ID NO: 4973943 - DNA, 25 bp, Homo sapien
tctgcctttatctaagcttctcttt

SEQ ID NO: 4973944 - DNA, 25 bp, Homo sapien
ctttccattatagtctgtttgtacc

SEQ ID NO: 4973945 - DNA, 25 bp, Homo sapien
tctatcctctttccattatagtctg

SEQ ID NO: 4973946 - DNA, 25 bp, Homo sapien
ccattatagtctgtttgtacctcct

SEQ ID NO: 4973947 - DNA, 25 bp, Homo sapien
tgaaagcggaaagcactcaagaaat

SEQ ID NO: 4973948 - DNA, 25 bp, Homo sapien
gatgaatttggtgatggtgaataaa

SEQ ID NO: 4973949 - DNA, 25 bp, Homo sapien
ttgcatcattggactgaataaggtg

SEQ ID NO: 4973950 - DNA, 25 bp, Homo sapien
ggagtgccctgaaagcggaaagcac

SEQ ID NO: 4973951 - DNA, 25 bp, Homo sapien
catgctagtcagagactgctgagac

SEQ ID NO: 4973952 - DNA, 25 bp, Homo sapien
caaaactggcagtgatgaaggctaa

SEQ ID NO: 4973953 - DNA, 25 bp, Homo sapien
cagagtctagcagagtgaaaggtct

SEQ ID NO: 4973954 - DNA, 25 bp, Homo sapien
tgcaacaccaatcaccggatgagct

SEQ ID NO: 4973955 - DNA, 25 bp, Homo sapien
ctctgagttagccatgaagcatgga

SEQ ID NO: 4973956 - DNA, 25 bp, Homo sapien
cccgctttgtcagaagctaaactct

SEQ ID NO: 4973957 - DNA, 25 bp, Homo sapien
cctgttgggttacatttgacaaaat

SEQ ID NO: 4973958 - DNA, 25 bp, Homo sapien
tacacttgacctcctctgattttgc

SEQ ID NO: 4973959 - DNA, 25 bp, Homo sapien
tctgagtataaaagattgggagacc

SEQ ID NO: 4973960 - DNA, 25 bp, Homo sapien
tcagaagccaacttggtggcaaaga

SEQ ID NO: 4973961 - DNA, 25 bp, Homo sapien
taaagtctgaagtatgatggcaatg

SEQ ID NO: 4973962 - DNA, 25 bp, Homo sapien
gcccctttgagtttgtggaggaatg

SEQ ID NO: 4973963 - DNA, 25 bp, Homo sapien
ctgccattttgcctttcacatcttg

SEQ ID NO: 4973964 - DNA, 25 bp, Homo sapien
ttttgcctttcacatcttgagtcat

SEQ ID NO: 4973965 - DNA, 25 bp, Homo sapien
gccattttgcctttcacatcttgag

SEQ ID NO: 4973966 - DNA, 25 bp, Homo sapien
cattttgcctttcacatcttgagtc

SEQ ID NO: 4973967 - DNA, 25 bp, Homo sapien
ggtgtgtatagtagcaacttagcca

SEQ ID NO: 4973968 - DNA, 25 bp, Homo sapien
caagtgtgcattctctaataagagc

SEQ ID NO: 4973969 - DNA, 25 bp, Homo sapien
caccaagacgcaaggatccaagaga

SEQ ID NO: 4973970 - DNA, 25 bp, Homo sapien
acttagccacaaacacaagtgtgca

SEQ ID NO: 4973971 - DNA, 25 bp, Homo sapien
tcattatcagtcatctcagaaaaat

SEQ ID NO: 4973972 - DNA, 25 bp, Homo sapien
tatcattatcagtcatctcagaaaa

SEQ ID NO: 4973973 - DNA, 25 bp, Homo sapien
aaaactgctgatctcttcttgatat

SEQ ID NO: 4973974 - DNA, 25 bp, Homo sapien
cattatcagtcatctcagaaaaatc

SEQ ID NO: 4973975 - DNA, 25 bp, Homo sapien
gacatggagatccaatttgtaagca

SEQ ID NO: 4973976 - DNA, 25 bp, Homo sapien
catccagttgaatgcagaggcattc

SEQ ID NO: 4973977 - DNA, 25 bp, Homo sapien
aatttgtaagcatccagttgaatgc

SEQ ID NO: 4973978 - DNA, 25 bp, Homo sapien
ctcatttaagagtgacatggagatc

SEQ ID NO: 4973979 - DNA, 25 bp, Homo sapien
gtgatatgcaatttgtacccaggaa

SEQ ID NO: 4973980 - DNA, 25 bp, Homo sapien
gtgagcttatacagaaataggtttg

SEQ ID NO: 4973981 - DNA, 25 bp, Homo sapien
ttttgggatacctgctatataacag

SEQ ID NO: 4973982 - DNA, 25 bp, Homo sapien
cccaggaattttggcccctgttatg

SEQ ID NO: 4973983 - DNA, 25 bp, Homo sapien
tcagcttcctttgttgctgctgcac

SEQ ID NO: 4973984 - DNA, 25 bp, Homo sapien
cactgcgtccttcgtgctgataggg

SEQ ID NO: 4973985 - DNA, 25 bp, Homo sapien
cttaagatctatttcactgcgtcct

SEQ ID NO: 4973986 - DNA, 25 bp, Homo sapien
ttcgtgctgatagggatggacacag

SEQ ID NO: 4973987 - DNA, 25 bp, Homo sapien
gatctatttcactgcgtccttcgtg

SEQ ID NO: 4973988 - DNA, 25 bp, Homo sapien
tcagatttctcagactctattctgc

SEQ ID NO: 4973989 - DNA, 25 bp, Homo sapien
aatagttggaaagtcatttaatagg

SEQ ID NO: 4973990 - DNA, 25 bp, Homo sapien
gatttctcagactctattctgctac

SEQ ID NO: 4973991 - DNA, 25 bp, Homo sapien
taatagttggaaagtcatttaatag

SEQ ID NO: 4973992 - DNA, 25 bp, Homo sapien
gcctggcctaaaactgaagttgatc

SEQ ID NO: 4973993 - DNA, 25 bp, Homo sapien
tcagttgtatctccgagagatttca

SEQ ID NO: 4973994 - DNA, 25 bp, Homo sapien
tcattcacaggatcaaattcctcct

SEQ ID NO: 4973995 - DNA, 25 bp, Homo sapien
gttgagtcttggattgtcagttgta

SEQ ID NO: 4973996 - DNA, 25 bp, Homo sapien
taaccctgatatttctgagcttcag

SEQ ID NO: 4973997 - DNA, 25 bp, Homo sapien
aaccctgatatttctgagcttcagg

SEQ ID NO: 4973998 - DNA, 25 bp, Homo sapien
ccctgatatttctgagcttcaggtc

SEQ ID NO: 4973999 - DNA, 25 bp, Homo sapien
ttaaccctgatatttctgagcttca

SEQ ID NO: 4974000 - DNA, 25 bp, Homo sapien
gcattaaagggcaaattcacatgtt

SEQ ID NO: 4974001 - DNA, 25 bp, Homo sapien
tcacatgttcacagaaagtgctttc

SEQ ID NO: 4974002 - DNA, 25 bp, Homo sapien
gaaagtgctttcatcactcaaaggg

SEQ ID NO: 4974003 - DNA, 25 bp, Homo sapien
aaagggcaaattcacatgttcacag

SEQ ID NO: 4974004 - DNA, 25 bp, Homo sapien
tgggttgaagggacttcctgttcac

SEQ ID NO: 4974005 - DNA, 25 bp, Homo sapien
agctttcagttaacatctggttgtg

SEQ ID NO: 4974006 - DNA, 25 bp, Homo sapien
tggctgggttgaagggacttcctgt

SEQ ID NO: 4974007 - DNA, 25 bp, Homo sapien
tcagttaacatctggttgtgaaaga

SEQ ID NO: 4974008 - DNA, 25 bp, Homo sapien
ttcagtttcattcaccccagcaggg

SEQ ID NO: 4974009 - DNA, 25 bp, Homo sapien
caggaggaacccactcaaagtgcag

SEQ ID NO: 4974010 - DNA, 25 bp, Homo sapien
agcatgagtgaatggttcagtttca

SEQ ID NO: 4974011 - DNA, 25 bp, Homo sapien
ctcctcggtcaaggtagcatgagtg

SEQ ID NO: 4974012 - DNA, 25 bp, Homo sapien
gatgtgatcattacgaggaataagg

SEQ ID NO: 4974013 - DNA, 25 bp, Homo sapien
gtgtgtggtgaagtcacaaattgcc

SEQ ID NO: 4974014 - DNA, 25 bp, Homo sapien
aaggatatctgccaagtgtgtggtg

SEQ ID NO: 4974015 - DNA, 25 bp, Homo sapien
cattacgaggaataaggatatctgc

SEQ ID NO: 4974016 - DNA, 25 bp, Homo sapien
gaaggtgatgtcactctgtttggag

SEQ ID NO: 4974017 - DNA, 25 bp, Homo sapien
aggtgatgtcactctgtttggagag

SEQ ID NO: 4974018 - DNA, 25 bp, Homo sapien
aaggtgatgtcactctgtttggaga

SEQ ID NO: 4974019 - DNA, 25 bp, Homo sapien
ctgaccaaagaacaaagtgctggtg

SEQ ID NO: 4974020 - DNA, 25 bp, Homo sapien
catcactttccttggcttccactcc

SEQ ID NO: 4974021 - DNA, 25 bp, Homo sapien
gctcttcaatttccatcactttcct

SEQ ID NO: 4974022 - DNA, 25 bp, Homo sapien
ttgctatgctcttcaatttccatca

SEQ ID NO: 4974023 - DNA, 25 bp, Homo sapien
tccatcactttccttggcttccact

SEQ ID NO: 4974024 - DNA, 25 bp, Homo sapien
tgtaaccagcttgcgcaagaggcag

SEQ ID NO: 4974025 - DNA, 25 bp, Homo sapien
gcatcttcctgacttacacaataga

SEQ ID NO: 4974026 - DNA, 25 bp, Homo sapien
gggacagcttatccctgcgaggttc

SEQ ID NO: 4974027 - DNA, 25 bp, Homo sapien
cagcagcagcaatgcttgtaaccag

SEQ ID NO: 4974028 - DNA, 25 bp, Homo sapien
tcaaagtcagctttgggttcagctg

SEQ ID NO: 4974029 - DNA, 25 bp, Homo sapien
gacagtaacagacccgacagcaggt

SEQ ID NO: 4974030 - DNA, 25 bp, Homo sapien
ccaacaaacttcaaagtcagctttg

SEQ ID NO: 4974031 - DNA, 25 bp, Homo sapien
gagtaaaattatagagtttagcaga

SEQ ID NO: 4974032 - DNA, 25 bp, Homo sapien
cagagttgacccaaacccaatccaa

SEQ ID NO: 4974033 - DNA, 25 bp, Homo sapien
tcagagttgacccaaacccaatcca

SEQ ID NO: 4974034 - DNA, 25 bp, Homo sapien
atggcagagcccagtgagcgctgca

SEQ ID NO: 4974035 - DNA, 25 bp, Homo sapien
cccagtgagcgctgcaatgccagat

SEQ ID NO: 4974036 - DNA, 25 bp, Homo sapien
gcaatgccagatacgtgccctctaa

SEQ ID NO: 4974037 - DNA, 25 bp, Homo sapien
gatacgtgccctctaataacatcca

SEQ ID NO: 4974038 - DNA, 25 bp, Homo sapien
cttcctttgccggaggcaattaaat

SEQ ID NO: 4974039 - DNA, 25 bp, Homo sapien
aggaggtctgcaggatgggaccctt

SEQ ID NO: 4974040 - DNA, 25 bp, Homo sapien
tgcaggatgggacccttgggatgcc

SEQ ID NO: 4974041 - DNA, 25 bp, Homo sapien
tgccggaggcaattaaatcgtatgt

SEQ ID NO: 4974042 - DNA, 25 bp, Homo sapien
tttggttcctctgtaaagccttcca

SEQ ID NO: 4974043 - DNA, 25 bp, Homo sapien
gccttgccacaatcagaggtgttaa

SEQ ID NO: 4974044 - DNA, 25 bp, Homo sapien
gctgagtgataaaagggatactgat

SEQ ID NO: 4974045 - DNA, 25 bp, Homo sapien
agaccgctgtcataggccttgccac

SEQ ID NO: 4974046 - DNA, 25 bp, Homo sapien
gctcaatacagtcgaatacagtggg

SEQ ID NO: 4974047 - DNA, 25 bp, Homo sapien
cccaggcatgatttagccagctcaa

SEQ ID NO: 4974048 - DNA, 25 bp, Homo sapien
gatggattcactagaggccgtgtcc

SEQ ID NO: 4974049 - DNA, 25 bp, Homo sapien
caagtaatgggaggtaagcagtgct

SEQ ID NO: 4974050 - DNA, 25 bp, Homo sapien
catagcctgtcagcataacattgtc

SEQ ID NO: 4974051 - DNA, 25 bp, Homo sapien
caatttgcctgataggattcaatgc

SEQ ID NO: 4974052 - DNA, 25 bp, Homo sapien
cctgataggattcaatgcatagcct

SEQ ID NO: 4974053 - DNA, 25 bp, Homo sapien
tgatatctggagacaagtttaagct

SEQ ID NO: 4974054 - DNA, 25 bp, Homo sapien
tgaggagtgaattgaatgcatctcc

SEQ ID NO: 4974055 - DNA, 25 bp, Homo sapien
aagctttaagggcagtgaatttaag

SEQ ID NO: 4974056 - DNA, 25 bp, Homo sapien
gcagtgaatttaaggccgtggacat

SEQ ID NO: 4974057 - DNA, 25 bp, Homo sapien
ctgttttcaccaaccaagctttgga

SEQ ID NO: 4974058 - DNA, 25 bp, Homo sapien
gatttcctcaatctcaccaccattg

SEQ ID NO: 4974059 - DNA, 25 bp, Homo sapien
tgtaaatcagatggaataaaccctt

SEQ ID NO: 4974060 - DNA, 25 bp, Homo sapien
aggctctgaaatgattgtcttgtct

SEQ ID NO: 4974061 - DNA, 25 bp, Homo sapien
taaagatacgagatttcacagagat

SEQ ID NO: 4974062 - DNA, 25 bp, Homo sapien
gaatcataattgtttgccaactttg

SEQ ID NO: 4974063 - DNA, 25 bp, Homo sapien
aataaacttgtctttgcataaccta

SEQ ID NO: 4974064 - DNA, 25 bp, Homo sapien
acacatggatctgttcatgtatcca

SEQ ID NO: 4974065 - DNA, 25 bp, Homo sapien
catgtatccatcactgagatgcaga

SEQ ID NO: 4974066 - DNA, 25 bp, Homo sapien
cagaaagccttgatatcatgtagtg

SEQ ID NO: 4974067 - DNA, 25 bp, Homo sapien
catgatacttggaggtctttaccac

SEQ ID NO: 4974068 - DNA, 25 bp, Homo sapien
tatagtattttggaacagacctcca

SEQ ID NO: 4974069 - DNA, 25 bp, Homo sapien
cctgttatgatccaagctgttccta

SEQ ID NO: 4974070 - DNA, 25 bp, Homo sapien
gaagacgcatcttactactgatgtt

SEQ ID NO: 4974071 - DNA, 25 bp, Homo sapien
cctgaagacgcatcttactactgat

SEQ ID NO: 4974072 - DNA, 25 bp, Homo sapien
ttcctgaagacgcatcttactactg

SEQ ID NO: 4974073 - DNA, 25 bp, Homo sapien
gacgcatcttactactgatgttttc

SEQ ID NO: 4974074 - DNA, 25 bp, Homo sapien
ggttctgcttaattaccaatttgga

SEQ ID NO: 4974075 - DNA, 25 bp, Homo sapien
tgcttaattaccaatttggacttag

SEQ ID NO: 4974076 - DNA, 25 bp, Homo sapien
ccaatttggacttaggttcaaagag

SEQ ID NO: 4974077 - DNA, 25 bp, Homo sapien
ctgggttctgcttaattaccaattt

SEQ ID NO: 4974078 - DNA, 25 bp, Homo sapien
caggcccttaatacattcatctcca

SEQ ID NO: 4974079 - DNA, 25 bp, Homo sapien
cacaggcccttaatacattcatctc

SEQ ID NO: 4974080 - DNA, 25 bp, Homo sapien
cgccacaggcccttaatacattcat

SEQ ID NO: 4974081 - DNA, 25 bp, Homo sapien
aagcccaggagagtccgccacaggc

SEQ ID NO: 4974082 - DNA, 25 bp, Homo sapien
ccctaaagcgtagtgagatgactga

SEQ ID NO: 4974083 - DNA, 25 bp, Homo sapien
gaaccaaatgtgctcagggaggcaa

SEQ ID NO: 4974084 - DNA, 25 bp, Homo sapien
tctttgatggccaacaatgatcctt

SEQ ID NO: 4974085 - DNA, 25 bp, Homo sapien
tgtgttaacgtctataggagaacca

SEQ ID NO: 4974086 - DNA, 25 bp, Homo sapien
gagaagcaaaagtagtctctctgct

SEQ ID NO: 4974087 - DNA, 25 bp, Homo sapien
gaagcaaaagtagtctctctgcttc

SEQ ID NO: 4974088 - DNA, 25 bp, Homo sapien
aaggagaagcaaaagtagtctctct

SEQ ID NO: 4974089 - DNA, 25 bp, Homo sapien
ttaaggagaagcaaaagtagtctct

SEQ ID NO: 4974090 - DNA, 25 bp, Homo sapien
ttctccactcactttgagtttgggc

SEQ ID NO: 4974091 - DNA, 25 bp, Homo sapien
gctgcgtggaataccaaaatgaccc

SEQ ID NO: 4974092 - DNA, 25 bp, Homo sapien
aaaatgacccatagcctttccttct

SEQ ID NO: 4974093 - DNA, 25 bp, Homo sapien
catcaactttgactgtaggctgcgt

SEQ ID NO: 4974094 - DNA, 25 bp, Homo sapien
tccaaacttccttccctgcaaacac

SEQ ID NO: 4974095 - DNA, 25 bp, Homo sapien
gtccaaacttccttccctgcaaaca

SEQ ID NO: 4974096 - DNA, 25 bp, Homo sapien
ggaggtccaaacttccttccctgca

SEQ ID NO: 4974097 - DNA, 25 bp, Homo sapien
gaggtccaaacttccttccctgcaa

SEQ ID NO: 4974098 - DNA, 25 bp, Homo sapien
ctgggctttgagaacaatactattt

SEQ ID NO: 4974099 - DNA, 25 bp, Homo sapien
tgggctttgagaacaatactattta

SEQ ID NO: 4974100 - DNA, 25 bp, Homo sapien
ggctttgagaacaatactatttaat

SEQ ID NO: 4974101 - DNA, 25 bp, Homo sapien
tctgggctttgagaacaatactatt

SEQ ID NO: 4974102 - DNA, 25 bp, Homo sapien
ccaggttagaaattgaatgctgaag

SEQ ID NO: 4974103 - DNA, 25 bp, Homo sapien
tgaagctggacattatcaagggacc

SEQ ID NO: 4974104 - DNA, 25 bp, Homo sapien
aatgctgaagggtggttgagatttg

SEQ ID NO: 4974105 - DNA, 25 bp, Homo sapien
ggacattatcaagggaccaggttag

SEQ ID NO: 4974106 - DNA, 25 bp, Homo sapien
ttgtcatctttgtgcattgcttcag

SEQ ID NO: 4974107 - DNA, 25 bp, Homo sapien
ctttgtgcattgcttcagtgaagcc

SEQ ID NO: 4974108 - DNA, 25 bp, Homo sapien
tcttgtcatctttgtgcattgcttc

SEQ ID NO: 4974109 - DNA, 25 bp, Homo sapien
tctcctctcttgtcatctttgtgca

SEQ ID NO: 4974110 - DNA, 25 bp, Homo sapien
tcctgaggaaacttgttgagtgggc

SEQ ID NO: 4974111 - DNA, 25 bp, Homo sapien
gaataagcagggtaatcatcatgaa

SEQ ID NO: 4974112 - DNA, 25 bp, Homo sapien
catgatcaataggagggtacattcc

SEQ ID NO: 4974113 - DNA, 25 bp, Homo sapien
gcttcatgaatctagcaggcaatag

SEQ ID NO: 4974114 - DNA, 25 bp, Homo sapien
taaggcagtcacagacctcatggtt

SEQ ID NO: 4974115 - DNA, 25 bp, Homo sapien
tctaaggcagtcacagacctcatgg

SEQ ID NO: 4974116 - DNA, 25 bp, Homo sapien
ttctaaggcagtcacagacctcatg

SEQ ID NO: 4974117 - DNA, 25 bp, Homo sapien
aggcagtcacagacctcatggttac

SEQ ID NO: 4974118 - DNA, 25 bp, Homo sapien
atctttatgagcactgtagaaactt

SEQ ID NO: 4974119 - DNA, 25 bp, Homo sapien
ctttatgagcactgtagaaactttc

SEQ ID NO: 4974120 - DNA, 25 bp, Homo sapien
aatctttatgagcactgtagaaact

SEQ ID NO: 4974121 - DNA, 25 bp, Homo sapien
tctttatgagcactgtagaaacttt

SEQ ID NO: 4974122 - DNA, 25 bp, Homo sapien
cagaatagatttgagtgccagcagt

SEQ ID NO: 4974123 - DNA, 25 bp, Homo sapien
cataggaagctgacctcggatgcag

SEQ ID NO: 4974124 - DNA, 25 bp, Homo sapien
gattgcttggaaatgtatgctgccc

SEQ ID NO: 4974125 - DNA, 25 bp, Homo sapien
caaacatcttgaactccgggcagaa

SEQ ID NO: 4974126 - DNA, 25 bp, Homo sapien
agccccacatcagtctttgctttga

SEQ ID NO: 4974127 - DNA, 25 bp, Homo sapien
tttattgagccgcaaggcgaccgga

SEQ ID NO: 4974128 - DNA, 25 bp, Homo sapien
ccaaaccttttattgagccgcaagg

SEQ ID NO: 4974129 - DNA, 25 bp, Homo sapien
aggcgaccggaggaaacaatcggct

SEQ ID NO: 4974130 - DNA, 25 bp, Homo sapien
tcagatcttggctaatatgagctct

SEQ ID NO: 4974131 - DNA, 25 bp, Homo sapien
cagatcttggctaatatgagctctt

SEQ ID NO: 4974132 - DNA, 25 bp, Homo sapien
gatcttggctaatatgagctcttct

SEQ ID NO: 4974133 - DNA, 25 bp, Homo sapien
atcttggctaatatgagctcttctg

SEQ ID NO: 4974134 - DNA, 25 bp, Homo sapien
cagattctgtttccccattcggtgc

SEQ ID NO: 4974135 - DNA, 25 bp, Homo sapien
tgtccttgggcacagattctgtttc

SEQ ID NO: 4974136 - DNA, 25 bp, Homo sapien
gtttatagatcacagtttttcctac

SEQ ID NO: 4974137 - DNA, 25 bp, Homo sapien
tcctactgtgtaactgtccttgggc

SEQ ID NO: 4974138 - DNA, 25 bp, Homo sapien
atctgcagaattcgcagctcccacg

SEQ ID NO: 4974139 - DNA, 25 bp, Homo sapien
gcagaattcgcagctcccacggtca

SEQ ID NO: 4974140 - DNA, 25 bp, Homo sapien
ctgcagaattcgcagctcccacggt

SEQ ID NO: 4974141 - DNA, 25 bp, Homo sapien
aattcgcagctcccacggtcaccat

SEQ ID NO: 4974142 - DNA, 25 bp, Homo sapien
ggacagccccattgcactgttcttg

SEQ ID NO: 4974143 - DNA, 25 bp, Homo sapien
aggtctaggacagccccattgcact

SEQ ID NO: 4974144 - DNA, 25 bp, Homo sapien
tgagcatgccttatagctgaggtct

SEQ ID NO: 4974145 - DNA, 25 bp, Homo sapien
gaatgttctcctgtgagcatgcctt

SEQ ID NO: 4974146 - DNA, 25 bp, Homo sapien
gttcacggtcaagtctgtgcctgca

SEQ ID NO: 4974147 - DNA, 25 bp, Homo sapien
agtctgtgcctgcagcatcaatatt

SEQ ID NO: 4974148 - DNA, 25 bp, Homo sapien
taactgttcacggtcaagtctgtgc

SEQ ID NO: 4974149 - DNA, 25 bp, Homo sapien
gcagcatcaatatttagcaggccac

SEQ ID NO: 4974150 - DNA, 25 bp, Homo sapien
tgtgatggaaggtgaaacattaaag

SEQ ID NO: 4974151 - DNA, 25 bp, Homo sapien
gatggaaggtgaaacattaaagaac

SEQ ID NO: 4974152 - DNA, 25 bp, Homo sapien
tgatggaaggtgaaacattaaagaa

SEQ ID NO: 4974153 - DNA, 25 bp, Homo sapien
ctgtgatggaaggtgaaacattaaa

SEQ ID NO: 4974154 - DNA, 25 bp, Homo sapien
taagaagtcagccttaccccaagag

SEQ ID NO: 4974155 - DNA, 25 bp, Homo sapien
gccttaccccaagagatagccaggg

SEQ ID NO: 4974156 - DNA, 25 bp, Homo sapien
gaagtcagccttaccccaagagata

SEQ ID NO: 4974157 - DNA, 25 bp, Homo sapien
agatagccaggggaatccacagatt

SEQ ID NO: 4974158 - DNA, 25 bp, Homo sapien
ttgatgagtcggatggagaaggaat

SEQ ID NO: 4974159 - DNA, 25 bp, Homo sapien
gaagtagtttgatgagtcggatgga

SEQ ID NO: 4974160 - DNA, 25 bp, Homo sapien
ctcagcagcaacttgcaagggaagt

SEQ ID NO: 4974161 - DNA, 25 bp, Homo sapien
acatcctcagcagcaacttgcaagg

SEQ ID NO: 4974162 - DNA, 25 bp, Homo sapien
cggcttctgaaaacacatcttgtgg

SEQ ID NO: 4974163 - DNA, 25 bp, Homo sapien
tctaaccaggatgacataattgtca

SEQ ID NO: 4974164 - DNA, 25 bp, Homo sapien
cgacatagcttacaataatatccaa

SEQ ID NO: 4974165 - DNA, 25 bp, Homo sapien
tcttgtggcaagatccgacatagct

SEQ ID NO: 4974166 - DNA, 25 bp, Homo sapien
agagcccagatttctgtgagtgcac

SEQ ID NO: 4974167 - DNA, 25 bp, Homo sapien
gcccagatttctgtgagtgcacaag

SEQ ID NO: 4974168 - DNA, 25 bp, Homo sapien
agatttctgtgagtgcacaaggtgc

SEQ ID NO: 4974169 - DNA, 25 bp, Homo sapien
atcacatagtccatatttggcagga

SEQ ID NO: 4974170 - DNA, 25 bp, Homo sapien
caagctcccagctggtcagttgatt

SEQ ID NO: 4974171 - DNA, 25 bp, Homo sapien
tgcaagagtcatttatcagaagcgt

SEQ ID NO: 4974172 - DNA, 25 bp, Homo sapien
tcagaagcgtgaacccagagattcg

SEQ ID NO: 4974173 - DNA, 25 bp, Homo sapien
gttgtagagctgtgactctcttcca

SEQ ID NO: 4974174 - DNA, 25 bp, Homo sapien
tgaacgagcctgactttgattacca

SEQ ID NO: 4974175 - DNA, 25 bp, Homo sapien
tctgaaatatacataagatgatatg

SEQ ID NO: 4974176 - DNA, 25 bp, Homo sapien
taagatgatatgaacgagcctgact

SEQ ID NO: 4974177 - DNA, 25 bp, Homo sapien
gactttgattaccatagagtggcat

SEQ ID NO: 4974178 - DNA, 25 bp, Homo sapien
gccagagttgtgtctagtcatctta

SEQ ID NO: 4974179 - DNA, 25 bp, Homo sapien
tcgcctgtatcacttgccctgcttg

SEQ ID NO: 4974180 - DNA, 25 bp, Homo sapien
cctgcgtcagcagtcagtcttgcta

SEQ ID NO: 4974181 - DNA, 25 bp, Homo sapien
tggttagccagtgagaaaacaactt

SEQ ID NO: 4974182 - DNA, 25 bp, Homo sapien
taaccatgcggttctttttgcaaca

SEQ ID NO: 4974183 - DNA, 25 bp, Homo sapien
tatactcgcagtgatagaatcttct

SEQ ID NO: 4974184 - DNA, 25 bp, Homo sapien
gaactgatcattggatatactcgca

SEQ ID NO: 4974185 - DNA, 25 bp, Homo sapien
gaatagggcaaaatgtcaaatactc

SEQ ID NO: 4974186 - DNA, 25 bp, Homo sapien
ccgtatgtgaactatagttggaaca

SEQ ID NO: 4974187 - DNA, 25 bp, Homo sapien
ccttgtttcaatacatggttgcaca

SEQ ID NO: 4974188 - DNA, 25 bp, Homo sapien
ggtaatatagaagacaggaattttc

SEQ ID NO: 4974189 - DNA, 25 bp, Homo sapien
tggaacagggttaattgtcaaaaga

SEQ ID NO: 4974190 - DNA, 25 bp, Homo sapien
gttattaaagcggagtgtttctgta

SEQ ID NO: 4974191 - DNA, 25 bp, Homo sapien
cgtgccacattccagcatgttgacc

SEQ ID NO: 4974192 - DNA, 25 bp, Homo sapien
tcaggtcttgaaggaacctgtgaac

SEQ ID NO: 4974193 - DNA, 25 bp, Homo sapien
gcagctcagtgggaaagctccccgt

SEQ ID NO: 4974194 - DNA, 25 bp, Homo sapien
gtctgatcttccacatgggtcctgg

SEQ ID NO: 4974195 - DNA, 25 bp, Homo sapien
tcctgggcacagcaaaaggacttga

SEQ ID NO: 4974196 - DNA, 25 bp, Homo sapien
caagtagtgcaagccttccgtgaca

SEQ ID NO: 4974197 - DNA, 25 bp, Homo sapien
tgtcttgccgtacttccctggagtg

SEQ ID NO: 4974198 - DNA, 25 bp, Homo sapien
tctgacttgcctggaccgtcctgca

SEQ ID NO: 4974199 - DNA, 25 bp, Homo sapien
gcctggaccgtcctgcactaaattc

SEQ ID NO: 4974200 - DNA, 25 bp, Homo sapien
cgtcctgcactaaattccaccggtg

SEQ ID NO: 4974201 - DNA, 25 bp, Homo sapien
cctgcactaaattccaccggtgcat

SEQ ID NO: 4974202 - DNA, 25 bp, Homo sapien
gtgagattctgcatgcccctggacg

SEQ ID NO: 4974203 - DNA, 25 bp, Homo sapien
ttctgcatgcccctggacggtgacc

SEQ ID NO: 4974204 - DNA, 25 bp, Homo sapien
ctgcatgcccctggacggtgaccat

SEQ ID NO: 4974205 - DNA, 25 bp, Homo sapien
gagattctgcatgcccctggacggt

SEQ ID NO: 4974206 - DNA, 25 bp, Homo sapien
ctttcttgttttgtatgccattggg

SEQ ID NO: 4974207 - DNA, 25 bp, Homo sapien
tgggttgagcttctgtactttcatc

SEQ ID NO: 4974208 - DNA, 25 bp, Homo sapien
gtgactgctaaccaggaagtacagg

SEQ ID NO: 4974209 - DNA, 25 bp, Homo sapien
gcttctgtactttcatctgtgactg

SEQ ID NO: 4974210 - DNA, 25 bp, Homo sapien
caggaaatttgacctgactgtcagg

SEQ ID NO: 4974211 - DNA, 25 bp, Homo sapien
catgtcttgtgtggcccatagctgc

SEQ ID NO: 4974212 - DNA, 25 bp, Homo sapien
ttcctgatatggtgactttatctct

SEQ ID NO: 4974213 - DNA, 25 bp, Homo sapien
cgattcttcagcacaggatagagct

SEQ ID NO: 4974214 - DNA, 25 bp, Homo sapien
agatgaaatactcgatgttttctga

SEQ ID NO: 4974215 - DNA, 25 bp, Homo sapien
aatactcgatgttttctgaagcccc

SEQ ID NO: 4974216 - DNA, 25 bp, Homo sapien
cctgtggccaagtaataataggcat

SEQ ID NO: 4974217 - DNA, 25 bp, Homo sapien
agcccctgtggccaagtaataatag

SEQ ID NO: 4974218 - DNA, 25 bp, Homo sapien
cactcttggaaagccacacctgtgt

SEQ ID NO: 4974219 - DNA, 25 bp, Homo sapien
ccactcttggaaagccacacctgtg

SEQ ID NO: 4974220 - DNA, 25 bp, Homo sapien
cccactcttggaaagccacacctgt

SEQ ID NO: 4974221 - DNA, 25 bp, Homo sapien
actcttggaaagccacacctgtgtc

SEQ ID NO: 4974222 - DNA, 25 bp, Homo sapien
gatgcatagactgtgagtaagacac

SEQ ID NO: 4974223 - DNA, 25 bp, Homo sapien
caaatccattgtgatgcatagactg

SEQ ID NO: 4974224 - DNA, 25 bp, Homo sapien
gcatagactgtgagtaagacactga

SEQ ID NO: 4974225 - DNA, 25 bp, Homo sapien
cattgtgatgcatagactgtgagta

SEQ ID NO: 4974226 - DNA, 25 bp, Homo sapien
gtttctcagtgatagcaaatactgc

SEQ ID NO: 4974227 - DNA, 25 bp, Homo sapien
tgtttctcagtgatagcaaatactg

SEQ ID NO: 4974228 - DNA, 25 bp, Homo sapien
tttctcagtgatagcaaatactgcc

SEQ ID NO: 4974229 - DNA, 25 bp, Homo sapien
cgtgtttctcagtgatagcaaatac

SEQ ID NO: 4974230 - DNA, 25 bp, Homo sapien
tgatgattgccctttgactttctgc

SEQ ID NO: 4974231 - DNA, 25 bp, Homo sapien
gcagctgttggtgtgctgctgacag

SEQ ID NO: 4974232 - DNA, 25 bp, Homo sapien
ctgacaggcatttattaaaggggat

SEQ ID NO: 4974233 - DNA, 25 bp, Homo sapien
tgctgctgacaggcatttattaaag

SEQ ID NO: 4974234 - DNA, 25 bp, Homo sapien
atgcactaggccctgaacaagaaga

SEQ ID NO: 4974235 - DNA, 25 bp, Homo sapien
tcagtcccagtagtgaacttggaat

SEQ ID NO: 4974236 - DNA, 25 bp, Homo sapien
ttggaattatgcactaggccctgaa

SEQ ID NO: 4974237 - DNA, 25 bp, Homo sapien
tattcattcctagctttccttcaac

SEQ ID NO: 4974238 - DNA, 25 bp, Homo sapien
cactagtgccttcctggtggttcat

SEQ ID NO: 4974239 - DNA, 25 bp, Homo sapien
gccaatgcggtactctgaactgtct

SEQ ID NO: 4974240 - DNA, 25 bp, Homo sapien
tcataaaggtgattgccaatgcggt

SEQ ID NO: 4974241 - DNA, 25 bp, Homo sapien
tgaactgtcttgtgtgtgtcttgaa

SEQ ID NO: 4974242 - DNA, 25 bp, Homo sapien
ggtatctctgaaatggcatgggctg

SEQ ID NO: 4974243 - DNA, 25 bp, Homo sapien
cacagtaggagtaagtaagggatct

SEQ ID NO: 4974244 - DNA, 25 bp, Homo sapien
tggaagccaaacatgacttcttggt

SEQ ID NO: 4974245 - DNA, 25 bp, Homo sapien
gtaacttgcccctacttggcagctg

SEQ ID NO: 4974246 - DNA, 25 bp, Homo sapien
gccatctgcctgaagacctcaccta

SEQ ID NO: 4974247 - DNA, 25 bp, Homo sapien
tggagagccagtggtgccatctgcc

SEQ ID NO: 4974248 - DNA, 25 bp, Homo sapien
atctgcctgaagacctcacctaacg

SEQ ID NO: 4974249 - DNA, 25 bp, Homo sapien
ggagagccagtggtgccatctgcct

SEQ ID NO: 4974250 - DNA, 25 bp, Homo sapien
ccccatgtgttttagcagggtggat

SEQ ID NO: 4974251 - DNA, 25 bp, Homo sapien
tgttttagcagggtggatgtcaaac

SEQ ID NO: 4974252 - DNA, 25 bp, Homo sapien
atcagtgaattccccatgtgtttta

SEQ ID NO: 4974253 - DNA, 25 bp, Homo sapien
catgtgttttagcagggtggatgtc

SEQ ID NO: 4974254 - DNA, 25 bp, Homo sapien
agtgagacagctttgtccatcatca

SEQ ID NO: 4974255 - DNA, 25 bp, Homo sapien
ctgagagacaaagggattggcactg

SEQ ID NO: 4974256 - DNA, 25 bp, Homo sapien
gagagacaaagggattggcactgtt

SEQ ID NO: 4974257 - DNA, 25 bp, Homo sapien
tgagagacaaagggattggcactgt

SEQ ID NO: 4974258 - DNA, 25 bp, Homo sapien
tctttcatctcaaaatgtttatgtc

SEQ ID NO: 4974259 - DNA, 25 bp, Homo sapien
ctttcatctcaaaatgtttatgtcc

SEQ ID NO: 4974260 - DNA, 25 bp, Homo sapien
tatcttggaatctcttctttcatct

SEQ ID NO: 4974261 - DNA, 25 bp, Homo sapien
aaatatcttggaatctcttctttca

SEQ ID NO: 4974262 - DNA, 25 bp, Homo sapien
tggtggtgccttgaattgtgaactt

SEQ ID NO: 4974263 - DNA, 25 bp, Homo sapien
gccttgaattgtgaactttttaata

SEQ ID NO: 4974264 - DNA, 25 bp, Homo sapien
cttccttttcctggtggtgccttga

SEQ ID NO: 4974265 - DNA, 25 bp, Homo sapien
ccacttccttttcctggtggtgcct

SEQ ID NO: 4974266 - DNA, 25 bp, Homo sapien
gaggaacgaaggagaatcagcgcca

SEQ ID NO: 4974267 - DNA, 25 bp, Homo sapien
gcaatagaatccatcgtctgaccat

SEQ ID NO: 4974268 - DNA, 25 bp, Homo sapien
gagaatcagcgccatatgcaataga

SEQ ID NO: 4974269 - DNA, 25 bp, Homo sapien
gcgccatatgcaatagaatccatcg

SEQ ID NO: 4974270 - DNA, 25 bp, Homo sapien
catctctgaatgttcgtcctccata

SEQ ID NO: 4974271 - DNA, 25 bp, Homo sapien
tggatgtgttacagtacttggtttc

SEQ ID NO: 4974272 - DNA, 25 bp, Homo sapien
gaattggcagtcattactgaaagaa

SEQ ID NO: 4974273 - DNA, 25 bp, Homo sapien
tcgtcctccatacagaaggtgactg

SEQ ID NO: 4974274 - DNA, 25 bp, Homo sapien
ccttaaagcattgcgagaactgagg

SEQ ID NO: 4974275 - DNA, 25 bp, Homo sapien
gtgacttgtcaaagcgtcactttgc

SEQ ID NO: 4974276 - DNA, 25 bp, Homo sapien
tgtgacttgtcaaagcgtcactttg

SEQ ID NO: 4974277 - DNA, 25 bp, Homo sapien
tgaccttaaagcattgcgagaactg

SEQ ID NO: 4974278 - DNA, 25 bp, Homo sapien
ttgcaatagtgctcccatttcctga

SEQ ID NO: 4974279 - DNA, 25 bp, Homo sapien
tcctgaggccactagcactgacttg

SEQ ID NO: 4974280 - DNA, 25 bp, Homo sapien
catgagattccgtcccttttccctt

SEQ ID NO: 4974281 - DNA, 25 bp, Homo sapien
cactgacttgttggccatgagattc

SEQ ID NO: 4974282 - DNA, 25 bp, Homo sapien
caagaatctcatgaaaggctggtaa

SEQ ID NO: 4974283 - DNA, 25 bp, Homo sapien
aacaattttcttcgaagacgtcttg

SEQ ID NO: 4974284 - DNA, 25 bp, Homo sapien
gccattgtgccttatgcaagcctca

SEQ ID NO: 4974285 - DNA, 25 bp, Homo sapien
cgaagacgtcttgaaattggcaata

SEQ ID NO: 4974286 - DNA, 25 bp, Homo sapien
tgccggattcggctccacgattcat

SEQ ID NO: 4974287 - DNA, 25 bp, Homo sapien
ttgccggattcggctccacgattca

SEQ ID NO: 4974288 - DNA, 25 bp, Homo sapien
cttgccggattcggctccacgattc

SEQ ID NO: 4974289 - DNA, 25 bp, Homo sapien
ggaaagggtccatgatcagaagtaa

SEQ ID NO: 4974290 - DNA, 25 bp, Homo sapien
aaggaatactcaggttgcacttgga

SEQ ID NO: 4974291 - DNA, 25 bp, Homo sapien
tcagaagtaaagtggagctgtgttt

SEQ ID NO: 4974292 - DNA, 25 bp, Homo sapien
tatgctacacgcgtgtgaaaaaagg

SEQ ID NO: 4974293 - DNA, 25 bp, Homo sapien
gaagtgagtgggttgacaggatgag

SEQ ID NO: 4974294 - DNA, 25 bp, Homo sapien
gaaggtttggtgagcatcagtttag

SEQ ID NO: 4974295 - DNA, 25 bp, Homo sapien
atcagtttaggagaataggccacaa

SEQ ID NO: 4974296 - DNA, 25 bp, Homo sapien
caataatggtgtgatgagtgacttc

SEQ ID NO: 4974297 - DNA, 25 bp, Homo sapien
ctttgcagtcaccagcaggaggtgt

SEQ ID NO: 4974298 - DNA, 25 bp, Homo sapien
ttgcagtcaccagcaggaggtgtgt

SEQ ID NO: 4974299 - DNA, 25 bp, Homo sapien
ggtgtgtgtgagagagatcagtcat

SEQ ID NO: 4974300 - DNA, 25 bp, Homo sapien
gcagtcaccagcaggaggtgtgtgt

SEQ ID NO: 4974301 - DNA, 25 bp, Homo sapien
tatccttcttataagccaaagctct

SEQ ID NO: 4974302 - DNA, 25 bp, Homo sapien
tgagggatgcctataacgtttatcc

SEQ ID NO: 4974303 - DNA, 25 bp, Homo sapien
cactcagagggctggataaacagtc

SEQ ID NO: 4974304 - DNA, 25 bp, Homo sapien
ccaatggtgggtgaacttagagatg

SEQ ID NO: 4974305 - DNA, 25 bp, Homo sapien
ccctgtgtccacgttcaagtttcct

SEQ ID NO: 4974306 - DNA, 25 bp, Homo sapien
tcttcacctttatgttgtaactgtt

SEQ ID NO: 4974307 - DNA, 25 bp, Homo sapien
caaagatctgaattaattgcctgaa

SEQ ID NO: 4974308 - DNA, 25 bp, Homo sapien
gaacctgcagcatggcaaatgatgt

SEQ ID NO: 4974309 - DNA, 25 bp, Homo sapien
tgtattcggcaaaacttttgtggcc

SEQ ID NO: 4974310 - DNA, 25 bp, Homo sapien
cacagccacggcagtatgttgaggg

SEQ ID NO: 4974311 - DNA, 25 bp, Homo sapien
tgacaatctgctagaagccactgtg

SEQ ID NO: 4974312 - DNA, 25 bp, Homo sapien
gccactgtgttgatcgtaatctttc

SEQ ID NO: 4974313 - DNA, 25 bp, Homo sapien
tcacagctcgtaagtgtcacctggc

SEQ ID NO: 4974314 - DNA, 25 bp, Homo sapien
ccaagtcaagttagtggcctggcta

SEQ ID NO: 4974315 - DNA, 25 bp, Homo sapien
tctagccagtcatgtgagcatcacc

SEQ ID NO: 4974316 - DNA, 25 bp, Homo sapien
gagaagagaaattacgggtcaccca

SEQ ID NO: 4974317 - DNA, 25 bp, Homo sapien
ggtgccaattttagctctcagcagg

SEQ ID NO: 4974318 - DNA, 25 bp, Homo sapien
atttaaagtgagacgtttgctgctc

SEQ ID NO: 4974319 - DNA, 25 bp, Homo sapien
aagtgagacgtttgctgctctggtc

SEQ ID NO: 4974320 - DNA, 25 bp, Homo sapien
aaatttaaagtgagacgtttgctgc

SEQ ID NO: 4974321 - DNA, 25 bp, Homo sapien
taaagtgagacgtttgctgctctgg

SEQ ID NO: 4974322 - DNA, 25 bp, Homo sapien
tccagaagagggctgtgaaaaggac

SEQ ID NO: 4974323 - DNA, 25 bp, Homo sapien
catggtggaccgaagtctgttagtc

SEQ ID NO: 4974324 - DNA, 25 bp, Homo sapien
tggaaatgctgaccctttgttaaga

SEQ ID NO: 4974325 - DNA, 25 bp, Homo sapien
gagccaacaggacatataggatccc

SEQ ID NO: 4974326 - DNA, 25 bp, Homo sapien
tgggcttgtgaacgttgcagtatct

SEQ ID NO: 4974327 - DNA, 25 bp, Homo sapien
gggcttgtgaacgttgcagtatctt

SEQ ID NO: 4974328 - DNA, 25 bp, Homo sapien
tacagttttccacttgatatggggg

SEQ ID NO: 4974329 - DNA, 25 bp, Homo sapien
gcactgattgcataggcctggctca

SEQ ID NO: 4974330 - DNA, 25 bp, Homo sapien
gagctgctggccctctagagagaca

SEQ ID NO: 4974331 - DNA, 25 bp, Homo sapien
gatatgggggtgtaataacaacttc

SEQ ID NO: 4974332 - DNA, 25 bp, Homo sapien
ttggtagtcaaaggctaccacctcg

SEQ ID NO: 4974333 - DNA, 25 bp, Homo sapien
aacgctgaagtactcgcccggagga

SEQ ID NO: 4974334 - DNA, 25 bp, Homo sapien
gcaagatgtctgcatggttgggctt

SEQ ID NO: 4974335 - DNA, 25 bp, Homo sapien
actgtaagtttatgagcaagatgtc

SEQ ID NO: 4974336 - DNA, 25 bp, Homo sapien
gacacctctgagctgattaattcta

SEQ ID NO: 4974337 - DNA, 25 bp, Homo sapien
tgctttcctttaccagacacctctg

SEQ ID NO: 4974338 - DNA, 25 bp, Homo sapien
tgtacttaagactgaactcgcggtg

SEQ ID NO: 4974339 - DNA, 25 bp, Homo sapien
tcttcttgctattgtcagacaacac

SEQ ID NO: 4974340 - DNA, 25 bp, Homo sapien
gcctaggccaatgtctacaataatt

SEQ ID NO: 4974341 - DNA, 25 bp, Homo sapien
ttggtgatccagtttacccagcacc

SEQ ID NO: 4974342 - DNA, 25 bp, Homo sapien
ttacagcttatggtcctacattcaa

SEQ ID NO: 4974343 - DNA, 25 bp, Homo sapien
gcttatggtcctacattcaagtctt

SEQ ID NO: 4974344 - DNA, 25 bp, Homo sapien
gcctgtaagtacattctgggtgacc

SEQ ID NO: 4974345 - DNA, 25 bp, Homo sapien
gaaggtccgcgaagtgttcatcaat

SEQ ID NO: 4974346 - DNA, 25 bp, Homo sapien
gcctctgtgcgcatagcctgtaagt

SEQ ID NO: 4974347 - DNA, 25 bp, Homo sapien
tactaggcaacaggtggaggacttc

SEQ ID NO: 4974348 - DNA, 25 bp, Homo sapien
aaaacagcagaggggatttcaatat

SEQ ID NO: 4974349 - DNA, 25 bp, Homo sapien
ggggatttcaatatagaccccctca

SEQ ID NO: 4974350 - DNA, 25 bp, Homo sapien
ggatttcaatatagaccccctcaat

SEQ ID NO: 4974351 - DNA, 25 bp, Homo sapien
atttcaatatagaccccctcaattt

SEQ ID NO: 4974352 - DNA, 25 bp, Homo sapien
ttatcggtccttctaaacgctttgc

SEQ ID NO: 4974353 - DNA, 25 bp, Homo sapien
gtaaatagcttctccctgatctctg

SEQ ID NO: 4974354 - DNA, 25 bp, Homo sapien
tcattgcgacttgcctgctggaaac

SEQ ID NO: 4974355 - DNA, 25 bp, Homo sapien
tctctgaggcccacatgacctatac

SEQ ID NO: 4974356 - DNA, 25 bp, Homo sapien
ctcgcatgtctgacgtgtgccatca

SEQ ID NO: 4974357 - DNA, 25 bp, Homo sapien
ccctcgcatgtctgacgtgtgccat

SEQ ID NO: 4974358 - DNA, 25 bp, Homo sapien
gtcaccctcgcatgtctgacgtgtg

SEQ ID NO: 4974359 - DNA, 25 bp, Homo sapien
accctcgcatgtctgacgtgtgcca

SEQ ID NO: 4974360 - DNA, 25 bp, Homo sapien
caagataaagccacttatcaaaaag

SEQ ID NO: 4974361 - DNA, 25 bp, Homo sapien
cacttatcaaaaagcttcgtggccc

SEQ ID NO: 4974362 - DNA, 25 bp, Homo sapien
taaagccacttatcaaaaagcttcg

SEQ ID NO: 4974363 - DNA, 25 bp, Homo sapien
aaaaagcttcgtggccccatctctt

SEQ ID NO: 4974364 - DNA, 25 bp, Homo sapien
tgctgtgaccacagtccccggactc

SEQ ID NO: 4974365 - DNA, 25 bp, Homo sapien
gtccccggactccttatctttagca

SEQ ID NO: 4974366 - DNA, 25 bp, Homo sapien
cctccttttagaattgctctgccag

SEQ ID NO: 4974367 - DNA, 25 bp, Homo sapien
acctccttttagaattgctctgcca

SEQ ID NO: 4974368 - DNA, 25 bp, Homo sapien
tgtgttctcttggatcacctctgcg

SEQ ID NO: 4974369 - DNA, 25 bp, Homo sapien
ggttctttggtcctgcagtctaagg

SEQ ID NO: 4974370 - DNA, 25 bp, Homo sapien
tagatagcccatcaaaggttctttg

SEQ ID NO: 4974371 - DNA, 25 bp, Homo sapien
ccaggatcttttcatccgtagaatg

SEQ ID NO: 4974372 - DNA, 25 bp, Homo sapien
ccttgagttctctgccacggctatc

SEQ ID NO: 4974373 - DNA, 25 bp, Homo sapien
tccgatctgatagccatccttgagt

SEQ ID NO: 4974374 - DNA, 25 bp, Homo sapien
gcctctctgtctctcggatggtaat

SEQ ID NO: 4974375 - DNA, 25 bp, Homo sapien
tcttctccctgtccgatctgatagc

SEQ ID NO: 4974376 - DNA, 25 bp, Homo sapien
cagagtgtgcaatgtatgtctcaat

SEQ ID NO: 4974377 - DNA, 25 bp, Homo sapien
gcttcagttctcaagtcagagtgtg

SEQ ID NO: 4974378 - DNA, 25 bp, Homo sapien
aaccctgttgaaagtaagcaagact

SEQ ID NO: 4974379 - DNA, 25 bp, Homo sapien
gactggttttgcaataagcaaacat

SEQ ID NO: 4974380 - DNA, 25 bp, Homo sapien
cccatgtgcccacacttgcggacat

SEQ ID NO: 4974381 - DNA, 25 bp, Homo sapien
tcttgttcactgcagaacagtgcac

SEQ ID NO: 4974382 - DNA, 25 bp, Homo sapien
ggtcagtccaatggcacacttccac

SEQ ID NO: 4974383 - DNA, 25 bp, Homo sapien
gcagaacagtgcacatggtcagtcc

SEQ ID NO: 4974384 - DNA, 25 bp, Homo sapien
ggcctccagaggcatatccttcctt

SEQ ID NO: 4974385 - DNA, 25 bp, Homo sapien
taatttaagcagtgcaaagctgggc

SEQ ID NO: 4974386 - DNA, 25 bp, Homo sapien
cctttcagacagtatggtgtgggca

SEQ ID NO: 4974387 - DNA, 25 bp, Homo sapien
gaatcattataagaagggcagtcct

SEQ ID NO: 4974388 - DNA, 25 bp, Homo sapien
aaagctgggccaaatgttagtcatg

SEQ ID NO: 4974389 - DNA, 25 bp, Homo sapien
gcttctaattggtgcctctgtattg

SEQ ID NO: 4974390 - DNA, 25 bp, Homo sapien
aattggtgcctctgtattgctgatg

SEQ ID NO: 4974391 - DNA, 25 bp, Homo sapien
cagcaagtgcgtgttccatgagaat

SEQ ID NO: 4974392 - DNA, 25 bp, Homo sapien
tctatgtggaggtatgaactcatgc

SEQ ID NO: 4974393 - DNA, 25 bp, Homo sapien
gcctagaccggtatcataaagccag

SEQ ID NO: 4974394 - DNA, 25 bp, Homo sapien
gccagacccctgctttattgaagtt

SEQ ID NO: 4974395 - DNA, 25 bp, Homo sapien
gaagttgcagtagttcgtaaagcag

SEQ ID NO: 4974396 - DNA, 25 bp, Homo sapien
taaagcagatgatgccctcaggtga

SEQ ID NO: 4974397 - DNA, 25 bp, Homo sapien
gatagagattgcaaatgtgtgaatg

SEQ ID NO: 4974398 - DNA, 25 bp, Homo sapien
ggttgatagagattgcaaatgtgtg

SEQ ID NO: 4974399 - DNA, 25 bp, Homo sapien
ctgccaaggttgatagagattgcaa

SEQ ID NO: 4974400 - DNA, 25 bp, Homo sapien
ccaaggttgatagagattgcaaatg

SEQ ID NO: 4974401 - DNA, 25 bp, Homo sapien
gatttgacagtttgagccttctggc

SEQ ID NO: 4974402 - DNA, 25 bp, Homo sapien
gctggtcttaaacactgaacagagt

SEQ ID NO: 4974403 - DNA, 25 bp, Homo sapien
tgcaatagcaactgtgggatttgac

SEQ ID NO: 4974404 - DNA, 25 bp, Homo sapien
cagagtgacaccattgattgcaata

SEQ ID NO: 4974405 - DNA, 25 bp, Homo sapien
ttctttttcggtaaccatgtctgag

SEQ ID NO: 4974406 - DNA, 25 bp, Homo sapien
tgttctttttcggtaaccatgtctg

SEQ ID NO: 4974407 - DNA, 25 bp, Homo sapien
ttttcggtaaccatgtctgagagtc

SEQ ID NO: 4974408 - DNA, 25 bp, Homo sapien
ctttttcggtaaccatgtctgagag

SEQ ID NO: 4974409 - DNA, 25 bp, Homo sapien
ttgctgtcagaatgagttttcttaa

SEQ ID NO: 4974410 - DNA, 25 bp, Homo sapien
tgctgtcagaatgagttttcttaag

SEQ ID NO: 4974411 - DNA, 25 bp, Homo sapien
tatattacatggtaacaggaacaag

SEQ ID NO: 4974412 - DNA, 25 bp, Homo sapien
tacatacctcagataatggagggag

SEQ ID NO: 4974413 - DNA, 25 bp, Homo sapien
cacactatgttttagagcactctgg

SEQ ID NO: 4974414 - DNA, 25 bp, Homo sapien
gccagctccttataatctatcttag

SEQ ID NO: 4974415 - DNA, 25 bp, Homo sapien
ggtgatgcttcaccagagattcaaa

SEQ ID NO: 4974416 - DNA, 25 bp, Homo sapien
taggtgatgcttcaccagagattca

SEQ ID NO: 4974417 - DNA, 25 bp, Homo sapien
cttctaggtgatgcttcaccagaga

SEQ ID NO: 4974418 - DNA, 25 bp, Homo sapien
gatgcttcaccagagattcaaaagc

SEQ ID NO: 4974419 - DNA, 25 bp, Homo sapien
tgtgatcagtattcaggcttctgca

SEQ ID NO: 4974420 - DNA, 25 bp, Homo sapien
tggttctgctgcaatggcttcacaa

SEQ ID NO: 4974421 - DNA, 25 bp, Homo sapien
gaggatgttcgctttcccagagacc

SEQ ID NO: 4974422 - DNA, 25 bp, Homo sapien
tctgcagagggacggatgtctgtca

SEQ ID NO: 4974423 - DNA, 25 bp, Homo sapien
tctccagttgacgtagatccagtca

SEQ ID NO: 4974424 - DNA, 25 bp, Homo sapien
gatggctgccatattgttagaatca

SEQ ID NO: 4974425 - DNA, 25 bp, Homo sapien
tggtgtccaatacagtcacaagaac

SEQ ID NO: 4974426 - DNA, 25 bp, Homo sapien
aaagcaaatgctttcctataagctc

SEQ ID NO: 4974427 - DNA, 25 bp, Homo sapien
atcacatggcaatgaggctgagcag

SEQ ID NO: 4974428 - DNA, 25 bp, Homo sapien
tccaaggtcgaggagctatgtctgg

SEQ ID NO: 4974429 - DNA, 25 bp, Homo sapien
catgatctgatctcctctgtaagac

SEQ ID NO: 4974430 - DNA, 25 bp, Homo sapien
gcaggcaaatattcgaggtcagatc

SEQ ID NO: 4974431 - DNA, 25 bp, Homo sapien
cctttgtgactgagttaaaaccagc

SEQ ID NO: 4974432 - DNA, 25 bp, Homo sapien
tttgtgactgagttaaaaccagctg

SEQ ID NO: 4974433 - DNA, 25 bp, Homo sapien
ctttgtgactgagttaaaaccagct

SEQ ID NO: 4974434 - DNA, 25 bp, Homo sapien
tctctgaagggtcattgctgaccaa

SEQ ID NO: 4974435 - DNA, 25 bp, Homo sapien
gtcattgctgaccaagatctttaaa

SEQ ID NO: 4974436 - DNA, 25 bp, Homo sapien
aaatatggtctctgaagggtcattg

SEQ ID NO: 4974437 - DNA, 25 bp, Homo sapien
tgaagggtcattgctgaccaagatc

SEQ ID NO: 4974438 - DNA, 25 bp, Homo sapien
atgccaggggactaaaaccctcttg

SEQ ID NO: 4974439 - DNA, 25 bp, Homo sapien
aatccaattttgatgctgatgccag

SEQ ID NO: 4974440 - DNA, 25 bp, Homo sapien
tccagccatttccataggaggatac

SEQ ID NO: 4974441 - DNA, 25 bp, Homo sapien
caaggtactgttgtttcacaaagca

SEQ ID NO: 4974442 - DNA, 25 bp, Homo sapien
tctgctacccagagtaatcttcgtt

SEQ ID NO: 4974443 - DNA, 25 bp, Homo sapien
ctgctacccagagtaatcttcgttc

SEQ ID NO: 4974444 - DNA, 25 bp, Homo sapien
tcatctaaaccctaagaaaggacta

SEQ ID NO: 4974445 - DNA, 25 bp, Homo sapien
ctagaatcttggcatagcgtctgaa

SEQ ID NO: 4974446 - DNA, 25 bp, Homo sapien
cttctagaatcttggcatagcgtct

SEQ ID NO: 4974447 - DNA, 25 bp, Homo sapien
aatcttggcatagcgtctgaagggc

SEQ ID NO: 4974448 - DNA, 25 bp, Homo sapien
gaatcttggcatagcgtctgaaggg

SEQ ID NO: 4974449 - DNA, 25 bp, Homo sapien
tataatagagtgacaggctgaaagc

SEQ ID NO: 4974450 - DNA, 25 bp, Homo sapien
ggttgtatataatagagtgacaggc

SEQ ID NO: 4974451 - DNA, 25 bp, Homo sapien
tctggttgtatataatagagtgaca

SEQ ID NO: 4974452 - DNA, 25 bp, Homo sapien
tgtatataatagagtgacaggctga

SEQ ID NO: 4974453 - DNA, 25 bp, Homo sapien
tgggcagattaggatccagaactcc

SEQ ID NO: 4974454 - DNA, 25 bp, Homo sapien
ggcagattaggatccagaactccat

SEQ ID NO: 4974455 - DNA, 25 bp, Homo sapien
gctgggcagattaggatccagaact

SEQ ID NO: 4974456 - DNA, 25 bp, Homo sapien
gcagctgggcagattaggatccaga

SEQ ID NO: 4974457 - DNA, 25 bp, Homo sapien
taaagcttgtgaaagacgtccctgc

SEQ ID NO: 4974458 - DNA, 25 bp, Homo sapien
gagattagacaacggcctggctggt

SEQ ID NO: 4974459 - DNA, 25 bp, Homo sapien
tcaatgtgattgcaaaaggctccca

SEQ ID NO: 4974460 - DNA, 25 bp, Homo sapien
tactggcttaggctcgttgtaccca

SEQ ID NO: 4974461 - DNA, 25 bp, Homo sapien
cttgcccttctcatcattgaaatcc

SEQ ID NO: 4974462 - DNA, 25 bp, Homo sapien
tcttcatcacccctaccaccaattt

SEQ ID NO: 4974463 - DNA, 25 bp, Homo sapien
aaatccctcagcttgtgtgaatgca

SEQ ID NO: 4974464 - DNA, 25 bp, Homo sapien
aatggctttccgctctattcctcct

SEQ ID NO: 4974465 - DNA, 25 bp, Homo sapien
tagttgccatagtgctgtatttgaa

SEQ ID NO: 4974466 - DNA, 25 bp, Homo sapien
gaaaatcgatgctttagccaaaagc

SEQ ID NO: 4974467 - DNA, 25 bp, Homo sapien
ttattcgcctttggtgttagttgcc

SEQ ID NO: 4974468 - DNA, 25 bp, Homo sapien
ccactgttttgtctgcatagaattt

SEQ ID NO: 4974469 - DNA, 25 bp, Homo sapien
tacagacaactctcatgtctcctta

SEQ ID NO: 4974470 - DNA, 25 bp, Homo sapien
catttggattatacatctgggctta

SEQ ID NO: 4974471 - DNA, 25 bp, Homo sapien
tcacagcacctatgagacatccaag

SEQ ID NO: 4974472 - DNA, 25 bp, Homo sapien
gagaggaatatacttggtagttgcc

SEQ ID NO: 4974473 - DNA, 25 bp, Homo sapien
atttcttcaaagggaggttctggtg

SEQ ID NO: 4974474 - DNA, 25 bp, Homo sapien
cttcaaagggaggttctggtgacag

SEQ ID NO: 4974475 - DNA, 25 bp, Homo sapien
aagatttcttcaaagggaggttctg

SEQ ID NO: 4974476 - DNA, 25 bp, Homo sapien
ttcttcaaagggaggttctggtgac

SEQ ID NO: 4974477 - DNA, 25 bp, Homo sapien
agtgtggatgggagcagaatgaaag

SEQ ID NO: 4974478 - DNA, 25 bp, Homo sapien
gaaagtgtggatgggagcagaatga

SEQ ID NO: 4974479 - DNA, 25 bp, Homo sapien
cttgggaatagagctctgcagtggc

SEQ ID NO: 4974480 - DNA, 25 bp, Homo sapien
accttgggaatagagctctgcagtg

SEQ ID NO: 4974481 - DNA, 25 bp, Homo sapien
actctggtgcagctttagttgtatg

SEQ ID NO: 4974482 - DNA, 25 bp, Homo sapien
gatattgcaggacatgggatggctc

SEQ ID NO: 4974483 - DNA, 25 bp, Homo sapien
ggcaatctgccaaaggccctggcaa

SEQ ID NO: 4974484 - DNA, 25 bp, Homo sapien
gatgggcatctttgcaggatatcgc

SEQ ID NO: 4974485 - DNA, 25 bp, Homo sapien
tcttgaagagtagacggtaacatac

SEQ ID NO: 4974486 - DNA, 25 bp, Homo sapien
taaaataagcctttgcagatcaagc

SEQ ID NO: 4974487 - DNA, 25 bp, Homo sapien
cacttttggaagcatcgtggactta

SEQ ID NO: 4974488 - DNA, 25 bp, Homo sapien
gacatactgtattcctgacatctgc

SEQ ID NO: 4974489 - DNA, 25 bp, Homo sapien
tggacctaacgccaagccaggaaag

SEQ ID NO: 4974490 - DNA, 25 bp, Homo sapien
tcaagagtgcatagtaccctggacc

SEQ ID NO: 4974491 - DNA, 25 bp, Homo sapien
aaggtggagtccaggctgattccca

SEQ ID NO: 4974492 - DNA, 25 bp, Homo sapien
gaggagtgataagttcaagagtgca

SEQ ID NO: 4974493 - DNA, 25 bp, Homo sapien
gttgcttttgtcttcgaatgcacgc

SEQ ID NO: 4974494 - DNA, 25 bp, Homo sapien
gcttttgtcttcgaatgcacgcttc

SEQ ID NO: 4974495 - DNA, 25 bp, Homo sapien
tgcttttgtcttcgaatgcacgctt

SEQ ID NO: 4974496 - DNA, 25 bp, Homo sapien
tgacaatggaaagttgcttttgtct

SEQ ID NO: 4974497 - DNA, 25 bp, Homo sapien
tgaggagctgaatataaattgccag

SEQ ID NO: 4974498 - DNA, 25 bp, Homo sapien
aatgaggagctgaatataaattgcc

SEQ ID NO: 4974499 - DNA, 25 bp, Homo sapien
gaatgaggagctgaatataaattgc

SEQ ID NO: 4974500 - DNA, 25 bp, Homo sapien
atgaggagctgaatataaattgcca

SEQ ID NO: 4974501 - DNA, 25 bp, Homo sapien
cagcagcgtgctgtaagtagggatt

SEQ ID NO: 4974502 - DNA, 25 bp, Homo sapien
gaggcctctaagcttggcaccagct

SEQ ID NO: 4974503 - DNA, 25 bp, Homo sapien
gatccagtgccggagcaaagaaata

SEQ ID NO: 4974504 - DNA, 25 bp, Homo sapien
tatccatgtagtagcggaggcctct

SEQ ID NO: 4974505 - DNA, 25 bp, Homo sapien
tggccaccgccaagcttttctcagc

SEQ ID NO: 4974506 - DNA, 25 bp, Homo sapien
agtcctccgcgtgtatcgctctgca

SEQ ID NO: 4974507 - DNA, 25 bp, Homo sapien
tattcaaagtcctccgcgtgtatcg

SEQ ID NO: 4974508 - DNA, 25 bp, Homo sapien
gtgtatcgctctgcatccgcgttcc

SEQ ID NO: 4974509 - DNA, 25 bp, Homo sapien
ggcatgtaccttccctcaataggca

SEQ ID NO: 4974510 - DNA, 25 bp, Homo sapien
ccctaatttggagcacctgaagcgc

SEQ ID NO: 4974511 - DNA, 25 bp, Homo sapien
tcactgaacggctcagactgttcca

SEQ ID NO: 4974512 - DNA, 25 bp, Homo sapien
ctgcagttgcaagggcgaaaatgac

SEQ ID NO: 4974513 - DNA, 25 bp, Homo sapien
ccagagagttttccctagagggcac

SEQ ID NO: 4974514 - DNA, 25 bp, Homo sapien
tagactaagtgggacagcgttctct

SEQ ID NO: 4974515 - DNA, 25 bp, Homo sapien
tgtggcaccgcaagctttgatttcc

SEQ ID NO: 4974516 - DNA, 25 bp, Homo sapien
taattcagggttgcctgtggcaccg

SEQ ID NO: 4974517 - DNA, 25 bp, Homo sapien
agtcaaccatatgccctaatttttc

SEQ ID NO: 4974518 - DNA, 25 bp, Homo sapien
gaaccttaaattggatgttgcttga

SEQ ID NO: 4974519 - DNA, 25 bp, Homo sapien
tttatagtttagtcaaccatatgcc

SEQ ID NO: 4974520 - DNA, 25 bp, Homo sapien
tagtttagtcaaccatatgccctaa

SEQ ID NO: 4974521 - DNA, 25 bp, Homo sapien
ttggcagccatattataatcacgag

SEQ ID NO: 4974522 - DNA, 25 bp, Homo sapien
caacaagcatgaggatgagcagcca

SEQ ID NO: 4974523 - DNA, 25 bp, Homo sapien
ctttgtggaaggagtttggcagcca

SEQ ID NO: 4974524 - DNA, 25 bp, Homo sapien
tggtgaaaacagacccagtgacgtt

SEQ ID NO: 4974525 - DNA, 25 bp, Homo sapien
caaaccctatacatagacccatttt

SEQ ID NO: 4974526 - DNA, 25 bp, Homo sapien
cttctaaatcaccaaaccctataca

SEQ ID NO: 4974527 - DNA, 25 bp, Homo sapien
tatacatagacccattttctcttgc

SEQ ID NO: 4974528 - DNA, 25 bp, Homo sapien
taaatcaccaaaccctatacataga

SEQ ID NO: 4974529 - DNA, 25 bp, Homo sapien
taccaagcagaaatagcatgacctc

SEQ ID NO: 4974530 - DNA, 25 bp, Homo sapien
cagaggactctactaagttgttcca

SEQ ID NO: 4974531 - DNA, 25 bp, Homo sapien
gcatgacctctgacattaatacaaa

SEQ ID NO: 4974532 - DNA, 25 bp, Homo sapien
tacggtatgaagttctggctcagag

SEQ ID NO: 4974533 - DNA, 25 bp, Homo sapien
aagcatttgcgcaggtttctgagaa

SEQ ID NO: 4974534 - DNA, 25 bp, Homo sapien
cacaataatgttggactgggaatta

SEQ ID NO: 4974535 - DNA, 25 bp, Homo sapien
tgttcacatttagttttcccacaat

SEQ ID NO: 4974536 - DNA, 25 bp, Homo sapien
tgaacacaattagagctttttgata

SEQ ID NO: 4974537 - DNA, 25 bp, Homo sapien
gcataagagctaacatctcaccttt

SEQ ID NO: 4974538 - DNA, 25 bp, Homo sapien
tgtctgcttatctttgagcataaga

SEQ ID NO: 4974539 - DNA, 25 bp, Homo sapien
ctttgagcataagagctaacatctc

SEQ ID NO: 4974540 - DNA, 25 bp, Homo sapien
gctggacttgtctgcttatctttga

SEQ ID NO: 4974541 - DNA, 25 bp, Homo sapien
tctgacatagctcgagggtgaggtc

SEQ ID NO: 4974542 - DNA, 25 bp, Homo sapien
tctttgggccatgtgtctgacatag

SEQ ID NO: 4974543 - DNA, 25 bp, Homo sapien
tgtgtctgacatagctcgagggtga

SEQ ID NO: 4974544 - DNA, 25 bp, Homo sapien
gccatgtgtctgacatagctcgagg

SEQ ID NO: 4974545 - DNA, 25 bp, Homo sapien
gagatgcagcaggagtattaggcct

SEQ ID NO: 4974546 - DNA, 25 bp, Homo sapien
caaaagtgccacctgataaatgcat

SEQ ID NO: 4974547 - DNA, 25 bp, Homo sapien
tatttctaccagatgtgcctttttc

SEQ ID NO: 4974548 - DNA, 25 bp, Homo sapien
ttctcatcagcagttatggatacta

SEQ ID NO: 4974549 - DNA, 25 bp, Homo sapien
cttctcaaaagtgccacctgataaa

SEQ ID NO: 4974550 - DNA, 25 bp, Homo sapien
ttgctttaagtcaaggtcagtccct

SEQ ID NO: 4974551 - DNA, 25 bp, Homo sapien
gcatcaattggctttaatatctggg

SEQ ID NO: 4974552 - DNA, 25 bp, Homo sapien
tgaggaaatgctagttctgtagagc

SEQ ID NO: 4974553 - DNA, 25 bp, Homo sapien
gtcatgtcatggcagagatcttaga

SEQ ID NO: 4974554 - DNA, 25 bp, Homo sapien
tgggtagaataatgactgctgtgga

SEQ ID NO: 4974555 - DNA, 25 bp, Homo sapien
tctggtgggtagaataatgactgct

SEQ ID NO: 4974556 - DNA, 25 bp, Homo sapien
ttttagcctcatgagactcgctgca

SEQ ID NO: 4974557 - DNA, 25 bp, Homo sapien
tcatgagactcgctgcagacttctg

SEQ ID NO: 4974558 - DNA, 25 bp, Homo sapien
agttcccgaaaagcaaggctaggtg

SEQ ID NO: 4974559 - DNA, 25 bp, Homo sapien
aagcaaggctaggtggagggcaatc

SEQ ID NO: 4974560 - DNA, 25 bp, Homo sapien
tcccgaaaagcaaggctaggtggag

SEQ ID NO: 4974561 - DNA, 25 bp, Homo sapien
ctaggtggagggcaatctgagagac

SEQ ID NO: 4974562 - DNA, 25 bp, Homo sapien
tcaggggtctgcatatcccctcctt

SEQ ID NO: 4974563 - DNA, 25 bp, Homo sapien
atccatcttatctccaagcttaatg

SEQ ID NO: 4974564 - DNA, 25 bp, Homo sapien
ccatgtaatccatcttatctccaag

SEQ ID NO: 4974565 - DNA, 25 bp, Homo sapien
actgttcatatcaggggtctgcata

SEQ ID NO: 4974566 - DNA, 25 bp, Homo sapien
ggcctgcagctgagaacttgtttgg

SEQ ID NO: 4974567 - DNA, 25 bp, Homo sapien
gaattaactgcacttaaatggcctg

SEQ ID NO: 4974568 - DNA, 25 bp, Homo sapien
tgaacagttcatcgctaatgtattt

SEQ ID NO: 4974569 - DNA, 25 bp, Homo sapien
cagcatgagtcagccttattacaga

SEQ ID NO: 4974570 - DNA, 25 bp, Homo sapien
tttctgctccatgcagacaagttga

SEQ ID NO: 4974571 - DNA, 25 bp, Homo sapien
agcccctcagactggaagcacttgt

SEQ ID NO: 4974572 - DNA, 25 bp, Homo sapien
cccctcagactggaagcacttgttc

SEQ ID NO: 4974573 - DNA, 25 bp, Homo sapien
ctaaggtgttgattgtcagcagatc

SEQ ID NO: 4974574 - DNA, 25 bp, Homo sapien
taatcagaatttgcaagtaatggag

SEQ ID NO: 4974575 - DNA, 25 bp, Homo sapien
tctcagagtcatttgcaggtgtctt

SEQ ID NO: 4974576 - DNA, 25 bp, Homo sapien
aatggagtatgagctcttctctggc

SEQ ID NO: 4974577 - DNA, 25 bp, Homo sapien
ctccaatctcagagtcatttgcagg

SEQ ID NO: 4974578 - DNA, 25 bp, Homo sapien
ctaagtatgtcctcggtgaattctc

SEQ ID NO: 4974579 - DNA, 25 bp, Homo sapien
cacttgttctatagcaaagtcctca

SEQ ID NO: 4974580 - DNA, 25 bp, Homo sapien
ccactttagatatttttcccatcac

SEQ ID NO: 4974581 - DNA, 25 bp, Homo sapien
ttcccatcactgggttcacttgttc

SEQ ID NO: 4974582 - DNA, 25 bp, Homo sapien
cttttcctgggcttccacgctccct

SEQ ID NO: 4974583 - DNA, 25 bp, Homo sapien
ttattcacaggattggcaaatgctc

SEQ ID NO: 4974584 - DNA, 25 bp, Homo sapien
cttatcttattcacaggattggcaa

SEQ ID NO: 4974585 - DNA, 25 bp, Homo sapien
tcagtgaacactatccttatcttat

SEQ ID NO: 4974586 - DNA, 25 bp, Homo sapien
agagtttctcagtgaacactatcct

SEQ ID NO: 4974587 - DNA, 25 bp, Homo sapien
gggagtagacatcgcctcctactgc

SEQ ID NO: 4974588 - DNA, 25 bp, Homo sapien
tgagaaggggagtagacatcgcctc

SEQ ID NO: 4974589 - DNA, 25 bp, Homo sapien
tcttcccgtatttttcttcgtgaga

SEQ ID NO: 4974590 - DNA, 25 bp, Homo sapien
atcgcctcctactgcaagtgccatt

SEQ ID NO: 4974591 - DNA, 25 bp, Homo sapien
tcacaaatagggggttatactatac

SEQ ID NO: 4974592 - DNA, 25 bp, Homo sapien
gaagatcttcatccaagactttaca

SEQ ID NO: 4974593 - DNA, 25 bp, Homo sapien
tgtgaagatcttcatccaagacttt

SEQ ID NO: 4974594 - DNA, 25 bp, Homo sapien
tcttcatccaagactttacaggatg

SEQ ID NO: 4974595 - DNA, 25 bp, Homo sapien
gatcttcatccaagactttacagga

SEQ ID NO: 4974596 - DNA, 25 bp, Homo sapien
gcctgagtacgttccctgccagtaa

SEQ ID NO: 4974597 - DNA, 25 bp, Homo sapien
tggacgtctttttaccagatagggc

SEQ ID NO: 4974598 - DNA, 25 bp, Homo sapien
cgtgttatagcccctgctccaaaag

SEQ ID NO: 4974599 - DNA, 25 bp, Homo sapien
tgacacccgtgttatagcccctgct

SEQ ID NO: 4974600 - DNA, 25 bp, Homo sapien
gaagccgctgcataactacgaagtc

SEQ ID NO: 4974601 - DNA, 25 bp, Homo sapien
cagattccagctttcagaggcagga

SEQ ID NO: 4974602 - DNA, 25 bp, Homo sapien
tacgaagtctagatacagctcagcc

SEQ ID NO: 4974603 - DNA, 25 bp, Homo sapien
tccattaaaagagagttgcaggcac

SEQ ID NO: 4974604 - DNA, 25 bp, Homo sapien
agtccccagggagccacctcagaca

SEQ ID NO: 4974605 - DNA, 25 bp, Homo sapien
tgttcttctagattatttcttccca

SEQ ID NO: 4974606 - DNA, 25 bp, Homo sapien
tttgttcttctagattatttcttcc

SEQ ID NO: 4974607 - DNA, 25 bp, Homo sapien
atttcttcccactgagtccccaggg

SEQ ID NO: 4974608 - DNA, 25 bp, Homo sapien
aggctgtttaaagagtggtgtgact

SEQ ID NO: 4974609 - DNA, 25 bp, Homo sapien
actgcatcataagaccactcacaaa

SEQ ID NO: 4974610 - DNA, 25 bp, Homo sapien
gctgtttaaagagtggtgtgactgc

SEQ ID NO: 4974611 - DNA, 25 bp, Homo sapien
cacaaactgcgacatatgctttgtt

SEQ ID NO: 4974612 - DNA, 25 bp, Homo sapien
agatttctgacaatctgtcttctcc

SEQ ID NO: 4974613 - DNA, 25 bp, Homo sapien
ccagactataaagctgaccactcag

SEQ ID NO: 4974614 - DNA, 25 bp, Homo sapien
tacattggatttcccgcagtcacct

SEQ ID NO: 4974615 - DNA, 25 bp, Homo sapien
tccctggcaacttcggaagggaaga

SEQ ID NO: 4974616 - DNA, 25 bp, Homo sapien
tggctttgctttgtgaccgagactc

SEQ ID NO: 4974617 - DNA, 25 bp, Homo sapien
tggtggctttgctttgtgaccgaga

SEQ ID NO: 4974618 - DNA, 25 bp, Homo sapien
gctttgctttgtgaccgagactcca

SEQ ID NO: 4974619 - DNA, 25 bp, Homo sapien
ctttgctttgtgaccgagactccat

SEQ ID NO: 4974620 - DNA, 25 bp, Homo sapien
taatatcatctccttgccgtccaag

SEQ ID NO: 4974621 - DNA, 25 bp, Homo sapien
ctagttaaaccagctgtcaagtgta

SEQ ID NO: 4974622 - DNA, 25 bp, Homo sapien
ctttctggggtagaagtgacatcct

SEQ ID NO: 4974623 - DNA, 25 bp, Homo sapien
tctccttgccgtccaagttctggga

SEQ ID NO: 4974624 - DNA, 25 bp, Homo sapien
tttacaagaccagtgtattgggtta

SEQ ID NO: 4974625 - DNA, 25 bp, Homo sapien
caagaccagtgtattgggttatact

SEQ ID NO: 4974626 - DNA, 25 bp, Homo sapien
agtgtattgggttatactacaaagg

SEQ ID NO: 4974627 - DNA, 25 bp, Homo sapien
ttgccctggggaaagagtctccatt

SEQ ID NO: 4974628 - DNA, 25 bp, Homo sapien
tgtaattcgaacaatgtacttggct

SEQ ID NO: 4974629 - DNA, 25 bp, Homo sapien
gccctgggcacagcgtgcatggatg

SEQ ID NO: 4974630 - DNA, 25 bp, Homo sapien
tggctttcttgagttgtatctgtga

SEQ ID NO: 4974631 - DNA, 25 bp, Homo sapien
gtatctgtgaatctttacaacaatg

SEQ ID NO: 4974632 - DNA, 25 bp, Homo sapien
gttttagtttatgttctgccgaagc

SEQ ID NO: 4974633 - DNA, 25 bp, Homo sapien
tccagttttagtttatgttctgccg

SEQ ID NO: 4974634 - DNA, 25 bp, Homo sapien
cagttttagtttatgttctgccgaa

SEQ ID NO: 4974635 - DNA, 25 bp, Homo sapien
tgttccagttttagtttatgttctg

SEQ ID NO: 4974636 - DNA, 25 bp, Homo sapien
gggtgttcaatcagtagaagattcg

SEQ ID NO: 4974637 - DNA, 25 bp, Homo sapien
tcaatcagtagaagattcggttgag

SEQ ID NO: 4974638 - DNA, 25 bp, Homo sapien
tgttcaatcagtagaagattcggtt

SEQ ID NO: 4974639 - DNA, 25 bp, Homo sapien
aagtggggtgttcaatcagtagaag

SEQ ID NO: 4974640 - DNA, 25 bp, Homo sapien
acagaagtcaggaggtgccccagtg

SEQ ID NO: 4974641 - DNA, 25 bp, Homo sapien
cagaccacagaagtcaggaggtgcc

SEQ ID NO: 4974642 - DNA, 25 bp, Homo sapien
accacagaagtcaggaggtgcccca

SEQ ID NO: 4974643 - DNA, 25 bp, Homo sapien
tccagaccacagaagtcaggaggtg

SEQ ID NO: 4974644 - DNA, 25 bp, Homo sapien
acagccttgtaggggcgccatccca

SEQ ID NO: 4974645 - DNA, 25 bp, Homo sapien
ctggaaaagaaggcgtaggacatcg

SEQ ID NO: 4974646 - DNA, 25 bp, Homo sapien
gaaaagaaggcgtaggacatcgcag

SEQ ID NO: 4974647 - DNA, 25 bp, Homo sapien
ggacatcgcagagggttgaagagga

SEQ ID NO: 4974648 - DNA, 25 bp, Homo sapien
aaagaaggcgtaggacatcgcagag

SEQ ID NO: 4974649 - DNA, 25 bp, Homo sapien
acttcttatactcataaatactctg

SEQ ID NO: 4974650 - DNA, 25 bp, Homo sapien
cataaatactctggataacagtcat

SEQ ID NO: 4974651 - DNA, 25 bp, Homo sapien
tatactcataaatactctggataac

SEQ ID NO: 4974652 - DNA, 25 bp, Homo sapien
ggacttcttatactcataaatactc

SEQ ID NO: 4974653 - DNA, 25 bp, Homo sapien
ttcttttgtaggatctctatactct

SEQ ID NO: 4974654 - DNA, 25 bp, Homo sapien
tttgtaccagcttttacacgggcta

SEQ ID NO: 4974655 - DNA, 25 bp, Homo sapien
catgactgccttttcggtttgtacc

SEQ ID NO: 4974656 - DNA, 25 bp, Homo sapien
cacgggctattgcaagggttttcaa

SEQ ID NO: 4974657 - DNA, 25 bp, Homo sapien
ttctgcttctcggcaacagtttggt

SEQ ID NO: 4974658 - DNA, 25 bp, Homo sapien
gcttctcggcaacagtttggtccat

SEQ ID NO: 4974659 - DNA, 25 bp, Homo sapien
ctgtttctgcttctcggcaacagtt

SEQ ID NO: 4974660 - DNA, 25 bp, Homo sapien
tgcttctcggcaacagtttggtcca

SEQ ID NO: 4974661 - DNA, 25 bp, Homo sapien
gtctgtgactgtgttggtaatcttc

SEQ ID NO: 4974662 - DNA, 25 bp, Homo sapien
ttttgatgtgtaaagtacagatcat

SEQ ID NO: 4974663 - DNA, 25 bp, Homo sapien
ctgtgtctgtgactgtgttggtaat

SEQ ID NO: 4974664 - DNA, 25 bp, Homo sapien
attttgatgtgtaaagtacagatca

SEQ ID NO: 4974665 - DNA, 25 bp, Homo sapien
gctcattaacattaacttcctcaga

SEQ ID NO: 4974666 - DNA, 25 bp, Homo sapien
cttgtgctcattaacattaacttcc

SEQ ID NO: 4974667 - DNA, 25 bp, Homo sapien
gtttcatcttgtgctcattaacatt

SEQ ID NO: 4974668 - DNA, 25 bp, Homo sapien
gttgaagctaagtttcatcttgtgc

SEQ ID NO: 4974669 - DNA, 25 bp, Homo sapien
gccagacactcctgaatcattttac

SEQ ID NO: 4974670 - DNA, 25 bp, Homo sapien
tgaggacccaatctcccgggttctg

SEQ ID NO: 4974671 - DNA, 25 bp, Homo sapien
tcattttacttgctctgaggaccca

SEQ ID NO: 4974672 - DNA, 25 bp, Homo sapien
aatctctgtagttagtgccttggcc

SEQ ID NO: 4974673 - DNA, 25 bp, Homo sapien
cacttttctatggaacataggagac

SEQ ID NO: 4974674 - DNA, 25 bp, Homo sapien
acttttctatggaacataggagacc

SEQ ID NO: 4974675 - DNA, 25 bp, Homo sapien
acacttttctatggaacataggaga

SEQ ID NO: 4974676 - DNA, 25 bp, Homo sapien
cttgccaaatgctagaggccactac

SEQ ID NO: 4974677 - DNA, 25 bp, Homo sapien
aatgctagaggccactacattcctt

SEQ ID NO: 4974678 - DNA, 25 bp, Homo sapien
ccaaatgctagaggccactacattc

SEQ ID NO: 4974679 - DNA, 25 bp, Homo sapien
caaagccggcaataggggtttgaat

SEQ ID NO: 4974680 - DNA, 25 bp, Homo sapien
aaaaataaggtgcatccaaatgcag

SEQ ID NO: 4974681 - DNA, 25 bp, Homo sapien
gttgtgagagtcacagatacgtctt

SEQ ID NO: 4974682 - DNA, 25 bp, Homo sapien
gtgagagtcacagatacgtctttgc

SEQ ID NO: 4974683 - DNA, 25 bp, Homo sapien
gcatccaaatgcagcaagggaagac

SEQ ID NO: 4974684 - DNA, 25 bp, Homo sapien
acatttggctaatttgaccaccagg

SEQ ID NO: 4974685 - DNA, 25 bp, Homo sapien
tacatgtttaaagctccagcatcct

SEQ ID NO: 4974686 - DNA, 25 bp, Homo sapien
ggctaatttgaccaccagggctaca

SEQ ID NO: 4974687 - DNA, 25 bp, Homo sapien
aatttgaccaccagggctacacata

SEQ ID NO: 4974688 - DNA, 25 bp, Homo sapien
gttttcaggcatttagtcttgtctc

SEQ ID NO: 4974689 - DNA, 25 bp, Homo sapien
ttgttttcaggcatttagtcttgtc

SEQ ID NO: 4974690 - DNA, 25 bp, Homo sapien
aggcatttagtcttgtctctttcca

SEQ ID NO: 4974691 - DNA, 25 bp, Homo sapien
ctttgttttcaggcatttagtcttg

SEQ ID NO: 4974692 - DNA, 25 bp, Homo sapien
gagtggccttccatatctgaacaca

SEQ ID NO: 4974693 - DNA, 25 bp, Homo sapien
gaacacacaggtctgcttgccttgt

SEQ ID NO: 4974694 - DNA, 25 bp, Homo sapien
catgggccaaaagactgagtggcct

SEQ ID NO: 4974695 - DNA, 25 bp, Homo sapien
cacaggtctgcttgccttgtccttc

SEQ ID NO: 4974696 - DNA, 25 bp, Homo sapien
caactggactgtgaggtactgacca

SEQ ID NO: 4974697 - DNA, 25 bp, Homo sapien
aaatcgtttaacatctgtgggcttc

SEQ ID NO: 4974698 - DNA, 25 bp, Homo sapien
ggtttcatcaaatcgtttaacatct

SEQ ID NO: 4974699 - DNA, 25 bp, Homo sapien
ctgaccacaaaaggtttcatcaaat

SEQ ID NO: 4974700 - DNA, 25 bp, Homo sapien
cacctgggccagtcagcttagttcg

SEQ ID NO: 4974701 - DNA, 25 bp, Homo sapien
cgaacctcatctaagcttggaacac

SEQ ID NO: 4974702 - DNA, 25 bp, Homo sapien
tgacttgagtgaccatacctgagcc

SEQ ID NO: 4974703 - DNA, 25 bp, Homo sapien
tcaaacttctagagcaggataccat

SEQ ID NO: 4974704 - DNA, 25 bp, Homo sapien
ctgcaggctcagcaacattccattt

SEQ ID NO: 4974705 - DNA, 25 bp, Homo sapien
tgcaggctcagcaacattccatttc

SEQ ID NO: 4974706 - DNA, 25 bp, Homo sapien
gcttttcatgaacttaaggacgcct

SEQ ID NO: 4974707 - DNA, 25 bp, Homo sapien
taaggacgcctagctgcttagccat

SEQ ID NO: 4974708 - DNA, 25 bp, Homo sapien
tcttctacaaatttaggttcagctt

SEQ ID NO: 4974709 - DNA, 25 bp, Homo sapien
aggttcagcttcaggattccagatt

SEQ ID NO: 4974710 - DNA, 25 bp, Homo sapien
ttgaaagcagcctctcggcctgtgc

SEQ ID NO: 4974711 - DNA, 25 bp, Homo sapien
tctcatcacccgaaacataggtggt

SEQ ID NO: 4974712 - DNA, 25 bp, Homo sapien
caaaggttggaagttcagcagctca

SEQ ID NO: 4974713 - DNA, 25 bp, Homo sapien
ttagagggacgaagcaaaggtgcat

SEQ ID NO: 4974714 - DNA, 25 bp, Homo sapien
cctttataacgagcacttcgggctg

SEQ ID NO: 4974715 - DNA, 25 bp, Homo sapien
ttgtttaggagcactgtttccatca

SEQ ID NO: 4974716 - DNA, 25 bp, Homo sapien
agcacttcgggctggaggtattgtt

SEQ ID NO: 4974717 - DNA, 25 bp, Homo sapien
gctggaggtattgtttaggagcact

SEQ ID NO: 4974718 - DNA, 25 bp, Homo sapien
tccagaggctctaactaaagttgac

SEQ ID NO: 4974719 - DNA, 25 bp, Homo sapien
ttataaccaagacaattgcctccaa

SEQ ID NO: 4974720 - DNA, 25 bp, Homo sapien
tctaactaaagttgacagatgtctg

SEQ ID NO: 4974721 - DNA, 25 bp, Homo sapien
taaccaagacaattgcctccaacat

SEQ ID NO: 4974722 - DNA, 25 bp, Homo sapien
tctgtgttaccagcacagttgatca

SEQ ID NO: 4974723 - DNA, 25 bp, Homo sapien
ttttggcttctgtgttaccagcaca

SEQ ID NO: 4974724 - DNA, 25 bp, Homo sapien
ttggcttctgtgttaccagcacagt

SEQ ID NO: 4974725 - DNA, 25 bp, Homo sapien
gcttctgtgttaccagcacagttga

SEQ ID NO: 4974726 - DNA, 25 bp, Homo sapien
gaaatccgaaatttcacaccaagag

SEQ ID NO: 4974727 - DNA, 25 bp, Homo sapien
aatccgaaatttcacaccaagagaa

SEQ ID NO: 4974728 - DNA, 25 bp, Homo sapien
aaatccgaaatttcacaccaagaga

SEQ ID NO: 4974729 - DNA, 25 bp, Homo sapien
tctgcttggctgaccatagaaaatg

SEQ ID NO: 4974730 - DNA, 25 bp, Homo sapien
cctcatgaaacttatcctttattaa

SEQ ID NO: 4974731 - DNA, 25 bp, Homo sapien
ctttcccattgacctcatgaaactt

SEQ ID NO: 4974732 - DNA, 25 bp, Homo sapien
tattaatacccatcggcatccaaca

SEQ ID NO: 4974733 - DNA, 25 bp, Homo sapien
cctgggtcttcaagatccctcaggc

SEQ ID NO: 4974734 - DNA, 25 bp, Homo sapien
cctcaggcccacagtatattccaat

SEQ ID NO: 4974735 - DNA, 25 bp, Homo sapien
ggcccacagtatattccaattcatt

SEQ ID NO: 4974736 - DNA, 25 bp, Homo sapien
tgggtcttcaagatccctcaggccc

SEQ ID NO: 4974737 - DNA, 25 bp, Homo sapien
ggccagctgtgcaccctgggagctg

SEQ ID NO: 4974738 - DNA, 25 bp, Homo sapien
gaggccagctgtgcaccctgggagc

SEQ ID NO: 4974739 - DNA, 25 bp, Homo sapien
tcatatgtgcatattctcaggatgg

SEQ ID NO: 4974740 - DNA, 25 bp, Homo sapien
aggccagctgtgcaccctgggagct

SEQ ID NO: 4974741 - DNA, 25 bp, Homo sapien
gatggttcttcgcattgttgaaggt

SEQ ID NO: 4974742 - DNA, 25 bp, Homo sapien
tgttgaaggttatctaatgtaagcc

SEQ ID NO: 4974743 - DNA, 25 bp, Homo sapien
taagcccctcatcaacttcctcaat

SEQ ID NO: 4974744 - DNA, 25 bp, Homo sapien
ctaggatggttcttcgcattgttga

SEQ ID NO: 4974745 - DNA, 25 bp, Homo sapien
caagagtcaccaagttcttttttca

SEQ ID NO: 4974746 - DNA, 25 bp, Homo sapien
agagtcaccaagttcttttttcaag

SEQ ID NO: 4974747 - DNA, 25 bp, Homo sapien
gattggttgctgaatatttctctgt

SEQ ID NO: 4974748 - DNA, 25 bp, Homo sapien
gcatattcccagagtgacagccagt

SEQ ID NO: 4974749 - DNA, 25 bp, Homo sapien
ctgagaagtagcagggcatattccc

SEQ ID NO: 4974750 - DNA, 25 bp, Homo sapien
tagcagggcatattcccagagtgac

SEQ ID NO: 4974751 - DNA, 25 bp, Homo sapien
tctggagtgtgctgtaaggcatcct

SEQ ID NO: 4974752 - DNA, 25 bp, Homo sapien
caaaggctcctgtctgcgtgtctga

SEQ ID NO: 4974753 - DNA, 25 bp, Homo sapien
aggctcctgtctgcgtgtctgatga

SEQ ID NO: 4974754 - DNA, 25 bp, Homo sapien
taaggcatcctatcatcgttctttc

SEQ ID NO: 4974755 - DNA, 25 bp, Homo sapien
tagagacatacttttgagctttaga

SEQ ID NO: 4974756 - DNA, 25 bp, Homo sapien
catacttttgagctttagaaagaca

SEQ ID NO: 4974757 - DNA, 25 bp, Homo sapien
tacttttgagctttagaaagacagt

SEQ ID NO: 4974758 - DNA, 25 bp, Homo sapien
attagagacatacttttgagcttta

SEQ ID NO: 4974759 - DNA, 25 bp, Homo sapien
attatgacatgaggaagttgaaatt

SEQ ID NO: 4974760 - DNA, 25 bp, Homo sapien
ttgcattctactatcaattctctca

SEQ ID NO: 4974761 - DNA, 25 bp, Homo sapien
tgacatgaggaagttgaaattgcat

SEQ ID NO: 4974762 - DNA, 25 bp, Homo sapien
attctctcataaattggccacaagt

SEQ ID NO: 4974763 - DNA, 25 bp, Homo sapien
tcctgaacctccaataccagcttcc

SEQ ID NO: 4974764 - DNA, 25 bp, Homo sapien
gaacctccaataccagcttcctcct

SEQ ID NO: 4974765 - DNA, 25 bp, Homo sapien
ctgcattctgtttcgacaggaccat

SEQ ID NO: 4974766 - DNA, 25 bp, Homo sapien
tctgcattctgtttcgacaggacca

SEQ ID NO: 4974767 - DNA, 25 bp, Homo sapien
ttcatctgctggcatgctccggcat

SEQ ID NO: 4974768 - DNA, 25 bp, Homo sapien
catctgctggcatgctccggcatcc

SEQ ID NO: 4974769 - DNA, 25 bp, Homo sapien
gacttcatctgctggcatgctccgg

SEQ ID NO: 4974770 - DNA, 25 bp, Homo sapien
tcagacttcatctgctggcatgctc

SEQ ID NO: 4974771 - DNA, 25 bp, Homo sapien
tgccgaaacactgcacggtgatgct

SEQ ID NO: 4974772 - DNA, 25 bp, Homo sapien
tacttagaggtgcagggagactgac

SEQ ID NO: 4974773 - DNA, 25 bp, Homo sapien
tcacactaggtagccagagagtccc

SEQ ID NO: 4974774 - DNA, 25 bp, Homo sapien
cggtgatgctgaaccataggcttca

SEQ ID NO: 4974775 - DNA, 25 bp, Homo sapien
gataatccttaacatgacacagagt

SEQ ID NO: 4974776 - DNA, 25 bp, Homo sapien
gctcaagaatgctaaataggactcg

SEQ ID NO: 4974777 - DNA, 25 bp, Homo sapien
gaaaacttagatcagcgtctggcac

SEQ ID NO: 4974778 - DNA, 25 bp, Homo sapien
gacaaagccttaagactaactctga

SEQ ID NO: 4974779 - DNA, 25 bp, Homo sapien
taaactgttcagagacgggactcat

SEQ ID NO: 4974780 - DNA, 25 bp, Homo sapien
cctagtcctcctgtatgaagtgaat

SEQ ID NO: 4974781 - DNA, 25 bp, Homo sapien
gagagctgctcatttttaccatggg

SEQ ID NO: 4974782 - DNA, 25 bp, Homo sapien
tacagcacataggtgtaggcgagtt

SEQ ID NO: 4974783 - DNA, 25 bp, Homo sapien
ggtgcacaataatacaaggttaata

SEQ ID NO: 4974784 - DNA, 25 bp, Homo sapien
aaaggtatacagattaaggaggaag

SEQ ID NO: 4974785 - DNA, 25 bp, Homo sapien
ggaattcctagctaatgcaactaag

SEQ ID NO: 4974786 - DNA, 25 bp, Homo sapien
tatataccagcaatgaataagcaca

SEQ ID NO: 4974787 - DNA, 25 bp, Homo sapien
gcagctcatcagtcctacagcagca

SEQ ID NO: 4974788 - DNA, 25 bp, Homo sapien
acatttcccgctgttaaactctctg

SEQ ID NO: 4974789 - DNA, 25 bp, Homo sapien
ggcaagttctcatcagcattcggga

SEQ ID NO: 4974790 - DNA, 25 bp, Homo sapien
tctagacatttaagaggcaagttct

SEQ ID NO: 4974791 - DNA, 25 bp, Homo sapien
tgccctttgtccagaccgagttcat

SEQ ID NO: 4974792 - DNA, 25 bp, Homo sapien
ttgccctttgtccagaccgagttca

SEQ ID NO: 4974793 - DNA, 25 bp, Homo sapien
cctgtgtaaggatctcaaagaatat

SEQ ID NO: 4974794 - DNA, 25 bp, Homo sapien
agaaagtcagcgtgctgtcttgatc

SEQ ID NO: 4974795 - DNA, 25 bp, Homo sapien
tagaaagtcagcgtgctgtcttgat

SEQ ID NO: 4974796 - DNA, 25 bp, Homo sapien
tgtcttgatcctgtgtaaggatctc

SEQ ID NO: 4974797 - DNA, 25 bp, Homo sapien
tatgttcgccagagaatacgttgga

SEQ ID NO: 4974798 - DNA, 25 bp, Homo sapien
tccctcgccccatcaaaggttttga

SEQ ID NO: 4974799 - DNA, 25 bp, Homo sapien
gcttctgtaatattggcttcagcta

SEQ ID NO: 4974800 - DNA, 25 bp, Homo sapien
ttctcttgggtcctgatcttctcat

SEQ ID NO: 4974801 - DNA, 25 bp, Homo sapien
tcagcgtcatttggaggggcagccc

SEQ ID NO: 4974802 - DNA, 25 bp, Homo sapien
gatggactttgagtcacttgtgagc

SEQ ID NO: 4974803 - DNA, 25 bp, Homo sapien
caaatgatggactttgagtcacttg

SEQ ID NO: 4974804 - DNA, 25 bp, Homo sapien
gtgccaaatgatggactttgagtca

SEQ ID NO: 4974805 - DNA, 25 bp, Homo sapien
tttaatatgatacagggcattttca

SEQ ID NO: 4974806 - DNA, 25 bp, Homo sapien
ttcccaaaataatggaattactggc

SEQ ID NO: 4974807 - DNA, 25 bp, Homo sapien
tacagaagggattcccattatgttg

SEQ ID NO: 4974808 - DNA, 25 bp, Homo sapien
tgggctgatgtaattctctcacttc

SEQ ID NO: 4974809 - DNA, 25 bp, Homo sapien
caaagccttgcataatctggttccc

SEQ ID NO: 4974810 - DNA, 25 bp, Homo sapien
ccctttgagacagccaggttggaaa

SEQ ID NO: 4974811 - DNA, 25 bp, Homo sapien
gctcgccttgcgagagtccctgatt

SEQ ID NO: 4974812 - DNA, 25 bp, Homo sapien
aacgagcctgcgcactaggagaaat

SEQ ID NO: 4974813 - DNA, 25 bp, Homo sapien
aactgagatccaagcagcattcatt

SEQ ID NO: 4974814 - DNA, 25 bp, Homo sapien
tgagatccaagcagcattcattctc

SEQ ID NO: 4974815 - DNA, 25 bp, Homo sapien
actgagatccaagcagcattcattc

SEQ ID NO: 4974816 - DNA, 25 bp, Homo sapien
gatccaagcagcattcattctctct

SEQ ID NO: 4974817 - DNA, 25 bp, Homo sapien
ttcagcattcttgcatgtatcctta

SEQ ID NO: 4974818 - DNA, 25 bp, Homo sapien
tcatggtgctcattgaatctattaa

SEQ ID NO: 4974819 - DNA, 25 bp, Homo sapien
catggtgctcattgaatctattaat

SEQ ID NO: 4974820 - DNA, 25 bp, Homo sapien
ttcatggtgctcattgaatctatta

SEQ ID NO: 4974821 - DNA, 25 bp, Homo sapien
gcctcttgattctgtggcctaggag

SEQ ID NO: 4974822 - DNA, 25 bp, Homo sapien
tagtgaataaggaaagctgtggttg

SEQ ID NO: 4974823 - DNA, 25 bp, Homo sapien
catcactcctgtccttacaataaca

SEQ ID NO: 4974824 - DNA, 25 bp, Homo sapien
aaattggagacttttcttggcccat

SEQ ID NO: 4974825 - DNA, 25 bp, Homo sapien
ttaactggtcatggtggtgggcgct

SEQ ID NO: 4974826 - DNA, 25 bp, Homo sapien
cttaaagccaggagaaggaggttgc

SEQ ID NO: 4974827 - DNA, 25 bp, Homo sapien
taactggtcatggtggtgggcgctt

SEQ ID NO: 4974828 - DNA, 25 bp, Homo sapien
gagaatcgcttaaagccaggagaag

SEQ ID NO: 4974829 - DNA, 25 bp, Homo sapien
tttttaagctaggatctcggtctgt

SEQ ID NO: 4974830 - DNA, 25 bp, Homo sapien
aatagcgtgatggcggctcaccgta

SEQ ID NO: 4974831 - DNA, 25 bp, Homo sapien
ttaagctaggatctcggtctgtcac

SEQ ID NO: 4974832 - DNA, 25 bp, Homo sapien
cgtgatggcggctcaccgtaagctc

SEQ ID NO: 4974833 - DNA, 25 bp, Homo sapien
catctcattaattagcatcgagttt

SEQ ID NO: 4974834 - DNA, 25 bp, Homo sapien
tcatcttctgattacagagcccagg

SEQ ID NO: 4974835 - DNA, 25 bp, Homo sapien
gcatcgagtttctgcccagcatggc

SEQ ID NO: 4974836 - DNA, 25 bp, Homo sapien
cagcaagacctgtgtccatccaggc

SEQ ID NO: 4974837 - DNA, 25 bp, Homo sapien
acctgctttccgtatagcagtaacc

SEQ ID NO: 4974838 - DNA, 25 bp, Homo sapien
tgcttatttgatcacctgctttccg

SEQ ID NO: 4974839 - DNA, 25 bp, Homo sapien
cattactagtgcttatttgatcacc

SEQ ID NO: 4974840 - DNA, 25 bp, Homo sapien
tcacacggcattactagtgcttatt

SEQ ID NO: 4974841 - DNA, 25 bp, Homo sapien
caccacggccggagccatctgtcca

SEQ ID NO: 4974842 - DNA, 25 bp, Homo sapien
gagtgcaagaccctcaacgaccaat

SEQ ID NO: 4974843 - DNA, 25 bp, Homo sapien
tgtccatttaggagtgcaagaccct

SEQ ID NO: 4974844 - DNA, 25 bp, Homo sapien
cgtgaagggctttgatgagatgtgt

SEQ ID NO: 4974845 - DNA, 25 bp, Homo sapien
tgcaaggagagatcaaagcgggtcc

SEQ ID NO: 4974846 - DNA, 25 bp, Homo sapien
aaggagagatcaaagcgggtcccca

SEQ ID NO: 4974847 - DNA, 25 bp, Homo sapien
ccttcgggatcgtttacaagcttct

SEQ ID NO: 4974848 - DNA, 25 bp, Homo sapien
cttcgggatcgtttacaagcttctg

SEQ ID NO: 4974849 - DNA, 25 bp, Homo sapien
tctgtacagctttgcctatgccatc

SEQ ID NO: 4974850 - DNA, 25 bp, Homo sapien
ccaataatagttaaattatcgaagg

SEQ ID NO: 4974851 - DNA, 25 bp, Homo sapien
tttatgtgaaccaagtcccttccca

SEQ ID NO: 4974852 - DNA, 25 bp, Homo sapien
tctgggggttgccaataatagttaa

SEQ ID NO: 4974853 - DNA, 25 bp, Homo sapien
tgtcagcaggcctgaactcgccttc

SEQ ID NO: 4974854 - DNA, 25 bp, Homo sapien
cactcacctcggagatgacagatcc

SEQ ID NO: 4974855 - DNA, 25 bp, Homo sapien
caggaagcctgaaacccttttgaca

SEQ ID NO: 4974856 - DNA, 25 bp, Homo sapien
gaagactcgacagccgcaaacaaat

SEQ ID NO: 4974857 - DNA, 25 bp, Homo sapien
atttcctttcctgcttggtgagatt

SEQ ID NO: 4974858 - DNA, 25 bp, Homo sapien
ctgccttgtatttgcccatttcctt

SEQ ID NO: 4974859 - DNA, 25 bp, Homo sapien
cattcctgcatcttcccagttgttt

SEQ ID NO: 4974860 - DNA, 25 bp, Homo sapien
tcattcctgcatcttcccagttgtt

SEQ ID NO: 4974861 - DNA, 25 bp, Homo sapien
gccacttttagcttagtgatgaaat

SEQ ID NO: 4974862 - DNA, 25 bp, Homo sapien
cacttttagcttagtgatgaaatgt

SEQ ID NO: 4974863 - DNA, 25 bp, Homo sapien
cggtctttggccacttttagcttag

SEQ ID NO: 4974864 - DNA, 25 bp, Homo sapien
cttttagcttagtgatgaaatgttg

SEQ ID NO: 4974865 - DNA, 25 bp, Homo sapien
tttcacactgcaccctttcaatgtc

SEQ ID NO: 4974866 - DNA, 25 bp, Homo sapien
cagttgagccatcagccttttcaca

SEQ ID NO: 4974867 - DNA, 25 bp, Homo sapien
gttgagccatcagccttttcacact

SEQ ID NO: 4974868 - DNA, 25 bp, Homo sapien
actgcaccctttcaatgtcaactac

SEQ ID NO: 4974869 - DNA, 25 bp, Homo sapien
aaccgtgaaccagacagaactgaat

SEQ ID NO: 4974870 - DNA, 25 bp, Homo sapien
tcaaccgtgaaccagacagaactga

SEQ ID NO: 4974871 - DNA, 25 bp, Homo sapien
cgtgaaccagacagaactgaattct

SEQ ID NO: 4974872 - DNA, 25 bp, Homo sapien
ccgtgaaccagacagaactgaattc

SEQ ID NO: 4974873 - DNA, 25 bp, Homo sapien
ccacataacagcgtggcctccacca

SEQ ID NO: 4974874 - DNA, 25 bp, Homo sapien
taacagcgtggcctccaccaaagtc

SEQ ID NO: 4974875 - DNA, 25 bp, Homo sapien
gcttggcgtttgacttccacataac

SEQ ID NO: 4974876 - DNA, 25 bp, Homo sapien
agcttggcgtttgacttccacataa

SEQ ID NO: 4974877 - DNA, 25 bp, Homo sapien
aacctcagctcacctcttgtgagta

SEQ ID NO: 4974878 - DNA, 25 bp, Homo sapien
acctcagctcacctcttgtgagtag

SEQ ID NO: 4974879 - DNA, 25 bp, Homo sapien
caacctcagctcacctcttgtgagt

SEQ ID NO: 4974880 - DNA, 25 bp, Homo sapien
tccactctggtggaggagatgctcc

SEQ ID NO: 4974881 - DNA, 25 bp, Homo sapien
gaaagggctgcattctgtctgacag

SEQ ID NO: 4974882 - DNA, 25 bp, Homo sapien
actacatctggctttcactggctcc

SEQ ID NO: 4974883 - DNA, 25 bp, Homo sapien
agatgctcccaggacaccactacat

SEQ ID NO: 4974884 - DNA, 25 bp, Homo sapien
gaccaaagtgtgtatttggaatcgg

SEQ ID NO: 4974885 - DNA, 25 bp, Homo sapien
ggattccacttgctcggataatgag

SEQ ID NO: 4974886 - DNA, 25 bp, Homo sapien
ggataatgagtcaagaatgtattcc

SEQ ID NO: 4974887 - DNA, 25 bp, Homo sapien
tctgattaatggtcctgtcagggtg

SEQ ID NO: 4974888 - DNA, 25 bp, Homo sapien
tatttgccggactgcttgattctga

SEQ ID NO: 4974889 - DNA, 25 bp, Homo sapien
ttttgcatcctttgaacaccagaag

SEQ ID NO: 4974890 - DNA, 25 bp, Homo sapien
gtcaatccctttatgtgaatcgtaa

SEQ ID NO: 4974891 - DNA, 25 bp, Homo sapien
gaatcgtaagctccataaccttttg

SEQ ID NO: 4974892 - DNA, 25 bp, Homo sapien
tggacttgagtagccacgtggaaag

SEQ ID NO: 4974893 - DNA, 25 bp, Homo sapien
taattctcggataccactgccttct

SEQ ID NO: 4974894 - DNA, 25 bp, Homo sapien
ggccaagtcctccattaggcatcat

SEQ ID NO: 4974895 - DNA, 25 bp, Homo sapien
ttctctatgcctctgaacagggctc

SEQ ID NO: 4974896 - DNA, 25 bp, Homo sapien
aagataaattcaactaattctcgga

SEQ ID NO: 4974897 - DNA, 25 bp, Homo sapien
taagagatgaggacctagtttcatt

SEQ ID NO: 4974898 - DNA, 25 bp, Homo sapien
taataaggtaagagatgaggaccta

SEQ ID NO: 4974899 - DNA, 25 bp, Homo sapien
atagggtgttctttcttcactttag

SEQ ID NO: 4974900 - DNA, 25 bp, Homo sapien
gtttttccaatcttatcttccacag

SEQ ID NO: 4974901 - DNA, 25 bp, Homo sapien
gacacacctccgttggatgtggcct

SEQ ID NO: 4974902 - DNA, 25 bp, Homo sapien
ttggatgtggcctgacagtccttac

SEQ ID NO: 4974903 - DNA, 25 bp, Homo sapien
gatgtggcctgacagtccttaccca

SEQ ID NO: 4974904 - DNA, 25 bp, Homo sapien
ctcactgtaagacacacctccgttg

SEQ ID NO: 4974905 - DNA, 25 bp, Homo sapien
ctatggcctcaccaagtagcccagg

SEQ ID NO: 4974906 - DNA, 25 bp, Homo sapien
tggcctcaccaagtagcccaggttt

SEQ ID NO: 4974907 - DNA, 25 bp, Homo sapien
atggcctcaccaagtagcccaggtt

SEQ ID NO: 4974908 - DNA, 25 bp, Homo sapien
tatggcctcaccaagtagcccaggt

SEQ ID NO: 4974909 - DNA, 25 bp, Homo sapien
ggttttgcagaagtaatagcagcat

SEQ ID NO: 4974910 - DNA, 25 bp, Homo sapien
tggttttgcagaagtaatagcagca

SEQ ID NO: 4974911 - DNA, 25 bp, Homo sapien
aaaaatgttggtgatattttctctg

SEQ ID NO: 4974912 - DNA, 25 bp, Homo sapien
cccaaaaatgttggtgatattttct

SEQ ID NO: 4974913 - DNA, 25 bp, Homo sapien
tatgaagccaaatcaaaccccccca

SEQ ID NO: 4974914 - DNA, 25 bp, Homo sapien
caaaaatgttggtgatattttctct

SEQ ID NO: 4974915 - DNA, 25 bp, Homo sapien
gaggaccatcctaatggttcctttg

SEQ ID NO: 4974916 - DNA, 25 bp, Homo sapien
catcctaatggttcctttggtgact

SEQ ID NO: 4974917 - DNA, 25 bp, Homo sapien
ctagaggaccatcctaatggttcct

SEQ ID NO: 4974918 - DNA, 25 bp, Homo sapien
gaccatcctaatggttcctttggtg

SEQ ID NO: 4974919 - DNA, 25 bp, Homo sapien
gagctcaaagaatgcatgggtcaat

SEQ ID NO: 4974920 - DNA, 25 bp, Homo sapien
caaagaatgcatgggtcaatgaagt

SEQ ID NO: 4974921 - DNA, 25 bp, Homo sapien
gctcaaagaatgcatgggtcaatga

SEQ ID NO: 4974922 - DNA, 25 bp, Homo sapien
gaatgcatgggtcaatgaagtcctg

SEQ ID NO: 4974923 - DNA, 25 bp, Homo sapien
tttgcccaagcaggcacactcatcc

SEQ ID NO: 4974924 - DNA, 25 bp, Homo sapien
cggtgttactgacggaaggctctga

SEQ ID NO: 4974925 - DNA, 25 bp, Homo sapien
tggaaagaacctgccggtgttactg

SEQ ID NO: 4974926 - DNA, 25 bp, Homo sapien
cacaatggcctcattgtctggaaag

SEQ ID NO: 4974927 - DNA, 25 bp, Homo sapien
gcaagacagaactccctcgggaagt

SEQ ID NO: 4974928 - DNA, 25 bp, Homo sapien
cacaaaacagtggtcgagagaagta

SEQ ID NO: 4974929 - DNA, 25 bp, Homo sapien
gaaacagtgctatatggagtccaac

SEQ ID NO: 4974930 - DNA, 25 bp, Homo sapien
caattttgatgtcggagtcgctcgg

SEQ ID NO: 4974931 - DNA, 25 bp, Homo sapien
agggaccgcccactctagcgggaga

SEQ ID NO: 4974932 - DNA, 25 bp, Homo sapien
gagaagaaactcctccactctctgt

SEQ ID NO: 4974933 - DNA, 25 bp, Homo sapien
ctttgggataagaatacgggctgcc

SEQ ID NO: 4974934 - DNA, 25 bp, Homo sapien
gaagtatctacttgcagtggtgccc

SEQ ID NO: 4974935 - DNA, 25 bp, Homo sapien
catcctccccactaaggtgtcctcc

SEQ ID NO: 4974936 - DNA, 25 bp, Homo sapien
gactgtcagccaatgaggaagctag

SEQ ID NO: 4974937 - DNA, 25 bp, Homo sapien
ggagactcctcttgctaatggtgtg

SEQ ID NO: 4974938 - DNA, 25 bp, Homo sapien
gctcctcttgatcatgacccctttg

SEQ ID NO: 4974939 - DNA, 25 bp, Homo sapien
gtgtgatcacttggctcctcttgat

SEQ ID NO: 4974940 - DNA, 25 bp, Homo sapien
taaaatgccttctgaggccaaaact

SEQ ID NO: 4974941 - DNA, 25 bp, Homo sapien
ttggaaagtctttcaagcccactaa

SEQ ID NO: 4974942 - DNA, 25 bp, Homo sapien
ctttgtgagcaatgacccctactgg

SEQ ID NO: 4974943 - DNA, 25 bp, Homo sapien
ctggaagggtagcaattggaaagtc

SEQ ID NO: 4974944 - DNA, 25 bp, Homo sapien
agaacaaaagctccattaaccaggg

SEQ ID NO: 4974945 - DNA, 25 bp, Homo sapien
tagctcccatatgatacaccctgat

SEQ ID NO: 4974946 - DNA, 25 bp, Homo sapien
caccctgattagcaaggcagcatca

SEQ ID NO: 4974947 - DNA, 25 bp, Homo sapien
ggcagaacaaaagctccattaacca

SEQ ID NO: 4974948 - DNA, 25 bp, Homo sapien
tcagcactgctggattcagattgct

SEQ ID NO: 4974949 - DNA, 25 bp, Homo sapien
tctcagcactgctggattcagattg

SEQ ID NO: 4974950 - DNA, 25 bp, Homo sapien
ctcagcactgctggattcagattgc

SEQ ID NO: 4974951 - DNA, 25 bp, Homo sapien
tccgagtgaacacaagagccaaggg

SEQ ID NO: 4974952 - DNA, 25 bp, Homo sapien
ctggaaacgggacaccagagggctc

SEQ ID NO: 4974953 - DNA, 25 bp, Homo sapien
tgatgcccaacaggcaggccttgca

SEQ ID NO: 4974954 - DNA, 25 bp, Homo sapien
ccactgaatccccagggtgcgtgca

SEQ ID NO: 4974955 - DNA, 25 bp, Homo sapien
tgaattttaggattccagggtatcc

SEQ ID NO: 4974956 - DNA, 25 bp, Homo sapien
gaattttaggattccagggtatcca

SEQ ID NO: 4974957 - DNA, 25 bp, Homo sapien
ctgaaactgaattttaggattccag

SEQ ID NO: 4974958 - DNA, 25 bp, Homo sapien
actgaattttaggattccagggtat

SEQ ID NO: 4974959 - DNA, 25 bp, Homo sapien
tttaaggatgggagaatgcttgcta

SEQ ID NO: 4974960 - DNA, 25 bp, Homo sapien
ttggatggcaagtttctcagaagga

SEQ ID NO: 4974961 - DNA, 25 bp, Homo sapien
caagaactggcacagcgtgaactgc

SEQ ID NO: 4974962 - DNA, 25 bp, Homo sapien
cattagcaggttggcctgaacatgg

SEQ ID NO: 4974963 - DNA, 25 bp, Homo sapien
ccttcgaaggtgtggacttccccat

SEQ ID NO: 4974964 - DNA, 25 bp, Homo sapien
gggacagactctagaccatgcgtgt

SEQ ID NO: 4974965 - DNA, 25 bp, Homo sapien
cccataatcacagggttggctgtag

SEQ ID NO: 4974966 - DNA, 25 bp, Homo sapien
ggatacagttaacccaggcagaagg

SEQ ID NO: 4974967 - DNA, 25 bp, Homo sapien
tcatcaggaatctccaacaggaagc

SEQ ID NO: 4974968 - DNA, 25 bp, Homo sapien
ctttggaatccgaaaggctgctgga

SEQ ID NO: 4974969 - DNA, 25 bp, Homo sapien
gtggaaggagccctatattttccag

SEQ ID NO: 4974970 - DNA, 25 bp, Homo sapien
gaaggagccctatattttccaggac

SEQ ID NO: 4974971 - DNA, 25 bp, Homo sapien
ttttccaggacagccgctttggaat

SEQ ID NO: 4974972 - DNA, 25 bp, Homo sapien
tgcccgtggcctggctgcattatca

SEQ ID NO: 4974973 - DNA, 25 bp, Homo sapien
ggcctggctgcattatcaggagaat

SEQ ID NO: 4974974 - DNA, 25 bp, Homo sapien
agaaatgctggctgcccgtggcctg

SEQ ID NO: 4974975 - DNA, 25 bp, Homo sapien
cagaaatgctggctgcccgtggcct

SEQ ID NO: 4974976 - DNA, 25 bp, Homo sapien
cctctgccaagggaacagatttgct

SEQ ID NO: 4974977 - DNA, 25 bp, Homo sapien
ttagcagaggtaagccctggcatgg

SEQ ID NO: 4974978 - DNA, 25 bp, Homo sapien
ctttagcagaggtaagccctggcat

SEQ ID NO: 4974979 - DNA, 25 bp, Homo sapien
ccatcctctgccaagggaacagatt

SEQ ID NO: 4974980 - DNA, 25 bp, Homo sapien
ttttcattatcccagagtgtgtctg

SEQ ID NO: 4974981 - DNA, 25 bp, Homo sapien
tgtctgcagtcccatgtcggtaaac

SEQ ID NO: 4974982 - DNA, 25 bp, Homo sapien
gcagtcccatgtcggtaaactccat

SEQ ID NO: 4974983 - DNA, 25 bp, Homo sapien
ccatgtcggtaaactccatctgtat

SEQ ID NO: 4974984 - DNA, 25 bp, Homo sapien
tgaaggatatacttaagcctccaat

SEQ ID NO: 4974985 - DNA, 25 bp, Homo sapien
ctccaattacccatgtcaacattat

SEQ ID NO: 4974986 - DNA, 25 bp, Homo sapien
cctccaattacccatgtcaacatta

SEQ ID NO: 4974987 - DNA, 25 bp, Homo sapien
ggatatacttaagcctccaattacc

SEQ ID NO: 4974988 - DNA, 25 bp, Homo sapien
gataacgaagataattgtttcatcc

SEQ ID NO: 4974989 - DNA, 25 bp, Homo sapien
cccaactatcacatttctactgctt

SEQ ID NO: 4974990 - DNA, 25 bp, Homo sapien
tttctactgctttggctgataacga

SEQ ID NO: 4974991 - DNA, 25 bp, Homo sapien
ctgctttggctgataacgaagataa

SEQ ID NO: 4974992 - DNA, 25 bp, Homo sapien
aattaaacggagatgtaaaactgat

SEQ ID NO: 4974993 - DNA, 25 bp, Homo sapien
ctgtgatgcattgccagctcttctt

SEQ ID NO: 4974994 - DNA, 25 bp, Homo sapien
tccaataaaattaaacggagatgta

SEQ ID NO: 4974995 - DNA, 25 bp, Homo sapien
tgtgatgcattgccagctcttcttt

SEQ ID NO: 4974996 - DNA, 25 bp, Homo sapien
actgatgcataatgacagcaatttc

SEQ ID NO: 4974997 - DNA, 25 bp, Homo sapien
atggtacagggaataattgatataa

SEQ ID NO: 4974998 - DNA, 25 bp, Homo sapien
tgatataagattgcaactgatgcat

SEQ ID NO: 4974999 - DNA, 25 bp, Homo sapien
tgcataatgacagcaatttctcttc

SEQ ID NO: 4975000 - DNA, 25 bp, Homo sapien
tcacctttccccaagcaatgatgct

SEQ ID NO: 4975001 - DNA, 25 bp, Homo sapien
tctctctattccaatcccgctctta

SEQ ID NO: 4975002 - DNA, 25 bp, Homo sapien
ggatggagtccattgcctcaccttt

SEQ ID NO: 4975003 - DNA, 25 bp, Homo sapien
tactatgtgaataaaagatggcctc

SEQ ID NO: 4975004 - DNA, 25 bp, Homo sapien
tcttagcaatgtactggccaggagg

SEQ ID NO: 4975005 - DNA, 25 bp, Homo sapien
tagcaatgtactggccaggagggaa

SEQ ID NO: 4975006 - DNA, 25 bp, Homo sapien
caatgtactggccaggagggaatgt

SEQ ID NO: 4975007 - DNA, 25 bp, Homo sapien
ttaagtcttagcaatgtactggcca

SEQ ID NO: 4975008 - DNA, 25 bp, Homo sapien
tttgcttgtccttaaagagtcctac

SEQ ID NO: 4975009 - DNA, 25 bp, Homo sapien
cgttattctctaagccaacatggca

SEQ ID NO: 4975010 - DNA, 25 bp, Homo sapien
ctcacaaggccccttttggcgttat

SEQ ID NO: 4975011 - DNA, 25 bp, Homo sapien
gcgccctctgccttgactgttagaa

SEQ ID NO: 4975012 - DNA, 25 bp, Homo sapien
gtgccttccagggacagttgctgca

SEQ ID NO: 4975013 - DNA, 25 bp, Homo sapien
cattgcactctgaccagatagtaca

SEQ ID NO: 4975014 - DNA, 25 bp, Homo sapien
attgcactctgaccagatagtacag

SEQ ID NO: 4975015 - DNA, 25 bp, Homo sapien
accagatagtacagccccttcttca

SEQ ID NO: 4975016 - DNA, 25 bp, Homo sapien
ccagatagtacagccccttcttcat

SEQ ID NO: 4975017 - DNA, 25 bp, Homo sapien
ttggaaaagacgtcataggagccag

SEQ ID NO: 4975018 - DNA, 25 bp, Homo sapien
ggcatttggaaaagacgtcatagga

SEQ ID NO: 4975019 - DNA, 25 bp, Homo sapien
tttggaaaagacgtcataggagcca

SEQ ID NO: 4975020 - DNA, 25 bp, Homo sapien
catttggaaaagacgtcataggagc

SEQ ID NO: 4975021 - DNA, 25 bp, Homo sapien
atatccctgccacatgtggtcattc

SEQ ID NO: 4975022 - DNA, 25 bp, Homo sapien
caggtttgcctctcatttgtcaatg

SEQ ID NO: 4975023 - DNA, 25 bp, Homo sapien
gcctctcatttgtcaatgttattat

SEQ ID NO: 4975024 - DNA, 25 bp, Homo sapien
tctccctactggcatatccctgcca

SEQ ID NO: 4975025 - DNA, 25 bp, Homo sapien
ggattcaggtaagtccatccagaga

SEQ ID NO: 4975026 - DNA, 25 bp, Homo sapien
tcttctgcggattcaggtaagtcca

SEQ ID NO: 4975027 - DNA, 25 bp, Homo sapien
tctgcggattcaggtaagtccatcc

SEQ ID NO: 4975028 - DNA, 25 bp, Homo sapien
aagtcttctgcggattcaggtaagt

SEQ ID NO: 4975029 - DNA, 25 bp, Homo sapien
catccacagccactggggggactga

SEQ ID NO: 4975030 - DNA, 25 bp, Homo sapien
actggggggactgaactgaactcca

SEQ ID NO: 4975031 - DNA, 25 bp, Homo sapien
ccactggggggactgaactgaactc

SEQ ID NO: 4975032 - DNA, 25 bp, Homo sapien
ggagctgggccaactagaaagtggg

SEQ ID NO: 4975033 - DNA, 25 bp, Homo sapien
aaaacacagagaatagggcagcatt

SEQ ID NO: 4975034 - DNA, 25 bp, Homo sapien
ccagaataatctaaaccgagggcca

SEQ ID NO: 4975035 - DNA, 25 bp, Homo sapien
gggcagcattagagggaaactatta

SEQ ID NO: 4975036 - DNA, 25 bp, Homo sapien
ccttgtataataatagagactccag

SEQ ID NO: 4975037 - DNA, 25 bp, Homo sapien
tacatgatggccgagggataggaga

SEQ ID NO: 4975038 - DNA, 25 bp, Homo sapien
catgatggccgagggataggagagg

SEQ ID NO: 4975039 - DNA, 25 bp, Homo sapien
acataacccttgttcgtggaaccat

SEQ ID NO: 4975040 - DNA, 25 bp, Homo sapien
ctacatgatggccgagggataggag

SEQ ID NO: 4975041 - DNA, 25 bp, Homo sapien
tgagatctgctatccaaatccatcc

SEQ ID NO: 4975042 - DNA, 25 bp, Homo sapien
catatcgagtcagagaaagtgcttc

SEQ ID NO: 4975043 - DNA, 25 bp, Homo sapien
gaccaaaggccacgatgagatctgc

SEQ ID NO: 4975044 - DNA, 25 bp, Homo sapien
gctctgttcctaaataacaggccag

SEQ ID NO: 4975045 - DNA, 25 bp, Homo sapien
aggtgggttcacagatctcagtcac

SEQ ID NO: 4975046 - DNA, 25 bp, Homo sapien
cagtgcaggtgggttcacagatctc

SEQ ID NO: 4975047 - DNA, 25 bp, Homo sapien
ttcatcaccagtggcagtgcaggtg

SEQ ID NO: 4975048 - DNA, 25 bp, Homo sapien
ttattcatcaccagtggcagtgcag

SEQ ID NO: 4975049 - DNA, 25 bp, Homo sapien
agccagaaagcccacgtcccaggtt

SEQ ID NO: 4975050 - DNA, 25 bp, Homo sapien
aacatccatgtgcactgcaaggttc

SEQ ID NO: 4975051 - DNA, 25 bp, Homo sapien
gaggccactctcaaaataacatcca

SEQ ID NO: 4975052 - DNA, 25 bp, Homo sapien
cctgtaatttagcttgaggagccag

SEQ ID NO: 4975053 - DNA, 25 bp, Homo sapien
tagattgtcctagcagttcagcagg

SEQ ID NO: 4975054 - DNA, 25 bp, Homo sapien
cattttcagcacatagactagattg

SEQ ID NO: 4975055 - DNA, 25 bp, Homo sapien
tcatgagtttgatgagtaaaagtca

SEQ ID NO: 4975056 - DNA, 25 bp, Homo sapien
catagactagattgtcctagcagtt

SEQ ID NO: 4975057 - DNA, 25 bp, Homo sapien
ttgtttattccctgaaactcctgga

SEQ ID NO: 4975058 - DNA, 25 bp, Homo sapien
tcctggacactcaaatctccagagg

SEQ ID NO: 4975059 - DNA, 25 bp, Homo sapien
gttcagattgtttattccctgaaac

SEQ ID NO: 4975060 - DNA, 25 bp, Homo sapien
ctggacactcaaatctccagaggag

SEQ ID NO: 4975061 - DNA, 25 bp, Homo sapien
tctctatggccttcatcaccacatc

SEQ ID NO: 4975062 - DNA, 25 bp, Homo sapien
ctctatggccttcatcaccacatcc

SEQ ID NO: 4975063 - DNA, 25 bp, Homo sapien
actctctatggccttcatcaccaca

SEQ ID NO: 4975064 - DNA, 25 bp, Homo sapien
ctctctatggccttcatcaccacat

SEQ ID NO: 4975065 - DNA, 25 bp, Homo sapien
caggtgtactaactcccctcctgag

SEQ ID NO: 4975066 - DNA, 25 bp, Homo sapien
tcccatcgactgtgaaaccagggtt

SEQ ID NO: 4975067 - DNA, 25 bp, Homo sapien
gcttgaaaagccgttggtgtcttcc

SEQ ID NO: 4975068 - DNA, 25 bp, Homo sapien
caatgtcgtcagtctgtttcaggtg

SEQ ID NO: 4975069 - DNA, 25 bp, Homo sapien
tgaaaacagaagagcgtacagggtc

SEQ ID NO: 4975070 - DNA, 25 bp, Homo sapien
gtggtgtacctcattttcatggaca

SEQ ID NO: 4975071 - DNA, 25 bp, Homo sapien
tagtggtgtacctcattttcatgga

SEQ ID NO: 4975072 - DNA, 25 bp, Homo sapien
tgtagtggtgtacctcattttcatg

SEQ ID NO: 4975073 - DNA, 25 bp, Homo sapien
ggtgtacctcattttcatggacatt

SEQ ID NO: 4975074 - DNA, 25 bp, Homo sapien
ccctgcctgcagacaggaggccaag

SEQ ID NO: 4975075 - DNA, 25 bp, Homo sapien
agctccatgcaggaccagcatcagg

SEQ ID NO: 4975076 - DNA, 25 bp, Homo sapien
catgcaggaccagcatcaggatgaa

SEQ ID NO: 4975077 - DNA, 25 bp, Homo sapien
tgcaggaccagcatcaggatgaact

SEQ ID NO: 4975078 - DNA, 25 bp, Homo sapien
caacttctttctatgtgaatttcct

SEQ ID NO: 4975079 - DNA, 25 bp, Homo sapien
tttccaccacagatccatattctgg

SEQ ID NO: 4975080 - DNA, 25 bp, Homo sapien
cttctttctatgtgaatttccttgt

SEQ ID NO: 4975081 - DNA, 25 bp, Homo sapien
ccaacttctttctatgtgaatttcc

SEQ ID NO: 4975082 - DNA, 25 bp, Homo sapien
cacccaggccaacactcctgtctga

SEQ ID NO: 4975083 - DNA, 25 bp, Homo sapien
cagccacccaggccaacactcctgt

SEQ ID NO: 4975084 - DNA, 25 bp, Homo sapien
acccaggccaacactcctgtctgac

SEQ ID NO: 4975085 - DNA, 25 bp, Homo sapien
gccacccaggccaacactcctgtct

SEQ ID NO: 4975086 - DNA, 25 bp, Homo sapien
tctaattgtgctgagcagcgatgcc

SEQ ID NO: 4975087 - DNA, 25 bp, Homo sapien
gcctcatgtctctcgctatcattag

SEQ ID NO: 4975088 - DNA, 25 bp, Homo sapien
ccctgatcgaagtggagcctctaat

SEQ ID NO: 4975089 - DNA, 25 bp, Homo sapien
tccaaaggccgatcctccggtgttg

SEQ ID NO: 4975090 - DNA, 25 bp, Homo sapien
ggcaatgtgtcaatatagccacaca

SEQ ID NO: 4975091 - DNA, 25 bp, Homo sapien
gcaatgtgtcaatatagccacacat

SEQ ID NO: 4975092 - DNA, 25 bp, Homo sapien
aaggcaatgtgtcaatatagccaca

SEQ ID NO: 4975093 - DNA, 25 bp, Homo sapien
aggcaatgtgtcaatatagccacac

SEQ ID NO: 4975094 - DNA, 25 bp, Homo sapien
ccaagagtctttcctagattcccag

SEQ ID NO: 4975095 - DNA, 25 bp, Homo sapien
cagggcttggcagaggccttaagtg

SEQ ID NO: 4975096 - DNA, 25 bp, Homo sapien
gcagaggccttaagtgacctgggca

SEQ ID NO: 4975097 - DNA, 25 bp, Homo sapien
tctttcctagattcccagggcttgg

SEQ ID NO: 4975098 - DNA, 25 bp, Homo sapien
caagtcttttggtgtctcaggctga

SEQ ID NO: 4975099 - DNA, 25 bp, Homo sapien
tctccagaaatttctataggattcc

SEQ ID NO: 4975100 - DNA, 25 bp, Homo sapien
ctttgctggcttcaagcgttcagcc

SEQ ID NO: 4975101 - DNA, 25 bp, Homo sapien
caaagggatccagttcttcacccac

SEQ ID NO: 4975102 - DNA, 25 bp, Homo sapien
gggcaattttgagtgaccagcaata

SEQ ID NO: 4975103 - DNA, 25 bp, Homo sapien
tttgagtgaccagcaataattctgt

SEQ ID NO: 4975104 - DNA, 25 bp, Homo sapien
caataattctgtagggtttaactgt

SEQ ID NO: 4975105 - DNA, 25 bp, Homo sapien
tgaccagcaataattctgtagggtt

SEQ ID NO: 4975106 - DNA, 25 bp, Homo sapien
gaacatgctccatgtagctgctgat

SEQ ID NO: 4975107 - DNA, 25 bp, Homo sapien
tgctccatgtagctgctgatccaag

SEQ ID NO: 4975108 - DNA, 25 bp, Homo sapien
ctctgtgtgcgtttgtgatttgtct

SEQ ID NO: 4975109 - DNA, 25 bp, Homo sapien
tgtgatttgtcttggctctcctgct

SEQ ID NO: 4975110 - DNA, 25 bp, Homo sapien
gagctccatgttgaatggtccaact

SEQ ID NO: 4975111 - DNA, 25 bp, Homo sapien
ttccaacactcagattgggatctag

SEQ ID NO: 4975112 - DNA, 25 bp, Homo sapien
tcagattgggatctagagaggctcc

SEQ ID NO: 4975113 - DNA, 25 bp, Homo sapien
tgttgaatggtccaacttccctatc

SEQ ID NO: 4975114 - DNA, 25 bp, Homo sapien
ctgcaaaggctgccacgatgggctg

SEQ ID NO: 4975115 - DNA, 25 bp, Homo sapien
tgcaaaggctgccacgatgggctgg

SEQ ID NO: 4975116 - DNA, 25 bp, Homo sapien
cagcagctcataatgttctgaaatt

SEQ ID NO: 4975117 - DNA, 25 bp, Homo sapien
cattgaacagtaaggcgagagcctc

SEQ ID NO: 4975118 - DNA, 25 bp, Homo sapien
aggagttgctgtgcgtgcattgaac

SEQ ID NO: 4975119 - DNA, 25 bp, Homo sapien
tgtgcgtgcattgaacagtaaggcg

SEQ ID NO: 4975120 - DNA, 25 bp, Homo sapien
ctggccaggtcaagtggtgcgagtg

SEQ ID NO: 4975121 - DNA, 25 bp, Homo sapien
cgagtgagatgggctgagactccca

SEQ ID NO: 4975122 - DNA, 25 bp, Homo sapien
gttactggataggtgactagtgtca

SEQ ID NO: 4975123 - DNA, 25 bp, Homo sapien
tccctctggttactggataggtgac

SEQ ID NO: 4975124 - DNA, 25 bp, Homo sapien
atggaccttgggatcattttataac

SEQ ID NO: 4975125 - DNA, 25 bp, Homo sapien
taaacgaggtgatgtatgctcaact

SEQ ID NO: 4975126 - DNA, 25 bp, Homo sapien
caatagccaacagccggtggatacg

SEQ ID NO: 4975127 - DNA, 25 bp, Homo sapien
tcaacttgcctagagccagaaatgg

SEQ ID NO: 4975128 - DNA, 25 bp, Homo sapien
gtgtctggcttagacctcctccaag

SEQ ID NO: 4975129 - DNA, 25 bp, Homo sapien
gttagcaattccacagtcagtcctg

SEQ ID NO: 4975130 - DNA, 25 bp, Homo sapien
gggcaccacattcgcatgagcagaa

SEQ ID NO: 4975131 - DNA, 25 bp, Homo sapien
tacccttgctgcctatgccaacagt

SEQ ID NO: 4975132 - DNA, 25 bp, Homo sapien
gccgccgccaccataaaacatgaag

SEQ ID NO: 4975133 - DNA, 25 bp, Homo sapien
cgccaaggagaaggttccggagtca

SEQ ID NO: 4975134 - DNA, 25 bp, Homo sapien
caaggttgtaactcactcccgggag

SEQ ID NO: 4975135 - DNA, 25 bp, Homo sapien
catgtaggataacagatagccgccc

SEQ ID NO: 4975136 - DNA, 25 bp, Homo sapien
gagcactaactgctctccgtttgtg

SEQ ID NO: 4975137 - DNA, 25 bp, Homo sapien
ataaaggctcggagaagaggctgtc

SEQ ID NO: 4975138 - DNA, 25 bp, Homo sapien
tttgattccgagatagattaccagg

SEQ ID NO: 4975139 - DNA, 25 bp, Homo sapien
gcatattggaagcagggtcgtcgcc

SEQ ID NO: 4975140 - DNA, 25 bp, Homo sapien
cattgggaccttgatcaccagggac

SEQ ID NO: 4975141 - DNA, 25 bp, Homo sapien
caccagggaccaagtggaatagaga

SEQ ID NO: 4975142 - DNA, 25 bp, Homo sapien
tgccggcactagcacactaatagat

SEQ ID NO: 4975143 - DNA, 25 bp, Homo sapien
gatacgacaatcaaataagtgaccc

SEQ ID NO: 4975144 - DNA, 25 bp, Homo sapien
gaaagaaaaaccagcacactaagtc

SEQ ID NO: 4975145 - DNA, 25 bp, Homo sapien
attgtcgggtacttcccttcctctg

SEQ ID NO: 4975146 - DNA, 25 bp, Homo sapien
gagccacattgtcaaggtaagaaag

SEQ ID NO: 4975147 - DNA, 25 bp, Homo sapien
gaaaagctgccagaaagagccacat

SEQ ID NO: 4975148 - DNA, 25 bp, Homo sapien
ctgaccacagaaaggcggtttcagg

SEQ ID NO: 4975149 - DNA, 25 bp, Homo sapien
tgaccacagaaaggcggtttcaggc

SEQ ID NO: 4975150 - DNA, 25 bp, Homo sapien
atcaaggctgattctcaagattccc

SEQ ID NO: 4975151 - DNA, 25 bp, Homo sapien
aatcaaggctgattctcaagattcc

SEQ ID NO: 4975152 - DNA, 25 bp, Homo sapien
caatcaaggctgattctcaagattc

SEQ ID NO: 4975153 - DNA, 25 bp, Homo sapien
aaagtagattccagaggagtcccag

SEQ ID NO: 4975154 - DNA, 25 bp, Homo sapien
aagtagattccagaggagtcccagc

SEQ ID NO: 4975155 - DNA, 25 bp, Homo sapien
gaaagtagattccagaggagtccca

SEQ ID NO: 4975156 - DNA, 25 bp, Homo sapien
tgaaagtagattccagaggagtccc

SEQ ID NO: 4975157 - DNA, 25 bp, Homo sapien
tggtagacagcagccaaggcttttt

SEQ ID NO: 4975158 - DNA, 25 bp, Homo sapien
gacagcagccaaggctttttttaag

SEQ ID NO: 4975159 - DNA, 25 bp, Homo sapien
gtagacagcagccaaggcttttttt

SEQ ID NO: 4975160 - DNA, 25 bp, Homo sapien
cagcagccaaggctttttttaagtt

SEQ ID NO: 4975161 - DNA, 25 bp, Homo sapien
gatttgggtctgaacaggctcttcc

SEQ ID NO: 4975162 - DNA, 25 bp, Homo sapien
ggctcttccacaagtctcttcaaag

SEQ ID NO: 4975163 - DNA, 25 bp, Homo sapien
ggtgagattcaatacagatatacag

SEQ ID NO: 4975164 - DNA, 25 bp, Homo sapien
gcttttatggtgagattcaatacag

SEQ ID NO: 4975165 - DNA, 25 bp, Homo sapien
caactcctgcagacccttgggcggc

SEQ ID NO: 4975166 - DNA, 25 bp, Homo sapien
ccaactcctgcagacccttgggcgg

SEQ ID NO: 4975167 - DNA, 25 bp, Homo sapien
gcagacccttgggcggctgtttccc

SEQ ID NO: 4975168 - DNA, 25 bp, Homo sapien
tcctgcagacccttgggcggctgtt

SEQ ID NO: 4975169 - DNA, 25 bp, Homo sapien
agaagcataactatccccagtgtcc

SEQ ID NO: 4975170 - DNA, 25 bp, Homo sapien
tagaagcataactatccccagtgtc

SEQ ID NO: 4975171 - DNA, 25 bp, Homo sapien
catagaagcataactatccccagtg

SEQ ID NO: 4975172 - DNA, 25 bp, Homo sapien
gaagcataactatccccagtgtcct

SEQ ID NO: 4975173 - DNA, 25 bp, Homo sapien
tggaagcagcacatgagagccccgg

SEQ ID NO: 4975174 - DNA, 25 bp, Homo sapien
atggaagcagcacatgagagccccg

SEQ ID NO: 4975175 - DNA, 25 bp, Homo sapien
aatggaagcagcacatgagagcccc

SEQ ID NO: 4975176 - DNA, 25 bp, Homo sapien
ggaagcagcacatgagagccccggc

SEQ ID NO: 4975177 - DNA, 25 bp, Homo sapien
gctgagcattcatcgaactcagagc

SEQ ID NO: 4975178 - DNA, 25 bp, Homo sapien
tcatcgaactcagagccggcttcag

SEQ ID NO: 4975179 - DNA, 25 bp, Homo sapien
cattcatcgaactcagagccggctt

SEQ ID NO: 4975180 - DNA, 25 bp, Homo sapien
agcattcatcgaactcagagccggc

SEQ ID NO: 4975181 - DNA, 25 bp, Homo sapien
gagatgtgccctctgacaaagaccc

SEQ ID NO: 4975182 - DNA, 25 bp, Homo sapien
ggagatgtgccctctgacaaagacc

SEQ ID NO: 4975183 - DNA, 25 bp, Homo sapien
caaaaactgaaccagcaccacctcc

SEQ ID NO: 4975184 - DNA, 25 bp, Homo sapien
ccacatcccgtttctttaaatggag

SEQ ID NO: 4975185 - DNA, 25 bp, Homo sapien
ccaccacatcccgtttctttaaatg

SEQ ID NO: 4975186 - DNA, 25 bp, Homo sapien
ccctcctccaccacatcccgtttct

SEQ ID NO: 4975187 - DNA, 25 bp, Homo sapien
ttctcacactgatgctcaggcaagg

SEQ ID NO: 4975188 - DNA, 25 bp, Homo sapien
ctgcaccttcatgcagtgcccagga

SEQ ID NO: 4975189 - DNA, 25 bp, Homo sapien
gtccactggatgaaccttctcacac

SEQ ID NO: 4975190 - DNA, 25 bp, Homo sapien
caccttcatgcagtgcccaggagtg

SEQ ID NO: 4975191 - DNA, 25 bp, Homo sapien
gatctctcaggtgggatgcaggcaa

SEQ ID NO: 4975192 - DNA, 25 bp, Homo sapien
ctattactattctttgcgtggcaca

SEQ ID NO: 4975193 - DNA, 25 bp, Homo sapien
caggcaagatggtgagagttagctc

SEQ ID NO: 4975194 - DNA, 25 bp, Homo sapien
caggtcccgcacagttctctgaaag

SEQ ID NO: 4975195 - DNA, 25 bp, Homo sapien
ttgtggataatttgggccacagctt

SEQ ID NO: 4975196 - DNA, 25 bp, Homo sapien
taagttgtggataatttgggccaca

SEQ ID NO: 4975197 - DNA, 25 bp, Homo sapien
acaggacattaagttgtggataatt

SEQ ID NO: 4975198 - DNA, 25 bp, Homo sapien
gacattaagttgtggataatttggg

SEQ ID NO: 4975199 - DNA, 25 bp, Homo sapien
ggccttcttttagccctccatcttg

SEQ ID NO: 4975200 - DNA, 25 bp, Homo sapien
aggccttcttttagccctccatctt

SEQ ID NO: 4975201 - DNA, 25 bp, Homo sapien
gccttcttttagccctccatcttgc

SEQ ID NO: 4975202 - DNA, 25 bp, Homo sapien
cacctcttcatggagtctttctgaa

SEQ ID NO: 4975203 - DNA, 25 bp, Homo sapien
ctggcttctccatcacctcttcatg

SEQ ID NO: 4975204 - DNA, 25 bp, Homo sapien
tcactgccccatgtttgtctcttct

SEQ ID NO: 4975205 - DNA, 25 bp, Homo sapien
tgaaaagtcactgccccatgtttgt

SEQ ID NO: 4975206 - DNA, 25 bp, Homo sapien
tggaaggttctgtttggtcttactc

SEQ ID NO: 4975207 - DNA, 25 bp, Homo sapien
cttcttggattgttgaactacaaat

SEQ ID NO: 4975208 - DNA, 25 bp, Homo sapien
ttggattgttgaactacaaatgcca

SEQ ID NO: 4975209 - DNA, 25 bp, Homo sapien
tcctctacaggcttaaagggagacc

SEQ ID NO: 4975210 - DNA, 25 bp, Homo sapien
gcaccattcaatcctgagatccagg

SEQ ID NO: 4975211 - DNA, 25 bp, Homo sapien
tgctgctccagggattcagcctgag

SEQ ID NO: 4975212 - DNA, 25 bp, Homo sapien
gatggttgattctcgtaaccccaaa

SEQ ID NO: 4975213 - DNA, 25 bp, Homo sapien
aagtacaggagcctacactgaggtc

SEQ ID NO: 4975214 - DNA, 25 bp, Homo sapien
aaggtgcctgttaaatcttcctgct

SEQ ID NO: 4975215 - DNA, 25 bp, Homo sapien
ctaaggtgcctgttaaatcttcctg

SEQ ID NO: 4975216 - DNA, 25 bp, Homo sapien
aatcttcctgctcagtatcagttac

SEQ ID NO: 4975217 - DNA, 25 bp, Homo sapien
taaatcttcctgctcagtatcagtt

SEQ ID NO: 4975218 - DNA, 25 bp, Homo sapien
tgatggttgcgtaaatcttttaaaa

SEQ ID NO: 4975219 - DNA, 25 bp, Homo sapien
ctgatggttgcgtaaatcttttaaa

SEQ ID NO: 4975220 - DNA, 25 bp, Homo sapien
gcatggaagtcagggaccagattct

SEQ ID NO: 4975221 - DNA, 25 bp, Homo sapien
ggctagagagtagtgcatggaagtc

SEQ ID NO: 4975222 - DNA, 25 bp, Homo sapien
gctagagagtagtgcatggaagtca

SEQ ID NO: 4975223 - DNA, 25 bp, Homo sapien
agggctagagagtagtgcatggaag

SEQ ID NO: 4975224 - DNA, 25 bp, Homo sapien
tagttcggccacactcagaggtagc

SEQ ID NO: 4975225 - DNA, 25 bp, Homo sapien
gcagttaggcagagcagtaaatgac

SEQ ID NO: 4975226 - DNA, 25 bp, Homo sapien
taattgctgcatcattagttcggcc

SEQ ID NO: 4975227 - DNA, 25 bp, Homo sapien
taatcactcttaattgctgcatcat

SEQ ID NO: 4975228 - DNA, 25 bp, Homo sapien
gttctatttcagaaaccagagaaag

SEQ ID NO: 4975229 - DNA, 25 bp, Homo sapien
gtgttctatttcagaaaccagagaa

SEQ ID NO: 4975230 - DNA, 25 bp, Homo sapien
ctatttcagaaaccagagaaagcat

SEQ ID NO: 4975231 - DNA, 25 bp, Homo sapien
tctatttcagaaaccagagaaagca

SEQ ID NO: 4975232 - DNA, 25 bp, Homo sapien
cccatgggctgaccatagctctgca

SEQ ID NO: 4975233 - DNA, 25 bp, Homo sapien
catgggctgaccatagctctgcacc

SEQ ID NO: 4975234 - DNA, 25 bp, Homo sapien
aattgctagatgaactcctgctcca

SEQ ID NO: 4975235 - DNA, 25 bp, Homo sapien
caccccaattgctagatgaactcct

SEQ ID NO: 4975236 - DNA, 25 bp, Homo sapien
cataggcgaagcgtagatgctctgg

SEQ ID NO: 4975237 - DNA, 25 bp, Homo sapien
tgctctggccttgcgttggagcccc

SEQ ID NO: 4975238 - DNA, 25 bp, Homo sapien
ccagaacgcaggttaggctacctag

SEQ ID NO: 4975239 - DNA, 25 bp, Homo sapien
tccctgtgtcaatgcataggcgaag

SEQ ID NO: 4975240 - DNA, 25 bp, Homo sapien
gtcactaaaaccttgcacctgcctt

SEQ ID NO: 4975241 - DNA, 25 bp, Homo sapien
tgtgcttcgtacacacgatggtcac

SEQ ID NO: 4975242 - DNA, 25 bp, Homo sapien
tacacacgatggtcactaaaacctt

SEQ ID NO: 4975243 - DNA, 25 bp, Homo sapien
gaggttccaactgagtgtgcttcgt

SEQ ID NO: 4975244 - DNA, 25 bp, Homo sapien
cttttcccctatagtcccttgtgct

SEQ ID NO: 4975245 - DNA, 25 bp, Homo sapien
cctatagtcccttgtgctctgttca

SEQ ID NO: 4975246 - DNA, 25 bp, Homo sapien
tgtgctctgttcatctttgttatag

SEQ ID NO: 4975247 - DNA, 25 bp, Homo sapien
tcagaacctccccaaggtgacttga

SEQ ID NO: 4975248 - DNA, 25 bp, Homo sapien
tgctcctggaaaccaaggtcgatag

SEQ ID NO: 4975249 - DNA, 25 bp, Homo sapien
gaaaccaaggtcgatagagcccaag

SEQ ID NO: 4975250 - DNA, 25 bp, Homo sapien
aaggtcgatagagcccaagttgaag

SEQ ID NO: 4975251 - DNA, 25 bp, Homo sapien
gagctgctcctggaaaccaaggtcg

SEQ ID NO: 4975252 - DNA, 25 bp, Homo sapien
aattggtccccagaaagagagctaa

SEQ ID NO: 4975253 - DNA, 25 bp, Homo sapien
tgtctcccagcaagttgatgcaccc

SEQ ID NO: 4975254 - DNA, 25 bp, Homo sapien
tgtgcaggcgtccttgatgagacag

SEQ ID NO: 4975255 - DNA, 25 bp, Homo sapien
aagccctgttaatcccatccctgtg

SEQ ID NO: 4975256 - DNA, 25 bp, Homo sapien
acctccctctttgtgtactgatgac

SEQ ID NO: 4975257 - DNA, 25 bp, Homo sapien
ctctttgtgtactgatgactattac

SEQ ID NO: 4975258 - DNA, 25 bp, Homo sapien
ctccctctttgtgtactgatgacta

SEQ ID NO: 4975259 - DNA, 25 bp, Homo sapien
ccctctttgtgtactgatgactatt

SEQ ID NO: 4975260 - DNA, 25 bp, Homo sapien
gctgttgtttttgctctcgctcctt

SEQ ID NO: 4975261 - DNA, 25 bp, Homo sapien
cgtcattaatagcgtggctgttgtt

SEQ ID NO: 4975262 - DNA, 25 bp, Homo sapien
ctgttgtttttgctctcgctccttc

SEQ ID NO: 4975263 - DNA, 25 bp, Homo sapien
cattaatagcgtggctgttgttttt

SEQ ID NO: 4975264 - DNA, 25 bp, Homo sapien
ccactgcaatgtagctcagtggact

SEQ ID NO: 4975265 - DNA, 25 bp, Homo sapien
gactcctccatctccacgtcagtgc

SEQ ID NO: 4975266 - DNA, 25 bp, Homo sapien
tagctcagtggactcttccgcaggg

SEQ ID NO: 4975267 - DNA, 25 bp, Homo sapien
gggaagcagaaggactcctccatct

SEQ ID NO: 4975268 - DNA, 25 bp, Homo sapien
gggtaatgaaagccgagtcatacat

SEQ ID NO: 4975269 - DNA, 25 bp, Homo sapien
atagcgtaggaaattgggtaatgaa

SEQ ID NO: 4975270 - DNA, 25 bp, Homo sapien
tatagcgtaggaaattgggtaatga

SEQ ID NO: 4975271 - DNA, 25 bp, Homo sapien
tgggtaatgaaagccgagtcataca

SEQ ID NO: 4975272 - DNA, 25 bp, Homo sapien
tctgggacccaaagaggcttcgctc

SEQ ID NO: 4975273 - DNA, 25 bp, Homo sapien
tcgcagtacaacaggaagagtccgt

SEQ ID NO: 4975274 - DNA, 25 bp, Homo sapien
taagctgaggaaactccggaagggc

SEQ ID NO: 4975275 - DNA, 25 bp, Homo sapien
gaaaaggactatctggctggacaac

SEQ ID NO: 4975276 - DNA, 25 bp, Homo sapien
tccttgtaaggctgacatgtatcac

SEQ ID NO: 4975277 - DNA, 25 bp, Homo sapien
caaagtttccccctcgtctctgatt

SEQ ID NO: 4975278 - DNA, 25 bp, Homo sapien
tcctgtggatgaatgcaactggaac

SEQ ID NO: 4975279 - DNA, 25 bp, Homo sapien
tgcctgaggctcaagttctgctccc

SEQ ID NO: 4975280 - DNA, 25 bp, Homo sapien
tatagaattccacccaggcttgtcc

SEQ ID NO: 4975281 - DNA, 25 bp, Homo sapien
gcttgtcccaggcttgtaagggccc

SEQ ID NO: 4975282 - DNA, 25 bp, Homo sapien
catgttgtagctgaattaattgggc

SEQ ID NO: 4975283 - DNA, 25 bp, Homo sapien
cctcaatatagaattccacccaggc

SEQ ID NO: 4975284 - DNA, 25 bp, Homo sapien
tgcactgaaacgcaaggagagcctg

SEQ ID NO: 4975285 - DNA, 25 bp, Homo sapien
tgcatgaagcatgaggtaaccctaa

SEQ ID NO: 4975286 - DNA, 25 bp, Homo sapien
tcacggcagaatcctaggtccaaag

SEQ ID NO: 4975287 - DNA, 25 bp, Homo sapien
catagcatcagacgcaggtcaagtc

SEQ ID NO: 4975288 - DNA, 25 bp, Homo sapien
agctctttatgtgcaacgtctgtct

SEQ ID NO: 4975289 - DNA, 25 bp, Homo sapien
gctctttatgtgcaacgtctgtctg

SEQ ID NO: 4975290 - DNA, 25 bp, Homo sapien
tgtctctgcagtcttcaatatcacc

SEQ ID NO: 4975291 - DNA, 25 bp, Homo sapien
tctgcagtcttcaatatcacctcgg

SEQ ID NO: 4975292 - DNA, 25 bp, Homo sapien
agtcttcaatatcacctcgggcctt

SEQ ID NO: 4975293 - DNA, 25 bp, Homo sapien
cacctcgggccttcttgaattgtcc

SEQ ID NO: 4975294 - DNA, 25 bp, Homo sapien
gggtggtctcgcacacagtcttcag

SEQ ID NO: 4975295 - DNA, 25 bp, Homo sapien
gaagtttgtcaggaaccagccgtga

SEQ ID NO: 4975296 - DNA, 25 bp, Homo sapien
ggtaacagtgccagcgaaatctaag

SEQ ID NO: 4975297 - DNA, 25 bp, Homo sapien
gaaaatgtatcctcccaaagcaggg

SEQ ID NO: 4975298 - DNA, 25 bp, Homo sapien
cccctgaacgctgtaagggagcatt

SEQ ID NO: 4975299 - DNA, 25 bp, Homo sapien
gagcatttattcgaggcctctcctc

SEQ ID NO: 4975300 - DNA, 25 bp, Homo sapien
cacctttggtgtcgcttggcttgta

SEQ ID NO: 4975301 - DNA, 25 bp, Homo sapien
ttggcttgtagacgcgtcgcccaga

SEQ ID NO: 4975302 - DNA, 25 bp, Homo sapien
ttgcttctttgatgcctatcaggca

SEQ ID NO: 4975303 - DNA, 25 bp, Homo sapien
tttgcttctttgatgcctatcaggc

SEQ ID NO: 4975304 - DNA, 25 bp, Homo sapien
tgcttctttgatgcctatcaggcat

SEQ ID NO: 4975305 - DNA, 25 bp, Homo sapien
cgttctgtccacgaacaaaacaaga

SEQ ID NO: 4975306 - DNA, 25 bp, Homo sapien
aatcaaccagtcgttctgtccacga

SEQ ID NO: 4975307 - DNA, 25 bp, Homo sapien
gaaggtgtagtcaatcaaccagtcg

SEQ ID NO: 4975308 - DNA, 25 bp, Homo sapien
gaaaatttgaaggtgtagtcaatca

SEQ ID NO: 4975309 - DNA, 25 bp, Homo sapien
gattcacagcaaggttcttgtccct

SEQ ID NO: 4975310 - DNA, 25 bp, Homo sapien
ctgattcacagcaaggttcttgtcc

SEQ ID NO: 4975311 - DNA, 25 bp, Homo sapien
tgattcacagcaaggttcttgtccc

SEQ ID NO: 4975312 - DNA, 25 bp, Homo sapien
cgatgatttgtgttctctgtctaaa

SEQ ID NO: 4975313 - DNA, 25 bp, Homo sapien
ccaccataaatttccaagccagcga

SEQ ID NO: 4975314 - DNA, 25 bp, Homo sapien
ccttccgagatgtggcaggctatct

SEQ ID NO: 4975315 - DNA, 25 bp, Homo sapien
ctggcttgtggcaagagctgccttc

SEQ ID NO: 4975316 - DNA, 25 bp, Homo sapien
gaggaaagtcctttcagcagtgggc

SEQ ID NO: 4975317 - DNA, 25 bp, Homo sapien
agagaggaaagtcctttcagcagtg

SEQ ID NO: 4975318 - DNA, 25 bp, Homo sapien
ggaaagtcctttcagcagtgggcct

SEQ ID NO: 4975319 - DNA, 25 bp, Homo sapien
gtccagccgggagccatcccactga

SEQ ID NO: 4975320 - DNA, 25 bp, Homo sapien
taagtctatttgactgtccctgtca

SEQ ID NO: 4975321 - DNA, 25 bp, Homo sapien
gctctaggtcggctcccagcgctgg

SEQ ID NO: 4975322 - DNA, 25 bp, Homo sapien
gcggaaggcgtttaagtctatttga

SEQ ID NO: 4975323 - DNA, 25 bp, Homo sapien
tcatcgtaaggtttacggatggtta

SEQ ID NO: 4975324 - DNA, 25 bp, Homo sapien
caaatgagagccaataaagggtgaa

SEQ ID NO: 4975325 - DNA, 25 bp, Homo sapien
agccaataaagggtgaattgcagct

SEQ ID NO: 4975326 - DNA, 25 bp, Homo sapien
tgagagccaataaagggtgaattgc

SEQ ID NO: 4975327 - DNA, 25 bp, Homo sapien
agagccaataaagggtgaattgcag

SEQ ID NO: 4975328 - DNA, 25 bp, Homo sapien
tgtttatatgacagcagagtgccgg

SEQ ID NO: 4975329 - DNA, 25 bp, Homo sapien
ctgtttatatgacagcagagtgccg

SEQ ID NO: 4975330 - DNA, 25 bp, Homo sapien
acctgcagcaacaccccagatgcat

SEQ ID NO: 4975331 - DNA, 25 bp, Homo sapien
tctaaagatccccatccactggcaa

SEQ ID NO: 4975332 - DNA, 25 bp, Homo sapien
tgcatcagacccttggggagacagg

SEQ ID NO: 4975333 - DNA, 25 bp, Homo sapien
gaacctgcagaccctctaaagatcc

SEQ ID NO: 4975334 - DNA, 25 bp, Homo sapien
ggcacatgtcactgtggttagacac

SEQ ID NO: 4975335 - DNA, 25 bp, Homo sapien
aagccattttgggcaactccccact

SEQ ID NO: 4975336 - DNA, 25 bp, Homo sapien
cactgtggttagacacatcttgcag

SEQ ID NO: 4975337 - DNA, 25 bp, Homo sapien
catgtcactgtggttagacacatct

SEQ ID NO: 4975338 - DNA, 25 bp, Homo sapien
gaatccccagctccttgttccacac

SEQ ID NO: 4975339 - DNA, 25 bp, Homo sapien
catgtgggttggaggagaatcccca

SEQ ID NO: 4975340 - DNA, 25 bp, Homo sapien
gggttggaggagaatccccagctcc

SEQ ID NO: 4975341 - DNA, 25 bp, Homo sapien
ggacatgtgggttggaggagaatcc

SEQ ID NO: 4975342 - DNA, 25 bp, Homo sapien
ggcagccatgagcttcagctgtgtc

SEQ ID NO: 4975343 - DNA, 25 bp, Homo sapien
ctgaagagtgggcagcacttcccat

SEQ ID NO: 4975344 - DNA, 25 bp, Homo sapien
catggtccattcctgaagagtgggc

SEQ ID NO: 4975345 - DNA, 25 bp, Homo sapien
gctgtgtcccttgccttccatggtc

SEQ ID NO: 4975346 - DNA, 25 bp, Homo sapien
catccttggcaatgggctgagtcgt

SEQ ID NO: 4975347 - DNA, 25 bp, Homo sapien
ttattagagcgttaaccatccttgg

SEQ ID NO: 4975348 - DNA, 25 bp, Homo sapien
tataatagcaataatcccctcgaaa

SEQ ID NO: 4975349 - DNA, 25 bp, Homo sapien
tgggtaacgaccaatttctcaagga

SEQ ID NO: 4975350 - DNA, 25 bp, Homo sapien
atgtagaacccggttgagacaaaag

SEQ ID NO: 4975351 - DNA, 25 bp, Homo sapien
tcctggaggccagataaacccacaa

SEQ ID NO: 4975352 - DNA, 25 bp, Homo sapien
gcagctcccaagtatcaggcatgta

SEQ ID NO: 4975353 - DNA, 25 bp, Homo sapien
gataaacccacaagggtcgctgcag

SEQ ID NO: 4975354 - DNA, 25 bp, Homo sapien
tgcggcagttgatcaaagtcttcct

SEQ ID NO: 4975355 - DNA, 25 bp, Homo sapien
tcatgcaagctaaagaacttccctg

SEQ ID NO: 4975356 - DNA, 25 bp, Homo sapien
tgtgcagcccgggactttccagtac

SEQ ID NO: 4975357 - DNA, 25 bp, Homo sapien
tacagacagggattgtgcttcatgc

SEQ ID NO: 4975358 - DNA, 25 bp, Homo sapien
tacatgttattccagccataaatcc

SEQ ID NO: 4975359 - DNA, 25 bp, Homo sapien
taaatccaagtgacaagcttgaact

SEQ ID NO: 4975360 - DNA, 25 bp, Homo sapien
tattccagccataaatccaagtgac

SEQ ID NO: 4975361 - DNA, 25 bp, Homo sapien
aagcttgaactttcctcaattgaca

SEQ ID NO: 4975362 - DNA, 25 bp, Homo sapien
gacatgacagcattaagcacctaga

SEQ ID NO: 4975363 - DNA, 25 bp, Homo sapien
cagtggaaccgctttgacatgacag

SEQ ID NO: 4975364 - DNA, 25 bp, Homo sapien
atcacttcggatggcctctacctgt

SEQ ID NO: 4975365 - DNA, 25 bp, Homo sapien
gaacatggcaccttgcaaaactcct

SEQ ID NO: 4975366 - DNA, 25 bp, Homo sapien
tgttcacagctccttgtctgcagag

SEQ ID NO: 4975367 - DNA, 25 bp, Homo sapien
cagctccttgtctgcagagcttccc

SEQ ID NO: 4975368 - DNA, 25 bp, Homo sapien
tccttgtctgcagagcttcccacat

SEQ ID NO: 4975369 - DNA, 25 bp, Homo sapien
ttgcccatgttcacagctccttgtc

SEQ ID NO: 4975370 - DNA, 25 bp, Homo sapien
ttaacctctctctttgtatcccaag

SEQ ID NO: 4975371 - DNA, 25 bp, Homo sapien
tgctaaatcccctttcggtagtata

SEQ ID NO: 4975372 - DNA, 25 bp, Homo sapien
cccagcgatgataaattaacctctc

SEQ ID NO: 4975373 - DNA, 25 bp, Homo sapien
tatcccaagtgtggcagtaaagctc

SEQ ID NO: 4975374 - DNA, 25 bp, Homo sapien
tagcaaacctaatgtttaatacaaa

SEQ ID NO: 4975375 - DNA, 25 bp, Homo sapien
taatgtttaatacaaaccaattcac

SEQ ID NO: 4975376 - DNA, 25 bp, Homo sapien
ctaatgtttaatacaaaccaattca

SEQ ID NO: 4975377 - DNA, 25 bp, Homo sapien
ccaatgacgtcatatgcgggagata

SEQ ID NO: 4975378 - DNA, 25 bp, Homo sapien
tgaggaatcctgcacggagaagtca

SEQ ID NO: 4975379 - DNA, 25 bp, Homo sapien
ccattgtctaagtcccgctgggagg

SEQ ID NO: 4975380 - DNA, 25 bp, Homo sapien
cagaaagtttccacgtgcagacatg

SEQ ID NO: 4975381 - DNA, 25 bp, Homo sapien
catttgagggtcttggtggattaac

SEQ ID NO: 4975382 - DNA, 25 bp, Homo sapien
ggtggattaactggccaatcagatt

SEQ ID NO: 4975383 - DNA, 25 bp, Homo sapien
gattaactggccaatcagatttcat

SEQ ID NO: 4975384 - DNA, 25 bp, Homo sapien
ttttggatggttcacatttgagggt

SEQ ID NO: 4975385 - DNA, 25 bp, Homo sapien
tttcagtggccaagcgacaaccatg

SEQ ID NO: 4975386 - DNA, 25 bp, Homo sapien
tgggaattacatcactcaagggccg

SEQ ID NO: 4975387 - DNA, 25 bp, Homo sapien
gtcacaaagccaagagagttctcct

SEQ ID NO: 4975388 - DNA, 25 bp, Homo sapien
gataataataagcagtgcccagccc

SEQ ID NO: 4975389 - DNA, 25 bp, Homo sapien
gcctccagcagcttgaatagtgtat

SEQ ID NO: 4975390 - DNA, 25 bp, Homo sapien
ctcttctatgaaatccagtctcacc

SEQ ID NO: 4975391 - DNA, 25 bp, Homo sapien
cttgaatagtgtattgcttgaagag

SEQ ID NO: 4975392 - DNA, 25 bp, Homo sapien
tcttctatgaaatccagtctcacca

SEQ ID NO: 4975393 - DNA, 25 bp, Homo sapien
cagccatccccatgtgtcgctgtgg

SEQ ID NO: 4975394 - DNA, 25 bp, Homo sapien
agcctgattccctgacaagctgtgg

SEQ ID NO: 4975395 - DNA, 25 bp, Homo sapien
gcttcttattcttcaagactccgtt

SEQ ID NO: 4975396 - DNA, 25 bp, Homo sapien
tctggtcttactcagtctcataaca

SEQ ID NO: 4975397 - DNA, 25 bp, Homo sapien
atcaacatgggcctcctcttgtatg

SEQ ID NO: 4975398 - DNA, 25 bp, Homo sapien
tcaacatgggcctcctcttgtatgt

SEQ ID NO: 4975399 - DNA, 25 bp, Homo sapien
caacatgggcctcctcttgtatgtt

SEQ ID NO: 4975400 - DNA, 25 bp, Homo sapien
aatcaacatgggcctcctcttgtat

SEQ ID NO: 4975401 - DNA, 25 bp, Homo sapien
cacttagtaacaagaccacacatgg

SEQ ID NO: 4975402 - DNA, 25 bp, Homo sapien
acacttagtaacaagaccacacatg

SEQ ID NO: 4975403 - DNA, 25 bp, Homo sapien
tagaagtaagtatagcaactcatgc

SEQ ID NO: 4975404 - DNA, 25 bp, Homo sapien
tcttatagtttccatcttgaaagct

SEQ ID NO: 4975405 - DNA, 25 bp, Homo sapien
ttgagggtaacttgaggcttgtaaa

SEQ ID NO: 4975406 - DNA, 25 bp, Homo sapien
taaattattacatcctcttactgaa

SEQ ID NO: 4975407 - DNA, 25 bp, Homo sapien
tgaggaactagaagaagccacgaca

SEQ ID NO: 4975408 - DNA, 25 bp, Homo sapien
cagctccaggcttcaaagatcagca

SEQ ID NO: 4975409 - DNA, 25 bp, Homo sapien
aagccacgacagcaggctcctcggg

SEQ ID NO: 4975410 - DNA, 25 bp, Homo sapien
caggcttcaaagatcagcacaggca

SEQ ID NO: 4975411 - DNA, 25 bp, Homo sapien
actttgaacgtgctggaaacagtgc

SEQ ID NO: 4975412 - DNA, 25 bp, Homo sapien
cattgggttgataacgcctagggcc

SEQ ID NO: 4975413 - DNA, 25 bp, Homo sapien
tttcttaagaggaagcggattgcct

SEQ ID NO: 4975414 - DNA, 25 bp, Homo sapien
ccaggaattctggactacgatgtga

SEQ ID NO: 4975415 - DNA, 25 bp, Homo sapien
aggctccatttccagacaggtgtca

SEQ ID NO: 4975416 - DNA, 25 bp, Homo sapien
tttccagacaggtgtcagacaaggg

SEQ ID NO: 4975417 - DNA, 25 bp, Homo sapien
tctaggcattaccagctgggccata

SEQ ID NO: 4975418 - DNA, 25 bp, Homo sapien
gagccagggagggactcaagaatct

SEQ ID NO: 4975419 - DNA, 25 bp, Homo sapien
ggaatgagttgaaaatcgccatcac

SEQ ID NO: 4975420 - DNA, 25 bp, Homo sapien
gtctcctgtcaggcaaaatgcatgt

SEQ ID NO: 4975421 - DNA, 25 bp, Homo sapien
tcggctgtttgtaacgggaatgagt

SEQ ID NO: 4975422 - DNA, 25 bp, Homo sapien
cttgaactcggtaggaaggtcggct

SEQ ID NO: 4975423 - DNA, 25 bp, Homo sapien
ttaattagctgctggcgcgcaagcg

SEQ ID NO: 4975424 - DNA, 25 bp, Homo sapien
tgtagaccaagtccaagttcgatgg

SEQ ID NO: 4975425 - DNA, 25 bp, Homo sapien
gctgggtgctgacgtgctgctttcc

SEQ ID NO: 4975426 - DNA, 25 bp, Homo sapien
taggcctcttgaccccttagcgatg

SEQ ID NO: 4975427 - DNA, 25 bp, Homo sapien
agtcctcatccaagcagtgtccacg

SEQ ID NO: 4975428 - DNA, 25 bp, Homo sapien
accacacaaggacaccggggaggca

SEQ ID NO: 4975429 - DNA, 25 bp, Homo sapien
aggtgacgatgggtaaagcgttcca

SEQ ID NO: 4975430 - DNA, 25 bp, Homo sapien
ggcaggaaaggtgacgatgggtaaa

SEQ ID NO: 4975431 - DNA, 25 bp, Homo sapien
tgacgatgggtaaagcgttccaaat

SEQ ID NO: 4975432 - DNA, 25 bp, Homo sapien
ggctgacgtgaccaactcgtctgcc

SEQ ID NO: 4975433 - DNA, 25 bp, Homo sapien
cctcttcccaggctgacgtgaccaa

SEQ ID NO: 4975434 - DNA, 25 bp, Homo sapien
ttcccaggctgacgtgaccaactcg

SEQ ID NO: 4975435 - DNA, 25 bp, Homo sapien
ccaggctgacgtgaccaactcgtct

SEQ ID NO: 4975436 - DNA, 25 bp, Homo sapien
ggttaattgatgctctaagtctctc

SEQ ID NO: 4975437 - DNA, 25 bp, Homo sapien
gacttggtggtcagccgttctctcc

SEQ ID NO: 4975438 - DNA, 25 bp, Homo sapien
attcttctaaacatccgggtcgctg

SEQ ID NO: 4975439 - DNA, 25 bp, Homo sapien
cagcgcccaagtcaaagcgcttttc

SEQ ID NO: 4975440 - DNA, 25 bp, Homo sapien
cattacataaaacaggagccagtga

SEQ ID NO: 4975441 - DNA, 25 bp, Homo sapien
ctgagctgggcgagatcgtctgtca

SEQ ID NO: 4975442 - DNA, 25 bp, Homo sapien
cccaagagccaatttattttaggca

SEQ ID NO: 4975443 - DNA, 25 bp, Homo sapien
tgtctgttcacattgctgagctggg

SEQ ID NO: 4975444 - DNA, 25 bp, Homo sapien
caagctgtcatctaagcccagggag

SEQ ID NO: 4975445 - DNA, 25 bp, Homo sapien
gaagtatatgcccaggcatttaaag

SEQ ID NO: 4975446 - DNA, 25 bp, Homo sapien
ttccatcagccgcagagttcaagct

SEQ ID NO: 4975447 - DNA, 25 bp, Homo sapien
gcatttaaagcggatctttcctctt

SEQ ID NO: 4975448 - DNA, 25 bp, Homo sapien
aagatgaggaatgtatttgatgctc

SEQ ID NO: 4975449 - DNA, 25 bp, Homo sapien
agagggcaagatgaggaatgtattt

SEQ ID NO: 4975450 - DNA, 25 bp, Homo sapien
gggcaagatgaggaatgtatttgat

SEQ ID NO: 4975451 - DNA, 25 bp, Homo sapien
tagagagggcaagatgaggaatgta

SEQ ID NO: 4975452 - DNA, 25 bp, Homo sapien
ctcttaagctgtgttgctggaatct

SEQ ID NO: 4975453 - DNA, 25 bp, Homo sapien
taagctgtgttgctggaatctggac

SEQ ID NO: 4975454 - DNA, 25 bp, Homo sapien
cttaagctgtgttgctggaatctgg

SEQ ID NO: 4975455 - DNA, 25 bp, Homo sapien
tttccattcaagctggggcccatca

SEQ ID NO: 4975456 - DNA, 25 bp, Homo sapien
gtggccattcactgtcccggcacag

SEQ ID NO: 4975457 - DNA, 25 bp, Homo sapien
tccacatgacatcgaaacgcttcct

SEQ ID NO: 4975458 - DNA, 25 bp, Homo sapien
catgacatcgaaacgcttcctgcag

SEQ ID NO: 4975459 - DNA, 25 bp, Homo sapien
agtggccattcactgtcccggcaca

SEQ ID NO: 4975460 - DNA, 25 bp, Homo sapien
cgggcttgaccccacctctacctgt

SEQ ID NO: 4975461 - DNA, 25 bp, Homo sapien
tatttccctcgtagcacctgctgca

SEQ ID NO: 4975462 - DNA, 25 bp, Homo sapien
tatagttggaattcgctgcttgttt

SEQ ID NO: 4975463 - DNA, 25 bp, Homo sapien
acagggtcccttggtctcagcgaca

SEQ ID NO: 4975464 - DNA, 25 bp, Homo sapien
gcctaagagaaccatctcttgctga

SEQ ID NO: 4975465 - DNA, 25 bp, Homo sapien
tctcagcaaggggttttatgaacat

SEQ ID NO: 4975466 - DNA, 25 bp, Homo sapien
ctctcagcaaggggttttatgaaca

SEQ ID NO: 4975467 - DNA, 25 bp, Homo sapien
gacagcagacagcctaagagaacca

SEQ ID NO: 4975468 - DNA, 25 bp, Homo sapien
tcctagcttgtgagtgctgtcagcc

SEQ ID NO: 4975469 - DNA, 25 bp, Homo sapien
tgcctcctagcttgtgagtgctgtc

SEQ ID NO: 4975470 - DNA, 25 bp, Homo sapien
tctgcctgcctcctagcttgtgagt

SEQ ID NO: 4975471 - DNA, 25 bp, Homo sapien
gggcgggcctgacatgggcaccaca

SEQ ID NO: 4975472 - DNA, 25 bp, Homo sapien
ggaacgaggcaccaacagaggcttg

SEQ ID NO: 4975473 - DNA, 25 bp, Homo sapien
gagcacagagggtgttcccaccctg

SEQ ID NO: 4975474 - DNA, 25 bp, Homo sapien
ttgatggaaagccatgccgagatcc

SEQ ID NO: 4975475 - DNA, 25 bp, Homo sapien
taattctcccagtgcataatggctt

SEQ ID NO: 4975476 - DNA, 25 bp, Homo sapien
ctagagcaggaactctcccttctct

SEQ ID NO: 4975477 - DNA, 25 bp, Homo sapien
tagagcaggaactctcccttctctg

SEQ ID NO: 4975478 - DNA, 25 bp, Homo sapien
gggatggagccctccgaacttggaa

SEQ ID NO: 4975479 - DNA, 25 bp, Homo sapien
tgttggtacccaactgaaagggatg

SEQ ID NO: 4975480 - DNA, 25 bp, Homo sapien
aacagatgtccgtgaaatgtgaccc

SEQ ID NO: 4975481 - DNA, 25 bp, Homo sapien
cggccgccattttgaaacgaacaga

SEQ ID NO: 4975482 - DNA, 25 bp, Homo sapien
tgggtaaaacgtcgcttgagaagag

SEQ ID NO: 4975483 - DNA, 25 bp, Homo sapien
aaacgtcgcttgagaagagcgggta

SEQ ID NO: 4975484 - DNA, 25 bp, Homo sapien
acagtgggtaaaacgtcgcttgaga

SEQ ID NO: 4975485 - DNA, 25 bp, Homo sapien
taaaacgtcgcttgagaagagcggg

SEQ ID NO: 4975486 - DNA, 25 bp, Homo sapien
ctaaacctgaggcttctcggttaca

SEQ ID NO: 4975487 - DNA, 25 bp, Homo sapien
cttctcggttacatagcccagcgcg

SEQ ID NO: 4975488 - DNA, 25 bp, Homo sapien
ggttacatagcccagcgcgggccga

SEQ ID NO: 4975489 - DNA, 25 bp, Homo sapien
agcgcgggccgaccattttttccat

SEQ ID NO: 4975490 - DNA, 25 bp, Homo sapien
ccatatttaatcaacgggaagctaa

SEQ ID NO: 4975491 - DNA, 25 bp, Homo sapien
catatttaatcaacgggaagctaaa

SEQ ID NO: 4975492 - DNA, 25 bp, Homo sapien
ccccaaggcttggcaagccctgggt

SEQ ID NO: 4975493 - DNA, 25 bp, Homo sapien
tatttaatcaacgggaagctaaaca

SEQ ID NO: 4975494 - DNA, 25 bp, Homo sapien
ggcttggcgcagttgacaaattctc

SEQ ID NO: 4975495 - DNA, 25 bp, Homo sapien
ttggagaaatgctccgaacgctcca

SEQ ID NO: 4975496 - DNA, 25 bp, Homo sapien
caagtaatccctcaaaagattggag

SEQ ID NO: 4975497 - DNA, 25 bp, Homo sapien
gggtcctccgagaagattctcccat

SEQ ID NO: 4975498 - DNA, 25 bp, Homo sapien
tgttttgcagagctcttttgataaa

SEQ ID NO: 4975499 - DNA, 25 bp, Homo sapien
tacttagaaatatgcctcccactag

SEQ ID NO: 4975500 - DNA, 25 bp, Homo sapien
tcagtaaactcgctagaatcaaagc

SEQ ID NO: 4975501 - DNA, 25 bp, Homo sapien
gaaccatcaaaagagtaattctggc

SEQ ID NO: 4975502 - DNA, 25 bp, Homo sapien
catatggacccattgtttaactccc

SEQ ID NO: 4975503 - DNA, 25 bp, Homo sapien
tatgtagtgttctccaatcccaccc

SEQ ID NO: 4975504 - DNA, 25 bp, Homo sapien
cctttagatagaaacccagtagtag

SEQ ID NO: 4975505 - DNA, 25 bp, Homo sapien
aggttgattccacaggctgatttgc

SEQ ID NO: 4975506 - DNA, 25 bp, Homo sapien
ggcagatggtaagacggagaccagc

SEQ ID NO: 4975507 - DNA, 25 bp, Homo sapien
aaaccagttttaagatggggcagag

SEQ ID NO: 4975508 - DNA, 25 bp, Homo sapien
aagtaatgcagggcagatggtaaga

SEQ ID NO: 4975509 - DNA, 25 bp, Homo sapien
accagttttaagatggggcagagag

SEQ ID NO: 4975510 - DNA, 25 bp, Homo sapien
actggaggagactagcatctgattt

SEQ ID NO: 4975511 - DNA, 25 bp, Homo sapien
gatttaggtttctccatgggttctc

SEQ ID NO: 4975512 - DNA, 25 bp, Homo sapien
catctgatttaggtttctccatggg

SEQ ID NO: 4975513 - DNA, 25 bp, Homo sapien
tcagggtccagggatagtctcagga

SEQ ID NO: 4975514 - DNA, 25 bp, Homo sapien
gactcagatgtccaaatgttctgac

SEQ ID NO: 4975515 - DNA, 25 bp, Homo sapien
tatgagacctggagacaatggactc

SEQ ID NO: 4975516 - DNA, 25 bp, Homo sapien
tgttctgacgtttaccggaggcttc

SEQ ID NO: 4975517 - DNA, 25 bp, Homo sapien
tgaggagaaatgacaaacaatgggc

SEQ ID NO: 4975518 - DNA, 25 bp, Homo sapien
gggcagccaggaatgggcaccacca

SEQ ID NO: 4975519 - DNA, 25 bp, Homo sapien
aggccgatggcagcccctgcatttc

SEQ ID NO: 4975520 - DNA, 25 bp, Homo sapien
agcccctgcatttccaggaaagcct

SEQ ID NO: 4975521 - DNA, 25 bp, Homo sapien
ggttcctcctcagactcagagtggg

SEQ ID NO: 4975522 - DNA, 25 bp, Homo sapien
tcgccagcacttgcacactttattt

SEQ ID NO: 4975523 - DNA, 25 bp, Homo sapien
cctgcgttgccatcaccaatgtggg

SEQ ID NO: 4975524 - DNA, 25 bp, Homo sapien
gagagaaagtgctgtcacctgcgtt

SEQ ID NO: 4975525 - DNA, 25 bp, Homo sapien
gggcctcgccagcacttgcacactt

SEQ ID NO: 4975526 - DNA, 25 bp, Homo sapien
accatgacttggtgggtaggtgacc

SEQ ID NO: 4975527 - DNA, 25 bp, Homo sapien
ccttggatggtaggcgaccatgact

SEQ ID NO: 4975528 - DNA, 25 bp, Homo sapien
gacggtggcttggatggtagatgac

SEQ ID NO: 4975529 - DNA, 25 bp, Homo sapien
catggtcatcgctctgtgcctgtct

SEQ ID NO: 4975530 - DNA, 25 bp, Homo sapien
gtccacctatcctggtgacctgagt

SEQ ID NO: 4975531 - DNA, 25 bp, Homo sapien
gatgtccacctatcctggtgacctg

SEQ ID NO: 4975532 - DNA, 25 bp, Homo sapien
ggatgtccacctatcctggtgacct

SEQ ID NO: 4975533 - DNA, 25 bp, Homo sapien
tgtccacctatcctggtgacctgag

SEQ ID NO: 4975534 - DNA, 25 bp, Homo sapien
aacaggggaaaaagctggcagcgac

SEQ ID NO: 4975535 - DNA, 25 bp, Homo sapien
ggaacaacaggggaaaaagctggca

SEQ ID NO: 4975536 - DNA, 25 bp, Homo sapien
agggtgggaagacaaggaacaacag

SEQ ID NO: 4975537 - DNA, 25 bp, Homo sapien
gggaaaaagctggcagcgacaagtc

SEQ ID NO: 4975538 - DNA, 25 bp, Homo sapien
ccagcaagggcaggtccccaacaag

SEQ ID NO: 4975539 - DNA, 25 bp, Homo sapien
atttggggcaggagttacaacagga

SEQ ID NO: 4975540 - DNA, 25 bp, Homo sapien
gcaggagttacaacaggagggagct

SEQ ID NO: 4975541 - DNA, 25 bp, Homo sapien
gggagctggaatgatgggtgccagc

SEQ ID NO: 4975542 - DNA, 25 bp, Homo sapien
cctcgtgttggtgatgctactgagc

SEQ ID NO: 4975543 - DNA, 25 bp, Homo sapien
tcgtcagtgagtcggtccttcatct

SEQ ID NO: 4975544 - DNA, 25 bp, Homo sapien
aaagaatgggataaccagtgcacac

SEQ ID NO: 4975545 - DNA, 25 bp, Homo sapien
taaaccacttggatgtactacctat

SEQ ID NO: 4975546 - DNA, 25 bp, Homo sapien
gtcagccccagtgaactctcaaatg

SEQ ID NO: 4975547 - DNA, 25 bp, Homo sapien
ggaccaatggggtaggtcagcccca

SEQ ID NO: 4975548 - DNA, 25 bp, Homo sapien
cagtggggtaggagtcactctgtcc

SEQ ID NO: 4975549 - DNA, 25 bp, Homo sapien
tcaaatccataggtcccttcatggc

SEQ ID NO: 4975550 - DNA, 25 bp, Homo sapien
cagaccagagtcaaacaatgcctcc

SEQ ID NO: 4975551 - DNA, 25 bp, Homo sapien
atgcctcccaggcagatttagaaac

SEQ ID NO: 4975552 - DNA, 25 bp, Homo sapien
cagagtcaaacaatgcctcccaggc

SEQ ID NO: 4975553 - DNA, 25 bp, Homo sapien
cctcccaggcagatttagaaaccaa

SEQ ID NO: 4975554 - DNA, 25 bp, Homo sapien
catctatcaaagaggagctctggtt

SEQ ID NO: 4975555 - DNA, 25 bp, Homo sapien
gtcatctatcaaagaggagctctgg

SEQ ID NO: 4975556 - DNA, 25 bp, Homo sapien
aagtggcagcacctataatttccca

SEQ ID NO: 4975557 - DNA, 25 bp, Homo sapien
tgaagtggcagcacctataatttcc

SEQ ID NO: 4975558 - DNA, 25 bp, Homo sapien
gtctctttctgctgatggctctccc

SEQ ID NO: 4975559 - DNA, 25 bp, Homo sapien
gaatcccaggcgaagatctcagggt

SEQ ID NO: 4975560 - DNA, 25 bp, Homo sapien
tttgttctgtgaatcagctcgggct

SEQ ID NO: 4975561 - DNA, 25 bp, Homo sapien
tcttgggcattgttgattcctggga

SEQ ID NO: 4975562 - DNA, 25 bp, Homo sapien
tacctatcaacaagagagattcctg

SEQ ID NO: 4975563 - DNA, 25 bp, Homo sapien
gaaaactcaaagatcagccccgaag

SEQ ID NO: 4975564 - DNA, 25 bp, Homo sapien
aaatggtttcctggtctggctgtcc

SEQ ID NO: 4975565 - DNA, 25 bp, Homo sapien
tgaggtgtctacaaaaccccgcagt

SEQ ID NO: 4975566 - DNA, 25 bp, Homo sapien
ggcctcccagctcttttcagcagct

SEQ ID NO: 4975567 - DNA, 25 bp, Homo sapien
aatggaacggcccagccatggcttc

SEQ ID NO: 4975568 - DNA, 25 bp, Homo sapien
ttctcggcctcccagctcttttcag

SEQ ID NO: 4975569 - DNA, 25 bp, Homo sapien
agcagctccccagaatggaacggcc

SEQ ID NO: 4975570 - DNA, 25 bp, Homo sapien
cctttgaggtccaaagggctgtcaa

SEQ ID NO: 4975571 - DNA, 25 bp, Homo sapien
tcctttgaggtccaaagggctgtca

SEQ ID NO: 4975572 - DNA, 25 bp, Homo sapien
ttcctttgaggtccaaagggctgtc

SEQ ID NO: 4975573 - DNA, 25 bp, Homo sapien
ccccgaggagaaggtttatggatca

SEQ ID NO: 4975574 - DNA, 25 bp, Homo sapien
taaacatcaggaacagctcgaccct

SEQ ID NO: 4975575 - DNA, 25 bp, Homo sapien
ccagggactgattgggcccttaaag

SEQ ID NO: 4975576 - DNA, 25 bp, Homo sapien
gagagagatttatgacctggatagc

SEQ ID NO: 4975577 - DNA, 25 bp, Homo sapien
gttcttccaaacagcgttgtccatg

SEQ ID NO: 4975578 - DNA, 25 bp, Homo sapien
tcttccaaacagcgttgtccatgtt

SEQ ID NO: 4975579 - DNA, 25 bp, Homo sapien
tccaaacagcgttgtccatgtttct

SEQ ID NO: 4975580 - DNA, 25 bp, Homo sapien
ctgttcttccaaacagcgttgtcca

SEQ ID NO: 4975581 - DNA, 25 bp, Homo sapien
taaaccacacaccaagacagagcag

SEQ ID NO: 4975582 - DNA, 25 bp, Homo sapien
accaagacagagcagagagagaacg

SEQ ID NO: 4975583 - DNA, 25 bp, Homo sapien
aagacagagcagagagagaacgcac

SEQ ID NO: 4975584 - DNA, 25 bp, Homo sapien
ctaaaccacacaccaagacagagca

SEQ ID NO: 4975585 - DNA, 25 bp, Homo sapien
ccacttgaccatgtgggatggcagg

SEQ ID NO: 4975586 - DNA, 25 bp, Homo sapien
tgtggtcacaaacccttcatagctt

SEQ ID NO: 4975587 - DNA, 25 bp, Homo sapien
ccctcttggaacatcccctgttttg

SEQ ID NO: 4975588 - DNA, 25 bp, Homo sapien
tgcttgattatatttcatccctgtc

SEQ ID NO: 4975589 - DNA, 25 bp, Homo sapien
tatagacatcgggaaacatacatcc

SEQ ID NO: 4975590 - DNA, 25 bp, Homo sapien
ttgcacccaagaaaccagcctgtgg

SEQ ID NO: 4975591 - DNA, 25 bp, Homo sapien
tgatgtcagacgacgagcgtgagca

SEQ ID NO: 4975592 - DNA, 25 bp, Homo sapien
tggcccacgcatgcaggaataaaca

SEQ ID NO: 4975593 - DNA, 25 bp, Homo sapien
tgagtccccttctcggtgaaatccg

SEQ ID NO: 4975594 - DNA, 25 bp, Homo sapien
ccttctcggtgaaatccgatatccc

SEQ ID NO: 4975595 - DNA, 25 bp, Homo sapien
tgaaatccgatatcccctgggatcg

SEQ ID NO: 4975596 - DNA, 25 bp, Homo sapien
gatatcccctgggatcgaccgaggc

SEQ ID NO: 4975597 - DNA, 25 bp, Homo sapien
tgcaggttctaagctgctcagtgtc

SEQ ID NO: 4975598 - DNA, 25 bp, Homo sapien
tttcaaaaggttgaactgcaggttc

SEQ ID NO: 4975599 - DNA, 25 bp, Homo sapien
cactctcctgagcaaatggcaaaca

SEQ ID NO: 4975600 - DNA, 25 bp, Homo sapien
cccagaacaaggcagtgtccagtaa

SEQ ID NO: 4975601 - DNA, 25 bp, Homo sapien
gccacaggaatgccccagacccggg

SEQ ID NO: 4975602 - DNA, 25 bp, Homo sapien
ggccacaggaatgccccagacccgg

SEQ ID NO: 4975603 - DNA, 25 bp, Homo sapien
taggaattccagacctctccgagag

SEQ ID NO: 4975604 - DNA, 25 bp, Homo sapien
tcaaaagctacagaagcccagggat

SEQ ID NO: 4975605 - DNA, 25 bp, Homo sapien
agatgaattcactgtggcccctcag

SEQ ID NO: 4975606 - DNA, 25 bp, Homo sapien
gaaaagggcagcttcctcgaagact

SEQ ID NO: 4975607 - DNA, 25 bp, Homo sapien
tcagacagagactccaagaggtcag

SEQ ID NO: 4975608 - DNA, 25 bp, Homo sapien
tatcccaggggagtgaaatgagctc

SEQ ID NO: 4975609 - DNA, 25 bp, Homo sapien
cctctggccgagtgatcaggagtct

SEQ ID NO: 4975610 - DNA, 25 bp, Homo sapien
caccatcccctgcagaacaggaggg

SEQ ID NO: 4975611 - DNA, 25 bp, Homo sapien
gaagaagatgggagtctgcctggca

SEQ ID NO: 4975612 - DNA, 25 bp, Homo sapien
accagctgccttcgctgcagttaga

SEQ ID NO: 4975613 - DNA, 25 bp, Homo sapien
gagataggggctccatgagacccca

SEQ ID NO: 4975614 - DNA, 25 bp, Homo sapien
aggcgcttccgcaggacaccagctg

SEQ ID NO: 4975615 - DNA, 25 bp, Homo sapien
tcctaacccagaatactgagtggac

SEQ ID NO: 4975616 - DNA, 25 bp, Homo sapien
gactggtgaactacactctcagctg

SEQ ID NO: 4975617 - DNA, 25 bp, Homo sapien
cagaatactgagtggactggtgaac

SEQ ID NO: 4975618 - DNA, 25 bp, Homo sapien
tactgagtggactggtgaactacac

SEQ ID NO: 4975619 - DNA, 25 bp, Homo sapien
tcttctgggagacatgcatgggctg

SEQ ID NO: 4975620 - DNA, 25 bp, Homo sapien
tgtgacagcatcgtaacaaggagct

SEQ ID NO: 4975621 - DNA, 25 bp, Homo sapien
ttccccgaggaactgactggactga

SEQ ID NO: 4975622 - DNA, 25 bp, Homo sapien
cagtcagatgaaaggacaaggacgc

SEQ ID NO: 4975623 - DNA, 25 bp, Homo sapien
cagtatggcttaccatgaaagctgc

SEQ ID NO: 4975624 - DNA, 25 bp, Homo sapien
gcagaaagccttgcatccttacagg

SEQ ID NO: 4975625 - DNA, 25 bp, Homo sapien
tctgccacccataggtcagaacagt

SEQ ID NO: 4975626 - DNA, 25 bp, Homo sapien
gaggccgagctcgtttcagatcgga

SEQ ID NO: 4975627 - DNA, 25 bp, Homo sapien
caattcttttgactttaacatgatg

SEQ ID NO: 4975628 - DNA, 25 bp, Homo sapien
ttcttttgactttaacatgatggac

SEQ ID NO: 4975629 - DNA, 25 bp, Homo sapien
gctcaattcttttgactttaacatg

SEQ ID NO: 4975630 - DNA, 25 bp, Homo sapien
cttttgactttaacatgatggacca

SEQ ID NO: 4975631 - DNA, 25 bp, Homo sapien
cttgacaattccaccaggggcctct

SEQ ID NO: 4975632 - DNA, 25 bp, Homo sapien
tgacaattccaccaggggcctcttc

SEQ ID NO: 4975633 - DNA, 25 bp, Homo sapien
tccctgcattcacgtggtctcaggc

SEQ ID NO: 4975634 - DNA, 25 bp, Homo sapien
tcttccctgcattcacgtggtctca

SEQ ID NO: 4975635 - DNA, 25 bp, Homo sapien
cctgatctacctgcaagctcatggg

SEQ ID NO: 4975636 - DNA, 25 bp, Homo sapien
gaatgtgcccaaaaaacgctgtctg

SEQ ID NO: 4975637 - DNA, 25 bp, Homo sapien
agcaggttcttccaatcagccagga

SEQ ID NO: 4975638 - DNA, 25 bp, Homo sapien
tttctcaagcccctgattctggtca

SEQ ID NO: 4975639 - DNA, 25 bp, Homo sapien
ggaggcagtggtggtaactgaaaga

SEQ ID NO: 4975640 - DNA, 25 bp, Homo sapien
gcaggaggcagtggtggtaactgaa

SEQ ID NO: 4975641 - DNA, 25 bp, Homo sapien
aggcagtggtggtaactgaaagaca

SEQ ID NO: 4975642 - DNA, 25 bp, Homo sapien
ctgcaggaggcagtggtggtaactg

SEQ ID NO: 4975643 - DNA, 25 bp, Homo sapien
ccttggcaaggaagctgtgttgctc

SEQ ID NO: 4975644 - DNA, 25 bp, Homo sapien
gtctgataatatagccttggcaagg

SEQ ID NO: 4975645 - DNA, 25 bp, Homo sapien
gctgtgttgctcttcgcagacccat

SEQ ID NO: 4975646 - DNA, 25 bp, Homo sapien
tgcaatgctgacctcatgtctgata

SEQ ID NO: 4975647 - DNA, 25 bp, Homo sapien
ggagtggtccctgcactcatccatg

SEQ ID NO: 4975648 - DNA, 25 bp, Homo sapien
aggaggagtggtccctgcactcatc

SEQ ID NO: 4975649 - DNA, 25 bp, Homo sapien
gaggagtggtccctgcactcatcca

SEQ ID NO: 4975650 - DNA, 25 bp, Homo sapien
tcaggaggagtggtccctgcactca

SEQ ID NO: 4975651 - DNA, 25 bp, Homo sapien
cgtagagcagatctttcctgttcct

SEQ ID NO: 4975652 - DNA, 25 bp, Homo sapien
gtttatgctgccagaaagagtctga

SEQ ID NO: 4975653 - DNA, 25 bp, Homo sapien
tgggacagtgtgttcgtaagacagg

SEQ ID NO: 4975654 - DNA, 25 bp, Homo sapien
gggatgtttatgctgccagaaagag

SEQ ID NO: 4975655 - DNA, 25 bp, Homo sapien
acagggggatgtttatgctgccaga

SEQ ID NO: 4975656 - DNA, 25 bp, Homo sapien
ctttctgggctgtacccacatggtc

SEQ ID NO: 4975657 - DNA, 25 bp, Homo sapien
tgtacccacatggtctgtccttgtt

SEQ ID NO: 4975658 - DNA, 25 bp, Homo sapien
ttgaggctgcgttgtctccttctct

SEQ ID NO: 4975659 - DNA, 25 bp, Homo sapien
tctctggacactggaatgactcaca

SEQ ID NO: 4975660 - DNA, 25 bp, Homo sapien
cctttgtcataggaactgccatctc

SEQ ID NO: 4975661 - DNA, 25 bp, Homo sapien
ccatctctctgtgtcgacgtcgctg

SEQ ID NO: 4975662 - DNA, 25 bp, Homo sapien
ttttcgtacgctctcccagagcacc

SEQ ID NO: 4975663 - DNA, 25 bp, Homo sapien
gcaggagggagaatgctcatccctt

SEQ ID NO: 4975664 - DNA, 25 bp, Homo sapien
aatgtggcagcttaatgttgctgct

SEQ ID NO: 4975665 - DNA, 25 bp, Homo sapien
ataagcttttgtcctcaaaacccat

SEQ ID NO: 4975666 - DNA, 25 bp, Homo sapien
gggaaacctgaaataggaatggcat

SEQ ID NO: 4975667 - DNA, 25 bp, Homo sapien
ctcttcggacttccccctgagagga

SEQ ID NO: 4975668 - DNA, 25 bp, Homo sapien
gctcctagaggacaggggaaacctg

SEQ ID NO: 4975669 - DNA, 25 bp, Homo sapien
ggaatggcatccaccctccgcagtg

SEQ ID NO: 4975670 - DNA, 25 bp, Homo sapien
acagttggggcatgtgtcctgatgc

SEQ ID NO: 4975671 - DNA, 25 bp, Homo sapien
atgtgtcctgatgccataatttttt

SEQ ID NO: 4975672 - DNA, 25 bp, Homo sapien
tgacagttggggcatgtgtcctgat

SEQ ID NO: 4975673 - DNA, 25 bp, Homo sapien
tcctgatgccataattttttcccca

SEQ ID NO: 4975674 - DNA, 25 bp, Homo sapien
gaatgttctttcctcgactagtgaa

SEQ ID NO: 4975675 - DNA, 25 bp, Homo sapien
ctcttaagcctagcgagaatgttct

SEQ ID NO: 4975676 - DNA, 25 bp, Homo sapien
gggatgagggtaaatgtcttcagta

SEQ ID NO: 4975677 - DNA, 25 bp, Homo sapien
taagcttggcctcttaagcctagcg

SEQ ID NO: 4975678 - DNA, 25 bp, Homo sapien
catgtgacggcctttttaaggatag

SEQ ID NO: 4975679 - DNA, 25 bp, Homo sapien
ttttaaggatagaacatcacgagtc

SEQ ID NO: 4975680 - DNA, 25 bp, Homo sapien
gggaaggcatgtgacggccttttta

SEQ ID NO: 4975681 - DNA, 25 bp, Homo sapien
ggatagaacatcacgagtcatctgg

SEQ ID NO: 4975682 - DNA, 25 bp, Homo sapien
caacaactttggttctccgcttcca

SEQ ID NO: 4975683 - DNA, 25 bp, Homo sapien
caactttggttctccgcttccaatt

SEQ ID NO: 4975684 - DNA, 25 bp, Homo sapien
acaactttggttctccgcttccaat

SEQ ID NO: 4975685 - DNA, 25 bp, Homo sapien
ctttggttctccgcttccaattatt

SEQ ID NO: 4975686 - DNA, 25 bp, Homo sapien
tccgggagcgttctcctccatcctc

SEQ ID NO: 4975687 - DNA, 25 bp, Homo sapien
ggtgcttcacatggccctgtctgca

SEQ ID NO: 4975688 - DNA, 25 bp, Homo sapien
tgcaggttgcgccaccgctttcatc

SEQ ID NO: 4975689 - DNA, 25 bp, Homo sapien
tctgggaagtgcctgagtgtggcct

SEQ ID NO: 4975690 - DNA, 25 bp, Homo sapien
tccagtacaggatttacgctgccct

SEQ ID NO: 4975691 - DNA, 25 bp, Homo sapien
cagtacaggatttacgctgccctga

SEQ ID NO: 4975692 - DNA, 25 bp, Homo sapien
caatccagtacaggatttacgctgc

SEQ ID NO: 4975693 - DNA, 25 bp, Homo sapien
gtacaggatttacgctgccctgacc

SEQ ID NO: 4975694 - DNA, 25 bp, Homo sapien
ggctctgtagcaaaggaacacattt

SEQ ID NO: 4975695 - DNA, 25 bp, Homo sapien
cggctctgtagcaaaggaacacatt

SEQ ID NO: 4975696 - DNA, 25 bp, Homo sapien
ccggctctgtagcaaaggaacacat

SEQ ID NO: 4975697 - DNA, 25 bp, Homo sapien
gccctggctagaaagaccatgcatt

SEQ ID NO: 4975698 - DNA, 25 bp, Homo sapien
cctggctagaaagaccatgcattcc

SEQ ID NO: 4975699 - DNA, 25 bp, Homo sapien
aggccctggctagaaagaccatgca

SEQ ID NO: 4975700 - DNA, 25 bp, Homo sapien
tggctagaaagaccatgcattccat

SEQ ID NO: 4975701 - DNA, 25 bp, Homo sapien
aggtgcccgggcctttggttctctg

SEQ ID NO: 4975702 - DNA, 25 bp, Homo sapien
gaacgtgttcactaaagtagctcat

SEQ ID NO: 4975703 - DNA, 25 bp, Homo sapien
aagaaagggccataggtgaggtgcc

SEQ ID NO: 4975704 - DNA, 25 bp, Homo sapien
ttccctcaagatttgctactcccag

SEQ ID NO: 4975705 - DNA, 25 bp, Homo sapien
ctgcaccgcgatcgacgctgcggag

SEQ ID NO: 4975706 - DNA, 25 bp, Homo sapien
caaatgagcgattcgcccgctggat

SEQ ID NO: 4975707 - DNA, 25 bp, Homo sapien
ggctcccgatcagggtcctgaagat

SEQ ID NO: 4975708 - DNA, 25 bp, Homo sapien
tcctgaagatgctgagcgctcacac

SEQ ID NO: 4975709 - DNA, 25 bp, Homo sapien
tcctgcagggattatgccgcgaccc

SEQ ID NO: 4975710 - DNA, 25 bp, Homo sapien
ttcctgcagggattatgccgcgacc

SEQ ID NO: 4975711 - DNA, 25 bp, Homo sapien
gaagccggccccttacattttgcga

SEQ ID NO: 4975712 - DNA, 25 bp, Homo sapien
agatccctccaaagcagaccggtgg

SEQ ID NO: 4975713 - DNA, 25 bp, Homo sapien
taagtgcattaacggcccacatgag

SEQ ID NO: 4975714 - DNA, 25 bp, Homo sapien
tatggacagagactagcttcagcct

SEQ ID NO: 4975715 - DNA, 25 bp, Homo sapien
ttctgaacgcgaaggattcctacct

SEQ ID NO: 4975716 - DNA, 25 bp, Homo sapien
tgtaaaagtggattttcctctgggc

SEQ ID NO: 4975717 - DNA, 25 bp, Homo sapien
tctgggcccagatgcgacgtgctaa

SEQ ID NO: 4975718 - DNA, 25 bp, Homo sapien
ctggcgggcagagacgaaacgcctt

SEQ ID NO: 4975719 - DNA, 25 bp, Homo sapien
tttgctgagaagatgcgacgatgac

SEQ ID NO: 4975720 - DNA, 25 bp, Homo sapien
gaagccattctcagtccggaggagc

SEQ ID NO: 4975721 - DNA, 25 bp, Homo sapien
tcagccatcgctgggttgtcgacct

SEQ ID NO: 4975722 - DNA, 25 bp, Homo sapien
cacctgctgagagggttgcttctca

SEQ ID NO: 4975723 - DNA, 25 bp, Homo sapien
caacgtgaggcccttagactaggag

SEQ ID NO: 4975724 - DNA, 25 bp, Homo sapien
tactttgtggcgttgcaggatccca

SEQ ID NO: 4975725 - DNA, 25 bp, Homo sapien
tagaaatgccccaatgtgatgctgg

SEQ ID NO: 4975726 - DNA, 25 bp, Homo sapien
tagaaagacgaagtgcactagcccc

SEQ ID NO: 4975727 - DNA, 25 bp, Homo sapien
aattgtcaagtgtcgtggcgtgcgc

SEQ ID NO: 4975728 - DNA, 25 bp, Homo sapien
aacgaaccaggttcggcctaatgca

SEQ ID NO: 4975729 - DNA, 25 bp, Homo sapien
caacgccttggaaaggttcgccctg

SEQ ID NO: 4975730 - DNA, 25 bp, Homo sapien
tgcagaaggaaatccggagcaatcc

SEQ ID NO: 4975731 - DNA, 25 bp, Homo sapien
tcactttcgggaacctcagtcccag

SEQ ID NO: 4975732 - DNA, 25 bp, Homo sapien
tcttctcgcgtgaattgatggcgtc

SEQ ID NO: 4975733 - DNA, 25 bp, Homo sapien
tgatggcgtcatcgaagcgacggcc

SEQ ID NO: 4975734 - DNA, 25 bp, Homo sapien
gacggttttcttgctcgtgggctcg

SEQ ID NO: 4975735 - DNA, 25 bp, Homo sapien
ggctctgccactccagcatctgaaa

SEQ ID NO: 4975736 - DNA, 25 bp, Homo sapien
ttgaaactctgctcgcctgctggct

SEQ ID NO: 4975737 - DNA, 25 bp, Homo sapien
tggctctgccactccagcatctgaa

SEQ ID NO: 4975738 - DNA, 25 bp, Homo sapien
gctctgccactccagcatctgaaag

SEQ ID NO: 4975739 - DNA, 25 bp, Homo sapien
gaccccattttcattcggatctgag

SEQ ID NO: 4975740 - DNA, 25 bp, Homo sapien
cctagaaagcaggtcaaatggactc

SEQ ID NO: 4975741 - DNA, 25 bp, Homo sapien
tgggatggctcacctatagcttcag

SEQ ID NO: 4975742 - DNA, 25 bp, Homo sapien
gaagcaatactagctgcccgactag

SEQ ID NO: 4975743 - DNA, 25 bp, Homo sapien
tagaagagcagcagtccacactttg

SEQ ID NO: 4975744 - DNA, 25 bp, Homo sapien
tcagagcagactactgaccgagaca

SEQ ID NO: 4975745 - DNA, 25 bp, Homo sapien
tcgccgtcgtcatattcctcccggt

SEQ ID NO: 4975746 - DNA, 25 bp, Homo sapien
ctcccggtcccgagtgtcagagcag

SEQ ID NO: 4975747 - DNA, 25 bp, Homo sapien
tactgaccgagacactactttcggc

SEQ ID NO: 4975748 - DNA, 25 bp, Homo sapien
tttccaggagcaacctgaaaaactc

SEQ ID NO: 4975749 - DNA, 25 bp, Homo sapien
tgctgtcattaaggagagggagaaa

SEQ ID NO: 4975750 - DNA, 25 bp, Homo sapien
aatgtagagtgttacctccaactca

SEQ ID NO: 4975751 - DNA, 25 bp, Homo sapien
taaatcatgggcttgacctttgacc

SEQ ID NO: 4975752 - DNA, 25 bp, Homo sapien
ggctggcttaattagggatgctgtc

SEQ ID NO: 4975753 - DNA, 25 bp, Homo sapien
cagaagttttgggagcattgagcct

SEQ ID NO: 4975754 - DNA, 25 bp, Homo sapien
tagaaagatacagtgttagctcccc

SEQ ID NO: 4975755 - DNA, 25 bp, Homo sapien
gtggtcatttcccttggccgggcgc

SEQ ID NO: 4975756 - DNA, 25 bp, Homo sapien
gcaacaaaatgtgcctgggagtgat

SEQ ID NO: 4975757 - DNA, 25 bp, Homo sapien
ccaagactagcatagggagtatcca

SEQ ID NO: 4975758 - DNA, 25 bp, Homo sapien
gcctcagtagagtcaagtcctgctg

SEQ ID NO: 4975759 - DNA, 25 bp, Homo sapien
gggcctctccggtactaacatcctg

SEQ ID NO: 4975760 - DNA, 25 bp, Homo sapien
gatagcttgtcccatgagcacagaa

SEQ ID NO: 4975761 - DNA, 25 bp, Homo sapien
tgtgtctgtgaatgtaaccagtact

SEQ ID NO: 4975762 - DNA, 25 bp, Homo sapien
tattcagtagggttccagccactgc

SEQ ID NO: 4975763 - DNA, 25 bp, Homo sapien
cgtaaatagtgaaagtaagatggtc

SEQ ID NO: 4975764 - DNA, 25 bp, Homo sapien
gataaactatatcttggctagtggc

SEQ ID NO: 4975765 - DNA, 25 bp, Homo sapien
ttctgcctcacaaaagtcccttggg

SEQ ID NO: 4975766 - DNA, 25 bp, Homo sapien
cccgagtataggatgcgtttctgcc

SEQ ID NO: 4975767 - DNA, 25 bp, Homo sapien
gaatcacgccatgtctttagggaaa

SEQ ID NO: 4975768 - DNA, 25 bp, Homo sapien
gcttatgtgcctatgagaaacttcc

SEQ ID NO: 4975769 - DNA, 25 bp, Homo sapien
tcacacggcgcaagctgggcggaac

SEQ ID NO: 4975770 - DNA, 25 bp, Homo sapien
ctgggagtcgggtgcgcattgcggg

SEQ ID NO: 4975771 - DNA, 25 bp, Homo sapien
gcattgcgggcggtgaacgagcgcg

SEQ ID NO: 4975772 - DNA, 25 bp, Homo sapien
agcatgtcggccgagctgggagtcg

SEQ ID NO: 4975773 - DNA, 25 bp, Homo sapien
tggtcggccgcctagggccaccgaa

SEQ ID NO: 4975774 - DNA, 25 bp, Homo sapien
cctaggtgtcgtggccacttgcgca

SEQ ID NO: 4975775 - DNA, 25 bp, Homo sapien
tcgttggagcagagggtaccgctac

SEQ ID NO: 4975776 - DNA, 25 bp, Homo sapien
aaaatgacttagtgcctaggtgtcg

SEQ ID NO: 4975777 - DNA, 25 bp, Homo sapien
gtcgatagccttggcggatgcgagg

SEQ ID NO: 4975778 - DNA, 25 bp, Homo sapien
gggtcgatagccttggcggatgcga

SEQ ID NO: 4975779 - DNA, 25 bp, Homo sapien
tcgtttcggggtcgatagccttggc

SEQ ID NO: 4975780 - DNA, 25 bp, Homo sapien
cgcgtcgtttcggggtcgatagcct

SEQ ID NO: 4975781 - DNA, 25 bp, Homo sapien
cgcggaggccagagacgcccgagat

SEQ ID NO: 4975782 - DNA, 25 bp, Homo sapien
gcccgagatcgcgtgtgtggcagcg

SEQ ID NO: 4975783 - DNA, 25 bp, Homo sapien
tgcccacggatggtaaggggagacg

SEQ ID NO: 4975784 - DNA, 25 bp, Homo sapien
ggtacaagagcaccccgcggaggcc

SEQ ID NO: 4975785 - DNA, 25 bp, Homo sapien
tcagggaaactctcaggcagatggg

SEQ ID NO: 4975786 - DNA, 25 bp, Homo sapien
tgaacaagtcaggtaactattccgg

SEQ ID NO: 4975787 - DNA, 25 bp, Homo sapien
ccctaataaacatcaccttggaggt

SEQ ID NO: 4975788 - DNA, 25 bp, Homo sapien
tgtgattctcggtgattctccaaga

SEQ ID NO: 4975789 - DNA, 25 bp, Homo sapien
catcatgttcatacctgtatcaaag

SEQ ID NO: 4975790 - DNA, 25 bp, Homo sapien
ttttgactgttgcaaataagttgct

SEQ ID NO: 4975791 - DNA, 25 bp, Homo sapien
tcattcagtgtagtgattcatcatg

SEQ ID NO: 4975792 - DNA, 25 bp, Homo sapien
cctgttgatgaatgttgggttgctt

SEQ ID NO: 4975793 - DNA, 25 bp, Homo sapien
cctgcactcctaggataaatcctac

SEQ ID NO: 4975794 - DNA, 25 bp, Homo sapien
gaaggctgggtctctattaatctta

SEQ ID NO: 4975795 - DNA, 25 bp, Homo sapien
tgtgtgaagtagtgtaacacacctt

SEQ ID NO: 4975796 - DNA, 25 bp, Homo sapien
taaacagaagtacactattgtaaag

SEQ ID NO: 4975797 - DNA, 25 bp, Homo sapien
cctctgggacctacagtgatgagaa

SEQ ID NO: 4975798 - DNA, 25 bp, Homo sapien
tacgtcgtctaaattgctgctctgg

SEQ ID NO: 4975799 - DNA, 25 bp, Homo sapien
tcgtggaagtcagagggattcccct

SEQ ID NO: 4975800 - DNA, 25 bp, Homo sapien
gattcttccctagccggtagatacg

SEQ ID NO: 4975801 - DNA, 25 bp, Homo sapien
gggcaccgcagcagggagcatgagc

SEQ ID NO: 4975802 - DNA, 25 bp, Homo sapien
cgcagggcaccgcagcagggagcat

SEQ ID NO: 4975803 - DNA, 25 bp, Homo sapien
ggcaccgcagcagggagcatgagca

SEQ ID NO: 4975804 - DNA, 25 bp, Homo sapien
ccaccgcagggcaccgcagcaggga

SEQ ID NO: 4975805 - DNA, 25 bp, Homo sapien
agtcagaggcgaccccgttcacagt

SEQ ID NO: 4975806 - DNA, 25 bp, Homo sapien
atttaccgcatggaaagccctcccg

SEQ ID NO: 4975807 - DNA, 25 bp, Homo sapien
gggtccctgtctgcggagagcctcc

SEQ ID NO: 4975808 - DNA, 25 bp, Homo sapien
gattttcattcgcagttttccagga

SEQ ID NO: 4975809 - DNA, 25 bp, Homo sapien
tgcagaccactgtgagccccagtat

SEQ ID NO: 4975810 - DNA, 25 bp, Homo sapien
cactgtgagccccagtattactcgg

SEQ ID NO: 4975811 - DNA, 25 bp, Homo sapien
aggaaggtgcagaccactgtgagcc

SEQ ID NO: 4975812 - DNA, 25 bp, Homo sapien
cccagtattactcggcagcagctga

SEQ ID NO: 4975813 - DNA, 25 bp, Homo sapien
ctctgagttgatcgctgtccttcca

SEQ ID NO: 4975814 - DNA, 25 bp, Homo sapien
cgtggaggcaccggctgctcccctc

SEQ ID NO: 4975815 - DNA, 25 bp, Homo sapien
tggaggcaccggctgctcccctcag

SEQ ID NO: 4975816 - DNA, 25 bp, Homo sapien
tgagttgatcgctgtccttccactc

SEQ ID NO: 4975817 - DNA, 25 bp, Homo sapien
gggacatccgagtcccactcccagc

SEQ ID NO: 4975818 - DNA, 25 bp, Homo sapien
cccagcccctctgaaggagagcccc

SEQ ID NO: 4975819 - DNA, 25 bp, Homo sapien
ggagagcccccacattaaacagctc

SEQ ID NO: 4975820 - DNA, 25 bp, Homo sapien
cctctgaaggagagcccccacatta

SEQ ID NO: 4975821 - DNA, 25 bp, Homo sapien
gcttgctgcacagacatattagaag

SEQ ID NO: 4975822 - DNA, 25 bp, Homo sapien
tgccaatgccttagcactggagagc

SEQ ID NO: 4975823 - DNA, 25 bp, Homo sapien
ctacaggaccaaatggaaaccgagg

SEQ ID NO: 4975824 - DNA, 25 bp, Homo sapien
cactccttggaatgggtcctgttat

SEQ ID NO: 4975825 - DNA, 25 bp, Homo sapien
aaagccctttgagctactgccttag

SEQ ID NO: 4975826 - DNA, 25 bp, Homo sapien
gatactgctgggaatgccaaccact

SEQ ID NO: 4975827 - DNA, 25 bp, Homo sapien
tgtgaatgcacgtagggccagaatt

SEQ ID NO: 4975828 - DNA, 25 bp, Homo sapien
gctcctctgagggttgatactgctg

SEQ ID NO: 4975829 - DNA, 25 bp, Homo sapien
cagtgtgtccaattcaaaccagcag

SEQ ID NO: 4975830 - DNA, 25 bp, Homo sapien
cgcagcagtgtgtccaattcaaacc

SEQ ID NO: 4975831 - DNA, 25 bp, Homo sapien
tgtgtccaattcaaaccagcagcaa

SEQ ID NO: 4975832 - DNA, 25 bp, Homo sapien
tccaattcaaaccagcagcaaagag

SEQ ID NO: 4975833 - DNA, 25 bp, Homo sapien
gaaaagcaatacctacggactggtg

SEQ ID NO: 4975834 - DNA, 25 bp, Homo sapien
gacccagggtccaactaatggcaga

SEQ ID NO: 4975835 - DNA, 25 bp, Homo sapien
gaacatggacataggcaacttgctc

SEQ ID NO: 4975836 - DNA, 25 bp, Homo sapien
gaacaggatgaagtgctcccagtgg

SEQ ID NO: 4975837 - DNA, 25 bp, Homo sapien
gacactcgtggcagcctgtctagca

SEQ ID NO: 4975838 - DNA, 25 bp, Homo sapien
aatactgttctatttcactatcaga

SEQ ID NO: 4975839 - DNA, 25 bp, Homo sapien
acttcaacatgcagggtggcaagag

SEQ ID NO: 4975840 - DNA, 25 bp, Homo sapien
ctgaaagtccctaacttcctgaggg

SEQ ID NO: 4975841 - DNA, 25 bp, Homo sapien
caagccaggaaagtcgcagcagtga

SEQ ID NO: 4975842 - DNA, 25 bp, Homo sapien
tacaaaatcgggcaagggaacatga

SEQ ID NO: 4975843 - DNA, 25 bp, Homo sapien
catgaaagccgatctgcaggctgca

SEQ ID NO: 4975844 - DNA, 25 bp, Homo sapien
gtctcagaactcgtaaccaggccag

SEQ ID NO: 4975845 - DNA, 25 bp, Homo sapien
ctggcacagaaggtgaagcttggaa

SEQ ID NO: 4975846 - DNA, 25 bp, Homo sapien
ggcacagaaggtgaagcttggaaca

SEQ ID NO: 4975847 - DNA, 25 bp, Homo sapien
acagaaggtgaagcttggaacagtt

SEQ ID NO: 4975848 - DNA, 25 bp, Homo sapien
agaaggtgaagcttggaacagtttg

SEQ ID NO: 4975849 - DNA, 25 bp, Homo sapien
catccagccaggcagtaaccaagct

SEQ ID NO: 4975850 - DNA, 25 bp, Homo sapien
gggaagctattctgccctcaggaat

SEQ ID NO: 4975851 - DNA, 25 bp, Homo sapien
aggaatactcaagctcactgggcag

SEQ ID NO: 4975852 - DNA, 25 bp, Homo sapien
tctcatttaatctacgtgcacgtgc

SEQ ID NO: 4975853 - DNA, 25 bp, Homo sapien
ctgcattttgggaggatcaggtggg

SEQ ID NO: 4975854 - DNA, 25 bp, Homo sapien
tatgatggtgccactgcactccagg

SEQ ID NO: 4975855 - DNA, 25 bp, Homo sapien
tgcagtgagctatgatggtgccact

SEQ ID NO: 4975856 - DNA, 25 bp, Homo sapien
cagatcgcttgagcccatgagttcc

SEQ ID NO: 4975857 - DNA, 25 bp, Homo sapien
tcggcaggtgattaagacgcagcac

SEQ ID NO: 4975858 - DNA, 25 bp, Homo sapien
gcatacaacagcgtgcagatggccc

SEQ ID NO: 4975859 - DNA, 25 bp, Homo sapien
tggtagtaggcaaccgcggtatcct

SEQ ID NO: 4975860 - DNA, 25 bp, Homo sapien
tggcaactgcagaactcgacaaagg

SEQ ID NO: 4975861 - DNA, 25 bp, Homo sapien
gctggctgcgactaacttgttcgtt

SEQ ID NO: 4975862 - DNA, 25 bp, Homo sapien
cttgttcgttttcccctgtgcttcg

SEQ ID NO: 4975863 - DNA, 25 bp, Homo sapien
ctcgttgctggctgcgactaacttg

SEQ ID NO: 4975864 - DNA, 25 bp, Homo sapien
gttgctggctgcgactaacttgttc

SEQ ID NO: 4975865 - DNA, 25 bp, Homo sapien
gaatagtgcgagtcttccaccagct

SEQ ID NO: 4975866 - DNA, 25 bp, Homo sapien
gcagtcggagcacaccagctggctc

SEQ ID NO: 4975867 - DNA, 25 bp, Homo sapien
tcgctgaaggtagtggtaaggaccc

SEQ ID NO: 4975868 - DNA, 25 bp, Homo sapien
tcggagattgccctcgtcgctgaag

SEQ ID NO: 4975869 - DNA, 25 bp, Homo sapien
ctcacaaccggccccaaagccgcgg

SEQ ID NO: 4975870 - DNA, 25 bp, Homo sapien
ccaaagccgcggaagccttcagaga

SEQ ID NO: 4975871 - DNA, 25 bp, Homo sapien
tcacaaccggccccaaagccgcgga

SEQ ID NO: 4975872 - DNA, 25 bp, Homo sapien
ggccccaaagccgcggaagccttca

SEQ ID NO: 4975873 - DNA, 25 bp, Homo sapien
ccgcgggctcgggtagaaacgtgag

SEQ ID NO: 4975874 - DNA, 25 bp, Homo sapien
ctgcgcgccacttccggtctgtgcc

SEQ ID NO: 4975875 - DNA, 25 bp, Homo sapien
agcaagaagtaggaggggacacttc

SEQ ID NO: 4975876 - DNA, 25 bp, Homo sapien
cgacggaggcataggcggttccctc

SEQ ID NO: 4975877 - DNA, 25 bp, Homo sapien
aaaagcagttttatgatcctgcagc

SEQ ID NO: 4975878 - DNA, 25 bp, Homo sapien
agcagttttatgatcctgcagccag

SEQ ID NO: 4975879 - DNA, 25 bp, Homo sapien
aaagcagttttatgatcctgcagcc

SEQ ID NO: 4975880 - DNA, 25 bp, Homo sapien
cagttttatgatcctgcagccagcc

SEQ ID NO: 4975881 - DNA, 25 bp, Homo sapien
gacgatggtggtggcctctctggcc

SEQ ID NO: 4975882 - DNA, 25 bp, Homo sapien
ggacgatggtggtggcctctctggc

SEQ ID NO: 4975883 - DNA, 25 bp, Homo sapien
cggacgatggtggtggcctctctgg

SEQ ID NO: 4975884 - DNA, 25 bp, Homo sapien
gggcagcacgttccaactcagtttc

SEQ ID NO: 4975885 - DNA, 25 bp, Homo sapien
aaagggggcagcacgttccaactca

SEQ ID NO: 4975886 - DNA, 25 bp, Homo sapien
agggggcagcacgttccaactcagt

SEQ ID NO: 4975887 - DNA, 25 bp, Homo sapien
gggggcagcacgttccaactcagtt

SEQ ID NO: 4975888 - DNA, 25 bp, Homo sapien
gggcgtcagttaagtagctcacaca

SEQ ID NO: 4975889 - DNA, 25 bp, Homo sapien
caggttatctactttgggaggtgca

SEQ ID NO: 4975890 - DNA, 25 bp, Homo sapien
cagggcacttggactatcacagtaa

SEQ ID NO: 4975891 - DNA, 25 bp, Homo sapien
catggtctcctgtcccctgtagagt

SEQ ID NO: 4975892 - DNA, 25 bp, Homo sapien
tatgtaacacagcaccaatcgcatg

SEQ ID NO: 4975893 - DNA, 25 bp, Homo sapien
gaagtcgatgtttagaaaaggccgc

SEQ ID NO: 4975894 - DNA, 25 bp, Homo sapien
tgtattagcgagtgcgtggaccacc

SEQ ID NO: 4975895 - DNA, 25 bp, Homo sapien
caggaacctggctgtcataagagga

SEQ ID NO: 4975896 - DNA, 25 bp, Homo sapien
agctcgcggacctggaactccttct

SEQ ID NO: 4975897 - DNA, 25 bp, Homo sapien
ctcatcgtgggtcagctgcgcatat

SEQ ID NO: 4975898 - DNA, 25 bp, Homo sapien
ccttcttgcttatcgtttccttctg

SEQ ID NO: 4975899 - DNA, 25 bp, Homo sapien
ttgtcaatgtagtcttccagctcgc

SEQ ID NO: 4975900 - DNA, 25 bp, Homo sapien
aatatgcggagtcagagccaggtgc

SEQ ID NO: 4975901 - DNA, 25 bp, Homo sapien
tgggaacactaggagctcacacaac

SEQ ID NO: 4975902 - DNA, 25 bp, Homo sapien
taacggtttcactgcctaccaggaa

SEQ ID NO: 4975903 - DNA, 25 bp, Homo sapien
gattttaagcagtgccatcatggga

SEQ ID NO: 4975904 - DNA, 25 bp, Homo sapien
gagtcacctttgtaaataatggcaa

SEQ ID NO: 4975905 - DNA, 25 bp, Homo sapien
caatacataagatactctgcatgga

SEQ ID NO: 4975906 - DNA, 25 bp, Homo sapien
cacctgtagggtgtcatataattaa

SEQ ID NO: 4975907 - DNA, 25 bp, Homo sapien
gaatacgtcctcaagggattttaga

SEQ ID NO: 4975908 - DNA, 25 bp, Homo sapien
cttcctggggttcttgatgatatgt

SEQ ID NO: 4975909 - DNA, 25 bp, Homo sapien
ttataatgtcagcctcatacaaaat

SEQ ID NO: 4975910 - DNA, 25 bp, Homo sapien
gtcagcctcatacaaaataatagtt

SEQ ID NO: 4975911 - DNA, 25 bp, Homo sapien
cctggggttcttgatgatatgtttt

SEQ ID NO: 4975912 - DNA, 25 bp, Homo sapien
gaatgtttactaggcatggtccaga

SEQ ID NO: 4975913 - DNA, 25 bp, Homo sapien
ggaagctgctgaatgaccccaattt

SEQ ID NO: 4975914 - DNA, 25 bp, Homo sapien
caaagcatctatcacgtggcaggcc

SEQ ID NO: 4975915 - DNA, 25 bp, Homo sapien
ggcagccaggcttacaaatcatgag

SEQ ID NO: 4975916 - DNA, 25 bp, Homo sapien
ccagtgtcagttgggaagtccctct

SEQ ID NO: 4975917 - DNA, 25 bp, Homo sapien
tcaatatccggagtccatgggactg

SEQ ID NO: 4975918 - DNA, 25 bp, Homo sapien
aaacactttcagtcaagcatggtgg

SEQ ID NO: 4975919 - DNA, 25 bp, Homo sapien
gaccagggatttgcagcaaggcagt

SEQ ID NO: 4975920 - DNA, 25 bp, Homo sapien
tatgactaagtgttcctggcaccac

SEQ ID NO: 4975921 - DNA, 25 bp, Homo sapien
gggaataaagtaattatccaatgga

SEQ ID NO: 4975922 - DNA, 25 bp, Homo sapien
caaagactcaagatgtatgactaag

SEQ ID NO: 4975923 - DNA, 25 bp, Homo sapien
agaggtatacgatggtgactatgga

SEQ ID NO: 4975924 - DNA, 25 bp, Homo sapien
ctaacgaacacaccagcttctcaga

SEQ ID NO: 4975925 - DNA, 25 bp, Homo sapien
aacgaacacaccagcttctcagagg

SEQ ID NO: 4975926 - DNA, 25 bp, Homo sapien
aacacaccagcttctcagaggacat

SEQ ID NO: 4975927 - DNA, 25 bp, Homo sapien
cacaccagcttctcagaggacatac

SEQ ID NO: 4975928 - DNA, 25 bp, Homo sapien
ttcatcatgacctcattgttcaagt

SEQ ID NO: 4975929 - DNA, 25 bp, Homo sapien
tggccattgcattcattggcttcac

SEQ ID NO: 4975930 - DNA, 25 bp, Homo sapien
cattgttcaagttctcactgatgat

SEQ ID NO: 4975931 - DNA, 25 bp, Homo sapien
gccattgcattcattggcttcacag

SEQ ID NO: 4975932 - DNA, 25 bp, Homo sapien
ggatctttagaccctccggtcatgg

SEQ ID NO: 4975933 - DNA, 25 bp, Homo sapien
tagaccctccggtcatggcaaaact

SEQ ID NO: 4975934 - DNA, 25 bp, Homo sapien
ttagaccctccggtcatggcaaaac

SEQ ID NO: 4975935 - DNA, 25 bp, Homo sapien
tctttagaccctccggtcatggcaa

SEQ ID NO: 4975936 - DNA, 25 bp, Homo sapien
ttagaaagccgtaacctctgcaggt

SEQ ID NO: 4975937 - DNA, 25 bp, Homo sapien
gggccaaagcactccaatgtctcag

SEQ ID NO: 4975938 - DNA, 25 bp, Homo sapien
gcagcagtgtcttgaggtattacca

SEQ ID NO: 4975939 - DNA, 25 bp, Homo sapien
caggtgggttgtcacatcagacgtc

SEQ ID NO: 4975940 - DNA, 25 bp, Homo sapien
cttggctgacccagttccagcgcct

SEQ ID NO: 4975941 - DNA, 25 bp, Homo sapien
ctgagctgagactggatgtgtctcc

SEQ ID NO: 4975942 - DNA, 25 bp, Homo sapien
ttttcaactctaccagcggagccct

SEQ ID NO: 4975943 - DNA, 25 bp, Homo sapien
agctgagactggatgtgtctccgag

SEQ ID NO: 4975944 - DNA, 25 bp, Homo sapien
gctcctatgtccagagttgacgact

SEQ ID NO: 4975945 - DNA, 25 bp, Homo sapien
ccaagatgtggtttgtgaattccga

SEQ ID NO: 4975946 - DNA, 25 bp, Homo sapien
gctgtttatccaagcttgagctctt

SEQ ID NO: 4975947 - DNA, 25 bp, Homo sapien
tgaattccgaactctgtggtctgct

SEQ ID NO: 4975948 - DNA, 25 bp, Homo sapien
ggaaggaaggcttaagttcagatcg

SEQ ID NO: 4975949 - DNA, 25 bp, Homo sapien
tttaaaatctgagaccaactgaagg

SEQ ID NO: 4975950 - DNA, 25 bp, Homo sapien
gatcggccatgattggagatttaaa

SEQ ID NO: 4975951 - DNA, 25 bp, Homo sapien
tgaaggtcactcaaggggtcagaca

SEQ ID NO: 4975952 - DNA, 25 bp, Homo sapien
tggtccttgcggaggttcagaccca

SEQ ID NO: 4975953 - DNA, 25 bp, Homo sapien
tttccagcaacagaccatgcagggt

SEQ ID NO: 4975954 - DNA, 25 bp, Homo sapien
gagagactcctccaactcaaggctg

SEQ ID NO: 4975955 - DNA, 25 bp, Homo sapien
ggaagttcttcctcttgtcgccctg

SEQ ID NO: 4975956 - DNA, 25 bp, Homo sapien
accggtgttaaactctcagtttgca

SEQ ID NO: 4975957 - DNA, 25 bp, Homo sapien
tggtccttcagacttggcctggccc

SEQ ID NO: 4975958 - DNA, 25 bp, Homo sapien
cttagggagcaagggtggtccttca

SEQ ID NO: 4975959 - DNA, 25 bp, Homo sapien
ggcccctgtctacgagaggccagct

SEQ ID NO: 4975960 - DNA, 25 bp, Homo sapien
ttgcgcctctggagacacttccagt

SEQ ID NO: 4975961 - DNA, 25 bp, Homo sapien
tgggttgcgcctctggagacacttc

SEQ ID NO: 4975962 - DNA, 25 bp, Homo sapien
ggttgcgcctctggagacacttcca

SEQ ID NO: 4975963 - DNA, 25 bp, Homo sapien
tgtgggttgcgcctctggagacact

SEQ ID NO: 4975964 - DNA, 25 bp, Homo sapien
atacacaaaaacaagtcattcacca

SEQ ID NO: 4975965 - DNA, 25 bp, Homo sapien
tgcagatgcatcacgagagacaaag

SEQ ID NO: 4975966 - DNA, 25 bp, Homo sapien
aggtcagtgcagatgcatcacgaga

SEQ ID NO: 4975967 - DNA, 25 bp, Homo sapien
gatgcatcacgagagacaaagaaaa

SEQ ID NO: 4975968 - DNA, 25 bp, Homo sapien
ttcttccccgtcatcagagacagca

SEQ ID NO: 4975969 - DNA, 25 bp, Homo sapien
aggaaattggaggtctcggttcaga

SEQ ID NO: 4975970 - DNA, 25 bp, Homo sapien
tctcggttcagacttggactctggc

SEQ ID NO: 4975971 - DNA, 25 bp, Homo sapien
gatcttctcacaaggtcttcagcag

SEQ ID NO: 4975972 - DNA, 25 bp, Homo sapien
gctctccttagcttcttttgtggcc

SEQ ID NO: 4975973 - DNA, 25 bp, Homo sapien
cagggtcatagacttcaaggagtcc

SEQ ID NO: 4975974 - DNA, 25 bp, Homo sapien
caaggagtccttggtggaagattcg

SEQ ID NO: 4975975 - DNA, 25 bp, Homo sapien
agctgcctgtcagaagacagcccac

SEQ ID NO: 4975976 - DNA, 25 bp, Homo sapien
gacgggctgctatccttgatctcac

SEQ ID NO: 4975977 - DNA, 25 bp, Homo sapien
attcttagaccgaaggccaccaaga

SEQ ID NO: 4975978 - DNA, 25 bp, Homo sapien
tcagttgcttaagatccgtactcgc

SEQ ID NO: 4975979 - DNA, 25 bp, Homo sapien
cattagagcgggaaaggacatcatt

SEQ ID NO: 4975980 - DNA, 25 bp, Homo sapien
gaaaggtcaaacatgctggcagtca

SEQ ID NO: 4975981 - DNA, 25 bp, Homo sapien
tggctttgaagtcggcaggacagac

SEQ ID NO: 4975982 - DNA, 25 bp, Homo sapien
tcatcatcactgtcgaccgaaggtg

SEQ ID NO: 4975983 - DNA, 25 bp, Homo sapien
tctccgggacgaagcagcacttttt

SEQ ID NO: 4975984 - DNA, 25 bp, Homo sapien
aactggatgtcaacctcaatttctc

SEQ ID NO: 4975985 - DNA, 25 bp, Homo sapien
actggatgtcaacctcaatttctcc

SEQ ID NO: 4975986 - DNA, 25 bp, Homo sapien
aaactggatgtcaacctcaatttct

SEQ ID NO: 4975987 - DNA, 25 bp, Homo sapien
tggatgtcaacctcaatttctcctc

SEQ ID NO: 4975988 - DNA, 25 bp, Homo sapien
ctgaaaggagaaaggctgaggagtt

SEQ ID NO: 4975989 - DNA, 25 bp, Homo sapien
gaaaggagaaaggctgaggagttac

SEQ ID NO: 4975990 - DNA, 25 bp, Homo sapien
tgaaaggagaaaggctgaggagtta

SEQ ID NO: 4975991 - DNA, 25 bp, Homo sapien
gttcacaatccccatgaactggcct

SEQ ID NO: 4975992 - DNA, 25 bp, Homo sapien
gcaacaatgttcacaatccccatga

SEQ ID NO: 4975993 - DNA, 25 bp, Homo sapien
tggaagcaactgcaacaatgttcac

SEQ ID NO: 4975994 - DNA, 25 bp, Homo sapien
ttgaatggaagcaactgcaacaatg

SEQ ID NO: 4975995 - DNA, 25 bp, Homo sapien
tcttcgggaagtggtagatgagagc

SEQ ID NO: 4975996 - DNA, 25 bp, Homo sapien
gctgagagcagaatttgcactttta

SEQ ID NO: 4975997 - DNA, 25 bp, Homo sapien
ggctgagagcagaatttgcactttt

SEQ ID NO: 4975998 - DNA, 25 bp, Homo sapien
tttctcttcgggaagtggtagatga

SEQ ID NO: 4975999 - DNA, 25 bp, Homo sapien
gtgtctgtccaatacattttccagg

SEQ ID NO: 4976000 - DNA, 25 bp, Homo sapien
gacagtcatgtggtaaatggtagcc

SEQ ID NO: 4976001 - DNA, 25 bp, Homo sapien
tggcctggaattgtctgcatatttg

SEQ ID NO: 4976002 - DNA, 25 bp, Homo sapien
cttggtgatgaagggtgtttagctt

SEQ ID NO: 4976003 - DNA, 25 bp, Homo sapien
aatataaacgtcaccaactgttctt

SEQ ID NO: 4976004 - DNA, 25 bp, Homo sapien
ggaagtgcaaatataaacgtcacca

SEQ ID NO: 4976005 - DNA, 25 bp, Homo sapien
aaacttccaacaccattaggaagtg

SEQ ID NO: 4976006 - DNA, 25 bp, Homo sapien
ccattaggaagtgcaaatataaacg

SEQ ID NO: 4976007 - DNA, 25 bp, Homo sapien
tccatttccctagtccaaagggcag

SEQ ID NO: 4976008 - DNA, 25 bp, Homo sapien
cacagtgcttgaatatcttgcccta

SEQ ID NO: 4976009 - DNA, 25 bp, Homo sapien
tctcagaaatcagggttgggtccat

SEQ ID NO: 4976010 - DNA, 25 bp, Homo sapien
agtattatctttcacgtaggccctg

SEQ ID NO: 4976011 - DNA, 25 bp, Homo sapien
catatgcagagaaatgatgccttcg

SEQ ID NO: 4976012 - DNA, 25 bp, Homo sapien
gatgccttcggagattcagttccaa

SEQ ID NO: 4976013 - DNA, 25 bp, Homo sapien
gccggtgtgcctcagaacatggagt

SEQ ID NO: 4976014 - DNA, 25 bp, Homo sapien
cacaagagtggtgtgcagggcaccc

SEQ ID NO: 4976015 - DNA, 25 bp, Homo sapien
tcaaatccagtatctcacctcttgc

SEQ ID NO: 4976016 - DNA, 25 bp, Homo sapien
tgttctgtcaaagaatattgtcttg

SEQ ID NO: 4976017 - DNA, 25 bp, Homo sapien
cacctcttgctcaaatgtaaatgcc

SEQ ID NO: 4976018 - DNA, 25 bp, Homo sapien
tctttacaaagctcgatcctatctc

SEQ ID NO: 4976019 - DNA, 25 bp, Homo sapien
tcccatacttcttgccatgagagtt

SEQ ID NO: 4976020 - DNA, 25 bp, Homo sapien
cccatacttcttgccatgagagttt

SEQ ID NO: 4976021 - DNA, 25 bp, Homo sapien
tattttggtgaaccacatgtcacag

SEQ ID NO: 4976022 - DNA, 25 bp, Homo sapien
ggccttaattgttctacctagacgc

SEQ ID NO: 4976023 - DNA, 25 bp, Homo sapien
tcaccaaagcatttctaaatcctgt

SEQ ID NO: 4976024 - DNA, 25 bp, Homo sapien
gggccccagtcgactgctactgtat

SEQ ID NO: 4976025 - DNA, 25 bp, Homo sapien
tgtctgtccaattctaggttaggcc

SEQ ID NO: 4976026 - DNA, 25 bp, Homo sapien
ggttaggccagcttcaaatccattc

SEQ ID NO: 4976027 - DNA, 25 bp, Homo sapien
gacaaataaattggaccgtatcaac

SEQ ID NO: 4976028 - DNA, 25 bp, Homo sapien
cattctctacccaagagccacggtg

SEQ ID NO: 4976029 - DNA, 25 bp, Homo sapien
gcttataatttgtggattatggacc

SEQ ID NO: 4976030 - DNA, 25 bp, Homo sapien
gacctctgtggtcatctatgtcgtt

SEQ ID NO: 4976031 - DNA, 25 bp, Homo sapien
aaacaaacacccattgcttataatt

SEQ ID NO: 4976032 - DNA, 25 bp, Homo sapien
gggactgtggcttcgaaagacctgg

SEQ ID NO: 4976033 - DNA, 25 bp, Homo sapien
cctaagtcctttcatatgcaaccaa

SEQ ID NO: 4976034 - DNA, 25 bp, Homo sapien
tacacaacagccttctagtcaccag

SEQ ID NO: 4976035 - DNA, 25 bp, Homo sapien
gtcaccaggctgcataaatatttgt

SEQ ID NO: 4976036 - DNA, 25 bp, Homo sapien
gaggactatcgcaatattaagtttc

SEQ ID NO: 4976037 - DNA, 25 bp, Homo sapien
tggtcacccgattctacctgttaga

SEQ ID NO: 4976038 - DNA, 25 bp, Homo sapien
gagaatccctcatattggtcacccg

SEQ ID NO: 4976039 - DNA, 25 bp, Homo sapien
ggtttctatcaatctagggtcccaa

SEQ ID NO: 4976040 - DNA, 25 bp, Homo sapien
agtcacagtacttagccgattccca

SEQ ID NO: 4976041 - DNA, 25 bp, Homo sapien
ggcgcaagacaacggatggccaaca

SEQ ID NO: 4976042 - DNA, 25 bp, Homo sapien
ctctggcagggagatgtgatctacc

SEQ ID NO: 4976043 - DNA, 25 bp, Homo sapien
cacacatgttgggatggcgcaagac

SEQ ID NO: 4976044 - DNA, 25 bp, Homo sapien
tcaattaagtctggcaacatgctct

SEQ ID NO: 4976045 - DNA, 25 bp, Homo sapien
gcgtcttcctgcggccctggtcgcg

SEQ ID NO: 4976046 - DNA, 25 bp, Homo sapien
tgcgtcttcctgcggccctggtcgc

SEQ ID NO: 4976047 - DNA, 25 bp, Homo sapien
gtgcagatcccgcaggtccacctcg

SEQ ID NO: 4976048 - DNA, 25 bp, Homo sapien
agatcccgcaggtccacctcggcgc

SEQ ID NO: 4976049 - DNA, 25 bp, Homo sapien
cttgtcgaggccgagcagcgcgcgg

SEQ ID NO: 4976050 - DNA, 25 bp, Homo sapien
acggtgagctgcagggtggcggcgg

SEQ ID NO: 4976051 - DNA, 25 bp, Homo sapien
cagcacggtgagctgcagggtggcg

SEQ ID NO: 4976052 - DNA, 25 bp, Homo sapien
agcagcgcgcggtgcagcacggtga

SEQ ID NO: 4976053 - DNA, 25 bp, Homo sapien
ggccagccgagaccattagggacat

SEQ ID NO: 4976054 - DNA, 25 bp, Homo sapien
cgctccgacacggaggtggcgtact

SEQ ID NO: 4976055 - DNA, 25 bp, Homo sapien
ggaggtggcgtacttctccttgccc

SEQ ID NO: 4976056 - DNA, 25 bp, Homo sapien
cagcgatggcagctcgaaggtggcc

SEQ ID NO: 4976057 - DNA, 25 bp, Homo sapien
ctccagaagcgaggagaagatcgcc

SEQ ID NO: 4976058 - DNA, 25 bp, Homo sapien
ccagaagcgaggagaagatcgccgc

SEQ ID NO: 4976059 - DNA, 25 bp, Homo sapien
cactccagaagcgaggagaagatcg

SEQ ID NO: 4976060 - DNA, 25 bp, Homo sapien
aagcgaggagaagatcgccgcgact

SEQ ID NO: 4976061 - DNA, 25 bp, Homo sapien
tgggaacacttaggcggcactggaa

SEQ ID NO: 4976062 - DNA, 25 bp, Homo sapien
ggtcttgggaacacttaggcggcac

SEQ ID NO: 4976063 - DNA, 25 bp, Homo sapien
ttgggaacacttaggcggcactgga

SEQ ID NO: 4976064 - DNA, 25 bp, Homo sapien
tcttgggaacacttaggcggcactg

SEQ ID NO: 4976065 - DNA, 25 bp, Homo sapien
ggaagacacatctctgagctctctg

SEQ ID NO: 4976066 - DNA, 25 bp, Homo sapien
tttcctttggaagacacatctctga

SEQ ID NO: 4976067 - DNA, 25 bp, Homo sapien
ctaaagttttattccaatcagtgtt

SEQ ID NO: 4976068 - DNA, 25 bp, Homo sapien
tctctgagctctctgtgaggaggac

SEQ ID NO: 4976069 - DNA, 25 bp, Homo sapien
gtaatttatgttgttggcattgata

SEQ ID NO: 4976070 - DNA, 25 bp, Homo sapien
tgaagttaatctgaccgttcttggg

SEQ ID NO: 4976071 - DNA, 25 bp, Homo sapien
gatacagctgaagttaatctgaccg

SEQ ID NO: 4976072 - DNA, 25 bp, Homo sapien
tgccctcagtgatgtaatttatgtt

SEQ ID NO: 4976073 - DNA, 25 bp, Homo sapien
tctggagtgaagctaggaactggtc

SEQ ID NO: 4976074 - DNA, 25 bp, Homo sapien
tctcagatctcgagactggccatct

SEQ ID NO: 4976075 - DNA, 25 bp, Homo sapien
aatgctcaaatacaggccaaaggtc

SEQ ID NO: 4976076 - DNA, 25 bp, Homo sapien
ggaactggtcacctagtcagtgaag

SEQ ID NO: 4976077 - DNA, 25 bp, Homo sapien
cactttttccttggttagcatgatg

SEQ ID NO: 4976078 - DNA, 25 bp, Homo sapien
tcccactctgctcggtgatgtgacc

SEQ ID NO: 4976079 - DNA, 25 bp, Homo sapien
agtccaagatagccgtgggtcccac

SEQ ID NO: 4976080 - DNA, 25 bp, Homo sapien
gtgggtcccactctgctcggtgatg

SEQ ID NO: 4976081 - DNA, 25 bp, Homo sapien
gtgatgacacgtgcacccgtgttgg

SEQ ID NO: 4976082 - DNA, 25 bp, Homo sapien
gaggtgatgacacgtgcacccgtgt

SEQ ID NO: 4976083 - DNA, 25 bp, Homo sapien
aggtgatgacacgtgcacccgtgtt

SEQ ID NO: 4976084 - DNA, 25 bp, Homo sapien
ggtgatgacacgtgcacccgtgttg

SEQ ID NO: 4976085 - DNA, 25 bp, Homo sapien
accaccactagcatccccactcctt

SEQ ID NO: 4976086 - DNA, 25 bp, Homo sapien
agcagctgctggttgttgactgcca

SEQ ID NO: 4976087 - DNA, 25 bp, Homo sapien
gctgctggttgttgactgccaccac

SEQ ID NO: 4976088 - DNA, 25 bp, Homo sapien
gctggttgttgactgccaccaccac

SEQ ID NO: 4976089 - DNA, 25 bp, Homo sapien
acagagactggctgcagaagaactc

SEQ ID NO: 4976090 - DNA, 25 bp, Homo sapien
cagagactggctgcagaagaactca

SEQ ID NO: 4976091 - DNA, 25 bp, Homo sapien
taagattctagtatcttcttccaag

SEQ ID NO: 4976092 - DNA, 25 bp, Homo sapien
aagattctagtatcttcttccaagt

SEQ ID NO: 4976093 - DNA, 25 bp, Homo sapien
gtaagattctagtatcttcttccaa

SEQ ID NO: 4976094 - DNA, 25 bp, Homo sapien
tgtaagattctagtatcttcttcca

SEQ ID NO: 4976095 - DNA, 25 bp, Homo sapien
ggaatatcaaaaaatgggaatatct

SEQ ID NO: 4976096 - DNA, 25 bp, Homo sapien
tgtataaaccttgacagggaatatc

SEQ ID NO: 4976097 - DNA, 25 bp, Homo sapien
tggtgtataaaccttgacagggaat

SEQ ID NO: 4976098 - DNA, 25 bp, Homo sapien
taaaccttgacagggaatatcaaaa

SEQ ID NO: 4976099 - DNA, 25 bp, Homo sapien
ccacttggtgtcaacttgcagtcga

SEQ ID NO: 4976100 - DNA, 25 bp, Homo sapien
tcaactttgcccacccacttggtgt

SEQ ID NO: 4976101 - DNA, 25 bp, Homo sapien
cttgcagtcgataatgttccccatc

SEQ ID NO: 4976102 - DNA, 25 bp, Homo sapien
catggacatcaactttgcccaccca

SEQ ID NO: 4976103 - DNA, 25 bp, Homo sapien
catgtcctggaagacgagtccatgc

SEQ ID NO: 4976104 - DNA, 25 bp, Homo sapien
tccaccacattgaggagtatgtcgg

SEQ ID NO: 4976105 - DNA, 25 bp, Homo sapien
gggtcccagacagagtattcataaa

SEQ ID NO: 4976106 - DNA, 25 bp, Homo sapien
tgtcggggtccatgcatagcttctt

SEQ ID NO: 4976107 - DNA, 25 bp, Homo sapien
ctgtgggaacacagccccccactag

SEQ ID NO: 4976108 - DNA, 25 bp, Homo sapien
gagaagagatgatgtaaactatacg

SEQ ID NO: 4976109 - DNA, 25 bp, Homo sapien
tatacgagcatccttatgccaagct

SEQ ID NO: 4976110 - DNA, 25 bp, Homo sapien
ctctgagaaactggacgccaagctg

SEQ ID NO: 4976111 - DNA, 25 bp, Homo sapien
gctctgagaaactggacgccaagct

SEQ ID NO: 4976112 - DNA, 25 bp, Homo sapien
gcccatggtgggcaagtactcataa

SEQ ID NO: 4976113 - DNA, 25 bp, Homo sapien
catggtgggcaagtactcataattc

SEQ ID NO: 4976114 - DNA, 25 bp, Homo sapien
gcaagtactcataattcagggaggg

SEQ ID NO: 4976115 - DNA, 25 bp, Homo sapien
cctgttctccacaatggcttggctg

SEQ ID NO: 4976116 - DNA, 25 bp, Homo sapien
ggatggccttcatttgtcatgcaga

SEQ ID NO: 4976117 - DNA, 25 bp, Homo sapien
gaggggcacatccatgaacactgaa

SEQ ID NO: 4976118 - DNA, 25 bp, Homo sapien
tttgtaggtctttaacaagctgccc

SEQ ID NO: 4976119 - DNA, 25 bp, Homo sapien
taggctaagaatatcttgttcgggt

SEQ ID NO: 4976120 - DNA, 25 bp, Homo sapien
ctgccctctagcttgtgggcgaggg

SEQ ID NO: 4976121 - DNA, 25 bp, Homo sapien
actggagccaagactatgtgtctct

SEQ ID NO: 4976122 - DNA, 25 bp, Homo sapien
actgaaacgaaactggagccaagac

SEQ ID NO: 4976123 - DNA, 25 bp, Homo sapien
ctggagccaagactatgtgtctctg

SEQ ID NO: 4976124 - DNA, 25 bp, Homo sapien
tggagccaagactatgtgtctctgc

SEQ ID NO: 4976125 - DNA, 25 bp, Homo sapien
gcaattggaccccattctggttcaa

SEQ ID NO: 4976126 - DNA, 25 bp, Homo sapien
catttcaggttgacagtagccttcc

SEQ ID NO: 4976127 - DNA, 25 bp, Homo sapien
caaaaccttggtgtggatatctact

SEQ ID NO: 4976128 - DNA, 25 bp, Homo sapien
ctggttggtgttcagttatgggccc

SEQ ID NO: 4976129 - DNA, 25 bp, Homo sapien
tgaggatgtgagaatggcctccaca

SEQ ID NO: 4976130 - DNA, 25 bp, Homo sapien
tgcatcaaatcagctttctggtaaa

SEQ ID NO: 4976131 - DNA, 25 bp, Homo sapien
gagtgaattaagcagttactggaga

SEQ ID NO: 4976132 - DNA, 25 bp, Homo sapien
aatttactcttcagtcggcagctgc

SEQ ID NO: 4976133 - DNA, 25 bp, Homo sapien
gcagaatatccagtcgtagccacga

SEQ ID NO: 4976134 - DNA, 25 bp, Homo sapien
gaccatggctctgaaagactcaact

SEQ ID NO: 4976135 - DNA, 25 bp, Homo sapien
tagccacgaaaatacgccgcgtcag

SEQ ID NO: 4976136 - DNA, 25 bp, Homo sapien
tgtcctgaaaacgttcctggccgca

SEQ ID NO: 4976137 - DNA, 25 bp, Homo sapien
tgggaaaacacactagctaagcaag

SEQ ID NO: 4976138 - DNA, 25 bp, Homo sapien
tggtagctttggagacaacagtttg

SEQ ID NO: 4976139 - DNA, 25 bp, Homo sapien
caagcctggtctcttagagaggcct

SEQ ID NO: 4976140 - DNA, 25 bp, Homo sapien
ccagttagatcctatcagtggtatc

SEQ ID NO: 4976141 - DNA, 25 bp, Homo sapien
gtactgcataccctgccagctgtga

SEQ ID NO: 4976142 - DNA, 25 bp, Homo sapien
cccctgtgaaatcggtgctgtactg

SEQ ID NO: 4976143 - DNA, 25 bp, Homo sapien
tgtaccataagccaacaaccgctga

SEQ ID NO: 4976144 - DNA, 25 bp, Homo sapien
tgaacactgagatccgtaaaactac

SEQ ID NO: 4976145 - DNA, 25 bp, Homo sapien
ctggtttcgaattgccctccagcaa

SEQ ID NO: 4976146 - DNA, 25 bp, Homo sapien
ggaaataccacagtgttcccactaa

SEQ ID NO: 4976147 - DNA, 25 bp, Homo sapien
gaggcaattagaatccagcaaacca

SEQ ID NO: 4976148 - DNA, 25 bp, Homo sapien
gggaaaatatctccacagaaaccag

SEQ ID NO: 4976149 - DNA, 25 bp, Homo sapien
gcctgtttaagcagagaagttgcca

SEQ ID NO: 4976150 - DNA, 25 bp, Homo sapien
gttgccagccccaaacaaagttgac

SEQ ID NO: 4976151 - DNA, 25 bp, Homo sapien
ggcgggagccacctcacataaattc

SEQ ID NO: 4976152 - DNA, 25 bp, Homo sapien
tatgaaagatcctggtaacagagtc

SEQ ID NO: 4976153 - DNA, 25 bp, Homo sapien
gcacccagctgcatagattttttta

SEQ ID NO: 4976154 - DNA, 25 bp, Homo sapien
cacccagctgcatagatttttttaa

SEQ ID NO: 4976155 - DNA, 25 bp, Homo sapien
ctgcacccagctgcatagatttttt

SEQ ID NO: 4976156 - DNA, 25 bp, Homo sapien
cccagctgcatagatttttttaaca

SEQ ID NO: 4976157 - DNA, 25 bp, Homo sapien
ttaggtgggtacataagggcccaga

SEQ ID NO: 4976158 - DNA, 25 bp, Homo sapien
gagatcttagacttgcaggcttcca

SEQ ID NO: 4976159 - DNA, 25 bp, Homo sapien
tgatgagcgtgtgtaccagtgcagc

SEQ ID NO: 4976160 - DNA, 25 bp, Homo sapien
cactgtcaccagatggagatcttag

SEQ ID NO: 4976161 - DNA, 25 bp, Homo sapien
ggacaggacctggttgatgatgctc

SEQ ID NO: 4976162 - DNA, 25 bp, Homo sapien
ctgggacaggacctggttgatgatg

SEQ ID NO: 4976163 - DNA, 25 bp, Homo sapien
aggacctggttgatgatgctcttgg

SEQ ID NO: 4976164 - DNA, 25 bp, Homo sapien
caggacctggttgatgatgctcttg

SEQ ID NO: 4976165 - DNA, 25 bp, Homo sapien
accctatcacaaacaggctgccagg

SEQ ID NO: 4976166 - DNA, 25 bp, Homo sapien
tcttgacactgcaccctatcacaaa

SEQ ID NO: 4976167 - DNA, 25 bp, Homo sapien
tggccatcttgtgggttttggccca

SEQ ID NO: 4976168 - DNA, 25 bp, Homo sapien
aggaggtaggagaatttggccatct

SEQ ID NO: 4976169 - DNA, 25 bp, Homo sapien
ggtagagtagcagttaggccatcac

SEQ ID NO: 4976170 - DNA, 25 bp, Homo sapien
acaagatgtttcagcctggtgttcc

SEQ ID NO: 4976171 - DNA, 25 bp, Homo sapien
cacaggctttggagatggtagagta

SEQ ID NO: 4976172 - DNA, 25 bp, Homo sapien
tagaagaggattctttctgcagcat

SEQ ID NO: 4976173 - DNA, 25 bp, Homo sapien
tgccttccaggtccccctcccatgc

SEQ ID NO: 4976174 - DNA, 25 bp, Homo sapien
caggtccccctcccatgcccttcac

SEQ ID NO: 4976175 - DNA, 25 bp, Homo sapien
ctgccttccaggtccccctcccatg

SEQ ID NO: 4976176 - DNA, 25 bp, Homo sapien
cttccaggtccccctcccatgccct

SEQ ID NO: 4976177 - DNA, 25 bp, Homo sapien
tccagccaacgggtgaagcaccatg

SEQ ID NO: 4976178 - DNA, 25 bp, Homo sapien
gaggtcgatgctgagtagccacgta

SEQ ID NO: 4976179 - DNA, 25 bp, Homo sapien
tagccacgtaagtttggtcttagag

SEQ ID NO: 4976180 - DNA, 25 bp, Homo sapien
tggtcttagagggacttccagccaa

SEQ ID NO: 4976181 - DNA, 25 bp, Homo sapien
tacaccagtaccatagataacacgt

SEQ ID NO: 4976182 - DNA, 25 bp, Homo sapien
gggtaattatttggcagttggcaca

SEQ ID NO: 4976183 - DNA, 25 bp, Homo sapien
ggcacagttaccagctcatcagaat

SEQ ID NO: 4976184 - DNA, 25 bp, Homo sapien
caggaggacagttgcgagttctctc

SEQ ID NO: 4976185 - DNA, 25 bp, Homo sapien
aagtagggcctatcttgtctttgtc

SEQ ID NO: 4976186 - DNA, 25 bp, Homo sapien
tgcagtccacatgcttgggtgcaca

SEQ ID NO: 4976187 - DNA, 25 bp, Homo sapien
gagggtcatgacaagctgtctggct

SEQ ID NO: 4976188 - DNA, 25 bp, Homo sapien
tctggctgtccaagtagggcctatc

SEQ ID NO: 4976189 - DNA, 25 bp, Homo sapien
gggggtttggagcctgctgcccgta

SEQ ID NO: 4976190 - DNA, 25 bp, Homo sapien
gggtttggagcctgctgcccgtatt

SEQ ID NO: 4976191 - DNA, 25 bp, Homo sapien
tagaagaggggggtttggagcctgc

SEQ ID NO: 4976192 - DNA, 25 bp, Homo sapien
gtttggagcctgctgcccgtattac

SEQ ID NO: 4976193 - DNA, 25 bp, Homo sapien
cagcgcacgctcacaaagtcacggg

SEQ ID NO: 4976194 - DNA, 25 bp, Homo sapien
ggagcctcggcgcttggcacagcgc

SEQ ID NO: 4976195 - DNA, 25 bp, Homo sapien
gagcctcggcgcttggcacagcgca

SEQ ID NO: 4976196 - DNA, 25 bp, Homo sapien
gcttggcacagcgcacgctcacaaa

SEQ ID NO: 4976197 - DNA, 25 bp, Homo sapien
tcggcagccagctcgtgagtaatga

SEQ ID NO: 4976198 - DNA, 25 bp, Homo sapien
cagccagctcgtgagtaatgaatgt

SEQ ID NO: 4976199 - DNA, 25 bp, Homo sapien
tatcttttccgatcttctgcaggac

SEQ ID NO: 4976200 - DNA, 25 bp, Homo sapien
tgtatcttttccgatcttctgcagg

SEQ ID NO: 4976201 - DNA, 25 bp, Homo sapien
ctccttgacattggggttccactcc

SEQ ID NO: 4976202 - DNA, 25 bp, Homo sapien
tgcgctccacgagctcttcatagag

SEQ ID NO: 4976203 - DNA, 25 bp, Homo sapien
tccactcccccattgcttccatgcg

SEQ ID NO: 4976204 - DNA, 25 bp, Homo sapien
tgatctccttgacattggggttcca

SEQ ID NO: 4976205 - DNA, 25 bp, Homo sapien
gttggctcccaaactagtagtctgt

SEQ ID NO: 4976206 - DNA, 25 bp, Homo sapien
cagtgattggcccagggacccttaa

SEQ ID NO: 4976207 - DNA, 25 bp, Homo sapien
tatgggtaggtccaactgaaaagac

SEQ ID NO: 4976208 - DNA, 25 bp, Homo sapien
ccttaactaagagcagtgccgacct

SEQ ID NO: 4976209 - DNA, 25 bp, Homo sapien
ggccatggaccactctgtgttctag

SEQ ID NO: 4976210 - DNA, 25 bp, Homo sapien
caccagcctttaccgtgaacctggt

SEQ ID NO: 4976211 - DNA, 25 bp, Homo sapien
gtgctcaagcgcagagaaccccaga

SEQ ID NO: 4976212 - DNA, 25 bp, Homo sapien
cccctgtgatgggtcagtgctcaag

SEQ ID NO: 4976213 - DNA, 25 bp, Homo sapien
tcttccagccctcttggttgctaag

SEQ ID NO: 4976214 - DNA, 25 bp, Homo sapien
tgtagagagtctcttctagccgaga

SEQ ID NO: 4976215 - DNA, 25 bp, Homo sapien
gtcactgtagagagtctcttctagc

SEQ ID NO: 4976216 - DNA, 25 bp, Homo sapien
tccagccctcttggttgctaaggat

SEQ ID NO: 4976217 - DNA, 25 bp, Homo sapien
ctggatacacagccgaggagagaca

SEQ ID NO: 4976218 - DNA, 25 bp, Homo sapien
atacacagccgaggagagacagagc

SEQ ID NO: 4976219 - DNA, 25 bp, Homo sapien
tacacagccgaggagagacagagct

SEQ ID NO: 4976220 - DNA, 25 bp, Homo sapien
ggatacacagccgaggagagacaga

SEQ ID NO: 4976221 - DNA, 25 bp, Homo sapien
tgaagagcccggactaaagccatag

SEQ ID NO: 4976222 - DNA, 25 bp, Homo sapien
cagagagggatctggccttgaggaa

SEQ ID NO: 4976223 - DNA, 25 bp, Homo sapien
ctctcaaaatgaaggaatggcagga

SEQ ID NO: 4976224 - DNA, 25 bp, Homo sapien
gccagcctgctggtcgagttaatca

SEQ ID NO: 4976225 - DNA, 25 bp, Homo sapien
ttaatccacgtgctaggggtggggc

SEQ ID NO: 4976226 - DNA, 25 bp, Homo sapien
aacctggttaatccacgtgctaggg

SEQ ID NO: 4976227 - DNA, 25 bp, Homo sapien
gagtagagagctccgccgccgaacc

SEQ ID NO: 4976228 - DNA, 25 bp, Homo sapien
cgagtagagagctccgccgccgaac

SEQ ID NO: 4976229 - DNA, 25 bp, Homo sapien
gtctgtaggagctcccagcgcacag

SEQ ID NO: 4976230 - DNA, 25 bp, Homo sapien
tctgtaggagctcccagcgcacagc

SEQ ID NO: 4976231 - DNA, 25 bp, Homo sapien
gcgtcttaaatgtcccccgctgaag

SEQ ID NO: 4976232 - DNA, 25 bp, Homo sapien
aaaaacgccatcactcactgtgcaa

SEQ ID NO: 4976233 - DNA, 25 bp, Homo sapien
ctggtgttctgcgtcttaaatgtcc

SEQ ID NO: 4976234 - DNA, 25 bp, Homo sapien
agataaaaacgccatcactcactgt

SEQ ID NO: 4976235 - DNA, 25 bp, Homo sapien
ccatagacccagtatggacagtcgt

SEQ ID NO: 4976236 - DNA, 25 bp, Homo sapien
ctctatgtggctctaaagttaggac

SEQ ID NO: 4976237 - DNA, 25 bp, Homo sapien
tcaacagtcctttcctgaatgtctc

SEQ ID NO: 4976238 - DNA, 25 bp, Homo sapien
tatggacagtcgtagagcagatgag

SEQ ID NO: 4976239 - DNA, 25 bp, Homo sapien
tgaagactgtccctgtaaactctaa

SEQ ID NO: 4976240 - DNA, 25 bp, Homo sapien
tgtgaaggagtctatgccactgttt

SEQ ID NO: 4976241 - DNA, 25 bp, Homo sapien
tctacagtctgtgatcaaatgcgtg

SEQ ID NO: 4976242 - DNA, 25 bp, Homo sapien
tataaagaagtagttgctggtgcca

SEQ ID NO: 4976243 - DNA, 25 bp, Homo sapien
gctggaggggtgtgtcactctcctt

SEQ ID NO: 4976244 - DNA, 25 bp, Homo sapien
tcaagagtatctgctcgaggaatgg

SEQ ID NO: 4976245 - DNA, 25 bp, Homo sapien
aatttcttcaatggatacttgctgg

SEQ ID NO: 4976246 - DNA, 25 bp, Homo sapien
aatggaaagacctcggtccttcagg

SEQ ID NO: 4976247 - DNA, 25 bp, Homo sapien
gggctgcttatagacagctatctcc

SEQ ID NO: 4976248 - DNA, 25 bp, Homo sapien
gagctttatgtgatccaaaatccca

SEQ ID NO: 4976249 - DNA, 25 bp, Homo sapien
aatccaagagggaggttattgaggc

SEQ ID NO: 4976250 - DNA, 25 bp, Homo sapien
agtgagaccctaactaactccacca

SEQ ID NO: 4976251 - DNA, 25 bp, Homo sapien
gtgtcatccttaagcaggggccgtg

SEQ ID NO: 4976252 - DNA, 25 bp, Homo sapien
agtagatgtgctgccaatgtgagca

SEQ ID NO: 4976253 - DNA, 25 bp, Homo sapien
taaagatatagaagacttcatgaat

SEQ ID NO: 4976254 - DNA, 25 bp, Homo sapien
ttgcgtgtcatccttaagcaggggc

SEQ ID NO: 4976255 - DNA, 25 bp, Homo sapien
tatttctcctagtaggaccacattt

SEQ ID NO: 4976256 - DNA, 25 bp, Homo sapien
tctgaccacaaaaatccctcgagga

SEQ ID NO: 4976257 - DNA, 25 bp, Homo sapien
tccacagtctgatgtagcactaagt

SEQ ID NO: 4976258 - DNA, 25 bp, Homo sapien
ttttttgcccacatgaatacgctcc

SEQ ID NO: 4976259 - DNA, 25 bp, Homo sapien
tatccaataaatgttagcatgaaca

SEQ ID NO: 4976260 - DNA, 25 bp, Homo sapien
ccaataaatgttagcatgaacatga

SEQ ID NO: 4976261 - DNA, 25 bp, Homo sapien
cagtgatttcgcagatatccaataa

SEQ ID NO: 4976262 - DNA, 25 bp, Homo sapien
gctcaaatccagtgatttcgcagat

SEQ ID NO: 4976263 - DNA, 25 bp, Homo sapien
atgcttcttaaaaagcctataagtg

SEQ ID NO: 4976264 - DNA, 25 bp, Homo sapien
gcctataagtgtccttccatctcga

SEQ ID NO: 4976265 - DNA, 25 bp, Homo sapien
tataagtgtccttccatctcgaagc

SEQ ID NO: 4976266 - DNA, 25 bp, Homo sapien
taaaaagcctataagtgtccttcca

SEQ ID NO: 4976267 - DNA, 25 bp, Homo sapien
taaaccatctcatgtcatgtcagtt

SEQ ID NO: 4976268 - DNA, 25 bp, Homo sapien
caaagacccttatgtttgacactta

SEQ ID NO: 4976269 - DNA, 25 bp, Homo sapien
tagccaaagacccttatgtttgaca

SEQ ID NO: 4976270 - DNA, 25 bp, Homo sapien
gacaaatttaatctagatgactatt

SEQ ID NO: 4976271 - DNA, 25 bp, Homo sapien
caaagggtgcatatcaaatggcttc

SEQ ID NO: 4976272 - DNA, 25 bp, Homo sapien
tgggcatatgaagagaacggagaaa

SEQ ID NO: 4976273 - DNA, 25 bp, Homo sapien
tcctcgagcaactaaaacatcctgt

SEQ ID NO: 4976274 - DNA, 25 bp, Homo sapien
gatgagggcaaaagagcatcctcga

SEQ ID NO: 4976275 - DNA, 25 bp, Homo sapien
aggcaccgccatagtgcccagctaa

SEQ ID NO: 4976276 - DNA, 25 bp, Homo sapien
acaggcaccgccatagtgcccagct

SEQ ID NO: 4976277 - DNA, 25 bp, Homo sapien
caggcaccgccatagtgcccagcta

SEQ ID NO: 4976278 - DNA, 25 bp, Homo sapien
ccaattaagtccaactgccgctgtc

SEQ ID NO: 4976279 - DNA, 25 bp, Homo sapien
tgccaattaagtccaactgccgctg

SEQ ID NO: 4976280 - DNA, 25 bp, Homo sapien
tactgccaattaagtccaactgccg

SEQ ID NO: 4976281 - DNA, 25 bp, Homo sapien
atttactgccaattaagtccaactg

SEQ ID NO: 4976282 - DNA, 25 bp, Homo sapien
ccaccggtaacacgctgatacttcg

SEQ ID NO: 4976283 - DNA, 25 bp, Homo sapien
ctgccgcgatccacggaagcaagaa

SEQ ID NO: 4976284 - DNA, 25 bp, Homo sapien
gtgttcgggcctctgctgccgcgat

SEQ ID NO: 4976285 - DNA, 25 bp, Homo sapien
ggtattccgatccatccaccggtaa

SEQ ID NO: 4976286 - DNA, 25 bp, Homo sapien
ggtgggcaagcggtgtgtaccgcag

SEQ ID NO: 4976287 - DNA, 25 bp, Homo sapien
caggctactgggtgggcaagcggtg

SEQ ID NO: 4976288 - DNA, 25 bp, Homo sapien
agcagcaggctactgggtgggcaag

SEQ ID NO: 4976289 - DNA, 25 bp, Homo sapien
tactgggtgggcaagcggtgtgtac

SEQ ID NO: 4976290 - DNA, 25 bp, Homo sapien
ctggcggtgccaggcatatagttca

SEQ ID NO: 4976291 - DNA, 25 bp, Homo sapien
tgtcaatgtcctcgatgaggctggc

SEQ ID NO: 4976292 - DNA, 25 bp, Homo sapien
caatgtcctcgatgaggctggcggt

SEQ ID NO: 4976293 - DNA, 25 bp, Homo sapien
cctcgatgaggctggcggtgccagg

SEQ ID NO: 4976294 - DNA, 25 bp, Homo sapien
cacttcctgtaacacgtgtgggccc

SEQ ID NO: 4976295 - DNA, 25 bp, Homo sapien
cagtcgccgcctcggtgggaccaag

SEQ ID NO: 4976296 - DNA, 25 bp, Homo sapien
ttctgccccggctttcagccgccgg

SEQ ID NO: 4976297 - DNA, 25 bp, Homo sapien
gaggccagcgcgtccaaaacctctt

SEQ ID NO: 4976298 - DNA, 25 bp, Homo sapien
cctgttcctgttaagtaggtaagag

SEQ ID NO: 4976299 - DNA, 25 bp, Homo sapien
taaatggcgaggaaacgtatactcc

SEQ ID NO: 4976300 - DNA, 25 bp, Homo sapien
gaggaaactccattggataaatggc

SEQ ID NO: 4976301 - DNA, 25 bp, Homo sapien
atactccctcttaaggaacacggtg

SEQ ID NO: 4976302 - DNA, 25 bp, Homo sapien
cttcgctgctctccattcgcaatcg

SEQ ID NO: 4976303 - DNA, 25 bp, Homo sapien
tccctcagctttcggggttcggcag

SEQ ID NO: 4976304 - DNA, 25 bp, Homo sapien
cgcctgcgcgatgggtcggccgtgg

SEQ ID NO: 4976305 - DNA, 25 bp, Homo sapien
ggattggctggcgtcgtccgacccc

SEQ ID NO: 4976306 - DNA, 25 bp, Homo sapien
cagccatagttagagtgggaaatta

SEQ ID NO: 4976307 - DNA, 25 bp, Homo sapien
actattgctgcttctatagagggca

SEQ ID NO: 4976308 - DNA, 25 bp, Homo sapien
gtttcacctgtgagcagatttcagc

SEQ ID NO: 4976309 - DNA, 25 bp, Homo sapien
gctcagggaatgaatcagccatagt

SEQ ID NO: 4976310 - DNA, 25 bp, Homo sapien
gactgtcaggcctatgagtaaatac

SEQ ID NO: 4976311 - DNA, 25 bp, Homo sapien
tgcccaagatgccaatttccatgaa

SEQ ID NO: 4976312 - DNA, 25 bp, Homo sapien
ggaggaccttaaagctaagctacca

SEQ ID NO: 4976313 - DNA, 25 bp, Homo sapien
tactggctgggtcttatgattggga

SEQ ID NO: 4976314 - DNA, 25 bp, Homo sapien
tagtagggtctgtagcgtatcccga

SEQ ID NO: 4976315 - DNA, 25 bp, Homo sapien
cacggacactcgaaactgatcttga

SEQ ID NO: 4976316 - DNA, 25 bp, Homo sapien
tgccgtcacggatactagaaactga

SEQ ID NO: 4976317 - DNA, 25 bp, Homo sapien
tagaaactgatctcgaagccccttc

SEQ ID NO: 4976318 - DNA, 25 bp, Homo sapien
ctgttagacctcagcagccagcagc

SEQ ID NO: 4976319 - DNA, 25 bp, Homo sapien
cagcagcccgccgcccggcgctgca

SEQ ID NO: 4976320 - DNA, 25 bp, Homo sapien
gcccgccgcccggcgctgcagctcc

SEQ ID NO: 4976321 - DNA, 25 bp, Homo sapien
agccagcagcccgccgcccggcgct

SEQ ID NO: 4976322 - DNA, 25 bp, Homo sapien
gcccgcaggagccacgtctcgcgcg

SEQ ID NO: 4976323 - DNA, 25 bp, Homo sapien
cgcccgtgccctgcggccctgcacg

SEQ ID NO: 4976324 - DNA, 25 bp, Homo sapien
aggagccacgtctcgcgcgactccc

SEQ ID NO: 4976325 - DNA, 25 bp, Homo sapien
acctctcgcgacacttgccgcccgt

SEQ ID NO: 4976326 - DNA, 25 bp, Homo sapien
cccgccgcctcaccttttcgcctgg

SEQ ID NO: 4976327 - DNA, 25 bp, Homo sapien
cgccgcctcaccttttcgcctggca

SEQ ID NO: 4976328 - DNA, 25 bp, Homo sapien
gccgcctcaccttttcgcctggcat

SEQ ID NO: 4976329 - DNA, 25 bp, Homo sapien
ccgccgcctcaccttttcgcctggc

SEQ ID NO: 4976330 - DNA, 25 bp, Homo sapien
tactcgcccactgggagcgccgtgg

SEQ ID NO: 4976331 - DNA, 25 bp, Homo sapien
gggcccgctactcgcccactgggag

SEQ ID NO: 4976332 - DNA, 25 bp, Homo sapien
gcgcctggtgttcggcgcgagcccg

SEQ ID NO: 4976333 - DNA, 25 bp, Homo sapien
tgggagcgccgtggcgcctggtgtt

SEQ ID NO: 4976334 - DNA, 25 bp, Homo sapien
tttttcagcaggacctgattatgca

SEQ ID NO: 4976335 - DNA, 25 bp, Homo sapien
tatgcactgctatctaggtagggtc

SEQ ID NO: 4976336 - DNA, 25 bp, Homo sapien
tcaatgttcagttgcctggattcaa

SEQ ID NO: 4976337 - DNA, 25 bp, Homo sapien
ttaaagaggtatggtgcatgcaacc

SEQ ID NO: 4976338 - DNA, 25 bp, Homo sapien
tccctgaagaagttgacataaaaat

SEQ ID NO: 4976339 - DNA, 25 bp, Homo sapien
gatgggtcagagataagtgttttaa

SEQ ID NO: 4976340 - DNA, 25 bp, Homo sapien
atactaattaatccctgaagaagtt

SEQ ID NO: 4976341 - DNA, 25 bp, Homo sapien
aataagatgggtcagagataagtgt

SEQ ID NO: 4976342 - DNA, 25 bp, Homo sapien
tagtacttgacagggtgtaaagcct

SEQ ID NO: 4976343 - DNA, 25 bp, Homo sapien
tatctaagagttactgtggcaacag

SEQ ID NO: 4976344 - DNA, 25 bp, Homo sapien
cctagacggacattgagggatcctt

SEQ ID NO: 4976345 - DNA, 25 bp, Homo sapien
tgaaggctaagtctcagtggacatg

SEQ ID NO: 4976346 - DNA, 25 bp, Homo sapien
gacttattgccagaaatcactgatg

SEQ ID NO: 4976347 - DNA, 25 bp, Homo sapien
gatgttgtatatcctaggcctccct

SEQ ID NO: 4976348 - DNA, 25 bp, Homo sapien
ggctgctgaggttctaaataaaacc

SEQ ID NO: 4976349 - DNA, 25 bp, Homo sapien
acctgaaattgtgtagcctctacag

SEQ ID NO: 4976350 - DNA, 25 bp, Homo sapien
caaaggcaggcgagctgtggtttat

SEQ ID NO: 4976351 - DNA, 25 bp, Homo sapien
tatagtctagtgctaagtatgccac

SEQ ID NO: 4976352 - DNA, 25 bp, Homo sapien
gaagccattccttagacagcagtgg

SEQ ID NO: 4976353 - DNA, 25 bp, Homo sapien
tactgtcaccatggagattgtagag

SEQ ID NO: 4976354 - DNA, 25 bp, Homo sapien
tcaaaatgcacagcagtaccagatg

SEQ ID NO: 4976355 - DNA, 25 bp, Homo sapien
tgggattacggcacacaactcctgg

SEQ ID NO: 4976356 - DNA, 25 bp, Homo sapien
gaaccgtaactcctcaagatagatg

SEQ ID NO: 4976357 - DNA, 25 bp, Homo sapien
caacaaattgtttatgcccacggtg

SEQ ID NO: 4976358 - DNA, 25 bp, Homo sapien
taatactgccgatagcagacatagg

SEQ ID NO: 4976359 - DNA, 25 bp, Homo sapien
ggtttatggcattctgcatcagtca

SEQ ID NO: 4976360 - DNA, 25 bp, Homo sapien
tcaaaacaataagaatccccaggct

SEQ ID NO: 4976361 - DNA, 25 bp, Homo sapien
tcagtcagaggaggataatactgcc

SEQ ID NO: 4976362 - DNA, 25 bp, Homo sapien
taagctttgttcagagtgtactaaa

SEQ ID NO: 4976363 - DNA, 25 bp, Homo sapien
ggtccacttattgctattcatctgc

SEQ ID NO: 4976364 - DNA, 25 bp, Homo sapien
actcagaagagtaacaaaggtccac

SEQ ID NO: 4976365 - DNA, 25 bp, Homo sapien
tacagtattatcattgtcaggttgc

SEQ ID NO: 4976366 - DNA, 25 bp, Homo sapien
ttaagagttgcttctcgccgggcac

SEQ ID NO: 4976367 - DNA, 25 bp, Homo sapien
gtattttaagagttgcttctcgccg

SEQ ID NO: 4976368 - DNA, 25 bp, Homo sapien
agagttgcttctcgccgggcacggt

SEQ ID NO: 4976369 - DNA, 25 bp, Homo sapien
ggaccaggcagatggatcccgaggt

SEQ ID NO: 4976370 - DNA, 25 bp, Homo sapien
tgtgggcaatacctccagcgttttt

SEQ ID NO: 4976371 - DNA, 25 bp, Homo sapien
gttcctgaggacctgtgggcaatac

SEQ ID NO: 4976372 - DNA, 25 bp, Homo sapien
tcctgaggacctgtgggcaatacct

SEQ ID NO: 4976373 - DNA, 25 bp, Homo sapien
aggacctgtgggcaatacctccagc

SEQ ID NO: 4976374 - DNA, 25 bp, Homo sapien
taacttgaacttacaatgcttcaaa

SEQ ID NO: 4976375 - DNA, 25 bp, Homo sapien
tacttactatagcattcagcttaaa

SEQ ID NO: 4976376 - DNA, 25 bp, Homo sapien
gccaggtgttctgtaatttggatat

SEQ ID NO: 4976377 - DNA, 25 bp, Homo sapien
cctgtagatgcagtttaacttgaac

SEQ ID NO: 4976378 - DNA, 25 bp, Homo sapien
cacatgtgcgggacagtgcaatcac

SEQ ID NO: 4976379 - DNA, 25 bp, Homo sapien
tgcttgtagtcacatgtgcgggaca

SEQ ID NO: 4976380 - DNA, 25 bp, Homo sapien
gtgatgcttgtagtcacatgtgcgg

SEQ ID NO: 4976381 - DNA, 25 bp, Homo sapien
gtagtcacatgtgcgggacagtgca

SEQ ID NO: 4976382 - DNA, 25 bp, Homo sapien
cagaaaggcacagaacctccaagat

SEQ ID NO: 4976383 - DNA, 25 bp, Homo sapien
tgtggtgtgaagcagtgtaacttcc

SEQ ID NO: 4976384 - DNA, 25 bp, Homo sapien
ccacggccttgtggtgtgaagcagt

SEQ ID NO: 4976385 - DNA, 25 bp, Homo sapien
tccaagatttcccacggccttgtgg

SEQ ID NO: 4976386 - DNA, 25 bp, Homo sapien
ccaggtagaaggacgcaaaggccag

SEQ ID NO: 4976387 - DNA, 25 bp, Homo sapien
gaaggacgcaaaggccagaccagca

SEQ ID NO: 4976388 - DNA, 25 bp, Homo sapien
tgccaggtagaaggacgcaaaggcc

SEQ ID NO: 4976389 - DNA, 25 bp, Homo sapien
tagaaggacgcaaaggccagaccag

SEQ ID NO: 4976390 - DNA, 25 bp, Homo sapien
tcattcatccccacataggaggcta

SEQ ID NO: 4976391 - DNA, 25 bp, Homo sapien
ttaaaggaagctacctcattcatcc

SEQ ID NO: 4976392 - DNA, 25 bp, Homo sapien
ccacataggaggctaggaagcatga

SEQ ID NO: 4976393 - DNA, 25 bp, Homo sapien
cttttaaaggaagctacctcattca

SEQ ID NO: 4976394 - DNA, 25 bp, Homo sapien
ccggccatgagggtgttttaatcct

SEQ ID NO: 4976395 - DNA, 25 bp, Homo sapien
cttatagtgtaagtcattgtgaagg

SEQ ID NO: 4976396 - DNA, 25 bp, Homo sapien
tgtaagtcattgtgaaggaaaggga

SEQ ID NO: 4976397 - DNA, 25 bp, Homo sapien
tagttttcggtatactagctatatg

SEQ ID NO: 4976398 - DNA, 25 bp, Homo sapien
tttacccaaatagtcaaggctcaga

SEQ ID NO: 4976399 - DNA, 25 bp, Homo sapien
tagtacaagattgcaggatctaggc

SEQ ID NO: 4976400 - DNA, 25 bp, Homo sapien
gcaaatctcatgaaggtaaactacc

SEQ ID NO: 4976401 - DNA, 25 bp, Homo sapien
aaacaagagtagtcagattttccca

SEQ ID NO: 4976402 - DNA, 25 bp, Homo sapien
agggaagcagcggtagaagaaatct

SEQ ID NO: 4976403 - DNA, 25 bp, Homo sapien
gggaagctctttcggccctcattca

SEQ ID NO: 4976404 - DNA, 25 bp, Homo sapien
gtccttatcccctgtacacatcaag

SEQ ID NO: 4976405 - DNA, 25 bp, Homo sapien
tcaagtcagaatgggctagcccatc

SEQ ID NO: 4976406 - DNA, 25 bp, Homo sapien
tattggtcaaatagtgccccaggca

SEQ ID NO: 4976407 - DNA, 25 bp, Homo sapien
aataatcctgttaactattggtcaa

SEQ ID NO: 4976408 - DNA, 25 bp, Homo sapien
gaaagcagcatggttggaacgtaaa

SEQ ID NO: 4976409 - DNA, 25 bp, Homo sapien
caggcaaaataaggtaactggctta

SEQ ID NO: 4976410 - DNA, 25 bp, Homo sapien
tgcagcttcaggaggtgctcaagag

SEQ ID NO: 4976411 - DNA, 25 bp, Homo sapien
caggaggtgctcaagaggacactga

SEQ ID NO: 4976412 - DNA, 25 bp, Homo sapien
tttttagggcaaacagcaaatgaca

SEQ ID NO: 4976413 - DNA, 25 bp, Homo sapien
ttagggcaaacagcaaatgacactg

SEQ ID NO: 4976414 - DNA, 25 bp, Homo sapien
ctgctgtggccgttggtgggaaatg

SEQ ID NO: 4976415 - DNA, 25 bp, Homo sapien
cgactgctgtggccgttggtgggaa

SEQ ID NO: 4976416 - DNA, 25 bp, Homo sapien
gactgctgtggccgttggtgggaaa

SEQ ID NO: 4976417 - DNA, 25 bp, Homo sapien
actgctgtggccgttggtgggaaat

SEQ ID NO: 4976418 - DNA, 25 bp, Homo sapien
tattgtgttggtaaagacgccattc

SEQ ID NO: 4976419 - DNA, 25 bp, Homo sapien
tgtgttggtaaagacgccattcaga

SEQ ID NO: 4976420 - DNA, 25 bp, Homo sapien
tgttggtaaagacgccattcagagc

SEQ ID NO: 4976421 - DNA, 25 bp, Homo sapien
ttattgtgttggtaaagacgccatt

SEQ ID NO: 4976422 - DNA, 25 bp, Homo sapien
aaaggatctgtctaggaggaaaggt

SEQ ID NO: 4976423 - DNA, 25 bp, Homo sapien
aaggtatggtcatggcctcgttatg

SEQ ID NO: 4976424 - DNA, 25 bp, Homo sapien
ggcctcgttatgagagcagccgtgc

SEQ ID NO: 4976425 - DNA, 25 bp, Homo sapien
caaagccattagttgaaaggatctg

SEQ ID NO: 4976426 - DNA, 25 bp, Homo sapien
ctgagatggatagaatccaaccagg

SEQ ID NO: 4976427 - DNA, 25 bp, Homo sapien
tgagatggatagaatccaaccaggc

SEQ ID NO: 4976428 - DNA, 25 bp, Homo sapien
tttaggaatgcagaactcagtggcc

SEQ ID NO: 4976429 - DNA, 25 bp, Homo sapien
tgccgtgtagcctgcgtaaccaagt

SEQ ID NO: 4976430 - DNA, 25 bp, Homo sapien
tagccgagaacttttgtactaggcc

SEQ ID NO: 4976431 - DNA, 25 bp, Homo sapien
taacccagtgcatttaggcacaggg

SEQ ID NO: 4976432 - DNA, 25 bp, Homo sapien
ccaggcaggcttgtctgctgtctct

SEQ ID NO: 4976433 - DNA, 25 bp, Homo sapien
gtctgctgtctcttgtgtctgcctt

SEQ ID NO: 4976434 - DNA, 25 bp, Homo sapien
ggcttgtctgctgtctcttgtgtct

SEQ ID NO: 4976435 - DNA, 25 bp, Homo sapien
caggcaggcttgtctgctgtctctt

SEQ ID NO: 4976436 - DNA, 25 bp, Homo sapien
gaaatttggccaggaagatcagaga

SEQ ID NO: 4976437 - DNA, 25 bp, Homo sapien
atttggccaggaagatcagagacag

SEQ ID NO: 4976438 - DNA, 25 bp, Homo sapien
tgagaaatttggccaggaagatcag

SEQ ID NO: 4976439 - DNA, 25 bp, Homo sapien
cttgagaaatttggccaggaagatc

SEQ ID NO: 4976440 - DNA, 25 bp, Homo sapien
tcgtgctcctacaggaaagagggat

SEQ ID NO: 4976441 - DNA, 25 bp, Homo sapien
gaatgtcagaggttaaaaacaatcc

SEQ ID NO: 4976442 - DNA, 25 bp, Homo sapien
tcagaatgtcagaggttaaaaacaa

SEQ ID NO: 4976443 - DNA, 25 bp, Homo sapien
ccacactcgtgctcctacaggaaag

SEQ ID NO: 4976444 - DNA, 25 bp, Homo sapien
aatcaggatcttaaacactcgagcc

SEQ ID NO: 4976445 - DNA, 25 bp, Homo sapien
gagcgcccgggaaaacgttgtctca

SEQ ID NO: 4976446 - DNA, 25 bp, Homo sapien
gctaacataaggtctctgagtgcgc

SEQ ID NO: 4976447 - DNA, 25 bp, Homo sapien
ttgtctcagcccaaagaggctcgga

SEQ ID NO: 4976448 - DNA, 25 bp, Homo sapien
gtgggcagtgggtccctacaaaggc

SEQ ID NO: 4976449 - DNA, 25 bp, Homo sapien
agtgggcagtgggtccctacaaagg

SEQ ID NO: 4976450 - DNA, 25 bp, Homo sapien
ccagcgcacagcagcggagtgggca

SEQ ID NO: 4976451 - DNA, 25 bp, Homo sapien
ggtgcccgcgggaagccgggtcatg

SEQ ID NO: 4976452 - DNA, 25 bp, Homo sapien
gtgcccgcgggaagccgggtcatgg

SEQ ID NO: 4976453 - DNA, 25 bp, Homo sapien
aggtgcccgcgggaagccgggtcat

SEQ ID NO: 4976454 - DNA, 25 bp, Homo sapien
tgcccgcgggaagccgggtcatggg

SEQ ID NO: 4976455 - DNA, 25 bp, Homo sapien
tggggaaatactccgcctccacgta

SEQ ID NO: 4976456 - DNA, 25 bp, Homo sapien
cgtaggggttccggtagagccacat

SEQ ID NO: 4976457 - DNA, 25 bp, Homo sapien
gagtctctggaacggggggagcagc

SEQ ID NO: 4976458 - DNA, 25 bp, Homo sapien
gatgagtctctggaacggggggagc

SEQ ID NO: 4976459 - DNA, 25 bp, Homo sapien
gtctctggaacggggggagcagctc

SEQ ID NO: 4976460 - DNA, 25 bp, Homo sapien
ctcctccggctggatgagtctctgg

SEQ ID NO: 4976461 - DNA, 25 bp, Homo sapien
cgcccgcctgcctgggaagcggggc

SEQ ID NO: 4976462 - DNA, 25 bp, Homo sapien
cgcctgcctgggaagcggggccgcc

SEQ ID NO: 4976463 - DNA, 25 bp, Homo sapien
gaggggaacaaagaagcgcagagca

SEQ ID NO: 4976464 - DNA, 25 bp, Homo sapien
ggggaacaaagaagcgcagagcagg

SEQ ID NO: 4976465 - DNA, 25 bp, Homo sapien
gcgaacagcgcgagccgcacgccca

SEQ ID NO: 4976466 - DNA, 25 bp, Homo sapien
aggaaggccgcgaacagcgcgagcc

SEQ ID NO: 4976467 - DNA, 25 bp, Homo sapien
cgcgaacagcgcgagccgcacgccc

SEQ ID NO: 4976468 - DNA, 25 bp, Homo sapien
aaggccgcgaacagcgcgagccgca

SEQ ID NO: 4976469 - DNA, 25 bp, Homo sapien
tggcaaagggtacgcaaagccagcg

SEQ ID NO: 4976470 - DNA, 25 bp, Homo sapien
tgtgccgagggcatcgtctggcaaa

SEQ ID NO: 4976471 - DNA, 25 bp, Homo sapien
ccctctggtgcgttcagcagggagc

SEQ ID NO: 4976472 - DNA, 25 bp, Homo sapien
gtaggtcggcgtacggtccatcatc

SEQ ID NO: 4976473 - DNA, 25 bp, Homo sapien
tcaagagcttctagccaagtcacag

SEQ ID NO: 4976474 - DNA, 25 bp, Homo sapien
cagtaatgccctagtggaacacccc

SEQ ID NO: 4976475 - DNA, 25 bp, Homo sapien
gctttacacgtttcacactatgcaa

SEQ ID NO: 4976476 - DNA, 25 bp, Homo sapien
gactcaagtctcaagtgatttaggc

SEQ ID NO: 4976477 - DNA, 25 bp, Homo sapien
tgattcttccctcgcagcagtggcg

SEQ ID NO: 4976478 - DNA, 25 bp, Homo sapien
tgaggagaactccttggcaccagca

SEQ ID NO: 4976479 - DNA, 25 bp, Homo sapien
gaagcccaatgagtcaccgcagaat

SEQ ID NO: 4976480 - DNA, 25 bp, Homo sapien
taactttagtctacgctgcccagaa

SEQ ID NO: 4976481 - DNA, 25 bp, Homo sapien
caaaggctgtatgcactgtagcagt

SEQ ID NO: 4976482 - DNA, 25 bp, Homo sapien
gaaagagaagtgagcctacctactg

SEQ ID NO: 4976483 - DNA, 25 bp, Homo sapien
ttcaagctgcaatggcactgaagca

SEQ ID NO: 4976484 - DNA, 25 bp, Homo sapien
taataaggcagttccgatggcaaag

SEQ ID NO: 4976485 - DNA, 25 bp, Homo sapien
ctccatgatcttgtgattcccattt

SEQ ID NO: 4976486 - DNA, 25 bp, Homo sapien
gcagcagaggcggccttccagtgca

SEQ ID NO: 4976487 - DNA, 25 bp, Homo sapien
gtcatgttccgagcagcagaggcgg

SEQ ID NO: 4976488 - DNA, 25 bp, Homo sapien
gaggcggccttccagtgcagaggga

SEQ ID NO: 4976489 - DNA, 25 bp, Homo sapien
gagccatggggtcatgttccgagca

SEQ ID NO: 4976490 - DNA, 25 bp, Homo sapien
tgatgccacggacactcccactttc

SEQ ID NO: 4976491 - DNA, 25 bp, Homo sapien
tgctgcactcatcgcactgatgcca

SEQ ID NO: 4976492 - DNA, 25 bp, Homo sapien
tgcactgctgcactcatcgcactga

SEQ ID NO: 4976493 - DNA, 25 bp, Homo sapien
gcactcatcgcactgatgccacgga

SEQ ID NO: 4976494 - DNA, 25 bp, Homo sapien
cttcatttgttgacgcacatgccga

SEQ ID NO: 4976495 - DNA, 25 bp, Homo sapien
catatggtggctgagtcaggttaag

SEQ ID NO: 4976496 - DNA, 25 bp, Homo sapien
taaggcataggaggtggtatgcttt

SEQ ID NO: 4976497 - DNA, 25 bp, Homo sapien
ttttttgtcacacatgaccagctct

SEQ ID NO: 4976498 - DNA, 25 bp, Homo sapien
ctttggccgcactcctagaaaacca

SEQ ID NO: 4976499 - DNA, 25 bp, Homo sapien
tggccgcactcctagaaaaccactg

SEQ ID NO: 4976500 - DNA, 25 bp, Homo sapien
gcccagacaatctaggttataatta

SEQ ID NO: 4976501 - DNA, 25 bp, Homo sapien
cacagtggcactccgttctgccgtt

SEQ ID NO: 4976502 - DNA, 25 bp, Homo sapien
attattcaaactcgagtcatgggga

SEQ ID NO: 4976503 - DNA, 25 bp, Homo sapien
ataattattcaaactcgagtcatgg

SEQ ID NO: 4976504 - DNA, 25 bp, Homo sapien
taattattcaaactcgagtcatggg

SEQ ID NO: 4976505 - DNA, 25 bp, Homo sapien
attcaaactcgagtcatggggaaga

SEQ ID NO: 4976506 - DNA, 25 bp, Homo sapien
aaagcatggggaacgagtcactttt

SEQ ID NO: 4976507 - DNA, 25 bp, Homo sapien
ggaggaaagcatggggaacgagtca

SEQ ID NO: 4976508 - DNA, 25 bp, Homo sapien
agcatggggaacgagtcactttttt

SEQ ID NO: 4976509 - DNA, 25 bp, Homo sapien
gcatggggaacgagtcactttttta

SEQ ID NO: 4976510 - DNA, 25 bp, Homo sapien
ttgggccggcatcaattatacggtc

SEQ ID NO: 4976511 - DNA, 25 bp, Homo sapien
taatttccttttgggccggcatcaa

SEQ ID NO: 4976512 - DNA, 25 bp, Homo sapien
tagtcccactcgaacatctccattc

SEQ ID NO: 4976513 - DNA, 25 bp, Homo sapien
ttacaactgtggttcatgaagcgag

SEQ ID NO: 4976514 - DNA, 25 bp, Homo sapien
ttacataaattaagtctctcccaga

SEQ ID NO: 4976515 - DNA, 25 bp, Homo sapien
tacataaattaagtctctcccagaa

SEQ ID NO: 4976516 - DNA, 25 bp, Homo sapien
gactactgtgtaggatatattctcc

SEQ ID NO: 4976517 - DNA, 25 bp, Homo sapien
gaaacaaaacttggagagctgtctg

SEQ ID NO: 4976518 - DNA, 25 bp, Homo sapien
gctaccaactggtgtttgacaactg

SEQ ID NO: 4976519 - DNA, 25 bp, Homo sapien
gaggctgcctgggtaatttactaag

SEQ ID NO: 4976520 - DNA, 25 bp, Homo sapien
tcacagagttgattctctccttcag

SEQ ID NO: 4976521 - DNA, 25 bp, Homo sapien
ctccagtagaactttaataacggtg

SEQ ID NO: 4976522 - DNA, 25 bp, Homo sapien
tgaggcccaggacttttttgacaaa

SEQ ID NO: 4976523 - DNA, 25 bp, Homo sapien
ccatgccctgccgaaaagttttaat

SEQ ID NO: 4976524 - DNA, 25 bp, Homo sapien
ggctcgcttgattcgcaatctgcat

SEQ ID NO: 4976525 - DNA, 25 bp, Homo sapien
catcaattaattcaccgacgtattc

SEQ ID NO: 4976526 - DNA, 25 bp, Homo sapien
tgttctcgtgggctcgcttgattcg

SEQ ID NO: 4976527 - DNA, 25 bp, Homo sapien
aattcaccgacgtattcatttacaa

SEQ ID NO: 4976528 - DNA, 25 bp, Homo sapien
ctgacctcggctgtgaccactgtgc

SEQ ID NO: 4976529 - DNA, 25 bp, Homo sapien
cctgacctcggctgtgaccactgtg

SEQ ID NO: 4976530 - DNA, 25 bp, Homo sapien
tgacctcggctgtgaccactgtgcc

SEQ ID NO: 4976531 - DNA, 25 bp, Homo sapien
tcctgacctcggctgtgaccactgt

SEQ ID NO: 4976532 - DNA, 25 bp, Homo sapien
cctttttatgactagccactggaca

SEQ ID NO: 4976533 - DNA, 25 bp, Homo sapien
gaaaagccaggttctggtctcttcc

SEQ ID NO: 4976534 - DNA, 25 bp, Homo sapien
gtaccaaactctcaacatggaaagt

SEQ ID NO: 4976535 - DNA, 25 bp, Homo sapien
ccactggacactcaaagtttaagca

SEQ ID NO: 4976536 - DNA, 25 bp, Homo sapien
taatgctccttttggtcctgaggcc

SEQ ID NO: 4976537 - DNA, 25 bp, Homo sapien
tccgctccgttttgatgatctctgc

SEQ ID NO: 4976538 - DNA, 25 bp, Homo sapien
ggttctgacaacgatctccagctgg

SEQ ID NO: 4976539 - DNA, 25 bp, Homo sapien
tcagctggcttgcagttacagcggg

SEQ ID NO: 4976540 - DNA, 25 bp, Homo sapien
caatctctagggcttctttactttc

SEQ ID NO: 4976541 - DNA, 25 bp, Homo sapien
tttcaattcctggaaacgttttgca

SEQ ID NO: 4976542 - DNA, 25 bp, Homo sapien
tcaattcctggaaacgttttgcagc

SEQ ID NO: 4976543 - DNA, 25 bp, Homo sapien
ttgtgctttcaattcctggaaacgt

SEQ ID NO: 4976544 - DNA, 25 bp, Homo sapien
tgttaatactagtctgcccttcagc

SEQ ID NO: 4976545 - DNA, 25 bp, Homo sapien
cccagtagtagtcatgagaaccaaa

SEQ ID NO: 4976546 - DNA, 25 bp, Homo sapien
ccctggatgttcagtggcacagacc

SEQ ID NO: 4976547 - DNA, 25 bp, Homo sapien
ccccaagtcatgtttaaggccctgg

SEQ ID NO: 4976548 - DNA, 25 bp, Homo sapien
acaaaagcaattttagatcaagagg

SEQ ID NO: 4976549 - DNA, 25 bp, Homo sapien
caaaagcaattttagatcaagaggg

SEQ ID NO: 4976550 - DNA, 25 bp, Homo sapien
aaaagcaattttagatcaagagggc

SEQ ID NO: 4976551 - DNA, 25 bp, Homo sapien
ctgttcagcaaaggctcgttgaagc

SEQ ID NO: 4976552 - DNA, 25 bp, Homo sapien
actggtctgcacaatgattgaatac

SEQ ID NO: 4976553 - DNA, 25 bp, Homo sapien
tctgtatccagagtatgaaactggt

SEQ ID NO: 4976554 - DNA, 25 bp, Homo sapien
gtatgaaactggtctgcacaatgat

SEQ ID NO: 4976555 - DNA, 25 bp, Homo sapien
ccaagtcactctgtatccagagtat

SEQ ID NO: 4976556 - DNA, 25 bp, Homo sapien
gcagccttctggcatttctatgctt

SEQ ID NO: 4976557 - DNA, 25 bp, Homo sapien
gaagctgggcacgattcacagcaga

SEQ ID NO: 4976558 - DNA, 25 bp, Homo sapien
tgccagctttacagtcattacaatt

SEQ ID NO: 4976559 - DNA, 25 bp, Homo sapien
tatgcttaggcattccgggtggaag

SEQ ID NO: 4976560 - DNA, 25 bp, Homo sapien
ttgaaacaaataaacagtcttaata

SEQ ID NO: 4976561 - DNA, 25 bp, Homo sapien
tgaaacaaataaacagtcttaataa

SEQ ID NO: 4976562 - DNA, 25 bp, Homo sapien
cttgaaacaaataaacagtcttaat

SEQ ID NO: 4976563 - DNA, 25 bp, Homo sapien
tctacagtgatggattaaaatagca

SEQ ID NO: 4976564 - DNA, 25 bp, Homo sapien
taaactatgggctactgaggtatca

SEQ ID NO: 4976565 - DNA, 25 bp, Homo sapien
tagcaagtgaacgtatttagctact

SEQ ID NO: 4976566 - DNA, 25 bp, Homo sapien
gagtagtaccaaaagcatccatgta

SEQ ID NO: 4976567 - DNA, 25 bp, Homo sapien
gaagcccaatgacagaacatattct

SEQ ID NO: 4976568 - DNA, 25 bp, Homo sapien
tgaatgatagtttcacaccaggaaa

SEQ ID NO: 4976569 - DNA, 25 bp, Homo sapien
caccaaggcagaatttaccaaaagc

SEQ ID NO: 4976570 - DNA, 25 bp, Homo sapien
aagaaacagtcacaaccaccaaggc

SEQ ID NO: 4976571 - DNA, 25 bp, Homo sapien
gacttataggcatatgaactgaaca

SEQ ID NO: 4976572 - DNA, 25 bp, Homo sapien
aagctgacgaagaaggaatcatagg

SEQ ID NO: 4976573 - DNA, 25 bp, Homo sapien
catcaactcagcacgatttgattca

SEQ ID NO: 4976574 - DNA, 25 bp, Homo sapien
cagtaggtagtgggacttataggca

SEQ ID NO: 4976575 - DNA, 25 bp, Homo sapien
cgaaacaaacagaaagagatgagct

SEQ ID NO: 4976576 - DNA, 25 bp, Homo sapien
gagatgagctgcaatgaaactaccc

SEQ ID NO: 4976577 - DNA, 25 bp, Homo sapien
ctatacgaaacaaacagaaagagat

SEQ ID NO: 4976578 - DNA, 25 bp, Homo sapien
gcaatgaaactacccatgattccat

SEQ ID NO: 4976579 - DNA, 25 bp, Homo sapien
ctattatgtatgcttcaaagctggg

SEQ ID NO: 4976580 - DNA, 25 bp, Homo sapien
gaaagatctgacagaaaggttttct

SEQ ID NO: 4976581 - DNA, 25 bp, Homo sapien
tggggagggcgaaaatgagaatatg

SEQ ID NO: 4976582 - DNA, 25 bp, Homo sapien
aaaccaacacctattatgtatgctt

SEQ ID NO: 4976583 - DNA, 25 bp, Homo sapien
gagtgataggcaactggacatctta

SEQ ID NO: 4976584 - DNA, 25 bp, Homo sapien
agaagaattactgctccgtttggaa

SEQ ID NO: 4976585 - DNA, 25 bp, Homo sapien
tctggcacaaacgaaacaaaagcct

SEQ ID NO: 4976586 - DNA, 25 bp, Homo sapien
gatactaacatgcttccggccgcaa

SEQ ID NO: 4976587 - DNA, 25 bp, Homo sapien
aatttcccacaagcaccaacagaac

SEQ ID NO: 4976588 - DNA, 25 bp, Homo sapien
agtgctgaggacagcggaatccttt

SEQ ID NO: 4976589 - DNA, 25 bp, Homo sapien
gaacaacgcttcacatctttaccag

SEQ ID NO: 4976590 - DNA, 25 bp, Homo sapien
ggaatttgcggacacaggcttcatg

SEQ ID NO: 4976591 - DNA, 25 bp, Homo sapien
tcattctaatgggtatcaagtggca

SEQ ID NO: 4976592 - DNA, 25 bp, Homo sapien
tatacccagagtgaaattgcttgac

SEQ ID NO: 4976593 - DNA, 25 bp, Homo sapien
ttttcaacagccactacaccatttt

SEQ ID NO: 4976594 - DNA, 25 bp, Homo sapien
tccaatttctccatagttaagccaa

SEQ ID NO: 4976595 - DNA, 25 bp, Homo sapien
tctccctcacaaggaatcagagagt

SEQ ID NO: 4976596 - DNA, 25 bp, Homo sapien
tcacaaggaatcagagagtcaccag

SEQ ID NO: 4976597 - DNA, 25 bp, Homo sapien
tgctatcaggaagtgatgccaatcc

SEQ ID NO: 4976598 - DNA, 25 bp, Homo sapien
gttttacattccatgcagatgaact

SEQ ID NO: 4976599 - DNA, 25 bp, Homo sapien
tctgcatctgcagtagctgaagggc

SEQ ID NO: 4976600 - DNA, 25 bp, Homo sapien
cgacaaacttgaatccatggactgc

SEQ ID NO: 4976601 - DNA, 25 bp, Homo sapien
gaagggctatctacttgctttccaa

SEQ ID NO: 4976602 - DNA, 25 bp, Homo sapien
tggactgcacatcagaaacgtctgc

SEQ ID NO: 4976603 - DNA, 25 bp, Homo sapien
ctagaatcggagtcagatgtgtctc

SEQ ID NO: 4976604 - DNA, 25 bp, Homo sapien
cctctagaatcggagtcagatgtgt

SEQ ID NO: 4976605 - DNA, 25 bp, Homo sapien
tgcaggtcactcagtcctctagaat

SEQ ID NO: 4976606 - DNA, 25 bp, Homo sapien
cagtcctctagaatcggagtcagat

SEQ ID NO: 4976607 - DNA, 25 bp, Homo sapien
tacatcagttgaggcgcgactcctt

SEQ ID NO: 4976608 - DNA, 25 bp, Homo sapien
cagttgaggcgcgactccttttctt

SEQ ID NO: 4976609 - DNA, 25 bp, Homo sapien
ttctacatcagttgaggcgcgactc

SEQ ID NO: 4976610 - DNA, 25 bp, Homo sapien
tcagttgaggcgcgactccttttct

SEQ ID NO: 4976611 - DNA, 25 bp, Homo sapien
catgaagatccgcaacaggctgagt

SEQ ID NO: 4976612 - DNA, 25 bp, Homo sapien
gaaacaagtctcctgaggccatgaa

SEQ ID NO: 4976613 - DNA, 25 bp, Homo sapien
tattgtgaccattaacaagcgctgc

SEQ ID NO: 4976614 - DNA, 25 bp, Homo sapien
tctagatcaacccagcaagctatgg

SEQ ID NO: 4976615 - DNA, 25 bp, Homo sapien
tatcaagccgccgacaaagaaatct

SEQ ID NO: 4976616 - DNA, 25 bp, Homo sapien
cttgcatggagactacaagtctgga

SEQ ID NO: 4976617 - DNA, 25 bp, Homo sapien
tttgggctgtttggcaaacccctgc

SEQ ID NO: 4976618 - DNA, 25 bp, Homo sapien
ggacccatgatttaagctgtaccca

SEQ ID NO: 4976619 - DNA, 25 bp, Homo sapien
gagacggagctgtcactgaatctga

SEQ ID NO: 4976620 - DNA, 25 bp, Homo sapien
tcctcaatcgctgcggagacggagc

SEQ ID NO: 4976621 - DNA, 25 bp, Homo sapien
agtttcctcaatcgctgcggagacg

SEQ ID NO: 4976622 - DNA, 25 bp, Homo sapien
cacagtttcctcaatcgctgcggag

SEQ ID NO: 4976623 - DNA, 25 bp, Homo sapien
agccctgcactccccggtccgccga

SEQ ID NO: 4976624 - DNA, 25 bp, Homo sapien
gagccctgcactccccggtccgccg

SEQ ID NO: 4976625 - DNA, 25 bp, Homo sapien
agagccctgcactccccggtccgcc

SEQ ID NO: 4976626 - DNA, 25 bp, Homo sapien
gccctgcactccccggtccgccgac

SEQ ID NO: 4976627 - DNA, 25 bp, Homo sapien
tggtggaaacacaacgcaatcaggc

SEQ ID NO: 4976628 - DNA, 25 bp, Homo sapien
gacttctccccgagaatgcagagag

SEQ ID NO: 4976629 - DNA, 25 bp, Homo sapien
aatcaggcctcctaatctcgcagcg

SEQ ID NO: 4976630 - DNA, 25 bp, Homo sapien
gatgtcttttcttggagctccgcca

SEQ ID NO: 4976631 - DNA, 25 bp, Homo sapien
tcactgtagcctgaggaactgtttc

SEQ ID NO: 4976632 - DNA, 25 bp, Homo sapien
ttctgtaatccagtcttcactgtag

SEQ ID NO: 4976633 - DNA, 25 bp, Homo sapien
gtcttcactgtagcctgaggaactg

SEQ ID NO: 4976634 - DNA, 25 bp, Homo sapien
ctttctgtaatccagtcttcactgt

SEQ ID NO: 4976635 - DNA, 25 bp, Homo sapien
tctgtctcaagatcagggagggttt

SEQ ID NO: 4976636 - DNA, 25 bp, Homo sapien
ttgtttctgcaaccggccccaatgt

SEQ ID NO: 4976637 - DNA, 25 bp, Homo sapien
cctacattaggagagcgagatcaga

SEQ ID NO: 4976638 - DNA, 25 bp, Homo sapien
tgtagagagtgctacagggctccat

SEQ ID NO: 4976639 - DNA, 25 bp, Homo sapien
cccaccaggacagaagcgttaagat

SEQ ID NO: 4976640 - DNA, 25 bp, Homo sapien
cttgaagcagaatcacagggatggc

SEQ ID NO: 4976641 - DNA, 25 bp, Homo sapien
gcttggtgataccacagagcaccca

SEQ ID NO: 4976642 - DNA, 25 bp, Homo sapien
gactgattttgggaaccagctggca

SEQ ID NO: 4976643 - DNA, 25 bp, Homo sapien
ttaactctctacatgtaggaagcca

SEQ ID NO: 4976644 - DNA, 25 bp, Homo sapien
ctttttgatcttcttctttggcaca

SEQ ID NO: 4976645 - DNA, 25 bp, Homo sapien
tgctcctttttgatcttcttctttg

SEQ ID NO: 4976646 - DNA, 25 bp, Homo sapien
ctgctcctttttgatcttcttcttt

SEQ ID NO: 4976647 - DNA, 25 bp, Homo sapien
tttgatcttcttctttggcacaacc

SEQ ID NO: 4976648 - DNA, 25 bp, Homo sapien
tctaattgatcttctctgttgcttc

SEQ ID NO: 4976649 - DNA, 25 bp, Homo sapien
agttctaattgatcttctctgttgc

SEQ ID NO: 4976650 - DNA, 25 bp, Homo sapien
gttctaattgatcttctctgttgct

SEQ ID NO: 4976651 - DNA, 25 bp, Homo sapien
ttctaattgatcttctctgttgctt

SEQ ID NO: 4976652 - DNA, 25 bp, Homo sapien
ggctgataagctgagactgggattc

SEQ ID NO: 4976653 - DNA, 25 bp, Homo sapien
ctgggattcacaaagggtcctaaat

SEQ ID NO: 4976654 - DNA, 25 bp, Homo sapien
ttaagatatgaccacattccttgct

SEQ ID NO: 4976655 - DNA, 25 bp, Homo sapien
taaggataccttgacatctatgtaa

SEQ ID NO: 4976656 - DNA, 25 bp, Homo sapien
gatgatacactctgcgttggctttt

SEQ ID NO: 4976657 - DNA, 25 bp, Homo sapien
gatacactctgcgttggcttttcat

SEQ ID NO: 4976658 - DNA, 25 bp, Homo sapien
aggagatgatacactctgcgttggc

SEQ ID NO: 4976659 - DNA, 25 bp, Homo sapien
acactctgcgttggcttttcatttc

SEQ ID NO: 4976660 - DNA, 25 bp, Homo sapien
caggctattttaacaggcggtggct

SEQ ID NO: 4976661 - DNA, 25 bp, Homo sapien
gcacagatcttggtcgtcgggtttt

SEQ ID NO: 4976662 - DNA, 25 bp, Homo sapien
tgcatcgtaatggaagctggtaagg

SEQ ID NO: 4976663 - DNA, 25 bp, Homo sapien
gccgcctctggctatgtctccgaat

SEQ ID NO: 4976664 - DNA, 25 bp, Homo sapien
atgacctttatactctcgtacccgt

SEQ ID NO: 4976665 - DNA, 25 bp, Homo sapien
tatactctcgtacccgtttttcatg

SEQ ID NO: 4976666 - DNA, 25 bp, Homo sapien
tactctcgtacccgtttttcatgaa

SEQ ID NO: 4976667 - DNA, 25 bp, Homo sapien
atactctcgtacccgtttttcatga

SEQ ID NO: 4976668 - DNA, 25 bp, Homo sapien
gtcaagaaacaagcacatctgtctc

SEQ ID NO: 4976669 - DNA, 25 bp, Homo sapien
cctgacacctggaaaactatgaaat

SEQ ID NO: 4976670 - DNA, 25 bp, Homo sapien
tctgtctctgactgaagagctaaat

SEQ ID NO: 4976671 - DNA, 25 bp, Homo sapien
gaagctacagacctgaaaagtcaag

SEQ ID NO: 4976672 - DNA, 25 bp, Homo sapien
aattttagtatgaacctcaagctgg

SEQ ID NO: 4976673 - DNA, 25 bp, Homo sapien
gttaattttagtatgaacctcaagc

SEQ ID NO: 4976674 - DNA, 25 bp, Homo sapien
attttagtatgaacctcaagctggg

SEQ ID NO: 4976675 - DNA, 25 bp, Homo sapien
taattttagtatgaacctcaagctg

SEQ ID NO: 4976676 - DNA, 25 bp, Homo sapien
ctgatacagtgtcaaccctctcatt

SEQ ID NO: 4976677 - DNA, 25 bp, Homo sapien
tctgatacagtgtcaaccctctcat

SEQ ID NO: 4976678 - DNA, 25 bp, Homo sapien
gggattttgtgtgacttgcgctctt

SEQ ID NO: 4976679 - DNA, 25 bp, Homo sapien
ttttgtgtgacttgcgctcttcaga

SEQ ID NO: 4976680 - DNA, 25 bp, Homo sapien
ttcgtgtgctcacttgcctgtactt

SEQ ID NO: 4976681 - DNA, 25 bp, Homo sapien
gtgacttgcgctcttcagatcttga

SEQ ID NO: 4976682 - DNA, 25 bp, Homo sapien
tttggaatcacagtttgtggtaccg

SEQ ID NO: 4976683 - DNA, 25 bp, Homo sapien
cacagtttgtggtaccgaaggagga

SEQ ID NO: 4976684 - DNA, 25 bp, Homo sapien
tgtggtaccgaaggaggaggtggtg

SEQ ID NO: 4976685 - DNA, 25 bp, Homo sapien
gaatcacagtttgtggtaccgaagg

SEQ ID NO: 4976686 - DNA, 25 bp, Homo sapien
tttccagaatttcatgtggtcttgt

SEQ ID NO: 4976687 - DNA, 25 bp, Homo sapien
tccagaatttcatgtggtcttgtgt

SEQ ID NO: 4976688 - DNA, 25 bp, Homo sapien
ccagaatttcatgtggtcttgtgtt

SEQ ID NO: 4976689 - DNA, 25 bp, Homo sapien
ttccagaatttcatgtggtcttgtg

SEQ ID NO: 4976690 - DNA, 25 bp, Homo sapien
catacacactgattgatgatggata

SEQ ID NO: 4976691 - DNA, 25 bp, Homo sapien
cactgattgatgatggatacccatt

SEQ ID NO: 4976692 - DNA, 25 bp, Homo sapien
cacactgattgatgatggataccca

SEQ ID NO: 4976693 - DNA, 25 bp, Homo sapien
tacacactgattgatgatggatacc

SEQ ID NO: 4976694 - DNA, 25 bp, Homo sapien
tgctgaattgtgtttcccatgatcc

SEQ ID NO: 4976695 - DNA, 25 bp, Homo sapien
gttgctgaattgtgtttcccatgat

SEQ ID NO: 4976696 - DNA, 25 bp, Homo sapien
ctgaattgtgtttcccatgatccct

SEQ ID NO: 4976697 - DNA, 25 bp, Homo sapien
gctgaattgtgtttcccatgatccc

SEQ ID NO: 4976698 - DNA, 25 bp, Homo sapien
gctccagcatccttaactttccctt

SEQ ID NO: 4976699 - DNA, 25 bp, Homo sapien
taactttccctttctctcatcgggc

SEQ ID NO: 4976700 - DNA, 25 bp, Homo sapien
agcatccttaactttccctttctct

SEQ ID NO: 4976701 - DNA, 25 bp, Homo sapien
ctgctccagcatccttaactttccc

SEQ ID NO: 4976702 - DNA, 25 bp, Homo sapien
gattactttcacaacaactgtggca

SEQ ID NO: 4976703 - DNA, 25 bp, Homo sapien
tatttcccaagttagagatcgtctc

SEQ ID NO: 4976704 - DNA, 25 bp, Homo sapien
tcataggctagaggctaatcaactg

SEQ ID NO: 4976705 - DNA, 25 bp, Homo sapien
tgtttgcaaaataagcagtgtcctg

SEQ ID NO: 4976706 - DNA, 25 bp, Homo sapien
agggtgaggtgggtagatcaactga

SEQ ID NO: 4976707 - DNA, 25 bp, Homo sapien
gtgaggtgggtagatcaactgagat

SEQ ID NO: 4976708 - DNA, 25 bp, Homo sapien
taaaaattccttaggctgggagcag

SEQ ID NO: 4976709 - DNA, 25 bp, Homo sapien
ttaaaaattccttaggctgggagca

SEQ ID NO: 4976710 - DNA, 25 bp, Homo sapien
tctttgcatggaggtagtaacagaa

SEQ ID NO: 4976711 - DNA, 25 bp, Homo sapien
tatgctcttggaacctaactcaaag

SEQ ID NO: 4976712 - DNA, 25 bp, Homo sapien
tatgcgtgcctctcagaattaacca

SEQ ID NO: 4976713 - DNA, 25 bp, Homo sapien
tgttctaagatattctatgcgtgcc

SEQ ID NO: 4976714 - DNA, 25 bp, Homo sapien
aattatgtttgatacttgaacaata

SEQ ID NO: 4976715 - DNA, 25 bp, Homo sapien
tgctcccggccagaaataaattatg

SEQ ID NO: 4976716 - DNA, 25 bp, Homo sapien
tgtttgatacttgaacaataaaaac

SEQ ID NO: 4976717 - DNA, 25 bp, Homo sapien
ctaggcttataggcactgctcccgg

SEQ ID NO: 4976718 - DNA, 25 bp, Homo sapien
aaaaagaagtcttaggctaggcgcg

SEQ ID NO: 4976719 - DNA, 25 bp, Homo sapien
tatccccatcccctagtatgtgagg

SEQ ID NO: 4976720 - DNA, 25 bp, Homo sapien
tgaacataggaatggcagcaaacac

SEQ ID NO: 4976721 - DNA, 25 bp, Homo sapien
gaaagcctttccactcacttggttg

SEQ ID NO: 4976722 - DNA, 25 bp, Homo sapien
cagaacaccaagctttagtgaagct

SEQ ID NO: 4976723 - DNA, 25 bp, Homo sapien
aatcagaacaccaagctttagtgaa

SEQ ID NO: 4976724 - DNA, 25 bp, Homo sapien
tcagaacaccaagctttagtgaagc

SEQ ID NO: 4976725 - DNA, 25 bp, Homo sapien
aacaccaagctttagtgaagcttta

SEQ ID NO: 4976726 - DNA, 25 bp, Homo sapien
tcttaaaatgggacgtaggagcatc

SEQ ID NO: 4976727 - DNA, 25 bp, Homo sapien
tcgcccaggctcaggagaataattt

SEQ ID NO: 4976728 - DNA, 25 bp, Homo sapien
gaaggccaggaaagcataatgcagt

SEQ ID NO: 4976729 - DNA, 25 bp, Homo sapien
taaaatcgctatcgcccatgcaggg

SEQ ID NO: 4976730 - DNA, 25 bp, Homo sapien
ctttaaggaagtaataggttgtgct

SEQ ID NO: 4976731 - DNA, 25 bp, Homo sapien
gccaggcagctccaatactttaagg

SEQ ID NO: 4976732 - DNA, 25 bp, Homo sapien
gtagttgtactatctctcttccatt

SEQ ID NO: 4976733 - DNA, 25 bp, Homo sapien
ccatttaacaggctattaggaactt

SEQ ID NO: 4976734 - DNA, 25 bp, Homo sapien
ggtttgagtccaccatattacaatg

SEQ ID NO: 4976735 - DNA, 25 bp, Homo sapien
caggccttcttggtattagagaaca

SEQ ID NO: 4976736 - DNA, 25 bp, Homo sapien
aaaatactacaagctgagagggtgc

SEQ ID NO: 4976737 - DNA, 25 bp, Homo sapien
tgatagctcatgcacacaatttacc

SEQ ID NO: 4976738 - DNA, 25 bp, Homo sapien
ggactcccctcgagccctttcaggc

SEQ ID NO: 4976739 - DNA, 25 bp, Homo sapien
caggccacccgcttccccttccatt

SEQ ID NO: 4976740 - DNA, 25 bp, Homo sapien
gtcaggactcccctcgagccctttc

SEQ ID NO: 4976741 - DNA, 25 bp, Homo sapien
ggtctggcgctccatccctaggtcg

SEQ ID NO: 4976742 - DNA, 25 bp, Homo sapien
cgtgtcagtgcgatcacaggagaga

SEQ ID NO: 4976743 - DNA, 25 bp, Homo sapien
aggagagacacggaggcccggagtg

SEQ ID NO: 4976744 - DNA, 25 bp, Homo sapien
aggaggaggcggaaccgagctaggc

SEQ ID NO: 4976745 - DNA, 25 bp, Homo sapien
gccgcatgaaatccccgggctagat

SEQ ID NO: 4976746 - DNA, 25 bp, Homo sapien
cggcgctcggctcggaattcgcacg

SEQ ID NO: 4976747 - DNA, 25 bp, Homo sapien
gccgggcgtgctgcgggaagaggaa

SEQ ID NO: 4976748 - DNA, 25 bp, Homo sapien
agcccggcctgggtagcacggtcct

SEQ ID NO: 4976749 - DNA, 25 bp, Homo sapien
gaattcgcacgcctctccgcggcga

SEQ ID NO: 4976750 - DNA, 25 bp, Homo sapien
ggtaaaactgggatcggcgcgttca

SEQ ID NO: 4976751 - DNA, 25 bp, Homo sapien
taagggttagaagcgaccctcgcac

SEQ ID NO: 4976752 - DNA, 25 bp, Homo sapien
tagcgtctggacgactagggagacc

SEQ ID NO: 4976753 - DNA, 25 bp, Homo sapien
tgaggctgattaaagaacaacgcgc

SEQ ID NO: 4976754 - DNA, 25 bp, Homo sapien
gcagttccggatttgcagggtccga

SEQ ID NO: 4976755 - DNA, 25 bp, Homo sapien
cagggtccgagggagaatacatcaa

SEQ ID NO: 4976756 - DNA, 25 bp, Homo sapien
gatgtcattcatgactccgaaatgg

SEQ ID NO: 4976757 - DNA, 25 bp, Homo sapien
aatggttaccatggcgactatcaga

SEQ ID NO: 4976758 - DNA, 25 bp, Homo sapien
ttggcgatgtcgtcactcagagtga

SEQ ID NO: 4976759 - DNA, 25 bp, Homo sapien
cttcaatcacgggtttcctcgggcg

SEQ ID NO: 4976760 - DNA, 25 bp, Homo sapien
tgtggactggcagaaaaacgtcacc

SEQ ID NO: 4976761 - DNA, 25 bp, Homo sapien
agtcacttcggcgatgtaaacgcga

SEQ ID NO: 4976762 - DNA, 25 bp, Homo sapien
agctgggaggacctaggcggccgtt

SEQ ID NO: 4976763 - DNA, 25 bp, Homo sapien
tggcttcgggcccttctagcttggg

SEQ ID NO: 4976764 - DNA, 25 bp, Homo sapien
aaagaggcggaaccgtagagacttg

SEQ ID NO: 4976765 - DNA, 25 bp, Homo sapien
tcctctcatcagagcatgatccagg

SEQ ID NO: 4976766 - DNA, 25 bp, Homo sapien
acagcgcgctccgtccttttttccg

SEQ ID NO: 4976767 - DNA, 25 bp, Homo sapien
cacagcgcgaactctgaagctcggc

SEQ ID NO: 4976768 - DNA, 25 bp, Homo sapien
ccccttccccgcacagcgcgctccg

SEQ ID NO: 4976769 - DNA, 25 bp, Homo sapien
cagcacagcgcgaactctgaagctc

SEQ ID NO: 4976770 - DNA, 25 bp, Homo sapien
cccgatcatccacgagggtcgtcgt

SEQ ID NO: 4976771 - DNA, 25 bp, Homo sapien
aacaaccccgatcatccacgagggt

SEQ ID NO: 4976772 - DNA, 25 bp, Homo sapien
gagggtcgtcgttcccgtgcctgtc

SEQ ID NO: 4976773 - DNA, 25 bp, Homo sapien
tccacgagggtcgtcgttcccgtgc

SEQ ID NO: 4976774 - DNA, 25 bp, Homo sapien
gcgcgttttgctcccgtgtggtgat

SEQ ID NO: 4976775 - DNA, 25 bp, Homo sapien
tgtgggtccacaggtttcgagcccc

SEQ ID NO: 4976776 - DNA, 25 bp, Homo sapien
attaaccgccgcctcaggtgtcgtc

SEQ ID NO: 4976777 - DNA, 25 bp, Homo sapien
tcgagcccctgttgaaaatgtcagc

SEQ ID NO: 4976778 - DNA, 25 bp, Homo sapien
acctcatccggccactaagtgggtt

SEQ ID NO: 4976779 - DNA, 25 bp, Homo sapien
ctgtatcttttaagatctatctaaa

SEQ ID NO: 4976780 - DNA, 25 bp, Homo sapien
agtgggttctgatcatactattgtg

SEQ ID NO: 4976781 - DNA, 25 bp, Homo sapien
gggttctgatcatactattgtgtga

SEQ ID NO: 4976782 - DNA, 25 bp, Homo sapien
cacgaagccgatttccagatgtcag

SEQ ID NO: 4976783 - DNA, 25 bp, Homo sapien
aagatgggcgatgcctctacacagc

SEQ ID NO: 4976784 - DNA, 25 bp, Homo sapien
catcctacgtgaagcaggtgtccat

SEQ ID NO: 4976785 - DNA, 25 bp, Homo sapien
ttatgtaatgccgaacaacttcggg

SEQ ID NO: 4976786 - DNA, 25 bp, Homo sapien
cagttagtaatttggatgtcttagc

SEQ ID NO: 4976787 - DNA, 25 bp, Homo sapien
gaaggccatcataagcagttagtaa

SEQ ID NO: 4976788 - DNA, 25 bp, Homo sapien
cttagctgggactcatctaaagcag

SEQ ID NO: 4976789 - DNA, 25 bp, Homo sapien
tctaaagcagttaggacctgctggg

SEQ ID NO: 4976790 - DNA, 25 bp, Homo sapien
tatcttaaggtcaaccgacttggga

SEQ ID NO: 4976791 - DNA, 25 bp, Homo sapien
cacagatgatcttaggttaccagcc

SEQ ID NO: 4976792 - DNA, 25 bp, Homo sapien
tgtagaatcccttcacacagcagcc

SEQ ID NO: 4976793 - DNA, 25 bp, Homo sapien
cacgtagtgtaacgggtcctggcaa

SEQ ID NO: 4976794 - DNA, 25 bp, Homo sapien
ttaatggggaccctcgacgtccatc

SEQ ID NO: 4976795 - DNA, 25 bp, Homo sapien
aatttgacccaactggctttatgtg

SEQ ID NO: 4976796 - DNA, 25 bp, Homo sapien
cacttggtgtactcttgcagttaga

SEQ ID NO: 4976797 - DNA, 25 bp, Homo sapien
cctctccacaaacacttggtgtact

SEQ ID NO: 4976798 - DNA, 25 bp, Homo sapien
tcctgtggaccaaagacatggctgg

SEQ ID NO: 4976799 - DNA, 25 bp, Homo sapien
cgtgaggaaatactagctggaaagc

SEQ ID NO: 4976800 - DNA, 25 bp, Homo sapien
tttacacatgcttccgacgtgagga

SEQ ID NO: 4976801 - DNA, 25 bp, Homo sapien
catgcaaagtgtagaagtcagttac

SEQ ID NO: 4976802 - DNA, 25 bp, Homo sapien
cagcaaggctagttcaaaaggagca

SEQ ID NO: 4976803 - DNA, 25 bp, Homo sapien
cagagagcggatcagctgtttagcc

SEQ ID NO: 4976804 - DNA, 25 bp, Homo sapien
tggtaaccattccaggtgatgtggg

SEQ ID NO: 4976805 - DNA, 25 bp, Homo sapien
ggtagtgagaccaagttcagaccac

SEQ ID NO: 4976806 - DNA, 25 bp, Homo sapien
gatacctgtctcctatggcttggaa

SEQ ID NO: 4976807 - DNA, 25 bp, Homo sapien
caaagtaccttatgagatgggatgg

SEQ ID NO: 4976808 - DNA, 25 bp, Homo sapien
caccagtaggatcagcaccctggaa

SEQ ID NO: 4976809 - DNA, 25 bp, Homo sapien
taggagcacctgattaactttctga

SEQ ID NO: 4976810 - DNA, 25 bp, Homo sapien
gaaagttacacctctagttagcatg

SEQ ID NO: 4976811 - DNA, 25 bp, Homo sapien
cacgcgaagacctgcatgtagggca

SEQ ID NO: 4976812 - DNA, 25 bp, Homo sapien
tgttgacggtccacctagaaggaac

SEQ ID NO: 4976813 - DNA, 25 bp, Homo sapien
gaaatagatcccttctgcacgcgaa

SEQ ID NO: 4976814 - DNA, 25 bp, Homo sapien
tacaaggaaagacactcctgtgcgg

SEQ ID NO: 4976815 - DNA, 25 bp, Homo sapien
atttgacagctagcgcagtctttgg

SEQ ID NO: 4976816 - DNA, 25 bp, Homo sapien
caaattgtaatgttagcaggtgcta

SEQ ID NO: 4976817 - DNA, 25 bp, Homo sapien
gagaattttacaatagtcgccaaca

SEQ ID NO: 4976818 - DNA, 25 bp, Homo sapien
tgactttccaaaagcagcggagagg

SEQ ID NO: 4976819 - DNA, 25 bp, Homo sapien
ggaggcataccaacaagaaacgaag

SEQ ID NO: 4976820 - DNA, 25 bp, Homo sapien
tacagtctggtcacatggatacagg

SEQ ID NO: 4976821 - DNA, 25 bp, Homo sapien
taagaagccaagatctgcgacagtc

SEQ ID NO: 4976822 - DNA, 25 bp, Homo sapien
actgaaaataggtttagaacataat

SEQ ID NO: 4976823 - DNA, 25 bp, Homo sapien
ctgaaaataggtttagaacataatt

SEQ ID NO: 4976824 - DNA, 25 bp, Homo sapien
ggtcagcaaagcaaactagtatcgg

SEQ ID NO: 4976825 - DNA, 25 bp, Homo sapien
ccaggagcatcttacccgatgggta

SEQ ID NO: 4976826 - DNA, 25 bp, Homo sapien
tcggaattaataagccactggcacc

SEQ ID NO: 4976827 - DNA, 25 bp, Homo sapien
tatatagcaactgatgcctcccagc

SEQ ID NO: 4976828 - DNA, 25 bp, Homo sapien
tccctactgctgtagccctgaggac

SEQ ID NO: 4976829 - DNA, 25 bp, Homo sapien
gacctccctactgctgtagccctga

SEQ ID NO: 4976830 - DNA, 25 bp, Homo sapien
cctactgctgtagccctgaggacaa

SEQ ID NO: 4976831 - DNA, 25 bp, Homo sapien
cctccctactgctgtagccctgagg

SEQ ID NO: 4976832 - DNA, 25 bp, Homo sapien
tgcacctctcaccagcaggtggaga

SEQ ID NO: 4976833 - DNA, 25 bp, Homo sapien
cacttgcatgcctgttcattggctc

SEQ ID NO: 4976834 - DNA, 25 bp, Homo sapien
gaaggcaaaacagaccaaaccgaca

SEQ ID NO: 4976835 - DNA, 25 bp, Homo sapien
ggctggcagcaaagatctgcctctt

SEQ ID NO: 4976836 - DNA, 25 bp, Homo sapien
ctcgggcagcggctcatgagagaag

SEQ ID NO: 4976837 - DNA, 25 bp, Homo sapien
tagagctccgggtgtcgggaaagct

SEQ ID NO: 4976838 - DNA, 25 bp, Homo sapien
gaggagcacgtagagctccgggtgt

SEQ ID NO: 4976839 - DNA, 25 bp, Homo sapien
ctcatgagagaagacggaatcctcc

SEQ ID NO: 4976840 - DNA, 25 bp, Homo sapien
tccctgctcagggaggtgcgtgcac

SEQ ID NO: 4976841 - DNA, 25 bp, Homo sapien
aagcagcgatgggccgggcccctcc

SEQ ID NO: 4976842 - DNA, 25 bp, Homo sapien
tgcgtgcacgcagtggggacggcct

SEQ ID NO: 4976843 - DNA, 25 bp, Homo sapien
gcacgcagtggggacggcctgagct

SEQ ID NO: 4976844 - DNA, 25 bp, Homo sapien
ggaggtcaaggccacgatgcggtcc

SEQ ID NO: 4976845 - DNA, 25 bp, Homo sapien
gtcaaggccacgatgcggtccaggt

SEQ ID NO: 4976846 - DNA, 25 bp, Homo sapien
aggtcaaggccacgatgcggtccag

SEQ ID NO: 4976847 - DNA, 25 bp, Homo sapien
gaggtcaaggccacgatgcggtcca

SEQ ID NO: 4976848 - DNA, 25 bp, Homo sapien
cttgaaggtgggtctctgtgagggc

SEQ ID NO: 4976849 - DNA, 25 bp, Homo sapien
ttgaaggtgggtctctgtgagggca

SEQ ID NO: 4976850 - DNA, 25 bp, Homo sapien
tgcatgccagcagtcccgcatcatc

SEQ ID NO: 4976851 - DNA, 25 bp, Homo sapien
ctgcatgccagcagtcccgcatcat

SEQ ID NO: 4976852 - DNA, 25 bp, Homo sapien
ccagcagtcccgcatcatcatgtac

SEQ ID NO: 4976853 - DNA, 25 bp, Homo sapien
atgccagcagtcccgcatcatcatg

SEQ ID NO: 4976854 - DNA, 25 bp, Homo sapien
ttggtgcagttactgggcttgtcca

SEQ ID NO: 4976855 - DNA, 25 bp, Homo sapien
tgcagttactgggcttgtccatgcg

SEQ ID NO: 4976856 - DNA, 25 bp, Homo sapien
tctcccacaggagcaccccgaaaga

SEQ ID NO: 4976857 - DNA, 25 bp, Homo sapien
cccacaggagcaccccgaaagacca

SEQ ID NO: 4976858 - DNA, 25 bp, Homo sapien
tggggagccgcccagagtgaagatc

SEQ ID NO: 4976859 - DNA, 25 bp, Homo sapien
ctccacaggcacaccggggtatggg

SEQ ID NO: 4976860 - DNA, 25 bp, Homo sapien
gggtgttagagcttctccgcctccc

SEQ ID NO: 4976861 - DNA, 25 bp, Homo sapien
tgcaaatgggcggagagccacaggg

SEQ ID NO: 4976862 - DNA, 25 bp, Homo sapien
ggcggagagccacagggtgttagag

SEQ ID NO: 4976863 - DNA, 25 bp, Homo sapien
agggtgttagagcttctccgcctcc

SEQ ID NO: 4976864 - DNA, 25 bp, Homo sapien
tcaaataatgcctcgggtgccatcc

SEQ ID NO: 4976865 - DNA, 25 bp, Homo sapien
tctggtgggtgtagatccggtcaaa

SEQ ID NO: 4976866 - DNA, 25 bp, Homo sapien
gtagatccggtcaaataatgcctcg

SEQ ID NO: 4976867 - DNA, 25 bp, Homo sapien
tcactctggtgggtgtagatccggt

SEQ ID NO: 4976868 - DNA, 25 bp, Homo sapien
cacagggcggccttgtcggcactca

SEQ ID NO: 4976869 - DNA, 25 bp, Homo sapien
acagggcggccttgtcggcactcac

SEQ ID NO: 4976870 - DNA, 25 bp, Homo sapien
ttgcttctcagatgaaaccaccagc

SEQ ID NO: 4976871 - DNA, 25 bp, Homo sapien
cttctcagatgaaaccaccagcaca

SEQ ID NO: 4976872 - DNA, 25 bp, Homo sapien
ggtgaatgtcccgtgcgaggccaaa

SEQ ID NO: 4976873 - DNA, 25 bp, Homo sapien
tatagtagtcgatgtggtgaatgtc

SEQ ID NO: 4976874 - DNA, 25 bp, Homo sapien
atgtcccgtgcgaggccaaagtctg

SEQ ID NO: 4976875 - DNA, 25 bp, Homo sapien
ccgtgcgaggccaaagtctgctatc

SEQ ID NO: 4976876 - DNA, 25 bp, Homo sapien
gctacactggtgctcctgactctgc

SEQ ID NO: 4976877 - DNA, 25 bp, Homo sapien
ctggctacactggtgctcctgactc

SEQ ID NO: 4976878 - DNA, 25 bp, Homo sapien
cactggtgctcctgactctgcagtt

SEQ ID NO: 4976879 - DNA, 25 bp, Homo sapien
acactggtgctcctgactctgcagt

SEQ ID NO: 4976880 - DNA, 25 bp, Homo sapien
ccaggggagccttcaggttccacac

SEQ ID NO: 4976881 - DNA, 25 bp, Homo sapien
gaggccagatactccatgcctcggg

SEQ ID NO: 4976882 - DNA, 25 bp, Homo sapien
gcctgcaggtactcccgcaggttgc

SEQ ID NO: 4976883 - DNA, 25 bp, Homo sapien
catactccacgatgacatacaaggg

SEQ ID NO: 4976884 - DNA, 25 bp, Homo sapien
gcccttggaggcatactccacgatg

SEQ ID NO: 4976885 - DNA, 25 bp, Homo sapien
ctgcaggcacaggagaagaggccat

SEQ ID NO: 4976886 - DNA, 25 bp, Homo sapien
cagcctgagcgctcttagaccataa

SEQ ID NO: 4976887 - DNA, 25 bp, Homo sapien
gagaggccttgggactgatacccca

SEQ ID NO: 4976888 - DNA, 25 bp, Homo sapien
gaatgaacaccaatgagcggagccc

SEQ ID NO: 4976889 - DNA, 25 bp, Homo sapien
caccacgtgtgtgaatctaggtatc

SEQ ID NO: 4976890 - DNA, 25 bp, Homo sapien
ttctgagatcaggtctgacaagtct

SEQ ID NO: 4976891 - DNA, 25 bp, Homo sapien
ctgagatcaggtctgacaagtcttt

SEQ ID NO: 4976892 - DNA, 25 bp, Homo sapien
tctgagatcaggtctgacaagtctt

SEQ ID NO: 4976893 - DNA, 25 bp, Homo sapien
gacgtcatagaacaatctcaaggtg

SEQ ID NO: 4976894 - DNA, 25 bp, Homo sapien
ccaggttgacgccaaggaacagagt

SEQ ID NO: 4976895 - DNA, 25 bp, Homo sapien
tgaggaaagcctgcaagcgatggat

SEQ ID NO: 4976896 - DNA, 25 bp, Homo sapien
cctctcatgggagccgttgttgcaa

SEQ ID NO: 4976897 - DNA, 25 bp, Homo sapien
ttgtccttgtccagcccgatagcct

SEQ ID NO: 4976898 - DNA, 25 bp, Homo sapien
tccagcccgatagcctctgccaaca

SEQ ID NO: 4976899 - DNA, 25 bp, Homo sapien
cagccactttggtcacacggttggg

SEQ ID NO: 4976900 - DNA, 25 bp, Homo sapien
cactttggtcacacggttgggtttg

SEQ ID NO: 4976901 - DNA, 25 bp, Homo sapien
cataagttggggctggtgaagttca

SEQ ID NO: 4976902 - DNA, 25 bp, Homo sapien
taagttggggctggtgaagttcaaa

SEQ ID NO: 4976903 - DNA, 25 bp, Homo sapien
ataagttggggctggtgaagttcaa

SEQ ID NO: 4976904 - DNA, 25 bp, Homo sapien
ttccaccactagaatagcaagcaag

SEQ ID NO: 4976905 - DNA, 25 bp, Homo sapien
cagaaagtggaatgaatgtttctgc

SEQ ID NO: 4976906 - DNA, 25 bp, Homo sapien
gcaggcatttcatgaaccttcaccg

SEQ ID NO: 4976907 - DNA, 25 bp, Homo sapien
tgttagtatacacaccttccaccac

SEQ ID NO: 4976908 - DNA, 25 bp, Homo sapien
ctagcatgggagtcccactggagga

SEQ ID NO: 4976909 - DNA, 25 bp, Homo sapien
gggaagctcatactcagagacccct

SEQ ID NO: 4976910 - DNA, 25 bp, Homo sapien
gccgtgatggccgaaccagaagaac

SEQ ID NO: 4976911 - DNA, 25 bp, Homo sapien
ccagcgagggtcttcgggaagctca

SEQ ID NO: 4976912 - DNA, 25 bp, Homo sapien
tccaaagaccatggtaggccaggag

SEQ ID NO: 4976913 - DNA, 25 bp, Homo sapien
tgcaggaaattcacgggctacacta

SEQ ID NO: 4976914 - DNA, 25 bp, Homo sapien
tgagggaacggtcattcttgcacac

SEQ ID NO: 4976915 - DNA, 25 bp, Homo sapien
gggcttcccaacaatggcagaggca

SEQ ID NO: 4976916 - DNA, 25 bp, Homo sapien
gaaggcccctgtgcaatagatgatg

SEQ ID NO: 4976917 - DNA, 25 bp, Homo sapien
gatgctcttggccagcttgtgcaca

SEQ ID NO: 4976918 - DNA, 25 bp, Homo sapien
atcttgtagacgatgaccgacccca

SEQ ID NO: 4976919 - DNA, 25 bp, Homo sapien
gaagtcactcttcttggtaccactc

SEQ ID NO: 4976920 - DNA, 25 bp, Homo sapien
catggaaaagggatggcctagaacc

SEQ ID NO: 4976921 - DNA, 25 bp, Homo sapien
gcgaggtcccgctccattagaaaag

SEQ ID NO: 4976922 - DNA, 25 bp, Homo sapien
tgtggcactaggaggatcaggcaac

SEQ ID NO: 4976923 - DNA, 25 bp, Homo sapien
tttcccttcagcacgagaggctggg

SEQ ID NO: 4976924 - DNA, 25 bp, Homo sapien
cccagagaacgtcccaaggcctgac

SEQ ID NO: 4976925 - DNA, 25 bp, Homo sapien
actgagcccagagaacgtcccaagg

SEQ ID NO: 4976926 - DNA, 25 bp, Homo sapien
gagcccagagaacgtcccaaggcct

SEQ ID NO: 4976927 - DNA, 25 bp, Homo sapien
ctgagcccagagaacgtcccaaggc

SEQ ID NO: 4976928 - DNA, 25 bp, Homo sapien
aagacaactgattgggagcacatgg

SEQ ID NO: 4976929 - DNA, 25 bp, Homo sapien
ccaagacagggacgatgataaaaac

SEQ ID NO: 4976930 - DNA, 25 bp, Homo sapien
ttctttccctgatgttgaggaacga

SEQ ID NO: 4976931 - DNA, 25 bp, Homo sapien
agcacggacaggaccaagacaggga

SEQ ID NO: 4976932 - DNA, 25 bp, Homo sapien
gtgccagcaggaacagccagaccca

SEQ ID NO: 4976933 - DNA, 25 bp, Homo sapien
aagcagggcagagtgggaaaggagg

SEQ ID NO: 4976934 - DNA, 25 bp, Homo sapien
gagagaagagggcagtgccagcagg

SEQ ID NO: 4976935 - DNA, 25 bp, Homo sapien
gcagtgccagcaggaacagccagac

SEQ ID NO: 4976936 - DNA, 25 bp, Homo sapien
ggacattccgagagacagcagcaag

SEQ ID NO: 4976937 - DNA, 25 bp, Homo sapien
ctccctggctcaacacgcagacctc

SEQ ID NO: 4976938 - DNA, 25 bp, Homo sapien
atgcaggacattccgagagacagca

SEQ ID NO: 4976939 - DNA, 25 bp, Homo sapien
tcctccctggctcaacacgcagacc

SEQ ID NO: 4976940 - DNA, 25 bp, Homo sapien
cctttctgaaggcaactcagttcac

SEQ ID NO: 4976941 - DNA, 25 bp, Homo sapien
atggacatcgtgaagcctgctgcgg

SEQ ID NO: 4976942 - DNA, 25 bp, Homo sapien
gcaaacaggatacatggacatcgtg

SEQ ID NO: 4976943 - DNA, 25 bp, Homo sapien
caggatacatggacatcgtgaagcc

SEQ ID NO: 4976944 - DNA, 25 bp, Homo sapien
tgctctttgcaagcagcaagcccca

SEQ ID NO: 4976945 - DNA, 25 bp, Homo sapien
gctctttgcaagcagcaagccccac

SEQ ID NO: 4976946 - DNA, 25 bp, Homo sapien
ttcagatgctcagtacccagcggag

SEQ ID NO: 4976947 - DNA, 25 bp, Homo sapien
agatcccgggcatgcattgcaatgg

SEQ ID NO: 4976948 - DNA, 25 bp, Homo sapien
gctgcagggtaaacccagatcccgg

SEQ ID NO: 4976949 - DNA, 25 bp, Homo sapien
tccgtgcgcctgcaaaactagggaa

SEQ ID NO: 4976950 - DNA, 25 bp, Homo sapien
cttccagaacggtcaaccatgcaga

SEQ ID NO: 4976951 - DNA, 25 bp, Homo sapien
ttccagaacggtcaaccatgcagag

SEQ ID NO: 4976952 - DNA, 25 bp, Homo sapien
atgcagagtgatgggagagtccgat

SEQ ID NO: 4976953 - DNA, 25 bp, Homo sapien
tgatgggagagtccgatagagttac

SEQ ID NO: 4976954 - DNA, 25 bp, Homo sapien
tttcttaagtgaagcacctccatct

SEQ ID NO: 4976955 - DNA, 25 bp, Homo sapien
tctctttgtcggtggtattaactcc

SEQ ID NO: 4976956 - DNA, 25 bp, Homo sapien
ccatctctttgtcggtggtattaac

SEQ ID NO: 4976957 - DNA, 25 bp, Homo sapien
tttgtcggtggtattaactccagca

SEQ ID NO: 4976958 - DNA, 25 bp, Homo sapien
tctaagagacgcagagcaagggaag

SEQ ID NO: 4976959 - DNA, 25 bp, Homo sapien
tgagacctctaagagacgcagagca

SEQ ID NO: 4976960 - DNA, 25 bp, Homo sapien
gaagagacaacggaagcaaaatgga

SEQ ID NO: 4976961 - DNA, 25 bp, Homo sapien
cacaggacatgagacctctaagaga

SEQ ID NO: 4976962 - DNA, 25 bp, Homo sapien
tggcccatccgagcatgcgggcggt

SEQ ID NO: 4976963 - DNA, 25 bp, Homo sapien
ctgagaagacgatggctggttacga

SEQ ID NO: 4976964 - DNA, 25 bp, Homo sapien
ctggttacgacccttcaccagatgc

SEQ ID NO: 4976965 - DNA, 25 bp, Homo sapien
gcggtgagcggcatggagaaatggg

SEQ ID NO: 4976966 - DNA, 25 bp, Homo sapien
ttcaggtaaagatagccagaaggtg

SEQ ID NO: 4976967 - DNA, 25 bp, Homo sapien
cagcagatgcgagtatgcaagggaa

SEQ ID NO: 4976968 - DNA, 25 bp, Homo sapien
aaagatagccagaaggtgaacacag

SEQ ID NO: 4976969 - DNA, 25 bp, Homo sapien
cagccagcagatgcgagtatgcaag

SEQ ID NO: 4976970 - DNA, 25 bp, Homo sapien
cttctcttaatcaccactcactcac

SEQ ID NO: 4976971 - DNA, 25 bp, Homo sapien
ggccccttctcttaatcaccactca

SEQ ID NO: 4976972 - DNA, 25 bp, Homo sapien
ccccttctcttaatcaccactcact

SEQ ID NO: 4976973 - DNA, 25 bp, Homo sapien
ccttctcttaatcaccactcactca

SEQ ID NO: 4976974 - DNA, 25 bp, Homo sapien
ccgtgagtcctcacatggatccaca

SEQ ID NO: 4976975 - DNA, 25 bp, Homo sapien
ctcacatggatccacacaaagccaa

SEQ ID NO: 4976976 - DNA, 25 bp, Homo sapien
tcagtctgaagtaccatttgtaaca

SEQ ID NO: 4976977 - DNA, 25 bp, Homo sapien
acagcaaaaccgtgtccccgtgagt

SEQ ID NO: 4976978 - DNA, 25 bp, Homo sapien
aaatacagtagggtggcaaggacag

SEQ ID NO: 4976979 - DNA, 25 bp, Homo sapien
caaggacagtccagtactggcttcc

SEQ ID NO: 4976980 - DNA, 25 bp, Homo sapien
gtggcaaggacagtccagtactggc

SEQ ID NO: 4976981 - DNA, 25 bp, Homo sapien
ctagaaatacagtagggtggcaagg

SEQ ID NO: 4976982 - DNA, 25 bp, Homo sapien
agggtcccatccatctccccattac

SEQ ID NO: 4976983 - DNA, 25 bp, Homo sapien
ccacaggtctggtgacagtgagcca

SEQ ID NO: 4976984 - DNA, 25 bp, Homo sapien
cgcatccgagctattaatccccgaa

SEQ ID NO: 4976985 - DNA, 25 bp, Homo sapien
cgcagactggttagcttcaccaata

SEQ ID NO: 4976986 - DNA, 25 bp, Homo sapien
taattggaaaccttacacacatact

SEQ ID NO: 4976987 - DNA, 25 bp, Homo sapien
ggagggccagtatatctctgagaca

SEQ ID NO: 4976988 - DNA, 25 bp, Homo sapien
cagtggccaatgacctacagagcag

SEQ ID NO: 4976989 - DNA, 25 bp, Homo sapien
ggttccttcctgttgcgagatccac

SEQ ID NO: 4976990 - DNA, 25 bp, Homo sapien
gatgaggtctaactctgggacaaag

SEQ ID NO: 4976991 - DNA, 25 bp, Homo sapien
tccctggattaatggagcattcagg

SEQ ID NO: 4976992 - DNA, 25 bp, Homo sapien
ttccctggattaatggagcattcag

SEQ ID NO: 4976993 - DNA, 25 bp, Homo sapien
cttccctggattaatggagcattca

SEQ ID NO: 4976994 - DNA, 25 bp, Homo sapien
gatcgtacgtaactcaggacacagg

SEQ ID NO: 4976995 - DNA, 25 bp, Homo sapien
ccagtgacgttgctctcaaagctta

SEQ ID NO: 4976996 - DNA, 25 bp, Homo sapien
cacagggctaagactgggaaacgct

SEQ ID NO: 4976997 - DNA, 25 bp, Homo sapien
cccatttgccagaaagatcgtacgt

SEQ ID NO: 4976998 - DNA, 25 bp, Homo sapien
ctgcagccctctgttcccagctcac

SEQ ID NO: 4976999 - DNA, 25 bp, Homo sapien
atccctgcagccctctgttcccagc

SEQ ID NO: 4977000 - DNA, 25 bp, Homo sapien
ttacagaccagcaccacccatccct

SEQ ID NO: 4977001 - DNA, 25 bp, Homo sapien
cagaccagcaccacccatccctgca

SEQ ID NO: 4977002 - DNA, 25 bp, Homo sapien
ggatgtggctagatccctactgaga

SEQ ID NO: 4977003 - DNA, 25 bp, Homo sapien
tgtgacctctgttactagtcctggg

SEQ ID NO: 4977004 - DNA, 25 bp, Homo sapien
cctactgagatggagtgtgtgtgcc

SEQ ID NO: 4977005 - DNA, 25 bp, Homo sapien
tcccagtagactggcccacgaagac

SEQ ID NO: 4977006 - DNA, 25 bp, Homo sapien
cggctgcgggtcactgtacacctta

SEQ ID NO: 4977007 - DNA, 25 bp, Homo sapien
caccttacacatgaactccacgttg

SEQ ID NO: 4977008 - DNA, 25 bp, Homo sapien
tttagccactggatgtgcggctgcg

SEQ ID NO: 4977009 - DNA, 25 bp, Homo sapien
cccagggccactgttttgttggcgg

SEQ ID NO: 4977010 - DNA, 25 bp, Homo sapien
gagtaatcccatcatgccacctgga

SEQ ID NO: 4977011 - DNA, 25 bp, Homo sapien
gattctgtacccaatgatctctagg

SEQ ID NO: 4977012 - DNA, 25 bp, Homo sapien
tgcggtaatagctccaagaggctca

SEQ ID NO: 4977013 - DNA, 25 bp, Homo sapien
tcctgtgcagggctagactaatact

SEQ ID NO: 4977014 - DNA, 25 bp, Homo sapien
gtggttgatgctgccgtactcattc

SEQ ID NO: 4977015 - DNA, 25 bp, Homo sapien
tcattctccacaatgcaggtgtagt

SEQ ID NO: 4977016 - DNA, 25 bp, Homo sapien
cacgacatccagctggtatgtgtgg

SEQ ID NO: 4977017 - DNA, 25 bp, Homo sapien
gagggcaccacagagtccattatga

SEQ ID NO: 4977018 - DNA, 25 bp, Homo sapien
aaatgccaaagggatacattgaggg

SEQ ID NO: 4977019 - DNA, 25 bp, Homo sapien
tgacaatgtcggcaccccgtggcac

SEQ ID NO: 4977020 - DNA, 25 bp, Homo sapien
gcaggccccatgacaatgtcggcac

SEQ ID NO: 4977021 - DNA, 25 bp, Homo sapien
caaagggatacattgagggtccaga

SEQ ID NO: 4977022 - DNA, 25 bp, Homo sapien
ccactgtgacgttcaagatcattcg

SEQ ID NO: 4977023 - DNA, 25 bp, Homo sapien
ggtgtaaagactccagaagtctcca

SEQ ID NO: 4977024 - DNA, 25 bp, Homo sapien
attcgtgatccggacagatgtgcct

SEQ ID NO: 4977025 - DNA, 25 bp, Homo sapien
gatgtgccttctgcaaacactccca

SEQ ID NO: 4977026 - DNA, 25 bp, Homo sapien
tactctaactttcgcatgcacacac

SEQ ID NO: 4977027 - DNA, 25 bp, Homo sapien
catgtaatcaggacttcctaactcg

SEQ ID NO: 4977028 - DNA, 25 bp, Homo sapien
ttttaatgaataacctgtataggtg

SEQ ID NO: 4977029 - DNA, 25 bp, Homo sapien
cctgtataggtggaaagtattactt

SEQ ID NO: 4977030 - DNA, 25 bp, Homo sapien
gtagcctccaattctgtggtcaggt

SEQ ID NO: 4977031 - DNA, 25 bp, Homo sapien
tctggggatgtccaatatggagcta

SEQ ID NO: 4977032 - DNA, 25 bp, Homo sapien
catttttcaaccagcgcagtgtggg

SEQ ID NO: 4977033 - DNA, 25 bp, Homo sapien
gccggcactgcatgcaatttctttt

SEQ ID NO: 4977034 - DNA, 25 bp, Homo sapien
acttagcagaacaggcaccgtgacc

SEQ ID NO: 4977035 - DNA, 25 bp, Homo sapien
gtgcctggcacttagcagaacaggc

SEQ ID NO: 4977036 - DNA, 25 bp, Homo sapien
caaagggcagtaagataggaaacag

SEQ ID NO: 4977037 - DNA, 25 bp, Homo sapien
ccaatgcccagacccaaagggcagt

SEQ ID NO: 4977038 - DNA, 25 bp, Homo sapien
tcatcctccgaggaggggagagcat

SEQ ID NO: 4977039 - DNA, 25 bp, Homo sapien
cctggaagccttcacactgggtggt

SEQ ID NO: 4977040 - DNA, 25 bp, Homo sapien
tagggaaacccaggcaggtctagac

SEQ ID NO: 4977041 - DNA, 25 bp, Homo sapien
taattccgtcctacattcaaaggcg

SEQ ID NO: 4977042 - DNA, 25 bp, Homo sapien
ttggacggctgactatagggaaacc

SEQ ID NO: 4977043 - DNA, 25 bp, Homo sapien
gagcagggataccaccacctgttca

SEQ ID NO: 4977044 - DNA, 25 bp, Homo sapien
gcagagcagggataccaccacctgt

SEQ ID NO: 4977045 - DNA, 25 bp, Homo sapien
ctccagcagagcagggataccacca

SEQ ID NO: 4977046 - DNA, 25 bp, Homo sapien
ggataccaccacctgttcagggcct

SEQ ID NO: 4977047 - DNA, 25 bp, Homo sapien
gccgagtaccaagtccaaatggcaa

SEQ ID NO: 4977048 - DNA, 25 bp, Homo sapien
gagtgatggagtggaagctggccga

SEQ ID NO: 4977049 - DNA, 25 bp, Homo sapien
aatcactaagccgagtaccaagtcc

SEQ ID NO: 4977050 - DNA, 25 bp, Homo sapien
accacttagcctcctggagatctgg

SEQ ID NO: 4977051 - DNA, 25 bp, Homo sapien
caccttcctctgaaactggcagaga

SEQ ID NO: 4977052 - DNA, 25 bp, Homo sapien
aagagccctggcaatcacctccgag

SEQ ID NO: 4977053 - DNA, 25 bp, Homo sapien
gggtcttaacatcccaagagccctg

SEQ ID NO: 4977054 - DNA, 25 bp, Homo sapien
aatgttagtgggcagcagtttctga

SEQ ID NO: 4977055 - DNA, 25 bp, Homo sapien
tgctggttacgcaagcatagaggcc

SEQ ID NO: 4977056 - DNA, 25 bp, Homo sapien
tcctcccctgtgatgcgggtgcggt

SEQ ID NO: 4977057 - DNA, 25 bp, Homo sapien
gtgcggttgctttccgccagctgca

SEQ ID NO: 4977058 - DNA, 25 bp, Homo sapien
ctgaaacattgacggagaagtaggt

SEQ ID NO: 4977059 - DNA, 25 bp, Homo sapien
tgggcatcacttactggaggctact

SEQ ID NO: 4977060 - DNA, 25 bp, Homo sapien
tttcctttgggatagctcagcctca

SEQ ID NO: 4977061 - DNA, 25 bp, Homo sapien
gacaaagggaattacgctggccaca

SEQ ID NO: 4977062 - DNA, 25 bp, Homo sapien
ccaagtcgagagaaggcaatttgtc

SEQ ID NO: 4977063 - DNA, 25 bp, Homo sapien
tcgacgcgtcagatgcacatgctgg

SEQ ID NO: 4977064 - DNA, 25 bp, Homo sapien
gagctgtcgcacacaaaggtccttt

SEQ ID NO: 4977065 - DNA, 25 bp, Homo sapien
cagggaacctctcgctaacaggtgt

SEQ ID NO: 4977066 - DNA, 25 bp, Homo sapien
gactatattaggacgggaggccaca

SEQ ID NO: 4977067 - DNA, 25 bp, Homo sapien
accatcctgggctgttacccatctc

SEQ ID NO: 4977068 - DNA, 25 bp, Homo sapien
agagactcagtggagcgactgccgc

SEQ ID NO: 4977069 - DNA, 25 bp, Homo sapien
ctgccgctccccgatgcataaggct

SEQ ID NO: 4977070 - DNA, 25 bp, Homo sapien
cctaagagactcagtggagcgactg

SEQ ID NO: 4977071 - DNA, 25 bp, Homo sapien
gactgccgctccccgatgcataagg

SEQ ID NO: 4977072 - DNA, 25 bp, Homo sapien
gtagagaaggggaatgttggtcagg

SEQ ID NO: 4977073 - DNA, 25 bp, Homo sapien
ttagtagagaaggggaatgttggtc

SEQ ID NO: 4977074 - DNA, 25 bp, Homo sapien
agagaaggggaatgttggtcaggct

SEQ ID NO: 4977075 - DNA, 25 bp, Homo sapien
tagtagagaaggggaatgttggtca

SEQ ID NO: 4977076 - DNA, 25 bp, Homo sapien
tgcaattggcttccactctctccac

SEQ ID NO: 4977077 - DNA, 25 bp, Homo sapien
ttcaagactccctgcaattggcttc

SEQ ID NO: 4977078 - DNA, 25 bp, Homo sapien
caagactccctgcaattggcttcca

SEQ ID NO: 4977079 - DNA, 25 bp, Homo sapien
agactccctgcaattggcttccact

SEQ ID NO: 4977080 - DNA, 25 bp, Homo sapien
caaccgctaatcagtttattaaaat

SEQ ID NO: 4977081 - DNA, 25 bp, Homo sapien
agcggcttttttccacggctaggag

SEQ ID NO: 4977082 - DNA, 25 bp, Homo sapien
tcagactaacctcgggttctagcgg

SEQ ID NO: 4977083 - DNA, 25 bp, Homo sapien
caggttctccgtttacaaagcaggg

SEQ ID NO: 4977084 - DNA, 25 bp, Homo sapien
tttacgctgcggatcattagaggga

SEQ ID NO: 4977085 - DNA, 25 bp, Homo sapien
cccatccagtggccctgaacttggg

SEQ ID NO: 4977086 - DNA, 25 bp, Homo sapien
tgggccctgcttgactgcgtcacaa

SEQ ID NO: 4977087 - DNA, 25 bp, Homo sapien
ggagttctatgtaaggtggctgatt

SEQ ID NO: 4977088 - DNA, 25 bp, Homo sapien
aactgcttgtatgctttctgggccc

SEQ ID NO: 4977089 - DNA, 25 bp, Homo sapien
gcaactaccatgtcagtactttcca

SEQ ID NO: 4977090 - DNA, 25 bp, Homo sapien
taccatgtcagtactttccattctc

SEQ ID NO: 4977091 - DNA, 25 bp, Homo sapien
tgctcactagcaccctgcaactacc

SEQ ID NO: 4977092 - DNA, 25 bp, Homo sapien
tagcaccctgcaactaccatgtcag

SEQ ID NO: 4977093 - DNA, 25 bp, Homo sapien
cacactttttgataatcctcaagga

SEQ ID NO: 4977094 - DNA, 25 bp, Homo sapien
cggagacccacactttttgataatc

SEQ ID NO: 4977095 - DNA, 25 bp, Homo sapien
ggagacccacactttttgataatcc

SEQ ID NO: 4977096 - DNA, 25 bp, Homo sapien
tttttgataatcctcaaggaagcag

SEQ ID NO: 4977097 - DNA, 25 bp, Homo sapien
atctcaccgaaatcccgggtcacag

SEQ ID NO: 4977098 - DNA, 25 bp, Homo sapien
agaagcatctcaccgaaatcccggg

SEQ ID NO: 4977099 - DNA, 25 bp, Homo sapien
ggacccggccagagtgcagaagcat

SEQ ID NO: 4977100 - DNA, 25 bp, Homo sapien
agagtgcagaagcatctcaccgaaa

SEQ ID NO: 4977101 - DNA, 25 bp, Homo sapien
tcggagtccccaaatagaaggagag

SEQ ID NO: 4977102 - DNA, 25 bp, Homo sapien
tctcggagtccccaaatagaaggag

SEQ ID NO: 4977103 - DNA, 25 bp, Homo sapien
ctctcggagtccccaaatagaagga

SEQ ID NO: 4977104 - DNA, 25 bp, Homo sapien
gtttctctcaactctcggagtcccc

SEQ ID NO: 4977105 - DNA, 25 bp, Homo sapien
ccacattcagcctgacaaaacggtg

SEQ ID NO: 4977106 - DNA, 25 bp, Homo sapien
ctgtgtttgccagagggccggcaat

SEQ ID NO: 4977107 - DNA, 25 bp, Homo sapien
ccagagggccggcaataaagctcac

SEQ ID NO: 4977108 - DNA, 25 bp, Homo sapien
tgacaaaacggtgcaaactgctgtg

SEQ ID NO: 4977109 - DNA, 25 bp, Homo sapien
tgccagcaggtccccccgtgcgttg

SEQ ID NO: 4977110 - DNA, 25 bp, Homo sapien
tggcagactgaatggcctctgccag

SEQ ID NO: 4977111 - DNA, 25 bp, Homo sapien
gtgcgttgccatggggaccccaccg

SEQ ID NO: 4977112 - DNA, 25 bp, Homo sapien
atggcagactgaatggcctctgcca

SEQ ID NO: 4977113 - DNA, 25 bp, Homo sapien
caggcagcccggctaatcctgacag

SEQ ID NO: 4977114 - DNA, 25 bp, Homo sapien
agcccggctaatcctgacaggaagc

SEQ ID NO: 4977115 - DNA, 25 bp, Homo sapien
agatttcggccttttgtgcgtccca

SEQ ID NO: 4977116 - DNA, 25 bp, Homo sapien
gatttcggccttttgtgcgtcccac

SEQ ID NO: 4977117 - DNA, 25 bp, Homo sapien
gacacgtgtagaatcccacttggga

SEQ ID NO: 4977118 - DNA, 25 bp, Homo sapien
ggataacgcagcctgagaactgagt

SEQ ID NO: 4977119 - DNA, 25 bp, Homo sapien
gggctcaagcttctatgcacggatt

SEQ ID NO: 4977120 - DNA, 25 bp, Homo sapien
ttgggaatcgcaggcgccaagagct

SEQ ID NO: 4977121 - DNA, 25 bp, Homo sapien
gctaaagaacagtgccatgatttca

SEQ ID NO: 4977122 - DNA, 25 bp, Homo sapien
agcccaggctaaagaacagtgccat

SEQ ID NO: 4977123 - DNA, 25 bp, Homo sapien
aagaacagtgccatgatttcagctc

SEQ ID NO: 4977124 - DNA, 25 bp, Homo sapien
aggctaaagaacagtgccatgattt

SEQ ID NO: 4977125 - DNA, 25 bp, Homo sapien
taaagcctagtatctatgctcaggg

SEQ ID NO: 4977126 - DNA, 25 bp, Homo sapien
tctggggatctagaacaatcctggg

SEQ ID NO: 4977127 - DNA, 25 bp, Homo sapien
tggctctgtggtagccaggaagcta

SEQ ID NO: 4977128 - DNA, 25 bp, Homo sapien
ggatctagaacaatcctgggaaaag

SEQ ID NO: 4977129 - DNA, 25 bp, Homo sapien
gagtgataaagatatacttgctgac

SEQ ID NO: 4977130 - DNA, 25 bp, Homo sapien
tacttgctgactatagagaactttg

SEQ ID NO: 4977131 - DNA, 25 bp, Homo sapien
aaagatatacttgctgactatagag

SEQ ID NO: 4977132 - DNA, 25 bp, Homo sapien
tgctgactatagagaactttgctct

SEQ ID NO: 4977133 - DNA, 25 bp, Homo sapien
gaaaccctgacagagtctttgtttg

SEQ ID NO: 4977134 - DNA, 25 bp, Homo sapien
gctcccaaagaatccctgatgctgt

SEQ ID NO: 4977135 - DNA, 25 bp, Homo sapien
gaaccaggtgatggaaaccctgaca

SEQ ID NO: 4977136 - DNA, 25 bp, Homo sapien
gactccaggtagtcacaggaaccag

SEQ ID NO: 4977137 - DNA, 25 bp, Homo sapien
ggaggacctgcaagggccctatgat

SEQ ID NO: 4977138 - DNA, 25 bp, Homo sapien
aaagccccgctttgtggtgcacaca

SEQ ID NO: 4977139 - DNA, 25 bp, Homo sapien
ttgggacacaggaccacagtccagt

SEQ ID NO: 4977140 - DNA, 25 bp, Homo sapien
gatctgaggctaggcaatggctctg

SEQ ID NO: 4977141 - DNA, 25 bp, Homo sapien
ggccctaaagttccttatactcatc

SEQ ID NO: 4977142 - DNA, 25 bp, Homo sapien
aagttccttatactcatcccgtcgg

SEQ ID NO: 4977143 - DNA, 25 bp, Homo sapien
tatactcatcccgtcgggctggctc

SEQ ID NO: 4977144 - DNA, 25 bp, Homo sapien
ctggccctaaagttccttatactca

SEQ ID NO: 4977145 - DNA, 25 bp, Homo sapien
aagcagccaggcccgagatccactt

SEQ ID NO: 4977146 - DNA, 25 bp, Homo sapien
agccaggcccgagatccacttctcc

SEQ ID NO: 4977147 - DNA, 25 bp, Homo sapien
caggcccgagatccacttctccctt

SEQ ID NO: 4977148 - DNA, 25 bp, Homo sapien
gcagccaggcccgagatccacttct

SEQ ID NO: 4977149 - DNA, 25 bp, Homo sapien
gtcggggacggcctagcggtgcaga

SEQ ID NO: 4977150 - DNA, 25 bp, Homo sapien
tcaggcaaggtcggggacggcctag

SEQ ID NO: 4977151 - DNA, 25 bp, Homo sapien
acggcctagcggtgcagagtgtggc

SEQ ID NO: 4977152 - DNA, 25 bp, Homo sapien
caaggtcggggacggcctagcggtg

SEQ ID NO: 4977153 - DNA, 25 bp, Homo sapien
gagctcgatcctccttttcaaactg

SEQ ID NO: 4977154 - DNA, 25 bp, Homo sapien
catggatactccacagtgagctcga

SEQ ID NO: 4977155 - DNA, 25 bp, Homo sapien
cacatctccatggatactccacagt

SEQ ID NO: 4977156 - DNA, 25 bp, Homo sapien
cccagttctgcagttagaggttggt

SEQ ID NO: 4977157 - DNA, 25 bp, Homo sapien
tctatttctatagggcgccacagct

SEQ ID NO: 4977158 - DNA, 25 bp, Homo sapien
gccacagctcgaagcaacatccatg

SEQ ID NO: 4977159 - DNA, 25 bp, Homo sapien
cttgttctgcaacaggccagccctt

SEQ ID NO: 4977160 - DNA, 25 bp, Homo sapien
tctctgaaccccaccttaagaagct

SEQ ID NO: 4977161 - DNA, 25 bp, Homo sapien
agccgccgccgcctcgccagctccc

SEQ ID NO: 4977162 - DNA, 25 bp, Homo sapien
ggagccgccgccgcctcgccagctc

SEQ ID NO: 4977163 - DNA, 25 bp, Homo sapien
aggagccgccgccgcctcgccagct

SEQ ID NO: 4977164 - DNA, 25 bp, Homo sapien
tgaggagccgccgccgcctcgccag

SEQ ID NO: 4977165 - DNA, 25 bp, Homo sapien
ctcgctcggcgtggaggttccgcct

SEQ ID NO: 4977166 - DNA, 25 bp, Homo sapien
ttccgcctcgggagagtccgccgtg

SEQ ID NO: 4977167 - DNA, 25 bp, Homo sapien
cccgggctctgttcgggtcctggcg

SEQ ID NO: 4977168 - DNA, 25 bp, Homo sapien
tggcttgtgcgagcgggcgtgtgcc

SEQ ID NO: 4977169 - DNA, 25 bp, Homo sapien
ccacccggggtctccagaccttgtg

SEQ ID NO: 4977170 - DNA, 25 bp, Homo sapien
cgccacccggggtctccagaccttg

SEQ ID NO: 4977171 - DNA, 25 bp, Homo sapien
cacccggggtctccagaccttgtgc

SEQ ID NO: 4977172 - DNA, 25 bp, Homo sapien
ccccctcctccagaacgcagcggcg

SEQ ID NO: 4977173 - DNA, 25 bp, Homo sapien
ttccttgcagaccgggctccatcgc

SEQ ID NO: 4977174 - DNA, 25 bp, Homo sapien
tttccttgcagaccgggctccatcg

SEQ ID NO: 4977175 - DNA, 25 bp, Homo sapien
agctcggaccggagaaaagtccttg

SEQ ID NO: 4977176 - DNA, 25 bp, Homo sapien
cgaggtcgccgcaatgcgctacgag

SEQ ID NO: 4977177 - DNA, 25 bp, Homo sapien
tgggttccgcggcttttcaagcagc

SEQ ID NO: 4977178 - DNA, 25 bp, Homo sapien
gcgtgcccgactgcagcacgggtac

SEQ ID NO: 4977179 - DNA, 25 bp, Homo sapien
cagtcctctcctgagtacttaatgg

SEQ ID NO: 4977180 - DNA, 25 bp, Homo sapien
gggacagcacctggcaatccgcact

SEQ ID NO: 4977181 - DNA, 25 bp, Homo sapien
tgctgatgtggactccgctctgtgg

SEQ ID NO: 4977182 - DNA, 25 bp, Homo sapien
ggcaatccgcactgaagctgcacag

SEQ ID NO: 4977183 - DNA, 25 bp, Homo sapien
tcaattgcattatccttctctaggg

SEQ ID NO: 4977184 - DNA, 25 bp, Homo sapien
tctagggaatccactagtgagctca

SEQ ID NO: 4977185 - DNA, 25 bp, Homo sapien
cgtaatctccattcatcaagactga

SEQ ID NO: 4977186 - DNA, 25 bp, Homo sapien
tgtaacacacagagccccgtaatct

SEQ ID NO: 4977187 - DNA, 25 bp, Homo sapien
acggctccccttgtaaacctgatgg

SEQ ID NO: 4977188 - DNA, 25 bp, Homo sapien
tgcatttgctcctgcgcttagtggg

SEQ ID NO: 4977189 - DNA, 25 bp, Homo sapien
cagcctggcactcgtcttcgtgaca

SEQ ID NO: 4977190 - DNA, 25 bp, Homo sapien
ttcgtgacagcggattgctggcctc

SEQ ID NO: 4977191 - DNA, 25 bp, Homo sapien
cagccttgttactgtctgggagaac

SEQ ID NO: 4977192 - DNA, 25 bp, Homo sapien
gaaaaacaatgatcctgatcctccc

SEQ ID NO: 4977193 - DNA, 25 bp, Homo sapien
agtgaagaagttccttcctgttctg

SEQ ID NO: 4977194 - DNA, 25 bp, Homo sapien
cgtctagccttccagctccaaggga

SEQ ID NO: 4977195 - DNA, 25 bp, Homo sapien
tgaaacttccaaaaaggcacgcgcc

SEQ ID NO: 4977196 - DNA, 25 bp, Homo sapien
ttctcctgaaacttccaaaaaggca

SEQ ID NO: 4977197 - DNA, 25 bp, Homo sapien
ctgaaacttccaaaaaggcacgcgc

SEQ ID NO: 4977198 - DNA, 25 bp, Homo sapien
tcctgaaacttccaaaaaggcacgc

SEQ ID NO: 4977199 - DNA, 25 bp, Homo sapien
cgcttagttgatctgggaagacttc

SEQ ID NO: 4977200 - DNA, 25 bp, Homo sapien
tgaacagattgaagccgggagttcc

SEQ ID NO: 4977201 - DNA, 25 bp, Homo sapien
gcagagcgcccaaggaacacttggt

SEQ ID NO: 4977202 - DNA, 25 bp, Homo sapien
gagttccaggcatactgccgatcca

SEQ ID NO: 4977203 - DNA, 25 bp, Homo sapien
ttccttaaagatcctagaatctggc

SEQ ID NO: 4977204 - DNA, 25 bp, Homo sapien
tttccttaaagatcctagaatctgg

SEQ ID NO: 4977205 - DNA, 25 bp, Homo sapien
gtatttccttaaagatcctagaatc

SEQ ID NO: 4977206 - DNA, 25 bp, Homo sapien
atttccttaaagatcctagaatctg

SEQ ID NO: 4977207 - DNA, 25 bp, Homo sapien
tctcagtgagtgatctatggaacac

SEQ ID NO: 4977208 - DNA, 25 bp, Homo sapien
gctgtataatccttctgactctcaa

SEQ ID NO: 4977209 - DNA, 25 bp, Homo sapien
tggaagatggatagtagtgtctgcc

SEQ ID NO: 4977210 - DNA, 25 bp, Homo sapien
ccatgccccagcattacaatgtggg

SEQ ID NO: 4977211 - DNA, 25 bp, Homo sapien
tcttgccagcgagattcagacatcg

SEQ ID NO: 4977212 - DNA, 25 bp, Homo sapien
gcaatatgcttgcaatgacccaggc

SEQ ID NO: 4977213 - DNA, 25 bp, Homo sapien
ggaggtctgttcatgcccagcagca

SEQ ID NO: 4977214 - DNA, 25 bp, Homo sapien
tgatgtccaccagggtaacgcagac

SEQ ID NO: 4977215 - DNA, 25 bp, Homo sapien
taagaaggaattcctccgcgaggga

SEQ ID NO: 4977216 - DNA, 25 bp, Homo sapien
taagaatgttctcggccagtggttc

SEQ ID NO: 4977217 - DNA, 25 bp, Homo sapien
catatggccagaaaacctacgtgtg

SEQ ID NO: 4977218 - DNA, 25 bp, Homo sapien
ccaggccatctcacaaacgtttttt

SEQ ID NO: 4977219 - DNA, 25 bp, Homo sapien
gagaggactgcggaggcttgagaca

SEQ ID NO: 4977220 - DNA, 25 bp, Homo sapien
tgtgcatttccaatcagttccccgg

SEQ ID NO: 4977221 - DNA, 25 bp, Homo sapien
gagtttgataggttccaggacaaga

SEQ ID NO: 4977222 - DNA, 25 bp, Homo sapien
caggagccacagttcaagcagagag

SEQ ID NO: 4977223 - DNA, 25 bp, Homo sapien
caaaactgggctgccgataaaccgc

SEQ ID NO: 4977224 - DNA, 25 bp, Homo sapien
gctgccgataaaccgcaaacccgga

SEQ ID NO: 4977225 - DNA, 25 bp, Homo sapien
actgggctgccgataaaccgcaaac

SEQ ID NO: 4977226 - DNA, 25 bp, Homo sapien
cacaaaactgggctgccgataaacc

SEQ ID NO: 4977227 - DNA, 25 bp, Homo sapien
ggaagaatgagagatcactgtgggc

SEQ ID NO: 4977228 - DNA, 25 bp, Homo sapien
gatgcgagtctctcccagtggcctg

SEQ ID NO: 4977229 - DNA, 25 bp, Homo sapien
ttgaagaaaccacagatgcgagtct

SEQ ID NO: 4977230 - DNA, 25 bp, Homo sapien
aaccacagatgcgagtctctcccag

SEQ ID NO: 4977231 - DNA, 25 bp, Homo sapien
ggtgcagggtcacctgaattttggt

SEQ ID NO: 4977232 - DNA, 25 bp, Homo sapien
tctccaagggtgcagggtcacctga

SEQ ID NO: 4977233 - DNA, 25 bp, Homo sapien
aattttggttgggagaggcacagtg

SEQ ID NO: 4977234 - DNA, 25 bp, Homo sapien
tgccttaacccgaattcctccatta

SEQ ID NO: 4977235 - DNA, 25 bp, Homo sapien
tcccagcagactatgccaatgaatg

SEQ ID NO: 4977236 - DNA, 25 bp, Homo sapien
ttgtttaggatggactctccctgtg

SEQ ID NO: 4977237 - DNA, 25 bp, Homo sapien
cctcagggacatcaggtcaccaact

SEQ ID NO: 4977238 - DNA, 25 bp, Homo sapien
agggacatcaggtcaccaactcctt

SEQ ID NO: 4977239 - DNA, 25 bp, Homo sapien
agcggcgtctgcaaatgatttgcat

SEQ ID NO: 4977240 - DNA, 25 bp, Homo sapien
tggctctttggaactgcctgttctt

SEQ ID NO: 4977241 - DNA, 25 bp, Homo sapien
aagtggctgtgctcgtggcatcagg

SEQ ID NO: 4977242 - DNA, 25 bp, Homo sapien
tggttttagtctcttgctcccaagc

SEQ ID NO: 4977243 - DNA, 25 bp, Homo sapien
ggaagatcttcaatatctgtgccat

SEQ ID NO: 4977244 - DNA, 25 bp, Homo sapien
gccactctttctctaactgtcctct

SEQ ID NO: 4977245 - DNA, 25 bp, Homo sapien
ccagcacacgtgcctgtgttctcat

SEQ ID NO: 4977246 - DNA, 25 bp, Homo sapien
tacaagagaatagagccactctttc

SEQ ID NO: 4977247 - DNA, 25 bp, Homo sapien
agccacatctacaagagaatagagc

SEQ ID NO: 4977248 - DNA, 25 bp, Homo sapien
aacactcgcggcgttttccctgaga

SEQ ID NO: 4977249 - DNA, 25 bp, Homo sapien
caagagaacactcgcggcgttttcc

SEQ ID NO: 4977250 - DNA, 25 bp, Homo sapien
tttcaagagaacactcgcggcgttt

SEQ ID NO: 4977251 - DNA, 25 bp, Homo sapien
ctcgcggcgttttccctgagaactc

SEQ ID NO: 4977252 - DNA, 25 bp, Homo sapien
gatagatgctcagcaataagattgc

SEQ ID NO: 4977253 - DNA, 25 bp, Homo sapien
gagcctccatactattctccagggt

SEQ ID NO: 4977254 - DNA, 25 bp, Homo sapien
tccatactattctccagggtggctg

SEQ ID NO: 4977255 - DNA, 25 bp, Homo sapien
tcttccatatactgacttcatgtct

SEQ ID NO: 4977256 - DNA, 25 bp, Homo sapien
gacgccagcaagttaccggaaggtg

SEQ ID NO: 4977257 - DNA, 25 bp, Homo sapien
tgcctcagaggactagatgaagagt

SEQ ID NO: 4977258 - DNA, 25 bp, Homo sapien
tcctaggaaactaaacgacgccagc

SEQ ID NO: 4977259 - DNA, 25 bp, Homo sapien
gcccaggaggctcagacattatctt

SEQ ID NO: 4977260 - DNA, 25 bp, Homo sapien
gtgtacttcttgctcatagtctaga

SEQ ID NO: 4977261 - DNA, 25 bp, Homo sapien
cttcttgctcatagtctagaaatga

SEQ ID NO: 4977262 - DNA, 25 bp, Homo sapien
tcttgctcatagtctagaaatgaat

SEQ ID NO: 4977263 - DNA, 25 bp, Homo sapien
tacttcttgctcatagtctagaaat

SEQ ID NO: 4977264 - DNA, 25 bp, Homo sapien
tacaagttcagctctgtatgtgtgc

SEQ ID NO: 4977265 - DNA, 25 bp, Homo sapien
gtttgtcttcatctacacggcgata

SEQ ID NO: 4977266 - DNA, 25 bp, Homo sapien
agttcagctctgtatgtgtgcggcc

SEQ ID NO: 4977267 - DNA, 25 bp, Homo sapien
tacacggcgatacaagttcagctct

SEQ ID NO: 4977268 - DNA, 25 bp, Homo sapien
tgtccccttgattcatatgttcaag

SEQ ID NO: 4977269 - DNA, 25 bp, Homo sapien
gaaacaaatgttgtccccttgattc

SEQ ID NO: 4977270 - DNA, 25 bp, Homo sapien
tttgaaacaaatgttgtccccttga

SEQ ID NO: 4977271 - DNA, 25 bp, Homo sapien
ctttgaaacaaatgttgtccccttg

SEQ ID NO: 4977272 - DNA, 25 bp, Homo sapien
cgtaactgggctattctgtgctcca

SEQ ID NO: 4977273 - DNA, 25 bp, Homo sapien
gcaccacctgaagctaggacacagg

SEQ ID NO: 4977274 - DNA, 25 bp, Homo sapien
tacaggaaccctaggaatcgccatt

SEQ ID NO: 4977275 - DNA, 25 bp, Homo sapien
gagggagaactccatgtgaacatga

SEQ ID NO: 4977276 - DNA, 25 bp, Homo sapien
tggtctataagacttattatgaaaa

SEQ ID NO: 4977277 - DNA, 25 bp, Homo sapien
caggcatgaccattatcctttctat

SEQ ID NO: 4977278 - DNA, 25 bp, Homo sapien
tgtttcattaagttctgatcttatt

SEQ ID NO: 4977279 - DNA, 25 bp, Homo sapien
aacagcagtcccctactccttgcct

SEQ ID NO: 4977280 - DNA, 25 bp, Homo sapien
tttcatcctttgtgctgtgcgctag

SEQ ID NO: 4977281 - DNA, 25 bp, Homo sapien
catgtgattgcaactttaagtgtga

SEQ ID NO: 4977282 - DNA, 25 bp, Homo sapien
catctctggatgcttataggatctt

SEQ ID NO: 4977283 - DNA, 25 bp, Homo sapien
taggtgggctcttttgattgacaaa

SEQ ID NO: 4977284 - DNA, 25 bp, Homo sapien
tgggttcagcggatgaaaagccttt

SEQ ID NO: 4977285 - DNA, 25 bp, Homo sapien
tccagcagaacctgtttatgggaca

SEQ ID NO: 4977286 - DNA, 25 bp, Homo sapien
tctgaccggagaccagggaaatggt

SEQ ID NO: 4977287 - DNA, 25 bp, Homo sapien
tatgggacagtcactagttctgacc

SEQ ID NO: 4977288 - DNA, 25 bp, Homo sapien
tctgcatgtcttctcccaagcttct

SEQ ID NO: 4977289 - DNA, 25 bp, Homo sapien
tagtggttggctctgcatgtcttct

SEQ ID NO: 4977290 - DNA, 25 bp, Homo sapien
ggtcccatgactcatctgacagatg

SEQ ID NO: 4977291 - DNA, 25 bp, Homo sapien
tgacagatggcgtttgttgagtccc

SEQ ID NO: 4977292 - DNA, 25 bp, Homo sapien
gggtttgatcagagtcttaagttca

SEQ ID NO: 4977293 - DNA, 25 bp, Homo sapien
gtcttaagttcagcgggtctctccc

SEQ ID NO: 4977294 - DNA, 25 bp, Homo sapien
gatattgacggtcggccccatgggc

SEQ ID NO: 4977295 - DNA, 25 bp, Homo sapien
gccattgccaatccagatattgacg

SEQ ID NO: 4977296 - DNA, 25 bp, Homo sapien
ctgcttcccacgaccggatccacag

SEQ ID NO: 4977297 - DNA, 25 bp, Homo sapien
tgcttcccacgaccggatccacagc

SEQ ID NO: 4977298 - DNA, 25 bp, Homo sapien
tgaaaacagaaccccgagggcatcg

SEQ ID NO: 4977299 - DNA, 25 bp, Homo sapien
atgaaaacagaaccccgagggcatc

SEQ ID NO: 4977300 - DNA, 25 bp, Homo sapien
cggccctcttgcacggactcttaga

SEQ ID NO: 4977301 - DNA, 25 bp, Homo sapien
cacggactcttagagggctcctcca

SEQ ID NO: 4977302 - DNA, 25 bp, Homo sapien
ttctagctgggccgcggccctcttg

SEQ ID NO: 4977303 - DNA, 25 bp, Homo sapien
tcttgcacggactcttagagggctc

SEQ ID NO: 4977304 - DNA, 25 bp, Homo sapien
ctgacctgagctaatgtctgctaaa

SEQ ID NO: 4977305 - DNA, 25 bp, Homo sapien
ttctccttcggagcaggaagggaga

SEQ ID NO: 4977306 - DNA, 25 bp, Homo sapien
ttttccagatttgggagccggtggc

SEQ ID NO: 4977307 - DNA, 25 bp, Homo sapien
ggcagtacattctgtctccgtctgg

SEQ ID NO: 4977308 - DNA, 25 bp, Homo sapien
tgggccatgttggagcctgggggat

SEQ ID NO: 4977309 - DNA, 25 bp, Homo sapien
tccacaagtcctgatgaccagcagg

SEQ ID NO: 4977310 - DNA, 25 bp, Homo sapien
aggcggcagtgggtccacaagtcct

SEQ ID NO: 4977311 - DNA, 25 bp, Homo sapien
gggcaggcggcagtgggtccacaag

SEQ ID NO: 4977312 - DNA, 25 bp, Homo sapien
ttctttgaggttggcatcaggccgc

SEQ ID NO: 4977313 - DNA, 25 bp, Homo sapien
tcccagctcttgtgagagggccaca

SEQ ID NO: 4977314 - DNA, 25 bp, Homo sapien
tagattagccatacccaggtctgag

SEQ ID NO: 4977315 - DNA, 25 bp, Homo sapien
cacatagagggcatggtacaaggtc

SEQ ID NO: 4977316 - DNA, 25 bp, Homo sapien
tcgttcattcattctagagacaggg

SEQ ID NO: 4977317 - DNA, 25 bp, Homo sapien
atcgttcattcattctagagacagg

SEQ ID NO: 4977318 - DNA, 25 bp, Homo sapien
tggtactatcagagccggctcaggg

SEQ ID NO: 4977319 - DNA, 25 bp, Homo sapien
tcaaaacaatccatggagcccgctc

SEQ ID NO: 4977320 - DNA, 25 bp, Homo sapien
gtgctcccactggttcggctgcagt

SEQ ID NO: 4977321 - DNA, 25 bp, Homo sapien
ctgcagtaggagaccgccttagcgg

SEQ ID NO: 4977322 - DNA, 25 bp, Homo sapien
tgcctaatcccgtcggctgcagctt

SEQ ID NO: 4977323 - DNA, 25 bp, Homo sapien
ccagcctgggcactcgatgcctaat

SEQ ID NO: 4977324 - DNA, 25 bp, Homo sapien
cagcgagcagcttgcgttttccaaa

SEQ ID NO: 4977325 - DNA, 25 bp, Homo sapien
ggcagagcaggccttgaaaacccgc

SEQ ID NO: 4977326 - DNA, 25 bp, Homo sapien
gaattggctttgttgttacacgcgg

SEQ ID NO: 4977327 - DNA, 25 bp, Homo sapien
gaaacctgggcgttttggccactga

SEQ ID NO: 4977328 - DNA, 25 bp, Homo sapien
ttacacgcggaaaagtcctaatgca

SEQ ID NO: 4977329 - DNA, 25 bp, Homo sapien
gaatcaaattgaacctgaagccaga

SEQ ID NO: 4977330 - DNA, 25 bp, Homo sapien
ggacctctgatgtcctccctaagac

SEQ ID NO: 4977331 - DNA, 25 bp, Homo sapien
gacctctgatgtcctccctaagaca

SEQ ID NO: 4977332 - DNA, 25 bp, Homo sapien
acctctgatgtcctccctaagacac

SEQ ID NO: 4977333 - DNA, 25 bp, Homo sapien
cagttcttgttgttccggtgaccca

SEQ ID NO: 4977334 - DNA, 25 bp, Homo sapien
ttccggtgacccacggctccaggta

SEQ ID NO: 4977335 - DNA, 25 bp, Homo sapien
ccacggctccaggtacagtctcttt

SEQ ID NO: 4977336 - DNA, 25 bp, Homo sapien
ttgttgttccggtgacccacggctc

SEQ ID NO: 4977337 - DNA, 25 bp, Homo sapien
tccttgaggattggggctgcgagct

SEQ ID NO: 4977338 - DNA, 25 bp, Homo sapien
ctccttgaggattggggctgcgagc

SEQ ID NO: 4977339 - DNA, 25 bp, Homo sapien
gaggattggggctgcgagctgttca

SEQ ID NO: 4977340 - DNA, 25 bp, Homo sapien
attggggctgcgagctgttcacctg

SEQ ID NO: 4977341 - DNA, 25 bp, Homo sapien
tctgtgtccacaggcctttctaagg

SEQ ID NO: 4977342 - DNA, 25 bp, Homo sapien
gctgcacttgattgaacctgactca

SEQ ID NO: 4977343 - DNA, 25 bp, Homo sapien
ggtatcttgccctgatggtgcttgg

SEQ ID NO: 4977344 - DNA, 25 bp, Homo sapien
tagccacagtgtttcgcaccgtgag

SEQ ID NO: 4977345 - DNA, 25 bp, Homo sapien
aatttgtattaaaggaggtagtgag

SEQ ID NO: 4977346 - DNA, 25 bp, Homo sapien
tgaatttgtattaaaggaggtagtg

SEQ ID NO: 4977347 - DNA, 25 bp, Homo sapien
aggaggtagtgagggggaggaagca

SEQ ID NO: 4977348 - DNA, 25 bp, Homo sapien
tattgaatttgtattaaaggaggta

SEQ ID NO: 4977349 - DNA, 25 bp, Homo sapien
taagagtcagaatccatattagact

SEQ ID NO: 4977350 - DNA, 25 bp, Homo sapien
ttaagagtcagaatccatattagac

SEQ ID NO: 4977351 - DNA, 25 bp, Homo sapien
gagaattaaacaacgttactgagtg

SEQ ID NO: 4977352 - DNA, 25 bp, Homo sapien
gaaagacattctctcaatccatcct

SEQ ID NO: 4977353 - DNA, 25 bp, Homo sapien
attaaacaacgttactgagtgagcc

SEQ ID NO: 4977354 - DNA, 25 bp, Homo sapien
gatcaaatcaagaaatcagggaaag

SEQ ID NO: 4977355 - DNA, 25 bp, Homo sapien
cagcagggaccctcaatactgattc

SEQ ID NO: 4977356 - DNA, 25 bp, Homo sapien
agcagggaccctcaatactgattct

SEQ ID NO: 4977357 - DNA, 25 bp, Homo sapien
gaggtgggcgggaagcagacatagc

SEQ ID NO: 4977358 - DNA, 25 bp, Homo sapien
ctggaggtgggcgggaagcagacat

SEQ ID NO: 4977359 - DNA, 25 bp, Homo sapien
tggaggtgggcgggaagcagacata

SEQ ID NO: 4977360 - DNA, 25 bp, Homo sapien
ggaggtgggcgggaagcagacatag

SEQ ID NO: 4977361 - DNA, 25 bp, Homo sapien
tcaaatactgagcagccaaaaaaag

SEQ ID NO: 4977362 - DNA, 25 bp, Homo sapien
agatggcgagaaacaggaagaggga

SEQ ID NO: 4977363 - DNA, 25 bp, Homo sapien
cgagaaacaggaagagggaatcctg

SEQ ID NO: 4977364 - DNA, 25 bp, Homo sapien
aaagaagaagatggcgagaaacagg

SEQ ID NO: 4977365 - DNA, 25 bp, Homo sapien
gaggccgggtgaccctgtcccagat

SEQ ID NO: 4977366 - DNA, 25 bp, Homo sapien
ggaggccgggtgaccctgtcccaga

SEQ ID NO: 4977367 - DNA, 25 bp, Homo sapien
tcagctggaggccgggtgaccctgt

SEQ ID NO: 4977368 - DNA, 25 bp, Homo sapien
gctggaggccgggtgaccctgtccc

SEQ ID NO: 4977369 - DNA, 25 bp, Homo sapien
ggaaaggctcatgggcattgaagac

SEQ ID NO: 4977370 - DNA, 25 bp, Homo sapien
gcggaaaggctcatgggcattgaag

SEQ ID NO: 4977371 - DNA, 25 bp, Homo sapien
cccggcggaaaggctcatgggcatt

SEQ ID NO: 4977372 - DNA, 25 bp, Homo sapien
cggcggaaaggctcatgggcattga

SEQ ID NO: 4977373 - DNA, 25 bp, Homo sapien
tggaagcccccggtatcaccaaatg

SEQ ID NO: 4977374 - DNA, 25 bp, Homo sapien
gaagtggaagcccccggtatcacca

SEQ ID NO: 4977375 - DNA, 25 bp, Homo sapien
gggtggagttttcaatctgggatcc

SEQ ID NO: 4977376 - DNA, 25 bp, Homo sapien
ggagttttcaatctgggatcctggg

SEQ ID NO: 4977377 - DNA, 25 bp, Homo sapien
tggctccctcgcccataaagcggga

SEQ ID NO: 4977378 - DNA, 25 bp, Homo sapien
gtggagttttcaatctgggatcctg

SEQ ID NO: 4977379 - DNA, 25 bp, Homo sapien
cagctttacatactggacactcttg

SEQ ID NO: 4977380 - DNA, 25 bp, Homo sapien
ctctctgctgatcccagctttacat

SEQ ID NO: 4977381 - DNA, 25 bp, Homo sapien
tactggacactcttgccgttctggc

SEQ ID NO: 4977382 - DNA, 25 bp, Homo sapien
tctgctgatcccagctttacatact

SEQ ID NO: 4977383 - DNA, 25 bp, Homo sapien
ctgatgaagacatggccaacagtac

SEQ ID NO: 4977384 - DNA, 25 bp, Homo sapien
agtacaggtggccacacacactgac

SEQ ID NO: 4977385 - DNA, 25 bp, Homo sapien
caacagtacaggtggccacacacac

SEQ ID NO: 4977386 - DNA, 25 bp, Homo sapien
gacatggccaacagtacaggtggcc

SEQ ID NO: 4977387 - DNA, 25 bp, Homo sapien
aacatatattacattcgaaggtcgc

SEQ ID NO: 4977388 - DNA, 25 bp, Homo sapien
gcttcccgagcagtctccaaacata

SEQ ID NO: 4977389 - DNA, 25 bp, Homo sapien
ttcccgagcagtctccaaacatata

SEQ ID NO: 4977390 - DNA, 25 bp, Homo sapien
atattacattcgaaggtcgcgcccg

SEQ ID NO: 4977391 - DNA, 25 bp, Homo sapien
cttcagtccccccaaatacacatac

SEQ ID NO: 4977392 - DNA, 25 bp, Homo sapien
tcagtccccccaaatacacatacac

SEQ ID NO: 4977393 - DNA, 25 bp, Homo sapien
cccttcagtccccccaaatacacat

SEQ ID NO: 4977394 - DNA, 25 bp, Homo sapien
ttcagtccccccaaatacacataca

SEQ ID NO: 4977395 - DNA, 25 bp, Homo sapien
ggatggtgtagtctgcctctgcaac

SEQ ID NO: 4977396 - DNA, 25 bp, Homo sapien
tcatttatacagtgtaggccctctg

SEQ ID NO: 4977397 - DNA, 25 bp, Homo sapien
cccctaatgcttccttggatgggtg

SEQ ID NO: 4977398 - DNA, 25 bp, Homo sapien
tctcattccagcagttaaggcttgg

SEQ ID NO: 4977399 - DNA, 25 bp, Homo sapien
ggccataattctgggtaaccagaag

SEQ ID NO: 4977400 - DNA, 25 bp, Homo sapien
ctggatcctggccataattctgggt

SEQ ID NO: 4977401 - DNA, 25 bp, Homo sapien
ggtaaccagaagagccctgttcaac

SEQ ID NO: 4977402 - DNA, 25 bp, Homo sapien
gaagagccctgttcaacatcttgtc

SEQ ID NO: 4977403 - DNA, 25 bp, Homo sapien
cttttgcgtaacataaatactcagc

SEQ ID NO: 4977404 - DNA, 25 bp, Homo sapien
tcggccttttgcgtaacataaatac

SEQ ID NO: 4977405 - DNA, 25 bp, Homo sapien
ctgagtcggccttttgcgtaacata

SEQ ID NO: 4977406 - DNA, 25 bp, Homo sapien
gagtcggccttttgcgtaacataaa

SEQ ID NO: 4977407 - DNA, 25 bp, Homo sapien
gatcagaaggatctagctgctccat

SEQ ID NO: 4977408 - DNA, 25 bp, Homo sapien
aatggtctgattcggcctctccagg

SEQ ID NO: 4977409 - DNA, 25 bp, Homo sapien
tagtttcctctgatccacgaagtca

SEQ ID NO: 4977410 - DNA, 25 bp, Homo sapien
aaagggtgtacgaacctggctgcca

SEQ ID NO: 4977411 - DNA, 25 bp, Homo sapien
aacctgctggtttcagtgcattctg

SEQ ID NO: 4977412 - DNA, 25 bp, Homo sapien
gctctctcgagttgttcaaaacctg

SEQ ID NO: 4977413 - DNA, 25 bp, Homo sapien
cagccgtcagtgaatcagtgggaga

SEQ ID NO: 4977414 - DNA, 25 bp, Homo sapien
cagtgggagaacaaattccctggaa

SEQ ID NO: 4977415 - DNA, 25 bp, Homo sapien
cacgctcctctcactcatctctgga

SEQ ID NO: 4977416 - DNA, 25 bp, Homo sapien
gcagccacctttcctgcaaggaact

SEQ ID NO: 4977417 - DNA, 25 bp, Homo sapien
cacctttcctgcaaggaactgtggg

SEQ ID NO: 4977418 - DNA, 25 bp, Homo sapien
ctaagcagccacctttcctgcaagg

SEQ ID NO: 4977419 - DNA, 25 bp, Homo sapien
agcaggagaaatattgatgtggatg

SEQ ID NO: 4977420 - DNA, 25 bp, Homo sapien
gagctttcagataaggcagcaggag

SEQ ID NO: 4977421 - DNA, 25 bp, Homo sapien
cagtgatggagctggactacagagc

SEQ ID NO: 4977422 - DNA, 25 bp, Homo sapien
gggagctttcagataaggcagcagg

SEQ ID NO: 4977423 - DNA, 25 bp, Homo sapien
tcaggatcagaaccaatgagtccag

SEQ ID NO: 4977424 - DNA, 25 bp, Homo sapien
tgagtccaggataaacaggtcgttg

SEQ ID NO: 4977425 - DNA, 25 bp, Homo sapien
agtgtcacccagaacatttgccctg

SEQ ID NO: 4977426 - DNA, 25 bp, Homo sapien
ttgggttggtctgcttggctgatct

SEQ ID NO: 4977427 - DNA, 25 bp, Homo sapien
aggactccttcggtctcctcggcag

SEQ ID NO: 4977428 - DNA, 25 bp, Homo sapien
tcagtaccggcaacagctaggacat

SEQ ID NO: 4977429 - DNA, 25 bp, Homo sapien
cattggtatggagtcaccaagcccc

SEQ ID NO: 4977430 - DNA, 25 bp, Homo sapien
gcttcagtaggagtgatcggtgtca

SEQ ID NO: 4977431 - DNA, 25 bp, Homo sapien
taatgccagagcagtctgtggtgct

SEQ ID NO: 4977432 - DNA, 25 bp, Homo sapien
acttggatgccctgaacagtggggt

SEQ ID NO: 4977433 - DNA, 25 bp, Homo sapien
tgctgtccgcttgcaggcgtgcatg

SEQ ID NO: 4977434 - DNA, 25 bp, Homo sapien
cagcccctgatgagttaatgccaga

SEQ ID NO: 4977435 - DNA, 25 bp, Homo sapien
ttcatttgcaagtatcacaaacacg

SEQ ID NO: 4977436 - DNA, 25 bp, Homo sapien
gtatcacaaacacgactccaattgg

SEQ ID NO: 4977437 - DNA, 25 bp, Homo sapien
tttgcaagtatcacaaacacgactc

SEQ ID NO: 4977438 - DNA, 25 bp, Homo sapien
cacaaacacgactccaattggctta

SEQ ID NO: 4977439 - DNA, 25 bp, Homo sapien
gacagactcttacttcatggcagca

SEQ ID NO: 4977440 - DNA, 25 bp, Homo sapien
ctgtctccatgtctcagctttgtgg

SEQ ID NO: 4977441 - DNA, 25 bp, Homo sapien
tgtggcctctgctcgccttcatttc

SEQ ID NO: 4977442 - DNA, 25 bp, Homo sapien
gccttcatttccagacagactctta

SEQ ID NO: 4977443 - DNA, 25 bp, Homo sapien
agcgagtagtattatagaattaggg

SEQ ID NO: 4977444 - DNA, 25 bp, Homo sapien
gactgacgaggtcttcgttccatat

SEQ ID NO: 4977445 - DNA, 25 bp, Homo sapien
ttcaccacagccaaactaagcgagt

SEQ ID NO: 4977446 - DNA, 25 bp, Homo sapien
tggccgggatcatggaagattgact

SEQ ID NO: 4977447 - DNA, 25 bp, Homo sapien
gttgaaatgtcctcaggaaacagga

SEQ ID NO: 4977448 - DNA, 25 bp, Homo sapien
ggcagttcactttaactgtgctcga

SEQ ID NO: 4977449 - DNA, 25 bp, Homo sapien
taactgtgctcgaagtcatgttgaa

SEQ ID NO: 4977450 - DNA, 25 bp, Homo sapien
ctcgcttaaccttggcagttcactt

SEQ ID NO: 4977451 - DNA, 25 bp, Homo sapien
ttgctacacgaaaggcaggacctgc

SEQ ID NO: 4977452 - DNA, 25 bp, Homo sapien
cctgcggatgaatccttgagattac

SEQ ID NO: 4977453 - DNA, 25 bp, Homo sapien
tttgttcttgcccagatcctccctg

SEQ ID NO: 4977454 - DNA, 25 bp, Homo sapien
cactgtttctgtatcttgccacaca

SEQ ID NO: 4977455 - DNA, 25 bp, Homo sapien
gaaaacggtgacacacagagtggct

SEQ ID NO: 4977456 - DNA, 25 bp, Homo sapien
tggaaacttgtgctggaaacttacc

SEQ ID NO: 4977457 - DNA, 25 bp, Homo sapien
agtcccaagggttccaaggccagag

SEQ ID NO: 4977458 - DNA, 25 bp, Homo sapien
cagaatttggcattgctagcacaaa

SEQ ID NO: 4977459 - DNA, 25 bp, Homo sapien
tcaaaacgcaattggcgttggccct

SEQ ID NO: 4977460 - DNA, 25 bp, Homo sapien
aacgcaattggcgttggccctcggg

SEQ ID NO: 4977461 - DNA, 25 bp, Homo sapien
aaaaagggcagtattgtagcagcag

SEQ ID NO: 4977462 - DNA, 25 bp, Homo sapien
ccaggaattttgacgcagtgcttgc

SEQ ID NO: 4977463 - DNA, 25 bp, Homo sapien
agcaacaattggggacaccaagtac

SEQ ID NO: 4977464 - DNA, 25 bp, Homo sapien
acaattggggacaccaagtactgta

SEQ ID NO: 4977465 - DNA, 25 bp, Homo sapien
caacaattggggacaccaagtactg

SEQ ID NO: 4977466 - DNA, 25 bp, Homo sapien
ctgggacagcaacaattggggacac

SEQ ID NO: 4977467 - DNA, 25 bp, Homo sapien
ttaagtttccagaccaatcgtttgc

SEQ ID NO: 4977468 - DNA, 25 bp, Homo sapien
taaggtcagtagcaaagtcaggagg

SEQ ID NO: 4977469 - DNA, 25 bp, Homo sapien
ccagaccaatcgtttgcatttggaa

SEQ ID NO: 4977470 - DNA, 25 bp, Homo sapien
gcatttggaatttagcataaggtca

SEQ ID NO: 4977471 - DNA, 25 bp, Homo sapien
tattgcaacttctagactatgaggg

SEQ ID NO: 4977472 - DNA, 25 bp, Homo sapien
tttttaagtatacaactccgtggca

SEQ ID NO: 4977473 - DNA, 25 bp, Homo sapien
tcaaggtgtgtccatgtcgtagcat

SEQ ID NO: 4977474 - DNA, 25 bp, Homo sapien
taagtacattggacaaccatcacca

SEQ ID NO: 4977475 - DNA, 25 bp, Homo sapien
caggcaaattctgtacagacacaca

SEQ ID NO: 4977476 - DNA, 25 bp, Homo sapien
tgaggaacagcaaacccgttaaata

SEQ ID NO: 4977477 - DNA, 25 bp, Homo sapien
acacacaaaggcatgttatgcagtg

SEQ ID NO: 4977478 - DNA, 25 bp, Homo sapien
gagaaggaggcacatgtgggttctg

SEQ ID NO: 4977479 - DNA, 25 bp, Homo sapien
taaagatgtcgccaggcctcttggc

SEQ ID NO: 4977480 - DNA, 25 bp, Homo sapien
tatccaggcaaggagatcattaagc

SEQ ID NO: 4977481 - DNA, 25 bp, Homo sapien
tcatggatgcaccacaactcggaaa

SEQ ID NO: 4977482 - DNA, 25 bp, Homo sapien
gccaactgctttcagaggcaacggt

SEQ ID NO: 4977483 - DNA, 25 bp, Homo sapien
cgctgagatgcagacgcgcttgcct

SEQ ID NO: 4977484 - DNA, 25 bp, Homo sapien
gattcgcaagccgagaccaaatcct

SEQ ID NO: 4977485 - DNA, 25 bp, Homo sapien
ggaaacgcttgctggcgcctgtcac

SEQ ID NO: 4977486 - DNA, 25 bp, Homo sapien
tcatggcgttcagcccgtggcagat

SEQ ID NO: 4977487 - DNA, 25 bp, Homo sapien
ggtctgtagagacatgccatctgct

SEQ ID NO: 4977488 - DNA, 25 bp, Homo sapien
tatctgtttgagatacctggcccca

SEQ ID NO: 4977489 - DNA, 25 bp, Homo sapien
tgtgacagtacagagcaatgacctt

SEQ ID NO: 4977490 - DNA, 25 bp, Homo sapien
tgactccgtcatgccatcagcagga

SEQ ID NO: 4977491 - DNA, 25 bp, Homo sapien
gtttaagtaaatgagcattcttctc

SEQ ID NO: 4977492 - DNA, 25 bp, Homo sapien
ggtctgcagtgacttggtatagggc

SEQ ID NO: 4977493 - DNA, 25 bp, Homo sapien
caccgcctctgcttgtttggacctt

SEQ ID NO: 4977494 - DNA, 25 bp, Homo sapien
gctgggcaagtttatttacctggca

SEQ ID NO: 4977495 - DNA, 25 bp, Homo sapien
gctgtaggtcttttacagctttcta

SEQ ID NO: 4977496 - DNA, 25 bp, Homo sapien
caaaacttgggagcagtggtaataa

SEQ ID NO: 4977497 - DNA, 25 bp, Homo sapien
taatgagggatgtcagctagtcctg

SEQ ID NO: 4977498 - DNA, 25 bp, Homo sapien
agataaaatcttggcgcagtagctc

SEQ ID NO: 4977499 - DNA, 25 bp, Homo sapien
aaagataacgagagccccaaagcag

SEQ ID NO: 4977500 - DNA, 25 bp, Homo sapien
taaaacttgtcactgaatcagaggt

SEQ ID NO: 4977501 - DNA, 25 bp, Homo sapien
gaaatacttttggaattaggacaca

SEQ ID NO: 4977502 - DNA, 25 bp, Homo sapien
gatcgcatctgttaggaagagccca

SEQ ID NO: 4977503 - DNA, 25 bp, Homo sapien
cctggggagtgttatccaacttgat

SEQ ID NO: 4977504 - DNA, 25 bp, Homo sapien
ggagtttatcctggggagtgttatc

SEQ ID NO: 4977505 - DNA, 25 bp, Homo sapien
ttatcctggggagtgttatccaact

SEQ ID NO: 4977506 - DNA, 25 bp, Homo sapien
catttggagtttatcctggggagtg

SEQ ID NO: 4977507 - DNA, 25 bp, Homo sapien
ctagctgtgatcgtctccaaaatta

SEQ ID NO: 4977508 - DNA, 25 bp, Homo sapien
cacagatgtcagtggttagtatccc

SEQ ID NO: 4977509 - DNA, 25 bp, Homo sapien
aataaactcattccctgtaggcccg

SEQ ID NO: 4977510 - DNA, 25 bp, Homo sapien
ggttagtatcccaactctagctgtg

SEQ ID NO: 4977511 - DNA, 25 bp, Homo sapien
gaataattgcccctttgcagagaaa

SEQ ID NO: 4977512 - DNA, 25 bp, Homo sapien
catagtctagaaaggagtgtgacct

SEQ ID NO: 4977513 - DNA, 25 bp, Homo sapien
aacagccctggaagaaaccctagag

SEQ ID NO: 4977514 - DNA, 25 bp, Homo sapien
tatgaaggttcccttaggctgctga

SEQ ID NO: 4977515 - DNA, 25 bp, Homo sapien
cagtgtattactcacatgggtgcaa

SEQ ID NO: 4977516 - DNA, 25 bp, Homo sapien
gaattgtgcctagtggagaacctct

SEQ ID NO: 4977517 - DNA, 25 bp, Homo sapien
gtgcaaggagaaggtctgtactaac

SEQ ID NO: 4977518 - DNA, 25 bp, Homo sapien
gagtggtgggccattaaccccaaca

SEQ ID NO: 4977519 - DNA, 25 bp, Homo sapien
tcatagtaccaagggcacgtgtctc

SEQ ID NO: 4977520 - DNA, 25 bp, Homo sapien
tagcacactggtggaagagacccct

SEQ ID NO: 4977521 - DNA, 25 bp, Homo sapien
tgcacagggagcaccaaaggacctt

SEQ ID NO: 4977522 - DNA, 25 bp, Homo sapien
taagtgataattgtcctggcctctc

SEQ ID NO: 4977523 - DNA, 25 bp, Homo sapien
taaaactgctctggaaataccggga

SEQ ID NO: 4977524 - DNA, 25 bp, Homo sapien
tgtgagggccaaataacctgctagc

SEQ ID NO: 4977525 - DNA, 25 bp, Homo sapien
tcacagtcaaggttggagagtctcc

SEQ ID NO: 4977526 - DNA, 25 bp, Homo sapien
gggaatgcaacgtgaggccaactga

SEQ ID NO: 4977527 - DNA, 25 bp, Homo sapien
ttggtttttcattataattggtagc

SEQ ID NO: 4977528 - DNA, 25 bp, Homo sapien
tggtttttcattataattggtagcc

SEQ ID NO: 4977529 - DNA, 25 bp, Homo sapien
ggtttttcattataattggtagcca

SEQ ID NO: 4977530 - DNA, 25 bp, Homo sapien
ctctgactgttgtctctttgtggtc

SEQ ID NO: 4977531 - DNA, 25 bp, Homo sapien
tcatgaactgtctctgactgttgtc

SEQ ID NO: 4977532 - DNA, 25 bp, Homo sapien
gtcatgtgattgtgagcttgctttc

SEQ ID NO: 4977533 - DNA, 25 bp, Homo sapien
tctttgtggtcatgtgattgtgagc

SEQ ID NO: 4977534 - DNA, 25 bp, Homo sapien
ggaagagactatcagcggcagcatt

SEQ ID NO: 4977535 - DNA, 25 bp, Homo sapien
ggatctcctctggaagagactatca

SEQ ID NO: 4977536 - DNA, 25 bp, Homo sapien
tgtaacagactctcctctcaaagga

SEQ ID NO: 4977537 - DNA, 25 bp, Homo sapien
ccttgagtctccatagagtaacagt

SEQ ID NO: 4977538 - DNA, 25 bp, Homo sapien
ccagtccagatacagggcagcgtgt

SEQ ID NO: 4977539 - DNA, 25 bp, Homo sapien
tgtaggtgaccacaccagagcctca

SEQ ID NO: 4977540 - DNA, 25 bp, Homo sapien
gatgagtgctgcgttgactactgct

SEQ ID NO: 4977541 - DNA, 25 bp, Homo sapien
tcagccgtcgggataggatccaggc

SEQ ID NO: 4977542 - DNA, 25 bp, Homo sapien
ctgccatgtagatgtcgtgcctttg

SEQ ID NO: 4977543 - DNA, 25 bp, Homo sapien
caaacaaagtttttagctgggtgct

SEQ ID NO: 4977544 - DNA, 25 bp, Homo sapien
tgcttagagacttgttgtctgccct

SEQ ID NO: 4977545 - DNA, 25 bp, Homo sapien
ttcaagtcaccccaagctttctgac

SEQ ID NO: 4977546 - DNA, 25 bp, Homo sapien
tctcgggccacgtctttcaaactgc

SEQ ID NO: 4977547 - DNA, 25 bp, Homo sapien
cccaaaggcttattctctctcgggc

SEQ ID NO: 4977548 - DNA, 25 bp, Homo sapien
tttcaaactgcaggtcaaaacccat

SEQ ID NO: 4977549 - DNA, 25 bp, Homo sapien
gtcaactttcagtgcaaatgtgtat

SEQ ID NO: 4977550 - DNA, 25 bp, Homo sapien
tgtgtatgaagtaagtgaccaagtc

SEQ ID NO: 4977551 - DNA, 25 bp, Homo sapien
gaccaagtcttgaggttccacatat

SEQ ID NO: 4977552 - DNA, 25 bp, Homo sapien
atgttggtgtctgttcttcgatgcc

SEQ ID NO: 4977553 - DNA, 25 bp, Homo sapien
catattttcagaaacgtggtcagat

SEQ ID NO: 4977554 - DNA, 25 bp, Homo sapien
cagttgggcccatttcaattgtgta

SEQ ID NO: 4977555 - DNA, 25 bp, Homo sapien
tgtaggtggatcaaatgctgggcct

SEQ ID NO: 4977556 - DNA, 25 bp, Homo sapien
tgtgcttttggacagcgatctgcca

SEQ ID NO: 4977557 - DNA, 25 bp, Homo sapien
catctgtagattccagttgggccca

SEQ ID NO: 4977558 - DNA, 25 bp, Homo sapien
gctgatctgccttgtcagggctgcc

SEQ ID NO: 4977559 - DNA, 25 bp, Homo sapien
tggtcctctacccaactctgcacct

SEQ ID NO: 4977560 - DNA, 25 bp, Homo sapien
gctggtgctgatctgccttgtcagg

SEQ ID NO: 4977561 - DNA, 25 bp, Homo sapien
tcctgtcagccgctcagtgagaaag

SEQ ID NO: 4977562 - DNA, 25 bp, Homo sapien
gtgcagaataagatgcctcgtcttc

SEQ ID NO: 4977563 - DNA, 25 bp, Homo sapien
ctggacctctaagcaacttatcacc

SEQ ID NO: 4977564 - DNA, 25 bp, Homo sapien
cctcgtcttcccaggcaccacacaa

SEQ ID NO: 4977565 - DNA, 25 bp, Homo sapien
ggacctctaagcaacttatcaccat

SEQ ID NO: 4977566 - DNA, 25 bp, Homo sapien
aaagctgcgtgtaggagcgcactgc

SEQ ID NO: 4977567 - DNA, 25 bp, Homo sapien
aagagatggaaagctgcgtgtagga

SEQ ID NO: 4977568 - DNA, 25 bp, Homo sapien
gtaggagcgcactgcccaccagcat

SEQ ID NO: 4977569 - DNA, 25 bp, Homo sapien
gttgcaggcagataaaagtggtggg

SEQ ID NO: 4977570 - DNA, 25 bp, Homo sapien
taagttgtgctgcttgtgacgcagg

SEQ ID NO: 4977571 - DNA, 25 bp, Homo sapien
tgtcctcttctaagttgtgctgctt

SEQ ID NO: 4977572 - DNA, 25 bp, Homo sapien
cagccgtatccggagagcaagggaa

SEQ ID NO: 4977573 - DNA, 25 bp, Homo sapien
aggcgcaggcaatggcatccacttg

SEQ ID NO: 4977574 - DNA, 25 bp, Homo sapien
gcacggggaacacatctgccttcag

SEQ ID NO: 4977575 - DNA, 25 bp, Homo sapien
cttcggcacggggaacacatctgcc

SEQ ID NO: 4977576 - DNA, 25 bp, Homo sapien
atctgccttcagttgtccccatcgt

SEQ ID NO: 4977577 - DNA, 25 bp, Homo sapien
ctgccttcagttgtccccatcgtga

SEQ ID NO: 4977578 - DNA, 25 bp, Homo sapien
gctaccccgggccacttctgcccca

SEQ ID NO: 4977579 - DNA, 25 bp, Homo sapien
ggcaggaagggcactcattctgaag

SEQ ID NO: 4977580 - DNA, 25 bp, Homo sapien
agggcactcattctgaaggtatttc

SEQ ID NO: 4977581 - DNA, 25 bp, Homo sapien
ggaagggcactcattctgaaggtat

SEQ ID NO: 4977582 - DNA, 25 bp, Homo sapien
cacaagctggtaggagccatgcatt

SEQ ID NO: 4977583 - DNA, 25 bp, Homo sapien
cttgaaaaacatccgtagcttttgc

SEQ ID NO: 4977584 - DNA, 25 bp, Homo sapien
cttcaacgtcaaggtcaagagacct

SEQ ID NO: 4977585 - DNA, 25 bp, Homo sapien
catttgtggcccagtccatgataag

SEQ ID NO: 4977586 - DNA, 25 bp, Homo sapien
tcttccctttatgagcattggcagt

SEQ ID NO: 4977587 - DNA, 25 bp, Homo sapien
tacataaatgtagttttcgctgtaa

SEQ ID NO: 4977588 - DNA, 25 bp, Homo sapien
aggacagaggtgtctatttctctct

SEQ ID NO: 4977589 - DNA, 25 bp, Homo sapien
ttttcgctgtaaagaaactgctgct

SEQ ID NO: 4977590 - DNA, 25 bp, Homo sapien
cagacatggcaagtattttcaagta

SEQ ID NO: 4977591 - DNA, 25 bp, Homo sapien
tgctcatggtgccatgcctggcacc

SEQ ID NO: 4977592 - DNA, 25 bp, Homo sapien
gggatcaagcaattgcttaccttgg

SEQ ID NO: 4977593 - DNA, 25 bp, Homo sapien
atgcccagacatggcaagtattttc

SEQ ID NO: 4977594 - DNA, 25 bp, Homo sapien
ctaagggctcgggatccgaaggagg

SEQ ID NO: 4977595 - DNA, 25 bp, Homo sapien
aaggctaagggctcgggatccgaag

SEQ ID NO: 4977596 - DNA, 25 bp, Homo sapien
ccaaaggctaagggctcgggatccg

SEQ ID NO: 4977597 - DNA, 25 bp, Homo sapien
ggaaatggggttcttgagggagctc

SEQ ID NO: 4977598 - DNA, 25 bp, Homo sapien
tgctttaatgcgaaacgtaattaac

SEQ ID NO: 4977599 - DNA, 25 bp, Homo sapien
gagaggcgcggagagtttggcaggc

SEQ ID NO: 4977600 - DNA, 25 bp, Homo sapien
agaaatccctggagcgcggcggacc

SEQ ID NO: 4977601 - DNA, 25 bp, Homo sapien
gcgaccccgcccgatgtaacgcgcc

SEQ ID NO: 4977602 - DNA, 25 bp, Homo sapien
ggctggcggggctgggggtgcaggg

SEQ ID NO: 4977603 - DNA, 25 bp, Homo sapien
ggagaggcgcagaggggcgcgcggg

SEQ ID NO: 4977604 - DNA, 25 bp, Homo sapien
gtgcagggggcgccccggcggaggc

SEQ ID NO: 4977605 - DNA, 25 bp, Homo sapien
cgcgcgggggctggcggggctgggg

SEQ ID NO: 4977606 - DNA, 25 bp, Homo sapien
ctcctccaagtgccccgggtggcca

SEQ ID NO: 4977607 - DNA, 25 bp, Homo sapien
cgaggggaggtggccgcagaccctg

SEQ ID NO: 4977608 - DNA, 25 bp, Homo sapien
gcgaggggaggtggccgcagaccct

SEQ ID NO: 4977609 - DNA, 25 bp, Homo sapien
gggtggccaaggtcgccgccgccag

SEQ ID NO: 4977610 - DNA, 25 bp, Homo sapien
ggtgggggcgggagttctgctgagc

SEQ ID NO: 4977611 - DNA, 25 bp, Homo sapien
gcgggagttctgctgagctgcattt

SEQ ID NO: 4977612 - DNA, 25 bp, Homo sapien
ggggcgggagttctgctgagctgca

SEQ ID NO: 4977613 - DNA, 25 bp, Homo sapien
gtgggggcgggagttctgctgagct

SEQ ID NO: 4977614 - DNA, 25 bp, Homo sapien
agcgaaacttctctgcgggttctgg

SEQ ID NO: 4977615 - DNA, 25 bp, Homo sapien
cagcagcgaaacttctctgcgggtt

SEQ ID NO: 4977616 - DNA, 25 bp, Homo sapien
cgaaacttctctgcgggttctggcg

SEQ ID NO: 4977617 - DNA, 25 bp, Homo sapien
tgcagcagcgaaacttctctgcggg

SEQ ID NO: 4977618 - DNA, 25 bp, Homo sapien
tccagacagtgaaaaggactgccct

SEQ ID NO: 4977619 - DNA, 25 bp, Homo sapien
taaatgacaggcctagaaggctccc

SEQ ID NO: 4977620 - DNA, 25 bp, Homo sapien
cctaaaatgcaggttcggtgccagg

SEQ ID NO: 4977621 - DNA, 25 bp, Homo sapien
tacggattgggccatggagactcct

SEQ ID NO: 4977622 - DNA, 25 bp, Homo sapien
acacgcttcccttttctcctccagt

SEQ ID NO: 4977623 - DNA, 25 bp, Homo sapien
cacgcttcccttttctcctccagtc

SEQ ID NO: 4977624 - DNA, 25 bp, Homo sapien
tacacgcttcccttttctcctccag

SEQ ID NO: 4977625 - DNA, 25 bp, Homo sapien
ttacacgcttcccttttctcctcca

SEQ ID NO: 4977626 - DNA, 25 bp, Homo sapien
tggtgggaagctaggccgtttagaa

SEQ ID NO: 4977627 - DNA, 25 bp, Homo sapien
caggccctagccttagggtttggct

SEQ ID NO: 4977628 - DNA, 25 bp, Homo sapien
ggccggagcaccctcacatctcctc

SEQ ID NO: 4977629 - DNA, 25 bp, Homo sapien
tgcggccggagcaccctcacatctc

SEQ ID NO: 4977630 - DNA, 25 bp, Homo sapien
ggtattgattgagaaactgcctgcc

SEQ ID NO: 4977631 - DNA, 25 bp, Homo sapien
tattcagctcggtatttttgagtgg

SEQ ID NO: 4977632 - DNA, 25 bp, Homo sapien
tcatgtcatggtagtgagctgaacc

SEQ ID NO: 4977633 - DNA, 25 bp, Homo sapien
gttaaggaaatagggcctgcagatc

SEQ ID NO: 4977634 - DNA, 25 bp, Homo sapien
cctgtggtgtgccttttgcccacag

SEQ ID NO: 4977635 - DNA, 25 bp, Homo sapien
gctgcttctcgggacgtctgagcag

SEQ ID NO: 4977636 - DNA, 25 bp, Homo sapien
cagctgcttctcgggacgtctgagc

SEQ ID NO: 4977637 - DNA, 25 bp, Homo sapien
ttctcgggacgtctgagcagctgtt

SEQ ID NO: 4977638 - DNA, 25 bp, Homo sapien
tcagctgcttctcgggacgtctgag

SEQ ID NO: 4977639 - DNA, 25 bp, Homo sapien
gcagcccctgcaaatctgtctgtga

SEQ ID NO: 4977640 - DNA, 25 bp, Homo sapien
gagtagcgatagtccttgcagcccc

SEQ ID NO: 4977641 - DNA, 25 bp, Homo sapien
tccacaggagcttgtgtgttttctc

SEQ ID NO: 4977642 - DNA, 25 bp, Homo sapien
gaggtgcctcaagagtagcgatagt

SEQ ID NO: 4977643 - DNA, 25 bp, Homo sapien
ccgttgtgggggatggcctgagcca

SEQ ID NO: 4977644 - DNA, 25 bp, Homo sapien
gtcccgttgtgggggatggcctgag

SEQ ID NO: 4977645 - DNA, 25 bp, Homo sapien
ctgctgacccagcgtcccgttgtgg

SEQ ID NO: 4977646 - DNA, 25 bp, Homo sapien
tgctgacccagcgtcccgttgtggg

SEQ ID NO: 4977647 - DNA, 25 bp, Homo sapien
ggcttgggccaccaggaactccact

SEQ ID NO: 4977648 - DNA, 25 bp, Homo sapien
gggcttgggccaccaggaactccac

SEQ ID NO: 4977649 - DNA, 25 bp, Homo sapien
accaggaactccactctgttggagc

SEQ ID NO: 4977650 - DNA, 25 bp, Homo sapien
gccaccaggaactccactctgttgg

SEQ ID NO: 4977651 - DNA, 25 bp, Homo sapien
acattgggagaggtttccagggtct

SEQ ID NO: 4977652 - DNA, 25 bp, Homo sapien
gtttccagggtctgggatggaacat

SEQ ID NO: 4977653 - DNA, 25 bp, Homo sapien
ggtctgggatggaacatttggtgcc

SEQ ID NO: 4977654 - DNA, 25 bp, Homo sapien
gggatggaacatttggtgcccccac

SEQ ID NO: 4977655 - DNA, 25 bp, Homo sapien
gccttatgtggatcggcagaaccga

SEQ ID NO: 4977656 - DNA, 25 bp, Homo sapien
cagcggcaagtttctgcggaggtac

SEQ ID NO: 4977657 - DNA, 25 bp, Homo sapien
tgggtttctggacatcgaggagcat

SEQ ID NO: 4977658 - DNA, 25 bp, Homo sapien
gaagctggtgagagtctcagcccag

SEQ ID NO: 4977659 - DNA, 25 bp, Homo sapien
ccttgagtgatttggtggaatgagc

SEQ ID NO: 4977660 - DNA, 25 bp, Homo sapien
cttgagtgatttggtggaatgagcc

SEQ ID NO: 4977661 - DNA, 25 bp, Homo sapien
cctctgaacagcaaggtcacaggtc

SEQ ID NO: 4977662 - DNA, 25 bp, Homo sapien
ctctgaacagcaaggtcacaggtca

SEQ ID NO: 4977663 - DNA, 25 bp, Homo sapien
gctttacccgaactgacttgcttgg

SEQ ID NO: 4977664 - DNA, 25 bp, Homo sapien
tgatttacctgcttcacgccatgct

SEQ ID NO: 4977665 - DNA, 25 bp, Homo sapien
gtgttagtgcaagtcattcgaatgg

SEQ ID NO: 4977666 - DNA, 25 bp, Homo sapien
tgcttccccactagggctgtgcttt

SEQ ID NO: 4977667 - DNA, 25 bp, Homo sapien
cttcttcagtggttgggttagttct

SEQ ID NO: 4977668 - DNA, 25 bp, Homo sapien
ctggcttggcatattcttgaaaaaa

SEQ ID NO: 4977669 - DNA, 25 bp, Homo sapien
gctgtgatacagaaataattcagga

SEQ ID NO: 4977670 - DNA, 25 bp, Homo sapien
tgttgtgtgaacagccaaacggcca

SEQ ID NO: 4977671 - DNA, 25 bp, Homo sapien
attcggtgaggcctttgccaccagg

SEQ ID NO: 4977672 - DNA, 25 bp, Homo sapien
tgtgctcagcccgtgcaaggtcttg

SEQ ID NO: 4977673 - DNA, 25 bp, Homo sapien
ccgtgcaaggtcttgtagatgatgt

SEQ ID NO: 4977674 - DNA, 25 bp, Homo sapien
atgaattcggtgaggcctttgccac

SEQ ID NO: 4977675 - DNA, 25 bp, Homo sapien
aagatgtcctttgattgttatacct

SEQ ID NO: 4977676 - DNA, 25 bp, Homo sapien
gaggagaagggcgttctgagttggg

SEQ ID NO: 4977677 - DNA, 25 bp, Homo sapien
ttgttatacctactctgccccaagc

SEQ ID NO: 4977678 - DNA, 25 bp, Homo sapien
cctttgattgttatacctactctgc

SEQ ID NO: 4977679 - DNA, 25 bp, Homo sapien
catttagggtcgtcagggtccccag

SEQ ID NO: 4977680 - DNA, 25 bp, Homo sapien
gcatttagggtcgtcagggtcccca

SEQ ID NO: 4977681 - DNA, 25 bp, Homo sapien
cagaggtgagctcgcctggttggag

SEQ ID NO: 4977682 - DNA, 25 bp, Homo sapien
gggcagaggtgagctcgcctggttg

SEQ ID NO: 4977683 - DNA, 25 bp, Homo sapien
gagagtagctatcagcgtgtcgtgt

SEQ ID NO: 4977684 - DNA, 25 bp, Homo sapien
tgtccccgcgttagcatcagcaagt

SEQ ID NO: 4977685 - DNA, 25 bp, Homo sapien
gctatcagcgtgtcgtgtgtccccg

SEQ ID NO: 4977686 - DNA, 25 bp, Homo sapien
agcgtgtcgtgtgtccccgcgttag

SEQ ID NO: 4977687 - DNA, 25 bp, Homo sapien
tttgtatctgctcagacgccttcat

SEQ ID NO: 4977688 - DNA, 25 bp, Homo sapien
ctttgtatctgctcagacgccttca

SEQ ID NO: 4977689 - DNA, 25 bp, Homo sapien
cactttgtatctgctcagacgcctt

SEQ ID NO: 4977690 - DNA, 25 bp, Homo sapien
actttgtatctgctcagacgccttc

SEQ ID NO: 4977691 - DNA, 25 bp, Homo sapien
gaagagagtcctgagtttgtccttt

SEQ ID NO: 4977692 - DNA, 25 bp, Homo sapien
tgtgtgcctaaatccagagagaggg

SEQ ID NO: 4977693 - DNA, 25 bp, Homo sapien
gatcccttgccgctacctaggtgct

SEQ ID NO: 4977694 - DNA, 25 bp, Homo sapien
ggagaaggatttgtgtgcctaaatc

SEQ ID NO: 4977695 - DNA, 25 bp, Homo sapien
gagagtggctgcggcatctttctct

SEQ ID NO: 4977696 - DNA, 25 bp, Homo sapien
agtggctgcggcatctttctctctg

SEQ ID NO: 4977697 - DNA, 25 bp, Homo sapien
ctggagagtggctgcggcatctttc

SEQ ID NO: 4977698 - DNA, 25 bp, Homo sapien
tggagagtggctgcggcatctttct

SEQ ID NO: 4977699 - DNA, 25 bp, Homo sapien
tctaaggcagtgtctgtcactcatg

SEQ ID NO: 4977700 - DNA, 25 bp, Homo sapien
gagcggttctcattcccttctaagg

SEQ ID NO: 4977701 - DNA, 25 bp, Homo sapien
ggtggtggacccttagtcctcagca

SEQ ID NO: 4977702 - DNA, 25 bp, Homo sapien
cacggtgtctttgcccagagcggtt

SEQ ID NO: 4977703 - DNA, 25 bp, Homo sapien
gtggtgagaaatgtggctgcctccc

SEQ ID NO: 4977704 - DNA, 25 bp, Homo sapien
ccttgtggtgagaaatgtggctgcc

SEQ ID NO: 4977705 - DNA, 25 bp, Homo sapien
gcaatttgtgcatgccttgtggtga

SEQ ID NO: 4977706 - DNA, 25 bp, Homo sapien
cacagctgccggcaatttgtgcatg

SEQ ID NO: 4977707 - DNA, 25 bp, Homo sapien
tgaggacgggcgtgtggccctggcc

SEQ ID NO: 4977708 - DNA, 25 bp, Homo sapien
tggccagagggctgcgtgtgggctg

SEQ ID NO: 4977709 - DNA, 25 bp, Homo sapien
ctggctgttcagggtgtgtgcttct

SEQ ID NO: 4977710 - DNA, 25 bp, Homo sapien
atgggaagatgaggacgggcgtgtg

SEQ ID NO: 4977711 - DNA, 25 bp, Homo sapien
ccccatcccatgtaggtggctgcta

SEQ ID NO: 4977712 - DNA, 25 bp, Homo sapien
ctgacgagcttgcagctcctgtggt

SEQ ID NO: 4977713 - DNA, 25 bp, Homo sapien
gtggctgctattcccctgatcctga

SEQ ID NO: 4977714 - DNA, 25 bp, Homo sapien
gagcccattgacctcctgaagctgg

SEQ ID NO: 4977715 - DNA, 25 bp, Homo sapien
taagcgcaagttcctgagagtctgt

SEQ ID NO: 4977716 - DNA, 25 bp, Homo sapien
ctgataagcgcaagttcctgagagt

SEQ ID NO: 4977717 - DNA, 25 bp, Homo sapien
cgcaagttcctgagagtctgttgag

SEQ ID NO: 4977718 - DNA, 25 bp, Homo sapien
gataagcgcaagttcctgagagtct

SEQ ID NO: 4977719 - DNA, 25 bp, Homo sapien
tacttgacgtaacatcctgtacgca

SEQ ID NO: 4977720 - DNA, 25 bp, Homo sapien
cgtagttccaggtgggacactgcct

SEQ ID NO: 4977721 - DNA, 25 bp, Homo sapien
cagagaaactcatggaccctcagca

SEQ ID NO: 4977722 - DNA, 25 bp, Homo sapien
gtttcatacagttttgcaggcccag

SEQ ID NO: 4977723 - DNA, 25 bp, Homo sapien
ctcatgataaccctgtgagaacacg

SEQ ID NO: 4977724 - DNA, 25 bp, Homo sapien
tgataaccctgtgagaacacgatat

SEQ ID NO: 4977725 - DNA, 25 bp, Homo sapien
ctgcactatcatatttaaccctcat

SEQ ID NO: 4977726 - DNA, 25 bp, Homo sapien
taaccctcatgataaccctgtgaga

SEQ ID NO: 4977727 - DNA, 25 bp, Homo sapien
gaatgttctccgattccatcagccc

SEQ ID NO: 4977728 - DNA, 25 bp, Homo sapien
ttttcatggttaggccatcagggca

SEQ ID NO: 4977729 - DNA, 25 bp, Homo sapien
taaaggcaattgttccatgtgtctg

SEQ ID NO: 4977730 - DNA, 25 bp, Homo sapien
tctctgagtgttctgattggaatcc

SEQ ID NO: 4977731 - DNA, 25 bp, Homo sapien
aagcatcacagagctcgttcatgga

SEQ ID NO: 4977732 - DNA, 25 bp, Homo sapien
catggactgtcctacgagtgtgctc

SEQ ID NO: 4977733 - DNA, 25 bp, Homo sapien
catccgcctccctgtcctagaaaag

SEQ ID NO: 4977734 - DNA, 25 bp, Homo sapien
ttttccttgagttggctaatgaaga

SEQ ID NO: 4977735 - DNA, 25 bp, Homo sapien
tagggtgttgcgttctcctgaaggt

SEQ ID NO: 4977736 - DNA, 25 bp, Homo sapien
tcccggtgacgtcccggcagataga

SEQ ID NO: 4977737 - DNA, 25 bp, Homo sapien
cttttctctcgaagtcccggtgacg

SEQ ID NO: 4977738 - DNA, 25 bp, Homo sapien
cagatagatgtagggtgttgcgttc

SEQ ID NO: 4977739 - DNA, 25 bp, Homo sapien
caagcacataccatccaggaagaga

SEQ ID NO: 4977740 - DNA, 25 bp, Homo sapien
tttcttgggcagcaattcctgtcac

SEQ ID NO: 4977741 - DNA, 25 bp, Homo sapien
cgccgagcccagcacgtgtttgagt

SEQ ID NO: 4977742 - DNA, 25 bp, Homo sapien
ttccccaaggagctggtccgctttc

SEQ ID NO: 4977743 - DNA, 25 bp, Homo sapien
tgcaggcagacagtccagaagacat

SEQ ID NO: 4977744 - DNA, 25 bp, Homo sapien
gatgaattcctctcaagcaggcatg

SEQ ID NO: 4977745 - DNA, 25 bp, Homo sapien
gattaaggagattggcgcagctgtc

SEQ ID NO: 4977746 - DNA, 25 bp, Homo sapien
tgatgtaggcaagcagcctggtccc

SEQ ID NO: 4977747 - DNA, 25 bp, Homo sapien
tacaaaaagaatctagagagagata

SEQ ID NO: 4977748 - DNA, 25 bp, Homo sapien
gatacaaaaagaatctagagagaga

SEQ ID NO: 4977749 - DNA, 25 bp, Homo sapien
agagatacaaaaagaatctagagag

SEQ ID NO: 4977750 - DNA, 25 bp, Homo sapien
caaaaagaatctagagagagatata

SEQ ID NO: 4977751 - DNA, 25 bp, Homo sapien
tttatctacagagcctggctatgtt

SEQ ID NO: 4977752 - DNA, 25 bp, Homo sapien
tttttatctacagagcctggctatg

SEQ ID NO: 4977753 - DNA, 25 bp, Homo sapien
ttttttatctacagagcctggctat

SEQ ID NO: 4977754 - DNA, 25 bp, Homo sapien
tatctacagagcctggctatgttgc

SEQ ID NO: 4977755 - DNA, 25 bp, Homo sapien
tgcacctagccagaacatcgttaat

SEQ ID NO: 4977756 - DNA, 25 bp, Homo sapien
gtatttcaggtggtcctccccatgg

SEQ ID NO: 4977757 - DNA, 25 bp, Homo sapien
tgactaagtgcataggctctggagt

SEQ ID NO: 4977758 - DNA, 25 bp, Homo sapien
taaggcttttgaagtggtcttgacc

SEQ ID NO: 4977759 - DNA, 25 bp, Homo sapien
cattatggagattgatgtcaggtca

SEQ ID NO: 4977760 - DNA, 25 bp, Homo sapien
atactcagctcccacgagaaagaaa

SEQ ID NO: 4977761 - DNA, 25 bp, Homo sapien
tgtcagctgatggttggtaaaaata

SEQ ID NO: 4977762 - DNA, 25 bp, Homo sapien
tcaggtcagaatattggagttatac

SEQ ID NO: 4977763 - DNA, 25 bp, Homo sapien
gctgagtgcatggaaactgttacgc

SEQ ID NO: 4977764 - DNA, 25 bp, Homo sapien
tctctgtgttattgcctgcggcagc

SEQ ID NO: 4977765 - DNA, 25 bp, Homo sapien
tgcactcgctgtaagctctaggctg

SEQ ID NO: 4977766 - DNA, 25 bp, Homo sapien
gaaattgagtgtccccaagtgagct

SEQ ID NO: 4977767 - DNA, 25 bp, Homo sapien
taaagcctcttccattgacttggcc

SEQ ID NO: 4977768 - DNA, 25 bp, Homo sapien
tcaaattaccactctagcagcgaga

SEQ ID NO: 4977769 - DNA, 25 bp, Homo sapien
gcccacagggagagctaatcatgaa

SEQ ID NO: 4977770 - DNA, 25 bp, Homo sapien
gaaacaactaaaaggcaggcagctt

SEQ ID NO: 4977771 - DNA, 25 bp, Homo sapien
tagattggacaattctgccaggagg

SEQ ID NO: 4977772 - DNA, 25 bp, Homo sapien
tattagcatgggctggtaaacgctg

SEQ ID NO: 4977773 - DNA, 25 bp, Homo sapien
gccaggaggaatagctcaactcaca

SEQ ID NO: 4977774 - DNA, 25 bp, Homo sapien
caaaagagggcttaataggatggct

SEQ ID NO: 4977775 - DNA, 25 bp, Homo sapien
ccccctactgaaaatactcatacag

SEQ ID NO: 4977776 - DNA, 25 bp, Homo sapien
tattccccctactgaaaatactcat

SEQ ID NO: 4977777 - DNA, 25 bp, Homo sapien
ttattccccctactgaaaatactca

SEQ ID NO: 4977778 - DNA, 25 bp, Homo sapien
ttccccctactgaaaatactcatac

SEQ ID NO: 4977779 - DNA, 25 bp, Homo sapien
ttcagaagacggagctttcacccgc

SEQ ID NO: 4977780 - DNA, 25 bp, Homo sapien
gaagactatggaaacccatccacag

SEQ ID NO: 4977781 - DNA, 25 bp, Homo sapien
cagtgtgtattacaatccacggcca

SEQ ID NO: 4977782 - DNA, 25 bp, Homo sapien
tccgtctgcaaggtaaaatctgggt

SEQ ID NO: 4977783 - DNA, 25 bp, Homo sapien
taaagtggttatgaagtagtgtccg

SEQ ID NO: 4977784 - DNA, 25 bp, Homo sapien
gcgtcaacagcttccctactgcagt

SEQ ID NO: 4977785 - DNA, 25 bp, Homo sapien
tcagccctccagtaattagcaaaat

SEQ ID NO: 4977786 - DNA, 25 bp, Homo sapien
tgtcccaaacagaatcgatccacac

SEQ ID NO: 4977787 - DNA, 25 bp, Homo sapien
catgttatacaaggctacctggcaa

SEQ ID NO: 4977788 - DNA, 25 bp, Homo sapien
tgagacagtgcagtggaccctctgt

SEQ ID NO: 4977789 - DNA, 25 bp, Homo sapien
tatactcataggtcccagagacagg

SEQ ID NO: 4977790 - DNA, 25 bp, Homo sapien
cacttggacctgagaagactaaggc

SEQ ID NO: 4977791 - DNA, 25 bp, Homo sapien
taagggataaactgagtgcccacag

SEQ ID NO: 4977792 - DNA, 25 bp, Homo sapien
tgcccacaggcacttagcaagttag

SEQ ID NO: 4977793 - DNA, 25 bp, Homo sapien
cagttagaacttcaccttccgggct

SEQ ID NO: 4977794 - DNA, 25 bp, Homo sapien
tttgagcagcgaaaagcgaggactt

SEQ ID NO: 4977795 - DNA, 25 bp, Homo sapien
aattccatctaaggcatggcactgg

SEQ ID NO: 4977796 - DNA, 25 bp, Homo sapien
tatacaaggtttattttctcgtaga

SEQ ID NO: 4977797 - DNA, 25 bp, Homo sapien
tgttccacgtcgctgtaggcctgac

SEQ ID NO: 4977798 - DNA, 25 bp, Homo sapien
aggtcctaggactggcacactcaat

SEQ ID NO: 4977799 - DNA, 25 bp, Homo sapien
tacatgatttcagtaagagttgccc

SEQ ID NO: 4977800 - DNA, 25 bp, Homo sapien
taataacagaatgaaagcggcctca

SEQ ID NO: 4977801 - DNA, 25 bp, Homo sapien
tattacctgatatctgtgggacacc

SEQ ID NO: 4977802 - DNA, 25 bp, Homo sapien
tacagctgtgctcaagggcaaggaa

SEQ ID NO: 4977803 - DNA, 25 bp, Homo sapien
tctcctacggacatggtggaacctg

SEQ ID NO: 4977804 - DNA, 25 bp, Homo sapien
tatcgaagggtttgctcttacgaca

SEQ ID NO: 4977805 - DNA, 25 bp, Homo sapien
tacaaagacatataccggtagactc

SEQ ID NO: 4977806 - DNA, 25 bp, Homo sapien
gaccctggccatactggaaatttcc

SEQ ID NO: 4977807 - DNA, 25 bp, Homo sapien
gggatgcagttgcatttccaacatg

SEQ ID NO: 4977808 - DNA, 25 bp, Homo sapien
gacaaccataaccaagttcctggga

SEQ ID NO: 4977809 - DNA, 25 bp, Homo sapien
cttgagacaaccataaccaagttcc

SEQ ID NO: 4977810 - DNA, 25 bp, Homo sapien
tcctgggatgcagttgcatttccaa

SEQ ID NO: 4977811 - DNA, 25 bp, Homo sapien
atcatcatacggtctttgcaaatcg

SEQ ID NO: 4977812 - DNA, 25 bp, Homo sapien
catcatcatacggtctttgcaaatc

SEQ ID NO: 4977813 - DNA, 25 bp, Homo sapien
gatcatcatcatacggtctttgcaa

SEQ ID NO: 4977814 - DNA, 25 bp, Homo sapien
catgatcatcatcatacggtctttg

SEQ ID NO: 4977815 - DNA, 25 bp, Homo sapien
ctgctgacccctttccaagccaatt

SEQ ID NO: 4977816 - DNA, 25 bp, Homo sapien
ggtcaaacggacagccaccaaaatg

SEQ ID NO: 4977817 - DNA, 25 bp, Homo sapien
gcacgtaatcaaaacgggcaaaaga

SEQ ID NO: 4977818 - DNA, 25 bp, Homo sapien
tttgcatgcacgtaatcaaaacggg

SEQ ID NO: 4977819 - DNA, 25 bp, Homo sapien
catggtttcatctcttcagtaggca

SEQ ID NO: 4977820 - DNA, 25 bp, Homo sapien
tgccatggtttcatctcttcagtag

SEQ ID NO: 4977821 - DNA, 25 bp, Homo sapien
ttctataaggattctacttctgcca

SEQ ID NO: 4977822 - DNA, 25 bp, Homo sapien
tctggtcctgtttctataaggattc

SEQ ID NO: 4977823 - DNA, 25 bp, Homo sapien
aaaatttaagccaaagtattctcag

SEQ ID NO: 4977824 - DNA, 25 bp, Homo sapien
aatttaagccaaagtattctcagtc

SEQ ID NO: 4977825 - DNA, 25 bp, Homo sapien
aaatttaagccaaagtattctcagt

SEQ ID NO: 4977826 - DNA, 25 bp, Homo sapien
agagatgttaaaaaatggcgtgatt

SEQ ID NO: 4977827 - DNA, 25 bp, Homo sapien
cacgggctgtgagaaacctggttca

SEQ ID NO: 4977828 - DNA, 25 bp, Homo sapien
catgatatttgcctccggaacgacc

SEQ ID NO: 4977829 - DNA, 25 bp, Homo sapien
gaccgactaatactctccttgggct

SEQ ID NO: 4977830 - DNA, 25 bp, Homo sapien
tactggcaccgaatcgaccgactaa

SEQ ID NO: 4977831 - DNA, 25 bp, Homo sapien
cagaagtaaattccccagcagcaaa

SEQ ID NO: 4977832 - DNA, 25 bp, Homo sapien
tggctccgagacacacaatgcagca

SEQ ID NO: 4977833 - DNA, 25 bp, Homo sapien
ccagcggatgtgagctcaggctcag

SEQ ID NO: 4977834 - DNA, 25 bp, Homo sapien
tcagcggtcgcattttgcgagtggc

SEQ ID NO: 4977835 - DNA, 25 bp, Homo sapien
tcccgggcacaggagcggagacccg

SEQ ID NO: 4977836 - DNA, 25 bp, Homo sapien
gtggtcaggcctttccgcgtagccc

SEQ ID NO: 4977837 - DNA, 25 bp, Homo sapien
acaggagcggagacccggcctcaac

SEQ ID NO: 4977838 - DNA, 25 bp, Homo sapien
agcacagacccaagaactgcgtggt

SEQ ID NO: 4977839 - DNA, 25 bp, Homo sapien
tgcgttctccaatcggatccgtcga

SEQ ID NO: 4977840 - DNA, 25 bp, Homo sapien
actagaaaaggtcgagcagacgggc

SEQ ID NO: 4977841 - DNA, 25 bp, Homo sapien
tcctccttcttttgcgccgaatgcg

SEQ ID NO: 4977842 - DNA, 25 bp, Homo sapien
gggcggatatgactggcgggccgac

SEQ ID NO: 4977843 - DNA, 25 bp, Homo sapien
tcggaccgagggctcagttgcgtca

SEQ ID NO: 4977844 - DNA, 25 bp, Homo sapien
gctcagttgcgtcagtgccgcgcgc

SEQ ID NO: 4977845 - DNA, 25 bp, Homo sapien
gacccttcgtgtccggtggttgctg

SEQ ID NO: 4977846 - DNA, 25 bp, Homo sapien
ctgagaggaacctgcggaatcggcc

SEQ ID NO: 4977847 - DNA, 25 bp, Homo sapien
ggcaccgcttcctccgtgtcctgtt

SEQ ID NO: 4977848 - DNA, 25 bp, Homo sapien
tccgtgtcctgttcgatggagccgt

SEQ ID NO: 4977849 - DNA, 25 bp, Homo sapien
gcttcctccgtgtcctgttcgatgg

SEQ ID NO: 4977850 - DNA, 25 bp, Homo sapien
ttcgatggagccgttcccagcgtcc

SEQ ID NO: 4977851 - DNA, 25 bp, Homo sapien
agttgcttcttggttatatgccaaa

SEQ ID NO: 4977852 - DNA, 25 bp, Homo sapien
gctgagtatactgatagttgcttct

SEQ ID NO: 4977853 - DNA, 25 bp, Homo sapien
tggctactccacgagcagaacagtg

SEQ ID NO: 4977854 - DNA, 25 bp, Homo sapien
catgcctggccagcatatgtaatct

SEQ ID NO: 4977855 - DNA, 25 bp, Homo sapien
tgattatgttttgtcttaggataga

SEQ ID NO: 4977856 - DNA, 25 bp, Homo sapien
atccctgtttgggtgcgatcttggc

SEQ ID NO: 4977857 - DNA, 25 bp, Homo sapien
cctccttttctacagtcaatggtag

SEQ ID NO: 4977858 - DNA, 25 bp, Homo sapien
gatagagttaatcagttaatccctg

SEQ ID NO: 4977859 - DNA, 25 bp, Homo sapien
cccctcagacatagtttatcatcac

SEQ ID NO: 4977860 - DNA, 25 bp, Homo sapien
ccctcagacatagtttatcatcact

SEQ ID NO: 4977861 - DNA, 25 bp, Homo sapien
tcccctcagacatagtttatcatca

SEQ ID NO: 4977862 - DNA, 25 bp, Homo sapien
cacgcaggcgggattaatgtggtac

SEQ ID NO: 4977863 - DNA, 25 bp, Homo sapien
agtgtgttcaaggagccacgcaggc

SEQ ID NO: 4977864 - DNA, 25 bp, Homo sapien
aagaaaggttttggtggaactgcag

SEQ ID NO: 4977865 - DNA, 25 bp, Homo sapien
tggtggaactgcaggaatggcattt

SEQ ID NO: 4977866 - DNA, 25 bp, Homo sapien
tacattggtttacttcttaaatgga

SEQ ID NO: 4977867 - DNA, 25 bp, Homo sapien
tgtcaatattctggataagtaactg

SEQ ID NO: 4977868 - DNA, 25 bp, Homo sapien
tgacatactgctttaaaacctgctg

SEQ ID NO: 4977869 - DNA, 25 bp, Homo sapien
cttattttttgtgcatatgagtgta

SEQ ID NO: 4977870 - DNA, 25 bp, Homo sapien
tgtgtgtattcacgcagttactcgc

SEQ ID NO: 4977871 - DNA, 25 bp, Homo sapien
tcagtcatcggtgaggttaatgcac

SEQ ID NO: 4977872 - DNA, 25 bp, Homo sapien
gaatgcacaagaaccacaattaaga

SEQ ID NO: 4977873 - DNA, 25 bp, Homo sapien
taatctaatacctgtgaaaactgac

SEQ ID NO: 4977874 - DNA, 25 bp, Homo sapien
tatggatcgtaaaattttaagcact

SEQ ID NO: 4977875 - DNA, 25 bp, Homo sapien
tctatgagttatcatcttagctgtg

SEQ ID NO: 4977876 - DNA, 25 bp, Homo sapien
tgaatttttactatggcagatatgg

SEQ ID NO: 4977877 - DNA, 25 bp, Homo sapien
aaagttactgtggtatctatgagtt

SEQ ID NO: 4977878 - DNA, 25 bp, Homo sapien
tggccaaatttaaaggtagtgtcaa

SEQ ID NO: 4977879 - DNA, 25 bp, Homo sapien
ccaaatttaaaggtagtgtcaatga

SEQ ID NO: 4977880 - DNA, 25 bp, Homo sapien
gcggccatggccaaatttaaaggta

SEQ ID NO: 4977881 - DNA, 25 bp, Homo sapien
gccatggccaaatttaaaggtagtg

SEQ ID NO: 4977882 - DNA, 25 bp, Homo sapien
cacacagcacttcagcatgacaaag

SEQ ID NO: 4977883 - DNA, 25 bp, Homo sapien
cacagcacttcagcatgacaaagtc

SEQ ID NO: 4977884 - DNA, 25 bp, Homo sapien
gcacttcagcatgacaaagtcattg

SEQ ID NO: 4977885 - DNA, 25 bp, Homo sapien
cagcacttcagcatgacaaagtcat

SEQ ID NO: 4977886 - DNA, 25 bp, Homo sapien
gacaaagccacccagagggttgatg

SEQ ID NO: 4977887 - DNA, 25 bp, Homo sapien
tcacttcaccatagtggacaaagcc

SEQ ID NO: 4977888 - DNA, 25 bp, Homo sapien
tggacaaagccacccagagggttga

SEQ ID NO: 4977889 - DNA, 25 bp, Homo sapien
caaagccacccagagggttgatgct

SEQ ID NO: 4977890 - DNA, 25 bp, Homo sapien
tccttgatgaagtagccctgactga

SEQ ID NO: 4977891 - DNA, 25 bp, Homo sapien
tgttgatctcagtgcagtgatagtt

SEQ ID NO: 4977892 - DNA, 25 bp, Homo sapien
tggaggcactgatcaatttgccatc

SEQ ID NO: 4977893 - DNA, 25 bp, Homo sapien
gccctgactgatattatagatcttc

SEQ ID NO: 4977894 - DNA, 25 bp, Homo sapien
tcttggtatgccaatgactggtgac

SEQ ID NO: 4977895 - DNA, 25 bp, Homo sapien
tcagtgggtcttgtagggcagcttc

SEQ ID NO: 4977896 - DNA, 25 bp, Homo sapien
gggcagcttcttggtatgccaatga

SEQ ID NO: 4977897 - DNA, 25 bp, Homo sapien
cttcttggtatgccaatgactggtg

SEQ ID NO: 4977898 - DNA, 25 bp, Homo sapien
ggtcacccgtttgatgtcaatcatc

SEQ ID NO: 4977899 - DNA, 25 bp, Homo sapien
cgtttgatgtcaatcatcttgtcct

SEQ ID NO: 4977900 - DNA, 25 bp, Homo sapien
ccttggtcacccgtttgatgtcaat

SEQ ID NO: 4977901 - DNA, 25 bp, Homo sapien
tgcccttggtcacccgtttgatgtc

SEQ ID NO: 4977902 - DNA, 25 bp, Homo sapien
taggtgggtcttcttcatacataga

SEQ ID NO: 4977903 - DNA, 25 bp, Homo sapien
ggatgtccattaggtgggtcttctt

SEQ ID NO: 4977904 - DNA, 25 bp, Homo sapien
ctctagcctctccagagaccagtcc

SEQ ID NO: 4977905 - DNA, 25 bp, Homo sapien
gaccagtccagtttctcggtcacag

SEQ ID NO: 4977906 - DNA, 25 bp, Homo sapien
tctacttcgctttatgccagttcct

SEQ ID NO: 4977907 - DNA, 25 bp, Homo sapien
taaaagccttctacttcgctttatg

SEQ ID NO: 4977908 - DNA, 25 bp, Homo sapien
tcgctttatgccagttcctatagaa

SEQ ID NO: 4977909 - DNA, 25 bp, Homo sapien
ccagttcctatagaagtgccttttg

SEQ ID NO: 4977910 - DNA, 25 bp, Homo sapien
caatggtcatagcctctaccccttc

SEQ ID NO: 4977911 - DNA, 25 bp, Homo sapien
cacaatggtcatagcctctacccct

SEQ ID NO: 4977912 - DNA, 25 bp, Homo sapien
acaatggtcatagcctctacccctt

SEQ ID NO: 4977913 - DNA, 25 bp, Homo sapien
aatggtcatagcctctaccccttcc

SEQ ID NO: 4977914 - DNA, 25 bp, Homo sapien
gaccagtttagaagggtcatcactg

SEQ ID NO: 4977915 - DNA, 25 bp, Homo sapien
gtggaccagtttagaagggtcatca

SEQ ID NO: 4977916 - DNA, 25 bp, Homo sapien
gaagcccggggacccatgtcttgga

SEQ ID NO: 4977917 - DNA, 25 bp, Homo sapien
gcccggggacccatgtcttggagca

SEQ ID NO: 4977918 - DNA, 25 bp, Homo sapien
cagtaagtatctagttcctcacact

SEQ ID NO: 4977919 - DNA, 25 bp, Homo sapien
tcagtaagtatctagttcctcacac

SEQ ID NO: 4977920 - DNA, 25 bp, Homo sapien
gtaagtatctagttcctcacactca

SEQ ID NO: 4977921 - DNA, 25 bp, Homo sapien
taagtatctagttcctcacactcag

SEQ ID NO: 4977922 - DNA, 25 bp, Homo sapien
attcatttgaattttagtaacatca

SEQ ID NO: 4977923 - DNA, 25 bp, Homo sapien
gaattttagtaacatcatttgacat

SEQ ID NO: 4977924 - DNA, 25 bp, Homo sapien
cgtgcaccagggaatcattttagaa

SEQ ID NO: 4977925 - DNA, 25 bp, Homo sapien
cattttagaataactattcatttga

SEQ ID NO: 4977926 - DNA, 25 bp, Homo sapien
ttttcgtgccacatgaattttccac

SEQ ID NO: 4977927 - DNA, 25 bp, Homo sapien
taattctttttttcgtgccacatga

SEQ ID NO: 4977928 - DNA, 25 bp, Homo sapien
tcgtgccacatgaattttccacttg

SEQ ID NO: 4977929 - DNA, 25 bp, Homo sapien
ataattctttttttcgtgccacatg

SEQ ID NO: 4977930 - DNA, 25 bp, Homo sapien
gggagggaatttgctgtcagtactt

SEQ ID NO: 4977931 - DNA, 25 bp, Homo sapien
taactagtgattccttcagaaggca

SEQ ID NO: 4977932 - DNA, 25 bp, Homo sapien
caacggataacatcgagagtctcgc

SEQ ID NO: 4977933 - DNA, 25 bp, Homo sapien
tcagtactttgagcacgtgtttttt

SEQ ID NO: 4977934 - DNA, 25 bp, Homo sapien
gcagcttctgaaggacccttaggca

SEQ ID NO: 4977935 - DNA, 25 bp, Homo sapien
cccacagggtcaagcccagaagaca

SEQ ID NO: 4977936 - DNA, 25 bp, Homo sapien
ttctcttgtcccttggccaagtgac

SEQ ID NO: 4977937 - DNA, 25 bp, Homo sapien
cagcttctgaaggacccttaggcat

SEQ ID NO: 4977938 - DNA, 25 bp, Homo sapien
gtacatttgatgtgaaatctaactt

SEQ ID NO: 4977939 - DNA, 25 bp, Homo sapien
tctgtattaagtacatttgatgtga

SEQ ID NO: 4977940 - DNA, 25 bp, Homo sapien
tataaatttcgagttgagcataagc

SEQ ID NO: 4977941 - DNA, 25 bp, Homo sapien
tcgagttgagcataagcaattgaat

SEQ ID NO: 4977942 - DNA, 25 bp, Homo sapien
gtgtgatatacactttcacgacatt

SEQ ID NO: 4977943 - DNA, 25 bp, Homo sapien
tgtccactctccagtgtgatataca

SEQ ID NO: 4977944 - DNA, 25 bp, Homo sapien
actttcacgacattatcaatggcac

SEQ ID NO: 4977945 - DNA, 25 bp, Homo sapien
cacgacattatcaatggcacattga

SEQ ID NO: 4977946 - DNA, 25 bp, Homo sapien
tcagagtatagtgtgctgtccaagg

SEQ ID NO: 4977947 - DNA, 25 bp, Homo sapien
gtccaaggaccctcgaggtgacaac

SEQ ID NO: 4977948 - DNA, 25 bp, Homo sapien
acaaccgaggttgctttctgcctga

SEQ ID NO: 4977949 - DNA, 25 bp, Homo sapien
ggccaaagggccacttcagagtata

SEQ ID NO: 4977950 - DNA, 25 bp, Homo sapien
tccgatggctttgattttatcactt

SEQ ID NO: 4977951 - DNA, 25 bp, Homo sapien
atggctttgattttatcacttggtt

SEQ ID NO: 4977952 - DNA, 25 bp, Homo sapien
atcctttcttcatccgatggctttg

SEQ ID NO: 4977953 - DNA, 25 bp, Homo sapien
cgatggctttgattttatcacttgg

SEQ ID NO: 4977954 - DNA, 25 bp, Homo sapien
tggtaaaaggtgtcactatccattc

SEQ ID NO: 4977955 - DNA, 25 bp, Homo sapien
tctaacccataaacgtccatccagt

SEQ ID NO: 4977956 - DNA, 25 bp, Homo sapien
tatccattctgtcagaagagtggag

SEQ ID NO: 4977957 - DNA, 25 bp, Homo sapien
tacacaatgtgtcactggtaaaagg

SEQ ID NO: 4977958 - DNA, 25 bp, Homo sapien
ctgctgttactaccgctgtcttctg

SEQ ID NO: 4977959 - DNA, 25 bp, Homo sapien
ctggctgctgttactaccgctgtct

SEQ ID NO: 4977960 - DNA, 25 bp, Homo sapien
tgtgactggctgctgttactaccgc

SEQ ID NO: 4977961 - DNA, 25 bp, Homo sapien
tgactggctgctgttactaccgctg

SEQ ID NO: 4977962 - DNA, 25 bp, Homo sapien
gaaactgatcaaaagaccattgttt

SEQ ID NO: 4977963 - DNA, 25 bp, Homo sapien
tttgctccgaaatctcttcatttta

SEQ ID NO: 4977964 - DNA, 25 bp, Homo sapien
gcttactgttcccactttgctccga

SEQ ID NO: 4977965 - DNA, 25 bp, Homo sapien
tgagcaaaggtgaaaaaatgtagaa

SEQ ID NO: 4977966 - DNA, 25 bp, Homo sapien
agccaaaatccatcattgatacttc

SEQ ID NO: 4977967 - DNA, 25 bp, Homo sapien
gccaaaatccatcattgatacttcc

SEQ ID NO: 4977968 - DNA, 25 bp, Homo sapien
ccaaaatccatcattgatacttcct

SEQ ID NO: 4977969 - DNA, 25 bp, Homo sapien
caaaatccatcattgatacttcctc

SEQ ID NO: 4977970 - DNA, 25 bp, Homo sapien
acattgctggctcacaatctggagg

SEQ ID NO: 4977971 - DNA, 25 bp, Homo sapien
taaccaggatcacattgacaatgga

SEQ ID NO: 4977972 - DNA, 25 bp, Homo sapien
ggagcataaccaggatcacattgac

SEQ ID NO: 4977973 - DNA, 25 bp, Homo sapien
tggtgatgacattgctggctcacaa

SEQ ID NO: 4977974 - DNA, 25 bp, Homo sapien
ttctgcattctcgggagtgacatac

SEQ ID NO: 4977975 - DNA, 25 bp, Homo sapien
tataggtctccgattgttttgaacc

SEQ ID NO: 4977976 - DNA, 25 bp, Homo sapien
gtactagttctgaatgtatccagtg

SEQ ID NO: 4977977 - DNA, 25 bp, Homo sapien
ctaagtctgtcattggtactagttc

SEQ ID NO: 4977978 - DNA, 25 bp, Homo sapien
gttggccacatgcagttatatcttc

SEQ ID NO: 4977979 - DNA, 25 bp, Homo sapien
ggaagatgtatacttttctaaatac

SEQ ID NO: 4977980 - DNA, 25 bp, Homo sapien
ttggaagatgtatacttttctaaat

SEQ ID NO: 4977981 - DNA, 25 bp, Homo sapien
gaagatgtatacttttctaaatacg

SEQ ID NO: 4977982 - DNA, 25 bp, Homo sapien
gatgtatacttttctaaatacgtac

SEQ ID NO: 4977983 - DNA, 25 bp, Homo sapien
tgtcattttgaaaattcacttcttc

SEQ ID NO: 4977984 - DNA, 25 bp, Homo sapien
ttctgtacacagaagattagcagac

SEQ ID NO: 4977985 - DNA, 25 bp, Homo sapien
tgaaaattcacttcttctgtacaca

SEQ ID NO: 4977986 - DNA, 25 bp, Homo sapien
cacagaagattagcagacttagcaa

SEQ ID NO: 4977987 - DNA, 25 bp, Homo sapien
tgaacactgtctatccctttctctg

SEQ ID NO: 4977988 - DNA, 25 bp, Homo sapien
aataactgtgaacactgtctatccc

SEQ ID NO: 4977989 - DNA, 25 bp, Homo sapien
aacactgtctatccctttctctgca

SEQ ID NO: 4977990 - DNA, 25 bp, Homo sapien
tttccaaataactgtgaacactgtc

SEQ ID NO: 4977991 - DNA, 25 bp, Homo sapien
ctttaaagcaatagctagtcttatt

SEQ ID NO: 4977992 - DNA, 25 bp, Homo sapien
cctttaaagcaatagctagtcttat

SEQ ID NO: 4977993 - DNA, 25 bp, Homo sapien
tcctttaaagcaatagctagtctta

SEQ ID NO: 4977994 - DNA, 25 bp, Homo sapien
ttaaagcaatagctagtcttattac

SEQ ID NO: 4977995 - DNA, 25 bp, Homo sapien
aatcacacatatctacactttttct

SEQ ID NO: 4977996 - DNA, 25 bp, Homo sapien
tgcagacatggcctctttcgtggat

SEQ ID NO: 4977997 - DNA, 25 bp, Homo sapien
tcttcgcttggacattcttcatcca

SEQ ID NO: 4977998 - DNA, 25 bp, Homo sapien
tttttcttcgcttggacattcttca

SEQ ID NO: 4977999 - DNA, 25 bp, Homo sapien
aattaccggtaggaatatctaagca

SEQ ID NO: 4978000 - DNA, 25 bp, Homo sapien
accggtaggaatatctaagcactca

SEQ ID NO: 4978001 - DNA, 25 bp, Homo sapien
gttacagcatgatccagtgccacat

SEQ ID NO: 4978002 - DNA, 25 bp, Homo sapien
gccacattctgcagatctaactaga

SEQ ID NO: 4978003 - DNA, 25 bp, Homo sapien
caatctgcaggattacagcattttt

SEQ ID NO: 4978004 - DNA, 25 bp, Homo sapien
gatctaactagagtacaatctgcag

SEQ ID NO: 4978005 - DNA, 25 bp, Homo sapien
caatgtggcgagaccctttctatac

SEQ ID NO: 4978006 - DNA, 25 bp, Homo sapien
gattctaatcacaccatgacttttg

SEQ ID NO: 4978007 - DNA, 25 bp, Homo sapien
gaaataaagtatctctccaacttga

SEQ ID NO: 4978008 - DNA, 25 bp, Homo sapien
tccatatcatcaagtcctctcaagg

SEQ ID NO: 4978009 - DNA, 25 bp, Homo sapien
taaactggccaagaacttggctgaa

SEQ ID NO: 4978010 - DNA, 25 bp, Homo sapien
gctgaactgtgaccatgcctgaggg

SEQ ID NO: 4978011 - DNA, 25 bp, Homo sapien
caatatagtaaggaaggaaagcgca

SEQ ID NO: 4978012 - DNA, 25 bp, Homo sapien
ggatgtagcacagggacacctttgc

SEQ ID NO: 4978013 - DNA, 25 bp, Homo sapien
tttatagaagatgcaggacatgtca

SEQ ID NO: 4978014 - DNA, 25 bp, Homo sapien
aatgtccatcattggctctcttggg

SEQ ID NO: 4978015 - DNA, 25 bp, Homo sapien
ggaaattattcaggagtctgaatgt

SEQ ID NO: 4978016 - DNA, 25 bp, Homo sapien
cttgcttgaggcctgttacccattt

SEQ ID NO: 4978017 - DNA, 25 bp, Homo sapien
agtcttccccaagggactccttgtg

SEQ ID NO: 4978018 - DNA, 25 bp, Homo sapien
gacatattggcagtcttccccaagg

SEQ ID NO: 4978019 - DNA, 25 bp, Homo sapien
agtatcccctaacagacatattggc

SEQ ID NO: 4978020 - DNA, 25 bp, Homo sapien
tgattttacaggttcttaaagtatc

SEQ ID NO: 4978021 - DNA, 25 bp, Homo sapien
taaatcaatacgaatgtcagcccga

SEQ ID NO: 4978022 - DNA, 25 bp, Homo sapien
caaagtcccaatgcgaaaagggcct

SEQ ID NO: 4978023 - DNA, 25 bp, Homo sapien
taattgtgaagtccatccccaccag

SEQ ID NO: 4978024 - DNA, 25 bp, Homo sapien
tcttacccgagtttgcctgttggcc

SEQ ID NO: 4978025 - DNA, 25 bp, Homo sapien
gactagcctggccaacatggtgaaa

SEQ ID NO: 4978026 - DNA, 25 bp, Homo sapien
gcaggtggataacctgaggtccgaa

SEQ ID NO: 4978027 - DNA, 25 bp, Homo sapien
ggataacctgaggtccgaagtttga

SEQ ID NO: 4978028 - DNA, 25 bp, Homo sapien
aggtggataacctgaggtccgaagt

SEQ ID NO: 4978029 - DNA, 25 bp, Homo sapien
ggtgacaagagtgaaactccaactc

SEQ ID NO: 4978030 - DNA, 25 bp, Homo sapien
tgggtgacaagagtgaaactccaac

SEQ ID NO: 4978031 - DNA, 25 bp, Homo sapien
cccgggagaaggaggttgtagtgag

SEQ ID NO: 4978032 - DNA, 25 bp, Homo sapien
cctgggtgacaagagtgaaactcca

SEQ ID NO: 4978033 - DNA, 25 bp, Homo sapien
ccaaaattccattgccacaagttga

SEQ ID NO: 4978034 - DNA, 25 bp, Homo sapien
taagttcaggctgcagaactatccg

SEQ ID NO: 4978035 - DNA, 25 bp, Homo sapien
tagccacaatcacactgctctgtag

SEQ ID NO: 4978036 - DNA, 25 bp, Homo sapien
caagttgaagattttcggtaagtca

SEQ ID NO: 4978037 - DNA, 25 bp, Homo sapien
taaaaaacttcataccatgggatca

SEQ ID NO: 4978038 - DNA, 25 bp, Homo sapien
aaaaaacttcataccatgggatcat

SEQ ID NO: 4978039 - DNA, 25 bp, Homo sapien
ctaaaaaacttcataccatgggatc

SEQ ID NO: 4978040 - DNA, 25 bp, Homo sapien
actgtgccataacaactgaaaaggc

SEQ ID NO: 4978041 - DNA, 25 bp, Homo sapien
gattcattatgcatgtagttcctgg

SEQ ID NO: 4978042 - DNA, 25 bp, Homo sapien
tcctggacagtaacaattgtagata

SEQ ID NO: 4978043 - DNA, 25 bp, Homo sapien
tcgcatcaggattcattatgcatgt

SEQ ID NO: 4978044 - DNA, 25 bp, Homo sapien
tgccattccgtgatatgttgctccc

SEQ ID NO: 4978045 - DNA, 25 bp, Homo sapien
tgttgctcccacataagtagaatgg

SEQ ID NO: 4978046 - DNA, 25 bp, Homo sapien
gttgcaaactttggatcgcatgcca

SEQ ID NO: 4978047 - DNA, 25 bp, Homo sapien
ctttggatcgcatgccattccgtga

SEQ ID NO: 4978048 - DNA, 25 bp, Homo sapien
tatgtcatatcatgagacctttgaa

SEQ ID NO: 4978049 - DNA, 25 bp, Homo sapien
catgagacctttgaaacaaaaattt

SEQ ID NO: 4978050 - DNA, 25 bp, Homo sapien
gtcatatcatgagacctttgaaaca

SEQ ID NO: 4978051 - DNA, 25 bp, Homo sapien
tcatgagacctttgaaacaaaaatt

SEQ ID NO: 4978052 - DNA, 25 bp, Homo sapien
aactgtcatattaagctgggaaaac

SEQ ID NO: 4978053 - DNA, 25 bp, Homo sapien
ctgaccagatctccaaggaagacag

SEQ ID NO: 4978054 - DNA, 25 bp, Homo sapien
ccaaggcaaaaatcgctgtagtatt

SEQ ID NO: 4978055 - DNA, 25 bp, Homo sapien
cagcatgaccacttgttgaaatctt

SEQ ID NO: 4978056 - DNA, 25 bp, Homo sapien
aactgcaactgccaccgtggagccc

SEQ ID NO: 4978057 - DNA, 25 bp, Homo sapien
tgccaccgtggagcccatataagca

SEQ ID NO: 4978058 - DNA, 25 bp, Homo sapien
agtgttgataagaccaaagatttgg

SEQ ID NO: 4978059 - DNA, 25 bp, Homo sapien
ttctcaactgcaactgccaccgtgg

SEQ ID NO: 4978060 - DNA, 25 bp, Homo sapien
catggctttatccataatgatttgt

SEQ ID NO: 4978061 - DNA, 25 bp, Homo sapien
gagttcttttcgatagcatggcacc

SEQ ID NO: 4978062 - DNA, 25 bp, Homo sapien
tcttttcgatagcatggcacctgaa

SEQ ID NO: 4978063 - DNA, 25 bp, Homo sapien
ttttcgatagcatggcacctgaatt

SEQ ID NO: 4978064 - DNA, 25 bp, Homo sapien
tcaacagtaagaccaatgaagaact

SEQ ID NO: 4978065 - DNA, 25 bp, Homo sapien
ctttatcaacagtaagaccaatgaa

SEQ ID NO: 4978066 - DNA, 25 bp, Homo sapien
cagtaagaccaatgaagaactcata

SEQ ID NO: 4978067 - DNA, 25 bp, Homo sapien
agaactcataaatgagaatactcac

SEQ ID NO: 4978068 - DNA, 25 bp, Homo sapien
tgacaagaatcctgtaggactgatc

SEQ ID NO: 4978069 - DNA, 25 bp, Homo sapien
actgatctatatattgagccacagg

SEQ ID NO: 4978070 - DNA, 25 bp, Homo sapien
tctatatattgagccacaggataat

SEQ ID NO: 4978071 - DNA, 25 bp, Homo sapien
gaatcctgtaggactgatctatata

SEQ ID NO: 4978072 - DNA, 25 bp, Homo sapien
aggaggaatgaccaatagcatcatt

SEQ ID NO: 4978073 - DNA, 25 bp, Homo sapien
catcatttttaattcgataaactac

SEQ ID NO: 4978074 - DNA, 25 bp, Homo sapien
ctacatgcttatatgtaggtgaaga

SEQ ID NO: 4978075 - DNA, 25 bp, Homo sapien
gatattatctaactgcagtaatcct

SEQ ID NO: 4978076 - DNA, 25 bp, Homo sapien
cagaacaggtgcgtagtgccacaac

SEQ ID NO: 4978077 - DNA, 25 bp, Homo sapien
caggtgcgtagtgccacaactgatt

SEQ ID NO: 4978078 - DNA, 25 bp, Homo sapien
gtccagaacaggtgcgtagtgccac

SEQ ID NO: 4978079 - DNA, 25 bp, Homo sapien
gcgtagtgccacaactgattttgga

SEQ ID NO: 4978080 - DNA, 25 bp, Homo sapien
tctgcatacaatgttcctgatttgt

SEQ ID NO: 4978081 - DNA, 25 bp, Homo sapien
gaagaatctgcatacaatgttcctg

SEQ ID NO: 4978082 - DNA, 25 bp, Homo sapien
catacaatgttcctgatttgttgta

SEQ ID NO: 4978083 - DNA, 25 bp, Homo sapien
aaaatgaagaatctgcatacaatgt

SEQ ID NO: 4978084 - DNA, 25 bp, Homo sapien
caggaagtgtatggtttcccctcaa

SEQ ID NO: 4978085 - DNA, 25 bp, Homo sapien
cctcaattttgatggaataagtggc

SEQ ID NO: 4978086 - DNA, 25 bp, Homo sapien
tatggtttcccctcaattttgatgg

SEQ ID NO: 4978087 - DNA, 25 bp, Homo sapien
tgtttttcaagcaggaagtgtatgg

SEQ ID NO: 4978088 - DNA, 25 bp, Homo sapien
gagaaggcaatactccatttggctg

SEQ ID NO: 4978089 - DNA, 25 bp, Homo sapien
gccattgacagcatgcaacgattta

SEQ ID NO: 4978090 - DNA, 25 bp, Homo sapien
gaagcaccacatctcctgtcacttg

SEQ ID NO: 4978091 - DNA, 25 bp, Homo sapien
ttaaggtgacttaggtcttccctgc

SEQ ID NO: 4978092 - DNA, 25 bp, Homo sapien
cataattttaaaaggtgatctctta

SEQ ID NO: 4978093 - DNA, 25 bp, Homo sapien
tctggatcttctgtggtactgtaat

SEQ ID NO: 4978094 - DNA, 25 bp, Homo sapien
caccatcattggtgtttgtctggat

SEQ ID NO: 4978095 - DNA, 25 bp, Homo sapien
taatttgcagaactggtgtttcaga

SEQ ID NO: 4978096 - DNA, 25 bp, Homo sapien
tggtgtttgtctggatcttctgtgg

SEQ ID NO: 4978097 - DNA, 25 bp, Homo sapien
cccaggcctgagaggatcagcaaga

SEQ ID NO: 4978098 - DNA, 25 bp, Homo sapien
gccggcccaggcctgagaggatcag

SEQ ID NO: 4978099 - DNA, 25 bp, Homo sapien
gtgggcccgcggaggtcagccggcc

SEQ ID NO: 4978100 - DNA, 25 bp, Homo sapien
tcagccggcccaggcctgagaggat

SEQ ID NO: 4978101 - DNA, 25 bp, Homo sapien
cagggatggccgttgtccttggaac

SEQ ID NO: 4978102 - DNA, 25 bp, Homo sapien
agctccgtggatcccgaggcgggtg

SEQ ID NO: 4978103 - DNA, 25 bp, Homo sapien
cagccacagggatggccgttgtcct

SEQ ID NO: 4978104 - DNA, 25 bp, Homo sapien
gacccagctccgtggatcccgaggc

SEQ ID NO: 4978105 - DNA, 25 bp, Homo sapien
cttcttctcatgtccttcaatcaga

SEQ ID NO: 4978106 - DNA, 25 bp, Homo sapien
gcgtgtcttcacctgaactccctac

SEQ ID NO: 4978107 - DNA, 25 bp, Homo sapien
tgaggattctggcacttggctactg

SEQ ID NO: 4978108 - DNA, 25 bp, Homo sapien
ttcaatcagaatctcaccatcctgc

SEQ ID NO: 4978109 - DNA, 25 bp, Homo sapien
tacacactggaacaactggtttatt

SEQ ID NO: 4978110 - DNA, 25 bp, Homo sapien
aggctacaatacacactggaacaac

SEQ ID NO: 4978111 - DNA, 25 bp, Homo sapien
tacaatacacactggaacaactggt

SEQ ID NO: 4978112 - DNA, 25 bp, Homo sapien
cacactggaacaactggtttattct

SEQ ID NO: 4978113 - DNA, 25 bp, Homo sapien
tgctctcttgctgatcctctcaggg

SEQ ID NO: 4978114 - DNA, 25 bp, Homo sapien
agccatcactgtggcgaggccgctg

SEQ ID NO: 4978115 - DNA, 25 bp, Homo sapien
gaggccgctggccacgcaatgctct

SEQ ID NO: 4978116 - DNA, 25 bp, Homo sapien
tgacctccgcgggtgattgcaagtg

SEQ ID NO: 4978117 - DNA, 25 bp, Homo sapien
tgactctgctcaagagggtgcattt

SEQ ID NO: 4978118 - DNA, 25 bp, Homo sapien
ctgactctgctcaagagggtgcatt

SEQ ID NO: 4978119 - DNA, 25 bp, Homo sapien
gactctgctcaagagggtgcatttc

SEQ ID NO: 4978120 - DNA, 25 bp, Homo sapien
gggtttgacacctacagcccatatt

SEQ ID NO: 4978121 - DNA, 25 bp, Homo sapien
gatggggtttgacacctacagccca

SEQ ID NO: 4978122 - DNA, 25 bp, Homo sapien
ttgacacctacagcccatatttcct

SEQ ID NO: 4978123 - DNA, 25 bp, Homo sapien
ctggatggggtttgacacctacagc

SEQ ID NO: 4978124 - DNA, 25 bp, Homo sapien
ggcttttaatcatagtaccacctca

SEQ ID NO: 4978125 - DNA, 25 bp, Homo sapien
tcacaatatgcaggtttgaatccca

SEQ ID NO: 4978126 - DNA, 25 bp, Homo sapien
tataccatgcccctactgacagaat

SEQ ID NO: 4978127 - DNA, 25 bp, Homo sapien
tgaatcccaggaaaccaggtaatgt

SEQ ID NO: 4978128 - DNA, 25 bp, Homo sapien
tatcatggcatctctgttgtccaga

SEQ ID NO: 4978129 - DNA, 25 bp, Homo sapien
agtgatatcatggcatctctgttgt

SEQ ID NO: 4978130 - DNA, 25 bp, Homo sapien
gatatcatggcatctctgttgtcca

SEQ ID NO: 4978131 - DNA, 25 bp, Homo sapien
tgatatcatggcatctctgttgtcc

SEQ ID NO: 4978132 - DNA, 25 bp, Homo sapien
ctaccctttaggttcactctcactt

SEQ ID NO: 4978133 - DNA, 25 bp, Homo sapien
cttgaatagtcctcagttctccatt

SEQ ID NO: 4978134 - DNA, 25 bp, Homo sapien
catctcattggtttggaatggtaaa

SEQ ID NO: 4978135 - DNA, 25 bp, Homo sapien
cattatagcaatcagtacacagaaa

SEQ ID NO: 4978136 - DNA, 25 bp, Homo sapien
aaaatggccatctcattggtttgga

SEQ ID NO: 4978137 - DNA, 25 bp, Homo sapien
ggtggaaaattgccactgtcaatac

SEQ ID NO: 4978138 - DNA, 25 bp, Homo sapien
caggccatagatctgattgaactga

SEQ ID NO: 4978139 - DNA, 25 bp, Homo sapien
gatctgattgaactgagcaatctgg

SEQ ID NO: 4978140 - DNA, 25 bp, Homo sapien
ggaggtaaatatgaagcactacagt

SEQ ID NO: 4978141 - DNA, 25 bp, Homo sapien
taaatatgaagcactacagtgacag

SEQ ID NO: 4978142 - DNA, 25 bp, Homo sapien
tatcattgcatttgtcagtagtaca

SEQ ID NO: 4978143 - DNA, 25 bp, Homo sapien
aacccaagtatgaagaactcacaca

SEQ ID NO: 4978144 - DNA, 25 bp, Homo sapien
ccaagtatgaagaactcacacatct

SEQ ID NO: 4978145 - DNA, 25 bp, Homo sapien
cccaagtatgaagaactcacacatc

SEQ ID NO: 4978146 - DNA, 25 bp, Homo sapien
ggctgtctgcatgatcactggcaaa

SEQ ID NO: 4978147 - DNA, 25 bp, Homo sapien
acaagaagttccatcttttatccac

SEQ ID NO: 4978148 - DNA, 25 bp, Homo sapien
tatccacatcttttggctgtctgca

SEQ ID NO: 4978149 - DNA, 25 bp, Homo sapien
caagaagttccatcttttatccaca

SEQ ID NO: 4978150 - DNA, 25 bp, Homo sapien
tatgttggcataaataatagtggct

SEQ ID NO: 4978151 - DNA, 25 bp, Homo sapien
tgttggcataaataatagtggctct

SEQ ID NO: 4978152 - DNA, 25 bp, Homo sapien
atgttggcataaataatagtggctc

SEQ ID NO: 4978153 - DNA, 25 bp, Homo sapien
ttggcataaataatagtggctcttg

SEQ ID NO: 4978154 - DNA, 25 bp, Homo sapien
tattaattttccgcactgcagattg

SEQ ID NO: 4978155 - DNA, 25 bp, Homo sapien
tacatattaattttccgcactgcag

SEQ ID NO: 4978156 - DNA, 25 bp, Homo sapien
ttacatattaattttccgcactgca

SEQ ID NO: 4978157 - DNA, 25 bp, Homo sapien
catattaattttccgcactgcagat

SEQ ID NO: 4978158 - DNA, 25 bp, Homo sapien
ctaagacagatttctgaaaacatac

SEQ ID NO: 4978159 - DNA, 25 bp, Homo sapien
cctgaatcacttataccacagtttc

SEQ ID NO: 4978160 - DNA, 25 bp, Homo sapien
tcacactgtgtgtatcctgaatcac

SEQ ID NO: 4978161 - DNA, 25 bp, Homo sapien
cagtttccagatacatcagtctttg

SEQ ID NO: 4978162 - DNA, 25 bp, Homo sapien
cacttataccacagtttccagatac

SEQ ID NO: 4978163 - DNA, 25 bp, Homo sapien
gccagcaggcttacagctaatgaag

SEQ ID NO: 4978164 - DNA, 25 bp, Homo sapien
tcatgacagatgaaagccagcaggc

SEQ ID NO: 4978165 - DNA, 25 bp, Homo sapien
ggtcggtgatgttttaacttgggca

SEQ ID NO: 4978166 - DNA, 25 bp, Homo sapien
ctggtgtagttctggttgatagaat

SEQ ID NO: 4978167 - DNA, 25 bp, Homo sapien
cagtctgaacatagtggttttctgg

SEQ ID NO: 4978168 - DNA, 25 bp, Homo sapien
tctgggcatgatgcagatgatccat

SEQ ID NO: 4978169 - DNA, 25 bp, Homo sapien
cagggaggtcgcattcttcaaagga

SEQ ID NO: 4978170 - DNA, 25 bp, Homo sapien
cattgattcagtccacacggatgcc

SEQ ID NO: 4978171 - DNA, 25 bp, Homo sapien
tcagcacagtttgaaccggctttaa

SEQ ID NO: 4978172 - DNA, 25 bp, Homo sapien
atgtttctccaataagggcacaatc

SEQ ID NO: 4978173 - DNA, 25 bp, Homo sapien
tttcgcagcatggtccttcagcaca

SEQ ID NO: 4978174 - DNA, 25 bp, Homo sapien
tttgaaccggctttaaatctacatg

SEQ ID NO: 4978175 - DNA, 25 bp, Homo sapien
gaaaatttagcttgatgaattaagg

SEQ ID NO: 4978176 - DNA, 25 bp, Homo sapien
ttgctgcaatttcagtgcgtagtct

SEQ ID NO: 4978177 - DNA, 25 bp, Homo sapien
ggcagtttctcactcgaattaataa

SEQ ID NO: 4978178 - DNA, 25 bp, Homo sapien
tgccctcctgaatcatttgcagaaa

SEQ ID NO: 4978179 - DNA, 25 bp, Homo sapien
gctttgcattaccacacactgcttg

SEQ ID NO: 4978180 - DNA, 25 bp, Homo sapien
tccagctttgcattaccacacactg

SEQ ID NO: 4978181 - DNA, 25 bp, Homo sapien
cttccagctttgcattaccacacac

SEQ ID NO: 4978182 - DNA, 25 bp, Homo sapien
cagctttgcattaccacacactgct

SEQ ID NO: 4978183 - DNA, 25 bp, Homo sapien
aaaaaaggatctaagcgaggctgat

SEQ ID NO: 4978184 - DNA, 25 bp, Homo sapien
ttgtgaagacactgggacttctgct

SEQ ID NO: 4978185 - DNA, 25 bp, Homo sapien
aaatgtgcaaagtcttcgaagctgc

SEQ ID NO: 4978186 - DNA, 25 bp, Homo sapien
tcgaagctgcagttactaaagatct

SEQ ID NO: 4978187 - DNA, 25 bp, Homo sapien
tggattcataatgcagacagctcct

SEQ ID NO: 4978188 - DNA, 25 bp, Homo sapien
gcaagtgattccagacttatggttc

SEQ ID NO: 4978189 - DNA, 25 bp, Homo sapien
cccatactaaggctcaataattgag

SEQ ID NO: 4978190 - DNA, 25 bp, Homo sapien
tgtcatcataagtgatccccatact

SEQ ID NO: 4978191 - DNA, 25 bp, Homo sapien
acaacacctcctgcatagtttgcat

SEQ ID NO: 4978192 - DNA, 25 bp, Homo sapien
aacaacacctcctgcatagtttgca

SEQ ID NO: 4978193 - DNA, 25 bp, Homo sapien
gcatagtttgcatcacacatcttcc

SEQ ID NO: 4978194 - DNA, 25 bp, Homo sapien
gcttctccagtggttgcaattttat

SEQ ID NO: 4978195 - DNA, 25 bp, Homo sapien
tgtaataactcattagcttctccag

SEQ ID NO: 4978196 - DNA, 25 bp, Homo sapien
tatccaaagctccaatgaagacaga

SEQ ID NO: 4978197 - DNA, 25 bp, Homo sapien
gtaaaaatgccacatcatgaggacg

SEQ ID NO: 4978198 - DNA, 25 bp, Homo sapien
agttgtatcagaccccatatgatta

SEQ ID NO: 4978199 - DNA, 25 bp, Homo sapien
ctttttgagcgacaacagttgtatc

SEQ ID NO: 4978200 - DNA, 25 bp, Homo sapien
agcattcgtcaatccaatcaactgg

SEQ ID NO: 4978201 - DNA, 25 bp, Homo sapien
tggaaaactttttgagcgacaacag

SEQ ID NO: 4978202 - DNA, 25 bp, Homo sapien
gtttttcaactataacatgcatttc

SEQ ID NO: 4978203 - DNA, 25 bp, Homo sapien
tttcaactataacatgcatttctat

SEQ ID NO: 4978204 - DNA, 25 bp, Homo sapien
caactataacatgcatttctatata

SEQ ID NO: 4978205 - DNA, 25 bp, Homo sapien
ttttcaactataacatgcatttcta

SEQ ID NO: 4978206 - DNA, 25 bp, Homo sapien
cccaactcatttcgtgaagtttgta

SEQ ID NO: 4978207 - DNA, 25 bp, Homo sapien
ttcccaactcatttcgtgaagtttg

SEQ ID NO: 4978208 - DNA, 25 bp, Homo sapien
ctcatttcgtgaagtttgtaacacc

SEQ ID NO: 4978209 - DNA, 25 bp, Homo sapien
caactcatttcgtgaagtttgtaac

SEQ ID NO: 4978210 - DNA, 25 bp, Homo sapien
caggggttctattccataactaaca

SEQ ID NO: 4978211 - DNA, 25 bp, Homo sapien
tctacgctttgtaatttaaaggaca

SEQ ID NO: 4978212 - DNA, 25 bp, Homo sapien
tctcttgattcaatatccttctcat

SEQ ID NO: 4978213 - DNA, 25 bp, Homo sapien
tctcattatataaggaaacatctgc

SEQ ID NO: 4978214 - DNA, 25 bp, Homo sapien
tgagtgacaccgcatagtaatgctg

SEQ ID NO: 4978215 - DNA, 25 bp, Homo sapien
aaatcataatcctgcataagggcag

SEQ ID NO: 4978216 - DNA, 25 bp, Homo sapien
gtaatgctgttagcatttgcctagc

SEQ ID NO: 4978217 - DNA, 25 bp, Homo sapien
tttgcctagctattaatatttcatg

SEQ ID NO: 4978218 - DNA, 25 bp, Homo sapien
accttcaatatacccttggtagtgg

SEQ ID NO: 4978219 - DNA, 25 bp, Homo sapien
cttcaatatacccttggtagtggca

SEQ ID NO: 4978220 - DNA, 25 bp, Homo sapien
tcaatatacccttggtagtggcaga

SEQ ID NO: 4978221 - DNA, 25 bp, Homo sapien
aaccttcaatatacccttggtagtg

SEQ ID NO: 4978222 - DNA, 25 bp, Homo sapien
tatttacttttgctttatagttcat

SEQ ID NO: 4978223 - DNA, 25 bp, Homo sapien
tgtatttacttttgctttatagttc

SEQ ID NO: 4978224 - DNA, 25 bp, Homo sapien
gtatttacttttgctttatagttca

SEQ ID NO: 4978225 - DNA, 25 bp, Homo sapien
ctggattttgtatttacttttgctt

SEQ ID NO: 4978226 - DNA, 25 bp, Homo sapien
taattatgatgactatctgtttgtc

SEQ ID NO: 4978227 - DNA, 25 bp, Homo sapien
cttttaattatgatgactatctgtt

SEQ ID NO: 4978228 - DNA, 25 bp, Homo sapien
ttgttgatgctttgaatgctttgta

SEQ ID NO: 4978229 - DNA, 25 bp, Homo sapien
cacattcagattgttgatgctttga

SEQ ID NO: 4978230 - DNA, 25 bp, Homo sapien
tgatgctttgaatgctttgtagcat

SEQ ID NO: 4978231 - DNA, 25 bp, Homo sapien
gttgatgctttgaatgctttgtagc

SEQ ID NO: 4978232 - DNA, 25 bp, Homo sapien
ttttaactgtacatttatctttcat

SEQ ID NO: 4978233 - DNA, 25 bp, Homo sapien
tttttaactgtacatttatctttca

SEQ ID NO: 4978234 - DNA, 25 bp, Homo sapien
taattcctgtgccactataactgta

SEQ ID NO: 4978235 - DNA, 25 bp, Homo sapien
ggtcaagtggtttcataattcctgt

SEQ ID NO: 4978236 - DNA, 25 bp, Homo sapien
cctgtgccactataactgtaaactc

SEQ ID NO: 4978237 - DNA, 25 bp, Homo sapien
ctgaaaatcttggtcaagtggtttc

SEQ ID NO: 4978238 - DNA, 25 bp, Homo sapien
aattcacagtatatggtttcccttc

SEQ ID NO: 4978239 - DNA, 25 bp, Homo sapien
tcccttcaattacaattttgtagga

SEQ ID NO: 4978240 - DNA, 25 bp, Homo sapien
cttcaattacaattttgtaggatgc

SEQ ID NO: 4978241 - DNA, 25 bp, Homo sapien
attcacagtatatggtttcccttca

SEQ ID NO: 4978242 - DNA, 25 bp, Homo sapien
tattattgaccgtattttctccgga

SEQ ID NO: 4978243 - DNA, 25 bp, Homo sapien
ccggaactgtaatttgcacaggtaa

SEQ ID NO: 4978244 - DNA, 25 bp, Homo sapien
ttttctccggaactgtaatttgcac

SEQ ID NO: 4978245 - DNA, 25 bp, Homo sapien
gtaatttgcacaggtaaactatcaa

SEQ ID NO: 4978246 - DNA, 25 bp, Homo sapien
ctgcaaaatgtgcaaaatgttttat

SEQ ID NO: 4978247 - DNA, 25 bp, Homo sapien
aaatgttttattagaacaatgccca

SEQ ID NO: 4978248 - DNA, 25 bp, Homo sapien
tgtgcaaaatgttttattagaacaa

SEQ ID NO: 4978249 - DNA, 25 bp, Homo sapien
caaaatgttttattagaacaatgcc

SEQ ID NO: 4978250 - DNA, 25 bp, Homo sapien
tgagcagaaacaagacgcgccacat

SEQ ID NO: 4978251 - DNA, 25 bp, Homo sapien
cgccgagcccgctgagcagaaacaa

SEQ ID NO: 4978252 - DNA, 25 bp, Homo sapien
tactgtccatccgcagcccgccgag

SEQ ID NO: 4978253 - DNA, 25 bp, Homo sapien
gcccgctgagcagaaacaagacgcg

SEQ ID NO: 4978254 - DNA, 25 bp, Homo sapien
ccagccggaataatggcagttggtg

SEQ ID NO: 4978255 - DNA, 25 bp, Homo sapien
cagttggtggttacagggcagttgg

SEQ ID NO: 4978256 - DNA, 25 bp, Homo sapien
gggtcccagccggaataatggcagt

SEQ ID NO: 4978257 - DNA, 25 bp, Homo sapien
agttggaagcgcgagatgacgcccc

SEQ ID NO: 4978258 - DNA, 25 bp, Homo sapien
tactcagattcgtggtcagctaata

SEQ ID NO: 4978259 - DNA, 25 bp, Homo sapien
ccagagataagagtttagggccttc

SEQ ID NO: 4978260 - DNA, 25 bp, Homo sapien
tgtggacagctctacacatccttgt

SEQ ID NO: 4978261 - DNA, 25 bp, Homo sapien
caggtatcttctgtgcgtgtggaca

SEQ ID NO: 4978262 - DNA, 25 bp, Homo sapien
cctagtcgctgtggtatgtgagccc

SEQ ID NO: 4978263 - DNA, 25 bp, Homo sapien
tattcatcatacttggtgggtctcg

SEQ ID NO: 4978264 - DNA, 25 bp, Homo sapien
tgggtctcgattcctcaccttgagg

SEQ ID NO: 4978265 - DNA, 25 bp, Homo sapien
tgaggctaccgcaacaaggtgactg

SEQ ID NO: 4978266 - DNA, 25 bp, Homo sapien
tatccacatgaacgtactctctctc

SEQ ID NO: 4978267 - DNA, 25 bp, Homo sapien
cacttgaccatgtgtatccacatga

SEQ ID NO: 4978268 - DNA, 25 bp, Homo sapien
ggacatgagtcacaaactggtttgg

SEQ ID NO: 4978269 - DNA, 25 bp, Homo sapien
ggtttttcgagaattcttgatgtga

SEQ ID NO: 4978270 - DNA, 25 bp, Homo sapien
gctacctcctccaagcagcaagtta

SEQ ID NO: 4978271 - DNA, 25 bp, Homo sapien
tccaagcatttgtgctagttgacat

SEQ ID NO: 4978272 - DNA, 25 bp, Homo sapien
gttccaagcatttgtgctagttgac

SEQ ID NO: 4978273 - DNA, 25 bp, Homo sapien
tagggctacctcctccaagcagcaa

SEQ ID NO: 4978274 - DNA, 25 bp, Homo sapien
acgtagatccacagttgtagaattc

SEQ ID NO: 4978275 - DNA, 25 bp, Homo sapien
aacatgacgtagatccacagttgta

SEQ ID NO: 4978276 - DNA, 25 bp, Homo sapien
catgacgtagatccacagttgtaga

SEQ ID NO: 4978277 - DNA, 25 bp, Homo sapien
ctaaacatgacgtagatccacagtt

SEQ ID NO: 4978278 - DNA, 25 bp, Homo sapien
actatagatagttacttgaacatgt

SEQ ID NO: 4978279 - DNA, 25 bp, Homo sapien
ttggtttctcactatagatagttac

SEQ ID NO: 4978280 - DNA, 25 bp, Homo sapien
ttcagtatctcttttagatgaaact

SEQ ID NO: 4978281 - DNA, 25 bp, Homo sapien
tcagtatctcttttagatgaaactc

SEQ ID NO: 4978282 - DNA, 25 bp, Homo sapien
atagtatagtcgtttgccagagctg

SEQ ID NO: 4978283 - DNA, 25 bp, Homo sapien
gacagggtgctgatgcttacttatc

SEQ ID NO: 4978284 - DNA, 25 bp, Homo sapien
gaagtcagatttaatagtatagtcg

SEQ ID NO: 4978285 - DNA, 25 bp, Homo sapien
gcttacttatcttcaagattgtgaa

SEQ ID NO: 4978286 - DNA, 25 bp, Homo sapien
caagctcatgtggacaaggtattct

SEQ ID NO: 4978287 - DNA, 25 bp, Homo sapien
ctcatgtggacaaggtattcttctc

SEQ ID NO: 4978288 - DNA, 25 bp, Homo sapien
tcaagctcatgtggacaaggtattc

SEQ ID NO: 4978289 - DNA, 25 bp, Homo sapien
gcttcaagctcatgtggacaaggta

SEQ ID NO: 4978290 - DNA, 25 bp, Homo sapien
tctgtgtctagagctggggagtggg

SEQ ID NO: 4978291 - DNA, 25 bp, Homo sapien
tcagtctgtgtctagagctggggag

SEQ ID NO: 4978292 - DNA, 25 bp, Homo sapien
agtctgtgtctagagctggggagtg

SEQ ID NO: 4978293 - DNA, 25 bp, Homo sapien
cagtctgtgtctagagctggggagt

SEQ ID NO: 4978294 - DNA, 25 bp, Homo sapien
atggcaacagggctataggcatgga

SEQ ID NO: 4978295 - DNA, 25 bp, Homo sapien
tccccattatggcaacagggctata

SEQ ID NO: 4978296 - DNA, 25 bp, Homo sapien
gtgtcttccccattatggcaacagg

SEQ ID NO: 4978297 - DNA, 25 bp, Homo sapien
tgtgaaaagccccaggcagcgtcag

SEQ ID NO: 4978298 - DNA, 25 bp, Homo sapien
cgatagcaagcaggccacagtgttt

SEQ ID NO: 4978299 - DNA, 25 bp, Homo sapien
gaaataagtccgctcagtcctggga

SEQ ID NO: 4978300 - DNA, 25 bp, Homo sapien
tacaacattccagccaagcagtggc

SEQ ID NO: 4978301 - DNA, 25 bp, Homo sapien
gttgccatgcaagactcctaggaaa

SEQ ID NO: 4978302 - DNA, 25 bp, Homo sapien
ggcggttaggttcttcctgagcaaa

SEQ ID NO: 4978303 - DNA, 25 bp, Homo sapien
tgggcggttaggttcttcctgagca

SEQ ID NO: 4978304 - DNA, 25 bp, Homo sapien
ttcctgagcaaagtcgtgtggacca

SEQ ID NO: 4978305 - DNA, 25 bp, Homo sapien
aaagtcgtgtggaccacctcctata

SEQ ID NO: 4978306 - DNA, 25 bp, Homo sapien
cttccacccaaaggtcccttcacat

SEQ ID NO: 4978307 - DNA, 25 bp, Homo sapien
ggtgtgtgtgcgggctctttgtacc

SEQ ID NO: 4978308 - DNA, 25 bp, Homo sapien
tgggtctggggataaatgggtgtgt

SEQ ID NO: 4978309 - DNA, 25 bp, Homo sapien
aatataacccattgccttccaccca

SEQ ID NO: 4978310 - DNA, 25 bp, Homo sapien
tcctctgacggcatttggactttca

SEQ ID NO: 4978311 - DNA, 25 bp, Homo sapien
gactttcatgaacagatgcccctgc

SEQ ID NO: 4978312 - DNA, 25 bp, Homo sapien
catccctcctctgacggcatttgga

SEQ ID NO: 4978313 - DNA, 25 bp, Homo sapien
gacggcatttggactttcatgaaca

SEQ ID NO: 4978314 - DNA, 25 bp, Homo sapien
cctggtcctgagcttcctcaccatg

SEQ ID NO: 4978315 - DNA, 25 bp, Homo sapien
ccacctggtcctgagcttcctcacc

SEQ ID NO: 4978316 - DNA, 25 bp, Homo sapien
tgagcttcctcaccatgggttatgt

SEQ ID NO: 4978317 - DNA, 25 bp, Homo sapien
tcctgagcttcctcaccatgggtta

SEQ ID NO: 4978318 - DNA, 25 bp, Homo sapien
tccctgcttggtgctaccctgtttt

SEQ ID NO: 4978319 - DNA, 25 bp, Homo sapien
gagtaacgtgctccctgcttggtgc

SEQ ID NO: 4978320 - DNA, 25 bp, Homo sapien
cctgcttggtgctaccctgttttcc

SEQ ID NO: 4978321 - DNA, 25 bp, Homo sapien
ctgcgcctggagtaacgtgctccct

SEQ ID NO: 4978322 - DNA, 25 bp, Homo sapien
agtgcagaagcacgtgtcatacagc

SEQ ID NO: 4978323 - DNA, 25 bp, Homo sapien
cagtcttcggaaattcccagtgcag

SEQ ID NO: 4978324 - DNA, 25 bp, Homo sapien
ccagtgcagaagcacgtgtcataca

SEQ ID NO: 4978325 - DNA, 25 bp, Homo sapien
tccagggcagtcttcggaaattccc

SEQ ID NO: 4978326 - DNA, 25 bp, Homo sapien
gttgctcaatttattggccttgggc

SEQ ID NO: 4978327 - DNA, 25 bp, Homo sapien
gctcaatttattggccttgggcttc

SEQ ID NO: 4978328 - DNA, 25 bp, Homo sapien
gggttgctcaatttattggccttgg

SEQ ID NO: 4978329 - DNA, 25 bp, Homo sapien
tttttgggttgctcaatttattggc

SEQ ID NO: 4978330 - DNA, 25 bp, Homo sapien
tccacgtggtacctagatttgcaaa

SEQ ID NO: 4978331 - DNA, 25 bp, Homo sapien
tatgggaacggatgagactttccac

SEQ ID NO: 4978332 - DNA, 25 bp, Homo sapien
tacctgatcactgcttaacggcatg

SEQ ID NO: 4978333 - DNA, 25 bp, Homo sapien
ccctgaatgtgttgagttggtggca

SEQ ID NO: 4978334 - DNA, 25 bp, Homo sapien
gtataatggtcgaggtaaagcttcc

SEQ ID NO: 4978335 - DNA, 25 bp, Homo sapien
taaagcttccactacagaagagaac

SEQ ID NO: 4978336 - DNA, 25 bp, Homo sapien
ctagttcatatgtaaggtatgattt

SEQ ID NO: 4978337 - DNA, 25 bp, Homo sapien
ttttcagcttgatgtataatggtcg

SEQ ID NO: 4978338 - DNA, 25 bp, Homo sapien
gtgtttttgcgaaaagtcaagctca

SEQ ID NO: 4978339 - DNA, 25 bp, Homo sapien
tgaatggttgtactgtgatgatgct

SEQ ID NO: 4978340 - DNA, 25 bp, Homo sapien
agtcaagctcatatatattgttaaa

SEQ ID NO: 4978341 - DNA, 25 bp, Homo sapien
tattgttaaagagtaggccctgagt

SEQ ID NO: 4978342 - DNA, 25 bp, Homo sapien
agtgtgtgctctcccaccctgtgag

SEQ ID NO: 4978343 - DNA, 25 bp, Homo sapien
tgtgtgctctcccaccctgtgagtt

SEQ ID NO: 4978344 - DNA, 25 bp, Homo sapien
taggaagtgtgtgctctcccaccct

SEQ ID NO: 4978345 - DNA, 25 bp, Homo sapien
ggaagtgtgtgctctcccaccctgt

SEQ ID NO: 4978346 - DNA, 25 bp, Homo sapien
ttgaaaccttcatcccatgatcacc

SEQ ID NO: 4978347 - DNA, 25 bp, Homo sapien
agctccactgaacgagccctcactg

SEQ ID NO: 4978348 - DNA, 25 bp, Homo sapien
accagctccactgaacgagccctca

SEQ ID NO: 4978349 - DNA, 25 bp, Homo sapien
cactgaacgagccctcactgtacat

SEQ ID NO: 4978350 - DNA, 25 bp, Homo sapien
gaaaattgacttggctaccctcata

SEQ ID NO: 4978351 - DNA, 25 bp, Homo sapien
tcctcttagagaaaattgacttggc

SEQ ID NO: 4978352 - DNA, 25 bp, Homo sapien
cctccaggacttgttcaggaaattt

SEQ ID NO: 4978353 - DNA, 25 bp, Homo sapien
tcatattctgcttaagtctctggat

SEQ ID NO: 4978354 - DNA, 25 bp, Homo sapien
gggtagtaattatgttctaggacca

SEQ ID NO: 4978355 - DNA, 25 bp, Homo sapien
ggaccatcctaacaacatgatgcca

SEQ ID NO: 4978356 - DNA, 25 bp, Homo sapien
tctcttccaataattgtatctcccc

SEQ ID NO: 4978357 - DNA, 25 bp, Homo sapien
tccaataattgtatctcccctttgt

SEQ ID NO: 4978358 - DNA, 25 bp, Homo sapien
tataacatcagcaccataatagcta

SEQ ID NO: 4978359 - DNA, 25 bp, Homo sapien
ttaggacaaatcctagagttaggag

SEQ ID NO: 4978360 - DNA, 25 bp, Homo sapien
gagaacactactggtaacatctacc

SEQ ID NO: 4978361 - DNA, 25 bp, Homo sapien
gcaccataatagctatgatttagga

SEQ ID NO: 4978362 - DNA, 25 bp, Homo sapien
tttcctcccagtggaatgtgttctt

SEQ ID NO: 4978363 - DNA, 25 bp, Homo sapien
tcctcccagtggaatgtgttctttg

SEQ ID NO: 4978364 - DNA, 25 bp, Homo sapien
ccagtggaatgtgttctttgtcaga

SEQ ID NO: 4978365 - DNA, 25 bp, Homo sapien
ttgtcagattctagcctcaggcctt

SEQ ID NO: 4978366 - DNA, 25 bp, Homo sapien
caccccattaaattcagctgctcca

SEQ ID NO: 4978367 - DNA, 25 bp, Homo sapien
accccattaaattcagctgctccat

SEQ ID NO: 4978368 - DNA, 25 bp, Homo sapien
tgctccatccaagggggcttattct

SEQ ID NO: 4978369 - DNA, 25 bp, Homo sapien
tcagctgctccatccaagggggctt

SEQ ID NO: 4978370 - DNA, 25 bp, Homo sapien
aaaggcaaccaattacgttgctcat

SEQ ID NO: 4978371 - DNA, 25 bp, Homo sapien
tcctaagggcaaggaagctgacatt

SEQ ID NO: 4978372 - DNA, 25 bp, Homo sapien
gaatgtatgtagtgctgctggccag

SEQ ID NO: 4978373 - DNA, 25 bp, Homo sapien
gatagtgttgttccgtcctcctaag

SEQ ID NO: 4978374 - DNA, 25 bp, Homo sapien
caatacctgtagtgccgtttggtca

SEQ ID NO: 4978375 - DNA, 25 bp, Homo sapien
ccacgtataagataaggagaagcta

SEQ ID NO: 4978376 - DNA, 25 bp, Homo sapien
gcaaaactctagcttagagtgttca

SEQ ID NO: 4978377 - DNA, 25 bp, Homo sapien
tcaggggaggagtcatgcttctttt

SEQ ID NO: 4978378 - DNA, 25 bp, Homo sapien
ggagaagctaaagactggtgtgcaa

SEQ ID NO: 4978379 - DNA, 25 bp, Homo sapien
tgctcatggtacagcctctggctgg

SEQ ID NO: 4978380 - DNA, 25 bp, Homo sapien
ggagccaggacagccgattccgttt

SEQ ID NO: 4978381 - DNA, 25 bp, Homo sapien
gatgatctgcagcacgctctgtgaa

SEQ ID NO: 4978382 - DNA, 25 bp, Homo sapien
gaatgtccgggaactcggtgttctg

SEQ ID NO: 4978383 - DNA, 25 bp, Homo sapien
tagaaaaacagaatgttggtaatga

SEQ ID NO: 4978384 - DNA, 25 bp, Homo sapien
agaaaaacagaatgttggtaatgag

SEQ ID NO: 4978385 - DNA, 25 bp, Homo sapien
ttagaaaaacagaatgttggtaatg

SEQ ID NO: 4978386 - DNA, 25 bp, Homo sapien
tttgccattgtcctcttctcactac

SEQ ID NO: 4978387 - DNA, 25 bp, Homo sapien
ccactagtgtcctttgccattgtcc

SEQ ID NO: 4978388 - DNA, 25 bp, Homo sapien
agtgtcctttgccattgtcctcttc

SEQ ID NO: 4978389 - DNA, 25 bp, Homo sapien
gtcctttgccattgtcctcttctca

SEQ ID NO: 4978390 - DNA, 25 bp, Homo sapien
cttggtcctccagcttccttttcat

SEQ ID NO: 4978391 - DNA, 25 bp, Homo sapien
gaccctttgaagctcacatttagca

SEQ ID NO: 4978392 - DNA, 25 bp, Homo sapien
gaccaggcgtaagatccacaaagag

SEQ ID NO: 4978393 - DNA, 25 bp, Homo sapien
aaaggactagaaagcggaccaggcg

SEQ ID NO: 4978394 - DNA, 25 bp, Homo sapien
aggaccctttgaagctcacatttag

SEQ ID NO: 4978395 - DNA, 25 bp, Homo sapien
gagaaaacgcgtgccctgatggcct

SEQ ID NO: 4978396 - DNA, 25 bp, Homo sapien
tcaggccctaggacttaaatcgaag

SEQ ID NO: 4978397 - DNA, 25 bp, Homo sapien
aaatgagtactcacagccttgcgcc

SEQ ID NO: 4978398 - DNA, 25 bp, Homo sapien
gagttgcccctgatatggatgtcca

SEQ ID NO: 4978399 - DNA, 25 bp, Homo sapien
tcaggtacccatggcagtgccaaag

SEQ ID NO: 4978400 - DNA, 25 bp, Homo sapien
ctctcgttaacctcactttgtggaa

SEQ ID NO: 4978401 - DNA, 25 bp, Homo sapien
gaaaaatcataactgccgtaaacca

SEQ ID NO: 4978402 - DNA, 25 bp, Homo sapien
tgaatatctgagcttgttcctctcg

SEQ ID NO: 4978403 - DNA, 25 bp, Homo sapien
atggaagcacatggctcccgcgggc

SEQ ID NO: 4978404 - DNA, 25 bp, Homo sapien
gaccttgacaatagactccaccttg

SEQ ID NO: 4978405 - DNA, 25 bp, Homo sapien
agacatgagctgagggagacagact

SEQ ID NO: 4978406 - DNA, 25 bp, Homo sapien
ttttgttaccaggaggaccttgaca

SEQ ID NO: 4978407 - DNA, 25 bp, Homo sapien
tacccagtgcgtctcaaattttaaa

SEQ ID NO: 4978408 - DNA, 25 bp, Homo sapien
tgttctacccagtgcgtctcaaatt

SEQ ID NO: 4978409 - DNA, 25 bp, Homo sapien
ctgtgttctacccagtgcgtctcaa

SEQ ID NO: 4978410 - DNA, 25 bp, Homo sapien
aacaggccccgacttttcatcctct

SEQ ID NO: 4978411 - DNA, 25 bp, Homo sapien
tctgacttggtctgggaagtgtgcc

SEQ ID NO: 4978412 - DNA, 25 bp, Homo sapien
tctgggaagtgtgccctgaggcctg

SEQ ID NO: 4978413 - DNA, 25 bp, Homo sapien
tgacttggtctgggaagtgtgccct

SEQ ID NO: 4978414 - DNA, 25 bp, Homo sapien
acttggtctgggaagtgtgccctga

SEQ ID NO: 4978415 - DNA, 25 bp, Homo sapien
ctaagaatatcttcttacatggcag

SEQ ID NO: 4978416 - DNA, 25 bp, Homo sapien
cactaagaatatcttcttacatggc

SEQ ID NO: 4978417 - DNA, 25 bp, Homo sapien
ttcactaagaatatcttcttacatg

SEQ ID NO: 4978418 - DNA, 25 bp, Homo sapien
tttttcactaagaatatcttcttac

SEQ ID NO: 4978419 - DNA, 25 bp, Homo sapien
tcatcttcaaagggcggggcaatta

SEQ ID NO: 4978420 - DNA, 25 bp, Homo sapien
acttggtaccaaaatagctctgttt

SEQ ID NO: 4978421 - DNA, 25 bp, Homo sapien
caaagggcggggcaattataatgaa

SEQ ID NO: 4978422 - DNA, 25 bp, Homo sapien
tgcaaacataaacgctttttccttg

SEQ ID NO: 4978423 - DNA, 25 bp, Homo sapien
tgagatgcacctctcttaaaagccc

SEQ ID NO: 4978424 - DNA, 25 bp, Homo sapien
gccttaagcaatcctagcaacttgg

SEQ ID NO: 4978425 - DNA, 25 bp, Homo sapien
ccaggtcttatgtggttcagtctca

SEQ ID NO: 4978426 - DNA, 25 bp, Homo sapien
tcagtctcagagctgtggaacagtc

SEQ ID NO: 4978427 - DNA, 25 bp, Homo sapien
taaaggcagctttactcacagtcac

SEQ ID NO: 4978428 - DNA, 25 bp, Homo sapien
tgtcaatcaccacaaccaaggagca

SEQ ID NO: 4978429 - DNA, 25 bp, Homo sapien
ccattgcttggtgggtaactgtcaa

SEQ ID NO: 4978430 - DNA, 25 bp, Homo sapien
cacagtggctgatcatgctcctaca

SEQ ID NO: 4978431 - DNA, 25 bp, Homo sapien
gcagaagttgactgttcttcggaag

SEQ ID NO: 4978432 - DNA, 25 bp, Homo sapien
tcaatgaggacagatcgtctgagtc

SEQ ID NO: 4978433 - DNA, 25 bp, Homo sapien
aggacatccggaagggcggtcacca

SEQ ID NO: 4978434 - DNA, 25 bp, Homo sapien
ggacagatcgtctgagtcagtttgg

SEQ ID NO: 4978435 - DNA, 25 bp, Homo sapien
cttcttccttgtagcctggccacaa

SEQ ID NO: 4978436 - DNA, 25 bp, Homo sapien
gccacaagcagtatgatcacctcca

SEQ ID NO: 4978437 - DNA, 25 bp, Homo sapien
agcagtatgatcacctccactcaca

SEQ ID NO: 4978438 - DNA, 25 bp, Homo sapien
ctggccacaagcagtatgatcacct

SEQ ID NO: 4978439 - DNA, 25 bp, Homo sapien
tttctgacataatccaatgtaaaat

SEQ ID NO: 4978440 - DNA, 25 bp, Homo sapien
gacataatccaatgtaaaatcgaag

SEQ ID NO: 4978441 - DNA, 25 bp, Homo sapien
cataatccaatgtaaaatcgaagag

SEQ ID NO: 4978442 - DNA, 25 bp, Homo sapien
aatccaatgtaaaatcgaagagctg

SEQ ID NO: 4978443 - DNA, 25 bp, Homo sapien
tagagtttgatggacagttgaagcc

SEQ ID NO: 4978444 - DNA, 25 bp, Homo sapien
tgtgttcactcgattatgccaaggt

SEQ ID NO: 4978445 - DNA, 25 bp, Homo sapien
catttagggagaaaccagtagcagt

SEQ ID NO: 4978446 - DNA, 25 bp, Homo sapien
catttgacaacccacgggatccttg

SEQ ID NO: 4978447 - DNA, 25 bp, Homo sapien
atcaaaagcattgtccgggccactg

SEQ ID NO: 4978448 - DNA, 25 bp, Homo sapien
tctattattgtcatgttggggctct

SEQ ID NO: 4978449 - DNA, 25 bp, Homo sapien
cattgtcacttctctattattgtca

SEQ ID NO: 4978450 - DNA, 25 bp, Homo sapien
ttcattgtcacttctctattattgt

SEQ ID NO: 4978451 - DNA, 25 bp, Homo sapien
tattattgtcatgttggggctctac

SEQ ID NO: 4978452 - DNA, 25 bp, Homo sapien
gaaccagcaggctcttatcctccat

SEQ ID NO: 4978453 - DNA, 25 bp, Homo sapien
aagggtgacccttaggcccaatgct

SEQ ID NO: 4978454 - DNA, 25 bp, Homo sapien
ccagagataactcttgggacagcag

SEQ ID NO: 4978455 - DNA, 25 bp, Homo sapien
caagagttcaatattacccctaagg

SEQ ID NO: 4978456 - DNA, 25 bp, Homo sapien
taggtacagaattagctgcagtggg

SEQ ID NO: 4978457 - DNA, 25 bp, Homo sapien
attgtcctcacggtctttagcccca

SEQ ID NO: 4978458 - DNA, 25 bp, Homo sapien
gacagagcgattgtcctcacggtct

SEQ ID NO: 4978459 - DNA, 25 bp, Homo sapien
ctacttctgtgatgaatacgcagaa

SEQ ID NO: 4978460 - DNA, 25 bp, Homo sapien
tacgcagaaaggacagagcgattgt

SEQ ID NO: 4978461 - DNA, 25 bp, Homo sapien
agagatcctcccactgtgttggaat

SEQ ID NO: 4978462 - DNA, 25 bp, Homo sapien
ggtcttgcactcttggcatcaagag

SEQ ID NO: 4978463 - DNA, 25 bp, Homo sapien
ttgcactcttggcatcaagagatcc

SEQ ID NO: 4978464 - DNA, 25 bp, Homo sapien
gagatcctcccactgtgttggaatt

SEQ ID NO: 4978465 - DNA, 25 bp, Homo sapien
gcggcatatgcagggttccaaaaca

SEQ ID NO: 4978466 - DNA, 25 bp, Homo sapien
agttggcggcatatgcagggttcca

SEQ ID NO: 4978467 - DNA, 25 bp, Homo sapien
ttggcggcatatgcagggttccaaa

SEQ ID NO: 4978468 - DNA, 25 bp, Homo sapien
aggagttggcggcatatgcagggtt

SEQ ID NO: 4978469 - DNA, 25 bp, Homo sapien
aggcccttcagatcatcgctgtctt

SEQ ID NO: 4978470 - DNA, 25 bp, Homo sapien
tcaggcccttcagatcatcgctgtc

SEQ ID NO: 4978471 - DNA, 25 bp, Homo sapien
aattcaggcccttcagatcatcgct

SEQ ID NO: 4978472 - DNA, 25 bp, Homo sapien
ttcaggcccttcagatcatcgctgt

SEQ ID NO: 4978473 - DNA, 25 bp, Homo sapien
tctttaggtctacgtttatcagctg

SEQ ID NO: 4978474 - DNA, 25 bp, Homo sapien
taggtctacgtttatcagctgcagt

SEQ ID NO: 4978475 - DNA, 25 bp, Homo sapien
tggttggtcaaagattgatcttgct

SEQ ID NO: 4978476 - DNA, 25 bp, Homo sapien
aactctttaggtctacgtttatcag

SEQ ID NO: 4978477 - DNA, 25 bp, Homo sapien
ggtcaaataggtttgtattgtatct

SEQ ID NO: 4978478 - DNA, 25 bp, Homo sapien
aataggtttgtattgtatctgctag

SEQ ID NO: 4978479 - DNA, 25 bp, Homo sapien
gtattgtatctgctagatgattaag

SEQ ID NO: 4978480 - DNA, 25 bp, Homo sapien
tgtattgtatctgctagatgattaa

SEQ ID NO: 4978481 - DNA, 25 bp, Homo sapien
tatgtgctttttgtcacggagagca

SEQ ID NO: 4978482 - DNA, 25 bp, Homo sapien
agagcaacaactatctaggcccagg

SEQ ID NO: 4978483 - DNA, 25 bp, Homo sapien
ttttatagtagcaggtcagagtaga

SEQ ID NO: 4978484 - DNA, 25 bp, Homo sapien
ttatagtccaaaaacgtatgtcact

SEQ ID NO: 4978485 - DNA, 25 bp, Homo sapien
ttcagcatccgtcagcgtggggagt

SEQ ID NO: 4978486 - DNA, 25 bp, Homo sapien
ggaatgtgctcttcagcatccgtca

SEQ ID NO: 4978487 - DNA, 25 bp, Homo sapien
cccaacaccggaatgtgctcttcag

SEQ ID NO: 4978488 - DNA, 25 bp, Homo sapien
gtggggagtgccagatccgcagcag

SEQ ID NO: 4978489 - DNA, 25 bp, Homo sapien
gtgaggaccttgtcagacctggctt

SEQ ID NO: 4978490 - DNA, 25 bp, Homo sapien
gaggaccttgtcagacctggcttca

SEQ ID NO: 4978491 - DNA, 25 bp, Homo sapien
ctgaaggattgcaggcaatatgggt

SEQ ID NO: 4978492 - DNA, 25 bp, Homo sapien
tgcaggcaatatgggtgaggacctt

SEQ ID NO: 4978493 - DNA, 25 bp, Homo sapien
tggctgaaatggtgtcgcaactcca

SEQ ID NO: 4978494 - DNA, 25 bp, Homo sapien
tccatttgactggaatgcgacacca

SEQ ID NO: 4978495 - DNA, 25 bp, Homo sapien
tgcagaggatcactagcagccagtt

SEQ ID NO: 4978496 - DNA, 25 bp, Homo sapien
gaaaatccagatcaatcgctgtggc

SEQ ID NO: 4978497 - DNA, 25 bp, Homo sapien
cttaaaagcgtcatcaggaaagacc

SEQ ID NO: 4978498 - DNA, 25 bp, Homo sapien
ctttctcttaaaagcgtcatcagga

SEQ ID NO: 4978499 - DNA, 25 bp, Homo sapien
tcttaaaagcgtcatcaggaaagac

SEQ ID NO: 4978500 - DNA, 25 bp, Homo sapien
tctcttaaaagcgtcatcaggaaag

SEQ ID NO: 4978501 - DNA, 25 bp, Homo sapien
ggtttcagtcaccactctgtacctc

SEQ ID NO: 4978502 - DNA, 25 bp, Homo sapien
tcatccctaagtgccaactctctag

SEQ ID NO: 4978503 - DNA, 25 bp, Homo sapien
tgtttggaagtctcccaacatggcg

SEQ ID NO: 4978504 - DNA, 25 bp, Homo sapien
gccaactctctagacttgtttggaa

SEQ ID NO: 4978505 - DNA, 25 bp, Homo sapien
cacattccaatcgtactctgttttg

SEQ ID NO: 4978506 - DNA, 25 bp, Homo sapien
aagccagtcccacattccaatcgta

SEQ ID NO: 4978507 - DNA, 25 bp, Homo sapien
ttttccatagcttctaagcgggatg

SEQ ID NO: 4978508 - DNA, 25 bp, Homo sapien
tctaagcgggatgccaaatctgtaa

SEQ ID NO: 4978509 - DNA, 25 bp, Homo sapien
ctgttccagagagcccccgatatga

SEQ ID NO: 4978510 - DNA, 25 bp, Homo sapien
gagagcccccgatatgatcagagaa

SEQ ID NO: 4978511 - DNA, 25 bp, Homo sapien
gctactctcaccctgagaagatcct

SEQ ID NO: 4978512 - DNA, 25 bp, Homo sapien
actctcaccctgagaagatcctcag

SEQ ID NO: 4978513 - DNA, 25 bp, Homo sapien
tttacccatactggcccagctacag

SEQ ID NO: 4978514 - DNA, 25 bp, Homo sapien
ttgcaacttttacccatactggccc

SEQ ID NO: 4978515 - DNA, 25 bp, Homo sapien
tgttttgcaacttttacccatactg

SEQ ID NO: 4978516 - DNA, 25 bp, Homo sapien
acttttacccatactggcccagcta

SEQ ID NO: 4978517 - DNA, 25 bp, Homo sapien
tgctcaaatcaacctgactgaggtg

SEQ ID NO: 4978518 - DNA, 25 bp, Homo sapien
tgttgctgtgcggatgtgcactgaa

SEQ ID NO: 4978519 - DNA, 25 bp, Homo sapien
cgggcaataactgcatgggccctct

SEQ ID NO: 4978520 - DNA, 25 bp, Homo sapien
aagcccctgattgtgagtacgatcg

SEQ ID NO: 4978521 - DNA, 25 bp, Homo sapien
tcttcagaaagccagcaatcccagg

SEQ ID NO: 4978522 - DNA, 25 bp, Homo sapien
gatggaggtggtcctaagctctcct

SEQ ID NO: 4978523 - DNA, 25 bp, Homo sapien
cacagcaatggcaggtagattgtgc

SEQ ID NO: 4978524 - DNA, 25 bp, Homo sapien
cctggaaaactgtaactctgcagag

SEQ ID NO: 4978525 - DNA, 25 bp, Homo sapien
gccctagccccagatgaaggttcat

SEQ ID NO: 4978526 - DNA, 25 bp, Homo sapien
agccctagccccagatgaaggttca

SEQ ID NO: 4978527 - DNA, 25 bp, Homo sapien
ccctagccccagatgaaggttcatt

SEQ ID NO: 4978528 - DNA, 25 bp, Homo sapien
ctcatgtgtcagcaacatgtgtacc

SEQ ID NO: 4978529 - DNA, 25 bp, Homo sapien
tgtgtacccctgcatccaatataga

SEQ ID NO: 4978530 - DNA, 25 bp, Homo sapien
tgcatccaatatagaaattccaggg

SEQ ID NO: 4978531 - DNA, 25 bp, Homo sapien
gcaacatgtgtacccctgcatccaa

SEQ ID NO: 4978532 - DNA, 25 bp, Homo sapien
gtaaatcccttctatcctgccaaca

SEQ ID NO: 4978533 - DNA, 25 bp, Homo sapien
tagacagcccccgatttgattcttt

SEQ ID NO: 4978534 - DNA, 25 bp, Homo sapien
ctgctgttcgctgggtgcccaccat

SEQ ID NO: 4978535 - DNA, 25 bp, Homo sapien
ttccgttggagcttttgaatgtgtc

SEQ ID NO: 4978536 - DNA, 25 bp, Homo sapien
caagatcaaggtgtattccaattac

SEQ ID NO: 4978537 - DNA, 25 bp, Homo sapien
taggatcgtcttcaaggtcaaagtc

SEQ ID NO: 4978538 - DNA, 25 bp, Homo sapien
tcaatcagactatgtgggcagaggt

SEQ ID NO: 4978539 - DNA, 25 bp, Homo sapien
gcagaggtgaaggtacatgagcccc

SEQ ID NO: 4978540 - DNA, 25 bp, Homo sapien
tcttggaatgaatggtcacctcccc

SEQ ID NO: 4978541 - DNA, 25 bp, Homo sapien
tttcttggaatgaatggtcacctcc

SEQ ID NO: 4978542 - DNA, 25 bp, Homo sapien
cttggaatgaatggtcacctcccct

SEQ ID NO: 4978543 - DNA, 25 bp, Homo sapien
ttcttggaatgaatggtcacctccc

SEQ ID NO: 4978544 - DNA, 25 bp, Homo sapien
tttaatcggtaaggctgcagtacag

SEQ ID NO: 4978545 - DNA, 25 bp, Homo sapien
cagtgtgaagtctggacggtggaaa

SEQ ID NO: 4978546 - DNA, 25 bp, Homo sapien
agatggagtttgtgtttgtgctgca

SEQ ID NO: 4978547 - DNA, 25 bp, Homo sapien
caagcagcatagatgtttaatcggt

SEQ ID NO: 4978548 - DNA, 25 bp, Homo sapien
gactgctccagtggcatggttcttt

SEQ ID NO: 4978549 - DNA, 25 bp, Homo sapien
ggtcatgtcaacaaaggcctctttg

SEQ ID NO: 4978550 - DNA, 25 bp, Homo sapien
tcaatcaatccaagagaactgcctc

SEQ ID NO: 4978551 - DNA, 25 bp, Homo sapien
tctttgatgctctgtgaaaaggtca

SEQ ID NO: 4978552 - DNA, 25 bp, Homo sapien
ccaagattggggattcgatggtgct

SEQ ID NO: 4978553 - DNA, 25 bp, Homo sapien
tgaagagaatgaccgacatccaaga

SEQ ID NO: 4978554 - DNA, 25 bp, Homo sapien
tttctttgagagagactggtgctca

SEQ ID NO: 4978555 - DNA, 25 bp, Homo sapien
gaagtaaaccgagcaagaagatgaa

SEQ ID NO: 4978556 - DNA, 25 bp, Homo sapien
tgagccccatgctccttcaggaatc

SEQ ID NO: 4978557 - DNA, 25 bp, Homo sapien
gcagcagcatctgatgttgagtaat

SEQ ID NO: 4978558 - DNA, 25 bp, Homo sapien
ttattgagcaaacagcagcagcatc

SEQ ID NO: 4978559 - DNA, 25 bp, Homo sapien
agcagcatctgatgttgagtaatgt

SEQ ID NO: 4978560 - DNA, 25 bp, Homo sapien
cagcagcagcatctgatgttgagta

SEQ ID NO: 4978561 - DNA, 25 bp, Homo sapien
aatgtgacagcttccttaacatcat

SEQ ID NO: 4978562 - DNA, 25 bp, Homo sapien
gagaagggagaatgtgacagcttcc

SEQ ID NO: 4978563 - DNA, 25 bp, Homo sapien
cattactagaagagttcttaattaa

SEQ ID NO: 4978564 - DNA, 25 bp, Homo sapien
ccgataaagtcaataatggagatcc

SEQ ID NO: 4978565 - DNA, 25 bp, Homo sapien
tctgagccttacttcggcggtaacc

SEQ ID NO: 4978566 - DNA, 25 bp, Homo sapien
cggcggtaaccatagttatgtgttt

SEQ ID NO: 4978567 - DNA, 25 bp, Homo sapien
tgagccttacttcggcggtaaccat

SEQ ID NO: 4978568 - DNA, 25 bp, Homo sapien
tacttcggcggtaaccatagttatg

SEQ ID NO: 4978569 - DNA, 25 bp, Homo sapien
ggtagtcatacatctcacaggaatt

SEQ ID NO: 4978570 - DNA, 25 bp, Homo sapien
ttcaccatcattgagggaacagtgg

SEQ ID NO: 4978571 - DNA, 25 bp, Homo sapien
tatggaaagttaagccacctcctga

SEQ ID NO: 4978572 - DNA, 25 bp, Homo sapien
cctgacctccggtgtcagcttcaat

SEQ ID NO: 4978573 - DNA, 25 bp, Homo sapien
cttgcaacaaagcagggattaactg

SEQ ID NO: 4978574 - DNA, 25 bp, Homo sapien
ttgcaacaaagcagggattaactgg

SEQ ID NO: 4978575 - DNA, 25 bp, Homo sapien
tgcaacaaagcagggattaactggc

SEQ ID NO: 4978576 - DNA, 25 bp, Homo sapien
gcaacaaagcagggattaactggct

SEQ ID NO: 4978577 - DNA, 25 bp, Homo sapien
aaggctgagtctgtgagatgcaggc

SEQ ID NO: 4978578 - DNA, 25 bp, Homo sapien
tgatgtttgtgttctcggtagtaca

SEQ ID NO: 4978579 - DNA, 25 bp, Homo sapien
ttctcggtagtacagaaattagaca

SEQ ID NO: 4978580 - DNA, 25 bp, Homo sapien
tgtgttctcggtagtacagaaatta

SEQ ID NO: 4978581 - DNA, 25 bp, Homo sapien
tgcttgaactggacgtctttctcca

SEQ ID NO: 4978582 - DNA, 25 bp, Homo sapien
ctgcttgaactggacgtctttctcc

SEQ ID NO: 4978583 - DNA, 25 bp, Homo sapien
tctctgctgctattttctcagacat

SEQ ID NO: 4978584 - DNA, 25 bp, Homo sapien
gtttataagtctctgctgctatttt

SEQ ID NO: 4978585 - DNA, 25 bp, Homo sapien
tttataagtctctgctgctattttc

SEQ ID NO: 4978586 - DNA, 25 bp, Homo sapien
aagtctctgctgctattttctcaga

SEQ ID NO: 4978587 - DNA, 25 bp, Homo sapien
cctgttgtgtgagacgagcagagca

SEQ ID NO: 4978588 - DNA, 25 bp, Homo sapien
aacaagttattctgcccgggctgtc

SEQ ID NO: 4978589 - DNA, 25 bp, Homo sapien
tgaagacaagctgcctgttgtgtga

SEQ ID NO: 4978590 - DNA, 25 bp, Homo sapien
ttatttataccaatgcaaagtgggg

SEQ ID NO: 4978591 - DNA, 25 bp, Homo sapien
tatatccacctgccgctcttggctg

SEQ ID NO: 4978592 - DNA, 25 bp, Homo sapien
gccatggctaacctgaccattctgg

SEQ ID NO: 4978593 - DNA, 25 bp, Homo sapien
tctcggcagctgaatgccatggcta

SEQ ID NO: 4978594 - DNA, 25 bp, Homo sapien
tgtattacccatataatccctgcat

SEQ ID NO: 4978595 - DNA, 25 bp, Homo sapien
tccagattcatccaacttgggtcct

SEQ ID NO: 4978596 - DNA, 25 bp, Homo sapien
caacttgggtcctgtttttgatgca

SEQ ID NO: 4978597 - DNA, 25 bp, Homo sapien
tccagggatggcaggttgtagccac

SEQ ID NO: 4978598 - DNA, 25 bp, Homo sapien
ttttgatgcagtccctaaagcacca

SEQ ID NO: 4978599 - DNA, 25 bp, Homo sapien
aactccctgttatttacattctcca

SEQ ID NO: 4978600 - DNA, 25 bp, Homo sapien
gttatttacattctccatcctaaca

SEQ ID NO: 4978601 - DNA, 25 bp, Homo sapien
tccatcctaacaaccattattatac

SEQ ID NO: 4978602 - DNA, 25 bp, Homo sapien
atattcaatttaaactccctgttat

SEQ ID NO: 4978603 - DNA, 25 bp, Homo sapien
ccctgcagtgagcattcatccattg

SEQ ID NO: 4978604 - DNA, 25 bp, Homo sapien
atccattgcggggctggtgttatta

SEQ ID NO: 4978605 - DNA, 25 bp, Homo sapien
tccattgcggggctggtgttattac

SEQ ID NO: 4978606 - DNA, 25 bp, Homo sapien
tccctgcagtgagcattcatccatt

SEQ ID NO: 4978607 - DNA, 25 bp, Homo sapien
taaatggaattgatcggaagggacg

SEQ ID NO: 4978608 - DNA, 25 bp, Homo sapien
tgtgctgtgttccaaagccctatcc

SEQ ID NO: 4978609 - DNA, 25 bp, Homo sapien
tctgatgtgagaagagacagcccca

SEQ ID NO: 4978610 - DNA, 25 bp, Homo sapien
ttctccacaacagcagacaaagatt

SEQ ID NO: 4978611 - DNA, 25 bp, Homo sapien
catcagagtaaaagctaagggcaca

SEQ ID NO: 4978612 - DNA, 25 bp, Homo sapien
tggttctgacaacacttaggctgca

SEQ ID NO: 4978613 - DNA, 25 bp, Homo sapien
tgtcactgtaaactgaaaccaggga

SEQ ID NO: 4978614 - DNA, 25 bp, Homo sapien
gaaacaccctggacacatttggaag

SEQ ID NO: 4978615 - DNA, 25 bp, Homo sapien
tattaattagcgaatccacaccaga

SEQ ID NO: 4978616 - DNA, 25 bp, Homo sapien
gattggaccctccttattctggtca

SEQ ID NO: 4978617 - DNA, 25 bp, Homo sapien
tcctatgaggtagcctagcttgtct

SEQ ID NO: 4978618 - DNA, 25 bp, Homo sapien
ggctatctccacaataatatgttga

SEQ ID NO: 4978619 - DNA, 25 bp, Homo sapien
tcgtctaacaggcaagtgaaacaca

SEQ ID NO: 4978620 - DNA, 25 bp, Homo sapien
taactgcatgaccaagactatagga

SEQ ID NO: 4978621 - DNA, 25 bp, Homo sapien
gaagcttacctctgtactgacggag

SEQ ID NO: 4978622 - DNA, 25 bp, Homo sapien
cactaccgtggcgtttgtggcctct

SEQ ID NO: 4978623 - DNA, 25 bp, Homo sapien
gataatttccactatctgcatgggc

SEQ ID NO: 4978624 - DNA, 25 bp, Homo sapien
tataaacaacattagcagccccttc

SEQ ID NO: 4978625 - DNA, 25 bp, Homo sapien
actggacgtaagacagggacacacc

SEQ ID NO: 4978626 - DNA, 25 bp, Homo sapien
taaatatgtcatctccagggtacac

SEQ ID NO: 4978627 - DNA, 25 bp, Homo sapien
gcctcctctggtggttgataagcaa

SEQ ID NO: 4978628 - DNA, 25 bp, Homo sapien
ctatggtcgttagggacacagggca

SEQ ID NO: 4978629 - DNA, 25 bp, Homo sapien
tcagctcttggtggaaaacagtggg

SEQ ID NO: 4978630 - DNA, 25 bp, Homo sapien
cctgctcaagggaatggtgccagat

SEQ ID NO: 4978631 - DNA, 25 bp, Homo sapien
ggccatcctctcagaaatcccatca

SEQ ID NO: 4978632 - DNA, 25 bp, Homo sapien
tgattatcagtggttcctcagagtt

SEQ ID NO: 4978633 - DNA, 25 bp, Homo sapien
catcaatgattatcagtggttcctc

SEQ ID NO: 4978634 - DNA, 25 bp, Homo sapien
aatgattatcagtggttcctcagag

SEQ ID NO: 4978635 - DNA, 25 bp, Homo sapien
tatttctacaggattgcccaaccct

SEQ ID NO: 4978636 - DNA, 25 bp, Homo sapien
ggagacaatatttaactcactgagt

SEQ ID NO: 4978637 - DNA, 25 bp, Homo sapien
ggagtccaggaatgtgttcatgtag

SEQ ID NO: 4978638 - DNA, 25 bp, Homo sapien
cgagagtatattgaagcaggtgtta

SEQ ID NO: 4978639 - DNA, 25 bp, Homo sapien
gatgtctctgtcatgcatagacatc

SEQ ID NO: 4978640 - DNA, 25 bp, Homo sapien
tgtttatcactaaataattacctaa

SEQ ID NO: 4978641 - DNA, 25 bp, Homo sapien
aatgtttatcactaaataattacct

SEQ ID NO: 4978642 - DNA, 25 bp, Homo sapien
gagatgtctctgtcatgcatagaca

SEQ ID NO: 4978643 - DNA, 25 bp, Homo sapien
tttcagatgggcatgatactgttct

SEQ ID NO: 4978644 - DNA, 25 bp, Homo sapien
gatactgttctattgagtttaggga

SEQ ID NO: 4978645 - DNA, 25 bp, Homo sapien
tgagtttagggagacactgcagatg

SEQ ID NO: 4978646 - DNA, 25 bp, Homo sapien
gatgggcatgatactgttctattga

SEQ ID NO: 4978647 - DNA, 25 bp, Homo sapien
tagacacagatgataactataccca

SEQ ID NO: 4978648 - DNA, 25 bp, Homo sapien
agacacagatgataactatacccac

SEQ ID NO: 4978649 - DNA, 25 bp, Homo sapien
ctagacacagatgataactataccc

SEQ ID NO: 4978650 - DNA, 25 bp, Homo sapien
agcatcagtgcagaacgtccagggg

SEQ ID NO: 4978651 - DNA, 25 bp, Homo sapien
tcagtgcagaacgtccaggggaagt

SEQ ID NO: 4978652 - DNA, 25 bp, Homo sapien
gggaagtggtcacgaacccgtgctg

SEQ ID NO: 4978653 - DNA, 25 bp, Homo sapien
aagtggtcacgaacccgtgctgacc

SEQ ID NO: 4978654 - DNA, 25 bp, Homo sapien
aaacttccatttcccttgctagtct

SEQ ID NO: 4978655 - DNA, 25 bp, Homo sapien
ttcccttgctagtcttccacctgtg

SEQ ID NO: 4978656 - DNA, 25 bp, Homo sapien
tccatttcccttgctagtcttccac

SEQ ID NO: 4978657 - DNA, 25 bp, Homo sapien
cccttgctagtcttccacctgtgtc

SEQ ID NO: 4978658 - DNA, 25 bp, Homo sapien
taactgcgctaataccattggtgac

SEQ ID NO: 4978659 - DNA, 25 bp, Homo sapien
gaatattgcctcctatgacatggac

SEQ ID NO: 4978660 - DNA, 25 bp, Homo sapien
ccagactccatagggtttgtaggaa

SEQ ID NO: 4978661 - DNA, 25 bp, Homo sapien
gaacccacacattctggctgtagag

SEQ ID NO: 4978662 - DNA, 25 bp, Homo sapien
tgtccttctagctcttagatcttca

SEQ ID NO: 4978663 - DNA, 25 bp, Homo sapien
tcttcggtgtccttctagctcttag

SEQ ID NO: 4978664 - DNA, 25 bp, Homo sapien
gcgtctaatcttcggtgtccttcta

SEQ ID NO: 4978665 - DNA, 25 bp, Homo sapien
ctgttgggtacctgcgtctaatctt

SEQ ID NO: 4978666 - DNA, 25 bp, Homo sapien
ctaaagtttaacaagagctgcggaa

SEQ ID NO: 4978667 - DNA, 25 bp, Homo sapien
atggccttgctgtcctacgtgtggc

SEQ ID NO: 4978668 - DNA, 25 bp, Homo sapien
tgtcctacgtgtggctttcttcccc

SEQ ID NO: 4978669 - DNA, 25 bp, Homo sapien
tcttccccacggctatgcctaaagg

SEQ ID NO: 4978670 - DNA, 25 bp, Homo sapien
taagcctgaacaaaagaatgcccct

SEQ ID NO: 4978671 - DNA, 25 bp, Homo sapien
catactgagtgacaaccttgctggg

SEQ ID NO: 4978672 - DNA, 25 bp, Homo sapien
ggagagtccataagtgtcccacata

SEQ ID NO: 4978673 - DNA, 25 bp, Homo sapien
cactggagggcgtggaattagcatc

SEQ ID NO: 4978674 - DNA, 25 bp, Homo sapien
tatgctgtgctggggtgggattcac

SEQ ID NO: 4978675 - DNA, 25 bp, Homo sapien
tcagatatgctgtgctggggtggga

SEQ ID NO: 4978676 - DNA, 25 bp, Homo sapien
tgctggggtgggattcacactggaa

SEQ ID NO: 4978677 - DNA, 25 bp, Homo sapien
ctgtgctggggtgggattcacactg

SEQ ID NO: 4978678 - DNA, 25 bp, Homo sapien
ccgttgagtccggatgggaaatgca

SEQ ID NO: 4978679 - DNA, 25 bp, Homo sapien
tcagagattgtctttaaggcggaca

SEQ ID NO: 4978680 - DNA, 25 bp, Homo sapien
gagagcagcggcagaacctgattct

SEQ ID NO: 4978681 - DNA, 25 bp, Homo sapien
cactgttggcaagcaggcagagagc

SEQ ID NO: 4978682 - DNA, 25 bp, Homo sapien
agagggcagcagcatttagggaaga

SEQ ID NO: 4978683 - DNA, 25 bp, Homo sapien
cagcagcatttagggaagagctcat

SEQ ID NO: 4978684 - DNA, 25 bp, Homo sapien
ctggagagcaccagagagggcagca

SEQ ID NO: 4978685 - DNA, 25 bp, Homo sapien
gggcagcagcatttagggaagagct

SEQ ID NO: 4978686 - DNA, 25 bp, Homo sapien
tgccactgtggatcctgaagaatca

SEQ ID NO: 4978687 - DNA, 25 bp, Homo sapien
ttaggaatgcagcaggttattgcta

SEQ ID NO: 4978688 - DNA, 25 bp, Homo sapien
gcgtactgaccaccttgtaagaatt

SEQ ID NO: 4978689 - DNA, 25 bp, Homo sapien
caggttattgctatagggtatgcgt

SEQ ID NO: 4978690 - DNA, 25 bp, Homo sapien
ctttctgtggatggttttcatcctc

SEQ ID NO: 4978691 - DNA, 25 bp, Homo sapien
cctttctgtggatggttttcatcct

SEQ ID NO: 4978692 - DNA, 25 bp, Homo sapien
tttctgtggatggttttcatcctcc

SEQ ID NO: 4978693 - DNA, 25 bp, Homo sapien
agccaaccttcggccaggtccatgg

SEQ ID NO: 4978694 - DNA, 25 bp, Homo sapien
tggcggactgcaggatgcccctcca

SEQ ID NO: 4978695 - DNA, 25 bp, Homo sapien
gtgctggcggactgcaggatgcccc

SEQ ID NO: 4978696 - DNA, 25 bp, Homo sapien
cctctgtgctggcggactgcaggat

SEQ ID NO: 4978697 - DNA, 25 bp, Homo sapien
gtgtagcaaaggtgctaactgggca

SEQ ID NO: 4978698 - DNA, 25 bp, Homo sapien
tagcaaaggtgctaactgggcacat

SEQ ID NO: 4978699 - DNA, 25 bp, Homo sapien
gcaaaggtgctaactgggcacattg

SEQ ID NO: 4978700 - DNA, 25 bp, Homo sapien
tgtagcaaaggtgctaactgggcac

SEQ ID NO: 4978701 - DNA, 25 bp, Homo sapien
gctatgaggtgcaggtgtaaattcc

SEQ ID NO: 4978702 - DNA, 25 bp, Homo sapien
cagctttagaattcctgtacatttc

SEQ ID NO: 4978703 - DNA, 25 bp, Homo sapien
gagtgtataactcttgggatgaaac

SEQ ID NO: 4978704 - DNA, 25 bp, Homo sapien
taaattccttcgcagctttagaatt

SEQ ID NO: 4978705 - DNA, 25 bp, Homo sapien
gccttcccagtgtgtttaaccaagc

SEQ ID NO: 4978706 - DNA, 25 bp, Homo sapien
ccttcccagtgtgtttaaccaagca

SEQ ID NO: 4978707 - DNA, 25 bp, Homo sapien
cttcccagtgtgtttaaccaagcac

SEQ ID NO: 4978708 - DNA, 25 bp, Homo sapien
taaaaactggagcaccttaggatga

SEQ ID NO: 4978709 - DNA, 25 bp, Homo sapien
gagtgataattcatggcaggtgcaa

SEQ ID NO: 4978710 - DNA, 25 bp, Homo sapien
ggatgtaacatctccaacactggct

SEQ ID NO: 4978711 - DNA, 25 bp, Homo sapien
gaagagaaactttatgtccagccat

SEQ ID NO: 4978712 - DNA, 25 bp, Homo sapien
aatcagtgaggactggttttgttgt

SEQ ID NO: 4978713 - DNA, 25 bp, Homo sapien
actactaagatgattaaatttagga

SEQ ID NO: 4978714 - DNA, 25 bp, Homo sapien
tatatagaaatcagtgaggactggt

SEQ ID NO: 4978715 - DNA, 25 bp, Homo sapien
cacttataattaatgtaactactaa

SEQ ID NO: 4978716 - DNA, 25 bp, Homo sapien
gttgaatcatcggtttgagacccat

SEQ ID NO: 4978717 - DNA, 25 bp, Homo sapien
tgacaggagggagaccgatcctcca

SEQ ID NO: 4978718 - DNA, 25 bp, Homo sapien
gatcctccaggacttctatcagcaa

SEQ ID NO: 4978719 - DNA, 25 bp, Homo sapien
tagtttttccactgggtgacaggag

SEQ ID NO: 4978720 - DNA, 25 bp, Homo sapien
ggcctaacagacactacaccagagg

SEQ ID NO: 4978721 - DNA, 25 bp, Homo sapien
agcagtgccagaaaacaagtcgatg

SEQ ID NO: 4978722 - DNA, 25 bp, Homo sapien
agtactctatggacaggactgtgga

SEQ ID NO: 4978723 - DNA, 25 bp, Homo sapien
tggaagtgagtgcatctgagccagt

SEQ ID NO: 4978724 - DNA, 25 bp, Homo sapien
tgcctgctcattgaagggcttaaga

SEQ ID NO: 4978725 - DNA, 25 bp, Homo sapien
caaagaatgtgaatccataatacgt

SEQ ID NO: 4978726 - DNA, 25 bp, Homo sapien
taatagccaagtcacaaactaggag

SEQ ID NO: 4978727 - DNA, 25 bp, Homo sapien
catacaagaatatcttggtacaggc

SEQ ID NO: 4978728 - DNA, 25 bp, Homo sapien
aacatatgaaatcctccatcaaaaa

SEQ ID NO: 4978729 - DNA, 25 bp, Homo sapien
aaacatatgaaatcctccatcaaaa

SEQ ID NO: 4978730 - DNA, 25 bp, Homo sapien
aaaacatatgaaatcctccatcaaa

SEQ ID NO: 4978731 - DNA, 25 bp, Homo sapien
gaaaacatatgaaatcctccatcaa

SEQ ID NO: 4978732 - DNA, 25 bp, Homo sapien
cttctgcaatgagcttatccaacat

SEQ ID NO: 4978733 - DNA, 25 bp, Homo sapien
caacatactgaaataggaagcacca

SEQ ID NO: 4978734 - DNA, 25 bp, Homo sapien
gaagcaccaagttgcttttctgtag

SEQ ID NO: 4978735 - DNA, 25 bp, Homo sapien
gcaatgagcttatccaacatactga

SEQ ID NO: 4978736 - DNA, 25 bp, Homo sapien
aaacaatctggttcatgaatgtgcc

SEQ ID NO: 4978737 - DNA, 25 bp, Homo sapien
cagaagtgagaagagctgcccttac

SEQ ID NO: 4978738 - DNA, 25 bp, Homo sapien
actgctactctacaaaagcatttgg

SEQ ID NO: 4978739 - DNA, 25 bp, Homo sapien
aatcattccgatttgtgaaagccgc

SEQ ID NO: 4978740 - DNA, 25 bp, Homo sapien
gaccaccggagcagtgtccatccgt

SEQ ID NO: 4978741 - DNA, 25 bp, Homo sapien
catcataatgttgctgggccatcag

SEQ ID NO: 4978742 - DNA, 25 bp, Homo sapien
tgtccccagttgttctaacaaagca

SEQ ID NO: 4978743 - DNA, 25 bp, Homo sapien
tctttgatagggagatgcgaccacc

SEQ ID NO: 4978744 - DNA, 25 bp, Homo sapien
gcattagggttgtcgttccaaggaa

SEQ ID NO: 4978745 - DNA, 25 bp, Homo sapien
ttagtcctaaagcagtatagcagca

SEQ ID NO: 4978746 - DNA, 25 bp, Homo sapien
tgggccattagtcctaaagcagtat

SEQ ID NO: 4978747 - DNA, 25 bp, Homo sapien
cagctggcaaaaccacgagcattag

SEQ ID NO: 4978748 - DNA, 25 bp, Homo sapien
acagtacgccccttaaaagactcat

SEQ ID NO: 4978749 - DNA, 25 bp, Homo sapien
aagactcattgtgggatttggtcat

SEQ ID NO: 4978750 - DNA, 25 bp, Homo sapien
gactccactatcagtgagctgtgtg

SEQ ID NO: 4978751 - DNA, 25 bp, Homo sapien
actctggttgggtgggactccacta

SEQ ID NO: 4978752 - DNA, 25 bp, Homo sapien
tcctttagtgcctataaaagcaggc

SEQ ID NO: 4978753 - DNA, 25 bp, Homo sapien
ggcagtagcataaaaacagccttga

SEQ ID NO: 4978754 - DNA, 25 bp, Homo sapien
tcctgcaggtataacgatgaatgcc

SEQ ID NO: 4978755 - DNA, 25 bp, Homo sapien
ggacatcctgcaggtataacgatga

SEQ ID NO: 4978756 - DNA, 25 bp, Homo sapien
tataacgatgaatgccggaatcaat

SEQ ID NO: 4978757 - DNA, 25 bp, Homo sapien
gaatgccggaatcaatgatagcatc

SEQ ID NO: 4978758 - DNA, 25 bp, Homo sapien
catcagcattcttgatatattagtt

SEQ ID NO: 4978759 - DNA, 25 bp, Homo sapien
cttctcatcagcattcttgatatat

SEQ ID NO: 4978760 - DNA, 25 bp, Homo sapien
tctcatcagcattcttgatatatta

SEQ ID NO: 4978761 - DNA, 25 bp, Homo sapien
cagcattcttgatatattagttttg

SEQ ID NO: 4978762 - DNA, 25 bp, Homo sapien
ctgaatgtcaaagaggagtatgcct

SEQ ID NO: 4978763 - DNA, 25 bp, Homo sapien
cctggtgtcaagaaagtaattggct

SEQ ID NO: 4978764 - DNA, 25 bp, Homo sapien
gaggcaaagggatctgaatgtcaaa

SEQ ID NO: 4978765 - DNA, 25 bp, Homo sapien
gaggagtatgcctggtgtcaagaaa

SEQ ID NO: 4978766 - DNA, 25 bp, Homo sapien
ctaggaatgcctcccatgggtcctt

SEQ ID NO: 4978767 - DNA, 25 bp, Homo sapien
ctccctaggaatgcctcccatgggt

SEQ ID NO: 4978768 - DNA, 25 bp, Homo sapien
tctaggttgaaacggaggagacttg

SEQ ID NO: 4978769 - DNA, 25 bp, Homo sapien
cttcttttccatggtctaggttgaa

SEQ ID NO: 4978770 - DNA, 25 bp, Homo sapien
tgagatcatcaagtagccagagtcc

SEQ ID NO: 4978771 - DNA, 25 bp, Homo sapien
tcctgggtgagatcatcaagtagcc

SEQ ID NO: 4978772 - DNA, 25 bp, Homo sapien
agcatcctgggtgagatcatcaagt

SEQ ID NO: 4978773 - DNA, 25 bp, Homo sapien
tgggtgagatcatcaagtagccaga

SEQ ID NO: 4978774 - DNA, 25 bp, Homo sapien
cacccgttgtgagtttctgtataaa

SEQ ID NO: 4978775 - DNA, 25 bp, Homo sapien
gcacccgttgtgagtttctgtataa

SEQ ID NO: 4978776 - DNA, 25 bp, Homo sapien
cctagcacccgttgtgagtttctgt

SEQ ID NO: 4978777 - DNA, 25 bp, Homo sapien
tagcacccgttgtgagtttctgtat

SEQ ID NO: 4978778 - DNA, 25 bp, Homo sapien
gagcatgatctgcaagacaggccag

SEQ ID NO: 4978779 - DNA, 25 bp, Homo sapien
gaatgacgtctaccattaggctctg

SEQ ID NO: 4978780 - DNA, 25 bp, Homo sapien
gccactcatccctttaggctttgaa

SEQ ID NO: 4978781 - DNA, 25 bp, Homo sapien
ttaggctctggttctggcaactgcg

SEQ ID NO: 4978782 - DNA, 25 bp, Homo sapien
aatcggccaccaccgctgaagtgaa

SEQ ID NO: 4978783 - DNA, 25 bp, Homo sapien
tctctcctagcaagagttttaacct

SEQ ID NO: 4978784 - DNA, 25 bp, Homo sapien
cctcttggcgtggattttgccttga

SEQ ID NO: 4978785 - DNA, 25 bp, Homo sapien
tttgccttgataatgggaatcggcc

SEQ ID NO: 4978786 - DNA, 25 bp, Homo sapien
aaacagacaggctacatgggcagac

SEQ ID NO: 4978787 - DNA, 25 bp, Homo sapien
cagacagggaagctccaatagcgcc

SEQ ID NO: 4978788 - DNA, 25 bp, Homo sapien
cttacccacaaacagacaggctaca

SEQ ID NO: 4978789 - DNA, 25 bp, Homo sapien
caatagcgccatatcctgaaatcat

SEQ ID NO: 4978790 - DNA, 25 bp, Homo sapien
gaagcccatgggtatcacgtggacc

SEQ ID NO: 4978791 - DNA, 25 bp, Homo sapien
tttgtcattagcagtttctccagga

SEQ ID NO: 4978792 - DNA, 25 bp, Homo sapien
actttgttagctggtcagactgagc

SEQ ID NO: 4978793 - DNA, 25 bp, Homo sapien
gacgctagcatacctatcattgtga

SEQ ID NO: 4978794 - DNA, 25 bp, Homo sapien
tttagcacaatctgagtaaggtggg

SEQ ID NO: 4978795 - DNA, 25 bp, Homo sapien
tgcccagcccgatagactcttttag

SEQ ID NO: 4978796 - DNA, 25 bp, Homo sapien
caggtacccacaccatgatcagcta

SEQ ID NO: 4978797 - DNA, 25 bp, Homo sapien
tcagaggcagagtagtcaatgtcat

SEQ ID NO: 4978798 - DNA, 25 bp, Homo sapien
agtttcaccacgttggcaaggatgg

SEQ ID NO: 4978799 - DNA, 25 bp, Homo sapien
cgttggcaaggatggtctcaatctc

SEQ ID NO: 4978800 - DNA, 25 bp, Homo sapien
ctttgtattttgaggagagatggag

SEQ ID NO: 4978801 - DNA, 25 bp, Homo sapien
aatctttgtattttgaggagagatg

SEQ ID NO: 4978802 - DNA, 25 bp, Homo sapien
gaaggacagtctatagctatccaaa

SEQ ID NO: 4978803 - DNA, 25 bp, Homo sapien
tgatactggtgtccaacgttatggg

SEQ ID NO: 4978804 - DNA, 25 bp, Homo sapien
tggagcaagcatgactgatactggt

SEQ ID NO: 4978805 - DNA, 25 bp, Homo sapien
tatccaaaatatccacaggtccatg

SEQ ID NO: 4978806 - DNA, 25 bp, Homo sapien
aaatctgatgctctaggcagaaact

SEQ ID NO: 4978807 - DNA, 25 bp, Homo sapien
ggcagaaactctgccttatcattgc

SEQ ID NO: 4978808 - DNA, 25 bp, Homo sapien
caaatctgatgctctaggcagaaac

SEQ ID NO: 4978809 - DNA, 25 bp, Homo sapien
ccttatcattgctcagaactccaaa

SEQ ID NO: 4978810 - DNA, 25 bp, Homo sapien
tgaccggagcctcttggcaggacac

SEQ ID NO: 4978811 - DNA, 25 bp, Homo sapien
tctgaccggagcctcttggcaggac

SEQ ID NO: 4978812 - DNA, 25 bp, Homo sapien
gggtgaagcatgtaatacagtcgga

SEQ ID NO: 4978813 - DNA, 25 bp, Homo sapien
tacagtcggactttgcttgcatgtt

SEQ ID NO: 4978814 - DNA, 25 bp, Homo sapien
taaaacagaacaacagtgtacaact

SEQ ID NO: 4978815 - DNA, 25 bp, Homo sapien
aaaacagaacaacagtgtacaactt

SEQ ID NO: 4978816 - DNA, 25 bp, Homo sapien
aaacagaacaacagtgtacaacttt

SEQ ID NO: 4978817 - DNA, 25 bp, Homo sapien
tacatccctgagtgttggccgatgg

SEQ ID NO: 4978818 - DNA, 25 bp, Homo sapien
gttgcaattcgatctggtgggagat

SEQ ID NO: 4978819 - DNA, 25 bp, Homo sapien
caagcttaggggttgcaattcgatc

SEQ ID NO: 4978820 - DNA, 25 bp, Homo sapien
gaccataaggctgaacaagcttagg

SEQ ID NO: 4978821 - DNA, 25 bp, Homo sapien
tgattttcatttcggcaattcataa

SEQ ID NO: 4978822 - DNA, 25 bp, Homo sapien
gccacatagtttagccctttctgat

SEQ ID NO: 4978823 - DNA, 25 bp, Homo sapien
ccagcttgtctcatgtggttccaaa

SEQ ID NO: 4978824 - DNA, 25 bp, Homo sapien
cacagctctcattgtcttggccaca

SEQ ID NO: 4978825 - DNA, 25 bp, Homo sapien
tcttcttttggcttagtatgtctaa

SEQ ID NO: 4978826 - DNA, 25 bp, Homo sapien
gtatgtctaatgaaattccccttcc

SEQ ID NO: 4978827 - DNA, 25 bp, Homo sapien
gcttagtatgtctaatgaaattccc

SEQ ID NO: 4978828 - DNA, 25 bp, Homo sapien
aatgaaattccccttcctcaagaat

SEQ ID NO: 4978829 - DNA, 25 bp, Homo sapien
aggcacagaataggccgtgtgcccc

SEQ ID NO: 4978830 - DNA, 25 bp, Homo sapien
cagaataggccgtgtgcccctggag

SEQ ID NO: 4978831 - DNA, 25 bp, Homo sapien
gaaggcacagaataggccgtgtgcc

SEQ ID NO: 4978832 - DNA, 25 bp, Homo sapien
aagactgaaggacagttgagagaag

SEQ ID NO: 4978833 - DNA, 25 bp, Homo sapien
tcatgccgaaaagtccaacgcttgc

SEQ ID NO: 4978834 - DNA, 25 bp, Homo sapien
tccaatcgggcaagggctgaccttt

SEQ ID NO: 4978835 - DNA, 25 bp, Homo sapien
taatctcatctccaagtcatgccga

SEQ ID NO: 4978836 - DNA, 25 bp, Homo sapien
gaggaagacaagttccagagccacg

SEQ ID NO: 4978837 - DNA, 25 bp, Homo sapien
acgtgaaacacccatgcaaagaggc

SEQ ID NO: 4978838 - DNA, 25 bp, Homo sapien
caagcatccgatcattgcagctgat

SEQ ID NO: 4978839 - DNA, 25 bp, Homo sapien
gtccatgtttatagccaagcatccg

SEQ ID NO: 4978840 - DNA, 25 bp, Homo sapien
gggcaaacctccaagaacagttgtg

SEQ ID NO: 4978841 - DNA, 25 bp, Homo sapien
tgcctagcttctctcttgctgtgtc

SEQ ID NO: 4978842 - DNA, 25 bp, Homo sapien
cctgcctagcttctctcttgctgtg

SEQ ID NO: 4978843 - DNA, 25 bp, Homo sapien
tgtgtctgtctgtgtgtccatttcc

SEQ ID NO: 4978844 - DNA, 25 bp, Homo sapien
tgtctgtctgtgtgtccatttccat

SEQ ID NO: 4978845 - DNA, 25 bp, Homo sapien
ttttaagttacattgctcattccca

SEQ ID NO: 4978846 - DNA, 25 bp, Homo sapien
gttttaagttacattgctcattccc

SEQ ID NO: 4978847 - DNA, 25 bp, Homo sapien
tcatttagcccgcatgcttacttcg

SEQ ID NO: 4978848 - DNA, 25 bp, Homo sapien
catttagcccgcatgcttacttcgg

SEQ ID NO: 4978849 - DNA, 25 bp, Homo sapien
atttagcccgcatgcttacttcggg

SEQ ID NO: 4978850 - DNA, 25 bp, Homo sapien
atctttggggtcataggtggagaca

SEQ ID NO: 4978851 - DNA, 25 bp, Homo sapien
taacaaaggtcttctgagcttatct

SEQ ID NO: 4978852 - DNA, 25 bp, Homo sapien
aaggtcttctgagcttatctttggg

SEQ ID NO: 4978853 - DNA, 25 bp, Homo sapien
tgtttaacaaaggtcttctgagctt

SEQ ID NO: 4978854 - DNA, 25 bp, Homo sapien
tggagtcctacaacaatgacccggg

SEQ ID NO: 4978855 - DNA, 25 bp, Homo sapien
gtcctacaacaatgacccgggctgc

SEQ ID NO: 4978856 - DNA, 25 bp, Homo sapien
tcctggagtcctacaacaatgaccc

SEQ ID NO: 4978857 - DNA, 25 bp, Homo sapien
gagtcctacaacaatgacccgggct

SEQ ID NO: 4978858 - DNA, 25 bp, Homo sapien
tcgtagtgggccacacgctgcgatt

SEQ ID NO: 4978859 - DNA, 25 bp, Homo sapien
cctgatcaatatcggaggacttcat

SEQ ID NO: 4978860 - DNA, 25 bp, Homo sapien
tgcacaccttgcagtaactgtctgt

SEQ ID NO: 4978861 - DNA, 25 bp, Homo sapien
ccacacgctgcgattcggagatcag

SEQ ID NO: 4978862 - DNA, 25 bp, Homo sapien
caagcaggcccgtaggagtctgagt

SEQ ID NO: 4978863 - DNA, 25 bp, Homo sapien
tctgagtctcggtaaagcagctgtg

SEQ ID NO: 4978864 - DNA, 25 bp, Homo sapien
tccttcctcattatacaaccaactg

SEQ ID NO: 4978865 - DNA, 25 bp, Homo sapien
gatattcaaggtacgtgtcggacca

SEQ ID NO: 4978866 - DNA, 25 bp, Homo sapien
cccctggaaacattcgtattgtgct

SEQ ID NO: 4978867 - DNA, 25 bp, Homo sapien
cagatccagtgtctagtgacctccc

SEQ ID NO: 4978868 - DNA, 25 bp, Homo sapien
tgctgtgccatgaggccttgggaca

SEQ ID NO: 4978869 - DNA, 25 bp, Homo sapien
ggtcagtccaatctgtcccatcaga

SEQ ID NO: 4978870 - DNA, 25 bp, Homo sapien
cgtggcagtccccaggcggccgcag

SEQ ID NO: 4978871 - DNA, 25 bp, Homo sapien
gcagtccccaggcggccgcagccat

SEQ ID NO: 4978872 - DNA, 25 bp, Homo sapien
gtggcagtccccaggcggccgcagc

SEQ ID NO: 4978873 - DNA, 25 bp, Homo sapien
tggcagtccccaggcggccgcagcc

SEQ ID NO: 4978874 - DNA, 25 bp, Homo sapien
cgtggcctgacacctcgaaaagccg

SEQ ID NO: 4978875 - DNA, 25 bp, Homo sapien
ctgacacctcgaaaagccgctgtgc

SEQ ID NO: 4978876 - DNA, 25 bp, Homo sapien
tgggaccttccaccagatgatgccc

SEQ ID NO: 4978877 - DNA, 25 bp, Homo sapien
atgacctactgctgccctccaacgt

SEQ ID NO: 4978878 - DNA, 25 bp, Homo sapien
ccaagggcaggcacatgcaactgat

SEQ ID NO: 4978879 - DNA, 25 bp, Homo sapien
ggttctttgattcctgactcagagg

SEQ ID NO: 4978880 - DNA, 25 bp, Homo sapien
ggaaccagagctgtcagtctcacat

SEQ ID NO: 4978881 - DNA, 25 bp, Homo sapien
tatgtgattcaccaaatggcctctg

SEQ ID NO: 4978882 - DNA, 25 bp, Homo sapien
taggtccttgctaaggctccagtac

SEQ ID NO: 4978883 - DNA, 25 bp, Homo sapien
cctgtaggtccttgctaaggctcca

SEQ ID NO: 4978884 - DNA, 25 bp, Homo sapien
cttgctaaggctccagtactgtacc

SEQ ID NO: 4978885 - DNA, 25 bp, Homo sapien
ccttaccctgtaggtccttgctaag

SEQ ID NO: 4978886 - DNA, 25 bp, Homo sapien
gggccatctggcaacagccctgatg

SEQ ID NO: 4978887 - DNA, 25 bp, Homo sapien
catcgaagtcgcagggtcttgtcac

SEQ ID NO: 4978888 - DNA, 25 bp, Homo sapien
tcacctcgccagagatgacagacag

SEQ ID NO: 4978889 - DNA, 25 bp, Homo sapien
gatgccaggtaatgatcaagtgcca

SEQ ID NO: 4978890 - DNA, 25 bp, Homo sapien
gccagtgacatagaaagtccatgaa

SEQ ID NO: 4978891 - DNA, 25 bp, Homo sapien
tgccagtgacatagaaagtccatga

SEQ ID NO: 4978892 - DNA, 25 bp, Homo sapien
aaagtccatgaacaactaggcactt

SEQ ID NO: 4978893 - DNA, 25 bp, Homo sapien
gaacaactaggcacttctcatcact

SEQ ID NO: 4978894 - DNA, 25 bp, Homo sapien
gcaagtcatcactacatcctggtgg

SEQ ID NO: 4978895 - DNA, 25 bp, Homo sapien
aatcagttgagtgggtttgatgcca

SEQ ID NO: 4978896 - DNA, 25 bp, Homo sapien
ggcatgagatggcagaagctatcag

SEQ ID NO: 4978897 - DNA, 25 bp, Homo sapien
tgagttttggctgattgggcaattg

SEQ ID NO: 4978898 - DNA, 25 bp, Homo sapien
tggcgtccccgtttccaggagcatc

SEQ ID NO: 4978899 - DNA, 25 bp, Homo sapien
ggcgtccccgtttccaggagcatcc

SEQ ID NO: 4978900 - DNA, 25 bp, Homo sapien
ttggcgtccccgtttccaggagcat

SEQ ID NO: 4978901 - DNA, 25 bp, Homo sapien
cttggcgtccccgtttccaggagca

SEQ ID NO: 4978902 - DNA, 25 bp, Homo sapien
tcatggcttaagttctgagcactca

SEQ ID NO: 4978903 - DNA, 25 bp, Homo sapien
gcttaagttctgagcactcagcacc

SEQ ID NO: 4978904 - DNA, 25 bp, Homo sapien
tggcttaagttctgagcactcagca

SEQ ID NO: 4978905 - DNA, 25 bp, Homo sapien
ggtgccacccagtattgcacccaca

SEQ ID NO: 4978906 - DNA, 25 bp, Homo sapien
tgctgaaaaaggtgccctcttgctg

SEQ ID NO: 4978907 - DNA, 25 bp, Homo sapien
gctggaacgattggctgctgaaaaa

SEQ ID NO: 4978908 - DNA, 25 bp, Homo sapien
aaaaggtgccctcttgctgaactct

SEQ ID NO: 4978909 - DNA, 25 bp, Homo sapien
ttatgtttcatccccaggaaggctg

SEQ ID NO: 4978910 - DNA, 25 bp, Homo sapien
caagtcccgacacactgaacagtgg

SEQ ID NO: 4978911 - DNA, 25 bp, Homo sapien
gctgcatccatacagaagtcataat

SEQ ID NO: 4978912 - DNA, 25 bp, Homo sapien
cctccgaggattttagggagctcat

SEQ ID NO: 4978913 - DNA, 25 bp, Homo sapien
cctggagcctccgaggattttaggg

SEQ ID NO: 4978914 - DNA, 25 bp, Homo sapien
gcagcatgcaaacgaggacaggcaa

SEQ ID NO: 4978915 - DNA, 25 bp, Homo sapien
tgcaaacgaggacaggcaatgcact

SEQ ID NO: 4978916 - DNA, 25 bp, Homo sapien
cagggcagcatgcaaacgaggacag

SEQ ID NO: 4978917 - DNA, 25 bp, Homo sapien
ggacaggcaatgcactgtgcctgat

SEQ ID NO: 4978918 - DNA, 25 bp, Homo sapien
gcaggcctgtccacttttcccaatt

SEQ ID NO: 4978919 - DNA, 25 bp, Homo sapien
cttcaggcaggcctgtccacttttc

SEQ ID NO: 4978920 - DNA, 25 bp, Homo sapien
tcaggcaggcctgtccacttttccc

SEQ ID NO: 4978921 - DNA, 25 bp, Homo sapien
aggcaggcctgtccacttttcccaa

SEQ ID NO: 4978922 - DNA, 25 bp, Homo sapien
ggcccgcacgagaggatgctctgca

SEQ ID NO: 4978923 - DNA, 25 bp, Homo sapien
gaaagcatcgctgatcaccatggcc

SEQ ID NO: 4978924 - DNA, 25 bp, Homo sapien
ccagctctgaaagcatcgctgatca

SEQ ID NO: 4978925 - DNA, 25 bp, Homo sapien
tgttacaacatcttccgagctgccc

SEQ ID NO: 4978926 - DNA, 25 bp, Homo sapien
ctgccgagcagtagagcgaagctgt

SEQ ID NO: 4978927 - DNA, 25 bp, Homo sapien
gctggagcacgctgaggattacacg

SEQ ID NO: 4978928 - DNA, 25 bp, Homo sapien
gattacacgttcctgtctctgcgac

SEQ ID NO: 4978929 - DNA, 25 bp, Homo sapien
gacctttcggcagctcggaccaact

SEQ ID NO: 4978930 - DNA, 25 bp, Homo sapien
catgtctttggtgaggctctggtcc

SEQ ID NO: 4978931 - DNA, 25 bp, Homo sapien
ccttgaatggctgtagtccttatct

SEQ ID NO: 4978932 - DNA, 25 bp, Homo sapien
cttatcttcagctgcgtcctctgca

SEQ ID NO: 4978933 - DNA, 25 bp, Homo sapien
cactgccttgtatggtgactttcta

SEQ ID NO: 4978934 - DNA, 25 bp, Homo sapien
cttgaacctagcattggaagaatga

SEQ ID NO: 4978935 - DNA, 25 bp, Homo sapien
gagaataaatctaggcaatgccaag

SEQ ID NO: 4978936 - DNA, 25 bp, Homo sapien
ttgtccgtgtatgccattttctcag

SEQ ID NO: 4978937 - DNA, 25 bp, Homo sapien
gacttcagccctacaataccatttc

SEQ ID NO: 4978938 - DNA, 25 bp, Homo sapien
tttttccaacttctgaggcactgct

SEQ ID NO: 4978939 - DNA, 25 bp, Homo sapien
tacagggtctaggaaccagtgttct

SEQ ID NO: 4978940 - DNA, 25 bp, Homo sapien
cactgagggtggcatttgtgtaaag

SEQ ID NO: 4978941 - DNA, 25 bp, Homo sapien
ggttcttctgccctcgtagtgggca

SEQ ID NO: 4978942 - DNA, 25 bp, Homo sapien
tgtgattgttcgtggtttccgtaaa

SEQ ID NO: 4978943 - DNA, 25 bp, Homo sapien
ttgtgattgttcgtggtttccgtaa

SEQ ID NO: 4978944 - DNA, 25 bp, Homo sapien
tgacaacaaagtccctctcagtttt

SEQ ID NO: 4978945 - DNA, 25 bp, Homo sapien
catctctctgggatgacaacaaagt

SEQ ID NO: 4978946 - DNA, 25 bp, Homo sapien
aatctaagtttaaagctcatctctc

SEQ ID NO: 4978947 - DNA, 25 bp, Homo sapien
ctaagtttaaagctcatctctctgg

SEQ ID NO: 4978948 - DNA, 25 bp, Homo sapien
tgtccttagttgcaggagacccttg

SEQ ID NO: 4978949 - DNA, 25 bp, Homo sapien
cacaggtcgttgaggcatgggaatc

SEQ ID NO: 4978950 - DNA, 25 bp, Homo sapien
ccagctgaggtccatgtggtaccca

SEQ ID NO: 4978951 - DNA, 25 bp, Homo sapien
gacccttgaagattggtgtcttccc

SEQ ID NO: 4978952 - DNA, 25 bp, Homo sapien
cttccccagtcacagagaaggctgt

SEQ ID NO: 4978953 - DNA, 25 bp, Homo sapien
agaaggctgtatgttctctctcctc

SEQ ID NO: 4978954 - DNA, 25 bp, Homo sapien
tcacagagaaggctgtatgttctct

SEQ ID NO: 4978955 - DNA, 25 bp, Homo sapien
cagagaaggctgtatgttctctctc

SEQ ID NO: 4978956 - DNA, 25 bp, Homo sapien
caaaagctctcctttctctccctta

SEQ ID NO: 4978957 - DNA, 25 bp, Homo sapien
caaaatggatgaagtgagtctatca

SEQ ID NO: 4978958 - DNA, 25 bp, Homo sapien
ccattgtttgaattctgagctgaac

SEQ ID NO: 4978959 - DNA, 25 bp, Homo sapien
ctctcaaaagcccttgtgccattgt

SEQ ID NO: 4978960 - DNA, 25 bp, Homo sapien
gctgaactaaccattgtttccaaag

SEQ ID NO: 4978961 - DNA, 25 bp, Homo sapien
cacagattcaggtggaaggcgactc

SEQ ID NO: 4978962 - DNA, 25 bp, Homo sapien
gggacacagattcaggtggaaggcg

SEQ ID NO: 4978963 - DNA, 25 bp, Homo sapien
gctcttggggacacagattcaggtg

SEQ ID NO: 4978964 - DNA, 25 bp, Homo sapien
cagattcaggtggaaggcgactcat

SEQ ID NO: 4978965 - DNA, 25 bp, Homo sapien
aaatgcccacagttgagagagccaa

SEQ ID NO: 4978966 - DNA, 25 bp, Homo sapien
tatgactgacgcagaaaagatgcag

SEQ ID NO: 4978967 - DNA, 25 bp, Homo sapien
tgtgtgccgaagattgcagcagctg

SEQ ID NO: 4978968 - DNA, 25 bp, Homo sapien
gatgcagtttcagtgtggattccag

SEQ ID NO: 4978969 - DNA, 25 bp, Homo sapien
ctgaagaatttagtacaacggtgaa

SEQ ID NO: 4978970 - DNA, 25 bp, Homo sapien
gaatttagtacaacggtgaagcaat

SEQ ID NO: 4978971 - DNA, 25 bp, Homo sapien
ttagtacaacggtgaagcaatgttt

SEQ ID NO: 4978972 - DNA, 25 bp, Homo sapien
gaagaatttagtacaacggtgaagc

SEQ ID NO: 4978973 - DNA, 25 bp, Homo sapien
cccagagatgcgttgagtgtcaaat

SEQ ID NO: 4978974 - DNA, 25 bp, Homo sapien
tggttccttaaccaaatgcccaggc

SEQ ID NO: 4978975 - DNA, 25 bp, Homo sapien
gttgagtgtcaaatggcctttccct

SEQ ID NO: 4978976 - DNA, 25 bp, Homo sapien
gcccaggcccagagatgcgttgagt

SEQ ID NO: 4978977 - DNA, 25 bp, Homo sapien
caatccacccaagataagtactcac

SEQ ID NO: 4978978 - DNA, 25 bp, Homo sapien
tcaatccacccaagataagtactca

SEQ ID NO: 4978979 - DNA, 25 bp, Homo sapien
agggccattcggagccagagtccag

SEQ ID NO: 4978980 - DNA, 25 bp, Homo sapien
agacaccacggcaataagacacaca

SEQ ID NO: 4978981 - DNA, 25 bp, Homo sapien
cactggtttccgtgtgcaccttctc

SEQ ID NO: 4978982 - DNA, 25 bp, Homo sapien
tcttcgctcattgctctccactggt

SEQ ID NO: 4978983 - DNA, 25 bp, Homo sapien
gctgtggaagaattggcccctttcc

SEQ ID NO: 4978984 - DNA, 25 bp, Homo sapien
tggcaaaggagaaagccaccaggcc

SEQ ID NO: 4978985 - DNA, 25 bp, Homo sapien
gaaggactgccagtgaagctctccc

SEQ ID NO: 4978986 - DNA, 25 bp, Homo sapien
caggaggaaggactgccagtgaagc

SEQ ID NO: 4978987 - DNA, 25 bp, Homo sapien
tgagggggcataagtctcaatggaa

SEQ ID NO: 4978988 - DNA, 25 bp, Homo sapien
agagtgagggggcataagtctcaat

SEQ ID NO: 4978989 - DNA, 25 bp, Homo sapien
gggggcataagtctcaatggaataa

SEQ ID NO: 4978990 - DNA, 25 bp, Homo sapien
gcataagtctcaatggaataagcat

SEQ ID NO: 4978991 - DNA, 25 bp, Homo sapien
tcccttcagcaggttaaccagttgt

SEQ ID NO: 4978992 - DNA, 25 bp, Homo sapien
gatcctctccagaaaggtgcccaag

SEQ ID NO: 4978993 - DNA, 25 bp, Homo sapien
tggccaggccctaattgtaatttac

SEQ ID NO: 4978994 - DNA, 25 bp, Homo sapien
tgggagcacagatcaagtacgcact

SEQ ID NO: 4978995 - DNA, 25 bp, Homo sapien
tgctgctcaagacccgagatgttct

SEQ ID NO: 4978996 - DNA, 25 bp, Homo sapien
cccagaggcataagcagatgatggc

SEQ ID NO: 4978997 - DNA, 25 bp, Homo sapien
gtttctaggcaaacacccagaggca

SEQ ID NO: 4978998 - DNA, 25 bp, Homo sapien
tgaatcctccgcatccaaacatgtg

SEQ ID NO: 4978999 - DNA, 25 bp, Homo sapien
ccctatctggaaggtagcagggtag

SEQ ID NO: 4979000 - DNA, 25 bp, Homo sapien
tcagatcagctaggagaggcaccat

SEQ ID NO: 4979001 - DNA, 25 bp, Homo sapien
gaggcaccatagacaggccagagtt

SEQ ID NO: 4979002 - DNA, 25 bp, Homo sapien
atagacaaaggaggtaacgtctccg

SEQ ID NO: 4979003 - DNA, 25 bp, Homo sapien
tggtccacttttggggtggctggca

SEQ ID NO: 4979004 - DNA, 25 bp, Homo sapien
cacttttggggtggctggcactctt

SEQ ID NO: 4979005 - DNA, 25 bp, Homo sapien
tggtggtccacttttggggtggctg

SEQ ID NO: 4979006 - DNA, 25 bp, Homo sapien
ctggcttggtggtccacttttgggg

SEQ ID NO: 4979007 - DNA, 25 bp, Homo sapien
gtagcgttcattgtcgtttcccatt

SEQ ID NO: 4979008 - DNA, 25 bp, Homo sapien
gggtagcgttcattgtcgtttccca

SEQ ID NO: 4979009 - DNA, 25 bp, Homo sapien
gagggtagcgttcattgtcgtttcc

SEQ ID NO: 4979010 - DNA, 25 bp, Homo sapien
ggagggtagcgttcattgtcgtttc

SEQ ID NO: 4979011 - DNA, 25 bp, Homo sapien
ggagtctcctacgtctacttccctc

SEQ ID NO: 4979012 - DNA, 25 bp, Homo sapien
tcctacgtctacttccctctacaca

SEQ ID NO: 4979013 - DNA, 25 bp, Homo sapien
agtctcctacgtctacttccctcta

SEQ ID NO: 4979014 - DNA, 25 bp, Homo sapien
tctcctacgtctacttccctctaca

SEQ ID NO: 4979015 - DNA, 25 bp, Homo sapien
gacttgttgacattcacccatcctc

SEQ ID NO: 4979016 - DNA, 25 bp, Homo sapien
gggacttgttgacattcacccatcc

SEQ ID NO: 4979017 - DNA, 25 bp, Homo sapien
caattttacatgcaccttaagtggg

SEQ ID NO: 4979018 - DNA, 25 bp, Homo sapien
gggacaattttacatgcaccttaag

SEQ ID NO: 4979019 - DNA, 25 bp, Homo sapien
ccctctggcatcagcaaagtcagat

SEQ ID NO: 4979020 - DNA, 25 bp, Homo sapien
ctggcatcagcaaagtcagatgcca

SEQ ID NO: 4979021 - DNA, 25 bp, Homo sapien
agaccctctggcatcagcaaagtca

SEQ ID NO: 4979022 - DNA, 25 bp, Homo sapien
ctctggcatcagcaaagtcagatgc

SEQ ID NO: 4979023 - DNA, 25 bp, Homo sapien
tctgggggacgctcttcacaaccag

SEQ ID NO: 4979024 - DNA, 25 bp, Homo sapien
ggccatctgggggacgctcttcaca

SEQ ID NO: 4979025 - DNA, 25 bp, Homo sapien
tcaacacttcaaggttggacttgtg

SEQ ID NO: 4979026 - DNA, 25 bp, Homo sapien
cccacatcaacacttcaaggttgga

SEQ ID NO: 4979027 - DNA, 25 bp, Homo sapien
gggcactgcccaatttcatacactt

SEQ ID NO: 4979028 - DNA, 25 bp, Homo sapien
gatttgtgcacaagataaacctggg

SEQ ID NO: 4979029 - DNA, 25 bp, Homo sapien
aaacctgggcttgcaaagcttcacc

SEQ ID NO: 4979030 - DNA, 25 bp, Homo sapien
tatgcctttctttggactattgaag

SEQ ID NO: 4979031 - DNA, 25 bp, Homo sapien
aatactccaatctcagtgtagtgat

SEQ ID NO: 4979032 - DNA, 25 bp, Homo sapien
ctccaatctcagtgtagtgattacc

SEQ ID NO: 4979033 - DNA, 25 bp, Homo sapien
tactccaatctcagtgtagtgatta

SEQ ID NO: 4979034 - DNA, 25 bp, Homo sapien
tccaatctcagtgtagtgattaccc

SEQ ID NO: 4979035 - DNA, 25 bp, Homo sapien
agcagacgccttgatttaaatccag

SEQ ID NO: 4979036 - DNA, 25 bp, Homo sapien
agctagagatgtcttgagggacaga

SEQ ID NO: 4979037 - DNA, 25 bp, Homo sapien
gtggccagagctagagatgtcttga

SEQ ID NO: 4979038 - DNA, 25 bp, Homo sapien
ctcgctgaccagcagacgccttgat

SEQ ID NO: 4979039 - DNA, 25 bp, Homo sapien
aatctgtgcaaccaccggaggaggc

SEQ ID NO: 4979040 - DNA, 25 bp, Homo sapien
tgagcgctgcaagtgttctgtggac

SEQ ID NO: 4979041 - DNA, 25 bp, Homo sapien
gcagaaatgatgctatcctgagtgg

SEQ ID NO: 4979042 - DNA, 25 bp, Homo sapien
tcctgagtggttcatggcagatcac

SEQ ID NO: 4979043 - DNA, 25 bp, Homo sapien
ggagaggattagaacaaatccttgt

SEQ ID NO: 4979044 - DNA, 25 bp, Homo sapien
gagaggattagaacaaatccttgtg

SEQ ID NO: 4979045 - DNA, 25 bp, Homo sapien
agaggattagaacaaatccttgtga

SEQ ID NO: 4979046 - DNA, 25 bp, Homo sapien
gcagaaaagtgggtcccgcatgatt

SEQ ID NO: 4979047 - DNA, 25 bp, Homo sapien
gggtcccgcatgatttatttgtact

SEQ ID NO: 4979048 - DNA, 25 bp, Homo sapien
tcatgatctaactccctccatagac

SEQ ID NO: 4979049 - DNA, 25 bp, Homo sapien
catagacaggagtcgaggagcacag

SEQ ID NO: 4979050 - DNA, 25 bp, Homo sapien
gcacaagtccctaaacgagcttcag

SEQ ID NO: 4979051 - DNA, 25 bp, Homo sapien
gagcttcagaaacatgagggtcccc

SEQ ID NO: 4979052 - DNA, 25 bp, Homo sapien
gcctgctcccttcggccacataccc

SEQ ID NO: 4979053 - DNA, 25 bp, Homo sapien
tctgagcacaagtccctaaacgagc

SEQ ID NO: 4979054 - DNA, 25 bp, Homo sapien
tgccatccatgaggttaccaacagc

SEQ ID NO: 4979055 - DNA, 25 bp, Homo sapien
ggcctggtttgctggtaactccaga

SEQ ID NO: 4979056 - DNA, 25 bp, Homo sapien
cacagcaggtctgataaagagggcc

SEQ ID NO: 4979057 - DNA, 25 bp, Homo sapien
aagagggccctgaacaacccattgc

SEQ ID NO: 4979058 - DNA, 25 bp, Homo sapien
cttccttctagactcttggtcagtt

SEQ ID NO: 4979059 - DNA, 25 bp, Homo sapien
tccttctagactcttggtcagtttc

SEQ ID NO: 4979060 - DNA, 25 bp, Homo sapien
cagtgacccattgaggcacattagc

SEQ ID NO: 4979061 - DNA, 25 bp, Homo sapien
tcacagtgacccattgaggcacatt

SEQ ID NO: 4979062 - DNA, 25 bp, Homo sapien
acagcaagaacaagggtggtatcag

SEQ ID NO: 4979063 - DNA, 25 bp, Homo sapien
caagaacaagggtggtatcagggca

SEQ ID NO: 4979064 - DNA, 25 bp, Homo sapien
agaacaagggtggtatcagggcagc

SEQ ID NO: 4979065 - DNA, 25 bp, Homo sapien
cagcaagaacaagggtggtatcagg

SEQ ID NO: 4979066 - DNA, 25 bp, Homo sapien
cagctccttcggctatgtgggcaaa

SEQ ID NO: 4979067 - DNA, 25 bp, Homo sapien
gtgggcaaagtgcagattgacagcc

SEQ ID NO: 4979068 - DNA, 25 bp, Homo sapien
ccttcggctatgtgggcaaagtgca

SEQ ID NO: 4979069 - DNA, 25 bp, Homo sapien
gcaaagtgcagattgacagcccagc

SEQ ID NO: 4979070 - DNA, 25 bp, Homo sapien
tctgtccagcacaaagatgctgaga

SEQ ID NO: 4979071 - DNA, 25 bp, Homo sapien
taagaacagcggttctgtccagcac

SEQ ID NO: 4979072 - DNA, 25 bp, Homo sapien
ggctgttttctaagaacagcggttc

SEQ ID NO: 4979073 - DNA, 25 bp, Homo sapien
tttctaagaacagcggttctgtcca

SEQ ID NO: 4979074 - DNA, 25 bp, Homo sapien
tcagcagaccatgctacacctaggt

SEQ ID NO: 4979075 - DNA, 25 bp, Homo sapien
gaattccttcttcacgtgacctctg

SEQ ID NO: 4979076 - DNA, 25 bp, Homo sapien
ctcttggacaggactcaaaacaggt

SEQ ID NO: 4979077 - DNA, 25 bp, Homo sapien
tgaaagtggactctgatgggcatct

SEQ ID NO: 4979078 - DNA, 25 bp, Homo sapien
agcagcaagccaagctccaagcctg

SEQ ID NO: 4979079 - DNA, 25 bp, Homo sapien
ctagcagcaagccaagctccaagcc

SEQ ID NO: 4979080 - DNA, 25 bp, Homo sapien
caagctccaagcctggagcccccag

SEQ ID NO: 4979081 - DNA, 25 bp, Homo sapien
cagcaagccaagctccaagcctgga

SEQ ID NO: 4979082 - DNA, 25 bp, Homo sapien
ctaccttgctaaaggagttctctct

SEQ ID NO: 4979083 - DNA, 25 bp, Homo sapien
tccctaccttgctaaaggagttctc

SEQ ID NO: 4979084 - DNA, 25 bp, Homo sapien
catccctaccttgctaaaggagttc

SEQ ID NO: 4979085 - DNA, 25 bp, Homo sapien
cacatccctaccttgctaaaggagt

SEQ ID NO: 4979086 - DNA, 25 bp, Homo sapien
tgtcttccctgactcgtgggctcca

SEQ ID NO: 4979087 - DNA, 25 bp, Homo sapien
tcagagccacccctcgggtcctctg

SEQ ID NO: 4979088 - DNA, 25 bp, Homo sapien
accttgtcttccctgactcgtgggc

SEQ ID NO: 4979089 - DNA, 25 bp, Homo sapien
gggtcctctggcctagaacaccttc

SEQ ID NO: 4979090 - DNA, 25 bp, Homo sapien
ccagctgtacccctgcgggctggag

SEQ ID NO: 4979091 - DNA, 25 bp, Homo sapien
ttgcgtgggtggcattcccagagcc

SEQ ID NO: 4979092 - DNA, 25 bp, Homo sapien
agagccagctgtacccctgcgggct

SEQ ID NO: 4979093 - DNA, 25 bp, Homo sapien
gcccctccttgcgtgggtggcattc

SEQ ID NO: 4979094 - DNA, 25 bp, Homo sapien
cacatgaggacgcagcccccttctg

SEQ ID NO: 4979095 - DNA, 25 bp, Homo sapien
ggcacatgaggacgcagcccccttc

SEQ ID NO: 4979096 - DNA, 25 bp, Homo sapien
tgaggacgcagcccccttctgtgtg

SEQ ID NO: 4979097 - DNA, 25 bp, Homo sapien
catgaggacgcagcccccttctgtg

SEQ ID NO: 4979098 - DNA, 25 bp, Homo sapien
ctgagggccatgaagcagtggggca

SEQ ID NO: 4979099 - DNA, 25 bp, Homo sapien
tctgcagagatactccttattccac

SEQ ID NO: 4979100 - DNA, 25 bp, Homo sapien
aggagcccctgctttagaggctgtg

SEQ ID NO: 4979101 - DNA, 25 bp, Homo sapien
caaaaagcccacgtccttctggtga

SEQ ID NO: 4979102 - DNA, 25 bp, Homo sapien
tttgaacatcaaaaagcccacgtcc

SEQ ID NO: 4979103 - DNA, 25 bp, Homo sapien
aggctcagaagaccaggcgaggctt

SEQ ID NO: 4979104 - DNA, 25 bp, Homo sapien
ctgccaacagcacgctcaggctcag

SEQ ID NO: 4979105 - DNA, 25 bp, Homo sapien
ccaccctgtctcagccgcagcacca

SEQ ID NO: 4979106 - DNA, 25 bp, Homo sapien
gtggtagaaacaccgggcaggacat

SEQ ID NO: 4979107 - DNA, 25 bp, Homo sapien
ctccaccctgtctcagccgcagcac

SEQ ID NO: 4979108 - DNA, 25 bp, Homo sapien
ggtggtagaaacaccgggcaggaca

SEQ ID NO: 4979109 - DNA, 25 bp, Homo sapien
caatggtctgggcattagaactgca

SEQ ID NO: 4979110 - DNA, 25 bp, Homo sapien
tgaagcctgccttcgtgacagcctg

SEQ ID NO: 4979111 - DNA, 25 bp, Homo sapien
tctaccgacgacatacctaaaggag

SEQ ID NO: 4979112 - DNA, 25 bp, Homo sapien
taaagtttgctctgacccaagggca

SEQ ID NO: 4979113 - DNA, 25 bp, Homo sapien
cgcagaagggcaacctcccggtttg

SEQ ID NO: 4979114 - DNA, 25 bp, Homo sapien
caggccccaggaggtcgcagaaggg

SEQ ID NO: 4979115 - DNA, 25 bp, Homo sapien
ctgggaagtgtctgtcgttcaggcc

SEQ ID NO: 4979116 - DNA, 25 bp, Homo sapien
tttaaggagtcagtccgctgagccc

SEQ ID NO: 4979117 - DNA, 25 bp, Homo sapien
ggggccaaacacgagggtggttgca

SEQ ID NO: 4979118 - DNA, 25 bp, Homo sapien
caaacacgagggtggttgcagggcc

SEQ ID NO: 4979119 - DNA, 25 bp, Homo sapien
ggccaaacacgagggtggttgcagg

SEQ ID NO: 4979120 - DNA, 25 bp, Homo sapien
aacacgagggtggttgcagggccca

SEQ ID NO: 4979121 - DNA, 25 bp, Homo sapien
gtatccagtcctgaccgctctcagg

SEQ ID NO: 4979122 - DNA, 25 bp, Homo sapien
tcctgacctcgcgtatccagtcctg

SEQ ID NO: 4979123 - DNA, 25 bp, Homo sapien
tgtgagtcctcccaataccatcact

SEQ ID NO: 4979124 - DNA, 25 bp, Homo sapien
gtggatccacgtcctccttctctga

SEQ ID NO: 4979125 - DNA, 25 bp, Homo sapien
tccctgcgagatcgtaaaatccttg

SEQ ID NO: 4979126 - DNA, 25 bp, Homo sapien
cctgcgagatcgtaaaatccttggg

SEQ ID NO: 4979127 - DNA, 25 bp, Homo sapien
gatcgtaaaatccttgggggcagga

SEQ ID NO: 4979128 - DNA, 25 bp, Homo sapien
cttccctgcgagatcgtaaaatcct

SEQ ID NO: 4979129 - DNA, 25 bp, Homo sapien
tggacctgtgtacccacagcatagc

SEQ ID NO: 4979130 - DNA, 25 bp, Homo sapien
gacctgtgtacccacagcatagctt

SEQ ID NO: 4979131 - DNA, 25 bp, Homo sapien
tggtggacctgtgtacccacagcat

SEQ ID NO: 4979132 - DNA, 25 bp, Homo sapien
tgtgtacccacagcatagcttccac

SEQ ID NO: 4979133 - DNA, 25 bp, Homo sapien
tacccttcagaatcggcattttaac

SEQ ID NO: 4979134 - DNA, 25 bp, Homo sapien
ccacctcagacctacccttcagaat

SEQ ID NO: 4979135 - DNA, 25 bp, Homo sapien
aatgcagaattcaagcccacctcag

SEQ ID NO: 4979136 - DNA, 25 bp, Homo sapien
attttaacactggtcctcaagtgag

SEQ ID NO: 4979137 - DNA, 25 bp, Homo sapien
gaagctgttgcttcctacctgagaa

SEQ ID NO: 4979138 - DNA, 25 bp, Homo sapien
ggagaacttgatgctaacccacagg

SEQ ID NO: 4979139 - DNA, 25 bp, Homo sapien
gaattcccatttagagagctgcaca

SEQ ID NO: 4979140 - DNA, 25 bp, Homo sapien
caaaggctcgtgatagtgcagctct

SEQ ID NO: 4979141 - DNA, 25 bp, Homo sapien
tacaatgtccactactgacaggcgc

SEQ ID NO: 4979142 - DNA, 25 bp, Homo sapien
tcctcactgggtataagcattggcc

SEQ ID NO: 4979143 - DNA, 25 bp, Homo sapien
cctcggacggatcaggagaccttgt

SEQ ID NO: 4979144 - DNA, 25 bp, Homo sapien
gttctagggcaaccacggactcttc

SEQ ID NO: 4979145 - DNA, 25 bp, Homo sapien
tgaaaggtggggcactcatggtttt

SEQ ID NO: 4979146 - DNA, 25 bp, Homo sapien
tcacttaaacacggactgaaaggtg

SEQ ID NO: 4979147 - DNA, 25 bp, Homo sapien
ggtggggcactcatggtttttcatt

SEQ ID NO: 4979148 - DNA, 25 bp, Homo sapien
cacttaaacacggactgaaaggtgg

SEQ ID NO: 4979149 - DNA, 25 bp, Homo sapien
ttgtggatggccgtcagcaagtact

SEQ ID NO: 4979150 - DNA, 25 bp, Homo sapien
cagcaagtactggctcttcaccttg

SEQ ID NO: 4979151 - DNA, 25 bp, Homo sapien
tcttcaccttgcggcccatgatgag

SEQ ID NO: 4979152 - DNA, 25 bp, Homo sapien
caccttgcggcccatgatgaggaag

SEQ ID NO: 4979153 - DNA, 25 bp, Homo sapien
tcttcaggtacagcacaagcttctt

SEQ ID NO: 4979154 - DNA, 25 bp, Homo sapien
ccattcttcaggtacagcacaagct

SEQ ID NO: 4979155 - DNA, 25 bp, Homo sapien
ggcagggacagtcagccccattctt

SEQ ID NO: 4979156 - DNA, 25 bp, Homo sapien
ccttcttcttgatgggccccaactt

SEQ ID NO: 4979157 - DNA, 25 bp, Homo sapien
tggggacaatcttcttgtcgccatt

SEQ ID NO: 4979158 - DNA, 25 bp, Homo sapien
gacaatcttcttgtcgccattttct

SEQ ID NO: 4979159 - DNA, 25 bp, Homo sapien
cttggggacaatcttcttgtcgcca

SEQ ID NO: 4979160 - DNA, 25 bp, Homo sapien
gggacaatcttcttgtcgccatttt

SEQ ID NO: 4979161 - DNA, 25 bp, Homo sapien
gccacatcctgtagcaatgactcca

SEQ ID NO: 4979162 - DNA, 25 bp, Homo sapien
ccaggagtgtgggaaaatcagccca

SEQ ID NO: 4979163 - DNA, 25 bp, Homo sapien
taacagtgttaacctgtgagccaca

SEQ ID NO: 4979164 - DNA, 25 bp, Homo sapien
cagggctgcttctgttctcaactcc

SEQ ID NO: 4979165 - DNA, 25 bp, Homo sapien
ggtggtgaacaaacagaagcccaga

SEQ ID NO: 4979166 - DNA, 25 bp, Homo sapien
gggcaacagctggatacagtcccag

SEQ ID NO: 4979167 - DNA, 25 bp, Homo sapien
cagctggatacagtcccaggtcctg

SEQ ID NO: 4979168 - DNA, 25 bp, Homo sapien
ccagaaggtagcagctggggcaaca

SEQ ID NO: 4979169 - DNA, 25 bp, Homo sapien
cagtcctgtggaatggctgtaggaa

SEQ ID NO: 4979170 - DNA, 25 bp, Homo sapien
cgtaaggcaaccattggcccagagc

SEQ ID NO: 4979171 - DNA, 25 bp, Homo sapien
ccgagacatcctacccatgactttg

SEQ ID NO: 4979172 - DNA, 25 bp, Homo sapien
catgactttgaacgtaaggcaacca

SEQ ID NO: 4979173 - DNA, 25 bp, Homo sapien
ctggttcaaccgatgctcaaaagtg

SEQ ID NO: 4979174 - DNA, 25 bp, Homo sapien
catacagcagttcctccagtaggag

SEQ ID NO: 4979175 - DNA, 25 bp, Homo sapien
gacggggcaagcagttggatccatt

SEQ ID NO: 4979176 - DNA, 25 bp, Homo sapien
ctgcttccctacccagagctttatg

SEQ ID NO: 4979177 - DNA, 25 bp, Homo sapien
tgcacacacactcgccagcatcatc

SEQ ID NO: 4979178 - DNA, 25 bp, Homo sapien
cacacgcaagctcatgtacacatgc

SEQ ID NO: 4979179 - DNA, 25 bp, Homo sapien
cacactcgccagcatcatcaatgca

SEQ ID NO: 4979180 - DNA, 25 bp, Homo sapien
acacacgcaagctcatgtacacatg

SEQ ID NO: 4979181 - DNA, 25 bp, Homo sapien
tccagaatcctgctgctaactgctt

SEQ ID NO: 4979182 - DNA, 25 bp, Homo sapien
agccatccagaatcctgctgctaac

SEQ ID NO: 4979183 - DNA, 25 bp, Homo sapien
atcctgctgctaactgcttgatttc

SEQ ID NO: 4979184 - DNA, 25 bp, Homo sapien
agaatcctgctgctaactgcttgat

SEQ ID NO: 4979185 - DNA, 25 bp, Homo sapien
tggattgtgttaaatccccactgag

SEQ ID NO: 4979186 - DNA, 25 bp, Homo sapien
ctggattgtgttaaatccccactga

SEQ ID NO: 4979187 - DNA, 25 bp, Homo sapien
tgtgttaaatccccactgagttaag

SEQ ID NO: 4979188 - DNA, 25 bp, Homo sapien
gattgtgttaaatccccactgagtt

SEQ ID NO: 4979189 - DNA, 25 bp, Homo sapien
gtttgcccaaatggcaagttgaaat

SEQ ID NO: 4979190 - DNA, 25 bp, Homo sapien
ttcctctccaatctacttcctggtg

SEQ ID NO: 4979191 - DNA, 25 bp, Homo sapien
gcccaaatggcaagttgaaatgtgg

SEQ ID NO: 4979192 - DNA, 25 bp, Homo sapien
acttcctggtgtttgcccaaatggc

SEQ ID NO: 4979193 - DNA, 25 bp, Homo sapien
cccaggggccttgcttgcatgtgcc

SEQ ID NO: 4979194 - DNA, 25 bp, Homo sapien
ttgcttgcatgtgcccgaggccagc

SEQ ID NO: 4979195 - DNA, 25 bp, Homo sapien
tgcccaagccgctccacccccaggg

SEQ ID NO: 4979196 - DNA, 25 bp, Homo sapien
caatgctgcccaagccgctccaccc

SEQ ID NO: 4979197 - DNA, 25 bp, Homo sapien
aacattgatgcagcagagctctgca

SEQ ID NO: 4979198 - DNA, 25 bp, Homo sapien
ctctgcatgagaatgacccacgagt

SEQ ID NO: 4979199 - DNA, 25 bp, Homo sapien
tgcatgagaatgacccacgagtgtt

SEQ ID NO: 4979200 - DNA, 25 bp, Homo sapien
tccttgcctcaacattgatgcagca

SEQ ID NO: 4979201 - DNA, 25 bp, Homo sapien
taggacatggcccaaaacgcatcca

SEQ ID NO: 4979202 - DNA, 25 bp, Homo sapien
tgttcaatgactagtgcaatgcctg

SEQ ID NO: 4979203 - DNA, 25 bp, Homo sapien
aacgcatccaatctctgttcaatga

SEQ ID NO: 4979204 - DNA, 25 bp, Homo sapien
gactagtgcaatgcctgacatcagg

SEQ ID NO: 4979205 - DNA, 25 bp, Homo sapien
acggagctcatacagttttcctttg

SEQ ID NO: 4979206 - DNA, 25 bp, Homo sapien
gacggagctcatacagttttccttt

SEQ ID NO: 4979207 - DNA, 25 bp, Homo sapien
ccccggcataagatgggcagcgctg

SEQ ID NO: 4979208 - DNA, 25 bp, Homo sapien
cttccccggcataagatgggcagcg

SEQ ID NO: 4979209 - DNA, 25 bp, Homo sapien
gaccactctctggtgttctcgccta

SEQ ID NO: 4979210 - DNA, 25 bp, Homo sapien
tgctgaccactctctggtgttctcg

SEQ ID NO: 4979211 - DNA, 25 bp, Homo sapien
tgaccactctctggtgttctcgcct

SEQ ID NO: 4979212 - DNA, 25 bp, Homo sapien
cttgctgaccactctctggtgttct

SEQ ID NO: 4979213 - DNA, 25 bp, Homo sapien
gaatgcatatgtcgtgcctcatggt

SEQ ID NO: 4979214 - DNA, 25 bp, Homo sapien
ggacaattcacgagacagctggaga

SEQ ID NO: 4979215 - DNA, 25 bp, Homo sapien
caaagggtcctcatttgtctgaaga

SEQ ID NO: 4979216 - DNA, 25 bp, Homo sapien
tgatcgtgatttgtccagagcacct

SEQ ID NO: 4979217 - DNA, 25 bp, Homo sapien
tctggtgccaccgacatatagttgg

SEQ ID NO: 4979218 - DNA, 25 bp, Homo sapien
caaagctgaatgcatccattgcgga

SEQ ID NO: 4979219 - DNA, 25 bp, Homo sapien
gagaacacatctgaggtagtcccaa

SEQ ID NO: 4979220 - DNA, 25 bp, Homo sapien
cattgcggaagacaccgacgtggaa

SEQ ID NO: 4979221 - DNA, 25 bp, Homo sapien
cctggaaggctgtatttcatctcgt

SEQ ID NO: 4979222 - DNA, 25 bp, Homo sapien
gaaggctgtatttcatctcgtcccc

SEQ ID NO: 4979223 - DNA, 25 bp, Homo sapien
ggctgtatttcatctcgtccccatc

SEQ ID NO: 4979224 - DNA, 25 bp, Homo sapien
tggaaggctgtatttcatctcgtcc

SEQ ID NO: 4979225 - DNA, 25 bp, Homo sapien
actgccagataaacaactttctttg

SEQ ID NO: 4979226 - DNA, 25 bp, Homo sapien
ctttctttgataaatcatccgtgtg

SEQ ID NO: 4979227 - DNA, 25 bp, Homo sapien
tttactgccagataaacaactttct

SEQ ID NO: 4979228 - DNA, 25 bp, Homo sapien
catccgtgtgacagtgttcctgaaa

SEQ ID NO: 4979229 - DNA, 25 bp, Homo sapien
gaaatactccctaatgctaactgtg

SEQ ID NO: 4979230 - DNA, 25 bp, Homo sapien
aaggctgagcctactttctgcaaga

SEQ ID NO: 4979231 - DNA, 25 bp, Homo sapien
taaaacacggcattagatacagagc

SEQ ID NO: 4979232 - DNA, 25 bp, Homo sapien
tgcaagaactcaaactgcccgtcag

SEQ ID NO: 4979233 - DNA, 25 bp, Homo sapien
aacacgtttctcgacaaggctgcat

SEQ ID NO: 4979234 - DNA, 25 bp, Homo sapien
tgagctgagctaggaaacacgtttc

SEQ ID NO: 4979235 - DNA, 25 bp, Homo sapien
tgaagtgagctgagctaggaaacac

SEQ ID NO: 4979236 - DNA, 25 bp, Homo sapien
gcattctctaaggtgctaagaaggg

SEQ ID NO: 4979237 - DNA, 25 bp, Homo sapien
cagaacgctggctgatttggcaggt

SEQ ID NO: 4979238 - DNA, 25 bp, Homo sapien
tatcgacatgagatcctctgtcctc

SEQ ID NO: 4979239 - DNA, 25 bp, Homo sapien
ttctgtgtacagaacgctggctgat

SEQ ID NO: 4979240 - DNA, 25 bp, Homo sapien
tcactcagattccacaaaccgtgac

SEQ ID NO: 4979241 - DNA, 25 bp, Homo sapien
tcagaattctctttcgatggagagt

SEQ ID NO: 4979242 - DNA, 25 bp, Homo sapien
agaattctctttcgatggagagtga

SEQ ID NO: 4979243 - DNA, 25 bp, Homo sapien
ttctcctggagctgcgagtgctggt

SEQ ID NO: 4979244 - DNA, 25 bp, Homo sapien
agctgcgagtgctggttcagaattc

SEQ ID NO: 4979245 - DNA, 25 bp, Homo sapien
atttttctttgcctcgcggaacctg

SEQ ID NO: 4979246 - DNA, 25 bp, Homo sapien
gcctcgcggaacctgatgaggaccc

SEQ ID NO: 4979247 - DNA, 25 bp, Homo sapien
actctgaatcccctaagcattgaac

SEQ ID NO: 4979248 - DNA, 25 bp, Homo sapien
gaatcccctaagcattgaactctcc

SEQ ID NO: 4979249 - DNA, 25 bp, Homo sapien
cagccatttggagaggaatgaggta

SEQ ID NO: 4979250 - DNA, 25 bp, Homo sapien
ccttccagaggcagctagaaacgct

SEQ ID NO: 4979251 - DNA, 25 bp, Homo sapien
agggcctccgtctggcagaggcaca

SEQ ID NO: 4979252 - DNA, 25 bp, Homo sapien
caacgagatacatcagcagggcctc

SEQ ID NO: 4979253 - DNA, 25 bp, Homo sapien
caaactcgctggcacagagatgttc

SEQ ID NO: 4979254 - DNA, 25 bp, Homo sapien
aatgatggcctcagatttcaactcg

SEQ ID NO: 4979255 - DNA, 25 bp, Homo sapien
aactcgttgtcacagggaggacaca

SEQ ID NO: 4979256 - DNA, 25 bp, Homo sapien
cagatttcaactcgttgtcacaggg

SEQ ID NO: 4979257 - DNA, 25 bp, Homo sapien
gcttggtgtgcttggagcccactgc

SEQ ID NO: 4979258 - DNA, 25 bp, Homo sapien
cactcggggagtgcaggtggggctt

SEQ ID NO: 4979259 - DNA, 25 bp, Homo sapien
gggcttggtgtgcttggagcccact

SEQ ID NO: 4979260 - DNA, 25 bp, Homo sapien
tggtgtgcttggagcccactgctct

SEQ ID NO: 4979261 - DNA, 25 bp, Homo sapien
ggtgtccggaagacagcgattatgg

SEQ ID NO: 4979262 - DNA, 25 bp, Homo sapien
aagggcgccgaccagtggaactgca

SEQ ID NO: 4979263 - DNA, 25 bp, Homo sapien
tgcagcaccttttccgcagccgagc

SEQ ID NO: 4979264 - DNA, 25 bp, Homo sapien
tgagtgaggacggttccaagccagg

SEQ ID NO: 4979265 - DNA, 25 bp, Homo sapien
ccagaaagagaccatcggaagccat

SEQ ID NO: 4979266 - DNA, 25 bp, Homo sapien
tgggtgcaagccaacagaacacaag

SEQ ID NO: 4979267 - DNA, 25 bp, Homo sapien
gttgactctgagagcagcggtgccc

SEQ ID NO: 4979268 - DNA, 25 bp, Homo sapien
taaggtgtccactcatgtctgcaga

SEQ ID NO: 4979269 - DNA, 25 bp, Homo sapien
tttagcatcaataacagaggttaaa

SEQ ID NO: 4979270 - DNA, 25 bp, Homo sapien
cttttagcatcaataacagaggtta

SEQ ID NO: 4979271 - DNA, 25 bp, Homo sapien
gactgcactcccctcttttagcatc

SEQ ID NO: 4979272 - DNA, 25 bp, Homo sapien
ttttagcatcaataacagaggttaa

SEQ ID NO: 4979273 - DNA, 25 bp, Homo sapien
ggtcgcgaggggcgctgagcgatac

SEQ ID NO: 4979274 - DNA, 25 bp, Homo sapien
gggtcgcgaggggcgctgagcgata

SEQ ID NO: 4979275 - DNA, 25 bp, Homo sapien
tgtcacacttaagcatctcgggcca

SEQ ID NO: 4979276 - DNA, 25 bp, Homo sapien
tagaagccgaagaactgcatgaccg

SEQ ID NO: 4979277 - DNA, 25 bp, Homo sapien
tcacgtagtcgtactcgctggccga

SEQ ID NO: 4979278 - DNA, 25 bp, Homo sapien
gatgtccgactggaagctcacgtag

SEQ ID NO: 4979279 - DNA, 25 bp, Homo sapien
ggctctgcgccctgttctccgcgac

SEQ ID NO: 4979280 - DNA, 25 bp, Homo sapien
gccggctctgcgccctgttctccgc

SEQ ID NO: 4979281 - DNA, 25 bp, Homo sapien
ccggctctgcgccctgttctccgcg

SEQ ID NO: 4979282 - DNA, 25 bp, Homo sapien
cggctctgcgccctgttctccgcga

SEQ ID NO: 4979283 - DNA, 25 bp, Homo sapien
gcgcgtcctgccgcaaacttccagg

SEQ ID NO: 4979284 - DNA, 25 bp, Homo sapien
cgcgtcctgccgcaaacttccaggg

SEQ ID NO: 4979285 - DNA, 25 bp, Homo sapien
gcgtcctgccgcaaacttccaggga

SEQ ID NO: 4979286 - DNA, 25 bp, Homo sapien
cgcggcactgactccggaggctgca

SEQ ID NO: 4979287 - DNA, 25 bp, Homo sapien
cctcggcctgcggtcggaggcggcg

SEQ ID NO: 4979288 - DNA, 25 bp, Homo sapien
cggctcccggaggtgcggcgagcag

SEQ ID NO: 4979289 - DNA, 25 bp, Homo sapien
ggacaaaaggcgcagtccccagcgt

SEQ ID NO: 4979290 - DNA, 25 bp, Homo sapien
accttctacctcgaattcctgagaa

SEQ ID NO: 4979291 - DNA, 25 bp, Homo sapien
atcaagggtccccactagggcagac

SEQ ID NO: 4979292 - DNA, 25 bp, Homo sapien
caggaacagaagtctctctgccacc

SEQ ID NO: 4979293 - DNA, 25 bp, Homo sapien
ggacggtatcagcacaacagctcgg

SEQ ID NO: 4979294 - DNA, 25 bp, Homo sapien
tcccatccacatcgggtgccagatg

SEQ ID NO: 4979295 - DNA, 25 bp, Homo sapien
ccatgactctccgtcctctggagga

SEQ ID NO: 4979296 - DNA, 25 bp, Homo sapien
gtggcacaatcaatgcaggaggcag

SEQ ID NO: 4979297 - DNA, 25 bp, Homo sapien
ggagctgcagacatatgtggcacaa

SEQ ID NO: 4979298 - DNA, 25 bp, Homo sapien
ggtgctgcagagagcacccgacctc

SEQ ID NO: 4979299 - DNA, 25 bp, Homo sapien
tttcccgtttggactggacgctgtc

SEQ ID NO: 4979300 - DNA, 25 bp, Homo sapien
ggagggctgccttgggtgctgcaga

SEQ ID NO: 4979301 - DNA, 25 bp, Homo sapien
cctccctggagatgcctagaggtgt

SEQ ID NO: 4979302 - DNA, 25 bp, Homo sapien
aggtctttacaccagtgaatctctg

SEQ ID NO: 4979303 - DNA, 25 bp, Homo sapien
caggtctttacaccagtgaatctct

SEQ ID NO: 4979304 - DNA, 25 bp, Homo sapien
tcaggtctttacaccagtgaatctc

SEQ ID NO: 4979305 - DNA, 25 bp, Homo sapien
tcctggggttctgatgaggagccct

SEQ ID NO: 4979306 - DNA, 25 bp, Homo sapien
gagccctccaaccatgcgtggtgct

SEQ ID NO: 4979307 - DNA, 25 bp, Homo sapien
tgaggagccctccaaccatgcgtgg

SEQ ID NO: 4979308 - DNA, 25 bp, Homo sapien
aggagccctccaaccatgcgtggtg

SEQ ID NO: 4979309 - DNA, 25 bp, Homo sapien
tcagtcccaacctgtaaccacagag

SEQ ID NO: 4979310 - DNA, 25 bp, Homo sapien
gagcccaggttaacagagacaagta

SEQ ID NO: 4979311 - DNA, 25 bp, Homo sapien
tcaaatgagggcaacttgtgggtct

SEQ ID NO: 4979312 - DNA, 25 bp, Homo sapien
gtaggaacatcagacaaaggaggac

SEQ ID NO: 4979313 - DNA, 25 bp, Homo sapien
accccggaagctaactgcgaccaca

SEQ ID NO: 4979314 - DNA, 25 bp, Homo sapien
cggaagctaactgcgaccacacaca

SEQ ID NO: 4979315 - DNA, 25 bp, Homo sapien
aagctaactgcgaccacacacagca

SEQ ID NO: 4979316 - DNA, 25 bp, Homo sapien
cccaacaccccggaagctaactgcg

SEQ ID NO: 4979317 - DNA, 25 bp, Homo sapien
gggtctctggttagcaccagcgtca

SEQ ID NO: 4979318 - DNA, 25 bp, Homo sapien
aaggaggcttcagttaaccagaact

SEQ ID NO: 4979319 - DNA, 25 bp, Homo sapien
acacaaatgtccagccgcaagccga

SEQ ID NO: 4979320 - DNA, 25 bp, Homo sapien
agccgatgccggaaacaagaacaaa

SEQ ID NO: 4979321 - DNA, 25 bp, Homo sapien
ggtaactgaaaaatgcggagagtgt

SEQ ID NO: 4979322 - DNA, 25 bp, Homo sapien
tgaaaaatgcggagagtgtcgtgcc

SEQ ID NO: 4979323 - DNA, 25 bp, Homo sapien
cggagagtgtcgtgcctaaagccat

SEQ ID NO: 4979324 - DNA, 25 bp, Homo sapien
aaaatgcggagagtgtcgtgcctaa

SEQ ID NO: 4979325 - DNA, 25 bp, Homo sapien
caccttctcaggactacagtcagag

SEQ ID NO: 4979326 - DNA, 25 bp, Homo sapien
tctcaggactacagtcagagtcttt

SEQ ID NO: 4979327 - DNA, 25 bp, Homo sapien
gagtctttgggccctcgtttctcca

SEQ ID NO: 4979328 - DNA, 25 bp, Homo sapien
tcaggactacagtcagagtctttgg

SEQ ID NO: 4979329 - DNA, 25 bp, Homo sapien
ctctgagtggattgtgtgccaattt

SEQ ID NO: 4979330 - DNA, 25 bp, Homo sapien
gctctgagtggattgtgtgccaatt

SEQ ID NO: 4979331 - DNA, 25 bp, Homo sapien
tctgagtggattgtgtgccaatttc

SEQ ID NO: 4979332 - DNA, 25 bp, Homo sapien
gtgcccaggcccgatcacgcatgag

SEQ ID NO: 4979333 - DNA, 25 bp, Homo sapien
acgcatgaggctaaagacggtgtgt

SEQ ID NO: 4979334 - DNA, 25 bp, Homo sapien
caggcccgatcacgcatgaggctaa

SEQ ID NO: 4979335 - DNA, 25 bp, Homo sapien
tccagtttcttgtaggattatacag

SEQ ID NO: 4979336 - DNA, 25 bp, Homo sapien
gaagccactcatttgtccccggctg

SEQ ID NO: 4979337 - DNA, 25 bp, Homo sapien
caggccacgcggagaagcagctctg

SEQ ID NO: 4979338 - DNA, 25 bp, Homo sapien
gccacgcggagaagcagctctgctc

SEQ ID NO: 4979339 - DNA, 25 bp, Homo sapien
ctttgaagccactcatttgtccccg

SEQ ID NO: 4979340 - DNA, 25 bp, Homo sapien
aacgggctaccatggagaaaattca

SEQ ID NO: 4979341 - DNA, 25 bp, Homo sapien
agagtttgcaaacgggctaccatgg

SEQ ID NO: 4979342 - DNA, 25 bp, Homo sapien
agaagagtttgcaaacgggctacca

SEQ ID NO: 4979343 - DNA, 25 bp, Homo sapien
ttgcaaacgggctaccatggagaaa

SEQ ID NO: 4979344 - DNA, 25 bp, Homo sapien
agagcgcacttttccccacgtgact

SEQ ID NO: 4979345 - DNA, 25 bp, Homo sapien
ctgtgagtggagcctcttttcagct

SEQ ID NO: 4979346 - DNA, 25 bp, Homo sapien
tcctggcagccaacatgaacgtggt

SEQ ID NO: 4979347 - DNA, 25 bp, Homo sapien
agaagtcctctaacacgccatcctg

SEQ ID NO: 4979348 - DNA, 25 bp, Homo sapien
gaacaatgccgctattggagagcac

SEQ ID NO: 4979349 - DNA, 25 bp, Homo sapien
ccctgggctgtgaaagaccactgat

SEQ ID NO: 4979350 - DNA, 25 bp, Homo sapien
gcaatgcctcgagccaaaaataacg

SEQ ID NO: 4979351 - DNA, 25 bp, Homo sapien
cctgaatagacgttgcaaagctggg

SEQ ID NO: 4979352 - DNA, 25 bp, Homo sapien
tctccacatcgtgtctaagcctgtg

SEQ ID NO: 4979353 - DNA, 25 bp, Homo sapien
gtcaaccttgcccaaacaatgctgc

SEQ ID NO: 4979354 - DNA, 25 bp, Homo sapien
cattttgcttactgagctcctggcc

SEQ ID NO: 4979355 - DNA, 25 bp, Homo sapien
aagcagctatgaaccgtgagtacac

SEQ ID NO: 4979356 - DNA, 25 bp, Homo sapien
ctccccttgcacaccaggagggctg

SEQ ID NO: 4979357 - DNA, 25 bp, Homo sapien
acgcagcgcccatcagcagaagctt

SEQ ID NO: 4979358 - DNA, 25 bp, Homo sapien
tttccactcatggagtgggtttatc

SEQ ID NO: 4979359 - DNA, 25 bp, Homo sapien
ggtttatctgccagacgcagcgccc

SEQ ID NO: 4979360 - DNA, 25 bp, Homo sapien
caacacacaaataggctttatctgt

SEQ ID NO: 4979361 - DNA, 25 bp, Homo sapien
ttcaacacacaaataggctttatct

SEQ ID NO: 4979362 - DNA, 25 bp, Homo sapien
agcattcaacacacaaataggcttt

SEQ ID NO: 4979363 - DNA, 25 bp, Homo sapien
ttacatcattgagaggactggtgac

SEQ ID NO: 4979364 - DNA, 25 bp, Homo sapien
agcttgcaatccagtctctattatc

SEQ ID NO: 4979365 - DNA, 25 bp, Homo sapien
gagcttgcaatccagtctctattat

SEQ ID NO: 4979366 - DNA, 25 bp, Homo sapien
tgagcttgcaatccagtctctatta

SEQ ID NO: 4979367 - DNA, 25 bp, Homo sapien
cctgagcttgcaatccagtctctat

SEQ ID NO: 4979368 - DNA, 25 bp, Homo sapien
acagacgaagcagtccacagatgca

SEQ ID NO: 4979369 - DNA, 25 bp, Homo sapien
ctgtaaacacagacgaagcagtcca

SEQ ID NO: 4979370 - DNA, 25 bp, Homo sapien
cgaagcagtccacagatgcaggttc

SEQ ID NO: 4979371 - DNA, 25 bp, Homo sapien
gttcaaattaccctcatgttccaga

SEQ ID NO: 4979372 - DNA, 25 bp, Homo sapien
tgtggggggtggttcagaagagtta

SEQ ID NO: 4979373 - DNA, 25 bp, Homo sapien
gatgtggggggtggttcagaagagt

SEQ ID NO: 4979374 - DNA, 25 bp, Homo sapien
gggatgtggggggtggttcagaaga

SEQ ID NO: 4979375 - DNA, 25 bp, Homo sapien
atgtggggggtggttcagaagagtt

SEQ ID NO: 4979376 - DNA, 25 bp, Homo sapien
ggttcagagagggatggaactggcc

SEQ ID NO: 4979377 - DNA, 25 bp, Homo sapien
aactggccttcagccaaaatgaccc

SEQ ID NO: 4979378 - DNA, 25 bp, Homo sapien
gagggatggaactggccttcagcca

SEQ ID NO: 4979379 - DNA, 25 bp, Homo sapien
gatggaactggccttcagccaaaat

SEQ ID NO: 4979380 - DNA, 25 bp, Homo sapien
tctagagaccagatccacacttcca

SEQ ID NO: 4979381 - DNA, 25 bp, Homo sapien
gagcaagcaaatacggactgcccat

SEQ ID NO: 4979382 - DNA, 25 bp, Homo sapien
tttggaagctgcacatatccagctt

SEQ ID NO: 4979383 - DNA, 25 bp, Homo sapien
tcttctcaaaagacagctgatttgg

SEQ ID NO: 4979384 - DNA, 25 bp, Homo sapien
tacaggcttgttatgcaactctgct

SEQ ID NO: 4979385 - DNA, 25 bp, Homo sapien
gaatctcttcagttacaggcttgtt

SEQ ID NO: 4979386 - DNA, 25 bp, Homo sapien
ctgactggggactcagttctggaca

SEQ ID NO: 4979387 - DNA, 25 bp, Homo sapien
catggaaccaggaaatacagcaagc

SEQ ID NO: 4979388 - DNA, 25 bp, Homo sapien
gccttggctgtgagggcgaatcctc

SEQ ID NO: 4979389 - DNA, 25 bp, Homo sapien
ggcgaatcctccaccagattgggca

SEQ ID NO: 4979390 - DNA, 25 bp, Homo sapien
ctccaccagattgggcagagaaagg

SEQ ID NO: 4979391 - DNA, 25 bp, Homo sapien
tgtgagggcgaatcctccaccagat

SEQ ID NO: 4979392 - DNA, 25 bp, Homo sapien
gctgtggcctcgagtgcctggagca

SEQ ID NO: 4979393 - DNA, 25 bp, Homo sapien
ccaggctgtggcctcgagtgcctgg

SEQ ID NO: 4979394 - DNA, 25 bp, Homo sapien
gtggcctcgagtgcctggagcactg

SEQ ID NO: 4979395 - DNA, 25 bp, Homo sapien
tgcctggagcactgctgggagtcat

SEQ ID NO: 4979396 - DNA, 25 bp, Homo sapien
taccattgtgagagtgcggaattcc

SEQ ID NO: 4979397 - DNA, 25 bp, Homo sapien
tcttcatgaagctgtggccgtttcc

SEQ ID NO: 4979398 - DNA, 25 bp, Homo sapien
gacgtggtagaatcgcttcaggcca

SEQ ID NO: 4979399 - DNA, 25 bp, Homo sapien
gaaatggagctgacgcttgccacag

SEQ ID NO: 4979400 - DNA, 25 bp, Homo sapien
ctgatacccatagggaagcccttct

SEQ ID NO: 4979401 - DNA, 25 bp, Homo sapien
cagctgatacccatagggaagccct

SEQ ID NO: 4979402 - DNA, 25 bp, Homo sapien
aggcagctgatacccatagggaagc

SEQ ID NO: 4979403 - DNA, 25 bp, Homo sapien
gctgatacccatagggaagcccttc

SEQ ID NO: 4979404 - DNA, 25 bp, Homo sapien
tcacaatcatggcgtaaggcaagga

SEQ ID NO: 4979405 - DNA, 25 bp, Homo sapien
cacaatcatggcgtaaggcaaggaa

SEQ ID NO: 4979406 - DNA, 25 bp, Homo sapien
ctcacaatcatggcgtaaggcaagg

SEQ ID NO: 4979407 - DNA, 25 bp, Homo sapien
gatacctctactacctgaaaaccag

SEQ ID NO: 4979408 - DNA, 25 bp, Homo sapien
tgtacatcaagagtaccaggcacat

SEQ ID NO: 4979409 - DNA, 25 bp, Homo sapien
cctgcaggcttgtgtgcaccttcca

SEQ ID NO: 4979410 - DNA, 25 bp, Homo sapien
cacttcaccttggttggttggctca

SEQ ID NO: 4979411 - DNA, 25 bp, Homo sapien
tcctgaagccagttaattgacacag

SEQ ID NO: 4979412 - DNA, 25 bp, Homo sapien
gagtcaaggaagtaccctgtcatgg

SEQ ID NO: 4979413 - DNA, 25 bp, Homo sapien
agcttcccaaattgccggatggcag

SEQ ID NO: 4979414 - DNA, 25 bp, Homo sapien
ggcaccacaagcatatgtgatacat

SEQ ID NO: 4979415 - DNA, 25 bp, Homo sapien
ggaaagctctcagagggcccctctg

SEQ ID NO: 4979416 - DNA, 25 bp, Homo sapien
ggccttgtaccgtgtccacctcagt

SEQ ID NO: 4979417 - DNA, 25 bp, Homo sapien
ggagccctcacctatttcctagaga

SEQ ID NO: 4979418 - DNA, 25 bp, Homo sapien
gcccctctgatgagcaactgaaggg

SEQ ID NO: 4979419 - DNA, 25 bp, Homo sapien
tggctgtcgttttgcacctcccaga

SEQ ID NO: 4979420 - DNA, 25 bp, Homo sapien
tcaggtggctttagacctcaacaag

SEQ ID NO: 4979421 - DNA, 25 bp, Homo sapien
taaagtggatgccaaaccatcagac

SEQ ID NO: 4979422 - DNA, 25 bp, Homo sapien
tggtcagcccagtgcaaagcttgtt

SEQ ID NO: 4979423 - DNA, 25 bp, Homo sapien
ttcataggaacaataagcaccaagt

SEQ ID NO: 4979424 - DNA, 25 bp, Homo sapien
taagcaccaagttgaagatactggt

SEQ ID NO: 4979425 - DNA, 25 bp, Homo sapien
ataagcaccaagttgaagatactgg

SEQ ID NO: 4979426 - DNA, 25 bp, Homo sapien
ctattcataggaacaataagcacca

SEQ ID NO: 4979427 - DNA, 25 bp, Homo sapien
gataatttggatgcaataaccacca

SEQ ID NO: 4979428 - DNA, 25 bp, Homo sapien
ctccgggcctgttcagctgattggt

SEQ ID NO: 4979429 - DNA, 25 bp, Homo sapien
taacatcttcagtattatgaatggt

SEQ ID NO: 4979430 - DNA, 25 bp, Homo sapien
tcaatttcctcaaagcctccgggcc

SEQ ID NO: 4979431 - DNA, 25 bp, Homo sapien
gatttcgaagaccactgtaggcaac

SEQ ID NO: 4979432 - DNA, 25 bp, Homo sapien
gagccattatcatgccactgtgtga

SEQ ID NO: 4979433 - DNA, 25 bp, Homo sapien
gccaggctttgtggtatgtaccttt

SEQ ID NO: 4979434 - DNA, 25 bp, Homo sapien
tgaccagaaaccagatgtagccatt

SEQ ID NO: 4979435 - DNA, 25 bp, Homo sapien
tctgggtcctcaacgttgccggtga

SEQ ID NO: 4979436 - DNA, 25 bp, Homo sapien
tacttgcggtgtcgcctcatgaagg

SEQ ID NO: 4979437 - DNA, 25 bp, Homo sapien
tccttggactgaaacatagtctggg

SEQ ID NO: 4979438 - DNA, 25 bp, Homo sapien
tacgtcctcagcagctacttgcggt

SEQ ID NO: 4979439 - DNA, 25 bp, Homo sapien
ctgagagtgagagaacgacaagaaa

SEQ ID NO: 4979440 - DNA, 25 bp, Homo sapien
agagtgagagaacgacaagaaaaca

SEQ ID NO: 4979441 - DNA, 25 bp, Homo sapien
tgagagtgagagaacgacaagaaaa

SEQ ID NO: 4979442 - DNA, 25 bp, Homo sapien
gagagtgagagaacgacaagaaaac

SEQ ID NO: 4979443 - DNA, 25 bp, Homo sapien
acttgatccgatacaaaaccattgc

SEQ ID NO: 4979444 - DNA, 25 bp, Homo sapien
aagggctcacagcacttgatccgat

SEQ ID NO: 4979445 - DNA, 25 bp, Homo sapien
aaaccattgcacctctggttgcatc

SEQ ID NO: 4979446 - DNA, 25 bp, Homo sapien
tttaaaactaggcataaacagccag

SEQ ID NO: 4979447 - DNA, 25 bp, Homo sapien
cgagtagctggtattataggtgcac

SEQ ID NO: 4979448 - DNA, 25 bp, Homo sapien
ctggagtggcagtggtgtgaacacg

SEQ ID NO: 4979449 - DNA, 25 bp, Homo sapien
cacaccaccacacccaactaatttt

SEQ ID NO: 4979450 - DNA, 25 bp, Homo sapien
gagtggcagtggtgtgaacacggct

SEQ ID NO: 4979451 - DNA, 25 bp, Homo sapien
ggtcagcctggttagaaagcccaac

SEQ ID NO: 4979452 - DNA, 25 bp, Homo sapien
tatttgatactcgtgcagtccctgg

SEQ ID NO: 4979453 - DNA, 25 bp, Homo sapien
tggacccagatcttacaggaccttg

SEQ ID NO: 4979454 - DNA, 25 bp, Homo sapien
tcgcctggagctcgccttaagatgt

SEQ ID NO: 4979455 - DNA, 25 bp, Homo sapien
ggtgtagtgtcctctcactccagca

SEQ ID NO: 4979456 - DNA, 25 bp, Homo sapien
caggtgccaggtataactccattca

SEQ ID NO: 4979457 - DNA, 25 bp, Homo sapien
cactttagtcaacaaacaggtaggc

SEQ ID NO: 4979458 - DNA, 25 bp, Homo sapien
ggtaagtgacctagtaacaacagca

SEQ ID NO: 4979459 - DNA, 25 bp, Homo sapien
gcagaactttgcgagtagagcccat

SEQ ID NO: 4979460 - DNA, 25 bp, Homo sapien
tactgctgaaagtatgagctgacct

SEQ ID NO: 4979461 - DNA, 25 bp, Homo sapien
tagaggcacccaaagagagaatgag

SEQ ID NO: 4979462 - DNA, 25 bp, Homo sapien
catccaagaggatggtcggctctgc

SEQ ID NO: 4979463 - DNA, 25 bp, Homo sapien
cccacttcagggtagatacacaaaa

SEQ ID NO: 4979464 - DNA, 25 bp, Homo sapien
aagcaggatcaatcccaaatgtccg

SEQ ID NO: 4979465 - DNA, 25 bp, Homo sapien
taccatacgattgggcaatcccact

SEQ ID NO: 4979466 - DNA, 25 bp, Homo sapien
gtccgtcaacgacaaatagataaag

SEQ ID NO: 4979467 - DNA, 25 bp, Homo sapien
cttgacgagcaaggtagacgaggct

SEQ ID NO: 4979468 - DNA, 25 bp, Homo sapien
tcctctaacgggcagaatgtcgctg

SEQ ID NO: 4979469 - DNA, 25 bp, Homo sapien
gctaacagatcttgagcgtaccagg

SEQ ID NO: 4979470 - DNA, 25 bp, Homo sapien
taataagcttgggttaggcgtccga

SEQ ID NO: 4979471 - DNA, 25 bp, Homo sapien
agtctccgacctccggggagccgag

SEQ ID NO: 4979472 - DNA, 25 bp, Homo sapien
cggggagccgagagcgggacgtggg

SEQ ID NO: 4979473 - DNA, 25 bp, Homo sapien
gacctccggggagccgagagcggga

SEQ ID NO: 4979474 - DNA, 25 bp, Homo sapien
tctccgacctccggggagccgagag

SEQ ID NO: 4979475 - DNA, 25 bp, Homo sapien
gagttgcacctagaacctaaaggca

SEQ ID NO: 4979476 - DNA, 25 bp, Homo sapien
cacgtggccgaagctgaatgatgta

SEQ ID NO: 4979477 - DNA, 25 bp, Homo sapien
gaatgatgtattcagggacacatag

SEQ ID NO: 4979478 - DNA, 25 bp, Homo sapien
tagactagacagtaagagttgcacc

SEQ ID NO: 4979479 - DNA, 25 bp, Homo sapien
taattcttcttcgtacttctggtag

SEQ ID NO: 4979480 - DNA, 25 bp, Homo sapien
tttctggcaccaagtttaattcttc

SEQ ID NO: 4979481 - DNA, 25 bp, Homo sapien
ttcttcttcgtacttctggtagtga

SEQ ID NO: 4979482 - DNA, 25 bp, Homo sapien
caggatttttctggcaccaagttta

SEQ ID NO: 4979483 - DNA, 25 bp, Homo sapien
cctgttgctgccttttgatagcctg

SEQ ID NO: 4979484 - DNA, 25 bp, Homo sapien
ctccttctcgttttcatcatagtgc

SEQ ID NO: 4979485 - DNA, 25 bp, Homo sapien
tgatagcctgattgtcaaccttctg

SEQ ID NO: 4979486 - DNA, 25 bp, Homo sapien
tggagtctcctttggtatccgcaaa

SEQ ID NO: 4979487 - DNA, 25 bp, Homo sapien
cctaactcagtgcaggtcctgttca

SEQ ID NO: 4979488 - DNA, 25 bp, Homo sapien
gaggaacatggagaggatatgggtg

SEQ ID NO: 4979489 - DNA, 25 bp, Homo sapien
cctggaagccctaactcagtgcagg

SEQ ID NO: 4979490 - DNA, 25 bp, Homo sapien
gaggatatgggtggatcaatatctt

SEQ ID NO: 4979491 - DNA, 25 bp, Homo sapien
atgatgaggtgacaaagagattctc

SEQ ID NO: 4979492 - DNA, 25 bp, Homo sapien
aatggagaccattatggatgatgag

SEQ ID NO: 4979493 - DNA, 25 bp, Homo sapien
gatgatgaggtgacaaagagattct

SEQ ID NO: 4979494 - DNA, 25 bp, Homo sapien
ccttggtggtctaaacggatgctgc

SEQ ID NO: 4979495 - DNA, 25 bp, Homo sapien
catctcccatggtgtgagcgtggct

SEQ ID NO: 4979496 - DNA, 25 bp, Homo sapien
tgcgacccaggacgagatgccttgt

SEQ ID NO: 4979497 - DNA, 25 bp, Homo sapien
tacaataagtcgttggaggaatgcc

SEQ ID NO: 4979498 - DNA, 25 bp, Homo sapien
gccacccgctctccaggaaaggcac

SEQ ID NO: 4979499 - DNA, 25 bp, Homo sapien
ctgttatgcaagcccgtgtgccagg

SEQ ID NO: 4979500 - DNA, 25 bp, Homo sapien
cggccacccgctctccaggaaaggc

SEQ ID NO: 4979501 - DNA, 25 bp, Homo sapien
tgttatgcaagcccgtgtgccaggg

SEQ ID NO: 4979502 - DNA, 25 bp, Homo sapien
gctgctgctgatggggttactaaag

SEQ ID NO: 4979503 - DNA, 25 bp, Homo sapien
tgctgctgctgatggggttactaaa

SEQ ID NO: 4979504 - DNA, 25 bp, Homo sapien
tgaagggttagatttttatgctgct

SEQ ID NO: 4979505 - DNA, 25 bp, Homo sapien
agggttagatttttatgctgctgct

SEQ ID NO: 4979506 - DNA, 25 bp, Homo sapien
ctgcgggtgagtgaaggacacatca

SEQ ID NO: 4979507 - DNA, 25 bp, Homo sapien
cagtgtttcaagtacaggcccacaa

SEQ ID NO: 4979508 - DNA, 25 bp, Homo sapien
gaatgtgtgtctcggtttccccatc

SEQ ID NO: 4979509 - DNA, 25 bp, Homo sapien
gaacgtgtgttcgtactccaggcta

SEQ ID NO: 4979510 - DNA, 25 bp, Homo sapien
gtaaataaaactggctggtgaatga

SEQ ID NO: 4979511 - DNA, 25 bp, Homo sapien
tgagtaaataaaactggctggtgaa

SEQ ID NO: 4979512 - DNA, 25 bp, Homo sapien
tgtgagtaaataaaactggctggtg

SEQ ID NO: 4979513 - DNA, 25 bp, Homo sapien
gagtaaataaaactggctggtgaat

SEQ ID NO: 4979514 - DNA, 25 bp, Homo sapien
gaacagctcgtctcagatgcttgca

SEQ ID NO: 4979515 - DNA, 25 bp, Homo sapien
gcttgcagatctttggttaatttag

SEQ ID NO: 4979516 - DNA, 25 bp, Homo sapien
gcacagacgtggatttctccagaga

SEQ ID NO: 4979517 - DNA, 25 bp, Homo sapien
gcaggcttctcgtgaggattcccgt

SEQ ID NO: 4979518 - DNA, 25 bp, Homo sapien
tgtgaagtcacgtggagtcagtgct

SEQ ID NO: 4979519 - DNA, 25 bp, Homo sapien
tgaagtcacgtggagtcagtgctgt

SEQ ID NO: 4979520 - DNA, 25 bp, Homo sapien
ctggtgtgaagtcacgtggagtcag

SEQ ID NO: 4979521 - DNA, 25 bp, Homo sapien
ggtgtgaagtcacgtggagtcagtg

SEQ ID NO: 4979522 - DNA, 25 bp, Homo sapien
cagaatccgtccctggtgctgcctt

SEQ ID NO: 4979523 - DNA, 25 bp, Homo sapien
taataaagctagtgggattcccttg

SEQ ID NO: 4979524 - DNA, 25 bp, Homo sapien
tgatgcttcaccgtgtcagaatccg

SEQ ID NO: 4979525 - DNA, 25 bp, Homo sapien
gacagcagaaccagccttgggactt

SEQ ID NO: 4979526 - DNA, 25 bp, Homo sapien
gagtgctccagatccctgaaatgcc

SEQ ID NO: 4979527 - DNA, 25 bp, Homo sapien
atgcccttcccagaccagtgacagg

SEQ ID NO: 4979528 - DNA, 25 bp, Homo sapien
gcatttttgggtgccatcgtgtgac

SEQ ID NO: 4979529 - DNA, 25 bp, Homo sapien
gggagtgctccagatccctgaaatg

SEQ ID NO: 4979530 - DNA, 25 bp, Homo sapien
aattggccaggaacttgattttctg

SEQ ID NO: 4979531 - DNA, 25 bp, Homo sapien
cctgatgcatgaaggatccccccat

SEQ ID NO: 4979532 - DNA, 25 bp, Homo sapien
aaccctgttgtcctgtggaaatctg

SEQ ID NO: 4979533 - DNA, 25 bp, Homo sapien
tgcatgaaggatccccccatgtcat

SEQ ID NO: 4979534 - DNA, 25 bp, Homo sapien
tgcaggtgcactgcctcgcggacag

SEQ ID NO: 4979535 - DNA, 25 bp, Homo sapien
tcaatatgtctctctccgatgggaa

SEQ ID NO: 4979536 - DNA, 25 bp, Homo sapien
taggatatggccacgcagccatcca

SEQ ID NO: 4979537 - DNA, 25 bp, Homo sapien
gggtggccagactcggcttctccag

SEQ ID NO: 4979538 - DNA, 25 bp, Homo sapien
ttcctggccaaatcgccaccagagt

SEQ ID NO: 4979539 - DNA, 25 bp, Homo sapien
gcaggcaccctttgtcagcagacat

SEQ ID NO: 4979540 - DNA, 25 bp, Homo sapien
tcgtgtggcaggaccctttagcttc

SEQ ID NO: 4979541 - DNA, 25 bp, Homo sapien
gacatctgtcatcaacaagagaagc

SEQ ID NO: 4979542 - DNA, 25 bp, Homo sapien
cccgcagactgtccgcagggtctgg

SEQ ID NO: 4979543 - DNA, 25 bp, Homo sapien
ggccccgtgcagatggacatttcct

SEQ ID NO: 4979544 - DNA, 25 bp, Homo sapien
tttcttctggggtgctttaaccatc

SEQ ID NO: 4979545 - DNA, 25 bp, Homo sapien
gtgcagatggacatttcctcccctc

SEQ ID NO: 4979546 - DNA, 25 bp, Homo sapien
cttgctaagagaggcctaatgaggg

SEQ ID NO: 4979547 - DNA, 25 bp, Homo sapien
cctaatgaggggctttggaacacat

SEQ ID NO: 4979548 - DNA, 25 bp, Homo sapien
gtttgcttgctaagagaggcctaat

SEQ ID NO: 4979549 - DNA, 25 bp, Homo sapien
atgctgcttccaacaccacggctcc

SEQ ID NO: 4979550 - DNA, 25 bp, Homo sapien
ggccaaggtcaaatataggatcagt

SEQ ID NO: 4979551 - DNA, 25 bp, Homo sapien
caaggccaaggtcaaatataggatc

SEQ ID NO: 4979552 - DNA, 25 bp, Homo sapien
tgtgcaaaccataacttccctccat

SEQ ID NO: 4979553 - DNA, 25 bp, Homo sapien
aacttccctccatttgtgcccaagg

SEQ ID NO: 4979554 - DNA, 25 bp, Homo sapien
acctggacctgtcattgctctgtct

SEQ ID NO: 4979555 - DNA, 25 bp, Homo sapien
tctgcaggcattgcgcggcaggaca

SEQ ID NO: 4979556 - DNA, 25 bp, Homo sapien
tctgggtcattcgtatctttgtcat

SEQ ID NO: 4979557 - DNA, 25 bp, Homo sapien
ctttctgggtcattcgtatctttgt

SEQ ID NO: 4979558 - DNA, 25 bp, Homo sapien
tggggtctacgtgtctgaccagtcc

SEQ ID NO: 4979559 - DNA, 25 bp, Homo sapien
ctcccactgggtccgaatatccctg

SEQ ID NO: 4979560 - DNA, 25 bp, Homo sapien
gggtccgaatatccctgctggctct

SEQ ID NO: 4979561 - DNA, 25 bp, Homo sapien
ctggctctggggtctacgtgtctga

SEQ ID NO: 4979562 - DNA, 25 bp, Homo sapien
caggcgggttgggaagctgcctaca

SEQ ID NO: 4979563 - DNA, 25 bp, Homo sapien
ctgtggggtatctgctccatccagg

SEQ ID NO: 4979564 - DNA, 25 bp, Homo sapien
cattgcttgctgtggggtatctgct

SEQ ID NO: 4979565 - DNA, 25 bp, Homo sapien
agctgcctacatgaacattgcttgc

SEQ ID NO: 4979566 - DNA, 25 bp, Homo sapien
gggctgcattcctatctaagaccag

SEQ ID NO: 4979567 - DNA, 25 bp, Homo sapien
gctgcattcctatctaagaccagcc

SEQ ID NO: 4979568 - DNA, 25 bp, Homo sapien
tgcattcctatctaagaccagccct

SEQ ID NO: 4979569 - DNA, 25 bp, Homo sapien
ctgggctgcattcctatctaagacc

SEQ ID NO: 4979570 - DNA, 25 bp, Homo sapien
cagatcacccgggtgaaaaatacca

SEQ ID NO: 4979571 - DNA, 25 bp, Homo sapien
cagctcagatcacccgggtgaaaaa

SEQ ID NO: 4979572 - DNA, 25 bp, Homo sapien
tgccagcagctcagatcacccgggt

SEQ ID NO: 4979573 - DNA, 25 bp, Homo sapien
cagcagctcagatcacccgggtgaa

SEQ ID NO: 4979574 - DNA, 25 bp, Homo sapien
aaggaagggccgtgattcccagcag

SEQ ID NO: 4979575 - DNA, 25 bp, Homo sapien
ccttttccccggctgtcaggatgag

SEQ ID NO: 4979576 - DNA, 25 bp, Homo sapien
tatatcagcaccaaatgatgcccag

SEQ ID NO: 4979577 - DNA, 25 bp, Homo sapien
tcctgtgcacaggtctgaggagtgc

SEQ ID NO: 4979578 - DNA, 25 bp, Homo sapien
ccacgcgcccctcatccaaagaaag

SEQ ID NO: 4979579 - DNA, 25 bp, Homo sapien
caaagaaagactcagtccctgcgcc

SEQ ID NO: 4979580 - DNA, 25 bp, Homo sapien
tccacgcgcccctcatccaaagaaa

SEQ ID NO: 4979581 - DNA, 25 bp, Homo sapien
aagactcagtccctgcgcccccagg

SEQ ID NO: 4979582 - DNA, 25 bp, Homo sapien
aaggcggcgcggtgcttgcgcagca

SEQ ID NO: 4979583 - DNA, 25 bp, Homo sapien
ctgagcaccgagaaggcggcgcggt

SEQ ID NO: 4979584 - DNA, 25 bp, Homo sapien
acgctgtgcgctcccaggctgagca

SEQ ID NO: 4979585 - DNA, 25 bp, Homo sapien
cagcggcttgttgtactcgtcgtcc

SEQ ID NO: 4979586 - DNA, 25 bp, Homo sapien
ctccgagggtgcgcggtccccgcct

SEQ ID NO: 4979587 - DNA, 25 bp, Homo sapien
tccgagggtgcgcggtccccgcctg

SEQ ID NO: 4979588 - DNA, 25 bp, Homo sapien
cgagggtgcgcggtccccgcctgcg

SEQ ID NO: 4979589 - DNA, 25 bp, Homo sapien
gagggtgcgcggtccccgcctgcgc

SEQ ID NO: 4979590 - DNA, 25 bp, Homo sapien
ctgcacccgcgccgcccggggcccg

SEQ ID NO: 4979591 - DNA, 25 bp, Homo sapien
ccagggcgctcttcttccgccactt

SEQ ID NO: 4979592 - DNA, 25 bp, Homo sapien
gcgctcttcttccgccacttggtcc

SEQ ID NO: 4979593 - DNA, 25 bp, Homo sapien
agggcgctcttcttccgccacttgg

SEQ ID NO: 4979594 - DNA, 25 bp, Homo sapien
gggcgctcttcttccgccacttggt

SEQ ID NO: 4979595 - DNA, 25 bp, Homo sapien
agggcgcagcgggttggagctcggg

SEQ ID NO: 4979596 - DNA, 25 bp, Homo sapien
gaagcagaaagacatgcaggagtgt

SEQ ID NO: 4979597 - DNA, 25 bp, Homo sapien
ctgagcaaagcctagacccaggtgc

SEQ ID NO: 4979598 - DNA, 25 bp, Homo sapien
cagctgagcggctgatgaggagggc

SEQ ID NO: 4979599 - DNA, 25 bp, Homo sapien
caggcaggcagtgcccagacaccag

SEQ ID NO: 4979600 - DNA, 25 bp, Homo sapien
tctctccaacgcagtggcctcctgt

SEQ ID NO: 4979601 - DNA, 25 bp, Homo sapien
ctctggggggctgcgttgtgtggcc

SEQ ID NO: 4979602 - DNA, 25 bp, Homo sapien
gctgcgttgtgtggccacctctctc

SEQ ID NO: 4979603 - DNA, 25 bp, Homo sapien
ctctcggggccagccaagtacttgg

SEQ ID NO: 4979604 - DNA, 25 bp, Homo sapien
tgcttcttcttgtgtatgctgtcac

SEQ ID NO: 4979605 - DNA, 25 bp, Homo sapien
ttgacctgcgactcggtcatgccca

SEQ ID NO: 4979606 - DNA, 25 bp, Homo sapien
aaggtgggccgggtgtgcttcttct

SEQ ID NO: 4979607 - DNA, 25 bp, Homo sapien
caggaacgtcccctgcaggttggac

SEQ ID NO: 4979608 - DNA, 25 bp, Homo sapien
tcgggtactcgttcccagccttgga

SEQ ID NO: 4979609 - DNA, 25 bp, Homo sapien
ccagcggcgtgttgttcagcaggaa

SEQ ID NO: 4979610 - DNA, 25 bp, Homo sapien
tgctcaggatgtccgtgatcccgtg

SEQ ID NO: 4979611 - DNA, 25 bp, Homo sapien
gaatggtctatacatcagagtaggg

SEQ ID NO: 4979612 - DNA, 25 bp, Homo sapien
agactgcagcattctctaggcatcg

SEQ ID NO: 4979613 - DNA, 25 bp, Homo sapien
ctaggcatcgtgtggagaccccaaa

SEQ ID NO: 4979614 - DNA, 25 bp, Homo sapien
aaagcgtctaatgtgcagactgcag

SEQ ID NO: 4979615 - DNA, 25 bp, Homo sapien
tccttgggccgtcaccgaatcggtc

SEQ ID NO: 4979616 - DNA, 25 bp, Homo sapien
tctagtggaacttaaggctcctccc

SEQ ID NO: 4979617 - DNA, 25 bp, Homo sapien
taagtgtgtcccgaggacactcccg

SEQ ID NO: 4979618 - DNA, 25 bp, Homo sapien
ctcaggcccggagctagagcttcct

SEQ ID NO: 4979619 - DNA, 25 bp, Homo sapien
ctggctcgcctctccaagaggccac

SEQ ID NO: 4979620 - DNA, 25 bp, Homo sapien
gctcgcctctccaagaggccacagg

SEQ ID NO: 4979621 - DNA, 25 bp, Homo sapien
ggctcgcctctccaagaggccacag

SEQ ID NO: 4979622 - DNA, 25 bp, Homo sapien
tggctcgcctctccaagaggccaca

SEQ ID NO: 4979623 - DNA, 25 bp, Homo sapien
gaccctgggtggtcctgacttctaa

SEQ ID NO: 4979624 - DNA, 25 bp, Homo sapien
ttcactgaaagacaggccacagctc

SEQ ID NO: 4979625 - DNA, 25 bp, Homo sapien
gctgcctggacttagagcaccaagt

SEQ ID NO: 4979626 - DNA, 25 bp, Homo sapien
gctgcgctgtcaggctctgtacgta

SEQ ID NO: 4979627 - DNA, 25 bp, Homo sapien
gacatgctggtgcaatcctgggtca

SEQ ID NO: 4979628 - DNA, 25 bp, Homo sapien
gggtcctcgcctcagattcttaagt

SEQ ID NO: 4979629 - DNA, 25 bp, Homo sapien
tccctttgagtcctacaggtaagcc

SEQ ID NO: 4979630 - DNA, 25 bp, Homo sapien
ggaaccccgaatgcactcttcaagg

SEQ ID NO: 4979631 - DNA, 25 bp, Homo sapien
tgtcacaagtggaatggaggtatgt

SEQ ID NO: 4979632 - DNA, 25 bp, Homo sapien
gaatgtcatgtagagcgatctggga

SEQ ID NO: 4979633 - DNA, 25 bp, Homo sapien
gatctgggaggagcgtcaccaggga

SEQ ID NO: 4979634 - DNA, 25 bp, Homo sapien
tgaggacatggcttaagattaaggt

SEQ ID NO: 4979635 - DNA, 25 bp, Homo sapien
cttttgtgtcctggttccgacagat

SEQ ID NO: 4979636 - DNA, 25 bp, Homo sapien
ggctctcctgcgcttgttttctatc

SEQ ID NO: 4979637 - DNA, 25 bp, Homo sapien
tgtcattgcaagaggcaggattgaa

SEQ ID NO: 4979638 - DNA, 25 bp, Homo sapien
ttccgacagatcagctgtcattgca

SEQ ID NO: 4979639 - DNA, 25 bp, Homo sapien
acagtcagtcattcatgccaagagg

SEQ ID NO: 4979640 - DNA, 25 bp, Homo sapien
ccaagaggggactagcaggagtccc

SEQ ID NO: 4979641 - DNA, 25 bp, Homo sapien
ggaggtcatgcgtctacagtcagtc

SEQ ID NO: 4979642 - DNA, 25 bp, Homo sapien
tgcgtctacagtcagtcattcatgc

SEQ ID NO: 4979643 - DNA, 25 bp, Homo sapien
gaggtcatgccgtcagcccagagga

SEQ ID NO: 4979644 - DNA, 25 bp, Homo sapien
agcccagaggaatgtgtgcaccgct

SEQ ID NO: 4979645 - DNA, 25 bp, Homo sapien
tgcaccgctgcggtggccctcaggt

SEQ ID NO: 4979646 - DNA, 25 bp, Homo sapien
ccagaggaatgtgtgcaccgctgcg

SEQ ID NO: 4979647 - DNA, 25 bp, Homo sapien
caggggttgggtgtcgaggtgtgat

SEQ ID NO: 4979648 - DNA, 25 bp, Homo sapien
aggggttgggtgtcgaggtgtgatc

SEQ ID NO: 4979649 - DNA, 25 bp, Homo sapien
tgctggcagctcaggccgaatctga

SEQ ID NO: 4979650 - DNA, 25 bp, Homo sapien
ggagtcacttagaatgcaaaagtgc

SEQ ID NO: 4979651 - DNA, 25 bp, Homo sapien
gaatgcaaaagtgcaacgtccagca

SEQ ID NO: 4979652 - DNA, 25 bp, Homo sapien
ttgcagcccgacttcctgagatgcc

SEQ ID NO: 4979653 - DNA, 25 bp, Homo sapien
gcagatccttgtacttaggaagagc

SEQ ID NO: 4979654 - DNA, 25 bp, Homo sapien
agatccttgtacttaggaagagcca

SEQ ID NO: 4979655 - DNA, 25 bp, Homo sapien
gatccttgtacttaggaagagccat

SEQ ID NO: 4979656 - DNA, 25 bp, Homo sapien
cagatccttgtacttaggaagagcc

SEQ ID NO: 4979657 - DNA, 25 bp, Homo sapien
gggccctcaaccgtcttctctgtag

SEQ ID NO: 4979658 - DNA, 25 bp, Homo sapien
ccgtgaatgatgaggatcgactgta

SEQ ID NO: 4979659 - DNA, 25 bp, Homo sapien
gagtggacgaattcgcaaatgcaga

SEQ ID NO: 4979660 - DNA, 25 bp, Homo sapien
gccaaagcacggtgagtgccagctt

SEQ ID NO: 4979661 - DNA, 25 bp, Homo sapien
ggagatggtcgcacagcgtcttcat

SEQ ID NO: 4979662 - DNA, 25 bp, Homo sapien
gatggtcgcacagcgtcttcatgtc

SEQ ID NO: 4979663 - DNA, 25 bp, Homo sapien
gtcgcacagcgtcttcatgtccctt

SEQ ID NO: 4979664 - DNA, 25 bp, Homo sapien
tggtcgcacagcgtcttcatgtccc

SEQ ID NO: 4979665 - DNA, 25 bp, Homo sapien
tgcctcgagacacaacaacaagttg

SEQ ID NO: 4979666 - DNA, 25 bp, Homo sapien
gcggtccctgataagtggatattat

SEQ ID NO: 4979667 - DNA, 25 bp, Homo sapien
caagttgtttgtcccacatcatgct

SEQ ID NO: 4979668 - DNA, 25 bp, Homo sapien
tcttacaaaaccgtgcggtccctga

SEQ ID NO: 4979669 - DNA, 25 bp, Homo sapien
ccgagaggctactccaaggagagcg

SEQ ID NO: 4979670 - DNA, 25 bp, Homo sapien
aggctactccaaggagagcggctcg

SEQ ID NO: 4979671 - DNA, 25 bp, Homo sapien
ctcccgagaggctactccaaggaga

SEQ ID NO: 4979672 - DNA, 25 bp, Homo sapien
agaggctactccaaggagagcggct

SEQ ID NO: 4979673 - DNA, 25 bp, Homo sapien
cttcctgccctctatcaggtccggc

SEQ ID NO: 4979674 - DNA, 25 bp, Homo sapien
cctctatcaggtccggctgtaggcc

SEQ ID NO: 4979675 - DNA, 25 bp, Homo sapien
tatcaggtccggctgtaggccactc

SEQ ID NO: 4979676 - DNA, 25 bp, Homo sapien
aggctggcccgcttcactatctgcg

SEQ ID NO: 4979677 - DNA, 25 bp, Homo sapien
gaaagcaggacagatcgcaaagacg

SEQ ID NO: 4979678 - DNA, 25 bp, Homo sapien
gccacacggaggtggcagacacact

SEQ ID NO: 4979679 - DNA, 25 bp, Homo sapien
caggcagaagatcgaaaggaggcca

SEQ ID NO: 4979680 - DNA, 25 bp, Homo sapien
aagacgggcagaacacaggcagaag

SEQ ID NO: 4979681 - DNA, 25 bp, Homo sapien
cataaagtaatcaatatcgacctcc

SEQ ID NO: 4979682 - DNA, 25 bp, Homo sapien
gtgtttcataaagtaatcaatatcg

SEQ ID NO: 4979683 - DNA, 25 bp, Homo sapien
aagtaatcaatatcgacctccagct

SEQ ID NO: 4979684 - DNA, 25 bp, Homo sapien
taatcaatatcgacctccagctcac

SEQ ID NO: 4979685 - DNA, 25 bp, Homo sapien
cctccaggggcccctctacagtcac

SEQ ID NO: 4979686 - DNA, 25 bp, Homo sapien
ggatcctccaggggcccctctacag

SEQ ID NO: 4979687 - DNA, 25 bp, Homo sapien
gatcctccaggggcccctctacagt

SEQ ID NO: 4979688 - DNA, 25 bp, Homo sapien
tgggatcctccaggggcccctctac

SEQ ID NO: 4979689 - DNA, 25 bp, Homo sapien
cctgggcggcatcggcgctggacaa

SEQ ID NO: 4979690 - DNA, 25 bp, Homo sapien
tctgtcgaaccaccttgcgaatgat

SEQ ID NO: 4979691 - DNA, 25 bp, Homo sapien
gctcctgggcggcatcggcgctgga

SEQ ID NO: 4979692 - DNA, 25 bp, Homo sapien
ggcatcggcgctggacaagtctatc

SEQ ID NO: 4979693 - DNA, 25 bp, Homo sapien
tgttgccctgctcatccgtgaattg

SEQ ID NO: 4979694 - DNA, 25 bp, Homo sapien
ttggtgacaatgttgccctgctcat

SEQ ID NO: 4979695 - DNA, 25 bp, Homo sapien
ctgctcccctggaatattctgaaac

SEQ ID NO: 4979696 - DNA, 25 bp, Homo sapien
ctgctcatccgtgaattgctcctct

SEQ ID NO: 4979697 - DNA, 25 bp, Homo sapien
ctggtggagatggtctcctcgtcgt

SEQ ID NO: 4979698 - DNA, 25 bp, Homo sapien
cctggtggagatggtctcctcgtcg

SEQ ID NO: 4979699 - DNA, 25 bp, Homo sapien
cctcgtcgtcactgaggccctcgct

SEQ ID NO: 4979700 - DNA, 25 bp, Homo sapien
ttcaggaagacccgccgccggacca

SEQ ID NO: 4979701 - DNA, 25 bp, Homo sapien
tggtggatgtgctttagcacaaagc

SEQ ID NO: 4979702 - DNA, 25 bp, Homo sapien
aatgtgcatcacgttctgacagctg

SEQ ID NO: 4979703 - DNA, 25 bp, Homo sapien
gatgtgctttagcacaaagcacagg

SEQ ID NO: 4979704 - DNA, 25 bp, Homo sapien
atcacgttctgacagctgaccagga

SEQ ID NO: 4979705 - DNA, 25 bp, Homo sapien
tctcattctccactgggactcctga

SEQ ID NO: 4979706 - DNA, 25 bp, Homo sapien
tctgtgggcaggacaccgaatggcc

SEQ ID NO: 4979707 - DNA, 25 bp, Homo sapien
caccgaatggccctctcggctgaag

SEQ ID NO: 4979708 - DNA, 25 bp, Homo sapien
gcagcccggcccaagtgcccttctg

SEQ ID NO: 4979709 - DNA, 25 bp, Homo sapien
cctggagtcccggccccttccgatg

SEQ ID NO: 4979710 - DNA, 25 bp, Homo sapien
cacgcagctcccctcgggctctcac

SEQ ID NO: 4979711 - DNA, 25 bp, Homo sapien
agtcccggccccttccgatgctggg

SEQ ID NO: 4979712 - DNA, 25 bp, Homo sapien
ctcagggcttgagtgcctgagaggc

SEQ ID NO: 4979713 - DNA, 25 bp, Homo sapien
tcagcctcgggctgttctgtccacg

SEQ ID NO: 4979714 - DNA, 25 bp, Homo sapien
cgggctgttctgtccacgtgtgctc

SEQ ID NO: 4979715 - DNA, 25 bp, Homo sapien
tccctgtcggcctgggagctctcag

SEQ ID NO: 4979716 - DNA, 25 bp, Homo sapien
tgcaccacttgggtgaaggtgttct

SEQ ID NO: 4979717 - DNA, 25 bp, Homo sapien
gaccttctcgtactcctgagatcca

SEQ ID NO: 4979718 - DNA, 25 bp, Homo sapien
gaatgagtgtggaccttgcgtgacc

SEQ ID NO: 4979719 - DNA, 25 bp, Homo sapien
gggctctagcccttcagtcatggta

SEQ ID NO: 4979720 - DNA, 25 bp, Homo sapien
tcttgccaggaaccttgtgcagcat

SEQ ID NO: 4979721 - DNA, 25 bp, Homo sapien
tgcaggtatgagacaatcgagccgt

SEQ ID NO: 4979722 - DNA, 25 bp, Homo sapien
acaatcgagccgtctgcatcccagt

SEQ ID NO: 4979723 - DNA, 25 bp, Homo sapien
tgagacaatcgagccgtctgcatcc

SEQ ID NO: 4979724 - DNA, 25 bp, Homo sapien
ggtatgagacaatcgagccgtctgc

SEQ ID NO: 4979725 - DNA, 25 bp, Homo sapien
tcctggaaggtgctagcctggcgtc

SEQ ID NO: 4979726 - DNA, 25 bp, Homo sapien
tcagcgtgcctggatgtgtgtctcc

SEQ ID NO: 4979727 - DNA, 25 bp, Homo sapien
tcctcctagacctacagctgtgtgc

SEQ ID NO: 4979728 - DNA, 25 bp, Homo sapien
tgacttctgaacataggagcacccc

SEQ ID NO: 4979729 - DNA, 25 bp, Homo sapien
tccccatgagaaggctgaccaaggt

SEQ ID NO: 4979730 - DNA, 25 bp, Homo sapien
gaaccacgcttcttgcaggtagaga

SEQ ID NO: 4979731 - DNA, 25 bp, Homo sapien
caaaataggcctagagcccaggcgt

SEQ ID NO: 4979732 - DNA, 25 bp, Homo sapien
gtttcattcaatgctggcacccagg

SEQ ID NO: 4979733 - DNA, 25 bp, Homo sapien
tggggtgggggcctggaacagctgc

SEQ ID NO: 4979734 - DNA, 25 bp, Homo sapien
cttggggtgggggcctggaacagct

SEQ ID NO: 4979735 - DNA, 25 bp, Homo sapien
ctgaccagtcctgagctccttgggg

SEQ ID NO: 4979736 - DNA, 25 bp, Homo sapien
accagtcctgagctccttggggtgg

SEQ ID NO: 4979737 - DNA, 25 bp, Homo sapien
caagaaccatgtccttactttaggg

SEQ ID NO: 4979738 - DNA, 25 bp, Homo sapien
aaactcagcaagccaaggtgacctg

SEQ ID NO: 4979739 - DNA, 25 bp, Homo sapien
ggcacaagaaccatgtccttacttt

SEQ ID NO: 4979740 - DNA, 25 bp, Homo sapien
acctggaggaaaggggattcctctg

SEQ ID NO: 4979741 - DNA, 25 bp, Homo sapien
tccgtcacctgactcacggtggggg

SEQ ID NO: 4979742 - DNA, 25 bp, Homo sapien
gactcctctccgtcacctgactcac

SEQ ID NO: 4979743 - DNA, 25 bp, Homo sapien
ggaatgtgtgattcgggcttgcccc

SEQ ID NO: 4979744 - DNA, 25 bp, Homo sapien
gggaatgtgtgattcgggcttgccc

SEQ ID NO: 4979745 - DNA, 25 bp, Homo sapien
catcctgcctcttagaacctggcag

SEQ ID NO: 4979746 - DNA, 25 bp, Homo sapien
tgccctgcacctgtcgcgtcatcct

SEQ ID NO: 4979747 - DNA, 25 bp, Homo sapien
cgtcatcctgcctcttagaacctgg

SEQ ID NO: 4979748 - DNA, 25 bp, Homo sapien
tgcacctgtcgcgtcatcctgcctc

SEQ ID NO: 4979749 - DNA, 25 bp, Homo sapien
gagtcctcagcagtgaccagagaag

SEQ ID NO: 4979750 - DNA, 25 bp, Homo sapien
tcagccttgctacactccagagagg

SEQ ID NO: 4979751 - DNA, 25 bp, Homo sapien
gacggccacctcattccagtactgg

SEQ ID NO: 4979752 - DNA, 25 bp, Homo sapien
tgttcaagcaaatcgataaggccat

SEQ ID NO: 4979753 - DNA, 25 bp, Homo sapien
agggaggcaggggacagcagctcgt

SEQ ID NO: 4979754 - DNA, 25 bp, Homo sapien
ctgcacgtagcggagaggaaagtgc

SEQ ID NO: 4979755 - DNA, 25 bp, Homo sapien
cacgtagcggagaggaaagtgcaca

SEQ ID NO: 4979756 - DNA, 25 bp, Homo sapien
gggaggcaggggacagcagctcgtc

SEQ ID NO: 4979757 - DNA, 25 bp, Homo sapien
aggcccaatgctcaggccttgtggc

SEQ ID NO: 4979758 - DNA, 25 bp, Homo sapien
acgcacgaacacacacatgcgggtg

SEQ ID NO: 4979759 - DNA, 25 bp, Homo sapien
acacatgcgggtgcggccacagaga

SEQ ID NO: 4979760 - DNA, 25 bp, Homo sapien
ctttccaagctccaggcccaatgct

SEQ ID NO: 4979761 - DNA, 25 bp, Homo sapien
ctgtgtgttcaacgtgcccggagcc

SEQ ID NO: 4979762 - DNA, 25 bp, Homo sapien
gtgtgttcaacgtgcccggagccat

SEQ ID NO: 4979763 - DNA, 25 bp, Homo sapien
tgtgtgttcaacgtgcccggagcca

SEQ ID NO: 4979764 - DNA, 25 bp, Homo sapien
tgacttgaggaattatatagctgac

SEQ ID NO: 4979765 - DNA, 25 bp, Homo sapien
actgaactccaagtcactgtacatg

SEQ ID NO: 4979766 - DNA, 25 bp, Homo sapien
ctgaactccaagtcactgtacatga

SEQ ID NO: 4979767 - DNA, 25 bp, Homo sapien
aactgtgacttgaggaattatatag

SEQ ID NO: 4979768 - DNA, 25 bp, Homo sapien
tagaagtctaggttactttggagat

SEQ ID NO: 4979769 - DNA, 25 bp, Homo sapien
catttttgaagttacgtgtgctagg

SEQ ID NO: 4979770 - DNA, 25 bp, Homo sapien
ctttaaagatgtggcatactttaaa

SEQ ID NO: 4979771 - DNA, 25 bp, Homo sapien
tacgtgtgctaggtatagaagtcta

SEQ ID NO: 4979772 - DNA, 25 bp, Homo sapien
tattaggtcacttgaaattgcccca

SEQ ID NO: 4979773 - DNA, 25 bp, Homo sapien
agtaatgtaatctcggtccactgca

SEQ ID NO: 4979774 - DNA, 25 bp, Homo sapien
gagttgctcacgtgtttcctgtgca

SEQ ID NO: 4979775 - DNA, 25 bp, Homo sapien
taataatgtgccctgatagagttgc

SEQ ID NO: 4979776 - DNA, 25 bp, Homo sapien
aaggctaaggcggaggcgatgccca

SEQ ID NO: 4979777 - DNA, 25 bp, Homo sapien
gcagggctgcaaaggctaaggcgga

SEQ ID NO: 4979778 - DNA, 25 bp, Homo sapien
tgtggggacgcagttgctgatggca

SEQ ID NO: 4979779 - DNA, 25 bp, Homo sapien
cacgccctgtggggacgcagttgct

SEQ ID NO: 4979780 - DNA, 25 bp, Homo sapien
acttgttgctgacaaaccagacctc

SEQ ID NO: 4979781 - DNA, 25 bp, Homo sapien
tgttgctgacaaaccagacctccca

SEQ ID NO: 4979782 - DNA, 25 bp, Homo sapien
gaacttgttgctgacaaaccagacc

SEQ ID NO: 4979783 - DNA, 25 bp, Homo sapien
gaggaacttgttgctgacaaaccag

SEQ ID NO: 4979784 - DNA, 25 bp, Homo sapien
ctttgagggatgacgtattgtggga

SEQ ID NO: 4979785 - DNA, 25 bp, Homo sapien
ggaaggggttattggtgctgatgcc

SEQ ID NO: 4979786 - DNA, 25 bp, Homo sapien
gagggatgacgtattgtgggaaggg

SEQ ID NO: 4979787 - DNA, 25 bp, Homo sapien
ggctccggctcagtccccatctggt

SEQ ID NO: 4979788 - DNA, 25 bp, Homo sapien
gagtagtcgcggtcggtgtgccgcc

SEQ ID NO: 4979789 - DNA, 25 bp, Homo sapien
tcaagttgcggctctgtcggccgga

SEQ ID NO: 4979790 - DNA, 25 bp, Homo sapien
cattcatctgggagggtgacagcga

SEQ ID NO: 4979791 - DNA, 25 bp, Homo sapien
cagcatgttcacgatctcgccacgg

SEQ ID NO: 4979792 - DNA, 25 bp, Homo sapien
tagtgtttttgagtctgggaaactg

SEQ ID NO: 4979793 - DNA, 25 bp, Homo sapien
gcaaatgtaaacactcaatttccac

SEQ ID NO: 4979794 - DNA, 25 bp, Homo sapien
tgaaattcttggtccttgccagatg

SEQ ID NO: 4979795 - DNA, 25 bp, Homo sapien
tgtaagctaagaggagcactacaag

SEQ ID NO: 4979796 - DNA, 25 bp, Homo sapien
ttgcgttttggccttcacggatgac

SEQ ID NO: 4979797 - DNA, 25 bp, Homo sapien
ttttggccttcacggatgacccaga

SEQ ID NO: 4979798 - DNA, 25 bp, Homo sapien
tccaacagggagttgggattttcca

SEQ ID NO: 4979799 - DNA, 25 bp, Homo sapien
acactctgctccaacagggagttgg

SEQ ID NO: 4979800 - DNA, 25 bp, Homo sapien
atgtcttccacactgaactgcagct

SEQ ID NO: 4979801 - DNA, 25 bp, Homo sapien
ttgttattgctttagaaggaaaata

SEQ ID NO: 4979802 - DNA, 25 bp, Homo sapien
gcaataatgcagactgttagccaaa

SEQ ID NO: 4979803 - DNA, 25 bp, Homo sapien
aaagtgatggtgagaatcagaacac

SEQ ID NO: 4979804 - DNA, 25 bp, Homo sapien
tagcattagagtctaatttcaagga

SEQ ID NO: 4979805 - DNA, 25 bp, Homo sapien
tgagaccgaggtgctctgagataac

SEQ ID NO: 4979806 - DNA, 25 bp, Homo sapien
ggtgctctgagataacagccatctt

SEQ ID NO: 4979807 - DNA, 25 bp, Homo sapien
tgcccagctgagaccgaggtgctct

SEQ ID NO: 4979808 - DNA, 25 bp, Homo sapien
ccgaggtgctctgagataacagcca

SEQ ID NO: 4979809 - DNA, 25 bp, Homo sapien
gggtccttctcctatcttcggctcc

SEQ ID NO: 4979810 - DNA, 25 bp, Homo sapien
gtccttctcctatcttcggctccac

SEQ ID NO: 4979811 - DNA, 25 bp, Homo sapien
tgagaatgctgtatcgcagggccag

SEQ ID NO: 4979812 - DNA, 25 bp, Homo sapien
cggggtccttctcctatcttcggct

SEQ ID NO: 4979813 - DNA, 25 bp, Homo sapien
tgttcacggcaacctaagaggtggg

SEQ ID NO: 4979814 - DNA, 25 bp, Homo sapien
gaagctgaagaagcgcacatgcgtt

SEQ ID NO: 4979815 - DNA, 25 bp, Homo sapien
cagtcgtaataacggcaagcccacg

SEQ ID NO: 4979816 - DNA, 25 bp, Homo sapien
gaaggctgaccccagtcctggtaaa

SEQ ID NO: 4979817 - DNA, 25 bp, Homo sapien
caggcttcccttctgtgagggccta

SEQ ID NO: 4979818 - DNA, 25 bp, Homo sapien
acatacgtggccaagactcctttgc

SEQ ID NO: 4979819 - DNA, 25 bp, Homo sapien
aggtatcgacaaatgaacatacgtg

SEQ ID NO: 4979820 - DNA, 25 bp, Homo sapien
ttcccttctgtgagggcctagcacc

SEQ ID NO: 4979821 - DNA, 25 bp, Homo sapien
atcgccttgcgcagaaacgacaggg

SEQ ID NO: 4979822 - DNA, 25 bp, Homo sapien
ttgcgcagaaacgacagggaccctc

SEQ ID NO: 4979823 - DNA, 25 bp, Homo sapien
tcccggctctcgactgctgtccctc

SEQ ID NO: 4979824 - DNA, 25 bp, Homo sapien
ctcgtacttcatcgccttgcgcaga

SEQ ID NO: 4979825 - DNA, 25 bp, Homo sapien
gaagtggaagctccgctgctgggca

SEQ ID NO: 4979826 - DNA, 25 bp, Homo sapien
tggccagacggttctcccgaaatga

SEQ ID NO: 4979827 - DNA, 25 bp, Homo sapien
tctcccgaaatgactggaagtggaa

SEQ ID NO: 4979828 - DNA, 25 bp, Homo sapien
ctttacaggcatggccagacggttc

SEQ ID NO: 4979829 - DNA, 25 bp, Homo sapien
aacggcaggacggtttgtcccagag

SEQ ID NO: 4979830 - DNA, 25 bp, Homo sapien
cggtttgtcccagaggcggtgcagg

SEQ ID NO: 4979831 - DNA, 25 bp, Homo sapien
gcaggacggtttgtcccagaggcgg

SEQ ID NO: 4979832 - DNA, 25 bp, Homo sapien
gacggtttgtcccagaggcggtgca

SEQ ID NO: 4979833 - DNA, 25 bp, Homo sapien
tctgtcatgcagtagcagcgcaggc

SEQ ID NO: 4979834 - DNA, 25 bp, Homo sapien
aatttggccatgtagggcactgcag

SEQ ID NO: 4979835 - DNA, 25 bp, Homo sapien
tccgaggacagtccgacagccaaaa

SEQ ID NO: 4979836 - DNA, 25 bp, Homo sapien
tgtacagcagggtggcaaagttcac

SEQ ID NO: 4979837 - DNA, 25 bp, Homo sapien
tggcagagacattggtggtgaagtt

SEQ ID NO: 4979838 - DNA, 25 bp, Homo sapien
cgttggcatatacaagtttggtggt

SEQ ID NO: 4979839 - DNA, 25 bp, Homo sapien
tttggtggttcctgttatgtcttcc

SEQ ID NO: 4979840 - DNA, 25 bp, Homo sapien
tgaagttggcgcactcgttggcata

SEQ ID NO: 4979841 - DNA, 25 bp, Homo sapien
aggagcttagtgacaagctcatccg

SEQ ID NO: 4979842 - DNA, 25 bp, Homo sapien
gaggtagtgggatccgaagcccaat

SEQ ID NO: 4979843 - DNA, 25 bp, Homo sapien
tgacgctgcaaagcaggcgcaggct

SEQ ID NO: 4979844 - DNA, 25 bp, Homo sapien
tgtccctcgggttgtcggtccagga

SEQ ID NO: 4979845 - DNA, 25 bp, Homo sapien
cctggcagagccgtgacatgatcac

SEQ ID NO: 4979846 - DNA, 25 bp, Homo sapien
ccgatggtgtcgtagtcctggcaga

SEQ ID NO: 4979847 - DNA, 25 bp, Homo sapien
tggtgacggcattctccgggaacgt

SEQ ID NO: 4979848 - DNA, 25 bp, Homo sapien
tgatgattcggcacaccctcttctt

SEQ ID NO: 4979849 - DNA, 25 bp, Homo sapien
cgttttcgctcctcagaaccacgag

SEQ ID NO: 4979850 - DNA, 25 bp, Homo sapien
gatccaggtagctctctccatagcg

SEQ ID NO: 4979851 - DNA, 25 bp, Homo sapien
tgtgctccttccacacggagccgtt

SEQ ID NO: 4979852 - DNA, 25 bp, Homo sapien
ccatcccgttgaggatctgatccag

SEQ ID NO: 4979853 - DNA, 25 bp, Homo sapien
ctgcgcacgtccgtggcgggatcac

SEQ ID NO: 4979854 - DNA, 25 bp, Homo sapien
gcaggccgttgtggcgacttcctct

SEQ ID NO: 4979855 - DNA, 25 bp, Homo sapien
accccgggcgtcaaccatgaagctc

SEQ ID NO: 4979856 - DNA, 25 bp, Homo sapien
gatcaccactcgcaggccgttgtgg

SEQ ID NO: 4979857 - DNA, 25 bp, Homo sapien
gggagtcctcatcatactctttaga

SEQ ID NO: 4979858 - DNA, 25 bp, Homo sapien
agtcctcatcatactctttagatgc

SEQ ID NO: 4979859 - DNA, 25 bp, Homo sapien
gagtcctcatcatactctttagatg

SEQ ID NO: 4979860 - DNA, 25 bp, Homo sapien
ctggccaccgggctgatgttgtctg

SEQ ID NO: 4979861 - DNA, 25 bp, Homo sapien
caagagttgaagacagtgggctggt

SEQ ID NO: 4979862 - DNA, 25 bp, Homo sapien
gactgcgccaccacaggaaagggcc

SEQ ID NO: 4979863 - DNA, 25 bp, Homo sapien
gacagtgggctggtcaaggacccac

SEQ ID NO: 4979864 - DNA, 25 bp, Homo sapien
tgggctgcatccaaggactgcgcca

SEQ ID NO: 4979865 - DNA, 25 bp, Homo sapien
gacctgatcaccactgtctcaggca

SEQ ID NO: 4979866 - DNA, 25 bp, Homo sapien
cctgatcaccactgtctcaggcatg

SEQ ID NO: 4979867 - DNA, 25 bp, Homo sapien
ctgatcaccactgtctcaggcatgg

SEQ ID NO: 4979868 - DNA, 25 bp, Homo sapien
catcttcttcaacttttggatgaga

SEQ ID NO: 4979869 - DNA, 25 bp, Homo sapien
ttcaacttttggatgagaagttgag

SEQ ID NO: 4979870 - DNA, 25 bp, Homo sapien
cgtgctgccacgctcagctattttt

SEQ ID NO: 4979871 - DNA, 25 bp, Homo sapien
tacagatgcgtgctgccacgctcag

SEQ ID NO: 4979872 - DNA, 25 bp, Homo sapien
acttggtctagcttcggcacaaaat

SEQ ID NO: 4979873 - DNA, 25 bp, Homo sapien
tcaacatccctggaatcccgcctct

SEQ ID NO: 4979874 - DNA, 25 bp, Homo sapien
tagcttcggcacaaaatccagcagc

SEQ ID NO: 4979875 - DNA, 25 bp, Homo sapien
tggaatcccgcctctcagccttgaa

SEQ ID NO: 4979876 - DNA, 25 bp, Homo sapien
gagcaatgtctttgcccagtcctgg

SEQ ID NO: 4979877 - DNA, 25 bp, Homo sapien
gagactgggagcaatgtctttgccc

SEQ ID NO: 4979878 - DNA, 25 bp, Homo sapien
ttcgcttagttccaattcaaaacag

SEQ ID NO: 4979879 - DNA, 25 bp, Homo sapien
cagaaagaactttgttcgcttagtt

SEQ ID NO: 4979880 - DNA, 25 bp, Homo sapien
gaggcatatattatccaaaggagca

SEQ ID NO: 4979881 - DNA, 25 bp, Homo sapien
ggaagggaccactgagctgatccag

SEQ ID NO: 4979882 - DNA, 25 bp, Homo sapien
gagcagaattgaaagaaggaccaca

SEQ ID NO: 4979883 - DNA, 25 bp, Homo sapien
cacattgaaggcagttaaagcgaga

SEQ ID NO: 4979884 - DNA, 25 bp, Homo sapien
tccgagacatccaggatctcatcaa

SEQ ID NO: 4979885 - DNA, 25 bp, Homo sapien
cttcatcttccgagacatccaggat

SEQ ID NO: 4979886 - DNA, 25 bp, Homo sapien
gacatccaggatctcatcaactgtc

SEQ ID NO: 4979887 - DNA, 25 bp, Homo sapien
tcttccgagacatccaggatctcat

SEQ ID NO: 4979888 - DNA, 25 bp, Homo sapien
gtttcatccgtgacgaccttgagca

SEQ ID NO: 4979889 - DNA, 25 bp, Homo sapien
gaccttgagcacgtcggtgacagaa

SEQ ID NO: 4979890 - DNA, 25 bp, Homo sapien
gacagaaatgtagcccaagcgcttg

SEQ ID NO: 4979891 - DNA, 25 bp, Homo sapien
cacgaaactggtttcatccgtgacg

SEQ ID NO: 4979892 - DNA, 25 bp, Homo sapien
ctatggccagaggtgtggttccatc

SEQ ID NO: 4979893 - DNA, 25 bp, Homo sapien
gaagcaccgtttttcagaagcagag

SEQ ID NO: 4979894 - DNA, 25 bp, Homo sapien
cagaagcagagtcacgatgtctgtg

SEQ ID NO: 4979895 - DNA, 25 bp, Homo sapien
tggggaagcaccgtttttcagaagc

SEQ ID NO: 4979896 - DNA, 25 bp, Homo sapien
ttcagaagcagagtcacgatgtctg

SEQ ID NO: 4979897 - DNA, 25 bp, Homo sapien
gggtcagtgcaggagtcggggctgg

SEQ ID NO: 4979898 - DNA, 25 bp, Homo sapien
gatgtggcatggagaagggtcagtg

SEQ ID NO: 4979899 - DNA, 25 bp, Homo sapien
cctgatgtggcatggagaagggtca

SEQ ID NO: 4979900 - DNA, 25 bp, Homo sapien
tgtggcatggagaagggtcagtgca

SEQ ID NO: 4979901 - DNA, 25 bp, Homo sapien
gatgtttccatagtgactggccaca

SEQ ID NO: 4979902 - DNA, 25 bp, Homo sapien
gcttgatgtttccatagtgactggc

SEQ ID NO: 4979903 - DNA, 25 bp, Homo sapien
tgatgtttccatagtgactggccac

SEQ ID NO: 4979904 - DNA, 25 bp, Homo sapien
tgcagcagaaacttcaccagcttga

SEQ ID NO: 4979905 - DNA, 25 bp, Homo sapien
gtttgatcagcacatctgccactgg

SEQ ID NO: 4979906 - DNA, 25 bp, Homo sapien
tggaacgtggccttcttgtgctacc

SEQ ID NO: 4979907 - DNA, 25 bp, Homo sapien
tggtggcgtccaccatgacgccgtg

SEQ ID NO: 4979908 - DNA, 25 bp, Homo sapien
ctgccactggaacgtggccttcttg

SEQ ID NO: 4979909 - DNA, 25 bp, Homo sapien
tctttctgcagatccttaggtcaat

SEQ ID NO: 4979910 - DNA, 25 bp, Homo sapien
taggcaccggcctatatttgggaaa

SEQ ID NO: 4979911 - DNA, 25 bp, Homo sapien
gacagaatgcactcctgaaggtagg

SEQ ID NO: 4979912 - DNA, 25 bp, Homo sapien
cagatgtgtgcgcaattttagaagg

SEQ ID NO: 4979913 - DNA, 25 bp, Homo sapien
cttgcaccgactcggcgtttgctga

SEQ ID NO: 4979914 - DNA, 25 bp, Homo sapien
ggttgccattggcttgtttcgagag

SEQ ID NO: 4979915 - DNA, 25 bp, Homo sapien
ccatactgcagcagactacgggcca

SEQ ID NO: 4979916 - DNA, 25 bp, Homo sapien
ttgtttcgagagcagcagagccacc

SEQ ID NO: 4979917 - DNA, 25 bp, Homo sapien
gggagccggcgtctgtagaagagcg

SEQ ID NO: 4979918 - DNA, 25 bp, Homo sapien
agccggcgtctgtagaagagcgatg

SEQ ID NO: 4979919 - DNA, 25 bp, Homo sapien
tcgggagccggcgtctgtagaagag

SEQ ID NO: 4979920 - DNA, 25 bp, Homo sapien
cagctgtcgggagccggcgtctgta

SEQ ID NO: 4979921 - DNA, 25 bp, Homo sapien
cttgacgatgtccaggttgttgtga

SEQ ID NO: 4979922 - DNA, 25 bp, Homo sapien
ccaggttgttgtgatggacggccac

SEQ ID NO: 4979923 - DNA, 25 bp, Homo sapien
ttgttgtgatggacggccacgtgca

SEQ ID NO: 4979924 - DNA, 25 bp, Homo sapien
agcttgacgatgtccaggttgttgt

SEQ ID NO: 4979925 - DNA, 25 bp, Homo sapien
ttttccggcagcattcgggtgtgcg

SEQ ID NO: 4979926 - DNA, 25 bp, Homo sapien
cttcccgtacttggccgccacgtgc

SEQ ID NO: 4979927 - DNA, 25 bp, Homo sapien
gccgccacgtgcagaggggtaaatc

SEQ ID NO: 4979928 - DNA, 25 bp, Homo sapien
gcattcgggtgtgcgtcccgctcca

SEQ ID NO: 4979929 - DNA, 25 bp, Homo sapien
ttggggttggcgttattttccagca

SEQ ID NO: 4979930 - DNA, 25 bp, Homo sapien
ccatgtttgtgtggccgatgcgagc

SEQ ID NO: 4979931 - DNA, 25 bp, Homo sapien
gaagggccaggactgtttccacatg

SEQ ID NO: 4979932 - DNA, 25 bp, Homo sapien
caccatgtttgtgtggccgatgcga

SEQ ID NO: 4979933 - DNA, 25 bp, Homo sapien
tttggctttgttctggagtaaatat

SEQ ID NO: 4979934 - DNA, 25 bp, Homo sapien
ctgccatgtgtagcggggtctccac

SEQ ID NO: 4979935 - DNA, 25 bp, Homo sapien
tctggctgccatgtgtagcggggtc

SEQ ID NO: 4979936 - DNA, 25 bp, Homo sapien
taaatatttggccacttccgtgtgc

SEQ ID NO: 4979937 - DNA, 25 bp, Homo sapien
cacgttggagacgttgggcgacgcc

SEQ ID NO: 4979938 - DNA, 25 bp, Homo sapien
tcttcacgatgggaaggtgccccat

SEQ ID NO: 4979939 - DNA, 25 bp, Homo sapien
cccgctgcaggaggttcttcacgat

SEQ ID NO: 4979940 - DNA, 25 bp, Homo sapien
aggttcttcacgatgggaaggtgcc

SEQ ID NO: 4979941 - DNA, 25 bp, Homo sapien
tcggtgaccgcgtcgatcgaggctc

SEQ ID NO: 4979942 - DNA, 25 bp, Homo sapien
gcagctccatgacacggacgtggtt

SEQ ID NO: 4979943 - DNA, 25 bp, Homo sapien
ggttctttttgcaggcgatgtgtaa

SEQ ID NO: 4979944 - DNA, 25 bp, Homo sapien
atcgaggctcccgtcttcagcagca

SEQ ID NO: 4979945 - DNA, 25 bp, Homo sapien
gtattgcaacaggagccggacacag

SEQ ID NO: 4979946 - DNA, 25 bp, Homo sapien
tttatccagaaggaccttagccacc

SEQ ID NO: 4979947 - DNA, 25 bp, Homo sapien
tgatgtcgtctatctctgcgtcgta

SEQ ID NO: 4979948 - DNA, 25 bp, Homo sapien
tccctgagccgccatgtgaattggg

SEQ ID NO: 4979949 - DNA, 25 bp, Homo sapien
cagcaggatctctgagattcgcacg

SEQ ID NO: 4979950 - DNA, 25 bp, Homo sapien
ttggttttggcttggattggtgccc

SEQ ID NO: 4979951 - DNA, 25 bp, Homo sapien
gcccatttcgagctgcacagtggag

SEQ ID NO: 4979952 - DNA, 25 bp, Homo sapien
cacagtggagaggtgtcaattcgtc

SEQ ID NO: 4979953 - DNA, 25 bp, Homo sapien
tcacgttgcccctgcgggaggcgat

SEQ ID NO: 4979954 - DNA, 25 bp, Homo sapien
accatgatcacgttgcccctgcggg

SEQ ID NO: 4979955 - DNA, 25 bp, Homo sapien
tttctatctgggctccccgatccag

SEQ ID NO: 4979956 - DNA, 25 bp, Homo sapien
cctgcgggaggcgatgtgcagtggc

SEQ ID NO: 4979957 - DNA, 25 bp, Homo sapien
ttctcgtagtgagccgcaatgtgca

SEQ ID NO: 4979958 - DNA, 25 bp, Homo sapien
tggctcctctgttgaggagcaactg

SEQ ID NO: 4979959 - DNA, 25 bp, Homo sapien
gcaactgggccacgttgaggttctc

SEQ ID NO: 4979960 - DNA, 25 bp, Homo sapien
ctgtggtgtgaaattgacgctggct

SEQ ID NO: 4979961 - DNA, 25 bp, Homo sapien
gcatctgccagggatttagagcggg

SEQ ID NO: 4979962 - DNA, 25 bp, Homo sapien
caagagcacgtttctgggcatctgc

SEQ ID NO: 4979963 - DNA, 25 bp, Homo sapien
cagggatttagagcggggctgtcca

SEQ ID NO: 4979964 - DNA, 25 bp, Homo sapien
aagagcacgtttctgggcatctgcc

SEQ ID NO: 4979965 - DNA, 25 bp, Homo sapien
ctgctgcagggctaccgccagaggc

SEQ ID NO: 4979966 - DNA, 25 bp, Homo sapien
agcaccgcagccgtgcgcgtgtcgt

SEQ ID NO: 4979967 - DNA, 25 bp, Homo sapien
gatgaggtgcgcgacgacgttctca

SEQ ID NO: 4979968 - DNA, 25 bp, Homo sapien
cccttggtgccgtagttgatgaggt

SEQ ID NO: 4979969 - DNA, 25 bp, Homo sapien
tggtggtgacgacatttttccaagg

SEQ ID NO: 4979970 - DNA, 25 bp, Homo sapien
cttccaagtggttctcttgtgctgc

SEQ ID NO: 4979971 - DNA, 25 bp, Homo sapien
tgtggctacattctggttagctcca

SEQ ID NO: 4979972 - DNA, 25 bp, Homo sapien
cttaaccacttccaagtggttctct

SEQ ID NO: 4979973 - DNA, 25 bp, Homo sapien
ggctacattctggttagctccattt

SEQ ID NO: 4979974 - DNA, 25 bp, Homo sapien
tagttgacaagctcccggaccacct

SEQ ID NO: 4979975 - DNA, 25 bp, Homo sapien
gacgttggctccatagttgacaagc

SEQ ID NO: 4979976 - DNA, 25 bp, Homo sapien
ctgtgactgggcgttgacgttggct

SEQ ID NO: 4979977 - DNA, 25 bp, Homo sapien
tgcccggctagagcagcgatgtgca

SEQ ID NO: 4979978 - DNA, 25 bp, Homo sapien
agggaacagaggcggtttcccactg

SEQ ID NO: 4979979 - DNA, 25 bp, Homo sapien
gaacagaggcggtttcccactgggc

SEQ ID NO: 4979980 - DNA, 25 bp, Homo sapien
cagaggcggtttcccactgggcccg

SEQ ID NO: 4979981 - DNA, 25 bp, Homo sapien
tacctttgacgccatcccagggata

SEQ ID NO: 4979982 - DNA, 25 bp, Homo sapien
gaaggcttgtcagcgagctggcctt

SEQ ID NO: 4979983 - DNA, 25 bp, Homo sapien
cccagggatacccacagaccacaag

SEQ ID NO: 4979984 - DNA, 25 bp, Homo sapien
agcgagctggccttccgcggacctg

SEQ ID NO: 4979985 - DNA, 25 bp, Homo sapien
tcaagaggctcacgtcaaaggtttc

SEQ ID NO: 4979986 - DNA, 25 bp, Homo sapien
ttcatagaagtccaaagagcctcca

SEQ ID NO: 4979987 - DNA, 25 bp, Homo sapien
ttttctagacaccaggacgctgagc

SEQ ID NO: 4979988 - DNA, 25 bp, Homo sapien
tccattgagaggcttggcacctgct

SEQ ID NO: 4979989 - DNA, 25 bp, Homo sapien
tccagtggagatgaaagctgtcccc

SEQ ID NO: 4979990 - DNA, 25 bp, Homo sapien
taacagcttaggtgctgagctccag

SEQ ID NO: 4979991 - DNA, 25 bp, Homo sapien
cctggcctaagttgtgggagtcaca

SEQ ID NO: 4979992 - DNA, 25 bp, Homo sapien
cattatgaggctcaagaaggcccct

SEQ ID NO: 4979993 - DNA, 25 bp, Homo sapien
gaggagattcggaaacagtcgaagc

SEQ ID NO: 4979994 - DNA, 25 bp, Homo sapien
cttgcaaaatcacaacctggggagg

SEQ ID NO: 4979995 - DNA, 25 bp, Homo sapien
agtcgaagcgctgaagcctcgtgtt

SEQ ID NO: 4979996 - DNA, 25 bp, Homo sapien
gaaacagtcgaagcgctgaagcctc

SEQ ID NO: 4979997 - DNA, 25 bp, Homo sapien
tgtgcagaagttcaaccaccatttt

SEQ ID NO: 4979998 - DNA, 25 bp, Homo sapien
cttggttgtcgtttctagaatgatt

SEQ ID NO: 4979999 - DNA, 25 bp, Homo sapien
cacatggccttccttagaagccaga

SEQ ID NO: 4980000 - DNA, 25 bp, Homo sapien
ccagatgcaagccattcaacccatt

SEQ ID NO: 4980001 - DNA, 25 bp, Homo sapien
agccagccttgcctcggtgctgacg

SEQ ID NO: 4980002 - DNA, 25 bp, Homo sapien
agccttgcctcggtgctgacggctg

SEQ ID NO: 4980003 - DNA, 25 bp, Homo sapien
tgacggctggggttttagtgcttac

SEQ ID NO: 4980004 - DNA, 25 bp, Homo sapien
cgggaagctgactcgcagtggcagc

SEQ ID NO: 4980005 - DNA, 25 bp, Homo sapien
tgaatgcatcaaagccacaaaacca

SEQ ID NO: 4980006 - DNA, 25 bp, Homo sapien
cctgaatgcatcaaagccacaaaac

SEQ ID NO: 4980007 - DNA, 25 bp, Homo sapien
ttgggcagcgcagtcgctctgatga

SEQ ID NO: 4980008 - DNA, 25 bp, Homo sapien
cgcagtcgctctgatgagcatctgt

SEQ ID NO: 4980009 - DNA, 25 bp, Homo sapien
caccatctagcagcggaagttgctg

SEQ ID NO: 4980010 - DNA, 25 bp, Homo sapien
caagtcaccaccatctagcagcgga

SEQ ID NO: 4980011 - DNA, 25 bp, Homo sapien
tagcagcggaagttgctgaacacct

SEQ ID NO: 4980012 - DNA, 25 bp, Homo sapien
tcaccaccatctagcagcggaagtt

SEQ ID NO: 4980013 - DNA, 25 bp, Homo sapien
cttcacagccacttttcttgaagcc

SEQ ID NO: 4980014 - DNA, 25 bp, Homo sapien
ttcacagccacttttcttgaagcca

SEQ ID NO: 4980015 - DNA, 25 bp, Homo sapien
ttcttgaagccaaatggcagacagg

SEQ ID NO: 4980016 - DNA, 25 bp, Homo sapien
tcacagccacttttcttgaagccaa

SEQ ID NO: 4980017 - DNA, 25 bp, Homo sapien
cattcttacaaaggtagactgcggt

SEQ ID NO: 4980018 - DNA, 25 bp, Homo sapien
gctccagcttcagtattaggcaggc

SEQ ID NO: 4980019 - DNA, 25 bp, Homo sapien
catgcctgggccttaaatgaggtaa

SEQ ID NO: 4980020 - DNA, 25 bp, Homo sapien
tattacaacatgttaggctggcagg

SEQ ID NO: 4980021 - DNA, 25 bp, Homo sapien
tggctcctgacgtagcccaatactt

SEQ ID NO: 4980022 - DNA, 25 bp, Homo sapien
gctcctgacgtagcccaatacttct

SEQ ID NO: 4980023 - DNA, 25 bp, Homo sapien
ctctggctcctgacgtagcccaata

SEQ ID NO: 4980024 - DNA, 25 bp, Homo sapien
cctgacgtagcccaatacttctcat

SEQ ID NO: 4980025 - DNA, 25 bp, Homo sapien
ctttacccatgcaggcagcaaagat

SEQ ID NO: 4980026 - DNA, 25 bp, Homo sapien
ggcagcaaagatccaggcagaagat

SEQ ID NO: 4980027 - DNA, 25 bp, Homo sapien
agcaaagatccaggcagaagatctt

SEQ ID NO: 4980028 - DNA, 25 bp, Homo sapien
tttacccatgcaggcagcaaagatc

SEQ ID NO: 4980029 - DNA, 25 bp, Homo sapien
ggagatgtcggccttagagggcagt

SEQ ID NO: 4980030 - DNA, 25 bp, Homo sapien
gctggagatgtcggccttagagggc

SEQ ID NO: 4980031 - DNA, 25 bp, Homo sapien
gagatgtcggccttagagggcagtg

SEQ ID NO: 4980032 - DNA, 25 bp, Homo sapien
ctggagatgtcggccttagagggca

SEQ ID NO: 4980033 - DNA, 25 bp, Homo sapien
gatgtgccgaatcaggtcacatgtc

SEQ ID NO: 4980034 - DNA, 25 bp, Homo sapien
tggatggtgtacactggactgtctg

SEQ ID NO: 4980035 - DNA, 25 bp, Homo sapien
ttttggatggtgtacactggactgt

SEQ ID NO: 4980036 - DNA, 25 bp, Homo sapien
tggggatgtgccgaatcaggtcaca

SEQ ID NO: 4980037 - DNA, 25 bp, Homo sapien
ggcacgacctttactggagttctga

SEQ ID NO: 4980038 - DNA, 25 bp, Homo sapien
gatagtttatggctccccagagact

SEQ ID NO: 4980039 - DNA, 25 bp, Homo sapien
tgtaaaggaactgtgaggcacgacc

SEQ ID NO: 4980040 - DNA, 25 bp, Homo sapien
tcaaacacactaagagaacagccct

SEQ ID NO: 4980041 - DNA, 25 bp, Homo sapien
tctcctttgcaaatctgtctcttgc

SEQ ID NO: 4980042 - DNA, 25 bp, Homo sapien
tgatctcctttgcaaatctgtctct

SEQ ID NO: 4980043 - DNA, 25 bp, Homo sapien
gatctcctttgcaaatctgtctctt

SEQ ID NO: 4980044 - DNA, 25 bp, Homo sapien
ctgatctcctttgcaaatctgtctc

SEQ ID NO: 4980045 - DNA, 25 bp, Homo sapien
tgcatctcagcagcaaatcaactgc

SEQ ID NO: 4980046 - DNA, 25 bp, Homo sapien
aatcaactgcagaggctgatgggcc

SEQ ID NO: 4980047 - DNA, 25 bp, Homo sapien
agccctgtgctctgagaaatcctgc

SEQ ID NO: 4980048 - DNA, 25 bp, Homo sapien
tgattgtacagaactcgcagcagcc

SEQ ID NO: 4980049 - DNA, 25 bp, Homo sapien
tatgaaggcacgcagtaacaagcac

SEQ ID NO: 4980050 - DNA, 25 bp, Homo sapien
gctataggttaagcaggatcctgac

SEQ ID NO: 4980051 - DNA, 25 bp, Homo sapien
ccttacgctgagttgtggacgacaa

SEQ ID NO: 4980052 - DNA, 25 bp, Homo sapien
ggaaggccaaatgaaccagcaagtg

SEQ ID NO: 4980053 - DNA, 25 bp, Homo sapien
actaaatagttccatcatgtaggcc

SEQ ID NO: 4980054 - DNA, 25 bp, Homo sapien
ttggagggcatatgatcctgtcacc

SEQ ID NO: 4980055 - DNA, 25 bp, Homo sapien
tgctgcaggctcttaagtaccccat

SEQ ID NO: 4980056 - DNA, 25 bp, Homo sapien
ggtgcagctggttagcacacacatg

SEQ ID NO: 4980057 - DNA, 25 bp, Homo sapien
aaattctcttgccatgaccccggga

SEQ ID NO: 4980058 - DNA, 25 bp, Homo sapien
tctagtagcattaagaggctggccc

SEQ ID NO: 4980059 - DNA, 25 bp, Homo sapien
gattcaagccgaaagcaaattctct

SEQ ID NO: 4980060 - DNA, 25 bp, Homo sapien
tctatacaacaaggaactgccctga

SEQ ID NO: 4980061 - DNA, 25 bp, Homo sapien
catgggttcagccactgcagtccct

SEQ ID NO: 4980062 - DNA, 25 bp, Homo sapien
ttacgcagatgcaggatcgtcccgc

SEQ ID NO: 4980063 - DNA, 25 bp, Homo sapien
gatcgtcccgctgggtgcattcgtg

SEQ ID NO: 4980064 - DNA, 25 bp, Homo sapien
cattcgtgggtttcatgcaggcatg

SEQ ID NO: 4980065 - DNA, 25 bp, Homo sapien
ctctctgagcccaaaacgaaccgaa

SEQ ID NO: 4980066 - DNA, 25 bp, Homo sapien
gctctctgagcccaaaacgaaccga

SEQ ID NO: 4980067 - DNA, 25 bp, Homo sapien
ctgagcccaaaacgaaccgaagagg

SEQ ID NO: 4980068 - DNA, 25 bp, Homo sapien
ctctgagcccaaaacgaaccgaaga

SEQ ID NO: 4980069 - DNA, 25 bp, Homo sapien
gcatccacctcttggcatcaaaaaa

SEQ ID NO: 4980070 - DNA, 25 bp, Homo sapien
ggccagcctggcagatgctttgtta

SEQ ID NO: 4980071 - DNA, 25 bp, Homo sapien
gtttcaacctgctatgcaaaggcca

SEQ ID NO: 4980072 - DNA, 25 bp, Homo sapien
ggcatcaaaaaatgggctgagtttc

SEQ ID NO: 4980073 - DNA, 25 bp, Homo sapien
ccaaagctttgtccaagttacctga

SEQ ID NO: 4980074 - DNA, 25 bp, Homo sapien
gcaggtgatccaaagctttgtccaa

SEQ ID NO: 4980075 - DNA, 25 bp, Homo sapien
taatatctaccccattccgcaggtg

SEQ ID NO: 4980076 - DNA, 25 bp, Homo sapien
acctgatcttgctgctctcagaaag

SEQ ID NO: 4980077 - DNA, 25 bp, Homo sapien
gggagcccattcctatggcaagcgc

SEQ ID NO: 4980078 - DNA, 25 bp, Homo sapien
ccaaaggaaccaagcgtgggctctt

SEQ ID NO: 4980079 - DNA, 25 bp, Homo sapien
tggactcaggaagaatcagcctttg

SEQ ID NO: 4980080 - DNA, 25 bp, Homo sapien
gagtttgcaatatcacagaggtccc

SEQ ID NO: 4980081 - DNA, 25 bp, Homo sapien
ccttgaacacccttgaacacagaag

SEQ ID NO: 4980082 - DNA, 25 bp, Homo sapien
cacaaagcagcgcttcacgtcttca

SEQ ID NO: 4980083 - DNA, 25 bp, Homo sapien
tagtgatgaccacccttgaacaccc

SEQ ID NO: 4980084 - DNA, 25 bp, Homo sapien
atgaccacccttgaacacccttgaa

SEQ ID NO: 4980085 - DNA, 25 bp, Homo sapien
ctgtgtgcgtgttcggggatctgca

SEQ ID NO: 4980086 - DNA, 25 bp, Homo sapien
cgtgttcggggatctgcacacagca

SEQ ID NO: 4980087 - DNA, 25 bp, Homo sapien
gttcggggatctgcacacagcagac

SEQ ID NO: 4980088 - DNA, 25 bp, Homo sapien
tgcgtgttcggggatctgcacacag

SEQ ID NO: 4980089 - DNA, 25 bp, Homo sapien
cggacctgccctgtcgcgctgccat

SEQ ID NO: 4980090 - DNA, 25 bp, Homo sapien
ccgcgctgaaatccgagcccggctc

SEQ ID NO: 4980091 - DNA, 25 bp, Homo sapien
ccggcgcccgcgctgaaatccgagc

SEQ ID NO: 4980092 - DNA, 25 bp, Homo sapien
tgtcgcgctgccatcgtccggcgcc

SEQ ID NO: 4980093 - DNA, 25 bp, Homo sapien
gcgccagcaagttacgcggcatctg

SEQ ID NO: 4980094 - DNA, 25 bp, Homo sapien
gggagcgccagcaagttacgcggca

SEQ ID NO: 4980095 - DNA, 25 bp, Homo sapien
gagcgccagcaagttacgcggcatc

SEQ ID NO: 4980096 - DNA, 25 bp, Homo sapien
cgccagcaagttacgcggcatctgg

SEQ ID NO: 4980097 - DNA, 25 bp, Homo sapien
ccggccctggccctgcgctctcccg

SEQ ID NO: 4980098 - DNA, 25 bp, Homo sapien
cggccctggccctgcgctctcccgc

SEQ ID NO: 4980099 - DNA, 25 bp, Homo sapien
cctggccctgcgctctcccgcccgc

SEQ ID NO: 4980100 - DNA, 25 bp, Homo sapien
gccctgcgctctcccgcccgccagc

SEQ ID NO: 4980101 - DNA, 25 bp, Homo sapien
acctgctgccaagccctgcgaaggg

SEQ ID NO: 4980102 - DNA, 25 bp, Homo sapien
aggcacctgctgccaagccctgcga

SEQ ID NO: 4980103 - DNA, 25 bp, Homo sapien
cctgcgaagggggtgcgcgcggggg

SEQ ID NO: 4980104 - DNA, 25 bp, Homo sapien
gcacctgctgccaagccctgcgaag

SEQ ID NO: 4980105 - DNA, 25 bp, Homo sapien
aggcacacacgtccagtggaggtga

SEQ ID NO: 4980106 - DNA, 25 bp, Homo sapien
gcggaggggaggcacacacgtccag

SEQ ID NO: 4980107 - DNA, 25 bp, Homo sapien
aggtgaggagctccaagctgcatgg

SEQ ID NO: 4980108 - DNA, 25 bp, Homo sapien
ggaggtgaggagctccaagctgcat

SEQ ID NO: 4980109 - DNA, 25 bp, Homo sapien
caatgtgtggactcagttgtgcccc

SEQ ID NO: 4980110 - DNA, 25 bp, Homo sapien
ctgtccgcagctgcccttgcagtgt

SEQ ID NO: 4980111 - DNA, 25 bp, Homo sapien
gtggccagctgacccgttgggctct

SEQ ID NO: 4980112 - DNA, 25 bp, Homo sapien
aaagaaacaatgtgtggactcagtt

SEQ ID NO: 4980113 - DNA, 25 bp, Homo sapien
tttaggatccgacactgaacacaca

SEQ ID NO: 4980114 - DNA, 25 bp, Homo sapien
taacgatcgtatagcctttacagca

SEQ ID NO: 4980115 - DNA, 25 bp, Homo sapien
gcattaaatgtctcccgttgtgagg

SEQ ID NO: 4980116 - DNA, 25 bp, Homo sapien
gaagcccgcgctcatagagctgaca

SEQ ID NO: 4980117 - DNA, 25 bp, Homo sapien
cagcctctagtttgatgcccatggg

SEQ ID NO: 4980118 - DNA, 25 bp, Homo sapien
atgggacaagcagttagaggcactg

SEQ ID NO: 4980119 - DNA, 25 bp, Homo sapien
caggaatcaatagcattttaggagg

SEQ ID NO: 4980120 - DNA, 25 bp, Homo sapien
gcattttacaagtgttcacccactt

SEQ ID NO: 4980121 - DNA, 25 bp, Homo sapien
cacttgggagctaattactgaaaga

SEQ ID NO: 4980122 - DNA, 25 bp, Homo sapien
gatgcatgcacagtttttgaggtgg

SEQ ID NO: 4980123 - DNA, 25 bp, Homo sapien
tatcatgcatgtataactaaatcta

SEQ ID NO: 4980124 - DNA, 25 bp, Homo sapien
tccacaaacgtttttatctataata

SEQ ID NO: 4980125 - DNA, 25 bp, Homo sapien
gagccccggcttctcctcttgagtc

SEQ ID NO: 4980126 - DNA, 25 bp, Homo sapien
tgcatgactatggtcctggctactc

SEQ ID NO: 4980127 - DNA, 25 bp, Homo sapien
acctggaagagcgacgctgggcttt

SEQ ID NO: 4980128 - DNA, 25 bp, Homo sapien
gtcagtgggcttccaagggttccat

SEQ ID NO: 4980129 - DNA, 25 bp, Homo sapien
gattgcgcccttaccaggacattgg

SEQ ID NO: 4980130 - DNA, 25 bp, Homo sapien
catggtggcgggtacaaagtcgcta

SEQ ID NO: 4980131 - DNA, 25 bp, Homo sapien
cagaattcactgaccggagaacaca

SEQ ID NO: 4980132 - DNA, 25 bp, Homo sapien
tatttaatcacgtagcatggtggcg

SEQ ID NO: 4980133 - DNA, 25 bp, Homo sapien
tggccagagcgttcactcttccctg

SEQ ID NO: 4980134 - DNA, 25 bp, Homo sapien
cccacttcctgagaacaagagactg

SEQ ID NO: 4980135 - DNA, 25 bp, Homo sapien
ttctgttggcctgagtcaaaggtgc

SEQ ID NO: 4980136 - DNA, 25 bp, Homo sapien
gcctccatggtattgttcgaatgca

SEQ ID NO: 4980137 - DNA, 25 bp, Homo sapien
cgcggaagcccacagaatagggcat

SEQ ID NO: 4980138 - DNA, 25 bp, Homo sapien
ttcgcggaagcccacagaatagggc

SEQ ID NO: 4980139 - DNA, 25 bp, Homo sapien
tcgcggaagcccacagaatagggca

SEQ ID NO: 4980140 - DNA, 25 bp, Homo sapien
gctggggctggcggactcaccgcag

SEQ ID NO: 4980141 - DNA, 25 bp, Homo sapien
ctggggctggcggactcaccgcagc

SEQ ID NO: 4980142 - DNA, 25 bp, Homo sapien
agcaggggcccgccgaagggccttg

SEQ ID NO: 4980143 - DNA, 25 bp, Homo sapien
tcagcaggggcccgccgaagggcct

SEQ ID NO: 4980144 - DNA, 25 bp, Homo sapien
caaactggccttgccatgagggcac

SEQ ID NO: 4980145 - DNA, 25 bp, Homo sapien
gtcccctgacgaggccgccatctgg

SEQ ID NO: 4980146 - DNA, 25 bp, Homo sapien
ggaaagatgccaccgagatcagctt

SEQ ID NO: 4980147 - DNA, 25 bp, Homo sapien
ctgggcccacgctggtccaggtccc

SEQ ID NO: 4980148 - DNA, 25 bp, Homo sapien
ttaccaaattttatcggttacatga

SEQ ID NO: 4980149 - DNA, 25 bp, Homo sapien
accaaattttatcggttacatgaag

SEQ ID NO: 4980150 - DNA, 25 bp, Homo sapien
tttatcggttacatgaagttgaaaa

SEQ ID NO: 4980151 - DNA, 25 bp, Homo sapien
aattttatcggttacatgaagttga

SEQ ID NO: 4980152 - DNA, 25 bp, Homo sapien
cgcctccttcagcttaggcccgaca

SEQ ID NO: 4980153 - DNA, 25 bp, Homo sapien
ctatgaaaggctgcgagctagagga

SEQ ID NO: 4980154 - DNA, 25 bp, Homo sapien
gcttaggcccgacactccatgaact

SEQ ID NO: 4980155 - DNA, 25 bp, Homo sapien
tgggccgccttccttcgtctgtgcg

SEQ ID NO: 4980156 - DNA, 25 bp, Homo sapien
gattcccataccgaggcctcttcag

SEQ ID NO: 4980157 - DNA, 25 bp, Homo sapien
ttacagatcccgtctgtggccgcca

SEQ ID NO: 4980158 - DNA, 25 bp, Homo sapien
gatggcgggcactgaattacagatc

SEQ ID NO: 4980159 - DNA, 25 bp, Homo sapien
cggcgctccaaccacgtgctgttta

SEQ ID NO: 4980160 - DNA, 25 bp, Homo sapien
tgttaatttgattgttctggttcgc

SEQ ID NO: 4980161 - DNA, 25 bp, Homo sapien
gaacagtagcactaaaaggctcctg

SEQ ID NO: 4980162 - DNA, 25 bp, Homo sapien
ctggaacagtagcactaaaaggctc

SEQ ID NO: 4980163 - DNA, 25 bp, Homo sapien
tctggttcgcactacaatgaccggg

SEQ ID NO: 4980164 - DNA, 25 bp, Homo sapien
ggcatacggggagctacatttcatt

SEQ ID NO: 4980165 - DNA, 25 bp, Homo sapien
tcctcgcgcccgctccagagtcctt

SEQ ID NO: 4980166 - DNA, 25 bp, Homo sapien
cagagtcctttacatctttggggag

SEQ ID NO: 4980167 - DNA, 25 bp, Homo sapien
tgaaacaggaactgctcctcgcgcc

SEQ ID NO: 4980168 - DNA, 25 bp, Homo sapien
acaaattagattctcgttgtgcttc

SEQ ID NO: 4980169 - DNA, 25 bp, Homo sapien
tgcttctccattggaagggcactag

SEQ ID NO: 4980170 - DNA, 25 bp, Homo sapien
cttctccattggaagggcactaggg

SEQ ID NO: 4980171 - DNA, 25 bp, Homo sapien
ttacaaattagattctcgttgtgct

SEQ ID NO: 4980172 - DNA, 25 bp, Homo sapien
cctctttctgagcaggctgtgtgga

SEQ ID NO: 4980173 - DNA, 25 bp, Homo sapien
gcctgagcacctctttctgagcagg

SEQ ID NO: 4980174 - DNA, 25 bp, Homo sapien
acctctttctgagcaggctgtgtgg

SEQ ID NO: 4980175 - DNA, 25 bp, Homo sapien
aaagcccagttctcctgcactcaag

SEQ ID NO: 4980176 - DNA, 25 bp, Homo sapien
tgacatagcgcactaaagcccagtt

SEQ ID NO: 4980177 - DNA, 25 bp, Homo sapien
taaagcccagttctcctgcactcaa

SEQ ID NO: 4980178 - DNA, 25 bp, Homo sapien
tagcgcactaaagcccagttctcct

SEQ ID NO: 4980179 - DNA, 25 bp, Homo sapien
acagcaggcacatggtccatggtgc

SEQ ID NO: 4980180 - DNA, 25 bp, Homo sapien
gcagctggggcgatcagaagattca

SEQ ID NO: 4980181 - DNA, 25 bp, Homo sapien
caggcacatggtccatggtgcagac

SEQ ID NO: 4980182 - DNA, 25 bp, Homo sapien
gattcattccgctgctggaggcctc

SEQ ID NO: 4980183 - DNA, 25 bp, Homo sapien
cttggcagatcttggtatcccctcg

SEQ ID NO: 4980184 - DNA, 25 bp, Homo sapien
ttggcagatcttggtatcccctcgg

SEQ ID NO: 4980185 - DNA, 25 bp, Homo sapien
tggcagatcttggtatcccctcggg

SEQ ID NO: 4980186 - DNA, 25 bp, Homo sapien
ccttcctgctgcagttgcacccact

SEQ ID NO: 4980187 - DNA, 25 bp, Homo sapien
cccttcctgctgcagttgcacccac

SEQ ID NO: 4980188 - DNA, 25 bp, Homo sapien
tcccttcctgctgcagttgcaccca

SEQ ID NO: 4980189 - DNA, 25 bp, Homo sapien
gcttcccatgcggaaagtacatgcg

SEQ ID NO: 4980190 - DNA, 25 bp, Homo sapien
cgttttcagcttcccatgcggaaag

SEQ ID NO: 4980191 - DNA, 25 bp, Homo sapien
tcccatgcggaaagtacatgcgggt

SEQ ID NO: 4980192 - DNA, 25 bp, Homo sapien
tcagcttcccatgcggaaagtacat

SEQ ID NO: 4980193 - DNA, 25 bp, Homo sapien
ttcagcttggtgccgcaggagagca

SEQ ID NO: 4980194 - DNA, 25 bp, Homo sapien
gcttggtgccgcaggagagcagggc

SEQ ID NO: 4980195 - DNA, 25 bp, Homo sapien
aggttcagcttggtgccgcaggaga

SEQ ID NO: 4980196 - DNA, 25 bp, Homo sapien
agcttggtgccgcaggagagcaggg

SEQ ID NO: 4980197 - DNA, 25 bp, Homo sapien
aggctggcagcagcaggcatgttga

SEQ ID NO: 4980198 - DNA, 25 bp, Homo sapien
ttagaggctggcagcagcaggcatg

SEQ ID NO: 4980199 - DNA, 25 bp, Homo sapien
tggcagcagcaggcatgttgaagaa

SEQ ID NO: 4980200 - DNA, 25 bp, Homo sapien
ctggcagcagcaggcatgttgaaga

SEQ ID NO: 4980201 - DNA, 25 bp, Homo sapien
gtgtatcattcaccggaacacatgc

SEQ ID NO: 4980202 - DNA, 25 bp, Homo sapien
caaagggtgtatcattcaccggaac

SEQ ID NO: 4980203 - DNA, 25 bp, Homo sapien
tcagtcaaagggtgtatcattcacc

SEQ ID NO: 4980204 - DNA, 25 bp, Homo sapien
aagggtgtatcattcaccggaacac

SEQ ID NO: 4980205 - DNA, 25 bp, Homo sapien
cagacgatgaagtaggtgaacataa

SEQ ID NO: 4980206 - DNA, 25 bp, Homo sapien
tcagacgatgaagtaggtgaacata

SEQ ID NO: 4980207 - DNA, 25 bp, Homo sapien
cgctctcttcgtcagagtgggtcac

SEQ ID NO: 4980208 - DNA, 25 bp, Homo sapien
gaaagacgctctcttcgtcagagtg

SEQ ID NO: 4980209 - DNA, 25 bp, Homo sapien
ctgggaaagacgctctcttcgtcag

SEQ ID NO: 4980210 - DNA, 25 bp, Homo sapien
aagacgctctcttcgtcagagtggg

SEQ ID NO: 4980211 - DNA, 25 bp, Homo sapien
tcggtcacgggagcggtttctccgc

SEQ ID NO: 4980212 - DNA, 25 bp, Homo sapien
tcttcagctgtttggccgcttgagc

SEQ ID NO: 4980213 - DNA, 25 bp, Homo sapien
ggcctgcgcctcgatgtctttgatt

SEQ ID NO: 4980214 - DNA, 25 bp, Homo sapien
ttctccgcttcctgttggattcctc

SEQ ID NO: 4980215 - DNA, 25 bp, Homo sapien
cctaagtgcctcctgctggaatgaa

SEQ ID NO: 4980216 - DNA, 25 bp, Homo sapien
tacagagaaactgggtcctacacag

SEQ ID NO: 4980217 - DNA, 25 bp, Homo sapien
tactgtgctggtggtcggtctgtcc

SEQ ID NO: 4980218 - DNA, 25 bp, Homo sapien
gatacaaaggcatctaggcacccct

SEQ ID NO: 4980219 - DNA, 25 bp, Homo sapien
cattataggcgggagtaggcatcag

SEQ ID NO: 4980220 - DNA, 25 bp, Homo sapien
caatctctgcgtgtgaggaatgcca

SEQ ID NO: 4980221 - DNA, 25 bp, Homo sapien
ttcccatgagggttaggctgcatag

SEQ ID NO: 4980222 - DNA, 25 bp, Homo sapien
tggttgagagtagctgccggcacca

SEQ ID NO: 4980223 - DNA, 25 bp, Homo sapien
ggctgtggtgctggttgtggttgtg

SEQ ID NO: 4980224 - DNA, 25 bp, Homo sapien
gtggctgctgtggaggcggtggtgg

SEQ ID NO: 4980225 - DNA, 25 bp, Homo sapien
ggttgtggttgtggcggcggcggct

SEQ ID NO: 4980226 - DNA, 25 bp, Homo sapien
tgctggttgtggttgtggcggcggc

SEQ ID NO: 4980227 - DNA, 25 bp, Homo sapien
gcagcaggctggacgctgctctgct

SEQ ID NO: 4980228 - DNA, 25 bp, Homo sapien
ctctgaggtgacttgatgctgcagt

SEQ ID NO: 4980229 - DNA, 25 bp, Homo sapien
cagcaggctggacgctgctctgctg

SEQ ID NO: 4980230 - DNA, 25 bp, Homo sapien
tgaggtgacttgatgctgcagttgg

SEQ ID NO: 4980231 - DNA, 25 bp, Homo sapien
gttgggactgctgaccgaacggact

SEQ ID NO: 4980232 - DNA, 25 bp, Homo sapien
tcgtggtcgtcattctgggcagtct

SEQ ID NO: 4980233 - DNA, 25 bp, Homo sapien
gatctgggtgtagccactctcaagg

SEQ ID NO: 4980234 - DNA, 25 bp, Homo sapien
gatacggaaggcacatccatcatgg

SEQ ID NO: 4980235 - DNA, 25 bp, Homo sapien
tcaggactattgctgctgtctgctg

SEQ ID NO: 4980236 - DNA, 25 bp, Homo sapien
cggtctcaggactattgctgctgtc

SEQ ID NO: 4980237 - DNA, 25 bp, Homo sapien
tctgctcctctgagacacggggctt

SEQ ID NO: 4980238 - DNA, 25 bp, Homo sapien
ggtttcggtctcaggactattgctg

SEQ ID NO: 4980239 - DNA, 25 bp, Homo sapien
cttcctctcctcgggtaggggcatg

SEQ ID NO: 4980240 - DNA, 25 bp, Homo sapien
cctctcctcgggtaggggcatgtct

SEQ ID NO: 4980241 - DNA, 25 bp, Homo sapien
ctctcctcgggtaggggcatgtctt

SEQ ID NO: 4980242 - DNA, 25 bp, Homo sapien
gaaactggcatgatttcccgactca

SEQ ID NO: 4980243 - DNA, 25 bp, Homo sapien
cacgttttcgcaaaagagatactgg

SEQ ID NO: 4980244 - DNA, 25 bp, Homo sapien
gaaacgatgggctcaatgacgcatg

SEQ ID NO: 4980245 - DNA, 25 bp, Homo sapien
tgacgcatgcttgagtagaaactgg

SEQ ID NO: 4980246 - DNA, 25 bp, Homo sapien
caaacgacggaagtattctctaggg

SEQ ID NO: 4980247 - DNA, 25 bp, Homo sapien
tagaagaggactgacacctgagtac

SEQ ID NO: 4980248 - DNA, 25 bp, Homo sapien
tggcattggcctctcggagtcagaa

SEQ ID NO: 4980249 - DNA, 25 bp, Homo sapien
tacatcctgcgaagacaaacgacgg

SEQ ID NO: 4980250 - DNA, 25 bp, Homo sapien
tatgaaggccatcgaaactaaggaa

SEQ ID NO: 4980251 - DNA, 25 bp, Homo sapien
taatgcgatatgctgggtgggatcc

SEQ ID NO: 4980252 - DNA, 25 bp, Homo sapien
gagagaccacgttaaaccactggag

SEQ ID NO: 4980253 - DNA, 25 bp, Homo sapien
gaagtatcacgtaaatatctgggcc

SEQ ID NO: 4980254 - DNA, 25 bp, Homo sapien
tggcgagcttgaccgagggctttcc

SEQ ID NO: 4980255 - DNA, 25 bp, Homo sapien
caaacgtgtagaactgactggagcc

SEQ ID NO: 4980256 - DNA, 25 bp, Homo sapien
gctatttgcaggaagactatcatga

SEQ ID NO: 4980257 - DNA, 25 bp, Homo sapien
cctccgagatggctggctatttgca

SEQ ID NO: 4980258 - DNA, 25 bp, Homo sapien
tccagagcctatgttctgaatcttt

SEQ ID NO: 4980259 - DNA, 25 bp, Homo sapien
gcagtaccaccctcaataagcaaag

SEQ ID NO: 4980260 - DNA, 25 bp, Homo sapien
tgctgggatagaaagcctggcagtc

SEQ ID NO: 4980261 - DNA, 25 bp, Homo sapien
caggtcacgcaagagcaagagaaga

SEQ ID NO: 4980262 - DNA, 25 bp, Homo sapien
ggcactgtggctcttcgttttctcc

SEQ ID NO: 4980263 - DNA, 25 bp, Homo sapien
tggcactgtggctcttcgttttctc

SEQ ID NO: 4980264 - DNA, 25 bp, Homo sapien
tacaggtcgcaaattcagctgaagc

SEQ ID NO: 4980265 - DNA, 25 bp, Homo sapien
aacattctggatctacatctacagg

SEQ ID NO: 4980266 - DNA, 25 bp, Homo sapien
tggagtccagcgcaaacattctgga

SEQ ID NO: 4980267 - DNA, 25 bp, Homo sapien
cacagagttggacactatgactgga

SEQ ID NO: 4980268 - DNA, 25 bp, Homo sapien
tatgccatgtaggaaagacgaccca

SEQ ID NO: 4980269 - DNA, 25 bp, Homo sapien
gacgacccagatcagataacggttt

SEQ ID NO: 4980270 - DNA, 25 bp, Homo sapien
ggtcactacggaagtccagcattcg

SEQ ID NO: 4980271 - DNA, 25 bp, Homo sapien
gcttggccttcacgctttgataaca

SEQ ID NO: 4980272 - DNA, 25 bp, Homo sapien
tgaggaagaatcattatacaggaaa

SEQ ID NO: 4980273 - DNA, 25 bp, Homo sapien
ttgaggaagaatcattatacaggaa

SEQ ID NO: 4980274 - DNA, 25 bp, Homo sapien
gcccttacgctggtattgaggaaga

SEQ ID NO: 4980275 - DNA, 25 bp, Homo sapien
tagcccttacgctggtattgaggaa

SEQ ID NO: 4980276 - DNA, 25 bp, Homo sapien
tgttattaccatgggaagagaagcc

SEQ ID NO: 4980277 - DNA, 25 bp, Homo sapien
taagcaccttctagcacctggtaag

SEQ ID NO: 4980278 - DNA, 25 bp, Homo sapien
attgccagcagtccataatcctagg

SEQ ID NO: 4980279 - DNA, 25 bp, Homo sapien
accttccccgtgagtattgccagca

SEQ ID NO: 4980280 - DNA, 25 bp, Homo sapien
tagaaaagtagccaacaaggtggca

SEQ ID NO: 4980281 - DNA, 25 bp, Homo sapien
tgacaataaatggtactcacattcc

SEQ ID NO: 4980282 - DNA, 25 bp, Homo sapien
aatggctccacatcgtaatagaggg

SEQ ID NO: 4980283 - DNA, 25 bp, Homo sapien
taatagagggttttgtggtcaagaa

SEQ ID NO: 4980284 - DNA, 25 bp, Homo sapien
tctgtaaatctcattggcaggagga

SEQ ID NO: 4980285 - DNA, 25 bp, Homo sapien
ctgtaaatctcattggcaggaggat

SEQ ID NO: 4980286 - DNA, 25 bp, Homo sapien
acgctgagttctgtaggtagttgag

SEQ ID NO: 4980287 - DNA, 25 bp, Homo sapien
taacttgaacgctgagttctgtagg

SEQ ID NO: 4980288 - DNA, 25 bp, Homo sapien
tttcttctcggtcataaaagatctt

SEQ ID NO: 4980289 - DNA, 25 bp, Homo sapien
caggcgtgtccttggcgtatttctt

SEQ ID NO: 4980290 - DNA, 25 bp, Homo sapien
tgtcctcaatatccccacgaagtaa

SEQ ID NO: 4980291 - DNA, 25 bp, Homo sapien
gcagttgggcagcttttaaggttac

SEQ ID NO: 4980292 - DNA, 25 bp, Homo sapien
gctgagtcatgaaaccactttagct

SEQ ID NO: 4980293 - DNA, 25 bp, Homo sapien
taatatatctggaagcccaaactat

SEQ ID NO: 4980294 - DNA, 25 bp, Homo sapien
caatgacagagggacagcggacttg

SEQ ID NO: 4980295 - DNA, 25 bp, Homo sapien
gggacagcggacttgtggatcaggg

SEQ ID NO: 4980296 - DNA, 25 bp, Homo sapien
tcagggggaccagtcactccaactt

SEQ ID NO: 4980297 - DNA, 25 bp, Homo sapien
ccaaactcaatgacagagggacagc

SEQ ID NO: 4980298 - DNA, 25 bp, Homo sapien
tgcccgctgctcttctaggcggatg

SEQ ID NO: 4980299 - DNA, 25 bp, Homo sapien
cggatgcccgatgtgaaagtggata

SEQ ID NO: 4980300 - DNA, 25 bp, Homo sapien
gaaagtggatatccagttccagtac

SEQ ID NO: 4980301 - DNA, 25 bp, Homo sapien
tgtttgagggtcttcccatcagctg

SEQ ID NO: 4980302 - DNA, 25 bp, Homo sapien
caaggctctctacacagggaggaag

SEQ ID NO: 4980303 - DNA, 25 bp, Homo sapien
tattgtgctagactctgacctgagc

SEQ ID NO: 4980304 - DNA, 25 bp, Homo sapien
gaaaatcatgttcgtggagcaccta

SEQ ID NO: 4980305 - DNA, 25 bp, Homo sapien
caactctggatctggtagggacacc

SEQ ID NO: 4980306 - DNA, 25 bp, Homo sapien
gacaatatcaccagacttgagtttc

SEQ ID NO: 4980307 - DNA, 25 bp, Homo sapien
aggtgttcctcaatccattgctgac

SEQ ID NO: 4980308 - DNA, 25 bp, Homo sapien
catctgactggtcccttgctcaggt

SEQ ID NO: 4980309 - DNA, 25 bp, Homo sapien
gcagttcctcaagagctatttagct

SEQ ID NO: 4980310 - DNA, 25 bp, Homo sapien
taccctggccgctgtatgaagaaaa

SEQ ID NO: 4980311 - DNA, 25 bp, Homo sapien
tagtctggaggcaattatagcagcc

SEQ ID NO: 4980312 - DNA, 25 bp, Homo sapien
gatgacatctctgtgggcctaagca

SEQ ID NO: 4980313 - DNA, 25 bp, Homo sapien
aaccaggtggtcactgttagcagca

SEQ ID NO: 4980314 - DNA, 25 bp, Homo sapien
aaagccatgtgcttatctgcaaaac

SEQ ID NO: 4980315 - DNA, 25 bp, Homo sapien
cactcatgagaagcttgttttttgt

SEQ ID NO: 4980316 - DNA, 25 bp, Homo sapien
tattctgagattaggcaaactgctg

SEQ ID NO: 4980317 - DNA, 25 bp, Homo sapien
cacacaaaccacaactattctgaga

SEQ ID NO: 4980318 - DNA, 25 bp, Homo sapien
tgaacaagttgcttgattgtctaac

SEQ ID NO: 4980319 - DNA, 25 bp, Homo sapien
cagccatgaacaagttgcttgattg

SEQ ID NO: 4980320 - DNA, 25 bp, Homo sapien
ctcagccatgaacaagttgcttgat

SEQ ID NO: 4980321 - DNA, 25 bp, Homo sapien
gccatgaacaagttgcttgattgtc

SEQ ID NO: 4980322 - DNA, 25 bp, Homo sapien
tcttggatatcacgaaataattcca

SEQ ID NO: 4980323 - DNA, 25 bp, Homo sapien
tttcctggctcccaaaaagtcgctc

SEQ ID NO: 4980324 - DNA, 25 bp, Homo sapien
ggctcccaaaaagtcgctcctcatt

SEQ ID NO: 4980325 - DNA, 25 bp, Homo sapien
ttgccatcccagccatcctgattgt

SEQ ID NO: 4980326 - DNA, 25 bp, Homo sapien
ccttccagggccagttcgaactttg

SEQ ID NO: 4980327 - DNA, 25 bp, Homo sapien
tctgcagaagtccaagccatctatc

SEQ ID NO: 4980328 - DNA, 25 bp, Homo sapien
ggagacattgctatctctgcagaag

SEQ ID NO: 4980329 - DNA, 25 bp, Homo sapien
gattcgatattgctcagagtagtcc

SEQ ID NO: 4980330 - DNA, 25 bp, Homo sapien
catcaaaggtgagttactacagaca

SEQ ID NO: 4980331 - DNA, 25 bp, Homo sapien
caaggatgggttattcttcgaaggc

SEQ ID NO: 4980332 - DNA, 25 bp, Homo sapien
taataaagggaggttgacaagcctg

SEQ ID NO: 4980333 - DNA, 25 bp, Homo sapien
taagaacaactaagatccttccagg

SEQ ID NO: 4980334 - DNA, 25 bp, Homo sapien
tatagcgccgttttatctgtgctgc

SEQ ID NO: 4980335 - DNA, 25 bp, Homo sapien
ctaggtcgacatatttgacatatcc

SEQ ID NO: 4980336 - DNA, 25 bp, Homo sapien
ctgttttttggacgtcctattggat

SEQ ID NO: 4980337 - DNA, 25 bp, Homo sapien
cttttttcctaggtcgacatatttg

SEQ ID NO: 4980338 - DNA, 25 bp, Homo sapien
ccatgtgaaaacctcggtcacatga

SEQ ID NO: 4980339 - DNA, 25 bp, Homo sapien
ggcggatcacaacactccatgtgaa

SEQ ID NO: 4980340 - DNA, 25 bp, Homo sapien
catacgggtgagtggcggatcacaa

SEQ ID NO: 4980341 - DNA, 25 bp, Homo sapien
tgaaaacctcggtcacatgaatcac

SEQ ID NO: 4980342 - DNA, 25 bp, Homo sapien
tgccttgatctcgacaggagctgca

SEQ ID NO: 4980343 - DNA, 25 bp, Homo sapien
caccgtaaggccttcactcgaaccg

SEQ ID NO: 4980344 - DNA, 25 bp, Homo sapien
ggagctgcatgttttacactcgatg

SEQ ID NO: 4980345 - DNA, 25 bp, Homo sapien
tcactcgaaccgttagttcagggga

SEQ ID NO: 4980346 - DNA, 25 bp, Homo sapien
gtcggcacaggagatgagttcctct

SEQ ID NO: 4980347 - DNA, 25 bp, Homo sapien
acaggagatgagttcctctggcttc

SEQ ID NO: 4980348 - DNA, 25 bp, Homo sapien
ctctggcttcttttctcggttttgt

SEQ ID NO: 4980349 - DNA, 25 bp, Homo sapien
cactgttgccacagtcggcacagga

SEQ ID NO: 4980350 - DNA, 25 bp, Homo sapien
aactacagatggggattggttcagc

SEQ ID NO: 4980351 - DNA, 25 bp, Homo sapien
cttttgtaccaagacagaaactaca

SEQ ID NO: 4980352 - DNA, 25 bp, Homo sapien
ttgtaccaagacagaaactacagat

SEQ ID NO: 4980353 - DNA, 25 bp, Homo sapien
cagatggggattggttcagcaaccg

SEQ ID NO: 4980354 - DNA, 25 bp, Homo sapien
tcaagaagacacagtgtaagcgctg

SEQ ID NO: 4980355 - DNA, 25 bp, Homo sapien
taagcgctgaaaaagcatgtgatct

SEQ ID NO: 4980356 - DNA, 25 bp, Homo sapien
tgactcctcggcagaagacattaag

SEQ ID NO: 4980357 - DNA, 25 bp, Homo sapien
ttagaacctaaatgatacagtgtgg

SEQ ID NO: 4980358 - DNA, 25 bp, Homo sapien
cctttaagcaccctgttgagatctc

SEQ ID NO: 4980359 - DNA, 25 bp, Homo sapien
cacagggtggatgattcggtaacaa

SEQ ID NO: 4980360 - DNA, 25 bp, Homo sapien
cagtattgaggcaaacacagggtgg

SEQ ID NO: 4980361 - DNA, 25 bp, Homo sapien
cttgtgtcgtcggttgccctacatc

SEQ ID NO: 4980362 - DNA, 25 bp, Homo sapien
taacacttcactaaatgctataagg

SEQ ID NO: 4980363 - DNA, 25 bp, Homo sapien
tgaccaatcccatattgatgaacat

SEQ ID NO: 4980364 - DNA, 25 bp, Homo sapien
gctataaggtaatttgaccaatccc

SEQ ID NO: 4980365 - DNA, 25 bp, Homo sapien
gcagtcaaacagctttgtacttaca

SEQ ID NO: 4980366 - DNA, 25 bp, Homo sapien
tggtgaagccctaattcctcaatgt

SEQ ID NO: 4980367 - DNA, 25 bp, Homo sapien
caggaggtcattgttacaggctaaa

SEQ ID NO: 4980368 - DNA, 25 bp, Homo sapien
cagcatctgctttatcaattcccta

SEQ ID NO: 4980369 - DNA, 25 bp, Homo sapien
taatatcttagcaacttggcatacc

SEQ ID NO: 4980370 - DNA, 25 bp, Homo sapien
gcacacatatgtatggtcacttctg

SEQ ID NO: 4980371 - DNA, 25 bp, Homo sapien
tcctatcctaaccaagattaatggt

SEQ ID NO: 4980372 - DNA, 25 bp, Homo sapien
cctattttatctaaacagagggtgg

SEQ ID NO: 4980373 - DNA, 25 bp, Homo sapien
ccaagattaatggtccttctataat

SEQ ID NO: 4980374 - DNA, 25 bp, Homo sapien
ggttcaggattacttgaaatacttc

SEQ ID NO: 4980375 - DNA, 25 bp, Homo sapien
tattaaatgtagttacaggttcagg

SEQ ID NO: 4980376 - DNA, 25 bp, Homo sapien
tacttcggtacatgcagttattaaa

SEQ ID NO: 4980377 - DNA, 25 bp, Homo sapien
taaatgtagttacaggttcaggatt

SEQ ID NO: 4980378 - DNA, 25 bp, Homo sapien
tataggaggcatgactaaagctgcc

SEQ ID NO: 4980379 - DNA, 25 bp, Homo sapien
tgaactcaccgcacttagaagtacc

SEQ ID NO: 4980380 - DNA, 25 bp, Homo sapien
aaagacgagggcatgaaccaaggca

SEQ ID NO: 4980381 - DNA, 25 bp, Homo sapien
tgccaacaagggactacagtgtgct

SEQ ID NO: 4980382 - DNA, 25 bp, Homo sapien
aactgattgagtatccagggatgtc

SEQ ID NO: 4980383 - DNA, 25 bp, Homo sapien
ctgattgagtatccagggatgtcct

SEQ ID NO: 4980384 - DNA, 25 bp, Homo sapien
atgatggtaactgattgagtatcca

SEQ ID NO: 4980385 - DNA, 25 bp, Homo sapien
tggtaactgattgagtatccaggga

SEQ ID NO: 4980386 - DNA, 25 bp, Homo sapien
cacctttactgaaacagttggctgt

SEQ ID NO: 4980387 - DNA, 25 bp, Homo sapien
gcacctttactgaaacagttggctg

SEQ ID NO: 4980388 - DNA, 25 bp, Homo sapien
ccttgctgaattggttactacagct

SEQ ID NO: 4980389 - DNA, 25 bp, Homo sapien
ttgcataaagtgagaaataggggtc

SEQ ID NO: 4980390 - DNA, 25 bp, Homo sapien
cattgacccagtgattgttcgggag

SEQ ID NO: 4980391 - DNA, 25 bp, Homo sapien
gcacagctgacctgcccaattctga

SEQ ID NO: 4980392 - DNA, 25 bp, Homo sapien
tattgacagctgaagacttatcctg

SEQ ID NO: 4980393 - DNA, 25 bp, Homo sapien
tggaggcacttattggctgtaaact

SEQ ID NO: 4980394 - DNA, 25 bp, Homo sapien
gagattcaagggcaattgggcgcca

SEQ ID NO: 4980395 - DNA, 25 bp, Homo sapien
gaacatgtcatcagagcactacgga

SEQ ID NO: 4980396 - DNA, 25 bp, Homo sapien
tgaggccagattacaggagtccatg

SEQ ID NO: 4980397 - DNA, 25 bp, Homo sapien
gaattaatatgctctgcactgctgg

SEQ ID NO: 4980398 - DNA, 25 bp, Homo sapien
gaggtatcaagcatttctagaatac

SEQ ID NO: 4980399 - DNA, 25 bp, Homo sapien
tctccttttcatctagaggctataa

SEQ ID NO: 4980400 - DNA, 25 bp, Homo sapien
catcgttagaaagtgctgcaagctg

SEQ ID NO: 4980401 - DNA, 25 bp, Homo sapien
caaatggtacttttcagctgaggta

SEQ ID NO: 4980402 - DNA, 25 bp, Homo sapien
gagaagggcctgaccaattcttcca

SEQ ID NO: 4980403 - DNA, 25 bp, Homo sapien
catctgctgggaactatgactttca

SEQ ID NO: 4980404 - DNA, 25 bp, Homo sapien
gattcctctaacttgggccataaga

SEQ ID NO: 4980405 - DNA, 25 bp, Homo sapien
gatccaagattgctactggctgaac

SEQ ID NO: 4980406 - DNA, 25 bp, Homo sapien
cagcaaactccgcacctagatttag

SEQ ID NO: 4980407 - DNA, 25 bp, Homo sapien
tttgtgaaatgactccacccctgag

SEQ ID NO: 4980408 - DNA, 25 bp, Homo sapien
aaggagattcttacagcttcaggaa

SEQ ID NO: 4980409 - DNA, 25 bp, Homo sapien
tattggcccacaagtccaggatgaa

SEQ ID NO: 4980410 - DNA, 25 bp, Homo sapien
tatcactggtccaaagtgaattttc

SEQ ID NO: 4980411 - DNA, 25 bp, Homo sapien
acattcttatcactggtccaaagtg

SEQ ID NO: 4980412 - DNA, 25 bp, Homo sapien
tcactggtccaaagtgaattttcaa

SEQ ID NO: 4980413 - DNA, 25 bp, Homo sapien
tcttatcactggtccaaagtgaatt

SEQ ID NO: 4980414 - DNA, 25 bp, Homo sapien
ccatgcaactacagctgtcataaat

SEQ ID NO: 4980415 - DNA, 25 bp, Homo sapien
gatactgtattcctgtcccatgcaa

SEQ ID NO: 4980416 - DNA, 25 bp, Homo sapien
agcatttaggacttcatcatatgca

SEQ ID NO: 4980417 - DNA, 25 bp, Homo sapien
tattcctgtcccatgcaactacagc

SEQ ID NO: 4980418 - DNA, 25 bp, Homo sapien
tgtagcatcctatatcatcagctct

SEQ ID NO: 4980419 - DNA, 25 bp, Homo sapien
tataaaccccgaagcatatgccatt

SEQ ID NO: 4980420 - DNA, 25 bp, Homo sapien
gaagctctcatagctacaactcacc

SEQ ID NO: 4980421 - DNA, 25 bp, Homo sapien
ttcaaagtaccagaacaaatctatg

SEQ ID NO: 4980422 - DNA, 25 bp, Homo sapien
tagtgttgagccgataaagaggtcc

SEQ ID NO: 4980423 - DNA, 25 bp, Homo sapien
ggccaatggcacgtttgatagccaa

SEQ ID NO: 4980424 - DNA, 25 bp, Homo sapien
tgatagccaatcgtaactgctggtg

SEQ ID NO: 4980425 - DNA, 25 bp, Homo sapien
ggcagcactgcctccgaataatgca

SEQ ID NO: 4980426 - DNA, 25 bp, Homo sapien
gcttaggaagtgctattcgcccagg

SEQ ID NO: 4980427 - DNA, 25 bp, Homo sapien
tcgcccaggattatcaggatcttta

SEQ ID NO: 4980428 - DNA, 25 bp, Homo sapien
tgcccgctttatcagtttattccaa

SEQ ID NO: 4980429 - DNA, 25 bp, Homo sapien
caattttccatggttccgaggctta

SEQ ID NO: 4980430 - DNA, 25 bp, Homo sapien
gatgaagacacagcattgcatatcc

SEQ ID NO: 4980431 - DNA, 25 bp, Homo sapien
gaaggacgctgtttctgctttttca

SEQ ID NO: 4980432 - DNA, 25 bp, Homo sapien
taaaacagttttacgatccaagcca

SEQ ID NO: 4980433 - DNA, 25 bp, Homo sapien
ctcaactccaattgttctaaaacag

SEQ ID NO: 4980434 - DNA, 25 bp, Homo sapien
ctcagtataaagcgggtttgcgagt

SEQ ID NO: 4980435 - DNA, 25 bp, Homo sapien
tcagtataaagcgggtttgcgagtt

SEQ ID NO: 4980436 - DNA, 25 bp, Homo sapien
cagtataaagcgggtttgcgagttt

SEQ ID NO: 4980437 - DNA, 25 bp, Homo sapien
gaaaacaagattctcggaggctggg

SEQ ID NO: 4980438 - DNA, 25 bp, Homo sapien
gaatatttcattcccggctccagag

SEQ ID NO: 4980439 - DNA, 25 bp, Homo sapien
gaatgccaccccaattgtactatag

SEQ ID NO: 4980440 - DNA, 25 bp, Homo sapien
ggctgggaaccagttaaccatagca

SEQ ID NO: 4980441 - DNA, 25 bp, Homo sapien
tctgctcaccagtctaggaatttca

SEQ ID NO: 4980442 - DNA, 25 bp, Homo sapien
tgatggctattctgtactccgcaat

SEQ ID NO: 4980443 - DNA, 25 bp, Homo sapien
caagtatctggattagtagaaagaa

SEQ ID NO: 4980444 - DNA, 25 bp, Homo sapien
gtcagcacttcaacaagtatctgga

SEQ ID NO: 4980445 - DNA, 25 bp, Homo sapien
actgcgtgtaagtaattcagacagg

SEQ ID NO: 4980446 - DNA, 25 bp, Homo sapien
caaactgcgtgtaagtaattcagac

SEQ ID NO: 4980447 - DNA, 25 bp, Homo sapien
tcaaactgcgtgtaagtaattcaga

SEQ ID NO: 4980448 - DNA, 25 bp, Homo sapien
tgcgtgtaagtaattcagacaggaa

SEQ ID NO: 4980449 - DNA, 25 bp, Homo sapien
ggccggaccgcggagatgccccaaa

SEQ ID NO: 4980450 - DNA, 25 bp, Homo sapien
gagatgccccaaactgacacggccg

SEQ ID NO: 4980451 - DNA, 25 bp, Homo sapien
gaccgcggagatgccccaaactgac

SEQ ID NO: 4980452 - DNA, 25 bp, Homo sapien
gcggagatgccccaaactgacacgg

SEQ ID NO: 4980453 - DNA, 25 bp, Homo sapien
tgagactcagtctcactctaccgcc

SEQ ID NO: 4980454 - DNA, 25 bp, Homo sapien
cctcccgagtagcagtagctgggat

SEQ ID NO: 4980455 - DNA, 25 bp, Homo sapien
tcccgagtagcagtagctgggatta

SEQ ID NO: 4980456 - DNA, 25 bp, Homo sapien
gcacctggccgtttttgttttgtga

SEQ ID NO: 4980457 - DNA, 25 bp, Homo sapien
ctgcaaagtgagaagttgacataca

SEQ ID NO: 4980458 - DNA, 25 bp, Homo sapien
tgctgtcggtcacctgtaattgcag

SEQ ID NO: 4980459 - DNA, 25 bp, Homo sapien
aaaaaagatacgtgcctgcaaagtg

SEQ ID NO: 4980460 - DNA, 25 bp, Homo sapien
tgtcctacaagttctcggagaaggt

SEQ ID NO: 4980461 - DNA, 25 bp, Homo sapien
acatgaaggcgaacaaagcccccaa

SEQ ID NO: 4980462 - DNA, 25 bp, Homo sapien
gctcacggtcagatgagcctcttga

SEQ ID NO: 4980463 - DNA, 25 bp, Homo sapien
tgcctatcaaactgagagagctcac

SEQ ID NO: 4980464 - DNA, 25 bp, Homo sapien
ccccaagatgcctatcaaactgaga

SEQ ID NO: 4980465 - DNA, 25 bp, Homo sapien
ctctgtccttggtgccgtgtttgag

SEQ ID NO: 4980466 - DNA, 25 bp, Homo sapien
tgtccttggtgccgtgtttgagaat

SEQ ID NO: 4980467 - DNA, 25 bp, Homo sapien
tccttggtgccgtgtttgagaatgc

SEQ ID NO: 4980468 - DNA, 25 bp, Homo sapien
ccttggtgccgtgtttgagaatgcg

SEQ ID NO: 4980469 - DNA, 25 bp, Homo sapien
gtgaggtggtcaccgtggcgggctt

SEQ ID NO: 4980470 - DNA, 25 bp, Homo sapien
tgaggtggtcaccgtggcgggcttc

SEQ ID NO: 4980471 - DNA, 25 bp, Homo sapien
tgtgaggtggtcaccgtggcgggct

SEQ ID NO: 4980472 - DNA, 25 bp, Homo sapien
gcttcctcatcgaagtgttgcagat

SEQ ID NO: 4980473 - DNA, 25 bp, Homo sapien
gaggcttcctcatcgaagtgttgca

SEQ ID NO: 4980474 - DNA, 25 bp, Homo sapien
tcctcatcgaagtgttgcagatcac

SEQ ID NO: 4980475 - DNA, 25 bp, Homo sapien
tgaggcttcctcatcgaagtgttgc

SEQ ID NO: 4980476 - DNA, 25 bp, Homo sapien
gggtccatgcggttcagctgctccc

SEQ ID NO: 4980477 - DNA, 25 bp, Homo sapien
atccttagggtccatgcggttcagc

SEQ ID NO: 4980478 - DNA, 25 bp, Homo sapien
agggtccatgcggttcagctgctcc

SEQ ID NO: 4980479 - DNA, 25 bp, Homo sapien
cttagggtccatgcggttcagctgc

SEQ ID NO: 4980480 - DNA, 25 bp, Homo sapien
ggttgtgcaacaaggagcaactgcc

SEQ ID NO: 4980481 - DNA, 25 bp, Homo sapien
accttggatttctggttgtgcaaca

SEQ ID NO: 4980482 - DNA, 25 bp, Homo sapien
tagaagcaggtgatgtccataagca

SEQ ID NO: 4980483 - DNA, 25 bp, Homo sapien
tgtccataagcataaccttggattt

SEQ ID NO: 4980484 - DNA, 25 bp, Homo sapien
tgaccatcctaagaagcaaccactt

SEQ ID NO: 4980485 - DNA, 25 bp, Homo sapien
tctttaatggcagcttagtgttccc

SEQ ID NO: 4980486 - DNA, 25 bp, Homo sapien
gaagattctagtacggtgaaaagca

SEQ ID NO: 4980487 - DNA, 25 bp, Homo sapien
acagctgccctgtactctttaatgg

SEQ ID NO: 4980488 - DNA, 25 bp, Homo sapien
ttatcctgtgattccgttctgcttt

SEQ ID NO: 4980489 - DNA, 25 bp, Homo sapien
agcacgactgcaaagtgactgcggg

SEQ ID NO: 4980490 - DNA, 25 bp, Homo sapien
caagcaacattgcaacgctgccctg

SEQ ID NO: 4980491 - DNA, 25 bp, Homo sapien
gccccagacctcagcgagttatttg

SEQ ID NO: 4980492 - DNA, 25 bp, Homo sapien
cgcgctcggatttcgggcggatagt

SEQ ID NO: 4980493 - DNA, 25 bp, Homo sapien
ttattcgaagtctccccgggacagc

SEQ ID NO: 4980494 - DNA, 25 bp, Homo sapien
tggtgtgaaactcccgcggagacgc

SEQ ID NO: 4980495 - DNA, 25 bp, Homo sapien
cggatagtgcgtgggaggcggcgct

SEQ ID NO: 4980496 - DNA, 25 bp, Homo sapien
aaaaagcaagaatatctttggtggc

SEQ ID NO: 4980497 - DNA, 25 bp, Homo sapien
aaagcaagaatatctttggtggcca

SEQ ID NO: 4980498 - DNA, 25 bp, Homo sapien
gcggaggaacttgataaacattaaa

SEQ ID NO: 4980499 - DNA, 25 bp, Homo sapien
ctgttgtctgcggaggaacttgata

SEQ ID NO: 4980500 - DNA, 25 bp, Homo sapien
tgaccactagaattgtagcgttggg

SEQ ID NO: 4980501 - DNA, 25 bp, Homo sapien
ggtgaccctgtcaccacgcagatga

SEQ ID NO: 4980502 - DNA, 25 bp, Homo sapien
tcacaccgccagtttgtggtgaccc

SEQ ID NO: 4980503 - DNA, 25 bp, Homo sapien
attttacgacccatgagacccaagg

SEQ ID NO: 4980504 - DNA, 25 bp, Homo sapien
tgcacagtcttctcaacccagatga

SEQ ID NO: 4980505 - DNA, 25 bp, Homo sapien
tgcagcggtctcactagtcttcttg

SEQ ID NO: 4980506 - DNA, 25 bp, Homo sapien
tcctcctggagactacacgcacagt

SEQ ID NO: 4980507 - DNA, 25 bp, Homo sapien
tttctagcccctgtgtgatcaggcc

SEQ ID NO: 4980508 - DNA, 25 bp, Homo sapien
tggagcgggttcaagccaagtcctc

SEQ ID NO: 4980509 - DNA, 25 bp, Homo sapien
ctctaggagggaggtactattcacg

SEQ ID NO: 4980510 - DNA, 25 bp, Homo sapien
ttctttctcacggtcactcaggttg

SEQ ID NO: 4980511 - DNA, 25 bp, Homo sapien
ccttagggcataacaattgctagca

SEQ ID NO: 4980512 - DNA, 25 bp, Homo sapien
tacctcaggctttctttcccagtgg

SEQ ID NO: 4980513 - DNA, 25 bp, Homo sapien
gaaacatggcaactaaagggatacc

SEQ ID NO: 4980514 - DNA, 25 bp, Homo sapien
tcctctgggatagtgtactgtacac

SEQ ID NO: 4980515 - DNA, 25 bp, Homo sapien
ggagtgacatacacatccaccatgg

SEQ ID NO: 4980516 - DNA, 25 bp, Homo sapien
tgttaagcgagtgaagcagaattcc

SEQ ID NO: 4980517 - DNA, 25 bp, Homo sapien
gccatattagcccatcagaccaagc

SEQ ID NO: 4980518 - DNA, 25 bp, Homo sapien
tgtgaccggctccactgtaccttgg

SEQ ID NO: 4980519 - DNA, 25 bp, Homo sapien
acaagtctgcccttttgtgaccggc

SEQ ID NO: 4980520 - DNA, 25 bp, Homo sapien
ttttgaggaacatgacgggccagcc

SEQ ID NO: 4980521 - DNA, 25 bp, Homo sapien
tgtagagaagcactgcgcctttgca

SEQ ID NO: 4980522 - DNA, 25 bp, Homo sapien
gcattcctggagaggctagtgtgca

SEQ ID NO: 4980523 - DNA, 25 bp, Homo sapien
tgacagagtatcctgaaatcagacc

SEQ ID NO: 4980524 - DNA, 25 bp, Homo sapien
gtcatgcggccatcgttcagacaca

SEQ ID NO: 4980525 - DNA, 25 bp, Homo sapien
cagtctaggtagttggtaaccttgg

SEQ ID NO: 4980526 - DNA, 25 bp, Homo sapien
catgttgtcacgaatccagtctagg

SEQ ID NO: 4980527 - DNA, 25 bp, Homo sapien
ttggtgtacacacccgggacatcct

SEQ ID NO: 4980528 - DNA, 25 bp, Homo sapien
aaaggagatagcaggtttggcgttt

SEQ ID NO: 4980529 - DNA, 25 bp, Homo sapien
gatagcaggtttggcgtttgcaaaa

SEQ ID NO: 4980530 - DNA, 25 bp, Homo sapien
tttggcgtttgcaaaaaaagcagac

SEQ ID NO: 4980531 - DNA, 25 bp, Homo sapien
gtttggcgtttgcaaaaaaagcaga

SEQ ID NO: 4980532 - DNA, 25 bp, Homo sapien
taactaagcttgcagatagataatg

SEQ ID NO: 4980533 - DNA, 25 bp, Homo sapien
ggttttgcttttaactaagcttgca

SEQ ID NO: 4980534 - DNA, 25 bp, Homo sapien
gataatggtttcactttggtacaac

SEQ ID NO: 4980535 - DNA, 25 bp, Homo sapien
gcttgcagatagataatggtttcac

SEQ ID NO: 4980536 - DNA, 25 bp, Homo sapien
tttgtttctggactgtaagctggta

SEQ ID NO: 4980537 - DNA, 25 bp, Homo sapien
ctaaaggagagcttcgcacgctgca

SEQ ID NO: 4980538 - DNA, 25 bp, Homo sapien
tgtgcaggtcttaataccagcaggc

SEQ ID NO: 4980539 - DNA, 25 bp, Homo sapien
ggaaaccgccgatatgactgccttg

SEQ ID NO: 4980540 - DNA, 25 bp, Homo sapien
taaggatgcccacacaaaggacctc

SEQ ID NO: 4980541 - DNA, 25 bp, Homo sapien
gggtacagtctgacatgagcctcct

SEQ ID NO: 4980542 - DNA, 25 bp, Homo sapien
gcacacagcatgttgtcggtgactg

SEQ ID NO: 4980543 - DNA, 25 bp, Homo sapien
tggcaggcgtcgtgcaagtttgcct

SEQ ID NO: 4980544 - DNA, 25 bp, Homo sapien
taaatgttgtgatgtgcagcggctg

SEQ ID NO: 4980545 - DNA, 25 bp, Homo sapien
cagccgctccgaatagaaaggagac

SEQ ID NO: 4980546 - DNA, 25 bp, Homo sapien
tcagccgctccgaatagaaaggaga

SEQ ID NO: 4980547 - DNA, 25 bp, Homo sapien
cactgctgatgcttcggaccaggga

SEQ ID NO: 4980548 - DNA, 25 bp, Homo sapien
cagacctcgccaaacgtttcctggg

SEQ ID NO: 4980549 - DNA, 25 bp, Homo sapien
ctgcactcactgaaggccggcgtta

SEQ ID NO: 4980550 - DNA, 25 bp, Homo sapien
cacaaaaacagcaggattccgggat

SEQ ID NO: 4980551 - DNA, 25 bp, Homo sapien
tcatgcttgccgtagccggagagct

SEQ ID NO: 4980552 - DNA, 25 bp, Homo sapien
cgtagccggagagctcacactccgt

SEQ ID NO: 4980553 - DNA, 25 bp, Homo sapien
aggcctcatgcttgccgtagccgga

SEQ ID NO: 4980554 - DNA, 25 bp, Homo sapien
ttgccgtagccggagagctcacact

SEQ ID NO: 4980555 - DNA, 25 bp, Homo sapien
aaggcacacagtgcggaccacgctg

SEQ ID NO: 4980556 - DNA, 25 bp, Homo sapien
gaaggcacacagtgcggaccacgct

SEQ ID NO: 4980557 - DNA, 25 bp, Homo sapien
tgggcacagcgggacgaatccgatt

SEQ ID NO: 4980558 - DNA, 25 bp, Homo sapien
ggacgaatccgatttcagctgcagc

SEQ ID NO: 4980559 - DNA, 25 bp, Homo sapien
gtaagtgtcatcatcgaattcctta

SEQ ID NO: 4980560 - DNA, 25 bp, Homo sapien
catcgaattccttatggacaatgta

SEQ ID NO: 4980561 - DNA, 25 bp, Homo sapien
ctcgccagggaccacccggtatgtt

SEQ ID NO: 4980562 - DNA, 25 bp, Homo sapien
caatgtcattgtcgtaagtgtcatc

SEQ ID NO: 4980563 - DNA, 25 bp, Homo sapien
ctgcccaagatcaccgtcaggtggt

SEQ ID NO: 4980564 - DNA, 25 bp, Homo sapien
tcaccgtcaggtggtggggcggaaa

SEQ ID NO: 4980565 - DNA, 25 bp, Homo sapien
tgcccaagatcaccgtcaggtggtg

SEQ ID NO: 4980566 - DNA, 25 bp, Homo sapien
caagatcaccgtcaggtggtggggc

SEQ ID NO: 4980567 - DNA, 25 bp, Homo sapien
gcaggagctgatgagtatgcccccg

SEQ ID NO: 4980568 - DNA, 25 bp, Homo sapien
cctttgatgcgaaactgaggctggc

SEQ ID NO: 4980569 - DNA, 25 bp, Homo sapien
tctccgggcgacctcctgtgcttgg

SEQ ID NO: 4980570 - DNA, 25 bp, Homo sapien
cgatgtcggcgaagagccctccttt

SEQ ID NO: 4980571 - DNA, 25 bp, Homo sapien
agggcacatcacagtactcccacgt

SEQ ID NO: 4980572 - DNA, 25 bp, Homo sapien
cacgtcagcctgcggttcttcagca

SEQ ID NO: 4980573 - DNA, 25 bp, Homo sapien
cccacgtcagcctgcggttcttcag

SEQ ID NO: 4980574 - DNA, 25 bp, Homo sapien
ctcccacgtcagcctgcggttcttc

SEQ ID NO: 4980575 - DNA, 25 bp, Homo sapien
atgataagagagtttaaggtttcct

SEQ ID NO: 4980576 - DNA, 25 bp, Homo sapien
ctaaatgataagagagtttaaggtt

SEQ ID NO: 4980577 - DNA, 25 bp, Homo sapien
taatttttgtagagatggggtcttg

SEQ ID NO: 4980578 - DNA, 25 bp, Homo sapien
tttttgtagagatggggtcttgcca

SEQ ID NO: 4980579 - DNA, 25 bp, Homo sapien
gcagtaattatgtttgcccaggccc

SEQ ID NO: 4980580 - DNA, 25 bp, Homo sapien
ggcccagtgcctgggcactggggtt

SEQ ID NO: 4980581 - DNA, 25 bp, Homo sapien
agtaattatgtttgcccaggcccag

SEQ ID NO: 4980582 - DNA, 25 bp, Homo sapien
cggcagtaattatgtttgcccaggc

SEQ ID NO: 4980583 - DNA, 25 bp, Homo sapien
gatcatggaattccacgggaggcag

SEQ ID NO: 4980584 - DNA, 25 bp, Homo sapien
gcgtgccacggtaggctgacccatt

SEQ ID NO: 4980585 - DNA, 25 bp, Homo sapien
cacccgactcggtgaggctgtgcgt

SEQ ID NO: 4980586 - DNA, 25 bp, Homo sapien
gctgtgtaaaccttgcctatcagga

SEQ ID NO: 4980587 - DNA, 25 bp, Homo sapien
tcaaaaaagggagaatctccattca

SEQ ID NO: 4980588 - DNA, 25 bp, Homo sapien
gacaaagccccattcacccattaat

SEQ ID NO: 4980589 - DNA, 25 bp, Homo sapien
tcctctcctccatagaggaggaaat

SEQ ID NO: 4980590 - DNA, 25 bp, Homo sapien
tgaaaaccactgattcagccccatc

SEQ ID NO: 4980591 - DNA, 25 bp, Homo sapien
ccgccttaaagacgtagcaccaggg

SEQ ID NO: 4980592 - DNA, 25 bp, Homo sapien
tctgagctgtacttccccgccttaa

SEQ ID NO: 4980593 - DNA, 25 bp, Homo sapien
tccccgccttaaagacgtagcacca

SEQ ID NO: 4980594 - DNA, 25 bp, Homo sapien
tgagctgtacttccccgccttaaag

SEQ ID NO: 4980595 - DNA, 25 bp, Homo sapien
tgtttcttgggagaaccctgacgga

SEQ ID NO: 4980596 - DNA, 25 bp, Homo sapien
aagatgtttcggacttgccagcccc

SEQ ID NO: 4980597 - DNA, 25 bp, Homo sapien
tgtcaagccgggaactacgtcaggc

SEQ ID NO: 4980598 - DNA, 25 bp, Homo sapien
tagataatgtagttgggcctcgtcc

SEQ ID NO: 4980599 - DNA, 25 bp, Homo sapien
gtgcccctgtagctgatgccctggt

SEQ ID NO: 4980600 - DNA, 25 bp, Homo sapien
gttccagttggtgcactcggcgcca

SEQ ID NO: 4980601 - DNA, 25 bp, Homo sapien
tgatgccctggtcctcgtagcacgt

SEQ ID NO: 4980602 - DNA, 25 bp, Homo sapien
ggccaacgcgctgctgttccagttg

SEQ ID NO: 4980603 - DNA, 25 bp, Homo sapien
aatccttcggggcactggcacacga

SEQ ID NO: 4980604 - DNA, 25 bp, Homo sapien
ccgttgaaacaccttggctcgctgc

SEQ ID NO: 4980605 - DNA, 25 bp, Homo sapien
cactggcacacgaaatctgagaagt

SEQ ID NO: 4980606 - DNA, 25 bp, Homo sapien
caggtgcccccgttgaaacaccttg

SEQ ID NO: 4980607 - DNA, 25 bp, Homo sapien
cctgcaggtcagacaagtgttgttc

SEQ ID NO: 4980608 - DNA, 25 bp, Homo sapien
ggaacacgcgtataccagttctgca

SEQ ID NO: 4980609 - DNA, 25 bp, Homo sapien
ctcaagtcctgcagcgtggaacacg

SEQ ID NO: 4980610 - DNA, 25 bp, Homo sapien
taagaatgtgctctatgtgccaggc

SEQ ID NO: 4980611 - DNA, 25 bp, Homo sapien
tgatgttgctggtatatcatctgcg

SEQ ID NO: 4980612 - DNA, 25 bp, Homo sapien
cacccggttgcttctgagcacaggg

SEQ ID NO: 4980613 - DNA, 25 bp, Homo sapien
gcaccagcaatattccacccggttg

SEQ ID NO: 4980614 - DNA, 25 bp, Homo sapien
agggcgcagccatgactgatgttgc

SEQ ID NO: 4980615 - DNA, 25 bp, Homo sapien
caacgaaggcattaagagtccaggt

SEQ ID NO: 4980616 - DNA, 25 bp, Homo sapien
gcaggatgccatccaacaacgaagg

SEQ ID NO: 4980617 - DNA, 25 bp, Homo sapien
taattaaagaagtagcacgtgccca

SEQ ID NO: 4980618 - DNA, 25 bp, Homo sapien
tagttttggacctgaagctgggcct

SEQ ID NO: 4980619 - DNA, 25 bp, Homo sapien
ctcttctgaatcgggcatggatttc

SEQ ID NO: 4980620 - DNA, 25 bp, Homo sapien
ctcctcttctgaatcgggcatggat

SEQ ID NO: 4980621 - DNA, 25 bp, Homo sapien
cctcttctgaatcgggcatggattt

SEQ ID NO: 4980622 - DNA, 25 bp, Homo sapien
tcctcttctgaatcgggcatggatt

SEQ ID NO: 4980623 - DNA, 25 bp, Homo sapien
gcctagggcccagctacacactggg

SEQ ID NO: 4980624 - DNA, 25 bp, Homo sapien
gggacaactgtactttatggattaa

SEQ ID NO: 4980625 - DNA, 25 bp, Homo sapien
gcagggagtggcatgttaattccgc

SEQ ID NO: 4980626 - DNA, 25 bp, Homo sapien
tacaccattctatatgaggaacttg

SEQ ID NO: 4980627 - DNA, 25 bp, Homo sapien
tccggaagcatcacagccttgaggg

SEQ ID NO: 4980628 - DNA, 25 bp, Homo sapien
agatggacacagacccctggagcct

SEQ ID NO: 4980629 - DNA, 25 bp, Homo sapien
cttgaggggcgggacacagggatcc

SEQ ID NO: 4980630 - DNA, 25 bp, Homo sapien
tggcccagatggacacagacccctg

SEQ ID NO: 4980631 - DNA, 25 bp, Homo sapien
gctgggcgaaacgaagactgctcca

SEQ ID NO: 4980632 - DNA, 25 bp, Homo sapien
ggcgaaacgaagactgctccacaca

SEQ ID NO: 4980633 - DNA, 25 bp, Homo sapien
ctggctgggcgaaacgaagactgct

SEQ ID NO: 4980634 - DNA, 25 bp, Homo sapien
tgggcgaaacgaagactgctccaca

SEQ ID NO: 4980635 - DNA, 25 bp, Homo sapien
attgcttcacagcgtcccttaaatt

SEQ ID NO: 4980636 - DNA, 25 bp, Homo sapien
gattgcttcacagcgtcccttaaat

SEQ ID NO: 4980637 - DNA, 25 bp, Homo sapien
tggaatgagacagtgtttcttcttt

SEQ ID NO: 4980638 - DNA, 25 bp, Homo sapien
tcttcttttgcgactggtttgtttc

SEQ ID NO: 4980639 - DNA, 25 bp, Homo sapien
ctagaagtggaatgagacagtgttt

SEQ ID NO: 4980640 - DNA, 25 bp, Homo sapien
cttcttttgcgactggtttgtttca

SEQ ID NO: 4980641 - DNA, 25 bp, Homo sapien
gagccgcagtcatgtcctcttggac

SEQ ID NO: 4980642 - DNA, 25 bp, Homo sapien
ccattcgtctgtcaatgctgggaga

SEQ ID NO: 4980643 - DNA, 25 bp, Homo sapien
tctgcagcggaagccattgggattt

SEQ ID NO: 4980644 - DNA, 25 bp, Homo sapien
gaagggctagaccatttctgagaca

SEQ ID NO: 4980645 - DNA, 25 bp, Homo sapien
cgctgcatcatgttcaacccttttg

SEQ ID NO: 4980646 - DNA, 25 bp, Homo sapien
ctagggctggtccacacataccacc

SEQ ID NO: 4980647 - DNA, 25 bp, Homo sapien
ataccacccgctgcatcatgttcaa

SEQ ID NO: 4980648 - DNA, 25 bp, Homo sapien
tgttcaacccttttgcaactgaacg

SEQ ID NO: 4980649 - DNA, 25 bp, Homo sapien
catccggccagcagaaaaacagtgc

SEQ ID NO: 4980650 - DNA, 25 bp, Homo sapien
tcatccggccagcagaaaaacagtg

SEQ ID NO: 4980651 - DNA, 25 bp, Homo sapien
tccggccagcagaaaaacagtgcag

SEQ ID NO: 4980652 - DNA, 25 bp, Homo sapien
ccggccagcagaaaaacagtgcagt

SEQ ID NO: 4980653 - DNA, 25 bp, Homo sapien
gaaatgatggtcgatgggcaccagt

SEQ ID NO: 4980654 - DNA, 25 bp, Homo sapien
gatgatcatgccaaccagaaaggtg

SEQ ID NO: 4980655 - DNA, 25 bp, Homo sapien
gccgttttggctgagaaattgatga

SEQ ID NO: 4980656 - DNA, 25 bp, Homo sapien
agagccaaggatgcatgccgttttg

SEQ ID NO: 4980657 - DNA, 25 bp, Homo sapien
cagaaacgtgagcaagctagaggag

SEQ ID NO: 4980658 - DNA, 25 bp, Homo sapien
gacttgcaataaaggaactgtacac

SEQ ID NO: 4980659 - DNA, 25 bp, Homo sapien
gtcgctccagatgttagtgaactgg

SEQ ID NO: 4980660 - DNA, 25 bp, Homo sapien
tatagtctgtactcttgccagcaag

SEQ ID NO: 4980661 - DNA, 25 bp, Homo sapien
taaggaggactgcacacttgactga

SEQ ID NO: 4980662 - DNA, 25 bp, Homo sapien
acttgactgatgcaccctgggcaaa

SEQ ID NO: 4980663 - DNA, 25 bp, Homo sapien
tcattagttacctgggacctcggcg

SEQ ID NO: 4980664 - DNA, 25 bp, Homo sapien
aatagtgctctggaagtaagtcccc

SEQ ID NO: 4980665 - DNA, 25 bp, Homo sapien
agccctggactcctgtaggatctca

SEQ ID NO: 4980666 - DNA, 25 bp, Homo sapien
tttcctcgcagaggttttctctcca

SEQ ID NO: 4980667 - DNA, 25 bp, Homo sapien
tccctttcctcgcagaggttttctc

SEQ ID NO: 4980668 - DNA, 25 bp, Homo sapien
tcctgtaggatctcagctctgagct

SEQ ID NO: 4980669 - DNA, 25 bp, Homo sapien
ccatgggggtttgctccggtaggca

SEQ ID NO: 4980670 - DNA, 25 bp, Homo sapien
catgggggtttgctccggtaggcat

SEQ ID NO: 4980671 - DNA, 25 bp, Homo sapien
gaggtgcccccatgggggtttgctc

SEQ ID NO: 4980672 - DNA, 25 bp, Homo sapien
ctgcggtaggaggtgcccccatggg

SEQ ID NO: 4980673 - DNA, 25 bp, Homo sapien
ctgctgagcacgggaggtagacctc

SEQ ID NO: 4980674 - DNA, 25 bp, Homo sapien
tgagcacgggaggtagacctcccat

SEQ ID NO: 4980675 - DNA, 25 bp, Homo sapien
gggaggtagacctcccatgagcagc

SEQ ID NO: 4980676 - DNA, 25 bp, Homo sapien
tgatggtcattgtagaaaaggggca

SEQ ID NO: 4980677 - DNA, 25 bp, Homo sapien
agcatttttgtccagtgaatacagc

SEQ ID NO: 4980678 - DNA, 25 bp, Homo sapien
tgaatacagctttggtgtagctttc

SEQ ID NO: 4980679 - DNA, 25 bp, Homo sapien
tgagtcaagcatttttgtccagtga

SEQ ID NO: 4980680 - DNA, 25 bp, Homo sapien
ccttcctgagtcaagcatttttgtc

SEQ ID NO: 4980681 - DNA, 25 bp, Homo sapien
tctcctccccgccagggaagtgatg

SEQ ID NO: 4980682 - DNA, 25 bp, Homo sapien
ctctctcctccccgccagggaagtg

SEQ ID NO: 4980683 - DNA, 25 bp, Homo sapien
cctccccgccagggaagtgatgcat

SEQ ID NO: 4980684 - DNA, 25 bp, Homo sapien
tcctccccgccagggaagtgatgca

SEQ ID NO: 4980685 - DNA, 25 bp, Homo sapien
ctcccagcagtcgggagcagagttt

SEQ ID NO: 4980686 - DNA, 25 bp, Homo sapien
tctcccagcagtcgggagcagagtt

SEQ ID NO: 4980687 - DNA, 25 bp, Homo sapien
ccagcctgagcaatacaggggaccc

SEQ ID NO: 4980688 - DNA, 25 bp, Homo sapien
gcctgagcaatacaggggaccccat

SEQ ID NO: 4980689 - DNA, 25 bp, Homo sapien
cagcctgagcaatacaggggacccc

SEQ ID NO: 4980690 - DNA, 25 bp, Homo sapien
ctgagcaatacaggggaccccatct

SEQ ID NO: 4980691 - DNA, 25 bp, Homo sapien
aaggctgcagtccgctgtgtttgtg

SEQ ID NO: 4980692 - DNA, 25 bp, Homo sapien
caaggctgcagtccgctgtgtttgt

SEQ ID NO: 4980693 - DNA, 25 bp, Homo sapien
tgtggtcccagtttcttgagaggcc

SEQ ID NO: 4980694 - DNA, 25 bp, Homo sapien
ggtcccagtttcttgagaggccgag

SEQ ID NO: 4980695 - DNA, 25 bp, Homo sapien
tctcaggttagactttccaagtctc

SEQ ID NO: 4980696 - DNA, 25 bp, Homo sapien
ctttgcctgcaatatctgtagactt

SEQ ID NO: 4980697 - DNA, 25 bp, Homo sapien
gtctggcttgtttcaactttgcctg

SEQ ID NO: 4980698 - DNA, 25 bp, Homo sapien
gatgtccccaatatacctgaggtct

SEQ ID NO: 4980699 - DNA, 25 bp, Homo sapien
tttctgtgtttccggctgggacttc

SEQ ID NO: 4980700 - DNA, 25 bp, Homo sapien
ggatcccaattgtagagcaggcagg

SEQ ID NO: 4980701 - DNA, 25 bp, Homo sapien
tccagggatcccaattgtagagcag

SEQ ID NO: 4980702 - DNA, 25 bp, Homo sapien
ccatctgggtcaccgaaactgtagg

SEQ ID NO: 4980703 - DNA, 25 bp, Homo sapien
ggcccatagcctttgtctccgccac

SEQ ID NO: 4980704 - DNA, 25 bp, Homo sapien
tttcttagacgtctacaccggccca

SEQ ID NO: 4980705 - DNA, 25 bp, Homo sapien
atagcctttgtctccgccaccatgg

SEQ ID NO: 4980706 - DNA, 25 bp, Homo sapien
ttagacgtctacaccggcccatagc

SEQ ID NO: 4980707 - DNA, 25 bp, Homo sapien
tcgctgaaccagagctgactatggg

SEQ ID NO: 4980708 - DNA, 25 bp, Homo sapien
ctttctttacttggaggagctcagt

SEQ ID NO: 4980709 - DNA, 25 bp, Homo sapien
catgaaagagttgctgaaatcgctg

SEQ ID NO: 4980710 - DNA, 25 bp, Homo sapien
tctgtggtctgccttacggcctctt

SEQ ID NO: 4980711 - DNA, 25 bp, Homo sapien
tgagcacggtctgtctactttccct

SEQ ID NO: 4980712 - DNA, 25 bp, Homo sapien
gagatgaacgatgaacctcaggctg

SEQ ID NO: 4980713 - DNA, 25 bp, Homo sapien
tgttcttttaaatcggtgagcacgg

SEQ ID NO: 4980714 - DNA, 25 bp, Homo sapien
gaggacattctgattccaagcagga

SEQ ID NO: 4980715 - DNA, 25 bp, Homo sapien
tgctggcgcctgccaccacccccga

SEQ ID NO: 4980716 - DNA, 25 bp, Homo sapien
gactgctggcgcctgccaccacccc

SEQ ID NO: 4980717 - DNA, 25 bp, Homo sapien
tgggactgctggcgcctgccaccac

SEQ ID NO: 4980718 - DNA, 25 bp, Homo sapien
gctggcgcctgccaccacccccgac

SEQ ID NO: 4980719 - DNA, 25 bp, Homo sapien
tgtacccttctaacctctatctcag

SEQ ID NO: 4980720 - DNA, 25 bp, Homo sapien
gattaccagccagttgacaaccaac

SEQ ID NO: 4980721 - DNA, 25 bp, Homo sapien
catctttgtacccttctaacctcta

SEQ ID NO: 4980722 - DNA, 25 bp, Homo sapien
tgacaaccaaccatctttgtaccct

SEQ ID NO: 4980723 - DNA, 25 bp, Homo sapien
tagatagagattcatggacccaccc

SEQ ID NO: 4980724 - DNA, 25 bp, Homo sapien
tgttctgaagggaacttagtcatcc

SEQ ID NO: 4980725 - DNA, 25 bp, Homo sapien
ccacaggattgtcagcgttcttcag

SEQ ID NO: 4980726 - DNA, 25 bp, Homo sapien
tgattcatcaataagacccacagga

SEQ ID NO: 4980727 - DNA, 25 bp, Homo sapien
caaagtgagcgaattgcttgagtcc

SEQ ID NO: 4980728 - DNA, 25 bp, Homo sapien
tgtctgccacatgggcctgtcacgg

SEQ ID NO: 4980729 - DNA, 25 bp, Homo sapien
tctgtgtcagagtacttggttatct

SEQ ID NO: 4980730 - DNA, 25 bp, Homo sapien
taagtgaataaatgatctgtgtcag

SEQ ID NO: 4980731 - DNA, 25 bp, Homo sapien
taggctagctagaggccccatagat

SEQ ID NO: 4980732 - DNA, 25 bp, Homo sapien
gagctcctgccatcagattgtcaca

SEQ ID NO: 4980733 - DNA, 25 bp, Homo sapien
ccccatagatgaggcttggcagaaa

SEQ ID NO: 4980734 - DNA, 25 bp, Homo sapien
tagctagaccgggagcctgttccat

SEQ ID NO: 4980735 - DNA, 25 bp, Homo sapien
tcctcctggcatgataatgttttga

SEQ ID NO: 4980736 - DNA, 25 bp, Homo sapien
tacaagggataccactgtgaattgc

SEQ ID NO: 4980737 - DNA, 25 bp, Homo sapien
tgatgtagtcgcatgtcctcctcca

SEQ ID NO: 4980738 - DNA, 25 bp, Homo sapien
gatcagttcattgcttacttgcatg

SEQ ID NO: 4980739 - DNA, 25 bp, Homo sapien
gccttgtgcagtggggggactcgac

SEQ ID NO: 4980740 - DNA, 25 bp, Homo sapien
gactcgaccccctgacatggggctg

SEQ ID NO: 4980741 - DNA, 25 bp, Homo sapien
tgacatggggcagcccatagcaggc

SEQ ID NO: 4980742 - DNA, 25 bp, Homo sapien
gcagcccatagcaggccttgtgcag

SEQ ID NO: 4980743 - DNA, 25 bp, Homo sapien
cgcggctctcacatggtggttcctg

SEQ ID NO: 4980744 - DNA, 25 bp, Homo sapien
tatccagatggagctctcgcttcct

SEQ ID NO: 4980745 - DNA, 25 bp, Homo sapien
cggctctcacatggtggttcctgct

SEQ ID NO: 4980746 - DNA, 25 bp, Homo sapien
gcggctctcacatggtggttcctgc

SEQ ID NO: 4980747 - DNA, 25 bp, Homo sapien
cacaaacgttcaggggtacagccat

SEQ ID NO: 4980748 - DNA, 25 bp, Homo sapien
gcacactggaggtcctccattacag

SEQ ID NO: 4980749 - DNA, 25 bp, Homo sapien
tacagaggcccagcgcacatcgctg

SEQ ID NO: 4980750 - DNA, 25 bp, Homo sapien
aggacgcagccctccgtgggcactg

SEQ ID NO: 4980751 - DNA, 25 bp, Homo sapien
caagagcgactcatagtaaccagga

SEQ ID NO: 4980752 - DNA, 25 bp, Homo sapien
gagtgccaagctctccatctgtggt

SEQ ID NO: 4980753 - DNA, 25 bp, Homo sapien
cagaaagggtatctgctgaccacca

SEQ ID NO: 4980754 - DNA, 25 bp, Homo sapien
ttaattatagttgcggcctggcccc

SEQ ID NO: 4980755 - DNA, 25 bp, Homo sapien
ctccattcctgctcaagcgtgtgtg

SEQ ID NO: 4980756 - DNA, 25 bp, Homo sapien
tccattcctgctcaagcgtgtgtgc

SEQ ID NO: 4980757 - DNA, 25 bp, Homo sapien
cattcctgctcaagcgtgtgtgctg

SEQ ID NO: 4980758 - DNA, 25 bp, Homo sapien
tcctgctcaagcgtgtgtgctgggc

SEQ ID NO: 4980759 - DNA, 25 bp, Homo sapien
tgagccgtggggaagcttgccttct

SEQ ID NO: 4980760 - DNA, 25 bp, Homo sapien
ctcctgagccgtggggaagcttgcc

SEQ ID NO: 4980761 - DNA, 25 bp, Homo sapien
cctgagccgtggggaagcttgcctt

SEQ ID NO: 4980762 - DNA, 25 bp, Homo sapien
cccctcctgagccgtggggaagctt

SEQ ID NO: 4980763 - DNA, 25 bp, Homo sapien
tctttatcttccattaagtagtgca

SEQ ID NO: 4980764 - DNA, 25 bp, Homo sapien
tcatcatgtctgaagttatgctatt

SEQ ID NO: 4980765 - DNA, 25 bp, Homo sapien
gcagcatgagctttcatctccttca

SEQ ID NO: 4980766 - DNA, 25 bp, Homo sapien
ggcctatgttgtgcttctggtgtaa

SEQ ID NO: 4980767 - DNA, 25 bp, Homo sapien
agcagcaggccagtacaatatgttg

SEQ ID NO: 4980768 - DNA, 25 bp, Homo sapien
ctattgagaagcctgtgggccagca

SEQ ID NO: 4980769 - DNA, 25 bp, Homo sapien
caggccagtacaatatgttgcagca

SEQ ID NO: 4980770 - DNA, 25 bp, Homo sapien
ccagtacaatatgttgcagcataat

SEQ ID NO: 4980771 - DNA, 25 bp, Homo sapien
tatctctgtttgttatatgaactat

SEQ ID NO: 4980772 - DNA, 25 bp, Homo sapien
caattgatatctctgtttgttatat

SEQ ID NO: 4980773 - DNA, 25 bp, Homo sapien
gatatctctgtttgttatatgaact

SEQ ID NO: 4980774 - DNA, 25 bp, Homo sapien
ctgacaattgatatctctgtttgtt

SEQ ID NO: 4980775 - DNA, 25 bp, Homo sapien
tgtcatctttaagtttcatttggta

SEQ ID NO: 4980776 - DNA, 25 bp, Homo sapien
catctttaagtttcatttggtatct

SEQ ID NO: 4980777 - DNA, 25 bp, Homo sapien
catcttgtcatctttaagtttcatt

SEQ ID NO: 4980778 - DNA, 25 bp, Homo sapien
tctttaagtttcatttggtatctct

SEQ ID NO: 4980779 - DNA, 25 bp, Homo sapien
tatgtagcgtcattgcagggtgacc

SEQ ID NO: 4980780 - DNA, 25 bp, Homo sapien
cattcactgtagtgagactcacagg

SEQ ID NO: 4980781 - DNA, 25 bp, Homo sapien
tattaacacccgtaatagagttggc

SEQ ID NO: 4980782 - DNA, 25 bp, Homo sapien
tgcctttatggccactatgtagcgt

SEQ ID NO: 4980783 - DNA, 25 bp, Homo sapien
atagacctattaattgagttcaacc

SEQ ID NO: 4980784 - DNA, 25 bp, Homo sapien
gaggaatgaagagtcctcacttgca

SEQ ID NO: 4980785 - DNA, 25 bp, Homo sapien
tgcctgaagctatgtggttgtagag

SEQ ID NO: 4980786 - DNA, 25 bp, Homo sapien
cactatagtggatgcttttacatat

SEQ ID NO: 4980787 - DNA, 25 bp, Homo sapien
gcttagaatcacacaaagaccaaat

SEQ ID NO: 4980788 - DNA, 25 bp, Homo sapien
tcgtgaagtgtaatagaaaggtagg

SEQ ID NO: 4980789 - DNA, 25 bp, Homo sapien
gatagtgtattgctcacagaagctg

SEQ ID NO: 4980790 - DNA, 25 bp, Homo sapien
gctaagttaaaagtgctcagaattc

SEQ ID NO: 4980791 - DNA, 25 bp, Homo sapien
ttttcaataagaatatgagggctca

SEQ ID NO: 4980792 - DNA, 25 bp, Homo sapien
ttcactgggagtgatattttcaata

SEQ ID NO: 4980793 - DNA, 25 bp, Homo sapien
aatcaatgagtacaccatccgtccc

SEQ ID NO: 4980794 - DNA, 25 bp, Homo sapien
gctcatgccctagaaaagggtttca

SEQ ID NO: 4980795 - DNA, 25 bp, Homo sapien
aggagaacccctgccagtggatagt

SEQ ID NO: 4980796 - DNA, 25 bp, Homo sapien
gacatctttgattacatccagtgga

SEQ ID NO: 4980797 - DNA, 25 bp, Homo sapien
gccagtggatagtgaaaaagacatc

SEQ ID NO: 4980798 - DNA, 25 bp, Homo sapien
gattacatccagtggaaataccggg

SEQ ID NO: 4980799 - DNA, 25 bp, Homo sapien
aaactcacacagtacactttaaata

SEQ ID NO: 4980800 - DNA, 25 bp, Homo sapien
gatgtggctcggttatagtatatgt

SEQ ID NO: 4980801 - DNA, 25 bp, Homo sapien
tcctggtaagatgtaagaattaatt

SEQ ID NO: 4980802 - DNA, 25 bp, Homo sapien
ccctaggatactgtcaggcaccaac

SEQ ID NO: 4980803 - DNA, 25 bp, Homo sapien
tggattcttctttattttgaaatat

SEQ ID NO: 4980804 - DNA, 25 bp, Homo sapien
gcaatgtggattcttctttattttg

SEQ ID NO: 4980805 - DNA, 25 bp, Homo sapien
caatgtggattcttctttattttga

SEQ ID NO: 4980806 - DNA, 25 bp, Homo sapien
atgtggattcttctttattttgaaa

SEQ ID NO: 4980807 - DNA, 25 bp, Homo sapien
atagcttttctattttttggcatac

SEQ ID NO: 4980808 - DNA, 25 bp, Homo sapien
tatagcttttctattttttggcata

SEQ ID NO: 4980809 - DNA, 25 bp, Homo sapien
ttatagcttttctattttttggcat

SEQ ID NO: 4980810 - DNA, 25 bp, Homo sapien
ttcgacacagtagtccagggccaca

SEQ ID NO: 4980811 - DNA, 25 bp, Homo sapien
taatcgagcatgctgccgattgctg

SEQ ID NO: 4980812 - DNA, 25 bp, Homo sapien
gattgctggtcaattggcttcgaca

SEQ ID NO: 4980813 - DNA, 25 bp, Homo sapien
agacctgtccctccaaaaggactgg

SEQ ID NO: 4980814 - DNA, 25 bp, Homo sapien
ttgtgatttcttaatacttggcttc

SEQ ID NO: 4980815 - DNA, 25 bp, Homo sapien
gggttgcatcttccatcgtagtaca

SEQ ID NO: 4980816 - DNA, 25 bp, Homo sapien
ggactgggtgcccagttgttccttc

SEQ ID NO: 4980817 - DNA, 25 bp, Homo sapien
gcatgtgtgccatcttgctcatcaa

SEQ ID NO: 4980818 - DNA, 25 bp, Homo sapien
cgcaacccacgacatgtagcacaga

SEQ ID NO: 4980819 - DNA, 25 bp, Homo sapien
ggctggaggcagaactttctggtat

SEQ ID NO: 4980820 - DNA, 25 bp, Homo sapien
gcacagaacggcttctcatcgcggg

SEQ ID NO: 4980821 - DNA, 25 bp, Homo sapien
tggtattgcagtccgtgtcagacag

SEQ ID NO: 4980822 - DNA, 25 bp, Homo sapien
cttccgggccccatgcaggtcagca

SEQ ID NO: 4980823 - DNA, 25 bp, Homo sapien
cagagctcctgatgttgttgaagtc

SEQ ID NO: 4980824 - DNA, 25 bp, Homo sapien
tcagccccagcaggacggccgccac

SEQ ID NO: 4980825 - DNA, 25 bp, Homo sapien
gcagagctcctgatgttgttgaagt

SEQ ID NO: 4980826 - DNA, 25 bp, Homo sapien
ctggagggtcccagcactgtgcgtc

SEQ ID NO: 4980827 - DNA, 25 bp, Homo sapien
gagcagagcttccactaagctggca

SEQ ID NO: 4980828 - DNA, 25 bp, Homo sapien
actgtgcgtcaccaaagcgaggctg

SEQ ID NO: 4980829 - DNA, 25 bp, Homo sapien
gctggcagctcagcacgtcgtctgt

SEQ ID NO: 4980830 - DNA, 25 bp, Homo sapien
agccattgtgtcttccacgaaccag

SEQ ID NO: 4980831 - DNA, 25 bp, Homo sapien
ttgtgtcttccacgaaccaggctct

SEQ ID NO: 4980832 - DNA, 25 bp, Homo sapien
acgaaccaggctctccgttttgcct

SEQ ID NO: 4980833 - DNA, 25 bp, Homo sapien
gatataagagtagccattgtgtctt

SEQ ID NO: 4980834 - DNA, 25 bp, Homo sapien
ctgccatggcctccaagttgctcag

SEQ ID NO: 4980835 - DNA, 25 bp, Homo sapien
ggacaaatattcctacaagaggctt

SEQ ID NO: 4980836 - DNA, 25 bp, Homo sapien
gcatgcttctctccatgataggtta

SEQ ID NO: 4980837 - DNA, 25 bp, Homo sapien
gaggcttgattggaatagggttatt

SEQ ID NO: 4980838 - DNA, 25 bp, Homo sapien
tgtgcccggccaggacaaatattcc

SEQ ID NO: 4980839 - DNA, 25 bp, Homo sapien
taagccagctcattgtgtagtgaaa

SEQ ID NO: 4980840 - DNA, 25 bp, Homo sapien
taagaatgtgctgccagattggatc

SEQ ID NO: 4980841 - DNA, 25 bp, Homo sapien
cattgctgctaagtacatgctggat

SEQ ID NO: 4980842 - DNA, 25 bp, Homo sapien
acaacacccgttttggcattgctgc

SEQ ID NO: 4980843 - DNA, 25 bp, Homo sapien
tgatcactcattgcccttaaccctg

SEQ ID NO: 4980844 - DNA, 25 bp, Homo sapien
gattggactgggttatactcagacc

SEQ ID NO: 4980845 - DNA, 25 bp, Homo sapien
tactcagacccttcgaccaggtaag

SEQ ID NO: 4980846 - DNA, 25 bp, Homo sapien
cagagaaagtttgccatgatcatgc

SEQ ID NO: 4980847 - DNA, 25 bp, Homo sapien
catgttagaggagacgatctgaccc

SEQ ID NO: 4980848 - DNA, 25 bp, Homo sapien
cagtttgtacatcacgtcctgcatg

SEQ ID NO: 4980849 - DNA, 25 bp, Homo sapien
ggaagttgtcatgtttgtgccacgt

SEQ ID NO: 4980850 - DNA, 25 bp, Homo sapien
tattaaatgtgttcctcagcgacag

SEQ ID NO: 4980851 - DNA, 25 bp, Homo sapien
tccagaatatgcaagccagggtgtt

SEQ ID NO: 4980852 - DNA, 25 bp, Homo sapien
agctcctaagggagtcggagcttgt

SEQ ID NO: 4980853 - DNA, 25 bp, Homo sapien
caccaccgctacagaggattaaggg

SEQ ID NO: 4980854 - DNA, 25 bp, Homo sapien
agggagtcggagcttgtgccaccac

SEQ ID NO: 4980855 - DNA, 25 bp, Homo sapien
caggctccaacattagtcgtacttc

SEQ ID NO: 4980856 - DNA, 25 bp, Homo sapien
gctccaacattagtcgtacttcctc

SEQ ID NO: 4980857 - DNA, 25 bp, Homo sapien
caacattagtcgtacttcctccctc

SEQ ID NO: 4980858 - DNA, 25 bp, Homo sapien
ccaacattagtcgtacttcctccct

SEQ ID NO: 4980859 - DNA, 25 bp, Homo sapien
acaaggatccgttcttcaggctgca

SEQ ID NO: 4980860 - DNA, 25 bp, Homo sapien
tgaaagcacttgtgagctcccgtcc

SEQ ID NO: 4980861 - DNA, 25 bp, Homo sapien
tgaaaacgtaacactggccaatgat

SEQ ID NO: 4980862 - DNA, 25 bp, Homo sapien
gacttgacatgtagtgctcagccac

SEQ ID NO: 4980863 - DNA, 25 bp, Homo sapien
agctggtcatgagagagccgtgcac

SEQ ID NO: 4980864 - DNA, 25 bp, Homo sapien
tatgtgcggcacgagcacacatgtc

SEQ ID NO: 4980865 - DNA, 25 bp, Homo sapien
tagctcgggaaggtgagtctccgca

SEQ ID NO: 4980866 - DNA, 25 bp, Homo sapien
tgtacagtagttaagttagctcggg

SEQ ID NO: 4980867 - DNA, 25 bp, Homo sapien
tcacacatatggaaggatcccatac

SEQ ID NO: 4980868 - DNA, 25 bp, Homo sapien
aaccaggccacgaagatgttccgaa

SEQ ID NO: 4980869 - DNA, 25 bp, Homo sapien
atgttccgaaagaggcgccagtcca

SEQ ID NO: 4980870 - DNA, 25 bp, Homo sapien
agccatgacagcagcgctgaacagc

SEQ ID NO: 4980871 - DNA, 25 bp, Homo sapien
agccttgcgggagcggatccagccc

SEQ ID NO: 4980872 - DNA, 25 bp, Homo sapien
gaaacaagctctagtacaacattac

SEQ ID NO: 4980873 - DNA, 25 bp, Homo sapien
aaaaacaggtgagccacaaaggcta

SEQ ID NO: 4980874 - DNA, 25 bp, Homo sapien
tacactctaccaatgtacatgggct

SEQ ID NO: 4980875 - DNA, 25 bp, Homo sapien
aacattacccagtcccctacatttg

SEQ ID NO: 4980876 - DNA, 25 bp, Homo sapien
tcatttatcatacgctaagacagta

SEQ ID NO: 4980877 - DNA, 25 bp, Homo sapien
tctaaataaacgttcaaattcttca

SEQ ID NO: 4980878 - DNA, 25 bp, Homo sapien
caggaaggcatatgatcagtagcgt

SEQ ID NO: 4980879 - DNA, 25 bp, Homo sapien
tttcacgatgcttgacaggaaggca

SEQ ID NO: 4980880 - DNA, 25 bp, Homo sapien
tgaggactgacaatgtgggtgatcc

SEQ ID NO: 4980881 - DNA, 25 bp, Homo sapien
agtgttccctgtatgctgttccaaa

SEQ ID NO: 4980882 - DNA, 25 bp, Homo sapien
tgttatctgctagggctaaagacca

SEQ ID NO: 4980883 - DNA, 25 bp, Homo sapien
gaataatctcaatccacccagtatg

SEQ ID NO: 4980884 - DNA, 25 bp, Homo sapien
gaatcctggatctatcacatgtggc

SEQ ID NO: 4980885 - DNA, 25 bp, Homo sapien
cagctttgaaacacgctgctgggcc

SEQ ID NO: 4980886 - DNA, 25 bp, Homo sapien
tgtgcatgtgggaagcggctcaact

SEQ ID NO: 4980887 - DNA, 25 bp, Homo sapien
tgtggtgttgagcacggtacccagc

SEQ ID NO: 4980888 - DNA, 25 bp, Homo sapien
gttggaggcgatcaccactgtgaag

SEQ ID NO: 4980889 - DNA, 25 bp, Homo sapien
tgaggccagctcgatcgtgaagccg

SEQ ID NO: 4980890 - DNA, 25 bp, Homo sapien
cttacagtgcgtggtgctgactgga

SEQ ID NO: 4980891 - DNA, 25 bp, Homo sapien
tgctgactggaagcccgatgttgga

SEQ ID NO: 4980892 - DNA, 25 bp, Homo sapien
cagaggcctgtgcagattccaactc

SEQ ID NO: 4980893 - DNA, 25 bp, Homo sapien
cggcgtgatgggagtgaggtccttc

SEQ ID NO: 4980894 - DNA, 25 bp, Homo sapien
gggagtgaggtccttccccatggtc

SEQ ID NO: 4980895 - DNA, 25 bp, Homo sapien
aaacagcagccagacgggtgtagct

SEQ ID NO: 4980896 - DNA, 25 bp, Homo sapien
gccacaaggctaccaggggaccgat

SEQ ID NO: 4980897 - DNA, 25 bp, Homo sapien
ccacaaggctaccaggggaccgatg

SEQ ID NO: 4980898 - DNA, 25 bp, Homo sapien
agccacaaggctaccaggggaccga

SEQ ID NO: 4980899 - DNA, 25 bp, Homo sapien
cacaaggctaccaggggaccgatgg

SEQ ID NO: 4980900 - DNA, 25 bp, Homo sapien
ctccacccacgttacctgctctgca

SEQ ID NO: 4980901 - DNA, 25 bp, Homo sapien
ccggcctgtcctgaactcgggcgta

SEQ ID NO: 4980902 - DNA, 25 bp, Homo sapien
ctgtcctgaactcgggcgtacacgg

SEQ ID NO: 4980903 - DNA, 25 bp, Homo sapien
tgaactcgggcgtacacggccgctg

SEQ ID NO: 4980904 - DNA, 25 bp, Homo sapien
gccacggctccgatcttggcagctg

SEQ ID NO: 4980905 - DNA, 25 bp, Homo sapien
gggcctccgtcatccctaacagaca

SEQ ID NO: 4980906 - DNA, 25 bp, Homo sapien
ttcctgtgtccatcggccacgtgct

SEQ ID NO: 4980907 - DNA, 25 bp, Homo sapien
ctgaatagcagcatcgcgccctggc

SEQ ID NO: 4980908 - DNA, 25 bp, Homo sapien
acaggtgtgtgcccgcctcaagact

SEQ ID NO: 4980909 - DNA, 25 bp, Homo sapien
gcgacctcctagcttgtcctggaga

SEQ ID NO: 4980910 - DNA, 25 bp, Homo sapien
cagaccggcgacctcctagcttgtc

SEQ ID NO: 4980911 - DNA, 25 bp, Homo sapien
gtgtgtgcccgcctcaagactgcac

SEQ ID NO: 4980912 - DNA, 25 bp, Homo sapien
tcttcttggagtaggacacggtgtc

SEQ ID NO: 4980913 - DNA, 25 bp, Homo sapien
tgccaccgcgttacagtagctcgag

SEQ ID NO: 4980914 - DNA, 25 bp, Homo sapien
taactgttgtttcggcgcagcagcc

SEQ ID NO: 4980915 - DNA, 25 bp, Homo sapien
tagagccccgagtctttgtgcacgg

SEQ ID NO: 4980916 - DNA, 25 bp, Homo sapien
gccgttggagatgggcgatttcaca

SEQ ID NO: 4980917 - DNA, 25 bp, Homo sapien
ggagatgggcgatttcacagagcca

SEQ ID NO: 4980918 - DNA, 25 bp, Homo sapien
tcgaagccgaaggtgccgttggaga

SEQ ID NO: 4980919 - DNA, 25 bp, Homo sapien
ctggtgtggccgtcgaagccgaagg

SEQ ID NO: 4980920 - DNA, 25 bp, Homo sapien
tggcacctggtagctctttaaatac

SEQ ID NO: 4980921 - DNA, 25 bp, Homo sapien
gctgcccgcagaagtgccttccgag

SEQ ID NO: 4980922 - DNA, 25 bp, Homo sapien
tgaggctttcgtcagatactcgtga

SEQ ID NO: 4980923 - DNA, 25 bp, Homo sapien
ggtgctgtcatcattagccttggca

SEQ ID NO: 4980924 - DNA, 25 bp, Homo sapien
cacacaaaaaaagcgaacaggaggg

SEQ ID NO: 4980925 - DNA, 25 bp, Homo sapien
tccgcatccacggacacacgaagag

SEQ ID NO: 4980926 - DNA, 25 bp, Homo sapien
acaggagggcgacaccaaaggaaat

SEQ ID NO: 4980927 - DNA, 25 bp, Homo sapien
acggacacacgaagagccacacaaa

SEQ ID NO: 4980928 - DNA, 25 bp, Homo sapien
agctctgccacgcggctgtactgac

SEQ ID NO: 4980929 - DNA, 25 bp, Homo sapien
tcagctctgccacgcggctgtactg

SEQ ID NO: 4980930 - DNA, 25 bp, Homo sapien
ctctgccacgcggctgtactgacac

SEQ ID NO: 4980931 - DNA, 25 bp, Homo sapien
cagctctgccacgcggctgtactga

SEQ ID NO: 4980932 - DNA, 25 bp, Homo sapien
tactttcggcttagcgctactgcgc

SEQ ID NO: 4980933 - DNA, 25 bp, Homo sapien
ggttcatacacgcagcaaaggattg

SEQ ID NO: 4980934 - DNA, 25 bp, Homo sapien
gctactgcgccaaactgatctaaga

SEQ ID NO: 4980935 - DNA, 25 bp, Homo sapien
tcttgccaactcgaatggtacccgc

SEQ ID NO: 4980936 - DNA, 25 bp, Homo sapien
gcagtaagacatggccgtcatttcc

SEQ ID NO: 4980937 - DNA, 25 bp, Homo sapien
tccaaacaattatggctacgtcagg

SEQ ID NO: 4980938 - DNA, 25 bp, Homo sapien
tacggatctcgaattgtttccaaac

SEQ ID NO: 4980939 - DNA, 25 bp, Homo sapien
aattgtctttctggtacggatctcg

SEQ ID NO: 4980940 - DNA, 25 bp, Homo sapien
gggagtgcccggaggccattgggaa

SEQ ID NO: 4980941 - DNA, 25 bp, Homo sapien
gcatagaatactgggagtgcccgga

SEQ ID NO: 4980942 - DNA, 25 bp, Homo sapien
tatggtagcagcatagaatactggg

SEQ ID NO: 4980943 - DNA, 25 bp, Homo sapien
gaaaagacattgattgctatggtag

SEQ ID NO: 4980944 - DNA, 25 bp, Homo sapien
gccaaaaggatgggcgttgtcactg

SEQ ID NO: 4980945 - DNA, 25 bp, Homo sapien
atgaaaattctgatgagtacaaaca

SEQ ID NO: 4980946 - DNA, 25 bp, Homo sapien
acatgaaaccagacaacagtggaga

SEQ ID NO: 4980947 - DNA, 25 bp, Homo sapien
cagtggagatataaaccaagaagca

SEQ ID NO: 4980948 - DNA, 25 bp, Homo sapien
aattctgatgagtacaaacagcagg

SEQ ID NO: 4980949 - DNA, 25 bp, Homo sapien
aatgcagggtcaagaaacccctgcc

SEQ ID NO: 4980950 - DNA, 25 bp, Homo sapien
tgaccacactgccaatgcagggtca

SEQ ID NO: 4980951 - DNA, 25 bp, Homo sapien
tttatggccacactcagacatcaac

SEQ ID NO: 4980952 - DNA, 25 bp, Homo sapien
tcagaacctaacaagccctgtgact

SEQ ID NO: 4980953 - DNA, 25 bp, Homo sapien
aggcctgagccactgcgcctgacct

SEQ ID NO: 4980954 - DNA, 25 bp, Homo sapien
gcctgagccactgcgcctgacctgg

SEQ ID NO: 4980955 - DNA, 25 bp, Homo sapien
aagatgggctcttgctatgttgctc

SEQ ID NO: 4980956 - DNA, 25 bp, Homo sapien
ctgagccactgcgcctgacctggat

SEQ ID NO: 4980957 - DNA, 25 bp, Homo sapien
ggcatcttcctcacttgtgctcaat

SEQ ID NO: 4980958 - DNA, 25 bp, Homo sapien
tggcacttttgcagcccgaggcagg

SEQ ID NO: 4980959 - DNA, 25 bp, Homo sapien
tccaaagctggatgacaaggtaaca

SEQ ID NO: 4980960 - DNA, 25 bp, Homo sapien
gaatagagttaaacaactgtccagc

SEQ ID NO: 4980961 - DNA, 25 bp, Homo sapien
cagtgcgttcctgagattggaagcc

SEQ ID NO: 4980962 - DNA, 25 bp, Homo sapien
ggaagcaatcagctgccacacagcg

SEQ ID NO: 4980963 - DNA, 25 bp, Homo sapien
tgagaatcctatagtagaacccaca

SEQ ID NO: 4980964 - DNA, 25 bp, Homo sapien
taccgattgcgaccagtgagaatcc

SEQ ID NO: 4980965 - DNA, 25 bp, Homo sapien
cagaagcagttgttgaaaagctccc

SEQ ID NO: 4980966 - DNA, 25 bp, Homo sapien
agaagcagttgttgaaaagctccca

SEQ ID NO: 4980967 - DNA, 25 bp, Homo sapien
tcagaagcagttgttgaaaagctcc

SEQ ID NO: 4980968 - DNA, 25 bp, Homo sapien
gccagggtttggagcacgtttcata

SEQ ID NO: 4980969 - DNA, 25 bp, Homo sapien
ttgtgctgccaaacccatatcaggc

SEQ ID NO: 4980970 - DNA, 25 bp, Homo sapien
gccatgagtgctaggcgtgctgacc

SEQ ID NO: 4980971 - DNA, 25 bp, Homo sapien
tgtcaatccttaaggcgtgcgttgg

SEQ ID NO: 4980972 - DNA, 25 bp, Homo sapien
gatttgtcccatactttcaacacat

SEQ ID NO: 4980973 - DNA, 25 bp, Homo sapien
tccacttgatggaattaaatcttag

SEQ ID NO: 4980974 - DNA, 25 bp, Homo sapien
caacacatctagtcagattttcctg

SEQ ID NO: 4980975 - DNA, 25 bp, Homo sapien
gatatctatcacaactaaaaaggtg

SEQ ID NO: 4980976 - DNA, 25 bp, Homo sapien
caagaggatatgtcctgttgaaagc

SEQ ID NO: 4980977 - DNA, 25 bp, Homo sapien
agaattcctctctaaccctcttctc

SEQ ID NO: 4980978 - DNA, 25 bp, Homo sapien
tcttcctacaagaggatatgtcctg

SEQ ID NO: 4980979 - DNA, 25 bp, Homo sapien
tgcaggactcttcctacaagaggat

SEQ ID NO: 4980980 - DNA, 25 bp, Homo sapien
tcagctgtctgttgtgtcgtcatct

SEQ ID NO: 4980981 - DNA, 25 bp, Homo sapien
ctgtctgttgtgtcgtcatctctac

SEQ ID NO: 4980982 - DNA, 25 bp, Homo sapien
gctgtctgttgtgtcgtcatctcta

SEQ ID NO: 4980983 - DNA, 25 bp, Homo sapien
cagctgtctgttgtgtcgtcatctc

SEQ ID NO: 4980984 - DNA, 25 bp, Homo sapien
aataaagcgctgttctacaaaggtc

SEQ ID NO: 4980985 - DNA, 25 bp, Homo sapien
gagtaaatgtgaaacatccaaccag

SEQ ID NO: 4980986 - DNA, 25 bp, Homo sapien
cacattcacttagacaaccttcaaa

SEQ ID NO: 4980987 - DNA, 25 bp, Homo sapien
tctgaaaagtattcacttagctgaa

SEQ ID NO: 4980988 - DNA, 25 bp, Homo sapien
ttccccagccatgagagtctccacc

SEQ ID NO: 4980989 - DNA, 25 bp, Homo sapien
tgtacaggttcacgtcaatgatacc

SEQ ID NO: 4980990 - DNA, 25 bp, Homo sapien
cgaatggtttctcctactttggcgc

SEQ ID NO: 4980991 - DNA, 25 bp, Homo sapien
ccaccgtctcgttgtacaggttcac

SEQ ID NO: 4980992 - DNA, 25 bp, Homo sapien
aaaatgcatgcctgcctcaaggtca

SEQ ID NO: 4980993 - DNA, 25 bp, Homo sapien
ccggtggtttcaaatattgaagcta

SEQ ID NO: 4980994 - DNA, 25 bp, Homo sapien
tagtaacacggagccggtggtttca

SEQ ID NO: 4980995 - DNA, 25 bp, Homo sapien
atgcatgcctgcctcaaggtcacca

SEQ ID NO: 4980996 - DNA, 25 bp, Homo sapien
ggctgtaccaaaggagttggcaaca

SEQ ID NO: 4980997 - DNA, 25 bp, Homo sapien
ggagttggcaacatcgtttgcacca

SEQ ID NO: 4980998 - DNA, 25 bp, Homo sapien
cagagcccacggctgtaccaaagga

SEQ ID NO: 4980999 - DNA, 25 bp, Homo sapien
ggcaacatcgtttgcaccaacagaa

SEQ ID NO: 4981000 - DNA, 25 bp, Homo sapien
gctggtttgcaaactactgtcagga

SEQ ID NO: 4981001 - DNA, 25 bp, Homo sapien
tcagtcagcggtaaaacacattcca

SEQ ID NO: 4981002 - DNA, 25 bp, Homo sapien
tagaggctggacaaactgctagctg

SEQ ID NO: 4981003 - DNA, 25 bp, Homo sapien
cccgatctgggaaagctgtgatgtc

SEQ ID NO: 4981004 - DNA, 25 bp, Homo sapien
gcccggccggtttactgtgtctcaa

SEQ ID NO: 4981005 - DNA, 25 bp, Homo sapien
caccttgaatatggcagtggctgta

SEQ ID NO: 4981006 - DNA, 25 bp, Homo sapien
tgtacatgctgtcaaaactcatgaa

SEQ ID NO: 4981007 - DNA, 25 bp, Homo sapien
ctcaatggaggactcccttgctgtg

SEQ ID NO: 4981008 - DNA, 25 bp, Homo sapien
tgatttccctgggtacactcacggg

SEQ ID NO: 4981009 - DNA, 25 bp, Homo sapien
gacacaatgcgtacaaataaaagac

SEQ ID NO: 4981010 - DNA, 25 bp, Homo sapien
ctctcactgcatggaatgttcaggg

SEQ ID NO: 4981011 - DNA, 25 bp, Homo sapien
actcacggggtaatggacacaatgc

SEQ ID NO: 4981012 - DNA, 25 bp, Homo sapien
tatcttatgaccaggcaaactacag

SEQ ID NO: 4981013 - DNA, 25 bp, Homo sapien
tgtacagacaccatgttcattgggc

SEQ ID NO: 4981014 - DNA, 25 bp, Homo sapien
tagaaaataacagtgcatgcagctt

SEQ ID NO: 4981015 - DNA, 25 bp, Homo sapien
tcattgggcctcatatgttctgaaa

SEQ ID NO: 4981016 - DNA, 25 bp, Homo sapien
ggactcctaggagtaactgttttga

SEQ ID NO: 4981017 - DNA, 25 bp, Homo sapien
cagatgcatttctattacgtgcaaa

SEQ ID NO: 4981018 - DNA, 25 bp, Homo sapien
gacacttctgtcaagcgaaagcaca

SEQ ID NO: 4981019 - DNA, 25 bp, Homo sapien
gggcacaggcataactaaattcaga

SEQ ID NO: 4981020 - DNA, 25 bp, Homo sapien
cacatgtttccaggcggtgctgacg

SEQ ID NO: 4981021 - DNA, 25 bp, Homo sapien
gaagaacaattcaagagtctcccgg

SEQ ID NO: 4981022 - DNA, 25 bp, Homo sapien
gagccatgaactagacccagaacct

SEQ ID NO: 4981023 - DNA, 25 bp, Homo sapien
gccaagtctctttgttgtggagcca

SEQ ID NO: 4981024 - DNA, 25 bp, Homo sapien
gctccaagccgaaaggcaacctgtt

SEQ ID NO: 4981025 - DNA, 25 bp, Homo sapien
gtatgcccgagaaatcagccttcct

SEQ ID NO: 4981026 - DNA, 25 bp, Homo sapien
gatgtgatcactgagcatccgggct

SEQ ID NO: 4981027 - DNA, 25 bp, Homo sapien
taatgacagcagtaccccgtatgcc

SEQ ID NO: 4981028 - DNA, 25 bp, Homo sapien
gatttgtcgcccaaggtcataacca

SEQ ID NO: 4981029 - DNA, 25 bp, Homo sapien
gctcatcatgatttgtcgcccaagg

SEQ ID NO: 4981030 - DNA, 25 bp, Homo sapien
tgtgtgactctgcatagagctcatc

SEQ ID NO: 4981031 - DNA, 25 bp, Homo sapien
ggtcataaccagtcacagccagcat

SEQ ID NO: 4981032 - DNA, 25 bp, Homo sapien
aattgataaagaaattcctgcctgg

SEQ ID NO: 4981033 - DNA, 25 bp, Homo sapien
gttaaggttacagaatcccatggcc

SEQ ID NO: 4981034 - DNA, 25 bp, Homo sapien
cttccttgctctagagatgacaggc

SEQ ID NO: 4981035 - DNA, 25 bp, Homo sapien
tggtgagcacctatcctatcgccta

SEQ ID NO: 4981036 - DNA, 25 bp, Homo sapien
tagtagaaaacaaagctcaatgaca

SEQ ID NO: 4981037 - DNA, 25 bp, Homo sapien
tttctcaagaattaggttaccatag

SEQ ID NO: 4981038 - DNA, 25 bp, Homo sapien
gtagcacagagtataacaggaatta

SEQ ID NO: 4981039 - DNA, 25 bp, Homo sapien
gaaaattacatttgacactccatta

SEQ ID NO: 4981040 - DNA, 25 bp, Homo sapien
tcttgggcaaattgaataaggcaga

SEQ ID NO: 4981041 - DNA, 25 bp, Homo sapien
caagagataaacattactatgacgg

SEQ ID NO: 4981042 - DNA, 25 bp, Homo sapien
tagctttctctaacgtaccaacctg

SEQ ID NO: 4981043 - DNA, 25 bp, Homo sapien
ggcagatttattgcagtaggagaca

SEQ ID NO: 4981044 - DNA, 25 bp, Homo sapien
cacattaggccgagaagtcacattt

SEQ ID NO: 4981045 - DNA, 25 bp, Homo sapien
gctaaaattaactgcagccaagcag

SEQ ID NO: 4981046 - DNA, 25 bp, Homo sapien
tacaactcatagaactaaccccggc

SEQ ID NO: 4981047 - DNA, 25 bp, Homo sapien
gcaggcaggaacacgctgatttgca

SEQ ID NO: 4981048 - DNA, 25 bp, Homo sapien
tgtcctctgtaggtgactgaccatc

SEQ ID NO: 4981049 - DNA, 25 bp, Homo sapien
tagtatctactcaagacggtttggg

SEQ ID NO: 4981050 - DNA, 25 bp, Homo sapien
cccaaggagtcgctatgaagacaca

SEQ ID NO: 4981051 - DNA, 25 bp, Homo sapien
ctgaccatctacaaagcatgttgga

SEQ ID NO: 4981052 - DNA, 25 bp, Homo sapien
taatcctatagaccttttcagagcc

SEQ ID NO: 4981053 - DNA, 25 bp, Homo sapien
gctgcccaaagcacaaaccggttga

SEQ ID NO: 4981054 - DNA, 25 bp, Homo sapien
gacaggtatcctgcaacatggatcc

SEQ ID NO: 4981055 - DNA, 25 bp, Homo sapien
gatccctaaaacatggcgatgccct

SEQ ID NO: 4981056 - DNA, 25 bp, Homo sapien
aatttcattgctagacatgaaattt

SEQ ID NO: 4981057 - DNA, 25 bp, Homo sapien
gaagaatttcattgctagacatgaa

SEQ ID NO: 4981058 - DNA, 25 bp, Homo sapien
agaatttcattgctagacatgaaat

SEQ ID NO: 4981059 - DNA, 25 bp, Homo sapien
aagaatttcattgctagacatgaaa

SEQ ID NO: 4981060 - DNA, 25 bp, Homo sapien
tcaatttttagccatatctgcagca

SEQ ID NO: 4981061 - DNA, 25 bp, Homo sapien
ggttcatggacctccatgaagccca

SEQ ID NO: 4981062 - DNA, 25 bp, Homo sapien
tttagccatatctgcagcaagagcc

SEQ ID NO: 4981063 - DNA, 25 bp, Homo sapien
tttgccatcaataccatgtggttca

SEQ ID NO: 4981064 - DNA, 25 bp, Homo sapien
tcctcacgtacaaagcttaagagtt

SEQ ID NO: 4981065 - DNA, 25 bp, Homo sapien
caatatatagttagagatcggccat

SEQ ID NO: 4981066 - DNA, 25 bp, Homo sapien
catccgtggcttcggctagtggcga

SEQ ID NO: 4981067 - DNA, 25 bp, Homo sapien
gctttgtaaagtcccaatgcaggaa

SEQ ID NO: 4981068 - DNA, 25 bp, Homo sapien
gcaactctggtgacagatacacctc

SEQ ID NO: 4981069 - DNA, 25 bp, Homo sapien
tacgtattattaagagtcacatatc

SEQ ID NO: 4981070 - DNA, 25 bp, Homo sapien
gatacacctctatttttcgtgagaa

SEQ ID NO: 4981071 - DNA, 25 bp, Homo sapien
gaatgctcacgcctctgaaatctgc

SEQ ID NO: 4981072 - DNA, 25 bp, Homo sapien
ttataatcacatattctatgagtat

SEQ ID NO: 4981073 - DNA, 25 bp, Homo sapien
ataatcacatattctatgagtatat

SEQ ID NO: 4981074 - DNA, 25 bp, Homo sapien
taatcacatattctatgagtatatt

SEQ ID NO: 4981075 - DNA, 25 bp, Homo sapien
tataatcacatattctatgagtata

SEQ ID NO: 4981076 - DNA, 25 bp, Homo sapien
gctagataagacacacgggagacca

SEQ ID NO: 4981077 - DNA, 25 bp, Homo sapien
caatgctacaactacagggtccaga

SEQ ID NO: 4981078 - DNA, 25 bp, Homo sapien
taaatgtggagacgagaaggaacca

SEQ ID NO: 4981079 - DNA, 25 bp, Homo sapien
gatattaatgcaccaagtctccctg

SEQ ID NO: 4981080 - DNA, 25 bp, Homo sapien
gcagttagccgcgatcgcatcatcg

SEQ ID NO: 4981081 - DNA, 25 bp, Homo sapien
gagattacccttcatttccacctag

SEQ ID NO: 4981082 - DNA, 25 bp, Homo sapien
gaggtaacactgacatcgatattgc

SEQ ID NO: 4981083 - DNA, 25 bp, Homo sapien
tgcccggccctgttcgttacttaca

SEQ ID NO: 4981084 - DNA, 25 bp, Homo sapien
aaaaatatggtaatcagatcttcag

SEQ ID NO: 4981085 - DNA, 25 bp, Homo sapien
gaaaaaatatggtaatcagatcttc

SEQ ID NO: 4981086 - DNA, 25 bp, Homo sapien
aaaatatggtaatcagatcttcagt

SEQ ID NO: 4981087 - DNA, 25 bp, Homo sapien
tgaaaaaatatggtaatcagatctt

SEQ ID NO: 4981088 - DNA, 25 bp, Homo sapien
tcagcacacgacaccctttaggaat

SEQ ID NO: 4981089 - DNA, 25 bp, Homo sapien
gagtatgaacaagaagcagcacatc

SEQ ID NO: 4981090 - DNA, 25 bp, Homo sapien
ggaccaacatcccagtgaactgttc

SEQ ID NO: 4981091 - DNA, 25 bp, Homo sapien
taaaaacgtaggcatatacagaggc

SEQ ID NO: 4981092 - DNA, 25 bp, Homo sapien
tattatacacaaaagcggatgggtt

SEQ ID NO: 4981093 - DNA, 25 bp, Homo sapien
gaataagcctgatgtactggtctct

SEQ ID NO: 4981094 - DNA, 25 bp, Homo sapien
tagtcctggaaatggttgccgcgcc

SEQ ID NO: 4981095 - DNA, 25 bp, Homo sapien
tcagctgctcaaaaatcctcgatgg

SEQ ID NO: 4981096 - DNA, 25 bp, Homo sapien
tcagtgactgttgatgcccgatgcc

SEQ ID NO: 4981097 - DNA, 25 bp, Homo sapien
gatgtatacactcccctatctgtgg

SEQ ID NO: 4981098 - DNA, 25 bp, Homo sapien
aagggagacatactgggactttcag

SEQ ID NO: 4981099 - DNA, 25 bp, Homo sapien
tgtggagccatttagattcagtgac

SEQ ID NO: 4981100 - DNA, 25 bp, Homo sapien
gcaacagagccggagtctgtttaaa

SEQ ID NO: 4981101 - DNA, 25 bp, Homo sapien
ggcaacagagccggagtctgtttaa

SEQ ID NO: 4981102 - DNA, 25 bp, Homo sapien
cagactgcctacttatgatttccgg

SEQ ID NO: 4981103 - DNA, 25 bp, Homo sapien
tgatttccggtacgatcttgagcaa

SEQ ID NO: 4981104 - DNA, 25 bp, Homo sapien
gaagtataaagtaaagctccccaga

SEQ ID NO: 4981105 - DNA, 25 bp, Homo sapien
tgaggttcacattttaagcacgaca

SEQ ID NO: 4981106 - DNA, 25 bp, Homo sapien
ctctgtatatatacatgtatattat

SEQ ID NO: 4981107 - DNA, 25 bp, Homo sapien
ctactctgtatatatacatgtatat

SEQ ID NO: 4981108 - DNA, 25 bp, Homo sapien
tactctgtatatatacatgtatatt

SEQ ID NO: 4981109 - DNA, 25 bp, Homo sapien
actctgtatatatacatgtatatta

SEQ ID NO: 4981110 - DNA, 25 bp, Homo sapien
ccaatgctgttattacactcactat

SEQ ID NO: 4981111 - DNA, 25 bp, Homo sapien
ttaaaaagcacataggccagacacg

SEQ ID NO: 4981112 - DNA, 25 bp, Homo sapien
aatgagaaacgcttgtcttcctgtc

SEQ ID NO: 4981113 - DNA, 25 bp, Homo sapien
tctaagatccttccattaatgacaa

SEQ ID NO: 4981114 - DNA, 25 bp, Homo sapien
cactgggtgacaatgttatataata

SEQ ID NO: 4981115 - DNA, 25 bp, Homo sapien
tcctagcatagcctgttcactgggt

SEQ ID NO: 4981116 - DNA, 25 bp, Homo sapien
aaactctgataaataagagacacgg

SEQ ID NO: 4981117 - DNA, 25 bp, Homo sapien
catttaagaaaggaccattagggct

SEQ ID NO: 4981118 - DNA, 25 bp, Homo sapien
tccgtcgagttttcgcaaaggcgcc

SEQ ID NO: 4981119 - DNA, 25 bp, Homo sapien
tcagccacgcaccatttaggacggg

SEQ ID NO: 4981120 - DNA, 25 bp, Homo sapien
tggtgggacaatgtacacgacccct

SEQ ID NO: 4981121 - DNA, 25 bp, Homo sapien
gaaaacactacggtgtcagccacgc

SEQ ID NO: 4981122 - DNA, 25 bp, Homo sapien
cgctgcgtctctccggctcaaaaaa

SEQ ID NO: 4981123 - DNA, 25 bp, Homo sapien
ctggctcctcgtttcatccggaaac

SEQ ID NO: 4981124 - DNA, 25 bp, Homo sapien
catccggaaaccgaccggccggcag

SEQ ID NO: 4981125 - DNA, 25 bp, Homo sapien
gcggagcagcgctggccgcgtgccg

SEQ ID NO: 4981126 - DNA, 25 bp, Homo sapien
ggagcggagcagcgctggccgcgtg

SEQ ID NO: 4981127 - DNA, 25 bp, Homo sapien
gtgcggtccccgaaactccgagcac

SEQ ID NO: 4981128 - DNA, 25 bp, Homo sapien
cgtgcggtccccgaaactccgagca

SEQ ID NO: 4981129 - DNA, 25 bp, Homo sapien
gagcccctcggcgtcgcgtggagct

SEQ ID NO: 4981130 - DNA, 25 bp, Homo sapien
ttccggaagcgcacacgggccagtt

SEQ ID NO: 4981131 - DNA, 25 bp, Homo sapien
acacgggccagttgcggcggcccat

SEQ ID NO: 4981132 - DNA, 25 bp, Homo sapien
tggagctgcgagtcgcccgcttccg

SEQ ID NO: 4981133 - DNA, 25 bp, Homo sapien
ggacccattctgcaaagcgtgtagc

SEQ ID NO: 4981134 - DNA, 25 bp, Homo sapien
gacccattctgcaaagcgtgtagca

SEQ ID NO: 4981135 - DNA, 25 bp, Homo sapien
cccattctgcaaagcgtgtagcaac

SEQ ID NO: 4981136 - DNA, 25 bp, Homo sapien
aggacccattctgcaaagcgtgtag

SEQ ID NO: 4981137 - DNA, 25 bp, Homo sapien
ctggaattctgatgtgggccttttc

SEQ ID NO: 4981138 - DNA, 25 bp, Homo sapien
agtaatcctcgcctatgccctggaa

SEQ ID NO: 4981139 - DNA, 25 bp, Homo sapien
gtcctggcacgagcctgggatgcca

SEQ ID NO: 4981140 - DNA, 25 bp, Homo sapien
tgggatgccaccaagccagctcagg

SEQ ID NO: 4981141 - DNA, 25 bp, Homo sapien
ctgcagctggcctgggtagatttct

SEQ ID NO: 4981142 - DNA, 25 bp, Homo sapien
tcaaaagaatcttgacgttgctgca

SEQ ID NO: 4981143 - DNA, 25 bp, Homo sapien
gaatcttgacgttgctgcaaacaaa

SEQ ID NO: 4981144 - DNA, 25 bp, Homo sapien
ggtagatttctaagccctcaaaaga

SEQ ID NO: 4981145 - DNA, 25 bp, Homo sapien
tcaatcctcctttaggcagtaatac

SEQ ID NO: 4981146 - DNA, 25 bp, Homo sapien
cttcgggacagcagtcacggccttt

SEQ ID NO: 4981147 - DNA, 25 bp, Homo sapien
tgtgctccttgactgtatttctcag

SEQ ID NO: 4981148 - DNA, 25 bp, Homo sapien
gtgctgggattctgcgcgcccaccg

SEQ ID NO: 4981149 - DNA, 25 bp, Homo sapien
tctgactcgactcttacatcctgct

SEQ ID NO: 4981150 - DNA, 25 bp, Homo sapien
tcctggaaatgcttctccaggtgct

SEQ ID NO: 4981151 - DNA, 25 bp, Homo sapien
ttattcgtgaccttgacttgtccac

SEQ ID NO: 4981152 - DNA, 25 bp, Homo sapien
attcaccctgatagccaggtatgcc

SEQ ID NO: 4981153 - DNA, 25 bp, Homo sapien
tgcattcaccctgatagccaggtat

SEQ ID NO: 4981154 - DNA, 25 bp, Homo sapien
acaacaaaggccaaggaatgtttat

SEQ ID NO: 4981155 - DNA, 25 bp, Homo sapien
gccatcaatcctttcgatgcgtaca

SEQ ID NO: 4981156 - DNA, 25 bp, Homo sapien
catcaatcctttcgatgcgtacaac

SEQ ID NO: 4981157 - DNA, 25 bp, Homo sapien
caatcctttcgatgcgtacaacaaa

SEQ ID NO: 4981158 - DNA, 25 bp, Homo sapien
cagttcacaaatgttgcatggtcca

SEQ ID NO: 4981159 - DNA, 25 bp, Homo sapien
aacagcatccactggaggtacagca

SEQ ID NO: 4981160 - DNA, 25 bp, Homo sapien
gaaacctgacctgatactgtagccg

SEQ ID NO: 4981161 - DNA, 25 bp, Homo sapien
tgtgctacactggaggatattctgc

SEQ ID NO: 4981162 - DNA, 25 bp, Homo sapien
gccacgtatttccagtcatcttcta

SEQ ID NO: 4981163 - DNA, 25 bp, Homo sapien
gtagaaatagccctgcagttccaaa

SEQ ID NO: 4981164 - DNA, 25 bp, Homo sapien
tgtgttcccaagtagtggctgtaga

SEQ ID NO: 4981165 - DNA, 25 bp, Homo sapien
ggctgtagaaatagccctgcagttc

SEQ ID NO: 4981166 - DNA, 25 bp, Homo sapien
tagactcattctttgcaacggtggg

SEQ ID NO: 4981167 - DNA, 25 bp, Homo sapien
tgcaagaaacgctccagagaagcaa

SEQ ID NO: 4981168 - DNA, 25 bp, Homo sapien
ggcaaagccctgactccgtgggtca

SEQ ID NO: 4981169 - DNA, 25 bp, Homo sapien
cagggactttcccaactgcaagaaa

SEQ ID NO: 4981170 - DNA, 25 bp, Homo sapien
actgaaggtctgactgtgcatccag

SEQ ID NO: 4981171 - DNA, 25 bp, Homo sapien
actgtgcatccagagtgcccatagg

SEQ ID NO: 4981172 - DNA, 25 bp, Homo sapien
tgaaggtctgactgtgcatccagag

SEQ ID NO: 4981173 - DNA, 25 bp, Homo sapien
tctgactgtgcatccagagtgccca

SEQ ID NO: 4981174 - DNA, 25 bp, Homo sapien
gcaaagggtgcaagctggctgggtg

SEQ ID NO: 4981175 - DNA, 25 bp, Homo sapien
ctgggtggagggaacacacatttac

SEQ ID NO: 4981176 - DNA, 25 bp, Homo sapien
tggctgggtggagggaacacacatt

SEQ ID NO: 4981177 - DNA, 25 bp, Homo sapien
ctgcaaagggtgcaagctggctggg

SEQ ID NO: 4981178 - DNA, 25 bp, Homo sapien
tcttaaaaatagctggtggagtcca

SEQ ID NO: 4981179 - DNA, 25 bp, Homo sapien
tctttaagatgtctgggttccccat

SEQ ID NO: 4981180 - DNA, 25 bp, Homo sapien
cagctttgtcatacgtccaggaacc

SEQ ID NO: 4981181 - DNA, 25 bp, Homo sapien
tcttcaacttcaggcgagtgctccg

SEQ ID NO: 4981182 - DNA, 25 bp, Homo sapien
gcaagtcagacaccattagtaacac

SEQ ID NO: 4981183 - DNA, 25 bp, Homo sapien
ccctttgctataggccagaatacac

SEQ ID NO: 4981184 - DNA, 25 bp, Homo sapien
gctataggccagaatacaccaacag

SEQ ID NO: 4981185 - DNA, 25 bp, Homo sapien
tagtaacactccctttgctataggc

SEQ ID NO: 4981186 - DNA, 25 bp, Homo sapien
ggaacgcgaagagtctcaatgccat

SEQ ID NO: 4981187 - DNA, 25 bp, Homo sapien
ggatcccagcgcaatttataatcat

SEQ ID NO: 4981188 - DNA, 25 bp, Homo sapien
gccatcatattccattggatcccag

SEQ ID NO: 4981189 - DNA, 25 bp, Homo sapien
caaatcttatctgcaggaacgcgaa

SEQ ID NO: 4981190 - DNA, 25 bp, Homo sapien
cgcagccacaaattggtttccatga

SEQ ID NO: 4981191 - DNA, 25 bp, Homo sapien
gcagccacaaattggtttccatgat

SEQ ID NO: 4981192 - DNA, 25 bp, Homo sapien
agccacaaattggtttccatgatct

SEQ ID NO: 4981193 - DNA, 25 bp, Homo sapien
gacgcagccacaaattggtttccat

SEQ ID NO: 4981194 - DNA, 25 bp, Homo sapien
ttctggtaatgagcgtccccttgca

SEQ ID NO: 4981195 - DNA, 25 bp, Homo sapien
aatggactagccctgcagtctcggt

SEQ ID NO: 4981196 - DNA, 25 bp, Homo sapien
gcctgcggtcatgccttctggtaat

SEQ ID NO: 4981197 - DNA, 25 bp, Homo sapien
tttacgattacacaagcctgcggtc

SEQ ID NO: 4981198 - DNA, 25 bp, Homo sapien
tccaggtggtatggacatggcccat

SEQ ID NO: 4981199 - DNA, 25 bp, Homo sapien
gctgaccctatggagcaggacctgt

SEQ ID NO: 4981200 - DNA, 25 bp, Homo sapien
aatgggcatggcactgctatcagac

SEQ ID NO: 4981201 - DNA, 25 bp, Homo sapien
gctatcagacatctctgccggagga

SEQ ID NO: 4981202 - DNA, 25 bp, Homo sapien
accacctgcaaaagtgtaacaatgc

SEQ ID NO: 4981203 - DNA, 25 bp, Homo sapien
aaagctctgatcagagggcactcac

SEQ ID NO: 4981204 - DNA, 25 bp, Homo sapien
ttaccacctgcaaaagtgtaacaat

SEQ ID NO: 4981205 - DNA, 25 bp, Homo sapien
gggaaagctctgatcagagggcact

SEQ ID NO: 4981206 - DNA, 25 bp, Homo sapien
ggccacttcaaagtgtaccgtgaca

SEQ ID NO: 4981207 - DNA, 25 bp, Homo sapien
caaagtgtaccgtgacagggtcgga

SEQ ID NO: 4981208 - DNA, 25 bp, Homo sapien
cttcaaagtgtaccgtgacagggtc

SEQ ID NO: 4981209 - DNA, 25 bp, Homo sapien
gatgaactggttgtaatgagaaaac

SEQ ID NO: 4981210 - DNA, 25 bp, Homo sapien
cagagacacaagcccccatgaagga

SEQ ID NO: 4981211 - DNA, 25 bp, Homo sapien
agagacacaagcccccatgaaggaa

SEQ ID NO: 4981212 - DNA, 25 bp, Homo sapien
ccagagacacaagcccccatgaagg

SEQ ID NO: 4981213 - DNA, 25 bp, Homo sapien
gccagagacacaagcccccatgaag

SEQ ID NO: 4981214 - DNA, 25 bp, Homo sapien
cctaggcaaaggattgtggaaaaca

SEQ ID NO: 4981215 - DNA, 25 bp, Homo sapien
tcagaagcccactgcaatccgtgtg

SEQ ID NO: 4981216 - DNA, 25 bp, Homo sapien
aagagctatcagtcagccacatgca

SEQ ID NO: 4981217 - DNA, 25 bp, Homo sapien
ggacttcacacggttattaccagga

SEQ ID NO: 4981218 - DNA, 25 bp, Homo sapien
tttttaaatataggtacttgcagct

SEQ ID NO: 4981219 - DNA, 25 bp, Homo sapien
cttttttaaatataggtacttgcag

SEQ ID NO: 4981220 - DNA, 25 bp, Homo sapien
tttaaatataggtacttgcagctat

SEQ ID NO: 4981221 - DNA, 25 bp, Homo sapien
aaatataggtacttgcagctataaa

SEQ ID NO: 4981222 - DNA, 25 bp, Homo sapien
agactatccttggtcaaacactgat

SEQ ID NO: 4981223 - DNA, 25 bp, Homo sapien
caggagttctcagactatccttggt

SEQ ID NO: 4981224 - DNA, 25 bp, Homo sapien
gagttctcagactatccttggtcaa

SEQ ID NO: 4981225 - DNA, 25 bp, Homo sapien
tctcagactatccttggtcaaacac

SEQ ID NO: 4981226 - DNA, 25 bp, Homo sapien
agtggtccacgatacaccagtccct

SEQ ID NO: 4981227 - DNA, 25 bp, Homo sapien
catacagtggtccacgatacaccag

SEQ ID NO: 4981228 - DNA, 25 bp, Homo sapien
ctgacatacagtggtccacgataca

SEQ ID NO: 4981229 - DNA, 25 bp, Homo sapien
ggtccacgatacaccagtccctgga

SEQ ID NO: 4981230 - DNA, 25 bp, Homo sapien
tgctcgtcagcccatgggctcctgt

SEQ ID NO: 4981231 - DNA, 25 bp, Homo sapien
taggaatcagatgcaggcaggcgcc

SEQ ID NO: 4981232 - DNA, 25 bp, Homo sapien
tcctgtcccaaagtaggaatcagat

SEQ ID NO: 4981233 - DNA, 25 bp, Homo sapien
ggcgccaaacctgcagtgcaaacag

SEQ ID NO: 4981234 - DNA, 25 bp, Homo sapien
tgggtgtgatgccgcccgagcacac

SEQ ID NO: 4981235 - DNA, 25 bp, Homo sapien
tgagttcacactcgcgctggctggg

SEQ ID NO: 4981236 - DNA, 25 bp, Homo sapien
tccagcccggtcaaggctgcccgtg

SEQ ID NO: 4981237 - DNA, 25 bp, Homo sapien
ctgcccgtgcacttgagttcacact

SEQ ID NO: 4981238 - DNA, 25 bp, Homo sapien
ctgccctgggtggtctctctctcac

SEQ ID NO: 4981239 - DNA, 25 bp, Homo sapien
cccctgccctgggtggtctctctct

SEQ ID NO: 4981240 - DNA, 25 bp, Homo sapien
ccctgccctgggtggtctctctctc

SEQ ID NO: 4981241 - DNA, 25 bp, Homo sapien
cctgccctgggtggtctctctctca

SEQ ID NO: 4981242 - DNA, 25 bp, Homo sapien
cactcggtccctcaagaagttctga

SEQ ID NO: 4981243 - DNA, 25 bp, Homo sapien
ggctttccctgcctatagacggcac

SEQ ID NO: 4981244 - DNA, 25 bp, Homo sapien
gttctgatactgttgggtctccaag

SEQ ID NO: 4981245 - DNA, 25 bp, Homo sapien
ttcagactgcgcttccccggagaag

SEQ ID NO: 4981246 - DNA, 25 bp, Homo sapien
aatcggaagcatttgtctagatctc

SEQ ID NO: 4981247 - DNA, 25 bp, Homo sapien
ttacaaatcttgacccacggagaag

SEQ ID NO: 4981248 - DNA, 25 bp, Homo sapien
gacccacggagaagtatcatgagcc

SEQ ID NO: 4981249 - DNA, 25 bp, Homo sapien
catgagcctcttctaatcggaagca

SEQ ID NO: 4981250 - DNA, 25 bp, Homo sapien
cttagctaagggagaaacaaggcca

SEQ ID NO: 4981251 - DNA, 25 bp, Homo sapien
atttttggggactgcggatatagct

SEQ ID NO: 4981252 - DNA, 25 bp, Homo sapien
tagctaagggagaaacaaggccagg

SEQ ID NO: 4981253 - DNA, 25 bp, Homo sapien
tgggcattatcaatcagatgaattt

SEQ ID NO: 4981254 - DNA, 25 bp, Homo sapien
tggagcctcagagtagagcttctat

SEQ ID NO: 4981255 - DNA, 25 bp, Homo sapien
ggattgtagcctaaatgccacagac

SEQ ID NO: 4981256 - DNA, 25 bp, Homo sapien
tatattcccttaggacaactggcag

SEQ ID NO: 4981257 - DNA, 25 bp, Homo sapien
cttgaccatatccaagaagactgag

SEQ ID NO: 4981258 - DNA, 25 bp, Homo sapien
caaagcactgttgctcttcaatatt

SEQ ID NO: 4981259 - DNA, 25 bp, Homo sapien
tttgcaaagcactgttgctcttcaa

SEQ ID NO: 4981260 - DNA, 25 bp, Homo sapien
aaagcactgttgctcttcaatattt

SEQ ID NO: 4981261 - DNA, 25 bp, Homo sapien
gaataaagctatatccaagttttaa

SEQ ID NO: 4981262 - DNA, 25 bp, Homo sapien
caagccaagtagcaattcaggtgac

SEQ ID NO: 4981263 - DNA, 25 bp, Homo sapien
ttggaatgtgctaattcaagccaag

SEQ ID NO: 4981264 - DNA, 25 bp, Homo sapien
aggcagtattaaaagattgagaccg

SEQ ID NO: 4981265 - DNA, 25 bp, Homo sapien
taaagagcccgtatcatgtgaaact

SEQ ID NO: 4981266 - DNA, 25 bp, Homo sapien
tggcgccccgcccaacttcaagtaa

SEQ ID NO: 4981267 - DNA, 25 bp, Homo sapien
ggcagtgaactacaatgaaaaccag

SEQ ID NO: 4981268 - DNA, 25 bp, Homo sapien
catcaaatatgcatgaatcacagtg

SEQ ID NO: 4981269 - DNA, 25 bp, Homo sapien
tgagatactggttcataaaacatca

SEQ ID NO: 4981270 - DNA, 25 bp, Homo sapien
tgtcccaactcagtcaagtgcaaga

SEQ ID NO: 4981271 - DNA, 25 bp, Homo sapien
gggaactggatgtccttcagctagg

SEQ ID NO: 4981272 - DNA, 25 bp, Homo sapien
aagcgtatcatagatcaggtcccag

SEQ ID NO: 4981273 - DNA, 25 bp, Homo sapien
gaagttatgtcccatgatctgaccc

SEQ ID NO: 4981274 - DNA, 25 bp, Homo sapien
gctggtgcattgtatcctccacagt

SEQ ID NO: 4981275 - DNA, 25 bp, Homo sapien
tagctgatgaatccttttccgctgg

SEQ ID NO: 4981276 - DNA, 25 bp, Homo sapien
catcgctgctgtgcggtcttgagct

SEQ ID NO: 4981277 - DNA, 25 bp, Homo sapien
ccacagtatagttgtggtcacagaa

SEQ ID NO: 4981278 - DNA, 25 bp, Homo sapien
ttagtaatccaatagcagcatcaac

SEQ ID NO: 4981279 - DNA, 25 bp, Homo sapien
gaagctgttcctgtggctccagaag

SEQ ID NO: 4981280 - DNA, 25 bp, Homo sapien
cctgtggctccagaagatcttcttt

SEQ ID NO: 4981281 - DNA, 25 bp, Homo sapien
gttcctgtggctccagaagatcttc

SEQ ID NO: 4981282 - DNA, 25 bp, Homo sapien
tgttcctgtggctccagaagatctt

SEQ ID NO: 4981283 - DNA, 25 bp, Homo sapien
tctttcagtaacttgttgttgcact

SEQ ID NO: 4981284 - DNA, 25 bp, Homo sapien
cttaaagcagtctggagtaaagtgc

SEQ ID NO: 4981285 - DNA, 25 bp, Homo sapien
agtaaagtgctctgaacaaatactg

SEQ ID NO: 4981286 - DNA, 25 bp, Homo sapien
actgctatacttggtgggtttaaag

SEQ ID NO: 4981287 - DNA, 25 bp, Homo sapien
aagaagaaggcataattcaattatc

SEQ ID NO: 4981288 - DNA, 25 bp, Homo sapien
ctaagaagaaggcataattcaatta

SEQ ID NO: 4981289 - DNA, 25 bp, Homo sapien
gaagaaggcataattcaattatctg

SEQ ID NO: 4981290 - DNA, 25 bp, Homo sapien
agaaggcataattcaattatctgtc

SEQ ID NO: 4981291 - DNA, 25 bp, Homo sapien
taagtgttctatccccttctccaag

SEQ ID NO: 4981292 - DNA, 25 bp, Homo sapien
gctaatctgtatagtttacccctgg

SEQ ID NO: 4981293 - DNA, 25 bp, Homo sapien
cacactcttatttctatagggtcca

SEQ ID NO: 4981294 - DNA, 25 bp, Homo sapien
tggacactcccctagtaaacacaga

SEQ ID NO: 4981295 - DNA, 25 bp, Homo sapien
ctatcatctgcgtatagctgtcagg

SEQ ID NO: 4981296 - DNA, 25 bp, Homo sapien
tatcatctgcgtatagctgtcagga

SEQ ID NO: 4981297 - DNA, 25 bp, Homo sapien
tgtccttgtcgtagcggttcttgca

SEQ ID NO: 4981298 - DNA, 25 bp, Homo sapien
cgtagcggttcttgcagccgtaggc

SEQ ID NO: 4981299 - DNA, 25 bp, Homo sapien
cgtaggcggagcaggactgcaccat

SEQ ID NO: 4981300 - DNA, 25 bp, Homo sapien
agaaacgggcttgtccttgtcgtag

SEQ ID NO: 4981301 - DNA, 25 bp, Homo sapien
cttccggtcctcaggcacttcactt

SEQ ID NO: 4981302 - DNA, 25 bp, Homo sapien
ccttccggtcctcaggcacttcact

SEQ ID NO: 4981303 - DNA, 25 bp, Homo sapien
gttggattccctcgcttcttttgta

SEQ ID NO: 4981304 - DNA, 25 bp, Homo sapien
acagttacagtgatggtggcctccc

SEQ ID NO: 4981305 - DNA, 25 bp, Homo sapien
ggtgactagtgtgcccgttttgttg

SEQ ID NO: 4981306 - DNA, 25 bp, Homo sapien
ttctcagtgtcgctgcgctcggttg

SEQ ID NO: 4981307 - DNA, 25 bp, Homo sapien
gcacttggtgcctgggagactgcct

SEQ ID NO: 4981308 - DNA, 25 bp, Homo sapien
cacgtgaccacagagtatgttagcc

SEQ ID NO: 4981309 - DNA, 25 bp, Homo sapien
tgcaggctggcgtgaggactttacc

SEQ ID NO: 4981310 - DNA, 25 bp, Homo sapien
gaggcagatagcaaacacgtgacca

SEQ ID NO: 4981311 - DNA, 25 bp, Homo sapien
cgtgaagcataaacgtggtgaggct

SEQ ID NO: 4981312 - DNA, 25 bp, Homo sapien
aggccctgacctgcatccgactgta

SEQ ID NO: 4981313 - DNA, 25 bp, Homo sapien
catgcaacagcctcttgatgggtct

SEQ ID NO: 4981314 - DNA, 25 bp, Homo sapien
tccgactgtacaggcaggagagttc

SEQ ID NO: 4981315 - DNA, 25 bp, Homo sapien
ggtacatggcagtgtgacaaactcc

SEQ ID NO: 4981316 - DNA, 25 bp, Homo sapien
tataatgtagcacgaaagacttcca

SEQ ID NO: 4981317 - DNA, 25 bp, Homo sapien
tactctgtgtttgcagcatcgccca

SEQ ID NO: 4981318 - DNA, 25 bp, Homo sapien
taggtatctgcatagccacaaggga

SEQ ID NO: 4981319 - DNA, 25 bp, Homo sapien
gaatgaaaaggcagaactgctccaa

SEQ ID NO: 4981320 - DNA, 25 bp, Homo sapien
aatgcacaaaacttagctagcacta

SEQ ID NO: 4981321 - DNA, 25 bp, Homo sapien
cagtttcagctgatagcaaataatt

SEQ ID NO: 4981322 - DNA, 25 bp, Homo sapien
tatcgaagtatgaagttcaagtttc

SEQ ID NO: 4981323 - DNA, 25 bp, Homo sapien
tttagatgagtttcacagctatata

SEQ ID NO: 4981324 - DNA, 25 bp, Homo sapien
tgagaaggataagatggataaactg

SEQ ID NO: 4981325 - DNA, 25 bp, Homo sapien
cattgctttatactgccatgggtcc

SEQ ID NO: 4981326 - DNA, 25 bp, Homo sapien
gctcagatatcctagtaaactcagt

SEQ ID NO: 4981327 - DNA, 25 bp, Homo sapien
tccaaacaaggcttcaggtacaaaa

SEQ ID NO: 4981328 - DNA, 25 bp, Homo sapien
tgatgcgaaacatccagaaaaggcc

SEQ ID NO: 4981329 - DNA, 25 bp, Homo sapien
tagcctttgggttatcacttctcga

SEQ ID NO: 4981330 - DNA, 25 bp, Homo sapien
gaatgcatgcctcagtaaagtgggt

SEQ ID NO: 4981331 - DNA, 25 bp, Homo sapien
tagcttaatatattcggctgggagc

SEQ ID NO: 4981332 - DNA, 25 bp, Homo sapien
tgtacacgacctcacagaacaagga

SEQ ID NO: 4981333 - DNA, 25 bp, Homo sapien
aatttggcactgttggaaactcggc

SEQ ID NO: 4981334 - DNA, 25 bp, Homo sapien
tgagtgctgtctatgataaacgcca

SEQ ID NO: 4981335 - DNA, 25 bp, Homo sapien
catgtgccaacactcttgtccaatt

SEQ ID NO: 4981336 - DNA, 25 bp, Homo sapien
tctaactttgaacatgctttagcat

SEQ ID NO: 4981337 - DNA, 25 bp, Homo sapien
tgtgtcttcctctaactttgaacat

SEQ ID NO: 4981338 - DNA, 25 bp, Homo sapien
caaaagagaagaaatgtgtcttcct

SEQ ID NO: 4981339 - DNA, 25 bp, Homo sapien
ttgaacatgctttagcattacttac

SEQ ID NO: 4981340 - DNA, 25 bp, Homo sapien
cagaacatcctgagactgatcatct

SEQ ID NO: 4981341 - DNA, 25 bp, Homo sapien
ttgccctgagaatctccggttataa

SEQ ID NO: 4981342 - DNA, 25 bp, Homo sapien
tcattaatatcctgatgcaatctca

SEQ ID NO: 4981343 - DNA, 25 bp, Homo sapien
gaatctccggttataatcattaata

SEQ ID NO: 4981344 - DNA, 25 bp, Homo sapien
tcaccaaatactgttaggagtaagg

SEQ ID NO: 4981345 - DNA, 25 bp, Homo sapien
caccaaatactgttaggagtaaggt

SEQ ID NO: 4981346 - DNA, 25 bp, Homo sapien
ttagtgatgtaatctcgttctattg

SEQ ID NO: 4981347 - DNA, 25 bp, Homo sapien
ttttagtgatgtaatctcgttctat

SEQ ID NO: 4981348 - DNA, 25 bp, Homo sapien
tttagtgatgtaatctcgttctatt

SEQ ID NO: 4981349 - DNA, 25 bp, Homo sapien
tagtgatgtaatctcgttctattgc

SEQ ID NO: 4981350 - DNA, 25 bp, Homo sapien
tacagattggacaactgattgcccc

SEQ ID NO: 4981351 - DNA, 25 bp, Homo sapien
tatcgccagtaagcaataatgcagg

SEQ ID NO: 4981352 - DNA, 25 bp, Homo sapien
cgtttgtctacagattggacaactg

SEQ ID NO: 4981353 - DNA, 25 bp, Homo sapien
tgattgccccaagccatgaaccata

SEQ ID NO: 4981354 - DNA, 25 bp, Homo sapien
gtttagaatccagttcaagaattga

SEQ ID NO: 4981355 - DNA, 25 bp, Homo sapien
caactcttgcactagatggattgga

SEQ ID NO: 4981356 - DNA, 25 bp, Homo sapien
aagccagccgaagatgggcaacaca

SEQ ID NO: 4981357 - DNA, 25 bp, Homo sapien
gtattcatgagcagcaagccagccg

SEQ ID NO: 4981358 - DNA, 25 bp, Homo sapien
tcaatcttctatggcgtaagaagcc

SEQ ID NO: 4981359 - DNA, 25 bp, Homo sapien
gcgtaagaagccatagaagattttc

SEQ ID NO: 4981360 - DNA, 25 bp, Homo sapien
tatggcgtaagaagccatagaagat

SEQ ID NO: 4981361 - DNA, 25 bp, Homo sapien
tcttctatggcgtaagaagccatag

SEQ ID NO: 4981362 - DNA, 25 bp, Homo sapien
tagaactgctgtcgagtggcagcag

SEQ ID NO: 4981363 - DNA, 25 bp, Homo sapien
ccacagttggtctccaccgggaagg

SEQ ID NO: 4981364 - DNA, 25 bp, Homo sapien
ggcagatgggacagtacatgtcagt

SEQ ID NO: 4981365 - DNA, 25 bp, Homo sapien
gatgtccacagttggtctccaccgg

SEQ ID NO: 4981366 - DNA, 25 bp, Homo sapien
gaagctgttctcgaagtacccttac

SEQ ID NO: 4981367 - DNA, 25 bp, Homo sapien
gtttgaagctgttctcgaagtaccc

SEQ ID NO: 4981368 - DNA, 25 bp, Homo sapien
gttctcgaagtacccttactagctc

SEQ ID NO: 4981369 - DNA, 25 bp, Homo sapien
cgaagtacccttactagctcctggt

SEQ ID NO: 4981370 - DNA, 25 bp, Homo sapien
ttcatgacatttaaggaaagacaaa

SEQ ID NO: 4981371 - DNA, 25 bp, Homo sapien
tcatgacatttaaggaaagacaaag

SEQ ID NO: 4981372 - DNA, 25 bp, Homo sapien
tatgttagcattcaaagccccgtgg

SEQ ID NO: 4981373 - DNA, 25 bp, Homo sapien
ttgccatacgccaatagaaagtact

SEQ ID NO: 4981374 - DNA, 25 bp, Homo sapien
gggtcaaaaagtcagcagcccttgc

SEQ ID NO: 4981375 - DNA, 25 bp, Homo sapien
tatttggtaagacagctgatgacag

SEQ ID NO: 4981376 - DNA, 25 bp, Homo sapien
gggtagcaatcaaagcgaaactgac

SEQ ID NO: 4981377 - DNA, 25 bp, Homo sapien
ggtcgcttactccttctataactga

SEQ ID NO: 4981378 - DNA, 25 bp, Homo sapien
cacaactgccacaagtacttggtcg

SEQ ID NO: 4981379 - DNA, 25 bp, Homo sapien
cttctataactgaatcatcatccag

SEQ ID NO: 4981380 - DNA, 25 bp, Homo sapien
tccagtttcaaactttgaacttcac

SEQ ID NO: 4981381 - DNA, 25 bp, Homo sapien
gctgtcaaatggagatctactaatg

SEQ ID NO: 4981382 - DNA, 25 bp, Homo sapien
tgcatcatttgacagcagatattct

SEQ ID NO: 4981383 - DNA, 25 bp, Homo sapien
tggagatctactaatgccatttgac

SEQ ID NO: 4981384 - DNA, 25 bp, Homo sapien
ttctcagcggtgttgagaggaaaag

SEQ ID NO: 4981385 - DNA, 25 bp, Homo sapien
ttgggggcttcgacagcacaacttc

SEQ ID NO: 4981386 - DNA, 25 bp, Homo sapien
tgttgggggcttcgacagcacaact

SEQ ID NO: 4981387 - DNA, 25 bp, Homo sapien
gcttgttgggggcttcgacagcaca

SEQ ID NO: 4981388 - DNA, 25 bp, Homo sapien
gggggcttcgacagcacaacttctg

SEQ ID NO: 4981389 - DNA, 25 bp, Homo sapien
aactgcaggtgctagtggctcaaaa

SEQ ID NO: 4981390 - DNA, 25 bp, Homo sapien
aaagcaactgcaggtgctagtggct

SEQ ID NO: 4981391 - DNA, 25 bp, Homo sapien
ggtgctagtggctcaaaaatgaggt

SEQ ID NO: 4981392 - DNA, 25 bp, Homo sapien
tagtggctcaaaaatgaggtattgt

SEQ ID NO: 4981393 - DNA, 25 bp, Homo sapien
caagctgcatgtgagtcaggagtaa

SEQ ID NO: 4981394 - DNA, 25 bp, Homo sapien
cacttaaaagtgctagagattcgac

SEQ ID NO: 4981395 - DNA, 25 bp, Homo sapien
tgtggatatgcagccaagcttgaaa

SEQ ID NO: 4981396 - DNA, 25 bp, Homo sapien
caaaatgaaacctccagaacaacgt

SEQ ID NO: 4981397 - DNA, 25 bp, Homo sapien
gaaggcaactccgaacgctgagaaa

SEQ ID NO: 4981398 - DNA, 25 bp, Homo sapien
agacagattcgtgcctctaaagagg

SEQ ID NO: 4981399 - DNA, 25 bp, Homo sapien
gttaaaaatttatcggcagcccagc

SEQ ID NO: 4981400 - DNA, 25 bp, Homo sapien
gtggaagctccagaacgatccgcct

SEQ ID NO: 4981401 - DNA, 25 bp, Homo sapien
cgcgggccccgatagggtgggcgtg

SEQ ID NO: 4981402 - DNA, 25 bp, Homo sapien
ctagagccgctctccgcgtcggccc

SEQ ID NO: 4981403 - DNA, 25 bp, Homo sapien
accgtcgccggcgactccggacagc

SEQ ID NO: 4981404 - DNA, 25 bp, Homo sapien
gcggccagagctaccccaagaaggc

SEQ ID NO: 4981405 - DNA, 25 bp, Homo sapien
ccgcgaaggaactacctcgccagtt

SEQ ID NO: 4981406 - DNA, 25 bp, Homo sapien
agattatttccaggaccgctcccgc

SEQ ID NO: 4981407 - DNA, 25 bp, Homo sapien
gcactgccgagcttccgcgagggcg

SEQ ID NO: 4981408 - DNA, 25 bp, Homo sapien
agggcggagcgcgtgctcgcctcga

SEQ ID NO: 4981409 - DNA, 25 bp, Homo sapien
cctccacgcgcggcccgtggggcga

SEQ ID NO: 4981410 - DNA, 25 bp, Homo sapien
ccctccacgcgcggcccgtggggcg

SEQ ID NO: 4981411 - DNA, 25 bp, Homo sapien
cgggaccctccacgcgcggcccgtg

SEQ ID NO: 4981412 - DNA, 25 bp, Homo sapien
tgacgtggcaacaccgcttcttaac

SEQ ID NO: 4981413 - DNA, 25 bp, Homo sapien
ttaactaacgcttcccctctcacac

SEQ ID NO: 4981414 - DNA, 25 bp, Homo sapien
gcaacaccgcttcttaactaacgct

SEQ ID NO: 4981415 - DNA, 25 bp, Homo sapien
gggccttgacgtggcaacaccgctt

SEQ ID NO: 4981416 - DNA, 25 bp, Homo sapien
gaccggtcaagtgacttagtgagaa

SEQ ID NO: 4981417 - DNA, 25 bp, Homo sapien
accggtcaagtgacttagtgagaag

SEQ ID NO: 4981418 - DNA, 25 bp, Homo sapien
tgaccggtcaagtgacttagtgaga

SEQ ID NO: 4981419 - DNA, 25 bp, Homo sapien
gtgcactggcactatctcagctcat

SEQ ID NO: 4981420 - DNA, 25 bp, Homo sapien
tttggagatagagtctgtctctgtc

SEQ ID NO: 4981421 - DNA, 25 bp, Homo sapien
gtctctgtcacccaggctggagtgc

SEQ ID NO: 4981422 - DNA, 25 bp, Homo sapien
aattctcttccctcagccttctgag

SEQ ID NO: 4981423 - DNA, 25 bp, Homo sapien
tatgacaacctagggaaaaaaggca

SEQ ID NO: 4981424 - DNA, 25 bp, Homo sapien
catttctaggctggtgaatcaaaga

SEQ ID NO: 4981425 - DNA, 25 bp, Homo sapien
tagtgctgagcacagtccttgagac

SEQ ID NO: 4981426 - DNA, 25 bp, Homo sapien
ggcatacgtaactcaccacttggaa

SEQ ID NO: 4981427 - DNA, 25 bp, Homo sapien
gactgaggtctttaacctatgtgaa

SEQ ID NO: 4981428 - DNA, 25 bp, Homo sapien
tgttcagataagtaaaccatcatgc

SEQ ID NO: 4981429 - DNA, 25 bp, Homo sapien
cgcccggccagaatagtcctaattt

SEQ ID NO: 4981430 - DNA, 25 bp, Homo sapien
gagaatgcccttgcaatagactgag

SEQ ID NO: 4981431 - DNA, 25 bp, Homo sapien
ccctctgttgtggactgtcaggaag

SEQ ID NO: 4981432 - DNA, 25 bp, Homo sapien
taaagtctgtctctatcatctgctg

SEQ ID NO: 4981433 - DNA, 25 bp, Homo sapien
tctaagttagtaggcgatccttctc

SEQ ID NO: 4981434 - DNA, 25 bp, Homo sapien
tcattcctccgcagtcaggtagtgc

SEQ ID NO: 4981435 - DNA, 25 bp, Homo sapien
ggaggctacgcagacctgatcaact

SEQ ID NO: 4981436 - DNA, 25 bp, Homo sapien
tacccgtgtttcacaaatagcctga

SEQ ID NO: 4981437 - DNA, 25 bp, Homo sapien
gaactggagccatacattgtgctaa

SEQ ID NO: 4981438 - DNA, 25 bp, Homo sapien
tgtttgtcctcagaagccgtagttg

SEQ ID NO: 4981439 - DNA, 25 bp, Homo sapien
ccagtagttctcacagaagaatgaa

SEQ ID NO: 4981440 - DNA, 25 bp, Homo sapien
acattttattgatgagccactttgc

SEQ ID NO: 4981441 - DNA, 25 bp, Homo sapien
tccgtgctgtgcaaatagatcagta

SEQ ID NO: 4981442 - DNA, 25 bp, Homo sapien
gaagaatgaaaatccgtgctgtgca

SEQ ID NO: 4981443 - DNA, 25 bp, Homo sapien
gtgtccacggcctcaaagtttgggc

SEQ ID NO: 4981444 - DNA, 25 bp, Homo sapien
aatcagaggtgtccacggcctcaaa

SEQ ID NO: 4981445 - DNA, 25 bp, Homo sapien
ccacggcctcaaagtttgggcccat

SEQ ID NO: 4981446 - DNA, 25 bp, Homo sapien
cagaggtgtccacggcctcaaagtt

SEQ ID NO: 4981447 - DNA, 25 bp, Homo sapien
gcagattgcccctaacttcagcagt

SEQ ID NO: 4981448 - DNA, 25 bp, Homo sapien
aaacacaaacctgcagattgcccct

SEQ ID NO: 4981449 - DNA, 25 bp, Homo sapien
gcagtgcctccgtcactgcatgtac

SEQ ID NO: 4981450 - DNA, 25 bp, Homo sapien
ctttggtttgcctgcctcctgaaac

SEQ ID NO: 4981451 - DNA, 25 bp, Homo sapien
cctgttctactgacgtgctttgcat

SEQ ID NO: 4981452 - DNA, 25 bp, Homo sapien
tgttctactgacgtgctttgcatga

SEQ ID NO: 4981453 - DNA, 25 bp, Homo sapien
cccctgttctactgacgtgctttgc

SEQ ID NO: 4981454 - DNA, 25 bp, Homo sapien
tctactgacgtgctttgcatgagaa

SEQ ID NO: 4981455 - DNA, 25 bp, Homo sapien
cataaggacgaaatacaatgttctg

SEQ ID NO: 4981456 - DNA, 25 bp, Homo sapien
ccagtattgccaaaaatgctattca

SEQ ID NO: 4981457 - DNA, 25 bp, Homo sapien
cagtcacatgtggatagtagttacc

SEQ ID NO: 4981458 - DNA, 25 bp, Homo sapien
gtagttacctatcagacagtacagg

SEQ ID NO: 4981459 - DNA, 25 bp, Homo sapien
gaggtgaatgacttgttacagagcc

SEQ ID NO: 4981460 - DNA, 25 bp, Homo sapien
gacattgtagtaatccaccttgcat

SEQ ID NO: 4981461 - DNA, 25 bp, Homo sapien
tgaaaccttagtacattggagctgg

SEQ ID NO: 4981462 - DNA, 25 bp, Homo sapien
gagttgtattgagtacagccccaac

SEQ ID NO: 4981463 - DNA, 25 bp, Homo sapien
aatggcatcggcaaagctcgggaac

SEQ ID NO: 4981464 - DNA, 25 bp, Homo sapien
taacagcactaacacggtccgaatg

SEQ ID NO: 4981465 - DNA, 25 bp, Homo sapien
tccgtccaaagaaggaatcgccctc

SEQ ID NO: 4981466 - DNA, 25 bp, Homo sapien
ctgggatcaggcgttaatcaccgcg

SEQ ID NO: 4981467 - DNA, 25 bp, Homo sapien
ggaggctgcgcaagggggcgagccc

SEQ ID NO: 4981468 - DNA, 25 bp, Homo sapien
acctcagctgcggaccgaggcgaga

SEQ ID NO: 4981469 - DNA, 25 bp, Homo sapien
ccgaggcgagatggcggccaccgag

SEQ ID NO: 4981470 - DNA, 25 bp, Homo sapien
ccccatggacgacgggtttgtgagc

SEQ ID NO: 4981471 - DNA, 25 bp, Homo sapien
tgctttaagccacgcggaaactgct

SEQ ID NO: 4981472 - DNA, 25 bp, Homo sapien
gctaacaaccagtgaagacccaagg

SEQ ID NO: 4981473 - DNA, 25 bp, Homo sapien
tattttagcgcctcgtatcagccag

SEQ ID NO: 4981474 - DNA, 25 bp, Homo sapien
ggcttcccagaacgctgtgtcgcta

SEQ ID NO: 4981475 - DNA, 25 bp, Homo sapien
gcataagctacaacacaattaaggg

SEQ ID NO: 4981476 - DNA, 25 bp, Homo sapien
taaaatacccagagtgggagttaca

SEQ ID NO: 4981477 - DNA, 25 bp, Homo sapien
cacaattaagggatattctggaatc

SEQ ID NO: 4981478 - DNA, 25 bp, Homo sapien
ggtgaaatgctcttggtctaatgaa

SEQ ID NO: 4981479 - DNA, 25 bp, Homo sapien
taatttcagtaagaagcatgccagt

SEQ ID NO: 4981480 - DNA, 25 bp, Homo sapien
tagtgcagaaagtagcaatccctgg

SEQ ID NO: 4981481 - DNA, 25 bp, Homo sapien
taactggcatgcttcttactgaaat

SEQ ID NO: 4981482 - DNA, 25 bp, Homo sapien
cattagaccaagagcatttcaccaa

SEQ ID NO: 4981483 - DNA, 25 bp, Homo sapien
ccagggattgctactttctgcacta

SEQ ID NO: 4981484 - DNA, 25 bp, Homo sapien
ccttaattgtgttgtagcttatgca

SEQ ID NO: 4981485 - DNA, 25 bp, Homo sapien
gattccagaatatcccttaattgtg

SEQ ID NO: 4981486 - DNA, 25 bp, Homo sapien
tccatcttccacaatagattaagac

SEQ ID NO: 4981487 - DNA, 25 bp, Homo sapien
gatcaagtattgtcttgatgcagca

SEQ ID NO: 4981488 - DNA, 25 bp, Homo sapien
tcttgatgcagcagttcggtcacat

SEQ ID NO: 4981489 - DNA, 25 bp, Homo sapien
gatgcagcagttcggtcacatcttc

SEQ ID NO: 4981490 - DNA, 25 bp, Homo sapien
tcaacaatgtcatttcacaacgtcg

SEQ ID NO: 4981491 - DNA, 25 bp, Homo sapien
cacaacgtcgttgccaggattagat

SEQ ID NO: 4981492 - DNA, 25 bp, Homo sapien
aatgtcatttcacaacgtcgttgcc

SEQ ID NO: 4981493 - DNA, 25 bp, Homo sapien
ggcaacgacgttgtgaaatgacatt

SEQ ID NO: 4981494 - DNA, 25 bp, Homo sapien
gaagatgtgaccgaactgctgcatc

SEQ ID NO: 4981495 - DNA, 25 bp, Homo sapien
tcaagacaatacttgatcagatgag

SEQ ID NO: 4981496 - DNA, 25 bp, Homo sapien
tgtgaccgaactgctgcatcaagac

SEQ ID NO: 4981497 - DNA, 25 bp, Homo sapien
atctaatcctggcaacgacgttgtg

SEQ ID NO: 4981498 - DNA, 25 bp, Homo sapien
cgacgttgtgaaatgacattgttga

SEQ ID NO: 4981499 - DNA, 25 bp, Homo sapien
gcacttttacaccacaggcaaaggg

SEQ ID NO: 4981500 - DNA, 25 bp, Homo sapien
gaacgactgtattccctgcttactg

SEQ ID NO: 4981501 - DNA, 25 bp, Homo sapien
cagaccagctctgatggaacgactg

SEQ ID NO: 4981502 - DNA, 25 bp, Homo sapien
aatcttgacgcatgtaccactgagg

SEQ ID NO: 4981503 - DNA, 25 bp, Homo sapien
tctcgtgtgaaactcctgcagggtc

SEQ ID NO: 4981504 - DNA, 25 bp, Homo sapien
tgcttactgaaccaaacttcggcta

SEQ ID NO: 4981505 - DNA, 25 bp, Homo sapien
gaccctgcaggagtttcacacgaga

SEQ ID NO: 4981506 - DNA, 25 bp, Homo sapien
ccctcagtggtacatgcgtcaagat

SEQ ID NO: 4981507 - DNA, 25 bp, Homo sapien
tgcctgtggtgtaaaagtgcatcac

SEQ ID NO: 4981508 - DNA, 25 bp, Homo sapien
tagccgaagtttggttcagtaagca

SEQ ID NO: 4981509 - DNA, 25 bp, Homo sapien
tacagtcgttccatcagagctggtc

SEQ ID NO: 4981510 - DNA, 25 bp, Homo sapien
tcagtaagcagggaatacagtcgtt

SEQ ID NO: 4981511 - DNA, 25 bp, Homo sapien
agcttctctacatcaacccccttgt

SEQ ID NO: 4981512 - DNA, 25 bp, Homo sapien
aatggcagctgcaattacttgtagc

SEQ ID NO: 4981513 - DNA, 25 bp, Homo sapien
gctgcaattacttgtagcttctcta

SEQ ID NO: 4981514 - DNA, 25 bp, Homo sapien
caagaccctgtttaatggcagctgc

SEQ ID NO: 4981515 - DNA, 25 bp, Homo sapien
cgtacttttgaagctctcagttgca

SEQ ID NO: 4981516 - DNA, 25 bp, Homo sapien
tgctaaataggttttctgtgcctct

SEQ ID NO: 4981517 - DNA, 25 bp, Homo sapien
caatttgattgtaatgtgccttgca

SEQ ID NO: 4981518 - DNA, 25 bp, Homo sapien
tctttcctgaaacaccgagaattta

SEQ ID NO: 4981519 - DNA, 25 bp, Homo sapien
ggtggcacagcatacatctgatttc

SEQ ID NO: 4981520 - DNA, 25 bp, Homo sapien
tccagtgtacatgtagaactcctgt

SEQ ID NO: 4981521 - DNA, 25 bp, Homo sapien
tatgtgtcccatcccaatcaatcct

SEQ ID NO: 4981522 - DNA, 25 bp, Homo sapien
ttctaaagaacatctcaagctcaag

SEQ ID NO: 4981523 - DNA, 25 bp, Homo sapien
ttacctgctgatggatattgcattg

SEQ ID NO: 4981524 - DNA, 25 bp, Homo sapien
gattggtcagatggtcatatgtcag

SEQ ID NO: 4981525 - DNA, 25 bp, Homo sapien
cttgagcaaatacctgattggtcag

SEQ ID NO: 4981526 - DNA, 25 bp, Homo sapien
caactgtttaccaaagtagttgtgc

SEQ ID NO: 4981527 - DNA, 25 bp, Homo sapien
ccactgttcggagggacttagagca

SEQ ID NO: 4981528 - DNA, 25 bp, Homo sapien
acccattggcttcagcgggtgggaa

SEQ ID NO: 4981529 - DNA, 25 bp, Homo sapien
ttgaacctgcgtggatgtgcggcgg

SEQ ID NO: 4981530 - DNA, 25 bp, Homo sapien
tctaaacagaggccgcggatcggga

SEQ ID NO: 4981531 - DNA, 25 bp, Homo sapien
aatgtctgtgtttcaagggctttga

SEQ ID NO: 4981532 - DNA, 25 bp, Homo sapien
tctttcaggtgcagaagggtgtata

SEQ ID NO: 4981533 - DNA, 25 bp, Homo sapien
tgataacgaaatgggagggttgtct

SEQ ID NO: 4981534 - DNA, 25 bp, Homo sapien
gaagacattactgtggcttcgaatc

SEQ ID NO: 4981535 - DNA, 25 bp, Homo sapien
aaacagagacacacggcattgttca

SEQ ID NO: 4981536 - DNA, 25 bp, Homo sapien
ggcattgttcatgggaggcatcgtc

SEQ ID NO: 4981537 - DNA, 25 bp, Homo sapien
ttgttcatgggaggcatcgtcaccc

SEQ ID NO: 4981538 - DNA, 25 bp, Homo sapien
aacagagacacacggcattgttcat

SEQ ID NO: 4981539 - DNA, 25 bp, Homo sapien
tccaccagatctccccagttctgtc

SEQ ID NO: 4981540 - DNA, 25 bp, Homo sapien
ctgtctccatcttctacctgcagct

SEQ ID NO: 4981541 - DNA, 25 bp, Homo sapien
tcttctacctgcagctgctctgttc

SEQ ID NO: 4981542 - DNA, 25 bp, Homo sapien
ctccaccagatctccccagttctgt

SEQ ID NO: 4981543 - DNA, 25 bp, Homo sapien
ctacttctaagggaacttctctaat

SEQ ID NO: 4981544 - DNA, 25 bp, Homo sapien
taattagagccttccccgattacat

SEQ ID NO: 4981545 - DNA, 25 bp, Homo sapien
taatgttggtatcaatctcacagca

SEQ ID NO: 4981546 - DNA, 25 bp, Homo sapien
gcctccatcacatcacagaagtacc

SEQ ID NO: 4981547 - DNA, 25 bp, Homo sapien
ggtatcgacttaagtgaaatttcaa

SEQ ID NO: 4981548 - DNA, 25 bp, Homo sapien
acccagtttgtatcaaagggtatcg

SEQ ID NO: 4981549 - DNA, 25 bp, Homo sapien
caaagggtatcgacttaagtgaaat

SEQ ID NO: 4981550 - DNA, 25 bp, Homo sapien
ttgtatcaaagggtatcgacttaag

SEQ ID NO: 4981551 - DNA, 25 bp, Homo sapien
tacatcctatgcggctctgtccagg

SEQ ID NO: 4981552 - DNA, 25 bp, Homo sapien
gcagtgtgacaaccccaggtgatgc

SEQ ID NO: 4981553 - DNA, 25 bp, Homo sapien
gagcagaggtacagcccggcagtgt

SEQ ID NO: 4981554 - DNA, 25 bp, Homo sapien
aaaggacactaagaggacactggcc

SEQ ID NO: 4981555 - DNA, 25 bp, Homo sapien
gcgaaaaggggggtgcatgcggctg

SEQ ID NO: 4981556 - DNA, 25 bp, Homo sapien
cacagcccctggtttggcgaaaagg

SEQ ID NO: 4981557 - DNA, 25 bp, Homo sapien
ggcctgggcagaggacataggcaac

SEQ ID NO: 4981558 - DNA, 25 bp, Homo sapien
ggccacagcccctggtttggcgaaa

SEQ ID NO: 4981559 - DNA, 25 bp, Homo sapien
gacatgggtgaagctccaaactgta

SEQ ID NO: 4981560 - DNA, 25 bp, Homo sapien
gtagggatgggatgtaactgccaac

SEQ ID NO: 4981561 - DNA, 25 bp, Homo sapien
cacccgtggtcatatgtggacatgg

SEQ ID NO: 4981562 - DNA, 25 bp, Homo sapien
gggtcctgtccacccgtggtcatat

SEQ ID NO: 4981563 - DNA, 25 bp, Homo sapien
ttccctctgcactccgtaatcaccc

SEQ ID NO: 4981564 - DNA, 25 bp, Homo sapien
tctgcactccgtaatcacccatcca

SEQ ID NO: 4981565 - DNA, 25 bp, Homo sapien
agcatggaggtgcccattccctctg

SEQ ID NO: 4981566 - DNA, 25 bp, Homo sapien
catggaggtgcccattccctctgca

SEQ ID NO: 4981567 - DNA, 25 bp, Homo sapien
tccagtccttccacatcaggcagag

SEQ ID NO: 4981568 - DNA, 25 bp, Homo sapien
aatgccctggtcatggcccatgagg

SEQ ID NO: 4981569 - DNA, 25 bp, Homo sapien
ctgagcccgaatgccctggtcatgg

SEQ ID NO: 4981570 - DNA, 25 bp, Homo sapien
ttccacatcaggcagagctgagccc

SEQ ID NO: 4981571 - DNA, 25 bp, Homo sapien
tggtcagtgcagacgtgttcaccag

SEQ ID NO: 4981572 - DNA, 25 bp, Homo sapien
cagtggtcagtgcagacgtgttcac

SEQ ID NO: 4981573 - DNA, 25 bp, Homo sapien
agtggtcagtgcagacgtgttcacc

SEQ ID NO: 4981574 - DNA, 25 bp, Homo sapien
gtcagtgcagacgtgttcaccagcc

SEQ ID NO: 4981575 - DNA, 25 bp, Homo sapien
tgcaaaggtgctcactagaacaagg

SEQ ID NO: 4981576 - DNA, 25 bp, Homo sapien
tgtgaaggtgttggacccactccct

SEQ ID NO: 4981577 - DNA, 25 bp, Homo sapien
gaaggtgttggacccactccctgtg

SEQ ID NO: 4981578 - DNA, 25 bp, Homo sapien
acaaggatgctttgggtcactctga

SEQ ID NO: 4981579 - DNA, 25 bp, Homo sapien
ccccaacgtatctgggagcttatag

SEQ ID NO: 4981580 - DNA, 25 bp, Homo sapien
gctctgcccacgtggaatttgtggg

SEQ ID NO: 4981581 - DNA, 25 bp, Homo sapien
tagcacaggagggtgaaggccccaa

SEQ ID NO: 4981582 - DNA, 25 bp, Homo sapien
ttcagctctgcccacgtggaatttg

SEQ ID NO: 4981583 - DNA, 25 bp, Homo sapien
aagaaagcaattgcccaggaatcct

SEQ ID NO: 4981584 - DNA, 25 bp, Homo sapien
agcaattgcccaggaatcctactgt

SEQ ID NO: 4981585 - DNA, 25 bp, Homo sapien
gaaagcaattgcccaggaatcctac

SEQ ID NO: 4981586 - DNA, 25 bp, Homo sapien
aaagcaattgcccaggaatcctact

SEQ ID NO: 4981587 - DNA, 25 bp, Homo sapien
atgcaggtttatgctcaggacagcc

SEQ ID NO: 4981588 - DNA, 25 bp, Homo sapien
ccagaagtcccggtgctgcggccaa

SEQ ID NO: 4981589 - DNA, 25 bp, Homo sapien
cctgccgctcaaccccatcctgggt

SEQ ID NO: 4981590 - DNA, 25 bp, Homo sapien
gtgactgcggagtgcccatgccagc

SEQ ID NO: 4981591 - DNA, 25 bp, Homo sapien
tgcggagtgcccatgccagcggctt

SEQ ID NO: 4981592 - DNA, 25 bp, Homo sapien
ggtggatcgcagatttagggctggg

SEQ ID NO: 4981593 - DNA, 25 bp, Homo sapien
cacgaccagggatttgagggtagat

SEQ ID NO: 4981594 - DNA, 25 bp, Homo sapien
gattgcggtttttgggtggatcgcg

SEQ ID NO: 4981595 - DNA, 25 bp, Homo sapien
actgcttctggccagcggtcccgag

SEQ ID NO: 4981596 - DNA, 25 bp, Homo sapien
cacgaggaagcgcttcagcttctgg

SEQ ID NO: 4981597 - DNA, 25 bp, Homo sapien
ggtcctgctccatcgaccacgagta

SEQ ID NO: 4981598 - DNA, 25 bp, Homo sapien
ttgagcgtctgagaagtcgccacca

SEQ ID NO: 4981599 - DNA, 25 bp, Homo sapien
caggagcgggttgttgagcgtctga

SEQ ID NO: 4981600 - DNA, 25 bp, Homo sapien
agaaatttccagaagtctctttgct

SEQ ID NO: 4981601 - DNA, 25 bp, Homo sapien
aaatttccagaagtctctttgctct

SEQ ID NO: 4981602 - DNA, 25 bp, Homo sapien
ttccagaagtctctttgctctttta

SEQ ID NO: 4981603 - DNA, 25 bp, Homo sapien
ccagaaatttccagaagtctctttg

SEQ ID NO: 4981604 - DNA, 25 bp, Homo sapien
cctcagatctagttggtttccacct

SEQ ID NO: 4981605 - DNA, 25 bp, Homo sapien
cctttcttgaagacatcagtctctg

SEQ ID NO: 4981606 - DNA, 25 bp, Homo sapien
gctgctgtcaggaatgagactctca

SEQ ID NO: 4981607 - DNA, 25 bp, Homo sapien
agtctctgctaccttgctcctagtc

SEQ ID NO: 4981608 - DNA, 25 bp, Homo sapien
tgcagcgagcagctgcttgcgtgca

SEQ ID NO: 4981609 - DNA, 25 bp, Homo sapien
gcagcgagcagctgcttgcgtgcac

SEQ ID NO: 4981610 - DNA, 25 bp, Homo sapien
tcatggtatgccacggtcttctcct

SEQ ID NO: 4981611 - DNA, 25 bp, Homo sapien
ttcatggtatgccacggtcttctcc

SEQ ID NO: 4981612 - DNA, 25 bp, Homo sapien
cttcatggtatgccacggtcttctc

SEQ ID NO: 4981613 - DNA, 25 bp, Homo sapien
catggtatgccacggtcttctcctc

SEQ ID NO: 4981614 - DNA, 25 bp, Homo sapien
agcgaccaatcacttgctcaattgc

SEQ ID NO: 4981615 - DNA, 25 bp, Homo sapien
ctaagcgaccaatcacttgctcaat

SEQ ID NO: 4981616 - DNA, 25 bp, Homo sapien
taagcgaccaatcacttgctcaatt

SEQ ID NO: 4981617 - DNA, 25 bp, Homo sapien
aagcgaccaatcacttgctcaattg

SEQ ID NO: 4981618 - DNA, 25 bp, Homo sapien
aaccctggagttaaagatgccagtt

SEQ ID NO: 4981619 - DNA, 25 bp, Homo sapien
aaaccctggagttaaagatgccagt

SEQ ID NO: 4981620 - DNA, 25 bp, Homo sapien
accctggagttaaagatgccagttt

SEQ ID NO: 4981621 - DNA, 25 bp, Homo sapien
gtccaataaagatttgcctgtcgaa

SEQ ID NO: 4981622 - DNA, 25 bp, Homo sapien
ccaggatatccggttgattggtgct

SEQ ID NO: 4981623 - DNA, 25 bp, Homo sapien
ctggtagtccaataaagatttgcct

SEQ ID NO: 4981624 - DNA, 25 bp, Homo sapien
agcgcagggtccaggatatccggtt

SEQ ID NO: 4981625 - DNA, 25 bp, Homo sapien
attctgccctccaaagttgcctttt

SEQ ID NO: 4981626 - DNA, 25 bp, Homo sapien
tgccctccaaagttgccttttcctg

SEQ ID NO: 4981627 - DNA, 25 bp, Homo sapien
ccagcagctggttgagtgtgtcctc

SEQ ID NO: 4981628 - DNA, 25 bp, Homo sapien
tgttgttgtattaaaaccatccatc

SEQ ID NO: 4981629 - DNA, 25 bp, Homo sapien
acattggaagaggatgcaaggggca

SEQ ID NO: 4981630 - DNA, 25 bp, Homo sapien
caccacattggaagaggatgcaagg

SEQ ID NO: 4981631 - DNA, 25 bp, Homo sapien
cattggaagaggatgcaaggggcat

SEQ ID NO: 4981632 - DNA, 25 bp, Homo sapien
tcccaccacattggaagaggatgca

SEQ ID NO: 4981633 - DNA, 25 bp, Homo sapien
tcttccgagcaagggcaaataagtc

SEQ ID NO: 4981634 - DNA, 25 bp, Homo sapien
tccgagcaagggcaaataagtctcc

SEQ ID NO: 4981635 - DNA, 25 bp, Homo sapien
cgagcaagggcaaataagtctccga

SEQ ID NO: 4981636 - DNA, 25 bp, Homo sapien
gagcaagggcaaataagtctccgac

SEQ ID NO: 4981637 - DNA, 25 bp, Homo sapien
accaacaaacatctccagaaactcg

SEQ ID NO: 4981638 - DNA, 25 bp, Homo sapien
agaatggcaccctttgggatttttg

SEQ ID NO: 4981639 - DNA, 25 bp, Homo sapien
gtgagaatggcaccctttgggattt

SEQ ID NO: 4981640 - DNA, 25 bp, Homo sapien
agtgagaatggcaccctttgggatt

SEQ ID NO: 4981641 - DNA, 25 bp, Homo sapien
ccttggtttctctgacactaaagag

SEQ ID NO: 4981642 - DNA, 25 bp, Homo sapien
aaggcaatgatgagcaccgcgggca

SEQ ID NO: 4981643 - DNA, 25 bp, Homo sapien
gcaatgatgagcaccgcgggcagca

SEQ ID NO: 4981644 - DNA, 25 bp, Homo sapien
ctctgacactaaagagttggcccat

SEQ ID NO: 4981645 - DNA, 25 bp, Homo sapien
tattaaaccaaacgtgttgcccatc

SEQ ID NO: 4981646 - DNA, 25 bp, Homo sapien
ttaaaccaaacgtgttgcccatcaa

SEQ ID NO: 4981647 - DNA, 25 bp, Homo sapien
caaaacgctcgttgacaactttcag

SEQ ID NO: 4981648 - DNA, 25 bp, Homo sapien
acaaaacgctcgttgacaactttca

SEQ ID NO: 4981649 - DNA, 25 bp, Homo sapien
tgaaacatagttattgacaagttcc

SEQ ID NO: 4981650 - DNA, 25 bp, Homo sapien
gaaacatagttattgacaagttcct

SEQ ID NO: 4981651 - DNA, 25 bp, Homo sapien
tttgaaacatagttattgacaagtt

SEQ ID NO: 4981652 - DNA, 25 bp, Homo sapien
acatagttattgacaagttccttcc

SEQ ID NO: 4981653 - DNA, 25 bp, Homo sapien
tggaccaccagtgagaatcatcttt

SEQ ID NO: 4981654 - DNA, 25 bp, Homo sapien
ttgccacctcgttttccaccgccac

SEQ ID NO: 4981655 - DNA, 25 bp, Homo sapien
ctggaccaccagtgagaatcatctt

SEQ ID NO: 4981656 - DNA, 25 bp, Homo sapien
ttcttgccacctcgttttccaccgc

SEQ ID NO: 4981657 - DNA, 25 bp, Homo sapien
gttgtaataaatccataaagcgtcc

SEQ ID NO: 4981658 - DNA, 25 bp, Homo sapien
ataaatccataaagcgtccgaaggc

SEQ ID NO: 4981659 - DNA, 25 bp, Homo sapien
taataaatccataaagcgtccgaag

SEQ ID NO: 4981660 - DNA, 25 bp, Homo sapien
tgagttgtaataaatccataaagcg

SEQ ID NO: 4981661 - DNA, 25 bp, Homo sapien
cgacccggccccacagctgcaagca

SEQ ID NO: 4981662 - DNA, 25 bp, Homo sapien
ccatgcacgaagagctgctttaggc

SEQ ID NO: 4981663 - DNA, 25 bp, Homo sapien
gcctgccatgcacgaagagctgctt

SEQ ID NO: 4981664 - DNA, 25 bp, Homo sapien
tgcacgaagagctgctttaggccgc

SEQ ID NO: 4981665 - DNA, 25 bp, Homo sapien
ggcacgggaaacatccaccctccgc

SEQ ID NO: 4981666 - DNA, 25 bp, Homo sapien
gagatgttgtctggcacgggaaaca

SEQ ID NO: 4981667 - DNA, 25 bp, Homo sapien
gctgtgtgtcccacgcttctctctc

SEQ ID NO: 4981668 - DNA, 25 bp, Homo sapien
catcagagatgttgtctggcacggg

SEQ ID NO: 4981669 - DNA, 25 bp, Homo sapien
tctgaggcccatgtcgtcctggaga

SEQ ID NO: 4981670 - DNA, 25 bp, Homo sapien
gacagcatttagcagcggtgggccc

SEQ ID NO: 4981671 - DNA, 25 bp, Homo sapien
cctcagggtcgctgacaaagatgcc

SEQ ID NO: 4981672 - DNA, 25 bp, Homo sapien
tccccagattgtggctgttccgctg

SEQ ID NO: 4981673 - DNA, 25 bp, Homo sapien
tgcattggccgcgtgatgtcccaga

SEQ ID NO: 4981674 - DNA, 25 bp, Homo sapien
cattctggacttttgctgaggcttc

SEQ ID NO: 4981675 - DNA, 25 bp, Homo sapien
tgggaaccaagtcctccacattctg

SEQ ID NO: 4981676 - DNA, 25 bp, Homo sapien
tgtggccgtttctgccaggaatatg

SEQ ID NO: 4981677 - DNA, 25 bp, Homo sapien
agctccgggtggacactgcgctcag

SEQ ID NO: 4981678 - DNA, 25 bp, Homo sapien
tggacactgcgctcagaagcgtcac

SEQ ID NO: 4981679 - DNA, 25 bp, Homo sapien
ctggagctccgggtggacactgcgc

SEQ ID NO: 4981680 - DNA, 25 bp, Homo sapien
tgagggggtctggagctccgggtgg

SEQ ID NO: 4981681 - DNA, 25 bp, Homo sapien
ccccacgtggaggaaagtgcaatgc

SEQ ID NO: 4981682 - DNA, 25 bp, Homo sapien
gaggaaagtgcaatgcttctggtcc

SEQ ID NO: 4981683 - DNA, 25 bp, Homo sapien
gaccggctttgcctgttggccgcca

SEQ ID NO: 4981684 - DNA, 25 bp, Homo sapien
gccaaggaccggctttgcctgttgg

SEQ ID NO: 4981685 - DNA, 25 bp, Homo sapien
tggaatattgaaaaattcgtgaagg

SEQ ID NO: 4981686 - DNA, 25 bp, Homo sapien
aggagcggcctcagcaggatgactc

SEQ ID NO: 4981687 - DNA, 25 bp, Homo sapien
tcttcctggaagactcggcggaggg

SEQ ID NO: 4981688 - DNA, 25 bp, Homo sapien
gaaggtgctttaggcccgagctgtt

SEQ ID NO: 4981689 - DNA, 25 bp, Homo sapien
ctgcgcgtgggcagcactttctgaa

SEQ ID NO: 4981690 - DNA, 25 bp, Homo sapien
cttgaaggcgcactgcttggtgatg

SEQ ID NO: 4981691 - DNA, 25 bp, Homo sapien
gcgcgtgggcagcactttctgaagc

SEQ ID NO: 4981692 - DNA, 25 bp, Homo sapien
aatgcacttgaaggcgcactgcttg

SEQ ID NO: 4981693 - DNA, 25 bp, Homo sapien
ctctcacgacgtcttcagtggtggg

SEQ ID NO: 4981694 - DNA, 25 bp, Homo sapien
tggactccgcctccttgggttgttc

SEQ ID NO: 4981695 - DNA, 25 bp, Homo sapien
cccgtagatgctgtggcctggatcc

SEQ ID NO: 4981696 - DNA, 25 bp, Homo sapien
cggtggcagttcttgggcacgtcca

SEQ ID NO: 4981697 - DNA, 25 bp, Homo sapien
tgcgtggggatatccacctccacca

SEQ ID NO: 4981698 - DNA, 25 bp, Homo sapien
ctgcgtggggatatccacctccacc

SEQ ID NO: 4981699 - DNA, 25 bp, Homo sapien
gcggaccgtgcctcagcgcggtggg

SEQ ID NO: 4981700 - DNA, 25 bp, Homo sapien
gaccgtgcctcagcgcggtggggcg

SEQ ID NO: 4981701 - DNA, 25 bp, Homo sapien
ggaccgtgcctcagcgcggtggggc

SEQ ID NO: 4981702 - DNA, 25 bp, Homo sapien
cggaccgtgcctcagcgcggtgggg

SEQ ID NO: 4981703 - DNA, 25 bp, Homo sapien
acacatcacagccagacccaaagca

SEQ ID NO: 4981704 - DNA, 25 bp, Homo sapien
acatcacagccagacccaaagcact

SEQ ID NO: 4981705 - DNA, 25 bp, Homo sapien
tcacagccagacccaaagcactcat

SEQ ID NO: 4981706 - DNA, 25 bp, Homo sapien
atcacagccagacccaaagcactca

SEQ ID NO: 4981707 - DNA, 25 bp, Homo sapien
cccgagtgccctgtcgctgatggtc

SEQ ID NO: 4981708 - DNA, 25 bp, Homo sapien
aggagccggtggcaaaggcgcctca

SEQ ID NO: 4981709 - DNA, 25 bp, Homo sapien
agtgccctgtcgctgatggtccggt

SEQ ID NO: 4981710 - DNA, 25 bp, Homo sapien
ctgtcgctgatggtccggtgttctg

SEQ ID NO: 4981711 - DNA, 25 bp, Homo sapien
gaaatcaggtaatagggtgccttca

SEQ ID NO: 4981712 - DNA, 25 bp, Homo sapien
ggtctgttccattatcctatgggta

SEQ ID NO: 4981713 - DNA, 25 bp, Homo sapien
tatattgccttggacagtatggtcg

SEQ ID NO: 4981714 - DNA, 25 bp, Homo sapien
aatagtttgaccagaatgcattgaa

SEQ ID NO: 4981715 - DNA, 25 bp, Homo sapien
acacactgccatatagaactacctg

SEQ ID NO: 4981716 - DNA, 25 bp, Homo sapien
gcagcatattagtctgtttacacac

SEQ ID NO: 4981717 - DNA, 25 bp, Homo sapien
gatccagttacttcctactaggtcc

SEQ ID NO: 4981718 - DNA, 25 bp, Homo sapien
gggaagcgaggcacatcttatctag

SEQ ID NO: 4981719 - DNA, 25 bp, Homo sapien
aactcatgagtttgggaattctgcc

SEQ ID NO: 4981720 - DNA, 25 bp, Homo sapien
gtttaagcctcaccttgacttttca

SEQ ID NO: 4981721 - DNA, 25 bp, Homo sapien
gaagagtctgtttaaatgggttcca

SEQ ID NO: 4981722 - DNA, 25 bp, Homo sapien
gcaggaagggacataatttttgcca

SEQ ID NO: 4981723 - DNA, 25 bp, Homo sapien
gctgaatttcaaaacttgttatttc

SEQ ID NO: 4981724 - DNA, 25 bp, Homo sapien
ggtggctgaatttcaaaacttgtta

SEQ ID NO: 4981725 - DNA, 25 bp, Homo sapien
tcacatccttctcagctgtgatggt

SEQ ID NO: 4981726 - DNA, 25 bp, Homo sapien
gtgatggtggctgaatttcaaaact

SEQ ID NO: 4981727 - DNA, 25 bp, Homo sapien
tcttactagagaatcagcaaagctc

SEQ ID NO: 4981728 - DNA, 25 bp, Homo sapien
ctgagtttttggataggcctgctga

SEQ ID NO: 4981729 - DNA, 25 bp, Homo sapien
tccttggaggttggaataggagact

SEQ ID NO: 4981730 - DNA, 25 bp, Homo sapien
cacaatgtccttggaggttggaata

SEQ ID NO: 4981731 - DNA, 25 bp, Homo sapien
ctggattagtctccttgaagcccct

SEQ ID NO: 4981732 - DNA, 25 bp, Homo sapien
gcaaagaaccttctgactgtctggg

SEQ ID NO: 4981733 - DNA, 25 bp, Homo sapien
ttgaagcccctgtgatttgtctcta

SEQ ID NO: 4981734 - DNA, 25 bp, Homo sapien
ccttggctcagcctgaaaggttctg

SEQ ID NO: 4981735 - DNA, 25 bp, Homo sapien
tgagtgagaagctgggcacatggag

SEQ ID NO: 4981736 - DNA, 25 bp, Homo sapien
ccttgtcccaagaagacccacaggg

SEQ ID NO: 4981737 - DNA, 25 bp, Homo sapien
aggccttgtcccaagaagacccaca

SEQ ID NO: 4981738 - DNA, 25 bp, Homo sapien
gagtgagaagctgggcacatggagc

SEQ ID NO: 4981739 - DNA, 25 bp, Homo sapien
gattcgggtgagcagcaaccaggta

SEQ ID NO: 4981740 - DNA, 25 bp, Homo sapien
ttcgggagagatggccagtgggtac

SEQ ID NO: 4981741 - DNA, 25 bp, Homo sapien
gagtctggtccatggggcctattaa

SEQ ID NO: 4981742 - DNA, 25 bp, Homo sapien
gcctggtcagaggaaaattggtcag

SEQ ID NO: 4981743 - DNA, 25 bp, Homo sapien
aacctggctagtgggaacctggcca

SEQ ID NO: 4981744 - DNA, 25 bp, Homo sapien
tcaatggggacctggtaaatggaag

SEQ ID NO: 4981745 - DNA, 25 bp, Homo sapien
ttggtcaatggggacctggtaaatg

SEQ ID NO: 4981746 - DNA, 25 bp, Homo sapien
gaacctggctagtgggaacctggcc

SEQ ID NO: 4981747 - DNA, 25 bp, Homo sapien
cttctctggacacccccaggaccat

SEQ ID NO: 4981748 - DNA, 25 bp, Homo sapien
tgggtgcctgttctgtgctgacagt

SEQ ID NO: 4981749 - DNA, 25 bp, Homo sapien
cattctgcatcttctctggacaccc

SEQ ID NO: 4981750 - DNA, 25 bp, Homo sapien
tcattcatcctaacagcaattccat

SEQ ID NO: 4981751 - DNA, 25 bp, Homo sapien
cctacatggtgcctgcatctgattc

SEQ ID NO: 4981752 - DNA, 25 bp, Homo sapien
gcctagtgtggctccatgataacaa

SEQ ID NO: 4981753 - DNA, 25 bp, Homo sapien
ggcctagtgtggctccatgataaca

SEQ ID NO: 4981754 - DNA, 25 bp, Homo sapien
gagacaatccccctacatggtgcct

SEQ ID NO: 4981755 - DNA, 25 bp, Homo sapien
cgtgggccaccagcagcagccagga

SEQ ID NO: 4981756 - DNA, 25 bp, Homo sapien
tgggccaccagcagcagccaggatt

SEQ ID NO: 4981757 - DNA, 25 bp, Homo sapien
ggccaccagcagcagccaggattac

SEQ ID NO: 4981758 - DNA, 25 bp, Homo sapien
gggccaccagcagcagccaggatta

SEQ ID NO: 4981759 - DNA, 25 bp, Homo sapien
aagacaggacaatatcactcggagc

SEQ ID NO: 4981760 - DNA, 25 bp, Homo sapien
acacacgggactcagtattctgtag

SEQ ID NO: 4981761 - DNA, 25 bp, Homo sapien
gggactcagtattctgtagccctgg

SEQ ID NO: 4981762 - DNA, 25 bp, Homo sapien
ctcggagcagcatgtcggtacttgg

SEQ ID NO: 4981763 - DNA, 25 bp, Homo sapien
gaggaactgatatatctagattggc

SEQ ID NO: 4981764 - DNA, 25 bp, Homo sapien
ttgtggaggtggccgcttgctcttt

SEQ ID NO: 4981765 - DNA, 25 bp, Homo sapien
ctgatatatctagattggcagcgtg

SEQ ID NO: 4981766 - DNA, 25 bp, Homo sapien
tatatctagattggcagcgtgtgag

SEQ ID NO: 4981767 - DNA, 25 bp, Homo sapien
aggaggactttatgtccagatgcag

SEQ ID NO: 4981768 - DNA, 25 bp, Homo sapien
ggaggactttatgtccagatgcaga

SEQ ID NO: 4981769 - DNA, 25 bp, Homo sapien
cagaccacaggtcattttgaggagg

SEQ ID NO: 4981770 - DNA, 25 bp, Homo sapien
gaggactttatgtccagatgcagaa

SEQ ID NO: 4981771 - DNA, 25 bp, Homo sapien
tgccagcaacaccatcagtgagctc

SEQ ID NO: 4981772 - DNA, 25 bp, Homo sapien
gctctctgccaatctgtcccaacaa

SEQ ID NO: 4981773 - DNA, 25 bp, Homo sapien
gagctctctgccaatctgtcccaac

SEQ ID NO: 4981774 - DNA, 25 bp, Homo sapien
tctctgccaatctgtcccaacaagg

SEQ ID NO: 4981775 - DNA, 25 bp, Homo sapien
ctggacatcatccatgtacccaagg

SEQ ID NO: 4981776 - DNA, 25 bp, Homo sapien
ccatgtacccaaggaagctcttgcc

SEQ ID NO: 4981777 - DNA, 25 bp, Homo sapien
cctggacatcatccatgtacccaag

SEQ ID NO: 4981778 - DNA, 25 bp, Homo sapien
tgtacccaaggaagctcttgccaaa

SEQ ID NO: 4981779 - DNA, 25 bp, Homo sapien
cagggcctgtgttgtggtgcacaac

SEQ ID NO: 4981780 - DNA, 25 bp, Homo sapien
ttctgtactacgtcactgctgaggg

SEQ ID NO: 4981781 - DNA, 25 bp, Homo sapien
gactatatcgccaccatcttggagc

SEQ ID NO: 4981782 - DNA, 25 bp, Homo sapien
taatgtaacggcaacagcagatctt

SEQ ID NO: 4981783 - DNA, 25 bp, Homo sapien
tcagagtagatcgacttcctgaggg

SEQ ID NO: 4981784 - DNA, 25 bp, Homo sapien
ggaacccctggcgtttctacattga

SEQ ID NO: 4981785 - DNA, 25 bp, Homo sapien
gtgagtggcagcatccccttgactg

SEQ ID NO: 4981786 - DNA, 25 bp, Homo sapien
ggacctacactttctatgacaactg

SEQ ID NO: 4981787 - DNA, 25 bp, Homo sapien
tatggctgtccctgggttgaaacca

SEQ ID NO: 4981788 - DNA, 25 bp, Homo sapien
tgtacccttaggtattggaggtgtc

SEQ ID NO: 4981789 - DNA, 25 bp, Homo sapien
tcctgtagccaaggtgtgtctccct

SEQ ID NO: 4981790 - DNA, 25 bp, Homo sapien
ctgctcttggctgtacccttaggta

SEQ ID NO: 4981791 - DNA, 25 bp, Homo sapien
tcaatgctacaggtgcccatgcaga

SEQ ID NO: 4981792 - DNA, 25 bp, Homo sapien
cctatcatcagtttgtgccccgaca

SEQ ID NO: 4981793 - DNA, 25 bp, Homo sapien
ggctttatgaggtggacaggtctca

SEQ ID NO: 4981794 - DNA, 25 bp, Homo sapien
caatcccaagcttttatgaggcccc

SEQ ID NO: 4981795 - DNA, 25 bp, Homo sapien
tgttctgtactgtccatattttgcc

SEQ ID NO: 4981796 - DNA, 25 bp, Homo sapien
gtcaccgctaattaccccaagggca

SEQ ID NO: 4981797 - DNA, 25 bp, Homo sapien
gcagctgttcgttcatctaccacca

SEQ ID NO: 4981798 - DNA, 25 bp, Homo sapien
cccaagggcagctgttcgttcatct

SEQ ID NO: 4981799 - DNA, 25 bp, Homo sapien
agtgtctgtcatgcttccaagagta

SEQ ID NO: 4981800 - DNA, 25 bp, Homo sapien
tgtcatgcttccaagagtagctgca

SEQ ID NO: 4981801 - DNA, 25 bp, Homo sapien
gaatgaggattcctgcggctcagtg

SEQ ID NO: 4981802 - DNA, 25 bp, Homo sapien
cggctcagtgtctgtcatgcttcca

SEQ ID NO: 4981803 - DNA, 25 bp, Homo sapien
tgtcctcaactaacggacttgaacc

SEQ ID NO: 4981804 - DNA, 25 bp, Homo sapien
atgtgtgtcctcaactaacggactt

SEQ ID NO: 4981805 - DNA, 25 bp, Homo sapien
tgtgtcctcaactaacggacttgaa

SEQ ID NO: 4981806 - DNA, 25 bp, Homo sapien
tgtgtgtcctcaactaacggacttg

SEQ ID NO: 4981807 - DNA, 25 bp, Homo sapien
gagttgaacattcctcttgatggag

SEQ ID NO: 4981808 - DNA, 25 bp, Homo sapien
cttgatggagcagttttgaaacact

SEQ ID NO: 4981809 - DNA, 25 bp, Homo sapien
cagagttgaacattcctcttgatgg

SEQ ID NO: 4981810 - DNA, 25 bp, Homo sapien
cacagagttgaacattcctcttgat

SEQ ID NO: 4981811 - DNA, 25 bp, Homo sapien
atagagaagttttgaaacactcttt

SEQ ID NO: 4981812 - DNA, 25 bp, Homo sapien
cagagttgaacattcgttttgattg

SEQ ID NO: 4981813 - DNA, 25 bp, Homo sapien
attcgttttgattgagcacttttga

SEQ ID NO: 4981814 - DNA, 25 bp, Homo sapien
ttgaacattcgttttgattgagcac

SEQ ID NO: 4981815 - DNA, 25 bp, Homo sapien
gaacattcgttttgattgagcactt

SEQ ID NO: 4981816 - DNA, 25 bp, Homo sapien
ggatatttggatagctttgaggatt

SEQ ID NO: 4981817 - DNA, 25 bp, Homo sapien
tatttggatagctttgaggatttca

SEQ ID NO: 4981818 - DNA, 25 bp, Homo sapien
aagtggatatttggatagctttgag

SEQ ID NO: 4981819 - DNA, 25 bp, Homo sapien
caagtggatatttggatagctttga

SEQ ID NO: 4981820 - DNA, 25 bp, Homo sapien
ctgcaagtggatatttggctagatt

SEQ ID NO: 4981821 - DNA, 25 bp, Homo sapien
tgcaagtggatatttggctagattt

SEQ ID NO: 4981822 - DNA, 25 bp, Homo sapien
caagtggatatttggctagatttga

SEQ ID NO: 4981823 - DNA, 25 bp, Homo sapien
gcaagtggatatttggctagatttg

SEQ ID NO: 4981824 - DNA, 25 bp, Homo sapien
acaaccgtcgcgaacatcagcaaag

SEQ ID NO: 4981825 - DNA, 25 bp, Homo sapien
tcagcaaagcagatccggatggcgt

SEQ ID NO: 4981826 - DNA, 25 bp, Homo sapien
gcaatacccaaaccgtgagtcgaag

SEQ ID NO: 4981827 - DNA, 25 bp, Homo sapien
tggagctccggaagccaagagaact

SEQ ID NO: 4981828 - DNA, 25 bp, Homo sapien
tgatggtcaagtccaacgctcaccg

SEQ ID NO: 4981829 - DNA, 25 bp, Homo sapien
tgtcaactgttctaccttagaaatc

SEQ ID NO: 4981830 - DNA, 25 bp, Homo sapien
gaaatcccaatttgatggtcaagtc

SEQ ID NO: 4981831 - DNA, 25 bp, Homo sapien
aacgctcaccgcagacatctggctg

SEQ ID NO: 4981832 - DNA, 25 bp, Homo sapien
accgagccggcccacttttgcagcc

SEQ ID NO: 4981833 - DNA, 25 bp, Homo sapien
acttttgcagccatctaactccacc

SEQ ID NO: 4981834 - DNA, 25 bp, Homo sapien
cacaccgagccggcccacttttgca

SEQ ID NO: 4981835 - DNA, 25 bp, Homo sapien
cttttgcagccatctaactccaccg

SEQ ID NO: 4981836 - DNA, 25 bp, Homo sapien
cagtgagtggctcatatcccatccc

SEQ ID NO: 4981837 - DNA, 25 bp, Homo sapien
cactgtccactggttgaccggggcg

SEQ ID NO: 4981838 - DNA, 25 bp, Homo sapien
tcccccactgtccactggttgaccg

SEQ ID NO: 4981839 - DNA, 25 bp, Homo sapien
gagtggctcatatcccatccccgtg

SEQ ID NO: 4981840 - DNA, 25 bp, Homo sapien
catatccttccgtgggattctgact

SEQ ID NO: 4981841 - DNA, 25 bp, Homo sapien
cacagatagtggctttaccccattg

SEQ ID NO: 4981842 - DNA, 25 bp, Homo sapien
gggatcaccgcatttctggcagcag

SEQ ID NO: 4981843 - DNA, 25 bp, Homo sapien
tactgagcagattaccgtggtagca

SEQ ID NO: 4981844 - DNA, 25 bp, Homo sapien
aaattccaggtactttggagtcagc

SEQ ID NO: 4981845 - DNA, 25 bp, Homo sapien
ctttggagtcagcaatggtatattg

SEQ ID NO: 4981846 - DNA, 25 bp, Homo sapien
tctaaagctacttctctagatgaaa

SEQ ID NO: 4981847 - DNA, 25 bp, Homo sapien
tattgagtgcatggctcttgctcac

SEQ ID NO: 4981848 - DNA, 25 bp, Homo sapien
agcaccaacagaaggcttctgagaa

SEQ ID NO: 4981849 - DNA, 25 bp, Homo sapien
cagcaccaacagaaggcttctgaga

SEQ ID NO: 4981850 - DNA, 25 bp, Homo sapien
ggcagcaccaacagaaggcttctga

SEQ ID NO: 4981851 - DNA, 25 bp, Homo sapien
gcagcaccaacagaaggcttctgag

SEQ ID NO: 4981852 - DNA, 25 bp, Homo sapien
caaagtagtttcacacatggtttca

SEQ ID NO: 4981853 - DNA, 25 bp, Homo sapien
caaggattaactgtgagctgaattc

SEQ ID NO: 4981854 - DNA, 25 bp, Homo sapien
ccttctgaatcaatggtatggttta

SEQ ID NO: 4981855 - DNA, 25 bp, Homo sapien
ttgtcataggctatacagtttttca

SEQ ID NO: 4981856 - DNA, 25 bp, Homo sapien
tcaaagggtcactggagcgatggtt

SEQ ID NO: 4981857 - DNA, 25 bp, Homo sapien
ctttcagcgctgaatgctgtcaggc

SEQ ID NO: 4981858 - DNA, 25 bp, Homo sapien
gaacgtggaactatgctggaaaaca

SEQ ID NO: 4981859 - DNA, 25 bp, Homo sapien
tgctctcagcaagtggtgcccatat

SEQ ID NO: 4981860 - DNA, 25 bp, Homo sapien
cagccagaagtgcatagttgggaca

SEQ ID NO: 4981861 - DNA, 25 bp, Homo sapien
ttcattgcttccacacaaagcagga

SEQ ID NO: 4981862 - DNA, 25 bp, Homo sapien
tttaatataattgaatccattgatc

SEQ ID NO: 4981863 - DNA, 25 bp, Homo sapien
tgtagcagtgaattagagctataca

SEQ ID NO: 4981864 - DNA, 25 bp, Homo sapien
ttttcattcacagtcacagtagtat

SEQ ID NO: 4981865 - DNA, 25 bp, Homo sapien
tacatttagatatattcaaacaatg

SEQ ID NO: 4981866 - DNA, 25 bp, Homo sapien
tgctataaatgttactggtctctgt

SEQ ID NO: 4981867 - DNA, 25 bp, Homo sapien
tttcctgtgacccaaatgccactgc

SEQ ID NO: 4981868 - DNA, 25 bp, Homo sapien
gcgccaaggtgccaacaatgctata

SEQ ID NO: 4981869 - DNA, 25 bp, Homo sapien
gctactgcttaaggcttgatcagga

SEQ ID NO: 4981870 - DNA, 25 bp, Homo sapien
ctgttgtctagcctgtgttggtgtg

SEQ ID NO: 4981871 - DNA, 25 bp, Homo sapien
ggagctgtgctgacgtttatagcaa

SEQ ID NO: 4981872 - DNA, 25 bp, Homo sapien
agaaagggagctgtgctgacgttta

SEQ ID NO: 4981873 - DNA, 25 bp, Homo sapien
gacgtttatagcaaattgagtcagc

SEQ ID NO: 4981874 - DNA, 25 bp, Homo sapien
tgcagtagcagaggcaaaacatcaa

SEQ ID NO: 4981875 - DNA, 25 bp, Homo sapien
cagtagcagaggcaaaacatcaaaa

SEQ ID NO: 4981876 - DNA, 25 bp, Homo sapien
tagcagaggcaaaacatcaaaagcc

SEQ ID NO: 4981877 - DNA, 25 bp, Homo sapien
ctgcagtagcagaggcaaaacatca

SEQ ID NO: 4981878 - DNA, 25 bp, Homo sapien
gatgggatgtatctccaaaactttc

SEQ ID NO: 4981879 - DNA, 25 bp, Homo sapien
caccttatttagatgcatcaccttc

SEQ ID NO: 4981880 - DNA, 25 bp, Homo sapien
tcttctacacactcttgatatgcaa

SEQ ID NO: 4981881 - DNA, 25 bp, Homo sapien
caccttcaacatgttcgcattttta

SEQ ID NO: 4981882 - DNA, 25 bp, Homo sapien
ggtgtttgtagttggatttccatta

SEQ ID NO: 4981883 - DNA, 25 bp, Homo sapien
ataacagaaaagtggtgtttgtagt

SEQ ID NO: 4981884 - DNA, 25 bp, Homo sapien
cagaaaagtggtgtttgtagttgga

SEQ ID NO: 4981885 - DNA, 25 bp, Homo sapien
tggtgtttgtagttggatttccatt

SEQ ID NO: 4981886 - DNA, 25 bp, Homo sapien
ttgtattccaggatatctcttgcca

SEQ ID NO: 4981887 - DNA, 25 bp, Homo sapien
tttgtattccaggatatctcttgcc

SEQ ID NO: 4981888 - DNA, 25 bp, Homo sapien
gtaggaactaaaagcacttcttgcc

SEQ ID NO: 4981889 - DNA, 25 bp, Homo sapien
tggtaggaactaaaagcacttcttg

SEQ ID NO: 4981890 - DNA, 25 bp, Homo sapien
ggtaggaactaaaagcacttcttgc

SEQ ID NO: 4981891 - DNA, 25 bp, Homo sapien
tttattgctagaaatcagcccttcc

SEQ ID NO: 4981892 - DNA, 25 bp, Homo sapien
tatagtggtatgagccaaattggct

SEQ ID NO: 4981893 - DNA, 25 bp, Homo sapien
taaccaaaattatagtggtatgagc

SEQ ID NO: 4981894 - DNA, 25 bp, Homo sapien
ttattgctagaaatcagcccttccc

SEQ ID NO: 4981895 - DNA, 25 bp, Homo sapien
tatctacccatagtccccatacaat

SEQ ID NO: 4981896 - DNA, 25 bp, Homo sapien
tctacccatagtccccatacaataa

SEQ ID NO: 4981897 - DNA, 25 bp, Homo sapien
acccatagtccccatacaataagaa

SEQ ID NO: 4981898 - DNA, 25 bp, Homo sapien
catagtccccatacaataagaagaa

SEQ ID NO: 4981899 - DNA, 25 bp, Homo sapien
tgatggtagtagtatcctttggttt

SEQ ID NO: 4981900 - DNA, 25 bp, Homo sapien
ctgggaaatggtgttcaaggatttg

SEQ ID NO: 4981901 - DNA, 25 bp, Homo sapien
tctttcaattccagatggtacttta

SEQ ID NO: 4981902 - DNA, 25 bp, Homo sapien
tccagagactatgaatctctcttaa

SEQ ID NO: 4981903 - DNA, 25 bp, Homo sapien
ttccagagactatgaatctctctta

SEQ ID NO: 4981904 - DNA, 25 bp, Homo sapien
tgatgttcaacatatttctgtaaaa

SEQ ID NO: 4981905 - DNA, 25 bp, Homo sapien
ctgatgttcaacatatttctgtaaa

SEQ ID NO: 4981906 - DNA, 25 bp, Homo sapien
atcttaaaccaggaattcttaactg

SEQ ID NO: 4981907 - DNA, 25 bp, Homo sapien
gaattcttaactgaagttattccat

SEQ ID NO: 4981908 - DNA, 25 bp, Homo sapien
ggcagtggacagtttgttgcgggaa

SEQ ID NO: 4981909 - DNA, 25 bp, Homo sapien
aaaaggagcatcagtaaaagttaca

SEQ ID NO: 4981910 - DNA, 25 bp, Homo sapien
ggacagtttgttgcgggaagccagg

SEQ ID NO: 4981911 - DNA, 25 bp, Homo sapien
aaaggagcatcagtaaaagttacaa

SEQ ID NO: 4981912 - DNA, 25 bp, Homo sapien
ctagaaatgggactctcagttcaag

SEQ ID NO: 4981913 - DNA, 25 bp, Homo sapien
tctagaaatgggactctcagttcaa

SEQ ID NO: 4981914 - DNA, 25 bp, Homo sapien
gtgggcagcagtagtttgatctgca

SEQ ID NO: 4981915 - DNA, 25 bp, Homo sapien
tcaccacgctatctgtgttcttccg

SEQ ID NO: 4981916 - DNA, 25 bp, Homo sapien
cacgctatctgtgttcttccgaata

SEQ ID NO: 4981917 - DNA, 25 bp, Homo sapien
agatcaccacgctatctgtgttctt

SEQ ID NO: 4981918 - DNA, 25 bp, Homo sapien
cgctatctgtgttcttccgaatata

SEQ ID NO: 4981919 - DNA, 25 bp, Homo sapien
gaagcatcagctgttgtaatgttgt

SEQ ID NO: 4981920 - DNA, 25 bp, Homo sapien
aagcatcagctgttgtaatgttgta

SEQ ID NO: 4981921 - DNA, 25 bp, Homo sapien
actgcacctgacttacgccttttct

SEQ ID NO: 4981922 - DNA, 25 bp, Homo sapien
tgtctggagaggatactgtacttgg

SEQ ID NO: 4981923 - DNA, 25 bp, Homo sapien
atgtctggagaggatactgtacttg

SEQ ID NO: 4981924 - DNA, 25 bp, Homo sapien
agggtagcagcaacaagctggagtc

SEQ ID NO: 4981925 - DNA, 25 bp, Homo sapien
cttcaacagggtagcagcaacaagc

SEQ ID NO: 4981926 - DNA, 25 bp, Homo sapien
agcaacaagctggagtccaagccct

SEQ ID NO: 4981927 - DNA, 25 bp, Homo sapien
tagcagcaacaagctggagtccaag

SEQ ID NO: 4981928 - DNA, 25 bp, Homo sapien
ctgataaaaggcaacctgtctatca

SEQ ID NO: 4981929 - DNA, 25 bp, Homo sapien
tcatgaaaaaggatccggagtttgt

SEQ ID NO: 4981930 - DNA, 25 bp, Homo sapien
gcaacctgtctatcataaaacgcct

SEQ ID NO: 4981931 - DNA, 25 bp, Homo sapien
aaaacgcctctttatagcatcatga

SEQ ID NO: 4981932 - DNA, 25 bp, Homo sapien
gtttctccacattgtaatagagcac

SEQ ID NO: 4981933 - DNA, 25 bp, Homo sapien
accattaccacggatgcaacttggt

SEQ ID NO: 4981934 - DNA, 25 bp, Homo sapien
tagagcacgtgtgggggttcatccc

SEQ ID NO: 4981935 - DNA, 25 bp, Homo sapien
ttaccacggatgcaacttggtcatt

SEQ ID NO: 4981936 - DNA, 25 bp, Homo sapien
ggagtcttgaagtgcttcaatgtaa

SEQ ID NO: 4981937 - DNA, 25 bp, Homo sapien
gggagtcttgaagtgcttcaatgta

SEQ ID NO: 4981938 - DNA, 25 bp, Homo sapien
gccaaaaatccccgtcttctgtcat

SEQ ID NO: 4981939 - DNA, 25 bp, Homo sapien
tacagccaaaaatccccgtcttctg

SEQ ID NO: 4981940 - DNA, 25 bp, Homo sapien
aaaatccccgtcttctgtcattgct

SEQ ID NO: 4981941 - DNA, 25 bp, Homo sapien
catccaacacacaaattgtttgctc

SEQ ID NO: 4981942 - DNA, 25 bp, Homo sapien
tgtcataaagatgaaaaattatctc

SEQ ID NO: 4981943 - DNA, 25 bp, Homo sapien
cctcctttgtcataaagatgaaaaa

SEQ ID NO: 4981944 - DNA, 25 bp, Homo sapien
catttcctcctttgtcataaagatg

SEQ ID NO: 4981945 - DNA, 25 bp, Homo sapien
tattcaaattcaaaatgctgttgta

SEQ ID NO: 4981946 - DNA, 25 bp, Homo sapien
tttggtctgatattcaaattcaaaa

SEQ ID NO: 4981947 - DNA, 25 bp, Homo sapien
attcaaattcaaaatgctgttgtac

SEQ ID NO: 4981948 - DNA, 25 bp, Homo sapien
ggtctgatattcaaattcaaaatgc

SEQ ID NO: 4981949 - DNA, 25 bp, Homo sapien
tcacatctagacatctggtgtctct

SEQ ID NO: 4981950 - DNA, 25 bp, Homo sapien
ctagacatctggtgtctctttcctc

SEQ ID NO: 4981951 - DNA, 25 bp, Homo sapien
catctagacatctggtgtctctttc

SEQ ID NO: 4981952 - DNA, 25 bp, Homo sapien
ttaatcacatctagacatctggtgt

SEQ ID NO: 4981953 - DNA, 25 bp, Homo sapien
cttcttatggttgtagatttcacca

SEQ ID NO: 4981954 - DNA, 25 bp, Homo sapien
ctgtaacagagccacaaatatggat

SEQ ID NO: 4981955 - DNA, 25 bp, Homo sapien
aacagagccacaaatatggatattt

SEQ ID NO: 4981956 - DNA, 25 bp, Homo sapien
gagccacaaatatggatatttcttc

SEQ ID NO: 4981957 - DNA, 25 bp, Homo sapien
aaatatggatatttcttcacttgaa

SEQ ID NO: 4981958 - DNA, 25 bp, Homo sapien
agctattggtgtatccactgacatt

SEQ ID NO: 4981959 - DNA, 25 bp, Homo sapien
agcagctattggtgtatccactgac

SEQ ID NO: 4981960 - DNA, 25 bp, Homo sapien
aagcagctattggtgtatccactga

SEQ ID NO: 4981961 - DNA, 25 bp, Homo sapien
gcagctattggtgtatccactgaca

SEQ ID NO: 4981962 - DNA, 25 bp, Homo sapien
gccaaatgccacacgtggtggaatg

SEQ ID NO: 4981963 - DNA, 25 bp, Homo sapien
gggccaaatgccacacgtggtggaa

SEQ ID NO: 4981964 - DNA, 25 bp, Homo sapien
cagggccaaatgccacacgtggtgg

SEQ ID NO: 4981965 - DNA, 25 bp, Homo sapien
ggccaaatgccacacgtggtggaat

SEQ ID NO: 4981966 - DNA, 25 bp, Homo sapien
cattctaagtctgcttccaagatac

SEQ ID NO: 4981967 - DNA, 25 bp, Homo sapien
cacatctgtctctgcattctaagtc

SEQ ID NO: 4981968 - DNA, 25 bp, Homo sapien
ctaagtctgcttccaagatacagat

SEQ ID NO: 4981969 - DNA, 25 bp, Homo sapien
taggattcagtggttggctagagct

SEQ ID NO: 4981970 - DNA, 25 bp, Homo sapien
ctctaagtgatttattcaggtgtga

SEQ ID NO: 4981971 - DNA, 25 bp, Homo sapien
tgatttattcaggtgtgattgaaga

SEQ ID NO: 4981972 - DNA, 25 bp, Homo sapien
agtgatttattcaggtgtgattgaa

SEQ ID NO: 4981973 - DNA, 25 bp, Homo sapien
ctaagtgatttattcaggtgtgatt

SEQ ID NO: 4981974 - DNA, 25 bp, Homo sapien
ctgtgtccctaaacagacctcttct

SEQ ID NO: 4981975 - DNA, 25 bp, Homo sapien
tgtgtccctaaacagacctcttctc

SEQ ID NO: 4981976 - DNA, 25 bp, Homo sapien
acaccgaggtggtgataaagccgga

SEQ ID NO: 4981977 - DNA, 25 bp, Homo sapien
ggagtctctgcttcctagatcagga

SEQ ID NO: 4981978 - DNA, 25 bp, Homo sapien
gaaagcacagacaccgaggtggtga

SEQ ID NO: 4981979 - DNA, 25 bp, Homo sapien
tgactgtgccctagccatgtgcacg

SEQ ID NO: 4981980 - DNA, 25 bp, Homo sapien
aacagaggctctggactgggaaaat

SEQ ID NO: 4981981 - DNA, 25 bp, Homo sapien
agagaggtccttccgcaccctcttg

SEQ ID NO: 4981982 - DNA, 25 bp, Homo sapien
tgcgcaacaatagctgggcgtccgc

SEQ ID NO: 4981983 - DNA, 25 bp, Homo sapien
agagcacgcgaggagggtgctgcgc

SEQ ID NO: 4981984 - DNA, 25 bp, Homo sapien
cgtctgccgggtgccaagctgaaga

SEQ ID NO: 4981985 - DNA, 25 bp, Homo sapien
aacaggtcagggcgatgtgggcagt

SEQ ID NO: 4981986 - DNA, 25 bp, Homo sapien
aggtcagggcgatgtgggcagtgga

SEQ ID NO: 4981987 - DNA, 25 bp, Homo sapien
acaggtcagggcgatgtgggcagtg

SEQ ID NO: 4981988 - DNA, 25 bp, Homo sapien
caggtcagggcgatgtgggcagtgg

SEQ ID NO: 4981989 - DNA, 25 bp, Homo sapien
ctggcgcttataccggctgggctgc

SEQ ID NO: 4981990 - DNA, 25 bp, Homo sapien
cgcttataccggctgggctgctgta

SEQ ID NO: 4981991 - DNA, 25 bp, Homo sapien
cttataccggctgggctgctgtaat

SEQ ID NO: 4981992 - DNA, 25 bp, Homo sapien
taccggctgggctgctgtaatgcgt

SEQ ID NO: 4981993 - DNA, 25 bp, Homo sapien
ctgcgaggatcaaccagcgcgtgca

SEQ ID NO: 4981994 - DNA, 25 bp, Homo sapien
atcaaccagcgcgtgcagaggcggg

SEQ ID NO: 4981995 - DNA, 25 bp, Homo sapien
cgaggatcaaccagcgcgtgcagag

SEQ ID NO: 4981996 - DNA, 25 bp, Homo sapien
aggatcaaccagcgcgtgcagaggc

SEQ ID NO: 4981997 - DNA, 25 bp, Homo sapien
aagaagcagcccaggtagcagcacc

SEQ ID NO: 4981998 - DNA, 25 bp, Homo sapien
tagcagcaccactgccaattctaaa

SEQ ID NO: 4981999 - DNA, 25 bp, Homo sapien
caccaagacaagaagcagcccaggt

SEQ ID NO: 4982000 - DNA, 25 bp, Homo sapien
ttctaaatgcctctccaattgtcat

SEQ ID NO: 4982001 - DNA, 25 bp, Homo sapien
gaggtctcgtttgttatgtttgggc

SEQ ID NO: 4982002 - DNA, 25 bp, Homo sapien
gatgatgaggtctcgtttgttatgt

SEQ ID NO: 4982003 - DNA, 25 bp, Homo sapien
tattgacttgttaaactgatgtagg

SEQ ID NO: 4982004 - DNA, 25 bp, Homo sapien
tgatgtaggcatagatgatgaggtc

SEQ ID NO: 4982005 - DNA, 25 bp, Homo sapien
aggtggagcttcacccttgttgccc

SEQ ID NO: 4982006 - DNA, 25 bp, Homo sapien
aaacttccatcctcaggtgatcaac

SEQ ID NO: 4982007 - DNA, 25 bp, Homo sapien
ctgccttgtcctcccaaagtcctga

SEQ ID NO: 4982008 - DNA, 25 bp, Homo sapien
gagattacaggcataggcatgagcc

SEQ ID NO: 4982009 - DNA, 25 bp, Homo sapien
gcatgtctcttgcaatatctcttgc

SEQ ID NO: 4982010 - DNA, 25 bp, Homo sapien
tgtatcttgacagcagttagcctga

SEQ ID NO: 4982011 - DNA, 25 bp, Homo sapien
tgggccccaggggtatgaacttctc

SEQ ID NO: 4982012 - DNA, 25 bp, Homo sapien
gggttggcttgccagaggatgtttc

SEQ ID NO: 4982013 - DNA, 25 bp, Homo sapien
catcgattctggaacaattggttga

SEQ ID NO: 4982014 - DNA, 25 bp, Homo sapien
gacactcccatcttgtcttttcctg

SEQ ID NO: 4982015 - DNA, 25 bp, Homo sapien
tgcctagaaatgttgacactcccat

SEQ ID NO: 4982016 - DNA, 25 bp, Homo sapien
caaggcatgttctagcaatttgctc

SEQ ID NO: 4982017 - DNA, 25 bp, Homo sapien
gcaatgatggcaaatgcagcccaga

SEQ ID NO: 4982018 - DNA, 25 bp, Homo sapien
gatgatgcaatgatggcaaatgcag

SEQ ID NO: 4982019 - DNA, 25 bp, Homo sapien
tgatggcaaatgcagcccagaaatt

SEQ ID NO: 4982020 - DNA, 25 bp, Homo sapien
tggcaaatgcagcccagaaatttcc

SEQ ID NO: 4982021 - DNA, 25 bp, Homo sapien
tcctgacattgaaatacactatgcc

SEQ ID NO: 4982022 - DNA, 25 bp, Homo sapien
cttggactgcgttgcaaagccagct

SEQ ID NO: 4982023 - DNA, 25 bp, Homo sapien
tacactatgccctgtggttcaccct

SEQ ID NO: 4982024 - DNA, 25 bp, Homo sapien
gccctgtggttcaccctgactctga

SEQ ID NO: 4982025 - DNA, 25 bp, Homo sapien
ttgcttcagtcaagatgaggttgcc

SEQ ID NO: 4982026 - DNA, 25 bp, Homo sapien
gatgaggttgcctctagaggataga

SEQ ID NO: 4982027 - DNA, 25 bp, Homo sapien
gagccattctgaagctctcatttgc

SEQ ID NO: 4982028 - DNA, 25 bp, Homo sapien
gagtgacttctatgggcagttccac

SEQ ID NO: 4982029 - DNA, 25 bp, Homo sapien
tacgccaatctctgcaatattatca

SEQ ID NO: 4982030 - DNA, 25 bp, Homo sapien
tgaaagctaaaatcctcggtagaag

SEQ ID NO: 4982031 - DNA, 25 bp, Homo sapien
ttctgaaagctaaaatcctcggtag

SEQ ID NO: 4982032 - DNA, 25 bp, Homo sapien
aacctgttgaggcatgttacgccaa

SEQ ID NO: 4982033 - DNA, 25 bp, Homo sapien
agtcagaaaagtaatctacgctcat

SEQ ID NO: 4982034 - DNA, 25 bp, Homo sapien
ccaggaaggggctacgggcaccatc

SEQ ID NO: 4982035 - DNA, 25 bp, Homo sapien
caggttgcagaaagagtaggccctt

SEQ ID NO: 4982036 - DNA, 25 bp, Homo sapien
aaagagtaggcccttcttggatgtc

SEQ ID NO: 4982037 - DNA, 25 bp, Homo sapien
ctcctagagaccagtgagtgcaggt

SEQ ID NO: 4982038 - DNA, 25 bp, Homo sapien
gagctgcagtgtgggcactgtgcaa

SEQ ID NO: 4982039 - DNA, 25 bp, Homo sapien
agctgcagtgtgggcactgtgcaat

SEQ ID NO: 4982040 - DNA, 25 bp, Homo sapien
tgcagtgtgggcactgtgcaatggc

SEQ ID NO: 4982041 - DNA, 25 bp, Homo sapien
tggagctgcagtgtgggcactgtgc

SEQ ID NO: 4982042 - DNA, 25 bp, Homo sapien
ttgtgacatatatccaggccaattg

SEQ ID NO: 4982043 - DNA, 25 bp, Homo sapien
gacatattgctgtacccaaggtaag

SEQ ID NO: 4982044 - DNA, 25 bp, Homo sapien
tttgtaacatatcacttggctcagc

SEQ ID NO: 4982045 - DNA, 25 bp, Homo sapien
gccaattgcctaggtgaagtttgtc

SEQ ID NO: 4982046 - DNA, 25 bp, Homo sapien
caattttttcagggtatgggtctga

SEQ ID NO: 4982047 - DNA, 25 bp, Homo sapien
tctgatagcttatttagctgaactt

SEQ ID NO: 4982048 - DNA, 25 bp, Homo sapien
ttttttcagggtatgggtctgatag

SEQ ID NO: 4982049 - DNA, 25 bp, Homo sapien
ggtctgatagcttatttagctgaac

SEQ ID NO: 4982050 - DNA, 25 bp, Homo sapien
aagtaattcttttgttgaacatatt

SEQ ID NO: 4982051 - DNA, 25 bp, Homo sapien
tttaacctccattgtttagtctatc

SEQ ID NO: 4982052 - DNA, 25 bp, Homo sapien
taacctccattgtttagtctatcaa

SEQ ID NO: 4982053 - DNA, 25 bp, Homo sapien
aataagaggattttaacctccattg

SEQ ID NO: 4982054 - DNA, 25 bp, Homo sapien
aggtgttgaacttctaattataaag

SEQ ID NO: 4982055 - DNA, 25 bp, Homo sapien
agggtaagacttgcagagttccttt

SEQ ID NO: 4982056 - DNA, 25 bp, Homo sapien
attatgcagaaggtataagggtttg

SEQ ID NO: 4982057 - DNA, 25 bp, Homo sapien
tatgcagaaggtataagggtttgtc

SEQ ID NO: 4982058 - DNA, 25 bp, Homo sapien
gctttttaatgctgtattcagttct

SEQ ID NO: 4982059 - DNA, 25 bp, Homo sapien
ttaatgctgtattcagttctttcat

SEQ ID NO: 4982060 - DNA, 25 bp, Homo sapien
tgtaggatctgtctccaggatgatg

SEQ ID NO: 4982061 - DNA, 25 bp, Homo sapien
gtaggatctgtctccaggatgatgt

SEQ ID NO: 4982062 - DNA, 25 bp, Homo sapien
gaggagagggtaaagttttgccaca

SEQ ID NO: 4982063 - DNA, 25 bp, Homo sapien
tgaggagagggtaaagttttgccac

SEQ ID NO: 4982064 - DNA, 25 bp, Homo sapien
gacgaacaatatagcatgagcgatc

SEQ ID NO: 4982065 - DNA, 25 bp, Homo sapien
tacagataactagctagactcatcc

SEQ ID NO: 4982066 - DNA, 25 bp, Homo sapien
aagtcattcttaaacgacgaacaat

SEQ ID NO: 4982067 - DNA, 25 bp, Homo sapien
caaagaaggaggacatgttgggaac

SEQ ID NO: 4982068 - DNA, 25 bp, Homo sapien
gatagaatatagttaagcacacaac

SEQ ID NO: 4982069 - DNA, 25 bp, Homo sapien
ttaacaggtttctcgaagatagaat

SEQ ID NO: 4982070 - DNA, 25 bp, Homo sapien
tctcgaagatagaatatagttaagc

SEQ ID NO: 4982071 - DNA, 25 bp, Homo sapien
caggtttctcgaagatagaatatag

SEQ ID NO: 4982072 - DNA, 25 bp, Homo sapien
tctgtccaggggcatggtttctccc

SEQ ID NO: 4982073 - DNA, 25 bp, Homo sapien
gtgacaagggcctttaatcattctc

SEQ ID NO: 4982074 - DNA, 25 bp, Homo sapien
gggcctttaatcattctctctgcac

SEQ ID NO: 4982075 - DNA, 25 bp, Homo sapien
cctttaatcattctctctgcactgg

SEQ ID NO: 4982076 - DNA, 25 bp, Homo sapien
tggaggctggaactcaatgctgcct

SEQ ID NO: 4982077 - DNA, 25 bp, Homo sapien
ggctggaactcaatgctgcctccac

SEQ ID NO: 4982078 - DNA, 25 bp, Homo sapien
cactggaggctggaactcaatgctg

SEQ ID NO: 4982079 - DNA, 25 bp, Homo sapien
gaggctggaactcaatgctgcctcc

SEQ ID NO: 4982080 - DNA, 25 bp, Homo sapien
accctcagaaagcttggggccagca

SEQ ID NO: 4982081 - DNA, 25 bp, Homo sapien
ctggaaaagggtctgaccctgcaga

SEQ ID NO: 4982082 - DNA, 25 bp, Homo sapien
ccctcagaaagcttggggccagcac

SEQ ID NO: 4982083 - DNA, 25 bp, Homo sapien
accttcctgtttcacctccgcatgg

SEQ ID NO: 4982084 - DNA, 25 bp, Homo sapien
cgcatggcctgaaatgaaggctctc

SEQ ID NO: 4982085 - DNA, 25 bp, Homo sapien
ttgtaggaacatgtctcagaagcca

SEQ ID NO: 4982086 - DNA, 25 bp, Homo sapien
gacccagggcagttccttgtaggaa

SEQ ID NO: 4982087 - DNA, 25 bp, Homo sapien
aagctccacccaggcacccattctt

SEQ ID NO: 4982088 - DNA, 25 bp, Homo sapien
ccaaccagtacaagttttgcctctt

SEQ ID NO: 4982089 - DNA, 25 bp, Homo sapien
aactctgctctccaaccagtacaag

SEQ ID NO: 4982090 - DNA, 25 bp, Homo sapien
ccaggcacccattcttggtctgcat

SEQ ID NO: 4982091 - DNA, 25 bp, Homo sapien
tcaggagtctggatgcacaattggg

SEQ ID NO: 4982092 - DNA, 25 bp, Homo sapien
tgggcagacacctggaaatatctgg

SEQ ID NO: 4982093 - DNA, 25 bp, Homo sapien
cagtgctgtcaggagtctggatgca

SEQ ID NO: 4982094 - DNA, 25 bp, Homo sapien
tgtctttggacatcgccctcagtgc

SEQ ID NO: 4982095 - DNA, 25 bp, Homo sapien
gtaatcatttaggagagccagctcc

SEQ ID NO: 4982096 - DNA, 25 bp, Homo sapien
cagctccctggatgctttctgggct

SEQ ID NO: 4982097 - DNA, 25 bp, Homo sapien
tgggcttggctcacgcagaagatat

SEQ ID NO: 4982098 - DNA, 25 bp, Homo sapien
gtaggcctgcatggagtaatcattt

SEQ ID NO: 4982099 - DNA, 25 bp, Homo sapien
gaacaagacagtttttatccaggtg

SEQ ID NO: 4982100 - DNA, 25 bp, Homo sapien
tgccaccagtgctggtgacgttgcc

SEQ ID NO: 4982101 - DNA, 25 bp, Homo sapien
tgacgttgcctgcagttgcccaaca

SEQ ID NO: 4982102 - DNA, 25 bp, Homo sapien
aggagaaactccagtgtggctgctc

SEQ ID NO: 4982103 - DNA, 25 bp, Homo sapien
ccctgtgagaactgtcattgttaat

SEQ ID NO: 4982104 - DNA, 25 bp, Homo sapien
ggtcttccacaagggactctccctg

SEQ ID NO: 4982105 - DNA, 25 bp, Homo sapien
gaaggagtgattcaatttgtctgac

SEQ ID NO: 4982106 - DNA, 25 bp, Homo sapien
tgagaactgtcattgttaatgaagg

SEQ ID NO: 4982107 - DNA, 25 bp, Homo sapien
tggaagagttgagatggactttgtt

SEQ ID NO: 4982108 - DNA, 25 bp, Homo sapien
aagagttgagatggactttgtttct

SEQ ID NO: 4982109 - DNA, 25 bp, Homo sapien
ctgttgggccgatctgaggtttttg

SEQ ID NO: 4982110 - DNA, 25 bp, Homo sapien
gaagagttgagatggactttgtttc

SEQ ID NO: 4982111 - DNA, 25 bp, Homo sapien
tcagaccctccagatatgcggacaa

SEQ ID NO: 4982112 - DNA, 25 bp, Homo sapien
acaaggtgccctcctgataactcac

SEQ ID NO: 4982113 - DNA, 25 bp, Homo sapien
tcatgggaacaaggtgccctcctga

SEQ ID NO: 4982114 - DNA, 25 bp, Homo sapien
tccagatatgcggacaaaccagcca

SEQ ID NO: 4982115 - DNA, 25 bp, Homo sapien
agcatcagtccccagtgtgcctgct

SEQ ID NO: 4982116 - DNA, 25 bp, Homo sapien
gactcctctaacatcctggtctctc

SEQ ID NO: 4982117 - DNA, 25 bp, Homo sapien
cctgctcctcgtcctgaatctctca

SEQ ID NO: 4982118 - DNA, 25 bp, Homo sapien
gcctctcccctgagcatcagtcccc

SEQ ID NO: 4982119 - DNA, 25 bp, Homo sapien
gttggagaggcttgtgagtgagccc

SEQ ID NO: 4982120 - DNA, 25 bp, Homo sapien
ttggagaggcttgtgagtgagccct

SEQ ID NO: 4982121 - DNA, 25 bp, Homo sapien
tggagaggcttgtgagtgagccctg

SEQ ID NO: 4982122 - DNA, 25 bp, Homo sapien
cccctgatgggcagggtccctgtct

SEQ ID NO: 4982123 - DNA, 25 bp, Homo sapien
ttcatgtccccctgaggacgtgtgc

SEQ ID NO: 4982124 - DNA, 25 bp, Homo sapien
ctgttcatgtccccctgaggacgtg

SEQ ID NO: 4982125 - DNA, 25 bp, Homo sapien
gttcatgtccccctgaggacgtgtg

SEQ ID NO: 4982126 - DNA, 25 bp, Homo sapien
tcatgtccccctgaggacgtgtgct

SEQ ID NO: 4982127 - DNA, 25 bp, Homo sapien
ccggacagcccatcactagtgacaa

SEQ ID NO: 4982128 - DNA, 25 bp, Homo sapien
tcagtccctgtgtttgctctctcag

SEQ ID NO: 4982129 - DNA, 25 bp, Homo sapien
cattaaccgcagagccacgtgtgat

SEQ ID NO: 4982130 - DNA, 25 bp, Homo sapien
catgagcagctttccatgtgggcca

SEQ ID NO: 4982131 - DNA, 25 bp, Homo sapien
tggaggaggacccaccgcagtggtt

SEQ ID NO: 4982132 - DNA, 25 bp, Homo sapien
ctgtgggggtagcaggtggaagtgg

SEQ ID NO: 4982133 - DNA, 25 bp, Homo sapien
gaagtggaggaggacccaccgcagt

SEQ ID NO: 4982134 - DNA, 25 bp, Homo sapien
caggtggaagtggaggaggacccac

SEQ ID NO: 4982135 - DNA, 25 bp, Homo sapien
tgcagctcagcgacttattgggcat

SEQ ID NO: 4982136 - DNA, 25 bp, Homo sapien
ctgctgaccccagtccaccgggttt

SEQ ID NO: 4982137 - DNA, 25 bp, Homo sapien
gaacagctgcagctcagcgacttat

SEQ ID NO: 4982138 - DNA, 25 bp, Homo sapien
cgcatggcctttgccagaacagctg

SEQ ID NO: 4982139 - DNA, 25 bp, Homo sapien
ggtgatttgatacacgctgccacgt

SEQ ID NO: 4982140 - DNA, 25 bp, Homo sapien
agattcacagcagcgggacctaagg

SEQ ID NO: 4982141 - DNA, 25 bp, Homo sapien
tgcagtgaaagaagcgtgggaaccc

SEQ ID NO: 4982142 - DNA, 25 bp, Homo sapien
ccagggcctggcgagtggcttttaa

SEQ ID NO: 4982143 - DNA, 25 bp, Homo sapien
gaggaagcccggctggacccacgtg

SEQ ID NO: 4982144 - DNA, 25 bp, Homo sapien
gaaccttctggagtttgcgctggcc

SEQ ID NO: 4982145 - DNA, 25 bp, Homo sapien
gcttactgtgaaatcagccagtatg

SEQ ID NO: 4982146 - DNA, 25 bp, Homo sapien
gacccacgtggcttactgtgaaatc

SEQ ID NO: 4982147 - DNA, 25 bp, Homo sapien
actgtgacctaggcatagagcaaga

SEQ ID NO: 4982148 - DNA, 25 bp, Homo sapien
ttggttgagcaacttccaaaggctc

SEQ ID NO: 4982149 - DNA, 25 bp, Homo sapien
tgggaaacagccatccagtgggaag

SEQ ID NO: 4982150 - DNA, 25 bp, Homo sapien
cttggttgagcaacttccaaaggct

SEQ ID NO: 4982151 - DNA, 25 bp, Homo sapien
ggcgctgcactggggaaagtttctc

SEQ ID NO: 4982152 - DNA, 25 bp, Homo sapien
tggctacatagactcgggagggcct

SEQ ID NO: 4982153 - DNA, 25 bp, Homo sapien
atggataagtagttgcccacaggtc

SEQ ID NO: 4982154 - DNA, 25 bp, Homo sapien
ggagagagccaggatcatggctaca

SEQ ID NO: 4982155 - DNA, 25 bp, Homo sapien
accggagacagtaagtgctaggcct

SEQ ID NO: 4982156 - DNA, 25 bp, Homo sapien
ggtgctcctgcagtggaaatccaca

SEQ ID NO: 4982157 - DNA, 25 bp, Homo sapien
atccacacgtgttgtggttacagca

SEQ ID NO: 4982158 - DNA, 25 bp, Homo sapien
gtcttttaacatggcactgggtgct

SEQ ID NO: 4982159 - DNA, 25 bp, Homo sapien
aaccaccattgtgctttgccccgca

SEQ ID NO: 4982160 - DNA, 25 bp, Homo sapien
tgagaagcacatagcatgtcctgcc

SEQ ID NO: 4982161 - DNA, 25 bp, Homo sapien
gagaattgttgagcaccagggcaag

SEQ ID NO: 4982162 - DNA, 25 bp, Homo sapien
cagggcaagaagcataaggactcac

SEQ ID NO: 4982163 - DNA, 25 bp, Homo sapien
tgagcagccccatcaggcatgagaa

SEQ ID NO: 4982164 - DNA, 25 bp, Homo sapien
taataagaggttctgaggtgccaca

SEQ ID NO: 4982165 - DNA, 25 bp, Homo sapien
gccactgtgtaaggtgagtatttaa

SEQ ID NO: 4982166 - DNA, 25 bp, Homo sapien
aagcattccgttcttatagccactg

SEQ ID NO: 4982167 - DNA, 25 bp, Homo sapien
gggactggtgtagtgacaacatcta

SEQ ID NO: 4982168 - DNA, 25 bp, Homo sapien
ctgagagcaggactgaccacagaac

SEQ ID NO: 4982169 - DNA, 25 bp, Homo sapien
tgagagcaggactgaccacagaacc

SEQ ID NO: 4982170 - DNA, 25 bp, Homo sapien
agccttgctgtctgaccaaggccaa

SEQ ID NO: 4982171 - DNA, 25 bp, Homo sapien
gatgagggtgttcacagccccctgc

SEQ ID NO: 4982172 - DNA, 25 bp, Homo sapien
ccttgctgtctgaccaaggccaagc

SEQ ID NO: 4982173 - DNA, 25 bp, Homo sapien
ttgctgtctgaccaaggccaagccc

SEQ ID NO: 4982174 - DNA, 25 bp, Homo sapien
gcagactgtgcagtcagccggccat

SEQ ID NO: 4982175 - DNA, 25 bp, Homo sapien
agtcagccggccatgctccccaggc

SEQ ID NO: 4982176 - DNA, 25 bp, Homo sapien
ggttccaagcagactgtgcagtcag

SEQ ID NO: 4982177 - DNA, 25 bp, Homo sapien
actgtgcagtcagccggccatgctc

SEQ ID NO: 4982178 - DNA, 25 bp, Homo sapien
tgggcttgtcatgcccactcgatga

SEQ ID NO: 4982179 - DNA, 25 bp, Homo sapien
actcttgggcttgtcatgcccactc

SEQ ID NO: 4982180 - DNA, 25 bp, Homo sapien
ccaacaccagctttcttaaggctcc

SEQ ID NO: 4982181 - DNA, 25 bp, Homo sapien
atgcccactcgatgatcctccttgg

SEQ ID NO: 4982182 - DNA, 25 bp, Homo sapien
tttaacatccaaagagtcactgttt

SEQ ID NO: 4982183 - DNA, 25 bp, Homo sapien
ctagatttttttaacatccaaagag

SEQ ID NO: 4982184 - DNA, 25 bp, Homo sapien
gatttttttaacatccaaagagtca

SEQ ID NO: 4982185 - DNA, 25 bp, Homo sapien
ttttttaacatccaaagagtcactg

SEQ ID NO: 4982186 - DNA, 25 bp, Homo sapien
tatgaggtagacaagcctggtgctg

SEQ ID NO: 4982187 - DNA, 25 bp, Homo sapien
tccaagctggctgtcattaacagct

SEQ ID NO: 4982188 - DNA, 25 bp, Homo sapien
agaagtccaagctggctgtcattaa

SEQ ID NO: 4982189 - DNA, 25 bp, Homo sapien
ccaggtgaccatcacagctgtatga

SEQ ID NO: 4982190 - DNA, 25 bp, Homo sapien
tgagcaactcttgagggcctgttcc

SEQ ID NO: 4982191 - DNA, 25 bp, Homo sapien
ctcctgtgacggaaaggctgctggt

SEQ ID NO: 4982192 - DNA, 25 bp, Homo sapien
taactcttaggagagttgtggccca

SEQ ID NO: 4982193 - DNA, 25 bp, Homo sapien
tttaacaaaccaatctatgggcctg

SEQ ID NO: 4982194 - DNA, 25 bp, Homo sapien
gcggggtcctggtgcactcaagcct

SEQ ID NO: 4982195 - DNA, 25 bp, Homo sapien
agagccgctgcctttctgggcgcag

SEQ ID NO: 4982196 - DNA, 25 bp, Homo sapien
ttgtccttaaggtggagtgccgccc

SEQ ID NO: 4982197 - DNA, 25 bp, Homo sapien
ctccagggtgatcgccggcgcaggg

SEQ ID NO: 4982198 - DNA, 25 bp, Homo sapien
tctgaaaagcggggagattttcctg

SEQ ID NO: 4982199 - DNA, 25 bp, Homo sapien
ggcctcaggcgtgcccgacgcttcc

SEQ ID NO: 4982200 - DNA, 25 bp, Homo sapien
catggcggcctcaggcgtgcccgac

SEQ ID NO: 4982201 - DNA, 25 bp, Homo sapien
cgacgcttcccttctgaaaagcggg

SEQ ID NO: 4982202 - DNA, 25 bp, Homo sapien
gagacatcctgccaatgttcttcat

SEQ ID NO: 4982203 - DNA, 25 bp, Homo sapien
ttctgctgagacatcctgccaatgt

SEQ ID NO: 4982204 - DNA, 25 bp, Homo sapien
tttggcaaacttctgctgagacatc

SEQ ID NO: 4982205 - DNA, 25 bp, Homo sapien
caaacttctgctgagacatcctgcc

SEQ ID NO: 4982206 - DNA, 25 bp, Homo sapien
ccagtccaggataggccatcactgt

SEQ ID NO: 4982207 - DNA, 25 bp, Homo sapien
tacagatgtgggttcagccctcacc

SEQ ID NO: 4982208 - DNA, 25 bp, Homo sapien
ggaaaccctggcatgagagcctttt

SEQ ID NO: 4982209 - DNA, 25 bp, Homo sapien
ttggccaagatgctcaagaaaacat

SEQ ID NO: 4982210 - DNA, 25 bp, Homo sapien
tagctcagatgtttcagaatgctgc

SEQ ID NO: 4982211 - DNA, 25 bp, Homo sapien
ttcctgtggcctgtgttgacttaag

SEQ ID NO: 4982212 - DNA, 25 bp, Homo sapien
ggtacgaggcttctaattgagccag

SEQ ID NO: 4982213 - DNA, 25 bp, Homo sapien
aactggtgtgagtgttttccttctc

SEQ ID NO: 4982214 - DNA, 25 bp, Homo sapien
cttggcttactgactttggtatcaa

SEQ ID NO: 4982215 - DNA, 25 bp, Homo sapien
ttttcttggcttactgactttggta

SEQ ID NO: 4982216 - DNA, 25 bp, Homo sapien
ttcttggcttactgactttggtatc

SEQ ID NO: 4982217 - DNA, 25 bp, Homo sapien
ggcttactgactttggtatcaaact

SEQ ID NO: 4982218 - DNA, 25 bp, Homo sapien
ttatcaacaacatcagtaggctcat

SEQ ID NO: 4982219 - DNA, 25 bp, Homo sapien
catttatcaacaacatcagtaggct

SEQ ID NO: 4982220 - DNA, 25 bp, Homo sapien
ctattcaagtcatttatcaacaaca

SEQ ID NO: 4982221 - DNA, 25 bp, Homo sapien
tcatttatcaacaacatcagtaggc

SEQ ID NO: 4982222 - DNA, 25 bp, Homo sapien
gaaagatctataacaagcctgagtt

SEQ ID NO: 4982223 - DNA, 25 bp, Homo sapien
gatctataacaagcctgagttcata

SEQ ID NO: 4982224 - DNA, 25 bp, Homo sapien
tggaaagatctataacaagcctgag

SEQ ID NO: 4982225 - DNA, 25 bp, Homo sapien
ctataacaagcctgagttcatagta

SEQ ID NO: 4982226 - DNA, 25 bp, Homo sapien
tacattccagatcacaatatttgtt

SEQ ID NO: 4982227 - DNA, 25 bp, Homo sapien
ctacattccagatcacaatatttgt

SEQ ID NO: 4982228 - DNA, 25 bp, Homo sapien
acattccagatcacaatatttgttt

SEQ ID NO: 4982229 - DNA, 25 bp, Homo sapien
ttggtatcaaaagtaaggtcctcca

SEQ ID NO: 4982230 - DNA, 25 bp, Homo sapien
caacaaggctcagtagaataattgg

SEQ ID NO: 4982231 - DNA, 25 bp, Homo sapien
tatcaaaagtaaggtcctccagata

SEQ ID NO: 4982232 - DNA, 25 bp, Homo sapien
aaggctcagtagaataattggtatc

SEQ ID NO: 4982233 - DNA, 25 bp, Homo sapien
ccatccaaatattttcggggatcaa

SEQ ID NO: 4982234 - DNA, 25 bp, Homo sapien
catcagtgacatcagacagagctct

SEQ ID NO: 4982235 - DNA, 25 bp, Homo sapien
gggatcaacttgtacttctttttca

SEQ ID NO: 4982236 - DNA, 25 bp, Homo sapien
catcagacagagctcttggatcagg

SEQ ID NO: 4982237 - DNA, 25 bp, Homo sapien
tatgtacaggccaatcacaatctga

SEQ ID NO: 4982238 - DNA, 25 bp, Homo sapien
gttgttatgtacaggccaatcacaa

SEQ ID NO: 4982239 - DNA, 25 bp, Homo sapien
gtacaggccaatcacaatctgaaag

SEQ ID NO: 4982240 - DNA, 25 bp, Homo sapien
ttatgtacaggccaatcacaatctg

SEQ ID NO: 4982241 - DNA, 25 bp, Homo sapien
tgtaagaatgggagagagcttctgc

SEQ ID NO: 4982242 - DNA, 25 bp, Homo sapien
taagaatgggagagagcttctgctg

SEQ ID NO: 4982243 - DNA, 25 bp, Homo sapien
atgtaagaatgggagagagcttctg

SEQ ID NO: 4982244 - DNA, 25 bp, Homo sapien
gtaagaatgggagagagcttctgct

SEQ ID NO: 4982245 - DNA, 25 bp, Homo sapien
tgtaaactggaattacactgagaag

SEQ ID NO: 4982246 - DNA, 25 bp, Homo sapien
aacacctgagttaaaggtttgtgtg

SEQ ID NO: 4982247 - DNA, 25 bp, Homo sapien
aggtttgtgtggctcagtcatgtca

SEQ ID NO: 4982248 - DNA, 25 bp, Homo sapien
tttgtgtggctcagtcatgtcattt

SEQ ID NO: 4982249 - DNA, 25 bp, Homo sapien
ttcaaaacaggaatcgattataaaa

SEQ ID NO: 4982250 - DNA, 25 bp, Homo sapien
cttcaaaacaggaatcgattataaa

SEQ ID NO: 4982251 - DNA, 25 bp, Homo sapien
tgcatctgttcaagttcatgtgcac

SEQ ID NO: 4982252 - DNA, 25 bp, Homo sapien
gttgcatctgttcaagttcatgtgc

SEQ ID NO: 4982253 - DNA, 25 bp, Homo sapien
cagttgcatctgttcaagttcatgt

SEQ ID NO: 4982254 - DNA, 25 bp, Homo sapien
tcagttgcatctgttcaagttcatg

SEQ ID NO: 4982255 - DNA, 25 bp, Homo sapien
aataatgagtattcgtaatccgtgc

SEQ ID NO: 4982256 - DNA, 25 bp, Homo sapien
tgggaataatgagtattcgtaatcc

SEQ ID NO: 4982257 - DNA, 25 bp, Homo sapien
agtattcgtaatccgtgcaagacca

SEQ ID NO: 4982258 - DNA, 25 bp, Homo sapien
aatgagtattcgtaatccgtgcaag

SEQ ID NO: 4982259 - DNA, 25 bp, Homo sapien
acagtgttgtcatggtcaagtcttc

SEQ ID NO: 4982260 - DNA, 25 bp, Homo sapien
tcaagtcttctaataattttgattt

SEQ ID NO: 4982261 - DNA, 25 bp, Homo sapien
tcacagtgttgtcatggtcaagtct

SEQ ID NO: 4982262 - DNA, 25 bp, Homo sapien
ctttcacagtgttgtcatggtcaag

SEQ ID NO: 4982263 - DNA, 25 bp, Homo sapien
ggattggtgagaaccattttcttga

SEQ ID NO: 4982264 - DNA, 25 bp, Homo sapien
tgacattctggggattggtgagaac

SEQ ID NO: 4982265 - DNA, 25 bp, Homo sapien
taagaccatatacctggaacccaga

SEQ ID NO: 4982266 - DNA, 25 bp, Homo sapien
cattgcctccacaatccaatggttt

SEQ ID NO: 4982267 - DNA, 25 bp, Homo sapien
caggaggaagacacttaggttctcc

SEQ ID NO: 4982268 - DNA, 25 bp, Homo sapien
agcaggaggaagacacttaggttct

SEQ ID NO: 4982269 - DNA, 25 bp, Homo sapien
ttattaaattcttgaagcaggagga

SEQ ID NO: 4982270 - DNA, 25 bp, Homo sapien
gaagcaggaggaagacacttaggtt

SEQ ID NO: 4982271 - DNA, 25 bp, Homo sapien
ttgtgcagcatcaagacacccagcc

SEQ ID NO: 4982272 - DNA, 25 bp, Homo sapien
ctggcttgtgcagcatcaagacacc

SEQ ID NO: 4982273 - DNA, 25 bp, Homo sapien
catcaagacacccagcccagagaat

SEQ ID NO: 4982274 - DNA, 25 bp, Homo sapien
agcatcaagacacccagcccagaga

SEQ ID NO: 4982275 - DNA, 25 bp, Homo sapien
gaaccctactgggtgatctgatgag

SEQ ID NO: 4982276 - DNA, 25 bp, Homo sapien
caagaaccctactgggtgatctgat

SEQ ID NO: 4982277 - DNA, 25 bp, Homo sapien
ccctactgggtgatctgatgagcac

SEQ ID NO: 4982278 - DNA, 25 bp, Homo sapien
gtaacaagaaccctactgggtgatc

SEQ ID NO: 4982279 - DNA, 25 bp, Homo sapien
cactcttgtgctcatctgagcctaa

SEQ ID NO: 4982280 - DNA, 25 bp, Homo sapien
tcttgtgctcatctgagcctaaaac

SEQ ID NO: 4982281 - DNA, 25 bp, Homo sapien
tgtgctcatctgagcctaaaactgc

SEQ ID NO: 4982282 - DNA, 25 bp, Homo sapien
cttcactcttgtgctcatctgagcc

SEQ ID NO: 4982283 - DNA, 25 bp, Homo sapien
tttcccattcccgagaaagagtcag

SEQ ID NO: 4982284 - DNA, 25 bp, Homo sapien
gagagcaattctcgggaatttccca

SEQ ID NO: 4982285 - DNA, 25 bp, Homo sapien
cagaacttttccagctggagagcaa

SEQ ID NO: 4982286 - DNA, 25 bp, Homo sapien
ttcccgagaaagagtcaggctgtag

SEQ ID NO: 4982287 - DNA, 25 bp, Homo sapien
caagtaggatcatgatgttggcagg

SEQ ID NO: 4982288 - DNA, 25 bp, Homo sapien
tagattgtggttaatagagttttcc

SEQ ID NO: 4982289 - DNA, 25 bp, Homo sapien
tgttggcaggatctgagttctttct

SEQ ID NO: 4982290 - DNA, 25 bp, Homo sapien
tgctctcaggcccagacattttact

SEQ ID NO: 4982291 - DNA, 25 bp, Homo sapien
caacagctataacattggctgcata

SEQ ID NO: 4982292 - DNA, 25 bp, Homo sapien
taagaccaacagctataacattggc

SEQ ID NO: 4982293 - DNA, 25 bp, Homo sapien
tagcttaagaccaacagctataaca

SEQ ID NO: 4982294 - DNA, 25 bp, Homo sapien
ctttagcttaagaccaacagctata

SEQ ID NO: 4982295 - DNA, 25 bp, Homo sapien
tgaggaacattcaagccacacaccc

SEQ ID NO: 4982296 - DNA, 25 bp, Homo sapien
tgagtggggcccaaggcactctctt

SEQ ID NO: 4982297 - DNA, 25 bp, Homo sapien
ttgctctctaaacaggttccaccac

SEQ ID NO: 4982298 - DNA, 25 bp, Homo sapien
taggactgaggaacattcaagccac

SEQ ID NO: 4982299 - DNA, 25 bp, Homo sapien
ggagatcaatgaggtaagagatgtc

SEQ ID NO: 4982300 - DNA, 25 bp, Homo sapien
ctcttacactcccagaggaaatgaa

SEQ ID NO: 4982301 - DNA, 25 bp, Homo sapien
atgaagaattatcatcaatggcaaa

SEQ ID NO: 4982302 - DNA, 25 bp, Homo sapien
cccagaggaaatgaagaattatcat

SEQ ID NO: 4982303 - DNA, 25 bp, Homo sapien
tacactcccagaggaaatgaagaat

SEQ ID NO: 4982304 - DNA, 25 bp, Homo sapien
atgttatagcctttagaagattatc

SEQ ID NO: 4982305 - DNA, 25 bp, Homo sapien
tttacattcttcagttcagaactga

SEQ ID NO: 4982306 - DNA, 25 bp, Homo sapien
tattttcatgcaagagacctttttc

SEQ ID NO: 4982307 - DNA, 25 bp, Homo sapien
cttcctcattcaatgttatagcctt

SEQ ID NO: 4982308 - DNA, 25 bp, Homo sapien
tcttcactaccttttttatacaaca

SEQ ID NO: 4982309 - DNA, 25 bp, Homo sapien
tttttatacaacatatcagcatcct

SEQ ID NO: 4982310 - DNA, 25 bp, Homo sapien
catggctcgtgttttcagagtccgt

SEQ ID NO: 4982311 - DNA, 25 bp, Homo sapien
cagagtccgtttcagttgttggtta

SEQ ID NO: 4982312 - DNA, 25 bp, Homo sapien
cagttaaatatagttacattaaaat

SEQ ID NO: 4982313 - DNA, 25 bp, Homo sapien
ctatacagttaaatatagttacatt

SEQ ID NO: 4982314 - DNA, 25 bp, Homo sapien
tatacagttaaatatagttacatta

SEQ ID NO: 4982315 - DNA, 25 bp, Homo sapien
tacagttaaatatagttacattaaa

SEQ ID NO: 4982316 - DNA, 25 bp, Homo sapien
tctgaaagaactgcatcctggattt

SEQ ID NO: 4982317 - DNA, 25 bp, Homo sapien
tttgtttcagacagcttcttttgta

SEQ ID NO: 4982318 - DNA, 25 bp, Homo sapien
taagttctagtaagtgttcatctga

SEQ ID NO: 4982319 - DNA, 25 bp, Homo sapien
caatttctattgtaagttgttcaca

SEQ ID NO: 4982320 - DNA, 25 bp, Homo sapien
ctgatattcccacgttattacttct

SEQ ID NO: 4982321 - DNA, 25 bp, Homo sapien
gatattcccacgttattacttctgt

SEQ ID NO: 4982322 - DNA, 25 bp, Homo sapien
atattcccacgttattacttctgtg

SEQ ID NO: 4982323 - DNA, 25 bp, Homo sapien
tgatattcccacgttattacttctg

SEQ ID NO: 4982324 - DNA, 25 bp, Homo sapien
gctttaagtcttgctctgaagagaa

SEQ ID NO: 4982325 - DNA, 25 bp, Homo sapien
agtcttgctctgaagagaaatccat

SEQ ID NO: 4982326 - DNA, 25 bp, Homo sapien
cagctttaagtcttgctctgaagag

SEQ ID NO: 4982327 - DNA, 25 bp, Homo sapien
ttaagtcttgctctgaagagaaatc

SEQ ID NO: 4982328 - DNA, 25 bp, Homo sapien
ctctttccttgaggctgcctttgta

SEQ ID NO: 4982329 - DNA, 25 bp, Homo sapien
ggctgcctttgtactttactgattt

SEQ ID NO: 4982330 - DNA, 25 bp, Homo sapien
tttctactgcatctttaccacctga

SEQ ID NO: 4982331 - DNA, 25 bp, Homo sapien
tctactgcatctttaccacctgaac

SEQ ID NO: 4982332 - DNA, 25 bp, Homo sapien
aaaaatttgtgcagcgtccctatgc

SEQ ID NO: 4982333 - DNA, 25 bp, Homo sapien
cttcaaaaatttgtgcagcgtccct

SEQ ID NO: 4982334 - DNA, 25 bp, Homo sapien
atttgtgcagcgtccctatgcaggg

SEQ ID NO: 4982335 - DNA, 25 bp, Homo sapien
gcagcgtccctatgcaggggccatg

SEQ ID NO: 4982336 - DNA, 25 bp, Homo sapien
aagaaagccccgaagacactcgtgg

SEQ ID NO: 4982337 - DNA, 25 bp, Homo sapien
cagcccgtgggaaaaggcgtctaca

SEQ ID NO: 4982338 - DNA, 25 bp, Homo sapien
acactcgtggcggtgctgtgcccag

SEQ ID NO: 4982339 - DNA, 25 bp, Homo sapien
gccattgataaggagaggcagcccg

SEQ ID NO: 4982340 - DNA, 25 bp, Homo sapien
tcgtggaacataagccgcccacggt

SEQ ID NO: 4982341 - DNA, 25 bp, Homo sapien
gcctggcggaactcgctgcaaatgg

SEQ ID NO: 4982342 - DNA, 25 bp, Homo sapien
tggcctcaaaatcgtggaacataag

SEQ ID NO: 4982343 - DNA, 25 bp, Homo sapien
gctgcaaatggcctcaaaatcgtgg

SEQ ID NO: 4982344 - DNA, 25 bp, Homo sapien
cagcacttattaggcacctgactat

SEQ ID NO: 4982345 - DNA, 25 bp, Homo sapien
ggaatatgaccagggtgatggacca

SEQ ID NO: 4982346 - DNA, 25 bp, Homo sapien
ggtcttgcaagtctcagcacttatt

SEQ ID NO: 4982347 - DNA, 25 bp, Homo sapien
tagacagctgaacaaagccctgagc

SEQ ID NO: 4982348 - DNA, 25 bp, Homo sapien
tcagcaccacttgccttgggagcca

SEQ ID NO: 4982349 - DNA, 25 bp, Homo sapien
cttctgggccacgaacacccaggtc

SEQ ID NO: 4982350 - DNA, 25 bp, Homo sapien
ccacagtgtggccacctgagtcagc

SEQ ID NO: 4982351 - DNA, 25 bp, Homo sapien
tgggccacgaacacccaggtccaca

SEQ ID NO: 4982352 - DNA, 25 bp, Homo sapien
cctaattacatcaggatagaggtag

SEQ ID NO: 4982353 - DNA, 25 bp, Homo sapien
ttacatcaggatagaggtagagttt

SEQ ID NO: 4982354 - DNA, 25 bp, Homo sapien
aacctaattacatcaggatagaggt

SEQ ID NO: 4982355 - DNA, 25 bp, Homo sapien
taattacatcaggatagaggtagag

SEQ ID NO: 4982356 - DNA, 25 bp, Homo sapien
tcagcacagtggataggagctgtct

SEQ ID NO: 4982357 - DNA, 25 bp, Homo sapien
agtgtcccgtccagcaagtcctgag

SEQ ID NO: 4982358 - DNA, 25 bp, Homo sapien
ggcgaaactgcaaggaagctccctc

SEQ ID NO: 4982359 - DNA, 25 bp, Homo sapien
gagctgtctcttcccaagggcgcag

SEQ ID NO: 4982360 - DNA, 25 bp, Homo sapien
cactgggaagggtccatggatctcg

SEQ ID NO: 4982361 - DNA, 25 bp, Homo sapien
aagggtccatggatctcggcccagc

SEQ ID NO: 4982362 - DNA, 25 bp, Homo sapien
atgggatgtcgaggcagcagagcga

SEQ ID NO: 4982363 - DNA, 25 bp, Homo sapien
cagagcgacactgggaagggtccat

SEQ ID NO: 4982364 - DNA, 25 bp, Homo sapien
agcagcaatggaccatatggttgac

SEQ ID NO: 4982365 - DNA, 25 bp, Homo sapien
caatggaccatatggttgactttgg

SEQ ID NO: 4982366 - DNA, 25 bp, Homo sapien
atggttgactttggaagccacgggc

SEQ ID NO: 4982367 - DNA, 25 bp, Homo sapien
catatggttgactttggaagccacg

SEQ ID NO: 4982368 - DNA, 25 bp, Homo sapien
ggtgcgtgcttgcaaccaatacctc

SEQ ID NO: 4982369 - DNA, 25 bp, Homo sapien
tttaactgatctttggctggttcca

SEQ ID NO: 4982370 - DNA, 25 bp, Homo sapien
tggttccattaggtgcgtgcttgca

SEQ ID NO: 4982371 - DNA, 25 bp, Homo sapien
tctttggctggttccattaggtgcg

SEQ ID NO: 4982372 - DNA, 25 bp, Homo sapien
atccccatgtgtttggtggcatttc

SEQ ID NO: 4982373 - DNA, 25 bp, Homo sapien
gcggccctttatccatgttgttcac

SEQ ID NO: 4982374 - DNA, 25 bp, Homo sapien
ccccatgtgtttggtggcatttccc

SEQ ID NO: 4982375 - DNA, 25 bp, Homo sapien
tcaaggcctttaccacgagcggccc

SEQ ID NO: 4982376 - DNA, 25 bp, Homo sapien
cctccagtgcgcagtcaggctgaaa

SEQ ID NO: 4982377 - DNA, 25 bp, Homo sapien
aatgatgccctccagtgcgcagtca

SEQ ID NO: 4982378 - DNA, 25 bp, Homo sapien
tggcccagctgagaacgaatgatgc

SEQ ID NO: 4982379 - DNA, 25 bp, Homo sapien
gctgagaacgaatgatgccctccag

SEQ ID NO: 4982380 - DNA, 25 bp, Homo sapien
atctccctttctcctgtgacaggtc

SEQ ID NO: 4982381 - DNA, 25 bp, Homo sapien
tcctgtgacaggtccattgctggca

SEQ ID NO: 4982382 - DNA, 25 bp, Homo sapien
gtaattaaccctgccatactcatgg

SEQ ID NO: 4982383 - DNA, 25 bp, Homo sapien
gactttgtcgtcttggttctcccat

SEQ ID NO: 4982384 - DNA, 25 bp, Homo sapien
tgtttctgctccattgaggtgtctc

SEQ ID NO: 4982385 - DNA, 25 bp, Homo sapien
ttgcccctcgtagggcaccaagcct

SEQ ID NO: 4982386 - DNA, 25 bp, Homo sapien
ccattgaggtgtctcattgcttcca

SEQ ID NO: 4982387 - DNA, 25 bp, Homo sapien
attgcttccattgcccctcgtaggg

SEQ ID NO: 4982388 - DNA, 25 bp, Homo sapien
tttttgagtatcagggccccagtcc

SEQ ID NO: 4982389 - DNA, 25 bp, Homo sapien
gttcatgaacctctggtttcccagg

SEQ ID NO: 4982390 - DNA, 25 bp, Homo sapien
gagtttggagtaatcctagccctga

SEQ ID NO: 4982391 - DNA, 25 bp, Homo sapien
taatcctagccctgacaagaagtag

SEQ ID NO: 4982392 - DNA, 25 bp, Homo sapien
tacctagggagtgcccatgaagccc

SEQ ID NO: 4982393 - DNA, 25 bp, Homo sapien
caatgccagtgacttccaatggcct

SEQ ID NO: 4982394 - DNA, 25 bp, Homo sapien
tgtcctggtcccttggtctgcatgg

SEQ ID NO: 4982395 - DNA, 25 bp, Homo sapien
gcttattcacagcaatagtacctag

SEQ ID NO: 4982396 - DNA, 25 bp, Homo sapien
cagactgacgccctctgagcagaag

SEQ ID NO: 4982397 - DNA, 25 bp, Homo sapien
gggtgctgtatccagggcccagact

SEQ ID NO: 4982398 - DNA, 25 bp, Homo sapien
cctgctaggcaacatgacatactcc

SEQ ID NO: 4982399 - DNA, 25 bp, Homo sapien
gtttgagtcccaacacctgctaggc

SEQ ID NO: 4982400 - DNA, 25 bp, Homo sapien
aacaataatagtaagccttgtcctc

SEQ ID NO: 4982401 - DNA, 25 bp, Homo sapien
cagcccaaggatgtgcagaatccct

SEQ ID NO: 4982402 - DNA, 25 bp, Homo sapien
acaataatagtaagccttgtcctca

SEQ ID NO: 4982403 - DNA, 25 bp, Homo sapien
caataatagtaagccttgtcctcag

SEQ ID NO: 4982404 - DNA, 25 bp, Homo sapien
ccatgtacagcacacagtaatgatc

SEQ ID NO: 4982405 - DNA, 25 bp, Homo sapien
cagcacacagtaatgatcagagtca

SEQ ID NO: 4982406 - DNA, 25 bp, Homo sapien
acccatgtacagcacacagtaatga

SEQ ID NO: 4982407 - DNA, 25 bp, Homo sapien
cacacagtaatgatcagagtcatca

SEQ ID NO: 4982408 - DNA, 25 bp, Homo sapien
ttgttcccaaggatggagccagaga

SEQ ID NO: 4982409 - DNA, 25 bp, Homo sapien
gagaccctgagagtgatggctcctg

SEQ ID NO: 4982410 - DNA, 25 bp, Homo sapien
ctgcagatgagcatgtgtggagcct

SEQ ID NO: 4982411 - DNA, 25 bp, Homo sapien
gcacaggtgagtgtgaccgtccctc

SEQ ID NO: 4982412 - DNA, 25 bp, Homo sapien
accacctggggtagtgactggtaga

SEQ ID NO: 4982413 - DNA, 25 bp, Homo sapien
tgtgtggtccctccagggatgcaga

SEQ ID NO: 4982414 - DNA, 25 bp, Homo sapien
ccagggatgcagagtccctttccct

SEQ ID NO: 4982415 - DNA, 25 bp, Homo sapien
ggataagggtaacctggatcctgct

SEQ ID NO: 4982416 - DNA, 25 bp, Homo sapien
gacagagttatggtcatggggataa

SEQ ID NO: 4982417 - DNA, 25 bp, Homo sapien
aggagcccaaggagaagcatcatgc

SEQ ID NO: 4982418 - DNA, 25 bp, Homo sapien
gcccaaggagaagcatcatgcaggc

SEQ ID NO: 4982419 - DNA, 25 bp, Homo sapien
ctgacccataagcaaggagcccaag

SEQ ID NO: 4982420 - DNA, 25 bp, Homo sapien
gacccataagcaaggagcccaagga

SEQ ID NO: 4982421 - DNA, 25 bp, Homo sapien
taaacgtgcacatgcatttcagcac

SEQ ID NO: 4982422 - DNA, 25 bp, Homo sapien
gcatttcagcactaaaagcagaaaa

SEQ ID NO: 4982423 - DNA, 25 bp, Homo sapien
gcccaaaccagagactacaaatgta

SEQ ID NO: 4982424 - DNA, 25 bp, Homo sapien
tgtaacaatggaataaacgtgcaca

SEQ ID NO: 4982425 - DNA, 25 bp, Homo sapien
tccaaatggtactgataggtcttaa

SEQ ID NO: 4982426 - DNA, 25 bp, Homo sapien
tccatcatcccttaatgatcaccag

SEQ ID NO: 4982427 - DNA, 25 bp, Homo sapien
ggtactgataggtcttaatttgtgg

SEQ ID NO: 4982428 - DNA, 25 bp, Homo sapien
tcccttaatgatcaccagaaaagat

SEQ ID NO: 4982429 - DNA, 25 bp, Homo sapien
gaggaatgggcccttaccagacact

SEQ ID NO: 4982430 - DNA, 25 bp, Homo sapien
tgagtgagaacacactagaagtgcc

SEQ ID NO: 4982431 - DNA, 25 bp, Homo sapien
tgagtaggtaatgagggtaaatccc

SEQ ID NO: 4982432 - DNA, 25 bp, Homo sapien
cagacactgtatctgccagagcctt

SEQ ID NO: 4982433 - DNA, 25 bp, Homo sapien
gatttgttacaatattcacagttgt

SEQ ID NO: 4982434 - DNA, 25 bp, Homo sapien
gttttcttgcactagagaggcagca

SEQ ID NO: 4982435 - DNA, 25 bp, Homo sapien
cctatacatctatttcgatgtagca

SEQ ID NO: 4982436 - DNA, 25 bp, Homo sapien
tagcatttcttcaagcagatataag

SEQ ID NO: 4982437 - DNA, 25 bp, Homo sapien
aatgcttattagaccccaaggctgc

SEQ ID NO: 4982438 - DNA, 25 bp, Homo sapien
caaaagatactagtggcctgggaaa

SEQ ID NO: 4982439 - DNA, 25 bp, Homo sapien
aattcctaggtttctgcgtgagctg

SEQ ID NO: 4982440 - DNA, 25 bp, Homo sapien
ctaggcacgtttgaccaccgaaagg

SEQ ID NO: 4982441 - DNA, 25 bp, Homo sapien
cagacctggtttctcggcggagtcc

SEQ ID NO: 4982442 - DNA, 25 bp, Homo sapien
tactatgaaccaagtatctgcggct

SEQ ID NO: 4982443 - DNA, 25 bp, Homo sapien
tcctcaactagattgggcatgccgt

SEQ ID NO: 4982444 - DNA, 25 bp, Homo sapien
tgcggctttaggtaccagattcaaa

SEQ ID NO: 4982445 - DNA, 25 bp, Homo sapien
ggaatgcaatcttccgccccttcag

SEQ ID NO: 4982446 - DNA, 25 bp, Homo sapien
gatgtgatgaccgacatggcgtctg

SEQ ID NO: 4982447 - DNA, 25 bp, Homo sapien
tccacgagttctcccggtgatgtga

SEQ ID NO: 4982448 - DNA, 25 bp, Homo sapien
ccctgtgcgccacggcgaacgtgat

SEQ ID NO: 4982449 - DNA, 25 bp, Homo sapien
tgggccttgctagatcaaagtgttg

SEQ ID NO: 4982450 - DNA, 25 bp, Homo sapien
cctggcctagaggttgtcttattcc

SEQ ID NO: 4982451 - DNA, 25 bp, Homo sapien
tttgttgtaaaactcagcagtccct

SEQ ID NO: 4982452 - DNA, 25 bp, Homo sapien
cacagacagccatattcttaccatg

SEQ ID NO: 4982453 - DNA, 25 bp, Homo sapien
taaaatttccacctatgactgtaga

SEQ ID NO: 4982454 - DNA, 25 bp, Homo sapien
tgtagtgagacatgttttaggaccc

SEQ ID NO: 4982455 - DNA, 25 bp, Homo sapien
agttgcccatgatattctacaaatg

SEQ ID NO: 4982456 - DNA, 25 bp, Homo sapien
tatctcggtatgcatatcatgtgta

SEQ ID NO: 4982457 - DNA, 25 bp, Homo sapien
gatgatggtgttttctagatatgca

SEQ ID NO: 4982458 - DNA, 25 bp, Homo sapien
tgatggtgttttctagatatgcaat

SEQ ID NO: 4982459 - DNA, 25 bp, Homo sapien
cttcacgtcccttgtaagtttggat

SEQ ID NO: 4982460 - DNA, 25 bp, Homo sapien
gagatgatggtgttttctagatatg

SEQ ID NO: 4982461 - DNA, 25 bp, Homo sapien
taggtaacttatacgcaatcagagg

SEQ ID NO: 4982462 - DNA, 25 bp, Homo sapien
ggcaggcagttgtgcatgcattcca

SEQ ID NO: 4982463 - DNA, 25 bp, Homo sapien
ggagtaggaagcaccacgcatgtgt

SEQ ID NO: 4982464 - DNA, 25 bp, Homo sapien
tattagcactagcacagtagcagct

SEQ ID NO: 4982465 - DNA, 25 bp, Homo sapien
taaaactacatgaactactttcaga

SEQ ID NO: 4982466 - DNA, 25 bp, Homo sapien
tcttctatgagttactgaatcattt

SEQ ID NO: 4982467 - DNA, 25 bp, Homo sapien
cagatctcttatctgtgccagccag

SEQ ID NO: 4982468 - DNA, 25 bp, Homo sapien
cccttactgataagaatacaaacaa

SEQ ID NO: 4982469 - DNA, 25 bp, Homo sapien
gcagctctgccttctatcgggcttt

SEQ ID NO: 4982470 - DNA, 25 bp, Homo sapien
ggagttgcgcatggagaataccacc

SEQ ID NO: 4982471 - DNA, 25 bp, Homo sapien
caggacgtgtttctcggagttgcgc

SEQ ID NO: 4982472 - DNA, 25 bp, Homo sapien
gcactatctggcttggcattctcag

SEQ ID NO: 4982473 - DNA, 25 bp, Homo sapien
catttgcatcttacccttgtggccg

SEQ ID NO: 4982474 - DNA, 25 bp, Homo sapien
agaagttgtaacacaggaggaggcc

SEQ ID NO: 4982475 - DNA, 25 bp, Homo sapien
tgctccagctgcaacgcgtgagagt

SEQ ID NO: 4982476 - DNA, 25 bp, Homo sapien
tccacggaagtgagtcaacacattg

SEQ ID NO: 4982477 - DNA, 25 bp, Homo sapien
tgctgccagcccgggtcaagttcat

SEQ ID NO: 4982478 - DNA, 25 bp, Homo sapien
ttaggtgggtctgggaaatcagttg

SEQ ID NO: 4982479 - DNA, 25 bp, Homo sapien
tcagtgtagattctgactgagtgag

SEQ ID NO: 4982480 - DNA, 25 bp, Homo sapien
gccagcccgggtcaagttcattcac

SEQ ID NO: 4982481 - DNA, 25 bp, Homo sapien
cacagctcagatttgcggtaacgga

SEQ ID NO: 4982482 - DNA, 25 bp, Homo sapien
gaatctgatagaatgcctagcctac

SEQ ID NO: 4982483 - DNA, 25 bp, Homo sapien
aaacctgaacagtgaatgcgtaaca

SEQ ID NO: 4982484 - DNA, 25 bp, Homo sapien
tagcctacagttgctcaccaggtac

SEQ ID NO: 4982485 - DNA, 25 bp, Homo sapien
tcaactgcataggaggcgcaatgtt

SEQ ID NO: 4982486 - DNA, 25 bp, Homo sapien
gagcagttgtctctagggctcccaa

SEQ ID NO: 4982487 - DNA, 25 bp, Homo sapien
tacaaatgtggtcgtggactctgga

SEQ ID NO: 4982488 - DNA, 25 bp, Homo sapien
gcagaagggacctctttagttgcct

SEQ ID NO: 4982489 - DNA, 25 bp, Homo sapien
tgcagacaaggtgcgtcaggacctc

SEQ ID NO: 4982490 - DNA, 25 bp, Homo sapien
tcaggacctcggaggaccgtgttgc

SEQ ID NO: 4982491 - DNA, 25 bp, Homo sapien
caggtgcctttcttgagcctcgtga

SEQ ID NO: 4982492 - DNA, 25 bp, Homo sapien
ggtgaactttgacccggcaggtgcc

SEQ ID NO: 4982493 - DNA, 25 bp, Homo sapien
gtgtcctcacagagccgccccgtgg

SEQ ID NO: 4982494 - DNA, 25 bp, Homo sapien
ccacgtggcaccaggcgcacaaggt

SEQ ID NO: 4982495 - DNA, 25 bp, Homo sapien
tggcaccaggcgcacaaggtgtcct

SEQ ID NO: 4982496 - DNA, 25 bp, Homo sapien
accaggcgcacaaggtgtcctcaca

SEQ ID NO: 4982497 - DNA, 25 bp, Homo sapien
cctcattttaagtgccgtacagtgt

SEQ ID NO: 4982498 - DNA, 25 bp, Homo sapien
tgcctagaattagtaacacatgtca

SEQ ID NO: 4982499 - DNA, 25 bp, Homo sapien
gaaacacataagcatgctcactgcc

SEQ ID NO: 4982500 - DNA, 25 bp, Homo sapien
ctcttataaacaacgctgagatgtg

SEQ ID NO: 4982501 - DNA, 25 bp, Homo sapien
atgcccggccgactgaaactcttaa

SEQ ID NO: 4982502 - DNA, 25 bp, Homo sapien
ttggaagtttcctgcatcaaagaac

SEQ ID NO: 4982503 - DNA, 25 bp, Homo sapien
tgtcttgatgacactgcgtttggca

SEQ ID NO: 4982504 - DNA, 25 bp, Homo sapien
gaaaagtcaacccatacagtgtgaa

SEQ ID NO: 4982505 - DNA, 25 bp, Homo sapien
gtatagttctcataaaataggtctt

SEQ ID NO: 4982506 - DNA, 25 bp, Homo sapien
taattctgtgtcgaatacccatgtg

SEQ ID NO: 4982507 - DNA, 25 bp, Homo sapien
tatttgaccgtgaatcctcagcata

SEQ ID NO: 4982508 - DNA, 25 bp, Homo sapien
cagcatattgtggagtatagttctc

SEQ ID NO: 4982509 - DNA, 25 bp, Homo sapien
ttttcatgttgcagagaagagtaca

SEQ ID NO: 4982510 - DNA, 25 bp, Homo sapien
gtggctaagccataagtaacattta

SEQ ID NO: 4982511 - DNA, 25 bp, Homo sapien
tcagcttggattttatctattgtca

SEQ ID NO: 4982512 - DNA, 25 bp, Homo sapien
tctttggcttttaggtcagcttgga

SEQ ID NO: 4982513 - DNA, 25 bp, Homo sapien
tcatttgttggcttacggttgctca

SEQ ID NO: 4982514 - DNA, 25 bp, Homo sapien
cttggtcaccctagctaatagtttg

SEQ ID NO: 4982515 - DNA, 25 bp, Homo sapien
tctgtaagcttggtagtgcttcctc

SEQ ID NO: 4982516 - DNA, 25 bp, Homo sapien
ttagtgtgctatagaatccctttgc

SEQ ID NO: 4982517 - DNA, 25 bp, Homo sapien
ctaagaacctagagctgtggaggag

SEQ ID NO: 4982518 - DNA, 25 bp, Homo sapien
ggaggagatgtcacactggactact

SEQ ID NO: 4982519 - DNA, 25 bp, Homo sapien
aagaacctagagctgtggaggagat

SEQ ID NO: 4982520 - DNA, 25 bp, Homo sapien
tactggtgtgtacaagggggcagga

SEQ ID NO: 4982521 - DNA, 25 bp, Homo sapien
actgcatgatggcagcattgagcag

SEQ ID NO: 4982522 - DNA, 25 bp, Homo sapien
cactgcatgatggcagcattgagca

SEQ ID NO: 4982523 - DNA, 25 bp, Homo sapien
taaagtcctcgtcctgatgttcctc

SEQ ID NO: 4982524 - DNA, 25 bp, Homo sapien
catcggatgggtctcagtagcttct

SEQ ID NO: 4982525 - DNA, 25 bp, Homo sapien
gtccactgtgagctagcctccacag

SEQ ID NO: 4982526 - DNA, 25 bp, Homo sapien
cctcccttctgtggatagactccag

SEQ ID NO: 4982527 - DNA, 25 bp, Homo sapien
tgaggccccggcataaaacctctgg

SEQ ID NO: 4982528 - DNA, 25 bp, Homo sapien
atctgcaagtcccaggtagccgact

SEQ ID NO: 4982529 - DNA, 25 bp, Homo sapien
catctccggcaaatggtcttggtgt

SEQ ID NO: 4982530 - DNA, 25 bp, Homo sapien
tagccgactcgaggaagaagcaggc

SEQ ID NO: 4982531 - DNA, 25 bp, Homo sapien
catgacatcgtcctgctgctccata

SEQ ID NO: 4982532 - DNA, 25 bp, Homo sapien
ccctttatgggtccagcatgacatc

SEQ ID NO: 4982533 - DNA, 25 bp, Homo sapien
agcatgacatcgtcctgctgctcca

SEQ ID NO: 4982534 - DNA, 25 bp, Homo sapien
tgctgctccatatggcatcaatgta

SEQ ID NO: 4982535 - DNA, 25 bp, Homo sapien
caggaaaacagaagtgtggtatgca

SEQ ID NO: 4982536 - DNA, 25 bp, Homo sapien
tcaggaaaacagaagtgtggtatgc

SEQ ID NO: 4982537 - DNA, 25 bp, Homo sapien
aggaaaacagaagtgtggtatgcac

SEQ ID NO: 4982538 - DNA, 25 bp, Homo sapien
cattacataacccagtttctctggt

SEQ ID NO: 4982539 - DNA, 25 bp, Homo sapien
agtttctctggtgatacaattttac

SEQ ID NO: 4982540 - DNA, 25 bp, Homo sapien
cagtttctctggtgatacaatttta

SEQ ID NO: 4982541 - DNA, 25 bp, Homo sapien
acccagtttctctggtgatacaatt

SEQ ID NO: 4982542 - DNA, 25 bp, Homo sapien
gttttcccgtatgaggtgaggagat

SEQ ID NO: 4982543 - DNA, 25 bp, Homo sapien
cctggcaaaacttagcatagtgtgg

SEQ ID NO: 4982544 - DNA, 25 bp, Homo sapien
actgagttgtcctgagagaacacca

SEQ ID NO: 4982545 - DNA, 25 bp, Homo sapien
gaacaccaggttgtgtacatgctgt

SEQ ID NO: 4982546 - DNA, 25 bp, Homo sapien
gcactgctggctagttggacctggc

SEQ ID NO: 4982547 - DNA, 25 bp, Homo sapien
tcttcttgtctttccccccattgcc

SEQ ID NO: 4982548 - DNA, 25 bp, Homo sapien
caccctctgtggtcattttcttctt

SEQ ID NO: 4982549 - DNA, 25 bp, Homo sapien
ttcttcttgtctttccccccattgc

SEQ ID NO: 4982550 - DNA, 25 bp, Homo sapien
tgtggtcattttcttcttcgttttc

SEQ ID NO: 4982551 - DNA, 25 bp, Homo sapien
gttgtggtgaatgtaaccagaggca

SEQ ID NO: 4982552 - DNA, 25 bp, Homo sapien
gagaccctgtgaatgcccagagttg

SEQ ID NO: 4982553 - DNA, 25 bp, Homo sapien
taaccagaggcaaatccgaggagac

SEQ ID NO: 4982554 - DNA, 25 bp, Homo sapien
ggcaaatccgaggagaccctgtgaa

SEQ ID NO: 4982555 - DNA, 25 bp, Homo sapien
tgataagggatcagagcagagattt

SEQ ID NO: 4982556 - DNA, 25 bp, Homo sapien
agagtgataagggatcagagcagag

SEQ ID NO: 4982557 - DNA, 25 bp, Homo sapien
ctggagagtgataagggatcagagc

SEQ ID NO: 4982558 - DNA, 25 bp, Homo sapien
agtgataagggatcagagcagagat

SEQ ID NO: 4982559 - DNA, 25 bp, Homo sapien
cttgggctcctcaggtgtaacacga

SEQ ID NO: 4982560 - DNA, 25 bp, Homo sapien
gctcctcaggtgtaacacgatgtac

SEQ ID NO: 4982561 - DNA, 25 bp, Homo sapien
ggtagcagatgatgcgagcatcatg

SEQ ID NO: 4982562 - DNA, 25 bp, Homo sapien
tagatgagacgaaaattctctccca

SEQ ID NO: 4982563 - DNA, 25 bp, Homo sapien
catcaatcttaatgaaccactgcat

SEQ ID NO: 4982564 - DNA, 25 bp, Homo sapien
tgccatcaatcttaatgaaccactg

SEQ ID NO: 4982565 - DNA, 25 bp, Homo sapien
gccatcaatcttaatgaaccactgc

SEQ ID NO: 4982566 - DNA, 25 bp, Homo sapien
gttgccatcaatcttaatgaaccac

SEQ ID NO: 4982567 - DNA, 25 bp, Homo sapien
gggatggacgatgaacaaacacact

SEQ ID NO: 4982568 - DNA, 25 bp, Homo sapien
tttgtaggggtgatcctgataattc

SEQ ID NO: 4982569 - DNA, 25 bp, Homo sapien
aagaaacaattgtatgttcgtcttt

SEQ ID NO: 4982570 - DNA, 25 bp, Homo sapien
taggggtgatcctgataattcgtgg

SEQ ID NO: 4982571 - DNA, 25 bp, Homo sapien
caattgtatgttcgtctttgtaggg

SEQ ID NO: 4982572 - DNA, 25 bp, Homo sapien
tctttgagtactgggtagcctggtg

SEQ ID NO: 4982573 - DNA, 25 bp, Homo sapien
ttttcccttcgtcccgcctgcagct

SEQ ID NO: 4982574 - DNA, 25 bp, Homo sapien
gactgtagaagcactccaccagaat

SEQ ID NO: 4982575 - DNA, 25 bp, Homo sapien
tctgcttataagttcagactgtaga

SEQ ID NO: 4982576 - DNA, 25 bp, Homo sapien
gaggttgtgaattctcagttttgag

SEQ ID NO: 4982577 - DNA, 25 bp, Homo sapien
ctgtgtaacagttggtcagtggtgg

SEQ ID NO: 4982578 - DNA, 25 bp, Homo sapien
taacagttggtcagtggtggaggtt

SEQ ID NO: 4982579 - DNA, 25 bp, Homo sapien
tggtggaggttgtgaattctcagtt

SEQ ID NO: 4982580 - DNA, 25 bp, Homo sapien
ggtctgtcatgagcgcagtagctgc

SEQ ID NO: 4982581 - DNA, 25 bp, Homo sapien
ggcagggcacactcagtagtcctct

SEQ ID NO: 4982582 - DNA, 25 bp, Homo sapien
tcctctgtgataaggcaggaaggtc

SEQ ID NO: 4982583 - DNA, 25 bp, Homo sapien
gcaacatgatgtcggagaccagggc

SEQ ID NO: 4982584 - DNA, 25 bp, Homo sapien
gaaggtgacaggagtaagttggagg

SEQ ID NO: 4982585 - DNA, 25 bp, Homo sapien
ggaaggtgacaggagtaagttggag

SEQ ID NO: 4982586 - DNA, 25 bp, Homo sapien
aaggtgacaggagtaagttggagga

SEQ ID NO: 4982587 - DNA, 25 bp, Homo sapien
aggtgacaggagtaagttggaggag

SEQ ID NO: 4982588 - DNA, 25 bp, Homo sapien
ctttgattccccagttataagtggg

SEQ ID NO: 4982589 - DNA, 25 bp, Homo sapien
tatacacctgtagcatgatcaccac

SEQ ID NO: 4982590 - DNA, 25 bp, Homo sapien
gaacttgaagccctctcagctagcc

SEQ ID NO: 4982591 - DNA, 25 bp, Homo sapien
tataaggcgctccagcatagtagcc

SEQ ID NO: 4982592 - DNA, 25 bp, Homo sapien
ctttgccactctccacagacgaaaa

SEQ ID NO: 4982593 - DNA, 25 bp, Homo sapien
gaataaatactgtgactgggcatgg

SEQ ID NO: 4982594 - DNA, 25 bp, Homo sapien
caagcaaatcgatcctaatttatga

SEQ ID NO: 4982595 - DNA, 25 bp, Homo sapien
tccttgacagtaaacaagcaaatcg

SEQ ID NO: 4982596 - DNA, 25 bp, Homo sapien
ctaggttgtttggtagttgcgtgct

SEQ ID NO: 4982597 - DNA, 25 bp, Homo sapien
gccagcagtatatgagcaatgtagt

SEQ ID NO: 4982598 - DNA, 25 bp, Homo sapien
tactagtcctttcttggtatgtggt

SEQ ID NO: 4982599 - DNA, 25 bp, Homo sapien
tgcccaggagtacaaatgctaggtt

SEQ ID NO: 4982600 - DNA, 25 bp, Homo sapien
taaccaatgcaattagatcaccaaa

SEQ ID NO: 4982601 - DNA, 25 bp, Homo sapien
ttttaaccaatgcaattagatcacc

SEQ ID NO: 4982602 - DNA, 25 bp, Homo sapien
tattctaaagacctggttagctgct

SEQ ID NO: 4982603 - DNA, 25 bp, Homo sapien
taaagacctggttagctgcttttaa

SEQ ID NO: 4982604 - DNA, 25 bp, Homo sapien
catgctttatgacagtgaatcagga

SEQ ID NO: 4982605 - DNA, 25 bp, Homo sapien
tttatgacagtgaatcaggacaaga

SEQ ID NO: 4982606 - DNA, 25 bp, Homo sapien
gacagtgaatcaggacaagacatag

SEQ ID NO: 4982607 - DNA, 25 bp, Homo sapien
gtgaatcaggacaagacatagattt

SEQ ID NO: 4982608 - DNA, 25 bp, Homo sapien
ggagcacataacaaggcctgggttg

SEQ ID NO: 4982609 - DNA, 25 bp, Homo sapien
agcacataacaaggcctgggttgat

SEQ ID NO: 4982610 - DNA, 25 bp, Homo sapien
cacataacaaggcctgggttgatag

SEQ ID NO: 4982611 - DNA, 25 bp, Homo sapien
cataacaaggcctgggttgatagca

SEQ ID NO: 4982612 - DNA, 25 bp, Homo sapien
gaaggaatcctgagagccagcaatg

SEQ ID NO: 4982613 - DNA, 25 bp, Homo sapien
ggaaggaatcctgagagccagcaat

SEQ ID NO: 4982614 - DNA, 25 bp, Homo sapien
aaggaatcctgagagccagcaatga

SEQ ID NO: 4982615 - DNA, 25 bp, Homo sapien
aataacaggcattgctctcatctgg

SEQ ID NO: 4982616 - DNA, 25 bp, Homo sapien
caaaccctgggtttccttgatgatc

SEQ ID NO: 4982617 - DNA, 25 bp, Homo sapien
catcttatcagaacccgagttcggc

SEQ ID NO: 4982618 - DNA, 25 bp, Homo sapien
gggcagccctgccatcttatcagaa

SEQ ID NO: 4982619 - DNA, 25 bp, Homo sapien
gctcttgtcattatctgctctaccc

SEQ ID NO: 4982620 - DNA, 25 bp, Homo sapien
ctaaaggcagctctaagtctggtct

SEQ ID NO: 4982621 - DNA, 25 bp, Homo sapien
caaactatccgtgaacttaaagaca

SEQ ID NO: 4982622 - DNA, 25 bp, Homo sapien
taaagacaaccttgattactgtgtg

SEQ ID NO: 4982623 - DNA, 25 bp, Homo sapien
gctttattctcatgttgtatattta

SEQ ID NO: 4982624 - DNA, 25 bp, Homo sapien
tgaggaacatgcactagtagatcgt

SEQ ID NO: 4982625 - DNA, 25 bp, Homo sapien
cagattaaggccgaatgaggaacat

SEQ ID NO: 4982626 - DNA, 25 bp, Homo sapien
tcttggataaagcttactagactcc

SEQ ID NO: 4982627 - DNA, 25 bp, Homo sapien
tgtggcacactgattccccagctgt

SEQ ID NO: 4982628 - DNA, 25 bp, Homo sapien
tcctgctgggtgaatacagctcttc

SEQ ID NO: 4982629 - DNA, 25 bp, Homo sapien
gctcttctccctggttgtgaaccgt

SEQ ID NO: 4982630 - DNA, 25 bp, Homo sapien
ccactaaacagttgggagatattct

SEQ ID NO: 4982631 - DNA, 25 bp, Homo sapien
ttctctgtatggagacagggtggca

SEQ ID NO: 4982632 - DNA, 25 bp, Homo sapien
tggcatatgcctgtctacagttaaa

SEQ ID NO: 4982633 - DNA, 25 bp, Homo sapien
agggaagacagctccctcgtcaaca

SEQ ID NO: 4982634 - DNA, 25 bp, Homo sapien
taaagagcctgaagggaagacagct

SEQ ID NO: 4982635 - DNA, 25 bp, Homo sapien
ccttcgctgtaacggtggcatatgc

SEQ ID NO: 4982636 - DNA, 25 bp, Homo sapien
aattgaggcaataatcaatacctta

SEQ ID NO: 4982637 - DNA, 25 bp, Homo sapien
tgaggcaataatcaataccttacca

SEQ ID NO: 4982638 - DNA, 25 bp, Homo sapien
tagaccaatgtccttgatgaacatt

SEQ ID NO: 4982639 - DNA, 25 bp, Homo sapien
ccaggaccatatggattcaaagccg

SEQ ID NO: 4982640 - DNA, 25 bp, Homo sapien
aaagcatttgtatgatcaagtaaca

SEQ ID NO: 4982641 - DNA, 25 bp, Homo sapien
cttcccagtgggtgaaaattgggca

SEQ ID NO: 4982642 - DNA, 25 bp, Homo sapien
ccagtgggtgaaaattgggcagaca

SEQ ID NO: 4982643 - DNA, 25 bp, Homo sapien
tgggtgaaaattgggcagacataca

SEQ ID NO: 4982644 - DNA, 25 bp, Homo sapien
ctgcttcccagtgggtgaaaattgg

SEQ ID NO: 4982645 - DNA, 25 bp, Homo sapien
gcagaagtagcacagttaggccctc

SEQ ID NO: 4982646 - DNA, 25 bp, Homo sapien
tgcaagctgaatcaacacactggat

SEQ ID NO: 4982647 - DNA, 25 bp, Homo sapien
agagctattggccaacaccctgaga

SEQ ID NO: 4982648 - DNA, 25 bp, Homo sapien
tagagtttgctgaccggcctctgga

SEQ ID NO: 4982649 - DNA, 25 bp, Homo sapien
ttcaaggatttgcattgaaggcctt

SEQ ID NO: 4982650 - DNA, 25 bp, Homo sapien
gggccctggcatggtattccagcca

SEQ ID NO: 4982651 - DNA, 25 bp, Homo sapien
attccagccagagtggactctgcgc

SEQ ID NO: 4982652 - DNA, 25 bp, Homo sapien
tctgcgcacgtgtgggagcagccct

SEQ ID NO: 4982653 - DNA, 25 bp, Homo sapien
gaagaccatgctgaaacatttatcc

SEQ ID NO: 4982654 - DNA, 25 bp, Homo sapien
tactctttgacccaatactccctag

SEQ ID NO: 4982655 - DNA, 25 bp, Homo sapien
tgttagggatacagcaagaaataag

SEQ ID NO: 4982656 - DNA, 25 bp, Homo sapien
taatgtaagaaagtaagcccaggcg

SEQ ID NO: 4982657 - DNA, 25 bp, Homo sapien
aatagagttgtcttctaaaagtggc

SEQ ID NO: 4982658 - DNA, 25 bp, Homo sapien
agagttgtcttctaaaagtggccat

SEQ ID NO: 4982659 - DNA, 25 bp, Homo sapien
ctctgagaaatagagttgtcttcta

SEQ ID NO: 4982660 - DNA, 25 bp, Homo sapien
gagaaatagagttgtcttctaaaag

SEQ ID NO: 4982661 - DNA, 25 bp, Homo sapien
tgtttactttgggagcgcagaggct

SEQ ID NO: 4982662 - DNA, 25 bp, Homo sapien
cgtaagagattataaagtggagggc

SEQ ID NO: 4982663 - DNA, 25 bp, Homo sapien
tctgtgcagtagaagtcgtgctaac

SEQ ID NO: 4982664 - DNA, 25 bp, Homo sapien
ttgagaagaagaacacaatgtcctg

SEQ ID NO: 4982665 - DNA, 25 bp, Homo sapien
cacacacgtttgctgtgctctcgct

SEQ ID NO: 4982666 - DNA, 25 bp, Homo sapien
ctctcagcacatgcgtgcgcaggca

SEQ ID NO: 4982667 - DNA, 25 bp, Homo sapien
gctatgaaactgagccagtgaatga

SEQ ID NO: 4982668 - DNA, 25 bp, Homo sapien
gtgctctcgctgtccttcattcgtg

SEQ ID NO: 4982669 - DNA, 25 bp, Homo sapien
aagtcctgcggaatggcagctgatg

SEQ ID NO: 4982670 - DNA, 25 bp, Homo sapien
ggtgattctgctgctaccctgttcc

SEQ ID NO: 4982671 - DNA, 25 bp, Homo sapien
gtgattctgctgctaccctgttccc

SEQ ID NO: 4982672 - DNA, 25 bp, Homo sapien
aaatgcacagaatcaaagtcctgcg

SEQ ID NO: 4982673 - DNA, 25 bp, Homo sapien
aactcctagtgtccgtgtccattcg

SEQ ID NO: 4982674 - DNA, 25 bp, Homo sapien
tgtccattcgtgtcatgtggtgcct

SEQ ID NO: 4982675 - DNA, 25 bp, Homo sapien
tctggattgtgcaggtacccaaact

SEQ ID NO: 4982676 - DNA, 25 bp, Homo sapien
gcaccaccgtcttatagtcatgaaa

SEQ ID NO: 4982677 - DNA, 25 bp, Homo sapien
ctgcatagggcagagaagtcgcctg

SEQ ID NO: 4982678 - DNA, 25 bp, Homo sapien
cggagagtgtggtgtactggatgca

SEQ ID NO: 4982679 - DNA, 25 bp, Homo sapien
tactggatgcatacctttgccttgg

SEQ ID NO: 4982680 - DNA, 25 bp, Homo sapien
ccaagccttagctcaagatcgctag

SEQ ID NO: 4982681 - DNA, 25 bp, Homo sapien
tgctcctcaacttgggtgctggtgc

SEQ ID NO: 4982682 - DNA, 25 bp, Homo sapien
gcagagcacaaccacacacagtgag

SEQ ID NO: 4982683 - DNA, 25 bp, Homo sapien
gagcgtctgctcctcaacttgggtg

SEQ ID NO: 4982684 - DNA, 25 bp, Homo sapien
tgctggttgtcttgcagagcacaac

SEQ ID NO: 4982685 - DNA, 25 bp, Homo sapien
cccgcatcccttactcacaactgtg

SEQ ID NO: 4982686 - DNA, 25 bp, Homo sapien
ccttgaaatgtttctcgaatgcctt

SEQ ID NO: 4982687 - DNA, 25 bp, Homo sapien
tcctccgaacctcaggccagtgcag

SEQ ID NO: 4982688 - DNA, 25 bp, Homo sapien
tgtttctcgaatgccttctcacatg

SEQ ID NO: 4982689 - DNA, 25 bp, Homo sapien
agaagccaaagaggcaaagagggtg

SEQ ID NO: 4982690 - DNA, 25 bp, Homo sapien
cagaagccaaagaggcaaagagggt

SEQ ID NO: 4982691 - DNA, 25 bp, Homo sapien
cttggctttacatcaaaagtgaaaa

SEQ ID NO: 4982692 - DNA, 25 bp, Homo sapien
aagacatagcaaataggatcttggc

SEQ ID NO: 4982693 - DNA, 25 bp, Homo sapien
tgtcaaaacacagattatgtgagtc

SEQ ID NO: 4982694 - DNA, 25 bp, Homo sapien
aggtaatcaacttgttctgtgaagc

SEQ ID NO: 4982695 - DNA, 25 bp, Homo sapien
cactgattttaggagatagcgtttc

SEQ ID NO: 4982696 - DNA, 25 bp, Homo sapien
cgcaggctgctgataagctgacgct

SEQ ID NO: 4982697 - DNA, 25 bp, Homo sapien
actgggcagaaagcattgacaagtg

SEQ ID NO: 4982698 - DNA, 25 bp, Homo sapien
cagttccaatccagtcgaaccaggg

SEQ ID NO: 4982699 - DNA, 25 bp, Homo sapien
caggacgtagcatcttacagaaata

SEQ ID NO: 4982700 - DNA, 25 bp, Homo sapien
cctggcaaggacacgagggggctcc

SEQ ID NO: 4982701 - DNA, 25 bp, Homo sapien
gactgcaggacgtagcatcttacag

SEQ ID NO: 4982702 - DNA, 25 bp, Homo sapien
gctggagactgcaggacgtagcatc

SEQ ID NO: 4982703 - DNA, 25 bp, Homo sapien
cccaccccttccagtgctggcctgt

SEQ ID NO: 4982704 - DNA, 25 bp, Homo sapien
cccatcccctccagtgctggcctgt

SEQ ID NO: 4982705 - DNA, 25 bp, Homo sapien
gcctgtgccaggtgcccacttcccc

SEQ ID NO: 4982706 - DNA, 25 bp, Homo sapien
ccccaccccttccagtgctggcctg

SEQ ID NO: 4982707 - DNA, 25 bp, Homo sapien
ttttcattccattttatgcatttac

SEQ ID NO: 4982708 - DNA, 25 bp, Homo sapien
tcgttttcattccattttatgcatt

SEQ ID NO: 4982709 - DNA, 25 bp, Homo sapien
attcgttttcattccattttatgca

SEQ ID NO: 4982710 - DNA, 25 bp, Homo sapien
ttattcgttttcattccattttatg

SEQ ID NO: 4982711 - DNA, 25 bp, Homo sapien
agttgttctaggcatttccgaccac

SEQ ID NO: 4982712 - DNA, 25 bp, Homo sapien
ttgttctaggcatttccgaccactg

SEQ ID NO: 4982713 - DNA, 25 bp, Homo sapien
tcatgcagttgttctaggcatttcc

SEQ ID NO: 4982714 - DNA, 25 bp, Homo sapien
tgcagttgttctaggcatttccgac

SEQ ID NO: 4982715 - DNA, 25 bp, Homo sapien
tcaagagctaccgtttatcgcaggc

SEQ ID NO: 4982716 - DNA, 25 bp, Homo sapien
gaggcatgggtagaacagagtccac

SEQ ID NO: 4982717 - DNA, 25 bp, Homo sapien
tatcgcaggccaattaggtccgttt

SEQ ID NO: 4982718 - DNA, 25 bp, Homo sapien
gaacactcccagcagaggctatggg

SEQ ID NO: 4982719 - DNA, 25 bp, Homo sapien
gagagaactgtttgcagagttacag

SEQ ID NO: 4982720 - DNA, 25 bp, Homo sapien
aataagtaccaccaggacagaagag

SEQ ID NO: 4982721 - DNA, 25 bp, Homo sapien
ccacgctggtgagcgagtggatcat

SEQ ID NO: 4982722 - DNA, 25 bp, Homo sapien
cgtgtctataagagatatgggctga

SEQ ID NO: 4982723 - DNA, 25 bp, Homo sapien
tggtctcctgattagtggcccctgt

SEQ ID NO: 4982724 - DNA, 25 bp, Homo sapien
ttaggaaaaggaagcgcaaccactc

SEQ ID NO: 4982725 - DNA, 25 bp, Homo sapien
tgtcctgtctggtgctcaagacccg

SEQ ID NO: 4982726 - DNA, 25 bp, Homo sapien
tttcaggtcaggtttagtggtctcc

SEQ ID NO: 4982727 - DNA, 25 bp, Homo sapien
ggaaccatacagatgtgacctttgg

SEQ ID NO: 4982728 - DNA, 25 bp, Homo sapien
tctggacgtttcctgtcagtggaac

SEQ ID NO: 4982729 - DNA, 25 bp, Homo sapien
acctttggtgtctttcactttagca

SEQ ID NO: 4982730 - DNA, 25 bp, Homo sapien
atttgcccgttctggacgtttcctg

SEQ ID NO: 4982731 - DNA, 25 bp, Homo sapien
cacatgtcagcgagggatagcagca

SEQ ID NO: 4982732 - DNA, 25 bp, Homo sapien
catagaaaggtgtctgcttcagcac

SEQ ID NO: 4982733 - DNA, 25 bp, Homo sapien
cacctagcactggagactttggaac

SEQ ID NO: 4982734 - DNA, 25 bp, Homo sapien
tgaaaacagccgtagggttggcctc

SEQ ID NO: 4982735 - DNA, 25 bp, Homo sapien
ttctttgagaaggcggtcttgttct

SEQ ID NO: 4982736 - DNA, 25 bp, Homo sapien
tttctttgagaaggcggtcttgttc

SEQ ID NO: 4982737 - DNA, 25 bp, Homo sapien
tgcaacattgacctcttgggcccaa

SEQ ID NO: 4982738 - DNA, 25 bp, Homo sapien
taccaaggccctgtacaaagtctga

SEQ ID NO: 4982739 - DNA, 25 bp, Homo sapien
caaggaagcctttaaccaggtgcaa

SEQ ID NO: 4982740 - DNA, 25 bp, Homo sapien
gggcaagtaagatctgttcctaacc

SEQ ID NO: 4982741 - DNA, 25 bp, Homo sapien
aaagaacaatggattcagcctgagg

SEQ ID NO: 4982742 - DNA, 25 bp, Homo sapien
ggacctgctcagttctgtcgggaga

SEQ ID NO: 4982743 - DNA, 25 bp, Homo sapien
aagacatctgacaacctccgagctc

SEQ ID NO: 4982744 - DNA, 25 bp, Homo sapien
ttcattaagtaggatgtggcaggca

SEQ ID NO: 4982745 - DNA, 25 bp, Homo sapien
acttagggaaatcggcaggttgagc

SEQ ID NO: 4982746 - DNA, 25 bp, Homo sapien
cctctgcctactgggttcaagagaa

SEQ ID NO: 4982747 - DNA, 25 bp, Homo sapien
tgcctactgggttcaagagaatctc

SEQ ID NO: 4982748 - DNA, 25 bp, Homo sapien
tctgcctactgggttcaagagaatc

SEQ ID NO: 4982749 - DNA, 25 bp, Homo sapien
acctctgcctactgggttcaagaga

SEQ ID NO: 4982750 - DNA, 25 bp, Homo sapien
tcaagtagagttgggcaaggctgta

SEQ ID NO: 4982751 - DNA, 25 bp, Homo sapien
caggatttgtcaagtagagttgggc

SEQ ID NO: 4982752 - DNA, 25 bp, Homo sapien
ttgtcaagtagagttgggcaaggct

SEQ ID NO: 4982753 - DNA, 25 bp, Homo sapien
accatcaggatttgtcaagtagagt

SEQ ID NO: 4982754 - DNA, 25 bp, Homo sapien
ccatttgctggagatagtatcactt

SEQ ID NO: 4982755 - DNA, 25 bp, Homo sapien
taggactactgggatggcacacacc

SEQ ID NO: 4982756 - DNA, 25 bp, Homo sapien
gagccattgtggctagccatgtgtc

SEQ ID NO: 4982757 - DNA, 25 bp, Homo sapien
tgttcactccgatagtctctgtcat

SEQ ID NO: 4982758 - DNA, 25 bp, Homo sapien
ccccagttcacaagagacatctgga

SEQ ID NO: 4982759 - DNA, 25 bp, Homo sapien
cagccccagttcacaagagacatct

SEQ ID NO: 4982760 - DNA, 25 bp, Homo sapien
agccccagttcacaagagacatctg

SEQ ID NO: 4982761 - DNA, 25 bp, Homo sapien
atggaatagccacagaaggggacca

SEQ ID NO: 4982762 - DNA, 25 bp, Homo sapien
aagtgtataacaggcaaccgaccac

SEQ ID NO: 4982763 - DNA, 25 bp, Homo sapien
ttaagtgtataacaggcaaccgacc

SEQ ID NO: 4982764 - DNA, 25 bp, Homo sapien
taagtgtataacaggcaaccgacca

SEQ ID NO: 4982765 - DNA, 25 bp, Homo sapien
gtgtataacaggcaaccgaccacac

SEQ ID NO: 4982766 - DNA, 25 bp, Homo sapien
caattccttgtctccttgtctgagt

SEQ ID NO: 4982767 - DNA, 25 bp, Homo sapien
agccaattccttgtctccttgtctg

SEQ ID NO: 4982768 - DNA, 25 bp, Homo sapien
tcagccaattccttgtctccttgtc

SEQ ID NO: 4982769 - DNA, 25 bp, Homo sapien
gccaattccttgtctccttgtctga

SEQ ID NO: 4982770 - DNA, 25 bp, Homo sapien
ttttcagggaacacatcttgatgga

SEQ ID NO: 4982771 - DNA, 25 bp, Homo sapien
tcttgatggagaatgttgggagaaa

SEQ ID NO: 4982772 - DNA, 25 bp, Homo sapien
tttgagtaggtgctaaaggtggcag

SEQ ID NO: 4982773 - DNA, 25 bp, Homo sapien
caggtagaagtttgagtaggtgcta

SEQ ID NO: 4982774 - DNA, 25 bp, Homo sapien
cagaggattttagcccagtataact

SEQ ID NO: 4982775 - DNA, 25 bp, Homo sapien
gaagtttggggcaaagcaccaggaa

SEQ ID NO: 4982776 - DNA, 25 bp, Homo sapien
accggaagtgttgctagattgagga

SEQ ID NO: 4982777 - DNA, 25 bp, Homo sapien
ccaggaaatccctcaaccggaagtg

SEQ ID NO: 4982778 - DNA, 25 bp, Homo sapien
agagtctgtgtgcatcgtgtcccaa

SEQ ID NO: 4982779 - DNA, 25 bp, Homo sapien
agtctgtgtgcatcgtgtcccaagt

SEQ ID NO: 4982780 - DNA, 25 bp, Homo sapien
agcagagtctgtgtgcatcgtgtcc

SEQ ID NO: 4982781 - DNA, 25 bp, Homo sapien
tcagttaccagaatggggtagttcc

SEQ ID NO: 4982782 - DNA, 25 bp, Homo sapien
tgttgttgggaacagtacgtcccag

SEQ ID NO: 4982783 - DNA, 25 bp, Homo sapien
ccagctgcattggattggaggaaat

SEQ ID NO: 4982784 - DNA, 25 bp, Homo sapien
tctgcagaacactagcggttgccgc

SEQ ID NO: 4982785 - DNA, 25 bp, Homo sapien
tcagccatttgaggagtggaaggtc

SEQ ID NO: 4982786 - DNA, 25 bp, Homo sapien
cagatacagttttgtgaactgtaaa

SEQ ID NO: 4982787 - DNA, 25 bp, Homo sapien
agatacagttttgtgaactgtaaat

SEQ ID NO: 4982788 - DNA, 25 bp, Homo sapien
gatacagttttgtgaactgtaaatc

SEQ ID NO: 4982789 - DNA, 25 bp, Homo sapien
tgcgttttaaaagcgacagaccctc

SEQ ID NO: 4982790 - DNA, 25 bp, Homo sapien
tacatgactattccggcctttctgg

SEQ ID NO: 4982791 - DNA, 25 bp, Homo sapien
tccagcagcctctacagttagggag

SEQ ID NO: 4982792 - DNA, 25 bp, Homo sapien
tacatcagatacacgtagcagccgt

SEQ ID NO: 4982793 - DNA, 25 bp, Homo sapien
gtatgggtcgttgctgagtctctcc

SEQ ID NO: 4982794 - DNA, 25 bp, Homo sapien
taaacacgtttagcttctctcgcag

SEQ ID NO: 4982795 - DNA, 25 bp, Homo sapien
gctcctatgtcccaagaaactgcag

SEQ ID NO: 4982796 - DNA, 25 bp, Homo sapien
aatgtaccttagctgcatcaacagg

SEQ ID NO: 4982797 - DNA, 25 bp, Homo sapien
gctgcttgaagaactgccggaggcc

SEQ ID NO: 4982798 - DNA, 25 bp, Homo sapien
ggcagtctgctgtcccggcggccgg

SEQ ID NO: 4982799 - DNA, 25 bp, Homo sapien
ggccggccaggtcccgcgtgagctg

SEQ ID NO: 4982800 - DNA, 25 bp, Homo sapien
ctgggcagctgcttgaagaactgcc

SEQ ID NO: 4982801 - DNA, 25 bp, Homo sapien
agcttctcgttctcagccgacagct

SEQ ID NO: 4982802 - DNA, 25 bp, Homo sapien
ggtgcagcttctcgttctcagccga

SEQ ID NO: 4982803 - DNA, 25 bp, Homo sapien
gacagctccaccaacttctgctgca

SEQ ID NO: 4982804 - DNA, 25 bp, Homo sapien
gcatctcctggttgcgccgcttggc

SEQ ID NO: 4982805 - DNA, 25 bp, Homo sapien
tgccgcggtccgggcccctcttgcc

SEQ ID NO: 4982806 - DNA, 25 bp, Homo sapien
ctgccgcggtccgggcccctcttgc

SEQ ID NO: 4982807 - DNA, 25 bp, Homo sapien
cccagtcgggctcgcgcttgagcag

SEQ ID NO: 4982808 - DNA, 25 bp, Homo sapien
aagctcaccacggtctgtgcgcacg

SEQ ID NO: 4982809 - DNA, 25 bp, Homo sapien
agaggtcggcgaagagctcgtcgtg

SEQ ID NO: 4982810 - DNA, 25 bp, Homo sapien
ccgcccgccttgtgattgctgttga

SEQ ID NO: 4982811 - DNA, 25 bp, Homo sapien
cgatggcgctctcgtcgtcgtacat

SEQ ID NO: 4982812 - DNA, 25 bp, Homo sapien
aagtcgatggcgctctcgtcgtcgt

SEQ ID NO: 4982813 - DNA, 25 bp, Homo sapien
ccatggagtcgatgtaggcgctgaa

SEQ ID NO: 4982814 - DNA, 25 bp, Homo sapien
cgatgtaggcgctgaagtcgatggc

SEQ ID NO: 4982815 - DNA, 25 bp, Homo sapien
ctggctcgcctagggcccctggctc

SEQ ID NO: 4982816 - DNA, 25 bp, Homo sapien
ccaggctgaagagcgcggcgctcat

SEQ ID NO: 4982817 - DNA, 25 bp, Homo sapien
cggcccggttcgtagaagggcgcag

SEQ ID NO: 4982818 - DNA, 25 bp, Homo sapien
ttcgtagaagggcgcaggctccgca

SEQ ID NO: 4982819 - DNA, 25 bp, Homo sapien
tgcgtccaagcgaggctgtcacctc

SEQ ID NO: 4982820 - DNA, 25 bp, Homo sapien
ggctctgcgtccaagcgaggctgtc

SEQ ID NO: 4982821 - DNA, 25 bp, Homo sapien
tccaagcgaggctgtcacctcgctg

SEQ ID NO: 4982822 - DNA, 25 bp, Homo sapien
ttctagccccggctgacgtgcacgc

SEQ ID NO: 4982823 - DNA, 25 bp, Homo sapien
ttgtgggcttggaacctcctcgctc

SEQ ID NO: 4982824 - DNA, 25 bp, Homo sapien
aatcaaaaccaggacttggccgcag

SEQ ID NO: 4982825 - DNA, 25 bp, Homo sapien
gctgctgggaatgacactccctctg

SEQ ID NO: 4982826 - DNA, 25 bp, Homo sapien
gttgggagtgaaatcaaaaccagga

SEQ ID NO: 4982827 - DNA, 25 bp, Homo sapien
tcgaggcccagagacgcggctgctg

SEQ ID NO: 4982828 - DNA, 25 bp, Homo sapien
cggttctcgctgctctcctcggagg

SEQ ID NO: 4982829 - DNA, 25 bp, Homo sapien
aatccgggccggttctcgctgctct

SEQ ID NO: 4982830 - DNA, 25 bp, Homo sapien
tgctctcctcggaggtcccgggtcc

SEQ ID NO: 4982831 - DNA, 25 bp, Homo sapien
ggaacaccaagctctactaactgct

SEQ ID NO: 4982832 - DNA, 25 bp, Homo sapien
tccagaggtcatttctaacgttgca

SEQ ID NO: 4982833 - DNA, 25 bp, Homo sapien
atgtcgagtctcttcctgcgcaggc

SEQ ID NO: 4982834 - DNA, 25 bp, Homo sapien
accagatctgcgtcggaacaccaag

SEQ ID NO: 4982835 - DNA, 25 bp, Homo sapien
tcaggtggattcatccctccctggc

SEQ ID NO: 4982836 - DNA, 25 bp, Homo sapien
ttctccagatggccacccaagagag

SEQ ID NO: 4982837 - DNA, 25 bp, Homo sapien
gtgcagcaggtctggactcacagct

SEQ ID NO: 4982838 - DNA, 25 bp, Homo sapien
ccgtcccgtcactgtgttccttaga

SEQ ID NO: 4982839 - DNA, 25 bp, Homo sapien
caggtctggactcacagcttgctct

SEQ ID NO: 4982840 - DNA, 25 bp, Homo sapien
ccagcatcttcaccggccgaggaga

SEQ ID NO: 4982841 - DNA, 25 bp, Homo sapien
cagtctcgtgtaggtgggaccagca

SEQ ID NO: 4982842 - DNA, 25 bp, Homo sapien
tcgtgtaggtgggaccagcatcttc

SEQ ID NO: 4982843 - DNA, 25 bp, Homo sapien
cccagtctcgtgtaggtgggaccag

SEQ ID NO: 4982844 - DNA, 25 bp, Homo sapien
atccaggcaggcgacagggctcagg

SEQ ID NO: 4982845 - DNA, 25 bp, Homo sapien
cagtccccctgggacggtggcttca

SEQ ID NO: 4982846 - DNA, 25 bp, Homo sapien
gcaggatccaggcaggcgacagggc

SEQ ID NO: 4982847 - DNA, 25 bp, Homo sapien
cagaaacagtccccctgggacggtg

SEQ ID NO: 4982848 - DNA, 25 bp, Homo sapien
tgaaaacgttgtgtctcgccctcca

SEQ ID NO: 4982849 - DNA, 25 bp, Homo sapien
cttccccaagcgtggagagcggctg

SEQ ID NO: 4982850 - DNA, 25 bp, Homo sapien
tagcccctgacgctctgcagcgttg

SEQ ID NO: 4982851 - DNA, 25 bp, Homo sapien
agctggatcccaagcgggctggacc

SEQ ID NO: 4982852 - DNA, 25 bp, Homo sapien
ttctgaagaccgagcggcgccaagt

SEQ ID NO: 4982853 - DNA, 25 bp, Homo sapien
tctggccgtctctggggaaactccg

SEQ ID NO: 4982854 - DNA, 25 bp, Homo sapien
cagcagcttctgaagaccgagcggc

SEQ ID NO: 4982855 - DNA, 25 bp, Homo sapien
agcggcgccaagtccgtctggccgt

SEQ ID NO: 4982856 - DNA, 25 bp, Homo sapien
gacttaatactttggtaagcctgga

SEQ ID NO: 4982857 - DNA, 25 bp, Homo sapien
tccaatgtgccagaaccagaagggc

SEQ ID NO: 4982858 - DNA, 25 bp, Homo sapien
ggaatgctgccaaccaaagtatagt

SEQ ID NO: 4982859 - DNA, 25 bp, Homo sapien
gagacagctgtttcactaacttgca

SEQ ID NO: 4982860 - DNA, 25 bp, Homo sapien
gcacgaatgttgtgatctttgcttc

SEQ ID NO: 4982861 - DNA, 25 bp, Homo sapien
ccactctctggttcttgggcacgaa

SEQ ID NO: 4982862 - DNA, 25 bp, Homo sapien
tctcttctgaaagcccactctctgg

SEQ ID NO: 4982863 - DNA, 25 bp, Homo sapien
tctgttgcctggtccatcaggcact

SEQ ID NO: 4982864 - DNA, 25 bp, Homo sapien
ctcatgacccaggagtagctcatca

SEQ ID NO: 4982865 - DNA, 25 bp, Homo sapien
cttctcatgacccaggagtagctca

SEQ ID NO: 4982866 - DNA, 25 bp, Homo sapien
gggccttctcatgacccaggagtag

SEQ ID NO: 4982867 - DNA, 25 bp, Homo sapien
ggcaggggccttctcatgacccagg

SEQ ID NO: 4982868 - DNA, 25 bp, Homo sapien
ctgctggattggcacctgctaactt

SEQ ID NO: 4982869 - DNA, 25 bp, Homo sapien
atccatgaccctccttttttcagca

SEQ ID NO: 4982870 - DNA, 25 bp, Homo sapien
ttagcgtaacatattttctgtcggg

SEQ ID NO: 4982871 - DNA, 25 bp, Homo sapien
ggcacctgctaactttctcttagcg

SEQ ID NO: 4982872 - DNA, 25 bp, Homo sapien
gaaaaggcatcaactcagggactgg

SEQ ID NO: 4982873 - DNA, 25 bp, Homo sapien
gatgctgtacataaggcccgtttct

SEQ ID NO: 4982874 - DNA, 25 bp, Homo sapien
acatccatggtgttggtgagcaggc

SEQ ID NO: 4982875 - DNA, 25 bp, Homo sapien
cccggagtgcgtgtaccatgatgct

SEQ ID NO: 4982876 - DNA, 25 bp, Homo sapien
gcatgcccaaagtcgatcccgatca

SEQ ID NO: 4982877 - DNA, 25 bp, Homo sapien
caatcccgaggatccagtggctgat

SEQ ID NO: 4982878 - DNA, 25 bp, Homo sapien
tgtgtagcggatccaaacgcatgcc

SEQ ID NO: 4982879 - DNA, 25 bp, Homo sapien
cagggcttgtactcatcctcacgaa

SEQ ID NO: 4982880 - DNA, 25 bp, Homo sapien
tacaaaagagacacagctgtgcggc

SEQ ID NO: 4982881 - DNA, 25 bp, Homo sapien
caaaagagacacagctgtgcggctg

SEQ ID NO: 4982882 - DNA, 25 bp, Homo sapien
aaagagacacagctgtgcggctgct

SEQ ID NO: 4982883 - DNA, 25 bp, Homo sapien
ctacaaaagagacacagctgtgcgg

SEQ ID NO: 4982884 - DNA, 25 bp, Homo sapien
ctaaaagacgtgactgtttcagtac

SEQ ID NO: 4982885 - DNA, 25 bp, Homo sapien
gactgtttcagtacgattagcgccc

SEQ ID NO: 4982886 - DNA, 25 bp, Homo sapien
gacgtgactgtttcagtacgattag

SEQ ID NO: 4982887 - DNA, 25 bp, Homo sapien
ttttctaaaagacgtgactgtttca

SEQ ID NO: 4982888 - DNA, 25 bp, Homo sapien
atttttgtcagccaatctttatatt

SEQ ID NO: 4982889 - DNA, 25 bp, Homo sapien
caatctttatattcacacggcggtg

SEQ ID NO: 4982890 - DNA, 25 bp, Homo sapien
atctttatattcacacggcggtgcc

SEQ ID NO: 4982891 - DNA, 25 bp, Homo sapien
gacatttttgtcagccaatctttat

SEQ ID NO: 4982892 - DNA, 25 bp, Homo sapien
aaatttcccactgacatagagagga

SEQ ID NO: 4982893 - DNA, 25 bp, Homo sapien
accatcagatccaacaaatttccca

SEQ ID NO: 4982894 - DNA, 25 bp, Homo sapien
taacattgaacccacattactctgg

SEQ ID NO: 4982895 - DNA, 25 bp, Homo sapien
aaatccaagctattgcctatgaaaa

SEQ ID NO: 4982896 - DNA, 25 bp, Homo sapien
atgacaatggatgtttaagtgaact

SEQ ID NO: 4982897 - DNA, 25 bp, Homo sapien
acacgtatgtttaagtacttttgtg

SEQ ID NO: 4982898 - DNA, 25 bp, Homo sapien
tgggaaacaatgtgatacacgtatg

SEQ ID NO: 4982899 - DNA, 25 bp, Homo sapien
aatgtgatacacgtatgtttaagta

SEQ ID NO: 4982900 - DNA, 25 bp, Homo sapien
gggaaacaatgtgatacacgtatgt

SEQ ID NO: 4982901 - DNA, 25 bp, Homo sapien
caatcacttcaggtgaaatcttttc

SEQ ID NO: 4982902 - DNA, 25 bp, Homo sapien
tctgagttgctattaaagttagctt

SEQ ID NO: 4982903 - DNA, 25 bp, Homo sapien
agtttcacgtgtgacttagcaattc

SEQ ID NO: 4982904 - DNA, 25 bp, Homo sapien
ctaaagacagaacagtttcacgtgt

SEQ ID NO: 4982905 - DNA, 25 bp, Homo sapien
taacagtattttcaagccactcaat

SEQ ID NO: 4982906 - DNA, 25 bp, Homo sapien
ggtcatgggcacaacgctataggtc

SEQ ID NO: 4982907 - DNA, 25 bp, Homo sapien
gaggtcatgggcacaacgctatagg

SEQ ID NO: 4982908 - DNA, 25 bp, Homo sapien
tcatgggcacaacgctataggtcct

SEQ ID NO: 4982909 - DNA, 25 bp, Homo sapien
tgggcacaacgctataggtcctcag

SEQ ID NO: 4982910 - DNA, 25 bp, Homo sapien
tgcaggcggagtcttgggccaggat

SEQ ID NO: 4982911 - DNA, 25 bp, Homo sapien
tctggctgcaggcggagtcttgggc

SEQ ID NO: 4982912 - DNA, 25 bp, Homo sapien
gctgcaggcggagtcttgggccagg

SEQ ID NO: 4982913 - DNA, 25 bp, Homo sapien
aggcggagtcttgggccaggatccc

SEQ ID NO: 4982914 - DNA, 25 bp, Homo sapien
gatgatgatgcgcttgggccttcgc

SEQ ID NO: 4982915 - DNA, 25 bp, Homo sapien
ttgggccttcgcagagacgccatga

SEQ ID NO: 4982916 - DNA, 25 bp, Homo sapien
agggtgttccctctcgtcatggcca

SEQ ID NO: 4982917 - DNA, 25 bp, Homo sapien
caggaaagggtgttccctctcgtca

SEQ ID NO: 4982918 - DNA, 25 bp, Homo sapien
gctacctgcttgtgcctgactgctg

SEQ ID NO: 4982919 - DNA, 25 bp, Homo sapien
agggcacaggctagccacgtgtcaa

SEQ ID NO: 4982920 - DNA, 25 bp, Homo sapien
gcccaggccagcaacgaatttctgc

SEQ ID NO: 4982921 - DNA, 25 bp, Homo sapien
ggctagccacgtgtcaaactcagag

SEQ ID NO: 4982922 - DNA, 25 bp, Homo sapien
cactttgcggaggcggaggtggatg

SEQ ID NO: 4982923 - DNA, 25 bp, Homo sapien
aattcaaaaaacagagctgggcgtg

SEQ ID NO: 4982924 - DNA, 25 bp, Homo sapien
tcaaaaaacagagctgggcgtgatg

SEQ ID NO: 4982925 - DNA, 25 bp, Homo sapien
tttgcggaggcggaggtggatggat

SEQ ID NO: 4982926 - DNA, 25 bp, Homo sapien
cgattcgcacgtggtactctggcaa

SEQ ID NO: 4982927 - DNA, 25 bp, Homo sapien
atcaaacccggcgattcgcacgtgg

SEQ ID NO: 4982928 - DNA, 25 bp, Homo sapien
cacgtggtactctggcaatggcttt

SEQ ID NO: 4982929 - DNA, 25 bp, Homo sapien
tggctttcccctaccgtcatactga

SEQ ID NO: 4982930 - DNA, 25 bp, Homo sapien
ttaaaaagccaatctaacatgataa

SEQ ID NO: 4982931 - DNA, 25 bp, Homo sapien
acatgcctcttgatctactttttaa

SEQ ID NO: 4982932 - DNA, 25 bp, Homo sapien
gcttgttagacaaccgcctgtattt

SEQ ID NO: 4982933 - DNA, 25 bp, Homo sapien
gccaatctaacatgataaaaccttt

SEQ ID NO: 4982934 - DNA, 25 bp, Homo sapien
tttgtcacccctggaggttaactca

SEQ ID NO: 4982935 - DNA, 25 bp, Homo sapien
ggaactgtgtacacatcccaggaag

SEQ ID NO: 4982936 - DNA, 25 bp, Homo sapien
gtatcactattccagaaaccacgag

SEQ ID NO: 4982937 - DNA, 25 bp, Homo sapien
aaaccacgagttcttattacagtgc

SEQ ID NO: 4982938 - DNA, 25 bp, Homo sapien
ctttgaagtcgctcatccagggtga

SEQ ID NO: 4982939 - DNA, 25 bp, Homo sapien
ccagggtgaacattctttcagattc

SEQ ID NO: 4982940 - DNA, 25 bp, Homo sapien
ggtgaacattctttcagattcccag

SEQ ID NO: 4982941 - DNA, 25 bp, Homo sapien
ggaactccactttgaagtcgctcat

SEQ ID NO: 4982942 - DNA, 25 bp, Homo sapien
attctcagtagtttagaacctcctt

SEQ ID NO: 4982943 - DNA, 25 bp, Homo sapien
tctcagtagtttagaacctcctttc

SEQ ID NO: 4982944 - DNA, 25 bp, Homo sapien
tggtaatgtcgttgaagtcactgag

SEQ ID NO: 4982945 - DNA, 25 bp, Homo sapien
taaaagtagcatgttggtaatgtcg

SEQ ID NO: 4982946 - DNA, 25 bp, Homo sapien
gaactgtgccccgaactaagtgctt

SEQ ID NO: 4982947 - DNA, 25 bp, Homo sapien
gagaaatgatgctgacgccaagccc

SEQ ID NO: 4982948 - DNA, 25 bp, Homo sapien
tatacatggtggaacttgagaactc

SEQ ID NO: 4982949 - DNA, 25 bp, Homo sapien
tggccatgaattccgacacaacgtg

SEQ ID NO: 4982950 - DNA, 25 bp, Homo sapien
gttcagctcttacatcattgctcca

SEQ ID NO: 4982951 - DNA, 25 bp, Homo sapien
tacaggggtttttgctagttcagct

SEQ ID NO: 4982952 - DNA, 25 bp, Homo sapien
ctagttcagctcttacatcattgct

SEQ ID NO: 4982953 - DNA, 25 bp, Homo sapien
cagctcttacatcattgctccaatc

SEQ ID NO: 4982954 - DNA, 25 bp, Homo sapien
gatctaaggcattaataaaatcttg

SEQ ID NO: 4982955 - DNA, 25 bp, Homo sapien
gcagttcaggattagagagctgatc

SEQ ID NO: 4982956 - DNA, 25 bp, Homo sapien
tcctccttgatccaacttactttta

SEQ ID NO: 4982957 - DNA, 25 bp, Homo sapien
gagagctgatctaaggcattaataa

SEQ ID NO: 4982958 - DNA, 25 bp, Homo sapien
gatttcttccacagagtgctgaaca

SEQ ID NO: 4982959 - DNA, 25 bp, Homo sapien
tgctgaacagcaacggcttggtctt

SEQ ID NO: 4982960 - DNA, 25 bp, Homo sapien
tttgtccagtaaggccaccatgtgg

SEQ ID NO: 4982961 - DNA, 25 bp, Homo sapien
gggataaacaatagcctgcgggtag

SEQ ID NO: 4982962 - DNA, 25 bp, Homo sapien
tctgcaatgctagagtgaggcttga

SEQ ID NO: 4982963 - DNA, 25 bp, Homo sapien
tcatgtaagctcacgagagaggcta

SEQ ID NO: 4982964 - DNA, 25 bp, Homo sapien
tgggcaagcttcctgagtgcacgtg

SEQ ID NO: 4982965 - DNA, 25 bp, Homo sapien
gaggctactggcttcactgcacgtg

SEQ ID NO: 4982966 - DNA, 25 bp, Homo sapien
cacaagtgctggatacgcctgcagt

SEQ ID NO: 4982967 - DNA, 25 bp, Homo sapien
taccgttctataatctgaagtaatc

SEQ ID NO: 4982968 - DNA, 25 bp, Homo sapien
tccaccacaagtgctggatacgcct

SEQ ID NO: 4982969 - DNA, 25 bp, Homo sapien
aagtctcctctggataccgttctat

SEQ ID NO: 4982970 - DNA, 25 bp, Homo sapien
ggtcacagaaatctgccagcgtcat

SEQ ID NO: 4982971 - DNA, 25 bp, Homo sapien
atgctctctggtacagacccgcgat

SEQ ID NO: 4982972 - DNA, 25 bp, Homo sapien
tgtaagcatcaatcaccccagctgc

SEQ ID NO: 4982973 - DNA, 25 bp, Homo sapien
gctctctggtacagacccgcgatca

SEQ ID NO: 4982974 - DNA, 25 bp, Homo sapien
gacacataaatggatcaacagctcc

SEQ ID NO: 4982975 - DNA, 25 bp, Homo sapien
gacctaaacccatgagcatgactga

SEQ ID NO: 4982976 - DNA, 25 bp, Homo sapien
tgctttccatttgtgactcatgaca

SEQ ID NO: 4982977 - DNA, 25 bp, Homo sapien
tcacagagacctaaacccatgagca

SEQ ID NO: 4982978 - DNA, 25 bp, Homo sapien
ctcctcgatttcagcaaggcaggct

SEQ ID NO: 4982979 - DNA, 25 bp, Homo sapien
gaaagctctaagattcttctagcct

SEQ ID NO: 4982980 - DNA, 25 bp, Homo sapien
gcattcgctatgatcctgtaagttg

SEQ ID NO: 4982981 - DNA, 25 bp, Homo sapien
cctgtaagttgtacccaagagaatg

SEQ ID NO: 4982982 - DNA, 25 bp, Homo sapien
ctggtcacggaaagccagaatattt

SEQ ID NO: 4982983 - DNA, 25 bp, Homo sapien
tggtcacggaaagccagaatatttt

SEQ ID NO: 4982984 - DNA, 25 bp, Homo sapien
tttgcttaagtagcttgacacgttg

SEQ ID NO: 4982985 - DNA, 25 bp, Homo sapien
taagtagcttgacacgttgttctca

SEQ ID NO: 4982986 - DNA, 25 bp, Homo sapien
tggctcaggcggcagtagctctgca

SEQ ID NO: 4982987 - DNA, 25 bp, Homo sapien
gactctttatgcagctccttcagta

SEQ ID NO: 4982988 - DNA, 25 bp, Homo sapien
ccttcagtagtttcatagcaagtga

SEQ ID NO: 4982989 - DNA, 25 bp, Homo sapien
tgttttcagcacagtgagcacctgc

SEQ ID NO: 4982990 - DNA, 25 bp, Homo sapien
ggagaatcaacaaagaaatcttaaa

SEQ ID NO: 4982991 - DNA, 25 bp, Homo sapien
gagaatcaacaaagaaatcttaaat

SEQ ID NO: 4982992 - DNA, 25 bp, Homo sapien
tgctcttgcacttccatcctgtcac

SEQ ID NO: 4982993 - DNA, 25 bp, Homo sapien
tcatactattatcttctggaagagg

SEQ ID NO: 4982994 - DNA, 25 bp, Homo sapien
gaaaacttgcaactcctgatcaggg

SEQ ID NO: 4982995 - DNA, 25 bp, Homo sapien
tgcttccgggcactgtctatcatct

SEQ ID NO: 4982996 - DNA, 25 bp, Homo sapien
cgatttgtgatgatgtcatcccaga

SEQ ID NO: 4982997 - DNA, 25 bp, Homo sapien
gatgtcatcccagatgttcattggg

SEQ ID NO: 4982998 - DNA, 25 bp, Homo sapien
gtgatgatgtcatcccagatgttca

SEQ ID NO: 4982999 - DNA, 25 bp, Homo sapien
catcccagatgttcattgggtccat

SEQ ID NO: 4983000 - DNA, 25 bp, Homo sapien
cttaaggggaacttgagatgataaa

SEQ ID NO: 4983001 - DNA, 25 bp, Homo sapien
aaggggaacttgagatgataaattg

SEQ ID NO: 4983002 - DNA, 25 bp, Homo sapien
taaggggaacttgagatgataaatt

SEQ ID NO: 4983003 - DNA, 25 bp, Homo sapien
aggggaacttgagatgataaattgc

SEQ ID NO: 4983004 - DNA, 25 bp, Homo sapien
tgtttgcttataaagctgatgaact

SEQ ID NO: 4983005 - DNA, 25 bp, Homo sapien
gcttataaagctgatgaactcctga

SEQ ID NO: 4983006 - DNA, 25 bp, Homo sapien
tataaagctgatgaactcctgaatt

SEQ ID NO: 4983007 - DNA, 25 bp, Homo sapien
tttgcttataaagctgatgaactcc

SEQ ID NO: 4983008 - DNA, 25 bp, Homo sapien
ctgcaatttggtgagtctactttgg

SEQ ID NO: 4983009 - DNA, 25 bp, Homo sapien
taagaggacatcaatactagaataa

SEQ ID NO: 4983010 - DNA, 25 bp, Homo sapien
tttggtgtaagaggacatcaatact

SEQ ID NO: 4983011 - DNA, 25 bp, Homo sapien
tggtgagtctactttggtgtaagag

SEQ ID NO: 4983012 - DNA, 25 bp, Homo sapien
gactgtaatgaagctctagaatcgc

SEQ ID NO: 4983013 - DNA, 25 bp, Homo sapien
ctggagctccccgtgcatagctttg

SEQ ID NO: 4983014 - DNA, 25 bp, Homo sapien
taaagcagactcagctcttgactgt

SEQ ID NO: 4983015 - DNA, 25 bp, Homo sapien
tgctgcggatcatgtaaggtagata

SEQ ID NO: 4983016 - DNA, 25 bp, Homo sapien
caagtgatttccactcagcaaggtg

SEQ ID NO: 4983017 - DNA, 25 bp, Homo sapien
tggttgtaacagtcaagggatgcaa

SEQ ID NO: 4983018 - DNA, 25 bp, Homo sapien
ttctgtgggctcaccatctacccag

SEQ ID NO: 4983019 - DNA, 25 bp, Homo sapien
aaaaatccttctcggcttctgtggg

SEQ ID NO: 4983020 - DNA, 25 bp, Homo sapien
tcatactgcttagcagcttcagaat

SEQ ID NO: 4983021 - DNA, 25 bp, Homo sapien
catcatactgcttagcagcttcaga

SEQ ID NO: 4983022 - DNA, 25 bp, Homo sapien
tcatcatactgcttagcagcttcag

SEQ ID NO: 4983023 - DNA, 25 bp, Homo sapien
catactgcttagcagcttcagaata

SEQ ID NO: 4983024 - DNA, 25 bp, Homo sapien
aatcccacggaggacgtcgtattct

SEQ ID NO: 4983025 - DNA, 25 bp, Homo sapien
gtattctccaattgatctatacagc

SEQ ID NO: 4983026 - DNA, 25 bp, Homo sapien
tatctcactggtaaaaatcccacgg

SEQ ID NO: 4983027 - DNA, 25 bp, Homo sapien
gaggacgtcgtattctccaattgat

SEQ ID NO: 4983028 - DNA, 25 bp, Homo sapien
gtaggctggccaggcaaccagcgct

SEQ ID NO: 4983029 - DNA, 25 bp, Homo sapien
ttagcaagctccacccatctgagga

SEQ ID NO: 4983030 - DNA, 25 bp, Homo sapien
ctaacagccgctgggtcgaggctca

SEQ ID NO: 4983031 - DNA, 25 bp, Homo sapien
ttcccacggactcgcttggcaggca

SEQ ID NO: 4983032 - DNA, 25 bp, Homo sapien
tactcatttgggaagtggtaaccca

SEQ ID NO: 4983033 - DNA, 25 bp, Homo sapien
tatatttgatgaagtgtgtgcagac

SEQ ID NO: 4983034 - DNA, 25 bp, Homo sapien
caccaggttatcaagagtctcaaca

SEQ ID NO: 4983035 - DNA, 25 bp, Homo sapien
tctcaacacgggaaacatagtgatg

SEQ ID NO: 4983036 - DNA, 25 bp, Homo sapien
tcttgaagcaacttttgagtgatgt

SEQ ID NO: 4983037 - DNA, 25 bp, Homo sapien
tcagacagtgtcttaaatttatcca

SEQ ID NO: 4983038 - DNA, 25 bp, Homo sapien
caagctgctaaagagctgttttgca

SEQ ID NO: 4983039 - DNA, 25 bp, Homo sapien
gaaaacgattgaagtcttgaagcaa

SEQ ID NO: 4983040 - DNA, 25 bp, Homo sapien
cctctcaattctatttggaaagact

SEQ ID NO: 4983041 - DNA, 25 bp, Homo sapien
aatcaccaatactatcagagcttgg

SEQ ID NO: 4983042 - DNA, 25 bp, Homo sapien
gaaaatacaaactgttgcaaacaca

SEQ ID NO: 4983043 - DNA, 25 bp, Homo sapien
caaagacaaattaggatctgaagca

SEQ ID NO: 4983044 - DNA, 25 bp, Homo sapien
ggaaggtctccgtgccggtagcttc

SEQ ID NO: 4983045 - DNA, 25 bp, Homo sapien
gaggctgctgtgcttgatctgaatg

SEQ ID NO: 4983046 - DNA, 25 bp, Homo sapien
gcttctgtacagaacgacctgggca

SEQ ID NO: 4983047 - DNA, 25 bp, Homo sapien
gaacgacctgggcatcctgcttcat

SEQ ID NO: 4983048 - DNA, 25 bp, Homo sapien
cctcataaaccgtctgcgcagtcgt

SEQ ID NO: 4983049 - DNA, 25 bp, Homo sapien
ctggcatacatcaaactgagcttct

SEQ ID NO: 4983050 - DNA, 25 bp, Homo sapien
tgcgcagtcgtagtaggtccgtccg

SEQ ID NO: 4983051 - DNA, 25 bp, Homo sapien
cttctctcgtttttgctcagcaacg

SEQ ID NO: 4983052 - DNA, 25 bp, Homo sapien
agcaggcccagttactccccgccgc

SEQ ID NO: 4983053 - DNA, 25 bp, Homo sapien
gagagggaaagcaggcccagttact

SEQ ID NO: 4983054 - DNA, 25 bp, Homo sapien
ggagagggaaagcaggcccagttac

SEQ ID NO: 4983055 - DNA, 25 bp, Homo sapien
ccagttactccccgccgcccagaca

SEQ ID NO: 4983056 - DNA, 25 bp, Homo sapien
agacaaaacctacaggtgccgcaga

SEQ ID NO: 4983057 - DNA, 25 bp, Homo sapien
gcagaggcagcgaccgggagcagga

SEQ ID NO: 4983058 - DNA, 25 bp, Homo sapien
cagcgaccgggagcaggagtgcagg

SEQ ID NO: 4983059 - DNA, 25 bp, Homo sapien
aaacctacaggtgccgcagaggcag

SEQ ID NO: 4983060 - DNA, 25 bp, Homo sapien
tgtggtcgaccagcgggtcagtgct

SEQ ID NO: 4983061 - DNA, 25 bp, Homo sapien
cccggtcagccaatcaaatgagctt

SEQ ID NO: 4983062 - DNA, 25 bp, Homo sapien
gccccactgacttcaagggtgctct

SEQ ID NO: 4983063 - DNA, 25 bp, Homo sapien
ggtcagtgctgctcccggtcagcca

SEQ ID NO: 4983064 - DNA, 25 bp, Homo sapien
gtgctgtatacatggccagcgggca

SEQ ID NO: 4983065 - DNA, 25 bp, Homo sapien
tcagggtgctgtatacatggccagc

SEQ ID NO: 4983066 - DNA, 25 bp, Homo sapien
aggtcagggtgctgtatacatggcc

SEQ ID NO: 4983067 - DNA, 25 bp, Homo sapien
acagaggtcagggtgctgtatacat

SEQ ID NO: 4983068 - DNA, 25 bp, Homo sapien
ctgtgtcagtgtgaagtcatgctgc

SEQ ID NO: 4983069 - DNA, 25 bp, Homo sapien
tcggaaacgccaatcagaatcaatg

SEQ ID NO: 4983070 - DNA, 25 bp, Homo sapien
gtgagaacagtacttcggaaacgcc

SEQ ID NO: 4983071 - DNA, 25 bp, Homo sapien
gtctccacaaacatcggagtgagaa

SEQ ID NO: 4983072 - DNA, 25 bp, Homo sapien
aaaagtgcacttctatcttaggaga

SEQ ID NO: 4983073 - DNA, 25 bp, Homo sapien
tctgacagaggatgctcgaacatgg

SEQ ID NO: 4983074 - DNA, 25 bp, Homo sapien
ttagtgccagcaaccggtccaaggt

SEQ ID NO: 4983075 - DNA, 25 bp, Homo sapien
tctgggctcatgctggtcatttcga

SEQ ID NO: 4983076 - DNA, 25 bp, Homo sapien
tctcatcgatcaatccttgaatcag

SEQ ID NO: 4983077 - DNA, 25 bp, Homo sapien
tgaagtccagggttctcatcgatca

SEQ ID NO: 4983078 - DNA, 25 bp, Homo sapien
gtccagggttctcatcgatcaatcc

SEQ ID NO: 4983079 - DNA, 25 bp, Homo sapien
aatcagcacatcttttgccaactta

SEQ ID NO: 4983080 - DNA, 25 bp, Homo sapien
ctgggagtcattatctgtctcactt

SEQ ID NO: 4983081 - DNA, 25 bp, Homo sapien
tacatttgttccctacatgttgtag

SEQ ID NO: 4983082 - DNA, 25 bp, Homo sapien
tatcatgaatccacatgagaatatt

SEQ ID NO: 4983083 - DNA, 25 bp, Homo sapien
cgaattccacaacggggttcagaag

SEQ ID NO: 4983084 - DNA, 25 bp, Homo sapien
tagaaggatgggaaacgaattccac

SEQ ID NO: 4983085 - DNA, 25 bp, Homo sapien
ccttgctctttaactggaagtacag

SEQ ID NO: 4983086 - DNA, 25 bp, Homo sapien
catgacttgaacgaagtccttgctc

SEQ ID NO: 4983087 - DNA, 25 bp, Homo sapien
tcattccctccacacgacaaagtac

SEQ ID NO: 4983088 - DNA, 25 bp, Homo sapien
cctccagacagagtgttttcaacac

SEQ ID NO: 4983089 - DNA, 25 bp, Homo sapien
tcctgccccgaaaggatccctggac

SEQ ID NO: 4983090 - DNA, 25 bp, Homo sapien
gaggagggccgaggaccctcctgcc

SEQ ID NO: 4983091 - DNA, 25 bp, Homo sapien
ccctcctgccccgaaaggatccctg

SEQ ID NO: 4983092 - DNA, 25 bp, Homo sapien
tgccccgaaaggatccctggacagc

SEQ ID NO: 4983093 - DNA, 25 bp, Homo sapien
gtttcgcaaccagttcacacagaga

SEQ ID NO: 4983094 - DNA, 25 bp, Homo sapien
cactttgttcaagcacacaataaac

SEQ ID NO: 4983095 - DNA, 25 bp, Homo sapien
cacacaataaacttgtcctccatag

SEQ ID NO: 4983096 - DNA, 25 bp, Homo sapien
ccatagtattctgatgttgcttcaa

SEQ ID NO: 4983097 - DNA, 25 bp, Homo sapien
cttacaaaggacatattattcacca

SEQ ID NO: 4983098 - DNA, 25 bp, Homo sapien
ctgctgcagcggcatacacttcttt

SEQ ID NO: 4983099 - DNA, 25 bp, Homo sapien
catatcgaagtataagtcctagaac

SEQ ID NO: 4983100 - DNA, 25 bp, Homo sapien
ttttctctccataacatatcgaagt

SEQ ID NO: 4983101 - DNA, 25 bp, Homo sapien
gctgtcccatcatgcagaaccgctg

SEQ ID NO: 4983102 - DNA, 25 bp, Homo sapien
gggtgcccgatgtcataaccagaaa

SEQ ID NO: 4983103 - DNA, 25 bp, Homo sapien
tcagcatgtacgtaagggtgcccga

SEQ ID NO: 4983104 - DNA, 25 bp, Homo sapien
tgtcatattgacagcctaagttgag

SEQ ID NO: 4983105 - DNA, 25 bp, Homo sapien
caggggactctgcaaggttatccca

SEQ ID NO: 4983106 - DNA, 25 bp, Homo sapien
tagcaggacaaggacaataaaatga

SEQ ID NO: 4983107 - DNA, 25 bp, Homo sapien
cagtgccgtctgtgtgaggaggctt

SEQ ID NO: 4983108 - DNA, 25 bp, Homo sapien
gaaagagcatactcccagtgccgtc

SEQ ID NO: 4983109 - DNA, 25 bp, Homo sapien
tgtctttagaattaggatctttacc

SEQ ID NO: 4983110 - DNA, 25 bp, Homo sapien
gaggcaggtcattggccatcacgat

SEQ ID NO: 4983111 - DNA, 25 bp, Homo sapien
gcaattgaatccctactgagttgtc

SEQ ID NO: 4983112 - DNA, 25 bp, Homo sapien
ccacactgtgggtcatagggaggca

SEQ ID NO: 4983113 - DNA, 25 bp, Homo sapien
cattaggaaattaagcaatcgattt

SEQ ID NO: 4983114 - DNA, 25 bp, Homo sapien
ggatggataaacaatccttccagca

SEQ ID NO: 4983115 - DNA, 25 bp, Homo sapien
taatttcaaggttgtgtctaaacac

SEQ ID NO: 4983116 - DNA, 25 bp, Homo sapien
ccagcactcgacaagggtctttata

SEQ ID NO: 4983117 - DNA, 25 bp, Homo sapien
gcctgtccatgaaagaatagtggcc

SEQ ID NO: 4983118 - DNA, 25 bp, Homo sapien
ggccactatctcaaccaccatgtag

SEQ ID NO: 4983119 - DNA, 25 bp, Homo sapien
gagtggccaagcctgtccatgaaag

SEQ ID NO: 4983120 - DNA, 25 bp, Homo sapien
taagccagtgcttcgcgtaagggcg

SEQ ID NO: 4983121 - DNA, 25 bp, Homo sapien
tgaagaatcaagtgagccccgagga

SEQ ID NO: 4983122 - DNA, 25 bp, Homo sapien
gaatgaccttctacggagccaagtg

SEQ ID NO: 4983123 - DNA, 25 bp, Homo sapien
tgaatgagcccaaccctctgcatag

SEQ ID NO: 4983124 - DNA, 25 bp, Homo sapien
ggatgtcctgacagactcgccatgt

SEQ ID NO: 4983125 - DNA, 25 bp, Homo sapien
ttaatggtactattggatttcccag

SEQ ID NO: 4983126 - DNA, 25 bp, Homo sapien
tcccagtttgccatggaggaatttc

SEQ ID NO: 4983127 - DNA, 25 bp, Homo sapien
gacggatatttaatggtactattgg

SEQ ID NO: 4983128 - DNA, 25 bp, Homo sapien
tctgtattaataacaagcttggcta

SEQ ID NO: 4983129 - DNA, 25 bp, Homo sapien
ctcttctccttgaggcgggcccagg

SEQ ID NO: 4983130 - DNA, 25 bp, Homo sapien
gcccaggcttctgtgcatgtgcttg

SEQ ID NO: 4983131 - DNA, 25 bp, Homo sapien
ccaggcttctgtgcatgtgcttgac

SEQ ID NO: 4983132 - DNA, 25 bp, Homo sapien
ttgaggcgggcccaggcttctgtgc

SEQ ID NO: 4983133 - DNA, 25 bp, Homo sapien
tccagcacatcatcatgcaccgtgg

SEQ ID NO: 4983134 - DNA, 25 bp, Homo sapien
gggcgccatgcactcatgccgattg

SEQ ID NO: 4983135 - DNA, 25 bp, Homo sapien
catgccgattgagctcgtccatctc

SEQ ID NO: 4983136 - DNA, 25 bp, Homo sapien
atcatgcaccgtggggtcccgctgc

SEQ ID NO: 4983137 - DNA, 25 bp, Homo sapien
tgggagctgtatgaatagctctgaa

SEQ ID NO: 4983138 - DNA, 25 bp, Homo sapien
tctgaactccggttgagaaatcaaa

SEQ ID NO: 4983139 - DNA, 25 bp, Homo sapien
ccgtctccgaaaacgaccagtggca

SEQ ID NO: 4983140 - DNA, 25 bp, Homo sapien
ccgaaaacgaccagtggcaggtcta

SEQ ID NO: 4983141 - DNA, 25 bp, Homo sapien
ctgccaaatatgacagggaagacat

SEQ ID NO: 4983142 - DNA, 25 bp, Homo sapien
ctgaatccccatttgctgcttctct

SEQ ID NO: 4983143 - DNA, 25 bp, Homo sapien
ctggcttctttcctaatttcaatgt

SEQ ID NO: 4983144 - DNA, 25 bp, Homo sapien
ctctggcttctttcctaatttcaat

SEQ ID NO: 4983145 - DNA, 25 bp, Homo sapien
gaatccccatttgctgcttctctgg

SEQ ID NO: 4983146 - DNA, 25 bp, Homo sapien
tagcggcgcttcaggtcgatcagat

SEQ ID NO: 4983147 - DNA, 25 bp, Homo sapien
tacaggaaaattatagcggcgcttc

SEQ ID NO: 4983148 - DNA, 25 bp, Homo sapien
attatagcggcgcttcaggtcgatc

SEQ ID NO: 4983149 - DNA, 25 bp, Homo sapien
caggaaaattatagcggcgcttcag

SEQ ID NO: 4983150 - DNA, 25 bp, Homo sapien
gtatgctgcacaatggtaaagtctt

SEQ ID NO: 4983151 - DNA, 25 bp, Homo sapien
cagatgacagatatggcgcagttgt

SEQ ID NO: 4983152 - DNA, 25 bp, Homo sapien
cagttgtatgctgcacaatggtaaa

SEQ ID NO: 4983153 - DNA, 25 bp, Homo sapien
tatggcgcagttgtatgctgcacaa

SEQ ID NO: 4983154 - DNA, 25 bp, Homo sapien
aggagaactccattaaaagacaagt

SEQ ID NO: 4983155 - DNA, 25 bp, Homo sapien
tttgtattgtttagaatgcctgtta

SEQ ID NO: 4983156 - DNA, 25 bp, Homo sapien
tgtttagaatgcctgttaaaaaata

SEQ ID NO: 4983157 - DNA, 25 bp, Homo sapien
tatttactaggaggagaactccatt

SEQ ID NO: 4983158 - DNA, 25 bp, Homo sapien
tgattccttagcatgaacatcatct

SEQ ID NO: 4983159 - DNA, 25 bp, Homo sapien
cgtctagaatcttatagtagcccat

SEQ ID NO: 4983160 - DNA, 25 bp, Homo sapien
tacacgagccatggaaaacttgatt

SEQ ID NO: 4983161 - DNA, 25 bp, Homo sapien
catctttgggaaggcgagaatacat

SEQ ID NO: 4983162 - DNA, 25 bp, Homo sapien
tacagtgccacagcagagtgaggag

SEQ ID NO: 4983163 - DNA, 25 bp, Homo sapien
ttgtgctgaagaattctctcaaagc

SEQ ID NO: 4983164 - DNA, 25 bp, Homo sapien
tctctcaaagcatccaggctacagt

SEQ ID NO: 4983165 - DNA, 25 bp, Homo sapien
tgtaaacctggacttcaacacatca

SEQ ID NO: 4983166 - DNA, 25 bp, Homo sapien
tccagaaggcctacttgtgtgacac

SEQ ID NO: 4983167 - DNA, 25 bp, Homo sapien
tccttcctgaacatttcatacacgc

SEQ ID NO: 4983168 - DNA, 25 bp, Homo sapien
tacacgctttccagaaggcctactt

SEQ ID NO: 4983169 - DNA, 25 bp, Homo sapien
atttcatacacgctttccagaaggc

SEQ ID NO: 4983170 - DNA, 25 bp, Homo sapien
aagaacttctgtcatcaattccaac

SEQ ID NO: 4983171 - DNA, 25 bp, Homo sapien
atgacatgctgctgttcccgacaaa

SEQ ID NO: 4983172 - DNA, 25 bp, Homo sapien
tttgagataattccaatgcatctag

SEQ ID NO: 4983173 - DNA, 25 bp, Homo sapien
caacatagggctttgagataattcc

SEQ ID NO: 4983174 - DNA, 25 bp, Homo sapien
gatgttctcatcttgactctcccct

SEQ ID NO: 4983175 - DNA, 25 bp, Homo sapien
tgagagtacatggagacgtgccttc

SEQ ID NO: 4983176 - DNA, 25 bp, Homo sapien
tctggtaatgtgcatcttttccaca

SEQ ID NO: 4983177 - DNA, 25 bp, Homo sapien
gactctcgcccttactctgattctg

SEQ ID NO: 4983178 - DNA, 25 bp, Homo sapien
tattgaaccgcggagttcctggagg

SEQ ID NO: 4983179 - DNA, 25 bp, Homo sapien
ctttttcatgcagtccacataatta

SEQ ID NO: 4983180 - DNA, 25 bp, Homo sapien
tccacataattattgaaccgcggag

SEQ ID NO: 4983181 - DNA, 25 bp, Homo sapien
ctggaggaaattccctggactgcat

SEQ ID NO: 4983182 - DNA, 25 bp, Homo sapien
acacgtctaagttcctccagactgc

SEQ ID NO: 4983183 - DNA, 25 bp, Homo sapien
tgagctgctccagaacacgtctaag

SEQ ID NO: 4983184 - DNA, 25 bp, Homo sapien
tgctccagaacacgtctaagttcct

SEQ ID NO: 4983185 - DNA, 25 bp, Homo sapien
ccagaacacgtctaagttcctccag

SEQ ID NO: 4983186 - DNA, 25 bp, Homo sapien
taaatgggacatggtgctgattcgg

SEQ ID NO: 4983187 - DNA, 25 bp, Homo sapien
gagttgactcctgttctccctcgca

SEQ ID NO: 4983188 - DNA, 25 bp, Homo sapien
caagactgtctatggagaaatggga

SEQ ID NO: 4983189 - DNA, 25 bp, Homo sapien
ggagtttacaactacacattgcaga

SEQ ID NO: 4983190 - DNA, 25 bp, Homo sapien
ctttaaatgtagatccagctttgtg

SEQ ID NO: 4983191 - DNA, 25 bp, Homo sapien
gacttcagggaatgaaccatgactt

SEQ ID NO: 4983192 - DNA, 25 bp, Homo sapien
gctttgtgtcagcaagtagactaat

SEQ ID NO: 4983193 - DNA, 25 bp, Homo sapien
tgaaccatgacttgtattaaaagat

SEQ ID NO: 4983194 - DNA, 25 bp, Homo sapien
tttgctcgctccctgaagctctggt

SEQ ID NO: 4983195 - DNA, 25 bp, Homo sapien
cactgccattttagtttcgagaggg

SEQ ID NO: 4983196 - DNA, 25 bp, Homo sapien
taaaatttttgccagtaaggccagc

SEQ ID NO: 4983197 - DNA, 25 bp, Homo sapien
tccagtgttgcagaattgtagtcgc

SEQ ID NO: 4983198 - DNA, 25 bp, Homo sapien
gacaatttcgttgtgagtgaagaaa

SEQ ID NO: 4983199 - DNA, 25 bp, Homo sapien
caatttcgttgtgagtgaagaaaaa

SEQ ID NO: 4983200 - DNA, 25 bp, Homo sapien
ctgagacaatttcgttgtgagtgaa

SEQ ID NO: 4983201 - DNA, 25 bp, Homo sapien
gagacaatttcgttgtgagtgaaga

SEQ ID NO: 4983202 - DNA, 25 bp, Homo sapien
ttttaatttctgatgcctatgctta

SEQ ID NO: 4983203 - DNA, 25 bp, Homo sapien
tgatgcctatgcttaattcccaaga

SEQ ID NO: 4983204 - DNA, 25 bp, Homo sapien
tctgatgcctatgcttaattcccaa

SEQ ID NO: 4983205 - DNA, 25 bp, Homo sapien
aatttctgatgcctatgcttaattc

SEQ ID NO: 4983206 - DNA, 25 bp, Homo sapien
ggatattctggtgccctgccaaggg

SEQ ID NO: 4983207 - DNA, 25 bp, Homo sapien
tgacccagctggctatgatgcctgc

SEQ ID NO: 4983208 - DNA, 25 bp, Homo sapien
tctcttagggcttgtcaggatattc

SEQ ID NO: 4983209 - DNA, 25 bp, Homo sapien
gaggatcactgtcactgacccagct

SEQ ID NO: 4983210 - DNA, 25 bp, Homo sapien
tgcatgagctccaatacagcaagat

SEQ ID NO: 4983211 - DNA, 25 bp, Homo sapien
agaagtggatgacgctgccctgtga

SEQ ID NO: 4983212 - DNA, 25 bp, Homo sapien
aagctatagaaatactccccatggg

SEQ ID NO: 4983213 - DNA, 25 bp, Homo sapien
ggagaagactcacaaggcgctcaca

SEQ ID NO: 4983214 - DNA, 25 bp, Homo sapien
ggaaagaagttctgtgccaacagaa

SEQ ID NO: 4983215 - DNA, 25 bp, Homo sapien
aggggcaatgcctttataaaccagg

SEQ ID NO: 4983216 - DNA, 25 bp, Homo sapien
tgcttacaactgaggtctagagaag

SEQ ID NO: 4983217 - DNA, 25 bp, Homo sapien
aactccagaagtccgctggccagct

SEQ ID NO: 4983218 - DNA, 25 bp, Homo sapien
caagttgacggcacaaagctcctca

SEQ ID NO: 4983219 - DNA, 25 bp, Homo sapien
cacttgcgcgtcagggccatacaag

SEQ ID NO: 4983220 - DNA, 25 bp, Homo sapien
gggccatacaagttgacggcacaaa

SEQ ID NO: 4983221 - DNA, 25 bp, Homo sapien
tgctcctgtccacttgcgcgtcagg

SEQ ID NO: 4983222 - DNA, 25 bp, Homo sapien
tatgcttgcgggctcacacagcgtc

SEQ ID NO: 4983223 - DNA, 25 bp, Homo sapien
gaagatgagccataacctggacgtc

SEQ ID NO: 4983224 - DNA, 25 bp, Homo sapien
ggacgtctccgatgttgaaacctat

SEQ ID NO: 4983225 - DNA, 25 bp, Homo sapien
gatgggtctctaggatatctttgta

SEQ ID NO: 4983226 - DNA, 25 bp, Homo sapien
tttgctgtagttgtacctttctccc

SEQ ID NO: 4983227 - DNA, 25 bp, Homo sapien
ttagcagagtcgtggtaaactccat

SEQ ID NO: 4983228 - DNA, 25 bp, Homo sapien
tgtgggcttgttctgttacctgctg

SEQ ID NO: 4983229 - DNA, 25 bp, Homo sapien
gaccacaacggtgcatttgctgtag

SEQ ID NO: 4983230 - DNA, 25 bp, Homo sapien
actgctttcaaaagtgaagactggg

SEQ ID NO: 4983231 - DNA, 25 bp, Homo sapien
aaaagtgaagactgggcttcagtac

SEQ ID NO: 4983232 - DNA, 25 bp, Homo sapien
tcaaaagtgaagactgggcttcagt

SEQ ID NO: 4983233 - DNA, 25 bp, Homo sapien
ctttcaaaagtgaagactgggcttc

SEQ ID NO: 4983234 - DNA, 25 bp, Homo sapien
catcatgtcgctgggattctgacct

SEQ ID NO: 4983235 - DNA, 25 bp, Homo sapien
gacacacaccagaataaggcaaggg

SEQ ID NO: 4983236 - DNA, 25 bp, Homo sapien
agcacgacacacaccagaataaggc

SEQ ID NO: 4983237 - DNA, 25 bp, Homo sapien
cgacacacaccagaataaggcaagg

SEQ ID NO: 4983238 - DNA, 25 bp, Homo sapien
cacgacacacaccagaataaggcaa

SEQ ID NO: 4983239 - DNA, 25 bp, Homo sapien
ctaggacctggagcgctcctacagt

SEQ ID NO: 4983240 - DNA, 25 bp, Homo sapien
gctcctacagttctctcgccaatga

SEQ ID NO: 4983241 - DNA, 25 bp, Homo sapien
caggtccagccagcatagcgtggcc

SEQ ID NO: 4983242 - DNA, 25 bp, Homo sapien
ccaatgaacgtgttgtagcactcca

SEQ ID NO: 4983243 - DNA, 25 bp, Homo sapien
tgaatggcccccgaagtacaagagg

SEQ ID NO: 4983244 - DNA, 25 bp, Homo sapien
agccacccccctcaaaggtgttgat

SEQ ID NO: 4983245 - DNA, 25 bp, Homo sapien
ctgaatggcccccgaagtacaagag

SEQ ID NO: 4983246 - DNA, 25 bp, Homo sapien
cacagccacccccctcaaaggtgtt

SEQ ID NO: 4983247 - DNA, 25 bp, Homo sapien
cttgagaacatctttcagccacaaa

SEQ ID NO: 4983248 - DNA, 25 bp, Homo sapien
agccacaaattaggggatctgttgc

SEQ ID NO: 4983249 - DNA, 25 bp, Homo sapien
cttccttgagaacatctttcagcca

SEQ ID NO: 4983250 - DNA, 25 bp, Homo sapien
tccttgagaacatctttcagccaca

SEQ ID NO: 4983251 - DNA, 25 bp, Homo sapien
gatttgtgtcgacattctgtctggg

SEQ ID NO: 4983252 - DNA, 25 bp, Homo sapien
gagctaaaagccacttgaccagatc

SEQ ID NO: 4983253 - DNA, 25 bp, Homo sapien
caatgatgcggaaggtggaaatcct

SEQ ID NO: 4983254 - DNA, 25 bp, Homo sapien
gggcctcccacaatgagctaaaagc

SEQ ID NO: 4983255 - DNA, 25 bp, Homo sapien
ccaatgaactaaactgatatcgtaa

SEQ ID NO: 4983256 - DNA, 25 bp, Homo sapien
taaatccaaattatctggccctacc

SEQ ID NO: 4983257 - DNA, 25 bp, Homo sapien
cagctgttccaacattacctgtgca

SEQ ID NO: 4983258 - DNA, 25 bp, Homo sapien
ttgcaatataccttgtaaagcagtg

SEQ ID NO: 4983259 - DNA, 25 bp, Homo sapien
tggcggtcactagcatggataacag

SEQ ID NO: 4983260 - DNA, 25 bp, Homo sapien
gataacagatgtccccagataccct

SEQ ID NO: 4983261 - DNA, 25 bp, Homo sapien
cagataccctgcagagatctggagg

SEQ ID NO: 4983262 - DNA, 25 bp, Homo sapien
gggcactcaccctactggagaaggc

SEQ ID NO: 4983263 - DNA, 25 bp, Homo sapien
ggcataggtgatcaatggcatcaca

SEQ ID NO: 4983264 - DNA, 25 bp, Homo sapien
ttcttttcaatgatgcggcataggt

SEQ ID NO: 4983265 - DNA, 25 bp, Homo sapien
tgatgcggcataggtgatcaatggc

SEQ ID NO: 4983266 - DNA, 25 bp, Homo sapien
cgcggcaaacgtcgtttctttgctt

SEQ ID NO: 4983267 - DNA, 25 bp, Homo sapien
ctcaagtacagagacatatttccaa

SEQ ID NO: 4983268 - DNA, 25 bp, Homo sapien
ttctcaagtacagagacatatttcc

SEQ ID NO: 4983269 - DNA, 25 bp, Homo sapien
atatttccaaagaaggcatatatag

SEQ ID NO: 4983270 - DNA, 25 bp, Homo sapien
ctgttctcaagtacagagacatatt

SEQ ID NO: 4983271 - DNA, 25 bp, Homo sapien
acacgagccttaactcctcattggg

SEQ ID NO: 4983272 - DNA, 25 bp, Homo sapien
ctcctcattggggaaactcttcaga

SEQ ID NO: 4983273 - DNA, 25 bp, Homo sapien
tcacacgagccttaactcctcattg

SEQ ID NO: 4983274 - DNA, 25 bp, Homo sapien
cttaactcctcattggggaaactct

SEQ ID NO: 4983275 - DNA, 25 bp, Homo sapien
aaactgttccaccagagactcttct

SEQ ID NO: 4983276 - DNA, 25 bp, Homo sapien
tcaaacacaaactgttccaccagag

SEQ ID NO: 4983277 - DNA, 25 bp, Homo sapien
atgtgctaaggccagactctccatg

SEQ ID NO: 4983278 - DNA, 25 bp, Homo sapien
cagactctccatgtatatcaccaag

SEQ ID NO: 4983279 - DNA, 25 bp, Homo sapien
tattaaaggcaagtgatgctcccag

SEQ ID NO: 4983280 - DNA, 25 bp, Homo sapien
taaggaattctcgaatacaccgacc

SEQ ID NO: 4983281 - DNA, 25 bp, Homo sapien
tgtcaacagggtccacaattccatc

SEQ ID NO: 4983282 - DNA, 25 bp, Homo sapien
tgaagcgcaaggctataaagtcgct

SEQ ID NO: 4983283 - DNA, 25 bp, Homo sapien
gaatcagctgcataactagtggctc

SEQ ID NO: 4983284 - DNA, 25 bp, Homo sapien
caatatagcttctagtaaggcaaca

SEQ ID NO: 4983285 - DNA, 25 bp, Homo sapien
tgttagtgaaccagtgaatcagctg

SEQ ID NO: 4983286 - DNA, 25 bp, Homo sapien
tagtggctcatacagttgccttgtc

SEQ ID NO: 4983287 - DNA, 25 bp, Homo sapien
gatacattccatcggccatttacat

SEQ ID NO: 4983288 - DNA, 25 bp, Homo sapien
cattctccagactttacagaggatc

SEQ ID NO: 4983289 - DNA, 25 bp, Homo sapien
cgttttgaaatgctacgagtctact

SEQ ID NO: 4983290 - DNA, 25 bp, Homo sapien
cacagacagatatgctatgtggtca

SEQ ID NO: 4983291 - DNA, 25 bp, Homo sapien
tttgattgccaagtgccaagtgctg

SEQ ID NO: 4983292 - DNA, 25 bp, Homo sapien
tactggcccgctgacaagtgtcttt

SEQ ID NO: 4983293 - DNA, 25 bp, Homo sapien
ctggagaggaagcaaggaacaccag

SEQ ID NO: 4983294 - DNA, 25 bp, Homo sapien
taactaactccaagtaaagcactga

SEQ ID NO: 4983295 - DNA, 25 bp, Homo sapien
gcagcacaggaaacgtccgcttata

SEQ ID NO: 4983296 - DNA, 25 bp, Homo sapien
tccgcttatagagctggtacatggg

SEQ ID NO: 4983297 - DNA, 25 bp, Homo sapien
tggcatctgcgtggctttgcccaac

SEQ ID NO: 4983298 - DNA, 25 bp, Homo sapien
acatcacacgcaagtcgaagcagca

SEQ ID NO: 4983299 - DNA, 25 bp, Homo sapien
tctctaaagggcactgcaaagctca

SEQ ID NO: 4983300 - DNA, 25 bp, Homo sapien
tctaaagggcactgcaaagctcagc

SEQ ID NO: 4983301 - DNA, 25 bp, Homo sapien
gtcactggctgtgagcgctaattct

SEQ ID NO: 4983302 - DNA, 25 bp, Homo sapien
cactggctgtgagcgctaattctgt

SEQ ID NO: 4983303 - DNA, 25 bp, Homo sapien
ttgtttatttgtcctcctagagatc

SEQ ID NO: 4983304 - DNA, 25 bp, Homo sapien
ctagagatccaagcatttgtactac

SEQ ID NO: 4983305 - DNA, 25 bp, Homo sapien
ttgtcctcctagagatccaagcatt

SEQ ID NO: 4983306 - DNA, 25 bp, Homo sapien
gatccaagcatttgtactactctaa

SEQ ID NO: 4983307 - DNA, 25 bp, Homo sapien
tatggctcatctcgagaaaacttgc

SEQ ID NO: 4983308 - DNA, 25 bp, Homo sapien
tactatcacatcgtatggctcatct

SEQ ID NO: 4983309 - DNA, 25 bp, Homo sapien
aacttgccccaaggaattatcacca

SEQ ID NO: 4983310 - DNA, 25 bp, Homo sapien
tacgtcatattttactatcacatcg

SEQ ID NO: 4983311 - DNA, 25 bp, Homo sapien
ctgacttgcttatttaatatgaacc

SEQ ID NO: 4983312 - DNA, 25 bp, Homo sapien
gcttatttaatatgaaccagtttac

SEQ ID NO: 4983313 - DNA, 25 bp, Homo sapien
taccttttattatccactaaataca

SEQ ID NO: 4983314 - DNA, 25 bp, Homo sapien
ccctggtatcagtattctgacttgc

SEQ ID NO: 4983315 - DNA, 25 bp, Homo sapien
acaagtgttagaatctgatctctgc

SEQ ID NO: 4983316 - DNA, 25 bp, Homo sapien
ctgatctctgcattatgtaaggtac

SEQ ID NO: 4983317 - DNA, 25 bp, Homo sapien
gtactctactttgtatacaaaaaca

SEQ ID NO: 4983318 - DNA, 25 bp, Homo sapien
ctgcattatgtaaggtacagaaaat

SEQ ID NO: 4983319 - DNA, 25 bp, Homo sapien
gatgctttaacaccactttattaaa

SEQ ID NO: 4983320 - DNA, 25 bp, Homo sapien
tgggcagcccgagaaagagctgaca

SEQ ID NO: 4983321 - DNA, 25 bp, Homo sapien
gcagcccgagaaagagctgacactt

SEQ ID NO: 4983322 - DNA, 25 bp, Homo sapien
ccgagaaagagctgacacttcccag

SEQ ID NO: 4983323 - DNA, 25 bp, Homo sapien
gtaatttcatacgtggtctctccat

SEQ ID NO: 4983324 - DNA, 25 bp, Homo sapien
tgattagactcaggttatgggaacc

SEQ ID NO: 4983325 - DNA, 25 bp, Homo sapien
cactgccccgaatgcttcaatgtgt

SEQ ID NO: 4983326 - DNA, 25 bp, Homo sapien
gaagcactgagggtaagtgaccgac

SEQ ID NO: 4983327 - DNA, 25 bp, Homo sapien
cataatatattttcccggccccagg

SEQ ID NO: 4983328 - DNA, 25 bp, Homo sapien
tgaataggtccttactttccggatg

SEQ ID NO: 4983329 - DNA, 25 bp, Homo sapien
caagtcatcactacttttgcctgtg

SEQ ID NO: 4983330 - DNA, 25 bp, Homo sapien
caggttggaaccaaggagtcctggt

SEQ ID NO: 4983331 - DNA, 25 bp, Homo sapien
tttgcaaagcagtgtattaggagtc

SEQ ID NO: 4983332 - DNA, 25 bp, Homo sapien
tctttatcacaattagagtcagata

SEQ ID NO: 4983333 - DNA, 25 bp, Homo sapien
tcttagtaagctataagtgagtaaa

SEQ ID NO: 4983334 - DNA, 25 bp, Homo sapien
cattttaattacaatacacatcaca

SEQ ID NO: 4983335 - DNA, 25 bp, Homo sapien
cattcaggcctacttctgccaaggg

SEQ ID NO: 4983336 - DNA, 25 bp, Homo sapien
tgtcaatataaattgaccattcttc

SEQ ID NO: 4983337 - DNA, 25 bp, Homo sapien
gggtatagctcaggcccagtttgaa

SEQ ID NO: 4983338 - DNA, 25 bp, Homo sapien
taaggctgcattacatgtctgtcaa

SEQ ID NO: 4983339 - DNA, 25 bp, Homo sapien
tttattactggatgcccgacaccgc

SEQ ID NO: 4983340 - DNA, 25 bp, Homo sapien
caagggtctaagtcccaaagccagt

SEQ ID NO: 4983341 - DNA, 25 bp, Homo sapien
gagatggctctgttcaagacaacgc

SEQ ID NO: 4983342 - DNA, 25 bp, Homo sapien
cacaacagcgatgaagagatggctc

SEQ ID NO: 4983343 - DNA, 25 bp, Homo sapien
cgagttcaatgatgttgtgtggcaa

SEQ ID NO: 4983344 - DNA, 25 bp, Homo sapien
ggccaaaagttcatctttgtactgc

SEQ ID NO: 4983345 - DNA, 25 bp, Homo sapien
ctgcagtgcaggaacgtaggctcta

SEQ ID NO: 4983346 - DNA, 25 bp, Homo sapien
ggctctaacatcgagttcaatgatg

SEQ ID NO: 4983347 - DNA, 25 bp, Homo sapien
ttcaggagagtgtttcagactcttt

SEQ ID NO: 4983348 - DNA, 25 bp, Homo sapien
cttcaggagagtgtttcagactctt

SEQ ID NO: 4983349 - DNA, 25 bp, Homo sapien
aggagagtgtttcagactctttgga

SEQ ID NO: 4983350 - DNA, 25 bp, Homo sapien
tgagtacacccatggttcaaaaaat

SEQ ID NO: 4983351 - DNA, 25 bp, Homo sapien
tatgaaaatgagtacacccatggtt

SEQ ID NO: 4983352 - DNA, 25 bp, Homo sapien
aaaatgagtacacccatggttcaaa

SEQ ID NO: 4983353 - DNA, 25 bp, Homo sapien
tttcttactgtaatagaaagcaatt

SEQ ID NO: 4983354 - DNA, 25 bp, Homo sapien
ttgggatcatccaaacaccaggcgc

SEQ ID NO: 4983355 - DNA, 25 bp, Homo sapien
ttagccgctggatctgaagttggga

SEQ ID NO: 4983356 - DNA, 25 bp, Homo sapien
gtttagctggatgcaagttagccgc

SEQ ID NO: 4983357 - DNA, 25 bp, Homo sapien
aattccaccaggttaatgaaagccg

SEQ ID NO: 4983358 - DNA, 25 bp, Homo sapien
caataaagctgatgtgaccaccggc

SEQ ID NO: 4983359 - DNA, 25 bp, Homo sapien
tggagtccagttaccaccaatgcct

SEQ ID NO: 4983360 - DNA, 25 bp, Homo sapien
gagagcaataaaccacacatcagtg

SEQ ID NO: 4983361 - DNA, 25 bp, Homo sapien
ggtactgacgcatgaactcgaatca

SEQ ID NO: 4983362 - DNA, 25 bp, Homo sapien
caaaacggattttacaaattcatca

SEQ ID NO: 4983363 - DNA, 25 bp, Homo sapien
tcaaaacggattttacaaattcatc

SEQ ID NO: 4983364 - DNA, 25 bp, Homo sapien
gactttcactggaggaattcacaga

SEQ ID NO: 4983365 - DNA, 25 bp, Homo sapien
ttcagactttcactggaggaattca

SEQ ID NO: 4983366 - DNA, 25 bp, Homo sapien
agtctttgtatgtgggcaccttcca

SEQ ID NO: 4983367 - DNA, 25 bp, Homo sapien
tgaagcacggtggtcttcagattca

SEQ ID NO: 4983368 - DNA, 25 bp, Homo sapien
tcagagctcaggagatgtctgaaga

SEQ ID NO: 4983369 - DNA, 25 bp, Homo sapien
atttgccagttctgacttcccctga

SEQ ID NO: 4983370 - DNA, 25 bp, Homo sapien
actgctgccagaacatgctggtttt

SEQ ID NO: 4983371 - DNA, 25 bp, Homo sapien
tatgtagtgatggattctcagaagc

SEQ ID NO: 4983372 - DNA, 25 bp, Homo sapien
gtagtgatggattctcagaagcagc

SEQ ID NO: 4983373 - DNA, 25 bp, Homo sapien
atatgtagtgatggattctcagaag

SEQ ID NO: 4983374 - DNA, 25 bp, Homo sapien
gaccactggtttagaacatattctg

SEQ ID NO: 4983375 - DNA, 25 bp, Homo sapien
gaacatattctgattaaaccctgat

SEQ ID NO: 4983376 - DNA, 25 bp, Homo sapien
ttggaaggaccactggtttagaaca

SEQ ID NO: 4983377 - DNA, 25 bp, Homo sapien
acatattctgattaaaccctgatgc

SEQ ID NO: 4983378 - DNA, 25 bp, Homo sapien
ggcccttttgctgccaaagctagga

SEQ ID NO: 4983379 - DNA, 25 bp, Homo sapien
ctaggaacaccttcactatggctct

SEQ ID NO: 4983380 - DNA, 25 bp, Homo sapien
gtactaatgcaattcctgagaactg

SEQ ID NO: 4983381 - DNA, 25 bp, Homo sapien
ttttgctgccaaagctaggaacacc

SEQ ID NO: 4983382 - DNA, 25 bp, Homo sapien
tgtctatctgcatcaccacgaggtg

SEQ ID NO: 4983383 - DNA, 25 bp, Homo sapien
ttttggactgtactgtgggaaactg

SEQ ID NO: 4983384 - DNA, 25 bp, Homo sapien
tcaccacgaggtgctccagaactgg

SEQ ID NO: 4983385 - DNA, 25 bp, Homo sapien
gaactggagtatacacctcaggaac

SEQ ID NO: 4983386 - DNA, 25 bp, Homo sapien
cgctgaatgagctcaacgtacatga

SEQ ID NO: 4983387 - DNA, 25 bp, Homo sapien
aagacgcttgcaacagactggagga

SEQ ID NO: 4983388 - DNA, 25 bp, Homo sapien
gaagcttggcatctgataaacacgg

SEQ ID NO: 4983389 - DNA, 25 bp, Homo sapien
tgtgtcaaggtacagcaagacgctt

SEQ ID NO: 4983390 - DNA, 25 bp, Homo sapien
catgtaaagaattctagtacacagc

SEQ ID NO: 4983391 - DNA, 25 bp, Homo sapien
cctaagggttaggagattttgagat

SEQ ID NO: 4983392 - DNA, 25 bp, Homo sapien
tatgccttggttctgtcaattctga

SEQ ID NO: 4983393 - DNA, 25 bp, Homo sapien
tcttcacacttggacttatgccttg

SEQ ID NO: 4983394 - DNA, 25 bp, Homo sapien
caaaaagtccatatccacggatagc

SEQ ID NO: 4983395 - DNA, 25 bp, Homo sapien
gcatttttcgccaccatattagaaa

SEQ ID NO: 4983396 - DNA, 25 bp, Homo sapien
gcaatagataactccttgttgttcg

SEQ ID NO: 4983397 - DNA, 25 bp, Homo sapien
ccttgttgttcgaatccacatttct

SEQ ID NO: 4983398 - DNA, 25 bp, Homo sapien
tagcaatggaatctatacaaacatg

SEQ ID NO: 4983399 - DNA, 25 bp, Homo sapien
gcttagtctctatcaggttcagaaa

SEQ ID NO: 4983400 - DNA, 25 bp, Homo sapien
tactgttatagttacacgcaattgc

SEQ ID NO: 4983401 - DNA, 25 bp, Homo sapien
tttcctagagaagggactaagagac

SEQ ID NO: 4983402 - DNA, 25 bp, Homo sapien
acacgtagttgtccagaaggcaggt

SEQ ID NO: 4983403 - DNA, 25 bp, Homo sapien
catgcagggcaaataggcgcaagcc

SEQ ID NO: 4983404 - DNA, 25 bp, Homo sapien
ttcaattctacatttgtgtgggcac

SEQ ID NO: 4983405 - DNA, 25 bp, Homo sapien
gtgggcacaccactttaacaagact

SEQ ID NO: 4983406 - DNA, 25 bp, Homo sapien
ctgagggcacagcatatctcttcag

SEQ ID NO: 4983407 - DNA, 25 bp, Homo sapien
gagggcacagcatatctcttcagat

SEQ ID NO: 4983408 - DNA, 25 bp, Homo sapien
gggcacagcatatctcttcagatca

SEQ ID NO: 4983409 - DNA, 25 bp, Homo sapien
gcacagcatatctcttcagatcaat

SEQ ID NO: 4983410 - DNA, 25 bp, Homo sapien
ctgaggacgaattgcctttagtaca

SEQ ID NO: 4983411 - DNA, 25 bp, Homo sapien
gaggacgaattgcctttagtacaaa

SEQ ID NO: 4983412 - DNA, 25 bp, Homo sapien
tgaggacgaattgcctttagtacaa

SEQ ID NO: 4983413 - DNA, 25 bp, Homo sapien
tgaagttgcacagaagtgaggacaa

SEQ ID NO: 4983414 - DNA, 25 bp, Homo sapien
tagtttgggctctcttactgctgat

SEQ ID NO: 4983415 - DNA, 25 bp, Homo sapien
ccatggacttagtgaagttgcacag

SEQ ID NO: 4983416 - DNA, 25 bp, Homo sapien
catcctgccagaacaggtagtttgg

SEQ ID NO: 4983417 - DNA, 25 bp, Homo sapien
gaacttcacccaataatcctaggag

SEQ ID NO: 4983418 - DNA, 25 bp, Homo sapien
tcctaggagctcatatactttttct

SEQ ID NO: 4983419 - DNA, 25 bp, Homo sapien
gcgcggaacaggttttctgcattat

SEQ ID NO: 4983420 - DNA, 25 bp, Homo sapien
ttatcatctcactaggatgaacttc

SEQ ID NO: 4983421 - DNA, 25 bp, Homo sapien
tagaatttactaaataattctccaa

SEQ ID NO: 4983422 - DNA, 25 bp, Homo sapien
tcaatgcaagttctccatagaattt

SEQ ID NO: 4983423 - DNA, 25 bp, Homo sapien
ttttcaatgcaagttctccatagaa

SEQ ID NO: 4983424 - DNA, 25 bp, Homo sapien
aatgcaagttctccatagaatttac

SEQ ID NO: 4983425 - DNA, 25 bp, Homo sapien
gagtctagaacttctaaaagtctga

SEQ ID NO: 4983426 - DNA, 25 bp, Homo sapien
gtctagaacttctaaaagtctgaag

SEQ ID NO: 4983427 - DNA, 25 bp, Homo sapien
agtctagaacttctaaaagtctgaa

SEQ ID NO: 4983428 - DNA, 25 bp, Homo sapien
tatcttttgtataaacactggtaca

SEQ ID NO: 4983429 - DNA, 25 bp, Homo sapien
gaattttacatttagcagctctatc

SEQ ID NO: 4983430 - DNA, 25 bp, Homo sapien
atcttttgtataaacactggtacaa

SEQ ID NO: 4983431 - DNA, 25 bp, Homo sapien
ttttacatttagcagctctatcttt

SEQ ID NO: 4983432 - DNA, 25 bp, Homo sapien
gagtaaggtgcgatcttctggccca

SEQ ID NO: 4983433 - DNA, 25 bp, Homo sapien
cttaatttcaacagagtaaggtgcg

SEQ ID NO: 4983434 - DNA, 25 bp, Homo sapien
ttcaacagagtaaggtgcgatcttc

SEQ ID NO: 4983435 - DNA, 25 bp, Homo sapien
aactttaggatttcttctctacatt

SEQ ID NO: 4983436 - DNA, 25 bp, Homo sapien
gacaaatacaagcaaaccgaaatct

SEQ ID NO: 4983437 - DNA, 25 bp, Homo sapien
gagtgacttccggacaaatacaagc

SEQ ID NO: 4983438 - DNA, 25 bp, Homo sapien
ttcaatactgttgagtgacttccgg

SEQ ID NO: 4983439 - DNA, 25 bp, Homo sapien
caagcaaaccgaaatctctggaaaa

SEQ ID NO: 4983440 - DNA, 25 bp, Homo sapien
ttcccacccaggcattgctaaagag

SEQ ID NO: 4983441 - DNA, 25 bp, Homo sapien
aaagagttaaaagaacatgacttca

SEQ ID NO: 4983442 - DNA, 25 bp, Homo sapien
caaggtctgcatactcgtgttttaa

SEQ ID NO: 4983443 - DNA, 25 bp, Homo sapien
ttaatagggcacaacatcaaggtct

SEQ ID NO: 4983444 - DNA, 25 bp, Homo sapien
tccgcagcggacaaggtctcctgca

SEQ ID NO: 4983445 - DNA, 25 bp, Homo sapien
atcagttgatgaccggccagggcag

SEQ ID NO: 4983446 - DNA, 25 bp, Homo sapien
cccaggccgcggatcagttgatgac

SEQ ID NO: 4983447 - DNA, 25 bp, Homo sapien
ggagcaacgcacaccggctccggag

SEQ ID NO: 4983448 - DNA, 25 bp, Homo sapien
cgcgtgcgcccgctcggcccggacc

SEQ ID NO: 4983449 - DNA, 25 bp, Homo sapien
cgccgagtcccgctcccgcgcgtgc

SEQ ID NO: 4983450 - DNA, 25 bp, Homo sapien
gccgccgagtcccgctcccgcgcgt

SEQ ID NO: 4983451 - DNA, 25 bp, Homo sapien
ccgagtcccgctcccgcgcgtgcgc

SEQ ID NO: 4983452 - DNA, 25 bp, Homo sapien
aatatgcagagcacgcaaagcccct

SEQ ID NO: 4983453 - DNA, 25 bp, Homo sapien
tataacttgtccctcggaccctgag

SEQ ID NO: 4983454 - DNA, 25 bp, Homo sapien
tgcctgtctgtatcctcaaaaggcc

SEQ ID NO: 4983455 - DNA, 25 bp, Homo sapien
tcttgtgggtttcgttagtggccta

SEQ ID NO: 4983456 - DNA, 25 bp, Homo sapien
ctgcttgctgcacgccacatgggtg

SEQ ID NO: 4983457 - DNA, 25 bp, Homo sapien
acagtgactgggaagaccgtgcgct

SEQ ID NO: 4983458 - DNA, 25 bp, Homo sapien
tggccgccatcagtgtaaatagagc

SEQ ID NO: 4983459 - DNA, 25 bp, Homo sapien
tatggatttgatgacaggcatagcc

SEQ ID NO: 4983460 - DNA, 25 bp, Homo sapien
gaggagagatgtggtatctcaggtg

SEQ ID NO: 4983461 - DNA, 25 bp, Homo sapien
ggtggaggagagatgtggtatctca

SEQ ID NO: 4983462 - DNA, 25 bp, Homo sapien
aatagtgcacctgagaggcggcttg

SEQ ID NO: 4983463 - DNA, 25 bp, Homo sapien
caggtggagaaacaaccagggcagt

SEQ ID NO: 4983464 - DNA, 25 bp, Homo sapien
ggctgcgtgattttccgctccgacc

SEQ ID NO: 4983465 - DNA, 25 bp, Homo sapien
gagaagatggcggtctccacaggtc

SEQ ID NO: 4983466 - DNA, 25 bp, Homo sapien
gagaagcccgagtgcgctgtctcga

SEQ ID NO: 4983467 - DNA, 25 bp, Homo sapien
tgcgctgtctcgaatgccgcgctct

SEQ ID NO: 4983468 - DNA, 25 bp, Homo sapien
tcgttgaaacaagagtatagagcag

SEQ ID NO: 4983469 - DNA, 25 bp, Homo sapien
gctcggcctgatctgccttttccta

SEQ ID NO: 4983470 - DNA, 25 bp, Homo sapien
agagcagtgtgatttaatagtttat

SEQ ID NO: 4983471 - DNA, 25 bp, Homo sapien
tttaatagtttatgccatcattgca

SEQ ID NO: 4983472 - DNA, 25 bp, Homo sapien
cttgtcaagagtagcttgaggctgg

SEQ ID NO: 4983473 - DNA, 25 bp, Homo sapien
aaaaaataaggcttgtcaagagtag

SEQ ID NO: 4983474 - DNA, 25 bp, Homo sapien
taaggcttgtcaagagtagcttgag

SEQ ID NO: 4983475 - DNA, 25 bp, Homo sapien
aaaataaggcttgtcaagagtagct

SEQ ID NO: 4983476 - DNA, 25 bp, Homo sapien
ggttgtcttccccacgagatagtaa

SEQ ID NO: 4983477 - DNA, 25 bp, Homo sapien
atggttgtcttccccacgagatagt

SEQ ID NO: 4983478 - DNA, 25 bp, Homo sapien
caacatctgctgtcagtttatacat

SEQ ID NO: 4983479 - DNA, 25 bp, Homo sapien
tcttccccacgagatagtaatgtcc

SEQ ID NO: 4983480 - DNA, 25 bp, Homo sapien
aaaattaccttgcatgttggcatgc

SEQ ID NO: 4983481 - DNA, 25 bp, Homo sapien
gagttttgattaagccactgtgctc

SEQ ID NO: 4983482 - DNA, 25 bp, Homo sapien
cagtgagttttgattaagccactgt

SEQ ID NO: 4983483 - DNA, 25 bp, Homo sapien
taccttgcatgttggcatgcgactg

SEQ ID NO: 4983484 - DNA, 25 bp, Homo sapien
catgtccagccacccagcgagtttt

SEQ ID NO: 4983485 - DNA, 25 bp, Homo sapien
ccatgtccagccacccagcgagttt

SEQ ID NO: 4983486 - DNA, 25 bp, Homo sapien
accatgtccagccacccagcgagtt

SEQ ID NO: 4983487 - DNA, 25 bp, Homo sapien
taccatgtccagccacccagcgagt

SEQ ID NO: 4983488 - DNA, 25 bp, Homo sapien
tcaacaaccttctactcatgttaat

SEQ ID NO: 4983489 - DNA, 25 bp, Homo sapien
caaccttctactcatgttaatgtct

SEQ ID NO: 4983490 - DNA, 25 bp, Homo sapien
tactcatgttaatgtcttgattaaa

SEQ ID NO: 4983491 - DNA, 25 bp, Homo sapien
ccttctactcatgttaatgtcttga

SEQ ID NO: 4983492 - DNA, 25 bp, Homo sapien
ttttgaagcaatgtgggtgctgact

SEQ ID NO: 4983493 - DNA, 25 bp, Homo sapien
gtgaaagagagctgcagttgaaatt

SEQ ID NO: 4983494 - DNA, 25 bp, Homo sapien
aaacagaaatggcatgctttaccca

SEQ ID NO: 4983495 - DNA, 25 bp, Homo sapien
tcctgttaaaagctgttcttgtgtg

SEQ ID NO: 4983496 - DNA, 25 bp, Homo sapien
gagaggacgcccctgcacgtcttgc

SEQ ID NO: 4983497 - DNA, 25 bp, Homo sapien
tctcaggttgggcacaattgctttg

SEQ ID NO: 4983498 - DNA, 25 bp, Homo sapien
taatttctgcccgtggtcaaaggtg

SEQ ID NO: 4983499 - DNA, 25 bp, Homo sapien
gaacagatatgcttctggatgtttg

SEQ ID NO: 4983500 - DNA, 25 bp, Homo sapien
tatgggtggatcctgctagaaccaa

SEQ ID NO: 4983501 - DNA, 25 bp, Homo sapien
gtttcattacgagcagcctttgtgt

SEQ ID NO: 4983502 - DNA, 25 bp, Homo sapien
gatgggaatagtttcattacgagca

SEQ ID NO: 4983503 - DNA, 25 bp, Homo sapien
ttatgggtggatcctgctagaacca

SEQ ID NO: 4983504 - DNA, 25 bp, Homo sapien
gcccaccagaaatatagacctttca

SEQ ID NO: 4983505 - DNA, 25 bp, Homo sapien
aatatagacctttcagtctccaggg

SEQ ID NO: 4983506 - DNA, 25 bp, Homo sapien
catgtaggggctagacaggtcctct

SEQ ID NO: 4983507 - DNA, 25 bp, Homo sapien
cagtctccagggtaaccatgtaggg

SEQ ID NO: 4983508 - DNA, 25 bp, Homo sapien
tgtcactgacagacaggagggtcac

SEQ ID NO: 4983509 - DNA, 25 bp, Homo sapien
accaatagtgtcactgacagacagg

SEQ ID NO: 4983510 - DNA, 25 bp, Homo sapien
caatagtgtcactgacagacaggag

SEQ ID NO: 4983511 - DNA, 25 bp, Homo sapien
tagtgtcactgacagacaggagggt

SEQ ID NO: 4983512 - DNA, 25 bp, Homo sapien
gcccagctgaggggtaatgataacc

SEQ ID NO: 4983513 - DNA, 25 bp, Homo sapien
cccagctgaggggtaatgataacct

SEQ ID NO: 4983514 - DNA, 25 bp, Homo sapien
atgcccagctgaggggtaatgataa

SEQ ID NO: 4983515 - DNA, 25 bp, Homo sapien
cagctgaggggtaatgataacctgg

SEQ ID NO: 4983516 - DNA, 25 bp, Homo sapien
gtgagctcccgggtgcacccagaac

SEQ ID NO: 4983517 - DNA, 25 bp, Homo sapien
cgctcccaggtcataggatgcggtg

SEQ ID NO: 4983518 - DNA, 25 bp, Homo sapien
tctgaatccgctcccaggtcatagg

SEQ ID NO: 4983519 - DNA, 25 bp, Homo sapien
aggtcataggatgcggtgagctccc

SEQ ID NO: 4983520 - DNA, 25 bp, Homo sapien
gccagggtgggcttaagtagccgtg

SEQ ID NO: 4983521 - DNA, 25 bp, Homo sapien
gggtgggcttaagtagccgtgggca

SEQ ID NO: 4983522 - DNA, 25 bp, Homo sapien
caggccagggtgggcttaagtagcc

SEQ ID NO: 4983523 - DNA, 25 bp, Homo sapien
cagggtgggcttaagtagccgtggg

SEQ ID NO: 4983524 - DNA, 25 bp, Homo sapien
cagcggaaagggtggagctttatgc

SEQ ID NO: 4983525 - DNA, 25 bp, Homo sapien
gcggaaagggtggagctttatgcat

SEQ ID NO: 4983526 - DNA, 25 bp, Homo sapien
ctgacagcggaaagggtggagcttt

SEQ ID NO: 4983527 - DNA, 25 bp, Homo sapien
tgacagcggaaagggtggagcttta

SEQ ID NO: 4983528 - DNA, 25 bp, Homo sapien
taaagtagtacctgcaaaaagccca

SEQ ID NO: 4983529 - DNA, 25 bp, Homo sapien
tgaaggcaatagctggaggtgacca

SEQ ID NO: 4983530 - DNA, 25 bp, Homo sapien
tgtttcttctgacctggtagtgaag

SEQ ID NO: 4983531 - DNA, 25 bp, Homo sapien
taatctgggtgagtaatggtgtcac

SEQ ID NO: 4983532 - DNA, 25 bp, Homo sapien
tctgttggcggaagacatgcggcga

SEQ ID NO: 4983533 - DNA, 25 bp, Homo sapien
tgtagttctgagtctgttggcggaa

SEQ ID NO: 4983534 - DNA, 25 bp, Homo sapien
aagacatgcggcgaggtggagccag

SEQ ID NO: 4983535 - DNA, 25 bp, Homo sapien
atgcggcgaggtggagccagcctgg

SEQ ID NO: 4983536 - DNA, 25 bp, Homo sapien
gggaggcagggatgagggttcagaa

SEQ ID NO: 4983537 - DNA, 25 bp, Homo sapien
gaggcagggatgagggttcagaaac

SEQ ID NO: 4983538 - DNA, 25 bp, Homo sapien
gtgggaggcagggatgagggttcag

SEQ ID NO: 4983539 - DNA, 25 bp, Homo sapien
ctgtgggaggcagggatgagggttc

SEQ ID NO: 4983540 - DNA, 25 bp, Homo sapien
taccgttgacactctctgcatgtgc

SEQ ID NO: 4983541 - DNA, 25 bp, Homo sapien
cagacgcgctgatgtcgactgctga

SEQ ID NO: 4983542 - DNA, 25 bp, Homo sapien
caaggtggctgatgacagacgcgct

SEQ ID NO: 4983543 - DNA, 25 bp, Homo sapien
caagtgggtggcacactgaacagcg

SEQ ID NO: 4983544 - DNA, 25 bp, Homo sapien
ctggcttcccgttgttttccttcag

SEQ ID NO: 4983545 - DNA, 25 bp, Homo sapien
tctggcttcccgttgttttccttca

SEQ ID NO: 4983546 - DNA, 25 bp, Homo sapien
gtccgacagagcctgccatcgtggc

SEQ ID NO: 4983547 - DNA, 25 bp, Homo sapien
tggacctgtggcttagtaggtccga

SEQ ID NO: 4983548 - DNA, 25 bp, Homo sapien
ttagtaggtccgacagagcctgcca

SEQ ID NO: 4983549 - DNA, 25 bp, Homo sapien
tgtggcttagtaggtccgacagagc

SEQ ID NO: 4983550 - DNA, 25 bp, Homo sapien
ttcatcattcaaaagttctagtcgt

SEQ ID NO: 4983551 - DNA, 25 bp, Homo sapien
tagtcgtccacacatagtaagcctt

SEQ ID NO: 4983552 - DNA, 25 bp, Homo sapien
caaaagttctagtcgtccacacata

SEQ ID NO: 4983553 - DNA, 25 bp, Homo sapien
cattcaaaagttctagtcgtccaca

SEQ ID NO: 4983554 - DNA, 25 bp, Homo sapien
gaaaccctccatcaaaggttgactc

SEQ ID NO: 4983555 - DNA, 25 bp, Homo sapien
ccctccatcaaaggttgactctcac

SEQ ID NO: 4983556 - DNA, 25 bp, Homo sapien
accctccatcaaaggttgactctca

SEQ ID NO: 4983557 - DNA, 25 bp, Homo sapien
aaaccctccatcaaaggttgactct

SEQ ID NO: 4983558 - DNA, 25 bp, Homo sapien
tccttcatggagtgacctgcattgg

SEQ ID NO: 4983559 - DNA, 25 bp, Homo sapien
ccaaggaattggttgcttcatgcct

SEQ ID NO: 4983560 - DNA, 25 bp, Homo sapien
gactttttatccatgtccttcatgg

SEQ ID NO: 4983561 - DNA, 25 bp, Homo sapien
tctgctcttgcacggttagtttcat

SEQ ID NO: 4983562 - DNA, 25 bp, Homo sapien
taaaaagtcgaattctcaaagagca

SEQ ID NO: 4983563 - DNA, 25 bp, Homo sapien
aaagtcgaattctcaaagagcaagt

SEQ ID NO: 4983564 - DNA, 25 bp, Homo sapien
ctcaaagagcaagtgcgttccagac

SEQ ID NO: 4983565 - DNA, 25 bp, Homo sapien
agagtaagatattaaaaagtcgaat

SEQ ID NO: 4983566 - DNA, 25 bp, Homo sapien
gagtgtcctgagagagtttccggtc

SEQ ID NO: 4983567 - DNA, 25 bp, Homo sapien
cagagtgtcctgagagagtttccgg

SEQ ID NO: 4983568 - DNA, 25 bp, Homo sapien
gtgcctgcagacccctggcagtccc

SEQ ID NO: 4983569 - DNA, 25 bp, Homo sapien
tcctgagagagtttccggtctgtgg

SEQ ID NO: 4983570 - DNA, 25 bp, Homo sapien
gctgtatgtttctggcggcacagaa

SEQ ID NO: 4983571 - DNA, 25 bp, Homo sapien
gttgctatttctctcaatatgaaca

SEQ ID NO: 4983572 - DNA, 25 bp, Homo sapien
gcatctctggcaggtcgttgctatt

SEQ ID NO: 4983573 - DNA, 25 bp, Homo sapien
aataaagcgcagaggaagcatattc

SEQ ID NO: 4983574 - DNA, 25 bp, Homo sapien
tgggggggcacaggtgctggactgg

SEQ ID NO: 4983575 - DNA, 25 bp, Homo sapien
catgagccatgccagcagcttgggc

SEQ ID NO: 4983576 - DNA, 25 bp, Homo sapien
aggcctgaggcatgagccatgccag

SEQ ID NO: 4983577 - DNA, 25 bp, Homo sapien
cctgaggcatgagccatgccagcag

SEQ ID NO: 4983578 - DNA, 25 bp, Homo sapien
gtggatgctgaatatgagggtgtca

SEQ ID NO: 4983579 - DNA, 25 bp, Homo sapien
ggtggatgctgaatatgagggtgtc

SEQ ID NO: 4983580 - DNA, 25 bp, Homo sapien
gagattcagaatagccttgcttccc

SEQ ID NO: 4983581 - DNA, 25 bp, Homo sapien
agattcagaatagccttgcttcccc

SEQ ID NO: 4983582 - DNA, 25 bp, Homo sapien
ctcagtgtaatagagaaagctcctt

SEQ ID NO: 4983583 - DNA, 25 bp, Homo sapien
caagctctgagctacttgactcagt

SEQ ID NO: 4983584 - DNA, 25 bp, Homo sapien
tccggtgtaaaccaagctctgagct

SEQ ID NO: 4983585 - DNA, 25 bp, Homo sapien
agtctctccatgagctccggtgtaa

SEQ ID NO: 4983586 - DNA, 25 bp, Homo sapien
cagaagctaggtgaacgacagagcc

SEQ ID NO: 4983587 - DNA, 25 bp, Homo sapien
taggtgaacgacagagcccccacgg

SEQ ID NO: 4983588 - DNA, 25 bp, Homo sapien
gctaggtgaacgacagagcccccac

SEQ ID NO: 4983589 - DNA, 25 bp, Homo sapien
gaagctaggtgaacgacagagcccc

SEQ ID NO: 4983590 - DNA, 25 bp, Homo sapien
tctcgcgaggaaagcccttcttagg

SEQ ID NO: 4983591 - DNA, 25 bp, Homo sapien
tcaaattctcccacggccacatcgg

SEQ ID NO: 4983592 - DNA, 25 bp, Homo sapien
ccacggccacatcggggataaaagg

SEQ ID NO: 4983593 - DNA, 25 bp, Homo sapien
cttgctgtgcacagcgaggcggcat

SEQ ID NO: 4983594 - DNA, 25 bp, Homo sapien
aagcggagatgggccatgggaagcc

SEQ ID NO: 4983595 - DNA, 25 bp, Homo sapien
ctggaagcggagatgggccatggga

SEQ ID NO: 4983596 - DNA, 25 bp, Homo sapien
ggaagcggagatgggccatgggaag

SEQ ID NO: 4983597 - DNA, 25 bp, Homo sapien
agcggagatgggccatgggaagcct

SEQ ID NO: 4983598 - DNA, 25 bp, Homo sapien
gaaggcgccccaaatgtttgtagga

SEQ ID NO: 4983599 - DNA, 25 bp, Homo sapien
gccctgtgcgtcttgcttggcagcc

SEQ ID NO: 4983600 - DNA, 25 bp, Homo sapien
gtgcagctcccggtgattagaaggc

SEQ ID NO: 4983601 - DNA, 25 bp, Homo sapien
caccgctattggtgcagctcccggt

SEQ ID NO: 4983602 - DNA, 25 bp, Homo sapien
gctccattaatacgggcctgaaccc

SEQ ID NO: 4983603 - DNA, 25 bp, Homo sapien
tacagctccattaatacgggcctga

SEQ ID NO: 4983604 - DNA, 25 bp, Homo sapien
gagggcgggtactgtacagctccat

SEQ ID NO: 4983605 - DNA, 25 bp, Homo sapien
ctgtacagctccattaatacgggcc

SEQ ID NO: 4983606 - DNA, 25 bp, Homo sapien
gcataaggccgggacctccggtcat

SEQ ID NO: 4983607 - DNA, 25 bp, Homo sapien
gagggacagtcagtcgcataaggcc

SEQ ID NO: 4983608 - DNA, 25 bp, Homo sapien
agtcagtcgcataaggccgggacct

SEQ ID NO: 4983609 - DNA, 25 bp, Homo sapien
gccaggagggacagtcagtcgcata

SEQ ID NO: 4983610 - DNA, 25 bp, Homo sapien
ttgcttgcccaaaagccggctaccg

SEQ ID NO: 4983611 - DNA, 25 bp, Homo sapien
gggttggcacgggattgccagtgtg

SEQ ID NO: 4983612 - DNA, 25 bp, Homo sapien
ttctgtttccttgcactggggttgg

SEQ ID NO: 4983613 - DNA, 25 bp, Homo sapien
taggggctgccaagacactcatttc

SEQ ID NO: 4983614 - DNA, 25 bp, Homo sapien
tccgagtctccgcagtctctgttct

SEQ ID NO: 4983615 - DNA, 25 bp, Homo sapien
cactaccagaggataaggacattta

SEQ ID NO: 4983616 - DNA, 25 bp, Homo sapien
aggacatttagcctccgagtctccg

SEQ ID NO: 4983617 - DNA, 25 bp, Homo sapien
tctccgcagtctctgttctgctgtc

SEQ ID NO: 4983618 - DNA, 25 bp, Homo sapien
ggaggtagtggccagtgtgcccagg

SEQ ID NO: 4983619 - DNA, 25 bp, Homo sapien
actgtccttgtggaaaccttctcca

SEQ ID NO: 4983620 - DNA, 25 bp, Homo sapien
gacactgtccttgtggaaaccttct

SEQ ID NO: 4983621 - DNA, 25 bp, Homo sapien
ccagtgtgcccaggttctgatgttg

SEQ ID NO: 4983622 - DNA, 25 bp, Homo sapien
accggctctcgctgcccagcatgca

SEQ ID NO: 4983623 - DNA, 25 bp, Homo sapien
caaagatggccctttagtgaagaca

SEQ ID NO: 4983624 - DNA, 25 bp, Homo sapien
tagtgaagacaactgttagaacaca

SEQ ID NO: 4983625 - DNA, 25 bp, Homo sapien
caactgttagaacacagtcacttgc

SEQ ID NO: 4983626 - DNA, 25 bp, Homo sapien
aatgtcaaacacagggcttggttct

SEQ ID NO: 4983627 - DNA, 25 bp, Homo sapien
agggcttggttctcttttagagtca

SEQ ID NO: 4983628 - DNA, 25 bp, Homo sapien
atgtcaaacacagggcttggttctc

SEQ ID NO: 4983629 - DNA, 25 bp, Homo sapien
ctattcaaggagggggcgaaggaag

SEQ ID NO: 4983630 - DNA, 25 bp, Homo sapien
aagctccataatcctcgctccttcc

SEQ ID NO: 4983631 - DNA, 25 bp, Homo sapien
ataatcctcgctccttccttagtgg

SEQ ID NO: 4983632 - DNA, 25 bp, Homo sapien
cacccctgaccccattaagctccat

SEQ ID NO: 4983633 - DNA, 25 bp, Homo sapien
acggcctggcacaacgtcctctctc

SEQ ID NO: 4983634 - DNA, 25 bp, Homo sapien
gggaacgagtggcctttctgctccc

SEQ ID NO: 4983635 - DNA, 25 bp, Homo sapien
ttctttgtcggggagggccacacaa

SEQ ID NO: 4983636 - DNA, 25 bp, Homo sapien
tcttctccaccgtaaatgcttgttg

SEQ ID NO: 4983637 - DNA, 25 bp, Homo sapien
cctccagaagcaccctcatggagcg

SEQ ID NO: 4983638 - DNA, 25 bp, Homo sapien
tgtcccgtaagcacaagggtggccc

SEQ ID NO: 4983639 - DNA, 25 bp, Homo sapien
caattcagtgtcaggtgtcccgtaa

SEQ ID NO: 4983640 - DNA, 25 bp, Homo sapien
ctgaggtgagtcctactggaggcca

SEQ ID NO: 4983641 - DNA, 25 bp, Homo sapien
cagacagtgtgcagagcatgagcaa

SEQ ID NO: 4983642 - DNA, 25 bp, Homo sapien
tttttacccgtgaaatctgcagcct

SEQ ID NO: 4983643 - DNA, 25 bp, Homo sapien
tcctgccgtgtaatgttgtttttac

SEQ ID NO: 4983644 - DNA, 25 bp, Homo sapien
ccttcctgccgtgtaatgttgtttt

SEQ ID NO: 4983645 - DNA, 25 bp, Homo sapien
atgttgtttttacccgtgaaatctg

SEQ ID NO: 4983646 - DNA, 25 bp, Homo sapien
tggtgtgaccatagaactctgtcgg

SEQ ID NO: 4983647 - DNA, 25 bp, Homo sapien
tctgaggcccagtagtgagggacac

SEQ ID NO: 4983648 - DNA, 25 bp, Homo sapien
tcctgctgtgctagggagacctctg

SEQ ID NO: 4983649 - DNA, 25 bp, Homo sapien
tgtgtttgcatgagggctgcagttc

SEQ ID NO: 4983650 - DNA, 25 bp, Homo sapien
catttttccacaagagaagcccatt

SEQ ID NO: 4983651 - DNA, 25 bp, Homo sapien
tcatctgtatgactggatctgagtg

SEQ ID NO: 4983652 - DNA, 25 bp, Homo sapien
tttatcatctgtatgactggatctg

SEQ ID NO: 4983653 - DNA, 25 bp, Homo sapien
tctgtatgactggatctgagtgtat

SEQ ID NO: 4983654 - DNA, 25 bp, Homo sapien
tgactggatctgagtgtatatgcta

SEQ ID NO: 4983655 - DNA, 25 bp, Homo sapien
tcttccatggaggatccctttcgac

SEQ ID NO: 4983656 - DNA, 25 bp, Homo sapien
catggaggatccctttcgactcttg

SEQ ID NO: 4983657 - DNA, 25 bp, Homo sapien
tctcttcttccatggaggatccctt

SEQ ID NO: 4983658 - DNA, 25 bp, Homo sapien
gatccctttcgactcttgcagtttg

SEQ ID NO: 4983659 - DNA, 25 bp, Homo sapien
catccacttgtattgctttctgtgc

SEQ ID NO: 4983660 - DNA, 25 bp, Homo sapien
ggtttcatccacttgtattgctttc

SEQ ID NO: 4983661 - DNA, 25 bp, Homo sapien
ggacaaagtagttgagccagggcat

SEQ ID NO: 4983662 - DNA, 25 bp, Homo sapien
aggacaaagtagttgagccagggca

SEQ ID NO: 4983663 - DNA, 25 bp, Homo sapien
tgggaaaagctatggacactgctca

SEQ ID NO: 4983664 - DNA, 25 bp, Homo sapien
taaccactgtaaggcaactactgag

SEQ ID NO: 4983665 - DNA, 25 bp, Homo sapien
tgcaggcaaggcacatgctcagaaa

SEQ ID NO: 4983666 - DNA, 25 bp, Homo sapien
tacctgaaggactagcatgaagcat

SEQ ID NO: 4983667 - DNA, 25 bp, Homo sapien
cgtggagatgcgtggcaagggcagc

SEQ ID NO: 4983668 - DNA, 25 bp, Homo sapien
attgtgagggagagcactgaagatt

SEQ ID NO: 4983669 - DNA, 25 bp, Homo sapien
ggattgtgagggagagcactgaaga

SEQ ID NO: 4983670 - DNA, 25 bp, Homo sapien
cagggttgggcgtggagatgcgtgg

SEQ ID NO: 4983671 - DNA, 25 bp, Homo sapien
gaagaagaaatcgtggggagagaac

SEQ ID NO: 4983672 - DNA, 25 bp, Homo sapien
aagaagaaatcgtggggagagaaca

SEQ ID NO: 4983673 - DNA, 25 bp, Homo sapien
ccacatccagaggtgtgtgaagcca

SEQ ID NO: 4983674 - DNA, 25 bp, Homo sapien
ggagcccaggcaccaattggcgtga

SEQ ID NO: 4983675 - DNA, 25 bp, Homo sapien
cagagcccagccaacggtaaatagg

SEQ ID NO: 4983676 - DNA, 25 bp, Homo sapien
gaactctccagttctggacccacat

SEQ ID NO: 4983677 - DNA, 25 bp, Homo sapien
tactcttgttggttggcggctttcg

SEQ ID NO: 4983678 - DNA, 25 bp, Homo sapien
tatccgttttgtgccgcgagctctt

SEQ ID NO: 4983679 - DNA, 25 bp, Homo sapien
gggaatcagaccgttcccgagcgcc

SEQ ID NO: 4983680 - DNA, 25 bp, Homo sapien
tacttcagctaaaccattgccactt

SEQ ID NO: 4983681 - DNA, 25 bp, Homo sapien
gcttcgtatgtgggtgcccgccacc

SEQ ID NO: 4983682 - DNA, 25 bp, Homo sapien
gccaacttggagagtctgcactttt

SEQ ID NO: 4983683 - DNA, 25 bp, Homo sapien
agtgcacggattcccaccgtgctgc

SEQ ID NO: 4983684 - DNA, 25 bp, Homo sapien
atgttgctgaatggcctttggctcc

SEQ ID NO: 4983685 - DNA, 25 bp, Homo sapien
ctttggtattagtttgggcttgcat

SEQ ID NO: 4983686 - DNA, 25 bp, Homo sapien
ttgcctctggtagaggccccagaag

SEQ ID NO: 4983687 - DNA, 25 bp, Homo sapien
gttcaacgagtttgtctaaaaatga

SEQ ID NO: 4983688 - DNA, 25 bp, Homo sapien
tgcctctggtagaggccccagaagg

SEQ ID NO: 4983689 - DNA, 25 bp, Homo sapien
gttgcctctggtagaggccccagaa

SEQ ID NO: 4983690 - DNA, 25 bp, Homo sapien
cgatcttcaaccaaaccctgtgttt

SEQ ID NO: 4983691 - DNA, 25 bp, Homo sapien
gtcactcgcctgttgtctggactcc

SEQ ID NO: 4983692 - DNA, 25 bp, Homo sapien
cagtcctcttatttaggaagctcgt

SEQ ID NO: 4983693 - DNA, 25 bp, Homo sapien
ctggcctccattgcacagctctggc

SEQ ID NO: 4983694 - DNA, 25 bp, Homo sapien
gggagccagaccgaggcacccagtc

SEQ ID NO: 4983695 - DNA, 25 bp, Homo sapien
ttgctgtggcgagcgtccgcgtcca

SEQ ID NO: 4983696 - DNA, 25 bp, Homo sapien
gtctgtagcactggaagatagactt

SEQ ID NO: 4983697 - DNA, 25 bp, Homo sapien
tggacacgcgccaatgtctgtagca

SEQ ID NO: 4983698 - DNA, 25 bp, Homo sapien
tgattcctaagctatgcaaggtgct

SEQ ID NO: 4983699 - DNA, 25 bp, Homo sapien
gattcggctgcaccagatcacactt

SEQ ID NO: 4983700 - DNA, 25 bp, Homo sapien
gatcacacttttccactcgagccat

SEQ ID NO: 4983701 - DNA, 25 bp, Homo sapien
ggcaggaagcgcaagagcaggatgt

SEQ ID NO: 4983702 - DNA, 25 bp, Homo sapien
gaagctcagcaggacccatttgaac

SEQ ID NO: 4983703 - DNA, 25 bp, Homo sapien
ggtcacccctgtacagtctctgagg

SEQ ID NO: 4983704 - DNA, 25 bp, Homo sapien
tgttttcgagaaatctggcctgtgc

SEQ ID NO: 4983705 - DNA, 25 bp, Homo sapien
cagcctgaagcggaatgatcttgca

SEQ ID NO: 4983706 - DNA, 25 bp, Homo sapien
cagagtgcaggccatcaattcccag

SEQ ID NO: 4983707 - DNA, 25 bp, Homo sapien
tcttgtgaagtagttgtgtgtaggg

SEQ ID NO: 4983708 - DNA, 25 bp, Homo sapien
tagggtattagctgttgggtttgat

SEQ ID NO: 4983709 - DNA, 25 bp, Homo sapien
tgaagtagttgtgtgtagggtatta

SEQ ID NO: 4983710 - DNA, 25 bp, Homo sapien
tagttgtgtgtagggtattagctgt

SEQ ID NO: 4983711 - DNA, 25 bp, Homo sapien
gatggcatgttgctcagtagagatg

SEQ ID NO: 4983712 - DNA, 25 bp, Homo sapien
catgcttaaacagccagtggcctct

SEQ ID NO: 4983713 - DNA, 25 bp, Homo sapien
ggcctctctcgggtatggcagtgac

SEQ ID NO: 4983714 - DNA, 25 bp, Homo sapien
cagttcctttgcataagatggcatg

SEQ ID NO: 4983715 - DNA, 25 bp, Homo sapien
gatggtaatgcaacgctcctgtctt

SEQ ID NO: 4983716 - DNA, 25 bp, Homo sapien
gagatggtaatgcaacgctcctgtc

SEQ ID NO: 4983717 - DNA, 25 bp, Homo sapien
gggagagatggtaatgcaacgctcc

SEQ ID NO: 4983718 - DNA, 25 bp, Homo sapien
taaattcggggagagatggtaatgc

SEQ ID NO: 4983719 - DNA, 25 bp, Homo sapien
agggagcagcgctcctgccctgagt

SEQ ID NO: 4983720 - DNA, 25 bp, Homo sapien
agtgagggagcagcgctcctgccct

SEQ ID NO: 4983721 - DNA, 25 bp, Homo sapien
ggagcagcgctcctgccctgagttc

SEQ ID NO: 4983722 - DNA, 25 bp, Homo sapien
agcagcgctcctgccctgagttcct

SEQ ID NO: 4983723 - DNA, 25 bp, Homo sapien
tctgcacaccttccgcagcgccact

SEQ ID NO: 4983724 - DNA, 25 bp, Homo sapien
gattccccacatcctactccacaga

SEQ ID NO: 4983725 - DNA, 25 bp, Homo sapien
ctggggctgaaaggcgctctgcaca

SEQ ID NO: 4983726 - DNA, 25 bp, Homo sapien
acaacaggcaaggtcgccgtgctgg

SEQ ID NO: 4983727 - DNA, 25 bp, Homo sapien
gctgcccgcccagtttctgtggtct

SEQ ID NO: 4983728 - DNA, 25 bp, Homo sapien
ctaaatgcataggatggctgtgtct

SEQ ID NO: 4983729 - DNA, 25 bp, Homo sapien
aggtggaactctcccagaggatgcc

SEQ ID NO: 4983730 - DNA, 25 bp, Homo sapien
tgagaggtggaactctcccagagga

SEQ ID NO: 4983731 - DNA, 25 bp, Homo sapien
tggaactctcccagaggatgcccct

SEQ ID NO: 4983732 - DNA, 25 bp, Homo sapien
gaggtggaactctcccagaggatgc

SEQ ID NO: 4983733 - DNA, 25 bp, Homo sapien
ttggagcgcagtccgtggcaggcag

SEQ ID NO: 4983734 - DNA, 25 bp, Homo sapien
tgttggagcgcagtccgtggcaggc

SEQ ID NO: 4983735 - DNA, 25 bp, Homo sapien
ctctgttggagcgcagtccgtggca

SEQ ID NO: 4983736 - DNA, 25 bp, Homo sapien
aggctctgttggagcgcagtccgtg

SEQ ID NO: 4983737 - DNA, 25 bp, Homo sapien
gaactgcttctatggggattcctaa

SEQ ID NO: 4983738 - DNA, 25 bp, Homo sapien
tatggggattcctaactcagctttc

SEQ ID NO: 4983739 - DNA, 25 bp, Homo sapien
ttctatggggattcctaactcagct

SEQ ID NO: 4983740 - DNA, 25 bp, Homo sapien
gattcctaactcagctttcagatgc

SEQ ID NO: 4983741 - DNA, 25 bp, Homo sapien
caagcttgcctgaattacctaatgg

SEQ ID NO: 4983742 - DNA, 25 bp, Homo sapien
ggttacatgtgtctgccaagagctg

SEQ ID NO: 4983743 - DNA, 25 bp, Homo sapien
aatggatgaccacaacaagtattgg

SEQ ID NO: 4983744 - DNA, 25 bp, Homo sapien
gctgaacctgttgctcatagagatg

SEQ ID NO: 4983745 - DNA, 25 bp, Homo sapien
acagaagccatgctgatctctccag

SEQ ID NO: 4983746 - DNA, 25 bp, Homo sapien
agaagccatgctgatctctccagca

SEQ ID NO: 4983747 - DNA, 25 bp, Homo sapien
agccatgctgatctctccagcattc

SEQ ID NO: 4983748 - DNA, 25 bp, Homo sapien
tgcacagaagccatgctgatctctc

SEQ ID NO: 4983749 - DNA, 25 bp, Homo sapien
ccatgtggcccgaaggaagagtact

SEQ ID NO: 4983750 - DNA, 25 bp, Homo sapien
ttgatttatgcaagagagcccctga

SEQ ID NO: 4983751 - DNA, 25 bp, Homo sapien
tctggtctcaatctaggaactttag

SEQ ID NO: 4983752 - DNA, 25 bp, Homo sapien
ggtctagccaaggagtgcgccatgt

SEQ ID NO: 4983753 - DNA, 25 bp, Homo sapien
aagcagccagtgacgcagttccatc

SEQ ID NO: 4983754 - DNA, 25 bp, Homo sapien
tgggaagagccatgcccacctgtac

SEQ ID NO: 4983755 - DNA, 25 bp, Homo sapien
acctgtacttccagtagcaggccca

SEQ ID NO: 4983756 - DNA, 25 bp, Homo sapien
cttgatcctgcaactggcaccatct

SEQ ID NO: 4983757 - DNA, 25 bp, Homo sapien
tcgcggcgacaaccgcgaagaggac

SEQ ID NO: 4983758 - DNA, 25 bp, Homo sapien
cgaagaggacttcccgcgagtgcgt

SEQ ID NO: 4983759 - DNA, 25 bp, Homo sapien
gttccacaaactgccacttgctggg

SEQ ID NO: 4983760 - DNA, 25 bp, Homo sapien
aggaagagccctcgcggcgacaacc

SEQ ID NO: 4983761 - DNA, 25 bp, Homo sapien
tgattcccagctcatccgagtggag

SEQ ID NO: 4983762 - DNA, 25 bp, Homo sapien
ccagctcatccgagtggagatttgg

SEQ ID NO: 4983763 - DNA, 25 bp, Homo sapien
tgtgattcccagctcatccgagtgg

SEQ ID NO: 4983764 - DNA, 25 bp, Homo sapien
agctcatccgagtggagatttgggc

SEQ ID NO: 4983765 - DNA, 25 bp, Homo sapien
tgcctcctcagggttttgaccgtta

SEQ ID NO: 4983766 - DNA, 25 bp, Homo sapien
agaaggaatccttccgagggtcgat

SEQ ID NO: 4983767 - DNA, 25 bp, Homo sapien
gagggtcgatttcacgtcctcgtac

SEQ ID NO: 4983768 - DNA, 25 bp, Homo sapien
caacatgacttgacgggcctttaat

SEQ ID NO: 4983769 - DNA, 25 bp, Homo sapien
ttgagggctagagcttccatgcagc

SEQ ID NO: 4983770 - DNA, 25 bp, Homo sapien
ccctagggatctgcggagtggcctt

SEQ ID NO: 4983771 - DNA, 25 bp, Homo sapien
catggagggcactgtgccatcccct

SEQ ID NO: 4983772 - DNA, 25 bp, Homo sapien
ccttctgcccttgcgggctgtgcct

SEQ ID NO: 4983773 - DNA, 25 bp, Homo sapien
aaataatcccagaagtgcaactcat

SEQ ID NO: 4983774 - DNA, 25 bp, Homo sapien
tctgtctttgaacacaacctgggcc

SEQ ID NO: 4983775 - DNA, 25 bp, Homo sapien
catcatagagacagtttgagctctt

SEQ ID NO: 4983776 - DNA, 25 bp, Homo sapien
ctgagcccaggtcctgtttctgtct

SEQ ID NO: 4983777 - DNA, 25 bp, Homo sapien
cagaagcccatagtgccagctctgg

SEQ ID NO: 4983778 - DNA, 25 bp, Homo sapien
tgcttctggacccggccagggccca

SEQ ID NO: 4983779 - DNA, 25 bp, Homo sapien
gaagcccatagtgccagctctggag

SEQ ID NO: 4983780 - DNA, 25 bp, Homo sapien
cagccagaagcccatagtgccagct

SEQ ID NO: 4983781 - DNA, 25 bp, Homo sapien
atgcaggcgtgggaagagtgtgtgc

SEQ ID NO: 4983782 - DNA, 25 bp, Homo sapien
aaatgcaggcgtgggaagagtgtgt

SEQ ID NO: 4983783 - DNA, 25 bp, Homo sapien
agaaatgcaggcgtgggaagagtgt

SEQ ID NO: 4983784 - DNA, 25 bp, Homo sapien
ccccagaaatgcaggcgtgggaaga

SEQ ID NO: 4983785 - DNA, 25 bp, Homo sapien
ttgccaaacaacccacttagccatg

SEQ ID NO: 4983786 - DNA, 25 bp, Homo sapien
gtttgccaaacaacccacttagcca

SEQ ID NO: 4983787 - DNA, 25 bp, Homo sapien
ctgggaaaggcataaggtgtgaggt

SEQ ID NO: 4983788 - DNA, 25 bp, Homo sapien
ctgtttgccaaacaacccacttagc

SEQ ID NO: 4983789 - DNA, 25 bp, Homo sapien
gtgagaattggacttcagtagttaa

SEQ ID NO: 4983790 - DNA, 25 bp, Homo sapien
gaattggacttcagtagttaactgt

SEQ ID NO: 4983791 - DNA, 25 bp, Homo sapien
ctcgaaaaacctgtgatctgtgaga

SEQ ID NO: 4983792 - DNA, 25 bp, Homo sapien
tcgaaaaacctgtgatctgtgagaa

SEQ ID NO: 4983793 - DNA, 25 bp, Homo sapien
gattgagggatgtaacccgtatagc

SEQ ID NO: 4983794 - DNA, 25 bp, Homo sapien
tgagggatgtaacccgtatagcgca

SEQ ID NO: 4983795 - DNA, 25 bp, Homo sapien
ggtcctgtgaggattgagggatgta

SEQ ID NO: 4983796 - DNA, 25 bp, Homo sapien
gggtcctgtgaggattgagggatgt

SEQ ID NO: 4983797 - DNA, 25 bp, Homo sapien
tactgggggatagaagctcaggagc

SEQ ID NO: 4983798 - DNA, 25 bp, Homo sapien
ctgttactgggggatagaagctcag

SEQ ID NO: 4983799 - DNA, 25 bp, Homo sapien
actgggggatagaagctcaggagct

SEQ ID NO: 4983800 - DNA, 25 bp, Homo sapien
cttctgttactgggggatagaagct

SEQ ID NO: 4983801 - DNA, 25 bp, Homo sapien
tgccatggtgtttcttcccagtcat

SEQ ID NO: 4983802 - DNA, 25 bp, Homo sapien
ccattgccatggtgtttcttcccag

SEQ ID NO: 4983803 - DNA, 25 bp, Homo sapien
ctgcaaaccattgccatggtgtttc

SEQ ID NO: 4983804 - DNA, 25 bp, Homo sapien
cattgccatggtgtttcttcccagt

SEQ ID NO: 4983805 - DNA, 25 bp, Homo sapien
aggccatgagcataggtgccaaggc

SEQ ID NO: 4983806 - DNA, 25 bp, Homo sapien
ggccaagtctaagacccatgccaca

SEQ ID NO: 4983807 - DNA, 25 bp, Homo sapien
agacatggccaagtctaagacccat

SEQ ID NO: 4983808 - DNA, 25 bp, Homo sapien
catacgctttgccaagaggcacaag

SEQ ID NO: 4983809 - DNA, 25 bp, Homo sapien
caagaaggtcgccccagaacacctg

SEQ ID NO: 4983810 - DNA, 25 bp, Homo sapien
gaagtaccttctcttaattccagga

SEQ ID NO: 4983811 - DNA, 25 bp, Homo sapien
cgaaagacagttgtctccaggaagt

SEQ ID NO: 4983812 - DNA, 25 bp, Homo sapien
cagaacacctgccattactggggct

SEQ ID NO: 4983813 - DNA, 25 bp, Homo sapien
ctgctggtggaaacaaggagtgtat

SEQ ID NO: 4983814 - DNA, 25 bp, Homo sapien
tggcgttcctccacgggactctccc

SEQ ID NO: 4983815 - DNA, 25 bp, Homo sapien
caggttccctatggcgttcctccac

SEQ ID NO: 4983816 - DNA, 25 bp, Homo sapien
ggaaacaaggagtgtatacccagga

SEQ ID NO: 4983817 - DNA, 25 bp, Homo sapien
aacaaacggcacttttatgagatcc

SEQ ID NO: 4983818 - DNA, 25 bp, Homo sapien
cagttaatttagcaccgtggccacg

SEQ ID NO: 4983819 - DNA, 25 bp, Homo sapien
gcctctcgatgggtcttgcactttg

SEQ ID NO: 4983820 - DNA, 25 bp, Homo sapien
gagatcctttcaaagcggctcccag

SEQ ID NO: 4983821 - DNA, 25 bp, Homo sapien
gtgaaagagtcgtggagcctgactt

SEQ ID NO: 4983822 - DNA, 25 bp, Homo sapien
ccaaagggtgcagatcacggctcct

SEQ ID NO: 4983823 - DNA, 25 bp, Homo sapien
aagagtcgtggagcctgactttcca

SEQ ID NO: 4983824 - DNA, 25 bp, Homo sapien
aaagggtgcagatcacggctcctgc

SEQ ID NO: 4983825 - DNA, 25 bp, Homo sapien
ctcccactggcttaagtggtaaagg

SEQ ID NO: 4983826 - DNA, 25 bp, Homo sapien
aggctctacaggcagcagatccagc

SEQ ID NO: 4983827 - DNA, 25 bp, Homo sapien
taaaggtaggtgttacatctttgaa

SEQ ID NO: 4983828 - DNA, 25 bp, Homo sapien
caggcccatccttggactggtcaca

SEQ ID NO: 4983829 - DNA, 25 bp, Homo sapien
ctgagacaaatagggctcactcctg

SEQ ID NO: 4983830 - DNA, 25 bp, Homo sapien
cacttgactgagacaaatagggctc

SEQ ID NO: 4983831 - DNA, 25 bp, Homo sapien
gccacacttgactgagacaaatagg

SEQ ID NO: 4983832 - DNA, 25 bp, Homo sapien
ttgactgagacaaatagggctcact

SEQ ID NO: 4983833 - DNA, 25 bp, Homo sapien
gtacctggcacacgaaatagcattc

SEQ ID NO: 4983834 - DNA, 25 bp, Homo sapien
ctggcacacgaaatagcattcagtt

SEQ ID NO: 4983835 - DNA, 25 bp, Homo sapien
tcttgcacagatacatgtacctggc

SEQ ID NO: 4983836 - DNA, 25 bp, Homo sapien
ttgcacagatacatgtacctggcac

SEQ ID NO: 4983837 - DNA, 25 bp, Homo sapien
tgaatgaagcctggtttttcgcagt

SEQ ID NO: 4983838 - DNA, 25 bp, Homo sapien
ttttcgcagttatcatcctctgact

SEQ ID NO: 4983839 - DNA, 25 bp, Homo sapien
ctctgactttatcatccccaaggaa

SEQ ID NO: 4983840 - DNA, 25 bp, Homo sapien
ctgggatggatcagcccttgagtct

SEQ ID NO: 4983841 - DNA, 25 bp, Homo sapien
aagcccagaccgcttttcgaagttg

SEQ ID NO: 4983842 - DNA, 25 bp, Homo sapien
ccagaccgcttttcgaagttgaatt

SEQ ID NO: 4983843 - DNA, 25 bp, Homo sapien
gcccagaccgcttttcgaagttgaa

SEQ ID NO: 4983844 - DNA, 25 bp, Homo sapien
cccagaccgcttttcgaagttgaat

SEQ ID NO: 4983845 - DNA, 25 bp, Homo sapien
attccagcagcagacccccaggagt

SEQ ID NO: 4983846 - DNA, 25 bp, Homo sapien
ctctctggagaggagctgtggaccc

SEQ ID NO: 4983847 - DNA, 25 bp, Homo sapien
ccccaggagtcctggcctgagagtg

SEQ ID NO: 4983848 - DNA, 25 bp, Homo sapien
aggagtcctggcctgagagtgagga

SEQ ID NO: 4983849 - DNA, 25 bp, Homo sapien
gatggaaaagctactctatgcaaat

SEQ ID NO: 4983850 - DNA, 25 bp, Homo sapien
aaattagagccccaaattacatgga

SEQ ID NO: 4983851 - DNA, 25 bp, Homo sapien
tattagtgggcatacaatgtataca

SEQ ID NO: 4983852 - DNA, 25 bp, Homo sapien
aacataaatgggcagcagttgagct

SEQ ID NO: 4983853 - DNA, 25 bp, Homo sapien
gatgccctgtaaggtggatcccgac

SEQ ID NO: 4983854 - DNA, 25 bp, Homo sapien
catttaatgcaagggacactcagcc

SEQ ID NO: 4983855 - DNA, 25 bp, Homo sapien
tcaatatgagacaatcagctgggcc

SEQ ID NO: 4983856 - DNA, 25 bp, Homo sapien
ttaaacccgtgtcagagcagatgct

SEQ ID NO: 4983857 - DNA, 25 bp, Homo sapien
gggagctgctctgttatgtacgaaa

SEQ ID NO: 4983858 - DNA, 25 bp, Homo sapien
agggagctgctctgttatgtacgaa

SEQ ID NO: 4983859 - DNA, 25 bp, Homo sapien
gctgctctgttatgtacgaaacccc

SEQ ID NO: 4983860 - DNA, 25 bp, Homo sapien
tctgttatgtacgaaaccccaacca

SEQ ID NO: 4983861 - DNA, 25 bp, Homo sapien
catttggaactccaaagcccagcat

SEQ ID NO: 4983862 - DNA, 25 bp, Homo sapien
aatgctcttcgtggatacaaatact

SEQ ID NO: 4983863 - DNA, 25 bp, Homo sapien
ccatttggaactccaaagcccagca

SEQ ID NO: 4983864 - DNA, 25 bp, Homo sapien
agcatcccacaaggacggacactca

SEQ ID NO: 4983865 - DNA, 25 bp, Homo sapien
gaaggctcctctgcgggctcccttg

SEQ ID NO: 4983866 - DNA, 25 bp, Homo sapien
ctacagcccggtgcctgcggagtat

SEQ ID NO: 4983867 - DNA, 25 bp, Homo sapien
cggagtattccgaacgcgagatcca

SEQ ID NO: 4983868 - DNA, 25 bp, Homo sapien
caaggaaaccacgaaggctcctctg

SEQ ID NO: 4983869 - DNA, 25 bp, Homo sapien
tgggcttgtgctcacacctgcgctg

SEQ ID NO: 4983870 - DNA, 25 bp, Homo sapien
aagggtctcccgagaatgtccaggg

SEQ ID NO: 4983871 - DNA, 25 bp, Homo sapien
catctttgcgggcagtgtccagtgg

SEQ ID NO: 4983872 - DNA, 25 bp, Homo sapien
ctgcggttcagtcgggagacgctca

SEQ ID NO: 4983873 - DNA, 25 bp, Homo sapien
gaaagcctcttacttgttcaaaaca

SEQ ID NO: 4983874 - DNA, 25 bp, Homo sapien
aggcctgtgctctcctgatcagtgg

SEQ ID NO: 4983875 - DNA, 25 bp, Homo sapien
aggaagcacagaggcactgaaagcc

SEQ ID NO: 4983876 - DNA, 25 bp, Homo sapien
gctgaattgtctgggtcaaccaggc

SEQ ID NO: 4983877 - DNA, 25 bp, Homo sapien
aacaagtagacaagtgaggatttgg

SEQ ID NO: 4983878 - DNA, 25 bp, Homo sapien
gttgatgtctgtgtaggtgaagttt

SEQ ID NO: 4983879 - DNA, 25 bp, Homo sapien
tgcaagaagtccaagactgccattc

SEQ ID NO: 4983880 - DNA, 25 bp, Homo sapien
ccaaaacaagtagacaagtgaggat

SEQ ID NO: 4983881 - DNA, 25 bp, Homo sapien
aggcagccgcatgcgagaagccgat

SEQ ID NO: 4983882 - DNA, 25 bp, Homo sapien
tgtttgtgtctctggtggacactgc

SEQ ID NO: 4983883 - DNA, 25 bp, Homo sapien
ggcacggtgaggcagccgcatgcga

SEQ ID NO: 4983884 - DNA, 25 bp, Homo sapien
tttgtgtctctggtggacactgcag

SEQ ID NO: 4983885 - DNA, 25 bp, Homo sapien
tccctgcctgagtataagaagagga

SEQ ID NO: 4983886 - DNA, 25 bp, Homo sapien
taaacggatagtccggggacagcgc

SEQ ID NO: 4983887 - DNA, 25 bp, Homo sapien
ggtgctcttgggatctgtactgaca

SEQ ID NO: 4983888 - DNA, 25 bp, Homo sapien
ctgtgaacaatggtgctcttgggat

SEQ ID NO: 4983889 - DNA, 25 bp, Homo sapien
caagagcagagcctgtcgtggcctc

SEQ ID NO: 4983890 - DNA, 25 bp, Homo sapien
gcagctttcccacaccgctgctgcc

SEQ ID NO: 4983891 - DNA, 25 bp, Homo sapien
tcctggagattgtgaaacctgttta

SEQ ID NO: 4983892 - DNA, 25 bp, Homo sapien
cctgtttattgagtgcgtttcacgg

SEQ ID NO: 4983893 - DNA, 25 bp, Homo sapien
ggcttcctggagattgtgaaacctg

SEQ ID NO: 4983894 - DNA, 25 bp, Homo sapien
acttcatcacgtggcccctttttca

SEQ ID NO: 4983895 - DNA, 25 bp, Homo sapien
gacttcatcacgtggcccctttttc

SEQ ID NO: 4983896 - DNA, 25 bp, Homo sapien
tgacttcatcacgtggccccttttt

SEQ ID NO: 4983897 - DNA, 25 bp, Homo sapien
ctgacttcatcacgtggcccctttt

SEQ ID NO: 4983898 - DNA, 25 bp, Homo sapien
tcaaaatacataaaaatttgtggaa

SEQ ID NO: 4983899 - DNA, 25 bp, Homo sapien
gtcaaaatacataaaaatttgtgga

SEQ ID NO: 4983900 - DNA, 25 bp, Homo sapien
tcagggccgcggaggcagtgtgcag

SEQ ID NO: 4983901 - DNA, 25 bp, Homo sapien
cgcctataggctcctcagttcctga

SEQ ID NO: 4983902 - DNA, 25 bp, Homo sapien
ttcctgagataagcggcgagggcac

SEQ ID NO: 4983903 - DNA, 25 bp, Homo sapien
agtgtgcagagctgcgcctataggc

SEQ ID NO: 4983904 - DNA, 25 bp, Homo sapien
actgtgatagtctctgcacctccga

SEQ ID NO: 4983905 - DNA, 25 bp, Homo sapien
cccgtgcaaggtgtggtcactccaa

SEQ ID NO: 4983906 - DNA, 25 bp, Homo sapien
gccaggaggaagactatggagctgc

SEQ ID NO: 4983907 - DNA, 25 bp, Homo sapien
ccttgaggaagagggcccgtgcaag

SEQ ID NO: 4983908 - DNA, 25 bp, Homo sapien
gcaagtacaaggcaaaacgccagca

SEQ ID NO: 4983909 - DNA, 25 bp, Homo sapien
tacaaggcaaaacgccagcatcatt

SEQ ID NO: 4983910 - DNA, 25 bp, Homo sapien
catcagatggcaagtacaaggcaaa

SEQ ID NO: 4983911 - DNA, 25 bp, Homo sapien
gatggcaagtacaaggcaaaacgcc

SEQ ID NO: 4983912 - DNA, 25 bp, Homo sapien
ccctgtgagggtagtcctgtgtgaa

SEQ ID NO: 4983913 - DNA, 25 bp, Homo sapien
gtgaagaacccatcatagccccaga

SEQ ID NO: 4983914 - DNA, 25 bp, Homo sapien
tcactcaggtcgctcaggcttctgt

SEQ ID NO: 4983915 - DNA, 25 bp, Homo sapien
tgagggtagtcctgtgtgaatccag

SEQ ID NO: 4983916 - DNA, 25 bp, Homo sapien
tgtaaaagtaggtccagaggcagtt

SEQ ID NO: 4983917 - DNA, 25 bp, Homo sapien
taaagagcctgggttgtatcctgca

SEQ ID NO: 4983918 - DNA, 25 bp, Homo sapien
aggcagcaacatcgcggttcaggaa

SEQ ID NO: 4983919 - DNA, 25 bp, Homo sapien
tattttatgcggaggatggctccct

SEQ ID NO: 4983920 - DNA, 25 bp, Homo sapien
gacatggcacttcagtaggacttca

SEQ ID NO: 4983921 - DNA, 25 bp, Homo sapien
cagatggccttgttgacttaggacc

SEQ ID NO: 4983922 - DNA, 25 bp, Homo sapien
gaaaaaccgtgtagctagaagcttc

SEQ ID NO: 4983923 - DNA, 25 bp, Homo sapien
tccggtagggtgacaatgattcgaa

SEQ ID NO: 4983924 - DNA, 25 bp, Homo sapien
tgagaagatccttgtgaaatgtcca

SEQ ID NO: 4983925 - DNA, 25 bp, Homo sapien
gagactggtgttgacttagaaaagc

SEQ ID NO: 4983926 - DNA, 25 bp, Homo sapien
taaaggctcgggctttaggatgcat

SEQ ID NO: 4983927 - DNA, 25 bp, Homo sapien
gcaggggtttgtttatagtgctcac

SEQ ID NO: 4983928 - DNA, 25 bp, Homo sapien
tatgaagcattccagtggacttgct

SEQ ID NO: 4983929 - DNA, 25 bp, Homo sapien
ttccagtggacttgctttgaaagct

SEQ ID NO: 4983930 - DNA, 25 bp, Homo sapien
ctatgaagcattccagtggacttgc

SEQ ID NO: 4983931 - DNA, 25 bp, Homo sapien
agcattccagtggacttgctttgaa

SEQ ID NO: 4983932 - DNA, 25 bp, Homo sapien
ttggtttcggaagtctgcagaggca

SEQ ID NO: 4983933 - DNA, 25 bp, Homo sapien
acaggcatttcccttgaagaggtca

SEQ ID NO: 4983934 - DNA, 25 bp, Homo sapien
gacggtttacccatagacaggcatt

SEQ ID NO: 4983935 - DNA, 25 bp, Homo sapien
gttctcatttcactcagacggttta

SEQ ID NO: 4983936 - DNA, 25 bp, Homo sapien
aaaaactggctggtctttcctcatg

SEQ ID NO: 4983937 - DNA, 25 bp, Homo sapien
tcagcagaaaaactggctggtcttt

SEQ ID NO: 4983938 - DNA, 25 bp, Homo sapien
gttccctaaggctcccgcacagagg

SEQ ID NO: 4983939 - DNA, 25 bp, Homo sapien
atggctggcacgtccgttccctaag

SEQ ID NO: 4983940 - DNA, 25 bp, Homo sapien
cacctcctctgggggatgctggcct

SEQ ID NO: 4983941 - DNA, 25 bp, Homo sapien
tctgggggatgctggcctggctgca

SEQ ID NO: 4983942 - DNA, 25 bp, Homo sapien
tggcctggctgcagcgtgggtccct

SEQ ID NO: 4983943 - DNA, 25 bp, Homo sapien
ctggcctggctgcagcgtgggtccc

SEQ ID NO: 4983944 - DNA, 25 bp, Homo sapien
atggctgtgaccagggaccgtggct

SEQ ID NO: 4983945 - DNA, 25 bp, Homo sapien
tataaaacgatgaggcatctccagg

SEQ ID NO: 4983946 - DNA, 25 bp, Homo sapien
cagcctcctaaggtgagggtctgga

SEQ ID NO: 4983947 - DNA, 25 bp, Homo sapien
ctcctatccgatatgcaaaccttgg

SEQ ID NO: 4983948 - DNA, 25 bp, Homo sapien
cctgctgactggacctgggaatttt

SEQ ID NO: 4983949 - DNA, 25 bp, Homo sapien
actgccctgctgactggacctggga

SEQ ID NO: 4983950 - DNA, 25 bp, Homo sapien
cccatttctcctgggtcggcctgcg

SEQ ID NO: 4983951 - DNA, 25 bp, Homo sapien
ggtcgaggtgccactgccctgctga

SEQ ID NO: 4983952 - DNA, 25 bp, Homo sapien
caaagtgagtctggttgctcaaacc

SEQ ID NO: 4983953 - DNA, 25 bp, Homo sapien
ctgtcttctttgagggcgctgccct

SEQ ID NO: 4983954 - DNA, 25 bp, Homo sapien
gctcaaacctcgtgccacaaagctg

SEQ ID NO: 4983955 - DNA, 25 bp, Homo sapien
cctttctggaagtttgggtgtagca

SEQ ID NO: 4983956 - DNA, 25 bp, Homo sapien
agatgctcttctgtttaacctctct

SEQ ID NO: 4983957 - DNA, 25 bp, Homo sapien
cctcctatggcgtgctcattctctg

SEQ ID NO: 4983958 - DNA, 25 bp, Homo sapien
taactagtctctgtcctcgttcatt

SEQ ID NO: 4983959 - DNA, 25 bp, Homo sapien
tctgacagtcactaactagtctctg

SEQ ID NO: 4983960 - DNA, 25 bp, Homo sapien
ttttagcatcgtcactgccatacat

SEQ ID NO: 4983961 - DNA, 25 bp, Homo sapien
tctgagttgtcattccttggtgcct

SEQ ID NO: 4983962 - DNA, 25 bp, Homo sapien
ctgtctgagttgtcattccttggtg

SEQ ID NO: 4983963 - DNA, 25 bp, Homo sapien
tgaacttttagcatcgtcactgcca

SEQ ID NO: 4983964 - DNA, 25 bp, Homo sapien
ccttcatgcaagctcgtctttgaca

SEQ ID NO: 4983965 - DNA, 25 bp, Homo sapien
cttcatgcaagctcgtctttgacat

SEQ ID NO: 4983966 - DNA, 25 bp, Homo sapien
tccttcatgcaagctcgtctttgac

SEQ ID NO: 4983967 - DNA, 25 bp, Homo sapien
tttctgcttcatcgtcccttgtaca

SEQ ID NO: 4983968 - DNA, 25 bp, Homo sapien
ctgtctttggtccacacagaaaaaa

SEQ ID NO: 4983969 - DNA, 25 bp, Homo sapien
cgtcccttgtacatctgccaggtaa

SEQ ID NO: 4983970 - DNA, 25 bp, Homo sapien
tcagcactgtctttggtccacacag

SEQ ID NO: 4983971 - DNA, 25 bp, Homo sapien
ctctggctctatgggtgaccaggca

SEQ ID NO: 4983972 - DNA, 25 bp, Homo sapien
acaggagctgtaccgcggccacctg

SEQ ID NO: 4983973 - DNA, 25 bp, Homo sapien
ctggactctggctctatgggtgacc

SEQ ID NO: 4983974 - DNA, 25 bp, Homo sapien
ggcacacaggagctgtaccgcggcc

SEQ ID NO: 4983975 - DNA, 25 bp, Homo sapien
gagctggactagcatggtccctggt

SEQ ID NO: 4983976 - DNA, 25 bp, Homo sapien
gactgccgtccagtgagctggacta

SEQ ID NO: 4983977 - DNA, 25 bp, Homo sapien
gtctgtggcatgcacatagtgaggc

SEQ ID NO: 4983978 - DNA, 25 bp, Homo sapien
tggtctgtggcatgcacatagtgag

SEQ ID NO: 4983979 - DNA, 25 bp, Homo sapien
tcctggttgggtcccataagggcac

SEQ ID NO: 4983980 - DNA, 25 bp, Homo sapien
tgggtcccataagggcaccgtgcat

SEQ ID NO: 4983981 - DNA, 25 bp, Homo sapien
tggacttcctggttgggtcccataa

SEQ ID NO: 4983982 - DNA, 25 bp, Homo sapien
aagggcaccgtgcattcctgagaca

SEQ ID NO: 4983983 - DNA, 25 bp, Homo sapien
gaggcaatggggcagctaacgtcaa

SEQ ID NO: 4983984 - DNA, 25 bp, Homo sapien
cgtcaatggtgcagctctgaccttc

SEQ ID NO: 4983985 - DNA, 25 bp, Homo sapien
gggcagctaacgtcaatggtgcagc

SEQ ID NO: 4983986 - DNA, 25 bp, Homo sapien
ggaagctttgctggagagagtgtat

SEQ ID NO: 4983987 - DNA, 25 bp, Homo sapien
acatctctggtgcagacacaccctg

SEQ ID NO: 4983988 - DNA, 25 bp, Homo sapien
tgttggataacatctctggtgcaga

SEQ ID NO: 4983989 - DNA, 25 bp, Homo sapien
gataacatctctggtgcagacacac

SEQ ID NO: 4983990 - DNA, 25 bp, Homo sapien
cttgtgttggataacatctctggtg

SEQ ID NO: 4983991 - DNA, 25 bp, Homo sapien
gactcgattgcaggctcttctgcca

SEQ ID NO: 4983992 - DNA, 25 bp, Homo sapien
tcctgccttggtagctatgaagtca

SEQ ID NO: 4983993 - DNA, 25 bp, Homo sapien
ttctagttctggtgaaccgactcga

SEQ ID NO: 4983994 - DNA, 25 bp, Homo sapien
tcactcttgctttgcgcagtctacg

SEQ ID NO: 4983995 - DNA, 25 bp, Homo sapien
tgcgggacagttgtattgacacact

SEQ ID NO: 4983996 - DNA, 25 bp, Homo sapien
ctgcgggacagttgtattgacacac

SEQ ID NO: 4983997 - DNA, 25 bp, Homo sapien
tgacgtgacacttgcattcctctgg

SEQ ID NO: 4983998 - DNA, 25 bp, Homo sapien
cagcactgttatgggatgacttaag

SEQ ID NO: 4983999 - DNA, 25 bp, Homo sapien
tcggaggtgactgttactactgggc

SEQ ID NO: 4984000 - DNA, 25 bp, Homo sapien
ggaaacctcacttatgtcatccctg

SEQ ID NO: 4984001 - DNA, 25 bp, Homo sapien
tcttgtctcagtctagaccactgat

SEQ ID NO: 4984002 - DNA, 25 bp, Homo sapien
taatttcttgtctcagtctagacca

SEQ ID NO: 4984003 - DNA, 25 bp, Homo sapien
tgatgggctgaattcctatgagtgg

SEQ ID NO: 4984004 - DNA, 25 bp, Homo sapien
tctagaccactgatgggctgaattc

SEQ ID NO: 4984005 - DNA, 25 bp, Homo sapien
tggtggttcaaggatgatctcgacc

SEQ ID NO: 4984006 - DNA, 25 bp, Homo sapien
cttgccttgaggtcagtggtggttc

SEQ ID NO: 4984007 - DNA, 25 bp, Homo sapien
gacactgtattatctcttatcacaa

SEQ ID NO: 4984008 - DNA, 25 bp, Homo sapien
gagagtcgtgaattccttcttcttg

SEQ ID NO: 4984009 - DNA, 25 bp, Homo sapien
accagccctggtaaggtagcaagac

SEQ ID NO: 4984010 - DNA, 25 bp, Homo sapien
tagacaggtgagtactttaaagtgc

SEQ ID NO: 4984011 - DNA, 25 bp, Homo sapien
tctttcaggaactcagatttattca

SEQ ID NO: 4984012 - DNA, 25 bp, Homo sapien
aacaaggtcagaactccagtacaga

SEQ ID NO: 4984013 - DNA, 25 bp, Homo sapien
actatactgtgagggtgtttgatgg

SEQ ID NO: 4984014 - DNA, 25 bp, Homo sapien
tctggctctctggttcactatttgt

SEQ ID NO: 4984015 - DNA, 25 bp, Homo sapien
gtctgctgactgggcgggaatgggc

SEQ ID NO: 4984016 - DNA, 25 bp, Homo sapien
ctgactgggcgggaatgggcttctg

SEQ ID NO: 4984017 - DNA, 25 bp, Homo sapien
gctgtagacctgcctctggtaaaac

SEQ ID NO: 4984018 - DNA, 25 bp, Homo sapien
ctgtagacctgcctctggtaaaaca

SEQ ID NO: 4984019 - DNA, 25 bp, Homo sapien
tgctgtagacctgcctctggtaaaa

SEQ ID NO: 4984020 - DNA, 25 bp, Homo sapien
ctgctgtagacctgcctctggtaaa

SEQ ID NO: 4984021 - DNA, 25 bp, Homo sapien
tgcgcctgggagcttgctgctttgc

SEQ ID NO: 4984022 - DNA, 25 bp, Homo sapien
gctgcgcctgggagcttgctgcttt

SEQ ID NO: 4984023 - DNA, 25 bp, Homo sapien
acagggacagcaactaggtgtcgtt

SEQ ID NO: 4984024 - DNA, 25 bp, Homo sapien
caactaggtgtcgtttgggaactga

SEQ ID NO: 4984025 - DNA, 25 bp, Homo sapien
gctgatcagaaagccgccagctgtc

SEQ ID NO: 4984026 - DNA, 25 bp, Homo sapien
agaaagccgccagctgtcctgtttc

SEQ ID NO: 4984027 - DNA, 25 bp, Homo sapien
tcagaaagccgccagctgtcctgtt

SEQ ID NO: 4984028 - DNA, 25 bp, Homo sapien
gatcagaaagccgccagctgtcctg

SEQ ID NO: 4984029 - DNA, 25 bp, Homo sapien
caaatgatatacagcattccccttt

SEQ ID NO: 4984030 - DNA, 25 bp, Homo sapien
tccaaatgatatacagcattcccct

SEQ ID NO: 4984031 - DNA, 25 bp, Homo sapien
ccaaatgatatacagcattcccctt

SEQ ID NO: 4984032 - DNA, 25 bp, Homo sapien
aatgatatacagcattcccctttct

SEQ ID NO: 4984033 - DNA, 25 bp, Homo sapien
gatgcccatttactgcgcgcggcag

SEQ ID NO: 4984034 - DNA, 25 bp, Homo sapien
gggcggccccgagaccgcaattgct

SEQ ID NO: 4984035 - DNA, 25 bp, Homo sapien
agccgcggcacatctggatggagtc

SEQ ID NO: 4984036 - DNA, 25 bp, Homo sapien
tgctctggcccggattgacgagcct

SEQ ID NO: 4984037 - DNA, 25 bp, Homo sapien
gcggtgagcgctagggaggccggcg

SEQ ID NO: 4984038 - DNA, 25 bp, Homo sapien
ccagcacggcccagccagcggagcg

SEQ ID NO: 4984039 - DNA, 25 bp, Homo sapien
gagcgctagggaggccggcgcccgg

SEQ ID NO: 4984040 - DNA, 25 bp, Homo sapien
gtgagcgctagggaggccggcgccc

SEQ ID NO: 4984041 - DNA, 25 bp, Homo sapien
ctgcaaagtgttcggacagtgactt

SEQ ID NO: 4984042 - DNA, 25 bp, Homo sapien
gctcttgccctgctgcaaagtgttc

SEQ ID NO: 4984043 - DNA, 25 bp, Homo sapien
acagtgactttttcagggggaagcg

SEQ ID NO: 4984044 - DNA, 25 bp, Homo sapien
tgccctgctgcaaagtgttcggaca

SEQ ID NO: 4984045 - DNA, 25 bp, Homo sapien
gagaaccagggtccgacttggcaaa

SEQ ID NO: 4984046 - DNA, 25 bp, Homo sapien
tgtattttgatgaatttgccagaag

SEQ ID NO: 4984047 - DNA, 25 bp, Homo sapien
cagatctgcgtggttgtttgataag

SEQ ID NO: 4984048 - DNA, 25 bp, Homo sapien
cagttaagacgaggtttgtttacag

SEQ ID NO: 4984049 - DNA, 25 bp, Homo sapien
ccaaggccattgattctatagtttt

SEQ ID NO: 4984050 - DNA, 25 bp, Homo sapien
actacgggccagtgtgctcatgcac

SEQ ID NO: 4984051 - DNA, 25 bp, Homo sapien
tagttttgtcatcctgatgggatac

SEQ ID NO: 4984052 - DNA, 25 bp, Homo sapien
gctcatgcacattccatcctgcaag

SEQ ID NO: 4984053 - DNA, 25 bp, Homo sapien
ggttctgggagatatggcctcttca

SEQ ID NO: 4984054 - DNA, 25 bp, Homo sapien
tcttcaggcctctctgttgttctgg

SEQ ID NO: 4984055 - DNA, 25 bp, Homo sapien
cctctttgggggtttgtagcttgat

SEQ ID NO: 4984056 - DNA, 25 bp, Homo sapien
gagtctggttctgggagatatggcc

SEQ ID NO: 4984057 - DNA, 25 bp, Homo sapien
acgttcccgatctggtgcctgggga

SEQ ID NO: 4984058 - DNA, 25 bp, Homo sapien
tacgttcccgatctggtgcctgggg

SEQ ID NO: 4984059 - DNA, 25 bp, Homo sapien
cgttcccgatctggtgcctggggag

SEQ ID NO: 4984060 - DNA, 25 bp, Homo sapien
gaaccgctccatgttctgtgccggg

SEQ ID NO: 4984061 - DNA, 25 bp, Homo sapien
gagaaccattagacacttcctggaa

SEQ ID NO: 4984062 - DNA, 25 bp, Homo sapien
aaacccgctggtggtggctaaggca

SEQ ID NO: 4984063 - DNA, 25 bp, Homo sapien
gccacgtgggtcttttgctaacaga

SEQ ID NO: 4984064 - DNA, 25 bp, Homo sapien
cccacacgaatctggaaacaattag

SEQ ID NO: 4984065 - DNA, 25 bp, Homo sapien
attctggtcccaatcaacctgctcg

SEQ ID NO: 4984066 - DNA, 25 bp, Homo sapien
aattagagcaagatgataggcaggc

SEQ ID NO: 4984067 - DNA, 25 bp, Homo sapien
ctgacctcccacacgaatctggaaa

SEQ ID NO: 4984068 - DNA, 25 bp, Homo sapien
tgatttgaatatgcccatcacagac

SEQ ID NO: 4984069 - DNA, 25 bp, Homo sapien
cacacaggccgctgtgcaagaccta

SEQ ID NO: 4984070 - DNA, 25 bp, Homo sapien
tgcatgaccctcttatgactcgacc

SEQ ID NO: 4984071 - DNA, 25 bp, Homo sapien
gctgagaaacctacattctttgccg

SEQ ID NO: 4984072 - DNA, 25 bp, Homo sapien
tatttttcagcaacataatatgaga

SEQ ID NO: 4984073 - DNA, 25 bp, Homo sapien
taatatgagacaagggccaagaact

SEQ ID NO: 4984074 - DNA, 25 bp, Homo sapien
ttgggaggtgctttcgggctctgca

SEQ ID NO: 4984075 - DNA, 25 bp, Homo sapien
ctgtgcacggtgtttagaagaggct

SEQ ID NO: 4984076 - DNA, 25 bp, Homo sapien
tgtggggtcccgcttgtgcccgcct

SEQ ID NO: 4984077 - DNA, 25 bp, Homo sapien
ccttctctgtcttctatgtcatgtg

SEQ ID NO: 4984078 - DNA, 25 bp, Homo sapien
gtcttctatgtcatgtgaggctggc

SEQ ID NO: 4984079 - DNA, 25 bp, Homo sapien
ctgtggggtcccgcttgtgcccgcc

SEQ ID NO: 4984080 - DNA, 25 bp, Homo sapien
ctgctgccacacgacctttcctgat

SEQ ID NO: 4984081 - DNA, 25 bp, Homo sapien
cttctgccgcttcattttggatact

SEQ ID NO: 4984082 - DNA, 25 bp, Homo sapien
tgctgccacacgacctttcctgatg

SEQ ID NO: 4984083 - DNA, 25 bp, Homo sapien
ccttctgccgcttcattttggatac

SEQ ID NO: 4984084 - DNA, 25 bp, Homo sapien
gaccttgaggtgaagtctgccctgc

SEQ ID NO: 4984085 - DNA, 25 bp, Homo sapien
gatttatcttgagttccgccctgga

SEQ ID NO: 4984086 - DNA, 25 bp, Homo sapien
tggcccggatgctagacctcagctt

SEQ ID NO: 4984087 - DNA, 25 bp, Homo sapien
aggaacacccgagacaagcctacgt

SEQ ID NO: 4984088 - DNA, 25 bp, Homo sapien
tttccaaagagggtcgccttgcatg

SEQ ID NO: 4984089 - DNA, 25 bp, Homo sapien
gcaacagtagggaagacgtttccaa

SEQ ID NO: 4984090 - DNA, 25 bp, Homo sapien
tcaagcttgtattttggcgagaaag

SEQ ID NO: 4984091 - DNA, 25 bp, Homo sapien
tgagatgcattagtcagtgcaacag

SEQ ID NO: 4984092 - DNA, 25 bp, Homo sapien
tctgggcggtctttgatgccttcct

SEQ ID NO: 4984093 - DNA, 25 bp, Homo sapien
tggctgttagtgtcaggcgcggctc

SEQ ID NO: 4984094 - DNA, 25 bp, Homo sapien
tctctgagctgttaacctgacgcag

SEQ ID NO: 4984095 - DNA, 25 bp, Homo sapien
gttaacctgacgcagaacctgctgt

SEQ ID NO: 4984096 - DNA, 25 bp, Homo sapien
ccagattgaacacaagccatattcc

SEQ ID NO: 4984097 - DNA, 25 bp, Homo sapien
tggtctcctacttcactttctaatg

SEQ ID NO: 4984098 - DNA, 25 bp, Homo sapien
tctaatgtgctttttgagtgagcac

SEQ ID NO: 4984099 - DNA, 25 bp, Homo sapien
cttgtgaggtggtggatttccccag

SEQ ID NO: 4984100 - DNA, 25 bp, Homo sapien
tatgtaggtgctctctttcatcgca

SEQ ID NO: 4984101 - DNA, 25 bp, Homo sapien
ctctttcatcgcagaccaggagctg

SEQ ID NO: 4984102 - DNA, 25 bp, Homo sapien
tgaccacctggcgagctagaagctt

SEQ ID NO: 4984103 - DNA, 25 bp, Homo sapien
caggagctggattgctaatactgac

SEQ ID NO: 4984104 - DNA, 25 bp, Homo sapien
ttatcatgtgaaaccgtaagtggca

SEQ ID NO: 4984105 - DNA, 25 bp, Homo sapien
tctgtactcattccaacaaggcgca

SEQ ID NO: 4984106 - DNA, 25 bp, Homo sapien
cacagtcacctcctagatctgcggg

SEQ ID NO: 4984107 - DNA, 25 bp, Homo sapien
cagtttctcccatgcaactctgtac

SEQ ID NO: 4984108 - DNA, 25 bp, Homo sapien
catgaggaacgtgtgcagcctaccc

SEQ ID NO: 4984109 - DNA, 25 bp, Homo sapien
tgcagcctacccagagggtttggag

SEQ ID NO: 4984110 - DNA, 25 bp, Homo sapien
cgtgtgcagcctacccagagggttt

SEQ ID NO: 4984111 - DNA, 25 bp, Homo sapien
tctgatgaatgttgtccattgtcag

SEQ ID NO: 4984112 - DNA, 25 bp, Homo sapien
cagtggcctcgtcctttgtttttca

SEQ ID NO: 4984113 - DNA, 25 bp, Homo sapien
ctgtaaggacagtggcctcgtcctt

SEQ ID NO: 4984114 - DNA, 25 bp, Homo sapien
agtggcctcgtcctttgtttttcag

SEQ ID NO: 4984115 - DNA, 25 bp, Homo sapien
aggacagtggcctcgtcctttgttt

SEQ ID NO: 4984116 - DNA, 25 bp, Homo sapien
cctgcagtcagacccatgagtagtt

SEQ ID NO: 4984117 - DNA, 25 bp, Homo sapien
gacccatgagtagtttcagtttgca

SEQ ID NO: 4984118 - DNA, 25 bp, Homo sapien
tttcagtttgcacgagctgctcgca

SEQ ID NO: 4984119 - DNA, 25 bp, Homo sapien
ttgcacgagctgctcgcaaggagtg

SEQ ID NO: 4984120 - DNA, 25 bp, Homo sapien
ccatgagtctgtgggtaaaggctcc

SEQ ID NO: 4984121 - DNA, 25 bp, Homo sapien
cctcatggcggagtagagaaatcca

SEQ ID NO: 4984122 - DNA, 25 bp, Homo sapien
gacaccgtgtagacttgtgaagcct

SEQ ID NO: 4984123 - DNA, 25 bp, Homo sapien
taagcactgatgtttgttaggccag

SEQ ID NO: 4984124 - DNA, 25 bp, Homo sapien
cattttggcgctcttgtcacctgca

SEQ ID NO: 4984125 - DNA, 25 bp, Homo sapien
aactctgtggtatgtttgacaccaa

SEQ ID NO: 4984126 - DNA, 25 bp, Homo sapien
tcttgtcacctgcagaactctgtgg

SEQ ID NO: 4984127 - DNA, 25 bp, Homo sapien
cactcttgtcatgggcattttggcg

SEQ ID NO: 4984128 - DNA, 25 bp, Homo sapien
cagagagagggcgtttcccagggag

SEQ ID NO: 4984129 - DNA, 25 bp, Homo sapien
accaccagggatggcgcagagagag

SEQ ID NO: 4984130 - DNA, 25 bp, Homo sapien
agagagggcgtttcccagggagcag

SEQ ID NO: 4984131 - DNA, 25 bp, Homo sapien
gatggcgcagagagagggcgtttcc

SEQ ID NO: 4984132 - DNA, 25 bp, Homo sapien
tgtgggccattgggaggccctccca

SEQ ID NO: 4984133 - DNA, 25 bp, Homo sapien
gtgggccattgggaggccctcccat

SEQ ID NO: 4984134 - DNA, 25 bp, Homo sapien
cagtggatcagcagagaataggagc

SEQ ID NO: 4984135 - DNA, 25 bp, Homo sapien
gaataggagcctttgctttcaccca

SEQ ID NO: 4984136 - DNA, 25 bp, Homo sapien
tgatggtccccagtagagacagtgg

SEQ ID NO: 4984137 - DNA, 25 bp, Homo sapien
gacaccattctcgaggaaacactag

SEQ ID NO: 4984138 - DNA, 25 bp, Homo sapien
aacggataggctgtccgggaacagt

SEQ ID NO: 4984139 - DNA, 25 bp, Homo sapien
agagaacctggaacggataggctgt

SEQ ID NO: 4984140 - DNA, 25 bp, Homo sapien
gaacggataggctgtccgggaacag

SEQ ID NO: 4984141 - DNA, 25 bp, Homo sapien
aacctggaacggataggctgtccgg

SEQ ID NO: 4984142 - DNA, 25 bp, Homo sapien
acaaacagcagataaaaagctgaag

SEQ ID NO: 4984143 - DNA, 25 bp, Homo sapien
cacaaacagcagataaaaagctgaa

SEQ ID NO: 4984144 - DNA, 25 bp, Homo sapien
ccttgtttccatcgtgggcacctct

SEQ ID NO: 4984145 - DNA, 25 bp, Homo sapien
cggcatccagaggtcccttttggca

SEQ ID NO: 4984146 - DNA, 25 bp, Homo sapien
tttcctactgacgttcgggtgatgc

SEQ ID NO: 4984147 - DNA, 25 bp, Homo sapien
atatgtggatgaggcgctgtcagcc

SEQ ID NO: 4984148 - DNA, 25 bp, Homo sapien
agaggtggcgtctggtgagtgtccc

SEQ ID NO: 4984149 - DNA, 25 bp, Homo sapien
tgagggctgggcaccaaagccggtg

SEQ ID NO: 4984150 - DNA, 25 bp, Homo sapien
ggtggcagcgtgagtgtccacagtg

SEQ ID NO: 4984151 - DNA, 25 bp, Homo sapien
ccttgcagaggtggcgtctggtgag

SEQ ID NO: 4984152 - DNA, 25 bp, Homo sapien
gctgcttctatctttgtgcctctgg

SEQ ID NO: 4984153 - DNA, 25 bp, Homo sapien
cccgtgctgtgctgcttctatcttt

SEQ ID NO: 4984154 - DNA, 25 bp, Homo sapien
caggtctctgctggtgttcccgtgc

SEQ ID NO: 4984155 - DNA, 25 bp, Homo sapien
gtgcctctggtcctgtttgcaccaa

SEQ ID NO: 4984156 - DNA, 25 bp, Homo sapien
tgccccctcctattccagaagcttc

SEQ ID NO: 4984157 - DNA, 25 bp, Homo sapien
ttgccccctcctattccagaagctt

SEQ ID NO: 4984158 - DNA, 25 bp, Homo sapien
tttagtccaccacgtcgcaaatggg

SEQ ID NO: 4984159 - DNA, 25 bp, Homo sapien
tttcctgacccttccattgtggatc

SEQ ID NO: 4984160 - DNA, 25 bp, Homo sapien
tatgagctcctttaacgctttgtgt

SEQ ID NO: 4984161 - DNA, 25 bp, Homo sapien
gcaaatgggacgctgcttcctttgg

SEQ ID NO: 4984162 - DNA, 25 bp, Homo sapien
cggtgagtggctctactgcgctccg

SEQ ID NO: 4984163 - DNA, 25 bp, Homo sapien
gtgagtggctctactgcgctccgcc

SEQ ID NO: 4984164 - DNA, 25 bp, Homo sapien
ccccgctgcccggtgagtggctcta

SEQ ID NO: 4984165 - DNA, 25 bp, Homo sapien
tgcccggtgagtggctctactgcgc

SEQ ID NO: 4984166 - DNA, 25 bp, Homo sapien
ctgtggaaagatgatagcttgcaaa

SEQ ID NO: 4984167 - DNA, 25 bp, Homo sapien
tggaaagatgatagcttgcaaaaga

SEQ ID NO: 4984168 - DNA, 25 bp, Homo sapien
gaaagatgatagcttgcaaaagact

SEQ ID NO: 4984169 - DNA, 25 bp, Homo sapien
tgtggaaagatgatagcttgcaaaa

SEQ ID NO: 4984170 - DNA, 25 bp, Homo sapien
gccagtgctacccataagaacgtct

SEQ ID NO: 4984171 - DNA, 25 bp, Homo sapien
gcaaatgtgtgctgttgagccagtg

SEQ ID NO: 4984172 - DNA, 25 bp, Homo sapien
taagaacgtctgtgcagatagatgc

SEQ ID NO: 4984173 - DNA, 25 bp, Homo sapien
catcccatgcggtggcttctagatg

SEQ ID NO: 4984174 - DNA, 25 bp, Homo sapien
cacctggttgaaggcagcattgtgg

SEQ ID NO: 4984175 - DNA, 25 bp, Homo sapien
acacctgcggtcaccagcgaggcca

SEQ ID NO: 4984176 - DNA, 25 bp, Homo sapien
agcccataaaatcctcctgtccaaa

SEQ ID NO: 4984177 - DNA, 25 bp, Homo sapien
aaccacctggttgaaggcagcattg

SEQ ID NO: 4984178 - DNA, 25 bp, Homo sapien
tatcttttggtaaatatcaccgaag

SEQ ID NO: 4984179 - DNA, 25 bp, Homo sapien
aattatcttttggtaaatatcaccg

SEQ ID NO: 4984180 - DNA, 25 bp, Homo sapien
ctactgaatagtgagatctaaaaca

SEQ ID NO: 4984181 - DNA, 25 bp, Homo sapien
ctgaatagtgagatctaaaacattt

SEQ ID NO: 4984182 - DNA, 25 bp, Homo sapien
gggacatagcagatgatagcctcgc

SEQ ID NO: 4984183 - DNA, 25 bp, Homo sapien
tgtagaagagcaataaaggcccatg

SEQ ID NO: 4984184 - DNA, 25 bp, Homo sapien
caacatcgtcatcccaagtaggaga

SEQ ID NO: 4984185 - DNA, 25 bp, Homo sapien
ccagagtctgtaatctcagagaggc

SEQ ID NO: 4984186 - DNA, 25 bp, Homo sapien
aattcctattctgttgacctgcaca

SEQ ID NO: 4984187 - DNA, 25 bp, Homo sapien
ggtttcaaacccctcatcattgtaa

SEQ ID NO: 4984188 - DNA, 25 bp, Homo sapien
tagccgagtgctaaaaacctatagg

SEQ ID NO: 4984189 - DNA, 25 bp, Homo sapien
tgtaagtttaccaggaggctgaaga

SEQ ID NO: 4984190 - DNA, 25 bp, Homo sapien
aatgcattgtcatagcttgttctaa

SEQ ID NO: 4984191 - DNA, 25 bp, Homo sapien
ttccacatgcagagttcaaataaag

SEQ ID NO: 4984192 - DNA, 25 bp, Homo sapien
tattatacacttcagtttagtctgc

SEQ ID NO: 4984193 - DNA, 25 bp, Homo sapien
cagtaactttgccaggtgtacgagt

SEQ ID NO: 4984194 - DNA, 25 bp, Homo sapien
tgggtatacaatggcgtcacatctg

SEQ ID NO: 4984195 - DNA, 25 bp, Homo sapien
gagagttaccaagccccgcaatttg

SEQ ID NO: 4984196 - DNA, 25 bp, Homo sapien
gactgagtgcccactaccatatggg

SEQ ID NO: 4984197 - DNA, 25 bp, Homo sapien
cagaggctgtcagagctgtaggcca

SEQ ID NO: 4984198 - DNA, 25 bp, Homo sapien
gacaatgagcataggactgctattc

SEQ ID NO: 4984199 - DNA, 25 bp, Homo sapien
ccagacaatgagcataggactgcta

SEQ ID NO: 4984200 - DNA, 25 bp, Homo sapien
agccagacaatgagcataggactgc

SEQ ID NO: 4984201 - DNA, 25 bp, Homo sapien
gcagccagacaatgagcataggact

SEQ ID NO: 4984202 - DNA, 25 bp, Homo sapien
atagtcacagggtgagtagaaaacc

SEQ ID NO: 4984203 - DNA, 25 bp, Homo sapien
taaccctccatgaagtgactggaat

SEQ ID NO: 4984204 - DNA, 25 bp, Homo sapien
gcttcctcagcaagacatgcaagta

SEQ ID NO: 4984205 - DNA, 25 bp, Homo sapien
gaaaaccatgtgcattaatctagag

SEQ ID NO: 4984206 - DNA, 25 bp, Homo sapien
actgagcgctgcctgaacgctggga

SEQ ID NO: 4984207 - DNA, 25 bp, Homo sapien
aacgctgggaggtgtgacccgggtg

SEQ ID NO: 4984208 - DNA, 25 bp, Homo sapien
cacttaggacgcggaaccctggagg

SEQ ID NO: 4984209 - DNA, 25 bp, Homo sapien
tggctgttctcaagagcatgacact

SEQ ID NO: 4984210 - DNA, 25 bp, Homo sapien
gacaatgagcataggacagctattc

SEQ ID NO: 4984211 - DNA, 25 bp, Homo sapien
gccagacaatgagcataggacagct

SEQ ID NO: 4984212 - DNA, 25 bp, Homo sapien
gcagccagacaatgagcataggaca

SEQ ID NO: 4984213 - DNA, 25 bp, Homo sapien
cagacaatgagcataggacagctat

SEQ ID NO: 4984214 - DNA, 25 bp, Homo sapien
cagtcagggctagaacatgggtaat

SEQ ID NO: 4984215 - DNA, 25 bp, Homo sapien
tagttgagacacataggacgttcct

SEQ ID NO: 4984216 - DNA, 25 bp, Homo sapien
tacagaaaccctgcgaggtagaggc

SEQ ID NO: 4984217 - DNA, 25 bp, Homo sapien
gaaaggcattacatccaagcaggaa

SEQ ID NO: 4984218 - DNA, 25 bp, Homo sapien
gtcctccacgctgacaatctctcac

SEQ ID NO: 4984219 - DNA, 25 bp, Homo sapien
aggctgcttaggtccccttcatcca

SEQ ID NO: 4984220 - DNA, 25 bp, Homo sapien
agtgcatccaaatgtcctccacgct

SEQ ID NO: 4984221 - DNA, 25 bp, Homo sapien
tcatccacacgaggctttggaaatg

SEQ ID NO: 4984222 - DNA, 25 bp, Homo sapien
gccgataaaggcacttcaaatgcag

SEQ ID NO: 4984223 - DNA, 25 bp, Homo sapien
caaatgaccaatggtggagctgggt

SEQ ID NO: 4984224 - DNA, 25 bp, Homo sapien
tattactttcccacgaaactgagaa

SEQ ID NO: 4984225 - DNA, 25 bp, Homo sapien
tcaaatgcagacgtgcgcccagcct

SEQ ID NO: 4984226 - DNA, 25 bp, Homo sapien
gcaggcctggtttcttacaagtgca

SEQ ID NO: 4984227 - DNA, 25 bp, Homo sapien
catgctgcttgcgaggtgatgtcta

SEQ ID NO: 4984228 - DNA, 25 bp, Homo sapien
gaatgcaggactaccagttttcagt

SEQ ID NO: 4984229 - DNA, 25 bp, Homo sapien
gcagggacaaccagcttagaataca

SEQ ID NO: 4984230 - DNA, 25 bp, Homo sapien
tactccagagtacagtgaagaagct

SEQ ID NO: 4984231 - DNA, 25 bp, Homo sapien
tcagtcatgatggaataccaggcag

SEQ ID NO: 4984232 - DNA, 25 bp, Homo sapien
gagagcagaagtccagtagcctttg

SEQ ID NO: 4984233 - DNA, 25 bp, Homo sapien
gatgatacactaggagatcccagct

SEQ ID NO: 4984234 - DNA, 25 bp, Homo sapien
gatcaaaggtaaattgttatcaact

SEQ ID NO: 4984235 - DNA, 25 bp, Homo sapien
caaaacccctataattgatatatac

SEQ ID NO: 4984236 - DNA, 25 bp, Homo sapien
aatgtgtgggaggattaaaagtatg

SEQ ID NO: 4984237 - DNA, 25 bp, Homo sapien
cagaataatgcaacactgtagtatg

SEQ ID NO: 4984238 - DNA, 25 bp, Homo sapien
aaagggaaaaactcatagcaggata

SEQ ID NO: 4984239 - DNA, 25 bp, Homo sapien
aaaagggaaaaactcatagcaggat

SEQ ID NO: 4984240 - DNA, 25 bp, Homo sapien
aaaaactcatagcaggatagagtag

SEQ ID NO: 4984241 - DNA, 25 bp, Homo sapien
ataagttctggagatgtaataaaca

SEQ ID NO: 4984242 - DNA, 25 bp, Homo sapien
aagttctggagatgtaataaacagc

SEQ ID NO: 4984243 - DNA, 25 bp, Homo sapien
gttctggagatgtaataaacagcaa

SEQ ID NO: 4984244 - DNA, 25 bp, Homo sapien
acaaaatttcagttatgaaagatga

SEQ ID NO: 4984245 - DNA, 25 bp, Homo sapien
tctaaaggtggctaacacacacaaa

SEQ ID NO: 4984246 - DNA, 25 bp, Homo sapien
gaaaaattgtgtcaaagtccatcta

SEQ ID NO: 4984247 - DNA, 25 bp, Homo sapien
gaaaagcattgtgttgcattattta

SEQ ID NO: 4984248 - DNA, 25 bp, Homo sapien
gatagaaaagcattgtgttgcatta

SEQ ID NO: 4984249 - DNA, 25 bp, Homo sapien
taatgcatatgtagtaagaaagatt

SEQ ID NO: 4984250 - DNA, 25 bp, Homo sapien
aatgcatatgtagtaagaaagattt

SEQ ID NO: 4984251 - DNA, 25 bp, Homo sapien
aagatttactatcccaactagcctc

SEQ ID NO: 4984252 - DNA, 25 bp, Homo sapien
ttagatgaggatagaacagatacgg

SEQ ID NO: 4984253 - DNA, 25 bp, Homo sapien
tacggtgtaacacgcctctccactg

SEQ ID NO: 4984254 - DNA, 25 bp, Homo sapien
tctccactgcttactgtgtgtacca

SEQ ID NO: 4984255 - DNA, 25 bp, Homo sapien
tgtgtgtaccaagaaggcagaaagc

SEQ ID NO: 4984256 - DNA, 25 bp, Homo sapien
gggcacagttaggtcgtgccctgat

SEQ ID NO: 4984257 - DNA, 25 bp, Homo sapien
cacagttaggtcgtgccctgataag

SEQ ID NO: 4984258 - DNA, 25 bp, Homo sapien
cagttaggtcgtgccctgataaggg

SEQ ID NO: 4984259 - DNA, 25 bp, Homo sapien
gggtacacaaggggaactccaggca

SEQ ID NO: 4984260 - DNA, 25 bp, Homo sapien
ggacactatggtgcactcaggcagt

SEQ ID NO: 4984261 - DNA, 25 bp, Homo sapien
tcagtaacgttatttagccaaagcc

SEQ ID NO: 4984262 - DNA, 25 bp, Homo sapien
cagcccattgtatgcagaggactaa

SEQ ID NO: 4984263 - DNA, 25 bp, Homo sapien
tgaaagctgtgccaatgcattagcc

SEQ ID NO: 4984264 - DNA, 25 bp, Homo sapien
tatgccagttatgtgcttcgacaga

SEQ ID NO: 4984265 - DNA, 25 bp, Homo sapien
agtctatgtgataaaacatctgtag

SEQ ID NO: 4984266 - DNA, 25 bp, Homo sapien
tgtcttgccaaacccatcatctaat

SEQ ID NO: 4984267 - DNA, 25 bp, Homo sapien
catctaataagggacttcttgtctt

SEQ ID NO: 4984268 - DNA, 25 bp, Homo sapien
acacaattcaacatcatttttctga

SEQ ID NO: 4984269 - DNA, 25 bp, Homo sapien
cacacaattcaacatcatttttctg

SEQ ID NO: 4984270 - DNA, 25 bp, Homo sapien
aaacacacaattcaacatcattttt

SEQ ID NO: 4984271 - DNA, 25 bp, Homo sapien
aacacacaattcaacatcatttttc

SEQ ID NO: 4984272 - DNA, 25 bp, Homo sapien
tgagacaatatagacatttagttat

SEQ ID NO: 4984273 - DNA, 25 bp, Homo sapien
ttgagacaatatagacatttagtta

SEQ ID NO: 4984274 - DNA, 25 bp, Homo sapien
ctttgaatacttgagcttcaaattc

SEQ ID NO: 4984275 - DNA, 25 bp, Homo sapien
ttgaattcatttggatctttgaata

SEQ ID NO: 4984276 - DNA, 25 bp, Homo sapien
cattgaattcatttggatctttgaa

SEQ ID NO: 4984277 - DNA, 25 bp, Homo sapien
gaattcatttggatctttgaatact

SEQ ID NO: 4984278 - DNA, 25 bp, Homo sapien
gagactggccagaaacttgcaagaa

SEQ ID NO: 4984279 - DNA, 25 bp, Homo sapien
tctccaaaagtctccagcctggtgg

SEQ ID NO: 4984280 - DNA, 25 bp, Homo sapien
agtgcttggttatgtggccacaaag

SEQ ID NO: 4984281 - DNA, 25 bp, Homo sapien
ccttggttgggaacgaggcactctc

SEQ ID NO: 4984282 - DNA, 25 bp, Homo sapien
aaaggcctccagtagaagagtctct

SEQ ID NO: 4984283 - DNA, 25 bp, Homo sapien
ctgcaaaagacagcttcccatcatg

SEQ ID NO: 4984284 - DNA, 25 bp, Homo sapien
acagcttcccatcatggtcatgatc

SEQ ID NO: 4984285 - DNA, 25 bp, Homo sapien
aagacagcttcccatcatggtcatg

SEQ ID NO: 4984286 - DNA, 25 bp, Homo sapien
tgcaaaagacagcttcccatcatgg

SEQ ID NO: 4984287 - DNA, 25 bp, Homo sapien
ggcaacacgtaaaatgattactgca

SEQ ID NO: 4984288 - DNA, 25 bp, Homo sapien
agaaacatgttaggcaacacgtaaa

SEQ ID NO: 4984289 - DNA, 25 bp, Homo sapien
aacatgttaggcaacacgtaaaatg

SEQ ID NO: 4984290 - DNA, 25 bp, Homo sapien
tgttaggcaacacgtaaaatgatta

SEQ ID NO: 4984291 - DNA, 25 bp, Homo sapien
gtcttcctcagatggctgtttgaga

SEQ ID NO: 4984292 - DNA, 25 bp, Homo sapien
ttcctcctttgaaatgaatccgtca

SEQ ID NO: 4984293 - DNA, 25 bp, Homo sapien
tcttcaacatgtgaaacatttcctc

SEQ ID NO: 4984294 - DNA, 25 bp, Homo sapien
gaatccgtcaccattcaaatcaaac

SEQ ID NO: 4984295 - DNA, 25 bp, Homo sapien
catttacacagccatcattatcttt

SEQ ID NO: 4984296 - DNA, 25 bp, Homo sapien
ttatctttatcaaaacctcggaata

SEQ ID NO: 4984297 - DNA, 25 bp, Homo sapien
gtgataatccatgaatccactccaa

SEQ ID NO: 4984298 - DNA, 25 bp, Homo sapien
tccaaagatcctcgaagaaacagtg

SEQ ID NO: 4984299 - DNA, 25 bp, Homo sapien
gcaggatgtttcgaaatgcattacg

SEQ ID NO: 4984300 - DNA, 25 bp, Homo sapien
cctcccaccaagtcataaaaaagct

SEQ ID NO: 4984301 - DNA, 25 bp, Homo sapien
gatccagtccaacaaccagaccttg

SEQ ID NO: 4984302 - DNA, 25 bp, Homo sapien
tgtcatctgtcattccaaatgtcac

SEQ ID NO: 4984303 - DNA, 25 bp, Homo sapien
gaactagatgttctcttaagatctt

SEQ ID NO: 4984304 - DNA, 25 bp, Homo sapien
tctgtagaacagtgcatgaactaga

SEQ ID NO: 4984305 - DNA, 25 bp, Homo sapien
gatagctttattgtcttgcaactaa

SEQ ID NO: 4984306 - DNA, 25 bp, Homo sapien
tgtccatgacgtataactatttcta

SEQ ID NO: 4984307 - DNA, 25 bp, Homo sapien
tcaagtggccagtagttttgcaatt

SEQ ID NO: 4984308 - DNA, 25 bp, Homo sapien
caacttctaagtttgctcgacagga

SEQ ID NO: 4984309 - DNA, 25 bp, Homo sapien
agtttcctatgaaattctaggacca

SEQ ID NO: 4984310 - DNA, 25 bp, Homo sapien
caaatgcgagattagagcaggtgcc

SEQ ID NO: 4984311 - DNA, 25 bp, Homo sapien
tgttctgaggcacagatgagatgac

SEQ ID NO: 4984312 - DNA, 25 bp, Homo sapien
gaaagatgttgagaagttgagcacc

SEQ ID NO: 4984313 - DNA, 25 bp, Homo sapien
ttagttgtgctgaactctggtttcc

SEQ ID NO: 4984314 - DNA, 25 bp, Homo sapien
gttgagcaccgttttctcctatggg

SEQ ID NO: 4984315 - DNA, 25 bp, Homo sapien
tttggttaaggtgtccgtcagcttc

SEQ ID NO: 4984316 - DNA, 25 bp, Homo sapien
ttggttaaggtgtccgtcagcttct

SEQ ID NO: 4984317 - DNA, 25 bp, Homo sapien
tggttaaggtgtccgtcagcttctg

SEQ ID NO: 4984318 - DNA, 25 bp, Homo sapien
ctcagttactgatctcgtgcgcggc

SEQ ID NO: 4984319 - DNA, 25 bp, Homo sapien
tctggcgctcagagaatcgggccgc

SEQ ID NO: 4984320 - DNA, 25 bp, Homo sapien
tctctgggcgcgcggctaccgagac

SEQ ID NO: 4984321 - DNA, 25 bp, Homo sapien
tggtgctgggtcaacgcggtgaggt

SEQ ID NO: 4984322 - DNA, 25 bp, Homo sapien
gtgcaagtgctgctcccccctccag

SEQ ID NO: 4984323 - DNA, 25 bp, Homo sapien
attcttctctacacttcttagaaag

SEQ ID NO: 4984324 - DNA, 25 bp, Homo sapien
atcttatgagctctatccattcttc

SEQ ID NO: 4984325 - DNA, 25 bp, Homo sapien
tgatcttatgagctctatccattct

SEQ ID NO: 4984326 - DNA, 25 bp, Homo sapien
caaggcaagtgctataggtgatttc

SEQ ID NO: 4984327 - DNA, 25 bp, Homo sapien
tagcgatgatgcatttgagaagctg

SEQ ID NO: 4984328 - DNA, 25 bp, Homo sapien
ttatagtcactatgacatcagctga

SEQ ID NO: 4984329 - DNA, 25 bp, Homo sapien
tagagggcatagttaacaaggcaag

SEQ ID NO: 4984330 - DNA, 25 bp, Homo sapien
taatagcagaattgtgagttttgtg

SEQ ID NO: 4984331 - DNA, 25 bp, Homo sapien
aatagcagaattgtgagttttgtgt

SEQ ID NO: 4984332 - DNA, 25 bp, Homo sapien
taatgccagccttaatagcagaatt

SEQ ID NO: 4984333 - DNA, 25 bp, Homo sapien
aaataatgccagccttaatagcaga

SEQ ID NO: 4984334 - DNA, 25 bp, Homo sapien
gcatggtcagtactcgtcgttccca

SEQ ID NO: 4984335 - DNA, 25 bp, Homo sapien
cttcagtgtagacaatgggttgggc

SEQ ID NO: 4984336 - DNA, 25 bp, Homo sapien
aagccacagtgtctccgcgatgagt

SEQ ID NO: 4984337 - DNA, 25 bp, Homo sapien
cataaacaggctgtagggtttcttc

SEQ ID NO: 4984338 - DNA, 25 bp, Homo sapien
acactgtccgtagatactgcttcca

SEQ ID NO: 4984339 - DNA, 25 bp, Homo sapien
tagacactgtccgtagatactgctt

SEQ ID NO: 4984340 - DNA, 25 bp, Homo sapien
ttagacactgtccgtagatactgct

SEQ ID NO: 4984341 - DNA, 25 bp, Homo sapien
gacactgtccgtagatactgcttcc

SEQ ID NO: 4984342 - DNA, 25 bp, Homo sapien
ttctcatgagctgcgttgcttcccc

SEQ ID NO: 4984343 - DNA, 25 bp, Homo sapien
tgggtgtgtccagacagcatggctc

SEQ ID NO: 4984344 - DNA, 25 bp, Homo sapien
agaggagctgcgatggtcacaacac

SEQ ID NO: 4984345 - DNA, 25 bp, Homo sapien
acacgggtggccactgcgttctcat

SEQ ID NO: 4984346 - DNA, 25 bp, Homo sapien
ctgttcggggcgtgcggcctgcaca

SEQ ID NO: 4984347 - DNA, 25 bp, Homo sapien
cggcaacacaaccacctccggctgt

SEQ ID NO: 4984348 - DNA, 25 bp, Homo sapien
tgctgcctgggtgtgaggaaaacca

SEQ ID NO: 4984349 - DNA, 25 bp, Homo sapien
agtgacacattcacacaccgggcga

SEQ ID NO: 4984350 - DNA, 25 bp, Homo sapien
ctgttcttgagattgattaccctgg

SEQ ID NO: 4984351 - DNA, 25 bp, Homo sapien
tatccagtagttttgcatttgggcc

SEQ ID NO: 4984352 - DNA, 25 bp, Homo sapien
tcagaggacatcaaatatccagtag

SEQ ID NO: 4984353 - DNA, 25 bp, Homo sapien
ctgagccatgactctgacgttggag

SEQ ID NO: 4984354 - DNA, 25 bp, Homo sapien
tgactctgacgttggagattagaca

SEQ ID NO: 4984355 - DNA, 25 bp, Homo sapien
tgagtcagccctgaaagcgatcctg

SEQ ID NO: 4984356 - DNA, 25 bp, Homo sapien
gccagacagtgaggcggatgagtca

SEQ ID NO: 4984357 - DNA, 25 bp, Homo sapien
acagtgaggcggatgagtcagccct

SEQ ID NO: 4984358 - DNA, 25 bp, Homo sapien
gccctgaaagcgatcctggccatga

SEQ ID NO: 4984359 - DNA, 25 bp, Homo sapien
gattgtgactggagggctttgtacc

SEQ ID NO: 4984360 - DNA, 25 bp, Homo sapien
ctcgcctgattgtgactggagggct

SEQ ID NO: 4984361 - DNA, 25 bp, Homo sapien
agcccctctgctcgcctgattgtga

SEQ ID NO: 4984362 - DNA, 25 bp, Homo sapien
ctgtgcgttagtgcgctggccctca

SEQ ID NO: 4984363 - DNA, 25 bp, Homo sapien
agagattcgcttgagcccttccagg

SEQ ID NO: 4984364 - DNA, 25 bp, Homo sapien
gggatgacttggtcaaccatctcat

SEQ ID NO: 4984365 - DNA, 25 bp, Homo sapien
tatgagaggtcatggcaattgcagc

SEQ ID NO: 4984366 - DNA, 25 bp, Homo sapien
tgcaaacggaagctgtctgggctga

SEQ ID NO: 4984367 - DNA, 25 bp, Homo sapien
taaaagatgccgctctcttggtgct

SEQ ID NO: 4984368 - DNA, 25 bp, Homo sapien
tgtaacgccaaggtgagctcatccc

SEQ ID NO: 4984369 - DNA, 25 bp, Homo sapien
aaggtgagctcatccccaggtacca

SEQ ID NO: 4984370 - DNA, 25 bp, Homo sapien
ggtaccacaatgacctgaggtgctt

SEQ ID NO: 4984371 - DNA, 25 bp, Homo sapien
gatgaaggaatgtgcacccaggagg

SEQ ID NO: 4984372 - DNA, 25 bp, Homo sapien
ggatgaaggaatgtgcacccaggag

SEQ ID NO: 4984373 - DNA, 25 bp, Homo sapien
aaagcaagttggatctctgtgatgc

SEQ ID NO: 4984374 - DNA, 25 bp, Homo sapien
cttggtttctcctaaagcaagttgg

SEQ ID NO: 4984375 - DNA, 25 bp, Homo sapien
tctcctaaagcaagttggatctctg

SEQ ID NO: 4984376 - DNA, 25 bp, Homo sapien
ggtttctcctaaagcaagttggatc

SEQ ID NO: 4984377 - DNA, 25 bp, Homo sapien
agttcccttctgatgtgttgtcctt

SEQ ID NO: 4984378 - DNA, 25 bp, Homo sapien
gggacaggtgaatagagcaatcaga

SEQ ID NO: 4984379 - DNA, 25 bp, Homo sapien
gacaggtgaatagagcaatcagaat

SEQ ID NO: 4984380 - DNA, 25 bp, Homo sapien
gctgctttagagtttagctcccaca

SEQ ID NO: 4984381 - DNA, 25 bp, Homo sapien
cagcatgactggagctctccgagag

SEQ ID NO: 4984382 - DNA, 25 bp, Homo sapien
tcgccttcccggcacagccttggac

SEQ ID NO: 4984383 - DNA, 25 bp, Homo sapien
agcatgactggagctctccgagagc

SEQ ID NO: 4984384 - DNA, 25 bp, Homo sapien
cttcccggcacagccttggactcag

SEQ ID NO: 4984385 - DNA, 25 bp, Homo sapien
ccaggagggacagggcagcccccac

SEQ ID NO: 4984386 - DNA, 25 bp, Homo sapien
caaaccccaggagggacagggcagc

SEQ ID NO: 4984387 - DNA, 25 bp, Homo sapien
ccaaaccccaggagggacagggcag

SEQ ID NO: 4984388 - DNA, 25 bp, Homo sapien
cccaggagggacagggcagccccca

SEQ ID NO: 4984389 - DNA, 25 bp, Homo sapien
ccggcgggtccctctggatgttccg

SEQ ID NO: 4984390 - DNA, 25 bp, Homo sapien
ctgtcttggaatgggacgaggcctc

SEQ ID NO: 4984391 - DNA, 25 bp, Homo sapien
tccaaacccgtgtgcattcggccgg

SEQ ID NO: 4984392 - DNA, 25 bp, Homo sapien
tgcaagtgcgtctggaacagggctt

SEQ ID NO: 4984393 - DNA, 25 bp, Homo sapien
gaagtgcctttacgcttaggtagaa

SEQ ID NO: 4984394 - DNA, 25 bp, Homo sapien
gcacgaagaaaagcgaaggtgcgag

SEQ ID NO: 4984395 - DNA, 25 bp, Homo sapien
aggaccgactggcagcaagcgtccg

SEQ ID NO: 4984396 - DNA, 25 bp, Homo sapien
tcctcgaagtgcctttacgcttagg

SEQ ID NO: 4984397 - DNA, 25 bp, Homo sapien
tccctcgcgctccaccctgctgcgt

SEQ ID NO: 4984398 - DNA, 25 bp, Homo sapien
cgcgctccaccctgctgcgtgaaca

SEQ ID NO: 4984399 - DNA, 25 bp, Homo sapien
tcgcgctccaccctgctgcgtgaac

SEQ ID NO: 4984400 - DNA, 25 bp, Homo sapien
cctcgcgctccaccctgctgcgtga

SEQ ID NO: 4984401 - DNA, 25 bp, Homo sapien
agcagagcacttaaacgctgaagaa

SEQ ID NO: 4984402 - DNA, 25 bp, Homo sapien
gccaaagtggacagcaactctgctt

SEQ ID NO: 4984403 - DNA, 25 bp, Homo sapien
caccaagccaaagtggacagcaact

SEQ ID NO: 4984404 - DNA, 25 bp, Homo sapien
gaagaaagggcacatacttgtcatc

SEQ ID NO: 4984405 - DNA, 25 bp, Homo sapien
cgtttgtgaggtcccatgttcaggc

SEQ ID NO: 4984406 - DNA, 25 bp, Homo sapien
tgtcgtttctgtcagcggcgtctct

SEQ ID NO: 4984407 - DNA, 25 bp, Homo sapien
tgttcaggcccgcatgaaacctctg

SEQ ID NO: 4984408 - DNA, 25 bp, Homo sapien
ttcctctggctctccgcgtttgtga

SEQ ID NO: 4984409 - DNA, 25 bp, Homo sapien
ctgcggcatagaagacagcgtctga

SEQ ID NO: 4984410 - DNA, 25 bp, Homo sapien
tcaggaaacagctgcggcatagaag

SEQ ID NO: 4984411 - DNA, 25 bp, Homo sapien
aaacagctgcggcatagaagacagc

SEQ ID NO: 4984412 - DNA, 25 bp, Homo sapien
tagaagacagcgtctgagatagaac

SEQ ID NO: 4984413 - DNA, 25 bp, Homo sapien
ctggctgaatacatgggagtcctct

SEQ ID NO: 4984414 - DNA, 25 bp, Homo sapien
gaagttgcagcgctcagtgtctgct

SEQ ID NO: 4984415 - DNA, 25 bp, Homo sapien
ccatggcagtcacgcctggagagct

SEQ ID NO: 4984416 - DNA, 25 bp, Homo sapien
agtcctctgtgcaagggtgtttcca

SEQ ID NO: 4984417 - DNA, 25 bp, Homo sapien
tcctctgaagcagctgtgttggagt

SEQ ID NO: 4984418 - DNA, 25 bp, Homo sapien
cctctgaagcagctgtgttggagtc

SEQ ID NO: 4984419 - DNA, 25 bp, Homo sapien
ttcctctgaagcagctgtgttggag

SEQ ID NO: 4984420 - DNA, 25 bp, Homo sapien
cattcctctgaagcagctgtgttgg

SEQ ID NO: 4984421 - DNA, 25 bp, Homo sapien
cactgtccttgtccttgccccacat

SEQ ID NO: 4984422 - DNA, 25 bp, Homo sapien
tggatgtgaggacactccccacagc

SEQ ID NO: 4984423 - DNA, 25 bp, Homo sapien
agctgctctgcaggtccctgcactg

SEQ ID NO: 4984424 - DNA, 25 bp, Homo sapien
attggatgtgaggacactccccaca

SEQ ID NO: 4984425 - DNA, 25 bp, Homo sapien
cagtcagcgagtggtcctgggaccc

SEQ ID NO: 4984426 - DNA, 25 bp, Homo sapien
tctcagaatcaggtggcgcagatgg

SEQ ID NO: 4984427 - DNA, 25 bp, Homo sapien
gggttgaatgcagctgtccagacca

SEQ ID NO: 4984428 - DNA, 25 bp, Homo sapien
gccaaatgccggcaatgtgtaggac

SEQ ID NO: 4984429 - DNA, 25 bp, Homo sapien
catcctagggatagtgaacactttg

SEQ ID NO: 4984430 - DNA, 25 bp, Homo sapien
cccttctagcctttcaattgatcgg

SEQ ID NO: 4984431 - DNA, 25 bp, Homo sapien
aattgatcggccacttctcaggccc

SEQ ID NO: 4984432 - DNA, 25 bp, Homo sapien
tctcaggcccatcctagggatagtg

SEQ ID NO: 4984433 - DNA, 25 bp, Homo sapien
gcactgtgatctccacgcaggtgga

SEQ ID NO: 4984434 - DNA, 25 bp, Homo sapien
gatacagaaggatcaactcggtcct

SEQ ID NO: 4984435 - DNA, 25 bp, Homo sapien
tctccatgcagcagaggctaagtag

SEQ ID NO: 4984436 - DNA, 25 bp, Homo sapien
gcattgctcttcttacagcgggata

SEQ ID NO: 4984437 - DNA, 25 bp, Homo sapien
tgtgagcattgcagggtgaacaggt

SEQ ID NO: 4984438 - DNA, 25 bp, Homo sapien
aagaaggagaaggtgcttgtaagcc

SEQ ID NO: 4984439 - DNA, 25 bp, Homo sapien
gataccagtatccaggtagagaaac

SEQ ID NO: 4984440 - DNA, 25 bp, Homo sapien
tcctaatctttgagcactgcagttg

SEQ ID NO: 4984441 - DNA, 25 bp, Homo sapien
catccagtgtgagaaaatctcttct

SEQ ID NO: 4984442 - DNA, 25 bp, Homo sapien
ccttcagccccacatggtgcatgtg

SEQ ID NO: 4984443 - DNA, 25 bp, Homo sapien
tcagaggaggacaaagcatccagtg

SEQ ID NO: 4984444 - DNA, 25 bp, Homo sapien
cagggaagtggtactgaaaagagtt

SEQ ID NO: 4984445 - DNA, 25 bp, Homo sapien
cgccctgctggcaagatgtcttcta

SEQ ID NO: 4984446 - DNA, 25 bp, Homo sapien
tagagcttgaaagtaggaaaccagc

SEQ ID NO: 4984447 - DNA, 25 bp, Homo sapien
gacaggtgactgttgttttccgttc

SEQ ID NO: 4984448 - DNA, 25 bp, Homo sapien
attcctgagagcgtggtcactggcg

SEQ ID NO: 4984449 - DNA, 25 bp, Homo sapien
ctgtgttgttttctgccactctgac

SEQ ID NO: 4984450 - DNA, 25 bp, Homo sapien
ggccccacaactgcctgtgttgttt

SEQ ID NO: 4984451 - DNA, 25 bp, Homo sapien
catggaattcactggaggccccaca

SEQ ID NO: 4984452 - DNA, 25 bp, Homo sapien
gttttctgccactctgactgtctcc

SEQ ID NO: 4984453 - DNA, 25 bp, Homo sapien
tgaggggccccgggagcagggcttc

SEQ ID NO: 4984454 - DNA, 25 bp, Homo sapien
agaggcctgaggggccccgggagca

SEQ ID NO: 4984455 - DNA, 25 bp, Homo sapien
gaaggcagaggcctgaggggccccg

SEQ ID NO: 4984456 - DNA, 25 bp, Homo sapien
ctggaaggcagaggcctgaggggcc

SEQ ID NO: 4984457 - DNA, 25 bp, Homo sapien
tgccgatctgatatccagaggacag

SEQ ID NO: 4984458 - DNA, 25 bp, Homo sapien
gatgccgatctgatatccagaggac

SEQ ID NO: 4984459 - DNA, 25 bp, Homo sapien
ttagatgccgatctgatatccagag

SEQ ID NO: 4984460 - DNA, 25 bp, Homo sapien
gatctgatatccagaggacagactg

SEQ ID NO: 4984461 - DNA, 25 bp, Homo sapien
gcgcctaacgcttttgtcagacttc

SEQ ID NO: 4984462 - DNA, 25 bp, Homo sapien
tgtctgaggacgtccgtccggctct

SEQ ID NO: 4984463 - DNA, 25 bp, Homo sapien
cccgtgtgagagtggaaaggactcc

SEQ ID NO: 4984464 - DNA, 25 bp, Homo sapien
tgcagtgggtgctttcggctgtccc

SEQ ID NO: 4984465 - DNA, 25 bp, Homo sapien
ctgttccgatgaaccaggatccatg

SEQ ID NO: 4984466 - DNA, 25 bp, Homo sapien
gcttggactgttccgatgaaccagg

SEQ ID NO: 4984467 - DNA, 25 bp, Homo sapien
gaaggcttggactgttccgatgaac

SEQ ID NO: 4984468 - DNA, 25 bp, Homo sapien
atctgaaggcttggactgttccgat

SEQ ID NO: 4984469 - DNA, 25 bp, Homo sapien
ctttccgggcctctctatgctccat

SEQ ID NO: 4984470 - DNA, 25 bp, Homo sapien
ttggacacttctttccgggcctctc

SEQ ID NO: 4984471 - DNA, 25 bp, Homo sapien
ggacacttctttccgggcctctcta

SEQ ID NO: 4984472 - DNA, 25 bp, Homo sapien
cactcttttggacacttctttccgg

SEQ ID NO: 4984473 - DNA, 25 bp, Homo sapien
tgcagagtctcagaacatgaaggag

SEQ ID NO: 4984474 - DNA, 25 bp, Homo sapien
agtgcctcacgctggattttgcaga

SEQ ID NO: 4984475 - DNA, 25 bp, Homo sapien
ttcagtgcctcacgctggattttgc

SEQ ID NO: 4984476 - DNA, 25 bp, Homo sapien
gttcttcagtgcctcacgctggatt

SEQ ID NO: 4984477 - DNA, 25 bp, Homo sapien
cattagtggatatgtgcatgctctc

SEQ ID NO: 4984478 - DNA, 25 bp, Homo sapien
gcaatccagtccttacattagtgga

SEQ ID NO: 4984479 - DNA, 25 bp, Homo sapien
ccatacacgcgtgtccggctggaag

SEQ ID NO: 4984480 - DNA, 25 bp, Homo sapien
tgctctccgggttctcagcattgtt

SEQ ID NO: 4984481 - DNA, 25 bp, Homo sapien
aaagctctgcagaccactcttggtg

SEQ ID NO: 4984482 - DNA, 25 bp, Homo sapien
actcttggtgactaatggtgcggca

SEQ ID NO: 4984483 - DNA, 25 bp, Homo sapien
ggtcaatgactctccactcagtagg

SEQ ID NO: 4984484 - DNA, 25 bp, Homo sapien
taatttcattggttccactcgccgg

SEQ ID NO: 4984485 - DNA, 25 bp, Homo sapien
taatcatgaagcaagtaaagtctct

SEQ ID NO: 4984486 - DNA, 25 bp, Homo sapien
gtacagtggtttggtactaatcatg

SEQ ID NO: 4984487 - DNA, 25 bp, Homo sapien
tctctgaaaatagtatacaaacgag

SEQ ID NO: 4984488 - DNA, 25 bp, Homo sapien
cacttcagatgcataataagcatta

SEQ ID NO: 4984489 - DNA, 25 bp, Homo sapien
ttaaggcacctgagttcgcgtctgg

SEQ ID NO: 4984490 - DNA, 25 bp, Homo sapien
tggcaaccagacaaccgacatgtaa

SEQ ID NO: 4984491 - DNA, 25 bp, Homo sapien
catgcgccaggaatgttcaaagcta

SEQ ID NO: 4984492 - DNA, 25 bp, Homo sapien
tattatttggttggtcagcacagga

SEQ ID NO: 4984493 - DNA, 25 bp, Homo sapien
cctcatgtttgtgcaggagagacat

SEQ ID NO: 4984494 - DNA, 25 bp, Homo sapien
tggtatttctttacatcagaatggg

SEQ ID NO: 4984495 - DNA, 25 bp, Homo sapien
gacctgtctgcaaatgctctgttgc

SEQ ID NO: 4984496 - DNA, 25 bp, Homo sapien
gctctgttgcagtgagggcaagaaa

SEQ ID NO: 4984497 - DNA, 25 bp, Homo sapien
tccctggagcagaggttgttagcaa

SEQ ID NO: 4984498 - DNA, 25 bp, Homo sapien
gaaatggagcactttgtgccctaac

SEQ ID NO: 4984499 - DNA, 25 bp, Homo sapien
tcagagtaacattcctgcctatggt

SEQ ID NO: 4984500 - DNA, 25 bp, Homo sapien
gagtagtcaggaagtagctatcaat

SEQ ID NO: 4984501 - DNA, 25 bp, Homo sapien
tgtccttgaagcaaccagggtctgg

SEQ ID NO: 4984502 - DNA, 25 bp, Homo sapien
aagattttctagactgggcatcgca

SEQ ID NO: 4984503 - DNA, 25 bp, Homo sapien
ggaaaacgccttgccgcagatcttg

SEQ ID NO: 4984504 - DNA, 25 bp, Homo sapien
cgaatatgcatcttcagggcgccca

SEQ ID NO: 4984505 - DNA, 25 bp, Homo sapien
tatgacaggcatggagtaactctca

SEQ ID NO: 4984506 - DNA, 25 bp, Homo sapien
ccccaaagatgaggagtatccggaa

SEQ ID NO: 4984507 - DNA, 25 bp, Homo sapien
aacttttcagcttcaatggcatggg

SEQ ID NO: 4984508 - DNA, 25 bp, Homo sapien
gagcagcggtagtccacacagtgat

SEQ ID NO: 4984509 - DNA, 25 bp, Homo sapien
tagtttggctttttggaggcgttga

SEQ ID NO: 4984510 - DNA, 25 bp, Homo sapien
ctgtatgtgtgtccagttcgctgta

SEQ ID NO: 4984511 - DNA, 25 bp, Homo sapien
tttggaggcgttgaaatgcttcttg

SEQ ID NO: 4984512 - DNA, 25 bp, Homo sapien
tgtccagttcgctgtagtttggctt

SEQ ID NO: 4984513 - DNA, 25 bp, Homo sapien
gggccgtgctcaggtgcggcagacg

SEQ ID NO: 4984514 - DNA, 25 bp, Homo sapien
gaggacacggcggtccctacagcat

SEQ ID NO: 4984515 - DNA, 25 bp, Homo sapien
cgaactgagcccgttttggctggga

SEQ ID NO: 4984516 - DNA, 25 bp, Homo sapien
tcacccggctcctttacgaactgag

SEQ ID NO: 4984517 - DNA, 25 bp, Homo sapien
cagaggaagaatctgttgtcagact

SEQ ID NO: 4984518 - DNA, 25 bp, Homo sapien
ggaagaatctgttgtcagactaaat

SEQ ID NO: 4984519 - DNA, 25 bp, Homo sapien
tgaacagaggaagaatctgttgtca

SEQ ID NO: 4984520 - DNA, 25 bp, Homo sapien
ctgtgaacagaggaagaatctgttg

SEQ ID NO: 4984521 - DNA, 25 bp, Homo sapien
ctcgctcggtgagccccgcccgcga

SEQ ID NO: 4984522 - DNA, 25 bp, Homo sapien
tctgggagctaggaggggcgcagga

SEQ ID NO: 4984523 - DNA, 25 bp, Homo sapien
tccacgctctctgggagctaggagg

SEQ ID NO: 4984524 - DNA, 25 bp, Homo sapien
ccgcccgcgatccacgctctctggg

SEQ ID NO: 4984525 - DNA, 25 bp, Homo sapien
taactgtcatttggaaccaccggac

SEQ ID NO: 4984526 - DNA, 25 bp, Homo sapien
cacacttttgacaagagatcttatc

SEQ ID NO: 4984527 - DNA, 25 bp, Homo sapien
ccctctaaaggcaggctgatcggaa

SEQ ID NO: 4984528 - DNA, 25 bp, Homo sapien
ataaaaaggaactctggcagagaag

SEQ ID NO: 4984529 - DNA, 25 bp, Homo sapien
cagaggcataatccagcccagcccc

SEQ ID NO: 4984530 - DNA, 25 bp, Homo sapien
agaggcataatccagcccagcccca

SEQ ID NO: 4984531 - DNA, 25 bp, Homo sapien
agcaggtatccgagggtgcactgca

SEQ ID NO: 4984532 - DNA, 25 bp, Homo sapien
tatccgagggtgcactgcacagatc

SEQ ID NO: 4984533 - DNA, 25 bp, Homo sapien
atcggcgtcaggacgtgcggccaca

SEQ ID NO: 4984534 - DNA, 25 bp, Homo sapien
gcactgcacagatcggcgtcaggac

SEQ ID NO: 4984535 - DNA, 25 bp, Homo sapien
tgcatggggcatgtcattacacaga

SEQ ID NO: 4984536 - DNA, 25 bp, Homo sapien
cattacacagatccgcgtgctagcg

SEQ ID NO: 4984537 - DNA, 25 bp, Homo sapien
gggccgctgtcagagcagggcgagt

SEQ ID NO: 4984538 - DNA, 25 bp, Homo sapien
acacgtatgcccgtgtgaggtctgg

SEQ ID NO: 4984539 - DNA, 25 bp, Homo sapien
catgtggtaaaaacgcaagccggga

SEQ ID NO: 4984540 - DNA, 25 bp, Homo sapien
gcgtgagtcagacgaaacaggtgct

SEQ ID NO: 4984541 - DNA, 25 bp, Homo sapien
ggaagtcaaggccacacccaaaggc

SEQ ID NO: 4984542 - DNA, 25 bp, Homo sapien
tctgctcagacacagcggagggcat

SEQ ID NO: 4984543 - DNA, 25 bp, Homo sapien
tcagcaggccaatagccactaggca

SEQ ID NO: 4984544 - DNA, 25 bp, Homo sapien
agccaaaaatggtgtcaggatgtcc

SEQ ID NO: 4984545 - DNA, 25 bp, Homo sapien
cagtgtcatgttcagcaggccaata

SEQ ID NO: 4984546 - DNA, 25 bp, Homo sapien
tttcctgcgtgttcccagtgtcatg

SEQ ID NO: 4984547 - DNA, 25 bp, Homo sapien
gctgagctatatccaaaagcaaacc

SEQ ID NO: 4984548 - DNA, 25 bp, Homo sapien
caaacctaatccttgataaagatcc

SEQ ID NO: 4984549 - DNA, 25 bp, Homo sapien
tgcatataaaacttggttacaccat

SEQ ID NO: 4984550 - DNA, 25 bp, Homo sapien
catttagatcttgatgaaccaattg

SEQ ID NO: 4984551 - DNA, 25 bp, Homo sapien
attttcattattatgcttctgcacc

SEQ ID NO: 4984552 - DNA, 25 bp, Homo sapien
cattttcattattatgcttctgcac

SEQ ID NO: 4984553 - DNA, 25 bp, Homo sapien
ccttctcaggctctccccatccttc

SEQ ID NO: 4984554 - DNA, 25 bp, Homo sapien
ctatagctttgcagaaggcctcctt

SEQ ID NO: 4984555 - DNA, 25 bp, Homo sapien
tatagctttgcagaaggcctccttc

SEQ ID NO: 4984556 - DNA, 25 bp, Homo sapien
catccttcccagagtcctgggtggg

SEQ ID NO: 4984557 - DNA, 25 bp, Homo sapien
tcttggtggcactgttattgtcttt

SEQ ID NO: 4984558 - DNA, 25 bp, Homo sapien
atcttggtggcactgttattgtctt

SEQ ID NO: 4984559 - DNA, 25 bp, Homo sapien
gctgtgcaagttgccaaagccattg

SEQ ID NO: 4984560 - DNA, 25 bp, Homo sapien
atgctgtgcaagttgccaaagccat

SEQ ID NO: 4984561 - DNA, 25 bp, Homo sapien
tgttcttgaagggtggtgttccttc

SEQ ID NO: 4984562 - DNA, 25 bp, Homo sapien
atgatgttcttgaagggtggtgttc

SEQ ID NO: 4984563 - DNA, 25 bp, Homo sapien
cttccacatggattgctgagcacaa

SEQ ID NO: 4984564 - DNA, 25 bp, Homo sapien
gacccattttgcttagactctagtg

SEQ ID NO: 4984565 - DNA, 25 bp, Homo sapien
tctagtgtccatgctcccatgggct

SEQ ID NO: 4984566 - DNA, 25 bp, Homo sapien
catgggctccaatcctctgcaggta

SEQ ID NO: 4984567 - DNA, 25 bp, Homo sapien
atgaagtttccgcagtaaccacaac

SEQ ID NO: 4984568 - DNA, 25 bp, Homo sapien
agcaggagggacctttagtgcatgt

SEQ ID NO: 4984569 - DNA, 25 bp, Homo sapien
gtttccgcagtaaccacaacacagc

SEQ ID NO: 4984570 - DNA, 25 bp, Homo sapien
gagggacctttagtgcatgtgcagc

SEQ ID NO: 4984571 - DNA, 25 bp, Homo sapien
ggtctccaacacatcctgaaatatt

SEQ ID NO: 4984572 - DNA, 25 bp, Homo sapien
tcttcttcccagagtgccttgatca

SEQ ID NO: 4984573 - DNA, 25 bp, Homo sapien
cttgatcaccatggtctccaacaca

SEQ ID NO: 4984574 - DNA, 25 bp, Homo sapien
ctgattcttcttcccagagtgcctt

SEQ ID NO: 4984575 - DNA, 25 bp, Homo sapien
gacagcaaagcttgccgggaataaa

SEQ ID NO: 4984576 - DNA, 25 bp, Homo sapien
acaagaggcgctacccctgttaaca

SEQ ID NO: 4984577 - DNA, 25 bp, Homo sapien
ggaacctaccaagacggcagaggca

SEQ ID NO: 4984578 - DNA, 25 bp, Homo sapien
tgttaacaccactcgggactctggg

SEQ ID NO: 4984579 - DNA, 25 bp, Homo sapien
gccagcagcaagacgagaccccgtc

SEQ ID NO: 4984580 - DNA, 25 bp, Homo sapien
agccagcagcaagacgagaccccgt

SEQ ID NO: 4984581 - DNA, 25 bp, Homo sapien
gggcctccggaagccatgcacagct

SEQ ID NO: 4984582 - DNA, 25 bp, Homo sapien
agggggcctccggaagccatgcaca

SEQ ID NO: 4984583 - DNA, 25 bp, Homo sapien
tccggaagccatgcacagctttggg

SEQ ID NO: 4984584 - DNA, 25 bp, Homo sapien
ttggccacgggccaactcttggcct

SEQ ID NO: 4984585 - DNA, 25 bp, Homo sapien
acgagactgaaggatgcgtccaggg

SEQ ID NO: 4984586 - DNA, 25 bp, Homo sapien
ctcccagagcaataccgagcctgct

SEQ ID NO: 4984587 - DNA, 25 bp, Homo sapien
tgcctcccagagcaataccgagcct

SEQ ID NO: 4984588 - DNA, 25 bp, Homo sapien
tgcgggacgagactgaaggatgcgt

SEQ ID NO: 4984589 - DNA, 25 bp, Homo sapien
gccatagatcatcatctttgggccc

SEQ ID NO: 4984590 - DNA, 25 bp, Homo sapien
cccagtgactatgcgcgctgtgggc

SEQ ID NO: 4984591 - DNA, 25 bp, Homo sapien
cgcgggccctgtcaggacccagaag

SEQ ID NO: 4984592 - DNA, 25 bp, Homo sapien
gggccctgtcaggacccagaaggac

SEQ ID NO: 4984593 - DNA, 25 bp, Homo sapien
gccttgaccacggtttccctggcga

SEQ ID NO: 4984594 - DNA, 25 bp, Homo sapien
gggcacatggggctcgccttgacca

SEQ ID NO: 4984595 - DNA, 25 bp, Homo sapien
tccttagcgtcaggcacgacggtcc

SEQ ID NO: 4984596 - DNA, 25 bp, Homo sapien
accttctcagagcttacgcccgaaa

SEQ ID NO: 4984597 - DNA, 25 bp, Homo sapien
caggctgggcgatcccggacaagcc

SEQ ID NO: 4984598 - DNA, 25 bp, Homo sapien
ctggttctttcaacgtgagctctgc

SEQ ID NO: 4984599 - DNA, 25 bp, Homo sapien
gggcgatcccggacaagcctctgtt

SEQ ID NO: 4984600 - DNA, 25 bp, Homo sapien
tggttctttcaacgtgagctctgca

SEQ ID NO: 4984601 - DNA, 25 bp, Homo sapien
tatgaaacctgcatgggagtgtctc

SEQ ID NO: 4984602 - DNA, 25 bp, Homo sapien
tcctctggcttggagatctgagaag

SEQ ID NO: 4984603 - DNA, 25 bp, Homo sapien
gtctcagtttatgtagttcctcctc

SEQ ID NO: 4984604 - DNA, 25 bp, Homo sapien
cacagatacattaagaacaccagtt

SEQ ID NO: 4984605 - DNA, 25 bp, Homo sapien
ctgctactgcctctgctcccgaacc

SEQ ID NO: 4984606 - DNA, 25 bp, Homo sapien
cccaattgctgctactgcctctgct

SEQ ID NO: 4984607 - DNA, 25 bp, Homo sapien
gatacccaattgctgctactgcctc

SEQ ID NO: 4984608 - DNA, 25 bp, Homo sapien
atttgatacccaattgctgctactg

SEQ ID NO: 4984609 - DNA, 25 bp, Homo sapien
ccaagtactttgctgacttgtaggc

SEQ ID NO: 4984610 - DNA, 25 bp, Homo sapien
cttctcttctcggttgacacgaatc

SEQ ID NO: 4984611 - DNA, 25 bp, Homo sapien
gacacgaatcctcctgtgttgggct

SEQ ID NO: 4984612 - DNA, 25 bp, Homo sapien
ttgctgacttgtaggcaggcccagg

SEQ ID NO: 4984613 - DNA, 25 bp, Homo sapien
cttcaagagttgtacactctgagga

SEQ ID NO: 4984614 - DNA, 25 bp, Homo sapien
tcaagagttgtacactctgaggaca

SEQ ID NO: 4984615 - DNA, 25 bp, Homo sapien
caagagttgtacactctgaggacac

SEQ ID NO: 4984616 - DNA, 25 bp, Homo sapien
ttcaagagttgtacactctgaggac

SEQ ID NO: 4984617 - DNA, 25 bp, Homo sapien
tatacaaagatacattctggtaatg

SEQ ID NO: 4984618 - DNA, 25 bp, Homo sapien
caaagatacattctggtaatgtagc

SEQ ID NO: 4984619 - DNA, 25 bp, Homo sapien
atacattctggtaatgtagcagagc

SEQ ID NO: 4984620 - DNA, 25 bp, Homo sapien
aagatacattctggtaatgtagcag

SEQ ID NO: 4984621 - DNA, 25 bp, Homo sapien
cacttgctgtgaagcacattggggt

SEQ ID NO: 4984622 - DNA, 25 bp, Homo sapien
ttgagagccagcgtttcagattcat

SEQ ID NO: 4984623 - DNA, 25 bp, Homo sapien
cgtagaggtggagagggtgcatttt

SEQ ID NO: 4984624 - DNA, 25 bp, Homo sapien
gcattttgcataagcatacacttgc

SEQ ID NO: 4984625 - DNA, 25 bp, Homo sapien
gctccagagcttcccgttttgcata

SEQ ID NO: 4984626 - DNA, 25 bp, Homo sapien
cttgttaagagtgtatgtagaatcc

SEQ ID NO: 4984627 - DNA, 25 bp, Homo sapien
gatgaagatctctctcgatcatgct

SEQ ID NO: 4984628 - DNA, 25 bp, Homo sapien
ggcaaagcatccttaccttgttaag

SEQ ID NO: 4984629 - DNA, 25 bp, Homo sapien
ggagatgagcttcagtagttaggca

SEQ ID NO: 4984630 - DNA, 25 bp, Homo sapien
tcagttttgcatagttcaacctaat

SEQ ID NO: 4984631 - DNA, 25 bp, Homo sapien
tcagtagttaggcaggagtgatcag

SEQ ID NO: 4984632 - DNA, 25 bp, Homo sapien
caacctaatcatcaacatagtagta

SEQ ID NO: 4984633 - DNA, 25 bp, Homo sapien
tgagctcaggatgtgcctcagggtc

SEQ ID NO: 4984634 - DNA, 25 bp, Homo sapien
gaggacagaataggagcaggcaaat

SEQ ID NO: 4984635 - DNA, 25 bp, Homo sapien
ctggacagaggacagaataggagca

SEQ ID NO: 4984636 - DNA, 25 bp, Homo sapien
caaatgtcttattgtccctttccca

SEQ ID NO: 4984637 - DNA, 25 bp, Homo sapien
aacagcatgtcctctggaactggaa

SEQ ID NO: 4984638 - DNA, 25 bp, Homo sapien
cagactctttcggagggctgcagag

SEQ ID NO: 4984639 - DNA, 25 bp, Homo sapien
tggctgagagaaccgcccacagcca

SEQ ID NO: 4984640 - DNA, 25 bp, Homo sapien
tgtggagaatgtggaaccggtggct

SEQ ID NO: 4984641 - DNA, 25 bp, Homo sapien
cagtgtcttgggtgtccgacgctag

SEQ ID NO: 4984642 - DNA, 25 bp, Homo sapien
cacaggtgatcgtggcttggcagcg

SEQ ID NO: 4984643 - DNA, 25 bp, Homo sapien
caattgttcgaggtgtctggccatc

SEQ ID NO: 4984644 - DNA, 25 bp, Homo sapien
ctgcacaccgtttggcagggagcga

SEQ ID NO: 4984645 - DNA, 25 bp, Homo sapien
tctaaggctgaggagacacttgtgt

SEQ ID NO: 4984646 - DNA, 25 bp, Homo sapien
gcctcactgaaactgtgggcaggta

SEQ ID NO: 4984647 - DNA, 25 bp, Homo sapien
tcttgctccgctttgaccgtgggac

SEQ ID NO: 4984648 - DNA, 25 bp, Homo sapien
aggctgcttgtacatcccacacgtg

SEQ ID NO: 4984649 - DNA, 25 bp, Homo sapien
tcacgggtaaagccatggcatccgt

SEQ ID NO: 4984650 - DNA, 25 bp, Homo sapien
cacgggtaaagccatggcatccgta

SEQ ID NO: 4984651 - DNA, 25 bp, Homo sapien
acgggtaaagccatggcatccgtac

SEQ ID NO: 4984652 - DNA, 25 bp, Homo sapien
tcgaagtaagttgcatcatcataga

SEQ ID NO: 4984653 - DNA, 25 bp, Homo sapien
aaatcagtattatcgaagtaagttg

SEQ ID NO: 4984654 - DNA, 25 bp, Homo sapien
cttccattggttgccttctagccag

SEQ ID NO: 4984655 - DNA, 25 bp, Homo sapien
agaaatcagtattatcgaagtaagt

SEQ ID NO: 4984656 - DNA, 25 bp, Homo sapien
ttagggtacatagttgtctcttgag

SEQ ID NO: 4984657 - DNA, 25 bp, Homo sapien
agtgagccttgcctatgaagcgcac

SEQ ID NO: 4984658 - DNA, 25 bp, Homo sapien
agttgtctcttgagagcagtgagcc

SEQ ID NO: 4984659 - DNA, 25 bp, Homo sapien
tctcttgagagcagtgagccttgcc

SEQ ID NO: 4984660 - DNA, 25 bp, Homo sapien
tccctccttgcaggtcgctgtcagg

SEQ ID NO: 4984661 - DNA, 25 bp, Homo sapien
cctccttgcaggtcgctgtcaggaa

SEQ ID NO: 4984662 - DNA, 25 bp, Homo sapien
gcaggtcgctgtcaggaagatcata

SEQ ID NO: 4984663 - DNA, 25 bp, Homo sapien
cttgcaggtcgctgtcaggaagatc

SEQ ID NO: 4984664 - DNA, 25 bp, Homo sapien
gatctcaattggtcctgaattctgg

SEQ ID NO: 4984665 - DNA, 25 bp, Homo sapien
gtttgatggtgaatgtaagatctca

SEQ ID NO: 4984666 - DNA, 25 bp, Homo sapien
cagtccctgagttaggagcatattt

SEQ ID NO: 4984667 - DNA, 25 bp, Homo sapien
catatttgagtctgtttgatggtga

SEQ ID NO: 4984668 - DNA, 25 bp, Homo sapien
tgaattgaaagcgaggtaggcctca

SEQ ID NO: 4984669 - DNA, 25 bp, Homo sapien
tttgaattgaaagcgaggtaggcct

SEQ ID NO: 4984670 - DNA, 25 bp, Homo sapien
gaattgaaagcgaggtaggcctcat

SEQ ID NO: 4984671 - DNA, 25 bp, Homo sapien
gttttgaattgaaagcgaggtaggc

SEQ ID NO: 4984672 - DNA, 25 bp, Homo sapien
tctactgcagcaactgggaatgtgc

SEQ ID NO: 4984673 - DNA, 25 bp, Homo sapien
tactgcaacagatccacagagcctt

SEQ ID NO: 4984674 - DNA, 25 bp, Homo sapien
taatcatgttgatatcccagaggaa

SEQ ID NO: 4984675 - DNA, 25 bp, Homo sapien
cagaggaaatcttggtggtacacta

SEQ ID NO: 4984676 - DNA, 25 bp, Homo sapien
cacgtgtgatctctgtattaatcat

SEQ ID NO: 4984677 - DNA, 25 bp, Homo sapien
taagaattcacgtgtgatctctgta

SEQ ID NO: 4984678 - DNA, 25 bp, Homo sapien
gaattcacgtgtgatctctgtatta

SEQ ID NO: 4984679 - DNA, 25 bp, Homo sapien
gctattaagaattcacgtgtgatct

SEQ ID NO: 4984680 - DNA, 25 bp, Homo sapien
gaagaaaggaggctagaggataact

SEQ ID NO: 4984681 - DNA, 25 bp, Homo sapien
catataagatcctaaagcaaccaga

SEQ ID NO: 4984682 - DNA, 25 bp, Homo sapien
tcaatctgcctttatgcactagcaa

SEQ ID NO: 4984683 - DNA, 25 bp, Homo sapien
tctaaggttcccattattgctatgc

SEQ ID NO: 4984684 - DNA, 25 bp, Homo sapien
gactgacaagctatccaaaaatttt

SEQ ID NO: 4984685 - DNA, 25 bp, Homo sapien
catgctatattctttgcaacagtga

SEQ ID NO: 4984686 - DNA, 25 bp, Homo sapien
agattcttctagtttctggaatgcc

SEQ ID NO: 4984687 - DNA, 25 bp, Homo sapien
cagttattgttggtaaggactgaca

SEQ ID NO: 4984688 - DNA, 25 bp, Homo sapien
agtgcctggactttgctgagtctta

SEQ ID NO: 4984689 - DNA, 25 bp, Homo sapien
atcagtgcctggactttgctgagtc

SEQ ID NO: 4984690 - DNA, 25 bp, Homo sapien
tcagtgcctggactttgctgagtct

SEQ ID NO: 4984691 - DNA, 25 bp, Homo sapien
tgcctggactttgctgagtcttatt

SEQ ID NO: 4984692 - DNA, 25 bp, Homo sapien
cacaagttttgataaagctttaatg

SEQ ID NO: 4984693 - DNA, 25 bp, Homo sapien
agttgatgcataagaacacaagttt

SEQ ID NO: 4984694 - DNA, 25 bp, Homo sapien
ttttgataaagctttaatgaaagca

SEQ ID NO: 4984695 - DNA, 25 bp, Homo sapien
taaagctttaatgaaagcatctatt

SEQ ID NO: 4984696 - DNA, 25 bp, Homo sapien
gagaaataatttcccatggagatta

SEQ ID NO: 4984697 - DNA, 25 bp, Homo sapien
ccactttcactatgtaggcagaaaa

SEQ ID NO: 4984698 - DNA, 25 bp, Homo sapien
tccactttcactatgtaggcagaaa

SEQ ID NO: 4984699 - DNA, 25 bp, Homo sapien
ttaagctccacagtagttttataga

SEQ ID NO: 4984700 - DNA, 25 bp, Homo sapien
gcccacgtcctgtgcattattttcc

SEQ ID NO: 4984701 - DNA, 25 bp, Homo sapien
tttccatccgtgaccacgtcctatg

SEQ ID NO: 4984702 - DNA, 25 bp, Homo sapien
gctgcacatctcatccgtgcccacg

SEQ ID NO: 4984703 - DNA, 25 bp, Homo sapien
tattttccatccgtgaccacgtcct

SEQ ID NO: 4984704 - DNA, 25 bp, Homo sapien
ggagctggtgacattagatgacttg

SEQ ID NO: 4984705 - DNA, 25 bp, Homo sapien
tattaaagcgataatgtatgaggag

SEQ ID NO: 4984706 - DNA, 25 bp, Homo sapien
ctgaggatattaaagcgataatgta

SEQ ID NO: 4984707 - DNA, 25 bp, Homo sapien
tgaggagctggtgacattagatgac

SEQ ID NO: 4984708 - DNA, 25 bp, Homo sapien
tccagatgctccaacctcataacag

SEQ ID NO: 4984709 - DNA, 25 bp, Homo sapien
agtgtcatagattgcagttctgatg

SEQ ID NO: 4984710 - DNA, 25 bp, Homo sapien
ctttcccagcataaaggctggtcac

SEQ ID NO: 4984711 - DNA, 25 bp, Homo sapien
taaaggctggtcacacttctcttcc

SEQ ID NO: 4984712 - DNA, 25 bp, Homo sapien
ctcccgataacatgctcccatggga

SEQ ID NO: 4984713 - DNA, 25 bp, Homo sapien
cgataacatgctcccatgggatctg

SEQ ID NO: 4984714 - DNA, 25 bp, Homo sapien
ttctgattgtcacttgtgtgataga

SEQ ID NO: 4984715 - DNA, 25 bp, Homo sapien
agatgaaacaattaggttgcattac

SEQ ID NO: 4984716 - DNA, 25 bp, Homo sapien
ataaaaataagaaaaatctagatca

SEQ ID NO: 4984717 - DNA, 25 bp, Homo sapien
aataagaaaaatctagatcaaatat

SEQ ID NO: 4984718 - DNA, 25 bp, Homo sapien
taaaaataagaaaaatctagatcaa

SEQ ID NO: 4984719 - DNA, 25 bp, Homo sapien
aaaataagaaaaatctagatcaaat

SEQ ID NO: 4984720 - DNA, 25 bp, Homo sapien
tggagatcacatgcttttgttctgg

SEQ ID NO: 4984721 - DNA, 25 bp, Homo sapien
aatcagacgctgatgtgagatacag

SEQ ID NO: 4984722 - DNA, 25 bp, Homo sapien
ctggtagttaggattccatatggga

SEQ ID NO: 4984723 - DNA, 25 bp, Homo sapien
gatttggattcaaggaatcagacgc

SEQ ID NO: 4984724 - DNA, 25 bp, Homo sapien
gaaggatattagtgctcccgctcaa

SEQ ID NO: 4984725 - DNA, 25 bp, Homo sapien
ttgcataaacacaggagagagaggc

SEQ ID NO: 4984726 - DNA, 25 bp, Homo sapien
tgatggtgtacaaactgctgcaacg

SEQ ID NO: 4984727 - DNA, 25 bp, Homo sapien
gaaggagtgctaactgaatgtagta

SEQ ID NO: 4984728 - DNA, 25 bp, Homo sapien
tgattattacccgatcgattccgtt

SEQ ID NO: 4984729 - DNA, 25 bp, Homo sapien
gaacagcatgattattacccgatcg

SEQ ID NO: 4984730 - DNA, 25 bp, Homo sapien
gcaaagccaacagaacagcatgatt

SEQ ID NO: 4984731 - DNA, 25 bp, Homo sapien
gatcgattccgttttgagtatctgc

SEQ ID NO: 4984732 - DNA, 25 bp, Homo sapien
tttctttagcccctgatagccaaaa

SEQ ID NO: 4984733 - DNA, 25 bp, Homo sapien
tagcccctgatagccaaaaatagcc

SEQ ID NO: 4984734 - DNA, 25 bp, Homo sapien
cctgatagccaaaaatagccctttg

SEQ ID NO: 4984735 - DNA, 25 bp, Homo sapien
tcatctttgctccgtcatgctcctg

SEQ ID NO: 4984736 - DNA, 25 bp, Homo sapien
ctggagtacatgcatcctcatgtgt

SEQ ID NO: 4984737 - DNA, 25 bp, Homo sapien
tggagtacatgcatcctcatgtgtc

SEQ ID NO: 4984738 - DNA, 25 bp, Homo sapien
gagtacatgcatcctcatgtgtcat

SEQ ID NO: 4984739 - DNA, 25 bp, Homo sapien
ggagtacatgcatcctcatgtgtca

SEQ ID NO: 4984740 - DNA, 25 bp, Homo sapien
ggtatcaaagtcgttttcatacaac

SEQ ID NO: 4984741 - DNA, 25 bp, Homo sapien
caaagtcgttttcatacaacatatc

SEQ ID NO: 4984742 - DNA, 25 bp, Homo sapien
tttcatacaacatatcagcccctga

SEQ ID NO: 4984743 - DNA, 25 bp, Homo sapien
ttattatggtatcaaagtcgttttc

SEQ ID NO: 4984744 - DNA, 25 bp, Homo sapien
gagtcctgtgcaatctttcgggtcg

SEQ ID NO: 4984745 - DNA, 25 bp, Homo sapien
cagctatttaggttctgaagcatgc

SEQ ID NO: 4984746 - DNA, 25 bp, Homo sapien
ctgcatgttccaggccgtcttgtag

SEQ ID NO: 4984747 - DNA, 25 bp, Homo sapien
ggttctgaagcatgctccagtgctg

SEQ ID NO: 4984748 - DNA, 25 bp, Homo sapien
ggaacacagcaggcctgtcagaagg

SEQ ID NO: 4984749 - DNA, 25 bp, Homo sapien
gaacacagcaggcctgtcagaagga

SEQ ID NO: 4984750 - DNA, 25 bp, Homo sapien
aggaacacagcaggcctgtcagaag

SEQ ID NO: 4984751 - DNA, 25 bp, Homo sapien
ccatctgtgacagcaacagagaaag

SEQ ID NO: 4984752 - DNA, 25 bp, Homo sapien
tccattcaaactcacctagaatctt

SEQ ID NO: 4984753 - DNA, 25 bp, Homo sapien
ggcctggattctctcagcccttatc

SEQ ID NO: 4984754 - DNA, 25 bp, Homo sapien
ttatcctccattcaaactcacctag

SEQ ID NO: 4984755 - DNA, 25 bp, Homo sapien
caaactcacctagaatcttactgac

SEQ ID NO: 4984756 - DNA, 25 bp, Homo sapien
atgttctattgacgtcatcttcaat

SEQ ID NO: 4984757 - DNA, 25 bp, Homo sapien
caaatccttatcatcaagggatccg

SEQ ID NO: 4984758 - DNA, 25 bp, Homo sapien
tcaagggatccgcagcaccggtcat

SEQ ID NO: 4984759 - DNA, 25 bp, Homo sapien
ccaaatccttatcatcaagggatcc

SEQ ID NO: 4984760 - DNA, 25 bp, Homo sapien
catcaagggatccgcagcaccggtc

SEQ ID NO: 4984761 - DNA, 25 bp, Homo sapien
tctgacagcttttgcaaggtggatg

SEQ ID NO: 4984762 - DNA, 25 bp, Homo sapien
cagtagttggtccacttctgacagc

SEQ ID NO: 4984763 - DNA, 25 bp, Homo sapien
taacctatacctgagaaaagaccaa

SEQ ID NO: 4984764 - DNA, 25 bp, Homo sapien
gatgccatgatagatttctaaccta

SEQ ID NO: 4984765 - DNA, 25 bp, Homo sapien
agcagtaatttctgttgttgctttg

SEQ ID NO: 4984766 - DNA, 25 bp, Homo sapien
cctcccagtaatggtatccaaaggt

SEQ ID NO: 4984767 - DNA, 25 bp, Homo sapien
gattaatagattctttgcaaacacc

SEQ ID NO: 4984768 - DNA, 25 bp, Homo sapien
tgaaccgagggaagcctattgacaa

SEQ ID NO: 4984769 - DNA, 25 bp, Homo sapien
agatcccacgatttgcttgtcccca

SEQ ID NO: 4984770 - DNA, 25 bp, Homo sapien
ttctgatagctaaaacctatgatac

SEQ ID NO: 4984771 - DNA, 25 bp, Homo sapien
ttttctgatagctaaaacctatgat

SEQ ID NO: 4984772 - DNA, 25 bp, Homo sapien
cacttgacaaagactttcagttttt

SEQ ID NO: 4984773 - DNA, 25 bp, Homo sapien
tttttctgatagctaaaacctatga

SEQ ID NO: 4984774 - DNA, 25 bp, Homo sapien
ccttctctcatggcagggccccata

SEQ ID NO: 4984775 - DNA, 25 bp, Homo sapien
ctcatggcagggccccataacattc

SEQ ID NO: 4984776 - DNA, 25 bp, Homo sapien
tcatggcagggccccataacattca

SEQ ID NO: 4984777 - DNA, 25 bp, Homo sapien
tctctcatggcagggccccataaca

SEQ ID NO: 4984778 - DNA, 25 bp, Homo sapien
cttgccaattgagctgttaatcatt

SEQ ID NO: 4984779 - DNA, 25 bp, Homo sapien
ttgccaattgagctgttaatcatta

SEQ ID NO: 4984780 - DNA, 25 bp, Homo sapien
tgagttccgcaaatgttgagtagcc

SEQ ID NO: 4984781 - DNA, 25 bp, Homo sapien
cagagacgtggcatgtaagataagc

SEQ ID NO: 4984782 - DNA, 25 bp, Homo sapien
tttgaaaacgcatggtgagttccgc

SEQ ID NO: 4984783 - DNA, 25 bp, Homo sapien
tgatccatgggtagaactgtggaag

SEQ ID NO: 4984784 - DNA, 25 bp, Homo sapien
ggtggtcgcggtacacttgcctcat

SEQ ID NO: 4984785 - DNA, 25 bp, Homo sapien
gtcctggtgtggtggtcgcggtaca

SEQ ID NO: 4984786 - DNA, 25 bp, Homo sapien
cagtgacacctcttgcagctccaac

SEQ ID NO: 4984787 - DNA, 25 bp, Homo sapien
aggtgtgcaatctgcacctgagtcc

SEQ ID NO: 4984788 - DNA, 25 bp, Homo sapien
gccttcactaaagttgcccttcata

SEQ ID NO: 4984789 - DNA, 25 bp, Homo sapien
tcaggctgtgacactaaagccttca

SEQ ID NO: 4984790 - DNA, 25 bp, Homo sapien
tgcccttcataagcttcttaggatg

SEQ ID NO: 4984791 - DNA, 25 bp, Homo sapien
cataagcttcttaggatgtgggtgg

SEQ ID NO: 4984792 - DNA, 25 bp, Homo sapien
accaaagcgagagcggactccggtg

SEQ ID NO: 4984793 - DNA, 25 bp, Homo sapien
gtgagcaaaccaaagcgagagcgga

SEQ ID NO: 4984794 - DNA, 25 bp, Homo sapien
ggactccggtgctggaggacagagc

SEQ ID NO: 4984795 - DNA, 25 bp, Homo sapien
gagcaaaccaaagcgagagcggact

SEQ ID NO: 4984796 - DNA, 25 bp, Homo sapien
gctgcctgtttggccacaactgtct

SEQ ID NO: 4984797 - DNA, 25 bp, Homo sapien
gccacaactgtcttaaatctcaggt

SEQ ID NO: 4984798 - DNA, 25 bp, Homo sapien
ctgcctgtttggccacaactgtctt

SEQ ID NO: 4984799 - DNA, 25 bp, Homo sapien
cctcctccctacaaaatcggccact

SEQ ID NO: 4984800 - DNA, 25 bp, Homo sapien
tcctccctacaaaatcggccacttc

SEQ ID NO: 4984801 - DNA, 25 bp, Homo sapien
ctacaaaatcggccacttcctcctc

SEQ ID NO: 4984802 - DNA, 25 bp, Homo sapien
tccctacaaaatcggccacttcctc

SEQ ID NO: 4984803 - DNA, 25 bp, Homo sapien
cctctgcccagtctgcctggatttc

SEQ ID NO: 4984804 - DNA, 25 bp, Homo sapien
cttcctctgcccagtctgcctggat

SEQ ID NO: 4984805 - DNA, 25 bp, Homo sapien
tctgcctggatttcagtttcttgtt

SEQ ID NO: 4984806 - DNA, 25 bp, Homo sapien
ctggatttcagtttcttgttccagg

SEQ ID NO: 4984807 - DNA, 25 bp, Homo sapien
caaccagtcccattatctggtgcat

SEQ ID NO: 4984808 - DNA, 25 bp, Homo sapien
ttcaaccagtcccattatctggtgc

SEQ ID NO: 4984809 - DNA, 25 bp, Homo sapien
tcaaccagtcccattatctggtgca

SEQ ID NO: 4984810 - DNA, 25 bp, Homo sapien
ctttcaaccagtcccattatctggt

SEQ ID NO: 4984811 - DNA, 25 bp, Homo sapien
ggacaggaaggttgaagaatctcat

SEQ ID NO: 4984812 - DNA, 25 bp, Homo sapien
caggacaggaaggttgaagaatctc

SEQ ID NO: 4984813 - DNA, 25 bp, Homo sapien
ctgaaacaggacaggaaggttgaag

SEQ ID NO: 4984814 - DNA, 25 bp, Homo sapien
aaacaggacaggaaggttgaagaat

SEQ ID NO: 4984815 - DNA, 25 bp, Homo sapien
agacagattgacattgcaggacatg

SEQ ID NO: 4984816 - DNA, 25 bp, Homo sapien
cattggtggtcctgaatgactggag

SEQ ID NO: 4984817 - DNA, 25 bp, Homo sapien
actcaggaggcgcagaactgctgtg

SEQ ID NO: 4984818 - DNA, 25 bp, Homo sapien
agcagattaggaaaaggaggcactg

SEQ ID NO: 4984819 - DNA, 25 bp, Homo sapien
cctatttcttcttggagccataagc

SEQ ID NO: 4984820 - DNA, 25 bp, Homo sapien
tcttggagccataagcattttatcg

SEQ ID NO: 4984821 - DNA, 25 bp, Homo sapien
ctatttcttcttggagccataagca

SEQ ID NO: 4984822 - DNA, 25 bp, Homo sapien
tcttcttggagccataagcatttta

SEQ ID NO: 4984823 - DNA, 25 bp, Homo sapien
ggactccagtggaagagtctgagaa

SEQ ID NO: 4984824 - DNA, 25 bp, Homo sapien
agaatctctgttgagttgatttccg

SEQ ID NO: 4984825 - DNA, 25 bp, Homo sapien
tctgttgagttgatttccgcattct

SEQ ID NO: 4984826 - DNA, 25 bp, Homo sapien
aatctctgttgagttgatttccgca

SEQ ID NO: 4984827 - DNA, 25 bp, Homo sapien
aatttttgcagcttgtaccttccaa

SEQ ID NO: 4984828 - DNA, 25 bp, Homo sapien
tctgatgtaatttttgcagcttgta

SEQ ID NO: 4984829 - DNA, 25 bp, Homo sapien
cttgtaccttccaaggatcattcaa

SEQ ID NO: 4984830 - DNA, 25 bp, Homo sapien
tgtaccttccaaggatcattcaaat

SEQ ID NO: 4984831 - DNA, 25 bp, Homo sapien
actgttgtgtctgattctggaggct

SEQ ID NO: 4984832 - DNA, 25 bp, Homo sapien
cttgagttttgtgttgcagagtaaa

SEQ ID NO: 4984833 - DNA, 25 bp, Homo sapien
tcttgagttttgtgttgcagagtaa

SEQ ID NO: 4984834 - DNA, 25 bp, Homo sapien
gacactgttgtgtctgattctggag

SEQ ID NO: 4984835 - DNA, 25 bp, Homo sapien
gatgaaggtgggttgtgtgctctga

SEQ ID NO: 4984836 - DNA, 25 bp, Homo sapien
cagcagggccatctcattgttgcaa

SEQ ID NO: 4984837 - DNA, 25 bp, Homo sapien
tgcaactttgcttgtgtggagtagg

SEQ ID NO: 4984838 - DNA, 25 bp, Homo sapien
gaatacaatggataagagatgaagg

SEQ ID NO: 4984839 - DNA, 25 bp, Homo sapien
actgggaagaagaggcttaatggac

SEQ ID NO: 4984840 - DNA, 25 bp, Homo sapien
aaagagagagcgcctgtgcagggga

SEQ ID NO: 4984841 - DNA, 25 bp, Homo sapien
tgagactgggaagaagaggcttaat

SEQ ID NO: 4984842 - DNA, 25 bp, Homo sapien
gaagaagaggcttaatggacttaca

SEQ ID NO: 4984843 - DNA, 25 bp, Homo sapien
tcagcttacactctcttgcatctac

SEQ ID NO: 4984844 - DNA, 25 bp, Homo sapien
tactcagcttacactctcttgcatc

SEQ ID NO: 4984845 - DNA, 25 bp, Homo sapien
cagccccaagattactcagcttaca

SEQ ID NO: 4984846 - DNA, 25 bp, Homo sapien
caagattactcagcttacactctct

SEQ ID NO: 4984847 - DNA, 25 bp, Homo sapien
ctcctcataattaggaagcagctgt

SEQ ID NO: 4984848 - DNA, 25 bp, Homo sapien
aattaggaagcagctgtttctggcc

SEQ ID NO: 4984849 - DNA, 25 bp, Homo sapien
ttcatgctcctcataattaggaagc

SEQ ID NO: 4984850 - DNA, 25 bp, Homo sapien
ctgttcatgctcctcataattagga

SEQ ID NO: 4984851 - DNA, 25 bp, Homo sapien
gattcatgttaccaattttggctgc

SEQ ID NO: 4984852 - DNA, 25 bp, Homo sapien
aaaacttccatcgttcttcatgcac

SEQ ID NO: 4984853 - DNA, 25 bp, Homo sapien
caggcaagattcatgttaccaattt

SEQ ID NO: 4984854 - DNA, 25 bp, Homo sapien
tcatgcaccttgtttccaactcaca

SEQ ID NO: 4984855 - DNA, 25 bp, Homo sapien
taaagtgagccgtgccttgattcct

SEQ ID NO: 4984856 - DNA, 25 bp, Homo sapien
atgtgtactccgcatctgaccccac

SEQ ID NO: 4984857 - DNA, 25 bp, Homo sapien
gcaacagtaaagtgagccgtgcctt

SEQ ID NO: 4984858 - DNA, 25 bp, Homo sapien
ttcaatggcaacagtaaagtgagcc

SEQ ID NO: 4984859 - DNA, 25 bp, Homo sapien
ctgtcatgaaccttataagataaac

SEQ ID NO: 4984860 - DNA, 25 bp, Homo sapien
tgaaccttataagataaacttgaag

SEQ ID NO: 4984861 - DNA, 25 bp, Homo sapien
ccatcaaatccttgtctgtcatgaa

SEQ ID NO: 4984862 - DNA, 25 bp, Homo sapien
ttgaaaccatcaaatccttgtctgt

SEQ ID NO: 4984863 - DNA, 25 bp, Homo sapien
ttgatttggaaggactgatatgacc

SEQ ID NO: 4984864 - DNA, 25 bp, Homo sapien
cttggaagctagtgcacacgcatgt

SEQ ID NO: 4984865 - DNA, 25 bp, Homo sapien
ggaagctagtgcacacgcatgtagt

SEQ ID NO: 4984866 - DNA, 25 bp, Homo sapien
cacacgcatgtagttgatttggaag

SEQ ID NO: 4984867 - DNA, 25 bp, Homo sapien
gccctttcaaggacaacatattgag

SEQ ID NO: 4984868 - DNA, 25 bp, Homo sapien
tgccctttcaaggacaacatattga

SEQ ID NO: 4984869 - DNA, 25 bp, Homo sapien
actttgcattccagtactgaagggg

SEQ ID NO: 4984870 - DNA, 25 bp, Homo sapien
tccagtactgaaggggactctcgga

SEQ ID NO: 4984871 - DNA, 25 bp, Homo sapien
cccagttggtcatcacggactatca

SEQ ID NO: 4984872 - DNA, 25 bp, Homo sapien
agttggtcatcacggactatcacca

SEQ ID NO: 4984873 - DNA, 25 bp, Homo sapien
gccacgcaccgtcccatttgcacaa

SEQ ID NO: 4984874 - DNA, 25 bp, Homo sapien
agtcaaattccacgccacgcaccgt

SEQ ID NO: 4984875 - DNA, 25 bp, Homo sapien
cgcaccgtcccatttgcacaataat

SEQ ID NO: 4984876 - DNA, 25 bp, Homo sapien
aaagtcaaattccacgccacgcacc

SEQ ID NO: 4984877 - DNA, 25 bp, Homo sapien
ggtataactcccaagtttagagtga

SEQ ID NO: 4984878 - DNA, 25 bp, Homo sapien
tataactcccaagtttagagtgaac

SEQ ID NO: 4984879 - DNA, 25 bp, Homo sapien
ctggaatttaggtataactcccaag

SEQ ID NO: 4984880 - DNA, 25 bp, Homo sapien
aggtataactcccaagtttagagtg

SEQ ID NO: 4984881 - DNA, 25 bp, Homo sapien
atagtcccaggcttcttctacagcc

SEQ ID NO: 4984882 - DNA, 25 bp, Homo sapien
tagtcccaggcttcttctacagcct

SEQ ID NO: 4984883 - DNA, 25 bp, Homo sapien
tgctttcaagccaatcaactttaag

SEQ ID NO: 4984884 - DNA, 25 bp, Homo sapien
tgtcaccacatagtccgcactcctt

SEQ ID NO: 4984885 - DNA, 25 bp, Homo sapien
gccaatcaactttaaggggacagca

SEQ ID NO: 4984886 - DNA, 25 bp, Homo sapien
gggacagcactgaactggctcgacc

SEQ ID NO: 4984887 - DNA, 25 bp, Homo sapien
aacagctagcaatccccgcacaaga

SEQ ID NO: 4984888 - DNA, 25 bp, Homo sapien
cacaaaaatcacctcgtagttgtct

SEQ ID NO: 4984889 - DNA, 25 bp, Homo sapien
tctctgcattgttaataatcttgat

SEQ ID NO: 4984890 - DNA, 25 bp, Homo sapien
ttgtctggaacagctagcaatcccc

SEQ ID NO: 4984891 - DNA, 25 bp, Homo sapien
ctggaccaggcccaaagttgactac

SEQ ID NO: 4984892 - DNA, 25 bp, Homo sapien
tgtgactcatttcaagaatactaat

SEQ ID NO: 4984893 - DNA, 25 bp, Homo sapien
taacaacactgagtgtggcagcttg

SEQ ID NO: 4984894 - DNA, 25 bp, Homo sapien
tttcaagaatactaatgccaattcc

SEQ ID NO: 4984895 - DNA, 25 bp, Homo sapien
gaatatcctgccagtaactctgcaa

SEQ ID NO: 4984896 - DNA, 25 bp, Homo sapien
tcagtattacatgaaagcgttttgg

SEQ ID NO: 4984897 - DNA, 25 bp, Homo sapien
catgaaagcgttttggaatatcctg

SEQ ID NO: 4984898 - DNA, 25 bp, Homo sapien
caaagattcctcttgtcagatacat

SEQ ID NO: 4984899 - DNA, 25 bp, Homo sapien
gttaattcttgtgtcaggcttccag

SEQ ID NO: 4984900 - DNA, 25 bp, Homo sapien
tgactattagagtccacgtgttcag

SEQ ID NO: 4984901 - DNA, 25 bp, Homo sapien
ccaggccttcatgtgttaattcttg

SEQ ID NO: 4984902 - DNA, 25 bp, Homo sapien
gatagataaacagtccatcttccag

SEQ ID NO: 4984903 - DNA, 25 bp, Homo sapien
tcgcgatgtctactgagtcctgcat

SEQ ID NO: 4984904 - DNA, 25 bp, Homo sapien
cttgtatcgcttcgcgatgtctact

SEQ ID NO: 4984905 - DNA, 25 bp, Homo sapien
gcttcgcgatgtctactgagtcctg

SEQ ID NO: 4984906 - DNA, 25 bp, Homo sapien
gtatcgcttcgcgatgtctactgag

SEQ ID NO: 4984907 - DNA, 25 bp, Homo sapien
tgagctttacgacatctggcagact

SEQ ID NO: 4984908 - DNA, 25 bp, Homo sapien
tttacgacatctggcagactcccct

SEQ ID NO: 4984909 - DNA, 25 bp, Homo sapien
tcctgctcccaaggggcagtgacta

SEQ ID NO: 4984910 - DNA, 25 bp, Homo sapien
tgtttctgagctttacgacatctgg

SEQ ID NO: 4984911 - DNA, 25 bp, Homo sapien
caaaacattcttggacatgccgcag

SEQ ID NO: 4984912 - DNA, 25 bp, Homo sapien
aatgaatggcatgtctcactcaggc

SEQ ID NO: 4984913 - DNA, 25 bp, Homo sapien
tcactcattgtcgtgcatcagacaa

SEQ ID NO: 4984914 - DNA, 25 bp, Homo sapien
gtcacaagcagttacaaaccctcag

SEQ ID NO: 4984915 - DNA, 25 bp, Homo sapien
caaatcagtaagtgaatagtaaatg

SEQ ID NO: 4984916 - DNA, 25 bp, Homo sapien
tgcaaatcagtaagtgaatagtaaa

SEQ ID NO: 4984917 - DNA, 25 bp, Homo sapien
gcaaatcagtaagtgaatagtaaat

SEQ ID NO: 4984918 - DNA, 25 bp, Homo sapien
atcagtaagtgaatagtaaatgtcc

SEQ ID NO: 4984919 - DNA, 25 bp, Homo sapien
ggagaagttcaactatttccatgtt

SEQ ID NO: 4984920 - DNA, 25 bp, Homo sapien
taattgcataaggagcacctgggta

SEQ ID NO: 4984921 - DNA, 25 bp, Homo sapien
aagtggtatgatatctctggtccct

SEQ ID NO: 4984922 - DNA, 25 bp, Homo sapien
gactctaacctctaaactcatgttt

SEQ ID NO: 4984923 - DNA, 25 bp, Homo sapien
atccctgcagagcactaaggttgtg

SEQ ID NO: 4984924 - DNA, 25 bp, Homo sapien
cactgaaaaatctgccagtcttgcc

SEQ ID NO: 4984925 - DNA, 25 bp, Homo sapien
tccttcaccagcaaatggagataac

SEQ ID NO: 4984926 - DNA, 25 bp, Homo sapien
gagataaccgtctccatccctgcag

SEQ ID NO: 4984927 - DNA, 25 bp, Homo sapien
gggtacagccagacctgttgcatgc

SEQ ID NO: 4984928 - DNA, 25 bp, Homo sapien
cctgttgcatgcagaactaagccag

SEQ ID NO: 4984929 - DNA, 25 bp, Homo sapien
gaagcgttaaaattgcattgcctct

SEQ ID NO: 4984930 - DNA, 25 bp, Homo sapien
catgcggagaatgaaagagagcacc

SEQ ID NO: 4984931 - DNA, 25 bp, Homo sapien
aaaggggcacagaggcgcatcttcc

SEQ ID NO: 4984932 - DNA, 25 bp, Homo sapien
aattggtgtcctcttctctgctgga

SEQ ID NO: 4984933 - DNA, 25 bp, Homo sapien
tattgaccgacagggacagtctgta

SEQ ID NO: 4984934 - DNA, 25 bp, Homo sapien
ttattgaccgacagggacagtctgt

SEQ ID NO: 4984935 - DNA, 25 bp, Homo sapien
atgtcatcacctccaatatctgcat

SEQ ID NO: 4984936 - DNA, 25 bp, Homo sapien
cagtgtaggaagatagttctgtcca

SEQ ID NO: 4984937 - DNA, 25 bp, Homo sapien
ctgtggtcacatggtgccaacagtg

SEQ ID NO: 4984938 - DNA, 25 bp, Homo sapien
gaagatagttctgtccatgtcatca

SEQ ID NO: 4984939 - DNA, 25 bp, Homo sapien
ttttagagaatctttataatgttca

SEQ ID NO: 4984940 - DNA, 25 bp, Homo sapien
tttagagaatctttataatgttcat

SEQ ID NO: 4984941 - DNA, 25 bp, Homo sapien
gagaatctttataatgttcattcat

SEQ ID NO: 4984942 - DNA, 25 bp, Homo sapien
tagagaatctttataatgttcattc

SEQ ID NO: 4984943 - DNA, 25 bp, Homo sapien
aggtccctgtagtttccgctgccca

SEQ ID NO: 4984944 - DNA, 25 bp, Homo sapien
ccactcctaggccagaaaagcaaga

SEQ ID NO: 4984945 - DNA, 25 bp, Homo sapien
gctaacaaatctgtgcaccgccagg

SEQ ID NO: 4984946 - DNA, 25 bp, Homo sapien
gaaaggcctttacagtgcagaaata

SEQ ID NO: 4984947 - DNA, 25 bp, Homo sapien
aggtcattgtgcaggccgaaatctg

SEQ ID NO: 4984948 - DNA, 25 bp, Homo sapien
gaaatctgagcattaacacagcacc

SEQ ID NO: 4984949 - DNA, 25 bp, Homo sapien
tcagtgattcatcagatccactctc

SEQ ID NO: 4984950 - DNA, 25 bp, Homo sapien
gattcatcagatccactctcctgaa

SEQ ID NO: 4984951 - DNA, 25 bp, Homo sapien
aaattggcagcatatcctatgagga

SEQ ID NO: 4984952 - DNA, 25 bp, Homo sapien
tcttctagagagtgtgccatctgtc

SEQ ID NO: 4984953 - DNA, 25 bp, Homo sapien
ttttataccctaggccaaattggca

SEQ ID NO: 4984954 - DNA, 25 bp, Homo sapien
ttcccagtggttagcaacttgcttc

SEQ ID NO: 4984955 - DNA, 25 bp, Homo sapien
tatgctcgttgtcagccagttgcca

SEQ ID NO: 4984956 - DNA, 25 bp, Homo sapien
cacaagttaggagtctgcaagggcg

SEQ ID NO: 4984957 - DNA, 25 bp, Homo sapien
tccacatagtttcaaaggtccacat

SEQ ID NO: 4984958 - DNA, 25 bp, Homo sapien
cgtctgcacccgttgccgagtgtgg

SEQ ID NO: 4984959 - DNA, 25 bp, Homo sapien
tacacaaatttgtaacccgtgcctg

SEQ ID NO: 4984960 - DNA, 25 bp, Homo sapien
ccaatgagtacattcagttcagtga

SEQ ID NO: 4984961 - DNA, 25 bp, Homo sapien
cataatcaactctgtgaaaagagtc

SEQ ID NO: 4984962 - DNA, 25 bp, Homo sapien
gacatttcactaagaatccgatcaa

SEQ ID NO: 4984963 - DNA, 25 bp, Homo sapien
tgaacctgcttgcttagcagaaaag

SEQ ID NO: 4984964 - DNA, 25 bp, Homo sapien
agcagaggcatctatgtcactgagc

SEQ ID NO: 4984965 - DNA, 25 bp, Homo sapien
catgaacctgcttgcttagcagaaa

SEQ ID NO: 4984966 - DNA, 25 bp, Homo sapien
atgaacctgcttgcttagcagaaaa

SEQ ID NO: 4984967 - DNA, 25 bp, Homo sapien
gaagtgaccgtctccttgcagtttc

SEQ ID NO: 4984968 - DNA, 25 bp, Homo sapien
gatccacgactcctgagtaggtgct

SEQ ID NO: 4984969 - DNA, 25 bp, Homo sapien
ccagaggcgggaagcgcaatccaag

SEQ ID NO: 4984970 - DNA, 25 bp, Homo sapien
cagattcccgggctgtttgtagcag

SEQ ID NO: 4984971 - DNA, 25 bp, Homo sapien
gctgtatgaacggtttgctgcaaac

SEQ ID NO: 4984972 - DNA, 25 bp, Homo sapien
aaagcgccaagacatctacccacag

SEQ ID NO: 4984973 - DNA, 25 bp, Homo sapien
tcaggaagcaaagcgccaagacatc

SEQ ID NO: 4984974 - DNA, 25 bp, Homo sapien
ccacagcatgtgctgtatgaacggt

SEQ ID NO: 4984975 - DNA, 25 bp, Homo sapien
tgtagcaatgctatgaatagctccc

SEQ ID NO: 4984976 - DNA, 25 bp, Homo sapien
aatagctcccactttatttcagtga

SEQ ID NO: 4984977 - DNA, 25 bp, Homo sapien
gtagcaatgctatgaatagctccca

SEQ ID NO: 4984978 - DNA, 25 bp, Homo sapien
gcatgtagcaatgctatgaatagct

SEQ ID NO: 4984979 - DNA, 25 bp, Homo sapien
tctttgggtcgggatcattttcatc

SEQ ID NO: 4984980 - DNA, 25 bp, Homo sapien
gctctagggccattgcatcttggtt

SEQ ID NO: 4984981 - DNA, 25 bp, Homo sapien
acacctagcttgtcgtcgcgctcta

SEQ ID NO: 4984982 - DNA, 25 bp, Homo sapien
aagtcaggttctgtgcttttgatga

SEQ ID NO: 4984983 - DNA, 25 bp, Homo sapien
caggattgctgagtcgcttgtgtgt

SEQ ID NO: 4984984 - DNA, 25 bp, Homo sapien
tcgcttgtgtgtccgctgtttacag

SEQ ID NO: 4984985 - DNA, 25 bp, Homo sapien
gctgagtcgcttgtgtgtccgctgt

SEQ ID NO: 4984986 - DNA, 25 bp, Homo sapien
attgctgagtcgcttgtgtgtccgc

SEQ ID NO: 4984987 - DNA, 25 bp, Homo sapien
accagtctgagaaatccggtcccca

SEQ ID NO: 4984988 - DNA, 25 bp, Homo sapien
caacaccagtctgagaaatccggtc

SEQ ID NO: 4984989 - DNA, 25 bp, Homo sapien
tatgtcaacaccagtctgagaaatc

SEQ ID NO: 4984990 - DNA, 25 bp, Homo sapien
ctatgtcaacaccagtctgagaaat

SEQ ID NO: 4984991 - DNA, 25 bp, Homo sapien
tgtttgatatccatcgacagggagc

SEQ ID NO: 4984992 - DNA, 25 bp, Homo sapien
acttgaagagagcatctgggactgg

SEQ ID NO: 4984993 - DNA, 25 bp, Homo sapien
cagagagacttgaagagagcatctg

SEQ ID NO: 4984994 - DNA, 25 bp, Homo sapien
catctgggactggaccggaacacac

SEQ ID NO: 4984995 - DNA, 25 bp, Homo sapien
gagacttgaagagagcatctgggac

SEQ ID NO: 4984996 - DNA, 25 bp, Homo sapien
tcctctgaacaagatctgggttaag

SEQ ID NO: 4984997 - DNA, 25 bp, Homo sapien
ttaagctctcggacagatgtccaag

SEQ ID NO: 4984998 - DNA, 25 bp, Homo sapien
ctgccatcaccagactgaaggacag

SEQ ID NO: 4984999 - DNA, 25 bp, Homo sapien
gggccagatggtgttcctctgaaca

SEQ ID NO: 4985000 - DNA, 25 bp, Homo sapien
tgtgctaaggccatcggactcccct

SEQ ID NO: 4985001 - DNA, 25 bp, Homo sapien
tgagcgcaagtcaggctgtgcagca

SEQ ID NO: 4985002 - DNA, 25 bp, Homo sapien
taagggctctctaggcaaagcttgc

SEQ ID NO: 4985003 - DNA, 25 bp, Homo sapien
gcagcaggtggtctgttcttgtcag

SEQ ID NO: 4985004 - DNA, 25 bp, Homo sapien
tctgtgttggaatggactttaaaac

SEQ ID NO: 4985005 - DNA, 25 bp, Homo sapien
ctgtgaagtaggattttactccaaa

SEQ ID NO: 4985006 - DNA, 25 bp, Homo sapien
tctatgatttttacccaccctttga

SEQ ID NO: 4985007 - DNA, 25 bp, Homo sapien
ttaggaatccttgactctgtgttgg

SEQ ID NO: 4985008 - DNA, 25 bp, Homo sapien
ttatccggtatgatcaaaatgcgtg

SEQ ID NO: 4985009 - DNA, 25 bp, Homo sapien
gatcaaaatgcgtgtgattcttcac

SEQ ID NO: 4985010 - DNA, 25 bp, Homo sapien
tcaaaatgcgtgtgattcttcacat

SEQ ID NO: 4985011 - DNA, 25 bp, Homo sapien
ccggtatgatcaaaatgcgtgtgat

SEQ ID NO: 4985012 - DNA, 25 bp, Homo sapien
agttggcctggaaatgaacatctct

SEQ ID NO: 4985013 - DNA, 25 bp, Homo sapien
ttctgtgatcccagtaggaaatagc

SEQ ID NO: 4985014 - DNA, 25 bp, Homo sapien
caggttcaattatgtcaacccggta

SEQ ID NO: 4985015 - DNA, 25 bp, Homo sapien
gtgatcccagtaggaaatagctcca

SEQ ID NO: 4985016 - DNA, 25 bp, Homo sapien
gattcccttttctgcacagctgcgt

SEQ ID NO: 4985017 - DNA, 25 bp, Homo sapien
ccttttctgcacagctgcgtgctgc

SEQ ID NO: 4985018 - DNA, 25 bp, Homo sapien
tttctgcacagctgcgtgctgcagt

SEQ ID NO: 4985019 - DNA, 25 bp, Homo sapien
agattcccttttctgcacagctgcg

SEQ ID NO: 4985020 - DNA, 25 bp, Homo sapien
gagccaagctctttcaaagccctac

SEQ ID NO: 4985021 - DNA, 25 bp, Homo sapien
aggagagccaagctctttcaaagcc

SEQ ID NO: 4985022 - DNA, 25 bp, Homo sapien
agccaagctctttcaaagccctacc

SEQ ID NO: 4985023 - DNA, 25 bp, Homo sapien
ctgaggagagccaagctctttcaaa

SEQ ID NO: 4985024 - DNA, 25 bp, Homo sapien
caggatagtatggaacctggtggat

SEQ ID NO: 4985025 - DNA, 25 bp, Homo sapien
cagagagtgcaaaatacttcttgca

SEQ ID NO: 4985026 - DNA, 25 bp, Homo sapien
tccagtgggccttatcttagcagag

SEQ ID NO: 4985027 - DNA, 25 bp, Homo sapien
gatgtagggtgcgagtcagccaaca

SEQ ID NO: 4985028 - DNA, 25 bp, Homo sapien
tgagcacataagtaatgtgtgatgt

SEQ ID NO: 4985029 - DNA, 25 bp, Homo sapien
tctctgagcacataagtaatgtgtg

SEQ ID NO: 4985030 - DNA, 25 bp, Homo sapien
cattctctgagcacataagtaatgt

SEQ ID NO: 4985031 - DNA, 25 bp, Homo sapien
cataagtaatgtgtgatgtatacag

SEQ ID NO: 4985032 - DNA, 25 bp, Homo sapien
cctctcattaatcacttctagttcc

SEQ ID NO: 4985033 - DNA, 25 bp, Homo sapien
tctcattaatcacttctagttccat

SEQ ID NO: 4985034 - DNA, 25 bp, Homo sapien
ttccctctcattaatcacttctagt

SEQ ID NO: 4985035 - DNA, 25 bp, Homo sapien
cttccctctcattaatcacttctag

SEQ ID NO: 4985036 - DNA, 25 bp, Homo sapien
tacttacatcaagtgtaaccaatgg

SEQ ID NO: 4985037 - DNA, 25 bp, Homo sapien
gttacatctataaaaccatatccta

SEQ ID NO: 4985038 - DNA, 25 bp, Homo sapien
tgaagggtacaagcagcctctctag

SEQ ID NO: 4985039 - DNA, 25 bp, Homo sapien
ggctgtctttaaaactccctgtgaa

SEQ ID NO: 4985040 - DNA, 25 bp, Homo sapien
tgaaactctgggcactctggctact

SEQ ID NO: 4985041 - DNA, 25 bp, Homo sapien
taagggttatacattacttgtcctg

SEQ ID NO: 4985042 - DNA, 25 bp, Homo sapien
catgtaacttgaaaaacagacctta

SEQ ID NO: 4985043 - DNA, 25 bp, Homo sapien
tccatcactgttaagattctcactg

SEQ ID NO: 4985044 - DNA, 25 bp, Homo sapien
tcagacgctaatgccatgcaaggcc

SEQ ID NO: 4985045 - DNA, 25 bp, Homo sapien
cttccatagtcgtgagaggcttctc

SEQ ID NO: 4985046 - DNA, 25 bp, Homo sapien
gcaaggcctatagagttcacttgta

SEQ ID NO: 4985047 - DNA, 25 bp, Homo sapien
actccagagagttcctattagtggg

SEQ ID NO: 4985048 - DNA, 25 bp, Homo sapien
tccttgttctattccttctggtttc

SEQ ID NO: 4985049 - DNA, 25 bp, Homo sapien
ccttgttctattccttctggtttca

SEQ ID NO: 4985050 - DNA, 25 bp, Homo sapien
tcatgcacccttttaacattacaga

SEQ ID NO: 4985051 - DNA, 25 bp, Homo sapien
gtttccaggataatatcatgcaccc

SEQ ID NO: 4985052 - DNA, 25 bp, Homo sapien
tttagttcggcatgaagtagtttaa

SEQ ID NO: 4985053 - DNA, 25 bp, Homo sapien
tttaaaagtttccaggataatatca

SEQ ID NO: 4985054 - DNA, 25 bp, Homo sapien
tggcagggagttcgttcacaacacc

SEQ ID NO: 4985055 - DNA, 25 bp, Homo sapien
ccagatccttctgagtggcagggag

SEQ ID NO: 4985056 - DNA, 25 bp, Homo sapien
tctgtgtgtgactgattgttctgag

SEQ ID NO: 4985057 - DNA, 25 bp, Homo sapien
ggcttttagactgagctgattccag

SEQ ID NO: 4985058 - DNA, 25 bp, Homo sapien
actgaattgccaatagatgattgcc

SEQ ID NO: 4985059 - DNA, 25 bp, Homo sapien
tcactgaaatctactgaagatctca

SEQ ID NO: 4985060 - DNA, 25 bp, Homo sapien
ctgaaatctactgaagatctcatct

SEQ ID NO: 4985061 - DNA, 25 bp, Homo sapien
caactgaattgccaatagatgattg

SEQ ID NO: 4985062 - DNA, 25 bp, Homo sapien
taatgaaactcagtacgcagtgcag

SEQ ID NO: 4985063 - DNA, 25 bp, Homo sapien
tgtcaagctcattgagaagctctgg

SEQ ID NO: 4985064 - DNA, 25 bp, Homo sapien
cattatgtaacaggatgggatgaca

SEQ ID NO: 4985065 - DNA, 25 bp, Homo sapien
tatatcccaagaaactgcatgccgg

SEQ ID NO: 4985066 - DNA, 25 bp, Homo sapien
atactgtgtcgtccactttcagagt

SEQ ID NO: 4985067 - DNA, 25 bp, Homo sapien
catactgtgtcgtccactttcagag

SEQ ID NO: 4985068 - DNA, 25 bp, Homo sapien
tatcaagcacttatttgacgcagga

SEQ ID NO: 4985069 - DNA, 25 bp, Homo sapien
caccacaaatatcaagcacttattt

SEQ ID NO: 4985070 - DNA, 25 bp, Homo sapien
caaatatcaagcacttatttgacgc

SEQ ID NO: 4985071 - DNA, 25 bp, Homo sapien
aatatcaagcacttatttgacgcag

SEQ ID NO: 4985072 - DNA, 25 bp, Homo sapien
tcaatgtgattgtggcagctctgtc

SEQ ID NO: 4985073 - DNA, 25 bp, Homo sapien
catataagaagtttggctctgtgtg

SEQ ID NO: 4985074 - DNA, 25 bp, Homo sapien
gcattctgtgggtcatataagaagt

SEQ ID NO: 4985075 - DNA, 25 bp, Homo sapien
gggaaactgttctcgtgcaattgca

SEQ ID NO: 4985076 - DNA, 25 bp, Homo sapien
tgtgtgtgtcactttaaggccaggc

SEQ ID NO: 4985077 - DNA, 25 bp, Homo sapien
tgcagctgctcccatgattcggtct

SEQ ID NO: 4985078 - DNA, 25 bp, Homo sapien
ggaattctatcttctaggtctgcat

SEQ ID NO: 4985079 - DNA, 25 bp, Homo sapien
ctgaaagtacttcctgggacccctg

SEQ ID NO: 4985080 - DNA, 25 bp, Homo sapien
cctgtcccgggaaggaattctatct

SEQ ID NO: 4985081 - DNA, 25 bp, Homo sapien
atcttctaggtctgcatctgaggaa

SEQ ID NO: 4985082 - DNA, 25 bp, Homo sapien
tccacacagtttccgcagaacaaga

SEQ ID NO: 4985083 - DNA, 25 bp, Homo sapien
tatctgttccacacagtttccgcag

SEQ ID NO: 4985084 - DNA, 25 bp, Homo sapien
tttccgcagaacaagagaatgaggg

SEQ ID NO: 4985085 - DNA, 25 bp, Homo sapien
cacagtttccgcagaacaagagaat

SEQ ID NO: 4985086 - DNA, 25 bp, Homo sapien
ctgctcatgtgcaatattgctgtct

SEQ ID NO: 4985087 - DNA, 25 bp, Homo sapien
tgctcatgtgcaatattgctgtctc

SEQ ID NO: 4985088 - DNA, 25 bp, Homo sapien
ctcatgtgcaatattgctgtctctc

SEQ ID NO: 4985089 - DNA, 25 bp, Homo sapien
gctcatgtgcaatattgctgtctct

SEQ ID NO: 4985090 - DNA, 25 bp, Homo sapien
attcagcaggctagtggcatcctgc

SEQ ID NO: 4985091 - DNA, 25 bp, Homo sapien
ctgctcctttgaagcgggcagattc

SEQ ID NO: 4985092 - DNA, 25 bp, Homo sapien
agtggcatcctgcacatggcctcgg

SEQ ID NO: 4985093 - DNA, 25 bp, Homo sapien
gaaactgctcctttgaagcgggcag

SEQ ID NO: 4985094 - DNA, 25 bp, Homo sapien
tctctacttccttggtatcccaacg

SEQ ID NO: 4985095 - DNA, 25 bp, Homo sapien
aacgggtcactgcaccaccaaaagc

SEQ ID NO: 4985096 - DNA, 25 bp, Homo sapien
ttggtatcccaacgggtcactgcac

SEQ ID NO: 4985097 - DNA, 25 bp, Homo sapien
catgcatatgtgcattctgattttg

SEQ ID NO: 4985098 - DNA, 25 bp, Homo sapien
ctgcatttttctcccctgatctctt

SEQ ID NO: 4985099 - DNA, 25 bp, Homo sapien
ttcctgcatttttctcccctgatct

SEQ ID NO: 4985100 - DNA, 25 bp, Homo sapien
tcttttcctgcatttttctcccctg

SEQ ID NO: 4985101 - DNA, 25 bp, Homo sapien
cttaaggcctttgtccttgtcttct

SEQ ID NO: 4985102 - DNA, 25 bp, Homo sapien
catcaaggtgtcttgtatatgaaag

SEQ ID NO: 4985103 - DNA, 25 bp, Homo sapien
tgtccatctggagagcacaactccc

SEQ ID NO: 4985104 - DNA, 25 bp, Homo sapien
ccccagtcatcaaggtgtcttgtat

SEQ ID NO: 4985105 - DNA, 25 bp, Homo sapien
gcattgtccatctggagagcacaac

SEQ ID NO: 4985106 - DNA, 25 bp, Homo sapien
cagacctagtctgttcagtcctaca

SEQ ID NO: 4985107 - DNA, 25 bp, Homo sapien
gtgtggtggtgcaattatgtcagac

SEQ ID NO: 4985108 - DNA, 25 bp, Homo sapien
tctgtgcactaggtactgagtgtgg

SEQ ID NO: 4985109 - DNA, 25 bp, Homo sapien
tcatgtttgtttggcactctgtgca

SEQ ID NO: 4985110 - DNA, 25 bp, Homo sapien
tatcgttgattgcttgtgtgtcctc

SEQ ID NO: 4985111 - DNA, 25 bp, Homo sapien
tctctgatctgcatgttgggtgcca

SEQ ID NO: 4985112 - DNA, 25 bp, Homo sapien
cataccaaagtagcaagcccaaggc

SEQ ID NO: 4985113 - DNA, 25 bp, Homo sapien
gatgactctccgtgagggcactgct

SEQ ID NO: 4985114 - DNA, 25 bp, Homo sapien
tgaagtccccgcagatggagctgcc

SEQ ID NO: 4985115 - DNA, 25 bp, Homo sapien
ctggcaccgaccacaactgtgcaag

SEQ ID NO: 4985116 - DNA, 25 bp, Homo sapien
tgctgtgttgtgctgaacagccact

SEQ ID NO: 4985117 - DNA, 25 bp, Homo sapien
ggtccatgcgttgtttgtttctctc

SEQ ID NO: 4985118 - DNA, 25 bp, Homo sapien
gttccctttgttgctcccatgctgt

SEQ ID NO: 4985119 - DNA, 25 bp, Homo sapien
gctcctgggacatcttctggtcaac

SEQ ID NO: 4985120 - DNA, 25 bp, Homo sapien
taaaaatcctcttcgaatgcaacgt

SEQ ID NO: 4985121 - DNA, 25 bp, Homo sapien
tctggtcaaccagggcatggacagc

SEQ ID NO: 4985122 - DNA, 25 bp, Homo sapien
gaatgcaacgtgagatggagatgaa

SEQ ID NO: 4985123 - DNA, 25 bp, Homo sapien
gggattatatcccataactggctct

SEQ ID NO: 4985124 - DNA, 25 bp, Homo sapien
cataactggctcttgtcaaaattga

SEQ ID NO: 4985125 - DNA, 25 bp, Homo sapien
tttgggattatatcccataactggc

SEQ ID NO: 4985126 - DNA, 25 bp, Homo sapien
ctcttgtcaaaattgacgttgttca

SEQ ID NO: 4985127 - DNA, 25 bp, Homo sapien
aaggcagtggccaactcattagtag

SEQ ID NO: 4985128 - DNA, 25 bp, Homo sapien
taaggcagtggccaactcattagta

SEQ ID NO: 4985129 - DNA, 25 bp, Homo sapien
gcagtggccaactcattagtagctt

SEQ ID NO: 4985130 - DNA, 25 bp, Homo sapien
ggcagtggccaactcattagtagct

SEQ ID NO: 4985131 - DNA, 25 bp, Homo sapien
ctgagcgcatctggggatgcacaca

SEQ ID NO: 4985132 - DNA, 25 bp, Homo sapien
tccaaagatacaggtcagctgagcg

SEQ ID NO: 4985133 - DNA, 25 bp, Homo sapien
cacaatgggctccagtggtactcca

SEQ ID NO: 4985134 - DNA, 25 bp, Homo sapien
tgcggaagttaccaactgtccaaag

SEQ ID NO: 4985135 - DNA, 25 bp, Homo sapien
tgcgtggtctacatcctgttcaaat

SEQ ID NO: 4985136 - DNA, 25 bp, Homo sapien
caaggcactttggacatcagacaca

SEQ ID NO: 4985137 - DNA, 25 bp, Homo sapien
tcaaaactgcgtggtctacatcctg

SEQ ID NO: 4985138 - DNA, 25 bp, Homo sapien
cagacacatagtcaaaactgcgtgg

SEQ ID NO: 4985139 - DNA, 25 bp, Homo sapien
caatcccagggctcggtcttggtga

SEQ ID NO: 4985140 - DNA, 25 bp, Homo sapien
gaagtcattaccgattagagggcct

SEQ ID NO: 4985141 - DNA, 25 bp, Homo sapien
ccttaagggaaagacgcatagagat

SEQ ID NO: 4985142 - DNA, 25 bp, Homo sapien
tatgagacaccagagccttaaggga

SEQ ID NO: 4985143 - DNA, 25 bp, Homo sapien
gaagagaaataatctgtgggtacaa

SEQ ID NO: 4985144 - DNA, 25 bp, Homo sapien
gagaaataatctgtgggtacaacaa

SEQ ID NO: 4985145 - DNA, 25 bp, Homo sapien
caacaaccaggacaatttcagtcat

SEQ ID NO: 4985146 - DNA, 25 bp, Homo sapien
tgggtacaacaaccaggacaatttc

SEQ ID NO: 4985147 - DNA, 25 bp, Homo sapien
taacaaatttcactgatattttctg

SEQ ID NO: 4985148 - DNA, 25 bp, Homo sapien
tcgaattgcacctctggtccttgct

SEQ ID NO: 4985149 - DNA, 25 bp, Homo sapien
tgctgtaggttaggctttaagatcc

SEQ ID NO: 4985150 - DNA, 25 bp, Homo sapien
tctgtgtgactacttgttcgaattg

SEQ ID NO: 4985151 - DNA, 25 bp, Homo sapien
tctgttgtggagaatgtgaagacat

SEQ ID NO: 4985152 - DNA, 25 bp, Homo sapien
gagtttgtacagcatgtgagtggac

SEQ ID NO: 4985153 - DNA, 25 bp, Homo sapien
gactgtggcggcattgagaatgcca

SEQ ID NO: 4985154 - DNA, 25 bp, Homo sapien
tgactccagggacagtaatagccaa

SEQ ID NO: 4985155 - DNA, 25 bp, Homo sapien
tgttcggtgctgtgataaactccag

SEQ ID NO: 4985156 - DNA, 25 bp, Homo sapien
tttgcactaggaagtaatcatctac

SEQ ID NO: 4985157 - DNA, 25 bp, Homo sapien
cagaacataatgttcggtgctgtga

SEQ ID NO: 4985158 - DNA, 25 bp, Homo sapien
tcctggcctattagaaccctttgca

SEQ ID NO: 4985159 - DNA, 25 bp, Homo sapien
ggtaatggcattataggtactttgt

SEQ ID NO: 4985160 - DNA, 25 bp, Homo sapien
ggaaattacagacttactccttctg

SEQ ID NO: 4985161 - DNA, 25 bp, Homo sapien
gcaatgtgtaggacaccttgaagat

SEQ ID NO: 4985162 - DNA, 25 bp, Homo sapien
actccttctggtaatggcattatag

SEQ ID NO: 4985163 - DNA, 25 bp, Homo sapien
tgaactctcctttggaatgtctaca

SEQ ID NO: 4985164 - DNA, 25 bp, Homo sapien
ccttgaaaggtagccctggttcatc

SEQ ID NO: 4985165 - DNA, 25 bp, Homo sapien
tacattggacccattgaactcaacg

SEQ ID NO: 4985166 - DNA, 25 bp, Homo sapien
catagaggttagaaagcttgggccc

SEQ ID NO: 4985167 - DNA, 25 bp, Homo sapien
gaactcaacggctttcggattgtga

SEQ ID NO: 4985168 - DNA, 25 bp, Homo sapien
ttttagctactatatctgccccact

SEQ ID NO: 4985169 - DNA, 25 bp, Homo sapien
cccagttttagctactatatctgcc

SEQ ID NO: 4985170 - DNA, 25 bp, Homo sapien
gttttagctactatatctgccccac

SEQ ID NO: 4985171 - DNA, 25 bp, Homo sapien
agttttagctactatatctgcccca

SEQ ID NO: 4985172 - DNA, 25 bp, Homo sapien
tgcatgcctgttgaaacagctgcag

SEQ ID NO: 4985173 - DNA, 25 bp, Homo sapien
ggacgcactgacacccagctgacag

SEQ ID NO: 4985174 - DNA, 25 bp, Homo sapien
ccagggagaccaatcacagaagcat

SEQ ID NO: 4985175 - DNA, 25 bp, Homo sapien
agctgacagccgctacttcctgtat

SEQ ID NO: 4985176 - DNA, 25 bp, Homo sapien
aggtgatctggttgcttttctctaa

SEQ ID NO: 4985177 - DNA, 25 bp, Homo sapien
ttttctctaacagttttagtgacat

SEQ ID NO: 4985178 - DNA, 25 bp, Homo sapien
gatctggttgcttttctctaacagt

SEQ ID NO: 4985179 - DNA, 25 bp, Homo sapien
ggtgatctggttgcttttctctaac

SEQ ID NO: 4985180 - DNA, 25 bp, Homo sapien
gatggaaaaccatgatgttgcctga

SEQ ID NO: 4985181 - DNA, 25 bp, Homo sapien
cgctgtgctcttggcgcccatcttt

SEQ ID NO: 4985182 - DNA, 25 bp, Homo sapien
tcatgatggaaaaccatgatgttgc

SEQ ID NO: 4985183 - DNA, 25 bp, Homo sapien
taataaaccatagtgcgctgtgctc

SEQ ID NO: 4985184 - DNA, 25 bp, Homo sapien
tccttccagcatccaatagtccagt

SEQ ID NO: 4985185 - DNA, 25 bp, Homo sapien
cattgagagttctaatggagcagac

SEQ ID NO: 4985186 - DNA, 25 bp, Homo sapien
ggattgagagcacttgcacttcaga

SEQ ID NO: 4985187 - DNA, 25 bp, Homo sapien
atccaatagtccagtccatagccca

SEQ ID NO: 4985188 - DNA, 25 bp, Homo sapien
tctgtgaatgtcatgcaagttcatg

SEQ ID NO: 4985189 - DNA, 25 bp, Homo sapien
ttctgtgaatgtcatgcaagttcat

SEQ ID NO: 4985190 - DNA, 25 bp, Homo sapien
tattccatttcccagtgaccttctg

SEQ ID NO: 4985191 - DNA, 25 bp, Homo sapien
ctgtgaatgtcatgcaagttcatga

SEQ ID NO: 4985192 - DNA, 25 bp, Homo sapien
gactctcagtcgtgaatgggcagta

SEQ ID NO: 4985193 - DNA, 25 bp, Homo sapien
tgccttaatgccagccagcagagtt

SEQ ID NO: 4985194 - DNA, 25 bp, Homo sapien
ccaggtcgcgtatggcttcggtcaa

SEQ ID NO: 4985195 - DNA, 25 bp, Homo sapien
tagcggacttcagggtcgaaagacc

SEQ ID NO: 4985196 - DNA, 25 bp, Homo sapien
aataagagtaatttctgccaaacac

SEQ ID NO: 4985197 - DNA, 25 bp, Homo sapien
ataaataagagtaatttctgccaaa

SEQ ID NO: 4985198 - DNA, 25 bp, Homo sapien
taaataagagtaatttctgccaaac

SEQ ID NO: 4985199 - DNA, 25 bp, Homo sapien
taagagtaatttctgccaaacacgt

SEQ ID NO: 4985200 - DNA, 25 bp, Homo sapien
ctctgtatatttctaaaggtttcat

SEQ ID NO: 4985201 - DNA, 25 bp, Homo sapien
tctctgtatatttctaaaggtttca

SEQ ID NO: 4985202 - DNA, 25 bp, Homo sapien
tattcttctctgtatatttctaaag

SEQ ID NO: 4985203 - DNA, 25 bp, Homo sapien
tcttctctgtatatttctaaaggtt

SEQ ID NO: 4985204 - DNA, 25 bp, Homo sapien
gaatggaagccactcctaaggcaac

SEQ ID NO: 4985205 - DNA, 25 bp, Homo sapien
tacacgcacggtagatggaatggaa

SEQ ID NO: 4985206 - DNA, 25 bp, Homo sapien
ttgtaaagcacacttgagctggtag

SEQ ID NO: 4985207 - DNA, 25 bp, Homo sapien
cacttgcatacctgggccatggaaa

SEQ ID NO: 4985208 - DNA, 25 bp, Homo sapien
tctgtgccaagcaggccacaacatg

SEQ ID NO: 4985209 - DNA, 25 bp, Homo sapien
acaagaacaaaatgtcaggactttc

SEQ ID NO: 4985210 - DNA, 25 bp, Homo sapien
agaacaaaatgtcaggactttctct

SEQ ID NO: 4985211 - DNA, 25 bp, Homo sapien
caggccacaacatgaatccagcttt

SEQ ID NO: 4985212 - DNA, 25 bp, Homo sapien
gtttgccatttcagcaaccttgcca

SEQ ID NO: 4985213 - DNA, 25 bp, Homo sapien
tctccgtggggtctccaatgtctcc

SEQ ID NO: 4985214 - DNA, 25 bp, Homo sapien
tactgaactaagaattccttttgtg

SEQ ID NO: 4985215 - DNA, 25 bp, Homo sapien
ttgtgtgtttgccatttcagcaacc

SEQ ID NO: 4985216 - DNA, 25 bp, Homo sapien
taaggattctgacctgtctacctcc

SEQ ID NO: 4985217 - DNA, 25 bp, Homo sapien
ccataaggattctgacctgtctacc

SEQ ID NO: 4985218 - DNA, 25 bp, Homo sapien
agatcttaccataaggattctgacc

SEQ ID NO: 4985219 - DNA, 25 bp, Homo sapien
tccaagatatccaagagaaatttac

SEQ ID NO: 4985220 - DNA, 25 bp, Homo sapien
agctcatctggagcctgcttgggct

SEQ ID NO: 4985221 - DNA, 25 bp, Homo sapien
tctgactgggagtgcttggtccctg

SEQ ID NO: 4985222 - DNA, 25 bp, Homo sapien
tggagctcatctggagcctgcttgg

SEQ ID NO: 4985223 - DNA, 25 bp, Homo sapien
catctggagcctgcttgggctgaca

SEQ ID NO: 4985224 - DNA, 25 bp, Homo sapien
ctgtggtcagagagaactgcagagg

SEQ ID NO: 4985225 - DNA, 25 bp, Homo sapien
ttccacaggccatgagataagagtt

SEQ ID NO: 4985226 - DNA, 25 bp, Homo sapien
catgggaaggacgtcctaaggaagc

SEQ ID NO: 4985227 - DNA, 25 bp, Homo sapien
gtcaatttggttgcagacttccaca

SEQ ID NO: 4985228 - DNA, 25 bp, Homo sapien
agattttccaggtatcctccatggg

SEQ ID NO: 4985229 - DNA, 25 bp, Homo sapien
tcaaattggaatgttctccagattc

SEQ ID NO: 4985230 - DNA, 25 bp, Homo sapien
caaattggaatgttctccagattca

SEQ ID NO: 4985231 - DNA, 25 bp, Homo sapien
tgatcaaattggaatgttctccaga

SEQ ID NO: 4985232 - DNA, 25 bp, Homo sapien
gatcaaattggaatgttctccagat

SEQ ID NO: 4985233 - DNA, 25 bp, Homo sapien
tatttccaggtgtggcatataaaac

SEQ ID NO: 4985234 - DNA, 25 bp, Homo sapien
taagttgcttaagtcagtggtttcc

SEQ ID NO: 4985235 - DNA, 25 bp, Homo sapien
aaacacttcatatgcactttattgc

SEQ ID NO: 4985236 - DNA, 25 bp, Homo sapien
catatcaacaatgtgactacaagtt

SEQ ID NO: 4985237 - DNA, 25 bp, Homo sapien
aactggacagcaggttcctttcacc

SEQ ID NO: 4985238 - DNA, 25 bp, Homo sapien
tgcaaactggacagcaggttccttt

SEQ ID NO: 4985239 - DNA, 25 bp, Homo sapien
ggaatcacttggcattcctcggtct

SEQ ID NO: 4985240 - DNA, 25 bp, Homo sapien
cattcctcggtctctgcaaactgga

SEQ ID NO: 4985241 - DNA, 25 bp, Homo sapien
ttctttcatccagcgctcctcggcc

SEQ ID NO: 4985242 - DNA, 25 bp, Homo sapien
tccagcgctcctcggccttccttgg

SEQ ID NO: 4985243 - DNA, 25 bp, Homo sapien
ctcacaaatgcagtgagtgcagtct

SEQ ID NO: 4985244 - DNA, 25 bp, Homo sapien
gagtgcagtcttctttcatccagcg

SEQ ID NO: 4985245 - DNA, 25 bp, Homo sapien
tcaggcgtgcctccagcttgtttat

SEQ ID NO: 4985246 - DNA, 25 bp, Homo sapien
ctgcctgcctcaggcgtgcctccag

SEQ ID NO: 4985247 - DNA, 25 bp, Homo sapien
cctgcctcaggcgtgcctccagctt

SEQ ID NO: 4985248 - DNA, 25 bp, Homo sapien
gcctcaggcgtgcctccagcttgtt

SEQ ID NO: 4985249 - DNA, 25 bp, Homo sapien
gaaaaaactctcatcacaacaacaa

SEQ ID NO: 4985250 - DNA, 25 bp, Homo sapien
gatggccctgatacaatcatgtaag

SEQ ID NO: 4985251 - DNA, 25 bp, Homo sapien
caacaacaagaattaccaagttatc

SEQ ID NO: 4985252 - DNA, 25 bp, Homo sapien
gaccaagccgctgtataaaacgcca

SEQ ID NO: 4985253 - DNA, 25 bp, Homo sapien
ctgcaaacgtgctgaaatcttggga

SEQ ID NO: 4985254 - DNA, 25 bp, Homo sapien
gcatcttcacccacatatattttat

SEQ ID NO: 4985255 - DNA, 25 bp, Homo sapien
tctctgagtgctgtgatggtttcct

SEQ ID NO: 4985256 - DNA, 25 bp, Homo sapien
gtttcctgaatttccgctgcaaacg

SEQ ID NO: 4985257 - DNA, 25 bp, Homo sapien
catattatccagtagccaggtaggg

SEQ ID NO: 4985258 - DNA, 25 bp, Homo sapien
tacaaggcattgtgattggtgttct

SEQ ID NO: 4985259 - DNA, 25 bp, Homo sapien
gataagatgataatccagagtgtca

SEQ ID NO: 4985260 - DNA, 25 bp, Homo sapien
cagagtgtcacatctggttcatgta

SEQ ID NO: 4985261 - DNA, 25 bp, Homo sapien
tcaggcattctgctcaggtagatgg

SEQ ID NO: 4985262 - DNA, 25 bp, Homo sapien
cattctgctcaggtagatgggtgca

SEQ ID NO: 4985263 - DNA, 25 bp, Homo sapien
tgccgttaggctcctcacattcttt

SEQ ID NO: 4985264 - DNA, 25 bp, Homo sapien
tgtgagggtgctgccgttaggctcc

SEQ ID NO: 4985265 - DNA, 25 bp, Homo sapien
gactcttgcgtcactgctctgaact

SEQ ID NO: 4985266 - DNA, 25 bp, Homo sapien
tcttagatgacttaactccatatcc

SEQ ID NO: 4985267 - DNA, 25 bp, Homo sapien
tatcaacaggatagctgtattgagc

SEQ ID NO: 4985268 - DNA, 25 bp, Homo sapien
tgagctgagcgtttcttttgagact

SEQ ID NO: 4985269 - DNA, 25 bp, Homo sapien
tacaattacttgatgctctaaagac

SEQ ID NO: 4985270 - DNA, 25 bp, Homo sapien
caattacttgatgctctaaagacag

SEQ ID NO: 4985271 - DNA, 25 bp, Homo sapien
aattacttgatgctctaaagacaga

SEQ ID NO: 4985272 - DNA, 25 bp, Homo sapien
tacttgatgctctaaagacagaact

SEQ ID NO: 4985273 - DNA, 25 bp, Homo sapien
ttctcagaccttgtgtcggtacatt

SEQ ID NO: 4985274 - DNA, 25 bp, Homo sapien
tctcagaccttgtgtcggtacattc

SEQ ID NO: 4985275 - DNA, 25 bp, Homo sapien
ggtcaccccttggtttcagatcaaa

SEQ ID NO: 4985276 - DNA, 25 bp, Homo sapien
tccaggtcaccccttggtttcagat

SEQ ID NO: 4985277 - DNA, 25 bp, Homo sapien
tcagagtgtgcagtgtgtctccact

SEQ ID NO: 4985278 - DNA, 25 bp, Homo sapien
tgttcagatttctggccgagagctt

SEQ ID NO: 4985279 - DNA, 25 bp, Homo sapien
ctgaataagtgggttgtcttcctgc

SEQ ID NO: 4985280 - DNA, 25 bp, Homo sapien
tcctgctttagcctacgggaggctg

SEQ ID NO: 4985281 - DNA, 25 bp, Homo sapien
cgtccagaggaactgcaaatatcct

SEQ ID NO: 4985282 - DNA, 25 bp, Homo sapien
aggcccatggccactacacggagca

SEQ ID NO: 4985283 - DNA, 25 bp, Homo sapien
ggcccttgtgtcattggcgtccaga

SEQ ID NO: 4985284 - DNA, 25 bp, Homo sapien
caagcatgaggctatggtggccctt

SEQ ID NO: 4985285 - DNA, 25 bp, Homo sapien
caggtaatcctgtgggtattctgcc

SEQ ID NO: 4985286 - DNA, 25 bp, Homo sapien
agttgtgccggggtaaatactccag

SEQ ID NO: 4985287 - DNA, 25 bp, Homo sapien
gtccaccttcgggatctcgctgcag

SEQ ID NO: 4985288 - DNA, 25 bp, Homo sapien
ttctgcctttacaaagacatcagcc

SEQ ID NO: 4985289 - DNA, 25 bp, Homo sapien
tgggtaacaaacaggcacataagtg

SEQ ID NO: 4985290 - DNA, 25 bp, Homo sapien
ctcttagccgctgaaactgggtaac

SEQ ID NO: 4985291 - DNA, 25 bp, Homo sapien
ggcgggccagaggtcaatgtcacct

SEQ ID NO: 4985292 - DNA, 25 bp, Homo sapien
gtcttcaaccataagggcgggccag

SEQ ID NO: 4985293 - DNA, 25 bp, Homo sapien
ctatagatcggcaataaacacagct

SEQ ID NO: 4985294 - DNA, 25 bp, Homo sapien
tagatcggcaataaacacagctaca

SEQ ID NO: 4985295 - DNA, 25 bp, Homo sapien
tatagatcggcaataaacacagcta

SEQ ID NO: 4985296 - DNA, 25 bp, Homo sapien
atagatcggcaataaacacagctac

SEQ ID NO: 4985297 - DNA, 25 bp, Homo sapien
agtcctggggatggctggctgacac

SEQ ID NO: 4985298 - DNA, 25 bp, Homo sapien
cacagtcctggggatggctggctga

SEQ ID NO: 4985299 - DNA, 25 bp, Homo sapien
ggccccccacagtcctggggatggc

SEQ ID NO: 4985300 - DNA, 25 bp, Homo sapien
ccccacagtcctggggatggctggc

SEQ ID NO: 4985301 - DNA, 25 bp, Homo sapien
aggaactgcatgaggtatacacagg

SEQ ID NO: 4985302 - DNA, 25 bp, Homo sapien
ggaactgcatgaggtatacacaggg

SEQ ID NO: 4985303 - DNA, 25 bp, Homo sapien
aactgcatgaggtatacacagggca

SEQ ID NO: 4985304 - DNA, 25 bp, Homo sapien
gaactgcatgaggtatacacagggc

SEQ ID NO: 4985305 - DNA, 25 bp, Homo sapien
cgctttatggaacggaaggtggcct

SEQ ID NO: 4985306 - DNA, 25 bp, Homo sapien
tgtgtggccaaatctaaaggctgca

SEQ ID NO: 4985307 - DNA, 25 bp, Homo sapien
tgttcccggaaccacagggtgtgca

SEQ ID NO: 4985308 - DNA, 25 bp, Homo sapien
tggtctctacccctttgaatgatgg

SEQ ID NO: 4985309 - DNA, 25 bp, Homo sapien
tagactgaatccaccgtcgcagagg

SEQ ID NO: 4985310 - DNA, 25 bp, Homo sapien
tcccgtaaacgttggagccatcgat

SEQ ID NO: 4985311 - DNA, 25 bp, Homo sapien
gatctgctctcgtgcatagactgaa

SEQ ID NO: 4985312 - DNA, 25 bp, Homo sapien
agagccagatgctcgttggcccggt

SEQ ID NO: 4985313 - DNA, 25 bp, Homo sapien
cccatccgagaagcgggctgtgctc

SEQ ID NO: 4985314 - DNA, 25 bp, Homo sapien
acaaggagggtcgttggtgcagacg

SEQ ID NO: 4985315 - DNA, 25 bp, Homo sapien
cgaagagcatgcagggcgcgtgggt

SEQ ID NO: 4985316 - DNA, 25 bp, Homo sapien
ctggagcgcgcgaagagcatgcagg

SEQ ID NO: 4985317 - DNA, 25 bp, Homo sapien
gtccaagtcgtgctctagaaaccag

SEQ ID NO: 4985318 - DNA, 25 bp, Homo sapien
ctgtgtggtccaagtcgtgctctag

SEQ ID NO: 4985319 - DNA, 25 bp, Homo sapien
tgtggtccaagtcgtgctctagaaa

SEQ ID NO: 4985320 - DNA, 25 bp, Homo sapien
ccaagtcgtgctctagaaaccagcc

SEQ ID NO: 4985321 - DNA, 25 bp, Homo sapien
tccagataaattggcgatgaggctg

SEQ ID NO: 4985322 - DNA, 25 bp, Homo sapien
agaggcctgcgagctgtgcatccag

SEQ ID NO: 4985323 - DNA, 25 bp, Homo sapien
tacttcgcatggaaacaccggttgg

SEQ ID NO: 4985324 - DNA, 25 bp, Homo sapien
gacaccaagtcattgtaccggaatt

SEQ ID NO: 4985325 - DNA, 25 bp, Homo sapien
agtccacagtgagcccctgcttcac

SEQ ID NO: 4985326 - DNA, 25 bp, Homo sapien
cagctgcagcgtgtgctcaaaaatc

SEQ ID NO: 4985327 - DNA, 25 bp, Homo sapien
gcttcacacgttcccgtatcagctg

SEQ ID NO: 4985328 - DNA, 25 bp, Homo sapien
gctgcagcgtgtgctcaaaaatctc

SEQ ID NO: 4985329 - DNA, 25 bp, Homo sapien
tgggtcacgcgggtaatgaaattga

SEQ ID NO: 4985330 - DNA, 25 bp, Homo sapien
cgcgggtaatgaaattgagccagca

SEQ ID NO: 4985331 - DNA, 25 bp, Homo sapien
tccacaatcagtgggtcacgcgggt

SEQ ID NO: 4985332 - DNA, 25 bp, Homo sapien
gtaatgaaattgagccagcaggtca

SEQ ID NO: 4985333 - DNA, 25 bp, Homo sapien
tacagcatcaagaatggaagattca

SEQ ID NO: 4985334 - DNA, 25 bp, Homo sapien
caaatgtcttcgtgtggagttaatt

SEQ ID NO: 4985335 - DNA, 25 bp, Homo sapien
gaagattcaacaaagtcatcgccag

SEQ ID NO: 4985336 - DNA, 25 bp, Homo sapien
ggagttaattgcactgtcaactctc

SEQ ID NO: 4985337 - DNA, 25 bp, Homo sapien
tatcaaacagaccttgaagttaggc

SEQ ID NO: 4985338 - DNA, 25 bp, Homo sapien
tcaaacagaccttgaagttaggcat

SEQ ID NO: 4985339 - DNA, 25 bp, Homo sapien
aatatcaaacagaccttgaagttag

SEQ ID NO: 4985340 - DNA, 25 bp, Homo sapien
aaaaatatcaaacagaccttgaagt

SEQ ID NO: 4985341 - DNA, 25 bp, Homo sapien
gtccaccaaaatgaggtgccacaca

SEQ ID NO: 4985342 - DNA, 25 bp, Homo sapien
tcagggaaccctgcgtcgtagatag

SEQ ID NO: 4985343 - DNA, 25 bp, Homo sapien
cagcaaggccaaaagaattccgagc

SEQ ID NO: 4985344 - DNA, 25 bp, Homo sapien
agaaacatgttggtcacagcaaggc

SEQ ID NO: 4985345 - DNA, 25 bp, Homo sapien
gatagtcagcgtgccttcatcatcc

SEQ ID NO: 4985346 - DNA, 25 bp, Homo sapien
aattatgggctgtggttctccttga

SEQ ID NO: 4985347 - DNA, 25 bp, Homo sapien
ttccaacctcgacacttgtatcctg

SEQ ID NO: 4985348 - DNA, 25 bp, Homo sapien
ggaagttgagtaaacactgcaagag

SEQ ID NO: 4985349 - DNA, 25 bp, Homo sapien
tattccaagtaattatgggctgtgg

SEQ ID NO: 4985350 - DNA, 25 bp, Homo sapien
aataacatcatgtcaaataatatca

SEQ ID NO: 4985351 - DNA, 25 bp, Homo sapien
aaccaaaataacatcatgtcaaata

SEQ ID NO: 4985352 - DNA, 25 bp, Homo sapien
ccaaaataacatcatgtcaaataat

SEQ ID NO: 4985353 - DNA, 25 bp, Homo sapien
caaaataacatcatgtcaaataata

SEQ ID NO: 4985354 - DNA, 25 bp, Homo sapien
tatctagacttggaaggcgatctgc

SEQ ID NO: 4985355 - DNA, 25 bp, Homo sapien
ggatgaatcccaagcggctaactgg

SEQ ID NO: 4985356 - DNA, 25 bp, Homo sapien
tagaggtgacacacatgccctgagt

SEQ ID NO: 4985357 - DNA, 25 bp, Homo sapien
agggtcagcctacgtgccagtgatg

SEQ ID NO: 4985358 - DNA, 25 bp, Homo sapien
cacagcagggtattaagggggcttt

SEQ ID NO: 4985359 - DNA, 25 bp, Homo sapien
ccagctgtcttagtgttgctgctag

SEQ ID NO: 4985360 - DNA, 25 bp, Homo sapien
gctgtcttagtgttgctgctagggc

SEQ ID NO: 4985361 - DNA, 25 bp, Homo sapien
cttttccagctgtcttagtgttgct

SEQ ID NO: 4985362 - DNA, 25 bp, Homo sapien
agcagatccagagcctgtccaggtg

SEQ ID NO: 4985363 - DNA, 25 bp, Homo sapien
tgagcagatccagagcctgtccagg

SEQ ID NO: 4985364 - DNA, 25 bp, Homo sapien
actgagcagatccagagcctgtcca

SEQ ID NO: 4985365 - DNA, 25 bp, Homo sapien
ttactgagcagatccagagcctgtc

SEQ ID NO: 4985366 - DNA, 25 bp, Homo sapien
gcttggtcagtggacttgatgacat

SEQ ID NO: 4985367 - DNA, 25 bp, Homo sapien
tagttagatgtctgcttggtcagtg

SEQ ID NO: 4985368 - DNA, 25 bp, Homo sapien
gacatggtagaggtgaacagcagca

SEQ ID NO: 4985369 - DNA, 25 bp, Homo sapien
acttgatgacatggtagaggtgaac

SEQ ID NO: 4985370 - DNA, 25 bp, Homo sapien
cattcacaaaatctggtgccacact

SEQ ID NO: 4985371 - DNA, 25 bp, Homo sapien
tcatgccaattgctagtggtatttt

SEQ ID NO: 4985372 - DNA, 25 bp, Homo sapien
aaatctggtgccacacttagggctc

SEQ ID NO: 4985373 - DNA, 25 bp, Homo sapien
tttgcttccatattcatgccaattg

SEQ ID NO: 4985374 - DNA, 25 bp, Homo sapien
tcatgaacatgtcagcattcccagt

SEQ ID NO: 4985375 - DNA, 25 bp, Homo sapien
tgaacatgtcagcattcccagtgct

SEQ ID NO: 4985376 - DNA, 25 bp, Homo sapien
tcatctgtgttcaggcatcatgaac

SEQ ID NO: 4985377 - DNA, 25 bp, Homo sapien
tgtgttcaggcatcatgaacatgtc

SEQ ID NO: 4985378 - DNA, 25 bp, Homo sapien
tgtgctgcacggtcaattctcaaag

SEQ ID NO: 4985379 - DNA, 25 bp, Homo sapien
ttggccttgatcgtgctgtgctgca

SEQ ID NO: 4985380 - DNA, 25 bp, Homo sapien
ccccaacgaactgactgcttgacat

SEQ ID NO: 4985381 - DNA, 25 bp, Homo sapien
gagagaactgtatgctggccttcca

SEQ ID NO: 4985382 - DNA, 25 bp, Homo sapien
tccagacaataacaggaggtgggtt

SEQ ID NO: 4985383 - DNA, 25 bp, Homo sapien
cagcaccacttgatccttgggggtt

SEQ ID NO: 4985384 - DNA, 25 bp, Homo sapien
gaggtgggttgccgtcagcttcaca

SEQ ID NO: 4985385 - DNA, 25 bp, Homo sapien
cacagagccactctacagcatgttc

SEQ ID NO: 4985386 - DNA, 25 bp, Homo sapien
cttgtacaattatgtttgctgcagc

SEQ ID NO: 4985387 - DNA, 25 bp, Homo sapien
gttggcatgacaggtaaatcgacca

SEQ ID NO: 4985388 - DNA, 25 bp, Homo sapien
aaatcgaccatgatcccgttgtgtg

SEQ ID NO: 4985389 - DNA, 25 bp, Homo sapien
tgcagcttgaacagtgccgtggcta

SEQ ID NO: 4985390 - DNA, 25 bp, Homo sapien
tccactggacgttgccacgtgcctg

SEQ ID NO: 4985391 - DNA, 25 bp, Homo sapien
tggatccatccagctccaatccatt

SEQ ID NO: 4985392 - DNA, 25 bp, Homo sapien
taagtaaagtccactggacgttgcc

SEQ ID NO: 4985393 - DNA, 25 bp, Homo sapien
gatccatccagctccaatccattgt

SEQ ID NO: 4985394 - DNA, 25 bp, Homo sapien
ccaagtgataagagggtgtgggtgg

SEQ ID NO: 4985395 - DNA, 25 bp, Homo sapien
caagtgataagagggtgtgggtggc

SEQ ID NO: 4985396 - DNA, 25 bp, Homo sapien
ctgtggccatacattccaaagttgt

SEQ ID NO: 4985397 - DNA, 25 bp, Homo sapien
aagttgtgctggtgccaattaaaac

SEQ ID NO: 4985398 - DNA, 25 bp, Homo sapien
ggctggattacaaagcttggtttgg

SEQ ID NO: 4985399 - DNA, 25 bp, Homo sapien
tgtcctgaggctggattacaaagct

SEQ ID NO: 4985400 - DNA, 25 bp, Homo sapien
tggccatgcactgatagacaccttg

SEQ ID NO: 4985401 - DNA, 25 bp, Homo sapien
cggatcatgagtgtgccatcatcaa

SEQ ID NO: 4985402 - DNA, 25 bp, Homo sapien
gactctctggtgtttcggatcatga

SEQ ID NO: 4985403 - DNA, 25 bp, Homo sapien
ttggcttccccagcggaatttctgg

SEQ ID NO: 4985404 - DNA, 25 bp, Homo sapien
cttcagcctggcaggtttctctcat

SEQ ID NO: 4985405 - DNA, 25 bp, Homo sapien
gttctgagcttttaattattcttcc

SEQ ID NO: 4985406 - DNA, 25 bp, Homo sapien
cttcgttctgagcttttaattattc

SEQ ID NO: 4985407 - DNA, 25 bp, Homo sapien
gagcttttaattattcttccttcag

SEQ ID NO: 4985408 - DNA, 25 bp, Homo sapien
cccggcaggtgaagtagacggtatt

SEQ ID NO: 4985409 - DNA, 25 bp, Homo sapien
atcctgcggctcaaaagtaattcgg

SEQ ID NO: 4985410 - DNA, 25 bp, Homo sapien
cacatcctgcggctcaaaagtaatt

SEQ ID NO: 4985411 - DNA, 25 bp, Homo sapien
ggtatttcctgatggtacctccaca

SEQ ID NO: 4985412 - DNA, 25 bp, Homo sapien
tgggcaaagccttgtaaaagctccc

SEQ ID NO: 4985413 - DNA, 25 bp, Homo sapien
gatattcgcaggtagccgcagcctg

SEQ ID NO: 4985414 - DNA, 25 bp, Homo sapien
tgaagcaactgcacgcccatggagt

SEQ ID NO: 4985415 - DNA, 25 bp, Homo sapien
aaccagggcgttggaatccagacgc

SEQ ID NO: 4985416 - DNA, 25 bp, Homo sapien
cagccagggattgtctagtcaccag

SEQ ID NO: 4985417 - DNA, 25 bp, Homo sapien
cattcccctcattatgaccagagaa

SEQ ID NO: 4985418 - DNA, 25 bp, Homo sapien
gagcctatgtgtgaagagagaaaac

SEQ ID NO: 4985419 - DNA, 25 bp, Homo sapien
tccaccctagtagtcttgcacttgc

SEQ ID NO: 4985420 - DNA, 25 bp, Homo sapien
gactttgaatcttggtggtttattg

SEQ ID NO: 4985421 - DNA, 25 bp, Homo sapien
aaatacaaggcttggtggtttattg

SEQ ID NO: 4985422 - DNA, 25 bp, Homo sapien
ggctacacgacaaaaatacaaggct

SEQ ID NO: 4985423 - DNA, 25 bp, Homo sapien
tggtggtttattggctacacgacaa

SEQ ID NO: 4985424 - DNA, 25 bp, Homo sapien
tccacggcagtcagatgggttgtat

SEQ ID NO: 4985425 - DNA, 25 bp, Homo sapien
tggcctgatctccacggcagtcaga

SEQ ID NO: 4985426 - DNA, 25 bp, Homo sapien
aggacatctaaagggtcaacactta

SEQ ID NO: 4985427 - DNA, 25 bp, Homo sapien
tctccacggcagtcagatgggttgt

SEQ ID NO: 4985428 - DNA, 25 bp, Homo sapien
agtcgctctaatctcagaaggtctc

SEQ ID NO: 4985429 - DNA, 25 bp, Homo sapien
ttctagttggttgaaatgaatatac

SEQ ID NO: 4985430 - DNA, 25 bp, Homo sapien
taatctcagaaggtctccaaaggtc

SEQ ID NO: 4985431 - DNA, 25 bp, Homo sapien
gctctaatctcagaaggtctccaaa

SEQ ID NO: 4985432 - DNA, 25 bp, Homo sapien
cttcctgatacatagcagaagtcca

SEQ ID NO: 4985433 - DNA, 25 bp, Homo sapien
ccttcctgatacatagcagaagtcc

SEQ ID NO: 4985434 - DNA, 25 bp, Homo sapien
gaacctcagtgttgaagcccccagg

SEQ ID NO: 4985435 - DNA, 25 bp, Homo sapien
cttacaggggcgtgagaacctcagt

SEQ ID NO: 4985436 - DNA, 25 bp, Homo sapien
cctcagtgttgaagcccccaggtgg

SEQ ID NO: 4985437 - DNA, 25 bp, Homo sapien
tacaggggcgtgagaacctcagtgt

SEQ ID NO: 4985438 - DNA, 25 bp, Homo sapien
ataggcccgccatgcacccagagga

SEQ ID NO: 4985439 - DNA, 25 bp, Homo sapien
gacccaaatctcctcggaagatccg

SEQ ID NO: 4985440 - DNA, 25 bp, Homo sapien
ggaaacgcgggagagccacaccctg

SEQ ID NO: 4985441 - DNA, 25 bp, Homo sapien
ctcggaagatccgaggacggccacc

SEQ ID NO: 4985442 - DNA, 25 bp, Homo sapien
aggtattgcgagttaacagtgccac

SEQ ID NO: 4985443 - DNA, 25 bp, Homo sapien
gctggcgaggcaggtattgcgagtt

SEQ ID NO: 4985444 - DNA, 25 bp, Homo sapien
gcgaggcaggtattgcgagttaaca

SEQ ID NO: 4985445 - DNA, 25 bp, Homo sapien
gcaggtattgcgagttaacagtgcc

SEQ ID NO: 4985446 - DNA, 25 bp, Homo sapien
ctggtcaaccatgagcctctcttca

SEQ ID NO: 4985447 - DNA, 25 bp, Homo sapien
ccccactgcaagggtcttcaatttg

SEQ ID NO: 4985448 - DNA, 25 bp, Homo sapien
tggtcaaccatgagcctctcttcac

SEQ ID NO: 4985449 - DNA, 25 bp, Homo sapien
cactgcaagggtcttcaatttgact

SEQ ID NO: 4985450 - DNA, 25 bp, Homo sapien
acttgcgagggagttgcagttgtaa

SEQ ID NO: 4985451 - DNA, 25 bp, Homo sapien
atagtgggtggatgtgacaccaaga

SEQ ID NO: 4985452 - DNA, 25 bp, Homo sapien
ttgtaatggagctgtcacaggagag

SEQ ID NO: 4985453 - DNA, 25 bp, Homo sapien
tgacaccaagagtcatggacttgcg

SEQ ID NO: 4985454 - DNA, 25 bp, Homo sapien
ctctgtcccactgtctatgtttgca

SEQ ID NO: 4985455 - DNA, 25 bp, Homo sapien
ttgcaaagccccgtttttcactcgc

SEQ ID NO: 4985456 - DNA, 25 bp, Homo sapien
gtcccactgtctatgtttgcaaagc

SEQ ID NO: 4985457 - DNA, 25 bp, Homo sapien
tttttcactcgcttgtgaccatttg

SEQ ID NO: 4985458 - DNA, 25 bp, Homo sapien
caaaaactaaactgaagaatgtatt

SEQ ID NO: 4985459 - DNA, 25 bp, Homo sapien
tcgaaagagattttctttgggccaa

SEQ ID NO: 4985460 - DNA, 25 bp, Homo sapien
gccaaaaactaaactgaagaatgta

SEQ ID NO: 4985461 - DNA, 25 bp, Homo sapien
ttcgaaagagattttctttgggcca

SEQ ID NO: 4985462 - DNA, 25 bp, Homo sapien
tttgaaagtcgctgcttcttttctg

SEQ ID NO: 4985463 - DNA, 25 bp, Homo sapien
cttcttttctgactgccaagttgca

SEQ ID NO: 4985464 - DNA, 25 bp, Homo sapien
gactgccaagttgcagctccctggt

SEQ ID NO: 4985465 - DNA, 25 bp, Homo sapien
gaaagtcgctgcttcttttctgact

SEQ ID NO: 4985466 - DNA, 25 bp, Homo sapien
tttccaggcttgagacaagcatctg

SEQ ID NO: 4985467 - DNA, 25 bp, Homo sapien
cagccctgtcattgtagaaattgga

SEQ ID NO: 4985468 - DNA, 25 bp, Homo sapien
aaaacaagtcgtcttcatcatttca

SEQ ID NO: 4985469 - DNA, 25 bp, Homo sapien
tctccctgttgctctaaaacaagtc

SEQ ID NO: 4985470 - DNA, 25 bp, Homo sapien
ctggaactgagagctgaagtggaaa

SEQ ID NO: 4985471 - DNA, 25 bp, Homo sapien
tagttggcatcgactctgctacttc

SEQ ID NO: 4985472 - DNA, 25 bp, Homo sapien
ccgtaagtgatggaatgctggaact

SEQ ID NO: 4985473 - DNA, 25 bp, Homo sapien
gaaacgtgactcttccacatcagag

SEQ ID NO: 4985474 - DNA, 25 bp, Homo sapien
ttctcatttttctttttatccagca

SEQ ID NO: 4985475 - DNA, 25 bp, Homo sapien
tattctcatttttctttttatccag

SEQ ID NO: 4985476 - DNA, 25 bp, Homo sapien
ttattctcatttttctttttatcca

SEQ ID NO: 4985477 - DNA, 25 bp, Homo sapien
tctcatttttctttttatccagcat

SEQ ID NO: 4985478 - DNA, 25 bp, Homo sapien
agttggccagcaccatagatgtctt

SEQ ID NO: 4985479 - DNA, 25 bp, Homo sapien
acatctctagtgtgggcttcccatg

SEQ ID NO: 4985480 - DNA, 25 bp, Homo sapien
tgagataaagacatagctgcaggga

SEQ ID NO: 4985481 - DNA, 25 bp, Homo sapien
taaggacacattatccagttggcca

SEQ ID NO: 4985482 - DNA, 25 bp, Homo sapien
tccagatagtgacagggacggagct

SEQ ID NO: 4985483 - DNA, 25 bp, Homo sapien
cagacgctcgatcgcatgcaaagaa

SEQ ID NO: 4985484 - DNA, 25 bp, Homo sapien
caagtgttcagtacttccaggcaca

SEQ ID NO: 4985485 - DNA, 25 bp, Homo sapien
gcagagcccgtgaacaagtctcaga

SEQ ID NO: 4985486 - DNA, 25 bp, Homo sapien
cacaagatcgggaacttcactatca

SEQ ID NO: 4985487 - DNA, 25 bp, Homo sapien
aagatcgggaacttcactatcatca

SEQ ID NO: 4985488 - DNA, 25 bp, Homo sapien
tcgggaacttcactatcatcatcat

SEQ ID NO: 4985489 - DNA, 25 bp, Homo sapien
tccacaagatcgggaacttcactat

SEQ ID NO: 4985490 - DNA, 25 bp, Homo sapien
gcctgcagtcggctgagctttccct

SEQ ID NO: 4985491 - DNA, 25 bp, Homo sapien
ctgctgctgttctacggaccacctt

SEQ ID NO: 4985492 - DNA, 25 bp, Homo sapien
cttccttccgcaagcagttgctttc

SEQ ID NO: 4985493 - DNA, 25 bp, Homo sapien
ctggtgcctgcagtcggctgagctt

SEQ ID NO: 4985494 - DNA, 25 bp, Homo sapien
ggtcgacaaagttcctctgagcgag

SEQ ID NO: 4985495 - DNA, 25 bp, Homo sapien
acaaagttcctctgagcgaggtggg

SEQ ID NO: 4985496 - DNA, 25 bp, Homo sapien
agcaggtcgacaaagttcctctgag

SEQ ID NO: 4985497 - DNA, 25 bp, Homo sapien
tcgacaaagttcctctgagcgaggt

SEQ ID NO: 4985498 - DNA, 25 bp, Homo sapien
cccttcgagagtaggccactgcgtg

SEQ ID NO: 4985499 - DNA, 25 bp, Homo sapien
gtgccaccatacatagttctcctta

SEQ ID NO: 4985500 - DNA, 25 bp, Homo sapien
gttctccttagtccataaaatgcca

SEQ ID NO: 4985501 - DNA, 25 bp, Homo sapien
ggtgtttctgcccttcgagagtagg

SEQ ID NO: 4985502 - DNA, 25 bp, Homo sapien
aaatggaattcattgaaaggcccat

SEQ ID NO: 4985503 - DNA, 25 bp, Homo sapien
tggcttggtaaacccaagagaaatg

SEQ ID NO: 4985504 - DNA, 25 bp, Homo sapien
atcccacttcacctttggcttggta

SEQ ID NO: 4985505 - DNA, 25 bp, Homo sapien
gagaaatggaattcattgaaaggcc

SEQ ID NO: 4985506 - DNA, 25 bp, Homo sapien
tagcaagactttctattagcaagac

SEQ ID NO: 4985507 - DNA, 25 bp, Homo sapien
gaattctttctcaagggacaatgcc

SEQ ID NO: 4985508 - DNA, 25 bp, Homo sapien
aagacattgccctagaacagtccca

SEQ ID NO: 4985509 - DNA, 25 bp, Homo sapien
acagtcccacccctagtagaagagg

SEQ ID NO: 4985510 - DNA, 25 bp, Homo sapien
cctattagggtatcattaactttct

SEQ ID NO: 4985511 - DNA, 25 bp, Homo sapien
gtgagtcttgattaccatttctggg

SEQ ID NO: 4985512 - DNA, 25 bp, Homo sapien
tttctggggcaacagataagtcccc

SEQ ID NO: 4985513 - DNA, 25 bp, Homo sapien
cagagggtgttaggtaatggataat

SEQ ID NO: 4985514 - DNA, 25 bp, Homo sapien
cagacacctgcgtaatgcattgctc

SEQ ID NO: 4985515 - DNA, 25 bp, Homo sapien
gcatgactgtattatctgacaatca

SEQ ID NO: 4985516 - DNA, 25 bp, Homo sapien
gaggttcttcctgagtaggttcatt

SEQ ID NO: 4985517 - DNA, 25 bp, Homo sapien
gcattgctctatggcagtaagacag

SEQ ID NO: 4985518 - DNA, 25 bp, Homo sapien
catctgcacccgtggctggttctgg

SEQ ID NO: 4985519 - DNA, 25 bp, Homo sapien
tccatccagtgaaaaattgcagtca

SEQ ID NO: 4985520 - DNA, 25 bp, Homo sapien
tcgaggattgaaaggcaccctccag

SEQ ID NO: 4985521 - DNA, 25 bp, Homo sapien
gaaaacctcctgacatcgaggattg

SEQ ID NO: 4985522 - DNA, 25 bp, Homo sapien
acaagtacaagttaagtttcacact

SEQ ID NO: 4985523 - DNA, 25 bp, Homo sapien
cattctagctggtgtttagtctaag

SEQ ID NO: 4985524 - DNA, 25 bp, Homo sapien
taagtttcacacttgattgcctaac

SEQ ID NO: 4985525 - DNA, 25 bp, Homo sapien
tgattgcctaactccacattctagc

SEQ ID NO: 4985526 - DNA, 25 bp, Homo sapien
ggatggatcgctgagtttatcctac

SEQ ID NO: 4985527 - DNA, 25 bp, Homo sapien
tgattacttttcctatgcttgagct

SEQ ID NO: 4985528 - DNA, 25 bp, Homo sapien
tagttagtccaacatctgagttttc

SEQ ID NO: 4985529 - DNA, 25 bp, Homo sapien
gatggtaccccatggagctttttag

SEQ ID NO: 4985530 - DNA, 25 bp, Homo sapien
ggccttcatggagctaatagtaaag

SEQ ID NO: 4985531 - DNA, 25 bp, Homo sapien
tccaagaacactggtttagctggag

SEQ ID NO: 4985532 - DNA, 25 bp, Homo sapien
gggacggaggtgtccaaacttctgc

SEQ ID NO: 4985533 - DNA, 25 bp, Homo sapien
tagctatgatcaaagtgaaaaagac

SEQ ID NO: 4985534 - DNA, 25 bp, Homo sapien
gggcagtgagccgtgtggtgcccgc

SEQ ID NO: 4985535 - DNA, 25 bp, Homo sapien
ggcagtgagccgtgtggtgcccgct

SEQ ID NO: 4985536 - DNA, 25 bp, Homo sapien
gcagtgagccgtgtggtgcccgctc

SEQ ID NO: 4985537 - DNA, 25 bp, Homo sapien
tggggcagtgagccgtgtggtgccc

SEQ ID NO: 4985538 - DNA, 25 bp, Homo sapien
gagagcagctcttcatgtacaagac

SEQ ID NO: 4985539 - DNA, 25 bp, Homo sapien
acagtgaccactactgcacaccaca

SEQ ID NO: 4985540 - DNA, 25 bp, Homo sapien
caatgatggatggagccgcttggca

SEQ ID NO: 4985541 - DNA, 25 bp, Homo sapien
catcacagacacatggacggcagca

SEQ ID NO: 4985542 - DNA, 25 bp, Homo sapien
ctctaaaatggccactttaggaacg

SEQ ID NO: 4985543 - DNA, 25 bp, Homo sapien
gaatgcgttcccaaggggaggtctc

SEQ ID NO: 4985544 - DNA, 25 bp, Homo sapien
tggccactttaggaacggctgtctt

SEQ ID NO: 4985545 - DNA, 25 bp, Homo sapien
cagttgtgtaaggaacgaaataagc

SEQ ID NO: 4985546 - DNA, 25 bp, Homo sapien
ccagggtatctgagtgagaactgcc

SEQ ID NO: 4985547 - DNA, 25 bp, Homo sapien
catatcatgatctgacggcgaggcg

SEQ ID NO: 4985548 - DNA, 25 bp, Homo sapien
caagggaaggccacacatatcatga

SEQ ID NO: 4985549 - DNA, 25 bp, Homo sapien
ccctgtgggcacctatgtgagtttc

SEQ ID NO: 4985550 - DNA, 25 bp, Homo sapien
tgtgcccagagaagttaggcccagg

SEQ ID NO: 4985551 - DNA, 25 bp, Homo sapien
tatctcatggattccgctctgacaa

SEQ ID NO: 4985552 - DNA, 25 bp, Homo sapien
gttctggtccaccaagtatgtgtgc

SEQ ID NO: 4985553 - DNA, 25 bp, Homo sapien
ttcttggtaaccagaaggctgccac

SEQ ID NO: 4985554 - DNA, 25 bp, Homo sapien
tctggggcctctttcatagaacacc

SEQ ID NO: 4985555 - DNA, 25 bp, Homo sapien
gcctctggggcctctttcatagaac

SEQ ID NO: 4985556 - DNA, 25 bp, Homo sapien
cctctggggcctctttcatagaaca

SEQ ID NO: 4985557 - DNA, 25 bp, Homo sapien
tggggcctctttcatagaacaccaa

SEQ ID NO: 4985558 - DNA, 25 bp, Homo sapien
ctcctgcccagaataccgccccatc

SEQ ID NO: 4985559 - DNA, 25 bp, Homo sapien
ctgcccagaataccgccccatcctc

SEQ ID NO: 4985560 - DNA, 25 bp, Homo sapien
gctttggccaaggctgctcctgccc

SEQ ID NO: 4985561 - DNA, 25 bp, Homo sapien
ctttggccaaggctgctcctgccca

SEQ ID NO: 4985562 - DNA, 25 bp, Homo sapien
ccatagggcctttagacagttcata

SEQ ID NO: 4985563 - DNA, 25 bp, Homo sapien
taagtagcagagtaaccatagggcc

SEQ ID NO: 4985564 - DNA, 25 bp, Homo sapien
gaaacaagtgcaacatgcttctagt

SEQ ID NO: 4985565 - DNA, 25 bp, Homo sapien
gatcaacgtcgcatggaaacaagtg

SEQ ID NO: 4985566 - DNA, 25 bp, Homo sapien
cggtgagttcaatccaagttggaga

SEQ ID NO: 4985567 - DNA, 25 bp, Homo sapien
gaaaagatttgtcctcagaatgccc

SEQ ID NO: 4985568 - DNA, 25 bp, Homo sapien
gccagggcagctcttggatatagtc

SEQ ID NO: 4985569 - DNA, 25 bp, Homo sapien
gaccgggcgtgacacaagtcttcag

SEQ ID NO: 4985570 - DNA, 25 bp, Homo sapien
agcaactaagggcagcattattttt

SEQ ID NO: 4985571 - DNA, 25 bp, Homo sapien
tttttctatgaggcacagagattcc

SEQ ID NO: 4985572 - DNA, 25 bp, Homo sapien
gcatccaggagcaactaagggcagc

SEQ ID NO: 4985573 - DNA, 25 bp, Homo sapien
caggagcaactaagggcagcattat

SEQ ID NO: 4985574 - DNA, 25 bp, Homo sapien
gggcccatgccggagtcgcagctct

SEQ ID NO: 4985575 - DNA, 25 bp, Homo sapien
tacacgtgggcccatgccggagtcg

SEQ ID NO: 4985576 - DNA, 25 bp, Homo sapien
gagtcgcagctctctgcgacactgt

SEQ ID NO: 4985577 - DNA, 25 bp, Homo sapien
ctaggctacacgtgggcccatgccg

SEQ ID NO: 4985578 - DNA, 25 bp, Homo sapien
cacaggtgaggtagtaagtgaggct

SEQ ID NO: 4985579 - DNA, 25 bp, Homo sapien
agtaagtgaggcttacaactaaaat

SEQ ID NO: 4985580 - DNA, 25 bp, Homo sapien
tctgtaaaagtagtcatcaacacag

SEQ ID NO: 4985581 - DNA, 25 bp, Homo sapien
tttctgtaaaagtagtcatcaacac

SEQ ID NO: 4985582 - DNA, 25 bp, Homo sapien
tctcttccaacttcttagaggtgga

SEQ ID NO: 4985583 - DNA, 25 bp, Homo sapien
tcttagaggtggaatttgcactctg

SEQ ID NO: 4985584 - DNA, 25 bp, Homo sapien
ctctgccacctcgagctctgacaga

SEQ ID NO: 4985585 - DNA, 25 bp, Homo sapien
tcctcctgagtcttcggtagatgtg

SEQ ID NO: 4985586 - DNA, 25 bp, Homo sapien
ggcttctaggtcatacatagataag

SEQ ID NO: 4985587 - DNA, 25 bp, Homo sapien
tgacatgatagagcacaattcggtt

SEQ ID NO: 4985588 - DNA, 25 bp, Homo sapien
gatagagcacaattcggttttatac

SEQ ID NO: 4985589 - DNA, 25 bp, Homo sapien
ccaaaggaggcaatcggatacagat

SEQ ID NO: 4985590 - DNA, 25 bp, Homo sapien
ctacagtagggttgaaaggcagcac

SEQ ID NO: 4985591 - DNA, 25 bp, Homo sapien
agctctccaactagcacagggacca

SEQ ID NO: 4985592 - DNA, 25 bp, Homo sapien
tagttgacaaacgaggacattcacc

SEQ ID NO: 4985593 - DNA, 25 bp, Homo sapien
tttcccatgtgcagtagctctccaa

SEQ ID NO: 4985594 - DNA, 25 bp, Homo sapien
caagaactctactggaccatttgag

SEQ ID NO: 4985595 - DNA, 25 bp, Homo sapien
cgtgctgaccaattaagaggcccaa

SEQ ID NO: 4985596 - DNA, 25 bp, Homo sapien
cccgtaatgcctcctagatgccgat

SEQ ID NO: 4985597 - DNA, 25 bp, Homo sapien
ccgattagtctaagcggctgctcca

SEQ ID NO: 4985598 - DNA, 25 bp, Homo sapien
tgtggtccagcatcaagtgcatgca

SEQ ID NO: 4985599 - DNA, 25 bp, Homo sapien
tccagcatcaagtgcatgcagcgga

SEQ ID NO: 4985600 - DNA, 25 bp, Homo sapien
tcaagtgcatgcagcggacggtgct

SEQ ID NO: 4985601 - DNA, 25 bp, Homo sapien
aggaatgtggtccagcatcaagtgc

SEQ ID NO: 4985602 - DNA, 25 bp, Homo sapien
agcaaaggcaccggctggggcaggg

SEQ ID NO: 4985603 - DNA, 25 bp, Homo sapien
caaaggcaccggctggggcagggca

SEQ ID NO: 4985604 - DNA, 25 bp, Homo sapien
cttaaagcaaaggcaccggctgggg

SEQ ID NO: 4985605 - DNA, 25 bp, Homo sapien
taaagcaaaggcaccggctggggca

SEQ ID NO: 4985606 - DNA, 25 bp, Homo sapien
agagagtggtccagcagaacagtct

SEQ ID NO: 4985607 - DNA, 25 bp, Homo sapien
ggtccagcagaacagtctgggctcc

SEQ ID NO: 4985608 - DNA, 25 bp, Homo sapien
tggcaggcaccacccggccaggaga

SEQ ID NO: 4985609 - DNA, 25 bp, Homo sapien
ggagaaagagagtggtccagcagaa

SEQ ID NO: 4985610 - DNA, 25 bp, Homo sapien
cactcatgtaagactcaaacgggct

SEQ ID NO: 4985611 - DNA, 25 bp, Homo sapien
cccagatgatcagactagtagacca

SEQ ID NO: 4985612 - DNA, 25 bp, Homo sapien
gaagtgagcagcacctcgttgagga

SEQ ID NO: 4985613 - DNA, 25 bp, Homo sapien
aaacaccgtgttttaggcagcataa

SEQ ID NO: 4985614 - DNA, 25 bp, Homo sapien
ggccctgtctctaactcactgtatg

SEQ ID NO: 4985615 - DNA, 25 bp, Homo sapien
caaaacatgccacggttctaggtct

SEQ ID NO: 4985616 - DNA, 25 bp, Homo sapien
tgctagaagctatcttaggccctgt

SEQ ID NO: 4985617 - DNA, 25 bp, Homo sapien
caatgatttaacaggctttgcttca

SEQ ID NO: 4985618 - DNA, 25 bp, Homo sapien
ttaatctttatttgctacttttcca

SEQ ID NO: 4985619 - DNA, 25 bp, Homo sapien
taatctttatttgctacttttccac

SEQ ID NO: 4985620 - DNA, 25 bp, Homo sapien
gaatgaaggacaatatggaaaagcc

SEQ ID NO: 4985621 - DNA, 25 bp, Homo sapien
aactctctcctgcatagtaaaagca

SEQ ID NO: 4985622 - DNA, 25 bp, Homo sapien
tctactgtacactttgccatggtca

SEQ ID NO: 4985623 - DNA, 25 bp, Homo sapien
cagataaaaacatgtggtcaccagg

SEQ ID NO: 4985624 - DNA, 25 bp, Homo sapien
tgaacatggcataggtcccaaagat

SEQ ID NO: 4985625 - DNA, 25 bp, Homo sapien
tgctaaagtgcatccgctgaccagg

SEQ ID NO: 4985626 - DNA, 25 bp, Homo sapien
taggctcagccctaccttgtcaaag

SEQ ID NO: 4985627 - DNA, 25 bp, Homo sapien
tgctggtggtagtccatgatactct

SEQ ID NO: 4985628 - DNA, 25 bp, Homo sapien
aatgaagttttcatagaggaaatgc

SEQ ID NO: 4985629 - DNA, 25 bp, Homo sapien
tatatacagcaacccaacaacagtg

SEQ ID NO: 4985630 - DNA, 25 bp, Homo sapien
ttattgcactcatatattgcccgga

SEQ ID NO: 4985631 - DNA, 25 bp, Homo sapien
tgtaaagggtccatataaagagttg

SEQ ID NO: 4985632 - DNA, 25 bp, Homo sapien
tatagtacacaagtcttgactactg

SEQ ID NO: 4985633 - DNA, 25 bp, Homo sapien
tgaaatcactctgagctaaaacaac

SEQ ID NO: 4985634 - DNA, 25 bp, Homo sapien
gactactgttgcattccactttgaa

SEQ ID NO: 4985635 - DNA, 25 bp, Homo sapien
atcactctgagctaaaacaacattt

SEQ ID NO: 4985636 - DNA, 25 bp, Homo sapien
ttttccactataatttgctctgatg

SEQ ID NO: 4985637 - DNA, 25 bp, Homo sapien
cttttaactcctaacaaatgctaca

SEQ ID NO: 4985638 - DNA, 25 bp, Homo sapien
agactaaaggaattatcagtaggca

SEQ ID NO: 4985639 - DNA, 25 bp, Homo sapien
gaattatcagtaggcatttttcttc

SEQ ID NO: 4985640 - DNA, 25 bp, Homo sapien
ctcctctggcttcattgcttcattg

SEQ ID NO: 4985641 - DNA, 25 bp, Homo sapien
tcagtaaattttgaggtggctcctc

SEQ ID NO: 4985642 - DNA, 25 bp, Homo sapien
ggaggggcagcttcatgattttttc

SEQ ID NO: 4985643 - DNA, 25 bp, Homo sapien
cattgcttcattgtgatctttttcc

SEQ ID NO: 4985644 - DNA, 25 bp, Homo sapien
agaggctgaggaataagctgattac

SEQ ID NO: 4985645 - DNA, 25 bp, Homo sapien
tgtctagaggctgaggaataagctg

SEQ ID NO: 4985646 - DNA, 25 bp, Homo sapien
ctagaggctgaggaataagctgatt

SEQ ID NO: 4985647 - DNA, 25 bp, Homo sapien
tctagaggctgaggaataagctgat

SEQ ID NO: 4985648 - DNA, 25 bp, Homo sapien
aaatacgtaagtgttaattctctgt

SEQ ID NO: 4985649 - DNA, 25 bp, Homo sapien
tatatgccaaggaccgatggatggc

SEQ ID NO: 4985650 - DNA, 25 bp, Homo sapien
catctaacaaaggttttggagtagt

SEQ ID NO: 4985651 - DNA, 25 bp, Homo sapien
gaaacagggtacatgactgtgaagt

SEQ ID NO: 4985652 - DNA, 25 bp, Homo sapien
tgtctgtgtgttggcatttacatgc

SEQ ID NO: 4985653 - DNA, 25 bp, Homo sapien
tgcccggccctctacatgtaaaaat

SEQ ID NO: 4985654 - DNA, 25 bp, Homo sapien
tgtgagatcccatcccctatgaagt

SEQ ID NO: 4985655 - DNA, 25 bp, Homo sapien
gacacactggatgatttagactacc

SEQ ID NO: 4985656 - DNA, 25 bp, Homo sapien
ttaaagaacccatgcagacacactg

SEQ ID NO: 4985657 - DNA, 25 bp, Homo sapien
tattgggtggtcataaaggtctccc

SEQ ID NO: 4985658 - DNA, 25 bp, Homo sapien
caaggagccgaaggaagactagtgc

SEQ ID NO: 4985659 - DNA, 25 bp, Homo sapien
catgtaaacatcttgcgggcagagg

SEQ ID NO: 4985660 - DNA, 25 bp, Homo sapien
tgaagttgggagcacgagatcagct

SEQ ID NO: 4985661 - DNA, 25 bp, Homo sapien
tttaatttcctgcaattaaggaata

SEQ ID NO: 4985662 - DNA, 25 bp, Homo sapien
tatgagcaacttgattactacaaga

SEQ ID NO: 4985663 - DNA, 25 bp, Homo sapien
ggagtcgcgttctttcatattttaa

SEQ ID NO: 4985664 - DNA, 25 bp, Homo sapien
gaataatgtcctctcaacagaaagc

SEQ ID NO: 4985665 - DNA, 25 bp, Homo sapien
ctttccacggtttccgctttctatg

SEQ ID NO: 4985666 - DNA, 25 bp, Homo sapien
cttattgtagaatttcaagtacagt

SEQ ID NO: 4985667 - DNA, 25 bp, Homo sapien
cacggtttccgctttctatggtcaa

SEQ ID NO: 4985668 - DNA, 25 bp, Homo sapien
aatttcaagtacagtagtctccctt

SEQ ID NO: 4985669 - DNA, 25 bp, Homo sapien
ctgtccagttcgcataatctgtgtt

SEQ ID NO: 4985670 - DNA, 25 bp, Homo sapien
ccaagtgttctgtccagttcgcata

SEQ ID NO: 4985671 - DNA, 25 bp, Homo sapien
gtccagttcgcataatctgtgttaa

SEQ ID NO: 4985672 - DNA, 25 bp, Homo sapien
agtgttctgtccagttcgcataatc

SEQ ID NO: 4985673 - DNA, 25 bp, Homo sapien
catgtagttttcatggtctttctgc

SEQ ID NO: 4985674 - DNA, 25 bp, Homo sapien
attcgatcatactgatgactgtcag

SEQ ID NO: 4985675 - DNA, 25 bp, Homo sapien
taggcatgactaatatgcctccaac

SEQ ID NO: 4985676 - DNA, 25 bp, Homo sapien
ctgatcctctataggcatgactaat

SEQ ID NO: 4985677 - DNA, 25 bp, Homo sapien
ggaggcaattaccaacaacaaatgc

SEQ ID NO: 4985678 - DNA, 25 bp, Homo sapien
gcaattaccaacaacaaatgcaggt

SEQ ID NO: 4985679 - DNA, 25 bp, Homo sapien
ggcaattaccaacaacaaatgcagg

SEQ ID NO: 4985680 - DNA, 25 bp, Homo sapien
ctggaggcaattaccaacaacaaat

SEQ ID NO: 4985681 - DNA, 25 bp, Homo sapien
catattgctgctttggccccgatga

SEQ ID NO: 4985682 - DNA, 25 bp, Homo sapien
acatcactgaatgggacaaagacca

SEQ ID NO: 4985683 - DNA, 25 bp, Homo sapien
tattatcaatgacataggacggaca

SEQ ID NO: 4985684 - DNA, 25 bp, Homo sapien
aaaaaagatacgagtgtcctgacca

SEQ ID NO: 4985685 - DNA, 25 bp, Homo sapien
tgccaaggaaatcaccattacaggt

SEQ ID NO: 4985686 - DNA, 25 bp, Homo sapien
tcaggatgaatgtgactagggaatt

SEQ ID NO: 4985687 - DNA, 25 bp, Homo sapien
tagcttacagaactactgccaagga

SEQ ID NO: 4985688 - DNA, 25 bp, Homo sapien
taagttggactatttcagtatggtc

SEQ ID NO: 4985689 - DNA, 25 bp, Homo sapien
tttctttataggtgcatgttggaat

SEQ ID NO: 4985690 - DNA, 25 bp, Homo sapien
ataggtgcatgttggaatatcttca

SEQ ID NO: 4985691 - DNA, 25 bp, Homo sapien
ctttataggtgcatgttggaatatc

SEQ ID NO: 4985692 - DNA, 25 bp, Homo sapien
tataggtgcatgttggaatatcttc

SEQ ID NO: 4985693 - DNA, 25 bp, Homo sapien
gatctccagatacactgataccatt

SEQ ID NO: 4985694 - DNA, 25 bp, Homo sapien
catataaccgatagtcctgacaact

SEQ ID NO: 4985695 - DNA, 25 bp, Homo sapien
tccaagcaatgtgtttcaagtaaat

SEQ ID NO: 4985696 - DNA, 25 bp, Homo sapien
caggtaagtcatataaaggtgagcc

SEQ ID NO: 4985697 - DNA, 25 bp, Homo sapien
gcaattcaaatcatgacatggtaat

SEQ ID NO: 4985698 - DNA, 25 bp, Homo sapien
tatttgggagtttactatgatctta

SEQ ID NO: 4985699 - DNA, 25 bp, Homo sapien
cagattagcatatggattttacccc

SEQ ID NO: 4985700 - DNA, 25 bp, Homo sapien
ttaaaaaagatccaaaccggcagca

SEQ ID NO: 4985701 - DNA, 25 bp, Homo sapien
aatcaacgataatctggtactaagg

SEQ ID NO: 4985702 - DNA, 25 bp, Homo sapien
tactactccttgtatataagctact

SEQ ID NO: 4985703 - DNA, 25 bp, Homo sapien
ggtactaaggaatatacaaatggca

SEQ ID NO: 4985704 - DNA, 25 bp, Homo sapien
caagactagttcatgaatgtaagaa

SEQ ID NO: 4985705 - DNA, 25 bp, Homo sapien
cttcatgtattaataggtgaaatct

SEQ ID NO: 4985706 - DNA, 25 bp, Homo sapien
gcttcactgattcaagagtcttcct

SEQ ID NO: 4985707 - DNA, 25 bp, Homo sapien
gctcaattaatgacccaaaatggaa

SEQ ID NO: 4985708 - DNA, 25 bp, Homo sapien
tccttgagtctgttctgctcaatta

SEQ ID NO: 4985709 - DNA, 25 bp, Homo sapien
tgccactataatccttaagacagag

SEQ ID NO: 4985710 - DNA, 25 bp, Homo sapien
gactgcatcttaagcacttaccatg

SEQ ID NO: 4985711 - DNA, 25 bp, Homo sapien
tatgaaccaacacagtaagccttga

SEQ ID NO: 4985712 - DNA, 25 bp, Homo sapien
taaataagatacaggatggtgctca

SEQ ID NO: 4985713 - DNA, 25 bp, Homo sapien
tgcattcaattgagccagtcaggat

SEQ ID NO: 4985714 - DNA, 25 bp, Homo sapien
ggtaccacctctcatgtcctgaaga

SEQ ID NO: 4985715 - DNA, 25 bp, Homo sapien
ggaccaaagcccgtgcaatgtttct

SEQ ID NO: 4985716 - DNA, 25 bp, Homo sapien
caaagagctcatggatttcagcgta

SEQ ID NO: 4985717 - DNA, 25 bp, Homo sapien
caatcccatgatttattccaaaagg

SEQ ID NO: 4985718 - DNA, 25 bp, Homo sapien
cttggcatattccaccacatctgaa

SEQ ID NO: 4985719 - DNA, 25 bp, Homo sapien
cactatttttgatgaagctctccag

SEQ ID NO: 4985720 - DNA, 25 bp, Homo sapien
atgaagctcaatcccatgatttatt

SEQ ID NO: 4985721 - DNA, 25 bp, Homo sapien
catgcaaaatatgctatgcattaat

SEQ ID NO: 4985722 - DNA, 25 bp, Homo sapien
tactaccttgacacaagatatttaa

SEQ ID NO: 4985723 - DNA, 25 bp, Homo sapien
cataacttgtttttcatactacctt

SEQ ID NO: 4985724 - DNA, 25 bp, Homo sapien
tatgcattaatactgaattgtaaac

SEQ ID NO: 4985725 - DNA, 25 bp, Homo sapien
gccaactgaggcatgaatttgactc

SEQ ID NO: 4985726 - DNA, 25 bp, Homo sapien
gaatgtgatatacaccttgaatgca

SEQ ID NO: 4985727 - DNA, 25 bp, Homo sapien
gcaatgctgattattacaactcaca

SEQ ID NO: 4985728 - DNA, 25 bp, Homo sapien
tatagctaataggtacaagttgtca

SEQ ID NO: 4985729 - DNA, 25 bp, Homo sapien
tttatgtctatgttcgccccttgta

SEQ ID NO: 4985730 - DNA, 25 bp, Homo sapien
taccaattagtcaagaacccaagct

SEQ ID NO: 4985731 - DNA, 25 bp, Homo sapien
ttattaggtttaggcatcaagtgtc

SEQ ID NO: 4985732 - DNA, 25 bp, Homo sapien
ccatcatttcagttgaggactctga

SEQ ID NO: 4985733 - DNA, 25 bp, Homo sapien
gtaaatgcctgggtcctaccacaaa

SEQ ID NO: 4985734 - DNA, 25 bp, Homo sapien
aatggaatctctcagggcgtgaccc

SEQ ID NO: 4985735 - DNA, 25 bp, Homo sapien
tgtaagaccggttcccactgtataa

SEQ ID NO: 4985736 - DNA, 25 bp, Homo sapien
gacccagggtctgcagataatccta

SEQ ID NO: 4985737 - DNA, 25 bp, Homo sapien
aagtcgacaggaataggtttcactc

SEQ ID NO: 4985738 - DNA, 25 bp, Homo sapien
ggatcagtcattaggtttctacgaa

SEQ ID NO: 4985739 - DNA, 25 bp, Homo sapien
cctagacaactaagagaagctgttc

SEQ ID NO: 4985740 - DNA, 25 bp, Homo sapien
caatcggcgaaaggctaagtaatta

SEQ ID NO: 4985741 - DNA, 25 bp, Homo sapien
tcatgcacaatttcaagggtaggag

SEQ ID NO: 4985742 - DNA, 25 bp, Homo sapien
gctggcacagggtctaacataatac

SEQ ID NO: 4985743 - DNA, 25 bp, Homo sapien
gggaatgatgcataccacagaagta

SEQ ID NO: 4985744 - DNA, 25 bp, Homo sapien
caactatcatccctataaagcggta

SEQ ID NO: 4985745 - DNA, 25 bp, Homo sapien
acaatttttggcaagggtgtaggag

SEQ ID NO: 4985746 - DNA, 25 bp, Homo sapien
cagaaatctatgaatcctttgcatg

SEQ ID NO: 4985747 - DNA, 25 bp, Homo sapien
taacacacagagatgtgaaatccaa

SEQ ID NO: 4985748 - DNA, 25 bp, Homo sapien
tttataaacgtaacacacagagatg

SEQ ID NO: 4985749 - DNA, 25 bp, Homo sapien
cgcattcagtccaatatccaactca

SEQ ID NO: 4985750 - DNA, 25 bp, Homo sapien
gacgcattcagtccaatatccaact

SEQ ID NO: 4985751 - DNA, 25 bp, Homo sapien
cattcagtccaatatccaactcagc

SEQ ID NO: 4985752 - DNA, 25 bp, Homo sapien
ctgacgcattcagtccaatatccaa

SEQ ID NO: 4985753 - DNA, 25 bp, Homo sapien
tggatggcactagcagtctccccag

SEQ ID NO: 4985754 - DNA, 25 bp, Homo sapien
tggcatccacagtgctggatggcac

SEQ ID NO: 4985755 - DNA, 25 bp, Homo sapien
ctttaggaatgaatgttgtagcagc

SEQ ID NO: 4985756 - DNA, 25 bp, Homo sapien
ttaggaatgaatgttgtagcagcaa

SEQ ID NO: 4985757 - DNA, 25 bp, Homo sapien
tcagaataacttgccttcgtggttc

SEQ ID NO: 4985758 - DNA, 25 bp, Homo sapien
gacgtgggaggctgctttatttgca

SEQ ID NO: 4985759 - DNA, 25 bp, Homo sapien
gatactccattcagttatggaaagc

SEQ ID NO: 4985760 - DNA, 25 bp, Homo sapien
cagaggtaaaatacaggacgtggga

SEQ ID NO: 4985761 - DNA, 25 bp, Homo sapien
tcctcagaagcctggtgaatttaag

SEQ ID NO: 4985762 - DNA, 25 bp, Homo sapien
tgtaactaaagatccatgactccct

SEQ ID NO: 4985763 - DNA, 25 bp, Homo sapien
tatatcttggtcttaacttagcagg

SEQ ID NO: 4985764 - DNA, 25 bp, Homo sapien
tactcaataatcacagggagcatgt

SEQ ID NO: 4985765 - DNA, 25 bp, Homo sapien
tacctatcagactagatgaaggctg

SEQ ID NO: 4985766 - DNA, 25 bp, Homo sapien
aatatggcagctgaactaaatggct

SEQ ID NO: 4985767 - DNA, 25 bp, Homo sapien
cagagataaagtaggactgtcccaa

SEQ ID NO: 4985768 - DNA, 25 bp, Homo sapien
gaacatagagtcaccctactagagg

SEQ ID NO: 4985769 - DNA, 25 bp, Homo sapien
tacagacaatgactaacagagaaca

SEQ ID NO: 4985770 - DNA, 25 bp, Homo sapien
cagagaacagttagtttccagagct

SEQ ID NO: 4985771 - DNA, 25 bp, Homo sapien
tactgtaggttgaggtaaggactcg

SEQ ID NO: 4985772 - DNA, 25 bp, Homo sapien
caccagcgcttgactttaagtacag

SEQ ID NO: 4985773 - DNA, 25 bp, Homo sapien
tgtctctgtagccttccaaatagta

SEQ ID NO: 4985774 - DNA, 25 bp, Homo sapien
taagaaaagacaatcctggttgaag

SEQ ID NO: 4985775 - DNA, 25 bp, Homo sapien
cagaataaatgcaaggtgctgacaa

SEQ ID NO: 4985776 - DNA, 25 bp, Homo sapien
aatagtaatctccacgatcaatcgc

SEQ ID NO: 4985777 - DNA, 25 bp, Homo sapien
ttcagtacgaatatactgagcttct

SEQ ID NO: 4985778 - DNA, 25 bp, Homo sapien
caatattgcacttgatttccaaaaa

SEQ ID NO: 4985779 - DNA, 25 bp, Homo sapien
tggcttccaatattgcacttgattt

SEQ ID NO: 4985780 - DNA, 25 bp, Homo sapien
gcttccaatattgcacttgatttcc

SEQ ID NO: 4985781 - DNA, 25 bp, Homo sapien
tccaatattgcacttgatttccaaa

SEQ ID NO: 4985782 - DNA, 25 bp, Homo sapien
caaattgctgtaccgtaaatgccac

SEQ ID NO: 4985783 - DNA, 25 bp, Homo sapien
cctttgagtgggctctagggcttaa

SEQ ID NO: 4985784 - DNA, 25 bp, Homo sapien
gaagaatgatctgaccctccttagg

SEQ ID NO: 4985785 - DNA, 25 bp, Homo sapien
tctctgtcagtatccagtgtggcat

SEQ ID NO: 4985786 - DNA, 25 bp, Homo sapien
tatgctcctgaaaaaccaattggtc

SEQ ID NO: 4985787 - DNA, 25 bp, Homo sapien
gcctcaaggtggaattacgccaaac

SEQ ID NO: 4985788 - DNA, 25 bp, Homo sapien
tacaaactccacttacgaggccagt

SEQ ID NO: 4985789 - DNA, 25 bp, Homo sapien
gaaaagctcagcaccagatgcctca

SEQ ID NO: 4985790 - DNA, 25 bp, Homo sapien
caatattatggtgtctcttaggcag

SEQ ID NO: 4985791 - DNA, 25 bp, Homo sapien
catgggattcatggaccaagcctgc

SEQ ID NO: 4985792 - DNA, 25 bp, Homo sapien
tagagggaagcttactcaccagtga

SEQ ID NO: 4985793 - DNA, 25 bp, Homo sapien
caagcctgctttaagtgcagaggca

SEQ ID NO: 4985794 - DNA, 25 bp, Homo sapien
aagttaagaaagactcaggcacacc

SEQ ID NO: 4985795 - DNA, 25 bp, Homo sapien
tccttcaacatggaaccaccaagtt

SEQ ID NO: 4985796 - DNA, 25 bp, Homo sapien
ttaaagaacaccatccaaactgagt

SEQ ID NO: 4985797 - DNA, 25 bp, Homo sapien
tatagcaatgccagacttgaacctt

SEQ ID NO: 4985798 - DNA, 25 bp, Homo sapien
gaaatggaggtaggatgatcccttg

SEQ ID NO: 4985799 - DNA, 25 bp, Homo sapien
gagaaggctattttgtgcagacagg

SEQ ID NO: 4985800 - DNA, 25 bp, Homo sapien
gcaagcaagatcttcatgcctgtaa

SEQ ID NO: 4985801 - DNA, 25 bp, Homo sapien
tacgtgtggcccatgacaatctttt

SEQ ID NO: 4985802 - DNA, 25 bp, Homo sapien
tgtataaactaactgaacaccctga

SEQ ID NO: 4985803 - DNA, 25 bp, Homo sapien
aatatggcagaaaggatcagcagaa

SEQ ID NO: 4985804 - DNA, 25 bp, Homo sapien
tctcttacaggtaaataacgcaagg

SEQ ID NO: 4985805 - DNA, 25 bp, Homo sapien
catttctcatccagcatacaggtga

SEQ ID NO: 4985806 - DNA, 25 bp, Homo sapien
cctttccttagctgttgacatccaa

SEQ ID NO: 4985807 - DNA, 25 bp, Homo sapien
gtaagaccctgtatatgatggtcca

SEQ ID NO: 4985808 - DNA, 25 bp, Homo sapien
tccaacaggatatagtagcagattc

SEQ ID NO: 4985809 - DNA, 25 bp, Homo sapien
gaagttcagttcaatagagtaagac

SEQ ID NO: 4985810 - DNA, 25 bp, Homo sapien
tgtattagttctacagtcttagcaa

SEQ ID NO: 4985811 - DNA, 25 bp, Homo sapien
tagtcatttttatctagcaccgagt

SEQ ID NO: 4985812 - DNA, 25 bp, Homo sapien
tatcccgcataactcaaccatttct

SEQ ID NO: 4985813 - DNA, 25 bp, Homo sapien
cattggccattaacctttctatgac

SEQ ID NO: 4985814 - DNA, 25 bp, Homo sapien
tgtggctcccataaccaacagctaa

SEQ ID NO: 4985815 - DNA, 25 bp, Homo sapien
tttaaaatccgctctagccgccaag

SEQ ID NO: 4985816 - DNA, 25 bp, Homo sapien
cacaatgggatttacaatgcctggt

SEQ ID NO: 4985817 - DNA, 25 bp, Homo sapien
gacagagaagcaccgactgatccat

SEQ ID NO: 4985818 - DNA, 25 bp, Homo sapien
ctctgactcgcaggttcaagcgact

SEQ ID NO: 4985819 - DNA, 25 bp, Homo sapien
gcaacctctgactcgcaggttcaag

SEQ ID NO: 4985820 - DNA, 25 bp, Homo sapien
cctctgactcgcaggttcaagcgac

SEQ ID NO: 4985821 - DNA, 25 bp, Homo sapien
aacctctgactcgcaggttcaagcg

SEQ ID NO: 4985822 - DNA, 25 bp, Homo sapien
tgacaccctattgtctgtcattatg

SEQ ID NO: 4985823 - DNA, 25 bp, Homo sapien
ccctattgtctgtcattatgcattt

SEQ ID NO: 4985824 - DNA, 25 bp, Homo sapien
tattatgacaccctattgtctgtca

SEQ ID NO: 4985825 - DNA, 25 bp, Homo sapien
caccctattgtctgtcattatgcat

SEQ ID NO: 4985826 - DNA, 25 bp, Homo sapien
agtctacgtagactggattctctgc

SEQ ID NO: 4985827 - DNA, 25 bp, Homo sapien
gaacggtagtagacgctcaaaaaca

SEQ ID NO: 4985828 - DNA, 25 bp, Homo sapien
ggtagtagacgctcaaaaacacaaa

SEQ ID NO: 4985829 - DNA, 25 bp, Homo sapien
tgctataacctctcagtcccctccc

SEQ ID NO: 4985830 - DNA, 25 bp, Homo sapien
aggccaggcgctaggactcggcggg

SEQ ID NO: 4985831 - DNA, 25 bp, Homo sapien
atgcgcagagaaccacgggcacagg

SEQ ID NO: 4985832 - DNA, 25 bp, Homo sapien
agacgccgctaccaccacaataaca

SEQ ID NO: 4985833 - DNA, 25 bp, Homo sapien
acacggacgccaccgccgagtggag

SEQ ID NO: 4985834 - DNA, 25 bp, Homo sapien
tctcctaatctgcaatgtgtcctgc

SEQ ID NO: 4985835 - DNA, 25 bp, Homo sapien
cagtgctgtcctttgaccccacctt

SEQ ID NO: 4985836 - DNA, 25 bp, Homo sapien
acagttatgctggaatcttacatgc

SEQ ID NO: 4985837 - DNA, 25 bp, Homo sapien
gattcaagcaactctggtgcatgta

SEQ ID NO: 4985838 - DNA, 25 bp, Homo sapien
ccatttgtctaggtgtgagcccagc

SEQ ID NO: 4985839 - DNA, 25 bp, Homo sapien
atttaattggacaaattgcctgagc

SEQ ID NO: 4985840 - DNA, 25 bp, Homo sapien
caggaattcagtttggcgacttgcc

SEQ ID NO: 4985841 - DNA, 25 bp, Homo sapien
tcctgatggaaaagcttcaatctca

SEQ ID NO: 4985842 - DNA, 25 bp, Homo sapien
tagaaatgtagcgtaaagtgattgc

SEQ ID NO: 4985843 - DNA, 25 bp, Homo sapien
gatgccaatccaaccaaagctcctg

SEQ ID NO: 4985844 - DNA, 25 bp, Homo sapien
tttccctttctataaccctcagaca

SEQ ID NO: 4985845 - DNA, 25 bp, Homo sapien
tttctataaccctcagacaaactcc

SEQ ID NO: 4985846 - DNA, 25 bp, Homo sapien
tataaccctcagacaaactccaaca

SEQ ID NO: 4985847 - DNA, 25 bp, Homo sapien
accctcagacaaactccaacattgt

SEQ ID NO: 4985848 - DNA, 25 bp, Homo sapien
cagggtaggatactcggaggatctc

SEQ ID NO: 4985849 - DNA, 25 bp, Homo sapien
gaagtggtgggttgaagcgttgcag

SEQ ID NO: 4985850 - DNA, 25 bp, Homo sapien
tggtgataagttgacctctaagttc

SEQ ID NO: 4985851 - DNA, 25 bp, Homo sapien
ctctaagttccccaaggcagaggga

SEQ ID NO: 4985852 - DNA, 25 bp, Homo sapien
agtcgctcagatgcgctgtgcatgc

SEQ ID NO: 4985853 - DNA, 25 bp, Homo sapien
cattgctgcgagtcgctcagatgcg

SEQ ID NO: 4985854 - DNA, 25 bp, Homo sapien
ctgagccattgctgcgagtcgctca

SEQ ID NO: 4985855 - DNA, 25 bp, Homo sapien
tgcgagtcgctcagatgcgctgtgc

SEQ ID NO: 4985856 - DNA, 25 bp, Homo sapien
actgctcctgaaattgtattgtccc

SEQ ID NO: 4985857 - DNA, 25 bp, Homo sapien
tttcatggcccctactgctcctgaa

SEQ ID NO: 4985858 - DNA, 25 bp, Homo sapien
tgaaattgtattgtccctggtcccc

SEQ ID NO: 4985859 - DNA, 25 bp, Homo sapien
tccactcactgcgaatctttgaggt

SEQ ID NO: 4985860 - DNA, 25 bp, Homo sapien
tcaaaggagattttggtcaaggctc

SEQ ID NO: 4985861 - DNA, 25 bp, Homo sapien
tctaacttggagagggtgaaggcct

SEQ ID NO: 4985862 - DNA, 25 bp, Homo sapien
caaggctccgctataaacaaaaatc

SEQ ID NO: 4985863 - DNA, 25 bp, Homo sapien
tcaggatctagagtggtgcatgcaa

SEQ ID NO: 4985864 - DNA, 25 bp, Homo sapien
ttcccagctctaaactcccatggtg

SEQ ID NO: 4985865 - DNA, 25 bp, Homo sapien
gacgctgatctctgaaggctgcaac

SEQ ID NO: 4985866 - DNA, 25 bp, Homo sapien
tgctgcctgagtaatcttgctccag

SEQ ID NO: 4985867 - DNA, 25 bp, Homo sapien
tccaggcttgcagaggacgctgatc

SEQ ID NO: 4985868 - DNA, 25 bp, Homo sapien
gaatttagcgccatagaaaacgctg

SEQ ID NO: 4985869 - DNA, 25 bp, Homo sapien
tgataagcaggaccctctagactag

SEQ ID NO: 4985870 - DNA, 25 bp, Homo sapien
cctgataagcaggaccctctagact

SEQ ID NO: 4985871 - DNA, 25 bp, Homo sapien
tgaacctgataagcaggaccctcta

SEQ ID NO: 4985872 - DNA, 25 bp, Homo sapien
taagcaggaccctctagactagagt

SEQ ID NO: 4985873 - DNA, 25 bp, Homo sapien
tgccagtgagtgtggcttgggtctg

SEQ ID NO: 4985874 - DNA, 25 bp, Homo sapien
tggttcctcccctggtgtgcccagg

SEQ ID NO: 4985875 - DNA, 25 bp, Homo sapien
caggcctgagggtaggtggttcctc

SEQ ID NO: 4985876 - DNA, 25 bp, Homo sapien
gtggcttgggtctggttccttccta

SEQ ID NO: 4985877 - DNA, 25 bp, Homo sapien
gcctctgcaccttgcagacccctca

SEQ ID NO: 4985878 - DNA, 25 bp, Homo sapien
cctctgcaccttgcagacccctcac

SEQ ID NO: 4985879 - DNA, 25 bp, Homo sapien
ctgcctctgcaccttgcagacccct

SEQ ID NO: 4985880 - DNA, 25 bp, Homo sapien
tgcctctgcaccttgcagacccctc

SEQ ID NO: 4985881 - DNA, 25 bp, Homo sapien
ttcccatgacaccatcctagtacct

SEQ ID NO: 4985882 - DNA, 25 bp, Homo sapien
tcccatgacaccatcctagtacctc

SEQ ID NO: 4985883 - DNA, 25 bp, Homo sapien
tttattgtagcttagatgacaggac

SEQ ID NO: 4985884 - DNA, 25 bp, Homo sapien
ttgtagcttagatgacaggactcca

SEQ ID NO: 4985885 - DNA, 25 bp, Homo sapien
tattgtagcttagatgacaggactc

SEQ ID NO: 4985886 - DNA, 25 bp, Homo sapien
tgtagcttagatgacaggactccaa

SEQ ID NO: 4985887 - DNA, 25 bp, Homo sapien
aattgtgagtccctcgtagctggag

SEQ ID NO: 4985888 - DNA, 25 bp, Homo sapien
ctttccaaatagtgagggagtccag

SEQ ID NO: 4985889 - DNA, 25 bp, Homo sapien
tcctcggactaaggatacaaatggg

SEQ ID NO: 4985890 - DNA, 25 bp, Homo sapien
tgtgactctcaaaagctaccgctgg

SEQ ID NO: 4985891 - DNA, 25 bp, Homo sapien
gttcactatatattgagctttgccc

SEQ ID NO: 4985892 - DNA, 25 bp, Homo sapien
tactgccagctgtaatgaggagtac

SEQ ID NO: 4985893 - DNA, 25 bp, Homo sapien
tccttctgagcaatgtgtactgcca

SEQ ID NO: 4985894 - DNA, 25 bp, Homo sapien
gcatttatctttgtgcctggatctc

SEQ ID NO: 4985895 - DNA, 25 bp, Homo sapien
cacttcctgctatctgtgttgactt

SEQ ID NO: 4985896 - DNA, 25 bp, Homo sapien
gaggggtctggacacgactgggctc

SEQ ID NO: 4985897 - DNA, 25 bp, Homo sapien
ggtctggacacgactgggctctgca

SEQ ID NO: 4985898 - DNA, 25 bp, Homo sapien
ctatctgtgttgacttgacctccca

SEQ ID NO: 4985899 - DNA, 25 bp, Homo sapien
tcctgagcttcgtcagtgctgcagt

SEQ ID NO: 4985900 - DNA, 25 bp, Homo sapien
aggacagggctctgattaatgccac

SEQ ID NO: 4985901 - DNA, 25 bp, Homo sapien
ggctctgattaatgccacagctcct

SEQ ID NO: 4985902 - DNA, 25 bp, Homo sapien
ctctggctgttgagtcgcagggact

SEQ ID NO: 4985903 - DNA, 25 bp, Homo sapien
cacaactgatgctgtggaagccaga

SEQ ID NO: 4985904 - DNA, 25 bp, Homo sapien
acaactgatgctgtggaagccagag

SEQ ID NO: 4985905 - DNA, 25 bp, Homo sapien
gaaacacaactgatgctgtggaagc

SEQ ID NO: 4985906 - DNA, 25 bp, Homo sapien
aacacaactgatgctgtggaagcca

SEQ ID NO: 4985907 - DNA, 25 bp, Homo sapien
caggcagctccagtagctctgtggt

SEQ ID NO: 4985908 - DNA, 25 bp, Homo sapien
gctctgtggttcctcgcctgcttgg

SEQ ID NO: 4985909 - DNA, 25 bp, Homo sapien
ccaggcagctccagtagctctgtgg

SEQ ID NO: 4985910 - DNA, 25 bp, Homo sapien
gtagctctgtggttcctcgcctgct

SEQ ID NO: 4985911 - DNA, 25 bp, Homo sapien
gatgccagagccaccagaaatgcag

SEQ ID NO: 4985912 - DNA, 25 bp, Homo sapien
cgtaatatttctcctcctgtcggca

SEQ ID NO: 4985913 - DNA, 25 bp, Homo sapien
tgtcggcatcactggacctatttgc

SEQ ID NO: 4985914 - DNA, 25 bp, Homo sapien
cctggagagggaagtacagacagcc

SEQ ID NO: 4985915 - DNA, 25 bp, Homo sapien
ctggtgcagggaaggtaaacagcac

SEQ ID NO: 4985916 - DNA, 25 bp, Homo sapien
tgagtttcagacctgcacaccagcg

SEQ ID NO: 4985917 - DNA, 25 bp, Homo sapien
aacagcacacgctgactgactgctt

SEQ ID NO: 4985918 - DNA, 25 bp, Homo sapien
gaaggtaaacagcacacgctgactg

SEQ ID NO: 4985919 - DNA, 25 bp, Homo sapien
aaatcagattggcatgtataatcaa

SEQ ID NO: 4985920 - DNA, 25 bp, Homo sapien
tcagattggcatgtataatcaaaac

SEQ ID NO: 4985921 - DNA, 25 bp, Homo sapien
acctcgtcattgcactctgataaat

SEQ ID NO: 4985922 - DNA, 25 bp, Homo sapien
ttgcactctgataaatcagattggc

SEQ ID NO: 4985923 - DNA, 25 bp, Homo sapien
caagagacgtattgcagtgccagct

SEQ ID NO: 4985924 - DNA, 25 bp, Homo sapien
tagttcttcaccaagcatgcgctcc

SEQ ID NO: 4985925 - DNA, 25 bp, Homo sapien
cacagcattaagatcaagagacgta

SEQ ID NO: 4985926 - DNA, 25 bp, Homo sapien
tttcagtgtcccctatttcctccaa

SEQ ID NO: 4985927 - DNA, 25 bp, Homo sapien
tgtactgacatttgacttactttta

SEQ ID NO: 4985928 - DNA, 25 bp, Homo sapien
ttgtactgacatttgacttactttt

SEQ ID NO: 4985929 - DNA, 25 bp, Homo sapien
ccttgaggaatttgtactgacattt

SEQ ID NO: 4985930 - DNA, 25 bp, Homo sapien
gaaaaccgtccagccaagtcgaata

SEQ ID NO: 4985931 - DNA, 25 bp, Homo sapien
tgtaccaacatatggcaggaaagcc

SEQ ID NO: 4985932 - DNA, 25 bp, Homo sapien
tgtaaatgcagtacggcaacctcca

SEQ ID NO: 4985933 - DNA, 25 bp, Homo sapien
gagacccaaggtgccagtgtttgaa

SEQ ID NO: 4985934 - DNA, 25 bp, Homo sapien
caaaattctgctcactgataggtcc

SEQ ID NO: 4985935 - DNA, 25 bp, Homo sapien
ttcactgcctgtttgatactttcca

SEQ ID NO: 4985936 - DNA, 25 bp, Homo sapien
tacacatggatacccttcactgcct

SEQ ID NO: 4985937 - DNA, 25 bp, Homo sapien
tttccagtagagctttgcattccgg

SEQ ID NO: 4985938 - DNA, 25 bp, Homo sapien
gcttggcctccctgttctttttgta

SEQ ID NO: 4985939 - DNA, 25 bp, Homo sapien
tggcctccctgttctttttgtatgt

SEQ ID NO: 4985940 - DNA, 25 bp, Homo sapien
accatgcttggcctccctgttcttt

SEQ ID NO: 4985941 - DNA, 25 bp, Homo sapien
catgcttggcctccctgttcttttt

SEQ ID NO: 4985942 - DNA, 25 bp, Homo sapien
tcatctgggtttgcgaaagttcact

SEQ ID NO: 4985943 - DNA, 25 bp, Homo sapien
gggtaacctcagagcagtaggctgt

SEQ ID NO: 4985944 - DNA, 25 bp, Homo sapien
catatagcctgggtgcaaagtaagt

SEQ ID NO: 4985945 - DNA, 25 bp, Homo sapien
gaacgtgtgcccattactaggtgat

SEQ ID NO: 4985946 - DNA, 25 bp, Homo sapien
aaatgagagcttggcttagacctgc

SEQ ID NO: 4985947 - DNA, 25 bp, Homo sapien
tctatcgtctttaagttgctctcca

SEQ ID NO: 4985948 - DNA, 25 bp, Homo sapien
gatgtcagcaaggcttgaaatgaga

SEQ ID NO: 4985949 - DNA, 25 bp, Homo sapien
gctctttcagcagactttcattgtt

SEQ ID NO: 4985950 - DNA, 25 bp, Homo sapien
tttaaggttggattcattcagttcc

SEQ ID NO: 4985951 - DNA, 25 bp, Homo sapien
ttttaaggttggattcattcagttc

SEQ ID NO: 4985952 - DNA, 25 bp, Homo sapien
gaaggagctcctaaatgcaagacca

SEQ ID NO: 4985953 - DNA, 25 bp, Homo sapien
tatagaccttccatgtttgaaatgg

SEQ ID NO: 4985954 - DNA, 25 bp, Homo sapien
aagcacagaaggactggcattcttt

SEQ ID NO: 4985955 - DNA, 25 bp, Homo sapien
tatggcaaggatggagaactaaaga

SEQ ID NO: 4985956 - DNA, 25 bp, Homo sapien
gaaatgactcttcgcacacgtctta

SEQ ID NO: 4985957 - DNA, 25 bp, Homo sapien
gaagatgctagacatatagggaccc

SEQ ID NO: 4985958 - DNA, 25 bp, Homo sapien
gtctattgtgggttcagacagacca

SEQ ID NO: 4985959 - DNA, 25 bp, Homo sapien
tagaatgactgcaccctgacacttg

SEQ ID NO: 4985960 - DNA, 25 bp, Homo sapien
gcttcccacctagagaatactttga

SEQ ID NO: 4985961 - DNA, 25 bp, Homo sapien
ttaaaattatgcttcccacctagag

SEQ ID NO: 4985962 - DNA, 25 bp, Homo sapien
agaatactttgacacacggaacgct

SEQ ID NO: 4985963 - DNA, 25 bp, Homo sapien
tactttgacacacggaacgctttgg

SEQ ID NO: 4985964 - DNA, 25 bp, Homo sapien
gatggtcatgagttcttcagaaacc

SEQ ID NO: 4985965 - DNA, 25 bp, Homo sapien
tgcattgagaggacatccagataag

SEQ ID NO: 4985966 - DNA, 25 bp, Homo sapien
gccctttttgataacttgtgcattg

SEQ ID NO: 4985967 - DNA, 25 bp, Homo sapien
ccccagttgctttgagcttgatggt

SEQ ID NO: 4985968 - DNA, 25 bp, Homo sapien
ggctccattgagaggattctccttc

SEQ ID NO: 4985969 - DNA, 25 bp, Homo sapien
gatatgtgaccttggccatcacacc

SEQ ID NO: 4985970 - DNA, 25 bp, Homo sapien
agccagaagctgtgcggtgtgatgt

SEQ ID NO: 4985971 - DNA, 25 bp, Homo sapien
ggtagctcttgtttgttcagtttcc

SEQ ID NO: 4985972 - DNA, 25 bp, Homo sapien
accacctttccttgcacgagggcat

SEQ ID NO: 4985973 - DNA, 25 bp, Homo sapien
acctttccttgcacgagggcatccg

SEQ ID NO: 4985974 - DNA, 25 bp, Homo sapien
caccacctttccttgcacgagggca

SEQ ID NO: 4985975 - DNA, 25 bp, Homo sapien
ctttccttgcacgagggcatccgga

SEQ ID NO: 4985976 - DNA, 25 bp, Homo sapien
tagggacccgacaaagaacaaagca

SEQ ID NO: 4985977 - DNA, 25 bp, Homo sapien
aattatgtgatctctctgactgctg

SEQ ID NO: 4985978 - DNA, 25 bp, Homo sapien
gcaaaattatgtgatctctctgact

SEQ ID NO: 4985979 - DNA, 25 bp, Homo sapien
tgaaatagggacccgacaaagaaca

SEQ ID NO: 4985980 - DNA, 25 bp, Homo sapien
gaagcatagtttccagtcacgtgcc

SEQ ID NO: 4985981 - DNA, 25 bp, Homo sapien
cccgagccatcgcagcctggggttg

SEQ ID NO: 4985982 - DNA, 25 bp, Homo sapien
atagtttccagtcacgtgccccgag

SEQ ID NO: 4985983 - DNA, 25 bp, Homo sapien
cttctgtgggaagcatagtttccag

SEQ ID NO: 4985984 - DNA, 25 bp, Homo sapien
tgtcctgcttcatggcccaagtcaa

SEQ ID NO: 4985985 - DNA, 25 bp, Homo sapien
tatgctgtgcgactatgataatcca

SEQ ID NO: 4985986 - DNA, 25 bp, Homo sapien
cacgtgaactgcagagacttggaac

SEQ ID NO: 4985987 - DNA, 25 bp, Homo sapien
gtgccccgcctccaaatgattttta

SEQ ID NO: 4985988 - DNA, 25 bp, Homo sapien
taaattgcaccttacactgaaaatg

SEQ ID NO: 4985989 - DNA, 25 bp, Homo sapien
tgacttctaaaatccacactgacaa

SEQ ID NO: 4985990 - DNA, 25 bp, Homo sapien
ccatgaatatctaaacaagaggtca

SEQ ID NO: 4985991 - DNA, 25 bp, Homo sapien
tgtggcaatgtagaagtttagagca

SEQ ID NO: 4985992 - DNA, 25 bp, Homo sapien
gctcctgagagttggcagccatgag

SEQ ID NO: 4985993 - DNA, 25 bp, Homo sapien
ttatctgctaaaggacatccagaaa

SEQ ID NO: 4985994 - DNA, 25 bp, Homo sapien
ggattttagagtcttatctgctaaa

SEQ ID NO: 4985995 - DNA, 25 bp, Homo sapien
aagctcctgagagttggcagccatg

SEQ ID NO: 4985996 - DNA, 25 bp, Homo sapien
ctgcgatgagatgcatagtttcctg

SEQ ID NO: 4985997 - DNA, 25 bp, Homo sapien
gcgatgagatgcatagtttcctgtc

SEQ ID NO: 4985998 - DNA, 25 bp, Homo sapien
cgatgagatgcatagtttcctgtca

SEQ ID NO: 4985999 - DNA, 25 bp, Homo sapien
tgcgatgagatgcatagtttcctgt

SEQ ID NO: 4986000 - DNA, 25 bp, Homo sapien
gatacagaagagagggtacagtcct

SEQ ID NO: 4986001 - DNA, 25 bp, Homo sapien
taacgtttaactgctgactggtaga

SEQ ID NO: 4986002 - DNA, 25 bp, Homo sapien
ataactcgtacttactgccttcggg

SEQ ID NO: 4986003 - DNA, 25 bp, Homo sapien
taagtggacgcgttactccttgctg

SEQ ID NO: 4986004 - DNA, 25 bp, Homo sapien
tctaaattttctagagagctcactg

SEQ ID NO: 4986005 - DNA, 25 bp, Homo sapien
agcttgggtttagggcttggtatag

SEQ ID NO: 4986006 - DNA, 25 bp, Homo sapien
aattttctagagagctcactgggtc

SEQ ID NO: 4986007 - DNA, 25 bp, Homo sapien
tagggcttggtatagaggcctctcc

SEQ ID NO: 4986008 - DNA, 25 bp, Homo sapien
cacaaagagcctgatagaatgctgc

SEQ ID NO: 4986009 - DNA, 25 bp, Homo sapien
tgctatagttgataggagtgtccca

SEQ ID NO: 4986010 - DNA, 25 bp, Homo sapien
gaatgctgcattgaccagaatgctg

SEQ ID NO: 4986011 - DNA, 25 bp, Homo sapien
ggtgcagacttgtccaggattcgat

SEQ ID NO: 4986012 - DNA, 25 bp, Homo sapien
tacaagattcgcacactgggatggc

SEQ ID NO: 4986013 - DNA, 25 bp, Homo sapien
cacgtgcctcgtatgttctacaaga

SEQ ID NO: 4986014 - DNA, 25 bp, Homo sapien
gcttgctgcttgtgcccgacttaga

SEQ ID NO: 4986015 - DNA, 25 bp, Homo sapien
ggttcaagctccagcaaactgctca

SEQ ID NO: 4986016 - DNA, 25 bp, Homo sapien
cagaaaaggcggcatcagggttctc

SEQ ID NO: 4986017 - DNA, 25 bp, Homo sapien
cgcccagagggccgccagacttcct

SEQ ID NO: 4986018 - DNA, 25 bp, Homo sapien
gataccaggcggcaagaatggcggt

SEQ ID NO: 4986019 - DNA, 25 bp, Homo sapien
ttcctgataccaggcggcaagaatg

SEQ ID NO: 4986020 - DNA, 25 bp, Homo sapien
ggcggcaagaatggcggtgccacat

SEQ ID NO: 4986021 - DNA, 25 bp, Homo sapien
tcatagaagatggagaatctgaagg

SEQ ID NO: 4986022 - DNA, 25 bp, Homo sapien
cttggtgtcattgtcatagaagatg

SEQ ID NO: 4986023 - DNA, 25 bp, Homo sapien
tgtttgatatgttgcttggtgtcat

SEQ ID NO: 4986024 - DNA, 25 bp, Homo sapien
tagtcatctttgtttgatatgttgc

SEQ ID NO: 4986025 - DNA, 25 bp, Homo sapien
cagcagctgaccatgccggggaccg

SEQ ID NO: 4986026 - DNA, 25 bp, Homo sapien
aaggcctggcacagcacaggcagca

SEQ ID NO: 4986027 - DNA, 25 bp, Homo sapien
acaggcagcagctgaccatgccggg

SEQ ID NO: 4986028 - DNA, 25 bp, Homo sapien
ctgctctcctgaaggcctggcacag

SEQ ID NO: 4986029 - DNA, 25 bp, Homo sapien
ccaccaagctcatccctgcctgcgt

SEQ ID NO: 4986030 - DNA, 25 bp, Homo sapien
tcatccttctttgaccccaccaagc

SEQ ID NO: 4986031 - DNA, 25 bp, Homo sapien
tttgaccccaccaagctcatccctg

SEQ ID NO: 4986032 - DNA, 25 bp, Homo sapien
cctgcctgcgttcctctgagcctct

SEQ ID NO: 4986033 - DNA, 25 bp, Homo sapien
agtcgctggcccaccctccgggctc

SEQ ID NO: 4986034 - DNA, 25 bp, Homo sapien
ctggcccaccctccgggctcttgga

SEQ ID NO: 4986035 - DNA, 25 bp, Homo sapien
ccaccctccgggctcttggactggc

SEQ ID NO: 4986036 - DNA, 25 bp, Homo sapien
cctccgggctcttggactggcctac

SEQ ID NO: 4986037 - DNA, 25 bp, Homo sapien
tgcagactctgtggcttgttggaga

SEQ ID NO: 4986038 - DNA, 25 bp, Homo sapien
tagctataagagctggcacggccag

SEQ ID NO: 4986039 - DNA, 25 bp, Homo sapien
tgtgggtgtcttcactacattgacc

SEQ ID NO: 4986040 - DNA, 25 bp, Homo sapien
tggcttccctgcagcgggtggaaag

SEQ ID NO: 4986041 - DNA, 25 bp, Homo sapien
gcagtcgattaggaaatttcactgg

SEQ ID NO: 4986042 - DNA, 25 bp, Homo sapien
ctaggcagtcgattaggaaatttca

SEQ ID NO: 4986043 - DNA, 25 bp, Homo sapien
cagtcgattaggaaatttcactgga

SEQ ID NO: 4986044 - DNA, 25 bp, Homo sapien
aggcagtcgattaggaaatttcact

SEQ ID NO: 4986045 - DNA, 25 bp, Homo sapien
gcgtttaccgaaaacttgggcatca

SEQ ID NO: 4986046 - DNA, 25 bp, Homo sapien
gcttgtgacgggaaattgaattcaa

SEQ ID NO: 4986047 - DNA, 25 bp, Homo sapien
ctctgggagaggtgatggcttgtga

SEQ ID NO: 4986048 - DNA, 25 bp, Homo sapien
cactgtttgtatgagagggcgttta

SEQ ID NO: 4986049 - DNA, 25 bp, Homo sapien
tcagctgcagcaattggacaaccag

SEQ ID NO: 4986050 - DNA, 25 bp, Homo sapien
ttcagctgcagcaattggacaacca

SEQ ID NO: 4986051 - DNA, 25 bp, Homo sapien
tttcagctgcagcaattggacaacc

SEQ ID NO: 4986052 - DNA, 25 bp, Homo sapien
gcttataagtcaaatagtacctcat

SEQ ID NO: 4986053 - DNA, 25 bp, Homo sapien
agtttgctggcatagtgcttataag

SEQ ID NO: 4986054 - DNA, 25 bp, Homo sapien
ttcaaagtgcagaatgtgaagtttg

SEQ ID NO: 4986055 - DNA, 25 bp, Homo sapien
gctggcatagtgcttataagtcaaa

SEQ ID NO: 4986056 - DNA, 25 bp, Homo sapien
ccttcctgtgcatcccggcgtggga

SEQ ID NO: 4986057 - DNA, 25 bp, Homo sapien
tgcatcccggcgtgggacacttgag

SEQ ID NO: 4986058 - DNA, 25 bp, Homo sapien
ggcgtgggacacttgagcacatttt

SEQ ID NO: 4986059 - DNA, 25 bp, Homo sapien
atcccggcgtgggacacttgagcac

SEQ ID NO: 4986060 - DNA, 25 bp, Homo sapien
gcggtggtgcgggtagagccctgtc

SEQ ID NO: 4986061 - DNA, 25 bp, Homo sapien
tgccatcacatccagggatcgggca

SEQ ID NO: 4986062 - DNA, 25 bp, Homo sapien
tgtcacgtgtcccgtgccatcacat

SEQ ID NO: 4986063 - DNA, 25 bp, Homo sapien
acatccagggatcgggcacttggtc

SEQ ID NO: 4986064 - DNA, 25 bp, Homo sapien
gattcacggtctcgagattccaaca

SEQ ID NO: 4986065 - DNA, 25 bp, Homo sapien
gacttggaagggaaatgttcttgca

SEQ ID NO: 4986066 - DNA, 25 bp, Homo sapien
aagctgctgatctcactctaaatgc

SEQ ID NO: 4986067 - DNA, 25 bp, Homo sapien
acttgggttcagcatgcagtgagca

SEQ ID NO: 4986068 - DNA, 25 bp, Homo sapien
ggctcatctggtgcaagactccggg

SEQ ID NO: 4986069 - DNA, 25 bp, Homo sapien
tgctagaaatagcatgaggctcatc

SEQ ID NO: 4986070 - DNA, 25 bp, Homo sapien
gctccataaaactgctagaaatagc

SEQ ID NO: 4986071 - DNA, 25 bp, Homo sapien
tgctcttgggaagctccataaaact

SEQ ID NO: 4986072 - DNA, 25 bp, Homo sapien
tgtcccagagatgtatgagccccga

SEQ ID NO: 4986073 - DNA, 25 bp, Homo sapien
ggctcataaacgcattaacatctag

SEQ ID NO: 4986074 - DNA, 25 bp, Homo sapien
tatgagccccgagttagaaagccag

SEQ ID NO: 4986075 - DNA, 25 bp, Homo sapien
aaagccagtgaaagcgtaggctcat

SEQ ID NO: 4986076 - DNA, 25 bp, Homo sapien
ttctgcgagagcattctgcgggtct

SEQ ID NO: 4986077 - DNA, 25 bp, Homo sapien
gctatcttcctcctcaacgtcaggg

SEQ ID NO: 4986078 - DNA, 25 bp, Homo sapien
gcaggaacctatccagctctttgta

SEQ ID NO: 4986079 - DNA, 25 bp, Homo sapien
tggaaaacacaacctcgctcagcct

SEQ ID NO: 4986080 - DNA, 25 bp, Homo sapien
ttcctactggagttttcttgtgcag

SEQ ID NO: 4986081 - DNA, 25 bp, Homo sapien
tgataacaagagtatctgtcttcct

SEQ ID NO: 4986082 - DNA, 25 bp, Homo sapien
ttcacatacataggtacatacacat

SEQ ID NO: 4986083 - DNA, 25 bp, Homo sapien
tatttgaagagcaagaacaaaaaat

SEQ ID NO: 4986084 - DNA, 25 bp, Homo sapien
aaccaatatttgaagagcaagaaca

SEQ ID NO: 4986085 - DNA, 25 bp, Homo sapien
gaaaattgcaacaagttatatgtat

SEQ ID NO: 4986086 - DNA, 25 bp, Homo sapien
ctgcggtagagtgaccatgtgtttc

SEQ ID NO: 4986087 - DNA, 25 bp, Homo sapien
ggcttcattagcagggatttccttt

SEQ ID NO: 4986088 - DNA, 25 bp, Homo sapien
tcactgcggtcttcttggcagtctg

SEQ ID NO: 4986089 - DNA, 25 bp, Homo sapien
tgccatggagcaatcataggcaaca

SEQ ID NO: 4986090 - DNA, 25 bp, Homo sapien
acttcactgtgacactgcaatgagg

SEQ ID NO: 4986091 - DNA, 25 bp, Homo sapien
cttcactgtgacactgcaatgaggg

SEQ ID NO: 4986092 - DNA, 25 bp, Homo sapien
ttcactgtgacactgcaatgaggga

SEQ ID NO: 4986093 - DNA, 25 bp, Homo sapien
tcttccaggacagactgtaggctct

SEQ ID NO: 4986094 - DNA, 25 bp, Homo sapien
ttccttcaagaacgcagagcttgct

SEQ ID NO: 4986095 - DNA, 25 bp, Homo sapien
ccaagtttctttgacaatggccagg

SEQ ID NO: 4986096 - DNA, 25 bp, Homo sapien
caaggagacctgagaagatgcagtc

SEQ ID NO: 4986097 - DNA, 25 bp, Homo sapien
ggtggctgaaccctacagatgcctc

SEQ ID NO: 4986098 - DNA, 25 bp, Homo sapien
taagacacttttctgccctagtaag

SEQ ID NO: 4986099 - DNA, 25 bp, Homo sapien
ttggattctaatgttcaggtctggc

SEQ ID NO: 4986100 - DNA, 25 bp, Homo sapien
gagtccctctcaaagtggcttatag

SEQ ID NO: 4986101 - DNA, 25 bp, Homo sapien
tttttctctgaatgacttggttcct

SEQ ID NO: 4986102 - DNA, 25 bp, Homo sapien
tctctgaatgacttggttcctttaa

SEQ ID NO: 4986103 - DNA, 25 bp, Homo sapien
tttaaaggactctggtgtccctcac

SEQ ID NO: 4986104 - DNA, 25 bp, Homo sapien
tgaatgacttggttcctttaaagga

SEQ ID NO: 4986105 - DNA, 25 bp, Homo sapien
gcctcatgtccacgggcacactgat

SEQ ID NO: 4986106 - DNA, 25 bp, Homo sapien
tggcctcatgtccacgggcacactg

SEQ ID NO: 4986107 - DNA, 25 bp, Homo sapien
gtggcctcatgtccacgggcacact

SEQ ID NO: 4986108 - DNA, 25 bp, Homo sapien
cctcatgtccacgggcacactgatt

SEQ ID NO: 4986109 - DNA, 25 bp, Homo sapien
ctcctggattagtgaatccattggc

SEQ ID NO: 4986110 - DNA, 25 bp, Homo sapien
tcctggattagtgaatccattggca

SEQ ID NO: 4986111 - DNA, 25 bp, Homo sapien
tattattgccagtcaatcctgtttt

SEQ ID NO: 4986112 - DNA, 25 bp, Homo sapien
gggtattattgccagtcaatcctgt

SEQ ID NO: 4986113 - DNA, 25 bp, Homo sapien
gtttagatcatcaagggcctgttta

SEQ ID NO: 4986114 - DNA, 25 bp, Homo sapien
tattgccagtcaatcctgttttcca

SEQ ID NO: 4986115 - DNA, 25 bp, Homo sapien
cctcggttcctttagagcgagtacg

SEQ ID NO: 4986116 - DNA, 25 bp, Homo sapien
tttagagcgagtacgcagcgtttta

SEQ ID NO: 4986117 - DNA, 25 bp, Homo sapien
tacgcagcgttttatcttcagcctc

SEQ ID NO: 4986118 - DNA, 25 bp, Homo sapien
gagtacgcagcgttttatcttcagc

SEQ ID NO: 4986119 - DNA, 25 bp, Homo sapien
tgaacacaaagtcctgaggtcattc

SEQ ID NO: 4986120 - DNA, 25 bp, Homo sapien
ctataacatgaacacaaagtcctga

SEQ ID NO: 4986121 - DNA, 25 bp, Homo sapien
taacatgaacacaaagtcctgaggt

SEQ ID NO: 4986122 - DNA, 25 bp, Homo sapien
acatgaacacaaagtcctgaggtca

SEQ ID NO: 4986123 - DNA, 25 bp, Homo sapien
tttatgtgccacacttttactgcca

SEQ ID NO: 4986124 - DNA, 25 bp, Homo sapien
gtggcaatgatggactttaatttcc

SEQ ID NO: 4986125 - DNA, 25 bp, Homo sapien
gccatagacttataataggggagca

SEQ ID NO: 4986126 - DNA, 25 bp, Homo sapien
ataaaccttttatgtgccacacttt

SEQ ID NO: 4986127 - DNA, 25 bp, Homo sapien
tcctagtacttgtacttgacgtctt

SEQ ID NO: 4986128 - DNA, 25 bp, Homo sapien
tgtacttgacgtcttttcttactgg

SEQ ID NO: 4986129 - DNA, 25 bp, Homo sapien
taaagtgatttcctagtacttgtac

SEQ ID NO: 4986130 - DNA, 25 bp, Homo sapien
gatttcctagtacttgtacttgacg

SEQ ID NO: 4986131 - DNA, 25 bp, Homo sapien
tccacatcgccccagtgcacagatc

SEQ ID NO: 4986132 - DNA, 25 bp, Homo sapien
atcaggggcaataagcaggtctctt

SEQ ID NO: 4986133 - DNA, 25 bp, Homo sapien
cacatcgccccagtgcacagatctg

SEQ ID NO: 4986134 - DNA, 25 bp, Homo sapien
ggggcaataagcaggtctcttccac

SEQ ID NO: 4986135 - DNA, 25 bp, Homo sapien
tcctgagggccatgtgtaggcacat

SEQ ID NO: 4986136 - DNA, 25 bp, Homo sapien
tgaggaacgctttatctacagtgga

SEQ ID NO: 4986137 - DNA, 25 bp, Homo sapien
ggcccagaccaccaaacaactagat

SEQ ID NO: 4986138 - DNA, 25 bp, Homo sapien
tcaagaagttggaaatggctaggcc

SEQ ID NO: 4986139 - DNA, 25 bp, Homo sapien
acggcctcagagtcacagctttgtg

SEQ ID NO: 4986140 - DNA, 25 bp, Homo sapien
tctattagtcactgtaccacggcct

SEQ ID NO: 4986141 - DNA, 25 bp, Homo sapien
tccttaaaggcaaacgtgtgaacaa

SEQ ID NO: 4986142 - DNA, 25 bp, Homo sapien
gaaatcaagctccttcatataggga

SEQ ID NO: 4986143 - DNA, 25 bp, Homo sapien
tgtcagggggactaaataaatgact

SEQ ID NO: 4986144 - DNA, 25 bp, Homo sapien
ctgtgtcagggggactaaataaatg

SEQ ID NO: 4986145 - DNA, 25 bp, Homo sapien
tccaggtaacttgtatgtcaactca

SEQ ID NO: 4986146 - DNA, 25 bp, Homo sapien
ggtaacttgtatgtcaactcagttt

SEQ ID NO: 4986147 - DNA, 25 bp, Homo sapien
gtttcttgtaggatttgaccagaca

SEQ ID NO: 4986148 - DNA, 25 bp, Homo sapien
ttcttcaacttaagtcagcaactgt

SEQ ID NO: 4986149 - DNA, 25 bp, Homo sapien
cagaaaatttctaccgtcctgcctt

SEQ ID NO: 4986150 - DNA, 25 bp, Homo sapien
tgcagtatatcaaagtgctcagctt

SEQ ID NO: 4986151 - DNA, 25 bp, Homo sapien
actgaatcacataagggagtagctg

SEQ ID NO: 4986152 - DNA, 25 bp, Homo sapien
catcatctgcacaattgcaattttt

SEQ ID NO: 4986153 - DNA, 25 bp, Homo sapien
gcattcgaataagcacacagcagca

SEQ ID NO: 4986154 - DNA, 25 bp, Homo sapien
gagtagctgtaaagcctctgagttc

SEQ ID NO: 4986155 - DNA, 25 bp, Homo sapien
caatgcttaggtaaacatggactca

SEQ ID NO: 4986156 - DNA, 25 bp, Homo sapien
gatgttccattccactcagcaatgc

SEQ ID NO: 4986157 - DNA, 25 bp, Homo sapien
gtgaggcggcacagtagtttctaaa

SEQ ID NO: 4986158 - DNA, 25 bp, Homo sapien
caaactcacagagtggcaggcactc

SEQ ID NO: 4986159 - DNA, 25 bp, Homo sapien
ccctaaaagctactggatctgaact

SEQ ID NO: 4986160 - DNA, 25 bp, Homo sapien
ttccctaaaagctactggatctgaa

SEQ ID NO: 4986161 - DNA, 25 bp, Homo sapien
cttccctaaaagctactggatctga

SEQ ID NO: 4986162 - DNA, 25 bp, Homo sapien
tccctaaaagctactggatctgaac

SEQ ID NO: 4986163 - DNA, 25 bp, Homo sapien
agagtgaaagtgaattatcaatgac

SEQ ID NO: 4986164 - DNA, 25 bp, Homo sapien
tgagagtgaaagtgaattatcaatg

SEQ ID NO: 4986165 - DNA, 25 bp, Homo sapien
agtgaaagtgaattatcaatgacag

SEQ ID NO: 4986166 - DNA, 25 bp, Homo sapien
ctgagagtgaaagtgaattatcaat

SEQ ID NO: 4986167 - DNA, 25 bp, Homo sapien
ctctactaatgagtcagctgttcct

SEQ ID NO: 4986168 - DNA, 25 bp, Homo sapien
ttgcacactacactggttcatctgg

SEQ ID NO: 4986169 - DNA, 25 bp, Homo sapien
gttcctgtcattgcacactacactg

SEQ ID NO: 4986170 - DNA, 25 bp, Homo sapien
tgctctctactaatgagtcagctgt

SEQ ID NO: 4986171 - DNA, 25 bp, Homo sapien
gaaatagagtcccaagggcactgta

SEQ ID NO: 4986172 - DNA, 25 bp, Homo sapien
cagatgaccgcccttatttgtccct

SEQ ID NO: 4986173 - DNA, 25 bp, Homo sapien
tatttgtccctacatgttttccaaa

SEQ ID NO: 4986174 - DNA, 25 bp, Homo sapien
ataaaagtgaaatagagtcccaagg

SEQ ID NO: 4986175 - DNA, 25 bp, Homo sapien
aatattcagcaattaactgggttca

SEQ ID NO: 4986176 - DNA, 25 bp, Homo sapien
taataaaactctgcataataagcca

SEQ ID NO: 4986177 - DNA, 25 bp, Homo sapien
atctcttgagttcactggaatggaa

SEQ ID NO: 4986178 - DNA, 25 bp, Homo sapien
cttaagagttaaagacctatgctgt

SEQ ID NO: 4986179 - DNA, 25 bp, Homo sapien
tggtacaagcgaatgcacaggcggt

SEQ ID NO: 4986180 - DNA, 25 bp, Homo sapien
ccgaggcgcagaaaagttagagaac

SEQ ID NO: 4986181 - DNA, 25 bp, Homo sapien
tagagaacttatccagggcacagac

SEQ ID NO: 4986182 - DNA, 25 bp, Homo sapien
catctaacagaccaggaaaccgagg

SEQ ID NO: 4986183 - DNA, 25 bp, Homo sapien
aataagactttctggcaacttcctg

SEQ ID NO: 4986184 - DNA, 25 bp, Homo sapien
gaatacacaaatctaaggcagacag

SEQ ID NO: 4986185 - DNA, 25 bp, Homo sapien
caaacctgaaccaataacctgaatg

SEQ ID NO: 4986186 - DNA, 25 bp, Homo sapien
gctgctccagtgtcagaagctttga

SEQ ID NO: 4986187 - DNA, 25 bp, Homo sapien
gaacagtatcgtttttataggctac

SEQ ID NO: 4986188 - DNA, 25 bp, Homo sapien
tccacatgtatcaaagtaagcacct

SEQ ID NO: 4986189 - DNA, 25 bp, Homo sapien
ctccccaattctagagagatgtcag

SEQ ID NO: 4986190 - DNA, 25 bp, Homo sapien
tacagtgcatacttcgactgctgac

SEQ ID NO: 4986191 - DNA, 25 bp, Homo sapien
tccctggtgggctgaacggaaacac

SEQ ID NO: 4986192 - DNA, 25 bp, Homo sapien
ttgactgcttagagataagcacctg

SEQ ID NO: 4986193 - DNA, 25 bp, Homo sapien
tatgacatccagtgcctttgactgc

SEQ ID NO: 4986194 - DNA, 25 bp, Homo sapien
taagcacctgcgtttgtgtcccctc

SEQ ID NO: 4986195 - DNA, 25 bp, Homo sapien
ggaggtgaggatgatatgccgtgct

SEQ ID NO: 4986196 - DNA, 25 bp, Homo sapien
ggatgatatgccgtgctgatgctca

SEQ ID NO: 4986197 - DNA, 25 bp, Homo sapien
atgatatgccgtgctgatgctcagc

SEQ ID NO: 4986198 - DNA, 25 bp, Homo sapien
tgaggatgatatgccgtgctgatgc

SEQ ID NO: 4986199 - DNA, 25 bp, Homo sapien
gccgataaaacctgcgagccctgtt

SEQ ID NO: 4986200 - DNA, 25 bp, Homo sapien
gagtaaatctgcagttaccaagatg

SEQ ID NO: 4986201 - DNA, 25 bp, Homo sapien
ttttgtgaagccgataaaacctgcg

SEQ ID NO: 4986202 - DNA, 25 bp, Homo sapien
tgcgagccctgttcatgagtaaatc

SEQ ID NO: 4986203 - DNA, 25 bp, Homo sapien
cattaccaccttgtttgtgctctcc

SEQ ID NO: 4986204 - DNA, 25 bp, Homo sapien
gaacaccgtgttgcagatctcctgg

SEQ ID NO: 4986205 - DNA, 25 bp, Homo sapien
cgccttagggcttcgtaccaatcgt

SEQ ID NO: 4986206 - DNA, 25 bp, Homo sapien
tgtccatcaccagcttaaaaagcat

SEQ ID NO: 4986207 - DNA, 25 bp, Homo sapien
tggttggtgtttgggtcccttctga

SEQ ID NO: 4986208 - DNA, 25 bp, Homo sapien
ggagtctcatttccacaatggtgac

SEQ ID NO: 4986209 - DNA, 25 bp, Homo sapien
ctcatttccacaatggtgacagtgg

SEQ ID NO: 4986210 - DNA, 25 bp, Homo sapien
cacaatggtgacagtgggatttggc

SEQ ID NO: 4986211 - DNA, 25 bp, Homo sapien
ttccacaatggtgacagtgggattt

SEQ ID NO: 4986212 - DNA, 25 bp, Homo sapien
tactcataaggatctccagaacgtt

SEQ ID NO: 4986213 - DNA, 25 bp, Homo sapien
tggtcatgtactcataaggatctcc

SEQ ID NO: 4986214 - DNA, 25 bp, Homo sapien
taaggatctccagaacgttttccag

SEQ ID NO: 4986215 - DNA, 25 bp, Homo sapien
ctactggtcatgtactcataaggat

SEQ ID NO: 4986216 - DNA, 25 bp, Homo sapien
ccacagtctccgatgaatcactaga

SEQ ID NO: 4986217 - DNA, 25 bp, Homo sapien
acagtctccgatgaatcactagagt

SEQ ID NO: 4986218 - DNA, 25 bp, Homo sapien
acaccacagtctccgatgaatcact

SEQ ID NO: 4986219 - DNA, 25 bp, Homo sapien
tcacaccacagtctccgatgaatca

SEQ ID NO: 4986220 - DNA, 25 bp, Homo sapien
ttgagaaaccatcacctaaccatac

SEQ ID NO: 4986221 - DNA, 25 bp, Homo sapien
actgttgagaaaccatcacctaacc

SEQ ID NO: 4986222 - DNA, 25 bp, Homo sapien
tgttgagaaaccatcacctaaccat

SEQ ID NO: 4986223 - DNA, 25 bp, Homo sapien
cactgttgagaaaccatcacctaac

SEQ ID NO: 4986224 - DNA, 25 bp, Homo sapien
ttagtggaaatccatatgagagttt

SEQ ID NO: 4986225 - DNA, 25 bp, Homo sapien
acctcctgtccttagtggaaatcca

SEQ ID NO: 4986226 - DNA, 25 bp, Homo sapien
agctgctccgcttacacctcctgtc

SEQ ID NO: 4986227 - DNA, 25 bp, Homo sapien
tggaaatccatatgagagtttgttt

SEQ ID NO: 4986228 - DNA, 25 bp, Homo sapien
tgtggaactcactgctacctaactt

SEQ ID NO: 4986229 - DNA, 25 bp, Homo sapien
gaggcctggcaattgatcttattcc

SEQ ID NO: 4986230 - DNA, 25 bp, Homo sapien
aattatggaaatgccgatgcctaac

SEQ ID NO: 4986231 - DNA, 25 bp, Homo sapien
tccttgtaacgtaagctgcactgag

SEQ ID NO: 4986232 - DNA, 25 bp, Homo sapien
tctctcaaagcccaaaaccttctgg

SEQ ID NO: 4986233 - DNA, 25 bp, Homo sapien
ttaccaggaccgtgtgatgtctccc

SEQ ID NO: 4986234 - DNA, 25 bp, Homo sapien
ggcagagccgcctatccatttaaag

SEQ ID NO: 4986235 - DNA, 25 bp, Homo sapien
ttctggcacccaaacctggcagagc

SEQ ID NO: 4986236 - DNA, 25 bp, Homo sapien
tgttgagtgatttcgcacggcgcac

SEQ ID NO: 4986237 - DNA, 25 bp, Homo sapien
tttataggagcacgttgcacacggc

SEQ ID NO: 4986238 - DNA, 25 bp, Homo sapien
aaagtgttgagtattggtcccagtc

SEQ ID NO: 4986239 - DNA, 25 bp, Homo sapien
cacgatggcgtaacggtcagcagga

SEQ ID NO: 4986240 - DNA, 25 bp, Homo sapien
ggtcccctgggtcacaggaagctgc

SEQ ID NO: 4986241 - DNA, 25 bp, Homo sapien
agtgcacatgcggagtaaggagact

SEQ ID NO: 4986242 - DNA, 25 bp, Homo sapien
tgcacgggccttcctgcgtcgtgca

SEQ ID NO: 4986243 - DNA, 25 bp, Homo sapien
tctgcatacaccaccagtgcacatg

SEQ ID NO: 4986244 - DNA, 25 bp, Homo sapien
ttcccgttatctccctgtctgctag

SEQ ID NO: 4986245 - DNA, 25 bp, Homo sapien
tgtgctgatctaaagtctgacttgg

SEQ ID NO: 4986246 - DNA, 25 bp, Homo sapien
ccctgtctgctaggcaaacattgac

SEQ ID NO: 4986247 - DNA, 25 bp, Homo sapien
gacttggcaatctgttaggatgaaa

SEQ ID NO: 4986248 - DNA, 25 bp, Homo sapien
aatattccattggtgtattagtccg

SEQ ID NO: 4986249 - DNA, 25 bp, Homo sapien
cagctttatccatgtggtggcaaat

SEQ ID NO: 4986250 - DNA, 25 bp, Homo sapien
tgacaggagcagttagaaactactt

SEQ ID NO: 4986251 - DNA, 25 bp, Homo sapien
caggtttacaacgtgatattatagg

SEQ ID NO: 4986252 - DNA, 25 bp, Homo sapien
tcaccaacagtgtactgtggttccc

SEQ ID NO: 4986253 - DNA, 25 bp, Homo sapien
tggctgtatcaatctacaatttcac

SEQ ID NO: 4986254 - DNA, 25 bp, Homo sapien
gccagaccatatcaactggtaaata

SEQ ID NO: 4986255 - DNA, 25 bp, Homo sapien
ggtatgaagtgataacagaattgtg

SEQ ID NO: 4986256 - DNA, 25 bp, Homo sapien
tgatggtctaactgcactgtctgcc

SEQ ID NO: 4986257 - DNA, 25 bp, Homo sapien
taatggcataagagggacactcggc

SEQ ID NO: 4986258 - DNA, 25 bp, Homo sapien
gaataagatctattgccgccttgcc

SEQ ID NO: 4986259 - DNA, 25 bp, Homo sapien
gctgtgttgcgtagggaatcttcca

SEQ ID NO: 4986260 - DNA, 25 bp, Homo sapien
tacattgctcaagggcctggatttc

SEQ ID NO: 4986261 - DNA, 25 bp, Homo sapien
ctctgcgctgccctcttctggtgag

SEQ ID NO: 4986262 - DNA, 25 bp, Homo sapien
aaaaacggctactttcatgcagaga

SEQ ID NO: 4986263 - DNA, 25 bp, Homo sapien
catctgtttggaaactcctcggaga

SEQ ID NO: 4986264 - DNA, 25 bp, Homo sapien
cgaaagttatcttttcctggatgtg

SEQ ID NO: 4986265 - DNA, 25 bp, Homo sapien
tttctcttaggatttctccacgctg

SEQ ID NO: 4986266 - DNA, 25 bp, Homo sapien
tttacctggcgaacgtctacaggtg

SEQ ID NO: 4986267 - DNA, 25 bp, Homo sapien
gctcttatgctatttctcttaggat

SEQ ID NO: 4986268 - DNA, 25 bp, Homo sapien
ctacacaaatgccaagccaatgtga

SEQ ID NO: 4986269 - DNA, 25 bp, Homo sapien
aaatgccaagccaatgtgatagcac

SEQ ID NO: 4986270 - DNA, 25 bp, Homo sapien
caaatgccaagccaatgtgatagca

SEQ ID NO: 4986271 - DNA, 25 bp, Homo sapien
cacaaatgccaagccaatgtgatag

SEQ ID NO: 4986272 - DNA, 25 bp, Homo sapien
aaaagccatggtttccgagatgtaa

SEQ ID NO: 4986273 - DNA, 25 bp, Homo sapien
tcttcatgtggccttattaaaagcc

SEQ ID NO: 4986274 - DNA, 25 bp, Homo sapien
tgtaaaacacccacagttacctcaa

SEQ ID NO: 4986275 - DNA, 25 bp, Homo sapien
actggtttttgcgtgggatgatgcc

SEQ ID NO: 4986276 - DNA, 25 bp, Homo sapien
tcatttcaaaactcttttcactgag

SEQ ID NO: 4986277 - DNA, 25 bp, Homo sapien
gtgttatttaccaaccgcacaaaga

SEQ ID NO: 4986278 - DNA, 25 bp, Homo sapien
aaatgctgtctattcagaactcatt

SEQ ID NO: 4986279 - DNA, 25 bp, Homo sapien
gcagaggcgctgcaacttgctaact

SEQ ID NO: 4986280 - DNA, 25 bp, Homo sapien
cagcatatgtagtctcagttttgga

SEQ ID NO: 4986281 - DNA, 25 bp, Homo sapien
tgggtgcagcatatgtagtctcagt

SEQ ID NO: 4986282 - DNA, 25 bp, Homo sapien
catatgtagtctcagttttggaaac

SEQ ID NO: 4986283 - DNA, 25 bp, Homo sapien
agtttgggtgcagcatatgtagtct

SEQ ID NO: 4986284 - DNA, 25 bp, Homo sapien
tctctccaaggttgaactaggtgac

SEQ ID NO: 4986285 - DNA, 25 bp, Homo sapien
actaggtgacaacgtattgctggaa

SEQ ID NO: 4986286 - DNA, 25 bp, Homo sapien
cttcctgtgtagaaagaggagttga

SEQ ID NO: 4986287 - DNA, 25 bp, Homo sapien
tgctggaatcggagctgcatgtgta

SEQ ID NO: 4986288 - DNA, 25 bp, Homo sapien
ccaacatacttctctttgtcatcag

SEQ ID NO: 4986289 - DNA, 25 bp, Homo sapien
cagaccccaacatacttctctttgt

SEQ ID NO: 4986290 - DNA, 25 bp, Homo sapien
cctctcgccggctccccagacccca

SEQ ID NO: 4986291 - DNA, 25 bp, Homo sapien
cggctccccagaccccaacatactt

SEQ ID NO: 4986292 - DNA, 25 bp, Homo sapien
caaaggatttagcagaagccacaat

SEQ ID NO: 4986293 - DNA, 25 bp, Homo sapien
tttgtaaagcataggattaaaaggc

SEQ ID NO: 4986294 - DNA, 25 bp, Homo sapien
tgtaaagcataggattaaaaggctg

SEQ ID NO: 4986295 - DNA, 25 bp, Homo sapien
tttcaaaggatttagcagaagccac

SEQ ID NO: 4986296 - DNA, 25 bp, Homo sapien
gctctcgcggcgcttctggattcac

SEQ ID NO: 4986297 - DNA, 25 bp, Homo sapien
catcgcagcttgtgtcatcgtctgt

SEQ ID NO: 4986298 - DNA, 25 bp, Homo sapien
gccttgctctgagggtaaaacgcca

SEQ ID NO: 4986299 - DNA, 25 bp, Homo sapien
ctctgagggtaaaacgccaactcct

SEQ ID NO: 4986300 - DNA, 25 bp, Homo sapien
gcctgctctccatgcgggggcctca

SEQ ID NO: 4986301 - DNA, 25 bp, Homo sapien
tgctctccatgcgggggcctcaatg

SEQ ID NO: 4986302 - DNA, 25 bp, Homo sapien
catgcgggggcctcaatgcccacac

SEQ ID NO: 4986303 - DNA, 25 bp, Homo sapien
ccatgcgggggcctcaatgcccaca

SEQ ID NO: 4986304 - DNA, 25 bp, Homo sapien
cctgggacctaggatcatcagaatc

SEQ ID NO: 4986305 - DNA, 25 bp, Homo sapien
cagtacttctcccagtgtgttttgg

SEQ ID NO: 4986306 - DNA, 25 bp, Homo sapien
agaatctgcgctctggaacctgctg

SEQ ID NO: 4986307 - DNA, 25 bp, Homo sapien
agttgccctggcgtgcttcccagaa

SEQ ID NO: 4986308 - DNA, 25 bp, Homo sapien
aagcatagagtctgggggaatattt

SEQ ID NO: 4986309 - DNA, 25 bp, Homo sapien
agcatagagtctgggggaatatttg

SEQ ID NO: 4986310 - DNA, 25 bp, Homo sapien
ccctggtcaatctgttgggcaacat

SEQ ID NO: 4986311 - DNA, 25 bp, Homo sapien
acagcgggtcccactagcagagacc

SEQ ID NO: 4986312 - DNA, 25 bp, Homo sapien
ccctgcacaaggcaccctggtcaat

SEQ ID NO: 4986313 - DNA, 25 bp, Homo sapien
ctagcagagaccttgctacctgcca

SEQ ID NO: 4986314 - DNA, 25 bp, Homo sapien
tgtcttgtatactcacatcacagga

SEQ ID NO: 4986315 - DNA, 25 bp, Homo sapien
ttgtcttgtatactcacatcacagg

SEQ ID NO: 4986316 - DNA, 25 bp, Homo sapien
gtcttgtatactcacatcacaggat

SEQ ID NO: 4986317 - DNA, 25 bp, Homo sapien
tgagtccgtgtgactccaggaagcc

SEQ ID NO: 4986318 - DNA, 25 bp, Homo sapien
aagccaaatctacccccatatctga

SEQ ID NO: 4986319 - DNA, 25 bp, Homo sapien
atttgttctaaccatgctccgtgag

SEQ ID NO: 4986320 - DNA, 25 bp, Homo sapien
tgagacttgccacagttgggaattc

SEQ ID NO: 4986321 - DNA, 25 bp, Homo sapien
tcaaaatgaagactgtctctagaag

SEQ ID NO: 4986322 - DNA, 25 bp, Homo sapien
agaagtggggcccattgatgggttt

SEQ ID NO: 4986323 - DNA, 25 bp, Homo sapien
tgattccctcacaagaagtgagaag

SEQ ID NO: 4986324 - DNA, 25 bp, Homo sapien
ggtttggttgagttgagcatcaaaa

SEQ ID NO: 4986325 - DNA, 25 bp, Homo sapien
gaacagcgagtggaatacatgaccc

SEQ ID NO: 4986326 - DNA, 25 bp, Homo sapien
cgagtggaatacatgacccaaacct

SEQ ID NO: 4986327 - DNA, 25 bp, Homo sapien
gacccaaacctaatgcttctggttc

SEQ ID NO: 4986328 - DNA, 25 bp, Homo sapien
ctcaggaacagcgagtggaatacat

SEQ ID NO: 4986329 - DNA, 25 bp, Homo sapien
ccttcactgtgcagagtgacttcat

SEQ ID NO: 4986330 - DNA, 25 bp, Homo sapien
ctgtgcagagtgacttcatgggcct

SEQ ID NO: 4986331 - DNA, 25 bp, Homo sapien
ttgggaccacaagggatgagtcctc

SEQ ID NO: 4986332 - DNA, 25 bp, Homo sapien
cctttgggaccacaagggatgagtc

SEQ ID NO: 4986333 - DNA, 25 bp, Homo sapien
ttcttcatgctacggcctaactcgt

SEQ ID NO: 4986334 - DNA, 25 bp, Homo sapien
gctctgctgaacattcacggggatg

SEQ ID NO: 4986335 - DNA, 25 bp, Homo sapien
tcacccttcaactcatctgtcttct

SEQ ID NO: 4986336 - DNA, 25 bp, Homo sapien
tatccaaacgcccaaagtacagcgc

SEQ ID NO: 4986337 - DNA, 25 bp, Homo sapien
caccatgctaaaaatacgagtctgc

SEQ ID NO: 4986338 - DNA, 25 bp, Homo sapien
aacagtcctctcttaatggtttcgg

SEQ ID NO: 4986339 - DNA, 25 bp, Homo sapien
tacgagtctgcatggaacagtcctc

SEQ ID NO: 4986340 - DNA, 25 bp, Homo sapien
cggatttaaaacatagccattggaa

SEQ ID NO: 4986341 - DNA, 25 bp, Homo sapien
ggagccattttctatatgacaccca

SEQ ID NO: 4986342 - DNA, 25 bp, Homo sapien
ggagcagatgctcccgttcccgagt

SEQ ID NO: 4986343 - DNA, 25 bp, Homo sapien
tggctccaacctcgtcaaaggcagg

SEQ ID NO: 4986344 - DNA, 25 bp, Homo sapien
gtacacaagatgctattcagactgg

SEQ ID NO: 4986345 - DNA, 25 bp, Homo sapien
tcagttccttagcatgacactcagg

SEQ ID NO: 4986346 - DNA, 25 bp, Homo sapien
ttagcatgacactcagggtctccac

SEQ ID NO: 4986347 - DNA, 25 bp, Homo sapien
tacaattcagttccttagcatgaca

SEQ ID NO: 4986348 - DNA, 25 bp, Homo sapien
ctgcgggatacaattcagttcctta

SEQ ID NO: 4986349 - DNA, 25 bp, Homo sapien
catcctccttctccaagtcatgctc

SEQ ID NO: 4986350 - DNA, 25 bp, Homo sapien
cacatcctccttctccaagtcatgc

SEQ ID NO: 4986351 - DNA, 25 bp, Homo sapien
cctccttctccaagtcatgctccat

SEQ ID NO: 4986352 - DNA, 25 bp, Homo sapien
ccacatcctccttctccaagtcatg

SEQ ID NO: 4986353 - DNA, 25 bp, Homo sapien
cagagagtcagcatggaatctcacc

SEQ ID NO: 4986354 - DNA, 25 bp, Homo sapien
gattttccagtgagcacgggcttct

SEQ ID NO: 4986355 - DNA, 25 bp, Homo sapien
gaatctcaccagctgcaccatggga

SEQ ID NO: 4986356 - DNA, 25 bp, Homo sapien
tctcctgcagcggacaagattctag

SEQ ID NO: 4986357 - DNA, 25 bp, Homo sapien
tgaaagctgcactccttgacaatgg

SEQ ID NO: 4986358 - DNA, 25 bp, Homo sapien
gcctctgggttgaccagaccctctg

SEQ ID NO: 4986359 - DNA, 25 bp, Homo sapien
taggacatctatggccatggcctct

SEQ ID NO: 4986360 - DNA, 25 bp, Homo sapien
caatggtaacgctcataaattccac

SEQ ID NO: 4986361 - DNA, 25 bp, Homo sapien
caatatgcgattcaaactctgtttt

SEQ ID NO: 4986362 - DNA, 25 bp, Homo sapien
aagcaagaaagactccattctatga

SEQ ID NO: 4986363 - DNA, 25 bp, Homo sapien
taacttggtacacgatgatttgaca

SEQ ID NO: 4986364 - DNA, 25 bp, Homo sapien
gacaggaaacagctaaccagttatt

SEQ ID NO: 4986365 - DNA, 25 bp, Homo sapien
taacaatctagcacatcttttgtaa

SEQ ID NO: 4986366 - DNA, 25 bp, Homo sapien
ggactcactgctaatcttgttaaca

SEQ ID NO: 4986367 - DNA, 25 bp, Homo sapien
gagcacagtggactcactgctaatc

SEQ ID NO: 4986368 - DNA, 25 bp, Homo sapien
agtggactcactgctaatcttgtta

SEQ ID NO: 4986369 - DNA, 25 bp, Homo sapien
tggcgttgagcactccctggtattg

SEQ ID NO: 4986370 - DNA, 25 bp, Homo sapien
ccctggtattgtaatagagtcggtg

SEQ ID NO: 4986371 - DNA, 25 bp, Homo sapien
gagtcggtggaaatgtttgctgcat

SEQ ID NO: 4986372 - DNA, 25 bp, Homo sapien
taatagagtcggtggaaatgtttgc

SEQ ID NO: 4986373 - DNA, 25 bp, Homo sapien
actgcctcgaaaggctcaacatcct

SEQ ID NO: 4986374 - DNA, 25 bp, Homo sapien
ctcgaaaggctcaacatcctcacac

SEQ ID NO: 4986375 - DNA, 25 bp, Homo sapien
aactgcctcgaaaggctcaacatcc

SEQ ID NO: 4986376 - DNA, 25 bp, Homo sapien
tgcctcgaaaggctcaacatcctca

SEQ ID NO: 4986377 - DNA, 25 bp, Homo sapien
aagttagagtctcttgggaatattt

SEQ ID NO: 4986378 - DNA, 25 bp, Homo sapien
gattgtgtgggtgcgcaggaatgca

SEQ ID NO: 4986379 - DNA, 25 bp, Homo sapien
tcctgagggacgtgggaacacttcc

SEQ ID NO: 4986380 - DNA, 25 bp, Homo sapien
gaatgcagagagatcggagctcccc

SEQ ID NO: 4986381 - DNA, 25 bp, Homo sapien
tcagggcagccttatgtgagttcag

SEQ ID NO: 4986382 - DNA, 25 bp, Homo sapien
ttggagagagtaagaagccgcctgc

SEQ ID NO: 4986383 - DNA, 25 bp, Homo sapien
ccatggctgatgcccgggtggtgct

SEQ ID NO: 4986384 - DNA, 25 bp, Homo sapien
agagagtaagaagccgcctgcctgc

SEQ ID NO: 4986385 - DNA, 25 bp, Homo sapien
tgcttggagagagtaagaagccgcc

SEQ ID NO: 4986386 - DNA, 25 bp, Homo sapien
cgtttataggcattggctgaaacaa

SEQ ID NO: 4986387 - DNA, 25 bp, Homo sapien
tcgggctcgtttataggcattggct

SEQ ID NO: 4986388 - DNA, 25 bp, Homo sapien
taaagtcgggctcgtttataggcat

SEQ ID NO: 4986389 - DNA, 25 bp, Homo sapien
ccccagcggctaaagtcgggctcgt

SEQ ID NO: 4986390 - DNA, 25 bp, Homo sapien
gctcctgagagctgccgaaaggtaa

SEQ ID NO: 4986391 - DNA, 25 bp, Homo sapien
gccgaaaggtaagaggaggtggcac

SEQ ID NO: 4986392 - DNA, 25 bp, Homo sapien
ggtggcacaaaaggacttgaatatc

SEQ ID NO: 4986393 - DNA, 25 bp, Homo sapien
agtagctcctgagagctgccgaaag

SEQ ID NO: 4986394 - DNA, 25 bp, Homo sapien
aagcccggtggaggccaccaaatgt

SEQ ID NO: 4986395 - DNA, 25 bp, Homo sapien
aagggatcaggagctgtggtcccac

SEQ ID NO: 4986396 - DNA, 25 bp, Homo sapien
tgctttcttagccataaagcctgag

SEQ ID NO: 4986397 - DNA, 25 bp, Homo sapien
tgaacagaaacgtgtgaggagcttc

SEQ ID NO: 4986398 - DNA, 25 bp, Homo sapien
tcctaggggaatccacggagcccca

SEQ ID NO: 4986399 - DNA, 25 bp, Homo sapien
aggcttcccaaagcgagtgcctcgc

SEQ ID NO: 4986400 - DNA, 25 bp, Homo sapien
gccccaggcgcagggcaaaggatgg

SEQ ID NO: 4986401 - DNA, 25 bp, Homo sapien
tgttttctgctgtactaatctcagg

SEQ ID NO: 4986402 - DNA, 25 bp, Homo sapien
gaggaaaagcaacggcttgggctcc

SEQ ID NO: 4986403 - DNA, 25 bp, Homo sapien
aagagtgcgggcaaaggggcgccgg

SEQ ID NO: 4986404 - DNA, 25 bp, Homo sapien
ggctccttatccgtgacgcgcgctc

SEQ ID NO: 4986405 - DNA, 25 bp, Homo sapien
cgtgggctccgtgcggggacaaagc

SEQ ID NO: 4986406 - DNA, 25 bp, Homo sapien
agggtgcgcggcccaagagaaggcc

SEQ ID NO: 4986407 - DNA, 25 bp, Homo sapien
gagagcgggagactccgggaggatc

SEQ ID NO: 4986408 - DNA, 25 bp, Homo sapien
atcccgacgcaggtccggagggtgc

SEQ ID NO: 4986409 - DNA, 25 bp, Homo sapien
agcgggaccacagcgcggctacgcg

SEQ ID NO: 4986410 - DNA, 25 bp, Homo sapien
ggatgaagctcttttgaggaagttg

SEQ ID NO: 4986411 - DNA, 25 bp, Homo sapien
tcctgaataatgacctcaactcctt

SEQ ID NO: 4986412 - DNA, 25 bp, Homo sapien
agtttatctaggcttggcatgtcca

SEQ ID NO: 4986413 - DNA, 25 bp, Homo sapien
gcaggagccctgtgaaatcgtgcct

SEQ ID NO: 4986414 - DNA, 25 bp, Homo sapien
ggaagagctgccttggatacacata

SEQ ID NO: 4986415 - DNA, 25 bp, Homo sapien
gatacacataagcacagatgatggc

SEQ ID NO: 4986416 - DNA, 25 bp, Homo sapien
gcttgttgattccacactgacaatc

SEQ ID NO: 4986417 - DNA, 25 bp, Homo sapien
ccaaatgaggcattggtctggactt

SEQ ID NO: 4986418 - DNA, 25 bp, Homo sapien
cctgggattgagctagagcagtcat

SEQ ID NO: 4986419 - DNA, 25 bp, Homo sapien
caataaagtcctgggattgagctag

SEQ ID NO: 4986420 - DNA, 25 bp, Homo sapien
aaagtcctgggattgagctagagca

SEQ ID NO: 4986421 - DNA, 25 bp, Homo sapien
cttcttcaataaagtcctgggattg

SEQ ID NO: 4986422 - DNA, 25 bp, Homo sapien
tgttgttttcagtgggaccatactc

SEQ ID NO: 4986423 - DNA, 25 bp, Homo sapien
ggaccatactctgacaattgtgaga

SEQ ID NO: 4986424 - DNA, 25 bp, Homo sapien
gtgggaccatactctgacaattgtg

SEQ ID NO: 4986425 - DNA, 25 bp, Homo sapien
gttttcagtgggaccatactctgac

SEQ ID NO: 4986426 - DNA, 25 bp, Homo sapien
ctaggaaacatatccaggcatattt

SEQ ID NO: 4986427 - DNA, 25 bp, Homo sapien
aacatatccaggcatatttgagagg

SEQ ID NO: 4986428 - DNA, 25 bp, Homo sapien
gagcagatgggcagtaataatacat

SEQ ID NO: 4986429 - DNA, 25 bp, Homo sapien
ggagcagatgggcagtaataataca

SEQ ID NO: 4986430 - DNA, 25 bp, Homo sapien
gcttaatgcgacaggcataaagaca

SEQ ID NO: 4986431 - DNA, 25 bp, Homo sapien
cgacaggcataaagacaggatgctg

SEQ ID NO: 4986432 - DNA, 25 bp, Homo sapien
cttcctggactcatagcttaatgcg

SEQ ID NO: 4986433 - DNA, 25 bp, Homo sapien
gactcatagcttaatgcgacaggca

SEQ ID NO: 4986434 - DNA, 25 bp, Homo sapien
tgaaaacaggtacccgtgtacatac

SEQ ID NO: 4986435 - DNA, 25 bp, Homo sapien
tgaaaaagttggagccctcatacat

SEQ ID NO: 4986436 - DNA, 25 bp, Homo sapien
gcactagtaactacagccaaaaggt

SEQ ID NO: 4986437 - DNA, 25 bp, Homo sapien
gatgatttctaagatttcacaaagg

SEQ ID NO: 4986438 - DNA, 25 bp, Homo sapien
cagtctttgcataaagatgtcatgg

SEQ ID NO: 4986439 - DNA, 25 bp, Homo sapien
tcaccctctatataaagttattgct

SEQ ID NO: 4986440 - DNA, 25 bp, Homo sapien
tgcttaacaaaatcaccctctatat

SEQ ID NO: 4986441 - DNA, 25 bp, Homo sapien
tgctttaacagtctttgcataaaga

SEQ ID NO: 4986442 - DNA, 25 bp, Homo sapien
gtttattccattttgtactattaga

SEQ ID NO: 4986443 - DNA, 25 bp, Homo sapien
cagttttctatacactatgatgttt

SEQ ID NO: 4986444 - DNA, 25 bp, Homo sapien
tcagttttctatacactatgatgtt

SEQ ID NO: 4986445 - DNA, 25 bp, Homo sapien
tccattttgtactattagatataca

SEQ ID NO: 4986446 - DNA, 25 bp, Homo sapien
tctagcaacaaacctcaaacaattc

SEQ ID NO: 4986447 - DNA, 25 bp, Homo sapien
taaataactttgctcaatggcaact

SEQ ID NO: 4986448 - DNA, 25 bp, Homo sapien
cactgtttaccctgttacatagtat

SEQ ID NO: 4986449 - DNA, 25 bp, Homo sapien
tattttcacacttcccagcaatcac

SEQ ID NO: 4986450 - DNA, 25 bp, Homo sapien
taagccacaatgcacaaggtatgcc

SEQ ID NO: 4986451 - DNA, 25 bp, Homo sapien
tagaacccagatgaccaatccactg

SEQ ID NO: 4986452 - DNA, 25 bp, Homo sapien
tgaaatggttagtagcacagactct

SEQ ID NO: 4986453 - DNA, 25 bp, Homo sapien
taacaggcaattaatatggctcatc

SEQ ID NO: 4986454 - DNA, 25 bp, Homo sapien
gccaaggattctgatgaatttatta

SEQ ID NO: 4986455 - DNA, 25 bp, Homo sapien
attattcctaaaatgaagccagtta

SEQ ID NO: 4986456 - DNA, 25 bp, Homo sapien
tttaattcagccaaggattctgatg

SEQ ID NO: 4986457 - DNA, 25 bp, Homo sapien
ttattattcctaaaatgaagccagt

SEQ ID NO: 4986458 - DNA, 25 bp, Homo sapien
tttgcataaaaagatggcctgctgt

SEQ ID NO: 4986459 - DNA, 25 bp, Homo sapien
cgatgtacaccagtgaagtatattg

SEQ ID NO: 4986460 - DNA, 25 bp, Homo sapien
aaagtaaacgatgtacaccagtgaa

SEQ ID NO: 4986461 - DNA, 25 bp, Homo sapien
tatattgtcacgctgacttttgcat

SEQ ID NO: 4986462 - DNA, 25 bp, Homo sapien
tcttattccatgatacggctttcac

SEQ ID NO: 4986463 - DNA, 25 bp, Homo sapien
tattccatgatacggctttcactct

SEQ ID NO: 4986464 - DNA, 25 bp, Homo sapien
cggctttcactctgtaaaactttgt

SEQ ID NO: 4986465 - DNA, 25 bp, Homo sapien
catgatacggctttcactctgtaaa

SEQ ID NO: 4986466 - DNA, 25 bp, Homo sapien
cactagagtgattaaaccacatctc

SEQ ID NO: 4986467 - DNA, 25 bp, Homo sapien
aatcactagagtgattaaaccacat

SEQ ID NO: 4986468 - DNA, 25 bp, Homo sapien
tcactagagtgattaaaccacatct

SEQ ID NO: 4986469 - DNA, 25 bp, Homo sapien
atcactagagtgattaaaccacatc

SEQ ID NO: 4986470 - DNA, 25 bp, Homo sapien
tcttctttacagttcccaggcttag

SEQ ID NO: 4986471 - DNA, 25 bp, Homo sapien
caagaacagcagtggtaatgatttc

SEQ ID NO: 4986472 - DNA, 25 bp, Homo sapien
tctatctctactatctaagggcagc

SEQ ID NO: 4986473 - DNA, 25 bp, Homo sapien
ccaggcttagtatcacatgatgtcg

SEQ ID NO: 4986474 - DNA, 25 bp, Homo sapien
ttccaagtacccagggtcttctaga

SEQ ID NO: 4986475 - DNA, 25 bp, Homo sapien
caagtacccagggtcttctagatgc

SEQ ID NO: 4986476 - DNA, 25 bp, Homo sapien
agtacccagggtcttctagatgcac

SEQ ID NO: 4986477 - DNA, 25 bp, Homo sapien
tccaagtacccagggtcttctagat

SEQ ID NO: 4986478 - DNA, 25 bp, Homo sapien
cagactaaaaaagctctcatgagtg

SEQ ID NO: 4986479 - DNA, 25 bp, Homo sapien
tattcatggaaacataactgccaga

SEQ ID NO: 4986480 - DNA, 25 bp, Homo sapien
taattattcatggaaacataactgc

SEQ ID NO: 4986481 - DNA, 25 bp, Homo sapien
gctctcatgagtggaagaatatgta

SEQ ID NO: 4986482 - DNA, 25 bp, Homo sapien
ttgaaaggtaatgggctaagatgta

SEQ ID NO: 4986483 - DNA, 25 bp, Homo sapien
taatgggctaagatgtaacttatca

SEQ ID NO: 4986484 - DNA, 25 bp, Homo sapien
aaatgttgaaaggtaatgggctaag

SEQ ID NO: 4986485 - DNA, 25 bp, Homo sapien
ggtaatgggctaagatgtaacttat

SEQ ID NO: 4986486 - DNA, 25 bp, Homo sapien
catggcgttcgtctaggatgatgag

SEQ ID NO: 4986487 - DNA, 25 bp, Homo sapien
ggatgatgagtaccaaatctcccac

SEQ ID NO: 4986488 - DNA, 25 bp, Homo sapien
acacataattgtcatggcgttcgtc

SEQ ID NO: 4986489 - DNA, 25 bp, Homo sapien
agtaggactaacagtaaataacaca

SEQ ID NO: 4986490 - DNA, 25 bp, Homo sapien
tatactttggaagctaccctcccag

SEQ ID NO: 4986491 - DNA, 25 bp, Homo sapien
ccaatatagattaacaagactaagg

SEQ ID NO: 4986492 - DNA, 25 bp, Homo sapien
ggaccaaaccaacttgtatcttcaa

SEQ ID NO: 4986493 - DNA, 25 bp, Homo sapien
aagaggtagcacatgctgaaaagtt

SEQ ID NO: 4986494 - DNA, 25 bp, Homo sapien
tgaagatactgaagacatgctctga

SEQ ID NO: 4986495 - DNA, 25 bp, Homo sapien
tgccttgaagatactgaagacatgc

SEQ ID NO: 4986496 - DNA, 25 bp, Homo sapien
gctatcttttcagaatgccttgaag

SEQ ID NO: 4986497 - DNA, 25 bp, Homo sapien
tctctaatagctatcttttcagaat

SEQ ID NO: 4986498 - DNA, 25 bp, Homo sapien
tttcttcttctttcaattgcaatgt

SEQ ID NO: 4986499 - DNA, 25 bp, Homo sapien
tattttcttcttctttcaattgcaa

SEQ ID NO: 4986500 - DNA, 25 bp, Homo sapien
tttattttcttcttctttcaattgc

SEQ ID NO: 4986501 - DNA, 25 bp, Homo sapien
ttttcttcttctttcaattgcaatg

SEQ ID NO: 4986502 - DNA, 25 bp, Homo sapien
cagcattatccgctgtttttcttca

SEQ ID NO: 4986503 - DNA, 25 bp, Homo sapien
gcattatccgctgtttttcttcaga

SEQ ID NO: 4986504 - DNA, 25 bp, Homo sapien
tttcttcagacaacatatgaatatt

SEQ ID NO: 4986505 - DNA, 25 bp, Homo sapien
tcgttctaacagcattatccgctgt

SEQ ID NO: 4986506 - DNA, 25 bp, Homo sapien
gcggatctatctgattcacctggga

SEQ ID NO: 4986507 - DNA, 25 bp, Homo sapien
gctgtttccacagcggatctatctg

SEQ ID NO: 4986508 - DNA, 25 bp, Homo sapien
tccacagcggatctatctgattcac

SEQ ID NO: 4986509 - DNA, 25 bp, Homo sapien
gggagttcaggtgcacaagctccat

SEQ ID NO: 4986510 - DNA, 25 bp, Homo sapien
tatggtgaaggaacaaaactgctac

SEQ ID NO: 4986511 - DNA, 25 bp, Homo sapien
agctcgatcttcagaaagtgactct

SEQ ID NO: 4986512 - DNA, 25 bp, Homo sapien
caaacgagctcgatcttcagaaagt

SEQ ID NO: 4986513 - DNA, 25 bp, Homo sapien
tcaagcaaacgagctcgatcttcag

SEQ ID NO: 4986514 - DNA, 25 bp, Homo sapien
ttcttttcctcaagcaaacgagctc

SEQ ID NO: 4986515 - DNA, 25 bp, Homo sapien
ctttatcccgttcttgttgctgcat

SEQ ID NO: 4986516 - DNA, 25 bp, Homo sapien
tatcactaagatcatttattatgtt

SEQ ID NO: 4986517 - DNA, 25 bp, Homo sapien
tttatcccgttcttgttgctgcatt

SEQ ID NO: 4986518 - DNA, 25 bp, Homo sapien
acttttcaacttatcactaagatca

SEQ ID NO: 4986519 - DNA, 25 bp, Homo sapien
aacatactgtggcaaaggttctact

SEQ ID NO: 4986520 - DNA, 25 bp, Homo sapien
ttagcagctaggacttagaaaatac

SEQ ID NO: 4986521 - DNA, 25 bp, Homo sapien
aataacttagagtgctgttagacac

SEQ ID NO: 4986522 - DNA, 25 bp, Homo sapien
gcacatttgtacatggagatgatgg

SEQ ID NO: 4986523 - DNA, 25 bp, Homo sapien
catctaagatataagaaaccctcag

SEQ ID NO: 4986524 - DNA, 25 bp, Homo sapien
taagaaaccctcagctacataaaga

SEQ ID NO: 4986525 - DNA, 25 bp, Homo sapien
aggatcaatgtaaggaacatcacat

SEQ ID NO: 4986526 - DNA, 25 bp, Homo sapien
caatgtaaggaacatcacatctaag

SEQ ID NO: 4986527 - DNA, 25 bp, Homo sapien
cttcctgaagcttttcttgaagttc

SEQ ID NO: 4986528 - DNA, 25 bp, Homo sapien
tgttgttccgcaatcaaagatgttc

SEQ ID NO: 4986529 - DNA, 25 bp, Homo sapien
ttcaagttgttctagaaacttagct

SEQ ID NO: 4986530 - DNA, 25 bp, Homo sapien
cagcaactaagcttgaagaatctcc

SEQ ID NO: 4986531 - DNA, 25 bp, Homo sapien
tgaaagatatctgtgtgaaccctct

SEQ ID NO: 4986532 - DNA, 25 bp, Homo sapien
ctcaataatgtagcatgaaagatat

SEQ ID NO: 4986533 - DNA, 25 bp, Homo sapien
tatcttccttaagctcaataatgta

SEQ ID NO: 4986534 - DNA, 25 bp, Homo sapien
ataatgtagcatgaaagatatctgt

SEQ ID NO: 4986535 - DNA, 25 bp, Homo sapien
tattttctggtaagggactatacac

SEQ ID NO: 4986536 - DNA, 25 bp, Homo sapien
tggttcatttctgctagcaagtagg

SEQ ID NO: 4986537 - DNA, 25 bp, Homo sapien
aggtaaactcaacttcaaatgtcag

SEQ ID NO: 4986538 - DNA, 25 bp, Homo sapien
tgaaaagcgcttacacgaacaaatc

SEQ ID NO: 4986539 - DNA, 25 bp, Homo sapien
gcctcaaaaagttgctgttactaaa

SEQ ID NO: 4986540 - DNA, 25 bp, Homo sapien
aatcagggtgtgttctgcaattaat

SEQ ID NO: 4986541 - DNA, 25 bp, Homo sapien
taatatgggcatgtatttaaaatgt

SEQ ID NO: 4986542 - DNA, 25 bp, Homo sapien
atgctaagcctcaaaaagttgctgt

SEQ ID NO: 4986543 - DNA, 25 bp, Homo sapien
catggctggaaaactgacatactac

SEQ ID NO: 4986544 - DNA, 25 bp, Homo sapien
gaaaatgttccaagtgactatccgc

SEQ ID NO: 4986545 - DNA, 25 bp, Homo sapien
tgactaatgtgtggagagtgcccac

SEQ ID NO: 4986546 - DNA, 25 bp, Homo sapien
cagaaaggctggaataggaatcccc

SEQ ID NO: 4986547 - DNA, 25 bp, Homo sapien
gtaggtagatttcccaacccacgca

SEQ ID NO: 4986548 - DNA, 25 bp, Homo sapien
gggagcaaggccatcaatcatgtag

SEQ ID NO: 4986549 - DNA, 25 bp, Homo sapien
cacaagtggaccgaacagtatctac

SEQ ID NO: 4986550 - DNA, 25 bp, Homo sapien
gaaaaaaggcatctctaaaggctga

SEQ ID NO: 4986551 - DNA, 25 bp, Homo sapien
ccaagtggtgaaagggaaatatgcc

SEQ ID NO: 4986552 - DNA, 25 bp, Homo sapien
gttgcttctggcatatgtagaacca

SEQ ID NO: 4986553 - DNA, 25 bp, Homo sapien
cagtgttgcttctggcatatgtaga

SEQ ID NO: 4986554 - DNA, 25 bp, Homo sapien
gaaatatgccggactgtgtgtcctc

SEQ ID NO: 4986555 - DNA, 25 bp, Homo sapien
agagacttccaagtaaaccacctgt

SEQ ID NO: 4986556 - DNA, 25 bp, Homo sapien
caatgtgagattcgtaagagacttc

SEQ ID NO: 4986557 - DNA, 25 bp, Homo sapien
tggttgtagccaaacatgtgggcaa

SEQ ID NO: 4986558 - DNA, 25 bp, Homo sapien
tggtagacaactgacgaaagtcttc

SEQ ID NO: 4986559 - DNA, 25 bp, Homo sapien
tcagtgtcccttcacttgaggtagt

SEQ ID NO: 4986560 - DNA, 25 bp, Homo sapien
tgacagttacaagaggagggacaat

SEQ ID NO: 4986561 - DNA, 25 bp, Homo sapien
tgaaagcagtaatgacctcagtgcc

SEQ ID NO: 4986562 - DNA, 25 bp, Homo sapien
tacatggcataacagtacacacttg

SEQ ID NO: 4986563 - DNA, 25 bp, Homo sapien
tttccatactgcaatagtgtctgaa

SEQ ID NO: 4986564 - DNA, 25 bp, Homo sapien
ctgtattcagaattgagcctagttc

SEQ ID NO: 4986565 - DNA, 25 bp, Homo sapien
gttctataatgaggtctattttcca

SEQ ID NO: 4986566 - DNA, 25 bp, Homo sapien
aacatacatgcaaaccctaattcct

SEQ ID NO: 4986567 - DNA, 25 bp, Homo sapien
taacaataaggaacactctacatgt

SEQ ID NO: 4986568 - DNA, 25 bp, Homo sapien
catgttcctatgatttagcctttag

SEQ ID NO: 4986569 - DNA, 25 bp, Homo sapien
tagaaactgtttactgggtcacaaa

SEQ ID NO: 4986570 - DNA, 25 bp, Homo sapien
aaccatcttctgtgatcaaaaggca

SEQ ID NO: 4986571 - DNA, 25 bp, Homo sapien
tctgcaggcagattacagcttcttt

SEQ ID NO: 4986572 - DNA, 25 bp, Homo sapien
tctcaaggttctggataatagcttc

SEQ ID NO: 4986573 - DNA, 25 bp, Homo sapien
tctaacttgcatctcgtgtctgaca

SEQ ID NO: 4986574 - DNA, 25 bp, Homo sapien
tgtatgtgcctaacctgaagtgtgt

SEQ ID NO: 4986575 - DNA, 25 bp, Homo sapien
tatgtgcatcaatactatctggaga

SEQ ID NO: 4986576 - DNA, 25 bp, Homo sapien
tactgaagtgagagtcttgggcaac

SEQ ID NO: 4986577 - DNA, 25 bp, Homo sapien
cacttataggattaggagacgacaa

SEQ ID NO: 4986578 - DNA, 25 bp, Homo sapien
tcttctaagggacaaactgcaggac

SEQ ID NO: 4986579 - DNA, 25 bp, Homo sapien
ttcatccaaactttgtgctgctttt

SEQ ID NO: 4986580 - DNA, 25 bp, Homo sapien
tggtctgtgacatttcatccaaact

SEQ ID NO: 4986581 - DNA, 25 bp, Homo sapien
gtagatctgtaatggtctgtgacat

SEQ ID NO: 4986582 - DNA, 25 bp, Homo sapien
tcagtagatctgtaatggtctgtga

SEQ ID NO: 4986583 - DNA, 25 bp, Homo sapien
gctggtgtagaggttcaaagtcaca

SEQ ID NO: 4986584 - DNA, 25 bp, Homo sapien
caaattatgtagagcaagtacatgc

SEQ ID NO: 4986585 - DNA, 25 bp, Homo sapien
tatgtagagcaagtacatgctggtg

SEQ ID NO: 4986586 - DNA, 25 bp, Homo sapien
tacatgctggtgtagaggttcaaag

SEQ ID NO: 4986587 - DNA, 25 bp, Homo sapien
cttccgaaggacaaaatgattgcag

SEQ ID NO: 4986588 - DNA, 25 bp, Homo sapien
aggaatggctgaacttccgaaggac

SEQ ID NO: 4986589 - DNA, 25 bp, Homo sapien
cagtcaaactttcgaggcttttgag

SEQ ID NO: 4986590 - DNA, 25 bp, Homo sapien
ggaagttcacagtcaaactttcgag

SEQ ID NO: 4986591 - DNA, 25 bp, Homo sapien
cagtcccctaaacagacgatttctt

SEQ ID NO: 4986592 - DNA, 25 bp, Homo sapien
ccaggagtccagtcccctaaacaga

SEQ ID NO: 4986593 - DNA, 25 bp, Homo sapien
tctttccatctttgactaaagcacc

SEQ ID NO: 4986594 - DNA, 25 bp, Homo sapien
gcttcatataatctctttccatctt

SEQ ID NO: 4986595 - DNA, 25 bp, Homo sapien
catataatctctttccatctttgac

SEQ ID NO: 4986596 - DNA, 25 bp, Homo sapien
catctttgactaaagcaccagccca

SEQ ID NO: 4986597 - DNA, 25 bp, Homo sapien
ctccctgtagtgttttatgaacatt

SEQ ID NO: 4986598 - DNA, 25 bp, Homo sapien
tgttttatgaacatttttcttctta

SEQ ID NO: 4986599 - DNA, 25 bp, Homo sapien
tccctgtagtgttttatgaacattt

SEQ ID NO: 4986600 - DNA, 25 bp, Homo sapien
tgtactaagagcttcaacaattttg

SEQ ID NO: 4986601 - DNA, 25 bp, Homo sapien
gtacatctgaggaactgtactaaga

SEQ ID NO: 4986602 - DNA, 25 bp, Homo sapien
cagctctattacgaggcggagcaaa

SEQ ID NO: 4986603 - DNA, 25 bp, Homo sapien
aacctcaacaacagctaagcagtac

SEQ ID NO: 4986604 - DNA, 25 bp, Homo sapien
tacagatgcatcctttaagttttca

SEQ ID NO: 4986605 - DNA, 25 bp, Homo sapien
caactgatttgcgtgactcaggcat

SEQ ID NO: 4986606 - DNA, 25 bp, Homo sapien
ggtacacttctgcttaatatctaac

SEQ ID NO: 4986607 - DNA, 25 bp, Homo sapien
ttcttgtttggcagtggtacacttc

SEQ ID NO: 4986608 - DNA, 25 bp, Homo sapien
gttcattcaccagtcggccacagct

SEQ ID NO: 4986609 - DNA, 25 bp, Homo sapien
cagctagcaatcatctggtccaggg

SEQ ID NO: 4986610 - DNA, 25 bp, Homo sapien
taaatggtcgaataatccttggatc

SEQ ID NO: 4986611 - DNA, 25 bp, Homo sapien
tccagggcgtagagccgatcttcaa

SEQ ID NO: 4986612 - DNA, 25 bp, Homo sapien
ggttaggcactccaacagtggaatc

SEQ ID NO: 4986613 - DNA, 25 bp, Homo sapien
tcatgttcaggtaaagaatccagtc

SEQ ID NO: 4986614 - DNA, 25 bp, Homo sapien
gagagagcaccagttcagtggatct

SEQ ID NO: 4986615 - DNA, 25 bp, Homo sapien
actttcagcatctgcggtatctggg

SEQ ID NO: 4986616 - DNA, 25 bp, Homo sapien
tccaggttggccatgattgcagccc

SEQ ID NO: 4986617 - DNA, 25 bp, Homo sapien
gttcatcatgtacaagaccttcaca

SEQ ID NO: 4986618 - DNA, 25 bp, Homo sapien
ttaacttgatgtcttctatggactg

SEQ ID NO: 4986619 - DNA, 25 bp, Homo sapien
ccagccttggtgttgaagatgttca

SEQ ID NO: 4986620 - DNA, 25 bp, Homo sapien
agcttgggtggacagcaagaacctc

SEQ ID NO: 4986621 - DNA, 25 bp, Homo sapien
tgggaagcttgggtggacagcaaga

SEQ ID NO: 4986622 - DNA, 25 bp, Homo sapien
gcttgggtggacagcaagaacctct

SEQ ID NO: 4986623 - DNA, 25 bp, Homo sapien
gaagcttgggtggacagcaagaacc

SEQ ID NO: 4986624 - DNA, 25 bp, Homo sapien
ttggttatagcagctttagaatttg

SEQ ID NO: 4986625 - DNA, 25 bp, Homo sapien
gttactgttttggttatagcagctt

SEQ ID NO: 4986626 - DNA, 25 bp, Homo sapien
ttatagcagctttagaatttgtttt

SEQ ID NO: 4986627 - DNA, 25 bp, Homo sapien
ctatgttactgttttggttatagca

SEQ ID NO: 4986628 - DNA, 25 bp, Homo sapien
tccttgaagcaacagtatgaaaaac

SEQ ID NO: 4986629 - DNA, 25 bp, Homo sapien
aactgcaggcatcataagagattct

SEQ ID NO: 4986630 - DNA, 25 bp, Homo sapien
tccatgtcattttctgtcgaaaagg

SEQ ID NO: 4986631 - DNA, 25 bp, Homo sapien
aaggtagttttaggaatagcaggtg

SEQ ID NO: 4986632 - DNA, 25 bp, Homo sapien
aatgtgatgtaaagatgttgcattc

SEQ ID NO: 4986633 - DNA, 25 bp, Homo sapien
gatgttgcattcttgtgtgaaagga

SEQ ID NO: 4986634 - DNA, 25 bp, Homo sapien
ctgagttcccaatgtgatgtaaaga

SEQ ID NO: 4986635 - DNA, 25 bp, Homo sapien
atgttgcattcttgtgtgaaaggac

SEQ ID NO: 4986636 - DNA, 25 bp, Homo sapien
tcttcgatctgcagccatgcattct

SEQ ID NO: 4986637 - DNA, 25 bp, Homo sapien
ttgaatggcatgcttaaggtctgcc

SEQ ID NO: 4986638 - DNA, 25 bp, Homo sapien
tcccagcactgtaggtacacactct

SEQ ID NO: 4986639 - DNA, 25 bp, Homo sapien
gttgaatagcaatcttgtatttgct

SEQ ID NO: 4986640 - DNA, 25 bp, Homo sapien
caactggctgatcttaggtaaataa

SEQ ID NO: 4986641 - DNA, 25 bp, Homo sapien
gaaactacattaagtctaacacatg

SEQ ID NO: 4986642 - DNA, 25 bp, Homo sapien
gaatatgctcaaactggttatcagg

SEQ ID NO: 4986643 - DNA, 25 bp, Homo sapien
gaacaggattccataacaactggct

SEQ ID NO: 4986644 - DNA, 25 bp, Homo sapien
ctttaactttctgcatgcagacaga

SEQ ID NO: 4986645 - DNA, 25 bp, Homo sapien
agtcctgctcagtcgctgggctgga

SEQ ID NO: 4986646 - DNA, 25 bp, Homo sapien
cagacagaatgcgaaaaaaaaataa

SEQ ID NO: 4986647 - DNA, 25 bp, Homo sapien
gagtcctgctcagtcgctgggctgg

SEQ ID NO: 4986648 - DNA, 25 bp, Homo sapien
ccagtgttaaccagaaatacatata

SEQ ID NO: 4986649 - DNA, 25 bp, Homo sapien
aaatgttagagtagttccagtgtta

SEQ ID NO: 4986650 - DNA, 25 bp, Homo sapien
ctgtaagttcagtgtcaaatgttag

SEQ ID NO: 4986651 - DNA, 25 bp, Homo sapien
taaccagaaatacatataacttcat

SEQ ID NO: 4986652 - DNA, 25 bp, Homo sapien
tgaattctgtgagcttatacctcac

SEQ ID NO: 4986653 - DNA, 25 bp, Homo sapien
tatacctcaccctctgatacagtta

SEQ ID NO: 4986654 - DNA, 25 bp, Homo sapien
tgagcttatacctcaccctctgata

SEQ ID NO: 4986655 - DNA, 25 bp, Homo sapien
tctgtgagcttatacctcaccctct

SEQ ID NO: 4986656 - DNA, 25 bp, Homo sapien
tcacctctacactgagctagaaatc

SEQ ID NO: 4986657 - DNA, 25 bp, Homo sapien
agtagccgttacttgcaaattaggg

SEQ ID NO: 4986658 - DNA, 25 bp, Homo sapien
taatcgcaaattaagagtagccgtt

SEQ ID NO: 4986659 - DNA, 25 bp, Homo sapien
tgtgtaacagtagcaagtgtacagg

SEQ ID NO: 4986660 - DNA, 25 bp, Homo sapien
aaagtagattaaaactggcttatgt

SEQ ID NO: 4986661 - DNA, 25 bp, Homo sapien
gaatggcattactggttaaactcag

SEQ ID NO: 4986662 - DNA, 25 bp, Homo sapien
ctttgcttgagattggcaactgaat

SEQ ID NO: 4986663 - DNA, 25 bp, Homo sapien
ggcactgtgaaaaggactaccactt

SEQ ID NO: 4986664 - DNA, 25 bp, Homo sapien
tatcacttgtgtcagtgcacactcc

SEQ ID NO: 4986665 - DNA, 25 bp, Homo sapien
taatctcttccaatctgggacagtt

SEQ ID NO: 4986666 - DNA, 25 bp, Homo sapien
agtttccgcccctcagatccaggat

SEQ ID NO: 4986667 - DNA, 25 bp, Homo sapien
tagagtatagacgacctcagttcca

SEQ ID NO: 4986668 - DNA, 25 bp, Homo sapien
gactggaaacatgagtaagaactgt

SEQ ID NO: 4986669 - DNA, 25 bp, Homo sapien
tataccactcataatgctaagtagc

SEQ ID NO: 4986670 - DNA, 25 bp, Homo sapien
tatcattagggtttccatttgcaga

SEQ ID NO: 4986671 - DNA, 25 bp, Homo sapien
tgagaatctagttaggtaccaggca

SEQ ID NO: 4986672 - DNA, 25 bp, Homo sapien
tgcagaggaagaacttaacagacct

SEQ ID NO: 4986673 - DNA, 25 bp, Homo sapien
tacaagctgggtgattttagaaaag

SEQ ID NO: 4986674 - DNA, 25 bp, Homo sapien
gcacccggccttcaatatgattttt

SEQ ID NO: 4986675 - DNA, 25 bp, Homo sapien
ggccatgacgtgatgataactgaat

SEQ ID NO: 4986676 - DNA, 25 bp, Homo sapien
cacttaaatctcttgataaagctgc

SEQ ID NO: 4986677 - DNA, 25 bp, Homo sapien
gataaagctgcttgatctcaaattt

SEQ ID NO: 4986678 - DNA, 25 bp, Homo sapien
gctggtcatgaattccagccctcaa

SEQ ID NO: 4986679 - DNA, 25 bp, Homo sapien
cctataccactaaagtcttctttga

SEQ ID NO: 4986680 - DNA, 25 bp, Homo sapien
aaattagttaaatactctgtatggg

SEQ ID NO: 4986681 - DNA, 25 bp, Homo sapien
tattaatctttatgtggtcatgtaa

SEQ ID NO: 4986682 - DNA, 25 bp, Homo sapien
taaagctggtcagattttaattgaa

SEQ ID NO: 4986683 - DNA, 25 bp, Homo sapien
tatacctattcatgctaatgtttta

SEQ ID NO: 4986684 - DNA, 25 bp, Homo sapien
caatacatgtctgtctaaatttcca

SEQ ID NO: 4986685 - DNA, 25 bp, Homo sapien
tcatcaatacatgtctgtctaaatt

SEQ ID NO: 4986686 - DNA, 25 bp, Homo sapien
tcttcatcaatacatgtctgtctaa

SEQ ID NO: 4986687 - DNA, 25 bp, Homo sapien
tcaatacatgtctgtctaaatttcc

SEQ ID NO: 4986688 - DNA, 25 bp, Homo sapien
gcagccttcagctcgttgtagcctc

SEQ ID NO: 4986689 - DNA, 25 bp, Homo sapien
tgcagccttcagctcgttgtagcct

SEQ ID NO: 4986690 - DNA, 25 bp, Homo sapien
ttcactcagtcacctaggggctggg

SEQ ID NO: 4986691 - DNA, 25 bp, Homo sapien
ggactttcactcagtcacctagggg

SEQ ID NO: 4986692 - DNA, 25 bp, Homo sapien
cagcagggcacaaatctgtagtttc

SEQ ID NO: 4986693 - DNA, 25 bp, Homo sapien
tacaaccaaggtagtcaggctgctt

SEQ ID NO: 4986694 - DNA, 25 bp, Homo sapien
caaagtgacaatggaccaggcttca

SEQ ID NO: 4986695 - DNA, 25 bp, Homo sapien
cacctccggttcagtactcagacag

SEQ ID NO: 4986696 - DNA, 25 bp, Homo sapien
ccaaaaattcctttcgagagtcaca

SEQ ID NO: 4986697 - DNA, 25 bp, Homo sapien
gagagtcacacacttacacccctta

SEQ ID NO: 4986698 - DNA, 25 bp, Homo sapien
ggtatatgccatgtatatcagagcc

SEQ ID NO: 4986699 - DNA, 25 bp, Homo sapien
caaacctgaatatgtagagccccac

SEQ ID NO: 4986700 - DNA, 25 bp, Homo sapien
gcagcagagccagcgacccccggca

SEQ ID NO: 4986701 - DNA, 25 bp, Homo sapien
agcagagccagcgacccccggcacc

SEQ ID NO: 4986702 - DNA, 25 bp, Homo sapien
cagcagagccagcgacccccggcac

SEQ ID NO: 4986703 - DNA, 25 bp, Homo sapien
gcagagccagcgacccccggcacca

SEQ ID NO: 4986704 - DNA, 25 bp, Homo sapien
cgcggcttggtttgttattgtcgac

SEQ ID NO: 4986705 - DNA, 25 bp, Homo sapien
attcggcaccgctaagccgacacaa

SEQ ID NO: 4986706 - DNA, 25 bp, Homo sapien
attctgaggcaacgccgagggctcg

SEQ ID NO: 4986707 - DNA, 25 bp, Homo sapien
cgcggccccgaactctaggaggcag

SEQ ID NO: 4986708 - DNA, 25 bp, Homo sapien
caaactggaccaaagactttaatag

SEQ ID NO: 4986709 - DNA, 25 bp, Homo sapien
gaagagccttctcaataaatagtgc

SEQ ID NO: 4986710 - DNA, 25 bp, Homo sapien
catctcttcagctttgtattaggca

SEQ ID NO: 4986711 - DNA, 25 bp, Homo sapien
tacagtggcactcataccatagaca

SEQ ID NO: 4986712 - DNA, 25 bp, Homo sapien
gactaggattggatttccgcgtagg

SEQ ID NO: 4986713 - DNA, 25 bp, Homo sapien
ctgtaaggtcttgaaatgatggact

SEQ ID NO: 4986714 - DNA, 25 bp, Homo sapien
ttccgcgtagggttggatttccatg

SEQ ID NO: 4986715 - DNA, 25 bp, Homo sapien
gggtatttagcaacttcgtctgtct

SEQ ID NO: 4986716 - DNA, 25 bp, Homo sapien
tatcctggtccacccaagtggatgt

SEQ ID NO: 4986717 - DNA, 25 bp, Homo sapien
tttcctatggtccttctaagctgcc

SEQ ID NO: 4986718 - DNA, 25 bp, Homo sapien
tttgtcctccgaaccatcacagagc

SEQ ID NO: 4986719 - DNA, 25 bp, Homo sapien
ttatctgggtacctgtcctgtttcc

SEQ ID NO: 4986720 - DNA, 25 bp, Homo sapien
acaagggccagtgtttgtgaaaatt

SEQ ID NO: 4986721 - DNA, 25 bp, Homo sapien
caagggccagtgtttgtgaaaatta

SEQ ID NO: 4986722 - DNA, 25 bp, Homo sapien
gcaagatgtcctcaaccaggcctat

SEQ ID NO: 4986723 - DNA, 25 bp, Homo sapien
caaccaggcctatcaaagtccttcc

SEQ ID NO: 4986724 - DNA, 25 bp, Homo sapien
caagatgtcctcaaccaggcctatc

SEQ ID NO: 4986725 - DNA, 25 bp, Homo sapien
tccagggaagtctgtagctgcagtg

SEQ ID NO: 4986726 - DNA, 25 bp, Homo sapien
cagtaaggttgtatgttgttccgat

SEQ ID NO: 4986727 - DNA, 25 bp, Homo sapien
ttgggctttgcagcccttgaacagc

SEQ ID NO: 4986728 - DNA, 25 bp, Homo sapien
tgtcccatggtaaggaattattctc

SEQ ID NO: 4986729 - DNA, 25 bp, Homo sapien
caagaggagccgttgatctgatctg

SEQ ID NO: 4986730 - DNA, 25 bp, Homo sapien
acatagctggcagcctgatggcggt

SEQ ID NO: 4986731 - DNA, 25 bp, Homo sapien
ccccatggctttcgtgcagacatag

SEQ ID NO: 4986732 - DNA, 25 bp, Homo sapien
gactggttgaagagtctacctacag

SEQ ID NO: 4986733 - DNA, 25 bp, Homo sapien
gatcgtgacaccataagtaagacat

SEQ ID NO: 4986734 - DNA, 25 bp, Homo sapien
gactgatcgtgacaccataagtaag

SEQ ID NO: 4986735 - DNA, 25 bp, Homo sapien
ctctgactgatcgtgacaccataag

SEQ ID NO: 4986736 - DNA, 25 bp, Homo sapien
cgtgacaccataagtaagacatata

SEQ ID NO: 4986737 - DNA, 25 bp, Homo sapien
cccctgtttggtgcccatgaatcac

SEQ ID NO: 4986738 - DNA, 25 bp, Homo sapien
tctgcatgtgttgctggtgtcccct

SEQ ID NO: 4986739 - DNA, 25 bp, Homo sapien
acgatctgcatgtgttgctggtgtc

SEQ ID NO: 4986740 - DNA, 25 bp, Homo sapien
gctggtgtcccctgtttggtgccca

SEQ ID NO: 4986741 - DNA, 25 bp, Homo sapien
gtttcagactagtcagattctctgt

SEQ ID NO: 4986742 - DNA, 25 bp, Homo sapien
tgtgtttcagactagtcagattctc

SEQ ID NO: 4986743 - DNA, 25 bp, Homo sapien
tcagactagtcagattctctgttgc

SEQ ID NO: 4986744 - DNA, 25 bp, Homo sapien
tgtgtgtttcagactagtcagattc

SEQ ID NO: 4986745 - DNA, 25 bp, Homo sapien
gccttgtccagtgcggagaaatctc

SEQ ID NO: 4986746 - DNA, 25 bp, Homo sapien
ggccttgtccagtgcggagaaatct

SEQ ID NO: 4986747 - DNA, 25 bp, Homo sapien
ccttgtccagtgcggagaaatctcc

SEQ ID NO: 4986748 - DNA, 25 bp, Homo sapien
catctcccaggttccagcgatcctc

SEQ ID NO: 4986749 - DNA, 25 bp, Homo sapien
tggaatgaactggtgcgatctcggc

SEQ ID NO: 4986750 - DNA, 25 bp, Homo sapien
tcactgcaacctccatctcccaggt

SEQ ID NO: 4986751 - DNA, 25 bp, Homo sapien
ctccatctcccaggttccagcgatc

SEQ ID NO: 4986752 - DNA, 25 bp, Homo sapien
catctgttgttgctcgctgtactta

SEQ ID NO: 4986753 - DNA, 25 bp, Homo sapien
tccagaatcatctgttgttgctcgc

SEQ ID NO: 4986754 - DNA, 25 bp, Homo sapien
aatcatctgttgttgctcgctgtac

SEQ ID NO: 4986755 - DNA, 25 bp, Homo sapien
tgttgttgctcgctgtacttagcca

SEQ ID NO: 4986756 - DNA, 25 bp, Homo sapien
agttggtgaccctatgtgtctgggt

SEQ ID NO: 4986757 - DNA, 25 bp, Homo sapien
aggtgtggcccacagcttgcctttt

SEQ ID NO: 4986758 - DNA, 25 bp, Homo sapien
agctgtccacctgagttggtgaccc

SEQ ID NO: 4986759 - DNA, 25 bp, Homo sapien
ctcctttctcatccagctgtccacc

SEQ ID NO: 4986760 - DNA, 25 bp, Homo sapien
gactcatgcgctgccgggaaagtgc

SEQ ID NO: 4986761 - DNA, 25 bp, Homo sapien
aagtttcatgtgactcatgcgctgc

SEQ ID NO: 4986762 - DNA, 25 bp, Homo sapien
aagtgctgtgtgtagaagacgaacc

SEQ ID NO: 4986763 - DNA, 25 bp, Homo sapien
tgtagaagacgaaccaggaacattc

SEQ ID NO: 4986764 - DNA, 25 bp, Homo sapien
gccccataagatgtggtttctgttt

SEQ ID NO: 4986765 - DNA, 25 bp, Homo sapien
tctgtttcaacatcagacacagtct

SEQ ID NO: 4986766 - DNA, 25 bp, Homo sapien
cacagtgggccccataagatgtggt

SEQ ID NO: 4986767 - DNA, 25 bp, Homo sapien
tcttctgcacagtgggccccataag

SEQ ID NO: 4986768 - DNA, 25 bp, Homo sapien
gctttcatgtgtcccttagccagag

SEQ ID NO: 4986769 - DNA, 25 bp, Homo sapien
cttggccaaccctgatgaagacatt

SEQ ID NO: 4986770 - DNA, 25 bp, Homo sapien
tgaagacattcggtgtccttctgtg

SEQ ID NO: 4986771 - DNA, 25 bp, Homo sapien
cagagccaaagagtccagcgcacag

SEQ ID NO: 4986772 - DNA, 25 bp, Homo sapien
cccctctggtgcccggttgtcctca

SEQ ID NO: 4986773 - DNA, 25 bp, Homo sapien
cggttgtcctcactgtgaccacggg

SEQ ID NO: 4986774 - DNA, 25 bp, Homo sapien
gcccctctggtgcccggttgtcctc

SEQ ID NO: 4986775 - DNA, 25 bp, Homo sapien
tgcccggttgtcctcactgtgacca

SEQ ID NO: 4986776 - DNA, 25 bp, Homo sapien
tcttgtacaaggagaagtatggcct

SEQ ID NO: 4986777 - DNA, 25 bp, Homo sapien
gggcccatcgcagtaatggctgctt

SEQ ID NO: 4986778 - DNA, 25 bp, Homo sapien
cagggccaggatcaacacaggcata

SEQ ID NO: 4986779 - DNA, 25 bp, Homo sapien
acaggcatagacatcccctggcatc

SEQ ID NO: 4986780 - DNA, 25 bp, Homo sapien
cataccaactgtgggtttttgttca

SEQ ID NO: 4986781 - DNA, 25 bp, Homo sapien
gatggcaaatacataccaactgtgg

SEQ ID NO: 4986782 - DNA, 25 bp, Homo sapien
ccaactgtgggtttttgttcaatat

SEQ ID NO: 4986783 - DNA, 25 bp, Homo sapien
gttcaatattccatataatccaata

SEQ ID NO: 4986784 - DNA, 25 bp, Homo sapien
gaaatggtactctgtgttggttaaa

SEQ ID NO: 4986785 - DNA, 25 bp, Homo sapien
aatggtactctgtgttggttaaaca

SEQ ID NO: 4986786 - DNA, 25 bp, Homo sapien
ggtactctgtgttggttaaacatct

SEQ ID NO: 4986787 - DNA, 25 bp, Homo sapien
tgaaatggtactctgtgttggttaa

SEQ ID NO: 4986788 - DNA, 25 bp, Homo sapien
caaggatcagagcaagaaggagcag

SEQ ID NO: 4986789 - DNA, 25 bp, Homo sapien
ggcaaggatcagagcaagaaggagc

SEQ ID NO: 4986790 - DNA, 25 bp, Homo sapien
ttgaagatggagatggcaaggatca

SEQ ID NO: 4986791 - DNA, 25 bp, Homo sapien
cttgaagatggagatggcaaggatc

SEQ ID NO: 4986792 - DNA, 25 bp, Homo sapien
gctcacagcgaagccggattacaga

SEQ ID NO: 4986793 - DNA, 25 bp, Homo sapien
gccgctgtgcccgtcagaagcttct

SEQ ID NO: 4986794 - DNA, 25 bp, Homo sapien
ctaggtgcctgtgccgctgtgcccg

SEQ ID NO: 4986795 - DNA, 25 bp, Homo sapien
gtcacttctgttgctaagttgctca

SEQ ID NO: 4986796 - DNA, 25 bp, Homo sapien
aaccagtttgcagtacttgagcctc

SEQ ID NO: 4986797 - DNA, 25 bp, Homo sapien
taggatcccatttggatgagtcaga

SEQ ID NO: 4986798 - DNA, 25 bp, Homo sapien
ggatgagtcagagattcttggaacc

SEQ ID NO: 4986799 - DNA, 25 bp, Homo sapien
tgcagtacttgagcctctctgcttc

SEQ ID NO: 4986800 - DNA, 25 bp, Homo sapien
cctgtgcactaacaataattcttcg

SEQ ID NO: 4986801 - DNA, 25 bp, Homo sapien
ttcttcgaagagttgctgagtgcag

SEQ ID NO: 4986802 - DNA, 25 bp, Homo sapien
cagagggcattccagtgtaggcgat

SEQ ID NO: 4986803 - DNA, 25 bp, Homo sapien
gaggagtcctcacattgcatctatc

SEQ ID NO: 4986804 - DNA, 25 bp, Homo sapien
tgacactattaagttctagggatgc

SEQ ID NO: 4986805 - DNA, 25 bp, Homo sapien
agttctagggatgctacggccaaaa

SEQ ID NO: 4986806 - DNA, 25 bp, Homo sapien
caatgtggctcttgacactattaag

SEQ ID NO: 4986807 - DNA, 25 bp, Homo sapien
ctagggatgctacggccaaaatatg

SEQ ID NO: 4986808 - DNA, 25 bp, Homo sapien
gtggctcctccataaggaccccaaa

SEQ ID NO: 4986809 - DNA, 25 bp, Homo sapien
tgtggctcctccataaggaccccaa

SEQ ID NO: 4986810 - DNA, 25 bp, Homo sapien
acatggaggggttaaaaacatgtct

SEQ ID NO: 4986811 - DNA, 25 bp, Homo sapien
agtcagcacccagtctagctggaaa

SEQ ID NO: 4986812 - DNA, 25 bp, Homo sapien
tctttcagtcagcacccagtctagc

SEQ ID NO: 4986813 - DNA, 25 bp, Homo sapien
ccagtctagctggaaacatggaggg

SEQ ID NO: 4986814 - DNA, 25 bp, Homo sapien
actctgagctggatgaatctcagac

SEQ ID NO: 4986815 - DNA, 25 bp, Homo sapien
gttgactgtgatgcatctccctcca

SEQ ID NO: 4986816 - DNA, 25 bp, Homo sapien
ttgttgactgtgatgcatctccctc

SEQ ID NO: 4986817 - DNA, 25 bp, Homo sapien
tgactgtgatgcatctccctccaca

SEQ ID NO: 4986818 - DNA, 25 bp, Homo sapien
tccccttgaagaccagagtagcaga

SEQ ID NO: 4986819 - DNA, 25 bp, Homo sapien
gcttggagagctgaaacgagcgtcc

SEQ ID NO: 4986820 - DNA, 25 bp, Homo sapien
tttcaacaggtagcagagagcgctc

SEQ ID NO: 4986821 - DNA, 25 bp, Homo sapien
ggaacctccgccagctgataacttg

SEQ ID NO: 4986822 - DNA, 25 bp, Homo sapien
cgggtaaatactggtcctggagtca

SEQ ID NO: 4986823 - DNA, 25 bp, Homo sapien
agacggcatccggtaggtagtcccg

SEQ ID NO: 4986824 - DNA, 25 bp, Homo sapien
accagggagattggccagcatccta

SEQ ID NO: 4986825 - DNA, 25 bp, Homo sapien
gccagcatcctacctgtgtttttgt

SEQ ID NO: 4986826 - DNA, 25 bp, Homo sapien
caaggcatggactggcttctgagta

SEQ ID NO: 4986827 - DNA, 25 bp, Homo sapien
tcttggaatctatggagatgactgc

SEQ ID NO: 4986828 - DNA, 25 bp, Homo sapien
gggctgacattgctgttcatcccca

SEQ ID NO: 4986829 - DNA, 25 bp, Homo sapien
gatgactgctggaaaaatacacggg

SEQ ID NO: 4986830 - DNA, 25 bp, Homo sapien
taccacggaaagagtgggtgtttgc

SEQ ID NO: 4986831 - DNA, 25 bp, Homo sapien
tgaggtaacccaagggccagagtca

SEQ ID NO: 4986832 - DNA, 25 bp, Homo sapien
tgttcgaccagaaggttaactcacc

SEQ ID NO: 4986833 - DNA, 25 bp, Homo sapien
gagtcacaactgcaataaccaggcc

SEQ ID NO: 4986834 - DNA, 25 bp, Homo sapien
aatgtgggagaaattgccagagttc

SEQ ID NO: 4986835 - DNA, 25 bp, Homo sapien
gggagaaattgccagagttcccaaa

SEQ ID NO: 4986836 - DNA, 25 bp, Homo sapien
agaaattgccagagttcccaaaggt

SEQ ID NO: 4986837 - DNA, 25 bp, Homo sapien
tgtgggagaaattgccagagttccc

SEQ ID NO: 4986838 - DNA, 25 bp, Homo sapien
aatcgagcttcgcagttgcagccat

SEQ ID NO: 4986839 - DNA, 25 bp, Homo sapien
cagaaaaatcgagcttcgcagttgc

SEQ ID NO: 4986840 - DNA, 25 bp, Homo sapien
ggatgactggtgcagaaaaatcgag

SEQ ID NO: 4986841 - DNA, 25 bp, Homo sapien
ggtgcagaaaaatcgagcttcgcag

SEQ ID NO: 4986842 - DNA, 25 bp, Homo sapien
tgatcaacagcagcgttacctgaag

SEQ ID NO: 4986843 - DNA, 25 bp, Homo sapien
cagtcagatagctggataagtgatc

SEQ ID NO: 4986844 - DNA, 25 bp, Homo sapien
ccataaatgtaggttgaggcctgaa

SEQ ID NO: 4986845 - DNA, 25 bp, Homo sapien
attgtcaatatcaagctcaagccca

SEQ ID NO: 4986846 - DNA, 25 bp, Homo sapien
tcacgacagtgcaaaccgtcagcat

SEQ ID NO: 4986847 - DNA, 25 bp, Homo sapien
cagtgcaaaccgtcagcattcttct

SEQ ID NO: 4986848 - DNA, 25 bp, Homo sapien
gtgtggatgcatcacgacagtgcaa

SEQ ID NO: 4986849 - DNA, 25 bp, Homo sapien
gatgcatcacgacagtgcaaaccgt

SEQ ID NO: 4986850 - DNA, 25 bp, Homo sapien
tctctctccaagagcttcatactca

SEQ ID NO: 4986851 - DNA, 25 bp, Homo sapien
gatgctggctaatactctctctcca

SEQ ID NO: 4986852 - DNA, 25 bp, Homo sapien
tgattactgtgcttgtggatgctgg

SEQ ID NO: 4986853 - DNA, 25 bp, Homo sapien
ctcatcacgacgtgggtaaattttg

SEQ ID NO: 4986854 - DNA, 25 bp, Homo sapien
cttccagaataaggagaaaaatatt

SEQ ID NO: 4986855 - DNA, 25 bp, Homo sapien
gcacgccacgagtcaagggtgccct

SEQ ID NO: 4986856 - DNA, 25 bp, Homo sapien
ggctgctccagtgctttgtgtcttt

SEQ ID NO: 4986857 - DNA, 25 bp, Homo sapien
tccatcgtggacacaaagtaaagta

SEQ ID NO: 4986858 - DNA, 25 bp, Homo sapien
gatgggtttgcagttggagcctcta

SEQ ID NO: 4986859 - DNA, 25 bp, Homo sapien
tgatcatttcgtttttaatgttcat

SEQ ID NO: 4986860 - DNA, 25 bp, Homo sapien
gttagccatgatcatttcgttttta

SEQ ID NO: 4986861 - DNA, 25 bp, Homo sapien
agccatgatcatttcgtttttaatg

SEQ ID NO: 4986862 - DNA, 25 bp, Homo sapien
gatcatttcgtttttaatgttcatg

SEQ ID NO: 4986863 - DNA, 25 bp, Homo sapien
ggtgagcaaggagagggcatcaaat

SEQ ID NO: 4986864 - DNA, 25 bp, Homo sapien
ctttggcacagccagggtctgacat

SEQ ID NO: 4986865 - DNA, 25 bp, Homo sapien
atggccagggtgagcaaggagaggg

SEQ ID NO: 4986866 - DNA, 25 bp, Homo sapien
gcacagccagggtctgacatggcca

SEQ ID NO: 4986867 - DNA, 25 bp, Homo sapien
ttgggtctccaagacaaagggagcc

SEQ ID NO: 4986868 - DNA, 25 bp, Homo sapien
tttactttcccaacatcagtgcagc

SEQ ID NO: 4986869 - DNA, 25 bp, Homo sapien
aaagggagcctctgcttcaatgacc

SEQ ID NO: 4986870 - DNA, 25 bp, Homo sapien
taaggcccaaggcaaggttctgtcc

SEQ ID NO: 4986871 - DNA, 25 bp, Homo sapien
gaatatcaaacattgccagtttata

SEQ ID NO: 4986872 - DNA, 25 bp, Homo sapien
tgaatatcaaacattgccagtttat

SEQ ID NO: 4986873 - DNA, 25 bp, Homo sapien
aatatcaaacattgccagtttatac

SEQ ID NO: 4986874 - DNA, 25 bp, Homo sapien
tatcaaacattgccagtttatacat

SEQ ID NO: 4986875 - DNA, 25 bp, Homo sapien
gcgaatacattcctagtccacagag

SEQ ID NO: 4986876 - DNA, 25 bp, Homo sapien
gtctgctgcttatttccagcgaata

SEQ ID NO: 4986877 - DNA, 25 bp, Homo sapien
ctgtgtgctgtcctcaagctgccca

SEQ ID NO: 4986878 - DNA, 25 bp, Homo sapien
gcaatcaggccggtcagggctccag

SEQ ID NO: 4986879 - DNA, 25 bp, Homo sapien
taacaggcagggattgcaacaatct

SEQ ID NO: 4986880 - DNA, 25 bp, Homo sapien
caaagaaactggctattggtggcat

SEQ ID NO: 4986881 - DNA, 25 bp, Homo sapien
aaaatgtgggacaatttgtagctcc

SEQ ID NO: 4986882 - DNA, 25 bp, Homo sapien
taaagcctgatagcaatatgtgcaa

SEQ ID NO: 4986883 - DNA, 25 bp, Homo sapien
cagagccgtcagaaataatgctgca

SEQ ID NO: 4986884 - DNA, 25 bp, Homo sapien
agtctatcattggtactggtaccaa

SEQ ID NO: 4986885 - DNA, 25 bp, Homo sapien
gagccgtcagaaataatgctgcata

SEQ ID NO: 4986886 - DNA, 25 bp, Homo sapien
tccagtctatcattggtactggtac

SEQ ID NO: 4986887 - DNA, 25 bp, Homo sapien
gaagcatgagccttctggtcacaag

SEQ ID NO: 4986888 - DNA, 25 bp, Homo sapien
ctgggaagcatgagccttctggtca

SEQ ID NO: 4986889 - DNA, 25 bp, Homo sapien
agcatgagccttctggtcacaagtt

SEQ ID NO: 4986890 - DNA, 25 bp, Homo sapien
ggaagcatgagccttctggtcacaa

SEQ ID NO: 4986891 - DNA, 25 bp, Homo sapien
ttcccgcagttcaacagcattcaag

SEQ ID NO: 4986892 - DNA, 25 bp, Homo sapien
ggttaggagaccttgaccagactta

SEQ ID NO: 4986893 - DNA, 25 bp, Homo sapien
gacttagccctaatctttccagcag

SEQ ID NO: 4986894 - DNA, 25 bp, Homo sapien
ttcaaggatgggtatattggtcttc

SEQ ID NO: 4986895 - DNA, 25 bp, Homo sapien
ctctgcccacgactgtgctggctgc

SEQ ID NO: 4986896 - DNA, 25 bp, Homo sapien
ggctctgcccacgactgtgctggct

SEQ ID NO: 4986897 - DNA, 25 bp, Homo sapien
gctctgcccacgactgtgctggctg

SEQ ID NO: 4986898 - DNA, 25 bp, Homo sapien
ctgaagaagttctgggtcatggtat

SEQ ID NO: 4986899 - DNA, 25 bp, Homo sapien
tgttgtgttcttcacatgtgttttg

SEQ ID NO: 4986900 - DNA, 25 bp, Homo sapien
tgttcttcacatgtgttttgggcct

SEQ ID NO: 4986901 - DNA, 25 bp, Homo sapien
tgggtcatggtatgctggctttgct

SEQ ID NO: 4986902 - DNA, 25 bp, Homo sapien
aaggtaggtgttgagcaaattccgt

SEQ ID NO: 4986903 - DNA, 25 bp, Homo sapien
ggtaggtgttgagcaaattccgtta

SEQ ID NO: 4986904 - DNA, 25 bp, Homo sapien
ttaaggtaggtgttgagcaaattcc

SEQ ID NO: 4986905 - DNA, 25 bp, Homo sapien
gtaggtgttgagcaaattccgttac

SEQ ID NO: 4986906 - DNA, 25 bp, Homo sapien
cctgcagtaggacctggtgatccat

SEQ ID NO: 4986907 - DNA, 25 bp, Homo sapien
atggagaagggcctgctttttgtca

SEQ ID NO: 4986908 - DNA, 25 bp, Homo sapien
ggtgatccatcaggaagccagaatg

SEQ ID NO: 4986909 - DNA, 25 bp, Homo sapien
caacaaatccttctttaaagctggg

SEQ ID NO: 4986910 - DNA, 25 bp, Homo sapien
agttggagcctcgggcaagcctgtt

SEQ ID NO: 4986911 - DNA, 25 bp, Homo sapien
aaaggaaacccaattcagtcctgat

SEQ ID NO: 4986912 - DNA, 25 bp, Homo sapien
aattcagtcctgatcccgctttcct

SEQ ID NO: 4986913 - DNA, 25 bp, Homo sapien
tccatggcgtaaagtagagctagct

SEQ ID NO: 4986914 - DNA, 25 bp, Homo sapien
tgtgttgaccacaagacttccagct

SEQ ID NO: 4986915 - DNA, 25 bp, Homo sapien
tcagggatagcttgcatttaaacac

SEQ ID NO: 4986916 - DNA, 25 bp, Homo sapien
aacacccaagtcaaaagtccacatt

SEQ ID NO: 4986917 - DNA, 25 bp, Homo sapien
cataatgggataaaccctcagggat

SEQ ID NO: 4986918 - DNA, 25 bp, Homo sapien
caaagaacttggtgccgaatggcat

SEQ ID NO: 4986919 - DNA, 25 bp, Homo sapien
acaaagaacttggtgccgaatggca

SEQ ID NO: 4986920 - DNA, 25 bp, Homo sapien
gacaaagaacttggtgccgaatggc

SEQ ID NO: 4986921 - DNA, 25 bp, Homo sapien
gagtgtctttgctacactcagttcc

SEQ ID NO: 4986922 - DNA, 25 bp, Homo sapien
cagaaacctgagtgtctttgctaca

SEQ ID NO: 4986923 - DNA, 25 bp, Homo sapien
gtgtctttgctacactcagttccat

SEQ ID NO: 4986924 - DNA, 25 bp, Homo sapien
gaaacctgagtgtctttgctacact

SEQ ID NO: 4986925 - DNA, 25 bp, Homo sapien
tgcagagaagttccctttaccacct

SEQ ID NO: 4986926 - DNA, 25 bp, Homo sapien
tgcacagctcaacctctgcagagaa

SEQ ID NO: 4986927 - DNA, 25 bp, Homo sapien
ctgcctcaccgagggctgctgcaga

SEQ ID NO: 4986928 - DNA, 25 bp, Homo sapien
tacacaacagtctccatgctgtctg

SEQ ID NO: 4986929 - DNA, 25 bp, Homo sapien
tctccctgtgctgttgggccttcta

SEQ ID NO: 4986930 - DNA, 25 bp, Homo sapien
ctccctgtgctgttgggccttctac

SEQ ID NO: 4986931 - DNA, 25 bp, Homo sapien
gatgtgggacagtaatgacagctgt

SEQ ID NO: 4986932 - DNA, 25 bp, Homo sapien
ctccttggaggtgtgaattgcatca

SEQ ID NO: 4986933 - DNA, 25 bp, Homo sapien
ccttctgactcaagttaagtttcgg

SEQ ID NO: 4986934 - DNA, 25 bp, Homo sapien
gaagtacatacattggatgtgggac

SEQ ID NO: 4986935 - DNA, 25 bp, Homo sapien
cactggaaactgagggaggtccgct

SEQ ID NO: 4986936 - DNA, 25 bp, Homo sapien
ggtatcaacaatgtgtgcacacctg

SEQ ID NO: 4986937 - DNA, 25 bp, Homo sapien
ggatccccaaggagatgcgcaaccc

SEQ ID NO: 4986938 - DNA, 25 bp, Homo sapien
aggttctggtcacaggtatcaacaa

SEQ ID NO: 4986939 - DNA, 25 bp, Homo sapien
tcttgctaatggtcgagcatgctgg

SEQ ID NO: 4986940 - DNA, 25 bp, Homo sapien
cacatttatattcttgggagcagac

SEQ ID NO: 4986941 - DNA, 25 bp, Homo sapien
gctggcaagcttccgggtacataat

SEQ ID NO: 4986942 - DNA, 25 bp, Homo sapien
gcatgctggttagccaccatttctg

SEQ ID NO: 4986943 - DNA, 25 bp, Homo sapien
tcccagaggccgtgagccaggacgt

SEQ ID NO: 4986944 - DNA, 25 bp, Homo sapien
ttccacatatcccatcacactgtgt

SEQ ID NO: 4986945 - DNA, 25 bp, Homo sapien
tcccatcacactgtgtccctcctca

SEQ ID NO: 4986946 - DNA, 25 bp, Homo sapien
cttttccacatatcccatcacactg

SEQ ID NO: 4986947 - DNA, 25 bp, Homo sapien
catttgggctgactcacagcctctg

SEQ ID NO: 4986948 - DNA, 25 bp, Homo sapien
aaatatgctctccacatgcgttcct

SEQ ID NO: 4986949 - DNA, 25 bp, Homo sapien
gcaaatatgctctccacatgcgttc

SEQ ID NO: 4986950 - DNA, 25 bp, Homo sapien
accagcaaatatgctctccacatgc

SEQ ID NO: 4986951 - DNA, 25 bp, Homo sapien
cagcaaatatgctctccacatgcgt

SEQ ID NO: 4986952 - DNA, 25 bp, Homo sapien
tcatcgtatttcatcccaggactag

SEQ ID NO: 4986953 - DNA, 25 bp, Homo sapien
tgataggacacacaacctttcacag

SEQ ID NO: 4986954 - DNA, 25 bp, Homo sapien
ttgccttaaggaagctgggttatac

SEQ ID NO: 4986955 - DNA, 25 bp, Homo sapien
aatgttccaatttaaagtcagccag

SEQ ID NO: 4986956 - DNA, 25 bp, Homo sapien
cagggtggaaagaatagggttcatg

SEQ ID NO: 4986957 - DNA, 25 bp, Homo sapien
gtggaaagaatagggttcatgtaga

SEQ ID NO: 4986958 - DNA, 25 bp, Homo sapien
gaaagaatagggttcatgtagagaa

SEQ ID NO: 4986959 - DNA, 25 bp, Homo sapien
gaatagggttcatgtagagaatgga

SEQ ID NO: 4986960 - DNA, 25 bp, Homo sapien
caattaacgctgtaagagcacgtga

SEQ ID NO: 4986961 - DNA, 25 bp, Homo sapien
tgaataaatggcaatgtggtccctg

SEQ ID NO: 4986962 - DNA, 25 bp, Homo sapien
tacagctactattctctccttgggc

SEQ ID NO: 4986963 - DNA, 25 bp, Homo sapien
ggacaccccttgtgggcacatacag

SEQ ID NO: 4986964 - DNA, 25 bp, Homo sapien
tagaggcaaacatggtcagagtaac

SEQ ID NO: 4986965 - DNA, 25 bp, Homo sapien
taaattccagaggatgcagccctag

SEQ ID NO: 4986966 - DNA, 25 bp, Homo sapien
catgataatctggagtagaggcaaa

SEQ ID NO: 4986967 - DNA, 25 bp, Homo sapien
catacaccaccgagaacttgcatgg

SEQ ID NO: 4986968 - DNA, 25 bp, Homo sapien
ggtatgcccttcacagaatgccatg

SEQ ID NO: 4986969 - DNA, 25 bp, Homo sapien
ggatatcattagtgtgccctcagga

SEQ ID NO: 4986970 - DNA, 25 bp, Homo sapien
cagggagtctgaaagagatcatgcc

SEQ ID NO: 4986971 - DNA, 25 bp, Homo sapien
caaataaactagatcctgcgaaggc

SEQ ID NO: 4986972 - DNA, 25 bp, Homo sapien
gatgggtgctgaaccttacctagca

SEQ ID NO: 4986973 - DNA, 25 bp, Homo sapien
tctgtgccctagagaagaggtgcat

SEQ ID NO: 4986974 - DNA, 25 bp, Homo sapien
gacctgttcccttgttcatcagagg

SEQ ID NO: 4986975 - DNA, 25 bp, Homo sapien
gatgtttccactgatcacgaacgtg

SEQ ID NO: 4986976 - DNA, 25 bp, Homo sapien
ttcccgaagaactgtacgaagacat

SEQ ID NO: 4986977 - DNA, 25 bp, Homo sapien
aactcctctcttcccgaagaactgt

SEQ ID NO: 4986978 - DNA, 25 bp, Homo sapien
agtagtgatctgagttaaacctaga

SEQ ID NO: 4986979 - DNA, 25 bp, Homo sapien
taaacctagatcattgaactcctct

SEQ ID NO: 4986980 - DNA, 25 bp, Homo sapien
tgcgatctttctctcgggagccaga

SEQ ID NO: 4986981 - DNA, 25 bp, Homo sapien
tctggtgatcctacgcaggttgcga

SEQ ID NO: 4986982 - DNA, 25 bp, Homo sapien
gatgtccctcaggtaagcaggatcc

SEQ ID NO: 4986983 - DNA, 25 bp, Homo sapien
gaagaggtcccaccaggagtagtca

SEQ ID NO: 4986984 - DNA, 25 bp, Homo sapien
tgcggaagtccaaagccttcacggg

SEQ ID NO: 4986985 - DNA, 25 bp, Homo sapien
caagtagaccgtactctgaaagggc

SEQ ID NO: 4986986 - DNA, 25 bp, Homo sapien
tggaaattactatcttgcacagcac

SEQ ID NO: 4986987 - DNA, 25 bp, Homo sapien
tggtgcctccaaggactattgcaga

SEQ ID NO: 4986988 - DNA, 25 bp, Homo sapien
gtaactaaagcatctgccaaagcca

SEQ ID NO: 4986989 - DNA, 25 bp, Homo sapien
ggttgtagtaactaaagcatctgcc

SEQ ID NO: 4986990 - DNA, 25 bp, Homo sapien
tagtaactaaagcatctgccaaagc

SEQ ID NO: 4986991 - DNA, 25 bp, Homo sapien
tgtagtaactaaagcatctgccaaa

SEQ ID NO: 4986992 - DNA, 25 bp, Homo sapien
cggatgatcacgaacatgaccagcg

SEQ ID NO: 4986993 - DNA, 25 bp, Homo sapien
catgaccagcgagttgcccaccaag

SEQ ID NO: 4986994 - DNA, 25 bp, Homo sapien
aagcccacgacgaacactacggagt

SEQ ID NO: 4986995 - DNA, 25 bp, Homo sapien
tagaccgccgtgatgatgaccggga

SEQ ID NO: 4986996 - DNA, 25 bp, Homo sapien
tgctgtcgggctcggcccagccggg

SEQ ID NO: 4986997 - DNA, 25 bp, Homo sapien
ctcggcccagccgggaaaccaggcg

SEQ ID NO: 4986998 - DNA, 25 bp, Homo sapien
tgtcgggctcggcccagccgggaaa

SEQ ID NO: 4986999 - DNA, 25 bp, Homo sapien
ctgccgttgctgtcgggctcggccc

SEQ ID NO: 4987000 - DNA, 25 bp, Homo sapien
cggaagatctggatcggggagtcca

SEQ ID NO: 4987001 - DNA, 25 bp, Homo sapien
cggctccccgcggaagatctggatc

SEQ ID NO: 4987002 - DNA, 25 bp, Homo sapien
ctccccgcggaagatctggatcggg

SEQ ID NO: 4987003 - DNA, 25 bp, Homo sapien
ggaagatctggatcggggagtccat

SEQ ID NO: 4987004 - DNA, 25 bp, Homo sapien
gaaggcgaggacaggcggcacctgc

SEQ ID NO: 4987005 - DNA, 25 bp, Homo sapien
cgattgcagcaggaaggcgaggaca

SEQ ID NO: 4987006 - DNA, 25 bp, Homo sapien
aaggcgaggacaggcggcacctgcg

SEQ ID NO: 4987007 - DNA, 25 bp, Homo sapien
ggtggggcgattgcagcaggaaggc

SEQ ID NO: 4987008 - DNA, 25 bp, Homo sapien
aggcaccggcccctggtggaactgt

SEQ ID NO: 4987009 - DNA, 25 bp, Homo sapien
gggcgaagagcgctcgctccttctc

SEQ ID NO: 4987010 - DNA, 25 bp, Homo sapien
gcaggacagggagaacggacttctc

SEQ ID NO: 4987011 - DNA, 25 bp, Homo sapien
ctggacgcggagaggcaaactttgc

SEQ ID NO: 4987012 - DNA, 25 bp, Homo sapien
cagagacaggcgaaggcgaggtttt

SEQ ID NO: 4987013 - DNA, 25 bp, Homo sapien
tctcagcgcacgtctcccactactg

SEQ ID NO: 4987014 - DNA, 25 bp, Homo sapien
tctcccactactggcggcggctctg

SEQ ID NO: 4987015 - DNA, 25 bp, Homo sapien
cctggtaggtgctgaaccgcgcgct

SEQ ID NO: 4987016 - DNA, 25 bp, Homo sapien
agacacaaagggagcaagggctcag

SEQ ID NO: 4987017 - DNA, 25 bp, Homo sapien
tagtccaagggtagctgtcagatcc

SEQ ID NO: 4987018 - DNA, 25 bp, Homo sapien
tatacggccgcgaatctgagcgtcc

SEQ ID NO: 4987019 - DNA, 25 bp, Homo sapien
gatcctgctgagtgagagacattct

SEQ ID NO: 4987020 - DNA, 25 bp, Homo sapien
aaagccactttgtgtctcagctgat

SEQ ID NO: 4987021 - DNA, 25 bp, Homo sapien
gctgatcagcctctatctgcccagt

SEQ ID NO: 4987022 - DNA, 25 bp, Homo sapien
ccatgggtcacacatggcaaagcca

SEQ ID NO: 4987023 - DNA, 25 bp, Homo sapien
tgcccagtttgtaggaagttgagtt

SEQ ID NO: 4987024 - DNA, 25 bp, Homo sapien
gagagggactggttgactgctagtt

SEQ ID NO: 4987025 - DNA, 25 bp, Homo sapien
agggactggttgactgctagtttgg

SEQ ID NO: 4987026 - DNA, 25 bp, Homo sapien
agagggactggttgactgctagttt

SEQ ID NO: 4987027 - DNA, 25 bp, Homo sapien
agagagggactggttgactgctagt

SEQ ID NO: 4987028 - DNA, 25 bp, Homo sapien
gctccttggcatgaaagcgctctga

SEQ ID NO: 4987029 - DNA, 25 bp, Homo sapien
ctggctccttggcatgaaagcgctc

SEQ ID NO: 4987030 - DNA, 25 bp, Homo sapien
ccttggcatgaaagcgctctgacaa

SEQ ID NO: 4987031 - DNA, 25 bp, Homo sapien
tccttggcatgaaagcgctctgaca

SEQ ID NO: 4987032 - DNA, 25 bp, Homo sapien
ttgggtgggcacaggacatcactag

SEQ ID NO: 4987033 - DNA, 25 bp, Homo sapien
tgccccaattaggagtcttgggtgg

SEQ ID NO: 4987034 - DNA, 25 bp, Homo sapien
tcactaggcatgagcttcatgggtg

SEQ ID NO: 4987035 - DNA, 25 bp, Homo sapien
agttaagaggcttcaccaccccact

SEQ ID NO: 4987036 - DNA, 25 bp, Homo sapien
aggccacagatacctgtgcaaagag

SEQ ID NO: 4987037 - DNA, 25 bp, Homo sapien
gcaaggccacagatacctgtgcaaa

SEQ ID NO: 4987038 - DNA, 25 bp, Homo sapien
aaatcatcattagcacctagacagt

SEQ ID NO: 4987039 - DNA, 25 bp, Homo sapien
acagtaattttcactgagcaaggcc

SEQ ID NO: 4987040 - DNA, 25 bp, Homo sapien
ttttgtggggataagggaagactgc

SEQ ID NO: 4987041 - DNA, 25 bp, Homo sapien
tggggataagggaagactgcctcat

SEQ ID NO: 4987042 - DNA, 25 bp, Homo sapien
tcatttttgtggggataagggaaga

SEQ ID NO: 4987043 - DNA, 25 bp, Homo sapien
ttgtggggataagggaagactgcct

SEQ ID NO: 4987044 - DNA, 25 bp, Homo sapien
gaggggccttcggatattttgcctg

SEQ ID NO: 4987045 - DNA, 25 bp, Homo sapien
tgagtgataaatgcttggccaccaa

SEQ ID NO: 4987046 - DNA, 25 bp, Homo sapien
ctgagtgataaatgcttggccacca

SEQ ID NO: 4987047 - DNA, 25 bp, Homo sapien
cttcggatattttgcctgagtgata

SEQ ID NO: 4987048 - DNA, 25 bp, Homo sapien
ttccacgtatggcacgcgcttggcc

SEQ ID NO: 4987049 - DNA, 25 bp, Homo sapien
gcccccagaggcacgctccactctg

SEQ ID NO: 4987050 - DNA, 25 bp, Homo sapien
agcctccttccacgtatggcacgcg

SEQ ID NO: 4987051 - DNA, 25 bp, Homo sapien
gtatggcacgcgcttggcccaagcc

SEQ ID NO: 4987052 - DNA, 25 bp, Homo sapien
tctcgcccacatctgcacgagtgtg

SEQ ID NO: 4987053 - DNA, 25 bp, Homo sapien
agggagtgctctcgcccacatctgc

SEQ ID NO: 4987054 - DNA, 25 bp, Homo sapien
cagtgcagggagtgctctcgcccac

SEQ ID NO: 4987055 - DNA, 25 bp, Homo sapien
ttccctgcagttactccccacagtg

SEQ ID NO: 4987056 - DNA, 25 bp, Homo sapien
agaaagatatgctggacacgcgggc

SEQ ID NO: 4987057 - DNA, 25 bp, Homo sapien
ctggcagtgacccagaaagatggta

SEQ ID NO: 4987058 - DNA, 25 bp, Homo sapien
tcatggccaaagacatagcctaact

SEQ ID NO: 4987059 - DNA, 25 bp, Homo sapien
ggatgtgacattcccggtgcagctg

SEQ ID NO: 4987060 - DNA, 25 bp, Homo sapien
gaaagaattaggcatgtagacgcat

SEQ ID NO: 4987061 - DNA, 25 bp, Homo sapien
gggctggaatgtattcagcgaaaag

SEQ ID NO: 4987062 - DNA, 25 bp, Homo sapien
atgtattcagcgaaaagaaagatct

SEQ ID NO: 4987063 - DNA, 25 bp, Homo sapien
ggtcctgtaagcaggtttccacctc

SEQ ID NO: 4987064 - DNA, 25 bp, Homo sapien
aggtctctgatatcctgcatgctgg

SEQ ID NO: 4987065 - DNA, 25 bp, Homo sapien
gaatgactgtccataactatttcta

SEQ ID NO: 4987066 - DNA, 25 bp, Homo sapien
tggccaggggagaatgactgtccat

SEQ ID NO: 4987067 - DNA, 25 bp, Homo sapien
gccaactgtcttaccaggtctctga

SEQ ID NO: 4987068 - DNA, 25 bp, Homo sapien
accagaggtgcctggttgctgaagg

SEQ ID NO: 4987069 - DNA, 25 bp, Homo sapien
aaccagaggtgcctggttgctgaag

SEQ ID NO: 4987070 - DNA, 25 bp, Homo sapien
taggcaggaatacgtgagactcgca

SEQ ID NO: 4987071 - DNA, 25 bp, Homo sapien
tgacatcattgctaaccacgggaaa

SEQ ID NO: 4987072 - DNA, 25 bp, Homo sapien
aacaactgcttaatgagtgaggccc

SEQ ID NO: 4987073 - DNA, 25 bp, Homo sapien
tatggatgaacatgcccttgtggac

SEQ ID NO: 4987074 - DNA, 25 bp, Homo sapien
catgatgaaagtagggcccggaaac

SEQ ID NO: 4987075 - DNA, 25 bp, Homo sapien
gatttacttgaaggtcccaactgca

SEQ ID NO: 4987076 - DNA, 25 bp, Homo sapien
tgagctggcctagatactatgcgga

SEQ ID NO: 4987077 - DNA, 25 bp, Homo sapien
gaaatacaccatgctgatcagtggg

SEQ ID NO: 4987078 - DNA, 25 bp, Homo sapien
caatgcagctgcgatcttctgggct

SEQ ID NO: 4987079 - DNA, 25 bp, Homo sapien
atggctcaatgcagctgcgatcttc

SEQ ID NO: 4987080 - DNA, 25 bp, Homo sapien
tatttgtaggaatgaggtctcctat

SEQ ID NO: 4987081 - DNA, 25 bp, Homo sapien
attatttgtaggaatgaggtctcct

SEQ ID NO: 4987082 - DNA, 25 bp, Homo sapien
gcttcttgccaatgccttcagtttc

SEQ ID NO: 4987083 - DNA, 25 bp, Homo sapien
tcttgccaatgccttcagtttcaca

SEQ ID NO: 4987084 - DNA, 25 bp, Homo sapien
gccaatgccttcagtttcacagctg

SEQ ID NO: 4987085 - DNA, 25 bp, Homo sapien
agggcttcttgccaatgccttcagt

SEQ ID NO: 4987086 - DNA, 25 bp, Homo sapien
cgaaggcacactacagaagtcagac

SEQ ID NO: 4987087 - DNA, 25 bp, Homo sapien
cagcctttcgatacatctgtaaaga

SEQ ID NO: 4987088 - DNA, 25 bp, Homo sapien
ttttggacagcctttcgatacatct

SEQ ID NO: 4987089 - DNA, 25 bp, Homo sapien
ctacgaaggcacactacagaagtca

SEQ ID NO: 4987090 - DNA, 25 bp, Homo sapien
tcagactctgccctgagagtgcgtg

SEQ ID NO: 4987091 - DNA, 25 bp, Homo sapien
gccccattatgtggggcatcagact

SEQ ID NO: 4987092 - DNA, 25 bp, Homo sapien
gactctgccctgagagtgcgtgcat

SEQ ID NO: 4987093 - DNA, 25 bp, Homo sapien
cattatgtggggcatcagactctgc

SEQ ID NO: 4987094 - DNA, 25 bp, Homo sapien
taagagtgagcatttctcaggattc

SEQ ID NO: 4987095 - DNA, 25 bp, Homo sapien
cagtggggtccggatggcctgttct

SEQ ID NO: 4987096 - DNA, 25 bp, Homo sapien
tctggcctctctcacatgtctcagg

SEQ ID NO: 4987097 - DNA, 25 bp, Homo sapien
ttatggtttcataacatcaaaatgc

SEQ ID NO: 4987098 - DNA, 25 bp, Homo sapien
tgtgatccctgatactgggcgtggc

SEQ ID NO: 4987099 - DNA, 25 bp, Homo sapien
cttcagagagcacgaacccttaggg

SEQ ID NO: 4987100 - DNA, 25 bp, Homo sapien
cccatgggcgctgattgtttaaaag

SEQ ID NO: 4987101 - DNA, 25 bp, Homo sapien
tccccaagtatgtgagaggctctcc

SEQ ID NO: 4987102 - DNA, 25 bp, Homo sapien
tgtcccacttaaattcagctctctg

SEQ ID NO: 4987103 - DNA, 25 bp, Homo sapien
tgcagaagtgagctatctgagccat

SEQ ID NO: 4987104 - DNA, 25 bp, Homo sapien
gaagtgagctatctgagccatgtga

SEQ ID NO: 4987105 - DNA, 25 bp, Homo sapien
gtgagctatctgagccatgtgaact

SEQ ID NO: 4987106 - DNA, 25 bp, Homo sapien
ctgaattagatctttctcctctgtg

SEQ ID NO: 4987107 - DNA, 25 bp, Homo sapien
ccataaatgatggaaggcccagcgg

SEQ ID NO: 4987108 - DNA, 25 bp, Homo sapien
tgctgaattagatctttctcctctg

SEQ ID NO: 4987109 - DNA, 25 bp, Homo sapien
tctcctctgtggtccataaatgatg

SEQ ID NO: 4987110 - DNA, 25 bp, Homo sapien
gagaaatggtctccagtcacagaac

SEQ ID NO: 4987111 - DNA, 25 bp, Homo sapien
acttaatggttggaacctcaggcca

SEQ ID NO: 4987112 - DNA, 25 bp, Homo sapien
catgtctagcctaattcctcggaga

SEQ ID NO: 4987113 - DNA, 25 bp, Homo sapien
taaggatgaacaagacacaagatgc

SEQ ID NO: 4987114 - DNA, 25 bp, Homo sapien
tgaggacacagggaacgaacatact

SEQ ID NO: 4987115 - DNA, 25 bp, Homo sapien
catactttgtgtgctaactcaggtc

SEQ ID NO: 4987116 - DNA, 25 bp, Homo sapien
tcacactcggtaattccaaggacag

SEQ ID NO: 4987117 - DNA, 25 bp, Homo sapien
tcctcagagaagtggatggcacggt

SEQ ID NO: 4987118 - DNA, 25 bp, Homo sapien
tgtagaccacatgatcccagcaagg

SEQ ID NO: 4987119 - DNA, 25 bp, Homo sapien
tggagattcatacagcagagtagca

SEQ ID NO: 4987120 - DNA, 25 bp, Homo sapien
gctgagcggcctaagcaacagaaat

SEQ ID NO: 4987121 - DNA, 25 bp, Homo sapien
gaaatgtactttcctgcggttctgg

SEQ ID NO: 4987122 - DNA, 25 bp, Homo sapien
accagtcagagtaccttagggccca

SEQ ID NO: 4987123 - DNA, 25 bp, Homo sapien
gaccctatgtcgagatacagccaca

SEQ ID NO: 4987124 - DNA, 25 bp, Homo sapien
tccgtctggattggagacagttgcc

SEQ ID NO: 4987125 - DNA, 25 bp, Homo sapien
taactacctctgtaaggaccctatg

SEQ ID NO: 4987126 - DNA, 25 bp, Homo sapien
catgatcatgtcgtgagcaactcac

SEQ ID NO: 4987127 - DNA, 25 bp, Homo sapien
gatctgtggatgactacgctgccca

SEQ ID NO: 4987128 - DNA, 25 bp, Homo sapien
tgaggctggcagcatataagcttgg

SEQ ID NO: 4987129 - DNA, 25 bp, Homo sapien
tagatgggagtggactgaactacct

SEQ ID NO: 4987130 - DNA, 25 bp, Homo sapien
gatgactgtacttcgtggcccttca

SEQ ID NO: 4987131 - DNA, 25 bp, Homo sapien
tgtctcgcctcaggaccataagaag

SEQ ID NO: 4987132 - DNA, 25 bp, Homo sapien
ccttcagtgtatgcagcagaaagcc

SEQ ID NO: 4987133 - DNA, 25 bp, Homo sapien
tgtattccaggtgccaagtccagat

SEQ ID NO: 4987134 - DNA, 25 bp, Homo sapien
gctccctggttggtgagtgcatcca

SEQ ID NO: 4987135 - DNA, 25 bp, Homo sapien
tgatgatgcctacccaatgaagcct

SEQ ID NO: 4987136 - DNA, 25 bp, Homo sapien
tctcatcagagataacaagccatgg

SEQ ID NO: 4987137 - DNA, 25 bp, Homo sapien
agctcttatgcttgggatcacccta

SEQ ID NO: 4987138 - DNA, 25 bp, Homo sapien
gctggtttacctgtcccgagctgat

SEQ ID NO: 4987139 - DNA, 25 bp, Homo sapien
cagcttctggtgtatgactaatgca

SEQ ID NO: 4987140 - DNA, 25 bp, Homo sapien
tcatctcaggattagccgggttgga

SEQ ID NO: 4987141 - DNA, 25 bp, Homo sapien
ccgggttggatatctgggtcttgct

SEQ ID NO: 4987142 - DNA, 25 bp, Homo sapien
ttcagcagtctcagggttaaatggg

SEQ ID NO: 4987143 - DNA, 25 bp, Homo sapien
taacccttggcgttcctagctgctg

SEQ ID NO: 4987144 - DNA, 25 bp, Homo sapien
ggtgtaaaccagaatgcttcacaga

SEQ ID NO: 4987145 - DNA, 25 bp, Homo sapien
ccttttattcagatacagccgggct

SEQ ID NO: 4987146 - DNA, 25 bp, Homo sapien
tacacagttatgcacgacagggctc

SEQ ID NO: 4987147 - DNA, 25 bp, Homo sapien
catagctcgagcacaaccagatctg

SEQ ID NO: 4987148 - DNA, 25 bp, Homo sapien
gataggtcctcgcatctccgtgaga

SEQ ID NO: 4987149 - DNA, 25 bp, Homo sapien
gctgatagatgaaagtctgttgccc

SEQ ID NO: 4987150 - DNA, 25 bp, Homo sapien
ctgttggtgcctgggccgactggcc

SEQ ID NO: 4987151 - DNA, 25 bp, Homo sapien
tgttggtgcctgggccgactggccc

SEQ ID NO: 4987152 - DNA, 25 bp, Homo sapien
ggtgcctgggccgactggcccacat

SEQ ID NO: 4987153 - DNA, 25 bp, Homo sapien
ttggtgcctgggccgactggcccac

SEQ ID NO: 4987154 - DNA, 25 bp, Homo sapien
tctgttaagcaacagccgccagggc

SEQ ID NO: 4987155 - DNA, 25 bp, Homo sapien
agcaaaacggaaatggtgcctaccg

SEQ ID NO: 4987156 - DNA, 25 bp, Homo sapien
tagaacaacactgctcaggactagt

SEQ ID NO: 4987157 - DNA, 25 bp, Homo sapien
caggactagtccaacactgaatgga

SEQ ID NO: 4987158 - DNA, 25 bp, Homo sapien
cattaatactgaaaacttggtgctg

SEQ ID NO: 4987159 - DNA, 25 bp, Homo sapien
ggctgcaggctgcatcttttcgaaa

SEQ ID NO: 4987160 - DNA, 25 bp, Homo sapien
gactttagtcttgcacggatcatgg

SEQ ID NO: 4987161 - DNA, 25 bp, Homo sapien
aaagattgtcaggagcttctcagca

SEQ ID NO: 4987162 - DNA, 25 bp, Homo sapien
cagcacctgcttgtgcattcagtgt

SEQ ID NO: 4987163 - DNA, 25 bp, Homo sapien
ggaggcggtcacttgccagctgtct

SEQ ID NO: 4987164 - DNA, 25 bp, Homo sapien
ttgccagctgtctaatccgtcctgc

SEQ ID NO: 4987165 - DNA, 25 bp, Homo sapien
tgcccttggcttatcagaggctcct

SEQ ID NO: 4987166 - DNA, 25 bp, Homo sapien
caaaggaggcaaagtcgaggcacaa

SEQ ID NO: 4987167 - DNA, 25 bp, Homo sapien
gagaggcctccaagtgtctctatga

SEQ ID NO: 4987168 - DNA, 25 bp, Homo sapien
tcacagatgccttcagacgaagcca

SEQ ID NO: 4987169 - DNA, 25 bp, Homo sapien
caaatgaggagaccacaagcaggtc

SEQ ID NO: 4987170 - DNA, 25 bp, Homo sapien
ctgggaccatggagcagacctgggc

SEQ ID NO: 4987171 - DNA, 25 bp, Homo sapien
gagcactctgcatcctaccacacgt

SEQ ID NO: 4987172 - DNA, 25 bp, Homo sapien
accatggagcagacctgggcctctg

SEQ ID NO: 4987173 - DNA, 25 bp, Homo sapien
cactctgcatcctaccacacgtgtg

SEQ ID NO: 4987174 - DNA, 25 bp, Homo sapien
gggtcacaatgcctcgcaatgctgg

SEQ ID NO: 4987175 - DNA, 25 bp, Homo sapien
caatgcctcgcaatgctgggcaagt

SEQ ID NO: 4987176 - DNA, 25 bp, Homo sapien
cggccgagaataagagaggcaccat

SEQ ID NO: 4987177 - DNA, 25 bp, Homo sapien
tggagagagcaccggccgagaataa

SEQ ID NO: 4987178 - DNA, 25 bp, Homo sapien
gcagccagtgactatgtgccccaga

SEQ ID NO: 4987179 - DNA, 25 bp, Homo sapien
ttaaaatgcagccagtgactatgtg

SEQ ID NO: 4987180 - DNA, 25 bp, Homo sapien
tatgtgccccagacttctcatgaat

SEQ ID NO: 4987181 - DNA, 25 bp, Homo sapien
tcaggctccattaagttgctgcttt

SEQ ID NO: 4987182 - DNA, 25 bp, Homo sapien
gagtccacgttttctccaaatgcag

SEQ ID NO: 4987183 - DNA, 25 bp, Homo sapien
tgcaccttcgcataattgtcacagt

SEQ ID NO: 4987184 - DNA, 25 bp, Homo sapien
tccaaagatgcatccacttctagag

SEQ ID NO: 4987185 - DNA, 25 bp, Homo sapien
cacttctagagtccacgttttctcc

SEQ ID NO: 4987186 - DNA, 25 bp, Homo sapien
ctctgccaacgatgagggcctgtgg

SEQ ID NO: 4987187 - DNA, 25 bp, Homo sapien
tataacacttcctcatgccctgttg

SEQ ID NO: 4987188 - DNA, 25 bp, Homo sapien
catatggcagagcaatagcacacgc

SEQ ID NO: 4987189 - DNA, 25 bp, Homo sapien
gatactaagtgactcccatctcctc

SEQ ID NO: 4987190 - DNA, 25 bp, Homo sapien
aggagcagcagaggtcatctgcaga

SEQ ID NO: 4987191 - DNA, 25 bp, Homo sapien
tcatccaatcaaccaaggagcagca

SEQ ID NO: 4987192 - DNA, 25 bp, Homo sapien
ggccatcttccactcatccaatcaa

SEQ ID NO: 4987193 - DNA, 25 bp, Homo sapien
ttccactcatccaatcaaccaagga

SEQ ID NO: 4987194 - DNA, 25 bp, Homo sapien
tgaattgagcctacttcggagctca

SEQ ID NO: 4987195 - DNA, 25 bp, Homo sapien
ctcacatatggcaggaagggcaccg

SEQ ID NO: 4987196 - DNA, 25 bp, Homo sapien
atgccccacatgcaagctggtcact

SEQ ID NO: 4987197 - DNA, 25 bp, Homo sapien
acatgcaagctggtcactcgccaca

SEQ ID NO: 4987198 - DNA, 25 bp, Homo sapien
gcagccggtcctgagcgttactcag

SEQ ID NO: 4987199 - DNA, 25 bp, Homo sapien
tctttagtctctcgcagccctgcag

SEQ ID NO: 4987200 - DNA, 25 bp, Homo sapien
gtggctgcgatggttcctgcatttc

SEQ ID NO: 4987201 - DNA, 25 bp, Homo sapien
cctgcagccggtcctgagcgttact

SEQ ID NO: 4987202 - DNA, 25 bp, Homo sapien
tgcccactcggatccttcttgaagg

SEQ ID NO: 4987203 - DNA, 25 bp, Homo sapien
gttccctggtgtcgggaagccacgc

SEQ ID NO: 4987204 - DNA, 25 bp, Homo sapien
aggtctgcctgcgattgcctctgcc

SEQ ID NO: 4987205 - DNA, 25 bp, Homo sapien
ccatgcggccgggaaatcaggcact

SEQ ID NO: 4987206 - DNA, 25 bp, Homo sapien
tatcagtacatggtatcacttaagg

SEQ ID NO: 4987207 - DNA, 25 bp, Homo sapien
tcaaggtttaggttttatcagtaca

SEQ ID NO: 4987208 - DNA, 25 bp, Homo sapien
tcagaactcaacatttgggtcccag

SEQ ID NO: 4987209 - DNA, 25 bp, Homo sapien
tgggtcccagatgcctccatcatta

SEQ ID NO: 4987210 - DNA, 25 bp, Homo sapien
tggtggaagctcaaggtcagggggt

SEQ ID NO: 4987211 - DNA, 25 bp, Homo sapien
gcctggtggaagctcaaggtcaggg

SEQ ID NO: 4987212 - DNA, 25 bp, Homo sapien
ggaagctcaaggtcagggggtgcat

SEQ ID NO: 4987213 - DNA, 25 bp, Homo sapien
gtggaagctcaaggtcagggggtgc

SEQ ID NO: 4987214 - DNA, 25 bp, Homo sapien
ttaactgcaacacactctcccatgg

SEQ ID NO: 4987215 - DNA, 25 bp, Homo sapien
aatgcatactcacctgcagccgtta

SEQ ID NO: 4987216 - DNA, 25 bp, Homo sapien
tgccagcaaactgggaacatctcag

SEQ ID NO: 4987217 - DNA, 25 bp, Homo sapien
tccagccaccattggagtattgttg

SEQ ID NO: 4987218 - DNA, 25 bp, Homo sapien
tcttctcatcacagacttccatcat

SEQ ID NO: 4987219 - DNA, 25 bp, Homo sapien
tgtagctccgccgtctccctccttc

SEQ ID NO: 4987220 - DNA, 25 bp, Homo sapien
tcacttaatccagtctacgaatcct

SEQ ID NO: 4987221 - DNA, 25 bp, Homo sapien
cagtctacgaatcctctgccagctt

SEQ ID NO: 4987222 - DNA, 25 bp, Homo sapien
tccttatttcaacccctctgctgta

SEQ ID NO: 4987223 - DNA, 25 bp, Homo sapien
caaaatttgctctcaacgtaggagg

SEQ ID NO: 4987224 - DNA, 25 bp, Homo sapien
cattttcatggccatagtcccggtg

SEQ ID NO: 4987225 - DNA, 25 bp, Homo sapien
tgccaataggaggtataattcccac

SEQ ID NO: 4987226 - DNA, 25 bp, Homo sapien
cccacatgggttagtaagcagaaac

SEQ ID NO: 4987227 - DNA, 25 bp, Homo sapien
tctgtctctttagacagtgagttct

SEQ ID NO: 4987228 - DNA, 25 bp, Homo sapien
ttagacagtgagttcttctcacact

SEQ ID NO: 4987229 - DNA, 25 bp, Homo sapien
ttcagctctcaattctgtctcttta

SEQ ID NO: 4987230 - DNA, 25 bp, Homo sapien
cagctctcaattctgtctctttaga

SEQ ID NO: 4987231 - DNA, 25 bp, Homo sapien
catctttctcgaagcacaggtgtgc

SEQ ID NO: 4987232 - DNA, 25 bp, Homo sapien
aaatgaaggattgtcatctttctcg

SEQ ID NO: 4987233 - DNA, 25 bp, Homo sapien
tgtgcttcgagaaatccccatgagg

SEQ ID NO: 4987234 - DNA, 25 bp, Homo sapien
taacaaagtttctagagtgaccaaa

SEQ ID NO: 4987235 - DNA, 25 bp, Homo sapien
ccagtaagcacatgccgcgttggcc

SEQ ID NO: 4987236 - DNA, 25 bp, Homo sapien
cagtaagcacatgccgcgttggccc

SEQ ID NO: 4987237 - DNA, 25 bp, Homo sapien
gccagtaagcacatgccgcgttggc

SEQ ID NO: 4987238 - DNA, 25 bp, Homo sapien
agaaaacactagtgtcttctgcttg

SEQ ID NO: 4987239 - DNA, 25 bp, Homo sapien
gaaaacactagtgtcttctgcttgg

SEQ ID NO: 4987240 - DNA, 25 bp, Homo sapien
catcctggcctcttgttttgctgac

SEQ ID NO: 4987241 - DNA, 25 bp, Homo sapien
agacatcctggcctcttgttttgct

SEQ ID NO: 4987242 - DNA, 25 bp, Homo sapien
tcagcagacatcctggcctcttgtt

SEQ ID NO: 4987243 - DNA, 25 bp, Homo sapien
gcagacatcctggcctcttgttttg

SEQ ID NO: 4987244 - DNA, 25 bp, Homo sapien
taaatgaggttgaacccgcgaagag

SEQ ID NO: 4987245 - DNA, 25 bp, Homo sapien
cacgctgtccgcaagcgcctgtggg

SEQ ID NO: 4987246 - DNA, 25 bp, Homo sapien
gaggaaacgcaaacccatctgactg

SEQ ID NO: 4987247 - DNA, 25 bp, Homo sapien
tctgactgattaccccgcacgctgt

SEQ ID NO: 4987248 - DNA, 25 bp, Homo sapien
cactatcggtctcttccgacagaga

SEQ ID NO: 4987249 - DNA, 25 bp, Homo sapien
ttccgacagagaaggcgatcccatg

SEQ ID NO: 4987250 - DNA, 25 bp, Homo sapien
tcgtaaacactatcggtctcttccg

SEQ ID NO: 4987251 - DNA, 25 bp, Homo sapien
ttagaacagtcgtaaacactatcgg

SEQ ID NO: 4987252 - DNA, 25 bp, Homo sapien
gagacgcgcgcagtgaggatagact

SEQ ID NO: 4987253 - DNA, 25 bp, Homo sapien
taaaacggttgccttgcagctttca

SEQ ID NO: 4987254 - DNA, 25 bp, Homo sapien
gtccgccacggctgcggcagtttgt

SEQ ID NO: 4987255 - DNA, 25 bp, Homo sapien
tgtgcagaatccgaaataaaacggt

SEQ ID NO: 4987256 - DNA, 25 bp, Homo sapien
caaattttcgggacttctgggctcg

SEQ ID NO: 4987257 - DNA, 25 bp, Homo sapien
gcaaattttcgggacttctgggctc

SEQ ID NO: 4987258 - DNA, 25 bp, Homo sapien
ctgatctgggaaggctagggtagcc

SEQ ID NO: 4987259 - DNA, 25 bp, Homo sapien
agggtagcccccaactgcctaggcg

SEQ ID NO: 4987260 - DNA, 25 bp, Homo sapien
acgaggccaaaggctgatctgggaa

SEQ ID NO: 4987261 - DNA, 25 bp, Homo sapien
agcacagccgctggggacgcagctc

SEQ ID NO: 4987262 - DNA, 25 bp, Homo sapien
gccttgggattctttgccggtggaa

SEQ ID NO: 4987263 - DNA, 25 bp, Homo sapien
gcaatggtgtacatcccaatccagg

SEQ ID NO: 4987264 - DNA, 25 bp, Homo sapien
tcatgcagaaccctgacagaggctc

SEQ ID NO: 4987265 - DNA, 25 bp, Homo sapien
tcatctgacttgctgccaacatagg

SEQ ID NO: 4987266 - DNA, 25 bp, Homo sapien
gaggaaggtggtgcttgaccagatc

SEQ ID NO: 4987267 - DNA, 25 bp, Homo sapien
cccatgagaagcaagtggtttcctg

SEQ ID NO: 4987268 - DNA, 25 bp, Homo sapien
gaagcaagtggtttcctgtagggac

SEQ ID NO: 4987269 - DNA, 25 bp, Homo sapien
tgccctgccattgactgtgcactgc

SEQ ID NO: 4987270 - DNA, 25 bp, Homo sapien
ctgccattgactgtgcactgctttc

SEQ ID NO: 4987271 - DNA, 25 bp, Homo sapien
catacaaaatgcactctgtgtgcat

SEQ ID NO: 4987272 - DNA, 25 bp, Homo sapien
ggccacccgagacgacagtcagcat

SEQ ID NO: 4987273 - DNA, 25 bp, Homo sapien
gcatctttcagcaggccacccgaga

SEQ ID NO: 4987274 - DNA, 25 bp, Homo sapien
cgagacgacagtcagcatctcctgt

SEQ ID NO: 4987275 - DNA, 25 bp, Homo sapien
gatttggtttgtcatattataagtc

SEQ ID NO: 4987276 - DNA, 25 bp, Homo sapien
ttgtcatattataagtctgctccat

SEQ ID NO: 4987277 - DNA, 25 bp, Homo sapien
ctaagatttggtttgtcatattata

SEQ ID NO: 4987278 - DNA, 25 bp, Homo sapien
ctgcatttgactcataagcaatttc

SEQ ID NO: 4987279 - DNA, 25 bp, Homo sapien
cgattgtctcgtcggctggcaccca

SEQ ID NO: 4987280 - DNA, 25 bp, Homo sapien
gagacgattgtctcgtcggctggca

SEQ ID NO: 4987281 - DNA, 25 bp, Homo sapien
gacgattgtctcgtcggctggcacc

SEQ ID NO: 4987282 - DNA, 25 bp, Homo sapien
ttgtctcgtcggctggcacccacag

SEQ ID NO: 4987283 - DNA, 25 bp, Homo sapien
tgacttttgttcaaagtccaagtaa

SEQ ID NO: 4987284 - DNA, 25 bp, Homo sapien
acagttgacttttgttcaaagtcca

SEQ ID NO: 4987285 - DNA, 25 bp, Homo sapien
gccattcactactttgcaacaattc

SEQ ID NO: 4987286 - DNA, 25 bp, Homo sapien
tgccattcactactttgcaacaatt

SEQ ID NO: 4987287 - DNA, 25 bp, Homo sapien
cattgggaaaagctatataacagag

SEQ ID NO: 4987288 - DNA, 25 bp, Homo sapien
tgttgtttggaaattagcattggga

SEQ ID NO: 4987289 - DNA, 25 bp, Homo sapien
ttatacaacttaacaggcaaacatg

SEQ ID NO: 4987290 - DNA, 25 bp, Homo sapien
tgcaagcagtatatgtaacagtaat

SEQ ID NO: 4987291 - DNA, 25 bp, Homo sapien
tgttcactcttaactctaaacacag

SEQ ID NO: 4987292 - DNA, 25 bp, Homo sapien
ctcttaactctaaacacagtgctcc

SEQ ID NO: 4987293 - DNA, 25 bp, Homo sapien
ctcggactggagctgcttgccaagg

SEQ ID NO: 4987294 - DNA, 25 bp, Homo sapien
cggactggagctgcttgccaaggta

SEQ ID NO: 4987295 - DNA, 25 bp, Homo sapien
gggctgctcggactggagctgcttg

SEQ ID NO: 4987296 - DNA, 25 bp, Homo sapien
tgctcggactggagctgcttgccaa

SEQ ID NO: 4987297 - DNA, 25 bp, Homo sapien
tattcttgtgctaccaggaactacg

SEQ ID NO: 4987298 - DNA, 25 bp, Homo sapien
taagttcacgcaaaggctgaaaggg

SEQ ID NO: 4987299 - DNA, 25 bp, Homo sapien
gactgaatgaagcatcccaggacat

SEQ ID NO: 4987300 - DNA, 25 bp, Homo sapien
ggaactacgctgacataatttagac

SEQ ID NO: 4987301 - DNA, 25 bp, Homo sapien
atcccttccagaggcctgagggtag

SEQ ID NO: 4987302 - DNA, 25 bp, Homo sapien
ttccagaggcctgagggtagttcat

SEQ ID NO: 4987303 - DNA, 25 bp, Homo sapien
catcccttccagaggcctgagggta

SEQ ID NO: 4987304 - DNA, 25 bp, Homo sapien
ccttccagaggcctgagggtagttc

SEQ ID NO: 4987305 - DNA, 25 bp, Homo sapien
gatgagcccaatttatagatacgta

SEQ ID NO: 4987306 - DNA, 25 bp, Homo sapien
tatgtcagcctaggaaaaacagtat

SEQ ID NO: 4987307 - DNA, 25 bp, Homo sapien
gtacattattctacctctcactggg

SEQ ID NO: 4987308 - DNA, 25 bp, Homo sapien
gggagtgtactggtaccaagtctaa

SEQ ID NO: 4987309 - DNA, 25 bp, Homo sapien
aatgatcattcaaagcatttgcata

SEQ ID NO: 4987310 - DNA, 25 bp, Homo sapien
tgtacaagtgtgagcaaaaagccgt

SEQ ID NO: 4987311 - DNA, 25 bp, Homo sapien
gtttgcagactaatgtacaagtgtg

SEQ ID NO: 4987312 - DNA, 25 bp, Homo sapien
ttagaatggcaagtgagagtttgca

SEQ ID NO: 4987313 - DNA, 25 bp, Homo sapien
tgcttcccaccgagctgctcgatga

SEQ ID NO: 4987314 - DNA, 25 bp, Homo sapien
gccagcagagcattatagcggacct

SEQ ID NO: 4987315 - DNA, 25 bp, Homo sapien
tggtcttcatgatgcatgtggttca

SEQ ID NO: 4987316 - DNA, 25 bp, Homo sapien
tatagcggacctgctggtcttcatg

SEQ ID NO: 4987317 - DNA, 25 bp, Homo sapien
tttaggaaaagcacggaggatcgac

SEQ ID NO: 4987318 - DNA, 25 bp, Homo sapien
ggtgctcattgtgcccctggaaagt

SEQ ID NO: 4987319 - DNA, 25 bp, Homo sapien
tggatcccggtagaacacatgagac

SEQ ID NO: 4987320 - DNA, 25 bp, Homo sapien
cactgcgcataagaggaaccctgaa

SEQ ID NO: 4987321 - DNA, 25 bp, Homo sapien
ttaactgggtttatcataattctca

SEQ ID NO: 4987322 - DNA, 25 bp, Homo sapien
actgcaaccggcctatactactcat

SEQ ID NO: 4987323 - DNA, 25 bp, Homo sapien
tacaggcgtgatatatttttatact

SEQ ID NO: 4987324 - DNA, 25 bp, Homo sapien
gcaaccggcctatactactcatttt

SEQ ID NO: 4987325 - DNA, 25 bp, Homo sapien
gctaacctactccattttagataag

SEQ ID NO: 4987326 - DNA, 25 bp, Homo sapien
tagttcctttgctaacctactccat

SEQ ID NO: 4987327 - DNA, 25 bp, Homo sapien
tttaggactctacactgaaggtttc

SEQ ID NO: 4987328 - DNA, 25 bp, Homo sapien
tgtggcaatcttgatttcatttgct

SEQ ID NO: 4987329 - DNA, 25 bp, Homo sapien
gacacttccaaaagttttgtcaaga

SEQ ID NO: 4987330 - DNA, 25 bp, Homo sapien
caacagctaagacttggggatcatc

SEQ ID NO: 4987331 - DNA, 25 bp, Homo sapien
ttgcctcgtggataatgccgcacat

SEQ ID NO: 4987332 - DNA, 25 bp, Homo sapien
ggataatgccgcacatattctccaa

SEQ ID NO: 4987333 - DNA, 25 bp, Homo sapien
tccaaagagagatcaagttctaatt

SEQ ID NO: 4987334 - DNA, 25 bp, Homo sapien
ttatccaaagagagatcaagttcta

SEQ ID NO: 4987335 - DNA, 25 bp, Homo sapien
ttttatccaaagagagatcaagttc

SEQ ID NO: 4987336 - DNA, 25 bp, Homo sapien
aaattttatccaaagagagatcaag

SEQ ID NO: 4987337 - DNA, 25 bp, Homo sapien
tactactgggacaagtgactttcag

SEQ ID NO: 4987338 - DNA, 25 bp, Homo sapien
catttataaaccctaggacctactg

SEQ ID NO: 4987339 - DNA, 25 bp, Homo sapien
gattcacaatgtacaccatgcacaa

SEQ ID NO: 4987340 - DNA, 25 bp, Homo sapien
caatttccaaaatatcagggactcc

SEQ ID NO: 4987341 - DNA, 25 bp, Homo sapien
tatactttccaaacagtgaagtcca

SEQ ID NO: 4987342 - DNA, 25 bp, Homo sapien
acagtgaagtccataacagcaagag

SEQ ID NO: 4987343 - DNA, 25 bp, Homo sapien
cagaagagtggaacatatactttcc

SEQ ID NO: 4987344 - DNA, 25 bp, Homo sapien
tcttgccccaactctaacagaagag

SEQ ID NO: 4987345 - DNA, 25 bp, Homo sapien
tgtcactggagcctgacgggtactt

SEQ ID NO: 4987346 - DNA, 25 bp, Homo sapien
aaccacataaattgtcactggagcc

SEQ ID NO: 4987347 - DNA, 25 bp, Homo sapien
tccaatacaaccacataaattgtca

SEQ ID NO: 4987348 - DNA, 25 bp, Homo sapien
gtactttctccaatacaaccacata

SEQ ID NO: 4987349 - DNA, 25 bp, Homo sapien
gcttctgctaccctcctcaaggacc

SEQ ID NO: 4987350 - DNA, 25 bp, Homo sapien
ctgccccggcttctgctaccctcct

SEQ ID NO: 4987351 - DNA, 25 bp, Homo sapien
gggtgggtgcagctacccaagatgt

SEQ ID NO: 4987352 - DNA, 25 bp, Homo sapien
agggtgggtgcagctacccaagatg

SEQ ID NO: 4987353 - DNA, 25 bp, Homo sapien
aactgagtttcaggctatgatggga

SEQ ID NO: 4987354 - DNA, 25 bp, Homo sapien
aacagactcccttctgggccaaggg

SEQ ID NO: 4987355 - DNA, 25 bp, Homo sapien
tgacagaacagactcccttctgggc

SEQ ID NO: 4987356 - DNA, 25 bp, Homo sapien
agaacagactcccttctgggccaag

SEQ ID NO: 4987357 - DNA, 25 bp, Homo sapien
aataccatatactagccaggcgcgg

SEQ ID NO: 4987358 - DNA, 25 bp, Homo sapien
aaataccatatactagccaggcgcg

SEQ ID NO: 4987359 - DNA, 25 bp, Homo sapien
ccaaccttccagatttaagttctga

SEQ ID NO: 4987360 - DNA, 25 bp, Homo sapien
ttctcagatttgtgcacaggactcc

SEQ ID NO: 4987361 - DNA, 25 bp, Homo sapien
ttcaagagttcataattcttctcat

SEQ ID NO: 4987362 - DNA, 25 bp, Homo sapien
ttctctctccaaaatttctcagatt

SEQ ID NO: 4987363 - DNA, 25 bp, Homo sapien
tatcttcatcatcgtacttctgctg

SEQ ID NO: 4987364 - DNA, 25 bp, Homo sapien
tggacactctctccaagtttttcca

SEQ ID NO: 4987365 - DNA, 25 bp, Homo sapien
cactctctccaagtttttccaaaag

SEQ ID NO: 4987366 - DNA, 25 bp, Homo sapien
gaaatttgatatcttcgctgatatc

SEQ ID NO: 4987367 - DNA, 25 bp, Homo sapien
tcttggcgagtttctctttcagttg

SEQ ID NO: 4987368 - DNA, 25 bp, Homo sapien
ttggcgagtttctctttcagttgat

SEQ ID NO: 4987369 - DNA, 25 bp, Homo sapien
ttcttggcgagtttctctttcagtt

SEQ ID NO: 4987370 - DNA, 25 bp, Homo sapien
cttggcgagtttctctttcagttga

SEQ ID NO: 4987371 - DNA, 25 bp, Homo sapien
caatgacctaaggagacagaggaca

SEQ ID NO: 4987372 - DNA, 25 bp, Homo sapien
gacaattcagagtgactacagcggc

SEQ ID NO: 4987373 - DNA, 25 bp, Homo sapien
cctatgcaacgcaagtgtgtccgca

SEQ ID NO: 4987374 - DNA, 25 bp, Homo sapien
gaactctgcccaaatctctagctga

SEQ ID NO: 4987375 - DNA, 25 bp, Homo sapien
ggtggaccacatttggcccataggc

SEQ ID NO: 4987376 - DNA, 25 bp, Homo sapien
aaaggatgtgtattgtgactccaaa

SEQ ID NO: 4987377 - DNA, 25 bp, Homo sapien
ggaaagctgagtgtccagaaaagaa

SEQ ID NO: 4987378 - DNA, 25 bp, Homo sapien
gactgcttaaagcacaaaaccctgt

SEQ ID NO: 4987379 - DNA, 25 bp, Homo sapien
gacccaaggatgtgttgcctaaaag

SEQ ID NO: 4987380 - DNA, 25 bp, Homo sapien
aatgccagtgaactagatactccag

SEQ ID NO: 4987381 - DNA, 25 bp, Homo sapien
caaggtaattgggatgcccaccact

SEQ ID NO: 4987382 - DNA, 25 bp, Homo sapien
taaaggatgcacttaacccaagaga

SEQ ID NO: 4987383 - DNA, 25 bp, Homo sapien
ggtgtgttacatatgtagccatgtg

SEQ ID NO: 4987384 - DNA, 25 bp, Homo sapien
gtgtgttacatatgtagccatgtgc

SEQ ID NO: 4987385 - DNA, 25 bp, Homo sapien
tgcaggtgtgttacatatgtagcca

SEQ ID NO: 4987386 - DNA, 25 bp, Homo sapien
caggtgtgttacatatgtagccatg

SEQ ID NO: 4987387 - DNA, 25 bp, Homo sapien
ctgaatgccaggagccatattgaaa

SEQ ID NO: 4987388 - DNA, 25 bp, Homo sapien
tggaatgatattatagcgccgcagg

SEQ ID NO: 4987389 - DNA, 25 bp, Homo sapien
gcgccgcaggtgttcacacatttga

SEQ ID NO: 4987390 - DNA, 25 bp, Homo sapien
tctttgacagactcctgaaggatat

SEQ ID NO: 4987391 - DNA, 25 bp, Homo sapien
tctgcttccacccaagcaaagcggt

SEQ ID NO: 4987392 - DNA, 25 bp, Homo sapien
atctgcttccacccaagcaaagcgg

SEQ ID NO: 4987393 - DNA, 25 bp, Homo sapien
ccatctgcttccacccaagcaaagc

SEQ ID NO: 4987394 - DNA, 25 bp, Homo sapien
tgcttccacccaagcaaagcggtac

SEQ ID NO: 4987395 - DNA, 25 bp, Homo sapien
tcattgacccggagcatcagctgca

SEQ ID NO: 4987396 - DNA, 25 bp, Homo sapien
aaacacccggccacgcactgcacat

SEQ ID NO: 4987397 - DNA, 25 bp, Homo sapien
tgacccggagcatcagctgcaaaca

SEQ ID NO: 4987398 - DNA, 25 bp, Homo sapien
ggagcatcagctgcaaacacccggc

SEQ ID NO: 4987399 - DNA, 25 bp, Homo sapien
cataacacactacaaggatggattc

SEQ ID NO: 4987400 - DNA, 25 bp, Homo sapien
tgtggctactcaccatgctatgttg

SEQ ID NO: 4987401 - DNA, 25 bp, Homo sapien
tattgcacactatcaggcagtagcc

SEQ ID NO: 4987402 - DNA, 25 bp, Homo sapien
tctttcctgcttagagagataacca

SEQ ID NO: 4987403 - DNA, 25 bp, Homo sapien
gattggcagtagaagtcaactctct

SEQ ID NO: 4987404 - DNA, 25 bp, Homo sapien
gtgccaagcattctgagctaagaac

SEQ ID NO: 4987405 - DNA, 25 bp, Homo sapien
tcaactctcttcatgcttgagctag

SEQ ID NO: 4987406 - DNA, 25 bp, Homo sapien
aatagcgagttaatcttagattggc

SEQ ID NO: 4987407 - DNA, 25 bp, Homo sapien
tcagaaggctaatagccattttctg

SEQ ID NO: 4987408 - DNA, 25 bp, Homo sapien
gagaagcccagcttcaaaatggatt

SEQ ID NO: 4987409 - DNA, 25 bp, Homo sapien
tcaaacacttcaacccatgctccaa

SEQ ID NO: 4987410 - DNA, 25 bp, Homo sapien
ggcctaacatatgagtcatcaaaca

SEQ ID NO: 4987411 - DNA, 25 bp, Homo sapien
ttcaacagcaacaccgctaccacgc

SEQ ID NO: 4987412 - DNA, 25 bp, Homo sapien
cagcaacaccgctaccacgcagttt

SEQ ID NO: 4987413 - DNA, 25 bp, Homo sapien
aacagcaacaccgctaccacgcagt

SEQ ID NO: 4987414 - DNA, 25 bp, Homo sapien
tcaacagcaacaccgctaccacgca

SEQ ID NO: 4987415 - DNA, 25 bp, Homo sapien
gtgaactcagctgagtttttatcca

SEQ ID NO: 4987416 - DNA, 25 bp, Homo sapien
gaaatagtaatttaagtcactgcct

SEQ ID NO: 4987417 - DNA, 25 bp, Homo sapien
ccaagctgctaacttggcaataatt

SEQ ID NO: 4987418 - DNA, 25 bp, Homo sapien
tttccccaagctgctaacttggcaa

SEQ ID NO: 4987419 - DNA, 25 bp, Homo sapien
aagaaaatgctaacacgctgatgat

SEQ ID NO: 4987420 - DNA, 25 bp, Homo sapien
ttcaacattggcagaaagtagggcc

SEQ ID NO: 4987421 - DNA, 25 bp, Homo sapien
ggccacgcagtgttcttgctacatc

SEQ ID NO: 4987422 - DNA, 25 bp, Homo sapien
ggatcctggcgattcaacattggca

SEQ ID NO: 4987423 - DNA, 25 bp, Homo sapien
atcaaaatcggaaagggagcaggaa

SEQ ID NO: 4987424 - DNA, 25 bp, Homo sapien
caaattaggtctagatgcacctcga

SEQ ID NO: 4987425 - DNA, 25 bp, Homo sapien
acctggctgccatacgagggaaatc

SEQ ID NO: 4987426 - DNA, 25 bp, Homo sapien
caggaagagcacaaattaggtctag

SEQ ID NO: 4987427 - DNA, 25 bp, Homo sapien
tgcagatatgagtcatcagatttat

SEQ ID NO: 4987428 - DNA, 25 bp, Homo sapien
gcatatcatccaccatagttagtat

SEQ ID NO: 4987429 - DNA, 25 bp, Homo sapien
tactgaacggtctgttctttgcaga

SEQ ID NO: 4987430 - DNA, 25 bp, Homo sapien
tagtatatactgaacggtctgttct

SEQ ID NO: 4987431 - DNA, 25 bp, Homo sapien
taactcttgattaccgacgacggca

SEQ ID NO: 4987432 - DNA, 25 bp, Homo sapien
cagaaggccctgactagtctccatt

SEQ ID NO: 4987433 - DNA, 25 bp, Homo sapien
caagagcaacaagagtaccagagat

SEQ ID NO: 4987434 - DNA, 25 bp, Homo sapien
ccatgactgttgtaagaatcagacc

SEQ ID NO: 4987435 - DNA, 25 bp, Homo sapien
tacacaacggaactttccataaatg

SEQ ID NO: 4987436 - DNA, 25 bp, Homo sapien
tatgagattactaactgttcgcctc

SEQ ID NO: 4987437 - DNA, 25 bp, Homo sapien
gccagataattgcacttctcgaatt

SEQ ID NO: 4987438 - DNA, 25 bp, Homo sapien
gccaaaatatgcaacagtatagaat

SEQ ID NO: 4987439 - DNA, 25 bp, Homo sapien
tcccatgtcatcaaagtgatatccc

SEQ ID NO: 4987440 - DNA, 25 bp, Homo sapien
ccagaaatttgtcttccaggtgtat

SEQ ID NO: 4987441 - DNA, 25 bp, Homo sapien
cattactagtaagaataccaagtgg

SEQ ID NO: 4987442 - DNA, 25 bp, Homo sapien
gtcaccttgaacagagaaatattag

SEQ ID NO: 4987443 - DNA, 25 bp, Homo sapien
gaataaactcacaatcttcagcaga

SEQ ID NO: 4987444 - DNA, 25 bp, Homo sapien
catttcaaacctctgaataaactca

SEQ ID NO: 4987445 - DNA, 25 bp, Homo sapien
gcttctcttcagggcttcgtttcat

SEQ ID NO: 4987446 - DNA, 25 bp, Homo sapien
ctgaataaactcacaatcttcagca

SEQ ID NO: 4987447 - DNA, 25 bp, Homo sapien
ttccataatccagcaggttcggggc

SEQ ID NO: 4987448 - DNA, 25 bp, Homo sapien
tttccataatccagcaggttcgggg

SEQ ID NO: 4987449 - DNA, 25 bp, Homo sapien
catttccataatccagcaggttcgg

SEQ ID NO: 4987450 - DNA, 25 bp, Homo sapien
atttccataatccagcaggttcggg

SEQ ID NO: 4987451 - DNA, 25 bp, Homo sapien
gcagatatggtcttctaactcccgg

SEQ ID NO: 4987452 - DNA, 25 bp, Homo sapien
cactgactgataggatcaagtccaa

SEQ ID NO: 4987453 - DNA, 25 bp, Homo sapien
tagtagaacaattcaatcaagaggc

SEQ ID NO: 4987454 - DNA, 25 bp, Homo sapien
taactcccggctacaagattcattg

SEQ ID NO: 4987455 - DNA, 25 bp, Homo sapien
tgaagataggattgccagttgactt

SEQ ID NO: 4987456 - DNA, 25 bp, Homo sapien
gcacctcggatatccattttggtca

SEQ ID NO: 4987457 - DNA, 25 bp, Homo sapien
tgactttgtttgcacgaacttctgc

SEQ ID NO: 4987458 - DNA, 25 bp, Homo sapien
acagcacctcggatatccattttgg

SEQ ID NO: 4987459 - DNA, 25 bp, Homo sapien
cgtaatcttgaatgtctttcaacaa

SEQ ID NO: 4987460 - DNA, 25 bp, Homo sapien
tcgtaatcttgaatgtctttcaaca

SEQ ID NO: 4987461 - DNA, 25 bp, Homo sapien
ctaaacttcgtaatcttgaatgtct

SEQ ID NO: 4987462 - DNA, 25 bp, Homo sapien
acttcgtaatcttgaatgtctttca

SEQ ID NO: 4987463 - DNA, 25 bp, Homo sapien
caatttggaacttaatctctgtatc

SEQ ID NO: 4987464 - DNA, 25 bp, Homo sapien
cagcgcgaacgacagggcccaggaa

SEQ ID NO: 4987465 - DNA, 25 bp, Homo sapien
tataaacaaccctgggcagcgcgaa

SEQ ID NO: 4987466 - DNA, 25 bp, Homo sapien
tccgggtttccaacgatcttaatca

SEQ ID NO: 4987467 - DNA, 25 bp, Homo sapien
ccccagcgatccagggccgtggccc

SEQ ID NO: 4987468 - DNA, 25 bp, Homo sapien
acctaagtccctgaactactcgcac

SEQ ID NO: 4987469 - DNA, 25 bp, Homo sapien
cccccagcgatccagggccgtggcc

SEQ ID NO: 4987470 - DNA, 25 bp, Homo sapien
ctaagtccctgaactactcgcaccc

SEQ ID NO: 4987471 - DNA, 25 bp, Homo sapien
tcctgcccgcccctgacgtttcttc

SEQ ID NO: 4987472 - DNA, 25 bp, Homo sapien
tttcttccccctgcgagaaaggctc

SEQ ID NO: 4987473 - DNA, 25 bp, Homo sapien
ttccccctgcgagaaaggctccaga

SEQ ID NO: 4987474 - DNA, 25 bp, Homo sapien
ggctccagaatttcgcttaataaac

SEQ ID NO: 4987475 - DNA, 25 bp, Homo sapien
agaacaggagaggaccaagcggcga

SEQ ID NO: 4987476 - DNA, 25 bp, Homo sapien
gaccaagcggcgagacaccagcacg

SEQ ID NO: 4987477 - DNA, 25 bp, Homo sapien
aaagcaatctggcaaccgggggccg

SEQ ID NO: 4987478 - DNA, 25 bp, Homo sapien
aagaaaagcaatctggcaaccgggg

SEQ ID NO: 4987479 - DNA, 25 bp, Homo sapien
agccgaaagtgaagcgggtcccgca

SEQ ID NO: 4987480 - DNA, 25 bp, Homo sapien
tgtcaggtccagaggtctgagcagt

SEQ ID NO: 4987481 - DNA, 25 bp, Homo sapien
ggtcccgcaccaaggagacgttgag

SEQ ID NO: 4987482 - DNA, 25 bp, Homo sapien
caagtaggcgtctcctgtcaggtcc

SEQ ID NO: 4987483 - DNA, 25 bp, Homo sapien
gcggaaggcggaagccgggagactc

SEQ ID NO: 4987484 - DNA, 25 bp, Homo sapien
gaagccgggagactccaaagcagca

SEQ ID NO: 4987485 - DNA, 25 bp, Homo sapien
ctgcggaaggcggaagccgggagac

SEQ ID NO: 4987486 - DNA, 25 bp, Homo sapien
gcggaagccgggagactccaaagca

SEQ ID NO: 4987487 - DNA, 25 bp, Homo sapien
tgttcggtgcggacaactggattcc

SEQ ID NO: 4987488 - DNA, 25 bp, Homo sapien
agcgtggcgggcacgctaagacccg

SEQ ID NO: 4987489 - DNA, 25 bp, Homo sapien
gtaacttgggccccggagcgacgca

SEQ ID NO: 4987490 - DNA, 25 bp, Homo sapien
ctggattcccgagtccgtaacttgg

SEQ ID NO: 4987491 - DNA, 25 bp, Homo sapien
tccataccagtgtcctgaatactca

SEQ ID NO: 4987492 - DNA, 25 bp, Homo sapien
actccataccagtgtcctgaatact

SEQ ID NO: 4987493 - DNA, 25 bp, Homo sapien
ccataccagtgtcctgaatactcat

SEQ ID NO: 4987494 - DNA, 25 bp, Homo sapien
ctccataccagtgtcctgaatactc

SEQ ID NO: 4987495 - DNA, 25 bp, Homo sapien
ggaggacaaggctctctgaagtgca

SEQ ID NO: 4987496 - DNA, 25 bp, Homo sapien
caagtattctggatccctaaggacc

SEQ ID NO: 4987497 - DNA, 25 bp, Homo sapien
ttcatacggatttaggctgtggcga

SEQ ID NO: 4987498 - DNA, 25 bp, Homo sapien
tttcgtctgcataaaggcactctgg

SEQ ID NO: 4987499 - DNA, 25 bp, Homo sapien
cacttcaagtagcacggagttagga

SEQ ID NO: 4987500 - DNA, 25 bp, Homo sapien
gtcccctgggaatgttaccatgcag

SEQ ID NO: 4987501 - DNA, 25 bp, Homo sapien
caatagaatctagtagccaaggcca

SEQ ID NO: 4987502 - DNA, 25 bp, Homo sapien
catgtcacattcagcgcgcatggta

SEQ ID NO: 4987503 - DNA, 25 bp, Homo sapien
ggtgatgatcgtccctgtaaggatt

SEQ ID NO: 4987504 - DNA, 25 bp, Homo sapien
ggttcaacctctagggtgatgatcg

SEQ ID NO: 4987505 - DNA, 25 bp, Homo sapien
caacctctagggtgatgatcgtccc

SEQ ID NO: 4987506 - DNA, 25 bp, Homo sapien
tctagggtgatgatcgtccctgtaa

SEQ ID NO: 4987507 - DNA, 25 bp, Homo sapien
ggttctggaagcctagagcccttca

SEQ ID NO: 4987508 - DNA, 25 bp, Homo sapien
tcccgttcattcgacttccagttct

SEQ ID NO: 4987509 - DNA, 25 bp, Homo sapien
ctccccaacacactttatgcctcct

SEQ ID NO: 4987510 - DNA, 25 bp, Homo sapien
ctggaagcctagagcccttcaaatg

SEQ ID NO: 4987511 - DNA, 25 bp, Homo sapien
gaccaagtatttaagaccagaggat

SEQ ID NO: 4987512 - DNA, 25 bp, Homo sapien
ttaagaccaagtatttaagaccaga

SEQ ID NO: 4987513 - DNA, 25 bp, Homo sapien
accaagtatttaagaccagaggatc

SEQ ID NO: 4987514 - DNA, 25 bp, Homo sapien
aagaccaagtatttaagaccagagg

SEQ ID NO: 4987515 - DNA, 25 bp, Homo sapien
ctctcctttccgagctctgctgcct

SEQ ID NO: 4987516 - DNA, 25 bp, Homo sapien
tctccagaggttgcgcagaccaaca

SEQ ID NO: 4987517 - DNA, 25 bp, Homo sapien
cagaggttgcgcagaccaacagtgg

SEQ ID NO: 4987518 - DNA, 25 bp, Homo sapien
tttggcctctccagaggttgcgcag

SEQ ID NO: 4987519 - DNA, 25 bp, Homo sapien
tagacctggctgttccaaccaggcc

SEQ ID NO: 4987520 - DNA, 25 bp, Homo sapien
atgcagctgggtcgcttcccttttt

SEQ ID NO: 4987521 - DNA, 25 bp, Homo sapien
cctagacctggctgttccaaccagg

SEQ ID NO: 4987522 - DNA, 25 bp, Homo sapien
cagctgggtcgcttccctttttcct

SEQ ID NO: 4987523 - DNA, 25 bp, Homo sapien
tgaggcctcagtgcccgaattgagt

SEQ ID NO: 4987524 - DNA, 25 bp, Homo sapien
ctcagtgcccgaattgagtgaatga

SEQ ID NO: 4987525 - DNA, 25 bp, Homo sapien
gcctcagtgcccgaattgagtgaat

SEQ ID NO: 4987526 - DNA, 25 bp, Homo sapien
cctgaggcctcagtgcccgaattga

SEQ ID NO: 4987527 - DNA, 25 bp, Homo sapien
tctcgtcagcctgctgtattagctg

SEQ ID NO: 4987528 - DNA, 25 bp, Homo sapien
tgctgtattagctgggccgcccttc

SEQ ID NO: 4987529 - DNA, 25 bp, Homo sapien
ttctgacctctcgtcagcctgctgt

SEQ ID NO: 4987530 - DNA, 25 bp, Homo sapien
tgacctctcgtcagcctgctgtatt

SEQ ID NO: 4987531 - DNA, 25 bp, Homo sapien
tctctgctgcctcacgcagggtgtg

SEQ ID NO: 4987532 - DNA, 25 bp, Homo sapien
gggaaatgagaccatcctcctagag

SEQ ID NO: 4987533 - DNA, 25 bp, Homo sapien
gaggcggctgacatgctgacctgaa

SEQ ID NO: 4987534 - DNA, 25 bp, Homo sapien
gagactccagctgacgttcaaacct

SEQ ID NO: 4987535 - DNA, 25 bp, Homo sapien
tctattaatacttggggatctgaag

SEQ ID NO: 4987536 - DNA, 25 bp, Homo sapien
atttctagtaccttattgtcacact

SEQ ID NO: 4987537 - DNA, 25 bp, Homo sapien
agatcagaggcccacaatagcttcc

SEQ ID NO: 4987538 - DNA, 25 bp, Homo sapien
tcccacgaactcagagcagatcttc

SEQ ID NO: 4987539 - DNA, 25 bp, Homo sapien
gaaagacgctactttgcaggaggcg

SEQ ID NO: 4987540 - DNA, 25 bp, Homo sapien
taagaaagtagggatacgtgcagcc

SEQ ID NO: 4987541 - DNA, 25 bp, Homo sapien
caaaatctgggacgctctgagtagt

SEQ ID NO: 4987542 - DNA, 25 bp, Homo sapien
taccagttggtagacctagaccatc

SEQ ID NO: 4987543 - DNA, 25 bp, Homo sapien
atctccctcagtccagtcccagaga

SEQ ID NO: 4987544 - DNA, 25 bp, Homo sapien
cctcctttttgaggtgtcaatccct

SEQ ID NO: 4987545 - DNA, 25 bp, Homo sapien
tctcctcctttttgaggtgtcaatc

SEQ ID NO: 4987546 - DNA, 25 bp, Homo sapien
gtgtcaatcccttacatgtgcttcc

SEQ ID NO: 4987547 - DNA, 25 bp, Homo sapien
cttagagctttgttccagcagtttc

SEQ ID NO: 4987548 - DNA, 25 bp, Homo sapien
tacttagagctttgttccagcagtt

SEQ ID NO: 4987549 - DNA, 25 bp, Homo sapien
tagagctttgttccagcagtttctc

SEQ ID NO: 4987550 - DNA, 25 bp, Homo sapien
ttacttagagctttgttccagcagt

SEQ ID NO: 4987551 - DNA, 25 bp, Homo sapien
ggctttttcccgcaccgtaagcatg

SEQ ID NO: 4987552 - DNA, 25 bp, Homo sapien
tgtatcactgagttcaccttggctt

SEQ ID NO: 4987553 - DNA, 25 bp, Homo sapien
acaaacgcgcgttccactgtaacag

SEQ ID NO: 4987554 - DNA, 25 bp, Homo sapien
taagcatgctcgatttcccggttaa

SEQ ID NO: 4987555 - DNA, 25 bp, Homo sapien
gaaaaggtgcatatgccactcagac

SEQ ID NO: 4987556 - DNA, 25 bp, Homo sapien
gaacttgagaatcagctcccagctg

SEQ ID NO: 4987557 - DNA, 25 bp, Homo sapien
tcttggcccagcataataagcaagg

SEQ ID NO: 4987558 - DNA, 25 bp, Homo sapien
tggttgtgactcatgaccccactgc

SEQ ID NO: 4987559 - DNA, 25 bp, Homo sapien
tccttggtcagtatagatttccgaa

SEQ ID NO: 4987560 - DNA, 25 bp, Homo sapien
gatcacggttagttacagatgcaaa

SEQ ID NO: 4987561 - DNA, 25 bp, Homo sapien
tagagcaagtgtaccctagggaacc

SEQ ID NO: 4987562 - DNA, 25 bp, Homo sapien
tactgaggtctttctacgggtgcct

SEQ ID NO: 4987563 - DNA, 25 bp, Homo sapien
caaattttctcaacacgattgaaaa

SEQ ID NO: 4987564 - DNA, 25 bp, Homo sapien
gaaaaagaaggtgaatgtccctctc

SEQ ID NO: 4987565 - DNA, 25 bp, Homo sapien
tctcctagaccaatgacaacttctg

SEQ ID NO: 4987566 - DNA, 25 bp, Homo sapien
gaaggtgaatgtccctctcctagac

SEQ ID NO: 4987567 - DNA, 25 bp, Homo sapien
atataatatgaatccaagagagtcc

SEQ ID NO: 4987568 - DNA, 25 bp, Homo sapien
agtatataatatgaatccaagagag

SEQ ID NO: 4987569 - DNA, 25 bp, Homo sapien
tataatatgaatccaagagagtcca

SEQ ID NO: 4987570 - DNA, 25 bp, Homo sapien
tatataatatgaatccaagagagtc

SEQ ID NO: 4987571 - DNA, 25 bp, Homo sapien
ggttcatcagcactacgggtttgta

SEQ ID NO: 4987572 - DNA, 25 bp, Homo sapien
tggttcatcagcactacgggtttgt

SEQ ID NO: 4987573 - DNA, 25 bp, Homo sapien
gttcatcagcactacgggtttgtac

SEQ ID NO: 4987574 - DNA, 25 bp, Homo sapien
tttctgataaagatagcaaagcaat

SEQ ID NO: 4987575 - DNA, 25 bp, Homo sapien
actatgctgtggataagagggtacc

SEQ ID NO: 4987576 - DNA, 25 bp, Homo sapien
agttcaagttgaactatgctgtgga

SEQ ID NO: 4987577 - DNA, 25 bp, Homo sapien
gggtaccacattaaccatagcactg

SEQ ID NO: 4987578 - DNA, 25 bp, Homo sapien
ggttatgaaaactcaacagacagta

SEQ ID NO: 4987579 - DNA, 25 bp, Homo sapien
caagatcaagtgttctaagacaaga

SEQ ID NO: 4987580 - DNA, 25 bp, Homo sapien
tggttccatccataacggcaagtgg

SEQ ID NO: 4987581 - DNA, 25 bp, Homo sapien
gatgaaggacattagactcgggcac

SEQ ID NO: 4987582 - DNA, 25 bp, Homo sapien
cacttcccacttgttcaatgtgcat

SEQ ID NO: 4987583 - DNA, 25 bp, Homo sapien
tcaagcaatgtacacttcccacttg

SEQ ID NO: 4987584 - DNA, 25 bp, Homo sapien
tccctcagatcccaatttcaagaaa

SEQ ID NO: 4987585 - DNA, 25 bp, Homo sapien
tgttcaatgtgcatccctcagatcc

SEQ ID NO: 4987586 - DNA, 25 bp, Homo sapien
gctacctttcaagaatatgaataaa

SEQ ID NO: 4987587 - DNA, 25 bp, Homo sapien
tccaactagtggaaagttactctag

SEQ ID NO: 4987588 - DNA, 25 bp, Homo sapien
gttcttaattgtggatgactgacaa

SEQ ID NO: 4987589 - DNA, 25 bp, Homo sapien
tattgtatattcctatagattagtc

SEQ ID NO: 4987590 - DNA, 25 bp, Homo sapien
caattccactgttgggtacataacc

SEQ ID NO: 4987591 - DNA, 25 bp, Homo sapien
gaggtatctgtacacttaagttcac

SEQ ID NO: 4987592 - DNA, 25 bp, Homo sapien
tataagccattactactgcaattcc

SEQ ID NO: 4987593 - DNA, 25 bp, Homo sapien
ttggaaggcagcttaatggatgact

SEQ ID NO: 4987594 - DNA, 25 bp, Homo sapien
aaggcccctttagagtttagtgatg

SEQ ID NO: 4987595 - DNA, 25 bp, Homo sapien
catagtaagttgtcccttaaggaga

SEQ ID NO: 4987596 - DNA, 25 bp, Homo sapien
gagtttacagcagataacatagcac

SEQ ID NO: 4987597 - DNA, 25 bp, Homo sapien
gttctatcggtgaaaaaatcaattc

SEQ ID NO: 4987598 - DNA, 25 bp, Homo sapien
gtcaacagcagcctaacacttagtc

SEQ ID NO: 4987599 - DNA, 25 bp, Homo sapien
ggaccacctgaagcagatgagcctc

SEQ ID NO: 4987600 - DNA, 25 bp, Homo sapien
accacctgaagcagatgagcctcct

SEQ ID NO: 4987601 - DNA, 25 bp, Homo sapien
aatgcctacatcattcacttcgcct

SEQ ID NO: 4987602 - DNA, 25 bp, Homo sapien
gtttttccgcatctctttcagctca

SEQ ID NO: 4987603 - DNA, 25 bp, Homo sapien
ttggtcaagtttttccgcatctctt

SEQ ID NO: 4987604 - DNA, 25 bp, Homo sapien
tttgccacatgtgaacaagtcagtc

SEQ ID NO: 4987605 - DNA, 25 bp, Homo sapien
agtctgggtcccaccagtcttggcc

SEQ ID NO: 4987606 - DNA, 25 bp, Homo sapien
tttggaaaggattaaccatcctaga

SEQ ID NO: 4987607 - DNA, 25 bp, Homo sapien
gatagatctgaataaagtaaactga

SEQ ID NO: 4987608 - DNA, 25 bp, Homo sapien
aaggctgtagcttctacaaaaagta

SEQ ID NO: 4987609 - DNA, 25 bp, Homo sapien
gagaagaggtcaatatgtcaacatt

SEQ ID NO: 4987610 - DNA, 25 bp, Homo sapien
gatttgatatcctacttcgtactct

SEQ ID NO: 4987611 - DNA, 25 bp, Homo sapien
tctttaagatttgatatcctacttc

SEQ ID NO: 4987612 - DNA, 25 bp, Homo sapien
tatcctacttcgtactctatttttg

SEQ ID NO: 4987613 - DNA, 25 bp, Homo sapien
aggaatattcccacagaggacattt

SEQ ID NO: 4987614 - DNA, 25 bp, Homo sapien
caaaattacaaaagtaagatcactt

SEQ ID NO: 4987615 - DNA, 25 bp, Homo sapien
ggcaaaattacaaaagtaagatcac

SEQ ID NO: 4987616 - DNA, 25 bp, Homo sapien
gcaaaattacaaaagtaagatcact

SEQ ID NO: 4987617 - DNA, 25 bp, Homo sapien
aggcaaaattacaaaagtaagatca

SEQ ID NO: 4987618 - DNA, 25 bp, Homo sapien
cctctgggataatgagctcaggtga

SEQ ID NO: 4987619 - DNA, 25 bp, Homo sapien
ggtgcttagcaagaacacgcttcct

SEQ ID NO: 4987620 - DNA, 25 bp, Homo sapien
agccctttcccggtgcttagcaaga

SEQ ID NO: 4987621 - DNA, 25 bp, Homo sapien
cacgcttcctctgggataatgagct

SEQ ID NO: 4987622 - DNA, 25 bp, Homo sapien
tcctcatcagctccaattgcaatgt

SEQ ID NO: 4987623 - DNA, 25 bp, Homo sapien
catcagctccaattgcaatgtagtc

SEQ ID NO: 4987624 - DNA, 25 bp, Homo sapien
ctcatcagctccaattgcaatgtag

SEQ ID NO: 4987625 - DNA, 25 bp, Homo sapien
tcagctccaattgcaatgtagtcat

SEQ ID NO: 4987626 - DNA, 25 bp, Homo sapien
ggaaaggatgaaacataagtatctc

SEQ ID NO: 4987627 - DNA, 25 bp, Homo sapien
tctgttgcttacattgccgctggaa

SEQ ID NO: 4987628 - DNA, 25 bp, Homo sapien
taagtatctcgagcatttgtctcat

SEQ ID NO: 4987629 - DNA, 25 bp, Homo sapien
gttgcttacattgccgctggaagta

SEQ ID NO: 4987630 - DNA, 25 bp, Homo sapien
tcaagtgataattccgcctcggcgt

SEQ ID NO: 4987631 - DNA, 25 bp, Homo sapien
agaaagccttgactacgccactgca

SEQ ID NO: 4987632 - DNA, 25 bp, Homo sapien
cacagtggtgaagagagcaagagtt

SEQ ID NO: 4987633 - DNA, 25 bp, Homo sapien
aagaacagcccggacaaaatagtga

SEQ ID NO: 4987634 - DNA, 25 bp, Homo sapien
tgggctgagggaaacttttcctcac

SEQ ID NO: 4987635 - DNA, 25 bp, Homo sapien
tataaaatcctgcttagctacaagc

SEQ ID NO: 4987636 - DNA, 25 bp, Homo sapien
ggaaccaagggaaattgcccatatg

SEQ ID NO: 4987637 - DNA, 25 bp, Homo sapien
tctgtgtctgtagccaaatgctcca

SEQ ID NO: 4987638 - DNA, 25 bp, Homo sapien
aatgtggtaaatagaggaagcaacc

SEQ ID NO: 4987639 - DNA, 25 bp, Homo sapien
ggagaatgagatcaagggccaaaat

SEQ ID NO: 4987640 - DNA, 25 bp, Homo sapien
tgtgcctagccacaaattgctaaat

SEQ ID NO: 4987641 - DNA, 25 bp, Homo sapien
gcaaccatttgaatccctaatcact

SEQ ID NO: 4987642 - DNA, 25 bp, Homo sapien
ggctgttctgcgatgtaattgcagg

SEQ ID NO: 4987643 - DNA, 25 bp, Homo sapien
gcgatgtaattgcaggttctttctt

SEQ ID NO: 4987644 - DNA, 25 bp, Homo sapien
ctcagggctgttctgcgatgtaatt

SEQ ID NO: 4987645 - DNA, 25 bp, Homo sapien
cttcttttcgtcaaggtctttctca

SEQ ID NO: 4987646 - DNA, 25 bp, Homo sapien
gaatagcattaactgacattccgat

SEQ ID NO: 4987647 - DNA, 25 bp, Homo sapien
ttaactgacattccgattcttgtgg

SEQ ID NO: 4987648 - DNA, 25 bp, Homo sapien
tctgtactctgcttgcgaatagcat

SEQ ID NO: 4987649 - DNA, 25 bp, Homo sapien
gcttgcgaatagcattaactgacat

SEQ ID NO: 4987650 - DNA, 25 bp, Homo sapien
gagagtgcattaagcagccttaggg

SEQ ID NO: 4987651 - DNA, 25 bp, Homo sapien
gatcactcatgagtttttgccaaga

SEQ ID NO: 4987652 - DNA, 25 bp, Homo sapien
caagatgatctcaaggtagccacta

SEQ ID NO: 4987653 - DNA, 25 bp, Homo sapien
actgagatcaagagacactgttaac

SEQ ID NO: 4987654 - DNA, 25 bp, Homo sapien
agggtcataggaatattcttaagct

SEQ ID NO: 4987655 - DNA, 25 bp, Homo sapien
ccagggtcataggaatattcttaag

SEQ ID NO: 4987656 - DNA, 25 bp, Homo sapien
cagggtcataggaatattcttaagc

SEQ ID NO: 4987657 - DNA, 25 bp, Homo sapien
tatcccagctcctacgaaattctaa

SEQ ID NO: 4987658 - DNA, 25 bp, Homo sapien
gttatactacttgactgcatgcggg

SEQ ID NO: 4987659 - DNA, 25 bp, Homo sapien
tgtgagcaccacaacccttgcattg

SEQ ID NO: 4987660 - DNA, 25 bp, Homo sapien
tgcatgagttatactactacaaaag

SEQ ID NO: 4987661 - DNA, 25 bp, Homo sapien
ttaaagtcaacggagagcgtgccct

SEQ ID NO: 4987662 - DNA, 25 bp, Homo sapien
tagatgttggccacggatcacggaa

SEQ ID NO: 4987663 - DNA, 25 bp, Homo sapien
tttattacacggcaccagcgagcag

SEQ ID NO: 4987664 - DNA, 25 bp, Homo sapien
ctggaaatacaagagcgagcgggtc

SEQ ID NO: 4987665 - DNA, 25 bp, Homo sapien
cttggcaaagcggaccacttcgtcc

SEQ ID NO: 4987666 - DNA, 25 bp, Homo sapien
tggcaaagcggaccacttcgtcctc

SEQ ID NO: 4987667 - DNA, 25 bp, Homo sapien
ttggcaaagcggaccacttcgtcct

SEQ ID NO: 4987668 - DNA, 25 bp, Homo sapien
ggcaggtcttctccgcgcccacccc

SEQ ID NO: 4987669 - DNA, 25 bp, Homo sapien
cggcaggtcttctccgcgcccaccc

SEQ ID NO: 4987670 - DNA, 25 bp, Homo sapien
ggctccggcaggtcttctccgcgcc

SEQ ID NO: 4987671 - DNA, 25 bp, Homo sapien
ggcgcgcagcaacccccaccaccgc

SEQ ID NO: 4987672 - DNA, 25 bp, Homo sapien
gcggaagacacagcaggagcgaccc

SEQ ID NO: 4987673 - DNA, 25 bp, Homo sapien
caccaccgcaggcccgggcctaggc

SEQ ID NO: 4987674 - DNA, 25 bp, Homo sapien
ggagcgacccccggcgcgcagcaac

SEQ ID NO: 4987675 - DNA, 25 bp, Homo sapien
gttttgctgcgcgttcacctccggt

SEQ ID NO: 4987676 - DNA, 25 bp, Homo sapien
aactgactgcagatcgctggtgagg

SEQ ID NO: 4987677 - DNA, 25 bp, Homo sapien
gcgcgacgtgcaggcgctaccaact

SEQ ID NO: 4987678 - DNA, 25 bp, Homo sapien
aggcagcgacaatcgaacaccgcgc

SEQ ID NO: 4987679 - DNA, 25 bp, Homo sapien
tgttcatggtttatttagctggtcc

SEQ ID NO: 4987680 - DNA, 25 bp, Homo sapien
tgggttgtatcaaacattgtgctgt

SEQ ID NO: 4987681 - DNA, 25 bp, Homo sapien
ttgtgctgtcacaaataacacttgt

SEQ ID NO: 4987682 - DNA, 25 bp, Homo sapien
gttcaatgcagcctcgcactcggct

SEQ ID NO: 4987683 - DNA, 25 bp, Homo sapien
tatctcatcttaagccccaaagtta

SEQ ID NO: 4987684 - DNA, 25 bp, Homo sapien
tctggccactggagattgtacttta

SEQ ID NO: 4987685 - DNA, 25 bp, Homo sapien
actttatggtgagctgatttgtatc

SEQ ID NO: 4987686 - DNA, 25 bp, Homo sapien
ccaaagttaactgtgtcatgcgggt

SEQ ID NO: 4987687 - DNA, 25 bp, Homo sapien
cactttatggtatagggttctgact

SEQ ID NO: 4987688 - DNA, 25 bp, Homo sapien
tttcaaataagtccactggcagatg

SEQ ID NO: 4987689 - DNA, 25 bp, Homo sapien
taacatcctgtatagtccattacta

SEQ ID NO: 4987690 - DNA, 25 bp, Homo sapien
ttatgtctgcatcaaaaactaatac

SEQ ID NO: 4987691 - DNA, 25 bp, Homo sapien
tcaattggaggtaggagtttatcaa

SEQ ID NO: 4987692 - DNA, 25 bp, Homo sapien
gagtttatcaatgaattgcttgaca

SEQ ID NO: 4987693 - DNA, 25 bp, Homo sapien
tcaatcaattggaggtaggagttta

SEQ ID NO: 4987694 - DNA, 25 bp, Homo sapien
ggtaggagtttatcaatgaattgct

SEQ ID NO: 4987695 - DNA, 25 bp, Homo sapien
tatatcagtaggagaacaccctagg

SEQ ID NO: 4987696 - DNA, 25 bp, Homo sapien
cattcagcccagagttgttgtagac

SEQ ID NO: 4987697 - DNA, 25 bp, Homo sapien
tgcacacattaagggttccaggact

SEQ ID NO: 4987698 - DNA, 25 bp, Homo sapien
caccctaggttcaggttcccaggca

SEQ ID NO: 4987699 - DNA, 25 bp, Homo sapien
aaaggtctatacatgttgcctctgc

SEQ ID NO: 4987700 - DNA, 25 bp, Homo sapien
cagcagcaacctccggagatcaagt

SEQ ID NO: 4987701 - DNA, 25 bp, Homo sapien
gcctctagagtaattggaaccacag

SEQ ID NO: 4987702 - DNA, 25 bp, Homo sapien
aaggcaagcactatacatctcagga

SEQ ID NO: 4987703 - DNA, 25 bp, Homo sapien
cccaagcattcaaatgttacttttc

SEQ ID NO: 4987704 - DNA, 25 bp, Homo sapien
tggcgctgatcactgcttctagaca

SEQ ID NO: 4987705 - DNA, 25 bp, Homo sapien
agttacaaatatggcgctgatcact

SEQ ID NO: 4987706 - DNA, 25 bp, Homo sapien
tttaaatccccaagcattcaaatgt

SEQ ID NO: 4987707 - DNA, 25 bp, Homo sapien
ctgttgacacgaactgtgcatcata

SEQ ID NO: 4987708 - DNA, 25 bp, Homo sapien
tcacattggctggattcaccaatgt

SEQ ID NO: 4987709 - DNA, 25 bp, Homo sapien
ccaaagggtcacaatccccgtggca

SEQ ID NO: 4987710 - DNA, 25 bp, Homo sapien
tgtgcatcataccttcataggtttt

SEQ ID NO: 4987711 - DNA, 25 bp, Homo sapien
ctctattagcaccaccgataggacc

SEQ ID NO: 4987712 - DNA, 25 bp, Homo sapien
tctctattagcaccaccgataggac

SEQ ID NO: 4987713 - DNA, 25 bp, Homo sapien
aaatatctctattagcaccaccgat

SEQ ID NO: 4987714 - DNA, 25 bp, Homo sapien
tatctctattagcaccaccgatagg

SEQ ID NO: 4987715 - DNA, 25 bp, Homo sapien
tggtaagggcagtatataaagataa

SEQ ID NO: 4987716 - DNA, 25 bp, Homo sapien
gtggtaagggcagtatataaagata

SEQ ID NO: 4987717 - DNA, 25 bp, Homo sapien
catgggttactgcaacacatgagta

SEQ ID NO: 4987718 - DNA, 25 bp, Homo sapien
gagtacacgagagcctttcacatcc

SEQ ID NO: 4987719 - DNA, 25 bp, Homo sapien
ttcagagtatctgcctacccagctc

SEQ ID NO: 4987720 - DNA, 25 bp, Homo sapien
cattctggaagctgtactcctgcca

SEQ ID NO: 4987721 - DNA, 25 bp, Homo sapien
aattctgttagaaggaatgccattc

SEQ ID NO: 4987722 - DNA, 25 bp, Homo sapien
cacttcttgatcaatcaaagctttt

SEQ ID NO: 4987723 - DNA, 25 bp, Homo sapien
ttcttcacttcttgatcaatcaaag

SEQ ID NO: 4987724 - DNA, 25 bp, Homo sapien
ctcccaaaataattctgttagaagg

SEQ ID NO: 4987725 - DNA, 25 bp, Homo sapien
tctttaatgaagataactggccaaa

SEQ ID NO: 4987726 - DNA, 25 bp, Homo sapien
ttaatgaagataactggccaaaact

SEQ ID NO: 4987727 - DNA, 25 bp, Homo sapien
gtctctttaatgaagataactggcc

SEQ ID NO: 4987728 - DNA, 25 bp, Homo sapien
taatgaagataactggccaaaacta

SEQ ID NO: 4987729 - DNA, 25 bp, Homo sapien
ggaaacagcagtacctcctgagatt

SEQ ID NO: 4987730 - DNA, 25 bp, Homo sapien
gcaaacaagtaacagagtgaccaga

SEQ ID NO: 4987731 - DNA, 25 bp, Homo sapien
cggccggccaaaactatataaacat

SEQ ID NO: 4987732 - DNA, 25 bp, Homo sapien
tccatgcggacactgtggcaaacaa

SEQ ID NO: 4987733 - DNA, 25 bp, Homo sapien
gctgcctgtttaatcccagattcat

SEQ ID NO: 4987734 - DNA, 25 bp, Homo sapien
cctgtgaatctggtgaaagcccaat

SEQ ID NO: 4987735 - DNA, 25 bp, Homo sapien
tgcctgtttaatcccagattcatcc

SEQ ID NO: 4987736 - DNA, 25 bp, Homo sapien
ttctgctgcctgtttaatcccagat

SEQ ID NO: 4987737 - DNA, 25 bp, Homo sapien
agaaaaatctattattgtagtaagt

SEQ ID NO: 4987738 - DNA, 25 bp, Homo sapien
aaatctattattgtagtaagtatat

SEQ ID NO: 4987739 - DNA, 25 bp, Homo sapien
tattattgtagtaagtatattttac

SEQ ID NO: 4987740 - DNA, 25 bp, Homo sapien
gaaaaatctattattgtagtaagta

SEQ ID NO: 4987741 - DNA, 25 bp, Homo sapien
gaaggcatagccacgttcatattta

SEQ ID NO: 4987742 - DNA, 25 bp, Homo sapien
tcatatttaatgtaacaggcctaac

SEQ ID NO: 4987743 - DNA, 25 bp, Homo sapien
gccacgttcatatttaatgtaacag

SEQ ID NO: 4987744 - DNA, 25 bp, Homo sapien
tatttaatgtaacaggcctaacagg

SEQ ID NO: 4987745 - DNA, 25 bp, Homo sapien
atgaagtaagtccaccttagaggtt

SEQ ID NO: 4987746 - DNA, 25 bp, Homo sapien
tgaagtaagtccaccttagaggtta

SEQ ID NO: 4987747 - DNA, 25 bp, Homo sapien
caccttagaggttacaaactgtatc

SEQ ID NO: 4987748 - DNA, 25 bp, Homo sapien
agtccaccttagaggttacaaactg

SEQ ID NO: 4987749 - DNA, 25 bp, Homo sapien
tatatttgatatgtgaacttctgat

SEQ ID NO: 4987750 - DNA, 25 bp, Homo sapien
tatttgatatgtgaacttctgatac

SEQ ID NO: 4987751 - DNA, 25 bp, Homo sapien
gcatgcgggcagatatatttgatat

SEQ ID NO: 4987752 - DNA, 25 bp, Homo sapien
gatatatttgatatgtgaacttctg

SEQ ID NO: 4987753 - DNA, 25 bp, Homo sapien
ctgcaaaggcttctgcccatccgtg

SEQ ID NO: 4987754 - DNA, 25 bp, Homo sapien
tgcaaaggcttctgcccatccgtgc

SEQ ID NO: 4987755 - DNA, 25 bp, Homo sapien
agcaactttcgctgagcatggtggc

SEQ ID NO: 4987756 - DNA, 25 bp, Homo sapien
tcttcatgcgtacatgttcacatac

SEQ ID NO: 4987757 - DNA, 25 bp, Homo sapien
tcacatacatacacgttcaaagcag

SEQ ID NO: 4987758 - DNA, 25 bp, Homo sapien
tagctgggcgtttttgtgcattgcc

SEQ ID NO: 4987759 - DNA, 25 bp, Homo sapien
agaactaccagcatctacactgcca

SEQ ID NO: 4987760 - DNA, 25 bp, Homo sapien
tggccttgtgatgtatggcatctca

SEQ ID NO: 4987761 - DNA, 25 bp, Homo sapien
ccctctccttctatggacggaactg

SEQ ID NO: 4987762 - DNA, 25 bp, Homo sapien
gaactgtgagcatgatgtgtgcaaa

SEQ ID NO: 4987763 - DNA, 25 bp, Homo sapien
ttttttcaaaagtcagccatatctc

SEQ ID NO: 4987764 - DNA, 25 bp, Homo sapien
tcttttttcaaaagtcagccatatc

SEQ ID NO: 4987765 - DNA, 25 bp, Homo sapien
ttttcaaaagtcagccatatctcca

SEQ ID NO: 4987766 - DNA, 25 bp, Homo sapien
tttcaaaagtcagccatatctccat

SEQ ID NO: 4987767 - DNA, 25 bp, Homo sapien
caccacacagatcaaaagttaagcc

SEQ ID NO: 4987768 - DNA, 25 bp, Homo sapien
aaagatgaaatgctcctgattattg

SEQ ID NO: 4987769 - DNA, 25 bp, Homo sapien
agacaatgccaggttggactgccag

SEQ ID NO: 4987770 - DNA, 25 bp, Homo sapien
ggattgtgtaaagacaatgccaggt

SEQ ID NO: 4987771 - DNA, 25 bp, Homo sapien
ttgcatgcaggattgtgtaaagaca

SEQ ID NO: 4987772 - DNA, 25 bp, Homo sapien
gataacacgagtgtgtccacactga

SEQ ID NO: 4987773 - DNA, 25 bp, Homo sapien
aacacgagtgtgtccacactgagaa

SEQ ID NO: 4987774 - DNA, 25 bp, Homo sapien
tggataacacgagtgtgtccacact

SEQ ID NO: 4987775 - DNA, 25 bp, Homo sapien
ttgtggataacacgagtgtgtccac

SEQ ID NO: 4987776 - DNA, 25 bp, Homo sapien
ggattagaccgtagtataccatcag

SEQ ID NO: 4987777 - DNA, 25 bp, Homo sapien
tacccggcctgtattcttgacaaag

SEQ ID NO: 4987778 - DNA, 25 bp, Homo sapien
ggcaatatgtgatcctagactgata

SEQ ID NO: 4987779 - DNA, 25 bp, Homo sapien
taagctgtaatgaggcaacacgcct

SEQ ID NO: 4987780 - DNA, 25 bp, Homo sapien
tcagaatggtgtacaattcaggcca

SEQ ID NO: 4987781 - DNA, 25 bp, Homo sapien
caaaacagttgacctgataacccag

SEQ ID NO: 4987782 - DNA, 25 bp, Homo sapien
catggatacgctaggtaaaggaatg

SEQ ID NO: 4987783 - DNA, 25 bp, Homo sapien
tcctgggtgagacggaatgagattt

SEQ ID NO: 4987784 - DNA, 25 bp, Homo sapien
tgaacgcgtaaacaaaagttgcatg

SEQ ID NO: 4987785 - DNA, 25 bp, Homo sapien
aatgctgcatgccttatgttgccac

SEQ ID NO: 4987786 - DNA, 25 bp, Homo sapien
taacattccacggatctctggtatc

SEQ ID NO: 4987787 - DNA, 25 bp, Homo sapien
gctctggaaagctctcaattgcaca

SEQ ID NO: 4987788 - DNA, 25 bp, Homo sapien
ccagtatctcccaatccatgcagga

SEQ ID NO: 4987789 - DNA, 25 bp, Homo sapien
ctcccaatccatgcaggaaaatcac

SEQ ID NO: 4987790 - DNA, 25 bp, Homo sapien
cagtatctcccaatccatgcaggaa

SEQ ID NO: 4987791 - DNA, 25 bp, Homo sapien
tatctcccaatccatgcaggaaaat

SEQ ID NO: 4987792 - DNA, 25 bp, Homo sapien
taagagtgcgaggtgacaataaggc

SEQ ID NO: 4987793 - DNA, 25 bp, Homo sapien
tgtaggacactcaatcttcaaactt

SEQ ID NO: 4987794 - DNA, 25 bp, Homo sapien
acaataaggcgatttcctggcggac

SEQ ID NO: 4987795 - DNA, 25 bp, Homo sapien
tcaaacttctttcattgaggataag

SEQ ID NO: 4987796 - DNA, 25 bp, Homo sapien
cacttcctccgcaatgcagggagga

SEQ ID NO: 4987797 - DNA, 25 bp, Homo sapien
tcctccgcaatgcagggaggagctg

SEQ ID NO: 4987798 - DNA, 25 bp, Homo sapien
ggccacacttcctccgcaatgcagg

SEQ ID NO: 4987799 - DNA, 25 bp, Homo sapien
tgacgccgtgccctaggccggcccg

SEQ ID NO: 4987800 - DNA, 25 bp, Homo sapien
gcagcggggttgacatgttattgcc

SEQ ID NO: 4987801 - DNA, 25 bp, Homo sapien
gggttgacatgttattgccgcacat

SEQ ID NO: 4987802 - DNA, 25 bp, Homo sapien
ggggttgacatgttattgccgcaca

SEQ ID NO: 4987803 - DNA, 25 bp, Homo sapien
gcggggttgacatgttattgccgca

SEQ ID NO: 4987804 - DNA, 25 bp, Homo sapien
tcagctcacagcgcaagcggaagga

SEQ ID NO: 4987805 - DNA, 25 bp, Homo sapien
agctcacagcgcaagcggaaggaag

SEQ ID NO: 4987806 - DNA, 25 bp, Homo sapien
cagctcacagcgcaagcggaaggaa

SEQ ID NO: 4987807 - DNA, 25 bp, Homo sapien
gctcacagcgcaagcggaaggaaga

SEQ ID NO: 4987808 - DNA, 25 bp, Homo sapien
aaaaatatagcacatcctgactgtg

SEQ ID NO: 4987809 - DNA, 25 bp, Homo sapien
caagaccctgttttattgaatcaaa

SEQ ID NO: 4987810 - DNA, 25 bp, Homo sapien
gccatagagtggtaatgctgccatc

SEQ ID NO: 4987811 - DNA, 25 bp, Homo sapien
taacgtttcagagttcagagctaca

SEQ ID NO: 4987812 - DNA, 25 bp, Homo sapien
actcctgacctcagcctcggcctct

SEQ ID NO: 4987813 - DNA, 25 bp, Homo sapien
cctgacctcagcctcggcctctcaa

SEQ ID NO: 4987814 - DNA, 25 bp, Homo sapien
cgtgagccacagtgcccggcctctt

SEQ ID NO: 4987815 - DNA, 25 bp, Homo sapien
attatgggcatttgccaccacgcct

SEQ ID NO: 4987816 - DNA, 25 bp, Homo sapien
tttattgcattaactggagaatgag

SEQ ID NO: 4987817 - DNA, 25 bp, Homo sapien
agctgctgctggatattgtccggag

SEQ ID NO: 4987818 - DNA, 25 bp, Homo sapien
gcccctgctgtcgaagcttcgctgt

SEQ ID NO: 4987819 - DNA, 25 bp, Homo sapien
tctcagggcgtgtatctgccatcac

SEQ ID NO: 4987820 - DNA, 25 bp, Homo sapien
aatttctaggtttgatctttgccct

SEQ ID NO: 4987821 - DNA, 25 bp, Homo sapien
cacaggacacaatgctggacactgg

SEQ ID NO: 4987822 - DNA, 25 bp, Homo sapien
aataggcaagactgccacctactga

SEQ ID NO: 4987823 - DNA, 25 bp, Homo sapien
caaatgggaacattcctcagggaat

SEQ ID NO: 4987824 - DNA, 25 bp, Homo sapien
ggctgcaccaaatcgccacaggcct

SEQ ID NO: 4987825 - DNA, 25 bp, Homo sapien
tgcaccaaatcgccacaggcctcac

SEQ ID NO: 4987826 - DNA, 25 bp, Homo sapien
gggctgcaccaaatcgccacaggcc

SEQ ID NO: 4987827 - DNA, 25 bp, Homo sapien
gctgcaccaaatcgccacaggcctc

SEQ ID NO: 4987828 - DNA, 25 bp, Homo sapien
gactcttttcatgaagggcgaaaca

SEQ ID NO: 4987829 - DNA, 25 bp, Homo sapien
taagcgttccttgaagcacttttat

SEQ ID NO: 4987830 - DNA, 25 bp, Homo sapien
aacacagtaagcgttccttgaagca

SEQ ID NO: 4987831 - DNA, 25 bp, Homo sapien
catgaagggcgaaacacagtaagcg

SEQ ID NO: 4987832 - DNA, 25 bp, Homo sapien
tgcgctgagctagggggccccgcga

SEQ ID NO: 4987833 - DNA, 25 bp, Homo sapien
agggggccccgcgagcattactcac

SEQ ID NO: 4987834 - DNA, 25 bp, Homo sapien
cctggggcctgtgcgctgagctagg

SEQ ID NO: 4987835 - DNA, 25 bp, Homo sapien
agctagggggccccgcgagcattac

SEQ ID NO: 4987836 - DNA, 25 bp, Homo sapien
cctgggctgccgcatttcttgcagt

SEQ ID NO: 4987837 - DNA, 25 bp, Homo sapien
cccacctgggctgccgcatttcttg

SEQ ID NO: 4987838 - DNA, 25 bp, Homo sapien
gagcgcagttctcgcgtctttccag

SEQ ID NO: 4987839 - DNA, 25 bp, Homo sapien
cagttttctgagcgcagttctcgcg

SEQ ID NO: 4987840 - DNA, 25 bp, Homo sapien
gcctccgctcttgcgttttcccgga

SEQ ID NO: 4987841 - DNA, 25 bp, Homo sapien
ggctgcatcaatttaccaggacggg

SEQ ID NO: 4987842 - DNA, 25 bp, Homo sapien
cgattccccgcaggcataacggtgc

SEQ ID NO: 4987843 - DNA, 25 bp, Homo sapien
ccaggcgtattgaatggtggcagca

SEQ ID NO: 4987844 - DNA, 25 bp, Homo sapien
cggttcccagttgcgtccttcaggc

SEQ ID NO: 4987845 - DNA, 25 bp, Homo sapien
tactccactccggttcccagttgcg

SEQ ID NO: 4987846 - DNA, 25 bp, Homo sapien
tccccttgtctagatccttcctgaa

SEQ ID NO: 4987847 - DNA, 25 bp, Homo sapien
tgcctgggtccccttgtctagatcc

SEQ ID NO: 4987848 - DNA, 25 bp, Homo sapien
ctgtagggaatagggcggtgccggt

SEQ ID NO: 4987849 - DNA, 25 bp, Homo sapien
gaccgtcgttcaaccaaatctgtat

SEQ ID NO: 4987850 - DNA, 25 bp, Homo sapien
aatcctcagccggaggcagtgaaag

SEQ ID NO: 4987851 - DNA, 25 bp, Homo sapien
tgctgcaaagtcctgcctgtgatcc

SEQ ID NO: 4987852 - DNA, 25 bp, Homo sapien
gaaaaggtgaaatcggtgccagcgt

SEQ ID NO: 4987853 - DNA, 25 bp, Homo sapien
taagggccttataatcatttggcag

SEQ ID NO: 4987854 - DNA, 25 bp, Homo sapien
gcctcaagaggcttaagggccttat

SEQ ID NO: 4987855 - DNA, 25 bp, Homo sapien
tctctcaaacatcttgcaaggtgcc

SEQ ID NO: 4987856 - DNA, 25 bp, Homo sapien
catcttgcaaggtgcctcaagaggc

SEQ ID NO: 4987857 - DNA, 25 bp, Homo sapien
ctcctccgagtcaccagtagctttc

SEQ ID NO: 4987858 - DNA, 25 bp, Homo sapien
tagaaagggaacttttgccctgtga

SEQ ID NO: 4987859 - DNA, 25 bp, Homo sapien
tgatattctatcacaggaaattcct

SEQ ID NO: 4987860 - DNA, 25 bp, Homo sapien
aggtgtggggtctgtgtaggaagtc

SEQ ID NO: 4987861 - DNA, 25 bp, Homo sapien
gaagagagattcaatagtctttgtg

SEQ ID NO: 4987862 - DNA, 25 bp, Homo sapien
tctagccatacaactggcggctgct

SEQ ID NO: 4987863 - DNA, 25 bp, Homo sapien
ggcagcctgcatgttctagccatac

SEQ ID NO: 4987864 - DNA, 25 bp, Homo sapien
catgttctagccatacaactggcgg

SEQ ID NO: 4987865 - DNA, 25 bp, Homo sapien
aatttaagacttctaggtctgccat

SEQ ID NO: 4987866 - DNA, 25 bp, Homo sapien
ctgaaatttaagacttctaggtctg

SEQ ID NO: 4987867 - DNA, 25 bp, Homo sapien
gaaatttaagacttctaggtctgcc

SEQ ID NO: 4987868 - DNA, 25 bp, Homo sapien
aaatttaagacttctaggtctgcca

SEQ ID NO: 4987869 - DNA, 25 bp, Homo sapien
tggaagtagcaaagggggactctcc

SEQ ID NO: 4987870 - DNA, 25 bp, Homo sapien
gggactctcctttgtctcctgcctt

SEQ ID NO: 4987871 - DNA, 25 bp, Homo sapien
taaatctgctggaagtagcaaaggg

SEQ ID NO: 4987872 - DNA, 25 bp, Homo sapien
ctgataaatctgctggaagtagcaa

SEQ ID NO: 4987873 - DNA, 25 bp, Homo sapien
tgtttgatctcatggaaacaaggct

SEQ ID NO: 4987874 - DNA, 25 bp, Homo sapien
gatgtcaagttttgcaggctcacca

SEQ ID NO: 4987875 - DNA, 25 bp, Homo sapien
cacagagcttgttggtgtcaccctg

SEQ ID NO: 4987876 - DNA, 25 bp, Homo sapien
gtctgcactgtttgagaacctcttg

SEQ ID NO: 4987877 - DNA, 25 bp, Homo sapien
ggtgccactgctggcggctgagctg

SEQ ID NO: 4987878 - DNA, 25 bp, Homo sapien
tcagacttggctgccggggtgcagg

SEQ ID NO: 4987879 - DNA, 25 bp, Homo sapien
ctgagctgctggtgctagcctgggt

SEQ ID NO: 4987880 - DNA, 25 bp, Homo sapien
cggggtgcaggagcaggagagccaa

SEQ ID NO: 4987881 - DNA, 25 bp, Homo sapien
gggccctgtaggaggtgtggcttcg

SEQ ID NO: 4987882 - DNA, 25 bp, Homo sapien
ccctgtaggaggtgtggcttcggct

SEQ ID NO: 4987883 - DNA, 25 bp, Homo sapien
tgggaggggccctgtaggaggtgtg

SEQ ID NO: 4987884 - DNA, 25 bp, Homo sapien
taggaggtgtggcttcggcttccac

SEQ ID NO: 4987885 - DNA, 25 bp, Homo sapien
cctctgaatgcggtcacattgggag

SEQ ID NO: 4987886 - DNA, 25 bp, Homo sapien
gacgaacaggtcaggtttggatttg

SEQ ID NO: 4987887 - DNA, 25 bp, Homo sapien
caattcagtccataccagtgggtac

SEQ ID NO: 4987888 - DNA, 25 bp, Homo sapien
taccttcctaaaagcctgacctctg

SEQ ID NO: 4987889 - DNA, 25 bp, Homo sapien
aagtgtgttagcacacttctcccaa

SEQ ID NO: 4987890 - DNA, 25 bp, Homo sapien
caattagtaatcctttctgatgatc

SEQ ID NO: 4987891 - DNA, 25 bp, Homo sapien
aacacccctccatcactatcacaag

SEQ ID NO: 4987892 - DNA, 25 bp, Homo sapien
caagttcctgctccccgcacacttg

SEQ ID NO: 4987893 - DNA, 25 bp, Homo sapien
cagtgtgctgatgggcaatgagcac

SEQ ID NO: 4987894 - DNA, 25 bp, Homo sapien
tgccccgaacaacaggatctccttt

SEQ ID NO: 4987895 - DNA, 25 bp, Homo sapien
tctcctgccccgaacaacaggatct

SEQ ID NO: 4987896 - DNA, 25 bp, Homo sapien
tgagcactcttgatagagcggcccc

SEQ ID NO: 4987897 - DNA, 25 bp, Homo sapien
aggtctgagaagctgtgagtccaca

SEQ ID NO: 4987898 - DNA, 25 bp, Homo sapien
gacttgtgcacctgcagaggtctga

SEQ ID NO: 4987899 - DNA, 25 bp, Homo sapien
tgagctctgttgtcttcattcccag

SEQ ID NO: 4987900 - DNA, 25 bp, Homo sapien
ctgggacaagtgacattctgttgga

SEQ ID NO: 4987901 - DNA, 25 bp, Homo sapien
tcctgacctttctcttggcactggg

SEQ ID NO: 4987902 - DNA, 25 bp, Homo sapien
catgtcctcagatttatactcgtca

SEQ ID NO: 4987903 - DNA, 25 bp, Homo sapien
tgtggatggtacacttttagcccga

SEQ ID NO: 4987904 - DNA, 25 bp, Homo sapien
taaaattcagggcataggttggatc

SEQ ID NO: 4987905 - DNA, 25 bp, Homo sapien
tacagtgtagcatagagcctcaaag

SEQ ID NO: 4987906 - DNA, 25 bp, Homo sapien
gcttttgcaagccatcacacgctct

SEQ ID NO: 4987907 - DNA, 25 bp, Homo sapien
agatgccgacgaggctgcttttgca

SEQ ID NO: 4987908 - DNA, 25 bp, Homo sapien
ttgtcagcttgtcccggctagcgga

SEQ ID NO: 4987909 - DNA, 25 bp, Homo sapien
tgcacggggtcactcatccagctct

SEQ ID NO: 4987910 - DNA, 25 bp, Homo sapien
cattgtcagacaagggtaggtttga

SEQ ID NO: 4987911 - DNA, 25 bp, Homo sapien
agacaagggtaggtttgaatgccac

SEQ ID NO: 4987912 - DNA, 25 bp, Homo sapien
tggacacattgtcagacaagggtag

SEQ ID NO: 4987913 - DNA, 25 bp, Homo sapien
tttgaggttgcatcagtctcgggct

SEQ ID NO: 4987914 - DNA, 25 bp, Homo sapien
acagtctgaatttcaccaagtgcct

SEQ ID NO: 4987915 - DNA, 25 bp, Homo sapien
ggtgaatggaccttgggtgataaca

SEQ ID NO: 4987916 - DNA, 25 bp, Homo sapien
ggaccttgggtgataacactgaaca

SEQ ID NO: 4987917 - DNA, 25 bp, Homo sapien
cagcgtggtggcagcccaggtggtg

SEQ ID NO: 4987918 - DNA, 25 bp, Homo sapien
ggcagcccaggtggtgagaggaacc

SEQ ID NO: 4987919 - DNA, 25 bp, Homo sapien
agcgtggtggcagcccaggtggtga

SEQ ID NO: 4987920 - DNA, 25 bp, Homo sapien
ggtggcagcccaggtggtgagagga

SEQ ID NO: 4987921 - DNA, 25 bp, Homo sapien
ctagctggcctttgagcttgttgga

SEQ ID NO: 4987922 - DNA, 25 bp, Homo sapien
ctttgacagcttcaccaggttgggt

SEQ ID NO: 4987923 - DNA, 25 bp, Homo sapien
ggagctgctctaccataacttatat

SEQ ID NO: 4987924 - DNA, 25 bp, Homo sapien
gatataataaggtacaaggatcctg

SEQ ID NO: 4987925 - DNA, 25 bp, Homo sapien
tctctggcctgctacaaggaagaag

SEQ ID NO: 4987926 - DNA, 25 bp, Homo sapien
gtctctggcctgctacaaggaagaa

SEQ ID NO: 4987927 - DNA, 25 bp, Homo sapien
gagtggaaactctccttggatggaa

SEQ ID NO: 4987928 - DNA, 25 bp, Homo sapien
gaaactctccttggatggaaacagg

SEQ ID NO: 4987929 - DNA, 25 bp, Homo sapien
aattctttattgttactgggcagaa

SEQ ID NO: 4987930 - DNA, 25 bp, Homo sapien
ctttattgttactgggcagaatatc

SEQ ID NO: 4987931 - DNA, 25 bp, Homo sapien
tttattgttactgggcagaatatcc

SEQ ID NO: 4987932 - DNA, 25 bp, Homo sapien
ttctttattgttactgggcagaata

SEQ ID NO: 4987933 - DNA, 25 bp, Homo sapien
tcagtgtcttcagttacagtcttcc

SEQ ID NO: 4987934 - DNA, 25 bp, Homo sapien
tagctttcctggctgtggtcttgcg

SEQ ID NO: 4987935 - DNA, 25 bp, Homo sapien
tggggaggctcagtgtcttcagtta

SEQ ID NO: 4987936 - DNA, 25 bp, Homo sapien
tggctgtggtcttgcgggctctggg

SEQ ID NO: 4987937 - DNA, 25 bp, Homo sapien
gtcagactcactgagttggcatggc

SEQ ID NO: 4987938 - DNA, 25 bp, Homo sapien
cttcgctgtcctgtcttactaagca

SEQ ID NO: 4987939 - DNA, 25 bp, Homo sapien
tcatgcgatgacctctagggcaaaa

SEQ ID NO: 4987940 - DNA, 25 bp, Homo sapien
ctctagggcaaaactctggttctcc

SEQ ID NO: 4987941 - DNA, 25 bp, Homo sapien
gataattatctcgagtttttcctcc

SEQ ID NO: 4987942 - DNA, 25 bp, Homo sapien
tctccatcttcagataattatctcg

SEQ ID NO: 4987943 - DNA, 25 bp, Homo sapien
tccctttgatttaagttgagagagg

SEQ ID NO: 4987944 - DNA, 25 bp, Homo sapien
ttcctccctttgatttaagttgaga

SEQ ID NO: 4987945 - DNA, 25 bp, Homo sapien
ctgcttgacgttctggagagaggaa

SEQ ID NO: 4987946 - DNA, 25 bp, Homo sapien
cttgacgttctggagagaggaaaca

SEQ ID NO: 4987947 - DNA, 25 bp, Homo sapien
aggctgcttgacgttctggagagag

SEQ ID NO: 4987948 - DNA, 25 bp, Homo sapien
gcttgacgttctggagagaggaaac

SEQ ID NO: 4987949 - DNA, 25 bp, Homo sapien
tctcagcggcgcagcgttgagtgcc

SEQ ID NO: 4987950 - DNA, 25 bp, Homo sapien
gagaaagtgtgccatggatccccga

SEQ ID NO: 4987951 - DNA, 25 bp, Homo sapien
tacccggccgtgtacacttggctgc

SEQ ID NO: 4987952 - DNA, 25 bp, Homo sapien
tgagatgtgttatgtcagagaaagt

SEQ ID NO: 4987953 - DNA, 25 bp, Homo sapien
tctcaaacacacttacgcagtggta

SEQ ID NO: 4987954 - DNA, 25 bp, Homo sapien
cagtggtattttgtaacgacgtcaa

SEQ ID NO: 4987955 - DNA, 25 bp, Homo sapien
tttctcaaacacacttacgcagtgg

SEQ ID NO: 4987956 - DNA, 25 bp, Homo sapien
cacttacgcagtggtattttgtaac

SEQ ID NO: 4987957 - DNA, 25 bp, Homo sapien
ccaaaggtgcataggtggaccagta

SEQ ID NO: 4987958 - DNA, 25 bp, Homo sapien
tggaccagtagggaagtatcctgtg

SEQ ID NO: 4987959 - DNA, 25 bp, Homo sapien
tgagttgtcctctcaatcctgccct

SEQ ID NO: 4987960 - DNA, 25 bp, Homo sapien
aggtggctgctggtacctctgagca

SEQ ID NO: 4987961 - DNA, 25 bp, Homo sapien
gattctctggtttgtatggcacctc

SEQ ID NO: 4987962 - DNA, 25 bp, Homo sapien
gatacgctgtccttgagagtctggg

SEQ ID NO: 4987963 - DNA, 25 bp, Homo sapien
tctgggaatgaattgctggcctctc

SEQ ID NO: 4987964 - DNA, 25 bp, Homo sapien
tgtccggtttcacacgattctctgg

SEQ ID NO: 4987965 - DNA, 25 bp, Homo sapien
actgtatctccttgtggcaggtctt

SEQ ID NO: 4987966 - DNA, 25 bp, Homo sapien
ttactgtatctccttgtggcaggtc

SEQ ID NO: 4987967 - DNA, 25 bp, Homo sapien
tactgtatctccttgtggcaggtct

SEQ ID NO: 4987968 - DNA, 25 bp, Homo sapien
gaggcaagaagaatagcgaaaggaa

SEQ ID NO: 4987969 - DNA, 25 bp, Homo sapien
cagaagggatttgcaagtgtgtgca

SEQ ID NO: 4987970 - DNA, 25 bp, Homo sapien
cttgcagaagggatttgcaagtgtg

SEQ ID NO: 4987971 - DNA, 25 bp, Homo sapien
gaatagcgaaaggaacttgcagaag

SEQ ID NO: 4987972 - DNA, 25 bp, Homo sapien
cggaaggaccctccactgccaaaga

SEQ ID NO: 4987973 - DNA, 25 bp, Homo sapien
tgagtctccggaaggaccctccact

SEQ ID NO: 4987974 - DNA, 25 bp, Homo sapien
cagccttgagtctccggaaggaccc

SEQ ID NO: 4987975 - DNA, 25 bp, Homo sapien
ggaccctccactgccaaagacaaag

SEQ ID NO: 4987976 - DNA, 25 bp, Homo sapien
gcagtctcttgagttcttttactct

SEQ ID NO: 4987977 - DNA, 25 bp, Homo sapien
tcttggtccataataggagaagctt

SEQ ID NO: 4987978 - DNA, 25 bp, Homo sapien
tctccagcctttcgtctttgccagt

SEQ ID NO: 4987979 - DNA, 25 bp, Homo sapien
cgtgagactctccagcctttcgtct

SEQ ID NO: 4987980 - DNA, 25 bp, Homo sapien
ctctctgtaagccacagttctgaat

SEQ ID NO: 4987981 - DNA, 25 bp, Homo sapien
gactcaagttgtgatttctctctgt

SEQ ID NO: 4987982 - DNA, 25 bp, Homo sapien
agggctgtggattcgaggcaaccat

SEQ ID NO: 4987983 - DNA, 25 bp, Homo sapien
ggcaaccatccatcggttatcagga

SEQ ID NO: 4987984 - DNA, 25 bp, Homo sapien
ctcccccagggctgcatgtttctgg

SEQ ID NO: 4987985 - DNA, 25 bp, Homo sapien
tcctcccccagggctgcatgtttct

SEQ ID NO: 4987986 - DNA, 25 bp, Homo sapien
gggctgcatgtttctgggggtccat

SEQ ID NO: 4987987 - DNA, 25 bp, Homo sapien
cagggctgcatgtttctgggggtcc

SEQ ID NO: 4987988 - DNA, 25 bp, Homo sapien
atcggcgatgacttggcccagcgct

SEQ ID NO: 4987989 - DNA, 25 bp, Homo sapien
tggcccagcgcttggcattggctcc

SEQ ID NO: 4987990 - DNA, 25 bp, Homo sapien
ctgacagttaaaaggcccagggtag

SEQ ID NO: 4987991 - DNA, 25 bp, Homo sapien
acacacaactcacatgtcatcggcg

SEQ ID NO: 4987992 - DNA, 25 bp, Homo sapien
atagctttagtccatgcattatgac

SEQ ID NO: 4987993 - DNA, 25 bp, Homo sapien
cattatagctttagtccatgcatta

SEQ ID NO: 4987994 - DNA, 25 bp, Homo sapien
caatcattatagctttagtccatgc

SEQ ID NO: 4987995 - DNA, 25 bp, Homo sapien
tccacaatcattatagctttagtcc

SEQ ID NO: 4987996 - DNA, 25 bp, Homo sapien
ccacagtgtacatttacttcctgta

SEQ ID NO: 4987997 - DNA, 25 bp, Homo sapien
caatgaccatggcctgaccacagtg

SEQ ID NO: 4987998 - DNA, 25 bp, Homo sapien
cagccccttcttgggagtgtggggg

SEQ ID NO: 4987999 - DNA, 25 bp, Homo sapien
agcaatgaccatggcctgaccacag

SEQ ID NO: 4988000 - DNA, 25 bp, Homo sapien
aatgtatcttattaactaattgtac

SEQ ID NO: 4988001 - DNA, 25 bp, Homo sapien
caacttgttattggtaatattgtgc

SEQ ID NO: 4988002 - DNA, 25 bp, Homo sapien
tacatatctctataacactttttcc

SEQ ID NO: 4988003 - DNA, 25 bp, Homo sapien
ttcctttagcatggttgatagattt

SEQ ID NO: 4988004 - DNA, 25 bp, Homo sapien
gggacagccacccattttatcaagg

SEQ ID NO: 4988005 - DNA, 25 bp, Homo sapien
gctgctgatgccagggcctagataa

SEQ ID NO: 4988006 - DNA, 25 bp, Homo sapien
tgtggaaatccctcccggagcacag

SEQ ID NO: 4988007 - DNA, 25 bp, Homo sapien
gccctgtggcgcttaagctgaatta

SEQ ID NO: 4988008 - DNA, 25 bp, Homo sapien
agttgttaatgacttagggatgctc

SEQ ID NO: 4988009 - DNA, 25 bp, Homo sapien
taatgacttagggatgctcagaagt

SEQ ID NO: 4988010 - DNA, 25 bp, Homo sapien
tcaggtaatgctgccccagtgaacg

SEQ ID NO: 4988011 - DNA, 25 bp, Homo sapien
gctcagaagtaaatcaggtaatgct

SEQ ID NO: 4988012 - DNA, 25 bp, Homo sapien
tgtcgcttccttgggcgcaaaggac

SEQ ID NO: 4988013 - DNA, 25 bp, Homo sapien
catcacctccatgccccggaataga

SEQ ID NO: 4988014 - DNA, 25 bp, Homo sapien
ttccttgggcgcaaaggacagcagc

SEQ ID NO: 4988015 - DNA, 25 bp, Homo sapien
cccatcacctccatgccccggaata

SEQ ID NO: 4988016 - DNA, 25 bp, Homo sapien
tgaagcttcttggacatggcagcca

SEQ ID NO: 4988017 - DNA, 25 bp, Homo sapien
ttgaagcttcttggacatggcagcc

SEQ ID NO: 4988018 - DNA, 25 bp, Homo sapien
gaagcttcttggacatggcagccat

SEQ ID NO: 4988019 - DNA, 25 bp, Homo sapien
cttgaagcttcttggacatggcagc

SEQ ID NO: 4988020 - DNA, 25 bp, Homo sapien
caaatggatttctggctgttctcca

SEQ ID NO: 4988021 - DNA, 25 bp, Homo sapien
agcctcgggctgatccagaccggca

SEQ ID NO: 4988022 - DNA, 25 bp, Homo sapien
gggctgatccagaccggcaatactg

SEQ ID NO: 4988023 - DNA, 25 bp, Homo sapien
tccagaccggcaatactgcatttac

SEQ ID NO: 4988024 - DNA, 25 bp, Homo sapien
cccacaacaggaccagctcaggtga

SEQ ID NO: 4988025 - DNA, 25 bp, Homo sapien
ctgctgcattttggacagcatgcat

SEQ ID NO: 4988026 - DNA, 25 bp, Homo sapien
gctcaggtgacagtgctttcagagg

SEQ ID NO: 4988027 - DNA, 25 bp, Homo sapien
aaacccacgatcttcccactgaggg

SEQ ID NO: 4988028 - DNA, 25 bp, Homo sapien
tcaatctgagcgcagcgtgcataca

SEQ ID NO: 4988029 - DNA, 25 bp, Homo sapien
tgcatacagccgctgcatcccagtg

SEQ ID NO: 4988030 - DNA, 25 bp, Homo sapien
gcagcgtgcatacagccgctgcatc

SEQ ID NO: 4988031 - DNA, 25 bp, Homo sapien
tctgagcgcagcgtgcatacagccg

SEQ ID NO: 4988032 - DNA, 25 bp, Homo sapien
gccgccaggcttgctgtataaatgt

SEQ ID NO: 4988033 - DNA, 25 bp, Homo sapien
cagacgctgcaatgccgtaatccat

SEQ ID NO: 4988034 - DNA, 25 bp, Homo sapien
tcttccttgagaattgcagacgctg

SEQ ID NO: 4988035 - DNA, 25 bp, Homo sapien
tgtctaaagccatttcttccttgag

SEQ ID NO: 4988036 - DNA, 25 bp, Homo sapien
tgtatttttatcctctctggaagga

SEQ ID NO: 4988037 - DNA, 25 bp, Homo sapien
gtatttttatcctctctggaaggac

SEQ ID NO: 4988038 - DNA, 25 bp, Homo sapien
tctctacggattcgactactctggg

SEQ ID NO: 4988039 - DNA, 25 bp, Homo sapien
aaacttgaaccacctatgtaaccag

SEQ ID NO: 4988040 - DNA, 25 bp, Homo sapien
ggtcctgctgtgatgaactcatttc

SEQ ID NO: 4988041 - DNA, 25 bp, Homo sapien
gaatcatacagatttggtcctgctg

SEQ ID NO: 4988042 - DNA, 25 bp, Homo sapien
caacagtaggtgaagtcagaagatc

SEQ ID NO: 4988043 - DNA, 25 bp, Homo sapien
gacggtagcctgatatctgataaag

SEQ ID NO: 4988044 - DNA, 25 bp, Homo sapien
cagtgggccattctttgacggtagc

SEQ ID NO: 4988045 - DNA, 25 bp, Homo sapien
tgtgaaacacagacgccaacagtag

SEQ ID NO: 4988046 - DNA, 25 bp, Homo sapien
tgggcactaggaacactgagatcaa

SEQ ID NO: 4988047 - DNA, 25 bp, Homo sapien
ctgggcactaggaacactgagatca

SEQ ID NO: 4988048 - DNA, 25 bp, Homo sapien
tggtctcatgttgctcccatttttc

SEQ ID NO: 4988049 - DNA, 25 bp, Homo sapien
gtggtctcatgttgctcccattttt

SEQ ID NO: 4988050 - DNA, 25 bp, Homo sapien
gagccactgcctgatctagactttt

SEQ ID NO: 4988051 - DNA, 25 bp, Homo sapien
ttctggattttgctgttgaatggga

SEQ ID NO: 4988052 - DNA, 25 bp, Homo sapien
ttgctgttgaatgggaaatgctgag

SEQ ID NO: 4988053 - DNA, 25 bp, Homo sapien
ttttgctgttgaatgggaaatgctg

SEQ ID NO: 4988054 - DNA, 25 bp, Homo sapien
ggattttgctgttgaatgggaaatg

SEQ ID NO: 4988055 - DNA, 25 bp, Homo sapien
gatgtgttgggtgttgccacgttcc

SEQ ID NO: 4988056 - DNA, 25 bp, Homo sapien
ttgggtgttgccacgttcccggagc

SEQ ID NO: 4988057 - DNA, 25 bp, Homo sapien
cacaggatgtgttgggtgttgccac

SEQ ID NO: 4988058 - DNA, 25 bp, Homo sapien
ggtgttgccacgttcccggagcacc

SEQ ID NO: 4988059 - DNA, 25 bp, Homo sapien
tggggactctccaacatctcttctc

SEQ ID NO: 4988060 - DNA, 25 bp, Homo sapien
ctggggactctccaacatctcttct

SEQ ID NO: 4988061 - DNA, 25 bp, Homo sapien
ttcatgctccttaagcaggcaaagg

SEQ ID NO: 4988062 - DNA, 25 bp, Homo sapien
gaaattcatgctccttaagcaggca

SEQ ID NO: 4988063 - DNA, 25 bp, Homo sapien
aggatgaaattcatgctccttaagc

SEQ ID NO: 4988064 - DNA, 25 bp, Homo sapien
tgctccttaagcaggcaaaggcaca

SEQ ID NO: 4988065 - DNA, 25 bp, Homo sapien
gagtttcccactgagtgtcttgcca

SEQ ID NO: 4988066 - DNA, 25 bp, Homo sapien
tatttgatcctatggagtttcccac

SEQ ID NO: 4988067 - DNA, 25 bp, Homo sapien
tgatcctatggagtttcccactgag

SEQ ID NO: 4988068 - DNA, 25 bp, Homo sapien
tatggagtttcccactgagtgtctt

SEQ ID NO: 4988069 - DNA, 25 bp, Homo sapien
ctgaagggaatggagagattgggcc

SEQ ID NO: 4988070 - DNA, 25 bp, Homo sapien
cctgaagggaatggagagattgggc

SEQ ID NO: 4988071 - DNA, 25 bp, Homo sapien
tgaagggaatggagagattgggcca

SEQ ID NO: 4988072 - DNA, 25 bp, Homo sapien
accagtcagaggcagggagtcgccc

SEQ ID NO: 4988073 - DNA, 25 bp, Homo sapien
ggagtcgcccactatcaatcccgat

SEQ ID NO: 4988074 - DNA, 25 bp, Homo sapien
ctgaaatcgaggaccagtcagaggc

SEQ ID NO: 4988075 - DNA, 25 bp, Homo sapien
tatcaatcccgatcactaggaggag

SEQ ID NO: 4988076 - DNA, 25 bp, Homo sapien
gccaagttccccacagatagcaggt

SEQ ID NO: 4988077 - DNA, 25 bp, Homo sapien
gagcgattcgctcagcagccaagtt

SEQ ID NO: 4988078 - DNA, 25 bp, Homo sapien
cacttgaaacaaaaccctgggtgtg

SEQ ID NO: 4988079 - DNA, 25 bp, Homo sapien
gctatacatagaacagagcgattcg

SEQ ID NO: 4988080 - DNA, 25 bp, Homo sapien
gagtcttgatgcaggcccagtgtct

SEQ ID NO: 4988081 - DNA, 25 bp, Homo sapien
aaaacaagattgctatgaagacctg

SEQ ID NO: 4988082 - DNA, 25 bp, Homo sapien
tccttccaggatgcgccacacagag

SEQ ID NO: 4988083 - DNA, 25 bp, Homo sapien
gtgtcttgtctactgccaaccaggg

SEQ ID NO: 4988084 - DNA, 25 bp, Homo sapien
agtgggacatatgtctcctttgcca

SEQ ID NO: 4988085 - DNA, 25 bp, Homo sapien
agctctcgagagtgggacatatgtc

SEQ ID NO: 4988086 - DNA, 25 bp, Homo sapien
ctttgccatcctatcttctggctta

SEQ ID NO: 4988087 - DNA, 25 bp, Homo sapien
tagcagggtcccattcaaaatgcat

SEQ ID NO: 4988088 - DNA, 25 bp, Homo sapien
cagggctcctgtccgcctccctcac

SEQ ID NO: 4988089 - DNA, 25 bp, Homo sapien
tcagggctcctgtccgcctccctca

SEQ ID NO: 4988090 - DNA, 25 bp, Homo sapien
agagtgtgatagttgatgcctgctg

SEQ ID NO: 4988091 - DNA, 25 bp, Homo sapien
cagggccagagtgtgatagttgatg

SEQ ID NO: 4988092 - DNA, 25 bp, Homo sapien
tggatgtgagtggaatcctggaccc

SEQ ID NO: 4988093 - DNA, 25 bp, Homo sapien
tggaccccgccatctcttaggtctc

SEQ ID NO: 4988094 - DNA, 25 bp, Homo sapien
cctgacttgtattgtcttgagcaat

SEQ ID NO: 4988095 - DNA, 25 bp, Homo sapien
taattcttatcagctcaaatatgcc

SEQ ID NO: 4988096 - DNA, 25 bp, Homo sapien
ccttatcgataattcttatcagctc

SEQ ID NO: 4988097 - DNA, 25 bp, Homo sapien
tgctggagtgaatttccttatcgat

SEQ ID NO: 4988098 - DNA, 25 bp, Homo sapien
ttcagtattaatgtgacaacaatca

SEQ ID NO: 4988099 - DNA, 25 bp, Homo sapien
gtattaatgtgacaacaatcaatag

SEQ ID NO: 4988100 - DNA, 25 bp, Homo sapien
aactgttgtaataacacagaaaata

SEQ ID NO: 4988101 - DNA, 25 bp, Homo sapien
taccagtgatgaagattgataactg

SEQ ID NO: 4988102 - DNA, 25 bp, Homo sapien
caaataacctagctgtgcgatagcg

SEQ ID NO: 4988103 - DNA, 25 bp, Homo sapien
gcgatagcgaatgcagtcaatatat

SEQ ID NO: 4988104 - DNA, 25 bp, Homo sapien
tggccaggcaaataacctagctgtg

SEQ ID NO: 4988105 - DNA, 25 bp, Homo sapien
tagctgtgcgatagcgaatgcagtc

SEQ ID NO: 4988106 - DNA, 25 bp, Homo sapien
ggaccgcacggaatttgaacagtat

SEQ ID NO: 4988107 - DNA, 25 bp, Homo sapien
ggcatgactccggtgtgaatctccc

SEQ ID NO: 4988108 - DNA, 25 bp, Homo sapien
tactgcaactatcctgacgtgtgac

SEQ ID NO: 4988109 - DNA, 25 bp, Homo sapien
tcacgtgtactacggcgcgatgggc

SEQ ID NO: 4988110 - DNA, 25 bp, Homo sapien
ttcatgggcactgggagaatttaca

SEQ ID NO: 4988111 - DNA, 25 bp, Homo sapien
tacggacgattgcacagacttaggg

SEQ ID NO: 4988112 - DNA, 25 bp, Homo sapien
catactaatcgctgtggcacgtctc

SEQ ID NO: 4988113 - DNA, 25 bp, Homo sapien
ttcccctgccatgtatatgaaggct

SEQ ID NO: 4988114 - DNA, 25 bp, Homo sapien
ttcggaagttctcagcgggaccgct

SEQ ID NO: 4988115 - DNA, 25 bp, Homo sapien
tttctagttccatcgcgaaggcggg

SEQ ID NO: 4988116 - DNA, 25 bp, Homo sapien
tcaaacaacattgcagacgggcttg

SEQ ID NO: 4988117 - DNA, 25 bp, Homo sapien
ttaggccgcattaacaaggatctgg

SEQ ID NO: 4988118 - DNA, 25 bp, Homo sapien
ttctccgccgttgaggtggagcccg

SEQ ID NO: 4988119 - DNA, 25 bp, Homo sapien
tgtgggccacatggtctcagaagag

SEQ ID NO: 4988120 - DNA, 25 bp, Homo sapien
aaatcaaaccctgtagccgtccgct

SEQ ID NO: 4988121 - DNA, 25 bp, Homo sapien
ccggcggcgggagcttagattctct

SEQ ID NO: 4988122 - DNA, 25 bp, Homo sapien
ggcagcgctggccacgccgtgggct

SEQ ID NO: 4988123 - DNA, 25 bp, Homo sapien
gttcggcctcggagacccgcgcagc

SEQ ID NO: 4988124 - DNA, 25 bp, Homo sapien
ctgggactggcccggaacgcgggtg

SEQ ID NO: 4988125 - DNA, 25 bp, Homo sapien
cggagcatctccgtgcctcgctcac

SEQ ID NO: 4988126 - DNA, 25 bp, Homo sapien
tgcgggatacgccagtgactaccag

SEQ ID NO: 4988127 - DNA, 25 bp, Homo sapien
tgagcaggccggatgcgggatacgc

SEQ ID NO: 4988128 - DNA, 25 bp, Homo sapien
ccggatgcgggatacgccagtgact

SEQ ID NO: 4988129 - DNA, 25 bp, Homo sapien
gggatacgccagtgactaccagagc

SEQ ID NO: 4988130 - DNA, 25 bp, Homo sapien
cggcggtgacggctaggctgggccc

SEQ ID NO: 4988131 - DNA, 25 bp, Homo sapien
tgtccttgggccgagttgccgagct

SEQ ID NO: 4988132 - DNA, 25 bp, Homo sapien
gggcgagtctcgcatccggcgcctt

SEQ ID NO: 4988133 - DNA, 25 bp, Homo sapien
cgcgggccgagccaagggcgagtct

SEQ ID NO: 4988134 - DNA, 25 bp, Homo sapien
gcacttccgggaccctcatgtcgta

SEQ ID NO: 4988135 - DNA, 25 bp, Homo sapien
gtctgcgtggatggcttattggcac

SEQ ID NO: 4988136 - DNA, 25 bp, Homo sapien
tggcttattggcacttccgggaccc

SEQ ID NO: 4988137 - DNA, 25 bp, Homo sapien
cctcatgtcgtaaggctgagaccta

SEQ ID NO: 4988138 - DNA, 25 bp, Homo sapien
cccgataatcgtaggctgatggggt

SEQ ID NO: 4988139 - DNA, 25 bp, Homo sapien
tgccccgataatcgtaggctgatgg

SEQ ID NO: 4988140 - DNA, 25 bp, Homo sapien
gccccgataatcgtaggctgatggg

SEQ ID NO: 4988141 - DNA, 25 bp, Homo sapien
ctgccccgataatcgtaggctgatg

SEQ ID NO: 4988142 - DNA, 25 bp, Homo sapien
caccagcagctaagcgcaggtctct

SEQ ID NO: 4988143 - DNA, 25 bp, Homo sapien
aaacaactgggtacccagcgaggtg

SEQ ID NO: 4988144 - DNA, 25 bp, Homo sapien
tgccccgcacatggctctggtcgta

SEQ ID NO: 4988145 - DNA, 25 bp, Homo sapien
tctgcgctttgtgagtttgggaaac

SEQ ID NO: 4988146 - DNA, 25 bp, Homo sapien
tgagcagaagctcccatgtaaacag

SEQ ID NO: 4988147 - DNA, 25 bp, Homo sapien
gggttcgagagttccaatttccata

SEQ ID NO: 4988148 - DNA, 25 bp, Homo sapien
gattcatccgaagctgtgctttcag

SEQ ID NO: 4988149 - DNA, 25 bp, Homo sapien
caatttccatatggaggaagtgaga

SEQ ID NO: 4988150 - DNA, 25 bp, Homo sapien
aaggtggctggctttcccagaattt

SEQ ID NO: 4988151 - DNA, 25 bp, Homo sapien
cccagaatttcccactagaggaggg

SEQ ID NO: 4988152 - DNA, 25 bp, Homo sapien
tggaaacatgcgtgcaggggtcctc

SEQ ID NO: 4988153 - DNA, 25 bp, Homo sapien
tataatggaacttcagaaggtggct

SEQ ID NO: 4988154 - DNA, 25 bp, Homo sapien
gtaccgagcaatgcagcctgagcct

SEQ ID NO: 4988155 - DNA, 25 bp, Homo sapien
caccagcgcaattctgtaccgagca

SEQ ID NO: 4988156 - DNA, 25 bp, Homo sapien
gcgcaattctgtaccgagcaatgca

SEQ ID NO: 4988157 - DNA, 25 bp, Homo sapien
tccgagtgaccaccctcctgagcag

SEQ ID NO: 4988158 - DNA, 25 bp, Homo sapien
tggcaagatgactagggcctgatca

SEQ ID NO: 4988159 - DNA, 25 bp, Homo sapien
gcaagatgactagggcctgatcact

SEQ ID NO: 4988160 - DNA, 25 bp, Homo sapien
tgcactggcaagatgactagggcct

SEQ ID NO: 4988161 - DNA, 25 bp, Homo sapien
cactggcaagatgactagggcctga

SEQ ID NO: 4988162 - DNA, 25 bp, Homo sapien
agcatgtggtgcatctcccttggaa

SEQ ID NO: 4988163 - DNA, 25 bp, Homo sapien
aaactggtgcgtggcgtggtcaact

SEQ ID NO: 4988164 - DNA, 25 bp, Homo sapien
gaatcagccctttggaaacctcgag

SEQ ID NO: 4988165 - DNA, 25 bp, Homo sapien
tgtccagactctgcgcattgcaagg

SEQ ID NO: 4988166 - DNA, 25 bp, Homo sapien
tatttcccacggattttaggacatc

SEQ ID NO: 4988167 - DNA, 25 bp, Homo sapien
tgcagctgcattcagatactcacga

SEQ ID NO: 4988168 - DNA, 25 bp, Homo sapien
tatacatcataagactgctctgttt

SEQ ID NO: 4988169 - DNA, 25 bp, Homo sapien
ttctgtgtagcaggatagaacaagg

SEQ ID NO: 4988170 - DNA, 25 bp, Homo sapien
gattaggaaggcggagaaacagaga

SEQ ID NO: 4988171 - DNA, 25 bp, Homo sapien
ctttgattaggaaggcggagaaaca

SEQ ID NO: 4988172 - DNA, 25 bp, Homo sapien
ttgattaggaaggcggagaaacaga

SEQ ID NO: 4988173 - DNA, 25 bp, Homo sapien
attaggaaggcggagaaacagagat

SEQ ID NO: 4988174 - DNA, 25 bp, Homo sapien
ctggtgcagtcttgtgcaggaggca

SEQ ID NO: 4988175 - DNA, 25 bp, Homo sapien
tgagctctgatgaacaatcctctgt

SEQ ID NO: 4988176 - DNA, 25 bp, Homo sapien
gctctgatgaacaatcctctgtaaa

SEQ ID NO: 4988177 - DNA, 25 bp, Homo sapien
ctgagctctgatgaacaatcctctg

SEQ ID NO: 4988178 - DNA, 25 bp, Homo sapien
gagctctgatgaacaatcctctgta

SEQ ID NO: 4988179 - DNA, 25 bp, Homo sapien
gctgttggtgaccagaagcttggcc

SEQ ID NO: 4988180 - DNA, 25 bp, Homo sapien
gtgaccagaagcttggccgccctgc

SEQ ID NO: 4988181 - DNA, 25 bp, Homo sapien
ttggtgaccagaagcttggccgccc

SEQ ID NO: 4988182 - DNA, 25 bp, Homo sapien
ccgggacttcaaatagaaagttctg

SEQ ID NO: 4988183 - DNA, 25 bp, Homo sapien
gaactgccttcctttgcgacgatga

SEQ ID NO: 4988184 - DNA, 25 bp, Homo sapien
ccttcctttgcgacgatgaaaggct

SEQ ID NO: 4988185 - DNA, 25 bp, Homo sapien
cctttgcgacgatgaaaggctgtcc

SEQ ID NO: 4988186 - DNA, 25 bp, Homo sapien
actgccttcctttgcgacgatgaaa

SEQ ID NO: 4988187 - DNA, 25 bp, Homo sapien
ttcaaatgtttttggagagatggta

SEQ ID NO: 4988188 - DNA, 25 bp, Homo sapien
cttttcaaatgtttttggagagatg

SEQ ID NO: 4988189 - DNA, 25 bp, Homo sapien
tttcaaatgtttttggagagatggt

SEQ ID NO: 4988190 - DNA, 25 bp, Homo sapien
ttttcaaatgtttttggagagatgg

SEQ ID NO: 4988191 - DNA, 25 bp, Homo sapien
tcactccttgttctcaagtcctgca

SEQ ID NO: 4988192 - DNA, 25 bp, Homo sapien
ccttcatggcctccttacaagtctc

SEQ ID NO: 4988193 - DNA, 25 bp, Homo sapien
tcatggcctccttacaagtctcagc

SEQ ID NO: 4988194 - DNA, 25 bp, Homo sapien
cagtctccaagaccaatcctgattt

SEQ ID NO: 4988195 - DNA, 25 bp, Homo sapien
aatgaaagtcccctcaaatgcactc

SEQ ID NO: 4988196 - DNA, 25 bp, Homo sapien
ggccgcccacaaaaactctggcgtg

SEQ ID NO: 4988197 - DNA, 25 bp, Homo sapien
ctctggcgtggaaacaaactcatgc

SEQ ID NO: 4988198 - DNA, 25 bp, Homo sapien
gccaagaagcgccaacacgtgtgtt

SEQ ID NO: 4988199 - DNA, 25 bp, Homo sapien
gatggaccagcacaaataaacccag

SEQ ID NO: 4988200 - DNA, 25 bp, Homo sapien
ataaacccagcaaaaagagcacttc

SEQ ID NO: 4988201 - DNA, 25 bp, Homo sapien
tggaccagcacaaataaacccagca

SEQ ID NO: 4988202 - DNA, 25 bp, Homo sapien
acccagcaaaaagagcacttcatac

SEQ ID NO: 4988203 - DNA, 25 bp, Homo sapien
tgtttaggatagtcattcatgaggc

SEQ ID NO: 4988204 - DNA, 25 bp, Homo sapien
tcgtcccaattccaatataaggaac

SEQ ID NO: 4988205 - DNA, 25 bp, Homo sapien
attcatgaggctcgtcccaattcca

SEQ ID NO: 4988206 - DNA, 25 bp, Homo sapien
tagtcattcatgaggctcgtcccaa

SEQ ID NO: 4988207 - DNA, 25 bp, Homo sapien
tagaacagcgatttctcccactcgt

SEQ ID NO: 4988208 - DNA, 25 bp, Homo sapien
ttctatccttagaacagcgatttct

SEQ ID NO: 4988209 - DNA, 25 bp, Homo sapien
tatccttagaacagcgatttctccc

SEQ ID NO: 4988210 - DNA, 25 bp, Homo sapien
ccttagaacagcgatttctcccact

SEQ ID NO: 4988211 - DNA, 25 bp, Homo sapien
ataatagagccgccacttgttcatc

SEQ ID NO: 4988212 - DNA, 25 bp, Homo sapien
aatagagccgccacttgttcatcca

SEQ ID NO: 4988213 - DNA, 25 bp, Homo sapien
taatagagccgccacttgttcatcc

SEQ ID NO: 4988214 - DNA, 25 bp, Homo sapien
ctagagacagtatggtggggatggc

SEQ ID NO: 4988215 - DNA, 25 bp, Homo sapien
agagacagtatggtggggatggcga

SEQ ID NO: 4988216 - DNA, 25 bp, Homo sapien
tagagacagtatggtggggatggcg

SEQ ID NO: 4988217 - DNA, 25 bp, Homo sapien
gggtcatcttgggaaaaggagaaca

SEQ ID NO: 4988218 - DNA, 25 bp, Homo sapien
gagaaagccgaacagatggcagctg

SEQ ID NO: 4988219 - DNA, 25 bp, Homo sapien
gagcaggcttcctgcgctccaatgc

SEQ ID NO: 4988220 - DNA, 25 bp, Homo sapien
cacgcagagggcactttgtaggaac

SEQ ID NO: 4988221 - DNA, 25 bp, Homo sapien
tcccttccaaggcaatgcagaggaa

SEQ ID NO: 4988222 - DNA, 25 bp, Homo sapien
attggagccagaattgcaatgtaaa

SEQ ID NO: 4988223 - DNA, 25 bp, Homo sapien
gaattgcaatgtaaagcccttggtg

SEQ ID NO: 4988224 - DNA, 25 bp, Homo sapien
gccagaattgcaatgtaaagccctt

SEQ ID NO: 4988225 - DNA, 25 bp, Homo sapien
ggtgttatcacttgtgtttggttca

SEQ ID NO: 4988226 - DNA, 25 bp, Homo sapien
gttatcatgcacagaaccattgctc

SEQ ID NO: 4988227 - DNA, 25 bp, Homo sapien
ctcgttatcatgcacagaaccattg

SEQ ID NO: 4988228 - DNA, 25 bp, Homo sapien
tatcatgcacagaaccattgctcac

SEQ ID NO: 4988229 - DNA, 25 bp, Homo sapien
ctgctcgttatcatgcacagaacca

SEQ ID NO: 4988230 - DNA, 25 bp, Homo sapien
ttctcttcactggagcagctctcca

SEQ ID NO: 4988231 - DNA, 25 bp, Homo sapien
tttctcttcactggagcagctctcc

SEQ ID NO: 4988232 - DNA, 25 bp, Homo sapien
gtttggctagcccttaacacattcg

SEQ ID NO: 4988233 - DNA, 25 bp, Homo sapien
gaaatccctgttgatcacatggcaa

SEQ ID NO: 4988234 - DNA, 25 bp, Homo sapien
cagctcctgcacattgttgtgagtc

SEQ ID NO: 4988235 - DNA, 25 bp, Homo sapien
gacagtgactcggttccaattccct

SEQ ID NO: 4988236 - DNA, 25 bp, Homo sapien
acaagttttatgtgatgcgaattct

SEQ ID NO: 4988237 - DNA, 25 bp, Homo sapien
ttctgttcatgaccaaaatgcaaag

SEQ ID NO: 4988238 - DNA, 25 bp, Homo sapien
tatgtgatgcgaattctgttcatga

SEQ ID NO: 4988239 - DNA, 25 bp, Homo sapien
tgcctggatcagctgggagaggact

SEQ ID NO: 4988240 - DNA, 25 bp, Homo sapien
gtgagatcccggtgtgggagaagca

SEQ ID NO: 4988241 - DNA, 25 bp, Homo sapien
aggaggtgagatcccggtgtgggag

SEQ ID NO: 4988242 - DNA, 25 bp, Homo sapien
ggacatcggtatcggtcctttaaga

SEQ ID NO: 4988243 - DNA, 25 bp, Homo sapien
aggaagctgccttgccggcccagca

SEQ ID NO: 4988244 - DNA, 25 bp, Homo sapien
cctcttgatgtgagggttgggacct

SEQ ID NO: 4988245 - DNA, 25 bp, Homo sapien
tgactgcagccaagtgcctcggaat

SEQ ID NO: 4988246 - DNA, 25 bp, Homo sapien
acacgcccgctgctagaaagctgga

SEQ ID NO: 4988247 - DNA, 25 bp, Homo sapien
tctcagcaggtcaagtggaagtttg

SEQ ID NO: 4988248 - DNA, 25 bp, Homo sapien
gaattgtcgggactggtcagcacag

SEQ ID NO: 4988249 - DNA, 25 bp, Homo sapien
cagtggacagatgccattacagtgg

SEQ ID NO: 4988250 - DNA, 25 bp, Homo sapien
agaccgctgcggagttgttgcccaa

SEQ ID NO: 4988251 - DNA, 25 bp, Homo sapien
ggtattcatgatcccggaattgtcg

SEQ ID NO: 4988252 - DNA, 25 bp, Homo sapien
tcctagtccagtctctttgaggatt

SEQ ID NO: 4988253 - DNA, 25 bp, Homo sapien
tttgaggattgaaagagctcagtga

SEQ ID NO: 4988254 - DNA, 25 bp, Homo sapien
tggtgggagatgtgaatttcctagt

SEQ ID NO: 4988255 - DNA, 25 bp, Homo sapien
agaagccagcagagttggcaaggtt

SEQ ID NO: 4988256 - DNA, 25 bp, Homo sapien
tatgtgagaaacaaggccctcactg

SEQ ID NO: 4988257 - DNA, 25 bp, Homo sapien
aagttcatcaatagcccacatgtgg

SEQ ID NO: 4988258 - DNA, 25 bp, Homo sapien
catagaggggcatgatgagagaaaa

SEQ ID NO: 4988259 - DNA, 25 bp, Homo sapien
gaaacaaggccctcactgttactct

SEQ ID NO: 4988260 - DNA, 25 bp, Homo sapien
caaggacattaagacgcttgtgctc

SEQ ID NO: 4988261 - DNA, 25 bp, Homo sapien
gacagaatgctgacataagtacttc

SEQ ID NO: 4988262 - DNA, 25 bp, Homo sapien
tcagctgacaccaacttactctggg

SEQ ID NO: 4988263 - DNA, 25 bp, Homo sapien
taagtacttcttcagctgacaccaa

SEQ ID NO: 4988264 - DNA, 25 bp, Homo sapien
tgtgaacaagaatggtgtgagacac

SEQ ID NO: 4988265 - DNA, 25 bp, Homo sapien
gttgggtgtgaacaagaatggtgtg

SEQ ID NO: 4988266 - DNA, 25 bp, Homo sapien
gggtgtgaacaagaatggtgtgaga

SEQ ID NO: 4988267 - DNA, 25 bp, Homo sapien
gtgtgaacaagaatggtgtgagaca

SEQ ID NO: 4988268 - DNA, 25 bp, Homo sapien
tgcactgctgccgcagctgtaatca

SEQ ID NO: 4988269 - DNA, 25 bp, Homo sapien
cactgctgccgcagctgtaatcact

SEQ ID NO: 4988270 - DNA, 25 bp, Homo sapien
gcactgctgccgcagctgtaatcac

SEQ ID NO: 4988271 - DNA, 25 bp, Homo sapien
actgctgccgcagctgtaatcactg

SEQ ID NO: 4988272 - DNA, 25 bp, Homo sapien
tgagtgatgaagactctggtgtctt

SEQ ID NO: 4988273 - DNA, 25 bp, Homo sapien
tcttgtcacgttgagtgatgaagac

SEQ ID NO: 4988274 - DNA, 25 bp, Homo sapien
tgaagactctggtgtcttgtggcat

SEQ ID NO: 4988275 - DNA, 25 bp, Homo sapien
accaactcctctcttgtcacgttga

SEQ ID NO: 4988276 - DNA, 25 bp, Homo sapien
gaagttctgggtcagcatccttatg

SEQ ID NO: 4988277 - DNA, 25 bp, Homo sapien
catccttatgacacgtgatcctgta

SEQ ID NO: 4988278 - DNA, 25 bp, Homo sapien
caaagctttgaatgggtccagcatc

SEQ ID NO: 4988279 - DNA, 25 bp, Homo sapien
catcctgtgtcagggagaagttctg

SEQ ID NO: 4988280 - DNA, 25 bp, Homo sapien
gctcacaggagtcttgtcatcccag

SEQ ID NO: 4988281 - DNA, 25 bp, Homo sapien
cagtggaactcatatcaggcacagg

SEQ ID NO: 4988282 - DNA, 25 bp, Homo sapien
aagtggagtgtaaaccaggatcaac

SEQ ID NO: 4988283 - DNA, 25 bp, Homo sapien
tgggctggctcagtctaatccgtgg

SEQ ID NO: 4988284 - DNA, 25 bp, Homo sapien
gaaagtcagtggcatgtaggtgtcc

SEQ ID NO: 4988285 - DNA, 25 bp, Homo sapien
gaggaaggtgaaagtcagtggcatg

SEQ ID NO: 4988286 - DNA, 25 bp, Homo sapien
ggaaggtgaaagtcagtggcatgta

SEQ ID NO: 4988287 - DNA, 25 bp, Homo sapien
ggtgaaagtcagtggcatgtaggtg

SEQ ID NO: 4988288 - DNA, 25 bp, Homo sapien
ggaaacccgattaggtgaagcatct

SEQ ID NO: 4988289 - DNA, 25 bp, Homo sapien
tagaccacaggtagtcattagaagg

SEQ ID NO: 4988290 - DNA, 25 bp, Homo sapien
tgaagcatcttcaagtccgattaga

SEQ ID NO: 4988291 - DNA, 25 bp, Homo sapien
actttatgtgtgacaaagtcctgaa

SEQ ID NO: 4988292 - DNA, 25 bp, Homo sapien
atttttgcagaaatgcaaataaatc

SEQ ID NO: 4988293 - DNA, 25 bp, Homo sapien
ttgcagaaatgcaaataaatcatca

SEQ ID NO: 4988294 - DNA, 25 bp, Homo sapien
ttttgcagaaatgcaaataaatcat

SEQ ID NO: 4988295 - DNA, 25 bp, Homo sapien
gcagaaatgcaaataaatcatcaac

SEQ ID NO: 4988296 - DNA, 25 bp, Homo sapien
gcctcaggaatcagtatctcaaatg

SEQ ID NO: 4988297 - DNA, 25 bp, Homo sapien
caggaagacacaccgtggcaccggg

SEQ ID NO: 4988298 - DNA, 25 bp, Homo sapien
aatgagtgtgcataatttgtgaagc

SEQ ID NO: 4988299 - DNA, 25 bp, Homo sapien
cagtcccaacatacagagcctgaaa

SEQ ID NO: 4988300 - DNA, 25 bp, Homo sapien
ggatgtcaacagcatgcacctagtt

SEQ ID NO: 4988301 - DNA, 25 bp, Homo sapien
gaactgctaacctagaaaatagtgg

SEQ ID NO: 4988302 - DNA, 25 bp, Homo sapien
atgcacctagttgtgatgacaaaaa

SEQ ID NO: 4988303 - DNA, 25 bp, Homo sapien
tgtctccaaggggcaaactcaccca

SEQ ID NO: 4988304 - DNA, 25 bp, Homo sapien
tttgcactgtttctgtggaaaatcc

SEQ ID NO: 4988305 - DNA, 25 bp, Homo sapien
agggaaggctcggtccaacatgcca

SEQ ID NO: 4988306 - DNA, 25 bp, Homo sapien
gaagagggaaggctcggtccaacat

SEQ ID NO: 4988307 - DNA, 25 bp, Homo sapien
tggaaaatccctgttccaacactgt

SEQ ID NO: 4988308 - DNA, 25 bp, Homo sapien
ttaagatctgcaaccatttctgagc

SEQ ID NO: 4988309 - DNA, 25 bp, Homo sapien
taacattttaagatctgcaaccatt

SEQ ID NO: 4988310 - DNA, 25 bp, Homo sapien
cattttaagatctgcaaccatttct

SEQ ID NO: 4988311 - DNA, 25 bp, Homo sapien
gcacagccccctcttgcagtactaa

SEQ ID NO: 4988312 - DNA, 25 bp, Homo sapien
tagggacggtcagagtctgggaagc

SEQ ID NO: 4988313 - DNA, 25 bp, Homo sapien
attgtccactccactaacacatatg

SEQ ID NO: 4988314 - DNA, 25 bp, Homo sapien
acacatatggacctgggtctaggag

SEQ ID NO: 4988315 - DNA, 25 bp, Homo sapien
tctgggaagcgaaattctattgtcc

SEQ ID NO: 4988316 - DNA, 25 bp, Homo sapien
gcagagtacggtgcacaagactcat

SEQ ID NO: 4988317 - DNA, 25 bp, Homo sapien
gcagatatttatgtatgctaggagc

SEQ ID NO: 4988318 - DNA, 25 bp, Homo sapien
cagtggttctctggcgactagcaga

SEQ ID NO: 4988319 - DNA, 25 bp, Homo sapien
gatatttatgtatgctaggagctgg

SEQ ID NO: 4988320 - DNA, 25 bp, Homo sapien
ggatatcatcctcatgtctgaaggt

SEQ ID NO: 4988321 - DNA, 25 bp, Homo sapien
taccttagttcctggatatcatcct

SEQ ID NO: 4988322 - DNA, 25 bp, Homo sapien
cctcatgtctgaaggtgcgagggcc

SEQ ID NO: 4988323 - DNA, 25 bp, Homo sapien
tcttaatactccatacggatacctt

SEQ ID NO: 4988324 - DNA, 25 bp, Homo sapien
gggactgtcacactgatctcagcca

SEQ ID NO: 4988325 - DNA, 25 bp, Homo sapien
ctgtgccaccctagctagaaaaatg

SEQ ID NO: 4988326 - DNA, 25 bp, Homo sapien
tggtttctgtgccaccctagctaga

SEQ ID NO: 4988327 - DNA, 25 bp, Homo sapien
tgctgaaggaagcacacatcacacc

SEQ ID NO: 4988328 - DNA, 25 bp, Homo sapien
gatatctggtgcaggcatccttggc

SEQ ID NO: 4988329 - DNA, 25 bp, Homo sapien
cagatatctggtgcaggcatccttg

SEQ ID NO: 4988330 - DNA, 25 bp, Homo sapien
atgtgtgggctcagatatctggtgc

SEQ ID NO: 4988331 - DNA, 25 bp, Homo sapien
ctatgtgtgggctcagatatctggt

SEQ ID NO: 4988332 - DNA, 25 bp, Homo sapien
ggtgtacctctggttcgacctgtca

SEQ ID NO: 4988333 - DNA, 25 bp, Homo sapien
ccagcatgctgtcgaccatcagtgt

SEQ ID NO: 4988334 - DNA, 25 bp, Homo sapien
cagtgtatacttgctgcccagctgc

SEQ ID NO: 4988335 - DNA, 25 bp, Homo sapien
gattttcctgggtagaccttccaca

SEQ ID NO: 4988336 - DNA, 25 bp, Homo sapien
ttcagttgtactcccagctttgggt

SEQ ID NO: 4988337 - DNA, 25 bp, Homo sapien
acagggatcctcccttcagttgtac

SEQ ID NO: 4988338 - DNA, 25 bp, Homo sapien
cacagggatcctcccttcagttgta

SEQ ID NO: 4988339 - DNA, 25 bp, Homo sapien
ctttcagccccctcattgcaaggaa

SEQ ID NO: 4988340 - DNA, 25 bp, Homo sapien
acaccatttcgaatctgccagtcat

SEQ ID NO: 4988341 - DNA, 25 bp, Homo sapien
cccctcattgcaaggaatgcattga

SEQ ID NO: 4988342 - DNA, 25 bp, Homo sapien
aaaaacaccatttcgaatctgccag

SEQ ID NO: 4988343 - DNA, 25 bp, Homo sapien
catagccactttcagacgagtcttg

SEQ ID NO: 4988344 - DNA, 25 bp, Homo sapien
ggattaaacatcaccgtgggatctg

SEQ ID NO: 4988345 - DNA, 25 bp, Homo sapien
tcttgcaggtattgcacatagccac

SEQ ID NO: 4988346 - DNA, 25 bp, Homo sapien
gggatctgggcgaatccatgagatc

SEQ ID NO: 4988347 - DNA, 25 bp, Homo sapien
catatcgtgactggggtgcgtggtg

SEQ ID NO: 4988348 - DNA, 25 bp, Homo sapien
ggagggggtgcatatcgtgactggg

SEQ ID NO: 4988349 - DNA, 25 bp, Homo sapien
gtgcgtggtggcatgattcagagcg

SEQ ID NO: 4988350 - DNA, 25 bp, Homo sapien
gcgtggtggcatgattcagagcgtc

SEQ ID NO: 4988351 - DNA, 25 bp, Homo sapien
gagtgtcttctggaaaggacttatt

SEQ ID NO: 4988352 - DNA, 25 bp, Homo sapien
cttctggaaaggacttattctctgt

SEQ ID NO: 4988353 - DNA, 25 bp, Homo sapien
tggaaaggacttattctctgtccct

SEQ ID NO: 4988354 - DNA, 25 bp, Homo sapien
aagaaaagtaactgagtgtcttctg

SEQ ID NO: 4988355 - DNA, 25 bp, Homo sapien
tggatttcagaccagatgtactgcc

SEQ ID NO: 4988356 - DNA, 25 bp, Homo sapien
cacggaattgatctttcaggcctgt

SEQ ID NO: 4988357 - DNA, 25 bp, Homo sapien
gaagggcattgcactgaagttaacc

SEQ ID NO: 4988358 - DNA, 25 bp, Homo sapien
tacatgagatgaatatgggaagggc

SEQ ID NO: 4988359 - DNA, 25 bp, Homo sapien
taagcgatagtagccattgaccatc

SEQ ID NO: 4988360 - DNA, 25 bp, Homo sapien
taaagaatcactctccctgttagga

SEQ ID NO: 4988361 - DNA, 25 bp, Homo sapien
ttggcattcacctctaggatttcgg

SEQ ID NO: 4988362 - DNA, 25 bp, Homo sapien
gacaatgtcgtttattatccagaga

SEQ ID NO: 4988363 - DNA, 25 bp, Homo sapien
tacagatgtgctttgcttggcgagc

SEQ ID NO: 4988364 - DNA, 25 bp, Homo sapien
tttgcttggcgagcgtccatacaga

SEQ ID NO: 4988365 - DNA, 25 bp, Homo sapien
ctttacagatgtgctttgcttggcg

SEQ ID NO: 4988366 - DNA, 25 bp, Homo sapien
gatgtgctttgcttggcgagcgtcc

SEQ ID NO: 4988367 - DNA, 25 bp, Homo sapien
agtttgtcgtcagggccatactttc

SEQ ID NO: 4988368 - DNA, 25 bp, Homo sapien
actttctctggaggttcaactggaa

SEQ ID NO: 4988369 - DNA, 25 bp, Homo sapien
ctgcttctggcggttgctggcttcc

SEQ ID NO: 4988370 - DNA, 25 bp, Homo sapien
tattctctcacgtatcaggaagcca

SEQ ID NO: 4988371 - DNA, 25 bp, Homo sapien
ttagagaagctgtagtgatgcagac

SEQ ID NO: 4988372 - DNA, 25 bp, Homo sapien
gatgcagacaggagtcaatcatggt

SEQ ID NO: 4988373 - DNA, 25 bp, Homo sapien
ggtaaactttataccagacagcagg

SEQ ID NO: 4988374 - DNA, 25 bp, Homo sapien
ctaggtgctctctgactggtaaact

SEQ ID NO: 4988375 - DNA, 25 bp, Homo sapien
gaggaagccccaagcagtgctatgg

SEQ ID NO: 4988376 - DNA, 25 bp, Homo sapien
aggaagccccaagcagtgctatggt

SEQ ID NO: 4988377 - DNA, 25 bp, Homo sapien
gtccccaccagcagatgaataccca

SEQ ID NO: 4988378 - DNA, 25 bp, Homo sapien
cacccaggagcgtgcatctcattca

SEQ ID NO: 4988379 - DNA, 25 bp, Homo sapien
ttcatcagacctgagtcttctggaa

SEQ ID NO: 4988380 - DNA, 25 bp, Homo sapien
aatcctggctgtaaaggagtctgca

SEQ ID NO: 4988381 - DNA, 25 bp, Homo sapien
gtctgcaaattagagcctttagctt

SEQ ID NO: 4988382 - DNA, 25 bp, Homo sapien
tggtagactagtcaaaatgggacct

SEQ ID NO: 4988383 - DNA, 25 bp, Homo sapien
gaggcaacttgaccatttatcaggg

SEQ ID NO: 4988384 - DNA, 25 bp, Homo sapien
ggaactggcaacatgttcaagctga

SEQ ID NO: 4988385 - DNA, 25 bp, Homo sapien
tgaagctgatgtgaagggccaatct

SEQ ID NO: 4988386 - DNA, 25 bp, Homo sapien
tcagccatagggtgtagcagtatcc

SEQ ID NO: 4988387 - DNA, 25 bp, Homo sapien
cagcacagtggtagttgggaacaca

SEQ ID NO: 4988388 - DNA, 25 bp, Homo sapien
gagagggcgcctcagttcaatccta

SEQ ID NO: 4988389 - DNA, 25 bp, Homo sapien
tgaaaatgaccttgcgctccagaga

SEQ ID NO: 4988390 - DNA, 25 bp, Homo sapien
tgaaggccccacacttgattatgag

SEQ ID NO: 4988391 - DNA, 25 bp, Homo sapien
cttgcatgccaggttcggagctaac

SEQ ID NO: 4988392 - DNA, 25 bp, Homo sapien
aggctctccttgcatgccaggttcg

SEQ ID NO: 4988393 - DNA, 25 bp, Homo sapien
gaaggccccacacttgattatgagg

SEQ ID NO: 4988394 - DNA, 25 bp, Homo sapien
tggcctgagggttctgactgtaagc

SEQ ID NO: 4988395 - DNA, 25 bp, Homo sapien
gtggcctgagggttctgactgtaag

SEQ ID NO: 4988396 - DNA, 25 bp, Homo sapien
ctgcataaaccatggcatctgccca

SEQ ID NO: 4988397 - DNA, 25 bp, Homo sapien
tgcataaaccatggcatctgcccag

SEQ ID NO: 4988398 - DNA, 25 bp, Homo sapien
ctggctgcatatgccagctgcttct

SEQ ID NO: 4988399 - DNA, 25 bp, Homo sapien
gcctggctgcatatgccagctgctt

SEQ ID NO: 4988400 - DNA, 25 bp, Homo sapien
cctggctgcatatgccagctgcttc

SEQ ID NO: 4988401 - DNA, 25 bp, Homo sapien
ggcaggcaggacttctgaacaccac

SEQ ID NO: 4988402 - DNA, 25 bp, Homo sapien
gcaggcaggacttctgaacaccacc

SEQ ID NO: 4988403 - DNA, 25 bp, Homo sapien
caggcaggacttctgaacaccaccg

SEQ ID NO: 4988404 - DNA, 25 bp, Homo sapien
gggcaggcaggacttctgaacacca

SEQ ID NO: 4988405 - DNA, 25 bp, Homo sapien
ccctgcctgctcttctggagcgcac

SEQ ID NO: 4988406 - DNA, 25 bp, Homo sapien
cccctgcctgctcttctggagcgca

SEQ ID NO: 4988407 - DNA, 25 bp, Homo sapien
ggcagcccttcaacagctctgggcg

SEQ ID NO: 4988408 - DNA, 25 bp, Homo sapien
taaaagaaagagctcacgtctaccg

SEQ ID NO: 4988409 - DNA, 25 bp, Homo sapien
ggtggtcttccgtgagatctaaaag

SEQ ID NO: 4988410 - DNA, 25 bp, Homo sapien
actgaaagacgcagctgaagtggtt

SEQ ID NO: 4988411 - DNA, 25 bp, Homo sapien
tctgttcatatctgtgttattaaca

SEQ ID NO: 4988412 - DNA, 25 bp, Homo sapien
ctctgacggtttttgcttctgttca

SEQ ID NO: 4988413 - DNA, 25 bp, Homo sapien
tgtgttattaacactttctccaggg

SEQ ID NO: 4988414 - DNA, 25 bp, Homo sapien
tctgtgttattaacactttctccag

SEQ ID NO: 4988415 - DNA, 25 bp, Homo sapien
tctagtgccagggtggctcagatca

SEQ ID NO: 4988416 - DNA, 25 bp, Homo sapien
tctgtgaggtctctaactagctgta

SEQ ID NO: 4988417 - DNA, 25 bp, Homo sapien
tgaccattaagggaagcactgtctg

SEQ ID NO: 4988418 - DNA, 25 bp, Homo sapien
taatggagacagatggatcgaggcc

SEQ ID NO: 4988419 - DNA, 25 bp, Homo sapien
gctaaagccagttctcctcccattg

SEQ ID NO: 4988420 - DNA, 25 bp, Homo sapien
gatcatatttctggtatcagacttc

SEQ ID NO: 4988421 - DNA, 25 bp, Homo sapien
gagagttccagccttcgctaaagcc

SEQ ID NO: 4988422 - DNA, 25 bp, Homo sapien
cagataaggaacgatggctgagtga

SEQ ID NO: 4988423 - DNA, 25 bp, Homo sapien
ctgtgatgtagaaaaaaacacccat

SEQ ID NO: 4988424 - DNA, 25 bp, Homo sapien
gacttttagcaaataggtagacttg

SEQ ID NO: 4988425 - DNA, 25 bp, Homo sapien
caaataggtagacttggaaatcttc

SEQ ID NO: 4988426 - DNA, 25 bp, Homo sapien
gacaatctggtgtgtagggacgttg

SEQ ID NO: 4988427 - DNA, 25 bp, Homo sapien
aatctggtgtgtagggacgttggga

SEQ ID NO: 4988428 - DNA, 25 bp, Homo sapien
gacgcttcacttgacctggcagaac

SEQ ID NO: 4988429 - DNA, 25 bp, Homo sapien
ccagcattctgtcagcatttagatc

SEQ ID NO: 4988430 - DNA, 25 bp, Homo sapien
catgtgaagtctggaggcgaatctg

SEQ ID NO: 4988431 - DNA, 25 bp, Homo sapien
ctgcccaaaaagattcatgtgaagt

SEQ ID NO: 4988432 - DNA, 25 bp, Homo sapien
acgcttttaccagggatggttccag

SEQ ID NO: 4988433 - DNA, 25 bp, Homo sapien
tgaacgcttttaccagggatggttc

SEQ ID NO: 4988434 - DNA, 25 bp, Homo sapien
cttttaccagggatggttccagaag

SEQ ID NO: 4988435 - DNA, 25 bp, Homo sapien
gcttttaccagggatggttccagaa

SEQ ID NO: 4988436 - DNA, 25 bp, Homo sapien
tttccaatagcgctttctgcataga

SEQ ID NO: 4988437 - DNA, 25 bp, Homo sapien
tgaactgctgttcaaacccaaaatg

SEQ ID NO: 4988438 - DNA, 25 bp, Homo sapien
aattttccaatagcgctttctgcat

SEQ ID NO: 4988439 - DNA, 25 bp, Homo sapien
tagacaaaatatgaactgctgttca

SEQ ID NO: 4988440 - DNA, 25 bp, Homo sapien
tctctccccgacatgggtcgctggt

SEQ ID NO: 4988441 - DNA, 25 bp, Homo sapien
tcttggatttacagtgggttgtacc

SEQ ID NO: 4988442 - DNA, 25 bp, Homo sapien
tatgaagctttacccatgaatctgc

SEQ ID NO: 4988443 - DNA, 25 bp, Homo sapien
taccgatggccagcaagtttttctc

SEQ ID NO: 4988444 - DNA, 25 bp, Homo sapien
ttagttggtaagcacgatcagagcc

SEQ ID NO: 4988445 - DNA, 25 bp, Homo sapien
cctaagagtttatgtgtcctgtcac

SEQ ID NO: 4988446 - DNA, 25 bp, Homo sapien
tgtggaccaagagggagcaacactg

SEQ ID NO: 4988447 - DNA, 25 bp, Homo sapien
gccaactgtgtggtgattgacccag

SEQ ID NO: 4988448 - DNA, 25 bp, Homo sapien
gactcaacaccctcctgccaaaatg

SEQ ID NO: 4988449 - DNA, 25 bp, Homo sapien
tatgactcaacaccctcctgccaaa

SEQ ID NO: 4988450 - DNA, 25 bp, Homo sapien
tgactcaacaccctcctgccaaaat

SEQ ID NO: 4988451 - DNA, 25 bp, Homo sapien
ctatgactcaacaccctcctgccaa

SEQ ID NO: 4988452 - DNA, 25 bp, Homo sapien
ccaagggagggtcctgggcaccagt

SEQ ID NO: 4988453 - DNA, 25 bp, Homo sapien
tcaggtcaaggccaaccaagggagg

SEQ ID NO: 4988454 - DNA, 25 bp, Homo sapien
gccaaccaagggagggtcctgggca

SEQ ID NO: 4988455 - DNA, 25 bp, Homo sapien
caaggccaaccaagggagggtcctg

SEQ ID NO: 4988456 - DNA, 25 bp, Homo sapien
taaaaggcaatgaatccagagcgtg

SEQ ID NO: 4988457 - DNA, 25 bp, Homo sapien
cacagcccttgatacgtagcacaca

SEQ ID NO: 4988458 - DNA, 25 bp, Homo sapien
gtagcacacaatgcgtgaggcggct

SEQ ID NO: 4988459 - DNA, 25 bp, Homo sapien
tttccacgtgcagagaaatccgtgc

SEQ ID NO: 4988460 - DNA, 25 bp, Homo sapien
gtgcgagggaccccggcgtcgggca

SEQ ID NO: 4988461 - DNA, 25 bp, Homo sapien
agctttccagccgccgagaacgtgc

SEQ ID NO: 4988462 - DNA, 25 bp, Homo sapien
ttccagccgccgagaacgtgcgagg

SEQ ID NO: 4988463 - DNA, 25 bp, Homo sapien
gtgcccactgggctgccgctcctcc

SEQ ID NO: 4988464 - DNA, 25 bp, Homo sapien
cgggcacgcccactgccgctgctgg

SEQ ID NO: 4988465 - DNA, 25 bp, Homo sapien
ggagccctcggaatgccggctgcct

SEQ ID NO: 4988466 - DNA, 25 bp, Homo sapien
ctccgagccccgtacgcctttctct

SEQ ID NO: 4988467 - DNA, 25 bp, Homo sapien
tgcactctctggcaaggccgggcac

SEQ ID NO: 4988468 - DNA, 25 bp, Homo sapien
ctccgaccggaatacaaagaggcct

SEQ ID NO: 4988469 - DNA, 25 bp, Homo sapien
tgggagcgacggcagctggaagaga

SEQ ID NO: 4988470 - DNA, 25 bp, Homo sapien
agtgggggccttcgactgtcaccct

SEQ ID NO: 4988471 - DNA, 25 bp, Homo sapien
cagcgttccgaaatcccgggagtgg

SEQ ID NO: 4988472 - DNA, 25 bp, Homo sapien
ccgccgtggccgtgtacttcgcgga

SEQ ID NO: 4988473 - DNA, 25 bp, Homo sapien
cgtgtacttcgcggacgtgggcaca

SEQ ID NO: 4988474 - DNA, 25 bp, Homo sapien
gcacagacgtctggctcgccgtgga

SEQ ID NO: 4988475 - DNA, 25 bp, Homo sapien
tgggcacagacgtctggctcgccgt

SEQ ID NO: 4988476 - DNA, 25 bp, Homo sapien
tatctgaatcggtggcttcactctt

SEQ ID NO: 4988477 - DNA, 25 bp, Homo sapien
tgtcatcggagctgtctactgagga

SEQ ID NO: 4988478 - DNA, 25 bp, Homo sapien
cagttgatgacaaggagcacagtcc

SEQ ID NO: 4988479 - DNA, 25 bp, Homo sapien
taaccactatgttgtaatccttcta

SEQ ID NO: 4988480 - DNA, 25 bp, Homo sapien
ttttagatgaaaattctccctcagt

SEQ ID NO: 4988481 - DNA, 25 bp, Homo sapien
gggttggtatcttgactgagtgtct

SEQ ID NO: 4988482 - DNA, 25 bp, Homo sapien
tttatctcaaaggtgagttccatct

SEQ ID NO: 4988483 - DNA, 25 bp, Homo sapien
ccctcagttattcctgggttggtat

SEQ ID NO: 4988484 - DNA, 25 bp, Homo sapien
ccacagtggggaggtcggatttctc

SEQ ID NO: 4988485 - DNA, 25 bp, Homo sapien
cttcctcagggactttagggtcaca

SEQ ID NO: 4988486 - DNA, 25 bp, Homo sapien
ggactttagggtcacacgagtcaga

SEQ ID NO: 4988487 - DNA, 25 bp, Homo sapien
gggaggtcggatttctcctctgccc

SEQ ID NO: 4988488 - DNA, 25 bp, Homo sapien
ctctcctcgtaggagaagttgccat

SEQ ID NO: 4988489 - DNA, 25 bp, Homo sapien
tggtcaaacggcagaacttcatgtc

SEQ ID NO: 4988490 - DNA, 25 bp, Homo sapien
tcattgaaacttgctcttagacctc

SEQ ID NO: 4988491 - DNA, 25 bp, Homo sapien
tcctgagcgctttgtcttctcctgc

SEQ ID NO: 4988492 - DNA, 25 bp, Homo sapien
ctggataaggaaagggtatagtaca

SEQ ID NO: 4988493 - DNA, 25 bp, Homo sapien
ctggtctcttcagagtactggctgc

SEQ ID NO: 4988494 - DNA, 25 bp, Homo sapien
taaggaaagggtatagtacacactg

SEQ ID NO: 4988495 - DNA, 25 bp, Homo sapien
aagggtatagtacacactggtctct

SEQ ID NO: 4988496 - DNA, 25 bp, Homo sapien
gcttctttataacttgctagaccca

SEQ ID NO: 4988497 - DNA, 25 bp, Homo sapien
aatgaatgtatttggataacgggca

SEQ ID NO: 4988498 - DNA, 25 bp, Homo sapien
gtatttggataacgggcagcatggc

SEQ ID NO: 4988499 - DNA, 25 bp, Homo sapien
tctctgccattcgagagtctatggc

SEQ ID NO: 4988500 - DNA, 25 bp, Homo sapien
tgaccttcgaagaacatatacacca

SEQ ID NO: 4988501 - DNA, 25 bp, Homo sapien
tattccatgaccttgtgaccttcga

SEQ ID NO: 4988502 - DNA, 25 bp, Homo sapien
catgaccttgtgaccttcgaagaac

SEQ ID NO: 4988503 - DNA, 25 bp, Homo sapien
gaccttgtgaccttcgaagaacata

SEQ ID NO: 4988504 - DNA, 25 bp, Homo sapien
tctcttccattgagtattgccagca

SEQ ID NO: 4988505 - DNA, 25 bp, Homo sapien
tcggctttggtggttatctcttcca

SEQ ID NO: 4988506 - DNA, 25 bp, Homo sapien
tgagcttcggctttggtggttatct

SEQ ID NO: 4988507 - DNA, 25 bp, Homo sapien
gacctgtgttctgagcttcggcttt

SEQ ID NO: 4988508 - DNA, 25 bp, Homo sapien
gtctctgtgtccttgacatccagca

SEQ ID NO: 4988509 - DNA, 25 bp, Homo sapien
ccttgacatccagcactgtccagca

SEQ ID NO: 4988510 - DNA, 25 bp, Homo sapien
ctctgtgtccttgacatccagcact

SEQ ID NO: 4988511 - DNA, 25 bp, Homo sapien
tgtgtccttgacatccagcactgtc

SEQ ID NO: 4988512 - DNA, 25 bp, Homo sapien
gaattctgtcggcattgagacccat

SEQ ID NO: 4988513 - DNA, 25 bp, Homo sapien
ttcctgaattctgtcggcattgaga

SEQ ID NO: 4988514 - DNA, 25 bp, Homo sapien
ttctgtcggcattgagacccatctc

SEQ ID NO: 4988515 - DNA, 25 bp, Homo sapien
cctgaattctgtcggcattgagacc

SEQ ID NO: 4988516 - DNA, 25 bp, Homo sapien
tctcctagtgggcaggatgctgtca

SEQ ID NO: 4988517 - DNA, 25 bp, Homo sapien
ctcctagtgggcaggatgctgtcag

SEQ ID NO: 4988518 - DNA, 25 bp, Homo sapien
aattcactcggaggcaaggtggtca

SEQ ID NO: 4988519 - DNA, 25 bp, Homo sapien
ggatccatcctttgaattcactcgg

SEQ ID NO: 4988520 - DNA, 25 bp, Homo sapien
tccccatgtcctatagaccctgtgt

SEQ ID NO: 4988521 - DNA, 25 bp, Homo sapien
tagaccctgtgttccggatccatcc

SEQ ID NO: 4988522 - DNA, 25 bp, Homo sapien
gctgggtggctcgtagttctttaag

SEQ ID NO: 4988523 - DNA, 25 bp, Homo sapien
ctaactagactgttgccactgaacg

SEQ ID NO: 4988524 - DNA, 25 bp, Homo sapien
tgccagtggtggtttctaactagac

SEQ ID NO: 4988525 - DNA, 25 bp, Homo sapien
ctctgtgctgggtggctcgtagttc

SEQ ID NO: 4988526 - DNA, 25 bp, Homo sapien
cttgggaatgagagctagacgtatg

SEQ ID NO: 4988527 - DNA, 25 bp, Homo sapien
tggttgatctggtttcgtttcagtg

SEQ ID NO: 4988528 - DNA, 25 bp, Homo sapien
gacgtatgaccccttgagtttctat

SEQ ID NO: 4988529 - DNA, 25 bp, Homo sapien
cagtgttccatgtgatagtgttttc

SEQ ID NO: 4988530 - DNA, 25 bp, Homo sapien
gctgcaaaccaattcatctcccaga

SEQ ID NO: 4988531 - DNA, 25 bp, Homo sapien
tcaacaagtttgaccctcgtatcaa

SEQ ID NO: 4988532 - DNA, 25 bp, Homo sapien
gaccctcgtatcaaaactgctaatt

SEQ ID NO: 4988533 - DNA, 25 bp, Homo sapien
tgtgaaagatcaacaagtttgaccc

SEQ ID NO: 4988534 - DNA, 25 bp, Homo sapien
caagacagtcgttcaacagctcctg

SEQ ID NO: 4988535 - DNA, 25 bp, Homo sapien
tgcatcctcttaagtttaaagacag

SEQ ID NO: 4988536 - DNA, 25 bp, Homo sapien
agctcctgtctcgtgcatcctctta

SEQ ID NO: 4988537 - DNA, 25 bp, Homo sapien
cctgatattaaccaagtaagttgat

SEQ ID NO: 4988538 - DNA, 25 bp, Homo sapien
taatgaaaatcaaaggtcttgctta

SEQ ID NO: 4988539 - DNA, 25 bp, Homo sapien
aatgaaaatcaaaggtcttgcttac

SEQ ID NO: 4988540 - DNA, 25 bp, Homo sapien
tttggcagccaacaaattcagggca

SEQ ID NO: 4988541 - DNA, 25 bp, Homo sapien
tctgcctgtgcagatcaaccaggtt

SEQ ID NO: 4988542 - DNA, 25 bp, Homo sapien
aaccaggttgggtctccgtggcctg

SEQ ID NO: 4988543 - DNA, 25 bp, Homo sapien
gaacatctctatcacggctgccatt

SEQ ID NO: 4988544 - DNA, 25 bp, Homo sapien
gtgtgacgccaaatctaaaacatac

SEQ ID NO: 4988545 - DNA, 25 bp, Homo sapien
gacaatgacatctactcaacctggg

SEQ ID NO: 4988546 - DNA, 25 bp, Homo sapien
tcaaagtaatgactggttgtgacaa

SEQ ID NO: 4988547 - DNA, 25 bp, Homo sapien
cctgggtaacttgtagtgtgacgcc

SEQ ID NO: 4988548 - DNA, 25 bp, Homo sapien
tgtacagtgatagaaggtcaaaggc

SEQ ID NO: 4988549 - DNA, 25 bp, Homo sapien
tattaacgcagcattgtaaagtggc

SEQ ID NO: 4988550 - DNA, 25 bp, Homo sapien
taatagtgggtgatagccagaatcc

SEQ ID NO: 4988551 - DNA, 25 bp, Homo sapien
gattcagctcacgtataaggaagtg

SEQ ID NO: 4988552 - DNA, 25 bp, Homo sapien
ctgaattggtacagcctcttgttgc

SEQ ID NO: 4988553 - DNA, 25 bp, Homo sapien
cctggataagtactgaaatcgcatg

SEQ ID NO: 4988554 - DNA, 25 bp, Homo sapien
tgcatggcccaattgaaagccaatg

SEQ ID NO: 4988555 - DNA, 25 bp, Homo sapien
cgcatgcacattcctgctgaattgg

SEQ ID NO: 4988556 - DNA, 25 bp, Homo sapien
cagggtttgccaaggagcgttagtt

SEQ ID NO: 4988557 - DNA, 25 bp, Homo sapien
taacatttcagggtttgccaaggag

SEQ ID NO: 4988558 - DNA, 25 bp, Homo sapien
caaggagcgttagtttcctgctcag

SEQ ID NO: 4988559 - DNA, 25 bp, Homo sapien
ttgccaaggagcgttagtttcctgc

SEQ ID NO: 4988560 - DNA, 25 bp, Homo sapien
ttttccaaagttttgtcatcgtggc

SEQ ID NO: 4988561 - DNA, 25 bp, Homo sapien
taaggctctttaggtgtgttttcca

SEQ ID NO: 4988562 - DNA, 25 bp, Homo sapien
tccaaagttttgtcatcgtggctca

SEQ ID NO: 4988563 - DNA, 25 bp, Homo sapien
ttccaaagttttgtcatcgtggctc

SEQ ID NO: 4988564 - DNA, 25 bp, Homo sapien
gactgcttcactgagtgcttgttcc

SEQ ID NO: 4988565 - DNA, 25 bp, Homo sapien
aggcatttgaaagaccgaggagact

SEQ ID NO: 4988566 - DNA, 25 bp, Homo sapien
cactgaacgaagttgcaggcatttg

SEQ ID NO: 4988567 - DNA, 25 bp, Homo sapien
cagctggagggttggttacacttca

SEQ ID NO: 4988568 - DNA, 25 bp, Homo sapien
ctgtgtgaaggagctttttgcttgt

SEQ ID NO: 4988569 - DNA, 25 bp, Homo sapien
tgaaaggaggaggaactaccctcca

SEQ ID NO: 4988570 - DNA, 25 bp, Homo sapien
tgtgtgaaggagctttttgcttgtc

SEQ ID NO: 4988571 - DNA, 25 bp, Homo sapien
actaccctccactttgctgtgtgaa

SEQ ID NO: 4988572 - DNA, 25 bp, Homo sapien
ccctatggcttggattacacagctc

SEQ ID NO: 4988573 - DNA, 25 bp, Homo sapien
tgccgggcccttaagtagtaaatga

SEQ ID NO: 4988574 - DNA, 25 bp, Homo sapien
tcttggcaaaggctcccctatggct

SEQ ID NO: 4988575 - DNA, 25 bp, Homo sapien
gattcattcatggacctgcgatgga

SEQ ID NO: 4988576 - DNA, 25 bp, Homo sapien
accaggtggagacagatagaggaaa

SEQ ID NO: 4988577 - DNA, 25 bp, Homo sapien
tcaggctgttctatgaatccatggc

SEQ ID NO: 4988578 - DNA, 25 bp, Homo sapien
gttgggtgacacttctgcagagaca

SEQ ID NO: 4988579 - DNA, 25 bp, Homo sapien
tgtgagtgggacattcaatgcagcc

SEQ ID NO: 4988580 - DNA, 25 bp, Homo sapien
gctctggatttcttcgaggaaaatc

SEQ ID NO: 4988581 - DNA, 25 bp, Homo sapien
tggatttcttcgaggaaaatccctg

SEQ ID NO: 4988582 - DNA, 25 bp, Homo sapien
tctggatttcttcgaggaaaatccc

SEQ ID NO: 4988583 - DNA, 25 bp, Homo sapien
ctggatttcttcgaggaaaatccct

SEQ ID NO: 4988584 - DNA, 25 bp, Homo sapien
ctaactcctacaaggacatttggaa

SEQ ID NO: 4988585 - DNA, 25 bp, Homo sapien
tagaggcaattttgccatttgcact

SEQ ID NO: 4988586 - DNA, 25 bp, Homo sapien
aatcaccttgtgtggtcctgaccca

SEQ ID NO: 4988587 - DNA, 25 bp, Homo sapien
ttctaatatctaagacattctttgg

SEQ ID NO: 4988588 - DNA, 25 bp, Homo sapien
tattctcttccttcctcagctccat

SEQ ID NO: 4988589 - DNA, 25 bp, Homo sapien
tatgctatgccttttccttccgacg

SEQ ID NO: 4988590 - DNA, 25 bp, Homo sapien
gctatgccttttccttccgacgtaa

SEQ ID NO: 4988591 - DNA, 25 bp, Homo sapien
tccttccgacgtaaatattctcttc

SEQ ID NO: 4988592 - DNA, 25 bp, Homo sapien
atttcattcactgtcttcatgcata

SEQ ID NO: 4988593 - DNA, 25 bp, Homo sapien
tcagggcattgagcaagttcaggac

SEQ ID NO: 4988594 - DNA, 25 bp, Homo sapien
caaactgaaatcagggcattgagca

SEQ ID NO: 4988595 - DNA, 25 bp, Homo sapien
cactgtcttcatgcataagatcttc

SEQ ID NO: 4988596 - DNA, 25 bp, Homo sapien
tatgacctcacagtcaatgtcaagt

SEQ ID NO: 4988597 - DNA, 25 bp, Homo sapien
tgacctatgacctcacagtcaatgt

SEQ ID NO: 4988598 - DNA, 25 bp, Homo sapien
cctatgacctcacagtcaatgtcaa

SEQ ID NO: 4988599 - DNA, 25 bp, Homo sapien
attgacctatgacctcacagtcaat

SEQ ID NO: 4988600 - DNA, 25 bp, Homo sapien
ccctcaaaatgacaattgtgaaatg

SEQ ID NO: 4988601 - DNA, 25 bp, Homo sapien
gtcacatttgttgccaagtaaaaga

SEQ ID NO: 4988602 - DNA, 25 bp, Homo sapien
aatgacaattgtgaaatgagtggct

SEQ ID NO: 4988603 - DNA, 25 bp, Homo sapien
tcctccctcaaaatgacaattgtga

SEQ ID NO: 4988604 - DNA, 25 bp, Homo sapien
ggaggggatcagcctctcagccctc

SEQ ID NO: 4988605 - DNA, 25 bp, Homo sapien
gggtgcaggaaaggcattgacatta

SEQ ID NO: 4988606 - DNA, 25 bp, Homo sapien
ggagtcgctgaaatgatggatgaca

SEQ ID NO: 4988607 - DNA, 25 bp, Homo sapien
gtgaagcaggtggttcagtcgaacc

SEQ ID NO: 4988608 - DNA, 25 bp, Homo sapien
cattattgataagggagtcgctgaa

SEQ ID NO: 4988609 - DNA, 25 bp, Homo sapien
accttcagggcagctttactaaatg

SEQ ID NO: 4988610 - DNA, 25 bp, Homo sapien
caagcatgcggaaatagccctaaag

SEQ ID NO: 4988611 - DNA, 25 bp, Homo sapien
gaggagcaagcatgcggaaatagcc

SEQ ID NO: 4988612 - DNA, 25 bp, Homo sapien
aatgtgggggaataaggtgcttcca

SEQ ID NO: 4988613 - DNA, 25 bp, Homo sapien
gtttctcaactagtaattgcagtcc

SEQ ID NO: 4988614 - DNA, 25 bp, Homo sapien
ggccatgtttctcaactagtaattg

SEQ ID NO: 4988615 - DNA, 25 bp, Homo sapien
ctagtaattgcagtcctttcatgtg

SEQ ID NO: 4988616 - DNA, 25 bp, Homo sapien
attgcagtcctttcatgtgtaatga

SEQ ID NO: 4988617 - DNA, 25 bp, Homo sapien
ctactctgcaatgaagaactttctg

SEQ ID NO: 4988618 - DNA, 25 bp, Homo sapien
ttctgactactctgcaatgaagaac

SEQ ID NO: 4988619 - DNA, 25 bp, Homo sapien
cttctgtccctttccagtaaggata

SEQ ID NO: 4988620 - DNA, 25 bp, Homo sapien
gaaggcgccctggattctctgtgtt

SEQ ID NO: 4988621 - DNA, 25 bp, Homo sapien
gatggggagtttccaaagaaatgcc

SEQ ID NO: 4988622 - DNA, 25 bp, Homo sapien
ttaacagtcctgcaacaggaagagc

SEQ ID NO: 4988623 - DNA, 25 bp, Homo sapien
ttccaaagaaatgcccttgagggac

SEQ ID NO: 4988624 - DNA, 25 bp, Homo sapien
gagcatggggatggggagtttccaa

SEQ ID NO: 4988625 - DNA, 25 bp, Homo sapien
aaggttgggcaccaaatgtgctgtg

SEQ ID NO: 4988626 - DNA, 25 bp, Homo sapien
ggaataaggttgggcaccaaatgtg

SEQ ID NO: 4988627 - DNA, 25 bp, Homo sapien
tatgtgctagcatccttgagaaatc

SEQ ID NO: 4988628 - DNA, 25 bp, Homo sapien
tgtgctagcatccttgagaaatcat

SEQ ID NO: 4988629 - DNA, 25 bp, Homo sapien
aattcacgcagttgacctataacca

SEQ ID NO: 4988630 - DNA, 25 bp, Homo sapien
gcttagcacctactgttaattcacg

SEQ ID NO: 4988631 - DNA, 25 bp, Homo sapien
gaacctgctactgatttcgcagatg

SEQ ID NO: 4988632 - DNA, 25 bp, Homo sapien
cgcagatgtatctttgttgtctcta

SEQ ID NO: 4988633 - DNA, 25 bp, Homo sapien
catcccaagtctcatgtgcagtttc

SEQ ID NO: 4988634 - DNA, 25 bp, Homo sapien
gaagaggtttcttatacatcccaag

SEQ ID NO: 4988635 - DNA, 25 bp, Homo sapien
tgtgcagtttctgattctcagtaca

SEQ ID NO: 4988636 - DNA, 25 bp, Homo sapien
ttctcagtacatatagcaaagagca

SEQ ID NO: 4988637 - DNA, 25 bp, Homo sapien
tgtgttcccgcgttcctaattgagg

SEQ ID NO: 4988638 - DNA, 25 bp, Homo sapien
tatggctgagccagaaagacgttca

SEQ ID NO: 4988639 - DNA, 25 bp, Homo sapien
tgacacctgttgcaatgtgttcccg

SEQ ID NO: 4988640 - DNA, 25 bp, Homo sapien
taaccgccaggcagattgacacctg

SEQ ID NO: 4988641 - DNA, 25 bp, Homo sapien
ctccctgctgctgtttttcatgcac

SEQ ID NO: 4988642 - DNA, 25 bp, Homo sapien
aacgaggttttgctttctccctgct

SEQ ID NO: 4988643 - DNA, 25 bp, Homo sapien
cctgctgctgtttttcatgcaccat

SEQ ID NO: 4988644 - DNA, 25 bp, Homo sapien
acgaggttttgctttctccctgctg

SEQ ID NO: 4988645 - DNA, 25 bp, Homo sapien
aaaaatcagctaggctttccagcag

SEQ ID NO: 4988646 - DNA, 25 bp, Homo sapien
tgtgatttagagttccccagcatca

SEQ ID NO: 4988647 - DNA, 25 bp, Homo sapien
cacctcagggaggtagcgaatcact

SEQ ID NO: 4988648 - DNA, 25 bp, Homo sapien
caagatagtattagtcagggaggca

SEQ ID NO: 4988649 - DNA, 25 bp, Homo sapien
agtggcaaagctctgccttattttc

SEQ ID NO: 4988650 - DNA, 25 bp, Homo sapien
tcacttctttatcacctggactggg

SEQ ID NO: 4988651 - DNA, 25 bp, Homo sapien
ccagtggcaaagctctgccttattt

SEQ ID NO: 4988652 - DNA, 25 bp, Homo sapien
ttatcacctggactgggtagatgcc

SEQ ID NO: 4988653 - DNA, 25 bp, Homo sapien
cacattaaaacaagcatctgtctgc

SEQ ID NO: 4988654 - DNA, 25 bp, Homo sapien
tgtctgctgtgggttaggttggggc

SEQ ID NO: 4988655 - DNA, 25 bp, Homo sapien
ctgtctgctgtgggttaggttgggg

SEQ ID NO: 4988656 - DNA, 25 bp, Homo sapien
attaaaacaagcatctgtctgctgt

SEQ ID NO: 4988657 - DNA, 25 bp, Homo sapien
cagtgggagcctgcagccactcatc

SEQ ID NO: 4988658 - DNA, 25 bp, Homo sapien
gtgggagcctgcagccactcatcat

SEQ ID NO: 4988659 - DNA, 25 bp, Homo sapien
gggagcctgcagccactcatcatcc

SEQ ID NO: 4988660 - DNA, 25 bp, Homo sapien
gggctactcagtgggagcctgcagc

SEQ ID NO: 4988661 - DNA, 25 bp, Homo sapien
gacaggaatccaagtctgtaatccc

SEQ ID NO: 4988662 - DNA, 25 bp, Homo sapien
ttagaataagggcacagacaggaat

SEQ ID NO: 4988663 - DNA, 25 bp, Homo sapien
gaataagggcacagacaggaatcca

SEQ ID NO: 4988664 - DNA, 25 bp, Homo sapien
gggcacagacaggaatccaagtctg

SEQ ID NO: 4988665 - DNA, 25 bp, Homo sapien
atgggcgctcgtgccaatgcagcca

SEQ ID NO: 4988666 - DNA, 25 bp, Homo sapien
ctgacatgggcgctcgtgccaatgc

SEQ ID NO: 4988667 - DNA, 25 bp, Homo sapien
acagctctgacatgggcgctcgtgc

SEQ ID NO: 4988668 - DNA, 25 bp, Homo sapien
gctcgtgccaatgcagccattggga

SEQ ID NO: 4988669 - DNA, 25 bp, Homo sapien
tgatctttcttctacataggagggc

SEQ ID NO: 4988670 - DNA, 25 bp, Homo sapien
tcttctacataggagggctgggcaa

SEQ ID NO: 4988671 - DNA, 25 bp, Homo sapien
tttcttctacataggagggctgggc

SEQ ID NO: 4988672 - DNA, 25 bp, Homo sapien
tctttcttctacataggagggctgg

SEQ ID NO: 4988673 - DNA, 25 bp, Homo sapien
gtctgaggtggatcctccgaggcaa

SEQ ID NO: 4988674 - DNA, 25 bp, Homo sapien
gcaaggaatcgttagaccatatgga

SEQ ID NO: 4988675 - DNA, 25 bp, Homo sapien
ttttctctttgaggctgacacacag

SEQ ID NO: 4988676 - DNA, 25 bp, Homo sapien
tgtctggtgtcctgacgtgtctgag

SEQ ID NO: 4988677 - DNA, 25 bp, Homo sapien
cagcaatgggctgctgaataacaca

SEQ ID NO: 4988678 - DNA, 25 bp, Homo sapien
aagctctagaatcctataagtgaag

SEQ ID NO: 4988679 - DNA, 25 bp, Homo sapien
caatgggctgctgaataacacagac

SEQ ID NO: 4988680 - DNA, 25 bp, Homo sapien
ttcccacagggaatgaaaagctcta

SEQ ID NO: 4988681 - DNA, 25 bp, Homo sapien
ccagatatgttcacagactgcttcc

SEQ ID NO: 4988682 - DNA, 25 bp, Homo sapien
aaatctggggtggtcgtgccttgcc

SEQ ID NO: 4988683 - DNA, 25 bp, Homo sapien
gaaggccttagtatcatgaatgtgc

SEQ ID NO: 4988684 - DNA, 25 bp, Homo sapien
tattcataagattgcctgcctgtct

SEQ ID NO: 4988685 - DNA, 25 bp, Homo sapien
cacttgactcataggtacatgctgc

SEQ ID NO: 4988686 - DNA, 25 bp, Homo sapien
ctcataggtacatgctgctcatgct

SEQ ID NO: 4988687 - DNA, 25 bp, Homo sapien
gactcataggtacatgctgctcatg

SEQ ID NO: 4988688 - DNA, 25 bp, Homo sapien
ctagcacttgactcataggtacatg

SEQ ID NO: 4988689 - DNA, 25 bp, Homo sapien
gcaggcgccagcatttgcacactga

SEQ ID NO: 4988690 - DNA, 25 bp, Homo sapien
tatctgggtcagtaaccgtggagac

SEQ ID NO: 4988691 - DNA, 25 bp, Homo sapien
gctccctttgtgattgaaatggtcc

SEQ ID NO: 4988692 - DNA, 25 bp, Homo sapien
caaccttagaggacatgccggctga

SEQ ID NO: 4988693 - DNA, 25 bp, Homo sapien
cacacaaggagtgggaggcatgatg

SEQ ID NO: 4988694 - DNA, 25 bp, Homo sapien
gggaggcatgatggttatcatgaat

SEQ ID NO: 4988695 - DNA, 25 bp, Homo sapien
aaaatatcacccgaatgcagacaac

SEQ ID NO: 4988696 - DNA, 25 bp, Homo sapien
cattagccttttggcagtcagccat

SEQ ID NO: 4988697 - DNA, 25 bp, Homo sapien
accattagccttttggcagtcagcc

SEQ ID NO: 4988698 - DNA, 25 bp, Homo sapien
gaatgcagacaaccattagcctttt

SEQ ID NO: 4988699 - DNA, 25 bp, Homo sapien
gacaaagcgacaagcacggattacg

SEQ ID NO: 4988700 - DNA, 25 bp, Homo sapien
cgctgcggctttatgtgatttgaca

SEQ ID NO: 4988701 - DNA, 25 bp, Homo sapien
tttggattccacttcgctcgctggg

SEQ ID NO: 4988702 - DNA, 25 bp, Homo sapien
atggtaactcctgcctgacaaagcg

SEQ ID NO: 4988703 - DNA, 25 bp, Homo sapien
caatttgtgcaagaacttgatgcct

SEQ ID NO: 4988704 - DNA, 25 bp, Homo sapien
tgatgccttaatacactagatgatt

SEQ ID NO: 4988705 - DNA, 25 bp, Homo sapien
tacactagatgatttagacattctt

SEQ ID NO: 4988706 - DNA, 25 bp, Homo sapien
gcaagaacttgatgccttaatacac

SEQ ID NO: 4988707 - DNA, 25 bp, Homo sapien
cctgcccacaaatgtatgtgtccct

SEQ ID NO: 4988708 - DNA, 25 bp, Homo sapien
agtgaagacaggtggagcgacatcc

SEQ ID NO: 4988709 - DNA, 25 bp, Homo sapien
ccaatgcctgcccacaaatgtatgt

SEQ ID NO: 4988710 - DNA, 25 bp, Homo sapien
aggtggagcgacatcccagtgctgt

SEQ ID NO: 4988711 - DNA, 25 bp, Homo sapien
tgcatgcttggactgcagccctgat

SEQ ID NO: 4988712 - DNA, 25 bp, Homo sapien
ccagaaggtactccaatcggcctca

SEQ ID NO: 4988713 - DNA, 25 bp, Homo sapien
tggctttccaagcatgtctgcatgc

SEQ ID NO: 4988714 - DNA, 25 bp, Homo sapien
tgatttccgggtccatccactggct

SEQ ID NO: 4988715 - DNA, 25 bp, Homo sapien
tcgtttgtggactgagcccaaaacc

SEQ ID NO: 4988716 - DNA, 25 bp, Homo sapien
cactgcgaaaatgtgaactcatctc

SEQ ID NO: 4988717 - DNA, 25 bp, Homo sapien
gctcatccatgcactgcgaaaatgt

SEQ ID NO: 4988718 - DNA, 25 bp, Homo sapien
ccatggggtcctggagagatccctg

SEQ ID NO: 4988719 - DNA, 25 bp, Homo sapien
caaaagtcgtaaacgcgaggagttg

SEQ ID NO: 4988720 - DNA, 25 bp, Homo sapien
gtcgtaaacgcgaggagttgtcttc

SEQ ID NO: 4988721 - DNA, 25 bp, Homo sapien
cgtaaacgcgaggagttgtcttcac

SEQ ID NO: 4988722 - DNA, 25 bp, Homo sapien
tgggcacaaaagtcgtaaacgcgag

SEQ ID NO: 4988723 - DNA, 25 bp, Homo sapien
agaaggccttctcatccacgctctt

SEQ ID NO: 4988724 - DNA, 25 bp, Homo sapien
cccatggtggccatgccaggtgcca

SEQ ID NO: 4988725 - DNA, 25 bp, Homo sapien
ttaggggcacccatggtggccatgc

SEQ ID NO: 4988726 - DNA, 25 bp, Homo sapien
aggccttctcatccacgctcttagg

SEQ ID NO: 4988727 - DNA, 25 bp, Homo sapien
ggtgcttggtcttgtctaacatgaa

SEQ ID NO: 4988728 - DNA, 25 bp, Homo sapien
tggtgcttggtcttgtctaacatga

SEQ ID NO: 4988729 - DNA, 25 bp, Homo sapien
ctggtgcttggtcttgtctaacatg

SEQ ID NO: 4988730 - DNA, 25 bp, Homo sapien
tcatgaaggcccccttcttgtacag

SEQ ID NO: 4988731 - DNA, 25 bp, Homo sapien
ttcatgaaggcccccttcttgtaca

SEQ ID NO: 4988732 - DNA, 25 bp, Homo sapien
gcttcatgaaggcccccttcttgta

SEQ ID NO: 4988733 - DNA, 25 bp, Homo sapien
cttgtacagagtgccctcgtaggac

SEQ ID NO: 4988734 - DNA, 25 bp, Homo sapien
aactggctgtaagggtgctggtgct

SEQ ID NO: 4988735 - DNA, 25 bp, Homo sapien
gaactggctgtaagggtgctggtgc

SEQ ID NO: 4988736 - DNA, 25 bp, Homo sapien
ctggaactggctgtaagggtgctgg

SEQ ID NO: 4988737 - DNA, 25 bp, Homo sapien
gggtgctggtgctgccgcaggcagc

SEQ ID NO: 4988738 - DNA, 25 bp, Homo sapien
agatgcggtcgagcctctattctgg

SEQ ID NO: 4988739 - DNA, 25 bp, Homo sapien
gcggtcgagcctctattctggtcac

SEQ ID NO: 4988740 - DNA, 25 bp, Homo sapien
gcgggagccagatgcggtcgagcct

SEQ ID NO: 4988741 - DNA, 25 bp, Homo sapien
gagccagatgcggtcgagcctctat

SEQ ID NO: 4988742 - DNA, 25 bp, Homo sapien
acgggttcctcctgcaggtacatac

SEQ ID NO: 4988743 - DNA, 25 bp, Homo sapien
ccacgggttcctcctgcaggtacat

SEQ ID NO: 4988744 - DNA, 25 bp, Homo sapien
aggctcaaggtggagcccacgggtt

SEQ ID NO: 4988745 - DNA, 25 bp, Homo sapien
aggtggagcccacgggttcctcctg

SEQ ID NO: 4988746 - DNA, 25 bp, Homo sapien
cagcgagcagcggtggtgaggtgcg

SEQ ID NO: 4988747 - DNA, 25 bp, Homo sapien
ccagcgagcagcggtggtgaggtgc

SEQ ID NO: 4988748 - DNA, 25 bp, Homo sapien
gagcagcggtggtgaggtgcggtgg

SEQ ID NO: 4988749 - DNA, 25 bp, Homo sapien
gcgagcagcggtggtgaggtgcggt

SEQ ID NO: 4988750 - DNA, 25 bp, Homo sapien
ccttccagcgcttagcgggtcggct

SEQ ID NO: 4988751 - DNA, 25 bp, Homo sapien
gcttcaaggcgccatgcagccttca

SEQ ID NO: 4988752 - DNA, 25 bp, Homo sapien
agcgcttagcgggtcggctcagctc

SEQ ID NO: 4988753 - DNA, 25 bp, Homo sapien
catctggccgggcttcaaggcgcca

SEQ ID NO: 4988754 - DNA, 25 bp, Homo sapien
gctgtggtagcagggccacaccaca

SEQ ID NO: 4988755 - DNA, 25 bp, Homo sapien
ctgtggtagcagggccacaccacac

SEQ ID NO: 4988756 - DNA, 25 bp, Homo sapien
cctcgggtgcattcatgtagttgtg

SEQ ID NO: 4988757 - DNA, 25 bp, Homo sapien
ggtgcattcatgtagttgtggaaca

SEQ ID NO: 4988758 - DNA, 25 bp, Homo sapien
cattcatgtagttgtggaacatggc

SEQ ID NO: 4988759 - DNA, 25 bp, Homo sapien
ttcatgtagttgtggaacatggctg

SEQ ID NO: 4988760 - DNA, 25 bp, Homo sapien
tagccgaggaacttgagatagaact

SEQ ID NO: 4988761 - DNA, 25 bp, Homo sapien
cgaggaacttgagatagaactggct

SEQ ID NO: 4988762 - DNA, 25 bp, Homo sapien
ggaacttgagatagaactggctgaa

SEQ ID NO: 4988763 - DNA, 25 bp, Homo sapien
gtggtggtagccgaggaacttgaga

SEQ ID NO: 4988764 - DNA, 25 bp, Homo sapien
ggagctggtgtaggcagtccaagaa

SEQ ID NO: 4988765 - DNA, 25 bp, Homo sapien
gtggagctggtgtaggcagtccaag

SEQ ID NO: 4988766 - DNA, 25 bp, Homo sapien
tggagctggtgtaggcagtccaaga

SEQ ID NO: 4988767 - DNA, 25 bp, Homo sapien
aggcccatcagcacggaggaacttg

SEQ ID NO: 4988768 - DNA, 25 bp, Homo sapien
cccatcagcacggaggaacttgagt

SEQ ID NO: 4988769 - DNA, 25 bp, Homo sapien
tcagcacggaggaacttgagtccag

SEQ ID NO: 4988770 - DNA, 25 bp, Homo sapien
agcacggaggaacttgagtccagga

SEQ ID NO: 4988771 - DNA, 25 bp, Homo sapien
ttgtggatctgaatcagccactctg

SEQ ID NO: 4988772 - DNA, 25 bp, Homo sapien
tgtggatctgaatcagccactctga

SEQ ID NO: 4988773 - DNA, 25 bp, Homo sapien
gtggatctgaatcagccactctgag

SEQ ID NO: 4988774 - DNA, 25 bp, Homo sapien
agcagctttttgaagctagccttca

SEQ ID NO: 4988775 - DNA, 25 bp, Homo sapien
agtagggcagcccaggacacatgcc

SEQ ID NO: 4988776 - DNA, 25 bp, Homo sapien
caggacacatgccttcagcagcttt

SEQ ID NO: 4988777 - DNA, 25 bp, Homo sapien
ttgaagctagccttcacctgccgcg

SEQ ID NO: 4988778 - DNA, 25 bp, Homo sapien
cctttgtccccgaggatgtagaggg

SEQ ID NO: 4988779 - DNA, 25 bp, Homo sapien
gtccggccgcacattcttgagctgg

SEQ ID NO: 4988780 - DNA, 25 bp, Homo sapien
tgctgcaaggggtccggccgcacat

SEQ ID NO: 4988781 - DNA, 25 bp, Homo sapien
tcttgagctggcctttgtccccgag

SEQ ID NO: 4988782 - DNA, 25 bp, Homo sapien
tggggtggggccatcgcctctctgc

SEQ ID NO: 4988783 - DNA, 25 bp, Homo sapien
gggccatcgcctctctgccagctag

SEQ ID NO: 4988784 - DNA, 25 bp, Homo sapien
tgtggccacaggaagcccgggtcgg

SEQ ID NO: 4988785 - DNA, 25 bp, Homo sapien
gggtggggccatcgcctctctgcca

SEQ ID NO: 4988786 - DNA, 25 bp, Homo sapien
cactgctgcgcccacaggtccagac

SEQ ID NO: 4988787 - DNA, 25 bp, Homo sapien
tgctgcgcccacaggtccagacact

SEQ ID NO: 4988788 - DNA, 25 bp, Homo sapien
gctgcgcccacaggtccagacactg

SEQ ID NO: 4988789 - DNA, 25 bp, Homo sapien
tgcgcccacaggtccagacactgcc

SEQ ID NO: 4988790 - DNA, 25 bp, Homo sapien
gggtgcagtcagtctggatgccgcc

SEQ ID NO: 4988791 - DNA, 25 bp, Homo sapien
gtcagtctggatgccgccgccatgg

SEQ ID NO: 4988792 - DNA, 25 bp, Homo sapien
cgccgccatggggttagacagagtg

SEQ ID NO: 4988793 - DNA, 25 bp, Homo sapien
gtgcagtcagtctggatgccgccgc

SEQ ID NO: 4988794 - DNA, 25 bp, Homo sapien
tctgggccttaaagagtccgactac

SEQ ID NO: 4988795 - DNA, 25 bp, Homo sapien
atgcgccagcagacaacggtgaagc

SEQ ID NO: 4988796 - DNA, 25 bp, Homo sapien
aaggcactgatagtcgcggcagcaa

SEQ ID NO: 4988797 - DNA, 25 bp, Homo sapien
gctaagtgtgttgcgtccggacgca

SEQ ID NO: 4988798 - DNA, 25 bp, Homo sapien
tcctcagagggcggctggctccagt

SEQ ID NO: 4988799 - DNA, 25 bp, Homo sapien
tcctggtcctcagagggcggctggc

SEQ ID NO: 4988800 - DNA, 25 bp, Homo sapien
cagagggcggctggctccagtgctc

SEQ ID NO: 4988801 - DNA, 25 bp, Homo sapien
ggtcctcagagggcggctggctcca

SEQ ID NO: 4988802 - DNA, 25 bp, Homo sapien
atgctgccgcccgatggtcttcttg

SEQ ID NO: 4988803 - DNA, 25 bp, Homo sapien
gttccaggacagggttctgagggaa

SEQ ID NO: 4988804 - DNA, 25 bp, Homo sapien
accaggttccaggacagggttctga

SEQ ID NO: 4988805 - DNA, 25 bp, Homo sapien
caggacagggttctgagggaaggac

SEQ ID NO: 4988806 - DNA, 25 bp, Homo sapien
caggttccaggacagggttctgagg

SEQ ID NO: 4988807 - DNA, 25 bp, Homo sapien
tggccgggtgtgtaggtagagccca

SEQ ID NO: 4988808 - DNA, 25 bp, Homo sapien
ccctgacatccggtgtgtaccgcag

SEQ ID NO: 4988809 - DNA, 25 bp, Homo sapien
gtggctggccgggtgtgtaggtaga

SEQ ID NO: 4988810 - DNA, 25 bp, Homo sapien
ggtggccctgacatccggtgtgtac

SEQ ID NO: 4988811 - DNA, 25 bp, Homo sapien
agaagagctcggcactgtcagaccc

SEQ ID NO: 4988812 - DNA, 25 bp, Homo sapien
ctgcttgcagaagagctcggcactg

SEQ ID NO: 4988813 - DNA, 25 bp, Homo sapien
aagagctcggcactgtcagacccca

SEQ ID NO: 4988814 - DNA, 25 bp, Homo sapien
ttgcagaagagctcggcactgtcag

SEQ ID NO: 4988815 - DNA, 25 bp, Homo sapien
gggtctggatgctgatgcatttctc

SEQ ID NO: 4988816 - DNA, 25 bp, Homo sapien
ggtctggatgctgatgcatttctcc

SEQ ID NO: 4988817 - DNA, 25 bp, Homo sapien
caatagctgatccaaaggggtctgg

SEQ ID NO: 4988818 - DNA, 25 bp, Homo sapien
ctgcagcccgtcctgcaatagctga

SEQ ID NO: 4988819 - DNA, 25 bp, Homo sapien
gggggtctgtgagcatccccgtgaa

SEQ ID NO: 4988820 - DNA, 25 bp, Homo sapien
ccccaccagggggtctgtgagcatc

SEQ ID NO: 4988821 - DNA, 25 bp, Homo sapien
ggtctgtgagcatccccgtgaagat

SEQ ID NO: 4988822 - DNA, 25 bp, Homo sapien
accagggggtctgtgagcatccccg

SEQ ID NO: 4988823 - DNA, 25 bp, Homo sapien
cgcccatccggtggcaggtagatgc

SEQ ID NO: 4988824 - DNA, 25 bp, Homo sapien
ccatccggtggcaggtagatgcgca

SEQ ID NO: 4988825 - DNA, 25 bp, Homo sapien
agcagtgctggccaccccgcactgc

SEQ ID NO: 4988826 - DNA, 25 bp, Homo sapien
cccgcactgcccgccctcgcaccct

SEQ ID NO: 4988827 - DNA, 25 bp, Homo sapien
tgggcatcagcctccggttctcccg

SEQ ID NO: 4988828 - DNA, 25 bp, Homo sapien
agatgggcatcagcctccggttctc

SEQ ID NO: 4988829 - DNA, 25 bp, Homo sapien
ctagatgggcatcagcctccggttc

SEQ ID NO: 4988830 - DNA, 25 bp, Homo sapien
catcagcctccggttctcccgctgc

SEQ ID NO: 4988831 - DNA, 25 bp, Homo sapien
tgtttatctggacgatgtctggcac

SEQ ID NO: 4988832 - DNA, 25 bp, Homo sapien
cagggtcttaatgtttatctggacg

SEQ ID NO: 4988833 - DNA, 25 bp, Homo sapien
cgcctccagggtcttaatgtttatc

SEQ ID NO: 4988834 - DNA, 25 bp, Homo sapien
tcttaatgtttatctggacgatgtc

SEQ ID NO: 4988835 - DNA, 25 bp, Homo sapien
cttgtccacaaagcggttgatgaag

SEQ ID NO: 4988836 - DNA, 25 bp, Homo sapien
gcttctcaccgctcagggatggcca

SEQ ID NO: 4988837 - DNA, 25 bp, Homo sapien
ggtagctcacgcagttggtatagtg

SEQ ID NO: 4988838 - DNA, 25 bp, Homo sapien
aggaggtagctcacgcagttggtat

SEQ ID NO: 4988839 - DNA, 25 bp, Homo sapien
gctcacgcagttggtatagtggatg

SEQ ID NO: 4988840 - DNA, 25 bp, Homo sapien
tagggcagagtgctctctcatcctc

SEQ ID NO: 4988841 - DNA, 25 bp, Homo sapien
ttctagggcagagtgctctctcatc

SEQ ID NO: 4988842 - DNA, 25 bp, Homo sapien
cttctagggcagagtgctctctcat

SEQ ID NO: 4988843 - DNA, 25 bp, Homo sapien
tctagggcagagtgctctctcatcc

SEQ ID NO: 4988844 - DNA, 25 bp, Homo sapien
gtgggctccaggtaaaggacccaga

SEQ ID NO: 4988845 - DNA, 25 bp, Homo sapien
catgtcccagtagaacacggcctcc

SEQ ID NO: 4988846 - DNA, 25 bp, Homo sapien
taaaggacccagatatgagtctgca

SEQ ID NO: 4988847 - DNA, 25 bp, Homo sapien
agtagaacacggcctcccagaactg

SEQ ID NO: 4988848 - DNA, 25 bp, Homo sapien
gagcagccgagatgccatgcttgtc

SEQ ID NO: 4988849 - DNA, 25 bp, Homo sapien
agcagagcagccgagatgccatgct

SEQ ID NO: 4988850 - DNA, 25 bp, Homo sapien
gcagccgagatgccatgcttgtcca

SEQ ID NO: 4988851 - DNA, 25 bp, Homo sapien
cagagcagccgagatgccatgcttg

SEQ ID NO: 4988852 - DNA, 25 bp, Homo sapien
atcttcccctcaaacacgtgggaga

SEQ ID NO: 4988853 - DNA, 25 bp, Homo sapien
tgggagatgcagttgcccacgacct

SEQ ID NO: 4988854 - DNA, 25 bp, Homo sapien
agggccctcagcacagctaggagca

SEQ ID NO: 4988855 - DNA, 25 bp, Homo sapien
cacagctaggagcagcttcttggcc

SEQ ID NO: 4988856 - DNA, 25 bp, Homo sapien
actgcatggcgccctcatccagcca

SEQ ID NO: 4988857 - DNA, 25 bp, Homo sapien
ctgcatggcgccctcatccagccag

SEQ ID NO: 4988858 - DNA, 25 bp, Homo sapien
tcattgggggtggttctcatccacc

SEQ ID NO: 4988859 - DNA, 25 bp, Homo sapien
ttgggggtggttctcatccacccac

SEQ ID NO: 4988860 - DNA, 25 bp, Homo sapien
attgggggtggttctcatccaccca

SEQ ID NO: 4988861 - DNA, 25 bp, Homo sapien
cattgggggtggttctcatccaccc

SEQ ID NO: 4988862 - DNA, 25 bp, Homo sapien
ctctgtgccacatcgtgggccacca

SEQ ID NO: 4988863 - DNA, 25 bp, Homo sapien
gggaccccacactccaacacaaaga

SEQ ID NO: 4988864 - DNA, 25 bp, Homo sapien
tggggcagtacgggaccccacactc

SEQ ID NO: 4988865 - DNA, 25 bp, Homo sapien
gtacgggaccccacactccaacaca

SEQ ID NO: 4988866 - DNA, 25 bp, Homo sapien
ggcagtacgggaccccacactccaa

SEQ ID NO: 4988867 - DNA, 25 bp, Homo sapien
caggaaggctgccttatggaagcgg

SEQ ID NO: 4988868 - DNA, 25 bp, Homo sapien
cccaggaaggctgccttatggaagc

SEQ ID NO: 4988869 - DNA, 25 bp, Homo sapien
ggaaggctgccttatggaagcggat

SEQ ID NO: 4988870 - DNA, 25 bp, Homo sapien
aggctgccttatggaagcggatgac

SEQ ID NO: 4988871 - DNA, 25 bp, Homo sapien
cagctctttgtcctgcatattcaag

SEQ ID NO: 4988872 - DNA, 25 bp, Homo sapien
gaggagggggacgtcatgggtggag

SEQ ID NO: 4988873 - DNA, 25 bp, Homo sapien
aggagggggacgtcatgggtggagg

SEQ ID NO: 4988874 - DNA, 25 bp, Homo sapien
gccgcagctctttgtcctgcatatt

SEQ ID NO: 4988875 - DNA, 25 bp, Homo sapien
gatcagctacaatcacgtctagcag

SEQ ID NO: 4988876 - DNA, 25 bp, Homo sapien
gaaggccgcattgaccccgattatg

SEQ ID NO: 4988877 - DNA, 25 bp, Homo sapien
acacactcagggatggtcaccgtct

SEQ ID NO: 4988878 - DNA, 25 bp, Homo sapien
gggtccaggaccattcttagaacac

SEQ ID NO: 4988879 - DNA, 25 bp, Homo sapien
gggagtcggccagtggagtctggat

SEQ ID NO: 4988880 - DNA, 25 bp, Homo sapien
cagggagtcggccagtggagtctgg

SEQ ID NO: 4988881 - DNA, 25 bp, Homo sapien
gatgggcagggagtcggccagtgga

SEQ ID NO: 4988882 - DNA, 25 bp, Homo sapien
gggcagggagtcggccagtggagtc

SEQ ID NO: 4988883 - DNA, 25 bp, Homo sapien
cggtcaccagcccccaaataaatcg

SEQ ID NO: 4988884 - DNA, 25 bp, Homo sapien
gtcaccagcccccaaataaatcgtc

SEQ ID NO: 4988885 - DNA, 25 bp, Homo sapien
ctgccggtcaccagcccccaaataa

SEQ ID NO: 4988886 - DNA, 25 bp, Homo sapien
caccagcccccaaataaatcgtcct

SEQ ID NO: 4988887 - DNA, 25 bp, Homo sapien
ggtgcacgtcagcaggttcccaatt

SEQ ID NO: 4988888 - DNA, 25 bp, Homo sapien
tgcacgtcagcaggttcccaattac

SEQ ID NO: 4988889 - DNA, 25 bp, Homo sapien
gggcacggtgcacgtcagcaggttc

SEQ ID NO: 4988890 - DNA, 25 bp, Homo sapien
gccaggggcacggtgcacgtcagca

SEQ ID NO: 4988891 - DNA, 25 bp, Homo sapien
tcctgaacacctccgcatggtcaag

SEQ ID NO: 4988892 - DNA, 25 bp, Homo sapien
caggtaccagcgtctttggggcaaa

SEQ ID NO: 4988893 - DNA, 25 bp, Homo sapien
tccgcatggtcaagtcgcgacacag

SEQ ID NO: 4988894 - DNA, 25 bp, Homo sapien
tggtcaagtcgcgacacaggtacca

SEQ ID NO: 4988895 - DNA, 25 bp, Homo sapien
tccttagcgcgtgtcgtttcctgct

SEQ ID NO: 4988896 - DNA, 25 bp, Homo sapien
cagcacagtagtggcgcccggagtt

SEQ ID NO: 4988897 - DNA, 25 bp, Homo sapien
caagcagcacagtagtggcgcccgg

SEQ ID NO: 4988898 - DNA, 25 bp, Homo sapien
ccactcagtggcatccttagcgcgt

SEQ ID NO: 4988899 - DNA, 25 bp, Homo sapien
cccagtccttctccgggaagaactg

SEQ ID NO: 4988900 - DNA, 25 bp, Homo sapien
agaactgcagaatatggccctggcc

SEQ ID NO: 4988901 - DNA, 25 bp, Homo sapien
aagaactgcagaatatggccctggc

SEQ ID NO: 4988902 - DNA, 25 bp, Homo sapien
ccagcaggaagtagtctgtgatccg

SEQ ID NO: 4988903 - DNA, 25 bp, Homo sapien
atgttatagagcttcaggtaaaggc

SEQ ID NO: 4988904 - DNA, 25 bp, Homo sapien
tatagagcttcaggtaaaggcagca

SEQ ID NO: 4988905 - DNA, 25 bp, Homo sapien
gttatagagcttcaggtaaaggcag

SEQ ID NO: 4988906 - DNA, 25 bp, Homo sapien
ttatagagcttcaggtaaaggcagc

SEQ ID NO: 4988907 - DNA, 25 bp, Homo sapien
acagctgatagcttggcagaaactc

SEQ ID NO: 4988908 - DNA, 25 bp, Homo sapien
actaacagctgatagcttggcagaa

SEQ ID NO: 4988909 - DNA, 25 bp, Homo sapien
taacagctgatagcttggcagaaac

SEQ ID NO: 4988910 - DNA, 25 bp, Homo sapien
agactaacagctgatagcttggcag

SEQ ID NO: 4988911 - DNA, 25 bp, Homo sapien
tctccattggggtggtcagttgccc

SEQ ID NO: 4988912 - DNA, 25 bp, Homo sapien
ctggttatagagctggctactgtac

SEQ ID NO: 4988913 - DNA, 25 bp, Homo sapien
ctactggttatagagctggctactg

SEQ ID NO: 4988914 - DNA, 25 bp, Homo sapien
ggttatagagctggctactgtactc

SEQ ID NO: 4988915 - DNA, 25 bp, Homo sapien
tggttcctaagatatagacatgtct

SEQ ID NO: 4988916 - DNA, 25 bp, Homo sapien
tcatttgtttggttcctaagatata

SEQ ID NO: 4988917 - DNA, 25 bp, Homo sapien
ccaactccagttgatcgtttgatca

SEQ ID NO: 4988918 - DNA, 25 bp, Homo sapien
tccagttgatcgtttgatcagattc

SEQ ID NO: 4988919 - DNA, 25 bp, Homo sapien
caggagtaatgcccatctaattcct

SEQ ID NO: 4988920 - DNA, 25 bp, Homo sapien
ccctgatacagcatgtgagctccag

SEQ ID NO: 4988921 - DNA, 25 bp, Homo sapien
ttccctgatacagcatgtgagctcc

SEQ ID NO: 4988922 - DNA, 25 bp, Homo sapien
tccctgatacagcatgtgagctcca

SEQ ID NO: 4988923 - DNA, 25 bp, Homo sapien
gccaagagggctttgacgatatggt

SEQ ID NO: 4988924 - DNA, 25 bp, Homo sapien
ctgctggctgttgccaagagggctt

SEQ ID NO: 4988925 - DNA, 25 bp, Homo sapien
tggctgttgccaagagggctttgac

SEQ ID NO: 4988926 - DNA, 25 bp, Homo sapien
ctgttgccaagagggctttgacgat

SEQ ID NO: 4988927 - DNA, 25 bp, Homo sapien
cagagacagcatgtaaaggagcatg

SEQ ID NO: 4988928 - DNA, 25 bp, Homo sapien
agcatgccaagtgatgccctaagag

SEQ ID NO: 4988929 - DNA, 25 bp, Homo sapien
agttgcaggagcaatggcccaggtc

SEQ ID NO: 4988930 - DNA, 25 bp, Homo sapien
caagtgatgccctaagagttgcagg

SEQ ID NO: 4988931 - DNA, 25 bp, Homo sapien
tgccaaaggtgcaactgcctcaggt

SEQ ID NO: 4988932 - DNA, 25 bp, Homo sapien
caaaggtgcaactgcctcaggtgcc

SEQ ID NO: 4988933 - DNA, 25 bp, Homo sapien
gccaaaggtgcaactgcctcaggtg

SEQ ID NO: 4988934 - DNA, 25 bp, Homo sapien
gctgccaaaggtgcaactgcctcag

SEQ ID NO: 4988935 - DNA, 25 bp, Homo sapien
caccttgtgtataggaggtactgac

SEQ ID NO: 4988936 - DNA, 25 bp, Homo sapien
aatgcttgcttgctacatgctggga

SEQ ID NO: 4988937 - DNA, 25 bp, Homo sapien
gccacccctgggtaagattatttca

SEQ ID NO: 4988938 - DNA, 25 bp, Homo sapien
gagttaccaggtttcacaattggcc

SEQ ID NO: 4988939 - DNA, 25 bp, Homo sapien
tagacccggtggagcttgtattacc

SEQ ID NO: 4988940 - DNA, 25 bp, Homo sapien
ggatactgagaaagccctagacccg

SEQ ID NO: 4988941 - DNA, 25 bp, Homo sapien
tatgattccagccaagaggttctac

SEQ ID NO: 4988942 - DNA, 25 bp, Homo sapien
ttgccttgcaaagaagtagaaatcc

SEQ ID NO: 4988943 - DNA, 25 bp, Homo sapien
tttacgtagcatttgagaaacggag

SEQ ID NO: 4988944 - DNA, 25 bp, Homo sapien
tacccacgcagatacagagctacag

SEQ ID NO: 4988945 - DNA, 25 bp, Homo sapien
caaggtatgttaggaccaatgcagg

SEQ ID NO: 4988946 - DNA, 25 bp, Homo sapien
gaggcttttcaagggcgagcacagc

SEQ ID NO: 4988947 - DNA, 25 bp, Homo sapien
aatacctccgtacagcaagtaaacg

SEQ ID NO: 4988948 - DNA, 25 bp, Homo sapien
gcactcttacaacaagcttctgggt

SEQ ID NO: 4988949 - DNA, 25 bp, Homo sapien
tcatctgtaaagtcgcactcttaca

SEQ ID NO: 4988950 - DNA, 25 bp, Homo sapien
aacgttccccgctttctgttctcag

SEQ ID NO: 4988951 - DNA, 25 bp, Homo sapien
gacttgtaatattgtaaccaagctc

SEQ ID NO: 4988952 - DNA, 25 bp, Homo sapien
gaggtgatttgcagttaattaattc

SEQ ID NO: 4988953 - DNA, 25 bp, Homo sapien
ggagcttgtcaagctttactggagg

SEQ ID NO: 4988954 - DNA, 25 bp, Homo sapien
gacactttaatcttgcaaattcttg

SEQ ID NO: 4988955 - DNA, 25 bp, Homo sapien
gtcatcagatttgtcaataagcagt

SEQ ID NO: 4988956 - DNA, 25 bp, Homo sapien
agtcatcagatttgtcaataagcag

SEQ ID NO: 4988957 - DNA, 25 bp, Homo sapien
aaaagtcgagatgtttgaatcatac

SEQ ID NO: 4988958 - DNA, 25 bp, Homo sapien
ttggaaaagtcgagatgtttgaatc

SEQ ID NO: 4988959 - DNA, 25 bp, Homo sapien
tatttggaaaagtcgagatgtttga

SEQ ID NO: 4988960 - DNA, 25 bp, Homo sapien
ggatatttggaaaagtcgagatgtt

SEQ ID NO: 4988961 - DNA, 25 bp, Homo sapien
gcgccgtaagcaattgctggtcata

SEQ ID NO: 4988962 - DNA, 25 bp, Homo sapien
actgctccggtgttgtaagtaatgg

SEQ ID NO: 4988963 - DNA, 25 bp, Homo sapien
tgtaagtaatggaattgaactttct

SEQ ID NO: 4988964 - DNA, 25 bp, Homo sapien
gaattgaactttcttgcgccgtaag

SEQ ID NO: 4988965 - DNA, 25 bp, Homo sapien
catgccaatttccaagcaccaactg

SEQ ID NO: 4988966 - DNA, 25 bp, Homo sapien
atctttgtagtcatcgttaaaattc

SEQ ID NO: 4988967 - DNA, 25 bp, Homo sapien
caaacatgggaatatttagtgatat

SEQ ID NO: 4988968 - DNA, 25 bp, Homo sapien
gccaatttccaagcaccaactggtt

SEQ ID NO: 4988969 - DNA, 25 bp, Homo sapien
caccaaatcccatttcaaatctttt

SEQ ID NO: 4988970 - DNA, 25 bp, Homo sapien
caaagacgtgacaacctattgtcct

SEQ ID NO: 4988971 - DNA, 25 bp, Homo sapien
caggatgtttagttgaatcagcaac

SEQ ID NO: 4988972 - DNA, 25 bp, Homo sapien
tagttgaatcagcaacaaagacgtg

SEQ ID NO: 4988973 - DNA, 25 bp, Homo sapien
cagcaacaaagacgtgacaacctat

SEQ ID NO: 4988974 - DNA, 25 bp, Homo sapien
cagcccagaccctgaattttaaatc

SEQ ID NO: 4988975 - DNA, 25 bp, Homo sapien
cattatgcccaactaatatttataa

SEQ ID NO: 4988976 - DNA, 25 bp, Homo sapien
caggtgcacgccattatgcccaact

SEQ ID NO: 4988977 - DNA, 25 bp, Homo sapien
gcccagaccctgaattttaaatcat

SEQ ID NO: 4988978 - DNA, 25 bp, Homo sapien
aattgttgaaaattcagtgggcatg

SEQ ID NO: 4988979 - DNA, 25 bp, Homo sapien
tgcttccggcagagaaattgttgaa

SEQ ID NO: 4988980 - DNA, 25 bp, Homo sapien
tcagaatcaagcagccctagctgct

SEQ ID NO: 4988981 - DNA, 25 bp, Homo sapien
agaagcgggtattaaacatctctgc

SEQ ID NO: 4988982 - DNA, 25 bp, Homo sapien
agaatcttcggggaacattcccact

SEQ ID NO: 4988983 - DNA, 25 bp, Homo sapien
aatcttcggggaacattcccactct

SEQ ID NO: 4988984 - DNA, 25 bp, Homo sapien
gaagaatcttcggggaacattccca

SEQ ID NO: 4988985 - DNA, 25 bp, Homo sapien
cagaagaatcttcggggaacattcc

SEQ ID NO: 4988986 - DNA, 25 bp, Homo sapien
tctctcttccgagtaacttctataa

SEQ ID NO: 4988987 - DNA, 25 bp, Homo sapien
tcatctatgtagacacagccctgca

SEQ ID NO: 4988988 - DNA, 25 bp, Homo sapien
gacaaactcaaattgtcgcatgcct

SEQ ID NO: 4988989 - DNA, 25 bp, Homo sapien
tcaaattgtcgcatgccttctctct

SEQ ID NO: 4988990 - DNA, 25 bp, Homo sapien
gtgaggccctttctaagcggctggc

SEQ ID NO: 4988991 - DNA, 25 bp, Homo sapien
catgggactgccatctggtgaggcc

SEQ ID NO: 4988992 - DNA, 25 bp, Homo sapien
ctttctaagcggctggctgccagag

SEQ ID NO: 4988993 - DNA, 25 bp, Homo sapien
gactgccatctggtgaggccctttc

SEQ ID NO: 4988994 - DNA, 25 bp, Homo sapien
cataggtcttaattgcacagcttga

SEQ ID NO: 4988995 - DNA, 25 bp, Homo sapien
gagagacactactgttgataggcag

SEQ ID NO: 4988996 - DNA, 25 bp, Homo sapien
gaaggctacacccatattcttgcac

SEQ ID NO: 4988997 - DNA, 25 bp, Homo sapien
tccatgttggtgcataaagcaatag

SEQ ID NO: 4988998 - DNA, 25 bp, Homo sapien
cacatgtcccctgccttatctggaa

SEQ ID NO: 4988999 - DNA, 25 bp, Homo sapien
gaatttagtggctccaaggcaagta

SEQ ID NO: 4989000 - DNA, 25 bp, Homo sapien
tgtgacctaatttagaccaactgtc

SEQ ID NO: 4989001 - DNA, 25 bp, Homo sapien
ctttagtcaataggttcacatacag

SEQ ID NO: 4989002 - DNA, 25 bp, Homo sapien
aagtttcttcattgtggctagatca

SEQ ID NO: 4989003 - DNA, 25 bp, Homo sapien
taggtgagaaatgtgtaaagagtac

SEQ ID NO: 4989004 - DNA, 25 bp, Homo sapien
taattgactcttctcattgaccaca

SEQ ID NO: 4989005 - DNA, 25 bp, Homo sapien
caattttgaaccaaacactgctcac

SEQ ID NO: 4989006 - DNA, 25 bp, Homo sapien
tttctcaagaaaattaactgcaact

SEQ ID NO: 4989007 - DNA, 25 bp, Homo sapien
cgaaatgcagagcacaacagtgatt

SEQ ID NO: 4989008 - DNA, 25 bp, Homo sapien
tcagcttctaacacacgaaatgcag

SEQ ID NO: 4989009 - DNA, 25 bp, Homo sapien
ccacttcactggctgtagagtcaaa

SEQ ID NO: 4989010 - DNA, 25 bp, Homo sapien
tagagtcaaactgggtaagcctcaa

SEQ ID NO: 4989011 - DNA, 25 bp, Homo sapien
ttataggacctacaaaattcagaag

SEQ ID NO: 4989012 - DNA, 25 bp, Homo sapien
gtgcttggcaactggacatgacata

SEQ ID NO: 4989013 - DNA, 25 bp, Homo sapien
gaaatttaacgcattatccaggaat

SEQ ID NO: 4989014 - DNA, 25 bp, Homo sapien
tcagctcagggcgacagatacagaa

SEQ ID NO: 4989015 - DNA, 25 bp, Homo sapien
cataatgtttcctggtattctttgg

SEQ ID NO: 4989016 - DNA, 25 bp, Homo sapien
cgttctaacaaagcactcataatgt

SEQ ID NO: 4989017 - DNA, 25 bp, Homo sapien
taatgtttcctggtattctttggtg

SEQ ID NO: 4989018 - DNA, 25 bp, Homo sapien
tcaatgaaaacgttctaacaaagca

SEQ ID NO: 4989019 - DNA, 25 bp, Homo sapien
tcacctgccttgtaaagctcatggc

SEQ ID NO: 4989020 - DNA, 25 bp, Homo sapien
aaccactgacctagacatgcttgta

SEQ ID NO: 4989021 - DNA, 25 bp, Homo sapien
ggattagcaaatgttccctagggta

SEQ ID NO: 4989022 - DNA, 25 bp, Homo sapien
caactcctgcctgtagtgacaataa

SEQ ID NO: 4989023 - DNA, 25 bp, Homo sapien
ttatctgtgggtcatacggaatggg

SEQ ID NO: 4989024 - DNA, 25 bp, Homo sapien
taaataggtccgtaacttcactgga

SEQ ID NO: 4989025 - DNA, 25 bp, Homo sapien
tcttccgctgttatctgtgggtcat

SEQ ID NO: 4989026 - DNA, 25 bp, Homo sapien
tggagcaaatggatagcggaatttt

SEQ ID NO: 4989027 - DNA, 25 bp, Homo sapien
tcctccaagtgatctaaatccttct

SEQ ID NO: 4989028 - DNA, 25 bp, Homo sapien
ttgttcctccaagtgatctaaatcc

SEQ ID NO: 4989029 - DNA, 25 bp, Homo sapien
ttctcgaatattttgtgtaaacata

SEQ ID NO: 4989030 - DNA, 25 bp, Homo sapien
tcgaatattttgtgtaaacatagga

SEQ ID NO: 4989031 - DNA, 25 bp, Homo sapien
tactgaatagtacgctcactggaga

SEQ ID NO: 4989032 - DNA, 25 bp, Homo sapien
tcgggtctcgttagtattggcatgg

SEQ ID NO: 4989033 - DNA, 25 bp, Homo sapien
gaaaaggcacctatggccatgccac

SEQ ID NO: 4989034 - DNA, 25 bp, Homo sapien
gattatgcaaacttttgagggcctg

SEQ ID NO: 4989035 - DNA, 25 bp, Homo sapien
tagaactgtgcctggaatccactag

SEQ ID NO: 4989036 - DNA, 25 bp, Homo sapien
tacagtcaaccatgagtaaatgcct

SEQ ID NO: 4989037 - DNA, 25 bp, Homo sapien
ggtttctacactggcacgcaagctt

SEQ ID NO: 4989038 - DNA, 25 bp, Homo sapien
tctcgccagaaggaagacgcctaat

SEQ ID NO: 4989039 - DNA, 25 bp, Homo sapien
gcagaaactttccataggtaataga

SEQ ID NO: 4989040 - DNA, 25 bp, Homo sapien
cacactcggcctacatactaatttt

SEQ ID NO: 4989041 - DNA, 25 bp, Homo sapien
gcagcgaaagtgtctaagttcttat

SEQ ID NO: 4989042 - DNA, 25 bp, Homo sapien
tgagaaatactttccgaaggcaaag

SEQ ID NO: 4989043 - DNA, 25 bp, Homo sapien
tgcatcaattgcaacctgagcaaag

SEQ ID NO: 4989044 - DNA, 25 bp, Homo sapien
tagggcttctcgaactccacctggt

SEQ ID NO: 4989045 - DNA, 25 bp, Homo sapien
tccacctggtgagatagctaacaag

SEQ ID NO: 4989046 - DNA, 25 bp, Homo sapien
gcgatgaccccatacgatgttataa

SEQ ID NO: 4989047 - DNA, 25 bp, Homo sapien
gatcattacttaattcactgtttgg

SEQ ID NO: 4989048 - DNA, 25 bp, Homo sapien
gaacatactaacaactctcttggct

SEQ ID NO: 4989049 - DNA, 25 bp, Homo sapien
tataggcactgaagtagatcattac

SEQ ID NO: 4989050 - DNA, 25 bp, Homo sapien
tctggttgatgtgtcagcttttgct

SEQ ID NO: 4989051 - DNA, 25 bp, Homo sapien
gctactactcggcaagttctgcctt

SEQ ID NO: 4989052 - DNA, 25 bp, Homo sapien
aaattataagtgctggtccatcttc

SEQ ID NO: 4989053 - DNA, 25 bp, Homo sapien
aaatctataggaatagctccatgat

SEQ ID NO: 4989054 - DNA, 25 bp, Homo sapien
gacaaagtgatcagctactactcgg

SEQ ID NO: 4989055 - DNA, 25 bp, Homo sapien
tatatacacagatatcataatgctg

SEQ ID NO: 4989056 - DNA, 25 bp, Homo sapien
cagatttgaactagactacaagaaa

SEQ ID NO: 4989057 - DNA, 25 bp, Homo sapien
tgtcctgtagaagcgagatcagagg

SEQ ID NO: 4989058 - DNA, 25 bp, Homo sapien
tttgtacaatcttattacatgtggg

SEQ ID NO: 4989059 - DNA, 25 bp, Homo sapien
cattacagaccacagcctccacggg

SEQ ID NO: 4989060 - DNA, 25 bp, Homo sapien
attacagaccacagcctccacgggt

SEQ ID NO: 4989061 - DNA, 25 bp, Homo sapien
ttacagaccacagcctccacgggtc

SEQ ID NO: 4989062 - DNA, 25 bp, Homo sapien
cactgagtttgaggatcaactgtcc

SEQ ID NO: 4989063 - DNA, 25 bp, Homo sapien
tattaagcaattgacagtgtctggc

SEQ ID NO: 4989064 - DNA, 25 bp, Homo sapien
cctattcctagtataccttgggcaa

SEQ ID NO: 4989065 - DNA, 25 bp, Homo sapien
gaaaccactgtgatgctcaacaaca

SEQ ID NO: 4989066 - DNA, 25 bp, Homo sapien
tccacactggtagagtcaaacttat

SEQ ID NO: 4989067 - DNA, 25 bp, Homo sapien
atgctaaataattgaagcattttta

SEQ ID NO: 4989068 - DNA, 25 bp, Homo sapien
aatgctaaataattgaagcattttt

SEQ ID NO: 4989069 - DNA, 25 bp, Homo sapien
tcaacttatagtctacagtgctgcg

SEQ ID NO: 4989070 - DNA, 25 bp, Homo sapien
caatgcatgcaaacaggtaacaggg

SEQ ID NO: 4989071 - DNA, 25 bp, Homo sapien
tgtttaatggaaaccaacgtctatg

SEQ ID NO: 4989072 - DNA, 25 bp, Homo sapien
cagtgctgcgtggttctttgtttaa

SEQ ID NO: 4989073 - DNA, 25 bp, Homo sapien
tgaatggcaacacaaaggtgaaagt

SEQ ID NO: 4989074 - DNA, 25 bp, Homo sapien
ctccaactgctccacaccaaaccat

SEQ ID NO: 4989075 - DNA, 25 bp, Homo sapien
cacaccaaaccattcttcgagtatg

SEQ ID NO: 4989076 - DNA, 25 bp, Homo sapien
attcttcgagtatgtgaatcagaca

SEQ ID NO: 4989077 - DNA, 25 bp, Homo sapien
cgagtatgtgaatcagacaaatcat

SEQ ID NO: 4989078 - DNA, 25 bp, Homo sapien
cattgccatagcaggtcgctaattt

SEQ ID NO: 4989079 - DNA, 25 bp, Homo sapien
ttcttcattgccatagcaggtcgct

SEQ ID NO: 4989080 - DNA, 25 bp, Homo sapien
gccatagcaggtcgctaattttgac

SEQ ID NO: 4989081 - DNA, 25 bp, Homo sapien
ttcattgccatagcaggtcgctaat

SEQ ID NO: 4989082 - DNA, 25 bp, Homo sapien
cagaagttagataaatatcttgtcc

SEQ ID NO: 4989083 - DNA, 25 bp, Homo sapien
agaagttagataaatatcttgtccc

SEQ ID NO: 4989084 - DNA, 25 bp, Homo sapien
gctggggcgcaacactgaggccggc

SEQ ID NO: 4989085 - DNA, 25 bp, Homo sapien
cgaaggtttagagcgccaggggaga

SEQ ID NO: 4989086 - DNA, 25 bp, Homo sapien
gcgcaacactgaggccggcgggaag

SEQ ID NO: 4989087 - DNA, 25 bp, Homo sapien
tccacacccggccactctggcgctg

SEQ ID NO: 4989088 - DNA, 25 bp, Homo sapien
gcaggggcaggggcagctctccttt

SEQ ID NO: 4989089 - DNA, 25 bp, Homo sapien
aggggcaggggcagctctcctttac

SEQ ID NO: 4989090 - DNA, 25 bp, Homo sapien
gggcaggggcaggggcagctctcct

SEQ ID NO: 4989091 - DNA, 25 bp, Homo sapien
ctcggataggcgggggcaggggcag

SEQ ID NO: 4989092 - DNA, 25 bp, Homo sapien
cctagagcggcgacagaagctcttc

SEQ ID NO: 4989093 - DNA, 25 bp, Homo sapien
gcggacagatttgcacggcggattc

SEQ ID NO: 4989094 - DNA, 25 bp, Homo sapien
ttgcacggcggattcctccgaagca

SEQ ID NO: 4989095 - DNA, 25 bp, Homo sapien
tagagcggcgacagaagctcttcgg

SEQ ID NO: 4989096 - DNA, 25 bp, Homo sapien
gattgtgttactcaagaagtgccag

SEQ ID NO: 4989097 - DNA, 25 bp, Homo sapien
tcatgacaatgtgcacgacgcttcc

SEQ ID NO: 4989098 - DNA, 25 bp, Homo sapien
tagattgtagcttgaccattgcaga

SEQ ID NO: 4989099 - DNA, 25 bp, Homo sapien
tagcaactgttccagatgagcagga

SEQ ID NO: 4989100 - DNA, 25 bp, Homo sapien
gtttctctgggcgtgtcattatata

SEQ ID NO: 4989101 - DNA, 25 bp, Homo sapien
gccaataagtagcaaaatgctggtg

SEQ ID NO: 4989102 - DNA, 25 bp, Homo sapien
gaagccagtggcgtttccatcaggc

SEQ ID NO: 4989103 - DNA, 25 bp, Homo sapien
tcccaagcttacaaagccaataagt

SEQ ID NO: 4989104 - DNA, 25 bp, Homo sapien
aatgtagacagcctcatttgagtac

SEQ ID NO: 4989105 - DNA, 25 bp, Homo sapien
ctagactgccagataaggttgagcc

SEQ ID NO: 4989106 - DNA, 25 bp, Homo sapien
aatgacactagggaataatgaaacc

SEQ ID NO: 4989107 - DNA, 25 bp, Homo sapien
tctcatcagagacgatgtgatcctt

SEQ ID NO: 4989108 - DNA, 25 bp, Homo sapien
tgattggcctcatagttgacttggg

SEQ ID NO: 4989109 - DNA, 25 bp, Homo sapien
gatagaaattagagggatatccagc

SEQ ID NO: 4989110 - DNA, 25 bp, Homo sapien
tgccagtcctgtgctgatagcctgt

SEQ ID NO: 4989111 - DNA, 25 bp, Homo sapien
tgctgcacaattagagcagaatcgt

SEQ ID NO: 4989112 - DNA, 25 bp, Homo sapien
tttccattgtgacatcaatacgcaa

SEQ ID NO: 4989113 - DNA, 25 bp, Homo sapien
tgtgcccagccttacggacatcctt

SEQ ID NO: 4989114 - DNA, 25 bp, Homo sapien
tttcactcatagaatatgaatacat

SEQ ID NO: 4989115 - DNA, 25 bp, Homo sapien
tgaattatctttttcactcatagaa

SEQ ID NO: 4989116 - DNA, 25 bp, Homo sapien
aggttcaagcaattctcatgcctca

SEQ ID NO: 4989117 - DNA, 25 bp, Homo sapien
tgatctcagttcactacagcctcca

SEQ ID NO: 4989118 - DNA, 25 bp, Homo sapien
ggtgtgatctcagttcactacagcc

SEQ ID NO: 4989119 - DNA, 25 bp, Homo sapien
cctcccaggttcaagcaattctcat

SEQ ID NO: 4989120 - DNA, 25 bp, Homo sapien
tctgttgccttgtccctactcgact

SEQ ID NO: 4989121 - DNA, 25 bp, Homo sapien
gatgcattgatcagactggctaccg

SEQ ID NO: 4989122 - DNA, 25 bp, Homo sapien
gttagcctccagacactgacttgat

SEQ ID NO: 4989123 - DNA, 25 bp, Homo sapien
gctgtctatttccagttagcctcca

SEQ ID NO: 4989124 - DNA, 25 bp, Homo sapien
tggccccaggacctctaatattaac

SEQ ID NO: 4989125 - DNA, 25 bp, Homo sapien
ctgagggaaccagctagtagatggc

SEQ ID NO: 4989126 - DNA, 25 bp, Homo sapien
attaactttactggataaaactgtg

SEQ ID NO: 4989127 - DNA, 25 bp, Homo sapien
agtagatggctcaattagtctttca

SEQ ID NO: 4989128 - DNA, 25 bp, Homo sapien
gatggatttgcacgacagcactgca

SEQ ID NO: 4989129 - DNA, 25 bp, Homo sapien
tgcacgacagcactgcaacggacct

SEQ ID NO: 4989130 - DNA, 25 bp, Homo sapien
gatttgcacgacagcactgcaacgg

SEQ ID NO: 4989131 - DNA, 25 bp, Homo sapien
tggatttgcacgacagcactgcaac

SEQ ID NO: 4989132 - DNA, 25 bp, Homo sapien
ctaacacgtgcacctgtgcttcact

SEQ ID NO: 4989133 - DNA, 25 bp, Homo sapien
acacgtgcacctgtgcttcactccc

SEQ ID NO: 4989134 - DNA, 25 bp, Homo sapien
acgtgcacctgtgcttcactccccc

SEQ ID NO: 4989135 - DNA, 25 bp, Homo sapien
taacacgtgcacctgtgcttcactc

SEQ ID NO: 4989136 - DNA, 25 bp, Homo sapien
tcctctgtgggattcaaatgctctc

SEQ ID NO: 4989137 - DNA, 25 bp, Homo sapien
ttagaactagggcataggctggctc

SEQ ID NO: 4989138 - DNA, 25 bp, Homo sapien
cattggctacattttgctgaggagg

SEQ ID NO: 4989139 - DNA, 25 bp, Homo sapien
gaagaggactcacaaatcgtgcact

SEQ ID NO: 4989140 - DNA, 25 bp, Homo sapien
tcagagtttctcggggcagtttttc

SEQ ID NO: 4989141 - DNA, 25 bp, Homo sapien
agttctcagagtttctcggggcagt

SEQ ID NO: 4989142 - DNA, 25 bp, Homo sapien
tgcaagttctcagagtttctcgggg

SEQ ID NO: 4989143 - DNA, 25 bp, Homo sapien
caagttctcagagtttctcggggca

SEQ ID NO: 4989144 - DNA, 25 bp, Homo sapien
cattgtaactcgcttaacgaggctc

SEQ ID NO: 4989145 - DNA, 25 bp, Homo sapien
ggatatcacggtatcccggccatcc

SEQ ID NO: 4989146 - DNA, 25 bp, Homo sapien
gccccaggagataagtgtaggtttc

SEQ ID NO: 4989147 - DNA, 25 bp, Homo sapien
agggaaaccccagtgggatatcacg

SEQ ID NO: 4989148 - DNA, 25 bp, Homo sapien
tgtctacgtagaagagccacagggc

SEQ ID NO: 4989149 - DNA, 25 bp, Homo sapien
gagccacagggcctcggaacatcct

SEQ ID NO: 4989150 - DNA, 25 bp, Homo sapien
agggcctcggaacatccttcggcac

SEQ ID NO: 4989151 - DNA, 25 bp, Homo sapien
atagcctgtgcgtgtctacgtagaa

SEQ ID NO: 4989152 - DNA, 25 bp, Homo sapien
cctaataccattacactgggattag

SEQ ID NO: 4989153 - DNA, 25 bp, Homo sapien
catcagggcacaaatcccattgatg

SEQ ID NO: 4989154 - DNA, 25 bp, Homo sapien
ctttcatcagggcacaaatcccatt

SEQ ID NO: 4989155 - DNA, 25 bp, Homo sapien
ctaataccattacactgggattagg

SEQ ID NO: 4989156 - DNA, 25 bp, Homo sapien
gactggaggcattcagactctgagg

SEQ ID NO: 4989157 - DNA, 25 bp, Homo sapien
gagtattattccacgcagactggag

SEQ ID NO: 4989158 - DNA, 25 bp, Homo sapien
gaagacaaagtctgagtggacaaca

SEQ ID NO: 4989159 - DNA, 25 bp, Homo sapien
cccacgtgaatagaagggcatttcc

SEQ ID NO: 4989160 - DNA, 25 bp, Homo sapien
tcagattgtgtcacaaggcagctgc

SEQ ID NO: 4989161 - DNA, 25 bp, Homo sapien
ggtcattcttaagaaaagtctaggc

SEQ ID NO: 4989162 - DNA, 25 bp, Homo sapien
taggccctcaggtagtgaattattc

SEQ ID NO: 4989163 - DNA, 25 bp, Homo sapien
catgggtatttccatgggcaaccca

SEQ ID NO: 4989164 - DNA, 25 bp, Homo sapien
tacagaaaggtacacgagataggca

SEQ ID NO: 4989165 - DNA, 25 bp, Homo sapien
ctttgagaaacggagaacttgccgg

SEQ ID NO: 4989166 - DNA, 25 bp, Homo sapien
tgaacatgagcttgagcacgcggtc

SEQ ID NO: 4989167 - DNA, 25 bp, Homo sapien
acttgccgggccatttgactctacg

SEQ ID NO: 4989168 - DNA, 25 bp, Homo sapien
tcctctggagatccttccgtccgtc

SEQ ID NO: 4989169 - DNA, 25 bp, Homo sapien
tgtagtcgatgtgcctgcgaagccc

SEQ ID NO: 4989170 - DNA, 25 bp, Homo sapien
agactgagtcgccaggtttctgtgc

SEQ ID NO: 4989171 - DNA, 25 bp, Homo sapien
tgtgccttcaaagccctgcgcgacg

SEQ ID NO: 4989172 - DNA, 25 bp, Homo sapien
gccgcgcgtccagcgttcccggcca

SEQ ID NO: 4989173 - DNA, 25 bp, Homo sapien
cgcgtccagcgttcccggccagcag

SEQ ID NO: 4989174 - DNA, 25 bp, Homo sapien
gcgtccagcgttcccggccagcagc

SEQ ID NO: 4989175 - DNA, 25 bp, Homo sapien
cgcgcgtccagcgttcccggccagc

SEQ ID NO: 4989176 - DNA, 25 bp, Homo sapien
gaactcaagtcaccgtggagctccg

SEQ ID NO: 4989177 - DNA, 25 bp, Homo sapien
tccggcggcgaaggctcttagatgt

SEQ ID NO: 4989178 - DNA, 25 bp, Homo sapien
ccgaaactttcaccgcgagcgggtg

SEQ ID NO: 4989179 - DNA, 25 bp, Homo sapien
tagatgtcttcagccgacgggtgac

SEQ ID NO: 4989180 - DNA, 25 bp, Homo sapien
ggccgcttctcgcacacagtgggga

SEQ ID NO: 4989181 - DNA, 25 bp, Homo sapien
ctgcccttgcggagcgggcgcgcgg

SEQ ID NO: 4989182 - DNA, 25 bp, Homo sapien
gaggactcctcggattgtgcaatct

SEQ ID NO: 4989183 - DNA, 25 bp, Homo sapien
tcgaggcccgcggacagttgccctc

SEQ ID NO: 4989184 - DNA, 25 bp, Homo sapien
cgtgacgtcgaggggctgcagcgga

SEQ ID NO: 4989185 - DNA, 25 bp, Homo sapien
acgtcgaggggctgcagcggaggct

SEQ ID NO: 4989186 - DNA, 25 bp, Homo sapien
ccgggcaggagcgtgacgtcgaggg

SEQ ID NO: 4989187 - DNA, 25 bp, Homo sapien
gacgtcgaggggctgcagcggaggc

SEQ ID NO: 4989188 - DNA, 25 bp, Homo sapien
gctgcggcgcctctcggcctgccga

SEQ ID NO: 4989189 - DNA, 25 bp, Homo sapien
gcctctcggcctgccgaggagcagt

SEQ ID NO: 4989190 - DNA, 25 bp, Homo sapien
tgccgaggagcagtccggtgctttt

SEQ ID NO: 4989191 - DNA, 25 bp, Homo sapien
tctcggcctgccgaggagcagtccg

SEQ ID NO: 4989192 - DNA, 25 bp, Homo sapien
agcctgcctgtcatgtggattagcg

SEQ ID NO: 4989193 - DNA, 25 bp, Homo sapien
tatccgagtgtgttaattatcccaa

SEQ ID NO: 4989194 - DNA, 25 bp, Homo sapien
gaagggcgtaagagtcagttcccac

SEQ ID NO: 4989195 - DNA, 25 bp, Homo sapien
gcattcgtaactttccaacagcctg

SEQ ID NO: 4989196 - DNA, 25 bp, Homo sapien
tagtgtgtgctcaattacaaatgcc

SEQ ID NO: 4989197 - DNA, 25 bp, Homo sapien
tgaacctcttgtggctcctatagga

SEQ ID NO: 4989198 - DNA, 25 bp, Homo sapien
cacaggcttggttaagcggtaccat

SEQ ID NO: 4989199 - DNA, 25 bp, Homo sapien
caacttatgatgaggctgtgtccca

SEQ ID NO: 4989200 - DNA, 25 bp, Homo sapien
tctcattactgaattagctggcagc

SEQ ID NO: 4989201 - DNA, 25 bp, Homo sapien
aaagcctcatccatgctgacaagag

SEQ ID NO: 4989202 - DNA, 25 bp, Homo sapien
gagtgctttggcgtgatcccagttc

SEQ ID NO: 4989203 - DNA, 25 bp, Homo sapien
caagagcagggcctgtagtagcctt

SEQ ID NO: 4989204 - DNA, 25 bp, Homo sapien
tctttattgacaccagaccatactg

SEQ ID NO: 4989205 - DNA, 25 bp, Homo sapien
ccatactggttggaagcttctttcc

SEQ ID NO: 4989206 - DNA, 25 bp, Homo sapien
ctccattggtaaaacatctggtggg

SEQ ID NO: 4989207 - DNA, 25 bp, Homo sapien
tcttcgtgtggtctttgggcctacc

SEQ ID NO: 4989208 - DNA, 25 bp, Homo sapien
cccaatgctgcgttttcctcggggt

SEQ ID NO: 4989209 - DNA, 25 bp, Homo sapien
caatgctgcgttttcctcggggttc

SEQ ID NO: 4989210 - DNA, 25 bp, Homo sapien
aatgctgcgttttcctcggggttct

SEQ ID NO: 4989211 - DNA, 25 bp, Homo sapien
cacccaatgctgcgttttcctcggg

SEQ ID NO: 4989212 - DNA, 25 bp, Homo sapien
acagtgcccattctcatctagcatg

SEQ ID NO: 4989213 - DNA, 25 bp, Homo sapien
tgtgatggaagcataacctatctca

SEQ ID NO: 4989214 - DNA, 25 bp, Homo sapien
ctgcaatatgcatactgtgatggaa

SEQ ID NO: 4989215 - DNA, 25 bp, Homo sapien
ttggacaccttgatcaacagtgccc

SEQ ID NO: 4989216 - DNA, 25 bp, Homo sapien
tggcagtggataaattccagtcccc

SEQ ID NO: 4989217 - DNA, 25 bp, Homo sapien
tctatttgtcaatcacagaccaccc

SEQ ID NO: 4989218 - DNA, 25 bp, Homo sapien
taatttctgtatgtgttaccctgca

SEQ ID NO: 4989219 - DNA, 25 bp, Homo sapien
caccctttaatagggcatggaatta

SEQ ID NO: 4989220 - DNA, 25 bp, Homo sapien
gatcatggcgaatttgcttctctgc

SEQ ID NO: 4989221 - DNA, 25 bp, Homo sapien
tcagtagatcatggcgaatttgctt

SEQ ID NO: 4989222 - DNA, 25 bp, Homo sapien
caagggctttcagtagatcatggcg

SEQ ID NO: 4989223 - DNA, 25 bp, Homo sapien
tagtgtcaagggctttcagtagatc

SEQ ID NO: 4989224 - DNA, 25 bp, Homo sapien
gggccagggtgcgactgcatttcca

SEQ ID NO: 4989225 - DNA, 25 bp, Homo sapien
ggccagggtgcgactgcatttccag

SEQ ID NO: 4989226 - DNA, 25 bp, Homo sapien
ccagggtgcgactgcatttccagct

SEQ ID NO: 4989227 - DNA, 25 bp, Homo sapien
gatgggccagggtgcgactgcattt

SEQ ID NO: 4989228 - DNA, 25 bp, Homo sapien
aggttccacctgagtgggattctga

SEQ ID NO: 4989229 - DNA, 25 bp, Homo sapien
gcattggggagagtagtcctctagt

SEQ ID NO: 4989230 - DNA, 25 bp, Homo sapien
catccagggccaacaaggcccatgg

SEQ ID NO: 4989231 - DNA, 25 bp, Homo sapien
ctgtggcgctgccataggttccacc

SEQ ID NO: 4989232 - DNA, 25 bp, Homo sapien
agatggcagattcgccccattggct

SEQ ID NO: 4989233 - DNA, 25 bp, Homo sapien
cagatggcagattcgccccattggc

SEQ ID NO: 4989234 - DNA, 25 bp, Homo sapien
cataatcccacagatggcagattcg

SEQ ID NO: 4989235 - DNA, 25 bp, Homo sapien
ccacagatggcagattcgccccatt

SEQ ID NO: 4989236 - DNA, 25 bp, Homo sapien
gataagtggactagcatgcagcatg

SEQ ID NO: 4989237 - DNA, 25 bp, Homo sapien
attctgggaagcaagcaagtgcgag

SEQ ID NO: 4989238 - DNA, 25 bp, Homo sapien
gtactgggctttcttatggctgcga

SEQ ID NO: 4989239 - DNA, 25 bp, Homo sapien
gctgatttgaaacatgaaggaggct

SEQ ID NO: 4989240 - DNA, 25 bp, Homo sapien
gaaatatgggatgtataaaatcaaa

SEQ ID NO: 4989241 - DNA, 25 bp, Homo sapien
tgcatgactataacagagtttgttt

SEQ ID NO: 4989242 - DNA, 25 bp, Homo sapien
ctataacagagtttgtttatctact

SEQ ID NO: 4989243 - DNA, 25 bp, Homo sapien
gactataacagagtttgtttatcta

SEQ ID NO: 4989244 - DNA, 25 bp, Homo sapien
tatgaataatgctgtatgaatgttc

SEQ ID NO: 4989245 - DNA, 25 bp, Homo sapien
gtattcatgttacctctgttctccc

SEQ ID NO: 4989246 - DNA, 25 bp, Homo sapien
gagttctcagcttttcatgctccta

SEQ ID NO: 4989247 - DNA, 25 bp, Homo sapien
gagagtttgtgttctagcccagagc

SEQ ID NO: 4989248 - DNA, 25 bp, Homo sapien
ggcctttaaatcattagtggatgct

SEQ ID NO: 4989249 - DNA, 25 bp, Homo sapien
ccctgccccagtagggctcagagcc

SEQ ID NO: 4989250 - DNA, 25 bp, Homo sapien
tggtgcggaagaccccacccgagct

SEQ ID NO: 4989251 - DNA, 25 bp, Homo sapien
ctgccagagggccgcccaccctggt

SEQ ID NO: 4989252 - DNA, 25 bp, Homo sapien
cctgccccagtagggctcagagccc

SEQ ID NO: 4989253 - DNA, 25 bp, Homo sapien
tgggcatagcaaagtgcagcccaga

SEQ ID NO: 4989254 - DNA, 25 bp, Homo sapien
acaccggatgggcatagcaaagtgc

SEQ ID NO: 4989255 - DNA, 25 bp, Homo sapien
tcttaaccaacctagaggtcctcca

SEQ ID NO: 4989256 - DNA, 25 bp, Homo sapien
ggcatgatgccactactcctaagca

SEQ ID NO: 4989257 - DNA, 25 bp, Homo sapien
catgtgactgattcctcagcactga

SEQ ID NO: 4989258 - DNA, 25 bp, Homo sapien
tccctgctcagctccgttcagtggg

SEQ ID NO: 4989259 - DNA, 25 bp, Homo sapien
atttcttccatagcgtgtactgcaa

SEQ ID NO: 4989260 - DNA, 25 bp, Homo sapien
gcttgttggatgactatactggcca

SEQ ID NO: 4989261 - DNA, 25 bp, Homo sapien
aattctaagacaggttgcgttttca

SEQ ID NO: 4989262 - DNA, 25 bp, Homo sapien
caggttgcgttttcagttccagttt

SEQ ID NO: 4989263 - DNA, 25 bp, Homo sapien
gacaggttgcgttttcagttccagt

SEQ ID NO: 4989264 - DNA, 25 bp, Homo sapien
ctaagacaggttgcgttttcagttc

SEQ ID NO: 4989265 - DNA, 25 bp, Homo sapien
tgagcaaacagtccacagggcacat

SEQ ID NO: 4989266 - DNA, 25 bp, Homo sapien
ttctctggtggtagcagccgggtat

SEQ ID NO: 4989267 - DNA, 25 bp, Homo sapien
tgatggctcagagcctgcgcctcgg

SEQ ID NO: 4989268 - DNA, 25 bp, Homo sapien
aagccggtttcaccgtgtgggatgc

SEQ ID NO: 4989269 - DNA, 25 bp, Homo sapien
tttcctcgagaaggtccaggcaggt

SEQ ID NO: 4989270 - DNA, 25 bp, Homo sapien
gtttgatgacacaaaaccgcagtgc

SEQ ID NO: 4989271 - DNA, 25 bp, Homo sapien
tctctggtgtggtcataggcaaccc

SEQ ID NO: 4989272 - DNA, 25 bp, Homo sapien
ctcatgagggagagcccggttgcct

SEQ ID NO: 4989273 - DNA, 25 bp, Homo sapien
ttctttgtcatcagcttcaggcaca

SEQ ID NO: 4989274 - DNA, 25 bp, Homo sapien
tcaggaaacaatcaccttgctccac

SEQ ID NO: 4989275 - DNA, 25 bp, Homo sapien
gctccacactcagagttttggtcat

SEQ ID NO: 4989276 - DNA, 25 bp, Homo sapien
cttctttgtcatcagcttcaggcac

SEQ ID NO: 4989277 - DNA, 25 bp, Homo sapien
agtagtgcccactctagaaggagct

SEQ ID NO: 4989278 - DNA, 25 bp, Homo sapien
ctagagaaagtcagactcaggagct

SEQ ID NO: 4989279 - DNA, 25 bp, Homo sapien
tccagggtcaggtaaaagctgtgca

SEQ ID NO: 4989280 - DNA, 25 bp, Homo sapien
tgaacttgggttaccagcagacaaa

SEQ ID NO: 4989281 - DNA, 25 bp, Homo sapien
ccccagtgctcagggtttgtgacag

SEQ ID NO: 4989282 - DNA, 25 bp, Homo sapien
gggacacgaagtcactgctctccaa

SEQ ID NO: 4989283 - DNA, 25 bp, Homo sapien
tgtccttttcctactgtccgtctgg

SEQ ID NO: 4989284 - DNA, 25 bp, Homo sapien
gtccgtctggtttctgctccactca

SEQ ID NO: 4989285 - DNA, 25 bp, Homo sapien
tttctacacagccacggaagggcaa

SEQ ID NO: 4989286 - DNA, 25 bp, Homo sapien
aggatgccccgtgtggagaactgcc

SEQ ID NO: 4989287 - DNA, 25 bp, Homo sapien
gagcgtcctggatgatttctacaca

SEQ ID NO: 4989288 - DNA, 25 bp, Homo sapien
gcagaagagagaccaacgtttgact

SEQ ID NO: 4989289 - DNA, 25 bp, Homo sapien
gctggtaatcttgctctgcttgaca

SEQ ID NO: 4989290 - DNA, 25 bp, Homo sapien
cagggagacccgtccatttggcagg

SEQ ID NO: 4989291 - DNA, 25 bp, Homo sapien
tcaggaagaacaccctctaaatggg

SEQ ID NO: 4989292 - DNA, 25 bp, Homo sapien
caacatctgagtgcagccgtttgag

SEQ ID NO: 4989293 - DNA, 25 bp, Homo sapien
aatctctgaagaaccttatagggcc

SEQ ID NO: 4989294 - DNA, 25 bp, Homo sapien
tcagacctgctagacatgccatagg

SEQ ID NO: 4989295 - DNA, 25 bp, Homo sapien
cataggagtggcgtgcacatctctc

SEQ ID NO: 4989296 - DNA, 25 bp, Homo sapien
ggaacataagtgactacaaggctct

SEQ ID NO: 4989297 - DNA, 25 bp, Homo sapien
tgtccttagtagtaggggccacctg

SEQ ID NO: 4989298 - DNA, 25 bp, Homo sapien
tgagccactgggaacgtgtactgtc

SEQ ID NO: 4989299 - DNA, 25 bp, Homo sapien
ccaggcatacctcctgaggttccac

SEQ ID NO: 4989300 - DNA, 25 bp, Homo sapien
ttgcagaaagtacttctgatgagcc

SEQ ID NO: 4989301 - DNA, 25 bp, Homo sapien
caagtacaatgacataaggtacagc

SEQ ID NO: 4989302 - DNA, 25 bp, Homo sapien
tttatggtgacaagtacaatgacat

SEQ ID NO: 4989303 - DNA, 25 bp, Homo sapien
caatgacataaggtacagcaaggaa

SEQ ID NO: 4989304 - DNA, 25 bp, Homo sapien
taaatggcctgctttatggtgacaa

SEQ ID NO: 4989305 - DNA, 25 bp, Homo sapien
ggcagcactccacggtggaggacgg

SEQ ID NO: 4989306 - DNA, 25 bp, Homo sapien
gaggacggcctctccaaggagcgca

SEQ ID NO: 4989307 - DNA, 25 bp, Homo sapien
gcgcagcacagaggtgacgcaccat

SEQ ID NO: 4989308 - DNA, 25 bp, Homo sapien
ccaaggagcgcagcacagaggtgac

SEQ ID NO: 4989309 - DNA, 25 bp, Homo sapien
cctggaagccccagaactgaccgta

SEQ ID NO: 4989310 - DNA, 25 bp, Homo sapien
gaactgaccgtacacacagagcaaa

SEQ ID NO: 4989311 - DNA, 25 bp, Homo sapien
gaagccccagaactgaccgtacaca

SEQ ID NO: 4989312 - DNA, 25 bp, Homo sapien
ccagaactgaccgtacacacagagc

SEQ ID NO: 4989313 - DNA, 25 bp, Homo sapien
gtagctatttacaggtaagatccca

SEQ ID NO: 4989314 - DNA, 25 bp, Homo sapien
actgactggtatggcagttttgacc

SEQ ID NO: 4989315 - DNA, 25 bp, Homo sapien
ggaaactggtggtctcctactccca

SEQ ID NO: 4989316 - DNA, 25 bp, Homo sapien
cctactcccaggagtccatgaaatt

SEQ ID NO: 4989317 - DNA, 25 bp, Homo sapien
cctgagctaggtgcctttccattgt

SEQ ID NO: 4989318 - DNA, 25 bp, Homo sapien
aggtgcccctgagctaggtgccttt

SEQ ID NO: 4989319 - DNA, 25 bp, Homo sapien
gtccacagcaccagataagtgatgc

SEQ ID NO: 4989320 - DNA, 25 bp, Homo sapien
tgttctccaggtcttgtcttattca

SEQ ID NO: 4989321 - DNA, 25 bp, Homo sapien
gcaaatatgaaaagcttcaacactc

SEQ ID NO: 4989322 - DNA, 25 bp, Homo sapien
tataccactatctcaaaccactttc

SEQ ID NO: 4989323 - DNA, 25 bp, Homo sapien
tgctttcttataccactatctcaaa

SEQ ID NO: 4989324 - DNA, 25 bp, Homo sapien
ctccctttgtaacttgctgcaataa

SEQ ID NO: 4989325 - DNA, 25 bp, Homo sapien
tattcatatacttttaatgacatca

SEQ ID NO: 4989326 - DNA, 25 bp, Homo sapien
aatgacatcattgccaatacataca

SEQ ID NO: 4989327 - DNA, 25 bp, Homo sapien
tatacttttaatgacatcattgcca

SEQ ID NO: 4989328 - DNA, 25 bp, Homo sapien
cttttaatgacatcattgccaatac

SEQ ID NO: 4989329 - DNA, 25 bp, Homo sapien
gccatcaaaaatcttacagtaaatt

SEQ ID NO: 4989330 - DNA, 25 bp, Homo sapien
ttatttttacactaagtcaacatct

SEQ ID NO: 4989331 - DNA, 25 bp, Homo sapien
gcagccatcaaaaatcttacagtaa

SEQ ID NO: 4989332 - DNA, 25 bp, Homo sapien
tacactaagtcaacatctgtcatgc

SEQ ID NO: 4989333 - DNA, 25 bp, Homo sapien
tacaaaatcatgatcagcacgaatt

SEQ ID NO: 4989334 - DNA, 25 bp, Homo sapien
atgggacctgcatggattttcagta

SEQ ID NO: 4989335 - DNA, 25 bp, Homo sapien
cctgtactacaaaatcatgatcagc

SEQ ID NO: 4989336 - DNA, 25 bp, Homo sapien
catgctttgtaatgggacctgcatg

SEQ ID NO: 4989337 - DNA, 25 bp, Homo sapien
tcaccaatgtacttgtctacaatag

SEQ ID NO: 4989338 - DNA, 25 bp, Homo sapien
tgtctacaatagaactagatacaac

SEQ ID NO: 4989339 - DNA, 25 bp, Homo sapien
tgtacttgtctacaatagaactaga

SEQ ID NO: 4989340 - DNA, 25 bp, Homo sapien
agcactttcaccaatgtacttgtct

SEQ ID NO: 4989341 - DNA, 25 bp, Homo sapien
ggaggtattattcctacacgctgaa

SEQ ID NO: 4989342 - DNA, 25 bp, Homo sapien
ctggtggtccatataacaaacagcc

SEQ ID NO: 4989343 - DNA, 25 bp, Homo sapien
tggtccatataacaaacagcctttt

SEQ ID NO: 4989344 - DNA, 25 bp, Homo sapien
gaggtattattcctacacgctgaaa

SEQ ID NO: 4989345 - DNA, 25 bp, Homo sapien
gatagttagtgtagtcatatccaaa

SEQ ID NO: 4989346 - DNA, 25 bp, Homo sapien
catgatagttagtgtagtcatatcc

SEQ ID NO: 4989347 - DNA, 25 bp, Homo sapien
ctcatgatagttagtgtagtcatat

SEQ ID NO: 4989348 - DNA, 25 bp, Homo sapien
tagttagtgtagtcatatccaaagc

SEQ ID NO: 4989349 - DNA, 25 bp, Homo sapien
cttttgtcaagctgtcgacgacaac

SEQ ID NO: 4989350 - DNA, 25 bp, Homo sapien
ttttgtcaagctgtcgacgacaacc

SEQ ID NO: 4989351 - DNA, 25 bp, Homo sapien
tacttttgtcaagctgtcgacgaca

SEQ ID NO: 4989352 - DNA, 25 bp, Homo sapien
acttttgtcaagctgtcgacgacaa

SEQ ID NO: 4989353 - DNA, 25 bp, Homo sapien
gcgccttatctctagggtccgccat

SEQ ID NO: 4989354 - DNA, 25 bp, Homo sapien
aagcgccttatctctagggtccgcc

SEQ ID NO: 4989355 - DNA, 25 bp, Homo sapien
agcgccttatctctagggtccgcca

SEQ ID NO: 4989356 - DNA, 25 bp, Homo sapien
cacagatgacatggtattatatcac

SEQ ID NO: 4989357 - DNA, 25 bp, Homo sapien
ccgctcctggcaacaatccaatttt

SEQ ID NO: 4989358 - DNA, 25 bp, Homo sapien
tctggcaagtaaactaagaaaacaa

SEQ ID NO: 4989359 - DNA, 25 bp, Homo sapien
tatacactaacagtaaataatctgg

SEQ ID NO: 4989360 - DNA, 25 bp, Homo sapien
tagccaagaggtgggaacaatctaa

SEQ ID NO: 4989361 - DNA, 25 bp, Homo sapien
gcatactcatgtttattatagcatt

SEQ ID NO: 4989362 - DNA, 25 bp, Homo sapien
aagaagaaaaatcatggccgggcgc

SEQ ID NO: 4989363 - DNA, 25 bp, Homo sapien
atacatacattgagatattattcag

SEQ ID NO: 4989364 - DNA, 25 bp, Homo sapien
gggtaagaggttcagtttcgcaaga

SEQ ID NO: 4989365 - DNA, 25 bp, Homo sapien
ccacatgatatggtatgggtcaaac

SEQ ID NO: 4989366 - DNA, 25 bp, Homo sapien
caatacaagtgctggataagaaagt

SEQ ID NO: 4989367 - DNA, 25 bp, Homo sapien
aattgtggttgccaatggttcaggg

SEQ ID NO: 4989368 - DNA, 25 bp, Homo sapien
acttggcaatctcggctccacagca

SEQ ID NO: 4989369 - DNA, 25 bp, Homo sapien
ttcagaaggtcatgcaatcaatagg

SEQ ID NO: 4989370 - DNA, 25 bp, Homo sapien
taaggattgattttgcgcctctgac

SEQ ID NO: 4989371 - DNA, 25 bp, Homo sapien
tgatattgtactgactcctgggagg

SEQ ID NO: 4989372 - DNA, 25 bp, Homo sapien
tccactgaagtacaattaaacaaaa

SEQ ID NO: 4989373 - DNA, 25 bp, Homo sapien
catagttcctcttactttcaaaaga

SEQ ID NO: 4989374 - DNA, 25 bp, Homo sapien
ttcatttgcatccactgaagtacaa

SEQ ID NO: 4989375 - DNA, 25 bp, Homo sapien
aagaatacacttcagctttggctgt

SEQ ID NO: 4989376 - DNA, 25 bp, Homo sapien
ccggggattcgaatacacttctcaa

SEQ ID NO: 4989377 - DNA, 25 bp, Homo sapien
aggacatgtccccggggattcgaat

SEQ ID NO: 4989378 - DNA, 25 bp, Homo sapien
tggtcacttttttggcggaggagaa

SEQ ID NO: 4989379 - DNA, 25 bp, Homo sapien
ctgcttggtcacttttttggcggag

SEQ ID NO: 4989380 - DNA, 25 bp, Homo sapien
caattccgtgaaagccatgaagctg

SEQ ID NO: 4989381 - DNA, 25 bp, Homo sapien
taattcaatgcagtatcgtgggcca

SEQ ID NO: 4989382 - DNA, 25 bp, Homo sapien
tacatccacagagcatacacacagg

SEQ ID NO: 4989383 - DNA, 25 bp, Homo sapien
gagttcagcgtgaaagcctaggccc

SEQ ID NO: 4989384 - DNA, 25 bp, Homo sapien
cgacaacgaaaacaggatagaccac

SEQ ID NO: 4989385 - DNA, 25 bp, Homo sapien
caaccatgggtgtgcattacaaacg

SEQ ID NO: 4989386 - DNA, 25 bp, Homo sapien
tagcgcactaggttctcaaccatgg

SEQ ID NO: 4989387 - DNA, 25 bp, Homo sapien
taaactgccagtgtccaataaaacc

SEQ ID NO: 4989388 - DNA, 25 bp, Homo sapien
tcatcaatttattaaaatagttgac

SEQ ID NO: 4989389 - DNA, 25 bp, Homo sapien
ttctcatctggaaacgatcccacgt

SEQ ID NO: 4989390 - DNA, 25 bp, Homo sapien
acgatcccacgtcttagaaccttca

SEQ ID NO: 4989391 - DNA, 25 bp, Homo sapien
agtcgcttgtgaattctcatctgga

SEQ ID NO: 4989392 - DNA, 25 bp, Homo sapien
ccttcaccacaaggagtttttcttg

SEQ ID NO: 4989393 - DNA, 25 bp, Homo sapien
cattagctacttactaggaaccgca

SEQ ID NO: 4989394 - DNA, 25 bp, Homo sapien
gaatttatgcaacatccggaagcaa

SEQ ID NO: 4989395 - DNA, 25 bp, Homo sapien
ggtaccatgggttgaaaatgccagg

SEQ ID NO: 4989396 - DNA, 25 bp, Homo sapien
cacccttagagcttgcgcctgttaa

SEQ ID NO: 4989397 - DNA, 25 bp, Homo sapien
tcttttgcgcctcttatcaagtcag

SEQ ID NO: 4989398 - DNA, 25 bp, Homo sapien
ttttgcgcctcttatcaagtcagca

SEQ ID NO: 4989399 - DNA, 25 bp, Homo sapien
ttcttttcttttgcgcctcttatca

SEQ ID NO: 4989400 - DNA, 25 bp, Homo sapien
tttcttttgcgcctcttatcaagtc

SEQ ID NO: 4989401 - DNA, 25 bp, Homo sapien
gacctctcagtataatcgaaacaat

SEQ ID NO: 4989402 - DNA, 25 bp, Homo sapien
tataatcgaaacaattaaaatcggc

SEQ ID NO: 4989403 - DNA, 25 bp, Homo sapien
ggaaataaaagacctctcagtataa

SEQ ID NO: 4989404 - DNA, 25 bp, Homo sapien
aaatcggcttaaggccttcacttct

SEQ ID NO: 4989405 - DNA, 25 bp, Homo sapien
tggctcagaatagcgtataaaatta

SEQ ID NO: 4989406 - DNA, 25 bp, Homo sapien
tatcaccgttactcaacacaatagg

SEQ ID NO: 4989407 - DNA, 25 bp, Homo sapien
cgtataaaattatcaccgttactca

SEQ ID NO: 4989408 - DNA, 25 bp, Homo sapien
gttactcaacacaataggtacctcc

SEQ ID NO: 4989409 - DNA, 25 bp, Homo sapien
gctgtatgacagtaaaagcaatttt

SEQ ID NO: 4989410 - DNA, 25 bp, Homo sapien
agttcttgcagtccaccttctacac

SEQ ID NO: 4989411 - DNA, 25 bp, Homo sapien
aagctcgtcgcttttcgcccaattc

SEQ ID NO: 4989412 - DNA, 25 bp, Homo sapien
tctacactaacattaacgagtaaag

SEQ ID NO: 4989413 - DNA, 25 bp, Homo sapien
gttgcggcttgttagggtgattcga

SEQ ID NO: 4989414 - DNA, 25 bp, Homo sapien
tgttagggtgattcgaattcggtga

SEQ ID NO: 4989415 - DNA, 25 bp, Homo sapien
gaattgccacctccggctccacggg

SEQ ID NO: 4989416 - DNA, 25 bp, Homo sapien
gcttgttagggtgattcgaattcgg

SEQ ID NO: 4989417 - DNA, 25 bp, Homo sapien
caaaaatggtctgccacttctggag

SEQ ID NO: 4989418 - DNA, 25 bp, Homo sapien
gaacaataagccaaaaatggtctgc

SEQ ID NO: 4989419 - DNA, 25 bp, Homo sapien
aatggtctgccacttctggagaaag

SEQ ID NO: 4989420 - DNA, 25 bp, Homo sapien
taagccaaaaatggtctgccacttc

SEQ ID NO: 4989421 - DNA, 25 bp, Homo sapien
tgccctcaggagcacgaactcgaaa

SEQ ID NO: 4989422 - DNA, 25 bp, Homo sapien
ttccgcccctacacgccccggcatc

SEQ ID NO: 4989423 - DNA, 25 bp, Homo sapien
tcaggagcacgaactcgaaaccggg

SEQ ID NO: 4989424 - DNA, 25 bp, Homo sapien
gcgcccgagccctgcgttgcgccgc

SEQ ID NO: 4989425 - DNA, 25 bp, Homo sapien
gagcaggagcgtgcggaccaaaaat

SEQ ID NO: 4989426 - DNA, 25 bp, Homo sapien
tacgaccgcgtcttcctcaaaaaga

SEQ ID NO: 4989427 - DNA, 25 bp, Homo sapien
gttgcgcgcgggcttcctgaccgac

SEQ ID NO: 4989428 - DNA, 25 bp, Homo sapien
gaccaaaaatcctcagcccttacga

SEQ ID NO: 4989429 - DNA, 25 bp, Homo sapien
cactagtggagttggcgggaaaggc

SEQ ID NO: 4989430 - DNA, 25 bp, Homo sapien
tatatagcacgcttgcatccgggtc

SEQ ID NO: 4989431 - DNA, 25 bp, Homo sapien
atatcccgggccctagaggcggtcg

SEQ ID NO: 4989432 - DNA, 25 bp, Homo sapien
cacacgccccggaacaggaaatatc

SEQ ID NO: 4989433 - DNA, 25 bp, Homo sapien
cataccattcgttgctctctgagga

SEQ ID NO: 4989434 - DNA, 25 bp, Homo sapien
tcataaagtgcacacgaactctggt

SEQ ID NO: 4989435 - DNA, 25 bp, Homo sapien
gcattggcagaaatgcttctcgtaa

SEQ ID NO: 4989436 - DNA, 25 bp, Homo sapien
gcttagctgacatgagcattggcag

SEQ ID NO: 4989437 - DNA, 25 bp, Homo sapien
tcatagcctgaaacgtcctgttgtg

SEQ ID NO: 4989438 - DNA, 25 bp, Homo sapien
gtaagcagttatttttcatagcctg

SEQ ID NO: 4989439 - DNA, 25 bp, Homo sapien
tggaaaggacctgaacttggcttct

SEQ ID NO: 4989440 - DNA, 25 bp, Homo sapien
cagtccagcagaagtatctacatct

SEQ ID NO: 4989441 - DNA, 25 bp, Homo sapien
cttttgctgggcttgtgcttttcat

SEQ ID NO: 4989442 - DNA, 25 bp, Homo sapien
gtcacttttgctgggcttgtgcttt

SEQ ID NO: 4989443 - DNA, 25 bp, Homo sapien
cacttttgctgggcttgtgcttttc

SEQ ID NO: 4989444 - DNA, 25 bp, Homo sapien
cagtcacttttgctgggcttgtgct

SEQ ID NO: 4989445 - DNA, 25 bp, Homo sapien
ttcttcctgaggttaggcacacagc

SEQ ID NO: 4989446 - DNA, 25 bp, Homo sapien
gatggaaccattacatgagagaagg

SEQ ID NO: 4989447 - DNA, 25 bp, Homo sapien
caatggacagatttacggaacccct

SEQ ID NO: 4989448 - DNA, 25 bp, Homo sapien
tggaggatgcccttacaatggacag

SEQ ID NO: 4989449 - DNA, 25 bp, Homo sapien
catgacatctcccaggggttgctgg

SEQ ID NO: 4989450 - DNA, 25 bp, Homo sapien
ctcccaggggttgctggtctcttgt

SEQ ID NO: 4989451 - DNA, 25 bp, Homo sapien
gtctcttgtcccttgtggacatctt

SEQ ID NO: 4989452 - DNA, 25 bp, Homo sapien
ttgtcccttgtggacatcttcaacc

SEQ ID NO: 4989453 - DNA, 25 bp, Homo sapien
tgtagaagcaaggaaacggctacct

SEQ ID NO: 4989454 - DNA, 25 bp, Homo sapien
tagaagcaaggaaacggctaccttc

SEQ ID NO: 4989455 - DNA, 25 bp, Homo sapien
ctgtagaagcaaggaaacggctacc

SEQ ID NO: 4989456 - DNA, 25 bp, Homo sapien
tgcaaatgcacaagtaatagaaagc

SEQ ID NO: 4989457 - DNA, 25 bp, Homo sapien
aaaacatggtcagaggtgatgcaaa

SEQ ID NO: 4989458 - DNA, 25 bp, Homo sapien
gatgcaaatgcacaagtaatagaaa

SEQ ID NO: 4989459 - DNA, 25 bp, Homo sapien
aacatggtcagaggtgatgcaaatg

SEQ ID NO: 4989460 - DNA, 25 bp, Homo sapien
gctttagggaaccaagagtgagatt

SEQ ID NO: 4989461 - DNA, 25 bp, Homo sapien
aaccaagagtgagattgtttccagc

SEQ ID NO: 4989462 - DNA, 25 bp, Homo sapien
tcaccgaatcacagcagtcagaaga

SEQ ID NO: 4989463 - DNA, 25 bp, Homo sapien
tcagaagaaagtgctttagggaacc

SEQ ID NO: 4989464 - DNA, 25 bp, Homo sapien
tttgtccttttttggctagagtgtc

SEQ ID NO: 4989465 - DNA, 25 bp, Homo sapien
tccattctgatttaatttttgtcct

SEQ ID NO: 4989466 - DNA, 25 bp, Homo sapien
cttttttggctagagtgtcttgtat

SEQ ID NO: 4989467 - DNA, 25 bp, Homo sapien
actgttcaatgcactttttctatac

SEQ ID NO: 4989468 - DNA, 25 bp, Homo sapien
ctccagtagcagaccgctttccaga

SEQ ID NO: 4989469 - DNA, 25 bp, Homo sapien
cacctccagtagcagaccgctttcc

SEQ ID NO: 4989470 - DNA, 25 bp, Homo sapien
tctgactctgcatcttctaccacag

SEQ ID NO: 4989471 - DNA, 25 bp, Homo sapien
tccagtagcagaccgctttccagat

SEQ ID NO: 4989472 - DNA, 25 bp, Homo sapien
actaagtgctgtccactaatatgca

SEQ ID NO: 4989473 - DNA, 25 bp, Homo sapien
gcactggccctgaaccacacttcaa

SEQ ID NO: 4989474 - DNA, 25 bp, Homo sapien
ctactaagtgctgtccactaatatg

SEQ ID NO: 4989475 - DNA, 25 bp, Homo sapien
ctaatatgcactggccctgaaccac

SEQ ID NO: 4989476 - DNA, 25 bp, Homo sapien
cactggttatgttatttcaaatccc

SEQ ID NO: 4989477 - DNA, 25 bp, Homo sapien
ggacagagataaatgaccactgctc

SEQ ID NO: 4989478 - DNA, 25 bp, Homo sapien
gggacagagataaatgaccactgct

SEQ ID NO: 4989479 - DNA, 25 bp, Homo sapien
ggtggcagcacgcacttaggtggca

SEQ ID NO: 4989480 - DNA, 25 bp, Homo sapien
agcacgcacttaggtggcagagaag

SEQ ID NO: 4989481 - DNA, 25 bp, Homo sapien
ctccaaagcaaaccgggcccagaag

SEQ ID NO: 4989482 - DNA, 25 bp, Homo sapien
ctgtgcctgtccagtattccctgcc

SEQ ID NO: 4989483 - DNA, 25 bp, Homo sapien
gtgcctgtccagtattccctgccct

SEQ ID NO: 4989484 - DNA, 25 bp, Homo sapien
gcagctgaattttgctgccaatttc

SEQ ID NO: 4989485 - DNA, 25 bp, Homo sapien
tcactgatcaagatgttcgcgggct

SEQ ID NO: 4989486 - DNA, 25 bp, Homo sapien
gacgttgccaccgaactccatgatg

SEQ ID NO: 4989487 - DNA, 25 bp, Homo sapien
taaatgtcggctttaggcgtcacgc

SEQ ID NO: 4989488 - DNA, 25 bp, Homo sapien
ggtaagtcgccttgtacaccgagcc

SEQ ID NO: 4989489 - DNA, 25 bp, Homo sapien
tgctcccagtcaatggagcaccagg

SEQ ID NO: 4989490 - DNA, 25 bp, Homo sapien
cccagaagcagcttcgcaggtagct

SEQ ID NO: 4989491 - DNA, 25 bp, Homo sapien
agcagcttcgcaggtagctctgagg

SEQ ID NO: 4989492 - DNA, 25 bp, Homo sapien
gccgcgcgtccaccgatggggaaaa

SEQ ID NO: 4989493 - DNA, 25 bp, Homo sapien
gaatgaagagactaggggaaaccgc

SEQ ID NO: 4989494 - DNA, 25 bp, Homo sapien
cttcgctccacctcatcccttttct

SEQ ID NO: 4989495 - DNA, 25 bp, Homo sapien
aaacatgactgactactccttcgct

SEQ ID NO: 4989496 - DNA, 25 bp, Homo sapien
accgcgggactttggaaacatgact

SEQ ID NO: 4989497 - DNA, 25 bp, Homo sapien
cagataccggaacggatagctcctt

SEQ ID NO: 4989498 - DNA, 25 bp, Homo sapien
tgaccaacgtggttggctttctggg

SEQ ID NO: 4989499 - DNA, 25 bp, Homo sapien
tcacaagagtaacaacagataccgg

SEQ ID NO: 4989500 - DNA, 25 bp, Homo sapien
atcgcggatagtgggagaacgtcct

SEQ ID NO: 4989501 - DNA, 25 bp, Homo sapien
tttcctagtgcacgggctttgggcg

SEQ ID NO: 4989502 - DNA, 25 bp, Homo sapien
tggtgcttttgtgcgtttcctagtg

SEQ ID NO: 4989503 - DNA, 25 bp, Homo sapien
cgggctcgcccgctggtgcttttgt

SEQ ID NO: 4989504 - DNA, 25 bp, Homo sapien
cctgcacttgctgcgctggggccga

SEQ ID NO: 4989505 - DNA, 25 bp, Homo sapien
ttaagaggcactttatagcaaagct

SEQ ID NO: 4989506 - DNA, 25 bp, Homo sapien
gacactcggaatgtgacttgaatct

SEQ ID NO: 4989507 - DNA, 25 bp, Homo sapien
tggtgaggctgaattttatatgcga

SEQ ID NO: 4989508 - DNA, 25 bp, Homo sapien
cgggacactcggaatgtgacttgaa

SEQ ID NO: 4989509 - DNA, 25 bp, Homo sapien
gctgtaccagtgtaccgataggtac

SEQ ID NO: 4989510 - DNA, 25 bp, Homo sapien
tggctgtaccagtgtaccgataggt

SEQ ID NO: 4989511 - DNA, 25 bp, Homo sapien
agtgtaccgataggtacactggtac

SEQ ID NO: 4989512 - DNA, 25 bp, Homo sapien
taccgataggtacactggtacatca

SEQ ID NO: 4989513 - DNA, 25 bp, Homo sapien
tgtgataaaggcagccgtctgttct

SEQ ID NO: 4989514 - DNA, 25 bp, Homo sapien
ccaaacttggtaattcttgcgtgtg

SEQ ID NO: 4989515 - DNA, 25 bp, Homo sapien
ctatgtggacgcatcaacagatgct

SEQ ID NO: 4989516 - DNA, 25 bp, Homo sapien
gaaaaggcatttcctagaagtcggc

SEQ ID NO: 4989517 - DNA, 25 bp, Homo sapien
tctagattatggactaaccgtgggc

SEQ ID NO: 4989518 - DNA, 25 bp, Homo sapien
taaattgctggctgcacttgaccca

SEQ ID NO: 4989519 - DNA, 25 bp, Homo sapien
taatgaagcagagcgaaaagcctac

SEQ ID NO: 4989520 - DNA, 25 bp, Homo sapien
caatgtcacatggatctcagtaggc

SEQ ID NO: 4989521 - DNA, 25 bp, Homo sapien
gatcccgagctctgcatggactgaa

SEQ ID NO: 4989522 - DNA, 25 bp, Homo sapien
tcactggaaggtaaggacatcaccg

SEQ ID NO: 4989523 - DNA, 25 bp, Homo sapien
tgcagagacccaagccctatagtgt

SEQ ID NO: 4989524 - DNA, 25 bp, Homo sapien
tagaaccggcgatcacaatgttcgc

SEQ ID NO: 4989525 - DNA, 25 bp, Homo sapien
tacttagaaacaaaggccttggtgc

SEQ ID NO: 4989526 - DNA, 25 bp, Homo sapien
cctgtgtgagagtaggagtgaacct

SEQ ID NO: 4989527 - DNA, 25 bp, Homo sapien
ccttggtgcagtcttgttgtatgca

SEQ ID NO: 4989528 - DNA, 25 bp, Homo sapien
tgtcacacagttggcaaggaaagtt

SEQ ID NO: 4989529 - DNA, 25 bp, Homo sapien
ctgacaaatcaccaggaatgacagt

SEQ ID NO: 4989530 - DNA, 25 bp, Homo sapien
ttctgacaaatcaccaggaatgaca

SEQ ID NO: 4989531 - DNA, 25 bp, Homo sapien
tctgacaaatcaccaggaatgacag

SEQ ID NO: 4989532 - DNA, 25 bp, Homo sapien
gcagcctaaaccaggccttcttgtt

SEQ ID NO: 4989533 - DNA, 25 bp, Homo sapien
atgatatagctttaggtggcttctc

SEQ ID NO: 4989534 - DNA, 25 bp, Homo sapien
caagtttcatgtggtcgtaaaagaa

SEQ ID NO: 4989535 - DNA, 25 bp, Homo sapien
tgcccaactccactaaatgatatag

SEQ ID NO: 4989536 - DNA, 25 bp, Homo sapien
ctgattactgatggaaaaagcctca

SEQ ID NO: 4989537 - DNA, 25 bp, Homo sapien
gagagtggaatccaatccttcccat

SEQ ID NO: 4989538 - DNA, 25 bp, Homo sapien
cagactttgatcttagccagtccca

SEQ ID NO: 4989539 - DNA, 25 bp, Homo sapien
cagtcccattgactcttcgtggaag

SEQ ID NO: 4989540 - DNA, 25 bp, Homo sapien
gaatgaagcattctgggtgccaaat

SEQ ID NO: 4989541 - DNA, 25 bp, Homo sapien
caaccttattaatagaccgtcacag

SEQ ID NO: 4989542 - DNA, 25 bp, Homo sapien
gctccaaactctagcaaggcaacct

SEQ ID NO: 4989543 - DNA, 25 bp, Homo sapien
aaatacggccaaggcagcaccaaga

SEQ ID NO: 4989544 - DNA, 25 bp, Homo sapien
tgcgtgctcactgctataacatggg

SEQ ID NO: 4989545 - DNA, 25 bp, Homo sapien
tgaggaggcccaaagttcatagcca

SEQ ID NO: 4989546 - DNA, 25 bp, Homo sapien
tctgttacagagctagctggcccac

SEQ ID NO: 4989547 - DNA, 25 bp, Homo sapien
cacagaagtgccatggaaccagagt

SEQ ID NO: 4989548 - DNA, 25 bp, Homo sapien
tctttaaaggatcagaacctctgct

SEQ ID NO: 4989549 - DNA, 25 bp, Homo sapien
tagtctacgtaaggcactgccatac

SEQ ID NO: 4989550 - DNA, 25 bp, Homo sapien
ttgaagaccacacttctgaactgtg

SEQ ID NO: 4989551 - DNA, 25 bp, Homo sapien
aacagcaagaacacttggaagggcc

SEQ ID NO: 4989552 - DNA, 25 bp, Homo sapien
aattctttaccatgaattttggaca

SEQ ID NO: 4989553 - DNA, 25 bp, Homo sapien
tctcaggacacttcacgaagacaca

SEQ ID NO: 4989554 - DNA, 25 bp, Homo sapien
tagtccatacttattgttacatact

SEQ ID NO: 4989555 - DNA, 25 bp, Homo sapien
tatgaaaccagcaattggtattaaa

SEQ ID NO: 4989556 - DNA, 25 bp, Homo sapien
ccaaatattgccgactgcgggtttc

SEQ ID NO: 4989557 - DNA, 25 bp, Homo sapien
tctctaatgtcttccgctctcgctg

SEQ ID NO: 4989558 - DNA, 25 bp, Homo sapien
tatttttcgggtctctaatgtcttc

SEQ ID NO: 4989559 - DNA, 25 bp, Homo sapien
tggaaaatgcggagagtttactctc

SEQ ID NO: 4989560 - DNA, 25 bp, Homo sapien
tggacgcggcgggcctggaaattgt

SEQ ID NO: 4989561 - DNA, 25 bp, Homo sapien
caccgcccgcggaatttctaataat

SEQ ID NO: 4989562 - DNA, 25 bp, Homo sapien
tctacaccgcccgcggaatttctaa

SEQ ID NO: 4989563 - DNA, 25 bp, Homo sapien
tttctcatatttcgggctggacgcg

SEQ ID NO: 4989564 - DNA, 25 bp, Homo sapien
cagccattgtagtgtatgcgctgcc

SEQ ID NO: 4989565 - DNA, 25 bp, Homo sapien
ccagcagccattgtagtgtatgcgc

SEQ ID NO: 4989566 - DNA, 25 bp, Homo sapien
gccattgtagtgtatgcgctgcccc

SEQ ID NO: 4989567 - DNA, 25 bp, Homo sapien
attgtagtgtatgcgctgcccctgc

SEQ ID NO: 4989568 - DNA, 25 bp, Homo sapien
gcggcgcgcgccgattgggcgggct

SEQ ID NO: 4989569 - DNA, 25 bp, Homo sapien
ggagcgggggcagcaagttgggatg

SEQ ID NO: 4989570 - DNA, 25 bp, Homo sapien
gcgcgcgccgattgggcgggctgcc

SEQ ID NO: 4989571 - DNA, 25 bp, Homo sapien
gggcagcaagttgggatgcgcgcta

SEQ ID NO: 4989572 - DNA, 25 bp, Homo sapien
cctgctgcgtgagccattgacgtgt

SEQ ID NO: 4989573 - DNA, 25 bp, Homo sapien
gctgcgtgagccattgacgtgtttg

SEQ ID NO: 4989574 - DNA, 25 bp, Homo sapien
agccattgacgtgtttggagctgga

SEQ ID NO: 4989575 - DNA, 25 bp, Homo sapien
cgtgagccattgacgtgtttggagc

SEQ ID NO: 4989576 - DNA, 25 bp, Homo sapien
ctggcgaagcggaggccggaggtga

SEQ ID NO: 4989577 - DNA, 25 bp, Homo sapien
ggcccgaatgcacttctgcggcgcg

SEQ ID NO: 4989578 - DNA, 25 bp, Homo sapien
gccacacgggtctgttcgctccggg

SEQ ID NO: 4989579 - DNA, 25 bp, Homo sapien
tgtagcctctgaagcgcagttaccg

SEQ ID NO: 4989580 - DNA, 25 bp, Homo sapien
tctcggcatggtctcggcacagcaa

SEQ ID NO: 4989581 - DNA, 25 bp, Homo sapien
atgctgacgggctacaccgcggaag

SEQ ID NO: 4989582 - DNA, 25 bp, Homo sapien
atcagatgctgacgggctacaccgc

SEQ ID NO: 4989583 - DNA, 25 bp, Homo sapien
tgcgcgccgtccaggatcagatgct

SEQ ID NO: 4989584 - DNA, 25 bp, Homo sapien
tccaggatcagatgctgacgggcta

SEQ ID NO: 4989585 - DNA, 25 bp, Homo sapien
gaataatgtagttatcatactggtc

SEQ ID NO: 4989586 - DNA, 25 bp, Homo sapien
tatcatactggtcccatgaaaatta

SEQ ID NO: 4989587 - DNA, 25 bp, Homo sapien
ggctttgctacgtttgaataatgta

SEQ ID NO: 4989588 - DNA, 25 bp, Homo sapien
ttgtggctttgctacgtttgaataa

SEQ ID NO: 4989589 - DNA, 25 bp, Homo sapien
ttcttgaggtacaaaaactgccgga

SEQ ID NO: 4989590 - DNA, 25 bp, Homo sapien
tctgggtaagcctagattggttagc

SEQ ID NO: 4989591 - DNA, 25 bp, Homo sapien
caaaaactgccggagattctgggta

SEQ ID NO: 4989592 - DNA, 25 bp, Homo sapien
cctagattggttagctttgtgttaa

SEQ ID NO: 4989593 - DNA, 25 bp, Homo sapien
gtctgagtctaaaaccaagctcagg

SEQ ID NO: 4989594 - DNA, 25 bp, Homo sapien
gctcaggtttctaagccacatgacc

SEQ ID NO: 4989595 - DNA, 25 bp, Homo sapien
ggctgccgacaatgaactgtctgtc

SEQ ID NO: 4989596 - DNA, 25 bp, Homo sapien
gtattgactgctataaaaatgatgg

SEQ ID NO: 4989597 - DNA, 25 bp, Homo sapien
tcaaacaatgcaaaagggtatacag

SEQ ID NO: 4989598 - DNA, 25 bp, Homo sapien
tacgtgagctgtaggataccttgct

SEQ ID NO: 4989599 - DNA, 25 bp, Homo sapien
agcagccggtgtcaagttttcaaga

SEQ ID NO: 4989600 - DNA, 25 bp, Homo sapien
ggttatagccataatgcctggtctg

SEQ ID NO: 4989601 - DNA, 25 bp, Homo sapien
attgcctcccccagtaagtcctaat

SEQ ID NO: 4989602 - DNA, 25 bp, Homo sapien
ggagttcagcatgatgaagccgcaa

SEQ ID NO: 4989603 - DNA, 25 bp, Homo sapien
cagcatgatgaagccgcaatgctgc

SEQ ID NO: 4989604 - DNA, 25 bp, Homo sapien
caatgctgccgaaggctgaaaacag

SEQ ID NO: 4989605 - DNA, 25 bp, Homo sapien
atgggagatcatggcaaagttggtc

SEQ ID NO: 4989606 - DNA, 25 bp, Homo sapien
caaagttggtctggtaaggtggcat

SEQ ID NO: 4989607 - DNA, 25 bp, Homo sapien
cagcttcagaataagatgggagatc

SEQ ID NO: 4989608 - DNA, 25 bp, Homo sapien
tacaaactttatttcaatgaccagc

SEQ ID NO: 4989609 - DNA, 25 bp, Homo sapien
tggactctggaaatctgtagcatgt

SEQ ID NO: 4989610 - DNA, 25 bp, Homo sapien
ggactctggaaatctgtagcatgtg

SEQ ID NO: 4989611 - DNA, 25 bp, Homo sapien
tcactggactctggaaatctgtagc

SEQ ID NO: 4989612 - DNA, 25 bp, Homo sapien
actggactctggaaatctgtagcat

SEQ ID NO: 4989613 - DNA, 25 bp, Homo sapien
gaattggcacctcccggtagcatgt

SEQ ID NO: 4989614 - DNA, 25 bp, Homo sapien
caagccacatttgacacctgtatca

SEQ ID NO: 4989615 - DNA, 25 bp, Homo sapien
tatccagggccaccttagtgggctc

SEQ ID NO: 4989616 - DNA, 25 bp, Homo sapien
ggtagcatgtgccactggagaccac

SEQ ID NO: 4989617 - DNA, 25 bp, Homo sapien
ttcctttggctccacagcaacagca

SEQ ID NO: 4989618 - DNA, 25 bp, Homo sapien
ggctccacagcaacagcacaaagaa

SEQ ID NO: 4989619 - DNA, 25 bp, Homo sapien
tccttccagtttgaaaagatgcctc

SEQ ID NO: 4989620 - DNA, 25 bp, Homo sapien
tgaaaagatgcctctccaggcctct

SEQ ID NO: 4989621 - DNA, 25 bp, Homo sapien
cttctgtaggagtgggtcaacccct

SEQ ID NO: 4989622 - DNA, 25 bp, Homo sapien
tgtaggagtgggtcaaccccttcta

SEQ ID NO: 4989623 - DNA, 25 bp, Homo sapien
accccttctatttctgctgctgttc

SEQ ID NO: 4989624 - DNA, 25 bp, Homo sapien
cccttctatttctgctgctgttctc

SEQ ID NO: 4989625 - DNA, 25 bp, Homo sapien
atggggaggagccactattccagaa

SEQ ID NO: 4989626 - DNA, 25 bp, Homo sapien
aagtatggggaggagccactattcc

SEQ ID NO: 4989627 - DNA, 25 bp, Homo sapien
gtatggggaggagccactattccag

SEQ ID NO: 4989628 - DNA, 25 bp, Homo sapien
tcaagtatggggaggagccactatt

SEQ ID NO: 4989629 - DNA, 25 bp, Homo sapien
tctacaggtgatgagggtcttttca

SEQ ID NO: 4989630 - DNA, 25 bp, Homo sapien
cctacatctacaggtgatgagggtc

SEQ ID NO: 4989631 - DNA, 25 bp, Homo sapien
agctctgtctgtcctacatctacag

SEQ ID NO: 4989632 - DNA, 25 bp, Homo sapien
tgagggtcttttcaaatagcaccaa

SEQ ID NO: 4989633 - DNA, 25 bp, Homo sapien
cctcatctcatatgggaagttcggt

SEQ ID NO: 4989634 - DNA, 25 bp, Homo sapien
tgtcccatagtcagatgctccaggg

SEQ ID NO: 4989635 - DNA, 25 bp, Homo sapien
tctattgtggatagcagaatcttgc

SEQ ID NO: 4989636 - DNA, 25 bp, Homo sapien
tcttgctccggagatctagaagcat

SEQ ID NO: 4989637 - DNA, 25 bp, Homo sapien
caccctctgtgcctgatgggaggcc

SEQ ID NO: 4989638 - DNA, 25 bp, Homo sapien
ccctcagaagtgtagatcccagaca

SEQ ID NO: 4989639 - DNA, 25 bp, Homo sapien
gttgactgagagcatggcaatttgg

SEQ ID NO: 4989640 - DNA, 25 bp, Homo sapien
ccttggagggttgaaacagccaaca

SEQ ID NO: 4989641 - DNA, 25 bp, Homo sapien
ccttccgttaagggttgactgccag

SEQ ID NO: 4989642 - DNA, 25 bp, Homo sapien
gcagctcagtgagtacaagatgctg

SEQ ID NO: 4989643 - DNA, 25 bp, Homo sapien
cagctcagtgagtacaagatgctgg

SEQ ID NO: 4989644 - DNA, 25 bp, Homo sapien
agcagctcagtgagtacaagatgct

SEQ ID NO: 4989645 - DNA, 25 bp, Homo sapien
gagcagctcagtgagtacaagatgc

SEQ ID NO: 4989646 - DNA, 25 bp, Homo sapien
tcctctcagtatacatctacagtgg

SEQ ID NO: 4989647 - DNA, 25 bp, Homo sapien
gacaggaccctagaagatacgcttc

SEQ ID NO: 4989648 - DNA, 25 bp, Homo sapien
tactgaatccccgaagagtctgagc

SEQ ID NO: 4989649 - DNA, 25 bp, Homo sapien
tccagccaagatgcactccaattag

SEQ ID NO: 4989650 - DNA, 25 bp, Homo sapien
agatcagggctgtcatgttcgtgca

SEQ ID NO: 4989651 - DNA, 25 bp, Homo sapien
gcaggccactcaaggtaaaccatag

SEQ ID NO: 4989652 - DNA, 25 bp, Homo sapien
ctttgagtaatgattgacagtctcg

SEQ ID NO: 4989653 - DNA, 25 bp, Homo sapien
cctgagactgctgcccctatgacag

SEQ ID NO: 4989654 - DNA, 25 bp, Homo sapien
ttgctccccacaagagggaagagac

SEQ ID NO: 4989655 - DNA, 25 bp, Homo sapien
cgggtctcccaaggtaccgctcatc

SEQ ID NO: 4989656 - DNA, 25 bp, Homo sapien
gctgtttctcttgcaaggctgcccc

SEQ ID NO: 4989657 - DNA, 25 bp, Homo sapien
gggaagagacaaaggctgctgtttc

SEQ ID NO: 4989658 - DNA, 25 bp, Homo sapien
ttttatagttaatctccaaagcatg

SEQ ID NO: 4989659 - DNA, 25 bp, Homo sapien
ttgcttttatagttaatctccaaag

SEQ ID NO: 4989660 - DNA, 25 bp, Homo sapien
aggagttccagggatatggtaatta

SEQ ID NO: 4989661 - DNA, 25 bp, Homo sapien
ttccagggatatggtaattaacata

SEQ ID NO: 4989662 - DNA, 25 bp, Homo sapien
cactcggtctgcgtatccagggcat

SEQ ID NO: 4989663 - DNA, 25 bp, Homo sapien
aatacaatagatccaaagtgagggc

SEQ ID NO: 4989664 - DNA, 25 bp, Homo sapien
cacaatagtgctggatgggccttta

SEQ ID NO: 4989665 - DNA, 25 bp, Homo sapien
taggtggtacaggttcaaaatggcc

SEQ ID NO: 4989666 - DNA, 25 bp, Homo sapien
tccattgcatgaaggatgcccaaat

SEQ ID NO: 4989667 - DNA, 25 bp, Homo sapien
gaaggatgcccaaatagtcagctat

SEQ ID NO: 4989668 - DNA, 25 bp, Homo sapien
aaagccatccattgcatgaaggatg

SEQ ID NO: 4989669 - DNA, 25 bp, Homo sapien
aaatagtcagctataagcagtcctg

SEQ ID NO: 4989670 - DNA, 25 bp, Homo sapien
tacatgcatgatcatcatcccaaca

SEQ ID NO: 4989671 - DNA, 25 bp, Homo sapien
aagcaggcacgggaaacctgagact

SEQ ID NO: 4989672 - DNA, 25 bp, Homo sapien
atacatgcatgatcatcatcccaac

SEQ ID NO: 4989673 - DNA, 25 bp, Homo sapien
aaacaaagcaggcacgggaaacctg

SEQ ID NO: 4989674 - DNA, 25 bp, Homo sapien
tagtgggatcgtaagcctgaatttc

SEQ ID NO: 4989675 - DNA, 25 bp, Homo sapien
cacagacttagtgaatagtgggatc

SEQ ID NO: 4989676 - DNA, 25 bp, Homo sapien
gaatttcgaattgcttgtccaggat

SEQ ID NO: 4989677 - DNA, 25 bp, Homo sapien
gaataaagggcacgctcagagtcac

SEQ ID NO: 4989678 - DNA, 25 bp, Homo sapien
ttgtagaatagcttctactattttt

SEQ ID NO: 4989679 - DNA, 25 bp, Homo sapien
tggcatatacaagtacattttttct

SEQ ID NO: 4989680 - DNA, 25 bp, Homo sapien
aactgcatattttggttccagaatt

SEQ ID NO: 4989681 - DNA, 25 bp, Homo sapien
ttcttgtagaatagcttctactatt

SEQ ID NO: 4989682 - DNA, 25 bp, Homo sapien
aaggggcacacaatcgtggttttga

SEQ ID NO: 4989683 - DNA, 25 bp, Homo sapien
cctgtagtacaaccttcaaacattc

SEQ ID NO: 4989684 - DNA, 25 bp, Homo sapien
cacaatcgtggttttgatccccttt

SEQ ID NO: 4989685 - DNA, 25 bp, Homo sapien
gggcacacaatcgtggttttgatcc

SEQ ID NO: 4989686 - DNA, 25 bp, Homo sapien
agcccatttactccacttaatccag

SEQ ID NO: 4989687 - DNA, 25 bp, Homo sapien
ttagcaatcatagcaggtagaaagg

SEQ ID NO: 4989688 - DNA, 25 bp, Homo sapien
tgccagcccatttactccacttaat

SEQ ID NO: 4989689 - DNA, 25 bp, Homo sapien
tgtccatggtcattagcaatcatag

SEQ ID NO: 4989690 - DNA, 25 bp, Homo sapien
ttatgatgagaagaaacaattatta

SEQ ID NO: 4989691 - DNA, 25 bp, Homo sapien
tatgatgagaagaaacaattattac

SEQ ID NO: 4989692 - DNA, 25 bp, Homo sapien
tttatgatgagaagaaacaattatt

SEQ ID NO: 4989693 - DNA, 25 bp, Homo sapien
atttatgatgagaagaaacaattat

SEQ ID NO: 4989694 - DNA, 25 bp, Homo sapien
ccataaatgtgctttgaaattcaca

SEQ ID NO: 4989695 - DNA, 25 bp, Homo sapien
ttccataagctcatctggacagtca

SEQ ID NO: 4989696 - DNA, 25 bp, Homo sapien
cctgttacgattccggcattgttga

SEQ ID NO: 4989697 - DNA, 25 bp, Homo sapien
tcaaggaactttttgcctgttacga

SEQ ID NO: 4989698 - DNA, 25 bp, Homo sapien
attgaataagagcaacaccaccaat

SEQ ID NO: 4989699 - DNA, 25 bp, Homo sapien
tgaataagagcaacaccaccaatgt

SEQ ID NO: 4989700 - DNA, 25 bp, Homo sapien
ttgaataagagcaacaccaccaatg

SEQ ID NO: 4989701 - DNA, 25 bp, Homo sapien
ggctaagagccttccgagtccactt

SEQ ID NO: 4989702 - DNA, 25 bp, Homo sapien
tataggcgtgcactcttgtggctcc

SEQ ID NO: 4989703 - DNA, 25 bp, Homo sapien
acttccagcacctgtgatgaggact

SEQ ID NO: 4989704 - DNA, 25 bp, Homo sapien
gatgaggactatttcaccagcaacg

SEQ ID NO: 4989705 - DNA, 25 bp, Homo sapien
ctttgggagtaaggcaaaaatcata

SEQ ID NO: 4989706 - DNA, 25 bp, Homo sapien
gtaaggcaaaaatcatagcctccag

SEQ ID NO: 4989707 - DNA, 25 bp, Homo sapien
gcctccagaagactaaacagtgatt

SEQ ID NO: 4989708 - DNA, 25 bp, Homo sapien
tcatagcctccagaagactaaacag

SEQ ID NO: 4989709 - DNA, 25 bp, Homo sapien
tgtccatttcctctgagttgtttac

SEQ ID NO: 4989710 - DNA, 25 bp, Homo sapien
gattcacatgaagacttatttgtcc

SEQ ID NO: 4989711 - DNA, 25 bp, Homo sapien
gttgtttactccacggagctcctat

SEQ ID NO: 4989712 - DNA, 25 bp, Homo sapien
tcacatgaagacttatttgtccatt

SEQ ID NO: 4989713 - DNA, 25 bp, Homo sapien
caagagtgaatgtacggttccattt

SEQ ID NO: 4989714 - DNA, 25 bp, Homo sapien
aacaagagtgaatgtacggttccat

SEQ ID NO: 4989715 - DNA, 25 bp, Homo sapien
acaagagtgaatgtacggttccatt

SEQ ID NO: 4989716 - DNA, 25 bp, Homo sapien
ccaatccaaacaggcgccctcggct

SEQ ID NO: 4989717 - DNA, 25 bp, Homo sapien
aatccaaacaggcgccctcggcttc

SEQ ID NO: 4989718 - DNA, 25 bp, Homo sapien
atccaaacaggcgccctcggcttcc

SEQ ID NO: 4989719 - DNA, 25 bp, Homo sapien
caatccaaacaggcgccctcggctt

SEQ ID NO: 4989720 - DNA, 25 bp, Homo sapien
tctggtgagggcacccggacgaaac

SEQ ID NO: 4989721 - DNA, 25 bp, Homo sapien
ccggacgaaacgggagggcagacag

SEQ ID NO: 4989722 - DNA, 25 bp, Homo sapien
cagtgcgcggcagcaagtcggctct

SEQ ID NO: 4989723 - DNA, 25 bp, Homo sapien
agcaagtcggctctggtgagggcac

SEQ ID NO: 4989724 - DNA, 25 bp, Homo sapien
tatgggggttgatatccacccggaa

SEQ ID NO: 4989725 - DNA, 25 bp, Homo sapien
ccggaaggtggatgcactgagcagc

SEQ ID NO: 4989726 - DNA, 25 bp, Homo sapien
ggtgatatgggggttgatatccacc

SEQ ID NO: 4989727 - DNA, 25 bp, Homo sapien
gatatgggggttgatatccacccgg

SEQ ID NO: 4989728 - DNA, 25 bp, Homo sapien
actctccctagctgtccgcggagaa

SEQ ID NO: 4989729 - DNA, 25 bp, Homo sapien
aggacactctccctagctgtccgcg

SEQ ID NO: 4989730 - DNA, 25 bp, Homo sapien
tctccctagctgtccgcggagaagc

SEQ ID NO: 4989731 - DNA, 25 bp, Homo sapien
acactctccctagctgtccgcggag

SEQ ID NO: 4989732 - DNA, 25 bp, Homo sapien
gcccaagtccaagggcgggactgcc

SEQ ID NO: 4989733 - DNA, 25 bp, Homo sapien
ccagtgcgcgacgtgggcagcactc

SEQ ID NO: 4989734 - DNA, 25 bp, Homo sapien
ggccgtagccccagtgcgcgacgtg

SEQ ID NO: 4989735 - DNA, 25 bp, Homo sapien
caggttcaggtgtttatccaggcgc

SEQ ID NO: 4989736 - DNA, 25 bp, Homo sapien
gtatttgcaaggcacaaccccgagg

SEQ ID NO: 4989737 - DNA, 25 bp, Homo sapien
gaacagagcagtataggcgtccacg

SEQ ID NO: 4989738 - DNA, 25 bp, Homo sapien
gcttaacgtttcaatgcctaggctg

SEQ ID NO: 4989739 - DNA, 25 bp, Homo sapien
gaaatgaggctagcgtaagagtcac

SEQ ID NO: 4989740 - DNA, 25 bp, Homo sapien
gcctctgacagtacaacctttctgg

SEQ ID NO: 4989741 - DNA, 25 bp, Homo sapien
tcaagcctctgacagtacaaccttt

SEQ ID NO: 4989742 - DNA, 25 bp, Homo sapien
tcaggtcaagcctctgacagtacaa

SEQ ID NO: 4989743 - DNA, 25 bp, Homo sapien
ctctgacagtacaacctttctggga

SEQ ID NO: 4989744 - DNA, 25 bp, Homo sapien
gcaagtgtccactccaaggtactca

SEQ ID NO: 4989745 - DNA, 25 bp, Homo sapien
tgaaagaagccatgcaagtgtccac

SEQ ID NO: 4989746 - DNA, 25 bp, Homo sapien
gaagccatgcaagtgtccactccaa

SEQ ID NO: 4989747 - DNA, 25 bp, Homo sapien
catgcaagtgtccactccaaggtac

SEQ ID NO: 4989748 - DNA, 25 bp, Homo sapien
gcaatcaacatttttggagatatta

SEQ ID NO: 4989749 - DNA, 25 bp, Homo sapien
ggcaatcaacatttttggagatatt

SEQ ID NO: 4989750 - DNA, 25 bp, Homo sapien
tgcaaatttgggtatcattaaataa

SEQ ID NO: 4989751 - DNA, 25 bp, Homo sapien
tttaagaatcaatccgatatatgca

SEQ ID NO: 4989752 - DNA, 25 bp, Homo sapien
cagaattggtaacagaaacggatac

SEQ ID NO: 4989753 - DNA, 25 bp, Homo sapien
ctcctgctccagaattggtaacaga

SEQ ID NO: 4989754 - DNA, 25 bp, Homo sapien
taacaaatagtgatatcatcagact

SEQ ID NO: 4989755 - DNA, 25 bp, Homo sapien
ataacaaatagtgatatcatcagac

SEQ ID NO: 4989756 - DNA, 25 bp, Homo sapien
aataacaaatagtgatatcatcaga

SEQ ID NO: 4989757 - DNA, 25 bp, Homo sapien
gatcagatgatgacatatagtggaa

SEQ ID NO: 4989758 - DNA, 25 bp, Homo sapien
tgatcagatgatgacatatagtgga

SEQ ID NO: 4989759 - DNA, 25 bp, Homo sapien
tatagtggaagtttgttataagagc

SEQ ID NO: 4989760 - DNA, 25 bp, Homo sapien
aagagcaaagattactttaagagtt

SEQ ID NO: 4989761 - DNA, 25 bp, Homo sapien
gcacacgatggtgcttttaacttca

SEQ ID NO: 4989762 - DNA, 25 bp, Homo sapien
gggcacacgatggtgcttttaactt

SEQ ID NO: 4989763 - DNA, 25 bp, Homo sapien
cctcaaacattccagtgttgatgaa

SEQ ID NO: 4989764 - DNA, 25 bp, Homo sapien
gccctcaaacattccagtgttgatg

SEQ ID NO: 4989765 - DNA, 25 bp, Homo sapien
acaaagtactcatctgatagtccat

SEQ ID NO: 4989766 - DNA, 25 bp, Homo sapien
tacaaaccaggtgaccatggttagc

SEQ ID NO: 4989767 - DNA, 25 bp, Homo sapien
tgaccatggttagctttaatcacgg

SEQ ID NO: 4989768 - DNA, 25 bp, Homo sapien
accaggtgaccatggttagctttaa

SEQ ID NO: 4989769 - DNA, 25 bp, Homo sapien
ccatggttagctttaatcacggcag

SEQ ID NO: 4989770 - DNA, 25 bp, Homo sapien
tgtggctagcttctcgtatgttcag

SEQ ID NO: 4989771 - DNA, 25 bp, Homo sapien
gtggctgaatttgtggctagcttct

SEQ ID NO: 4989772 - DNA, 25 bp, Homo sapien
tagcttctcgtatgttcagttgaga

SEQ ID NO: 4989773 - DNA, 25 bp, Homo sapien
tcgtatgttcagttgagaaaaaagt

SEQ ID NO: 4989774 - DNA, 25 bp, Homo sapien
acaaaataaaatgataaagaaagag

SEQ ID NO: 4989775 - DNA, 25 bp, Homo sapien
caacaaaataaaatgataaagaaag

SEQ ID NO: 4989776 - DNA, 25 bp, Homo sapien
caaaataaaatgataaagaaagagg

SEQ ID NO: 4989777 - DNA, 25 bp, Homo sapien
agaaaggatttttccaccatgtgat

SEQ ID NO: 4989778 - DNA, 25 bp, Homo sapien
tctggaatatcgaggaagggctttc

SEQ ID NO: 4989779 - DNA, 25 bp, Homo sapien
aagggctttcccgtgactaagtcag

SEQ ID NO: 4989780 - DNA, 25 bp, Homo sapien
ccagaaatgagtgatggcatttaca

SEQ ID NO: 4989781 - DNA, 25 bp, Homo sapien
tttctttggccagtcgacacgtttc

SEQ ID NO: 4989782 - DNA, 25 bp, Homo sapien
gatcagcaactctgtagacctcttg

SEQ ID NO: 4989783 - DNA, 25 bp, Homo sapien
tccagctcccgttgtaagtacaatc

SEQ ID NO: 4989784 - DNA, 25 bp, Homo sapien
actgaggtgtctgcaatcacatcca

SEQ ID NO: 4989785 - DNA, 25 bp, Homo sapien
tcttctcaacttgccaaaagccacg

SEQ ID NO: 4989786 - DNA, 25 bp, Homo sapien
ctcttctcaacttgccaaaagccac

SEQ ID NO: 4989787 - DNA, 25 bp, Homo sapien
gcagaaatgctgcactctggtagca

SEQ ID NO: 4989788 - DNA, 25 bp, Homo sapien
actctggtagcacgggcgtccttac

SEQ ID NO: 4989789 - DNA, 25 bp, Homo sapien
aagcaaacaccactcatgtcggtag

SEQ ID NO: 4989790 - DNA, 25 bp, Homo sapien
aagctcgctcttaaataactttggg

SEQ ID NO: 4989791 - DNA, 25 bp, Homo sapien
tgctgtggaaggtcctaggaggacc

SEQ ID NO: 4989792 - DNA, 25 bp, Homo sapien
gcccagttctcctaatcccaaggag

SEQ ID NO: 4989793 - DNA, 25 bp, Homo sapien
tgcccagttctcctaatcccaagga

SEQ ID NO: 4989794 - DNA, 25 bp, Homo sapien
gtcctaggaggacctgcccagttct

SEQ ID NO: 4989795 - DNA, 25 bp, Homo sapien
taaacccagatgtttcgatggatgc

SEQ ID NO: 4989796 - DNA, 25 bp, Homo sapien
gcagtacattcttctctcaggagca

SEQ ID NO: 4989797 - DNA, 25 bp, Homo sapien
tccattttgaggcattgcactggct

SEQ ID NO: 4989798 - DNA, 25 bp, Homo sapien
catattgagaataaaaccccaagcc

SEQ ID NO: 4989799 - DNA, 25 bp, Homo sapien
ggtcctgcgtcctgtaatgcccggg

SEQ ID NO: 4989800 - DNA, 25 bp, Homo sapien
ggagggggtcctgcgtcctgtaatg

SEQ ID NO: 4989801 - DNA, 25 bp, Homo sapien
ctggaggagggggtcctgcgtcctg

SEQ ID NO: 4989802 - DNA, 25 bp, Homo sapien
gggtcctgcgtcctgtaatgcccgg

SEQ ID NO: 4989803 - DNA, 25 bp, Homo sapien
aagactccaaaaagagcacagaacc

SEQ ID NO: 4989804 - DNA, 25 bp, Homo sapien
gactaatactgagcttaaagactcc

SEQ ID NO: 4989805 - DNA, 25 bp, Homo sapien
tttagcatgaaaacgagatagctgc

SEQ ID NO: 4989806 - DNA, 25 bp, Homo sapien
tgaagtcaactatacaaggcaagca

SEQ ID NO: 4989807 - DNA, 25 bp, Homo sapien
tcggcaaagcgcttcaggaaacctc

SEQ ID NO: 4989808 - DNA, 25 bp, Homo sapien
tattttctctgagggtgctggtgcc

SEQ ID NO: 4989809 - DNA, 25 bp, Homo sapien
gaagctcttttagcaggtctgagga

SEQ ID NO: 4989810 - DNA, 25 bp, Homo sapien
tgggcgacctactcttctcatgaag

SEQ ID NO: 4989811 - DNA, 25 bp, Homo sapien
cagccctctgaagtctttcttggta

SEQ ID NO: 4989812 - DNA, 25 bp, Homo sapien
ttctatttaacacatcacttgggta

SEQ ID NO: 4989813 - DNA, 25 bp, Homo sapien
tcttgaaggcacgtatttagtaagc

SEQ ID NO: 4989814 - DNA, 25 bp, Homo sapien
cacttgggtatgataaagagagtac

SEQ ID NO: 4989815 - DNA, 25 bp, Homo sapien
tcaagttgctaacactacacgtgcc

SEQ ID NO: 4989816 - DNA, 25 bp, Homo sapien
cataattttggctaggcaacctcgt

SEQ ID NO: 4989817 - DNA, 25 bp, Homo sapien
tgcatccgagccaaaatcccagaat

SEQ ID NO: 4989818 - DNA, 25 bp, Homo sapien
taattctagcgagacagtcactaag

SEQ ID NO: 4989819 - DNA, 25 bp, Homo sapien
cggtccccagatagtcgcggatccc

SEQ ID NO: 4989820 - DNA, 25 bp, Homo sapien
atagtcgcggatccccgaagctaag

SEQ ID NO: 4989821 - DNA, 25 bp, Homo sapien
cgcggatccccgaagctaagagcca

SEQ ID NO: 4989822 - DNA, 25 bp, Homo sapien
cagatagtcgcggatccccgaagct

SEQ ID NO: 4989823 - DNA, 25 bp, Homo sapien
gacccggtgcgaaccgccatacgcg

SEQ ID NO: 4989824 - DNA, 25 bp, Homo sapien
cggtgggccggaggcagtccgcgta

SEQ ID NO: 4989825 - DNA, 25 bp, Homo sapien
tgtctcacaaggtgcgcaacactcg

SEQ ID NO: 4989826 - DNA, 25 bp, Homo sapien
tactgttgcggaaactctgtctcac

SEQ ID NO: 4989827 - DNA, 25 bp, Homo sapien
tgcacgtcgcgcaatcctggctgca

SEQ ID NO: 4989828 - DNA, 25 bp, Homo sapien
cggccgggcgcactaggcggtagct

SEQ ID NO: 4989829 - DNA, 25 bp, Homo sapien
aggcggtagctgcacgtcgcgcaat

SEQ ID NO: 4989830 - DNA, 25 bp, Homo sapien
attcggcccgcacggtcgccaggag

SEQ ID NO: 4989831 - DNA, 25 bp, Homo sapien
agagggacgcgtgcttcgagcctgc

SEQ ID NO: 4989832 - DNA, 25 bp, Homo sapien
aggagagagggacgcgtgcttcgag

SEQ ID NO: 4989833 - DNA, 25 bp, Homo sapien
agagagggacgcgtgcttcgagcct

SEQ ID NO: 4989834 - DNA, 25 bp, Homo sapien
ctgcgaggagagagggacgcgtgct

SEQ ID NO: 4989835 - DNA, 25 bp, Homo sapien
tcagcaggggatcgtcgagcaaaag

SEQ ID NO: 4989836 - DNA, 25 bp, Homo sapien
agcccgcaggaatgctcctttctgg

SEQ ID NO: 4989837 - DNA, 25 bp, Homo sapien
tcgtcgagcaaaagcccgcaggaat

SEQ ID NO: 4989838 - DNA, 25 bp, Homo sapien
ctcggcaggaccctcgccgcgacag

SEQ ID NO: 4989839 - DNA, 25 bp, Homo sapien
atcgcctcgcggttcccgggatggc

SEQ ID NO: 4989840 - DNA, 25 bp, Homo sapien
cgtggaggcgactcagatcgcctcg

SEQ ID NO: 4989841 - DNA, 25 bp, Homo sapien
gcggttcccgggatggcgcggtcgc

SEQ ID NO: 4989842 - DNA, 25 bp, Homo sapien
ggcgactcagatcgcctcgcggttc

SEQ ID NO: 4989843 - DNA, 25 bp, Homo sapien
acaagcttcgggcaaattcactcac

SEQ ID NO: 4989844 - DNA, 25 bp, Homo sapien
aagattccggagagaacgccgcaga

SEQ ID NO: 4989845 - DNA, 25 bp, Homo sapien
gggaacccatgcaatgaaatgtgaa

SEQ ID NO: 4989846 - DNA, 25 bp, Homo sapien
ccggctcttttcctgggcgtccgcg

SEQ ID NO: 4989847 - DNA, 25 bp, Homo sapien
acgctgttcggatggagcaggccaa

SEQ ID NO: 4989848 - DNA, 25 bp, Homo sapien
agcaggccaattggaaaagccgggt

SEQ ID NO: 4989849 - DNA, 25 bp, Homo sapien
gttgacgctgttcggatggagcagg

SEQ ID NO: 4989850 - DNA, 25 bp, Homo sapien
tggaaaagccgggttcagacacgac

SEQ ID NO: 4989851 - DNA, 25 bp, Homo sapien
ccgggtgtgctggcggacgtagggc

SEQ ID NO: 4989852 - DNA, 25 bp, Homo sapien
ggcaagtgtgaggagggcgggcgtc

SEQ ID NO: 4989853 - DNA, 25 bp, Homo sapien
caagtgtgaggagggcgggcgtcgg

SEQ ID NO: 4989854 - DNA, 25 bp, Homo sapien
gggtgtgctggcggacgtagggcct

SEQ ID NO: 4989855 - DNA, 25 bp, Homo sapien
caggctgcggggctctgagcgcctg

SEQ ID NO: 4989856 - DNA, 25 bp, Homo sapien
cccggggcttaacggctgctggagc

SEQ ID NO: 4989857 - DNA, 25 bp, Homo sapien
ccgtcccggggcttaacggctgctg

SEQ ID NO: 4989858 - DNA, 25 bp, Homo sapien
ctgcggggctctgagcgcctgcctc

SEQ ID NO: 4989859 - DNA, 25 bp, Homo sapien
tggccaagcgtagaagcaggtaaac

SEQ ID NO: 4989860 - DNA, 25 bp, Homo sapien
ttggccaagcgtagaagcaggtaaa

SEQ ID NO: 4989861 - DNA, 25 bp, Homo sapien
ccttggccaagcgtagaagcaggta

SEQ ID NO: 4989862 - DNA, 25 bp, Homo sapien
cttggccaagcgtagaagcaggtaa

SEQ ID NO: 4989863 - DNA, 25 bp, Homo sapien
gggctcccaagtcgaagacctactg

SEQ ID NO: 4989864 - DNA, 25 bp, Homo sapien
tcgaagacctactgccttgagagcg

SEQ ID NO: 4989865 - DNA, 25 bp, Homo sapien
ggagaggatccgtgtttaaccagct

SEQ ID NO: 4989866 - DNA, 25 bp, Homo sapien
ggactgcgcgcttttcagccactgt

SEQ ID NO: 4989867 - DNA, 25 bp, Homo sapien
cctatgcatctatgtctcctagacc

SEQ ID NO: 4989868 - DNA, 25 bp, Homo sapien
ctctgcaaagggctgatttctacag

SEQ ID NO: 4989869 - DNA, 25 bp, Homo sapien
tctacagtcgctaggacctgcagcg

SEQ ID NO: 4989870 - DNA, 25 bp, Homo sapien
cgatgtatccaatccacctatgcat

SEQ ID NO: 4989871 - DNA, 25 bp, Homo sapien
gaggtgctgcctggtcgaaagcatc

SEQ ID NO: 4989872 - DNA, 25 bp, Homo sapien
tgcctggtcgaaagcatctgcactt

SEQ ID NO: 4989873 - DNA, 25 bp, Homo sapien
tcaatgataattgtctgtagaatgt

SEQ ID NO: 4989874 - DNA, 25 bp, Homo sapien
aacatcaatgataattgtctgtaga

SEQ ID NO: 4989875 - DNA, 25 bp, Homo sapien
aaaaagagtttctatgtctggatgt

SEQ ID NO: 4989876 - DNA, 25 bp, Homo sapien
gaaaaaagagtttctatgtctggat

SEQ ID NO: 4989877 - DNA, 25 bp, Homo sapien
aaaaaagagtttctatgtctggatg

SEQ ID NO: 4989878 - DNA, 25 bp, Homo sapien
aaagagtttctatgtctggatgttt

SEQ ID NO: 4989879 - DNA, 25 bp, Homo sapien
tgatgatgaccttctgtgctctgga

SEQ ID NO: 4989880 - DNA, 25 bp, Homo sapien
ccttctgtgctctggaacttctgtt

SEQ ID NO: 4989881 - DNA, 25 bp, Homo sapien
gaccttctgtgctctggaacttctg

SEQ ID NO: 4989882 - DNA, 25 bp, Homo sapien
tgtgatgatgaccttctgtgctctg

SEQ ID NO: 4989883 - DNA, 25 bp, Homo sapien
gagttcttatggtccttgtccttac

SEQ ID NO: 4989884 - DNA, 25 bp, Homo sapien
tggagttcttatggtccttgtcctt

SEQ ID NO: 4989885 - DNA, 25 bp, Homo sapien
ggagttcttatggtccttgtcctta

SEQ ID NO: 4989886 - DNA, 25 bp, Homo sapien
cttgaagactgaccggcttgttttc

SEQ ID NO: 4989887 - DNA, 25 bp, Homo sapien
aagactgaccggcttgttttctggg

SEQ ID NO: 4989888 - DNA, 25 bp, Homo sapien
tgtacaaatgaacatttcccgcagc

SEQ ID NO: 4989889 - DNA, 25 bp, Homo sapien
ctgctatcgcaggtcctccatattt

SEQ ID NO: 4989890 - DNA, 25 bp, Homo sapien
ctatcgcaggtcctccatatttgta

SEQ ID NO: 4989891 - DNA, 25 bp, Homo sapien
ctttacaaagtcacagtggttttca

SEQ ID NO: 4989892 - DNA, 25 bp, Homo sapien
tggtataatgtttaccttgctgtca

SEQ ID NO: 4989893 - DNA, 25 bp, Homo sapien
gtataatgtttaccttgctgtcaag

SEQ ID NO: 4989894 - DNA, 25 bp, Homo sapien
ggtataatgtttaccttgctgtcaa

SEQ ID NO: 4989895 - DNA, 25 bp, Homo sapien
tataatgtttaccttgctgtcaagg

SEQ ID NO: 4989896 - DNA, 25 bp, Homo sapien
agatcaagtgtcttcagagagtggc

SEQ ID NO: 4989897 - DNA, 25 bp, Homo sapien
ggttaagagatcaagtgtcttcaga

SEQ ID NO: 4989898 - DNA, 25 bp, Homo sapien
agagatcaagtgtcttcagagagtg

SEQ ID NO: 4989899 - DNA, 25 bp, Homo sapien
taagagatcaagtgtcttcagagag

SEQ ID NO: 4989900 - DNA, 25 bp, Homo sapien
gcacacacggatgcgagaatcaggg

SEQ ID NO: 4989901 - DNA, 25 bp, Homo sapien
tgaaatgaagtagaggcacacacgg

SEQ ID NO: 4989902 - DNA, 25 bp, Homo sapien
gaagtagaggcacacacggatgcga

SEQ ID NO: 4989903 - DNA, 25 bp, Homo sapien
tgtcagtgaaatgaagtagaggcac

SEQ ID NO: 4989904 - DNA, 25 bp, Homo sapien
tagtcaactatcggttggtagctct

SEQ ID NO: 4989905 - DNA, 25 bp, Homo sapien
agtcaactatcggttggtagctctc

SEQ ID NO: 4989906 - DNA, 25 bp, Homo sapien
gtcaactatcggttggtagctctct

SEQ ID NO: 4989907 - DNA, 25 bp, Homo sapien
catatgtctgaactttaagtttaac

SEQ ID NO: 4989908 - DNA, 25 bp, Homo sapien
caaatcccactgtattcacaatgat

SEQ ID NO: 4989909 - DNA, 25 bp, Homo sapien
tcacaatgatcaatttcaatcgaac

SEQ ID NO: 4989910 - DNA, 25 bp, Homo sapien
tcgaacattactttcctggagttca

SEQ ID NO: 4989911 - DNA, 25 bp, Homo sapien
tgtgaagacatacaagttgttttcg

SEQ ID NO: 4989912 - DNA, 25 bp, Homo sapien
gatccttgtgaagacatacaagttg

SEQ ID NO: 4989913 - DNA, 25 bp, Homo sapien
tccttgtgaagacatacaagttgtt

SEQ ID NO: 4989914 - DNA, 25 bp, Homo sapien
gacatacaagttgttttcgttgcca

SEQ ID NO: 4989915 - DNA, 25 bp, Homo sapien
actgaaagagcaggtgccgcgccac

SEQ ID NO: 4989916 - DNA, 25 bp, Homo sapien
agactgaaagagcaggtgccgcgcc

SEQ ID NO: 4989917 - DNA, 25 bp, Homo sapien
gactgaaagagcaggtgccgcgcca

SEQ ID NO: 4989918 - DNA, 25 bp, Homo sapien
gagactgaaagagcaggtgccgcgc

SEQ ID NO: 4989919 - DNA, 25 bp, Homo sapien
ctttcatgagatgtagatctggtgg

SEQ ID NO: 4989920 - DNA, 25 bp, Homo sapien
catctttcatgagatgtagatctgg

SEQ ID NO: 4989921 - DNA, 25 bp, Homo sapien
tcaatcttccagatgtacatctttc

SEQ ID NO: 4989922 - DNA, 25 bp, Homo sapien
tttcgatactcttttaacgtactca

SEQ ID NO: 4989923 - DNA, 25 bp, Homo sapien
cacccgaacacaagcaaaggctgag

SEQ ID NO: 4989924 - DNA, 25 bp, Homo sapien
gcagaaacaccaaatcactcagacc

SEQ ID NO: 4989925 - DNA, 25 bp, Homo sapien
ttctactctagtcaaaaaaccacag

SEQ ID NO: 4989926 - DNA, 25 bp, Homo sapien
gacttggagccaaataactcagcaa

SEQ ID NO: 4989927 - DNA, 25 bp, Homo sapien
gagagaaggcatgcgcataccatcc

SEQ ID NO: 4989928 - DNA, 25 bp, Homo sapien
tgaaacatgcctcaacccacaatgg

SEQ ID NO: 4989929 - DNA, 25 bp, Homo sapien
tactacccgattgaagaagataggc

SEQ ID NO: 4989930 - DNA, 25 bp, Homo sapien
agatcagcgtgcttcccctcaaagg

SEQ ID NO: 4989931 - DNA, 25 bp, Homo sapien
gttccacagtctgcctagattccgt

SEQ ID NO: 4989932 - DNA, 25 bp, Homo sapien
atcatccaagggcaagaacaaattg

SEQ ID NO: 4989933 - DNA, 25 bp, Homo sapien
gtcaccactactcatatctctatat

SEQ ID NO: 4989934 - DNA, 25 bp, Homo sapien
gattccgtaagggtctgatcatcca

SEQ ID NO: 4989935 - DNA, 25 bp, Homo sapien
ctgacacgaaacaaaagaagtccgt

SEQ ID NO: 4989936 - DNA, 25 bp, Homo sapien
tcctacacatgtacattgaagatgg

SEQ ID NO: 4989937 - DNA, 25 bp, Homo sapien
tttgtaggaagctgaactgacacga

SEQ ID NO: 4989938 - DNA, 25 bp, Homo sapien
tggattgagttccatacttggctgg

SEQ ID NO: 4989939 - DNA, 25 bp, Homo sapien
ccactggccccctcataaccaccat

SEQ ID NO: 4989940 - DNA, 25 bp, Homo sapien
ttcccatctagaccacacatctgcc

SEQ ID NO: 4989941 - DNA, 25 bp, Homo sapien
cacatctgccactggccccctcata

SEQ ID NO: 4989942 - DNA, 25 bp, Homo sapien
tcccatctagaccacacatctgcca

SEQ ID NO: 4989943 - DNA, 25 bp, Homo sapien
ttcttcaacttgacaacccaattct

SEQ ID NO: 4989944 - DNA, 25 bp, Homo sapien
tattgtgatcactcttccagcaggt

SEQ ID NO: 4989945 - DNA, 25 bp, Homo sapien
gagtcagtgtgtcactttcaacagg

SEQ ID NO: 4989946 - DNA, 25 bp, Homo sapien
gtctgcaagttgaaacacatgggca

SEQ ID NO: 4989947 - DNA, 25 bp, Homo sapien
cacatgggcaattaacggtacttca

SEQ ID NO: 4989948 - DNA, 25 bp, Homo sapien
ggaagttcctcatgataccggtgac

SEQ ID NO: 4989949 - DNA, 25 bp, Homo sapien
gctagctggtaacactcctggtaac

SEQ ID NO: 4989950 - DNA, 25 bp, Homo sapien
tcaaccaggttttggcagctagctg

SEQ ID NO: 4989951 - DNA, 25 bp, Homo sapien
caacgactaaaggagtggaagctca

SEQ ID NO: 4989952 - DNA, 25 bp, Homo sapien
gtttagaagcgctgctcttttacca

SEQ ID NO: 4989953 - DNA, 25 bp, Homo sapien
tagtagtcgcgttattttccatgtg

SEQ ID NO: 4989954 - DNA, 25 bp, Homo sapien
ccactttggatgattcctacacttc

SEQ ID NO: 4989955 - DNA, 25 bp, Homo sapien
tgtgaagtcagagtttagaagcgct

SEQ ID NO: 4989956 - DNA, 25 bp, Homo sapien
aggatgacaatagtcatattgaatt

SEQ ID NO: 4989957 - DNA, 25 bp, Homo sapien
atagtcatattgaatttgtgttcca

SEQ ID NO: 4989958 - DNA, 25 bp, Homo sapien
tagtcatattgaatttgtgttccat

SEQ ID NO: 4989959 - DNA, 25 bp, Homo sapien
gacaatagtcatattgaatttgtgt

SEQ ID NO: 4989960 - DNA, 25 bp, Homo sapien
ctggtgatacaacttaccccaaagg

SEQ ID NO: 4989961 - DNA, 25 bp, Homo sapien
tctgttagtgagtgctggtgataca

SEQ ID NO: 4989962 - DNA, 25 bp, Homo sapien
agtctgttagtgagtgctggtgata

SEQ ID NO: 4989963 - DNA, 25 bp, Homo sapien
tgctggtgatacaacttaccccaaa

SEQ ID NO: 4989964 - DNA, 25 bp, Homo sapien
caatgggatggtggaaataagcttc

SEQ ID NO: 4989965 - DNA, 25 bp, Homo sapien
tgggagccgattctccaaggagctc

SEQ ID NO: 4989966 - DNA, 25 bp, Homo sapien
gatactttgaaacacgaaaggctgg

SEQ ID NO: 4989967 - DNA, 25 bp, Homo sapien
tactatctgctccatagaaacctgg

SEQ ID NO: 4989968 - DNA, 25 bp, Homo sapien
agaaacatttcctgtcaactgggct

SEQ ID NO: 4989969 - DNA, 25 bp, Homo sapien
gagaaacatttcctgtcaactgggc

SEQ ID NO: 4989970 - DNA, 25 bp, Homo sapien
ggagaaacatttcctgtcaactggg

SEQ ID NO: 4989971 - DNA, 25 bp, Homo sapien
gcagagatgagacacagcttgggca

SEQ ID NO: 4989972 - DNA, 25 bp, Homo sapien
gagatgagacacagcttgggcagaa

SEQ ID NO: 4989973 - DNA, 25 bp, Homo sapien
cagagatgagacacagcttgggcag

SEQ ID NO: 4989974 - DNA, 25 bp, Homo sapien
atgagacacagcttgggcagaagca

SEQ ID NO: 4989975 - DNA, 25 bp, Homo sapien
taagtatattgaggtagcaggttac

SEQ ID NO: 4989976 - DNA, 25 bp, Homo sapien
gagctcctcagtcataagtatattg

SEQ ID NO: 4989977 - DNA, 25 bp, Homo sapien
gctcctcagtcataagtatattgag

SEQ ID NO: 4989978 - DNA, 25 bp, Homo sapien
ataagtatattgaggtagcaggtta

SEQ ID NO: 4989979 - DNA, 25 bp, Homo sapien
ttcttctcgtagagagaagaggacc

SEQ ID NO: 4989980 - DNA, 25 bp, Homo sapien
tcttctcgtagagagaagaggacct

SEQ ID NO: 4989981 - DNA, 25 bp, Homo sapien
attcttctcgtagagagaagaggac

SEQ ID NO: 4989982 - DNA, 25 bp, Homo sapien
aaagcaagaccaattatctcccact

SEQ ID NO: 4989983 - DNA, 25 bp, Homo sapien
gagggacaacaaccacaacgtcagc

SEQ ID NO: 4989984 - DNA, 25 bp, Homo sapien
gggtgccgagggacaacaaccacaa

SEQ ID NO: 4989985 - DNA, 25 bp, Homo sapien
accacaacgtcagccattaacagca

SEQ ID NO: 4989986 - DNA, 25 bp, Homo sapien
ggacaacaaccacaacgtcagccat

SEQ ID NO: 4989987 - DNA, 25 bp, Homo sapien
tggaccactgctttgccttccatca

SEQ ID NO: 4989988 - DNA, 25 bp, Homo sapien
tttgccttccatcagtgacaatgag

SEQ ID NO: 4989989 - DNA, 25 bp, Homo sapien
tgccttccatcagtgacaatgagcc

SEQ ID NO: 4989990 - DNA, 25 bp, Homo sapien
tggtgtggctgcctggaccactgct

SEQ ID NO: 4989991 - DNA, 25 bp, Homo sapien
tacatgtgatttctggtgctcactc

SEQ ID NO: 4989992 - DNA, 25 bp, Homo sapien
ggctgattatatctgactgctggta

SEQ ID NO: 4989993 - DNA, 25 bp, Homo sapien
cctgggatctaggacgagtcatttc

SEQ ID NO: 4989994 - DNA, 25 bp, Homo sapien
tgctcactcttcactagacctggga

SEQ ID NO: 4989995 - DNA, 25 bp, Homo sapien
tattatttagtagaaggcttgaggg

SEQ ID NO: 4989996 - DNA, 25 bp, Homo sapien
gggagaaagtatcattagaataata

SEQ ID NO: 4989997 - DNA, 25 bp, Homo sapien
gcttgaggggagaaagtatcattag

SEQ ID NO: 4989998 - DNA, 25 bp, Homo sapien
gaggggagaaagtatcattagaata

SEQ ID NO: 4989999 - DNA, 25 bp, Homo sapien
gcaagctggctttctcattttgctc

SEQ ID NO: 4990000 - DNA, 25 bp, Homo sapien
tggctttctcattttgctccaatag

SEQ ID NO: 4990001 - DNA, 25 bp, Homo sapien
gctttctcattttgctccaatagtc

SEQ ID NO: 4990002 - DNA, 25 bp, Homo sapien
ctgcaagctggctttctcattttgc

SEQ ID NO: 4990003 - DNA, 25 bp, Homo sapien
gcctttctaaaaggcagcaaccgaa

SEQ ID NO: 4990004 - DNA, 25 bp, Homo sapien
gattgtgggcaagcctttctaaaag

SEQ ID NO: 4990005 - DNA, 25 bp, Homo sapien
ggctctgtctggcttgtggattgtg

SEQ ID NO: 4990006 - DNA, 25 bp, Homo sapien
aaggcagcaaccgaaccctgtttgc

SEQ ID NO: 4990007 - DNA, 25 bp, Homo sapien
tggtctgggccccaagatgaccagg

SEQ ID NO: 4990008 - DNA, 25 bp, Homo sapien
gtctgggccccaagatgaccaggaa

SEQ ID NO: 4990009 - DNA, 25 bp, Homo sapien
ctggtggtctgggccccaagatgac

SEQ ID NO: 4990010 - DNA, 25 bp, Homo sapien
ggtggtctgggccccaagatgacca

SEQ ID NO: 4990011 - DNA, 25 bp, Homo sapien
cctggggccaacagtgcacagaatg

SEQ ID NO: 4990012 - DNA, 25 bp, Homo sapien
tgtgtctgataaggccctccgtgtg

SEQ ID NO: 4990013 - DNA, 25 bp, Homo sapien
ggaaaggctatgagcacttgagtgc

SEQ ID NO: 4990014 - DNA, 25 bp, Homo sapien
gcacttgagtgctaatactgtggtc

SEQ ID NO: 4990015 - DNA, 25 bp, Homo sapien
ttccattttggacgtacagacggtc

SEQ ID NO: 4990016 - DNA, 25 bp, Homo sapien
gacggtcactcaaattcgcacttca

SEQ ID NO: 4990017 - DNA, 25 bp, Homo sapien
ctgttaaggagttacacatgaaata

SEQ ID NO: 4990018 - DNA, 25 bp, Homo sapien
gaaagaagtagtctgatgaatgcca

SEQ ID NO: 4990019 - DNA, 25 bp, Homo sapien
gaattgtgctctcgagctcacaaag

SEQ ID NO: 4990020 - DNA, 25 bp, Homo sapien
ctggggagcccacatgctagtcagg

SEQ ID NO: 4990021 - DNA, 25 bp, Homo sapien
agccctttgttgagctccattgcat

SEQ ID NO: 4990022 - DNA, 25 bp, Homo sapien
atttgttcttcacctgcaccctgca

SEQ ID NO: 4990023 - DNA, 25 bp, Homo sapien
tctgaagtgatgcttgcagcaaggc

SEQ ID NO: 4990024 - DNA, 25 bp, Homo sapien
tggaggtgcaagtagtttctctctc

SEQ ID NO: 4990025 - DNA, 25 bp, Homo sapien
gcaccaggttgattagagcataaca

SEQ ID NO: 4990026 - DNA, 25 bp, Homo sapien
tttgggcctttatggacaagcagag

SEQ ID NO: 4990027 - DNA, 25 bp, Homo sapien
cacagaaaaggtgcccatccagtcc

SEQ ID NO: 4990028 - DNA, 25 bp, Homo sapien
cggtgactaccgtgtgctgccattt

SEQ ID NO: 4990029 - DNA, 25 bp, Homo sapien
agtggttttgcggtgactaccgtgt

SEQ ID NO: 4990030 - DNA, 25 bp, Homo sapien
agagcacagaaaaggtgcccatcca

SEQ ID NO: 4990031 - DNA, 25 bp, Homo sapien
cagccagctgaggtagcaaatgcaa

SEQ ID NO: 4990032 - DNA, 25 bp, Homo sapien
gcaaatgcaacagcttggcggatcc

SEQ ID NO: 4990033 - DNA, 25 bp, Homo sapien
tggcggatccaactgcaaagtctgc

SEQ ID NO: 4990034 - DNA, 25 bp, Homo sapien
gttaagtattcctccagcgtgccca

SEQ ID NO: 4990035 - DNA, 25 bp, Homo sapien
acagtctgagaagtagccacactct

SEQ ID NO: 4990036 - DNA, 25 bp, Homo sapien
gtctgagaagtagccacactctcat

SEQ ID NO: 4990037 - DNA, 25 bp, Homo sapien
cttgaacagccggtgaactgctatc

SEQ ID NO: 4990038 - DNA, 25 bp, Homo sapien
tgaactgctatccacagtctgagaa

SEQ ID NO: 4990039 - DNA, 25 bp, Homo sapien
ttttccagaacagcctatccagggg

SEQ ID NO: 4990040 - DNA, 25 bp, Homo sapien
gaaccggatggctcctatcactggg

SEQ ID NO: 4990041 - DNA, 25 bp, Homo sapien
aaggagctggaaccggatggctcct

SEQ ID NO: 4990042 - DNA, 25 bp, Homo sapien
gcctatccaggggtcatacacttcc

SEQ ID NO: 4990043 - DNA, 25 bp, Homo sapien
acttcacctccatgagcacgggctg

SEQ ID NO: 4990044 - DNA, 25 bp, Homo sapien
acctccatgagcacgggctgcactg

SEQ ID NO: 4990045 - DNA, 25 bp, Homo sapien
ctccgcttctctgtatgtgtcactc

SEQ ID NO: 4990046 - DNA, 25 bp, Homo sapien
tctctgtatgtgtcactcttgcagg

SEQ ID NO: 4990047 - DNA, 25 bp, Homo sapien
ggtacttagtggaagcaggatttca

SEQ ID NO: 4990048 - DNA, 25 bp, Homo sapien
agtctggccccggtctctgtgcttt

SEQ ID NO: 4990049 - DNA, 25 bp, Homo sapien
ggctgaggagtctggccccggtctc

SEQ ID NO: 4990050 - DNA, 25 bp, Homo sapien
acccagctggtacttagtggaagca

SEQ ID NO: 4990051 - DNA, 25 bp, Homo sapien
tgcttctcggccacccttgcgacat

SEQ ID NO: 4990052 - DNA, 25 bp, Homo sapien
gccacccttgcgacatcatcttcca

SEQ ID NO: 4990053 - DNA, 25 bp, Homo sapien
tcggccacccttgcgacatcatctt

SEQ ID NO: 4990054 - DNA, 25 bp, Homo sapien
ttctcggccacccttgcgacatcat

SEQ ID NO: 4990055 - DNA, 25 bp, Homo sapien
gcaggaatgccagacttattagaaa

SEQ ID NO: 4990056 - DNA, 25 bp, Homo sapien
ggcaggaatgccagacttattagaa

SEQ ID NO: 4990057 - DNA, 25 bp, Homo sapien
aagagcctcggataaggcagtgctg

SEQ ID NO: 4990058 - DNA, 25 bp, Homo sapien
gggatcattgtggagtttaccattg

SEQ ID NO: 4990059 - DNA, 25 bp, Homo sapien
gtggagtttaccattgtcatcctga

SEQ ID NO: 4990060 - DNA, 25 bp, Homo sapien
aggaaagagcctcggataaggcagt

SEQ ID NO: 4990061 - DNA, 25 bp, Homo sapien
aatggagtgtcggaggtgcacatac

SEQ ID NO: 4990062 - DNA, 25 bp, Homo sapien
tgttgtgcacaaagcaatggagtgt

SEQ ID NO: 4990063 - DNA, 25 bp, Homo sapien
tcccaagttgttgtatgataacagc

SEQ ID NO: 4990064 - DNA, 25 bp, Homo sapien
taattaaacacgatggcaccagcca

SEQ ID NO: 4990065 - DNA, 25 bp, Homo sapien
gtcagggacattccctgggtgcaca

SEQ ID NO: 4990066 - DNA, 25 bp, Homo sapien
cagaagtggtgcgaatcagggtaca

SEQ ID NO: 4990067 - DNA, 25 bp, Homo sapien
tcagctggtggctcggtgtcgggcc

SEQ ID NO: 4990068 - DNA, 25 bp, Homo sapien
tcgggccttcctgggacgctaatgg

SEQ ID NO: 4990069 - DNA, 25 bp, Homo sapien
gacgaaataccaccagaactggtca

SEQ ID NO: 4990070 - DNA, 25 bp, Homo sapien
ggctaaaagacgaaataccaccaga

SEQ ID NO: 4990071 - DNA, 25 bp, Homo sapien
caccagaactggtcaaatgaggcac

SEQ ID NO: 4990072 - DNA, 25 bp, Homo sapien
actggagtaccaaggctaaaagacg

SEQ ID NO: 4990073 - DNA, 25 bp, Homo sapien
gttcccagagttgatgtaaatattt

SEQ ID NO: 4990074 - DNA, 25 bp, Homo sapien
tttgcataggccaggtgtaagttcc

SEQ ID NO: 4990075 - DNA, 25 bp, Homo sapien
cataggccaggtgtaagttcccaga

SEQ ID NO: 4990076 - DNA, 25 bp, Homo sapien
atgtgtttgcataggccaggtgtaa

SEQ ID NO: 4990077 - DNA, 25 bp, Homo sapien
cacggatccacttcaggacttctgt

SEQ ID NO: 4990078 - DNA, 25 bp, Homo sapien
cacagcacctttgcttggaggatcc

SEQ ID NO: 4990079 - DNA, 25 bp, Homo sapien
tcagaccttccagcaattcacggat

SEQ ID NO: 4990080 - DNA, 25 bp, Homo sapien
gaggatcctttgagcagtcatgccg

SEQ ID NO: 4990081 - DNA, 25 bp, Homo sapien
ctgacttaatgagctaaatgcagga

SEQ ID NO: 4990082 - DNA, 25 bp, Homo sapien
caaaagttaaaagtggttccagcag

SEQ ID NO: 4990083 - DNA, 25 bp, Homo sapien
gcacatgcggtggttctgtctcctg

SEQ ID NO: 4990084 - DNA, 25 bp, Homo sapien
ttaatgagctaaatgcaggaaggtt

SEQ ID NO: 4990085 - DNA, 25 bp, Homo sapien
gagccagcactctacatagacacag

SEQ ID NO: 4990086 - DNA, 25 bp, Homo sapien
agagccagcactctacatagacaca

SEQ ID NO: 4990087 - DNA, 25 bp, Homo sapien
gccagcactctacatagacacagag

SEQ ID NO: 4990088 - DNA, 25 bp, Homo sapien
agcactctacatagacacagagctt

SEQ ID NO: 4990089 - DNA, 25 bp, Homo sapien
aatctgtccttagggtgtcatttcc

SEQ ID NO: 4990090 - DNA, 25 bp, Homo sapien
ttagccataatctgtccttagggtg

SEQ ID NO: 4990091 - DNA, 25 bp, Homo sapien
gccataatctgtccttagggtgtca

SEQ ID NO: 4990092 - DNA, 25 bp, Homo sapien
ccttagggtgtcatttcctagcaac

SEQ ID NO: 4990093 - DNA, 25 bp, Homo sapien
attacgataggaccgcagcaaggag

SEQ ID NO: 4990094 - DNA, 25 bp, Homo sapien
tgaaagcagattacgataggaccgc

SEQ ID NO: 4990095 - DNA, 25 bp, Homo sapien
tctgaaagcagattacgataggacc

SEQ ID NO: 4990096 - DNA, 25 bp, Homo sapien
gcagattacgataggaccgcagcaa

SEQ ID NO: 4990097 - DNA, 25 bp, Homo sapien
gtcagcactcaaggatccccgaata

SEQ ID NO: 4990098 - DNA, 25 bp, Homo sapien
tctctcctatagctgggcagcactg

SEQ ID NO: 4990099 - DNA, 25 bp, Homo sapien
ggcagcactgcggaacctatttttg

SEQ ID NO: 4990100 - DNA, 25 bp, Homo sapien
aaacctcttactaatctttggcaag

SEQ ID NO: 4990101 - DNA, 25 bp, Homo sapien
gagggctagacatacgggaaagtaa

SEQ ID NO: 4990102 - DNA, 25 bp, Homo sapien
gatactgggcaatcttgtgagcagg

SEQ ID NO: 4990103 - DNA, 25 bp, Homo sapien
taagaccactgggatatagctcggc

SEQ ID NO: 4990104 - DNA, 25 bp, Homo sapien
gaggcaaggcccgaatgctctcagt

SEQ ID NO: 4990105 - DNA, 25 bp, Homo sapien
tcccaagcattgtcatgaggcggcc

SEQ ID NO: 4990106 - DNA, 25 bp, Homo sapien
ttgggcctaggccagttttagagga

SEQ ID NO: 4990107 - DNA, 25 bp, Homo sapien
ccagttttagaggagttcccaagca

SEQ ID NO: 4990108 - DNA, 25 bp, Homo sapien
agtgtgctcactggatgggatggcc

SEQ ID NO: 4990109 - DNA, 25 bp, Homo sapien
gatatctgggtaagaaacttgtcag

SEQ ID NO: 4990110 - DNA, 25 bp, Homo sapien
tctgcattctgggtcttgatatctg

SEQ ID NO: 4990111 - DNA, 25 bp, Homo sapien
aaagagccagtgtcgtttgatgact

SEQ ID NO: 4990112 - DNA, 25 bp, Homo sapien
gtcagacatgtctccttgattccag

SEQ ID NO: 4990113 - DNA, 25 bp, Homo sapien
tggagcattccttatctggcaaaag

SEQ ID NO: 4990114 - DNA, 25 bp, Homo sapien
ggagcactatggctgttggagcatt

SEQ ID NO: 4990115 - DNA, 25 bp, Homo sapien
ctcttttttgtaacaggaggatcgg

SEQ ID NO: 4990116 - DNA, 25 bp, Homo sapien
taacaggaggatcggggagcactat

SEQ ID NO: 4990117 - DNA, 25 bp, Homo sapien
cacagctgcattagggatgactcct

SEQ ID NO: 4990118 - DNA, 25 bp, Homo sapien
gcattagggatgactcctaggtact

SEQ ID NO: 4990119 - DNA, 25 bp, Homo sapien
gctccatacgcaggcatttcacagc

SEQ ID NO: 4990120 - DNA, 25 bp, Homo sapien
cttcctgctccatacgcaggcattt

SEQ ID NO: 4990121 - DNA, 25 bp, Homo sapien
ctgggtagaaagatgaacaacagga

SEQ ID NO: 4990122 - DNA, 25 bp, Homo sapien
aggagctcattggaagggctcccat

SEQ ID NO: 4990123 - DNA, 25 bp, Homo sapien
gaaagatgaacaacaggagctcatt

SEQ ID NO: 4990124 - DNA, 25 bp, Homo sapien
aacaacaggagctcattggaagggc

SEQ ID NO: 4990125 - DNA, 25 bp, Homo sapien
tggcgtctctgcgacgaggtgccat

SEQ ID NO: 4990126 - DNA, 25 bp, Homo sapien
tgccatggctggcagtgtagacgcc

SEQ ID NO: 4990127 - DNA, 25 bp, Homo sapien
gggcactcttctacgtggctggcgt

SEQ ID NO: 4990128 - DNA, 25 bp, Homo sapien
gccccggtgtgtggcgagttttcca

SEQ ID NO: 4990129 - DNA, 25 bp, Homo sapien
caagggcagtctgttgcagcagtct

SEQ ID NO: 4990130 - DNA, 25 bp, Homo sapien
tgacaatctgtctataggctgcttc

SEQ ID NO: 4990131 - DNA, 25 bp, Homo sapien
tgatgagttgaccagaggagcagcc

SEQ ID NO: 4990132 - DNA, 25 bp, Homo sapien
ccagagcgctgtgagaatttgcagg

SEQ ID NO: 4990133 - DNA, 25 bp, Homo sapien
acaatgaatactgtcttggagatgt

SEQ ID NO: 4990134 - DNA, 25 bp, Homo sapien
atacaatgaatactgtcttggagat

SEQ ID NO: 4990135 - DNA, 25 bp, Homo sapien
tgaaatactcaattgttacatttaa

SEQ ID NO: 4990136 - DNA, 25 bp, Homo sapien
tgctgagaccaattcctgacacctg

SEQ ID NO: 4990137 - DNA, 25 bp, Homo sapien
caccgtcagtctagttgatgctaag

SEQ ID NO: 4990138 - DNA, 25 bp, Homo sapien
ggctcagttgcagctggtccctggc

SEQ ID NO: 4990139 - DNA, 25 bp, Homo sapien
tcagcccacactaggctctgcagag

SEQ ID NO: 4990140 - DNA, 25 bp, Homo sapien
gaaggtcagttgcatgctgtccctg

SEQ ID NO: 4990141 - DNA, 25 bp, Homo sapien
ggaatcccgccttcctatgctgaag

SEQ ID NO: 4990142 - DNA, 25 bp, Homo sapien
tccaagttactcaagggaaagtcat

SEQ ID NO: 4990143 - DNA, 25 bp, Homo sapien
gaagacagacttcccaaactgggtg

SEQ ID NO: 4990144 - DNA, 25 bp, Homo sapien
tcatttaccagagcgaaatatcagg

SEQ ID NO: 4990145 - DNA, 25 bp, Homo sapien
agtcctttgccactgaagttggggc

SEQ ID NO: 4990146 - DNA, 25 bp, Homo sapien
tcatggacttgagtcctttgccact

SEQ ID NO: 4990147 - DNA, 25 bp, Homo sapien
tttggatgggctgagccacagctga

SEQ ID NO: 4990148 - DNA, 25 bp, Homo sapien
gggctgtccgcatggggtggtttgg

SEQ ID NO: 4990149 - DNA, 25 bp, Homo sapien
taacagagagtaggaagctctcttt

SEQ ID NO: 4990150 - DNA, 25 bp, Homo sapien
ctttggtatattgacgttgttttga

SEQ ID NO: 4990151 - DNA, 25 bp, Homo sapien
aacagagagtaggaagctctctttg

SEQ ID NO: 4990152 - DNA, 25 bp, Homo sapien
tggtatattgacgttgttttgaagt

SEQ ID NO: 4990153 - DNA, 25 bp, Homo sapien
cacggggagtgggtgccaattttga

SEQ ID NO: 4990154 - DNA, 25 bp, Homo sapien
cggggagtgggtgccaattttgatg

SEQ ID NO: 4990155 - DNA, 25 bp, Homo sapien
gggagtgggtgccaattttgatggg

SEQ ID NO: 4990156 - DNA, 25 bp, Homo sapien
ggagtgggtgccaattttgatggga

SEQ ID NO: 4990157 - DNA, 25 bp, Homo sapien
agacaatagaattgcttgagacggg

SEQ ID NO: 4990158 - DNA, 25 bp, Homo sapien
ggaagctgagacaatagaattgctt

SEQ ID NO: 4990159 - DNA, 25 bp, Homo sapien
gaggcagaggttgcggtgagctgag

SEQ ID NO: 4990160 - DNA, 25 bp, Homo sapien
tgagacaatagaattgcttgagacg

SEQ ID NO: 4990161 - DNA, 25 bp, Homo sapien
gaacaattgaccacatgcccaatgc

SEQ ID NO: 4990162 - DNA, 25 bp, Homo sapien
caggtattaagagtggtatgaagaa

SEQ ID NO: 4990163 - DNA, 25 bp, Homo sapien
gacttgccatgaagagtccgaacaa

SEQ ID NO: 4990164 - DNA, 25 bp, Homo sapien
gagtccgaacaattgaccacatgcc

SEQ ID NO: 4990165 - DNA, 25 bp, Homo sapien
cctcctgaccttctcccgctgagaa

SEQ ID NO: 4990166 - DNA, 25 bp, Homo sapien
gcagctctagtcttgcaagaggatc

SEQ ID NO: 4990167 - DNA, 25 bp, Homo sapien
ccattttgagatcctaacattgagg

SEQ ID NO: 4990168 - DNA, 25 bp, Homo sapien
cccaggcctgccactattttttcac

SEQ ID NO: 4990169 - DNA, 25 bp, Homo sapien
agccaagacgttcttatgacttcca

SEQ ID NO: 4990170 - DNA, 25 bp, Homo sapien
gacttccagtatgtcctaagttaac

SEQ ID NO: 4990171 - DNA, 25 bp, Homo sapien
gccttatttaaacgggctgtgaaga

SEQ ID NO: 4990172 - DNA, 25 bp, Homo sapien
cctaagttaacagaaagagcataat

SEQ ID NO: 4990173 - DNA, 25 bp, Homo sapien
caatcgtctcctcagaagacgagcc

SEQ ID NO: 4990174 - DNA, 25 bp, Homo sapien
tcaatcgtctcctcagaagacgagc

SEQ ID NO: 4990175 - DNA, 25 bp, Homo sapien
atcgtctcctcagaagacgagccat

SEQ ID NO: 4990176 - DNA, 25 bp, Homo sapien
aatcgtctcctcagaagacgagcca

SEQ ID NO: 4990177 - DNA, 25 bp, Homo sapien
cacaagacggttggcaaactatcag

SEQ ID NO: 4990178 - DNA, 25 bp, Homo sapien
cagtttgggtacagacacacaagga

SEQ ID NO: 4990179 - DNA, 25 bp, Homo sapien
gatcataccggaataggttgggccc

SEQ ID NO: 4990180 - DNA, 25 bp, Homo sapien
cagccctagaaaactgatgcaagta

SEQ ID NO: 4990181 - DNA, 25 bp, Homo sapien
cctgacattttgattagactaccta

SEQ ID NO: 4990182 - DNA, 25 bp, Homo sapien
gactcaagttcatgcaaattataga

SEQ ID NO: 4990183 - DNA, 25 bp, Homo sapien
aattatgagcattacaggaatcctg

SEQ ID NO: 4990184 - DNA, 25 bp, Homo sapien
tctggttggaaacacttttaattgc

SEQ ID NO: 4990185 - DNA, 25 bp, Homo sapien
tatgcacctcttaaacaaatttaaa

SEQ ID NO: 4990186 - DNA, 25 bp, Homo sapien
ttttcattgctcaagatgctgactt

SEQ ID NO: 4990187 - DNA, 25 bp, Homo sapien
aaatcaaaaggaactacacatgcaa

SEQ ID NO: 4990188 - DNA, 25 bp, Homo sapien
aataatttttcattgctcaagatgc

SEQ ID NO: 4990189 - DNA, 25 bp, Homo sapien
aattcgccagcgttcagagcaagcc

SEQ ID NO: 4990190 - DNA, 25 bp, Homo sapien
gcctccatatgcaattgtagcctgg

SEQ ID NO: 4990191 - DNA, 25 bp, Homo sapien
tagtgaattccagaacaccggccac

SEQ ID NO: 4990192 - DNA, 25 bp, Homo sapien
tgtagcctggacctggagagtgttc

SEQ ID NO: 4990193 - DNA, 25 bp, Homo sapien
cattatctacagcaaattgcctggg

SEQ ID NO: 4990194 - DNA, 25 bp, Homo sapien
cagagaattcaaatttcgtttggca

SEQ ID NO: 4990195 - DNA, 25 bp, Homo sapien
agacatgaccaatttattcagagaa

SEQ ID NO: 4990196 - DNA, 25 bp, Homo sapien
gcttatacaaccaaggcacaaaata

SEQ ID NO: 4990197 - DNA, 25 bp, Homo sapien
ggtcataacacgctaagtaaactgg

SEQ ID NO: 4990198 - DNA, 25 bp, Homo sapien
tactgccggtagtggacaatatggc

SEQ ID NO: 4990199 - DNA, 25 bp, Homo sapien
catgtgacggcaacagctaatggtc

SEQ ID NO: 4990200 - DNA, 25 bp, Homo sapien
tgaagtccacactgccaaaagggaa

SEQ ID NO: 4990201 - DNA, 25 bp, Homo sapien
gatctatcctggtctaatattatta

SEQ ID NO: 4990202 - DNA, 25 bp, Homo sapien
ctgtgatctatcctggtctaatatt

SEQ ID NO: 4990203 - DNA, 25 bp, Homo sapien
gtgatctatcctggtctaatattat

SEQ ID NO: 4990204 - DNA, 25 bp, Homo sapien
aaactgtgatctatcctggtctaat

SEQ ID NO: 4990205 - DNA, 25 bp, Homo sapien
taatagtgaactaggcctcctccag

SEQ ID NO: 4990206 - DNA, 25 bp, Homo sapien
gatgcttataccacaggactctggc

SEQ ID NO: 4990207 - DNA, 25 bp, Homo sapien
cacaaaatattcaaagggagcacct

SEQ ID NO: 4990208 - DNA, 25 bp, Homo sapien
taaagtatgcacattccaccaggct

SEQ ID NO: 4990209 - DNA, 25 bp, Homo sapien
ctctattttaatctgaggggaaatt

SEQ ID NO: 4990210 - DNA, 25 bp, Homo sapien
tctattttaatctgaggggaaatta

SEQ ID NO: 4990211 - DNA, 25 bp, Homo sapien
tctctattttaatctgaggggaaat

SEQ ID NO: 4990212 - DNA, 25 bp, Homo sapien
ttctctattttaatctgaggggaaa

SEQ ID NO: 4990213 - DNA, 25 bp, Homo sapien
tggcaaaagcaaccatactcattct

SEQ ID NO: 4990214 - DNA, 25 bp, Homo sapien
accatggcaaaagcaaccatactca

SEQ ID NO: 4990215 - DNA, 25 bp, Homo sapien
aagcaaccatggcaaaagcaaccat

SEQ ID NO: 4990216 - DNA, 25 bp, Homo sapien
aagcaaccatactcattcttgataa

SEQ ID NO: 4990217 - DNA, 25 bp, Homo sapien
ccagctggtgaacctgttattaaaa

SEQ ID NO: 4990218 - DNA, 25 bp, Homo sapien
ccaaaactatagtgctaaccctgaa

SEQ ID NO: 4990219 - DNA, 25 bp, Homo sapien
tgtctctattttctaccagctggtg

SEQ ID NO: 4990220 - DNA, 25 bp, Homo sapien
tgtgctttccatccaaattagaggt

SEQ ID NO: 4990221 - DNA, 25 bp, Homo sapien
tatgcgccttgtgtatgacaactgt

SEQ ID NO: 4990222 - DNA, 25 bp, Homo sapien
gctgtgaagaactgtaccctgtaat

SEQ ID NO: 4990223 - DNA, 25 bp, Homo sapien
cagcatctcaggctaaccatttcag

SEQ ID NO: 4990224 - DNA, 25 bp, Homo sapien
aaagttcgggatggccttaaccatg

SEQ ID NO: 4990225 - DNA, 25 bp, Homo sapien
tcatttatgtcctgtcttttctaga

SEQ ID NO: 4990226 - DNA, 25 bp, Homo sapien
atgtcctgtcttttctagatctggg

SEQ ID NO: 4990227 - DNA, 25 bp, Homo sapien
tttctagatctgggagttttctgac

SEQ ID NO: 4990228 - DNA, 25 bp, Homo sapien
ttatgtcctgtcttttctagatctg

SEQ ID NO: 4990229 - DNA, 25 bp, Homo sapien
tcaccactcagggtagtcatatgcc

SEQ ID NO: 4990230 - DNA, 25 bp, Homo sapien
cccctagggcttttaagatggcatt

SEQ ID NO: 4990231 - DNA, 25 bp, Homo sapien
tcttatcaggcacatccaaaagtgc

SEQ ID NO: 4990232 - DNA, 25 bp, Homo sapien
cattctgatgctagcaaggagtccc

SEQ ID NO: 4990233 - DNA, 25 bp, Homo sapien
aaagtagcatacttttttgattaag

SEQ ID NO: 4990234 - DNA, 25 bp, Homo sapien
aaatacattgcaaagtaacttattg

SEQ ID NO: 4990235 - DNA, 25 bp, Homo sapien
tagcaggatggagtgtgcaggagct

SEQ ID NO: 4990236 - DNA, 25 bp, Homo sapien
tgattaagtatcctgttaaaatagc

SEQ ID NO: 4990237 - DNA, 25 bp, Homo sapien
gagaaaccactgttgtgagactgct

SEQ ID NO: 4990238 - DNA, 25 bp, Homo sapien
aatatacgataaggtgggtgcgcac

SEQ ID NO: 4990239 - DNA, 25 bp, Homo sapien
taatacttatgatgactcctggcgt

SEQ ID NO: 4990240 - DNA, 25 bp, Homo sapien
gagtgactaaaatcccaccctcgag

SEQ ID NO: 4990241 - DNA, 25 bp, Homo sapien
ggaacgagacacaacgatccttggg

SEQ ID NO: 4990242 - DNA, 25 bp, Homo sapien
ccaccagctgggataattgtagtct

SEQ ID NO: 4990243 - DNA, 25 bp, Homo sapien
gaagagcgacctgtttgaccatccc

SEQ ID NO: 4990244 - DNA, 25 bp, Homo sapien
tcattgtaggaagagcgggctttca

SEQ ID NO: 4990245 - DNA, 25 bp, Homo sapien
gaatattagctcaatctcctaagtg

SEQ ID NO: 4990246 - DNA, 25 bp, Homo sapien
caacctgcaacataagcacaagtaa

SEQ ID NO: 4990247 - DNA, 25 bp, Homo sapien
tacatatcagccttatcagagagta

SEQ ID NO: 4990248 - DNA, 25 bp, Homo sapien
gattcctggagaacccaacctgcaa

SEQ ID NO: 4990249 - DNA, 25 bp, Homo sapien
catggctagtaatgaaaccagctgc

SEQ ID NO: 4990250 - DNA, 25 bp, Homo sapien
tatagtccaccatggctagtaatga

SEQ ID NO: 4990251 - DNA, 25 bp, Homo sapien
cagggcaagatatagtccaccatgg

SEQ ID NO: 4990252 - DNA, 25 bp, Homo sapien
atgaaaccagctgcatcaccagctt

SEQ ID NO: 4990253 - DNA, 25 bp, Homo sapien
gctggcccaaacagggataagaagt

SEQ ID NO: 4990254 - DNA, 25 bp, Homo sapien
tcccacaatagctggcccaaacagg

SEQ ID NO: 4990255 - DNA, 25 bp, Homo sapien
ggataagaagtataaaactgcaatg

SEQ ID NO: 4990256 - DNA, 25 bp, Homo sapien
ttccattaatcccacaatagctggc

SEQ ID NO: 4990257 - DNA, 25 bp, Homo sapien
gcttatgtataactcctagcatggg

SEQ ID NO: 4990258 - DNA, 25 bp, Homo sapien
ctgtatattcggaaaatggcttatg

SEQ ID NO: 4990259 - DNA, 25 bp, Homo sapien
tagcatgggtttaccatttacagcc

SEQ ID NO: 4990260 - DNA, 25 bp, Homo sapien
gtagtgacgtactttcgaagatcct

SEQ ID NO: 4990261 - DNA, 25 bp, Homo sapien
caagtgggtcaatccagacagtaac

SEQ ID NO: 4990262 - DNA, 25 bp, Homo sapien
tatattcctgtgtagcatcaagtgg

SEQ ID NO: 4990263 - DNA, 25 bp, Homo sapien
gcatccacgtgttcctcagtattaa

SEQ ID NO: 4990264 - DNA, 25 bp, Homo sapien
gacagtaacactttctgctggtacc

SEQ ID NO: 4990265 - DNA, 25 bp, Homo sapien
caagctccctttccagagtaggtca

SEQ ID NO: 4990266 - DNA, 25 bp, Homo sapien
tctcagcaggacaggctgttgggtc

SEQ ID NO: 4990267 - DNA, 25 bp, Homo sapien
tgttgggtcctgtgctttctgacaa

SEQ ID NO: 4990268 - DNA, 25 bp, Homo sapien
gctttctgacaagctccctttccag

SEQ ID NO: 4990269 - DNA, 25 bp, Homo sapien
gcagagggtcctagtcattgcagta

SEQ ID NO: 4990270 - DNA, 25 bp, Homo sapien
acagagccagttgccctccatcata

SEQ ID NO: 4990271 - DNA, 25 bp, Homo sapien
tccatcataacagctattaacaatg

SEQ ID NO: 4990272 - DNA, 25 bp, Homo sapien
tattaacaatgtgcagagggtccta

SEQ ID NO: 4990273 - DNA, 25 bp, Homo sapien
tatatcctaacctcacacagtgcct

SEQ ID NO: 4990274 - DNA, 25 bp, Homo sapien
ccttaagaaggaatcgatcatttac

SEQ ID NO: 4990275 - DNA, 25 bp, Homo sapien
gggacttctggttaatgccttaaga

SEQ ID NO: 4990276 - DNA, 25 bp, Homo sapien
ggaaggaaactattctccatcagta

SEQ ID NO: 4990277 - DNA, 25 bp, Homo sapien
ccacgccaggcctcaataactattt

SEQ ID NO: 4990278 - DNA, 25 bp, Homo sapien
caattaaacatgctgtagtgtctca

SEQ ID NO: 4990279 - DNA, 25 bp, Homo sapien
gaaacataatacacctaacacccca

SEQ ID NO: 4990280 - DNA, 25 bp, Homo sapien
cagccaacttccttaaaagcccaat

SEQ ID NO: 4990281 - DNA, 25 bp, Homo sapien
aatgtgtactccagtttcgaccctt

SEQ ID NO: 4990282 - DNA, 25 bp, Homo sapien
ccagaaaatgtgtactccagtttcg

SEQ ID NO: 4990283 - DNA, 25 bp, Homo sapien
gaaaatgtgtactccagtttcgacc

SEQ ID NO: 4990284 - DNA, 25 bp, Homo sapien
aaatgtgtactccagtttcgaccct

SEQ ID NO: 4990285 - DNA, 25 bp, Homo sapien
cttgagcaggtagaacatcttgcgg

SEQ ID NO: 4990286 - DNA, 25 bp, Homo sapien
ttccccttggacttctcgtggagga

SEQ ID NO: 4990287 - DNA, 25 bp, Homo sapien
catcttgcggttggacagcacgtcg

SEQ ID NO: 4990288 - DNA, 25 bp, Homo sapien
gcacgtcgccgctggtcatcttgtc

SEQ ID NO: 4990289 - DNA, 25 bp, Homo sapien
ccaagaagcccgagtagaggtggta

SEQ ID NO: 4990290 - DNA, 25 bp, Homo sapien
gctgaagcggccggccaagaagccc

SEQ ID NO: 4990291 - DNA, 25 bp, Homo sapien
tgaagcggccggccaagaagcccga

SEQ ID NO: 4990292 - DNA, 25 bp, Homo sapien
acggtgcccccatcggccgcggccg

SEQ ID NO: 4990293 - DNA, 25 bp, Homo sapien
agtggggaaaggcggatgcccatgg

SEQ ID NO: 4990294 - DNA, 25 bp, Homo sapien
ccagtggggaaaggcggatgcccat

SEQ ID NO: 4990295 - DNA, 25 bp, Homo sapien
ggaaaggcggatgcccatgggggcc

SEQ ID NO: 4990296 - DNA, 25 bp, Homo sapien
tggggaaaggcggatgcccatgggg

SEQ ID NO: 4990297 - DNA, 25 bp, Homo sapien
cggctggtccgacttccacgttagc

SEQ ID NO: 4990298 - DNA, 25 bp, Homo sapien
aaaggccgagttgcgccgcgaagac

SEQ ID NO: 4990299 - DNA, 25 bp, Homo sapien
cacgttagcctacggccgcgaggtg

SEQ ID NO: 4990300 - DNA, 25 bp, Homo sapien
agcgcgctctaggttcttccgccgg

SEQ ID NO: 4990301 - DNA, 25 bp, Homo sapien
tggtaaggactgctagcgtactgtg

SEQ ID NO: 4990302 - DNA, 25 bp, Homo sapien
tcagcttgacactcctaggctgtac

SEQ ID NO: 4990303 - DNA, 25 bp, Homo sapien
caaaagtgctccagtagagtggtgg

SEQ ID NO: 4990304 - DNA, 25 bp, Homo sapien
gggccaccagctaaagcactccttt

SEQ ID NO: 4990305 - DNA, 25 bp, Homo sapien
tataagttgatactttccaactcat

SEQ ID NO: 4990306 - DNA, 25 bp, Homo sapien
gaaaatataagttgatactttccaa

SEQ ID NO: 4990307 - DNA, 25 bp, Homo sapien
ttttatgaatccatcatgactctga

SEQ ID NO: 4990308 - DNA, 25 bp, Homo sapien
aaatgtagaagctaaaatcagtaaa

SEQ ID NO: 4990309 - DNA, 25 bp, Homo sapien
aaaaatcaagtggcactggggcggt

SEQ ID NO: 4990310 - DNA, 25 bp, Homo sapien
aaatcaagtggcactggggcggttt

SEQ ID NO: 4990311 - DNA, 25 bp, Homo sapien
tcaagtggcactggggcggtttgat

SEQ ID NO: 4990312 - DNA, 25 bp, Homo sapien
ggatgtgcaagggtcctggtgtcag

SEQ ID NO: 4990313 - DNA, 25 bp, Homo sapien
tccaaatgccagtcgatagagcagt

SEQ ID NO: 4990314 - DNA, 25 bp, Homo sapien
tcaacggatcatccgaagaggttct

SEQ ID NO: 4990315 - DNA, 25 bp, Homo sapien
tgcagggctagagagactccaaaca

SEQ ID NO: 4990316 - DNA, 25 bp, Homo sapien
catccgaagaggttctgcagggcta

SEQ ID NO: 4990317 - DNA, 25 bp, Homo sapien
ttataaaatgtagatttggctctaa

SEQ ID NO: 4990318 - DNA, 25 bp, Homo sapien
ttggctctaatgctgagctctttca

SEQ ID NO: 4990319 - DNA, 25 bp, Homo sapien
tctttcagggtagtcttgggtgaga

SEQ ID NO: 4990320 - DNA, 25 bp, Homo sapien
taaaatgtagatttggctctaatgc

SEQ ID NO: 4990321 - DNA, 25 bp, Homo sapien
tttcagggtctcacccttggacggc

SEQ ID NO: 4990322 - DNA, 25 bp, Homo sapien
tgtttcagggtctcacccttggacg

SEQ ID NO: 4990323 - DNA, 25 bp, Homo sapien
ctgtttcagggtctcacccttggac

SEQ ID NO: 4990324 - DNA, 25 bp, Homo sapien
gcaagcactgagaaatctgatcagg

SEQ ID NO: 4990325 - DNA, 25 bp, Homo sapien
agatgctctcctgccagcaagcact

SEQ ID NO: 4990326 - DNA, 25 bp, Homo sapien
tgctccagacactggcgatatagcc

SEQ ID NO: 4990327 - DNA, 25 bp, Homo sapien
gaaatctgatcagggctgcagagtg

SEQ ID NO: 4990328 - DNA, 25 bp, Homo sapien
ctggggacctagagcagttctggat

SEQ ID NO: 4990329 - DNA, 25 bp, Homo sapien
tctgggatggattgggaggaaactg

SEQ ID NO: 4990330 - DNA, 25 bp, Homo sapien
cctccaggagaacagagagcagtgt

SEQ ID NO: 4990331 - DNA, 25 bp, Homo sapien
agagcagtgtgggagccaggaccag

SEQ ID NO: 4990332 - DNA, 25 bp, Homo sapien
catgagggtggctgggccccatcac

SEQ ID NO: 4990333 - DNA, 25 bp, Homo sapien
tccatccctaacactgtggctttag

SEQ ID NO: 4990334 - DNA, 25 bp, Homo sapien
actgtggctttaggatccagctggg

SEQ ID NO: 4990335 - DNA, 25 bp, Homo sapien
gcatcacatgcttccatccctaaca

SEQ ID NO: 4990336 - DNA, 25 bp, Homo sapien
acagtcctgggctggcatcacatgc

SEQ ID NO: 4990337 - DNA, 25 bp, Homo sapien
tgtaggggtcaaagtttccttcagc

SEQ ID NO: 4990338 - DNA, 25 bp, Homo sapien
tcagacggtcatgtaggggtcaaag

SEQ ID NO: 4990339 - DNA, 25 bp, Homo sapien
aggtggccactggtgaccaaggaca

SEQ ID NO: 4990340 - DNA, 25 bp, Homo sapien
ggtggccactggtgaccaaggacat

SEQ ID NO: 4990341 - DNA, 25 bp, Homo sapien
aagaatgctttagatgtcctctgca

SEQ ID NO: 4990342 - DNA, 25 bp, Homo sapien
agagtgaaacttcccatatgatggc

SEQ ID NO: 4990343 - DNA, 25 bp, Homo sapien
gagcaacagaaacgattgcaaacac

SEQ ID NO: 4990344 - DNA, 25 bp, Homo sapien
aaagattgaagcgtgcttggagagc

SEQ ID NO: 4990345 - DNA, 25 bp, Homo sapien
tggtttggatcccatgaagaatata

SEQ ID NO: 4990346 - DNA, 25 bp, Homo sapien
tttggatcccatgaagaatatatca

SEQ ID NO: 4990347 - DNA, 25 bp, Homo sapien
gaatatatcaatcttcatagattca

SEQ ID NO: 4990348 - DNA, 25 bp, Homo sapien
tatatcaatcttcatagattcatcc

SEQ ID NO: 4990349 - DNA, 25 bp, Homo sapien
cagaccaaaccctgcgtaggttccg

SEQ ID NO: 4990350 - DNA, 25 bp, Homo sapien
ccaaaccctgcgtaggttccgagat

SEQ ID NO: 4990351 - DNA, 25 bp, Homo sapien
tagagaatgatcttgtccacaccaa

SEQ ID NO: 4990352 - DNA, 25 bp, Homo sapien
gccacagccattacttagattaggc

SEQ ID NO: 4990353 - DNA, 25 bp, Homo sapien
catcatctttttgtagtggcttagg

SEQ ID NO: 4990354 - DNA, 25 bp, Homo sapien
tcatcctcataattcatggattatg

SEQ ID NO: 4990355 - DNA, 25 bp, Homo sapien
cttccctgagagctaagtccagtgg

SEQ ID NO: 4990356 - DNA, 25 bp, Homo sapien
tccctgagagctaagtccagtggat

SEQ ID NO: 4990357 - DNA, 25 bp, Homo sapien
atcttccctgagagctaagtccagt

SEQ ID NO: 4990358 - DNA, 25 bp, Homo sapien
tcagtcatcactcttgcctcggccc

SEQ ID NO: 4990359 - DNA, 25 bp, Homo sapien
cagtatcatcagtaccacgggctcc

SEQ ID NO: 4990360 - DNA, 25 bp, Homo sapien
ttcagtcgccttccagtatcatcag

SEQ ID NO: 4990361 - DNA, 25 bp, Homo sapien
ctgagcctttcagtcgccttccagt

SEQ ID NO: 4990362 - DNA, 25 bp, Homo sapien
agtatcatcagtaccacgggctcca

SEQ ID NO: 4990363 - DNA, 25 bp, Homo sapien
aggcacccgggcgtcggtcatcgcg

SEQ ID NO: 4990364 - DNA, 25 bp, Homo sapien
cctgccactcgaccaggtaggtagg

SEQ ID NO: 4990365 - DNA, 25 bp, Homo sapien
ttcgccgccctttgcggccgcggta

SEQ ID NO: 4990366 - DNA, 25 bp, Homo sapien
tcagcaacccagtgcacctgccact

SEQ ID NO: 4990367 - DNA, 25 bp, Homo sapien
attggggccggtctctcggtgccct

SEQ ID NO: 4990368 - DNA, 25 bp, Homo sapien
ggaattctgcgtgtccacgtacctt

SEQ ID NO: 4990369 - DNA, 25 bp, Homo sapien
gccgggaattctgcgtgtccacgta

SEQ ID NO: 4990370 - DNA, 25 bp, Homo sapien
tcccgccgccgggaattctgcgtgt

SEQ ID NO: 4990371 - DNA, 25 bp, Homo sapien
tgagctccaaagttgatgcagacat

SEQ ID NO: 4990372 - DNA, 25 bp, Homo sapien
gggttcctatgtgtatataatccat

SEQ ID NO: 4990373 - DNA, 25 bp, Homo sapien
tgccccaaacttcataaaagtaatc

SEQ ID NO: 4990374 - DNA, 25 bp, Homo sapien
taaaagtaatccatttgagctccaa

SEQ ID NO: 4990375 - DNA, 25 bp, Homo sapien
agcgtggctctgagcgaccactgga

SEQ ID NO: 4990376 - DNA, 25 bp, Homo sapien
tcagcagtcgggtcccggagctgcc

SEQ ID NO: 4990377 - DNA, 25 bp, Homo sapien
aaggctgtgcttcgcggaggcctgc

SEQ ID NO: 4990378 - DNA, 25 bp, Homo sapien
agctgcctttggtgcgcacgggcgc

SEQ ID NO: 4990379 - DNA, 25 bp, Homo sapien
tttcttagagggaaagcagtcagga

SEQ ID NO: 4990380 - DNA, 25 bp, Homo sapien
tgcttcccctcggtcagaccaccga

SEQ ID NO: 4990381 - DNA, 25 bp, Homo sapien
tcagaccaccgagaactgccgctgt

SEQ ID NO: 4990382 - DNA, 25 bp, Homo sapien
agaacgctggccctcagcacatctt

SEQ ID NO: 4990383 - DNA, 25 bp, Homo sapien
aactacatggattgtagctgttggg

SEQ ID NO: 4990384 - DNA, 25 bp, Homo sapien
gggtgacaacatatccatacttcat

SEQ ID NO: 4990385 - DNA, 25 bp, Homo sapien
gacttcgtgaactacatggattgta

SEQ ID NO: 4990386 - DNA, 25 bp, Homo sapien
ggcgctgtgacaggacttcgtgaac

SEQ ID NO: 4990387 - DNA, 25 bp, Homo sapien
tctttgtgttggctgtagagcgttc

SEQ ID NO: 4990388 - DNA, 25 bp, Homo sapien
tgttggctgtagagcgttcattcca

SEQ ID NO: 4990389 - DNA, 25 bp, Homo sapien
tcattccatcgactgaatgtaacat

SEQ ID NO: 4990390 - DNA, 25 bp, Homo sapien
tagagcgttcattccatcgactgaa

SEQ ID NO: 4990391 - DNA, 25 bp, Homo sapien
gatccagtcccaagtactctttgaa

SEQ ID NO: 4990392 - DNA, 25 bp, Homo sapien
ctggtgactggtcctgacagatcca

SEQ ID NO: 4990393 - DNA, 25 bp, Homo sapien
ctggtcctgacagatccagtcccaa

SEQ ID NO: 4990394 - DNA, 25 bp, Homo sapien
tgcacactcagtgtcccgttccttc

SEQ ID NO: 4990395 - DNA, 25 bp, Homo sapien
cactctgtgctcatttgagctttca

SEQ ID NO: 4990396 - DNA, 25 bp, Homo sapien
ctttcaagatccctttccactctgt

SEQ ID NO: 4990397 - DNA, 25 bp, Homo sapien
catctttcaagatccctttccactc

SEQ ID NO: 4990398 - DNA, 25 bp, Homo sapien
ccactctgtgctcatttgagctttc

SEQ ID NO: 4990399 - DNA, 25 bp, Homo sapien
ctcagcactcacaggatatctgact

SEQ ID NO: 4990400 - DNA, 25 bp, Homo sapien
actgtggttgatgccatctgactct

SEQ ID NO: 4990401 - DNA, 25 bp, Homo sapien
cacaggatatctgactccaggccag

SEQ ID NO: 4990402 - DNA, 25 bp, Homo sapien
tggttgatgccatctgactctgtcc

SEQ ID NO: 4990403 - DNA, 25 bp, Homo sapien
cttgagggccacttcgctggagctt

SEQ ID NO: 4990404 - DNA, 25 bp, Homo sapien
agcttcggtcctccatcagattcag

SEQ ID NO: 4990405 - DNA, 25 bp, Homo sapien
gccacttcgctggagcttcggtcct

SEQ ID NO: 4990406 - DNA, 25 bp, Homo sapien
gctggagcttcggtcctccatcaga

SEQ ID NO: 4990407 - DNA, 25 bp, Homo sapien
gttcctcaggcacagaatgtgggcg

SEQ ID NO: 4990408 - DNA, 25 bp, Homo sapien
gacaagtggagtgtgtcagagtagg

SEQ ID NO: 4990409 - DNA, 25 bp, Homo sapien
gagtaggaaaggacagaattgaggt

SEQ ID NO: 4990410 - DNA, 25 bp, Homo sapien
aatgtgggcgtggtggacaagtgga

SEQ ID NO: 4990411 - DNA, 25 bp, Homo sapien
tgtacctggaatatctgttgctggt

SEQ ID NO: 4990412 - DNA, 25 bp, Homo sapien
tacctggaatatctgttgctggtct

SEQ ID NO: 4990413 - DNA, 25 bp, Homo sapien
tttctatgccccggaacaatgtctc

SEQ ID NO: 4990414 - DNA, 25 bp, Homo sapien
ttcttttctatgccccggaacaatg

SEQ ID NO: 4990415 - DNA, 25 bp, Homo sapien
cggctcttcttcgagtcttctcaga

SEQ ID NO: 4990416 - DNA, 25 bp, Homo sapien
atgcgcagattctcgcctctcgcgg

SEQ ID NO: 4990417 - DNA, 25 bp, Homo sapien
gctcagggacggtttttccgccatg

SEQ ID NO: 4990418 - DNA, 25 bp, Homo sapien
atgcgcactggcacctaacggctct

SEQ ID NO: 4990419 - DNA, 25 bp, Homo sapien
taaccatatctttactgacgtcagg

SEQ ID NO: 4990420 - DNA, 25 bp, Homo sapien
gagcctcctgctcaagagtaaagga

SEQ ID NO: 4990421 - DNA, 25 bp, Homo sapien
tgcccttgagcaacttgggtaacca

SEQ ID NO: 4990422 - DNA, 25 bp, Homo sapien
tcaggtactagaccccagatgagga

SEQ ID NO: 4990423 - DNA, 25 bp, Homo sapien
acaggtgtcgggggctgcaggctgc

SEQ ID NO: 4990424 - DNA, 25 bp, Homo sapien
ggtgtcgggggctgcaggctgcggg

SEQ ID NO: 4990425 - DNA, 25 bp, Homo sapien
agaacaggtgtcgggggctgcaggc

SEQ ID NO: 4990426 - DNA, 25 bp, Homo sapien
aagaacaggtgtcgggggctgcagg

SEQ ID NO: 4990427 - DNA, 25 bp, Homo sapien
gaggtgggcgggtggggagaagcac

SEQ ID NO: 4990428 - DNA, 25 bp, Homo sapien
ggaggtgggcgggtggggagaagca

SEQ ID NO: 4990429 - DNA, 25 bp, Homo sapien
ctgcgggaggaggtgggcgggtggg

SEQ ID NO: 4990430 - DNA, 25 bp, Homo sapien
cccttcagagttggggcttggggag

SEQ ID NO: 4990431 - DNA, 25 bp, Homo sapien
cttcagagttggggcttggggagtg

SEQ ID NO: 4990432 - DNA, 25 bp, Homo sapien
tcagagttggggcttggggagtggg

SEQ ID NO: 4990433 - DNA, 25 bp, Homo sapien
cagagttggggcttggggagtgggg

SEQ ID NO: 4990434 - DNA, 25 bp, Homo sapien
ggaaagaatgggtgtgcggagcggg

SEQ ID NO: 4990435 - DNA, 25 bp, Homo sapien
tgggtgtgcggagcgggccgttctg

SEQ ID NO: 4990436 - DNA, 25 bp, Homo sapien
ggagcgggccgttctggtgcccagg

SEQ ID NO: 4990437 - DNA, 25 bp, Homo sapien
gcggagcgggccgttctggtgccca

SEQ ID NO: 4990438 - DNA, 25 bp, Homo sapien
ctgagatgtggacgccttggaggcg

SEQ ID NO: 4990439 - DNA, 25 bp, Homo sapien
gcgcctgagatgtggacgccttgga

SEQ ID NO: 4990440 - DNA, 25 bp, Homo sapien
gatgtggacgccttggaggcggagg

SEQ ID NO: 4990441 - DNA, 25 bp, Homo sapien
cgcctgagatgtggacgccttggag

SEQ ID NO: 4990442 - DNA, 25 bp, Homo sapien
gcaaggcctctttaatggagacagt

SEQ ID NO: 4990443 - DNA, 25 bp, Homo sapien
gagtcatgtacttattcttaggcag

SEQ ID NO: 4990444 - DNA, 25 bp, Homo sapien
aatagttgtatttgggcaaggcctc

SEQ ID NO: 4990445 - DNA, 25 bp, Homo sapien
tattttgctatcatggcctcgagtc

SEQ ID NO: 4990446 - DNA, 25 bp, Homo sapien
aagtgccagcttaacgtgtgtgacg

SEQ ID NO: 4990447 - DNA, 25 bp, Homo sapien
tacatttgtcctgtgtcaatggcta

SEQ ID NO: 4990448 - DNA, 25 bp, Homo sapien
tgtgtgacggtgaaaacacgacacc

SEQ ID NO: 4990449 - DNA, 25 bp, Homo sapien
cagaagcggtaactttgctggtgca

SEQ ID NO: 4990450 - DNA, 25 bp, Homo sapien
tacatccgtagctggaagaagtgcc

SEQ ID NO: 4990451 - DNA, 25 bp, Homo sapien
ctggtacatccgtagctggaagaag

SEQ ID NO: 4990452 - DNA, 25 bp, Homo sapien
gtacatccgtagctggaagaagtgc

SEQ ID NO: 4990453 - DNA, 25 bp, Homo sapien
ggtacatccgtagctggaagaagtg

SEQ ID NO: 4990454 - DNA, 25 bp, Homo sapien
gatcatcccgtggagcctgatgtgt

SEQ ID NO: 4990455 - DNA, 25 bp, Homo sapien
ttagtccagatcatcccgtggagcc

SEQ ID NO: 4990456 - DNA, 25 bp, Homo sapien
tcccgtggagcctgatgtgttcctt

SEQ ID NO: 4990457 - DNA, 25 bp, Homo sapien
tgcttattttagtccagatcatccc

SEQ ID NO: 4990458 - DNA, 25 bp, Homo sapien
tccgagaagttggagggtccctgtc

SEQ ID NO: 4990459 - DNA, 25 bp, Homo sapien
agaggttggagacgtccttgtccga

SEQ ID NO: 4990460 - DNA, 25 bp, Homo sapien
tcgggatgatacacaaagctgcgtc

SEQ ID NO: 4990461 - DNA, 25 bp, Homo sapien
gaagccaatagctgggccatgaaga

SEQ ID NO: 4990462 - DNA, 25 bp, Homo sapien
ttatttgctgtggaggaccaaaagg

SEQ ID NO: 4990463 - DNA, 25 bp, Homo sapien
tgctgtggaggaccaaaaggaccag

SEQ ID NO: 4990464 - DNA, 25 bp, Homo sapien
gaccaaaaggaccagttgcctctga

SEQ ID NO: 4990465 - DNA, 25 bp, Homo sapien
gaggaccaaaaggaccagttgcctc

SEQ ID NO: 4990466 - DNA, 25 bp, Homo sapien
gaccctttgtactagagctgtgttg

SEQ ID NO: 4990467 - DNA, 25 bp, Homo sapien
gagaccctttgtactagagctgtgt

SEQ ID NO: 4990468 - DNA, 25 bp, Homo sapien
ctgagaccctttgtactagagctgt

SEQ ID NO: 4990469 - DNA, 25 bp, Homo sapien
cctttgtactagagctgtgttgata

SEQ ID NO: 4990470 - DNA, 25 bp, Homo sapien
aaatacggagggtacacaattgtat

SEQ ID NO: 4990471 - DNA, 25 bp, Homo sapien
agaaaatacggagggtacacaattg

SEQ ID NO: 4990472 - DNA, 25 bp, Homo sapien
aatacggagggtacacaattgtatg

SEQ ID NO: 4990473 - DNA, 25 bp, Homo sapien
tgggagaaaatacggagggtacaca

SEQ ID NO: 4990474 - DNA, 25 bp, Homo sapien
ctccaggatggaagatccacaaggt

SEQ ID NO: 4990475 - DNA, 25 bp, Homo sapien
ggatggaagatccacaaggtgctcc

SEQ ID NO: 4990476 - DNA, 25 bp, Homo sapien
tggtccacttctgtgatgctgcaca

SEQ ID NO: 4990477 - DNA, 25 bp, Homo sapien
agaggttgaggtcttcttctgcaag

SEQ ID NO: 4990478 - DNA, 25 bp, Homo sapien
tgcaagactgcagacattgagtttc

SEQ ID NO: 4990479 - DNA, 25 bp, Homo sapien
gatggcgatctcttcctctgagagg

SEQ ID NO: 4990480 - DNA, 25 bp, Homo sapien
gctcctgtttatcactgccaggaaa

SEQ ID NO: 4990481 - DNA, 25 bp, Homo sapien
gtttatcactgccaggaaactccca

SEQ ID NO: 4990482 - DNA, 25 bp, Homo sapien
tgccaggaaactcccattcagtctt

SEQ ID NO: 4990483 - DNA, 25 bp, Homo sapien
atctctgctcctgtttatcactgcc

SEQ ID NO: 4990484 - DNA, 25 bp, Homo sapien
gtcattcccgaaggcaacccatttg

SEQ ID NO: 4990485 - DNA, 25 bp, Homo sapien
cgctgtcctcccagccattctactt

SEQ ID NO: 4990486 - DNA, 25 bp, Homo sapien
tcctgtgtcattcccgaaggcaacc

SEQ ID NO: 4990487 - DNA, 25 bp, Homo sapien
gaaggcaacccatttgccacgctgt

SEQ ID NO: 4990488 - DNA, 25 bp, Homo sapien
tctctctggctatgcccctcgggga

SEQ ID NO: 4990489 - DNA, 25 bp, Homo sapien
agagtgttttcaggctggcctctct

SEQ ID NO: 4990490 - DNA, 25 bp, Homo sapien
ctgtcctcttcggatggcattgtgt

SEQ ID NO: 4990491 - DNA, 25 bp, Homo sapien
gcattgtgtccagctccactaccag

SEQ ID NO: 4990492 - DNA, 25 bp, Homo sapien
cagtatgaaatccattaggcaccaa

SEQ ID NO: 4990493 - DNA, 25 bp, Homo sapien
gctccagtttatcagtatgaaatcc

SEQ ID NO: 4990494 - DNA, 25 bp, Homo sapien
atgaaatccattaggcaccaaatga

SEQ ID NO: 4990495 - DNA, 25 bp, Homo sapien
atccattaggcaccaaatgaaaatt

SEQ ID NO: 4990496 - DNA, 25 bp, Homo sapien
tatcctttgaattcccgtgagcact

SEQ ID NO: 4990497 - DNA, 25 bp, Homo sapien
tattctatcctttgaattcccgtga

SEQ ID NO: 4990498 - DNA, 25 bp, Homo sapien
tgaattcccgtgagcacttttatcc

SEQ ID NO: 4990499 - DNA, 25 bp, Homo sapien
tgagcacttttatcctgcgtagggt

SEQ ID NO: 4990500 - DNA, 25 bp, Homo sapien
agaggaggatcaaatatatggtgta

SEQ ID NO: 4990501 - DNA, 25 bp, Homo sapien
aggaggatcaaatatatggtgtatg

SEQ ID NO: 4990502 - DNA, 25 bp, Homo sapien
gaggaggatcaaatatatggtgtat

SEQ ID NO: 4990503 - DNA, 25 bp, Homo sapien
ccagcagctctcatgcctgcaggat

SEQ ID NO: 4990504 - DNA, 25 bp, Homo sapien
gctgcccctggaagaagccagcagc

SEQ ID NO: 4990505 - DNA, 25 bp, Homo sapien
agctctcatgcctgcaggatctggc

SEQ ID NO: 4990506 - DNA, 25 bp, Homo sapien
cagcacagagcactggcaggggatg

SEQ ID NO: 4990507 - DNA, 25 bp, Homo sapien
acgcaggccctctgtttcctgcctc

SEQ ID NO: 4990508 - DNA, 25 bp, Homo sapien
gcagcatcctcacgcaggccctctg

SEQ ID NO: 4990509 - DNA, 25 bp, Homo sapien
ctgtctgcagcatcctcacgcaggc

SEQ ID NO: 4990510 - DNA, 25 bp, Homo sapien
tctgtttcctgcctcttgttctcat

SEQ ID NO: 4990511 - DNA, 25 bp, Homo sapien
ccgccagcagccttgtgtcagtgag

SEQ ID NO: 4990512 - DNA, 25 bp, Homo sapien
gctgcgaagtgtaattttattcctg

SEQ ID NO: 4990513 - DNA, 25 bp, Homo sapien
cagtgagacccttaagggtccttcg

SEQ ID NO: 4990514 - DNA, 25 bp, Homo sapien
gctgaactttcatcctttccaggta

SEQ ID NO: 4990515 - DNA, 25 bp, Homo sapien
gctggctcttttctggacctggata

SEQ ID NO: 4990516 - DNA, 25 bp, Homo sapien
tgagtcacagagtccatggctggct

SEQ ID NO: 4990517 - DNA, 25 bp, Homo sapien
ttttctggacctggataacctggcc

SEQ ID NO: 4990518 - DNA, 25 bp, Homo sapien
tggacctggataacctggccttccc

SEQ ID NO: 4990519 - DNA, 25 bp, Homo sapien
catattgaggaatatgagtaactca

SEQ ID NO: 4990520 - DNA, 25 bp, Homo sapien
caatgatcatattgaggaatatgag

SEQ ID NO: 4990521 - DNA, 25 bp, Homo sapien
tgaggaatatgagtaactcaacctc

SEQ ID NO: 4990522 - DNA, 25 bp, Homo sapien
gaatatgagtaactcaacctcttgt

SEQ ID NO: 4990523 - DNA, 25 bp, Homo sapien
gcgaaaaaccatggtgtgcttggga

SEQ ID NO: 4990524 - DNA, 25 bp, Homo sapien
agcaaaagcgaaaaaccatggtgtg

SEQ ID NO: 4990525 - DNA, 25 bp, Homo sapien
catggtgtgcttgggagcctttgct

SEQ ID NO: 4990526 - DNA, 25 bp, Homo sapien
gcctttgctggtgtagggtgcctga

SEQ ID NO: 4990527 - DNA, 25 bp, Homo sapien
agggtcgtcactaggggccacatac

SEQ ID NO: 4990528 - DNA, 25 bp, Homo sapien
ctgtgggtgacaatcaaaggaaggg

SEQ ID NO: 4990529 - DNA, 25 bp, Homo sapien
gaagggtcgtcactaggggccacat

SEQ ID NO: 4990530 - DNA, 25 bp, Homo sapien
tgggtgacaatcaaaggaagggtcg

SEQ ID NO: 4990531 - DNA, 25 bp, Homo sapien
tcagacgtggagaatggacaggcgt

SEQ ID NO: 4990532 - DNA, 25 bp, Homo sapien
aaatatttggcctgaagacagtggc

SEQ ID NO: 4990533 - DNA, 25 bp, Homo sapien
gggaaaccagttacagtgccatcgc

SEQ ID NO: 4990534 - DNA, 25 bp, Homo sapien
tggtaagagctagagagcaaatatt

SEQ ID NO: 4990535 - DNA, 25 bp, Homo sapien
tgtgactgaaggaagtgtggacctg

SEQ ID NO: 4990536 - DNA, 25 bp, Homo sapien
ccagagagagcctggtgtgactgaa

SEQ ID NO: 4990537 - DNA, 25 bp, Homo sapien
gataggaaccgactgacactgctcc

SEQ ID NO: 4990538 - DNA, 25 bp, Homo sapien
tggacctgggagataggaaccgact

SEQ ID NO: 4990539 - DNA, 25 bp, Homo sapien
atggcttccctaggcacgcggaggc

SEQ ID NO: 4990540 - DNA, 25 bp, Homo sapien
tgaccacacgtaagtgtcatggctt

SEQ ID NO: 4990541 - DNA, 25 bp, Homo sapien
ccaaacactgacatgaccacacgta

SEQ ID NO: 4990542 - DNA, 25 bp, Homo sapien
gtgtcatggcttccctaggcacgcg

SEQ ID NO: 4990543 - DNA, 25 bp, Homo sapien
cagcactgagtatacagcccggaga

SEQ ID NO: 4990544 - DNA, 25 bp, Homo sapien
catcagggaatgagtcaaggctctg

SEQ ID NO: 4990545 - DNA, 25 bp, Homo sapien
caccactgacgtccacatcagggaa

SEQ ID NO: 4990546 - DNA, 25 bp, Homo sapien
ctctgagtccctgtctgcaatgcca

SEQ ID NO: 4990547 - DNA, 25 bp, Homo sapien
gctgctgccttacacctcatgtgga

SEQ ID NO: 4990548 - DNA, 25 bp, Homo sapien
tgtggagatccaggacaatgtaacc

SEQ ID NO: 4990549 - DNA, 25 bp, Homo sapien
cccctgaatctgtagagtgtaatgc

SEQ ID NO: 4990550 - DNA, 25 bp, Homo sapien
ggccctattccagtagtagcctgca

SEQ ID NO: 4990551 - DNA, 25 bp, Homo sapien
ttccacatctttcattgctagtgat

SEQ ID NO: 4990552 - DNA, 25 bp, Homo sapien
cacatctttcattgctagtgatgct

SEQ ID NO: 4990553 - DNA, 25 bp, Homo sapien
ctttcattgctagtgatgctgtgca

SEQ ID NO: 4990554 - DNA, 25 bp, Homo sapien
catctttcattgctagtgatgctgt

SEQ ID NO: 4990555 - DNA, 25 bp, Homo sapien
cttcttgggtactctgtgaaggctt

SEQ ID NO: 4990556 - DNA, 25 bp, Homo sapien
ttctggaagattccacccttgctgc

SEQ ID NO: 4990557 - DNA, 25 bp, Homo sapien
aagattccacccttgctgcttcatc

SEQ ID NO: 4990558 - DNA, 25 bp, Homo sapien
aagagtttagctccctgcacccttc

SEQ ID NO: 4990559 - DNA, 25 bp, Homo sapien
cagtctgtgttatctgcagggggga

SEQ ID NO: 4990560 - DNA, 25 bp, Homo sapien
gtctgtgttatctgcaggggggaca

SEQ ID NO: 4990561 - DNA, 25 bp, Homo sapien
ccagtctgtgttatctgcagggggg

SEQ ID NO: 4990562 - DNA, 25 bp, Homo sapien
agtctgtgttatctgcaggggggac

SEQ ID NO: 4990563 - DNA, 25 bp, Homo sapien
ggaatgttcccatccattgtgccat

SEQ ID NO: 4990564 - DNA, 25 bp, Homo sapien
tcctcatgtgtgctcgtcacaagct

SEQ ID NO: 4990565 - DNA, 25 bp, Homo sapien
tctatgtgggttcagttttgagctc

SEQ ID NO: 4990566 - DNA, 25 bp, Homo sapien
ccccatttgtgctagttctatgtgg

SEQ ID NO: 4990567 - DNA, 25 bp, Homo sapien
cagcagaaaggcgaggggtcaagcc

SEQ ID NO: 4990568 - DNA, 25 bp, Homo sapien
tcctgcacatgcagggcagcagaaa

SEQ ID NO: 4990569 - DNA, 25 bp, Homo sapien
cagaaaggcgaggggtcaagcctga

SEQ ID NO: 4990570 - DNA, 25 bp, Homo sapien
tcactcctcatcctgcacatgcagg

SEQ ID NO: 4990571 - DNA, 25 bp, Homo sapien
cattatctagcctggacatttcagt

SEQ ID NO: 4990572 - DNA, 25 bp, Homo sapien
cccatgtggttctggtgagccatca

SEQ ID NO: 4990573 - DNA, 25 bp, Homo sapien
tcagctaatccctcctgagcattat

SEQ ID NO: 4990574 - DNA, 25 bp, Homo sapien
tgcctcttctgttgtgaccacccca

SEQ ID NO: 4990575 - DNA, 25 bp, Homo sapien
ccgcaggaagcttgcttcccttcac

SEQ ID NO: 4990576 - DNA, 25 bp, Homo sapien
cccgcaggaagcttgcttcccttca

SEQ ID NO: 4990577 - DNA, 25 bp, Homo sapien
caaggggagaccaaatcatccagcg

SEQ ID NO: 4990578 - DNA, 25 bp, Homo sapien
tccaacagccacacaccaaggggag

SEQ ID NO: 4990579 - DNA, 25 bp, Homo sapien
gcttttctggtccaaatcttccaca

SEQ ID NO: 4990580 - DNA, 25 bp, Homo sapien
aatcatccagcggagcttcctggcc

SEQ ID NO: 4990581 - DNA, 25 bp, Homo sapien
ctggaaatgatcagggcttggtgat

SEQ ID NO: 4990582 - DNA, 25 bp, Homo sapien
ctggatgctggaaatgatcagggct

SEQ ID NO: 4990583 - DNA, 25 bp, Homo sapien
aaatgatcagggcttggtgatgtaa

SEQ ID NO: 4990584 - DNA, 25 bp, Homo sapien
atgatcagggcttggtgatgtaaca

SEQ ID NO: 4990585 - DNA, 25 bp, Homo sapien
gatgagccaataaccgacttcaaag

SEQ ID NO: 4990586 - DNA, 25 bp, Homo sapien
gggagaaggatgagccaataaccga

SEQ ID NO: 4990587 - DNA, 25 bp, Homo sapien
caataaccgacttcaaaggataagg

SEQ ID NO: 4990588 - DNA, 25 bp, Homo sapien
ataagggcataatgactgaaccagg

SEQ ID NO: 4990589 - DNA, 25 bp, Homo sapien
cacagtttaatgaccgctggttgag

SEQ ID NO: 4990590 - DNA, 25 bp, Homo sapien
gggtcccacagtttaatgaccgctg

SEQ ID NO: 4990591 - DNA, 25 bp, Homo sapien
accgctggttgagcctgaagggctc

SEQ ID NO: 4990592 - DNA, 25 bp, Homo sapien
taatgaccgctggttgagcctgaag

SEQ ID NO: 4990593 - DNA, 25 bp, Homo sapien
tgccagatggccgtatttacttgtt

SEQ ID NO: 4990594 - DNA, 25 bp, Homo sapien
acacaggtaggtaatctgttggtcc

SEQ ID NO: 4990595 - DNA, 25 bp, Homo sapien
tgttctaagattgacacaggtaggt

SEQ ID NO: 4990596 - DNA, 25 bp, Homo sapien
gatggccgtatttacttgttctaag

SEQ ID NO: 4990597 - DNA, 25 bp, Homo sapien
tgcctttgagtgatataaggactcc

SEQ ID NO: 4990598 - DNA, 25 bp, Homo sapien
ctttgagtgatataaggactcccat

SEQ ID NO: 4990599 - DNA, 25 bp, Homo sapien
ggtgcctttgagtgatataaggact

SEQ ID NO: 4990600 - DNA, 25 bp, Homo sapien
caactggtgcctttgagtgatataa

SEQ ID NO: 4990601 - DNA, 25 bp, Homo sapien
gcattatcccaattaagctcacggc

SEQ ID NO: 4990602 - DNA, 25 bp, Homo sapien
tatcccaattaagctcacggcctac

SEQ ID NO: 4990603 - DNA, 25 bp, Homo sapien
cagcattatcccaattaagctcacg

SEQ ID NO: 4990604 - DNA, 25 bp, Homo sapien
tgcagacagcattatcccaattaag

SEQ ID NO: 4990605 - DNA, 25 bp, Homo sapien
caggtggccaagcaggtggcgtcac

SEQ ID NO: 4990606 - DNA, 25 bp, Homo sapien
tctcactagagtttaggacaccaga

SEQ ID NO: 4990607 - DNA, 25 bp, Homo sapien
agagtttaggacaccagagagccag

SEQ ID NO: 4990608 - DNA, 25 bp, Homo sapien
atttcttctcactagagtttaggac

SEQ ID NO: 4990609 - DNA, 25 bp, Homo sapien
gactcccacaactgggttgtaatct

SEQ ID NO: 4990610 - DNA, 25 bp, Homo sapien
ccacaactgggttgtaatctccaga

SEQ ID NO: 4990611 - DNA, 25 bp, Homo sapien
cagaattacaacctgatgaaattgt

SEQ ID NO: 4990612 - DNA, 25 bp, Homo sapien
ctgtttatagtcagactcccacaac

SEQ ID NO: 4990613 - DNA, 25 bp, Homo sapien
aatgtatttattcaagcaaagagga

SEQ ID NO: 4990614 - DNA, 25 bp, Homo sapien
gtatttattcaagcaaagaggaaga

SEQ ID NO: 4990615 - DNA, 25 bp, Homo sapien
tgtatttattcaagcaaagaggaag

SEQ ID NO: 4990616 - DNA, 25 bp, Homo sapien
atgtatttattcaagcaaagaggaa

SEQ ID NO: 4990617 - DNA, 25 bp, Homo sapien
tctctgataacatatgctcctccaa

SEQ ID NO: 4990618 - DNA, 25 bp, Homo sapien
gccttcagtatcagttaatcggctg

SEQ ID NO: 4990619 - DNA, 25 bp, Homo sapien
agaaacgccatagccatctctgata

SEQ ID NO: 4990620 - DNA, 25 bp, Homo sapien
taatcggctgtcataccaactgcca

SEQ ID NO: 4990621 - DNA, 25 bp, Homo sapien
cattttaaggacaaaggcgagtcga

SEQ ID NO: 4990622 - DNA, 25 bp, Homo sapien
ggcgagtcgatcgtcatacttggat

SEQ ID NO: 4990623 - DNA, 25 bp, Homo sapien
gagatgggcaacaacagtcccaaag

SEQ ID NO: 4990624 - DNA, 25 bp, Homo sapien
gccacagagggtaaagataacccca

SEQ ID NO: 4990625 - DNA, 25 bp, Homo sapien
ggtggctaggcctggagtcatggca

SEQ ID NO: 4990626 - DNA, 25 bp, Homo sapien
tcaatgctgggaagcacctaaacta

SEQ ID NO: 4990627 - DNA, 25 bp, Homo sapien
gatacagcagactggccattcgtgg

SEQ ID NO: 4990628 - DNA, 25 bp, Homo sapien
gaagcacctaaactaatcagccaga

SEQ ID NO: 4990629 - DNA, 25 bp, Homo sapien
aaagaatcttgaagagcatcaaaag

SEQ ID NO: 4990630 - DNA, 25 bp, Homo sapien
caagtggattgttttggggcagaca

SEQ ID NO: 4990631 - DNA, 25 bp, Homo sapien
gcagacgaagtgctctcacactggg

SEQ ID NO: 4990632 - DNA, 25 bp, Homo sapien
ctcagggcagacgaagtgctctcac

SEQ ID NO: 4990633 - DNA, 25 bp, Homo sapien
acccacgagagacttttccaagaag

SEQ ID NO: 4990634 - DNA, 25 bp, Homo sapien
gctgaagcgatacgtggcctctctg

SEQ ID NO: 4990635 - DNA, 25 bp, Homo sapien
tctctgtgaagctaacatttccaaa

SEQ ID NO: 4990636 - DNA, 25 bp, Homo sapien
cagaggcagtggctgaagcgatacg

SEQ ID NO: 4990637 - DNA, 25 bp, Homo sapien
accacaaaatgcctttctttgtctc

SEQ ID NO: 4990638 - DNA, 25 bp, Homo sapien
ccatcttcatactcaggagaaaaac

SEQ ID NO: 4990639 - DNA, 25 bp, Homo sapien
tcaggagaaaaaccacaaaatgcct

SEQ ID NO: 4990640 - DNA, 25 bp, Homo sapien
cacaaaatgcctttctttgtctcat

SEQ ID NO: 4990641 - DNA, 25 bp, Homo sapien
gtcacattccaagaaggcccagtct

SEQ ID NO: 4990642 - DNA, 25 bp, Homo sapien
cccagtctggcttcaccttagattg

SEQ ID NO: 4990643 - DNA, 25 bp, Homo sapien
gattgtccctcactctcaagggcag

SEQ ID NO: 4990644 - DNA, 25 bp, Homo sapien
ctcaagggcagccctatgatctctg

SEQ ID NO: 4990645 - DNA, 25 bp, Homo sapien
ggcacatcattgtccgtggcccttg

SEQ ID NO: 4990646 - DNA, 25 bp, Homo sapien
gctctgatctgtttccagatataaa

SEQ ID NO: 4990647 - DNA, 25 bp, Homo sapien
tgagtcttttccagacgatctctgc

SEQ ID NO: 4990648 - DNA, 25 bp, Homo sapien
catcattgtccgtggcccttgttta

SEQ ID NO: 4990649 - DNA, 25 bp, Homo sapien
tgctgctggatctgaacaaactcta

SEQ ID NO: 4990650 - DNA, 25 bp, Homo sapien
ttcaacttaagtgggtcatagacct

SEQ ID NO: 4990651 - DNA, 25 bp, Homo sapien
tttgagaggtaatgcccggtgctgc

SEQ ID NO: 4990652 - DNA, 25 bp, Homo sapien
tctaagtagagtggaggaagcaaag

SEQ ID NO: 4990653 - DNA, 25 bp, Homo sapien
catgaagctcttgaaaggatttaag

SEQ ID NO: 4990654 - DNA, 25 bp, Homo sapien
gaagctcttgaaaggatttaagtag

SEQ ID NO: 4990655 - DNA, 25 bp, Homo sapien
ctcttgaaaggatttaagtagcagc

SEQ ID NO: 4990656 - DNA, 25 bp, Homo sapien
agaacatgaagctcttgaaaggatt

SEQ ID NO: 4990657 - DNA, 25 bp, Homo sapien
tttgaactgcataagagtaactcgg

SEQ ID NO: 4990658 - DNA, 25 bp, Homo sapien
tgaactgcataagagtaactcggag

SEQ ID NO: 4990659 - DNA, 25 bp, Homo sapien
tctctttgaactgcataagagtaac

SEQ ID NO: 4990660 - DNA, 25 bp, Homo sapien
caactttctctttgaactgcataag

SEQ ID NO: 4990661 - DNA, 25 bp, Homo sapien
ttcatcagttcacactctctgtgag

SEQ ID NO: 4990662 - DNA, 25 bp, Homo sapien
actctctgtgaggctctttagacat

SEQ ID NO: 4990663 - DNA, 25 bp, Homo sapien
tttcatcagttcacactctctgtga

SEQ ID NO: 4990664 - DNA, 25 bp, Homo sapien
cagataaacgtggtgaggaacacag

SEQ ID NO: 4990665 - DNA, 25 bp, Homo sapien
gatgcctgtagagctgcggccttgt

SEQ ID NO: 4990666 - DNA, 25 bp, Homo sapien
gactctgaggcagtatgaccctttc

SEQ ID NO: 4990667 - DNA, 25 bp, Homo sapien
tgagaacctggatcatgtcagaagg

SEQ ID NO: 4990668 - DNA, 25 bp, Homo sapien
taagctgggttatcatctgccaatc

SEQ ID NO: 4990669 - DNA, 25 bp, Homo sapien
aaacaatgggatgaaagtgacgccc

SEQ ID NO: 4990670 - DNA, 25 bp, Homo sapien
ggaatccttttgcagccagcgaact

SEQ ID NO: 4990671 - DNA, 25 bp, Homo sapien
cagagactgctgttttaaggtaaac

SEQ ID NO: 4990672 - DNA, 25 bp, Homo sapien
gtggtcccacactttttagatgtac

SEQ ID NO: 4990673 - DNA, 25 bp, Homo sapien
catgatgtcattagtgtggtcccac

SEQ ID NO: 4990674 - DNA, 25 bp, Homo sapien
tgtgcacatcattgcctttgcatga

SEQ ID NO: 4990675 - DNA, 25 bp, Homo sapien
tcagaaatcctcaagacttgagtct

SEQ ID NO: 4990676 - DNA, 25 bp, Homo sapien
caggcactgtctgcctgtggacacc

SEQ ID NO: 4990677 - DNA, 25 bp, Homo sapien
tcaggcactgtctgcctgtggacac

SEQ ID NO: 4990678 - DNA, 25 bp, Homo sapien
tgtctgcctgtggacacccgtggct

SEQ ID NO: 4990679 - DNA, 25 bp, Homo sapien
ctgcctgtggacacccgtggctcac

SEQ ID NO: 4990680 - DNA, 25 bp, Homo sapien
agctctggtgcttgacacactggtt

SEQ ID NO: 4990681 - DNA, 25 bp, Homo sapien
gacacactggttcagcaagaagcct

SEQ ID NO: 4990682 - DNA, 25 bp, Homo sapien
catcagctctggtgcttgacacact

SEQ ID NO: 4990683 - DNA, 25 bp, Homo sapien
ggtgcttgacacactggttcagcaa

SEQ ID NO: 4990684 - DNA, 25 bp, Homo sapien
ctccagtgtctgaacaggccccatg

SEQ ID NO: 4990685 - DNA, 25 bp, Homo sapien
ctgtggggctctgccggttcctgga

SEQ ID NO: 4990686 - DNA, 25 bp, Homo sapien
tccagtgtctgaacaggccccatgc

SEQ ID NO: 4990687 - DNA, 25 bp, Homo sapien
tgtggggctctgccggttcctggag

SEQ ID NO: 4990688 - DNA, 25 bp, Homo sapien
tctgcctcaaggagcacaagggttt

SEQ ID NO: 4990689 - DNA, 25 bp, Homo sapien
tagctaactatgcaacataaggccc

SEQ ID NO: 4990690 - DNA, 25 bp, Homo sapien
tctaagtgcaaagctctgtgctggg

SEQ ID NO: 4990691 - DNA, 25 bp, Homo sapien
tgctaatttactgacctatcgaaag

SEQ ID NO: 4990692 - DNA, 25 bp, Homo sapien
tcagccaagaaacgagcagacaact

SEQ ID NO: 4990693 - DNA, 25 bp, Homo sapien
tgtccctgagtcagtgtgagactgt

SEQ ID NO: 4990694 - DNA, 25 bp, Homo sapien
gaaacgagcagacaactcttctaac

SEQ ID NO: 4990695 - DNA, 25 bp, Homo sapien
ggatgaaccatttcctcagccaaga

SEQ ID NO: 4990696 - DNA, 25 bp, Homo sapien
acagtgatgctccactgcaggttgc

SEQ ID NO: 4990697 - DNA, 25 bp, Homo sapien
tacagtgatgctccactgcaggttg

SEQ ID NO: 4990698 - DNA, 25 bp, Homo sapien
ttctacagtgatgctccactgcagg

SEQ ID NO: 4990699 - DNA, 25 bp, Homo sapien
gtcatgagtatagtggccatagagg

SEQ ID NO: 4990700 - DNA, 25 bp, Homo sapien
cattgaaatcgattttcttttcagg

SEQ ID NO: 4990701 - DNA, 25 bp, Homo sapien
tgcaaatctttgtctcacttctttc

SEQ ID NO: 4990702 - DNA, 25 bp, Homo sapien
gaaatcagcattgaaatcgattttc

SEQ ID NO: 4990703 - DNA, 25 bp, Homo sapien
acatgaaatcagcattgaaatcgat

SEQ ID NO: 4990704 - DNA, 25 bp, Homo sapien
caaacaccaataagaagcacagagt

SEQ ID NO: 4990705 - DNA, 25 bp, Homo sapien
gctgcatcttaggagtaaggaccat

SEQ ID NO: 4990706 - DNA, 25 bp, Homo sapien
cacagttatcggctctccttaggaa

SEQ ID NO: 4990707 - DNA, 25 bp, Homo sapien
tggaggttgagttctgccaagcaaa

SEQ ID NO: 4990708 - DNA, 25 bp, Homo sapien
gagtgaacaccatttgacccgccat

SEQ ID NO: 4990709 - DNA, 25 bp, Homo sapien
tatggatctgatctaaacggaaatg

SEQ ID NO: 4990710 - DNA, 25 bp, Homo sapien
aacggaaatgggactggctttctct

SEQ ID NO: 4990711 - DNA, 25 bp, Homo sapien
agatccaggagtgaacaccatttga

SEQ ID NO: 4990712 - DNA, 25 bp, Homo sapien
tatcgatatcaatcctactggtgac

SEQ ID NO: 4990713 - DNA, 25 bp, Homo sapien
ccaatcattgtttctccggttgact

SEQ ID NO: 4990714 - DNA, 25 bp, Homo sapien
ggattcaggttggatacaaatagga

SEQ ID NO: 4990715 - DNA, 25 bp, Homo sapien
tgtttacaggcatccaatcattgtt

SEQ ID NO: 4990716 - DNA, 25 bp, Homo sapien
tcagtggagcaactcagaagggtgt

SEQ ID NO: 4990717 - DNA, 25 bp, Homo sapien
cacttgcttctgaggacagctcgct

SEQ ID NO: 4990718 - DNA, 25 bp, Homo sapien
taggcactaagtcagcttccggatc

SEQ ID NO: 4990719 - DNA, 25 bp, Homo sapien
tggagagacgaccagagctactgct

SEQ ID NO: 4990720 - DNA, 25 bp, Homo sapien
ttgctgtagctgcaagaaaagctga

SEQ ID NO: 4990721 - DNA, 25 bp, Homo sapien
tgctgtagctgcaagaaaagctgag

SEQ ID NO: 4990722 - DNA, 25 bp, Homo sapien
ccagaaggaagacgagcactgcctg

SEQ ID NO: 4990723 - DNA, 25 bp, Homo sapien
tgccaaacctgagggagcctgcatt

SEQ ID NO: 4990724 - DNA, 25 bp, Homo sapien
cagtgccatgaggtacagctgggct

SEQ ID NO: 4990725 - DNA, 25 bp, Homo sapien
ttcactgtgacttcccaagcaaagc

SEQ ID NO: 4990726 - DNA, 25 bp, Homo sapien
cattatctaaactcaagtgacaggg

SEQ ID NO: 4990727 - DNA, 25 bp, Homo sapien
tcctgagactcctgcaaattggtga

SEQ ID NO: 4990728 - DNA, 25 bp, Homo sapien
tgaaaagtatgcaccagtaccctgg

SEQ ID NO: 4990729 - DNA, 25 bp, Homo sapien
tctatcacatagtgttgctgaccac

SEQ ID NO: 4990730 - DNA, 25 bp, Homo sapien
tgaaaacaagaacacagcaaggccc

SEQ ID NO: 4990731 - DNA, 25 bp, Homo sapien
gaaaacaagaacacagcaaggccca

SEQ ID NO: 4990732 - DNA, 25 bp, Homo sapien
aaaacaagaacacagcaaggcccat

SEQ ID NO: 4990733 - DNA, 25 bp, Homo sapien
ctgaaaacaagaacacagcaaggcc

SEQ ID NO: 4990734 - DNA, 25 bp, Homo sapien
gtctggactcactcctagagcccat

SEQ ID NO: 4990735 - DNA, 25 bp, Homo sapien
catgtgtctccaactgtcaagactc

SEQ ID NO: 4990736 - DNA, 25 bp, Homo sapien
cctggacgtctggactcactcctag

SEQ ID NO: 4990737 - DNA, 25 bp, Homo sapien
aactgtcaagactcttactctccag

SEQ ID NO: 4990738 - DNA, 25 bp, Homo sapien
agaaatctggcagaacactcagccc

SEQ ID NO: 4990739 - DNA, 25 bp, Homo sapien
tgtccaaagaggacgcagaaatctg

SEQ ID NO: 4990740 - DNA, 25 bp, Homo sapien
actacaaagcccagatgatacacaa

SEQ ID NO: 4990741 - DNA, 25 bp, Homo sapien
cccctgctgcgtatggaaggcagaa

SEQ ID NO: 4990742 - DNA, 25 bp, Homo sapien
gtaaaggcaaggcatggtgtcccat

SEQ ID NO: 4990743 - DNA, 25 bp, Homo sapien
gatggtggctatcctcagcttgttc

SEQ ID NO: 4990744 - DNA, 25 bp, Homo sapien
aatacagtaggccattgtaacccag

SEQ ID NO: 4990745 - DNA, 25 bp, Homo sapien
gggatacagtctccgaaatgcatca

SEQ ID NO: 4990746 - DNA, 25 bp, Homo sapien
attatcataggccaacacagggtca

SEQ ID NO: 4990747 - DNA, 25 bp, Homo sapien
tcctctggatactgcctggaggacc

SEQ ID NO: 4990748 - DNA, 25 bp, Homo sapien
tcataggccaacacagggtcaggat

SEQ ID NO: 4990749 - DNA, 25 bp, Homo sapien
catctctgtgatagcaatgccttcc

SEQ ID NO: 4990750 - DNA, 25 bp, Homo sapien
agtaggacttttgcccacatccagg

SEQ ID NO: 4990751 - DNA, 25 bp, Homo sapien
tccagtaaacagaagaggttccctg

SEQ ID NO: 4990752 - DNA, 25 bp, Homo sapien
catagttctctaggagggtgcacac

SEQ ID NO: 4990753 - DNA, 25 bp, Homo sapien
caggtcctcactgaacaagttggaa

SEQ ID NO: 4990754 - DNA, 25 bp, Homo sapien
tcgggaaagagcgttgaatgtggct

SEQ ID NO: 4990755 - DNA, 25 bp, Homo sapien
gaaagagcgttgaatgtggctccat

SEQ ID NO: 4990756 - DNA, 25 bp, Homo sapien
agctcgggaaagagcgttgaatgtg

SEQ ID NO: 4990757 - DNA, 25 bp, Homo sapien
agcgttgaatgtggctccattccta

SEQ ID NO: 4990758 - DNA, 25 bp, Homo sapien
cctgaaaggtacaagcttgtgccat

SEQ ID NO: 4990759 - DNA, 25 bp, Homo sapien
tgtacctgaaaggtacaagcttgtg

SEQ ID NO: 4990760 - DNA, 25 bp, Homo sapien
cttgtacctgaaaggtacaagcttg

SEQ ID NO: 4990761 - DNA, 25 bp, Homo sapien
tacctgaaaggtacaagcttgtgcc

SEQ ID NO: 4990762 - DNA, 25 bp, Homo sapien
agttcagccttcgacctgacagcat

SEQ ID NO: 4990763 - DNA, 25 bp, Homo sapien
aagttcagccttcgacctgacagca

SEQ ID NO: 4990764 - DNA, 25 bp, Homo sapien
aaagttcagccttcgacctgacagc

SEQ ID NO: 4990765 - DNA, 25 bp, Homo sapien
tacataacatagaattaagaaataa

SEQ ID NO: 4990766 - DNA, 25 bp, Homo sapien
taattaccagtgcaggtgcatgcag

SEQ ID NO: 4990767 - DNA, 25 bp, Homo sapien
agaaatgacacccacaggaagacag

SEQ ID NO: 4990768 - DNA, 25 bp, Homo sapien
ctaattaccagtgcaggtgcatgca

SEQ ID NO: 4990769 - DNA, 25 bp, Homo sapien
gactgtagtcaacaagcaaaaactg

SEQ ID NO: 4990770 - DNA, 25 bp, Homo sapien
catcaaacttcaccgaaggactgta

SEQ ID NO: 4990771 - DNA, 25 bp, Homo sapien
ccgaaggactgtagtcaacaagcaa

SEQ ID NO: 4990772 - DNA, 25 bp, Homo sapien
gcaaaaactgtgcaagattaaaagc

SEQ ID NO: 4990773 - DNA, 25 bp, Homo sapien
catctcttaaaacgtcacttctctg

SEQ ID NO: 4990774 - DNA, 25 bp, Homo sapien
tcttctcttagctggaatgtcatct

SEQ ID NO: 4990775 - DNA, 25 bp, Homo sapien
ttccctcgccctgaagtactgggta

SEQ ID NO: 4990776 - DNA, 25 bp, Homo sapien
tactgggtaactgtaagccccatgg

SEQ ID NO: 4990777 - DNA, 25 bp, Homo sapien
cagagcccgagtccccattgacatc

SEQ ID NO: 4990778 - DNA, 25 bp, Homo sapien
caggtggaagacaggccagtatccg

SEQ ID NO: 4990779 - DNA, 25 bp, Homo sapien
gacaccaggtatgagctccatgagt

SEQ ID NO: 4990780 - DNA, 25 bp, Homo sapien
ttcttgcagctgatgctcagcagct

SEQ ID NO: 4990781 - DNA, 25 bp, Homo sapien
gtttggcggcatccttacagaagca

SEQ ID NO: 4990782 - DNA, 25 bp, Homo sapien
tctgactggatagagcgctggcctt

SEQ ID NO: 4990783 - DNA, 25 bp, Homo sapien
tggctctaagctccctaacagtagg

SEQ ID NO: 4990784 - DNA, 25 bp, Homo sapien
ggtagcgcaccattagaggcacatg

SEQ ID NO: 4990785 - DNA, 25 bp, Homo sapien
cctgatgagagggtgctgtagtgcc

SEQ ID NO: 4990786 - DNA, 25 bp, Homo sapien
agcactgtctgaactaggggggcat

SEQ ID NO: 4990787 - DNA, 25 bp, Homo sapien
gtattatttcagacagtgggtagca

SEQ ID NO: 4990788 - DNA, 25 bp, Homo sapien
gggccgaaagtctccagactcacag

SEQ ID NO: 4990789 - DNA, 25 bp, Homo sapien
cagtgctgctctgaaggccttcctt

SEQ ID NO: 4990790 - DNA, 25 bp, Homo sapien
caatgtctgtgattcaaggaaaaac

SEQ ID NO: 4990791 - DNA, 25 bp, Homo sapien
tctgtctacgtcttgaattagaaac

SEQ ID NO: 4990792 - DNA, 25 bp, Homo sapien
aatctccaaattggacatccagagc

SEQ ID NO: 4990793 - DNA, 25 bp, Homo sapien
aatacacaggctctcatttagtttg

SEQ ID NO: 4990794 - DNA, 25 bp, Homo sapien
tccccaattgggactgttagaatta

SEQ ID NO: 4990795 - DNA, 25 bp, Homo sapien
cactctccagagaaaatattggtta

SEQ ID NO: 4990796 - DNA, 25 bp, Homo sapien
tctcactggacatgggacctagtat

SEQ ID NO: 4990797 - DNA, 25 bp, Homo sapien
aatgccttaaccctatgagtgaaag

SEQ ID NO: 4990798 - DNA, 25 bp, Homo sapien
cgcgcgcagccgaaaatgggaaaat

SEQ ID NO: 4990799 - DNA, 25 bp, Homo sapien
tctaaaaggtgatgatagttcccac

SEQ ID NO: 4990800 - DNA, 25 bp, Homo sapien
tagtcgcagtgttcgttccagcaag

SEQ ID NO: 4990801 - DNA, 25 bp, Homo sapien
gaaaatcttaatcgtctgtgcacac

SEQ ID NO: 4990802 - DNA, 25 bp, Homo sapien
gattttcagtgctaaaagtccagaa

SEQ ID NO: 4990803 - DNA, 25 bp, Homo sapien
agaatagctctccacttgacctgcc

SEQ ID NO: 4990804 - DNA, 25 bp, Homo sapien
cttgtcactgcggcgagttagcagt

SEQ ID NO: 4990805 - DNA, 25 bp, Homo sapien
tcactgtgtacaccctgattttcag

SEQ ID NO: 4990806 - DNA, 25 bp, Homo sapien
tatacttcgtcaggatgagtccatc

SEQ ID NO: 4990807 - DNA, 25 bp, Homo sapien
tctatgcaagaaaggataaacaccc

SEQ ID NO: 4990808 - DNA, 25 bp, Homo sapien
gacaaagggattcgtatttatgccc

SEQ ID NO: 4990809 - DNA, 25 bp, Homo sapien
tatgccctgaagttgcagcttccag

SEQ ID NO: 4990810 - DNA, 25 bp, Homo sapien
acagacgagctctccagggtgacct

SEQ ID NO: 4990811 - DNA, 25 bp, Homo sapien
gcacttggtcactaccctccttggt

SEQ ID NO: 4990812 - DNA, 25 bp, Homo sapien
tttgctgatcctgcacttggtcact

SEQ ID NO: 4990813 - DNA, 25 bp, Homo sapien
accctccttggtgagagcaccggac

SEQ ID NO: 4990814 - DNA, 25 bp, Homo sapien
aactaggctttgagaagacactcca

SEQ ID NO: 4990815 - DNA, 25 bp, Homo sapien
gatgcacaactgacttctaaaccga

SEQ ID NO: 4990816 - DNA, 25 bp, Homo sapien
gaagactcgtgcagtctgctcaggg

SEQ ID NO: 4990817 - DNA, 25 bp, Homo sapien
gctcagggtttttgtacccagcaag

SEQ ID NO: 4990818 - DNA, 25 bp, Homo sapien
cacagggatgccaagtgtctgtgga

SEQ ID NO: 4990819 - DNA, 25 bp, Homo sapien
gagtaagtgtctggtatgccacact

SEQ ID NO: 4990820 - DNA, 25 bp, Homo sapien
ggagtgacttccagcagccagtttc

SEQ ID NO: 4990821 - DNA, 25 bp, Homo sapien
tgcctcatggcacagggatgccaag

SEQ ID NO: 4990822 - DNA, 25 bp, Homo sapien
gtggctccccggacctggcttgcgt

SEQ ID NO: 4990823 - DNA, 25 bp, Homo sapien
acctggcttgcgttgactagggagc

SEQ ID NO: 4990824 - DNA, 25 bp, Homo sapien
actagggagcggatcgttggtttct

SEQ ID NO: 4990825 - DNA, 25 bp, Homo sapien
gccagttgtcttgcccctggtagcc

SEQ ID NO: 4990826 - DNA, 25 bp, Homo sapien
tcctccttgccagtacagcaaatgt

SEQ ID NO: 4990827 - DNA, 25 bp, Homo sapien
agtacacgtctgcattctgtgagcc

SEQ ID NO: 4990828 - DNA, 25 bp, Homo sapien
gcagacggtttctgtagtgcctgct

SEQ ID NO: 4990829 - DNA, 25 bp, Homo sapien
tagatgagggtttcgacttggaagg

SEQ ID NO: 4990830 - DNA, 25 bp, Homo sapien
tagtgtgtatggttgtgtctcctcc

SEQ ID NO: 4990831 - DNA, 25 bp, Homo sapien
gtgtatggttgtgtctcctccttcc

SEQ ID NO: 4990832 - DNA, 25 bp, Homo sapien
ctcctctagtgtgtatggttgtgtc

SEQ ID NO: 4990833 - DNA, 25 bp, Homo sapien
tcttgaatatcttttgccacactcc

SEQ ID NO: 4990834 - DNA, 25 bp, Homo sapien
cttcagacttagccagatcctgcac

SEQ ID NO: 4990835 - DNA, 25 bp, Homo sapien
tagccagatcctgcacccctctcat

SEQ ID NO: 4990836 - DNA, 25 bp, Homo sapien
aggaagccagcaaacctgcttcaga

SEQ ID NO: 4990837 - DNA, 25 bp, Homo sapien
tgaggaagccagcaaacctgcttca

SEQ ID NO: 4990838 - DNA, 25 bp, Homo sapien
gtgagcatcctgtgctgagctgcag

SEQ ID NO: 4990839 - DNA, 25 bp, Homo sapien
catcctgtgctgagctgcagtttac

SEQ ID NO: 4990840 - DNA, 25 bp, Homo sapien
gagcatcctgtgctgagctgcagtt

SEQ ID NO: 4990841 - DNA, 25 bp, Homo sapien
gcatcctgtgctgagctgcagttta

SEQ ID NO: 4990842 - DNA, 25 bp, Homo sapien
tagattagcagcctgctaaacgccg

SEQ ID NO: 4990843 - DNA, 25 bp, Homo sapien
tgctaaacgccggtgacagcctgtg

SEQ ID NO: 4990844 - DNA, 25 bp, Homo sapien
gcagcctgctaaacgccggtgacag

SEQ ID NO: 4990845 - DNA, 25 bp, Homo sapien
ctaaacgccggtgacagcctgtgtc

SEQ ID NO: 4990846 - DNA, 25 bp, Homo sapien
tcattggttggtggcgttgctgctc

SEQ ID NO: 4990847 - DNA, 25 bp, Homo sapien
tgctgctcgcccgtgtgataggttt

SEQ ID NO: 4990848 - DNA, 25 bp, Homo sapien
catgtgctggattccgcatgtgcct

SEQ ID NO: 4990849 - DNA, 25 bp, Homo sapien
cccgtgtgataggtttccacagtaa

SEQ ID NO: 4990850 - DNA, 25 bp, Homo sapien
atgtgtgtgcttgggagtgatgctt

SEQ ID NO: 4990851 - DNA, 25 bp, Homo sapien
tgtgtgtgcttgggagtgatgctta

SEQ ID NO: 4990852 - DNA, 25 bp, Homo sapien
gtgtgtgcttgggagtgatgcttac

SEQ ID NO: 4990853 - DNA, 25 bp, Homo sapien
tggaatgcccaatgttgcatcaatt

SEQ ID NO: 4990854 - DNA, 25 bp, Homo sapien
tctttgtaggtgtgtttcagtaccc

SEQ ID NO: 4990855 - DNA, 25 bp, Homo sapien
gcatcaatttgggtgtctttgtagg

SEQ ID NO: 4990856 - DNA, 25 bp, Homo sapien
cagtacccagtagactttgtttgca

SEQ ID NO: 4990857 - DNA, 25 bp, Homo sapien
ctgggaacagtcgttctacttcaca

SEQ ID NO: 4990858 - DNA, 25 bp, Homo sapien
tgatacaaaccacgcctgttcccat

SEQ ID NO: 4990859 - DNA, 25 bp, Homo sapien
acttccttgatacaaaccacgcctg

SEQ ID NO: 4990860 - DNA, 25 bp, Homo sapien
tccttgatacaaaccacgcctgttc

SEQ ID NO: 4990861 - DNA, 25 bp, Homo sapien
aggtctcttcctacagccagaccat

SEQ ID NO: 4990862 - DNA, 25 bp, Homo sapien
agagcagaacttaaattccagtcca

SEQ ID NO: 4990863 - DNA, 25 bp, Homo sapien
gcagaacttaaattccagtccagga

SEQ ID NO: 4990864 - DNA, 25 bp, Homo sapien
tccaggtctcttcctacagccagac

SEQ ID NO: 4990865 - DNA, 25 bp, Homo sapien
ccgagtgcaggtgtacttagtgggg

SEQ ID NO: 4990866 - DNA, 25 bp, Homo sapien
ggaatactttccaacaggcccatgc

SEQ ID NO: 4990867 - DNA, 25 bp, Homo sapien
gggaatactttccaacaggcccatg

SEQ ID NO: 4990868 - DNA, 25 bp, Homo sapien
caggtgtacttagtggggaatactt

SEQ ID NO: 4990869 - DNA, 25 bp, Homo sapien
tctgtacagggagctgcgagcacat

SEQ ID NO: 4990870 - DNA, 25 bp, Homo sapien
gaataaataagccttgccctcccaa

SEQ ID NO: 4990871 - DNA, 25 bp, Homo sapien
taactgcctatagtagagtgacgtc

SEQ ID NO: 4990872 - DNA, 25 bp, Homo sapien
gaacctaggctcttagatgctcaag

SEQ ID NO: 4990873 - DNA, 25 bp, Homo sapien
acagccccttggtctagatgaggca

SEQ ID NO: 4990874 - DNA, 25 bp, Homo sapien
caagggcccttctactaaagcatgc

SEQ ID NO: 4990875 - DNA, 25 bp, Homo sapien
cagatatgagatgcttgctatgcac

SEQ ID NO: 4990876 - DNA, 25 bp, Homo sapien
tgcctctcgaaaaggtgaacatggt

SEQ ID NO: 4990877 - DNA, 25 bp, Homo sapien
gtctctcaggattccacctcagaat

SEQ ID NO: 4990878 - DNA, 25 bp, Homo sapien
taatcacgtcggctgtagctcacag

SEQ ID NO: 4990879 - DNA, 25 bp, Homo sapien
gtggatgaccttatcaccaccaggc

SEQ ID NO: 4990880 - DNA, 25 bp, Homo sapien
gaattttataatcacgtcggctgta

SEQ ID NO: 4990881 - DNA, 25 bp, Homo sapien
gacttgctatatttttcatgccgac

SEQ ID NO: 4990882 - DNA, 25 bp, Homo sapien
tccctgttgataggaggttttgtag

SEQ ID NO: 4990883 - DNA, 25 bp, Homo sapien
tgtgcagtgtttctattcctgctga

SEQ ID NO: 4990884 - DNA, 25 bp, Homo sapien
catgccgactgtccctgtgcagaca

SEQ ID NO: 4990885 - DNA, 25 bp, Homo sapien
tgcaataaaactggttttctggccg

SEQ ID NO: 4990886 - DNA, 25 bp, Homo sapien
ggcgcggtggctcacgcctgtaatc

SEQ ID NO: 4990887 - DNA, 25 bp, Homo sapien
ccagcactttgggaggccgcagcag

SEQ ID NO: 4990888 - DNA, 25 bp, Homo sapien
cattgcaataaaactggttttctgg

SEQ ID NO: 4990889 - DNA, 25 bp, Homo sapien
attccccaaatcactctgtaaatag

SEQ ID NO: 4990890 - DNA, 25 bp, Homo sapien
atgtctgcatcttttcaattgtttc

SEQ ID NO: 4990891 - DNA, 25 bp, Homo sapien
ttatgtctgcatcttttcaattgtt

SEQ ID NO: 4990892 - DNA, 25 bp, Homo sapien
tatgtctgcatcttttcaattgttt

SEQ ID NO: 4990893 - DNA, 25 bp, Homo sapien
tcttgcctgcttgatgagatttggc

SEQ ID NO: 4990894 - DNA, 25 bp, Homo sapien
tgacatttatagtgtcctcacacag

SEQ ID NO: 4990895 - DNA, 25 bp, Homo sapien
ccttgactgttttgccagtttgctg

SEQ ID NO: 4990896 - DNA, 25 bp, Homo sapien
tgcacctgctcagtgtagatgacac

SEQ ID NO: 4990897 - DNA, 25 bp, Homo sapien
agtaacagctggagtgaatgcccat

SEQ ID NO: 4990898 - DNA, 25 bp, Homo sapien
caagcttcttaacgcgatgcacaca

SEQ ID NO: 4990899 - DNA, 25 bp, Homo sapien
ttcaggagtataagcctagctgctc

SEQ ID NO: 4990900 - DNA, 25 bp, Homo sapien
gccttcaggagtataagcctagctg

SEQ ID NO: 4990901 - DNA, 25 bp, Homo sapien
taactcaaaaccatttcaagcttct

SEQ ID NO: 4990902 - DNA, 25 bp, Homo sapien
gacatttgttgaatgagcatggtct

SEQ ID NO: 4990903 - DNA, 25 bp, Homo sapien
gacattactttccagacatttgttg

SEQ ID NO: 4990904 - DNA, 25 bp, Homo sapien
atttgttgaatgagcatggtctgtc

SEQ ID NO: 4990905 - DNA, 25 bp, Homo sapien
tgtgacattactttccagacatttg

SEQ ID NO: 4990906 - DNA, 25 bp, Homo sapien
cagtgccttcacacttttagttaca

SEQ ID NO: 4990907 - DNA, 25 bp, Homo sapien
agcagcaccttgtagcagcatcagt

SEQ ID NO: 4990908 - DNA, 25 bp, Homo sapien
ccttgtagcagcatcagttgtgagc

SEQ ID NO: 4990909 - DNA, 25 bp, Homo sapien
ttcagtgccttcacacttttagtta

SEQ ID NO: 4990910 - DNA, 25 bp, Homo sapien
aagctgcctccgttctccagtcagc

SEQ ID NO: 4990911 - DNA, 25 bp, Homo sapien
cctctcgataacattagaagctgcc

SEQ ID NO: 4990912 - DNA, 25 bp, Homo sapien
tccacctctcgataacattagaagc

SEQ ID NO: 4990913 - DNA, 25 bp, Homo sapien
aacatccacctctcgataacattag

SEQ ID NO: 4990914 - DNA, 25 bp, Homo sapien
cataaaggatgtgagggatcaaccc

SEQ ID NO: 4990915 - DNA, 25 bp, Homo sapien
accataaaggatgtgagggatcaac

SEQ ID NO: 4990916 - DNA, 25 bp, Homo sapien
ggaccataaaggatgtgagggatca

SEQ ID NO: 4990917 - DNA, 25 bp, Homo sapien
ccataaaggatgtgagggatcaacc

SEQ ID NO: 4990918 - DNA, 25 bp, Homo sapien
tgcccacggctgatgagatgccccg

SEQ ID NO: 4990919 - DNA, 25 bp, Homo sapien
acccatgcagggtctccagtgccca

SEQ ID NO: 4990920 - DNA, 25 bp, Homo sapien
ccacggctgatgagatgccccgcat

SEQ ID NO: 4990921 - DNA, 25 bp, Homo sapien
cagtgcccacggctgatgagatgcc

SEQ ID NO: 4990922 - DNA, 25 bp, Homo sapien
aaactctgctgtccgccagtatctg

SEQ ID NO: 4990923 - DNA, 25 bp, Homo sapien
tcacacgagaatctctacaagggat

SEQ ID NO: 4990924 - DNA, 25 bp, Homo sapien
tacaagggattccaaactctgctgt

SEQ ID NO: 4990925 - DNA, 25 bp, Homo sapien
tctgctgtccgccagtatctgctgt

SEQ ID NO: 4990926 - DNA, 25 bp, Homo sapien
ggagggtcagtaccaccactcacca

SEQ ID NO: 4990927 - DNA, 25 bp, Homo sapien
accactcaccattcgggaatgagga

SEQ ID NO: 4990928 - DNA, 25 bp, Homo sapien
gaaggagggtcagtaccaccactca

SEQ ID NO: 4990929 - DNA, 25 bp, Homo sapien
caccactcaccattcgggaatgagg

SEQ ID NO: 4990930 - DNA, 25 bp, Homo sapien
ttttaaggaggctcgctgagatgag

SEQ ID NO: 4990931 - DNA, 25 bp, Homo sapien
agatgaggtgtgggaactcacagca

SEQ ID NO: 4990932 - DNA, 25 bp, Homo sapien
tctatacaaggggatcagaccgcct

SEQ ID NO: 4990933 - DNA, 25 bp, Homo sapien
ggatcagaccgccttttaaggaggc

SEQ ID NO: 4990934 - DNA, 25 bp, Homo sapien
tgccacagtcctgccaaatttattt

SEQ ID NO: 4990935 - DNA, 25 bp, Homo sapien
ttttctacatcattcattcgattca

SEQ ID NO: 4990936 - DNA, 25 bp, Homo sapien
ctttgccacagtcctgccaaattta

SEQ ID NO: 4990937 - DNA, 25 bp, Homo sapien
ttcgattcacatttaccaaatgcat

SEQ ID NO: 4990938 - DNA, 25 bp, Homo sapien
aaagtgttcggcaaccacgccaaga

SEQ ID NO: 4990939 - DNA, 25 bp, Homo sapien
tacagacaggtagcatggtgaagcc

SEQ ID NO: 4990940 - DNA, 25 bp, Homo sapien
gaacatcatcaatagctccgagggc

SEQ ID NO: 4990941 - DNA, 25 bp, Homo sapien
agagccaggaggtgatcaacgccaa

SEQ ID NO: 4990942 - DNA, 25 bp, Homo sapien
catcaaacaagctagagagtcacag

SEQ ID NO: 4990943 - DNA, 25 bp, Homo sapien
cagttgtgaaggttgtgaggtctcc

SEQ ID NO: 4990944 - DNA, 25 bp, Homo sapien
tctcccatgtgtaagacagtgcgtg

SEQ ID NO: 4990945 - DNA, 25 bp, Homo sapien
gaacacgcgtcatctgccaaaagtt

SEQ ID NO: 4990946 - DNA, 25 bp, Homo sapien
tctatgtaatactgaccccaaggaa

SEQ ID NO: 4990947 - DNA, 25 bp, Homo sapien
taacaatgctacgttttgtgtccga

SEQ ID NO: 4990948 - DNA, 25 bp, Homo sapien
ccccaaggaaagacgatcagataca

SEQ ID NO: 4990949 - DNA, 25 bp, Homo sapien
ccgattcagtgtgtaaacgttggtg

SEQ ID NO: 4990950 - DNA, 25 bp, Homo sapien
cagtagagccttccattcaaaagtg

SEQ ID NO: 4990951 - DNA, 25 bp, Homo sapien
gaaccatatctgagcagcgtgattc

SEQ ID NO: 4990952 - DNA, 25 bp, Homo sapien
caaataccagccatatcagtagagc

SEQ ID NO: 4990953 - DNA, 25 bp, Homo sapien
catggtctctagtgctgcctatcaa

SEQ ID NO: 4990954 - DNA, 25 bp, Homo sapien
ctgtgtgttcaggtcctgtcccctt

SEQ ID NO: 4990955 - DNA, 25 bp, Homo sapien
tgtgttcaggtcctgtccccttgct

SEQ ID NO: 4990956 - DNA, 25 bp, Homo sapien
tcaccttcgtgagggtttctcctgt

SEQ ID NO: 4990957 - DNA, 25 bp, Homo sapien
aggtcctgtccccttgctttggcag

SEQ ID NO: 4990958 - DNA, 25 bp, Homo sapien
gggaaacaagccatgcgtgaatgca

SEQ ID NO: 4990959 - DNA, 25 bp, Homo sapien
ctgaatgaaactgtggtggctcgta

SEQ ID NO: 4990960 - DNA, 25 bp, Homo sapien
tccaccacgggttcaccatcctgtt

SEQ ID NO: 4990961 - DNA, 25 bp, Homo sapien
gcaattgctccctcaactgaatgaa

SEQ ID NO: 4990962 - DNA, 25 bp, Homo sapien
tttgtgcattctgccgtgtatatac

SEQ ID NO: 4990963 - DNA, 25 bp, Homo sapien
ggagttttgtgcattctgccgtgta

SEQ ID NO: 4990964 - DNA, 25 bp, Homo sapien
gcattctgccgtgtatatacgcaca

SEQ ID NO: 4990965 - DNA, 25 bp, Homo sapien
gagatggagttttgtgcattctgcc

SEQ ID NO: 4990966 - DNA, 25 bp, Homo sapien
gagctgatgctaacatcactgctgg

SEQ ID NO: 4990967 - DNA, 25 bp, Homo sapien
gatgcacttaggtcatgcagtgagc

SEQ ID NO: 4990968 - DNA, 25 bp, Homo sapien
tgtgatgctggctcgctttgccttc

SEQ ID NO: 4990969 - DNA, 25 bp, Homo sapien
ttgccatgtgatgctggctcgcttt

SEQ ID NO: 4990970 - DNA, 25 bp, Homo sapien
tgtctggattatcaagaagtttatg

SEQ ID NO: 4990971 - DNA, 25 bp, Homo sapien
cttgtctggattatcaagaagttta

SEQ ID NO: 4990972 - DNA, 25 bp, Homo sapien
tctggattatcaagaagtttatgga

SEQ ID NO: 4990973 - DNA, 25 bp, Homo sapien
ctggattatcaagaagtttatggag

SEQ ID NO: 4990974 - DNA, 25 bp, Homo sapien
cacaggcaagagactcccttggact

SEQ ID NO: 4990975 - DNA, 25 bp, Homo sapien
gccaaggtttgatgcattctcagaa

SEQ ID NO: 4990976 - DNA, 25 bp, Homo sapien
agaagtcccctgaaccacaggcaag

SEQ ID NO: 4990977 - DNA, 25 bp, Homo sapien
catggtgctgtgttggaaagatgcc

SEQ ID NO: 4990978 - DNA, 25 bp, Homo sapien
aaatggtggttccccctgggctgtg

SEQ ID NO: 4990979 - DNA, 25 bp, Homo sapien
gcaagagacaaatggtctgagagaa

SEQ ID NO: 4990980 - DNA, 25 bp, Homo sapien
ggaggataagcagatcatgccggct

SEQ ID NO: 4990981 - DNA, 25 bp, Homo sapien
ctgtgggtatctgggaggttctcat

SEQ ID NO: 4990982 - DNA, 25 bp, Homo sapien
atgacccctagcgtcccatgcagca

SEQ ID NO: 4990983 - DNA, 25 bp, Homo sapien
tagcgtcccatgcagcagagacgtg

SEQ ID NO: 4990984 - DNA, 25 bp, Homo sapien
cccctagcgtcccatgcagcagaga

SEQ ID NO: 4990985 - DNA, 25 bp, Homo sapien
tttccatgacccctagcgtcccatg

SEQ ID NO: 4990986 - DNA, 25 bp, Homo sapien
caggaggccacagctcactcttcac

SEQ ID NO: 4990987 - DNA, 25 bp, Homo sapien
tcttccttccgagtcctactgttct

SEQ ID NO: 4990988 - DNA, 25 bp, Homo sapien
gctggtgtgcctgcacagaaacatc

SEQ ID NO: 4990989 - DNA, 25 bp, Homo sapien
tggtgtgcctgcacagaaacatctt

SEQ ID NO: 4990990 - DNA, 25 bp, Homo sapien
ctggatccctgatgaggatagtttt

SEQ ID NO: 4990991 - DNA, 25 bp, Homo sapien
gatccctgatgaggatagtttttag

SEQ ID NO: 4990992 - DNA, 25 bp, Homo sapien
ttactaagaaccaagtggccttgac

SEQ ID NO: 4990993 - DNA, 25 bp, Homo sapien
tttactaagaaccaagtggccttga

SEQ ID NO: 4990994 - DNA, 25 bp, Homo sapien
gccagagtctctaacatgatatcag

SEQ ID NO: 4990995 - DNA, 25 bp, Homo sapien
ggaggctctgcaataagccgttttc

SEQ ID NO: 4990996 - DNA, 25 bp, Homo sapien
catgatatcagagagccagtccagg

SEQ ID NO: 4990997 - DNA, 25 bp, Homo sapien
tcacttcattttgtgcataatgagc

SEQ ID NO: 4990998 - DNA, 25 bp, Homo sapien
tgggccatctacagcaacaaatggc

SEQ ID NO: 4990999 - DNA, 25 bp, Homo sapien
actcaggcacgtctgcaactgggcc

SEQ ID NO: 4991000 - DNA, 25 bp, Homo sapien
ctgaactcaggcacgtctgcaactg

SEQ ID NO: 4991001 - DNA, 25 bp, Homo sapien
actgggccatctacagcaacaaatg

SEQ ID NO: 4991002 - DNA, 25 bp, Homo sapien
tttcatattaccatctgctaacctg

SEQ ID NO: 4991003 - DNA, 25 bp, Homo sapien
cttttcatattaccatctgctaacc

SEQ ID NO: 4991004 - DNA, 25 bp, Homo sapien
ttaccacagtgagcgtcatcatgtc

SEQ ID NO: 4991005 - DNA, 25 bp, Homo sapien
gtgttaccacagtgagcgtcatcat

SEQ ID NO: 4991006 - DNA, 25 bp, Homo sapien
gcagcacttcttccatttcccgaag

SEQ ID NO: 4991007 - DNA, 25 bp, Homo sapien
agtaagttatttgctccctgtaggg

SEQ ID NO: 4991008 - DNA, 25 bp, Homo sapien
taacggcctcaaaacatgacatgca

SEQ ID NO: 4991009 - DNA, 25 bp, Homo sapien
cccgaagttccaagcagtagtaagt

SEQ ID NO: 4991010 - DNA, 25 bp, Homo sapien
gaaatcactggttccaactggatca

SEQ ID NO: 4991011 - DNA, 25 bp, Homo sapien
tgctttccagtctctcacgtctgga

SEQ ID NO: 4991012 - DNA, 25 bp, Homo sapien
tccgcaaatggcctcagcattaaag

SEQ ID NO: 4991013 - DNA, 25 bp, Homo sapien
tgtttcctgactgtaaaacttcgtc

SEQ ID NO: 4991014 - DNA, 25 bp, Homo sapien
ctgattttgttgttcgaactgaaaa

SEQ ID NO: 4991015 - DNA, 25 bp, Homo sapien
tgttgttcgaactgaaaattttgtg

SEQ ID NO: 4991016 - DNA, 25 bp, Homo sapien
tgttcgaactgaaaattttgtgcga

SEQ ID NO: 4991017 - DNA, 25 bp, Homo sapien
ttcgaactgaaaattttgtgcgatc

SEQ ID NO: 4991018 - DNA, 25 bp, Homo sapien
tttgtccttgggtcagcctctcagt

SEQ ID NO: 4991019 - DNA, 25 bp, Homo sapien
acttttgtccttgggtcagcctctc

SEQ ID NO: 4991020 - DNA, 25 bp, Homo sapien
aacttttgtccttgggtcagcctct

SEQ ID NO: 4991021 - DNA, 25 bp, Homo sapien
gtccttgggtcagcctctcagtgac

SEQ ID NO: 4991022 - DNA, 25 bp, Homo sapien
gagcaatggcccctgcttgatatat

SEQ ID NO: 4991023 - DNA, 25 bp, Homo sapien
ttgttgctcaagttccatgtcagga

SEQ ID NO: 4991024 - DNA, 25 bp, Homo sapien
tctcagggacttgcaaaaacaaagg

SEQ ID NO: 4991025 - DNA, 25 bp, Homo sapien
tgaggctgcgctgtctgctgattcc

SEQ ID NO: 4991026 - DNA, 25 bp, Homo sapien
gatgtcccatcaactactgagctga

SEQ ID NO: 4991027 - DNA, 25 bp, Homo sapien
ttccccgccaaagaagattggattc

SEQ ID NO: 4991028 - DNA, 25 bp, Homo sapien
aacatggcggcctttggtttccaag

SEQ ID NO: 4991029 - DNA, 25 bp, Homo sapien
tgggctgggtccaacctgaatcaga

SEQ ID NO: 4991030 - DNA, 25 bp, Homo sapien
ggcttggctttggacccttagtgtc

SEQ ID NO: 4991031 - DNA, 25 bp, Homo sapien
tagaaggctaaacagggacttgctt

SEQ ID NO: 4991032 - DNA, 25 bp, Homo sapien
tctgtccagctacttgaccttgggc

SEQ ID NO: 4991033 - DNA, 25 bp, Homo sapien
aaaggaggcagtagaaggctaaaca

SEQ ID NO: 4991034 - DNA, 25 bp, Homo sapien
tcgttatctaggtaatattgtgtaa

SEQ ID NO: 4991035 - DNA, 25 bp, Homo sapien
cccaataggtagttgtttgatactc

SEQ ID NO: 4991036 - DNA, 25 bp, Homo sapien
ctgatttttaagagatcaatttgga

SEQ ID NO: 4991037 - DNA, 25 bp, Homo sapien
taggaaaattgtgtatcatgacggt

SEQ ID NO: 4991038 - DNA, 25 bp, Homo sapien
ctcccgcttgtaagtgcgaacatgt

SEQ ID NO: 4991039 - DNA, 25 bp, Homo sapien
tgatgagccgctagattgattgcat

SEQ ID NO: 4991040 - DNA, 25 bp, Homo sapien
aactgttgatgagccgctagattga

SEQ ID NO: 4991041 - DNA, 25 bp, Homo sapien
aatcaactgttgatgagccgctaga

SEQ ID NO: 4991042 - DNA, 25 bp, Homo sapien
gggtgaagaaatcatccaacagggt

SEQ ID NO: 4991043 - DNA, 25 bp, Homo sapien
ccataagtggaagtctctgtttaag

SEQ ID NO: 4991044 - DNA, 25 bp, Homo sapien
ccaacagggtcttagtctattatac

SEQ ID NO: 4991045 - DNA, 25 bp, Homo sapien
catatgattacgtgcagtctcacag

SEQ ID NO: 4991046 - DNA, 25 bp, Homo sapien
gcatgatgccatgtccaacaagcag

SEQ ID NO: 4991047 - DNA, 25 bp, Homo sapien
ggtacctcagagtagtctcacagag

SEQ ID NO: 4991048 - DNA, 25 bp, Homo sapien
gatggaatcacatcctccgcgctta

SEQ ID NO: 4991049 - DNA, 25 bp, Homo sapien
gaatctaagaactgccagggatgga

SEQ ID NO: 4991050 - DNA, 25 bp, Homo sapien
gatttcttgccccttgacaagagtg

SEQ ID NO: 4991051 - DNA, 25 bp, Homo sapien
cagctctcggtaaaagtgttggaaa

SEQ ID NO: 4991052 - DNA, 25 bp, Homo sapien
cattgatctccttatgtgtatcagc

SEQ ID NO: 4991053 - DNA, 25 bp, Homo sapien
gtgtatcagctctcggtaaaagtgt

SEQ ID NO: 4991054 - DNA, 25 bp, Homo sapien
cgaggttggcaagcaaaaagctgca

SEQ ID NO: 4991055 - DNA, 25 bp, Homo sapien
cagaatgtcccaaagggagagcgag

SEQ ID NO: 4991056 - DNA, 25 bp, Homo sapien
aagtcgctgtggaaggaggcaccca

SEQ ID NO: 4991057 - DNA, 25 bp, Homo sapien
tcctggcgcaggaatgagaagcaga

SEQ ID NO: 4991058 - DNA, 25 bp, Homo sapien
ctggagcacaggcaattacgagcag

SEQ ID NO: 4991059 - DNA, 25 bp, Homo sapien
gtgggtgttcagagggaaggctgtc

SEQ ID NO: 4991060 - DNA, 25 bp, Homo sapien
gagcacaggcaattacgagcagtgt

SEQ ID NO: 4991061 - DNA, 25 bp, Homo sapien
gcaattacgagcagtgtgggtgttc

SEQ ID NO: 4991062 - DNA, 25 bp, Homo sapien
tgcagcagggaacgtttcctcctgc

SEQ ID NO: 4991063 - DNA, 25 bp, Homo sapien
tgacttatggcactgagcatttcca

SEQ ID NO: 4991064 - DNA, 25 bp, Homo sapien
tttcatggctgacaaataggccaca

SEQ ID NO: 4991065 - DNA, 25 bp, Homo sapien
ccaggaattttcatggctgacaaat

SEQ ID NO: 4991066 - DNA, 25 bp, Homo sapien
ggccacagatgaatcgtgaggcaac

SEQ ID NO: 4991067 - DNA, 25 bp, Homo sapien
cttctttggatagacctggaagcca

SEQ ID NO: 4991068 - DNA, 25 bp, Homo sapien
ttctttggatagacctggaagccat

SEQ ID NO: 4991069 - DNA, 25 bp, Homo sapien
tctttggatagacctggaagccatt

SEQ ID NO: 4991070 - DNA, 25 bp, Homo sapien
tttggatagacctggaagccatttc

SEQ ID NO: 4991071 - DNA, 25 bp, Homo sapien
tgcactgcgtgttcccatttccaga

SEQ ID NO: 4991072 - DNA, 25 bp, Homo sapien
aggagccctgcactgcgtgttccca

SEQ ID NO: 4991073 - DNA, 25 bp, Homo sapien
cgtgttcccatttccagagcagcag

SEQ ID NO: 4991074 - DNA, 25 bp, Homo sapien
gagccctgcactgcgtgttcccatt

SEQ ID NO: 4991075 - DNA, 25 bp, Homo sapien
caaggtccatgtgggtcctgaagct

SEQ ID NO: 4991076 - DNA, 25 bp, Homo sapien
cctgaagctgggtttgcacagcatt

SEQ ID NO: 4991077 - DNA, 25 bp, Homo sapien
gcagttttgtgtgcgagtgacgggt

SEQ ID NO: 4991078 - DNA, 25 bp, Homo sapien
ccagtttgagtggagtcttcatgac

SEQ ID NO: 4991079 - DNA, 25 bp, Homo sapien
tccatattccgggagagagaaccag

SEQ ID NO: 4991080 - DNA, 25 bp, Homo sapien
ggccaagcttgggtgacaaccagca

SEQ ID NO: 4991081 - DNA, 25 bp, Homo sapien
gtctacctgacgcatctgaatccta

SEQ ID NO: 4991082 - DNA, 25 bp, Homo sapien
tggcttgcatgttccagttccagct

SEQ ID NO: 4991083 - DNA, 25 bp, Homo sapien
atgttcacagcgtctggccaccctg

SEQ ID NO: 4991084 - DNA, 25 bp, Homo sapien
caaaagcaatgccataggtcagtgt

SEQ ID NO: 4991085 - DNA, 25 bp, Homo sapien
ggtcagtgttaagcaatctttttca

SEQ ID NO: 4991086 - DNA, 25 bp, Homo sapien
ccagctcgctgacagaagtaatgtt

SEQ ID NO: 4991087 - DNA, 25 bp, Homo sapien
acaaccgcggccgactccaggcaca

SEQ ID NO: 4991088 - DNA, 25 bp, Homo sapien
tcaacacgtcagcacaaccgcggcc

SEQ ID NO: 4991089 - DNA, 25 bp, Homo sapien
aacacgtcagcacaaccgcggccga

SEQ ID NO: 4991090 - DNA, 25 bp, Homo sapien
acgtcagcacaaccgcggccgactc

SEQ ID NO: 4991091 - DNA, 25 bp, Homo sapien
cctgcagtaggtcggctgtgcggga

SEQ ID NO: 4991092 - DNA, 25 bp, Homo sapien
tagagatcagtcaagaggagcagca

SEQ ID NO: 4991093 - DNA, 25 bp, Homo sapien
caatgggaggtcctgcagtaggtcg

SEQ ID NO: 4991094 - DNA, 25 bp, Homo sapien
agcaataagcctctgggcagcggcc

SEQ ID NO: 4991095 - DNA, 25 bp, Homo sapien
gggagacaattaacatccactaatg

SEQ ID NO: 4991096 - DNA, 25 bp, Homo sapien
tttgcaactagcaaagcagttgcgc

SEQ ID NO: 4991097 - DNA, 25 bp, Homo sapien
taaacagcatattatcaacatttac

SEQ ID NO: 4991098 - DNA, 25 bp, Homo sapien
gcagttgcgctaacacccataaata

SEQ ID NO: 4991099 - DNA, 25 bp, Homo sapien
agtaacctcatctgagaacctgcaa

SEQ ID NO: 4991100 - DNA, 25 bp, Homo sapien
cccatgtaaagtaacctcatctgag

SEQ ID NO: 4991101 - DNA, 25 bp, Homo sapien
aagtaacctcatctgagaacctgca

SEQ ID NO: 4991102 - DNA, 25 bp, Homo sapien
ccatgtaaagtaacctcatctgaga

SEQ ID NO: 4991103 - DNA, 25 bp, Homo sapien
gcatcaggcccacgttttcatacac

SEQ ID NO: 4991104 - DNA, 25 bp, Homo sapien
tgctgttgcatcaggcccacgtttt

SEQ ID NO: 4991105 - DNA, 25 bp, Homo sapien
tcatctgaaactcttctgctgttgc

SEQ ID NO: 4991106 - DNA, 25 bp, Homo sapien
ttttcatacactctagcactgtctg

SEQ ID NO: 4991107 - DNA, 25 bp, Homo sapien
ttctgcacagcgtggagttggagta

SEQ ID NO: 4991108 - DNA, 25 bp, Homo sapien
atcacaacgtatgtccctgtccggc

SEQ ID NO: 4991109 - DNA, 25 bp, Homo sapien
accacgactggccttgcatgcatga

SEQ ID NO: 4991110 - DNA, 25 bp, Homo sapien
catgcatgatgcgttcctgcttatg

SEQ ID NO: 4991111 - DNA, 25 bp, Homo sapien
gaatatcaatcacaacgtatgtccc

SEQ ID NO: 4991112 - DNA, 25 bp, Homo sapien
ctcttagcatatagttgtgagcggt

SEQ ID NO: 4991113 - DNA, 25 bp, Homo sapien
catatagttgtgagcggtgctttct

SEQ ID NO: 4991114 - DNA, 25 bp, Homo sapien
ttctctgatattcctaacacgcatg

SEQ ID NO: 4991115 - DNA, 25 bp, Homo sapien
tgtgagcggtgctttctctgatatt

SEQ ID NO: 4991116 - DNA, 25 bp, Homo sapien
tcttcttgggctttgaattgttaca

SEQ ID NO: 4991117 - DNA, 25 bp, Homo sapien
ccaaaagtcgttcaccatgttttgc

SEQ ID NO: 4991118 - DNA, 25 bp, Homo sapien
catccgccaaaagtcgttcaccatg

SEQ ID NO: 4991119 - DNA, 25 bp, Homo sapien
aagtcgttcaccatgttttgcaggc

SEQ ID NO: 4991120 - DNA, 25 bp, Homo sapien
ttcaaatttgggcatgatgatattt

SEQ ID NO: 4991121 - DNA, 25 bp, Homo sapien
ttggtttcaaatttgggcatgatga

SEQ ID NO: 4991122 - DNA, 25 bp, Homo sapien
gatatttgcattgatgtcatctgaa

SEQ ID NO: 4991123 - DNA, 25 bp, Homo sapien
gatgatatttgcattgatgtcatct

SEQ ID NO: 4991124 - DNA, 25 bp, Homo sapien
cgttgggatcaccatcgtgtaggac

SEQ ID NO: 4991125 - DNA, 25 bp, Homo sapien
aggctcgttgggatcaccatcgtgt

SEQ ID NO: 4991126 - DNA, 25 bp, Homo sapien
gctcgttgggatcaccatcgtgtag

SEQ ID NO: 4991127 - DNA, 25 bp, Homo sapien
tcgttgggatcaccatcgtgtagga

SEQ ID NO: 4991128 - DNA, 25 bp, Homo sapien
ttttcggccgtagagaagtatgcac

SEQ ID NO: 4991129 - DNA, 25 bp, Homo sapien
ctggtatgatcaaagggcaggttat

SEQ ID NO: 4991130 - DNA, 25 bp, Homo sapien
ttcggccgtagagaagtatgcactc

SEQ ID NO: 4991131 - DNA, 25 bp, Homo sapien
ctcttttcggccgtagagaagtatg

SEQ ID NO: 4991132 - DNA, 25 bp, Homo sapien
tcgaattctgctatttcagcaacat

SEQ ID NO: 4991133 - DNA, 25 bp, Homo sapien
cttagttctcgaattctgctatttc

SEQ ID NO: 4991134 - DNA, 25 bp, Homo sapien
agttctcgaattctgctatttcagc

SEQ ID NO: 4991135 - DNA, 25 bp, Homo sapien
tctcgaattctgctatttcagcaac

SEQ ID NO: 4991136 - DNA, 25 bp, Homo sapien
ccccatgtttccatcataggattct

SEQ ID NO: 4991137 - DNA, 25 bp, Homo sapien
tgtaccccatgtttccatcatagga

SEQ ID NO: 4991138 - DNA, 25 bp, Homo sapien
cacaagatctgtcaaagaatcatac

SEQ ID NO: 4991139 - DNA, 25 bp, Homo sapien
ttgtaatgttccacaagatctgtca

SEQ ID NO: 4991140 - DNA, 25 bp, Homo sapien
taacatgggccactttagacttgcc

SEQ ID NO: 4991141 - DNA, 25 bp, Homo sapien
tagacttgccgttattgttctcccc

SEQ ID NO: 4991142 - DNA, 25 bp, Homo sapien
tgacagcaaatcataacatgggcca

SEQ ID NO: 4991143 - DNA, 25 bp, Homo sapien
gccgttattgttctcccctttgtca

SEQ ID NO: 4991144 - DNA, 25 bp, Homo sapien
agagaacaaaatctccaaggtggct

SEQ ID NO: 4991145 - DNA, 25 bp, Homo sapien
gagagaacaaaatctccaaggtggc

SEQ ID NO: 4991146 - DNA, 25 bp, Homo sapien
ctggtgcgcacagagagaacaaaat

SEQ ID NO: 4991147 - DNA, 25 bp, Homo sapien
acagagagaacaaaatctccaaggt

SEQ ID NO: 4991148 - DNA, 25 bp, Homo sapien
tctctgcttctttcccagagaggtg

SEQ ID NO: 4991149 - DNA, 25 bp, Homo sapien
ctttttcagttaataatttctctgc

SEQ ID NO: 4991150 - DNA, 25 bp, Homo sapien
cccagagaggtgtccctgaaaccac

SEQ ID NO: 4991151 - DNA, 25 bp, Homo sapien
cctttttcagttaataatttctctg

SEQ ID NO: 4991152 - DNA, 25 bp, Homo sapien
tctgcacagttcagaggatatttaa

SEQ ID NO: 4991153 - DNA, 25 bp, Homo sapien
ggatatttaagctcaataacatctc

SEQ ID NO: 4991154 - DNA, 25 bp, Homo sapien
cagaggatatttaagctcaataaca

SEQ ID NO: 4991155 - DNA, 25 bp, Homo sapien
ctttcagaggcaggatctgcacagt

SEQ ID NO: 4991156 - DNA, 25 bp, Homo sapien
cacagatcacagtaatcaccagtgt

SEQ ID NO: 4991157 - DNA, 25 bp, Homo sapien
cacacagatcacagtaatcaccagt

SEQ ID NO: 4991158 - DNA, 25 bp, Homo sapien
gcccgtgatgttctgtgtaatgccg

SEQ ID NO: 4991159 - DNA, 25 bp, Homo sapien
gtgtaatgccggaccaactcagcca

SEQ ID NO: 4991160 - DNA, 25 bp, Homo sapien
tctgtcagacggactagatctaaag

SEQ ID NO: 4991161 - DNA, 25 bp, Homo sapien
ccagagcttgcgttgatcacattca

SEQ ID NO: 4991162 - DNA, 25 bp, Homo sapien
tccaggttaagagtttcgcggtgcc

SEQ ID NO: 4991163 - DNA, 25 bp, Homo sapien
gtaattacagttcctcccagagctt

SEQ ID NO: 4991164 - DNA, 25 bp, Homo sapien
gctgagaggatctatgattcacacc

SEQ ID NO: 4991165 - DNA, 25 bp, Homo sapien
gaggctcctcacgtatctttcctgg

SEQ ID NO: 4991166 - DNA, 25 bp, Homo sapien
gcttctgctgctataacgttgtcaa

SEQ ID NO: 4991167 - DNA, 25 bp, Homo sapien
cagggatgcactcatttagatagga

SEQ ID NO: 4991168 - DNA, 25 bp, Homo sapien
gtttttatcagttgagtgcctatag

SEQ ID NO: 4991169 - DNA, 25 bp, Homo sapien
atttgttaaccacactgctccctgc

SEQ ID NO: 4991170 - DNA, 25 bp, Homo sapien
atatttgttaaccacactgctccct

SEQ ID NO: 4991171 - DNA, 25 bp, Homo sapien
tatttgttaaccacactgctccctg

SEQ ID NO: 4991172 - DNA, 25 bp, Homo sapien
caagcactggtgaacaacattggac

SEQ ID NO: 4991173 - DNA, 25 bp, Homo sapien
tctgtgatagcatctggaaactgtc

SEQ ID NO: 4991174 - DNA, 25 bp, Homo sapien
gatatatgatcacacccgaagaacc

SEQ ID NO: 4991175 - DNA, 25 bp, Homo sapien
gacgggatctcactaagctgtccag

SEQ ID NO: 4991176 - DNA, 25 bp, Homo sapien
tggcggcaaaatgcccaagcctgcc

SEQ ID NO: 4991177 - DNA, 25 bp, Homo sapien
tcaatatcattcaatggcggcaaaa

SEQ ID NO: 4991178 - DNA, 25 bp, Homo sapien
attcaatggcggcaaaatgcccaag

SEQ ID NO: 4991179 - DNA, 25 bp, Homo sapien
taaattcaatatcattcaatggcgg

SEQ ID NO: 4991180 - DNA, 25 bp, Homo sapien
ggccctctataagctccaattcaaa

SEQ ID NO: 4991181 - DNA, 25 bp, Homo sapien
tgtagctcccgatccaaagggcatg

SEQ ID NO: 4991182 - DNA, 25 bp, Homo sapien
ggatagcgaacaatcttccaggaca

SEQ ID NO: 4991183 - DNA, 25 bp, Homo sapien
ggtggacatttagcttggccctcta

SEQ ID NO: 4991184 - DNA, 25 bp, Homo sapien
aagggtctgggtagatttctggatc

SEQ ID NO: 4991185 - DNA, 25 bp, Homo sapien
catcttttcggatgttgtaggaacc

SEQ ID NO: 4991186 - DNA, 25 bp, Homo sapien
tgtaggaaccgtcctcaaggtgcaa

SEQ ID NO: 4991187 - DNA, 25 bp, Homo sapien
tctggatctaagtgcattaactgtg

SEQ ID NO: 4991188 - DNA, 25 bp, Homo sapien
aagcctcagcgattccttgattata

SEQ ID NO: 4991189 - DNA, 25 bp, Homo sapien
cctcagcgattccttgattatacta

SEQ ID NO: 4991190 - DNA, 25 bp, Homo sapien
gaaagcctcagcgattccttgatta

SEQ ID NO: 4991191 - DNA, 25 bp, Homo sapien
ggaaagcctcagcgattccttgatt

SEQ ID NO: 4991192 - DNA, 25 bp, Homo sapien
tcatcttggtcataattgggaaaca

SEQ ID NO: 4991193 - DNA, 25 bp, Homo sapien
tccagcctgaccttttagccgtatc

SEQ ID NO: 4991194 - DNA, 25 bp, Homo sapien
aatatagagagctcgcgagaggtcc

SEQ ID NO: 4991195 - DNA, 25 bp, Homo sapien
tatactatctgatgctgcgtggcga

SEQ ID NO: 4991196 - DNA, 25 bp, Homo sapien
ggcaggtcattcagttctgcttgac

SEQ ID NO: 4991197 - DNA, 25 bp, Homo sapien
aaataggattgccttccaagctgac

SEQ ID NO: 4991198 - DNA, 25 bp, Homo sapien
gttctgcttgactcaaacaaatagg

SEQ ID NO: 4991199 - DNA, 25 bp, Homo sapien
gactttttgaccagcattctctaat

SEQ ID NO: 4991200 - DNA, 25 bp, Homo sapien
tgtcattgagaaacatgcgcaggct

SEQ ID NO: 4991201 - DNA, 25 bp, Homo sapien
tcaaacatcactcggtagcagaaag

SEQ ID NO: 4991202 - DNA, 25 bp, Homo sapien
cgtgagggaattcaaggcatggccc

SEQ ID NO: 4991203 - DNA, 25 bp, Homo sapien
ggaatggtgtttgcttgcgatgccc

SEQ ID NO: 4991204 - DNA, 25 bp, Homo sapien
cattctctagaggtggttcacccgt

SEQ ID NO: 4991205 - DNA, 25 bp, Homo sapien
ggaactcaagaggattggcaccaaa

SEQ ID NO: 4991206 - DNA, 25 bp, Homo sapien
caacaccttatggtatgacaaggga

SEQ ID NO: 4991207 - DNA, 25 bp, Homo sapien
gagcacagcccaggtatggaattaa

SEQ ID NO: 4991208 - DNA, 25 bp, Homo sapien
acagcatgctgctatagcaatcccc

SEQ ID NO: 4991209 - DNA, 25 bp, Homo sapien
taagccatagacaacagcatgctgc

SEQ ID NO: 4991210 - DNA, 25 bp, Homo sapien
cttctcctaattccaagaataagcc

SEQ ID NO: 4991211 - DNA, 25 bp, Homo sapien
caagaataagccatagacaacagca

SEQ ID NO: 4991212 - DNA, 25 bp, Homo sapien
ctctgattagaaagggaaggatgcc

SEQ ID NO: 4991213 - DNA, 25 bp, Homo sapien
tatactcaaatgttggacctcaccc

SEQ ID NO: 4991214 - DNA, 25 bp, Homo sapien
tattaggctggacaagaggatggcc

SEQ ID NO: 4991215 - DNA, 25 bp, Homo sapien
gccttaattacaggaatggtccagt

SEQ ID NO: 4991216 - DNA, 25 bp, Homo sapien
tcttacagctgttgtgccaaacccc

SEQ ID NO: 4991217 - DNA, 25 bp, Homo sapien
tacagcaagcggagagtgagactag

SEQ ID NO: 4991218 - DNA, 25 bp, Homo sapien
aagtcgaaggcatcccaagagggaa

SEQ ID NO: 4991219 - DNA, 25 bp, Homo sapien
aagactgggagcataaccgctgggc

SEQ ID NO: 4991220 - DNA, 25 bp, Homo sapien
ctttgaattggaggcgacgagaacc

SEQ ID NO: 4991221 - DNA, 25 bp, Homo sapien
ggatcacccgacccggcgccgtgcg

SEQ ID NO: 4991222 - DNA, 25 bp, Homo sapien
gatcacccgacccggcgccgtgcga

SEQ ID NO: 4991223 - DNA, 25 bp, Homo sapien
gggatcacccgacccggcgccgtgc

SEQ ID NO: 4991224 - DNA, 25 bp, Homo sapien
cgggatcacccgacccggcgccgtg

SEQ ID NO: 4991225 - DNA, 25 bp, Homo sapien
catgacgcgcctcgggggcggtcct

SEQ ID NO: 4991226 - DNA, 25 bp, Homo sapien
ggggcggtgccatgacgcgcctcgg

SEQ ID NO: 4991227 - DNA, 25 bp, Homo sapien
gtgccatgacgcgcctcgggggcgg

SEQ ID NO: 4991228 - DNA, 25 bp, Homo sapien
gggcggtgccatgacgcgcctcggg

SEQ ID NO: 4991229 - DNA, 25 bp, Homo sapien
gctctcttacactcgggcctcagaa

SEQ ID NO: 4991230 - DNA, 25 bp, Homo sapien
cttgtgggctaggtgagaggccaag

SEQ ID NO: 4991231 - DNA, 25 bp, Homo sapien
aggtgtgacggtccctgggccactt

SEQ ID NO: 4991232 - DNA, 25 bp, Homo sapien
cggcggcgagcggttccttgtgggc

SEQ ID NO: 4991233 - DNA, 25 bp, Homo sapien
aataagtagccactaactctagggc

SEQ ID NO: 4991234 - DNA, 25 bp, Homo sapien
gatgctgaagttgccggataccatg

SEQ ID NO: 4991235 - DNA, 25 bp, Homo sapien
gacagatgtcactggcagatgctga

SEQ ID NO: 4991236 - DNA, 25 bp, Homo sapien
actctagggctgttcccatactggg

SEQ ID NO: 4991237 - DNA, 25 bp, Homo sapien
agatacttttcataggccccttggc

SEQ ID NO: 4991238 - DNA, 25 bp, Homo sapien
gatggccttgctcacttgtatgtca

SEQ ID NO: 4991239 - DNA, 25 bp, Homo sapien
tgcactgctgtaaatggaggaggct

SEQ ID NO: 4991240 - DNA, 25 bp, Homo sapien
tctgcgtgcttagttgggatgctct

SEQ ID NO: 4991241 - DNA, 25 bp, Homo sapien
catatgctgcatgaggacctttcta

SEQ ID NO: 4991242 - DNA, 25 bp, Homo sapien
ggtttaaaattcacggcaccatgga

SEQ ID NO: 4991243 - DNA, 25 bp, Homo sapien
tattatgcacgtgaagccttcccgg

SEQ ID NO: 4991244 - DNA, 25 bp, Homo sapien
tatgtaacctagctactttgggatg

SEQ ID NO: 4991245 - DNA, 25 bp, Homo sapien
ggacgatcatctgccttacagtgta

SEQ ID NO: 4991246 - DNA, 25 bp, Homo sapien
aacccgatgggtggcaattgtgata

SEQ ID NO: 4991247 - DNA, 25 bp, Homo sapien
taacatgtttttcctaacacagccg

SEQ ID NO: 4991248 - DNA, 25 bp, Homo sapien
taacattgcacattcaccagtccgt

SEQ ID NO: 4991249 - DNA, 25 bp, Homo sapien
tgatactgctacactgttcattcat

SEQ ID NO: 4991250 - DNA, 25 bp, Homo sapien
ttcccctcctgtgatgatactgcta

SEQ ID NO: 4991251 - DNA, 25 bp, Homo sapien
taatactgcaatttccagaatataa

SEQ ID NO: 4991252 - DNA, 25 bp, Homo sapien
tgtgatgatactgctacactgttca

SEQ ID NO: 4991253 - DNA, 25 bp, Homo sapien
taccttggcgaagtaagtacaatac

SEQ ID NO: 4991254 - DNA, 25 bp, Homo sapien
gatcttgtgaggaatactaaaccat

SEQ ID NO: 4991255 - DNA, 25 bp, Homo sapien
tggcccagactttttaaggtataca

SEQ ID NO: 4991256 - DNA, 25 bp, Homo sapien
caggaggcacccaaagataaacttt

SEQ ID NO: 4991257 - DNA, 25 bp, Homo sapien
ttattcacaggacacacactggtaa

SEQ ID NO: 4991258 - DNA, 25 bp, Homo sapien
ttcacaggacacacactggtaaagt

SEQ ID NO: 4991259 - DNA, 25 bp, Homo sapien
tattcacaggacacacactggtaaa

SEQ ID NO: 4991260 - DNA, 25 bp, Homo sapien
tcacaggacacacactggtaaagta

SEQ ID NO: 4991261 - DNA, 25 bp, Homo sapien
tggtttttaattctccatatgaaag

SEQ ID NO: 4991262 - DNA, 25 bp, Homo sapien
tcatgctattacctttaagaaaaat

SEQ ID NO: 4991263 - DNA, 25 bp, Homo sapien
agaaaaataatagctttacgatggt

SEQ ID NO: 4991264 - DNA, 25 bp, Homo sapien
acgatggtttttaattctccatatg

SEQ ID NO: 4991265 - DNA, 25 bp, Homo sapien
gtccaatggctgttaacataaatct

SEQ ID NO: 4991266 - DNA, 25 bp, Homo sapien
taacctacgagatgcagatcacctg

SEQ ID NO: 4991267 - DNA, 25 bp, Homo sapien
cataaatctaaatcctgagtaacct

SEQ ID NO: 4991268 - DNA, 25 bp, Homo sapien
tcctgagtaacctacgagatgcaga

SEQ ID NO: 4991269 - DNA, 25 bp, Homo sapien
tgtttacgacatggaaaaaccatgg

SEQ ID NO: 4991270 - DNA, 25 bp, Homo sapien
tccagggacatgtttacgacatgga

SEQ ID NO: 4991271 - DNA, 25 bp, Homo sapien
ttacgacatggaaaaaccatgggtg

SEQ ID NO: 4991272 - DNA, 25 bp, Homo sapien
gacatgtttacgacatggaaaaacc

SEQ ID NO: 4991273 - DNA, 25 bp, Homo sapien
gaaaaggcaggcttgagttcattat

SEQ ID NO: 4991274 - DNA, 25 bp, Homo sapien
atggaaaaggcaggcttgagttcat

SEQ ID NO: 4991275 - DNA, 25 bp, Homo sapien
ggaaaaggcaggcttgagttcatta

SEQ ID NO: 4991276 - DNA, 25 bp, Homo sapien
tgatggaaaaggcaggcttgagttc

SEQ ID NO: 4991277 - DNA, 25 bp, Homo sapien
aacaaagatcaaggcaactgcagta

SEQ ID NO: 4991278 - DNA, 25 bp, Homo sapien
caaagatcaaggcaactgcagtagc

SEQ ID NO: 4991279 - DNA, 25 bp, Homo sapien
aagatcaaggcaactgcagtagctg

SEQ ID NO: 4991280 - DNA, 25 bp, Homo sapien
aaagatcaaggcaactgcagtagct

SEQ ID NO: 4991281 - DNA, 25 bp, Homo sapien
ccaaggaggtcccaaacgagcagtt

SEQ ID NO: 4991282 - DNA, 25 bp, Homo sapien
ggtcccaaacgagcagttcaccaga

SEQ ID NO: 4991283 - DNA, 25 bp, Homo sapien
aaggaggtcccaaacgagcagttca

SEQ ID NO: 4991284 - DNA, 25 bp, Homo sapien
ccaaacgagcagttcaccagactga

SEQ ID NO: 4991285 - DNA, 25 bp, Homo sapien
ctgccagataaaacggaatttccat

SEQ ID NO: 4991286 - DNA, 25 bp, Homo sapien
agataaaacggaatttccatcccag

SEQ ID NO: 4991287 - DNA, 25 bp, Homo sapien
gccagataaaacggaatttccatcc

SEQ ID NO: 4991288 - DNA, 25 bp, Homo sapien
cagataaaacggaatttccatccca

SEQ ID NO: 4991289 - DNA, 25 bp, Homo sapien
ggatatgttgaactggccaatgtaa

SEQ ID NO: 4991290 - DNA, 25 bp, Homo sapien
gaactggccaatgtaagcccaaatg

SEQ ID NO: 4991291 - DNA, 25 bp, Homo sapien
tgtaaatgtcttcgcccccagtaac

SEQ ID NO: 4991292 - DNA, 25 bp, Homo sapien
caatgtaagcccaaatgaagtgatc

SEQ ID NO: 4991293 - DNA, 25 bp, Homo sapien
tcaatgacattaagacagccatctg

SEQ ID NO: 4991294 - DNA, 25 bp, Homo sapien
catcaatgacattaagacagccatc

SEQ ID NO: 4991295 - DNA, 25 bp, Homo sapien
tgcacatcaatgacattaagacagc

SEQ ID NO: 4991296 - DNA, 25 bp, Homo sapien
ctgtctgcacatcaatgacattaag

SEQ ID NO: 4991297 - DNA, 25 bp, Homo sapien
agtccggcttttctacctgatacaa

SEQ ID NO: 4991298 - DNA, 25 bp, Homo sapien
tgcaacacaaggtgagactcagata

SEQ ID NO: 4991299 - DNA, 25 bp, Homo sapien
gaaatggttctagccctttccaaga

SEQ ID NO: 4991300 - DNA, 25 bp, Homo sapien
taccctggcataaagcagtgttagc

SEQ ID NO: 4991301 - DNA, 25 bp, Homo sapien
aattccaatttacctagtattatct

SEQ ID NO: 4991302 - DNA, 25 bp, Homo sapien
attccaatttacctagtattatctg

SEQ ID NO: 4991303 - DNA, 25 bp, Homo sapien
tgccttctttggtgccggaaactaa

SEQ ID NO: 4991304 - DNA, 25 bp, Homo sapien
cggaaactaacagtgtgcttgcagc

SEQ ID NO: 4991305 - DNA, 25 bp, Homo sapien
ggtggccgttgtgaggtcccaaata

SEQ ID NO: 4991306 - DNA, 25 bp, Homo sapien
catacaatccctgaatggcatggaa

SEQ ID NO: 4991307 - DNA, 25 bp, Homo sapien
aaattatagtgagccgccaaagtgc

SEQ ID NO: 4991308 - DNA, 25 bp, Homo sapien
agtatgccggtgttgctaatgcaga

SEQ ID NO: 4991309 - DNA, 25 bp, Homo sapien
tgtatttcaacatcatcctacggaa

SEQ ID NO: 4991310 - DNA, 25 bp, Homo sapien
taaactctattgtgcagtatgccgg

SEQ ID NO: 4991311 - DNA, 25 bp, Homo sapien
tggacagatggttcccttccagctt

SEQ ID NO: 4991312 - DNA, 25 bp, Homo sapien
ggacagatggttcccttccagcttc

SEQ ID NO: 4991313 - DNA, 25 bp, Homo sapien
ctggacagatggttcccttccagct

SEQ ID NO: 4991314 - DNA, 25 bp, Homo sapien
cagggaaatgtgcaaagaagtaact

SEQ ID NO: 4991315 - DNA, 25 bp, Homo sapien
ggatggtagctaattctcagggaaa

SEQ ID NO: 4991316 - DNA, 25 bp, Homo sapien
gggtaccaaatattcaacgtcctgc

SEQ ID NO: 4991317 - DNA, 25 bp, Homo sapien
tcctgctcagaaactactattttgg

SEQ ID NO: 4991318 - DNA, 25 bp, Homo sapien
tcatgttccagctcggccagcaagt

SEQ ID NO: 4991319 - DNA, 25 bp, Homo sapien
catcatgttccagctcggccagcaa

SEQ ID NO: 4991320 - DNA, 25 bp, Homo sapien
aagtcaaagtggtgtcttttggtgc

SEQ ID NO: 4991321 - DNA, 25 bp, Homo sapien
gtcaaagtggtgtcttttggtgcct

SEQ ID NO: 4991322 - DNA, 25 bp, Homo sapien
gtgtgtttctatcacctgcacttgc

SEQ ID NO: 4991323 - DNA, 25 bp, Homo sapien
tgtgtttctatcacctgcacttgct

SEQ ID NO: 4991324 - DNA, 25 bp, Homo sapien
tgtgtgtttctatcacctgcacttg

SEQ ID NO: 4991325 - DNA, 25 bp, Homo sapien
tctccagagaatagcctgtcttcag

SEQ ID NO: 4991326 - DNA, 25 bp, Homo sapien
taatttttctccagagaatagcctg

SEQ ID NO: 4991327 - DNA, 25 bp, Homo sapien
gagaatagcctgtcttcagtcttta

SEQ ID NO: 4991328 - DNA, 25 bp, Homo sapien
ttttctccagagaatagcctgtctt

SEQ ID NO: 4991329 - DNA, 25 bp, Homo sapien
ttgcaggcttcacgagatcgattcc

SEQ ID NO: 4991330 - DNA, 25 bp, Homo sapien
tccttgcaggcttcacgagatcgat

SEQ ID NO: 4991331 - DNA, 25 bp, Homo sapien
gttcggtccttgcaggcttcacgag

SEQ ID NO: 4991332 - DNA, 25 bp, Homo sapien
cacccgcaggtctaaattggggtgg

SEQ ID NO: 4991333 - DNA, 25 bp, Homo sapien
tgggaagcaaataggcatcaaagat

SEQ ID NO: 4991334 - DNA, 25 bp, Homo sapien
gaagcaaataggcatcaaagatgct

SEQ ID NO: 4991335 - DNA, 25 bp, Homo sapien
gggaagcaaataggcatcaaagatg

SEQ ID NO: 4991336 - DNA, 25 bp, Homo sapien
agcaaataggcatcaaagatgctcg

SEQ ID NO: 4991337 - DNA, 25 bp, Homo sapien
tcatgtcccattaacgtgtcctggc

SEQ ID NO: 4991338 - DNA, 25 bp, Homo sapien
tcatgccaacagatcttactaacag

SEQ ID NO: 4991339 - DNA, 25 bp, Homo sapien
cgatgcagaatatagcctgttgtca

SEQ ID NO: 4991340 - DNA, 25 bp, Homo sapien
tcactgtagagtcccacgatgcaga

SEQ ID NO: 4991341 - DNA, 25 bp, Homo sapien
agcattaaaacagtagtctggctta

SEQ ID NO: 4991342 - DNA, 25 bp, Homo sapien
cattaaaacagtagtctggcttaat

SEQ ID NO: 4991343 - DNA, 25 bp, Homo sapien
gaagcattaaaacagtagtctggct

SEQ ID NO: 4991344 - DNA, 25 bp, Homo sapien
agaagcattaaaacagtagtctggc

SEQ ID NO: 4991345 - DNA, 25 bp, Homo sapien
tggcatctcctggtaaaagtaaaca

SEQ ID NO: 4991346 - DNA, 25 bp, Homo sapien
tatcccatgaagaagttatgacagt

SEQ ID NO: 4991347 - DNA, 25 bp, Homo sapien
agtggcatctcctggtaaaagtaaa

SEQ ID NO: 4991348 - DNA, 25 bp, Homo sapien
gtggcatctcctggtaaaagtaaac

SEQ ID NO: 4991349 - DNA, 25 bp, Homo sapien
ttttgattctttagaaaacatcttc

SEQ ID NO: 4991350 - DNA, 25 bp, Homo sapien
aaaatgatatacttctttgtagcat

SEQ ID NO: 4991351 - DNA, 25 bp, Homo sapien
tatttgaaaatgatatacttctttg

SEQ ID NO: 4991352 - DNA, 25 bp, Homo sapien
gatatacttctttgtagcatttttg

SEQ ID NO: 4991353 - DNA, 25 bp, Homo sapien
tactgaagatccattgcgagagacc

SEQ ID NO: 4991354 - DNA, 25 bp, Homo sapien
tccattgcgagagaccgtgattcca

SEQ ID NO: 4991355 - DNA, 25 bp, Homo sapien
gagagaccgtgattccagtaactgc

SEQ ID NO: 4991356 - DNA, 25 bp, Homo sapien
cttgggatgttgtgaatactgaaga

SEQ ID NO: 4991357 - DNA, 25 bp, Homo sapien
ctaggtcagtgcttctcgagccttt

SEQ ID NO: 4991358 - DNA, 25 bp, Homo sapien
gatgttattccaggccagtgttttg

SEQ ID NO: 4991359 - DNA, 25 bp, Homo sapien
ttcttcggtcaggtcttcaaaagac

SEQ ID NO: 4991360 - DNA, 25 bp, Homo sapien
ttttatagtgctcgtgtaactgcag

SEQ ID NO: 4991361 - DNA, 25 bp, Homo sapien
aactgcagtttggtgatgttattcc

SEQ ID NO: 4991362 - DNA, 25 bp, Homo sapien
gatccttcgaggatgtggtgtcaca

SEQ ID NO: 4991363 - DNA, 25 bp, Homo sapien
aattccaagatttgcgtaagcatgg

SEQ ID NO: 4991364 - DNA, 25 bp, Homo sapien
tctgccatagaagcattataactgg

SEQ ID NO: 4991365 - DNA, 25 bp, Homo sapien
aagcatggctaccttctcatcagga

SEQ ID NO: 4991366 - DNA, 25 bp, Homo sapien
tatgtaccaggattgtctaaacctc

SEQ ID NO: 4991367 - DNA, 25 bp, Homo sapien
gaaccactaggttcgagttccttga

SEQ ID NO: 4991368 - DNA, 25 bp, Homo sapien
ctgatcaataggagggactaaccct

SEQ ID NO: 4991369 - DNA, 25 bp, Homo sapien
taaacctcattatagaccttcagaa

SEQ ID NO: 4991370 - DNA, 25 bp, Homo sapien
caagtctacacctccttcataggtc

SEQ ID NO: 4991371 - DNA, 25 bp, Homo sapien
atgttcaaagaaattgctattcact

SEQ ID NO: 4991372 - DNA, 25 bp, Homo sapien
tttagaacctaaacaatgcaacaac

SEQ ID NO: 4991373 - DNA, 25 bp, Homo sapien
tgaaagatgtgctatttcaatgtaa

SEQ ID NO: 4991374 - DNA, 25 bp, Homo sapien
aagacatacaaaacactattgaaag

SEQ ID NO: 4991375 - DNA, 25 bp, Homo sapien
tgtagccaaatattagatcaatcca

SEQ ID NO: 4991376 - DNA, 25 bp, Homo sapien
gaaggtgttcagacacataattgct

SEQ ID NO: 4991377 - DNA, 25 bp, Homo sapien
tattagatcaatccactcgtgaagg

SEQ ID NO: 4991378 - DNA, 25 bp, Homo sapien
caatccactcgtgaaggtgttcaga

SEQ ID NO: 4991379 - DNA, 25 bp, Homo sapien
ctattagattagactcaatcgaaaa

SEQ ID NO: 4991380 - DNA, 25 bp, Homo sapien
actcaatcgaaaaatcatggagtct

SEQ ID NO: 4991381 - DNA, 25 bp, Homo sapien
tagattagactcaatcgaaaaatca

SEQ ID NO: 4991382 - DNA, 25 bp, Homo sapien
tcctcccatttctcttgtctatcta

SEQ ID NO: 4991383 - DNA, 25 bp, Homo sapien
aatcattttcacattaaggtctctc

SEQ ID NO: 4991384 - DNA, 25 bp, Homo sapien
gactcatagaatacttctgatatgg

SEQ ID NO: 4991385 - DNA, 25 bp, Homo sapien
tggaatagggctcatatatccttat

SEQ ID NO: 4991386 - DNA, 25 bp, Homo sapien
ctgaaattgcactacttggtaaagc

SEQ ID NO: 4991387 - DNA, 25 bp, Homo sapien
aatccaacttcaggctattgactag

SEQ ID NO: 4991388 - DNA, 25 bp, Homo sapien
acatcatcaccatagaattctggaa

SEQ ID NO: 4991389 - DNA, 25 bp, Homo sapien
ggaagctccacgtcgtcaaccatct

SEQ ID NO: 4991390 - DNA, 25 bp, Homo sapien
gtcgtcaaccatctgtcctccttgt

SEQ ID NO: 4991391 - DNA, 25 bp, Homo sapien
ttactcatcagctttattaactgct

SEQ ID NO: 4991392 - DNA, 25 bp, Homo sapien
gtccagttactcatcagctttatta

SEQ ID NO: 4991393 - DNA, 25 bp, Homo sapien
caagtccagttactcatcagcttta

SEQ ID NO: 4991394 - DNA, 25 bp, Homo sapien
gaaaccccaagtccagttactcatc

SEQ ID NO: 4991395 - DNA, 25 bp, Homo sapien
tctttaaaatccgttgcaccatcca

SEQ ID NO: 4991396 - DNA, 25 bp, Homo sapien
aatccgttgcaccatccagacagtt

SEQ ID NO: 4991397 - DNA, 25 bp, Homo sapien
taaaatccgttgcaccatccagaca

SEQ ID NO: 4991398 - DNA, 25 bp, Homo sapien
tccgttgcaccatccagacagtttt

SEQ ID NO: 4991399 - DNA, 25 bp, Homo sapien
catttcctatgcacttgggggctgt

SEQ ID NO: 4991400 - DNA, 25 bp, Homo sapien
cacatagttctaaccatctctctga

SEQ ID NO: 4991401 - DNA, 25 bp, Homo sapien
cagctaaggaaatagcaatagcagc

SEQ ID NO: 4991402 - DNA, 25 bp, Homo sapien
tctaaccatctctctgagtgtccca

SEQ ID NO: 4991403 - DNA, 25 bp, Homo sapien
ctttgaaacaagtatgttgtatata

SEQ ID NO: 4991404 - DNA, 25 bp, Homo sapien
tgctttgaaacaagtatgttgtata

SEQ ID NO: 4991405 - DNA, 25 bp, Homo sapien
tgaaacaagtatgttgtatatatac

SEQ ID NO: 4991406 - DNA, 25 bp, Homo sapien
gtgctttgaaacaagtatgttgtat

SEQ ID NO: 4991407 - DNA, 25 bp, Homo sapien
tgcaggcacagcatatactctggtg

SEQ ID NO: 4991408 - DNA, 25 bp, Homo sapien
ctgcaggcacagcatatactctggt

SEQ ID NO: 4991409 - DNA, 25 bp, Homo sapien
gggaagagtagtgactcccatacat

SEQ ID NO: 4991410 - DNA, 25 bp, Homo sapien
cataacccggggaagagtagtgact

SEQ ID NO: 4991411 - DNA, 25 bp, Homo sapien
gactcccatacatgaactttggttc

SEQ ID NO: 4991412 - DNA, 25 bp, Homo sapien
gttcaggcatttcctggtagcgtgt

SEQ ID NO: 4991413 - DNA, 25 bp, Homo sapien
atttagggcccctactggcttactg

SEQ ID NO: 4991414 - DNA, 25 bp, Homo sapien
tactggcttactgagatcccggaag

SEQ ID NO: 4991415 - DNA, 25 bp, Homo sapien
ctctccagccgttccttatttaggg

SEQ ID NO: 4991416 - DNA, 25 bp, Homo sapien
cggaaggttcctggatttgacaaat

SEQ ID NO: 4991417 - DNA, 25 bp, Homo sapien
catggaaacacagggtactgggaga

SEQ ID NO: 4991418 - DNA, 25 bp, Homo sapien
gcagtgtgctccgccacatggtgct

SEQ ID NO: 4991419 - DNA, 25 bp, Homo sapien
tactgggagaggtcgttgcagctgc

SEQ ID NO: 4991420 - DNA, 25 bp, Homo sapien
tgaaggaggtactgatagttggaaa

SEQ ID NO: 4991421 - DNA, 25 bp, Homo sapien
aaacctagatcatgagacaggaaat

SEQ ID NO: 4991422 - DNA, 25 bp, Homo sapien
tctaagggaagatgtactttactac

SEQ ID NO: 4991423 - DNA, 25 bp, Homo sapien
taaagttaccttcaatagcttaatg

SEQ ID NO: 4991424 - DNA, 25 bp, Homo sapien
tgttccctactgaaagccaagtatt

SEQ ID NO: 4991425 - DNA, 25 bp, Homo sapien
tgaggttcatagaactttaggtaga

SEQ ID NO: 4991426 - DNA, 25 bp, Homo sapien
ttaggtagatgtcggaacacagatc

SEQ ID NO: 4991427 - DNA, 25 bp, Homo sapien
gaactttaggtagatgtcggaacac

SEQ ID NO: 4991428 - DNA, 25 bp, Homo sapien
ttcatagaactttaggtagatgtcg

SEQ ID NO: 4991429 - DNA, 25 bp, Homo sapien
aacagcaaaatcagagtctattttc

SEQ ID NO: 4991430 - DNA, 25 bp, Homo sapien
gaacagcaaaatcagagtctatttt

SEQ ID NO: 4991431 - DNA, 25 bp, Homo sapien
gaaagaacagcaaaatcagagtcta

SEQ ID NO: 4991432 - DNA, 25 bp, Homo sapien
aagaacagcaaaatcagagtctatt

SEQ ID NO: 4991433 - DNA, 25 bp, Homo sapien
taagtgtttaccgtcaataaactgc

SEQ ID NO: 4991434 - DNA, 25 bp, Homo sapien
gaaagtgtgacaatcatgccccagc

SEQ ID NO: 4991435 - DNA, 25 bp, Homo sapien
gtacttgtactttcagacatcccat

SEQ ID NO: 4991436 - DNA, 25 bp, Homo sapien
tggctaaactgaaagtgtgacaatc

SEQ ID NO: 4991437 - DNA, 25 bp, Homo sapien
gacatcttggagtgttatctggacc

SEQ ID NO: 4991438 - DNA, 25 bp, Homo sapien
ctccttttgtagatgcggcggacat

SEQ ID NO: 4991439 - DNA, 25 bp, Homo sapien
atgcggcggacatcttggagtgtta

SEQ ID NO: 4991440 - DNA, 25 bp, Homo sapien
ggcatgaggccgtgcctccttttgt

SEQ ID NO: 4991441 - DNA, 25 bp, Homo sapien
aaatacaggtttgtgtccgtgatgc

SEQ ID NO: 4991442 - DNA, 25 bp, Homo sapien
cgtgatgcacacgtgtccaggatta

SEQ ID NO: 4991443 - DNA, 25 bp, Homo sapien
gattagtcaccagaggcgtcaccat

SEQ ID NO: 4991444 - DNA, 25 bp, Homo sapien
cacacgtgtccaggattagtcacca

SEQ ID NO: 4991445 - DNA, 25 bp, Homo sapien
ctgctttgcattccatgtgcagctt

SEQ ID NO: 4991446 - DNA, 25 bp, Homo sapien
aacgagactgcaaaatagctgttat

SEQ ID NO: 4991447 - DNA, 25 bp, Homo sapien
tgttctagctaaacgagactgcaaa

SEQ ID NO: 4991448 - DNA, 25 bp, Homo sapien
gctaaacgagactgcaaaatagctg

SEQ ID NO: 4991449 - DNA, 25 bp, Homo sapien
atgatgttctagctaaacgagactg

SEQ ID NO: 4991450 - DNA, 25 bp, Homo sapien
tggtcacccaatttgtcaaggcagg

SEQ ID NO: 4991451 - DNA, 25 bp, Homo sapien
catggcggtttggtcacccaatttg

SEQ ID NO: 4991452 - DNA, 25 bp, Homo sapien
tttgtcaaggcaggatgctctgtga

SEQ ID NO: 4991453 - DNA, 25 bp, Homo sapien
ccaatttgtcaaggcaggatgctct

SEQ ID NO: 4991454 - DNA, 25 bp, Homo sapien
cactttcccgggaacatccaattca

SEQ ID NO: 4991455 - DNA, 25 bp, Homo sapien
tcttccactttcccgggaacatcca

SEQ ID NO: 4991456 - DNA, 25 bp, Homo sapien
ctgaagcaacgtctccacaacatct

SEQ ID NO: 4991457 - DNA, 25 bp, Homo sapien
tgaagcaacgtctccacaacatctt

SEQ ID NO: 4991458 - DNA, 25 bp, Homo sapien
gaacctgctatgataaaatctgcat

SEQ ID NO: 4991459 - DNA, 25 bp, Homo sapien
cctagtgtaacttccccactggaat

SEQ ID NO: 4991460 - DNA, 25 bp, Homo sapien
tgtgccaaactatgctactttaaga

SEQ ID NO: 4991461 - DNA, 25 bp, Homo sapien
ttaagaacatgtgtacagaacctgc

SEQ ID NO: 4991462 - DNA, 25 bp, Homo sapien
tttcattccattatgattggaaaaa

SEQ ID NO: 4991463 - DNA, 25 bp, Homo sapien
catgtgcttgagaggaaagtgtatt

SEQ ID NO: 4991464 - DNA, 25 bp, Homo sapien
tcattccattatgattggaaaaata

SEQ ID NO: 4991465 - DNA, 25 bp, Homo sapien
tggttttttgagagaatgttgttta

SEQ ID NO: 4991466 - DNA, 25 bp, Homo sapien
agagacaggtttcacagtgttaacc

SEQ ID NO: 4991467 - DNA, 25 bp, Homo sapien
actacaggcacttgcctcgcccggc

SEQ ID NO: 4991468 - DNA, 25 bp, Homo sapien
acaggcacttgcctcgcccggctaa

SEQ ID NO: 4991469 - DNA, 25 bp, Homo sapien
agacaggtttcacagtgttaaccag

SEQ ID NO: 4991470 - DNA, 25 bp, Homo sapien
tagagtaatggcctttagctccatc

SEQ ID NO: 4991471 - DNA, 25 bp, Homo sapien
gtatatatataggactttttccact

SEQ ID NO: 4991472 - DNA, 25 bp, Homo sapien
tatatataggactttttccacttgt

SEQ ID NO: 4991473 - DNA, 25 bp, Homo sapien
gtgttactataactatgtgtgtgca

SEQ ID NO: 4991474 - DNA, 25 bp, Homo sapien
gaaatacatgaaaagctttacttac

SEQ ID NO: 4991475 - DNA, 25 bp, Homo sapien
aaatgactatataaattgctggaaa

SEQ ID NO: 4991476 - DNA, 25 bp, Homo sapien
attgctggaaatacatgaaaagctt

SEQ ID NO: 4991477 - DNA, 25 bp, Homo sapien
caaaatgactatataaattgctgga

SEQ ID NO: 4991478 - DNA, 25 bp, Homo sapien
tatatggtgcaacaacattatgttc

SEQ ID NO: 4991479 - DNA, 25 bp, Homo sapien
cctttctattttatatggtgcaaca

SEQ ID NO: 4991480 - DNA, 25 bp, Homo sapien
ttctattttatatggtgcaacaaca

SEQ ID NO: 4991481 - DNA, 25 bp, Homo sapien
tattttatatggtgcaacaacatta

SEQ ID NO: 4991482 - DNA, 25 bp, Homo sapien
tgaaaatgagtgaaatacccccaga

SEQ ID NO: 4991483 - DNA, 25 bp, Homo sapien
ctgactgaaaatgagtgaaataccc

SEQ ID NO: 4991484 - DNA, 25 bp, Homo sapien
tgactgaaaatgagtgaaatacccc

SEQ ID NO: 4991485 - DNA, 25 bp, Homo sapien
atgagtgaaatacccccagattttg

SEQ ID NO: 4991486 - DNA, 25 bp, Homo sapien
tttgtgaagtgtctattggctccat

SEQ ID NO: 4991487 - DNA, 25 bp, Homo sapien
tatttttatacagtctctcaaagga

SEQ ID NO: 4991488 - DNA, 25 bp, Homo sapien
gtgaagtgtctattggctccatttt

SEQ ID NO: 4991489 - DNA, 25 bp, Homo sapien
ttctccatgctttcctatttttata

SEQ ID NO: 4991490 - DNA, 25 bp, Homo sapien
tattgaatctggttcaaaaatcacc

SEQ ID NO: 4991491 - DNA, 25 bp, Homo sapien
atgatgggctgggatattgaatctg

SEQ ID NO: 4991492 - DNA, 25 bp, Homo sapien
caaaaatcaccgattttgaacatat

SEQ ID NO: 4991493 - DNA, 25 bp, Homo sapien
tatttttaaggagcctctgattttc

SEQ ID NO: 4991494 - DNA, 25 bp, Homo sapien
attggctctatgctgttcaaagtag

SEQ ID NO: 4991495 - DNA, 25 bp, Homo sapien
tctatgctgttcaaagtagtactcc

SEQ ID NO: 4991496 - DNA, 25 bp, Homo sapien
cccttgtgcaaaatgtgattggctc

SEQ ID NO: 4991497 - DNA, 25 bp, Homo sapien
gcaaaatgtgattggctctatgctg

SEQ ID NO: 4991498 - DNA, 25 bp, Homo sapien
tcatcaagtgtcatactgcagggca

SEQ ID NO: 4991499 - DNA, 25 bp, Homo sapien
tgtgagatgcagtgacttccagcca

SEQ ID NO: 4991500 - DNA, 25 bp, Homo sapien
ccagccaagatggttcagatatcaa

SEQ ID NO: 4991501 - DNA, 25 bp, Homo sapien
tatcactcagctggactctagaaaa

SEQ ID NO: 4991502 - DNA, 25 bp, Homo sapien
ttcgaatggccaagtgtctgttttc

SEQ ID NO: 4991503 - DNA, 25 bp, Homo sapien
tataagtatacttatttcgaatggc

SEQ ID NO: 4991504 - DNA, 25 bp, Homo sapien
ccactttatagttattcaaaccaga

SEQ ID NO: 4991505 - DNA, 25 bp, Homo sapien
taaccaggatataagtatacttatt

SEQ ID NO: 4991506 - DNA, 25 bp, Homo sapien
tgtctaaaggagtcggcaggaaaaa

SEQ ID NO: 4991507 - DNA, 25 bp, Homo sapien
gcatggagctagtcctgtgtctaaa

SEQ ID NO: 4991508 - DNA, 25 bp, Homo sapien
ccggcgaccaactctgcggcgccgg

SEQ ID NO: 4991509 - DNA, 25 bp, Homo sapien
aatgcgagtgggtggtcgccggcct

SEQ ID NO: 4991510 - DNA, 25 bp, Homo sapien
cgccgggacctgcactgccggatag

SEQ ID NO: 4991511 - DNA, 25 bp, Homo sapien
tctcaccccgacctcaggtttccgc

SEQ ID NO: 4991512 - DNA, 25 bp, Homo sapien
cctgcactgccggatagctcggcat

SEQ ID NO: 4991513 - DNA, 25 bp, Homo sapien
gatagctcggcatgcctcggctccg

SEQ ID NO: 4991514 - DNA, 25 bp, Homo sapien
ctgctgcttcttccggataaacgcc

SEQ ID NO: 4991515 - DNA, 25 bp, Homo sapien
tgctgcttcttccggataaacgcca

SEQ ID NO: 4991516 - DNA, 25 bp, Homo sapien
gctgcttcttccggataaacgccat

SEQ ID NO: 4991517 - DNA, 25 bp, Homo sapien
gactccggcggcaccgtgactcagg

SEQ ID NO: 4991518 - DNA, 25 bp, Homo sapien
gcataaaaagggatgctggcccata

SEQ ID NO: 4991519 - DNA, 25 bp, Homo sapien
actttaccaaccattgcaggctgcg

SEQ ID NO: 4991520 - DNA, 25 bp, Homo sapien
ggatccgacctcacacactaaacgt

SEQ ID NO: 4991521 - DNA, 25 bp, Homo sapien
acatcacacagctgcacatgaacac

SEQ ID NO: 4991522 - DNA, 25 bp, Homo sapien
ggttcaagggcggcacatcacacag

SEQ ID NO: 4991523 - DNA, 25 bp, Homo sapien
tgccaaactcgtaacaaggttcaag

SEQ ID NO: 4991524 - DNA, 25 bp, Homo sapien
gtgccaaactcgtaacaaggttcaa

SEQ ID NO: 4991525 - DNA, 25 bp, Homo sapien
ccatcaccatgattgtacttagctt

SEQ ID NO: 4991526 - DNA, 25 bp, Homo sapien
gatcacaagatcacgttccatcacc

SEQ ID NO: 4991527 - DNA, 25 bp, Homo sapien
gccttttgatcacaagatcacgttc

SEQ ID NO: 4991528 - DNA, 25 bp, Homo sapien
gatcacgttccatcaccatgattgt

SEQ ID NO: 4991529 - DNA, 25 bp, Homo sapien
gtgtattgtgtctctggatacttga

SEQ ID NO: 4991530 - DNA, 25 bp, Homo sapien
gcagtgtattgtgtctctggatact

SEQ ID NO: 4991531 - DNA, 25 bp, Homo sapien
gtttaacaaagcatcctgcgcagcc

SEQ ID NO: 4991532 - DNA, 25 bp, Homo sapien
ttccgcagtgtattgtgtctctgga

SEQ ID NO: 4991533 - DNA, 25 bp, Homo sapien
ctctggcccgagagcatgtcacttt

SEQ ID NO: 4991534 - DNA, 25 bp, Homo sapien
gctctggcccgagagcatgtcactt

SEQ ID NO: 4991535 - DNA, 25 bp, Homo sapien
tacacactgtgccatcacaacgatc

SEQ ID NO: 4991536 - DNA, 25 bp, Homo sapien
actgtgccatcacaacgatcacggt

SEQ ID NO: 4991537 - DNA, 25 bp, Homo sapien
ccaagctatgccaactgatgtatca

SEQ ID NO: 4991538 - DNA, 25 bp, Homo sapien
gccaactgatgtatcatccacaaga

SEQ ID NO: 4991539 - DNA, 25 bp, Homo sapien
ctgtttgttagtcagacatttttgc

SEQ ID NO: 4991540 - DNA, 25 bp, Homo sapien
gatggttgggcacataacccaagct

SEQ ID NO: 4991541 - DNA, 25 bp, Homo sapien
gggaagaacaagaggctcacactgg

SEQ ID NO: 4991542 - DNA, 25 bp, Homo sapien
aagaacaagaggctcacactggttt

SEQ ID NO: 4991543 - DNA, 25 bp, Homo sapien
ctggtttaatgcagaatacacaagg

SEQ ID NO: 4991544 - DNA, 25 bp, Homo sapien
aatgcagaatacacaaggagagagg

SEQ ID NO: 4991545 - DNA, 25 bp, Homo sapien
tctttgtcttggttgcatacatcca

SEQ ID NO: 4991546 - DNA, 25 bp, Homo sapien
ttgcatacatccattttccttctga

SEQ ID NO: 4991547 - DNA, 25 bp, Homo sapien
tcttggttgcatacatccattttcc

SEQ ID NO: 4991548 - DNA, 25 bp, Homo sapien
tttgtcttggttgcatacatccatt

SEQ ID NO: 4991549 - DNA, 25 bp, Homo sapien
tgtgtcagacattcggtcctctaga

SEQ ID NO: 4991550 - DNA, 25 bp, Homo sapien
tcatgtgtcagacattcggtcctct

SEQ ID NO: 4991551 - DNA, 25 bp, Homo sapien
gtgtcagacattcggtcctctagaa

SEQ ID NO: 4991552 - DNA, 25 bp, Homo sapien
catgtgtcagacattcggtcctcta

SEQ ID NO: 4991553 - DNA, 25 bp, Homo sapien
aaacacatctggtttctgagcccag

SEQ ID NO: 4991554 - DNA, 25 bp, Homo sapien
acacatctggtttctgagcccagcc

SEQ ID NO: 4991555 - DNA, 25 bp, Homo sapien
aacacatctggtttctgagcccagc

SEQ ID NO: 4991556 - DNA, 25 bp, Homo sapien
cttgggagattcaggtcggtataac

SEQ ID NO: 4991557 - DNA, 25 bp, Homo sapien
caatgatgggcaatacagtcagatg

SEQ ID NO: 4991558 - DNA, 25 bp, Homo sapien
agttcagcaataagtgacaccaggg

SEQ ID NO: 4991559 - DNA, 25 bp, Homo sapien
ttctcggtgggcagagcatagacaa

SEQ ID NO: 4991560 - DNA, 25 bp, Homo sapien
actcaaagtttcattgccagacacg

SEQ ID NO: 4991561 - DNA, 25 bp, Homo sapien
tcattgccagacacgtcattatcag

SEQ ID NO: 4991562 - DNA, 25 bp, Homo sapien
atgatggttttaacttcctgagctt

SEQ ID NO: 4991563 - DNA, 25 bp, Homo sapien
cagacacgtcattatcagtcattgt

SEQ ID NO: 4991564 - DNA, 25 bp, Homo sapien
cttcttatcctccatagcaggggtt

SEQ ID NO: 4991565 - DNA, 25 bp, Homo sapien
tgtatccctacaaaacttcttatcc

SEQ ID NO: 4991566 - DNA, 25 bp, Homo sapien
ttgtatccctacaaaacttcttatc

SEQ ID NO: 4991567 - DNA, 25 bp, Homo sapien
cacagtttgtaggttgtagagtcca

SEQ ID NO: 4991568 - DNA, 25 bp, Homo sapien
ggtacacagtttgtaggttgtagag

SEQ ID NO: 4991569 - DNA, 25 bp, Homo sapien
tgtggtacacagtttgtaggttgta

SEQ ID NO: 4991570 - DNA, 25 bp, Homo sapien
cagtttgtaggttgtagagtccagt

SEQ ID NO: 4991571 - DNA, 25 bp, Homo sapien
gctgatttgacaggatagcaggaaa

SEQ ID NO: 4991572 - DNA, 25 bp, Homo sapien
gtgggtctctggtgagaatgtgagc

SEQ ID NO: 4991573 - DNA, 25 bp, Homo sapien
ctgctgctgcggcaatgctcacttt

SEQ ID NO: 4991574 - DNA, 25 bp, Homo sapien
tgaaccacctcatgaaaacttgctg

SEQ ID NO: 4991575 - DNA, 25 bp, Homo sapien
gtctttcctttggtgggctcgcctg

SEQ ID NO: 4991576 - DNA, 25 bp, Homo sapien
cactgagtaatttgagatgaaccac

SEQ ID NO: 4991577 - DNA, 25 bp, Homo sapien
ctgaaccaggcacatcatggaccat

SEQ ID NO: 4991578 - DNA, 25 bp, Homo sapien
gcctgaaccaggcacatcatggacc

SEQ ID NO: 4991579 - DNA, 25 bp, Homo sapien
cctgaaccaggcacatcatggacca

SEQ ID NO: 4991580 - DNA, 25 bp, Homo sapien
cccagtgagaagaacctatattgct

SEQ ID NO: 4991581 - DNA, 25 bp, Homo sapien
ttagcaggttagattctgccagtca

SEQ ID NO: 4991582 - DNA, 25 bp, Homo sapien
ttggtctttacccaggaaatagcag

SEQ ID NO: 4991583 - DNA, 25 bp, Homo sapien
cagtgtgaatacagccccagtgaga

SEQ ID NO: 4991584 - DNA, 25 bp, Homo sapien
tttcacttcattctgaacctttccc

SEQ ID NO: 4991585 - DNA, 25 bp, Homo sapien
cattctctggtatttcacttcattc

SEQ ID NO: 4991586 - DNA, 25 bp, Homo sapien
cttattctgaacctgtcccattctc

SEQ ID NO: 4991587 - DNA, 25 bp, Homo sapien
attctgaacctgtcccattctctgg

SEQ ID NO: 4991588 - DNA, 25 bp, Homo sapien
tccaagtgtgaaacggagtactgtg

SEQ ID NO: 4991589 - DNA, 25 bp, Homo sapien
cagattttgcgtggttgtatacacc

SEQ ID NO: 4991590 - DNA, 25 bp, Homo sapien
tcacaaggtgtggagcctaatagtc

SEQ ID NO: 4991591 - DNA, 25 bp, Homo sapien
tcttacaagtgtggcaggatcacaa

SEQ ID NO: 4991592 - DNA, 25 bp, Homo sapien
taggcaacagctcactatactagag

SEQ ID NO: 4991593 - DNA, 25 bp, Homo sapien
tcagctacaagctccaagccgctgg

SEQ ID NO: 4991594 - DNA, 25 bp, Homo sapien
ggaaatcttcggagtgcttcagcag

SEQ ID NO: 4991595 - DNA, 25 bp, Homo sapien
ttcagcagagaactcggcgtgcacc

SEQ ID NO: 4991596 - DNA, 25 bp, Homo sapien
caacacggcactgtgctttcctgca

SEQ ID NO: 4991597 - DNA, 25 bp, Homo sapien
aaaccgcctgtcaaagtcaaagctg

SEQ ID NO: 4991598 - DNA, 25 bp, Homo sapien
tgaatttcaacactctctaccctgg

SEQ ID NO: 4991599 - DNA, 25 bp, Homo sapien
caggaaaattagagctctcagctac

SEQ ID NO: 4991600 - DNA, 25 bp, Homo sapien
tatgcaagccctcaggcagattctc

SEQ ID NO: 4991601 - DNA, 25 bp, Homo sapien
cagaattgactagaaccagctgaga

SEQ ID NO: 4991602 - DNA, 25 bp, Homo sapien
tcaagcacttttggttccctagcaa

SEQ ID NO: 4991603 - DNA, 25 bp, Homo sapien
aatgagtagtagcttgtagaggcac

SEQ ID NO: 4991604 - DNA, 25 bp, Homo sapien
gagacatctacagttgctaaggcag

SEQ ID NO: 4991605 - DNA, 25 bp, Homo sapien
taaggcagttactagagcgcagcac

SEQ ID NO: 4991606 - DNA, 25 bp, Homo sapien
tgactgtacaaagcaatccatggtg

SEQ ID NO: 4991607 - DNA, 25 bp, Homo sapien
tatttcttccagagtgggtgaccca

SEQ ID NO: 4991608 - DNA, 25 bp, Homo sapien
tcaagtaaggtacagtgctttgtcc

SEQ ID NO: 4991609 - DNA, 25 bp, Homo sapien
cctacatctgaagtgagaagtgagc

SEQ ID NO: 4991610 - DNA, 25 bp, Homo sapien
caagagaacgatcaactagggacga

SEQ ID NO: 4991611 - DNA, 25 bp, Homo sapien
tcatgaacgtgaaactatcccggat

SEQ ID NO: 4991612 - DNA, 25 bp, Homo sapien
tatgcatgctatgagcgctgtccac

SEQ ID NO: 4991613 - DNA, 25 bp, Homo sapien
gatagtcgggttgaagagtaaatcc

SEQ ID NO: 4991614 - DNA, 25 bp, Homo sapien
gggaggatttctgcaccccgaacgc

SEQ ID NO: 4991615 - DNA, 25 bp, Homo sapien
gaacgcacatactccattgcctggg

SEQ ID NO: 4991616 - DNA, 25 bp, Homo sapien
cagtagtcgttattccagtccaccg

SEQ ID NO: 4991617 - DNA, 25 bp, Homo sapien
taactgatgactcggatgtgggccc

SEQ ID NO: 4991618 - DNA, 25 bp, Homo sapien
tactgggtattctcagggcctagcc

SEQ ID NO: 4991619 - DNA, 25 bp, Homo sapien
tctgtctctgcaagggcaagcctgt

SEQ ID NO: 4991620 - DNA, 25 bp, Homo sapien
caaaacatgggtccttagctaggca

SEQ ID NO: 4991621 - DNA, 25 bp, Homo sapien
gactataaaagattgccagtgtcaa

SEQ ID NO: 4991622 - DNA, 25 bp, Homo sapien
tcacatctcagataaactttattgg

SEQ ID NO: 4991623 - DNA, 25 bp, Homo sapien
ctttcaactggcaataatcacatct

SEQ ID NO: 4991624 - DNA, 25 bp, Homo sapien
catagagactataaaagattgccag

SEQ ID NO: 4991625 - DNA, 25 bp, Homo sapien
cactggcatttggttattcggcttg

SEQ ID NO: 4991626 - DNA, 25 bp, Homo sapien
tgctgcatggtgagcggctggtgct

SEQ ID NO: 4991627 - DNA, 25 bp, Homo sapien
gtgagtgtaaggcagactggacctg

SEQ ID NO: 4991628 - DNA, 25 bp, Homo sapien
cacagccatgtttgctatagagaca

SEQ ID NO: 4991629 - DNA, 25 bp, Homo sapien
gattcattcccggttgttggtgata

SEQ ID NO: 4991630 - DNA, 25 bp, Homo sapien
cattcccggttgttggtgatagtgg

SEQ ID NO: 4991631 - DNA, 25 bp, Homo sapien
gtgaggattcattcccggttgttgg

SEQ ID NO: 4991632 - DNA, 25 bp, Homo sapien
ttggtgatagtgggaacttaggtac

SEQ ID NO: 4991633 - DNA, 25 bp, Homo sapien
cggcttcgaattgatcagctgagga

SEQ ID NO: 4991634 - DNA, 25 bp, Homo sapien
tgggcccatggaacaccgacggctt

SEQ ID NO: 4991635 - DNA, 25 bp, Homo sapien
gaggaggttgagatgtcttcacgtc

SEQ ID NO: 4991636 - DNA, 25 bp, Homo sapien
tcacgtcaacaggttcactgtagct

SEQ ID NO: 4991637 - DNA, 25 bp, Homo sapien
ctgacaggcccttagagaaacgggt

SEQ ID NO: 4991638 - DNA, 25 bp, Homo sapien
gacagcgtgaaactcaggccgggta

SEQ ID NO: 4991639 - DNA, 25 bp, Homo sapien
agaactgtgccatgagggctctcgg

SEQ ID NO: 4991640 - DNA, 25 bp, Homo sapien
gggttcatcatgcacgacagcgtga

SEQ ID NO: 4991641 - DNA, 25 bp, Homo sapien
attttcccctgtgtcacactgttga

SEQ ID NO: 4991642 - DNA, 25 bp, Homo sapien
agtaaggtgtactgaaataattcca

SEQ ID NO: 4991643 - DNA, 25 bp, Homo sapien
ctccacgcacagtataaagtaaggt

SEQ ID NO: 4991644 - DNA, 25 bp, Homo sapien
ctgtgagactctgaatactccacgc

SEQ ID NO: 4991645 - DNA, 25 bp, Homo sapien
aaaagccacagagtattagattgac

SEQ ID NO: 4991646 - DNA, 25 bp, Homo sapien
ttctctgctctcggcaggacccaaa

SEQ ID NO: 4991647 - DNA, 25 bp, Homo sapien
ccacagagtattagattgaccttcc

SEQ ID NO: 4991648 - DNA, 25 bp, Homo sapien
gtattagattgaccttcctcatgct

SEQ ID NO: 4991649 - DNA, 25 bp, Homo sapien
agaaagcagtgctttccaaacattc

SEQ ID NO: 4991650 - DNA, 25 bp, Homo sapien
gcagtgctttccaaacattctgcag

SEQ ID NO: 4991651 - DNA, 25 bp, Homo sapien
cagattcctctgaaggtctcagcct

SEQ ID NO: 4991652 - DNA, 25 bp, Homo sapien
ccagctggaatagcatggcagaaag

SEQ ID NO: 4991653 - DNA, 25 bp, Homo sapien
acccagcccagtgtccgacatagaa

SEQ ID NO: 4991654 - DNA, 25 bp, Homo sapien
cttggatctgctatatacatgtttg

SEQ ID NO: 4991655 - DNA, 25 bp, Homo sapien
ccacttggatctgctatatacatgt

SEQ ID NO: 4991656 - DNA, 25 bp, Homo sapien
tgtccgacatagaacaagtgtcctg

SEQ ID NO: 4991657 - DNA, 25 bp, Homo sapien
gcatgtcctcagtaaaggccaatgg

SEQ ID NO: 4991658 - DNA, 25 bp, Homo sapien
tgagtctagaacttagagttggcat

SEQ ID NO: 4991659 - DNA, 25 bp, Homo sapien
tcctaatgctgctgtaatgagtcta

SEQ ID NO: 4991660 - DNA, 25 bp, Homo sapien
cttagagttggcatgtcctcagtaa

SEQ ID NO: 4991661 - DNA, 25 bp, Homo sapien
gctctgtatgctgcgagttgcttca

SEQ ID NO: 4991662 - DNA, 25 bp, Homo sapien
gctgcgagttgcttcaggtactcct

SEQ ID NO: 4991663 - DNA, 25 bp, Homo sapien
gtactccttcttcgcagcctcggtt

SEQ ID NO: 4991664 - DNA, 25 bp, Homo sapien
aggtactccttcttcgcagcctcgg

SEQ ID NO: 4991665 - DNA, 25 bp, Homo sapien
ggtaaacaaatgactaaccttgtca

SEQ ID NO: 4991666 - DNA, 25 bp, Homo sapien
gaaaagtggcttcagaattagtcag

SEQ ID NO: 4991667 - DNA, 25 bp, Homo sapien
caacgccagctatgaaattcgagat

SEQ ID NO: 4991668 - DNA, 25 bp, Homo sapien
gattttacagcagggcataaggctt

SEQ ID NO: 4991669 - DNA, 25 bp, Homo sapien
ctgtttctggaatggtaagaatccg

SEQ ID NO: 4991670 - DNA, 25 bp, Homo sapien
gtaaatggtctcagcaacaccggtt

SEQ ID NO: 4991671 - DNA, 25 bp, Homo sapien
taagaatccgaaccgaggtccttgc

SEQ ID NO: 4991672 - DNA, 25 bp, Homo sapien
caccggtttgacctgtttctggaat

SEQ ID NO: 4991673 - DNA, 25 bp, Homo sapien
ttttagagacttcgccaaaggtagc

SEQ ID NO: 4991674 - DNA, 25 bp, Homo sapien
tcacgaaagaataacgcataggcag

SEQ ID NO: 4991675 - DNA, 25 bp, Homo sapien
tcccacattgaagccacaattttag

SEQ ID NO: 4991676 - DNA, 25 bp, Homo sapien
tctcctaaaccgtcccacattgaag

SEQ ID NO: 4991677 - DNA, 25 bp, Homo sapien
cacaaactatttgggataaacacaa

SEQ ID NO: 4991678 - DNA, 25 bp, Homo sapien
ggatgcactttgaaagatacttggc

SEQ ID NO: 4991679 - DNA, 25 bp, Homo sapien
ttttcatgtcagtaacggatgcact

SEQ ID NO: 4991680 - DNA, 25 bp, Homo sapien
tattgtctggatccggacttcttgc

SEQ ID NO: 4991681 - DNA, 25 bp, Homo sapien
ccttctgggtttcgtatatctggca

SEQ ID NO: 4991682 - DNA, 25 bp, Homo sapien
ggccccttggtctcatggctgccat

SEQ ID NO: 4991683 - DNA, 25 bp, Homo sapien
tgagcacttagctgtgactggttaa

SEQ ID NO: 4991684 - DNA, 25 bp, Homo sapien
ccatctgaggatgggaactgtactg

SEQ ID NO: 4991685 - DNA, 25 bp, Homo sapien
gtccatttacccctgtctgtcagca

SEQ ID NO: 4991686 - DNA, 25 bp, Homo sapien
ggaatctctcaagcccgtccattta

SEQ ID NO: 4991687 - DNA, 25 bp, Homo sapien
ctggaaggctgccagttgcagcagg

SEQ ID NO: 4991688 - DNA, 25 bp, Homo sapien
gagcaggagaacgtgaggaatctct

SEQ ID NO: 4991689 - DNA, 25 bp, Homo sapien
tgacttgcacttagttatacaggga

SEQ ID NO: 4991690 - DNA, 25 bp, Homo sapien
gggtcagactgccagacactaaaaa

SEQ ID NO: 4991691 - DNA, 25 bp, Homo sapien
taacaacaacaaagtacgactgtgg

SEQ ID NO: 4991692 - DNA, 25 bp, Homo sapien
gctggatgagaaggtacactgactg

SEQ ID NO: 4991693 - DNA, 25 bp, Homo sapien
gcaaaggcctccaattagaatccta

SEQ ID NO: 4991694 - DNA, 25 bp, Homo sapien
tagactactggcatgatagctaaga

SEQ ID NO: 4991695 - DNA, 25 bp, Homo sapien
tacagaaaccatattagactactgg

SEQ ID NO: 4991696 - DNA, 25 bp, Homo sapien
ttaccatgatggctaaaacggaatg

SEQ ID NO: 4991697 - DNA, 25 bp, Homo sapien
gagctgatcagggtcattaataaca

SEQ ID NO: 4991698 - DNA, 25 bp, Homo sapien
gtaaactgatcatcattccaatggg

SEQ ID NO: 4991699 - DNA, 25 bp, Homo sapien
tattcatagatccaaagagctgatc

SEQ ID NO: 4991700 - DNA, 25 bp, Homo sapien
ccaatgggacctgacaagtttcttt

SEQ ID NO: 4991701 - DNA, 25 bp, Homo sapien
ctgtgaagttcattacagcagtaat

SEQ ID NO: 4991702 - DNA, 25 bp, Homo sapien
gttcattacagcagtaataaatcat

SEQ ID NO: 4991703 - DNA, 25 bp, Homo sapien
aagttcattacagcagtaataaatc

SEQ ID NO: 4991704 - DNA, 25 bp, Homo sapien
gtgaagttcattacagcagtaataa

SEQ ID NO: 4991705 - DNA, 25 bp, Homo sapien
taatacaacctctatacacacaagt

SEQ ID NO: 4991706 - DNA, 25 bp, Homo sapien
atttgcagtgatcaataacattccc

SEQ ID NO: 4991707 - DNA, 25 bp, Homo sapien
tgcctggcatttatataatacaacc

SEQ ID NO: 4991708 - DNA, 25 bp, Homo sapien
ggcccaggcttgaaccaaatattta

SEQ ID NO: 4991709 - DNA, 25 bp, Homo sapien
tactaagatgaagatgtttagaaga

SEQ ID NO: 4991710 - DNA, 25 bp, Homo sapien
ctccaaatgggcagcatactaagat

SEQ ID NO: 4991711 - DNA, 25 bp, Homo sapien
tgggcagcatactaagatgaagatg

SEQ ID NO: 4991712 - DNA, 25 bp, Homo sapien
gatcatgtatagttggtagaggttt

SEQ ID NO: 4991713 - DNA, 25 bp, Homo sapien
ttcattctttggtgctgttacaagc

SEQ ID NO: 4991714 - DNA, 25 bp, Homo sapien
tgctaggcaaccataattcatagta

SEQ ID NO: 4991715 - DNA, 25 bp, Homo sapien
ggtgctgttacaagctccttccagt

SEQ ID NO: 4991716 - DNA, 25 bp, Homo sapien
taccttttaatggatactctgctac

SEQ ID NO: 4991717 - DNA, 25 bp, Homo sapien
agcacagaacctagtttccagtggg

SEQ ID NO: 4991718 - DNA, 25 bp, Homo sapien
gggcctgaccatggtaatgactgca

SEQ ID NO: 4991719 - DNA, 25 bp, Homo sapien
cctgtggttgagctctgggaatctc

SEQ ID NO: 4991720 - DNA, 25 bp, Homo sapien
gggattcgagaaccatttccacctg

SEQ ID NO: 4991721 - DNA, 25 bp, Homo sapien
ggtcatccatactgaagtaggtccc

SEQ ID NO: 4991722 - DNA, 25 bp, Homo sapien
aatacaggattcaggcagaccacct

SEQ ID NO: 4991723 - DNA, 25 bp, Homo sapien
aaatgtgtcttgtcctttgagggtc

SEQ ID NO: 4991724 - DNA, 25 bp, Homo sapien
tggaaatgtcccaaacacaggatgt

SEQ ID NO: 4991725 - DNA, 25 bp, Homo sapien
ggtgagatttggctctctactccca

SEQ ID NO: 4991726 - DNA, 25 bp, Homo sapien
tatatacaacttctccccttcaccc

SEQ ID NO: 4991727 - DNA, 25 bp, Homo sapien
tcacccatttcatgatgtaatgaag

SEQ ID NO: 4991728 - DNA, 25 bp, Homo sapien
tcatatccattgaatgaatgtttgg

SEQ ID NO: 4991729 - DNA, 25 bp, Homo sapien
ttggaaattcatgctgctctaatac

SEQ ID NO: 4991730 - DNA, 25 bp, Homo sapien
tggcaacatattggaaattcatgct

SEQ ID NO: 4991731 - DNA, 25 bp, Homo sapien
cttttccataatggcaacatattgg

SEQ ID NO: 4991732 - DNA, 25 bp, Homo sapien
cataatggcaacatattggaaattc

SEQ ID NO: 4991733 - DNA, 25 bp, Homo sapien
ggcactccctataggcctgaaggaa

SEQ ID NO: 4991734 - DNA, 25 bp, Homo sapien
tgatgtgcggcactccctataggcc

SEQ ID NO: 4991735 - DNA, 25 bp, Homo sapien
tgaattccttgatgtgcggcactcc

SEQ ID NO: 4991736 - DNA, 25 bp, Homo sapien
ggcctgaaggaacacttctgcttca

SEQ ID NO: 4991737 - DNA, 25 bp, Homo sapien
cgatggttgtcaaaacagttgtaca

SEQ ID NO: 4991738 - DNA, 25 bp, Homo sapien
tttgaatgcaaagtgtaccatgact

SEQ ID NO: 4991739 - DNA, 25 bp, Homo sapien
aaacagttgtacagtggcctttgaa

SEQ ID NO: 4991740 - DNA, 25 bp, Homo sapien
ctatgaaagcgatggttgtcaaaac

SEQ ID NO: 4991741 - DNA, 25 bp, Homo sapien
caacacgggcatttgctggagtcgc

SEQ ID NO: 4991742 - DNA, 25 bp, Homo sapien
aggcacaggagacgtgcagctccag

SEQ ID NO: 4991743 - DNA, 25 bp, Homo sapien
cattaaaggctaggaccagtgctgt

SEQ ID NO: 4991744 - DNA, 25 bp, Homo sapien
gagtcgctttttgcttgcagcatta

SEQ ID NO: 4991745 - DNA, 25 bp, Homo sapien
tgaaagctggtaagccggtttgact

SEQ ID NO: 4991746 - DNA, 25 bp, Homo sapien
ggatgagaggtggcatctttcaaga

SEQ ID NO: 4991747 - DNA, 25 bp, Homo sapien
cagttcagaagatgtggggatctcc

SEQ ID NO: 4991748 - DNA, 25 bp, Homo sapien
aggaatcctccactggatgagaggt

SEQ ID NO: 4991749 - DNA, 25 bp, Homo sapien
cacaaacaggtaagcagattcttac

SEQ ID NO: 4991750 - DNA, 25 bp, Homo sapien
tcctggcccagcatattggagactg

SEQ ID NO: 4991751 - DNA, 25 bp, Homo sapien
catgttttgtggatgaaatggtagc

SEQ ID NO: 4991752 - DNA, 25 bp, Homo sapien
ccattatggttcatggggtgacaca

SEQ ID NO: 4991753 - DNA, 25 bp, Homo sapien
ggtaaccagactcaacttcattcag

SEQ ID NO: 4991754 - DNA, 25 bp, Homo sapien
gaaggaggagtaattggtggaatgt

SEQ ID NO: 4991755 - DNA, 25 bp, Homo sapien
gagtaattggtggaatgttgaagtc

SEQ ID NO: 4991756 - DNA, 25 bp, Homo sapien
gaggagtaattggtggaatgttgaa

SEQ ID NO: 4991757 - DNA, 25 bp, Homo sapien
gtaattggtggaatgttgaagtctt

SEQ ID NO: 4991758 - DNA, 25 bp, Homo sapien
gaacaatactgtgtagtttccagaa

SEQ ID NO: 4991759 - DNA, 25 bp, Homo sapien
ttccagaatatctgccagagaaggc

SEQ ID NO: 4991760 - DNA, 25 bp, Homo sapien
ggcaatgtagtcaggatctttgaac

SEQ ID NO: 4991761 - DNA, 25 bp, Homo sapien
cagagaaggcagtaatcctaatgac

SEQ ID NO: 4991762 - DNA, 25 bp, Homo sapien
catagtcctggctcggctctgtcat

SEQ ID NO: 4991763 - DNA, 25 bp, Homo sapien
acatagtcctggctcggctctgtca

SEQ ID NO: 4991764 - DNA, 25 bp, Homo sapien
cattgtgaaccgaagcaaagctctg

SEQ ID NO: 4991765 - DNA, 25 bp, Homo sapien
aataactggattcaatggcaaatcc

SEQ ID NO: 4991766 - DNA, 25 bp, Homo sapien
tgagtatgagtatggatttgtccat

SEQ ID NO: 4991767 - DNA, 25 bp, Homo sapien
tcaatccatcatcatatccggagta

SEQ ID NO: 4991768 - DNA, 25 bp, Homo sapien
tatcaccacatgatgctaacaggca

SEQ ID NO: 4991769 - DNA, 25 bp, Homo sapien
caggcacaaaccacctagtatggtc

SEQ ID NO: 4991770 - DNA, 25 bp, Homo sapien
cattgtgagagatgattggtgcccc

SEQ ID NO: 4991771 - DNA, 25 bp, Homo sapien
ggcttcacacataagatgtcccctt

SEQ ID NO: 4991772 - DNA, 25 bp, Homo sapien
ttatgactgacggatgcttctggcg

SEQ ID NO: 4991773 - DNA, 25 bp, Homo sapien
tgatccagactcatgtcaacagtgc

SEQ ID NO: 4991774 - DNA, 25 bp, Homo sapien
gatgcttctggcgtctagtggatag

SEQ ID NO: 4991775 - DNA, 25 bp, Homo sapien
tgacaatgtctggaggtacttttga

SEQ ID NO: 4991776 - DNA, 25 bp, Homo sapien
atcaaagagccttgattgtctcagg

SEQ ID NO: 4991777 - DNA, 25 bp, Homo sapien
ttgttatgatcaaaacctaaaagct

SEQ ID NO: 4991778 - DNA, 25 bp, Homo sapien
cactctcggtgactatagaataaca

SEQ ID NO: 4991779 - DNA, 25 bp, Homo sapien
gtctcaggcttacaactctgttaac

SEQ ID NO: 4991780 - DNA, 25 bp, Homo sapien
tttatcctttcatgcgaaaaactaa

SEQ ID NO: 4991781 - DNA, 25 bp, Homo sapien
aaactaattatttgtttgcaagatg

SEQ ID NO: 4991782 - DNA, 25 bp, Homo sapien
cattagtattctgagtagatggcac

SEQ ID NO: 4991783 - DNA, 25 bp, Homo sapien
gaatggaattgaaatttcactacta

SEQ ID NO: 4991784 - DNA, 25 bp, Homo sapien
atctcttgaagttgcgtgctgtctt

SEQ ID NO: 4991785 - DNA, 25 bp, Homo sapien
tgaagttgcgtgctgtcttctcctc

SEQ ID NO: 4991786 - DNA, 25 bp, Homo sapien
tcttgaagttgcgtgctgtcttctc

SEQ ID NO: 4991787 - DNA, 25 bp, Homo sapien
aagttgcgtgctgtcttctcctctc

SEQ ID NO: 4991788 - DNA, 25 bp, Homo sapien
ttcccaacaaggtttcctctacata

SEQ ID NO: 4991789 - DNA, 25 bp, Homo sapien
tactgaagttgctattggtaaccac

SEQ ID NO: 4991790 - DNA, 25 bp, Homo sapien
agaaagcactcctctgttttcccaa

SEQ ID NO: 4991791 - DNA, 25 bp, Homo sapien
tacatatcatacttgaaggatactg

SEQ ID NO: 4991792 - DNA, 25 bp, Homo sapien
caacccattgtcaggaatctctgtg

SEQ ID NO: 4991793 - DNA, 25 bp, Homo sapien
tgtgcaacccattgtcaggaatctc

SEQ ID NO: 4991794 - DNA, 25 bp, Homo sapien
tgagggagtccgcagcaagcatccc

SEQ ID NO: 4991795 - DNA, 25 bp, Homo sapien
ggtctgcaggtttgcatgcatgtgc

SEQ ID NO: 4991796 - DNA, 25 bp, Homo sapien
ccgactgtaatcaatgggagcagca

SEQ ID NO: 4991797 - DNA, 25 bp, Homo sapien
cacttgtggagacagcgtatcttgg

SEQ ID NO: 4991798 - DNA, 25 bp, Homo sapien
gaaggagggttaatgctcttcccga

SEQ ID NO: 4991799 - DNA, 25 bp, Homo sapien
gttacactagttttacctggcaggc

SEQ ID NO: 4991800 - DNA, 25 bp, Homo sapien
gctaacactgttgcatatttaaggt

SEQ ID NO: 4991801 - DNA, 25 bp, Homo sapien
tgctaacactgttgcatatttaagg

SEQ ID NO: 4991802 - DNA, 25 bp, Homo sapien
ttgctaacactgttgcatatttaag

SEQ ID NO: 4991803 - DNA, 25 bp, Homo sapien
gaatggctgagtggccagttgccat

SEQ ID NO: 4991804 - DNA, 25 bp, Homo sapien
cataaagacgttgtgaattggtcta

SEQ ID NO: 4991805 - DNA, 25 bp, Homo sapien
tggcagcataaagacgttgtgaatt

SEQ ID NO: 4991806 - DNA, 25 bp, Homo sapien
aaagcattccccgaatggctgagtg

SEQ ID NO: 4991807 - DNA, 25 bp, Homo sapien
ccttaccaacaggtaaaatatcatt

SEQ ID NO: 4991808 - DNA, 25 bp, Homo sapien
tacttgcttgaatgaatccttacca

SEQ ID NO: 4991809 - DNA, 25 bp, Homo sapien
tcagatccatcccttcatatgctgg

SEQ ID NO: 4991810 - DNA, 25 bp, Homo sapien
catatgctggtcgtcttttccatca

SEQ ID NO: 4991811 - DNA, 25 bp, Homo sapien
gcctatcctattgcctggtacactg

SEQ ID NO: 4991812 - DNA, 25 bp, Homo sapien
ctgtctgtaactttgatcaaggtat

SEQ ID NO: 4991813 - DNA, 25 bp, Homo sapien
tctgagtttaatggaagatgaggtg

SEQ ID NO: 4991814 - DNA, 25 bp, Homo sapien
aggtgagattagatgcagaagtgcc

SEQ ID NO: 4991815 - DNA, 25 bp, Homo sapien
tctgcatttgatcaaaatcacaaag

SEQ ID NO: 4991816 - DNA, 25 bp, Homo sapien
caaggcatgtattatattcaaatgg

SEQ ID NO: 4991817 - DNA, 25 bp, Homo sapien
tctatttctgtattaggaatgcctt

SEQ ID NO: 4991818 - DNA, 25 bp, Homo sapien
atgcaagcaatgtcacaaggcatgt

SEQ ID NO: 4991819 - DNA, 25 bp, Homo sapien
ttaggtgataaaagctacaatattt

SEQ ID NO: 4991820 - DNA, 25 bp, Homo sapien
aaagctacaatatttccttgtggat

SEQ ID NO: 4991821 - DNA, 25 bp, Homo sapien
gataaaagctacaatatttccttgt

SEQ ID NO: 4991822 - DNA, 25 bp, Homo sapien
taaaagctacaatatttccttgtgg

SEQ ID NO: 4991823 - DNA, 25 bp, Homo sapien
tcccctccaatttcatcctcatcat

SEQ ID NO: 4991824 - DNA, 25 bp, Homo sapien
ctgcattcccctccaatttcatcct

SEQ ID NO: 4991825 - DNA, 25 bp, Homo sapien
gcattcccctccaatttcatcctca

SEQ ID NO: 4991826 - DNA, 25 bp, Homo sapien
ttcccctccaatttcatcctcatca

SEQ ID NO: 4991827 - DNA, 25 bp, Homo sapien
cactgcacttctcatactgaagcag

SEQ ID NO: 4991828 - DNA, 25 bp, Homo sapien
tgcacttctcatactgaagcagcat

SEQ ID NO: 4991829 - DNA, 25 bp, Homo sapien
tgtcactgcacttctcatactgaag

SEQ ID NO: 4991830 - DNA, 25 bp, Homo sapien
gtcactgcacttctcatactgaagc

SEQ ID NO: 4991831 - DNA, 25 bp, Homo sapien
taatactgatacatcaaatgggacc

SEQ ID NO: 4991832 - DNA, 25 bp, Homo sapien
ggaggtaacttgcaacgtttgagga

SEQ ID NO: 4991833 - DNA, 25 bp, Homo sapien
tcttctgattgcaggaaaatggagg

SEQ ID NO: 4991834 - DNA, 25 bp, Homo sapien
aatgggaccttaatgaaccccgctg

SEQ ID NO: 4991835 - DNA, 25 bp, Homo sapien
tgttcctcctgtgaactgttagggc

SEQ ID NO: 4991836 - DNA, 25 bp, Homo sapien
cagagggctccaagacagttttaga

SEQ ID NO: 4991837 - DNA, 25 bp, Homo sapien
caaagtagagtcagattgtcagtct

SEQ ID NO: 4991838 - DNA, 25 bp, Homo sapien
tagggctatgttatagtactcgcaa

SEQ ID NO: 4991839 - DNA, 25 bp, Homo sapien
ctagaaagtccaagggtagttcagg

SEQ ID NO: 4991840 - DNA, 25 bp, Homo sapien
cactttgactagaaagtccaagggt

SEQ ID NO: 4991841 - DNA, 25 bp, Homo sapien
gtccaagggtagttcaggaagaatc

SEQ ID NO: 4991842 - DNA, 25 bp, Homo sapien
tgactagaaagtccaagggtagttc

SEQ ID NO: 4991843 - DNA, 25 bp, Homo sapien
ggcttgggatggccccgcctctctg

SEQ ID NO: 4991844 - DNA, 25 bp, Homo sapien
gggcttgggatggccccgcctctct

SEQ ID NO: 4991845 - DNA, 25 bp, Homo sapien
tcactggcagggagacctttgacca

SEQ ID NO: 4991846 - DNA, 25 bp, Homo sapien
taagctttagcatcagttgggacct

SEQ ID NO: 4991847 - DNA, 25 bp, Homo sapien
tgggacctgtcacaatcctgtgctc

SEQ ID NO: 4991848 - DNA, 25 bp, Homo sapien
gcaggacacacccttgcttcaaagc

SEQ ID NO: 4991849 - DNA, 25 bp, Homo sapien
taatgtggcacaccccactgttacc

SEQ ID NO: 4991850 - DNA, 25 bp, Homo sapien
tctctatttaattgatgggttgatt

SEQ ID NO: 4991851 - DNA, 25 bp, Homo sapien
caaatttcttaatgtggcacacccc

SEQ ID NO: 4991852 - DNA, 25 bp, Homo sapien
aattgatgggttgatttcaaatttc

SEQ ID NO: 4991853 - DNA, 25 bp, Homo sapien
cacaggctacgatgatgcctccaaa

SEQ ID NO: 4991854 - DNA, 25 bp, Homo sapien
agagagttgaatccccatccacatt

SEQ ID NO: 4991855 - DNA, 25 bp, Homo sapien
tcccttgctgactacagagagttga

SEQ ID NO: 4991856 - DNA, 25 bp, Homo sapien
catttccacaggctacgatgatgcc

SEQ ID NO: 4991857 - DNA, 25 bp, Homo sapien
tttctactttcccatgattctcctt

SEQ ID NO: 4991858 - DNA, 25 bp, Homo sapien
cttttctactttcccatgattctcc

SEQ ID NO: 4991859 - DNA, 25 bp, Homo sapien
ctactttcccatgattctcctttct

SEQ ID NO: 4991860 - DNA, 25 bp, Homo sapien
ttcttttctactttcccatgattct

SEQ ID NO: 4991861 - DNA, 25 bp, Homo sapien
taaagaatatttatgtctaacagga

SEQ ID NO: 4991862 - DNA, 25 bp, Homo sapien
tatgacagtatgctggcttggagaa

SEQ ID NO: 4991863 - DNA, 25 bp, Homo sapien
aatagtgtatgattgttagcagtcc

SEQ ID NO: 4991864 - DNA, 25 bp, Homo sapien
tggaatgatactcagaatagaaaca

SEQ ID NO: 4991865 - DNA, 25 bp, Homo sapien
catgagctggttccttcaagtggtc

SEQ ID NO: 4991866 - DNA, 25 bp, Homo sapien
tcaggactatgtttctaagatgaca

SEQ ID NO: 4991867 - DNA, 25 bp, Homo sapien
ctgtaactggtggaaatggtgagct

SEQ ID NO: 4991868 - DNA, 25 bp, Homo sapien
ggtgagctgaatccacatgcttgcc

SEQ ID NO: 4991869 - DNA, 25 bp, Homo sapien
ttgtgcgctccaagtcagagggtct

SEQ ID NO: 4991870 - DNA, 25 bp, Homo sapien
tcctaagtgcgagccctgtgactgt

SEQ ID NO: 4991871 - DNA, 25 bp, Homo sapien
gatgtacaagctatagggactccta

SEQ ID NO: 4991872 - DNA, 25 bp, Homo sapien
taagttccggaagaaggcaagccac

SEQ ID NO: 4991873 - DNA, 25 bp, Homo sapien
cggcccgggatagacttttactgag

SEQ ID NO: 4991874 - DNA, 25 bp, Homo sapien
tactgagaacatagctttaaactta

SEQ ID NO: 4991875 - DNA, 25 bp, Homo sapien
tgtaaatcacatgaaccaaaacgtc

SEQ ID NO: 4991876 - DNA, 25 bp, Homo sapien
tagacatatctaagtaaagaaaagc

SEQ ID NO: 4991877 - DNA, 25 bp, Homo sapien
tcctcgaggaccaatgttgtgctaa

SEQ ID NO: 4991878 - DNA, 25 bp, Homo sapien
cttcctcgaggaccaatgttgtgct

SEQ ID NO: 4991879 - DNA, 25 bp, Homo sapien
ttcctcgaggaccaatgttgtgcta

SEQ ID NO: 4991880 - DNA, 25 bp, Homo sapien
ttgggaatctgtgtgatttctgtat

SEQ ID NO: 4991881 - DNA, 25 bp, Homo sapien
ggaatctgtgtgatttctgtataaa

SEQ ID NO: 4991882 - DNA, 25 bp, Homo sapien
tcacacaggaagctatgtccctcat

SEQ ID NO: 4991883 - DNA, 25 bp, Homo sapien
gggaatctgtgtgatttctgtataa

SEQ ID NO: 4991884 - DNA, 25 bp, Homo sapien
taatcaaatgatcctagcattttta

SEQ ID NO: 4991885 - DNA, 25 bp, Homo sapien
gactgagtgactcttatttaatcaa

SEQ ID NO: 4991886 - DNA, 25 bp, Homo sapien
taggagagacttacgagaaagagaa

SEQ ID NO: 4991887 - DNA, 25 bp, Homo sapien
agcaggctttgtgttgactgagtga

SEQ ID NO: 4991888 - DNA, 25 bp, Homo sapien
tcttggggtgtgaagagacatgagg

SEQ ID NO: 4991889 - DNA, 25 bp, Homo sapien
caccatacccggactaaagcccaca

SEQ ID NO: 4991890 - DNA, 25 bp, Homo sapien
accatacccggactaaagcccacag

SEQ ID NO: 4991891 - DNA, 25 bp, Homo sapien
tcccagttatggggtttgatttcag

SEQ ID NO: 4991892 - DNA, 25 bp, Homo sapien
cagaagataataaatagccaggatc

SEQ ID NO: 4991893 - DNA, 25 bp, Homo sapien
aataaatagccaggatctaattttg

SEQ ID NO: 4991894 - DNA, 25 bp, Homo sapien
aaatagccaggatctaattttgcca

SEQ ID NO: 4991895 - DNA, 25 bp, Homo sapien
taatgacctatttgtgcgtctctct

SEQ ID NO: 4991896 - DNA, 25 bp, Homo sapien
gacagtgtctatatcctaaccacct

SEQ ID NO: 4991897 - DNA, 25 bp, Homo sapien
gcgtctctctttctagacagtgtct

SEQ ID NO: 4991898 - DNA, 25 bp, Homo sapien
tcttccatgatatattataatgacc

SEQ ID NO: 4991899 - DNA, 25 bp, Homo sapien
tctcctgcacctagaagctgtttgc

SEQ ID NO: 4991900 - DNA, 25 bp, Homo sapien
gacttgatcaacttttactggcatg

SEQ ID NO: 4991901 - DNA, 25 bp, Homo sapien
tcttgcttctacatatatggcctca

SEQ ID NO: 4991902 - DNA, 25 bp, Homo sapien
caggaggattcaattacagacttga

SEQ ID NO: 4991903 - DNA, 25 bp, Homo sapien
tatgatccatgacttgccctatgag

SEQ ID NO: 4991904 - DNA, 25 bp, Homo sapien
taatcaagatgcctggatacagctg

SEQ ID NO: 4991905 - DNA, 25 bp, Homo sapien
tgcacactctccacttaaaataggg

SEQ ID NO: 4991906 - DNA, 25 bp, Homo sapien
tatatgtgtgaaagatggagccggc

SEQ ID NO: 4991907 - DNA, 25 bp, Homo sapien
gctgtactttttagttgttatgatg

SEQ ID NO: 4991908 - DNA, 25 bp, Homo sapien
ttttagttgttatgatgaatgccat

SEQ ID NO: 4991909 - DNA, 25 bp, Homo sapien
actttttagttgttatgatgaatgc

SEQ ID NO: 4991910 - DNA, 25 bp, Homo sapien
cttgctgtactttttagttgttatg

SEQ ID NO: 4991911 - DNA, 25 bp, Homo sapien
ttcagcgaagcgtaccaactaaccg

SEQ ID NO: 4991912 - DNA, 25 bp, Homo sapien
cattcacattcctgccgggttgtca

SEQ ID NO: 4991913 - DNA, 25 bp, Homo sapien
cacggctgacctgcagagatatgga

SEQ ID NO: 4991914 - DNA, 25 bp, Homo sapien
gataaatggcttatcaccaccactg

SEQ ID NO: 4991915 - DNA, 25 bp, Homo sapien
tacagtatatcttatcattcctttt

SEQ ID NO: 4991916 - DNA, 25 bp, Homo sapien
gcttaaaccttaatgctttccctga

SEQ ID NO: 4991917 - DNA, 25 bp, Homo sapien
tttacagagcttaaaccttaatgct

SEQ ID NO: 4991918 - DNA, 25 bp, Homo sapien
tcaccactgacgaataatgtgtaca

SEQ ID NO: 4991919 - DNA, 25 bp, Homo sapien
tagagactacaaacaatggcactgg

SEQ ID NO: 4991920 - DNA, 25 bp, Homo sapien
caatgtatgacaaccgtagagacta

SEQ ID NO: 4991921 - DNA, 25 bp, Homo sapien
tgaaaatggtgcagggctgaaagct

SEQ ID NO: 4991922 - DNA, 25 bp, Homo sapien
gtgtcaaattctgctgtaagggtat

SEQ ID NO: 4991923 - DNA, 25 bp, Homo sapien
aagaatccgagcaaatcgtgtcact

SEQ ID NO: 4991924 - DNA, 25 bp, Homo sapien
cttagccgcgaacagcaggaaggaa

SEQ ID NO: 4991925 - DNA, 25 bp, Homo sapien
acaatcgcggtgtttggcaagcccc

SEQ ID NO: 4991926 - DNA, 25 bp, Homo sapien
tgtcactttccgcacaatcgcggtg

SEQ ID NO: 4991927 - DNA, 25 bp, Homo sapien
cagacagggagcgtcgggcgcagcg

SEQ ID NO: 4991928 - DNA, 25 bp, Homo sapien
aggtcccagacagggagcgtcgggc

SEQ ID NO: 4991929 - DNA, 25 bp, Homo sapien
gagaaggtcccagacagggagcgtc

SEQ ID NO: 4991930 - DNA, 25 bp, Homo sapien
gggagaaggtcccagacagggagcg

SEQ ID NO: 4991931 - DNA, 25 bp, Homo sapien
caagcttagacggaacagagtgagg

SEQ ID NO: 4991932 - DNA, 25 bp, Homo sapien
tccctcacatccgtttgtggtttgt

SEQ ID NO: 4991933 - DNA, 25 bp, Homo sapien
tgtctgggctcaggagtaaaagaaa

SEQ ID NO: 4991934 - DNA, 25 bp, Homo sapien
tctcacatcaagcaactccttttct

SEQ ID NO: 4991935 - DNA, 25 bp, Homo sapien
ggcacacgcgctcgggctctaggta

SEQ ID NO: 4991936 - DNA, 25 bp, Homo sapien
gctctaggtactgggcgttttattg

SEQ ID NO: 4991937 - DNA, 25 bp, Homo sapien
ttttattggagattctgagttgttc

SEQ ID NO: 4991938 - DNA, 25 bp, Homo sapien
ggcgttttattggagattctgagtt

SEQ ID NO: 4991939 - DNA, 25 bp, Homo sapien
caactcggaaacttgcaacttgccg

SEQ ID NO: 4991940 - DNA, 25 bp, Homo sapien
catttctccggtcggtgagtggcag

SEQ ID NO: 4991941 - DNA, 25 bp, Homo sapien
tcttggcagtccacgaaagacctgg

SEQ ID NO: 4991942 - DNA, 25 bp, Homo sapien
tctctttttatagctggacgcccta

SEQ ID NO: 4991943 - DNA, 25 bp, Homo sapien
ctccatctcatgagggagcagccct

SEQ ID NO: 4991944 - DNA, 25 bp, Homo sapien
gatttatctctgagggcagtgtcct

SEQ ID NO: 4991945 - DNA, 25 bp, Homo sapien
ctagggcccaaaactctgcgaagga

SEQ ID NO: 4991946 - DNA, 25 bp, Homo sapien
tggctgccgtccaacagatttatct

SEQ ID NO: 4991947 - DNA, 25 bp, Homo sapien
catagctgtctgttcccgtgcattt

SEQ ID NO: 4991948 - DNA, 25 bp, Homo sapien
tgattgccaactgctctgtgcagct

SEQ ID NO: 4991949 - DNA, 25 bp, Homo sapien
ccttctaggacatgttgattgccaa

SEQ ID NO: 4991950 - DNA, 25 bp, Homo sapien
accaagcaaatacgagcagagagac

SEQ ID NO: 4991951 - DNA, 25 bp, Homo sapien
taccttcacgattgacttggtggag

SEQ ID NO: 4991952 - DNA, 25 bp, Homo sapien
acattcacaagtccttcaaggcaca

SEQ ID NO: 4991953 - DNA, 25 bp, Homo sapien
ggttgcaaagaggaagcagtaagaa

SEQ ID NO: 4991954 - DNA, 25 bp, Homo sapien
tgagtgaattgtcaatgcaagttcc

SEQ ID NO: 4991955 - DNA, 25 bp, Homo sapien
atccaaatgcatgagacctgtgcat

SEQ ID NO: 4991956 - DNA, 25 bp, Homo sapien
gaaaatccaaatgcatgagacctgt

SEQ ID NO: 4991957 - DNA, 25 bp, Homo sapien
gggaaaatccaaatgcatgagacct

SEQ ID NO: 4991958 - DNA, 25 bp, Homo sapien
ctctgctttaagggaaaatccaaat

SEQ ID NO: 4991959 - DNA, 25 bp, Homo sapien
ccatcggagtgtatggagttaaagt

SEQ ID NO: 4991960 - DNA, 25 bp, Homo sapien
ggagttaaagtggtatactgtacat

SEQ ID NO: 4991961 - DNA, 25 bp, Homo sapien
tctacataatcaagagtctggtttc

SEQ ID NO: 4991962 - DNA, 25 bp, Homo sapien
gtctggtttcttccatcggagtgta

SEQ ID NO: 4991963 - DNA, 25 bp, Homo sapien
aggtggcaagaatgtactgtattaa

SEQ ID NO: 4991964 - DNA, 25 bp, Homo sapien
gatgtaggatttgaaataagcttgg

SEQ ID NO: 4991965 - DNA, 25 bp, Homo sapien
gataggaagatccacaagaggctca

SEQ ID NO: 4991966 - DNA, 25 bp, Homo sapien
taagcttggtttggtgatcagatcc

SEQ ID NO: 4991967 - DNA, 25 bp, Homo sapien
ctccaccatcatcttgatcaagaac

SEQ ID NO: 4991968 - DNA, 25 bp, Homo sapien
tttccagtcaacgtgccgatctcca

SEQ ID NO: 4991969 - DNA, 25 bp, Homo sapien
tccaccatcatcttgatcaagaacc

SEQ ID NO: 4991970 - DNA, 25 bp, Homo sapien
ggtatttccagtcaacgtgccgatc

SEQ ID NO: 4991971 - DNA, 25 bp, Homo sapien
tgggatggaatggatagagaatatt

SEQ ID NO: 4991972 - DNA, 25 bp, Homo sapien
tgtaaaaggtctggaacgatggtct

SEQ ID NO: 4991973 - DNA, 25 bp, Homo sapien
tccaattgtaaaaggtctggaacga

SEQ ID NO: 4991974 - DNA, 25 bp, Homo sapien
gatggaatggatagagaatatttga

SEQ ID NO: 4991975 - DNA, 25 bp, Homo sapien
caatatagacgaggtgcagggtccg

SEQ ID NO: 4991976 - DNA, 25 bp, Homo sapien
cacaatatagacgaggtgcagggtc

SEQ ID NO: 4991977 - DNA, 25 bp, Homo sapien
attcacaatatagacgaggtgcagg

SEQ ID NO: 4991978 - DNA, 25 bp, Homo sapien
gatgaaatgcatatggggtaaggtt

SEQ ID NO: 4991979 - DNA, 25 bp, Homo sapien
gtataagaacacagctgtgttaaac

SEQ ID NO: 4991980 - DNA, 25 bp, Homo sapien
taagaacacagctgtgttaaacacc

SEQ ID NO: 4991981 - DNA, 25 bp, Homo sapien
agaacacagctgtgttaaacaccag

SEQ ID NO: 4991982 - DNA, 25 bp, Homo sapien
agtcagtataagaacacagctgtgt

SEQ ID NO: 4991983 - DNA, 25 bp, Homo sapien
tgtggtggcccagcaaatggtctga

SEQ ID NO: 4991984 - DNA, 25 bp, Homo sapien
agctggggattgtggtggcccagca

SEQ ID NO: 4991985 - DNA, 25 bp, Homo sapien
gattgtggtggcccagcaaatggtc

SEQ ID NO: 4991986 - DNA, 25 bp, Homo sapien
gggattgtggtggcccagcaaatgg

SEQ ID NO: 4991987 - DNA, 25 bp, Homo sapien
agcaggaagtgaattgctcttggtc

SEQ ID NO: 4991988 - DNA, 25 bp, Homo sapien
aggagagcacgactgagctgacaga

SEQ ID NO: 4991989 - DNA, 25 bp, Homo sapien
aggaagtgaattgctcttggtcaca

SEQ ID NO: 4991990 - DNA, 25 bp, Homo sapien
ccaggagagcacgactgagctgaca

SEQ ID NO: 4991991 - DNA, 25 bp, Homo sapien
agaggcggaaagtcgactcatgcat

SEQ ID NO: 4991992 - DNA, 25 bp, Homo sapien
gacgtatatacttaggctctgagaa

SEQ ID NO: 4991993 - DNA, 25 bp, Homo sapien
caagcttgcactgtatgtcatccat

SEQ ID NO: 4991994 - DNA, 25 bp, Homo sapien
tcatccatgagtggcaggagatgtt

SEQ ID NO: 4991995 - DNA, 25 bp, Homo sapien
tcacagcaattgcaaatctttgacg

SEQ ID NO: 4991996 - DNA, 25 bp, Homo sapien
ccagttggtatagtgatgtctctcc

SEQ ID NO: 4991997 - DNA, 25 bp, Homo sapien
atgtctctccaatatctagctgcaa

SEQ ID NO: 4991998 - DNA, 25 bp, Homo sapien
caatatctagctgcaaagggctcac

SEQ ID NO: 4991999 - DNA, 25 bp, Homo sapien
tctcatccaccagttggtatagtga

SEQ ID NO: 4992000 - DNA, 25 bp, Homo sapien
tccccagattgctcttacttcttgt

SEQ ID NO: 4992001 - DNA, 25 bp, Homo sapien
tcttacttcttgtgatgatcccagt

SEQ ID NO: 4992002 - DNA, 25 bp, Homo sapien
cagtgcattttatctcattgtgata

SEQ ID NO: 4992003 - DNA, 25 bp, Homo sapien
tgtgatgatcccagtgcattttatc

SEQ ID NO: 4992004 - DNA, 25 bp, Homo sapien
aggaggtcccgagcacatatgcgca

SEQ ID NO: 4992005 - DNA, 25 bp, Homo sapien
acagaaacaagtacccggagccaag

SEQ ID NO: 4992006 - DNA, 25 bp, Homo sapien
tatgcgcacatatgcaatcaccaga

SEQ ID NO: 4992007 - DNA, 25 bp, Homo sapien
taagtagacgttgtcctggaatgtg

SEQ ID NO: 4992008 - DNA, 25 bp, Homo sapien
ctaggaacgtcttgcaaagacaaac

SEQ ID NO: 4992009 - DNA, 25 bp, Homo sapien
gttgactgcagttaagggtggatct

SEQ ID NO: 4992010 - DNA, 25 bp, Homo sapien
caggtgctctctagactcattgcca

SEQ ID NO: 4992011 - DNA, 25 bp, Homo sapien
tctccttgctgcgattttctgctag

SEQ ID NO: 4992012 - DNA, 25 bp, Homo sapien
acccagctttcggtacaccaacgag

SEQ ID NO: 4992013 - DNA, 25 bp, Homo sapien
cagctttcggtacaccaacgaggct

SEQ ID NO: 4992014 - DNA, 25 bp, Homo sapien
agctttcggtacaccaacgaggctt

SEQ ID NO: 4992015 - DNA, 25 bp, Homo sapien
ccagctttcggtacaccaacgaggc

SEQ ID NO: 4992016 - DNA, 25 bp, Homo sapien
taggtcaagatctctaaatgcagat

SEQ ID NO: 4992017 - DNA, 25 bp, Homo sapien
taaaaatggtgttgccatctatcca

SEQ ID NO: 4992018 - DNA, 25 bp, Homo sapien
aatgcagatttccactatcttcagc

SEQ ID NO: 4992019 - DNA, 25 bp, Homo sapien
tctatccagatgaagtcattctcag

SEQ ID NO: 4992020 - DNA, 25 bp, Homo sapien
aataggtagcccctgcttccgacca

SEQ ID NO: 4992021 - DNA, 25 bp, Homo sapien
gcccctgcttccgaccactcacaat

SEQ ID NO: 4992022 - DNA, 25 bp, Homo sapien
ggctaataggtagcccctgcttccg

SEQ ID NO: 4992023 - DNA, 25 bp, Homo sapien
ctaataggtagcccctgcttccgac

SEQ ID NO: 4992024 - DNA, 25 bp, Homo sapien
tgtcagtcaccaacagtctcaggag

SEQ ID NO: 4992025 - DNA, 25 bp, Homo sapien
ttccagtaagaatatccttgcttat

SEQ ID NO: 4992026 - DNA, 25 bp, Homo sapien
taaaaagtccctagatcatgcatca

SEQ ID NO: 4992027 - DNA, 25 bp, Homo sapien
tgtgttgtttcagtgtgtagataaa

SEQ ID NO: 4992028 - DNA, 25 bp, Homo sapien
gcaaaaccgtatgcagtccagttgg

SEQ ID NO: 4992029 - DNA, 25 bp, Homo sapien
gatcttgattaaagtgcaaaaccgt

SEQ ID NO: 4992030 - DNA, 25 bp, Homo sapien
cataagaccttctatgagaagcagg

SEQ ID NO: 4992031 - DNA, 25 bp, Homo sapien
tattctgggcttgcattccgctatt

SEQ ID NO: 4992032 - DNA, 25 bp, Homo sapien
tatgccgatgggtgaagggttgtgg

SEQ ID NO: 4992033 - DNA, 25 bp, Homo sapien
ttgtggggtagccagagatgggata

SEQ ID NO: 4992034 - DNA, 25 bp, Homo sapien
cagagatgggatagacgcagacccc

SEQ ID NO: 4992035 - DNA, 25 bp, Homo sapien
gctggcagtgtgaaggaaaactcat

SEQ ID NO: 4992036 - DNA, 25 bp, Homo sapien
gctacctgctcatggaagtcttccc

SEQ ID NO: 4992037 - DNA, 25 bp, Homo sapien
ttggtggtgaattctgtacaattaa

SEQ ID NO: 4992038 - DNA, 25 bp, Homo sapien
ttctgtacaattaatctctgcagca

SEQ ID NO: 4992039 - DNA, 25 bp, Homo sapien
tgtgctggtgggtgctacctgctca

SEQ ID NO: 4992040 - DNA, 25 bp, Homo sapien
cacctatggtcctcattgttcttaa

SEQ ID NO: 4992041 - DNA, 25 bp, Homo sapien
tccaccgggaaacatttccatattg

SEQ ID NO: 4992042 - DNA, 25 bp, Homo sapien
aagcagatagtaccattcttcacac

SEQ ID NO: 4992043 - DNA, 25 bp, Homo sapien
gttcactgttagaaaggtagcctaa

SEQ ID NO: 4992044 - DNA, 25 bp, Homo sapien
gtcagctttgctgcattgtacatct

SEQ ID NO: 4992045 - DNA, 25 bp, Homo sapien
tgttgtcagctttgctgcattgtac

SEQ ID NO: 4992046 - DNA, 25 bp, Homo sapien
gctttgctgcattgtacatctggaa

SEQ ID NO: 4992047 - DNA, 25 bp, Homo sapien
gctgcattgtacatctggaaaagct

SEQ ID NO: 4992048 - DNA, 25 bp, Homo sapien
cagtgccttcttgtcaaccttcctg

SEQ ID NO: 4992049 - DNA, 25 bp, Homo sapien
cacccatgagggtgttctctgatca

SEQ ID NO: 4992050 - DNA, 25 bp, Homo sapien
ctgaagaaacttttgaagggagatc

SEQ ID NO: 4992051 - DNA, 25 bp, Homo sapien
ttcttgtcaaccttcctggatgaag

SEQ ID NO: 4992052 - DNA, 25 bp, Homo sapien
ctagaagatgaagcacggacatgga

SEQ ID NO: 4992053 - DNA, 25 bp, Homo sapien
tagaagatgaagcacggacatggag

SEQ ID NO: 4992054 - DNA, 25 bp, Homo sapien
aagctatcaccccatttggccatct

SEQ ID NO: 4992055 - DNA, 25 bp, Homo sapien
atgctccctacacagtaagcgggta

SEQ ID NO: 4992056 - DNA, 25 bp, Homo sapien
gtcaatgctccctacacagtaagcg

SEQ ID NO: 4992057 - DNA, 25 bp, Homo sapien
tcagtgttgccgacaagccacacaa

SEQ ID NO: 4992058 - DNA, 25 bp, Homo sapien
taggattccttgtgtccgtgtcttc

SEQ ID NO: 4992059 - DNA, 25 bp, Homo sapien
ggctataggattccttgtgtccgtg

SEQ ID NO: 4992060 - DNA, 25 bp, Homo sapien
tctggctataggattccttgtgtcc

SEQ ID NO: 4992061 - DNA, 25 bp, Homo sapien
ctggtctggctataggattccttgt

SEQ ID NO: 4992062 - DNA, 25 bp, Homo sapien
aggtccctggtgctgaatttgtcct

SEQ ID NO: 4992063 - DNA, 25 bp, Homo sapien
caggtccctggtgctgaatttgtcc

SEQ ID NO: 4992064 - DNA, 25 bp, Homo sapien
catgagtgcttgactgtccaggtcc

SEQ ID NO: 4992065 - DNA, 25 bp, Homo sapien
gaataaagagttatggatattgacc

SEQ ID NO: 4992066 - DNA, 25 bp, Homo sapien
cttcgtgactactgatgggatgaca

SEQ ID NO: 4992067 - DNA, 25 bp, Homo sapien
tgttagatgaaatgcaagtccactc

SEQ ID NO: 4992068 - DNA, 25 bp, Homo sapien
taatgagatacaaagcgggcctgtc

SEQ ID NO: 4992069 - DNA, 25 bp, Homo sapien
ctcttgttgtaaatttatgaattgg

SEQ ID NO: 4992070 - DNA, 25 bp, Homo sapien
ttgttgtaaatttatgaattggtcc

SEQ ID NO: 4992071 - DNA, 25 bp, Homo sapien
cttgttgtaaatttatgaattggtc

SEQ ID NO: 4992072 - DNA, 25 bp, Homo sapien
tgttgtaaatttatgaattggtccc

SEQ ID NO: 4992073 - DNA, 25 bp, Homo sapien
ttgcatcactggcaaacaataaaac

SEQ ID NO: 4992074 - DNA, 25 bp, Homo sapien
gatgcagctccaccaatccattggc

SEQ ID NO: 4992075 - DNA, 25 bp, Homo sapien
ggaggcttctcaacattgccataga

SEQ ID NO: 4992076 - DNA, 25 bp, Homo sapien
gcattggcatgtaagaggccacaaa

SEQ ID NO: 4992077 - DNA, 25 bp, Homo sapien
gggttgagattgaatgctctgagca

SEQ ID NO: 4992078 - DNA, 25 bp, Homo sapien
gaaattttcctggtcgaatgaattg

SEQ ID NO: 4992079 - DNA, 25 bp, Homo sapien
gtgacttggcccaatttacatggaa

SEQ ID NO: 4992080 - DNA, 25 bp, Homo sapien
ggtcgaatgaattgttatagtcaaa

SEQ ID NO: 4992081 - DNA, 25 bp, Homo sapien
tttacatggaaagtgattgaaattt

SEQ ID NO: 4992082 - DNA, 25 bp, Homo sapien
tgtgtgtcctgactcatctctttgt

SEQ ID NO: 4992083 - DNA, 25 bp, Homo sapien
tgtgtcctgactcatctctttgtgg

SEQ ID NO: 4992084 - DNA, 25 bp, Homo sapien
gtgtgtcctgactcatctctttgtg

SEQ ID NO: 4992085 - DNA, 25 bp, Homo sapien
cacaatccaaggaggacttgttctg

SEQ ID NO: 4992086 - DNA, 25 bp, Homo sapien
caaggaggacttgttctgctttgct

SEQ ID NO: 4992087 - DNA, 25 bp, Homo sapien
ggtagtaactcagatctaaggccat

SEQ ID NO: 4992088 - DNA, 25 bp, Homo sapien
gagcagccctgacatccatggtagt

SEQ ID NO: 4992089 - DNA, 25 bp, Homo sapien
tgtgattcgtaagctttctgagtgt

SEQ ID NO: 4992090 - DNA, 25 bp, Homo sapien
gcacagtgctcggtcaatattatgt

SEQ ID NO: 4992091 - DNA, 25 bp, Homo sapien
ctgttttaaccgtgacacaagcttg

SEQ ID NO: 4992092 - DNA, 25 bp, Homo sapien
cacatgctcccatagtgaagactga

SEQ ID NO: 4992093 - DNA, 25 bp, Homo sapien
caaatgtggagcctgctgaagatcg

SEQ ID NO: 4992094 - DNA, 25 bp, Homo sapien
acacactgggaatgcttaatgccgg

SEQ ID NO: 4992095 - DNA, 25 bp, Homo sapien
gtagaaacagtaatccggcgaggcc

SEQ ID NO: 4992096 - DNA, 25 bp, Homo sapien
ttaatgccggacaacccacagcttt

SEQ ID NO: 4992097 - DNA, 25 bp, Homo sapien
ttagaagacggtgtgcatccactct

SEQ ID NO: 4992098 - DNA, 25 bp, Homo sapien
cccaggggccagttatatatctgca

SEQ ID NO: 4992099 - DNA, 25 bp, Homo sapien
tttggagatgtaaccccaggggcca

SEQ ID NO: 4992100 - DNA, 25 bp, Homo sapien
tgtgaagcaagccaatagcctttgg

SEQ ID NO: 4992101 - DNA, 25 bp, Homo sapien
aggttccacattctgtggttctgaa

SEQ ID NO: 4992102 - DNA, 25 bp, Homo sapien
tatggtaacgtgataattctctttc

SEQ ID NO: 4992103 - DNA, 25 bp, Homo sapien
tttctcaacgaaagaattctcaact

SEQ ID NO: 4992104 - DNA, 25 bp, Homo sapien
gtcacgtccacctctcctttggtta

SEQ ID NO: 4992105 - DNA, 25 bp, Homo sapien
cccaggaagttggaaactgctggct

SEQ ID NO: 4992106 - DNA, 25 bp, Homo sapien
caggaagttggaaactgctggctcc

SEQ ID NO: 4992107 - DNA, 25 bp, Homo sapien
aggaagttggaaactgctggctcca

SEQ ID NO: 4992108 - DNA, 25 bp, Homo sapien
gcccccaggaagttggaaactgctg

SEQ ID NO: 4992109 - DNA, 25 bp, Homo sapien
ttccccagaaggacacaacgcgatg

SEQ ID NO: 4992110 - DNA, 25 bp, Homo sapien
cgatgcctgtagctagtctcccctg

SEQ ID NO: 4992111 - DNA, 25 bp, Homo sapien
tagtctcccctgctccgactttgaa

SEQ ID NO: 4992112 - DNA, 25 bp, Homo sapien
cctgctccgactttgaatgcagctg

SEQ ID NO: 4992113 - DNA, 25 bp, Homo sapien
gatggttccagattccttatcataa

SEQ ID NO: 4992114 - DNA, 25 bp, Homo sapien
gcaatgtagggtgggtcaattaaaa

SEQ ID NO: 4992115 - DNA, 25 bp, Homo sapien
aaactttgggacaacaggcagctgg

SEQ ID NO: 4992116 - DNA, 25 bp, Homo sapien
ccaggagcatgctgtagtggaatta

SEQ ID NO: 4992117 - DNA, 25 bp, Homo sapien
catggcaggctgaattaaagcaact

SEQ ID NO: 4992118 - DNA, 25 bp, Homo sapien
tcctcatacgcgatctcagaccgtg

SEQ ID NO: 4992119 - DNA, 25 bp, Homo sapien
tacagtagtgagcttcatggcaggc

SEQ ID NO: 4992120 - DNA, 25 bp, Homo sapien
gaccgtgcatctatttgatttacag

SEQ ID NO: 4992121 - DNA, 25 bp, Homo sapien
gtgatgaaatcttgggccgtcaggt

SEQ ID NO: 4992122 - DNA, 25 bp, Homo sapien
ggccgtcaggttccgtccctctcag

SEQ ID NO: 4992123 - DNA, 25 bp, Homo sapien
gcagatccacgctgtaacagctttt

SEQ ID NO: 4992124 - DNA, 25 bp, Homo sapien
cctctcaggacatgaatcttccctt

SEQ ID NO: 4992125 - DNA, 25 bp, Homo sapien
tatggctaaacaaataacctttcat

SEQ ID NO: 4992126 - DNA, 25 bp, Homo sapien
ttatggctaaacaaataacctttca

SEQ ID NO: 4992127 - DNA, 25 bp, Homo sapien
tacaactggtatgataatattctcc

SEQ ID NO: 4992128 - DNA, 25 bp, Homo sapien
gcctcattgttatctgtgttatcaa

SEQ ID NO: 4992129 - DNA, 25 bp, Homo sapien
tgatcaagtctattgcttatacaac

SEQ ID NO: 4992130 - DNA, 25 bp, Homo sapien
tcccttgctccagtctgcctttgat

SEQ ID NO: 4992131 - DNA, 25 bp, Homo sapien
gggcaggagaaccatagtagacctt

SEQ ID NO: 4992132 - DNA, 25 bp, Homo sapien
aatgtgaacgacactggttactatg

SEQ ID NO: 4992133 - DNA, 25 bp, Homo sapien
tgtgaacgacactggttactatggt

SEQ ID NO: 4992134 - DNA, 25 bp, Homo sapien
tagaccttgctctaattttggtcac

SEQ ID NO: 4992135 - DNA, 25 bp, Homo sapien
aaactggctctgaatgttataaccg

SEQ ID NO: 4992136 - DNA, 25 bp, Homo sapien
ggttgcaatggcaatatctccacgg

SEQ ID NO: 4992137 - DNA, 25 bp, Homo sapien
tgttgctatggcaacctggttgcaa

SEQ ID NO: 4992138 - DNA, 25 bp, Homo sapien
tataaccgtacaaaatggaaagagc

SEQ ID NO: 4992139 - DNA, 25 bp, Homo sapien
ctaacacgtatagatcctcaaacga

SEQ ID NO: 4992140 - DNA, 25 bp, Homo sapien
cacgtatagatcctcaaacgaaaat

SEQ ID NO: 4992141 - DNA, 25 bp, Homo sapien
gatcctcaaacgaaaatcaggatat

SEQ ID NO: 4992142 - DNA, 25 bp, Homo sapien
tatagatcctcaaacgaaaatcagg

SEQ ID NO: 4992143 - DNA, 25 bp, Homo sapien
ggtgcttcagttgatcccgattatc

SEQ ID NO: 4992144 - DNA, 25 bp, Homo sapien
cataaacatggacaaggtgcttcag

SEQ ID NO: 4992145 - DNA, 25 bp, Homo sapien
tcccgattatctgctttgggattag

SEQ ID NO: 4992146 - DNA, 25 bp, Homo sapien
ctttgggagcataatagcgttcata

SEQ ID NO: 4992147 - DNA, 25 bp, Homo sapien
tatgatgggatcactaacagccatc

SEQ ID NO: 4992148 - DNA, 25 bp, Homo sapien
tcactaacagccatcagtttctctc

SEQ ID NO: 4992149 - DNA, 25 bp, Homo sapien
gttgcttatgatgggatcactaaca

SEQ ID NO: 4992150 - DNA, 25 bp, Homo sapien
tgggatcactaacagccatcagttt

SEQ ID NO: 4992151 - DNA, 25 bp, Homo sapien
tatgaaactccttgtttcaaatcaa

SEQ ID NO: 4992152 - DNA, 25 bp, Homo sapien
cctactctagcgttgaataatacca

SEQ ID NO: 4992153 - DNA, 25 bp, Homo sapien
tccggtttgattttcctactctagc

SEQ ID NO: 4992154 - DNA, 25 bp, Homo sapien
taataccaacaatgtgcccttgact

SEQ ID NO: 4992155 - DNA, 25 bp, Homo sapien
acatcttcctcaaggcactgtggat

SEQ ID NO: 4992156 - DNA, 25 bp, Homo sapien
cagttgtttctttggacaggtctca

SEQ ID NO: 4992157 - DNA, 25 bp, Homo sapien
tttctttggacaggtctcagtttgc

SEQ ID NO: 4992158 - DNA, 25 bp, Homo sapien
catcttcctcaaggcactgtggatt

SEQ ID NO: 4992159 - DNA, 25 bp, Homo sapien
tgggaagttgtaatatgttgtgtga

SEQ ID NO: 4992160 - DNA, 25 bp, Homo sapien
agctggctctcccacaataatctaa

SEQ ID NO: 4992161 - DNA, 25 bp, Homo sapien
caataatctaacattgtatgggaag

SEQ ID NO: 4992162 - DNA, 25 bp, Homo sapien
tgtaatatgttgtgtgattacttct

SEQ ID NO: 4992163 - DNA, 25 bp, Homo sapien
cattgtaagttatcttcagtgagat

SEQ ID NO: 4992164 - DNA, 25 bp, Homo sapien
tggaacattccattgtaagttatct

SEQ ID NO: 4992165 - DNA, 25 bp, Homo sapien
cttcagtgagatttcatcatttctg

SEQ ID NO: 4992166 - DNA, 25 bp, Homo sapien
gcctctgaggcctaatgtataagcc

SEQ ID NO: 4992167 - DNA, 25 bp, Homo sapien
cactctggacttggttatctgacac

SEQ ID NO: 4992168 - DNA, 25 bp, Homo sapien
tatttcactcccacagactgacagg

SEQ ID NO: 4992169 - DNA, 25 bp, Homo sapien
tcattaagcaagcacacaccgaagg

SEQ ID NO: 4992170 - DNA, 25 bp, Homo sapien
atcaaaagcctggactgacttggcc

SEQ ID NO: 4992171 - DNA, 25 bp, Homo sapien
gctgggcaaattggactcttgcaac

SEQ ID NO: 4992172 - DNA, 25 bp, Homo sapien
tggagcagcttttcctgataacgct

SEQ ID NO: 4992173 - DNA, 25 bp, Homo sapien
aattggactcttgcaactatcagcc

SEQ ID NO: 4992174 - DNA, 25 bp, Homo sapien
gcttttcctgataacgctgggcaaa

SEQ ID NO: 4992175 - DNA, 25 bp, Homo sapien
acctggcagccatgtttaccgccat

SEQ ID NO: 4992176 - DNA, 25 bp, Homo sapien
ggtgggcaattcctctatggtgtac

SEQ ID NO: 4992177 - DNA, 25 bp, Homo sapien
tttagtggtgggcaattcctctatg

SEQ ID NO: 4992178 - DNA, 25 bp, Homo sapien
aattcctctatggtgtacctggcag

SEQ ID NO: 4992179 - DNA, 25 bp, Homo sapien
ggctgactttaacacagacaccacc

SEQ ID NO: 4992180 - DNA, 25 bp, Homo sapien
accccagccactaacgtattcagat

SEQ ID NO: 4992181 - DNA, 25 bp, Homo sapien
atccgccatgggcattccaggggct

SEQ ID NO: 4992182 - DNA, 25 bp, Homo sapien
cagccactaacgtattcagatttca

SEQ ID NO: 4992183 - DNA, 25 bp, Homo sapien
tttatttcacgttccataaggacca

SEQ ID NO: 4992184 - DNA, 25 bp, Homo sapien
cacgttccataaggaccagctgaca

SEQ ID NO: 4992185 - DNA, 25 bp, Homo sapien
ggaccagctgacagtctatgttcat

SEQ ID NO: 4992186 - DNA, 25 bp, Homo sapien
tccataaggaccagctgacagtcta

SEQ ID NO: 4992187 - DNA, 25 bp, Homo sapien
agttggttttaccagctggtagtga

SEQ ID NO: 4992188 - DNA, 25 bp, Homo sapien
actctgtagttggttttaccagctg

SEQ ID NO: 4992189 - DNA, 25 bp, Homo sapien
agtactctgtagttggttttaccag

SEQ ID NO: 4992190 - DNA, 25 bp, Homo sapien
tgtagttggttttaccagctggtag

SEQ ID NO: 4992191 - DNA, 25 bp, Homo sapien
ataccggtgcatccctcccataaga

SEQ ID NO: 4992192 - DNA, 25 bp, Homo sapien
ccctcccataagatgggtgctttgt

SEQ ID NO: 4992193 - DNA, 25 bp, Homo sapien
ttgtataccggtgcatccctcccat

SEQ ID NO: 4992194 - DNA, 25 bp, Homo sapien
cataagatgggtgctttgttgtgag

SEQ ID NO: 4992195 - DNA, 25 bp, Homo sapien
aagctggcagcagattctcccaata

SEQ ID NO: 4992196 - DNA, 25 bp, Homo sapien
gaagctggcagcagattctcccaat

SEQ ID NO: 4992197 - DNA, 25 bp, Homo sapien
aatctctaagccacccagggtgctt

SEQ ID NO: 4992198 - DNA, 25 bp, Homo sapien
atcaatctctaagccacccagggtg

SEQ ID NO: 4992199 - DNA, 25 bp, Homo sapien
tctaagccacccagggtgcttgcac

SEQ ID NO: 4992200 - DNA, 25 bp, Homo sapien
tacacatcaatctctaagccaccca

SEQ ID NO: 4992201 - DNA, 25 bp, Homo sapien
tgcccccatggcagttgtgggtgtc

SEQ ID NO: 4992202 - DNA, 25 bp, Homo sapien
ggctgtgcccccatggcagttgtgg

SEQ ID NO: 4992203 - DNA, 25 bp, Homo sapien
ctgtgcccccatggcagttgtgggt

SEQ ID NO: 4992204 - DNA, 25 bp, Homo sapien
ccccatggcagttgtgggtgtctga

SEQ ID NO: 4992205 - DNA, 25 bp, Homo sapien
tgggatttctactgtagtcagggaa

SEQ ID NO: 4992206 - DNA, 25 bp, Homo sapien
tatgtgtcaggcatgcttcccgaag

SEQ ID NO: 4992207 - DNA, 25 bp, Homo sapien
ctattgagcctctattatgtgtcag

SEQ ID NO: 4992208 - DNA, 25 bp, Homo sapien
tggtaaattccagccgatcagacag

SEQ ID NO: 4992209 - DNA, 25 bp, Homo sapien
caattagtccccaaatttgctgtac

SEQ ID NO: 4992210 - DNA, 25 bp, Homo sapien
tgaaccctgtcaaagtacatgctct

SEQ ID NO: 4992211 - DNA, 25 bp, Homo sapien
tcactagaaatgactatgaaccctg

SEQ ID NO: 4992212 - DNA, 25 bp, Homo sapien
tagctgctataaaattcttgtgaca

SEQ ID NO: 4992213 - DNA, 25 bp, Homo sapien
tgctcataattgacaaattgttccc

SEQ ID NO: 4992214 - DNA, 25 bp, Homo sapien
tacaataatacaagcatcctcctga

SEQ ID NO: 4992215 - DNA, 25 bp, Homo sapien
ttaagaaagatcaaccccttgctca

SEQ ID NO: 4992216 - DNA, 25 bp, Homo sapien
agaatagtggcaaaagatacaataa

SEQ ID NO: 4992217 - DNA, 25 bp, Homo sapien
gactctggtattcgtcttttcagcg

SEQ ID NO: 4992218 - DNA, 25 bp, Homo sapien
aaagtcattgactctggtattcgtc

SEQ ID NO: 4992219 - DNA, 25 bp, Homo sapien
tattcgtcttttcagcgtcttcgtg

SEQ ID NO: 4992220 - DNA, 25 bp, Homo sapien
agcgtcttcgtggtgcaatacagcc

SEQ ID NO: 4992221 - DNA, 25 bp, Homo sapien
actgtggtaaagagggatcctgtct

SEQ ID NO: 4992222 - DNA, 25 bp, Homo sapien
agactgtggtaaagagggatcctgt

SEQ ID NO: 4992223 - DNA, 25 bp, Homo sapien
tgtggtaaagagggatcctgtctta

SEQ ID NO: 4992224 - DNA, 25 bp, Homo sapien
gactgtggtaaagagggatcctgtc

SEQ ID NO: 4992225 - DNA, 25 bp, Homo sapien
ggagagatactttgatgtagcaatc

SEQ ID NO: 4992226 - DNA, 25 bp, Homo sapien
cctatctcatagtattccagagcat

SEQ ID NO: 4992227 - DNA, 25 bp, Homo sapien
gagatactttgatgtagcaatcaaa

SEQ ID NO: 4992228 - DNA, 25 bp, Homo sapien
tgtctcctatctcatagtattccag

SEQ ID NO: 4992229 - DNA, 25 bp, Homo sapien
gctttcacagaagacatatctgcat

SEQ ID NO: 4992230 - DNA, 25 bp, Homo sapien
tcacagaagacatatctgcatggca

SEQ ID NO: 4992231 - DNA, 25 bp, Homo sapien
cagctttcacagaagacatatctgc

SEQ ID NO: 4992232 - DNA, 25 bp, Homo sapien
tttcacagaagacatatctgcatgg

SEQ ID NO: 4992233 - DNA, 25 bp, Homo sapien
gtttgagtaggtacaccatggaatc

SEQ ID NO: 4992234 - DNA, 25 bp, Homo sapien
tcttagtgaagagcacaatgtagca

SEQ ID NO: 4992235 - DNA, 25 bp, Homo sapien
tgttctaatacaccattgaaattgt

SEQ ID NO: 4992236 - DNA, 25 bp, Homo sapien
tgaagtctattactcgcattcttag

SEQ ID NO: 4992237 - DNA, 25 bp, Homo sapien
gcgtagccacatcagtggttgaaaa

SEQ ID NO: 4992238 - DNA, 25 bp, Homo sapien
aatgtgcgtagccacatcagtggtt

SEQ ID NO: 4992239 - DNA, 25 bp, Homo sapien
accttacatgatattaatgatgctg

SEQ ID NO: 4992240 - DNA, 25 bp, Homo sapien
cccatcttccagactcttttaactc

SEQ ID NO: 4992241 - DNA, 25 bp, Homo sapien
gccatcataatatggagtgacagcc

SEQ ID NO: 4992242 - DNA, 25 bp, Homo sapien
aggtgccagtgtgcattgtatccca

SEQ ID NO: 4992243 - DNA, 25 bp, Homo sapien
tgtatcccactgaattaggccatca

SEQ ID NO: 4992244 - DNA, 25 bp, Homo sapien
tggttttggccgctgccccttcttc

SEQ ID NO: 4992245 - DNA, 25 bp, Homo sapien
cgtgctcaagcccatcccgccttgc

SEQ ID NO: 4992246 - DNA, 25 bp, Homo sapien
agcccatcccgccttgcctcttcca

SEQ ID NO: 4992247 - DNA, 25 bp, Homo sapien
gtgccccgtgctcaagcccatcccg

SEQ ID NO: 4992248 - DNA, 25 bp, Homo sapien
ctgacgtgccccgtgctcaagccca

SEQ ID NO: 4992249 - DNA, 25 bp, Homo sapien
cgtcagagaaccaggctctgaagga

SEQ ID NO: 4992250 - DNA, 25 bp, Homo sapien
cagctgagttttggtgggagggcca

SEQ ID NO: 4992251 - DNA, 25 bp, Homo sapien
agttttggtgggagggccaatagtg

SEQ ID NO: 4992252 - DNA, 25 bp, Homo sapien
gctctgaaggacagctgagttttgg

SEQ ID NO: 4992253 - DNA, 25 bp, Homo sapien
tgagccggttacatgcaccctgctc

SEQ ID NO: 4992254 - DNA, 25 bp, Homo sapien
tgcagcccaaggctatctctcgcat

SEQ ID NO: 4992255 - DNA, 25 bp, Homo sapien
caccctgctccttggctctgacttg

SEQ ID NO: 4992256 - DNA, 25 bp, Homo sapien
catggatagggttgctgtctgagcc

SEQ ID NO: 4992257 - DNA, 25 bp, Homo sapien
ctgcagcccctcccttcatgcccac

SEQ ID NO: 4992258 - DNA, 25 bp, Homo sapien
gtgagcagaaagaagcttttctctg

SEQ ID NO: 4992259 - DNA, 25 bp, Homo sapien
agcagaaagaagcttttctctgtca

SEQ ID NO: 4992260 - DNA, 25 bp, Homo sapien
agtgagcagaaagaagcttttctct

SEQ ID NO: 4992261 - DNA, 25 bp, Homo sapien
cttccagtgagtccagcgcaggcct

SEQ ID NO: 4992262 - DNA, 25 bp, Homo sapien
gcgcaggcctgctttacctcgggtt

SEQ ID NO: 4992263 - DNA, 25 bp, Homo sapien
tccttgctagcctcaggacaccaag

SEQ ID NO: 4992264 - DNA, 25 bp, Homo sapien
cgatgcctgccaccagtgccttcca

SEQ ID NO: 4992265 - DNA, 25 bp, Homo sapien
gaacagttaggctaaatgcctcaga

SEQ ID NO: 4992266 - DNA, 25 bp, Homo sapien
tccattttacgagctgctgttgaca

SEQ ID NO: 4992267 - DNA, 25 bp, Homo sapien
gattggctattttagtcaacgtgag

SEQ ID NO: 4992268 - DNA, 25 bp, Homo sapien
agccgttatgctacttctgttggaa

SEQ ID NO: 4992269 - DNA, 25 bp, Homo sapien
tgcgctgacaaaaacgtgcctagaa

SEQ ID NO: 4992270 - DNA, 25 bp, Homo sapien
cgctgacaaaaacgtgcctagaaca

SEQ ID NO: 4992271 - DNA, 25 bp, Homo sapien
ctgcgctgacaaaaacgtgcctaga

SEQ ID NO: 4992272 - DNA, 25 bp, Homo sapien
ctgacaaaaacgtgcctagaacatc

SEQ ID NO: 4992273 - DNA, 25 bp, Homo sapien
cacgcagcgactgagaaacagcctg

SEQ ID NO: 4992274 - DNA, 25 bp, Homo sapien
tattttgggcattctgctgcgaaag

SEQ ID NO: 4992275 - DNA, 25 bp, Homo sapien
tttgaagactttaccgcaaccctgc

SEQ ID NO: 4992276 - DNA, 25 bp, Homo sapien
aagttcttaatacgggatggcacca

SEQ ID NO: 4992277 - DNA, 25 bp, Homo sapien
ctgaaacttcaatcagtgtatttgc

SEQ ID NO: 4992278 - DNA, 25 bp, Homo sapien
cagtgtatttgctacctgttgaagt

SEQ ID NO: 4992279 - DNA, 25 bp, Homo sapien
tagcattaacttttatgtctgaaac

SEQ ID NO: 4992280 - DNA, 25 bp, Homo sapien
ttaacttttatgtctgaaacttcaa

SEQ ID NO: 4992281 - DNA, 25 bp, Homo sapien
gattgaccctcagagtcatacaatg

SEQ ID NO: 4992282 - DNA, 25 bp, Homo sapien
tgatgattgaccctcagagtcatac

SEQ ID NO: 4992283 - DNA, 25 bp, Homo sapien
ttgaccctcagagtcatacaatggg

SEQ ID NO: 4992284 - DNA, 25 bp, Homo sapien
tcatacaatggggagagcagctcac

SEQ ID NO: 4992285 - DNA, 25 bp, Homo sapien
tctgcctggaatgaagtgaccccag

SEQ ID NO: 4992286 - DNA, 25 bp, Homo sapien
gagtaagaaatcacaccagatggtg

SEQ ID NO: 4992287 - DNA, 25 bp, Homo sapien
taagctttatagctggcatctcagc

SEQ ID NO: 4992288 - DNA, 25 bp, Homo sapien
gatacatcatagtacgaaatctggg

SEQ ID NO: 4992289 - DNA, 25 bp, Homo sapien
tgacaagccttcagctaaactaacc

SEQ ID NO: 4992290 - DNA, 25 bp, Homo sapien
ttagttaccatgaatcagaggcact

SEQ ID NO: 4992291 - DNA, 25 bp, Homo sapien
cagaggcacttacatgtgtataagc

SEQ ID NO: 4992292 - DNA, 25 bp, Homo sapien
cagtattactttacacaccatcagg

SEQ ID NO: 4992293 - DNA, 25 bp, Homo sapien
tacagggtccatcacataggtttta

SEQ ID NO: 4992294 - DNA, 25 bp, Homo sapien
gttgttgtgctttcgtttactgaca

SEQ ID NO: 4992295 - DNA, 25 bp, Homo sapien
gattcctgccccaattacagggtcc

SEQ ID NO: 4992296 - DNA, 25 bp, Homo sapien
tcctacaaaagcgtattataaacag

SEQ ID NO: 4992297 - DNA, 25 bp, Homo sapien
ttcagcaagtgtacaggcaaccatc

SEQ ID NO: 4992298 - DNA, 25 bp, Homo sapien
tagatgaagacaaacaacgcaggct

SEQ ID NO: 4992299 - DNA, 25 bp, Homo sapien
tgttatacacaagggaagtccagga

SEQ ID NO: 4992300 - DNA, 25 bp, Homo sapien
tatacgcttacatctgctagtggca

SEQ ID NO: 4992301 - DNA, 25 bp, Homo sapien
aaaaatgggctaacactttatgaag

SEQ ID NO: 4992302 - DNA, 25 bp, Homo sapien
ctttgagcgtcagaacagcctttta

SEQ ID NO: 4992303 - DNA, 25 bp, Homo sapien
gatgagtaccaatgtcatgatacca

SEQ ID NO: 4992304 - DNA, 25 bp, Homo sapien
caatatttaggtcacaagcgagaca

SEQ ID NO: 4992305 - DNA, 25 bp, Homo sapien
tctggtctaggacaagatacaaacc

SEQ ID NO: 4992306 - DNA, 25 bp, Homo sapien
tatttagagaatggcaactctggtc

SEQ ID NO: 4992307 - DNA, 25 bp, Homo sapien
tttaagtaatctcagccaccaaagt

SEQ ID NO: 4992308 - DNA, 25 bp, Homo sapien
actctgaccagatttgtattacaca

SEQ ID NO: 4992309 - DNA, 25 bp, Homo sapien
tcttatgaaagccaccaaaacttgg

SEQ ID NO: 4992310 - DNA, 25 bp, Homo sapien
aagtcccctcctatgtgctccttgg

SEQ ID NO: 4992311 - DNA, 25 bp, Homo sapien
caagaggatcaattctgcaggagac

SEQ ID NO: 4992312 - DNA, 25 bp, Homo sapien
gctccttggtcactgggacatgact

SEQ ID NO: 4992313 - DNA, 25 bp, Homo sapien
tagctgtgcacctcattttccttac

SEQ ID NO: 4992314 - DNA, 25 bp, Homo sapien
gtagctgtgcacctcattttcctta

SEQ ID NO: 4992315 - DNA, 25 bp, Homo sapien
agtagctgtgcacctcattttcctt

SEQ ID NO: 4992316 - DNA, 25 bp, Homo sapien
agctgtgcacctcattttccttact

SEQ ID NO: 4992317 - DNA, 25 bp, Homo sapien
catgaagacagacttgttcctgtcc

SEQ ID NO: 4992318 - DNA, 25 bp, Homo sapien
gaagacagacttgttcctgtcctct

SEQ ID NO: 4992319 - DNA, 25 bp, Homo sapien
cctcatgaagacagacttgttcctg

SEQ ID NO: 4992320 - DNA, 25 bp, Homo sapien
tcatgaagacagacttgttcctgtc

SEQ ID NO: 4992321 - DNA, 25 bp, Homo sapien
gctgagtgggccgaaagttgtctcc

SEQ ID NO: 4992322 - DNA, 25 bp, Homo sapien
gaaatgcagctctaatgactctgtc

SEQ ID NO: 4992323 - DNA, 25 bp, Homo sapien
gtcctcagccttcgaaattcttcta

SEQ ID NO: 4992324 - DNA, 25 bp, Homo sapien
gactctgtcactaagaggctgagtg

SEQ ID NO: 4992325 - DNA, 25 bp, Homo sapien
cccttaatgagattaagtctgaccc

SEQ ID NO: 4992326 - DNA, 25 bp, Homo sapien
tactggttgatttcccttaatgaga

SEQ ID NO: 4992327 - DNA, 25 bp, Homo sapien
tgtcactgaatactggttgatttcc

SEQ ID NO: 4992328 - DNA, 25 bp, Homo sapien
cccaactgggattgtcctgtttagt

SEQ ID NO: 4992329 - DNA, 25 bp, Homo sapien
attacatgtaaagacgaatgcaggt

SEQ ID NO: 4992330 - DNA, 25 bp, Homo sapien
ggttatagcgctgatctcaattaca

SEQ ID NO: 4992331 - DNA, 25 bp, Homo sapien
tcaggacctcggcattctcgggtta

SEQ ID NO: 4992332 - DNA, 25 bp, Homo sapien
tacatgtaaagacgaatgcaggtac

SEQ ID NO: 4992333 - DNA, 25 bp, Homo sapien
ttacagaaataaccggcatccccac

SEQ ID NO: 4992334 - DNA, 25 bp, Homo sapien
tacagaaataaccggcatccccact

SEQ ID NO: 4992335 - DNA, 25 bp, Homo sapien
ccactttacgtccagactttccatt

SEQ ID NO: 4992336 - DNA, 25 bp, Homo sapien
cccactttacgtccagactttccat

SEQ ID NO: 4992337 - DNA, 25 bp, Homo sapien
atacacccagtaatcccgcagcaga

SEQ ID NO: 4992338 - DNA, 25 bp, Homo sapien
ggtgacaccttcactgcaaggtggg

SEQ ID NO: 4992339 - DNA, 25 bp, Homo sapien
tcggaataatatccaggtgacacct

SEQ ID NO: 4992340 - DNA, 25 bp, Homo sapien
ggatggtgagagagccttcatacac

SEQ ID NO: 4992341 - DNA, 25 bp, Homo sapien
ctgatgactccaacaacaattttca

SEQ ID NO: 4992342 - DNA, 25 bp, Homo sapien
tcctgatgactccaacaacaatttt

SEQ ID NO: 4992343 - DNA, 25 bp, Homo sapien
aactagagccccacagtcttacact

SEQ ID NO: 4992344 - DNA, 25 bp, Homo sapien
tttaaactagagccccacagtctta

SEQ ID NO: 4992345 - DNA, 25 bp, Homo sapien
tagagccccacagtcttacactact

SEQ ID NO: 4992346 - DNA, 25 bp, Homo sapien
taaactagagccccacagtcttaca

SEQ ID NO: 4992347 - DNA, 25 bp, Homo sapien
gattaaagcaaggtattgttttgga

SEQ ID NO: 4992348 - DNA, 25 bp, Homo sapien
ggtgccccatctgccccatgtcagt

SEQ ID NO: 4992349 - DNA, 25 bp, Homo sapien
ctacacttggtgccccatctgcccc

SEQ ID NO: 4992350 - DNA, 25 bp, Homo sapien
tggtgccccatctgccccatgtcag

SEQ ID NO: 4992351 - DNA, 25 bp, Homo sapien
gccccatctgccccatgtcagttac

SEQ ID NO: 4992352 - DNA, 25 bp, Homo sapien
ggatctatgctagatgctctcctca

SEQ ID NO: 4992353 - DNA, 25 bp, Homo sapien
cacattcataacagagatttgggct

SEQ ID NO: 4992354 - DNA, 25 bp, Homo sapien
tgtaaaatgcctgaaccctggatgg

SEQ ID NO: 4992355 - DNA, 25 bp, Homo sapien
gctcctaacctttccggcattacaa

SEQ ID NO: 4992356 - DNA, 25 bp, Homo sapien
ctggaaagggagatctgatatagat

SEQ ID NO: 4992357 - DNA, 25 bp, Homo sapien
gggagatctgatatagatggaaata

SEQ ID NO: 4992358 - DNA, 25 bp, Homo sapien
ggaaatattctgttccgatcagtgt

SEQ ID NO: 4992359 - DNA, 25 bp, Homo sapien
tctgttccgatcagtgtttatcaaa

SEQ ID NO: 4992360 - DNA, 25 bp, Homo sapien
gcctccccgatccccctgaattcca

SEQ ID NO: 4992361 - DNA, 25 bp, Homo sapien
tatactgaatatcttggaggatttc

SEQ ID NO: 4992362 - DNA, 25 bp, Homo sapien
ttatactgaatatcttggaggattt

SEQ ID NO: 4992363 - DNA, 25 bp, Homo sapien
cttatactgaatatcttggaggatt

SEQ ID NO: 4992364 - DNA, 25 bp, Homo sapien
cccacctgtgacaccatgaaataaa

SEQ ID NO: 4992365 - DNA, 25 bp, Homo sapien
cgccgttataaaacacaaggaatat

SEQ ID NO: 4992366 - DNA, 25 bp, Homo sapien
tattaagagcctaaactggatggct

SEQ ID NO: 4992367 - DNA, 25 bp, Homo sapien
caaggaatataggtccccacctgtg

SEQ ID NO: 4992368 - DNA, 25 bp, Homo sapien
taccaatgaatatgtctgaactccg

SEQ ID NO: 4992369 - DNA, 25 bp, Homo sapien
caggttatccaataggcagcccaga

SEQ ID NO: 4992370 - DNA, 25 bp, Homo sapien
tttttacctctgaaagcacgtggcc

SEQ ID NO: 4992371 - DNA, 25 bp, Homo sapien
tctggtttctggtcctgatggcagc

SEQ ID NO: 4992372 - DNA, 25 bp, Homo sapien
caatgctgccaaacagagtggagtt

SEQ ID NO: 4992373 - DNA, 25 bp, Homo sapien
caatgatggcgattccgtgcggctt

SEQ ID NO: 4992374 - DNA, 25 bp, Homo sapien
atggcgattccgtgcggcttcccca

SEQ ID NO: 4992375 - DNA, 25 bp, Homo sapien
aacagagcaatgatggcgattccgt

SEQ ID NO: 4992376 - DNA, 25 bp, Homo sapien
tttaatgtgctacttctaatcataa

SEQ ID NO: 4992377 - DNA, 25 bp, Homo sapien
aatgtgctacttctaatcataaaag

SEQ ID NO: 4992378 - DNA, 25 bp, Homo sapien
agcaaagatatagccatttctttac

SEQ ID NO: 4992379 - DNA, 25 bp, Homo sapien
ggcaacagacagaccacatcattta

SEQ ID NO: 4992380 - DNA, 25 bp, Homo sapien
cagttttagtcctgatgaggaggaa

SEQ ID NO: 4992381 - DNA, 25 bp, Homo sapien
tactggcttaatacgagttctctgt

SEQ ID NO: 4992382 - DNA, 25 bp, Homo sapien
gatcacaagtagacacaaactactg

SEQ ID NO: 4992383 - DNA, 25 bp, Homo sapien
gagttctctgtatgaattccttcct

SEQ ID NO: 4992384 - DNA, 25 bp, Homo sapien
cacctgagtcttggcggttccaggg

SEQ ID NO: 4992385 - DNA, 25 bp, Homo sapien
ctcacaataacaagggacccaagct

SEQ ID NO: 4992386 - DNA, 25 bp, Homo sapien
tcagccaacccaagctaacaaggat

SEQ ID NO: 4992387 - DNA, 25 bp, Homo sapien
taggtgagatcccagaacagaagaa

SEQ ID NO: 4992388 - DNA, 25 bp, Homo sapien
taaaagacctctgctaggaatctcg

SEQ ID NO: 4992389 - DNA, 25 bp, Homo sapien
gaagtggcctgcagtacatcttatg

SEQ ID NO: 4992390 - DNA, 25 bp, Homo sapien
gcagagaggactcacaagactcact

SEQ ID NO: 4992391 - DNA, 25 bp, Homo sapien
ttcaaagcctaaccgcccagatatg

SEQ ID NO: 4992392 - DNA, 25 bp, Homo sapien
tgtttagaagtagacgggtcactgc

SEQ ID NO: 4992393 - DNA, 25 bp, Homo sapien
gccaactggattatagtttagacca

SEQ ID NO: 4992394 - DNA, 25 bp, Homo sapien
agggtcggccgcattagcactgcat

SEQ ID NO: 4992395 - DNA, 25 bp, Homo sapien
catagggtcacttactcctccaggg

SEQ ID NO: 4992396 - DNA, 25 bp, Homo sapien
cttgctctacaactaaatgaaactg

SEQ ID NO: 4992397 - DNA, 25 bp, Homo sapien
tacataaaggcacatgtaaccagaa

SEQ ID NO: 4992398 - DNA, 25 bp, Homo sapien
gccctgtgaaaatctacacctatgc

SEQ ID NO: 4992399 - DNA, 25 bp, Homo sapien
taactccacggccatgagacaatgc

SEQ ID NO: 4992400 - DNA, 25 bp, Homo sapien
tcaattaggaacaggaaaggcatca

SEQ ID NO: 4992401 - DNA, 25 bp, Homo sapien
tacagctcatactgactgggctggg

SEQ ID NO: 4992402 - DNA, 25 bp, Homo sapien
caaggcaatgcacttcagttcagta

SEQ ID NO: 4992403 - DNA, 25 bp, Homo sapien
cagatatgggagctccagttaggca

SEQ ID NO: 4992404 - DNA, 25 bp, Homo sapien
aggtatacatatgccggattgttac

SEQ ID NO: 4992405 - DNA, 25 bp, Homo sapien
caataacggcttttacagtgaccac

SEQ ID NO: 4992406 - DNA, 25 bp, Homo sapien
cccagccaataacggcttttacagt

SEQ ID NO: 4992407 - DNA, 25 bp, Homo sapien
cagtgaccacttcatggcatatttt

SEQ ID NO: 4992408 - DNA, 25 bp, Homo sapien
gattaaggcacgtgcctatatgccc

SEQ ID NO: 4992409 - DNA, 25 bp, Homo sapien
ggattaaggcacgtgcctatatgcc

SEQ ID NO: 4992410 - DNA, 25 bp, Homo sapien
attaaggcacgtgcctatatgcccg

SEQ ID NO: 4992411 - DNA, 25 bp, Homo sapien
caggaggcggactcaggaggtaatg

SEQ ID NO: 4992412 - DNA, 25 bp, Homo sapien
tgtatcttctaaagcagcagtgccc

SEQ ID NO: 4992413 - DNA, 25 bp, Homo sapien
gatccaacaggaggcggactcagga

SEQ ID NO: 4992414 - DNA, 25 bp, Homo sapien
cggactcaggaggtaatgctcactg

SEQ ID NO: 4992415 - DNA, 25 bp, Homo sapien
gaagtcagttcatgggccatttctg

SEQ ID NO: 4992416 - DNA, 25 bp, Homo sapien
tcgaccccattcttggaggtagcag

SEQ ID NO: 4992417 - DNA, 25 bp, Homo sapien
ggctcaatctgctagctctatagga

SEQ ID NO: 4992418 - DNA, 25 bp, Homo sapien
gcagggattccaactttgcaacaca

SEQ ID NO: 4992419 - DNA, 25 bp, Homo sapien
tttagaagaggttcaacaaacatga

SEQ ID NO: 4992420 - DNA, 25 bp, Homo sapien
tgaccttttgaactcttagatttct

SEQ ID NO: 4992421 - DNA, 25 bp, Homo sapien
catccaggccatacatatggtttcc

SEQ ID NO: 4992422 - DNA, 25 bp, Homo sapien
aagtcatcccattacatctccttgg

SEQ ID NO: 4992423 - DNA, 25 bp, Homo sapien
tatacagccatgatttccagccact

SEQ ID NO: 4992424 - DNA, 25 bp, Homo sapien
caagaaagacgctgtggagactaaa

SEQ ID NO: 4992425 - DNA, 25 bp, Homo sapien
gagactaaatggtacaacccatggg

SEQ ID NO: 4992426 - DNA, 25 bp, Homo sapien
taacatcaagacgtggactgaatcc

SEQ ID NO: 4992427 - DNA, 25 bp, Homo sapien
tgccctaggcttccattgcattaag

SEQ ID NO: 4992428 - DNA, 25 bp, Homo sapien
ttgaggtttctccaacggttgcttg

SEQ ID NO: 4992429 - DNA, 25 bp, Homo sapien
acaggaggtttcatgtgctgcccta

SEQ ID NO: 4992430 - DNA, 25 bp, Homo sapien
caagccacgagagtagacaggaggt

SEQ ID NO: 4992431 - DNA, 25 bp, Homo sapien
aaacaagatttttacaagatgattt

SEQ ID NO: 4992432 - DNA, 25 bp, Homo sapien
ttacaagatgatttgttattcttac

SEQ ID NO: 4992433 - DNA, 25 bp, Homo sapien
gatttttacaagatgatttgttatt

SEQ ID NO: 4992434 - DNA, 25 bp, Homo sapien
aacaagatttttacaagatgatttg

SEQ ID NO: 4992435 - DNA, 25 bp, Homo sapien
ctttgaaattaaccgtgtgctcaga

SEQ ID NO: 4992436 - DNA, 25 bp, Homo sapien
agtgaaatctcacttcgtacagttc

SEQ ID NO: 4992437 - DNA, 25 bp, Homo sapien
tgaggcaatggtcctcccgaaagaa

SEQ ID NO: 4992438 - DNA, 25 bp, Homo sapien
tgtgctcagaaccacgctggttttc

SEQ ID NO: 4992439 - DNA, 25 bp, Homo sapien
ccaaatcaggcctagacagaagtgc

SEQ ID NO: 4992440 - DNA, 25 bp, Homo sapien
catgacagagaggataaggggaatc

SEQ ID NO: 4992441 - DNA, 25 bp, Homo sapien
aaaaaagggttctggatcatgagta

SEQ ID NO: 4992442 - DNA, 25 bp, Homo sapien
gatcatgagtatccaaatcaggcct

SEQ ID NO: 4992443 - DNA, 25 bp, Homo sapien
gaatggtatgtccatcattggtgac

SEQ ID NO: 4992444 - DNA, 25 bp, Homo sapien
gtctcggcacaccacataatttggg

SEQ ID NO: 4992445 - DNA, 25 bp, Homo sapien
acttcaggataacctgaatggtatg

SEQ ID NO: 4992446 - DNA, 25 bp, Homo sapien
atacctagcctctcttgagtttagg

SEQ ID NO: 4992447 - DNA, 25 bp, Homo sapien
acatacttagtgacagtcagaaccc

SEQ ID NO: 4992448 - DNA, 25 bp, Homo sapien
caacatacttagtgacagtcagaac

SEQ ID NO: 4992449 - DNA, 25 bp, Homo sapien
ttcaacatacttagtgacagtcaga

SEQ ID NO: 4992450 - DNA, 25 bp, Homo sapien
tcaacatacttagtgacagtcagaa

SEQ ID NO: 4992451 - DNA, 25 bp, Homo sapien
gcgacggtatcttcgatgaagctca

SEQ ID NO: 4992452 - DNA, 25 bp, Homo sapien
cttctcggggaaggcgacggtatct

SEQ ID NO: 4992453 - DNA, 25 bp, Homo sapien
cggtatcttcgatgaagctcaggtc

SEQ ID NO: 4992454 - DNA, 25 bp, Homo sapien
ggaaggcgacggtatcttcgatgaa

SEQ ID NO: 4992455 - DNA, 25 bp, Homo sapien
tgaaccgcagtgtgagtgcaagcag

SEQ ID NO: 4992456 - DNA, 25 bp, Homo sapien
tgtgagcacgcgtgagcggcagtgt

SEQ ID NO: 4992457 - DNA, 25 bp, Homo sapien
ggcagtgtgagtgcgagagcgcctc

SEQ ID NO: 4992458 - DNA, 25 bp, Homo sapien
gttcggaccgagtgttccagagacc

SEQ ID NO: 4992459 - DNA, 25 bp, Homo sapien
cgcctcggggcgactagtcccaagt

SEQ ID NO: 4992460 - DNA, 25 bp, Homo sapien
gggagccgacagttagaatgcgcct

SEQ ID NO: 4992461 - DNA, 25 bp, Homo sapien
ccaagtcacggaaacctcggcgcat

SEQ ID NO: 4992462 - DNA, 25 bp, Homo sapien
gccgacagttagaatgcgcctcggg

SEQ ID NO: 4992463 - DNA, 25 bp, Homo sapien
tcacctagtgaaatcgtgtaaataa

SEQ ID NO: 4992464 - DNA, 25 bp, Homo sapien
gtgtacacagctcccattcacctag

SEQ ID NO: 4992465 - DNA, 25 bp, Homo sapien
tgaaatcgtgtaaataatgaagtgc

SEQ ID NO: 4992466 - DNA, 25 bp, Homo sapien
aaataatgaagtgcacacattgcat

SEQ ID NO: 4992467 - DNA, 25 bp, Homo sapien
aatatgagtagaggtggcacgtgcc

SEQ ID NO: 4992468 - DNA, 25 bp, Homo sapien
ttcagaaacaaacgactagggctcc

SEQ ID NO: 4992469 - DNA, 25 bp, Homo sapien
tagggcccttaccacttcatggcag

SEQ ID NO: 4992470 - DNA, 25 bp, Homo sapien
catagtagcccatcaagtaaaggtg

SEQ ID NO: 4992471 - DNA, 25 bp, Homo sapien
cccgttgttggcagaatggcaatac

SEQ ID NO: 4992472 - DNA, 25 bp, Homo sapien
tgctgttggctgtcaaagatgctgc

SEQ ID NO: 4992473 - DNA, 25 bp, Homo sapien
cagatggaatgcttaagtcagtgcc

SEQ ID NO: 4992474 - DNA, 25 bp, Homo sapien
ccaagttagaatagcctcaaggcca

SEQ ID NO: 4992475 - DNA, 25 bp, Homo sapien
aacaaggcaaatacccacataagtg

SEQ ID NO: 4992476 - DNA, 25 bp, Homo sapien
taagtgaataacaccatagagtcgg

SEQ ID NO: 4992477 - DNA, 25 bp, Homo sapien
tgtagaaagtcttacagaatcatgt

SEQ ID NO: 4992478 - DNA, 25 bp, Homo sapien
cactttcatgcctttcgtttgtcca

SEQ ID NO: 4992479 - DNA, 25 bp, Homo sapien
tgtactacacacaaacggacttgca

SEQ ID NO: 4992480 - DNA, 25 bp, Homo sapien
tttcatgcacgaaaaaagcatcggc

SEQ ID NO: 4992481 - DNA, 25 bp, Homo sapien
cctgctcccgatgagtgcatttgcg

SEQ ID NO: 4992482 - DNA, 25 bp, Homo sapien
tacttgagaaggttaacctgctccc

SEQ ID NO: 4992483 - DNA, 25 bp, Homo sapien
ttgtatctcaatactctgacatgta

SEQ ID NO: 4992484 - DNA, 25 bp, Homo sapien
ctcaatactctgacatgtaataaaa

SEQ ID NO: 4992485 - DNA, 25 bp, Homo sapien
tgtatctcaatactctgacatgtaa

SEQ ID NO: 4992486 - DNA, 25 bp, Homo sapien
tatctcaatactctgacatgtaata

SEQ ID NO: 4992487 - DNA, 25 bp, Homo sapien
catgcgaggcattgagagacttctc

SEQ ID NO: 4992488 - DNA, 25 bp, Homo sapien
tgcttacaatgagtggatccctaac

SEQ ID NO: 4992489 - DNA, 25 bp, Homo sapien
gagtaatcaggacctaccctatgga

SEQ ID NO: 4992490 - DNA, 25 bp, Homo sapien
taaacatcatgctttgacccactgg

SEQ ID NO: 4992491 - DNA, 25 bp, Homo sapien
caggaaaagtcgatgcaagccctcc

SEQ ID NO: 4992492 - DNA, 25 bp, Homo sapien
cattgaagcattgaaggttacgcca

SEQ ID NO: 4992493 - DNA, 25 bp, Homo sapien
tgattccaagtgcagatggccagag

SEQ ID NO: 4992494 - DNA, 25 bp, Homo sapien
tgggaatcacaagcctgccaggaaa

SEQ ID NO: 4992495 - DNA, 25 bp, Homo sapien
ctggtgtctgttatgatgtcttatg

SEQ ID NO: 4992496 - DNA, 25 bp, Homo sapien
caaatctgttgtcaaattgaatggc

SEQ ID NO: 4992497 - DNA, 25 bp, Homo sapien
tgtttccagaaagtgcacattaaaa

SEQ ID NO: 4992498 - DNA, 25 bp, Homo sapien
tggcagtccacaaagtaaatgtcct

SEQ ID NO: 4992499 - DNA, 25 bp, Homo sapien
ctttatttactacaaacattgaatt

SEQ ID NO: 4992500 - DNA, 25 bp, Homo sapien
tgtacacagctgatgagaaatgttc

SEQ ID NO: 4992501 - DNA, 25 bp, Homo sapien
tcaggcctcatagagaacagcactg

SEQ ID NO: 4992502 - DNA, 25 bp, Homo sapien
aaatgcctgacatagtgtacacagc

SEQ ID NO: 4992503 - DNA, 25 bp, Homo sapien
gcactgacaacttccagaaacatat

SEQ ID NO: 4992504 - DNA, 25 bp, Homo sapien
cacacatcccgcttctgattgaggg

SEQ ID NO: 4992505 - DNA, 25 bp, Homo sapien
cgaggaaaagtcgacaggaaatcac

SEQ ID NO: 4992506 - DNA, 25 bp, Homo sapien
attgagggacccgtggtctgcacac

SEQ ID NO: 4992507 - DNA, 25 bp, Homo sapien
aagtcgacaggaaatcactaatcca

SEQ ID NO: 4992508 - DNA, 25 bp, Homo sapien
gcgtgggccactaatcctccaaggg

SEQ ID NO: 4992509 - DNA, 25 bp, Homo sapien
ccactaatcctccaagggaccgcag

SEQ ID NO: 4992510 - DNA, 25 bp, Homo sapien
ctgcgtgggccactaatcctccaag

SEQ ID NO: 4992511 - DNA, 25 bp, Homo sapien
actaatcctccaagggaccgcaggc

SEQ ID NO: 4992512 - DNA, 25 bp, Homo sapien
caaactatgtaaggagggaaaaatg

SEQ ID NO: 4992513 - DNA, 25 bp, Homo sapien
gtccatgtcagttacacaggagtca

SEQ ID NO: 4992514 - DNA, 25 bp, Homo sapien
atttagagctgcgattttattgccc

SEQ ID NO: 4992515 - DNA, 25 bp, Homo sapien
taaagatgagatggctcccacagtc

SEQ ID NO: 4992516 - DNA, 25 bp, Homo sapien
gaatttccgtggctctggacttcct

SEQ ID NO: 4992517 - DNA, 25 bp, Homo sapien
cgaatttccgtggctctggacttcc

SEQ ID NO: 4992518 - DNA, 25 bp, Homo sapien
aatttccgtggctctggacttcctc

SEQ ID NO: 4992519 - DNA, 25 bp, Homo sapien
gacagaagataaccgggccactgaa

SEQ ID NO: 4992520 - DNA, 25 bp, Homo sapien
ctacacgacagaagataaccgggcc

SEQ ID NO: 4992521 - DNA, 25 bp, Homo sapien
acgacagaagataaccgggccactg

SEQ ID NO: 4992522 - DNA, 25 bp, Homo sapien
acacgacagaagataaccgggccac

SEQ ID NO: 4992523 - DNA, 25 bp, Homo sapien
ttgtgggccgcgtgtagtaaaatct

SEQ ID NO: 4992524 - DNA, 25 bp, Homo sapien
gccgcgtgtagtaaaatctgtgacc

SEQ ID NO: 4992525 - DNA, 25 bp, Homo sapien
gtagtaaaatctgtgaccaccaggg

SEQ ID NO: 4992526 - DNA, 25 bp, Homo sapien
cgtgtagtaaaatctgtgaccacca

SEQ ID NO: 4992527 - DNA, 25 bp, Homo sapien
tgctgctgtagacctggtcgctggg

SEQ ID NO: 4992528 - DNA, 25 bp, Homo sapien
tcgctgggtgttcgcggcgggattt

SEQ ID NO: 4992529 - DNA, 25 bp, Homo sapien
gttcgcggcgggatttctccagcca

SEQ ID NO: 4992530 - DNA, 25 bp, Homo sapien
ctgtagacctggtcgctgggtgttc

SEQ ID NO: 4992531 - DNA, 25 bp, Homo sapien
gatggcagaccttgccctgaggatg

SEQ ID NO: 4992532 - DNA, 25 bp, Homo sapien
gagtcaaagccggactgggctgcct

SEQ ID NO: 4992533 - DNA, 25 bp, Homo sapien
ctttggtgctcaaggtggtccctga

SEQ ID NO: 4992534 - DNA, 25 bp, Homo sapien
tccgccctgggagctgagtcaaagc

SEQ ID NO: 4992535 - DNA, 25 bp, Homo sapien
tcacaggccacgcaaggcatctgaa

SEQ ID NO: 4992536 - DNA, 25 bp, Homo sapien
ggattcacaggccacgcaaggcatc

SEQ ID NO: 4992537 - DNA, 25 bp, Homo sapien
aggattcacaggccacgcaaggcat

SEQ ID NO: 4992538 - DNA, 25 bp, Homo sapien
caggccacgcaaggcatctgaacct

SEQ ID NO: 4992539 - DNA, 25 bp, Homo sapien
ccagggcaggggcatcaaagcctct

SEQ ID NO: 4992540 - DNA, 25 bp, Homo sapien
aagcccatcggccttgggaagattc

SEQ ID NO: 4992541 - DNA, 25 bp, Homo sapien
tcggccttgggaagattctaaaagc

SEQ ID NO: 4992542 - DNA, 25 bp, Homo sapien
ccaggcccggggatctttctgaaga

SEQ ID NO: 4992543 - DNA, 25 bp, Homo sapien
tgcactcgcagagcgttttctcctt

SEQ ID NO: 4992544 - DNA, 25 bp, Homo sapien
ccgctgcactcgcagagcgttttct

SEQ ID NO: 4992545 - DNA, 25 bp, Homo sapien
gctgcactcgcagagcgttttctcc

SEQ ID NO: 4992546 - DNA, 25 bp, Homo sapien
ctcgcagagcgttttctccttctaa

SEQ ID NO: 4992547 - DNA, 25 bp, Homo sapien
cacagacgaacgaaggcactgcaag

SEQ ID NO: 4992548 - DNA, 25 bp, Homo sapien
gcaggcaacgctcgtggtaaacaca

SEQ ID NO: 4992549 - DNA, 25 bp, Homo sapien
ctgttagcgcgtaagcctggaccag

SEQ ID NO: 4992550 - DNA, 25 bp, Homo sapien
tgttgtgaaacacacgcagctcccc

SEQ ID NO: 4992551 - DNA, 25 bp, Homo sapien
acacgcgcagggtgacagggctgag

SEQ ID NO: 4992552 - DNA, 25 bp, Homo sapien
tattatggggaatgacctgcgtcct

SEQ ID NO: 4992553 - DNA, 25 bp, Homo sapien
gggcttcccattcatcccggtgatt

SEQ ID NO: 4992554 - DNA, 25 bp, Homo sapien
tcctggtcaggagtgagtagggaga

SEQ ID NO: 4992555 - DNA, 25 bp, Homo sapien
tggctgctgccctcggagagctcag

SEQ ID NO: 4992556 - DNA, 25 bp, Homo sapien
tttacccgcaagccagagggctcct

SEQ ID NO: 4992557 - DNA, 25 bp, Homo sapien
ggaggcagcaatccccctggaagca

SEQ ID NO: 4992558 - DNA, 25 bp, Homo sapien
gagaaacccctgctctccgtgtctg

SEQ ID NO: 4992559 - DNA, 25 bp, Homo sapien
acacgacaggagcaaccagggtggc

SEQ ID NO: 4992560 - DNA, 25 bp, Homo sapien
gcttgttcggcattgatgagccagg

SEQ ID NO: 4992561 - DNA, 25 bp, Homo sapien
cgagtgtcaacaatcatgcagcagc

SEQ ID NO: 4992562 - DNA, 25 bp, Homo sapien
cagggatacagttgggatgcagcat

SEQ ID NO: 4992563 - DNA, 25 bp, Homo sapien
tgcgatagatcttagtcatgtactg

SEQ ID NO: 4992564 - DNA, 25 bp, Homo sapien
catcaacattggagaatgggctagc

SEQ ID NO: 4992565 - DNA, 25 bp, Homo sapien
tgtaggtttatagcttcgattcttg

SEQ ID NO: 4992566 - DNA, 25 bp, Homo sapien
gtttatagcttcgattcttgaagag

SEQ ID NO: 4992567 - DNA, 25 bp, Homo sapien
aaggcctttgtcactgtcactctgt

SEQ ID NO: 4992568 - DNA, 25 bp, Homo sapien
ctgggatattccctggattactgca

SEQ ID NO: 4992569 - DNA, 25 bp, Homo sapien
gcaaggcctttgtcactgtcactct

SEQ ID NO: 4992570 - DNA, 25 bp, Homo sapien
tattccctggattactgcagccttg

SEQ ID NO: 4992571 - DNA, 25 bp, Homo sapien
ttctgaaggtctaaagatcacagcc

SEQ ID NO: 4992572 - DNA, 25 bp, Homo sapien
aacaaagatactcccatcaggcaga

SEQ ID NO: 4992573 - DNA, 25 bp, Homo sapien
cagccactgatgtccagagttttgc

SEQ ID NO: 4992574 - DNA, 25 bp, Homo sapien
tggagacaaaacatacatcgtggcc

SEQ ID NO: 4992575 - DNA, 25 bp, Homo sapien
gtgatggagtaagaccttgttctcc

SEQ ID NO: 4992576 - DNA, 25 bp, Homo sapien
tttaaaaggagtcatgacggctggg

SEQ ID NO: 4992577 - DNA, 25 bp, Homo sapien
ttaaaaggagtcatgacggctgggc

SEQ ID NO: 4992578 - DNA, 25 bp, Homo sapien
tcattagcttgatcacatggctcga

SEQ ID NO: 4992579 - DNA, 25 bp, Homo sapien
tacacattgtgctgggaccatctgc

SEQ ID NO: 4992580 - DNA, 25 bp, Homo sapien
tcagatgctatcaagtggctacact

SEQ ID NO: 4992581 - DNA, 25 bp, Homo sapien
ggaacacagacattgagtcccttct

SEQ ID NO: 4992582 - DNA, 25 bp, Homo sapien
acagtcttacggagaagtcaaagaa

SEQ ID NO: 4992583 - DNA, 25 bp, Homo sapien
cggagaagtcaaagaaccgaggtct

SEQ ID NO: 4992584 - DNA, 25 bp, Homo sapien
tcttacggagaagtcaaagaaccga

SEQ ID NO: 4992585 - DNA, 25 bp, Homo sapien
cttacggagaagtcaaagaaccgag

SEQ ID NO: 4992586 - DNA, 25 bp, Homo sapien
gtgattaggcctttagttcctcaag

SEQ ID NO: 4992587 - DNA, 25 bp, Homo sapien
gcattttcacgagaggattactacc

SEQ ID NO: 4992588 - DNA, 25 bp, Homo sapien
gcatttgacatctatggcccctgca

SEQ ID NO: 4992589 - DNA, 25 bp, Homo sapien
gatttggaggctggctaagcataaa

SEQ ID NO: 4992590 - DNA, 25 bp, Homo sapien
tacataacctggcacaagagacctc

SEQ ID NO: 4992591 - DNA, 25 bp, Homo sapien
tactcctgactcctaggatgccagg

SEQ ID NO: 4992592 - DNA, 25 bp, Homo sapien
caaggtctcaatctatagcccaagc

SEQ ID NO: 4992593 - DNA, 25 bp, Homo sapien
catggtgacataacatacaaggccc

SEQ ID NO: 4992594 - DNA, 25 bp, Homo sapien
ctttggaccctttgcacaacttcgg

SEQ ID NO: 4992595 - DNA, 25 bp, Homo sapien
taaagaagcatgttggccggacgcg

SEQ ID NO: 4992596 - DNA, 25 bp, Homo sapien
ggttactcttgcacaactttggacc

SEQ ID NO: 4992597 - DNA, 25 bp, Homo sapien
acaacttcggtcatgtaagcagcag

SEQ ID NO: 4992598 - DNA, 25 bp, Homo sapien
caaaggcacaggtttggttgtgttc

SEQ ID NO: 4992599 - DNA, 25 bp, Homo sapien
aacgctcagcaaggtaaacaaaggc

SEQ ID NO: 4992600 - DNA, 25 bp, Homo sapien
tctgaaattctagcatctgccaacc

SEQ ID NO: 4992601 - DNA, 25 bp, Homo sapien
tctagatgtaaagtggaaagtggtt

SEQ ID NO: 4992602 - DNA, 25 bp, Homo sapien
taccaccctggttcagtcatataga

SEQ ID NO: 4992603 - DNA, 25 bp, Homo sapien
tcaaggtgtagatcacaggcatgcc

SEQ ID NO: 4992604 - DNA, 25 bp, Homo sapien
gggcacatgtcttggcacaggaaac

SEQ ID NO: 4992605 - DNA, 25 bp, Homo sapien
gaagagaagatacctgccactaact

SEQ ID NO: 4992606 - DNA, 25 bp, Homo sapien
ggtcacgttctgttatgggagagcc

SEQ ID NO: 4992607 - DNA, 25 bp, Homo sapien
tgggagagcctataaagcatgatac

SEQ ID NO: 4992608 - DNA, 25 bp, Homo sapien
gctagggacacactcttgcaagtga

SEQ ID NO: 4992609 - DNA, 25 bp, Homo sapien
taagaagggtatgaggacagacaga

SEQ ID NO: 4992610 - DNA, 25 bp, Homo sapien
tggccctctgtagctgatttttaaa

SEQ ID NO: 4992611 - DNA, 25 bp, Homo sapien
gatgtatcaaagtgcgcattcctcc

SEQ ID NO: 4992612 - DNA, 25 bp, Homo sapien
ctatataactttggccctccagcaa

SEQ ID NO: 4992613 - DNA, 25 bp, Homo sapien
ggtgtgtgttagtgccttctaaagc

SEQ ID NO: 4992614 - DNA, 25 bp, Homo sapien
tgtgtactggtggacattgggcttc

SEQ ID NO: 4992615 - DNA, 25 bp, Homo sapien
cccaaatagtgaacgtggttctcaa

SEQ ID NO: 4992616 - DNA, 25 bp, Homo sapien
ggcttctagcatacccgttaaccca

SEQ ID NO: 4992617 - DNA, 25 bp, Homo sapien
ggttctcaataggtaacttttcatc

SEQ ID NO: 4992618 - DNA, 25 bp, Homo sapien
tggttgataagtgaagttaagatgt

SEQ ID NO: 4992619 - DNA, 25 bp, Homo sapien
atgacatattcctggtttagaaaca

SEQ ID NO: 4992620 - DNA, 25 bp, Homo sapien
tcttgatgtttacttaacaggttta

SEQ ID NO: 4992621 - DNA, 25 bp, Homo sapien
taaattatccatcctgacctggttg

SEQ ID NO: 4992622 - DNA, 25 bp, Homo sapien
ctgagggctgaaaacaatactgcct

SEQ ID NO: 4992623 - DNA, 25 bp, Homo sapien
ttttgtttcaatgcatcagtaagga

SEQ ID NO: 4992624 - DNA, 25 bp, Homo sapien
aaggatggatgaccagatgcagtga

SEQ ID NO: 4992625 - DNA, 25 bp, Homo sapien
gcttagagctccaactgttcttcct

SEQ ID NO: 4992626 - DNA, 25 bp, Homo sapien
tagctaggactgcacgggtaagcca

SEQ ID NO: 4992627 - DNA, 25 bp, Homo sapien
tgccattgtgccttcagaacagtga

SEQ ID NO: 4992628 - DNA, 25 bp, Homo sapien
gcacttttacgagaccgagacaggt

SEQ ID NO: 4992629 - DNA, 25 bp, Homo sapien
gacaggttgattgcttaaagctcag

SEQ ID NO: 4992630 - DNA, 25 bp, Homo sapien
actgataaaatctgcatccttggcc

SEQ ID NO: 4992631 - DNA, 25 bp, Homo sapien
tcggttttaaactcagacagaacag

SEQ ID NO: 4992632 - DNA, 25 bp, Homo sapien
taacttcttataagagctgtctcgg

SEQ ID NO: 4992633 - DNA, 25 bp, Homo sapien
accagcagatggtgggcgtaaagat

SEQ ID NO: 4992634 - DNA, 25 bp, Homo sapien
gagcaatcttgagcaatagcggtgt

SEQ ID NO: 4992635 - DNA, 25 bp, Homo sapien
caaggtcgtattacagaggtgcagc

SEQ ID NO: 4992636 - DNA, 25 bp, Homo sapien
caggagcgactacatgtgcactaca

SEQ ID NO: 4992637 - DNA, 25 bp, Homo sapien
catgtgcgtctcgttgacttgagca

SEQ ID NO: 4992638 - DNA, 25 bp, Homo sapien
gccttcaatgtagtaagcagtcagt

SEQ ID NO: 4992639 - DNA, 25 bp, Homo sapien
tcgtcacgtgaccatcatagagtgt

SEQ ID NO: 4992640 - DNA, 25 bp, Homo sapien
gagttaagaatcactgccgtaagga

SEQ ID NO: 4992641 - DNA, 25 bp, Homo sapien
cgtaaggataacagaggtcagggtc

SEQ ID NO: 4992642 - DNA, 25 bp, Homo sapien
gaagctatcactacagattctccag

SEQ ID NO: 4992643 - DNA, 25 bp, Homo sapien
gaaaaagttaatttgagcctgggca

SEQ ID NO: 4992644 - DNA, 25 bp, Homo sapien
aacacaaattgctacacccagccag

SEQ ID NO: 4992645 - DNA, 25 bp, Homo sapien
cagtaaaattggcagacctctagca

SEQ ID NO: 4992646 - DNA, 25 bp, Homo sapien
cttctattaagagctgtctccattt

SEQ ID NO: 4992647 - DNA, 25 bp, Homo sapien
cacggccaaggtcatcctggtcttc

SEQ ID NO: 4992648 - DNA, 25 bp, Homo sapien
ttctattaagagctgtctccatttc

SEQ ID NO: 4992649 - DNA, 25 bp, Homo sapien
cagatattaggtttgagctttgcca

SEQ ID NO: 4992650 - DNA, 25 bp, Homo sapien
aagagtttcccacttgtacgatgta

SEQ ID NO: 4992651 - DNA, 25 bp, Homo sapien
tagatcgccatctaccaagagtttc

SEQ ID NO: 4992652 - DNA, 25 bp, Homo sapien
gggttcctctgcctatagggccaca

SEQ ID NO: 4992653 - DNA, 25 bp, Homo sapien
tttgacctctcataagccttactag

SEQ ID NO: 4992654 - DNA, 25 bp, Homo sapien
gacctctcataagccttactagtat

SEQ ID NO: 4992655 - DNA, 25 bp, Homo sapien
tatttgacctctcataagccttact

SEQ ID NO: 4992656 - DNA, 25 bp, Homo sapien
tgacctctcataagccttactagta

SEQ ID NO: 4992657 - DNA, 25 bp, Homo sapien
tgagtatccacatttagatggcaca

SEQ ID NO: 4992658 - DNA, 25 bp, Homo sapien
taacctgcttgggtgtaatttgcca

SEQ ID NO: 4992659 - DNA, 25 bp, Homo sapien
cattgttaggaattgcttggacact

SEQ ID NO: 4992660 - DNA, 25 bp, Homo sapien
tcaaccttgatgtacagtgactgtg

SEQ ID NO: 4992661 - DNA, 25 bp, Homo sapien
tgacagtactcttgtgggaaatcac

SEQ ID NO: 4992662 - DNA, 25 bp, Homo sapien
aaagggtcagaatggttaacactca

SEQ ID NO: 4992663 - DNA, 25 bp, Homo sapien
gggaaatcaccaaatgctgtcatag

SEQ ID NO: 4992664 - DNA, 25 bp, Homo sapien
gattcagcagtactctctcaaaggt

SEQ ID NO: 4992665 - DNA, 25 bp, Homo sapien
ttaaggcaactaggacaggtactgc

SEQ ID NO: 4992666 - DNA, 25 bp, Homo sapien
gacatgcattttaataccctaagga

SEQ ID NO: 4992667 - DNA, 25 bp, Homo sapien
tacaaatcacatctaccgttaagga

SEQ ID NO: 4992668 - DNA, 25 bp, Homo sapien
ccaccctaatgtgcctcagtctggg

SEQ ID NO: 4992669 - DNA, 25 bp, Homo sapien
gcgaagtgaatatctaggagtatta

SEQ ID NO: 4992670 - DNA, 25 bp, Homo sapien
tggcatgtgtagaactcaacttggc

SEQ ID NO: 4992671 - DNA, 25 bp, Homo sapien
ggcagaagcgaagtgaatatctagg

SEQ ID NO: 4992672 - DNA, 25 bp, Homo sapien
ggcatgtgtagaactcaacttggca

SEQ ID NO: 4992673 - DNA, 25 bp, Homo sapien
gctgctgccgcacagaattcacatt

SEQ ID NO: 4992674 - DNA, 25 bp, Homo sapien
gaacgtggtaaatgaccagccagcc

SEQ ID NO: 4992675 - DNA, 25 bp, Homo sapien
ccttttcctcatgcaggtggtgatt

SEQ ID NO: 4992676 - DNA, 25 bp, Homo sapien
ccaggtgtgagttatccatgcttca

SEQ ID NO: 4992677 - DNA, 25 bp, Homo sapien
gatttcacgaggctggcatgcgcat

SEQ ID NO: 4992678 - DNA, 25 bp, Homo sapien
cgcctggtccgagggccatatgtca

SEQ ID NO: 4992679 - DNA, 25 bp, Homo sapien
tgcgcatctccactgtgtcgcctgg

SEQ ID NO: 4992680 - DNA, 25 bp, Homo sapien
catgtgaacactttgccccttgaac

SEQ ID NO: 4992681 - DNA, 25 bp, Homo sapien
caccccatcacgtgcaactaatttt

SEQ ID NO: 4992682 - DNA, 25 bp, Homo sapien
tgagctactgcgcatagtcctttat

SEQ ID NO: 4992683 - DNA, 25 bp, Homo sapien
ccatcacgtgcaactaattttcgta

SEQ ID NO: 4992684 - DNA, 25 bp, Homo sapien
tagtcctttattagtcttgaatgct

SEQ ID NO: 4992685 - DNA, 25 bp, Homo sapien
aacctctatctcccgtgtgaggagg

SEQ ID NO: 4992686 - DNA, 25 bp, Homo sapien
tgtctgaagccaatagcccctgaac

SEQ ID NO: 4992687 - DNA, 25 bp, Homo sapien
ttggcgctgggcatcccttgtctga

SEQ ID NO: 4992688 - DNA, 25 bp, Homo sapien
tgaatctctggctgcgtggtgtttg

SEQ ID NO: 4992689 - DNA, 25 bp, Homo sapien
taaacgttactgctatgggtccctg

SEQ ID NO: 4992690 - DNA, 25 bp, Homo sapien
gagtgttcaaatacgggctctacca

SEQ ID NO: 4992691 - DNA, 25 bp, Homo sapien
gacacagccgcaaagggtaccttct

SEQ ID NO: 4992692 - DNA, 25 bp, Homo sapien
tggattctccgcaaagccaacgctg

SEQ ID NO: 4992693 - DNA, 25 bp, Homo sapien
tcaggagcacatcgctgtaaacagt

SEQ ID NO: 4992694 - DNA, 25 bp, Homo sapien
gaaacgtccctgctagaactagaga

SEQ ID NO: 4992695 - DNA, 25 bp, Homo sapien
cacacagatggtggaattcccgtga

SEQ ID NO: 4992696 - DNA, 25 bp, Homo sapien
ccagttttggaaacgcaaggcagta

SEQ ID NO: 4992697 - DNA, 25 bp, Homo sapien
ggacattcagatgacttatcacagg

SEQ ID NO: 4992698 - DNA, 25 bp, Homo sapien
tccaaggccttgagatacgattcaa

SEQ ID NO: 4992699 - DNA, 25 bp, Homo sapien
aacaatggaagcaaactgggaaagc

SEQ ID NO: 4992700 - DNA, 25 bp, Homo sapien
cagtctcgcgtctttacacacatgg

SEQ ID NO: 4992701 - DNA, 25 bp, Homo sapien
gacaatgtcctgcattcaccgcggc

SEQ ID NO: 4992702 - DNA, 25 bp, Homo sapien
ctacggtgttcccaccactgaaagg

SEQ ID NO: 4992703 - DNA, 25 bp, Homo sapien
tttaaatcagcacctttatgccagt

SEQ ID NO: 4992704 - DNA, 25 bp, Homo sapien
tatgccagtctcagaatctcaaaac

SEQ ID NO: 4992705 - DNA, 25 bp, Homo sapien
ggccatctgcggctaatccagtcag

SEQ ID NO: 4992706 - DNA, 25 bp, Homo sapien
ggctaatccagtcagagcgcgcggc

SEQ ID NO: 4992707 - DNA, 25 bp, Homo sapien
agtcggccatctgcggctaatccag

SEQ ID NO: 4992708 - DNA, 25 bp, Homo sapien
tgcggctaatccagtcagagcgcgc

SEQ ID NO: 4992709 - DNA, 25 bp, Homo sapien
gggcagggtcgcgaactgagggcag

SEQ ID NO: 4992710 - DNA, 25 bp, Homo sapien
gtccctttaagatgatcctcctccc

SEQ ID NO: 4992711 - DNA, 25 bp, Homo sapien
cgaacgcggcgctgtccctttaaga

SEQ ID NO: 4992712 - DNA, 25 bp, Homo sapien
gtcgcgaactgagggcaggacgcgc

SEQ ID NO: 4992713 - DNA, 25 bp, Homo sapien
gcgacatccgggctaccggactggc

SEQ ID NO: 4992714 - DNA, 25 bp, Homo sapien
acatccgggctaccggactggcgac

SEQ ID NO: 4992715 - DNA, 25 bp, Homo sapien
agtccccgcgggatgcccggctcac

SEQ ID NO: 4992716 - DNA, 25 bp, Homo sapien
ggcagctaccagtccccgcgggatg

SEQ ID NO: 4992717 - DNA, 25 bp, Homo sapien
gccgggacgccggggccagcacgcg

SEQ ID NO: 4992718 - DNA, 25 bp, Homo sapien
gcctcgcagactccggggccgggac

SEQ ID NO: 4992719 - DNA, 25 bp, Homo sapien
ctcgcagactccggggccgggacgc

SEQ ID NO: 4992720 - DNA, 25 bp, Homo sapien
cgcagactccggggccgggacgccg

SEQ ID NO: 4992721 - DNA, 25 bp, Homo sapien
tggccccgactcctaagctgtgcgg

SEQ ID NO: 4992722 - DNA, 25 bp, Homo sapien
gcaggtggtgcagcccgaggtgtgc

SEQ ID NO: 4992723 - DNA, 25 bp, Homo sapien
cgcgcgtgagaaccggcgcgggcga

SEQ ID NO: 4992724 - DNA, 25 bp, Homo sapien
gggaagggcgctggccgcgcgtgag

SEQ ID NO: 4992725 - DNA, 25 bp, Homo sapien
gggcgcgtcatcctgctttcggaac

SEQ ID NO: 4992726 - DNA, 25 bp, Homo sapien
catgttttgagattccgcgtgtgtg

SEQ ID NO: 4992727 - DNA, 25 bp, Homo sapien
tccgggcgcgtcatcctgctttcgg

SEQ ID NO: 4992728 - DNA, 25 bp, Homo sapien
ccgggcgtgctctggaccgtctcgt

SEQ ID NO: 4992729 - DNA, 25 bp, Homo sapien
ctgctgcagctctcatacctcggtg

SEQ ID NO: 4992730 - DNA, 25 bp, Homo sapien
ccccgggatccgttttgcgtctgca

SEQ ID NO: 4992731 - DNA, 25 bp, Homo sapien
aggccgcctggttgtcgctgctgca

SEQ ID NO: 4992732 - DNA, 25 bp, Homo sapien
tgcagctctcatacctcggtgcggg

SEQ ID NO: 4992733 - DNA, 25 bp, Homo sapien
aatctccacggcaggacagagtgct

SEQ ID NO: 4992734 - DNA, 25 bp, Homo sapien
aaggccacaaacaatctccacggca

SEQ ID NO: 4992735 - DNA, 25 bp, Homo sapien
cagctctggtttagagccagccctt

SEQ ID NO: 4992736 - DNA, 25 bp, Homo sapien
tgcaccccatagagtcagctctggt

SEQ ID NO: 4992737 - DNA, 25 bp, Homo sapien
aaatctcaacgctcttctcgcccat

SEQ ID NO: 4992738 - DNA, 25 bp, Homo sapien
aacatctctgcgcttctcccttccc

SEQ ID NO: 4992739 - DNA, 25 bp, Homo sapien
cagccgctagcccaaatctcaacgc

SEQ ID NO: 4992740 - DNA, 25 bp, Homo sapien
tcttctcgcccattcccaaacatct

SEQ ID NO: 4992741 - DNA, 25 bp, Homo sapien
gttgtaaaccgacttctctgaatct

SEQ ID NO: 4992742 - DNA, 25 bp, Homo sapien
cttggctgagggtgcaccgctcctg

SEQ ID NO: 4992743 - DNA, 25 bp, Homo sapien
tattcgccaaacctattccgttgta

SEQ ID NO: 4992744 - DNA, 25 bp, Homo sapien
tttcttcgcagttccttccacggtg

SEQ ID NO: 4992745 - DNA, 25 bp, Homo sapien
tctttcttcctgcagacttgcaaga

SEQ ID NO: 4992746 - DNA, 25 bp, Homo sapien
ttcctgcagacttgcaagagctccc

SEQ ID NO: 4992747 - DNA, 25 bp, Homo sapien
tcttcctgcagacttgcaagagctc

SEQ ID NO: 4992748 - DNA, 25 bp, Homo sapien
ctccttgggctctgtaagttgcttt

SEQ ID NO: 4992749 - DNA, 25 bp, Homo sapien
ctttgatgctctgttcctttctctg

SEQ ID NO: 4992750 - DNA, 25 bp, Homo sapien
tctttgatgctctgttcctttctct

SEQ ID NO: 4992751 - DNA, 25 bp, Homo sapien
ctactttgaaaggagtctttgatgc

SEQ ID NO: 4992752 - DNA, 25 bp, Homo sapien
ctttgaaaggagtctttgatgctct

SEQ ID NO: 4992753 - DNA, 25 bp, Homo sapien
agttccatcccatatactgccactt

SEQ ID NO: 4992754 - DNA, 25 bp, Homo sapien
ttccatcccatatactgccacttga

SEQ ID NO: 4992755 - DNA, 25 bp, Homo sapien
tcagttccatcccatatactgccac

SEQ ID NO: 4992756 - DNA, 25 bp, Homo sapien
ttcctcagttccatcccatatactg

SEQ ID NO: 4992757 - DNA, 25 bp, Homo sapien
tttcagtgtggagcagttagccaga

SEQ ID NO: 4992758 - DNA, 25 bp, Homo sapien
ggtacccatgactgctgtatttcag

SEQ ID NO: 4992759 - DNA, 25 bp, Homo sapien
ttgagcatgtgggtacccatgactg

SEQ ID NO: 4992760 - DNA, 25 bp, Homo sapien
ggtgttggctgaactaacttcttac

SEQ ID NO: 4992761 - DNA, 25 bp, Homo sapien
cggcgccccaacttttgcctgcgtc

SEQ ID NO: 4992762 - DNA, 25 bp, Homo sapien
cgcggtgcggccgagggtcacttcc

SEQ ID NO: 4992763 - DNA, 25 bp, Homo sapien
cacttcctcgcatgtaaatggcttt

SEQ ID NO: 4992764 - DNA, 25 bp, Homo sapien
acttttgcctgcgtccgccgggccg

SEQ ID NO: 4992765 - DNA, 25 bp, Homo sapien
gcaccggcgcgaacaaagtgcgttc

SEQ ID NO: 4992766 - DNA, 25 bp, Homo sapien
ccgcaccggcgcgaacaaagtgcgt

SEQ ID NO: 4992767 - DNA, 25 bp, Homo sapien
ggccgcaccggcgcgaacaaagtgc

SEQ ID NO: 4992768 - DNA, 25 bp, Homo sapien
cgcaccggcgcgaacaaagtgcgtt

SEQ ID NO: 4992769 - DNA, 25 bp, Homo sapien
ccaccgagcgaggtgggtcggcggc

SEQ ID NO: 4992770 - DNA, 25 bp, Homo sapien
gcgcggagttgcgagcccggagttg

SEQ ID NO: 4992771 - DNA, 25 bp, Homo sapien
gaggcgtcccgagctcagccagtgc

SEQ ID NO: 4992772 - DNA, 25 bp, Homo sapien
gccagtgccggtcgcgggcgcggag

SEQ ID NO: 4992773 - DNA, 25 bp, Homo sapien
tgctcattccaggttgagcgtagaa

SEQ ID NO: 4992774 - DNA, 25 bp, Homo sapien
tagaatcctgtggtaaccagacctt

SEQ ID NO: 4992775 - DNA, 25 bp, Homo sapien
cactttgtaggagtttgctcattcc

SEQ ID NO: 4992776 - DNA, 25 bp, Homo sapien
catagcactttgcttgttacttgcc

SEQ ID NO: 4992777 - DNA, 25 bp, Homo sapien
gtcactgtcaacttgcacggttggg

SEQ ID NO: 4992778 - DNA, 25 bp, Homo sapien
cttggcggtcagagcgcagtcccag

SEQ ID NO: 4992779 - DNA, 25 bp, Homo sapien
cagtcccaggcctgctaggtcatta

SEQ ID NO: 4992780 - DNA, 25 bp, Homo sapien
tgtggaacaagtccctgtctgtctg

SEQ ID NO: 4992781 - DNA, 25 bp, Homo sapien
tgcagagagagggtcccccctccag

SEQ ID NO: 4992782 - DNA, 25 bp, Homo sapien
tcctctggcagggcttgtggggtgc

SEQ ID NO: 4992783 - DNA, 25 bp, Homo sapien
ctctgctcctctggcagggcttgtg

SEQ ID NO: 4992784 - DNA, 25 bp, Homo sapien
cagagagagggtcccccctccagct

SEQ ID NO: 4992785 - DNA, 25 bp, Homo sapien
gaagaatatagggtaggtggaccaa

SEQ ID NO: 4992786 - DNA, 25 bp, Homo sapien
ctttctgtatcgaggataatttgag

SEQ ID NO: 4992787 - DNA, 25 bp, Homo sapien
tagggtaggtggaccaattataatg

SEQ ID NO: 4992788 - DNA, 25 bp, Homo sapien
aggatttttgcgtcagttagggtga

SEQ ID NO: 4992789 - DNA, 25 bp, Homo sapien
catgtgtgtttttggccttcttcgt

SEQ ID NO: 4992790 - DNA, 25 bp, Homo sapien
cgtttccttaaagcctgtcctctgc

SEQ ID NO: 4992791 - DNA, 25 bp, Homo sapien
cattccatgtgtgtttttggccttc

SEQ ID NO: 4992792 - DNA, 25 bp, Homo sapien
tcgtttccttaaagcctgtcctctg

SEQ ID NO: 4992793 - DNA, 25 bp, Homo sapien
gactgaatatcatctccgtgagcct

SEQ ID NO: 4992794 - DNA, 25 bp, Homo sapien
cagcttctgtgatcgccttctgtga

SEQ ID NO: 4992795 - DNA, 25 bp, Homo sapien
ccagcttctgtgatcgccttctgtg

SEQ ID NO: 4992796 - DNA, 25 bp, Homo sapien
agcttctgtgatcgccttctgtgac

SEQ ID NO: 4992797 - DNA, 25 bp, Homo sapien
gctgtgaagtgaggtcccggaccag

SEQ ID NO: 4992798 - DNA, 25 bp, Homo sapien
tcagttctgggattccgttggcggc

SEQ ID NO: 4992799 - DNA, 25 bp, Homo sapien
ggattccgttggcggctgctgcttt

SEQ ID NO: 4992800 - DNA, 25 bp, Homo sapien
gtcattccatgtcaagggctgtgaa

SEQ ID NO: 4992801 - DNA, 25 bp, Homo sapien
tgagaagtgatggtttacaacagtt

SEQ ID NO: 4992802 - DNA, 25 bp, Homo sapien
ggggatttcctccaatgagaacaag

SEQ ID NO: 4992803 - DNA, 25 bp, Homo sapien
tcacttcctttaggtggggagcagg

SEQ ID NO: 4992804 - DNA, 25 bp, Homo sapien
tggtttacaacagttggcatcagaa

SEQ ID NO: 4992805 - DNA, 25 bp, Homo sapien
ggcacttttgtagcttctgcccatg

SEQ ID NO: 4992806 - DNA, 25 bp, Homo sapien
ggtactgctagcaagggctttgaaa

SEQ ID NO: 4992807 - DNA, 25 bp, Homo sapien
cataagaatagtagcgtgcttggca

SEQ ID NO: 4992808 - DNA, 25 bp, Homo sapien
gcaaggctccagtcgccagaaagag

SEQ ID NO: 4992809 - DNA, 25 bp, Homo sapien
cccatgaagcaaatacggaaaatac

SEQ ID NO: 4992810 - DNA, 25 bp, Homo sapien
tgacccatgaagcaaatacggaaaa

SEQ ID NO: 4992811 - DNA, 25 bp, Homo sapien
tttgacccatgaagcaaatacggaa

SEQ ID NO: 4992812 - DNA, 25 bp, Homo sapien
tcatttgacccatgaagcaaatacg

SEQ ID NO: 4992813 - DNA, 25 bp, Homo sapien
gaactgataagctggtgttggtgac

SEQ ID NO: 4992814 - DNA, 25 bp, Homo sapien
tccaggttcttgtcagttggataga

SEQ ID NO: 4992815 - DNA, 25 bp, Homo sapien
catcagcaagcattggtcctgctag

SEQ ID NO: 4992816 - DNA, 25 bp, Homo sapien
gatagatgtctccttcatcagcaag

SEQ ID NO: 4992817 - DNA, 25 bp, Homo sapien
gttgtgggtggggcagtgggaggag

SEQ ID NO: 4992818 - DNA, 25 bp, Homo sapien
tgtgggtggggcagtgggaggagat

SEQ ID NO: 4992819 - DNA, 25 bp, Homo sapien
tgggtggggcagtgggaggagattc

SEQ ID NO: 4992820 - DNA, 25 bp, Homo sapien
ctgggttgtgggtggggcagtggga

SEQ ID NO: 4992821 - DNA, 25 bp, Homo sapien
cgtttttcaagcgtctgggagatgg

SEQ ID NO: 4992822 - DNA, 25 bp, Homo sapien
tggttgtagttgtgccgagcgacat

SEQ ID NO: 4992823 - DNA, 25 bp, Homo sapien
tgtgccgagcgacatgcttagttga

SEQ ID NO: 4992824 - DNA, 25 bp, Homo sapien
ttgataccatataatgctggcgttt

SEQ ID NO: 4992825 - DNA, 25 bp, Homo sapien
cctggagccccatcgagtcagtagc

SEQ ID NO: 4992826 - DNA, 25 bp, Homo sapien
ggcctggagccccatcgagtcagta

SEQ ID NO: 4992827 - DNA, 25 bp, Homo sapien
ctggagccccatcgagtcagtagca

SEQ ID NO: 4992828 - DNA, 25 bp, Homo sapien
gcctggagccccatcgagtcagtag

SEQ ID NO: 4992829 - DNA, 25 bp, Homo sapien
tataggctttgagggcaaacacctc

SEQ ID NO: 4992830 - DNA, 25 bp, Homo sapien
aacacctcagtgaagtgaagcacag

SEQ ID NO: 4992831 - DNA, 25 bp, Homo sapien
ttttggcgaggatgggaatattttc

SEQ ID NO: 4992832 - DNA, 25 bp, Homo sapien
gaagattagttaaggattataggct

SEQ ID NO: 4992833 - DNA, 25 bp, Homo sapien
gaatcggacagaggaatatgggccc

SEQ ID NO: 4992834 - DNA, 25 bp, Homo sapien
atatgggccccagaaacatgcagca

SEQ ID NO: 4992835 - DNA, 25 bp, Homo sapien
gaaagcaatgagtaatccagcaggc

SEQ ID NO: 4992836 - DNA, 25 bp, Homo sapien
ttagttctcggagccagacagtccc

SEQ ID NO: 4992837 - DNA, 25 bp, Homo sapien
ccatggcactggagggcactaggag

SEQ ID NO: 4992838 - DNA, 25 bp, Homo sapien
gagggcactaggaggtgttttcagc

SEQ ID NO: 4992839 - DNA, 25 bp, Homo sapien
tttatcagtacactgtgaacatgga

SEQ ID NO: 4992840 - DNA, 25 bp, Homo sapien
cccaggagtacgaagagggtggaga

SEQ ID NO: 4992841 - DNA, 25 bp, Homo sapien
ttcctttccaattgccatgagaggg

SEQ ID NO: 4992842 - DNA, 25 bp, Homo sapien
accagtccttcaccagactcttggg

SEQ ID NO: 4992843 - DNA, 25 bp, Homo sapien
ggtcaggatctgatatgagtactgt

SEQ ID NO: 4992844 - DNA, 25 bp, Homo sapien
tgggcttccccttggtaagagatgc

SEQ ID NO: 4992845 - DNA, 25 bp, Homo sapien
tgtgcacgtgtaaacacacacctgt

SEQ ID NO: 4992846 - DNA, 25 bp, Homo sapien
tgaactttttgagattgctgccctg

SEQ ID NO: 4992847 - DNA, 25 bp, Homo sapien
gaaaggacaaacttggacttgcaac

SEQ ID NO: 4992848 - DNA, 25 bp, Homo sapien
cagatggaactatggtcagccttgg

SEQ ID NO: 4992849 - DNA, 25 bp, Homo sapien
tagggccactctgatttacaatgaa

SEQ ID NO: 4992850 - DNA, 25 bp, Homo sapien
gcccaaagacttaggatgccacact

SEQ ID NO: 4992851 - DNA, 25 bp, Homo sapien
caatgaagggtggtaaggacattcc

SEQ ID NO: 4992852 - DNA, 25 bp, Homo sapien
ggtcacttgaccacttatagggcca

SEQ ID NO: 4992853 - DNA, 25 bp, Homo sapien
tggccgttgtcaggggctgattttc

SEQ ID NO: 4992854 - DNA, 25 bp, Homo sapien
cttgttctgtaaaatggcagaagct

SEQ ID NO: 4992855 - DNA, 25 bp, Homo sapien
tcactgtctggcaccccatcttgtt

SEQ ID NO: 4992856 - DNA, 25 bp, Homo sapien
catggtaaaggacatgtgaaggctg

SEQ ID NO: 4992857 - DNA, 25 bp, Homo sapien
tgacaactaaaatatgatcatacat

SEQ ID NO: 4992858 - DNA, 25 bp, Homo sapien
gagaactggcctttttgacaactaa

SEQ ID NO: 4992859 - DNA, 25 bp, Homo sapien
ggcctttttgacaactaaaatatga

SEQ ID NO: 4992860 - DNA, 25 bp, Homo sapien
tcccagagaactggcctttttgaca

SEQ ID NO: 4992861 - DNA, 25 bp, Homo sapien
gtgtggcagctcagatcattttaga

SEQ ID NO: 4992862 - DNA, 25 bp, Homo sapien
taagttgagaggctagacactctcc

SEQ ID NO: 4992863 - DNA, 25 bp, Homo sapien
tgacctctgggtttattatctgcca

SEQ ID NO: 4992864 - DNA, 25 bp, Homo sapien
caaatagtagacagggcttaaagga

SEQ ID NO: 4992865 - DNA, 25 bp, Homo sapien
gaagaagactgaggccattttgtaa

SEQ ID NO: 4992866 - DNA, 25 bp, Homo sapien
ctgaattgaaaaacacggtgagttg

SEQ ID NO: 4992867 - DNA, 25 bp, Homo sapien
cagatattgtgatgagctaggatgt

SEQ ID NO: 4992868 - DNA, 25 bp, Homo sapien
tctgttgtaagcagtacacctggcc

SEQ ID NO: 4992869 - DNA, 25 bp, Homo sapien
cagtcagcctgttagtgaccccaga

SEQ ID NO: 4992870 - DNA, 25 bp, Homo sapien
gcctccttccagtcagcctgttagt

SEQ ID NO: 4992871 - DNA, 25 bp, Homo sapien
tccttccagtcagcctgttagtgac

SEQ ID NO: 4992872 - DNA, 25 bp, Homo sapien
tccagtcagcctgttagtgacccca

SEQ ID NO: 4992873 - DNA, 25 bp, Homo sapien
tacttgcagtcctagcacccagaaa

SEQ ID NO: 4992874 - DNA, 25 bp, Homo sapien
tctgcctgcctcgtataatatgtgt

SEQ ID NO: 4992875 - DNA, 25 bp, Homo sapien
tcccttatctggaatggttgagatc

SEQ ID NO: 4992876 - DNA, 25 bp, Homo sapien
tccttcaagttcatgttggtgctca

SEQ ID NO: 4992877 - DNA, 25 bp, Homo sapien
tcggccaagccagcattagtgggag

SEQ ID NO: 4992878 - DNA, 25 bp, Homo sapien
gatttccaaggcctcatcccaggtt

SEQ ID NO: 4992879 - DNA, 25 bp, Homo sapien
ggccagtaaataggcgccagatgtt

SEQ ID NO: 4992880 - DNA, 25 bp, Homo sapien
tttgctgagctctccatggtcggcc

SEQ ID NO: 4992881 - DNA, 25 bp, Homo sapien
gttgcccagcttcgagagtctcagg

SEQ ID NO: 4992882 - DNA, 25 bp, Homo sapien
taaaagccagcccatatagcagtac

SEQ ID NO: 4992883 - DNA, 25 bp, Homo sapien
aatctcatggagatggttgcccagc

SEQ ID NO: 4992884 - DNA, 25 bp, Homo sapien
gagctgccaagaggcgaaatctcat

SEQ ID NO: 4992885 - DNA, 25 bp, Homo sapien
gcatcgtttccaggcagtcttagta

SEQ ID NO: 4992886 - DNA, 25 bp, Homo sapien
cagaggctctctcttcgtgtgagaa

SEQ ID NO: 4992887 - DNA, 25 bp, Homo sapien
ggaaggaatcttgcaggccggtcca

SEQ ID NO: 4992888 - DNA, 25 bp, Homo sapien
gaagaagatatagagaccccaccaa

SEQ ID NO: 4992889 - DNA, 25 bp, Homo sapien
tttgctggaatggacctgacgagcc

SEQ ID NO: 4992890 - DNA, 25 bp, Homo sapien
tactgcttctagtcaaggagaaccg

SEQ ID NO: 4992891 - DNA, 25 bp, Homo sapien
cgatgcgaagaaccctgctgctgtg

SEQ ID NO: 4992892 - DNA, 25 bp, Homo sapien
gcttgggcgggctgttgaataaccc

SEQ ID NO: 4992893 - DNA, 25 bp, Homo sapien
tcccgaggcgcagcaataataaggc

SEQ ID NO: 4992894 - DNA, 25 bp, Homo sapien
tcttgccagacagaactacagttcc

SEQ ID NO: 4992895 - DNA, 25 bp, Homo sapien
taacctactgggagggttcttgcca

SEQ ID NO: 4992896 - DNA, 25 bp, Homo sapien
tctccacgctagtgtgaacgcctct

SEQ ID NO: 4992897 - DNA, 25 bp, Homo sapien
ctgaaagtgaatgggccgtgcacac

SEQ ID NO: 4992898 - DNA, 25 bp, Homo sapien
tatttatcatcgtcgttgtctgctg

SEQ ID NO: 4992899 - DNA, 25 bp, Homo sapien
catcgtcgttgtctgctgaaagtga

SEQ ID NO: 4992900 - DNA, 25 bp, Homo sapien
cgttgtctgctgaaagtgaatgggc

SEQ ID NO: 4992901 - DNA, 25 bp, Homo sapien
tgcttgatggactaaatgcagccat

SEQ ID NO: 4992902 - DNA, 25 bp, Homo sapien
taaaaacggaggcagcaatgccctg

SEQ ID NO: 4992903 - DNA, 25 bp, Homo sapien
cagcatgatcatgatattccccttc

SEQ ID NO: 4992904 - DNA, 25 bp, Homo sapien
tagaggtgccaccaacggtgaccta

SEQ ID NO: 4992905 - DNA, 25 bp, Homo sapien
tttcggcctttccacattaagtctc

SEQ ID NO: 4992906 - DNA, 25 bp, Homo sapien
gctttcggcctttccacattaagtc

SEQ ID NO: 4992907 - DNA, 25 bp, Homo sapien
cggcctttccacattaagtctctgc

SEQ ID NO: 4992908 - DNA, 25 bp, Homo sapien
ttgctttcggcctttccacattaag

SEQ ID NO: 4992909 - DNA, 25 bp, Homo sapien
aaagggtttctgcataaggtgccca

SEQ ID NO: 4992910 - DNA, 25 bp, Homo sapien
aagggtttctgcataaggtgcccac

SEQ ID NO: 4992911 - DNA, 25 bp, Homo sapien
gcggtggatggaaagggcggactgc

SEQ ID NO: 4992912 - DNA, 25 bp, Homo sapien
ctgttcagtcgtgaagcccagggcc

SEQ ID NO: 4992913 - DNA, 25 bp, Homo sapien
gtgctgctggttttaacagctccca

SEQ ID NO: 4992914 - DNA, 25 bp, Homo sapien
acagagtgacgcctctgggtcccgc

SEQ ID NO: 4992915 - DNA, 25 bp, Homo sapien
cattctttgcaaggagtagggccac

SEQ ID NO: 4992916 - DNA, 25 bp, Homo sapien
caataatgacgacgaggcggatggc

SEQ ID NO: 4992917 - DNA, 25 bp, Homo sapien
tgtgccacgggcgagctacttcatt

SEQ ID NO: 4992918 - DNA, 25 bp, Homo sapien
tagagcccatttcagaagcctgcag

SEQ ID NO: 4992919 - DNA, 25 bp, Homo sapien
tcaggcatgatttataggttgccat

SEQ ID NO: 4992920 - DNA, 25 bp, Homo sapien
caataagtcttacaataccaacctc

SEQ ID NO: 4992921 - DNA, 25 bp, Homo sapien
catgtctgcataccaagatatatat

SEQ ID NO: 4992922 - DNA, 25 bp, Homo sapien
acgatcgtaatcatgtacctttggg

SEQ ID NO: 4992923 - DNA, 25 bp, Homo sapien
aggtgcatgctacctgtagcttggc

SEQ ID NO: 4992924 - DNA, 25 bp, Homo sapien
caggtgcatgctacctgtagcttgg

SEQ ID NO: 4992925 - DNA, 25 bp, Homo sapien
ttcatagcactgttggcagggaccc

SEQ ID NO: 4992926 - DNA, 25 bp, Homo sapien
caagccataagacctgacagagtca

SEQ ID NO: 4992927 - DNA, 25 bp, Homo sapien
ggcatgataacaaaacccagattct

SEQ ID NO: 4992928 - DNA, 25 bp, Homo sapien
catgatgaaccgttttgccaccaag

SEQ ID NO: 4992929 - DNA, 25 bp, Homo sapien
tgtctgtccataagagcctcctgta

SEQ ID NO: 4992930 - DNA, 25 bp, Homo sapien
tatgtgtaacactggtggctgctgg

SEQ ID NO: 4992931 - DNA, 25 bp, Homo sapien
ccatctccattgcagggcggtccat

SEQ ID NO: 4992932 - DNA, 25 bp, Homo sapien
agccaaatggtcaagaatatgtgta

SEQ ID NO: 4992933 - DNA, 25 bp, Homo sapien
acatctgcagcaagacctctgtgcc

SEQ ID NO: 4992934 - DNA, 25 bp, Homo sapien
tagcattcgcctattccatgaagtc

SEQ ID NO: 4992935 - DNA, 25 bp, Homo sapien
tctgtgcccgaccatgtcatctggt

SEQ ID NO: 4992936 - DNA, 25 bp, Homo sapien
ttaacaaccgcttcatgaactcctg

SEQ ID NO: 4992937 - DNA, 25 bp, Homo sapien
ggcattcaataaagtgcatgtgttc

SEQ ID NO: 4992938 - DNA, 25 bp, Homo sapien
tcggtaactttaatctcgtaattca

SEQ ID NO: 4992939 - DNA, 25 bp, Homo sapien
tgtccatagaacagccttcagcaga

SEQ ID NO: 4992940 - DNA, 25 bp, Homo sapien
aatctcgtaattcattgtttctctg

SEQ ID NO: 4992941 - DNA, 25 bp, Homo sapien
tctgcaggatgagtcgtttttcggt

SEQ ID NO: 4992942 - DNA, 25 bp, Homo sapien
aatccggtttgggatttcacaagct

SEQ ID NO: 4992943 - DNA, 25 bp, Homo sapien
ttccttcccatttgttgcttccgtc

SEQ ID NO: 4992944 - DNA, 25 bp, Homo sapien
ccggtttgggatttcacaagctttg

SEQ ID NO: 4992945 - DNA, 25 bp, Homo sapien
tcccatttgttgcttccgtctgtcc

SEQ ID NO: 4992946 - DNA, 25 bp, Homo sapien
ttcctttaactgtcgggagtctaca

SEQ ID NO: 4992947 - DNA, 25 bp, Homo sapien
tgcaatcttcagtgatgaccgtctt

SEQ ID NO: 4992948 - DNA, 25 bp, Homo sapien
tattctcgacattccaaatgtagga

SEQ ID NO: 4992949 - DNA, 25 bp, Homo sapien
tctttttacagcgtgtttaatgcaa

SEQ ID NO: 4992950 - DNA, 25 bp, Homo sapien
accccaggggtgctgtcattactgt

SEQ ID NO: 4992951 - DNA, 25 bp, Homo sapien
gttggtgatttgcacaaccccaggg

SEQ ID NO: 4992952 - DNA, 25 bp, Homo sapien
cagcgttggtgatttgcacaacccc

SEQ ID NO: 4992953 - DNA, 25 bp, Homo sapien
gggtgctgtcattactgtgggctgc

SEQ ID NO: 4992954 - DNA, 25 bp, Homo sapien
gtgattcaggtccagttgcaagcca

SEQ ID NO: 4992955 - DNA, 25 bp, Homo sapien
gtccagttgcaagccagcaacacag

SEQ ID NO: 4992956 - DNA, 25 bp, Homo sapien
ttcaggtccagttgcaagccagcaa

SEQ ID NO: 4992957 - DNA, 25 bp, Homo sapien
ctgtgattcaggtccagttgcaagc

SEQ ID NO: 4992958 - DNA, 25 bp, Homo sapien
gctgcagggagctttacacacgggc

SEQ ID NO: 4992959 - DNA, 25 bp, Homo sapien
ctgcagggagctttacacacgggcc

SEQ ID NO: 4992960 - DNA, 25 bp, Homo sapien
ggctgcagggagctttacacacggg

SEQ ID NO: 4992961 - DNA, 25 bp, Homo sapien
gggctgcagggagctttacacacgg

SEQ ID NO: 4992962 - DNA, 25 bp, Homo sapien
aactccatggagaagatataagctg

SEQ ID NO: 4992963 - DNA, 25 bp, Homo sapien
ctccatggagaagatataagctgtc

SEQ ID NO: 4992964 - DNA, 25 bp, Homo sapien
aaatgtatttgtgagtctgatgagc

SEQ ID NO: 4992965 - DNA, 25 bp, Homo sapien
caccttttgtgtttcaatgctgggc

SEQ ID NO: 4992966 - DNA, 25 bp, Homo sapien
gggaccttggctcttccacggtggc

SEQ ID NO: 4992967 - DNA, 25 bp, Homo sapien
ggaccttggctcttccacggtggct

SEQ ID NO: 4992968 - DNA, 25 bp, Homo sapien
accttggctcttccacggtggctgt

SEQ ID NO: 4992969 - DNA, 25 bp, Homo sapien
gaccttggctcttccacggtggctg

SEQ ID NO: 4992970 - DNA, 25 bp, Homo sapien
ttgaggtcaattatttccccagcaa

SEQ ID NO: 4992971 - DNA, 25 bp, Homo sapien
tttctattagttgtgactgaagtag

SEQ ID NO: 4992972 - DNA, 25 bp, Homo sapien
gtgacattgtcccttgaacaacact

SEQ ID NO: 4992973 - DNA, 25 bp, Homo sapien
ggaaagtgacattgtcccttgaaca

SEQ ID NO: 4992974 - DNA, 25 bp, Homo sapien
tcggtcccccagtggcaaaattcgc

SEQ ID NO: 4992975 - DNA, 25 bp, Homo sapien
aaaattcgcagctgtcgcccagcac

SEQ ID NO: 4992976 - DNA, 25 bp, Homo sapien
ctgcgggacagaggcgtcctcgcgt

SEQ ID NO: 4992977 - DNA, 25 bp, Homo sapien
ccccagtggcaaaattcgcagctgt

SEQ ID NO: 4992978 - DNA, 25 bp, Homo sapien
gaccggaccagcagctgcttgcgtc

SEQ ID NO: 4992979 - DNA, 25 bp, Homo sapien
ccacagctgtctggcggatacacac

SEQ ID NO: 4992980 - DNA, 25 bp, Homo sapien
gcgcgtctggtcgaccggaccagca

SEQ ID NO: 4992981 - DNA, 25 bp, Homo sapien
ggatacacacgtgcgcgtctggtcg

SEQ ID NO: 4992982 - DNA, 25 bp, Homo sapien
tgaggaaacgaagagtagggtcatt

SEQ ID NO: 4992983 - DNA, 25 bp, Homo sapien
aacgaagagtagggtcatttcccat

SEQ ID NO: 4992984 - DNA, 25 bp, Homo sapien
catccaggacccgaaacagcgggga

SEQ ID NO: 4992985 - DNA, 25 bp, Homo sapien
tgcgaccgcccaggtctcccgagct

SEQ ID NO: 4992986 - DNA, 25 bp, Homo sapien
aggcgacagtgcgtggagggccccg

SEQ ID NO: 4992987 - DNA, 25 bp, Homo sapien
cccgccctgtgactcgacctccagc

SEQ ID NO: 4992988 - DNA, 25 bp, Homo sapien
tatgcttccaaccacatctggagtg

SEQ ID NO: 4992989 - DNA, 25 bp, Homo sapien
tgcttccaaccacatctggagtgtc

SEQ ID NO: 4992990 - DNA, 25 bp, Homo sapien
atgcttccaaccacatctggagtgt

SEQ ID NO: 4992991 - DNA, 25 bp, Homo sapien
ggacaggattatagccccagttgaa

SEQ ID NO: 4992992 - DNA, 25 bp, Homo sapien
ttttccaggacaggattatagcccc

SEQ ID NO: 4992993 - DNA, 25 bp, Homo sapien
ccaggacaggattatagccccagtt

SEQ ID NO: 4992994 - DNA, 25 bp, Homo sapien
gacaggattatagccccagttgaag

SEQ ID NO: 4992995 - DNA, 25 bp, Homo sapien
tacaaaaagaatcctccaaaagtga

SEQ ID NO: 4992996 - DNA, 25 bp, Homo sapien
tgaagttatacaaaaagaatcctcc

SEQ ID NO: 4992997 - DNA, 25 bp, Homo sapien
gcttacaatctttattgaagttata

SEQ ID NO: 4992998 - DNA, 25 bp, Homo sapien
ctttgcttacaatctttattgaagt

SEQ ID NO: 4992999 - DNA, 25 bp, Homo sapien
ggaggagggctgtgccctctcttta

SEQ ID NO: 4993000 - DNA, 25 bp, Homo sapien
tcccttgggaggagggctgtgccct

SEQ ID NO: 4993001 - DNA, 25 bp, Homo sapien
ttgggaggagggctgtgccctctct

SEQ ID NO: 4993002 - DNA, 25 bp, Homo sapien
gaggagggctgtgccctctctttac

SEQ ID NO: 4993003 - DNA, 25 bp, Homo sapien
tgtcccctccactgccgcccggctt

SEQ ID NO: 4993004 - DNA, 25 bp, Homo sapien
actgccgcccggctttcaacccgat

SEQ ID NO: 4993005 - DNA, 25 bp, Homo sapien
tgcagtgctttcagctgtagctcca

SEQ ID NO: 4993006 - DNA, 25 bp, Homo sapien
gctttcaacccgattctcagcctcc

SEQ ID NO: 4993007 - DNA, 25 bp, Homo sapien
gaaatatcagtcacacaatttgatg

SEQ ID NO: 4993008 - DNA, 25 bp, Homo sapien
aatatcagtcacacaatttgatgag

SEQ ID NO: 4993009 - DNA, 25 bp, Homo sapien
aaatatcagtcacacaatttgatga

SEQ ID NO: 4993010 - DNA, 25 bp, Homo sapien
tcaggagactgaagagcctcctcca

SEQ ID NO: 4993011 - DNA, 25 bp, Homo sapien
agtgaaacctgaagtagagctctcc

SEQ ID NO: 4993012 - DNA, 25 bp, Homo sapien
tgaaacctgaagtagagctctccac

SEQ ID NO: 4993013 - DNA, 25 bp, Homo sapien
ctaggagtgaaacctgaagtagagc

SEQ ID NO: 4993014 - DNA, 25 bp, Homo sapien
aggagtgaaacctgaagtagagctc

SEQ ID NO: 4993015 - DNA, 25 bp, Homo sapien
agtagctttcagagccagttcagct

SEQ ID NO: 4993016 - DNA, 25 bp, Homo sapien
gagtagctttcagagccagttcagc

SEQ ID NO: 4993017 - DNA, 25 bp, Homo sapien
tagctttcagagccagttcagctac

SEQ ID NO: 4993018 - DNA, 25 bp, Homo sapien
cagagtagctttcagagccagttca

SEQ ID NO: 4993019 - DNA, 25 bp, Homo sapien
attcccagtagtctgagactccttt

SEQ ID NO: 4993020 - DNA, 25 bp, Homo sapien
ttcccagtagtctgagactcctttg

SEQ ID NO: 4993021 - DNA, 25 bp, Homo sapien
ggtcgtaggcttccaggtactgttc

SEQ ID NO: 4993022 - DNA, 25 bp, Homo sapien
tgtgccactgcctcatcatactgaa

SEQ ID NO: 4993023 - DNA, 25 bp, Homo sapien
ctcgtttagtacagccattctcttc

SEQ ID NO: 4993024 - DNA, 25 bp, Homo sapien
tctctgcaaggagatggtcgtaggc

SEQ ID NO: 4993025 - DNA, 25 bp, Homo sapien
gaactcctccacagcttgcacatag

SEQ ID NO: 4993026 - DNA, 25 bp, Homo sapien
aactcctccacagcttgcacatagt

SEQ ID NO: 4993027 - DNA, 25 bp, Homo sapien
tgccttttaaaaacgatctttgcta

SEQ ID NO: 4993028 - DNA, 25 bp, Homo sapien
tcttttatctgttcgtcctctctct

SEQ ID NO: 4993029 - DNA, 25 bp, Homo sapien
cttttatctgttcgtcctctctctt

SEQ ID NO: 4993030 - DNA, 25 bp, Homo sapien
ccctcttttatctgttcgtcctctc

SEQ ID NO: 4993031 - DNA, 25 bp, Homo sapien
accctcttttatctgttcgtcctct

SEQ ID NO: 4993032 - DNA, 25 bp, Homo sapien
tagcagctatctgaactttgtcttc

SEQ ID NO: 4993033 - DNA, 25 bp, Homo sapien
cattagcagctatctgaactttgtc

SEQ ID NO: 4993034 - DNA, 25 bp, Homo sapien
cttcattagcagctatctgaacttt

SEQ ID NO: 4993035 - DNA, 25 bp, Homo sapien
tcattagcagctatctgaactttgt

SEQ ID NO: 4993036 - DNA, 25 bp, Homo sapien
tcagactcttctacagacagcttag

SEQ ID NO: 4993037 - DNA, 25 bp, Homo sapien
gacagcttagtctcctcctgactag

SEQ ID NO: 4993038 - DNA, 25 bp, Homo sapien
tctgtcagtctttctatagaagtct

SEQ ID NO: 4993039 - DNA, 25 bp, Homo sapien
tctttctatagaagtctgtggttca

SEQ ID NO: 4993040 - DNA, 25 bp, Homo sapien
tgcccaggcttttcagagacttctg

SEQ ID NO: 4993041 - DNA, 25 bp, Homo sapien
ctgcccaggcttttcagagacttct

SEQ ID NO: 4993042 - DNA, 25 bp, Homo sapien
ctaccagttactcaagaaccacctt

SEQ ID NO: 4993043 - DNA, 25 bp, Homo sapien
ctttcctgccttttcagaggtaact

SEQ ID NO: 4993044 - DNA, 25 bp, Homo sapien
ttcctgccttttcagaggtaactac

SEQ ID NO: 4993045 - DNA, 25 bp, Homo sapien
gttactcaagaaccacctttcctgc

SEQ ID NO: 4993046 - DNA, 25 bp, Homo sapien
ttctcctctggctcgtccccaccca

SEQ ID NO: 4993047 - DNA, 25 bp, Homo sapien
tggcttgactgttgggtctaaagac

SEQ ID NO: 4993048 - DNA, 25 bp, Homo sapien
ctgttgggtctaaagactctgctgc

SEQ ID NO: 4993049 - DNA, 25 bp, Homo sapien
ccacccacatctactggcttgactg

SEQ ID NO: 4993050 - DNA, 25 bp, Homo sapien
gctcttctgaaacttcttttggctt

SEQ ID NO: 4993051 - DNA, 25 bp, Homo sapien
ctagaatcaccacagtctgctcttc

SEQ ID NO: 4993052 - DNA, 25 bp, Homo sapien
gcttctcctctatgctcacaattac

SEQ ID NO: 4993053 - DNA, 25 bp, Homo sapien
tagaatcaccacagtctgctcttct

SEQ ID NO: 4993054 - DNA, 25 bp, Homo sapien
ctagagtcaagtcaactttttcctg

SEQ ID NO: 4993055 - DNA, 25 bp, Homo sapien
tctgcactcttcttggacatcagtt

SEQ ID NO: 4993056 - DNA, 25 bp, Homo sapien
gagtcaagtcaactttttcctgtgg

SEQ ID NO: 4993057 - DNA, 25 bp, Homo sapien
ctctgcactcttcttggacatcagt

SEQ ID NO: 4993058 - DNA, 25 bp, Homo sapien
ggagtcataaacctgttctctcaac

SEQ ID NO: 4993059 - DNA, 25 bp, Homo sapien
ttctcccatggagtcataaacctgt

SEQ ID NO: 4993060 - DNA, 25 bp, Homo sapien
ccttctccatttcacagtcctgttc

SEQ ID NO: 4993061 - DNA, 25 bp, Homo sapien
caggctttgcgaaagacttgtcttc

SEQ ID NO: 4993062 - DNA, 25 bp, Homo sapien
aatacaccattctcgattctctcca

SEQ ID NO: 4993063 - DNA, 25 bp, Homo sapien
cacaccatccaaggtgtttcccaat

SEQ ID NO: 4993064 - DNA, 25 bp, Homo sapien
tcccaatacaccattctcgattctc

SEQ ID NO: 4993065 - DNA, 25 bp, Homo sapien
accatccaaggtgtttcccaataca

SEQ ID NO: 4993066 - DNA, 25 bp, Homo sapien
gtggcaaaccagtgaatggaataga

SEQ ID NO: 4993067 - DNA, 25 bp, Homo sapien
ggcaaaccagtgaatggaatagagc

SEQ ID NO: 4993068 - DNA, 25 bp, Homo sapien
tggcaaaccagtgaatggaatagag

SEQ ID NO: 4993069 - DNA, 25 bp, Homo sapien
caactgcagtacatatagttctata

SEQ ID NO: 4993070 - DNA, 25 bp, Homo sapien
tgctccccggacattccaagagatg

SEQ ID NO: 4993071 - DNA, 25 bp, Homo sapien
tctataaactcgctgggaacagtct

SEQ ID NO: 4993072 - DNA, 25 bp, Homo sapien
gaacagagggagcatttgttccctc

SEQ ID NO: 4993073 - DNA, 25 bp, Homo sapien
tagatgttagaaaggtggacccacc

SEQ ID NO: 4993074 - DNA, 25 bp, Homo sapien
gaggtggagcactatacttgcagag

SEQ ID NO: 4993075 - DNA, 25 bp, Homo sapien
tccgggtaggtgtgacatgagctta

SEQ ID NO: 4993076 - DNA, 25 bp, Homo sapien
tcttttaagagtgcagacagtctcc

SEQ ID NO: 4993077 - DNA, 25 bp, Homo sapien
ggactcagggaatccaccaggtgga

SEQ ID NO: 4993078 - DNA, 25 bp, Homo sapien
caggagaagctgtcctccacgtgga

SEQ ID NO: 4993079 - DNA, 25 bp, Homo sapien
agccaagaagatgtgttttccaggg

SEQ ID NO: 4993080 - DNA, 25 bp, Homo sapien
agatctgtccacttagtaattattc

SEQ ID NO: 4993081 - DNA, 25 bp, Homo sapien
tgtgttatttcttggaaaggctgtc

SEQ ID NO: 4993082 - DNA, 25 bp, Homo sapien
tgtgtgtgttatttcttggaaaggc

SEQ ID NO: 4993083 - DNA, 25 bp, Homo sapien
gtgtgttatttcttggaaaggctgt

SEQ ID NO: 4993084 - DNA, 25 bp, Homo sapien
gcgtgtgtgtgttatttcttggaaa

SEQ ID NO: 4993085 - DNA, 25 bp, Homo sapien
ggagatgacaagaatcaccccagga

SEQ ID NO: 4993086 - DNA, 25 bp, Homo sapien
tcagcatgggtgagctatgcagccc

SEQ ID NO: 4993087 - DNA, 25 bp, Homo sapien
tatgcagcccaggtgaagggatcct

SEQ ID NO: 4993088 - DNA, 25 bp, Homo sapien
tggtaccctaactagcgcggctgtg

SEQ ID NO: 4993089 - DNA, 25 bp, Homo sapien
ttgtacagacgttttcaggcctctc

SEQ ID NO: 4993090 - DNA, 25 bp, Homo sapien
gaagccatttgtacagacgttttca

SEQ ID NO: 4993091 - DNA, 25 bp, Homo sapien
tgtcgtctgcgcagcattcagcttc

SEQ ID NO: 4993092 - DNA, 25 bp, Homo sapien
cttctcggaagccatttgtacagac

SEQ ID NO: 4993093 - DNA, 25 bp, Homo sapien
gatttgggatttggccaggaggaag

SEQ ID NO: 4993094 - DNA, 25 bp, Homo sapien
ggatttgggatttggccaggaggaa

SEQ ID NO: 4993095 - DNA, 25 bp, Homo sapien
gagtattgaacagggctgtcagtac

SEQ ID NO: 4993096 - DNA, 25 bp, Homo sapien
attgaacagggctgtcagtactttg

SEQ ID NO: 4993097 - DNA, 25 bp, Homo sapien
tgtgagtattgaacagggctgtcag

SEQ ID NO: 4993098 - DNA, 25 bp, Homo sapien
tattgaacagggctgtcagtacttt

SEQ ID NO: 4993099 - DNA, 25 bp, Homo sapien
aacaattgaacattcaggtgagagc

SEQ ID NO: 4993100 - DNA, 25 bp, Homo sapien
gagcatcagctaggaacggtctgaa

SEQ ID NO: 4993101 - DNA, 25 bp, Homo sapien
tatctgtgacttaaagatggcagac

SEQ ID NO: 4993102 - DNA, 25 bp, Homo sapien
cactactgggtaatgtcatgggaag

SEQ ID NO: 4993103 - DNA, 25 bp, Homo sapien
aaatgtgtaattctgtgggaacatt

SEQ ID NO: 4993104 - DNA, 25 bp, Homo sapien
tgtgataaatcatgagtttctggca

SEQ ID NO: 4993105 - DNA, 25 bp, Homo sapien
tgctgattgtgataaatcatgagtt

SEQ ID NO: 4993106 - DNA, 25 bp, Homo sapien
gctccaatggctgaacagagaaaat

SEQ ID NO: 4993107 - DNA, 25 bp, Homo sapien
gaaatccgtggaagcacaatgacca

SEQ ID NO: 4993108 - DNA, 25 bp, Homo sapien
cacagtgtgaaatccgtggaagcac

SEQ ID NO: 4993109 - DNA, 25 bp, Homo sapien
tgttgtctgctgttacgtaattgtg

SEQ ID NO: 4993110 - DNA, 25 bp, Homo sapien
taattgtgcacacagtgtgaaatcc

SEQ ID NO: 4993111 - DNA, 25 bp, Homo sapien
tgagagctccaccttgatcgccact

SEQ ID NO: 4993112 - DNA, 25 bp, Homo sapien
ttgatcgccactggtcctcctcttt

SEQ ID NO: 4993113 - DNA, 25 bp, Homo sapien
tacgctcgttcaggtggcctttgcc

SEQ ID NO: 4993114 - DNA, 25 bp, Homo sapien
gttggctccacactacgctcgttca

SEQ ID NO: 4993115 - DNA, 25 bp, Homo sapien
gcctgtagaaagagtattgaactgt

SEQ ID NO: 4993116 - DNA, 25 bp, Homo sapien
gaaagagtattgaactgtcgacaca

SEQ ID NO: 4993117 - DNA, 25 bp, Homo sapien
gtattgaactgtcgacacaggacat

SEQ ID NO: 4993118 - DNA, 25 bp, Homo sapien
tagaaagagtattgaactgtcgaca

SEQ ID NO: 4993119 - DNA, 25 bp, Homo sapien
ttgaaagtagtccttttgatttcat

SEQ ID NO: 4993120 - DNA, 25 bp, Homo sapien
tgttgaaagtagtccttttgatttc

SEQ ID NO: 4993121 - DNA, 25 bp, Homo sapien
gttgaaagtagtccttttgatttca

SEQ ID NO: 4993122 - DNA, 25 bp, Homo sapien
cctggcttttcaggacggccacagt

SEQ ID NO: 4993123 - DNA, 25 bp, Homo sapien
ccttggtatataatcagaagtcctt

SEQ ID NO: 4993124 - DNA, 25 bp, Homo sapien
tcctggcttttcaggacggccacag

SEQ ID NO: 4993125 - DNA, 25 bp, Homo sapien
catggaatgattgtagttgatttaa

SEQ ID NO: 4993126 - DNA, 25 bp, Homo sapien
gaagggagccagtgaacatggaatg

SEQ ID NO: 4993127 - DNA, 25 bp, Homo sapien
taaaagttgagaggcaaaggacagc

SEQ ID NO: 4993128 - DNA, 25 bp, Homo sapien
aggacagctaaggttgaaagggctt

SEQ ID NO: 4993129 - DNA, 25 bp, Homo sapien
gacaaatcggaaagagctagtgaac

SEQ ID NO: 4993130 - DNA, 25 bp, Homo sapien
tcagaagggtaatggccagaagcca

SEQ ID NO: 4993131 - DNA, 25 bp, Homo sapien
aaatagcgcctcttctctccaggac

SEQ ID NO: 4993132 - DNA, 25 bp, Homo sapien
gaacttgacagaaataaatagcgcc

SEQ ID NO: 4993133 - DNA, 25 bp, Homo sapien
cctttaccgtctgtctgctgcggtc

SEQ ID NO: 4993134 - DNA, 25 bp, Homo sapien
gcctttaccgtctgtctgctgcggt

SEQ ID NO: 4993135 - DNA, 25 bp, Homo sapien
tgcctttaccgtctgtctgctgcgg

SEQ ID NO: 4993136 - DNA, 25 bp, Homo sapien
ctgcctttaccgtctgtctgctgcg

SEQ ID NO: 4993137 - DNA, 25 bp, Homo sapien
cagaaaaggacgtgcaggacacagt

SEQ ID NO: 4993138 - DNA, 25 bp, Homo sapien
catttataaacacgggcacctgcca

SEQ ID NO: 4993139 - DNA, 25 bp, Homo sapien
tactcccgcattgctgatagaagca

SEQ ID NO: 4993140 - DNA, 25 bp, Homo sapien
tggacaggacgtcgttaagcgcacc

SEQ ID NO: 4993141 - DNA, 25 bp, Homo sapien
aagaatgattgcaggagacagcttg

SEQ ID NO: 4993142 - DNA, 25 bp, Homo sapien
tgcaagaatgattgcaggagacagc

SEQ ID NO: 4993143 - DNA, 25 bp, Homo sapien
gctgcaagaatgattgcaggagaca

SEQ ID NO: 4993144 - DNA, 25 bp, Homo sapien
caagaatgattgcaggagacagctt

SEQ ID NO: 4993145 - DNA, 25 bp, Homo sapien
ctctctctcggtcctttggtcattt

SEQ ID NO: 4993146 - DNA, 25 bp, Homo sapien
cctgatttttgagtggggtgaagcc

SEQ ID NO: 4993147 - DNA, 25 bp, Homo sapien
caaattcaaaccctgatttttgagt

SEQ ID NO: 4993148 - DNA, 25 bp, Homo sapien
ctctctcggtcctttggtcattttc

SEQ ID NO: 4993149 - DNA, 25 bp, Homo sapien
cagcaacaggacagatcttagattt

SEQ ID NO: 4993150 - DNA, 25 bp, Homo sapien
ggctggaagcaacactaatgccact

SEQ ID NO: 4993151 - DNA, 25 bp, Homo sapien
tataccagaaggtgaggaaatggct

SEQ ID NO: 4993152 - DNA, 25 bp, Homo sapien
agcagttttccgagactccccagaa

SEQ ID NO: 4993153 - DNA, 25 bp, Homo sapien
tccccagaatacagaaggcttgtgg

SEQ ID NO: 4993154 - DNA, 25 bp, Homo sapien
caaaatgagatctcccttacggcaa

SEQ ID NO: 4993155 - DNA, 25 bp, Homo sapien
gatcccgatctgctgccaaaatgag

SEQ ID NO: 4993156 - DNA, 25 bp, Homo sapien
gaactaatagcacaaagcaggaaat

SEQ ID NO: 4993157 - DNA, 25 bp, Homo sapien
tctcccttacggcaatgtggtggga

SEQ ID NO: 4993158 - DNA, 25 bp, Homo sapien
aggattcataggaaagctgccacaa

SEQ ID NO: 4993159 - DNA, 25 bp, Homo sapien
gatgatgagaaattgcccttaacca

SEQ ID NO: 4993160 - DNA, 25 bp, Homo sapien
gctgaaaagtatccccagaaaggcc

SEQ ID NO: 4993161 - DNA, 25 bp, Homo sapien
taaccactaatagctggacaggatt

SEQ ID NO: 4993162 - DNA, 25 bp, Homo sapien
gaaagaaagttagtcaagagcacag

SEQ ID NO: 4993163 - DNA, 25 bp, Homo sapien
aaagttagtcaagagcacagctggt

SEQ ID NO: 4993164 - DNA, 25 bp, Homo sapien
agaaagttagtcaagagcacagctg

SEQ ID NO: 4993165 - DNA, 25 bp, Homo sapien
gttattgtctacaatgttttgctcc

SEQ ID NO: 4993166 - DNA, 25 bp, Homo sapien
ggtgtgtccacaacctgcttcccgt

SEQ ID NO: 4993167 - DNA, 25 bp, Homo sapien
gaagctgcggctgagctgcttctct

SEQ ID NO: 4993168 - DNA, 25 bp, Homo sapien
aattgcctataagcatggacaacct

SEQ ID NO: 4993169 - DNA, 25 bp, Homo sapien
tgagctgcttctctagaagcctctc

SEQ ID NO: 4993170 - DNA, 25 bp, Homo sapien
agcttctttggtctcggtcactggg

SEQ ID NO: 4993171 - DNA, 25 bp, Homo sapien
gaagccattcctgcatgactcaaag

SEQ ID NO: 4993172 - DNA, 25 bp, Homo sapien
tgtcccggcgtatctgggaagccat

SEQ ID NO: 4993173 - DNA, 25 bp, Homo sapien
aaagcctttctctgctctcgcacat

SEQ ID NO: 4993174 - DNA, 25 bp, Homo sapien
tgtcggtgaggcatggtctcctgcc

SEQ ID NO: 4993175 - DNA, 25 bp, Homo sapien
cggtgaggcatggtctcctgccaaa

SEQ ID NO: 4993176 - DNA, 25 bp, Homo sapien
ggtttactgcgagttccctgcagcc

SEQ ID NO: 4993177 - DNA, 25 bp, Homo sapien
agccgtgaggttccacctggtgtcg

SEQ ID NO: 4993178 - DNA, 25 bp, Homo sapien
agcccttcgtatgggcttcctggtg

SEQ ID NO: 4993179 - DNA, 25 bp, Homo sapien
gcttgcagagcccttcgtatgggct

SEQ ID NO: 4993180 - DNA, 25 bp, Homo sapien
tgcagagcccttcgtatgggcttcc

SEQ ID NO: 4993181 - DNA, 25 bp, Homo sapien
cttcgtatgggcttcctggtgccat

SEQ ID NO: 4993182 - DNA, 25 bp, Homo sapien
tccacaccaagactcaaccagagca

SEQ ID NO: 4993183 - DNA, 25 bp, Homo sapien
caagagctaacctgcctccgttccc

SEQ ID NO: 4993184 - DNA, 25 bp, Homo sapien
cgttccccacccaagagctaacctg

SEQ ID NO: 4993185 - DNA, 25 bp, Homo sapien
ctccacaccaagactcaaccagagc

SEQ ID NO: 4993186 - DNA, 25 bp, Homo sapien
taaccatggtcttagagactccggc

SEQ ID NO: 4993187 - DNA, 25 bp, Homo sapien
aggaccagatccatccacaagttca

SEQ ID NO: 4993188 - DNA, 25 bp, Homo sapien
gactccggcttggtcatgacattga

SEQ ID NO: 4993189 - DNA, 25 bp, Homo sapien
tccacaagttcagcgggagaggcca

SEQ ID NO: 4993190 - DNA, 25 bp, Homo sapien
ttaatcaatacttcatcagaaaagc

SEQ ID NO: 4993191 - DNA, 25 bp, Homo sapien
tctggatcatagatacagtctcctt

SEQ ID NO: 4993192 - DNA, 25 bp, Homo sapien
ctcctttctcagattcacaactggg

SEQ ID NO: 4993193 - DNA, 25 bp, Homo sapien
aacaactttcccgtgtttccagatg

SEQ ID NO: 4993194 - DNA, 25 bp, Homo sapien
ttcctgcccacaagaccttgaccat

SEQ ID NO: 4993195 - DNA, 25 bp, Homo sapien
ataacatctctttggactgaagaca

SEQ ID NO: 4993196 - DNA, 25 bp, Homo sapien
cactgacaagggatcacctataaca

SEQ ID NO: 4993197 - DNA, 25 bp, Homo sapien
atctcattatccaagggcccacaga

SEQ ID NO: 4993198 - DNA, 25 bp, Homo sapien
ttccttcctcgcctttggcacctgt

SEQ ID NO: 4993199 - DNA, 25 bp, Homo sapien
cttcctcgcctttggcacctgtctg

SEQ ID NO: 4993200 - DNA, 25 bp, Homo sapien
ctcgcctttggcacctgtctgtggc

SEQ ID NO: 4993201 - DNA, 25 bp, Homo sapien
cctcgcctttggcacctgtctgtgg

SEQ ID NO: 4993202 - DNA, 25 bp, Homo sapien
cacatccgcaaagagctcatgccag

SEQ ID NO: 4993203 - DNA, 25 bp, Homo sapien
gaggcacagcctgccaaacgaaagg

SEQ ID NO: 4993204 - DNA, 25 bp, Homo sapien
tgggcttgtcagaaccagttgttgg

SEQ ID NO: 4993205 - DNA, 25 bp, Homo sapien
aggcaccggctgcattctgcaccag

SEQ ID NO: 4993206 - DNA, 25 bp, Homo sapien
tttgctggctggactgtgccatccg

SEQ ID NO: 4993207 - DNA, 25 bp, Homo sapien
tgctggctggactgtgccatccggc

SEQ ID NO: 4993208 - DNA, 25 bp, Homo sapien
tggctggactgtgccatccggccat

SEQ ID NO: 4993209 - DNA, 25 bp, Homo sapien
ctttgctggctggactgtgccatcc

SEQ ID NO: 4993210 - DNA, 25 bp, Homo sapien
ctatttttagctgccgcaattgcct

SEQ ID NO: 4993211 - DNA, 25 bp, Homo sapien
gattccacccgtgacccaagaggtg

SEQ ID NO: 4993212 - DNA, 25 bp, Homo sapien
aagctgggtgaggatatcagattcc

SEQ ID NO: 4993213 - DNA, 25 bp, Homo sapien
cctgggcacgaccaaacagggtcag

SEQ ID NO: 4993214 - DNA, 25 bp, Homo sapien
ggtaaagcgccagggcctttgtcag

SEQ ID NO: 4993215 - DNA, 25 bp, Homo sapien
acggttctttccattcaggcagaaa

SEQ ID NO: 4993216 - DNA, 25 bp, Homo sapien
acaccacagactccacgaagaccca

SEQ ID NO: 4993217 - DNA, 25 bp, Homo sapien
acgaagacccaactgcagcaacggt

SEQ ID NO: 4993218 - DNA, 25 bp, Homo sapien
ggctgtcataactaacacggctgat

SEQ ID NO: 4993219 - DNA, 25 bp, Homo sapien
ggaaagtgtccacgcagtggtatct

SEQ ID NO: 4993220 - DNA, 25 bp, Homo sapien
cagaaagttgggagtgttccattat

SEQ ID NO: 4993221 - DNA, 25 bp, Homo sapien
gctggtgccacacacggctgtcata

SEQ ID NO: 4993222 - DNA, 25 bp, Homo sapien
gcctgttgaaagagagcccctgtga

SEQ ID NO: 4993223 - DNA, 25 bp, Homo sapien
gcttagatgcgggtgaatggccacc

SEQ ID NO: 4993224 - DNA, 25 bp, Homo sapien
tggaaagatgttgcgctggcttgct

SEQ ID NO: 4993225 - DNA, 25 bp, Homo sapien
cctgtgagggcacatcaaagtgtca

SEQ ID NO: 4993226 - DNA, 25 bp, Homo sapien
cctcattcaggtttgttggagttcc

SEQ ID NO: 4993227 - DNA, 25 bp, Homo sapien
gagttccaggaacatactgccagga

SEQ ID NO: 4993228 - DNA, 25 bp, Homo sapien
atttagttccggaggtgctgacagc

SEQ ID NO: 4993229 - DNA, 25 bp, Homo sapien
gctgacagctggtaatatgttaaac

SEQ ID NO: 4993230 - DNA, 25 bp, Homo sapien
tcacttaagtctcactggctgattg

SEQ ID NO: 4993231 - DNA, 25 bp, Homo sapien
ctcactggctgattgagaagcatca

SEQ ID NO: 4993232 - DNA, 25 bp, Homo sapien
tctcactggctgattgagaagcatc

SEQ ID NO: 4993233 - DNA, 25 bp, Homo sapien
aagtctcactggctgattgagaagc

SEQ ID NO: 4993234 - DNA, 25 bp, Homo sapien
tgtaatgccaggagggattgctcct

SEQ ID NO: 4993235 - DNA, 25 bp, Homo sapien
cgacacttgtgaatggacatacttg

SEQ ID NO: 4993236 - DNA, 25 bp, Homo sapien
tctggttgttctgatctggtgatat

SEQ ID NO: 4993237 - DNA, 25 bp, Homo sapien
ttttcatagagcaagtgaacccagc

SEQ ID NO: 4993238 - DNA, 25 bp, Homo sapien
atgggcagttatgatgtcgtctctt

SEQ ID NO: 4993239 - DNA, 25 bp, Homo sapien
tcgtctctttgtggggcactcacag

SEQ ID NO: 4993240 - DNA, 25 bp, Homo sapien
gctgctggaaacgattgtggtcagt

SEQ ID NO: 4993241 - DNA, 25 bp, Homo sapien
aaacgattgtggtcagtggatatgg

SEQ ID NO: 4993242 - DNA, 25 bp, Homo sapien
tacgccatggagataaggacagagt

SEQ ID NO: 4993243 - DNA, 25 bp, Homo sapien
taacccggttctgtatacgccatgg

SEQ ID NO: 4993244 - DNA, 25 bp, Homo sapien
gacagagtaagcaaggctgttcttc

SEQ ID NO: 4993245 - DNA, 25 bp, Homo sapien
gaggatgcttcctaccttccactag

SEQ ID NO: 4993246 - DNA, 25 bp, Homo sapien
caggccaaattctaaagaccatgga

SEQ ID NO: 4993247 - DNA, 25 bp, Homo sapien
ggccaaattctaaagaccatggatg

SEQ ID NO: 4993248 - DNA, 25 bp, Homo sapien
accatggatgctaggaagaagctgc

SEQ ID NO: 4993249 - DNA, 25 bp, Homo sapien
aacaggccaaattctaaagaccatg

SEQ ID NO: 4993250 - DNA, 25 bp, Homo sapien
ccagagataagcttcataagagcag

SEQ ID NO: 4993251 - DNA, 25 bp, Homo sapien
gagataagcttcataagagcagaca

SEQ ID NO: 4993252 - DNA, 25 bp, Homo sapien
ctaccctactgccagagataagctt

SEQ ID NO: 4993253 - DNA, 25 bp, Homo sapien
tactgccagagataagcttcataag

SEQ ID NO: 4993254 - DNA, 25 bp, Homo sapien
tgccttagggtcatgtaagccacaa

SEQ ID NO: 4993255 - DNA, 25 bp, Homo sapien
gccacaatgttgtatccatccaggt

SEQ ID NO: 4993256 - DNA, 25 bp, Homo sapien
tttctgctgccttagggtcatgtaa

SEQ ID NO: 4993257 - DNA, 25 bp, Homo sapien
aaatccacgggggttcagagacaca

SEQ ID NO: 4993258 - DNA, 25 bp, Homo sapien
gtatataagctgagatgtcagaggg

SEQ ID NO: 4993259 - DNA, 25 bp, Homo sapien
aagctgagatgtcagaggggttcct

SEQ ID NO: 4993260 - DNA, 25 bp, Homo sapien
tcactcgtatataagctgagatgtc

SEQ ID NO: 4993261 - DNA, 25 bp, Homo sapien
tcgtatataagctgagatgtcagag

SEQ ID NO: 4993262 - DNA, 25 bp, Homo sapien
tcaggtagtccttaaatgtccagtc

SEQ ID NO: 4993263 - DNA, 25 bp, Homo sapien
ctatcatatgcagtcctgtgtagag

SEQ ID NO: 4993264 - DNA, 25 bp, Homo sapien
tcaatgctatttaggcaggaatcac

SEQ ID NO: 4993265 - DNA, 25 bp, Homo sapien
gattaactatggcagtaactgcagc

SEQ ID NO: 4993266 - DNA, 25 bp, Homo sapien
aggctgctagcagacatctgttctc

SEQ ID NO: 4993267 - DNA, 25 bp, Homo sapien
ttaggctgctagcagacatctgttc

SEQ ID NO: 4993268 - DNA, 25 bp, Homo sapien
taggctgctagcagacatctgttct

SEQ ID NO: 4993269 - DNA, 25 bp, Homo sapien
tattggttaataggatctggagtgg

SEQ ID NO: 4993270 - DNA, 25 bp, Homo sapien
aaatattggttaataggatctggag

SEQ ID NO: 4993271 - DNA, 25 bp, Homo sapien
taaaatattggttaataggatctgg

SEQ ID NO: 4993272 - DNA, 25 bp, Homo sapien
atattggttaataggatctggagtg

SEQ ID NO: 4993273 - DNA, 25 bp, Homo sapien
gggcatctgatcttcagggacttca

SEQ ID NO: 4993274 - DNA, 25 bp, Homo sapien
ctgggaggggcatctgatcttcagg

SEQ ID NO: 4993275 - DNA, 25 bp, Homo sapien
gggaggggcatctgatcttcaggga

SEQ ID NO: 4993276 - DNA, 25 bp, Homo sapien
gaggggcatctgatcttcagggact

SEQ ID NO: 4993277 - DNA, 25 bp, Homo sapien
taattgtcgcagagattgagtgtga

SEQ ID NO: 4993278 - DNA, 25 bp, Homo sapien
catcttgggttgaggaagtggtaat

SEQ ID NO: 4993279 - DNA, 25 bp, Homo sapien
tggtaattgtcgcagagattgagtg

SEQ ID NO: 4993280 - DNA, 25 bp, Homo sapien
ttgaggaagtggtaattgtcgcaga

SEQ ID NO: 4993281 - DNA, 25 bp, Homo sapien
tgttagctctggcttgtgagtgtaa

SEQ ID NO: 4993282 - DNA, 25 bp, Homo sapien
atgttagctctggcttgtgagtgta

SEQ ID NO: 4993283 - DNA, 25 bp, Homo sapien
ggagatctgaagttggtgggaattg

SEQ ID NO: 4993284 - DNA, 25 bp, Homo sapien
aagttggtaggaatggagatctgaa

SEQ ID NO: 4993285 - DNA, 25 bp, Homo sapien
caacccgtatgcctggtgaatccca

SEQ ID NO: 4993286 - DNA, 25 bp, Homo sapien
cgtatgcctggtgaatcccaatgct

SEQ ID NO: 4993287 - DNA, 25 bp, Homo sapien
ggtgaatcccaatgcttgttgttga

SEQ ID NO: 4993288 - DNA, 25 bp, Homo sapien
tgcctggtgaatcccaatgcttgtt

SEQ ID NO: 4993289 - DNA, 25 bp, Homo sapien
tccaatataaaagtcttgatgccag

SEQ ID NO: 4993290 - DNA, 25 bp, Homo sapien
cctccaatataaaagtcttgatgcc

SEQ ID NO: 4993291 - DNA, 25 bp, Homo sapien
ctccaatataaaagtcttgatgcca

SEQ ID NO: 4993292 - DNA, 25 bp, Homo sapien
tcctccaatataaaagtcttgatgc

SEQ ID NO: 4993293 - DNA, 25 bp, Homo sapien
tcaggaaaattgctacttctctctt

SEQ ID NO: 4993294 - DNA, 25 bp, Homo sapien
ctctctttcatcacaccaagattga

SEQ ID NO: 4993295 - DNA, 25 bp, Homo sapien
caagattgatgttcaggtccccaaa

SEQ ID NO: 4993296 - DNA, 25 bp, Homo sapien
tctaaacatgtagcgaatctgagat

SEQ ID NO: 4993297 - DNA, 25 bp, Homo sapien
gcaatgggaggcctattatgctgcc

SEQ ID NO: 4993298 - DNA, 25 bp, Homo sapien
gcatcttaactgagcggactactct

SEQ ID NO: 4993299 - DNA, 25 bp, Homo sapien
ctaggaacatgtccaagtgactggc

SEQ ID NO: 4993300 - DNA, 25 bp, Homo sapien
taacacgccatgaagttctgtacac

SEQ ID NO: 4993301 - DNA, 25 bp, Homo sapien
taatgttgggtttgctgtgatgtag

SEQ ID NO: 4993302 - DNA, 25 bp, Homo sapien
gtgacaggtaaagactctatccacg

SEQ ID NO: 4993303 - DNA, 25 bp, Homo sapien
tgtgtgtgttgaccagtgacaggta

SEQ ID NO: 4993304 - DNA, 25 bp, Homo sapien
ccacgtgagggtgcactgaagttga

SEQ ID NO: 4993305 - DNA, 25 bp, Homo sapien
taagtaaggaattgtcatagcccat

SEQ ID NO: 4993306 - DNA, 25 bp, Homo sapien
gggactaagtaaggaattgtcatag

SEQ ID NO: 4993307 - DNA, 25 bp, Homo sapien
gactaagtaaggaattgtcatagcc

SEQ ID NO: 4993308 - DNA, 25 bp, Homo sapien
ttgtcatagcccatggccagagtaa

SEQ ID NO: 4993309 - DNA, 25 bp, Homo sapien
ccacccagttcagcagcgaggacac

SEQ ID NO: 4993310 - DNA, 25 bp, Homo sapien
tctcccctctgtatttgccgagcct

SEQ ID NO: 4993311 - DNA, 25 bp, Homo sapien
gcggcgtttcagcacttcggtatgt

SEQ ID NO: 4993312 - DNA, 25 bp, Homo sapien
tctttcgatgccatggctgcggcgt

SEQ ID NO: 4993313 - DNA, 25 bp, Homo sapien
tcagcacttcggtatgtggacagct

SEQ ID NO: 4993314 - DNA, 25 bp, Homo sapien
gaaatagtcgcattgtgtcaaaagt

SEQ ID NO: 4993315 - DNA, 25 bp, Homo sapien
cagtcacaaatatgtatcttgcgga

SEQ ID NO: 4993316 - DNA, 25 bp, Homo sapien
gcctcttaaagacattgcagcacgt

SEQ ID NO: 4993317 - DNA, 25 bp, Homo sapien
taaaccagcttgctcaccattagag

SEQ ID NO: 4993318 - DNA, 25 bp, Homo sapien
aacttccaggttagaccaaacagat

SEQ ID NO: 4993319 - DNA, 25 bp, Homo sapien
caggcaggttatatacaatggaagg

SEQ ID NO: 4993320 - DNA, 25 bp, Homo sapien
tgggtagggagccaaccaagagtct

SEQ ID NO: 4993321 - DNA, 25 bp, Homo sapien
tttttaagcccatatggacattggg

SEQ ID NO: 4993322 - DNA, 25 bp, Homo sapien
ctttagtaaaattgaaagtggatct

SEQ ID NO: 4993323 - DNA, 25 bp, Homo sapien
ttttcatcaaagtgggtcattcact

SEQ ID NO: 4993324 - DNA, 25 bp, Homo sapien
tctagaagaaccatatattctgtct

SEQ ID NO: 4993325 - DNA, 25 bp, Homo sapien
taagagaccttagaagtcattattc

SEQ ID NO: 4993326 - DNA, 25 bp, Homo sapien
ccttgactgccccttgctttggtct

SEQ ID NO: 4993327 - DNA, 25 bp, Homo sapien
ttgcttctattagtattgccttagt

SEQ ID NO: 4993328 - DNA, 25 bp, Homo sapien
agtattgccttagtttaggttctca

SEQ ID NO: 4993329 - DNA, 25 bp, Homo sapien
tgactgccccttgctttggtcttta

SEQ ID NO: 4993330 - DNA, 25 bp, Homo sapien
tgcatgcgcgccatgagtcacggtg

SEQ ID NO: 4993331 - DNA, 25 bp, Homo sapien
gcccctgagtggttagatgtttcaa

SEQ ID NO: 4993332 - DNA, 25 bp, Homo sapien
aatgcttagcatcccctcttccggg

SEQ ID NO: 4993333 - DNA, 25 bp, Homo sapien
gagctgctcaatgttatccggtaga

SEQ ID NO: 4993334 - DNA, 25 bp, Homo sapien
catggtgtgctgaaggcagttccta

SEQ ID NO: 4993335 - DNA, 25 bp, Homo sapien
tagtgattatataccgccactctgg

SEQ ID NO: 4993336 - DNA, 25 bp, Homo sapien
tcccaggatgttctaaataggacca

SEQ ID NO: 4993337 - DNA, 25 bp, Homo sapien
tcccacatagtaggagcatcccagg

SEQ ID NO: 4993338 - DNA, 25 bp, Homo sapien
tggctttggttaaggaacagcccac

SEQ ID NO: 4993339 - DNA, 25 bp, Homo sapien
ttcataatgtcctatggctttggtt

SEQ ID NO: 4993340 - DNA, 25 bp, Homo sapien
gggtccaagacgaatttcataatgt

SEQ ID NO: 4993341 - DNA, 25 bp, Homo sapien
cttcagttgtcacacgccagggtcc

SEQ ID NO: 4993342 - DNA, 25 bp, Homo sapien
gaggtttaggatggatccatagatt

SEQ ID NO: 4993343 - DNA, 25 bp, Homo sapien
agagaaagaggtttaggatggatcc

SEQ ID NO: 4993344 - DNA, 25 bp, Homo sapien
tttggtggtacttgaaatcagagga

SEQ ID NO: 4993345 - DNA, 25 bp, Homo sapien
tccatagatttggtggtacttgaaa

SEQ ID NO: 4993346 - DNA, 25 bp, Homo sapien
caggatgggatgaagattaacttga

SEQ ID NO: 4993347 - DNA, 25 bp, Homo sapien
ggatgaagattaacttgatgtttct

SEQ ID NO: 4993348 - DNA, 25 bp, Homo sapien
tgggatgaagattaacttgatgttt

SEQ ID NO: 4993349 - DNA, 25 bp, Homo sapien
ggatgggatgaagattaacttgatg

SEQ ID NO: 4993350 - DNA, 25 bp, Homo sapien
taatgaataatcgaagcaagaccca

SEQ ID NO: 4993351 - DNA, 25 bp, Homo sapien
aaatatggatgggtgacttagggcc

SEQ ID NO: 4993352 - DNA, 25 bp, Homo sapien
gagctgctggcggataaatatggat

SEQ ID NO: 4993353 - DNA, 25 bp, Homo sapien
ccttgccaattggtcagcttggagc

SEQ ID NO: 4993354 - DNA, 25 bp, Homo sapien
gggaaacgatggtctccatattgtt

SEQ ID NO: 4993355 - DNA, 25 bp, Homo sapien
actcatcagcatcgttattaatctt

SEQ ID NO: 4993356 - DNA, 25 bp, Homo sapien
tcagcatcgttattaatcttcttct

SEQ ID NO: 4993357 - DNA, 25 bp, Homo sapien
catattgttgacagaacacctcaaa

SEQ ID NO: 4993358 - DNA, 25 bp, Homo sapien
ctcatcccttcctataacatactgt

SEQ ID NO: 4993359 - DNA, 25 bp, Homo sapien
cctcatcccttcctataacatactg

SEQ ID NO: 4993360 - DNA, 25 bp, Homo sapien
cagccagaattctagagagtttgag

SEQ ID NO: 4993361 - DNA, 25 bp, Homo sapien
gattcttaagagaatagcaagccca

SEQ ID NO: 4993362 - DNA, 25 bp, Homo sapien
gagatgaaaagttccgtcagccaga

SEQ ID NO: 4993363 - DNA, 25 bp, Homo sapien
ggaagagggatttggccaaggcagc

SEQ ID NO: 4993364 - DNA, 25 bp, Homo sapien
gggatctggattcagaaggagaaac

SEQ ID NO: 4993365 - DNA, 25 bp, Homo sapien
tctgatgatagccatgagctctcag

SEQ ID NO: 4993366 - DNA, 25 bp, Homo sapien
tctcaggggatctggattcagaagg

SEQ ID NO: 4993367 - DNA, 25 bp, Homo sapien
gattcagaaggagaaaccttgaaag

SEQ ID NO: 4993368 - DNA, 25 bp, Homo sapien
ctggtggacaggcacgggtacaaat

SEQ ID NO: 4993369 - DNA, 25 bp, Homo sapien
tggtggacaggcacgggtacaaatc

SEQ ID NO: 4993370 - DNA, 25 bp, Homo sapien
tctggtggacaggcacgggtacaaa

SEQ ID NO: 4993371 - DNA, 25 bp, Homo sapien
cacatgttagcttcccttttgtggc

SEQ ID NO: 4993372 - DNA, 25 bp, Homo sapien
gtggagccaccgcttatcggaattc

SEQ ID NO: 4993373 - DNA, 25 bp, Homo sapien
gcttatcggaattccagaaactacc

SEQ ID NO: 4993374 - DNA, 25 bp, Homo sapien
tgagctgaatggagcgataccacac

SEQ ID NO: 4993375 - DNA, 25 bp, Homo sapien
cagcaccaacaagcgccctcactgt

SEQ ID NO: 4993376 - DNA, 25 bp, Homo sapien
tgtggctgttcatgataggcctcca

SEQ ID NO: 4993377 - DNA, 25 bp, Homo sapien
ccagggctccacgtacacagcccag

SEQ ID NO: 4993378 - DNA, 25 bp, Homo sapien
tctcagggttcctgttgtcatggtg

SEQ ID NO: 4993379 - DNA, 25 bp, Homo sapien
tatccaatggaaaaacgtgagtcac

SEQ ID NO: 4993380 - DNA, 25 bp, Homo sapien
gataacaggtgaatggagtctaacc

SEQ ID NO: 4993381 - DNA, 25 bp, Homo sapien
cagcgagtgctagtgatgacagaca

SEQ ID NO: 4993382 - DNA, 25 bp, Homo sapien
ggttcagccacaagcataatggagt

SEQ ID NO: 4993383 - DNA, 25 bp, Homo sapien
tgttcctcgtacaaacctacacttc

SEQ ID NO: 4993384 - DNA, 25 bp, Homo sapien
acagggtccgtaggtcaaagcagga

SEQ ID NO: 4993385 - DNA, 25 bp, Homo sapien
cagggtccgtaggtcaaagcaggaa

SEQ ID NO: 4993386 - DNA, 25 bp, Homo sapien
ttcctgttcctcgtacaaacctaca

SEQ ID NO: 4993387 - DNA, 25 bp, Homo sapien
cctcaagaccacccttttctgtatt

SEQ ID NO: 4993388 - DNA, 25 bp, Homo sapien
ctcaagaccacccttttctgtattt

SEQ ID NO: 4993389 - DNA, 25 bp, Homo sapien
tcaagaccacccttttctgtatttg

SEQ ID NO: 4993390 - DNA, 25 bp, Homo sapien
ccatgcataaggaggagtccaggaa

SEQ ID NO: 4993391 - DNA, 25 bp, Homo sapien
ggtttactacagaaaaggatataga

SEQ ID NO: 4993392 - DNA, 25 bp, Homo sapien
ggatatagattgcaatcaggaatgg

SEQ ID NO: 4993393 - DNA, 25 bp, Homo sapien
gactgacagttgtggtttactacag

SEQ ID NO: 4993394 - DNA, 25 bp, Homo sapien
ctcccctcttgttagatctcagtct

SEQ ID NO: 4993395 - DNA, 25 bp, Homo sapien
ggactgaaccctgagtcaccccaat

SEQ ID NO: 4993396 - DNA, 25 bp, Homo sapien
tgggaccctgaaacatgaggagaag

SEQ ID NO: 4993397 - DNA, 25 bp, Homo sapien
ttcagtggtatcagccacccaggaa

SEQ ID NO: 4993398 - DNA, 25 bp, Homo sapien
acgtgtgttctgcttgacacaaggt

SEQ ID NO: 4993399 - DNA, 25 bp, Homo sapien
gaacccctgcagtgactgtcaccag

SEQ ID NO: 4993400 - DNA, 25 bp, Homo sapien
gtgttctgcttgacacaaggtcctc

SEQ ID NO: 4993401 - DNA, 25 bp, Homo sapien
cctgaacccctgcagtgactgtcac

SEQ ID NO: 4993402 - DNA, 25 bp, Homo sapien
catcgaattgttcagcctaagagca

SEQ ID NO: 4993403 - DNA, 25 bp, Homo sapien
tttctgaggtatcacacagggaccc

SEQ ID NO: 4993404 - DNA, 25 bp, Homo sapien
gactaaatttgatggacacactgca

SEQ ID NO: 4993405 - DNA, 25 bp, Homo sapien
tcatgtagtacaaagccctgagaca

SEQ ID NO: 4993406 - DNA, 25 bp, Homo sapien
gcatgacccatatggatggctaaat

SEQ ID NO: 4993407 - DNA, 25 bp, Homo sapien
gcctcaactgggtcactacagcaaa

SEQ ID NO: 4993408 - DNA, 25 bp, Homo sapien
aaagaccatggttgttgctgagagg

SEQ ID NO: 4993409 - DNA, 25 bp, Homo sapien
cacatgtcagtgattaatgaatcca

SEQ ID NO: 4993410 - DNA, 25 bp, Homo sapien
ttacctagtctccttagaaatggag

SEQ ID NO: 4993411 - DNA, 25 bp, Homo sapien
cagacatcatatatgatatccttac

SEQ ID NO: 4993412 - DNA, 25 bp, Homo sapien
cattttatttacctagtctccttag

SEQ ID NO: 4993413 - DNA, 25 bp, Homo sapien
gtccccaactactcattcaaaagaa

SEQ ID NO: 4993414 - DNA, 25 bp, Homo sapien
ccagccatctgcatgacatgggtat

SEQ ID NO: 4993415 - DNA, 25 bp, Homo sapien
tagacatctcttattcgcccagcca

SEQ ID NO: 4993416 - DNA, 25 bp, Homo sapien
tggtcataatcacccctgataatat

SEQ ID NO: 4993417 - DNA, 25 bp, Homo sapien
taccagttggtgctcaaagtcaaac

SEQ ID NO: 4993418 - DNA, 25 bp, Homo sapien
tcatggatggcaaagccgccaggag

SEQ ID NO: 4993419 - DNA, 25 bp, Homo sapien
ggaagctaatctccttaaggtcaag

SEQ ID NO: 4993420 - DNA, 25 bp, Homo sapien
tttcctaaatgaattgcagcgaggc

SEQ ID NO: 4993421 - DNA, 25 bp, Homo sapien
gaaagtaatctggacctcctacgcc

SEQ ID NO: 4993422 - DNA, 25 bp, Homo sapien
cacacccaaggagatggaaccagaa

SEQ ID NO: 4993423 - DNA, 25 bp, Homo sapien
gagtttcccaagcttgcatgaattc

SEQ ID NO: 4993424 - DNA, 25 bp, Homo sapien
ttagtgtcttctgaccctaggagga

SEQ ID NO: 4993425 - DNA, 25 bp, Homo sapien
aggctttgaattactcgggctgcaa

SEQ ID NO: 4993426 - DNA, 25 bp, Homo sapien
gtggtgtcagttccggatgccacac

SEQ ID NO: 4993427 - DNA, 25 bp, Homo sapien
ctgtggtgtcagttccggatgccac

SEQ ID NO: 4993428 - DNA, 25 bp, Homo sapien
tgtggtgtcagttccggatgccaca

SEQ ID NO: 4993429 - DNA, 25 bp, Homo sapien
ggaaggctgcgtctctgctgtggtg

SEQ ID NO: 4993430 - DNA, 25 bp, Homo sapien
gaggcatcctgccatacctcgtgct

SEQ ID NO: 4993431 - DNA, 25 bp, Homo sapien
tatcagccggaaagatgaggcatcc

SEQ ID NO: 4993432 - DNA, 25 bp, Homo sapien
tgagcaccttgccttcctcccaggt

SEQ ID NO: 4993433 - DNA, 25 bp, Homo sapien
tccacgatgaatatcagccggaaag

SEQ ID NO: 4993434 - DNA, 25 bp, Homo sapien
catgtccagacttaagtgactccag

SEQ ID NO: 4993435 - DNA, 25 bp, Homo sapien
gcaaagaactagttttcaggccact

SEQ ID NO: 4993436 - DNA, 25 bp, Homo sapien
tgtagtcacgattcacctaaaaggg

SEQ ID NO: 4993437 - DNA, 25 bp, Homo sapien
ccaggttaaattcgagatgtatcac

SEQ ID NO: 4993438 - DNA, 25 bp, Homo sapien
taagcaccacctccagtgttatgag

SEQ ID NO: 4993439 - DNA, 25 bp, Homo sapien
cctggaacgtaaggacagaagtctc

SEQ ID NO: 4993440 - DNA, 25 bp, Homo sapien
tggcccacatgaccagctcctattt

SEQ ID NO: 4993441 - DNA, 25 bp, Homo sapien
aaagtactcactccaggctgtaagc

SEQ ID NO: 4993442 - DNA, 25 bp, Homo sapien
caccaatcggttcaacaaacaaatg

SEQ ID NO: 4993443 - DNA, 25 bp, Homo sapien
cattttccatatgggaaatgccatt

SEQ ID NO: 4993444 - DNA, 25 bp, Homo sapien
ccattttccatatgggaaatgccat

SEQ ID NO: 4993445 - DNA, 25 bp, Homo sapien
tttcaccaatcggttcaacaaacaa

SEQ ID NO: 4993446 - DNA, 25 bp, Homo sapien
catttcaggctagtaattggcaggc

SEQ ID NO: 4993447 - DNA, 25 bp, Homo sapien
gactcaggtttactcagctccggat

SEQ ID NO: 4993448 - DNA, 25 bp, Homo sapien
tacttgaggtctatggaggaaggcc

SEQ ID NO: 4993449 - DNA, 25 bp, Homo sapien
taatgctgaatctgcaggagagctc

SEQ ID NO: 4993450 - DNA, 25 bp, Homo sapien
tcaggctactgaagactaggctcag

SEQ ID NO: 4993451 - DNA, 25 bp, Homo sapien
gctactgaagactaggctcagttcc

SEQ ID NO: 4993452 - DNA, 25 bp, Homo sapien
ttctgcatcaggctactgaagacta

SEQ ID NO: 4993453 - DNA, 25 bp, Homo sapien
ggctgccacacccattcttccaatc

SEQ ID NO: 4993454 - DNA, 25 bp, Homo sapien
gatatgacggataacagaggaccca

SEQ ID NO: 4993455 - DNA, 25 bp, Homo sapien
caatgcataacatctgcagggctca

SEQ ID NO: 4993456 - DNA, 25 bp, Homo sapien
gggcaatgtctccaggctaatagaa

SEQ ID NO: 4993457 - DNA, 25 bp, Homo sapien
caactagataagtactctgccgaga

SEQ ID NO: 4993458 - DNA, 25 bp, Homo sapien
cccggggtgcatgatggaatatttg

SEQ ID NO: 4993459 - DNA, 25 bp, Homo sapien
gtctcgttggcacatcgaatcttgc

SEQ ID NO: 4993460 - DNA, 25 bp, Homo sapien
cgttggcacatcgaatcttgcagcc

SEQ ID NO: 4993461 - DNA, 25 bp, Homo sapien
tgtgtgcggccacacgtgagtcccg

SEQ ID NO: 4993462 - DNA, 25 bp, Homo sapien
gtacaggttttaggagctcctttgc

SEQ ID NO: 4993463 - DNA, 25 bp, Homo sapien
tgcatcctgttgtctcggggaactt

SEQ ID NO: 4993464 - DNA, 25 bp, Homo sapien
caggttttaggagctcctttgcagg

SEQ ID NO: 4993465 - DNA, 25 bp, Homo sapien
aggttttaggagctcctttgcaggc

SEQ ID NO: 4993466 - DNA, 25 bp, Homo sapien
cactagaagcatggaatcacaaacc

SEQ ID NO: 4993467 - DNA, 25 bp, Homo sapien
ccccactagaagcatggaatcacaa

SEQ ID NO: 4993468 - DNA, 25 bp, Homo sapien
gcatggaatcacaaaccaaagacca

SEQ ID NO: 4993469 - DNA, 25 bp, Homo sapien
gattcccccactagaagcatggaat

SEQ ID NO: 4993470 - DNA, 25 bp, Homo sapien
gccacagcgtgaactggctccagtc

SEQ ID NO: 4993471 - DNA, 25 bp, Homo sapien
ttccctcaggttttcatcctcaggc

SEQ ID NO: 4993472 - DNA, 25 bp, Homo sapien
gccttcatctcggattaacttccag

SEQ ID NO: 4993473 - DNA, 25 bp, Homo sapien
ggttttcatcctcaggcaggaagag

SEQ ID NO: 4993474 - DNA, 25 bp, Homo sapien
ttgcaaggtgcttagagagcaacat

SEQ ID NO: 4993475 - DNA, 25 bp, Homo sapien
caggagcacttgcaaggtgcttaga

SEQ ID NO: 4993476 - DNA, 25 bp, Homo sapien
gagcacttgcaaggtgcttagagag

SEQ ID NO: 4993477 - DNA, 25 bp, Homo sapien
cacttgcaaggtgcttagagagcaa

SEQ ID NO: 4993478 - DNA, 25 bp, Homo sapien
cctggtgagcgccctgcagagggca

SEQ ID NO: 4993479 - DNA, 25 bp, Homo sapien
gctccctggtgagcgccctgcagag

SEQ ID NO: 4993480 - DNA, 25 bp, Homo sapien
ctggtgagcgccctgcagagggcat

SEQ ID NO: 4993481 - DNA, 25 bp, Homo sapien
tccctggtgagcgccctgcagaggg

SEQ ID NO: 4993482 - DNA, 25 bp, Homo sapien
ataacttttagtgttgctgttggaa

SEQ ID NO: 4993483 - DNA, 25 bp, Homo sapien
gcatgtttggagatctgactctgcc

SEQ ID NO: 4993484 - DNA, 25 bp, Homo sapien
tctcaagaggccctttaagaattaa

SEQ ID NO: 4993485 - DNA, 25 bp, Homo sapien
gctttataggagtcaggatagtata

SEQ ID NO: 4993486 - DNA, 25 bp, Homo sapien
caagtagagaccgttaaagttcagg

SEQ ID NO: 4993487 - DNA, 25 bp, Homo sapien
cctgaagccatctaacctgtaagat

SEQ ID NO: 4993488 - DNA, 25 bp, Homo sapien
gagtctgaggtcaaaaccctgaagc

SEQ ID NO: 4993489 - DNA, 25 bp, Homo sapien
taaacttctgaccagtccctaccaa

SEQ ID NO: 4993490 - DNA, 25 bp, Homo sapien
actctgtgtagcccgtttcttttgg

SEQ ID NO: 4993491 - DNA, 25 bp, Homo sapien
tcttgtgcccaagctcataccactt

SEQ ID NO: 4993492 - DNA, 25 bp, Homo sapien
aaggctgtgctttcagtccattcac

SEQ ID NO: 4993493 - DNA, 25 bp, Homo sapien
tagagtgagcgttgccagacagatg

SEQ ID NO: 4993494 - DNA, 25 bp, Homo sapien
cctctttcagagttggagcagtgct

SEQ ID NO: 4993495 - DNA, 25 bp, Homo sapien
cacagaggctgtggctttgcttttt

SEQ ID NO: 4993496 - DNA, 25 bp, Homo sapien
gctttttgcagatccatcctctttc

SEQ ID NO: 4993497 - DNA, 25 bp, Homo sapien
aacccattttcttgtcagtctctgc

SEQ ID NO: 4993498 - DNA, 25 bp, Homo sapien
ctttttgcccttgaagtaacggctg

SEQ ID NO: 4993499 - DNA, 25 bp, Homo sapien
ccaagcccttaacaagtgtatagta

SEQ ID NO: 4993500 - DNA, 25 bp, Homo sapien
gtgtatagtaatgaactttttgccc

SEQ ID NO: 4993501 - DNA, 25 bp, Homo sapien
agatgtgagataaatcataggcttc

SEQ ID NO: 4993502 - DNA, 25 bp, Homo sapien
tttgttcccaaccctctgcatggca

SEQ ID NO: 4993503 - DNA, 25 bp, Homo sapien
tgttcccaaccctctgcatggcatc

SEQ ID NO: 4993504 - DNA, 25 bp, Homo sapien
tctttgttcccaaccctctgcatgg

SEQ ID NO: 4993505 - DNA, 25 bp, Homo sapien
ttgttcccaaccctctgcatggcat

SEQ ID NO: 4993506 - DNA, 25 bp, Homo sapien
tcaggatgaagccataatggacttt

SEQ ID NO: 4993507 - DNA, 25 bp, Homo sapien
aaagccatcattaggtgtcacactc

SEQ ID NO: 4993508 - DNA, 25 bp, Homo sapien
ggatgctctcagcaattttgttctg

SEQ ID NO: 4993509 - DNA, 25 bp, Homo sapien
ctttaaatatgggatgctctcagca

SEQ ID NO: 4993510 - DNA, 25 bp, Homo sapien
caacttctttaccttgtctcacttt

SEQ ID NO: 4993511 - DNA, 25 bp, Homo sapien
cattacccgcattactaaaactgaa

SEQ ID NO: 4993512 - DNA, 25 bp, Homo sapien
acagcaagccaaagatacccctgcc

SEQ ID NO: 4993513 - DNA, 25 bp, Homo sapien
tagcacttatcaccgtctgacctag

SEQ ID NO: 4993514 - DNA, 25 bp, Homo sapien
tcactgaggtatatgatgcttctct

SEQ ID NO: 4993515 - DNA, 25 bp, Homo sapien
tatatgatgcttctcttaaccatac

SEQ ID NO: 4993516 - DNA, 25 bp, Homo sapien
acagaccctgattcactgaggtata

SEQ ID NO: 4993517 - DNA, 25 bp, Homo sapien
cagaccctgattcactgaggtatat

SEQ ID NO: 4993518 - DNA, 25 bp, Homo sapien
tcattgggaaatagttgaactaatc

SEQ ID NO: 4993519 - DNA, 25 bp, Homo sapien
taaggaagtatcattgggaaatagt

SEQ ID NO: 4993520 - DNA, 25 bp, Homo sapien
atcaagaggtatcccacgccaaggt

SEQ ID NO: 4993521 - DNA, 25 bp, Homo sapien
cctatcaagaggtatcccacgccaa

SEQ ID NO: 4993522 - DNA, 25 bp, Homo sapien
gggtaagcagggaacctctcatatg

SEQ ID NO: 4993523 - DNA, 25 bp, Homo sapien
gtaagcagggaacctctcatatgac

SEQ ID NO: 4993524 - DNA, 25 bp, Homo sapien
ctgcagggtaagcagggaacctctc

SEQ ID NO: 4993525 - DNA, 25 bp, Homo sapien
gcagggtaagcagggaacctctcat

SEQ ID NO: 4993526 - DNA, 25 bp, Homo sapien
taactaacttcagggtctagcaccc

SEQ ID NO: 4993527 - DNA, 25 bp, Homo sapien
gggccctctcgtggacaaaggcata

SEQ ID NO: 4993528 - DNA, 25 bp, Homo sapien
gaacatgtgcaaaaagaggactagc

SEQ ID NO: 4993529 - DNA, 25 bp, Homo sapien
tagttgcccacaatctaggagagtg

SEQ ID NO: 4993530 - DNA, 25 bp, Homo sapien
caaaccatctgccataaagcatcac

SEQ ID NO: 4993531 - DNA, 25 bp, Homo sapien
aaagcatcaccaactcatccgacgg

SEQ ID NO: 4993532 - DNA, 25 bp, Homo sapien
tgccataaagcatcaccaactcatc

SEQ ID NO: 4993533 - DNA, 25 bp, Homo sapien
catctgccataaagcatcaccaact

SEQ ID NO: 4993534 - DNA, 25 bp, Homo sapien
cagggacatcaggtaggctggccac

SEQ ID NO: 4993535 - DNA, 25 bp, Homo sapien
tggccacctcttggtaggtctcgat

SEQ ID NO: 4993536 - DNA, 25 bp, Homo sapien
gatggctccacgtagcacctcatta

SEQ ID NO: 4993537 - DNA, 25 bp, Homo sapien
gaaattgttgcctgtctgagcgacg

SEQ ID NO: 4993538 - DNA, 25 bp, Homo sapien
gagcatctggatctcaagtggtcac

SEQ ID NO: 4993539 - DNA, 25 bp, Homo sapien
tggtctgtaccatggacaagaggaa

SEQ ID NO: 4993540 - DNA, 25 bp, Homo sapien
tttaatggagatataagaagatact

SEQ ID NO: 4993541 - DNA, 25 bp, Homo sapien
ccatggacaagaggaatttatttga

SEQ ID NO: 4993542 - DNA, 25 bp, Homo sapien
tgtgtgtgtcctgtacaaatgtctg

SEQ ID NO: 4993543 - DNA, 25 bp, Homo sapien
ctgtgtgtgtcctgtacaaatgtct

SEQ ID NO: 4993544 - DNA, 25 bp, Homo sapien
tgtgtgtcctgtacaaatgtctgca

SEQ ID NO: 4993545 - DNA, 25 bp, Homo sapien
gtgtgtgtcctgtacaaatgtctgc

SEQ ID NO: 4993546 - DNA, 25 bp, Homo sapien
tctccataggggtgctgtcagcatc

SEQ ID NO: 4993547 - DNA, 25 bp, Homo sapien
ttctccataggggtgctgtcagcat

SEQ ID NO: 4993548 - DNA, 25 bp, Homo sapien
cttctccataggggtgctgtcagca

SEQ ID NO: 4993549 - DNA, 25 bp, Homo sapien
catcaaaaaagtgtcctaaggagaa

SEQ ID NO: 4993550 - DNA, 25 bp, Homo sapien
tttcttgcttatgcatatacatgag

SEQ ID NO: 4993551 - DNA, 25 bp, Homo sapien
atttcttgcttatgcatatacatga

SEQ ID NO: 4993552 - DNA, 25 bp, Homo sapien
ttcttgcttatgcatatacatgaga

SEQ ID NO: 4993553 - DNA, 25 bp, Homo sapien
ctcgtggactctgagggtatttgcg

SEQ ID NO: 4993554 - DNA, 25 bp, Homo sapien
tttgcgtactagttctttaaatgca

SEQ ID NO: 4993555 - DNA, 25 bp, Homo sapien
tcccatatcttgctcgtggactctg

SEQ ID NO: 4993556 - DNA, 25 bp, Homo sapien
tgcgccttcccatatcttgctcgtg

SEQ ID NO: 4993557 - DNA, 25 bp, Homo sapien
gagcccccttgtcctggaggtggac

SEQ ID NO: 4993558 - DNA, 25 bp, Homo sapien
ttgtcctggaggtggaccccaacat

SEQ ID NO: 4993559 - DNA, 25 bp, Homo sapien
cttgtcctggaggtggaccccaaca

SEQ ID NO: 4993560 - DNA, 25 bp, Homo sapien
tgagcccccttgtcctggaggtgga

SEQ ID NO: 4993561 - DNA, 25 bp, Homo sapien
tacgaaaaggagatccgggagctgc

SEQ ID NO: 4993562 - DNA, 25 bp, Homo sapien
tgccaaccaaagacgggctgaggct

SEQ ID NO: 4993563 - DNA, 25 bp, Homo sapien
gacctgtggcgcacaaagactgaga

SEQ ID NO: 4993564 - DNA, 25 bp, Homo sapien
ggtcaaggcacagtacgaggatatt

SEQ ID NO: 4993565 - DNA, 25 bp, Homo sapien
tatcctgagtaatggactgacctag

SEQ ID NO: 4993566 - DNA, 25 bp, Homo sapien
cttgcacttctatgatacttgacag

SEQ ID NO: 4993567 - DNA, 25 bp, Homo sapien
aactggaggtgcatgaggttaaccc

SEQ ID NO: 4993568 - DNA, 25 bp, Homo sapien
ttcatctaccaattactatcctgag

SEQ ID NO: 4993569 - DNA, 25 bp, Homo sapien
cagctttaatagtcttatcaaattt

SEQ ID NO: 4993570 - DNA, 25 bp, Homo sapien
tctgcagcatcaagttcagctttaa

SEQ ID NO: 4993571 - DNA, 25 bp, Homo sapien
ctgcagcatcaagttcagctttaat

SEQ ID NO: 4993572 - DNA, 25 bp, Homo sapien
ctttaatagtcttatcaaatttatt

SEQ ID NO: 4993573 - DNA, 25 bp, Homo sapien
ggtgtagatattgctcagggatccc

SEQ ID NO: 4993574 - DNA, 25 bp, Homo sapien
tttttcgagagagggtatacacact

SEQ ID NO: 4993575 - DNA, 25 bp, Homo sapien
tatacacactgactacaaaagggca

SEQ ID NO: 4993576 - DNA, 25 bp, Homo sapien
catcttgagctcttgcacagttgca

SEQ ID NO: 4993577 - DNA, 25 bp, Homo sapien
taaatttgggcaactcttgaaagac

SEQ ID NO: 4993578 - DNA, 25 bp, Homo sapien
gaaacccaatatgcagacagccatg

SEQ ID NO: 4993579 - DNA, 25 bp, Homo sapien
taccaaggatggcacactctttctt

SEQ ID NO: 4993580 - DNA, 25 bp, Homo sapien
ggtattccctactgtgatgcctcac

SEQ ID NO: 4993581 - DNA, 25 bp, Homo sapien
tctaagcccagcttgcatcagtgtc

SEQ ID NO: 4993582 - DNA, 25 bp, Homo sapien
catagttttaggtatccaccaaggg

SEQ ID NO: 4993583 - DNA, 25 bp, Homo sapien
ggaaagtatcccatatggacaagga

SEQ ID NO: 4993584 - DNA, 25 bp, Homo sapien
tgtaaagattagtacaggaatcccc

SEQ ID NO: 4993585 - DNA, 25 bp, Homo sapien
gacatggtgcaagccgcctggcttt

SEQ ID NO: 4993586 - DNA, 25 bp, Homo sapien
tagcccatgacacccaagttaagta

SEQ ID NO: 4993587 - DNA, 25 bp, Homo sapien
tttgctttcagagcgctccacagag

SEQ ID NO: 4993588 - DNA, 25 bp, Homo sapien
ggctttcaccagacgcaaatgagtc

SEQ ID NO: 4993589 - DNA, 25 bp, Homo sapien
caaagtttcatagacctgtgggaca

SEQ ID NO: 4993590 - DNA, 25 bp, Homo sapien
tcatgcccagactaaaaataaacaa

SEQ ID NO: 4993591 - DNA, 25 bp, Homo sapien
tgcttaactcataagattgatgggt

SEQ ID NO: 4993592 - DNA, 25 bp, Homo sapien
tttaattataggcacagaagtaggg

SEQ ID NO: 4993593 - DNA, 25 bp, Homo sapien
gctttttgttctggatcatctgttt

SEQ ID NO: 4993594 - DNA, 25 bp, Homo sapien
ttttgttctggatcatctgtttttc

SEQ ID NO: 4993595 - DNA, 25 bp, Homo sapien
tgttctggatcatctgtttttctat

SEQ ID NO: 4993596 - DNA, 25 bp, Homo sapien
ttgttctggatcatctgtttttcta

SEQ ID NO: 4993597 - DNA, 25 bp, Homo sapien
cctagtgggatcagcagtacctgca

SEQ ID NO: 4993598 - DNA, 25 bp, Homo sapien
tcttcctagtgggatcagcagtacc

SEQ ID NO: 4993599 - DNA, 25 bp, Homo sapien
cacatttgtagtcatcggagataca

SEQ ID NO: 4993600 - DNA, 25 bp, Homo sapien
gtagtcatcggagatacagcaatga

SEQ ID NO: 4993601 - DNA, 25 bp, Homo sapien
ggaattcattaactaaagggagcta

SEQ ID NO: 4993602 - DNA, 25 bp, Homo sapien
agcccatccctgaaaattacaaaag

SEQ ID NO: 4993603 - DNA, 25 bp, Homo sapien
agcaaatcgctttggtggattcaga

SEQ ID NO: 4993604 - DNA, 25 bp, Homo sapien
gatgttacactactctttacctgtc

SEQ ID NO: 4993605 - DNA, 25 bp, Homo sapien
gcttcctggcaatgtagcatgatag

SEQ ID NO: 4993606 - DNA, 25 bp, Homo sapien
ccagggaataatcaaaacttctagg

SEQ ID NO: 4993607 - DNA, 25 bp, Homo sapien
gctttggaatcaacttaagggtctg

SEQ ID NO: 4993608 - DNA, 25 bp, Homo sapien
tagaaatacgttaactggctgaagg

SEQ ID NO: 4993609 - DNA, 25 bp, Homo sapien
taatgaatcctcaacgtccagagtt

SEQ ID NO: 4993610 - DNA, 25 bp, Homo sapien
tgttaacaaaatcaagagctacccc

SEQ ID NO: 4993611 - DNA, 25 bp, Homo sapien
gaaaatccaccgatgttgcacaatg

SEQ ID NO: 4993612 - DNA, 25 bp, Homo sapien
tacacatcgagtacccatgcaggac

SEQ ID NO: 4993613 - DNA, 25 bp, Homo sapien
agaagaaaatcttcagtgtagaaag

SEQ ID NO: 4993614 - DNA, 25 bp, Homo sapien
atcttcagtgtagaaagaaaaaggc

SEQ ID NO: 4993615 - DNA, 25 bp, Homo sapien
agaaaatcttcagtgtagaaagaaa

SEQ ID NO: 4993616 - DNA, 25 bp, Homo sapien
tcttcagtgtagaaagaaaaaggct

SEQ ID NO: 4993617 - DNA, 25 bp, Homo sapien
tgccgtgaaatagcagcaggcatcg

SEQ ID NO: 4993618 - DNA, 25 bp, Homo sapien
tgaaatagcagcaggcatcgggctc

SEQ ID NO: 4993619 - DNA, 25 bp, Homo sapien
aatagcagcaggcatcgggctctgt

SEQ ID NO: 4993620 - DNA, 25 bp, Homo sapien
tagcagcaggcatcgggctctgtga

SEQ ID NO: 4993621 - DNA, 25 bp, Homo sapien
gaaaaccctgccaacacaattgctg

SEQ ID NO: 4993622 - DNA, 25 bp, Homo sapien
cactgagcggtctctagtgctggag

SEQ ID NO: 4993623 - DNA, 25 bp, Homo sapien
gattaatctgaggtgccaacaaagc

SEQ ID NO: 4993624 - DNA, 25 bp, Homo sapien
gaattactcaattagccaaaggcag

SEQ ID NO: 4993625 - DNA, 25 bp, Homo sapien
cacaaggacatctgggaggctaacc

SEQ ID NO: 4993626 - DNA, 25 bp, Homo sapien
aatcatgtatcttcactggccagca

SEQ ID NO: 4993627 - DNA, 25 bp, Homo sapien
agtgctgacactacatgcgtgaacc

SEQ ID NO: 4993628 - DNA, 25 bp, Homo sapien
tcctctgagaagagacacttgccta

SEQ ID NO: 4993629 - DNA, 25 bp, Homo sapien
gcactgccagctgtattaaagcaaa

SEQ ID NO: 4993630 - DNA, 25 bp, Homo sapien
tacggccatgtgtcatgtagcaatg

SEQ ID NO: 4993631 - DNA, 25 bp, Homo sapien
tgaaaaatggcaaggaggtaggccc

SEQ ID NO: 4993632 - DNA, 25 bp, Homo sapien
tcaatcgtcaattaggttccaaggg

SEQ ID NO: 4993633 - DNA, 25 bp, Homo sapien
tgtaagctctactcatgaagtgccc

SEQ ID NO: 4993634 - DNA, 25 bp, Homo sapien
gacacactctcagtctgtagccttg

SEQ ID NO: 4993635 - DNA, 25 bp, Homo sapien
gatgttcatacgtggacaaagtcac

SEQ ID NO: 4993636 - DNA, 25 bp, Homo sapien
cacatgactgtattgctgactctca

SEQ ID NO: 4993637 - DNA, 25 bp, Homo sapien
gtcatgctcgtcaactgagcatgca

SEQ ID NO: 4993638 - DNA, 25 bp, Homo sapien
gggacggtcatgctcgtcaactgag

SEQ ID NO: 4993639 - DNA, 25 bp, Homo sapien
tacaacttctccatgaggtctttca

SEQ ID NO: 4993640 - DNA, 25 bp, Homo sapien
tatggtaccaagttacaggttacaa

SEQ ID NO: 4993641 - DNA, 25 bp, Homo sapien
ctaaacaatagtcatagccaaaact

SEQ ID NO: 4993642 - DNA, 25 bp, Homo sapien
tactgggagcttattataggtcggg

SEQ ID NO: 4993643 - DNA, 25 bp, Homo sapien
aaaagcaccttattccatcacctca

SEQ ID NO: 4993644 - DNA, 25 bp, Homo sapien
tctacctctaagatcaggctaatta

SEQ ID NO: 4993645 - DNA, 25 bp, Homo sapien
tatgtaatgcagtgaactaaaagga

SEQ ID NO: 4993646 - DNA, 25 bp, Homo sapien
gtatgtaatgcagtgaactaaaagg

SEQ ID NO: 4993647 - DNA, 25 bp, Homo sapien
actattcaactttcatcccaaggca

SEQ ID NO: 4993648 - DNA, 25 bp, Homo sapien
gtaatgtcacaatttatacactatt

SEQ ID NO: 4993649 - DNA, 25 bp, Homo sapien
ttcttccacaggaaaaatgcttact

SEQ ID NO: 4993650 - DNA, 25 bp, Homo sapien
cctgctgttcttccacaggaaaaat

SEQ ID NO: 4993651 - DNA, 25 bp, Homo sapien
tgttcttccacaggaaaaatgctta

SEQ ID NO: 4993652 - DNA, 25 bp, Homo sapien
tgctgttcttccacaggaaaaatgc

SEQ ID NO: 4993653 - DNA, 25 bp, Homo sapien
tgaatcttctacaggattatcctca

SEQ ID NO: 4993654 - DNA, 25 bp, Homo sapien
ctgtgaatcttctacaggattatcc

SEQ ID NO: 4993655 - DNA, 25 bp, Homo sapien
tacaggattatcctcagggggagca

SEQ ID NO: 4993656 - DNA, 25 bp, Homo sapien
ggattatcctcagggggagcagtta

SEQ ID NO: 4993657 - DNA, 25 bp, Homo sapien
tttctatcccttcattttctagagg

SEQ ID NO: 4993658 - DNA, 25 bp, Homo sapien
gagatgtgatgcacggaaagaccca

SEQ ID NO: 4993659 - DNA, 25 bp, Homo sapien
acatggttctcagtagcgcagggca

SEQ ID NO: 4993660 - DNA, 25 bp, Homo sapien
tgctcaaaggtgaagatgaacgtcc

SEQ ID NO: 4993661 - DNA, 25 bp, Homo sapien
gttccagctaaagtcacccgttgag

SEQ ID NO: 4993662 - DNA, 25 bp, Homo sapien
tcctcatagacttggtatgttacat

SEQ ID NO: 4993663 - DNA, 25 bp, Homo sapien
gttcctcatagacttggtatgttac

SEQ ID NO: 4993664 - DNA, 25 bp, Homo sapien
tgttcctcatagacttggtatgtta

SEQ ID NO: 4993665 - DNA, 25 bp, Homo sapien
cttgttcctcatagacttggtatgt

SEQ ID NO: 4993666 - DNA, 25 bp, Homo sapien
gcaatctttcatcttctactactgg

SEQ ID NO: 4993667 - DNA, 25 bp, Homo sapien
ggtgcaatctttcatcttctactac

SEQ ID NO: 4993668 - DNA, 25 bp, Homo sapien
catggtgcaatctttcatcttctac

SEQ ID NO: 4993669 - DNA, 25 bp, Homo sapien
ctgtatcatggtgcaatctttcatc

SEQ ID NO: 4993670 - DNA, 25 bp, Homo sapien
catatcaataattttaacatttaca

SEQ ID NO: 4993671 - DNA, 25 bp, Homo sapien
tatcaataattttaacatttacaaa

SEQ ID NO: 4993672 - DNA, 25 bp, Homo sapien
cacatatcaataattttaacattta

SEQ ID NO: 4993673 - DNA, 25 bp, Homo sapien
acatatcaataattttaacatttac

SEQ ID NO: 4993674 - DNA, 25 bp, Homo sapien
tccatatcctgattacagtcttgtg

SEQ ID NO: 4993675 - DNA, 25 bp, Homo sapien
tcatctcttccatatcctgattaca

SEQ ID NO: 4993676 - DNA, 25 bp, Homo sapien
tctcttccatatcctgattacagtc

SEQ ID NO: 4993677 - DNA, 25 bp, Homo sapien
cttccatatcctgattacagtcttg

SEQ ID NO: 4993678 - DNA, 25 bp, Homo sapien
tcaggaactaggcatcaaaacacaa

SEQ ID NO: 4993679 - DNA, 25 bp, Homo sapien
gacctttcgttgactctgtaattga

SEQ ID NO: 4993680 - DNA, 25 bp, Homo sapien
taagggcgctggcatgtgacaaaac

SEQ ID NO: 4993681 - DNA, 25 bp, Homo sapien
tttacactcaaaccgcaaaacagta

SEQ ID NO: 4993682 - DNA, 25 bp, Homo sapien
tccacgtggtaactatgctcggttt

SEQ ID NO: 4993683 - DNA, 25 bp, Homo sapien
ctgtctcttccacgtggtaactatg

SEQ ID NO: 4993684 - DNA, 25 bp, Homo sapien
tctcttccacgtggtaactatgctc

SEQ ID NO: 4993685 - DNA, 25 bp, Homo sapien
tcttccacgtggtaactatgctcgg

SEQ ID NO: 4993686 - DNA, 25 bp, Homo sapien
gggtctcaaatctatcatctacatc

SEQ ID NO: 4993687 - DNA, 25 bp, Homo sapien
tcgccataagaaactcatcatcctc

SEQ ID NO: 4993688 - DNA, 25 bp, Homo sapien
tgttgtggttctcctgtgggtccat

SEQ ID NO: 4993689 - DNA, 25 bp, Homo sapien
tatcatctacatcagtcgccataag

SEQ ID NO: 4993690 - DNA, 25 bp, Homo sapien
cttcttgttgcaagtcttctccctc

SEQ ID NO: 4993691 - DNA, 25 bp, Homo sapien
tcttgttgcaagtcttctccctcaa

SEQ ID NO: 4993692 - DNA, 25 bp, Homo sapien
ttcttgttgcaagtcttctccctca

SEQ ID NO: 4993693 - DNA, 25 bp, Homo sapien
aagtgacactggcaacatacaactg

SEQ ID NO: 4993694 - DNA, 25 bp, Homo sapien
tttcggccgctgaagacaccattgt

SEQ ID NO: 4993695 - DNA, 25 bp, Homo sapien
tcctttcggccgctgaagacaccat

SEQ ID NO: 4993696 - DNA, 25 bp, Homo sapien
agtgacactggcaacatacaactga

SEQ ID NO: 4993697 - DNA, 25 bp, Homo sapien
tgagtaagacctgaagagcttccca

SEQ ID NO: 4993698 - DNA, 25 bp, Homo sapien
cagcactggcctggtgaaggtctac

SEQ ID NO: 4993699 - DNA, 25 bp, Homo sapien
agccattctgaactactttcaggtc

SEQ ID NO: 4993700 - DNA, 25 bp, Homo sapien
tacatattccacgtgccagccattc

SEQ ID NO: 4993701 - DNA, 25 bp, Homo sapien
tgttctgcgtgtaccatttcatgga

SEQ ID NO: 4993702 - DNA, 25 bp, Homo sapien
gttctgcgtgtaccatttcatggag

SEQ ID NO: 4993703 - DNA, 25 bp, Homo sapien
catgttctgcgtgtaccatttcatg

SEQ ID NO: 4993704 - DNA, 25 bp, Homo sapien
tctgcgtgtaccatttcatggagaa

SEQ ID NO: 4993705 - DNA, 25 bp, Homo sapien
tgctggctctgaagtagatctctct

SEQ ID NO: 4993706 - DNA, 25 bp, Homo sapien
cagcctcttctggcgggactgctgg

SEQ ID NO: 4993707 - DNA, 25 bp, Homo sapien
tcagcctcttctggcgggactgctg

SEQ ID NO: 4993708 - DNA, 25 bp, Homo sapien
gctggctctgaagtagatctctctt

SEQ ID NO: 4993709 - DNA, 25 bp, Homo sapien
cgtatttctgctccagcatccacca

SEQ ID NO: 4993710 - DNA, 25 bp, Homo sapien
agatccgtatttctgctccagcatc

SEQ ID NO: 4993711 - DNA, 25 bp, Homo sapien
gtatttctgctccagcatccaccat

SEQ ID NO: 4993712 - DNA, 25 bp, Homo sapien
cagagatccgtatttctgctccagc

SEQ ID NO: 4993713 - DNA, 25 bp, Homo sapien
taaagatctaaactgcctgaaaacc

SEQ ID NO: 4993714 - DNA, 25 bp, Homo sapien
ctgtgttccgtgtgttatacaagca

SEQ ID NO: 4993715 - DNA, 25 bp, Homo sapien
tgaaatgttttctcaccaaacgata

SEQ ID NO: 4993716 - DNA, 25 bp, Homo sapien
ctcaaactgtgttccgtgtgttata

SEQ ID NO: 4993717 - DNA, 25 bp, Homo sapien
tgtgcccaggcaaacttagaaggta

SEQ ID NO: 4993718 - DNA, 25 bp, Homo sapien
cagacaaggcgatgtccagaagcaa

SEQ ID NO: 4993719 - DNA, 25 bp, Homo sapien
taactaaacaagaagtgcggaggcg

SEQ ID NO: 4993720 - DNA, 25 bp, Homo sapien
gataacatgtgaacagaccctgaag

SEQ ID NO: 4993721 - DNA, 25 bp, Homo sapien
cagtgaatacagatcttcctcagta

SEQ ID NO: 4993722 - DNA, 25 bp, Homo sapien
tcagtataccaacagcagtctcgga

SEQ ID NO: 4993723 - DNA, 25 bp, Homo sapien
aaggttcccaagagcctggtttcag

SEQ ID NO: 4993724 - DNA, 25 bp, Homo sapien
catgatatgcagtaagagccattcc

SEQ ID NO: 4993725 - DNA, 25 bp, Homo sapien
cacattcaggagcacgttctaggca

SEQ ID NO: 4993726 - DNA, 25 bp, Homo sapien
gactagtgggctgtactgacaatcg

SEQ ID NO: 4993727 - DNA, 25 bp, Homo sapien
gagataaatcgtagtctggcagcaa

SEQ ID NO: 4993728 - DNA, 25 bp, Homo sapien
catttcactggagggattgcagcca

SEQ ID NO: 4993729 - DNA, 25 bp, Homo sapien
tttagattcaaggagcacgtgcaag

SEQ ID NO: 4993730 - DNA, 25 bp, Homo sapien
gcccaagctaggtttttcatgaaaa

SEQ ID NO: 4993731 - DNA, 25 bp, Homo sapien
gccaaggaataaacatccagcttat

SEQ ID NO: 4993732 - DNA, 25 bp, Homo sapien
caacagtttaaaagtgggcactcac

SEQ ID NO: 4993733 - DNA, 25 bp, Homo sapien
tgttcaagcacctagatccagcata

SEQ ID NO: 4993734 - DNA, 25 bp, Homo sapien
gatttaacaccatggatgtaaccaa

SEQ ID NO: 4993735 - DNA, 25 bp, Homo sapien
atatattcctaatatcccaaggcag

SEQ ID NO: 4993736 - DNA, 25 bp, Homo sapien
tactcctgggctttacaattatgtg

SEQ ID NO: 4993737 - DNA, 25 bp, Homo sapien
gggaaactgaatgcccaaccatgtg

SEQ ID NO: 4993738 - DNA, 25 bp, Homo sapien
ccctgactgagacgttttggttgag

SEQ ID NO: 4993739 - DNA, 25 bp, Homo sapien
gcaacattgactggttctcacaacc

SEQ ID NO: 4993740 - DNA, 25 bp, Homo sapien
gatagagcctaagtcaccagatcca

SEQ ID NO: 4993741 - DNA, 25 bp, Homo sapien
tcaataaagcaaccacctacagaat

SEQ ID NO: 4993742 - DNA, 25 bp, Homo sapien
gagacgatcatctatatacaatgca

SEQ ID NO: 4993743 - DNA, 25 bp, Homo sapien
ttacaaacttgcatagctaagcagg

SEQ ID NO: 4993744 - DNA, 25 bp, Homo sapien
gctaagcaggtcataatacaaaata

SEQ ID NO: 4993745 - DNA, 25 bp, Homo sapien
tcattcacatacgaagccattagaa

SEQ ID NO: 4993746 - DNA, 25 bp, Homo sapien
aattagatgacacaacaaatgacca

SEQ ID NO: 4993747 - DNA, 25 bp, Homo sapien
tcctggaaaaattgattagcactca

SEQ ID NO: 4993748 - DNA, 25 bp, Homo sapien
caaaagagtggctaccaatgacgtt

SEQ ID NO: 4993749 - DNA, 25 bp, Homo sapien
aagttagtgccctgtatctgccaaa

SEQ ID NO: 4993750 - DNA, 25 bp, Homo sapien
ttgatgaagtttgagtgggacccac

SEQ ID NO: 4993751 - DNA, 25 bp, Homo sapien
taaactagagactggtctggagcct

SEQ ID NO: 4993752 - DNA, 25 bp, Homo sapien
tatcaggttacaatatcttcaggcc

SEQ ID NO: 4993753 - DNA, 25 bp, Homo sapien
tggccacagttctcggagcagtgta

SEQ ID NO: 4993754 - DNA, 25 bp, Homo sapien
gagcagtgtatgtggcacatggtaa

SEQ ID NO: 4993755 - DNA, 25 bp, Homo sapien
catttgcaattccttagaaatggta

SEQ ID NO: 4993756 - DNA, 25 bp, Homo sapien
gctaaattctgatctctagtgaaga

SEQ ID NO: 4993757 - DNA, 25 bp, Homo sapien
caaactgcaatctggaacatgacca

SEQ ID NO: 4993758 - DNA, 25 bp, Homo sapien
accatgttctgggatgatgatgcca

SEQ ID NO: 4993759 - DNA, 25 bp, Homo sapien
gaagaaaacaacgagcaaatccatc

SEQ ID NO: 4993760 - DNA, 25 bp, Homo sapien
taagcaccaatgatacattcaatgg

SEQ ID NO: 4993761 - DNA, 25 bp, Homo sapien
agactccttcctggataggtctgca

SEQ ID NO: 4993762 - DNA, 25 bp, Homo sapien
caattttcttatcctttcggacatc

SEQ ID NO: 4993763 - DNA, 25 bp, Homo sapien
tgtgcatatctggtagaacttctac

SEQ ID NO: 4993764 - DNA, 25 bp, Homo sapien
tctgtcatctttgtctcgggatgcc

SEQ ID NO: 4993765 - DNA, 25 bp, Homo sapien
taacctaagttgcacccaagcaaga

SEQ ID NO: 4993766 - DNA, 25 bp, Homo sapien
gaaaactacacatttgaatcacact

SEQ ID NO: 4993767 - DNA, 25 bp, Homo sapien
tagggttatacatttacatccaagt

SEQ ID NO: 4993768 - DNA, 25 bp, Homo sapien
gaatcacactagctttcactgtgct

SEQ ID NO: 4993769 - DNA, 25 bp, Homo sapien
agtttttctcttggctaccccactg

SEQ ID NO: 4993770 - DNA, 25 bp, Homo sapien
ttagccttagtttttctcttggcta

SEQ ID NO: 4993771 - DNA, 25 bp, Homo sapien
ctcttggctaccccactgggtcctt

SEQ ID NO: 4993772 - DNA, 25 bp, Homo sapien
tagccttagtttttctcttggctac

SEQ ID NO: 4993773 - DNA, 25 bp, Homo sapien
catggaatttccctagattctgagg

SEQ ID NO: 4993774 - DNA, 25 bp, Homo sapien
tgttttgaaggtcgaggaaacgcag

SEQ ID NO: 4993775 - DNA, 25 bp, Homo sapien
ggtgaccaaaaatctagggtgctca

SEQ ID NO: 4993776 - DNA, 25 bp, Homo sapien
cagaatacagttttacaagcagtag

SEQ ID NO: 4993777 - DNA, 25 bp, Homo sapien
ggaaactgttggagcagcatgcccc

SEQ ID NO: 4993778 - DNA, 25 bp, Homo sapien
tggaatgaagccacactagattatc

SEQ ID NO: 4993779 - DNA, 25 bp, Homo sapien
ctgagatagtaatgttgtaaaggga

SEQ ID NO: 4993780 - DNA, 25 bp, Homo sapien
aagccacactagattatcttaggaa

SEQ ID NO: 4993781 - DNA, 25 bp, Homo sapien
gattctccctacagtgccaaaatgc

SEQ ID NO: 4993782 - DNA, 25 bp, Homo sapien
tctatctttagtaccatagctaatg

SEQ ID NO: 4993783 - DNA, 25 bp, Homo sapien
tcatttgcaactttggttgatgtag

SEQ ID NO: 4993784 - DNA, 25 bp, Homo sapien
aatgccacaagcatgcactactttt

SEQ ID NO: 4993785 - DNA, 25 bp, Homo sapien
gaacatcgtaatcatttcaacattg

SEQ ID NO: 4993786 - DNA, 25 bp, Homo sapien
ctccgtcccatactggaacatcgta

SEQ ID NO: 4993787 - DNA, 25 bp, Homo sapien
tgagacctgtgagtcactgtaagcc

SEQ ID NO: 4993788 - DNA, 25 bp, Homo sapien
catactggaacatcgtaatcatttc

SEQ ID NO: 4993789 - DNA, 25 bp, Homo sapien
aggactgggtaaaattggcacccag

SEQ ID NO: 4993790 - DNA, 25 bp, Homo sapien
cagcaccgaggcgtctgcaggatcc

SEQ ID NO: 4993791 - DNA, 25 bp, Homo sapien
aagacacttcccctactgacttata

SEQ ID NO: 4993792 - DNA, 25 bp, Homo sapien
ccgaggcgtctgcaggatccccagg

SEQ ID NO: 4993793 - DNA, 25 bp, Homo sapien
atgtcagcacatccgaataagccag

SEQ ID NO: 4993794 - DNA, 25 bp, Homo sapien
tttgcaatcggacaaatgtcagcac

SEQ ID NO: 4993795 - DNA, 25 bp, Homo sapien
tcttgttttcgtgccaaactccgga

SEQ ID NO: 4993796 - DNA, 25 bp, Homo sapien
aactccggagaacccagcgtctttg

SEQ ID NO: 4993797 - DNA, 25 bp, Homo sapien
gggttcgtcagctacctgggtgtca

SEQ ID NO: 4993798 - DNA, 25 bp, Homo sapien
agccttaggcacaagttgacggaag

SEQ ID NO: 4993799 - DNA, 25 bp, Homo sapien
cacaagttgacggaagtcacagaag

SEQ ID NO: 4993800 - DNA, 25 bp, Homo sapien
tgggtgtcaccttcatcagaggctt

SEQ ID NO: 4993801 - DNA, 25 bp, Homo sapien
aacatatttgcccattagtgcaggc

SEQ ID NO: 4993802 - DNA, 25 bp, Homo sapien
tgcagaacatgctactaagtgacag

SEQ ID NO: 4993803 - DNA, 25 bp, Homo sapien
tagtacccaagtatgaaagcagaag

SEQ ID NO: 4993804 - DNA, 25 bp, Homo sapien
tgtatatccacatccaaaagtagct

SEQ ID NO: 4993805 - DNA, 25 bp, Homo sapien
gaggctgctactttcaggctgttat

SEQ ID NO: 4993806 - DNA, 25 bp, Homo sapien
tgaggctgctactttcaggctgtta

SEQ ID NO: 4993807 - DNA, 25 bp, Homo sapien
aggctgctactttcaggctgttatt

SEQ ID NO: 4993808 - DNA, 25 bp, Homo sapien
aaataaaacgtgaggaagtgcaagc

SEQ ID NO: 4993809 - DNA, 25 bp, Homo sapien
tatccctagaagagctttgcttgag

SEQ ID NO: 4993810 - DNA, 25 bp, Homo sapien
gacttgcacggtaagatcacaacca

SEQ ID NO: 4993811 - DNA, 25 bp, Homo sapien
gcgagcaagggactagctagtagct

SEQ ID NO: 4993812 - DNA, 25 bp, Homo sapien
tatgacacaagtctttccctgaacc

SEQ ID NO: 4993813 - DNA, 25 bp, Homo sapien
atatgacacaagtctttccctgaac

SEQ ID NO: 4993814 - DNA, 25 bp, Homo sapien
atgacacaagtctttccctgaaccc

SEQ ID NO: 4993815 - DNA, 25 bp, Homo sapien
aatattaaggacttcctcaagagaa

SEQ ID NO: 4993816 - DNA, 25 bp, Homo sapien
tattaaggacttcctcaagagaatc

SEQ ID NO: 4993817 - DNA, 25 bp, Homo sapien
atcaacaccatctgcggtttcgctt

SEQ ID NO: 4993818 - DNA, 25 bp, Homo sapien
caccatctgcggtttcgctttcttc

SEQ ID NO: 4993819 - DNA, 25 bp, Homo sapien
gtctcctgtaagatatatactattg

SEQ ID NO: 4993820 - DNA, 25 bp, Homo sapien
tctaagttcagaataagaagtactt

SEQ ID NO: 4993821 - DNA, 25 bp, Homo sapien
taaaagtaaattgacatgaaagagt

SEQ ID NO: 4993822 - DNA, 25 bp, Homo sapien
ttaaatctggaaacacacatgaaat

SEQ ID NO: 4993823 - DNA, 25 bp, Homo sapien
ccatcagcatcatagattcctagtt

SEQ ID NO: 4993824 - DNA, 25 bp, Homo sapien
accatcagcatcatagattcctagt

SEQ ID NO: 4993825 - DNA, 25 bp, Homo sapien
cttgaagcacctctgataagttata

SEQ ID NO: 4993826 - DNA, 25 bp, Homo sapien
gaagcacctctgataagttataacg

SEQ ID NO: 4993827 - DNA, 25 bp, Homo sapien
gcacctctgataagttataacggaa

SEQ ID NO: 4993828 - DNA, 25 bp, Homo sapien
tctgataagttataacggaagtcct

SEQ ID NO: 4993829 - DNA, 25 bp, Homo sapien
gaagttcctgagagtccgcctttcc

SEQ ID NO: 4993830 - DNA, 25 bp, Homo sapien
tgcaatcaccataaaccacgtgaag

SEQ ID NO: 4993831 - DNA, 25 bp, Homo sapien
tagaacttcctcatagtcaacaaga

SEQ ID NO: 4993832 - DNA, 25 bp, Homo sapien
gatcaaaccaaacgacagctacaga

SEQ ID NO: 4993833 - DNA, 25 bp, Homo sapien
gcctatcgagtgcacagatctctca

SEQ ID NO: 4993834 - DNA, 25 bp, Homo sapien
ctcagcaagagcaggcccaggaagt

SEQ ID NO: 4993835 - DNA, 25 bp, Homo sapien
tggtgacagaggaaaagcctatcga

SEQ ID NO: 4993836 - DNA, 25 bp, Homo sapien
taacccaatgagtcaaagcaacaga

SEQ ID NO: 4993837 - DNA, 25 bp, Homo sapien
tgatttcttcaatccatgaataata

SEQ ID NO: 4993838 - DNA, 25 bp, Homo sapien
atttcttcaatccatgaataataaa

SEQ ID NO: 4993839 - DNA, 25 bp, Homo sapien
tttgatttcttcaatccatgaataa

SEQ ID NO: 4993840 - DNA, 25 bp, Homo sapien
ttcttcaatccatgaataataaatg

SEQ ID NO: 4993841 - DNA, 25 bp, Homo sapien
catgcacttgcctaccagagcttga

SEQ ID NO: 4993842 - DNA, 25 bp, Homo sapien
caggttttaggcacactgcatgcac

SEQ ID NO: 4993843 - DNA, 25 bp, Homo sapien
cctgcactgtaagggcctctagaac

SEQ ID NO: 4993844 - DNA, 25 bp, Homo sapien
aactcaaaagtactgctggcaggtt

SEQ ID NO: 4993845 - DNA, 25 bp, Homo sapien
caccttgtttcttgttggatgacac

SEQ ID NO: 4993846 - DNA, 25 bp, Homo sapien
taaacgcaacctaattcatgttcct

SEQ ID NO: 4993847 - DNA, 25 bp, Homo sapien
catggacctcatcataaacgcaacc

SEQ ID NO: 4993848 - DNA, 25 bp, Homo sapien
tcacaccttgtttcttgttggatga

SEQ ID NO: 4993849 - DNA, 25 bp, Homo sapien
attccgtaaccctgctaagaaggct

SEQ ID NO: 4993850 - DNA, 25 bp, Homo sapien
acagattccgtaaccctgctaagaa

SEQ ID NO: 4993851 - DNA, 25 bp, Homo sapien
ctaacagattccgtaaccctgctaa

SEQ ID NO: 4993852 - DNA, 25 bp, Homo sapien
agattccgtaaccctgctaagaagg

SEQ ID NO: 4993853 - DNA, 25 bp, Homo sapien
tatcccaactgtgcacaacgaatgg

SEQ ID NO: 4993854 - DNA, 25 bp, Homo sapien
aatgtgcttccatatgtcgggctca

SEQ ID NO: 4993855 - DNA, 25 bp, Homo sapien
tcgggctcaaccacaggaaattgtc

SEQ ID NO: 4993856 - DNA, 25 bp, Homo sapien
gactgagatgttaagttctgtccca

SEQ ID NO: 4993857 - DNA, 25 bp, Homo sapien
atgaaatcagcattagtgatatcaa

SEQ ID NO: 4993858 - DNA, 25 bp, Homo sapien
tatgaaatcagcattagtgatatca

SEQ ID NO: 4993859 - DNA, 25 bp, Homo sapien
tgaaatcagcattagtgatatcaaa

SEQ ID NO: 4993860 - DNA, 25 bp, Homo sapien
gagttgctctgaaacgctgctggtt

SEQ ID NO: 4993861 - DNA, 25 bp, Homo sapien
tctgaaacgctgctggttaggcagg

SEQ ID NO: 4993862 - DNA, 25 bp, Homo sapien
ctttgagttgctctgaaacgctgct

SEQ ID NO: 4993863 - DNA, 25 bp, Homo sapien
cgctgctggttaggcaggaactcac

SEQ ID NO: 4993864 - DNA, 25 bp, Homo sapien
gaaagccaagaaacagtcgttcagc

SEQ ID NO: 4993865 - DNA, 25 bp, Homo sapien
tcccatgttcaattccacggaaagc

SEQ ID NO: 4993866 - DNA, 25 bp, Homo sapien
ccccaaaacacgcaaggcaaacgat

SEQ ID NO: 4993867 - DNA, 25 bp, Homo sapien
tttccctgactttggctcattttca

SEQ ID NO: 4993868 - DNA, 25 bp, Homo sapien
gcactcgtgctaccgctgccggagc

SEQ ID NO: 4993869 - DNA, 25 bp, Homo sapien
ccgcactcgtgctaccgctgccgga

SEQ ID NO: 4993870 - DNA, 25 bp, Homo sapien
gctgcccgcactcgtgctaccgctg

SEQ ID NO: 4993871 - DNA, 25 bp, Homo sapien
cgtgctaccgctgccggagccgctg

SEQ ID NO: 4993872 - DNA, 25 bp, Homo sapien
acgcgacgcgggaaccgctggcggc

SEQ ID NO: 4993873 - DNA, 25 bp, Homo sapien
ctggcggacctccttcagtgcgcgg

SEQ ID NO: 4993874 - DNA, 25 bp, Homo sapien
agtgcgcgggggtacacacgcgacg

SEQ ID NO: 4993875 - DNA, 25 bp, Homo sapien
tgagggctggcggacctccttcagt

SEQ ID NO: 4993876 - DNA, 25 bp, Homo sapien
ctgcagcagaccctgtgcctcagca

SEQ ID NO: 4993877 - DNA, 25 bp, Homo sapien
cagcagaccctgtgcctcagcaccg

SEQ ID NO: 4993878 - DNA, 25 bp, Homo sapien
tgcagcagaccctgtgcctcagcac

SEQ ID NO: 4993879 - DNA, 25 bp, Homo sapien
agcagaccctgtgcctcagcaccgc

SEQ ID NO: 4993880 - DNA, 25 bp, Homo sapien
tgggaagacttcacccgcctgccgg

SEQ ID NO: 4993881 - DNA, 25 bp, Homo sapien
gcgcctgggacccaatcgcaagggc

SEQ ID NO: 4993882 - DNA, 25 bp, Homo sapien
cggcctcgcgtgtacgaacctgtga

SEQ ID NO: 4993883 - DNA, 25 bp, Homo sapien
cccggaaggctgagtgacggcgcct

SEQ ID NO: 4993884 - DNA, 25 bp, Homo sapien
gttcgggcgctacgcagctgcctgt

SEQ ID NO: 4993885 - DNA, 25 bp, Homo sapien
ttcggctttccagtttgtctcggtc

SEQ ID NO: 4993886 - DNA, 25 bp, Homo sapien
agctgcctgtgagcgcgagcctctt

SEQ ID NO: 4993887 - DNA, 25 bp, Homo sapien
tcacttagggctgttcgggcgctac

SEQ ID NO: 4993888 - DNA, 25 bp, Homo sapien
gatggttggatgctgcttgaccctg

SEQ ID NO: 4993889 - DNA, 25 bp, Homo sapien
ggatgctgcttgaccctgccctgat

SEQ ID NO: 4993890 - DNA, 25 bp, Homo sapien
ggttggatgctgcttgaccctgccc

SEQ ID NO: 4993891 - DNA, 25 bp, Homo sapien
ctgtggatggttggatgctgcttga

SEQ ID NO: 4993892 - DNA, 25 bp, Homo sapien
gggtaatgtaacgatcctttgtgat

SEQ ID NO: 4993893 - DNA, 25 bp, Homo sapien
gtaatgtaacgatcctttgtgatac

SEQ ID NO: 4993894 - DNA, 25 bp, Homo sapien
cagtggtgggtaatgtaacgatcct

SEQ ID NO: 4993895 - DNA, 25 bp, Homo sapien
tggtgggtaatgtaacgatcctttg

SEQ ID NO: 4993896 - DNA, 25 bp, Homo sapien
caaagccgtgattctgtggttgctc

SEQ ID NO: 4993897 - DNA, 25 bp, Homo sapien
gaaaagattaccagtctccaaagcc

SEQ ID NO: 4993898 - DNA, 25 bp, Homo sapien
ttccctgcaccgaaaagattaccag

SEQ ID NO: 4993899 - DNA, 25 bp, Homo sapien
tgcaatattccctgcaccgaaaaga

SEQ ID NO: 4993900 - DNA, 25 bp, Homo sapien
ccctcagaagtccaaatgtaattag

SEQ ID NO: 4993901 - DNA, 25 bp, Homo sapien
tcgctttatcctgtgcatcttcggg

SEQ ID NO: 4993902 - DNA, 25 bp, Homo sapien
gattccagagttcctcgctttatcc

SEQ ID NO: 4993903 - DNA, 25 bp, Homo sapien
agagttcctcgctttatcctgtgca

SEQ ID NO: 4993904 - DNA, 25 bp, Homo sapien
gaagctttgaattaccatagggcag

SEQ ID NO: 4993905 - DNA, 25 bp, Homo sapien
taagctcaagcatggaaaacgaact

SEQ ID NO: 4993906 - DNA, 25 bp, Homo sapien
tcctgaaaggcctacatagccagag

SEQ ID NO: 4993907 - DNA, 25 bp, Homo sapien
tagccagagagagaacctcatagct

SEQ ID NO: 4993908 - DNA, 25 bp, Homo sapien
cttttcctcttctgcctgcaccaga

SEQ ID NO: 4993909 - DNA, 25 bp, Homo sapien
ttttcctcttctgcctgcaccagac

SEQ ID NO: 4993910 - DNA, 25 bp, Homo sapien
ttcctcttctgcctgcaccagacag

SEQ ID NO: 4993911 - DNA, 25 bp, Homo sapien
cctcttctgcctgcaccagacaggt

SEQ ID NO: 4993912 - DNA, 25 bp, Homo sapien
tcttgaaagtcgttgcaggcttgca

SEQ ID NO: 4993913 - DNA, 25 bp, Homo sapien
gaaagtcgttgcaggcttgcagtca

SEQ ID NO: 4993914 - DNA, 25 bp, Homo sapien
gaattctactcttgaaagtcgttgc

SEQ ID NO: 4993915 - DNA, 25 bp, Homo sapien
ccctgcgatggtgaattctactctt

SEQ ID NO: 4993916 - DNA, 25 bp, Homo sapien
ggctggctgccctgtgtggactcac

SEQ ID NO: 4993917 - DNA, 25 bp, Homo sapien
agtcctgcagcttttggctggctgc

SEQ ID NO: 4993918 - DNA, 25 bp, Homo sapien
tcagtcctgcagcttttggctggct

SEQ ID NO: 4993919 - DNA, 25 bp, Homo sapien
cctgcagcttttggctggctgccct

SEQ ID NO: 4993920 - DNA, 25 bp, Homo sapien
ctctgcttccttggcctttcccagc

SEQ ID NO: 4993921 - DNA, 25 bp, Homo sapien
ggcctttctggcttggcttccaggg

SEQ ID NO: 4993922 - DNA, 25 bp, Homo sapien
gcctttctggcttggcttccagggc

SEQ ID NO: 4993923 - DNA, 25 bp, Homo sapien
tgcttccttggcctttcccagctgc

SEQ ID NO: 4993924 - DNA, 25 bp, Homo sapien
ggcgccgcttgctggtggatggcat

SEQ ID NO: 4993925 - DNA, 25 bp, Homo sapien
gagtgcttactgaggatttcccacg

SEQ ID NO: 4993926 - DNA, 25 bp, Homo sapien
tgtgactggaagcaccaaaagggct

SEQ ID NO: 4993927 - DNA, 25 bp, Homo sapien
tggctgaacgcagacatagcgcctg

SEQ ID NO: 4993928 - DNA, 25 bp, Homo sapien
tttggctcacacaaacacagtggtg

SEQ ID NO: 4993929 - DNA, 25 bp, Homo sapien
ttctagcggtcacaggcctgaggct

SEQ ID NO: 4993930 - DNA, 25 bp, Homo sapien
gctctcctgtaaagtcacctcctgg

SEQ ID NO: 4993931 - DNA, 25 bp, Homo sapien
gtcaatctgctcgtatctgcccgtg

SEQ ID NO: 4993932 - DNA, 25 bp, Homo sapien
aattcctgctaagagcggtggccca

SEQ ID NO: 4993933 - DNA, 25 bp, Homo sapien
ttccagaagtagagcatggagccat

SEQ ID NO: 4993934 - DNA, 25 bp, Homo sapien
gcttttccagaagtagagcatggag

SEQ ID NO: 4993935 - DNA, 25 bp, Homo sapien
cttttgggtgatgtaggacaaggct

SEQ ID NO: 4993936 - DNA, 25 bp, Homo sapien
agctcttttgggtgatgtaggacaa

SEQ ID NO: 4993937 - DNA, 25 bp, Homo sapien
cactccagaggttgctttatacagc

SEQ ID NO: 4993938 - DNA, 25 bp, Homo sapien
ctcacagggtcgagtgggtgctaaa

SEQ ID NO: 4993939 - DNA, 25 bp, Homo sapien
taaagtaatacgcatctcacagggt

SEQ ID NO: 4993940 - DNA, 25 bp, Homo sapien
gttagtagatatcaggcactccaga

SEQ ID NO: 4993941 - DNA, 25 bp, Homo sapien
tctccaaccgtaagataggtagggc

SEQ ID NO: 4993942 - DNA, 25 bp, Homo sapien
gaaatctctccaaccgtaagatagg

SEQ ID NO: 4993943 - DNA, 25 bp, Homo sapien
tgagccttccactcagaaatctctc

SEQ ID NO: 4993944 - DNA, 25 bp, Homo sapien
ccgtaagataggtagggccctgatt

SEQ ID NO: 4993945 - DNA, 25 bp, Homo sapien
atttcatctgtcattcatagacggc

SEQ ID NO: 4993946 - DNA, 25 bp, Homo sapien
tcatagacggctctgctgcagtgtc

SEQ ID NO: 4993947 - DNA, 25 bp, Homo sapien
tctgtcattcatagacggctctgct

SEQ ID NO: 4993948 - DNA, 25 bp, Homo sapien
ctgcagtgtctttgggcatggaaag

SEQ ID NO: 4993949 - DNA, 25 bp, Homo sapien
ggttctctgtgaccctcataccatc

SEQ ID NO: 4993950 - DNA, 25 bp, Homo sapien
taactgacttggctactgaaatcac

SEQ ID NO: 4993951 - DNA, 25 bp, Homo sapien
ttttccctcattaactgtggcagcc

SEQ ID NO: 4993952 - DNA, 25 bp, Homo sapien
cacacaggcacagattgacatttta

SEQ ID NO: 4993953 - DNA, 25 bp, Homo sapien
gcagatttgatcaaatatgggcatc

SEQ ID NO: 4993954 - DNA, 25 bp, Homo sapien
tatgggcatcagacaggtagagatc

SEQ ID NO: 4993955 - DNA, 25 bp, Homo sapien
ttgatcaaatatgggcatcagacag

SEQ ID NO: 4993956 - DNA, 25 bp, Homo sapien
gcatcagacaggtagagatcacagc

SEQ ID NO: 4993957 - DNA, 25 bp, Homo sapien
cttgggttgcaagtgaacatttggg

SEQ ID NO: 4993958 - DNA, 25 bp, Homo sapien
caattcagattgtgctccatagccc

SEQ ID NO: 4993959 - DNA, 25 bp, Homo sapien
tttgtcctcacagcctcatggaggg

SEQ ID NO: 4993960 - DNA, 25 bp, Homo sapien
tagtgctggaaggatttgaaaaccc

SEQ ID NO: 4993961 - DNA, 25 bp, Homo sapien
tcccagcgggtggtcatgtcgacaa

SEQ ID NO: 4993962 - DNA, 25 bp, Homo sapien
aaatgactggcttacacaattgtgg

SEQ ID NO: 4993963 - DNA, 25 bp, Homo sapien
ttctggaaagcctcaactctgccct

SEQ ID NO: 4993964 - DNA, 25 bp, Homo sapien
gttggacaagtctgaagtctgcagg

SEQ ID NO: 4993965 - DNA, 25 bp, Homo sapien
gcagggcaagccctaatgaagggca

SEQ ID NO: 4993966 - DNA, 25 bp, Homo sapien
tgcgtaaagtcaactgactacggac

SEQ ID NO: 4993967 - DNA, 25 bp, Homo sapien
tctaagtcaagtttccttgcgtaaa

SEQ ID NO: 4993968 - DNA, 25 bp, Homo sapien
ccacccaggttttctacacttgatc

SEQ ID NO: 4993969 - DNA, 25 bp, Homo sapien
caatctatccaggttttctaagtca

SEQ ID NO: 4993970 - DNA, 25 bp, Homo sapien
ctttccccagaagacaatgcaaagt

SEQ ID NO: 4993971 - DNA, 25 bp, Homo sapien
aagtcctcgggtgatgttcactctt

SEQ ID NO: 4993972 - DNA, 25 bp, Homo sapien
ttccccagaagacaatgcaaagtcc

SEQ ID NO: 4993973 - DNA, 25 bp, Homo sapien
acaatgcaaagtcctcgggtgatgt

SEQ ID NO: 4993974 - DNA, 25 bp, Homo sapien
caaggttggccttagtgagtagaca

SEQ ID NO: 4993975 - DNA, 25 bp, Homo sapien
gagtagacatagtgctgagcccatg

SEQ ID NO: 4993976 - DNA, 25 bp, Homo sapien
ttaacgaatgagtccatataaagca

SEQ ID NO: 4993977 - DNA, 25 bp, Homo sapien
tctcttctgctggtagactgggcac

SEQ ID NO: 4993978 - DNA, 25 bp, Homo sapien
aatactcgtctgtaataggcccgtg

SEQ ID NO: 4993979 - DNA, 25 bp, Homo sapien
tttcactgaagtagaaggccgtggc

SEQ ID NO: 4993980 - DNA, 25 bp, Homo sapien
tgcttcgcaggtccaatcgccataa

SEQ ID NO: 4993981 - DNA, 25 bp, Homo sapien
gaaaggcaatcaaagtccctgtgga

SEQ ID NO: 4993982 - DNA, 25 bp, Homo sapien
cataagctctgacactgactggtgg

SEQ ID NO: 4993983 - DNA, 25 bp, Homo sapien
cactgggtcactataagatggatct

SEQ ID NO: 4993984 - DNA, 25 bp, Homo sapien
atgggtttggcgacccactgggtca

SEQ ID NO: 4993985 - DNA, 25 bp, Homo sapien
gaaattagtatcaattcacagctgg

SEQ ID NO: 4993986 - DNA, 25 bp, Homo sapien
cattgcataaactgccatgcatggc

SEQ ID NO: 4993987 - DNA, 25 bp, Homo sapien
tatggcagtatcgtaggtcaaaagt

SEQ ID NO: 4993988 - DNA, 25 bp, Homo sapien
aacccctagtaagatcctcattgca

SEQ ID NO: 4993989 - DNA, 25 bp, Homo sapien
tgatacggattttcaacaaccccta

SEQ ID NO: 4993990 - DNA, 25 bp, Homo sapien
ttttcctgggcgttgtagtttctga

SEQ ID NO: 4993991 - DNA, 25 bp, Homo sapien
tcctgggcgttgtagtttctgattg

SEQ ID NO: 4993992 - DNA, 25 bp, Homo sapien
cctgggcgttgtagtttctgattgt

SEQ ID NO: 4993993 - DNA, 25 bp, Homo sapien
cgttgtagtttctgattgtttgtcc

SEQ ID NO: 4993994 - DNA, 25 bp, Homo sapien
gcacagcttctgaaccggttgagag

SEQ ID NO: 4993995 - DNA, 25 bp, Homo sapien
agcacagcttctgaaccggttgaga

SEQ ID NO: 4993996 - DNA, 25 bp, Homo sapien
acagcttctgaaccggttgagagat

SEQ ID NO: 4993997 - DNA, 25 bp, Homo sapien
cacagcttctgaaccggttgagaga

SEQ ID NO: 4993998 - DNA, 25 bp, Homo sapien
caagattcacatgaagtaccatttt

SEQ ID NO: 4993999 - DNA, 25 bp, Homo sapien
cattttattcccataaaacctcatc

SEQ ID NO: 4994000 - DNA, 25 bp, Homo sapien
ttcaagattcacatgaagtaccatt

SEQ ID NO: 4994001 - DNA, 25 bp, Homo sapien
ccttcaagattcacatgaagtacca

SEQ ID NO: 4994002 - DNA, 25 bp, Homo sapien
ctaggtcagctatgtcaaggaggca

SEQ ID NO: 4994003 - DNA, 25 bp, Homo sapien
taggtcagctatgtcaaggaggcac

SEQ ID NO: 4994004 - DNA, 25 bp, Homo sapien
catgagggtctgagtctgatgattt

SEQ ID NO: 4994005 - DNA, 25 bp, Homo sapien
ctgagtctgatgatttttcaacaaa

SEQ ID NO: 4994006 - DNA, 25 bp, Homo sapien
tttcaacaaagcaatttcctgtgtc

SEQ ID NO: 4994007 - DNA, 25 bp, Homo sapien
tcaacaaagcaatttcctgtgtcat

SEQ ID NO: 4994008 - DNA, 25 bp, Homo sapien
agtctggactcttgtgtagcataga

SEQ ID NO: 4994009 - DNA, 25 bp, Homo sapien
tgtagcatagaaaggatcatcagtt

SEQ ID NO: 4994010 - DNA, 25 bp, Homo sapien
ggactcttgtgtagcatagaaagga

SEQ ID NO: 4994011 - DNA, 25 bp, Homo sapien
cttgtgtagcatagaaaggatcatc

SEQ ID NO: 4994012 - DNA, 25 bp, Homo sapien
cctagaagggctggttagcacaacc

SEQ ID NO: 4994013 - DNA, 25 bp, Homo sapien
tagtgctaaatactcccacagaagc

SEQ ID NO: 4994014 - DNA, 25 bp, Homo sapien
aaaactccaggtcctgtcaccagga

SEQ ID NO: 4994015 - DNA, 25 bp, Homo sapien
ggagtactagaagttcctaccagga

SEQ ID NO: 4994016 - DNA, 25 bp, Homo sapien
ccagtccagttcaggagttcttgcc

SEQ ID NO: 4994017 - DNA, 25 bp, Homo sapien
cagtccagttcaggagttcttgcca

SEQ ID NO: 4994018 - DNA, 25 bp, Homo sapien
tccagttcaggagttcttgccatga

SEQ ID NO: 4994019 - DNA, 25 bp, Homo sapien
gtccagttcaggagttcttgccatg

SEQ ID NO: 4994020 - DNA, 25 bp, Homo sapien
tactttacagcacttaatcagaggg

SEQ ID NO: 4994021 - DNA, 25 bp, Homo sapien
ccgtataaggtcaggcctttgccta

SEQ ID NO: 4994022 - DNA, 25 bp, Homo sapien
cttttcatttccgtataaggtcagg

SEQ ID NO: 4994023 - DNA, 25 bp, Homo sapien
tcagaggggccgtttcattatcctt

SEQ ID NO: 4994024 - DNA, 25 bp, Homo sapien
ggttccacctttacaatgtccatgc

SEQ ID NO: 4994025 - DNA, 25 bp, Homo sapien
caacaattaatctccttgaggcttc

SEQ ID NO: 4994026 - DNA, 25 bp, Homo sapien
tgctcctccagtcatgtagtcctgt

SEQ ID NO: 4994027 - DNA, 25 bp, Homo sapien
gagaaggacacaggtgtgcccgttt

SEQ ID NO: 4994028 - DNA, 25 bp, Homo sapien
ttctttggtgtgtaatcccacagta

SEQ ID NO: 4994029 - DNA, 25 bp, Homo sapien
ccagataatggtcatgagcatatag

SEQ ID NO: 4994030 - DNA, 25 bp, Homo sapien
tggtcatgagcatatagaaaagctt

SEQ ID NO: 4994031 - DNA, 25 bp, Homo sapien
gtgtaatcccacagtagagaagtct

SEQ ID NO: 4994032 - DNA, 25 bp, Homo sapien
ctgcggcctgcagcgctagttttaa

SEQ ID NO: 4994033 - DNA, 25 bp, Homo sapien
tgcagcggctcctgcggagattgca

SEQ ID NO: 4994034 - DNA, 25 bp, Homo sapien
agattgcattgagagctcccgtccg

SEQ ID NO: 4994035 - DNA, 25 bp, Homo sapien
taatggtccgtttgtgttcacgcat

SEQ ID NO: 4994036 - DNA, 25 bp, Homo sapien
ctgcaccaaagacattcttgttaaa

SEQ ID NO: 4994037 - DNA, 25 bp, Homo sapien
caaagacattcttgttaaaatgaat

SEQ ID NO: 4994038 - DNA, 25 bp, Homo sapien
ccaaagacattcttgttaaaatgaa

SEQ ID NO: 4994039 - DNA, 25 bp, Homo sapien
agacattcttgttaaaatgaatcat

SEQ ID NO: 4994040 - DNA, 25 bp, Homo sapien
cacagcaatgtggagtttttcatgc

SEQ ID NO: 4994041 - DNA, 25 bp, Homo sapien
cagcaatgtggagtttttcatgcct

SEQ ID NO: 4994042 - DNA, 25 bp, Homo sapien
tcacttccatcaccaagtgtagaag

SEQ ID NO: 4994043 - DNA, 25 bp, Homo sapien
ccaagtgtagaagatttctgtttgt

SEQ ID NO: 4994044 - DNA, 25 bp, Homo sapien
tagaagcttgggctctcttagcatc

SEQ ID NO: 4994045 - DNA, 25 bp, Homo sapien
tacaagaatttttaccacagcatgg

SEQ ID NO: 4994046 - DNA, 25 bp, Homo sapien
gagaaactagttgttcccaagatgt

SEQ ID NO: 4994047 - DNA, 25 bp, Homo sapien
aattaaatggaatgctccctagcag

SEQ ID NO: 4994048 - DNA, 25 bp, Homo sapien
gatgcataagttttatcccagtttt

SEQ ID NO: 4994049 - DNA, 25 bp, Homo sapien
tctagtctttaaatggaacaccagc

SEQ ID NO: 4994050 - DNA, 25 bp, Homo sapien
gaaactatcccaattgactactgcc

SEQ ID NO: 4994051 - DNA, 25 bp, Homo sapien
tcagtgttgacagaatgacctattc

SEQ ID NO: 4994052 - DNA, 25 bp, Homo sapien
ccatggaagttccacttgggtttca

SEQ ID NO: 4994053 - DNA, 25 bp, Homo sapien
gatcagtacactaacagacaagaga

SEQ ID NO: 4994054 - DNA, 25 bp, Homo sapien
cagttgctccatcaaaatttttgca

SEQ ID NO: 4994055 - DNA, 25 bp, Homo sapien
ggctacctctaatcatgacctttta

SEQ ID NO: 4994056 - DNA, 25 bp, Homo sapien
tggaacatgagctacttaaacttct

SEQ ID NO: 4994057 - DNA, 25 bp, Homo sapien
gaactattgtacaccacttatcaag

SEQ ID NO: 4994058 - DNA, 25 bp, Homo sapien
ccagcatctgaccaataaattgggt

SEQ ID NO: 4994059 - DNA, 25 bp, Homo sapien
caccatttgttacgttttgtcccat

SEQ ID NO: 4994060 - DNA, 25 bp, Homo sapien
gttccagagctgagtaatagatcca

SEQ ID NO: 4994061 - DNA, 25 bp, Homo sapien
taataagtgggctgaaatatgctac

SEQ ID NO: 4994062 - DNA, 25 bp, Homo sapien
gccccactaaagagcttgcagtgaa

SEQ ID NO: 4994063 - DNA, 25 bp, Homo sapien
agccctggttgctttaggtggagaa

SEQ ID NO: 4994064 - DNA, 25 bp, Homo sapien
cacacacaaatgctgtatgtcccag

SEQ ID NO: 4994065 - DNA, 25 bp, Homo sapien
ccatcagtgggcacaaggtgagctt

SEQ ID NO: 4994066 - DNA, 25 bp, Homo sapien
tcgatgtaggtgacggctgccatca

SEQ ID NO: 4994067 - DNA, 25 bp, Homo sapien
gaagaagttgatctgcatgctgccg

SEQ ID NO: 4994068 - DNA, 25 bp, Homo sapien
cttggtgtgatcctggaagaagttg

SEQ ID NO: 4994069 - DNA, 25 bp, Homo sapien
cttcgcgcggcgtgatgttggcacc

SEQ ID NO: 4994070 - DNA, 25 bp, Homo sapien
ttcgcgcggcgtgatgttggcacct

SEQ ID NO: 4994071 - DNA, 25 bp, Homo sapien
ccttcgcgcggcgtgatgttggcac

SEQ ID NO: 4994072 - DNA, 25 bp, Homo sapien
taattgcggaaatatttaaggagtg

SEQ ID NO: 4994073 - DNA, 25 bp, Homo sapien
aggaagtgctcgctcaagtaattgc

SEQ ID NO: 4994074 - DNA, 25 bp, Homo sapien
gctcgctcaagtaattgcggaaata

SEQ ID NO: 4994075 - DNA, 25 bp, Homo sapien
ttaaggagtgtgatcttcttcatca

SEQ ID NO: 4994076 - DNA, 25 bp, Homo sapien
tactgcaggctgttacaatcattga

SEQ ID NO: 4994077 - DNA, 25 bp, Homo sapien
acaatcattgaagaacacctccagg

SEQ ID NO: 4994078 - DNA, 25 bp, Homo sapien
tgaggtaggactcggtgccatcaca

SEQ ID NO: 4994079 - DNA, 25 bp, Homo sapien
catcacactttatgtactgcaggct

SEQ ID NO: 4994080 - DNA, 25 bp, Homo sapien
ctgaccagccttccctccgagggct

SEQ ID NO: 4994081 - DNA, 25 bp, Homo sapien
ccagccttccctccgagggcttgga

SEQ ID NO: 4994082 - DNA, 25 bp, Homo sapien
cctgaccagccttccctccgagggc

SEQ ID NO: 4994083 - DNA, 25 bp, Homo sapien
gaggtggaagtcgaccacctcacgc

SEQ ID NO: 4994084 - DNA, 25 bp, Homo sapien
aggtggaagtcgaccacctcacgcg

SEQ ID NO: 4994085 - DNA, 25 bp, Homo sapien
ggtggaagtcgaccacctcacgcgt

SEQ ID NO: 4994086 - DNA, 25 bp, Homo sapien
aagttgcccagcttgaggtctcggt

SEQ ID NO: 4994087 - DNA, 25 bp, Homo sapien
tcaggaaaaagttgcccagcttgag

SEQ ID NO: 4994088 - DNA, 25 bp, Homo sapien
gaaaaagttgcccagcttgaggtct

SEQ ID NO: 4994089 - DNA, 25 bp, Homo sapien
aaaagttgcccagcttgaggtctcg

SEQ ID NO: 4994090 - DNA, 25 bp, Homo sapien
tttgccgcagacaacatagtgtcgg

SEQ ID NO: 4994091 - DNA, 25 bp, Homo sapien
cgcagacaacatagtgtcgggcctc

SEQ ID NO: 4994092 - DNA, 25 bp, Homo sapien
acaacatagtgtcgggcctcaggct

SEQ ID NO: 4994093 - DNA, 25 bp, Homo sapien
cacaatttgccgcagacaacatagt

SEQ ID NO: 4994094 - DNA, 25 bp, Homo sapien
cacgaacacaaagtcgttgtcctcg

SEQ ID NO: 4994095 - DNA, 25 bp, Homo sapien
tcctacgacgtgctgctgggcaagg

SEQ ID NO: 4994096 - DNA, 25 bp, Homo sapien
tcctcgaaaaaaccatggaatccta

SEQ ID NO: 4994097 - DNA, 25 bp, Homo sapien
gaacacaaagtcgttgtcctcgaaa

SEQ ID NO: 4994098 - DNA, 25 bp, Homo sapien
gcatgagcagtagcgacttaggcac

SEQ ID NO: 4994099 - DNA, 25 bp, Homo sapien
caaccttgttgtccgcgtctgagat

SEQ ID NO: 4994100 - DNA, 25 bp, Homo sapien
tctccttctggagcggcatgagcag

SEQ ID NO: 4994101 - DNA, 25 bp, Homo sapien
acacatagcgctgccggctgcgcgg

SEQ ID NO: 4994102 - DNA, 25 bp, Homo sapien
agggacggccggtgcccgtgtcact

SEQ ID NO: 4994103 - DNA, 25 bp, Homo sapien
ggtgcccgtgtcacttccccgcagt

SEQ ID NO: 4994104 - DNA, 25 bp, Homo sapien
tttagccggtaaagcagccgccaga

SEQ ID NO: 4994105 - DNA, 25 bp, Homo sapien
caccgctgcagtcatgttcctggag

SEQ ID NO: 4994106 - DNA, 25 bp, Homo sapien
gctcctccgcgaattcctaaaccca

SEQ ID NO: 4994107 - DNA, 25 bp, Homo sapien
tggaaacaatataagagacctggcc

SEQ ID NO: 4994108 - DNA, 25 bp, Homo sapien
ggttataatggaaacaatataagag

SEQ ID NO: 4994109 - DNA, 25 bp, Homo sapien
taatggaaacaatataagagacctg

SEQ ID NO: 4994110 - DNA, 25 bp, Homo sapien
cttgaagggtagtctgttggatcag

SEQ ID NO: 4994111 - DNA, 25 bp, Homo sapien
ttacttgaagggtagtctgttggaa

SEQ ID NO: 4994112 - DNA, 25 bp, Homo sapien
tctgttggaaaggtagcttgttgga

SEQ ID NO: 4994113 - DNA, 25 bp, Homo sapien
tggaaaggtagcttgttggattttc

SEQ ID NO: 4994114 - DNA, 25 bp, Homo sapien
catctgatgacacgtgatggtggaa

SEQ ID NO: 4994115 - DNA, 25 bp, Homo sapien
ggaaggtcaagggtttatgtgaaca

SEQ ID NO: 4994116 - DNA, 25 bp, Homo sapien
atgacacgtgatggtggaaggtcaa

SEQ ID NO: 4994117 - DNA, 25 bp, Homo sapien
ggtttatgtgaacagtcagcatact

SEQ ID NO: 4994118 - DNA, 25 bp, Homo sapien
gaacccagtttagccaccacatgta

SEQ ID NO: 4994119 - DNA, 25 bp, Homo sapien
gcaaggaccctgcagtttttcacat

SEQ ID NO: 4994120 - DNA, 25 bp, Homo sapien
tgccaccacaggtgttccagcttca

SEQ ID NO: 4994121 - DNA, 25 bp, Homo sapien
tcatgcacccatggttgaccacttg

SEQ ID NO: 4994122 - DNA, 25 bp, Homo sapien
actgtgcatacagacacagctggtc

SEQ ID NO: 4994123 - DNA, 25 bp, Homo sapien
caccactgtgcatacagacacagct

SEQ ID NO: 4994124 - DNA, 25 bp, Homo sapien
agctggtcgctgcagctgcttgcat

SEQ ID NO: 4994125 - DNA, 25 bp, Homo sapien
ctgcttgcatgcaggctgacagctt

SEQ ID NO: 4994126 - DNA, 25 bp, Homo sapien
agactgaccccagttgcctgatcca

SEQ ID NO: 4994127 - DNA, 25 bp, Homo sapien
accccagttgcctgatccacgagaa

SEQ ID NO: 4994128 - DNA, 25 bp, Homo sapien
agttgcctgatccacgagaaactgc

SEQ ID NO: 4994129 - DNA, 25 bp, Homo sapien
gctgttgcagactgaccccagttgc

SEQ ID NO: 4994130 - DNA, 25 bp, Homo sapien
gtattgctgaaggtcgtttcttact

SEQ ID NO: 4994131 - DNA, 25 bp, Homo sapien
tgaaggtcgtttcttactgaaggag

SEQ ID NO: 4994132 - DNA, 25 bp, Homo sapien
tgctgaaggtcgtttcttactgaag

SEQ ID NO: 4994133 - DNA, 25 bp, Homo sapien
ggtcgtttcttactgaaggagtcca

SEQ ID NO: 4994134 - DNA, 25 bp, Homo sapien
ttgaaggaactgaatcaccgctgca

SEQ ID NO: 4994135 - DNA, 25 bp, Homo sapien
gatgccaaaaacctgagagtctgat

SEQ ID NO: 4994136 - DNA, 25 bp, Homo sapien
tggaaatagactcagtgtggtgttg

SEQ ID NO: 4994137 - DNA, 25 bp, Homo sapien
tttgctccaagaattaccacaggaa

SEQ ID NO: 4994138 - DNA, 25 bp, Homo sapien
gtgaaaaagcataaaggaaagacat

SEQ ID NO: 4994139 - DNA, 25 bp, Homo sapien
tgtgaaaaagcataaaggaaagaca

SEQ ID NO: 4994140 - DNA, 25 bp, Homo sapien
cttcatgtgaaaaagcataaaggaa

SEQ ID NO: 4994141 - DNA, 25 bp, Homo sapien
tcatgtgaaaaagcataaaggaaag

SEQ ID NO: 4994142 - DNA, 25 bp, Homo sapien
taaattgaatttaatgagcatcccc

SEQ ID NO: 4994143 - DNA, 25 bp, Homo sapien
cctctaaatccagcattgtgttagg

SEQ ID NO: 4994144 - DNA, 25 bp, Homo sapien
tattctatattggttgtagaactgc

SEQ ID NO: 4994145 - DNA, 25 bp, Homo sapien
tatattggttgtagaactgcctttc

SEQ ID NO: 4994146 - DNA, 25 bp, Homo sapien
tctcagtttggatagtttttgccat

SEQ ID NO: 4994147 - DNA, 25 bp, Homo sapien
ctctcagtttggatagtttttgcca

SEQ ID NO: 4994148 - DNA, 25 bp, Homo sapien
taaatcagatgccatgcatcttgct

SEQ ID NO: 4994149 - DNA, 25 bp, Homo sapien
tgcatcttgcttgtgcaaccatgat

SEQ ID NO: 4994150 - DNA, 25 bp, Homo sapien
tataaatcagatgccatgcatcttg

SEQ ID NO: 4994151 - DNA, 25 bp, Homo sapien
gatgccatgcatcttgcttgtgcaa

SEQ ID NO: 4994152 - DNA, 25 bp, Homo sapien
gttttcctagtggacactgttgaca

SEQ ID NO: 4994153 - DNA, 25 bp, Homo sapien
tagtggacactgttgacaatagttg

SEQ ID NO: 4994154 - DNA, 25 bp, Homo sapien
gacactgttgacaatagttgtgtac

SEQ ID NO: 4994155 - DNA, 25 bp, Homo sapien
ctaagttttcctagtggacactgtt

SEQ ID NO: 4994156 - DNA, 25 bp, Homo sapien
ttgataagtagacaagttggtacct

SEQ ID NO: 4994157 - DNA, 25 bp, Homo sapien
ggtggacagagttgcctatatctgc

SEQ ID NO: 4994158 - DNA, 25 bp, Homo sapien
taagggcctatcagctgtgattgct

SEQ ID NO: 4994159 - DNA, 25 bp, Homo sapien
tacctatacttggtgacctgtctca

SEQ ID NO: 4994160 - DNA, 25 bp, Homo sapien
tgaactttgacagttgacgccttgg

SEQ ID NO: 4994161 - DNA, 25 bp, Homo sapien
tgctgcaatgccaacagtactggaa

SEQ ID NO: 4994162 - DNA, 25 bp, Homo sapien
gacgccttggatcatctgccactga

SEQ ID NO: 4994163 - DNA, 25 bp, Homo sapien
gcagctgtagtatggagggatcccc

SEQ ID NO: 4994164 - DNA, 25 bp, Homo sapien
ccaccttcagtgtgtttgaagtgct

SEQ ID NO: 4994165 - DNA, 25 bp, Homo sapien
tgtgaactttctgacatgaaagagg

SEQ ID NO: 4994166 - DNA, 25 bp, Homo sapien
acatgaaagaggagttcgatgaagc

SEQ ID NO: 4994167 - DNA, 25 bp, Homo sapien
ccttcagtgtgtttgaagtgctctg

SEQ ID NO: 4994168 - DNA, 25 bp, Homo sapien
cctattgtctccctgactccattta

SEQ ID NO: 4994169 - DNA, 25 bp, Homo sapien
atcgaggatggttgatttttgttgc

SEQ ID NO: 4994170 - DNA, 25 bp, Homo sapien
tccctgactccatttatcgaggatg

SEQ ID NO: 4994171 - DNA, 25 bp, Homo sapien
gactccatttatcgaggatggttga

SEQ ID NO: 4994172 - DNA, 25 bp, Homo sapien
ttctcaatttgtattaggtgcccct

SEQ ID NO: 4994173 - DNA, 25 bp, Homo sapien
ctcaatttgtattaggtgccccttt

SEQ ID NO: 4994174 - DNA, 25 bp, Homo sapien
gggagacctttcctgatacgctcat

SEQ ID NO: 4994175 - DNA, 25 bp, Homo sapien
tgccttatctgggagacctttcctg

SEQ ID NO: 4994176 - DNA, 25 bp, Homo sapien
ctcttttaggtcgtaggctgggtca

SEQ ID NO: 4994177 - DNA, 25 bp, Homo sapien
tatcagagggagtgtcgtgtttccc

SEQ ID NO: 4994178 - DNA, 25 bp, Homo sapien
ccatcctgaataggtcagtcactga

SEQ ID NO: 4994179 - DNA, 25 bp, Homo sapien
tctggtgtatctgcggtaggctgtc

SEQ ID NO: 4994180 - DNA, 25 bp, Homo sapien
gattgaaataccttttgacacccac

SEQ ID NO: 4994181 - DNA, 25 bp, Homo sapien
ggtcctaattagcttcttccacaag

SEQ ID NO: 4994182 - DNA, 25 bp, Homo sapien
cacctgttggcatcattggtcctaa

SEQ ID NO: 4994183 - DNA, 25 bp, Homo sapien
ttcttccacaaggatgtcaagtaat

SEQ ID NO: 4994184 - DNA, 25 bp, Homo sapien
caggaccctgctgttgtcttgagtt

SEQ ID NO: 4994185 - DNA, 25 bp, Homo sapien
taaaatgtgaccctctctgttgctg

SEQ ID NO: 4994186 - DNA, 25 bp, Homo sapien
gtccctgtcattgctgttccagatg

SEQ ID NO: 4994187 - DNA, 25 bp, Homo sapien
taatgtgcgggagatgtattctttg

SEQ ID NO: 4994188 - DNA, 25 bp, Homo sapien
ctgcttagacacattcactggttct

SEQ ID NO: 4994189 - DNA, 25 bp, Homo sapien
cctgcttagacacattcactggttc

SEQ ID NO: 4994190 - DNA, 25 bp, Homo sapien
ctacactgactatttcctgtggaat

SEQ ID NO: 4994191 - DNA, 25 bp, Homo sapien
tacactgactatttcctgtggaatt

SEQ ID NO: 4994192 - DNA, 25 bp, Homo sapien
tgtgacactgaattacagggcttct

SEQ ID NO: 4994193 - DNA, 25 bp, Homo sapien
tcttttattgaagtgctgactggaa

SEQ ID NO: 4994194 - DNA, 25 bp, Homo sapien
gatgtttctcatcttgtgacactga

SEQ ID NO: 4994195 - DNA, 25 bp, Homo sapien
gaagaagggttatcacagcagcccc

SEQ ID NO: 4994196 - DNA, 25 bp, Homo sapien
taatgagtcagcatgatgatgggcc

SEQ ID NO: 4994197 - DNA, 25 bp, Homo sapien
gccagggtcttgtaaggagagctca

SEQ ID NO: 4994198 - DNA, 25 bp, Homo sapien
cctttgtgcatacctaagacatctt

SEQ ID NO: 4994199 - DNA, 25 bp, Homo sapien
gctcactttttggaatggatcttcc

SEQ ID NO: 4994200 - DNA, 25 bp, Homo sapien
tctttcaagaaccatctacatagat

SEQ ID NO: 4994201 - DNA, 25 bp, Homo sapien
tgcaaagccaagttcagacaacata

SEQ ID NO: 4994202 - DNA, 25 bp, Homo sapien
caaagtctgtgaaaattatgctcct

SEQ ID NO: 4994203 - DNA, 25 bp, Homo sapien
taaacatggtatatcgtgagtcata

SEQ ID NO: 4994204 - DNA, 25 bp, Homo sapien
tgctgtcgggtctctgggatttcca

SEQ ID NO: 4994205 - DNA, 25 bp, Homo sapien
tcaaactgggatttcagccggctct

SEQ ID NO: 4994206 - DNA, 25 bp, Homo sapien
ccattctgccatgcgtgctgttgag

SEQ ID NO: 4994207 - DNA, 25 bp, Homo sapien
gagtgtaaggtgcaccattggcctc

SEQ ID NO: 4994208 - DNA, 25 bp, Homo sapien
cttttctgtgggtagagaaactgaa

SEQ ID NO: 4994209 - DNA, 25 bp, Homo sapien
gggtagagaaactgaagggcagcca

SEQ ID NO: 4994210 - DNA, 25 bp, Homo sapien
ctgcttttctgtgggtagagaaact

SEQ ID NO: 4994211 - DNA, 25 bp, Homo sapien
gcagccagcctgtctgcatggaggt

SEQ ID NO: 4994212 - DNA, 25 bp, Homo sapien
ctctggttccttctaacagtggttt

SEQ ID NO: 4994213 - DNA, 25 bp, Homo sapien
agatccaagaactctggttccttct

SEQ ID NO: 4994214 - DNA, 25 bp, Homo sapien
actccatgaggcaactgtcctccaa

SEQ ID NO: 4994215 - DNA, 25 bp, Homo sapien
agtgcattgcagatatcactggttg

SEQ ID NO: 4994216 - DNA, 25 bp, Homo sapien
gtgtcttgcatgctttgtttagtag

SEQ ID NO: 4994217 - DNA, 25 bp, Homo sapien
agcttgttttgctctagtatcctct

SEQ ID NO: 4994218 - DNA, 25 bp, Homo sapien
ctttagtgtcttgcatgctttgttt

SEQ ID NO: 4994219 - DNA, 25 bp, Homo sapien
ctctagtatcctctgcacgttccat

SEQ ID NO: 4994220 - DNA, 25 bp, Homo sapien
gtgctgctttctgcaagttttacat

SEQ ID NO: 4994221 - DNA, 25 bp, Homo sapien
ttcacaggtaaaggacctatcttta

SEQ ID NO: 4994222 - DNA, 25 bp, Homo sapien
tgggctgctttgctatcccagctgc

SEQ ID NO: 4994223 - DNA, 25 bp, Homo sapien
tgggtcccatgagcaatgcgcagag

SEQ ID NO: 4994224 - DNA, 25 bp, Homo sapien
ccatatgcatctgggttaaaggaca

SEQ ID NO: 4994225 - DNA, 25 bp, Homo sapien
aactgaactgagaaaggtccaaaat

SEQ ID NO: 4994226 - DNA, 25 bp, Homo sapien
gacaaagtcttaaccagtcctgcgg

SEQ ID NO: 4994227 - DNA, 25 bp, Homo sapien
atgtctgtgcaaatgagccatatgc

SEQ ID NO: 4994228 - DNA, 25 bp, Homo sapien
ggacaagattacagttgccagtcat

SEQ ID NO: 4994229 - DNA, 25 bp, Homo sapien
gagatgtttccttgaggtccaccaa

SEQ ID NO: 4994230 - DNA, 25 bp, Homo sapien
ccaccaagcccacagaatttggaaa

SEQ ID NO: 4994231 - DNA, 25 bp, Homo sapien
tttgctgtgcattggcaatgcctgg

SEQ ID NO: 4994232 - DNA, 25 bp, Homo sapien
tctgatcgtttctcctggtacttgt

SEQ ID NO: 4994233 - DNA, 25 bp, Homo sapien
tagattggcattcagaacccttagg

SEQ ID NO: 4994234 - DNA, 25 bp, Homo sapien
acatttctctgatcgtttctcctgg

SEQ ID NO: 4994235 - DNA, 25 bp, Homo sapien
ccttagggattttgaacttgacaca

SEQ ID NO: 4994236 - DNA, 25 bp, Homo sapien
gaatgggtaatcttctcataggttg

SEQ ID NO: 4994237 - DNA, 25 bp, Homo sapien
tcctatggaggttgtcagggacaat

SEQ ID NO: 4994238 - DNA, 25 bp, Homo sapien
tccacttctagtcgatgttcgggtg

SEQ ID NO: 4994239 - DNA, 25 bp, Homo sapien
tttgattctgaaggccgccttatcc

SEQ ID NO: 4994240 - DNA, 25 bp, Homo sapien
tgaaatgccagattcgtggaccatg

SEQ ID NO: 4994241 - DNA, 25 bp, Homo sapien
cagaccctccctgaatctcataagg

SEQ ID NO: 4994242 - DNA, 25 bp, Homo sapien
gggccatgcactgaaatgccagatt

SEQ ID NO: 4994243 - DNA, 25 bp, Homo sapien
gactgacagctttgacaccattacc

SEQ ID NO: 4994244 - DNA, 25 bp, Homo sapien
agcagagagttcactataatcaaaa

SEQ ID NO: 4994245 - DNA, 25 bp, Homo sapien
gagcagagagttcactataatcaaa

SEQ ID NO: 4994246 - DNA, 25 bp, Homo sapien
ctagagcagagagttcactataatc

SEQ ID NO: 4994247 - DNA, 25 bp, Homo sapien
tagagcagagagttcactataatca

SEQ ID NO: 4994248 - DNA, 25 bp, Homo sapien
gctgtagttcacactctttgcttgc

SEQ ID NO: 4994249 - DNA, 25 bp, Homo sapien
tgcagcagctgtagttcacactctt

SEQ ID NO: 4994250 - DNA, 25 bp, Homo sapien
gcagctgtagttcacactctttgct

SEQ ID NO: 4994251 - DNA, 25 bp, Homo sapien
gtagttcacactctttgcttgccat

SEQ ID NO: 4994252 - DNA, 25 bp, Homo sapien
accctctctgacacattcagcacca

SEQ ID NO: 4994253 - DNA, 25 bp, Homo sapien
cagctccaccctctctgacacattc

SEQ ID NO: 4994254 - DNA, 25 bp, Homo sapien
ctttcagctccaccctctctgacac

SEQ ID NO: 4994255 - DNA, 25 bp, Homo sapien
ccctctctgacacattcagcaccat

SEQ ID NO: 4994256 - DNA, 25 bp, Homo sapien
tccttcctggcccaagttaatagaa

SEQ ID NO: 4994257 - DNA, 25 bp, Homo sapien
ttgtgaggagaagggtcttttatct

SEQ ID NO: 4994258 - DNA, 25 bp, Homo sapien
ctgaaatgtcctaacaatgtagctt

SEQ ID NO: 4994259 - DNA, 25 bp, Homo sapien
aaaaagaagtccaatgctattctga

SEQ ID NO: 4994260 - DNA, 25 bp, Homo sapien
tgtaaccctctagctttcattatgg

SEQ ID NO: 4994261 - DNA, 25 bp, Homo sapien
tcttctgccagaattaagaagggac

SEQ ID NO: 4994262 - DNA, 25 bp, Homo sapien
ttcattatggaagctttactcccaa

SEQ ID NO: 4994263 - DNA, 25 bp, Homo sapien
tctggatcaccatatctagagggta

SEQ ID NO: 4994264 - DNA, 25 bp, Homo sapien
gggatagtgtctacccatgtaccta

SEQ ID NO: 4994265 - DNA, 25 bp, Homo sapien
cataagaaagagtcctccatgcagt

SEQ ID NO: 4994266 - DNA, 25 bp, Homo sapien
tgagttcctctatcccaagtccaac

SEQ ID NO: 4994267 - DNA, 25 bp, Homo sapien
aacatgaatctagaaagggtaagca

SEQ ID NO: 4994268 - DNA, 25 bp, Homo sapien
gatgttaaacgcttctgatacattt

SEQ ID NO: 4994269 - DNA, 25 bp, Homo sapien
acaggagatgttaaacgcttctgat

SEQ ID NO: 4994270 - DNA, 25 bp, Homo sapien
caggagatgttaaacgcttctgata

SEQ ID NO: 4994271 - DNA, 25 bp, Homo sapien
ggagatgttaaacgcttctgataca

SEQ ID NO: 4994272 - DNA, 25 bp, Homo sapien
ccttctaattcacgtagaagggaca

SEQ ID NO: 4994273 - DNA, 25 bp, Homo sapien
tcccttctaattcacgtagaaggga

SEQ ID NO: 4994274 - DNA, 25 bp, Homo sapien
gaaattaacagacatcacaatcctc

SEQ ID NO: 4994275 - DNA, 25 bp, Homo sapien
attattattggagaaattaacagac

SEQ ID NO: 4994276 - DNA, 25 bp, Homo sapien
aattaacagacatcacaatcctcat

SEQ ID NO: 4994277 - DNA, 25 bp, Homo sapien
attattggagaaattaacagacatc

SEQ ID NO: 4994278 - DNA, 25 bp, Homo sapien
gacttgatttgaccctgtttccaga

SEQ ID NO: 4994279 - DNA, 25 bp, Homo sapien
ccagaacaatgtgcaatggcttgac

SEQ ID NO: 4994280 - DNA, 25 bp, Homo sapien
ttcagtttgtagatataattcatca

SEQ ID NO: 4994281 - DNA, 25 bp, Homo sapien
tttagccacagaaattcaatttggt

SEQ ID NO: 4994282 - DNA, 25 bp, Homo sapien
tcactcagtgcttgaatgcacttgg

SEQ ID NO: 4994283 - DNA, 25 bp, Homo sapien
ttgcatcactcagtgcttgaatgca

SEQ ID NO: 4994284 - DNA, 25 bp, Homo sapien
ctcagtgcttgaatgcacttggtgt

SEQ ID NO: 4994285 - DNA, 25 bp, Homo sapien
gtgcttgaatgcacttggtgttcat

SEQ ID NO: 4994286 - DNA, 25 bp, Homo sapien
ctgtgcaatcctgagggttataatc

SEQ ID NO: 4994287 - DNA, 25 bp, Homo sapien
cttcctgtgcaatcctgagggttat

SEQ ID NO: 4994288 - DNA, 25 bp, Homo sapien
tcctgtgcaatcctgagggttataa

SEQ ID NO: 4994289 - DNA, 25 bp, Homo sapien
ttcttcctgtgcaatcctgagggtt

SEQ ID NO: 4994290 - DNA, 25 bp, Homo sapien
gaatcccctcgattgccgaaaggca

SEQ ID NO: 4994291 - DNA, 25 bp, Homo sapien
ccctcgattgccgaaaggcaagaag

SEQ ID NO: 4994292 - DNA, 25 bp, Homo sapien
agcctgaatcccctcgattgccgaa

SEQ ID NO: 4994293 - DNA, 25 bp, Homo sapien
tcgattgccgaaaggcaagaagtga

SEQ ID NO: 4994294 - DNA, 25 bp, Homo sapien
cttccagagtccaaacaggccccat

SEQ ID NO: 4994295 - DNA, 25 bp, Homo sapien
ggtgtgctgcattgggcaggggctg

SEQ ID NO: 4994296 - DNA, 25 bp, Homo sapien
gcttccagagtccaaacaggcccca

SEQ ID NO: 4994297 - DNA, 25 bp, Homo sapien
agctgcaaggtacactttcaggacc

SEQ ID NO: 4994298 - DNA, 25 bp, Homo sapien
gggaaggaagaacacctgaaccagc

SEQ ID NO: 4994299 - DNA, 25 bp, Homo sapien
acactttcaggaccaccaggcaatg

SEQ ID NO: 4994300 - DNA, 25 bp, Homo sapien
gaaccagcagctattgttcccctct

SEQ ID NO: 4994301 - DNA, 25 bp, Homo sapien
gaaggcttaggttaacattggcgag

SEQ ID NO: 4994302 - DNA, 25 bp, Homo sapien
caagaaggcttaggttaacattggc

SEQ ID NO: 4994303 - DNA, 25 bp, Homo sapien
cttaggttaacattggcgagattca

SEQ ID NO: 4994304 - DNA, 25 bp, Homo sapien
tgcccaagaaggcttaggttaacat

SEQ ID NO: 4994305 - DNA, 25 bp, Homo sapien
agtacacgctactatgctacggcag

SEQ ID NO: 4994306 - DNA, 25 bp, Homo sapien
gaaagctttattctcggaagtacac

SEQ ID NO: 4994307 - DNA, 25 bp, Homo sapien
ccagagggtaacgaggcaggcactt

SEQ ID NO: 4994308 - DNA, 25 bp, Homo sapien
gctaccatgccagggccagagggta

SEQ ID NO: 4994309 - DNA, 25 bp, Homo sapien
cagtttgaatgcagttgtcagtgct

SEQ ID NO: 4994310 - DNA, 25 bp, Homo sapien
tagagtctggactgtgcttggcaca

SEQ ID NO: 4994311 - DNA, 25 bp, Homo sapien
tcagtaggtgagctatcaaacccac

SEQ ID NO: 4994312 - DNA, 25 bp, Homo sapien
tgttcctggaggacaattgtaagca

SEQ ID NO: 4994313 - DNA, 25 bp, Homo sapien
gtgaagtcacaatttcaggaagcaa

SEQ ID NO: 4994314 - DNA, 25 bp, Homo sapien
caacaggcatcttggttcagttcta

SEQ ID NO: 4994315 - DNA, 25 bp, Homo sapien
gagctctctgcctctgatattgtgg

SEQ ID NO: 4994316 - DNA, 25 bp, Homo sapien
gaatgcttgttctatccccccagaa

SEQ ID NO: 4994317 - DNA, 25 bp, Homo sapien
taaactcaaccaccagggagtccaa

SEQ ID NO: 4994318 - DNA, 25 bp, Homo sapien
tcaaccaccagggagtccaatcttt

SEQ ID NO: 4994319 - DNA, 25 bp, Homo sapien
tcttgggtcttttgcttccaaaatc

SEQ ID NO: 4994320 - DNA, 25 bp, Homo sapien
cagggagtccaatcttttattcatt

SEQ ID NO: 4994321 - DNA, 25 bp, Homo sapien
tgtcacttctgcatgtgaagcggag

SEQ ID NO: 4994322 - DNA, 25 bp, Homo sapien
catgtgaagcggagcttctgaacga

SEQ ID NO: 4994323 - DNA, 25 bp, Homo sapien
cacttctgcatgtgaagcggagctt

SEQ ID NO: 4994324 - DNA, 25 bp, Homo sapien
tgaacgatagccttcatcttgtcca

SEQ ID NO: 4994325 - DNA, 25 bp, Homo sapien
ctctggagttgccatgactttcagt

SEQ ID NO: 4994326 - DNA, 25 bp, Homo sapien
tatcatcagcaaagagtaaaaagac

SEQ ID NO: 4994327 - DNA, 25 bp, Homo sapien
ggagttgccatgactttcagtaaag

SEQ ID NO: 4994328 - DNA, 25 bp, Homo sapien
aagagtaaaaagacaagctggaatc

SEQ ID NO: 4994329 - DNA, 25 bp, Homo sapien
tgatgctacaacctccttgtccaga

SEQ ID NO: 4994330 - DNA, 25 bp, Homo sapien
tacaacctccttgtccagacacttt

SEQ ID NO: 4994331 - DNA, 25 bp, Homo sapien
tctgcgtgatgctacaacctccttg

SEQ ID NO: 4994332 - DNA, 25 bp, Homo sapien
tgcgtgatgctacaacctccttgtc

SEQ ID NO: 4994333 - DNA, 25 bp, Homo sapien
ctaaacagggttgagctcccaatca

SEQ ID NO: 4994334 - DNA, 25 bp, Homo sapien
taaacagggttgagctcccaatcac

SEQ ID NO: 4994335 - DNA, 25 bp, Homo sapien
ccaagggcttacaccccatgagcat

SEQ ID NO: 4994336 - DNA, 25 bp, Homo sapien
accaagggcttacaccccatgagca

SEQ ID NO: 4994337 - DNA, 25 bp, Homo sapien
tttgtattaaatgtctgggtcttgg

SEQ ID NO: 4994338 - DNA, 25 bp, Homo sapien
atttgtattaaatgtctgggtcttg

SEQ ID NO: 4994339 - DNA, 25 bp, Homo sapien
gcagaagcaaacttcctgtatttgt

SEQ ID NO: 4994340 - DNA, 25 bp, Homo sapien
taggcagaagcaaacttcctgtatt

SEQ ID NO: 4994341 - DNA, 25 bp, Homo sapien
ggtgatatctctatagaataaggat

SEQ ID NO: 4994342 - DNA, 25 bp, Homo sapien
tccttggagtgaaccttctagtttg

SEQ ID NO: 4994343 - DNA, 25 bp, Homo sapien
aaccttctagtttgctggattcctc

SEQ ID NO: 4994344 - DNA, 25 bp, Homo sapien
tatgctggtgatatctctatagaat

SEQ ID NO: 4994345 - DNA, 25 bp, Homo sapien
atgatcttgttatgactcatcatga

SEQ ID NO: 4994346 - DNA, 25 bp, Homo sapien
tgatcttgttatgactcatcatgaa

SEQ ID NO: 4994347 - DNA, 25 bp, Homo sapien
tgctcatgtcaaagggagtcaactc

SEQ ID NO: 4994348 - DNA, 25 bp, Homo sapien
tttggatacactggatgctcatgtc

SEQ ID NO: 4994349 - DNA, 25 bp, Homo sapien
tgtcaaagggagtcaactcatcttt

SEQ ID NO: 4994350 - DNA, 25 bp, Homo sapien
gggagtcaactcatctttactctga

SEQ ID NO: 4994351 - DNA, 25 bp, Homo sapien
agaaaagggtattccccatcctgct

SEQ ID NO: 4994352 - DNA, 25 bp, Homo sapien
tcagtatgagtaatcttggtcttac

SEQ ID NO: 4994353 - DNA, 25 bp, Homo sapien
tgtcagtatgagtaatcttggtctt

SEQ ID NO: 4994354 - DNA, 25 bp, Homo sapien
ttatgtcagtatgagtaatcttggt

SEQ ID NO: 4994355 - DNA, 25 bp, Homo sapien
tatgtcagtatgagtaatcttggtc

SEQ ID NO: 4994356 - DNA, 25 bp, Homo sapien
tgaaggaaatgtcaaatgatactct

SEQ ID NO: 4994357 - DNA, 25 bp, Homo sapien
ggaaatgtcaaatgatactcttcag

SEQ ID NO: 4994358 - DNA, 25 bp, Homo sapien
aaggaaatgtcaaatgatactcttc

SEQ ID NO: 4994359 - DNA, 25 bp, Homo sapien
gaaggaaatgtcaaatgatactctt

SEQ ID NO: 4994360 - DNA, 25 bp, Homo sapien
ttgatagttgaacttgatgatccag

SEQ ID NO: 4994361 - DNA, 25 bp, Homo sapien
gatagttgaacttgatgatccagtt

SEQ ID NO: 4994362 - DNA, 25 bp, Homo sapien
agtcaacgagctggatcaccatgtc

SEQ ID NO: 4994363 - DNA, 25 bp, Homo sapien
tgaaatcttgaagtcaacgagctgg

SEQ ID NO: 4994364 - DNA, 25 bp, Homo sapien
caacaaatcttttcccctacatatc

SEQ ID NO: 4994365 - DNA, 25 bp, Homo sapien
gcaacaaatcttttcccctacatat

SEQ ID NO: 4994366 - DNA, 25 bp, Homo sapien
tgcaacaaatcttttcccctacata

SEQ ID NO: 4994367 - DNA, 25 bp, Homo sapien
catgataccggccattgaagaggtc

SEQ ID NO: 4994368 - DNA, 25 bp, Homo sapien
cccatccaagctttctaataacatg

SEQ ID NO: 4994369 - DNA, 25 bp, Homo sapien
ccccatccaagctttctaataacat

SEQ ID NO: 4994370 - DNA, 25 bp, Homo sapien
aataacatgataccggccattgaag

SEQ ID NO: 4994371 - DNA, 25 bp, Homo sapien
tgcagtagtccgcagggtcctcttg

SEQ ID NO: 4994372 - DNA, 25 bp, Homo sapien
ggatgatagccacctttgcagtagt

SEQ ID NO: 4994373 - DNA, 25 bp, Homo sapien
ttgctcatcatctgatccaggatct

SEQ ID NO: 4994374 - DNA, 25 bp, Homo sapien
cctcctttggctctggtggtgtggg

SEQ ID NO: 4994375 - DNA, 25 bp, Homo sapien
gataatgaagaagaccgcccaaata

SEQ ID NO: 4994376 - DNA, 25 bp, Homo sapien
gaggaatataatcttgatgagccaa

SEQ ID NO: 4994377 - DNA, 25 bp, Homo sapien
tggagcagcaactggacgatgaaga

SEQ ID NO: 4994378 - DNA, 25 bp, Homo sapien
gaagaccgcccaaatactgaggaat

SEQ ID NO: 4994379 - DNA, 25 bp, Homo sapien
aggacggtttcagcctccagtactg

SEQ ID NO: 4994380 - DNA, 25 bp, Homo sapien
tgagggatcaccacttactgacaga

SEQ ID NO: 4994381 - DNA, 25 bp, Homo sapien
cagtactggggatttgccaaaagca

SEQ ID NO: 4994382 - DNA, 25 bp, Homo sapien
aagcaggacggtttcagcctccagt

SEQ ID NO: 4994383 - DNA, 25 bp, Homo sapien
ggttccagaaaaaacgatcctcagc

SEQ ID NO: 4994384 - DNA, 25 bp, Homo sapien
caccagaaaaggagaactgcgacat

SEQ ID NO: 4994385 - DNA, 25 bp, Homo sapien
gcaagtgttcccagagcgttggaca

SEQ ID NO: 4994386 - DNA, 25 bp, Homo sapien
gcgttggacataaacggtgactctc

SEQ ID NO: 4994387 - DNA, 25 bp, Homo sapien
agatcctttctcaaaagcaccacag

SEQ ID NO: 4994388 - DNA, 25 bp, Homo sapien
gccaggggactgaattcacacaggt

SEQ ID NO: 4994389 - DNA, 25 bp, Homo sapien
cacacaggtgtttgatatcatccaa

SEQ ID NO: 4994390 - DNA, 25 bp, Homo sapien
gatcctttctcaaaagcaccacagt

SEQ ID NO: 4994391 - DNA, 25 bp, Homo sapien
cacaggacatagatggtttaggcat

SEQ ID NO: 4994392 - DNA, 25 bp, Homo sapien
acacaggacatagatggtttaggca

SEQ ID NO: 4994393 - DNA, 25 bp, Homo sapien
acaacacaggacatagatggtttag

SEQ ID NO: 4994394 - DNA, 25 bp, Homo sapien
aacacaggacatagatggtttaggc

SEQ ID NO: 4994395 - DNA, 25 bp, Homo sapien
caaagcttgagagtctgttaggagc

SEQ ID NO: 4994396 - DNA, 25 bp, Homo sapien
agtaattccatatcctaggcggggt

SEQ ID NO: 4994397 - DNA, 25 bp, Homo sapien
cctaggcggggtatctgtgagaacc

SEQ ID NO: 4994398 - DNA, 25 bp, Homo sapien
gagccttctcccaactagcttttgg

SEQ ID NO: 4994399 - DNA, 25 bp, Homo sapien
tccaataagcaacttccaagataga

SEQ ID NO: 4994400 - DNA, 25 bp, Homo sapien
tttctgtctataggcaaaacaacag

SEQ ID NO: 4994401 - DNA, 25 bp, Homo sapien
attcgcaatgcatcatctaaatttc

SEQ ID NO: 4994402 - DNA, 25 bp, Homo sapien
caacagaactcctcgttcggaaatt

SEQ ID NO: 4994403 - DNA, 25 bp, Homo sapien
ttctgaggtcacctgccctaccagg

SEQ ID NO: 4994404 - DNA, 25 bp, Homo sapien
gtttctcggatgatcagcctccctg

SEQ ID NO: 4994405 - DNA, 25 bp, Homo sapien
tgggatggctccaactccagaacag

SEQ ID NO: 4994406 - DNA, 25 bp, Homo sapien
agcctccctggtttgccactttgca

SEQ ID NO: 4994407 - DNA, 25 bp, Homo sapien
caagtgtgagttgggtgccaagccc

SEQ ID NO: 4994408 - DNA, 25 bp, Homo sapien
tctgactcttccaagtgtgagttgg

SEQ ID NO: 4994409 - DNA, 25 bp, Homo sapien
aagcccctctagacacagcctcttg

SEQ ID NO: 4994410 - DNA, 25 bp, Homo sapien
gccaattccacccagtcctgtctcc

SEQ ID NO: 4994411 - DNA, 25 bp, Homo sapien
ggtcaaagactctcaaaagacacca

SEQ ID NO: 4994412 - DNA, 25 bp, Homo sapien
taaactggtcaaagactctcaaaag

SEQ ID NO: 4994413 - DNA, 25 bp, Homo sapien
cctcactaaactggtcaaagactct

SEQ ID NO: 4994414 - DNA, 25 bp, Homo sapien
tcactaaactggtcaaagactctca

SEQ ID NO: 4994415 - DNA, 25 bp, Homo sapien
ttgaaagggatgcactcacagagta

SEQ ID NO: 4994416 - DNA, 25 bp, Homo sapien
aaagggatgcactcacagagtaagg

SEQ ID NO: 4994417 - DNA, 25 bp, Homo sapien
agtaaggcaggcatttaggagtcga

SEQ ID NO: 4994418 - DNA, 25 bp, Homo sapien
ggcaggcatttaggagtcgactcat

SEQ ID NO: 4994419 - DNA, 25 bp, Homo sapien
tgcaacatgtggtgaaggggacaga

SEQ ID NO: 4994420 - DNA, 25 bp, Homo sapien
caacatgtggtgaaggggacagagt

SEQ ID NO: 4994421 - DNA, 25 bp, Homo sapien
ctgcaacatgtggtgaaggggacag

SEQ ID NO: 4994422 - DNA, 25 bp, Homo sapien
acatgtggtgaaggggacagagtta

SEQ ID NO: 4994423 - DNA, 25 bp, Homo sapien
gactgcattgtaaatcccgtattga

SEQ ID NO: 4994424 - DNA, 25 bp, Homo sapien
taaatcccgtattgagcaggagggc

SEQ ID NO: 4994425 - DNA, 25 bp, Homo sapien
caaagggcttgacttcagaagcagc

SEQ ID NO: 4994426 - DNA, 25 bp, Homo sapien
taccaaatggtcgaagagatgatct

SEQ ID NO: 4994427 - DNA, 25 bp, Homo sapien
ttaaggcactgtcaagtccactgtg

SEQ ID NO: 4994428 - DNA, 25 bp, Homo sapien
cactaggtatgccataagcagcccc

SEQ ID NO: 4994429 - DNA, 25 bp, Homo sapien
ttttggcacagcaggccgtgcctac

SEQ ID NO: 4994430 - DNA, 25 bp, Homo sapien
gcagacccatcatggtgccttggtg

SEQ ID NO: 4994431 - DNA, 25 bp, Homo sapien
gaggcttaagcagagcaggtgtctt

SEQ ID NO: 4994432 - DNA, 25 bp, Homo sapien
gccagggctccaccattatgcctaa

SEQ ID NO: 4994433 - DNA, 25 bp, Homo sapien
tcggtgaggaccctaagagacctgc

SEQ ID NO: 4994434 - DNA, 25 bp, Homo sapien
aggtgtcttgacagctctcggtgag

SEQ ID NO: 4994435 - DNA, 25 bp, Homo sapien
ctatcgagggaggtataagtctcac

SEQ ID NO: 4994436 - DNA, 25 bp, Homo sapien
ctgctatcgagggaggtataagtct

SEQ ID NO: 4994437 - DNA, 25 bp, Homo sapien
cacaactgctatcgagggaggtata

SEQ ID NO: 4994438 - DNA, 25 bp, Homo sapien
caactgctatcgagggaggtataag

SEQ ID NO: 4994439 - DNA, 25 bp, Homo sapien
catggagtctccaccgggatctact

SEQ ID NO: 4994440 - DNA, 25 bp, Homo sapien
aagagtaaagactgctcttatcatc

SEQ ID NO: 4994441 - DNA, 25 bp, Homo sapien
aaagagtaaagactgctcttatcat

SEQ ID NO: 4994442 - DNA, 25 bp, Homo sapien
tccaccgggatctactccatcacca

SEQ ID NO: 4994443 - DNA, 25 bp, Homo sapien
aaagcagatttacccctcaggaaga

SEQ ID NO: 4994444 - DNA, 25 bp, Homo sapien
agaagagggttagcaaaagcagatt

SEQ ID NO: 4994445 - DNA, 25 bp, Homo sapien
aagagggttagcaaaagcagattta

SEQ ID NO: 4994446 - DNA, 25 bp, Homo sapien
gaagagggttagcaaaagcagattt

SEQ ID NO: 4994447 - DNA, 25 bp, Homo sapien
agcactaatggtgcttgattctgtc

SEQ ID NO: 4994448 - DNA, 25 bp, Homo sapien
cactaatggtgcttgattctgtctt

SEQ ID NO: 4994449 - DNA, 25 bp, Homo sapien
aatatcagcactaatggtgcttgat

SEQ ID NO: 4994450 - DNA, 25 bp, Homo sapien
tcagcactaatggtgcttgattctg

SEQ ID NO: 4994451 - DNA, 25 bp, Homo sapien
tagaggtttggctgatatgcatgaa

SEQ ID NO: 4994452 - DNA, 25 bp, Homo sapien
gaattcgtgatttgggaagattttc

SEQ ID NO: 4994453 - DNA, 25 bp, Homo sapien
ctggtagaggtttggctgatatgca

SEQ ID NO: 4994454 - DNA, 25 bp, Homo sapien
gatatgcatgaattcgtgatttggg

SEQ ID NO: 4994455 - DNA, 25 bp, Homo sapien
cattagctcagcatcggttcttgcc

SEQ ID NO: 4994456 - DNA, 25 bp, Homo sapien
gtacagttcaacaggagggcaccct

SEQ ID NO: 4994457 - DNA, 25 bp, Homo sapien
aaataccttgacacactctcattag

SEQ ID NO: 4994458 - DNA, 25 bp, Homo sapien
ggttcttgccttaaggtacagttca

SEQ ID NO: 4994459 - DNA, 25 bp, Homo sapien
agctttcttcagttccgttcctaat

SEQ ID NO: 4994460 - DNA, 25 bp, Homo sapien
gttgcgatctccatcagacactggg

SEQ ID NO: 4994461 - DNA, 25 bp, Homo sapien
tgggaacttgcttgcatgtcaagct

SEQ ID NO: 4994462 - DNA, 25 bp, Homo sapien
tgtcctggactctcttggcttgtgg

SEQ ID NO: 4994463 - DNA, 25 bp, Homo sapien
tttggctcttgcactttgattccgc

SEQ ID NO: 4994464 - DNA, 25 bp, Homo sapien
tgcactttgattccgcaggtggact

SEQ ID NO: 4994465 - DNA, 25 bp, Homo sapien
gtccttttggctcttgcactttgat

SEQ ID NO: 4994466 - DNA, 25 bp, Homo sapien
gcaggtggactttgacttggatctg

SEQ ID NO: 4994467 - DNA, 25 bp, Homo sapien
ttatttcccaagcaaatcaattaga

SEQ ID NO: 4994468 - DNA, 25 bp, Homo sapien
tctttttcagcaaggaggatggagt

SEQ ID NO: 4994469 - DNA, 25 bp, Homo sapien
gcaggtaggggatggtatttatttc

SEQ ID NO: 4994470 - DNA, 25 bp, Homo sapien
aggatggagtgggcaggtaggggat

SEQ ID NO: 4994471 - DNA, 25 bp, Homo sapien
caaatttgctctgttaacaaattga

SEQ ID NO: 4994472 - DNA, 25 bp, Homo sapien
gccatgagtagcaagttattctaac

SEQ ID NO: 4994473 - DNA, 25 bp, Homo sapien
gaatctgtgacttcctaatcttgcc

SEQ ID NO: 4994474 - DNA, 25 bp, Homo sapien
aaaacactctatttatgtctcacta

SEQ ID NO: 4994475 - DNA, 25 bp, Homo sapien
caatcaaatatgtaacattgctgaa

SEQ ID NO: 4994476 - DNA, 25 bp, Homo sapien
aatatttccagtataaattggactg

SEQ ID NO: 4994477 - DNA, 25 bp, Homo sapien
gactgaactgataaatcaatgcttt

SEQ ID NO: 4994478 - DNA, 25 bp, Homo sapien
aatatgtaacattgctgaaatgaag

SEQ ID NO: 4994479 - DNA, 25 bp, Homo sapien
tgtttttatggtatatggtgtatca

SEQ ID NO: 4994480 - DNA, 25 bp, Homo sapien
tcgtaaccacacagaatcatatgat

SEQ ID NO: 4994481 - DNA, 25 bp, Homo sapien
gcctcgtaaccacacagaatcatat

SEQ ID NO: 4994482 - DNA, 25 bp, Homo sapien
tcagcctcgtaaccacacagaatca

SEQ ID NO: 4994483 - DNA, 25 bp, Homo sapien
ccacaaacataacacagcatgaata

SEQ ID NO: 4994484 - DNA, 25 bp, Homo sapien
caaacataacacagcatgaatatgt

SEQ ID NO: 4994485 - DNA, 25 bp, Homo sapien
caccaaacagcaggcagagtttatt

SEQ ID NO: 4994486 - DNA, 25 bp, Homo sapien
acataacacagcatgaatatgtctg

SEQ ID NO: 4994487 - DNA, 25 bp, Homo sapien
cacagcattaggtgcatgggaaatg

SEQ ID NO: 4994488 - DNA, 25 bp, Homo sapien
gttttcacagcattaggtgcatggg

SEQ ID NO: 4994489 - DNA, 25 bp, Homo sapien
attcttccactcataaggtgctttc

SEQ ID NO: 4994490 - DNA, 25 bp, Homo sapien
ataaggtgctttctctggatgccac

SEQ ID NO: 4994491 - DNA, 25 bp, Homo sapien
tttcactgattagcaaccttttaca

SEQ ID NO: 4994492 - DNA, 25 bp, Homo sapien
gctgagctgaggaatctatccctgt

SEQ ID NO: 4994493 - DNA, 25 bp, Homo sapien
gacgatttgcttttcgagatactca

SEQ ID NO: 4994494 - DNA, 25 bp, Homo sapien
gagatactcatagcaaagtagaagc

SEQ ID NO: 4994495 - DNA, 25 bp, Homo sapien
ccaccccattcaggaaaatacccag

SEQ ID NO: 4994496 - DNA, 25 bp, Homo sapien
caccccattcaggaaaatacccagg

SEQ ID NO: 4994497 - DNA, 25 bp, Homo sapien
ttcaccaccccattcaggaaaatac

SEQ ID NO: 4994498 - DNA, 25 bp, Homo sapien
ttcttcaccaccccattcaggaaaa

SEQ ID NO: 4994499 - DNA, 25 bp, Homo sapien
gttgaaataaactcaatcttgccat

SEQ ID NO: 4994500 - DNA, 25 bp, Homo sapien
tgttgaaataaactcaatcttgcca

SEQ ID NO: 4994501 - DNA, 25 bp, Homo sapien
ttgaaataaactcaatcttgccatc

SEQ ID NO: 4994502 - DNA, 25 bp, Homo sapien
cacggagaggctccacttatggaaa

SEQ ID NO: 4994503 - DNA, 25 bp, Homo sapien
gagaggctccacttatggaaattgg

SEQ ID NO: 4994504 - DNA, 25 bp, Homo sapien
ttcacggagaggctccacttatgga

SEQ ID NO: 4994505 - DNA, 25 bp, Homo sapien
cttatggaaattggcagtcagaggt

SEQ ID NO: 4994506 - DNA, 25 bp, Homo sapien
ctactgctaatgacagcaacaactc

SEQ ID NO: 4994507 - DNA, 25 bp, Homo sapien
aacaactcagtaggaaaattctgga

SEQ ID NO: 4994508 - DNA, 25 bp, Homo sapien
acagcaacaactcagtaggaaaatt

SEQ ID NO: 4994509 - DNA, 25 bp, Homo sapien
tactgctaatgacagcaacaactca

SEQ ID NO: 4994510 - DNA, 25 bp, Homo sapien
tgccccacacaggaaaatagtctcc

SEQ ID NO: 4994511 - DNA, 25 bp, Homo sapien
taagcactctccactaatcagcagt

SEQ ID NO: 4994512 - DNA, 25 bp, Homo sapien
ggcattgccacgtcaacagtatctg

SEQ ID NO: 4994513 - DNA, 25 bp, Homo sapien
gaaaatagtctccatcatcaaaact

SEQ ID NO: 4994514 - DNA, 25 bp, Homo sapien
ctgtatggacaagttataaaatatt

SEQ ID NO: 4994515 - DNA, 25 bp, Homo sapien
gtctgaggtcaacacttcctccagg

SEQ ID NO: 4994516 - DNA, 25 bp, Homo sapien
taatctgagcgtctgaggtcaacac

SEQ ID NO: 4994517 - DNA, 25 bp, Homo sapien
aaatattttggccactttagcataa

SEQ ID NO: 4994518 - DNA, 25 bp, Homo sapien
tgagcatctggacaggctagctccc

SEQ ID NO: 4994519 - DNA, 25 bp, Homo sapien
gtatgtattcctgtctacactgcta

SEQ ID NO: 4994520 - DNA, 25 bp, Homo sapien
aggctagctccccaaagtatgtatt

SEQ ID NO: 4994521 - DNA, 25 bp, Homo sapien
ctacactgctacttgattcagattc

SEQ ID NO: 4994522 - DNA, 25 bp, Homo sapien
atagtctttctctgtaagatccagc

SEQ ID NO: 4994523 - DNA, 25 bp, Homo sapien
gctgtgttttgccagcaaacaactc

SEQ ID NO: 4994524 - DNA, 25 bp, Homo sapien
gatctactctaagtccaaacaagct

SEQ ID NO: 4994525 - DNA, 25 bp, Homo sapien
gcaaacaactctgggatctactcta

SEQ ID NO: 4994526 - DNA, 25 bp, Homo sapien
ccaggtctctcacaagttcatagta

SEQ ID NO: 4994527 - DNA, 25 bp, Homo sapien
cataggacgcagcaatatagtatct

SEQ ID NO: 4994528 - DNA, 25 bp, Homo sapien
tgcagactccaagtactttacatag

SEQ ID NO: 4994529 - DNA, 25 bp, Homo sapien
caagtactttacataggacgcagca

SEQ ID NO: 4994530 - DNA, 25 bp, Homo sapien
gcagcaatatagtatcttccatagt

SEQ ID NO: 4994531 - DNA, 25 bp, Homo sapien
ttattacggcatttttgcattaata

SEQ ID NO: 4994532 - DNA, 25 bp, Homo sapien
ctttattacggcatttttgcattaa

SEQ ID NO: 4994533 - DNA, 25 bp, Homo sapien
cgcagagtagcaggcccagcacgca

SEQ ID NO: 4994534 - DNA, 25 bp, Homo sapien
cgatgatgggcttcttggcggtgtc

SEQ ID NO: 4994535 - DNA, 25 bp, Homo sapien
tgtcgccgtggggtctagacagctc

SEQ ID NO: 4994536 - DNA, 25 bp, Homo sapien
gggtctagacagctcgaggctcgcc

SEQ ID NO: 4994537 - DNA, 25 bp, Homo sapien
aggctctgggagtgcagccggcgct

SEQ ID NO: 4994538 - DNA, 25 bp, Homo sapien
gcgtgggcctatgggaaatgcagtc

SEQ ID NO: 4994539 - DNA, 25 bp, Homo sapien
cagcgcactcgcgtgagactcgggt

SEQ ID NO: 4994540 - DNA, 25 bp, Homo sapien
cctttcaaaagctctgcgggcgggc

SEQ ID NO: 4994541 - DNA, 25 bp, Homo sapien
ctaagcggagactctggaaacgcct

SEQ ID NO: 4994542 - DNA, 25 bp, Homo sapien
agactctggaaacgcctggggcggg

SEQ ID NO: 4994543 - DNA, 25 bp, Homo sapien
aagcggagactctggaaacgcctgg

SEQ ID NO: 4994544 - DNA, 25 bp, Homo sapien
ggagactctggaaacgcctggggcg

SEQ ID NO: 4994545 - DNA, 25 bp, Homo sapien
gaatggtgacaacgttcgctgtacg

SEQ ID NO: 4994546 - DNA, 25 bp, Homo sapien
gcatcactagggtcagaactgggcc

SEQ ID NO: 4994547 - DNA, 25 bp, Homo sapien
aactccgggcgtctactttgaagcg

SEQ ID NO: 4994548 - DNA, 25 bp, Homo sapien
ttcagtcacccgtacaaagctgggc

SEQ ID NO: 4994549 - DNA, 25 bp, Homo sapien
tgtagtcttgcagcagttttggtgg

SEQ ID NO: 4994550 - DNA, 25 bp, Homo sapien
ggttgaggacacctaaagtgtattc

SEQ ID NO: 4994551 - DNA, 25 bp, Homo sapien
tcatccctttcatgtataaaaaggg

SEQ ID NO: 4994552 - DNA, 25 bp, Homo sapien
aggttgtattctttgtagtcttgca

SEQ ID NO: 4994553 - DNA, 25 bp, Homo sapien
ctaaccagaaaagtcgtaggattgt

SEQ ID NO: 4994554 - DNA, 25 bp, Homo sapien
gtaccgctgccaatcctaattttat

SEQ ID NO: 4994555 - DNA, 25 bp, Homo sapien
gattgtaccgctgccaatcctaatt

SEQ ID NO: 4994556 - DNA, 25 bp, Homo sapien
aagtcgtaggattgtaccgctgcca

SEQ ID NO: 4994557 - DNA, 25 bp, Homo sapien
gaaatacggtgttgaactaagcagc

SEQ ID NO: 4994558 - DNA, 25 bp, Homo sapien
taagcagctggaataccagcctgtc

SEQ ID NO: 4994559 - DNA, 25 bp, Homo sapien
tgggtactaaactaatcactcctcc

SEQ ID NO: 4994560 - DNA, 25 bp, Homo sapien
taaattacgtgcagttgagtaacac

SEQ ID NO: 4994561 - DNA, 25 bp, Homo sapien
aaacacctgtgttgctcatgtcaga

SEQ ID NO: 4994562 - DNA, 25 bp, Homo sapien
catacaaagatgcacatgagcagct

SEQ ID NO: 4994563 - DNA, 25 bp, Homo sapien
tagtatggcatatagactcctcagc

SEQ ID NO: 4994564 - DNA, 25 bp, Homo sapien
gctgaaagtttctatcacggccagg

SEQ ID NO: 4994565 - DNA, 25 bp, Homo sapien
tgtttgtagttgttcccatgcatgt

SEQ ID NO: 4994566 - DNA, 25 bp, Homo sapien
ttgaatgctctcagaaatgctgctg

SEQ ID NO: 4994567 - DNA, 25 bp, Homo sapien
gctgctgagataatcttcagacttc

SEQ ID NO: 4994568 - DNA, 25 bp, Homo sapien
aaatgctgaagcaagctttgtttgt

SEQ ID NO: 4994569 - DNA, 25 bp, Homo sapien
gataccacatcctttattcctctgg

SEQ ID NO: 4994570 - DNA, 25 bp, Homo sapien
gcattagatgcatttccagtggaaa

SEQ ID NO: 4994571 - DNA, 25 bp, Homo sapien
tactgtggatctaataaccttactg

SEQ ID NO: 4994572 - DNA, 25 bp, Homo sapien
acactttagaaggaaaccgcattag

SEQ ID NO: 4994573 - DNA, 25 bp, Homo sapien
tcatagaatgccctgaagttaagag

SEQ ID NO: 4994574 - DNA, 25 bp, Homo sapien
cactttctagggcaaaatgttcctc

SEQ ID NO: 4994575 - DNA, 25 bp, Homo sapien
aaacttgaaccaaaagcatacctgc

SEQ ID NO: 4994576 - DNA, 25 bp, Homo sapien
taagagaaagccgtagaaacttgaa

SEQ ID NO: 4994577 - DNA, 25 bp, Homo sapien
tcaaatggatgccacgaactttcaa

SEQ ID NO: 4994578 - DNA, 25 bp, Homo sapien
ggtttgatcatggaaaagacagcat

SEQ ID NO: 4994579 - DNA, 25 bp, Homo sapien
ggaaaattactggttcatttatcaa

SEQ ID NO: 4994580 - DNA, 25 bp, Homo sapien
tggatgccacgaactttcaatggaa

SEQ ID NO: 4994581 - DNA, 25 bp, Homo sapien
cgtaagtacagcagcaatcttcttg

SEQ ID NO: 4994582 - DNA, 25 bp, Homo sapien
tggctacggatggagtgatttgaaa

SEQ ID NO: 4994583 - DNA, 25 bp, Homo sapien
cttcttggctacggatggagtgatt

SEQ ID NO: 4994584 - DNA, 25 bp, Homo sapien
tcttggctacggatggagtgatttg

SEQ ID NO: 4994585 - DNA, 25 bp, Homo sapien
gctcggatgtgattagacttactcg

SEQ ID NO: 4994586 - DNA, 25 bp, Homo sapien
gattccattccgctgagtttctacc

SEQ ID NO: 4994587 - DNA, 25 bp, Homo sapien
cttccagatcaaagatagccttgat

SEQ ID NO: 4994588 - DNA, 25 bp, Homo sapien
tctacctcctgtacaataagctcgg

SEQ ID NO: 4994589 - DNA, 25 bp, Homo sapien
ccagcctttaggaggccaataatac

SEQ ID NO: 4994590 - DNA, 25 bp, Homo sapien
tctagggtgtagatctgcacttatt

SEQ ID NO: 4994591 - DNA, 25 bp, Homo sapien
tctgctctccacttataatagtttt

SEQ ID NO: 4994592 - DNA, 25 bp, Homo sapien
aataatacttctagggtgtagatct

SEQ ID NO: 4994593 - DNA, 25 bp, Homo sapien
ataaaattaaaattgtctacaaatg

SEQ ID NO: 4994594 - DNA, 25 bp, Homo sapien
aattaaaattgtctacaaatggcat

SEQ ID NO: 4994595 - DNA, 25 bp, Homo sapien
aaattaaaattgtctacaaatggca

SEQ ID NO: 4994596 - DNA, 25 bp, Homo sapien
actggtacacgagagggaggacagt

SEQ ID NO: 4994597 - DNA, 25 bp, Homo sapien
accagcactggtacacgagagggag

SEQ ID NO: 4994598 - DNA, 25 bp, Homo sapien
cactggtacacgagagggaggacag

SEQ ID NO: 4994599 - DNA, 25 bp, Homo sapien
agcactggtacacgagagggaggac

SEQ ID NO: 4994600 - DNA, 25 bp, Homo sapien
gactacaacccagactcgaactata

SEQ ID NO: 4994601 - DNA, 25 bp, Homo sapien
gctactatatggcttcagaacttca

SEQ ID NO: 4994602 - DNA, 25 bp, Homo sapien
tactgtcttgacacttaagtgttac

SEQ ID NO: 4994603 - DNA, 25 bp, Homo sapien
cagaaaccaaaagaactgcccgact

SEQ ID NO: 4994604 - DNA, 25 bp, Homo sapien
gctatacgtagttaatctggtcacg

SEQ ID NO: 4994605 - DNA, 25 bp, Homo sapien
tcattttccccgctatacgtagtta

SEQ ID NO: 4994606 - DNA, 25 bp, Homo sapien
tctggtcacgtgtgataagtctgag

SEQ ID NO: 4994607 - DNA, 25 bp, Homo sapien
cgtgtgataagtctgagcttccaac

SEQ ID NO: 4994608 - DNA, 25 bp, Homo sapien
tgcagcaacggagagtggtccggta

SEQ ID NO: 4994609 - DNA, 25 bp, Homo sapien
aggaaggagtcggtgagcggcagcg

SEQ ID NO: 4994610 - DNA, 25 bp, Homo sapien
aggccaggtccagatcgaaatcccg

SEQ ID NO: 4994611 - DNA, 25 bp, Homo sapien
tccggtagcgcgttgagctgcggcc

SEQ ID NO: 4994612 - DNA, 25 bp, Homo sapien
gccgctgctgcggccgcagctaccc

SEQ ID NO: 4994613 - DNA, 25 bp, Homo sapien
cgccgccgctgctgcggccgcagct

SEQ ID NO: 4994614 - DNA, 25 bp, Homo sapien
cgccgctgctgcggccgcagctacc

SEQ ID NO: 4994615 - DNA, 25 bp, Homo sapien
gccgccgctgctgcggccgcagcta

SEQ ID NO: 4994616 - DNA, 25 bp, Homo sapien
gcggtctccggcctcgcacgccgga

SEQ ID NO: 4994617 - DNA, 25 bp, Homo sapien
tctccagcctggcagggcggtctcc

SEQ ID NO: 4994618 - DNA, 25 bp, Homo sapien
gggtgctagccacctgtttagcagc

SEQ ID NO: 4994619 - DNA, 25 bp, Homo sapien
tcttaaaggaaaccgcacagtgtcc

SEQ ID NO: 4994620 - DNA, 25 bp, Homo sapien
tgtttaccgaaaatgcatccaggcc

SEQ ID NO: 4994621 - DNA, 25 bp, Homo sapien
gattgcacgactatgggaaagagag

SEQ ID NO: 4994622 - DNA, 25 bp, Homo sapien
gccaatgtcagcagttagcccagtg

SEQ ID NO: 4994623 - DNA, 25 bp, Homo sapien
gaggtcaatcaaaactcctccaggc

SEQ ID NO: 4994624 - DNA, 25 bp, Homo sapien
ttttatgttgagttccacctgttca

SEQ ID NO: 4994625 - DNA, 25 bp, Homo sapien
aatgctggtgtggaaggaatctgtt

SEQ ID NO: 4994626 - DNA, 25 bp, Homo sapien
gagttccacctgttcataatgggca

SEQ ID NO: 4994627 - DNA, 25 bp, Homo sapien
catctaaaatgctggtgtggaagga

SEQ ID NO: 4994628 - DNA, 25 bp, Homo sapien
ggcaagagataatgtgcggcagata

SEQ ID NO: 4994629 - DNA, 25 bp, Homo sapien
caggtgtcctgaaatgtgtcactca

SEQ ID NO: 4994630 - DNA, 25 bp, Homo sapien
tataaaacaagatctggggcaagag

SEQ ID NO: 4994631 - DNA, 25 bp, Homo sapien
aaaatcctggtagcactataaaaca

SEQ ID NO: 4994632 - DNA, 25 bp, Homo sapien
accaagcacatatccataaaccgcc

SEQ ID NO: 4994633 - DNA, 25 bp, Homo sapien
cacatatccataaaccgccccagat

SEQ ID NO: 4994634 - DNA, 25 bp, Homo sapien
gccccagatctaaaggaccaagaga

SEQ ID NO: 4994635 - DNA, 25 bp, Homo sapien
cataaaccgccccagatctaaagga

SEQ ID NO: 4994636 - DNA, 25 bp, Homo sapien
ctgcttccagtgagtctgggcgcat

SEQ ID NO: 4994637 - DNA, 25 bp, Homo sapien
gcacagacacacttcacagctgctt

SEQ ID NO: 4994638 - DNA, 25 bp, Homo sapien
cagctgcttccagtgagtctgggcg

SEQ ID NO: 4994639 - DNA, 25 bp, Homo sapien
cagacacacttcacagctgcttcca

SEQ ID NO: 4994640 - DNA, 25 bp, Homo sapien
cacctaagctaactggcgaactctg

SEQ ID NO: 4994641 - DNA, 25 bp, Homo sapien
agtactcttgcaaagcacactgcaa

SEQ ID NO: 4994642 - DNA, 25 bp, Homo sapien
aagcacactgcaagttcagtccatg

SEQ ID NO: 4994643 - DNA, 25 bp, Homo sapien
tgacaaaggggttgggagaatacaa

SEQ ID NO: 4994644 - DNA, 25 bp, Homo sapien
attacacaatgggcctgactggctc

SEQ ID NO: 4994645 - DNA, 25 bp, Homo sapien
ttattacacaatgggcctgactggc

SEQ ID NO: 4994646 - DNA, 25 bp, Homo sapien
tattacacaatgggcctgactggct

SEQ ID NO: 4994647 - DNA, 25 bp, Homo sapien
tcagttgttttccacgggacaccca

SEQ ID NO: 4994648 - DNA, 25 bp, Homo sapien
ttgtctttgggatagttgaaaacat

SEQ ID NO: 4994649 - DNA, 25 bp, Homo sapien
tgtctttgggatagttgaaaacata

SEQ ID NO: 4994650 - DNA, 25 bp, Homo sapien
gttgtctttgggatagttgaaaaca

SEQ ID NO: 4994651 - DNA, 25 bp, Homo sapien
gtctttgggatagttgaaaacatac

SEQ ID NO: 4994652 - DNA, 25 bp, Homo sapien
ttcctgtagcaaagcccatgtgccc

SEQ ID NO: 4994653 - DNA, 25 bp, Homo sapien
gtagcaaagcccatgtgcccctggg

SEQ ID NO: 4994654 - DNA, 25 bp, Homo sapien
ctggattcctgtagcaaagcccatg

SEQ ID NO: 4994655 - DNA, 25 bp, Homo sapien
ggattcctgtagcaaagcccatgtg

SEQ ID NO: 4994656 - DNA, 25 bp, Homo sapien
aggtatttaaatgggctcattgttc

SEQ ID NO: 4994657 - DNA, 25 bp, Homo sapien
ctgaaggtatttaaatgggctcatt

SEQ ID NO: 4994658 - DNA, 25 bp, Homo sapien
gaaggtatttaaatgggctcattgt

SEQ ID NO: 4994659 - DNA, 25 bp, Homo sapien
tgaaggtatttaaatgggctcattg

SEQ ID NO: 4994660 - DNA, 25 bp, Homo sapien
ttttcagggccgaaaagacgctctg

SEQ ID NO: 4994661 - DNA, 25 bp, Homo sapien
gaaaatgtcaacacgttgcaaattg

SEQ ID NO: 4994662 - DNA, 25 bp, Homo sapien
caaattggcatactttgggtttgcc

SEQ ID NO: 4994663 - DNA, 25 bp, Homo sapien
ggtttgccaatatgtgataaagaac

SEQ ID NO: 4994664 - DNA, 25 bp, Homo sapien
catcagagcggagtcaaaagcacaa

SEQ ID NO: 4994665 - DNA, 25 bp, Homo sapien
gactccagagattacggctgaactg

SEQ ID NO: 4994666 - DNA, 25 bp, Homo sapien
tccgtccagagagcggctgagtcag

SEQ ID NO: 4994667 - DNA, 25 bp, Homo sapien
aattgggcggcgaagtctgactcca

SEQ ID NO: 4994668 - DNA, 25 bp, Homo sapien
gccgccgtgacttcagcaaggcact

SEQ ID NO: 4994669 - DNA, 25 bp, Homo sapien
agtgcaacaaaatccggctctggcc

SEQ ID NO: 4994670 - DNA, 25 bp, Homo sapien
agcaaggcactactatctccgtcag

SEQ ID NO: 4994671 - DNA, 25 bp, Homo sapien
gaagccgcagaaaagacgctgaaag

SEQ ID NO: 4994672 - DNA, 25 bp, Homo sapien
ccgcactcagccattcaaactcttt

SEQ ID NO: 4994673 - DNA, 25 bp, Homo sapien
cttgcatgttttgcttgataacaga

SEQ ID NO: 4994674 - DNA, 25 bp, Homo sapien
tggaattgctacctgagtaatcttc

SEQ ID NO: 4994675 - DNA, 25 bp, Homo sapien
aggcatggaacaccgcactcagcca

SEQ ID NO: 4994676 - DNA, 25 bp, Homo sapien
ggagttcctcggcttgccttgccag

SEQ ID NO: 4994677 - DNA, 25 bp, Homo sapien
tgtcaggccctctattttagagtga

SEQ ID NO: 4994678 - DNA, 25 bp, Homo sapien
gccagccaacaaggctcttcctgtg

SEQ ID NO: 4994679 - DNA, 25 bp, Homo sapien
gccaacctgtcatatcctgtctgct

SEQ ID NO: 4994680 - DNA, 25 bp, Homo sapien
tagaactcagtctacttaggaagcc

SEQ ID NO: 4994681 - DNA, 25 bp, Homo sapien
aatgattgtcctttcccctgataac

SEQ ID NO: 4994682 - DNA, 25 bp, Homo sapien
taccgtaagccaccaaagataaatg

SEQ ID NO: 4994683 - DNA, 25 bp, Homo sapien
cactttaaaggtggacatatgtgca

SEQ ID NO: 4994684 - DNA, 25 bp, Homo sapien
gagattttctgttatggtacccaaa

SEQ ID NO: 4994685 - DNA, 25 bp, Homo sapien
caactgaatgtctcttaactgtggg

SEQ ID NO: 4994686 - DNA, 25 bp, Homo sapien
gttgtctcaagcacaaccaactgaa

SEQ ID NO: 4994687 - DNA, 25 bp, Homo sapien
gttctttttgaataccgtgcatggg

SEQ ID NO: 4994688 - DNA, 25 bp, Homo sapien
gacagccatgccttttccaagtaaa

SEQ ID NO: 4994689 - DNA, 25 bp, Homo sapien
gctgtgtaatataatggccaagacc

SEQ ID NO: 4994690 - DNA, 25 bp, Homo sapien
ctcattttcaacagggcagtcggat

SEQ ID NO: 4994691 - DNA, 25 bp, Homo sapien
tatagagcttatcctgctagagcag

SEQ ID NO: 4994692 - DNA, 25 bp, Homo sapien
cacttcttaggcaacgtagtggccc

SEQ ID NO: 4994693 - DNA, 25 bp, Homo sapien
ggccctttactctttggaagtcatc

SEQ ID NO: 4994694 - DNA, 25 bp, Homo sapien
aaactggaccagtgccccacttctt

SEQ ID NO: 4994695 - DNA, 25 bp, Homo sapien
tgggcatctgattaccatagcacac

SEQ ID NO: 4994696 - DNA, 25 bp, Homo sapien
tttgctgtagatggatctgggtgct

SEQ ID NO: 4994697 - DNA, 25 bp, Homo sapien
ttactctgtgttggcgttgtcctca

SEQ ID NO: 4994698 - DNA, 25 bp, Homo sapien
tcacattcctgtcccgtaagtatta

SEQ ID NO: 4994699 - DNA, 25 bp, Homo sapien
ccgtaagtattactctgtgttggcg

SEQ ID NO: 4994700 - DNA, 25 bp, Homo sapien
aatattcccgctgacttcccattag

SEQ ID NO: 4994701 - DNA, 25 bp, Homo sapien
caaatattcccgctgacttcccatt

SEQ ID NO: 4994702 - DNA, 25 bp, Homo sapien
agaaacgtccttctgccaagggaca

SEQ ID NO: 4994703 - DNA, 25 bp, Homo sapien
gaggtgtagaaacgtccttctgcca

SEQ ID NO: 4994704 - DNA, 25 bp, Homo sapien
ggtcccagtgtatcggtggggcata

SEQ ID NO: 4994705 - DNA, 25 bp, Homo sapien
cccagtgtatcggtggggcataaaa

SEQ ID NO: 4994706 - DNA, 25 bp, Homo sapien
gtcccagtgtatcggtggggcataa

SEQ ID NO: 4994707 - DNA, 25 bp, Homo sapien
ccagtgtatcggtggggcataaaaa

SEQ ID NO: 4994708 - DNA, 25 bp, Homo sapien
caattggattcagcattgatgcctt

SEQ ID NO: 4994709 - DNA, 25 bp, Homo sapien
tcaattggattcagcattgatgcct

SEQ ID NO: 4994710 - DNA, 25 bp, Homo sapien
aattggattcagcattgatgccttt

SEQ ID NO: 4994711 - DNA, 25 bp, Homo sapien
agcatgactcttgtactccgggccc

SEQ ID NO: 4994712 - DNA, 25 bp, Homo sapien
tcttgtagcctctgatgtcattggg

SEQ ID NO: 4994713 - DNA, 25 bp, Homo sapien
actgcaaggccttttgtcttgtagc

SEQ ID NO: 4994714 - DNA, 25 bp, Homo sapien
ccatgggaactactgcaaggccttt

SEQ ID NO: 4994715 - DNA, 25 bp, Homo sapien
tgttggaaactgtgttgttacatgt

SEQ ID NO: 4994716 - DNA, 25 bp, Homo sapien
ggagcccccggcctgaatgactgca

SEQ ID NO: 4994717 - DNA, 25 bp, Homo sapien
catcctggtgaaaggagcccccggc

SEQ ID NO: 4994718 - DNA, 25 bp, Homo sapien
gttgttacatgttcagctgcttgtg

SEQ ID NO: 4994719 - DNA, 25 bp, Homo sapien
gatcatcagaaacattgagacagca

SEQ ID NO: 4994720 - DNA, 25 bp, Homo sapien
gggctagaggatcatcagaaacatt

SEQ ID NO: 4994721 - DNA, 25 bp, Homo sapien
tgagtcgcagtgaagtgctgtgagc

SEQ ID NO: 4994722 - DNA, 25 bp, Homo sapien
tccacaaaactgagtgagtcgcagt

SEQ ID NO: 4994723 - DNA, 25 bp, Homo sapien
aatgtaactattataacagaagtgc

SEQ ID NO: 4994724 - DNA, 25 bp, Homo sapien
gcatcggcatgtttctcacttttca

SEQ ID NO: 4994725 - DNA, 25 bp, Homo sapien
ctttgcatcggcatgtttctcactt

SEQ ID NO: 4994726 - DNA, 25 bp, Homo sapien
aactattataacagaagtgcacagc

SEQ ID NO: 4994727 - DNA, 25 bp, Homo sapien
gcctagtctgcattctgaggctgca

SEQ ID NO: 4994728 - DNA, 25 bp, Homo sapien
aaaatagcctagtctgcattctgag

SEQ ID NO: 4994729 - DNA, 25 bp, Homo sapien
tagtctgcattctgaggctgcaacc

SEQ ID NO: 4994730 - DNA, 25 bp, Homo sapien
aaagccctgaagggtactcagggtg

SEQ ID NO: 4994731 - DNA, 25 bp, Homo sapien
agccctcgagcaggcacacagtcat

SEQ ID NO: 4994732 - DNA, 25 bp, Homo sapien
gccaatggtctataaaagtcactgc

SEQ ID NO: 4994733 - DNA, 25 bp, Homo sapien
ctggccattcctgggcacaaggctc

SEQ ID NO: 4994734 - DNA, 25 bp, Homo sapien
tgctggtcttttgctagccctcgag

SEQ ID NO: 4994735 - DNA, 25 bp, Homo sapien
tgtgcctgagttgttagagctgcca

SEQ ID NO: 4994736 - DNA, 25 bp, Homo sapien
tatgctaccagtggtttccatggaa

SEQ ID NO: 4994737 - DNA, 25 bp, Homo sapien
cttggttcggtaagctatgctacca

SEQ ID NO: 4994738 - DNA, 25 bp, Homo sapien
aaatgacagtggaaacggccccatg

SEQ ID NO: 4994739 - DNA, 25 bp, Homo sapien
tgggattaccagcacctgctgccat

SEQ ID NO: 4994740 - DNA, 25 bp, Homo sapien
ctgctgccatgcccagctaattttt

SEQ ID NO: 4994741 - DNA, 25 bp, Homo sapien
tgagccaccgggcccagccctggtt

SEQ ID NO: 4994742 - DNA, 25 bp, Homo sapien
catgagccaccgggcccagccctgg

SEQ ID NO: 4994743 - DNA, 25 bp, Homo sapien
tcagctggcagcaagcattgtctga

SEQ ID NO: 4994744 - DNA, 25 bp, Homo sapien
accagactgtgggtactcagacatt

SEQ ID NO: 4994745 - DNA, 25 bp, Homo sapien
gactgtgggtactcagacattcttt

SEQ ID NO: 4994746 - DNA, 25 bp, Homo sapien
caaaccagactgtgggtactcagac

SEQ ID NO: 4994747 - DNA, 25 bp, Homo sapien
cagactgtgggtactcagacattct

SEQ ID NO: 4994748 - DNA, 25 bp, Homo sapien
cagtcttcctttcattcagctcgtt

SEQ ID NO: 4994749 - DNA, 25 bp, Homo sapien
cattcagctcgtttggatccttctt

SEQ ID NO: 4994750 - DNA, 25 bp, Homo sapien
ttggcagtaatctggtatacctcat

SEQ ID NO: 4994751 - DNA, 25 bp, Homo sapien
tctttggcagtaatctggtatacct

SEQ ID NO: 4994752 - DNA, 25 bp, Homo sapien
catggcggagcaaaggcacaagttc

SEQ ID NO: 4994753 - DNA, 25 bp, Homo sapien
tgatgacgagcaacttaaacctgga

SEQ ID NO: 4994754 - DNA, 25 bp, Homo sapien
ccatccgaggatgctagaggcagtc

SEQ ID NO: 4994755 - DNA, 25 bp, Homo sapien
caaggagtgcatctagcaggcagac

SEQ ID NO: 4994756 - DNA, 25 bp, Homo sapien
tcacacgtgatgcagtcataaggag

SEQ ID NO: 4994757 - DNA, 25 bp, Homo sapien
gatctttggcttctaaggtaaggcc

SEQ ID NO: 4994758 - DNA, 25 bp, Homo sapien
acataaaggctgagagttgactgca

SEQ ID NO: 4994759 - DNA, 25 bp, Homo sapien
caagtttatcatagtcgtgaggcat

SEQ ID NO: 4994760 - DNA, 25 bp, Homo sapien
tatagtaactgttctctgtaaccaa

SEQ ID NO: 4994761 - DNA, 25 bp, Homo sapien
agttgtacttcagaagtatgctatc

SEQ ID NO: 4994762 - DNA, 25 bp, Homo sapien
gaagtatgctatcagcagtctcctt

SEQ ID NO: 4994763 - DNA, 25 bp, Homo sapien
tccttctttatagtaactgttctct

SEQ ID NO: 4994764 - DNA, 25 bp, Homo sapien
acatacacgatgccaatacatacat

SEQ ID NO: 4994765 - DNA, 25 bp, Homo sapien
ggggcagtgccggatgtacactgaa

SEQ ID NO: 4994766 - DNA, 25 bp, Homo sapien
tacacgatgccaatacatacatgta

SEQ ID NO: 4994767 - DNA, 25 bp, Homo sapien
aagaaatttgttctgggggcagtgc

SEQ ID NO: 4994768 - DNA, 25 bp, Homo sapien
cagaatccagataaggctctctgct

SEQ ID NO: 4994769 - DNA, 25 bp, Homo sapien
gaatccagataaggctctctgctga

SEQ ID NO: 4994770 - DNA, 25 bp, Homo sapien
agaatccagataaggctctctgctg

SEQ ID NO: 4994771 - DNA, 25 bp, Homo sapien
tcagaatccagataaggctctctgc

SEQ ID NO: 4994772 - DNA, 25 bp, Homo sapien
tgtgttctgttgagcacagcgggca

SEQ ID NO: 4994773 - DNA, 25 bp, Homo sapien
gtgttctgttgagcacagcgggcat

SEQ ID NO: 4994774 - DNA, 25 bp, Homo sapien
ttcccattctgttgccacactgctt

SEQ ID NO: 4994775 - DNA, 25 bp, Homo sapien
tcctctactgctaagaccctggtgg

SEQ ID NO: 4994776 - DNA, 25 bp, Homo sapien
cctgatcgtggacattgtcatgacc

SEQ ID NO: 4994777 - DNA, 25 bp, Homo sapien
tactctatgaagtctagggagagga

SEQ ID NO: 4994778 - DNA, 25 bp, Homo sapien
catgcctgaccatgtcgtctggtcg

SEQ ID NO: 4994779 - DNA, 25 bp, Homo sapien
gagggcctattgagaaccatcccag

SEQ ID NO: 4994780 - DNA, 25 bp, Homo sapien
tgcccatgacctgtatcccacgcac

SEQ ID NO: 4994781 - DNA, 25 bp, Homo sapien
tctgcccatgacctgtatcccacgc

SEQ ID NO: 4994782 - DNA, 25 bp, Homo sapien
atgacctgtatcccacgcacttcat

SEQ ID NO: 4994783 - DNA, 25 bp, Homo sapien
cccatgacctgtatcccacgcactt

SEQ ID NO: 4994784 - DNA, 25 bp, Homo sapien
tcttctttaggaaatggggatagag

SEQ ID NO: 4994785 - DNA, 25 bp, Homo sapien
caaagccagtatgcatatagccact

SEQ ID NO: 4994786 - DNA, 25 bp, Homo sapien
tccgtcaagctggtaggtcctgtca

SEQ ID NO: 4994787 - DNA, 25 bp, Homo sapien
cttcagggtcctggcgatgcatagg

SEQ ID NO: 4994788 - DNA, 25 bp, Homo sapien
cttaagcaacgattacaaagccagt

SEQ ID NO: 4994789 - DNA, 25 bp, Homo sapien
cttatttggcttcttaactggaacg

SEQ ID NO: 4994790 - DNA, 25 bp, Homo sapien
gagtttcccaggtcgttattataga

SEQ ID NO: 4994791 - DNA, 25 bp, Homo sapien
ttttcagcgtcctcagaaggaagga

SEQ ID NO: 4994792 - DNA, 25 bp, Homo sapien
tgttcttagcatgctgggtcaccac

SEQ ID NO: 4994793 - DNA, 25 bp, Homo sapien
taagcagtcacttttcaggtcatct

SEQ ID NO: 4994794 - DNA, 25 bp, Homo sapien
tgaggcctggtctcgtgactagtcc

SEQ ID NO: 4994795 - DNA, 25 bp, Homo sapien
tcttcatgctcttgttgcaagggcc

SEQ ID NO: 4994796 - DNA, 25 bp, Homo sapien
caaggctgagggaactttcatgtca

SEQ ID NO: 4994797 - DNA, 25 bp, Homo sapien
tgtctggcttgataccaataatctg

SEQ ID NO: 4994798 - DNA, 25 bp, Homo sapien
tctggacattgaaatgaccggattg

SEQ ID NO: 4994799 - DNA, 25 bp, Homo sapien
tacataggctactggatgtctggct

SEQ ID NO: 4994800 - DNA, 25 bp, Homo sapien
ggtgtttggtctcataggaaaatcc

SEQ ID NO: 4994801 - DNA, 25 bp, Homo sapien
ctatgttatacgagcaggtggtcct

SEQ ID NO: 4994802 - DNA, 25 bp, Homo sapien
cattcagtgttaattggcatcttgg

SEQ ID NO: 4994803 - DNA, 25 bp, Homo sapien
tccttgtgtatccttgagtggccag

SEQ ID NO: 4994804 - DNA, 25 bp, Homo sapien
tccttgagtggccagctgtccacat

SEQ ID NO: 4994805 - DNA, 25 bp, Homo sapien
gaaagtcagcttatccagagagtca

SEQ ID NO: 4994806 - DNA, 25 bp, Homo sapien
ggatgactgctccattgcatttagg

SEQ ID NO: 4994807 - DNA, 25 bp, Homo sapien
ttccatgcatgttctaaagtgttca

SEQ ID NO: 4994808 - DNA, 25 bp, Homo sapien
tgcatttaggctggtcgtcaggtac

SEQ ID NO: 4994809 - DNA, 25 bp, Homo sapien
aagaagttaaataatgctccagatg

SEQ ID NO: 4994810 - DNA, 25 bp, Homo sapien
agttaaataatgctccagatgacgt

SEQ ID NO: 4994811 - DNA, 25 bp, Homo sapien
gaagttaaataatgctccagatgac

SEQ ID NO: 4994812 - DNA, 25 bp, Homo sapien
caagaagttaaataatgctccagat

SEQ ID NO: 4994813 - DNA, 25 bp, Homo sapien
aaaggaagtcccagtctatttagag

SEQ ID NO: 4994814 - DNA, 25 bp, Homo sapien
gtcccagtctatttagaggtacagc

SEQ ID NO: 4994815 - DNA, 25 bp, Homo sapien
gaagtcccagtctatttagaggtac

SEQ ID NO: 4994816 - DNA, 25 bp, Homo sapien
cagtctatttagaggtacagccatg

SEQ ID NO: 4994817 - DNA, 25 bp, Homo sapien
ggttcatgaggtcaacgtggaaaat

SEQ ID NO: 4994818 - DNA, 25 bp, Homo sapien
gatggttggactttgttctttagaa

SEQ ID NO: 4994819 - DNA, 25 bp, Homo sapien
gaggtcaacgtggaaaatgtcttta

SEQ ID NO: 4994820 - DNA, 25 bp, Homo sapien
tttaaaatattgcttggatggttgg

SEQ ID NO: 4994821 - DNA, 25 bp, Homo sapien
ctttacatcttgaggtgggttggaa

SEQ ID NO: 4994822 - DNA, 25 bp, Homo sapien
gagaggggtgataaactgtctatcc

SEQ ID NO: 4994823 - DNA, 25 bp, Homo sapien
cttggctttacatcttgaggtgggt

SEQ ID NO: 4994824 - DNA, 25 bp, Homo sapien
atccttggctttacatcttgaggtg

SEQ ID NO: 4994825 - DNA, 25 bp, Homo sapien
agggcagcatgggaccagagtgcag

SEQ ID NO: 4994826 - DNA, 25 bp, Homo sapien
gcagcatgggaccagagtgcagctg

SEQ ID NO: 4994827 - DNA, 25 bp, Homo sapien
ggcagcatgggaccagagtgcagct

SEQ ID NO: 4994828 - DNA, 25 bp, Homo sapien
cagtaattggataggtttggcagac

SEQ ID NO: 4994829 - DNA, 25 bp, Homo sapien
acttgtgcccgggtgtgatttagcg

SEQ ID NO: 4994830 - DNA, 25 bp, Homo sapien
tggttcctgatgaatgctccacttg

SEQ ID NO: 4994831 - DNA, 25 bp, Homo sapien
cagaagggtttgtgcaggctcttcc

SEQ ID NO: 4994832 - DNA, 25 bp, Homo sapien
gatttctgcatgatggatctggctg

SEQ ID NO: 4994833 - DNA, 25 bp, Homo sapien
caccctgattgctcggtcatctgaa

SEQ ID NO: 4994834 - DNA, 25 bp, Homo sapien
gtctgacaaatggacgggcagccct

SEQ ID NO: 4994835 - DNA, 25 bp, Homo sapien
tgccaccctgattgctcggtcatct

SEQ ID NO: 4994836 - DNA, 25 bp, Homo sapien
accgctccgcactgttgaccaagga

SEQ ID NO: 4994837 - DNA, 25 bp, Homo sapien
cactgttgaccaaggagggtgtgca

SEQ ID NO: 4994838 - DNA, 25 bp, Homo sapien
ccgcactgttgaccaaggagggtgt

SEQ ID NO: 4994839 - DNA, 25 bp, Homo sapien
aataccgctccgcactgttgaccaa

SEQ ID NO: 4994840 - DNA, 25 bp, Homo sapien
accacccattctttctcgtatctga

SEQ ID NO: 4994841 - DNA, 25 bp, Homo sapien
cacccattctttctcgtatctgatg

SEQ ID NO: 4994842 - DNA, 25 bp, Homo sapien
cccattctttctcgtatctgatggc

SEQ ID NO: 4994843 - DNA, 25 bp, Homo sapien
cattctttctcgtatctgatggcca

SEQ ID NO: 4994844 - DNA, 25 bp, Homo sapien
tcatctagactctttgagctttgcc

SEQ ID NO: 4994845 - DNA, 25 bp, Homo sapien
gctttgcctaagtagaaagagggta

SEQ ID NO: 4994846 - DNA, 25 bp, Homo sapien
ggggagtagttatagccacagcacc

SEQ ID NO: 4994847 - DNA, 25 bp, Homo sapien
agcaccaggtgggttgacttgatcc

SEQ ID NO: 4994848 - DNA, 25 bp, Homo sapien
ctgtggttgaggagtatgccagaaa

SEQ ID NO: 4994849 - DNA, 25 bp, Homo sapien
cactgtggttgaggagtatgccaga

SEQ ID NO: 4994850 - DNA, 25 bp, Homo sapien
gcagagcctgaacgagggcactgtg

SEQ ID NO: 4994851 - DNA, 25 bp, Homo sapien
cctgctgttaggagttgagggggca

SEQ ID NO: 4994852 - DNA, 25 bp, Homo sapien
gataccatccacatgatgtttggaa

SEQ ID NO: 4994853 - DNA, 25 bp, Homo sapien
cctgataccatccacatgatgtttg

SEQ ID NO: 4994854 - DNA, 25 bp, Homo sapien
ccatccacatgatgtttggaagctg

SEQ ID NO: 4994855 - DNA, 25 bp, Homo sapien
taccatccacatgatgtttggaagc

SEQ ID NO: 4994856 - DNA, 25 bp, Homo sapien
gccagggctgcatgatgaagacagt

SEQ ID NO: 4994857 - DNA, 25 bp, Homo sapien
tgccagggctgcatgatgaagacag

SEQ ID NO: 4994858 - DNA, 25 bp, Homo sapien
cagggctgcatgatgaagacagtaa

SEQ ID NO: 4994859 - DNA, 25 bp, Homo sapien
ccagggctgcatgatgaagacagta

SEQ ID NO: 4994860 - DNA, 25 bp, Homo sapien
agtctcttggtatgtaatgatgaag

SEQ ID NO: 4994861 - DNA, 25 bp, Homo sapien
tctcttggtatgtaatgatgaagtg

SEQ ID NO: 4994862 - DNA, 25 bp, Homo sapien
ctaggtacaatcgagttgaaagtca

SEQ ID NO: 4994863 - DNA, 25 bp, Homo sapien
gttgaaagtcagacatgaaaatgaa

SEQ ID NO: 4994864 - DNA, 25 bp, Homo sapien
cctggacaccaatgatgcaagaatt

SEQ ID NO: 4994865 - DNA, 25 bp, Homo sapien
tcataagccttggaggcaattctct

SEQ ID NO: 4994866 - DNA, 25 bp, Homo sapien
tagagtatcccccagagcatttcct

SEQ ID NO: 4994867 - DNA, 25 bp, Homo sapien
ggacaccaatgatgcaagaatttac

SEQ ID NO: 4994868 - DNA, 25 bp, Homo sapien
actgatggttgtcccagagcaccct

SEQ ID NO: 4994869 - DNA, 25 bp, Homo sapien
cccactgatggttgtcccagagcac

SEQ ID NO: 4994870 - DNA, 25 bp, Homo sapien
tgttccccgaaagctgctcatggac

SEQ ID NO: 4994871 - DNA, 25 bp, Homo sapien
caccctgggatgaatacgcctgttc

SEQ ID NO: 4994872 - DNA, 25 bp, Homo sapien
tggctttctgcctgcactttgcctc

SEQ ID NO: 4994873 - DNA, 25 bp, Homo sapien
tgcactttgcctctcccatgacttc

SEQ ID NO: 4994874 - DNA, 25 bp, Homo sapien
gacttcctgttttcaggtgctccat

SEQ ID NO: 4994875 - DNA, 25 bp, Homo sapien
ttctgcctgcactttgcctctccca

SEQ ID NO: 4994876 - DNA, 25 bp, Homo sapien
atgtaataatgtggcccaacaacgg

SEQ ID NO: 4994877 - DNA, 25 bp, Homo sapien
cctccgtcaggaataatggcgtcac

SEQ ID NO: 4994878 - DNA, 25 bp, Homo sapien
ccaacaacgggcctgaatggcttct

SEQ ID NO: 4994879 - DNA, 25 bp, Homo sapien
catgtaaggttaatgacagcccctc

SEQ ID NO: 4994880 - DNA, 25 bp, Homo sapien
gatgtcaaagtcatgtgcatgtgtt

SEQ ID NO: 4994881 - DNA, 25 bp, Homo sapien
tgatgtcaaagtcatgtgcatgtgt

SEQ ID NO: 4994882 - DNA, 25 bp, Homo sapien
gagcaggaaacatgatgtcaaagtc

SEQ ID NO: 4994883 - DNA, 25 bp, Homo sapien
agcaggaaacatgatgtcaaagtca

SEQ ID NO: 4994884 - DNA, 25 bp, Homo sapien
ccttcaacctcttggatcccaactc

SEQ ID NO: 4994885 - DNA, 25 bp, Homo sapien
tccaggtataatttgacccttcaac

SEQ ID NO: 4994886 - DNA, 25 bp, Homo sapien
aacctcttggatcccaactcctctt

SEQ ID NO: 4994887 - DNA, 25 bp, Homo sapien
ttccaggtataatttgacccttcaa

SEQ ID NO: 4994888 - DNA, 25 bp, Homo sapien
aaggctgctgataagttttgtgtcc

SEQ ID NO: 4994889 - DNA, 25 bp, Homo sapien
tgtcctgaagtctggaaggctgctg

SEQ ID NO: 4994890 - DNA, 25 bp, Homo sapien
ttttacccatttgtcctgaagtctg

SEQ ID NO: 4994891 - DNA, 25 bp, Homo sapien
cactgcagatctaggtaagaattca

SEQ ID NO: 4994892 - DNA, 25 bp, Homo sapien
acaagggcctttgatggccaggctg

SEQ ID NO: 4994893 - DNA, 25 bp, Homo sapien
ctgggtgagatgaggcaagtgtggg

SEQ ID NO: 4994894 - DNA, 25 bp, Homo sapien
cactgtaggtggagtagcagccgaa

SEQ ID NO: 4994895 - DNA, 25 bp, Homo sapien
aggtatgaaaggtgagtcaggcccc

SEQ ID NO: 4994896 - DNA, 25 bp, Homo sapien
ctggtggttgcttgccagccagcat

SEQ ID NO: 4994897 - DNA, 25 bp, Homo sapien
ctctggtggttgcttgccagccagc

SEQ ID NO: 4994898 - DNA, 25 bp, Homo sapien
cctgcgtatgctgaatactggtcag

SEQ ID NO: 4994899 - DNA, 25 bp, Homo sapien
caggggtaaatctgctcatccaggt

SEQ ID NO: 4994900 - DNA, 25 bp, Homo sapien
ccaggtcatgcaccttttgcagtct

SEQ ID NO: 4994901 - DNA, 25 bp, Homo sapien
gctccagtaacctgcgtatgctgaa

SEQ ID NO: 4994902 - DNA, 25 bp, Homo sapien
aagtcgctgggagattttctgtgtg

SEQ ID NO: 4994903 - DNA, 25 bp, Homo sapien
tgtctggtagagtaatatttcgatg

SEQ ID NO: 4994904 - DNA, 25 bp, Homo sapien
tcattttgaccttgaagtcgctggg

SEQ ID NO: 4994905 - DNA, 25 bp, Homo sapien
gagtaatatttcgatgtagtaggag

SEQ ID NO: 4994906 - DNA, 25 bp, Homo sapien
catggggtgctacatatcaaagaca

SEQ ID NO: 4994907 - DNA, 25 bp, Homo sapien
gaaacatgcctagccatccatgttg

SEQ ID NO: 4994908 - DNA, 25 bp, Homo sapien
gaggagtaaggaaggtgaggaaaca

SEQ ID NO: 4994909 - DNA, 25 bp, Homo sapien
aaaacctgcactggcaacccatggg

SEQ ID NO: 4994910 - DNA, 25 bp, Homo sapien
ttttgttccaggtcctgtgtttctg

SEQ ID NO: 4994911 - DNA, 25 bp, Homo sapien
tgttccaggtcctgtgtttctggta

SEQ ID NO: 4994912 - DNA, 25 bp, Homo sapien
caggtcctgtgtttctggtaggttc

SEQ ID NO: 4994913 - DNA, 25 bp, Homo sapien
tccaggtcctgtgtttctggtaggt

SEQ ID NO: 4994914 - DNA, 25 bp, Homo sapien
cattcgtaagcactccctttggctg

SEQ ID NO: 4994915 - DNA, 25 bp, Homo sapien
gacaagagagtcattcgtaagcact

SEQ ID NO: 4994916 - DNA, 25 bp, Homo sapien
tttggctgccaggtaaggaatatcc

SEQ ID NO: 4994917 - DNA, 25 bp, Homo sapien
tgacagcagcatagcatttaaaggc

SEQ ID NO: 4994918 - DNA, 25 bp, Homo sapien
cctccgcgggcgagtcctttgcgtg

SEQ ID NO: 4994919 - DNA, 25 bp, Homo sapien
tgagtgtgggtagagataaaccctc

SEQ ID NO: 4994920 - DNA, 25 bp, Homo sapien
tcctttgcgtggtgggtaggtagcc

SEQ ID NO: 4994921 - DNA, 25 bp, Homo sapien
tcaaatcagcgcagagatgagtgtg

SEQ ID NO: 4994922 - DNA, 25 bp, Homo sapien
tcgtcaggggaattgtaatcttggg

SEQ ID NO: 4994923 - DNA, 25 bp, Homo sapien
gaatccctgtgcctgattgccgctc

SEQ ID NO: 4994924 - DNA, 25 bp, Homo sapien
ctgattgccgctctcctcccaattg

SEQ ID NO: 4994925 - DNA, 25 bp, Homo sapien
ctcttgcaactgtgccgtctcgtca

SEQ ID NO: 4994926 - DNA, 25 bp, Homo sapien
gatgtaattccatgtgctgggatca

SEQ ID NO: 4994927 - DNA, 25 bp, Homo sapien
gcatttaggagctgcaactgtgcgc

SEQ ID NO: 4994928 - DNA, 25 bp, Homo sapien
ccatgtgctgggatcatgtagtgat

SEQ ID NO: 4994929 - DNA, 25 bp, Homo sapien
catgtagtgatttgcatttaggagc

SEQ ID NO: 4994930 - DNA, 25 bp, Homo sapien
gaaagtagaccaaatggcagatgcg

SEQ ID NO: 4994931 - DNA, 25 bp, Homo sapien
ggcagatgcgtttccccttaatatt

SEQ ID NO: 4994932 - DNA, 25 bp, Homo sapien
tcatcagaatgaaagtagaccaaat

SEQ ID NO: 4994933 - DNA, 25 bp, Homo sapien
aaagtctattgtgccatttggtatg

SEQ ID NO: 4994934 - DNA, 25 bp, Homo sapien
tcgtgacgtgcatgtttgtcaacat

SEQ ID NO: 4994935 - DNA, 25 bp, Homo sapien
agaagcaaacactgtccctgtcaaa

SEQ ID NO: 4994936 - DNA, 25 bp, Homo sapien
gcaggaagaagccacgggaaatcca

SEQ ID NO: 4994937 - DNA, 25 bp, Homo sapien
taaatgaggcagaattcgtgacgtg

SEQ ID NO: 4994938 - DNA, 25 bp, Homo sapien
gatattctgctagtgcaaacttgtg

SEQ ID NO: 4994939 - DNA, 25 bp, Homo sapien
tctgaagataggctagcaatttcac

SEQ ID NO: 4994940 - DNA, 25 bp, Homo sapien
tgggttgtgtccttttatcagggag

SEQ ID NO: 4994941 - DNA, 25 bp, Homo sapien
cacttgaaattatgaaggtggacca

SEQ ID NO: 4994942 - DNA, 25 bp, Homo sapien
ttttcttgagattctcagctcccag

SEQ ID NO: 4994943 - DNA, 25 bp, Homo sapien
gcattgtcacattttcagctgggca

SEQ ID NO: 4994944 - DNA, 25 bp, Homo sapien
tcaagcattgtcacattttcagctg

SEQ ID NO: 4994945 - DNA, 25 bp, Homo sapien
ttagaacgactcagccatgaatcaa

SEQ ID NO: 4994946 - DNA, 25 bp, Homo sapien
tattcgttagaacgactcagccatg

SEQ ID NO: 4994947 - DNA, 25 bp, Homo sapien
gaccactcaaatgatgatgagctgc

SEQ ID NO: 4994948 - DNA, 25 bp, Homo sapien
tctcttttactctcagcagaccact

SEQ ID NO: 4994949 - DNA, 25 bp, Homo sapien
aaatcgttgaagattctctggccag

SEQ ID NO: 4994950 - DNA, 25 bp, Homo sapien
tgagctgccaagctataaatcgttg

SEQ ID NO: 4994951 - DNA, 25 bp, Homo sapien
tatattttcagcgtatcttctctcc

SEQ ID NO: 4994952 - DNA, 25 bp, Homo sapien
tcttttggtgctgctctaatgactt

SEQ ID NO: 4994953 - DNA, 25 bp, Homo sapien
gaatagcccagtaccgtgttttcta

SEQ ID NO: 4994954 - DNA, 25 bp, Homo sapien
tacagcttctatcctaaattggacc

SEQ ID NO: 4994955 - DNA, 25 bp, Homo sapien
gaaatgcaaagacttgctcttgtaa

SEQ ID NO: 4994956 - DNA, 25 bp, Homo sapien
aacaggctgcagatcgggtcttcct

SEQ ID NO: 4994957 - DNA, 25 bp, Homo sapien
gatagcgatgctgaactgacaagct

SEQ ID NO: 4994958 - DNA, 25 bp, Homo sapien
gaatgggtaaagctggcccattatg

SEQ ID NO: 4994959 - DNA, 25 bp, Homo sapien
caggaactcatcaggtgggaaaggc

SEQ ID NO: 4994960 - DNA, 25 bp, Homo sapien
ggtttcctccaatcaggaactcatc

SEQ ID NO: 4994961 - DNA, 25 bp, Homo sapien
cttgaagatgggttcgaaaagcctc

SEQ ID NO: 4994962 - DNA, 25 bp, Homo sapien
ttctgactaagtcagctaggtttcc

SEQ ID NO: 4994963 - DNA, 25 bp, Homo sapien
agctgaaacgagcttgtctgcaggg

SEQ ID NO: 4994964 - DNA, 25 bp, Homo sapien
aagttggcaaagaaagctggtgatc

SEQ ID NO: 4994965 - DNA, 25 bp, Homo sapien
tctgcaggggatagaccaagaagac

SEQ ID NO: 4994966 - DNA, 25 bp, Homo sapien
ctggactagatgaattgaaagggaa

SEQ ID NO: 4994967 - DNA, 25 bp, Homo sapien
catgtacactgtagcaatactttaa

SEQ ID NO: 4994968 - DNA, 25 bp, Homo sapien
cactgtagcaatactttaacactag

SEQ ID NO: 4994969 - DNA, 25 bp, Homo sapien
atttcaggctgaaataatcgtgtac

SEQ ID NO: 4994970 - DNA, 25 bp, Homo sapien
gtagcaatactttaacactagtctg

SEQ ID NO: 4994971 - DNA, 25 bp, Homo sapien
tggactcctgctgattctctcgcat

SEQ ID NO: 4994972 - DNA, 25 bp, Homo sapien
gactatctgcggctgccttttccag

SEQ ID NO: 4994973 - DNA, 25 bp, Homo sapien
ctggactatctgcggctgccttttc

SEQ ID NO: 4994974 - DNA, 25 bp, Homo sapien
cagaatggactcctgctgattctct

SEQ ID NO: 4994975 - DNA, 25 bp, Homo sapien
tccatggagagaggtaaaacttcca

SEQ ID NO: 4994976 - DNA, 25 bp, Homo sapien
ttccatggagagaggtaaaacttcc

SEQ ID NO: 4994977 - DNA, 25 bp, Homo sapien
agtttggttatcacatagcgttcat

SEQ ID NO: 4994978 - DNA, 25 bp, Homo sapien
gtttggttatcacatagcgttcatt

SEQ ID NO: 4994979 - DNA, 25 bp, Homo sapien
tggttatcacatagcgttcatttcc

SEQ ID NO: 4994980 - DNA, 25 bp, Homo sapien
ttggttatcacatagcgttcatttc

SEQ ID NO: 4994981 - DNA, 25 bp, Homo sapien
tacttgtttcgatcggtgtcgacat

SEQ ID NO: 4994982 - DNA, 25 bp, Homo sapien
tagtttacttgtttcgatcggtgtc

SEQ ID NO: 4994983 - DNA, 25 bp, Homo sapien
agtttacttgtttcgatcggtgtcg

SEQ ID NO: 4994984 - DNA, 25 bp, Homo sapien
tttacttgtttcgatcggtgtcgac

SEQ ID NO: 4994985 - DNA, 25 bp, Homo sapien
atgtactgggcctgagcatctgcaa

SEQ ID NO: 4994986 - DNA, 25 bp, Homo sapien
aggctgaaggagatccatggtattg

SEQ ID NO: 4994987 - DNA, 25 bp, Homo sapien
ggagataaatgagggatagggtgac

SEQ ID NO: 4994988 - DNA, 25 bp, Homo sapien
tgttcaggagataaatgagggatag

SEQ ID NO: 4994989 - DNA, 25 bp, Homo sapien
ggctgaaggagatccatggtattgt

SEQ ID NO: 4994990 - DNA, 25 bp, Homo sapien
catttgagctcctgaccaactggaa

SEQ ID NO: 4994991 - DNA, 25 bp, Homo sapien
tcccatttgagctcctgaccaactg

SEQ ID NO: 4994992 - DNA, 25 bp, Homo sapien
ttgagctcctgaccaactggaagag

SEQ ID NO: 4994993 - DNA, 25 bp, Homo sapien
tttcatcccatttgagctcctgacc

SEQ ID NO: 4994994 - DNA, 25 bp, Homo sapien
aacccaactatctgccatacactga

SEQ ID NO: 4994995 - DNA, 25 bp, Homo sapien
tacgaagggtgattcgttgtccctg

SEQ ID NO: 4994996 - DNA, 25 bp, Homo sapien
cgttgtccctgtgaacagctctgct

SEQ ID NO: 4994997 - DNA, 25 bp, Homo sapien
gctctgcttccaacccaactatctg

SEQ ID NO: 4994998 - DNA, 25 bp, Homo sapien
gcaggcttgatttataaagcgtcct

SEQ ID NO: 4994999 - DNA, 25 bp, Homo sapien
tgcagagttggtggatagaaagatt

SEQ ID NO: 4995000 - DNA, 25 bp, Homo sapien
tagaaagatttagcaggcttgattt

SEQ ID NO: 4995001 - DNA, 25 bp, Homo sapien
tccacactggttctgcagagttggt

SEQ ID NO: 4995002 - DNA, 25 bp, Homo sapien
aaggacctctatgaactgtgaatcc

SEQ ID NO: 4995003 - DNA, 25 bp, Homo sapien
tgaactgtgaatccgatgtttctat

SEQ ID NO: 4995004 - DNA, 25 bp, Homo sapien
ctttgagtacaaaggacctctatga

SEQ ID NO: 4995005 - DNA, 25 bp, Homo sapien
tctcatcaacactttgagtacaaag

SEQ ID NO: 4995006 - DNA, 25 bp, Homo sapien
gactggaagtcatttgggaagtaca

SEQ ID NO: 4995007 - DNA, 25 bp, Homo sapien
ctgactggaagtcatttgggaagta

SEQ ID NO: 4995008 - DNA, 25 bp, Homo sapien
cactgactggaagtcatttgggaag

SEQ ID NO: 4995009 - DNA, 25 bp, Homo sapien
actggaagtcatttgggaagtacaa

SEQ ID NO: 4995010 - DNA, 25 bp, Homo sapien
aatgacacctgtgcaaggttctttg

SEQ ID NO: 4995011 - DNA, 25 bp, Homo sapien
gatagcaacaatgacacctgtgcaa

SEQ ID NO: 4995012 - DNA, 25 bp, Homo sapien
gacacctgtgcaaggttctttggtg

SEQ ID NO: 4995013 - DNA, 25 bp, Homo sapien
caacaatgacacctgtgcaaggttc

SEQ ID NO: 4995014 - DNA, 25 bp, Homo sapien
tataggagttgggtcgaagagtaca

SEQ ID NO: 4995015 - DNA, 25 bp, Homo sapien
cattcccgccagagccctatgaaat

SEQ ID NO: 4995016 - DNA, 25 bp, Homo sapien
tgaagcccttatatgggtcccaagt

SEQ ID NO: 4995017 - DNA, 25 bp, Homo sapien
aagagtacagacatagccattcccg

SEQ ID NO: 4995018 - DNA, 25 bp, Homo sapien
tttattaatcacttgtttgacactc

SEQ ID NO: 4995019 - DNA, 25 bp, Homo sapien
tattaatcacttgtttgacactctg

SEQ ID NO: 4995020 - DNA, 25 bp, Homo sapien
ttaatcacttgtttgacactctgcc

SEQ ID NO: 4995021 - DNA, 25 bp, Homo sapien
attaatcacttgtttgacactctgc

SEQ ID NO: 4995022 - DNA, 25 bp, Homo sapien
ccacagcacagctgactttatctga

SEQ ID NO: 4995023 - DNA, 25 bp, Homo sapien
cctgccacagcacagctgactttat

SEQ ID NO: 4995024 - DNA, 25 bp, Homo sapien
acagctgactttatctgaatttcat

SEQ ID NO: 4995025 - DNA, 25 bp, Homo sapien
cagcacagctgactttatctgaatt

SEQ ID NO: 4995026 - DNA, 25 bp, Homo sapien
tggctccaggaaacgaaaggtaaga

SEQ ID NO: 4995027 - DNA, 25 bp, Homo sapien
tcctcaatgggaaatgattgtgcag

SEQ ID NO: 4995028 - DNA, 25 bp, Homo sapien
gaagcggtcttatagtatgcctccc

SEQ ID NO: 4995029 - DNA, 25 bp, Homo sapien
gactcccaccattgaactggctgga

SEQ ID NO: 4995030 - DNA, 25 bp, Homo sapien
tgacagcaccccagcaatgaagagg

SEQ ID NO: 4995031 - DNA, 25 bp, Homo sapien
ggcaagggtgagatttccagctccc

SEQ ID NO: 4995032 - DNA, 25 bp, Homo sapien
gatggatgaaagtcctagctacctt

SEQ ID NO: 4995033 - DNA, 25 bp, Homo sapien
taggcttcccactcagatctaggtg

SEQ ID NO: 4995034 - DNA, 25 bp, Homo sapien
gctatttttcacatagggtagtaca

SEQ ID NO: 4995035 - DNA, 25 bp, Homo sapien
catatctattgctaacactctacca

SEQ ID NO: 4995036 - DNA, 25 bp, Homo sapien
tatttaagaacactcaattagggct

SEQ ID NO: 4995037 - DNA, 25 bp, Homo sapien
cactctaatccaagtgacagctatt

SEQ ID NO: 4995038 - DNA, 25 bp, Homo sapien
cttttgcccatcagcttatccttgc

SEQ ID NO: 4995039 - DNA, 25 bp, Homo sapien
acttttgcccatcagcttatccttg

SEQ ID NO: 4995040 - DNA, 25 bp, Homo sapien
acggagcccgcggcatctgccacag

SEQ ID NO: 4995041 - DNA, 25 bp, Homo sapien
cactgccaagttctgggcaccaagt

SEQ ID NO: 4995042 - DNA, 25 bp, Homo sapien
gcactgccaagttctgggcaccaag

SEQ ID NO: 4995043 - DNA, 25 bp, Homo sapien
tcagcactgccaagttctgggcacc

SEQ ID NO: 4995044 - DNA, 25 bp, Homo sapien
aatccaggagagcaggatagattcc

SEQ ID NO: 4995045 - DNA, 25 bp, Homo sapien
acaaatccaggagagcaggatagat

SEQ ID NO: 4995046 - DNA, 25 bp, Homo sapien
caggcagcaatatgtccttgtggag

SEQ ID NO: 4995047 - DNA, 25 bp, Homo sapien
tccaggagagcaggatagattccat

SEQ ID NO: 4995048 - DNA, 25 bp, Homo sapien
ggcagacaacctggtaccagtaatt

SEQ ID NO: 4995049 - DNA, 25 bp, Homo sapien
tggtgtaaaaaacaacgcaattggc

SEQ ID NO: 4995050 - DNA, 25 bp, Homo sapien
tgtcttggtcccgttcttattccac

SEQ ID NO: 4995051 - DNA, 25 bp, Homo sapien
cgcaattggcagtgcattctccaag

SEQ ID NO: 4995052 - DNA, 25 bp, Homo sapien
taggatgtaaataggcctctcaggc

SEQ ID NO: 4995053 - DNA, 25 bp, Homo sapien
tctcaggccatcaagatttgtctgt

SEQ ID NO: 4995054 - DNA, 25 bp, Homo sapien
gttacaatttcagatcccttttgca

SEQ ID NO: 4995055 - DNA, 25 bp, Homo sapien
tcacatccactgagccatcttttgg

SEQ ID NO: 4995056 - DNA, 25 bp, Homo sapien
tttgatacatttgtcgaattggtga

SEQ ID NO: 4995057 - DNA, 25 bp, Homo sapien
catttgtcgaattggtgagtggcca

SEQ ID NO: 4995058 - DNA, 25 bp, Homo sapien
gatacatttgtcgaattggtgagtg

SEQ ID NO: 4995059 - DNA, 25 bp, Homo sapien
tacatttgtcgaattggtgagtggc

SEQ ID NO: 4995060 - DNA, 25 bp, Homo sapien
tcaacatttctactgagtggcgaga

SEQ ID NO: 4995061 - DNA, 25 bp, Homo sapien
gatactaccctacaagctgacgttg

SEQ ID NO: 4995062 - DNA, 25 bp, Homo sapien
aatagctcggtgtttcaaagcagcc

SEQ ID NO: 4995063 - DNA, 25 bp, Homo sapien
gataatgcaaatggaccaaagcgcc

SEQ ID NO: 4995064 - DNA, 25 bp, Homo sapien
taaactgtctttaccacatcacatg

SEQ ID NO: 4995065 - DNA, 25 bp, Homo sapien
gtctttaccacatcacatgttccca

SEQ ID NO: 4995066 - DNA, 25 bp, Homo sapien
accattctataccaatgttccctga

SEQ ID NO: 4995067 - DNA, 25 bp, Homo sapien
ctataccaatgttccctgagagtta

SEQ ID NO: 4995068 - DNA, 25 bp, Homo sapien
gcaaatcatgaaggcctagaatcag

SEQ ID NO: 4995069 - DNA, 25 bp, Homo sapien
agagttgcaatactccaggtggcaa

SEQ ID NO: 4995070 - DNA, 25 bp, Homo sapien
tagaagagttgcaatactccaggtg

SEQ ID NO: 4995071 - DNA, 25 bp, Homo sapien
ttatagcaacaatgggtgctgatgg

SEQ ID NO: 4995072 - DNA, 25 bp, Homo sapien
tccatgaacagtgcatcttccctca

SEQ ID NO: 4995073 - DNA, 25 bp, Homo sapien
tctccatgaacagtgcatcttccct

SEQ ID NO: 4995074 - DNA, 25 bp, Homo sapien
ctccatgaacagtgcatcttccctc

SEQ ID NO: 4995075 - DNA, 25 bp, Homo sapien
ggcatatttgaataatcaactgggc

SEQ ID NO: 4995076 - DNA, 25 bp, Homo sapien
tcatctatgaggaaggcaatataaa

SEQ ID NO: 4995077 - DNA, 25 bp, Homo sapien
gaaaaatcagttgtagacattgaac

SEQ ID NO: 4995078 - DNA, 25 bp, Homo sapien
gagtcccacatttgctggaataagg

SEQ ID NO: 4995079 - DNA, 25 bp, Homo sapien
taaagaccacatgcctttaggcaga

SEQ ID NO: 4995080 - DNA, 25 bp, Homo sapien
tatttatgcccaatgtctgccagaa

SEQ ID NO: 4995081 - DNA, 25 bp, Homo sapien
tcttcttagggttgataaagaccac

SEQ ID NO: 4995082 - DNA, 25 bp, Homo sapien
aaggccaccctaggctattttacag

SEQ ID NO: 4995083 - DNA, 25 bp, Homo sapien
agatgagcttcacatcatcatgtgc

SEQ ID NO: 4995084 - DNA, 25 bp, Homo sapien
ctagatgagcttcacatcatcatgt

SEQ ID NO: 4995085 - DNA, 25 bp, Homo sapien
tagatgagcttcacatcatcatgtg

SEQ ID NO: 4995086 - DNA, 25 bp, Homo sapien
gaaaaatcgactgaaaatctgcact

SEQ ID NO: 4995087 - DNA, 25 bp, Homo sapien
tgaaaatctgcacttctatgggatg

SEQ ID NO: 4995088 - DNA, 25 bp, Homo sapien
tctatgggatgtttaacaaatcgaa

SEQ ID NO: 4995089 - DNA, 25 bp, Homo sapien
tagagaaaaatcgactgaaaatctg

SEQ ID NO: 4995090 - DNA, 25 bp, Homo sapien
gcccaaagagattaaccacctgcat

SEQ ID NO: 4995091 - DNA, 25 bp, Homo sapien
aatggccagcggcttcacgcataac

SEQ ID NO: 4995092 - DNA, 25 bp, Homo sapien
gaaaaattcgcaaggacagtcacac

SEQ ID NO: 4995093 - DNA, 25 bp, Homo sapien
catctgtcatcaactgggttccctg

SEQ ID NO: 4995094 - DNA, 25 bp, Homo sapien
gccccttggcattgtttattccttg

SEQ ID NO: 4995095 - DNA, 25 bp, Homo sapien
tgaactaacacttctcggtagatgg

SEQ ID NO: 4995096 - DNA, 25 bp, Homo sapien
ctcggtagatggctttaactactct

SEQ ID NO: 4995097 - DNA, 25 bp, Homo sapien
tactcttcgaatgccacgtgtggag

SEQ ID NO: 4995098 - DNA, 25 bp, Homo sapien
ttccaactgaactaacacttctcgg

SEQ ID NO: 4995099 - DNA, 25 bp, Homo sapien
acttttcaatgttgatgcatatttt

SEQ ID NO: 4995100 - DNA, 25 bp, Homo sapien
gcatatttttcttgtgatgccacat

SEQ ID NO: 4995101 - DNA, 25 bp, Homo sapien
tgcatatttttcttgtgatgccaca

SEQ ID NO: 4995102 - DNA, 25 bp, Homo sapien
ttttggccaaatgcaacagtagttc

SEQ ID NO: 4995103 - DNA, 25 bp, Homo sapien
aacagtagttctcccttgaagacag

SEQ ID NO: 4995104 - DNA, 25 bp, Homo sapien
gcaacagtagttctcccttgaagac

SEQ ID NO: 4995105 - DNA, 25 bp, Homo sapien
atttttggccaaatgcaacagtagt

SEQ ID NO: 4995106 - DNA, 25 bp, Homo sapien
aatagaatccaagagcctgactagg

SEQ ID NO: 4995107 - DNA, 25 bp, Homo sapien
gtgttggaacctatcatcagtgctc

SEQ ID NO: 4995108 - DNA, 25 bp, Homo sapien
aaaacacgaaagacatgaggagcac

SEQ ID NO: 4995109 - DNA, 25 bp, Homo sapien
ccttctggaatatcacgagtaaaat

SEQ ID NO: 4995110 - DNA, 25 bp, Homo sapien
tgtcacattgaggataacaaacctg

SEQ ID NO: 4995111 - DNA, 25 bp, Homo sapien
ggataacaaacctgaaccatgggca

SEQ ID NO: 4995112 - DNA, 25 bp, Homo sapien
cctggaccaccatgaatggcaacat

SEQ ID NO: 4995113 - DNA, 25 bp, Homo sapien
gacatgactatgcatttaaggatgc

SEQ ID NO: 4995114 - DNA, 25 bp, Homo sapien
cccacagcccacttcttaatatgtg

SEQ ID NO: 4995115 - DNA, 25 bp, Homo sapien
cagcccacttcttaatatgtggaga

SEQ ID NO: 4995116 - DNA, 25 bp, Homo sapien
cacttcttaatatgtggagaataac

SEQ ID NO: 4995117 - DNA, 25 bp, Homo sapien
tcttaatatgtggagaataacgcat

SEQ ID NO: 4995118 - DNA, 25 bp, Homo sapien
tggaaattctgttagtatcagcacc

SEQ ID NO: 4995119 - DNA, 25 bp, Homo sapien
aaaatatatctgtcttgccgtctgc

SEQ ID NO: 4995120 - DNA, 25 bp, Homo sapien
gctgtgattgggcactggaaattct

SEQ ID NO: 4995121 - DNA, 25 bp, Homo sapien
tttctcagaggataagccagctgtg

SEQ ID NO: 4995122 - DNA, 25 bp, Homo sapien
cttgttctagctctcctagtttttg

SEQ ID NO: 4995123 - DNA, 25 bp, Homo sapien
ttgttctagctctcctagtttttgg

SEQ ID NO: 4995124 - DNA, 25 bp, Homo sapien
tgttctagctctcctagtttttggg

SEQ ID NO: 4995125 - DNA, 25 bp, Homo sapien
ccttgttctagctctcctagttttt

SEQ ID NO: 4995126 - DNA, 25 bp, Homo sapien
ttcccagccgtttgccgagtcacat

SEQ ID NO: 4995127 - DNA, 25 bp, Homo sapien
cactccacgctattccaatctgttg

SEQ ID NO: 4995128 - DNA, 25 bp, Homo sapien
gagtcacattctctactaccctttc

SEQ ID NO: 4995129 - DNA, 25 bp, Homo sapien
tgcagctttagcagtaaggtgccag

SEQ ID NO: 4995130 - DNA, 25 bp, Homo sapien
tgaatttttgcacaatcaaccatca

SEQ ID NO: 4995131 - DNA, 25 bp, Homo sapien
gaatttttgcacaatcaaccatcaa

SEQ ID NO: 4995132 - DNA, 25 bp, Homo sapien
tggcaccactctcttgaagcaaagg

SEQ ID NO: 4995133 - DNA, 25 bp, Homo sapien
gatgttgaggactttgtaacaaagc

SEQ ID NO: 4995134 - DNA, 25 bp, Homo sapien
cagcccacttgatgttgaggacttt

SEQ ID NO: 4995135 - DNA, 25 bp, Homo sapien
gaagcaaagggacattcagattatt

SEQ ID NO: 4995136 - DNA, 25 bp, Homo sapien
ttgttccagagcacgctcagaggct

SEQ ID NO: 4995137 - DNA, 25 bp, Homo sapien
cagctgagctgactgaagtgatgtc

SEQ ID NO: 4995138 - DNA, 25 bp, Homo sapien
gaggctgcatgagtcttcttaaggt

SEQ ID NO: 4995139 - DNA, 25 bp, Homo sapien
tttgctgatggaatggtttgttcca

SEQ ID NO: 4995140 - DNA, 25 bp, Homo sapien
tgcaactggccatctggcacaaaat

SEQ ID NO: 4995141 - DNA, 25 bp, Homo sapien
tcaaccgaatgtatccctgcatatt

SEQ ID NO: 4995142 - DNA, 25 bp, Homo sapien
tctggcacaaaatcaaccgaatgta

SEQ ID NO: 4995143 - DNA, 25 bp, Homo sapien
tgtatccctgcatattcatcttcat

SEQ ID NO: 4995144 - DNA, 25 bp, Homo sapien
cactgatgtgcaagtttccgcatgg

SEQ ID NO: 4995145 - DNA, 25 bp, Homo sapien
tgtccactgatgtgcaagtttccgc

SEQ ID NO: 4995146 - DNA, 25 bp, Homo sapien
tggcatgtccactgatgtgcaagtt

SEQ ID NO: 4995147 - DNA, 25 bp, Homo sapien
atgtgcaagtttccgcatgggaagc

SEQ ID NO: 4995148 - DNA, 25 bp, Homo sapien
cattacaccactcatcataacatat

SEQ ID NO: 4995149 - DNA, 25 bp, Homo sapien
aatcactgtttccaggcacccttgc

SEQ ID NO: 4995150 - DNA, 25 bp, Homo sapien
atcactgtttccaggcacccttgct

SEQ ID NO: 4995151 - DNA, 25 bp, Homo sapien
ttttaagtatacctccattacacca

SEQ ID NO: 4995152 - DNA, 25 bp, Homo sapien
gataagacttctaatttatcatcag

SEQ ID NO: 4995153 - DNA, 25 bp, Homo sapien
ttgtggtgataagacttctaattta

SEQ ID NO: 4995154 - DNA, 25 bp, Homo sapien
gactctggagagaatgggcttaaga

SEQ ID NO: 4995155 - DNA, 25 bp, Homo sapien
ttaagagcaaaatttctcaatggtg

SEQ ID NO: 4995156 - DNA, 25 bp, Homo sapien
gataaagactatctgaattaggggc

SEQ ID NO: 4995157 - DNA, 25 bp, Homo sapien
agataaagactatctgaattagggg

SEQ ID NO: 4995158 - DNA, 25 bp, Homo sapien
ataaagactatctgaattaggggca

SEQ ID NO: 4995159 - DNA, 25 bp, Homo sapien
tgtctgcttgattggcagtatctgg

SEQ ID NO: 4995160 - DNA, 25 bp, Homo sapien
ggttccttctgtgctcctacacctg

SEQ ID NO: 4995161 - DNA, 25 bp, Homo sapien
tatctggtggactcctgtatagcca

SEQ ID NO: 4995162 - DNA, 25 bp, Homo sapien
taatcacccatctcagttggttcct

SEQ ID NO: 4995163 - DNA, 25 bp, Homo sapien
cagggaaatatatggtaattcttca

SEQ ID NO: 4995164 - DNA, 25 bp, Homo sapien
agggaaatatatggtaattcttcac

SEQ ID NO: 4995165 - DNA, 25 bp, Homo sapien
gcaagaacccttgagctctgcaaaa

SEQ ID NO: 4995166 - DNA, 25 bp, Homo sapien
taaacatcagccattacaaaagagc

SEQ ID NO: 4995167 - DNA, 25 bp, Homo sapien
tctgaaacagtagagctctccatag

SEQ ID NO: 4995168 - DNA, 25 bp, Homo sapien
taactgctgcctccgttacttgtaa

SEQ ID NO: 4995169 - DNA, 25 bp, Homo sapien
gaataatagaggatggccggtgacc

SEQ ID NO: 4995170 - DNA, 25 bp, Homo sapien
gcatttagggaaacaccgacctcca

SEQ ID NO: 4995171 - DNA, 25 bp, Homo sapien
caaataaactttggccactggagga

SEQ ID NO: 4995172 - DNA, 25 bp, Homo sapien
tggaggaaagtaccccatggttgct

SEQ ID NO: 4995173 - DNA, 25 bp, Homo sapien
gagcggacccacagcttctgaggaa

SEQ ID NO: 4995174 - DNA, 25 bp, Homo sapien
tctgcggcccgagacttacttctgc

SEQ ID NO: 4995175 - DNA, 25 bp, Homo sapien
aaacagctgcctcgggcctaagggt

SEQ ID NO: 4995176 - DNA, 25 bp, Homo sapien
caacgcatgcaagcgtgggtcgcca

SEQ ID NO: 4995177 - DNA, 25 bp, Homo sapien
gatcgaaagcgaaaagtgtccggaa

SEQ ID NO: 4995178 - DNA, 25 bp, Homo sapien
cattttcataagttccaggcctgag

SEQ ID NO: 4995179 - DNA, 25 bp, Homo sapien
aacctggcgctagaaaggaatcacc

SEQ ID NO: 4995180 - DNA, 25 bp, Homo sapien
tattggacccgattctgtgatcccc

SEQ ID NO: 4995181 - DNA, 25 bp, Homo sapien
ggcctccccaccaacaaggctgaaa

SEQ ID NO: 4995182 - DNA, 25 bp, Homo sapien
gaggcctccactcggaataagccgc

SEQ ID NO: 4995183 - DNA, 25 bp, Homo sapien
attcgtgggaaacgcgcccaccgct

SEQ ID NO: 4995184 - DNA, 25 bp, Homo sapien
gagggagcggcccattcgtgggaaa

SEQ ID NO: 4995185 - DNA, 25 bp, Homo sapien
gatgaggcaaagctagcattgccag

SEQ ID NO: 4995186 - DNA, 25 bp, Homo sapien
aagatgaggcaaagctagcattgcc

SEQ ID NO: 4995187 - DNA, 25 bp, Homo sapien
agatgaggcaaagctagcattgcca

SEQ ID NO: 4995188 - DNA, 25 bp, Homo sapien
tgaggcaaagctagcattgccagag

SEQ ID NO: 4995189 - DNA, 25 bp, Homo sapien
atctttagcagtcccgcatcccagg

SEQ ID NO: 4995190 - DNA, 25 bp, Homo sapien
gtgcgcacagcgtgactttgcctcc

SEQ ID NO: 4995191 - DNA, 25 bp, Homo sapien
ccagtgcgcacagcgtgactttgcc

SEQ ID NO: 4995192 - DNA, 25 bp, Homo sapien
caggctcagcaagtcgttgacgatc

SEQ ID NO: 4995193 - DNA, 25 bp, Homo sapien
caccgcacggactgcgacgcggatt

SEQ ID NO: 4995194 - DNA, 25 bp, Homo sapien
ccgcacggactgcgacgcggattac

SEQ ID NO: 4995195 - DNA, 25 bp, Homo sapien
accgcacggactgcgacgcggatta

SEQ ID NO: 4995196 - DNA, 25 bp, Homo sapien
ccgagcgcacgccggctgtaagtac

SEQ ID NO: 4995197 - DNA, 25 bp, Homo sapien
cacttttcgcacgtgagcgggagaa

SEQ ID NO: 4995198 - DNA, 25 bp, Homo sapien
cctggttgactttgatgcggtgact

SEQ ID NO: 4995199 - DNA, 25 bp, Homo sapien
gctgggagtgttcgctttgtgaatc

SEQ ID NO: 4995200 - DNA, 25 bp, Homo sapien
tgtgggcgtgcagaacacgatcctg

SEQ ID NO: 4995201 - DNA, 25 bp, Homo sapien
ccttggttttcaggacttattcttg

SEQ ID NO: 4995202 - DNA, 25 bp, Homo sapien
cttattcttgccggggttggctcgc

SEQ ID NO: 4995203 - DNA, 25 bp, Homo sapien
cttgccggggttggctcgcacgcca

SEQ ID NO: 4995204 - DNA, 25 bp, Homo sapien
ccggggttggctcgcacgccagcat

SEQ ID NO: 4995205 - DNA, 25 bp, Homo sapien
gagaggctggaagctcgacgtctta

SEQ ID NO: 4995206 - DNA, 25 bp, Homo sapien
tgttacttggccaaccgagtgtgag

SEQ ID NO: 4995207 - DNA, 25 bp, Homo sapien
ttaagaggcggtccctcagctggag

SEQ ID NO: 4995208 - DNA, 25 bp, Homo sapien
tgcttgcgcacataattaagaggcg

SEQ ID NO: 4995209 - DNA, 25 bp, Homo sapien
tcttctttcctctgcgaacgcgctg

SEQ ID NO: 4995210 - DNA, 25 bp, Homo sapien
cttataccacggaaggctctcagcc

SEQ ID NO: 4995211 - DNA, 25 bp, Homo sapien
gaacgcgctgagcagcgattgaaaa

SEQ ID NO: 4995212 - DNA, 25 bp, Homo sapien
gcagcgattgaaaacgttttggtcc

SEQ ID NO: 4995213 - DNA, 25 bp, Homo sapien
tgcggactcgttttcactgctccag

SEQ ID NO: 4995214 - DNA, 25 bp, Homo sapien
cagacctgcgcttacagtcatcgcg

SEQ ID NO: 4995215 - DNA, 25 bp, Homo sapien
cctttcctcggactctggagcggga

SEQ ID NO: 4995216 - DNA, 25 bp, Homo sapien
gaaatcgtttctctggacgcggcag

SEQ ID NO: 4995217 - DNA, 25 bp, Homo sapien
acccaggccgaaaaagcgagccttg

SEQ ID NO: 4995218 - DNA, 25 bp, Homo sapien
caggccgaaaaagcgagccttgatg

SEQ ID NO: 4995219 - DNA, 25 bp, Homo sapien
ggccgaaaaagcgagccttgatgtc

SEQ ID NO: 4995220 - DNA, 25 bp, Homo sapien
ccgaaaaagcgagccttgatgtctt

SEQ ID NO: 4995221 - DNA, 25 bp, Homo sapien
caaagggacgtgcaatggactcaag

SEQ ID NO: 4995222 - DNA, 25 bp, Homo sapien
tgggcctcgaggcttaactaggaag

SEQ ID NO: 4995223 - DNA, 25 bp, Homo sapien
ggtcaccaaagggacgtgcaatgga

SEQ ID NO: 4995224 - DNA, 25 bp, Homo sapien
caatggactcaagtgtgggcctcga

SEQ ID NO: 4995225 - DNA, 25 bp, Homo sapien
agaccgctctgctgcgcaggagcct

SEQ ID NO: 4995226 - DNA, 25 bp, Homo sapien
ttgcagcccggcagccttagtagac

SEQ ID NO: 4995227 - DNA, 25 bp, Homo sapien
cagccttagtagacgggtacagagg

SEQ ID NO: 4995228 - DNA, 25 bp, Homo sapien
tgcagaccgctctgctgcgcaggag

SEQ ID NO: 4995229 - DNA, 25 bp, Homo sapien
actgcggaaaaaccgacctcagcca

SEQ ID NO: 4995230 - DNA, 25 bp, Homo sapien
gcctgaaacccgcactgcggaaaaa

SEQ ID NO: 4995231 - DNA, 25 bp, Homo sapien
gcggaaaaaccgacctcagccacat

SEQ ID NO: 4995232 - DNA, 25 bp, Homo sapien
aggaggcctgaaacccgcactgcgg

SEQ ID NO: 4995233 - DNA, 25 bp, Homo sapien
taggaacagcttgacccgttgagat

SEQ ID NO: 4995234 - DNA, 25 bp, Homo sapien
caacccgggcttcgcaatgggagaa

SEQ ID NO: 4995235 - DNA, 25 bp, Homo sapien
gaaagaaattctatgcgcggcagtt

SEQ ID NO: 4995236 - DNA, 25 bp, Homo sapien
tagaattcatactacctcagaggag

SEQ ID NO: 4995237 - DNA, 25 bp, Homo sapien
tgctgctgggccaatacttcaggac

SEQ ID NO: 4995238 - DNA, 25 bp, Homo sapien
cattcaggtgggtcacaaagagaca

SEQ ID NO: 4995239 - DNA, 25 bp, Homo sapien
tatactggttatcggctgctgctgg

SEQ ID NO: 4995240 - DNA, 25 bp, Homo sapien
gagtgcatccaagctatgctgaaga

SEQ ID NO: 4995241 - DNA, 25 bp, Homo sapien
tccattgctcctttgtggatcagtt

SEQ ID NO: 4995242 - DNA, 25 bp, Homo sapien
tggatcagtttagtgctgaaaagaa

SEQ ID NO: 4995243 - DNA, 25 bp, Homo sapien
atagttttccattgctcctttgtgg

SEQ ID NO: 4995244 - DNA, 25 bp, Homo sapien
tcagccataggcatagttttccatt

SEQ ID NO: 4995245 - DNA, 25 bp, Homo sapien
cttgaatgaatccagtaaccaggca

SEQ ID NO: 4995246 - DNA, 25 bp, Homo sapien
tagctctctataactcagattggga

SEQ ID NO: 4995247 - DNA, 25 bp, Homo sapien
gaaaggcttatctctttaggttgag

SEQ ID NO: 4995248 - DNA, 25 bp, Homo sapien
gggatgtggaactacattttctcac

SEQ ID NO: 4995249 - DNA, 25 bp, Homo sapien
tcagacagagatgtctaaggtcctc

SEQ ID NO: 4995250 - DNA, 25 bp, Homo sapien
gcataactgctcctttcttgttgga

SEQ ID NO: 4995251 - DNA, 25 bp, Homo sapien
gtgactggtagcagttactcatcag

SEQ ID NO: 4995252 - DNA, 25 bp, Homo sapien
cagttactcatcagacagagatgtc

SEQ ID NO: 4995253 - DNA, 25 bp, Homo sapien
gctcagcaatggttaggcttttgtc

SEQ ID NO: 4995254 - DNA, 25 bp, Homo sapien
ttgtcttttaggctccagttctgcc

SEQ ID NO: 4995255 - DNA, 25 bp, Homo sapien
cagttctgcccttggtctaagagca

SEQ ID NO: 4995256 - DNA, 25 bp, Homo sapien
ccttggtctaagagcaggctgctca

SEQ ID NO: 4995257 - DNA, 25 bp, Homo sapien
gaagctgttctcagttaagcgggaa

SEQ ID NO: 4995258 - DNA, 25 bp, Homo sapien
tgaagctgttctcagttaagcggga

SEQ ID NO: 4995259 - DNA, 25 bp, Homo sapien
gttctcagttaagcgggaatcaggc

SEQ ID NO: 4995260 - DNA, 25 bp, Homo sapien
gctgttctcagttaagcgggaatca

SEQ ID NO: 4995261 - DNA, 25 bp, Homo sapien
cacagtctgcttggttagccgtaag

SEQ ID NO: 4995262 - DNA, 25 bp, Homo sapien
tgaccccaaatcagcacagtctgct

SEQ ID NO: 4995263 - DNA, 25 bp, Homo sapien
ccttgtattagtgttgaccccaaat

SEQ ID NO: 4995264 - DNA, 25 bp, Homo sapien
agttttttcatccatagtttgctac

SEQ ID NO: 4995265 - DNA, 25 bp, Homo sapien
caggatcacaccacggcagtctttt

SEQ ID NO: 4995266 - DNA, 25 bp, Homo sapien
tgccgcaggatcacaccacggcagt

SEQ ID NO: 4995267 - DNA, 25 bp, Homo sapien
cacggcagtcttttccgggtatcag

SEQ ID NO: 4995268 - DNA, 25 bp, Homo sapien
cggcagtcttttccgggtatcaggt

SEQ ID NO: 4995269 - DNA, 25 bp, Homo sapien
ctaaaggaaacggagtgcaagtgcc

SEQ ID NO: 4995270 - DNA, 25 bp, Homo sapien
aaaggaaacggagtgcaagtgccac

SEQ ID NO: 4995271 - DNA, 25 bp, Homo sapien
taaaggaaacggagtgcaagtgcca

SEQ ID NO: 4995272 - DNA, 25 bp, Homo sapien
agccgtcgctgtccagcaggaaagg

SEQ ID NO: 4995273 - DNA, 25 bp, Homo sapien
cagagaagccgtcgctgtccagcag

SEQ ID NO: 4995274 - DNA, 25 bp, Homo sapien
acagcagagaagccgtcgctgtcca

SEQ ID NO: 4995275 - DNA, 25 bp, Homo sapien
agaagccgtcgctgtccagcaggaa

SEQ ID NO: 4995276 - DNA, 25 bp, Homo sapien
ggagtcgtagtggatacttgtgatc

SEQ ID NO: 4995277 - DNA, 25 bp, Homo sapien
agtcgtagtggatacttgtgatcat

SEQ ID NO: 4995278 - DNA, 25 bp, Homo sapien
gagtcgtagtggatacttgtgatca
